United States Patent Application Publication US 2025/0320254 A1 - sequence listing, part 12

SEQ ID NO: 60378 - protein, 669 aa, Homo sapiens
IYPQSASYPNSDREWSPTPSPSGSRPSTPKSDSELVSKSTERTGQKNPEMLWLWGELPQAAKSSSPHKMKESSPLSSRKICDKSHFQAIHSESSDTFSDQSPTLVGGALLDQNKPQTEMQFVNEEDLETLGAAAPLLPMIEELKPPSASVVQTANKTDSPSRKRDKRSRHLGADGVYLDDLTDMDPEVAALYFPKNGDPSGLAKHASDNGARSANQSPQSVGSSGVDSGVESTSDGLRDLPSIAISLCGGLSDHREITKDAFLEQAVSYQQFVDNPAIIDDPNLVVKIGSKYYNWTTAAPLLLAMQAFQKPLPKATVESIMRDKMPKKGGRWWFSWRGRNTTIKEESKPEQCLAGKAHSTGEQPPQLSLATRVKHESSSSDEERAAAKPSNAGHLPLLPNVSYKKTLRLTSEQLKSLKLKNGPNDVVFSVTTQYQGTCRCEGTIYLWNWDDKVIISDIDGTITRSDTLGHILPTLGKDWTHQGIAKLYHKVSQNGYKFLYCSARAIGMADMTRGYLHWVNERGTVLPQGPLLLSPSSLFSALHREVIEKKPEKFKVQCLTDIKNLFFPNTEPFYAAFGNRPADVYSYKQVGVSLNRIFTVNPKGELVQEHAKTNISSYVRLCEVVDHVFPLLKRSHSSDFPCSDTFSNFTFWREPLPPFENQDIHSASA

SEQ ID NO: 60379 - protein, 16 aa, Homo sapiens
LLSCMLSEARRDPGES

SEQ ID NO: 60380 - protein, 195 aa, Homo sapiens
IKLWKNGFTVNDDFRSYSDGASQQFLNSIKKGELPSELQGIFDKEEVDVKVEDKKNEICLSTKPVFQPFSGQGHRLGSATPKIVSKAKNIEVENKNNLSAVPLNNLEPITNIQIWLANGKRIVQKFNITHRVSHIKDFIEKYQGSQRSPPFSLATALPVLRLLDETLTLEEADLQNAVIIQRLQKTASFRELSEH

SEQ ID NO: 60381 - protein, 10 aa, Homo sapiens
VAHKLFNNLK

SEQ ID NO: 60382 - protein, 51 aa, Homo sapiens
KPPDKPLMCYMRYSRKVWDQVKASNPDLKLWEIGKLIDGMWGDLTDEEKQE

SEQ ID NO: 60383 - protein, 368 aa, Homo sapiens
KYSAVDTNPLSLYVMHPFWNTIVKVFPTWLAPNLITFSGFLLVVFNFLLMAYFDPDFYASAPGHKHVPDWVWIVVGILNFVAYTLDGVDGKQARRTNSSTPLGELFDHGLDSWSCVYFVVTVYSIFGRGSTGVSVFVLYLLLWVVLFSFILSHWEKYNTGILFLPWGYDISQVTISFVYIVTAVVGVEAWYEPFLFNFLYRDLFTAMIIGCALCVTLPMSLLNFFRSYKNNTLKLNSVYEAMVPLFSPCLLFILSTAWILWSPSDILELHPRVFYFMVGTAFANSTCQLIVCQMSSTRCPTLNWLLVPLFLVVLVVNLGVASYVESILLYTLTTAFTLAHIHYGVRVVKQLSSHFQIYPFSLRKPNSD

SEQ ID NO: 60384 - protein, 254 aa, Homo sapiens
LHLNYTKIEQLCSGAAYCQFMDMLFPGCVHLRKVKFQAKLEHEYIHNFKVLQAAFKKMGVDKIIPVEKLVKGKFQDNFEFIQWFKKFFDANYDGKDYNPLLARQGQDVAPPPNPGDQIFNKSKKLIGTAVPQRTSPTGPKNMQTSGRLSNVAPPCILRKNPPSARNGGHETDAQILELNQQLVDLKLTVDGLEKERDFYFSKLRDIELICQEHESENSPVISGIIGILYATEEGFAPPEDDEIEEHQQEDQDEY

SEQ ID NO: 60385 - protein, 657 aa, Homo sapiens
RNRRALGEANGVWKYDLTPAIQTTSTLYERGFENIMKRQNKEQVPPPAVEPKKPGNKKQPKKVATPPNQNQKQGRFRSLEEALKALDVADLQKELDKSQSVFSGNPSIWLKDLASYLNYKLQAPLSEPTLSQHTHDYPYSLVSRELRGIIRGLLAKAAGSLELFFDHCLFTMLQELDKTPGESLHGYRICIQAILQDKPKIATANLGKFLELLRSHQSRPAKCLTIMWALGQAGFANLTEGLKVWLGIMLPVLGIKSLSPFAITYLDRLLLMHPNLTKGFGMIGPKDFFPLLDFAYMPNNSLTPSLQEQLCQLYPRLKVLAFGAKPDSTLHTYFPSFLSRATPSCPPEMKKELLSSLTECLTVDPLSASVWRQLYPKHLSQSSLLLEHLLSSWEQIPKKVQKSLQETIQSLKLTNQELLRKGSSNNQDVVTCDMACKGLLQQVQGPRLPWTRLLLLLLVFAVGFLCHDLRSHSSFQASLTGRLLRSSGFLPASQQACAKLYSYSLQGYSWLGETLPLWGSHLLTVVRPSLQLAWAHTNATVSFLSAHCASHLAWFGDSLTSLSQRLQIQLPDSVNQLLRYLRELPLLFHQNVLLPLWHLLLEALAWAQEHCHEACRGEVTWDCMKTQLSEAVHWTWLCLQDITVAFLDWALALISQQ

SEQ ID NO: 60386 - protein, 446 aa, Homo sapiens
IHVNGVLHCRVRYSQLLGLHEQLRKEYGANVLPAFPPKKLFSLTPAEVEQRREQLEKYMQAVRQDPLLGSSETFNSFLRRAQQETQQVPTEEVSLEVLLSNGQKVLVNVLTSDQTEDVLEAVAAKLDLPDDLIGYFSLFLVREKEDGAFSFVRKLQEFELPYVSVTSLRSQEYKIVLRKSYWDSAYDDDVMENRVGLNLLYAQTVSDIERGWILVTKEQHRQLKSLQEKVSKKEFLRLAQTLRHYGYLRFDACVADFPEKDCPVVVSAGNSELSLQLRLPGQQLREGSFRVTRMRCWRVTSSVPLPSGSTSSPGRGRGEVRLELAFEYLMSKDRLQWVTITSPQAIMMSICLQSMVDELMVKKSGGSIRKMLRRRVGGTLRRSDSQQAVKSPPLLESPDATRESMVKLSSKLSAVSLRGIGSPSTDASASDVHGNFAFEGIGDEDL

SEQ ID NO: 60387 - protein, 346 aa, Homo sapiens
LMFVNPSWYRWINNRLVATWLTLPVALLETMFGVKVIITGDAFVPGERSVIIMNHRTRMDWMFLWNCLMRYSYLRLEKICLKASLKGVPGFGWAMQAAAYIFIHRKWKDDKSHFEDMIDYFCDIHEPLQLLIFPEGTDLTENSKSRSNAFAEKNGLQKYEYVLHPRTTGFTFVVDRLREGKNLDAVHDITVAYPHNIPQSEKHLLQGDFPREIHFHVHRYPIDTLPTSKEDLQLWCHKRWEEKEERLRSFYQGEKNFYFTGQSVIPPCKSELRVLVVKLLSILYWTLFSPAMCLLIYLYSLVKWYFIITIVIFVLQERIFGGLEIIELACYRLLHKQPHLNSKKNE

SEQ ID NO: 60388 - protein, 166 aa, Homo sapiens
KNLDAVHDITVAYPHNIPQSEKHLLQGDFPREIHFHVHRYPIDTLPTSKEDLQLWCHKRWEEKEERLRSFYQGEKNFYFTGQSVIPPCKSELRVLVVKLLSILYWTLFSPAMCLLIYLYSLVKWYFIITIVIFVLQERIFGGLEIIELACYRLLHKQPHLNSKKNE

SEQ ID NO: 60389 - protein, 355 aa, Homo sapiens
VCLLVLGMAGSGKTTFVQRLTGHLHAQGTPPYVINLDPAVHEVPFPANIDIRDTVKYKEVMKQYGLGPNGGIVTSLNLFATRFDQVMKFIEKAQNMSKYVLIDTPGQIEVFTWSASGTIITEALASSFPTVVIYVMDTSRSTNPVTFMSNMLYACSILYKTKLPFIVVMNKTDIIDHSFAVEWMQDFEAFQDALNQETTYVSNLTRSMSLVLDEFYSSLRVVGVSAVLGTGLDELFVQVTSAAEEYEREYRPEYERLKKSLANAESQQQREQLERLRKDMGSVALDAGTAKDSLSPVLHPSDLILTRGTLDEEDEEADSDTDDIDHRVTEESHEEPAFQNFMQESMAQYWKRNNK

SEQ ID NO: 60390 - protein, 191 aa, Homo sapiens
LAAAKCRNRRRELTEKLQAETEELEEEKSGLQKEIAELQKEKEKLEFMLVAHGPVCKISPEERRSPPAPGLQPMRSGGGSVGAVVVKQEPLEEDSPSSSSAGLDKAQRSVIKPISIAGGFYGEEPLHTPIVVTSTPAVTPGTSNLVFTYPSVLEQESPASPSESCSKAHRRSSSSGDQSSDSLNSPTLLAL

SEQ ID NO: 60391 - protein, 613 aa, Homo sapiens
LAWAPARLQAKESPQRKKRKSEAVGMSNQTDLLALGTAVGSILLYSTVKGELHSKLISGGHDNRVNCIQWHQDSGCLYSCSDDKHIVEWNVQTCKVKCKWKGDNSSVSSLCISPDGKMLLSAGRTIKLWVLETKEVYRHFTGHATPVSSLMFTTIRPPNESQPFDGITGLYFLSGAVHDRLLNVWQVRSENKEKSAVMSFTVTDEPVYIDLTLSENKEEPVKLAVVCRDGQVHLFEHILNGYCKKPLTSNCTIQIATPGKGKKSTPKPIPILAAGFCSDKMSLLLVYGSWFQPTIERVALNSREPHMCLVRDISNCWAPKVETAITKVRTPVMNSEAKVLVPGIPGHHAAIKPAPPQTEQVESKRKSGGNEVSIEERLGAMDIDTHKKGKEDLQTNSFPVLLTQGLESNDFEMLNKVLQTRNVNLIKKTVLRMPLHTIIPLLQELTKRLQGHPNSAVLMVQWLKCVLTVHASYLSTLPDLVPQLGTLYQLMESRVKTFQKLSHLHGKLILLITQVTASEKTKGATSPGQKAKLVYEEESSEEESDDEIADKDSEDNWDEDEEESESEKDEDVEEEDEDAEGKDEENGEDRDTASEKELNGDSDLDPENESEEE

SEQ ID NO: 60392 - protein, 16 aa, Homo sapiens
IRKQRKECSDVIYSYR

SEQ ID NO: 60393 - protein, 28 aa, Homo sapiens
IADRAIPGIPWKLCCSSAHHAANSEASG

SEQ ID NO: 60394 - protein, 7 aa, Homo sapiens
LKMAACL

SEQ ID NO: 60395 - protein, 103 aa, Homo sapiens
VQTVETMNEGDHRVREKLMHLFTSGDCKAYSPEDLEERKNSLKKWLEKNHIPITEQGDAPRTLCVAGVLTIDPPYGPENCSSSNEIILSRVQDLIEGHLTASQ

SEQ ID NO: 60396 - protein, 90 aa, Homo sapiens
ITSFKEVVQRALGLAHVAIKCSKNKSSSQEAVQMLSSVRLNLRGLLSKAKQLFTDVATGEMSRELADDITAMDTLVTELQDLSNQFRNQY

SEQ ID NO: 60397 - protein, 215 aa, Homo sapiens
LPSSNKGVILIFMRTVVLTMKASVIEMFLVLLVTGVHSNKETAKKIKRPKFTVPQINCDVKAGKIIDPEFIVKCPAGCQDPKYHVYGTDVYASYSSVCGAAVHSGVLDNSGGKILVRKVAGQSGYKGSYSNGVQSLSLPRWRESFIVLESKPKKGVTYPSALTYSSSKSPAAQAGKCSRVIESKPSESMNTRRVLGDSGEINILTGQAPLALAIF

SEQ ID NO: 60398 - protein, 705 aa, Homo sapiens
LPSSNKGVILIFMRTVVLTMKASVIEMFLVLLVTGVHSNKETAKKIKRPKFTVPQINCDVKAGKIIDPEFIVKCPAGCQDPKYHVYGTDVYASYSSVCGAAVHSGVLDNSGGKILVRKVAGQSGYKGSYSNGVQSLSLPRWRESFIVLESKPKKGVTYPSALTYSSSKSPAAQAGETTKAYQRPPIPGTTAQPVTLMQLLAVTVAVATPTTLPRPSPSAASTTSIPRPQSVGHRSQEMDLWSTATYTSSQNRPRADPGIQRQDPSGAAFQKPVGADVSLGEMDSWKPGSVLLDEGLVPKEELSTQSLEPVSLGDPNCKIDLSFLIDGSTSIGKRRFRIQKQLLADVAQALDIGPAGPLMGVVQYGDNPATHFNLKTHTNSRDLKTAIEKITQRGGLSNVGRAISFVTKNFFSKANGNRSGAPNVVVVMVDGWPTDKVEEASRLARESGINIFFITIEGAAENEKQYVVEPNFANKAVCRTNGFYSLHVQSWFGLHKTLQPLVKRVCDTDRLACSKTCLNSADIGFVIDGSSSVGTGNFRTVLQFVTNLTKEFEISDTDTRIGAVQYTYEQRLEFGFDKYSSKPDILNAIKRVGYWSGGTSTGAAINFALEQLFKKSKPNKRKLMILITDGRSYDDVRIPAMAAHLKGVITYAIGVAWAAQEELEVIATHPARDHSFFVDEFDNLHQYVPRIIQNICTEFNSQPRN

SEQ ID NO: 60399 - protein, 37 aa, Homo sapiens
RSLQFTNPGRQTEFAPETGKREKRRLKKMQPLVQTDE

SEQ ID NO: 60400 - protein, 422 aa, Homo sapiens
LSRQYESLPATHIRGKCSVALLNETESVLSYLDKEDTFFYSLVYDPSLKTLLADKGEIRVGPRYQADIPEMLLEGESDEREQSKLEVKVWDPNSPLTDRQIDQFLVVARAVGTFARALDCSSSVRQPSLHMSAAAASRDITLFHAMDTLYRHSYDLSSAISVLVPLGGPVLCRDEMEEWSASEASLFEEALEKYGKDFNDIRQDFLPWKSLTSIIEYYYMWKTTDRYVQQKRLKAAEAESKLKQVYIPTYKPNPNQISTSNGKPGAVNGAVGTTFQPQNPLLGRACESCYATQSHQWYSWGPPNMQCRLCAICWLYWKKYGGLKMPTQSEEEKLSPSPTTEDPRVRSHVSRQAMQGMPVRNTGSPKSAVKTRQAFFLHTTYFTKFARQVCKNTLRLRQAARRPFVAINYAAIRAECKMLLNS

SEQ ID NO: 60401 - protein, 8 aa, Homo sapiens
RLVTTPSL

SEQ ID NO: 60402 - protein, 259 aa, Homo sapiens
LDLISIPITGDTLRTFSLVLVLDLSKPNDLWPTMENLLQATKSHVDKVIMKLGKTNAKAVSEMRQKIWNNMPKDHPQDHELIDPFPVPLVIIGSKYDVFQDFESEKRKVICKTLRFVAHYYGASLMFTSKSEALLLKIRGVINQLAFGIDKSKSICVDQNKPLFITAGLDSFGQIGSPPVPENDIGKLHAHSPMELWKKVYEKLFPPKSINTLKDIKDPARDPQYAENEVDEMRIQKDLELEQYKRSSSKSWKQIELDS

SEQ ID NO: 60403 - protein, 430 aa, Homo sapiens
LEDWSFFAVYDGHAGSRVANYCSTHLLEHITTNEDFRAAGKSGSALELSVENVKNGIRTGFLKIDEYMRNFSDLRNGMDRSGSTAVGVMISPKHIYFINCGDSRAVLYRNGQVCFSTQDHKPCNPREKERIQNAGGSVMIQRVNGSLAVSRALGDYDYKCVDGKGPTEQLVSPEPEVYEILRAEEDEFIILACDGIWDVMSNEELCEYVKSRLEVSDDLENVCNWVVDTCLHKGSRDNMSIVLVCFSNAPKVSDEAVKKDSELDKHLESRVEEIMEKSGEEGMPDLAHVMRILSAENIPNLPPGGGLAGKRNVIEAVYSRLNPHRESDGASDEAEESGSQGKLVEALRQMRINHRGNYRQLLEEMLTSYRLAKVEGEESPAEPAATATSSNSDAGNPVTMQESHTESESGLAELDSSNEDAGTKMSGEKI

SEQ ID NO: 60404 - protein, 338 aa, Homo sapiens
LEDWSFFAVYDGHAGSRVANYCSTHLLEHITTNEDFRAAGKSGSALELSVENVKNGIRTGFLKIDEYMRNFSDLRNGMDRSGSTAVGVMISPKHIYFINCGDSRAVLYRNGQVCFSTQDHKPCNPREKERIQNAGGSVMIQRVNGSLAVSRALGDYDYKCVDGKGPTEQLVSPEPEVYEILRAEEDEFIILACDGIWDVMSNEELCEYVKSRLEVSDDLENVCNWVVDTCLHKGSRDNMSIVLVCFSNAPKVSDEAVKKDSELDKHLESRVEEIMEKSGEEGMPDLAHVMRILSAENIPNLPPGGGLAGKRNVIEAVYSRLNPHRESDGGAGDLEDPW

SEQ ID NO: 60405 - skipped

SEQ ID NO: 60406 - protein, 13 aa, Homo sapiens
LQKWFLFEHSAWV

SEQ ID NO: 60407 - protein, 6 aa, Homo sapiens
IYSLGF

SEQ ID NO: 60408 - protein, 307 aa, Homo sapiens
IEHSPNKCLPVKEIYSWILDHFPYFATAPTGWKNSVRHNLSLNKCFQKVERSHGKVNGKGSLWCVDPEYKPNLIQALKKQPFSSASSQNGSLSPHYLSSVIKQNQVRNLKESDIDAAAAMMLLNTSIEQGILECEKPLPLKTALQKKRSYGNAFHHPSAVRLQESDSLATSIDPKEDHNYSASSMAAQRCASRSSVSSLSSVDEVYEFIPKNSHVGSDGSEGFHSEEDTDVDYEDDPLGDSGYASQPCAKISEKGQSGKKMRKQTCQEIDEELKEAAGSLLHLAGIRTCLGSLISTAKTQNQKQRKK

SEQ ID NO: 60409 - protein, 13 aa, Homo sapiens
LLAEKLKEEVINK

SEQ ID NO: 60410 - protein, 68 aa, Homo sapiens
IFKKSRSPSWYKYTSTVSTGITDLESSTGLWPTISQFTLSEETNADVYYYRIIIPVLLMLVFLALFFL

SEQ ID NO: 60411 - protein, 79 aa, Homo sapiens
LKDVEKFIRLESTFKDPRTAEERKRKSVDAIGGESMPIPTIDTSRKKRLPSKELPDSSSPVPANNIRVIKNSIRLTLNR

SEQ ID NO: 60412 - protein, 245 aa, Homo sapiens
RAVLDVANHFSRLKIHFTKVFSAFALVRTIRYLYRRLQRMLGLRRGSENEDLWAESEGTVACLGAEDRAATSAKSWPIFLFFAVILGGPYLIWKLLSTHSDEVTDSINWASGEDDHVVARAEYDFAAVSEEEISFRAGDMLNLALKEQQPKVRGWLLASLDGQTTGLIPANYVKILGKRKGRKTVESSKVSKQQQSFTNPTLTKGATVADSLDEQEAAFESVFVETNKVPVAPDSIGKDGEKQDL

SEQ ID NO: 60413 - protein, 494 aa, Homo sapiens
LRRQALVLLTVSGVLAGAGLGAALRGLSLSRTQVTYLAFPGEMLLRMLRMIILPLVVCSLVSGAASLDASCLGRLGGIAVAYFGLTTLSASALAVALAFIIKPGSGAQTLQSSDLGLEDSGPPPVPKETVDSFLDLARNLFPSNLVVAAFRTYATDYKVVTQNSSSGNVTHEKIPIGTEIEGMNILGLVLFALVLGVALKKLGSEGEDLIRFFNSLNEATMVLVSWIMWYVPVGIMFLVGSKIVEMKDIIVLVTSLGKYIFASILGHVIHGGIVLPLIYFVFTRKNPFRFLLGLLAPFATAFATCSSSATLPSMMKCIEENNGVDKRISRFILPIGATVNMDGAAIFQCVAAVFIAQLNNVELNAGQIFTILVTATASSVGAAGVPAGGVLTIAIILEAIGLPTHDLPLILAVDWIVDRTTTVVNVEGDALGAGILHHLNQKATKKGEQELAEVKVEAIPNCKSEEETSPLVTHQNPAGPVASAPELESKESVL

SEQ ID NO: 60414 - protein, 554 aa, Homo sapiens
IGFQWLSLATLVLICAGQGGRREDGGPACYGGFDLYFILDKSGSVLHHWNEIYYFVEQLAHKFISPQLRMSFIVFSTRGTTLMKLTEDREQIRQGLEELQKVLPGGDTYMHEGFERASEQIYYENRQGYRTASVIIALTDGELHEDLFFYSEREANRSRDLGAIVYCVGVKDFNETQLARIADSKDHVFPVNDGFQALQGIIHSILKKSCIEILAAEPSTICAGESFQVVVRGNGFRHARNVDRVLCSFKINDSVTLNEKPFSVEDTYLLCPAPILKEVGMKAALQVSMNDGLSFISSSVIITTTHCSDGSILAIALLILFLLLALALLWWFWPLCCTVIIKEVPPPPAEESEEEDDDGLPKKKWPTVDASYYGGRGVGGIKRMEVRWGEKGSTEEGAKLEKAKNARVKMPEQEYEFPEPRNLNNNMRRPSSPRKWYSPIKGKLDALWVLLRKGYDRVSVMRPQPGDTGRCINFTRVKNNQPAKYPLNNAYHTSSPPPAPIYTPPPPAPHCPPPPPSAPTPPIPSPPSTLPPPPQAPPPNRAPPPSRPPPRPSV

SEQ ID NO: 60415 - protein, 35 aa, Homo sapiens
LTCTSFWTNQEVCCTTGMKSITLWNSWLTNSSAHS

SEQ ID NO: 60416 - protein, 183 aa, Homo sapiens
KDRDALKRRNKSKKNNSSSRSTHNEMEKNRRAHLRLCLEKLKGLVPLGPESSRHTTLSLLTKAKLHIKKLEDCDRKAVHQIDQLQREQRHLKRQLEKLGIERIRMDSIGSTVSSERSDSDREEIDVDVESTDYLTGDLDWSSSSVSDSDERGSMQSLGSDEGYSSTSIKRIKLQDSHKACLGL

SEQ ID NO: 60417 - protein, 358 aa, Homo sapiens
MQPVHHLNHGPPLHSHQYPHTAHTNAMAPSMGSSVNDALKRDKDAIYGHPLFPLLALIFEKCELATCTPREPGVAGGDVCSSESFNEDIAVFAKQIRAEKPLFSSNPELDNLMIQAIQVLRFHLLELEKVHELCDNFCHRYISCLKGKMPIDLVIDDREGGSKSDSEDITRSANLTDQPSWNRDHDDTASTRSGGTPGPSSGGHTSHSGDNSSEQGDGLDNSVASPSTGDDDDPDKDKKRHKKRGIFPKVATNIMRAWLFQHLTHPYPSEEQKKQLAQDTGLTILQVNNWFINARRRIVQPMIDQSNRAVSQGTPYNPDGQPMGGFVMDGQQHMGIRAPGPMSGMGMNMGMEGQWHYM

SEQ ID NO: 60418 - protein, 9 aa, Homo sapiens
IPGRTLRRS

SEQ ID NO: 60419 - protein, 6 aa, Homo sapiens
LMWRSS

SEQ ID NO: 60420 - protein, 2112 aa, Homo sapiens
KKTFTKWVNSHLARVSCRITDLYTDLRDGRMLIKLLEVLSGERLPKPTKGRMRIHCLENVDKALQFLKEQRVHLENMGSHDIVDGNHRLTLGLIWTIILRFQIQDISVETEDNKEKKSAKDALLLWCQMKTAGYPNVNIHNFTTSWRDGMAFNALIHKHRPDLIDFDKLKKSNAHYNLQNAFNLAEQHLGLTKLLDPEDISVDHPDEKSIITYVVTYYHYFSKMKALAVEGKRIGKVLDNAIETEKMIEKYESLASDLLEWIEQTIIILNNRKFANSLVGVQQQLQAFNTYRTVEKPPKFTEKGNLEVLLFTIQSKMRANNQKVYMPREGKLISDINKAWERLEKAEHERELALRNELIRQEKLEQLARRFDRKAAMRETWLSENQRLVSQDNFGFDLPAVEAATKKHEAIETDIAAYEERVQAVVAVARELEAENYHDIKRITARKDNVIRLWEYLLELLRARRQRLEMNLGLQKIFQEMLYIMDWMDEMKVLVLSQDYGKHLLGVEDLLQKHTLVEADIGIQAERVRGVNASAQKFATDGEGYKPCDPQVIRDRVAHMEFCYQELCQLAAERRARLEESRRLWKFFWEMAEEEGWIREKEKILSSDDYGKDLTSVMRLLSKHRAFEDEMSGRSGHFEQAIKEGEDMIAEEHFGSEKIRERIIYIREQWANLEQLSAIRKKRLEEASLLHQFQADADDIDAWMLDILKIVSSSDVGHDEYSTQSLVKKHKDVAEEIANYRPTLDTLHEQASALPQEHAESPDVRGRLSGIEERYKEVAELTRLRKQALQDTLALYKMFSEADACELWIDEKEQWLNNMQIPEKLEDLEVIQHRFESLEPEMNNQASRVAVVNQIARQLMHSGHPSEKEIKAQQDKLNTRWSQFRELVDRKKDALLSALSIQNYHLECNETKSWIREKTKVIESTQDLGNDLAGVMALQRKLTGMERDLVAIEAKLSDLQKEAEKLESEHPDQAQAILSRLAEISDVWEEMKTTLKNREASLGEASKLQQFLRDLDDFQSWLSRTQTAIASEDMPNTLTEAEKLLTQHENIKNEIDNYEEDYQKMRDMGEMVTQGQTDAQYMFLRQRLQALDTGWNELHKMWENRQNLLSQSHAYQQFLRDTKQAEAFLNNQEYVLAHTEMPTTLEGAEAAIKKQEDFMTTMDANEEKINAVVETGRRLVSDGNINSDRIQEKVDSIDDRHRKNRETASELLMRLKDNRDLQKFLQDCQELSLWINEKMLTAQDMSYDEARNLHSKWLKHQAFMAELASNKEWLDKIEKEGMQLISEKPETEAVVKEKLTGLHKMWEVLESTTQTKAQRLFDANKAELFTQSCADLDKWLHGLESQIQSDDYGKDLTSVNILLKKQQMLENQMEVRKKEIEELQSQAQALSQEGKSTDEVDSKRLTVQTKFMELLEPLNERKHNLLASKEIHQFNRDVEDEILWVGERMPLATSTDHGHNLQTVQLLIKKNQTLQKEIQGHQPRIDDIFERSQNIVTDSSSLSAEAIRQRLADLKQLWGLLIEETEKRHRRLEEAHRAQQYYFDAAEAEAWMSEQELYMMSEEKAKDEQSAVSMLKKHQILEQAVEDYAETVHQLSKTSRALVADSHPESERISMRQSKVDKLYAGLKDLAEERRGKLDERHRLFQLNREVDDLEQWIAEREVVAGSHELGQDYEHVTMLQERFREFARDTGNIGQERVDTVNHLADELINSGHSDAATIAEWKDGLNEAWADLLELIDTRTQILAASYELHKFYHDAKEIFGRIQDKHKKLPEELGRDQNTVETLQRMHTTFEHDIQALGTQVRQLQEDAARLQAAYAGDKADDIQKRENEVLEAWKSLLDACESRRVRLVDTGDKFRFFSMVRDLMLWMEDVIRQIEAQEKPRDVSSVELLMNNHQGIKAEIDARNDSFTTCIELGKSLLARKHYASEEIKEKLLQLTEKRKEMIDKWEDRWEWLRLILEVHQFSRDASVAEAWLLGQEPYLSSREIGQSVDEVEKLIKRHEAFEKSAATWDERFSALERLTTLELLEVRRQQEEEERKRRPPSPEPSTKVSEEAESQQQWDTSKGEQVSQNGLPAEQGSPRVSYRSQTYQNYKNFNSRRTASDQPWSGL

SEQ ID NO: 60421 - protein, 85 aa, Homo sapiens
VPGARLSRLPLARVKALVKADPDVTLAGQEAIFILARAAELFVETIAKDAYCCAQQGKRKTLQRRDLDNAIEAVDEFAFLEGTLD

SEQ ID NO: 60422 - protein, 382 aa, Homo sapiens
RMSRHEGVSCDACLKGNFRGRRYKCLICYDYDLCASCYESGATTTRHTTDHPMQCILTRVDFDLYYGGEAFSVEQPQSFTCPYCGKMGYTETSLQEHVTSEHAETSTEVICPICAALPGGDPNHVTDDFAAHLTLEHRAPRDLDESSGVRHVRRMFHPGRGLGGPRARRSNMHFTSSSTGGLSSSQSSYSPSNREAMDPIAELLSQLSGVRRSAGGQLNSSGPSASQLQQLQMQLQLERQHAQAARQQLETARNATRRTNTSSVTTTITQSTATTNIANTESSQQTLQNSQFLLTRLNDPKMSETERQSMESERADRSLFVQELLLSTLVREESSSSDEDDRGEMADFGAMGCVDIMPLDVALENLNLKESNKGNEPPPPPL

SEQ ID NO: 60423 - protein, 31 aa, Homo sapiens
MRKFCPKAAHSPCLTGCHDELSSLLPAHHNR

SEQ ID NO: 60424 - protein, 6 aa, Homo sapiens
MTRGSV

SEQ ID NO: 60425 - protein, 339 aa, Homo sapiens
LNNIKANDYANAVLQALSNVPPLRNYFLEEDNYKNIKRPPGDIMFLLVQRFGELMRKLWNPRNFKAHVSPHEMLQAVVLCSKKTFQITKQGDGVDFLSWFLNALHSALGGTKKKKKTIVTDVFQGSMRIFTKKLPHPDLPAEEKEQLLHNDEYQETMVESTFMYLTLDLPTAPLYKDEKEQLIIPQVPLFNILAKFNGITEKEYKTYKENFLKRFQLTKLPPYLIFCIKRFTKNNFFVEKNPTIVNFPITNVDLREYLSEEVQAVHKNTTYDLIANIVHDGKPSEGSYRIHVLHHGTGKWYELQDLQVTDILPQMITLSEAYIQIWKRRDNDETNQQGA

SEQ ID NO: 60426 - protein, 293 aa, Homo sapiens
LVQRFGELMRKLWNPRNFKAHVSPHEMLQAVVLCSKKTFQITKQGDGVDFLSWFLNALHSALGGTKKKKKTIVTDVFQGSMRIFTKKLPHPDLPAEEKEQLLHNDEYQETMVESTFMYLTLDLPTAPLYKDEKEQLIIPQVPLFNILAKFNGITEKEYKTYKENFLKRFQLTKLPPYLIFCIKRFTKNNFFVEKNPTIVNFPITNVDLREYLSEEVQAVHKNTTYDLIANIVHDGKPSEGSYRIHVLHHGTGKWYELQDLQVTDILPQMITLSEAYIQIWKRRDNDETNQQGA

SEQ ID NO: 60427 - protein, 63 aa, Homo sapiens
MVFKTEDLIAWVSQFVTFYPGDVILTGTPPGVGVFRKPPVFLKKGDEVQCEIEELGVIINKVV

SEQ ID NO: 60428 - protein, 680 aa, Homo sapiens
LGLRSRLGQPLTGRRAGLCEQARSCRFYSGSATLSKVEGTDVTGIEEVVIPKKKTWDKVAVLQALASTVNRDTTAVPYVFQDDPYLMPASSLESRSFLLAKKSGENVAKFIINSYPKYFQKDIAEPHIPCLMPEYFEPQIKDISEAALKERIELRKVKASVDMFDQLLQAGTTVSLETTNSLLDLLCYYGDQEPSTDYHFQQTGQSEALEEENDETSRRKAGHQFGVTWRAKNNAERIFSLMPEKNEHSYCTMIRGMVKHRAYEQALNLYTELLNNRLHADVYTFNALIEATVCAINEKFEEKWSKILELLRHMVAQKVKPNLQTFNTILKCLRRFHVFARSPALQVLREMKAIGIEPSLATYHHIIRLFDQPGDPLKRSSFIIYDIMNELMGKRFSPKDPDDDKFFQSAMSICSSLRDLELAYQVHGLLKTGDNWKFIGPDQHRNFYYSKFFDLICLMEQIDVTLKWYEDLIPSAYFPHSQTMIHLLQALDVANRLEVIPKIWKDSKEYGHTFRSDLREEILMLMARDKHPPELQVAFADCAADIKSAYESQPIRQTAQDWPATSLNCIAILFLRAGRTQEAWKMLGLFRKHNKIPRSELLNELMDSAKVSNSPSQAIEVVELASAFSLPICEGLTQRVMSDFAINQEQKEALSNLTALTSDSDTDSSSDSDSDTSEGK

SEQ ID NO: 60429 - protein, 10 aa, Homo sapiens
LEWAVRRRAR

SEQ ID NO: 60430 - protein, 10 aa, Homo sapiens
ILCEKIKGIM

SEQ ID NO: 60431 - protein, 32 aa, Homo sapiens
MPSWFSFNWAPRCLSRRLKGTNNQIQESWTDH

SEQ ID NO: 60432 - protein, 196 aa, Homo sapiens
VVKTYEDMTLEELEDHEDEFNEEDERAIEMYRRRRLAEWKATKLKNKFGEVLEISGKDYVQEVTKAGEGLWVILHLYKQGIPLCALINQHLSGLARKFPDVKFIKAISTTCIPNYPDRNLPTIFVYLEGDIKAQFIGPLVFGGMNLTRDELEWKLSESGAIMTDLEENPKKPIEDVLLSSVRRSVLMKRDSDSEGD

SEQ ID NO: 60433 - protein, 110 aa, Homo sapiens [sequence omitted]

SEQ ID NO: 60434 - protein, 22 aa, Homo sapiens
MSDSDSRTEKRKKKRPNGKATF

SEQ ID NO: 60435 - protein, 45 aa, Homo sapiens
IFHPVFSVMVSASEDATIKVWDYETGDFERTLKGRTHRLCTGHFI

SEQ ID NO: 60436 - protein, 22 aa, Homo sapiens
IPLFWACEVYHSVAFEVSYLSQ

SEQ ID NO: 60437 - protein, 6 aa, Homo sapiens
VKLDVV

SEQ ID NO: 60438 - protein, 69 aa, Homo sapiens
KPSDEEMLFIYGHYKQATVGDINTERPGMLDFTGKAKWDAWNELKGTSKEDAMKAYINKVEELKKKYGI

SEQ ID NO: 60439 - protein, 44 aa, Homo sapiens
ILLRNQVTLIGFTLMFWCEFTASFLLFLNAISGLHINSITHPWE

SEQ ID NO: 60440 - protein, 213 aa, Homo sapiens
KCGPYISSVTSQSVNLMIRGVVLFFIGVFLALVLNLLQIQRNVTLFPPDVIASIFSSAWWVPPCCGTASAVIGLLYPCIDRHLGEPHKFKREWSSVMRCVAVFVGINHASAKVDFDNNIQLSLTLAALSIGLWWTFDRSRSGFGLGVGIAFLATVVTQLLVYNGVYQYTSPDFLYVRSWLPCIFFAGGITMGNIGRQLAMYECKVIAEKSHQE

SEQ ID NO: 60441 - protein, 1176 aa, Homo sapiens
LLFVFWWQKGKMANDSPAKSLVDIDLSSLRDPAGIFELVEVVGNGTYGQVYKGRHVKTGQLAAIKVMDVTEDEEEEIKLEINMLKKYSHHRNIATYYGAFIKKSPPGHDDQLWLVMEFCGAGSITDLVKNTKGNTLKEDWIAYISREILRGLAHLHIHHVIHRDIKGQNVLLTENAEVKLVDFGVSAQLDRTVGRRNTFIGTPYWMAPEVIACDENPDATYDYRSDLWSCGITAIEMAEGAPPLCDMHPMRALFLIPRNPPPRLKSKKWSKKFFSFIEGCLVKNYMQRPSTEQLLKHPFIRDQPNERQVRIQLKDHIDRTRKKRGEKDETEYEYSGSEEEEEEVPEQEGEPSSIVNVPGESTLRRDFLRLQQENKERSEALRRQQLLQEQQLREQEEYKRQLLAERQKRIEQQKEQRRRLEEQQRREREARRQQEREQRRREQEEKRRLEELERRRKEEEERRRAEEEKRRVEREQEYIRRQLEEEQRHLEVLQQQLLQEQAMLLHDHRRPHPQHSQQPPPPQQERSKPSFHAPEPKAHYEPADRAREVPVRTTSRSPVLSRRDSPLQGSGQQNSQAGQRNSTSIEPRLLWERVEKLVPRPGSGSSSGSSNSGSQPGSHPGSQSGSGERFRVRSSSKSEGSPSQRLENAVKKPEDKKEVFRPLKPAVRIDLTALAKELRAVEDVRPPHKVTDYSSSSEESGTTDEEDDDVEQEGADESTSGPEDTRAASSLNLSNGETESVKTMIVHDDVESEPAMTPSKEGTLIVRQTQSASSTLQKHKSSSSFTPFIDPRLLQISPSSGTTVTSVVGFSCDGMRPEAIRQDPTRKGSVVNVNPTNTRPQSDTPEIRKYKKRFNSEILCAALWGVNLLVGTESGLMLLDRSGQGKVYPLINRRRFQQMDVLEGLNVLVTISGKKDKLRVYYLSWLRNKILHNDPEVEKKQGWTTVGDLEGCVHYKVVKYERIKFLVIALKSSVEVYAWAPKPYHKFMAFKSFGELVHKPLLVDLTVEEGQRLKVIYGSCAGFHAVDVDSGSVYDIYLPTHVRKNPHSMIQCSIKPHAIIILPNTDGMELLVCYEDEGVYVNTYGRITKDVVLQWGEMPTSVAYIRSNQTMGWGEKAIEIRSVETGHLDGVFMHKRAQRLKFLCERNDKVFFASVRSGGSSQVYFMTLGRTSLLSW

SEQ ID NO: 60442 - protein, 48 aa, Homo sapiens
TAAAAAAGEEEDGGTAAGLCGGLWHGVYKTRICWKYRTTVYHPFLYCY

SEQ ID NO: 60443 - protein, 336 aa, Homo sapiens
KEFCDFYAKFNMANALASATCERCKGGFAPAEKIVNSNGELYHEQCFVCAQCFQQFPEGLFYEFEGRKYCEHDFQMLFAPCCHQCGEFIIGRVIKAMNNSWHPECFRCDLCQEVLADIGFVKNAGRHLCRPCHNREKARGLGKYICQKCHAIIDEQPLIFKNDPYHPDHFNCANCGKELTADARELKGELYCLPCHDKMGVPICGACRRPIEGRVVNAMGKQWHVEHFVCAKCEKPFLGHRHYERKGLAYCETHYNQLFGDVCFHCNRVIEGDVVSALNKAWCVNCFACSTCNTKLTLKNKFVEFDMKPVCKKCYEKFPLELKKRLKKLAETLGRK

SEQ ID NO: 60444 - protein, 3239 aa, Homo sapiens
LSAGLTRLGSQVGGAMRRSKADVERYIASVQGSTPSPRQKSMKGFYFAKLYYEAKEYDLAKKYICTYINVQERDPKAHRFLGLLYELEENTDKAVECYRRSVELNPTQKDLVLKIAELLCKNDVTDGRAKYWLERAAKLFPGSPAIYKLKEQLLDCEGEDGWNKLFDLIQSELYVRPDDVHVNIRLVEVYRSTKRLKDAVAHCHEAERNIALRSSLEWNSCVVQTLKEYLESLQCLESDKSDWRATNTDLLLAYANLMLLTLSTRDVQESRELLQSFDSALQSVKSLGGNDELSATFLEMKGHFYMHAGSLLLKMGQHSSNVQWRALSELAALCYLIAFQVPRPKIKLIKGEAGQNLLEMMACDRLSQSGHMLLNLSRGKQDFLKEIVETFANKSGQSALYDALFSSQSPKDTSFLGSDDIGNIDVREPELEDLTRYDVGAIRAHNGSLQHLTWLGLQWNSLPALPGIRKWLKQLFHHLPHETSRLETNAPESICILDLEVFLLGVVYTSHLQLKEKCNSHHSSYQPLCLPLPVCKQLCTERQKSWWDAVCTLIHRKAVPGNVAKLRLLVQHEINTLRAQEKHGLQPALLVHWAECLQKTGSGLNSFYDQREYIGRSVHYWKKVLPLLKIIKKKNSIPEPIDPLFKHFHSVDIQASEIVEYEEDAHITFAILDAVNGNIEDAVTAFESIKSVVSYWNLALIFHRKAEDIENDALSPEEQEECKNYLRKTRDYLIKIIDDSDSNLSVVKKLPVPLESVKEMLNSVMQELEDYSEGGPLYKNGSLRNADSEIKHSTPSPTRYSLSPSKSYKYSPKTPPRWAEDQNSLLKMICQQVEAIKKEMQELKLNSSNSASPHRWPTENYGPDSVPDGYQGSQTFHGAPLTVATTGPSVYYSQSPAYNSQYLLRPAANVTPTKGPVYGMNRLPPQQHIYAYPQQMHTPPVQSSSACMFSQEMYGPPALRFESPATGILSPRGDDYFNYNVQQTSTNPPLPEPGYFTKPPIAAHASRSAESKTIEFGKTNFVQPMPGEGLRPSLPTQAHTTQPTPFKFNSNFKSNDGDFTFSSPQVVTQPPPAAYSNSESLLGLLTSDKPLQGDGYSGAKPIPGGQTIGPRNTFNFGSKNVSGISFTENMGSSQQKNSGFRRSDDMFTFHGPGKSVFGTPTLETANKNHETDGGSAHGDDDDDGPHFEPVVPLPDKIEVKTGEEDEEEFFCNRAKLFRFDVESKEWKERGIGNVKILRHKTSGKIRLLMRREQVLKICANHYISPDMKLTPNAGSDRSFVWHALDYADELPKPEQLAIRFKTPEEAALFKCKFEEAQSILKAPGTNVAMASNQAVRIVKEPTSHDNKDICKSDAGNLNFEFQVAKKEGSWWHCNSCSLKNASTAKKCVSCQNLNPSNKELVGPPLAETVFTPKTSPENVQDRFALVTPKKEGHWDCSICLVRNEPTVSRCIACQNTKSANKSGSSFVHQASFKFGQGDLPKPINSDFRSVFSTKEGQWDCSACLVQNEGSSTKCAACQNPRKQSLPATSIPTPASFKFGTSETSKTLKSGFEDMFAKKEGQWDCSSCLVRNEANATRCVACQNPDKPSPSTSVPAPASFKFGTSETSKAPKSGFEGMFTKKEGQWDCSVCLVRNEASATKCIACQNPGKQNQTTSAVSTPASSETSKAPKSGFEGMFTKKEGQWDCSVCLVRNEASATKCIACQNPGKQNQTTSAVSTPASSETSKAPKSGFEGMFTKKEGQWDCSVCLVRNEASATKCIACQCPSKQNQTTAISTPASSEISKAPKSGFEGMFIRKGQWDCSVCCVQNESSSLKCVACDASKPTHKPIAEAPSAFTLGSEMKLHDSSGSQVGTGFKSNFSEKASKFGNTEQGFKFGHVDQENSPSFMFQGSSNTEFKSTKEGFSIPVSADGFKFGISEPGNQEKKSEKPLENGTGFQAQDISGQKNGRGVIFGQTSSTFTFADLAKSTSGEGFQFGKKDPNFKGFSGAGEKLFSSQYGKMANKANTSGDFEKDDDAYKTEDSDDIHFEPVVQMPEKVELVTGEEDEKVLYSQRVKLFRFDAEVSQWKERGLGNLKILKNEVNGKLRMLMRREQVLKVCANHWITTTMNLKPLSGSDRAWMWLASDFSDGDAKLEQLAAKFKTPELAEEFKQKFEECQRLLLDIPLQTPHKLVDTGRAAKLIQRAEEMKSGLKDFKTFLTNDQTKVTEEENKGSGTGAAGASDTTIKPNPENTGPTLEWDNYDLREDALDDSVSSSSVHASPLASSPVRKNLFRFGESTTGFNFSFKSALSPSKSPAKLNQSGTSVGTDEESDVTQEEERDGQYFEPVVPLPDLVEVSSGEENEQVVFSHRAKLYRYDKDVGQWKERGIGDIKILQNYDNKQVRIVMRRDQVLKLCANHRITPDMTLQNMKGTERVWLWTACDFADGERKVEHLAVRFKLQDVADSFKKIFDEAKTAQEKDSLITPHVSRSSTPRESPCGKIAVAVLEETTRERTDVIQGDDVADATSEVEVSSTSETTPKAVVSPPKFVFGSESVKSIFSSEKSKPFAFGNSSATGSLFGFSFNAPLKSNNSETSSVAQSGSESKVEPKKCELSKNSDIEQSSDSKVKNLFASFPTEESSINYTFKTPEKAKEKKKPEDSPSDDDVLIVYELTPTAEQKALATKLKLPPTFFCYKNRPDYVSEEEEDDEDFETAVKKLNGKLYLDGSEKCRPLEENTADNEKECIIVWEKKPTVEEKAKADTLKLPPTFFCGVCSDTDEDNGNGEDFQSELQKVQEAQKSQTEEITSTTDSVYTGGTEVMVPSFCKSEEPDSITKSISSPSVSSETMDKPVDLSTRKEIDTDSTSQGESKIVSFGFGSSTGLSFADLASSNSGDFAFGSKDKNFQWANTGAAVFGTQSVGTQSAGKVGEDEDGSDEEVVHNEDIHFEPIVSLPEVEVKSGEEDEEILFKERAKLYRWDRDVSQWKERGVGDIKILWHTMKNYYRILMRRDQVFKVCANHVITKTMELKPLNVSNNALVWTASDYADGEAKVEQLAVRFKTKEVADCFKKTFEECQQNLMKLQKGHVSLAAELSKETNPVVFFDVCADGEPLGRITMELFSNIVPRTAENFRALCTGEKGFGFKNSIFHRVIPDFVCQGGDITKHDGTGGQSIYGDKFEDENFDVKHTGPGLLSMANQGQNTNNSQFVITLKKAEHLDFKHVVFGFVKDGMDTVKKIESFGSPKGSVCRRITITECGQI

SEQ ID NO: 60445 - protein, 500 aa, Homo sapiens
ISCSSGAILGRSETQECLFFNANWEKDRTNQTGVEPCYGDKDKRRHCFATWKNISGSIEIVKQGCWLDDINCYDRTDCVEKKDSPEVYFCCCEGNMCNEKFSYFPEMEVTQPTSNPVTPKPPYYNILLYSLVPLMLIAGIVICAFWVYRHHKMAYPPVLVPTQDPGPPPPSPLLGLKPLQLLEVKARGRFGCVWKAQLLNEYVAVKIFPIQDKQSWQNEYEVYSLPGMKHENILQFIGAEKRGTSVDVDLWLITAFHEKGSLSDFLKANVVSWNELCHIAETMARGLAYLHEDIPGLKDGHKPAISHRDIKSKNVLLKNNLTACIADFGLALKFEAGKSAGDTHGQVGTRRYMAPEVLEGAINFQRDAFLRIDMYAMGLVLWELASRCTAADGPVDEYMLPFEEEIGQHPSLEDMQEVVVHKKKRPVLRDYWQKHAGMAMLCETIEECWDHDAEARLSAGCVGERITQMQRLTNIITTEDIVTVVTMVTNVDFPPKESSL

SEQ ID NO: 60446 - protein, 5 aa, Homo sapiens
MVPAV

SEQ ID NO: 60447 - protein, 69 aa, Homo sapiens
MDENTLHEILNEVDLNKNGQVELNEFLQLMSAIQKGRVSGSRLAILMKTAEENLDRRVPIPVDRSCGGL

SEQ ID NO: 60448 - protein, 20 aa, Homo sapiens
LATLLLLLLLLLLQLPLHSR

SEQ ID NO: 60449 - protein, 875 aa, Homo sapiens
IFYSSIKEMKPPLRGHGKGAWGKENVRKTEESVLKVEVDLDQTQRERKMQNALGRGKVVPLWHPAHLQTLPVTPNKQKTDGRGTKPEASSHQGTPKQTTAQGAPKTSFIAAKGTQVVKISVHMGRVSLKQEPRKSHSPSSDTSKLAAERDLNVTISLSTDRPKQRSQAVANERAHPASTAVPKSGEAMALNKTKTQSKEVNANKHKANTSLPFPKFTVNSNRLRKQSINETPLGSLSKDDGARGAHGKKLNFSESHLVIITKEEEQKADPKEVSNSKTKTIFPKVLGKSQSKHISRNRSEMSSSSLAPHRVPLSQTNHALTGGLEPAKINITAKAPSTEYNQSHIKALLPEDSGTHQVLRIDVTLSPRDPKAPGQFGRPVVVPHGKEKEAERRWKEGNFNVYLSDLIPVDRAIEDTRPAGCAEQLVHNNLPTTSVIMCFVDEVWSTLLRSVHSVINRSPPHLIKEILLVDDFSTKDYLKDNLDKYMSQFPKVRILRLKERHGLIRARLAGAQNATGDVLTFLDSHVECNVGWLEPLLERVYLSRKKVACPVIEVINDKDMSYMTVDNFQRGIFVWPMNFGWRTIPPDVIAKNRIKETDTIRCPVMAGGLFSIDKSYFFELGTYDPGLDVWGGENMELSFKVWMCGGEIEIIPCSRVGHIFRNDNPYSFPKDRMKTVERNLVRVAEVWLDEYKELFYGHGDHLIDQGLDVGNLTQQRELRKKLKCKSFKWYLENVFPDLRAPIVRASGVLINVALGKCISIENTTVILEDCDGSKELQQFNYTWLRLIKCGEWCIAPIPDKGAVRLHPCDNRNKGLKWLHKSTSVFHPELVNHIVFENNQQLLCLEGNFSQKILKVAACDPVKPYQKWKFEKYYEA

SEQ ID NO: 60450 - skipped

SEQ ID NO: 60451 - protein, 876 aa, Homo sapiens
LLGMNNDFPPRAHCLVRWYGLREFVVIAPAAHSDAVLSESKCNLLLSSVSIALGNTGCQVPLFVQIHHKWRRMYVGECQGPGVRTDFEMVHLRKVPNQYTHLSGLLDIFKSKIGCPLTPLPPVSIAIRFTYVLQDWQQYFWPQQPPDIDALVGGEVGGLEFGKLPFGACEDPISELHLATTWPHLTEGIIVDNDVYSDLDPIQAPHWSVRVRKAENPQCLLGDFVTEFFKICRRKESTDEILGRSAFEEEGKETADITHALSKLTEPASVPIHKLSVSNMVHTAKKKIRKHRGVEESPLNNDVLNTILLFLFPDAVSEKPLDGTTSTDNNNPPSESEDYNLYNQFKSAPSDSLTYKLALCLCMINFYHGGLKGVAHLWQEFVLEMRFRWENNFLIPGLASGPPDLRCCLLHQKLQMLNCCIERKKARDEGKKTSASDVTNIYPGDAGKAGDQLVPDNLKETDKEKGEVGKSWDSWSDSEEEFFECLSDTEELKGNGQESGKKGGPKEMANLRPEGRLYQHGKLTLLHNGEPLYIPVTQEPAPMTEDLLEEQSEVLAKLGTSAEGAHLRARMQSACLLSDMESFKAANPGCSLEDFVRWYSPRDYIEEEVIDEKGNVVLKGELSARMKIPSNMWVEAWETAKPIPARRQRRLFDDTREAEKVLHYLAIQKPADLARHLLPCVIHAAVLKVKEEESLENISSVKKIIKQIISHSSKVLHFPNPEDKKLEEIIHQITNVEALIARARSLKAKFGTEKCEQEEEKEDLERFVSCLLEQPEVLVTGAGRGHAGRIIHKLFVNAQRAAAMTPPEEELKRMGSPEERRQNSVSDFPPPAGREFILRTTVPRPAPYSKALPQRMYSVLTKEDFRLAVKIIDGDV

SEQ ID NO: 60452 - protein, 68 aa, Homo sapiens
ISLTAGFSCCSFSWTVTYFDSFEPGMFPPTPLSPARFKKLTGHSFHMGYSMAILNGIVAALTVAWCLM

SEQ ID NO: 60453 - protein, 235 aa, Homo sapiens
LEFDDAGGEGVTSHVDDEYRWAGVEDPKVMITTSRDPSSRLKMFAKELKLVFPGAQRMNRGRHEVGALVRACKANGVTDLLVVHEHRGTPVGLIVSHLPFGPTAYFTLCNVVMRHDIPDLGTMSEAKPHLITHGFSSRLGKRVSDILRYLFPVPKDDSHRVITFANQDDYISFRHHVYKKTDHRNVELTEVGPRFELKLYMIRLGTLEQEATADVEWRWHPYTNTARKRVFLSTE

SEQ ID NO: 60454 - protein, 20 aa, Homo sapiens
MMSKENMKLPQPPEGHCYSS

SEQ ID NO: 60455 - protein, 22 aa, Homo sapiens
VATALRNMALDVRNKELIGMFW

SEQ ID NO: 60456 - protein, 439 aa, Homo sapiens
IYSILYSDATGRRGMDKNIGEQLNKAYEAFRQACMDRDSAVKELQQKTENYEQRIREQQEQLSLQQTIIDKLKSQLLLVNSTQDNNYGCVPLLEDSETRKNNLTLDQPQDKVISGIAREKLPKVRRQEVSSPRKETSARSLGSPLLHERGNIEKTFWDLKEEFHKICMLAKAQKDHLSKLNIPDTATETQCSVPIQCTDKTDKQEALFKPQAKDDINRGAPSITSVTPRGLCRDEEDTSFESLSKFNVKFPPMDNDSTFLHSTPERPGILSPATSEAVCQEKFNMEFRDNPGNFVKTEETLFEIQGIDPIASAIQNLKTTDKTKPSNLVNTCIRTTLDRAACLPPGDHNALYVNSFPLLDPSDAPFPSLDSPGKAIRGPQQPIWKPFPNQDSDSVVLSGTDSELHIPRVCEFCQAVFPPSITSRGDFLRHLNSHFNGET

SEQ ID NO: 60457 - protein, 35 aa, Homo sapiens
IVMLQDEEEWIKTLASNSIKRMKPSGRHAWIEILQ

SEQ ID NO: 60458 - protein, 476 aa, Homo sapiens
LLLTPRPGARFCGSIILCHYEMSSLGASFVQIKFDDLQFFENCGGGSFGSVYRAKWISQDKEVAVKKLLKIEKEAEILSVLSHRNIIQFYGVILEPPNYGIVTEYASLGSLYDYINSNRSEEMDMDHIMTWATDVAKGMHYLHMEAPVKVIHRDLKSRNVVIAADGVLKICDFGASRFHNHTTHMSLVGTFPWMAPEVIQSLPVSETCDTYSYGVVLWEMLTREVPFKGLEGLQVAWLVVEKNERLTIPSSCPRSFAELLHQCWEADAKKRPSFKQIISILESMSNDTSLPDKCNSFLHNKAEWRCEIEATLERLKKLERDLSFKEQELKERERRLKMWEQKLTEQSNTPLLLPLAARMSEESYFESKTEESNSAEMSCQITATSNGEGHGMNPSLQAMMLMGFGDIFSMNKAGAVMHSGMQINMQAKQNSSKTTSKRRGKKVNMALGFSDFDLSEGDDDDDDDGEEEDNDMDNSE

SEQ ID NO: 60459 - protein, 44 aa, Homo sapiens
VILTCQKVTMMMMMTVRRRIMTWIIVNESRKQSNKITNVWKTQK

SEQ ID NO: 60460 - protein, 41 aa, Homo sapiens [sequence omitted]

SEQ ID NO: 60461 - protein, 7 aa, Homo sapiens
LFFSSML

SEQ ID NO: 60462 - protein, 192 aa, Homo sapiens
MMTSSGRYCEGYKLLNKHKGNITFETMMEILRDKPSGINMEGEFLTTASMVSILPQDSSLPCIHFFTGTPDPERSVFKPFIFVPHISQLLDTSSPTFELEDLVKKKSHFKPDRRHPLYQKHQQALEVVNNNEEKAKIMLDNMRKLEKELFREMESILQNKHLDVEKIVNLFPQCTKDEIQIYQSNLSVKVSS

SEQ ID NO: 60463 - protein, 68 aa, Homo sapiens
KAEESSWLIEDGKVVTVHLEKIKKMEWWSRLVSSDPEINTKKINPENSKLSDLDSETHIMVEKTIYDQ

SEQ ID NO: 60464 - protein, 294 aa, Homo sapiens
KWTNYLTGWQPRWFVLDNGILSYYDSQDDVCKGSKGSIKMAVCEIKVHSADNTRMELIIPGEQHFYMKAVNAAERQRWLVALGSSKACLTDTRTKKEKEISETSESLKTKMSELRLYCDLLMQQVHTIQEFVHHDENHSSPSAENMNEASSLLSATCNTFITTLEECVKIANAKFKPEMFQLHHPDPLVSPVSPSPVQMMKRSVSHPGSCSSERSSHSIKEPVSTLHRLSQRRRRTYSDTDSCSDIPLEDPDRPVHCSKNTLNGDLASATIPEESRLMAKKQSESEDTLPSFSS

SEQ ID NO: 60465 - protein, 652 aa, Homo sapiens
LFYLPASALRQVTNMSDKSELKAELERKKQRLAQIREEKKRKEEERKKKETDQKKEAVAPVQEESDLEKKRREAEALLQSMGLTPESPIVFSEYWVPPPMSPSSKSVSTPSEAGSQDSGDGAVGSRTLHWDTDPSVLQLHSDSDLGRGPIKLGMAKITQVDFPPREIVTYTKETQTPVMAQPKEDEEEDDDVVAPKPPIEPEEEKTLKKDEENDSKAPPHELTEEEKQQILHSEEFLSFFDHSTRIVERALSEQINIFFDYSGRDLEDKEGEIQAGAKLSLNRQFFDERWSKHRVVSCLDWSSQYPELLVASYNNNEDAPHEPDGVALVWNMKYKKTTPEYVFHCQSAVMSATFAKFHPNLVVGGTYSGQIVLWDNRSNKRTPVQRTPLSAAAHTHPVYCVNVVGTQNAHNLISISTDGKICSWSLDMLSHPQDSMELVHKQSKAVAVTSMSFPVGDVNNFVVGSEEGSVYTACRHGSKAGISEMFEGHQGPITGIHCHAAVGAVDFSHLFVTSSFDWTVKLWTTKNNKPLYSFEDNADYVYDVMWSPTHPALFACVDGMGRLDLWNLNNDTEVPTASISVEGNPALNRVRWTHSGREIAVGDSEGQIVIYDVGEQIAVPRNDEWARFGRTLAEINANRADAEEEAATRIPA

SEQ ID NO: 60466 - protein, 646 aa, Homo sapiens
LGAGASYGSAADRDRDPDPDRAGRRLRVLSGHLLGRPREALSTNECKARRAASAATAAPTATPAAQESGTIPKKRQEVMKWNGWGYNDSKFIFNKKGQIELTGKRYPLSGMGLPTFKEWIQNTLGVNVEHKTTSKASLNPSDTPPSVVNEDFLHDLKETNISYSQEADDRVFRAHGHCLHEIFLLREGMFERIPDIVLWPTCHDDVVKIVNLACKYNLCIIPIGGGTSVSYGLMCPADETRTIISLDTSQMNRILWVDENNLTAHVEAGITGQELERQLKESGYCTGHEPDSLEFSTVGGWVSTRASGMKKNIYGNIEDLVVHIKMVTPRGIIEKSCQGPRMSTGPDIHHFIMGSEGTLGVITEATIKIRPVPEYQKYGSVAFPNFEQGVACLREIAKQRCAPASIRLMDNKQFQFGHALKPQVSSIFTSFLDGLKKFYITKFKGFDPNQLSVATLLFEGDREKVLQHEKQVYDIAAKFGGLAAGEDNGQRGYLLTYVIAYIRDLALEYYVLGESFETSAPWDRVVDLCRNVKERITRECKEKGVQFAPFSTCRVTQTYDAGACIYFYFAFNYRGISDPLTVFEQTEAAAREEILANGGSLSHHHGVGKLRKQWLKESISDVGFGMLKSVKEYVDPNNIFGNRNLL

SEQ ID NO: 60467 - protein, 34 aa, Homo sapiens
VLHIEQKPNRVFSCYVYQMICDTGEEEETINRSC

SEQ ID NO: 60468 - protein, 30 aa, Homo sapiens
LDPFIPILVSNYNPKEFESRIQYCLENNWL

SEQ ID NO: 60469 - protein, 25 aa, Homo sapiens
MSVRDIKIERGTLVALGALQKFSKR

SEQ ID NO: 60470 - protein, 208 aa, Homo sapiens
KMSSDRQRSDDESPSTSSGSSDADQRDPAAPEPEEQEERKPSATQQKKNTKLSSKTTAKLSTSAKRIQKELAEITLDPPPNCSAGPKGDNIYEWRSTILGPPGSVYEGGVFFLDITFSSDYPFKPPKVTFRTRIYHCNINSQGVICLDILKDNWSPALTISKVLLSICSLLTDCNPADPLVGSIATQYLTNRAEHDRIARQWTKRYAT

SEQ ID NO: 60471 - protein, 1041 aa, Homo sapiens
VLNVPHRERMAWEARREPGPRRAAVRETVMLLLCLGVPTGRPYNVDTESALLYQGPHNTLFGYSVVLHSHGANRWLLVGAPTANWLANASVINPGAIYRCRIGKNPGQTCEQLQLGSPNGEPCGKTCLEERDNQWLGVTLSRQPGENGSIVTCGHRWKNIFYIKNENKLPTGGCYGVPPDLRTELSKRIAPCYQDYVKKFGENFASCQAGISSFYTKDLIVMGAPGSSYWTGSLFVYNITTNKYKAFLDKQNQVKFGSYLGYSVGAGHFRSQHTTEVVGGAPQHEQIGKAYIFSIDEKELNILHEMKGKKLGSYFGASVCAVDLNADGFSDLLVGAPMQSTIREEGRVFVYINSGSGAVMNAMETNLVGSDKYAARFGESIVNLGDIDNDGFEDVAIGAPQEDDLQGAIYIYNGRADGISSTFSQRIEGLQISKSLSMFGQSISGQIDADNNGYVDVAVGAFRSDSAVLLRTRPVVIVDASLSHPESVNRTKFDCVENGWPSVCIDLTLCFSYKGKEVPGYIVLFYNMSLDVNRKAESPPRFYFSSNGTSDVITGSIQVSSREANCRTHQAFMRKDVRDILTPIQIEAAYHLGPHVISKRSTEEFPPLQPILQQKKEKDIMKKTINFARFCAHENCSADLQVSAKIGFLKPHENKTYLAVGSMKTLMLNVSLFNAGDDAYETTLHVKLPVGLYFIKILELEEKQINCEVTDNSGVVQLDCSIGYIYVDHLSRIDISFLLDVSSLSRAEEDLSITVHATCENEEEMDNLKHSRVTVAIPLKYEVKLTVHGFVNPTSFVYGSNDENEPETCMVEKMNLTFHVINTGNSMAPNVSVEIMVPNSFSPQTDKLFNILDVQTTTGECHFENYQRVCALEQQKSAMQTLKGIVRFLSKTDKRLLYCIKADPHCLNFLCNFGKMESGKEASVHIQLEGRPSILEMDETSALKFEIRATGFPEPNPRVIELNKDENVAHVLLEGLHHQRPKRYFTIVIISSSLLLGLIVLLLISYVMWKAGFFKRQYKSILQEENRRDSWSYINSKSNDD

SEQ ID NO: 60472 - protein, 18 aa, Homo sapiens
MMIKDFFQIERMENRLRL

SEQ ID NO: 60473 - protein, 63 aa, Homo sapiens
LVVAGVAAPHQSRAPRLGRRRVRVLLSCTRCLGSARRGPPPGFEDGGVATGSDPAMARYIFVE

SEQ ID NO: 60474 - protein, 772 aa, Homo sapiens
LIVYMAILVGTDQDFYSLLGVSKTASSREIRQAFKKLALKLHPDKNPNNPNAHGDFLKINRAYEVLKDEDLRKKYDKYGEKGLEDNQGGQYESWNYYRYDFGIYDDDPEIITLERREFDAAVNSGELWFVNFYSPGCSHCHDLAPTWRDFAKEVDGLLRIGAVNCGDDRMLCRMKGVNSYPSLFIFRSGMAPVKYHGDRSKESLVSFAMQHVRSTVTELWTGNFVNSIQTAFAAGIGWLITFCSKGGDCLTSQTRLRLSGMLDGLVNVGWMDCATQDNLCKSLDITTSTTAYFPPGATLNNKEKNSILFLNSLDAKEIYLEVIHNLPDFELLSANTLEDRLAHHRWLLFFHFGKNENSNDPELKKLKTLLKNDHIQVGRFDCSSAPDICSNLYVFQPSLAVFKGQGTKEYEIHHGKKILYDILAFAKESVNSHVTTLGPQNFPANDKEPWLVDFFAPWCPPCRALLPELRRASNLLYGQLKFGTLDCTVHEGLCNMYNIQAYPTTVVFNQSNIHEYEGHHSAEQILEFIEDLMNPSVVSLTPTTFNELVTQRKHNEVWMVDFYSPWCHPCQVLMPEWKRMARTLTGLINVGSIDCQQYHSFCAQENVQRYPEIRFFPPKSNKAYHYHSYNGWNRDAYSLRIWGLGFLPQVSTDLTPQTFSEKVLQGKNHWVIDFYAPWCGPCQNFAPEFELLARMIKGKVKAGKVDCQAYAQTCQKAGIRAYPTVKFYFYERAKRNFQEEQINTRDAKAIAALISEKLETLRNQGKRNKDEL

SEQ ID NO: 60475 - protein, 24 aa, Homo sapiens
KSKEKFSRRADKYQRCKSNRCLNK

SEQ ID NO: 60476 - protein, 124 aa, Homo sapiens
VMSNTGNWMHIRYQSKLQARKALSKDGRIFGESIMIGVKPCIDKSVMESSDRCALSSPSLAFTPPIKTLGTPTQPGSTPRISTMRPLATAYKASTSDYQVISDRQTPKKDESLVSKAMEYMFGW

SEQ ID NO: 60477 - protein, 23 aa, Homo sapiens
ISIFSLYTTNQNSRYTNTTWKYS

SEQ ID NO: 60478 - protein, 291 aa, Homo sapiens
LVTNLRILWHSLALSRVNVSVGYNCILNITTRTANSKLRGQTEALYILTKCNSTRFEFIFTNLVPGSPRLFTSVMAVHRAYETSKMYRDFKLRSALIQNKQLRLLPQEHVYDKINGVWNLSSDQGNLGTFFITNVRIVWHANMNDSFNVSIPYLQIRSIKIRDSKFGLALVIESSQQSGGYVLGFKIDPVEKLQESVKEINSLHKVYSASPIFGVDYEMEEKPQPLEALTVEQIQDDVEIDSDGHTDAFVAYFADGNKQQDREPVFSEELGLAIEKLKDGFTLQGLWEVMS

SEQ ID NO: 60479 - protein, 30 aa, Homo sapiens
KTLFPVYRIGVIFENNWLMFKTEDCHDCLS

SEQ ID NO: 60480 - protein, 16 aa, Homo sapiens
LLLFVSLWRGFCGPEP

SEQ ID NO: 60481 - protein, 1084 aa, Homo sapiens
LLDLIPENPNPKSGIIPGSYSFESVLSAVADFKAPVFEPGGSMQQGMYTPKAEVWDQEFDPVMVILRTVYRRDVQSAMDRYTAFLKQSGKFPGNPWPPYKKRTSLHPSYKGLMRLLHCKTLHIVLFTLLYKILMDHQNLSEHVLCMVLYLIELGLENSAEEESDEEASVGGPERCHDSWFPGSNLVSNMRHFINYVRVRVPETAPEVKRDSPASTSSDNLGSLQNSGTAQVFSLVAERRKKFQEIINRSSSEANQVVRPKTSSKWSAPGSAPQLTTAILEIKESILSLLIKLHHKLSGKQNSYYPPWLDDIEILIQPEIPKYSHGDGITAVERILLKAASQSRMNKRIIEEICRKVTPPVPPKKVTAAEKKTLDKEERRQKARERQQKLLAEFASRQKSFMETAMDVDSPENDIPMEITTAEPQVSEAVYDCVICGQSGPSSEDRPTGLVVLLQASSVLGQCRDNVEPKKLPISEEEQIYPWDTCAAVHDVRLSLLQRYFKDSSCLLAVSIGWEGGVYVQTCGHTLHIDCHKSYMESLRNDQVLQGFSVDKGEFTCPLCRQFANSVLPCYPGSNVENNPWQRPSNKSIQDLIKEVEELQGRPGAFPSETNLSKEMESVMKDIKNTTQKKYRDYSKTPGSPDNDFLFMYSVARTNLELELIHRGGNLCSGGASTAGKRSCLNQLFHVLALHMRLYSIDSEYNPWRKLTQLEEMNPQLGYEEQQPEVPILYHDVTSLLLIQILMMPQPLRKDHFTCIVKVLFTLLYTQALAALSVKCSEEDRSAWKHAGALKKSTCDAEKSYEVLLSFVISELFKGKLYHEEGTQECAMVNPIAWSPESMEKCLQDFCLPFLRITSLLQHHLFGEDLPSCQEEEEFSVLASCLGLLPTFYQTEHPFISASCLDWPVPAFDIITQWCFEIKSFTERHAEQGKALLIQESKWKLPHLLQLPENYNTIFQYYHRKTCSVCTKVPKDPAVCLVCGTFVCLKGLCCKQQSYCECVLHSQNCGAGTGIFLLINASVIIIIRGHRFCLWGSVYLDAHGEEDRDLRRGKPLYICKERYKVLEQQWISHTFDHINKRWGPHYNGL

SEQ ID NO: 60482 - protein, 17 aa, Homo sapiens
MVCSWFSSTVNYSHFGN

SEQ ID NO: 60483 - protein, 118 aa, Homo sapiens
LRRYTRAEYESEAEGVMAGQAFRKFLPLFDRVLVERSAAETVTKGGIMLPEKSQGKVLQATVVAVGSGSKGKGGEIQPVSVKVGDKVLLPEYGGTKVVLDDKDYFLFRDGDILGKYVD

SEQ ID NO: 60484 - protein, 102 aa, Homo sapiens
VTKTKDGHEVRSCKVADKTGSITISVWDEIGGLIQPGDIIRLTRGYASMWKGCLTLYTGRGGELQKIGDLGAVQAAAMRDSIHYYPGNDLHPDLEEPSSLGV

SEQ ID NO: 60485 - protein, 477 aa, Homo sapiens
ISTDLFTYLCPALLYQIDSRLCIEHFDKLLVEDINKDKNLVPEDEANIGASAWICGIISITVISLLSLLGVILVPIINQGCFKFLLTFLVALAVGTMSGDALLHLLPHSQGGHDHSHQHAHGHGHSHGHESNKFLEEYDAVLKGLVALGGIYLLFIIEHCIRMFKHYKQQRGKQKWFMKQNTEESTIGRKLSDHKLNNTPDSDWLQLKPLAGTDDSVVSEDRLNETELTDLEGQQESPPKNYLCIEEEKIIDHSHSDGLHTIHEHDLHAAAHNHHGENKTVLRKHNHQWHHKHSHHSHGPCHSGSDLKETGIANIAWMVIMGDGIHNFSDGLAIGAAFSAGLTGGISTSIAVFCHELPHELGDFAVLLKAGMTVKQAIVYNLLSAMMAYIGMLIGTAVGQYANNITLWIFAVTAGMFLYVALVDMLPEMLHGDGDNEEHGFCPVGQFILQNLGLLFGFAIMLVIALYEDKIVFDIQF

SEQ ID NO: 60486 - protein, 401 aa, Homo sapiens
INQGCFKFLLTFLVALAVGTMSGDALLHLLPHSQGGHDHSHQHAHGHGHSHGHESNKFLEEYDAVLKGLVALGGIYLLFIIEHCIRMFKHYKQQRGKQKWFMKQNTEESTIGRKLSDHKLNNTPDSDWLQLKPLAGTDDSVVSEDRLNETELTDLEGQQESPPKNYLCIEEEKIIDHSHSDGLHTIHEHDLHAAAHNHHGENKTVLRKHNHQWHHKHSHHSHGPCHSGSDLKETGIANIAWMVIMGDGIHNFSDGLAIGAAFSAGLTGGISTSIAVFCHELPHELGDFAVLLKAGMTVKQAIVYNLLSAMMAYIGMLIGTAVGQYANNITLWIFAVTAGMFLYVALVDMLPEMLHGDGDNEEHGFCPVGQFILQNLGLLFGFAIMLVIALYEDKIVFDIQF

SEQ ID NO: 60487 - protein, 182 aa, Homo sapiens [sequence omitted]

SEQ ID NO: 60488 - protein, 264 aa, Homo sapiens
LDSTEINVPQDILGIWVDPIDSTYQYIKGSADIKSNQGIFPCGLQCVTILIGVYDIQTGVPLMGVINQPFVSRDPNTLRWKGQCYWGLSYMGTNMHSLQLTISRRNGSETHTGNTGSEAAFSPSFSAVISTSEKETIKAALSRVCGDRIFGAAGAGYKSLCVVQGLVDIYIFSEDTTFKWDSCAAHAILRAMGGGIVDLKECLERNPETGLDLPQLVYHVENEGAAGVDRWANKGGLIAYRSRKRLETFLSLLVQNLAPAETHT

SEQ ID NO: 60489 - protein, 253 aa, Homo sapiens
IFEMNDDDPHKEEEIRKYSAIYGRFDSKRKDGKHLTLHELTVNEAAAQLCVKDNALLTRRDELFALARQISREVTYKYTYRTTKSKCGERDELSPKRIKVEDGFPDFQDSVQTLFQQARAKSEELAALSSQQPEKVMAKQMEFLCNQAGYERLQHAERRLSAGLYRQSSEEHSPNGLTSDNSDGQGERPLNLRMPNLQNRQPHHFVVDGELSRLYPSEAKSHSSESLGILKDYPHSAFTLEKKVIKTEPEDSR

SEQ ID NO: 60490 - protein, 18 aa, Homo sapiens
LAVAPKLSPLACPGAVPG

SEQ ID NO: 60491 - protein, 238 aa, Homo sapiens
IPKVELQISIYGVKILEPKTKEVQHNCQLHRISFCADDKTDKRIFTFICKDSESNKHLCYVFDSEKCAEEITLTIGQAFDLAYRKFLESGGKDVETRKQIAGLQKRIQDLETENMELKNKVQDLENQLRITQVSAPPAGSMTPKSPSTDIFDMIPFSPISHQSSMPTRNGTQPPPVPSRSTEIKRDLFGAEPFDPFNCGAADFPPDIQSKLDEMQEGFKMGLTLEGTVFCLDPLDSRC

SEQ ID NO: 60492 - protein, 25 aa, Homo sapiens
VSLSMEAGTFFDPVKEEDLLFSKSE

SEQ ID NO: 60493 - protein, 1020 aa, Homo sapiens
LLVSTAAASQNQERLCAFKDPYQQDLGIGESRISHENGTILCSKGSTCYGLWEKSKGDINLVKQGCWSHIGDPQECHYEECVVTTTPPSIQNGTYRFCCCSTDLCNVNFTENFPPPDTTPLSPPHSFNRDETIIIALASVSVLAVLIVALCFGYRMLTGDRKQGLHSMNMMEAAASEPSLDLDNLKLLELIGRGRYGAVYKGSLDERPVAVKVFSFANRQNFINEKNIYRVPLMEHDNIARFIVGDERVTADGRMEYLLVMEYYPNGSLCKYLSLHTSDWVSSCRLAHSVTRGLAYLHTELPRGDHYKPAISHRDLNSRNVLVKNDGTCVISDFGLSMRLTGNRLVRPGEEDNAAISEVGTIRYMAPEVLEGAVNLRDCESALKQVDMYALGLIYWEIFMRCTDLFPGESVPEYQMAFQTEVGNHPTFEDMQVLVSREKQRPKFPEAWKENSLAVRSLKETIEDCWDQDAEARLTAQCAEERMAELMMIWERNKSVSPTVNPMSTAMQNERNLSHNRRVPKIGPYPDYSSSSYIEDSIHHTDSIVKNISSEHSMSSTPLTIGEKNRNSINYERQQAQARIPSPETSVTSLSTNTTTTNTTGLTPSTGMTTISEMPYPDETNLHTTNVAQSIGPTPVCLQLTEEDLETNKLDPKEVDKNLKESSDENLMEHSLKQFSGPDPLSSTSSSLLYPLIKLAVEATGQQDFTQTANGQACLIPDVLPTQIYPLPKQQNLPKRPTSLPLNTKNSTKEPRLKFGSKHKSNLKQVETGVAKMNTINAAEPHVVTVTMNGVAGRNHSVNSHAATTQYANGTVLSGQTTNIVTHRAQEMLQNQFIGEDTRLNINSSPDEHEPLLRREQQAGHDEGVLDRLVDRRERPLEGGRTNSNNNNSNPCSEQDVLAQGVPSTAADPGPSKPRRAQRPNSLDLSATNVLDGSSIQIGESTQDGKSGSGEKIKKRVKTPYSLKRWRPSTWVISTESLDCEVNNNGSNRAVHSKSSTAVYLAEGGTATTMVSKDIGMNCL

SEQ ID NO: 60494 - protein, 12 aa, Homo sapiens
INMLKSNAFACI

SEQ ID NO: 60495 - protein, 160 aa, Homo sapiens
TAAGDARDTADAVAAEGAYYLEQVTITEASEDDYEYEEIPDDNFSIPEGEEDLAKAIQMAQEQATDTEILERKTVLPSKHAVPEVIEDFLCNFLIKMGMTRTLDCFQSEWYELIQKGVTELRTVGNVPDVYTQIMLLENENKNLKKDLKHYKQAAEYVIF

SEQ ID NO: 60496 - protein, 89 aa, Homo sapiens
VARVHIGQVIMSIRTKLQNKEHVIEALRRAKFKLPGHQKIHISKKWGFTKFNADEFEDMVAEKWLIPDGCGVKYIPNRGPLDKWRALHS

SEQ ID NO: 60497 - protein, 5 aa, Homo sapiens
RDYSN

SEQ ID NO: 60498 - protein, 21 aa, Homo sapiens
RMESSINHISQVRPQYFPICL

SEQ ID NO: 60499 - protein, 939 aa, Homo sapiens
LERATFSKMDMFPLTWVFLALYFSRHQVRGQPDPPCGGRLNSKDAGYITSPGYPQDYPSHQNCEWIVYAPEPNQKIVLNFNPHFEIEKHDCKYDFIEIRDGDSESADLLGKHCGNIAPPTIISSGSMLYIKFTSDYARQGAGFSLRYEIFKTGSEDCSKNFTSPNGTIESPGFPEKYPHNLDCTFTILAKPKMEIILQFLIFDLEHDPLQVGEGDCKYDWLDIWDGIPHVGPLIGKYCGTKTPSELRSSTGILSLTFHTDMAVAKDGFSARYYLVHQEPLENFQCNVPLGMESGRIANEQISASSTYSDGRWTPQQSRLHGDDNGWTPNLDSNKEYLQVDLRFLTMLTAIATQGAISRETQNGYYVKSYKLEVSTNGEDWMVYRHGKNHKVFQANNDATEVVLNKLHAPLLTRFVRIRPQTWHSGIALRLELFGCRVTDAPCSNMLGMLSGLIADSQISASSTQEYLWSPSAARLVSSRSGWFPRIPQAQPGEEWLQVDLGTPKTVKGVIIQGARGGDSITAVEARAFVRKFKVSYSLNGKDWEYIQDPRTQQPKLFEGNMHYDTPDIRRFDPIPAQYVRVYPERWSPAGIGMRLEVLGCDWTDSKPTVETLGPTVKSEETTTPYPTEEEATECGENCSFEDDKDLQLPSGFNCNFDFLEEPCGWMYDHAKWLRTTWASSSSPNDRTFPDDRNFLRLQSDSQREGQYARLISPPVHLPRSPVCMEFQYQATGGRGVALQVVREASQESKLLWVIREDQGGEWKHGRIILPSYDMEYQIVFEGVIGKGRSGEIAIDDIRISTDVPLENCMEPISAFAGENFKVDIPEIHEREGYEDEIDDEYEVDWSNSSSATSGSGAPSTDKEKSWLYTLDPILITIIAMSSLGVLLGATCAGLLLYCTCSYSGLSSRSCTTLENYNFELYDGLKHKVKMNHQKCCSEA

SEQ ID NO: 60500 - protein, 109 aa, Homo sapiens
IKRHLKLSHIRLALGVGRTLESQVKVVALCAGSGSSVLQGVEADLYLTGEMSHHDTLDAASQGINVILCEHSNTERGFLSDLRDMLDSHLENKINIILSETDRDPLQVV

SEQ ID NO: 60501 - protein, 99 aa, Homo sapiens
LHSLVTAAALNGLFWLLSSSSLRPFFLLSVSLLAYFLLDLWQPRFLPDVSASSPEEPHSDRFTCRSCCSTRGRIQLSSAFESALAVLCWLCWDTMFQGL

SEQ ID NO: 60502 - protein, 34 aa, Homo sapiens
MRGQGLLDRVSCGVQRVSNQSILRIQRFRPSRPY

SEQ ID NO: 60503 - protein, 111 aa, Homo sapiens
KASHNRTRALQSHSSPEGKEEPEPLSPELEYIPRKRGKNPMKAVGLAWAIGFPCGILLFILTKREVDKDRVKQMKARQNMRLSNTGEYESQRFRASSQSAPSPDVGSGVQT

SEQ ID NO: 60504 - protein, 37 aa, Homo sapiens
ITAMCSITSRNQVSVSRSTHPTFFVPLFAHCQQNTSL

SEQ ID NO: 60505 - protein, 20 aa, Homo sapiens
MLFAKMDSWSEMILCMAFQI

SEQ ID NO: 60506 - protein, 13 aa, Homo sapiens
KEVFAIQETNGNS

SEQ ID NO: 60507 - protein, 30 aa, Homo sapiens
LGIQVQDIFEKNFRNIFAIQETSKNIIMFI

SEQ ID NO: 60508 - protein, 145 aa, Homo sapiens
LESMFKLYDAGRDGFIDLMELKLMMEKLGAPQTHLGLKSMIKEVDEDFDGKLSFREFLLIFHKAAAGELQEDSGLMALAKLSEIDVALEGVKGAKNFFEAKVQALSSASKFEAELKAEQDERKREEEERRLRQAAFQKLKANFNT

SEQ ID NO: 60509 - protein, 18 aa, Homo sapiens
IGDWHRTRMLLEKLMKSE

SEQ ID NO: 60510 - protein, 69 aa, Homo sapiens
LGCFWPNAEVDRFFLAVHGRYFRSCPISGRAVRDPPGSILYPFIVVPITVTLLVTALVVWQSKRTEGIV

SEQ ID NO: 60511 - protein, 216 aa, Homo sapiens
VNGHLESTQILLEAGADPNGSRHHRSTPVYHASRVGRADILKALIRYGADVDVNHHLTPDVQPRFSRRLTSLVVCPLYISAAYHNLQCFRLLLLAGANPDFNCNGPVNTQGFYRGSPGCVMDAVLRHGCEAAFVSLLVEFGANLNLVKWESLGPESRGRRKVDPEALQVFKEARSVPRTLLCLCRVAVRRALGKHRLHLIPSLPLPDPIKKFLLHE

SEQ ID NO: 60512 - protein, 8 aa, Homo sapiens
MPPRSVFA

SEQ ID NO: 60513 - protein, 24 aa, Homo sapiens
ISQVLEAPGVYVFGELLELANVQE

SEQ ID NO: 60514 - protein, 363 aa, Homo sapiens
TMDLHLFDYSEPGNFSDISWPCNSSDCIVVDTVMCPNMPNKSVLLYTLSFIYIFIFVIGMIANSVVVWVNIQAKTTGYDTHCYILNLAIADLWVVLTIPVWVVSLVQHNQWPMGELTCKVTHLIFSINLFGSIFFLTCMSVDRYLSITYFTNTPSSRKKMVRRVVCILVWLLAFCVSLPDTYYLKTVTSASNNETYCRSFYPEHSIKEWLIGMELVSVVLGFAVPFSIIAVFYFLLARAISASSDQEKHSSRKIIFSYVVVFLVCWLPYHVAVLLDIFSILHYIPFTCRLEHALFTALHVTQCLSLVHCCVNPVLYSFINRNYRYELMKAFIFKYSAKTGLTKLIDASRVSETEYSALEQSTK

SEQ ID NO: 60515 - protein, 610 aa, Homo sapiens
LLSPPPRPPPPLDREPRAPGPWLCPSRAGTAQDPARIRERRGRVAGGAAGPAMELRARGWWLLCAAAALVACARGDPASKSRSCGEVRQIYGAKGFSLSDVPQAEISGEHLRICPQGYTCCTSEMEENLANRSHAELETALRDSSRVLQAMLATQLRSFDDHFQHLLNDSERTLQATFPGAFGELYTQNARAFRDLYSELRLYYRGANLHLEETLAEFWARLLERLFKQLHPQLLLPDDYLDCLGKQAEALRPFGEAPRELRLRATRAFVAARSFVQGLGVASDVVRKVAQVPLGPECSRAVMKLVYCAHCLGVPGARPCPDYCRNVLKGCLANQADLDAEWRNLLDSMVLITDKFWGTSGVESVIGSVHTWLAEAINALQDNRDTLTAKVIQGCGNPKVNPQGPGPEEKRRRGKLAPRERPPSGTLEKLVSEAKAQLRDVQDFWISLPGTLCSEKMALSTASDDRCWNGMARGRYLPEVMGDGLANQINNPEVEVDITKPDMTIRQQIMQLKIMTNRLRSAYNGNDVDFQDASDDGSGSGSGDGCLDDLCSRKVSRKSSSSRTPLTHALPGLSEQEGQKTSAASCPQPPTFLLPLLLFLALTVARPRWR

SEQ ID NO: 60516 - protein, 76 aa, Homo sapiens
TCKEAGGEYHCSCPYRFTGRHCEIGKPDSCASGPCHNGGTCFHYIGKYKCDCPPGFSGRHCEIGKVGGRPGQGGQG

SEQ ID NO: 60517 - protein, 12 aa, Homo sapiens
LDNTMEIFDIEV

SEQ ID NO: 60518 - protein, 90 aa, Homo sapiens
VVSLYAVAAGLAVDCVRQAQPAMVHALVDCLGEFVRKTLATWLRRRGGWTDVLKCVVSTDPGLRSHWLVAALCSFGRFLKAAFFVLLPER

SEQ ID NO: 60519 - protein, 39 aa, Homo sapiens
TTWRARIAWTSRYQRSSWDTWIPWYERTQRLRWTKWRKG

SEQ ID NO: 60520 - protein, 26 aa, Homo sapiens
RRPSWSCRTPWRFWTCWSSWSPRCQR

SEQ ID NO: 60521 - protein, 32 aa, Homo sapiens
RPPRATRPSWTSWCPWSLLWWCWSRCHCWDWR

SEQ ID NO: 60522 - protein, 48 aa, Homo sapiens
IKVKMQASIEKGGSLPKVESKFINYVNNGFWITDQEAIQDLWQWRKSL

SEQ ID NO: 60523 - protein, 31 aa, Homo sapiens
RRYSLAYCYSWKEPETGRTAFKKSQRWAITL

SEQ ID NO: 60524 - protein, 814 aa, Homo sapiens
VVPFVLAPRPPDDPGFGPHQRLEKLDSLLSDYDILSLSNIQQHSVRKRDLQTSTHVETLLTFSALKRHFKLYLTSSTERFSQNFKVVVVDGKNESEYTVKWQDFFTGHVVGEPDSRVLAHIRDDDVIIRINTDGAEYNIEPLWRFVNDTKDKRMLVYKSEDIKNVSRLQSPKVCGYLKVDNEELLPKGLVDREPPEELVHRVKRRADPDPMKNTCKLLVVADHRFYRYMGRGEESTTTNYLIELIDRVDDIYRNTSWDNAGFKGYGIQIEQIRILKSPQEVKPGEKHYNMAKSYPNEEKDAWDVKMLLEQFSFDIAEEASKVCLAHLFTYQDFDMGTLGLAYVGSPRANSHGGVCPKAYYSPVGKKNIYLNSGLTSTKNYGKTILTKEADLVTTHELGHNFGAEHDPDGLAECAPNEDQGGKYVMYPIAVSGDHENNKMFSNCSKQSIYKTIESKAQECFQERSNKVCGNSRVDEGEECDPGIMYLNNDTCCNSDCTLKEGVQCSDRNSPCCKNCQFETAQKKCQEAINATCKGVSYCTGNSSECPPPGNAEDDTVCLDLGKCKDGKCIPFCEREQQLESCACNETDNSCKVCCRDLSGRCVPYVDAEQKNLFLRKGKPCTVGFCDMNGKCEKRVQDVIERFWDFIDQLSINTFGKFLADNIVGSVLVFSLIFWIPFSILVHCVDKKLDKQYESLSLFHPSNVEMLSSMDSASVRIIKPFPAPQTPGRLQPAPVIPSAPAAPKLDHQRMDTIQEDPSTDSHMDEDGFEKDPFPNSSTAAKSFEDLTDHPVTRSEKAASFKLQRQNRVDSKETEC

SEQ ID NO: 60525 - protein, 92 aa, Homo sapiens
TVNDSNCDQELLSLLLDAKLLVKCVSTPFYPRIVDHLLASLQQGRWDAEELGRHLREAGHEAEAGSLLLAVRGTHQAFRTFSTALRAAQHWV

SEQ ID NO: 60526 - protein, 371 aa, Homo sapiens
ISEIRELENIEEHQSVDIATLEDEAQENKSKMKMVEEHMEQQKENMEHLKSLKIEAENKYDAIKFKINQLSELADPLKDELNLADSEVDNQKRGKRHYEEKQKEHLDTLNKKKRELDMKEKELEEKMSQARQICPERIEVEKSASILDKEINRLRQKIQAEHASHGDREEIMRQYQEARETYLDLDSKVRTLKKFIKLLGEIMEHRFKTYQQFRRCLTLRCKLYFDNLLSQRAYCGKMNFDHKNETLSISVQPGEGNKAAFNDMRALSGGERSFSTVCFILSLWSIAESPFRCLDEFDVYMDMVNRRIAMDLILKMADSQRFRQFILLTPQSMSSLPSSKLIRILRMSDPERGQTTLPFRPVTQEEDDDQR

SEQ ID NO: 60527 - protein, 74 aa, Homo sapiens
MSAEHRWTGFLLPDLRSLPQRMRPGPLSGNLQARKFQKGMKINMDKNRRRKPASDSVSHWMEMDMKAQSRMQST

SEQ ID NO: 60528 - protein, 42 aa, Homo sapiens
KDFPEGDIRLCEKNIPHAFITHFNQEMADMIADSLKDDLSKM

SEQ ID NO: 60529 - protein, 223 aa, Homo sapiens
LDLASLRSVRAFCQEMLQEEPRLDVLINNAGIFQCPYMKTEDGFEMQFGVNHLGHFLLTNLLLGLLKSSAPSRIVVVSSKLYKYGDINFDDLNSEQSYNKSFCYSRSKLANILFTRELARRLEGTNVTVNVLHPGIVRTNLGRHIHIPLLVKPLFNLVSWAFFKTPVEGAQTSIYLASSPEVEGVSGRYFGDCKEEELLPKAMDESVARKLWDISEVMVGLLK

SEQ ID NO: 60530 - protein, 335 aa, Homo sapiens
RNNMLAVHFDKPGGPENLYVKEVAKPSPGEGEVLLKVAASALNRADLMQRQGQYDPPPGASNILGLEASGHVAELGPGCQGHWKIGDTAMALLPGGGQAQYVTVPEGLLMPIPEGLTLTQAAAIPEAWLTAFQLLHLVGNVQAGDYVLIHAGLSGVGTAAIQLTRMAGAIPLVTAGSQKKLQMAEKLGAAAGFNYKKEDFSEATLKFTKGAGVNLILDCIGGSYWEKNVNCLALDGRWVLYGLMGGGDINGPLFSKLLFKRGSLITSLLRSRDNKYKQMLVNAFTEQILPHFSTEGPQRLLPVLDRIYPVTEIQEAHKYMEANKNIGKIVLELPQ

SEQ ID NO: 60531 - protein, 200 aa, Homo sapiens
KPSPGEGEVLLKVAASALNRADLMQRQGQYDPPPGASNILGLEASGHVAELGPGCQGHWKIGDTAMALLPGGGQAQYVTVPEGLLMPIPEGLTLTQAAAIPEAWLTAFQLLHLVGNVQAGDYVLIHAGLSGVGTAAIQLTRMAGAIPLVTAGSQKKLQMAEKLGAAAGFNYKKEDFSEATLKFTKGKQLLLQFSRNLRDD

SEQ ID NO: 60532 - protein, 36 aa, Homo sapiens
RDTGRSGTQPWLCSPVGARLSTSLSPKGSSCLSQRD

SEQ ID NO: 60533 - protein, 325 aa, Homo sapiens
LRFQAHQQQGNKAEKAGSKEQGPRQRKGAAPAEKKCGAETQHEGLELRVENLQAVQTDFSSDPLQKVVCFNHDNTLLATGGTDGYVRVWKVPSLEKVLEFKAHEGEIEDLALGPDGKLVTVGRDLKASVWQKDQLVTQLHWQENGPTFSSTPYRYQACRFGQVPDQPAGLRLFTVQIPHKRLRQPPPCYLTAWDGSNFLPLRTKSCGHEVVSCLDVSESGTFLGLGTVTGSVAIYIAFSLQCLYYVREAHGIVVTDVAFLPEKGRGPELLGSHETALFSVAVDSRCQLHLLPSRRSVPVWLLLLLCVGLIIVTILLLQSAFPGFL

SEQ ID NO: 60534 - protein, 791 aa, Homo sapiens
VACRAIGILSRFSAFRILRSRGYICRNFTGSSALLTRTHINYGVKGDVAVVRINSPNSKVNTLSKELHSEFSEVMNEIWASDQIRSAVLISSKPGCFIAGADINMLAACKTLQEVTQLSQEAQRIVEKLEKSTKPIVAAINGSCLGGGLEVAISCQYRIATKDRKTVLGTPEVLLGALPGAGGTQRLPKMVGVPAALDMMLTGRSIRADRAKKMGLVDQLVEPLGPGLKPPEERTIEYLEEVAITFAKGLADKKISPKRDKGLVEKLTAYAMTIPFVRQQVYKKVEEKVRKQTKGLYPAPLKIIDVVKTGIEQGSDAGYLCESQKFGELVMTKESKALMGLYHGQVLCKKNKFGAPQKDVKHLAILGAGLMGAGIAQVSVDKGLKTILKDATLTALDRGQQQVFKGLNDKVKKKALTSFERDSIFSNLTGQLDYQGFEKADMVIEAVFEDLSLKHRVLKEVEAVIPDHCIFASNTSALPISEIAAVSKRPEKVIGMHYFSPVDKMQLLEIITTEKTSKDTSASAVAVGLKQGKVIIVVKDGPGFYTTRCLAPMMSEVIRILQEGVDPKKLDSLTTSFGFPVGAATLVDEVGVDVAKHVAEDLGKVFGERFGGGNPELLTQMVSKGFLGRKSGKGFYIYQEGVKRKDLNSDMDSILASLKLPPKSEVSSDEDIQFRLVTRFVNEAVMCLQEGILATPAEGDIGAVFGLGFPPCLGGWSRRLGRKLTLAWSPCCVSFNEVLFLYSGPFRFVDLYGAQKIVDRLKKYEAAYGKQFTPCQLLADHANSPNKKFYQ

SEQ ID NO: 60535 - protein, 23 aa, Homo sapiens
LVGKDPGLEQCCAAPCRSPASMR

SEQ ID NO: 60536 - protein, 152 aa, Homo sapiens
IPYQDSPEGPDHSSASSGVPNPPKARTYTETVNHHYLLFQDTDLGSFHDLLRREPMLRMQEGEGHSQLCLDRLQLEAIHKVRFSPNLDSYGWLVSGGQSGLVRIHFVRGLASPLGHRMQLESRAHFNAMFQPSSPTRRPGFSPTSHRLLPTP

SEQ ID NO: 60537 - protein, 83 aa, Homo sapiens
LDRLQLEAIHKVRFSPNLDSYGWLVSGGQSGLVRIHFVRGLASPLGHRMQLESRAHFNAMFQPSSPTRRPGFSPTSHRLLPTP

SEQ ID NO: 60538 - protein, 24 aa, Homo sapiens
KNFAKYFLHQSHEEREHAEKLMKL

SEQ ID NO: 60539 - protein, 298 aa, Homo sapiens
KMSNRVVCREASHAGSWYTASGPQLNAQLEGWLSQVQSTKRPARAIIAPHAGYTYCGSCAAHAYKQVDPSITRRIFILGPSHHVPLSRCALSSVDIYRTPLYDLRIDQKIYGELWKTGMFERMSLQTDEDEHSIEMHLPYTAKAMESHKDEFTIIPVLVGALSESKEQEFGKLFSKYLADPSNLFVVSSDFCHWGQRFRYSYYDESQGEIYRSIEHLDKMGMSIIEQLDPVSFSNYLKKYHNTICGRHPIGVLLNAITELQKNGMNMSFSFLNYAQSSQCRNWQDSSVSYAAGALTVH

SEQ ID NO: 60540 - protein, 612 aa, Homo sapiens
VGYTDTILDVKSKRVRALLGFSSDVTDREDDKNQDSVVNGTEAEVKETAMIAKSELTDSASVLDNFKFLESAAADFSDEDEDDDVDGREKSVIDTSTIVRKKALPDSGEDRDTKEALKEFDFLVTSEEGDNESRSAGDGTDWEKEDQCLMPEAWNVDQGVITKLKEQYKKERKGKKGVKRPNRSKLQDMLANLRDVDELPSLQPSVGSPSRPSSSRLPEHEINRADEVEALTFPPSSGKSFIMGADEALESELGLGELAGLTVANEADSLTYDIANNKDALRKTWNPKFTLRSHFDGIRALAFHPIEPVLITASEDHTLKMWNLQKTAPAKKSTSLDVEPIYTFRAHKGPVLCVVMSSNGEQCYSGGTDGLIQGWNTTNPNIDPYDSYDPSVLRGPLLGHTDAVWGLAYSAAHQRLLSCSADGTLRLWNTTEVAPALSVFNDTKELGIPASVDLVSSDPSHMVASFSKGYTSIFNMETQQRILTLESNVDTTANSSCQINRVISHPTLPISITAHEDRHIKFYDNNTGKLIHSMVAHLEAVTSLAVDPNGLYLMSGSHDCSIRLWNLESKTCIQEFTAHRKKFEESIHDVAFHPSKCYIASAGADALAKVFV

SEQ ID NO: 60541 - protein, 513 aa, Homo sapiens
RRFTFQVIIDGREFPEGEGRSKKEAKNAAAKLAVEILNKEKKAVSPLLLTTTNSSEGLSMGNYIGLINRIAQKKRLTVNYEQCASGVHGPEGFHYKCKMGQKEYSIGTGSTKQEAKQLAAKLAYLQILSEETSVKSDYLSSGSFATTCESQSNSLVTSTLASESSSEGDFSADTSEINSNSDSLNSSSLLMNGLRNNQRKAKRSLAPRFDLPDMKETKYTVDKRFGMDFKEIELIGSGGFGQVFKAKHRIDGKTYVIKRVKYNNEKAEREVKALAKLDHVNIVHYNGCWDGFDYDPETSDDSLESSDYDPENSKNSSRSKTKCLFIQMEFCDKGTLEQWIEKRRGEKLDKVLALELFEQITKGVDYIHSKKLIHRDLKPSNIFLVDTKQVKIGDFGLVTSLKNDGKRTRSKGTLRYMSPEQISSQDYGKEVDLYALGLILAELLHVCDTAFETSKFFTDLRDGIISDIFDKKEKTLLQKLLSKKPEDRPNTSEILRTLTVWKKSPEKNERHTC

SEQ ID NO: 60542 - protein, 309 aa, Homo sapiens
RRAALWLWLCALALSLQPALPQIVATNLPPEDQDGSGDDSDNFSGSGAGALQDITLSQQTPSTWKDTQLLTAIPTSPEPTGLEATAASTSTLPAGEGPKEGEAVVLPEVEPGLTAREQEATPRPRETTQLPTTHLASTTTATTAQEPATSHPHRDMQPGHHETSTPAGPSQADLHTPHTEDGGPSATERAAEDGASSQLPAAEGSGEQDFTFETSGENTAVVAVEPDRRNQSPVDQGATGASQGLLDRKEVLGGVIAGGLVGLIFAVCLVGFMLYRMKKKDEGSYSLEEPKQANGGAYQKPTKQEEFYA

SEQ ID NO: 60543 - protein, 42 aa, Homo sapiens
KSILAEYKIHNADVTLRSDATADDLIDVVEGNRVYIPCIYVK

SEQ ID NO: 60544 - protein, 11 aa, Homo sapiens
ILNKEMMMILK

SEQ ID NO: 60545 - protein, 617 aa, Homo sapiens
VVGPGARTGLGAPVRLMAPTPVLISSAAAQAAAAAAAGGTASSLTGSTNGLFRPIGTQPPQQQQQQPSTNLQSNSFYGSSSLTNSSQSSSLFSHGPGQPGSTSLGFGSGNSLGAAIGSALSGFGSSVGSSASSSATRRESLSTSSDLYKRSSSSLAPIGQPFYNSLGFSSSPSPIGMPLPSQTPGHSLTPPPSLSSHGSSSSLHLGGLTNGSGRYISAAPGAEAKYRSASSTSSLFSSSSQLFPPSRLRYNRSDIMPSGRSRLLEDFRNNRFPNLQLRDLIGHIVEFSQDQHGSRFIQQKLERATPAERQMVFNEILQAAYQLMTDVFGNYVIQKFFEFGSLDQKLALATRIRGHVLPLALQMYGCRVIQKALESISSDQQSEMVKELDGHVLKCVKDQNGNHVVQKCIECVQPQSLQFIIDAFKGQVFVLSTHPYGCRVIQRILEHCTAEQTLPILEELHQHTEQLVQDQYGNYVIQHVLEHGRPEDKSKIVSEIRGKVLALSQHKFASNVVEKCVTHASRAERALLIDEVCCQNDGPHSALYTMMKDQYANYVVQKMIDMAEPAQRKIIMHKIRPHITTLRKYTYGKHILAKLEKYYLKNSPDLGPIGGPPNGML

SEQ ID NO: 60546 - protein, 163 aa, Homo sapiens
LFRALWRSLSREVKEHVGTDQFGNKYYYILQNKNWRGQTIQEKRIVEAANKKEVDYETGDIPTEWEAWIRRTRKTPPTMEEILKNEKHREEIKIKSQDFYEKEKLLSKETSEELLPPPVQTQIKGRASAPYFGKEKPSVAPSSTGKTFQPGSWMPRDGKSHNE

SEQ ID NO: 60547 - protein, 29 aa, Homo sapiens
LGSSAAAGLSWLWSRLDDVTGSLGSLTWP

SEQ ID NO: 60548 - protein, 240 aa, Homo sapiens
KKGKKFKLRDILSPDMISPPLGDFRHTIHIGKEGQHDVFGDISFLQGNYELLPGNQEKAHLGQFPGHNEFFRANSTSDSVFTETPSPVLKNAISLPTIGGSQALMLPLLSPVTFNSKQESFGPAKLPRLSCEPVMEEKAQEKSSLLENGTVHQGDTSWGSSGSASQSSQGRDSHSSSLSEQYPDWPAEDMFDHPTPCELIKGKTKSEESLSDLTGSLLSLQLDLGPSLLDEVLNVMDKNK

SEQ ID NO: 60549 - protein, 500 aa, Homo sapiens
LLQEHIRDLNIVVVSVAGAFRKGKSFLLDFMLRYMYNKDSQSWIGGNNEPLTGFTWRGGCERETTGIQVWNEVFVIDRPNGTKVAVLLMDTQGAFDSQSTIKDCATVFALSTMTSSVQVYNLSQNIQEDDLQHLQLFTEYGRLAMEEIYQKPFQTLMFLIRDWSYPYEHSYGLEGGKQFLEKRLQVKQNQHEELQNVRKHIHNCFSNLGCFLLPHPGLKVATNPSFDGRLKDIDEDFKRELRNLVPLLLAPENLVEKEISGSKVTCRDLVEYFKAYIKIYQGEELPHPKSMLQATAEANNLAAVAGARDTYCKSMEQVCGGDKPYIAPSDLERKHLDLKEVAIKQFRSVKKMGGDEFCRRYQDQLEAEIEETYANFIKHNDGKNIFYAARTPATLFAVMFAMYIISGLTGFIGLNSIAVLCNLVMGLALIFLCTWAYVKYSGEFREIGTVIDQIAETLWEQVLKPLGDNLMEENIRQSVTNSIKAGLTDQVSHHARLKTD

SEQ ID NO: 60550 - protein, 511 aa, Homo sapiens
IDYSAEEGENRREATPRGGGDGGGGGRSFSQPEAGGSHHKVSVSPVVHVRGLCESVVEADLVEALEKFGTICYVMMMPFKRQALVEFENIDSAKECVTFAADEPVYIAGQQAFFNYSTSKRITRPGNTDDPSGGNKVLLLSIQNPLYPITVDVLYTVCNPVGKVQRIVIFKRNGIQAMVEFESVLCAQKAKAALNGADIYAGCCTLKIEYARPTRLNVIRNDNDSWDYTKPYLGRRDRGKGRQRQAILGEHPSSFRHDGYGSHGPLLPLPSRYRMGSRDTPELVAYPLPQASSSYMHGGNPSGSVVMVSGLHQLKMNCSRVFNLFCLYGNIEKVKFMKTIPGTALVEMGDEYAVERAVTHLNNVKLFGKRLNVCVSKQHSVVPSQIFELEDGTSSYKDFAMSKNNRFTSAGQASKNIIQPPSCVLHYYNVPLCVTEETFTKLCNDHEVLTFIKYKVFDAKPSAKTLSGLLEWECKTDAVEALTALNHYQIRVPNGSNPYTLKLCFSTSSHL

SEQ ID NO: 60551 - protein, 5 aa, Homo sapiens
LHTKN

SEQ ID NO: 60552 - protein, 1033 aa, Homo sapiens
TPFLSFSRSARLSAFVPRGRPARRLRPSPCVRPSRPASLGLRLSTRAFLRTRGPARPLRPQRLPFPSPPLLPPPSPTLPTPFSCPEARCACACVCPSANAATSARQMNSVRAANRRPRRVSRPRPVQQQQQQPPQQPPPQPPQQQPPQQQPPPPPQQQQQQQPPPPPPPPPPLPQERNNVGERDDDVPADMVAEESGPGAQNSPYQLRRKTLLPKRTACPTKNSMEGASTSTTENFGHRAKRARVSGKSQDLSAAPAEQYLQEKLPDEVVLKIFSYLLEQDLCRAACVCKRFSELANDPILWKRLYMEVFEYTRPMMHPEPGKFYQINPEEYEHPNPWKESFQQLYKGAHVKPGFAEHFYSNPARYKGRENMLYYDTIEDALGGVQEAHFDGLIFVHSGIYTDEWIYIESPITMIGAAPGKVADKVIIENTRDSTFVFMEGSEDAYVGYMTIRFNPDDKSAQHHNAHHCLEITVNCSPIIDHCIIRSTCTVGSAVCVSGQGACPTIKHCNISDCENVGLYITDHAQGIYEDNEISNNALAGIWVKNHGNPIIRRNHIHHGRDVGVFTFDHGMGYFESCNIHRNRIAGFEVKAYANPTVVRCEIHHGQTGGIYVHEKGRGQFIENKIYANNFAGVWITSNSDPTIRGNSIFNGNQGGVYIFGDGRGLIEGNDIYGNALAGIQIRTNSCPIVRHNKIHDGQHGGIYVHEKGQGVIEENEVYSNTLAGVWVTTGSTPVLRRNRIHSGKQVGVYFYDNGHGVLEDNDIYNHMYSGVQIRTGSNPKIRRNKIWGGQNGGILVYNSGLGCIEDNEIFDNAMAGVWIKTDSNPTLRRNKIHDGRDGGICIFNGGRGLLEENDIFRNAQAGVLISTNSHPILRKNRIFDGFAAGIEITNHATATLEGNQIFNNRFGGLFLASGVNVTMKDNKIMNNQDAIEKAVSRGQCLYKISSYTSYPMHDFYRCHTCNTTDRNAICVNCIKKCHQGHDVEFIRHDRFFCDCGAGTLSNPCTLAGEPTHDTDTLYDSAPPIESNTLQHN

SEQ ID NO: 60553 - protein, 87 aa, Homo sapiens
MMMCLQIWLQKNQVLVHKIVHTNFVEKLFCRKEQRVPQRTVWRAPQLQLQKTLVIVQNVQECLENHKIYQQHLLNSIFRRNCQMKWF

SEQ ID NO: 60554 - protein, 516 aa, Homo sapiens
TPPQGLLPTSRPAAPATAGSRNMSTTLLSAFYDVDFLCKTEKSLANLNLNNMLDKKAVGTPVAAAPSSGFAPGFLRRHSASNLHALAHPAPSPGSCSPKFPGAANGSSCGSAAAGGPTSYGTLKEPSGGGGTALLNKENKFRDRSFSENGDRSQHLLHLQQQQKGGGGSQINSTRYKTELCRPFEESGTCKYGEKCQFAHGFHELRSLTRHPKYKTELCRTFHTIGFCPYGPRCHFIHNADERRPAPSGGASGDLRAFGTRDALHLGFPREPRPKLHHSLSFSGFPSGHHQPPGGLESPLLLDSPTSRTPPPPSCSSASSCSSSASSCSSASAASTPSGAPTCCASAAAAAAAALLYGTGGAEDLLAPGAPCAACSSASCANNAFAFGPELSSLITPLAIQTHNFAAVAAAAYYRSQQQQQQQGLAPPAQPPAPPSATLPAGAAAPPSPPFSFQLPRRLSDSPVFDAPPSPPDSLSDRDSYLSGSLSSGSLSGSESPSLDPGRRLPIFSRLSISDD

SEQ ID NO: 60555 - protein, 350 aa, Homo sapiens
VIDYYLPKLLSYSPESLQYMVKILQTSIDAKTGQEQSFPSLGSCNSRGALGALMACLRIARAHGHLQSATDTWENLVSDARIKQGLIHQHCQVRIDTLGLLCESNRSTEIVSMEEMQWIQFFITYNLNSQSPGVRQQICSLLKKLFCRIQESSQVLYKLEQSKSKREPENELTKQHPSVSLQQYKNFMSSICNSLFEALFPGSSYSTRFSALTILGSIAEVFHVPEGRIYTVYQLSHDIDVGRFQTLMECFTSTFEDVKILAFDLLMKLSKTAVHFQDSGKLQGLFQAALELSTSTKPYDCVTASYLLNFLIWQDALPSSLSAYLTQQVACDNGDRPAAVVERNTLMGLY

SEQ ID NO: 60556 - protein, 148 aa, Homo sapiens
ILMTMRSLLRTPFLCGLLWAFCAPGARAEEPAASFSQPGSMGLDKNTVHDQEHIMEHLEGVINKPEAEMSPQELQLHYFKMHDYDGNNLLDGLELSTAITHVHKEEGSEQAPLMSEDELINIIDGVLRDDDKNNDGYIDYAEFAKSLQ

SEQ ID NO: 60557 - protein, 10 aa, Homo sapiens
ITLKMSGRKH

SEQ ID NO: 60558 - protein, 177 aa, Homo sapiens
KTGVVFGASLFLLLSLTVFSIVSVTAYIALALLSVTISFRIYKGVIQAIQKSDEGHPFRAYLESEVAISEELVQKYSNSALGHVNCTIKELRRLFLVDDLVDSLKFAVLMWVFTYVGALFNGLTLLILALISLFSVPVIYERHQAQIDHYLGLANKNVKDAMAKIQAKIPGLKRKAE

SEQ ID NO: 60559 - protein, 6 aa, Homo sapiens
MHLIPA

SEQ ID NO: 60560 - protein, 8 aa, Homo sapiens
LISTYFHV

SEQ ID NO: 60561 - protein, 19 aa, Homo sapiens
MINSGQNTENPQLSEGTGE

SEQ ID NO: 60562 - protein, 293 aa, Homo sapiens
VSPCDGPSKVSYTLQRQTIFNISLMKLYNHRPLTEPSLQKTVLINNMLRRIQEELKQEGSLRPMFTPSSQPTTEPSDSYREAPPAFSHLASPSSHPCDLGSTTPLEACLTPASLLEDDDDTFCTSQAMQPTAPTKLSPPALLPEKDSFSSALDEIEELCPTSTSTEAATAATDSVKGTSSEAGTQKLDGPQESRADDSKLMDSLPGNFEITTSTGFLTDLTLDDILFADIDTSMYDFDPCTSSSGTASKMAPVSADDLLKTLAPYSSQPVTPSQPFKMDLTELDHIMEVLVGS

SEQ ID NO: 60563 - protein, 79 aa, Homo sapiens
LLTSPNDPCCRKMSRGTIPAMKRECQYNSHKGSSCGPQTKNHCITSADCIGEKGAGTEKPEINHLSFLEKRMLRLSRFG

SEQ ID NO: 60564 - protein, 42 aa, Homo sapiens
INSPFGGGRVCVCVCVCVCVGGSVPEIVNIIELFLPFSCPFF

SEQ ID NO: 60565 - protein, 39 aa, Homo sapiens
LPKKQKQNRPIPQWIRMKTGNKIRYNSKRRHWRRTKLGL

SEQ ID NO: 60566 - protein, 150 aa, Homo sapiens
VRYFSKSAIMAGEEINEDYPVEIHEYLSAFENSIGAVDEMLKTMMSVSRNELLQKLDPLEQAKVDLVSAYTLNSMFWVYLATQGVNPKEHPVKQELERIRVYMNRVKEITDKKKAGKLDRGAASRFVKNALWEPKSKNASKVANKGKSKS

SEQ ID NO: 60567 - protein, 719 aa, Homo sapiens
VSAPPRPPSPQIAHRSSCVHPRSRQPLAPGLAGRVSGIMCGIFAYLNYHVPRTRREILETLIKGLQRLEYRGYDSAGVGFDGGNDKDWEANACKIQLIKKKGKVKALDEEVHKQQDMDLDIEFDVHLGIAHTRWATHGEPSPVNSHPQRSDKNNEFIVIHNGIITNYKDLKKFLESKGYDFESETDTETIAKLVKYMYDNRESQDTSFTTLVERVIQQLEGAFALVFKSVHFPGQAVGTRRGSPLLIGVRSEHKLSTDHIPILYRTGKDKKGSCNLSRVDSTTCLFPVEEKAVEYYFASDASAVIEHTNRVIFLEDDDVAAVVDGRLSIHRIKRTAGDHPGRAVQTLQMELQQIMKGNFSSFMQKEIFEQPESVVNTMRGRVNFDDYTVNLGGLKDHIKEIQRCRRLILIACGTSYHAGVATRQVLEELTELPVMVELASDFLDRNTPVFRDDVCFFLSQSGETADTLMGLRYCKERGALTVGITNTVGSSISRETDCGVHINAGPEIGVASTKAYTSQFVSLVMFALMMCDDRISMQERRKEIMLGLKRLPDLIKEVLSMDDEIQKLATELYHQKSVLIMGRGYHYATCLEGALKIKEITYMHSEGILAGELKHGPLALVDKLMPVIMIIMRDHTYAKCQNALQQVVARQGRPVVICDKEDTETIKNTKRTIKVPHSVDCLQGILSVIPLQLLAFHLAVLRGYDVDFPRNLAKSVTVE

SEQ ID NO: 60568 - protein, 235 aa, Homo sapiens
RRFCHMLKNPYTIKKQPLHQFVQRPLFPLPAAFYHPVRYMFIQTQDTPNPNSLKFIPGKPVLETRTMDFPTPAAAFRSPLARQLFRIEGVKSVFFGPDFITVTKENEELDWNLLKPDIYATIMDFFASGLPLVTEETPSGEAGSEEDDEVVAMIKELLDTRIRPTVQEDGGDVIYKGFEDGIVQLKLQGSCTSCPSSIITLKNGIQNMLQFYIPEVEGVEQVMDDESDEKEANSP

SEQ ID NO: 60569 - protein, 32 aa, Homo sapiens
MKCLIQGHTMSGMDLQISLLVRRGLVTQWLRM

SEQ ID NO: 60570 - protein, 195 aa, Homo sapiens
KPRMGLFHHHHQGLSRSELGRRSSLGEKGGPILGASPHHSSSGEEKAKSSWFGLREAKDPTQKPSPHPVKPLSAAPVEGSPDRKQSRSSLSIALSSGLEKLKTVTSGSIQPVTQAPQAGQMVDTKRLKDSAVLDQSAKYYHLTHDELISLLLQRERELSQRDEHVQELESYIDRLLVRIMETSPTLLQIPPGPPK

SEQ ID NO: 60571 - protein, 68 aa, Homo sapiens
KDSAVLDQSAKYYHLTHDELISLLLQRERELSQRDEHVQELESYIDRLLVRIMETSPTLLQIPPGPPK

SEQ ID NO: 60572 - protein, 794 aa, Homo sapiens
VALAVVVLSLALGMSGRWVLAWYRARRAVTLHSAPPVLPADSSSPAVAPDLFWGTYRPHVYFGMKTRSPKPLLTGLMWAQQGTTPGTPKLRHTCEQGDGVGPYGWEFHDGLSFGRQHIQDGALRLTTEFVKRPGGQHGGDWSWRVTVEPQDSGTSALPLVSLFFYVVTDGKEVLLPEVGAKGQLKFISGHTSELGDFRFTLLPPTSPGDTAPKYGSYNVFWTSNPGLPLLTEMVKSRLNSWFQHRPPGAPPERYLGLPGSLKWEDRGPSGQGQGQFLIQQVTLKIPISIEFVFESGSAQAGGNQALPRLAGSLLTQALESHAEGFRERFEKTFQLKEKGLSSGEQVLGQAALSGLLGGIGYFYGQGLVLPDIGVEGSEQKVDPALFPPVPLFTAVPSRSFFPRGFLWDEGFHQLVVQRWDPSLTREALGHWLGLLNADGWIGREQILGDEARARVPPEFLVQRAVHANPPTLLLPVAHMLEVGDPDDLAFLRKALPRLHAWFSWLHQSQAGPLPLSYRWRGRDPALPTLLNPKTLPSGLDDYPRASHPSVTERHLDLRCWVALGARVLTRLAEHLGEAEVAAELGPLAASLEAAESLDELHWAPELGVFADFGNHTKAVQLKPRPPQGLVRVVGRPQPQLQYVDALGYVSLFPLLLRLLDPTSSRLGPLLDILADSRHLWSPFGLRSLAASSSFYGQRNSEHDPPYWRGAVWLNVNYLALGALHHYGHLEGPHQARAAKLHGELRANVVGNVWRQYQATGFLWEQYSDRDGRGMGCRPFHGWTSLVLLAMAEDY

SEQ ID NO: 60573 - protein, 4 aa, Homo sapiens
ISFY

SEQ ID NO: 60574 - protein, 119 aa, Homo sapiens
LERENIRKMQGLMFRCSASCCEDSQASMKQVHQCIERCHVPLAQAQALVTSELEKFQDRLARCTMHCNDKAKDSIDAGSKELQVKQQLDSCVTKCVDDHMHLIPTMTKKMKEALLSIGK

SEQ ID NO: 60575 - protein, 23 aa, Homo sapiens
KDNLIVPILEEGVQNSISGESEA

SEQ ID NO: 60576 - protein, 17 aa, Homo sapiens
MPTSSEMNCSYQKLLCS

SEQ ID NO: 60577 - protein, 86 aa, Homo sapiens [sequence omitted]

SEQ ID NO: 60578 - protein, 36 aa, Homo sapiens
LLVFGVWILYILKLNYTTEECDMKKMHYVDPDHVKS

SEQ ID NO: 60579 - protein, 91 aa, Homo sapiens
VRRRRPQKTAPTGRVRRQRPKKTALASQVRRRRPQKMSLISRVRTARPQKTAPASRVRRIRPQKTSLTSRVRRSRLQKTALTSPVQRSRAQ

SEQ ID NO: 60580 - protein, 56 aa, Homo sapiens
LIASCSNDQTVRVWVVATMQCKGELREHEHVVECISWAPESSYSSISEATGSETKK

SEQ ID NO: 60581 - protein, 10 aa, Homo sapiens
VKGLLARPPS

SEQ ID NO: 60582 - protein, 73 aa, Homo sapiens
LPSMAASSTKSWWETGEVQAQSAAKTPSCKDIVAGDMSKKSLWEQKGGSKTSSTIKTLWQLHWVLAEFWKTGM

SEQ ID NO: 60583 - protein, 35 aa, Homo sapiens
KKSLWEQKGGSKTSSTIKTLWQLHWVLAEFWKTGM

SEQ ID NO: 60584 - protein, 406 aa, Homo sapiens
RQCSLNTLPAASILAWKSVLGNGHLSSLGTRDTHPYASLSRALQTQCCISSPSHLMSQQYRPYSFFTKLTADELWKGALAETGAGAKKGRGKRTKKKKRKDLNRGQIIGEGRYGFLWPGLNVPLMKNGAVQTIAQRSKEEQEKVEADMIQQREEWDRKKKMKVKRERGWSGNSWGGISLGPPDPGPCGETYEDFDTRILEVRNVFTMTAKEGRKKSIRVLVAVGNGKGAAGFSIGKATDRMDAFRKAKNRAVHHLHYIERYEDHTIFHDISLRFKRTHIKMKKQPKGYGLRCHRAIITICRLIGIKDMYAKVSGSINMLSLTQGLFRGLSRQETHQQLADKKGLHVVEIREECGPLPIVVASPRGPLRKDPEPEDEVPDVKLDWEDVKTAQGMKRSVWSNLKRAAT

SEQ ID NO: 60585 - protein, 698 aa, Homo sapiens
IPSSLEREETPGKMWLKLFFLLLYFLVLFVLARFFEAIVWYETGIFATQLVDPVALSFKKLKTILECRGLGYSGLPEKKDVRELVEKSGDLMEGELYSALKEEEASESVSSTNFSGEMHFYELVEDTKDGIWLVQVIANDRSPLVGKIHWEKMVKKVSRFGIRTGTFNCSSDPRYCRRRGWVRSTLIMSVPQTSTSKGKVMLKEYSGRKIEVEHIFKWITAHAASRIKTIYNAEHLKEEWNKSDQYWLKIYLFANLDQPPAFFSALSIKFTGRVEFIFVNVENWDNKSYMTDIGIYNMPSYILRTPEGIYRYGNHTGEFISLQAMDSFLRSLQPEVNDLFVLSLVLVNLMAWMDLFITQGATIKRFVVLISTLGTYNSLLIISWLPVLGFLQLPYLDSFYEYSLKLLRYSNTTTLASWVRADWMFYSSHPALFLSTYLGHGLLIDYFEKKRRRNNNNDEVNANNLEWLSSLWDWYTSYLFHPIASFQNFPVESDWDEDPDLFLERLAFPDLWLHPLIPTDYIKNLPMWRFKCLGVQSEEEMSEGSQDTENDSESENTDTLSSEKEVFEDKQSVLHNSPGTASHCDAEACSCANKYCQTSPCERKGRSYGSYNTNEDMEPDWLTWPADMLHCTECVVCLENFENGCLLMGLPCGHVFHQNCIVMWLAGGRHCCPVCRWPSYKKKQPYAQHQPLSNDVPS

SEQ ID NO: 60586 - protein, 24 aa, Homo sapiens
LASDHKDIHSSVSRVGKAIDKDSL

SEQ ID NO: 60587 - protein, 340 aa, Homo sapiens
TGLRVRRAQQIAQLYGRLYSESSRRVLLGRLWRRLHGRPGHASALMAALAGVFVWDEERIQEEELQRSINEMKRLEEMSNMFQSSGVQHHPPEPKAQTEGNEDSEGKEQRWEMVMDKKHFKLWRRPITGTHLYQYRVFGTYTDVTPRQFFNVQLDTEYRKKWDALVIKLEVIERDVVSGSEVLHWVTHFPYPMYSRDYVYVRRYSVDQENNMMVLVSRAVEHPSVPESPEFVRVRSYESQMVIRPHKSFDENGFDYLLTYSDNPQTVFPRYCVSWMVSSGMPDFLEKLHMATLKAKNMEIKVKDYISAKPLEMSSEAKATSQSSERKNEGSCGPARIEYA

SEQ ID NO: 60588 - protein, 56 aa, Homo sapiens
LIAWVSQFVTFYPGDVILTGTPPGVGVFRKPPVFLKKGDEVQCEIEELGVIINKVV

SEQ ID NO: 60589 - protein, 128 aa, Homo sapiens
IPFAFFLPELIFGFLVWTMVAATHIVYPLLQGWVMYVSLTSFLISLMFLLSYLFGFYKRFESWRVLDSLYHGTTGILYMSAAVLQVHATIVSEKLLDPRIYYINSAASFFAFIATLLYILHAFSIYYH

SEQ ID NO: 60590 - protein, 4 aa, Homo sapiens
RALL

SEQ ID NO: 60591 - protein, 32 aa, Homo sapiens; identical to SEQ ID NO: 60431

SEQ ID NO: 60592 - protein, 38 aa, Homo sapiens
MRIHKRLIDLHSPSEIVKQITSISIEPGVEVEVTIADA

SEQ ID NO: 60593 - protein, 7 aa, Homo sapiens
LSTFVIN

SEQ ID NO: 60594 - protein, 15 aa, Homo sapiens
IMELYSEETISGKFL

SEQ ID NO: 60595 - protein, 370 aa, Homo sapiens
IANQPVVIDNGSGVIKAGFAGDQIPKYCFPNYVGRPKHMRVMAGALEGDLFIGPKAEEHRGLLTIRYPMEHGVVRDWNDMERIWQYVYSKDQLQTFSEEHPVLLTEAPLNPSKNREKAAEVFFETFNVPALFISMQAVLSLYATGRTTGVVLDSGDGVTHAVPIYEGFAMPHSIMRVDIAGRDVSRYLRLLLRKEGVDFHTSAEFEVVRTIKERACYLSINPQKDEALETEKVQYTLPDGSTLDVGPARFRAPELLFQPDLVGDESEGLHEVVAFAIHKSDMDLRRTLFANIVLSGGSTLFKGFGDRLLSEVKKLAPKDIKIKISAPQERLYSTWIGGSILASLDTFKKMWVSKKEYEEDGSRAIHRKTF

SEQ ID NO: 60596 - protein, 1823 aa, Homo sapiens
KEAFVQSESIIEVLRFDDGGLLQTETTLGLSSYQQKSISLYRGNCRPIRFEPPMLDFHEQPVGMPKMEKVYLHNPSSEETITLVSISATTSHFHASFFQNRKILPGGNTSFDVVFLARVVGNVENTLFINTSNHGVFTYQVFGVGVPNPYRLRPFLGARVPVNSSFSPIINIHNPHSEPLQVVEMYSSGGDLHLELPTGQQGGTRKLWEIPPYETKGVMRASFSSREADNHTAFIRIKTNASDSTEFIILPVEVEVTTAPGIYSSTEMLDFGTLRTQDLPKVLNLHLLNSGTKDVPITSVRPTPQNDAITVHFKPITLKASESKYTKVASISFDASKAKKPSQFSGKITVKAKEKSYSKLEIPYQAEVLDGYLGFDHAATLFHIRDSPADPVERPIYLTNTFSFAILIHDVLLPEEAKTMFKVHNFSKPVLILPNESGYIFTLLFMPSTSSMHIDNNILLITNASKFHLPVRVYTGFLDYFVLPPKIEERFIDFGVLSATEASNILFAIINSNPIELAIKSWHIIGDGLSIELVAVERGNRTTIISSLPEFEKSSLSDQSSVTLASGYFAVFRVKLTAKKLEGIHDGAIQITTDYEILTIPVKAVIAVGSLTCFPKHVVLPPSFPGKIVHQSLNIMNSFSQKVKIQQIRSLSEDVRFYYKRLRGNKEDLEPGKKSKIANIYFDPGLQCGDHCYVGLPFLSKSEPKVQPGVAMQEDMWDADWDLHQSLFKGWTGIKENSGHRLSAIFEVNTDLQKNIISKITAELSWPSILSSPRHLKFPLTNTNCSSEEEITLENPADVPVYVQFIPLALYSNPSVFVDKLVSRFNLSKVAKIDLRTLEFQVFRNSAHPLQSSTGFMEGLSRHLILNLILKPGEKKSVKVKFTPVHNRTVSSLIIVRNNLTVMDAVMVQGQGTTENLRVAGKLPGPGSSLRFKITEALLKDCTDSLKLREPNFTLKRTFKVENTGQLQIHIETIEISGYSCEGYGFKVVNCQEFTLSANASRDIIILFTPDFTASRVIRELKFITTSGSEFVFILNASLPYHMLATCAEALPRPNWELALYIIISGIMSALFLLVIGTAYLEAQGIWEPFRRRLSFEASNPPFDVGRPFDLRRIVGISSEGNLNTLSCDPGHSRGFCGAGGSSSRPSAGSHKQCGPSVHPHSSHSNRNSADVENVRAKNSSSTSSRTSAQAASSQSANKTSPLVLDSNTVTQGHTAGRKSKGAKQSQHGSQHHAHSPLEQHPQPPLPPPVPQPQEPQPERLSPAPLAHPSHPERASSARHSSEDSDITSLIEAMDKDFDHHDSPALEVFTEQPPSPLPKSKGKGKPLQRKVKPPKKQEEKEKKGKGKPQEDELKDSLADDDSSSTTTETSNPDTEPLLKEDTEKQKGKQAMPEKHESEMSQVKQKSKKLLNIKKEIPTDVKPSSLELPYTPPLESKQRRNLPSKIPLPTAMTSGSKSRNAQKTKGTSKLVDNRPPALAKFLPNSQELGNTSSSEGEKDSPPPEWDSVPVHKPGSSTDSLYKLSLQTLNADIFLKQRQTSPTPASPSPPAAPCPFVARGSYSSIVNSSSSSDPKIKQPNGSKHKLTKAASLPGKNGNPTFAAVTAGYDKSPGGNGFAKVSSNKTGFSSSLGISHAPVDSDGSDSSGLWSPVSNPSSPDFTPLNSFSAFGNSFNLTGEVFSKLGLSRSCNQASQRSWNEFNSGPSYLWESPATDPSPSWPASSGSPTHTATSVLGNTSGLWSTTPFSSSIWSSNLSSALPFTTPANTLASIGLMGTENSPAPHAPSTSSPADDLGQTYNPWRIWSPTIGRRSSDPWSNSHFPHEN

SEQ ID NO: 60597 - protein, 232 aa, Homo sapiens
VLKRAVELDSESRYPQALVCYQEGIDLLLQVLKGTKDNTKRCNLREKISKYMDRAENIKKYLDQEKEDGKYHKQIKIEENATGFSYESLFREYLNETVTEVWIEDPYIRHTHQLYNFLRFCEMLIKRPCKVKTIHLLTSLDEGIEQVQQSRGLQEIEESLRSHGVLLEVQYSSSIHDREIRFNNGWMIKIGRGLDYFKKPQSRFSLGYCDFDLRPCHETTVDIFHKKHTKNI

SEQ ID NO: 60598 - protein, 49 aa, Homo sapiens
KVPTTITLTLRGQPSRITTLSPMGSGAAPSEESSSQVLPSSSQRLPPAP

SEQ ID NO: 60599 - protein, 217 aa, Homo sapiens
IWYTKDRMQPGPVFGNMDKFVGLGVFVDTYPNEEKQQERVFPYISAMVNNGSLSYDHERDGRPTELGGCTAIVRNLHYDTFLVIRYVKRHLTIMMDIDGKHEWRDCIEVPGVRLPRGYYFGTSSITGDLSDNHDVISLKLFELTVERTPEEEKLHRDVFLPSVDNMKLPEMTAPLPPLSGLALFLIVFFSLVFSVFAIVIGIILYNKWQEQSRKRFY

SEQ ID NO: 60600 - protein, 134 aa, Homo sapiens
IRYVKRHLTIMMDIDGKHEWRDCIEVPGVRLPRGYYFGTSSITGDLSDNHDVISLKLFELTVERTPEEEKLHRDVFLPSVDNMKLPEMTAPLPPLSGLALFLIVFFSLVFSVFAIVIGIILYNKWQEQSRKRFY

SEQ ID NO: 60601 - protein, 70 aa, Homo sapiens
LLQGYDNTESSVRKASVFCLVAIYSVIGEDLKPHLAQLTGSKMKLLNLYIKRAQTTNSNSSSSSDVSTHS

SEQ ID NO: 60602 - protein, 920 aa, Homo sapiens
VRGNGASGRRGLSGSCHPFSRLNLWSHGEFGPLRSRRRRHRHYCLYRLLRVRSADEVSEEAAARAVETAATMSDTRRRVKVYTLNEDRQWDDRGTGHVSSTYVEELKGMSLLVRAESDGSLLLESKINPNTAYQKQQDTLIVWSEAENYDLALSFQEKAGCDEIWEKICQVQGKDPSVEVTQDLIDESEEERFEEMPETSHLIDLPTCELNKLEEIADLVTSVLSSPIRREKLALALENEGYIKKLLQLFQACENLENTEGLHHLYEIIRGILFLNKATLFEVMFSDECIMDVVGCLEYDPALAQPKRHREFLTKTAKFKEVIPITDSELRQKIHQTYRVQYIQDIILPTPSVFEENFLSTLTSFIFFNKVEIVSMLQEDEKFLSEVFAQLTDEATDDDKRRELVNFFKEFCAFSQTLQPQNRDAFFKTLAKLGILPALEIVMGMDDLQVRSAATDIFSYLVEFSPSMVREFVMQEAQQSDDDILLINVVIEQMICDTDPELGGAVQLMGLLRTLIDPENMLATTNKTEKSEFLNFFYNHCMHVLTAPLLTNTSEDKCEKDFFLKHYRYSWSFICTPSHSHSHSTPSSSISQDNIVGSNKNNTICPDNYQTAQLLALILELLTFCVEHHTYHIKNYIMNKDLLRRVLVLMNSKHTFLALCALRFMRRIIGLKDEFYNRYITKGNLFEPVINALLDNGTRYNLLNSAVIELFEFIRVEDIKSLTAHIVENFYKALESIEYVQTFKGLKTKYEQEKDRQNQKLNSVPSILRSNRFRRDAKALEEDEEMWFNEDEEEEGKAVVAPVEKPKPEDDFPDNYEKFMETKKAKESEDKENLPKRTSPGGFKFTFSHSASAANGTNSKSVVAQIPPATSNGSSSKTTNLPTSVTATKGSLVGLVDYPDDEEEDEEEESSPRKRPRLGS

SEQ ID NO: 60603 - protein, 377 aa, Homo sapiens
KDLRTYLASVKAMHEASKKLNECLQEVYEPDWPGRDEANKIAENNDLLWMDYHQKLVDQALLTMDTYLGQFPDIKSRIAKRGRKLVDYDSARHHYESLQTAKKKDEAKIAKAEEELIKAQKVFEEMNVDLQEELPSLWNSRVGFYVNTFQSIAGLEENFHKEMSKLNQNLNDVLVGLEKQHGSNTFTVKAQPSDNAPAKGNKSPSPPDGSPAATPEIRVNHEPEPAGGATPGATLPKSPSQPAEASEVAGGTQPAAGAQEPGETAASEAASSSLPAVVVETFPATVNGTVEGGSGAGRLDLPPGFMFKVQAQHDYTATDTDELQLKAGDVVLVIPFQNPEEQDEGWLMGVKESDWNQHKELEKCRGVFPENFTERVP

SEQ ID NO: 60604 - protein, 33 aa, Homo sapiens
MSGADDTVYMEYHSSRSKAPSKHVHPLFKRFRK

SEQ ID NO: 60605 - protein, 768 aa, Homo sapiens
LSDGPFLLPRRDRALTQLQVRALWSSAGSRAVAVDLGNRKLEISSGKLARFADGSAVVQSGDTAVMVTAVSKTKPSPSQFMPLVVDYRQKAAAAGRIPTNYLRREIGTSDKEILTSRIIDRSIRPLFPAGYFYDTQVLCNLLAVDGVNEPDVLAINGASVALSLSDIPWNGPVGAVRIGIIDGEYVVNPTRKEMSSSTLNLVVAGAPKSQIVMLEASAENILQQDFCHAIKVGVKYTQQIIQGIQQLVKETGVTKRTPQKLFTPSPEIVKYTHKLAMERLYAVFTDYEHDKVSRDEAVNKIRLDTEEQLKEKFPEADPYEIIESFNVVAKEVFRSIVLNEYKRCDGRDLTSLRNVSCEVDMFKTLHGSALFQRGQTQVLCTVTFDSLESGIKSDQVITAINGIKDKNFMLHYEFPPYATNEIGKVTGLNRRELGHGALAEKALYPVIPRDFPFTIRVTSEVLESNGSSSMASACGGSLALMDSGVPISSAVAGVAIGLVTKTDPEKGEIEDYRLLTDILGIEDYNGDMDFKIAGTNKGITALQADIKLPGIPIKIVMEAIQQASVAKKEILQIMNKTISKPRASRKENGPVVETVQVPLSKRAKFVGPGGYNLKKLQAETGVTISQVDEETFSVFAPTPSAMHEARDFITEICKDDQEQQLEFGAVYTATITEIRDTGVMVKLYPNMTAVLLHNTQLDQRKIKHPTALGLEVGQEIQVKYFGRDPADGRMRLSRKVLQSPATTVVRTLNDRSSIVMGEPISQSSSNSQ

SEQ ID NO: 60606 - protein, 263 aa, Homo sapiens
LHADWTELTNCVPGVLDRRDSAALRTPRKFYYITLLRDPVSRYLSEWRHVQRGATWKTSLHMCDGRTPTPEELPPCYEGTDWSGCTLQEFMDCPYNLANNRQVRMLADLSLVGCYNLSFIPEGKRAQLLLESAKKNLRGMAFFGLTEFQRKTQYLFERTFNLKFIRPFMQYNSTRAGGVEVDEDTIRRIEELNDLDMQLYDYAKDLFQQRYQYKRQLERREQRLRSREERLLHRAKEALPREDADEPGRVPTEDYMSHIIEKW

SEQ ID NO: 60607 - protein, 11 aa, Homo sapiens
KMAAAPLEERD

SEQ ID NO: 60608 - protein, 122 aa, Homo sapiens
IFPKEFETAETLLNSEVHMLLEHRKQQNESAEDEQELSEVFMKTLNYTARFSRFKNRETIASVRSLLLQKKLHKFELACLANLCPETAEESKALIPSLEGRFEDEELQQILDDIQTKRSFQY

SEQ ID NO: 60609 - protein, 5 aa, Homo sapiens
RRMAP

SEQ ID NO: 60610 - protein, 150 aa, Homo sapiens
LLRHYRNPWKAAYHHFQRYSDVRVKEEKKAMLQEIANQKGVSCRAQGWKVHLCAAQLLQLTNLEHDVYERLTNLQEGIIPKKKAATDDDLHRINELIQGNMQRCKLVMDQISEARDSMLKVLDHKDRVLKLLNKNGTVKKVSKLKRKEKV

SEQ ID NO: 60611 - protein, 386 aa, Homo sapiens
LKRTALHGESNSVLIIGPRGSGKTMLINHALKELMEIEEVSENVLQVHLNGLLQINDKIALKEITRQLNLENVVGDKVFGSFAENLSFLLEALKKGDRTSSCPVIFILDEFDLFAHHKNQTLLYNLFDISQSAQTPIAVIGLTCRLDILELLEKRVKSRFSHRQIHLMNSFGFPQYVKIFKEQLSLPAEFPDKVFAEKWNENVQYLSEDRSVQEVLQKHFNISKNLRSLHMLLMLALNRVTASHPFMTAVDLMEASQLCSMDSKANIVHGLSVLEICLIIAMKHLNDIYEEEPFNFQMVYNEFQKFVQRKAHSVYNFEKPVVMKAFEHLQQLELIKPMERTSGNSQREYQLMKLLLDNTQIMNALQKYPNCPTDVRQWATSSLSWL

SEQ ID NO: 60612 - protein, 4 aa, Homo sapiens
MFSI

SEQ ID NO: 60613 - protein, 330 aa, Homo sapiens
LFSGKGRRAGPWGAALGGRTRGIMEADKDDTQQILKEHSPDEFIKDEQNKGLIDEITKKNIQLKKEIQKLETELQEATKEFQIKEDIPETKMKFLSVETPENDSQLSNISCSFQVSSKVPYEIQKGQALITFEKEEVAQNVVSMSKHHVQIKDVNLEVTAKPVPLNSGVRFQVYVEVSKMKINVTEIPDTLREDQMRDKLELSFSKSRNGGGEVDRVDYDRQSGSAVITFVEIGVADKILKKKEYPLYINQTCHRVTVSPYTEIHLKKYQIFSGTSKRTVLLTGMEGIQMDEEIVEDLINIHFQRAKNGGGEVDVVKCSLGQPHIAYFEE

SEQ ID NO: 60614 - protein, 60 aa, Homo sapiens
VDQQRPNIPNRWFSDPTLTSLAKLMKECWYQNPSARLTALRIKKTLTKIDNSLDKLKTDC

SEQ ID NO: 60615 - protein, 81 aa, Homo sapiens
ISVTREELYKMLAHEDLRKAGLLIFANKQDVKECMTVAEISQFLKLTSIKDHQWHIQACCALTGEGLCQGLEWMMSRLKIR

SEQ ID NO: 60616 - protein, 919 aa, Homo sapiens
LSPTMRPGTGAERGGLMMGHPGMHYAPMGMHPMGQRANMPPVPHGMMPQMMPPMGGPPMGQMPGMMSSVMPGMMMSHMSQASMQPALPPGVNSMDVAAGTASGAKSMWTEHKSPDGRTYYYNTETKQSTWEKPDDLKTPAEQLLSKCPWKEYKSDSGKPYYYNSQTKESRWAKPKELEDLEGYQNTIVAGSLITKSNLHAMIKAEESSKQEECTTTSTAPVPTTEIPTTMSTMAAAEAAAAVVAAAAAAAAAAAAANANASTSASNTVSGTVPVVPEPEVTSIVATVVDNENTVTISTEEQAQLTSTPAIQDQSVEVSSNTGEETSKQETVADFTPKKEEEESQPAKKTYTWNTKEEAKQAFKELLKEKRVPSNASWEQAMKMIINDPRYSALAKLSEKKQAFNAYKVQTEKEEKEEARSKYKEAKESFQRFLENHEKMTSTTRYKKAEQMFGEMEVWNAISERDRLEIYEDVLFFLSKKEKEQAKQLRKRNWEALKNILDNMANVTYSTTWSEAQQYLMDNPTFAEDEELQNMDKEDALICFEEHIRALEKEEEEEKQKSLLRERRRQRKNRESFQIFLDELHEHGQLHSMSSWMELYPTISSDIRFTNMLGQPGSTALDLFKFYVEDLKARYHDEKKIIKDILKDKGFVVEVNTTFEDFVAIISSTKRSTTLDAGNIKLAFNSLLEKAEAREREREKEEARKMKRKESAFKSMLKQAAPPIELDAVWEDIRERFVKEPAFEDITLESERKRIFKDFMHVLEHECQHHHSKNKKHSKKSKKHHRKRSRSRSGSDSDDDDSHSKKKRQRSESRSASEHSSSAESERSYKKSKKHKKKSKKRRHKSDSPESDAEREKDKKEKDRESEKDRTRQRSESKHKSPKKKTGKDSGNWDTSGSELSEGELEKRRRTLLEQLDDDQ

SEQ ID NO: 60617 - protein, 203 aa, Homo sapiens
IQFQDSCYIFLQEAIKVESIEDVRNQCTDHGADMISIHNEEENAFILDTLKKQWKGPDDILLGMFYDTDDASFKWFDNSNMTFDKWTDQDDDEDLVDTCAFLHIKTGEWKKGNCEVSSVEGTLCKTAIPYKRKYLSDNHILISALVIASTVILTVLGAIIWFLYKKHSDSRFTTVFSTAPQSPYNEDCVLVVGEENEYPVQFD

SEQ ID NO: 60618 - protein, 395 aa, Homo sapiens
LVPAHPMAPPSPSTTSSNNNSSSSSNSGWDQLSKTNLYIRGLPPHTTDQDLVKLCQPYGKIVSTKAILDKTTNKCKGYGFVDFDSPAAAQKAVSALKASGVQAQMAKQQEQDPTNLYISNLPLSMDEQELENMLKPFGQVISTRILRDSSGTSRGVGFARMESTEKCEAVIGHFNGKFIKTPPGVSAPTEPLLCKFADGGQKKRQNPNKYIPNGRPWHREGEVRLAGMTLTYDPTTAAIQNGFYPSPYSIATNRMITQTSITPYIASPVSAYQVAKETRENKYRGSAIKVQSPSWMQPQPYILQHPGAVLTPSMEHTMSLQPASMISPLAQQMSHLSLGSTGTYMPATSAMQGAYLPQYAHMQTTAVPVEEASGQQQVAVETSNDHSPYTFQPNK

SEQ ID NO: 60619 - protein, 15 aa, Homo sapiens
IRKDILDKARASLRP

SEQ ID NO: 60620 - protein, 685 aa, Homo sapiens
LASAQLGGAPNRWEVLSATPTTIKDEAGNLVQIPSAATSSGQYVLPLQNLQNQQIFSVAPGSDSSNGTVSSVQYQVIPQIQSADGQQVQIGFTGSSDNGGINQESSQIQIIPGSNQTLLASGTPSANIQNLIPQTGQVQVQGVAIGGSSFPGQTQVVANVPLGLPGNITFVPINSVDLDSLGLSGSSQTMTAGINADGHLINTGQAMDSSDNSERTGERVSPDINETNTDTDLFVPTSSSSQLPVTIDSTGILQQNTNSLTTSSGQVHSSDLQGNYIQSPVSEETQAQNIQVSTAQPVVQHLQLQESQQPTSQAQIVQGITPQTIHGVQASGQNISQQALQNLQLQLNPGTFLIQAQTVTPSGQVTWQTFQVQGVQNLQNLQIQNTAAQQITLTPVQTLTLGQVAAGGAFTSTPVSLSTGQLPNLQTVTVNSIDSAGIQLHPGENADSPADIRIKEEEPDPEEWQLSGDSTLNTNDLTHLRVQVVDEEGDQQHQEGKRLRRVACTCPNCKEGGGRGTNLGKKKQHICHIPGCGKVYGKTSHLRAHLRWHSGERPFVCNWMYCGKRFTRSDELQRHRRTHTGEKKFVCPECSKRFMRSDHLAKHIKTHQNKKGIHSSSTVLASVEAARDDTLITAGGTTLILANIQQGSVSGIGTVNTSATSNQDILTNTEIPLQLVTVSGNETME

SEQ ID NO: 60621 - protein, 470 aa, Homo sapiens
LSLFTLLTDLAPAFPSSSSKMGKSFANFMCKKDFHPASKSNIKKVWMAEQKISYDKKKQEELMQQYLKEQESYDNRLLMGDERVKNGLNFMYEAPPGAKKENKEKEETEGETEYKFEWQKGAPREKYAKDDMNIRDQPFGIQVRNVRCIKCHKWGHVNTDRECPLFGLSGINASSVPTDGSGPSMHPSELIAEMRNSGFALKRNVLGRNLTANDPSQEYVASEGEEDPEVEFLKSLTTKQKQKLLRKLDRLEKKKKKKDRKKKKFQKSRSKHKKHKSSSSSSSSSSSSSSTETSESSSESESNNKEKKIQRKKRKKNKCSGHNNSDSEEKDKSKKRKLHEELSSSHHNREKAKEKPRFLKHESSREDSKWSHSDSDKKSRTHKHSPEKRGSERKEGSSRSHGREERSRRSRSRSPGSYKQRETRKRAQRNPGEEQSRRNDSRSHGTDLYRGEKMYREHPGGTHTKVTQRE

SEQ ID NO: 60622 - protein, 210 aa, Homo sapiens [sequence omitted]

SEQ ID NO: 60623 - protein, 502 aa, Homo sapiens
KLHVNSARQYKDLWNMSDDKPFLCTAPGCGQRFTNEDHLAVHKHKHEMTLKFGPARNDSVIVADQTPTPTRFLKNCEEVGLFNELASPFENEFKKASEDDIKKMPLDLSPLATPIIRSKIEEPSVVETTHQDSPLPHPESTTSDEKEVPLAQTAQPTSAIVRPASLQVPNVLLTSSDSSVIIQQAVPSPTSSTVITQAPSSNRPIVPVPGPFPLLLHLPNGQTMPVAIPASITSSNVHVPAAVPLVRPVTMVPSVPGIPGPSSPQPVQSEAKMRLKAALTQQHPPVTNGDTVKGHGSGLVRTQSEESRPQSLQQPATSTTETPASPAHTTPQTQSTSGRRRRAANEDPDEKRRKFLERNRAAASRCRQKRKVWVQSLEKKAEDLSSLNGQLQSEVTLLRNEVAQLKQLLLAHKDCPVTAMQKKSGYHTADKDDSSEDISVPSSPHTEAIQHSSVSTSNGVSSTSKAEAVATSVLTQMADQSTEPALSQIVMAPSSQSQPSGS

SEQ ID NO: 60624 - protein, 34 aa, Homo sapiens
LAGVDARAGLRPLLAAVNSFGQLMIFIIVPSFYK

SEQ ID NO: 60625 - protein, 692 aa, Homo sapiens
ISPKSQDIPFVSTDIINTLKNDPDSALGNGSGEFSQNSMEEKQETKSTDGQEPHSVVYDTSNGKKVVDSIRNLKSLGPNQENVVQNEIIVYPENTEDNMKNGVKKTEINVEGVAKNNNIDMEVERPSNSEAHETDTAISYKENHLAASSVPDQKLNQPSAEKTKDAAIQTTPSCNSFDGKHQDHNLSDSKVEECVQTSNNNISTQHSCLSSQDSVNTSREFRSQGTLIIHSEDPLTVKDPICAHGNDDLLPPVDRIDKNSTASYLKNYPLYRQDYNPKPKPSNEITREYIPKIGMTTYKIVPPKSLEISKDWQSETIEYKDDQDMHALGKKHTHENVKETAIQTEDSAISESPEEPLPNLKPKPNLRTEHQVPSSVSSPDDAMVSPLKPAPKMTRDTGTAPFAPNLEEINNILESKFKSRASNAQAKPSSFFLQMQKRVSGHYVTSAAAKSVHAAPNPAPKELTNKEAERDMLPSPEQTLSPLSKMPHSVPQPLVEKTDDDVIGQAPAEASPPPIAPKPVTIPASQVSTQNLKTLKTFGAPRPYSSSGPSPFALAVVKRSQSFSKERTESPSASALVQPPANTEEGKTHSVNKFVDIPQLGVSDKENNSAHNEQNSQIPTPTDGPSFTVMRQSSLTFQSSDPEQMRQSLLTAIRSGEAAAKLKRVTIPSNTISVNGRSRLSHSMSPDAQDGH

SEQ ID NO: 60626 - protein, 11 aa, Homo sapiens
MNNLISCEMRK

SEQ ID NO: 60627 - protein, 722 aa, Homo sapiens
LSSPTPRSRRPLASAPARIKEVHWSKMEASVILPILKKKLAFLSGGKDRRSGLILTIPLCLEQTNMDELSVTLDYLLSIPSEKCKARGFTVIVDGRKSQWNVVKTVVVMLQNVVPAEVSLVCVVKPDEFWDKKVTHFCFWKEKDRLGFEVILVSANKLTRYIEPCQLTEDFGGSLTYDHMDWLNKRLVFEKFTKESTSLLDELALINNGSDKGNQQEKERSVDLNFLPSVDPETVLQTGHELLSELQQRRFNGSDGGVSWSPMDDELLAQPQVMKLLDSLREQYTRYQEVCRQRSKRTQLEEIQQKVMQVVNWLEGPGSEQLRAQWGIGDSIRASQALQQKHEEIESQHSEWFAVYVELNQQIAALLNAGDEEDLVELKSLQQQLSDVCYRQASQLEFRQNLLQAALEFHGVAQDLSQQLDGLLGMLCVDVAPADGASIQQTLKLLEEKLKSVDVGLQGLREKGQGLLDQISNQASWAYGKDVTIENKENVDHIQGVMEDMQLRKQRCEDMVDVRRLKMLQMVQLFKCEEDAAQAVEWLSELLDALLKTHIRLGDDAQETKVLLEKHRKFVDVAQSTYDYGRQLLQATVVLCQSLRCTSRSSGDTLPRLNRVWKQFTIASEERVHRLEMAIAFHSNAEKILQDCPEEPEAINDEEQFDEIEAVGKSLLDRLTVPVVYPDGTEQYFGSPSDMASTAENIRDRMKLVNLKRQQLRHPEMVTTES

SEQ ID NO: 60628 - protein, 31 aa, Homo sapiens
KTVTHVVVVSAPSAITLPVTMKTEGLVTCEK

SEQ ID NO: 60629 - protein, 5 aa, Homo sapiens
IITPR

SEQ ID NO: 60630 - protein, 97 aa, Homo sapiens
LENKHGDPKKKRGERRNSFSENEKHTHRIKDSENFRRKDRSKSKEMNRKHSGSRSDEDRYQNGAERRWEKSSRYSEQSRESKKNQDRRREKSPAKQK

SEQ ID NO: 60631 - protein, 32 aa, Homo sapiens
MTTASTSQVRQNYHQYSEAAINRQINLEHYAS

SEQ ID NO: 60632 - protein, 5 aa, Homo sapiens
MAAIT

SEQ ID NO: 60633 - protein, 130 aa, Homo sapiens
LTYALGVGLLHIVLLSIPFFSVPVAWTLTNIIHNLGMYVFLHAVKGTPFETPDQGKARLLTHWEQLDYGVQFTSSRKFFTISPIILYFLASFYTKYDPTHFILNTASLLSVLIPKMPQLHGVRIFGINKY

SEQ ID NO: 60634 - protein, 755 aa, Homo sapiens
ILRAEMSQWYELQQLDSKFLEQVHQLYDDSFPMEIRQYLAQWLEKQDWEHAANDVSFATIRFHDLLSQLDDQYSRFSLENNFLLQHNIRKSKRNLQDNFQEDPIQMSMIIYSCLKEERKILENAQRFNQAQSGNIQSTVMLDKQKELDSKVRNVKDKVMCIEHEIKSLEDLQDEYDFKCKTLQNREHETNGVAKSDQKQEQLLLKKMYLMLDNKRKEVVHKIIELLNVTELTQNALINDELVEWKRRQQSACIGGPPNACLDQLQNWFTIVAESLQQVRQQLKKLEELEQKYTYEHDPITKNKQVLWDRTFSLFQQLIQSSFVVERQPCMPTHPQRPLVLKTGVQFTVKLRLLVKLQELNYNLKVKVLFDKDVNERNTVKGFRKFNILGTHTKVMNMEESTNGSLAAEFRHLQLKEQKNAGTRTNEGPLIVTEELHSLSFETQLCQPGLVIDLETTSLPVVVISNVSQLPSGWASILWYNMLVAEPRNLSFFLTPPCARWAQLSEVLSWQFSSVTKRGLNVDQLNMLGEKLLGPNASPDGLIPWTRFCKENINDKNFPFWLWIESILELIKKHLLPLWNDGCIMGFISKERERALLKDQQPGTFLLRFSESSREGAITFTWVERSQNGGEPDFHAVEPYTKKELSAVTFPDIIRNYKVMAAENIPENPLKYLYPNIDKDHAFGKYYSRPKEAPEPMELDGPKGTGYIKTELISVSEVHPSRLQTTDNLLPMSPEEFDEVSRIVGSVEFDSMMNTV

SEQ ID NO: 60635 - protein, 265 aa, Homo sapiens
LILEYAAGGEIFSLCLPELAEMVSENDVIRLIKQILEGVYYLHQNNIVHLDLKPQNILLSSIYPLGDIKIVDFGMSRKIGHACELREIMGTPEYLAPEILNYDPITTATDMWNIGIIAYMLLTHTSPFVGEDNQETYLNISQVNVDYSEETFSSVSQLATDFIQSLLVKNPEKRPTAEICLSHSWLQQWDFENLFHPEETSSSSQTQDHSVRSSEDKTSKSSCNGTCGDREDKENIPEDSSMVSKRFRFDDSLPNPHELVSDLLC

SEQ ID NO: 60636 - protein, 29 aa, Homo sapiens
KGTDGVEYLLIPVDNGTLTDFLEKEEEEA

SEQ ID NO: 60637 - protein, 33 aa, Homo sapiens
MLERQFTVRKVHYDPEKDVHIYEAQKRNQKEDL

SEQ ID NO: 60638 - protein, 322 aa, Homo sapiens
LGVVHWVSLVLYCLAFVLGIPGNAIVIWFTGFKWKKTVTTLWFLNLAIADFIFLLFLPLYISYVAMNFHWPFGIWLCKANSFTAQLNMFASVFFLTVISLDHYIHLIHPVLSHRHRTLKNSLIVIIFIWLLASLIGGPALYFRDTVEFNNHTLCYNNFQKHDPDLTLIRHHVLTWVKFIIGYLFPLLTMSICYLCLIFKVKKRSILISSRHFWTILVVVVAFVVCWTPYHLFSIWELTIHHNSYSHHVMQAGIPLSTGLAFLNSCLNPILYVLISKKFQARFRSSVAEILKYTLWEVSCSGTVSEQLRNSETKNLCLLETAQ

SEQ ID NO: 60639 - protein, 396 aa, Homo sapiens
RAFPNPYADYNKSLAEGYFDAAGRLTPEFSQRLTNKIRELLQQMERGLKSADPRDGTGYTGWAGIAVLYLHLYDVFGDPAYLQLAHGYVKQSLNCLTKRSITFLCGDAGPLAVAAVLYHKMNNEKQAEDCITRLIHLNKIDPHAPNEMLYGRIGYIYALLFVNKNFGVEKIPQSHIQQICETILTSGENLARKRNFTAKSPLMYEWYQEYYVGAAHGLAGIYYYLMQPSLQVSQGKLHSLVKPSVDYVCQLKFPSGNYPPCIGDNRDLLVHWCHGAPGVIYMLIQAYKVFREEKYLCDAYQCADVIWQYGLLKKGYGLCHGSAGNAYAFLTLYNLTQDMKYLYRACKFAEWCLEYGEHGCRTPDTPFSLFEGMAGTIYFLADLLVPTKARFPAFEL

SEQ ID NO: 60640 - protein, 413 aa, Homo sapiens
KYFMTRNSSTIIAFAVGGQYVPGNGFSLIGAHTDSPCLRVKRRSRRSQVGFQQVGVETYGGGIWSTWFDRDLTLAGRVIVKCPTSGRLEQQLVHVERPILRIPHLAIHLQRNINENFGPNTEMHLVPILATAIQEELEKGTPEPGPLNAVDERHHSVLMSLLCAHLGLSPKDIVEMELCLADTQPAVLGGAYDEFIFAPRLDNLHSCFCALQALIDSCAGPGSLATEPHVRMVTLYDNEEVGSESAQGAQSLLTELVLRRISASCQHPTAFEEAIPKSFMISADMAHAVHPNYLDKHEENHRPLFHKGPVIKVNSKQRYASNAVSEALIREVANKVKVPLQDLMVRNDTPCGTTIGPILASRLGLRVLDLGSPQLAMHSIREMACTTGVLQTLTLFKGFFELFPSLSHNLLVD

SEQ ID NO: 60641 - protein, 201 aa, Homo sapiens
LDTFKHTDEEFLKQASSQKPAWKDGSTATCVLAVDNILYIANLGDSRAILCRYNEESQKHAALSLSKEHNPTQYEERMRIQKAGGNVRDGRVLGVLEVSRSIGDGQYKRCGVTSVPDIRRCQLTPNDRFILLACDGLFKVFTPEEAVNFILSCLEDEKIQTREGKSAADARYEAACNRLANKAVQRGSADNVTVMVVRIGH

SEQ ID NO: 60642 - protein, 192 aa, Homo sapiens
TQSRKLVEALCAAGHRAELLRFPERSTEIGKLLSSYLQKKSDVEDHSVHLLFSANRWEQVPLIKEKLSQGVTLVVDRYAFSGVAFTGAKENFSLDWCKQPDVGLPKPDLVLFLQLQLADAAKRGAFGHERYENGAFQERALRCFHQLMKDTTLNWKMVDASKSIEAVHEDIRVLSEDAIRTATEKPLGELWK

SEQ ID NO: 60643 - protein, 401 aa, Homo sapiens
VEGTMNWHLPLFLLASVTLPSICSHFNPLSLEELGSNTGIQVFNQIVKSRPHDNIVISPHGIASVLGMLQLGADGRTKKQLAMVMRYGVNGVGKILKKINKAIVSKKNKDIVTVANAVFVKNASEIEVPFVTRNKDVFQCEVRNVNFEDPASACDSINAWVKNETRDMIDNLLSPDLIDGVLTRLVLVNAVYFKGLWKSRFQPENTKKRTFVAADGKSYQVPMLAQLSVFRCGSTSAPNDLWYNFIELPYHGESISMLIALPTESSTPLSAIIPHISTKTIDSWMSIMVPKRVQVILPKFTAVAQTDLKEPLKVLGITDMFDSSKANFAKITRSENLHVSHILQKAKIEVSEDGTKASAATTAILIARSSPPWFIVDRPFLFFIRHNPTGAVLFMGQINKP

SEQ ID NO: 60644 - protein, 14 aa, Homo sapiens
KMAACPCFATVPTL

SEQ ID NO: 60645 - protein, 42 aa, Homo sapiens
LTEAASGRTFWLLTVLLWFSRIVCRCEINHEFRCSFDPREFC

SEQ ID NO: 60646 - protein, 12 aa, Homo sapiens
LHLAWKMSVPRI

SEQ ID NO: 60647 - protein, 19 aa, Homo sapiens
RTQRQKRRKRIPWIPRTKG

SEQ ID NO: 60648 - protein, 2417 aa, Homo sapiens
IRRDFSRRLRREANLVATCLPVRASLPHRLNMLRGPGPGLLLLAVQCLGTAVPSTGASKSKRQAQQMVQPQSPVAVSQSKPGCYDNGKHYQINQQWERTYLGNALVCTCYGGSRGFNCESKPEAEETCFDKYTGNTYRVGDTYERPKDSMIWDCTCIGAGRGRISCTIANRCHEGGQSYKIGDTWRRPHETGGYMLECVCLGNGKGEWTCKPIAEKCFDHAAGTSYVVGETWEKPYQGWMMVDCTCLGEGSGRITCTSRNRCNDQDTRTSYRIGDTWSKKDNRGNLLQCICTGNGRGEWKCERHTSVQTTSSGSGPFTDVRAAVYQPQPHPQPPPYGHCVTDSGVVYSVGMQWLKTQGNKQMLCTCLGNGVSCQETAVTQTYGGNSNGEPCVLPFTYNGRTFYSCTTEGRQDGHLWCSTTSNYEQDQKYSFCTDHTVLVQTRGGNSNGALCHFPFLYNNHNYTDCTSEGRRDNMKWCGTTQNYDADQKFGFCPMAAHEEICTTNEGVMYRIGDQWDKQHDMGHMMRCTCVGNGRGEWTCIAYSQLRDQCIVDDITYNVNDTFHKRHEEGHMLNCTCFGQGRGRWKCDPVDQCQDSETGTFYQIGDSWEKYVHGVRYQCYCYGRGIGEWHCQPLQTYPSSSGPVEVFITETPSQPNSHPIQWNAPQPSHISKYILRWRPKNSVGRWKEATIPGHLNSYTIKGLKPGVVYEGQLISIQQYGHQEVTRFDFTTTSTSTPVTSNTVTGETTPFSPLVATSESVTEITASSFVVSWVSASDTVSGFRVEYELSEEGDEPQYLDLPSTATSVNIPDLLPGRKYIVNVYQISEDGEQSLILSTSQTTAPDAPPDTTVDQVDDTSIVVRWSRPQAPITGYRIVYSPSVEGSSTELNLPETANSVTLSDLQPGVQYNITIYAVEENQESTPVVIQQETTGTPRSDTVPSPRDLQFVEVTDVKVTIMWTPPESAVTGYRVDVIPVNLPGEHGQRLPISRNTFAEVTGLSPGVTYYFKVFAVSHGRESKPLTAQQTTKLDAPTNLQFVNETDSTVLVRWTPPRAQITGYRLTVGLTRRGQPRQYNVGPSVSKYPLRNLQPASEYTVSLVAIKGNQESPKATGVFTTLQPGSSIPPYNTEVTETTIVITWTPAPRIGFKLGVRPSQGGEAPREVTSDSGSIVVSGLTPGVEYVYTIQVLRDGQERDAPIVNKVVTPLSPPTNLHLEANPDTGVLTVSWERSTTPDITGYRITTTPTNGQQGNSLEEVVHADQSSCTFDNLSPGLEYNVSVYTVKDDKESVPISDTIIPAVPPPTDLRFTNIGPDTMRVTWAPPPSIDLTNFLVRYSPVKNEEDVAELSISPSDNAVVLTNLLPGTEYVVSVSSVYEQHESTPLRGRQKTGLDSPTGIDFSDITANSFTVHWIAPRATITGYRIRHHPEHFSGRPREDRVPHSRNSITLTNLTPGTEYVVSIVALNGREESPLLIGQQSTVSDVPRDLEVVAATPTSLLISWDAPAVTVRYYRITYGETGGNSPVQEFTVPGSKSTATISGLKPGVDYTITVYAVTGRGDSPASSKPISINYRTEIDKPSQMQVTDVQDNSISVKWLPSSSPVTGYRVTTTPKNGPGPTKTKTAGPDQTEMTIEGLQPTVEYVVSVYAQNPSGESQPLVQTAVTNIDRPKGLAFTDVDVDSIKIAWESPQGQVSRYRVTYSSPEDGIHELFPAPDGEEDTAELQGLRPGSEYTVSVVALHDDMESQPLIGTQSTAIPAPTDLKFTQVTPTSLSAQWTPPNVQLTGYRVRVTPKEKTGPMKEINLAPDSSSVVVSGLMVATKYEVSVYALKDTLTSRPAQGVVTTLENVSPPRRARVTDATETTITISWRTKTETITGFQVDAVPANGQTPIQRTIKPDVRSYTITGLQPGTDYKIYLYTLNDNARSSPVVIDASTAIDAPSNLRFLATTPNSLLVSWQPPRARITGYIIKYEKPGSPPREVVPRPRPGVTEATITGLEPGTEYTIYVIALKNNQKSEPLIGRKKTDELPQLVTLPHPNLHGPEILDVPSTVQKTPFVTHPGYDTGNGIQLPGTSGQQPSVGQQMIFEEHGFRRTTPPTTATPIRHRPRPYPPNVGEEIQIGHIPREDVDYHLYPHGPGLNPNASTGQEALSQTTISWAPFQDTSEYIISCHPVGTDEEPLQFRVPGTSTSATLTGLTRGATYNVIVEALKDQQRHKVREEVVTVGNSVNEGLNQPTDDSCFDPYTVSHYAVGDEWERMSESGFKLLCQCLGFGSGHFRCDSSRWCHDNGVNYKIGEKWDRQGENGQMMSCTCLGNGKGEFKCDPHEATCYDDGKTYHVGEQWQKEYLGAICSCTCFGGQRGWRCDNCRRPGGEPSPEGTTGQSYNQYSQRYHQRTNTNVNCPIECFMPLDVQADREDSRE

SEQ ID NO: 60649 - protein, 16 aa, Homo sapiens
KCLARNTVGTSMILLL

SEQ ID NO: 60650 - protein, 18 aa, Homo sapiens
LPLKSIYMRQIDQMVGLI

SEQ ID NO: 60651 - protein, 187 aa, Homo sapiens
IMLALISRLLDWFRSLFWKEEMELTLVGLQYSGKTTFVNVIASGQFSEDMIPTVGFNMRKVTKGNVTIKIWDIGGQPRFRSMWERYCRGVNAIVYMIDAADREKIEASRNELHNLLDKPQLQGIPVLVLGNKRDLPNALDEKQLIEKMNLSAIQDREICCYSISCKEKDNIDITLQWLIQHSKSRRS

SEQ ID NO: 60652 - protein, 46 aa, Homo sapiens
LGVTTSDTSYSDMAAGSEKEVEAPYLSRRSGTTPGCESPAKETQGA

SEQ ID NO: 60653 - protein, 42 aa, Homo sapiens
LAAYSSTVGLRAVAPSPSGAIGGLLEQFARGVGLRSISSNAL

SEQ ID NO: 60654 - protein, 187 aa, Homo sapiens
KGWALHHLKCVDIDECGTEGANCGADQFCVNTEGSYECRDCAKACLGCMGAGPGRCKKCSPGYQQVGSKCLDVDECETEVCPGENKQCENTEGGYRCICAEGYKQMEGICVKEQIPESAGFFSEMTEDELVVLQQMFFGIIICALATLAAKGDLVFTAIFIGAVAAMTGYWLSERSDRVLEGFIKGR

SEQ ID NO: 60655 - protein, 105 aa, Homo sapiens
IHSYRGHLWLFRDAGTHDGLLVNQTELFVPSLNVDGQPIFANITLPVYTLKERCLQVVRSLVKPENYRRLDIVRSLYEDLEDHPNVQKDLERLTQERIAHQRMGD

SEQ ID NO: 60656 - protein, 14 aa, Homo sapiens
ILDRFDFSNTVWHL

SEQ ID NO: 60657 - protein, 704 aa, Homo sapiens
IMAAATGDPGLSKLQFAPFSSALDVGFWHELTQKKLNEYRLDEAPKDIKGYYYNGDSAGLPARLTLEFSAFDMSAPTPARCCPAIGTLYNTNTLESFKTADKKLLLEQAANEIWESIKSGTALENPVLLNKFLLLTFADLKKYHFYYWFCYPALCLPESLPLIQGPVGLDQRFSLKQIEALECAYDNLCQTEGVTALPYFLIKYDENMVLVSLLKHYSDFFQGQRTKITIGVYDPCNLAQYPGWPLRNFLVLAAHRWSSSFQSVEVVCFRDRTMQGARDVAHSIIFEVKLPEMAFSPDCPKAVGWEKNQKGGMGPRMVNLSECMDPKRLAESSVDLNLKLMCWRLVPTLDLDKVVSVKCLLLGAGTLGCNVARTLMGWGVRHITFVDNAKISYSNPVRQPLYEFEDCLGGGKPKALAAADRLQKIFPGVNARGFNMSIPMPGHPVNFSSVTLEQARRDVEQLEQLIESHDVVFLLMDTRESRWLPAVIAASKRKLVINAALGFDTFVVMRHGLKKPKQQGAGDLCPNHPVASADLLGSSLFANIPGYKLGCYFCNDVVAPGDSTRDRTLDQQCTVSRPGLAVIAGALAVELMVSVLQHPEGGYAIASSSDDRMNEPPTSLGLVPHQIRGFLSRFDNVLPVSLAFDKCTACSSKVLDQYEREGFNFLAKVFNSSHSFLEDLTGLTLLHQETQAAEIWDMSDDETI

SEQ ID NO: 60658 - protein, 5 aa, Homo sapiens
VETMM

SEQ ID NO: 60659 - protein, 798 aa, Homo sapiens
LAVQRDHEGRYSEAVFYYKEAAQALIYAEMAGSSLENIQEKITEYLERVQALHSAVQSKSADPLKSKHQLDLERAHFLVTQAFDEDEKENVEDAIELYTEAVDLCLKTSYETADKVLQNKLKQLARQALDRAEALSEPLTKPVGKISSTSVKPKPPPVRAHFPLGANPFLERPQSFISPQSCDAQGQRYTAEEIEVLRTTSKINGIEYVPFMNVDLRERFAYPMPFCDRWGKLPLSPKQKTTFSKWVRPEDLTNNPTMIYTVSSFSIKQTIVSDCSFVASLAISAAYERRFNKKLITGIIYPQNKDGEPEYNPCGKYMVKLHLNGVPRKVIIDDQLPVDHKGELLCSYSNNKSELWVSLIEKAYMKVMGGYDFPGSNSNIDLHALTGWIPERIAMHSDSQTFSKDNSFRMLYQRFHKGDVLITASTGMMTEAEGEKWGLVPTHAYAVLDIREFKGLRFIQLKNPWSHLRWKGRYSENDVKNWTPELQKYLNFDPRTAQKIDNGIFWISWDDLCQYYDVIYLSWNPGLFKESTCIHSTWDAKQGPVKDAYSLANNPQYKLEVQCPQGGAAVWVLLSRHITDKDDFANNREFITMVVYKTDGKKVYYPADPPPYIDGIRINSPHYLTKIKLTTPGTHTFTLVVSQYEKQNTIHYTVRVYSACSFTFSKIPSPYTLSKRINGKWSGQSAGGCGNFQETHKNNPIYQFHIEKTGPLLIELRGPRQYSVGFEVVTVSTLGDPGPHGFLRKSSGDYRCGFCYLELENIPSGIFNIIPSTFLPKQEGPFFLDFNSIIPIKITQLQ

SEQ ID NO: 60660 - protein, 30 aa, Homo sapiens
MFQLLYIQKSQCNSRTKIFCQSADHILNDS

SEQ ID NO: 60661 - protein, 52 aa, Homo sapiens
TEGRITEKEIRDHISKETLFYICGPPPMTDFFSKQLENNHVPKEHICFEKWW

SEQ ID NO: 60662 - protein, 5 aa, Homo sapiens
ILEVH

SEQ ID NO: 60663 - protein, 49 aa, Homo sapiens
IKKLIERKQAQIRKVYPGLSCFKDGVRQIPIESIPGISTYRPSFKSEIF

SEQ ID NO: 60664 - protein, 240 aa, Homo sapiens
VASLSRTQGQPQRQPRAAASGAGAGTAGGGGSGGAEGSKMSTEAQRVDDSPSTSGGSSDGDQRESVQQEPEREQVQPKKKEGKISSKTAAKLSTSAKRIQKELAEITLDPPPNCSAGPKGDNIYEWRSTILGPPGSVYEGGVFFLDITFSPDYPFKPPKVTFRTRIYHCNINSQGVICLDILKDNWSPALTISKVLLSICSLLTDCNPADPLVGSIATQYMTNRAEHDRMARQWTKRYAT

SEQ ID NO: 60665 - protein, 512 aa, Homo sapiens
KNDRIDCSMKTSKSSAPGMTKSHSGVTKFSGMVLLCKVCGDVASGFHYGVHACEGCKGFFRRSIQQNIQYKKCLKNENCSIMRMNRNRCQQCRFKKCLSVGMSRDAVRFGRIPKREKQRMLIEMQSAMKTMMNSQFSGHLQNDTLVEHHEQTALPAQEQLRPKPQLEQENIKSSSPPSSDFAKEEVIGMVTRAHKDTFMYNQEQQENSAESMQPQRGERIPKNMEQYNLNHDHCGNGLSSHFPCSESQQHLNGQFKGRNIMHYPNGHAICIANGHCMNFSNAYTQRVCDRVPIDGFSQNENKNSYLCNTGGRMHLVCPMSKSPYVDPHKSGHEIWEEFSMSFTPAVKEVVEFAKRIPGFRDLSQHDQVNLLKAGTFEVLMVRFASLFDAKERTVTFLSGKKYSVDDLHSMGAGDLLNSMFEFSEKLNALQLSDEEMSLFTAVVLVSADRSGIENVNSVEALQETLIRALRTLIMKNHPNEASIFTKLLLKLPDLRSLNNMHSEELLAFKVHP

SEQ ID NO: 60666 - protein, 36 aa, Homo sapiens
IAIPCNNKGAHSVGLMWWMLAREVLRMRGTISREHP

SEQ ID NO: 60667 - protein, 128 aa, Homo sapiens
LKVAQMVTLLIAFICVRSSLWTNYSAYSYFEVVTICDLIMILAFYLVHLFRFYRVLTCISWPLSELLHYLIGTLLLLIASIVAASKSYNQSGLVAGAIFGFMATFLCMASIWLSYKISCVTQSTDAAV

SEQ ID NO: 60668 - protein, 21 aa, Homo sapiens
LVTYVPVTTFKNLQTVNVDEN

SEQ ID NO: 60669 - protein, 79 aa, Homo sapiens
VFLLREAPGGRTCVRAQAPPLHSPSCVPRSRQAATFFSARRDGARPRRFYQMLQELWSSYGSKMPERKFCIERMSNCLL

SEQ ID NO: 60670 - protein, 554 aa, Homo sapiens
TLAIDITTDSLVREQTASSQVDPGSWGKPGKIWEGCVWVFFLQISLLALFFFPLVCVFCFVLFFKKILAVLELASGGVSEASSVTGTVRNSGLRGSSAWGTIPCHPVPCLGDKDSSYMGKRLDQPQMYPQYTYYYPHYLQTKQSYAPAPHPMAPPSPSTNSSSNNSSNNSSGEQLSKTNLYIRGLPPGTTDQDLIKLCQPYGKIVSTKAILDKNTNQCKGYGFVDFDSPAAAQKAVASLKANGVQAQMAKQQEQDPTNLYISNLPISMDEQELENMLKPFGHVISTRILRDANGVSRGVGFARMESTEKCEVVIQHFNGKYLKTPPGIPAPSEPLLCKFADGGQKKRQNQSKYTQNGRPWPREGEAGMALTYDPTAAIQNGFYSSPYSIATNRMIPQTSITPFIAASPVSTYQVQSTSWMPHPPYVMQPTGAVITPTMDHPMSMQPANMMGPLTQQMNHLSLGTTGTIQSQDRIMILHQLLCQYMTAAAPMQGTYIPQYTPVPPTAVSIEGVVADTSPQTVAPSSQDTSGQQQQIAVDTSNEHAPAYSYQQSKP

SEQ ID NO: 60671 - protein, 55 aa, Homo sapiens
KSGKWEGLVYAPPEKEKQRKTEELEEESFPERSKKEDRGKRTKGGHKGFLPERNF

SEQ ID NO: 60672 - protein, 310 aa, Homo sapiens
LEGDTTKGTSEMSEKRGPTSSNPRKRHREDSDVEMVEDDSRKEMTAACTPRRRIINLTSVLSLQEEINEQGHEVLREMLHNHSFVGCVNPQWALAQHQTKLYLLNTTKLSEELFYQILIYDFANFGVLRLSEPAPLFDLAMLALDSPESGWTEEDGPKEGLAEYIVEFLKKKAEMLADYFSLEIDEEGNLIGLPLLIDNYVPPLEGLPIFILRLATEVNWDEEKECFESLSKECAMFYSIRKQYISEESTLSGQQSEVPGSIPNSWKWTVEHIVYKALRSHILPPKHFTEDGNILQLANLPDLYKVFERC

SEQ ID NO: 60673 - protein, 1235 aa, Homo sapiens
LAWTMVLLWEPAGAWLALGLALALGPSVAAAAPRQDCTGVECPPLENCIEEALEPGACCATCVQQGCACEGYQYYDCLQGGFVRGRVPAGQSYFVDFGSTECSCPPGGGKISCQFMLCPELPPNCIEAVVVADSCPQCGQVGCVHAGHKYAAGHTVHLPPCRACHCPDAGGELICYQLPGCHGNFSDAEEGDPERHYEDPYSYDQEVAEVEAATALGGEVQAGAVQAGAGGPPAALGGGSQPLSTIQAPPWPAVLPRPTAAAALGPPAPVQAKARRVTEDSEEEEEEEEEREEMAVTEQLAAGGHRGLDGLPTTAPAGPSLPIQEERAEAGARAEAGARPEENLILDAQATSRSTGPEGVTHAPSLGKAALVPTQAVPGSPRDPVKPSPHNILSTSLPDAAWIPPTREVPRKPQVLPHSHVEEDTDPNSVHSIPRSSPEGSTKDLIETCCAAGQQWAIDNDECLEIPESGTEDNVCRTAQRHCCVSYLQEKSCMAGVLGAKEGETCGAEDNDSCGISLYKQCCDCCGLGLRVRAEGQSCESNPNLGYPCNHVMLSCCEGEEPLIVPEVRRPPEPAAAPRRVSEAEMAGREALSLGTEAELPNSLPGDDQDECLLLPGELCQHLCINTVGSYHCACFPGFSLQDDGRTCRPEGHPPQPEAPQEPALKSEFSQVASNTIPLPLPQPNTCKDNGPCKQVCSTVGGSAICSCFPGYAIMADGVSCEDQDECLMGAHDCSRRQFCVNTLGSFYCVNHTVLCADGYILNAHRKCVDINECVTDLHTCSRGEHCVNTLGSFHCYKALTCEPGYALKDGECEDVDECAMGTHTCQPGFLCQNTKGSFYCQARQRCMDGFLQDPEGNCVDINECTSLSEPCRPGFSCINTVGSYTCQRNPLICARGYHASDDGTKCVDVNECETGVHRCGEGQVCHNLPGSYRCDCKAGFQRDAFGRGCIDVNECWASPGRLCQHTCENTLGSYRCSCASGFLLAADGKRCEDVNECEAQRCSQECANIYGSYQCYCRQGYQLAEDGHTCTDIDECAQGAGILCTFRCLNVPGSYQCACPEQGYTMTANGRSCKDVDECALGTHNCSEAETCHNIQGSFRCLRFECPPNYVQVSKTKCERTTCHDFLECQNSPARITHYQLNFQTGLLVPAHIFRIGPAPAFTGDTIALNIIKGNEEGYFGTRRLNAYTGVVYLQRAVLEPRDFALDVEMKLWRQGSVTTFLAKMHIFFTTFAL

SEQ ID NO: 60674 - protein, 14 aa, Homo sapiens
REHTALLKIEGVYA

SEQ ID NO: 60675 - protein, 357 aa, Homo sapiens
LDEVAFMLCRKDAVVSFGKVFLPVFYSLIFVLGLSGNLLLLMVLLRYVPRRRMVEIYLLNLAISNLLFLVTLPFWGISVAWHWVFGSFLCKMVSTLYTINFYSGIFFISCMSLDKYLEIVHAQPYHRLRTRAKSLLLATIVWAVSLAVSIPDMVFVQTHENPKGVWNCHADFGGHGTIWKLFLRFQQNLLGFLLPLLAMIFFYSRIGCVLVRLRPAGQGRALKIAAALVVAFFVLWFPYNLTLFLHTLLDLQVFGNCEVSQHLDYALQVTESIAFLHCCFSPILYAFSSHRFRQYLKAFLAAVLGWHLAPGTAQASLSSCSESSILTAQEEMTGMNDLGERQSENYPNKEDVGNKSA

SEQ ID NO: 60676 - protein, 66 aa, Homo sapiens
LVSHLEQGKESCFTQPQGVLSRNDWRAGWIGYLELRRYTYLAKAVLRRIVSKIFRNRQCWEDRRKA

SEQ ID NO: 60677 - protein, 28 aa, Homo sapiens
IRIIQYAVCRISMTTLKMNFLYSPDILI

SEQ ID NO: 60678 - protein, 342 aa, Homo sapiens
VDSADTGERSGWLTGWLPTWCPTSISHLKEAEEKMLKCVPCTYKKEPVRISNGNKIWTLKFSHNISNKTPLVLLHGFGGGLGLWALNFGDLCTNRPVYAFDLLGFGRSSRPRFDSDAEEVENQFVESIEEWRCALGLDKMILLGHNLGGFLAAAYSLKYPSRVNHLILVEPWGFPERPDLADQDRPIPVWIRALGAALTPFNPLAGLRIAGPFGLSLVQRLRPDFKRKYSSMFEDDTVTEYIYHCNVQTPSGETAFKNMTIPYGWAKRPMLQRIGKMHPDIPVSVIFGARSCIDGNSGTSIQSLRPHSYVKTIAILGAGHYVYADQPEEFNQKVKEICDTVD

SEQ ID NO: 60679 - protein, 76 aa, Homo sapiens
MWTFFSRGLSFSMSSAIASVTVTFSNILSSAFLGYVLYGECQEVLWWGGVFLILCGLTLIHRKLPPTWKPLPHKQQ

SEQ ID NO: 60680 - protein, 11 aa, Homo sapiens
LALRSQLRLDS

SEQ ID NO: 60681 - protein, 298 aa, Homo sapiens
IFTMSGALDVLQMKEEDVLKFLAAGTHLGGTNLDFQMEQYIYKRKSDGIYIINLKRTWEKLLLAARAIVAIENPADVSVISSRNTGQRAVLKFAAATGATPIAGRFTPGTFTNQIQAAFREPRLLVVTDPRADHQPLTEASYVNLPTIALCNTDSPLRYVDIAIPCNNKGAHSVGLMWWMLAREVLRMRGTISREHPWEVMPDLYFYRDPEEIEKEEQAAAEKAVTKEEFQGEWTAPAPEFTATQPEVADWSEGVQVPSVPIQQFPTEDWSAQPATEDWSAAPTAQATEWVGATTDWS

SEQ ID NO: 60682 - protein, 27 aa, Homo sapiens
VSSPLPPRPDPLFCPKELALTASGSRS

SEQ ID NO: 60683 - protein, 32 aa, Homo sapiens
MYDPETDCWTFMAPMACHEGGVGVGCIPLLTI

SEQ ID NO: 60684 - protein, 355 aa, Homo sapiens
VSVIVMLVSEAEMEKQKVARYFPTERGQPMVHGALSLALSSVRSTETHVERVLSLQFRDQSLKRSLVHLHFPTWPELGLPDSPSNLLRFIQEVHAHYLHQRPLHTPIIVHCSSGVGRTGAFALLYAAVQEVEAGNGIPELPQLVRRMRQQRKHMLQEKLHLRFCYEAVVRHVEQVLQRHGVPPPCKPLASASISQKNHLPQDSQDLVLGGDVPISSIQATIAKLSIRPPGGLESPVASLPGPAEPPGLPPASLPESTPIPSSSPPPLSSPLPEAPQPKEEPPVPEAPSSGPPSSSLELLASLTPEAFSLDSSLRGKQRMSKHNFLQAHNGQGLRATRPSDDPLSLLDPLWTLNKT

SEQ ID NO: 60685 - protein, 115 aa, Homo sapiens
MSLIQDDVDLRDTRRHCDKGNLRVKPQQGTAVFWYNYLPDGQGWVGDVDDYSLHGGCLVTRGTKWIANNWINVDPSRARQALFQQEMARLAREGGTDSQPEWALDRAYRDARVEL

SEQ ID NO: 60686 - protein, 41 aa, Homo sapiens
MNSTVFHVPDVADMDCWPVSPEFGHRCALGGQGLEVYNWYD

SEQ ID NO: 60687 - protein, 891 aa, Homo sapiens
VGLSLLLPLSGRTFLLLLSVVMAQSHWPSEPSEAVRDWENQLEASMHSVLSDLHEAVPTVVGIPDGTAVVGRSFRVTIPTDLIASSGDIIKVSAAGKEALPSWLHWDSQSHTLEGLPLDTDKGVHYISVSATRLGANGSHIPQTSSVFSIEVYPEDHSELQSVRTASPDPGEVVSSACAADEPVTVLTVILDADLTKMTPKQRIDLLHRMRSFSEVELHNMKLVPVVNNRLFDMSAFMAGPGNAKKVVENGALLSWKLGCSLNQNSVPDIHGVEAPAREGAMSAQLGYPVVGWHIANKKPPLPKRVRRQIHATPTPVTAIGPPTTAIQEPPSRIVPTPTSPAIAPPTETMAPPVRDPVPGKPTVTIRTRGAIIQTPTLGPIQPTRVSEAGTTVPGQIRPTMTIPGYVEPTAVATPPTTTTKKPRVSTPKPATPSTDSTTTTTRRPTKKPRTPRPVPRVTTKVSITRLETASPPTRIRTTTSGVPRGGEPNQRPELKNHIDRVDAWVGTYFEVKIPSDTFYDHEDTTTDKLKLTLKLREQQLVGEKSWVQFNSNSQLMYGLPDSSHVGKHEYFMHATDKGGLSAVDAFEIHVHRRPQGDRAPARFKAKFVGDPALVLNDIHKKIALVKKLAFAFGDRNCSTITLQNITRGSIVVEWTNNTLPLEPCPKEQIAGLSRRIAEDDGKPRPAFSNALEPDFKATSITVTGSGSCRHLQFIPVVPPRRVPSEAPPTEVPDRDPEKSSEDDVYLHTVIPAVVVAAILLIAGIIAMICYRKKRKGKLTLEDQATFIKKGVPIIFADELDDSKPPPSSSMPLILQEEKAPLPPPEYPNQSVPETTPLNQDTMGEYTPLRDEDPNAPPYQPPPPFTAPMEGKGSRPKNMTPYRSPPPYVPP

SEQ ID NO: 60688 - protein, 231 aa, Homo sapiens
RLQPLARLTMALSAETESHIYRALRTASGAAAHLVALGFTIFVAVLARPGSSLFSWHPVLMSLAFSFLMTEALLVFSPESSLLHSLSRKGRARCHWVLQLLALLCALLGLGLVILHKEQLGKAHLVTRHGQAGLLAVLWAGLQCSGGVGLLYPKLLPRWPLAKLKLYHATSGLVGYLLGSASLLLGMCSLWFTASVTGAAWYLAVLCPVLTSLVIMNQVSNAYLYRKRIQP

SEQ ID NO: 60689 - protein, 642 aa, Homo sapiens
LNMESVVRRCPFLSRVPQAFLQKAGKSLLFYAQNCPKMMEVGAKPAPRALSTAAVHYQQIKETPPASEKDKTAKAKVQQTPDGSQQSPDGTQLPSGHPLPATSQGTASKCPFLAAQMNQRGSSVFCKASLELQEDVQEMNAVRKEVAETSAGPSVVSVKTDGGDPSGLLKNFQDIMQKQRPERVSHLLQDNLPKSVSTFQYDRFFEKKIDEKKNDHTYRVFKTVNRRAHIFPMADDYSDSLITKKQVSVWCSNDYLGMSRHPRVCGAVMDTLKQHGAGAGGTRNISGTSKFHVDLERELADLHGKDAALLFSSCFVANDSTLFTLAKMMPGCEIYSDSGNHASMIQGIRNSRVPKYIFRHNDVSHLRELLQRSDPSVPKIVAFETVHSMDGAVCPLEELCDVAHEFGAITFVDEVHAVGLYGARGGGIGDRDGVMPKMDIISGTLGKAFGCVGGYIASTSSLIDTVRSYAAGFIFTTSLPPMLLAGALESVRILKSAEGRVLRRQHQRNVKLMRQMLMDAGLPVVHCPSHIIPVRVADAAKNTEVCDELMSRHNIYVQAINYPTVPRGEELLRIAPTPHHTPQMMNYFLENLLVTWKQVGLELKPHSSAECNFCRRPLHFEVMSEREKSYFSGLSKLVSAQA

SEQ ID NO: 60690 - protein, 485 aa, Homo sapiens
TVYIIQVTDGSHEWTVKHRYSDFHDLHEKLVAERKIDKNLLPPKKIIGKNSRSLVEKREKDLEVYLQKLLAAFPGVTPRVLAHFLHFHFYEINGITAALAEELFEKGEQLLGAGEVFAIGPLQLYAVTEQLQQGKPTCASGDAKTDLGHILDFTCRLKYLKVSGTEGPFGTSNIQEQLLPFDLSIFKSLHQVEISHCDAKHIRGLVASKPTLATLSVRFSATSMKEVLVPEASEFDEWEPEGTTLEGPVTAVIPTWQALTTLDLSHNSVSEIDESVKLIPKIEFLDLSHNGLLVVDNLQHLYNLVHLDLSYNKLSSLEGLHTKLGNIKTLNLAGNLLESLSGLHKLYSLVNLDLRDNRIEQMEEVRSIGSLPCLEHVSLLNNPLSIIPDYRTKVLAQFGERASEVCLDDTVTTEKELDTVEVLKAIQKAKEVKSKLSNPEKKGGEDSRLSAAPCIRPSSSPPTVAPASASLPQPILSNQGILGDE

SEQ ID NO: 60691 - protein, 687 aa, Homo sapiens
VHTEWTQRDLERMENIRFCRQYLVFHDGDSVVFAGPAGNSVETRGELLSRESPSGTMKAVLRKAGGTGPGEEKQFLEVWEKNRKLKSFNLSALEKHGPVYEDDCFGCLSWSHSETHLLYVAEKKRPKAESFFQTKALDVSASDDEIARLKKPDQAIKGDQFVFYEDWGENMVSKSIPVLCVLDVESGNISVLEGVPENVSPGQAFWAPGDAGVVFVGWWHEPFRLGIRFCTNRRSALYYVDLIGGKCELLSDDSLAVSSPRLSPDQCRIVYLQYPSLIPHHQCSQLCLYDWYTKVTSVVVDVVPRQLGENFSGIYCSLLPLGCWSADSQRVVFDSAQRSRQDLFAVDTQVGTVTSLTAGGSGGSWKLLTIDQDLMVAQFSTPSLPPTLKVGFLPSAGKEQSVLWVSLEEAEPIPDIHWGIRVLQPPPEQENVQYAGLDFEAILLQPGSPPDKTQVPMVVMPHGGPHSSFVTAWMLFPAMLCKMGFAVLLVNYRGSTGFGQDSILSLPGNVGHQDVKDVQFAVEQVLQEEHFDASHVALMGGSHGGFISCHLIGQYPETYRACVARNPVINIASMLGSTDIPDWCVVEAGFPFSSDCLPDLSVWAEMLDKSPIRYIPQVKTPLLLMLGQEDRRVPFKQGMEYYRALKTRNVPVRLLLYPKSTHALSEVEVESDSFMNAVLWLRTHLGS

SEQ ID NO: 60692 - protein, 29 aa, Homo sapiens
KDCFFCKTTIVSVEDWEKGANTSTTSSAA

SEQ ID NO: 60693 - protein, 10 aa, Homo sapiens
IKFEPFGAVC

SEQ ID NO: 60694 - protein, 714 aa, Homo sapiens
LRGLPITITESDIREMMESFEGPQPADVRLMKRKTGVSRGFAFVEFYHLQDATSWMEANQKKLVIQGKHIAMHYSNPRPKFEDWLCNKCCLNNFRKRLKCFRCGADKFDSEQEVPPGTTESVQSVDYYCDTIILRNIAPHTVVDSIMTALSPYASLAVNNIRLIKDKQTQQNRGFAFVQLSSAMDASQLLQILQSLHPPLKIDGKTIGVDFAKSARKDLVLSDGNRVSAFSVASTAIAAAQWSSTQSQSGEGGSVDYSYLQPGQDGYAQYAQYSQDYQQFYQQQAGGLESDASSASGTAVTTTSAAVVSQSPQLYNQTSNPPGSPTEEAQPSTSTSTQAPAASPTGVVPGTKYAVPDTSTYQYDESSGYYYDPTTGLYYDPNSQYYYNSLTQQYLYWDGEKETYVPAAESSSHQQSGLPPAKEGKEKKEKPKSKTAQQIAKDMERWAKSLNKQKENFKNSFQPVNSLREEERRESAAADAGFALFEKKGALAERQQLIPELVRNGDEENPLKRGLVAAYSGDSDNEEELVERLESEEEKLADWKKMACLLCRRQFPNKDALVRHQQLSDLHKQNMDIYRRSRLSEQELEALELREREMKYRDRAAERREKYGIPEPPEPKRKKQFDAGTVNYEQPTKDGIDHSNIGNKMLQAMGWREGSGLGRKCQGITAPIEAQVRLKGAGLGAKGSAYGLSGADSYKDAVRKAMFARFTEME

SEQ ID NO: 60695 - protein, 34 aa, Homo sapiens
LLGSYKGKKCAFRVIQVSPFLLALSGNSRELVLD

SEQ ID NO: 60696 - protein, 57 aa, Homo sapiens
ISFPAPLYIGEVVLASAEVKKLKRFIAIIAVSCSVIESKKTVMEGWVKVMVPEASKS

SEQ ID NO: 60697 - protein, 161 aa, Homo sapiens
LTLPLDFKEFDLLRKEADFYQIEPLIQCLNDPKPLYPMDTFEEVVELSSTRKLSKYSNPVAVIITQLTITTKVHSLLEGISNYFTKWNKHMMDTRDCQVSFTFGPCDYHQEVSLRVHLMEYITKQGFTIRNTRVHHMSERANENTVEHNWTFCRLARKTDD

SEQ ID NO: 60698 - protein, 272 aa, Homo sapiens
KKYEPPVPTRVGKKKKKTKGPDAASKLPLVTPHTQCRLKLLKLERIKDYLLMEEEFIRNQEQMKPLEEKQEEERSKVDDLRGTPMSVGTLEEIIDDNHAIVSTSVGSEHYVSILSFVDKDLLEPGCSVLLNHKVHAVIGVLMDDTDPLVTVMKVEKAPQETYADIGGLDNQIQEIKESVELPLTHPEYYEEMGIKPPKGVILYGPPGTGKTLLAKAVANQTSATFLRVVGSELIQKYLGDGPKLVRELFRVAEEHAPSIVFIDEIDAIGTKR

SEQ ID NO: 60699 - protein, 9 aa, Homo sapiens
IGSTGCYNF

SEQ ID NO: 60700 - protein, 19 aa, Homo sapiens
RGSHNSFQDLVTIVSVPVQ

SEQ ID NO: 60701 - protein, 36 aa, Homo sapiens
IDIYHLTREMPPSDKTPLQCVMEVDREPAMLEREAE

SEQ ID NO: 60702 - protein, 589 aa, Homo sapiens
LSRAEAGSQTAAGAMERAVVRCVPSEPKLSLSFALADGSHKNMQRDQSEPLGRVLSRIATNALKGHAKAAAAKKSRKSRPNASGGAACSGPGPEPAVFCEPVVKLYYREEAVAEDVLNVDAWQDGAVLQIGDVKYKVERNPPAFTELQLPRYIMAGFPVCPKLSLEFGDPASSLFRWYKEAKPGAAEPEVGVPSSLSPSSPSSSWTETDVEERVYTPSNADIGLRLKLHCTPGDGQRFGHSRELESVCVVEAGPGTCTFDHRHLYTKKVTEDALIRTVSYNILADTYAQTEFSRTVLYPYCAPYALELDYRQNLIQKELTGYNADVICLQEVDRAVFSDSLVPALEAFGLEGVFRIKQHEGLATFYRKSKFSLLSQHDISFYEALESDPLHKELLEKLVLYPSAQEKVLQRSSVLQVSVLQSTKDSSKRICVANTHLYWHPKGGYIRLIQMAVALAHIRHVSCDLYPGIPVIFCGDFNSTPSTGMYHFVINGSIPEDHEDWASNGEEERCNMSLTHFFKLKSACGEPAYTNYVGGFHGCLDYIFIDLNALEVEQVIPLPSHEEVTTHQALPSVSHPSDHIALVCDLKWK

SEQ ID NO: 60703 - protein, 1456 aa, Homo sapiens
LLSSFRCAFSDMRRLLEPCWWILFLKITSSVLHYVVCFPALTEGYVGALHENRHGSAVQIRRRKASGDPYWAYSGAYGPEHWVTSSVSCGGRHQSPIDILDQYARVGEEYQELQLDGFDNESSNKTWMKNTGKTVAILLKDDYFVSGAGLPGRFKAEKVEFHWGHSNGSAGSEHSINGRRFPVEMQIFFYNPDDFDSFQTAISENRIIGAMAIFFQVSPRDNSALDPIIHGLKGVVHHEKETFLDPFVLRDLLPASLGSYYRYTGSLTTPPCSEIVEWIVFRRPVPISYHQLEAFYSIFTTEQQDHVKSVEYLRNNFRPQQRLHDRVVSKSAVRDSWNHDMTDFLENPLGTEASKVCSSPPIHMKVQPLNQTALQVSWSQPETIYHPPIMNYMISYSWTKNEDEKEKTFTKDSDKDLKATISHVSPDSLYLFRVQAVCRNDMRSDFSQTMLFQANTTRIFQGTRIVKTGVPTASPASSADMAPISSGSSTWTSSGIPFSFVSMATGMGPSSSGSQATVASVVTSTLLAGLGFGGGGISSFPSTVWPTRLPTAASASKQAARPVLATTEALASPGPDGDSSPTKDGEGTEEGEKDEKSESEDGEREHEEDGEKDSEKKEKSGVTHAAEERNQTEPSPTPSSPNRTAEGGHQTIPGHEQDHTAVPTDQTGGRRDAGPGLDPDMVTSTQVPPTATEEQYAGSDPKRPEMPSKKPMSRGDRFSEDSRFITVNPAEKNTSGMISRPAPGRMEWIIPLIVVSALTFVCLILLIAVLVYWRGCNKIKSKGFPRRFREVPSSGERGEKGSRKCFQTAHFYVEDSSSPRVVPNESIPIIPIPDDMEAIPVKQFVKHIGELYSNNQHGFSEDFEEVQRCTADMNITAEHSNHPENKHKNRYINILAYDHSRVKLRPLPGKDSKHSDYINANYVDGYNKAKAYIATQGPLKSTFEDFWRMIWEQNTGIIVMITNLVEKGRRKCDQYWPTENSEEYGNIIVTLKSTKIHACYTVRRFSIRNTKVKKGQKGNPKGRQNERVVIQYHYTQWPDMGVPEYALPVLTFVRRSSAARMPETGPVLVHCSAGVGRTGTYIVIDSMLQQIKDKSTVNVLGFLKHIRTQRNYLVQTEEQYIFIHDALLEAILGKETEVSSNQLHSYVNSILIPGVGGKTRLEKQFKLVTQCNAKYVECFSAQKECNKEKNRNSSVVPSERARVGLAPLPGMKGTDYINASYIMGYYRSNEFIITQHPLPHTTKDFWRMIWDHNAQIIVMLPDNQSLAEDEFVYWPSREESMNCEAFTVTLISKDRLCLSNEEQIIIHDFILEATQDDYVLEVRHFQCPKWPNPDAPISSTFELINVIKEEALTRDGPTIVHDEYGAVSAGMLCALTTLSQQLENENAVDVFQVAKMINLMRPGVFTDIEQYQFIYKAMLSLVSTKENGNGPMTVDKNGAVLIADESDPAESMESLV

SEQ ID NO: 60704 - protein, 4 aa, Homo sapiens
IRPC

SEQ ID NO: 60705 - protein, 129 aa, Homo sapiens
KMTSLFAQEIRLSKRHEEIVSQRLMLLQQMENKLGDQHTEKASQLQTVETAFKRNLSLLKDIEAAEKSLQTRIHPLPRPEVVSLETRYWASVEEYIPKWEQFLLGRAPYPFAVENQNEAENTIQNEAQR

SEQ ID NO: 60706 - protein, 28 aa, Homo sapiens
LPMKKNILKASSFCLKKETLKTVMLVVH

SEQ ID NO: 60707 - protein, 412 aa, Homo sapiens
ISALLGFCYMAAFLKMSVSVNFFRPFTRFLVPFTLHRKRNNLTILQRYMSSKIPAVTYPKNESTPPSEELELDKWKTTMKSSVQEECVSTISSSKDEDPLAATREFIEMWRLLGREVPEHITEEELKTLMECVSNTAKKKYLKYLYTKEKVKKARQIKKEMKAAAREEAKNIKLLETTEEDKQKNFLFLRLWDRNMDIAMGWKGAQAMQFGQPLVFDMAYENYMKRKELQNTVSQLLESEGWNRRNVDPFHIYFCNLKIDGALHRELVKRYQEKWDKLLLTSTEKSHVDLFPKDSIIYLTADSPNVMTTFRHDKVYVIGSFVDKSMQPGTSLAKAKRLNLATECLPLDKYLQWEIGNKNLTLDQMIRILLCLKNNGNWQEALQFVPKRKHTGFLEISQHSQEFINRLKKAKT

SEQ ID NO: 60708 - protein, 6 aa, Homo sapiens
MSEKQW

SEQ ID NO: 60709 - protein, 174 aa, Homo sapiens
KAGDEKPEKSQRAGAAGGPEEEAEKPVKTKTVSSSNGGESSSRSAEKRSAEEEAADLPTKPTKISKFGFAIGSQTTKKASAISIKLGSSKPKETVPTLAPKTLSVAAAFNEDEDSEPEEMPPEAKMRMKNIGRDTPTSAGPNSFNKGKHGFSDNQKLWERNIKSHLGNVHDQDN

SEQ ID NO: 60710 - protein, 34 aa, Homo sapiens
TPPPAAWTPSVAHQEGGGIWNPRGPVPAVCSSAS

SEQ ID NO: 60711 - protein, 648 aa, Homo sapiens
KSALFQLAEMCLASEGMKMEESKLIKAKESDGGRIKELEKGKEEKEIKMEKTDETRLQKEAEFEKSAKENLRDSKELRNFEALQIDDIMAIKMEDPKEIRKEELEEDHKCSHFPDFSYSASSKIIISDVPSRKDHMCHPHGIMIIEDPAALNKPEKLKKKKKKSKMDRHGNDKSTPKKTCKKRQSSESDIESVIYTIEAVAKGDWGIEKLGDTPRKKVRTSSSGKGSILDAKPPKKKVKSREKKMSKEKSSDTTKESRPPDFISISASKNISGETPEGIKAEPLTPMEDALPPSLSGQAKPEDSDCHRKIETCGSRKSERSCKGALYKTLVSEGMLTSLRANVDRGKRSSGKGNSSDHEGCWNEESWTFSQSGTSGSKKFKKTKPKEDCLLGSAKLDEEFEKKFNSLPQYSPVTFDRKCVPVPRKKKKTGNVSSEPTKTSKGPFQSQKKNLFHKIVSKYKHKKEKPNVPEKGSGDKWSNKQLFLDAIHPTEAIFSEDRNTMEPVHKVKNIPSIFNTPEPTTTQEPLVGSQKRKARKTKITHLVRTADGRVSPAGGTLDDKPKEQLQRSLPKATETDCNDKCSHNTEVGETRSSTPEMPAVSAFFSLAALAEVAAMENVHRGQRSTPLTHDGQPKEMPQAPVLISCADQ

SEQ ID NO: 60712 - protein, 245 aa, Homo sapiens
MQQETVPVPVPSEKTKQPKECFLIQPKERKENTTKTRKRRKKKITDVLAKSEPKPGLPEDLQKLMKDYYSSRRLVIELEELNLPDSCFLKANDLTHSLSSYLKEICPKWVKLRKNHSEKKSVLMLIICSSAVRALELIRSMTAFRGDGKVIKLFAKHIKVQAQVKLLEKRVVHLGVGTPGRIKELVKQGGLNLSPLKFLVFDWNWRDQKLRRMMDIPEIRKEVFELLEMGVLSLCKSESLKLGLF

SEQ ID NO: 60713 - protein, 706 aa, Homo sapiens
VTWTSTAMAEGEDVPPLPTSSGDGWEKDLEEALEAGGCDLETLRNIIQGRPLPADLRAKVWKIALNVAGKGDSLASWDGILDLPEQNTIHKDCLQFIDQLSVPEEKAAELLLDIESVITFYCKSRNIKYSTSLSWIHLLKPLVHLQLPRSDLYNCFYAIMNKYIPRDCSQKGRPFHLFRLLIQYHEPELCSYLDTKKITPDSYALNWLGSLFACYCSTEVTQAIWDGYLQQADPFFIYFLMLIILVNAKEVILTQESDSKEEVIKFLENTPSSLNIEDIEDLFSLAQYYCSKTPASFRKDNHHLFGSTLLGIKDDDADLSQALCLAISVSEILQANQLQGEGVRFFVVDCRPAEQYNAGHLSTAFHLDSDLMLQNPSEFAQSVKSLLEAQKQSIESGSIAGGEHLCFMGSGREEEDMYMNMVLAHFLQKNKEYVSIASGGFMALQQHLADINVDGPENGYGHWIASTSGSRSSINSVDGESPNGSSDRGMKSLVNKMTVALKTKSVNVREKVISFIENTSTPVDRMSFNLPWPDRSCTERHVSSSDRVGKPYRGVKPVFSIGDEEEYDTDEIDSSSMSDDDRKEVVNIQTWINKPDVKHHFPCKEVKESGHMFPSHLLVTATHMYCLREIVSRKGLAYIQSRQALNSVVKITSKKKHPELITFKYGNSSASGIEILAIERYLIPNAGDATKAIKQQIMKVLDALES

SEQ ID NO: 60714 - protein, 136 aa, Homo sapiens
KKMNFFKVGKHFTVVDMPGYGFRAPEDFVDMVETYLKERRNLKRTFLLVDSVVGIQKTDNIAIEMCEEFALPYVIVLTKIDKSSKGHLLKQVLQIQKFVNMKTQGCFPQLFPVSAVTFSGIHLLRCFIASVTGSLD

SEQ ID NO: 60715 - protein, 60 aa, Homo sapiens
RRRLQQSFRTSFLEPMTHEVLSTFIPSEGSSSKVEESVARDGSISLCDPGGLWDVGFRPL

SEQ ID NO: 60716 - protein, 473 aa, Homo sapiens
KCLIEVNETITQISWEKIHGKSSQTVAVHHPQYGFSVQGEYQGRVLFKNYSLNDATITLHNIGFSDSGKYICKAVTFPLGNAQSSTTVTVLVEPTVSLIKGPDSLIDGGNETVAAICIAATGKPVAHIDWEGDLGEMESTTTSFPNETATIISQYKLFPTRFARGRRITCVVKHPALEKDIRYSFILDIQYAPEVSVTGYDGNWFVGRKGVNLKCNADANPPPFKSVWSRLDGQWPDGLLASDNTLHFVHPLTFNYSGVYICKVTNSLGQRSDQKVIYISDPPTTTTLQPTIQWHPSTADIEDLATEPKKLPFPLSTLATIKDDTIATIIASVVGGALFIVLVSVLAGIFCYRRRRTFRGDYFAKNYIPPSDMQKESQIDVLQQDELDSYPDSVKKENKNPVNNLIRKDYLEEPEKTQWNNVENLNRFERPMDYYEDLKMGMKFVSDEHYDENEDDLVSHVDGSVISRREWYV

SEQ ID NO: 60717 - protein, 1179 aa, Homo sapiens
LGTSVRSSPSLAKIQGSKQFSYDGTDKNIPMKPPTPLLNTTSSLSGYPLGRADFDHYTGRDSERALRLSEKPPYSKYSSRHKSHDNVYSLGGLEGRKASGSLLAMWNGSSLSDAGPPPISRSGAASMPSSPKQARKMSIQDSLALQPKLTRHKELASENINLRTRKYSSSSLSHMGAYSRSLPRLYRATENQLTPLSLPPRNSLGNSKRTKLGEKDLPHSVIDNDNYLNFSSLSSGALPYKTSASEGNPYVSSTLSVPASPRVARKMLLASTSSCASDDFDQASYVGTNPSHSLLAGESDRVFATRRNFSCGSVEFDEADLESLRQASGTPQPALRERKSSISSISGRDDLMDYHRRQREERLREQEMERLERQRLETILSLCAEYTKPDSRLSTGTTVEDVQKINKELEKLQLSDEESVFEEALMSPDTRYRCHRKDSLPDADLASCGSLSQSSASFFTPRSTRNDELLSDLTRTPPPPSSTFPKASSESSYLSILPKTPEGISEEQRSQELAAMEETRIVILNNLEELKQKIKDINDQMDESFRELDMECALLDGEQKSETTELMKEKEILDHLNRKIAELEKNIVGEKTKEKVKLDAEREKLERLQELYSEQKTQLDNCPESMREQLQQQLKRDADLLDVESKHFEDLEFQQLEHESRLDEEKENLTQQLLREVAEYQRNIVSRKEKISALKKQANHIVQQAQREQDHFVKEKNNLIMMLQREKENLCNLEKKYSSLSGGKGFPVNPNTLKEGYISVNEINEPCGNSTNLSPSTQFPADADAVATEPATAVLASQPQSKEHFRSLEERKKQHKEGLYLSDTLPRKKTTSSISPHFSSATMGRSITPKAHLPLGQSNSCGSVLPPSLAAMAKDSESRRMLRGYNHQQMSEGHRQKSEFYNRTASESNVYLNSFHYPDHSYKDQAFDTLSLDSSDSMETSISACSPDNISSASTSNIARIEEMERLLKQAHAEKTRLLESREREMEAKKRALEEEKRRREILEKRLQEETSQRQKLIEKEVKIRERQRAQARPLTRYLPVRKEDFDLRSHVETAGHNIDTCYHVSITEKTCRGFLIKMGGKIKTWKKRWFVFDRNKRTFSYYADKHETKLKGVIYFQAIEEVYYDHLKNANKSPNPLLTFSVKTHDRIYYMVAPSPEAMRIWMDVIVTGAEGYTHFLL

SEQ ID NO: 60718 - protein, 308 aa, Homo sapiens
TKMAVARLAAVAAWVPCRSWGWAAVPFGPHRGLSVLLARIPQRAPRWLPACRQKTSLSFLNRPDLPNLAYKKLKGKSPGIIFIPGYLSYMNGTKALAIEEFCKSLGHACIRFDYSGVGSSDGNSEESTLGKWRKDVLSIIDDLADGPQILVGSSLGGWLMLHAAIARPEKVVALIGVATAADTLVTKFNQLPVELKKEVEMKGVWSMPSKYSEEGVYNVQYSFIKEAEHHCLLHSPIPVNCPIRLLHGMKDDIVPWHTSMQVADRVLSTDVDVILRKHSDHRMREKADIQLLVYTIDDLIDKLSTIVN

SEQ ID NO: 60719 - protein, 35 aa, Homo sapiens
MHNFEHYFGFFHYIREALKSDKLAQLKELIHRQAS

SEQ ID NO: 60720 - protein, 395 aa, Homo sapiens
LPAMEWWASSPLRLWLLLFLLPSAQGRQKESGSKWKVFIDQINRSLENYEPCSSQNCSCYHGVIEEDLTPFRGGISRKMMAEVVRRKLGTHYQITKNRLYRENDCMFPSRCSGVEHFILEVIGRLPDMEMVINVRDYPQVPKWMEPAIPVFSFSKTSEYHDIMYPAWTFWEGGPAVWPIYPTGLGRWDLFREDLVRSAAQWPWKKKNSTAYFRGSRTSPERDPLILLSRKNPKLVDAEYTKNQAWKSMKDTLGKPAAKDVHLVDHCKYKYLFNFRGVAASFRFKHLFLCGSLVFHVGDEWLEFFYPQLKPWVHYIPVKTDLSNVQELLQFVKANDDVAQEIAERGSQFIRNHLQMDDITCYWENLLSEYSKFLSYNVTRRKGYDQIIPKMLKTEL

SEQ ID NO: 60721 - protein, 22 aa, Homo sapiens
KSVARITKLEKAKAKELATKLG

SEQ ID NO: 60722 - protein, 273 aa, Homo sapiens
KYFKMLSRKLAQLPDRCTLKTGHYNINFISSLGVSYMMLCTENYPNVLAFSFLDELQKEFITTYNMMKTNTAVRPYCFIEFDNFIQRTKQRYNNPRSLSTKINLSDMQTEIKLRPPYQISMCELGSANGVTSAFSVDCKGAGKISSAHQRLEPATLSGIVGFILSLLCGALNLIRGFHAIESLLQSDGDDFNYIIAFFLGTAACLYQCYLLVYYTGWRNVKSFLTFGLICLCNMYLYELRNLWQLFFHVTVGAFVTLQIWLRQAQGKAPDYDV

SEQ ID NO: 60723 - protein, 601 aa, Homo sapiens
VVSTANRRLLRTSPPVRAFAKELFLGKIKKKEVFPFPEVSQDELNEINQFLGPVEKFFTEEVDSRKIDQEGKIPDETLEKLKSLGLFGLQVPEEYGGLGFSNTMYSRLGEIISMDGSITVTLAAHQAIGLKGIILAGTEEQKAKYLPKLASGEHIAAFCLTEPASGSDAASIRSRATLSEDKKHYILNGSKVWITNGGLANIFTVFAKTEVVDSDGSVKDKITAFIVERDFGGVTNGKPEDKLGIRGSNTCEVHFENTKIPVENILGEVGDGFKVAMNILNSGRFSMGSVVAGLLKRLIEMTAEYACTRKQFNKRLSEFGLIQEKFALMAQKAYVMESMTYLTAGMLDQPGFPDCSIEAAMVKVFSSEAAWQCVSEALQILGGLGYTRDYPYERILRDTRILLIFEGTNEILRMYIALTGLQHAGRILTTRIHELKQAKVSTVMDTVGRRLRDSLGRTVDLGLTGNHGVVHPSLADSANKFEENTYCFGRTVETLLLRFGKTIMEEQLVLKRVANILINLYGMTAVLSRASRSIRIGLRNHDHEVLLANTFCVEAYLQNLFSLSQLDKYAPENLDEQIKKVSQQILEKRAYICAHPLDRTC

SEQ ID NO: 60724 - protein, 894 aa, Homo sapiens
MIPVLTSKKASELPVSEVASILQFKNPLIMLLLASAVISVLMHQFDDAVSITVAILIVVTVAFVQEYRSEKSLEELSKLVPPECHCVREGKLEHTLARDLVPGDTVCLSVGDRVPADLRLFEAVDLSIDESSLTGETTPCSKVTAPQPAATNGDLASRSNIAFMGTLVRCGKAKGVVIGTGENSEFGEVFKMMQAEEAPKTPLQKSMDLLGKQLSFYSFGIIGIIMLVGWLLGKDILEMFTISVSLAVAAIPEGLPIVVTVTLALGVMRMVKKRAIVKKLPIVETLGCCNVICSDKTGTLTKNEMTVTHIFTSDGLHAEVTGVGYNQFGEVIVDGDVVHGFYNPAVSRIVEAGCVCNDAVIRNNTLMGKPTEGALIALAMKMGLDGLQQDYIRKAEYPFSSEQKWMAVKCVHRTQQDRPEICFMKGAYEQVIKYCTTYQSKGQTLTLTQQQRDVYQQEKARMGSAGLRVLALASGPELGQLTFLGLVGIIDPPRTGVKEAVTTLIASGVSIKMITGDSQETAVAIASRLGLYSKTSQSVSGEEIDAMDVQQLSQIVPKVAVFYRASPRHKMKIIKSLQKNGSVVAMTGDGVNDAVALKAADIGVAMGQTGTDVCKEAADMILVDDDFQTIMSAIEEGKGIYNNIKNFVRFQLSTSIAALTLISLATLMNFPNPLNAMQILWINIIMDGPPAQSLGVEPVDKDVIRKPPRNWKDSILTKNLILKILVSSIIIVCGTLFVFWRELRDNVITPRDTTMTFTCFVFFDMFNALSSRSQTKSVFEIGLCSNRMFCYAVLGSIMGQLLVIYFPPLQKVFQTESLSILDLLFLLGLTSSVCIVAEIIKKVERSREKIQKHVSSTSSSFLEVWLWERSGQQLVEIHPHLETGLPLTEDVSCV

SEQ ID NO: 60725 - protein, 195 aa, Homo sapiens
KKKKERSNRAASAAGAAGSAGGSSGAAGAAGGGAGAGTRPGDGGTASAGAAGPGAATKAVTKDEDEWKELEQKEVDYSGLRVQAMQISSEKEEDDNEKRQDPGDNWEEGGGGGGGMEKSSGPWNKTAPVQAPPAPVIVTETPEPAMTSGVYRPPGARLTTTRKTPQGPPEIYSDTQFPSLQSTAKHVESRNRYLK

SEQ ID NO: 60726 - protein, 40 aa, Homo sapiens
KRSYEKLQKKQMREFRGNTKNHREDRSEIERLTAKIEVCS

SEQ ID NO: 60727 - protein, 55 aa, Homo sapiens
RESEKLLEALQEEKRELKAALQSQENLIHEARIQKEKLQEKVKATNTQHAVEAIR

SEQ ID NO: 60728 - protein, 485 aa, Homo sapiens
IDAQHKRGKLTARERISLLLDPGSFVESDMFVEHRCADFGMAADKNKFPGDSVVTGRGRINGRLVYVFSQDFTVFGGSLSGAHAQKICKIMDQAITVGAPVIGLNDSGGARIQEGVESLAGYADIFLRNVTASGVIPQISLIMGPCAGGAVYSPALTDFTFMVKDTSYLFITGPDVVKSVTNEDVTQEELGGAKTHTTMSGVAHRAFENDVDALCNLRDFFNYLPLSSQDPAPVRECHDPSDRLVPELDTIVPLESTKAYNMVDIIHSVVDEREFFEIMPNYAKNIIVGFARMNGRTVGIVGNQPKVASGCLDINSSVKGARFVRFCDAFNIPLITFVDVPGFLPGTAQEYGGIIRHGAKLLYAFAEATVPKVTVITRKAYGGAYDVMSSKHLCGDTNYAWPTAEIAVMGAKGAVEIIFKGHENVEAAQAEYIEKFANPFPAAVRGFVDDIIQPSSTRARICCDLDVLASKKVQRPWRKHANIPL

SEQ ID NO: 60729 - protein, 77 aa, Homo sapiens
LALFAFVGFMLILVVVPLFVWKMGRLLQYSCCPVVVLPDTLKITNSPQKLISCRREEVDACATAVMSPEELLRAWIS

SEQ ID NO: 60730 - protein, 44 aa, Homo sapiens
IFWQEYSPRSCSWGRMCQFFCCGFLATDTPISGWNFVVSPWFSV

SEQ ID NO: 60731 - protein, 353 aa, Homo sapiens
IGAMALEQNQSTDYYYEENEMNGTYDYSQYELICIKEDVREFAKVFLPVFLTIVFVIGLAGNSMVVAIYAYYKKQRTKTDVYILNLAVADLLLLFTLPFWAVNAVHGWVLGKIMCKITSALYTLNFVSGMQFLACISIDRYVAVTKVPSQSGVGKPCWIICFCVWMAAILLSIPQLVFYTVNDNARCIPIFPRYLGTSMKALIQMLEICIGFVVPFLIMGVCYFITARTLMKMPNIKISRPLKVLLTVVIVFIVTQLPYNIVKFCRAIDIIYSLITSCNMSKRMDIAIQVTESIALFHSCLNPILYVFMGASFKNYVMKVAKKYGSWRRQRQSVEEFPFDSEGPTEPTSTFSI

SEQ ID NO: 60732 - protein, 669 aa, Homo sapiens
LETPIRMSVLSEVTASSRHYVDRLFDPDPQKVLQGVIDMKNAVIGNNKQKANLIVLGAVPRLLYLLQQETSSTELKTECAVVLGSLAMGTENNVKSLLDCHIIPALLQGLLSPDLKFIEACLRCLRTIFTSPVTPEELLYTDATVIPHLMALLSRSRYTQEYICQIFSHCCKGPDHQTILFNHGAVQNIAHLLTSLSYKVRMQALKCFSVLAFENPQVSMTLVNVLVDGELLPQIFVKMLQRDKPIEMQLTSAKCLTYMCRAGAIRTDDNCIVLKTLPCLVRMCSKERLLEERVEGAETLAYLIEPDVELQRIASITDHLIAMLADYFKYPSSVSAITDIKRLDHDLKHAHELRQAAFKLYASLGANDEDIRKKIIETENMMDRIVTGLSESSVKVRLAAVRCLHSLSRSVQQLRTSFQDHAVWKPLMKVLQNAPDEILVVASSMLCNLLLEFSPSKEPILESGAVELLCGLTQSENPALRVNGIWALMNMAFQAEQKIKADILRSLSTEQLFRLLSDSDLNVLMKTLGLLRNLLSTRPHIDKIMSTHGKQIMQAVTLILEGEHNIEVKEQTLCILANIADGTTAKDLIMTNDDILQKIKYYMGHSHVKLQLAAMFCISNLIWNEEEGSQERQDKLRDMGIVDILHKLSQSPDSNLCDKAKMALQQYLA

SEQ ID NO: 60733 - protein, 178 aa, Homo sapiens
IQFFQKIFVPDYDPTIEDSYLKHTEIDNQWAILDVLDTAGQEEFSAMREQYMRTGDGFLIVYSVTDKASFEHVDRFHQLILRVKDRESFPMILVANKVDLMHLRKITREQGKEMATKHNIPYIETSAKDPPLNVDKAFHDLVRVIRQQIPEKSQKKKKKTKWRGDRATGTHKLQCVIL

SEQ ID NO: 60734 - protein, 361 aa, Homo sapiens
IMAPLGTTVLLWSLLRSSPGVERVCFRARIQPWHGGLLQPLPCSFEMGLPRRRFSSEAAESGSPETKKPTFMDEEVQSILTKMTGLNLQKTFKPAIQELKPPTYKLMTQAQLEEATRQAVEAAKVRLKMPPVLEERVPINDVLAEDKILEGTETTKYVFTDISYSIPHRERFIVVREPSGTLRKASWEERDRMIQVYFPKEGRKILTPIIFKEENLRTMYSQDRHVDVLNLCFAQFEPDSTEYIKVHHKTYEDIDKRGKYDLLRSTRYFGGMVWYFVNNKKIDGLLIDQIQRDLIDDATNLVQLYHVLHPDGQSAQGAKDQAAEGINLIKVFAKTEAQKGAYIELTLQTYQEALSRHSAAS

SEQ ID NO: 60735 - protein, 293 aa, Homo sapiens
VGAILTCPLEVVKTRLQSSSVTLYISEVQLNTMAGASVNRVVSPGPLHCLKVILEKEGPRSLFRGLGPNLVGVAPSRAIYFAAYSNCKEKLNDVFDPDSTQVHMISAAMAGFTAITATNPIWLIKTRLQLDARNRGERRMGAFECVRKVYQTDGLKGFYRGMSASYAGISETVIHFVIYESIKQKLLEYKTASTMENDEESVKEASDFVGMMLAAATSKTCATTIAYPHEVVRTRLREEGTKYRSFFQTLSLLVQEEGYGSLYRGLTTHLVRQIPNTAIMMATYELVVYLLNG

SEQ ID NO: 60736 - protein, 47 aa, Homo sapiens
IRSREVPFEAQTSRYLNEFEELAILGKGGYGRVYKVRNKLDGQYYAI

SEQ ID NO: 60737 - protein, 36 aa, Homo sapiens
VENLNELRQDLSKFRNEIRDLLGFRTSKYAMFYPRN

SEQ ID NO: 60738 - protein, 85 aa, Homo sapiens
LVKSHLMYAVREEVEVLKEQIKELVERNSLLERENALLKSLSSNDQLSQLPTQQANPGSTSQQQAVIAQPPQPTQPPQQPNVSSA

SEQ ID NO: 60739 - protein, 55 aa, Homo sapiens
IRCRRVCHVFMLAFWAPNWHWEGVTESTRLIPGPTFKRSSTYNPSISLKTKTSLN

SEQ ID NO: 60740 - protein, 25 aa, Homo sapiens
ICHKCSLRCNSHSQPDTHNICRTSD

SEQ ID NO: 60741 - protein, 18 aa, Homo sapiens
IFMHTILYNMLFKRDCHF

SEQ ID NO: 60742 - protein, 27 aa, Homo sapiens
LISGAGTAFHSAPVVRSLRLPFRIFRL

SEQ ID NO: 60743 - protein, 23 aa, Homo sapiens
MCKWRSLTESRLEQPPNSWRGIC

SEQ ID NO: 60744 - protein, 53 aa, Homo sapiens
LALQVHFHSSLRPLPWGVMFCYRDPRYQIAPGLIWGLGICHSAVQTLIFFSSF

SEQ ID NO: 60745 - protein, 37 aa, Homo sapiens
LGAGNLPFCCTDTDFFFFFLKSKILGDGQVRKSDGYN

SEQ ID NO: 60746 - protein, 22 aa, Homo sapiens
IEDLTRHAESQQKHMAEKMPAK

SEQ ID NO: 60747 - protein, 100 aa, Homo sapiens
IKNLKKHKTKVHSGADKTLDSSAEDHTLSEQDSIQKSPLSETMDVKPSDMTLPLALPLGTEDHHMLLPVTDTQSPTSDTLLRSTVNGYSEPQLIFLQQLY

SEQ ID NO: 60748 - protein, 392 aa, Homo sapiens
KKRIQEVGEPSKEEKAVAKYLRFNCPTKSTNMMGHRVDYFIASKAVDCLLDSKWAKAKKGEEALFTTRESVVDYCNRLLKKQFFHRALKVMKMKYDKDIKKEKDKGKAESGKEEDKKSKKENIKDEKTKKEKEKKKDGEKEESKKEETPGTPKKKETKKKFKLEPHDDQVFLDGNEVYVWIYDPVHFKTFVMGLILVIAVIAATLFPLWPAEMRVGVYYLSVGAGCFVASILLLAVARCILFLIIWLITGGRHHFWFLPNLTADVGFIDSFRPLYTHEYKGPKADLKKDEKSETKKQQKSDSEEKSDSEKKEDEEGKVGPGNHGTEGSGGERHSDTDSDRREDDRSQHSSGNGNDFEMITKEELEQQTDGDCEEDEEEENDGETPKSSHEKS

SEQ ID NO: 60749 - protein, 100 aa, Homo sapiens
IESDSFVQQTFRSSKEVKKSVEPSEVKQATSTSGPASAVADPPSTEKEIDPTSIPTAIKYQDDNSLAHPNLFIEKADAEEKWFKRLIALRQERLMGSPVA

SEQ ID NO: 60750 - protein, 9 aa, Homo sapiens
IKRRMNYNP

SEQ ID NO: 60751 - protein, 33 aa, Homo sapiens
LEYFMKQMNDAHHGGWTTKMDWIFHTIKQHALN

SEQ ID NO: 60752 - protein, 71 aa, Homo sapiens
MLEYCKHLNSHLSEGIYLCQYCEYSTGQIEDLKIHLDFKHSADLPHKCSDCLMRFGNERELISHLPVHETT

SEQ ID NO: 60753 - protein, 11 aa, Homo sapiens
TIKNKEMSIDY

SEQ ID NO: 60754 - protein, 29 aa, Homo sapiens
VIYNDHKVCASERPPKDLGYMYFYRRIPS

SEQ ID NO: 60755 - protein, 251 aa, Homo sapiens
IRAGIKDIDRYHEKLAVSLYSSSLPPHLSGIKLGVISSEELPLYYRRSVELNSNSLESYENVMQSSLGFVNPGVVEFLLEKLGIDESNPPSLMRGLQSKNFSEDDFASALRKKQSASWALKCVKIGVDYFKVGRHVDAMNEYNKALEIDKQNVEALVARGALYATKGSLNKAIEDFELALENCPTHRNARKYLCQTLVERGGQLEEEEKFLNAESYYKKALALDETFKDAEDALQKLHKYMQVIPYFLLEI

SEQ ID NO: 60756 - protein, 565 aa, Homo sapiens
MMKGEFYVIEYAACDATYNEIVTFERLRPVNQNKTVKKNTFFKCTVDVPEDLREACANENAHKDFKKAVGACRIFYHPETTQLMILSASEATVKRVNILSDMHLRSIRTKLMLMSRNEEATKHLECTKQLAAAFHEEFVVREDLMGLAIGTHGSNIQQARKVPGVTAIELDEDTGTFRIYGESADAVKKARGFLEFVEDFIQVPRNLVGKVIGKNGKVIQEIVDKSGVVRVRIEGDNENKLPREDGMVPFVFVGTKESIGNVQVLLEYHIAYLKEVEQLRMERLQIDEQLRQIGMGFRPSSTRGPEKEKGYATDESTVSSVQGSRSYSGRGRGRRGPNYTSGYGTNSELSNPSETESERKDELSDWSLAGEDDRDSRHQRDSRRRPGGRGRSVSGGRGRGGPRGGKSSISSVLKDPDSNPYSLLDNTESDQTADTDASESHHSTNRRRRSRRRRTDEDAVLMDGMTESDTASVNENGLVTVADYISRAESQSRQRNLPRETLAKNKKEMAKDVIEEHGPSEKAINGPTSASGDDISKLQRTPGEEKINTLKEENTQEAAVLNGVS

SEQ ID NO: 60757 - protein, 5 aa, Homo sapiens
MFPLL

SEQ ID NO: 60758 - protein, 162 aa, Homo sapiens
LSLFQGSSDGVEVRYDLLDCHISICSPQVAQLFTDNFDYQTRDDFVRGLLVNEEILGNQIHMHVTAKEYGARVSNLHMYSAVCADVIRRWVYPLTPEANFTDSTTQSCTHSRHNIYRGPEVSLGHGSILEENVLLGSGTVIGSNCFITNSVIGPGCHIGEHR

SEQ ID NO: 60759 - protein, 40 aa, Homo sapiens
LSWFSQRDTTDKGQQLRKNQQLQRFIQWLKEAEEESSEDD

SEQ ID NO: 60760 - protein, 38 aa, Homo sapiens
LLAPASSTLSGPTFGWQQSPSRMSTLPWSSNSSIRCVT

SEQ ID NO: 60761 - protein, 11 aa, Homo sapiens
LKSMDSKMDFI

SEQ ID NO: 60762 - protein, 12 aa, Homo sapiens
KTMAYHHYAFKI

SEQ ID NO: 60763 - protein, 29 aa, Homo sapiens
LWTKRYKCCIKSANYVKLAYLPLLCLSLA

SEQ ID NO: 60764 - protein, 650 aa, Homo sapiens
IVPLDAHQREDLFPQLHCSWLNLVSTIHSRSQLSEIPTMSHPSWLPPKSTGEPLGHVPARMETTHSFGNPSISVSTQQPPKKFAPVVAPKPKYNPYKQPGGEGDFLPPPPPPLDDSSALPSISGNFPPPPPLDEEAFKVQGNPGGKTLEERRSSLDAEIDSLTSILADLECSSPYKPRPPQSSTGSTASPPVSTPVTGHKRMVIPNQPPLTATKKSTLKPQPAPQAGPIPVAPIGTLKPQPQPVPASYTTASTSSRPTFNVQVKSAQPSPHYMAAPSSGQIYGSGPQGYNTQPVPVSGQCPPPSTRGGMDYAYIPPPGLQPEPGYGYAPNQGRYYEGYYAAGPGYGGRNDSDPTYGQQGHPNTWKREPGYTPPGAGNQNPPGMYPVTGPKKTYITDPVSAPCAPPLQPKGGHSGQLGPSSVAPSFRPEDELEHLTKKMLYDMENPPADEYFGRCARCGENVVGEGTGCTAMDQVFHVDCFTCIICNNKLRGQPFYAVEKKAYCEPCYINTLEQCNVCSKPIMERILRATGKAYHPHCFTCVMCHRSLDGIPFTVDAGGLIHCIEDFHKKFAPRCSVCKEPIMPAPGQEETVRIVALDRDFHVHCYRCEDCGGLLSEGDNQGCYPLDGHILCKTCNSARIRVLTAKASTDL

SEQ ID NO: 60765 - protein, 42 aa, Homo sapiens
LWSRSHPFCCSRGPLAMAGILFEDIFDVKDIDPEGKKFDRGK

SEQ ID NO: 60766 - protein, 115 aa, Homo sapiens
KMDLILDVNIQIYPVDLGDKFRLVIASTLYEDGTLDDGEYNPTDDRPSRADQFEYVMYGKVYRIEGDETSTEAATRLSAYVSYGGLLMRLQGDANNLHGFEVDSRVYLLMKKLAF

SEQ ID NO: 60767 - protein, 61 aa, Homo sapiens
IGERIRVILDMEDKTLAFERGYEFLGVAFRGLPKVCLYPAVSAVYGNTEVTLVYLGKPLDG

SEQ ID NO: 60768 - protein, 196 aa, Homo sapiens
IKVKFGESIEDLHTCRLLIKQDIPAGLYVDPYELASLRERNITEAVMVSENFDIEAPNYLSKESEVLIYARRDSQCIDCFQAFLPVHCRYHRPHSEDGEASIVVNNPDLLMFCDQEFPILKCWAHSEVAAPCALENEDICQWNKMKYKSVYKNVILQVPVGLTVHTSLVCSVTLLITILCSTLILVAVFKYGHFSL

SEQ ID NO: 60769 - protein, 14 aa, Homo sapiens
INSFKMNWRCSWND

SEQ ID NO: 60770 - protein, 5 aa, Homo sapiens
LLDPK

SEQ ID NO: 60771 - protein, 717 aa, Homo sapiens
VLSLSGRKLREFPRGAANHDLTDTTRADLSRNRLSEIPIEACHFVSLENLNLYQNCIRYIPEAILNLQALTFLNISRNQLSTLPVHLCNLPLKVLIASNNKLVSLPEEIGHLRHLMELDVSCNEIQTIPSQIGNLEALRDLNVRRNHLVHLPEELAELPLIRLDFSCNKITTIPVCYRNLRHLQTITLDNNPLQSPPAQICIKGKVHIFKYLNIQACKIAPDLPDYDRRPLGFGSCHEELYSSRPYGALDSGFNSVDSGDKRWSGNEPTDEFSDLPLRVAEITKEQRLRRESQYQENRGSLVVTNGGVEHDLDQIDYIDSCTAEEEEAEVRQPKGPDPDSLSSQFMAYIEQRRISHEGSPVKPVAIREFQKTEDMRRYLHQNRVPAEPSSLLSLSASHNQLSHTDLELHQRREQLVERTRREAQLAALQYEEEKIRTKQIQRDAVLDFVKQKASQSPQKQHPLLDGVDGECPFPSRRSQHTDDSALCMSLSGLNQVGCAATLPHSSAFTPLKSDDRPNALLSSPATETVHHSPAYSFPAAIQRNQPQRPESFLFRAGVRAETNKGHASPLPPSAAPTTDSTDSITGQNSRQREEELELIDQLRKHIEYRLKVSLPCDLGAALTDGVVLCHLANHVRPRSVPSIHVPSPAVPKLTMAKCRRNVENFLEACRKIGVPQEQLCLPLHILEEKGLSQVAVTVQALLELAPPKQQQHQLSAV

SEQ ID NO: 60772 - protein, 55 aa, Homo sapiens
TKCIPQQKNDSDCGVFVLQYCKCLALEQPFQFSQEDMPRVRKRIYKELCECRLMD

SEQ ID NO: 60773 - protein, 67 aa, Homo sapiens
TAFALLQAQLRGQDAARRLQDLAAGPVGSLCRRAERFRDAFTQELRRGLRGRSGPPPGSQRGPGANI

SEQ ID NO: 60774 - protein, 104 aa, Homo sapiens
MLDFVFTVDDPVAWHSKNLKKNWSHYSFLKVLGPKIITSIQNNYGAGVYYNSLIMCNGRLIKYGVISTNVLIEDLLNWNNLYIAGRLQKPASLAVSQEFTGFSL

SEQ ID NO: 60775 - protein, 76 aa, Homo sapiens
IMDPPGKNRDVEETLFQVAHDPDCGDVVRLGLSAIVRPSSIRQSTKGIFTAGLKKSVIYSSLKLHKMWKGWLRKTS

SEQ ID NO: 60776 - protein, 70 aa, Homo sapiens
KKHDLLRLAKEEVSRQELRQRVRMADNEVMDAFRKIMAARQKKRTPTKKEKDQAWKTLKERESILKLLDG

SEQ ID NO: 60777 - protein, 54 aa, Homo sapiens
VVDRKGPLVTLNKPQGLPVTGKPGELTLFSVLPELSQSLGLREQELQVVRASGK

SEQ ID NO: 60778 - protein, 16 aa, Homo sapiens
KRKPMALGSNPQVQMV

SEQ ID NO: 60779 - protein, 52 aa, Homo sapiens
LTPSQAAQLPLHLHLHRLLLPGTRARDTPVELLAPLPPYFSRTLQCLGLRLQ

SEQ ID NO: 60780 - protein, 45 aa, Homo sapiens
LVVLKTRGRRARLPGRRPAPLGNRELLAAGWGPSSQWRPPPCLLA

SEQ ID NO: 60781 - protein, 34 aa, Homo sapiens
IWNECKRIAKGSSYSREETSSRAMKPLPHHLCAA

SEQ ID NO: 60782 - protein, 460 aa, Homo sapiens
VPAACMDAALKRSRSEEPAEILPPARDEEEEEEEGMEQGLEEEEEVDPRIQGELEKLNQSTDDINRRETELEDARQKFRSVLVEATVKLDELVKKIGKAVEDSKPYWEARRVARQAQLEAQKATQDFQRATEVLRAAKETISLAEQRLLEDDKRQFDSAWQEMLNHATQRVMEAEQTKTRSELVHKETAARYNAAMGRMRQLEKKLKRAINKSKPYFELKAKYYVQLEQLKKTVDDLQAKLTLAKGEYKMALKNLEMISDEIHERRRSSAMGPRGCGVGAEGSSTSVEDLPGSKPEPDAISVASEAFEDDSCSNFVSEDDSETQSVSSFSSGPTSPSEMPDQFPAVVRPGSLDLPSPVSLSEFGMMFPVLGPRSECSGASSPECEVERGDRAEGAENKTSDKANNNRGLSSSSGSGGSSKSQSSTSPEGQALENRMKQLSLQCSKGRDGIIADIKMVQIG

SEQ ID NO: 60783 - protein, 58 aa, Homo sapiens
ISKLPQENKSLHSPPSGNVLPSLVQAIFNGDPDEVRALIFKKEDVNFQQYFWNRNSKH

SEQ ID NO: 60784 - protein, 46 aa, Homo sapiens
ILVKDYILKRTPIHAAATNGHSECLRLLIGNAEPQNAVDIQDGNGQ

SEQ ID NO: 60785 - protein, 784 aa, Homo sapiens
LQPEEQEVGIDPLSSYSNKSGGDSNKNGRRTSSTLDSEGTFNSYRKEWEELFVNNNYLATIRQKGINGQLRSSRFRSICWKLFLCVLPQDKSQWISRIEELRAWYSNIKEIHITNPRKVVGQQDLMINNPLSQDEGSLWNKFFQDKELRSMIEQDVKRTFPEMQFFQQENVRKILTDVLFCYARENEQLLYKQGMHELLAPIVFVLHCDHQAFLHASESAQPSEEMKTVLNPEYLEHDAYAVFSQLMETAEPWFSTFEHDGQKGKETLMTPIPFARPQDLGPTIAIVTKVNQIQDHLLKKHDIELYMHLNRLEIAPQIYGLRWVRLLFGREFPLQDLLVVWDALFADGLSLGLVDYIFVAMLLYIRDALISSNYQTCLGLLMHYPFIGDVHSLILKALFLRDPKRNPRPVTYQFHPNLDYYKARGADLMNKSRTNAKGAPLNINKVSNSLINFGRKLISPAMAPGSAGGPVPGGNSSSSSSVVIPTRTSAEAPSHHLQQQQQQQRLMKSESMPVQLNKGLSSKNISSSPSVESLPGGREFTGSPPSSATKKDSFFSNISRSRSHSKTMGRKESEEELEAQISFLQGQLNDLDAMCKYCAKVMDTHLVNIQDVILQENLEKEDQILVSLAGLKQIKDILKGSLRFNQSQLEAEENEQITIADNHYCSSGQGQGRGQGQSVQMSGAIKQASSETPGCTDRGNSDDFILISKDDDGSSARGSFSGQAQPLRTLRSTSGKSQAPVCSPLVFSDPLMGPASASSSNPSSSPDDDSSKDSGFTIVSPLDI

SEQ ID NO: 60786 - protein, 138 aa, Homo sapiens
LLLSLLAFICEEVVSQCTLCGGLYFFEFVSCSAFLLSLLILIVYCTPFYERVDTTKVKSSDFYITLGTGCVFLLASIIFVSTHDRTSAEIAAIVFGFIASFMFLLDFITMLYEKRQESQLRKPENTTRAEALTEPLNA

SEQ ID NO: 60787 - protein, 1578 aa, Homo sapiens
LSVERVYQKKTQLEHILLRPDTYIGSVEPLTQFMWVYDEDVGMNCREVTFVPGLYKIFDEILVNAADNKQRDKNMTCIKVSIDPESNIISIWNNGKGIPVVEHKVEKVYVPALIFGQLLTSSNYDDDEKKVTGGRNGYGAKLCNIFSTKFTVETACKEYKHSFKQTWMNNMMKTSEAKIKHFDGEDYTCITFQPDLSKFKMEKLDKDIVALMTRRAYDLAGSCRGVKVMFNGKKLPVNGFRSYVDLYVKDKLDETGVALKVIHELANERWDVCLTLSEKGFQQISFVNSIATTKGGRHVDYVVDQVVGKLIEVVKKKNKAGVSVKPFQVKNHIWVFINCLIENPTFDSQTKENMTLQPKSFGSKCQLSEKFFKAASNCGIVESILNWVKFKAQTQLNKKCSSVKYSKIKGIPKLDDANDAGGKHSLECTLILTEGDSAKSLAVSGLGVIGRDRYGVFPLRGKILNVREASHKQIMENAEINNIIKIVGLQYKKSYDDAESLKTLRYGKIMIMTDQDQDGSHIKGLLINFIHHNWPSLLKHGFLEEFITPIVKASKNKQELSFYSIPEFDEWKKHIENQKAWKIKYYKGLGTSTAKEAKEYFADMERHRILFRYAGPEDDAAITLAFSKKKIDDRKEWLTNFMEDRRQRRLHGLPEQFLYGTATKHLTYNDFINKELILFSNSDNERSIPSLVDGFKPGQRKVLFTCFKRNDKREVKVAQLAGSVAEMSAYHHGEQALMMTIVNLAQNFVGSNNINLLQPIGQFGTRLHGGKDAASPRYIFTMLSTLARLLFPAVDDNLLKFLYDDNQRVEPEWYIPIIPMVLINGAEGIGTGWACKLPNYDAREIVNNVRRMLDGLDPHPMLPNYKNFKGTIQELGQNQYAVSGEIFVVDRNTVEITELPVRTWTQVYKEQVLEPMLNGTDKTPALISDYKEYHTDTTVKFVVKMTEEKLAQAEAAGLHKVFKLQTTLTCNSMVLFDHMGCLKKYETVQDILKEFFDLRLSYYGLRKEWLVGMLGAESTKLNNQARFILEKIQGKITIENRSKKDLIQMLVQRGYESDPVKAWKEAQEKAAEEDETQNQHDDSSSDSGTPSGPDFNYILNMSLWSLTKEKVEELIKQRDAKGREVNDLKRKSPSDLWKEDLAAFVEELDKVESQEREDVLAGMSGKAIKGKVGKPKVKKLQLEETMPSPYGRRIIPEITAMKADASKKLLKKKKGDLDTAAVKVEFDEEFSGAPVEGAGEEALTPSVPINKGPKPKREKKEPGTRVRKTPTSSGKPSAKKVKKRNPWSDDESKSESDLEETEPVVIPRDSLLRRAAAERPKYTFDFSEEEDDDADDDDDDNNDLEELKVKASPITNDGEDEFVPSDGLDKDEYTFSPGKSKATPEKSLHDKKSQDFGNLFSFPSYSQKSEDDSAKFDSNEEDSASVFSPSFGLKQTDKVPSKTVAAKKGKPSSDTVPKPKRAPKQKKVVEAVNSDSDSEFGIPKKTTTPKGKGRGAKKRKASGSENEGDYNPGRKTSKTTSKKPKKTSFDQDSDVDIFPSDFPTEPPSLPRTGRARKEVKYFAESDEEEDDVDFAMFN

SEQ ID NO: 60788 - protein, 613 aa, Homo sapiens
ISAIESLFGASLTGIAYSLFAGQPLTILGSTGPVLVFEKILYKFCRDYQLSYLSLRTSIGLWTSFLCIVLVATDASSLVCYITRFTEEAFAALICIIFIYEALEKLFDLGETYAFNMHNNLDKLTSYSCVCTEPPNPSNETLAQWKKDNITAHNISWRNLTVSECKKLRGVFLGSACGHHGPYIPDVLFWCVILFFTTFFLSSFLKQFKTKRYFPTKVRSTISDFAVFLTIVIMVTIDYLVGVPSPKLHVPEKFEPTHPERGWIISPLGDNPWWTLLIAAIPALLCTILIFMDQQITAVIINRKEHKLKKGAGYHLDLLMVGVMLGVCSVMGLPWFVAATVLSISHVNSLKVESECSAPGEQPKFLGIREQRVTGLMIFILMGLSVFMTSVLKFIPMPVLYGVFLYMGVSSLKGIQLFDRIKLFGMPAKHQPDLIYLRYVPLWKVHIFTVIQLTCLVLLWVIKVSAAAVVFPMMVLALVFVRKLMDLCFTKRELSWLDDLMPESKKKKEDDKKKKEKEEAERMLQDDDDTVHLPFEGGSLLQIPVKALKYSVDPSIVNISDEMAKTAQWKALSMNTENAKVTRSNMSPDKPVSVKISFEDEPRKKYVDAETSL

SEQ ID NO: 60789 - protein, 49 aa, Homo sapiens
KKDRVTDALNATRAAVEEGIVLGGGCALLWCIPALDSLTPANEDKLIGI

SEQ ID NO: 60790 - protein, 562 aa, Homo sapiens
IVATRERDVRRHYEAEHEYYERYVADGERAALVERLRQGDLPVASFTPEERAARAGLGLCRLLALKGRGWGEGDFVYQCMEVLLREVLPEHVSVLQGVDLSPDITRQRILSIDRNLRNQLFNRARDFKAYSLALDDQAFVAYENYLLVFIRGVGPELEVQEDLLTIINLTHHFSVGALMSAILESLQTAGLSLQRMVGLTTTHTLRMIGENSGLVSYMREKAVSPNCWNVIHYSGFLHLELLSSYDVDVNQIINTISEWIVLIKTRGVRRPEFQTLLTESESEHGERVNGRCLNNWLRRGKTLKLIFSLRKEMEAFLVSVGATTVHFSDKQWLCDFGFLVDIMEHLRELSEELRVSKVFAAAAFDHICTFEVKLNLFQRHIEEKNLTDFPALREVVDELKQQNKEDEKIFDPDRYQMVICRLQKEFERHFKDLRFIKKDLELFSNPFNFKPEYAPISVRVELTKLQANTNLWNEYRIKDLGQFYAGLSAESYPIIKGVACKVASLFDSNQICEKAFSYLTRNQHTLSQPLTDEHLQALFRVATTEMEPGWDDLVRERNESNP

SEQ ID NO: 60791 - protein, 288 aa, Homo sapiens
KESLSEVEEKYKKAMVSNAQLDNEKNNLIYQVDTLKDVIEEQEEQMAEFYRENEEKSKELERQKHMCSVLQHKMEELKEGLRQRDELIEKHGLVIIPDGTPNGDVSHEPVAGAITVVSQEAAQVLESAGEGPLDVRLRKLAGEKEELLSQIRKLKLQLEEERQKCSRNDGTVGDLAGLQNGSDLQFIEMQRDANRQISEYKFKLSKAEQDITTLEQSISRLEGQVLRYKTAAENAEKVEDELKAEKRKLQRELRTALDKIEEMEMTNSHLAKRLEKMKANRTALLAQQ

SEQ ID NO: 60792 - protein, 12 aa, Homo sapiens
MKANRTALLAQQ

SEQ ID NO: 60793 - protein, 183 aa, Homo sapiens
LQAPGSSMEDPLPGPGSPSHSAPDPDGLPHFMETPLQPPPPVQRVMDPGFLDVSGISLLDNSNASVWPSLPSSTELTTTAVSTSGPEDICSSSSSHERGGEATWSGSEFEVSFLDSPGAQAQADHLPQLTLPDSLTSAASPEDGLSAELLEAQAEEEPASTEGLDTGTEAEGLDSQAQISTTE

SEQ ID NO: 60794 - protein, 164 aa, Homo sapiens
KPDRAHHCSVCKRCIRKMDHHCPWVNNCVGENNQKYFVLFTMYIALISLHALIMVGFHFLHCFEEDWTKCSSFSPPTTVILLILLCFEGLLFLIFTSVMFGTQVHSICTDETGIEQLKKEERRWAKKTKWMNMKAVFGHPFSLGWASPFATPDQGKADPYQYVV

SEQ ID NO: 60795 - protein, 273 aa, Homo sapiens
LEWRRRLKSLALRLAQYPGRGSAEGCDFSIHFSSFGDVACMAICSCQCPAAMAFCFLETLWWEFTASYDTTCIGLASRPYAFLEFDSIIQKVKWHFNYVSSSQMECSLEKIQEELKLQPPAVLTLEDTDVANGVMNGHTPMHLEPAPNFRMEPVTALGILSLILNIMCAALNLIRGVHLAEHSLQVAHEEIGNILAFLVPFVACIFQCYLYLFYSPARTMKVVLMLLFICLGNMYLHGLRNLWQILFHIGVAFLSSYQILTRQLQEKQSDCGV

SEQ ID NO: 60796 - protein, 276 aa, Homo sapiens
KRGLRLKTVDSCFQDLKESRLVEDTFTIDEVSEVLNGLQAVVHSEVESELINTAYTNVLLLRQLFAQAEKWYLKLQTDISELENRELLEQVAEFEKAEITSSNKKPILDVTKPKLAPLNEGGTAELLNKEILRLQEENEKLKSRLKTIEIQATNALDEKSKLEKALQDLQLDQGNQKDFIKAQDLSNLENTVAALKSEFQKTLNDKTENQKSLEENLATAKHDLLRVQEQLHMAEKELEKKFQQTAAYRNMKEILTKKNDQIKDLRKRLAQYEPED

SEQ ID NO: 60797 - protein, 260 aa, Homo sapiens
VEGYLAVAVVRRSDTSLTWNSVKGKKSCHTAVDRTAGWNIPMGLLFNQTGSCKFDEYFSQSCAPGSDPRSNLCALCIGDEQGENKCVPNSNERYYGYTGAFRCLAENAGDVAFVKDVTVLQNTDGNNNEAWAKDLKLADFALLCLDGKRKPVTEARSCHLAMAPNHAVVSRMDKVERLKQVLLHQQAKFGRNGSDCPDKFCLFQSETKNLLFNDNTECLARLHGKTTYEKYLGPQYVAGITNLKKCSTSPLLEACEFLRK

SEQ ID NO: 60798 - protein, 83 aa, Homo sapiens
VFRARHVAPDSIRGSFGLTDTRNTTHGSDSVVSASREIAAFFPDFSEQRWYEEEEPQLRCGPVCYSPEGGVHYVAGTGGLGPA

SEQ ID NO: 60799 - protein, 44 aa, Homo sapiens
ILALSDTEQRLEAQVNRNTIYSTLVTCVTFVATLPVLYMLFKAS

SEQ ID NO: 60800 - protein, 88 aa, Homo sapiens
LAAGLRCLPHLPAICARRMSPAFRAMDVEPRAKGVLLEPFVHQVGGHSCVLRFNETTLCKPLVPREHQFYETLPAEMRKFTPQYKGVS

SEQ ID NO: 60801 - protein, 371 aa, Homo sapiens
VEYFTRLREARAPASVLPAATPRQSLGHPPPEPGPDRVADAKGDSESEEDEDLEVPVPSRFNRRVSVCAETYNPDEEEEDTDPRVIHPKTDEQRCRLQEACKDILLFKNLDQEQLSQVLDAMFERIVKADEHVIDQGDDGDNFYVIERGTYDILVTKDNQTRSVGQYDNRGSFGELALMYNTPRAATIVATSEGSLWGLDRVTFRRIIVKNNAKKRKMFESFIESVPLLKSLEVSERMKIVDVIGEKIYKDGERIITQGEKADSFYIIESGEVSILIRSRTKSNKDGGNQEVEIARCHKGQYFGELALVTNKPRAASAYAVGDVKCLVMDVQAFERLLGPCMDIMKRNISHYEEQLVKMFGSSVDLGNLGQ

SEQ ID NO: 60802 - protein, 130 aa, Homo sapiens
TYPVLLVDDLSVLLSLGMGAVAVLDFIHYCRATVCWELKGNMVVLVHDSGDAEDEENDILLNGLSHQSHLILRAEGLATGFCRDVHGQLRILWRRPSQPAVHRDQSFTYQYKIQDKSVSFFAKGMSPAVL

SEQ ID NO: 60803 - protein, 1114 aa, Homo sapiens
RLWGRRAATMAAAAGGGGPGTAVGATGSGIAAAAAGLAVYRRKDGGPATKFWESPETVSQLDSVRVWLGKHYKKYVHADAPTNKTLAGLVVQLLQFQEDAFGKHVTNPAFTKLPAKCFMDFKAGGALCHILGAAYKYKNEQGWRRFDLQNPSRMDRNVEMFMNIEKTLVQNNCLTRPNIYLIPDIDLKLANKLKDIIKRHQGTFTDEKSKASHHIYPYSSSQDDEEWLRPVMRKEKQVLVHWGFYPDSYDTWVHSNDVDAEIEDPPIPEKPWKVHVKWILDTDIFNEWMNEEDYEVDENRKPVSFRQRISTKNEEPVRSPERRDRKASANARKRKHSPSPPPPTPTESRKKSGKKGQASLYGKRRSQKEEDEQEDLTKDMEDPTPVPNIEEVVLPKNVNLKKDSENTPVKGGTVADLDEQDEETVTAGGKEDEDPAKGDQSRSVDLGEDNVTEQTNHIIIPSYASWFDYNCIHVIERRALPEFFNGKNKSKTPEIYLAYRNFMIDTYRLNPQEYLTSTACRRNLTGDVCAVMRVHAFLEQWGLVNYQVDPESRPMAMGPPPTPHFNVLADTPSGLVPLHLRSPQVPAAQQMLNFPEKNKEKPVDLQNFGLRTDIYSKKTLAKSKGASAGREWTEQETLLLLEALEMYKDDWNKVSEHVGSRTQDECILHFLRLPIEDPYLENSDASLGPLAYQPVPFSQSGNPVMSTVAFLASVVDPRVASAAAKAALEEFSRVREEVPLELVEAHVKKVQEAARASGKVDPTYGLESSCIAGTGPDEPEKLEGAEEEKMEADPDGQQPEKAENKVENETDEGDKAQDGENEKNSEKEQDSEVSEDTKSEEKETEENKELTDTCKERESDTGKKKVEHEISEGNVATAAAAALASAATKAKHLAAVEERKIKSLVALLVETQMKKLEIKLRHFEELETIMDREKEALEQQRQQLLTERQNFHMEQLKYAELRARQQMEQQQHGQNPQQAHQHSGGPGLAPLGAAGHPGMMPHQQPPPYPLMHHQMPPPHPPQPGQIPGPGSMMPGQHMPGRMIPTVAANIHPSGSGPTPPGMPPMPGNILGPRVPLTAPNGMYPPPPQQQPPPPPPADGVPPPPAPGPPASAAP

SEQ ID NO: 60804 - protein, 24 aa, Homo sapiens
IPQGIVKLDHPRIHVDFPVILYEV

SEQ ID NO: 60805 - protein, 125 aa, Homo sapiens [sequence omitted]

SEQ ID NO: 60806 - protein, 352 aa, Homo sapiens
KMQRALPGARQHLGAILASASVVVKALCAAVLFLYLLSFAVDTGCLAVTPGYLFPPNFWIWTLATHGLMEQHVWDVAISLTTVVVAGRLLEPLWGALELLIFFSVVNVSVGLLGAFAYLLTYMASFNLVYLFTVRIHGALGFLGGVLVALKQTMGDCVVLRVPQVRVSVMPMLLLALLLLLRLATLLQSPALASYGFGLLSSWVYLRFYQRHSRGRGDMADHFAFATFFPEILQPVVGLLANLVHSLLVKVKICQKTVKRYDVGAPSSITISLPGTDPQDAERRRQLALKALNERLKRVEDQSIWPSMDDDEEESGAKVDSPLPSDKAPTPPGKGAAPESSLITFEAAPPTL

SEQ ID NO: 60807 - protein, 11 aa, Homo sapiens
LPVTTTPSLSN

SEQ ID NO: 60808 - protein, 226 aa, Homo sapiens
LAMDWDSETRRLYYDEQESEAYEKHVSMLQPQKKKKTTVALRDCIELFTTMETLGEHDPWYCPNCKKHQQATKKFDLWSLPKILVVHLKRFSYNRYWRDKLDTVVEFPIRGLNMSEFVCNLSARPYVYDLIAVSNHYGAMGVGHYTAYAKNKLNGKWYYFDDSNVSLASEDQIVTKAAYVLFYQRRDDEFYKTPSLSSSGSSDGGTRPSSSQQGFGDDEACSMDTN

SEQ ID NO: 60809 - protein, 111 aa, Homo sapiens
LNSLKYVRPGGGFEPNFMLFEKCEVNGAGAHPLFAFLREALPAPSDDATALMTDPKLITWSPVCRNDVAWNFEKFLVGPDGVPLRRYSRRFQTIDIEPDIEALLSQGPSCA

SEQ ID NO: 60810 - protein, 381 aa, Homo sapiens
VGGYGTRLRPLTLSTPKPLVDFCNKPILLHQVEALAAAGVDHVILAVSYMSQVLEKEMKAQEQRLGIRISMSHEEEPLGTAGPLALARDLLSETADPFFVLNSDVICDFPFQAMVQFHRHHGQEGSILVTKVEEPSKYGVVVCEADTGRIHRFVEKPQVFVSNKINAGMYILSPAVLQRIQLQPTSIEKEVFPIMAKEGQLYAMELQGFWMDIGQPKDFLTGMCLFLQSLRQKQPERLCSGPGIVGNVLVDPSARIGQNCSIGPNVSLGPGVVVEDGVCIRRCTVLRDARIRSHSWLESCIVGWRCRVGQWVSLWAGLGGERGGECACLPDKAYPLLEVRMENVTVLGEDVIVNDELYLNGASVLPHKSIGESVPEPRIIM

SEQ ID NO: 60811 - protein, 402 aa, Homo sapiens
MRYDDHTVCKPLISREQRFYESLPPEMKEFTPEYKGVVSVCFEGDSDGYINLVAYPYVESETVEQDDTTEREQPRRKHSRRSLHRSGSGSDHKEEKASLSLETSESSQEAKSPKVELHSHSEVPFQMLDGNSGLSSEKISHNPWSLRCHKQQLSRMRSESKDRKLYKFLLLENVVHHFKYPCVLDLKMGTRQHGDDASAEKAARQMRKCEQSTSATLGVRVCGMQVYQLDTGHYLCRNKYYGRGLSIEGFRNALYQYLHNGLDLRRDLFEPILSKLRGLKAVLERQASYRFYSSSLLVIYDGKECRAESCLDRRSEMRLKHLDMVLPEVASSCGPSTSPSNTSPEAGPSSQPKVDVRMIDFAHSTFKGFRDDPTVHDGPDRGYVFGLENLISIMEQMRDENQ

SEQ ID NO: 60812 - protein, 167 aa, Homo sapiens
VWKIPEESQLVFYGHQGSIDCIHLINEEHMVSGADDGSVALWGLSKKRPLALQREAHGLRGEPGLEQPFWISSVAALLNTDLVATGSHSSCVRLWQCGEGFRQLDLLCDIPLVGFINSLKFSSSGDFLVAGVGQEHRLGRWWRIKEARNSVCIIPLRRVPVPPAAGS

SEQ ID NO: 60813 - protein, 6 aa, Homo sapiens
MQRATP

SEQ ID NO: 60814 - protein, 12 aa, Homo sapiens
LAMLGLPPLSHI

SEQ ID NO: 60815 - protein, 768 aa, Homo sapiens
ISFEEYIRVKARSVPQHRMKEFLDSLASKGPEALQEFQQTATTTMVYQQGGNCIYTDSTEVAGSLLELACPVTTSVQPQTQQEQQIQVQQPQQVQVQVQVQQSPQQVSAQLSPQLTVHQPTEQPIQVQVQIQGQAPQSAAPSIQTPSLQSPSPSQLQAAQIQVQHVQAAQQIQAAEIPEEHIPHQQIQAQLVAGQSLAGGQQIQIQTVGALSPPPSQQGSPREGERRVGTASVLQPVKKRKVDMPITVSYAISGQPVATVLAIPQGQQQSYVSLRPDLLTVDSAHLYSATGTITSPTGETWTIPVYSAQPRGDPQQQSITHIAIPQEAYNAVHVSGSPTALAAVKLEDDKEKMVGTTSVVKNSHEEVVQTLANSLFPAQFMNGNIHIPVAVQAVAGTYQNTAQTVHIWDPQQQPQQQTPQEQTPPPQQQQQQLQVTCSAQTVQVAEVEPQSQPQPSPELLLPNSLKPEEGLEVWKNWAQTKNAELEKDAQNRLAPIGRRQLLRFQEDLISSAVAELNYGLCLMTREARNGEGEPYDPDVLYYIFLCIQKYLFENGRVDDIFSDLYYVRFTEWLHEVLKDVQPRVTPLGYVLPSHVTEEMLWECKQLGAHSPSTLLTTLMFFNTKYFLLKTVDQHMKLAFSKVLRQTKKNPSNPKDKSTSIRYLKALGIHQTGQKVTDDMYAEQTENPENPLRCPIKLYDFYLFKCPQSVKGRNDTFYLTPEPVVAPNSPIWYSVQPISREQMGQMLTRILVIREIQEAIAVANASTMH

SEQ ID NO: 60816 - protein, 1825 aa, Homo sapiens
LTRNPKARRRARARDRSPPLIPVPLFRMELTSRERGRGQPLPWELRLGLLLSVLAATLAQAPAPDVPGCSRGSCYPATGDLLVGRADRLTASSTCGLNGPQPYCIVSHLQDEKKCFLCDSRRPFSARDNPHSHRIQNVVTSFAPQRRAAWWQSENGIPAVTIQLDLEAEFHFTHLIMTFKTFRPAAMLVERSADFGRTWHVYRYFSYDCGADFPGVPLAPPRHWDDVVCESRYSEIEPSTEGEVIYRVLDPAIPIPDPYSSRIQNLLKITNLRVNLTRLHTLGDNLLDPRREIREKYYYALYELVVRGNCFCYGHASECAPAPGAPAHAEGMVHGACICKHNTRGLNCEQCQDFYRDLPWRPAEDGHSHACRKCECHGHTHSCHFDMAVYLASGNVSGGVCDGCQHNTAGRHCELCRPFFYRDPTKDLRDPAVCRSCDCDPMGSQDGGRCDSHDDPALGLVSGQCRCKEHVVGTRCQQCRDGFFGLSISDRLGCRRCQCNARGTVPGSTPCDPNSGSCYCKRLVTGRGCDRCLPGHWGLSHDLLGCRPCDCDVGGALDPQCDEGTGQCHCRQHMVGRRCEQVQPGYFRPFLDHLIWEAEDTRGQVLDVVERLVTPGETPSWTGSGFVRLQEGQTLEFLVASVPKAMDYDLLLRLEPQVPEQWAELELIVQRPGPVPAHSLCGHLVPKDDRIQGTLQPHARYLIFPNPVCLEPGISYKLHLKLVRTGGSAQPETPYSGPGLLIDSLVLLPRVLVLEMFSGGDAAALERQATFERYQCHEEGLVPSKTSPSEACAPLLISLSTLIYNGALPCQCNPQGSLSSECNPHGGQCLCKPGVVGRRCDLCAPGYYGFGPTGCQACQCSHEGALSSLCEKTSGQCLCRTGAFGLRCDRCQRGQWGFPSCRPCVCNGHADECNTHTGACLGCRDHTGGEHCERCIAGFHGDPRLPYGGQCRPCPCPEGPGSQRHFATSCHQDEYSQQIVCHCRAGYTGLRCEACAPGHFGDPSRPGGRCQLCECSGNIDPMDPDACDPHTGQCLRCLHHTEGPHCAHCKPGFHGQAARQSCHRCTCNLLGTNPQQCPSPDQCHCDPSSGQCPCLPNVQGPSCDRCAPNFWNLTSGHGCQPCACHPSRARGPTCNEFTGQCHCRAGFGGRTCSECQELHWGDPGLQCHACDCDSRGIDTPQCHRFTGHCSCRPGVSGVRCDQCARGFSGIFPACHPCHACFGDWDRVVQDLAARTQRLEQRAQELQQTGVLGAFESSFWHMQEKLGIVQGIVGARNTSAASTAQLVEATEELRREIGEATEHLTQLEADLTDVQDENFNANHALSGLERDRLALNLTLRQLDQHLDLLKHSNFLGAYDSIRHAHSQSAEAERRANTSALAVPSPVSNSASARHRTEALMDAQKEDFNSKHMANQRALGKLSAHTHTLSLTDINELVCGAPGDAPCATSPCGGAGCRDEDGQPRCGGLSCNGAAATADLALGRARHTQAELQRALAEGGSILSRVAETRRQASEAQQRAQAALDKANASRGQVEQANQELQELIQSVKDFLNQEGADPDSIEMVATRVLELSIPASAEQIQHLAGAIAERVRSLADVDAILARTVGDVRRAEQLLQDARRARSWAEDEKQKAETVQAALEEAQRAQGIAQGAIRGAVADTRDTEQTLYQVQERMAGAERALSSAGERARQLDALLEALKLKRAGNSLAASTAEETAGSAQGRAQEAEQLLRGPLGDQYQTVKALAERKAQGVLAAQARAEQLRDEARDLLQAAQDKLQRLQELEGTYEENERALESKAAQLDGLEARMRSVLQAINLQVQIYNTCQ

SEQ ID NO: 60817 - protein, 591 aa, Homo sapiens
LVPESLQEQIQSNFIIVIHPGSTTLRIGRATDTLPASIPHVIARRHKQQGQPLYKDSWLLREGLNKPESNEQRQNGLKMVDQAIWSKKMSNGTRRIPVSPEQARSYNKQMRPAILDHCSGNKWTNTSHHPEYLVGEEALYVNPLDCYNIHWPIRRGQLNIHPGPGGSLTAVLADIEVIWSHAIQKYLEIPLKDLKYYRCILLIPDIYNKQHVKELVNMILMKMGFSGIVVHQESVCATYGSGLSSTCIVDVGDQKTSVCCVEDGVSHRNTRLCLAYGGSDVSRCFYWLMQRAGFPYRECQLTNKMDCLLLQHLKETFCHLDQDISGLQDHEFQIRHPDSPALLYQFRLGDEKLQAPMALFYPATFGIVGQKMTTLQHRSQGDPEDPHDEHYLLATQSKQEQSAKATADRKSASKPIGFEGDLRGQSSDLPERLHSQEVDLGSAQGDGLMAGNDSEEALTALMSRKTAISLFEGKALGLDKAILHSIDCCSSDDTKKKMYSSILVVGGGLMFHKAQEFLQHRILNKMPPSFRRIIENVDVITRPKDMDPRLIAWKGGAVLACLDTTQELWIYQREWQRFGVRMLRERAAFVW

SEQ ID NO: 60818 - protein, 41 aa, Homo sapiens
IPGRIPALPQLGSPGPGASARFSSGSLRPPDARRRTPQPCS

SEQ ID NO: 60819 - protein, 22 aa, Homo sapiens
INSKLKRPRMLPLFKLVCLKII

SEQ ID NO: 60820 - protein, 1404 aa, Homo sapiens
KKALFQPLTPGSREFEDVVNILHSSYLEPTSVTNFNYRRACLVHNELLEKEFTEKRRELKFDGRLDKELSESYAFLMVDRYQVQTICEKGLHVGQSKITILGSPSMGVYLSRYADLLQANPLDTGAMGDVVIFKIMKGKIKSIYDPMGVKSLESMLNKSALDPTPKHECHVSKNANRITSLLAYRAYELTQYYFYEYGFDELRRRPRHVCPYAVVSFTYKDDIQTPKFVPSSRSNSFNTDRNIDKYNYTLWKGQLLNKGKLLCYISLRSATRAFLPIKLPEKLDVETVMSIDHLKQKIPPALFYKETYLGPNEVLKNGMYCSLYEVVEKTRIGSNMESLLQKLDREKLVLVKPLGDRGYLFLLSPYQMVPPYEYQTAKSRVLHALFLFQEPRSIVTSQKGSTNAAPQERHESMPDVLKIAQFLQFSLIQCRKEFKNISAINFHSVVEKYVSEFFKRGFGSGKREFIMFPYDSRLDDKKFLYSAPRNKSHIDTCLHAYIFRPEVYQLPICKLKELFEENRKLQQFSPLSDYEGQEEEMNGTKMKFGKRNNSRGEAIISGKQRSSHSLDYDKDRVKELINLIQCRKKSVGGDSDTEDMRSKTVLKRKLEDLPENMRKLAKTSNLSENCHLYEESPQPIGSLGHDADLRRQQQDTCNSGIADIHRLFNWLSETLANARHSDASLTDTVNKALGLSTDDAYEELRQKHEYELNSTPDKKDYEQPTCAKVENAQFKGTQSLLLEVDATSKYSVAISTSEVGTDHKLHLKEDPNLISVNNFEDCSLCPSVPIEHGFRRQQSKSNNVEETEIHWKLIPITGGNARSPEDQLGKHGEKQTPGMKSPEEQLVCVPPQEAFPNDPRVINRQRSSDYQFPSSPFTDTLKGTTEDDVLTGQVEEQCVPAAEAEPPAVSETTERTVLGEYNLFSRKIEEILKQKNVSYVSTVSTPIFSTQEKMKRLSEFIYSKTSKAGVQEFVDGLHEKLNTIIIKASAKGGNLPPVSPNDSGAKIASNPLERHVIPVSSSDFNNKHLLEPLCSDPLKDTNSDEQHSTSALTEVEMNQPQHATELMVTSDHIVPGDMAREPVEETTKSPSDVNISAQPALSNFISQLEPEVFNSLVKIMKDVQKNTVKFYIHEEEESVLCKEIKEYLIKLGNTECHPEQFLERRSKLDKLLIIIQNEDIAGFIHKIPGLVTLKKLPCVSFAGVDSLDDVKNHTYNELFVSGGFIVSDESILNPEVVTVENLKNFLTFLEELSTPEGKWQWKVHCKFQKKLKELGRLNAKALSLLTLLNVYQKKHLVEILSYHNCDSQTRNAPELDCLIRLQAQNIQQRHIVFLTEKNIKMLSSYTDNGIVVATAEDFMQNFKNLVGYHNSITEENLPQLGANENLESQSDAVLTLTPLELGVGISQH

SEQ ID NO: 60821 - protein, 25 aa, Homo sapiens
MSLWVKQNNRCPLCQQDWVAQRIGK

SEQ ID NO: 60822 - protein, 92 aa, Homo sapiens
LCRIFIGTGATETFLPPSFFLRSFSSLSFSLPGSLKGESTGSPQTPSASAHHKCHYRHGPHYLLPLLPTIWQEADAHFDGWIGCCWQDNHSV

SEQ ID NO: 60823 - protein, 9 aa, Homo sapiens
KKHRFGLPV

SEQ ID NO: 60824 - protein, 400 aa, Homo sapiens
LAQAHMFVKLKVIAESLSVILKSVLTAFLVLWLPHWGLYIFSLAQLFYTTVLVLCYVIYFTKLLGSPESTKLQTLPVSRITDLLPNITRNGAFINWKEAKLTWSFFKQSFLKQILTEGERYVMTFLNVLNFGDQGVYDIVNNLGSLVARLIFQPIEESFYIFFAKVLERGKDATLQKQEDVAVAAAVLESLLKLALLAGLTITVFGFAYSQLALDIYGGTMLSSGSGPVLLRSYCLYVLLLAINGVTECFTFAAMSKEEVDRYNFVMLALSSSFLVLSYLLTRWCGSVGFILANCFNMGIRITQSLCFIHRYYRRSPHRPLAGLHLSPVLLGTFALSGGVTAVSEVFLCCEQGWPARLAHIAVGAFCLGATLGTAFLTETKLIHFLRTQLGVPRRTDKMT

SEQ ID NO: 60825 - protein, 86 aa, Homo sapiens
VSSVLLAPSVFQQTVTRSSDLERKASSPSPLTIGTPESQRKPSIILSKSQLQDTLIHLIKNDSSFLSTLHEVYLQVLTKNKDNHNL

SEQ ID NO: 60826 - protein, 323 aa, Homo sapiens
VDLLNKMKKANEDELKRLDEELEDAEKNLGESEIRDAMMAKAEYLCRIGDKEGALTAFRKTYDKTVALGHRLDIVFYLLRIGLFYMDNDLITRNTEKAKSLIEEGGDWDRRNRLKVYQGLYCVAIRDFKQAAELFLDTVSTFTSYELMDYKTFVTYTVYVSMIALERPDLREKVIKGAEILEVLHSLPAVRQYLFSLYECRYSVFFQSLAVVEQEMKKDWLFAPHYRYYVREMRIHAYSQLLESYRSLTLGYMAEAFGVGVEFIDQELSRFIAAGRLHCKIDKVNEIVETNRPDSKNWQYQETIKKGDLLLNRVQKLSRVINM

SEQ ID NO: 60827 - protein, 31 aa, Homo sapiens
IYELLPHITFKAVFYKPHEEHHAFEGGRGKH

SEQ ID NO: 60828 - protein, 62 aa, Homo sapiens
IRIMAKYYTRMTMKRMVQLLDLSVDESEAFLSNLVVNKTIFAKVDRLAGINNFQRPKDPNNL

SEQ ID NO: 60829 - protein, 14 aa, Homo sapiens
RQSITSLQMAAEWK

SEQ ID NO: 60830 - protein, 66 aa, Homo sapiens
VLPIKEDYIIEVKATTDGGDGTSSEQIRIPRITSMDARGSTSAISNVHPMSSYMPIVLFLIVYVLW

SEQ ID NO: 60831 - protein, 19 aa, Homo sapiens
MQTGAGLPTAARPGPGLWL

SEQ ID NO: 60832 - protein, 25 aa, Homo sapiens
LPWAPQPSREPDAVMPQRRSGRLRP

SEQ ID NO: 60833 - protein, 217 aa, Homo sapiens
LGQAITLHPESAISKSKMGLTPLWRDSSALSSQRNSFPTSFWTSSYQPPPAPCLGGVHPDFQVTGPPGTFSAADPSPWPGHNLHQTGPAPPPAVSESWPYPLTSQVSPSYSHMHDVYMRHHHPHAHMHHRHRHHHHHHHPPAGSALDPSYGPLLMPSVHAARIPAPQCDITKTEPTTVTSATSAWAGAFHGTVDIVPSVGFDTGLQHQDKSKESPWY

SEQ ID NO: 60834 - protein, 23 aa, Homo sapiens
LMRLWFRSGDHSLLSIKTKKTGN

SEQ ID NO: 60835 - protein, 118 aa, Homo sapiens
LNHVRKSAISDHLKSKTHTKRKAEFEEQNVRKKQRPLTASLQCNSTAQTEKVSVIQDFVKMCLEANIPLEKADHPAVRAFLSRHVKNGGSIPKSDQLRRAYLPDGYENENQLLNSQDC

SEQ ID NO: 60836 - protein, 37 aa, Homo sapiens
LVSGNNTVPFAVSLVDSTSEKSQDILLSVENTVIYRK

SEQ ID NO: 60837 - protein, 23 aa, Homo sapiens
LASLNSSLEMDMEGLEDYFSEDS

SEQ ID NO: 60838 - protein, 163 aa, Homo sapiens
RPPLRNEFRYFQRMTTTSSVEGKQNLVIMGRKTWFSIPEKNRPLKDRINLVLSRELKEPPQGAHFLARSLDDALKLTERPELANKVDMIWIVGGSSVYKEAMNHLGHLKLFVTRIMQDFESDTFFSEIDLEKYKLLPEYPGVLSDVQEGKHIKYKFEVCEKDD

SEQ ID NO: 60839 - protein, 36 aa, Homo sapiens
IWNSPAISVKDLKLTTDEEKESLVLSLWTECLIQVV

SEQ ID NO: 60840 - protein, 226 aa, Homo sapiens
LKTKDGKLPFCAMGVSSVIHPKNPHAPTIHFNYRYFEVEEADGNKQWWFGGGCDLTPTYLNQEDAVHFHRTLKEACDQHGPDLYPKFKKWCDDYFFIAHRGERRGIGGIFFDDLDSPSKEEVFRFVQSCARAVVPSYIPLVKKHCDDSFTPQEKLWQQLRRGRYVEFNLLYDRGTKFGLFTPGSRIESILMSLPLTARWEYMHSPSENSKEAEILEVLRHPRDWVR

SEQ ID NO: 60841 - protein, 11 aa, Homo sapiens
RVKLAEQEDGR

SEQ ID NO: 60842 - protein, 95 aa, Homo sapiens
LYADLDGGFSHAAWLLPGWLPLPSFRRRDRAHQEIKDIFYKAIQKRRQSQEKIDDILQTLLDATYKDGRPLTDDEVAGMLTGLLLAEQHTSSTSA

SEQ ID NO: 60843 - protein, 133 aa, Homo sapiens
LEKISSREKYINNQLENLVQEYRAAQAQLSEAKERYQQGNGGVTERTRLLSEVMEELEKVKQEMEEKGSSMTDGAPLVKIKQSLTKLKQETVEMDIRIGIVEHTLLQSKLKEKSNMTRNMHATVIPEPATGFY

SEQ ID NO: 60844 - protein, 21 aa, Homo sapiens
MPQLFQNQQQAFIKTYWFSCF

SEQ ID NO: 60845 - protein, 327 aa, Homo sapiens
LPLVLLRLLCLLPTGLPVRSVDFNRGTDNITVRQGDTAILRCVVEDKNSKVAWLNRSGIIFAGHDKWSLDPRVELEKRHSLEYSLRIQKVDVYDEGSYTCSVQTQHEPKTSQVYLIVQVPPKISNISSDVTVNEGSNVTLVCMANGRPEPVITWRHLTPTGREFEGEEEYLEILGITREQSGKYECKAANEVSSADVKQVKVTVNYPPTITESKSNEATTGRQASLKCEASAVPAPDFEWYRDDTRINSANGLEIKSTEGQSSLTVTNVTEEHYGNYTCVAANKLGVTNASLVLFRPGSVRGINGSISLAVPLWLLAASLLCLLSKC

SEQ ID NO: 60846 - protein, 465 aa, Homo sapiens
LVGGGCGNGTGLRNRNGSAIGLPVPPITALITPGPVRHCQIPDLPVDGSLLFEFLFFIYLLVALFIQYINIYKTVWWYPYNHPASCTSLNFHLIDYHLAAFITVMLARRLVWALISEATKAGAASMIHYMVLISARLVLLTLCGWVLCWTLVNLFRSHSVLNLLFLGYPFGVYVPLCCFHQDSRAHLLLTDYNYVVQHEAVEESASTVGGLAKSKDFLSLLLESLKEQFNNATPIPTHSCPLSPDLIRNEVECLKADFNHRIKEVLFNSLFSAYYVAFLPLCFVKSTQYYDMRWSCEHLIMVWINAFVMLTTQLLPSKYCDLLHKSAAHLGKWQKLEHGSYSNAPQHIWSENTIWPQGVLVRHSRCLYRAMGPYNVAVPSDVSHARFYFLFHRPLRLLNLLILIEGSVVFYQLYSLLRSEKWNHTLSMALILFCNYYVLFKLLRDRIVLGRAYSYPLNSYELKAN

SEQ ID NO: 60847 - protein, 927 aa, Homo sapiens
IDQEIKSQEEKEQEKEKRVTTLKEELTKLKSFALMVVDEQQRLTAQLTLQRQKIQELTTNAKETHTKLALAEARVQEEEQKATRLEKELQTQTTKFHQDQDTIMAKLTNEDSQNRQLQQKLAALSRQIDELEETNRSLRKAEEELQDIKEKISKGEYGNAGIMAEVEELRKRVLDMEGKDEELIKMEEQCRDLNKRLERETLQSKDFKLEVEKLSKRIMALEKLEDAFNKSKQECYSLKCNLEKERMTTKQLSQELESLKVRIKELEAIESRLEKTEFTLKEDLTKLKTLTVMFVDERKTMSEKLKKTEDKLQAASSQLQVEQNKVTTVTEKLIEETKRALKSKTDVEEKMYSVTKERDDLKNKLKAEEEKGNDLLSRVNMLKNRLQSLEAIEKDFLKNKLNQDSGKSTTALHQENNKIKELSQEVERLKLKLKDMKAIEDDLMKTEDEYETLERRYANERDKAQFLSKELEHVKMELAKYKLAEKTETSHEQWLFKRLQEEEAKSGHLSREVDALKEKIHEYMATEDLICHLQGDHSVLQKKLNQQENRNRDLGREIENLTKELERYRHFSKSLRPSLNGRRISDPQVFSKEVQTEAVDNEPPDYKSLIPLERAVINGQLYEESENQDEDPNDEGSVLSFKCSQSTPCPVNRKLWIPWMKSKEGHLQNGKMQTKPNANFVQPGDLVLSHTPGQPLHIKVTPDHVQNTATLEITSPTTESPHSYTSTAVIPNCGTPKQRITILQNASITPVKSKTSTEDLMNLEQGMSPITMATFARAQTPESCGSLTPERTMSPIQVLAVTGSASSPEQGRSPEPTEISAKHAIFRVSPDRQSSWQFQRSNSNSSSVITTEDNKIHIHLGSPYMQAVASPVRPASPSAPLQDNRTQGLINGALNKTTNKVTSSITITPTATPLPRQSQITVSNIYN

SEQ ID NO: 60848 - protein, 3279 aa, Homo sapiens
LEPQAAALLEMLSRLSGLANVVLHELSGDDDTDQNMRAPLDPELHQESDMEFNNTTQEDVQERLAYAEQLVVELKDIIRQKDVQLQQKDEALQEERKAADNKIKKLKLHAKAKLTSLNKYIEEMKAQGGTVLPTEPQSEEQLSKHDKSSTEEEMEIEKIKHKLQEKEELISTLQAQLTQAQAEQPAQSSTEMEEFVMMKQQLQEKEEFISTLQAQLSQTQAEQAAQLSSMQQVVREKDARFETQVRLHEDELLQLVTQADVETEMQQKLRVLQRKLEEHEESLVGRAQVVDLLQQELTAAEQRNQILSQQLQQMEAEHNTLRNTVETEREESKILLEKMELEVAERKLSFHNLQEEMHHLLEQFEQAGQAQAELESRYSALEQKHKAEMEEKTSHILSLQKTGQELQSACDALKDQNSKLLQDKNEQAVQSAQTIQQLEDQLQQKSKEISQFLNRLPLQQHETASQTSFPDVYNEGTQAVTEENIASLQKRVVELENEKGALLLSSIELEELKAENEKLSSQITLLEAQNRTGEADREVSEISIVDIANKRSSSAEESGQDVLENTFSQKHKELSVLLLEMKEAQEEIAFLKLQLQGKRAEEADHEVLDQKEMKQMEGEGIAPIKMKVFLEDTGQDFPLMPNEESSLPAVEKEQASTEHQSRTSEEISLNDAGVELKSTKQDGDKSLSAVPDIGQCHQDELERLKSQILELELNFHKAQEIYEKNLDEKAKEISNLNQLIEEFKKNADNNSSAFTALSEERDQLLSQVKELSMVTELRAQVKQLEMNLAEAERQRRLDYESQTAHDNLLTEQIHSLSIEAKSKDVKIEVLQNELDDVQLQFSEQSTLIRSLQSQLQNKESEVLEGAERVRHISSKVEELSQALSQKELEITKMDQLLLEKKRDVETLQQTIEEKDQQVTEISFSMTEKMVQLNEEKFSLGVEIKTLKEQLNLLSRAEEAKKEQVEEDNEVSSGLKQNYDEMSPAGQISKEELQHEFDLLKKENEQRKRKLQAALINRKELLQRVSRLEEELANLKDESKKEIPLSETERGEVEEDKENKEYSEKCVTSKCQEIEIYLKQTISEKEVELQHIRKDLEEKLAAEEQFQALVKQMNQTLQDKTNQIDLLQAEISENQAIIQKLITSNTDASDGDSVALVKETVVISPPCTGSSEHWKPELEEKILALEKEKEQLQKKLQEALTSRKAILKKAQEKERHLREELKQQKDDYNRLQEQFDEQSKENENIGDQLRQLQIQVRESIDGKLPSTDQQESCSSTPGLEEPLFKATEQHHTQPVLESNLCPDWPSHSEDASALQGGTSVAQIKAQLKEIEAEKVELELKVSSTTSELTKKSEEVFQLQEQINKQGLEIESLKTVSHEAEVHAESLQQKLESSQLQIAGLEHLRELQPKLDELQKLISKKEEDVSYLSGQLSEKEAALTKIQTEIIEQEDLIKALHTQLEMQAKEHDERIKQLQVELCEMKQKPEEIGEESRAKQQIQRKLQAALISRKEALKENKSLQEELSLARGTIERLTKSLADVESQVSAQNKEKDTVLGRLALLQEERDKLITEMDRSLLENQSLSSSCESLKLALEGLTEDKEKLVKEIESLKSSKIAESTEWQEKHKELQKEYEILLQSYENVSNEAERIQHVVEAVRQEKQELYGKLRSTEANKKETEKQLQEAEQEMEEMKEKMRKFAKSKQQKILELEEENDRLRAEVHPAGDTAKECMETLLSSNASMKEELERVKMEYETLSKKFQSLMSEKDSLSEEVQDLKHQIEGNVSKQANLEATEKHDNQTNVTEEGTQSIPGETEEQDSLSMSTRPTCSESVPSAKSANPAVSKDFSSHDEINNYLQQIDQLKERIAGLEEEKQKNKEFSQTLENEKNTLLSQISTKDGELKMLQEEVTKMNLLNQQIQEELSRVTKLKETAEEEKDDLEERLMNQLAELNGSIGNYCQDVTDAQIKNELLESEMKNLKKCVSELEEEKQQLVKEKTKVESEIRKEYLEKIQGAQKEPGNKSHAKELQELLKEKQQEVKQLQKDCIRYQEKISALERTVKALEFVQTESQKDLEITKENLAQAVEHRKKAQAELASFKVLLDDTQSEAARVLADNLKLKKELQSNKESVKSQMKQKDEDLERRLEQAEEKHLKEKKNMQEKLDALRREKVHLEETIGEIQVTLNKKDKEVQQLQENLDSTVTQLAAFTKSMSSLQDDRDRVIDEAKKWERKFSDAIQSKEEEIRLKEDNCSVLKDQLRQMSIHMEELKINISRLEHDKQIWESKAQTEVQLQQKVCDTLQGENKELLSQLEETRHLYHSSQNELAKLESELKSLKDQLTDLSNSLEKCKEQKGNLEGIIRQQEADIQNSKFSYEQLETDLQASRELTSRLHEEINMKEQKIISLLSGKEEAIQVAIAELRQQHDKEIKELENLLSQEEEENIVLEEENKKAVDKTNQLMETLKTIKKENIQQKAQLDSFVKSMSSLQNDRDRIVGDYQQLEERHLSIILEKDQLIQEAAAENNKLKEEIRGLRSHMDDLNSENAKLDAELIQYREDLNQVITIKDSQQKQLLEVQLQQNKELENKYAKLEEKLKESEEANEDLRRSFNALQEEKQDLSKEIESLKVSISQLTRQVTALQEEGTLGLYHAQLKVKEEEVHRLSALFSSSQKRIAELEEELVCVQKEAAKKVGEIEDKLKKELKHLHHDAGIMRNETETAEERVAELARDLVEMEQKLLMVTKENKGLTAQIQSFGRSMSSLQNSRDHANEELDELKRKYDASLKELAQLKEQGLLNRERDALLSETAFSMNSTEENSLSHLEKLNQQLLSKDEQLLHLSSQLEDSYNQVQSFSKAMASLQNERDHLWNELEKFRKSEEGKQRSAAQPSTSPAEVQSLKKAMSSLQNDRDRLLKELKNLQQQYLQINQEITELHPLKAQLQEYQDKTKAFQIMQEELRQENLSWQHELHQLRMEKSSWEIHERRMKEQYLMAISDKDQQLSHLQNLIRELRSSSSQTQPLKVQYQRQASPETSASPDGSQNLVYETELLRTQLNDSLKEIHQKELRIQQLNSNFSQLLEEKNTLSIQLCDTSQSLRENQQHYGDLLNHCAVLEKQVQELQAVSKEKGPLNIDVAPGAPQEKNGVHRKSDPEELREPQQSFSEAQQQLCNTRQEVNELRKLLEEERDQRVAAENALSVAEEQIRRLEHSEWDSSRTPIIGSCGTQEQALLIDLTSNSCRRTRSGVGWKRVLRSLCHSRTRVPLLAAIYFLMIHVLLILCFTGHL

SEQ ID NO: 60849 - protein, 35 aa, Homo sapiens
IEVFFLPDSASQSAIPKTGIPRDISFPRWVTKSGL

SEQ ID NO: 60850 - protein, 123 aa, Homo sapiens
VMRTIDDRIVHELNTTVPTASFAGKIDASQTCKQLYESLMAAHASRDRVIKNCIAQTSAVVKNLREEREKNLDDLTLLKQLRKEQTKLKWMQSELNVEEVVNDRSWKVFNERCRIHFKPPKNE

SEQ ID NO: 60851 - protein, 148 aa, Homo sapiens
MNIEDMLCKVQEEMARKKERGLWRSLGQWTIQQQKTQDEMKENIIFLKCPVPPTQELLDQKKQFEKCGLQVLKVEKIDNEVLMAAFQRKKKMMEEKLHRQPVSHRLFQQVPYQFCNVVCRVGFQRMYSTPCGRCQCLIIGATLWNLVS

SEQ ID NO: 60852 - protein, 6 aa, Homo sapiens
RRWKSF

SEQ ID NO: 60853 - protein, 434 aa, Homo sapiens
LEPLGSPDAGLGAAVGKEAEGAGEESSGVDTMTHNNFWLKKIEISVSEAEKRTGRNAMNMQETYTAYLIETRSVEHTDGQSVLTDSLWRRYSEFELLRSYLLVYYPHIVVPPLPEKRAEFVWHKLSADNMDPDFVERRRIGLENFLLRIASHPILCRDKIFYLFLTQEGNWKETVNETGFQLKADSRLKALNATFRVKNPDKRFTDLKHYSDELQSVISHLLRVRARVADRLYGVYKVHGNYGRVFSEWSAIEKEMGDGLQSAGHHMDVYASSIDDILEDEEHYADQLKEYLFYAEALRAVCRKHELMQYDLEMAAQDLASKKQQCEELVTGTVRTFSLKGMTTKLFGQETPEQREARIKVLEEQINEGEQQLKSKNLEGREFVKNAWADIERFKEQKNRDLKEALISYAVMQISMCKKGIQVWTNAKECFSKM

SEQ ID NO: 60854 - protein, 268 aa, Homo sapiens
IATPIAASLGDLITLSILALVSSFFYRHKDSRYLTPLVCLSFAALTPVWVLIAKQSPPIVKILKFGWFPIILAMVISSFGGLILSKTVSKQQYKGMAIFTPVICGVGGNLVAIQTSRISTYLHMWSAPGVLPLQMKKFWPNPCSTFCTSEINSMSARVLLLLVVPGHLIFFYIIYLVEGQSVINSQTFVVLYLLAGLIQVTILLYLAEVMVRLTWHQALDPDNHCIPYLTGLGDLLGTGLLALCFFTDWLLKSKAELGGISELASGPP

SEQ ID NO: 60855 - protein, 7 aa, Homo sapiens
KTVTFEY

SEQ ID NO: 60856 - protein, 1323 aa, Homo sapiens
VSCSAWVTVHEKKSSRKSEYLLPVAPSKPTAPIFLQGLSDLKVMDGSQVTMTVQVSGNPPPEVIWLHNGNEIQESEDFHFEQRGTQHSLCIQEVFPEDTGTYTCEAWNSAGEVRTQAVLTVQEPHDGTQPWFISKPRSVTASLGQSVLISCAIAGDPFPTVHWLRDGKALCKDTGHFEVLQNEDVFTLVLKKVQPWHAGQYEILLKNRVGECSCQVSLMLQNSSARALPRGREPASCEDLCGGGVGADGGGSDRYGSLRPGWPARGQGWLEEEDGEDVRGVLKRRVETRQHTEEAIRQQEVEQLDFRDLLGKKVSTKTLSEDDLKEIPAEQMDFRANLQRQVKPKTVSEEERKVHSPQQVDFRSVLAKKGTSKTPVPEKVPPPKPATPDFRSVLGGKKKLPAENGSSSAETLNAKAVESSKPLSNAQPSGPLKPVGNAKPAETLKPMGNAKPAETLKPMGNAKPDENLKSASKEELKKDVKNDVNCKRGHAGTTDNEKRSESQGTAPAFKQKLQDVHVAEGKKLLLQCQVSSDPPATIIWTLNGKTLKTTKFIILSQEGSLCSVSIEKALPEDRGLYKCVAKNDAGQAECSCQVTVDDAPASENTKAPEMKSRRPKSSLPPVLGTESDATVKKKPAPKTPPKAAMPPQIIQFPEDQKVRAGESVELFGKVTGTQPITCTWMKFRKQIQESEHMKVENSENGSKLTILAARQEHCGCYTLLVENKLGSRQAQVNLTVVDKPDPPAGTPCASDIRSSSLTLSWYGSSYDGGSAVQSYSIEIWDSANKTWKELATCRSTSFNVQDLLPDHEYKFRVRAINVYGTSEPSQESELTTVGEKPEEPKDEVEVSDDDEKEPEVDYRTVTINTEQKVSDFYDIEERLGSGKFGQVFRLVEKKTRKVWAGKFFKAYSAKEKENIRQEISIMNCLHHPKLVQCVDAFEEKANIVMVLEIVSGGELFERIIDEDFELTERECIKYMRQISEGVEYIHKQGIVHLDLKPENIMCVNKTGTRIKLIDFGLARRLENAGSLKVLFGTPEFVAPEVINYEPIGYATDMWSIGVICYILVSGLSPFMGDNDNETLANVTSATWDFDDEAFDEISDDAKDFISNLLKKDMKNRLDCTQCLQHPWLMKDTKNMEAKKLSKDRMKKYMARRKWQKTGNAVRAIGRLSSMAMISGLSGRKSSTGSPTSPLNAEKLESEEDVSQAFLEAVAEEKPHVKPYFSKTIRDLEVVEGSAARFDCKIEGYPDPEVVWFKDDQSIRESRHFQIDYDEDGNCSLIISDVCGDDDAKYTCKAVNSLGEATCTAELIVETMEEGEGEGEEEEE

SEQ ID NO: 60857 - protein, 378 aa, Homo sapiens
LAAGGMDTLEEVTWANGSTALPPPLAPNISVPHRCLLLLYEDIGTSRVRYWDLLLLIPNVLFLIFLLWKLPSARAKIRITSSPIFITFYILVFVVALVGIARAVVSMTVSTSNAATVADKILWEITRFFLLAIELSVIILGLAFGHLESKSSIKRVLAITTVLSLAYSVTQGTLEILYPDAHLSAEDFNIYGHGGRQFWLVSSCFFFLVYSLVVILPKTPLKERISLPSRRSFYVYAGILALLNLLQGLGSVLLCFDIIEGLCCVDATTFLYFSFFAPLIYVAFLRGFFGSEPKILFSYKCQVDETEEPDVHLPQPYAVARREGLEAAGAAGASAASYSSTQFDSAGGVAYLDDIASMPCHTGSINSTDSERWKAINA

SEQ ID NO: 60858 - protein, 331 aa, Homo sapiens
LARRKRGSAALGERDSGARGPGPEDPSSMPEESSPRRTPQSIPYQDLPHLVNADGQYLFCRYWKPTGTPKALIFVSHGAGEHSGRYEELARMLMGLDLLVFAHDHVGHGQSEGERMVVSDFHVFVRDVLQHVDSMQKDYPGLPVFLLGHSMGGAIAILTAAERPGHFAGMVLISPLVLANPESATTFKVLAAKVLNLVLPNLSLGPIDSSVLSRNKTEVDIYNSDPLICRAGLKVCFGIQLLNAVSRVERALPKLTVPFLLLQGSADRLCDSKGAYLLMELAKSQDKTLKIYEGAYHVLHKELPEVTNSVFHEINMWVSQRTATAGTASPP

SEQ ID NO: 60859 - protein, 174 aa, Homo sapiens
KTGAFSERQGSTIGVDFTMKTLEIQGKRVKLQIWDTAGQERFRTITQSYYRSANGAILAYDITKRSSFLSVPHWIEDVRKYAGSNIVQLLIGNKSDLSELREVSLAEAQSLAEHYDILCAIETSAKDSSNVEEAFLRVATELIMRHGGPLFSEKSPDHIQLNSKDIGEGWGCGC

SEQ ID NO: 60860 - protein, 9 aa, Homo sapiens
LTPSRWPHT

SEQ ID NO: 60861 - protein, 22 aa, Homo sapiens
KKIKRRNQAIYAAVDDDDDDAA

SEQ ID NO: 60862 - protein, 26 aa, Homo sapiens
VALPVGVTVVVAASRGLRRHTARGIH

SEQ ID NO: 60863 - protein, 1263 aa, Homo sapiens
RTSPAMITSELPVLQDSTNETTAHSDAGSELEETEVKGKRKRGRPGRPPSTNKKPRKSPGEKSRIEAGIRGAGRGRANGHPQQNGEGEPVTLFEVVKLGKSAMQSVVDDWIESYKQDRDIALLDLINFFIQCSGCRGTVRIEMFRNMQNAEIIRKMTEEFDEDSGDYPLTMPGPQWKKFRSNFCEFIGVLIRQCQYSIIYDEYMMDTVISLLTGLSDSQVRAFRHTSTLAAMKLMTALVNVALNLSIHQDNTQRQYEAERNKMIGKRANERLELLLQKRKELQENQDEIENMMNSIFKGIFVHRYRDAIAEIRAICIEEIGVWMKMYSDAFLNDSYLKYVGWTLHDRQGEVRLKCLKALQSLYTNRELFPKLELFTNRFKDRIVSMTLDKEYDVAVEAIRLVTLILHGSEEALSNEDCENVYHLVYSAHRPVAVAAGEFLHKKLFSRHDPQAEEALAKRRGRNSPNGNLIRMLVLFFLESELHEHAAYLVDSLWESSQELLKDWECMTELLLEEPVQGEEAMSDRQESALIELMVCTIRQAAEAHPPVGRGTGKRVLTAKERKTQIDDRNKLTEHFIITLPMLLSKYSADAEKVANLLQIPQYFDLEIYSTGRMEKHLDALLKQIKFVVEKHVESDVLEACSKTYSILCSEEYTIQNRVDIARSQLIDEFVDRFNHSVEDLLQEGEEADDDDIYNVLSTLKRLTSFHNAHDLTKWDLFGNCYRLLKTGIEHGAMPEQIVVQALQCSHYSILWQLVKITDGSPSKEDLLVLRKTVKSFLAVCQQCLSNVNTPVKEQAFMLLCDLLMIFSHQLMTGGREGLQPLVFNPDTGLQSELLSFVMDHVFIDQDEENQSMEGDEEDEANKIEALHKRRNLLAAFSKLIIYDIVDMHAAADIFKHYMKYYNDYGDIIKETLSKTRQIDKIQCAKTLILSLQQLFNELVQEQGPNLDRTSAHVSGIKELARRFALTFGLDQIKTREAVATLHKDGIEFAFKYQNQKGQEYPPPNLAFLEVLSEFSSKLLRQDKKTVHSYLEKFLTEQMMERREDVWLPLISYRNSLVTGGEDDRMSVNSGSSSSKTSSVRNKKGRPPLHKKRVEDESLDNTWLNRTDTMIQTPGPLPAPQLTSTVLRENSRPMGDQIQEPESEHGSEPDFLHNPQMQISWLGQPKLEDLNRKDRTGMNYMKVRTGVRHAVRGLMEEDAEPIFEDVMMSSRSQLEDMNEEFEDTMVIDLPPSRNRRERAELRPDFFDSAAIIEDDSGFGMPMF

SEQ ID NO: 60864 - protein, 344 aa, Homo sapiens
LESELEARGEERRGAREALLRLLLPHNRLVSLPRALGSGFPHLQLLDVSGNALTALGPELLALRGLRTLLAKNNRLGGPSALPKGLAQSPLCRSLQVLNLSGNCFQEVPASLLELRALQTLSLGGNQLQSIPAEIENLQSLECLYLGGNFIKEIPPELGNLPSLNYLVLCDNKIQSIPPQLSQLHSLRSLSLHNNLLTYLPREILNLIHLEELSLRGNPLVVRFVRDLTYDPPTLLELAARTIKIRNISYTPYDLPGNLLRYLGSASNCPNPKCGGVYFDCCVRQIKFVDFCGKYRLPLMHYLCSPECSSPCSSASHSSTSQSESDSEDEASVAARRMQKVLLG

SEQ ID NO: 60865 - protein, 7 aa, Homo sapiens
MALQNLK

SEQ ID NO: 60866 - protein, 21 aa, Homo sapiens
MPNKILGKNTAKNGCLIRTCC

SEQ ID NO: 60867 - protein, 251 aa, Homo sapiens
LTSLFECPVCFDYVLPPILQCQAGHLVCNQCRQKLSCCPTCRGALTPSIRNLAMEKVASAVLFPCKYATTGCSLTLHHTEKPEHEDICEYRPYSCPCPGASCKWQGSLEAVMSHLMHAHKSITTLQGEDIVFLATDINLPGAVDWVMMQSCFGHHFMLVLEKQEKYEGHQQFFAIVLLIGTRKQAENFAYRLELNGNRRRLTWEATPRSIHDGVAAAIMNSDCLVFDTAIAHLFADNGNLGINVTISTCCP

SEQ ID NO: 60868 - protein, 5 aa, Homo sapiens
MLSMM

SEQ ID NO: 60869 - protein, 134 aa, Homo sapiens
TYLLTESSKLMISELDFQDSVFVLGFSEELNKLLLQLYLDNRKEIRTILSELAPSLPSYHNLEWRLDVQLASRSLRQQIKPAVTIKLHLNQNGDHNTKVLQTDPATLLHLVQQLEQALEEMKTNHCRRVVRNIK

SEQ ID NO: 60870 - protein, 40 aa, Homo sapiens
VAVGRAGRVLVFVMGKEGVHGGGLNKKAYSMAKYLRDSGF

SEQ ID NO: 60871 - protein, 5 aa, Homo sapiens
LSLWK

SEQ ID NO: 60872 - protein, 12 aa, Homo sapiens
MDITADSFSGVV

SEQ ID NO: 60873 - protein, 191 aa, Homo sapiens
IGDRLYSEVSLTIDHSLIPEERLSPTPSMQDGLDLPSETDLRILGCELIQAAGILLRLPQVAMATGQVLFHRFFYSKSFVKHSFEIVAMACINLASKIEEAPRRIRDVINVFHHLRQLRGKRTPSPLILDQNYINTKNQVIKAERRVLKELGFCVHVKHPHKIIVMYLQVLECERNQTLVQTAWVVHDGKS

SEQ ID NO: 60874 - protein, 345 aa, Homo sapiens
ILGCELIQAAGILLRLPQVAMATGQVLFHRFFYSKSFVKHSFEIVAMACINLASKIEEAPRRIRDVINVFHHLRQLRGKRTPSPLILDQNYINTKNQVIKAERRVLKELGFCVHVKHPHKIIVMYLQVLECERNQTLVQTAWNYMNDSLRTNVFVRFQPETIACACIYLAARALQIPLPTRPHWFLLFGTTEEEIQEICIETLRLYTRKKPNYELLEKEVEKRKVALQEAKLKAKGLNPDGTPALSTLGGFSPASKPSSPREVKAEEKSPISINVKTVKKEPEDRQQASKSPYNGVRKDSKRSRNSRSASRSRSRTRSRSRSHTPRRQDEVLLRCPGRSRTPGLK

SEQ ID NO: 60875 - protein, 18 aa, Homo sapiens
VALCFRAVELPGPLPPRE

SEQ ID NO: 60876 - protein, 425 aa, Homo sapiens
IKDSGGVGEECIQPPNHEINKEMHNFEEELTCPICYSIFEDPRVLPCSHTFCRNCLENILQASGNFYIWRPLRIPLKCPNCRSITEIAPTGIESLPVNFALRAIIEKYQQEDHPDIVTCPEHYRQPLNVYCLLDKKLVCGHCLTIGQHHGHPIDDLQSAYLKEKDTPQKLLEQLTDTHWTDLTHLIEKLKEQKSHSEKMIQGDKEAVLQYFKELNDTLEQKKKSFLTALCDVGNLINQEYTPQIERMKEIREQQLELMALTISLQEESPLKFLEKVDDVRQHVQILKQRPLPEVQPVEIYPRVSKILKEEWSRTEIGQIKNVLIPKMKISPKRMSCSWPGKDEKEVEFLKILNIVVVTLISVILMSILFFNQHIITFLSEITLIWFSEASLSVYQSLSNSLHKVKNILCHIFYLLKEFVWKIVSH

SEQ ID NO: 60877 - protein, 14 aa, Homo sapiens
KCLFERKGHSSKTA

SEQ ID NO: 60878 - protein, 515 aa, Homo sapiens
LDNQRLKNFKNKGRDLETMRRQRNEVVVELRKNKRDEHLLKRRNVPHEDICEDSDIDGDYRVQNTSLEAIVQNASSDNQGIQLSAVQAARKLLSSDRNPPIDDLIKSGILPILVHCLERDDNPSLQFEAAWALTNIASGTSEQTQAVVQSNAVPLFLRLLHSPHQNVCEQAVWALGNIIGDGPQCRDYVISLGVVKPLLSFISPSIPITFLRNVTWVMVNLCRHKDPPPPMETIQEILPALCVLIHHTDVNILVDTVWALSYLTDAGNEQIQMVIDSGIVPHLVPLLSHQEVKVQTAALRAVGNIVTGTDEQTQVVLNCDALSHFPALLTHPKEKINKEAVWFLSNITAGNQQQVQAVIDANLVPMIIHLLDKGDFGTQKEAAWAISNLTISGRKDQVAYLIQQNVIPPFCNLLTVKDAQVVQVVLDGLSNILKMAEDEAETIGNLIEECGGLEKIEQLQNHENEDIYKLAYEIIDQFFSSDDIDEDPSLVPEAIQGGTFGFNSSANVPTEGFQF

SEQ ID NO: 60879 - protein, 686 aa, Homo sapiens
KRIFQTLLLLTVVFGFLYGAMLYYELQTQLRKAEAVALKYQQHQESLSAQLQVVYEHRSRLEKSLQKERLEHKKAKEDFLVYKLEAQETLNKGRQDSNSRYSALNVQHQMLKSQHEELKKQHSDLEEEHRKQGEDFSRTFNDHKQKYLQLQQEKEQELSKLKETVYNLREENRQLRKAHQDIHTQLQDVKQQHKNLLSEHEQLVVTLEDHKSALAAAQTQVAEYKQLKDTLNRIPSLRKPDPAEQQNVTQVAHSPQGYNTAREKPTREVQEVSRNNDVWQNHEAVPGRAEDTKLYAPTHKEAEFQAPPEPIQQEVERREPEEHQVEEEHRKALEEEEMEQVGQAEHLEEEHDPSPEEQDREWKEQHEQREAANLLEGHARAEVYPSAKPMIKFQSPYEEQLEQQRLAVQQVEEAQQLREHQEALHQQRLQGHLLRQQEQQQQQVAREMALQRQAELEEGRPQHQEQLRQQAHYDAMDNDIVQGAEDQGIQGEEGAYERDNQHQDEAEGDPGNRHEPREQGPREADPESEADRAAVEDINPADDPNNQGEDEFEEAEQVREENLPDENEEQKQSNQKQENTEVEEHLVMAGNPDQQEDNVDEQYQEEAEEEVQEDLTEEKKRELEHNAEETYGENDENTDDKNNDGEEQEVRDDNRPKGREEHYEEEEEEEEDGAAVAEKSHRRAEM

SEQ ID NO: 60880 - protein, 122 aa, Homo sapiens
VLKGRPCKIVEMSTSKTGKHGHAKVHLVGIDIFTGKKYEDICPSTHNMDVPNIKRNDYQLICIQDGYLSLLTETGEVREDLKLPEGELGKEIEGKYNAGEDVQVSVMCAMSEEYAVAIKPCK

SEQ ID NO: 60881 - protein, 54 aa, Homo sapiens
RTIVQLWILNQTREHLLCQQQPAVPPPPPSPLPPLECSSHRSLSTVVQTDMLYR

SEQ ID NO: 60882 - protein, 105 aa, Homo sapiens
LDLTHPVEDGIFDSGNFEQFLREKVKVNGKTGNLGNVVHIERFKNKITVVSEKQFSKRYLKYLTKKYLKKNNLRDWLRVVASDKETYELRYFQISQDEDESESED

SEQ ID NO: 60883 - protein, 19 aa, Homo sapiens
IVGRPRHQGVMVGMGQKDS

SEQ ID NO: 60884 - protein, 13 aa, Homo sapiens
LEATVSSINNSNL

SEQ ID NO: 60885 - protein, 21 aa, Homo sapiens
ININSLRLKEYHRVQNKVTAK

SEQ ID NO: 60886 - protein, 489 aa, Homo sapiens
KSFNDDAMLIEKFVDTPRHVEVQVFGDHHGNAVYLFERDCSVQRRHQKIIEEAPAPGIKSEVRKKLGEAAVRAAKAVNYVGAGTVEFIMDSKHNFCFMEMNTRLQVEHPVTEMITGTDLVEWQLRIAAGEKIPLSQEEITLQGHAFEARIYAEDPSNNFMPVAGPLVHLSTPRADPSTRIETGVRQGDEVSVHYDPMIAKLVVWAADRQAALTKLRYSLRQYNIVGLHTNIDFLLNLSGHPEFEAGNVHTDFIPQHHKQLLLSRKAAAKESLCQAALGLILKEKAMTDTFTLQAHDQFSPFSSSSGRRLNISYTRNMTLKDGKNNVAIAVTYNHDGSYSMQIEDKTFQVLGNLYSEGDCTYLKCSVNGVASKAKLIILENTIYLFSKEGSIEIDIPVPKYLSSVSSQETQGGPLAPMTGTIEKVFVKAGDKVKAGDSLMVMIAMKMEHTIKSPKDGTVKKVFYREGAQANRHTPLVEFEEEESDKRESE

SEQ ID NO: 60887 - protein, 338 aa, Homo sapiens
RFNFFIQQKCGFRKAPRKVEPRRSDPGTSGEAYKRSALIPPVEETVFYPSPYPIRSLIKPLFFTVGFTGCAFGSAAIWQYESLKSRVQSYFDGIKADWLDSIRPQKEGDFRKEINKWWNNLSDGQRTVTGIIAANVLVFCLWRVPSLQRTMIRYFTSNPASKVLCSPMLLSTFSHFSLFHMAANMYVLWSFSSSIVNILGQEQFMAVYLSAGVISNFVSYVGKVATGRYGPSLGASGAIMTVLAAVCTKIPEGRLAIIFLPMFTFTAGNALKAIIAMDTAGMILGWKFFDHAAHLGGALFGIWYVTYGHELIWKNREPLVKIWHEIRTNGPKKGGGSK

SEQ ID NO: 60888 - protein, 8 aa, Homo sapiens
MNDFYQEI

SEQ ID NO: 60889 - protein, 311 aa, Homo sapiens
LPENMLQTPESRGLPVPQAEGEKDGGHDGETRAPTASQERPKEELGAGREEGAAEPALTRKGARALAAKALARRRAYRRLNRTVAELVQFLLVKDKKKSPITRSEMVKYVIGDLKILFPDIIARAAEHLRYVFGFELKQFDRKHHTYILINKLKPLEEEEEEDLGGDGPRLGLLMMILGLIYMRGNSAREAQVWEMLRRLGVQPSKYHFLFGYPKRLIMEDFVQQRYLSYRRVPHTNPPEYEFSWGPRSNLEISKMEVLGFVAKLHKKEPQHWPVQYREALADEADRARAKARAEASMRARASARAGIHLW

SEQ ID NO: 60890 - protein, 760 aa, Homo sapiens
IRHHGHHTGHELTGKSSWEDQGRAAGSTQGRKMRWLLLYYALCFSLSKASAHTVELNNMFGQIQSPGYPDSYPSDSEVTWNITVPDGFRIKLYFMHFNLESSYLCEYDYVKVETEDQVLATFCGRETTDTEQTPGQEVVLSPGSFMSITFRSDFSNEERFTGFDAHYMAVDVDECKEREDEELSCDHYCHNYIGGYYCSCRFGYILHTDNRTCRVECSDNLFTQRTGVITSPDFPNPYPKSSECLYTIELEEGFMVNLQFEDIFDIEDHPEVPCPYDYIKIKVGPKVLGPFCGEKAPEPISTQSHSVLILFHSDNSGENRGWRLSYRAAGNECPELQPPVHGKIEPSQAKYFFKDQVLVSCDTGYKVLKDNVEMDTFQIECLKDGTWSNKIPTCKIVDCRAPGELEHGLITFSTRNNLTTYKSEIKYSCQEPYYKMLNNNTGIYTCSAQGVWMNKVLGRSLPTCLPECGQPSRSLPSLVKRIIGGRNAEPGLFPWQALIVVEDTSRVPNDKWFGSGALLSASWILTAAHVLRSQRRDTTVIPVSKEHVTVYLGLHDVRDKSGAVNSSAARVVLHPDFNIQNYNHDIALVQLQEPVPLGPHVMPVCLPRLEPEGPAPHMLGLVAGWGISNPNVTVDEIISSGTRTLSDVLQYVKLPVVPHAECKTSYESRSGNYSVTENMFCAGYYEGGKDTCLGDSGGAFVIFDDLSQRWVVQGLVSWGGPEECGSKQVYGVYTKVSNYVDWVWEQMGLPQSVVEPQVER

SEQ ID NO: 60891 - protein, 180 aa, Homo sapiens
IPGSSFLNVLAGALFGPWLGLLLCCVLTSVGATCCYLLSSIFGKQLVVSYFPDKVALLQRKVEENRNSLFFFLLFLRLFPMTPNWFLNLSAPILNIPIVQFFFSVLIGLIPYNFICVQTGSILSTLTSLDALFSWDTVFKLLAIAMVALIPGTLIKKFSQKHLQLNETSTANHIHSRKDT

SEQ ID NO: 60892 - protein, 35 aa, Homo sapiens; identical to SEQ ID NO: 30255

SEQ ID NO: 60893 - protein, 369 aa, Homo sapiens
KKMDAQCSAKVNARKRRKEAPGPNGATEEDGVPSKVQRCAVGLRQPAPFSDEIEVDFSKPYVRVTMEEASRGTPCERPVRVYADGIFDLFHSGHARALMQAKNLFPNTYLIVGVCSDELTHNFKGFTVMNENERYDAVQHCRYVDEVVRNAPWTLTPEFLAEHRIDFVAHDDIPYSSAGSDDVYKHIKEAGMFAPTQRTEGISTSDIITRIVRDYDVYARRNLQRGYTAKELNVSFINEKKYHLQERVDKVKKKVKDVEEKSKEFVQKVEEKSIDLIQKWEEKSREFIGSFLEMFGPEGALKHMLKEGKGRMLQAISPKQSPSSSPTRERSPSPSFRWPFSGKTSPPCSPANLSRHKAAAYDISEDEED

SEQ ID NO: 60894 - protein, 38 aa, Homo sapiens
VNTGVARLPRSSGKAEVMLQPEPGLPPGAASRGPAAPS

SEQ ID NO: 60895 - skipped

SEQ ID NO: 60896 - protein, 35 aa, Homo sapiens; identical to SEQ ID NO: 30255

SEQ ID NO: 60897 - protein, 184 aa, Homo sapiens [sequence omitted]

SEQ ID NO: 60898 - protein, 21 aa, Homo sapiens
LCKNSRSFFGNLPSFKSKIYV

SEQ ID NO: 60899 - protein, 576 aa, Homo sapiens
VPAEARTGLLSFEESQRIKKLHEENKQFLCIPRRPNWNQNTTPEELKQAEKDNFLEWRRQLVRLEEEQKLILTPFERNLDFWRQLWRVIERSDIVVQIVDARNPLLFRCEDLECYVKEMDANKENVILINKADLLTAEQRSAWAMYFEKEDVKVIFWSALAGAIPLNGDSEEEANRDDRQSNTTKFGHSSFDQAEISHSESEHLPARDSPSLSENPTTDEDDSEYEDCPEEEEDDWQTCSEEDGPKEEDCSQDWKESSTADSEARSRKTPQKRQIHNFSHLVSKQELLELFKELHTGRKVKDGQLTVGLVGYPNVGKSSTINTIMGNKKVSVSATPGHTKHFQTLYVEPGLCLCDCPGLVMPSFVSTKAEMTCSGILPIDQMRDHVPPVSLVCQNIPRHVLEATYGINIITPREDEDPHRPPTSEELLTAYGYMRGFMTAHGQPDQPRSARYILKDYVSGKLLYCHPPPGRDPVTFQHQHQRLLENKMNSDEIKMQLGRNKKAKQIENIVDKTFFHQENVRALTKGVQAVMGYKPGSGVVTASTASSENGAGKPWKKHGNRNKKEKSRRLYKHLDM

SEQ ID NO: 60900 - protein, 57 aa, Homo sapiens
IGMEHPKLFHVLDCTWNRQLCTWWRDHGYSDVFEAYFRCEGHVKIYHGNCNTPIPED

SEQ ID NO: 60901 - protein, 67 aa, Homo sapiens
VAKGARVAATRSALALASGSLCRDNRCGSRFRGSSCGRFSPERDLRLPASLCCADPSLRGPHAKQRP

SEQ ID NO: 60902 - protein, 22 aa, Homo sapiens
VRVRPLLTSGLPSAPLPSLAAG

SEQ ID NO: 60903 - protein, 8 aa, Homo sapiens
MSHHWITQ

SEQ ID NO: 60904 - protein, 52 aa, Homo sapiens
LENYRNLVSLGFVISNPDLVTCLEQIKEPCNLKIHETAAKPPVVQHFWSLQF

SEQ ID NO: 60905 - protein, 11 aa, Homo sapiens
MNFRLSSSRPG

SEQ ID NO: 60906 - protein, 37 aa, Homo sapiens
MTFLIVTVAWAAHTRLFQVVGKTDDTLALLNLAASWL

SEQ ID NO: 60907 - protein, 611 aa, Homo sapiens
LRRFWRSTGFCPPLPHSQADQYVLSWDQQLNLAYVGAVPHRGIKQVRTHWLLELVTTRGSTGRGLSYNFTHLDGYLDLLRENQLLPGFELMGSASGHFTDFEDKQQVFEWKDLVSSLARRYIGRYGLAHVSKWNFETWNEPDHHDFDNVSMTMQGFLNYYDACSEGLRAASPALRLGGPGDSFHTPPRSPLSWGLLRHCHDGTNFFTGEAGVRLDYISLHRKGARSSISILEQEKVVAQQIRQLFPKFADTPIYNDEADPLVGWSLPQPWRADVTYAAMVVKVIAQHQNLLLANTTSAFPYALLSNDNAFLSYHPHPFAQRTLTARFQVNNTRPPHVQLLRKPVLTAMGLLALLDEEQLWAEVSQAGTVLDSNHTVGVLASAHRPQGPADAWRAAVLIYASDDTRAHPNRSVAVTLRLRGVPPGPGLVYVTRYLDNGLCSPDGEWRRLGRPVFPTAEQFRRMRAAEDPVAAAPRPLPAGGRLTLRPALRLPSLLLVHVCARPEKPPGQVTRLRALPLTQGQLVLVWSDEHVGSKCLWTYEIQFSQDGKAYTPVSRKPSTFNLFVFSPDTGAVSGSYRVRALDYWARPGPFSDPVPYLEVPVPRGPPSPGNP

SEQ ID NO: 60908 - protein, 50 aa, Homo sapiens
IDLDSVDMDETEREVEYFKRFCLDSARQTRQRLSINWSNFSLKKATFAAH

SEQ ID NO: 60909 - protein, 715 aa, Homo sapiens
RYFDRVDENNPEYLRERNMAPDLRQDFNMMEQKKRVSMILQSPAFCEELESMIQEQFKKGKNPTGLLALQQIADFMTTNVPNVYPAAPQGGMAALNMSLGMVTPVNDLRGSDSIAYDKGEKLLRCKLAAFYRLADLFGWSQLIYNHITTRVNSEQEHFLIVPFGLLYSEVTASSLVKINLQGDIVDRGSTNLGVNQAGFTLHSAIYAARPDVKCVVHIHTPAGAAVSAMKCGLLPISPEALSLGEVAYHDYHGILVDEEEKVLIQKNLGPKSKVLILRNHGLVSVGESVEEAFYYIHNLVVACEIQVRTLASAGGPDNLVLLNPEKYKAKSRSPGSPVGEGTGSPPKWQIGEQEFEALMRMLDNLGYRTGYPYRYPALREKSKKYSDVEVPASVTGYSFASDGDSGTCSPLRHSFQKQQREKTRWLNSGRGDEASEEGQNGSSPKSKTKWTKEDGHRTSTSAVPNLFVPLNTNPKEVQEMRNKIREQNLQDIKTAGPQSQVLCGVVMDRSLVQGELVTASKAIIEKEYQPHVIVSTTGPNPFTTLTDRELEEYRREVERKQKGSEENLDEAREQKEKSPPDQPAVPHPPPSTPIKLEEDLVPEPTTGDDSDAATFKPTLPDLSPDEPSEALGFPMLEKEEEAHRPPSPTEAPTEASPEPAPDPAPVAEEAAPSAVEEGAAADPGSDGSPGKSPSKKKKKFRTPSFLKKSKKKSDS

SEQ ID NO: 60910 - protein, 785 aa, Homo sapiens
VGKHYLQLAGDTDEELNSCTAVDWLVLAAKQGRREAVKLLRRCLADRRGITSENEREVRQLSSETDLERAVRKAALVMYWKLNPKKKKQVAVAELLENVGQVNEHDGGAQPGPVPKSLQKQRRMLERLVSSESKNYIALDDFVEITKKYAKGVIPSSLFLQDDEDDDELAGKSPEDLPLRLKVVKYPLHAIMEIKEYLIDMASRAGMHWLSTIIPTHHINALIFFFIVSNLTIDFFAFFIPLVIFYLSFISMVICTLKVFQDSKAWENFRTLTDLLLRFEPNLDVEQAEVNFGWNHLEPYAHFLLSVFFVIFSFPIASKDCIPCSELAVITGFFTVTSYLSLSTHAEPYTRRALATEVTAGLLSLLPSMPLNWPYLKVLGQTFITVPVGHLVVLNVSVPCLLYVYLLYLFFRMAQLRNFKGTYCYLVPYLVCFMWCELSVVILLESTGLGLLRASIGYFLFLFALPILVAGLALVGVLQFARWFTSLELTKIAVTVAVCSVPLLLRWWTKASFSVVGMVKSLTRSSMVKLILVWLTAIVLFCWFYVYRSEGMKVYNSTLTWQQYGALCGPRAWKETNMARTQILCSHLEGHRVTWTGRFKYVRVTDIDNSAESAINMLPFFIGDWMRCLYGEAYPACSPGNTSTAEEELCRLKLLAKHPCHIKKFDRYKFEITVGMPFSSGADGSRSREEDDVTKDIVLRASSEFKSVLLSLRQGSLIEFSTILEGRLGSKWPVFELKAISCLNCMAQLSPTRRHVKIEHDWRSTVHGAVKFAFDFFFFPFLSAA

SEQ ID NO: 60911 - protein, 126 aa, Homo sapiens
LLTRVDEFVGMLDMLRGDSSHVVSEGVPRIHAKAAEMRRIYSRIDRLEAFVRMVGGRVARMEEQVTKAEAELGTFPRAFKKLLHTMNVPSLFSKSAPSRPQQAGYEAPVLFRTEDYFPCCSERPQL

SEQ ID NO: 60912 - protein, 131 aa, Homo sapiens
IFGPPVKEPPTDVTPTFLTTGVLSTLRQADFEAHNILRESGYAGKISQMPVILTPLHFDRDPLQKQPSCQRSVVIRTFITSDSLTGIPATPGNEIPVEVVLKMVTEIKKIPGISRIMYDLTSKPPGTTEWE

SEQ ID NO: 60913 - protein, 87 aa, Homo sapiens
IIPARMKRAGRVDFILQPLGMGPKNFIHGLRRTGPHDPLGGASSLGEATEPDPLRARRQPSADGSKPWWWSYFTSLSTHRPRWLLKY

SEQ ID NO: 60914 - protein, 89 aa, Homo sapiens
VLFVIGLFAAGAFILYKFKRKRPGRTVYAQMHNEKEQEMTSPVSHSEDVQGAVQGEEFIDDDLDSQTLGNHSGVVLSINSREMHSYLVS

SEQ ID NO: 60915 - protein, 282 aa, Homo sapiens
RAPSPTKRKDRSDEKSKDRSKDKGATKESSEKDRGRDKTRKRHSASSGSSSTRSRSSSTSSSGSSTSTGSSSGSSSSSASSRSGSSSTSRSSSSSSSSGSPSPSRRRHDNRRRSRSKSKPPKRDEKERKRRSPSPKPTKVHIGRLTRNVTKDHIMEIFSTYGKIKMIDMPVERMHPHLSKGYACVEFENPDEAEKALKHMDGGQIDGQEITATVVLAPWPRPTPRRFSPPRRMLPPPPMWLRSPPRMRRRSRSPRRRSPVRRRSRSPGRRRHRSRSSSNSSQ

SEQ ID NO: 60916 - protein, 17 aa, Homo sapiens
MALLDVVVSGHPPVTLR

SEQ ID NO: 60917 - protein, 13 aa, Homo sapiens
IKSKIPTYCSICC

SEQ ID NO: 60918 - protein, 13 aa, Homo sapiens
RSNPSSQFKPGAP

SEQ ID NO: 60919 - skipped

SEQ ID NO: 60920 - protein, 1053 aa, Homo sapiens
IEQVTGRSFGDKDFRTGLENGILLCELLNAIKPGLVKKINRLPTPIAGLDNIILFLRGCKELGLKESQLFDPSDLQDTSNRVTVKSLDYSRKLKNVLVTIYWLGKAANSCTSYSGTTLNLKEFEGLLAQMRKDTDDIESPKRSIRDSGYIDCWDSERSDSLSPPRHGRDDSFDSLDSFGSRSRQTPSPDVVLRGSSDGRGSDSESDLPHRKLPDVKKDDMSARRTSHGEPKSAVPFNQYLPNKSNQTAYVPAPLRKKKAEREEYRKSWSTATSPLGGERPFRYGPRTPVSDDAESTSMFDMRCEEEAAVQPHSRARQEQLQLINNQLREEDDKWQDDLARWKSRRRSVSQDLIKKEEERKKMEKLLAGEDGTSERRKSIKTYREIVQEKERRERELHEAYKNARSQEEAEGILQQYIERFTISEAVLERLEMPKILERSHSTEPNLSSFLNDPNPMKYLRQQSLPPPKFTATVETTIARASVLDTSMSAGSGSPSKTVTPKAVPMLTPKPYSQPKNSQDVLKTFKVDGKVSVNGETVHREEEKERECPTVAPAHSLTKSQMFEGVARVHGSPLELKQDNGSIEINIKKPNSVPQELAATTEKTEPNSQEDKNDGGKSRKGNIELASSEPQHFTTTVTRCSPTVAFVEFPSSPQLKNDVSEEKDQKKPENEMSGKVELVLSQKVVKPKSPEPEATLTFPFLDKMPEANQLHLPNLNSQVDSPSSEKSPVMTPQFKFWAWDPEEERRRQEKWQQEQERLLQERYQKEQDKLKEEWEKAQKEVEEEERRYYEEERKIIEDTVVPFTVSSSSADQLSTSSSMTEGSGTMNKIDLGNCQDEKQDRRWKKSFQGDDSDLLLKTRESDRLEEKGSLTEGALAHSGNPVSKGVHEDHQLDTEAGAPHCGTNPQLAQDPSQNQQTSNPTHSSEDVKPKTLPLDKSINHQIESPSERRKKSPREHFQAGPFSPCSPTPPGQSPNRSISGKKLCSSCGLPLGKGAAMIIETLNLYFHIQCFRCGICKGQLGDAVSGTDVRIRNGLLNCNDCYMRSRSAGQPTTL

SEQ ID NO: 60921 - protein, 179 aa, Homo sapiens
RLHQRLPHFQLSRAFLAQALLEDSCHYLLYSLIFVNSYPVTMSIFPVLLFSLLHAATYTKKVLDARGSNSLPLLRSVLDKLSANQQNILKFIACNEIFLMPATVFMLFSGQGSLLQPFIYYRFLTLRYSSRRNPYCRTLFNELRIVVEHIIMKPACPLFVRRLCLQSIAFISRLAPTVP

SEQ ID NO: 60922 - protein, 465 aa, Homo sapiens
KQEPLQVRVKAVLKKREYGSKYTQNNFITGVRAINEFCLKSSDLEQLRKIRRRSPHEDTESFTVYLRSDVEAKSLEVWGSPEALAREKKLRKEAEIEYRERLFRNQKILREYRDFLGNTKPRSRTASVFFKGPGKVVMVAICINGLNCFFKFLAWIYTGSASMFSEAIHSLSDTCNQGLLALGISKSVQTPDPSHPYGFSNMRYISSLISGVGIFMMGAGLSWYHGVMGLLHPQPIESLLWAYCILAGSLVSEGATLLVAVNELRRNARAKGMSFYKYVMESRDPSTNVILLEDTAAVLGVIIAATCMGLTSITGNPLYDSLGSLGVGTLLGMVSAFLIYTNTEALLGRSIQPEQVQRLTELLENDPSVRAIHDVKATDLGLGKVRFKAEVDFDGRVVTRSYLEKQDFDQMLQEIQEVKTPEELETFMLKHGENIIDTLGAEVDRLEKELKKRNPEVRHVDLEIL

SEQ ID NO: 60923 - protein, 559 aa, Homo sapiens
KLEKQNEQLRSRSGAVQGAGSLGPGSPVRAGASIPSSGAASPRGFPLGLSAKSGGGPGSGPRRTSSEELRDATSLLAAGEGGLLDEVEPLRPDELERLSGWEEEEESWLYSSPKKKLTPMQKSVSPLVWCRQVLDYPSPDVECAKKSLIHKLDQTMSALKRQNLYNNPFNSMSYTSPYSPNASSPYSSGFNSPSSTPVRPPIVKQLILPGNSGNLKSSDRNPPLSPQSSIDSELSASELDEDSIGSNYKLNDVTDVQILARMQEESLRQEYAATTSRRSSGSSCNSTRRGTFSDQELDAQSLDDEDDNMHHAVYPAVNRFSPSPRNSPRPSPKQSPRNSPRSRSPARGIEYSRVSPQPMISRLQQPRLSLQGHPTDLQTSNVKNEEKLRRSLPNLSRTSNTQVDSVKSSRSDSNFQVPNGGIPRMQPQASAIPSPGKFRSPAAPSPLALRQPVKAFSNHGSGSPGSQEITQLTQTTSSPGPPMVQSTVSANPPSNINSATLTRPAGTTAMRSGLPRPSAPSAGGIPVPRSKLAQPVRRSLPAPKTYGSMKDDSWKDGCY

SEQ ID NO: 60924 - protein, 24 aa, Homo sapiens
LGGGGGELAVFITKEKTYTNAEIG

SEQ ID NO: 60925 - protein, 426 aa, Homo sapiens
KRQNLYNNPFNSMSYTSPYSPNASSPYSSGFNSPSSTPVRPPIVKQLILPGNSGNLKSSDRNPPLSPQSSIDSELSASELDEDSIGSNYKLNDVTDVQILARMQEESLRQEYAATTSRRSSGSSCNSTRRGTFSDQELDAQSLDDEDDNMHHAVYPAVNRFSPSPRNSPRPSPKQSPRNSPRSRSPARGIEYSRVSPQPMISRLQQPRLSLQGHPTDLQTSNVKNEEKLRRSLPNLSRTSNTQVDSVKSSRSDSNFQVPNGGIPRMQPQASATSQRLKNLPRTSLKAKQLLQTSSTKRVPSPGKFRSPAAPSPLALRQPVKAFSNHGSGSPGSQEITQLTQTTSSPGPPMVQSTVSANPPSNINSATLTRPAGTTAMRSGLPRPSAPSAGGIPVPRSKLAQPVRRSLPAPKTYGSMKDDSWKDGCY

SEQ ID NO: 60926 - protein, 7 aa, Homo sapiens
VGLLLSL

SEQ ID NO: 60927 - protein, 292 aa, Homo sapiens
LLTLLLQLLPPGLLPGCAIFQDLIRYGKTKCGEPSRPAACRAFDVPKRYFSHFYIISVLWNGFLLWCLTQSLFLGAPFPSWLHGLLRILGAAQFQGGELALSAFLVLVFLWLHSLRRLFECLYVSVFSNVMIHVVQYCFGLVYYVLVGLTVLSQVPMDGRNAYITGKNLLMQARWFHILGMMMFIWSSAHQYKCHVILGNLRKNKAGVVIHCNHRIPFGDWFEYVSSPNYLAELMIYVSMAVTFGFHNLTWWLVVTNVFFNQALSAFLSHQFYKSKFVSYPKHRKAFLPFLF

SEQ ID NO: 60928 - protein, 67 aa, Homo sapiens
ISNVKIPKHLTDAYFKKKQLRKPRHQEGEIFDTEKGKYEITEQRKIDQKAVDSQILSKIKAIPQLQG

SEQ ID NO: 60929 - protein, 11 aa, Homo sapiens
TNGIYPHKLVF

SEQ ID NO: 60930 - protein, 46 aa, Homo sapiens
VIESGPHCANTEIIVKLSDGRELCLDPKENWVQRVVEKFLKRAENS

SEQ ID NO: 60931 - protein, 56 aa, Homo sapiens
IHPKNIQSVNVKSPGPHCAQTEVIATLKNGRKACLNPASPIVKKIIEKMLNSDKSN

SEQ ID NO: 60932 - protein, 227 aa, Homo sapiens
KSTFVNILKQLCEDWEVVPEPVARWCNVQSTQDEFEELTMSQKNGGNVLQMMYEKPERWSFTFQTYACLSRIRAQLASLNGKLKDAEKPVLFFERSVYSDRYIFASNLYESECMNETEWTIYQDWHDWMNNQFGQSLELDGIIYLQATPETCLHRIYLRGRNEEQGIPLEYLEKLHYKHESWLLHRTLKTNFDYLQEVPILTLDVNEDFKDKYESLVEKVKEFLSTL

SEQ ID NO: 60933 - protein, 1102 aa, Homo sapiens
RPNTVMATQVMGQSSGGGGLFTSSGNIGMALPNDMYDLHDLSKAELAAPQLIMLANVALTGEVNGSCCDYLVGEERQMAELMPVGDNNFSDSEEGEGLEESADIKGEPHGLENMELRSLELSVVEPQPVFEASGAPDIYSSNKDLPPETPGAEDKGKSSKTKPFRCKPCQYEAESEEQFVHHIRVHSAKKFFVEESAEKQAKARESGSSTAEEGDFSKGPIRCDRCGYNTNRYDHYTAHLKHHTRAGDNERVYKCIICTYTTVSEYHWRKHLRNHFPRKVYTCGKCNYFSDRKNNYVQHVRTHTGERPYKCELCPYSSSQKTHLTRHMRTHSGEKPFKCDQCSYVASNQHEVTRHARQVHNGPKPLNCPHCDYKTADRSNFKKHVELHVNPRQFNCPVCDYAASKKCNLQYHFKSKHPTCPNKTMDVSKVKLKKTKKREADLPDNITNEKTEIEQTKIKGDVAGKKNEKSVKAEKRDVSKEKKPSNNVSVIQVTTRTRKSVTEVKEMDVHTGSNSEKFSKTKKSKRKLEVDSHSLHGPVNDEESSTKKKKKVESKSKNNSQEVPKGDSKVEENKKQNTCMKKSTKKKTLKNKSSKKSSKPPQKEPVEKGSAQMDPPQMGPAPTEAVQKGPVQVEPPPPMEHAQMEGAQIRPAPDEPVQMEVVQEGPAQKELLPPVEPAQMVGAQIVLAHMELPPPMETAQTEVAQMGPAPMEPAQMEVAQVESAPMQVVQKEPVQMELSPPMEVVQKEPVQIELSPPMEVVQKEPVKIELSPPIEVVQKEPVQMELSPPMGVVQKEPAQREPPPPREPPLHMEPISKKPPLRKDKKEKSNMQSERARKEQVLIEVGLVPVKDSWLLKESVSTEDLSPPSPPLPKENLREEASGDQKLLNTGEGNKEAPLQKVGAEEADESLPGLAANINESTHISSSGQNLNTPEGETLNGKHQTDSIVCEMKMDTDQNTRENLTGINSTVEEPVSPMLPPSAVEEREAVSKTALASPPATMAANESQEIDEDEGIHSHEGSDLSDNMSEGSDDSGLHGARPVPQESSRKNAKEALAVKAAKGDFVCIFCDRSFRKGKDYSKHLNRHLVNVYYLEEAAQGQE

SEQ ID NO: 60934 - protein, 545 aa, Homo sapiens
RPEEENASANPPSGIEDETAENGVPKPKVTETEDDSDSDSDDDEDDVHVTIGDIKTGAPQYGSYGTAPVNLNIKTGGRVYGTTGTKVKGVDLDAPGSINGVPLLEVDLDSFEDKPWRKPGADLSDYFNYGFNEDTWKAYCEKQKRIRMGLEVIPVTSTTNKITAEDCTMEVTPGAEIQDGRFNLFKVQQGRTGNSEKETALPSTKAEFTSPPSLFKTGLPPSRNSTSSQSQTSTASRKANSSVGKWQDRYGRAESPDLRRLPGAIDVIGQTITISRVEGRRRANENSNIQVLSERSATEVDNNFSKPPPFFPPGAPPTHLPPPPFLPPPPTVSTAPPLIPPPGFPPPPGAPPPSLIPTIESGHSSGYDSRSARAFPYGNVAFPHLPGSAPSWPSLVDTSKQWDYYARREKDRDRERDRDRERDRDRDRERERTRERERERDHSPTPSVFNSDEERYRYREYAERGYERHRASREKEERHRERRHREKEETRHKSSRSNSRRRHESEEGDSHRRHKHKKSKRSKEGKEAGSEPAPEQESTEATPAE

SEQ ID NO: 60935 - protein, 343 aa, Homo sapiens
KDLGAEHLAGHEGVQLLGLLNVYLEQEERFQPREKGLSLIEATPENDNTLCPGLRNAKVEDLRSLANFFGSCTETFVLAVNILDRFLALMKVKPKHLSCIGVCSFLLAARIVEEDCNIPSTHDVIRISQCKCTASDIKRMEKIISEKLHYELEATTALNFLHLYHTIILCHTSERKEILSLDKLEAQLKACNCRLIFSKAKPSVLALCLLNLEVETLKSVELLEILLLVKKHSKINDTEFFYWRELVSKCLAEYSSPECCKPDLKKLVWIVSRRTAQNLHNSYYSVPELPTIPEGGCFDESESEDSCEDMSCGEESLSSSPPSDQECTFFFNFKVAQTLCFPS

SEQ ID NO: 60936 - protein, 334 aa, Homo sapiens
LALASVTIRSSRCRGIQAFRNSFSSSWFHLNTNVMSGSNGSKENSHNKARTSPYPGSKVERSQVPNEKVGWLVEWQDYKPVEYTAVSVLAGPRWADPQISESNFSPKFNEKDGHVERKSKNGLYEIENGRPRNPAGRTGLVGRGLLGRWGPNHAADPIITRWKRDSSGNKIMHPVSGKHILQFVAIKRKDCGEWAIPGGMVDPGEKISATLKREFGEEALNSLQKTSAEKREIEEKLHKLFSQDHLVIYKGYVDDPRNTDNAWMETEAVNYHDETGEIMDNLMLEAGDDAGKVKWVDINDKLKLYASHSQFIKLVAEKRDAHWSEDSEADCHAL

SEQ ID NO: 60937 - protein, 47 aa, Homo sapiens
VESIDGPPGAFTCYLDAGLARTTTGNKVFGTLKGAVDGGLSIPHSTK

SEQ ID NO: 60938 - protein, 81 aa, Homo sapiens
VQFIAVTGDHECLGRWNTYIPLHYNKDGFWSHSIFLPADTVVEWKFVLVENGGVTRWEECSNRFLETGHEDKVVHAWWGIH

SEQ ID NO: 60939 - protein, 750 aa, Homo sapiens
LIMEENNDSTENPQQGQGRQNAIKCGWLRKQGGFVKTWHTRWFVLKGDQLYYFKDEDETKPLGTIFLPGNKVSEHPCNEENPGKFLFEVVPGGDRDRMTANHESYLLMASTQNDMEDWVKSIRRVIWGPFGGGIFGQKLEDTVRYEKRYGNRLAPMLVEQCVDFIRQRGLKEEGLFRLPGQANLVKELQDAFDCGEKPSFDSNTDVHTVASLLKLYLRELPEPVIPYAKYEDFLSCAKLLSKEEEAGVKELAKQVKSLPVVNYNLLKYICRFLDEVQSYSGVNKMSVQNLATVFGPNILRPKVEDPLTIMEGTVVVQQLMSVMISKHDCLFPKDAELQSKPQDGVSNNNEIQKKATMGQLQNKENNNTKDSPSRQCSWDKSESPQRSSMNNGSPTALSGSKTNSPKNSVHKLDVSRSPPLMVKKNPAFNKGSGIVTNGSFSSSNAEGLEKTQTTPNGSLQARRSSSLKVSGTKMGTHSVQNGTVRMGILNSDTLGNPTNVRNMSWLPNGYVTLRDNKQKEQAGELGQHNRLSTYDNVHQQFSMMNLDDKQSIDSATWSTSSCEISLPENSNSCRSSTTTCPEQDFFGGNFEDPVLDGPPQDDLSHPRDYESKSDHRSVGGRSSRATSSSDNSETFVGNSSSNHSALHSLVSSLKQEMTKQKIEYESRIKSLEQRNLTLETEMMSLHDELDQERKKFTMIEIKMRNAERAKEDAEKRNDMLQKEMEQFFSTFGELTVEPRRTERGNTIWIQ

SEQ ID NO: 60940 - protein, 2142 aa, Homo sapiens
IALDIFGPQKMDPIYHTRELPTSSAISSALDRIRERQKKLQVLREAMNVEEPVRRYKTYHGDVFSTSSESPSIISSESDFRQVRRSEASKRFESSSGLPGVDETLSQGQSQRPSRQYETPFEGNLINQEIMLKRQEEELMQLQAKMALRQSRLSLYPGDTIKASMLDITRDPLREIALETAMTQRKLRNFFGPEFVKMTIEPFISLDLPRSILTKKGKNEDNRRKVNIMLLNGQRLELTCDTKTICKDVFDMVVAHIGLVEHHLFALATLKDNEYFFVDPDLKLTKVAPEGWKEEPKKKTKATVNFTLFFRIKFFMDDVSLIQHTLTCHQYYLQLRKDILEERMHCDDETSLLLASLALQAEYGDYQPEVHGVSYFRMEHYLPARVMEKLDLSYIKEELPKLHNTYVGASEKETELEFLKVCQRLTEYGVHFHRVHPEKKSQTGILLGVCSKGVLVFEVHNGVRTLVLRFPWRETKKISFSKKKITLQNTSDGIKHGFQTDNSKICQYLLHLCSYQHKFQLQMRARQSNQDAQDIERASFRSLNLQAESVRGFNMGRAISTGSLASSTLNKLAVRPLSVQAEILKRLSCSELSLYQPLQNSSKEKNDKASWEEKPREMSKSYHDLSQASLYPHRKNVIVNMEPPPQTVAELVGKPSHQMSRSDAESLAGVTKLNNSKSVASLNRSPERRKHESDSSSIEDPGQAYVLGMTMHSSGNSSSQVPLKENDVLHKRWSIVSSPEREITLVNLKKDAKYGLGFQIIGGEKMGRLDLGIFISSVAPGGPADLDGCLKPGDRLISVNSVSLEGVSHHAAIEILQNAPEDVTLVISQPKEKISKVPSTPVHLTNEMKNYMKKSSYMQDSAIDSSSKDHHWSRGTLRHISENSFGPSGGLREGSLSSQDSRTESASLSQSQVNGFFASHLGDQTWQESQHGSPSPSVISKATEKETFTDSNQSKTKKPGISDVTDYSDRGDSDMDEATYSSSQDHQTPKQESSSSVNTSNKMNFKTFSSSPPKPGDIFEVELAKNDNSLGISVTVLFDKGGVNTSVRHGGIYVKAVIPQGAAESDGRIHKGDRVLAVNGVSLEGATHKQAVETLRNTGQVVHLLLEKGQSPTSKEHVPVTPQCTLSDQNAQGQGPEKVKKTTQVKDYSFVTEENTFEVKLFKNSSGLGFSFSREDNLIPEQINASIVRVKKLFPGQPAAESGKIDVGDVILKVNGASLKGLSQQEVISALRGTAPEVFLLLCRPPPGVLPEIDTALLTPLQSPAQVLPNSSKDSSQPSCVEQSTSSDENEMSDKSKKQCKSPSRRDSYSDSSGSGEDDLVTAPANISNSTWSSALHQTLSNMVSQAQSHHEAPKSQEDTICTMFYYPQKIPNKPEFEDSNPSPLPPDMAPGQSYQPQSESASSSSMDKYHIHHISEPTRQENWTPLKNDLENHLEDFELEVELLITLIKSEKGSLGFTVTKGNQRIGCYVHDVIQDPAKSDGRLKPGDRLIKVNDTDVTNMTHTDAVNLLRAASKTVRLVIGRVLELPRIPMLPHLLPDITLTCNKEELGFSLCGGHDSLYQVVYISDINPRSVAAIEGNLQLLDVIHYVNGVSTQGMTLEEVNRALDMSLPSLVLKATRNDLPVVPSSKRSAVSAPKSTKGNGSYSVGSCSQPALTPNDSFSTVAGEEINEISYPKGKCSTYQIKGSPNLTLPKESYIQEDDIYDDSQEAEVIQSLLDVVDEEAQNLLNENNAAGYSCGPGTLKMNGKLSEERTEDTDCDGSPLPEYFTEATKMNGCEEYCEEKVKSESLIQKPQEKKTDDDEITWGNDELPIERTNHEDSDKDHSFLTNDELAVLPVVKVLPSGKYTGANLKSVIRVLRGLLDQGIPSKELENLQELKPLDQCLIGQTKENRRKNRYKNILPYDATRVPLGDEGGYINASFIKIPVGKEEFVYIACQGPLPTTVGDFWQMIWEQKSTVIAMMTQEVEGEKIKCQRYWPNILGKTTMVSNRLRLALVRMQQLKGFVVRAMTLEDIQTREVRHISHLNFTAWPDHDTPSQPDDLLTFISYMRHIHRSGPIITHCSAGIGRSGTLICIDVVLGLISQDLDFDISDLVRCMRLQRHGMVQTEDQYIFCYQVILYVLTRLQAEEEQKQQPQLLK

SEQ ID NO: 60941 - protein, 269 aa, Homo sapiens
LKKSINNLEKNTEMCNVMMQLRKMANHPLLHRQYYTAEKLKEMSQLMLKEPTHCEANPDLIFEDMEVMTDFELHVLCKQYRHINNFQLDMDLILDSGKFRVLGCILSELKQKGDRVVLFSQFTMMLDILEVLLKHHQHRYLRLDGKTQISERIHLIDEFNTDMDIFVFLLSTKAGGLGINLTSANVVILHDIDCNPYNDKQAEDRCHRVGQTKEVLVIKLISQGTIEESMLKINQQKLKLEQDMTTVDEGDEGSMPADIATLLKTSMGL

SEQ ID NO: 60942 - protein, 36 aa, Homo sapiens
LASFLESGEGTAYSCMEETVIGWLPSTFCIRKQSPL

SEQ ID NO: 60943 - protein, 77 aa, Homo sapiens
LDDQGQLIKKETFIPFGIGKRVCMGEQLAKMELFLMFVSLMQSFAFALPEDSKKPLLTGRFGLTLAPHPFNITISRR

SEQ ID NO: 60944 - protein, 294 aa, Homo sapiens
VKYYQSHHYSTVVPPDEITVIYRHGLPLVTLTLPSRKERCQFVVKPMLSTVGSFLQDLQNEDKGIKTAAIFTADGNMISASTLMDILLMNDFKLVINKIAYDVQCPKREKPSNEHTAEMEHMKSLVHRLFTILHLEESQKKREHHLLEKIDHLKEQLQPLEQVKAGIEAHSEAKTSGLLWAGLALLSIQGGALAWLTWWVYSWDIMEPVTYFITFANSMVFFAYFIVTRQDYTYSAVKSRQFLQFFHKKSKQQHFDVQQYNKLKEDLAKAKESLKQARHSLCLQMQVEELNEKN

SEQ ID NO: 60945 - protein, 19 aa, Homo sapiens
MTVGMGYSMYREFWAKPKP

SEQ ID NO: 60946 - protein, 86 aa, Homo sapiens
KESEQDVEDSQNHTGEPVGDDYKKMGTLFGELNKNLINMGFTRMYFGERIVEPVIVIFFWVMLWFLGLQALGLVAVLCLVIIYVQQ

SEQ ID NO: 60947 - protein, 169 aa, Homo sapiens
VQQYHPSNNGEYQSSGPEDDFESCLRNMKSQYEVFRSSRLSSDATVLTPNTESSCDLMTKTKSTSGNDDSTSLDLEWEDEEGMNRMLPMRERSKTEEDILRAALKYSNKKTGSNPTSASDDSNGLEWENDFVSAEMDDNGNSEYSGFVNPVLELSDSGIRHSDTDQQTR

SEQ ID NO: 60948 - protein, 15 aa, Homo sapiens
IRQWTYRSWGNGCSE

SEQ ID NO: 60949 - protein, 848 aa, Homo sapiens
LFPGEIMKRGRLPSSSEDSDDNGSLSTTWSQNSRSQHRRSSCSRHEDRKPSEVFRTDLITAMKLHDSYQLNPDEYYVLADPWRQEWEKGVQVPVSPGTIPQPVARVVSEEKSLMFIRPKKYIVSSGSEPPELGYVDIRTLADSVCRYDLNDMDAAWLELTNEEFKEMGMPELDEYTMERVLEEFEQRCYDNMNHAIETEEGLGIEYDEDVVCDVCQSPDGEDGNEMVFCDKCNICVHQACYGILKVPEGSWLCRTCALGVQPKCLLCPKKGGAMKPTRSGTKWVHVSCALWIPEVSIGSPEKMEPITKVSHIPSSRWALVCSLCNEKFGASIQCSVKNCRTAFHVTCAFDRGLEMKTILAENDEVKFKSYCPKHSSHRKPEESLGKGAAQENGAPECSPRNPLEPFASLEQNREEAHRVSVRKQKLQQLEDEFYTFVNLLDVARALRLPEEVVDFLYQYWKLKRKVNFNKPLITPKKDEEDNLAKREQDVLFRRLQLFTHLRQDLERVRNLTYMVTRREKIKRSVCKVQEQIFNLYTKLLEQERVSGVPSSCSSSSLENMLLFNSPSVGPDAPKIEDLKWHSAFFRKQMGTSLVHSLKKPHKRDPLQNSPGSEGKTLLKQPDLCGRREGMVVPESFLGLEKTFAEARLISAQQKNGVVMPDHGKRRDNRFHCDLIKGDLKDKSFKQSHKPLRSTDVSQRHLDNTRAATSPGVGQSAPGTRKEIVPKCNGSLIKVNYNQTAVKVPTTPASPVKNWGGFRIPKKGERQQQGEAHDGACHQHSDYPYLGLGRVPAKERAKSKLKSDNENDGYVPDVEMSDSESEASEKKCIHTSSTISRRTDIIRRSILAS

SEQ ID NO: 60950 - protein, 129 aa, Homo sapiens
KDPKRLYCKNGGFFLRIHPDGRVDGVREKSDPHIKLQLQAEERGVVSIKGVCANRYLAMKEDGRLLASKCVTDECFFFERLESNNYNTYRSRKYTSWYVALKRTGQYKLGSKTGPGQKAILFLPMSAKS

SEQ ID NO: 60951 - protein, 39 aa, Homo sapiens
INIFYASRQMAYALKGMIRSSVFLAIKKNRFHINLIQLP

SEQ ID NO: 60952 - protein, 20 aa, Homo sapiens
IGHSRQPTCIQSGCLQLCGF

SEQ ID NO: 60953 - protein, 867 aa, Homo sapiens
TMPAVSLPPKENALFKRILRCYEHKQYRNGLKFCKQILSNPKFAEHGETLAMKGLTLNCLGKKEEAYELVRRGLRNDLKSHVCWHVYGLLQRSDKKYDEAIKCYRNALKWDKDNLQILRDLSLLQIQMRDLEGYRETRYQLLQLRPAQRASWIGYAIAYHLLEDYEMAAKILEEFRKTQQTSPDKVDYEYSELLLYQNQVLREAGLYREALEHLCTYEKQICDKLAVEETKGELLLQLCRLEDAADVYRGLQERNPENWAYYKGLEKALKPANMLERLKIYEEAWTKYPRGLVPRRLPLNFLSGEKFKECLDKFLRMNFSKGCPPVFNTLRSLYKDKEKVAIIEELVVGYETSLKSCRLFNPNDDGKEEPPTTLLWVQYYLAQHYDKIGQPSIALEYINTAIESTPTLIELFLVKAKIYKHAGNIKEAARWMDEAQALDTADRFINSKCAKYMLKANLIKEAEEMCSKFTREGTSAVENLNEMQCMWFQTECAQAYKAMNKFGEALKKCHEIERHFIEITDDQFDFHTYCMRKITLRSYVDLLKLEDVLRQHPFYFKAARIAIEIYLKLHDNPLTDENKEHEADTANMSDKELKKLRNKQRRAQKKAQIEEEKKNAEKEKQQRNQKKKKDDDDEEIGGPKEELIPEKLAKVETPLEEAIKFLTPLKNLVKNKIETHLFAFEIYFRKEKFLLMLQSVKRAFAIDSSHPWLHECMIRLFNTAVCESKDLSDTVRTVLKQEMNRLFGATNPKNFNETFLKRNSDSLPHRLSAAKMVYYLDPSSQKRAIELATTLDESLTNRNLQTCMEVLEALYDGSLGDCKEAAEIYRANCHKLFPYALAFMPPGYEEDMKITVNGDSSAEAEELANEI

SEQ ID NO: 60954 - protein, 35 aa, Homo sapiens
KDEFQQGLPTSLQYFKIIIQRQRKGGNHRRVSSRL

SEQ ID NO: 60955 - protein, 204 aa, Homo sapiens
LPPARSRIFKIIVIGDSNVGKTCLTYRFCAGRFPDRTEATIGVDFRERAVEIDGERIKIQLWDTAGQERFRKSMVQHYYRNVHAVVFVYDMTNMASFHSLPSWIEECKQHLLANDIPRILVGNKCDLRSAIQVPTDLAQKFADTHSMPLFETSAKNPNDNDHVEAIFMTLAHKLKSHKPLMLSQPPDNGIILKPEPKPAMTCWC

SEQ ID NO: 60956 - protein, 67 aa, Homo sapiens
LMTYVGAFFNGITLLILAELLIFSVPIVYEKYKTQIDHYVGIARHQTKSIVEKIQAKLPGIAKKKAE

SEQ ID NO: 60957 - protein, 170 aa, Homo sapiens
VDGFTDPSNNKNRFCLGLLSNVNRNSTIENTRRHIGKGVHLYYVGGEVYAECLSDSSIFVQSRNCNYHHGFHPTTVCKIPSGCSLKIFNNQEFAQLLAQSVNHGFETVYELTKMCTIRMSFVKGWGAEYHRQDVTSTPCWIEIHLHGPLQWLDKVLTQMGSPHNPISSVS

SEQ ID NO: 60958 - protein, 68 aa, Homo sapiens
KQIIGRPVVVKLNSGVDYRGVLACLDGYMNIALEQTEEYVNGQLKNKYGDAFIRGNNVLYISTQKRRM

SEQ ID NO: 60959 - protein, 455 aa, Homo sapiens
IFSRSFPLLTGSDLCENMPCTCTWRNWRQWIRPLVAVIYLVSIVVAVPLCVWELQKLEVGIHTKAWFIAGIFLLLTIPISLWVILQHLVHYTQPELQKPIIRILWMVPIYSLDSWIALKYPGIAIYVDTCRECYEAYVIYNFMGFLTNYLTNRYPNLVLILEAKDQQKHFPPLCCCPPWAMGEVLLFRCKLGVLQYTVVRPFTTIVALICELLGIYDEGNFSFSNAWTYLVIINNMSQLFAMYCLLLFYKVLKEELSPIQPVGKFLCVKLVVFVSFWQAVVIALLVKVGVISEKHTWEWQTVEAVATGLQDFIICIEMFLAAIAHHYTFSYKPYVQEAEEGSCFDSFLAMWDVSDIRDDISEQVRHVGRTVRGHPRKKLFPEDQDQNEHTSLLSSSSQDAISIASSMPPSPMGHYQGFGHTVTPQTTPTTAKISDEILSDTIGEKKEPSDKSVDS

SEQ ID NO: 60960 - protein, 79 aa, Homo sapiens
KRPVAVYNLCLELEDGDNPYPSKEDTPTSSLDSLSSPSPVTTAVPGPPGPDKNHLLADGGSFGDWASTMPDPIVYGPVA

SEQ ID NO: 60961 - protein, 6 aa, Homo sapiens
LVSVNL

SEQ ID NO: 60962 - protein, 273 aa, Homo sapiens
LIFRVGTKGRNKGEFTNLQGVAASTNGKILIADSNNQCVQIFSNDGQFKSRFGIRGRSPGQLQRPTGVAVHPSGDIIIADYDNKWVSIFSSDGKFKTKIGSGKLMGPKGVSVDRNGHIIVVDNKACCVFIFQPNGKIVTRFGSRGNGDRQFAGPHFAAVNSNNEIIITDFHNHSVKVFNQEGEFMLKFGSNGEGNGQFNAPTGVAVDSNGNIIVADWGNSRIQVFDGSGSFLSYINTSADPLYGPQGLALTSDGHVVVADSGNHCFKVYRYLQ

SEQ ID NO: 60963 - protein, 42 aa, Homo sapiens
RVKLLICSRSKARVVESSPDISFIVKHSSVFPSIKENNYKFI

SEQ ID NO: 60964 - protein, 179 aa, Homo sapiens
LKNSWVWKELYSVRNIRPSCHGVLGVYGGMIYTGIFYWILRGMEPWTLKHKGSDFERLKPAKDCTPIEYPKPDGQISFDLLSSVALSGTNHEHDQPAHLTLRDDSIPVNRNLSIYDGPEQRFCPAGVYEFVPVEQGDGFRLQINAQNCVHCKTCDIKDPSQNINWVVPEGGGGPAYNGM

SEQ ID NO: 60965 - protein, 114 aa, Homo sapiens
RHLYICDYHKNLIQSVRNRRKRKGSDDDGGDSPVQDIDTPEVDLYQLQVNTLRRYKRHFKLPTRPGLNKAQLVEIVGCHFRSIPVNEKDTLTYFIYSVKNDKNKSDLKVDSGVH

SEQ ID NO: 60966 - protein, 183 aa, Homo sapiens
TIAMNTVLSRANSLFAFSLSVMAALTFGCFITTAFKDRSVPVRLHVSRIMLKNVEDFTGPRERSDLGFITFDITADLENIFDWNVKQLFLYLSAEYSTKNNALNQVVLWDKIVLRGDNPKLLLKDMKTKYFFFDDGNGLKGNRNVTLTLSWNVVPNAGILPLVTGSGHVSVPFPDTYEITKSY

SEQ ID NO: 60967 - protein, 46 aa, Homo sapiens
KRPDNCNRKCQEKTRRYRWQFSGVFCTAHPISSSRKSSAIEASKHS

SEQ ID NO: 60968 - protein, 112 aa, Homo sapiens
IFSEQMLVYYINIFRDAFWPNGKLAPPTTIRSKEQSQETKQRAQQKLLENIPDMLQSLVGQQNARHGIIKIFNALQETRANKHLLYALMELLLIELCPELRVHLDQLKAGQV

SEQ ID NO: 60969 - skipped

SEQ ID NO: 60970 - protein, 408 aa, Homo sapiens
IDKSSMYKFLEPWLGLGLLTSTGNKWRSRRKMLTPTFHFTILEDFLDIMNEQANILVKKLEKHINQEAFNCFFYITLCALDIICETAMGKNIGAQSNDDSEYVRAVYRMSEMIFRRIKMPWLWLDLWYLMFKEGWEHKKSLQILHTFTNSVIAERANEMNANEDCRGDGRGSAPSKNKRRAFLDLLLSVTDDEGNRLSHEDIREEVDTFMFEGHDTTAAAINWSLYLLGSNPEVQKKVDHELDDVFGKSDRPATVEDLKKLRYLECVIKETLRLFPSVPLFARSVSEDCEVAGYRVLKGTEAVIIPYALHRDPRYFPNPEEFQPERFFPENAQGRHPYAYVPFSAGPRNCIGQKFAVMEEKTILSCILRHFWIESNQKREELGLEGQLILRPSNGIWIKLKRRNADER

SEQ ID NO: 60971 - protein, 263 aa, Homo sapiens
KFPGAMAEYSYVKSTKLVLKGTKTKSKKKKSKDKKRKREEDEETQLDIVGIWWTVTNFGEISGTIAIEMDKGTYIHALDNGLFTLGAPHKEVDEGPSPPEQFTAVKLSDSRIALKSGYGKYLGINSDGLVVGRSDAIGPREQWEPVFQNGKMALLASNSCFIRCNEAGDIEAKSKTAGEEEMIKIRSCAERETKKKDDIPEEDKGNVKQCEINYVKKFQSFQDHKLKISKEDSKILKKARKDGFLHETLLDRRAKLKADRYCK

SEQ ID NO: 60972 - protein, 18 aa, Homo sapiens
MCGCWMRRRRRRRGSAGC

SEQ ID NO: 60973 - protein, 1136 aa, Homo sapiens
IVNMSPTQWDFPVELCCRPMAFVTLTGLDVVYNAVHRAVWDAFCANRRADRVPISFKVLPGDHEYPKCRPKRTSYEWYIPKGILKTGWMNKHLNLVPALVVVFYELDWDEPQWKEKQSECATRVEIVRQSLQGRNTKVAVVLIQKKTPLPPGEDVIASERAAALCNACELSGKSLFVLPHTDHLVGYIIRLENAFYEHAQTYYYTEIRRVKSHKEFLNKTTHQLLFVRHQFKIAFFSELKQDTQNALKNYRTAYNLVHELRAHETNILEIKTMAGFINYKICRLCFQHNTPLDAIAQFRKHIDLCKKKIGSAELSFEHDAWMSKQFQAFGDLFDEAIKLGLTAIQTQNPGFYYQQAAYYAQERKQLAKTLCNHEASVMYPNPDPLETQTGVLDFYGQRSWRQGILSFDLSDPEKEKVGILAIQLKERNVVHSEIIITLLSNAVAQFKKYKCPRMKSHLMVQMGEEYYYAKDYTKALKLLDYVMCDYRSEGWWTLLTSVLTTALKCSYLMAQLKDYITYSLELLGRASTLKDDQKSRIEKNLINVLMNESPDPEPDCDILAVKTAQKLWADRISLAGSNIFTIGVQDFVPFVQCKAKFHAPSFHVDVPVQFDIYLKADCPHPIRFSKLCVSFNNQEYNQFCVIEEASKANEVLENLTQGKMCLVPGKTRKLLFKFVAKTEDVGKKIEITSVDLALGNETGRCVVLNWQGGGGDAASSQEALQAARSFKRRPKLPDNEVHWDSIIIQASTMIISRVPNISVHLLHEPPALTNEMYCLVVTVQSHEKTQIRDVKLTAGLKPGQDANLTQKTHVTLHGTELCDESYPALLTDIPVGDLHPGEQLEKMLYVRCGTVGSRMFLVYVSYLINTTVEEKEIVCKCHKDETVTIETVFPFDVAVKFVSTKFEHLERVYADIPFLLMTDLLSASPWALTIVSSELQLAPSMTTVDQLESQVDNVILQTGESASECFCLQCPSLGNIEGGVATGHYIISWKRTSAMENIPIITTVITLPHVIVENIPLHVNADLPSFGRVRESLPVKYHLQNKTDLVQDVEISVEPSDAFMFSGLKQIRLRILPGTEQEMLYNFYPLMAGYQQLPSLNINLLRFPNFTNQLLRRFIPTSIFVKPQGRLMDDTSIAAA

SEQ ID NO: 60974 - protein, 374 aa, Homo sapiens
IEDRRNWSLIGRPGAPASGLNRSSGLWLGPDRCRPRSRCSCRVMENPSPAAALGKALCALLLATLGAAGQPLGGESICSARALAKYSITFTGKWSQTAFPKQYPLFRPPAQWSSLLGAAHSSDYSMWRKNQYVSNGLRDFAERGEAWALMKEIEAAGEALQSVHAVFSAPAVPSGTGQTSAELEVQRRHSLVSFVVRIVPSPDWFVGVDSLDLCDGDRWREQAALDLYPYDAGTDSGFTFSSPNFATIPQDTVTEITSSSPSHPANSFYYPRLKALPPIARVTLVRLRQSPRAFIPPAPVLPSRDNEIVDSASVPETPLDCEVSLWSSWGLCGGHCGRLGTKSRTRYVRVQPANNGSPCPELEEEAECVPDNCV

SEQ ID NO: 60975 - protein, 27 aa, Homo sapiens
VVGARGRSRLSMGSSHLLNKGLPLVRL

SEQ ID NO: 60976 - protein, 408 aa, Homo sapiens
LDGRDCTVEMPILKDVATVAFCDAQSTQEIHEKVLNEAVGALMYHTITLTREDLEKFKALRIIVRIGSGFDNIDIKSAGDLGIAVCNVPAASVEETADSTLCHILNLYRRATWLHQALREGTRVQSVEQIREVASGAARIRGETLGIIGLGRVGQAVALRAKAFGFNVLFYDPYLSDGVERALGLQRVSTLQDLLFHSDCVTLHCGLNEHNHHLINDFTVKQMRQGAFLVNTARGGLVDEKALAQALKEGRIRGAALDVHESEPFSFSQGPLKDAPNLICTPHAAWYSEQASIEMREEAAREIRRAITGRIPDSLKNCVNKDHLTAATHWASMDPAVVHPELNGAAYRYPPGVVGVAPTGIPAAVEGIVPSAMSLSHGLPPVAHPPHAPSPGQTVKPEADRDHASDQL

SEQ ID NO: 60977 - protein, 333 aa, Homo sapiens
VDITLLFRASVKTVKTRNKALGVAVGGGVDGSRDELFRRSPRPKGDFSSRAREVISHIGKLRDFLLEHRKDYINAYSHTMSEYGRMTDTERDQIDQDAQIFMRTCSEAIQQLRTEAHKEIHSQQVKEHRTAVLDFIEDYLKRVCKLYSEQRAIRVKRVVDKKRLSKLEPEPNTKTRESTSSEKVSQSPSKDSEENPATEERPEKILAETQPELGTWGDGKGEDELSPEEIQMFEQENQRLIGEMNSLFDEVRQIEGRVVEISRLQEIFTEKVLQQEAEIDSIHQLVVGATENIKEGNEDIREAIKNNAGFRVWILFFLVMCSFSLLFLDWYDS

SEQ ID NO: 60978 - protein, 4 aa, Homo sapiens
LGMG

SEQ ID NO: 60979 - protein, 6 aa, Homo sapiens
RKKFKK

SEQ ID NO: 60980 - protein, 284 aa, Homo sapiens
MPKRKRKQHYLSSEDEPDDNPDVLDSRIETAQRQCPETEPHDTKEENSRDLEELPKTSSETNSTTSRVMEEKDEYSSSETTGEKPEQNDDDTIKSQEEDQPIIIKRKRGRPRKYPVETTLKMKDDSKTDTGIVTVEQSPSSSKLKVMQTDESNKETANLQERSISNDDGEEKIVTSVRRRGRKPKRSLTVSDDAESSEPERKRQKSVSDPVEDKKEQESDEEEEEEEEDEPSGATTRSTTRSEAQRSKTQLSPSIKRKREVSPPGARTRGQQRVEEAPVKKAKR

SEQ ID NO: 60981 - protein, 231 aa, Homo sapiens
LVYGGRGALGSRCVQAFRARNWWVASVDVVENEEASASIIVKMTDSFTEQADQVTAEVGKLLGEEKVDAILCVAGGWAGGNAKSKSLFKNCDLMWKQSIWTSTISSHLATKHLKEGGLLTLAGAKAALDGTPGMIGYGMAKGAVHQLCQSLAGKNSGMPPGAAAIAVLPVTLDTPMNRKSMPEADFSSWTPLEFLVETFHDWITGKNRPSSGSLIQVVTTEGRTELTPAYF

SEQ ID NO: 60982 - protein, 218 aa, Homo sapiens
ILMGPRNPSPDHLSESESEEEENISYLNESSGEEWDSSEEEDSMVPNLSPLESLAWQVKCLLKYSTTWKPLNPNSWLYHAKLLDPSTPVHILREIGLRLSHCSHCVPKLEPIPEWPPLASCGVPPFQKPLTSPSRLSRDHATLNGALQFATKQLSRTLSRATPIPEYLKQIPNSCVSGCCCGWLTKTVKETTRTEPINTTYSYTDFQKAVNKLLTASL

SEQ ID NO: 60983 - protein, 1085 aa, Homo sapiens
LLLLCYLNVVPSLGRQTSLTTSVIPKAEQSVAYKDFIYFTVFEGNVRNVSEVSVEYLCSQPCVVNLEAVVSSEFRSSIPVYKKRWKNEKHLHTSRTQIVHVKFPSIMVYRDDYFIRHSISVSAVIVRAWITHKYSGRDWNVKWEENLLHAVAKNYTLLQTIPPFERPFKDHQVCLEWNMGYIWNLRANRIPQCPLENDVVALLGFPYASSGENTGIVKKFPRFRNRELEATRRQRMDYPVFTVSLWLYLLHYCKANLCGILYFVDSNEMYGTPSVFLTEEGYLHIQMHLVKGEDLAVKTKFIIPLKEWFRLDISFNGGQIVVTTSIGQDLKSYHNQTISFREDFHYNDTAGYFIIGGSRYVAGIEGFFGPLKYYRLRSLHPAQIFNPLLEKQLAEQIKLYYERCAEVQEIVSVYASAAKHGGERQEACHLHNSYLDLQRRYGRPSMCRAFPWEKELKDKHPSLFQALLEMDLLTVPRNQNESVSEIGGKIFEKAVKRLSSIDGLHQISSIVPFLTDSSCCGYHKASYYLAVFYETGLNVPRDQLQGMLYSLVGGQGSERLSSMNLGYKHYQGIDNYPLDWELSYAYYSNIATKTPLDQHTLQGDQAYVETIRLKDDEILKVQTKEDGDVFMWLKHEATRGNAAAQQRLAQMLFWGQQGVAKNPEAAIEWYAKGALETEDPALIYDYAIVLFKGQGVKKNRRLALELMKKAASKGLHQAVNGLGWYYHKFKKNYAKAAKYWLKAEEMGNPDASYNLGVLHLDGIFPGVPGRNQTLAGEYFHKAAQGGHMEGTLWCSLYYITGNLETFPRDPEKAVVWAKHVAEKNGYLGHVIRKGLNAYLEGSWHEALLYYVLAAETGIEVSQTNLAHICEERPDLARRYLGVNCVWRYYNFSVFQIDAPSFAYLKMGDLYYYGHQNQSQDLELSVQMYAQAALDGDSQGFFNLALLIEEGTIIPHHILDFLEIDSTLHSNNISILQELYERCWSHSNEESFSPCSLAWLYLHLRLLWGAILHSALIYFLGTFLLSILIAWTVQYFQSVSASDPPPRPSQASPDTATSTASPAVTPAADASDQDQPTVTNNPEPRG

SEQ ID NO: 60984 - protein, 213 aa, Homo sapiens
IAYALVPVFFIMGLFGVLICHLLKKKGYRCTTEAEQDIEEEKVEKIELNDSVNENSDTVGQIVHYIMKNEANADVLKAMVADNSLYDPESPVTPSTPGSPPVSPGPLSPGGTPGKHVCGHHLHTVGGVVERDVCHRCRHKRWHFIKPTNKSRESRPRRQGEVTVLSVGRFRVTKVEHKSNQKERRSLMSVSGAETVNGEVPATPVKRERSGTE

SEQ ID NO: 60985 - protein, 23 aa, Homo sapiens
VDIEEMALKLDNVLLDTYQDASS

SEQ ID NO: 60986 - protein, 7 aa, Homo sapiens
ICWMENP

SEQ ID NO: 60987 - protein, 42 aa, Homo sapiens
ISVFPEDLGTAEASANVLTVAMGSLLSRQLIFQIITYFLHHC

SEQ ID NO: 60988 - protein, 711 aa, Homo sapiens
LNAEIKHTETKNSTPPKCRKKYALTNIQAAMGLSDPAAQPLLGNGSANIKLVKNGENQLRKAAEQGQQDPNKNLSPTAVINITSEKLEGKEPHPQDSSSCEILPSQPRRTKSFLNYYADLETSARELEQNRGNHHGTAEEKSQPVQGQASTIIGNGDLLLQKPNRPQSSPEDGQVATVSSSPETKKDHPKTGAKTDCALHRIQNLAPSDEESSWTTLSQDSASPSSPDETADIWSDHSFQTDPDLPPGWKRVSDIAGTYYWHIPTGTTQWERPVSIPADLQGSRKGSLSSVTPSPTPENEKQPWSDFAVLNGGKINSDIWKDLHAATVNPDPSLKEFEGATLRYASLKLRNAPHPDDDDSCSINSDPEAKCFAVRSLGWVEMAEEDLAPGKSSVAVNNCIRQLSYCKNDIRDTVGIWGEGKDMYLILENDMLSLVDPMDRSVLHSQPIVSIRVWGVGRDNGRDFAYVARDKDTRILKCHVFRCDTPAKAIATSLHEICSKIMAERKNAKALACSSLQERANVNLDVPLQVDFPTPKTELVQKFHVQYLGMLPVDKPVGMDILNSAIENLMTSSNKEDWLSVNMNVADATVTVISEKNEEEVLVECRVRFLSFMGVGKDVHTFAFIMDTGNQRFECHVFWCEPNAGNVSEAVQAACMLRYQKCLVARPPSQKVRPPPPPADSVTRRVTTNVKRGVLSLIDTLKQKRPVTEMP

SEQ ID NO: 60989 - protein, 315 aa, Homo sapiens
LVSWGRSRVVGCCLFPLFQHRRTIGSAGLNLFWKLCVTVMRLVILDNYDLASEWAAKYICNRIIQFKPGQDRYFTLGLPTGSTPLGCYKKLIEYHKNGHLSFKYVKTFNMDEYVGLPRNHPESYHSYMWNNFFKHIDIDPNNAHILDGNAADLQAECDAFENKIKEAGGIDLFVGGIGPDGHIAFNEPGSSLVSRTRLKTLAMDTILANAKYFDGDLSKVPTMALTVGVGTVMDAREVMILITGAHKAFALYKAIEEGVNHMWTVSAFQQHPRTIFVCDEDATLELRVKTVKYFKGLMHVHNKLVDPLFSMKDGN

SEQ ID NO: 60990 - protein, 20 aa, Homo sapiens
LPTDQLHNQCISWRIYPYCL

SEQ ID NO: 60991 - protein, 542 aa, Homo sapiens
MKQSPALAPEERCRRAGSPKPVLRADDNNMGNGCSQKLATANLLRFLLLVLIPCICALVLLLVILLSYVGTLQKVYFKSNGSEPLVTDGEIQGSDVILTNTIYNQSTVVSTAHPDQHVPAWTTDASLPGDQSHRNTSACMNITHSQCQMLPYHATLTPLLSVVRNMEMEKFLKFFTYLHRLSCYQHIMLFGCTLAFPECIIDGDDSHGLLPCRSFCEAAKEGCESVLGMVNYSWPDFLRCSQFRNQTESSNVSRICFSPQQENGKQLLCGRGENFLCASGICIPGKLQCNGYNDCDDWSDEAHCNCSENLFHCHTGKCLNYSLVCDGYDDCGDLSDEQNCACHSQGLVECRNGQCIPSTFQCDGDEDCKDGSDEENCSVIQTSCQEGDQRCLYNPCLDSCGGSSLCDPNNSLNNCSQCEPITLELCMNLPYNSTSYPNYFGHRTQKEASISWESSLFPALVQTNCYKYLMFFSCTILVPKCDVNTGEHIPPCRALCEHSKERCESVLGIVGLQWPEDTDCSQFPEENSDNQTCLMPDEYVEG

SEQ ID NO: 60992 - protein, 25 aa, Homo sapiens
MTITWAMAALRSWRLLTSSGSYCWS

SEQ ID NO: 60993 - protein, 877 aa, Homo sapiens
MEMEKFLKFFTYLHRLSCYQHIMLFGCTLAFPECIIDGDDSHGLLPCRSFCEAAKEGCESVLGMVNYSWPDFLRCSQFRNQTESSNVSRICFSPQQENGKQLLCGRGENFLCASGICIPGKLQCNGYNDCDDWSDEAHCNCSENLFHCHTGKCLNYSLVCDGYDDCGDLSDEQNCDCNPTTEHRCGDGRCIAMEWVCDGDHDCVDKSDEVNCSCHSQGLVECRNGQCIPSTFQCDGDEDCKDGSDEENCSVIQTSCQEGDQRCLYNPCLDSCGGSSLCDPNNSLNNCSQCEPITLELCMNLPYNSTSYPNYFGHRTQKEASISWESSLFPALVQTNCYKYLMFFSCTILVPKCDVNTGEHIPPCRALCEHSKERCESVLGIVGLQWPEDTDCSQFPEENSDNQTCLMPDEYVEECSPSHFKCRSGQCVLASRRCDGQADCDDDSDEENCGCKERDLWECPSNKQCLKHTVICDGFPDCPDYMDEKNCSFCQDDELECANHACVSRDLWCDGEADCSDSSDEWDCVTLSINVNSSSFLMVHRAATEHHVCADGWQEILSQLACKQMGLGEPSVTKLIQEQEKEPRWLTLHSNWESLNGTTLHELLVNGQSCESRSKISLLCTKQDCGRRPAARMNKRILGGRTSRPGRWPWQCSLQSEPSGHICGCVLIAKKWVLTVAHCFEGRENAAVWKVVLGINNLDHPSVFMQTRFVKTIILHPRYSRAVVDYDISIVELSEDISETGYVRPVCLPNPEQWLEPDTYCYITGWGHMGNKMPFKLQEGEVRIISLEHCQSYFDMKTITTRMICAGYESGTVDSCMGDSGGPLVCEKPGGRWTLFGLTSWGSVCFSKVLGPGVYSNVSYFVEWIKRQIYIQTFLLN

SEQ ID NO: 60994 - protein, 294 aa, Homo sapiens
KAVERRSVNKEHNSNFKAGYIPIDEDRLHKTGLRGRKGNLAICVIILLFILAVINLIITLVIWAVIRIGPNGCDSMEFHESGLLRFKQVSDMGVIHPLYKSTVGGRRNENLVITGNNQPIVFQQGTTKLSVENNKTSITSDIGMQFFDPRTQNILFSTDYETHEFHLPSGVKSLNVQKASTERITSNATSDLNIKVDGRAIVRGNEGVFIMGKTIEFHMGGNMELKAENSIILNGSVMVSTTRLPSSSSGDQLGSGDWVRYKLCMCADGTLFKVQVTSQNMGCQISDNPCGNTH

SEQ ID NO: 60995 - protein, 196 aa, Homo sapiens
IFQGTLTNETRCLNCETVSSKDEDFLDLSVDVEQNTSITHCLRDFSNTETLCSEQKYYCETCCSKQEAQKRMRVKKLPMILALHLKRFKYMEQLHRYTKLSYRVVFPLELRLFNTSSDAVNLDRMYDLVAVVVHCGSGPNRGHYITIVKSHGFWLLFDDDIVEKIDAQAIEEFYGLTSDISKNSESGYILFYQSRE

SEQ ID NO: 60996 - protein, 378 aa, Homo sapiens
VMVNMIALTALHTEEENYNVVAPGCLSQSSDTTAKALWEALLNTKHKEAVMEVRRHLVEAASRENLPIKMSMGRVTPGQLMSYIQLFKNNLKALMNHCGLLQLGLATAQTLKHPQTAKWDNFLAFERLLLQSIGESAMSVVLNQLLPMIKPVTQRTNEDYSPEELLILLIYIYSVTGELTVDKDLCEAEEKVKKALAQVFCEESGLSPLLQKITDWDSSINLTFHKSKIAVDELFTSLRDIAGARSLLKQFKSVYVPGNHTHQASYKPLLKQVVEEIFHPERPDSVDIEHMSSGLTDLLKTGFSMFMKVSRPHPSDYPLLILFVVGGVTVSEVKMVKDLVASLKPGTQVIVLSTRLLKPLNIPELLFATDRLHPDLGF

SEQ ID NO: 60997 - protein, 21 aa, Homo sapiens
ITDREEARRKHTGGKILGFFF

SEQ ID NO: 60998 - protein, 80 aa, Homo sapiens
KRKEYLETNLKRNVEINLMFSLKNWDPCFLVMLERWTNLLFCRKALIFYENIKKSLHSQMLVKFDRTGNLHSLVMKSLHN

SEQ ID NO: 60999 - protein, 376 aa, Homo sapiens
LSTSSDSEMITQLLAYTPPQEQDDTPDWVARIKNLMKEAPTAYSLLIMHRDVIYAVRDPYGNRPLCIGRLIPVSDINDKEKKTSETEGWVVSSESCSFLSIGARYYREVLPGEIVEISRHNVQTLDIISRSEGNPVAFCIFEYVYFARPDSMFEDQMVYTVRYRCGQQLAIEAPVDADLVSTVPESATPAALAYAGKCGLPYVEVLCKNRYVGRTFIQPNMRLRQLGVAKKFGVLSDNFKGKRIVLVDDSIVRGNTISPIIKLLKESGAKEVHIRVASPPIKYPCFMGINIPTKEELIANKPEFDHLAEYLGANSVVYLSVEGLVSSVQEGIKFKKQKEKKHDIMIQENGNGLECFEKSGHCTACLTGKYPVELEW

SEQ ID NO: 61000 - protein, 144 aa, Homo sapiens
KAVHVKAQEDERIVLVDNKCKCARITSRIIRSSEDPNEDIVERNIRIIVPLNNRENISDPTSPLRTRFVYHLSDLCKKCDPTEVELDNQIVTATQSNICDEDSATETCYTYDRNKCYTAVVPLVYGGETKMVETALTPDACYPD

SEQ ID NO: 61001 - protein, 40 aa, Homo sapiens
KILIYHPAFIKYVFDNWLQSHRRYPLTSILSVIFSMHVCD

SEQ ID NO: 61002 - protein, 16 aa, Homo sapiens
MVKKIIEKMLKNGKSN

SEQ ID NO: 61003 - protein, 194 aa, Homo sapiens
IQHAQQTCEECSTLFGEYYCDICHLFDKDKKQYHCENCGICRIGPKEDFFHCLKCNLCLAMNLQGRHKCIENVSRQNCPICLEDIHTSRVVAHVLPCGHLLHRTCYEEMLKEGYRCPLCMHSALDMTRYWRQLDDEVAQTPMPSEYQNMTVDILCNDCNGRSTVQFHILGMKCKICESYNTAQAGGRRISLDQQ

SEQ ID NO: 61004 - protein, 118 aa, Homo sapiens [sequence omitted]

SEQ ID NO: 61005 - protein, 78 aa, Homo sapiens
LINLLRQSQSYCTDTECLQELPGPSGDNGISVTMILVAWMVIALILFLLRPPNLRGSSLPGKPTSPHNGQDPPAPPVD

SEQ ID NO: 61006 - protein, 320 aa, Homo sapiens
LDSVPELRWLPVLRHYDLDLVRAAMAQVIGDRVPKWVHVLIGKVVLELERFLPQPFTGEIRGMCDFMNLSLADCLLVNLAYESSVFCTSIVAQDSRGHIYHGRNLDYPFGNVLRKLTVDVQFLKNGQIAFTGTTFIGYVGLWTGQSPHKFTVSGDERDKGWWWENAIAALFRRHIPVSWLIRATLSESENFEAAVGKLAKTPLIADVYYIVGGTSPREGVVITRNRDGPADIWPLDPLNGAWFRVETNYDHWKPAPKEDDRRTSAIKALNATGQANLSLEALFQILSVVPVYNNFTIYTTVMSAGSPDKYMTRIRNPSRK

SEQ ID NO: 61007 - protein, 326 aa, Homo sapiens
IQRSAAAAAATRTARQHPPADSSVTMEDMNEYSNIEEFAEGSKINASKNQQDDGKMFIGGLSWDTSKKDLTEYLSRFGEVVDCTIKTDPVTGRSRGFGFVLFKDAASVDKVLELKEHKLDGKLIDPKRAKALKGKEPPKKVFVGGLSPDTSEEQIKEYFGAFGEIENIELPMDTKTNERRGFCFITYTDEEPVKKLLESRYHQIGSGKCEIKVAQPKEVYRQQQQQQKGGRGAAAGGRGGTRGRGRGQGQNWNQGFNNYYDQGYGNYNSAYGGDQNYSGYGGYDYTGYNYGNYGYGQGYADYSGQQSTYGKASRGGGNHQNNYQPY

SEQ ID NO: 61008 - protein, 232 aa, Homo sapiens
LFTSAGLWIVYFIAVEDDKILPLNSAERKPGVKHAPYISIAGDDPPASCVFSQVMNMAAFLALVVAVLRFIQLKPKVLNPWLNISGLVALCLASFGMTLLGNFQLTNDEEIHNVGTSLTFGFGTLTCWIQAALTLKVNIKNEGRRVGIPRVILSASITLCVVLYFILMAQSIHMYAARVQWGLVMCFLSYFGTFAVEFRHYRYEIVCSEYQENFLSFSESLSEASEYQTDQV

SEQ ID NO: 61009 - protein, 62 aa, Homo sapiens
VETLGTVLQLKQPLNITCINAAEIESRVRELSKLAETTDKVKQGFWKEFETLQQQECKLLYS

SEQ ID NO: 61010 - protein, 283 aa, Homo sapiens
RNVVLMSLLHLGAVYSLVLIPKAKPLTLLWAYFCFLLAALGVTAGAHRLWSHRSYRAKLPLRIFLAVANSMAFQNDIFEWSRDHRAHHKYSETDADPHNARRGFFFSHIGWLFVRKHRDVIEKGRKLDVTDLLADPVVRIQRKYYKISVVLMCFVVPTLVPWYIWGESLWNSYFLASILRYTISLNISWLVNSAAHMYGNRPYDKHISPRQNPLVALGAIGEGFHNYHHTFPFDYSASEFGLNFNPTTWFIDFMCWLGLATDRKRATKPMIEARKARTGDSSA

SEQ ID NO: 61011 - protein, 226 aa, Homo sapiens
ILAKVENLQPEIKTIARHLNQEVAVRANQLGWSKRDARLTYLKNMRRLISELYVRDNCHPFKATVLVWIQLPMWIFMSFALRNLSTGAAHSEGFSVQEQLATGGILWFPDLTAPDSTWILPISVGVINLLIVEICALQKIGMSRFQTYITYFVRAMSVLMIPIAATVPSSIVLYWLCSSFVGLSQNLLLRSPGFRQLCRIPSTKSDSETPYKDIFAAFNTKFISRK

SEQ ID NO: 61012 - protein, 190 aa, Homo sapiens
RLTYLKNMRRLISELYVRDNCHPFKATVLVWIQLPMWIFMSFALRNLSTGAAHSEAGFSVQEQLATGGILWFPDLTAPDSTWILPISVGVINLLIVEICALQKIGMSRFQTYITYFVRAMSVLMIPIAATVPSSIVLYWLCSSFVGLSQNLLLRSPGFRQLCRIPSTKSDSETPYKDIFAAFNTKFISRK

SEQ ID NO: 61013 - protein, 2124 aa, Homo sapiens
VELAALLIERGASLEEVNDEGYTPLMEAAREGHEEMVALLLGQGANINAQTEETQETALTLACCGGFLEVADFLIKAGADIELGCSTPLMEAAQEGHLELVKYLLAAGANVHATTATGDTALTYACENGHTDVADVLLQAGADLEHESEGGRTPLMKAARAGHVCTVQFLISKGANVNRTTANNDHTVLSLACAGGHLAVVELLLAHGADPTHRLKDGSTMLIEAAKGGHTSVVCYLLDYPNNLLSAPPPDVTQLTPPSHDLNRAPRVPVQALPMVVPPQEPDKPPANVATTLPIRNKAASKQKSSSHLPANSQDVQGYITNQSPESIVEEAQGKLTELEQRIKEAIEKNAQLQSLELAHADQLTKEKIEELNKTREEQIQKKQKILEELQKVERELQLKTQQQLKKQYLEVKAQRIQLQQQQQQSCQHLGLLTPVGVGEQLSEGDYARLQQVDPVLLKDEPQQTAAQMGFAPIQPLAMPQALPLAAGPLPPGSIANLTELQGVIVGQPVLGQAQLAGLGQGILTETQQGLMVASPAQTLNDTLDDIMAAVSGRASAMSNTPTHSIAASISQPQTPTPSPIISPSAMLPIYPAIDIDAQTESNHDTALTLACAGGHEELVQTLLERGASIEHRDKKGFTPLILAATAGHVGVVEILLDNGADIEAQSERTKDTPLSLACSGGRQEVVELLLARGANKEHRNVSDYTPLSLAASGGYVNIIKILLNAGAEINSRTGSKLGISPLMLAAMNGHTAAVKLLLDMGSDINAQIETNRNTALTLACFQGRTEVVSLLLDRKANVEHRAKTGLTPLMEAASGGYAEVGRVLLDKGADVNAPPVPSSRDTALTIAADKGHYKFCELLIGRGAHIDVRNKKGNTPLWLAANGGHLDVVQLLVQAGADVDAADNRKITPLMAAFRKGHVKVVRYLVKEVNQFPSDSECMRYIATITDKEMLKKCHLCMESIVQAKDRQAAEANKNASILLEELDLEKLREESRRLALAAKREKRKEKRRKKKEEQRRKLEEIEAKNKENFELQAAQEKEKLKVEDEPEVLTEPPSATTTTTIGISATWTTLAGSHGKRNNTITTTSSKRKNRKNKITPENVQIIFDDPLPISYSQPEKVNGESKSSSTSESGDSDNMRISSCSDESSNSNSSRKSDNHSPAVVTTTVSSKKQPSVLVTFPKEERKSVSGKASIKLSETISEGTSNSLSTCTKSGPSPLSSPNGKLTVASPKRGQKREEGWKEVVRRSKKVSVPSTVISRVIGRGGCNINAIREFTGAHIDIDKQKDKTGDRIITIRGGTESTRQATQLINALIKDPDKEIDELIPKNRLKSSSANSKIGSSAPTTTAANTSLMGIKMTTVALSSTSQTATALTVPAISSASTHKTIKNPVNNVRPGFPVSLPLAYPPPQFAHALLAAQTFQQIRPPRLPMTHFGGTFPPAQSTWGPFPVRPLSPARATNSPKPHMVPRHSNQNSSGSQVNSAGSLTSSPTTTTSSSASTVPGTSTNGSPSSPSVRRQLFVTVVKTSNATTTTVTTTASNNNTAPTNATYPMPTAKEHYPVSSPSSPSPPAQPGGVSRNSPLDCGSASPNKVASSSEQEAGSPPVVETTNTRPPNSSSSSGSSSAHSNQQQPPGSVSQEPRPPLQQSQVPPPEVRMTVPPLATSSAPVAVPSTAPVTYPMPQTPMGCPQPTPKMETPAIRPPPHGTTAPHKNSASVQNSSVAVLSVNHIKRPHSVPSSVQLPSTLSTQSACQNSVHPANKPIAPNFSAPLPFGPFSTLFENSPTSAHAFWGGSVVSSQSTPESMLSGKSSYLPNSDPLHQSDTSKAPGFRPPLQRPAPSPSGIVNMDSPYGSVTPSSTHLGNFASNISGGQMYGPGAPLGGAPAAANFNRQHFSPLSLLTPCSSASNDSSAQSVSSGVRAPSPAPSSVPLGSEKPSNVSQDRKVPVPIGTERSARIRQTGTSAPSVIGSNLSTSVGHSGIWSFEGIGGNQDKVDWCNPGMGNPMIHRPMSDPGVFSQHQAMERDSTGIVTPSGTFHQHVPAGYMDFPKVGGMPFSVYGNAMIPPVAPIPDGAGGPIFNGPHAADPSWNSLIKMVSSSTENNGPQTVWTGPWAPHMNSVHMNQLG

SEQ ID NO: 61014 - protein, 2034 aa, Homo sapiens
MEAAQEGHLELVKYLLAAGANVHATTATGDTALTYACENGHTDVADVLLQAGADLEHESEGGRTPLMKAARAGHVCTVQFLISKGANVNRTTANNDHTVLSLACAGGHLAVVELLLAHGADPTHRLKDGSTMLIEAAKGGHTSVVCYLLDYPNNLLSAPPPDVTQLTPPSHDLNRAPRVPVQALPMVVPPQEPDKPPANVATTLPIRNKAASKQKSSSHLPANSQDVQGYITNQSPESIVEEAQGKLTELEQRIKEAIEKNAQLQSLELAHADQLTKEKIEELNKTREEQIQKKQKILEELQKVERELQLKTQQQLKKQYLEVKAQRIQLQQQQQQSCQHLGLLTPVGVGEQLSEGDYARLQQVDPVLLKDEPQQTAAQMGFAPIQPLAMPQALPLAAGPLPPGSIANLTELQGVIVGQPVLGQAQLAGLGQGILTETQQGLMVASPAQTLNDTLDDIMAVSGRASAMSNTPTHSIAASISQPQTPTPSPIISPSAMLPIYPAIDIDAQTESNHDTALTLACAGGHEELVQTLLERGASIEHRDKKGFTPLILAATAGHVGVVEILLDNGADIEAQSERTKDTPLSLACSGGRQEVVELLLARGANKEHRNVSDYTPLSLAASGGYVNIIKILLNAGAEINSRTGSKLGISPLMLAAMNGHTAAVKLLLDMGSDINAQIETNRNTALTLACFQGRTEVVSLLLDRKANVEHRAKTGLTPLMEAASGGYAEVGRVLLDKGADVNAPPVPSSRDTALTIAADKGHYKFCELLIGRGAHIDVRNKKGNTPLWLAANGGHLDVVQLLVQAGADVDAADNRKITPLMAAFRKGHVKVVRYLVKEVNQFPSDSECMRYIATITDKEMLKKCHLCMESIVQAKDRQAAEANKNASILLEELDLEKLREESRRLALAAKREKRKEKRRKKKEEQRRKLEEIEAKNKENFELQAAQEKEKLKVEDEPEVLTEPPSATTTTTIGISATWTTLAGSHGKRNNTITTTSSKRKNRKNKITPENVQIIFDDPLPISYSQPEKVNGESKSSSTSESGDSDNMRISSCSDESSNSNSSRKSDNHSPAVVTTTVSSKKQPSVLVTFPKEERKSVSGKASIKLSETISEGTSNSLSTCTKSGPSPLSSPNGKLTVASPKRGQKREEGWKEVVRRSKKVSVPSTVISRVIGRGGCNINAIREFTGAHIDIDKQKDKTGDRIITIRGGTESTRQATQLINALIKDPDKEIDELIPKNRLKSSSANSKIGSSAPTTTAANTSLMGIKMTTVALSSTSQTATALTVPAISSASTHKTIKNPVNNVRPGFPVSLPLAYPPPQFAHALLAAQTFQQIRPPRLPMTHFGGTFPPAQSTWGPFPVRPLSPARATNSPKPHMVPRHSNQNSSGSQVNSAGSLTSSPTTTTSSSASTVPGTSTNGSPSSPSVRRQLFVTVVKTSNATTTTVTTTASNNNTAPTNATYPMPTAKEHYPVSSPSSPSPPAQPGGVSRNSPLDCGSASPNKVASSSEQEAGSPPVVETTNTRPPNSSSSSGSSSAHSNQQQPPGSVSQEPRPPLQQSQVPPPEVRMTVPPLATSSAPVAVPSTAPVTYPMPQTPMGCPQPTPKMETPAIRPPPHGTTAPHKNSASVQNSSVAVLSVNHIKRPHSVPSSVQLPSTLSTQSACQNSVHPANKPIAPNFSAPLPFGPFSTLFENSPTSAHAFWGGSVVSSQSTPESMLSGKSSYLPNSDPLHQSDTSKAPGFRPPLQRPAPSPSGIVNMDSPYGSVTPSSTHLGNFASNISGGQMYGPGAPLGGAPAAANFNRQHFSPLSLLTPCSSASNDSSAQSVSSGVRAPSPAPSSVPLGSEKPSNVSQDRKVPVPIGTERSARIRQTGTSAPSVIGSNLSTSVGHSGIWSFEGIGGNQDKVDWCNPGMGNPMIHRPMSDPGVFSQHQAMERDSTGIVTPSGTFHQHVPAGYMDFPKVGGMPFSVYGNAMIPPVAPIPDGAGGPIFNGPHAADPSWNSLIKMVSSSTENNGPQTVWTGPWAPHMNSVHMNQLG

SEQ ID NO: 61015 - protein, 1805 aa, Homo sapiens
ITNQSPESIVEEAQGKLTELEQRIKEAIEKNAQLQSLELAHADQLTKEKIEELNKTREEQIQKKQKILEELQKVERELQLKTQQQLKKQYLEVKAQRIQLQQQQQQSCQHLGLLTPVGVGEQLSEGDYARLQQVDPVLLKDEPQQTAAQMGFAPIQPLAMPQALPLAAGPLPPGSIANLTELQGVIVGQPVLGQAQLAGLGQGILTETQQGLMVASPAQTLNDTLDDIMAAVSGRASAMSNTPTHSIAASISQPQTPTPSPIISPSAMLPIYPAIDIDAQTESNHDTALTLACAGGHEELVQTLLERGASIEHRDKKGFTPLILAATAGHVGVVEILLDNGADIEAQSERTKDTPLSLACSGGRQEVVELLLARGANKEHRNVSDYTPLSLAASGGYVNIIKILLNAGAEINSRTGSKLGISPLMLAAMNGHTAAVKLLLDMGSDINAQIETNRNTALTLACFQGRTEVVSLLLDRKANVEHRAKTGLTPLMEAASGGYAEVGRVLLDKGADVNAPPVPSSRDTALTIAADKGHYKFCELLIGRGAHIDVRNKKGNTPLWLAANGGHLDVVQLLVQAGADVDAADNRKITPLMAAFRKGHVKVVRYLVKEVNQFPSDSECMRYIATITDKEMLKKCHLCMESIVQAKDRQAAEANKNASILLEELDLEKLREESRRLALAAKREKRKEKRRKKKEEQRRKLEEIEAKNKENFELQAAQEKEKLKVEDEPEVLTEPPSATTTTTIGISATWTTLAGSHGKRNNTITTTSSKRKNRKNKITPENVQIIFDDPLPISYSQPEKVNGESKSSSTSESGDSDNMRISSCSDESSNSNSSRKSDNHSPAVVTTTVSSKKQPSVLVTFPKEERKSVSGKASIKLSETISEGTSNSLSTCTKSGPSPLSSPNGKLTVASPKRGQKREEGWKEVVRRSKKVSVPSTVISRVIGRGGCNINAIREFTGAHIDIDKQKDKTGDRIITIRGGTESTRQATQLINALIKDPDKEIDELIPKNRLKSSSANSKIGSSAPTTTAANTSLMGIKMTTVALSSTSQTATALTVPAISSASTHKTIKNPVNNVRPGFPVSLPLAYPPPQFAHALLAAQTFQQIRPPRLPMTHFGGTFPPAQSTWGPFPVRPLSPARATNSPKPHMVPRHSNQNSSGSQVNSAGSLTSSPTTTTSSSASTVPGTSTNGSPSSPSVRRQLFVTVVKTSNATTTTVTTTASNNNTAPTNATYPMPTAKEHYPVSSPSSPSPPAQPGGVSRNSPLDCGSASPNKVASSSEQEAGSPPVVETTNTRPPNSSSSSGSSSAHSNQQQPPGSVSQEPRPPLQQSQVPPPEVRMTVPPLATSSAPVAVPSTAPVTYPMPQTPMGCPQPTPKMETPAIRPPPHGTTAPHKNSASVQNSSVAVLSVNHIKRPHSVPSSVQLPSTLSTQSACQNSVHPANKPIAPNFSAPLPFGPFSTLFENSPTSAHAFWGGSVVSSQSTPESMLSGKSSYLPNSDPLHQSDTSKAPGFRPPLQRPAPSPSGIVNMDSPYGSVTPSSTHLGNFASNISGGQMYGPGAPLGGAPAAANFNRQHFSPLSLLTPCSSASNDSSAQSVSSGVRAPSPAPSSVPLGSEKPSNVSQDRKVPVPIGTERSARIRQTGTSAPSVIGSNLSTSVGHSGIWSFEGIGGNQDKVDWCNPGMGNPMIHRPMSDPGVFSQHQAMERDSTGIVTPSGTFHQHVPAGYMDFPKVGGMPFSVYGNAMIPPVAPIPDGAGGPIFNGPHAADPSWNSLIKMVSSSTENNGPQTVWTGPWAPHMNSVHMNQLG

SEQ ID NO: 61016 - protein, 466 aa, Homo sapiens
VLSGPGGLLRAQEQPSCRRAFDLYFVLDKSGSVANNWIEIYNFVQQLAERFVSPEMRLSFIVFSSQATIILPLTGDRGKISKGLEDLKRVSPVGETYIHEGLKLANEQIQKAGGLKTSSIIIALTDGKLDGLVPSYAEKEAKISRSLGASVYCVGVLDFEQAQLERIADSKEQVFPVKGGFQALKGIINSILAQSCTEILELQPSSVCVGEEFQIVLSGRGFMLGSRNGSVLCTYTVNETYTTSVKPVSVQLNSMLCPAPILNKAGETLDVSVSFNGGKSVISGSLIVTATECSNGIAAIIVILVLLLLLGIGLMWWFWPLCCKVVIKDPPPPPAPAPKEEEEEPLPTKKWPTVDASYYGGRGVGGIKRMEVRWGDKGSTEEGARLEKAKNAVVKIPEETEEPIRPRPPRPKPTHQPPQTKWYTPIKGRLDALWALLRRQYDRVSLMRPQEGDEGRCINFSRVPSQ

SEQ ID NO: 61017 - protein, 17 aa, Homo sapiens
MSLGNCSCNPDKCKIII

SEQ ID NO: 61018 - protein, 72 aa, Homo sapiens
LEHLQEMREEKKRIRKKLRDFEDNFFRQNGRNVQKEDRTPMAEEYSEYKHIKAKLRLLEVLISKRDTDSKSM

SEQ ID NO: 61019 - protein, 250 aa, Homo sapiens
IFGFNVIFWFLGITFLGIGLWAWNEKGVLSNISSITDLGGFDPVWLFLVVGGVMFILGFAGCIGALRENTFLLKFFSVFLGIIFFLELTAGVLAFVFKDWIKDQLYFFINNNIRAYRDDIDLQNLIDFTQEYWQCCGAFGADDWNLNIYFNCTDSNASRERCGVPFSCCTKDPAEDVINTQCGYDARQKPEVDQQIVIYTKGCVPQFEKWLQDNLTIVAGIFIGIALLQIFGICLAQNLVSDIEAVRASW

SEQ ID NO: 61020 - protein, 68 aa, Homo sapiens
LAQSGAIVLLVRPSLKMRSREAGPKLRRIQEPANGSPGAVSETGGYREERLSDAEIMGKLLAWLAVGM

SEQ ID NO: 61021 - protein, 39 aa, Homo sapiens
LERNVEVALAGEEGRRRMLGESDERCTNAGSGCRRSSPG

SEQ ID NO: 61022 - protein, 24 aa, Homo sapiens
ILPRCKELTSFIAFVYFSRLRYHC

SEQ ID NO: 61023 - protein, 64 aa, Homo sapiens
MLTPEPVPAPTGRTSLRGVAQRVRAKGGADYTRCRALRPFICSQRSLPAQPGKMRESGTPERGG

SEQ ID NO: 61024 - protein, 124 aa, Homo sapiens
MECAGSKPFPRYGYKPSPPNGCGSPLFGVHLNIGIPSLTKCCNQHDRCYETCGKSKNDCDEEFQYCLSKICRDVQKTLGLTQHVQACETTVELLFDSVIHLGCKPYLDSQRAACRCHYEEKTDL

SEQ ID NO: 61025 - protein, 188 aa, Homo sapiens
LMSTATFLTSKDEGLKATTTDVRKNDSIISNVTVTSVTLPNAVSTLQSSKPKTETQSSIKTTEIPGSVLQPDASPSKTGTLTSIPVTIPENTSQSQVIGTEGGKNASTSATSRSYSSIILPVVIALIVITLSVFVLVGLYRMCWKADPGTPENGNDQPQSDKESVKLLTVKTISHESGEHSAQGKTKN

SEQ ID NO: 61026 - protein, 9 aa, Homo sapiens
LPSSAAVPW

SEQ ID NO: 61027 - protein, 33 aa, Homo sapiens
ILHFVTNLQNSINWVGFHPFLAKFLKLNPLVRV

SEQ ID NO: 61028 - protein, 109 aa, Homo sapiens
LERWQFDIECDKTAKDDSAPREKSQKAIQDEIRSVIRQITATVTFLPLLEVSCSFDLLIYTDKDLVVPEKWEESGPQFITNSEEVRLRSFTTTIHKVNSMVAYKIPVND

SEQ ID NO: 61029 - protein, 479 aa, Homo sapiens
RMASTTTCTRFTDEYQLFEELGKGAFSVVRRCMKIPTGQEYAAKIINTKKLSARDHQKLEREARICRLLKHPNIVRLHDSISEEGFHYLVFDLVTGGELFEDIVAREYYSEADASHCIQQILESVNHCHLNGIVHRDLKPENLLLASKSKGAAVKLADFGLAIEVQGDQQAWFGFAGTPGYLSPEVLRKDPYGKPVDMWACGVILYILLVGYPPFWDEDQHRLYQQIKAGAYDFPSPEWDTVTPEAKDLINKMLTINPAKRITASEALKHPWICQRSTVASMMHRQETVDCLKKFNARRKLKGAILTTMLATRNFSAAKSLLKKPDGVKESTESSNTTIEDEDVKARKQEIIKVTEQLIEAINNGDFEAYTKICDPGLTAFEPEALGNLVEGMDFHRFYFENALSKSNKPIHTIILNPHVHLVGDDAACIAYIRLTQYMDGSGMPKTMQSEETRVWHRRDGKWQNVHFHRSGSPTVPIN

SEQ ID NO: 61030 - protein, 129 aa, Homo sapiens [sequence omitted]

SEQ ID NO: 61031 - protein, 176 aa, Homo sapiens
LTGGGEMLLNVALVALVLLGAYRLWVRWGRRGLGAGAGAGEESPATSLPRMKKRDFSLEQLRQYDGSRNPRILLAVNGKVFDVTKGSKFYGPAGPYGIFAGRDASRGLATFCLDKDALRDEYDDLSDLNAVQMESVREWEMQFKEKYDYVGRLLKPGEEPSEYTDEEDTKDHNKQD

SEQ ID NO: 61032 - protein, 49 aa, Homo sapiens
MGKVKAWTGSDNREWLEGWKKKKMQMPQISASLTVWKSPHNTLHQVGLN

SEQ ID NO: 61033 - protein, 133 aa, Homo sapiens
KTMKLIPASRHRATQKVVIGDHDGVVMCFGMKKGEAAAVFKTLPGPKIARLELGGVINTPQEKIFIAAASEIRGFTKRGKQFLSFETNLTESIKAMYVFCSLLYFYILIYNILDRCEATKYHILIGFLENKIN

SEQ ID NO: 61034 - protein, 107 aa, Homo sapiens
IHPKLEYQLLLAKKVQLIDALKELQIHEGNTNFLIPEYHCILEEADHLQEEYKKQPAHLERLYGMITDLFIDKFKFKGTNVKTKVPLLLEILDSYDQNALISFFDAA

SEQ ID NO: 61035 - protein, 17 aa, Homo sapiens
RWRIESTMHTQVFLSSN

SEQ ID NO: 61036 - protein, 230 aa, Homo sapiens
LALPLRAPPNPAPLGKDASLRRMSSNRFPGSSGSNMIYYLVVGVTVSAGGYYAYKTVTSDQAKHTEHKTNLKEKTKAEIHPFQGEKENVAETEKASSEAPEELIVEAEVVDAEESPSATVVVIKEASACPGHVEAAPETTAVSAETGPEVTDAAARETTEVNPETTPEVTNAALDEAVTIDNDKDTTKNETSDEYAELEEENSPAESESSAGDDLQEEASVGSEAASAQG

SEQ ID NO: 61037 - protein, 23 aa, Homo sapiens
LDSMPKVSGSRDTVCIKQKFASC

SEQ ID NO: 61038 - protein, 33 aa, Homo sapiens
MPVLHCVFSASVRRTVMKSLILRKTQLPLNSPL

SEQ ID NO: 61039 - protein, 993 aa, Homo sapiens
LSSIRAVIKRSSRTSIQSELHRDRRRPEITIVAAEPLRPASWFPGTPPPGLGFPTSSAAGSWRPNELVPAELPPSYEQVIKEINQVQVNTTNNNNAAATPRHTITSATQTDFSEEIDNDLPQTLQAPLKPLQPFSAVSSGNLPTNVAPLIVFDISEEPNCPENPSATRCPVPKPRSKSNLRPIPRDSHIKEQSQQKISPAAVGEESSPGRPQSLLDNASTSDSQAVMNIMNTEQSQNSIVSRIKVFEGQTNIETSGLPKKPEITPRSLPPKPTVSSGKPSVAPKPAANRASGEWDSGTENRLKVTSKEGLTPYPPLQEAGSIPVTKPELPKKPNPGLIRSVNPEIPGRGPLAESSDSGKKVPTPAPRPLLLKKSVSSENPTYPSAPLKPVTVPPRLAGASQAKAYKSLGEGPPANPPVPVLQSKPLVDIDLISFDDDVLPTPSGNLAEESVGSEMVLDPFQLPAKTEPIKERAVQPAPTRKPTVIRIPAKPGKCLHEDPQSPPPLPAEKPIGNTFSTVSGKLSNVERTRNLESNHPGQTGGFVRVPPRLPPRPVNGKTIPTQQPPTKVPPERPPPPKLSATRRSNKKLPFNRSSSDMDLQKKQSNLATGLSKAKSQVFKNQDPVLPPRPKPGHPLYSKYMRGDVLVMLKQTENNYLECQKGEDTGRVHLSQMKIITPLDEHLRSRPNDPSHAQKPVDSGAPHAVVLHDFPAEQVDDLNLTSGEIVYLLEKIDTDWYRGNCRNQIGIFPANYVKVIIDIPEGGNGKRECVSSHCVKGSRCVARFEYIGEQKDELSFSEGEIIILKEYVNEEWARGEVRGRTGIFPLNFVEPVEDYPTSGANVLSTKVPLKTKKEDSGSNSQVNSLPAEWCEALHSFTAETSDDLSFKRGDRIQILERLDSDWCRGRLQDREGIFPAVFVRPCPAEAKSMLAIVPKGRKAKALYDFRGENEDELSFKAGDIITELESVDDDWMSGELMGKSGIFPKNYIQFLQIS

SEQ ID NO: 61040 - protein, 25 aa, Homo sapiens
LSSKFQFSSNKEQNGRNYIQASGLA

SEQ ID NO: 61041 - protein, 331 aa, Homo sapiens
IVPKTAENFRALCTGEKGIGHTTGKPLHFKGCPFHRIIKKFMIQGGDFSNQNGTGGESIYGEKFEDENFHYKHDREGLLSMANAGRNTNGSQFFITTVPTPHLDGKHVVFGQVIKGIGVARILENVEVKGEKPAKLCVIAECGELKEGDDGGIFPKDGSGDSHPDFPEDADIDLKDVDKILLITEDLKNIGNTFFKSQNWEMAIKKYAEVLRYVDSSKAVIETADRAKLQPIALSCVLNIGACKLKMSNWQGAIDSCLEALELDPSNTKALYRRAQGWQGLKEYDQALADLKKAQGIAPEDKAIQAELLKVKQKIKAQKDKEKAVYAKMFA

SEQ ID NO: 61042 - protein, 301 aa, Homo sapiens
KLSLPEDFYHFWKFCEELDPEKPSDSLSASLGLQLVGPYDILAGKHKTKKKSTGLNFNLHWRFYYDPPEFQTIIIGDNKTQYHMGYFRDSPDEFPVYVGINEAKKNCIIVPNGDNVFAAVKLFLTKKLREITDKKKINLLKNIDEKLTEAARELGYSLEQRTVKMKQRDKKVVTKTFHGAGLVVPVDKNDVGYRELPETDADLKRICKTIVEAASDEERLKAFAPIQEMMTFVQFANDECDYGMGLELGMDLFCYGSHYFHKVAGQLLPLAYNLLKRNLFAEIIEEHLANRSQENIDQLAA

SEQ ID NO: 61043 - protein, 62 aa, Homo sapiens [sequence omitted]

SEQ ID NO: 61044 - protein, 185 aa, Homo sapiens
LYMQLDEGSLTFNANPDEGVNYFMSKGILDDSPKEIAKFIFCTRTLNWKKLRIYLDERRDVLDDLVTLHNFRNQFLPNALREFFRHIHAPEERGEYLETLITKFSHRFCACNPDLMRELGLSPDAVYVLCYSLILLSIDLTSPHVKNKMSKREFIRNTRRAAQNISEDFVGHLYDNIYLIGHVAA

SEQ ID NO: 61045 - protein, 12 aa, Homo sapiens
KNTKLEKTENLS

SEQ ID NO: 61046 - protein, 340 aa, Homo sapiens
LPVLLVPFLLCQALVRCSSPLPLVVNTWPFKNATEAAWRALASGGSALDAVESGCAMCEREQCDGSVGFGGSPDELGETTLDAMIMDGTTMDVGAVGDLRRIKNAIGVARKVLEHTTHTLLVGESATTFAQSMGFINEDLSTTASQALHSDWLARNCQPNYWRNVIPDPSKYCGPYKPPGILKQDIPIHKETEDDRGHDTIGMVVIHKTGHIAAGTSTNGIKFKIHGRVGDSPIPGAGAYADDTAGAAAATGNGDILMRFLPSYQAVEYMRRGEDPTIACQKVISRIQKHFPEFFGAVICANVTGSYGAACNKLSTFTQFSFMVYNSEKNQPTEEKVDCI

SEQ ID NO: 61047 - protein, 8 aa, Homo sapiens
LKSQAVRS

SEQ ID NO: 61048 - protein, 5 aa, Homo sapiens
KIRTT

SEQ ID NO: 61049 - protein, 502 aa, Homo sapiens
LVFVDKPEKAKLLLEGVENKLIPGLKIIVVMDAYGSELVERGQRCGVEVTSMKAMEDLGRANRRKPKPPAPEDLAVICFTSGTTGNPKGAMVTHRNIVSDCSAFVKATENTVNPCPDDTLISFLPLAHMFERVVECVMLCHGAKIGFFQGDIRLLMDDLKVLQPTVFPVVPRLLNRMFDRIFGQANTTLKRWLLDFASKRKEAELRSGIIRNNSLWDRLIFHKVQSSLGGRVRLMVTGAAPVSATVLTFLRAALGCQFYEGYGQTECTAGCCLTMPGDWTAGHVGAPMPCNLIKLVDVEEMNYMAAEGEGEVCVKGPNVFQGYLKDPAKTAEALDKDGWLHTGDIGKWLPNGTLKIIDRKKHIFKLAQGEYIAPEKIENIYMRSEPVAQVFVHGESLQAFLIAIVVPDVETLCSWAQKRGFEGSFEELCRNKDVKKAILEDMVRLGKDSGLKPFEQVKGITLHPELFSIDNGLLTPTMKAKRPELRNYFRSQIDDLYSTIKV

SEQ ID NO: 61050 - protein, 184 aa, Homo sapiens
IPLYRSSEEEKRVTVIKAPHYPGIGPVDESGIPTAIRTTVDRPKDWYKTMFKQIHMVHKPDDDTDMYNTPYTYNAGLYNPPYSAQSHPAAKTQTYRPLSKSHSDNSPNAFKDASSPVPPPHVPPPVPPLRPRDRSSTEKHDWDPPDRKVDTRKFRSEPRSIFEYEPGKSSILQHERPVTKPQAS

SEQ ID NO: 61051 - protein, 41 aa, Homo sapiens
LELRESDVIDVMEKCDDGWFVGTSRRTKFFGTFPGNYVKRL

SEQ ID NO: 61052 - protein, 17 aa, Homo sapiens
RKKHTHTRDSLPVSLSR

SEQ ID NO: 61053 - protein, 518 aa, Homo sapiens
ILASNQQNMFLVFRAATDQCPAAEGWIPGFVLGHTSAVIVENPDGTLKKSTSWHTALRLRKKSEKKDKDGKREGKLENGYRKSREGLSNKVSVKLLNPNYIYDVPPEFVIPLSEVTCETGETVVLRCRVCGRPKASITWKGPEHNTLNNDGHYSISYSDLGEATLKIVGVTTEDDGIYTCIAVNDMGSASSSASLRVLGPGMDGIMVTWKDNFDSFYSEVAELGRGRFSVVKKCDQKGTKRAVATKFVNKKLMKRDQVTHELGILQSLQHPLLVGLLDTFETPTSYILVLEMADQGRLLDCVVRWGSLTEGKIRAHLGEVLEAVRYLHNCRIAHLDLKPENILVDESLAKPTIKLADFGDAVQLNTTYYIHQLLGNPEFAAPEIILGNPVSLTSDTWSVGVLTYVLLSGVSPFLDDSVEETCLNICRLDFSFPDDYFKGVSQKAKEFVCFLLQEDPAKRPSAALALQEQWLQAGNGRSTGVLDTSRLTSFIERRKHQNDVRPIRSIKNFLQSRLLPRV

SEQ ID NO: 61054 - protein, 95 aa, Homo sapiens
VLLFARDTSNDPGQLLRNHLNQVGHTGGLEQVEMFLLAYAVRHTIQVYRLSKYNTEEFITVYPTDPPKDWPVVTLIAEDDRHYNIPVRVCEETSL

SEQ ID NO: 61055 - protein, 221 aa, Homo sapiens
KKKKGYNVNDEKAKEKDKKAEGAATEEEGTPKESEPQAAAEPAEAKEGKEKPDQDAEGKAEEKEGEKDAAAAKEEAPKAEPEKTEGAAEAKAEPPKAPEQEQAAPGPAAGGEAPKAAEAAAAPAESAAPAAGEEPSKEEGEPKKTEAPAAPAAQETKSDGAPASDSKPGSSEAAPSSKETPAATEAPSSTPKAQGPAASAEEPKPVEAPAANSDQTVTVKE

SEQ ID NO: 61056 - protein, 182 aa, Homo sapiens
TGLSTGALVAILLCIVILLVTVVLFAALRRQRKKEPLIISKEDIRDNIVSYNDEGGGEEDTQAFDIGTLRNPEAIEDNKLRRDIVPEALFLPRRTPTARDNTDVRDFINQRLKENDTDPTAPPYDSLATYAYEGTGSVADSLSSLESVTTDADQDYDYLSDWGPRFKKLADMYGGVDSDKDS

SEQ ID NO: 61057 - protein, 115 aa, Homo sapiens
VEDHQEVLPFIYRAIGSKHLPASNVSFLHFDSHPDLLIPVNMPADTVFDKETLFGELSIENWIMPAVYAGHFSHVIWFHPTWAQQIREGRHHFLVGKDTSTTTIRTGKGHSNTEK

SEQ ID NO: 61058 - protein, 285 aa, Homo sapiens [sequence omitted]

SEQ ID NO: 61059 - protein, 149 aa, Homo sapiens
VKTSPPRTAPKKQLPSIPKNALPITKPTSPAPAAQSTNGTHASYGPFYLEYSLLAEFTLVVKQKLPGVYVQPSYRSALMWFGVIFIQHGLYQDGVFKFTVYIPDNYPDGDCPRLVFDIPVFHPLVDPTSGELDVKRAFAKWRRNHNHIW

SEQ ID NO: 61060 - protein, 35 aa, Homo sapiens
LNPEAAVLYEKDIQLFKSKVVDSVKVCTARLTNLK

SEQ ID NO: 61061 - protein, 295 aa, Homo sapiens
KERILIFSSRGINFRTRHLMQDLRMLMPHSKADTKMDRKDKLFVINEVCEMKNCNKCIYFEAKKKQDLYMWLSNSPHGPSAKFLVQNIHTLAELKMTGNCLKGSRPLLSFDPAFDELPHYALLKELLIQIFSTPRYHPKSQPFVDHVFTFTILDNRIWFRNFQIIEEDAALVEIGPRFVLNLIKIFQGSFGGPTLYENPHYQSPNMHRRVIRSITAAKYREKQQVKDVQKLRKKEPKTLLPHDPTADVFVTPAEEKPIEIQWVKPEPKVDLKARKKRIYKRQRKMKQRMDSGKTK

SEQ ID NO: 61062 - protein, 16 aa, Homo sapiens
IIRRLWNIFVRNQEKI

SEQ ID NO: 61063 - protein, 542 aa, Homo sapiens
TMPSLLVLTFSPCVLLGWALLAGGTGGGGVGGGGGGAGIGGGRQEREALPPQKIEVLVLLPQDDSYLFSLTRVRPAIEYALRSVEGNGTGRRLLPPGTRFQVAYEDSDCGNRALFSLVDRVAAARGAKPDLILGPVCEYAAAPVARLASHWDLPMLSAGALAAGFQHKDSEYSHLTRVAPAYAKMGEMMLALFRHHHWSRAALVYSDDKLERNCYFTLEGVHEVFQEEGLHTSIYSFDETKDLDLEDIVRNIQASERVVIMCASSDTIRSIMLVAHRHGMTSGDYAFFNIELFNSSSYGDGSWKRGDKHDFEAKQAYSSLQTVTLLRTVKPEFEKFSMEVKSSVEKQGLNMEDYVNMFVEGFHDAILLYVLALHEVLRAGYSKKDGGKIIQQTWNRTFEGIAGQVSIDANGDRYGDFSVIAMTDVEAGTQEVIGDYFGKEGRFEMRPNVKYPWGPLKLRIDENRIVEHTNSSPCKSSGGLEESAVTGIVVGALLGAGLLMAFYFFRKKYRITIERRTQQEESNLGKHRELREDSIRSHFSVA

SEQ ID NO: 61064 - protein, 223 aa, Homo sapiens
LDMTYFEENKLVDEDFPEDSSSQKVKELISFLSEPEILVKENNMHPKHCNLLGDELLECLSWRRGALLYMYCHSLTKRREWLLRKSSLLKKYLLDGISYLLQMLNYRCPIQLNEGVSFQDLDTAKLLSAGIFSDIHLLAMMYSGEMCYWGSKYCADQQPENHEVDTSVSGAGCTTYKEPLDFREVGEKILKKYVSVCEGPLKEQEWNTTNAKQILNFFHHRCN

SEQ ID NO: 61065 - protein, 9 aa, Homo sapiens
LFGFSTYGI

SEQ ID NO: 61066 - protein, 6 aa, Homo sapiens
RIFGGP

SEQ ID NO: 61067 - protein, 22 aa, Homo sapiens
IVCVPSYLELWVLYTLWKKAKP

SEQ ID NO: 61068 - protein, 866 aa, Homo sapiens
LKTYPALTEEIFLLSSALNVFPNMKVISLFILVGFIGEFQSFSSASSPVNCQWDFYAPWSECNGCTKTQTRRRSVAVYGQYGGQPCVGNAFETQSCEPTRGCPTEEGCGERFRCFSGQCISKSLVCNGDSDCDEDSADEDRCEDSERRPSCDIDKPPPNIELTGNGYNELTGQFRNRVINTKSFGGQCRKVFSGDGKDFYRLSGNVLSYTFQVKINNDFNYEFYNSTWSYVKHTSTEHTSSSRKRSFFRSSSSSSRSYTSHTNEIHKGKSYQLLVVENTVEVAQFINNNPEFLQLAEPFWKELSHLPSLYDYSAYRRLIDQYGTHYLQSGSLGGEYRVLFYVDSEKLKQNDFNSVEEKKCKSSGWHFVVKFSSHGCKELENALKAASGTQNNVLRGEPFIRGGGAGFISGLSYLELDNPAGNKRRYSAWAESVTNLPQVIKQKLTPLYELVKEVPCASVKKLYLKWALEEYLDEFDPCHCRPCQNGGLATVEGTHCLCHCKPYTFGAACEQGVLVGNQAGGVDGGWSCWSSWSPCVQGKKTRSRECNNPPPSGGGRSCVGETTESTQCEDEELEHLRLLEPHCFPLSLVPTEFCPSPPALKDGFVQDEGTMFPVGKNVVYTCNEGYSLIGNPVARCGEDLRWLVGEMHCQKIACVLPVLMDGIQSHPQKPFYTVGEKVTVSCSGGMSLEGPSAFLCGSSLKWSPEMKNARCVQKENPLTQAVPKCQRWEKLQNSRCVCKMPYECGPSLDVCAQDERSKRILPLTVCKMHVLHCQGRNYTLTGRDSCTLPASAEKACGACPLWGKCDAESSKCVCREASECEEEGFSICVEVNGKEQTMSECEAGALRCRGQSISVTSIRPCAAETQ

SEQ ID NO: 61069 - protein, 14 aa, Homo sapiens
LSLPALSKWWFGYC

SEQ ID NO: 61070 - protein, 5 aa, Homo sapiens
LGYTK

SEQ ID NO: 61071 - protein, 125 aa, Homo sapiens
IITPHALPMFREPRQRSTRKQLEKDRLDPLKSHKPEPPVAGPGRGGRVGTHGGTLSSYIVKNIALDKTDDSNPREAILRHAKAAEDSPYWVSPAYSKTQPKTMFAQVESDDEEAKNEPEWKKRKI

SEQ ID NO: 61072 - protein, 5 aa, Homo sapiens
LQIQN

SEQ ID NO: 61073 - protein, 12 aa, Homo sapiens
RRDGNFQNIVSV

SEQ ID NO: 61074 - protein, 330 aa, Homo sapiens
LLLLCQFMEDRSAQAGNCWLRQAKNGRCQVLYKTELSKEECCSTGRLSTSWTEEDVNDNTLFKWMIFNGGAPNCIPCKETCENVDCGPGKKCRMNKKNKPRCVCAPDCSNITWKGPVCGLDGKTYRNECALLKARCKEQPELEVQYQGRCKKTCRDVFCPGSSTCVVDQTNNAYCVTCNRICPEPASSEQYLCGNDGVTYSSACHLRKATCLLGRSIGLAYEGKCIKAKSCEDIQCTGGKKCLWDFKVGRGRCSLCDELCPDSKSDEPVCASDNATYASECAMKEAACSSGVLLEVKHSGSCNSISEDTEEEEEDEDQDYSFPISSILEW

SEQ ID NO: 61075 - protein, 40 aa, Homo sapiens
VKDASMQDSDTFEIYDPRNPVNKRRREESKKLMREKKERR

SEQ ID NO: 61076 - protein, 18 aa, Homo sapiens
VNPPKQEHLLALKGPVSL

SEQ ID NO: 61077 - protein, 353 aa, Homo sapiens
LTLPQNFGNIFLGETFSSYISVHNDSNQVVKDILVKADLQTSSQRLNLSASNAAVAELKPDCCIDDVIHHEVKEIGTHILVCAVSYTTQAGEKMYFRKFFKFQVLKPLDVKTKFYNAESDLSSVTDEVFLEAQIQNMTTSPMFMEKVSLEPSIMYNVTELNSVSQAGECVSTFGSRAYLQPMDTRQYLYCLKPKNEFAEKAGIIKGVTVIGKLDIVWKTNLGERGRLQTSQLQRMAPGYGDVRLSLEAIPDTVNLEEPFHITCKITNCSERTMDLVLEMCNTNSIHWCGISGRQLGKLHPSSSLCLALTLLSSVQGLQSISGLRLTDTFLKRTYEYDDIAQVCVVSSAIKVES

SEQ ID NO: 61078 - protein, 681 aa, Homo sapiens
MTLGREVMSPLQAMSSYTVAGRNVLRWDLSPEQIKTRTEELIVQTKQVYDAVGMLGIEEVTYENCLQALADVEVKYIVERTMLDFPQHVSSDKEVRAASTEADKRLSRFDIEMSMRGDIFERIVHLQETCDLGKIKPEARRYLEKSIKMGKRNGLHLPEQVQNEIKSMKKRMSELCIDFNKNLNEDDTFLVFSKAELGALPDDFIDSLEKTDDDKYKITLKYPHYFPVMKKCCIPETRRRMEMAFNTRCKEENTIILQQLLPLRTKVAKLLGYSTHADFVLEMNTAKSTSRVTAFLDDLSQKLKPLGEAEREFILNLKKKECKDRGFEYDGKINAWDLYYYMTQTEELKYSIDQEFLKEYFPIEVVTEGLLNTYQELLGLSFEQMTDAHVWNKSVTLYTVKDKATGEVLGQFYLDLYPREGKYNHAACFGLQPGCLLPDGSRMMAVAALVVNFSQPVAGRPSLLRHDEVRTYFHEFGHVMHQICAQTDFARFSGTNVETDFVEVPSQMLENWVWDVDSLRRLSKHYKDGSPIADDLLEKLVASRLVNTGLLTLRQIVLSKVDQSLHTNTSLDAASEYAKYCSEILGVAATPGTNMPATFGHLAGGYDGQYYGYLWSEVFSMDMFYSCFKKEGIMNPEVGMKYRNLILKPGGSLDGMDMLHNFLKREPNQKAFLMSRGLHAP

SEQ ID NO: 61079 - protein, 15 aa, Homo sapiens
LGVGRRFPPKIVKTL

SEQ ID NO: 61080 - protein, 1416 aa, Homo sapiens
VCLKMTTKRSLFVRLVPCRCLRGEEETVTTLDYSHCSLEQVPKEIFTFEKTLEELYLDANQIEELPKQLFNCQSLHKLSLPDNDLTTLPASIANLINLRELDVSKNGIQEFPENIKNCKVLTIVEASVNPISKLPDGFSQLLNLTQLYLNDAFLEFLPANFGRLTKLQILELRENQLKMLPKTMNRLTQLERLDLGSNEFTEVPEVLEQLSGLKEFWMDANRLTFIPGFIGSLKQLTYLDVSKNNIEMVEEGISTCENLQDLLLSSNSLQQLPETIGSLKNITTLKIDENQLMYLPDSIGGLISVEELDCSFNEVEALPSSIGQLTNLRTFAADHNYLQQLPPEIGSWKNITVLFLHSNKLETLPEEMGDMQKLKVINLSDNRLKNLPFSFTKLQQLTAMWLSDNQSKPLIPLQKETDSETQKMVLTNYMFPQQPRTEDVMFISDNESFNPSLWEEQRKQRAQVAFECDEDKDEREAPPREGNLKRYPTPYPDELKNMVKTVQTIVHRLKDEETNEDSGRDLKPHEDQQDINKDVGVKTSESTTTVKSKVDEREKYMIGNSVQKISEPEAEISPGSLPVTANMKASENLKHIVNHDDVFEESEELSSDEEMKMAEMRPPLIETSINQPKVVALSNNKKDDTKETDSLSDEVTHNSNQNNSNCSSPSRMSDSVSLNTDSSQDTSLCSPVKQTHIDINSKIRQEDENFNSLLQNGDILNSSTEEKFKAHDKKDFNLPEYDLNVEERLVLIEKSVDSTATADDTHKLDHINMNLNKLITNDTFQPEIMERSKTQDIVLGTSFLSINSKEETEHLENGNKYPNLESVNKVNGHSEETSQSPNRTEPHDSDCSVDLGISKSTEDLSPQKSGPVGSVVKSHSITNMEIGGLKIYDILSDNGPQQPSTTVKITSAVDGKNIVRSKSATLLYDQPLQVFTGSSSSSDLISGTKAIFKFDSNHNPEEPNIIRGPTSGPQSAPQIYGPPQYNIQYSSSAAVKDTLWHSKQNPQIDHASFPPQLLPRSESTENQSYAKHSANMNFSNHNNVRANTAYHLHQRLGPARHGEMWAISPNDRLIPAVTRSTIQRQSSVSSTASVNLGDPGSTRRAQIPEGDYLSYREFHSAGRTPPMMPGSQRPLSARTYSIDGPNASRPQSARPSINEIPERTMSVSDFNYSRTSPSKRPNARVGSEHSLLDPPGKSKVPRDWREQVLRHIEAKKLEKKHPQTSSSGDPCQDGIFISGQQNYSSATLSHKDVPPDSLMKMPLSNGQMGQPLRPQANYSQIHHPPQASVARHPSREQLIDYLMLKVAHQPPYTQPHCSPRQGHELAKQEIRVRVEKDPELGFSISGGVGGRGNPFRPDDDGIFVTRVQPEGPASKLLQPGDKIIQANGYSFINIEHGQAVSLLKTFQNTVELIIVREVSS

SEQ ID NO: 61081 - protein, 80 aa, Homo sapiens
IQVTNLSSAVTSEQMRTLFSFLGEIEELRLYPPDNAPLAFSSKVCYVKFRDPSSVGVAQHLTNTVFIDRALIVVPCAEDD

SEQ ID NO: 61082 - protein, 27 aa, Homo sapiens
RTEENKIQHNGNCQLNEENLSTKTEAV

SEQ ID NO: 61083 - protein, 128 aa, Homo sapiens
KQPWWRKLFGQESGPSAEKYSMATQLFIGGVTGWCMGFIFQKVGKLAATAVGGGFSLLQLANHTGYIKVDWQRVEKDMKKAKEQLKIRKSNQIPTEVRSKAEEVVSFVKKNVLVTGGFFGGFLLGMAS

SEQ ID NO: 61084 - protein, 161 aa, Homo sapiens
KKHLELYDRDLKHFRISKALDRVLDPTCTIKTPEITVSIIKELNRRGVLANALAGRDEKEISHVLNFLIRNLSQPRFAPVLINAAEIIIDIYLPVIGQSPVVDKKFLLLQGLVEKEIDYQRELLETLGMMDMLFATMRRKEGTSVLEHTSDGFPENKKIES

SEQ ID NO: 61085 - protein, 31 aa, Homo sapiens
IRRQMDSVTKVSERIGPRCESQPGFKVLTSC

SEQ ID NO: 61086 - protein, 51 aa, Homo sapiens
LSSVTPLMEDRWTAVWPVTSPLKPLESGPLSSAGHIIGILTHSLNSLFIKT

SEQ ID NO: 61087 - protein, 744 aa, Homo sapiens
VDVPSARLTKYIVLLCFTKFLKAVGLFESYDLLKAVHIVQFIFILKLGTAFFMVLFQKPFSSGKTITKHQWIKIFKHAVAGCIISLLWFFGLTLCGPLRTLLLFEHSDIVVISLLSVLFTSSGGGPAKTRGAAFFIIAVICLLLFDNDDLMAKMAEHPEGHHDSALTHMLYTAIAFLGVADHKGGVLLLVLALCCKVGFHTASRKLSVDVGGAKRLQALSHLVSVLLLCPWVIVLSVTTESKVESWFSLIMPFATVIFFVMILDFYVDSICSVKMEVSKCARYGSFPIFISALLFGNFWTHPITDQLRAMNKAAHQESTEHVLSGGVVVSAIFFILSANILSSPSKRGQKGTLIGYSPEGTPLYNFMGDAFQHSSQSIPRFIKESLKQILEESDSRQIFYFLCLNLLFTFVELFYGVLTNSLGLISDGFHMLFDCSALVMGLFAALMSRWKATRIFSYGYGRIEILSGFINGLFLIVIAFFVFMESVARLIDPPELDTHMLTPVSVGGLIVNLIGICAFSHAHSHAHGASQGSCHSSDHSHSHHMHGHSDHGHGHSHGSAGGGMNANMRGVFLHVLADTLGSIGVIVSTVLIEQFGWFIADPLCSLFIAILIFLSVVPLIKDACQVLLLRLPPEYEKELHIALEKIQKIEGLISYRDPHFWRHSASIVAGTIHIQVTSDVLEQRIVQQVTGILKDAGVNNLTIQVEKEAYFQHMSGLSTGFHDVLAMTKQMESMKYCKDGTYIM

SEQ ID NO: 61088 - protein, 40 aa, Homo sapiens
KPFSSGKTITKHQIIGSLKIPGRKEFKDKKLNDPRKLVGN

SEQ ID NO: 61089 - protein, 19 aa, Homo sapiens
MLLDINLILALSLILWKLI

SEQ ID NO: 61090 - protein, 894 aa, Homo sapiens
KDSVATMLSRLFRMHGLFVASHPWEVIVGTVTLTICMMSMNMFTGNNKICGWNYECPKFEEDVLSSDIIILTITRCIAILYIYFQFQNLRQLGSKYILGIAGLFTIFSSFVFSTVVIHFLDKELTGLNEALPFFLLLIDLSRASTLAKFALSSNSQDEVRENIARGMAILGPTFTLDALVECLVIGVGTMSGVRQLEIMCCFGCMSVLANYFVFMTFFPACVSLVLELSRESREGRPIWQLSHFARVLEEEENKPNPVTQRVKMIMSLGLVLVHAHSRWIADPSPQNSTADTSKVSLGLDENVSKRIEPSVSLWQFYLSKMISMDIEQVITLSLALLLAVKYIFFEQTETESTLSLKNPITSPVVTQKKVPDNCCRREPMLVRNNQKCDSVEEETGINRERKVEVIKPLVAETDTPNRATFVVGNSSLLDTSSVLVTQEPEIELPREPRPNEECLQILGNAEKGAKFLSDAEIIQLVNAKHIPAYKLETLMETHERGVSIRRQLLSKKLSEPSSLQYLPYRDYNYSLVMGACCENVIGYMPIPVGVAGPLCLDEKEFQVPMATTEGCLVASTNRGCRAIGLGGGASSRVLADGMTRGPVVRLPRACDSAEVKAWLETSEGFAVIKEAFDSTSRFARLQKLHTSIAGRNLYIRFQSRSGDAMGMNMISKGTEKALSKLHEYFPEMQILAVSGNYCTDKKPAAINWIEGRGKSVVCEAVIPAKVVREVLKTTTEAMIEVNINKNLVGSAMAGSIGGYNAHAANIVTAIYIACGQDAAQNVGSSNCITLMEASGPTNEDLYISCTMPSIEIGTVGGGTNLLPQQACLQMLGVQGACKDNPGENARQLARIVCGTVMAGELSLMAALAAGHLVKSHMIHNRSKINLQDLQGACTKKTA

SEQ ID NO: 61091 - protein, 253 aa, Homo sapiens
KTEARHILTLVHKHFCTRLSGYIERPQLIRAKVPIVKFRDKVSCVEFDLNVNNIVGIRNTFLLRTYAYLENRVRPLVLVIKKWASHHQINDASRGTLSSYSLVLMVLHYLQTLPEPILPSLQKIYPESFSPAIQLHLVHQAPCNVPPYLSKNESNLGDLLLGFLKYYATEFDWNSQMISVREAKAIPRPDGIEWRNKYICVEEPFDGTNTARAVHEKQKFDMIKDQFLKSWHRLKNKRDLNSILPVRAAVLKR

SEQ ID NO: 61092 - protein, 1547 aa, Homo sapiens
ILNKSAGRMDSYFKAAVSDLDKLLDDFEQNPDEQDYLQDVQNAYDSNHCSVSSELASSQRTSLLPKDQECVNSCASSETSYGTNESSLNEKTLKGLTSIQNEKNVTGLDLLSSVDGGTSDEIQPLYMGRCSKPICDLISDMGNLVHATNSEEDIKKLLPDDFKSNADSLIGLDLSSVSDTPCVSSTDHDSDTVREQQNDISSELQNREIGGIKELGIKVDTTLSDSYNYSGTENLKDKKIFNQLESIVDFNMSSALTRQSSKMFHAKDKLQHKSQPCGLLKDVGLVKEEVDVAVITAAECLKEEGKTSALTCSLPKNEDLCLNDSNSRDENFKLPDFSFQEDKTVIKQSAQEDSKSLDLKDNDVIQDSSSALHVSSKDVPSSLSCLPASGSMCGSLIESKARGDFLPQHEHKDNIQDAVTIHEEIQNSVVLGGEPFKENDLLKQEKCKSILLQSLIEGMEDRKIDPDQTVIRAESLDGGDTSSTVVESQEGLSGTHVPESSDCCEGFINTFSSNDMDGQDLDYFNIDEGAKSGPLISDAELDAFLTEQYLQTTNIKSFEENVNDSKSQMNQIDMKGLDDGNINNIYFNAEAGAIGESHGINIICEIVDKQNTIENGLSLGEKSTIPVQQGLPTSKSEITNQLSVSDINSQSVGGARPKQLFSLPSRTRSSKDLNKPDVPDTIESEPSTADTVVPITCAIDSTADPQVSFNSNYIDIESNSEGGSSFVTANEDSVPENTCKEGLVLGQKQPTWVPDSEAPNCMNCQVKFTFTKRRHHCRACGKVFCGVCCNRKCKLQYLEKEARVCVVCYETISKAQAFERMMSPTGSNLKSNHSDECTTVQPPQENQTSSIPSPATLPVSALKQPGVEGLCSKEQKRVWFADGILPNGEVADTTKLSSGSKRCSEDFSPLSPDVPMTVNTVDHSHSTTVEKPNNETGDITRNEIIQSPISQVPSVEKLSMNTGNEGLPTSGSFTLDDDVFAETEEPSSPTGVLVNSNLPIASISDYRLLCDINKYVCNKISLLPNDEDSLPPLLVASGEKGSVPVVEEHPSHEQIILLLEGESFHPVTFVLNANLLVNVKFIFYSSDKYWYFSTNGLHGLGQAEIIILLLCLPNEDTIPKDIFRLFITIYKDALKGKYIENLDNITFTESFLSSKDHGGFLFITPTFQKLDDLSLPSNPFLCGILIQKLEIPWAKVFPMRLMLRLGAEYKAYPAPLTSIRGRKPLFGEIGHTIMNLLVDLRNYQYTLHNIDQLLIHMEMGKSCIKIPRKKYSDVMKVLNSSNEHVISIGASFSTEADSHLVCIQNDGIYETQANSATGHPRKVTGASFVVFNGALKTSSGFLAKSSIVEDGLMVQITPETMNGLRLALREQKDFKITCGKVDAVDLREYVDICWVDAEEKGNKGVISSVDGISLQGFPSEKIKLEADFETDEKIVKCTEVFYFLKDQDLSILSTSYQFAKEIAMACSAALCPHLKTLKSNGMNKIGLRVSIDTDMVEFQAGSEGQLLPQHYLNDLDSALIPVIHGGTSNSSLPLEIELVFFIIEHLF

SEQ ID NO: 61093 - protein, 57 aa, Homo sapiens
KKSNRYSLTIWTGKNDNYSVEDLLYIRDHFDKKQVFYDILEPQNHEFKQAIGIKVNL

SEQ ID NO: 61094 - protein, 39 aa, Homo sapiens
TKRKRLKYFAKLWTMHNAQDLQKWTEEFNMEETQTSLLH

SEQ ID NO: 61095 - protein, 53 aa, Homo sapiens
LLRLPSLRTVSSSVIEQLFFVRLVGKTPIETLIRDMLLSGSSFNWPYMSIQCS

SEQ ID NO: 61096 - protein, 875 aa, Homo sapiens
LTAPPTNQWYHGKLDRTIAEERLRQAGKSGSYLIRESDRRPGSFVLSFLSQMNVVNHFRIIAMCGDYYIGGRRFSSLSDLIGYYSHVSCLLKGEKLLYPVAPPEPVEDRRRVRAILPYTKVPDTDEISFLKGDMFIVHNELEDGWMWVTNLRTDEQGLIVEDLVEEVGREEDPHEGKIWFHGKISKQEAYNLLMTVGQVCSFLVRPSDNTPGDYSLYFRTNENIQRFKICPTPNNQFMMGGRYYNSIGDIIDHYRKEQIVEGYYLKEPVPMQDQEQVLNDTVDGKEIYNTIRRKTKDAFYKNIVKKGYLLKKGKGKRWKNLYFILEGSDAQLIYFESEKRATKPKGLIDLSVCSVYVVHDSLFGRPNCFQIVVQHFSEEHYIFYFAGETPEQAEDWMKGLQAFCNLRKSSPGTSNKRLRQVSSLVLHIEEAHKLPVKHFTNPYCNIYLNSVQVAKTHAREGQNPVWSEEFVFDDLPPDINRFEITLSNKTKKSKDPDILFMRCQLSRLQKGHATDEWFLLSSHIPLKGIEPGSLRVRARYSMEKIMPEEEYSEFKELILQKELHVVYALSHVCGQDRTLLASILLRIFLHEKLESLLLCTLNDREISMEDEATTLFRATTLASTLMEQYMKATATQFVHHALKDSILKIMESKQSCELSPSKLEKNEDVNTNLTHLLNILSELVEKIFMASEILPPTLRYIYGCLQKSVQHKWPTNTTMRTRVVSGFVFLRLICPAILNPRMFNIISDSPSPIAARTLILVAKSVQNLANLVEFGAKEPYMEGVNPFIKSNKHRMIMFLDELGNVPELPDTTEHSRTDLSRDLAALHEICVAHSDELRTLSNERGAQQHVLKKLLAITELLQQKQNQYTKTNDVR

SEQ ID NO: 61097 - protein, 31 aa, Homo sapiens
LPENLKVCPGVHTEALMITLEMMCRSVMEFS

SEQ ID NO: 61098 - protein, 39 aa, Homo sapiens
LPPPAATMPLRPAAAAADWLRRLRAACCGGGGAPSATRA

SEQ ID NO: 61099 - protein, 28 aa, Homo sapiens
IENMELTPLEQDDEDDDNTLFDANHPRR

SEQ ID NO: 61100 - protein, 22 aa, Homo sapiens
VSASSGATSKSSSMNPTETKIK

SEQ ID NO: 61101 - protein, 46 aa, Homo sapiens
KRAHSKSLDYLNLDKMIKEPADTEVLQYQLQHLTLRGDRVFARNNT

SEQ ID NO: 61102 - protein, 29 aa, Homo sapiens
LHSPSEIVKQITSISIEPGVEVEVTIADA

SEQ ID NO: 61103 - protein, 69 aa, Homo sapiens [sequence omitted]

SEQ ID NO: 61104 - protein, 14 aa, Homo sapiens
MFCCCPGCSCKCVS

SEQ ID NO: 61105 - protein, 10 aa, Homo sapiens
REYNTLPSNI

SEQ ID NO: 61106 - protein, 64 aa, Homo sapiens
IRAIIAVLSTEEQSAGLQQPSGIGQRPRPMSSEELPLASSWRSNNSRKSSADTEFSDECTTAER

SEQ ID NO: 61107 - protein, 137 aa, Homo sapiens
KIEVLMNGRKHFVEKRYSEFHALHKKLKKCIKTPEIPSKHVRNWVPKVLEQRRQGLETYLQAVILENEELPKLFLDFLNVRHLPSLPKAESCGSFDETESEESSKLSHQPVLLFLRDPYVLPAASGNQTCHLLTALY

SEQ ID NO: 61108 - protein, 147 aa, Homo sapiens
KIEVLMNGRKHFVEKRYSEFHALHKKLKKCIKTPEIPSKHVRNWVPKVLEQRRQGLETYLQAVILENEELPKLFLDFLNVRHLPSLPKAESCGSFDETESEESSKLSHQPVLLFLRDPYVLPAASDFPNVVIEGVLHGIFYPHLQPR

SEQ ID NO: 61109 - protein, 51 aa, Homo sapiens
VFTSGSGVDPDARGRRMFDLRISEALLCIHSGLHRWRQQRLGRRLSGQRRR

SEQ ID NO: 61110 - protein, 38 aa, Homo sapiens
IYAWWQKNGIKGRGKWARSSQKETTCQRQAREQTRNEL

SEQ ID NO: 61111 - protein, 371 aa, Homo sapiens
VPPPAVPSVPPLVTSMPPPVSPSTAAAFGNPPVSHFPPSTSAPNTLLPAPPSGPPISGFSVGSTYDITRGHAGRAPQTPLMPSFSAPSGTGLLPTPITQQASLTSLAQGTGTTSAITFPEEQEDPRITRGQDEASAGGIWGFIKGVAGNPMVKSVLDKTKHSVESMITTLDPGMAPYIKSGGELDIVVTSNKEVKVAAVRDAFQEVFGLAVVVGEAGQSNIAPQPVGYAAGLKGAQERIDSLRRTGVIHEKQTAVSVENFIAELLPDKWFDIGCLVVEDPVHGIHLETFTQATPVPLEFVQQAQSLTPQDYNLRWSGLLVTVGEVLEKSLLNVSRTDWHMAFTGMSRRQMIYSAARAIAGMYKQRLPPRTV

SEQ ID NO: 61112 - protein, 1174 aa, Homo sapiens
VPSVPEDAAPASRDGGGVRDEGPAAAGDGLGRPLGPTPSQSRFQVDLVSENAGRAAAAAAAAAAAAAAAGAGAGAKQTPADGEASGESEPAKGSEEAKGRFRVNFVDPAASSSAEDSLSDAAGVGVDGPNVSFQNGGDTVLSEGSSLHSGGGGGSGHHQHYYYDTHTNTYYLRTFGHNTMDAVPRIDHYRHTAAQLGEKLLRPSLAELHDELEKEPFEDGFANGEESTPTRDAVVTYTAESKGVVKFGWIKGVLVRCMLNIWGVMLFIRLSWIVGQAGIGLSVLVIMMATVVTTITGLSTSAIATNGFVRGGGAYYLISRSLGPEFGGAIGLIFAFANAVAVAMYVVGFAETVVELLKEHSILMIDEINDIRIIGAITVVILLGISVAGMEWEAKAQIVLLVILLLAIGDFVIGTFIPLESKKPKGFFGYKSEIFNENFGPDFREEETFFSVFAIFFPAATGILAGANISGDLADPQSAIPKGTLLAILITTLVYVGIAVSVGSCVVRDATGNVNDTIVTELTNCTSAACKLNFDFSSCESSPCSYGLMNNFQVMSMVSGFTPLISAGIFSATLSSALASLVSAPKIFQALCKDNIYPAFQMFAKGYGKNNEPLRGYILTFLIALGFILIAELNVIAPIISNFFLASYALINFSVFHASLAKSPGWRPAFKYYNMWISLLGAILCCIVMFVINWWAALLTYVIVLGLYIYVTYKKPDVNWGSSTQALTYLNALQHSIRLSGVEDHVKNFRPQCLVMTGAPNSRPALLHLVHDFTKNVGLMICGHVHMGPRRQAMKEMSIDQAKYQRWLIKNKMKAFYAPVHADDLREGAQYLMQAAGLGRMKPNTLVLGFKKDWLQADMRDVDMYINLFHDAFDIQYGVVVIRLKEGLDISHLQGQEELLSSQEKSPGTKDVVVSVEYSKKSDLDTSKPLSEKPITHKVEEEDGKTATQPLLKKESKGPIVPLNVADQKLLEASTQFQKKQGKNTIDVWWLFDDGGLTLLIPYLLTTKKKWKDCKIRVFIGGKINRIDHDRRAMATLLSKFRIDFSDIMVLGDINTKPKKENIIAFEEIIEPYRLHEDDKEQDIADKMKEDEPWRITDNELELYKTKTYRQIRLNELLKEHSSTANIIVMSLPVARKGAVSSALYMAWLEALSKDLPPILLVRGNHQSVLTFYS

SEQ ID NO: 61113 - protein, 4 aa, Homo sapiens
VATR

SEQ ID NO: 61114 - protein, 738 aa, Homo sapiens
VTYMEEERNFTTEQVTAMLLSKLKETAESVLKKPVVDCVVSVPCFYTDAERRSVMDATQIAGLNCLRLMNETTAVALAYGIYKQDLPALEEKPRNVVFVDMGHSAYQVSVCAFNRGKLKVLATAFDTTLGGRKFDEVLVNHFCEEFGKKYKLDIKSKIRALLRLSQECEKLKKLMSANASDLPLSIECFMNDVDVSGTMNRGKFLEMCNDLLARVEPPLRSVLEQTKLKKEDIYAVEIVGGATRIPAVKEKISKFFGKELSTTLNADEAVTRGCALQCAILSPAFKVREFSITDVVPYPISLRWNSPAEEGSSDCEVFSKNHAAPFSKVLTFYRKEPFTLEAYYSSPQDLPYPDPAIAQFSVQKVTPQSDGSSSKVKVKVRVNVHGIFSVSSASLVEVHKSEENEEPMETDQNAKEEEKMQVDQEEPHVEEQQQQTPAENKAESEEMETSQAGSKDKKMDQPPQAKKAKVKTSTVDLPIENQLLWQIDREMLNLYIENEGKMIMQDKLEKERNDAKNAVEEYVYEMRDKLSGEYEKFVSEDDRNSFTLKLEDTENWLYEDGEDQPKQVYVDKLAELKNLGQPIKIRFQESEERPKLFEELGKQIQQYMKIISSFKNKEDQYDHLDAADMTKVEKSTNEAMEWMNNKLNLQNKQSLTMDPVVKSKEIEAKIKELTSTCSPIISKPKPKVEPPKEEQKNAEQNGPVDGQGDNPGPQAAEQGTDTAVPSDSDKKLPEMDID

SEQ ID NO: 61115 - protein, 269 aa, Homo sapiens
LQHETQELASKRVDIQNKRFYLDVKQNAKGRFLKIAEVGAGGNKSRLTLSMSVAVEFRDYLGDFIEHYAQLGPSQPPDLAQAQDEPRRALKSEFLVRENRKYYMDLKENQRGRFLRIRQTVNRGPGLGSTQGQTIALPAQGLIEFRDALAKLIDDYGVEEEPAELPEGTSLTVDNKRFFFDVGSNKYGVFMRVSEVKPTYRNSITVPYKVWAKFGHTFCKYSEEMKKIQEKQREKRAACEQLHQQQQQQQEETAAATLLLQGEEEGEED

SEQ ID NO: 61116 - protein, 407 aa, Homo sapiens
LGYRGGARDEQGFGGAFPARSFSTGSDLGHWVTTPPDIPGSRNLHWGEKSPPYGVPTTSTPYEGPTEEPFSSGGGGSVQGQSSEQLNRFAGFGIGLASLFTENVLAHPCIVLRRQCQVNYHAQHYHLTPFTVINIMYSFNKTQGPRALWKGMGSTFIVQGVTLGAEGIISEFTPLPREVLHKWSPKQIGEHLLLKSLTYVVAMPFYSASLIETVQSEIIRDNTGILECVKEGIGRVIGMGVPHSKRLLPLLSLIFPTVLHGVLHYIISSVIQKFVLLILKRKTYNSHLAESTSPVQSMLDAYFPELIANFAASLCSDVILYPLETVLHRLHIQGTRTIIDNTDLGYEVLPINTQYEGMRDCINTIRQEEGVFGFYKGFGAVIIQYTLHAAVLQITKIIYSTLLQNNI

SEQ ID NO: 61117 - protein, 21 aa, Homo sapiens
KSLYRKCIGTSLHCSTPPMSG

SEQ ID NO: 61118 - protein, 929 aa, Homo sapiens
LQLWQRTVPLDTLKGLGTCFPSGPELRGAGIAAAMERASERRTASALFAGFRALGLFSNDIPHVVRFSALKRRFYVTTCVGKSFHTYDVQKLSLVAVSNSVPQDICCMAADGRLVFAAYGNVFSAFARNKEIVHTFKGHKAEIHFLQPFGDHIISVDTDGILIIWHIYSEEEYLQLTFDKSVFKISAILHPSTYLNKILLGSEQGSLQLWNVKSNKLLYTFPGWKVGVTALQQAPAVDVVAIGLMSGQVIIHNIKFNETLMKFRQDWGPITSISFRTDGHPVMAAGSPCGHIGLWDLEDKKLINQMRNAHSTAIAGLTFLHREPLLVTNGADNALRIWIFDGPTGEGRLLRFRMGHSAPLTNIRYYGQNGQQILSASQDGTLQSFSTVHEKFNKSLGHGLINKKRVKRKGLQNTMSVRLPPITKFAAEEARESDWDGIIACHQGKLSCSTWNYQKSTIGAYFLKPKELKKDDITATAVDITSCGNFAVIGLSSGTVDVYNMQSGIHRGSFGKDQAHKGSVRGVAVDGLNQLTVTTGSEGLLKFWNFKNKILIHSVSLSSSPNIMLLHRDSGILGLALDDFSISVLDIETRKIVREFSGHQGQINDMAFSPDGRWLISAAMDCSIRTWDLPSGCLIDCFLLDSAPLNVSMSPTGDFLATSHVDHLGIYLWSNISLYSVVSLRPLPADYVPSIVMLPGTCQTQDVEVSEETVEPSDELIEYDSPEQLNEQLVTLSLLPESRWKNLLNLDVIKKKNKPKEPPKVPKSAPFFIPTIPGLVPRYAAPEQNNDPQQSKVVNLGVLAQKSDFCLKLEEGLVNNKYDTALNLLKESGPSGIETELRSLSPDCGGSIEVMQSFLKMIGMMLDRKRDFELAQAYLALFLKLHLKMLPSEPVLLEEITNLSSQVEENWTHLQSLFNQSMCILNYLKSALL

SEQ ID NO: 61119 - protein, 131 aa, Homo sapiens
RKQLISEKPSQEDGNTTEEFDSFRIFRLVGCALLALGVRAFVCKYLSIFAPFLTLQLAYMGLYKYFPKSEKKIKTTVLTAALLLSGIPAEVINRSMDTYSKMGEVFTDLCVYFFTFIFCHELLDYWGSEVP

SEQ ID NO: 61120 - protein, 100 aa, Homo sapiens
RSPMNQENPPPYPGPGPTAPYPPYPPQPMGPGPMGGPYPPPQGYPYQGYPQYGWQGGPQEPPKTTVYVVEDQRRDELGPSTCLTACWTALCCCCLWDMLT

SEQ ID NO: 61121 - protein, 64 aa, Homo sapiens
IIPSHPQLADVPGGPLFNGLHNPDPAWNPMIKVIQNSTECTDAQQIWPGTWAPHIGNMHLKYVN

SEQ ID NO: 61122 - protein, 48 aa, Homo sapiens
IARTPPCCLPQIPGVTTPPTAPLSKLEELKEQETEEEIPDDAQFEMDI

SEQ ID NO: 61123 - protein, 481 aa, Homo sapiens
KKSYYAKLRQQEIERERELAEKYRDRAKERRDGVNKDYEETELISTTANYRAVGPTAEADKSAAEKRRQLIQESKFLGGDMEHTHLVKGLDFALLQKVRAEIASKEKEEEELMEKPQKETKKDEDPENKIEFKTRLGRNVYRMLFKSKAYERNELFLPGRMAYVVDLDDEYADTDIPTTLIRSKADCPTMEAQTTLTTNDIVISKLTQILSYLRQGTRNKKLKKKDKGKLEEKKPPEADMNIFEDIGDYVPSTTKTPRDKERERYRERERDRERDRDRDRERERERDRERERERDREREEEKKRHSYFEKPKVDDEPMDVDKGPGSTKELIKSINEKFAGSAGWEGTESLKKPEDKKQLGDFFGMSNSYAECYPATMDDMAVDSDEEVDYSKMDQGNKKGPLGRWDFDTQEEYSEYMNNKEALPKAAFQYGIKMSEGRKTRRFKETNDKAELDRQWKKISAIIEKRKKMEADGVEVKRPKY

SEQ ID NO: 61124 - protein, 201 aa, Homo sapiens
VKMASGSGTKNLDFRRKWDKDEYEKLAEKRLTEEREKKDGKPVQPVKRELLRHRDYKVDLESKLGKTIVITKTTPQSEMGGYYCNVCDCVVKDSINFLDHINGKKHQRNLGMSMRVERSTLDQVKKRFEVNKKKMEEKQKDYDFEERMKELREEEEKAKAYKKEKQKEKKRRAEEDLTFEEDDEMAAVMGFSGFGSTKKSY

SEQ ID NO: 61125 - protein, 8 aa, Homo sapiens
VFSRSCWR

SEQ ID NO: 61126 - protein, 198 aa, Homo sapiens
MAVDKSNPTSKHKSGAVASLLSKAERATELAAEGQLTLQQFAQSTEMLKRVVQEHLPLMSEAGAGLPDMEAVAGAEALNGQSDFPYLGAFPINPGLFIMTPAGVFLAESALHMAGLAEYPMQGELASAISSGKKKRKRCGMCAPCRRRINCEQCSSCRNRKTGHQICKFRKCEELKKKPSAALEKVMLPTGAAFRWFQ

SEQ ID NO: 61127 - protein, 57 aa, Homo sapiens
TWKEVKKIIKEDPRCIKFSSSDRKKQREFEEYIRDKYITAKADFRTLLKETKFITYS

SEQ ID NO: 61128 - protein, 79 aa, Homo sapiens
RTLLKETKFITYRSKKLIQESDQHLKDVEKILQNDKRYLVLDCVPEERRKLIVAYVDDLDRRGPPPPPTASEPTRRSTK

SEQ ID NO: 61129 - protein, 28 aa, Homo sapiens
LLVLSLKKILQSLLILFLGVTIFEAKLT

SEQ ID NO: 61130 - protein, 60 aa, Homo sapiens
RTPSADLFHYDSMNAVNWGMREYKIYPYELLLVTTRGRNRLPKDVDRTRLEGNFWKSGCL

SEQ ID NO: 61131 - protein, 133 aa, Homo sapiens
TAAFSYFQKAAARGYSKAQYNAGLCHEHGRGTPRDISKAVLYYQLAASQGHSLAQYRYARCLLRDPASSWNPERQRAVSLLKQAADSGLREAQAFLGVLFTKEPYLDEQRAVKYLWLAANNGVCDLSGQACWG

SEQ ID NO: 61132 - protein, 57 aa, Homo sapiens
LNTLLAGTSRLPHASSTGNLGLLCRSGHLGASLEASSRAIPPHPYPLERSVVRLGFG

SEQ ID NO: 61133 - protein, 79 aa, Homo sapiens
MSSEDREAQEDELLALASIYDGDEFRKAESVQGGETRIYLDLPQNFKIFVSAICSMQALRQPMGRTPWQRGPVCLDAIS

SEQ ID NO: 61134 - protein, 100 aa, Homo sapiens
LDQRYGKRVIQKALEEMESKEWLEKNSKSCPCCGTPIEKLDGCNKMTCTGCMQYFCWICMGSLSRANPYKHFNDPGSPCFNRLFYAVDVDDDIWEDEVED

SEQ ID NO: 61135 - protein, 673 aa, Homo sapiens
KEFVIKKLQKNCQCSPAKAKNMILGFLPVLQWLPKYDLKKNILGDVMSGLIVGILLVPQSIAYSLLAGQEPVYGLYTSFFASIIYFLLGTSRHISVGIFGVLCLMIGETVDRELQKAGYDNAHSAPSLGMVSNGSTLLNHTSDRICDKSCYAIMVGSTVTFIAGVYQVAMGFFQVGFVSVYLSDALLSGFVTGASFTILTSQAKYLLGLNLPRTNGVGSLITTWIHVFRNIHKTNLCDLITSLLCLLVLLPTKELNEHFKSKLKAPIPIELVVVVAATLASHFGKLHENYNSSIAGHIPTGFMPPKVPEWNLIPSVAVDAIAISIIGFAITVSLSEMFAKKHGYTVKANQEMYAIGFCNIIPSFFHCFTTSAALAKTLVKESTGCHTQLSGVVTALVLLLVLLVIAPLFYSLQKSVLGVITIVNLRGALRKFRDLPKMWSISRMDTVIWFVTMLSSALLSTEIGLLVGVCFSIFCVILRTQKPKSSLLGLVEESEVFESVSAYKNLQIKPGIKIFRFVAPLYYINKECFKSALYKQTVNPILIKVAWKKAAKRKIKEKVVTLGGIQDEMSVQLSHDPLELHTIVIDCSAIQFLDTAGIHTLKEVRRDYEAIGIQVLLAQCNPTVRDSLTNGEYCKKEEENLLFYSVYEAMAFAEVSKNQKGVCVPNGLSLSSD

SEQ ID NO: 61136 - protein, 852 aa, Homo sapiens
KPYFTVSAESGELLVSSRLDREEICGKKPACALEFEAVAENPLNFYHVNVEIEDINDHTPKFTQNSFELQISESAQPGTRFILEVAEDADIGLNSLQKYKLSLNPSFSLIIKEKQDGSKYPELALEKTLDREQQSYHRLVLTALDGGHPPLSGTTELRIQVTDANDNPPVFNRDVYRVSLRENVPPGTTVLQVSATDQDEGINSEITYSFYRTGQIFSLNSKSGEITTQKKLDFEETKEYSMVVEGRDGGGLVAQCTVEINIQDENDNSPEVTFHSLLEMILENAVPGTLIALIKIHDQDSGENGEVNCQLQGEVPFKIISSSKNSYKLVTDGTLDREQTPEYNVTITATDRGKPPLSSSISVILHIRDVNDNAPVFHQASYLVSVPENNPPGASIAQVCASDLDLGLNGQVSYSIMASDLEPLALASYVSMSAQSGVVFAQRAFDYEQLRTFELTLQARDQGSPALSANVSLRVLVGDRNDNAPRVLYPALGPDGSALFDMVPRAAEPGYLVTKVVAVDADSGHNAWLSYHVLQASEPGLFSLGLRTGEVRTARALGDRDAARQRLLVAVRDGGQPPLSATATLHLVFADSLQEVLPDITDRPVPSDPQAELQFYLVVALALISVLFLLAVILAVALRLRRSSSPAAWSCFQPGLCVKSGPVVPPNYSQGTLPYSYNLCVAHTGKTEFNFLKCSEQLSSGQDILCGDSSGALFPLCNSSESTSHPELQAPPNTDWRFSQAQRPGTSGSQNGDDTGTWPNNQFDTEMLQAMILASASEAADGSSTLGGGAGTMGLSARYGPQFTLQHVPDYRQNVYIPGSNATLTNAAGKRDGKAPAGGNGNKKKSGKKEKK

SEQ ID NO: 61137 - protein, 8 aa, Homo sapiens
MSSFLRLS

SEQ ID NO: 61138 - protein, 31 aa, Homo sapiens
KKKAKKASTKDSESPSQKKKKKKKKTAEQTV

SEQ ID NO: 61139 - protein, 883 aa, Homo sapiens
RMPALACLRRLCRHVSPQAVLFLLFIFCLFSVFISAYYLYGWKRGLEPSADAPEPDCGDPPPVAPSRLLPLKPVQAATPSRTDPLVLVFVESLYSQLGQEVVAILESSRFKYRTEIAPGKGDMPTLTDKGRGRFALIIYENILKYVNLDAWNRELLDKYCVAYGVGIIGFFKANENSLLSAQLKGFPLFLHSNLGLKDCSINPKSPLLYVTRPSEVEKGVLPGEDWTVFQSNHSTYEPVLLAKTRSSESIPHLGADAGLHAALHATVVQDLGLHDGIQRVLFGNNLNFWLHKLVFVDAVAFLTGKRLSLPLDRYILVDIDDIFVGKEGTRMKVEDVKALFDTQNELRAHIPNFTFNLGYSGKFFHTGTNAEDAGDDLLLSYVKEFWWFPHMWSHMQPHLFHNQSVLAEQMALNKKFAVEHGIPTDMGYAVAPHHSGVYPVHVQLYEAWKQVWSIRVTSTEEYPHLKPARYRRGFIHNGIMVLPRQTCGLFTHTIFYNEYPGGSSELDKIINGGELFLTVLLNPISIFMTHLSNYGNDRLGLYTFKHLVRFLHSWTNLRLQTLPPVQLAQKYFQIFSEEKDPLWQDPCEDKRHKDIWSKEKTCDRFPKLLIIGPQKTGTTALYLFLGMHPDLSSNYPSSETFEEIQFFNGHNYHKGIDWYMEFFPIPSNTTSDFYFEKSANYFDSEVAPRRAAALLPKAKVLTILINPADRAYSWYQHQRAHDDPVALKYTFHEVITAGSDASSKLRALQNRCLVPGWYATHIERWLSAYHANQILVLDGKLLRTEPAKVMDMVQKFLGVTNTIDYHKTLAFDPKKGFWCQLLEGGKTKCLGKSKGRKYPEMDLDSRAFLKDYYRDHNIELSKLLYKMGQTLPTWLREDLQNTR

SEQ ID NO: 61140 - protein, 44 aa, Homo sapiens
LLLFWKMWTSTKWFHWKQIVVLTMHPFPQALNSQQVPTRMMMSS

SEQ ID NO: 61141 - protein, 904 aa, Homo sapiens
KPQPTRKLPPKKDMKEQEKGEGSDSKESPKTKSDESGEEKNGDEDCQRGGQKKKGNKHKWVPLQIDMKPEVPREKLASRPTRPPEPRHIPANRGEIKGSESATYVPVAPPTPAWQPEIKPEPAWHDQDETSSVKSDGAGGARASFRGRGRGRGRGRGRGRGGTRTHFDYQFGYRKFDGVEGPRTPKYMNNITYYFDNVSSTELYSVDQELLKDYIKRQIEYYFSVDNLERDFFLRRKMDADGFLPITLIASFHRVQALTTDISLIFAALKDSKVVEIVDEKVRRREEPEKWPLPPIVDYSQTDFSQLLNCPEFVPRQHYQKETESAPGSPRAVTPVPTKTEEVSNLKTLPKGLSASLPDLDSENWIEVKKRPRPSPARPKKSEESRFSHLTSLPQQLPSQQLMSKDQDEQEELDFLFDEEMEQMDGRKNTFTAWSDEESDYEIDDRDVNKILIVTQTPHYMRRHPGGDRTGNHTSRAKMSAELAKVINDGLFYYEQDLWAEKFEPEYSQIKQEVENFKKVNMISREQFDTLTPEPPVDPNQEVPPGPPRFQQVPTDALANKLFGAPEPSTIARSLPTTVPESPNYRNTRTPRTPRTPQLKDSSQTSRFYPVVKEGRTLDAKMPRKRKTRHSSNPPLESHVGWVMDSREHRPRTASISSSPSEGTPTVGSYGCTPQSLPKFQHPSHELLKENGFTQHVYHKYRRRCLNERKRLGIGQSQEMNTLFRFWSFFLRDHFNKKMYEEFKQLALEDAKEGYRYGLECLFRYYSYGLEKKFRLDIFKDFQEETVKDYEAGQLYGLEKFWAFLKYSKAKNLDIDPKLQEYLGKFRRLEDFRVDPPMGEEGNHKRHSVVAGGGGGEGRKRCPSQSSSRPAAMISQPPTPPTGQPVREDAKWTSQHSNTQTLGK

SEQ ID NO: 61142 - protein, 21 aa, Homo sapiens
MDLSSGFDSATSQLCEFGQGT

SEQ ID NO: 61143 - protein, 68 aa, Homo sapiens
RKLTSLIGGFWLLVPLGFLAELYTKNFSRIIGMQLAVVSEEQDQNLNRLICWILMQFITSFMIFSPML

SEQ ID NO: 61144 - protein, 23 aa, Homo sapiens
MLEKLCFCHSCTFSFGKRKRLFY

SEQ ID NO: 61145 - protein, 33 aa, Homo sapiens
IVFKQPISCVKEEIQETQTPIHSQKKRRRKSNQ

SEQ ID NO: 61146 - protein, 7 aa, Homo sapiens
MKPQPPG

SEQ ID NO: 61147 - protein, 13 aa, Homo sapiens
IEINPDSAQPYKW

SEQ ID NO: 61148 - protein, 266 aa, Homo sapiens; identical to SEQ ID NO: 53213

SEQ ID NO: 61149 - protein, 93 aa, Homo sapiens
IKAVIEQRQCTGVWNHKDELPIEIELGMKCWYHSVFACPILRQQTSDSNPPIKLICGHVISRDALNKLINGGKLKCPYCPMEQNPADGKRIIF

SEQ ID NO: 61150 - protein, 709 aa, Homo sapiens
KMADREGGCAAGRGRELEPELEPGPGPGSALEPGEEFEIVDRSQLPGPGDLRSATRPRAAEGWSAPILTLARRATGNLSASCGSALRAAAGLGGGDSGDGTARAASKCQMMEERANLMHMMKLSIKVLLQSALSLGRSLDADHAPLQQFFVVMEHCLKHGLKVKKSFIGQNKSFFGPLELVEKLCPEASDIATSVRNLPELKTAVGRGRAWLYLALMQKKLADYLKVLIDNKHLLSEFYEPEALMMEEEGMVIVGLLVGLNVLDANLCLKGEDLDSQVGVIDFSLYLKDVQDLDGGKEHERITDVLDQKNYVEELNRHLSCTVGDLQTKIDGLEKTNSKLQEELSAATDRICSLQEEQQQLREQNELIRERSEKSVEITKQDTKVELETYKQTRQGLDEMYSDVWKQLKEEKKVRLELEKELELQIGMKTEMEIAMKLLEKDTHEKQDTLVALRQQLEEVKAINLQMFHKAQNAESSLQQKNEAITSFEGKTNQVMSSMKQMEERLQHSERARQGAEERSHKLQQELGGRIGALQLQLSQLHEQCSSLEKELKSEKEQRQALQRELQHEKDTSSLLRMELQQVEGLKKELRELQDEKAELQKICEEQEQALQEMGLHLSQSKLKMEDIKEVNQALKGHAWLKDDEATHCRQCEKEFSISRRKHHCRNCGHIFCNTCSSNELALPSYPKPVRVCDSCHTLLLQRCSSTAS

SEQ ID NO: 61151 - protein, 55 aa, Homo sapiens
LCMLLVLGTAIVEAHDGHDDDVIDIEDDLDDVIEEVEDSKPDTTAPPSSPKESGR

SEQ ID NO: 61152 - protein, 44 aa, Homo sapiens
MNHHPEWFNVYNKVQITLTSHDCGELTKKDVKLAKFIEKAAASV

SEQ ID NO: 61153 - protein, 32 aa, Homo sapiens
LEFMSMKSYPDVSVDISMLSSLGPAIYHVMLY

SEQ ID NO: 61154 - protein, 458 aa, Homo sapiens
LGSAEKEPEQPPALWRKVVDFLLKAIMRTMWFAGGFHRVAVKGRQALPTEAAILTLAPHSSYFDAIPVTMTMSSIVMKAESRDIPIWGTLIQYIRPVFVSRSDQDSRRKTVEEIKRRAQSNGKWPQIMIFPEGTCTNRTCLITFKPGAFIPGAPVQPVVLRYPNKLDTITWTWQGPGALEILWLTLCQFHNQVEIEFLPVYSPSEEEKRNPALYASNVRRVMAEALGVSVTDYTFEDCQLALAEGQLRLPADTCLLEFARLVRGLGLKPEKLEKDLDRYSERARMKGGEKIGIAEFAASLEVPVSDLLEDMFSLFDESGSGEVDLRECVVALSVVCRPARTLDTIQLAFKMYGAQEDGSVGEGDLSCILKTALGVAELTVTDLFRAIDQEEKGKITFADFHRFAEMYPAFAEEYLYPDQTHFESCAETSPAPIPNGFCADFSPENSDAGRKPVRKKLD

SEQ ID NO: 61155 - protein, 86 aa, Homo sapiens
RHVNGQDQIVPGLYACGEAACASVHGANRLGANSLLDLVVFGQACALSIEESCRPGDKVPPIKPNAGEESVMNLDKLRFADGSIRT

SEQ ID NO: 61156 - protein, 91 aa, Homo sapiens
MVWNTDLVETLELQNLMLCALQTIYGAEARKESRGTHAREGYKVQIDEYDYSKPIQGQQKKPFEEHWRKHTLSYVDVGTGKTRNRQNFERG

SEQ ID NO: 61157 - protein, 1061 aa, Homo sapiens
LGLWRLAHPEAQGTTQCQRTEHPVISYKEIGPWLREFRAKNAVDFSQLTFDPGQKELVVGARNYLFRLQLEDLSLIQAVEWECDEATKKACYSKGKSKEECQNYIRVLLVGGDRLFTCGTNAFTPVCTNRSLSNLTEIHDQISGMARCPYSPQHNSTALLTAGGELYAATAMDFPGRDPAIYRSLGILPPLRTAQYNSKWLNEPNFVSSYDIGNFTYFFFRENAVEHDCGKTVFSRAARVCKNDIGGRFLLEDTWTTFMKARLNCSRPGEVPFYYNELQSTFFLPELDLIYGIFTTNVNSIAASAVCVFNLSAIAQAFSGPFKYQENSRSAWLPYPNPNPHFQCGTVDQGLYVNLTERNLQDAQKFILMHEVVQPVTTVPSFMEDNSRFSHVAVDVVQGREALVHIIYLATDYGTIKKVRVPLNQTSSSCLLEEIELFPERRREPIRSLQILHSQSVLFVGLREHVVKIPLKRCQFYRTRSTCIGAQDPYCGWDVVMKKCTSLEESLSMTQWEQSISACPTRNLTVDGHFGVWSPWTPCTHTDGSAVGSCLCRTRSCDSPAPQCGGWQCEGPGMEIANCSRNGGWTPWTSWSPCSTTCGIGFQVRQRSCSNPTPRHGGRVCVGQNREERYCNEHLLCPPHMFWTGWGPWERCTAQCGGGIQARRRICENGPDCAGCNVEYQSCNTNPCPELKKTTPWTPWTPVNISDNGGHYEQRFRYTCKARLADPNLLEVGRQRIEMRYCSSDGTSGCSTDGLSGDFLRAGRYSAHTVNGAWSAWTSWSQCSRDCSRGIRNRKRVCNNPEPKYGGMPCLGPSLEYQECNILPCPVDGVWSCWSPWTKCSATCGGGHYMRTRSCSNPAPAYGGDICLGLHTEEALCNTQPCPESWSEWSDWSECEASGVQVRARQCILLFPMGSQCSGNTTESRPCVFDSNFIPEVSVARSSSVEEKRCGEFNMFHMIAVGLSSSILGCLLTLLVYTYCQRYQQQSHDATVIHPVSPAPLNTSITNHINKLDKYDSVEAIKAFNKNNLILEERNKYFNPHLTGKTYSNAYFTDLNNYDEY

SEQ ID NO: 61158 - protein, 493 aa, Homo sapiens
LITRCLAWSVLISRLAMATYTCITCRVAFRDADMQRAHYKTDWHRYNLRRKVASMAPVTAEGFQERVRAQRAVAEEESKGSATYCTVCSKKFASFNAYENHLKSRRHVELEKKAVQAVNRKVEMMNEKNLEKGLGVDSVDKDAMNAAIQQAIKAQPSMSPKKAPPAPAKEARNVVAVGTGGRGTHDRDPSEKPPRLQWFEQQAKKLAKQQEEDSEEEEEDLDGDDWEDIDSDEELECEDTEAMDDVVEQDAEEEEAEEGPPLGAIPITDCLFCSHHSSSLMKNVAHMTKDHSFFIPDIEYLSDIKGLIKYLGEKVGVGKICLWCNEKGKSFYSTEAVQAHMNDKSHCKLFTDGDAALEFADFYDFRSSYPDHKEGEDPNKAEELPSEKNLEYDDETMELILPSGARVGHRSLMRYYKQRFGLSRAVAVAKNRKAVGRVLQQYRALGWTGSTGAALMRERDMQYVQRMKSKWMLKTGMKNNATKQMHFRVQVRF

SEQ ID NO: 61159 - protein, 645 aa, Homo sapiens
LKKRWFVLTHNSLDYYKSSEKNALKLGTLVLNSLCSVVPPDEKIFKETGYWNVTVYGRKHCYRLYTKLLNEATRWSSAIQNVTDTKAPIDTPTQQLIQDIKENCLNSDVVEQIYKRNPILRYTHHPLHSPLLPLPYGDINLNLLKDKGYTTLQDEAIKIFNSLQQLESMSDPIPIIQGILQTGHDLRPLRDELYCQLIKQTNKVPHPGSVGNLYSWQILTCLSCTFLPSRGILKYLKFHLKRIREQFPGSEMEKYALFTYESLKKTKCREFVPSRDEIEALIHRQEMTSTVYCHGGGSCKITINSHTTAGEVVEKLIRGLAMEDSRNMFALFEYNGHVDKAIESRTVVADVLAKFEKLAATSEVGDLPWKFYFKLYCFLDTDNVPKDSVEFAFMFEQAHEAVIHGHHPAPEENLQVLAALRLQYLQGDYTLHAAIPPLEEVYSLQRLKARISQSTKTFTPCERLEKRRTSFLEGTLRRSFRTGSVVRQKVEEEQMLDMWIKEEVSSARASIIDKWRKFQGMNQEQAMAKYMALIKEWPGYGSTLFDVECKEGGFPQELWLGVSADAVSVYKRGEGRPLEVFQYEHILSFGAPLANTYKIVVDERELLFETSEVVDVAKLMKAYISMIVKKRYSTTRSASSQGSSR

SEQ ID NO: 61160 - protein, 159 aa, Homo sapiens
INLELYASCVYLSMSYYFDRDDVALKNFAKYFLHQSHEEREHAEKLMKLQNQGGGRIFLQDIKKPDCDDWESGLNAMECALHLEKNVNQSLLELHKLATDKNDPHLCDFIETHYLNEQVKAIKELGDHMTNLCKMGAPESSLAEYLFDQHTLGDSDNES

SEQ ID NO: 61161 - protein, 164 aa, Homo sapiens
LMLFLEEGGVVTVCKINTQEPEETLDFDFCSTNVINKIILQSEGLREAFSELDMTSEVLQITMSPDKPYFRLSTFGNAGSSHLDYPKDSDLMEAFHCNQTQVNRYKISLLKPSTKALVLSCKVSIRTDNRGFLSLQYMIRNEDGQICFVEYYCCPDEEVPESES

SEQ ID NO: 61162 - protein, 51 aa, Homo sapiens
RNSARLSSLFPFALLQRHSSKPVLPTSGWKALGDEDDLAKREDEFVDLGDV

SEQ ID NO: 61163 - protein, 11 aa, Homo sapiens
KKKTKQMSGLF

SEQ ID NO: 61164 - protein, 8 aa, Homo sapiens
RVCNHLTV

SEQ ID NO: 61165 - protein, 85 aa, Homo sapiens
VEDIAAEEDLDKTAGYRPQANVNTWNLVSPDSPRSIDSNSEIVSFGSPCSINSRQFLIPPKDEDSPKSNGGGWSFTNFFQNKPND

SEQ ID NO: 61166 - protein, 28 aa, Homo sapiens
MWNSRESYRCFTENWSKRTNCSQQQCRG

SEQ ID NO: 61167 - protein, 75 aa, Homo sapiens
KMFDIKAWAEYVVEWAAKDPYGFLTTVILALTPLFLASAVLSWKLAKMIEAREKEQKKKQKRQENIAKAKRLKKD

SEQ ID NO: 61168 - protein, 44 aa, Homo sapiens
LEKIDLKFIDTTSKFGHGCFQTMEEKTAFMAPLKKDRIAKEEGA

SEQ ID NO: 61169 - protein, 374 aa, Homo sapiens
MCCVCKEYGKHQGHKHSVLEPEANQIRASILDMAHCIRTFTEEISDYSRKLVGIVQHIEGGEQIVEDGIGMAHTEHVPGTAENARSCIRAYFYDLHETLCRQEEMALSVVDAHVREKLIWLRQQQEDMTILLSEVSAACLHCEKTLQQDDCRVVLAKQEITRLLETLQKQQQQFTEVADHIQLDASIPVTFTKDNRVHIGPKMEIRVVTLGLDGAGKTTILFKLKQDEFMQPIPTIGFNVETVEYKNLKFTIWDVGGKHKLRPLWKHYYLNTQAVVFVVDSSHRDRISEAHSELAKLLTEKELRDALLLIFANKQDVAGALSVEEITELLSLHKLCCGRSWYIQGCDARSGMGLYEGLDWLSRQLVAAGVLDVA

SEQ ID NO: 61170 - protein, 171 aa, Homo sapiens
TEMCHRKPGTPGVGKTTLGKELASKSGLKYINVGDLAREEQLYDGYDEEYDCPILDEDRVVDELDNQMREGGVIVDYHGCDFFPERWFHIVFVLRTDTNVLYERLETRGYNEKKLTDNIQCEIFQVLYEEATASYKEEIVHQLPSNKPEELENNVDQILKWIEQWIKDHNS

SEQ ID NO: 61171 - protein, 260 aa, Homo sapiens
KTASPKSMPKDAQMMAQILKDMGITEYEPRVINQMLEFAFRYVTTILDDAKIYSSHAKKATVDADDVRLAIQCRADQSFTSPPPRDFLLDIARQRNQTPLPLIKPYSGPRLPPDRYCLTAPNYRLKSLQKKASTSAGRITVPRLSVGSVTSRPSTPTLGTPTPQTMSVSTKVGTPMSLTGQRFTVQMPTSQSPAVKASIPATSAVQNVLINPSLIGSKNILITTNMMSSQNTANESSNALKRKREDDDDDDDDDDDYDNL

SEQ ID NO: 61172 - protein, 534 aa, Homo sapiens
LETAVLYPSHSSFTMPGSLPLNAEACWPKDVGIVALEIYFPSQYVDQAELEKYDGVDAGKYTIGLGQAKMGFCTDREDINSLCMTVVQNLMERNNLSYDCIGRLEVGTETIIDKSKSVKTNLMQLFEESGNTDIEGIDTTNACYGGTAAVFNAVNWIESSSWDGRYALVVAGDIAVYATGNARPTGGVGAVALLIGPNAPLIFERGLRGTHMQHAYDFYKPDMLSEYPIVDGKLSIQCYLSALDRCYSVYCKKIHAQWQKEGNDKDFTLNDFGFMIFHSPYCKLVQKSLARMLLNDFLNDQNRDKNSIYSGLEAFGDVKLEDTYFDRDVEKAFMKASSELFSQKTKASLLVSNQNGNMYTSSVYGSLASVLAQYSPQQLAGKRIGVFSYGSGLAATLYSLKVTQDATPGSALDKITASLCDLKSRLDSRTGVAPDVFAENMKLREDTHHLVNYIPQGSIDSLFEGTWYLVRVDEKHRRTYARRPTPNDDTLDEGVGLVHSNIATEHIPSPAKKVPRLPATAAEPEAAVISNGEH

SEQ ID NO: 61173 - protein, 218 aa, Homo sapiens
LFVMASETEKTHALLQTCSTESLISSLGLGAFCLVADRLLQFSTIQQNDWLRALSDNAVHCVIGMWSWAVVTGIKKKTDFGEIILAGFLASVIDVDHFFLAGSMSLKAALTLPRRPFLHCSTVIPVVVLTLKFTMHLFKLKDSWCFLPWMLFISWTSHHIRDGIRHGLWICPFGKTSPLPFWLYVIITSSLPHICSFVMYLTGTRQMMSSKHGVRIDV

SEQ ID NO: 61174 - protein, 485 aa, Homo sapiens
RRRRRSMSDGFDRAPGAGRGRSRGLGRGGGGPEGGGFPNGAGPAERARHQPPQPKAPGFLQPPPLRQPRTTPPPGAQCEVPASPQRPSRPGALPEQTRPLRAPPSSQDKIPQQNSESAMAKPQVVVAPVLMSKLSVNAPEFYPSGYSSSYTESYEDGCEDYPTLSEYVQDFLNHLTEQPGSFETEIEQFAETLNGCVTTDDALQELVELIYQQATSIPNFSYMGARLCNYLSHHLTISPQSGNFRQLLLQRCRTEYEVKDQAAKGDEVTRKRFHAFVLFLGELYLNLEIKGTNGQVTRADILQVGLRELLNALFSNPMDDNLICAVKLLKLTGSVLEDAWKEKGKMDMEEIIQRIENVVLDANCSRDVKQMLLKLVELRSSNWGRVHATSTYREATPENDPNYFMNEPTFYTSDGVPFTAADPDYQEKYQELLEREDFFPDYEENGTDLSGAGDPYLDDIDDEMDPEIEEAYEKFCLESERKRKQ

SEQ ID NO: 61175 - protein, 455 aa, Homo sapiens
LIGGGREPQGLAEKSPLQTIGEEQTQNPYTELLVLKAHHDIVRFLVQLDDYRFASAGDDGIVVVWNAQTGEKLLELNGHTQKITAIITFPSLESCEEKNQLILTASADRTVIVWDGDTTRQVQRISCFQSTVKCLTVLQRLDVWLSGGNDLCVWNRKLDLLCKTSHLSDTGISALVEIPKNCVVAAVGKELIIFRLVAPTEGSLEWDILEVKRLLDHQDNILSLINVNDLSFVTGSHVGELIIWDALDWTMQAYERNFWDPSPQLDTQQEIKLCQKSNDISIHHFTCDEENVFAAVGRGLYVYSLQMKRVIACQKTAHDSNVLHVARLPNRQLISCSEDGSVRIWELREKQQLAAEPVPTGFFNMWGFGRVSKQASQPVKKQQENATSCSLELIGDLIGHSSSVEMFLYFEDHGLVTCSADHLIILWKNGERESGLRSLRLFQKLEENGDLYLAV

SEQ ID NO: 61176 - protein, 7 aa, Homo sapiens
ITRMGYS

SEQ ID NO: 61177 - protein, 93 aa, Homo sapiens
VKRLVKEKVMYEKEAKQQEEKIEKMRAEDGENYDIKKQAEILQESRMMIPDCQRRLEAAYLDLQRILENEKDLEEAEEYKEARLVLDSVKLEA

SEQ ID NO: 61178 - protein, 53 aa, Homo sapiens
ILQESRMMIPDCQRRLEAAYLDLQRILENEKDLEEAEEYKEARLVLDSVKLEA

SEQ ID NO: 61179 - protein, 552 aa, Homo sapiens
ISGTRGWWRHRRWDRGRTRMGPRGAASLPRGPGPRRLLLPVVLPLLLLLLLAPPGSGAGASRPPHLVFLLADDLGWNDVGFHGSRIRTPHLDALAAGGVLLDNYYTQPLCTPSRSQLLTGRYQIRTGLQHQIIWPCQPSCVPLDEKLLPQLLKEAGYTTHMVGKWHLGMYRKECLPTRRGFDTYFGYLLGSEDYYSHERCTLIDALNVTRCALDFRDGEEVATGYKNMYSTNIFTKRAIALITNHPPEKPLFLYLALQSVHEPLQVPEEYLKPYDFIQDKNRHHYAGMVSLMDEAVGNVTAALKSSGLWNNTVFIFSTDNGGQTLAGGNNWPLRGRKWSLWEGGVRGVGFVASPLLKQKGVKNRELIHISDWLPTLVKLARGHTNGTKPLDGFDVWKTISEGSPSPRIELLHNIDPNFVDSSPCPRNSMAPAKDDSSLPEYSAFNTSVHAAIRHGNWKLLTGYPGCGYWFPPPSQYNVSEIPSSDPPTKTLWLFDIDRDPEERHDLSREYPHIVTKLLSRLQFYHKHSVPVYFPAQDPRCDPKATGVWGPWM

SEQ ID NO: 61180 - protein, 48 aa, Homo sapiens
KKMMEIMTREVQTNALKEVVNKLIPDSIGKDIEKACQSILSMMSSLEK

SEQ ID NO: 61181 - protein, 32 aa, Homo sapiens
KALKKHKERIGHRYIEIFKSSRAEVGTHYNPP

SEQ ID NO: 61182 - protein, 919 aa, Homo sapiens
KMLTLQTWLVQALFIFLTTESTGELLDPCGYISPESPVVQLHSNFTAVCVLKEKCMDYFHVNANYIVWKTNHFTIPKEQYTIINRTASSVTFTDIASLNIQLTCNILTFGQLEQNVYGITIISGLPPEKPKNLSCIVNEGKKMRCEWDGGRETHLETNFTLKSEWATHKFADCKAKRDTPTSCTVDYSTVYFVNIEVWVEAENALGKVTSDHINFDPVYKVKPNPPHNLSVINSEELSSILKLTWTNPSIKSVIILKYNIQYRTKDASTWSQIPPEDTASTRSSFTVQDLKPFTEYVFRIRCMKEDGKGYWSDWSEEASGITYEDRPSKAPSFWYKIDPSHTQGYRTVQLVWKTLPPFEANGKILDYEVTLTRWKSHLQNYTVNATKLTVNLTNDRYLATLTVRNLVGKSDAAVLTIPACDFQATHPVMDLKAFPKDNMLWVEWTTPRESVKKYILEWCVLSDKAPCITDWQQEDGTVHRTYLRGNLAESKCYLITVTPVYADGPGSPESIKAYLKQAPPSKGPTVRTKKVGKNEAVLEWDQLPVDVQNGFIRNYTIFYRTIIGNETAVNVDSSHTEYTLSSLTSDTLYMVRMAAYTDEGGKDGPEFTFTTPKFAQGEIEAIVVPVCLAFLLTTLLGVLFCFNKRDLIKKHIWPNVPDPSKSHIAQWSPHTPPRHNFNSKDQMYSDGNFTDVSVVEIEANDKKPFPEDLKSLDLFKKEKINTEGHSSGIGGSSCMSSSRPSISSSDENESSQNTSSTVQYSTVVHSGYRHQVPSVQVFSRSESTQPLLDSEERPEDLQLVDHVDGGDGILPRQQYFKQNCSQHESSPDISHFERSKQVSSVNEEDFVRLKQQISDHISQSCGSGQMKMFQEVSAADAFGPGTEGQVERFETVGMEAATDEGMPKSYLPQTVRQGGYMPQ

SEQ ID NO: 61183 - protein, 198 aa, Homo sapiens
TSLCEEIMSLALRSELVVDKTKRKKRRELSEEQKQEIKDAFELFDTDKDEAIDYHELKVAMRALGFDVKKADVLKILKDYDREATGKITFEDFNEVVTDWILERDPHEEILKAFKLFDDDDSGKISLRNLRRVARELGENMSDEELRAMIEEFDKDGDGEILKNILLLPIWSRCLSLNREFFSEVNQEEFIAIMTGDI

SEQ ID NO: 61184 - protein, 115 aa, Homo sapiens
MHMPGHSRGSICLHDKDRKILFSGDVVYDGSLIDWLPYSRISDYVGTCERLIELVDRGLVEKVLPGHFNTFGAERLFRLASNYISKAGICHKVSTFAMRSLASLALRVTNSRTSP

SEQ ID NO: 61185 - protein, 420 aa, Homo sapiens
IDFVINMVLGKVKSLTISFDCLNDSNVPVYSSGDTVSGRVNLEVTGEIRVKSLKIHARGHAKVRWTESRNAGSNTAYTQNYTEEVEYFNHKDILIGHERDDDNSEEGFHTIHSGRHEYAFSFELPQTPLATSFEGRHGSVRYWVKAELHRPWLLPVKLKKEFTVFEHIDINTPSLLSPQAGTKEKTLCCWFCTSGPISLSAKIERKGYTPGESIQIFAEIENCSSRMVVPKAAIYQTQAFYAKGKMKEVKQLVANLRGESLSSGKTETWNGKLLKIPPVSPSILDCSIIRVEYSLMVYVDIPGAMDLFLNLPLVIGTIPLHPFGSRTSSVSSQCSMNMNWLSLSLPERPEAPPSYAEVVTEEQRRNNLAPVSACDDFERALQGPLFAYIQEFRFLPPPLYSEIDPNPDQSADDRPSCPSR

SEQ ID NO: 61186 - protein, 84 aa, Homo sapiens
VEAQIYRDAKECLNLLSNRLGTSQFFFGDTPSTLDAYVFGFLAPLYKVRFPKVQLQEHLKQLSNLCRFCDDILSSYFRLSLGDG

SEQ ID NO: 61187 - protein, 465 aa, Homo sapiens
LAAAMSAQCCAGQLACCCGSAGCSLCCDCCPRIRQSLSTRFMYALYFILVVVLCCIMMSTTVAHKMKEHIPFFEDMCKGIKAGDTCEKLVGYSAVYRVCFGMACFFFIFCLLTLKINNSKSCRAHIHNGFWFFKLLLLGAMCSGAFFIPDQDTFLNAWRYVGAVGGFLFIGIQLLLLVEFAHKWNKNWTAGTASNKLWYASLALVTLIMYSIATGGLVLMAVFYTQKDSCMENKILLGVNGGLCLLISLVAISPWVQNRQPHSGLLQSGVISCYVTYLTFSALSSKPAEVVLDEHGKNVTICVPDFGQDLYRDENLVTILGTSLLIGCILYSCLTSTTRSSSDALQGRYAAPELEIARCCFCFSPGGEDTEEQQPGKEGPRVIYDEKKGTVYIYSYFHFVFFLASLYVMMTVTNWFNYESANIESFFSGSWSIFWVKMASCWICVLLYLCTLVAPLCCPTREFSV

SEQ ID NO: 61188 - protein, 100 aa, Homo sapiens
LFDCLKDGMRNKETLEGREKAFIAHFQDNLHSVNRDLNELERLSNLVGKPSENHPLHNSGLLSLDPVQDKTPLYSQLLQAYKWSNKLQYHAGLASGLLNQ

SEQ ID NO: 61189 - protein, 163 aa, Homo sapiens
KAQPTTLVLPPQYVDDVISRIDRMFPEMSIHLSRPNGTSAMLLVTLGKVLKVIVIMRSLFIDRTIVKGYNENVYTEDGKLDIWSKSNYQVFQKVTDHATTALLHYQLPQMPDVVVRSFMTWLRSYIKLFQAPCQHCGKFLQDGLPPTWRDFRTLEAFHDTCRQ

SEQ ID NO: 61190 - protein, 10 aa, Homo sapiens
LVVALKITLR

SEQ ID NO: 61191 - protein, 233 aa, Homo sapiens
LWIFVSKFTEFDARKLHKLYKHAIKKRQESQQNSDQNSNLNPHVIRNPDVERLKENTNHDDSSRDSYSSDRHLTQYHDHHKDRHQGDSYKKSDSRKRPYSSFSNGKDHRDWDHYKQDSRYYSDREKHRKLDDHRSRDHRSNLEGSLKDRSHSDHRSHSDHRLHSDHRSSSEYTHHKSSRDYRYHSDWQMDHRASSSGPRSPLDQRSPYGSRSPFEHSVEHKSTPEHTWSSRKT

SEQ ID NO: 61192 - protein, 8 aa, Homo sapiens
RYLFARIG

SEQ ID NO: 61193 - protein, 9 aa, Homo sapiens
IWSNSTKSQ

SEQ ID NO: 61194 - protein, 390 aa, Homo sapiens
REPPPETPDINQLPPSILLKIFSNLSLDERCLSASLVCKYWRDLCLDFQFWKQLDLSSRQQVTDELLEKIASRSQNIIEINISDCRSMSDNGVCVLAFKCPGLLRYTAYRCKQLSDTSIIAVASHCPLLQKVHVGNQDKLTDEGLKQLGSKCRELKDIHFGQCYKISDEGMIVIAKGCLKLQRIYMQENKLVTDQSVKAFAEHCPELQYVGFMGCSVTSKGVIHLTKLRNLSSLDLRHITELDNETVMEIVKRCKNLSSLNLCLNWIINDRCVEVIAKEGQNLKELYLVSCKITDYALIAIGRYSMTIETVDVGWCKEITDQGATLIAQSSKSLRYLGLMRCDKVNEVTVEQLVQQYPHITFSTVLQDCKRTLERAYQMGWTPNMSAASS

SEQ ID NO: 61195 - protein, 942 aa, Homo sapiens
KMVFLPLKWSLATMSFLLSSLLALLTVSTPSWCQSTEASPKRSDGTPFPWNKIRLPEYVIPVHYDLLIHANLTTLTFWGTTKVEITASQPTSTIILHSHHLQISRATLRKGAGERLSEEPLQVLEHPRQEQIALLAPEPLLVGLPYTVVIHYAGNLSETFHGFYKSTYRTKEGELRILASTQFEPTAARMAFPCFDEPAFKASFSIKIRREPRHLAISNMPLVKSVTVAEGLIEDHFDVTVKMSTYLVAFIISDFESVSKITKSGVKVSVYAVPDKINQADYALDAAVTLLEFYEDYFSIPYPLPKQDLAAIPDFQSGAMENWGLTTYRESALLFDAEKSSASSKLGITMTVAHELAHQWFGNLVTMEWWNDLWLNEGFAKFMEFVSVSVTHPELKVGDYFFGKCFDAMEVDALNSSHPVSTPVENPAQIREMFDDVSYDKGACILNMLREYLSADAFKSGIVQYLQKHSYKNTKNEDLWDSMASICPTDGVKGMDGFCSRSQHSSSSSHWHQEGVDVKTMMNTWTLQKGFPLITITVRGRNVHMKQEHYMKGSDGAPDTGYLWHVPLTFITSKSDMVHRFLLKTKTDVLILPEEVEWIKFNVGMNGYYIVHYEDDGWDSLTGLLKGTHTAVSSNDRASLINNAFQLVSIGKLSIEKALDLSLYLKHETEIMPVFQGLNELIPMYKLMEKRDMNEVETQFKAFLIRLLRDLIDKQTWTDEGSVSERMLRSQLLLLACVHNYQPCVQRAEGYFRKWKESNGNLSLPVDVTLAVFAVGAQSTEGWDFLYSKYQFSLSSTEKSQIEFALCRTQNKEKLQWLLDESFKGDKIKTQEFPQILTLIGRNPVGYPLAWQFLRKNWNKLVQKFELGSSSIAHMVMGTTNQFSTRTRLEEVKGFFSSLKENGSQLRCVQQTIETIEENIGWMDKNFDKIRVWLQSEKLERM

SEQ ID NO: 61196 - protein, 11 aa, Homo sapiens
LEWLWRLLPTL

SEQ ID NO: 61197 - protein, 154 aa, Homo sapiens
VILHAEDDTDEALRVQNLLQDDFGIKPGIIFAEMPCGRQHLQNLDDAVNGSAWTILLLTENFLRDTWCNFQFYTSLMNSVNRQHKYNSVIPMRPLNNPLPRERTPFALQTINALEEESRGFPTQVERIFQESVYKTQQTIWKETRNMVQRQFIA

SEQ ID NO: 61198 - protein, 194 aa, Homo sapiens
LKPRTLADLIRILHQLFAGDEVNVEEVQAIMEAYESDPTEWAMYAKFDQYRYTRNLVDQGNGKFNLMILCWGEGHGSSIHDHTNSHCFLKMLQGNLKETLFAWPDKKSNEMVKKSERVLRENQCAYINDSIGLHRVENISHTEPAVSLHLYSPPFDTCHAFDQRTGHKNKVTMTFHSKFGIRTPNATSGSLENN

SEQ ID NO: 61199 - protein, 18 aa, Homo sapiens
LLSEDATGKSKGDIICLA

SEQ ID NO: 61200 - protein, 217 aa, Homo sapiens
LPPLTMGPGPRLLLPLVLCVGLGALVFSSGAEGFRKRGPSVTAKVFFDVRIGDKDVGRIVIGLFGKVVPKTVENFVALATGEKGYGYKGSKFHRVIKDFMIQGGDITTGDGTGGVSIYGETFPDENFKLKHYGIGWVSMANAGPDTNGSQFFITLTKPTWLDGKHVVFGKVIDGMTVVHSIELQATDGHDRPLTNCSIINSGKIDVKTPFVVEIADW

SEQ ID NO: 61201 - protein, 1095 aa, Homo sapiens
LIVYQDCERRGRNVLFDSSVKRRNEDISVSKLGSDAQVKVFGKCCQLKPGGDSSSSLDSSVTSSSDIKDQCLKYQGSRCSSDANMLGEMMFGSVAMSYKGSTLKIHQIRSPPQLMLSKVFTARTGSSICGSLNTLQDSLEFINQDNNTLKADNNTVINGLLGNIVHSNPMDMPGRELNEDRDSGIARSASLSSLLITPFPSPNSSLTRSCASSYQRRWRRSQTTSLENGVFPRWSIEESFNLSDESCGPNPGIVRKKKIAIGVIFSLSKDEDENNKFNEFFFSHFPLFESHMNKLKSAIEQAMKMSRRSADASQRSLAYNRIVDALNEFRTTICNLYTMPRIGEPVWLTMMSGTPEKNHLCYRFMKEFTFLMENASKNQFLPALITAVLTNHLAWVPTVMPNGQPPIKIFLEKHSSQSVDMLAKTHPYNPLWAQLGDLYGAIGSPVRLARTVVVGKRQDMVQRLLYFLTYFIRCSELQETHLLENGEDEAIVMPGTVITTTLEKGEIEESEYVLVTMHRNKSSLLFKESEEIRTPNCNCKYCSHPLLGQNVENISQQEREDIQNSSKELLGISDECQMISPSDCQEENAVDVKQYRDKLRTCFDAKLETVVCTGSVPVDKCALSESGLESTEETWQSEKLLDSDSHTGKAMRSTGMVVEKKPPDKIVPASFSCEAAQTKVTFLIGDSMSPDSDTELRSQAVVDQITRHHTKPLKEERGAIDQHQETKQTTKDQSGESDTQNMVSEEPCELPCWNHSDPESMSLFDEYFNDDSIETRTIDDVPFKTSTDSKDHCCMLEFSKILCTKNNKQNNEFCKCIETVPQDSCKTCFPQQDQRDTLSILVPHGDKESSDKKIAVGTEWDIPRNESSDSALGDSESEDTGHDMTRQVSSYYGGEQEDWAEEDEIPFPGSKLIEVSAVQPNIANFGRSLLGGYCSSYVPDFVLQGIGSDERFRQCLMSDLSHAVQHPVLDEPIAEAVCIIADMDKWTVQVASSQRRVTDNKLGKEVLVSSLVSNLLHSTLQLYKHNLSPNFCVMHLEDRLQELYFKSKMLSEYLRGQMRVHVKELGVVLGIESSDLPLLAAVASTHSPYVAQILL

SEQ ID NO: 61202 - protein, 307 aa, Homo sapiens
LEMENSQLCKLFIGGLNVQTSESGLRGHFEAFGTLTDCVVVVNPQTKRSRCFGFVTYSNVEEADAAMAASPHAVDGNTVELKRAVSREDSARPGAHAKVKKLFVGGLKGDVAEGDLIEHFSQFGTVEKAEIIADKQSGKKRGFGFVYFQNHDAADKAAVVKFHPIQGHRVEVKKAVPKEDIYSGGGGGGSRSSRGGRGGRGRGGGRDQNGLSKGGGGGYNSYGGYGGGGGGGYNAYGGGGGGSSYGGSDYGNGFGGFGSYSQHQSSYGPMKSGGGGGGGGSSWGGRSNSGPYRGGYGGGGGYGGSSF

SEQ ID NO: 61203 - protein, 32 aa, Homo sapiens
VLPLAECVESCSGVRYSVFDRGGLRGTRCSEL

SEQ ID NO: 61204 - protein, 5 aa, Homo sapiens
VLWKA

SEQ ID NO: 61205 - protein, 147 aa, Homo sapiens
MRIKKEKEKPNSAHRNSSASYGDDPTAQSLQDVSDEQVLVLFEQMLLDMNLNEEKQQPLREKDIIIKREMVSQYLYTSKAGMSQKESSKSAMMYIQELRSGLRDMPLLSCLESLRVSLNNNPVSWVQTFGAEGLASLLDILKRLHDD

SEQ ID NO: 61206 - protein, 860 aa, Homo sapiens
ILQHLLLVRNDYEARPQYYKLIEECISQIVLHKNGADPDFKCRHLQIEIEGLIDQMIDKTKVEKSEAKAAELEKKLDSELTARHELQVEMKKMESDFEQKLQDLQGEKDALHSEKQQIATEKQDLEAEVSQLTGEVAKLTKELEDAKKEMASLSAAAITVPPSVPSRAPVPPAPPLPGDSGTIIPPPPAPGDSTTPPPPPPPPPPPPPLPGGVCISSPPSLPGGTAISPPPPLSGDATIPPPPPLPEGVGIPSPSSLPGGTAIPPPPPLPGSARIPPPPPPLPGSAGIPPPPPPLPGEAGMPPPPPPLPGGPGIPPPPPFPGGPGIPPPPPGMGMPPPPPFGFGVPAAPVLPFGLTPKKLYKPEVQLRRPNWSKLVAEDLSQDCFWTKVKEDRFENNELFAKLTLTFSAQTKTSKAKKDQEGGEEKKSVQKKKVKELKVLDSKTAQNLSIFLGSFRMPYQEIKNVILEVNEAVLTESMIQNLIKQMPEPEQLKMLSELKDEYDDLAESEQFGVVMGTVPRLRPRLNAILFKLQFSEQVENIKPEIVSVTAACEELRKSESFSNLLEITLLVGNYMNAGSRNAGAFGFNISFLCKLRDTKSTDQKMTLLHFLAELCENDYPDVLKFPDELAHVEKASRVSAENLQKNLDQMKKQISDVERDVQNFPAATDEKDKFVEKMTSFVKDAQEQYNKLRMMHSNMETLYKELGEYFLFDPKKLSVEEFFMDLHNFRNMFLQAVKENQKRRETEEKMRRAKLAKEKAEKERLEKQQKREQLIDMNAEGDETGVMDSLLEALQSGAAFRRKRGPRQANRKAGCAVTSLLASELTKDDAMAAVPAKVSKNSETFPTILEEAKELVGRAS

SEQ ID NO: 61207 - skipped

SEQ ID NO: 61208 - protein, 752 aa, Homo sapiens
VMDFYKTLRGGATVKVSASSPSLAVASQSDSKQRRLLVDFPKGSVSNAQQPDLSKAVSLSMGLYMGETETKVMGNDLGFPQQGQISLSSGETDLKLLEESIANLNRSTSVPENPKSSASTAVSAAPTEKEFPKTHSDVSSEQQHLKGQTGTNGGNVKLYTTDQSTFDILQDLEFSSGSPGKETNESPWRSDLLIDENCLLSPLAGEDDSFLLEGNSNEDCKPLILPDTKPKIKDNGDLVLSSPSNVTLPQVKTEKEDFIELCTPGVIKQEKLGTVYCQASFPGANIIGNKMSAISVHGVSTSGGQMYHYDMNTASLSQQQDQKPIFNVIPPIPVGSENWNRCQGSGDDNLTSLGTLNFPGRTVFSNGYSSPSMRPDVSSPPSSSSTATTGPPPKLCLVCSDEASGCHYGVLTCGSCKVFFKRAVEGQHNYLCAGRNDCIIDKIRRKNCPACRYRKCLQAGMNLEARKTKKKIKGIQQATTGVSQETSENPGNKTIVPATLPQLTPTLVSLLEVIEPEVLYAGYDSSVPDSTWRIMTTLNMLGGRQVIAAVKWAKAIPGFRNLHLDDQMTLLQYSWMFLMAFALGWRSYRQSSANLLCFAPDLIINEQRMTLPCMYDQCKHMLYVSSELHRLQVSYEEYLCMKTLLLLSSVPKDGLKSQELFDEIRMTYIKELGKAIVKREGNSSQNWQRFYQLTKLLDSMHEVVENLLNYCFQTFLDKTMSIEFPEMLAEIITNQIPKYSNGNIKKLLFHQK

SEQ ID NO: 61209 - protein, 21 aa, Homo sapiens
VKLLPLPPAQPQSLIICNVRL

SEQ ID NO: 61210 - protein, 10 aa, Homo sapiens
LHTILDLPAV

SEQ ID NO: 61211 - protein, 290 aa, Homo sapiens
KMKLIILEHYSQASEWAAKYIRNRIIQFNPGPEKYFTLGLPTGSTPLGCYKKLIEYYKNGDLSFKYVKTFNMDEYVGLPRDHPESYHSFMWNNFFKHIDIHPENTHILDGNAVDLQAECDAFEEKIKAAGGIELFVGGIGPDGHIAFNEPGSSLVSRTRVKTLAMDTILANARFFDGELTKVPTMALTVGVGTVMDAREVMILITGAHKAFALYKAIEEGVNHMWTVSAFQQHPRTVFVCDEDATLELKVKTVKYFKGLMLVHNKLVDPLYSIKEKETEKSQSSKKPYSD

SEQ ID NO: 61212 - protein, 33 aa, Homo sapiens
MASKILQKRFMAASLPVVSAFSEIRNGFSSVYC

SEQ ID NO: 61213 - protein, 40 aa, Homo sapiens
KKMQANNAKAMSALAEASRALVKPKEVKPKIPKGVSCELD

SEQ ID NO: 61214 - protein, 96 aa, Homo sapiens
VTGGMKVKADRDESSPYAAMLAAQDVAQRCKELGITALHIKLRATGGNRTKTPGPGAQSALRALARSGMKIGRIEDVTPIPSDSTRRKGGRRGRRL

SEQ ID NO: 61215 - protein, 409 aa, Homo sapiens
RQNWEDADFPILCQTCLGENPYIRMTKEKYGKECKICARPFTVFRWCPGVRMRFKKTEVCQTCSKLKNVCQTCLLDLEYGLPIQVRDAGLSFKDDMPKSDVNKEYYTQNMEREISNSDGTRPVGMLGKATSTSDMLLKLARTTPYYKRNRPHICSFWVKGECKRGEECPYRHEKPTDPDDPLADQNIKDRYYGINDPVADKLLKRASTMPRLDPPEDKTITTLYVGGLGDTITETDLRNHFYQFGEIRTITVVQRQQCAFIQFATRQAAEVAAEKSFNKLIVNGRRLNVKWGRSQAARGKEKEKDGTTDSGIKLEPVPGLPGALPPPPAAEEEASANYFNLPPSGPPAVVNIALPPPPGIAPPPPPGFGPHMFHPMGPPPPFMRAPGPIHYPSQDPQRMGAHAGKHSSP

SEQ ID NO: 61216 - protein, 9 aa, Homo sapiens
ILRSMSRST

SEQ ID NO: 61217 - protein, 147 aa, Homo sapiens
VVPCGTPWGQWYQTLEEVFIEVQVPPGTRAQDIQCGLQSRHVALSVGGREILKGKLFDSTIADEGTWTLEDRKMVRIVLTKTKRDAANCWTSLLESEYAADPWVQDQMQRKLTLERFQKENPGFDFSGAEISGNYTKGGPDFSNLEK

SEQ ID NO: 61218 - protein, 19 aa, Homo sapiens
TRLAWILSDGLGASCGGAG

SEQ ID NO: 61219 - protein, 513 aa, Homo sapiens
IDPSKRPTLKHQRPQPEKQKQFSSSGEWYKRGVKENSIITKYRKGACENCGAMTHKKKDCFERPRRVGAKFTGTNIAPDEHVQPQLMFDYDGKRDRWNGYNPEEHMKIVEEYAKVDLAKRTLKAQKLQEELASGKLVEQANSPKHQWGEEEPNSQMEKDHNSEDEDEDKYADDIDMPGQNFDSKRRITVRNLRIREDIAKYLRNLDPNSAYYDPKTRAMRENPYANAGKNPDEVSYAGDNFVRYTGDTISMAQTQLFAWEAYDKGSEVHLQADPTKLELLYKSFKVKKEDFKEQQKESILEKYGGQEHLDAPPAELLLAQTEDYVEYSRHGTVIKGQERAVACSKYEEDVKIHNHTHIWGSYWKEGRWGYKCCHSFFKYSYCTGEAGKEIVNSEECIINEITGEESVKKPQTLMELHQEKLKEEKKKKKKKKKKHRKSSSDSDDEEKKHEKLKKALNAEEARLLHVKETMQIDERKRPYNSMYETREPTEEEMEAYRMKRQRPDDPMASFLGQ

SEQ ID NO: 61220 - protein, 344 aa, Homo sapiens [sequence omitted]

SEQ ID NO: 61221 - protein, 147 aa, Homo sapiens
LKKQVEKLQAQVTLSNAQLKAFKDEEKAREALRQQKRKAKASGERYHVEPHPEHLCGAYPYAYPPMPAMVPHHGFEDWSQIRYPPPPMAMEHPPPLPNSRLFHLPEYTWRLPCGGVRNPNQSSQVMDPPTARPTEPESPKNDREGPQ

SEQ ID NO: 61222 - protein, 116 aa, Homo sapiens
LASRRLTRKLYKCIKKAVKQKQIRRGVKEVQKFVNKGEKGIMVLAGDTLPIEVYCHLPVMCEDRNLPYVYIPSKTDLGAAAGSKRPTCVIMVKPHEEYQEAYDECLEEVQSLPLPL

SEQ ID NO: 61223 - protein, 2932 aa, Homo sapiens
ILSLITPSPRVYGRALSAPAMGRRRRLCLQLYFLWLGCVVLWAQGTAGQPQPPPPKPPRPQPPPQQVRSATAGSEGGFLAPEYREEGAAVASRVRRRGQQDVLRGPNVCGSRFHSYCCPGWKTLPGGNQCIVPICRNSCGDGFCSRPNMCTCSSGQISSTCGSKSIQQCSVRCMNGGTCADDHCQCQKGYIGTYCGQPVCENGCQNGGRCIGPNRCACVYGFTGPQCERDYRTGPCFTQVNNQMCQGQLTGIVCTKTLCCATIGRAWGHPCEMCPAQPQPCRRGFIPNIRTGACQDVDECQAIPGICQGGNCINTVGSFECRCPAGHKQSETTQKCEDIDECSIIPGICETGECSNTVGSYFCVCPRGYVTSTDGSRCIDQRTGMCFSGLVNGRCAQELPGRMTKMQCCCEPGRCWGIGTIPEACPVRGSEEYRRLCMDGLPMGGIPGSAGSRPGGTGGNGFAPSGNGNGYGPGGTGFIPIPGGNGFSPGVGGAGVGAGGQGPIITGLTILNQTIDICKHHANLCLNGRCIPTVSSYRCECNMGYKQDANGDCIDVDECTSNPCTNGDCVNTPGSYYCKCHAGFQRTPTKQACIDIDECIQNGVLCKNGRCVNTDGSFQCICNAGFELTTDGKNCVDHDECTTTNMCLNGMCINEDGSFKCICKPGFVLAPNGRYCTDVDECQTPGICMNGHCINSEGSFRCDCPPGLAVGMDGRVCVDTHMRSTCYGGIKKGVCVRPFPGAVTKSECCCANPDYGFGEPCQPCPAKNSAEFHGLCSSGVGITVDGRDINECALDPDICANGICENLRGSYRCNCNSGYEPDASGRNCIDIDECLVNRLLCDNGLCRNTPGSYSCTCPPGYVFRTETETCEDINECESNPCVNGACRNNLGSFNCECSPGSKLSSTGLICIDSLKGTCWLNIQDSRCEVNINGATLKSECCATLGAAWGSPCERCELDTACPRGLARIKGVTCEDVNECEVFPGVCPNGRCVNSKGSFHCECPEGLTLDGTGRVCLDIRMEQCYLKWDEDECIHPVPGKFRMDACCCAVGAAWGTECEECPKPGTKEYETLCPRGAGFANRGDVLTGRPFYKDINECKAFPGMCTYGKCRNTIGSFKCRCNSGFALDMEERNCTDIDECRISPDLCGSGICVNTPGSFECECFEGYESGFMMMKNCMDIDECERNPLLCRGGTCVNTEGSFQCDCPLGHELSPSREDCVDINECSLSDNLCRNGKCVNMIGTYQCSCNPGYQATPDRQGCTDIDECMIMNGGCDTQCTNSEGSYECSCSEGYALMPDGRSCADIDECENNPDICDGGQCTNIPGEYRCLCYDGFMASMDMKTCIDVNECDLNSNICMFGECENTKGSFICHCQLGYSVKKGTTGCTDVDECEIGAHNCDMHASCLNIPGSFKCSCREGWIGNGIKCIDLDECSNGTHQCSINAQCVNTPGSYRCACSEGFTGDGFTCSDVDECAENINLCENGQCLNVPGAYRCECEMGFTPASDSRSCQDIDECSFQNICVFGTCNNLPGMFHCICDDGYELDRTGGNCTDIDECADPINCVNGLCVNTPGRYECNCPPDFQLNPTGVGCVDNRVGNCYLKFGPRGDGSLSCNTEIGVGVSRSSCCCSLGKAWGNPCETCPPVNSTEYYTLCPGGEGFRPNPITIILEDIDECQELPGLCQGGNCINTFGSFQCECPQGYYLSEDTRICEDIDECFAHPGVCGPGTCYNTLGNYTCICPPEYMQVNGGHNCMDMRKSFCYRSYNGTTCENELPFNVTKRMCCCTYNVGKAWNKPCEPCPTPGTADFKTICGNIPGFTFDIHTGKAVDIDECKEIPGICANGVCINQIGSFRCECPTGFSYNDLLLVCEDIDECSNGDNLCQRNADCINSPGSYRCECAAGFKLSPNGACVDRNECLEIPNVCSHGLCVDLQGSYQCICHNGFKASQDQTMCMDVDECERHPCGNGTCKNTVGSYNCLCYPGFELTHNNDCLDIDECSSFFGQVCRNGRCFNEIGSFKCLCNEGYELTPDGKNCIDTNECVALPGSCSPGTCQNLEGSFRCICPPGYEVKSENCIDINECDEDPNICLFGSCTNTPGGFQCLCPPGFVLSDNGRRCFDTRQSFCFTNFENGKCSVPKAFNTTKAKCCCSKMPGEGWGDPCELCPKDDEVAFQDLCPYGHGTVPSLHDTREDVNECLESPGICSNGQCINTDGSFRCECPMGYNLDYTGVRCVDTDECSIGNPCGNGTCTNVIGSFECNCNEGFEPGPMMNCEDINECAQNPLLCAFRCMNTFGSYECTCPIGYALREDQKMCKDLDECAEGLHDCESRGMMCKNLIGTFMCICPPGMARRPDGEGCVDENECRTKPGICENGRCVNIIGSYRCECNEGFQSSSSGTECLDNRQGLCFAEVLQTICQMASSSRNLVTKSECCCDGGRGWGHQCELCPLPGTAQYKKICPHGPGYTTDGRDIDECKVMPNLCTNGQCINTMGSFRCFCKVGYTTDISGTSCIDLDECSQSPKPCNYICKNTEGSYQCSCPRGYVLQEDGKTCKDLDECQTKQHNCQFLCVNTLGGFTCKCPPGFTQHHTACIDNNECGSQPSLCGAKGICQNTPGSFSCECQRGFSLDATGLNCEDVDECDGNHRCQHGCQNILGGYRCGCPQGYIQHYQWNQCVDENECSNPNACGSASCYNTLGSYKCACPSGFSFDQFSSACHDVNECSSSKNPCNYGCSNTEGGYLCGCPPGYYRVGQGHCVSGMGFNKGQYLSLDTEVDEENALSPEACYECKINGYSKKDSRQKRSIHEPDPTAVEQISLESVDMDSPVNMKFNLSHLGSKEHILELRPAIQPLNNHIRYVISQGNDDSVFRIHQRNGLSYLHTAKKKLMPGTYTLEITSIPLYKKKELKKLEESNEDDYLLGELGEALRMRLQIQLY

SEQ ID NO: 61224 - protein, 15 aa, Homo sapiens
MSCWIPEDSYQASMH

SEQ ID NO: 61225 - protein, 36 aa, Homo sapiens
VAEDYVSVAAFQVMTEDKGVDLGQKPNPYFYSCCHH

SEQ ID NO: 61226 - protein, 28 aa, Homo sapiens
IGLKIKDQKKVERQFSTASDHEQPGVSG

SEQ ID NO: 61227 - protein, 324 aa, Homo sapiens
KKLSRPFQNQTHAKRAYRELVLLKCVNHKNIISLLNVFTPQKTLEEFQDVYLVMELMDANLCQVIHMELDHERMSYLLYQMLCGIKHLHSAGIIHRDLKPSNIVVKSDCTLKILDFGLARTACTNFMMTPYVVTRYYRAPEVILGMGYKENVDIWSVGCIMGELVKGCVIFQGTDHIDQWNKVIEQLGTPSAEFMKKLQPTVRNYVENRPKYPGIKFEELFPDWIFPSESERDKIKTSQARDLLSKMLVIDPDKRISVDEALRHPYITVWYDPAEAEAPPPQIYDAQLEEREHAIEEWKELIYKEVMDWEERSKNGVVKDQPSG

SEQ ID NO: 61228 - protein, 683 aa, Homo sapiens
TMCGIFAYMNYRVPRTRKEIFETLIKGLQRLEYRGYDSAGVAIDGNNHEVKERHIQLVKKRGKVKALDEELYKQDSMDLKVEFETHFGIAHTRWATHGVPSAVNSHPQRSDKGNEFVVIHNGIITNYKDLRKFLESKGYEFESETDTETIAKLIKYVFDNRETEDITFSTLVERVIQQLEGAFALVFKSVHYPGEAVATRRGSPLLIGVRSKYKLSTEQIPILYRTCTLENVKNICKTRMKRLDSSACLHAVGDKAVEFFFASDASAIIEHTNRVIFLEDDDIAAVADGKLSIHRVKRSASDDPSRAIQTLQMELQQIMKGNFSAFMQKEIFEQPESVFNTMRGRVNFETNTVLLGGLKDHLKEIRRCRRLIVIGCGTSYHAAVATRQVLEELTELPVMVELASDFLDRNTPVFRDDVCFFISQSGETADTLLALRYCKDRGALTVGVTNTVGSSISRETDCGVHINAGPEIGVASTKAYTSQFISLVMFGLMMSEDRISLQNRRQEIIRGLRSLPELIKEVLSLEEKIHDLALELYTQRSLLVMGRGYNYATCLEGALKIKEITYMHSEGILAGELKHGPLALIDKQMPVIMVIMKDPCFAKCQNALQQVTARQGRPIILCSKDDTESSKFAYKTIELPHTVDCLQGILSVIPLQLLSFHLAVLRGYDVDFPRNLAKSVTVE

SEQ ID NO: 61229 - protein, 449 aa, Homo sapiens
VGARMLKKQSAGLVLWGAILFVAWNALLLLFFWTRPAPGRPPSVSALDGDPASLTREVIRLAQDAEVELERQRGLLQQIGDALSSQRGRVPTAAPPAQPRVPVTPAPAVIPILVIACDRSTVRRCLDKLLHYRPSAELFPIIVSQDCGHEETAQAIASYGSAVTHIRQPDLSSIAVPPDHRKFQGYYKIARHYRWALGQVFRQFRFPAAVVVEDDLEVAPDFFEYFRATYPLLKADPSLWCVSAWNDNGKEQMVDASRPELLYRTDFFPGLGWLLLAELWAELEPKWPKAFWDDWMRRPEQRQGRACIRPEISRTMTFGRKGVSHGQFFDQHLKFIKLNQQFVHFTQLDLSYLQREAYDRDFLARVYGAPQLQVEKVRTNDRKELGEVRVQYTGRDSFKAFAKALGVMDDLKSGVPRAGYRGIVTFQFRGRRVHLAPPLTWEGYDPSWN

SEQ ID NO: 61230 - protein, 17 aa, Homo sapiens
VLKMKILTQDMTFLAVT

SEQ ID NO: 61231 - protein, 511 aa, Homo sapiens
IADVLIMSDKDDIETPLLTEAAPILEDGNCEPAKNSESVDQGAKPESKSEPVVSTRKRPETKPSSDLETSKVLPIQDNVSKDVPQTRWGYWGSWGKSILSSASATVATVGQGISNVIEKAETSLGIPGPSEISTEVKYVAGETNAKENENSSPVAGAFGVFSTISTAVQSTGKSVISGGLDALEFIGKKTMDVIAEGDPGFKRTKGLMNRNATLSQVLREAKEKEEIRTSNEVTVETDKKTHYGLLFDEFQGLSHLEALEMLSQESEIKVKSILNSLSGEELETLKVELEQLKETFSLAEFCEEEEEEKKGDEDFTKDITELFSQLHVSSKPEKLARARNTAHEWIRKSLTKPLAENEEGEKQSEAENTEQVNKNSIEDIHAFAIRSLAELTACSIELFHKTAALVLHGRKQEVTAIERSQTLSQMTIVLCKELSSLSKEFTTCLTTAGVKEMADVLNPLITAVFLEASNSASYIQDAFQLLLPVLEISLIENKIESHRHELQGQKPLLEH

SEQ ID NO: 61232 - protein, 19 aa, Homo sapiens
IKKVWMAEQKISYDKKKQE

SEQ ID NO: 61233 - protein, 53 aa, Homo sapiens
IDKFVHPKTHKTSHCYRITYRHMERTLSQREVRHIHQALQEAAVQLLGVEGRF

SEQ ID NO: 61234 - protein, 688 aa, Homo sapiens
LPGGEKVVPFWAFLSFRMQPDMSLNVIKMKSSDFLESAELDSGGFGKVSLCFHRTQGLMIMKTVYKGPNCIEHNEALLEEAKMMNRLRHSRVVKLLGVIIEEGKYSLVMEYMEKGNLMHVLKAEMSTPLSVKGRIILEIIEGMCYLHGKGVIHKDLKPENILVDNDFHIKIADLGLASFKMWSKLNNEEHNELREVDGTAKKNGGTLYYMAPEHLNDVNAKPTEKSDVYSFAVVLWAIFANKEPYENAICEQQLIMCIKSGNRPDVDDITEYCPREIISLMKLCWEANPEARPTFPGIEEKFRPFYLSQLEESVEEDVKSLKKEYSNENAVVKRMQSLQLDCVAVPSSRSNSATEQPGSLHSSQGLGMGPVEESWFAPSLEHPQEENEPSLQSKLQDEANYHLYGSRMDRQTKQQPRQNVAYNREEERRRRVSHDPFAQQRPYENFQNTEGKGTAYSSAASHGNAVHQPSGLTSQPQVLYQNNGLYSSHGFGTRPLDPGTAGPRVWYRPIPSHMPSLHNIPVPETNYLGNTPTMPFSSLPPTDESIKYTIYNSTGIQIGAYNYMEIGGTSSSLLDSTNTNFKEEPAAKYQAIFDNTTSLTDKHLDPIRENLGKHWKNCARKLGFTQSQIDEIDHDYERDGLKEKVYQMLQKWVMREGIKGATVGKLAQALHQCSRIDLLSSLIYVSQN

SEQ ID NO: 61235 - protein, 16 aa, Homo sapiens
ILKKYRNMVVRACGCH

SEQ ID NO: 61236 - protein, 44 aa, Homo sapiens
VRCNMKMELEQANERECEVLKKIWGSAQGMDSMLKYLQRKIDEF

SEQ ID NO: 61237 - protein, 154 aa, Homo sapiens
VTHILSVHDSARPMLEGVKYLCIPAADSPSQNLTRHFKESIKFIHECRLRGESCLVHCLAGVSRSVTLVIAYIMTVTDFGWEDALHTVRAGRSCANPNVGFQRQLQEFEKHEVHQYRQWLKEEYGESPLQDAEEAKNILAAPGILKFWAFLRRL

SEQ ID NO: 61238 - protein, 115 aa, Homo sapiens
LRSVVDSAGLRQMQAWGSLLSGLRREEWRSPSSHCSVPSLAAGLLFGSLAGLGAYQLYQDPRNVWGFLAATSVTFVGVMGMRSYYYGKFMPVGLIAGASLLMAAKVGVRMLMTSD

SEQ ID NO: 61239 - protein, 12 aa, Homo sapiens
VPRPRLSGAMRD

SEQ ID NO: 61240 - protein, 330 aa, Homo sapiens
VSPKPGPYVKEMNDAATFYTNRVLKDYKHSDLRHVDWVKSYLNIWSELQAYIKEHHTTGLTWSKTGPVASTVSAFSVLSSGPGLPPPPPPLPPPGPPPLFENEGKKEESSPSRSALFAQLNQGEAITKGLRHVTDDQKTYKNPSLRAQGGQTQSPTKSHTPSPTSPKSYPSQKHAPVLELEGKKWRVEYQEDRNDLVISETELKQVAYIFKCEKSTIQIKGKVNSIIIDNCKKLGLVFDNVVGIVEVINSQDIQIQVMGRVPTISINKTEGCHIYLSEDALDCEIVSAKSSEMNILIPQDGDYREFPIPEQFKTAWDGSKLITEPAEIMA

SEQ ID NO: 61241 - protein, 16 aa, Homo sapiens
LALLGLLFAFFVKVYN

SEQ ID NO: 61242 - protein, 36 aa, Homo sapiens
IFWLITGIMFMGSGLIWRRLLSFLGRQLEAPLPPMV

SEQ ID NO: 61243 - protein, 226 aa, Homo sapiens
LTAAGPRPGLLCFTIYIMNPSMKQKQEEIKENIKNSSVPRRTLKMIQPSASGSLVGRENELSAGLSKRKHRNDHLTSTTSSPGVIVPESSENKNLGGVTQESFDLMIKENPSSQYWKEVAEKRRKALYEALKENEKLHKEIEQKDNEIARLKKENKELAEVAEHVQYMAELIERLNGEPLDNFESLDNQEFDSEEETVEDSLVEDSEIGTCAEGTVSSSTDAKPCI

SEQ ID NO: 61244 - protein, 63 aa, Homo sapiens [sequence omitted]

SEQ ID NO: 61245 - protein, 96 aa, Homo sapiens
KRSRKESYSVYVYKVLKQVHPDTGISSKAMGIMNSFVNDIFERIAGEASRLAHYNKRSTITSREIQTAVRLLLPGELAKHAVSEGTKAVTKYTSSK

SEQ ID NO: 61246 - protein, 104 aa, Homo sapiens
TLRCHLSPEKNAEDMEVRWFRSQFSPAVFVYKGGRERTEEQMEEYRGRTTFVSKDISRGSVALVIHNITAQENGTYRCYFQEGRSYDEAILHLVVAELLEAEVY

SEQ ID NO: 61247 - protein, 5 aa, Homo sapiens
TKKGK

SEQ ID NO: 61248 - protein, 4 aa, Homo sapiens
KQKI

SEQ ID NO: 61249 - protein, 24 aa, Homo sapiens
RHFPQTVTGAYLSGVREASKIAAF

SEQ ID NO: 61250 - protein, 81 aa, Homo sapiens
LRDNIQGITKPAIRRLARRGGVKRISGLIYEETRGVLKVFLENVIRDAVTYTEHAKRKTVTAMDVVYALKRQGRTLYGFGG

SEQ ID NO: 61251 - protein, 117 aa, Homo sapiens
KAKTRSSRAGLQFPVGRVHRLLRKGNYAERVGAGAPVYLAAVLEYLTAEILELAGNAARDNKKTRIIPRHLQLAIRNDEELNKLLGKVTIAQGGVLPNIQAVLLPKKTESHHKAKGK

SEQ ID NO: 61252 - protein, 113 aa, Homo sapiens
KRWVRLLLLVMSGRGKGGKGLGKGGAKRHRKVLRDNIQGITKPAIRRLARRGGVKRISGLIYEETRGVLKVFLENVIRDAVTYTEHAKRKTVTAMDVVYALKRQGRTLYGFGG

SEQ ID NO: 61253 - protein, 115 aa, Homo sapiens
KTRSSRAGLQFPVGRVHRLLRKGNYAERVGAGAPVYLAAVLEYLTAEILELAGNAARDNKKTRIIPRHLQLAIRNDEELNKLLGKVTIAQGGVLPNIQAVLLPKKTESHHKAKGK

SEQ ID NO: 61254 - protein, 148 aa, Homo sapiens
IPGVSAPWSQRQEACVAGGPDRMSVMDLANTCSSFQSDLDFCSDCGSVLPLPGAQDTVTCIRCGFNINVRDFEGKVVKTSVVFHQLGTAMPMSVEEGPECQGPVVDRRCPRCGHEGMAYHTRQMRSADEGQTVFYTCTNCKFQEKEDS

SEQ ID NO: 61255 - protein, 97 aa, Homo sapiens
IKLRKRKPEKKVEWTSDTVDNEHMGRRSSKCCCIYEKPRAFGESSTESDEEEEEGCGHTHCVRGHRKGRRRATLGPTPTTPPQPPDPSQPPPGPMQH

SEQ ID NO: 61256 - protein, 137 aa, Homo sapiens
VEAAHCVLAQDPENQALARFYCYTERTIAKRLVLRRDPSVKRTLCRGCSSLLVPGLTCTQRQRRCRGQRWTVQTCLTCQRSQRFLNDPGHLLWGDRPEAQLGSQADSKPLQPLPNTAHSISDRLPEEKMQTQGSSNQ

SEQ ID NO: 61257 - protein, 42 aa, Homo sapiens
LFNNHGLQVQQQQQRNLSLHEYMSMELLQETGVSVPKGYVAK

SEQ ID NO: 61258 - protein, 170 aa, Homo sapiens
MNVRNFLKEDAMKTKTHYHAMHADCLQELRRYLESGVVLRRTVPPMVNVTRSEASEGNITVTCRASSFYPRNIILTWRQDGVSLSHDTQQWGDVLPDGNGTYQTWVATRICRGEEQRFTCYMEHSGNHSTHPVPSGKVLVLQSHWQTFHVSAVAAGCCYFCYYYFLCPLL

SEQ ID NO: 61259 - protein, 28 aa, Homo sapiens
IETWELGRVMGAVTALSQALNRHAEALK

SEQ ID NO: 61260 - protein, 45 aa, Homo sapiens
TSWRILPTDTEPSSRPGPPLQSTSIRLEMAFVPAYDWSQRAVQTP

SEQ ID NO: 61261 - protein, 270 aa, Homo sapiens
LSSSIEEGLRMQAMHRAQRVRRPIPGSDQTTTMSGGEGEPGEGEGDGEDVSSDSAPDSAPGPAPKRPRGGGAGGSSVGTGGGGTGGVGGGAGSEDSGDRGGTLGGGTLGPPSPPGAPSPPEPGGEIELVFRPHPLLVEKGEYCQTRYVKTTGNATVDHLSKYLALRIALERRQQQEAGEPGGPGGGASDTGGPDGCGGEGGGAGGGDGPEEPALPSLEGVSEKQYTIYIAPGGGAFTTLNGSLTLELVNEKFWKVSRPLELCYAPTKDPK

SEQ ID NO: 61262 - protein, 9 aa, Homo sapiens
LCCSHVYCV

SEQ ID NO: 61263 - protein, 13 aa, Homo sapiens
VCPRRNKSVGLVC

SEQ ID NO: 61264 - protein, 722 aa, Homo sapiens
KKTKGGNVFAALIQDQSEEEEEEEKHPPKPAKPEKNRINKAVSEEQQPALKGKKGKEEKSKGKAKPQNKFAALDNEEEDKEEEIIKEKEPPKQGKEKAKKAEQGSEEEGEGEEEEEEGGESKADDPYAHLSKKEKKKLKKQMEYERQVASLKAANAAENDFSVSQAEMSSRQAMLENASDIKLEKFSISAHGKELFVNADLYIVAGRRYGLVGPNGKGKTTLLKHIANRALSIPPNIDVLLCEQEVVADETPAVQAVLRADTKRLKLLEEERRLQGQLEQGDDTAAERLEKVYEELRATGAAAAEAKARRILAGLGFDPEMQNRPTQKFSGGWRMRVSLARALFMEPTLLMLDEPTNHLDLNAVIWLNNYLQGWRKTLLIVSHDQGFLDDVCTDIIHLDAQRLHYYRGNYMTFKKMYQQKQKELLKQYEKQEKKLKELKAGGKSTKQAEKQTKEALTRKQQKCRRKNQDEESQEAPELLKRPKEYTVRFTFPDPPPLSPPVLGLHGVTFGYQGQKPLFKNLDFGIDMDSRICIVGPNGVGKSTLLLLLTGKLTPTHGEMRKNHRLKIGFFNQQYAEQLRMEETPTEYLQRGFNLPYQDARKCLGRFGLESHAHTIQICKLSGGQKARVVFAELACREPDVLILDEPTNNLDIESIDALGEAINEYKGAVIVVSHDARLITETNCQLWVVEEQSVSQIDGDFEDYKREVLEALGEVMVSRPRE

SEQ ID NO: 61265 - protein, 435 aa, Homo sapiens
LPLAGLAPVAGAHPAAAADSSRARGSLRGRGSRTCAGDQRKVPARLGGQQGPGRGCGCRRGPHRATFLPGGCRWKMSQERPTFYRQELNKTIWEVPERYQNLSPVGSGAYGSVCAAFDTKTGLRVAVKKLSRPFQSIIHAKRTYRELRLLKHMKHENVIGLLDVFTPARSLEEFNDVYLVTHLMGADLNNIVKCQKLTDDHVQFLIYQILRGLKYIHSADIIHRDLKPSNLAVNEDCELKILDFGLARHTDDEMTGYVATRWYRAPEIMLNWMHYNQTVDIWSVGCIMAELLTGRTLFPGTDHIDQLKLILRLVGTPGAELLKKISSESARNYIQSLTQMPKMNFANVFIGANPLAVDLLEKMLVLDSDKRITAAQALAHAYFAQYHDPDDEPVADPYDQSFESRDLLIDEWKSLTYDEVISFVPPPLDQEEMES

SEQ ID NO: 61266 - protein, 66 aa, Homo sapiens
KPFQDYQKLSSNLGGPGSSRTPPTGRSFSGLNSRLKATPSTYSGVFRTQRVDLYQQVKEKPLWPQL

SEQ ID NO: 61267 - protein, 676 aa, Homo sapiens
VLSFRRSEGLSSCRGSRPPFPAPSLRAEPTEQGTGMAKAAAIGIDLGTTYSCVGVFQHGKVEIIANDQGNRTTPSYVAFTDTERLIGDAAKNQVALNPQNTVFDAKRLIGRKFGDPVVQSDMKHWPFQVINDGDKPKVQVSYKGETKAFYPEEISSMVLTKMKEIAEAYLGYPVTNAVITVPAYFNDSQRQATKDAGVIAGLNVLRIINEPTAAAIAYGLDRTGKGERNVLIFDLGGGTFDVSILTIDDGIFEVKATAGDTHLGGEDFDNRLVNHFVEEFKRKHKKDISQNKRAVRRLRTACERAKRTLSSSTQASLEIDSLFEGIDFYTSITRARFEELCSDLFRSTLEPVEKALRDAKLDKAQIHDLVLVGGSTRIPKVQKLLQDFFNGRDLNKSINPDEAVAYGAAVQAAILMGDKSENVQDLLLLDVAPLSLGLETAGGVMTALIKRNSTIPTKQTQIFTTYSDNQPGVLIQVYEGERAMTKDNNLLGRFELSGIPPAPRGVPQIEVTFDIDANGILNVTATDKSTGKANKITITNDKGRLSKEEIERMVQEAEKYKAEDEVQRERVSAKNALESYAFNMKSAVEDEGLKGKISEADKKKVLDKCQEVISWLDANTLAEKDEFEHKRKELEQVCNPIISGLYQGAGGPGPGGFGAQGPKGGSGSGPTIEEVD

SEQ ID NO: 61268 - protein, 967 aa, Homo sapiens
LDVSKLTDTICGVGNMSANASDQERTPWHVTIKPKSQETCRGALISDQWVLTAAHCFRDGNDHSLWRVNVGDPKSQWGKEFLIEKAVISPGFDVFAKKNQGILEFYGDDIALLKLAQKVKMSTHARPICLPCTMEANLALRRPQGSTCRDHENELLNKQSVPAHFVALNGSKLNINLKMGVEWTSCAEVVSQEKTMFPNLTDVREVVTDQFLCSGTQEDESPCKGVTTTPWSLARPQGSCSLEGVEIKGGSFRLLQEGQALEYVCPSGFYPYPVQTRTCRSTGSWSTLKTQDQKTVRKAECRAIHCPRPHDFENGEYWPRSPYYNVSDEISFHCYDGYTLRGSANRTCQVNGRWSGQTAICDNGAGYCSNPGIPIGTRKVGSQYRLEDSVTYHCSRGLTLRGSQRRTCQEGGSWSGTEPSCQDSFMYDTPQEVAEAFLSSLTETIEGVDAEDGHGPGEQQKRKIVLDPSGSMNIYLVLDGSDSIGASNFTGAKKCLVNLIEKVASYGVKPRYGLVTYATYPKIWVKVSEADSSNADWVTKQLNEINYEDHKLKSGTNTKKALQAVYSMMSWPDDVPPEGWNRTRHVIILMTDGLHNMGGDPITVIDEIRDLLYIGKDRKNPREDYLDVYVFGVGPLVNQVNINALASKKDNEQHVFKVKDMENLEDVFYQMIDESQSLSLCGMVWEHRKGTDYHKQPWQAKISVIRPSKGHESCMGAVVSEYFVLTAAHCFTVDDKEHSIKVSVGGEKRDLEIEVVLFHPNYNINGKKEAGIPEFYDYDVALIKLKNKLKYGQTIRPICLPCTEGTTRALRLPPTTTCQQQKEELLPAQDIKALFVSEEEKKLTRKEVYIKNGDKKGSCERDAQYAPGYDKVKDISEVVTPRFLCTGGVSPYADPNTCRGDSGGPLIVHKRSRFIQVGVISWGVVDVCKNQKRQKQVPAHARDFHINLFQVLPWLKEKLQDEDLGFL

SEQ ID NO: 61269 - protein, 82 aa, Homo sapiens
LYDMVCGDIPFEHDEEIIRGQVFFRQRVSSECQHLIRWCLALRPSDRPTFEEIQNHPWMQDVLLPQETAEIHLHSLSPGPSK

SEQ ID NO: 61270 - protein, 750 aa, Homo sapiens [sequence omitted]

SEQ ID NO: 61271 - protein, 26 aa, Homo sapiens
KEKDSPHMQDPNQADEEAMTQIIRVS

SEQ ID NO: 61272 - protein, 313 aa, Homo sapiens
VDPEDERAIEMFMNKNPPARRTLADIIMEKLTEKQTEVETVMSEVSGFPMPQLDPRVLEVYRGVREVLSKYRSGKLPKAFKIIPALSNWEQILYVTEPEAWTAAAMYQATRIFASNLKERMAQRFYNLVLLPRVRDDVAEYKRLNFHLYMALKKALFKPGAWFKGILIPLCESGTCTLREAIIVGSIITKCSIPVLHSSAAMLKIAEMEYSGANSIFLRLLLDKKYALPYRVLDALVFHFLGFRTEKRELPVLWHQCLLTLVQRYKADLATDQKEALLELLRLQPHPQLSPEIRRELQSAVPRDVEDVPITVE

SEQ ID NO: 61273 - protein, 90 aa, Homo sapiens
RRTLQVVVSSLLTEAGFESAEKASVETLTEMLQSYISEIGRSAKSYCEHTARTQPTLSDIVVTLVEMGFNVDTLPAYAKRSQRMVITARK

SEQ ID NO: 61274 - protein, 333 aa, Homo sapiens
VVLGEFGVRNVHTTDFPGNYSGYDDAWDQDRFEKNFRVDVVHMDENSLEFDMVGIDAAIANAFRRILLAEVPTMAVEKVLVYNNTSIVQDEILAHRLGLIPIHADPRLFEYRNQGDEEGTEIDTLQFRLQVRCTRNPHAAKDSSDPNELYVNHKVYTRHMTWIPLGNQADLFPEGTIRPVHDDILIAQLRPGQEIDLLMHCVKGIGKDHAKFSPVATASYRLLPDITLLEPVEGEAAEELSRCFSPGVIEVQEVQGKKVARVANPRLDTFSREIFRNEKLKKVVRLARVRDHYIFSVESTGVLPPDVLVSEAIKVLMGKCRRFLDELDAVQMD

SEQ ID NO: 61275 - protein, 14 aa, Homo sapiens
IWFQAPVTFKGFRE

SEQ ID NO: 61276 - protein, 271 aa, Homo sapiens
VCADSAPAARAPQALARASGRGGRVARRGAEESGPPHSPSRRGSASRAGPGRASETMNFLLSWVHWSLALLLYLHHAKWSQAAPMAEGGGQNHHEVVKFMDVYQRSYCHPIETLVDIFQEYPDEIEYIFKPSCVPLMRCGGCCNDEGLECVPTEESNITMQIMRIKPHQGQHIGEMSFLQHNKCECRPKKDRARQEKKSVRGKGKGQKRKRKKSRYKSWSVPCGPCSERRKHLFVQDPQTCKCSCKNTDSRCKARQLELNERTCRCDKPRR

SEQ ID NO: 61277 - protein, 368 aa, Homo sapiens
VNHAAVAVGHRVYSFGGYCSGEDYETLRQIDVHIFNAVSLRWTKLPPVKSAIRGQAPVVPYMRYGHSTVLIDDTVLLWGGRNDTEGACNVLYAFDVNTHKWFTPRVSGTVPGARDGHSACVLGKIMYIFGGYEQQADCFSNDIHKLDTSTMTWTLICTKGSPARWRDFHSATMLGSHMYVFGGRADRFGPFHSNNEIYCNRIRVFDTRTEAWLDCPPTPVLPEGRRSHSAFGYNGELYIFGGYNARLNRHFHDLWKFNPVSFTWKKIEPKGKGPCPRRRQCCCIVGDKIVLFGGTSPSPEEGLGDEFDLIDHSDLHILDFSPSLKTLCKLAVIQYNLDQSCLPHDIRWELNAMTTNSNISRPIVSSHG

SEQ ID NO: 61278 - protein, 39 aa, Homo sapiens
KGMHIRKATKYLKDVTLQKQCVPFQRYNAGVGRCAQAKQ

SEQ ID NO: 61279 - protein, 212 aa, Homo sapiens [sequence omitted]

SEQ ID NO: 61280 - protein, 43 aa, Homo sapiens
VQIPVSAVQLHQMAVIGQQAGSSSNLTELQVVNLDTAHSTKSE

SEQ ID NO: 61281 - protein, 6 aa, Homo sapiens
ITVKIN

SEQ ID NO: 61282 - protein, 61 aa, Homo sapiens
IDHVSDLMTINLLGKELADWDATPFVKSWSNCNHRLATDTRVRQKSTKVFHENQLAIWNLK

SEQ ID NO: 61283 - protein, 165 aa, Homo sapiens
MTQYQRKLWEDMEDLVHDPEFDRGKARCIISDGMDAGLWQLCTTRDIMDSVVRVMAMAIDYRRQAWLRLTSLTKKTQEKISHLPFDGTSLFGQDVKAVVAEDNNIKENDYKDHKYYNQHRYFYSHDQKAHYHNRGYSKGDWYKPRNHPYRYRKKGDSPERHGYKN

SEQ ID NO: 61284 - protein, 360 aa, Homo sapiens
LKDTMGIADKTENTLERNKIEPLGYCEDAESNRQLESTEFNKSNLEVVDTSTFGPESNILENAICDVPDQNSKQLNAIESTKIESHETANLQDDRNSQSSSVSYLESKSVKSKHTKPVIHSKQNMTTDAPKKIVAAKYEVIHSKTKVNVKSVKRNTDVPESQQNFHRPVKVRKKQIDKEPKIQSCNSGVKSVKNQAHSVLKKTLQDQTLVQIFKPLTHSLSDKSHAHPGCLKEPHHPAQTGHVSHSSQKQCHKPQQQAPAMKTNSHVKEELEHPGVEHFKEEDKLKLKKPEKNLQPRQRRSSKSFSLDEPPLFIPDNIATIRREGSDHSSSFESKYMWTPSKQCGFCKKPHGNRCVCMCV

SEQ ID NO: 61285 - skipped

SEQ ID NO: 61286 - protein, 443 aa, Homo sapiens
LREEDNKYCADCEAKGPRWASWNIGVFICIRCAGIHRNLGVHISRVKSVNLDQWTAEQIQCMQDMGNTKARLLYEANLPENFRRPQTDQAVEFFIRDKYEKKKYYDKNAIAITNISSSDAPLQPLVSSPSLQAAVDKNKLEKEKEKKKEEKKREKEPEKPAKPLTAEKLQKKDQQLEPKKSTSPKKAAEPTVDLLGLDGPAVAPVTNGNTTVPPLNDDLDIFGPMISNPLPATVMPPAQGTPSAPAAATLSTVTSGDLDLFTEQTTKSEEVAKKQLSKDSILSLYGTGTIQQQSTPGVFMGPTNIPFTSQAPAAFQGFPSMGVPVPAAPGLIGNVMGQSPSMMVGMPMPNGFMGNAQTGVMPLPQNVVGPQGGMVGQMGAPQSKFGLPQAQQPQWSLSQMNQQMAGMSISSATPTAGFGQPSSTTAGWSGSSSGQTLSTQLWK

SEQ ID NO: 61287 - protein, 26 aa, Homo sapiens
MNIEKKLNDNSRSEAPNWATQDSGFY

SEQ ID NO: 61288 - protein, 342 aa, Homo sapiens
VAHFTFQPDPEPREYGQTQKMNLFQSVTSALDNSLAKDPTAVIFGEDVAFGGVFRCTVGLRDKYGKDRVFNTPLCEQGIVGFGIGIAVTGATAIAEIQFADYIFPAFDQIVNEAAKYRYRSGDLFNCGSLTIRSPWGCVGHGALYHSQSPEAFFAHCPGIKVVIPRSPFQAKGLLLSCIEDKNPCIFFEPKILYRAAAEEVPIEPYNIPLSQAEVIQEGSDVTLVAWGTQVHVIREVASMAKEKLGVSCEVIDLRTIIPWDVDTICKSVIKTGRLLISHEAPLTGGFASEISSTVQEECFLNLEAPISRVCGYDTPFPHIFEPFYIPDKWKCYDALRKMINY

SEQ ID NO: 61289 - protein, 26 aa, Homo sapiens
VPFTEQGVRLLHDLNFSKNEIHSFTA

SEQ ID NO: 61290 - protein, 300 aa, Homo sapiens
TLLVDGTRFVVNPQIFTAHPDTMLGRMFGPGREYNFTRPNEKGEYEIAEGISATVFRTVLDYYKTGIINCPDGISIPDLRDTCDYLCINFDFNTIRCQDLSALLHELSNDGAHKQFDHYLEELILPIMVGCAKKGERECHIVVLTDEDSVDWDEDHPPPMGEEYSQILYSSKLYRFFKYIENRDVAKTVLKERGLKNIRIGIEGYPTCKEKIKRRPGGRSEVIYNYVQRPFIQMSWEKEEGKSRHVDFQCVRSKSLTNLVAAGDDVLEDQEILMHHPPQVDELDRLNAPLSQMASNDFQD

SEQ ID NO: 61291 - protein, 6 aa, Homo sapiens
KAWRPV

SEQ ID NO: 61292 - protein, 56 aa, Homo sapiens
RRVCVLAFILLSWEPTAGGSFSGSLGGRWMGSRGPRGTGPGKRRRRRRRSRSPGEA

SEQ ID NO: 61293 - protein, 1114 aa, Homo sapiens
RKMAAGKSGGSAGEITFLEALARSESKRDGGFKNNWSFDHEEESEGDTDKDGTNLLSVDEDEDSETSKGKKLNRRSEIVANSSGEFILKTYVRRNKSESFKTLKGNPIGLNMLSNNKKLSENTQNTSLCSGTVVHGRRFHHAHAQIPVVKTAAQSSLDRKERKEYPPHVQKVEINPVRLSRLQGVERIMKKTEESESQVEPEIKRKVQQKRHCSTYQPTPPLSPASKKCLTHLEDLQRNCRQAITLNESTGPLLRTSIHQNSGGQKSQNTGLTTKKFYGNNVEKVPIDIIVNCDDSKHTYLQTNGKVILPGAKIPKITNLKERKTSLSDLNDPIILSSDDDDDNDRTNRRESISPQPADSACSSPAPSTGKVEAALNENTCRAERELRSIPEDSELNTVTLPRKARMKDQFGNSIINTPLKRRKVFSQEPPDALALSCQSSFDSVILNCRSIRVGTLFRLLIEPVIFCLDFIKIQLDEPDHDPVEIILNTSDLTKCEWCNVRKLPVVFLQAIPAVYQKLSIQLQMNKEDKVWNDCKGVNKLTNLEEQYIILIFQNGLDPPANMVFESIINEIGIKNNISNFFAKIPFEEANGRLVACTRTYEESIKGSCGQKENKIKTVSFESKIQLRSKQEFQFFDEEEETGENHTIFIGPVEKLIVYPPPPAKGGISVTNEDLHCLNEGEFLNDVIIDFYLKYLVLEKLKKEDADRIHIFSSFFYKRLNQRERRNHETTNLSIQQKRHGRVKTWTRHVDIFEKDFIFVPLNEAAHWFLAVVCFPGLEKPKYEPNPHYHENAVIQKCSTVEDSCISSSASEMESCSQNSSAKPVIKKMLNKKHCIAVIDSNPGQEESDPRYKRNICSVKYSVKKINHTASENEEFNKGESTSQKVADRTKSENGLQNESLSSTHHTDGLSKIRLNYSDESPEAGKMLEDELVDFSEDQDNQDDSSDDGFLADDNCSSEIGQWHLKPTICKQPCILLMDSLRGPSRSNVVKILREYLEVEWEVKKGSKRSFSKDVMKGSNPKVPQQNNFSDCGVYVLQYVESFFENPILSFELPMNLANWFPPPRMRTKREEIRNIILKLQEDQSKEKRKHKDTYSTEAPLGEGTEQYVNSISD

SEQ ID NO: 61294 - protein, 1260 aa, Homo sapiens
IVDPPSKMEDGKPVWAPHPTDGFQMGNIVDIGPDSLTIEPLNQKGKTFLALINQVFPAEEDSKKDVEDNCSLMYLNEATLLHNIKVRYSKDRIYTYVANILIAVNPYFDIPKIYSSEAIKSYQGKSLGTRPPHVFAIADKAFRDMKVLKMSQSIIVSGESGAGKTENTKFVLRYLTESYGTGQDIDDRIVEANPLLEAFGNAKTVRNNNSSRFGKFVEIHFNEKSSVVGGFVSHYLLEKSRICVQGKEERNYHIFYRLCAGASEDIREKLHLSSPDNFRYLNRGCTRYFANKETDKQILQNRKSPEYLKAGSMKDPLLDDHGDFIRMCTAMKKIGLDDEEKLDLFRVVAGVLHLGNIDFEEAGSTSGGCNLKNKSAQSLEYCAELLGLDQDDLRVSLTTRVMLTTAGGTKGTVIKVPLKVEQANNARDALAKTVYSHLFDHVVNRVNQCFPFETSSYFIGVLDIAGFEYFEHNSFEQFCINYCNEKLQQFFNERILKEEQELYQKEGLGVNEVHYVDNQDCIDLIEAKLVGILDILDEENRLPQPSDQHFTSAVHQKHKDHFRLTIPRKSKLAVHRNIRDDEGFIIRHFAGAVCYETTQFVEKNNDALHMSLESLICESRDKFIRELFESSTNNNKDTKQKAGKLSFISVGNKFKTQLNLLLDKLRSTGASFIRCIKPNLKMTSHHFEGAQILSQLQCSGMVSVLDLMQGGYPSRASFHELYNMYKKYMPDKLARLDPRLFCKALFKALGLNENDYKFGLTKVFFRPGKFAEFDQIMKSDPDHLAELVKRVNHWLTCSRWKKVQWCSLSVIKLKNKIKYRAEACIKMQKTIRMWLCKRRHKPRIDGLVKVGTLKKRLDKFNEVVSVLKDGKPEMNKQIKNLEISIDTLMAKIKSTMMTQEQIQKEYDALVKSSEELLSALQKKKQQEEEAERLRRIQEEMEKERKRREEDEKRRRKEEEERRMKLEMEAKRKQEEEERKKREDDEKRIQAEVEAQLARQKEEESQQQAVLEQERRDRELALRIAQSEAELISDEAQADLALRRGPAVLATKAAAGTKKYDLSKWKYAELRDTINTSCDIELLAACREEFHRRLKVYHAWKSKNKKRNTETEQRAPKSVTDYAQQNPAAQIPARQREIEMNRQQRFFRIPFIRPADQYKDPQSKKKGWWYAHFDGPWIARQMELHPDKPPILLVAGKDDMEMCELNLEETGLTRKRGAEILPRQFEEIWERCGGIQYLQNAIESRQARPTYATAMLQSLLK

SEQ ID NO: 61295 - protein, 46 aa, Homo sapiens
VITNRERHPGSFDVFHMKDANGHSFATQLSNIFVIGKGNKPWISLP

SEQ ID NO: 61296 - protein, 29 aa, Homo sapiens [sequence omitted]

SEQ ID NO: 61297 - protein, 290 aa, Homo sapiens
VCITEVIKLLLSVGILAKETGSLGRFKASLRENVLGSPKELLKLSVPSLVYAVQNNMAFLALSNLDAAVYQVTYQLKIPCTALCTVLMLNRTLSKLQWVSVFMLCAGVTLVQWKPAQATKVVVEQNPLLGFGAIAIAVLCSGFAGVYFEKVLKSSDTSLWVRNIQMYLSGIIVTLAGVYLSDGAEIKEKGFFYGYTYYVWFVIFLASVGGLYTSVVVKYTDNIMKGFSAAAAIVLSTIASVMLFGLQITLTFALGTLLVCVSIYLYGLPRQDTTSIQQGETASKERVIGV

SEQ ID NO: 61298 - protein, 41 aa, Homo sapiens
IIAWMFRAAIQCEFSKQEFMDGMTELGCDSIEKLKAQIPKM

SEQ ID NO: 61299 - protein, 12 aa, Homo sapiens
ISIGKATGRGQY

SEQ ID NO: 61300 - protein, 1417 aa, Homo sapiens
LVTAPGIIRPGGNVTIGVELLEHCPSQVTVKAELLKTASNLTVSVLEAEGVFEKGSFKTLTLPSLPLNSADEIYELRVTGRTQDEILFSNSTRLSFETKRISVFIQTDKALYKPKQEVKFRIVTLFSDFKPYKTSLNILIKDPKSNLIQQWLSQQSDLGVISKTFQLSSHPILGDWSIQVQVNDQTYYQSFQVSEYVLPKFEVTLQTPLYCSMNSKHLNGTITAKYTYGKPVKGDVTLTFLPLSFWGKKKNITKTFKINGSANFSFNDEEMKNVMDSSNGLSEYLDLSSPGPVEILTTVTESVTGISRNVSTNVFFKQHDYIIEFFDYTTVLKPSLNFTATVKVTRADGNQLTLEERRNNVVITVTQRNYTEYWSGSNSGNQKMEAVQKINYTVPQSGTFKIEFPILEDSSELQLKAYFLGSKSSMAVHSLFKSPSKTYIQLKTRDENIKVGSPFELVVSGNKRLKELSYMVVSRGQLVAVGKQNSTMFSLTPENSWTPKACVIVYYIEDDGEIISDVLKIPVQLVFKNKIKLYWSKVKAEPSEKVSLRISVTQPDSIVGIVAVDKSVNLMNASNDITMENVVHELELYNTGYYLGMFMNSFAVFQECGLWVLTDANLTKDYIDGVYDNAEYAERFMEENEGHIVDIHDFSLGSSPHVRKHFPETWIWLDTNMGYRIYQEFEVTVPDSITSWVATGFVISEDLGLGLTTTPVELQAFQPFFIFLNLPYSVIRGEEFALEITIFNYLKDATEVKVIIEKSDKFDILMTSNEINATGHQQTLLVPSEDGATVLFPIRPTHLGEIPITVTALSPTASDAVTQMILVKAEGIEKSYSQSILLDLTDNRLQSTLKTLSFSFPPNTVTGSERVQITAIGDVLGPSINGLASLIRMPYGCGEQNMINFAPNIYILDYLTKKKQLTDNLKEKALSFMRQGYQRELLYQREDGSFSAFGNYDPSGSTWLSAFVLRCFLEADPYIDIDQNVLHRTYTWLKGHQKSNGEFWDPGRVIHSELQGGNKSPVTLTAYIVTSLLGYRKYQPNIDVQESIHFLESEFSRGISDNYTLALITYALSSVGSPKAKEALNMLTWRAEQEGGMQFWVSSESKLSDSWQPRSLDIEVAAYALLSHFLQFQTSEGIPIMRWLSRQRNSLGGFASTQDTTVALKALSEFAALMNTERTNIQVTVTGPSSPSPVKFLIDTHNRLLLQTAELAVVQPTAVNISANGFGFAICQLNVVYNVKASGSSRRRRSIQNQEAFDLDVAVKENKDDLNHVDLNVCTSFSGPGRSGMALMEVNLLSGFMVPSEAISLSETVKKVEYDHGKLNLYLDSVNETQFCVNIPAVRNFKVSNTQDASVSIVDYYEPRRQAVRSYNSEVKLSSCDLCSDVQGCRPCEDGASGSHHHSSVIFIFCFKLLYFMELWL

SEQ ID NO: 61301 - protein, 6 aa, Homo sapiens
KNLLMS

SEQ ID NO: 61302 - protein, 155 aa, Homo sapiens
MLGKQTPSGTTCHCIVDSCGSRMRELARALGGSSTLMGGRAEKPPGGGLSPWTIATSIPRAVAAQPRRRQPCRQPPNQLTTVPPSSPSGLAAPRHAAVMSWMRGRTSVHAPILTPAQSVAACRPSWQAQSWMKSRTMMRLSRPCSTAAQPACHLQ

SEQ ID NO: 61303 - protein, 115 aa, Homo sapiens
KRMVLNVEREKNMILEQQAQLQREKEQDQMKLYAKLEKLDVLEKECFRLTTTQKTAEDKIKHLEEKLKEEEHQRKLFQDKASELQTGLEISKIIMSSVSNLKHSKEKKKSSKVCI

SEQ ID NO: 61304 - protein, 209 aa, Homo sapiens [sequence omitted]

SEQ ID NO: 61305 - protein, 29 aa, Homo sapiens
LCRNQPQFPLFVFFSKYGKGSGEQCSGAG

SEQ ID NO: 61306 - protein, 193 aa, Homo sapiens
LDNPSPFYNPFQFEITFECIEDLSEDLEWKIIYVGSAESEEYDQVLDSVLVGPVPAGRHMFVFQADAPNPGLIPDADAVGVTVVLITCTYRGQEFIRVGYYVNNEYTETELRENPPVKPDFSKLQRNILASNPRVTRFHINWEDNTEKLEDAESSNPNLQSLLSTDALPSASKGWSTSENSLNVMLESHMDCM

SEQ ID NO: 61307 - protein, 24 aa, Homo sapiens
IRSSFRLCFSGSCSRRKAYVCISG

SEQ ID NO: 61308 - protein, 967 aa, Homo sapiens
LEIWRSDATMRTHTRGAPSVFFIYLLCFVSAYITDENPEVMIPFTNANYDSHPMLYFSRAEVAELQLRAASSHEHIAARLTEAVHTMLSSPLEYLPPWDPKDYSARWNEIFGNNLGALAMFCVLYPENIEARDMAKDYMERMAAQPSWLVKDAPWDEVPLAHSLVGFATAYDFLYNYLSKTQQEKFLEVIANASGYMYETSYRRGWGFQYLHNHQPTNCMALLTGSLVLMNQGYLQEAYLWTKQVLTIMEKSLVLLREVTDGSLYEGVAYGSYTTRSLFQYMFLVQRHFNINHFGHPWLKQHFAFMYRTILPGFQRTVAIADSNYNWFYGPESQLVFLDKFVMRNGSGNWLADQIRRNRVVEGPGTPSKGQRWCTLHTEFLWYDGSLKSVPPPDFGTPTLHYFEDWGVVTYGSALPAEINRSFLSFKSGKLGGRAIYDIVHRNKYKDWIKGWRNFNAGHEHPDQNSFTFAPNGVPFITEALYGPKYTFFNNVLMFSPAVSKSCFSPWVGQVTEDCSSKWSKYKHDLAASCQGRVVAAEEKNGVVFIRGEGVGAYNPQLNLKNVQRNLILLHPQLLLLVDQIHLGEESPLETAASFFHNVDVPFEETVVDGVHGAFIRQRDGLYKMYWMDDTGYSEKATFASVTYPRGYPYNGTNYVNVTMHLRSPITRAAYLFIGPSIDVQSFTVHGDSQQLDVFIATSKHAYATYLWTGEATGQSAFAQVIADRHKILFDRNSAIKSSIVPEVKDYAAIVEQNLQHFKPVFQLLEKQILSRVRNTASFRKTAERLLRFSDKRQTEEAIDRIFAISQQQQQQSKSKKNRRAGKRYKFVDAVPDIFAQIEVNEKKIRQKAQILAQKELPIDEDEEMKDLLDFADVTYEKHKNGGLIKGRFGQARMVTTTHSRAPSLSASYTRLFLILNIAIFFVMLAMQLTYFQRAQSLHGQRCLYAVLLIDSCILLWLYSSCSQSQC

SEQ ID NO: 61309 - protein, 58 aa, Homo sapiens
KKKKKGSPYGSAEAQKTDCWKQIKYPFARHQSAEFTISYDNEKEMTQKLDLITSDMAG

SEQ ID NO: 61310 - protein, 728 aa, Homo sapiens
INEPQCPAGFETPPTLLFSLDGFRAEYLHTWGGLLPVISKLKKCGTYTKNMRPVYPTKTFPNHYSIVTGLYPESHGIIDNKMYDPKMNASFSLKSKEKFNPEWYKGEPIWVTAKYQGLKSGTFFWPGSDVEINGIFPDIYKMYNGSVPFEERILAVLQWLQLPKDERPHFYTLYLEEPDSSGHSYGPVSSEVIKALQRVDGMVGMLMDGLKELNLHRCLNLILISDHGMEQGSCKKYIYLNKYLGDVKNIKVIYGPAARLRPSDVPDKYYSFNYEGIARNLSCREPNQHFKPYLKHFLPKRLHFAKSDRIEPLTFYLDPQWQLALNPSERKYCGSGFHGSDNVFSNMQALFVGYGPGFKHGIEADTFENIEVYNLMCDLLNLTPAPNNGTHGSLNHLLKNPVYTPKHPKEVHPLVQCPFTRNPRDNLGCSCNPSILPIEDFQTQFNLTVAEEKIIKHETLPYGRPRVLQKENTICLLSQHQFMSGYSQDILMPLWTSYTVDRNDSFSTEDFSNCLYQDFRIPLSPVHKCSFYKNNTKVSYGFLSPPQLNKNSSGIYSEALLTTNIVPMYQSFQVIWRYFHDTLLRKYAEERNGVNVVSGPVFDFDYDGRCDSLENLRQKRRVIRNQEILIPTHFFIVLTSCKDTSQTPLHCENLDTLAFILPHRTDNSESCVHGKHDSSWVEELLMLHRARITDVEHITGLSFYQQRKEPVSDILKLKTHLPTFSQED

SEQ ID NO: 61311 - protein, 97 aa, Homo sapiens [sequence omitted]

SEQ ID NO: 61312 - protein, 9 aa, Homo sapiens
IEEYFKCKK

SEQ ID NO: 61313 - protein, 194 aa, Homo sapiens
KLNFKTTPMDADSDVALDILITNVVCVFRTRCHLNLRKIALEGANVIYKRDVGKVLMKLRKPRITATIWSSGKIICTGATSEEEAKFGARRLARSLQKLGFQVIFTDFKVVNVLAVCNMPFEIRLPEFTKNNRPHASYEPELHPAVCYRIKSLRATLQIFSTGSITVTGPNVKAVATAVEQIYPFVFESRKEIL

SEQ ID NO: 61314 - protein, 365 aa, Homo sapiens
VGSVIEMMAGCGEIDHSINMLPTNRKANESCSNTAPSLTVPECAICLQTCVHPVSLPCKHVFCYLCVKGASWLGKRCALCRQEIPEDFLDKPTLLSPEELKAASRGNGEYAWYYEGRNGWWQYDERTSRELEDAFSKGKKNTEMLIAGFLYVADLENMVQYRRNEHGRRRKIKRDIIDIPKKGVAGLRLDCDANTVNLARESSADGADSVSAQSGASVQPLVSSVRPLTSVDGQLTSPATPSPDASTSLEDSFAHLQLSGDNTAERSHRGEGEEDHESPSSGRVPAPDTSIEETESDASSDSEDVSAVVAQHSLTQQRLLVSNANQTVPDRSDRSGTDRSVAGGGTVSVSVRSRRPDGQCTVTEV

SEQ ID NO: 61315 - protein, 25 aa, Homo sapiens
IFMAPRTMYVLGIFNIHVIFSFGLI

SEQ ID NO: 61316 - skipped

SEQ ID NO: 61317 - protein, 73 aa, Homo sapiens
KAPRGFLKRVFKRKKPQLRLEKSGDLLVHLNCLLFVHRLAEESRTNACASKCRVINKEHVLAAAKVILKKSRG

SEQ ID NO: 61318 - protein, 29 aa, Homo sapiens
TEDIVHREVTPDQKLLSRRLLTKTNRMPR

SEQ ID NO: 61319 - protein, 48 aa, Homo sapiens
VDPQNQTMTTFTWNINHARLMVVEERCVYCVNSDKWLDRNPPGSLSLL

SEQ ID NO: 61320 - protein, 31 aa, Homo sapiens
KETALAATEKAKDLASKAATKKQQQQQQQFV

SEQ ID NO: 61321 - protein, 374 aa, Homo sapiens
KMLRSVWNFLKRHKKKCIFLGTVLGGVYILGKYGQKKIREIQEREAAEYIAQARRQYHFESNQRTCNMTVLSMLPTLREALMQQLNSESLTALLKNRPSNKLEIWEDLKIISFTRSTVAVYSTCMLVVLLRVQLNIIGGYIYLDNAAVGKNGTTILAPPDVQQQYLSSIQHLLGDGLTELITVIKQAVQKVLGSVSLKHSLSLLDLEQKLKEIRNLVEQHKSSSWINKDGSKPLLCHYMMPDEETPLAVQACGLSPRDITTIKLLNETRDMLESPDFSTVLNTCLNRGFSRLLDNMAEFFRPTEQDLQHGNSMNSLSSVSLPLAKIIPIVNGQIHSVCSETPSHFVQDLLTMEQVKDFAANVYEAFSTPQQLEK

SEQ ID NO: 61322 - protein, 9 aa, Homo sapiens
MGAPLLDLW

SEQ ID NO: 61323 - protein, 198 aa, Homo sapiens
VLVIGELGVGKTSIIKRYVHQLFSQHYRATIGVDFALKVLNWDSRTLVRLQLWDIAGQERFGNMTRVYYKEAVGAFVVFDISRSSTFEAVLKWKSDLDSKVHLPNGSPIPAVLLANKCDQNKDSSQSPSQVDQFCKEHGFAGWFETSAKDNINIEEAARFLVEKILVNHQSFPNEENDVDKIKLDQETLRAENKSQCC

SEQ ID NO: 61324 - protein, 1044 aa, Homo sapiens
INEGALVSALADDTLHLWNLRQKRPAILHSLKFCRERVTFCHLPFQSKWLYVGTERGNIHIVNVESFTLSGYVIMWNKAIELSSKSHPGPVVHISDNPMDEGKLLIGFESGTVVLWDLKSKKADYRYTYDEAIHSVAWHHEGKQFICSHSDGTLTIWNVRSPAKPVQTITPHGKQLKDGKKPEPCKPILKVEFKTTRSGEPFIILSGGLSYDTVGRRPCLTVMHGKSTAVLEMDYSIVDFLTLCETPYPNDFQEPYAVVVLLEKDLVLIDLAQNGYPIFENPYPLSIHESPVTCCEYFADCPVDLIPALYSVGARQKRQGYSKKEWPINGGNWGLGAQSYPEIIITGHADGSVKFWDASAITLQVLYKLKTSKVFEKSRNKDDRPNTDIVDEDPYAIQIISWCPESRMLCIAGVSAHVIIYRFSKQEVITEVIPMLEVRLLYEINDVETPEGEQPPPLPTPVGGSNPQPIPPQSHPSTSSSSSDGLRDNVPCLKVKNSPLKQSPGYQTELVIQLVWVGGEPPQQITSLAVNSSYGLVVFGNCNGIAMVDYLQKAVLLNLGTIELYGSNDPYRREPRSPRKSRQPSGAGLCDISEGTVVPEDRCKSPTSGSSSPHNSDDEQKMNNFIEKVKTKSRKFSKMVANDIAKMSRKLSLPTDLKPDLDVKDNSFSRSRSSSVTSIDKESREAISALHFCETFTRKTDSSPSPCLWVGTTLGTVLVIALNLPPGGEQRLLQPVIVSPSGTILRLKGAILRMAFLDTTGCLIPPAYEPWREHNVPEEKDEKEKLKKRRPVSVSPSSSQEISENQYAVICSEKQAKVISLPTQNCAYKQNITETSFVLRGDIVALSNSICLACFCANGHIMTFSLPSLRPLLDVYYLPLTNMRIARTFCFTNNGQALYLVSPTEIQRLTYSQETCENLQEMLGELFTPVETPEAPNRGFFKGLFGGGAQSLDREELFGESSSGKASRSLAQHIPGPGGIEGVKGAASGVVGELARARLALDERGQKLGDLEERTAAMLSSAESFSKHAHEIMLKYKDKKWYQF

SEQ ID NO: 61325 - protein, 229 aa, Homo sapiens
IDPREGPGRPPLDGRDHFGRPPVDIRENLVRPGIDHLGRRDHFGFNPEKPWGHRGDFDEREHRVLPVYGGPKGLHEERGRFRSGNYRFDPRSGPWNRGFGQEVHRDFDDRRRPWERQRDRDDRDFDFCREMNGNRLGRDRIQNTWVPPPHARVFDYFEGATSQRKGDNVPQVNGENTERHAQPPPIPVQNDPELYEKLTSSNEINKEKSDTVADIESEPVVESTETEGT

SEQ ID NO: 61326 - protein, 26 aa, Homo sapiens
INKEKSDTVADIESEPVVESTETEGT

SEQ ID NO: 61327 - protein, 664 aa, Homo sapiens
RCMLQNNNNLDACCAVLSQESTRYLYGEGDLNFSDDSGISGLRNHMTSLNLDLQSQNIYHHGREGSRMNGSRTLTHSISDGQLQGGQSNSELFQQEPQTAPAQVPQGFNVFGMSSSSGASNSAPHLGFHLGSKGTSSLSQQTPRFNPIMVTLAPNIQTGRNTPTSLHIHGVPPPVLNSPQGNSIYIRPYITTPGGTTRQTQQHSGWVSQFNPMNPQQVYQPSQPGPWTTCPASNPLSHTSSQQPNQQGHQTSHVYMPISSPTTSQPPTIHSSGSSQSSAHSQYNIQNISTGPRKNQIEIKLEPPQRNNSSKLRSSGPRTSSTSSSVNSQTLNRNQPTVYIAASPPNTDELMSRSQPKVYISANAATGDEQVMRNQPTLFISTNSGASAASRNMSGQVSMGPAFIHHHPPKSRAIGNNSATSPRVVVTQPNTKYTFKITVSPNKPPAVSPGVVSPTFELTNLLNHPDHYVETENIQHLTDPTLAHVDRISETRKLSMGSDDAAYTQALLVHQKARMERLQRELEIQKKKLDKLKSEVNEMENNLTRRRLKRSNSISQIPSLEEMQQLRSCNRQLQIDIDCLTKEIDLFQARGPHFNPSAIHNFYDNIGFVGPVPPKPKDQRSIIKTPKTQDTEDDEGAQWNCTACTFLNHPALIRCEQCEMPRHF

SEQ ID NO: 61328 - protein, 70 aa, Homo sapiens
MHMQPPPLEPPSVDMMCRAAKALLAMARVDENRSEFLLHEGRLLDISISAVLNSLVASVICDVLFQIGQL

SEQ ID NO: 61329 - protein, 2990 aa, Homo sapiens
METCPLDDDVKSLQKLLEEHKSLQSDLEAEQVKVNSLTHMVVIVDENSGESATAILEDQLQKLGERWTAVCRWTEERWNRLQEINILWQELLEEQCLLKAWLTEKEEALNKVQTSNFKDQKELSVSVRRLAILKEDMEMKRQTLDQLSEIGQDVGQLLDNSKASKKINSDSEELTQRWDSLVQRLEDSSNQVTQAVAKLGMSQIPQKDLLETVRVREQAITKKSKQELPPPPPPKKRQIHVDIEAKKKFDAISAELLNWILKWKTAIQTTEIKEYMKMQDTSEMKKKLKALEKEQRERIPRADELNQTGQILVEQMGKEGLPTEEIKNVLEKVSSEWKNVSQHLEDLERKIQLQEDINAYFKQLDELEKVIKTKEEWVKHTSISESSRQSLPSLKDSCQRELTNLLGLHPKIEMARASCSALMSQPSAPDFVQRGFDSFLGRYQAVQEAVEDRQQHLENELKGQPGHAYLETLKTLKDVLNDSENKAQVSLNVLNDLAKVEKALQEKKTLDEILENQKPALHKLAEETKALEKNVHPDVEKLYKQEFDDVQGKWNKLKVLVSKDLHLLEEIALTLRAFEADSTVIEKWMDGVKDFLMKQQAAQGDDAGLQRQLDQCSAFVNEIETIESSLKNMKEIETNLRSGPVAGIKTWVQTRLGDYQTQLEKLSKEIATQKSRLSESQEKAANLKKDLAEMQEWMTQAEEEYLERDFEYKSPEELESAVEEMKRAKEDVLQKEVRVKILKDNIKLLAAKVPSGGQELTSELNVVLENYQLLCNRIRGKCHTLEEVWSCWIELLHYLDLETTWLNTLEERMKSTEVLPEKTDAVNEALESLESVLRHPADNRTQIRELGQTLIDGGILDDIISEKLEAFNSRYEDLSHLAESKQISLEKQLQVLRETDQMLQVLQESLGELDKQLTTYLTDRIDAFQVPQEAQKIQAEISAHELTLEELRRNMRSQPLTSPESRTARGGSQMDVLQRKLREVSTKFQLFQKPANFEQRMLDCKRVLDGVKAELHVLDVKDVDPDVIQTHLDKCMKLYKTLSEVKLEVETVIKTGRHIVQKQQTDNPKGMDEQLTSLKVLYNDLGAQVTEGKQDLERASQLARKMKKEAASLSEWLSATETELVQKSTSEGLLGDLDTEISWAKNVLKDLEKRKADLNTITESSAALQNLIEGSEPILEERLCVLNAGWSRVRTWTEDWCNTLMNHQNQLEIFDGNVAHISTWLYQAEALLDEIEKKPTSKQEEIVKRLVSELDDANLQVENVRDQALILMNARGSSSRELVEPKLAELNRNFEKVSQHIKSAKLLIAQEPLYQCLVTTETFETGVPFSDLEKLENDIENMLKFVEKHLESSDEDEKMDEESAQIEEVLQRGEEMLHQPMEDNKKEKIRLQLLLLHTRYNKIKAIPIQQRKMGQLASGIRSSLLPTDYLVEINKILLCMDDVELSLNVPELNTAIYEDFSFQEDSLKNIKDQLDKLGEQIAVIHEKQPDVILEASGPEAIQIRDTLTQLNAKWDRINRMYSDRKGCFDRAMEEWRQFHCDLNDLTQWITEAEELLVDTCAPGGSLDLEKARIHQQELEVGISSHQPSFAALNRTGDGIVQKLSQADGSFLKEKLAGLNQRWDAIVAEVKDRQPRLKGESKQVMKYRHQLDEIICWLTKAEHAMQKRSTTELGENLQELRDLTQEMEVHAEKLKWLNRTELEMLSDKSLSLPERDKISESLRTVNMTWNKICREVPTTLKECIQEPSSVSQTRIAAHPNVQKVVLVSSASDIPVQSHRTSEISIPADLDKTITELADWLVLIDQMLKSNIVTVGDVEEINKTVSRMKITKADLEQRHPQLDYVFTLAQNLKNKASSSDMRTAITEKLERVKNQWDGTQHGVELRQQQLEDMIIDSLQWDDHREETEELMRKYEARLYILQQARRDPLTKQISDNQILLQELGPGDGIVMAFDNVLQKLLEEYGSDDTRNVKETTEYLKTSWINLKQSIADRQNALEAEWRTVQASRRDLENFLKWIQEAETTVNVLVDASHRENALQDSILARELKQQMQDIQAEIDAHNDIFKSIDGNRQKMVKALGNSEEATMLQHRLDDMNQRWNDLKAKSASIRAHLEASAEKWNRLLMSLEELIKWLNMKDEELKKQMPIGGDVPALQLQYDHCKALRRELKEKEYSVLNAVDQARVFLADQPIEAPEEPRRNLQSKTELTPEERAQKIAKAMRKQSSEVKEKWESLNAVTSNWQKQVDKALEKLRDLQGAMDDLDADMKEAESVRNGWKPVGDLLIDSLQDHIEKIMAFREEIAPINFKVKTVNDLSSQLSPLDLHPSLKMSRQLDDLNMRWKLLQVSVDDRLKQLQEAHRDFGPSSQHFLSTSVQLPWQRSISHNKVPYYINHQTQTTCWDHPKMTELFQSLADLNNVRFSAYRTAIKIRRLQKALCLDLLELSTTNEIFKQHKLNQNDQLLSVPDVINCLTTTYDGLEQMHKDLVNVPLCVDMCLNWLLNVYDTGRTGKIRVQSLKIGLMSLSKGLLEEKYRYLFKEVAGPTEMCDQRQLGLLLHDAIQIPRQLGEVAAFGGSNIEPSVRSCFQQNNNKPEISVKEFIDWMHLEPQSMVWLPVLHRVAAAETAKHQAKCNICKECPIVGFRYRSLKHFNYDVCQSCFFSGRTAKGHKLHYPMVEYCIPTTSGEDVRDFTKVLKNKFRSKKYFAKHPRLGYLPVQTVLEGDNLETPITLISMWPEHYDPSQSPQLFHDDTHSRIEQYATRLAQMERTNGSFLTDSSSTTGSVEDEHALIQQYCQTLGGESPVSQPQSPAQILKSVEREERGELERIIADLEEEQRNLQVEYEQLKDQHLRRGLPVGSPPESIISPHHTSEDSELIAEAKLLRQHKGRLEARMQILEDHNKQLESQLHRLRQLLEQPESDSRINGVSPWASPQHSALSYSLDPDASGPQFHQAAGEDLLAPPHDTSTDLTEVMEQIHSTFPSCCPNVPSRPQAM

SEQ ID NO: 61330 - protein, 27 aa, Homo sapiens
IFPAVLAKLEGFLSAGIDKSSWPSPQN

SEQ ID NO: 61331 - protein, 1905 aa, Homo sapiens
KHPAPAHPGLSMAPEAGATLRAPRRLSWAALLLLAALLPVASSAAASVDHPLKPRHVKLLSTKMGLKVTWDPPKDATSRPVEHYNIAYGKSLKSLKYIKVNAETYSFLIEDVEPGVVYFVLLTAENHSGVSRPVYRAESPPGGEWIEIDGFPIKGPGPFNETVTEKEVPNKPLRVRVRSSDDRLSVAWKAPRLSGAKSPRRSRGFLLGYGESGRKMNYVPLTRDERTHEIKKLASESVYVVSLQSMNSQGRSQPVYRAALTKRKISEEDELDVPDDISVRVMSSQSVLVSWVDPVLEKQKKVVASRQYTVRYREKGELARWDYKQIANRRVLIENLIPDTVYEFAVRISQGERDGKWSTSVFQRTPESAPTTAPENLNVWPVNGKPTVVAASWDALPETEGKVKEYILSYAPALKPFGAKSLTYPGDTTSALVDGLQPGERYLFKIRATNRRGLGPHSKAFIVAMPTTSKADVEQNTEDNGKPEKPEPSSPSPRAPASSQHPSVPASPQGRNAKDLLLDLKNKILANGGAPRKPQLRAKKAEELDLQSTEITGEEELGSREDSPMSPSDTQDQKRTLRPPSRHGHSVVAPGRTAVRARMPALPRREGVDKPGFSLATQPRPGAPPSASASPAHHASTQGTSHRPSLPASLNDNDLVDSDEDERAVGSLHPKGAFAQPRPALSPSRQSPSSVLRDRSSVHPGAKPASPARRTPHSGAAEEDSSASAPPSRLSPPHGGSSRLLPTQPHLSSPLSKGGKDGEDAPATNSNAPSRSTMSSSVSSHLSSRTQVSEGAEASDGESHGDGDREDGGRQAEATAQTLRARPASGHFHLLRHKPFAANGRSPSRFSIGRGPRLQPSSSPQSTVPSRAHPRVPSHSDSHPKLSSGIHGDEEDEKPLPATVVNDHVPSSSRQPISRGWEDLRRSPQRGASLHRKEPIPENPKSTGADTHPQGKYSSLASKAQDVQQSTDADTEGHSPKAQPGSTDRHASPARPPAARSQQHPSVPRRMTPGRAPQQQPPPPVATSQHHPGPQSRDAGRSPSQPRLSLTQAGRPRPTSQGRSHSSSDPYTASSRGMLPTALQNQDEDAQGSYDDDSTEVEAQDVRAPAHAARAKEAAASLPKHQQVESPTGAGAGGDHRSQRGHAASPARPSRPGGPQSRARVPSRAAPGKSEPPSKRPLSSKSQQSVSAEDDEEEDAGFFKGGKEDLLSSSVPKWPSSSTPRGGKDADGSLAKEEREPAIALAPRGGSLAPVKRPLPPPPGSSPRASHVPSRLPPRSAATVSPVAGTHPWPQYTTRAPPGHFSTTPMLSLRQRMMHARFRNPLSRQPARPSYRQGYNGRPNVEGKVLPGSNGKPNGQRIINGPQGTKWVVDLDRGLVLNAEGRYLQDSHGNPLRIKLGGDGRTIVDLEGTPVVSPDGLPLFGQGRHGTPLANAQDKPILSLGGKPLVGLEVIKKTTHPPTTTMQPTTTTTPLPTTTTPRPTTATTRRTTTTRRTTTRRPTTTVRTTTRTTTTTTPTPTTPIPTCPPGTLERHDDDGNLIMSSNGIPECYAEEDEFSGLETDTAVPTEEAYVIYDEDYEFETSRPPTTTEPSTTATTPRVIPEEGAISSFPEEEFDLAGRKRFVAPYVTYLNKDPSAPCSLTDALDHFQVDSLDEIIPNDLKKSDLPPQHAPRNITVVAVEGCHSFVIVDWDKATPGDVVTGYLVYSASYEDFIRNKWSTQASSVTHLPIENLKPNTRYYFKVQAQNPHGYGPISPSVSFVTESDNPLLVVRPPGGEPIWIPFAFKHDPSYTDCHGRQYVKRTWYRKFVGVVLCNSLRYKIYLSDNLKDTFYSIGDSWGRGEDHCQFVDSHLDGRTGPQSYVEALPTIQGYYRQYRQEPVRFGNIGFGTPYYYVGWYECGVSIPGKW

SEQ ID NO: 61332 - protein, 177 aa, Homo sapiens
LLLLLASQVLSPGSCADEEEVPEEWVLLHVVQGQIGAGNYSYLRLNHEGKIVLRMRSLKGDADLYVSASSLHPSFDDYELQSATCGPDAVSIPAHFRRPVGIGVYGHPSHLESEFEMKVYYDGTVEQHPFGEAAYPADGADAGQKHAGAPEDASQEEESVLWTILISILKLVLEILF

SEQ ID NO: 61333 - protein, 172 aa, Homo sapiens
IVSTVNLGCKLDLKTIALRARNAEYNPKRFAAVIMRIREPRTTALIFSSGKMVCTGAKSEEQSRLAARKYARVVQKLGFPAKFLDFKIQNMVGSCDVKFPIRLEGLVLTHQQFSSYEPELFPGLIYRMIKPRIVLLIFVSGKVVLTGAKVRAEIYEAFENIYPILKGFRKTT

SEQ ID NO: 61334 - protein, 2467 aa, Homo sapiens
LLQLLLLVAAPGSTQAQAAPFPELCSYTWEAVDTKNNVLYKINICGSVDIVQCGPSSAVCMHDLKTRTYHSVGDSVLRSATRSLLEFNTTVSCDQQGTNHRVQSSIAFLCGKTLGTPEFVTATECVHYFEWRTTAACKKDIFKANKEVPCYVFDEELRKHDLNPLIKLSGAYLVDDSDPDTSLFINVCRDIDTLRDPGSQLRACPPGTAACLVRGHQAFDVGQPRDGLKLVRKDRLVLSYVREEAGKLDFCDGHSPAVTITFVCPSERREGTIPKLTAKSNCRYEIEWITEYACHRDYLESKTCSLSGEQQDVSIDLTPLAQSGGSSYISDGKEYLFYLNVCGETEIQFCNKKQAAVCQVKKSDTSQVKAAGRYHNQTLRYSDGDLTLIYFGGDECSSGFQRMSVINFECNKTAGNDGKGTPVFTGEVDCTYFFTWDTEYACVKEKEDLLCGATDGKKRYDLSALVRHAEPEQNWEAVDGSQTETEKKHFFINICHRVLQEGKARGCPEDAAVCAVDKNGSKNLGKFISSPMKEKGNIQLSYSDGDDCGHGKKIKTNITLVCKPGDLESAPVLRTSGEGGCFYEFEWHTAAACVLSKTEGENCTVFDSQAGFSFDLSPLTKKNGAYKVETKKYDFYINVCGPVSVSPCQPDSGACQVAKSDEKTWNLGLSNAKLSYYDGMIQLNYRGGTPYNNERHTPRATLITFLCDRDAGVGFPEYQEEDNSTYNFRWYTSYACPEEPLECVVTDPSTLEQYDLSSLAKSEGGLGGNWYAMDNSGEHVTWRKYYINVCRPLNPVPGCNRYASACQMKYEKDQGSFTEVVSISNLGMAKTGPVVEDSGSLLLEYVNGSACTTSDGRQTTYTTRIHLVCSRGRLNSHPIFSLNWECVVSFLWNTEAACPIQTTTDTDQACSIRDPNSGFVFNLNPLNSSQGYNVSGIGKIFMFNVCGTMPVCGTILGKPASGCEAETQTEELKNWKPARPVGIEKSLQLSTEGFITLTYKGPLSAKGTADAFIVRFVCNDDVYSGPLKFLHQDIDSGQGIRNTYFEFETALACVPSPVDCQVTDLAGNEYDLTGLSTVRKPWTAVDTSVDGRKRTFYLSVCNPLPYIPGCQGSAVGSCLVSEGNSWNLGVVQMSPQAAANGSLSIMYVNGDKCGNQRFSTRITFECAQISGSPAFQLQDGCEYVFIWRTVEACPVVRVEGDNCEVKDPRHGNLYDLKPLGLNDTIVSAGEYTYYFRVCGKLSSDVCPTSDKSKVVSSCQEKREPQGFHKVAGLLTQKLTYENGLLKMNFTGGDTCHKVYQRSTAIFFYCDRGTQRPVFLKETSDCSYLFEWRTQYACPPFDLTECSFKDGAGNSFDLSSLSRYSDNWEAITGTGDPEHYLINVCKSLAPQAGTEPCPPEAAACLLGGSKPVNLGRVRDGPQWRDGIIVLKYVDGDLCPDGIRKKSTTIRFTCSESQVNSRPMFISAVEDCEYTFAWPTATACPMKSNEHDDCQVTNPSTGHLFDLSSLSGRAGFTAAYSEKGLVYMSICGENENCPPGVGACFGQTRISVGKANKRLRYVDQVLQLVYKDGSPCPSKSGLSYKSVISFVCRPEARPTNRPMLISLDKQTCTLFFSWHTPLACEQATECSVRNGSSIVDLSPLIHRTGGYEAYDESEDDASDTNPDFYINICQPLNPMHGVPCPAGAAVCKVPIDGPPIDIGRVAGPPILNPIANEIYLNFESSTPCLADKHFNYTSLIAFHCKRGVSMGTPKLLRTSECDFVFEWETPVVCPDEVRMDGCTLTDEQLLYSFNLSSLSTSTFKVTRDSRTYSVGVCTFAVGPEQGGCKDGGVCLLSGTKGASFGRLQSMKLDYRHQDEAVVLSYVNGDRCPPETDDGVPCVFPFIFNGKSYEECIIESRAKLWCSTTADYDRDHEWGFCRHSNSYRTSSIIFKCDEDEDIGRPQVFSEVRGCDVTFEWKTKVVCPPKKLECKFVQKHKTYDLRLLSSLTGSWSLVHNGVSYYINLCQKIYKGPLGCSERASICRRTTTGDVQVLGLVHTQKLGVIGDKVVVTYSKGYPCGGNKTASSVIELTCTKTVGRPAFKRFDIDSCTYYFSWDSRAACAVKPQEVQMVNGTITNPINGKSFSLGDIYFKLFRASGDMRTNGDNYLYEIQLSSITSSRNPACSGANICQVKPNDQHFSRKVGTSDKTKYYLQDGDLDVVFASSSKCGKDKTKSVSSTIFFHCDPLVEDGIPEFSHETADCQYLFSWYTSAVCPLGVGFDSENPGDDGQMHKGLSERSQAVGAVLSLLLVALTCCLLALLLYKKERRETVISKLTTCCRRSSNVSYKYSKVNKEEETDENETEWLMEEIQLPPPRQGKEGQENGHITTKSVKALSSLHGDDQDSEDEVLTIPEVKVHSGRGAGAESSHPVRNAQSNALQEREDDRVGLVRGEKARKGKSSSAQQKTVSSTKLVSFHDDSDEDLLHI

SEQ ID NO: 61335 - protein, 10 aa, Homo sapiens
LCLSTQYPIQ

SEQ ID NO: 61336 - protein, 12 aa, Homo sapiens
MLVPTWSHREEM

SEQ ID NO: 61337 - protein, 7 aa, Homo sapiens
VHWPSSR

SEQ ID NO: 61338 - protein, 133 aa, Homo sapiens [sequence omitted]

SEQ ID NO: 61339 - protein, 42 aa, Homo sapiens
KKGEQPLLLTNAELKDYSGLHDAAAAGDTLPEGATANGMKAM

SEQ ID NO: 61340 - protein, 338 aa, Homo sapiens
LAMVLLGAKGNTATQMAQALSLNTEEDIHRAFQSLLTEVNKAGTQYLLRTANRLFGEKTCQFLSTFKESCLQFYHAELKELSFIRAAEESRKHINTWVSKKTEGKIEELLPGSSIDAETRLVLVNAIYFKGKWNEPFDETYTREMPFKINQEEQRPVQMMYQEATFKLAHVGEVRAQLLELPYARKELSLLVLLPDDGVELSTVEKSLTFEKLTAWTKPDCMKSTEVEVLLPKFKLQEDYDMESVLRHLGIVDAFQQGKADLSAMSAERDLCLSKFVHKSFVEVNEEGTEAAAASSCFVVAECCMESGPRFCADHPFLFFIRHNRANSILFCGRFSSP

SEQ ID NO: 61341 - protein, 385 aa, Homo sapiens
LARRSCPSSLQVTSFPVVQLHMNRTAMRASQKDFENSMNQVKLLKKDPGNEVKLKLYALYKQATEGPCNMPKPGVFDLINKAKWDAWNALGSLPKEAARQNYVDLVSSLSPSLESSSQVEPGTDRKSTGFETLVVTSEDGITKIMFNRPKKKNAINTEMYHEIMRALKAASKDDSIITVLTGNGDYYSSGNDLTNFTDIPPGGVEEKAKNNAVLLREFVGCFIDFPKPLIAVVNGPAVGISVTLLGLFDAVYASDRATFHTPFSHLGQSPEGCSSYTFPKIMSPAKATEMLIFGKKLTAGEACAQGLVTEVFPDSTFQKEVWTRLKAFAKLPPNALRISKEVIRKREREKLHAVNAEECNVLQGRWLSDECTNAVVNFLSRKSKL

SEQ ID NO: 61342 - protein, 42 aa, Homo sapiens [sequence omitted]

SEQ ID NO: 61343 - protein, 93 aa, Homo sapiens
IHLHFTEHRASSHQGGPFKLQICLSSLYSNLLLHCHYREVHHMSGHRTESAGGHLFLPQDLRWKSPGLGVFAVQSVYELARRHNVSPFYSGPP

SEQ ID NO: 61344 - protein, 711 aa, Homo sapiens
LSPPPPAALAPVSGVVLPAPPAVSAGSSPAGSPGGGAGGEGLGAAAAALLLHPPPPPPPATAAPPPPPPPPPPPASAAAPASGPPAPPGLAAGPGPAGGAPTPALVAGSSAAAPFPHGDSALNEQEKELQRRLKRLYPAVDEQETPLPRSWSPKDKFSYIGLSQNNLRVHYKGHGKTPKDAASVRATHPIPAACGIYYFEVKIVSKGRDGYMGIGLSAQGVNMNRLPGWDKHSYGYHGDDGHSFCSSGTGQPYGPTFTTGDVIGCCVNLINNTCFYTKNGHSLGIAFTDLPPNLYPTVGLQTPGEVVDANFGQHPFVFDIEDYMREWRTKIQAQIDRFPIGDREGEWQTMIQKMVSSYLVHHGYCATAEAFARSTDQTVLEELASIKNRQRIQKLVLAGRMGEAIETTQQLYPSLLERNPNLLFTLKVRQFIEMVNGTDSEVRCLGGRSPKSQDSYPVSPRPFSSPSMSPSHGMNIHNLASGKGSTAHFSGFESCSNGVISNKAHQSYCHSNKHQSSNLNVPELNSINMSRSQQVNNFTSNDVDMETDHYSNGVGETSSNGFLNGSSKHDHEMEDCDTEMEVDSSQLRRQLCGGSQAAIERMIHFGRELQAMSEQLRRDCGKNTANKKMLKDAFSLLAYSDPWNSPVGNQLDPIQREPVCSALNSAILETHNLPKQPPLALAMGQATQCLGLMARSGIGSCAFATVEDYLH

SEQ ID NO: 61345 - protein, 305 aa, Homo sapiens
LNSYFEPPVEESALERRPETISEPKTYVDLTNEETTDSTTSKISPSEDTQQENGSMFSLITWNIDGLDLNNLSERARGVCSYLALYSPDVIFLQEVIPPYYSYLKKRSSNYEIITGHEEGYFTAIMLKKSRVKLKSQEIIPFPSTKMMRNLLCVHVNVSGNELCLMTSHLESTRGHAAERMNQLKMVLKKMQEAPESATVIFAGDTNLRDREVTRCGGLPNNIVDVWEFLGKPKHCQYTWDTQMNSNLGITAACKLRFDRIFFRAAAEEGHIIPRSLDLLGLEKLDCGRFPSDHWGLLCNLDIIL

SEQ ID NO: 61346 - protein, 7 aa, Homo sapiens
IIMKKIS

SEQ ID NO: 61347 - protein, 16 aa, Homo sapiens
IDATGFININSLRLKE

SEQ ID NO: 61348 - protein, 128 aa, Homo sapiens
IAMPEPSKSAPAPKKGSKKAITKAQKKDGKKRKRSRKESYSIYVYKVLKQVHPDTGISSKAMGIMNSFVNDIFERIAGEASRLAHYNKRSTITSREIQTAVRLLLPGELAKHAVSEGTKAVTKYTSSK

SEQ ID NO: 61349 - protein, 51 aa, Homo sapiens
KHYHKEYRQMYRTEIQMARMARKAGNFYVPAEPKLAFVIRIRGINGVSPKV

SEQ ID NO: 61350 - protein, 13 aa, Homo sapiens
MVLSLSCYECYLL

SEQ ID NO: 61351 - protein, 33 aa, Homo sapiens
KRNVIRELKKGKYIMYALGRVKRFLFICMRLFR

SEQ ID NO: 61352 - protein, 151 aa, Homo sapiens
KMAAAAELSLLEKSLGLSKGNKYSAQGERQIPVLQTNNGPSLTGLTTIAAHLVKQANKEYLLGSTAEEKAIVQQWLEYRVTQVDGHSSKNDIHTLLKDLNSYLEDKVYLTGYNFTLADILLYYGLHRFIVSICIVTGFFSVVLRMIFKTLS

SEQ ID NO: 61353 - protein, 175 aa, Homo sapiens
KMAAAAELSLLEKSLGLSKGNKYSAQGERQIPVLQTNNGPSLTGLTTIAAHLVKQANKEYLLGSTAEEKAIVQQWLEYRVTQVDGHSSKNDIHTLLKDLNSYLEDKVYLTGYNFTLADILLYYGLHRFIVDLTVQEKEKYLNVSRWFCHIQHYPGIRQHLSSVVFIKNRLYTNSH

SEQ ID NO: 61354 - protein, 49 aa, Homo sapiens
IALDYEGGTVTFTNAESQELIYTFTATFTRRLVPFLWLKWPGTRLLLRP

SEQ ID NO: 61355 - protein, 113 aa, Homo sapiens; identical to SEQ ID NO: 61252

SEQ ID NO: 61356 - protein, 7 aa, Homo sapiens
TWTTPSS

SEQ ID NO: 61357 - protein, 648 aa, Homo sapiens
LRPWTSLLLVDAALLWLLQGPLGTLLPQGLPGLWLEGTLRLGGLWGLLKLRGLLGFVGTLLLPLCLATPLTVSLRALVAGASRAPPARVASAPWSWLLVGYGAAGLSWSLWAVLSPPGAQEKEQDQVNNKVLMWRLLKLSRPDLPLLVAAFFFLVLAVLGETLIPHYSGRVIDILGGDFDPHAFASAIFFMCLFSFGSSLSAGCRGGCFTYTMSRINLRIREQLFSSLLRQDLGFFQETKTGELNSRLSSDTTLMSNWLPLNANVLLRSLVKVVGLYGFMLSISPRLTLLSLLHMPFTIAAEKVYNTRHQEVLREIQDAVARAGQVVREAVGGLQTVRSFGAEEHEVCRYKEALEQCRQLYWRRDLERALYLLVRRVLHLGVQMLMLSCGLQQMQDGELTQGSLLSFMIYQESVGSYVQTLVYIYGDMLSNVGAAEKVFSYMDRQPNLPSPGTLAPTTLQGVVKFQDVSFAYPNRPDRPVLKGLTFTLRPGEVTALVGPNGSGKSTVAALLQNLYQPTGGQVLLDEKPISQYEHCYLHSQVVSVGQEPVLFSGSVRNNIAYGLQSCEDDKVMAAAQAAHADDFIQEMEHGIYTDVGEKGSQLAAGQKQRLAIARALVRDPRVLILDEATSALDVQCEQAKTLWKFMIF

SEQ ID NO: 61358 - protein, 612 aa, Homo sapiens
LTVSLRALVAGASRAPPARVASAPWSWLLVGYGAAGLSWSLWAVLSPPGAQEKEQDQVNNKVLMWRLLKLSRPDLPLLVAAFFFLVLAVLGETLIPHYSGRVIDILGGDFDPHAFASAIFFMCLFSFGSSLSAGCRGGCFTYTMSRINLRIREQLFSSLLRQDLGFFQETKTGELNSRLSSDTTLMSNWLPLNANVLLRSLVKVVGLYGFMLSISPRLTLLSLLHMPFTIAAEKVYNTRHQEVLREIQDAVARAGQVVREAVGGLQTVRSFGAEEHEVCRYKEALEQCRQLYWRRDLERALYLLVRRVLHLGVQMLMLSCGLQQMQDGELTQGSLLSFMIYQESVGSYVQTLVYIYGDMLSNVGAAEKVFSYMDRQPNLPSPGTLAPTTLQGVVKFQDVSFAYPNRPDRPVLKGLTFTLRPGEVTALVGPNGSGKSTVAALLQNLYQPTGGQVLLDEKPISQYEHCYLHSQVVSVGQEPVLFSGSVRNNIAYGLQSCEDDKVMAAAQAAHADDFIQEMEHGIYTDVGEKGSQLAAGQKQRLAIARALVRDPRVLILDEATSALDVQCEQALQDWNSRGDRTVLVIAHRLQTVQRAHQILVLQEGKLQKLAQL

SEQ ID NO: 61359 - protein, 299 aa, Homo sapiens
INGAITQFSCNISHLSSLIAQLEEKQQQPTRELLQDIGDTLSRAERIRIPEPWITPPDLQEKIHIFAQKCLFLTESLKQFTEKMQSDMEKIQELREAQLYSVDVTLDPDTAYPSLILSDNLRQVRYSYLQQDLPDNPERFNLFPCVLGSPCFIAGRHYWEVEVGDKAKWTIGVCEDSVCRKGGVTSAPQNGFWAVSLWYGKEYWALTSPMTALPLRTPLQRVGIFLDYDAGEVSFYNVTERCHTFTFSHATFCGPVRPYFSLSYSGGKSAAPLIICPMSGIDGFSGHVGNHGHSMETSP

SEQ ID NO: 61360 - protein, 202 aa, Homo sapiens
VTNICQAADKQLFTLVEWAKRIPHFSSLPLDDQVILLRAGWNELLIASFSHRSIDVRDGILLATGLHVHRNSAHSAGVGAIFDRSLSRVLTELVSKMRDMRMDKTELGCLRAIILFNPDAKGLSNPSEVEVLREKVYASLETYCKQKYPEQQGRFAKLLLRLPALRSIGLKCLEHLFFFKLIGDTPIDTFLMEMLEAPHQLA

SEQ ID NO: 61361 - protein, 708 aa, Homo sapiens
LRAGTSDMEEEEGPLAGGPGLQEPLQLGELDITSDEFILDEVDVHIQANLEDELVKEALKTGVDLRHYSKQVELELQQIEQKSIRDYIQESENIASLHNQITACDAVLERMEQMLGAFQSDLSSISSEIRTLQEQSGAMNIRLRNRQAVRGKLGELVDGLVVPSALVTAILEAPVTEPRFLEQLQELDAKAAAVREQEARGTAACADVRGVLDRLRVKAVTKIREFILQKIYSFRKPMTNYQIPQTALLKYRFFYQFLLGNERATAKEIRDEYVETLSKIYLSYYRSYLGRLMKVQYEEVAEKDDLMGVEDTAKKGFFSKPSLRSRNTIFTLGTRGSVISPTELEAPILVPHTAQRGEQRYPFEALFRSQHYALLDNSCREYLFICEFFVVSGPAAHDLFHAVMGRTLSMTLKHLDSYLADCYDAIAVFLCIHIVLRFRNIAAKRDVPALDRYWEQVLALLWPRFELILEMNVQSVRSTDPQRLGGLDTRPHYITRRYAEFSSALVSINQTIPNERTMQLLGQLQVEVENFVLRVAAEFSSRKEQLVFLINNYDMMLGVLMERAADDSKEVESFQQLLNARTQEFIEELLSPPFGGLVAFVKEAEALIERGQAERLRGEEARVTQLIRGFGSSWKSSVESLSQDVMRSFTNFRNGTSIIQGALTQLIQLYHRFHRVLSQPQLRALPARAELINIHHLMVELKKHKPNF

SEQ ID NO: 61362 - protein, 605 aa, Homo sapiens
KPGKDVPPKKDKLQTKRKKPRRYWEEETVPTTAGASPGPPRNKKNRELRPQRPKNAYILKKSRISKKPQVPKKPREWKNPESQRGLSGTQDPFPGPAPVPVEVVQKFCRIDKSRKLPHSKAKTRSRLEVAEAEEEETSIKAARSELLLAEEPGFLEGEDGEDTAKICQADIVEAVDIASAAKHFDLNLRQFGPYRLNYSRTGRHLAFGGRRGHVAALDWVTKKLMCEINVMEAVRDIRFLHSEALLAVAQNRWLHIYDNQGIELHCIRRCDRVTRLEFLPFHFLLATASETGFLTYLDVSVGKIVAALNARAGRLDVMSQNPYNAVIHLGHSNGTVSLWSPAMKEPLAKILCHRGGVRAVAVDSTGTYMATSGLDHQLKIFDLRGTYQPLSTRTLPHGAGHLAFSQRGLLVAGMGDVVNIWAGQGKASPPSLEQPYLTHRLSGPVHGLQFCPFEDVLGVGHTGGITSMLVPGAGEPNFDGLESNPYRSRKQRQEWEVKALLEKVPAELICLDPRALAEVDVISLEQGKKEQIERLGYDPQAKAPFQPKPKQKGRSSTASLVKRKRKVMDEEHRDKVRQSLQQQHHKEAKAKPTGARPSALDRFVR

SEQ ID NO: 61363 - protein, 50 aa, Homo sapiens
VHCCCARDRGNRRPGRTSTLSSISVYTTPRAPSRLPSGGIPGAPPHHTAR

SEQ ID NO: 61364 - protein, 160 aa, Homo sapiens
VAAPADPEMVTLPLQPSSTMGQVGRQLAIIGDDINRRYDSEFQTMLQHLQPTAENAYEYFTKIATSLFESGINWGRVVALLGFGYRLALHVYQHGLTGFLGQVTRFVVDFMLHHCIARWIAQRGGWVAALNLGNGPILNVLVVLGVVLLGQFVVRRFFKS

SEQ ID NO: 61365 - protein, 56 aa, Homo sapiens
LIPPQSRRRMKRVWDRAVEFLASNESRIQTESHRVAGEDMLVWRWTKPSSFSDSER

SEQ ID NO: 61366 - protein, 47 aa, Homo sapiens
LFNTLFVNPCCLGFIAFAYSVKSRDRKMVGDLTGAQAYASTAKCLNI

SEQ ID NO: 61367 - protein, 291 aa, Homo sapiens
LDPELMQKFSCLGTTDKDVLISEFQRLLGFQLNPAGCAFFLDMTNWNLQAAIGAYYDFESPNISVPSMSFVEDVTIGEGESIPPDTQFVKTWRIQNSGAEAWPPGVCLKYVGGDQFGHVNMVMVRSLEPQEIADVSVQMCSPSRAGMYQGQWRMCTATGLYYGDVIWVILSVEVGGLLGVTQQLSSFETEFNTQPHRKVEGNFNPFASPQKNRQSDENNLKDPGGSEFDSISKNTWAPAPDTWAPAPDQTEQDQNRLSQNSVNLSPSSHANNLSVVTYSKGLHGPYPFGQS

SEQ ID NO: 61368 - protein, 74 aa, Homo sapiens
IQSITGTSVSQNVVIAMSGISKVFVGEVVEEALDVCEKWGEMPPLQPKHMREAVRRLKSKGQIPNSKHKKIIFF

SEQ ID NO: 61369 - protein, 163 aa, Homo sapiens
IPPDSWQPPNVYLETSMGIIVLELYWKHAPKTCKNFAELARRGYYNGTKFHRIIKDFMIQGGDPTGTGRGGASIYGKQFEDELHPDLKFTGAGILAMANAGPDTNGSQFFVTLAPTQWLDGKHTIFGRVCQGIGMVNRVGMVETNSQDRPVDDVKIIKAYPSG

SEQ ID NO: 61370 - protein, 36 aa, Homo sapiens
ITWIGCGLDRLQWENVSAMIEEVFEATDIKITVYTL

SEQ ID NO: 61371 - protein, 33 aa, Homo sapiens
IGCGLDRLQWENVSAMIEEVFEATDIKITVYTL

SEQ ID NO: 61372 - protein, 17 aa, Homo sapiens
MVCDVRPQVHPNYRISA

SEQ ID NO: 61373 - protein, 446 aa, Homo sapiens
ISLLRRCCCRHTRSPCLVMAENDVDNELLDYEDDEVETAAGGDGAEAPAKKDVKGSYVSIHSSGFRDFLLKPELLRAIVDCGFEHPSEVQHECIPQAILGMDVLCQAKSGMGKTAVFVLATLQQLEPVTGQVSVLVMCHTRELAFQISKEYERFSKYMPNVKVAVFFGGLSIKKDEEVLKKNCPHIVVGTPGRILALARNKSLNLKHIKHFILDECDKMLEQLDMRRDVQEIFRMTPHEKQVMMFSATLSKEIRPVCRKFMQDPMEIFVDDETKLTLHGLQQYYVKLKDNEKNRKLFDLLDVLEFNQVVIFVKSVQRCIALAQLLVEQNFPAIAIHRGMPQEERLSRYQQFKDFQRRILVATNLFGRGMDIERVNIAFNYDMPEDSDTYLHRVARAGRFGTKGLAITFVSDENDAKILNDVQDRFEVNISELPDEIDISSYIEQTR

SEQ ID NO: 61374 - protein, 1129 aa, Homo sapiens
LSAMEPNDSTSTAVEEPDSLEVLVKTLDSQTRTFIVGAQMNVKEFKEHIAASVSIPSEKQRLIYQGRVLQDDKKLQEYNVGGKVIHLVERAPPQTHLPSGASSGTGSASATHGGGSPPGTRGPGASVHDRNANSYVMVGTFNLPSDGSAVDVHINMEQAPIQSEPRVRLVMAQHMIRDIQTLLSRMECRGGPQPQHSQPPPQPPAVTPEPVALSSQTSEPVESEAPPREPMEAEEVEERAPAQNPELTPGPAPAGPTPAPETNAPNHPSPAEYVEVLQELQRLESRLQPFLQRYYEVLGAAATTDYNNNHEGREEDQRLINLVGESLRLLGNTFVALSDLRCNLACTPPRHLHVVRPMSHYTTPMVLQQAAIPIQINVGTTVTMTGNGTRPPPTPNAEAPPPGPGQASSVAPSSTNVESSAEGAPPPGPAPPPATSHPRVIRISHQSVEPVVMMHMNIQDSGTQPGGVPSAPTGPLGPPGHGQTLGQQVPGFPTAPTRVVIARPTPPQARPSHPGGPPVSGTLQGAGLGTNASLAQMVSGLVGQLLMQPVLVAQGTPGMAPPPAPATASASAGTTNTATTAGPAPGGPAQPPPTPQPSMADLQFSQLLGNLLGPAGPGAGGSGVASPTITVAMPGVPAFLQGMTDFLQATQTAPPPPPPPPPPPPAPEQQTMPPPGSPSGGAGSPGGLGLESLSPEFFTSVVQGVLSSLLGSLGARAGSSESIAAFIQRLSGSSNIFEPGADGALGFFGALLSLLCQNFSMVDVVMLLHGHFQPLQRLQPQLRSFFHQHYLGGQEPTPSNIRMATHTLITGLEEYVRESFSLVQVQPGVDIIRTNLEFLQEQFNSIAAHVLHCTDSGFGARLLELCNQGLFECLALNLHCLGGQQMELAAVINGRIRRMSRGVNPSLVSWLTTMMGLRLQVVLEHMPVGPDAILRYVRRVGDPPQPLPEEPMEVQGAERASPEPQRENASPAPGTTAEEAMSRGPPPAPEGGSRDEQDGASAETEPWAAAVPPEWVPIIQQDIQSQRKVKPQPPLSDAYLSGMPAKRRKTMQGEGPQLLLSEAVSRAAKAAGARPLTSPESLSRDLEAPEVQESYRQQLRSDIQKRLQEDPNYSPQRFPNAQRAFADDP

SEQ ID NO: 61375 - protein, 19 aa, Homo sapiens
LGMPPFTPELKRKQTTCHT

SEQ ID NO: 61376 - protein, 23 aa, Homo sapiens
LEGESVWMGWGRRGRGWAAAPMP

SEQ ID NO: 61377 - protein, 19 aa, Homo sapiens
ILKQDQASSSHLSSSMKAA

SEQ ID NO: 61378 - protein, 263 aa, Homo sapiens
LEEAASRLQGLQKLINDSVFFLAAYDLRQGQEALARLQAALAERRRGLQPKKRFAFKTRGKDAASSTKVDAAPGIPPAVESIQDSPLPKKAEGDLGPSWVCGFSNLESQVLEKRASELHQRDVLLTELSNCTVRLYGNPNTLRLTKAHSCKLLCGPVSTSVFLEDCSDCVLAVACQQLRIHSTKDTRIFLQVTSRAIVEDCSGIQFAPYTWSYPEIDKDFESSGLDRSKNNWNDVDDFNWLARDMASPNWSILPEEERNIQWD

SEQ ID NO: 61379 - protein, 105 aa, Homo sapiens
VLMALCALTRALRSLNLAPPTVAAPAPSLFPAAQMMNNGLLQQPSALMLLPCRPVLTSVALNANFVSWKSRTKYTITPVKMRKSGGRDHTGAGNVRSNSRPSIQR

SEQ ID NO: 61380 - protein, 1208 aa, Homo sapiens
VALGMAMDQVNALCEQLVKAVTVMMDPNSTQRYRLEALKFCEEFKEKCPICVPCGLRLAEKTQVAIVRHFGLQILEHVVKFRWNGMSRLEKVYLKNSVMELIANGTLNILEEENHIKDALSRIVVEMIKREWPQHWPDMLIELDTLSKQGETQTELVMFILLRLAEDVVTFQTLPPQRRRDIQQTLTQNMERIFSFLLNTLQENVNKYQQVKTDTSQESKAQANCRVGVAALNTLAGYIDWVSMSHITAENCKLLEILCLLLNEQELQLGAAECLLIAVSRKGKLEDRKPLMVLFGDVAMHYILSAAQTADGGGLVEKHYVFLKRLCQVLCALGNQLCALLGADSDVETPSNFGKYLESFLAFTTHPSQFLRSSTQMTWGALFRHEILSRDPLLLAIIPKYLRASMTNLVKMGFPSKTDSPSCEYSRFDFDSDEDFNAFFNSSRAQQGEVMRLACRLDPKTSFQMAGEWLKYQLSTFLDAGSVNSCSAVGTGEGSLCSVFSPSFVQWEAMTLFLESVITQMFRTLNREEIPVNDGIELLQMVLNFDTKDPLILSCVLTNVSALFPFVTYRPEFLPQVFSKLFSSVTFETVEESKAPRTRAVRNVRRHACSSIIKMCRDYPQLVLPNFDMLYNHVKQLLSNELLLTQMEKCALMEALVLISNQFKNYERQKVFLEELMAPVASIWLSQDMHRVLSDVDAFIAYVGTDQKSCDPGLEDPCGLNRARMSFCVYSILGVVKRTCWPTDLEEAKAGGFVVGYTSSGNPIFRNPCTEQILKLLDNLLALIRTHNTLYAPEMLAKMAEPFTKALDMLDAEKSAILGLPQPLLELNDSPVFKTVLERMQRFFSTLYENCFHILGKAGPSMQQDFYTVEDLATQLLSSAFVNLNNIPDYRLRPMLRVFVKPLVLFCPPEHYEALVSPILGPLFTYLHMRLSQKWQVINQRSLLCGEDEAADENPESQEMLEEQLVRMLTREVMDLITVCCVSKKGADHSSAPPADGDDEEMMATEVTPSAMAELTDLGKCLMKHEDVCTALLITAFNSLAWKDTLSCQRTTSQLCWPLLKQVLSGTLLADAVTWLFTSVLKGLQMHGQHDGCMASLVHLAFQIYEALRPRYLEIRAVMEQIPEIQKDSLDQFDCKLLNPSLQKVADKRRKDQFKRLIAGCIGKPLGEQFRKEVHIKNLPSLFKKTKPMLETEVLDNDGGGLATIFEP

SEQ ID NO: 61381 - protein, 81 aa, Homo sapiens
LLMMAGIDDCYTSAQGCTATLGNFAKATFDAISKTYSYLTPDLWKETVFTKSPYQEFTDHLVKTHTRVSVQQTQAPAVATT

SEQ ID NO: 61382 - protein, 58 aa, Homo sapiens
LKHLPEKYMMNSVLENFTILQVVTSRDSQETLLVIAFVFEVSTSEHGAQHHVYKLVKD

SEQ ID NO: 61383 - protein, 371 aa, Homo sapiens
IKAWDIGVATMKKGEICHLLCKPEYAYGSAGSLPKIPSNATLFFEIELLDFKGEDLFEDGGIIRRTKRKGEGYSNPNEGATVEIHLEGRCGGRMFDCRDVAFTVGEGEDHDIPIGIDKALEKMQREEQCILYLGPRYGFGEAGKPKFGIEPNAELIYEVTLKSFEKAKESWEMDTKEKLEQAAIVKEKGTVYFKGGKYMQAVIQYGKIVSWLEMEYGLSEKESKASESFLLAAFLNLAMCYLKLREYTKAVECCDKALGLDSANEKGLYRRGEAQLLMNEFESAKGDFEKVLEVNPQNKAARLQISMCQKKAKEHNERDRRIYANMFKKFAEQDAKEEANKAMGKKTSEGVTNEKGTDSQAMEEEKPEGHV

SEQ ID NO: 61384 - protein, 189 aa, Homo sapiens
LDNKGKSTAGNFLVNPLEPKNAEKLKVKIADLGNACWVHKHFTEDIQTRQYRSLEVLIGSGYNTPADIWSTACMAFELATGDYLFEPHSGEEYTRDEDHIALIIELLGKVPRKLIVAGKYSKEFFTKKGDLKHITKLKPWGLFEVLVEKYEWSQEEAAGFTDFLLPMLELIPEKRATAAECLRHPWLNS

SEQ ID NO: 61385 - protein, 382 aa, Homo sapiens
IFLLLSLAASWSKAENDFGLVQPLVTMEQLLWVSGRQIGSVDTFRIPLITATPRGTLLAFAEARKMSSSDEGAKFIALRRSMDQGSTWSPTAFIVNDGDVPDGLNLGAVVSDVETGVVFLFYSLCAHKAGCQVASTMLVWSKDDGVSWSTPRNLSLDIGTEVFAPGPGSGIQKQREPRKGRLIVCGHGTLERDGVFCLLSDDHGASWRYGSGVSGIPYGQPKQENDFNPDECQPYELPDGSVVINARNQNNYHCHCRIVLRSYDACDTLRPRDVTFDPELVDPVVAAGAVVTSSGIVFFSNPAHPEFRVNLTLRWSFSNGTSWRKETVQLWPGPSGYSSLATLEGSMDGEEQAPQLYVLYEKGRNHYTESISVAKISVYGTL

SEQ ID NO: 61386 - protein, 389 aa, Homo sapiens
LTEGFAVLHWKPPQNPVDTYDVQVTAPGAPPLQAETPGSAVDYPLHDLVLHTNYTATVRGLRGPNLTSPASITFTTGLEAPRDLEAKEVTPRTALLTWTEPPVRPAGYLLSFHTPGGQNQEILLPGGITSHQLLGLFPSTSYNARLQAMWGQSLLPPVSTSFTTGGLRIPFPRDCGEEMQNGAGASRTSTIFLNGNRERPLNVFWDMETDGGGWLVFQRRMDGQTDFWRDWEDYAHGFGNISGEFWLGNEALHSLTQAGDYSMRVDLRAGDEAVFAQYDSFHVDSAAEYYRLHLEGYHGTAGDSMSYHSGSVFSARDRDPNSLLISCAVSYRGAWWYRNCHYANLNGLYGSTVDHQGVSWYHWKGFEFSVPFTEMKLRPRNFRSPAGGG

SEQ ID NO: 61387 - protein, 298 aa, Homo sapiens
TALNDTVEFYRWTWSIADKRVENWPLMQSPWPTLSISTLYLLFVWLGPKWMKDREPFQMRLVLIIYNFGMVLLNLFIFRELFMGSYNAGYSYICQSVDYSNNVHEVRIAAALWWYFVSKGVEYLDTVFFILRKKNNQVSFLHVYHHCTMFTLWWIGIKWVAGGQAFFGAQLNSFIHVIMYSYYGLTAFGPWIQKYLWWKRYLTMLQLIQFHVTIGHTALSLYTDCPFPKWMHWALIAYAISFIFLFLNFYIRTYKEPKKPKAGKTAMNGISANGVSKSEKQLMIENGKKQKNGKAKGD

SEQ ID NO: 61388 - protein, 24 aa, Homo sapiens
IVYPPESAIQFSYKDEENGNRGDF

SEQ ID NO: 61389 - protein, 309 aa, Homo sapiens
IFFIIGLIFIPIGIGIFVTSNNIREIEIDYTGTEPSSPCNKCLSPDVTPCFCTINFTLEKSFEGNVFMYYGLSNFYQNHRRYVKSRDDSQLNGDSSALLNPSKECEPYRRNEDKPIAPCGAIANSMFNDTLELFLIGNDSYPIPIALKKKGIAWWTDKNVKFRNPPGGDNLEERFKGTTKPVNWLKPVYMLDSDPDNNGFINEDFIVWMRTAALPTFRKLYRLIERKSDLHPTLPAGRYSLNVTYNYPVHYFDGRKRMILSTISWMGGKNPFLGIAYIAVGSISFLLGVVLLVINHKYRNSSNTADITI

SEQ ID NO: 61390 - protein, 14 aa, Homo sapiens
LAPLAPFGFSYCLH

SEQ ID NO: 61391 - protein, 519 aa, Homo sapiens
IKESQNVDFICSVLVVADQLLITRLKEICEVALTEKLTLKNAAMLLEFAAMYSAKQLKLSCLQFIGLNMAALLEARSLDVLSDGVLKDLSEFYRKMIPAMDRRVITPYQDGPDISYLEVEDGDIFLKEEINMEQNHSETMFKKAKTKAKKKPRKRSDSSGGYNLSDIIQSPSSTGLLKSGKTNSVESLPELLTSDSEGSYAGVGSPRDLQSPDFTTGFHSDKIEAKVKPYVNGTSPVYSREDLKPWEKSPILKISAPQPIPSNRIDTTSSASWVAGSFSPVSPPVVDLRTIMEIEESRQKCGATPKSHLGKTVSHGVKLSQKQRKMIALTTKENNSGMNSMETVLFTPSKAPKPVNAWASSLHSVSSKSFRDFLLEEKKSVTSHSSGDHVKKVSFKGIENSQAPKIVRCSTHGTPGPEGNHISDLPLLDSPNPWLSSSVTAPSMVAPVTFASIVEEELQQEAALIRSREKPLALIQIEEHAIQDLLVFYEAFGNPEEFVIVERTPQGPLAVPMWNKHGC

SEQ ID NO: 61392 - protein, 17 aa, Homo sapiens
KKLTGKDVNFEFPEFQL

SEQ ID NO: 61393 - protein, 465 aa, Homo sapiens
LQGAELWKRFHEIGTEMIITKAGRRMFPAMRVKISGLDPHQQYYIAMDIVPVDNKRYRYVYHSSKWMVAGNADSPVPPRVYIHPDSPASGETWMRQVISFDKLKLTNNELDDQGHIILHSMHKYQPRVHVIRKDCGDDLSPIKPVPSGEGVKAFSFPETVFTTVTAYQNQQITRLKIDRNPFAKGFRDSGRNRMGLEALVESYAFWRPSLRTLTFEDIPGIPKQGNASSSTLLQGTGNGVPATHPHLLSGSSCSSPAFHLGPNTSQLCSLAPADYSACARSGLTLNRYSTSLAETYNRLTNQAGETFAPPRTPSYVGVSSSTSVNMSMGGTDGDTFSCPQTSLSMQISGMSPQLQYIMPSPSSNAFATNQTHQGSYNTFRLHSPCALYGYNFSTSPKLAASPEKIVSSQGSFLGSSPSGTMTDRQMLPPVEGVHLLSSGGQQSFFDSRTLGSLTLSSSQVSAHMV

SEQ ID NO: 61394 - protein, 32 aa, Homo sapiens
IAARKLLTVLGRIRSRVPASHPTVLFSTSERI

SEQ ID NO: 61395 - protein, 303 aa, Homo sapiens [sequence omitted]

SEQ ID NO: 61396 - protein, 28 aa, Homo sapiens
IPGCYGQYIVRTPEFLSSILSSTYPTCS

SEQ ID NO: 61397 - protein, 39 aa, Homo sapiens
MEEFPFPYYIILRDVNALPETLSDALRQWFELVTASDHP

SEQ ID NO: 61398 - protein, 945 aa, Homo sapiens
VPWVRTMGQKLKQRLRLDVGREICRQYPLFCFLLLCLSAASLLLNRYIHILMIFWSFVAGVVTFYCSLGPDSLLPNIFFTIKYKPKQLGLQELFPQGHSCAVCGKVKCKRHRPSLLLENYQPWLDLKISSKVDASLSEVLELVLENFVYPWYRDVTDDESFVDELRITLRFFASVLIRRIHKVDIPSIITKKLLKAAMKHIEVIVKARQKVKNTEFLQQAALEEYGPELHVALRSRRDELHYLRKLTELLFPYILPPKATDCRSLTLLIREILSGSVFLPSLDFLADPDTVNHLLIIFIDDSPPEKATEPASPLVPFLQKFAEPRNKKPSVLKLELKQIREQQDLLFRFMNFLKQEGAVHVLQFCLTVEEFNDRILRPELSNDEMLSLHEELQKIYKTYCLDESIDKIRFDPFIVEEIQRIAEGPYIDVVKLQTMRCLFEAYEHVLSLLENVFTPMFCHSDEYFRQLLRGAESPTRNSKLNRGSLSLDDFRNTQKRGESFGISRIGSKIKGVFKSTTMEGAMLPNYGVAEGEDDFIEEGIVVMEDDSPVEAVSTPNTPRNLAAWKISIPYVDFFEDPSSERKEKKERIPVFCIDVERNDRRAVGHEPEHWSVYRRYLEFYVLESKLTEFHGAFPDAQLPSKRIIGPKNYEFLKSKREEFQEYLQKLLQHPELSNSQLLADFLSPNGGETQFLDKILPDVNLGKIIKSVPGKLMKEKGQHLEPFIMNFINSCESPKPKPSRPELTILSPTSENNKKLFNDLFKNNANRAENTERKQNQNYFMEVMTVEGVYDYLMYVGRVVFQVPDWLHHLLMGTRILFKNTLEMYTDYYLQCKLEQLFQEHRLVSLITLLRDAIFCENTEPRSLQDKQKGAKQTFEEMMNYIPDLLVKCIGEETKYESIRLLFDGLQQPVLNKQLTYVLLDIVIQELFPELNKVQKEVTSVTSWM

SEQ ID NO: 61399 - protein, 82 aa, Homo sapiens
MQSFQHQQDPSQIDWAALAQAWIAQREASGQQSMVEQPPGMMPNGQDMSTMESGPNNHGNFQGDSNFNRMWQPGLLFMFSQF

SEQ ID NO: 61400 - protein, 34 aa, Homo sapiens
KAKKPKHSRSRSVEKSQRSGKKASRKHKSKSRSR

SEQ ID NO: 61401 - protein, 293 aa, Homo sapiens
VLFYQGKLCSMAGNFWQSSHYLQWILDKQDLLKERQKDLKFLSEEEYWKLQIFFTNVIQALGEHLKLRQQVIATATVYFKRFYARYSLKSIDPVLMAPTCVFLASKVEEFGVVSNTRLIAAATSVLKTRFSYAFPKEFPYRMNHILECEFYLLELMDCCLIVYHPYRPLLQYVQDMGQEDMLLPLAWRIVNDTYRTDLCLLYPPFMIALACLHVACVVQQKDARQWFAELSVDMEKILEIIRVILKLYEQWKNFDERKEMATILSKMPKPKPPPNSEGEQGPNGSQNSSYSQS

SEQ ID NO: 61402 - protein, 24 aa, Homo sapiens
IPKYLQTGSKSGAQMNLKKRAWDS

SEQ ID NO: 61403 - protein, 102 aa, Homo sapiens
LRSFSNVTKQDNYNEEVADLKIKRSKLHEQVLDLGLTWKKIIKFLNEKLEKSKMQSINEDLKDILHAAKQIEVNCPFQKRRLDGKEEDEKMSRASDRFRGLR

SEQ ID NO: 61404 - protein, 1085 aa, Homo sapiens
KRLWGWASPLRQFSILPPHILTRLEEKKLTVDKLKDMRKDEIGHILHHVNIGLKVKQCVHQIPSVMMEASIQPITRTVLRVTLSIYADFTWNDQVHGTVGEPWWIWVEDPTNDHIYHSEYFLALKKQVISKEAQLLVFTIPIFEPLPSQYYIRAVSDRWLGAEAVCIINFQHLILPERHPPHTELLDLQPLPITALGCKAYEALYNFSHFNPVQTQIFHTLYHTDCNVLLGAPTGSGKTVAAELAIFRVFNKYPTSKAVYIAPLKALVRERMDDWKVRIEEKLGKKVIELTGDVTPDMKSIAKADLIVTTPEKWDGVSRSWQNRNYVQQVTILIIDEIHLLGEERGPVLEVIVSRTNFISSHTEKPVRIVGLSTALANARDLADWLNIKQMGLFNFRPSVRPVPLEVHIQGFPGQHYCPRMASMNKPAFQAIRSHSPAKPVLIFVSSRRQTRLTALELIAFLATEEDPKQWLNMDEREMENIIATVRDSNLKLTLAFGIGMHHAGLHERDRKTVEELFVNCKVQVLIATSTLAWGVNFPAHLVIIKGTEYYDGKTRRYVDFPITDVLQMMGRAGRPQFDDQGKAVILVHDIKKDFYKKFLYEPFPVESSLLGVLSDHLNAEIAGGTITSKQDALDYITWTYFFRRLIMNPSYYNLGDVSHDSVNKFLSHLIEKSLIELELSYCIEIGEDNRSIEPLTYGRIASYYYLKHQTVKMFKDRLKPECSTEELLSILSDAEEYTDLPVRHNEDHMNSELAKCLPIESNPHSFDSPHTKAHLLLQAHLSRAMLPCPDYDTDTKTVLDQALRVCQAMLDVAANQGWLVTVLNITNLIQMVIQGRWLKDSSLLTLPNIENHHLHLFKKWKPIMKGPHARGRTSIESLPELIHACGGKDHVFSSMVESELHAAKTKQAWNFLSHLPVINVGISVKGSWDDLVEGHNELSVSTLTADKRDDNKWIKLHADQEYVLQVSLQRVHFGFHKGKPESCAVTPRFPKSKDEGWFLILGEVDKRELIALKRVGYIRNHHVASLSFYTPEIPGRYIYTLYFMSDCYLGLDQQYDIYLNVTQASLSAQVNTKVSDSLTDLALK

SEQ ID NO: 61405 - protein, 510 aa, Homo sapiens
VKETPHRPSDGLSNTESSDGLNKLLAHLLMLSKRCPFKDVREKSEFILKSIQELGIRIPRPLGQGPSRFIPEKEILQVGSEDAQMHALFADSFAALGRLDNITLVMVFHPQYLESFLKTQHYLLQMDGPLPLHYRHYIGIMAAARHQCSYLVNLHVNDFLHVGGDPKWLNGLENAPQKLQNLGELNKVLAHRPWLITKEHIEGLLKAEEHSWSLAELVHAVVLLTHYHSLASFTFGCGISPEIHCDGGHTFRPPSVSNYCICDITNGNHSVDEMPVNSAENVSVSDSFFEVEALMEKMRQLQECRDEEEASQEEMASRFEIEKRESMFVFSSDDEEVTPARAVSRHFEDTSYGYKDFSRHGMHVPTFRVQDYCWEDHGYSLVNRLYPDVGQLIDEKFHIAYNLTYNTMAMHKDVDTSMLRRAIWNYIHCMFGIRYDDYDYGEINQLLDRSFKVYIKTVVCTPEKVTKRMYDSFWRQFKHSEKVHVNLLLIEARMQAELLYALRAITRYMT

SEQ ID NO: 61406 - protein, 62 aa, Homo sapiens
LEATAWALKVAENELGITPVVSAQAVVAGSDPLGLIAYLSHFHSAFKSMAHSPGDLKERRAG

SEQ ID NO: 61407 - protein, 691 aa, Homo sapiens
IIPTVKKIVLLAGWALFLFLAYKVSKTDREYQEYNPYEVLNLDPGATVAEIKKQYRLLSLKYHPDKGGDEVMFMRIAKAYAALTDEESRKNWEEFGNPDGPQATSFGIALPAWIVDQKNSILVLLVYGLAFMVILPVVVGSWWYRSIRYSGDQILIRTTQIYTYFVYKTRNMDMKRLIMVLAGASEFDPQYNKDATSRPTDNILIPQLIREIGSINLKKNEPPLTCPYSLKARVLLLSHLARMKIPETLEEDQQFMLKKCPALLQEMVNVICQLIVMARNREEREFRAPTLASLENCMKLSQMAVQGLQQFKSPLLQLPHIEEDNLRRVSNHKKYKIKTIQDLVSLKESDRHTLLHFLEDEKYEEVMAVLGSFPYVTMDIKSQVLDDEDSNNITVGSLVTVLVKLTRQTMAEVFEKEQSICAAEEQPAEDGQGETNKNRTKGGWQQKSKGPKKTAKSKKKKPLKKKPTPVLLPQSKQQKQKQANGVVGNEAAVKEDEEEVSDKGSDSEEEETNRDSQSEKDDGSDRDSDREQDEKQNKDDEAEWQELQQSIQRKERALLETKSKITHPVYSLYFPEEKQEWWWLYIADRKEQTLISMPYHVCTLKDTEEVELKFPAPGKPGNYQYTVFLRSDSYMGLDQIKPLKLEVHEAKPVPENHPQWDTAIEGDEDQEDSEGFEDSFEEEEEEEEDDD

SEQ ID NO: 61408 - protein, 21 aa, Homo sapiens
KHTAKRESSIGNQIKNNTSCV

SEQ ID NO: 61409 - protein, 429 aa, Homo sapiens
LEVLEKEFDKAFVDVDLLLGEIDPDQADITYEGRQKMTSLSSCFAQLCHKAQSVSQINHKLEAQLVDLKSELTETQAEKVVLEKEVHDQLLQLHSIQLQLHAKTGQSADSGTIKAKLSGPSVEELERELEANKKEKMKEAQLEAEVKLLRKENEALRRHIAVLQAEVYGARLAAKYLDKELAGRVQQIQLLGRDMKGPAHDKLWNQLEAEIHLHRHKTVIRACRGRNDLKRPMQAPPGHDQDSLKKSQGVGPIRKVLLLKEDHEGLGISITGGKEHGVPILISEIHPGQPADRCGGLHVGDAILAVNGVNLRDTKHKEAVTILSQQRGEIEFEVVYVAPEVDSDDENVEYEDESGHRYRLYLDELEGGGNPGASCKDTSGEIKVLQGFNKKAVTDTHENGDLGTASETPLDDGASKLDDLHTLYHKKSY

SEQ ID NO: 61410 - protein, 92 aa, Homo sapiens
VVSLSTPIRWHRGQDPQAHIHRNREGNTIPSFFNWFSDHSLLEFDRIAEIIKGELWPNPLQYYLMGEGPRRGIRGPPRQPVESARSFRFQSG

SEQ ID NO: 61411 - protein, 741 aa, Homo sapiens
LTSLPPTLRPSCPEGLQPAVCRACLCARGAAPGRRPGAELFPQGGSAAQPRGSGGLATQDPAPQPRTPSGGEVWLLSGAAPDHWTAGAMPVGGLLPLFSSPAGGVLGGGLGGGGGRKGSGPAALRLTEKFVLLLVFSAFITLCFGAIFFLPDSSKLLSGVLFHSSPALQPAADHKPGPGARAEDAAEGRARRREEGAPGDPEAALEDNLARIRENHERALREAKETLQKLPEEIQRDILLEKKKVAQDQLRDKAPFRGLPPVDFVPPIGVESREPADAAIREKRAKIKEMMKHAWNNYKGYAWGLNELKPISKGGHSSSLFGNIKGATIVDALDTLFIMEMKHEFEEAKSWVEENLDFNVNAEISVFEVNIRFVGGLLSAYYLSGEEIFRKKAVELGVKLLPAFHTPSGIPWALLNMKSGIGRNWPWASGGSSILAEFGTLHLEFMHLSHLSGNPIFAEKVMNIRTVLNKLEKPQGLYPNYLNPSSGQWGQHHVSVGGLGDSFYEYLLKAWLMSDKTDLEAKKMYFDAVQAIETHLIRKSSSGLTYIAEWKGGLLEHKMGHLTCFAGGMFALGADAAPEGMAQHYLELGAEIARTCHESYNRTFMKLGPEAFRFDGGVEAIATRQNEKYYILRPEVMETYMYMWRLTHDPKYRKWAWEAVEALENHCRVNGGYSGLRDVYLLHESYDDVQQSFFLAETLKYLYLIFSDDDLLPLEHWIFNSEAHLLPILPKDKKEVEIREE

SEQ ID NO: 61412 - protein, 87 aa, Homo sapiens
TLCWWTTLSLLSVWRRDFSKESSGTWGKIATCISYSLWNTLGIAEYEKWYWKELALGLWRQQYSGRIWNPAFGVYALEPLIRKPHLC

SEQ ID NO: 61413 - protein, 40 aa, Homo sapiens
KTEDNNTLVFIVDVKANKHRIKQAMKKLYDIDVAKVNTLI

SEQ ID NO: 61414 - protein, 199 aa, Homo sapiens
IDNKEKNKMTVMNVAMVMAPNLFMCHALGLKSSEQREFVMAAGTANTMHLLIKYQKLLWTIPKFIVNQVRKQNTENHKKDKRAMKKLLKKMAYDREKYEKQDKSTNDADVPQGVIRVQAPHLSKVSMAIQLTEELKASDVLARFLSQESGVAQTLKKGEVFLYEIGGNIGERCLDDDTYMKDLYQLNPNAEWVIKSKPL

SEQ ID NO: 61415 - protein, 447 aa, Homo sapiens
LCSMASWIPCLCGSAPCLLCRCCPSGNNSTVTRLIYALFLLVGVCVACVMLIPGMEEQLNKIPGFCENEKGVVPCNILVGYKAVYRLCFGLAMFYLLLSLLMIKVKSSSDPRAAVHNGFWFFKFAAAIAIIIGAFFIPEGTFTTVWFYVGMAGAFCFILIQLVLLIDFAHSWNESWVEKMEEGNSRCWYAALLSATALNYLLSLVAIVLFFVYYTHPASCSENKAFISVNMLLCVGASVMSILPKIQESQPRSGLLQSSVITVYTMYLTWSAMTNEPETNCNPSLLSIIGYNTTSTVPKEGQSVQWWHAQGIIGLILFLLCVFYSSIRTSNNSQVNKLTLTSDESTLIEDGGARSDGSLEDGDDVHRAVDNERDGVTYSYSFFHFMLFLASLYIMMTLTNWYRYEPSREMKSQWTAVWVKISSSWIGIVLYVWTLVAPLVLTNRDFD

SEQ ID NO: 61416 - protein, 7 aa, Homo sapiens
VSLQHER

SEQ ID NO: 61417 - protein, 10 aa, Homo sapiens
LRLSVSSYGD

SEQ ID NO: 61418 - protein, 17 aa, Homo sapiens
IICPQSPPLELLMITNS

SEQ ID NO: 61419 - protein, 147 aa, Homo sapiens
VNFLLVNGFQTAIDIFEDRIRGIDIIKWMERYLRDKTVMIIVAISPKYKQDVEGAESQLDEDEHGLHTKYIHRMMQIEFIKQGSMNFRFIPVLFPNAKKEHVPTWLQNTHVYSWPKNKKNILLRLLREEEYVAPPRGPLPTLQVVPL

SEQ ID NO: 61420 - protein, 538 aa, Homo sapiens
IMGCVQCKDKEATKLTEERDGSLNQSSGYRYGTDPTPQHYPSFGVTSIPNYNNFHAAGGQGLTVFGGVNSSSHTGTLRTRGGTGVTLFVALYDYEARTEDDLSFHKGEKFQILNSSEGDWWEARSLTTGETGYIPSNYVAPVDSIQAEEWYFGKLGRKDAERQLLSFGNPRGTFLIRESETTKGAYSLSIRDWDDMKGDHVKHYKIRKLDNGGYYITTRAQFETLQQLVQHYSERAAGLCCRLVVPCHKGMPRLTDLSVKTKDVWEIPRESLQLIKRLGNGQFGEVWMGTWNGNTKVAIKTLKPGTMSPESFLEEAQIMKKLKHDKLVQLYAVVSEEPIYIVTEYMNKGSLLDFLKDGEGRALKLPNLVDMAAQVAAGMAYIERMNYIHRDLRSANILVGNGLICKIADFGLARLIEDNEYTARQGAKFPIKWTAPEAALYGRFTIKSDVWSFGILLTELVTKGRVPYPGMNNREVLEQVERGYRMPCPQDCPISLHELMIHCWKKDPEERPTFEYLQSFLEDYFTATEPQYQPGENL

SEQ ID NO: 61421 - protein, 123 aa, Homo sapiens
ISSFFRNVDTRVVGDGGSISKGKICSLKARAVLIDMEEGVVNEILQGPLRDVFDTKQLITDISGSGNNWAVGHKVFGSLYQDQILEKFRKSAEHCDCLQCFFIIHSMGGGKIFHSFACNSVKG

SEQ ID NO: 61422 - protein, 66 aa, Homo sapiens
MELKERFMRLYKKKAHLHHYLQVEGMEESCFTEAVSSLSALIQEYDQLDATKNMPVQDLPRLSIAM

SEQ ID NO: 61423 - protein, 66 aa, Homo sapiens
IGQRAVLKFAAATGATPIAGRFTPGTFTNQIQAAFWEPRLLVVTDPRADHQPLTEASYVNLPTIAL

SEQ ID NO: 61424 - protein, 10 aa, Homo sapiens
INAAEIESRV

SEQ ID NO: 61425 - protein, 37 aa, Homo sapiens
TNWTKSLPLPTPEEKMRQQAQTVQADVVPINITGTLC

SEQ ID NO: 61426 - protein, 73 aa, Homo sapiens
TGVLAAVLASQPSIPRSVGKDKKAIQASIRRNKETNTVLARLNSELQQQLKDVLEERISLEVQLEQLRPFSHL

SEQ ID NO: 61427 - protein, 474 aa, Homo sapiens
RAEMGTADLGPSSVPTPTNVTIESYNMNPIVYWEYQIMPQVPVFTVEVKNYGVKNSEWIDACINISHHYCNISDHVGDPSNSLWVRVKARVGQKESAYAKSEEFAVCRDGKIGPPKLDIRKEEKQIMIDIFHPSVFVNGDEQEVDYDPETTCYIRVYNVYVRMNGSEIQYKILTQKEDDCDEIQCQLAIPVSSLNSQYCVSAEGVLHVWGVTTEKSKEVCITIFNSSIKGSLWIPVVAALLLFLVLSLVFICFYIKKINPLKEKSIILPKSLISVVRSATLETKPESKYVSLITSYQPFSLEKEVVCEEPLSPATVPGMHTEDNPGKVEHTEELSSITEVVTTEENIPDVVPGSHLTPIERESSSPLSSNQSEPGSIALNSYHSRNCSESDHSRNGFDTDSSCLESHSSLSDSEFPPNNKGEIKTEGQELITVIKAPTSFGYDKPHVLVDLLVDDSGKESLIGYRPTEDSKEFS

SEQ ID NO: 61428 - protein, 275 aa, Homo sapiens
TEGLEMADHMMAMNHGRFPDGTNGLHHHPAHRMGMGQFPSPHHHQQQQPQHAFNALMGEHIHYGAGNMNATSGIRHAMGPGTVNGGHPPSALAPAARFNNSQFMGPPVASQGGSLPASMQLQKLNNQYFNHHPYPHNHYMPDLHPAAGHQMNGTNQHFRDCNPKHSGGSSTPGGSGGSSTPGGSGSSSGGGAGSSNSGGGSGSGNMPASVAHVPAAMLPPNVIDTDFIDEEVLMSLVIEMGLDRIKELPELWLGQNEFDFMTDFVCKQQPSRVSC

SEQ ID NO: 61429 - protein, 38 aa, Homo sapiens
VEKHVVQSISAQQEKETIAKCIANLKLLAKKAQAQPVM

SEQ ID NO: 61430 - protein, 13 aa, Homo sapiens
LNRTCASDFLPSA

SEQ ID NO: 61431 - protein, 15 aa, Homo sapiens
ITKMACGAEFSMIMD

SEQ ID NO: 61432 - protein, 5469 aa, Homo sapiens
IADERDKVQKKTFTKWINQHLMKVRKHVNDLYEDLRDGHNLISLLEVLSGDTLPREKGRMRFHRLQNVQIALDYLKRRQVKLVNIRNDDITDGNPKLTLGLIWTIILHFQISDIHVTGESEDMSAKERLLLWTQQATEGYAGIRCENFTTCWRDGKLFNAIIHKYRPDLIDMNTVAVQSNLANLEHAFYVAEKIGVIRLLDPEDVDVSSPDEKSVITYVSSLYDAFPKVPEGGEGIGANDVEVKWIEYQNMVNYLIQWIRHHVTTMSERTFPNNPVELKALYNQYLQFKETEIPPKETEKSKIKRLYKLLEIWIEFGRIKLLQGYHPNDIEKEWGKLIIAMLEREKALRPEVERLEMLQQIANRVQRDSVICEDKLILAGNALQSDSKRLESGVQFQNEAEIAGYILECENLLRQHVIDVQILIDGKYYQADQLVQRVAKLRDEIMALRNECSSVYSKGRILTTEQTKLMISGITQSLNSGFAQTLHPSLTSGLTQSLTPSLTSSSMTSGLSSGMTSRLTPSVTPAYTPGFPSGLVPNFSSGVEPNSLQTLKLMQIRKPLLKSSLLDQNLTEEEINMKFVQDLLNWVDEMQVQLDRTEWGSDLPSVESHLENHKNVHRAIEEFESSLKEAKISEIQMTAPLKLTYAEKLHRLESQYAKLLNTSRNQERHLDTLHNFVSRATNELIWLNEKEEEEVAYDWSERNTNIARKKDYHAELMRELDQKEENIKSVQEIAEQLLLENHPARLTIEAYRAAMQTQWSWILQLCQCVEQHIKENTAYFEFFNDAKEATDYLRNLKDAIQRKYSCDRSSSIHKLEDLVQESMEEKEELLQYKSTIANLMGKAKTIIQLKPRNSDCPLKTSIPIKAICDYRQIEITIYKDDECVLANNSHRAKWKVISPTGNEAMVPSVCFTVPPPNKEAVDLANRIEQQYQNVLTLWHESHINMKSVVSWHYLINEIDRIRASNVASIKTMLPGEHQQVLSNLQSRFEDFLEDSQESQVFSGSDITQLEKEVNVCKQYYQELLKSAEREEQEESVYNLYISEVRNIRLRLENCEDRLIRQIRTPLERDDLHESVFRITEQEKLKKELERLKDDLGTITNKCEEFFSQAAASSSVPTLRSELNVVLQNMNQVYSMSSTYIDKLKTVNLVLKNTQAAEALVKLYETKLCEEEAVIADKNNIENLISTLKQWRSEVDEKRQVFHALEDELQKAKAISDEMFKTYKERDLDFDWHKEKADQLVERWQNVHVQIDNRLRDLEGIGKSLKYYRDTYHPLDDWIQQVETTQRKIQENQPENSKTLATQLNQQKMLVSEIEMKQSKMDECQKYAEQYSATVKDYELQTMTYRAMVDSQQKSPVKRRRMQSSADLIIQEFMDLRTRYTALVTLMTQYIKFAGDSLKRLEEEEKSLEEEKKEHVEKAKELQKWVSNISKTLKDAEKAGKPPFSKQKISSEEISTKKEQLSEALQTIQLFLAKHGDKMTDEERNELEKQVKTLQESYNLLFSESLKQLQESQTSGDVKVEEKIVAERQQEYKEKLQGICDLLTQTENRLIGHQEAFMIGDGTVELKKYQSKQEELQKDMQGSAQALAEVVKNTENFLKENGEKLSQEDKALIEQKLNEAKIKCEQLNLKAEQSKKELDKVVTTAIKEETEKVAAVKQLEESKTKIENLLDWLSNVDKDSERAGTKHKQVIEQNGTHFQEGDGKSAIGEEDEVNGNLLETDVDGQVGTTQENLNQQYQKVKAQHEKIISQHQAVIIATQSAQVLLEKQGQYLSPEEKEKLQKNMKELKVHYETALAESEKKMKLTHSLQEELEKFDADYTEFEHWLQQSEQELENLEAGADDINGLMTKLKRQKSFSEDVISHKGDLRYITISGNRVLEAAKSCSKRDGGKVDTSATHREVQRKLDHATDRFRSLYSKCNVLGNNLKDLVDKYQHYEDASCGLLAGLQACEATASKHLSEPIAVDPKNLQRQLEETKALQGQISSQQVAVEKLKKTAEVLLDARGSLLPAKNDIQKTLDDIVGRYEDLSKSVNERNEKLQITLTRSLSVQDGLDEMLDWMGNVESSLKEQGQVPLNSTALQDIISKNIMLEQDIAGRQSSINAMNEKVKKFMETTDPSTASSLQAKMKDLSARFSEASHKHKETLAKMEELKTKVELFENLSEKLQTFLETKTQALTEVDVPGKDVTELSQYMQESTSEFLEHKKHLEVLHSLLKEISSHGLPSDKALVLEKTNNLSKKFKEMEDTIKEKKEAVTSCQEQLDAFQVLVKSLKSWIKETTKKVPIVQPSFGAEDLGKSLEDTKKLQEKWSLKTPEIQKVNNSGISLCNLISAVTTPAKAIAAVKSGGAVLNGEGTATNTEEFWANKGLTSIKKDMTDISHGYEDLGLLLKDKIAELNTKLSKLQKAQEESSAMMQWLQKMNKTATKWQQTPAPTDTEAVKTQVEQNKSFEAELKQNVNKVQELKDKLTELLEENPDTPEAPRWKQMLTEIDSKWQELNQLTIDRQQKLEESSNNLTQFQTVEAQLKQWLVEKELMVSVLGPLSIDPNMLNTQRQQVQILLQEFATRKPQYEQLTAAGQGILSRPGEDPSLRGIVKEQLAAVTQKWDSLTGQLSDRCDWIDQAIVKSTQYQSLLRSLSDKLSDLDNKLSSSLAVSTHPDAMNQQLETAQKMKQEIQQEKKQIKVAQALCEDLSALVKEEYLKAELSRQLEGILKSFKDVEQKAENHVQHLQSACASSHQFQQMSRDFQAWLDTKKEEQNKSHPISAKLDVLESLIKDHKDFSKTLTAQSHMYEKTIAEGENLLLKTQGSEKAALQLQLNTIKTNWDTFNKQVKERENKLKESLEKALKYKEQVETLWPWIDKCQNNLEEIKFCLDPAEGENSIAKLKSLQKEMDQHFGMVELLNNTANSLLSVCEIDKEVVTDENKSLIQKVDMVTEQLHSKKFCLENMTQKFKEFQEVSKESKRQLQCAKEQLDIHDSLGSQAYSNKYLTMLQTQQKSLQALKHQVDLAKRLAQDLVVEASDSKGTSDVLLQVETIAQEHSTLSQQVDEKCSFLETKLQGIGHFQNTIREMFSQFAEFDDELDSMAPVGRDAETLQKQKETIKAFLKKLEALMASNDNANKTCKMMLATEETSPDLVGIKRDLEALSKQCNKLLDRAQAREEQVEGTIKRLEEFYSKLKEFSILLQKAEEHEESQGPVGMETETINQQLNMFKVFQKEEIEPLQGKQQDVNWLGQGLIQSAAKSTSTQGLEHDLDDVNARWKTLNKKVAQRAAQLQEALLHCGRFQDALESLLSWMVDTEELVANQKPPSAEFKVVKAQIQEQKLLQRLLDDRKSTVEVIKREGEKIATTAEPADKVKILKQLSLLDSRWEALLNKAETRNRQLEGISVVAQQFHETLEPLNEWLTTIEKRLVNCEPIGTQASKLEEQIAQHKALEDDIINHNKHLHQAVSIGQSLKVLSSREDKDMVQSKLDFSQVWYIEIQEKSHSRSELLQQALCNAKIFGEDEVELMNWLNEVHDKLSKLSVQDYSTEGLWKQQSELRVLQEDILLRKQNVDQALLNGLELLKQTTGDEVLIIQDKLEAIKARYKDITKLSTDVAKTLEQALQLARRLHSTHEELCTWLDKVEVELLSYETQVLKGEEASQAQMRPKELKKEAKNNKALLDSLNEVSSALLELVPWRAREGLEKMVAEDNERYRLVSDTITQKVEEIDAAILRSQQFDQAADAELSWITETEKKLMSLGDIRLEQDQTSAQLQVQKTFTMEILRHKDIIDDLVKSGHKIMTACSEEEKQSMKKKLDKVLKNYDTICQINSERYLQLERAQSLVNQFWETYEELWPWLTETQSIISQLPAPALEYETLRQQQEEHRQLRELIAEHKPHIDKMNKTGPQLLELSPGEGFSIQEKYVAADTLYSQIKEDVKKRAVALDEAISQSTQFHDKIDQILESLERIVERLRQPPSISAEVEKIKEQISENKNVSVDMEKLQPLYETLKQRGEEMIARSGGTDKDISAKAVQDKLDQMVFIWENIHTLVEEREAKLLDVMELAEKFWCDHMSLIVTIKDTQDFIRDLEDPGIDPSVVKQQQEAAETIREEIDGLQEELDIVINLGSELIAACGEPDKPIVKKSIDELNSAWDSLNKAWKDRIDKLEEAMQAAVQYQDGLQAVFDWVDIAGGKLASMSPIGTDLETVKQQIEELKQFKSEAYQQQIEMERLNHQAELLLKKVTEESDKHTVQDPLMELKLIWDSLEERIINRQHKLEGALLALGQFQHALDELLAWLTHTEGLLSEQKPVGGDPKAIEIELAKHHVLQNDVLAHQSTVEAVNKAGNDLIESSAGEEASNLQNKLEVLNQRWQNVLEKTEQRKQQLDGALRQAKGFHGEIEDLQQWLTDTERHLLASKPLGGLPETAKEQLNVHMEVCAAFEAKEETYKSLMQKGQQMLARCPKSAETNIDQDINNLKEKWESVETKLNERKTKLEEALNLAMEFHNSLQDFINWLTQAEQTLNVASRPSLILDTVLFQIDEHKVFANEVNSHREQIIELDKTGTHLKYFSQKQDVVLIKNLLISVQSRWEKVVQRLVERGRSLDDARKRAKQFHEAWSKLMEWLEESEKSLDSELEIANDPDKIKTQLAQHKEFQKSLGAKHSVYDTTNRTGRSLKEKTSLADDNLKLDDMLSELRDKWDTICGKSVERQNKLEEALLFSGQFTDALQALIDWLYRVEPQLAEDQPVHGDIDLVMNLIDNHKAFQKELGKRTSSVQALKRSARELIEGSRDDSSWVKVQMQELSTRWETVCALSISKQTRLEAALRQAEEFHSVVHALLEWLAEAEQTLRFHGVLPDDEDALRTLIDQHKEFMKKLEEKRAELNKATTMGDTVLAICHPDSITTIKHWITIIRARFEEVLAWAKQHQQRLASALAGLIAKQELLEALLAWLQWAETTLTDKDKEVIPQEIEEVKALIAEHQTFMEEMTRKQPDVDKVTKTYKRRAADPSSLQSHIPVLDKGRAGRKRFPASSLYPSGSQTQIETKNPRVNLLVSKWQQVWLLALERRRKLNDALDRLEELREFANFDFDIWRKKYMRWMNHKKSRVMDFFRRIDKDQDGKITRQEFIDGILSSKFPTSRLEMSAVADIFDRDGDGYIDYYEFVAALHPNKDAYKPITDADKIEDEVTRQVAKCKCAKRFQVEQIGDNKYRFFLGNQFGDSQQLRLVRILRSTVMVRVGGGWMALDEFLVKNDPCRAKGRTNMELREKFILADGASQGMAAFRPRGRRSRPSSRGASPNRSTSVSSQAAQAASPQVPATTTPKILHPLTRNYGKPWLTNSKMSTPCKAAECSDFPVPSAEGTPIQGSKLRLPGYLSGKGFHSGEDSGLITTAAARVRTQFADSKKTPSRPGSRAGSKAGSRASSRRGSDASDFDISEIQSVCSDVETVPQTHRPTPRAGSRPSTAKPSKIPTPQRKSPASKLDKSSKR

SEQ ID NO: 61433 - protein, 18 aa, Homo sapiens
LDGTEVPFSLLWLYLFSA

SEQ ID NO: 61434 - protein, 449 aa, Homo sapiens
LSGVEQLLEEFRRQLQQERPQEELELELRAGGGPQEDCPGPGSGGYSAMPDAIIRTKDSLAAGASFLRAPAAVRGWRQCVAACCSEPRCSVAVVELPRRPAPPAAVLGCYLFNCTARGRNVCKFALHSGYSSYSLSRAPDGAALATARASPRQEKDAPPLSKAGQDVVLHLPTDGVVLDGRESTDDHAIVQYEWALLQGDPSVDMKVPQSGTLKLSHLQEGTYTFQLTVTDTAGQRSSDNVSVTVLRAAYSTGGCLHTCSRYHFFCDDGCCIDITLACDGVQQCPDGSDEDFCQNLGLDRKMVTHTAASPALPRTTGPSEDAGGDSLVEKSQKATAPNKPPALSNTEKRNHSAFWGPESQIIPVMPDSSSSGKNRKEESYIFESKGDGGGGEHPAPETGAVLPLALGLAITALLLLMVACRLRLVKQKLKKARPITSEESDYLINGMYL

SEQ ID NO: 61435 - protein, 76 aa, Homo sapiens
RNHSAFWGPESQIIPVMPDSSSSGKNRKEESYIFESKGDGGGGEHPAPETGKCPPWKPFADCSLLRTACPLAEDIP

SEQ ID NO: 61436 - protein, 127 aa, Homo sapiens
LEAPGSTNDRLFLVKGGIFLGTVAAAGMLAGFITTLSLAKKKSPEWFNKGSMATAALPESGSSLALRALGWGSLYAWCGVGVISFAVWKALGVHSMNDFRSKMQSIFPTIPKNSESAVEWEETLKSK

SEQ ID NO: 61437 - protein, 66 aa, Homo sapiens
RDASLMAMRRRIEGLTPEEIRNLSKEEMHMPTTMEDFEMALKKVSKSVSAADIERYEKWIFEFGSC

SEQ ID NO: 61438 - protein, 595 aa, Homo sapiens
IEDTHQKPKMPKPINVRVTTMDAELEFAIQPNTTGKQLFDQVVKTIGLREVWYFGLHYVDNKGFPTWLKLDKKVSAQEVRKENPLQFKFRAKFYPEDVAEELIQDITQKLFFLQVKEGILSDEIYCPPETAVLLGSYAVQAKFGDYNKEVHKSGYLSSERLIPQRVMDQHKLTRDQWEDRIQVWHAEHRGMLKDNAMLEYLKIAQDLEMYGINYFEIKNKKGTDLWLGVDALGLNIYEKDDKLTPKIGFPWSEIRNISFNDKKFVIKPIDKKAPDFVFYAPRLRINKRILQLCMGNHELYMRRRKPDTIEVQQMKAQAREEKHQKQLERQQLETEKKRRETVEREKEQMMREKEELMLRLQDYEEKTKKAERELSEQIQRALQLEEERKRAQEEAERLEADRMAALRAKEELERQAVDQIKSQEQLAAELAEYTAKIALLEEARRRKEDEVEEWQHRAKEAQDDLVKTKEELHLVMTAPPPPPPPVYEPVSYHVQESLQDEGAEPTGYSAELSSEGIRDDRNEEKRITEAEKNERVQRQLLTLSSELSQARDENKRTHNDIIHNENMRQGRDKYKTLRQIRQGNTKQRIDEFEAL

SEQ ID NO: 61439 - protein, 48 aa, Homo sapiens
MNEKLQHCMELTDLMRNHLNEKRALRLEWMIVILITIEVMFELGRVFF

SEQ ID NO: 61440 - protein, 18 aa, Homo sapiens
LKEYADYESLVEIISQKV

SEQ ID NO: 61441 - protein, 266 aa, Homo sapiens
IFLFCCREQPCCAGLRVFRNQLPRKNDFYSYEPPSENPPPETGESVCLQLKSGAHLCRVCGCLGPKTCSRCHKAYYCSKEHQTLDWRLGHKQACAQPDHLDHIIPDHNFLFPEFEIVIETEDEIMPEVVEKEDYSEIIGSMGEALEEELDSMAKHESREDKIFQKFKTQIALEPEQILRYGRGIAPIWISGENIPQEKDIPDCPCGAKRILEFQVMPQLLNYLKADRLGKSIDWGILAVFTCAESCSLGTGYTEEFVWKQDVTDTP

SEQ ID NO: 61442 - protein, 246 aa, Homo sapiens
LGCLCLALLCLGGADKRLRDNHEWKKLIMVQHWPETVCEKIQNDCRDPPDYWTIHGLWPDKSEGCNRSWPFNLEEIKDLLPEMRAYWPDVIHSFPNRSRFWKHEWEKHGTCAAQVDALNSQKKYFGRSLELYRELDLNSVLLKLGIKPSINYYQVADFKDALARVYGVIPKIQCLPPSQDEEVQTIGQIELCLTKQDQQLQNCTEPGEQPSPKQEVWLANGAAESRGLRVCEDGPVFYPPPKKTKH

SEQ ID NO: 61443 - protein, 534 aa, Homo sapiens
ITDFGLSKEAIDHDKRAYSFCGTIEYMAPEVVNRRGHTQSADWWSFGVLMFEMLTGSLPFQGKDRKETMALILKAKLGMPQFLSGEAQSLLRALFKRNPCNRLGAGIDGVEEIKRHPFFVTIDWNTLYRKEIKPPFKPAVGRPEDTFHFDPEFTARTPTDSPGVPPSANAHHLFRGFSFVASSLIQEPSQQDLHKVPVHPIVQQLHGNNIHFTDGYEIKEDIGVGSYSVCKRCVHKATDTEYAVKIIDKSKRDPSEEIEILLRYGQHPNIITLKDVYDDGKFVYLVMELMRGGELLDRILRQRYFSEREASDVLCTITKTMDYLHSQGVVHRDLKPSNILYRDESGSPESIRVCDFGFAKQLRAGNGLLMTPCYTANFVAPEVLKRQGYDAACDIWSLGILLYTMLAGFTPFANGPDDTPEEILARIGSGKYALSGGNWDSISDAAKDVVSKMLHVDPHQRLTAMQVLKHPWVVNREYLSPNQLSRQDVHLVKGAMAATYFALNRTPQAPRLEPVLSSNLAQRRGMKRLTSTRL

SEQ ID NO: 61444 - protein, 194 aa, Homo sapiens
IQSPYLPIYFGNVCLRFLPVFDIVIHRFLELLPVSKSLETLLDHLGGLYKFHDRPVTYLYNTLHYYEMHLRDRAFLKRKLVHAIIGSLKDNRPQGWCLSDTYLKCAMNAREENPWVPDDTYYCRLIGRLVDTMAGKSPGPFPNCDWRFNEFPNPAAHALHVTCVELMALAVSGKEVGNALLNVVLKRYVFWFMQ

SEQ ID NO: 61445 - protein, 197 aa, Homo sapiens
ISSPSLTSETEWVGYPFRLFDFTACHQSYSEMSCSYTLALAHAVWHHSSIGQLSLIPKFLTEVLLPIVKTEFQLLYVYHLVGPFLQRFQQERTRCMIEIGVAFYDMLLNVDQCSTHLNYMDPICDFLYHMKYMFTGDSVKEQVEKIICNLKPALKLRLRFITHISKMEPAAVPPQAMNSGSPAPQSNQVPVSLPVTQ

SEQ ID NO: 61446 - protein, 4 aa, Homo sapiens
MAGG

SEQ ID NO: 61447 - protein, 21 aa, Homo sapiens
IYIVNIVCVCVCVYIYICTVI

SEQ ID NO: 61448 - protein, 42 aa, Homo sapiens
MWPTLMQLWIFRMRSSPRCAQVLMNNLVNWLVEKKLLSLLQI

SEQ ID NO: 61449 - protein, 12 aa, Homo sapiens
KTQRGAFGANSE

SEQ ID NO: 61450 - protein, 132 aa, Homo sapiens
IINTFLKTSGGMTDPEKLIRIYPELLKRLDDVSNDVRMAAASTLVTWLQCVKGANAKSYYQSSVQYLYRELLVHLDDPERAIQDAILEVLKEGSGLFPDLLVRETEAVIHKHRSATYCEQLLQHVQAVPATQ

SEQ ID NO: 61451 - protein, 815 aa, Homo sapiens
MYSPPQCVPENTGYTYALSSSYSSDALDFETEHKLDPVFDSPRMSRRSLRLATTACTLGDGEAVGADSGTSSAVSLKNRAARTTKQRRSTNKSAFSINHVSRQVTSSGVSHGGTVSLQDAVTRRPPVLDESWIREQTTVDHFWGLDDDGDLKGGNKAAIQGNGDVGAAAATAHNGFSCSNCSMLSERKDVLTAHPAAPGPVSRVYSRDRNQKCDDCKGKRHLDAHTAAHSQSPRLPGRAGTLWHIWACAGYFLLQILRRIGAVGQAVSRTAWSALWLAVVAPGKAASGVFWWLGIGWYQFVTLISWLNVFLLTRCLRNICKFLVLLIPLFLLLAGLSLRGQGNFFSFLPVLNWASMHRTQRVDDPQDVFKPTTSRLKQPLQGDSEAFPWHWMSGVEQQVASLSGQCHHHGENLRELTTLLQKLQARVDQMEGGAAGPSASVRDAVGQPPRETDFMAFHQEHEVRMSHLEDILGKLREKSEAIQKELEQTKQKTISAVGEQLLPTVEHLQLELDQLKSELSSWRHVKTGCETVDAVQERVDVQVREMVKLLFSEDQQGGSLEQLLQRFSSQFVSKGDLQTMLRDLQLQILRNVTHHVSVTKQLPTSEAVVSAVSEAGASGITEAQARAIVNSALKLYSQDKTGMVDFALESGGGSILSTRCSETYETKTALMSLFGIPLWYFSQSPRVVIQPDIYPGNCWAFKGSQGYLVVRLSMMIHPAAFTLEHIPKTLSPTGNISSAPKDFAVYGLENEYQEEGQLLGQFTYDQDGESLQMFQALKRPDDTAFQIVELRIFSNWGHPEYTCLYRFRVHGEPVK

SEQ ID NO: 61452 - protein, 664 aa, Homo sapiens
RNQKCGASFYVNRILWLARYTASSFSSFLVQLFQVVLMKLSYESENYKLKTHESKDCESESYKSKSHESKAHASYYGRMNVREVLREDGHLSVNGEALCYFLLQILRRIGAVGQAVSRTAWSALWLAVVAPGKAASGVFWWLGIGWYQFVTLISWLNVFLLTRCLRNICKFLVLLIPLFLLLAGLSLRGQGNFFSFLPVLNWASMHRTQRVDDPQDVFKPTTSRLKQPLQGDSEAFPWHWMSGVEQQVASLSGQCHHHGENLRELTTLLQKLQARVDQMEGGAAGPSASVRDAVGQPPRETDFMAFHQEHEVRMSHLEDILGKLREKSEAIQKELEQTKQKTISAVGEQLLPTVEHLQLELDQLKSELSSWRHVKTGCETVDAVQERVDVQVREMVKLLFSEDQQGGSLEQLLQRFSSQFVSKGDLQTMLRDLQLQILRNVTHHVSVTKQLPTSEAVVSAVSEAGASGITEAQARAIVNSALKLYSQDKTGMVDFALESGGGSILSTRCSETYETKTALMSLFGIPLWYFSQSPRVVIQPDIYPGNCWAFKGSQGYLVVRLSMMIHPAAFTLEHIPKTLSPTGNISSAPKDFAVYGLENEYQEEGQLLGQFTYDQDGESLQMFQALKRPDDTAFQIVELRIFSNWGHPEYTCLYRFRVHGEPVK

SEQ ID NO: 61453 - protein, 292 aa, Homo sapiens
KGDYYEAHQMYRTLFFRYMSQSKHTEARELMYSGALLFFSHGQQNSAADLSMLVLESLEKAEVEVADELLENLAKVFSLMDPNSPERVTFVSRALKWSSGGSGKLGHPRLHQLLALTLWKEQNYCESRYHFLHSADGEGCANMLVEYSTSRGFRSEVDMFVAQAVLQFLCLKNKSSASVVFTTYTQKHPSIEDGPPFVEPLLNFIWFLLLAVDGGKLTVFTVLCEQYQPSLRRDPMYNEYLDRIGQLFFGVPPKQTSSYGGLLGNLLTSLMGSSEQEDGEESPSDGSPIELD

SEQ ID NO: 61454 - protein, 628 aa, Homo sapiens
LARLEGREFEFLMRQPSVTIGRNSSQGSVDLSMGLSSFISRRHLQLSFQEPHFYLRCLGKNGVFVDGAFQRRGAPALQLPKQCTFRFPSTAIKIQFTSLYHKEEAPASPLRPLYPQISPLKIHIPEPDLRSMVSPVPSPTGTISVPNSCPASPRGAGSSSYRFVQNVTSDLQLAAEFAAKAASEQQADTSGGDSPKDESKPPFSYAQLIVQAISSAQDRQLTLSGIYAHITKHYPYYRTADKGWQNSIRHNLSLNRYFIKVPRSQEEPGKGSFWRIDPASEAKLVEQAFRKRRQRGVSCFRTPFGPLSSRSAPASPTHPGLMSPRSGGLQTPECLSREGSPIPHDPEFGSKLASVPEYRYSQSAPGSPVSAQPVIMAVPPRPSSLVAKPVAYMPASIVTSQQPAGHAIHVVQQAPTVTMVRVVTTSANSANGYILTSQGAAGGSHDAAGAAVLDLGSEARGLEEKPTIAFATIPAAGGVIQTVASQMAPGVPGHTVTILQPATPVTLGQHHLPVRAVTQNGKHAVPTNSLAGNAYALTSPLQLLATQASSSAPVVVTRVCEVGPKEPAAAVAATATTTPATATTASASASSTGEPEVKRSRVEEPSGAVTTPAGVIAAAGPQGPGTGE

SEQ ID NO: 61455 - protein, 51 aa, Homo sapiens
LLKMPSVAQFVLTPSTEVCSPRYHRDANTALPLALRTVSRLVEREAGLMPG

SEQ ID NO: 61456 - protein, 97 aa, Homo sapiens
KNRGYAASCRIKRVTQKEELERQRVELQQEVEKLARENSSMRLELDALRSKYEALQTFARTVARGPVAPSKVATTSVITIVKSTELSSTSVPFSAAS

SEQ ID NO: 61457 - protein, 36 aa, Homo sapiens
LENPDYPKREDRIIINPSSSLLASQDETKLPKIRLF

SEQ ID NO: 61458 - protein, 104 aa, Homo sapiens
LQEESGLTVDALHKVGQIVFEFVGEPELMDVHVFCTDSIQGTPVESDEMRPCWFQLDQIPFKDMWPDDSYWFPLLLQKKKFHGYFKFQGQDTILDYTLREVDTV

SEQ ID NO: 61459 - protein, 234 aa, Homo sapiens
VMIVLSGSLLHRGAPYRDPLRIPREHVHNASAHLTFNKFWRRYGKLSRHLMKVKLKKYTKFLFVRDPFVRLISAFRSKFELENEEFYRKFAVPMLRLYANHTSLPASAREAFRAGLKVSFANFIQYLLDPHTEKLAPFNEHWRQVYRLCHPCQIDYDFVGKLETLDEDAAQLLQLLQVDRQLRFPPSYRNRTASSWEEDWFAKIPLAWRQQLYKLYEADFVLFGYPKPENLLRD

SEQ ID NO: 61460 - protein, 212 aa, Homo sapiens
LMQAIKCVVVGDGAVGKTCLLISYTTNAFPGEYIPTVFDNYSANVMVDGKPVNLGLWDTAGQEDYDRLRPLSYPQTVGETYGKDITSRGKDKPIADVFLICFSLVSPASFENVRAKWYPEVRHHCPNTPIILVGTKLDLRDDKDTIEKLKEKKLTPITYPQGLAMAKEIGAVKYLECSALTQRGLKTVFDEAIRAVLCPPPVKKRKRKCLLL

SEQ ID NO: 61461 - protein, 20 aa, Homo sapiens
LPTDQLHNQCISWRIYPYCL

SEQ ID NO: 61462 - protein, 16 aa, Homo sapiens
IPGVLGAHTARPQDSV

SEQ ID NO: 61463 - protein, 11 aa, Homo sapiens
LEKPAKYDDIK

SEQ ID NO: 61464 - protein, 37 aa, Homo sapiens
LKEKIDCQSGKKLEDGPKYLKSGDATIVDMVPGKLLC

SEQ ID NO: 61465 - protein, 454 aa, Homo sapiens
IYNPRFGPREGQEENKILFYHPNEVEKNEKIRNVGLCEAIVQFTRTFSPSKPAKSLHTQKNRQFFNEPEENFWMVMVVRNPIIEKQSKDGKPVIEYQEEELLDKVYSSVLRQCYSMYKLFNGTFLKAMEDGGVKLLKERLEKFFHRYLQTLHLQSCDLLDIFGGISFFPLDKMTYLKIQSFINRMEESLNIVKYTAFLYNDQLIWSGLEQDDMRILYKYLTTSLFPRHIEPELAGRDSPIRAEMPGNLQHYGRFLTGPLNLNDPDAKCRFPKIFVNTDDTYEELHLIVYKAMSAAVCFMIDASVHPTLDFCRRLDSIVGPQLTVLASDICEQFNINKRMSGSEKEPQFKFIYFNHMNLAEKSTVHMRKTPSVSLTSVHPDLMKILGDINSDFTRVDEDEEIIVKAMSDYWVVGKKSDRRELYVILNQKNANLIEVNEEVKKLCATQFNNIFFLD

SEQ ID NO: 61466 - protein, 216 aa, Homo sapiens
RSPAMNSFSTSAFGPVAFSLGLLLVLPAAFPAPVPPGEDSKDVAAPHRQPLTSSERIDKQIRYILDGISALRKETCNKSNMCESSKEALAENNLNLPKMAEKDGCFQSGFNEETCLVKIITGLLEFEVYLEYLQNRFESSEEQARAVQMSTKVLIQFLQKKAKNLDAITTPDPTTNASLLTKLQAQNQWLQDMTTHLILRSFKEFLQSSLRALRQM

SEQ ID NO: 61467 - protein, 211 aa, Homo sapiens
ISIWDIYLHLEMGNGLSDQTSILSNLPSFQSFHIVILGLDCAGKTTVLYRLQFNEFVNTVPTKGFNTEKIKVTLGNSKTVTFHFWDVGGQEKLRPLWKSYTRCTDGIVFVVDSVDVERMEEAKTELHKITRISENQGVPVLIVANKQDLRNSLSLSEIEKLLAMGELSSSTPWHLQPTCAIIGDGLKEGLEKLHDMIIKRRKMLRQQKKKR

SEQ ID NO: 61468 - protein, 20 aa, Homo sapiens
RDLWGRGLKCGCLKQKCINK

SEQ ID NO: 61469 - protein, 60 aa, Homo sapiens
LTDSDLKKTVDESARIQRAYNHYFDLIIINDNLDKAFEKLQTAIEKLRMEPQWVPISWVY

SEQ ID NO: 61470 - protein, 571 aa, Homo sapiens
KKLAAREEAKLLAGFMGVMNNMRKQKTLCDVILMVQERKIPAHRVVLAAASHFFNLMFTTNMLESKSFEVELKDAEPDIIEQLVEFAYTARISVNSNNVQSLLDAANQYQIEPVKKMCVDFLKEQVDASNCLGISVLAECLDCPELKATADDFIHQHFTEVYKTDEFLQLDVKRVTHLLNQDTLTVRAEDQVYDAAVRWLKYDEPNRQPFMVDILAKVRFPLISKNFLSKTVQAEPLIQDNPECLKMVISGMRYHLLSPEDREELVDGTRPRRKKHDYRIALFGGSQPQSCRYFNPKDYSWTDIRCPFEKRRDAACVFWDNVVYILGGSQLFPIKRMDCYNVVKDSWYSKLGPPTPRDSLAACAAEGKIYTSGGSEVGNSALYLFECYDTRTESWHTKPSMLTQRCSHGMVEANGLIYVCGGSLGNNVSGRVLNSCEVYDPATETWTELCPMIEARKNHGLVFVKDKIFAVGGQNGLGGLDNVEYYDIKLNEWKMVSPMPWKGVTVKCAAVGSIVYVLAGFQGVGRLGHILEYNTETDKWVANSKVRAFPVTSCLICVVDTCGANEETLET

SEQ ID NO: 61471 - protein, 4 aa, Homo sapiens
MTSQ

SEQ ID NO: 61472 - protein, 28 aa, Homo sapiens
LPCLCIYHKGCIDEWFEVNRSCPEHPSD

SEQ ID NO: 61473 - protein, 672 aa, Homo sapiens
RLAVRQQGDLVRKLKEDKAPQVDVDKAVAELKARKRVLEAKELALQPKDDIVDRAKMEDTLKRRFFYDQAFAIYGGVSGLYDFGPVGCALKNNIIQTWRQHFIQEEQILEIDCTMLTPEPVLKTSGHVDKFADFMVKDVKNGECFRADHLLKAHLQKLMSDKKCSVEKKSEMESVLAQLDNYGQQELADLFVNYNVKSPITGNDLSPPVSFNLMFKTFIGPGGNMPGYLRPETAQGIFLNFKRLLEFNQGKLPFAAAQIGNSFRNEISPRSGLIRVREFTMAEIEHFVDPSEKDHPKFQNVADLHLYLYSAKAQVSGQSARKMRLGDAVEQGVINNTVLGYFIGRIYLYLTKVGISPDKLRFRQHMENEMAHYACDCWDAESKTSYGWIEIVGCADRSCYDLSCHARATKVPLVAEKPLKEPKTVNVVQFEPSKGAIGKAYKKDAKLVMEYLAICDECYITEMEMLLNEKGEFTIETEGKTFQLTKDMINVKRFQKTLYVEEVVPNVIEPSFGLGRIMYTVFEHTFHVREGDEQRTFFSFPAVVAPFKCSVLPLSQNQEFMPFVKELSEALTRHGVSHKVDDSSGSIGRRYARTDEIGVAFGVTIDFDTVNKTPHTATLRDRDSMRQIRAEISELPSIVQDLANGNITWADVEARYPLFEGQETGKKETIEE

SEQ ID NO: 61474 - protein, 74 aa, Homo sapiens
MKLRFSHSVQNSERGKKIGNVMVTTSRNVVQTGKAVGQSVGGAFSSAKTAMSSWLSTFTTSTSQSLTEPPDEKP

SEQ ID NO: 61475 - protein, 60 aa, Homo sapiens
KSWCVRRSKPGCSMPEIWDVEDPANAGKTPLCNLLVKDSKPHFTTVFQNSVYKVLEVVKE

SEQ ID NO: 61476 - protein, 599 aa, Homo sapiens
LSRDCALAIKQRGACCEQCKGCTYEGNTYNSSFKWQSPAEPCVLRQCQEGVVTESGVRCVVHCKNPLEHLGMCCPTCPGCVFEGVQYQEGEEFQPEGSKCTKCSCTGGRTQCVREVCPILSCPQHLSHIPPGQCCPKCLGQRKVFDLPFGSCLFRSDVYDNGSSFLYDNCTACTCRDSTVVCKRKCSHPGGCDQGQEGCCEECLLRVPPEDIKVCKFGNKIFQDGEMWSSINCTICACVKGRTECRNKQCIPISSCPQGKILNRKGCCPICTEKPGVCTVFGDPHYNTFDGRTFNFQGTCQYVLTKDCSSPASPFQVLVKNDARRTRSFSWTKSVELVLGESRVSLQQHLTVRWNGSRIALPCRAPHFHIDLDGYLLKVTTKAGLEISWDGDSFVEVMAAPHLKGKLCGLCGNYNGHKRDDLIGGDGNFKFDVDDFAESWRVESNEFCNRPQRKPVPELCQGTVKVKLRAHRECQKLKSWEFQTCHSTVDYATFYRSCVTDMCECPVHKNCYCESFLAYTRACQREGIKVHWEPQQNCAATQCKHGAVYDTCGPGCIKTCDNWNEIGPCNKPCVAGCHCPANLVLHKGRCIKPVLCPQR

SEQ ID NO: 61477 - protein, 1039 aa, Homo sapiens
VELSRRQAVVKNFRTKMFHLRTCAAKLRPLTASQTVKTFSQNRPAAARTFQQIRCYSAPVAAEPFLSGTSSNYVEEMYCAWLENPKSVHKSWDIFFRNTNAGAPPGTAYQSPLPLSRGSLAAVAHAQSLVEAQPNVDKLVEDHLAVQSLIRAYQIRGHHVAQLDPLGILDADLDSSVPADIISSTDKLGFYGLDESDLDKVFHLPTTTFIGGQESALPLREIIRRLEMAYCQHIGVEFMFINDLEQCQWIRQKFETPGIMQFTNEEKRTLLARLVRSTRFEEFLQRKWSSEKRFGLEGCEVLIPALKTIIDKSSENGVDYVIMGMPHRGRLNVLANVIRKELEQIFCQFDSKLEAADEGSGDVKYHLGMYHRRINRVTDRNITLSLVANPSHLEAADPVVMGKTKAEQFYCGDTEGKKVMSILLHGDAAFAGQGIVYETFHLSDLPSYTTHGTVHVVVNNQIGFTTDPRMARSSPYPTDVARVVNAPIFHVNSDDPEAVMYVCKVAAEWRSTFHKDVVVDLVCYRRNGHNEMDEPMFTQPLMYKQIRKQKPVLQKYAELLVSQGVVNQPEYEEEISKYDKICEEAFARSKDEKILHIKHWLDSPWPGFFTLDGQPRSMSCPSTGLTEDILTHIGNVASSVPVENFTIHGGLSRILKTRGEMVKNRTVDWALAEYMAFGSLLKEGIHIRLSGQDVERGTFSHRHHVLHDQNVDKRTCIPMNHLWPNQAPYTVCNSSLSEYGVLGFELGFAMASPNALVLWEAQFGDFHNTAQCIIDQFICPGQAKWVRQNGIVLLLPHGMEGMGPEHSSARPERFLQMCNDDPDVLPDLKEANFDINQLYDCNWVVVNCSTPGNFFHVLRRQILLPFRKPLIIFTPKSLLRHPEARSSFDEMLPGTHFQRVIPEDGPAAQNPENVKRLLFCTGKVYYDLTRERKARDMVGQVAITRIEQLSPFPFDLLLKEVQKYPNAELAWCQEEHKNQGYYDYVKPRLRTTISRAKPVWYAGRDPAAAPATGNKKTHLTELQRLLDTAFDLDVFKNFS

SEQ ID NO: 61478 - protein, 308 aa, Homo sapiens
IDGTEKAECTEESIVEQTYAPAECVSQAIDINEPIGNLKKLLEPRLQCSLDAHEICLQDIHLDPERSLFDQGVKTDGTVQLSVQVISYQGIEPKLNILEIVKPADTVEVVIDPDAHHAESEAHLVEEAQVITLDGTKHITTISDETSEQVTRWAAALEGYRKEQERLGIPYDPIQWSTDQVLHWVVWVMKEFSMTDIDLTTLNISGRELCSLNQEDFFQRVPQGEILWSHLELLRKYVLASQEQQMNEIVTIDQPVQIIPASVQSATPTTIKVINSSVKAAKVQRAPRISEDRSSPGNRTGNNGQIQL

SEQ ID NO: 61479 - protein, 284 aa, Homo sapiens
VVGVGRAGSVRMRDLRNPHPSSAFLNLIGFVSRRELGSIDGVQQISLEDALSSQEVEVAYICSESSSHEDYIRQFLNAGKHVLVEYPMTLSLAAAQELWELAEQKGKVLHEEHVELLMEEFAFLKKEVVGKDLLKGSLLFTAGPLEEERFGFPAFSGISRLTWLVSLFGELSLVSATLEERKEDQYMKMTVCLETEKKSPLSWIEEKGPGLKRNRYLSFHFKSGSLENVPNVGVNKNIFLKDQNIFVQKLLGQFSEKELAAEKKRILHCLGLAEEIQKYCCSRK

SEQ ID NO: 61480 - protein, 29 aa, Homo sapiens
LVPEIAHTYKADREKYNRLAREWTQKYAM

SEQ ID NO: 61481 - protein, 38 aa, Homo sapiens
LTLACGGVALNSFEDLSPDCLGHAGLVYEYTLGEVHLY

SEQ ID NO: 61482 - protein, 13 aa, Homo sapiens
MDKQVLHLFGLCC

SEQ ID NO: 61483 - protein, 334 aa, Homo sapiens
TLSGLLWELIRTMVDRAEAERDVLFPGYTHLQRAQPIRWSHWILSHAVALTRDSERLLEVRKRINVLPLGSGAIAGNPLGVDRELLRAELNFGAITLNSMDATSERDFVAEFLFWASLCMTHLSRMAEDLILYCTKEFSFVQLSDAYSTGSSLMPQKKNPDSLELIRSKAGRVFGRCAGLLMTLKGLPSTYNKDLQEDKEAVFEVSDTMSAVLQVATGVISTLQIHQENMGQALSPDMLATDLAYYLVRKGMPFRQAHEASGKAVFMAETKGVALNQLSLQELQTISPLFSGDVICVWDYGHSVEQYGALGGTARSSVDWQIRQVRALLQAQQA

SEQ ID NO: 61484 - protein, 15 aa, Homo sapiens
LIGSQSIRFALGRWY

SEQ ID NO: 61485 - protein, 15 aa, Homo sapiens
LIGSQSIRFALGRWY

SEQ ID NO: 61486 - protein, 31 aa, Homo sapiens
VDHQCIGVCDKHLVNHYYCKRPIYEFKITWW

SEQ ID NO: 61487 - protein, 15 aa, Homo sapiens
LIGSQSIRFALGRWY

SEQ ID NO: 61488 - protein, 846 aa, Homo sapiens
LWCREPSRCRRSRRLGRWGGGGSRGAWRGREGGTCWGNELGKTERALCRAGGRRGGQRPQPGGRGRMEQVEILRKFIQRVQAMKSPDHNGEDNFARDFMRLRRLSTKYRTEKIYPTATGEKEENVKKNRYKDILPFDHSRVKLTLKTPSQDSDYINANFIKGVYGPKAYVATQGPLANTVIDFWRMIWEYNVVIIVMACREFEMGRKKCERYWPLYGEDPITFAPFKISCEDEQARTDYFIRTLLLEFQNESRRLYQFHYVNWPDHDVPSSFDSILDMISLMRKYQEHEDVPICIHCSAGCGRTGAICAIDYTWNLLKAGKIPEEFNVFNLIQEMRTQRHSAVQTKEQYELVHRAIAQLFEKQLQLYEIHGAQKIADGVNEINTENMVSSIEPEKQDSPPPKPPRTRSCLVEGDAKEEILQPPEPHPVPPILTPSPPSAFPTVTTVWQDNDRYHPKPVLHMVSSEQHSADLNRNYSKSTELPGKNESTIEQIDKKLERNLSFEIKKVPLQEGPKSFDGNTLLNRGHAIKIKSASPCIADKISKPQELSSDLNVGDTSQNSCVDCSVTQSNKVSVTPPEESQNSDTPPRPDRLPLDEKGHVTWSFHGPENAIPIPDLSEGNSSDINYQTRKTVSLTPSPTTQVETPDLVDHDNTSPLFRTPLSFTNPLHSDDSDSDERNSDGAVTQNKTNISTASATVSAATSTESISTRKVLPMSIARHNIAGTTHSGAEKDVDVSEDSPPPLPERTPESFVLASEHNTPVRSEWSELQSQERSEQKKSEGLITSENEKCDHPAGGIHYEMCIECPPTFSDKREQISENPTEATDIGFGNRCGKPKGPRDPPSEWT

SEQ ID NO: 61489 - protein, 378 aa, Homo sapiens
KDSPVLGARTRARRERRQALAFGTMGCTLSAEDKAAVERSKMIDRNLREDGEKAAREVKLLLLGAGESGKSTIVKQMKIIHEAGYSEEECKQYKAVVYSNTIQSIIAIIRAMGRLKIDFGDSARADDARQLFVLAGAAEEGFMTAELAGVIKRLWKDSGVQACFNRSREYQLNDSAAYYLNDLDRIAQPNYIPTQQDVLRTRVKTTGIVETHFTFKDLHFKMFDVGGQRSERKKWIHCFEGVTAIIFCVALSDYDLVLAEDEEMNRMHESMKLFDSICNNKWFTDTSIILFLNKKDLFEEKIKKSPLTICYPEYAGSNTYEEAAAYIQCQFEDLNKRKDTKEIYTHFTCATDTKNVQFVFDAVTDVIIKNNLKDCGLF

SEQ ID NO: 61490 - protein, 13 aa, Homo sapiens
KESVLLGKSLRHD

SEQ ID NO: 61491 - protein, 319 aa, Homo sapiens
IQARQQVIELARQLNFIPIDLGSLSSAREIENLPLRLFTLWRGPVVVAISLATFFFLYSFVRDVIHPYARNQQSDFYKIPIEIVNKTLPIVAITLLSLVYLAGLLAAAYQLYYGTKYRRFPPWLETWLQCRKQLGLLSFFFAMVHVAYSLCLPMRRSERYLFLNMAYQQVHANIENSWNEEEVWRIEMYISFGIMSLGLLSLLAVTSIPSVSNALNWREFSFIQSTLGYVALLISTFHVLIYGWKRAFEEEYYRFYTPPNFVLALVLPSIVILGKIILFLPCISRKLKRIKKGWEKSQFLEEGMGGTIPHVSPERVTVM

SEQ ID NO: 61492 - protein, 4 aa, Homo sapiens
MGSW

SEQ ID NO: 61493 - protein, 593 aa, Homo sapiens
LLLLLWLLEAPLLLGVRAQAAGQGPGQGPGPGQQPPPPPQQQQSGQQYNGERGISVPDHGYCQPISIPLCTDIAYNQTIMPNLLGHTNQEDAGLEVHQFYPLVKVQCSAELKFFLCSMYAPVCTVLEQALPPCRSLCERARQGCEALMNKFGFQWPDTLKCEKFPVHGAGELCVGQNTSDKGTPTPSLLPEFWTSNPQHGGGGHRGGFPGGAGASERGKFSCPRALKVPSYLNYHFLGEKDCGAPCEPTKVYGLMYFGPEELRFSRTWIGIWSVLCCASTLFTVLTYLVDMRRFSYPERPIIFLSGCYTAVAVAYIAGFLLEDRVVCNDKFAEDGARTVAQGTKKEGCTILFMMLYFFSMASSIWWVILSLTWFLAAGMKWGHEAIEANSQYFHLAAWAVPAIKTITILALGQVDGDVLSGVCFVGLNNVDALRGFVLAPLFVYLFIGTSFLLAGFVSLFRIRTIMKHDGTKTEKLEKLMVRIGVFSVLYTVPATIVIACYFYEQAFRDQWERSWVAQSCKSYAIPCPHLQAGGGAPPHPPMSPDFTVFMIKYLMTLIVGITSGFWIWSGKTLNSWRKFYTRLTNSKQGETTV

SEQ ID NO: 61494 - protein, 107 aa, Homo sapiens
LDVNHFAPDELTVKTKDGVVEITGKHEERQDEHGYISRCFTRKYTLPPGVDPTQVSSSLSPEGTLTVEAPMPKLATQSNEITIPVTFESRAQLGGPEAAKSDETAAK

SEQ ID NO: 61495 - protein, 14 aa, Homo sapiens
RVTKGPVSVFGDPV

SEQ ID NO: 61496 - protein, 178 aa, Homo sapiens
VCKHWLRGLCKKGDQCEFLHEYDMTKMPECYFYSKFGECSNKECPFLHIDPESKIKDCPWYDRGFCKHGPLCRHRHTRRVICVNYLVGFCPEGPSCKFMHPRFELPMGTTEQPPLPQQTQPPAKQRTPQVIGVMQSQNSSAGNRGPRPLEQVTCYKCGEKGHYANRCTKGHLAFLSGQ

SEQ ID NO: 61497 - protein, 306 aa, Homo sapiens
VDAAVVPSVMACGVTGSVSVALHPLVILNISDHWIRMRSQEGRPVQVIGALIGKQEGRNIEVMNSFELLSHTVEEKIIIDKEYYYTKEEQFKQVFKELEFLGWYTTGGPPDPSDIHVHKQVCEIIESPLFLKLNPMTKHTDLPVSVFESVIDIINGEATMLFAELTYTLATEEAERIGVDHVARMTATGSGENSTVAEHLIAQHSAIKMLHSRVKLILEYVKASEAGEVPFNHEILREAYALCHCLPVLSTDKFKTDFYDQCNDVGLMAYLGTITKTCNTMNQFVNKFNVLYDRQGIGRRMRGLFF

SEQ ID NO: 61498 - protein, 17 aa, Homo sapiens
ICSSAWRRSPSPRETWS

SEQ ID NO: 61499 - protein, 87 aa, Homo sapiens
IYRHLRPGGILVLEPQPWSSYGKRKTLTETIYKNYYRIQLKPEQFSSYLTSPDVGFSSYELVATPHNTSKGFQRPVYLFHKARSPSH

SEQ ID NO: 61500 - protein, 48 aa, Homo sapiens
VGLIFVVFTIHFYRSLVRHKTERHNREIEELHKLKVQLDGHERSLQVL

SEQ ID NO: 61501 - protein, 269 aa, Homo sapiens
IRSSKSAEDLTDGSYDDVLNAEQLQKLLYLLESTEDPVIIERALITLGNNAAFSVNQAIIRELGGIPIVANKINHSNQSIKEKALNALNNLSVNVENQIKIKIYISQVCEDVFSGPLNSAVQLAGLTLLTNMTVTNDHQHMLHSYITDLFQVLLTGNGNTKVQVLKLLLNLSENPAMTEGLLRAQVDSSFLSLYDSHVAKEILLRVLTLFQNIKNCLKIEGHLAVQPTFTEGSLFFLLHGEECAQKIRALVDHHDAEVKEKVVTIIPKI

SEQ ID NO: 61502 - protein, 283 aa, Homo sapiens
IYAMHWGTDSRLLVSASQDGKLIIWDSYTTNKVHAIPLRSSWVMTCAYAPSGNFVACGGLDNICSIYSLKTREGNVRVSRELPGHTGYLSCCRFLDDNQIITSSGDTTCALWDIETGQQTVGFAGHSGDVMSLSLAPDGRTFVSGACDASIKLWDVRDSMCRQTFIGHESDINAVAFFPNGYAFTTGSDDATCRLFDLRADQELLMYSHDNIICGITSVAFSRSGRLLLAGYDDFNCNIWDAMKGDRAGVLAGHDNRVSCLGVTDDGMAVATGSWDSFLKIWN

SEQ ID NO: 61503 - protein, 130 aa, Homo sapiens
VEAELDPVEYTLRKRLPSRLPRRPNDIYVNMKTDFKAQLARCQKLLDGGARGQNACSEIYIHGLGLAINRAINIALQLQAGSFGSLQVAANTSTVELVDELEPETDTREPLTRIRNNSAIHIRVFRVTPK

SEQ ID NO: 61504 - protein, 679 aa, Homo sapiens
KMAANVGSMFQYWKRFDLQQLQRELDATATVLANRQDESEQSRKRLIEQSREFKKNTPEDLRKQVAPLLKSFQGEIDALSKRSKEAEAAFLNVYKRLIDVPDPVPALDLGQQLQLKVQRLHDIETENQKLRETLEEYNKEFAEVKNQEVTIKALKEKIREYEQTLKNQAETIALEKEQKLQNDFAEKERKLQETQMSTTSKLEEAEHKVQSLQTALEKTRTELFDLKTKYDEETTAKADEIEMIMTDLERANQRAEVAQREAETLREQLSSANHSLQLASQIQKAPDVEQAIEVLTRSSLEVELAAKEREIAQLVEDVQRLQASLTKLRENSASQISQLEQQLSAKNSTLKQLEEKLKGQADYEEVKKELNILKSMEFAPSEGAGTQDAAKPLEVLLLEKNRSLQSENAALRISNSDLSGRCAELQVRITEAVATATEQRELIARLEQDLSIIQSIQRPDAEGAAEHRLEKIPEPIKEATALFYGPAAPASGALPEGQVDSLLSIISSQRERFRARNQELEAENRLAQHTLQALQSELDSLRADNIKLFEKIKFLQSYPGRGSGSDDTELRYSSQYEERLDPFSSFSKRERQRKYLSLSPWDKATLSMGRLVLSNKMARTIGFFYTLFLHCLVFLVLYKLAWSESMERDCATFCAKKFADHLHKFHENDNGAAAGDLWQ

SEQ ID NO: 61505 - protein, 23 aa, Homo sapiens
ISNIISIETPNTAPSSKKKDKKE

SEQ ID NO: 61506 - protein, 6 aa, Homo sapiens
LSLVPP

SEQ ID NO: 61507 - protein, 737 aa, Homo sapiens
VSAFIEKEVGNDLKSLKKLDKLIEQRTVSKMQLEEQVLTISSEIPKRIRSALKNAEESKQFLNQFLEQETHLFSAINSHLLTAQPWMDDLGTMISQIEEIERHLAYLKWISQIEELSDNIQQYLMTNNVPEAASTLVSMAELDIKLQESSCTHLLGFMRATVKFWHKILKDKLTSDFEEILAQLHWPFIAPPQSQTVGLSRPASAPEIYSYLETLFCQLLKLQTSDELLTEPKQLPEKYSLPASPSVILPIQVMLTPLQKRFRYHFRGNRQTNVLSKPEWYLAQVLMWIGNHTEFLDEKIQPILDKVGSLVNARLEFSRGLMMLVLEKLATDIPCLLYDDNLFCHLVDEVLLFERELHSVHGYPGTFASCMHILSEETCFQRWLTVERKFALQKMDSMLSSEAAWVSQYKDITDVDEMKVPDCAETFMTLLLVITDRYKNLPTASRKLQFLELQKDLVDDFRIRLTQVMKEETRASLGFRYCAILNAVNYISTVLADWADNVFFLQLQQAALEVFAENNTLSKLQLGQLASMESSVFDDMINLLERLKHDMLTRQVDHVFREVKDAAKLYKKERWLSLPSQSEQAVMSLSSSACPLLLTLRDHLLQLEQQLCFSLFKIFWQMLVEKLDVYIYQEIILANHFNEGGAAQLQFDMTRNLFPLFSHYCKRPENYFKHIKEACIVLNLNVGSALLLKDVLQSASGQLPATAALNEVGIYKLAQQDVEILLNLRTNWPNTGK

SEQ ID NO: 61508 - protein, 126 aa, Homo sapiens
VKLNKASTNMLRIVEPYIAWGYPNLKSVNELIYKSGYGKINKKRIALTDNALIARSLGKYGIICMEDLIHEIYTVGKRFKEANNFLWPFKLSSPRGGMKKKTTHFVEGGDAGNREDQINRLIRRMN

SEQ ID NO: 61509 - protein, 14 aa, Homo sapiens
TTEIRVRASSGRPR

SEQ ID NO: 61510 - protein, 118 aa, Homo sapiens
ICIDIPTIYQKNRKKCVNVTTKGLHPDQKEYEKNNTTTLMACLGGLLGIIGVICLISCLSPEMNCDGGHSYVRNYLQKPTFALGELYPPLINLWEAGKEKSTSLKVKATVIGLPTNMS

SEQ ID NO: 61511 - protein, 6 aa, Homo sapiens
MHQLKQ

SEQ ID NO: 61512 - protein, 364 aa, Homo sapiens
IDLTLDKSAKTRQAALEGIKNALASKMLYEFILERRMTLTDSIERCLKKGKSDEQRAAAALASVLCIQLGPGIESEEILKTLGPILKKIICDGSASMQARQTCATCFGVCCFIATDDITELYSTLECLENIFTKSYLKEKDTTVICSTPNTVLHISSLLAWTLLLTICPINEVKKKLEMHFHKLPSLLSCDDVNMRIAAGESLALLFELARGIESDFFYEDMESLTQMLRALATDGNKHRAKVDKRKQRSVFRDVLRAVEERDFPTETIKFGPERMYIDCWVKKHTYDTFKEVLGSGMQYHLQSNEFLRNVFELGPPVMLDAATLKTMKISRFERHLYNSAAFKARTKARSKCRDKRADVGEFF

SEQ ID NO: 61513 - protein, 169 aa, Homo sapiens
LPQLQTSAQVPSGEEIGKIKNGHTGLSNGNGIHHGAKHGSADNRKLSAPVSQKMHRKIQSSLSVNSDISKKSKVNAVFSQKTGSSPEDCCVHCILACLFCEFLTLCNIVLGQASCGICTSEACCCCCGDEMGDDCNCPCDMDCGIMDACCESSDCLEICMECCGICFPS

SEQ ID NO: 61514 - protein, 463 aa, Homo sapiens
VAVERRRGSSAGFPCSQRSRRPAEPGRGIPDRRRRGPIGRVNMDLENKVKKMGLGHEQGFGAPCLKCKEKCEGFELHFWRKICRNCKCGQEEHDVLLSNEEDRKVGKLFEDTKYTTLIAKLKSDGIPMYKRNVMILTNPVAAKKNVSINTVTYEWAPPVQNQALARQYMQMLPKEKQPVAGSEGAQYRKKQLAKQLPAHDQDPSKCHELSPREVKEMEQFVKKYKSEALGVGDVKLPCEMDAQGPKQMNIPGGDRSTPAAVGAMEDKSAEHKRTQYSCYCCKLSMKEGDPAIYAERAGYDKLWHPACFVCSTCHELLVDMIYFWKNEKLYCGRHYCDSEKPRCAGCDELIFSNEYTQAENQNWHLKHFCCFDCDSILAGEIYVMVNDKPVCKPCYVKNHAVVCQGCHNAIDPEVQRVTYNNFSWHASTECFLCSCCSKCLIGQKFMPVEGMVFCSVECKKRMS

SEQ ID NO: 61515 - protein, 165 aa, Homo sapiens
KAAMGLETEKADVQLFMDDDSYSHHSGLEYADPEKFADSDQDRDPHRLNSHLKLGFEDVIAEPVTTHSFDKVWICSHALFEISKYVMYKFLTVFLAIPLAFIAGILFATLSCLHIWILMPFVKTCLMVLPSVQTIWKSVTDVIIAPLCTSVGRCFSSVSLQLSQD

SEQ ID NO: 61516 - protein, 101 aa, Homo sapiens
LSRLLKPGGMVLLRDYGRYDMAQLRFKKGQCLSGNFYVRGDGTRVYFFTQEELDTLFTTAGLEKVQNLVDRRLQVNRGKQLTMYRVWIQCKYCKPLLSSTS

SEQ ID NO: 61517 - protein, 699 aa, Homo sapiens
VDKPNDQSSRWSSESNYPPQYLILKLERPAIVQNITFGKYEKTHVCNLKKFKVFGGMNEENMTELLSSGLKNDYNKETFTLKHKIDEQMFPCRFIKIVPLLSWGPSFNFSIWYVELSGIDDPDIVQPCLNWYSKYREQEAIRLCLKHFRQHNYTEAFESLQKKTKIALEHPMLTDIHDKLVLKGDFDACEELIEKAVNDGLFNQYISQQEYKPRWSQIIPKSTKGDGEDNRPGMRGGHQMVIDVQTETVYLFGGWDGTQDLADFWAYSVKENQWTCISRDTEKENGPSARSCHKMCIDIQRRQIYTLGRYLDSSVRNSKSLKSDFYRYDIDTNTWMLLSEDTAADGGPKLVFDHQMCMDSEKHMIYTFGGRILTCNGSVDDSRASEPQFSGLFAFNCQCQTWKLLREDSCNAGPEDIQSRIGHCMLFHSKNRCLYVFGGQRSKTYLNDFFSYDVDSDHVDIISDGTKKDSGMVPMTGFTQRATIDPELNEIHVLSGLSKDKEKREENVRNSFWIYDIVRNSWSCVYKNDQAAKDNPTKSLQEEEPCPRFAHQLVYDELHKVHYLFGGNPGKSCSPKMRLDDFWSLKLCRPSKDYLLRHCKYLIRKHRFEEKAQVDPLSALKYLQNDLYITVDHSDPEETKEFQLLASALFKSGSDFTALGFSDVDHTYAQRTQLFDTLVNFFPDSMTPPKGNLVDLITL

SEQ ID NO: 61518 - protein, 25 aa, Homo sapiens
RMVRGDPRAIVEYRDLDAPDDVDFF

SEQ ID NO: 61519 - protein, 51 aa, Homo sapiens
LDPKGSLLGDFLTAYHGLEKPRVTTMVDGRYLVVSLSNGTIHIFRVRSPDS

SEQ ID NO: 61520 - protein, 245 aa, Homo sapiens
VKKGNLKAKKPKKGKPHCSRNPVIVRGIGRYSRSAMYSRKAMYKRKYSAAKSKVEKKKKEKVLATVTKPVGGDKNGSTRVVKLRKMPRYYPTEDVPRKLLSHSKKPFSQHVRKLRASITPGTILIILTGRHRGKRVVFLKQLASGLLLVTGPLVLNRVPLRRTHQKFVIATSTKIDISNVKIPKHLTDAYFKKKKLRKPRHQEGEIFDTEKEKYEITEQCKIEQKAVDSQILPKIKAIPQLQGYL

SEQ ID NO: 61521 - protein, 38 aa, Homo sapiens
LLAKAVANQTSATFLRVVGSELIQKYLGDGPKLVWELF

SEQ ID NO: 61522 - protein, 76 aa, Homo sapiens
LSITTRNNQLDPTSKEDFLNICIEPDTISKGDFITIGSRKVRNPKLHVEGTECLQASQCTLLIPEVSGEGVGSHSI

SEQ ID NO: 61523 - protein, 713 aa, Homo sapiens
LLVHGALAFPLGLDSYHGCVIAAARYGRGRVVVTGHKVLFTVGKLGPFLLNAVRWLDGGRRGKIVVQTELRTLSGLLAVGGIDTSIEPNLTSDASVYCFEPVSEVGVKELQEFVAEGGGLFVGAQAWWWAFKNPGVSPLARFPGNLLLNPFGISITSQSLNPGPFRTPKAGIRTYHFRSTLAEFQVIMGRKRGNVEKGWLAKLGPDGAAFLQIPAEEIPAYMSVHRLLRKLLSRYRLPVATRENPVINDCCRGAMLSLATGLAHSGSDLSLLVPEIEDMYSSPYLRPSESPITVEVNCTNPGTRYCWMSTGLYIPGRQIIEVSLPEAAASADLKIQIGCHTDDLTRASKLFRGPLVINRCCLDKPTKSITCLWGGLLYIIVPQNSKLGSVPVTVKGAVHAPYYKLGETTLEEWKRRIQENPGPWGELATDNIILTVPTANLRTLENPEPLLRLWDEVMQAVARLGAEPFPLRLPQRIVADVQISVGWMHAGYPIMCHLESVQELINEKLIRTKGLWGPVHELGRNQQRQEWEFPPHTTEATCNLWCVYVHETVLGIPRSRANIALWPPVREKRVRIYLSKGPNVKNWNAWTALETYLQMNVPSSHYALAVPQSPHYVGNPRVLTDLDKELQEAFGWEPFIRLFTEYRNQTNLPTENVDKMNLWVKMFSHQVQKNLAPFFEAWAWPIQKEVATSLAYLPEWKENIMKLYLLTQM

SEQ ID NO: 61524 - protein, 162 aa, Homo sapiens
LHGARSKPYSCPECGKSFGVRKSLIIHHRSHTKERPYECAECEKSFNCHSGLIRHQMTHRGERPYKCSECEKTYSRKEHLQNHQRLHTGERPFQCALCGKSFIRKQNLLKHQRIHTGERPYTCGECGKSFRYKESLKDHLRVHSGGPGPGAPRQLPPPPERD

SEQ ID NO: 61525 - protein, 16 aa, Homo sapiens
KRKTYKAGSLGSSCSC

SEQ ID NO: 61526 - protein, 80 aa, Homo sapiens
IRKPARRKIQTTNPDFLLLLFMSVPVVSAPPFCPPAEGSRDGRPKASVARPAAVHEHHSPRDCGHLPDVLRSSLGGWQPH

SEQ ID NO: 61527 - protein, 32 aa, Homo sapiens
IVIESSKPPILRARKILEENLTVDYDKDYLFS

SEQ ID NO: 61528 - protein, 29 aa, Homo sapiens
IARAMGVADEALGNVRTVRAFAMEQREEE

SEQ ID NO: 61529 - protein, 57 aa, Homo sapiens
LGRGIALFQGLSNIAFNCMVLGTLFIGGSLVAGQQLTGGDLMSFLVASQTVQRWSGG

SEQ ID NO: 61530 - protein, 545 aa, Homo sapiens
LSDFRDALDPQCLAAVIFIYFAALSPAITFGGLLGEKTQDLIGVSELIMSTALQGVVFCLLGAQPLLVIGFSGPLLVFEEAFFSFCSSNHLEYLVGRVWIGFWLVFLALLMVALEGSFLVRFVSRFTQEIFAFLISLIFIYETFYKLVKIFQEHPLHGCSASNSSEVDGGENMTWAGARPTLGPGNRSLAGQSGQGKPRGQPNTALLSLVLMAGTFFIAFFLRKFKNSRFFPGRIRRVIGDFGVPIAILIMVLVDYSIEDTYTQKLSVPSGFSVTAPEKRGWVINPLGEKSPFPVWMMVASLLPAILVFILIFMETQITTLIISKKERMLQKGSGFHLDLLLIVAMGGICALFGLPWLAAATVRSVTHANALTVMSKAVAPGDKPKIQEVKEQRVTGLLVALLVGLSIVIGDLLRQIPLAVLFGIFLYMGVTSLNGIQFYERLHLLLMPPKHHPDVTYVKKVRTLRMHLFTALQLLCLALLWAVMSTAASLAFPFILILTVPLRMVVLTRIFTDREMKCLDANEAEPVFDEREGVDEYNEMPMPV

SEQ ID NO: 61531 - protein, 39 aa, Homo sapiens
ILIQHGCPGEGCGLAPTPNREPANGTNPSAELHRSPSLL

SEQ ID NO: 61532 - protein, 59 aa, Homo sapiens
LGVPPGPALAASMLSLARPPLPPTGLRTRSVPQSPSRDLRPRLAERPELVSRAPFSAAR

SEQ ID NO: 61533 - protein, 24 aa, Homo sapiens
LGMLVLEASGPRSVFGLIDPRFSG

SEQ ID NO: 61534 - protein, 37 aa, Homo sapiens
ILELARKQRMNTDIRRNIFCTIMTSEDFLDAFEKLLK

SEQ ID NO: 61535 - protein, 1084 aa, Homo sapiens
RMFSFEGDFKTRPKVSLGGASRKEEKASLLHRTQEERRKREEERRRLKNAIIIQSFIRGYRDRKQQYSIQRSAFDRCATLSQSGGAFPIANGPNLTLLVRQLLFFYKQNEDSKRLIWLYQNLIKHSSLFVKQLDGSERLTCLFQIKRLMSLCCRLLQNCNDDSLNVALPMRMLEVFSSENTYLPVLQDASYVVSVIEQILHYMIHNGYYRSLYLLINSKLPSSIEYSDLSRVPIAKILLENVLKPLHFTYNSCPEGARQQVFTAFTEEFLAAPFTDQIFHFIIPALADAQTVFPYEPFLNALLLIESRCSRKSGGAPWLFYFVLTVGENYLGALSEEGLLVYLRVLQTFLSQLPVSPASASCHDSASDSEEESEEADKPSSPEDGRLSVSYITEECLKKLDTKQQTNTLLNLVWRDSASEEVFTTMASVCHTLMVQHRMMVPKVRLLYSLAFNARFLRHLWFLISSMSTRMITGSMVPLLQVISRGSPMSFEDSSRIIPLFYLFSSLFSHSLISIHDNEFFGDPIEVVGQRQSSMMPFTLEELIMLSRCLRDACLGIIKLAYPETKPEVREEYITAFQSIGVTTSSEMQQCIQMEQKRWIQLFKVITNLVKMLKSRDTRRNFCPPNHWLSEQEDIKADKVTQLYVPASRHVWRFRRMGRIGPLQSTLDVGLESPPLSVSEERQLAVLTELPFVVPFEERVKIFQRLIYADKQEVQGDGPFLDGINVTIRRNYIYEDAYDKLSPENEPDLKKRIRVHLLNAHGLDEAGIDGGGIFREFLNELLKSGFNPNQGFFKTTNEGLLYPNPAAQMLVGDSFARHYYFLGRMLGKALYENMLVELPFAGFFLSKLLGTSADVDIHHLASLDPEVYKNLLFLKSYEDDVEELGLNFTVVNNDLGEAQVVELKFGGKDIPVTSANRIAYIHLVADYRLNRQIRQHCLAFRQGLANVVSLEWLRMFDQQEIQVLISGAQVPISLEDLKSFTNYSGGYSADHPVIKVFWRVVEGFTDEEKRKLLKFVTSCSRPPLLGFKELYPAFCIHNGGSDLERLPTASTCMNLLKLPEFYDETLLRSKLLYAIECAAGFELS

SEQ ID NO: 61536 - protein, 30 aa, Homo sapiens
KAKIQDKEGIPPDQQRLIFAGKQLEDGCTV

SEQ ID NO: 61537 - protein, 299 aa, Homo sapiens
LKWHPDKNPENKEEAERKFKQVAEAYEVLSDAKKRDIYDKYGKEGLNGGGGGGSHFDSPFEFGFTFRNPDDVFREFFGGRDPFSFDFFEDPFEDFFGNRRGPRGSRSRGTGSFFSAFSGFPSFGSGFSSFDTGFTSFGSLGHGGLTSFSSTSFGGSGMGNFKSISTSTKMVNGRKITTKRIVENGQERVEVEEDGQLKSLTINGVADDDALAEERMRRGQNALPAQPAGLRPPKPPRPASLLRHAPHCLSEEEGEQDRPRAPGPWDPLASAAGLKEGGKRKKQKQREESKKKKSTKGNH

SEQ ID NO: 61538 - protein, 23 aa, Homo sapiens
RPPWYDWFPWCCWTDWSPRTLCK

SEQ ID NO: 61539 - protein, 5 aa, Homo sapiens
IKIEK

SEQ ID NO: 61540 - protein, 4 aa, Homo sapiens
LTAP

SEQ ID NO: 61541 - protein, 97 aa, Homo sapiens
TAFSSHILVVVTQFGKMGTLVSLEPSSVASDVSKPVLTTKVLLGQDEPLIHVFAKNLVAFVSQEAGNRAVLLAVAVKDKSMEGLKALREVIRVCQVW

SEQ ID NO: 61542 - protein, 64 aa, Homo sapiens
KPVLTTKVLLGQDEPLIHVFAKNLVAFVSQEAGNRAVLLAVAVKDKSMEGLKALREVIRVCQVW

SEQ ID NO: 61543 - protein, 62 aa, Homo sapiens
LQPGGTFLCKTWAGSQSRRLQRRLTEEFQNVRIIKPEASRKESSEVYFLATQYHGRKGTVKQ

SEQ ID NO: 61544 - protein, 26 aa, Homo sapiens
LVTQALAVLLECLESPGSSPTVRWWG

SEQ ID NO: 61545 - protein, 344 aa, Homo sapiens
RRSRDIDALLARERRAVRRLVKILLLGAGESGKSTFLKQMRIIHGREFDQKALLEFRDTIFDNILKGSRVLVDARDKLGIPWQYSENEKHGMFLMAFENKAGLPVEPATFQLYVPALSALWRDSGIREAFSRRSEFQLGESVKYFLDNLDRIGQLNYFPSKQDILLARKATKGIVEHDFVIKKIPFKMVDVGGQRSQRQKWFQCFDGITSILFMVSSSEYDQVLMEDRRTNRLVESMNIFETIVNNKLFFNVSIILFLNKMDLLVEKVKTVSIKKHFPDFRGDPHRLEDVQRYLVQCFDRKRRNRSKPLFHHFTTAIDTENVRFVFHAVKDTILQENLKDIMLQ

SEQ ID NO: 61546 - protein, 26 aa, Homo sapiens
MLSENPKTDKVTASPHPLAEAHSPHP

SEQ ID NO: 61547 - protein, 120 aa, Homo sapiens
VDMMDLPRSRINAGMLAQFIDKPVCFVGRLEKIHPTGKMFILSDGEGKNGTIELMEPLDEEISGIVEVVGRVTAKATILCTSYVQFKEDSHPFDLGLYNEAVKIIHDFPQFYPLGIVQHD

SEQ ID NO: 61548 - protein, 9 aa, Homo sapiens
IIFSLGPGG

SEQ ID NO: 61549 - protein, 44 aa, Homo sapiens
IPVTSSVSDPGMGYISSASPKISLAPTDVKELSTTEPGRTLDPQ

SEQ ID NO: 61550 - protein, 635 aa, Homo sapiens
TLYLMHRGKLDCAGGALLSSYLIVLMILLAVVICTVSAIMCVSMRGTICNPGPRKSMSKLLYIRLALFFPEMVWASLGAAWVADGVQCDRTVVNGIIATVVVSWIIIAATVVSIIIVFDPLGGKMAPYSSAGPSHLDSHDSSQLLNGLKTAATSVWETRIKLLCCCIGKDDHTRVAFSSTAELFSTYFSDTDLVPSDIAAGLALLHQQQDNIRNNQEPAQVVCHAPGSSQEADLDAELENCHHYMQFAAAAYGWPLYIYRNPLTGLCRIGGDCCRSRTTDYDLVGGDQLNCHFGSILHTTGLQYRDFIHVSFHDKVYELPFLVALDHRKESVVVAVRGTMSLQDVLTDLSAESEVLDVECEVQDRLAHKGISQAARYVYQRLINDGILSQAFSIAPEYRLVIVGHSLGGGAAALLATMLRAAYPQVRCYAFSPPRGLWSKALQEYSQSFIVSLVLGKDVIPRLSVTNLEDLKRRILRVVAHCNKPKYKILLHGLWYELFGGNPNNLPTELDGGDQEVLTQPLLGEQSLLTRWSPAYSFSSDSPLDSSPKYPPLYPPGRIIHLQEEGASGRFGCCSAAHYSAKWSHEAEFSKILIGPKMLTDHMPDILMRALDSVVSDRAACVSCPAQGVSSVDVA

SEQ ID NO: 61551 - protein, 454 aa, Homo sapiens; identical to SEQ ID NO: 61465

SEQ ID NO: 61552 - protein, 273 aa, Homo sapiens
RKRTGIREQLDAELLRYSESLLGVPIAYDNIKVVGELGDIYDDQGHIHLNIEADFVIFCPEPGQKLMGIVNKVSSSHIGCLVHGCFNASIPKPEQLSAEQWQTMEINMGDELEFEVFRLDSDAAGVFCIRGKLNITSLQFKRSEVSEEVTENGTEEAAKKPKKKKKKKDPETYEVDSGTTKLADDADDTPMEESALQNTNNANGIWEEEPKKKKKKKKHQEVQDQDPVFQGSDSSGYQSDHKKKKKKRKHSEEAEFTPPLKCSPKRKGKSNFL

SEQ ID NO: 61553 - protein, 269 aa, Homo sapiens
LDGQFEFCLLRGKQGGFENKKRIDSVYLDPLVFREFAFIDMPDAAHGISSQDGPLSVLKQATLLLERNFHPFAELPEPQQTALSDIFQAVLFDDELLMVLEPVCDDLVSGLSPTVAVLGELKPRQQQDLVAFLQLVGCSLQGGCPGPEDAGSKQLFMTAYFLVSALAEMPDSAAALLGTCCKLQIIPTLCHLLRALSDDGVSDLEDPTLTPLKDTERFGIVQRLFASADISLERLKSSVKAVILKDSKVFPLLLCITLNGLCALGREHS

SEQ ID NO: 61554 - protein, 343 aa, Homo sapiens
IRNLLADVETFVADILKGENLSKKAKEKRESLIKKIKDVKSIYLQEFQDKGDAEDGEEYDDPFAGPPDTISLASERYDKDDEAPSDGAQFPPIAAQDLPFVLKAGYLEKRRKDHSFLGFEWQKRWCALSKTVFYYYGSDKDKQQKGEFAIDGYSVRMNNTLRKDGKKDCCFEISAPDKRIYQFTAASPKDAEEWVQQLKFVLQDMESDIIPEDYDERGELYDDVDHPLPISNPLTSSQPIDDEIYEELPEEEEDSAPVKVEEQRKMSQDSVHHTSGDKSTDYANFYQGLWDCTGAFSDELSFKRGDVIYILSKEYNRYGWWVGEMKGAIGLVPKAYIMEMYDI

SEQ ID NO: 61555 - protein, 17 aa, Homo sapiens
IQMARTTSCIIMEIIVP

SEQ ID NO: 61556 - protein, 45 aa, Homo sapiens
MARLRPISASTPGCGLQDLTGSGAARPTRATRRWSWRRSSTSTAT

SEQ ID NO: 61557 - protein, 95 aa, Homo sapiens
KDSLGNSKGENAANWLTAKSGRKKRCPYTKHQTLELEKEFLFNMYLTRERRLEISRSVHLTDRQVKIWFQNRRMKLKKMNRENRIRELTANFNFS

SEQ ID NO: 61558 - protein, 25 aa, Homo sapiens
LVSEPQDETEENESRKPDPGAHSQL

SEQ ID NO: 61559 - protein, 61 aa, Homo sapiens
IRELEREFFFSVYINKEKRLQLSRMLNLTDRQVKIWFQNRRMKEKKINRDRLQYYSANPLL

SEQ ID NO: 61560 - protein, 12 aa, Homo sapiens
LAKDFARHLEEE

SEQ ID NO: 61561 - protein, 64 aa, Homo sapiens
IIWGILAMKPHFLKINVSELSLWVIQGCFWLFGTVILKYLTSKIFGIADDMEFHSCCPGWSAMV

SEQ ID NO: 61562 - protein, 36 aa, Homo sapiens
LPRKTPGRTVWLAALPGRGGRRWRAPRPSLRYPSAR

SEQ ID NO: 61563 - protein, 27 aa, Homo sapiens
MKRSSDSSYHMIQEPAGGRVGTRKRIC

SEQ ID NO: 61564 - protein, 17 aa, Homo sapiens
RKAVTCQWWSVQKSGSS

SEQ ID NO: 61565 - protein, 76 aa, Homo sapiens
LRLVASSKINSRSLTIFGTGDTLKAITMTANSGFVRAANNQGVKFSVFIHQPRALTESKEALATPLPKDYTTDSEH

SEQ ID NO: 61566 - protein, 39 aa, Homo sapiens
LDVCHTSHSRESLSPGEGFLRLRVLAAVVFQLSGRTTCL

SEQ ID NO: 61567 - protein, 71 aa, Homo sapiens
IDRENFVDIVDAKLKIPVSGSKSEGLLYVHSSRGGPFQRWHLDEVFLELKDGQQIPVFKLSGENGDEVKKE

SEQ ID NO: 61568 - protein, 27 aa, Homo sapiens
MRRAAREPPWPGRSCVDQASQECGHVF

SEQ ID NO: 61569 - protein, 35 aa, Homo sapiens
VTVSKWKSLLSQQLLCKMPRPGIVAEHPRPAEVPP

SEQ ID NO: 61570 - protein, 218 aa, Homo sapiens
LQTAHADEFDCPSELQHAQELFPQWHLPIKIAAVMASLTFLYTLLREVIHPLATSHQQYFYKIPILVINKVLPMVSITLLALVYLPGVIAAIVQVHNGTKYKKFPHWLDKWMLTRKQFGLLSLFFAVLHAIYTLSYAMRRSYRYKLLNWAYQQVQQNKEDAWIEHDVWRMEIYVSLGIVGLAILALLAVTSIPSVSDSLTWREFHYIQVHGRINFLTL

SEQ ID NO: 61571 - protein, 55 aa, Homo sapiens
IKDGPSSKVFGFVARKQGSATDNVCHLFAEHDPEQPASAIVNFVSKVMIGSPKKV

SEQ ID NO: 61572 - protein, 575 aa, Homo sapiens
VEQTPRSQQDPAGPGLPAQSDRLANHQEDDVDLEALVNDMNASLESLYSACSMQSDTVPLLQNGQHARSQPRASGPPRSIQPQVSPRQRVQRSQPVHILAVRRLQEEDQQFRTSSLPAIPNPFPELCGPGSPPVLTPGSLPPSQAAAKQDVKVFSEDGTSKVVEILADMTARDLCQLLVYKSHCVDDNSWTLVEHHPHLGLERCLEDHELVVQVESTMASESKFLFRKNYAKYEFFKNPMNFFPEQMVTWCQQSNGSQTQLLQNFLNSSSCPEIQGFLHVKELGKKSWKKLYVCLRRSGLYCSTKGTSKEPRHLQLLADLEDSNIFSLIAGRKQYNAPTDHGLCIKPNKVRNETKELRLLCAEDEQTRTCWMTAFRLLKYGMLLYQNYRIPQQRKALLSPFSTPVRSVSENSLVAMDFSGQTGRVIENPAEAQSAALEEGHAWRKRSTRMNILGSQSPLHPSTLSTVIHRTQHWFHGRISREESHRIIKQQGLVDGLFLLRDSQSNPKAFVLTLCHHQKIKNFQILPCEDDGQTFFSLDDGNTKFSDLIQLVDFYQLNKGVLPCKLKHHCIRVAL

SEQ ID NO: 61573 - protein, 54 aa, Homo sapiens
LAPCSRKVAAAGAPEAQDTGLLLLQNPQVFLEEICRQNFVLRFYLGKEQKSVVS

SEQ ID NO: 61574 - protein, 229 aa, Homo sapiens
ILPAMVSHSELRKLFYSADAVCFDVDSTVIREEGIDELAKICGVEDAVSEMTRRAMGGAVPFKAALTERLALIQPSREQVQRLIAEQPPHLTPGIRELVSRLQERNVQVFLISGGFRSIVEHVASKLNIPATNVFANRLKFYFNGEYAGFDETQPTAESGGKGKVIKLLKEKFHFKKIIMIGDGATDMEACPPADAFIGFGGNVIRQQVKDNAKWYITDFVELLGELEE

SEQ ID NO: 61575 - protein, 15 aa, Homo sapiens
INGFALPLKAEHIFW

SEQ ID NO: 61576 - protein, 577 aa, Homo sapiens
VDMPVPSSFNDISQDWRLRHFVGWVWYEREVILPERWTQDLRTRVVLRIGSAHSYAIVWVNGVDTLEHEGGYLPFEADISNLVQVGPLPSRLRITIAINNTLTPTTLPPGTIQYLTDTSKYPKGYFVQNTYFDFFNYAGLQRSVLLYTTPTTYIDDITVTTSVEQDSGLVNYQISVKGSNLFKLEVRLLDAENKVVANGTGTQGQLKVPGVSLWWPYLMHERPAYLYSLEVQLTAQTSLGPVSDFYTLPVGIRTVAVTKSQFLINGKPFYFHGVNKHEDADIRGKGFDWPLLVKDFNLLRWLGANAFRTSHYPYAEEVMQMCDRYGIVVIDECPGVGLALPQFFNNVSLHHHMQVMEEVVRRDKNHPAVVMWSVANEPASHLESAGYYLKMVIAHTKSLDPSRPVTFVSNSNYAADKGAPYVDVICLNSYYSWYHDYGHLELIQLQLATQFENWYKKYQKPIIQSEYGAETIAGFHQDPPLMFTEEYQKSLLEQYHLGLDQKRRKYVVGELIWNFADFMTEQSPTRVLGNKKGIFTRQRQPKSAAFLLRERYWKIANETRYPHSVAKSQCLENSLFT

SEQ ID NO: 61577 - protein, 30 aa, Homo sapiens
IEMDSRRVPRDKLACITKCSKHIFDAIKIT

SEQ ID NO: 61578 - protein, 63 aa, Homo sapiens
IDYNRFQELIQEYEDSGGSKTFSAKDYMARTPHWALFGANERSFDPKDTRHQRKNKSKAISGC

SEQ ID NO: 61579 - protein, 80 aa, Homo sapiens
IDEAYKILAHLWHLGYSPEDIIGNIFRVCKTFQMAEYLKLEFIKEIGYTHMKIAEGVNSLLQMAGLLARLCQKTMAPVAS

SEQ ID NO: 61580 - protein, 386 aa, Homo sapiens
VPSSGPGPRAGARPRRRIQPVPYRLELDQKISSAACGYGFTLLSSKTADVTKVWGMGLNKDSQLGFHRSRKDKTRGYEYVLEPSPVSLPLDRPQETRVLQVSCGRAHSLVLTDREGVFSMGNNSYGQCGRKVVENEIYSESHRVHRMQDFDGQVVQVACGQDHSLFLTDKGEVYSCGWGADGQTGLGHYNITSSPTKLGGDLAGVNVIQVATYGDCCLAVSADGGLFGWGNSEYLQLASVTDSTQVNVPRCLHFSGVGKVRQAACGGTGCAVLNGEGHVFVWGYGILGKGPNLVESAVPEMIPPTLFGLTEFNPEIQVSRIRCGLSHFAALTNKGELFVWGKNIRGCLGIGRLEDQYFPWRVTMPGEPVDVACGVDHMVTLAKSFI

SEQ ID NO: 61581 - protein, 115 aa, Homo sapiens
IGMGFPVKVPYRKITINPGCVVVDGMPPGVSFKAPSYLEISSMRRILDSAEFIKFTVIRPFPGLVINNQLVDQSESEGPVIQESAEPSQLEVPATEEIKETDGSSQIKQEPDPTW

SEQ ID NO: 61582 - protein, 15 aa, Homo sapiens
LIGSQSIRFALGRWY

SEQ ID NO: 61583 - protein, 15 aa, Homo sapiens
LIGSQSIRFALGRWY

SEQ ID NO: 61584 - protein, 15 aa, Homo sapiens
LIGSQSIRFALGRWY

SEQ ID NO: 61585 - protein, 48 aa, Homo sapiens
VRSYEFTSNSCSQRAVIFTTKRGKKVCTHPRKKWVQKYISLLKTPKQL

SEQ ID NO: 61586 - protein, 307 aa, Homo sapiens
LEELTKLQNNCTSSITRQKKRLQELALALKKCKPSLPAEAEGAAQELENQMKERQGLFFDMEAYLPKKNGLYLSLVLGNVNVTLLSKQAKFAYKDEYEKFKLYLTIILILISFTCRFLLNSRVTDAAFNFLLVWYYCTLTIRESILINNGSRIKGWWVFHHYVSTFLSGVMLTWPDGLMYQKFRNQFLSFSMYQSFVQFLQYYYQSGCLYRLRALGERHTMDLTVEGFQSWMWRGLTFLLPFLFFGHFWQLFNALTLFNLAQDPQCKEWQVLMCGFPFLLLFLGNFFTTLRVVHHKFHSQRHGSKKD

SEQ ID NO: 61587 - protein, 28 aa, Homo sapiens
MPYFAQKTAKDMTSSWLQPRFIFLFVVN

SEQ ID NO: 61588 - protein, 111 aa, Homo sapiens
LVLKLDEKAPWNWFLIFIPVWIFDTILLVLLIVKMAGRCKSGFDPRHGSHNIKKKAWYLIAMLLKLAFCLALCAKLEQFTTMNLSYVFIPLWALLAGALTELGYNVFFVRD

SEQ ID NO: 61589 - protein, 43 aa, Homo sapiens
RSWAYVKKCKNNMCPNRGLVSQLLEWEKTILGDSITNIMDPLY

SEQ ID NO: 61590 - protein, 64 aa, Homo sapiens
TTNSKECELPAADSCAIMEGEDNEEEVVYSNKQSLLGKLKSLATKEKEDHFESVQLKTSRSPNI

SEQ ID NO: 61591 - protein, 5 aa, Homo sapiens
MLSCF

SEQ ID NO: 61592 - protein, 42 aa, Homo sapiens
RFARTAGPAAAFCPRFLATDVTNNKILEHRVEEQTQTRFLFN

SEQ ID NO: 61593 - protein, 147 aa, Homo sapiens
LKSKAPHWTNRILHEYKNLSTSEGVSKEMHHLQRMFLQNCWEIPTYGAAFFTGQIFTKASPSNHKVIPVYVGVNIKGLHLLNMETKALLISLKYGCFMWQLGDTDTCFQIHSMENKMSFIVHTKQAGLVVKLLMKLNGQLMPTERNS

SEQ ID NO: 61594 - protein, 54 aa, Homo sapiens
KKGSKALAEFEEKMNENWKKELEKHREKLLSGSESSSKKRQRKKKEKKKSGRFF

SEQ ID NO: 61595 - protein, 249 aa, Homo sapiens
RLFDVCTVSRTDRETKLTLVFEHVDQDLTTYLDKVPEPGVPTETIKDMMFQLLRGLDFLHSHRVVHRDLKPQNILVTSSGQIKLADFGLARIYSFQMALTSVVVTLWYRAPEVLLQSSYATPVDLWSVGCIFAEMFRRKPLFRGSSDVDQLGKILDVIGLPGEEDWPRDVALPRQAFHSKSAQPIEKFVTDIDELGKDLLLKCLTFNPAKRISAYSALSHPYFQDLERCKENLDSHLPPSQNTSELNTA

SEQ ID NO: 61596 - protein, 41 aa, Homo sapiens
IKIPVISVYSGPLRSGRNIERVSFYLGFSIEGPLAYDIEVI

SEQ ID NO: 61597 - protein, 29 aa, Homo sapiens
LTSPFKHSLRIYSVRRSNTMLSHSSSSSS

SEQ ID NO: 61598 - protein, 393 aa, Homo sapiens
LVPREVEHFSRYSPSPLSMKQLLDFGSENACERTSFAFLRQELPVRLANILKEIDILPTQLVNTSSVQLVKSWYIQSLMDLVEFHEKSPDDQKALSDFVDTLIKVRNRHHNVVPTMAQGIIEYKDACTVDPVTNQNLQYFLDRFYMNRISTRMLMNQHILIFSDSQTGNPSHIGSIDPNCDVVAVVQDAFECSRMLCDQYYLSSPELKLTQVNGKFPDQPIHIVYVPSHLHHMLFELFKNAMRATVEHQENQPSLTPIEVIVVLGKEDLTIKISDRGGGVPLRIIDRLFSYTYSTAPTPVMDNSRNAPLAGFGYGLPISRLYAKYFQGDLNLYSLSGYGTDAIIYLKALSSESIEKLPVFNKSAFKHYQMSSEADDWCIPSREPKNLAKEVAM

SEQ ID NO: 61599 - protein, 28 aa, Homo sapiens
MKSIKASISRDPFYDMLATRKRRIANKK

SEQ ID NO: 61600 - protein, 20 aa, Homo sapiens
KESKRRCHIVRKTNAVTLPE

SEQ ID NO: 61601 - protein, 576 aa, Homo sapiens
TEARFPDVANGFIEEIIHFKNYYDLNVLCNFLLENPDYPKREDRIIINPSSSLLASQDETKLPKIDFFDYSKLTPLDQRCFIQAADLLMADFKVLSSQDIKWALHELKGHYAITRKALSDAIKKWQELSPETSGKRKKRKQMNQYSYIDFKFEQGDIKIEKRMFFLENKRRHCRSYDRRALLPAVQQEQEFYEQKIKEMAEHEDFLLALQMNEEQYQKDGQLIECRCCYGEFPFEELTQCADAHLFCKECLIRYAQEAVFGSGKLELSCMEGSCTCSFPTSELEKVLPQTILYKYYERKAEEEVAAAYADELVRCPSCSFPALLDSDVKRFSCPNPHCRKETCRKCQGLWKEHNGLTCEELAEKDDIKYRTSIEEKMTAARIRKCHKCGTGLIKSEGCNRMSCRCGAQMCYLCRVSINGYDHFCQHPRSPGAPCQECSRCSLWTDPTEDDEKLIEEIQKEAEEEQKRKNGENTFKRIGPPLEKPVEKVQRVEALPRPVPQNLPQPQMPPYAFAHPPFPLPPVRPVFNNFPLNMGPIPAPYVPPLPNVRVNYDFGPIHMPLEHNLPMHFGPQPRHRF

SEQ ID NO: 61602 - protein, 94 aa, Homo sapiens
LVSTATTAPPSTAPSGPGSVQKYIVVSLPPTGEGKGGPTSHPSPVPPPASSPSPLSGSALCGGKQEAGDSPPPAPGTPKANGSQPNSGSPQPAP

SEQ ID NO: 61603 - protein, 46 aa, Homo sapiens
KPKLVQMPVIHPLSSPSNRFCVTSLDPDTLPAVATLLMDVMSYFNG

SEQ ID NO: 61604 - protein, 40 aa, Homo sapiens
KDTGDLKDSSLLKTKRKHKKKHKERHKMGEEIIPLRVLSK

SEQ ID NO: 61605 - protein, 58 aa, Homo sapiens
KEPPGPGPDMTILCDPETLFYESPHLTLDGLPPLRLQLRPRPSEDTFLMHRTLRRWEA

SEQ ID NO: 61606 - protein, 1071 aa, Homo sapiens
IKSWVDKMQEDLVTLAKTASGVNQLVDIYEKYQDLYTVEPNNARQLVEIAARDIEKLLSNRSKALVRLALEAEKVQAAHQWREDFASNEVVYYNAKDDLDPEKNDSEPGSQRIKPVFIEDANFGRQISYQHAAVHIPTDIYEGSTIVLNELNWTSALDEVFKKNREEDPSLLWQVFGSATGLARYYPASPWVDNSRTPNKIDLYDVRRRPWYIQGAASPKDMLILVDVSGSVSGLTLKLIRTSVSEMLETLSDDDFVNVASFNSNAQDVSCFQHLVQANVRNKKVLKDAVNNITAKGITDYKKGFSFAFEQLLNYNVSRANCNKIIMLFTDGGEERAQEIFNKYNKDKKVRVFTFSVGQHNYDRGPIQWMACENKGYYYEIPSIGAIRINTQEYLDVLGRPMVLAGDKAKQVQWTNVYLDALELGLVITGTLPVFNITGQFENKTNLKNQLILGVMGVDVSLEDIKRLTPRFTLCPNGYYFAIDPNGYVLLHPNLQPKPIGVGIPTINLRKRRPNIQNPKSQEPVTLDFLDAELENDIKVEIRNKMIDGESGEKTFRTLVKSQDERYIDKGNRTYTWTPVNGTDYSLALVLPTYSFYYIKAKLEETITQARYSETLKPDNFEESGYTFIAPRDYCNDLKISDNNTEFLLNFNEFIDRKTPNNPSCNADLINRVLLDAGFTNELVQNYWSKQKNIKGVKARFVVTDGGITRVYPKEAGENWQENPETYEDSFYKRSLDNDNYVFTAPYFNKSGPGAYESGIMVSKAVEIYIQGKLLKPAVVGIKIDVNSWIENFTKTSIRDPCAGPVCDCKRNSDVMDCVILDDGGFLLMANHDDYTNQIGRFFGEIDPSLMRHLVNISVYAFNKSYDYQSVCEPGAAPKQGAGHRSAYVPSVADILQIGWWATAAAWSILQQFLLSLTFPRLLEAVEMEDDDFTASLSKQSCITEQTQYFFDNDSKSFSGVLDCGNCSRIFHGEKLMNTNLIFIMVESKGTCPCDTRLLIQAEQTSDGPNPCDMVKQPRYRKGPDVCFDNNVLEDYTDCGGVSGLNPSLWYIIGIQFLLLWLVSGSTHRLL

SEQ ID NO: 61607 - protein, 107 aa, Homo sapiens
LLFEGEKKITINKDTKVPNACLFTINKEDHTLGNIIKSQLLKDPQVLFAGYKVPHPLEHKIIIRVQTTPDYSPQEAFTNAITDLISELSLLEERFRVAIKDKQEGIE

SEQ ID NO: 61608 - protein, 57 aa, Homo sapiens
KIRNVGLCEAIVQFTRTFSPSKPAKSLHTQKNRQFFNEPEENFWMVMVVRNPIIEKQ

SEQ ID NO: 61609 - protein, 603 aa, Homo sapiens
LTSASTLCQVEPVGRWFEAFVKRRNRNASASFQELEDKKELSEESEDEELQLEEFPMLKTLDPKDWKNQDHYAVLGLGHVRYKATQRQIKAAHKAMVLKHHPDKRKAAGEPIKEGDNDYFTCITKAYEMLSDPVKRRAFNSVDPTFDNSVPSKSEAKDNFFEVFTPVFERNSRWSNKKNVPKLGDMNSSFEDVDIFYSFWYNFDSWREFSYLDEEEKEKAECRDERRWIEKQNRATRAQRKKEEMNRIRTLVDNAYSCDPRIKKFKEEEKAKKEAEKKAKAEAKRKEQEAKEKQRQAELEAARLAKEKEEEEVRQQALLAKKEKDIQKKAIKKERQKLRNSCKTWNHFSDNEAERVKMMEEVEKLCDRLELASLQCLNETLTSCTKEVGKAALEKQIEEINEQIRKEKEEAEARMRQASKNTEKSTGGGGNGSKNWSEDDLQLLIKAVNLFPAGTNSRWEVIANYMNIHSSSGVKRTAKDVIGKAKSLQKLDPHQKDDINKKAFDKFKKEHGVVPQADNATPSERFEGPYTDFTPWTTEEQKLLEQALKTYPVNTPERWEKIAEAVPGRTKKDCMKRYKELVEMVKAKKAAQEQVLNASRAKK

SEQ ID NO: 61610 - protein, 9 aa, Homo sapiens
VAGPGRLSS

SEQ ID NO: 61611 - protein, 429 aa, Homo sapiens
VVLCRESQVSILQSLFGERHHFSFPSIFIYGHTASGKTYVTQTLLKTLELPHVFVNCVECFTLRLLLEQILNKLNHLSSSEDGCSTEITCETFNDFVRLFKQVTTAENLKDQTVYIVLDKAEYLRDMEANLLPGFLRLQELADRNVTVLFLSEIVWEKFRPNTGCFEPFVLYFPDYSIGNLQKILSHDHPPEYSADFYAAYINILLGVFYTVCRDLKELRHLAVLNFPKYCEPVVKGEASERDTRKLWRNIEPHLKKAMQTVYLREISSSQWEKLQKDDTDPGQLKGLSAHTHVELPYYSKFILIAAYLASYNPARTDKRFFLKHHGKIKKTNFLKKHEKTSNHLLGPKPFPLDRLLAILYSIVDSRVAPTANIFSQITSLVTLQLLTLVGHDDQLDGPKYKCTVSLDFIRAIARTVNFDIIKYLYDFL

SEQ ID NO: 61612 - protein, 215 aa, Homo sapiens
VAVFLLTFYVISQVFEIKMDASLGNLFARSALDTAARSTKPPRYKCGISKACPEKHFAFKMASGAANVVGPKICLEDNVLMSGVKNNVGRGINVALANGKTGEVLDTKYFDMWGGDVAPFIEFLKAIQDGTIVLMGTYDDGATKLNDEARRLIADLGSTSITNLGFRDNWVFCGGKGIKTKSPFEQHIKNNKDTNKYEGWPEVVEMEGCIPQKQD

SEQ ID NO: 61613 - protein, 6 aa, Homo sapiens
RRSIRH

SEQ ID NO: 61614 - protein, 616 aa, Homo sapiens
IGDLFNGRYHVIRKLGWGHFSTVWLCWDMQGKRFVAMKVVKSAQHYTETALDEIKLLKCVRESDPSDPNKDMVVQLIDDFKISGMNGIHVCMVFEVLGHHLLKWIIKSNYQGLPVRCVKSIIRQVLQGLDYLHSKCKIIHTDIKPENILMCVDDAYVRRMAAEATEWQKAGAPPPSGSAVSTAPQQKPIGKISKNKKKKLKKKQKRQAELLEKRLQEIEELEREAERKIIEENITSAAPSNDQDGEYCPEVKLKTTGLEEAAEAETAKDNGEAEDQEEKEDAEKENIEKDEDDVDQELANIDPTWIESPKTNGHIENGPFSLEQQLDDEDDDEEDCPNPEEYNLDEPNAESDYTYSSSYEQFNGELPNGRHKIPESQFPEFSTSLFSGSLEPVACGSVLSEGSPLTEQEESSPSHDRSRTVSASSTGDLPKAKTRAADLLVNPLDPRNADKIRVKIADLGNACWVHKHFTEDIQTRQYRSIEVLIGAGYSTPADIWSTACMAFELATGDYLFEPHSGEDYSRDEDHIAHIIELLGSIPRHFALSGKYSREFFNRRGELRHITKLKPWSLFDVLVEKYGWPHEDAAQFTDFLIPMLEMVPEKRASAGECLRHPWLNS

SEQ ID NO: 61615 - protein, 251 aa, Homo sapiens
LPNGRHKIPESQFPEFSTSLFSGSLEPVACGSVLSEGSPLTEQEESSPSHDRSRTVSASSTGDLPKAKTRAADLLVNPLDPRNADKIRVKIADLGNACWVHKHFTEDIQTRQYRSIEVLIGAGYSTPADIWSTACMAFELATGDYLFEPHSGEDYSRDEDHIALIIELLGKVPRKYAMLGKYSKEFFTRKGELRHITKLKPWSLFDVLVEKYGWPHEDAAQFTDFLIPMLEMVPEKRASAGECLRHPWLNS

SEQ ID NO: 61616 - protein, 759 aa, Homo sapiens
LDRELHLQVVARHEDLLAQATGIESLEGVLQMMQTRIGALQGAVDRIKAKIVEPYNKIVARTAQLARLQVACDLLRRIIRILNLSKRLQGQLQGGSREITKAAQSLNELDYLSQGIDLSGIEVIENDLLFIARARLEVENQAKRLLEQGLETQNPTQVGTALQVFYNLGTLKDTITSVVDGYCATLEENINSALDIKVLTQPSQSAVRGGPGRSTMPTPGNTAALRASFWTNMEKLMDHIYAVCGQVQHLQKVLAKKRDPVSHICFIEEIVKDGQPEIFYTFWNSVTQALSSQFHMATNSSMFLKQAFEGEYPKLLRLYNDLWKRLQQYSQHIQGNFNASGTTDLYVDLQHMEDDAQDIFIPKKPDYDPEKALKDSLQPYEAAYLSKSLSRLFDPINLVFPPGGRNPPSSDELDGIIKTIASELNVAAVDTNLTLAVSKNVAKTIQLYSVKSEQLLSTQGDASQVIGPLTEGQRRNVAVVNSLYKLHQSVTKVVSSQSSFPLAAEQTIISALKAIHALMENAVQPLLTSVGDAIEAIIITMHQEDFSGSLSSSGKPDVPCSLYMKELQGFIARVMSDYFKHFECLDFVFDNTEAIAQRAVELFIRHASLIRPLGEGGKMRLAADFAQMELAVGPFCRRVSDLGKSYRMLRSFRPLLFQASEHVASSPALGDVIPFSIIIQFLFTRAPAELKSPFQRAEWSHTRFSQWLDDHPSEKDRLLLIRGALEAYVQSVRSREGKEFAPVYPIMVQLLQKAMSALQ

SEQ ID NO: 61617 - protein, 5 aa, Homo sapiens
IITSL

SEQ ID NO: 61618 - protein, 588 aa, Homo sapiens
VEGCPALPHKLVAICDISADTGGSIEFMTECTTIEHPFCMYDADQHIIHDSVEGSGILMCSIDNLPAQLPIEATECFGDMLYPYVEEMILSDATQPLESQNFSPVVRDAVITSNGTLPDKYKYIQTLRESRERAQSLSMGTRRKVLVLGSGYISEPVLEYLSRDGNIEITVGSDMKNQIEQLGKKYNINPVSMDICKQEEKLGFLVAKQDLVISLLPYVLHPLVAKACITNKVNMVTASYITPALKELEKSVEDAGITIIGELGLDPGLDHMLAMETIDKAKEVGATIESYISYCGGLPAPEHSNNPLRYKFSWSPVGVLMNVMQSATYLLDGKVVNVAGGISFLDAVTSMDFFPGLNLEGYPNRDSTKYAEIYGISSAHTLLRGTLRYKGYMKALNGFVKLGLINREALPAFRPEANPLTWKQLLCDLVGISPSSEHDVLKEAVLKKLGGDNTQLEAAEWLGLLGDEQVPQAESILDALSKHLVMKLSYGPEEKDMIVMRDSFGIRHPSGHLEHKTIDLVAYGDINGFSAMAKTVGLPTAMAAKMLLDGEIGAKGLMGPFSKEIYGPILERIKAEGIIYTTQSTIKP

SEQ ID NO: 61619 - protein, 34 aa, Homo sapiens
TETRFNQLVEQYKQKLLGPSKGAPLAKRSKWFDS

SEQ ID NO: 61620 - protein, 371 aa, Homo sapiens
ITETGTMGSKLVGIVTSRDIDFLAEKDHTTLLSEVMTPRIELVVAPAGVTLKEANEILQRSKKGKLPIVNDCDELVAIIARTDLKKNRDYPLASKDSQKQLLCGAAVGTREDDKYRLDLLTQAGVDVIVLDSSQGNSVYQIAMVHYIKQKYPHLQVIGGNVVTAAQAKNLIDAGVDGLRVGMGCGSICITQEVMACGRPQGTAVYKVAEYARRFGVPIIADGGIQTVGHVVKALALGASTVMMGSLLAATTEAPGEYFFSDGVRLKKYRGMGSLDAMEKSSSSQKRYFSEGDKVKIAQGVSGSIQDKGSIQKFVPYLIAGIQHGCQDIGARSLSVLRSMMYSGELKFEKRTMSAQIEGGVHGLHSYEKRLY

SEQ ID NO: 61621 - protein, 168 aa, Homo sapiens
VYKVAEYARRFGVPIIADGGIQTVGHVVKALALGASTVMMGSLLAATTEAPGEYFFSDGVRLKKYRGMGSLDAMEKSSSSQKRYFSEGDKVKIAQGVSGSIQDKGSIQKFVPYLIAGIQHGCQDIGARSLSVLRSMMYSGELKFEKRTMSAQIEGGVHGLHSYEKRLY

SEQ ID NO: 61622 - protein, 17 aa, Homo sapiens
LDNLTKDDLDEEEDTHL

SEQ ID NO: 61623 - protein, 38 aa, Homo sapiens
KPLDTPGLGAAVLSVRKAGLKMRSHLTPSVCTVPSPGS

SEQ ID NO: 61624 - protein, 5 aa, Homo sapiens
LETAV

SEQ ID NO: 61625 - protein, 641 aa, Homo sapiens
VAVLIAYKRKSRESDLTLKRLQMQMDNLESRVALECKEAFAELQTDIHELTSDLDGAGIPFLDYRTYTMRVLFPGIEDHPVLRDLEVPGYRQERVEKGLKLFAQLINNKVFLLSFIRTLESQRSFSMRDRGNVASLIMTVLQSKLEYATDVLKQLLADLIDKNLESKNHPKLLLRRTESVAEKMLTNWFTFLLYKFLKECAGEPLFSLFCAIKQQMEKGPIDAITGEARYSLSEDKLIRQQIDYKTLVLSCVSPDNANSPEVPVKILNCDTITQVKEKILDAIFKNVPCSHRPKAADMDLEWRQGSGARMILQDEDITTKIENDWKRLNTLAHYQVPDGSVVALVSKQVTAYNAVNNSTVSRTSASKYENMIRYTGSPDSLRSRTPMITPDLESGVKMWHLVKNHEHGDQKEGDRGSKMVSEIYLTRLLATKGTLQKFVDDLFETIFSTAHRGSALPLAIKYMFDFLDEQADKHGIHDPHVRHTWKSNCLPLRFWVNMIKNPQFVFDIHKNSITDACLSVVAQTFMDSCSTSEHRLGKDSPSNKLLYAKDIPSYKNWVERYYSDIGKMPAISDQDMNAYLAEQSRMHMNEFNTMSALSEIFSYVGKYSEEILGPLDHDDQCGKQKLAYKLEQVITLMSLDS

SEQ ID NO: 61626 - protein, 30 aa, Homo sapiens
MDPRKVNELQAFVKMCKQDPSVLHTEEMRF

SEQ ID NO: 61627 - protein, 35 aa, Homo sapiens
LNRAGFQTEDFSLYACASPKTPIQAGGYGEFAAFK

SEQ ID NO: 61628 - protein, 13 aa, Homo sapiens
LVKSNPVTLWLVS

SEQ ID NO: 61629 - protein, 96 aa, Homo sapiens
LEFKLQQTSCRKRDWKKPECKVRPNGRKRKCLACIKLGSEDKVLGRLVHCPIETQVLREAEEHQETQCLRVQRAGEDPHSFYFPGQFAFSKALPRS

SEQ ID NO: 61630 - protein, 75 aa, Homo sapiens
MQMLRKLFTAIRALFLAVCVLKVIVSLVSLGVGLRNLCGQSSQPLNEEGSEKRLLGENSVPPSPSREQTSTAIVL

SEQ ID NO: 61631 - protein, 149 aa, Homo sapiens [sequence omitted]

SEQ ID NO: 61632 - protein, 588 aa, Homo sapiens
KEENGVLVLNDANFDNFVADKDTVLLEFYAPWCGHCKQFAPEYEKIANILKDKDPPIPVAKIDATSASVLASRFDVSGYPTIKILKKGQAVDYEGSRTQEEIVAKVREVSQPDWTPPPEVTLVLTKENFDEVVNDADIILVEFYAPWCGHCKKLAPEYEKAAKELSKRSPPIPLAKVDATAETDLAKRFDVSGYPTLKIFRKGRPYDYNGPREKYGIVDYMIEQSGPPSKEILTLKQVQEFLKDGDDVIIIGVFKGESDPAYQQYQDAANNLREDYKFHHTFSTEIAKFLKVSQGQLVVMQPEKFQSKYEPRSHMMDVQQGSTQDSAIKDFVLKYALPLVGHRKVSNDAKRYTRRPLVVVYYSVDFSFDYRAATQFWRSKVLEVAKDFPEYTFAIADEEDYAGEVKDLGLSESGEDVNAAILDESGKKFAMEPEEFDSDTLREFVTAFKKGKLKPVIKSQPVPKNNKGPVKVVVGKTFDSIVMDPKKDVLIEFYAPWCGHCKQLEPVYNSLAKKYKGQKGLVIAKMDATANDVPSDRYKVEGFPTIYFAPSGDKKNPVKFEGGDRDLEHLSKFIEEHATKLSRTKEEL

SEQ ID NO: 61633 - protein, 53 aa, Homo sapiens
IVNRISLFLSTFTLAVSAGAVLLLPFSIISNEILLSFPQNYYIQWLNGSLIHG

SEQ ID NO: 61634 - protein, 53 aa, Homo sapiens
MTKIIGNCVSILVLSSALPVMSRTLGLHKLHLPNTSRDSETAKPSVNGHQKAL

SEQ ID NO: 61635 - protein, 78 aa, Homo sapiens
IFRLLGTPTEEQWPSMTKLPDYKPYPMYPATTSLVNVVPKLNATGRDLLQNLLKCNPVQRISAEEALQHPYFSDFCPP

SEQ ID NO: 61636 - protein, 35 aa, Homo sapiens
VLPVRTQDPFLPYPPRSCPQGQAASSATTRDPAQR

SEQ ID NO: 61637 - protein, 624 aa, Homo sapiens
IMPSDLAKKKAAKKKEAAKARQRPRKGHEENGDVVTEPQVAEKNEANGRETTEVDLLTKELEDFEMKKAAARAVTGVLASHPNSTDVHIINLSLTFHGQELLSDTKLELNSGRRYGLIGLNGIGKSMLLSAIGKREVPIPEHIDIYHLTREMPPSDKTPLHCVMEVDTERAMLEKEAERLAHEDAECEKLMELYERLEELDADKAEMRASRILHGLGFTPAMQRKKLKDFSGGWRMRVALARALFIRPFMLLLDEPTNHLDLDACVWLEEELKTFKRILVLVSHSQDFLNGVCTNIIHMHNKKLKYYTGNYDQYVKTRLELEENQMKRFHWEQDQIAHMKNYIARFGHGSAKLARQAQSKEKTLQKMMASGLTERVVSDKTLSFYFPPCGKIPPPVIMVQNVSFKYTKDGPCIYNNLEFGIDLDTRVALVGPNGAGKSTLLKLLTGELLPTDGMIRKHSHVKIGRYHQHLQEQLDLDLSPLEYMMKCYPEIKEKEEMRKIIGRYGLTGKQQVSPIRNLSDGQKCRVCLAWLAWQNPHMLFLDEPTNHLDIETIDALADAINEFEGGMMLVSHDFRLIQQVAQEIWVCEKQTITKWPGDILAYKEHLKSKLVDEEPQLTKRTHNV

SEQ ID NO: 61638 - protein, 152 aa, Homo sapiens
LLLPPDPIVINHVISVDPSDQKKTACYDIDVEVEEPLKGQMSSFLLSTANQQEISALDSKIHETIESINQLKIQRDFMLSFSRDPKGYVQDLLRSQSRDLKVMTDVAGNPEEERRAEFYHQPWSQEAVSRYFYCKIQQRRQELEQSLVVRNT

SEQ ID NO: 61639 - protein, 88 aa, Homo sapiens
IESINQLKIQRDFMLSFSRDPKGYVQDLLRSQSRDLKVMTDVAGNPEEERRAEFYHQPWSQEAVSRYFYCKIQQRRQELEQSLVVRNT

SEQ ID NO: 61640 - protein, 19 aa, Homo sapiens
RKLLLLWSCQRMCPCGWIQ

SEQ ID NO: 61641 - protein, 1179 aa, Homo sapiens
IMPKKKRLSAGRVPLILFLCQMISALEVPLDLVQPPTITQQSPKDYIIDPRENIVIQCEAKGKPPPSFSWTRNGTHFDIDKDPLVTMKPGTGTLIINIMSEGKAETYEGVYQCTARNERGAAVSNNIVVRPSRSPLWTKEKLEPITLQSGQSLVLPCRPPIGLPPPIIFWMDNSFQRLPQSERVSQGLNGDLYFSNVLPEDTREDYICYARFNHTQTIQQKQPISVKVISVDELNDTIAANLSDTEFYGAKSSRERPPTFLTPEGNASNKEELRGNVLSLECIAEGLPTPIIYWAKEDGMLPKNRTVYKNFEKTLQIIHVSEADSGNYQCIAKNALGAIHHTISVRVKAAPYWITAPQNLVLSPGEDGTLICRANGNPKPRISWLTNGVPIEIAPDDPSRKIDGDTIIFSNVQERSSAVYQCNASNEYGYLLANAFVNVLAEPPRILTPANTLYQVIANRPALLDCAFFGSPLPTIEWFKGAKGSALHEDIYVLHENGTLEIPVAQKDSTGTYTCVARNKLGMAKNEVHLEIKDPTWIVKQPEYAVVQRGSMVSFECKVKHDHTLSLTVLWLKDNRELPSDERFTVDKDHLVVADVSDDDSGTYTCVANTTLDSVSASAVLSVVDVPNPPFDLELTDQLDKSVQLSWTPGDDNNSPITKFIIEYEDAMHKPGLWHHQTEVSGTQTTAQLKLSPYVNYSFRVMAVNSIGKSLPSEASEQYLTKASEPDKNPTAVEGLGSEPDNLVITWKPLNGFESNGPGLQYKVSWRQKDGDDEWTSVVVANVSKYIVSGTPTFVPYLIKVQALNDMGFAPEPAVVMGHSGEDLPMVAPGNVRVNVVNSTLAEVHWDPVPLKSIRGHLQGYRIYYWKTQSSSKRNRRHIEKKILTFQGSKTHGMLPGLEPFSHYTLNVRVVNGKGEGPASPDRVFNTPEGVPSAPSSLKIVNPTLDSLTLEWDPPSHPNGILTEYTLKYQPINSTHELGPLVDLKIPANKTRWTLKNLNFSTRYKFYFYAQTSAGSGSQITEEAVTTVDEAMASRQVDIATQGWFIGLMCAVALLILILLIVCFIRRNKGGKYPVKEKEDAHADPEIQPMKEDDGTFGEYSDAEDHKPLKKGSRTPSDRTVKKEDSDDSLVDYGEGVNGQFNEDGSFIGQYSGKKEKEPAEGNESSEAPSPVNAMNSFV

SEQ ID NO: 61642 - protein, 778 aa, Homo sapiens
LTVDIYIYLLSNARSVCGKQRSKQLYFLFSPKHYWRISHISLQRGFHTNIIRCKWTKSEAHSCSKHCYSPSNHGLHIGILKLSTSAPKGLTKVNICMSRIKSTLNSVSKAVFGNQNEMISRLAQFKPSSQILRKVSDSGWLKQKNIKQAIKSLKKYSDKSAEKSPFPEEKSHIIDKEEDIGKRSLFHYTSSITTKFGDSFYFLSNHINSYFKRKEKMSQQKENEHFRDKSELEDKKVEEGKLRSPDPGILAYKPGSESVHTVDKPTSPSAIPDVLQVSTKQSIANFLSRPTEGVQALVGGYIGGLVPKLKYDSKSQSEEQEEPAKTDQAVSKDRNAEEKKRLSLQREKIIARVSIDNRTRALVQALRRTTDPKLCITRVEELTFHLLEFPEGKGVAVKERIIPYLLRLRQIKDETLQAAVREILALIGYVDPVKGRGIRILSIDGGGTRGVVALQTLRKLVELTQKPVHQLFDYICGVSTGAILAFMLGLFHMPLDECEELYRKLGSDVFSQNVIVGTVKMSWSHAFYDSQTWENILKDRMGSALMIETARNPTCPKVAAVSTIVNRGITPKAFVFRNYGHFPGINSHYLGGCQYKMWQAIRASSAAPGYFAEYALGNDLHQDGGLLLNNPSALAMHECKCLWPDVPLECIVSLGTGRYESDVRNTVTYTSLKTKLSNVINSATDTEEVHIMLDGLLPPDTYFRFNPVMCENIPLDESRNEKLDQLQLEGLKYIERNEQKMKKVAKILSQEKTTLQKINDWIKLKTDMYEGLPFFSKL

SEQ ID NO: 61643 - protein, 23 aa, Homo sapiens
RKLYVNTWIYGTLLGCLWVTIKA

SEQ ID NO: 61644 - protein, 292 aa, Homo sapiens
RKKDHFRNDTNTQSFYREKWIYVHKESTKERHGYCTLGEAFNRLDFSSAIQDIRRFNYVVKLLQLIAKSQLTSLSGVAQKNYFNILDKIVQKVLDDHHNPRLIKDLLQDLSSTLCILIRGVGKSVLVGNINIWICRLETILAWQQQLQDLQMTKQVNNGLTLSDLPLHMLNNILYRFSDGWDIITLGQVTPTLYMLSEDRQLWKKLCQYHFAEKQFCRHLILSEKGHIEWKLMYFALQKHYPAKEQYGDTLHFCRHCSILFWKDSGHPCTAADPDSCFTPVSPQHFIDLFKF

SEQ ID NO: 61645 - protein, 56 aa, Homo sapiens
LTLFLVGLALLTLIINPYWTHKKTQQLLNPVDWNFAQPEAKSRPEGNGQLLRKKRP

SEQ ID NO: 61646 - protein, 1248 aa, Homo sapiens
ITPFQEDQPPTPVPSAEEENVGLHVPCGYLVPVPCGYAVPSNLPLLLPAYSSPVIICATSLDEEETPEVTEDRQPNSLSSEEPPTSEDQVGREDSALARWAADPANTAWMENPEEAIYDDVPRENSDSEPDEMIYDDVENGDEGGNSSLEYGWSSSEFESYEEQSDSECKNGIPRSFLRSNHKKQLSHDLTRLKEHYEKKMRDLMASTVGVVEIQQLRQKHELKMQKLVKAAKDGTKDGLERTRAAVKRGRSFIRTKSLIAQDHRSSLEEEQNLFIDVDCKHPEAILTPMPEGLSQQQVVRRYILGSVVDSEKNYVDALKRILEQYEKPLSEMEPKVLSERKLKTVFYRVKEILQCHSLFQIALASRVSEWDSVEMIGDVFVASFSKSMVLDAYSEYVNNFSTAVAVLKKTCATKPAFLEFLKQEQEASPDRTTLYSLMMKPIQRFPQFILLLQDMLKNTSKGHPDRLPLQMALTELETLAEKLNERKRDADQRCEVKQIAKAINERYLNKLLSSGSRYLIRSDDMIETVYNDRGEIVKTKERRVFMLNDVLMCATVSSRPSHDSRVMSSQRYLLKWSVPLGHVDAIEYGSSAGTGEHSRHLAVHPPESLAVVANAKPNKVYMGPGQLYQDLQNLLHDLNVIGQITQLIGNLKGNYQNLNQSVAHDWTSGLQRLILKKEDEIRAADCCRIQLQLPGKQDKSGRPTFFTAVFNTFTPAIKESWVNSLQMAKLALEEENHMGWFCVEDDGNHIKKEKHPLLVGHMPVMVAKQQEFKIECAAYNPEPYLNNESQPDSFSTAHGFLWIGSCTHQMGQIAIVSFQNSTPKVIECFNVESRILCMLYVPVEEKRREPGAPPDPETPAVRASDVPTICVGTEEGSISIYKSSQGSKKVRLQHFFTPEKSTVMSLACTSQSLYAGLVNGAVASYARAPDGSWDSEPQKVIKLGVLPVRSLLMMEDTLWAASGGQVFIISVETHAVEGQLEAHQEEGMVISHMAVSGVGIWIAFTSGSTLRLFHTETLKHLQDINIATPVHNMLPGHQRLSVTSLLVCHGLLMVGTSLGVLVALPVPRLQGIPKVTGRGMVSYHAHNSPVKFIVLATALHEKDKDKSRDSLAPGPEPQDEDQKDALPSGGAGSSLSQGDPDAAIWLGDSLGSMTQKSDLSSSSGSLSLSHGSSSLEHRSEDSTIYDLLKDPVSLRSKARRAKKAKASSALVVCGGQGHRRVHRKARQPHQEELAPTVMVWQIPLLNI

SEQ ID NO: 61647 - protein, 298 aa, Homo sapiens
KFITSSASDFSDPVYKEIAITNGCINRMSKEELRAKLSEFKLETRGVKDVLKKRLKNYYKKQKLMLKESNFADSYYDYICIIDFEATCEEGNPPEFVHEIIEFPVVLLNTHTLEIEDTFQQYVRPEINTQLSDFCISLTGITQDQVDRADTFPQVLKKVIDWMKLKELGTKYKYSLLTDGSWDMSKFLNIQCQLSRLKYPPFAKKWINIRKSYGNFYKVPRSQTKLTIMLEKLGMDYDGRPHCGLDDSKNIARIAVRMLQDGCELRINEKMHAGQLMSVSSSLPIEGTPPPQMPHFRK

SEQ ID NO: 61648 - protein, 139 aa, Homo sapiens
INAIIHKGFDERHAYIGGMFGAGIYFAENSSKSNQYVYGIGGGTGCPTHKDRSCYICHRQMLFCRVTLGKSFLQFSTMKMAHAPPGHHSVIGRPSVNGLAYAEYVIYRGEQAYPEYLITYQIMKPEAPSQTATAAEQKT

SEQ ID NO: 61649 - protein, 293 aa, Homo sapiens
LMEWSSRRSIFRMNGDKFRKFIKAPPRNYSMIVMFTALQPQRQCSVCRQANEEYQILANSWRYSSAFCNKLFFSMVDYDEGTDVFQQLNMNSAPTFMHFPPKGRPKRADTFDLQRIGFAAEQLAKWIADRTDVHIRVFRPPNYSGTIALALLVSLVGGLLYLRRNNLEFIYNKTGWAMVSLCIVFAMTSGQMWNHIRGPPYAHKNPHNGQVSYIHGSSQAQFVAESHIILVLNAAITMGMVLLNEAATSKGDVGKRRIICLVGLGLVVFFFSFLLSIFRSKYHGYPYSDLDFE

SEQ ID NO: 61650 - protein, 321 aa, Homo sapiens
RDSANSAPKTQSIMMQVLDKGRFQKPAATLSLLAGQTVELRCKGSRIGWSYPAYLDTFKDSRLSVKQNERYGQLTLVNSTSADTGEFSCWVQLCSGYICRKDEAKTGSTYIFFTEKGELFVPSPSYFDVVYLNPDRQAVVPCRVTVLSAKVTLHREFPAKEIPANGTDIVYDMKRGFVYLQPHSEHQGVVYCRAEAGGRSQISVKYQLLYVAVPSGPPSTTILASSNKVKSGDDISVLCTVLGEPDVEVEFTWIFPGQKDERPVTIQDTWRLIHRGLGHTTRISQSVITVEDFETIDAGYYICTAQNLQGQTTVATTVEFS

SEQ ID NO: 61651 - protein, 152 aa, Homo sapiens
LDTVQGILDRIYASQTDQMVFNAYQAGVGALKLSMKDVTVEKAESLVDQIQELCDTQDEVSQTLAGGVTNGLDFDSEELEKELDILLQDTTKEPLDLPDNPRNRHFTNSVPNPRISDAELEAELEKLSLSEGGLVPSSKSPKRQLEPTLKPL

SEQ ID NO: 61652 - protein, 330 aa, Homo sapiens
LKTKSQYHDLQAPDNQQTKDIWKKVAEKEELEQGSRPAPTLEEEKIRSLSSSSRNIQQMLADSINRMKAYAFHQKKESMKKKQDEEINQIEEERTKQICKSWKEDSEWQASLRKSKAADEKRRSLAKQAREDYKRLSLGAQKGRGGERLQSPLRVPQKPERPPLPPKPQFLNSGAYPQKPLRNQGVVRTLSSSAQEDIIRWFKEEQLPLRAGYQKTSDTIAPWFHGILTLKKANELLLSTGMPGSFLIRVSERIKGYALSYLSEDGCKHFLIDASADAYSFLGVDQLQHATLADLVEYHKEEPITSLGKELLLYPCGQQDQLPDYLELFE

SEQ ID NO: 61653 - protein, 733 aa, Homo sapiens
VAAESPEPDVPAASGWRLESARVMSAQGDCEFLVQRARELVPQDLWAAKAWLITARSLYPADFNIQYEMYTIERNAERTATAGRLLYDMFVNFPDQPVVWREISIITSALRNDSQDKQTQFLRSLFETLPGRVQCEMLLKVTEQCFNTLERSEMLLLLLRRFPETVVQHGVGLGEALLEAETIEEQESPVNCFRKLFVCDVLPLIINNHDVRLPANLLYKYLNKAAEFYINYVTRSTQIENQHQGAQDTSDLMSPSKRSSQKYIIEGLTEKSSQIVDPWERLFKILNVVGMRCEWQMDKGRRSYGDILHRMKDLCRYMNNFDSEAHAKYKNQVVYSTMLVFFKNAFQYVNSIQPSLFQGPNAPSQVPLVLLEDVSNVYGDVEIDRNKHIHKKRKLAEGREKTMSSDDEDCSAKGRNRHIVVNKAELANSTEVLESFKLARESWELLYSLEFLDKEFTRICLAWKTDTWLWLRIFLTDMIIYQGQYKKAIASLHHLAALQGSISQPQITGQGTLEHQRALIQLATCHFALGEYRMTCEKVLDLMCYMVLPIQDGGKSQEEPSKVKPKFRKGSDLKLLPCTSKAIMPYCLHLMLACFKLRAFTDNRDDMALGHVIVLLQQEWPRGENLFLKAVNKICQQGNFQYENFFNYVTNIDMLEEFAYLRTQEGGKIHLELLPNQGMLIKHHTVTRGITKGVKEDFRLAMERQVSRCGENLMVVLHRFCINEKILLLQTLT

SEQ ID NO: 61654 - protein, 8 aa, Homo sapiens
KRFYRHRK

SEQ ID NO: 61655 - protein, 441 aa, Homo sapiens
IDIESKFALRTPEDTAEDTCHLIPGVAESVATCHFNHSSKTFMVIHGWTVTGMYESWVPKLVAALYKREPDSNVIVVDWLSRAQEHYPVSAGYTKLVGQDVARFINWMEEEFNYPLDNVHLLGYSLGAHAAGIAGSLTNKKVNRITGLDPAGPNFEYAEAPSRLSPDDADFVDVLHTFTRGSPGRSIGIQKPVGHVDIYPNGGTFQPGCNIGEAIRVIAERGLGDVDQLVKCSHERSIHLFIDSLLNEENPSKAYRCSSKEAFEKGLCLSCRKNRCNNLGYEINKVRAKRSSKMYLKTRSQMPYKVFHYQVKIHFSGTESETHTNQAFEISLYGTVAESENIPFTLPEVSTNKTYSFLIYTEVDIGELLMLKLKWKSDSYFSWSDWWSSPGFAIQKIRVKAGETQKKVIFCSREKVSHLQKGKAPAVFVKCHDKSLNKKSG

SEQ ID NO: 61656 - protein, 397 aa, Homo sapiens
MLPLTAAFEAVAQMFSTNSFNEQEAKRTLVGLVRDLRGIAFAFNAKTSFMMLFEWIYPSYMPILQRAIELWYHDPACTTPVLKLMAELVHNRSQRLQFDVSSPNGILLFRETSKMITMYGNRILTLGEVPKDQVYALKLKGISICFSMLKAALSGSYVNFGVFRLYGDDALDNALQTFIKLLLSIPHSDLLDYPKLSQSYYSLLEVLTQDHMNFIASLEPHVIMYILSSISEGLTALDTMVCTGCCSCLDHIVTYLFKQLSRSTKKRTTPLNQESDRFLHIMQQHPEMIQQMLSTVLNIIIFEDCRNQWSMSRPLLGLILLNEKYFSDLRNSIVNSQPPEKQQAMHLCFENLMEGIERNLLTKNRDRFTQNLSAFRREVNDSMKNSTYGVNSNDMMS

SEQ ID NO: 61657 - protein, 8 aa, Homo sapiens
VAAAVGAA

SEQ ID NO: 61658 - protein, 764 aa, Homo sapiens
RAGAVAVAIEQASGREDALPWPPVRRFPRRRPASMPGVARLPLLLGLLLLPRPGRPLDLADYTYDLAEEDDSEPLNYKDPCKAAAFLGDIALDEEDLRAFQVQQAVDLRRHTARKSSIKAAVPGNTSTPSCQSTNGQPQRGACGRWRGRSRSRRAATSRPERVWPDGVIPFVIGGNFTGSQRAVFRQAMRHWEKHTCVTFLERTDEDSYIVFTYRPCGCCSYVGRRGGGPQAISIGKNCDKFGIVVHELGHVVGFWHEHTRPDRDRHVSIVRENIQPGQEYNFLKMEPQEVESLGETYDFDSIMHYARNTFSRGIFLDTIVPKYEVNGVKPPIGQRTRLSKGDIAQARKLYKCPACGETLQDSTGNFSSPEYPNGYSAHMHCVWRISVTPGEKIILNFTSLDLYRSRLCWYDYVEVRDGFWRKAPLRGRFCGSKLPEPIVSTDSRLWVEFRSSSNWVGKGFFAVYEAICGGDVKKDYGHIQSPNYPDDYRPSKVCIWRIQVSEGFHVGLTFQSFEIERHDSCAYDYLEVRDGHSESSTLIGRYCGYEKPDDIKSTSSRLWLKFVSDGSINKAGFAVNFFKEVDECSRPNRGGCEQRCLNTLGSYKCSCDPGYELAPDKRRCEAACGGFLTKLNGSITSPGWPKEYPPNKNCIWQLVAPTQYRISLQFDFFETEGNDVCKYDFVEVRSGLTADSKLHGKFCGSEKPEVITSQYNNMRVEFKSDNTVSKKGFKAHFFSEKRPALQPPRGRPHQLKFRVQKRNRTPQ

SEQ ID NO: 61659 - protein, 443 aa, Homo sapiens
IINDGAAILRQEKTMIEVDAPITVCGDIHGQFFDLMKLFEVGGSPSNTRYLFLGDYVDRGYFSIECVLYLWSLKINHPKTLFLLRGNHECRHLTDYFTFKQECRIKYSEQVYDACMETFDCLPLAALLNQQFLCVHGGMSPEITSLDDIRKLDRFTEPPAFGPVCDLLWSDPSEDYGNEKTLEHYTHNTVRGCSYFYSYPAVCEFLQNNNLLSIIRAHEAQDAGYRMYRKSQATGFPSLITIFSAPNYLDVYNNKAAVLKYENNVMNIRQFNCSPHPYWLPNFMDVFTWSLPFVGEKVTEMLVNVLNICSDDELISDDEAEGSTTVRKEIIRNKIRAIGKMARVFSILRQESESVLTLKGLTPTGTLPLGVLSGGKQTIETAIRGFSLQHKIRSFEEARGLDRINERMPPRKDSIHAGGPMKSVTSAHSHAAHRSDQGKKAHS

SEQ ID NO: 61660 - protein, 386 aa, Homo sapiens
LDKDLRAIETRLPSPKSSPAPRRAPEQRPPAGPASAWSSSYPHAPYLGSARSLSPHKMADGGSPFLGRRDFVYPSSTRDPSASNGGGSPARREEKKRKAARLKFDFQAQSPKELTLQKGDIVYIHKEVDKNWLEGEHHGRLGIFPANYVEVLPADEIPKPIKPPTYQVLEYGEAVAQYTFKGDLEVELSFRKGEHICLIRKVNENWYEGRITGTGRQGIFPASYVQVSREPRLRLCDDGPQLPTSPRLTAAARSARHPSSPSALRSPADPIDLGGQTSPRRTGFSFPTQEPRPQTQNLGTPGPALSHSRGPSHPLDLGTSSPNTSQIHWTPYRAMYQYRPQNEDELELREGDRVDVMQQCDDGWFVGVSRRTQKFGTFPGNYVAPV

SEQ ID NO: 61661 - protein, 183 aa, Homo sapiens
LSYSGRPGSRQAGLGRAGDSAVLVLPPSPGPRSSRPSMDSEGGSLLLDEDSEVFKMLQENREGRAAPRQSSSFRLLQEALEAEERGGTPAFLPSSLSPQSSLPASRALATPPKLHTCEKCSTSIANQAVRIQEGRYRHPGCYTCADCGLNLKMRGHFWVGDELYCEKHARQRYSAPATLSSRA

SEQ ID NO: 61662 - protein, 91 aa, Homo sapiens
IHTLELKLEESHNRFSATEVTNKTLAAEMQELRVRLAEAEETARTAERQKSQLQRLLQELRRRLTPLQLEIQRVVEKADSWVEKEEPAPSN

SEQ ID NO: 61663 - protein, 183 aa, Homo sapiens
LDLNVRNLSMIVEEMKAVDTQHGEILRNVTILRGAPGPPGPRGFKGDMGVKGPVGGRGPKGDPGSLGPLGPQGPQGQPGEAGPVGERGPVGPRGFPGLKGSKGSFGTGGPRGQPGPKGDIGPPGPEGPPGSPGPSGPQGKPGIAGKTGSPGQRGAMGPKGEPGIQGPPGLPGPPGPPGSQSFY

SEQ ID NO: 61664 - protein, 100 aa, Homo sapiens
IGLLRLRKCSEETFRFELGGGVSIVRELHVYGSVVPVSSRDPTKFQHQGFGMLLMEEAERIAREEHGSGKIAVISGVGTRNYYRKIGYRLQGPYMVKMLK

SEQ ID NO: 61665 - protein, 36 aa, Homo sapiens
VKVYGYMPLLYTQFRVDSVLFKTRLPHDKTKCFKFI

SEQ ID NO: 61666 - protein, 42 aa, Homo sapiens
LKQLMVHAFIKRSDAEEVDFAGWLCSTIGLNQPSTPTHAAGV

SEQ ID NO: 61667 - protein, 197 aa, Homo sapiens
KMNNGGKAEKENTPSEANLQEEEVRTLFVSGLPLDIKPRELYLLFRPFKGYEGSLIKLTSKQPVGFVSFDSRSEAEAAKNALNGIRFDPEIPQTLRLEFAKANTKMAKNKLVGTPNPSTPLPNTVPQFIAREPYELTVPALYPSSPEVWAPYPLYPAELAPALPPPAFTYPASLHAQMRWLPPSEATSQGWKSRQFC

SEQ ID NO: 61668 - protein, 280 aa, Homo sapiens
IRTKTQSFCRNEYSLTGLCNRSSCPLANSQYATIKEEKGQCYLYMKVIERAAFPRRLWERVRLSKNYEKALEQIDENLIYWPRFIRHKCKQRFTKITQYLIRIRKLTLKRQRKLVPLSKKVERREKRREEKALIAAQLDNAIEKELLERLKQDTYGDIYNFPIHAFDKALEQQEAESDSSDTEEKDDDDDDEEDVGKREFVEDGEVDESDISDFEDMDKLDASSDEDQDGKSSSEEEEEKALSAKHKGKMPLRGPLQRKRAYVEIEYEQETEPVAKAKTT

SEQ ID NO: 61669 - protein, 440 aa, Homo sapiens
KSSFKPYSKGSGGGDSRKDSGSSSVSSTSSSSSSSPGDKAGFRVPSAACPPFPPHGAPVSASSSSSSPGGSRGGSPHHSDCKNGGGVGGGELDKKDQEPKPSPEPAAVSRGGGGEPGAHGGAESGASGRKSEPPSALVGAGHVAPVSPYKPGHSVFPLPPSSIGYHGSIVGAYAGYPSQFVPGLDPSKSGLVGGQLSGGLGLPPGKPPSSSPLTGASPPSFLQGLCRDPYCLGGYHGASHLGGSSCSTCSAHDPAGPSLKAGGYPLVYPGHPLQPAALSSSAAQAALPGHPLYTYGFMLQNEPLPHSCNWVAASGPCDKRFATSEELLSHLRTHTALPGAEKLLAAYPGASGLGSAAAAAAAAASCHLHLPPPAAPGSPGSLSLRNPHTLGLSRYHPYGKSHLSTAGGLAVPSLPTAGPYYSPYALYGQRLASASALGYQ

SEQ ID NO: 61670 - protein, 127 aa, Homo sapiens
KVFIQRDYSSGTRCQFQTKFPAELENRIDRQQFEETVRTLNNLYAEAEKLGGQSYLEGCLACLTAYTIFLCMETHYEKVLKKVSKYIQEQNEKIYAPQGLLLTDPIERGLRVIEITIYEDRGMSSGR

SEQ ID NO: 61671 - protein, 6 aa, Homo sapiens
IHFYRS

SEQ ID NO: 61672 - protein, 61 aa, Homo sapiens
MSLQAGASKPDENPTINLQFKIQQLAISGLKVNRLDMYGEKYKPFKGIKYMTKAGKFQVRT

SEQ ID NO: 61673 - protein, 614 aa, Homo sapiens
LLAPGGSSGRDAQAAPPRDLDKKRHAELKMDQALLLIHNELLWTNLTVYWKSECCYHCLFQVLVNVPQSPKAGKPSAAAASVSTQHGSILQLNDTLEEKEVCRLEYRFGEFGNYSLLVKNIHNGVSEIACDLAVNEDPVDSNLPVSIAFLIGLAVIIVISFLRLLLSLDDFNNWISKAISSRETDRLINSELGSPSRTDPLDGDVQPATWRLSALPPRLRSVDTFRGIALILMVFVNYGGGKYWYFKHASWNGLTVADLVFPWFVFIMGSSIFLSMTSILQRGCSKFRLLGKIAWRSFLLICIGIIIVNPNYCLGPLSWDKVRIPGVLQRLGVTYFVVAVLELLFAKPVPEHCASERSCLSLRDITSSWPQWLLILVLEGLWLGLTFLLPVPGCPTGYLGPGGIGDFGKYPNCTGGAAGYIDRLLLGDDHLYQHPSSAVLYHTEVAYDPEGILGTINSIVMAFLGVQAGKILLYYKARTKDILIRFTAWCCILGLISVALTKVSENEGFIPVNKNLWSLSYVTTLSSFAFFILLVLYPVVDVKGLWTGTPFFYPGMNSILVYVGHEVFENYFPFQWKLKDNQSHKEHLTQNIVATALWVLIAYILYRKKIFWKI

SEQ ID NO: 61674 - protein, 176 aa, Homo sapiens
KDYIAYAHSTIMPRLSEEASQALIEAYVDMRKIGSSRGMVSAYPRQLESLIRLAEAHAKVRLSNKVEAIDVEEAKRLHREALKQSATDPRTGIVDISILTTGMSATSRKRKEELAEALKKLILSKGKTPALKYQQLFEDIRGQSDIAITKDMFEEALRALADDDFLTVTGKTVRLL

SEQ ID NO: 61675 - protein, 156 aa, Homo sapiens
VFGAGDGLGAGEAEAGVNTRGTHAKEGTFGNPNLECLVFRIRKEKEMKCEETHAPNSNWVYVMLPSKKTVRMPSVTQRLRDPDINPCLSESDASTRCLDENNYDRERCSTYFLRYKNCRRFWNSIVMQRRKNGVKPFMPTAAERDEILRAVGNMPY

SEQ ID NO: 61676 - protein, 56 aa, Homo sapiens
RIFSVPPTEETLSEPNFYDTISKIRLRQQLEMYSISRKYDYQQPQNQADSVQLSLE

SEQ ID NO: 61677 - protein, 27 aa, Homo sapiens
LEMYSISRKYDYQQPQNQADSVQLSLE

SEQ ID NO: 61678 - protein, 694 aa, Homo sapiens
VDAPCQTVEDLTNGVVMAQVLQKIDPAYFDENWLNRIKTEVGDNWRLKISNLKKILKGILDYNHEILGQQINDFTLPDVNLIGEHSDAAELGRMLQLILGCAVNCEQKQEYIQAIMMMEESVQHVVMTAIQELMSKESPVSAGNDAYVDLDRQLKKTTEELNEALSAKEEIAQRCHELDMQVAALQEEKSSLLAENQVLMERLNQSDSIEDPNSPAGRRHLQLQTQLEQLQEETFRLEAAKDDYRIRCEELEKEISELRQQNDELTTLADEAQSLKDEIDVLRHSSDKVSKLEGQVESYKKKLEDLGDLRRQVKLLEEKNTMYMQNTVSLEEELRKANAARSQLETYKRQVVELQNRLSEESKKADKLDFEYKRLKEKVDSLQKEKDRLRTERDSLKETIEELRCVQAQEGQLTTQGLMPLGSQESSDSLAAEIVTPEIREKLIRLQHENKMLKLNQEGSDNEKIALLQSLLDDANLRKNELETENRLVNQRLLEVQSQVEELQKSLQDQGSKAEDSVLLKKKLEEHLEKLHEANNELQKKRAIIEDLEPRFNNSSLKIEELQEALRKKEEEMKQMEERYKKYLEKAKSVIRTLDPKQNQGAAPEIQALKNQLQERDRLFHSLEKEYEKTKSQREMEEKYIVSAWYNMGMTLHKKAAEDRLASTGSGQSFLARQRQATSSRRSYPGHVQPATAR

SEQ ID NO: 61679 - protein, 140 aa, Homo sapiens
KVSTASVGRFQERLPKEKVPRGSGKKRKFQPLFGDFAAEKKNQLELLRVMNSKKPQLDVTRATNKQMREEDQEEAAKRRKMSQKGKRKGGRQGPGGKRKGGPPSQGGKRKGGLGGKMNSGPPGLGGKRKGGQRPGGKRRK

SEQ ID NO: 61680 - protein, 55 aa, Homo sapiens
ILCKDQDGKIGLRLKSIDNDIFVQLVQANSPASLVGLRFGDQVLQISGENCRVEL

SEQ ID NO: 61681 - protein, 12 aa, Homo sapiens
KTRRIELEKRKK

SEQ ID NO: 61682 - protein, 286 aa, Homo sapiens
KTATKKRKTFDSSRQRAEGTDIPTVKPLKPRPEPPKKPSNWRRKHEEFIATIRAAKGLDQALKEGGKLPPPPPPSYDPDYIQCPYCQRRFNENAADRHINFCKEQAARISNKGKFSTDTKGKPTSRTQVYKPPALKKSNSPGTASSGSSRLPQPSGAGKTVVGVPSGKVSSSSSSLGNKLQTLSPSHKGIAAPHAGANVKPRNSTPPSLARNPAPGVLTNKRKTYTESYIARPDGDCASSLNGGNIKGIEGHSPGNLPKFCHECGTKYPVEWAKFCCECGIRRMIL

SEQ ID NO: 61683 - protein, 58 aa, Homo sapiens
RTSKVRQLLDTTDIQGEEFAKVIVQKLKDNKQMGLQPYPEILVVSRSPSLNLLQNKSM

SEQ ID NO: 61684 - protein, 284 aa, Homo sapiens
LENRNAQTKQLQTAVSNVEKHFGELCQIFAAYVRKTARLRDKADLLVNEINAYAATETPHLKLGLMNFADEFAKLQDYRQAEVERLEAKVVEPLKTYGTIVKMKRDDLKATLTARNREAKQLTQLERTRQRNPSDRHVISQAETELQRAAMDASRTSRHLEETINNFERQKMKDIKTIFSEFITIEMLFHGKALEVYTAAYQNIQNIDEDEDLEVFRNSLYAPDYSSRLDIVRANSKSPLQRSLSAKCVSGTGQVSTCRLRKDQQAEDDEDDELDVTEEENFLK

SEQ ID NO: 61685 - protein, 55 aa, Homo sapiens
IFGLEFKFILGSEELWPVLLGFTILPAILQSAALPFCPESPRFLLINRKEEENAK

SEQ ID NO: 61686 - protein, 18 aa, Homo sapiens
ICKAWTAFSSYMQRTSRP

SEQ ID NO: 61687 - protein, 8 aa, Homo sapiens
MIIIRGLI

SEQ ID NO: 61688 - protein, 51 aa, Homo sapiens
RIRGQAFPAAGAPRRSGQMRNMTLPLRRRKEVPLPPYLCSSASSLFPELFL

SEQ ID NO: 61689 - protein, 52 aa, Homo sapiens
VKAFPAFLQTVSLEDFLKKIQRVDFDIFHPSLQQKNTLLPLYLYIQSWRKTY

SEQ ID NO: 61690 - protein, 17 aa, Homo sapiens
RPPASLQYRFARIAIEV

SEQ ID NO: 61691 - protein, 7 aa, Homo sapiens
TAAMRSA

SEQ ID NO: 61692 - protein, 345 aa, Homo sapiens
LLSHWVFVGAPRPPASDSWKKGLVPSAPPASRKMGSKALPAPIPLHPSLQLTNYSFLQAVNTFPATVDHLQGLYGLSAVQTMHMNHWTLGYPNVHEITRSTITEMAAAQGLVDARFPFPALPFTTHLFHPKQGAIAHVLPALHKDRPRFDFANLAVAATQEDPPKMGDLSKLSPGLGSPISGLSKLTPDRKPSRGRLPSKTKKEFICKFCGRHFTKSYNLLIHERTHTDERPYTCDICHKAFRRQDHLRDHRYIHSKEKPFKCQECGKGFCQSRTLAVHKTLHMQESPHKCPTCGRTFNQRSNLKTHLLTHTDIKPYSCEQCGKVFRRNCDLRRHSLTHTPRQDF

SEQ ID NO: 61693 - protein, 26 aa, Homo sapiens
LVPTLRPHSLPIPGRPLTPAVWPLPA

SEQ ID NO: 61694 - protein, 292 aa, Homo sapiens
VCARQRGESCSDLEPCDESSGLYCDRSADPSNQTGICTAVEGDNCVFDGVIYRSGEKFQPSCKFQCTCRDGQIGCVPRCQLDVLLPEPNCPAPRKVEVPGECCEKWICGPDEEDSLGGLTLAAYRPEATLGVEVSDSSVNCIEQTTEWTACSKSCGMGFSTRVTNRNRQCEMLKQTRLCMVRPCEQEPEQPTDKKGKKCLRTKKSLKAIHLQFKNCTSLHTYKPRFCGVCSDGRCCTPHNTKTIQAEFQCSPGQIVKKPVMVIGTCTCHTNCPKNNEAFLQELELKTTRGKM

SEQ ID NO: 61695 - protein, 10 aa, Homo sapiens
RIYLSGCTNI

SEQ ID NO: 61696 - protein, 6 aa, Homo sapiens
LGGTVG

SEQ ID NO: 61697 - protein, 478 aa, Homo sapiens
KPCGKIRNLKKMEMFTFLLTCIFLPLLRGHSLFTCEPITVPRCMKMAYNMTFFPNLMGHYDQSIAAVEMEHFLPLANLECSPNIETFLCKAFVPTCIEQIHVVPPCRKLCEKVYSDCKKLIDTFGIRWPEELECDRLQYCDETVPVTFDPHTEFLGPQKKTEQVQRDIGFWCPRHLKTSGGQGYKFLGIDQCAPPCPNMYFKSDELEFAKSFIGTVSIFCLCATLFTFLTFLIDVRRFRYPERPIIYYSVCYSIVSLMYFIGFLLGDSTACNKADEKLELGDTVVLGSQNKACTVLFMLLYFFTMAGTVWWVILTITWFLAAGRKWSCEAIEQKAVWFHAVAWGTPGFLTVMLLAMNKVEGDNISGVCFVGLYDLDASRYFVLLPLCLCVFVGLSLLLAGIISLNHVRQVIQHDGRNQEKLKKFMIRIGVFSGLYLVPLVTLLGCYVYEQVNRITWEITWVSDHCRQYHIPCPYQSNQ

SEQ ID NO: 61698 - protein, 220 aa, Homo sapiens
LPAPSSASEIPKGKQKAQLRQREVVDLYNGMCLQGPAGVPGRDGSPGANGIPGTPGIPGRDGFKGEKGECLRESFEESWTPNYKQCSWSSLNYGIDLGKIAECTFTKMRSNSALRVLFSGSLRLKCRNACCQRWYFTFNGAECSGPLPIEAIIYLDQGSPEMNSTINIHRTSSVEGLCEGIGAGLVDVAIWVGTCSDYPKGDASTGWNSVSRIIIEELPK

SEQ ID NO: 61699 - protein, 248 aa, Homo sapiens
KMPGRSSSNSGSTGFISFSGVESALSSLKNFQACINSGMDTASSVALDLVESQTEVSSEYSMDKAMVEFATLDRQLNHYVKAVQSTINHVKEERPEKIPDLKLLVEKKFLALQSKNSDADFQNNEKFVQFKQQLKELKKQCGLQADREADGTEGVDEDIIVTQSQTNFTCPITKEEMKKPVKNKVCGHTYEEDAIVRMIESRQKRKKKAYCPQIGCSHTDIRKSDLIQDEALRRAIENHNKKRHRHSE

SEQ ID NO: 61700 - protein, 39 aa, Homo sapiens
MPDDSVEKVSSPSPATDGKVFSISSQNQQESSVPEGNVY

SEQ ID NO: 61701 - protein, 23 aa, Homo sapiens
ISKTEKKVKLEDKSSTAFGMNRK

SEQ ID NO: 61702 - protein, 59 aa, Homo sapiens
VPLTSRHEVVPALDAGSSDSSSRQHRPGHGPLSSPYDHGLYPSSTGGHLLTPPILQVAM

SEQ ID NO: 61703 - protein, 345 aa, Homo sapiens
TALSPAPTTMDFTPAPLEDTSSRPQFCKWPCECPPSPPRCPLGVSLITDGCECCKMCAQQLGDNCTEAAICDPHRGLYCDYSGDRPRYAIGVCAQVVGVGCVLDGVRYNNGQSFQPNCKYNCTCIDGAVGCTPLCLRVRPPRLWCPHPRRVSIPGHCCEQWVCEDDAKRPRKTAPRDTGAFDAVGEVEAWHRNCIAYTSPWSPCSTSCGLGVSTRISNVNAQCWPEQESRLCNLRPCDVDIHTLIKAGKKCLAVYQPEASMNFTLAGCISTRSYQPKYCGVCMDNRCCIPYKSKTIDVSFQCPDGLGFSRQVLWINACFCNLSCRNPNDIFADLESYPDFSEIAN

SEQ ID NO: 61704 - protein, 155 aa, Homo sapiens
LRTRGVPAPAITRGRGGVTARPVGVVVPRGTPTPRGVLSTRGPVSRGRGLLTPRARGVPPTGYRPPPPPPTQETYGEYDYDDGYGTAYDEQSYDSYDNSYSTPAQSGADYYDYGHGLSEETYDSYGQEEWTNSRHKAPSARTAKGVYRDQPYGRY

SEQ ID NO: 61705 - protein, 113 aa, Homo sapiens
LPLSRIRVIMKSSPEVSSINQEALVLTAKATELFVQCLATYSYRHGSGKEKKVLTYSDLANTAQQSETFQFLADILPKKILASKYLKMLKEEKREEDEENDNDNESDHDEADS

SEQ ID NO: 61706 - protein, 10 aa, Homo sapiens
RTWIWPVDQC

SEQ ID NO: 61707 - protein, 46 aa, Homo sapiens
VEGGEAMSRWQPGWAGRAGSNGTSPRSFFPRIQCGPSGGRGAALRS

SEQ ID NO: 61708 - protein, 360 aa, Homo sapiens
IKDRRHHLKTYPNCFVAKELIDWLIEHKEASDRETAIKLMQKLADRGIIHHVCDEHKEFKDVKLFYRFRKDDGTFPLDNEVKAFMRGQRLYEKLMSPENTLLQPREEEGVKYERTFMASEFLDWLVQEGEATTRKEAEQLCHRLMEHGIIQHVSNKHPFVDSNLLYQFRMNFRRRRRLMELLNEKSPSSQETHDSPFCLRKQSHDNRKSTSFMSVSPSKEIKIVSAVRRSSMSSCGSSGYFSSSPTLSSSPPVLCNPKSVLKRPVTSEELLTPGAPYARKTFTIVGDAVGWGFVVRGSKPCHIQAVDPSGPAAAAGMKVCQFVVSVNGLNVLHVDYRTVSNLILTGPRTIVMEVMEELEC

SEQ ID NO: 61709 - protein, 1046 aa, Homo sapiens
LRVKWDISDSDVQQFRVTYMTAQGDPEEEVIGTVMVPGSQNNLLLKPLLPDTEYKVTVTPIYTDGEGVSVSAPGKTLPSSGPQNLRVSEEWYNRLRITWDPPSSPVKGYRIVYKPVSVPGPTLETFVGADINTILITNLLSGMDYNVKIFASQASGFSDALTGMVKTLFLGVTNLQAKHVEMTSLCAHWQVHRHATAYRVVIESLQDRQKQESTVGGGTTRHCFYGLQPDSEYKISVYTKLQEIEGPSVSIMEKTQSLPTRPPTFPPTIPPAKEVCKAAKADLVFMVDGSWSIGDENFNKIISFLYSTVGALNKIGTDGTQVAMVQFTDDPRTEFKLNAYKTKETLLDAIKHISYKGGNTKTGKAIKYVRDTLFTAESGTRRGIPKVIVVITDGRSQDDVNKISREMQLDGYSIFAIGVADADYSELVSIGSKPSARHVFFVDDFDAFKKIEDELITFVCETASATCPVVHKDGIDLAGFKMMEMFGLVEKDFSSVEGVSMEPGTFNVFPCYQLHKDALVSQPTRYLHPEGLPSDYTISFLFRILPDTPQEPFALWEILNKNSDPLVGVILDNGGKTLTYFNYDQSGDFQTVTFEGPEIRKIFYGSFHKLHIVVSETLVKVVIDCKQVGEKAMNASANITSDGVEVLGKMVRSRGPGGNSAPFQLQMFDIVCSTSWANTDKCCELPGLRDDESCPDLPHSCSCSETNEVALGPAGPPGGPGLRGPKGQQGEPGPKGPDGPRGEIGLPGPQGPPGPQGPSGLSIQGMPGMPGEKGEKGDTGLPGPQGIPGGVGSPGRDGSPGQRGLPGKDGSSGPPGPPGPIGIPGTPGVPGITGSMGPQGALGPPGVPGAKGERGERGDLQSQAMVRSVARQVCEQLIQSHMARYTAILNQIPSHSSSIRTVQGPPGEPGRPGSPGAPGEQGPPGTPGFPGNAGVPGTPGERGLTGIKGEKGNPGVGTQGPRGPPGPAGPSGESRPGSPGPPGSPGPRGPPGHLGVPGPQGPSGQPGYCDPSSCSAYGVRAPHPDQPEFTPVQDELEAMELWGPGV

SEQ ID NO: 61710 - protein, 47 aa, Homo sapiens
LQSSTGFQPYCLVVRKPSSSWFWKPRYKCVNLSIKDILEPDAAEPGA

SEQ ID NO: 61711 - protein, 27 aa, Homo sapiens
RVCRPRSIWRAKATLDMPDEEFRFNFF

SEQ ID NO: 61712 - protein, 281 aa, Homo sapiens
VALSSKSGLSRGRKVMLSALGMLAAGGAGLAMALHSAVSASDLELHPPSYPWSHRGLLSSLDHTSIRRGFQVYKQVCASCHSMDFVAYRHLVGVCYTEDEAKELAAEVEVQDGPNEDGEMFMRPGKLFDYFPKPYPNSEAARAANNGALPPDLSYIVRARHGGEDYVFSLLTGYCEPPTGVSLREGLYFNPYFPGQAIAMAPPIYTDVLEFDDGTPATMSQIAKDVCTFLRWASEPEHDHRKRMGLKMLMMMALLVPLVYTIKRHKWSVLKSRKLAYRPPK

SEQ ID NO: 61713 - protein, 123 aa, Homo sapiens
RMTFDTWKSYTDFPCQYVKDTYAGSDRDTFSFDISLPEKIQSYERMEFAVYYECNGQTYWDSNRGKNYRIIRAELKSTQGMTKPHSGPDLGISFDQFGSPRCSYGLFPEWPSYLGYEKLGPYY

SEQ ID NO: 61714 - protein, 31 aa, Homo sapiens
LPERGRFAPSQDMAAPLRIRSAGSRTSRPTP

SEQ ID NO: 61715 - protein, 1075 aa, Homo sapiens
KEACDWLRATGFPQYAQLYEDFLFPIDISLVKREHDFLDRDAIEALCRRLNTLNKCAVMKLEISPHRKRSDDSDEDEPCAISGKWTFQRDSKRWSRLEEFDVFSPKQDLVPGSPDDSHPKDGPSPGGTLMDLSERQEVSSVRSLSSTGSLPSHAPPSEDAATPRTNSVISVCSSSNLAGNDDSFGSLPSPKELSSFSFSMKGHEKTAKSKTRSLLKRMESLKLKSSHHSKHKAPSKLGLIISGPILQEGMDEEKLKQLNCVEISALNGNRINVPMVRKRSVSNSTQTSSSSSQSETSSAVSTPSPVTRTRSLSACNKRVGMYLEGFDPFNQSTFNNVVEQNFKNRESYPEDTVFYIPEDHKPGTFPKALTNGSFSPSGNNGSVNWRTGSFHGPGHISLRRENSSDSPKELKRRNSSSSMSSRLSIYDNVPGSILYSSSGDLADLENEDIFPELDDILYHVKGMQRIVNQWSEKFSDEGDSDSALDSVSPCPSSPKQIHLDVDNDRTTPSDLDSTGNSLNEPEEPSEIPERRDSGVGASLTRSNRHRLRWHSFQSSHRPSLNSVSLQINCQSVAQMNLLQKYSLLKLTALLEKYTPSNKHGFSWAVPKFMKRIKVPDYKDRSVFGVPLTVNVQRTGQPLPQSIQQAMRYLRNHCLDQVGLFRKSGVKSRIQALRQMNEGAIDCVNYEGQSAYDVADMLKQYFRDLPEPLMTNKLSETFLQIYQYVPKDQRLQAIKAAIMLLPDENREVLQTLLYFLSDVTAAVKENQMTPTNLAVCLAPSLFHLNTLKRENSSPRVMQRKQSLGKPDQKDLNENLAATQGLAHMIAECKKLFQVPEEMSRCRNSYTEQELKPLTLEALGHLGNDDSADYQHFLQDCVDGLFKEVKEKFKGWVSYSTSEQAELSYKKVSEGPPLRLWRSVIEVPAVPEEILKRLLKEQHLWDVDLLDSKVIEILDSQTEIYQYVQNSMAPHPARDYVVLRTWRTNLPKGACALLLTSVDHDRAPVVGVRVNVLLSRYLIEPCGPGKSKLTYMCRVDLRGHMPEWYTKSFGHLCAAEVVKIRDSFSNQNTETKDTKSR

SEQ ID NO: 61716 - protein, 75 aa, Homo sapiens
LLEEMPRFYGSRLDYFQPSFESLIRAQVVYYSEMHKIFGDLSHQLDQPGHSDEQRERENEAKLSELRALSIVADD

SEQ ID NO: 61717 - protein, 393 aa, Homo sapiens
LVSAESALITQQDLAPQQRAAPQQKRSSPSEGLCPPGHHISEDGRDCISCKYGQDYSTHWNDLLFCLRCTRCDSGEVELSPCTTTRNTVCQCEEGTFREEDSPEMCRKCRTGCPRGMVKVGDCTPWSDIECVHKESGTKHSGEVPAVEETVTSSPGTPASPCSLSGIIIGVTVAAVVLIVAVFVCKSLLWKKVLPYLKGICSGGGGDPERVDRSSQRPGAEDNVLNEIVSILQPTQVPEQEMEVQEPAEPTGVNMLSPGESEHLLEPAEAERSQRRRLLVPANEGDPTETLRQCFDDFADLVPFDSWEPLMRKLGLMDNEIKVAKAEAAGHRDTLYTMLIKWVNKTGRDASVHTLLDALETLGERLAKQKIEDHLLSSGKFMYLEGNADSAMS

SEQ ID NO: 61718 - protein, 430 aa, Homo sapiens
KVAKGGESEWVEGGEGREEKKVGGGPGGRVAAHSGPSGGSAMRRVTLFLNGSPKNGKVVAVYGTLSDLLSVASSKLGIKATSVYNGKGGLIDDIALIRDDDVLFVCEGEPFIDPQTDSKPPEGLLGFHTDWLTLNVGGRYFTTTRSTLVNKEPDSMLAHMFKDKGVWGNKQDHRGAFLIDRSPEYFEPILNYLRHGQLIVNDGINLLGVLEEARFFGIDSLIEHLEVAIKNSQPPEDHSPISRKEFVRFLLATPTKSELRCQGLNFSGADLSRLDLRYINFKMANLSRCNLAHANLCCANLERADLSGSVLDCANLQGVKMLCSNAEGASLKLCNFEDPSGLKANLEGANLKGVDMEGSQMTGINLRVATLKNAKLKNCNLRGATLAGTDLENCDLSGCDLQEANLRGSNVKGAIFEEMLTPLHMSQSVR

SEQ ID NO: 61719 - protein, 57 aa, Homo sapiens
RIRLPTCGSSGPPSAACWCWPMPGAGPLSIPCRMSWSTMSTNGIPRGRPGTTSTTWT

SEQ ID NO: 61720 - protein, 10 aa, Homo sapiens
LTYFSRDQSK

SEQ ID NO: 61721 - protein, 378 aa, Homo sapiens
KELLCCSCQADPRHQGHRVQPVKDTAHDFRAKCRNMEHALREKAKAFWAMRRSYEAIAKHNQVEAAWLEGRIRQEFDKLREFLRVEEQAILDAMAEETRQKQLLADEKMKQLTEETEVLAHEIERLQMEMKEDDVSFLMKHKSRKRRLFCTMEPEPVQPGMLIDVCKYLGSLQYRVWKKMLASVESVPFSFDPNTAAGWLSVSDDLTSVTNHGYRVQVENPERFSSAPCLLGSRVFSQGSHAWEVALGGLQSWRVGVVRVRQDSGAEGHSHSCYHDTRSGFWYVCRTQGVEGDHCVTSDPATSPLVLAIPRRLRVELECEEGELSFYDAERHCHLYTFHARFGEVRPYFYLGGARGAGPPEPLRICPLHISVKEELDG

SEQ ID NO: 61722 - protein, 452 aa, Homo sapiens
IGGMMKTLLLFVGLLLTWESGQVLGDQTVSDNELQEMSNQGSKYVNKEIQNAVNGVKQIKTLIEKTNEERKTLLSNLEEAKKKKEDALNETRESETKLKELPGVCNETMMALWEECKPCLKQTCMKFYARVCRSGSGLVGRQLEEFLNQSSPFYFWMNGDRIDSLLENDRQQTHMLDVMQDHFSRASSIIDELFQDRFFTREPQDTYHYLPFSLPHRRPHFFFPKSRIVRSLMPFSPYEPLNFHAMFQPFLEMIHEAQQAMDIHFHSPAFQHPPTEFIREGDDDRTVCREIRHNSTGCLRMKDQCDKCREILSVDCSTNNPSQAKLRRELDESLQVAERLTRKYNELLKSYQWKMLNTSSLLEQLNEQFNWVSRLANLTQGEDQYYLRVTTVASHTSDSDVPSGVTEVVVKLFDSDPITVTVPVEVSRKNPKFMETVAEKALQEYRKKHREE

SEQ ID NO: 61723 - protein, 61 aa, Homo sapiens
LVLLQKWPLWSCSETRPWAPLQPLSMTPSGFGWLWGRGPRGGLALSVVAASSLATMANAEI

SEQ ID NO: 61724 - protein, 496 aa, Homo sapiens
VMENKAMYLHTVSDCDTSSICEDSFDGRSLSKLNLCEDGPCHKRRASICCTQLGSLSALKHAVLGLYLLVFLILVGIFILAVSRPRSSPDDLKALTRNVNRLNESFRDLQLRLLQAPLQADLTEQVWKVQDALQNQSDSLLALAGAVQRLEGALWGLQAQAVQTEQAVALLRDRTGQQSDTAQLELYQLQVESNSSQLLLRRHAGLLDGLARRVGILGEELADVGGVLRGLNHSLSYDVALHRTRLQDLRVLVSNASEDTRRLRLAHVGMELQLKQELAMLNAVTEDLRLKDWEHSIALRNISLAKGPPGPKGDQGDEGKEGRPGIPGLPGLRGLPGERGTPGLPGPKGDDGKLGATGPMGMRGFKGDRGPKGEKGEKGDRAGDASGVEAPMMIRLVNGSGPHEGRVEVYHDRRWGTVCDDGWDKKDGDVVCRMLGFRGVEEVYRTARFGQGTGRIWMDDVACKGTEETIFRCSFSKWGVTNCGHAEDASVTCNRH

SEQ ID NO: 61725 - protein, 496 aa, Homo sapiens
LLLLPEPAALTRALSRAMACRQEPQPQGPPPAAGAVASYDYLVIGGGSGGLASARRAAELGARAAVVESHKLGGTCVNVGCVPKKVMWNTAVHSEFMHDHADYGFPSCEGKFNWRVIKEKRDAYVSRLNAIYQNNLTKSHIEIIRGHAAFTSDPKPTIEVSGKKYTAPHILIATGGMPSTPHESQIPGASLGITSDGFFQLEELPGRSVIVGAGYIAVEMAGILSALGSKTSLMIRHDKVLRSFDSMISTNCTEELENAGVEVLKFSQVKEVKKTLSGLEVSMVTAVPGRLPVMTMIPDVDCLLWAIGRVPNTKDLSLNKLGIQTDDKGHIIVDEFQNTNVKGIYAVGDVCGKALLTPVAIAAGRKLAHRLFEYKEDSKLDYNNIPTVVFSHPPIGTVGLTEDEAIHKYGIENVKTYSTSFTPMYHAVTKRKTKCVMKMVCANKEEKVVGIHMQGLGCDEMLQGFAVAVKMGATKADFDNTVAIHPTSSEELVTLR

SEQ ID NO: 61726 - protein, 246 aa, Homo sapiens
LDDDSVIEGVSDQVLVAVVVSFALIATLVYALFRNVHQNIHPENQELVRVLREQLQTEQDAPAATRQQFYTDMYCPICLHQASFPVETNCGHLFCGACIIAYWRYGSWLGAISCPICRQTVTLLLTVFGEDDQSQDVLRLHQDINDYNRRFSGQPRSIMERIMDLPTLLRHAFREMFSVGGLFWMFRIRIILCLMGAFFYLISPLDFVPEALFGILGFLDDFFVIFLLLIYISIMYREVITQRLTR

SEQ ID NO: 61727 - protein, 35 aa, Homo sapiens
LLRLRRIHRRTPRSSSAAALWMEEGLPAQNAPGTL

SEQ ID NO: 61728 - protein, 781 aa, Homo sapiens
IISPKTGMERPLCSHLCSCLAMLALLSPLSLAQYDSWPHYPEYFQQPAPEYHQPQAPANVAKIQLRLAGQKRKHSEGRVEVYYDGQWGTVCDDDFSIHAAHVVCRELGYVEAKSWTASSSYGKGEGPIWLDNLHCTGNEATLAACTSNGWGVTDCKHTEDVGVVCSDKRIPGFKFDNSLINQIENLNIQVEDIRIRAILSTYRKRTPVMEGYVEVKEGKTWKQICDKHWTAKNSRVVCGMFGFPGERTYNTKVYKMFASRRKQRYWPFSMDCTGTEAHISSCKLGPQVSLDPMKNVTCENGLPAVVSCVPGQVFSPDGPSRFRKAYKPEQPLVRLRGGAYIGEGRVEVLKNGEWGTVCDDKWDLVSASVVCRELGFGSAKEAVTGSRLGQGIGPIHLNEIQCTGNEKSIIDCKFNAESQGCNHEEDAGVRCNTPAMGLQKKLRLNGGRNPYEGRVEVLVERNGSLVWGMVCGQNWGIVEAMVVCRQLGLGFASNAFQETWYWHGDVNSNKVVMSGVKCSGTELSLAHCRHDGEDVACPQGGVQYGAGVACSETAPDLVLNAEMVQQTTYLEDRPMFMLQCAMEENCLSASAAQTDPTTGYRRLLRFSSQIHNNGQSDFRPKNGRHAWIWHDCHRHYHSMEVFTHYDLLNLNGTKVAEGHKASFCLEDTECEGDIQKNYECANFGDQGITMGCWDMYRHDIDCQWVDITDVPPGDYLFQVVINPNFEVAESDYSNNIMKCRSRYDGHRIWMYNCHIGGSFSEETEKKFEHFSGLLNNQLSPQ

SEQ ID NO: 61729 - protein, 245 aa, Homo sapiens
LFAAFLVTELLPPFQRLIQPEEMWLYRNPYVEAEYFPTKPMFVIAFLSPLSLIFLAKFLKKADTRDSRQACLAASLALALNGVFTNTIKLIVGRPRPDFFYRCFPDGLAHSDLMCTGDKDVVNEGRKSFPSGHSSFAFAGLAFASFYLAGKLHCFTPQGRGKSWRFCAFLSPLLFAAVIALSRTCDYKHHWQDVLVGSMIGMTFAYVCYRQYYPPLTDAECHKPFQDKLVLSTAQKPGDSYCFDI

SEQ ID NO: 61730 - protein, 152 aa, Homo sapiens
LVTELLPPFQRLIQPEEMWLYRNPYVEAEYFPTKPMFVIAFLSPLSLIFLAKFLKKADTRDSRQACLAASLALALNGVFTNTIKLIVGRPRPDFFYRCFPDGLAHSDLMCTGDKDVVNEGRKSFPSGHSSCMNIIWTLPYACFHIIEFNLES

SEQ ID NO: 61731 - protein, 276 aa, Homo sapiens
IGIAHAEKALKMTREERIEQYTFIYIDKQPEEALSQAKKSVASKTEVKKTRRPRSVLNTQPEQTNAGEVASSLSSTEIRRHSQRRHTSAEEEEPPPVKIAWKTAAARKSLPASITMHKGSLDLQKCNMSPVVKIEQVFALQNATGDGKFIDQFVYSTKGIGNKTEISVRGQDRLIISTPNQRNEKPTQSVSSPEATSGSTGSVEKKQQRRSIRTRSESEKSTEVVPKKKIKKEQVETVPQATVKTGLQKGSADRGVQGSVRFSDSSVSAAIEETVD

SEQ ID NO: 61732 - protein, 776 aa, Homo sapiens
TADSPEAEPPRRARVSLKRRIELTVEYPWRCGALSPTSNCRTGMWSWKCLLFWAVLVTATLCTARPSPTLPEQDALPSSEDDDDDDDSSSEEKETDNTKPNRMPVAPYWTSPEKMEKKLHAVPAAKTVKFKCPSSGTPNPTLRWLKNGKEFKPDHRIGGYKVRYATWSIIMDSVVPSDKGNYTCIVENEYGSINHTYQLDVVERSPHRPILQAGLPANKTVALGSNVEFMCKVYSDPQPHIQWLKHIEVNGSKIGPDNLPYVQILKTAGVNTTDKEMEVLHLRNVSFEDAGEYTCLAGNSIGLSHHSAWLTVLEALEERPAVMTSPLYLEIIIYCTGAFLISCMVGSVIVYKMKSGTKKSDFHSQMAVHKLAKSIPLRRQVTVSADSSASMNSGVLLVRPSRLSSSGTPMLAGVSEYELPEDPRWELPRDRLVLGKPLGEGCFGQVVLAEAIGLDKDKPNRVTKVAVKMLKSDATEKDLSDLISEMEMMKMIGKHKNIINLLGACTQDGPLYVIVEYASKGNLREYLQARRPPGLEYCYNPSHNPEEQLSSKDLVSCAYQVARGMEYLASKKCIHRDLAARNVLVTEDNVMKIADFGLARDIHHIDYYKKTTNGRLPVKWMAPEALFDRIYTHQSDVWSFGVLLWEIFTLGGSPYPGVPVEELFKLLKEGHRMDKPSNCTNELYMMMRDCWHAVPSQRPTFKQLVEDLDRIVALTSNQEYLDLSMPLDQYSPSFPDTRSSTCSSGEDSVFSHEPLPEEPCLPRHPAQLANGGLKRR

SEQ ID NO: 61733 - protein, 296 aa, Homo sapiens
LALGAALLAVGSASEYDYVSFQSDIGPYQSGRFYTKPPQCVDIPADLRLCHNVGYKKMVLPNLLEHETMAEVKQQASSWVPLLNKNCHAGTQVFLCSLFAPVCLDRPIYPCRWLCEAVRDSCEPVMQFFGFYWPEMLKCDKFPEGDVCIAMTPPNATEASKPQGTTVCPPCDNELKSEAIIEHLCASEFALRMKIKEVKKENGDKKIVPKKKKPLKLGPIKKKDLKKLVLYLKNGADCPCHQLDNLSHHFLIMGRKVKSQYLLTAIHKWDKKNKEFKNFMKKMKNHECPTFQSVFK

SEQ ID NO: 61734 - protein, 49 aa, Homo sapiens
LPKYGVKVGLTNYAATYCTGLLLAHRLLNRFGMDKIYEGQVEVTGDNTM

SEQ ID NO: 61735 - protein, 234 aa, Homo sapiens
LRRCMCGNNMSTPLPAIVPAARKATAAVIFLHGLGDTGHGWAEAFAGIRSSHIKYICPHAPVRPVTLNMNVAMPSWFDIIGLSPDSQEDESGIKQAAENIKALIDQEVKNGIPSNRIILGGFSQGGALSLYTALTTQQKLAGVTALSCWLPLRASFPQGPIGGANRDISILQCHGDCDPLVPLMFGSLTVEKLKTLVNPANVTFKTYEGMMHSSCQQEMMDVKQFIDKLLPPID

SEQ ID NO: 61736 - protein, 309 aa, Homo sapiens
VGCRRQLDKSKLKPGTRVALDMTTLTIMRYLPREVDPLIYNMSHEDPENVSYSEIGGLSEQIRELREVIELPLTNPELFQRVGIIPPKGCLLYGPPGTGKTLLARAIASQLDCNFLKVVSSSIVDKYIGESAHLIREMFNYARDHQPCIIFMDEIDAIGGRRFSEGTSADREIQRTLTELLNQMDGFDTLHRVKMIMATNRPDTLDPALLCPGRLDRKIHIDLPNEQTRLDILKIHAGPITKHGEIDYEAIVKLSDGFNGADLRNVCTEAGMFAIRADHDFVVQEDFMKAVRKVADSKKLEAKLDYKPV

SEQ ID NO: 61737 - protein, 12 aa, Homo sapiens
LPISSKANISQF

SEQ ID NO: 61738 - protein, 638 aa, Homo sapiens
IVLEDLKKLHVENDEKLQLLRAELQSLEQSHLKELEDTLQVRHIQEFEKVMTDHRVSLEELKKENQQIINQIQESHAEIIQEKEKQLQELKLKVSDLSDTRCKLEVELALKEAETDEIKILLEESRAQQKETLKSLLEQETENLRTEISKLNQKIQDNNENYQVGLAELRTLMTIEKDQCISELISRHEEESNILKAELNKVTSLHNQAFEIEKNLKEQIIELQSKLDSELSALERQKDEKITQQEEKYEAIIQNLEKDRQKLVSSQEQDREQLIQKLNCEKDEAIQTALKEFKLEREVVEKELLEKVKHLENQIAKSPAIDSTRGDSSSLVAELQEKLQEEKAKFLEQLEEQEKRKNEEMQNVRTSLIAEQQTNFNTVLTREKMRKENIINDLSDKLKSTMQQQERDKDLIESLSEDRARLLEEKKKLEEEVSKLRSSSFVPSPYVATAPELYGACAPELPGESDRSAVETADEGRVDSAMETSMMSVQENIHMLSEEKQRIMLLERTLQLKEEENKRLNQRLMSQSMSSVSSRHSEKIAIRDFQVGDLVLIILDERHDNYVLFTVSPTLYFLHSESLPALDLKPGEGASGASRRPWVLGKVMEKEYCQAKKAQNRFKVPLGTKFYRVKAVSWNKKV

SEQ ID NO: 61739 - protein, 31 aa, Homo sapiens
IYQPFSTTDLLNWKHSEPCHLAPGIREPCRA

SEQ ID NO: 61740 - protein, 37 aa, Homo sapiens
LQSVGSACTSRAVFDCRCLGRRSRSRRRRRRRRGLRS

SEQ ID NO: 61741 - protein, 10 aa, Homo sapiens
RWQFTEFESP

SEQ ID NO: 61742 - protein, 138 aa, Homo sapiens
RHYELYRRCKLEEMGFTDVGPENKPVSLQETYEAKRHEFHGERQRKEEEMKQMFVQPVKEKEAILKEAERKLQAKFEHLKRLHQEERMKLEEQRRLLEEEIIAFSKKKATSEIFHSQSFLATGSNLSKDKDHKNSNFL

SEQ ID NO: 61743 - protein, 306 aa, Homo sapiens
LAWNNITKLQLHEHYKIHKEAVTGITVSRNGSSVFTTSQDSTLKMFSKESKMLQRSISFSNMALSSCLLLPGDATVITSSWDNNVYFYSIAFGRRQDTLMGHDDAVSKICWHDNRLYSASWDSTVKVWSGVPAEMPGTKRHHFDLLAELEHDVSVDTISLNAASTLLVSGTKEGTVNIWDLTTATLMHQIPCHSGIVCDTAFSPDSRHVLSTGTDGCLNVIDVQTGMLISSMTSDEPQRCFVWDGNSVLSGSQSGELLVWDLLGAKISERIQGHTGAVTCIWMNEQCSSIITGGEDRQIIFWKLQY

SEQ ID NO: 61744 - protein, 78 aa, Homo sapiens
ISSMTSDEPQRCFVWDGNSVLSGSQSGELLVWDLLGAKISERIQGHTGAVTCIWMNEQCSSIITGGEDRQIIFWKLQY

SEQ ID NO: 61745 - protein, 466 aa, Homo sapiens
RRPGEPPLIKGWLPYLGVVLNLRKDPLRFMKTLQKQHGDTFTVLLGGKYITFILDPFQYQLVIKNHKQLSFRVFSNKLLEKAFSISQLQKNHDMNDELHLCYQFLQGKSLDILLESMMQNLKQVFEPQLLKTTSWDTAELYPFCSSIIFEITFTTIYGKVIVCDNNKFISELRDDFLKFDDKFAYLVSNIPIELLGNVKSIREKIIKCFSSEKLAKMQGWSEVFQSRQDVLEKYYVHEDLEIGAHHLGFLWASVANTIPTMFWAMYYLLRHPEAMAAVRDEIDRLLQSTGQKKGSGFPIHLTREQLDSLICLESSIFEALRLSSYSTTIRFVEEDLTLSSETGDYCVRKGDLVAIFPPVLHGDPEIFEAPEEFRYDRFIEDGKKKTTFFKRGKKLKCYLMPFGTGTSKCPGRFFALMEIKQLLVILLTYFDLEIIDDKPIGLNYSRLLFGIQYPDSDVLFRYKVKS

SEQ ID NO: 61746 - protein, 27 aa, Homo sapiens
RCGPDGVAGSGLLKLWSEFKILFMCMA

SEQ ID NO: 61747 - protein, 283 aa, Homo sapiens
KMNSSTSTMSEEPDALSVVNQLRDLAADPLNRRAIVQDQGCLPGLILFMDHPNPPVVHSALLALRYLAECRANREKMKGELGMMLSLQNVIQKTTTPGETKLLASEIYDILQSSNMADGDSFNEMNSRRRKAQFFLGTTNKRAKTVVLHIDGLDDTSRRNLCEEALLKIKGVISFTFQMAVQRCVVRIRSDLKAEALASAIASTKVMKAQQVVKSESGEEMLVPFQDTPVEVEQNTELPDYLPEDESPTKEQDKAVSRVGSHPEGGASWLSTAANFLSRSFYW

SEQ ID NO: 61748 - protein, 1045 aa, Homo sapiens
VGYGKDRSGSLLYLHDTLEDIKRANKSQECLIPVHVDGDGHCLVHAVSRALVGRELFWHALRENLKQHFQQHLARYQALFHDFIDAAEWEDIINECDPLFVPPEGVPLGLRNIHIFGLANVLHRPIILLDSLSGMRSSGDYSATFLPGLIPAEKCTGKDGHLNKPICIAWSSSGRNHYIPLVGIKGAALPKLPMNLLPKAWGVPQDLIKKYIKLEEDGGCVIGGDRSLQDKYLLRLVAAMEEVFMDKHGIHPSLVADVHQYFYRRTGVIGVQPEEVTAAAKKAVMDNRLHKCLLCGALSELHVPPEWLAPGGKLYNLAKSTHGQLRTDKNYSFPLNNLVCSYDSVKDVLVPDYGMSNLTACNWCHGTSVRKVRGDGSIVYLDGDRTNSRSTGGKCGCGFKHFWDGKEYDNLPEAFPITLEWGGRVVRETVYWFQYESDSSLNSNVYDVAMKLVTKHFPGEFGSEILVQKVVHTILHQTAKKNPDDYTPVNIDGAHAQRVGDVQGQESESQLPTKIILTGQKTKTLHKEELNMSKTERTIQQNITEQASVMQKRKTEKLKQEQKGQPRTVSPSTIRDGPSSAPATPTKAPYSPTTSKEKKIRITTNDGRQSMVTLKSSTTFFELQESIAREFNIPPYLQCIRYGFPPKELMPPQAGMEKEPVPLQHGDRITIEILKSKAEGGQSAAAHSAHTVKQEDIAVTGKLSSKELQEQAEKEMYSLCLLATLMGEDVWSYAKGLPHMFQQGGVFYSIMKKTMGMADGKHCTFPHLPGKTFVYNASEDRLELCVDAAGHFPIGPDVEDLVKEAVSQVRAEATTRSRESSPSHGLLKLGSGGVVKKKSEQLHNVTAFQGKGHSLGTASGNPHLDPRARETSVVRKHNTGTDFSNSSTKTEPSVFTASSSNSELIRIAPGVVTMRDGRQLDPDLVEAQRKKLQEMVSSIQASMDRHLRDQSTEQSPSDLPQRKTEVVSSSAKSGSLQTGLPESFPLTGGTENLNTETTDGCVADALGAAFATRSKAQRGNSVEELEEMDSQDAEMTNTTEPMDHS

SEQ ID NO: 61749 - protein, 6 aa, Homo sapiens
ILGFFF

SEQ ID NO: 61750 - protein, 46 aa, Homo sapiens
VTGGGCGCHCTAPTATAAPDLGDHVLPLQKELPFVTRRGRRSTLGP

SEQ ID NO: 61751 - protein, 92 aa, Homo sapiens
LISSDGHEFIVKREHALTSGTIKAMLSGPGQFAENETNEVNFREIPSHVLSKVCMYFTYKVRYTNSSTEIPEFPIAPEIALELLMAANFLDC

SEQ ID NO: 61752 - protein, 68 aa, Homo sapiens
LIGCIIGRQGAKINEIRQMSGAQIKIANPVEGSTDRQVTITGSAASISLAQYLINVRLSSETGGMGSS

SEQ ID NO: 61753 - protein, 245 aa, Homo sapiens
VCDDCSGIFCLEHRSRESHGCPEVTVINERLKTDQHTSYPCSFKDCAERELVAVICPYCEKNFCLRHRHQSDHECEKLEIPKPRMAATQKLVKDIIDSKTGETASKRWKGAKNSETAAKVALMKLKMHADGDKSLPQTERIYFQVFLPKGSKEKSKPMFFCHRWSIGKAIDFAASLARLKNDNNKFTAKKLRLCHITSGEALPLDHTLETWIAKEDCPLYNGGNIILEYLNDEEQFCKNVESYLE

SEQ ID NO: 61754 - protein, 213 aa, Homo sapiens
IASPDASGIPVINCRVCQSLINLDGKLHQHVVKCTVCNEATPIKNPPTGKKYVRCPCNCLLICKDTSRRIGCPRPNCRRIINLGPVMLISEEQPAQPALPIQPEGTRVVCGHCGNTFLWMELRFNTLAKCPHCKKISSVGSALPRRRCCAYITIGMICIFIGVGLTVGTPDFARRFRATYVSWAIAYLLGLICLIRACYWGAIRVSYPEHSFA

SEQ ID NO: 61755 - protein, 160 aa, Homo sapiens
MPDSPVDVKTQSRLTPPTMPPPPTTQGAPRTSSFTPTTLTNGTSHSPTALNGAPSPPNGFSNGPSSSSSSSLANQQLPPACGARQLSKLKRFLTTLQQFGNDISPEIGERVRTLVLGLVNSTLTIEEFHSKLQEATNFPLRPFVIPFLKVLHSSLVCKVF

SEQ ID NO: 61756 - protein, 12 aa, Homo sapiens
LFTGTVADMCSR

SEQ ID NO: 61757 - protein, 31 aa, Homo sapiens
LRTGCGMGSEAPASGCSGAVRSSQREAAASR

SEQ ID NO: 61758 - protein, 236 aa, Homo sapiens
LNKMFVGEVSSSSNQEPEFNEKEDDEWILVDFIDTCTGFSAEEEEEEEDISEESPTEHPSVFSCLPASLECLADTSDSCFLQFESCPMEESWFITPPPCFTAGGLTTIKVETSPMENLLIEHPSMSVYAVHNSCPGLSEATRGTDELHSPSSPRVEAQNEMGQHIHCYVAALAAHTTFLEQPKSFRPSQWIKEHSERQPLNRNSLRRQNLTRDCHPRQVKHNGWVVHQPCPRQYNY

SEQ ID NO: 61759 - protein, 39 aa, Homo sapiens
KLIKKKGTRAYACQCSWRTIEEVTDLQTDHQLRWVCGKH

SEQ ID NO: 61760 - protein, 861 aa, Homo sapiens
VVMACRWSTKESPRWRSALLLLFLAGVYGNGALAEHSENVHISGVSTACGETPEQIRAPSGIITSPGWPSEYPAKINCSWFIRANPGEIITISFQDFDIQGSRRCNLDWLTIETYKNIESYRACGSTIPPPYISSQDHIWIRFHSDDNISRKGFRLAYFSGKSEEPNCACDQFRCGNGKCIPEAWKCNNMDECGDSSDEEICAKEANPPTAAAFQPCAYNQFQCLSRFTKVYTCLPESLKCDGNIDCLDLGDEIDCDVPTCGQWLKYFYGTFNSPNYPDFYPPGSNCTWLIDTGDHRKVILRFTDFKLDGTGYGDYVKIYDGLEENPHKLLRVLTAFDSHAPLTVVSSSGQIRVHFCADKVNAARGFNATYQVDGFCLPWEIPCGGNWGCYTEQQRCDGYWHCPNGRDETNCTMCQKEEFPCSRNGVCYPRSDRCNYQNHCPNGSDEKNCFFCQPGNFHCKNNRCVFESWVCDSQDDCGDGSDEENCPVIVPTRVITAAVIGSLICGLLLVIALGCTCKLYSLRMFERRSFETQLSRVEAELLRREAPPSYGQLIAQGLIPPVEDFPVCSPNQASVLENLRLAVRSQLGFTSVRLPMAGRSSNIWNRIFNFARSRHSGSLALVSADGDEVVPSQSTSREPERNHTHRSLFSVESDDTDTENERRDMAGASGGVAAPLPQKVPPTTAVEATVGACASSSTQSTRGGHADNGRDVTSVEPPSVSPARHQLTSALSRMTQGLRWVRFTLGRSSSLSQNQSPLRQLDNGVSGREDDDDVEMLIPISDGSSDFDVNDCSRPLLDLASDQGQGLRQPYNATNPGVRPSNRDGPCERCGIVHTAQIPDTCLEVTLKNETSDDEALLLC

SEQ ID NO: 61761 - protein, 288 aa, Homo sapiens
KDHHYFKYCKISALALLKMVMHARSGGNLEVMGLMLGKVDGETMIIMDSFALPVEGTETRVNAQAAAYEYMAAYIENAKQVGRLENAIGWYHSHPGYGCWLSGIDVSTQMLNQQFQEPFVAVVIDPTRTISAGKVNLGAFRTYPKGYKPPDEGPSEYQTIPLNKIEDFGVHCKQYYALEVSYFKSSLDRKLLELLWNKYWVNTLSSSSLLTNADYTTGQVFDLSEKLEQSEAQLGRGSFMLGLETHDRKSEDKLAKATRDSCKTTIEAIHGLMSQVIKDKLFNQINIS

SEQ ID NO: 61762 - protein, 84 aa, Homo sapiens
TQDCPGPDMARGQQKIQSQQKNAKKQAGQKKKQGHDQKAAAKAALIYTCTVCRTQMPDPKTFKQHFESKHPKTPLPPELADVQA

SEQ ID NO: 61763 - protein, 16 aa, Homo sapiens
ISRKSEDDEKLKRRKD

SEQ ID NO: 61764 - protein, 38 aa, Homo sapiens
MDTNRDGKLSLEEFIRGAKSDPSIVRLLQCDPSSAGQF

SEQ ID NO: 61765 - protein, 308 aa, Homo sapiens
IFPIQYPDIWKMYKQAQASFWTAEEVDLSKDLPHWNKLKADEKYFISHILAFFAASDGIVNENLVERFSQEVQVPEARCFYGFQILIENVHSEMYSLLIDTYIRDPKKREFLFNAIETMPYVKKKADWALRWIADRKSTFGERVVAFAAVEGVFFSGSFAAIFWLKKRGLMPGLTFSNELISRDEGLHCDFACLMFQYLVNKPSEERVREIIVDAVKIEQEFLTEALPVGLIGMNCILMKQYIEFVADRLLVELGFSKVFQAENPFDFMENISLEGKTNFFEKRVSEYQRFAVMAETTDNVFTLDADF

SEQ ID NO: 61766 - protein, 5 aa, Homo sapiens
MKGCV

SEQ ID NO: 61767 - protein, 56 aa, Homo sapiens
ITGFNMGNVPTLSFFQNTMATVVRVRQTSTTQTLCREMLHTWNRISLPRNFNIWNM

SEQ ID NO: 61768 - protein, 590 aa, Homo sapiens
TLRPWKAMEVAANCSLRVKRPLLDPRFEGYKLSLEPLPCYQLELDAAVAEVKLRDDQYTLEHMHAFGMYNYLHCDSWYQDSVYYIDTLGRIMNLTVMLDTALGKPREVFRLPTDLTACDNRLCASIHFSSSTWVTLSDGTGRLYVIGTGERGNSASEKWEIMFNEELGDPFIIIHSISLLNAEEHSIATLLLRIEKEELDMKGSGFYVSLEWVTISKKNQDNKKYEIIKRDILRGKSVPHYAAIEPDGNGLMIVSYKSLTFVQAGQDLEENMDEDISEKIKEPLYYWQQTEDDLTVTIRLPEDSTKEDIQIQFLPDHINIVLKDHQFLEGKLYSSIDHESSTWIIKESNSLEISLIKKNEGLTWPELVIGDKQGELIRDSAQCAAIAERLMHLTSEELNPNPDKEKPPCNAQELEECDIFFEESSSLCRFDGNTLKTTHVVNLGSNQYLFSVIVDPKEMPCFCLRHDVDALLWQPHSSKQDDMWEHIATFNALGYVQASKRDKKFFACAPNYSYAALCECLRRVFIYRQPAPMSTVLYNRKEGRQVGQVAKQQVASLETNDPILGFQATNERLFVLTTKNLFLIKVNTEN

SEQ ID NO: 61769 - protein, 258 aa, Homo sapiens
LATCGSKMSDIGDWFRSIPAITRYWFAATVAVPLVGKLGLISPAYLFLWPEAFLYRFQIWRPITATFYFPVGPGTGFLYLVNLYFLYQYSTRLETGAFDGRPADYLFMLLFNWICIVITGLAMDMQLLMIPLIMSVLYVWAQLNRDMIVSFWFGTRFKACYLPWVILGFNYIIGGSVINELIGNLVGHLYFFLMFRYPMDLGGRNFLSTPQFLYRWLPSRRGGVSGFGVPPASMRRAADQNGGGGRHNWGQGFRLGDQ

SEQ ID NO: 61770 - protein, 374 aa, Homo sapiens
LFGGEFEDSVFEERPERRSGPPASYCAKLCEPQWFYEETESSDDVEVLTLKKFKGDLAYRRQEYQKALQEYSSISEKLSSTNFAMKRDVQEGQARCLAHLGRHMEALEIAANLENKATNTDHLTTVLYLQLAICSSLQNLEKTIFCLQKLISLHPFNPWNWGKLAEAYLNLGPALSAALASSQKQHSFTSSDKTIKSFFPHSGKDCLLCFPETLPESSLFSVEANSSNSQKNEKALTNIQNCMAEKRETVLIETQLKACASFIRTRLLLQFTQPQQTSFALERNLRTQQEIEDKMKGFSFKEDTLLLIAEVMGEDIPEKIKDEVHPEVKCVGSVALTALVTVSSEEFEDKWFRKIKDHFCPFENQFHTEIQILA

SEQ ID NO: 61771 - protein, 286 aa, Homo sapiens
VNVVLKDAEGILEDLQSYRGAGHEIREAIQHPADEKLQEKAWGAVVPLVGKLKKFYEFSQRLEAALRGLLGALTSTPYSPTQHLEREQALAKQFAEILHFTLRFDELKMTNPAIQNDFSYYRRTLSRMRINNVPAEGENEVNNELANRMSLFYAEATPMLKTLSDATTKFVSENKNLPIENTTDCLSTMASVCRVMLETPEYRSRFTNEETVSFCLRVMVGVIILYDHVHPVGAFAKTSKIDMKGCIKVLKDQPPNSVEGLLNALRYTTKHLNDETTSKQIKSMLQ

SEQ ID NO: 61772 - protein, 40 aa, Homo sapiens
LYSPPNPFMPKSRKLQRVSSRVGTIFRFHLPKLEMSMRGN

SEQ ID NO: 61773 - protein, 13 aa, Homo sapiens
VSGTQLGVIPQQE

SEQ ID NO: 61774 - protein, 325 aa, Homo sapiens
VLFIFLTSFFLNYSHTMVATTWFPKQMVLELSENLKRLIKHRPCTCTHCIGQRKLSAWFDERFNQTMQPLLTAQNALLEDDTYRWWLRLQREKKPNNLNDTIKELFRVVPGNVDPMLEKRSVGCRRCAVVGNSGNLRESSYGPEIDSHDFVLRMNKAPTAGFEADVGTKTTHHLVYPESFRELGDNVSMILVPFKTIDLEWVVSAITTGTISHTYIPVPAKIRVKQDKILIYHPAFIKYVFDNWLQGHGRYPSTGILSVIFSMHVCDEVDLYGFGADSKGNWHHYWENNPSAGAFRKTGVHDADFESNVTATLASINKIRIFKGR

SEQ ID NO: 61775 - protein, 26 aa, Homo sapiens
ILRFSMALAPGQRAIFSASRWALPFP

SEQ ID NO: 61776 - protein, 1158 aa, Homo sapiens
LDFLAENNLCGQAILRIVSCGNAIIAELLRLSEFIPAVFRLKDRADQQKYGDIIFDFSYFKGPELWESKLDAKPELQDLDEEFRENNIEIVTRFYLAFQSVHKYIVDLNRYLDDLNEGVYIQQTLETVLLNEDGKQLLCEALYLYGVMLLVIDQKIEGEVRERMLVSYYRYSAARSSADSNMDDICKLLRSTGYSSQPGAKRPSNYPESYFQRVPINESFISMVIGRLRSDDIYNQVSAYPLPEHRSTALANQAAMLYVILYFEPSILHTHQAKMREIVDKYFPDNWVISIYMGITVNLVDAWEPYKAAKTALNNTLDLSNVREQASRYATVSERVHAQVQQFLKEGYLREEMVLDNIPKLLNCLRDCNVAIRWLMLHTADSACDPNNKRLRQIKDQILTDSRYNPRILFQLLLDTAQFEFILKEMFKQMLSEKQTKWEHYKKEGSERMTELADVFSGVKPLTRVEKNENLQAWFREISKQILSLNYDDSTAAGRKTVQLIQALEEVQEFHQLESNLQVCQFLADTRKFLHQMIRTINIKEEVLITMQIVGDLSFAWQLIDSFTSIMQESIRVNPSMVTKLRATFLKLASALDLPLLRINQANSPDLLSVSQYYSGELVSYVRKVLQIIPESMFTSLLKIIKLQTHDIIEVPTRLDKDKLRDYAQLGPRYEVAKLTHAISIFTEGILMMKTTLVGIIKVDPKQLLEDGIRKELVKRVAFALHRGLIFNPRAKPSELMPKLKELGATMDGFHRSFEYIQDYVNIYGLKIWQEEVSRIINYNVEQECNNFLRTKIQDWQSMYQSTHIPIPKFTPVDESVTFIGRLCREILRITDPKMTCHIDQLNTWYDMKTHQEVTSSRLFSEIQTTLGTFGLNGLDRLLCFMIVKELQNFLSMFQKIILRDRTVQDTLKTLMNAVSPLKSIVANSNKIYFSAIAKTQKIWTAYLEAIMKVGQMQILRQQIANELNYSCRFDSKHLAAALENLNKALLADIEAHYQDPSLPYPKEDNTLLYEITAYLEAAGIHNPLNKIYITTKRLPYFPIVNFLFLIAQLPKLQYNKNLGMVCRKPTDPVDWPPLVLGLLTLLKQFHSRYTEQFLALIGQFICSTVEQCTSQKIPEIPADVVGALLFLEDYVRYTKLPRRVAEAHVPNFIFDEFRTVL

SEQ ID NO: 61777 - protein, 131 aa, Homo sapiens
IETHLFRAETSRDLSHWTRSIVQGCHNSAELIAEISTACTYKNQECRLTIHYENGFSITTEPQEGAFPKTIIQSPYEKLKMSSDDGIRMLYLDFGGKDGEIQLDLHSCPKPIVFIIHSFLSAKITRLGLVA

SEQ ID NO: 61778 - protein, 262 aa, Homo sapiens
LLHEFVEDWYNQEFMGNQCSFGDDRHLTNRVLSLGYATKYTARSKCLTETPIEYLRWLNQQTRWSKSYFREWLYNAMWFHKHHLWMTYEAIITGFFPFFLIATVIQLFYRGKIWNILLFLLTVQLVGLIKSSFASCLRGNIVMVFMSLYSVLYMSSLLPAKMFAIATINKAGWGTSGRKTIVVNFIGLIPVSVWFTILLGGVIFTIYKESKRPFSESKQTVLIVGTLLYACYWVMLLTLYVVLINKCGRRKKGQQYDMVLDV

SEQ ID NO: 61779 - protein, 4 aa, Homo sapiens
MTDT

SEQ ID NO: 61780 - protein, 50 aa, Homo sapiens
VDSHKVKHVACYGFRLSHLRSEEVHWLHVDMGVSSVREKYELAHPPEEWK

SEQ ID NO: 61781 - protein, 242 aa, Homo sapiens
IKYNLDFWRKNVHMNDNVLHSAFEVGARKVVSCLSTCIFPDKTTYPIDETMIHNGPPHNSNFGYSYAKRMIDVQNRAYFQQYGCTFTAVIPTNVFGPHDNFNIEDGHVLPGLIHKVHLAKSSGSALTVWGTGNPRRQFIYSLDLAQLFIWVLREYNEVEPIILSVGEEDEVSIKEAAEAVVEAMDFHGEVTFDTTKSDGQFKKTASNSKLRTYLPDFRFTPFKQAVKETCAWFTDNYEQARK

SEQ ID NO: 61782 - protein, 95 aa, Homo sapiens
LPMQEKTYRRLLMLQNALTTMLPHHAGLNPRAFRMLHVDRRTLQNAVRNVLDGELLNRYLYLSTMERSELAKKIGTTPDIILDDLLETDRVTAHF

SEQ ID NO: 61783 - protein, 102 aa, Homo sapiens
THLLTADHGPPRLSYCGGGEALAVPFEPARLLPLAANGRLYHPAPERAGGVGLVRSALAFELSACFEYGPGAPALPSHVRWQGRRLALTMDLAPLLLAARSP

SEQ ID NO: 61784 - protein, 48 aa, Homo sapiens
RPAFGCISRGLPAPGICIWDRPPGLADQRGSSSNVCCGGCNSIPASSW

SEQ ID NO: 61785 - protein, 47 aa, Homo sapiens
LDTAGLFRGGAPAGICIWDRPPGLADQRGSSSNVCCGGCNSIPASSW

SEQ ID NO: 61786 - protein, 57 aa, Homo sapiens
LARSLQPSVLMQLKLSDGSAYRFEVPTAKFQELRYSVALVLKEMADLEKRCERRLQD

SEQ ID NO: 61787 - protein, 106 aa, Homo sapiens
KWCIRHFYKPMLRRGSSKWMARTGVFLASAFFHEYLVSVPLRMFRLWAFTGMMAQIPLAWFVGRFFQGNYGNAAVWLSLIIGQPIAVLMYVHDYYVLNYEAPAAEA

SEQ ID NO: 61788 - protein, 676 aa, Homo sapiens
LEQVHQFTNTETATLIESCTNTCLSTLDKQTSTQTVETRTVAVGEGRVKDINSSTKTRSIGVGTLLSGHSGFDRPSAVKTKESGVGQININDNYLVGLKMRTIACGPPQLTVGLTASRRSVGVGDDPVGESLENPQPQAPLGMMTGLDHYIERIQKLLAEQQTLLAENYSELAEAFGEPHSQMGSLNSQLISTLSSINSVMKSASTEELRNPDFQKTSLGKITGNYLGYTCKCGGLQSGSPLSSQTSQPEQEVGTSEGKPISSLDAFPTQEGTLSPVNLTDDQIAAGLYACTNNESTLKSIMKKKDGNKDSNGAKKNLQFVGINGGYETTSSDDSSSDESSSSESDDECDVIEYPLEEEEEEEDEDTRGMAEGHHAVNIEGLKSARVEDEMQVQECEPEKVEIRERYELSEKMLSACNLLKNTINDPKALTSKDMRFCLNTLQHEWFRVSSQKSAIPAMVGDYIAAFEAISPDVLRYVINLADGNGNTALHYSVSHSNFEIVKLLLDADVCNVDHQNKAGYTPIMLAALAAVEAEKDMRIVEELFGCGDVNAKASQAGQTALMLAVSHGRIDMVKGLLACGADVNIQDDEGSTALMCASEHGHVEIVKLLLAQPGCNGHLEDNDGSTALSIALEAGHKDIAVLLYAHVNFAKAQSPGTPRLGRKTSPGPTHRGSFD

SEQ ID NO: 61789 - protein, 276 aa, Homo sapiens
IQNMIFLLLMLSLELQLHQIAALFTVTVPKELYIIEHGSNVTLECNFDTGSHVNLGAITASLQKVENDTSPHRERATLLEEQLPLGKASFHIPQVQVRDEGQYQCIIIYGVAWDYKYLTLKVKASYRKINTHILKVPETDEVELTCQATGYPLAEVSWPNVSVPANTSHSRTPEGLYQVTSVLRLKPPPGRNFSCVFWNTHVRELTLASIDLQSQMEPRTHPTWLLHIFIPFCIIAFIFIATVIALRKQLCQKLYSSKDTTKRPVTTTKREVNSAI

SEQ ID NO: 61790 - protein, 99 aa, Homo sapiens
VRPECQRLFYRGKQLENGYTLFDYDVGLNDIIQLLVRPDPDHLPGTSTQIEAKPCSNSPPKVKKAPRVGPSNQPSTSARARLIDPGFGIYKGLALSPRL

SEQ ID NO: 61791 - protein, 764 aa, Homo sapiens
MRTCRIHEISCGAHSTQCIPVSWRCDGENDCDSGEDEENCGNITCSPDEFTCSSGRCISRNFVCNGQDDCSDGSDELDCAPPTCGAHEFQCSTSSCIPISWVCDDDADCSDQSDESLEQCGRQPVIHTKCPASEIQCGSGECIHKKWRCDGDPDCKDGSDEVNCPSRTCRPDQFECEDGSCIHGSRQCNGIRDCVDGSDEVNCKNVNQCLGPGKFKCRSGECIDISKVCNQEQDCRDWSDEPLKECHINECLVNNGGCSHICKDLVIGYECDCAAGFELIDRKTCGDIDECQNPGICSQICINLKGGYKCECSRGYQMDLATGVCKAVGKEPSLIFTNRRDIRKIGLERKEYIQLVEQLRNTVALDADIAAQKLFWADLSQKAIFSASIDDKVGRHVKMIDNVYNPAAIAVDWVYKTIYWTDAASKTISVATLDGTKRKFLFNSDLREPASIAVDPLSGFVYWSDWGEPAKIEKAGMNGFDRRPLVTADIQWPNGITLDLIKSRLYWLDSKLHMLSSVDLNGQDRRIVLKSLEFLAHPLALTIFEDRVYWIDGENEAVYGANKFTGSELATLVNNLNDAQDIIVYHELVQPSGKNWCEEDMENGGCEYLCLPAPQINDHSPKYTCSCPSGYNVEENGRDCQSTATTVTYSETKDTNTTEISATSGLVPGGINVTTAVSEVSVPPKGTSAAWAILPLLLLVMAAVGGYLMWRNWQHKNMKSMNFDNPVYLKTTEEDLSIDIGRHSASVGHTYPAISVVSTDDDLA

SEQ ID NO: 61792 - protein, 324 aa, Homo sapiens
RDLDCSLEAAAELRAVCGLDKLKCLEDGEDPEVIPENTDLVTLGVRKRFLEHREETITIDRACRQETFVYEMESHAIGKKPENSADMIEEGELILSVNILYPVIFHKHKEHKPYQTMLVLGSQKLTQLRDSIRCVSDLQIGGEFSNTPDQAPEHISKDLYKSAFFYFEGTFYNDKRYPECRDLSRTIIEWSESHDRGYGKFQTARMEDFTFNDLCIKLGFPYLYCHQGDCEHVIVITDIRLVHHDDCLDRTLYPLLIKKHWLWTRKCFVCKMYTARWVTNNDSFAPEDPCFFCDVCFRMLHYDSEGNKLGEFLAYPYVDPGTFN

SEQ ID NO: 61793 - protein, 4 aa, Homo sapiens
MRRS

SEQ ID NO: 61794 - protein, 510 aa, Homo sapiens
ILDKSYYLGLLRSKISELTTEVNKLQKGIEMYNQENSVYLSYEKRAETLAVEIKELQGQLADYNMLVDKLNTNTEMEEVMNDYNMLKAQNDRETQSLDVIFTERQAKEKQIRSVEEEIEQEKQATDDIIKNMSFENQVKYLEMKTTNEKLLQELDTLQQQLDSQNMKKESLEAEIAHSQVKQEAVLLHEKLYELESHRDQMIAEDKSIGSPMEEREKLLKQIKDDNQEIASMERQLTDTKEKINQFIEEIRQLDMDLEEHQGEMNQKYKELKKREEHMDTFIETFEETKNQELKRKAQIEANIVALLEHCSRNINRIEQISSITNQELKMMQDDLNFKSTEVQKSQSTAQNLTSDIQRLQLDLQKMELLESKMTEEQHSLKSKIKQMTTDLEIYNDLPALKSSGEEKIKKLHQERMILSTHRNAFKKIMEKQNIEYEALKTQLQENETHSQLTNLERKWQHLEQNNFAMKEFIATKSQESDYQPIKKNVTKQIAEYNKTIVDALHSTSGN

SEQ ID NO: 61795 - protein, 48 aa, Homo sapiens
IDWLFSIMESPKEALSAQSRDLLKATLLSLRVLPEFKKKAVWTRAYGW

SEQ ID NO: 61796 - protein, 10 aa, Homo sapiens
MGQGPRRLLI

SEQ ID NO: 61797 - protein, 264 aa, Homo sapiens
LDDPEILEGRTEKYVDTPFGKPSDALILGKIKNVDCVLLARHGRQHTIMPSKVNYQANIWALKEEGCTHVIVTTACGSLREEIQPGDIVIIDQFIDRTTMRPQSFYDGSHSCARGVCHIPMAEPFCPKTREVLIETAKKLGLRCHSKGTMVTIEGPRFSSRAESFMFRTWGADVINMTTVPEVVLAKEAGICYASIAMATDYDCWKEHEEAVSVDRVLKTLKENANKAKSLLLTTIPQIGSTEWSETLHNLKNMAQFSVLLPRH

SEQ ID NO: 61798 - protein, 178 aa, Homo sapiens
LDLPSNLPGLILTSEHCNEGVQLPLSSLSQDSKLVYIQLLWDNINLHQEPREPLYVSWRNFNSEKKSSLLSEEQQETSTLVETIRQSIQHNNVLKPINLLSQQMKPGMKRQRSLYREILFLSLVSLGRENIDIEAFDNEYGIAYNSLSSEILERLQKIDAPPSASVEWCRKCFGAPLI

SEQ ID NO: 61799 - protein, 890 aa, Homo sapiens
IMSNPFAHLAEPLDPVQPGKKFFNLNKLEDSRYGRLPFSIRVLLEAAIRNCDEFLVKKQDIENILHWNVTQHKNIEVPFKPARVILQDFTGVPAVVDFAAMRDAVKKLGGDPEKINPVCPADLVIDHSIQVDFNRRADSLQKNQDLEFERNRERFEFLKWGSQAFHNMRIIPPGSGIIHQVNLEYLARVVFDQDGYYYPDSLVGTDSHTTMIDGLGILGWGVGGIEAEAVMLGQPISMVLPQVIGYRLMGKPHPLVTSTDIVLTITKHLRQVGVVGKFVEFFGPGVAQLSIADRATIANMCPEYGATAAFFPVDEVSITYLVQTGRDEEKLKYIKKYLQAVGMFRDFNDPSQDPDFTQVVELDLKTVVPCCSGPKRPQDKVAVSDMKKDFESCLGAKQGFKGFQVAPEHHNDHKTFIYDNTEFTLAHGSVVIAAITSCTNTSNPSVMLGAGLLAKKAVDAGLNVMPYIKTSLSPGSGVVTYYLQESGVMPYLSQLGFDVVGYGCMTCIGNSGPLPEPVVEAITQGDLVAVGVLSGNRNFEGRVHPNTRANYLASPPLVIAYAIAGTIRIDFEKEPLGVNAKGQQVFLKDIWPTRDEIQAVERQYVIPGMFKEVYQKIETVNESWNALATPSDKLFFWNSKSTYIKSPPFFENLTLDLQPPKSIVDAYVLLNLGDSVTTDHISPAGNIARNSPAARYLTNRGLTPREFNSYGSRRGNDAVMARGTFANIRLLNRFLNKQAPQTIHLPSGEILDVFDAAERYQQAGLPLIVLAGKEYGAGSSRDWAAKGPFLLGIKAVLAESYERIHRSNLVGMGVIPLEYLPGENADALGLTGQERYTIIIPENLKPQMKVQVKLDTGKTFQAVMRFDTDVELTYFLNGGILNYMIRKMAK

SEQ ID NO: 61800 - protein, 219 aa, Homo sapiens
LQEEPVEGFRITLVDESDLYNWEVAIFGPPNTLYEGGYFKAHIKFPIDYPYSPPTFRFLTKMWHPNIYENGDVCISILHPPVDDPQSGELPSERWNPTQNVRTILLSVISLLNEPNTFSPANVDASVMFRKWRDSKGKDKEYAEIIRKQVSATKAEAEKDGVKVPTTLAEYCIKTKVPSNDNSSDLLYDDLYDDDIDDEDEEEEDADCYDDDDSGNEES

SEQ ID NO: 61801 - protein, 372 aa, Homo sapiens
VTAGDPVSWFRDGEPKLLQGPDSGLGHELVLAQADSTDEGTYICQTLDGALGGTVTLQLGYPPARPVVSCQAADYENFSCTWSPSQISGLPTRYLTSYRKKTVLGADSQRRSPSTGPWPCPQDPLGAARCVVHGAEFWSQYRINVTEVNPLGASTRLLDVSLQSILRPDPPQGLRVESVPGYPRRLRASWTYPASWPCQPHFLLKFRLQYRPAQHPAWSTVEPAGLEEVITDAVAGLPHAVRVSARDFLDAGTWSTWSPEAWGTPSTGTIPKEIPAWGQLHTQPEVEPQVDSPAPPRPSLQPHPRLLDHRDSVEQVAVLASLGILSFLGLVAGALALGLWLRLRRGGKDGSPKPGFLASVIPVDRRPGAPNL

SEQ ID NO: 61802 - protein, 12 aa, Homo sapiens
MSWAPNVSWGAA

SEQ ID NO: 61803 - protein, 561 aa, Homo sapiens
LASMLWRIRWEELQFGNSERYHKGAGSRLTLSLRGSSYGSLMTAHGKYQIFANTGHFKGNVVAIKHVNKKRIELTRQVLFELKHMRDVQFNHLTRFIGACIDPPNICIVTEYCPRGSLQDILENDSINLDWMFRYSLINDLVKGMAFLHNSIISSHGSLKSSNCVVDSRFVLKITDYGLASFRSTAEPDDSHALYAKKLWTAPELLSGNPLPTTGMQKADVYSFGIILQEIALRSGPFYLEGLDLSPKEIVQKVRNGQRPYFRPSIDRTQLNEELVLLMERCWAQDPAERPDFGQIKGFIRRFNKEGGTSILDNLLLRMEQYANNLEKLVEERTQAYLEEKRKAEALLYQILPHSVAEQLKRGETVQAEAFDSVTIYFSDIVGFTALSAESTPMQVVTLLNDLYTCFDAIIDNFDVYKVETIGDAYMVVSGLPGRNGQRHAPEIARMALALLDAVSSFRIRHRPHDQLRLRIGVHTGPVCAGVVGLKMPRYCLFGDTVNTASRMESNGQALKIHVSSTTKDALDELGCFQLELRGDVEMKGKGKMRTYWLLGERKGPPGLL

SEQ ID NO: 61804 - protein, 435 aa, Homo sapiens
VAAAVLTPVLGGQTGEMAAEVLPSARWQYCGAPDGSQRAVLVQFSNGKLQSPGNMRFTLYENKDSTNPRKRNQRILAAETDRLSYVGNNFGTGALKCNTLCRHFVGILNKTSGQMEVYDAELFNMQPLFSDVSVESELALESQTKTYREKMDSCIEAFGTTKQKRALNTRRMNRVGNESLNRAVAKAAETIIDTKGVTALVSDAIHNDLQDDSLYLPPCYDDAAKPEDVYKFEDLLSPAEYEALQSPSEAFRNVTSEEILKMIEENSHCTFVIEALKSLPSDVESRDRQARCIWFLDTLIKFRAHRVVKRKSALGPGVPHIINTKLLKHFTCLTYNNGRLRNLISDSMKAKITAYVIILALHIHDFQIDLTVLQRDLKLSEKRMMEIAKAMRLKISKRRVSVAAGSEEDHKLGTLSLPLPPAQTSDRLAKRRKIT

SEQ ID NO: 61805 - protein, 428 aa, Homo sapiens
LGRGLFVDPARDNFRTMTSLYGSIHPADSVYLSTRTHGAVFNLEYSPDGSVLTVACEQTEVLLFDPISSKHIKTLSEAHEDCVNNIRFLDNRLFATCSDDTTIALWDLRKLNTKVCTLHGHTSWVKNIEYDTNTRLLVTSGFDGNVIIWDTNRYTEDGCPHKKFFHTRFLMRMRLTPDCSKMLISTSSGYLLILHDLDLTKSLEVGSYPILRARRTTSSSDLTTSSSSSGPRVSGSPCHHSDSNSSEKHMSRASQREGVSPRNSLEVVTPEVLGESDHGNCITSLQLHPKGWATLLRCSSNSDDEECTCVYEFQEGAPVRPVSPRCSLRLTHYIEEANVGRGYIKELCFSPDGRMISSPHGYGIRLLGFDKQCSELVDCLPKEASPLRVIRSLYSHNDVVLTTKFSPTHCQIASGCLSGRVSLYQPKF

SEQ ID NO: 61806 - protein, 16 aa, Homo sapiens
TNDFFPTWLWDSLVGI

SEQ ID NO: 61807 - protein, 56 aa, Homo sapiens
IEAKSKTAGEEEMMKIRSCAERETKKKDDIPEEDKGNVKQCEINYKEISELPRPQT

SEQ ID NO: 61808 - protein, 350 aa, Homo sapiens
ISQAYEVLSDAKKRELYDKGGEQAIKEGGAGGGFGSPMDIFDMFFGGGGRMQRERRGKNVVHQLSVTLEDLYNGATRKLALQKNVICDKCEGRGGKKGAVECCPNCRGTGMQIRIHQIGPGMVQQIQSVCMECQGHGERISPKDRCKSCNGRKIVREKKILEVHIDKGMKDGQKITFHGEGDQEPGLEPGDIIIVLDQKDHAVFTRRGEDLFMCMDIQLVEALCGFQKPISTLDNRTIVITSHPGQIVKHGDIKCVLNEGMPIYRRPYEKGRLIIEFKVNFPENGFLSPDKLSLLEKLLPERKEVEETDEMDQVELVDFDPNQERRRHYNGEAYEDDEHHPRGGVQCQTS

SEQ ID NO: 61809 - protein, 196 aa, Homo sapiens
VDSRAESIDKKISRLDAELVKYKDQIKKMREGPAKNMVKQKALRVLKQKRMYEQQRDNLAQQSFNMEQANYTIQSLKDTKTTVDAMKLGVKEMKKAYKQVKIDQIEDLQDQLEDMMEDANEIQEALSRSYGTPELDEDDLEAELDALGDELLADEDSSYLDEAASAPAIPEGVPTDTKNKDGVLVDEFGLPQIPAS

SEQ ID NO: 61810 - protein, 8 aa, Homo sapiens
LTWLYSSI

SEQ ID NO: 61811 - protein, 978 aa, Homo sapiens
LEPPGPDMATVRASLRGALLLLLAVAGVAEVAGGLAPGSAGALCCNHSKDNQMCRDVCEQIFSSKSESRLKHLLQRAPDYCPETMVEIWNCMNSSLPGVFKKSDGWVGLGCCELAIALECRQACKQASSKNDISKVCRKEYENALFSCISRNEMGSVCCSYAGHHTNCREYCQAIFRTDSSPGPSQIKAVENYCASISPQLIHCVNNYTQSYPMRNPTDSLYCCDRAEDHACQNACKRILMSKKTEMEIVDGLIEGCKTQPLPQDPLWQCFLESSQSVHPGVTVHPPPSTGLDGAKLHCCSKANTSTCRELCTKLYSMSWGNTQSWQEFDRFCEYNPVEVSMLTCLADVREPCQLGCRNLTYCTNFNNRPTELFRSCNAQSDQGAMNDMKLWEKGSIKMPFINIPVLDIKKCQPEMWKAIACSLQIKPCHSKSRGSIICKSDCVEILKKCGDQNKFPEDHTAESICELLSPTDDLKNCIPLDTYLRPSTLGNIVEEVTHPCNPNPCPANELCEVNRKGCPSGDPCLPYFCVQGCKLGEASDFIVRQGTLIQVPSSAGEVGCYKICSCGQSGLLENCMEMHCIDLQKSCIVGGKRKSHGTSFSIDCNVCSCFAGNLVCSTRLCLSEHSSEDDRRTFTGLPCNCADQFVPVCGQNGRTYPSACIARCVGLQDHQFEFGSCMSKDPCNPNPCQKNQRCIPKPQVCLTTFDKFGCSQYECVPRQLACDQVQDPVCDTDHMEHNNLCTLYQRGKSLSYKGPCQPFCRATEPVCGHNGETYSSVCAAYSDRVAVDYYGDCQAVGVLSEHSSVAECASVKCPSLLAAGCKPIIPPGACCPLCAGMLRVLFDKEKLDTIAKVTNKKPITVLEILQKIRMHVSVPQCDVFGYFSIESEIVILIIPVDHYPKALQIEACNKEAEKIESLINSDSPTLASHVPLSALIISQVQVSSSVPSAGVRARPSCHSLLLPLSLGLALHLLWTYN

SEQ ID NO: 61812 - protein, 79 aa, Homo sapiens
ISRNEMGSVCCSYAGHHTNCREYCQAIFRTDSSPGPSQIKAVENYCASISPQLIHCVNNYTQSYPMRNPTDSRSVLSDI

SEQ ID NO: 61813 - protein, 187 aa, Homo sapiens
TVHEREVQTAMQISHSWEESFSLSDNDVEKSASPKRIDFIPVSPAPSPTRGIGKQCFSPSLQSFVSSNGLPPSPIPSPTTRFTTRRSQSPINCIRPSVLGPLKRKCEMETEYQPKRFFQGITNMLSSDVAQLSDPGVCVSSDTLDGNSSSAGSSCNSPAKVSTTTDSPVSPAQAASPFIPLDELSSK

SEQ ID NO: 61814 - protein, 1167 aa, Homo sapiens
MEELIWEQYTVTLQKDSKRGFGIAVSGGRDNPHFENGETSIVISDVLPGGPADGLLQENDRVVMVNGTPMEDVLHSFAVQQLRKSGKVAAIVVKRPRKVQVAALQASPPLDQDDRAFEVMDEFDGRSFRSGYSERSRLNSHGGRSRSWEDSPERGRPHERARSRERDLSRDRSRGRSLERGLDQDHARTRDRSRGRSLERGLDHDFGPSRDRDRDRSRGRSIDQDYERAYHRAYDPDYERAYSPEYRRGARHDARSRGPRSRSREHPHSRSPSPEPRGRPGPIGVLLMKSRANEEYGLRLGSQIFVKEMTRTGLATKDGNLHEGDIILKINGTVTENMSLTDARKLIEKSRGKLQLVVLRDSQQTLINIPSLNDSDSEIEDISEIESNRSFSPEERRHQYSDYDYHSSSEKLKERPSSREDTPSRLSRMGATPTPFKSTGDIAGTVVPETNKEPRYQEDPPAPQPKAAPRTFLRPSPEDEAIYGPNTKMVRFKKGDSVGLRLAGGNDVGIFVAGIQEGTSAEQEGLQEGDQILKVNTQDFRGLVREDAVLYLLEIPKGEMVTILAQSRADVYRDILACGRGDSFFIRSHFECEKETPQSLAFTRGEVFRVVDTLYDGKLGNWLAVRIGNELEKGLIPNKSRAEQMASVQNAQRDNAGDRADFWRMRGQRSGVKKNLRKSREDLTAVVSVSTKFPAYERVLLREAGFKRPVVLFGPIADIAMEKLANELPDWFQTAKTEPKDAGSEKSTGVVRLNTVRQIIEQDKHALLDVTPKAVDLLNYTQWFPIVIFFNPDSRQGVKTMRQRLNPTSNKSSRKLFDQANKLKKTCAHLFTATINLNSANDSWFGSLKDTIQHQQGEAVWVSEGKMEGMDDDPEDRMSYLTAMGADYLSCDSRLISDFEDTDGEGGAYTDNELDEPAEEPLVSSITRSSEPVQHEESIRKPSPEPRAQMRRAASSDQLRDNSPPPAFKPEPPKAKTQNKEESYDFSKSYEYKSNPSAVAGNETPGASTKGYPPPVAAKPTFGRSILKPSTPIPPQEGEEVGESSEEQDNAPKSVLGKVKIFEKMDHKARLQRMQELQEAQNARIEIAQKHPDIYAVPIKTHKPDPGTPQHTSSRPPEPQKAPSRPYQDTRGSYGSDAEEEEYRQQLSEHSKRGYYGQSARYRDTEL

SEQ ID NO: 61815 - protein, 4 aa, Homo sapiens
KLQP

SEQ ID NO: 61816 - protein, 8 aa, Homo sapiens
ISFKTIHK

SEQ ID NO: 61817 - protein, 162 aa, Homo sapiens
KKKKKVRPLSREITMSQAYQNMCAGMFKTMVAFDMDGKVRKPKFELDSEQVRYEHRFAPFNSVMTPPPVHYLQFKEMSDLNKYSPPPQSPELYVAASKHFQQAKMILENIPNPDHEVNRILKVAKPNFVVMKLLAGGHKKESKVPPEFDFSAHKYFPVVKLV

SEQ ID NO: 61818 - protein, 11 aa, Homo sapiens
IRPWVCTSTGS

SEQ ID NO: 61819 - protein, 277 aa, Homo sapiens
LRKPGRLSPLRPRRGKLSLKRGEEGNMDMKRRIHLELRNRTPAAVRELVLDNCKSNDGKIEGLTAEFVNLEFLSLINVGLISVSNLPKLPKLKKLELSENRIFGGLDMLAEKLPNLTHLNLSGNKLKDISTLEPLKKLECLKSLDLFNCEVTNLNDYRESVFKLLPQLTYLDGYDREDQEAPDSDAEVDGVDEEEEDEEGEDEEDEDDEDGEEEEFDEEDDEDEDVEGDEDDDEVSEEEEEFGLDEEDEDEDEDEEEEEGGKGEKRKRETDDEGEDD

SEQ ID NO: 61820 - protein, 29 aa, Homo sapiens
LIQRKKQKMMEKLTSSCPDLPSQTDKKCS

SEQ ID NO: 61821 - protein, 208 aa, Homo sapiens
IKSNQIHKLLKEEKEELADQVLTLKTQVDAQLQVVRKLEEKEHLLQSNIGTGEKELGLRTQALEMNKRKAMEAAQLADDLKAQLELAQKKLHDFQDEIVENSVTKEKDMFNFKRAQEDISRLRRKLETTKKPDNVPKCDEILMEEIKDYKARLTCPCCNMRKKDAVLTKCFHVFCFECVKTRYDTRQRKCPKCNAAFGANDFHRIYIG

SEQ ID NO: 61822 - protein, 53 aa, Homo sapiens
INKNVVLALLTLTSSAFLLFQLYYYKHYLSTKNGAGLSKSKGSRIGFDSTQWK

SEQ ID NO: 61823 - protein, 135 aa, Homo sapiens
IITNFERLVKGDWKPEGDEWLKMSYPAKVTLLGSVIFTFQHTQHLAISKHNLMFLYTIFIVATKITMMTTQTSTMTFAPFEDTLSWMLFGWQQPFSSCEKKSEAKSPSNGVGSLASKPVDVASDNVKKKHTKKNE

SEQ ID NO: 61824 - protein, 472 aa, Homo sapiens
TALQCFCHLCTKDNFTCVTDGLCFVSVTETTDKVIHNSMCIAEIDLIPRDRPFVCAPSSKTGSVTTTYCCNQDHCNKIELPTTVKSSPGLGPVELAAVIAGPVCFVCISLMLMVYICHNRTVIHHRVPNEEDPSLDRPFISEGTTLKDLIYDMTTSGSGSGLPLLVQRTIARTIVLQESIGKGRFGEVWRGKWRGEEVAVKIFSSREERSWFREAEIYQTVMLRHENILGFIAADNKDNGTWTQLWLVSDYHEHGSLFDYLNRYTVTVEGMIKLALSTASGLAHLHMEIVGTQGKPAIAHRDLKSKNILVKKNGTCCIADLGLAVRHDSATDTIDIAPNHRVGTKRYMAPEVLDDSINMKHFESFKRADIYAMGLVFWEIARRCSIGGIHEDYQLPYYDLVPSDPSVEEMRKVVCEQKLRPNIPNRWQSCEALRVMAKIMRECWYANGAARLTALRIKKTLSQLSQQEGIKM

SEQ ID NO: 61825 - protein, 36 aa, Homo sapiens
IAPSGVQKERIQPEDMFVCDINEKDISGPSPSKKLK

SEQ ID NO: 61826 - protein, 33 aa, Homo sapiens [sequence omitted]

SEQ ID NO: 61827 - protein, 18 aa, Homo sapiens
KKEIKDILIQYDMYPSGS

SEQ ID NO: 61828 - protein, 47 aa, Homo sapiens
LQSVTRGCFDLAQKRIFGLMEKDSYPRFLRSDLYLDLINQKKMSPPL

SEQ ID NO: 61829 - protein, 411 aa, Homo sapiens
LSVLAAAAGRAGPAGRGMALLDLALEGMAVFGFVLFLVLWLMHFMAIIYTRLHLNKKATDKQPYSKLPGVSLLKPLKGVDPNLINNLETFFELDYPKYEVLLCVQDHDDPAIDVCKKLLGKYPNVDARLFIGGKKVGINPKINNLMPGYEVAKYDLIWICDSGIRVIPDTLTDMVNQMTEKVGLVHGLPYVADRQGFAATLEQVYFGTSHPRYYISANVTGFKCVTGMSCLMRKDVLDQAGGLIAFAQYIAEDYFMAKAIADRGWRFAMSTQVAMQNSGSYSISQFQSRMIRWTKLRINMLPATIICEPISECFVASLIIGWAAHHVFRWDIMVFFMCHCLAWFIFDYIQLRGVQGGTLCFSKLDYAVAWFIRESMTIYIFLSALWDPTISWRTGRYRLRCGGTAEEILDV

SEQ ID NO: 61830 - protein, 81 aa, Homo sapiens
IYCSDGEEYTVSSCVRGRLMEVNENILHKPSILQEKPSTEGYIAVVLPKFEESKSITEGLLTQKQYEEVMVKRINATTATS

SEQ ID NO: 61831 - protein, 463 aa, Homo sapiens
IEAGNINITSGEVFEIEEHISERQAEVLAEFERRKRARQINVSTDDSEVKACLRALGEPITLFGEGPAERRERLRNILSVVGTDALKKTKKDDEKSKKSKEEYQQTWYHEGPNSLKVARLWIANYSLPRAMKRLEEARLHKEIPETTRTSQMQELHKSLRSLNNFCSQIGDDRPISYCHFSPNSKMLATACWSGLCKLWSVPDCNLLHTLRGHNTNVGAIVFHPKSTVSLDPKDVNLASCAADGSVKLWSLDSDEPVADIEGHTVRVARVMWHPSGRFLGTTCYDRSWRLWDLEAQEEILHQEGHSMGVYDIAFHQDGSLAGTGGLDAFGRVWDLRTGRCIMFLEGHLKEIYGINFSPNGYHIATGSGDNTCKVWDLRQRRCVYTIPAHQNLVTGVKFEPIHGNFLLTGAYDNTAKIWTHPGWSPLKTLAGHEGKVMGLDISSDGQLIATCSYDRTFKLWMAE

SEQ ID NO: 61832 - protein, 278 aa, Homo sapiens
LSFRCSLADFQIEKKIGRGQFSEVYKATCLLDRKTVALKKVQIFEMMDAKARQDCVKEIGLLKQLNHPNIIKYLDSFIEDNELNIVLELADAGDLSQMIKYFKKQKRLIPERTVWKYFVQLCSAVEHMHSRRVMHRDIKPANVFITATGVVKLGDLGLGRFFSSETTAAHSLVGTPYYMSPERIHENGYNFKSDIWSLGCLLYEMAALQSPFYGDKMNLFSLCQKIEQCDYPPLPGEHYSEKLRELVSMCICPDPHQRPDIGYVHQVAKQMHIWMSST

SEQ ID NO: 61833 - protein, 21 aa, Homo sapiens
VTSCTKSYEAAKAEQNTTEAN

SEQ ID NO: 61834 - protein, 639 aa, Homo sapiens
LPLVLLLSGRPTRADSKVFGDLDQVRMTSEGSDCRCKCIMRPLSKDACSRVRSGRARVEDFYTVETVSSGTDCRCSCTAPPSSLNPCENEWKMEKLKKQAPELLKLQSMVDLLEGTLYSMDLMKVHAYVHKVASQMNTLEESIKANLSRENEVVKDSVRHLSEQLRHYENHSAIMLGIKKELSRLGLQLLQKDAAAAPATPATGTGSKAQDTARGKGKDISKYGSVQKSFADRGLPKPPKEKLLQVEKLRKESGKGSFLQPTAKPRALAQQQAVIRGFTYYKAGKQEVTEAVADNTLQGTSWLEQLPPKVEGRSNSAEPNSAEQDEAEPRSSERVDLASGTPTSIPATTTTATTTPTPTTSLLPTEPPSGPEVSSQGREASCEGTLRAVDPPVRHHSYGRHEGAWMKDPAARDDRIYVTNYYYGNSLVEFRNLENFKQGRWSNMYKLPYNWIGTGHVVYQGAFYYNRAFTKNIIKYDLRQRFVASWALLPDVVYEDTTPWKWRGHSDIDFAVDESGLWVIYPAVDDRDEAQPEVIVLSRLDPGDLSVHRETTWKTRLRRNSYGNCFLVCGILYAVDTYNQQEGQVAYAFDTHTGTDARPQLPFLNEHAYTTQIDYNPKERVLYAWDNGHQLTYTLHFVV

SEQ ID NO: 61835 - protein, 376 aa, Homo sapiens
VELLKVGHVGPLQIGQAVKKPRTVNVEDSWAMEATASAASTSVTFREMDMSPEEVVASPRASPAKQRGPEAASNIQQCLFLKKMGAKGSTPGMFNLPVSLYVTSQGEVLVADRGNYRIQVFTRKGFLKEIRRSPSGIDSFVLSFLGADLPNLTPLSVAMNCQGLIGVTDSYDNSLKVYTLDGHCVACHRSQLSKPWGITALPSGQFVVTDVEGGKLWCFTVDRGSGVVKYSCLCSAVRPKFVTCDAEGTVYFTQGLGLNLENRQNEHHLEGGFSIGSVGPDGQLGRQISHFFSENEDFRCIAGMCVDARGDLIVADSSRKEILHFPKGGGYSVLIREGLTCPVGIALTPKGQLLVLDCWDHCIKIYSYHLRRYSTP

SEQ ID NO: 61836 - protein, 1432 aa, Homo sapiens
RLNADVLKTAEKLYRTAWIAKQQRINLDRLIITSAEASPAECCQHAKILEDTQFVDGYKQLGFQETAYGEFLSRLRENPRLIASSLVAGEKLNQENTQSVIYTVFTSLYGNCIMQEDESYLLQVLRYLIEFELKESDNPRRLLRRGTCAFSILFKLFSEGLFSAKLFLTATLHEPIMQLLVEDEDHLETDPNKLIERFSPSQQEKLFGEKGSDRFRQKVQEMVESNEAKLVALVNKFIGYLKQNTYCFPHSLRWIVSQMYKTLSCVDRLEVGEVRAMCTDLLLACFICPAVVNPEQYGIISDAPINEVARFNLMQVGRLLQQLAMTGSEEGDPRTKSSLGKFDKSCVAAFLDVVIGGRAVETPPLSSVNLLEGLSRTVVYITYSQLITLVNFMKSVMSGDQLREDRMALDNLLANLPPAKPGKSSSLEMTPYNTPQLSPATTPANKKNRLPIATRSRSRTNMLMDLHMDHEGSSQETIQEVQPEEVLVISLGTGPQLTPGMMSENEVLNMQLSDGGQGDVPVDENKLHGKPDKTLRFSLCSDNLEGISEGPSNRSNSVSSLDLEGESVSELGAGPSGSNGVEALQLLEHEQATTQDNLDDKLRKFEIRDMMGLTDDRDISETVSETWSTDVLGSDFDPNIDEDRLQEIAGAAAENMLGSLLCLPGSGSVLLDPCTGSTISETTSEAWSVEVLPSDSEAPDLKQEERLQELESCSGLGSTSDDTDVREVSSRPSTPGLSVVSGISATSEDIPNKIEDLRSECSSDFGGKDSVTSPDMDEITHGAHQLTSPPSQSESLLAMFDPLSSHEGASAVVRPKVHYARPSHPPPDPPILEGAVGGNEARLPNFGSHVLTPAEMEAFKQRHSYPERLVRSRSSDIVSSVRRPMSDPSWNRRPGNEERELPPAAAIGATSLVAAPHSSSSSPSKDSSRGETEERKDSDDEKSDRNRPWWRKRFVSAMPKAPIPFRKKEKQEKDKDDLGPDRFSTLTDDPSPRLSAQAQVAEDILDKYRNAIKRTSPSDGAMANYESTEVMGDGESAHDSPRDEALQNISADDLPDSASQAAHPQDSAFSYRDAKKKLRLALCSADSVAFPVLTHSTRNGLPDHTDPEDNEIVCFLKVQIAEAINLQDKNLMAQLQETMRCVCRFDNRTCRKLLASIAEDYRKRAPYIAYLTRCRQGLQTTQAHLERLLQRVLRDKEVANRYFTTVCVRLLLESKEKKIREFIQDFQKLTAADDKTAQVEDFLQFLYGAMAQDVIWQNASEEQLQDAQLAIERSVMNRIFKLAFYPNQDGDILRDQVLHEHIQRLSKVVTANHRALQIPEVYLREAPWPSAQSEIRTISAYKTPRDKVQCILRMCSTIMNLLSLANEDSVPGADDFVPVLVFVLIKANPPCLLSTVQYISSFYASCLSGEESYWWMQFTAAVEFIKTIDDRK

SEQ ID NO: 61837 - protein, 565 aa, Homo sapiens
TTQVAARRGLSAWPVPQEPSMEYQDAVRMLNTLQTNAGYLEQVKRQRGDPQTQLEAMELYLARSGLQVEDLDRLNIIHVTGTKGKGSTCAFTECILRSYGLKTGFFSSPHLVQVRERIRINGQPISPELFTKYFWRLYHRLEETKDGSCVSMPPYFRFLTLMAFHVFLQEKVDLAVVEVGIGGAYDCTNIIRKPVVCGVSSLGIDHTSLLGDTVEKIAWQKGGIFKQGVPAFTVLQPEGPLAVLRDRAQQISCPLYLCPMLEALEEGGPPLTLGLEGEHQRSNAALALQLAHCWLQRQDRHGAGEPKASRPGLLWQLPLAPVFQPTSHMRLGLRNTEWPGRTQVLRRGPLTWYLDGAHTASSAQACVRWFRQALQGRERPSGGPEVRVLLFNATGDRDPAALLKLLQPCQFDYAVFCPNLTEVSSTGNADQQNFTVTLDQVLLRCLEHQQHWNHLDEEQASPDLWSAPSPEPGGSASLLLAPHPPHTCSASSLVFSCISHALQWISQGRDPIFQPPSPPKGLLTHPVAHSGASILREAAAIHVLVTGSLHLVGGVLKLLEPALSQ

SEQ ID NO: 61838 - protein, 50 aa, Homo sapiens
MLDQINSCLDHLEEKNDHLHARLQELLESNRQTRLEFQQQLGEAPSDASP

SEQ ID NO: 61839 - protein, 230 aa, Homo sapiens
VDQPSRFGNKAYRTWYAKLDEEAENLVATVVPTHLAAAVPEVAVYLKESVGNSTRIDYGTGHEAAFAAFLCCLCKIGVLRVDDQIAIVFKVFNRYLEVMRKLQKTYRMEPAGSQGVWGLDDFQFLPFIWGSSQLIDHPYLEPRHFVDEKAVNENHKDYMFLECILFITEMKTGPFAEHSNQLWNISAVPSWSKVNQGLIRMYKAECLEKFPVIQHFKFGSLLPIHPVTSG

SEQ ID NO: 61840 - protein, 7 aa, Homo sapiens
MVFNSRP

SEQ ID NO: 61841 - protein, 56 aa, Homo sapiens
TPLTSVYLRVRPILPAGLCLGVTLPELAPTTVATVMLMCDCCQEPAHMTVWRKFFP

SEQ ID NO: 61842 - protein, 246 aa, Homo sapiens
IEHIDEVQNEIDRLNEQASEEILKVEQKYNKLRQPFFQKRSELIAKIPNFWVTTFVNHPQVSALLGEEDEEALHYLTRVEVTEFEDIKSGYRIDFYFDENPYFENKVLSKEFHLNESGDPSSKSTEIKWKSGKDLTKRSSQTQNKASRKRQHEEPESFFTWFTDHSDAGADELGEVIKDDIWPNPLQYYLVPDMDDEEGEGEEDDDDDEEEEGLEDIDEEGDEDEGEEDEDDDEGEEGEEDEGEDD

SEQ ID NO: 61843 - protein, 186 aa, Homo sapiens
LFIYAKLNPGIAYVQGMNEIVGPLYYTFATDPNSEWKEHAEADTFFCFTNLMAEIRDNFIKSLDDSQCGITYKMEKVYSTLKDKDVELYLKLQEQNIKPQFFAFRWLTLLLSQEFLLPDVIRIWDSLFADDNRFDFLLLVCCAMLMLIREQLLEGDFTVNMRLLQDYPITDVCQILQKAKELQDSK

SEQ ID NO: 61844 - protein, 50 aa, Homo sapiens
VMPNAPVDEAIPLERFLVPIESIERASGLLFVPNILARAGSLKAITAGSK

SEQ ID NO: 61845 - protein, 84 aa, Homo sapiens
TGGKVFGEGTAAASAGGFGFGSSSNTTSFGTLASQNAPTFGSLSQQTSGFGTQSSGFSGFGSGTGGFSFGSNNSSVQGFGGWRS

SEQ ID NO: 61846 - protein, 11 aa, Homo sapiens
LYPEFGLDMND

SEQ ID NO: 61847 - protein, 254 aa, Homo sapiens
MPGSHLPPLYLDGHVFASQPRLVPQTIPQQQSYQQAAAAQQIPISLHTSLQAQAQLGLRGGLPVSQSQEIFSSLQPFRSQVYMHPSLSPPSTMILSGGTALKPPYSAFPGMQPLEMVKPQSGSPYQPMSGNQALVYEGQLSQAAGLGASQMLDSQLPQLTMPLPRYGSGQQPLILPQSIQLPPGQSLSVGAPRRIPPPGSQPPVLNTSREPSQMEMKGFHFADSKQNVPSGGPVPSPQTYRQNNEWMRNPAWEP

SEQ ID NO: 61848 - protein, 239 aa, Homo sapiens
VNPLFEKRPKNFGIGQDIQPKRDLTRFVKWPRYIRLQRQRAILYKRLKVPPAINQFTQALDRQTATQLLKLAHKYRPETKQEKKQRLLARAEKKAAGKGDVPTKRPPVLRAGVNTVTTLVENKKAQLVVIAHDVDPIELVVFLPALCRKMGVPYCIIKGKARLGRLVHRKTCTTVAFTQVNSEDKGALAKLVEAIRTNYNDRYDEIRRHWGGNVLGPKSVARIAKLEKAKAKELATKLG

SEQ ID NO: 61849 - protein, 56 aa, Homo sapiens
LAPLHSLASQALEHGLPDPGSLLVHSFQQLGRIDSLSEQISFLEEQLGSCSCKKDS

SEQ ID NO: 61850 - protein, 93 aa, Homo sapiens
KHPGLGEYAACQSHAFMKGVFTFVTGTGMAFGLQMFIQRKFPYPLQWSLLVAVVAGSVVSYGVTRVESEKCNNLWLFLETGQLPKDRSTDQRS

SEQ ID NO: 61851 - protein, 114 aa, Homo sapiens
VDIDSDGVFKYVLIRVHSAPRSGAPAAESKEIVRGYKWAEYHADIYDKVSGDMQKQGCDCECLGGGRISHQSQDKKIHVYGYSMAYGPAQHAISTEKIKAKYPDYEVTWANDGY

SEQ ID NO: 61852 - protein, 104 aa, Homo sapiens
KGRGAKGIGFLTSGWRFVQIKEMVPEFVVPDLTGFKLKPYVSYLAPESEETPLTAAQLFSEAVAPAIEKDFKDGTFDPDNLEKYGFEPTQEGKLFQLYPRNFLR

SEQ ID NO: 61853 - protein, 763 aa, Homo sapiens
LQYAVSGLEPLAWSEDHRVSVSTARSIAVLELICDVHNPGQDLVIHRTSVPAPLNSCLLKVGSKTEVAECKEKFAASKDPTVSQTFMLDRVFNPEGKALPPMRGFKYTSWSPMGCDANGRCLLAALTMDNRLTIQANLNRLQWVQLVDLTEIYGERLYETSYRLSKNEAPEGNLGDFAEFQRRHSMQTPVRMEWSGICTTQQVKHNNECRDVGSVLLAVLFENGNIAVWQFQLPFVGKESISSCNTIESGITSPSVLFWWEYEHNNRKMSGLIVGSAFGPIKILPVNLKAVKGYFTLRQPVILWKEMDQLPVHSIKCVPLYHPYQKCSCSLVVAARGSYVFWCLLLISKAGLNVHNSHVTGLHSLPIVSMTADKQNGTVYTCSSDGKVRQLIPIFTDVALKFEHQLIKLSDVFGSVRTHGIAVSPCGAYLAIITTEGMINGLHPVNKNYQVQFVTLKTFEEAAAQLLESSVQNLFKQVDLIDLVRWKILKDKHIPQFLQEALEKKIESSGVTYFWRFKLFLLRILYQSMQKTPSEALWKPTHEDSKILLVDSPGMGNADDEQQEEGTSSKQVVKQGLQERSKEGDVEEPTDDSLPTTGDAGGREPMEEKLLEIQGKIEAVEMHLTREHMKRVLGEVYLHTWITENTSIPTRGLCNFLMSDEEYDDRTARVLIGHISKKMNKQTFPEHCSLCKEILPFTDRKQAVCSNGHIWLRCFLTYQSCQSLIYRRCLLHDSIARHPAPEDPDWIKRLLQSPCPFCDSPVF

SEQ ID NO: 61854 - protein, 41 aa, Homo sapiens
KKHRVTLPGQEEPWDIRNLLIWIKKNLLKERPELFIQGDSV

SEQ ID NO: 61855 - protein, 20 aa, Homo sapiens
MPCFLGLTLWRNTFCILCLI

SEQ ID NO: 61856 - protein, 308 aa, Homo sapiens
KPTPVKPNYALKFTLAGHTKAVSSVKFSPNGEWLASSSADKLIKIWGAYDGKFEKTISGHKLGISDVAWSSDSNLLVSASDDKTLKIWDVSSGKCLKTLKGHSNYVFCCNFNPQSNLIVSGSFDESVRIWDVKTGKCLKTLPAHSDPVSAVHFNRDGSLIVSSSYDGLCRIWDTASGQCLKTLIDDDNPPVSFVKFSPNGKYILAATLDNTLKLWDYSKGKCLKTYTGHKNEKYCIFANFSVTGGKWIVSGSEDNLVYIWNLQTKEIVQKLQGHTDVVISTACHPTENIIASAALENDKTIKLWKSDC

SEQ ID NO: 61857 - protein, 378 aa, Homo sapiens
LGFSTGSPQLSSPMNPVSSSEDIKPPLGLNGVLKVPAHPSGNMASFTKHICAICGDRSSGKHYGVYSCEGCKGFFKRTVRKDLTYTCRDNKDCLIDKRQRNRCQYCRYQKCLAMGMKREAVQEERQRGKDRNENEVESTSSANEDMPVERILEAELAVEPKTETYVEANMGLNPSSPNDPVTNICQAADKQLFTLVEWAKRIPHFSELPLDDQVILLRAGWNELLIASFSHRSIAVKDGILLATGLHVHRNSAHSAGVGAIFDRVLTELVSKMRDMQMDKTELGCLRAIVLFNPDSKGLSNPAEVEALREKVYASLEAYCKHKYPEQPGRFAKLLLRLPALRSIGLKCLEHLFFFKLIGDTPIDTFLMEMLEAPHQMT

SEQ ID NO: 61858 - protein, 1847 aa, Homo sapiens
VRPGPRPAGMDVHTRWKARSALRPGAPLLPPLLLLLLWAPPPSRAAQPADLLKVLDFHNLPDGITKTTGFCATRRSSKGPDVAYRVTKDAQLSAPTKQLYPASAFPEDFSILTTVKAKKGSQAFLVSIYNEQGIQQIGLELGRSPVFLYEDHTGKPGPEDYPLFRGINLSDGKWHRIALSVHKKNVTLILDCKKKTTKFLDRSDHPMIDINGIIVFGTRILDEEVFEGDIQQLLFVSDHRAAYDYCEHYSPDCDTAVPDTPQSQDPNPDEYYTEGDGEGETYYYEYPYYEDPEDLGKEPTPSKKPVEAAKETTEVPEELTPTPTEAAPMPETSEGAGKEEDVGIGDYDYVPSEDYYTPSPYDDLTYGEGEENPDQPTDPGAGAEIPTSTADTSNSSNPAPPPGEGADDLEGEFTEETIRNLDENYYDPYYDPTSSPSEIGPGMPANQDTIYEGIGGPRGEKGQKGEPAIIEPGMLIEGPPGPEGPAGLPGPPGTMGPTGQVGDPGERGPPGRPGLPGADGLPGPPGTMLMLPFRFGGGGDAGSKGPMVSAQESQAQAILQQARLALRGPAGPMGLTGRPGPVGPPGSGGLKGEPGDVGPQGPRGVQGPPGPAGKPGRRGRAGSDGARGMPGQTGPKGDRGFDGLAGLPGEKGHRGDPGPSGPPGPPGDDGERGDDGEVGPRGLPGEPGPRGLLGPKGPPGPPGPPGVTGMDGQPGPKGNVGPQGEPGPPGQQGNPGAQGLPGPQGAIGPPGEKGPLGKPGLPGMPGADGPPGHPGKEGPPGEKGGQGPPGPQGPIGYPGPRGVKGADGIRGLKGTKGEKGEDGFPGFKGDMGIKGDRGEIGPPGPRGEDGPEGPKGRGGPNGDPGPLGPPGEKGKLGVPGLPGYPGRQGPKGSIGFPGFPGANGEKGGRGTPGKPGPRGQRGPTGPRGERGPRGITGKPGPKGNSGGDGPAGPPGERGPNGPQGPTGFPGPKGPPGPPGKDGLPGHPGQRGETGFQGKTGPPGPPGVVGPQGPTGETGPMGERGHPGPPGPPGEQGLPGLAGKEGTKGDPGPAGLPGKDGPPGLRGFPGDRGLPGPVGALGLKGNEGPPGPPGPAGSPGERGPAGAAGPIGIPGRPGPQGPPGPAGEKGAPGEKGPQGPAGRDGLQGPVGLPGPAGPVGPPGEDGDKGEIGEPGQKGSKGDKGEQGPPGPTGPQGPIGQPGPSGADGEPGPRGQQGLFGQKGDEGPRGFPGPPGPVGLQGLPGPPGEKGETGDVGQMGPPGPPGPRGPSGAPGADGPQGPPGGIGNPGAVGEKGEPGEAGEPGLPGEGGPPGPKGERGEKGESGPSGAAGPPGPKGPPGDDGPKGSPGPVGFPGDPGPPGEPGPAGQDGPPGDKGDDGEPGQTGSPGPTGEPGPSGPPGKRGPPGPAGPEGRQGEKGAKGEAGLEGPPGKTGPIGPQGAPGKPGPDGLRGIPGPVGEQGLPGSPGPDGPPGPMGPPGLPGLKGDSGPKGEKGHPGLIGLIGPPGEQGEKGDRGLPGPQGSSGPKGEQGITGPSGPIGPPGPPGLPGPPGPKGAKGSSGPTGPKGEAGHPGPPGPPGPPGEVIQPLPIQASRTRRNIDASQLLDDGNGENYVDYADGMEEIFGSLNSLKLEIEQMKRPLGTQQNPARTCKDLQLCHPDFPDGEYWVDPNQGCSRDSFKVYCNFTAGGSTCVFPDKKSEGARITSWPKENPGSWFSEFKRGKLLSYVDAEGNPVGVVQMTFLRLLSASAHQNVTYHCYQSVAWQDAATGSYDKALRFLGSNDEEMSYDNNPYIRALVDGCATKKGYQKTVLEIDTPKVEQVPIVDIMFNDFGEASQKFGFEVGPACFMG

SEQ ID NO: 61859 - protein, 1847 aa, Homo sapiens
VRPGPRPAGMDVHTRWKARSALRPGAPLLPPLLLLLLWAPPPSRAAQPADLLKVLDFHNLPDGITKTTGFCATRRSSKGPDVAYRVTKDAQLSAPTKQLYPASAFPEDFSILTTVKAKKGSQAFLVSIYNEQGIQQIGLELGRSPVFLYEDHTGKPGPEDYPLFRGINLSDGKWHRIALSVHKKNVTLILDCKKKTTKFLDRSDHPMIDINGIIVFGTRILDEEVFEGDIQQLLFVSDHRAAYDYCEHYSPDCDTAVPDTPQSQDPNPDEYYTEGDGEGETYYYEYPYYEDPEDLGKEPTPSKKPVEAAKETTEVPEELTPTPTEAAPMPETSEGAGKEEDVGIGDYDYVPSEDYYTPSPYDDLTYGEGEENPDQPTDPGAGAEIPTSTADTSNSSNPAPPPGEGADDLEGEFTEETIRNLDENYYDPYYDPTSSPSEIGPGMPANQDTIYEGIGGPRGEKGQKGEPAIIEPGMLIEGPPGPEGPAGLPGPPGTMGPTGQVGDPGERGPPGRPGLPGADGLPGPPGTMLMLPFRFGGGGDAGSKGPMVSAQESQAQAILQQARLALRGPAGPMGLTGRPGPVGPPGSGGLKGEPGDVGPQGPRGVQGPPGPAGKPGRRGRAGSDGARGMPGQTGPKGDRGFDGLAGLPGEKGHRGDPGPSGPPGPPGDDGERGDDGEVGPRGLPGEPGPRGLLGPKGPPGPPGPPGVTGMDGQPGPKGNVGPQGEPGPPGQQGNPGAQGLPGPQGAIGPPGEKGPLGKPGLPGMPGADGPPGHPGKEGPPGEKGGQGPPGPQGPIGYPGPRGVKGADGIRGLKGTKGEKGEDGFPGFKGDMGIKGDRGEIGPPGPRGEDGPEGPKGRGGPNGDPGPLGPPGEKGKLGVPGLPGYPGRQGPKGSIGFPGFPGANGEKGGRGTPGKPGPRGQRGPTGPRGERGPRGITGKPGPKGNSGGDGPAGPPGERGPNGPQGPTGFPGPKGPPGPPGKDGLPGHPGQRGETGFQGKTGPPGPPGVVGPQGPTGETGPMGERGHPGPPGPPGEQGLPGLAGKEGTKGDPGPAGLPGKDGPPGLRGFPGDRGLPGPVGALGLKGNEGPPGPPGPAGSPGERGPAGAAGPIGIPGRPGPQGPPGPAGEKGAPGEKGPQGPAGRDGLQGPVGLPGPAGPVGPPGEDGDKGEIGEPGQKGSKGDKGEQGPPGPTGPQGPIGQPGPSGADGEPGPRGQQGLFGQKGDEGPRGFPGPPGPVGLQGLPGPPGEKGETGDVGQMGPPGPPGPRGPSGAPGADGPQGPPGGIGNPGAVGEKGEPGEAGEPGLPGEGGPPGPKGERGEKGESGPSGAAGPPGPKGPPGDDGPKGSPGPVGFPGDPGPPGEPGPAGQDGPPGDKGDDGEPGQTGSPGPTGEPGPSGPPGKRGPPGPAGPEGRQGEKGAKGEAGLEGPPGKTGPIGPQGAPGKPGPDGLRGIPGPVGEQGLPGSPGPDGPPGPMGPPGLPGLKGDSGPKGEKGHPGLIGLIGPPGEQGEKGDRGLPGPQGSSGPKGEQGITGPSGPIGPPGPPGLPGPPGPKGAKGSSGPTGPKGEAGHPGPPGPPGPPGEVIQPLPIQASRTRRNIDASQLLDDGNGENYVDYADGMEEIFGSLNSLKLEIEQMKRPLGTQQNPARTCKDLQLCHPDFPDGEYWVDPNQGCSRDSFKVYCNFTAGGSTCVFPDKKSEGSKMARWPKEQPSTWYSQYKRGSLLSYVDAEGNPVGVVQMTFLRLLSASAHQNVTYHCYQSVAWQDAATGSYDKALRFLGSNDEEMSYDNNPYIRALVDGCATKKGYQKTVLEIDTPKVEQVPIVDIMFNDFGEASQKFGFEVGPACFMG

SEQ ID NO: 61860 - protein, 34 aa, Homo sapiens
LDYNPKDRALYAWNNGHQILYNVTLFHVIRSDEL

SEQ ID NO: 61861 - protein, 40 aa, Homo sapiens
ILNEFGEGSALEKSLAVSQGGELYEEWLELRNGCLCCSVK

SEQ ID NO: 61862 - protein, 220 aa, Homo sapiens
LRAVIMGAPGSGKGTVSSRITTHFELKHLSSGDLLRDNMLRGTEIGVLAKAFIDQGKLIPDDVMTRLALHELKNLTQYSWLLDGFPRTLPQAEALDRAYQIDTVINLNVPFEVIKQRLTARWIHPASGRVYNIEFNPPKTVGIDDLTGEPLIQREDDKPETVIKRLKAYEDQTKPVLEYYQKKGVLETFSGTETNKIWPYVYAFLQTKVPQRSQKASVTP

SEQ ID NO: 61863 - protein, 83 aa, Homo sapiens
VQKVMVQPINLIFRYLQNRSQIQVWLYEQVNMQIEGCIIGFDEYMNLVLDDAEEIHSKTKSRKQLGRIMLKGDNITLLQSVSN

SEQ ID NO: 61864 - protein, 58 aa, Homo sapiens
ITLSIVLERMRYEGVVDIFQTVKMLRTQRPAMVQTEDQYQFSYRAALEYLGSFDHYAT

SEQ ID NO: 61865 - protein, 34 aa, Homo sapiens
IIAVNGQSLEGVTHEEAVAILKRTKGTVTLMVLS

SEQ ID NO: 61866 - protein, 4 aa, Homo sapiens
MTVK

SEQ ID NO: 61867 - protein, 4 aa, Homo sapiens
MAKR

SEQ ID NO: 61868 - protein, 37 aa, Homo sapiens
LVNCTCECFQPGKINLRTCDQCKHGWVAHETLKSCLQ

SEQ ID NO: 61869 - protein, 109 aa, Homo sapiens
VRQLLEAGADPNGVNRFGRRAIQVMMMGSARVAELLLLHGAEPNCADPATLTRPVHDAAREGFLDTLVVLHRAGARLDVRDAWGRLPVDLAEERGHRDVAGYLRTATGD

SEQ ID NO: 61870 - protein, 49 aa, Homo sapiens
LEAMYRRALLQLHLEQRGPRPSGDKEEQPLQEPDSGLRSRDSEPSGPWL

SEQ ID NO: 61871 - protein, 27 aa, Homo sapiens
IIDCVVRIPKEQGVLSFWRGNLANVIR

SEQ ID NO: 61872 - protein, 13 aa, Homo sapiens
KKIWMFDKYGLLV

SEQ ID NO: 61873 - protein, 23 aa, Homo sapiens
LLFAFRCSPSISFSRKKNGIRCS

SEQ ID NO: 61874 - protein, 64 aa, Homo sapiens
IEQFMKILEEIDTLILPENFKDSRLKRKGLVKKVQAFLAECDTVEQNICQETERLQSTNFALAE

SEQ ID NO: 61875 - protein, 228 aa, Homo sapiens
RPPAGMQWAVGRRWAWAALLLAVAAVLTQVVWLWLGTQSFVFQREEIAQLARQYAGLDHELAFSRLIVELRRLHPGHVLPDEELQWVFVNAGGWMGAMCLLHASLSEYVLLFGTALGSRGHSGRYWAEISDTIISGTFHQWREGTTKSEVFYPGETVVHGPGEATAVEWGPNTWMVEYGRGVIPSTLAFALADTVFSTQDFLTLFYTLRSYARGLRLELTTYLFGQDP

SEQ ID NO: 61876 - protein, 56 aa, Homo sapiens
LEETPVSWKDDTERTNRLVLIGRNLDKDILKQLFIATVTETEKQWTTHFKEDQVCT

SEQ ID NO: 61877 - protein, 55 aa, Homo sapiens
LTLTDCKKHIRVHTGEKPYACLKCGKRFSQSSHLYKHSKTTCLRWQSSNLPSTLL

SEQ ID NO: 61878 - protein, 32 aa, Homo sapiens
MAPRKGLCVPGDWDFGLTSGPLTVKCQKRKRT

SEQ ID NO: 61879 - protein, 155 aa, Homo sapiens
VTAKSGDIFKVDVGGSEPASLSYLSFEGATKRNRPNVQVGDLIYGQFVVANKDMEPEMVCIDSCGRANGMGVIGQDGLLFKVTLGLIRKLLAPDCEIIQEVGKLYPLEIVFGMNGRIWVKAKTIQQTLILANILEACEHMTSDQRKQIFSRLAES

SEQ ID NO: 61880 - skipped

SEQ ID NO: 61881 - protein, 37 aa, Homo sapiens
VGFIVSSVGLLLGIALVMRVDGAVSSWFRQLFLAQQR

SEQ ID NO: 61882 - protein, 316 aa, Homo sapiens
LIDVTCTLLLLNPDFTTAWNVRKELILSGTLNPIKDLHLGKLALTKFPKSPETWIHRRWVLQQLIQETSLPSFVTKGNLGTIPTERAQRLIQEEMEVCGEAAGRYPSNYNAWSHRIWVLQHLAKLDVKILLDELSSTKHWASMHVSDHSGFHYRQFLLKSLISQTVIDSSVMEQNPLRSEPALVPPKDEEAAVSTEEPRINLPHLLEEEVEFSTDLIDSYPGHETLWCHRRHIFYLQHHLNAGSQLSQAMEVDGLNDSSKQGYSQETKRLKRTPVPDSLGLEMEHRFIDQVLSTCRNVEQARFASAYRKWLVTLSQ

SEQ ID NO: 61883 - protein, 227 aa, Homo sapiens
ISNRAAVPEHGVAPDAERLRLPEREVTKEHGDPGDTWKDYCTLVTIAKSLLDLNKYRPIQTPSVCSDSLESPDEDMGSDSDVTTESGSSPSHSPEERQDPGSAPSPLSLLHPGVAAKGKHASEKRHKCPYSGCGKVYGKSSHLKAHYRVHTGERPFPCTWPDCLKKFSRSDELTRHYRTHTGEKQFRCPLCEKRFMRSDHLTKHARRHTEFHPSMIKRSKKALANAL

SEQ ID NO: 61884 - protein, 185 aa, Homo sapiens
MCSVCYKEHLQRQQNSGRMSPMGTASGSNSPTSDSASVQRADTSLNNCEGAAGSTSEKSRNVPVAALPVTQQMTEMSISREDKITTPKTEVSEPVVTQPSPSVSQPSTSQSEEKAPELPKPKKNRCFMCRKKVGLTGFDCRCGNLFCGLHRYSDKHNCPYDYKAEAAAKIRKENPVVVAEKIQRI

SEQ ID NO: 61885 - protein, 364 aa, Homo sapiens
RHFGRMTLESIMACCLSEEAKEARRINDEIERQLRRDKRDARRELKLLLLGTGESGKSTFIKQMRIIHGSGYSDEDKRGFTKLVYQNIFTAMQAMIRAMDTLKIPYKYEHNKAHAQLVREVDVEKVSAFENPYVDAIKSLWNDPGIQECYDRRREYQLSDSTKYYLNDLDRVADPAYLPTQQDVLRVRVPTTGIIEYPFDLQSVIFRMVDVGGQRSERRKWIHCFENVTSIMFLVALSEYDQVLVESDNENRMEESKALFRTIITYPWFQNSSVILFLNKKDLLEEKIMYSHLVDYFPEYDGPQRDAQAAREFILKMFVDLNPDSDKIIYSHFTCATDTENIRFVFAAVKDTILQLNLKEYNLV

SEQ ID NO: 61886 - protein, 45 aa, Homo sapiens
LDKIRKCIDHNQEILLTIVNDCIHMFENKEYGEDVCESLFYFCLF

SEQ ID NO: 61887 - protein, 53 aa, Homo sapiens
VWPMYLKYRQEMQDITWEVVYLDGTKSEEDLFLQVYEDLIQELAKQKCLQVTA

SEQ ID NO: 61888 - protein, 118 aa, Homo sapiens
RMPGLGWMKKCYQMIDRRLRKNLKSFIIVHPSWFIRTILAVTRPFISSKFSSKIKYVNSLSELSGLIPMDCIHIPESIIKLDEELREASEAAKTSCLYNDPEMSSMEKDIDLKLKEKP

SEQ ID NO: 61889 - protein, 95 aa, Homo sapiens
IKQLLKDKPEHVGVKVGVRTRGCNGLSYTLEYTKTKGDSDEEVIQDGVRVFIEKKAQLTLLGTEMDYVEDKLSSEFVFNNPNIKGTCGCGESFNI

SEQ ID NO: 61890 - protein, 15 aa, Homo sapiens
RILIKQTREFQPSRH

SEQ ID NO: 61891 - protein, 11 aa, Homo sapiens
VKWRFWIRTTL

SEQ ID NO: 61892 - protein, 47 aa, Homo sapiens
KLDLKTKEKNGLEFTSSGSANTENTKVTGSLETKYRWTEYGLAFTEK

SEQ ID NO: 61893 - protein, 102 aa, Homo sapiens
IVIFLEFFAWGLLTTPMLTVLHETFSQHTFLMNGLIQGVKGLLSFLSAPLIGALSDVWGRKPFLLGTVFFTCFPIPLMRISPCLCKYRIRDKRPYNMIFGMN

SEQ ID NO: 61894 - protein, 29 aa, Homo sapiens
IRELKKGKYIMYALGRVKRFLFICMRLFR

SEQ ID NO: 61895 - protein, 707 aa, Homo sapiens
VLELQTELKQLRNVLTNTQSENERLASVAQELKEINQNVEIQRGRLRDDIKEYKFREARLLQDYSELEEENISLQKQVSVLRQNQVEFEGLKHEIKRLEEETEYLNSQLEDAIRLKEISERQLEEALETLKTEREQKNSLRKELSHYMSINDSFYTSHLHVSLDGLKFSDDAAEPNNDAEALVNGFEHGGLAKLPLDNKTSTPKKEGLAPPSPSLVSDLLSELNISEIQKLKQQLMQMEREKAGLLATLQDTQKQLEHTRGSLSEQQEKVTRLTENLSALRRLQASKERQTALDNEKDRDSHEDGDYYEVDINGPEILACKYHVAVAEAGELREQLKALRSTHEAREAQHAEEKGRYEAEGQALTEKVSLLEKASRQDRELLARLEKELKKVSDVAGETQGSLSVAQDELVTFSEELANLYHHVCMCNNETPNRVMLDYYREGQGGAGRTSPGGRTSPEARGRRSPILLPKGLLAPEAGRADGGTGDSSPSPGSSLPSPLSDPRREPMNIYNLIAIIRDQIKHLQAAVDRTTELSRQRIASQELGPAVDKDKEALMEEILKLKSLLSTKREQITTLRTVLKANKQTAEVALANLKSKYENEKAMVTETMMKLRNELKALKEDAATFSSLRAMFATRCDEYITQLDEMQRQLAAAEDEKKTLNSLLRMAIQQKLALTQRLELLELDHEQTRRGRAKAAPKTKPATPSL

SEQ ID NO: 61896 - protein, 7 aa, Homo sapiens
MVDNFYF

SEQ ID NO: 61897 - protein, 15 aa, Homo sapiens
ILHIFMHKIILKYRS

SEQ ID NO: 61898 - protein, 81 aa, Homo sapiens
IKSNLLSGSLQSLWRAVTGPLFDFQGDPAQQGGTLILGPGNNIHFIHRDRNRLDHKPINSVLQLVGVQHVNFTNRPSVIHV

SEQ ID NO: 61899 - protein, 31 aa, Homo sapiens
KASWPKVKQGTGLRTGPMFGPKEAMANLSPE

SEQ ID NO: 61900 - protein, 20 aa, Homo sapiens
IHLLRMDHSQGLELQEVAAF

SEQ ID NO: 61901 - protein, 2253 aa, Homo sapiens
LLLWKNLTFRRRQTCQLLLEVAWPLFIFLILISVRLSYPPYEQHECHFPNKAMPSAGTLPWVQGIICNANNPCFRYPTPGEAPGVVGNFNKSIVARLFSDARRLLLYSQKDTSMKDMRKVLRTLQQIKKSSSNLKLQDFLVDNETFSGFLYHNLSLPKSTVDKMLRADVILHKVFLQGYQLHLTSLCNGSKSEEMIQLGDQEVSELCGLPREKLAAAERVLRSNMDILKPILRTLNSTSPFPSKELAEATKTLLHSLGTLAQELFSMRSWSDMRQEVMFLTNVNSSSSSTQIYQAVSRIVCGHPEGGGLKIKSLNWYEDNNYKALFGGNGTEEDAETFYDNSTTPYCNDLMKNLESSPLSRIIWKALKPLLVGKILYTPDTPATRQVMAEVNKTFQELAVFHDLEGMWEELSPKIWTFMENSQEMDLVRMLLDSRDNDHFWEQQLDGLDWTAQDIVAFLAKHPEDVQSSNGSVYTWREAFNETNQAIRTISRFMECVNLNKLEPIATEVWLINKSMELLDERKFWAGIVFTGITPGSIELPHHVKYKIRMDIDNVERTNKIKDGYWDPGPRADPFEDMRYVWGGFAYLQDVVEQAIIRVLTGTEKKTGVYMQQMPYPCYVDDIFLRVMSRSMPLFMTLAWIYSVAVIIKGIVYEKEARLKETMRIMGLDNSILWFSWFISSLIPLLVSAGLLVVILKLGNLLPYSDPSVVFVFLSVFAVVTILQCFLISTLFSRANLAAACGGIIYFTLYLPYVLCVAWQDYVGFTLKIFASLLSPVAFGFGCEYFALFEEQGIGVQWDNLFESPVEEDGFNLTTSVSMMLFDTFLYGVMTWYIEAVFPGQYGIPRPWYFPCTKSYWFGEESDEKSHPGSNQKRISEICMEEEPTHLKLGVSIQNLVKVYRDGMKVAVDGLALNFYEGQITSFLGHNGAGKTTTMSILTGLFPPTSGTAYILGKDIRSEMSTIRQNLGVCPQHNVLFDMLTVEEHIWFYARLKGLSEKHVKAEMEQMALDVGLPSSKLKSKTSQLSGGMQRKLSVALAFVGGSKVVILDEPTAGVDPYSRRGIWELLLKYRQGRTIILSTHHMDEADVLGDRIAIISHGKLCCVGSSLFLKNQLGTGYYLTLVKKDVESSLSSCRNSSSTVSYLKKEDSVSQSSSDAGLGSDHESDTLTIDVSAISNLIRKHVSEARLVEDIGHELTYVLPYEAAKEGAFVELFHEIDDRLSDLGISSYGISETTLEEIFLKVAEESGVDAETSDGTLPARRNRRAFGDKQSCLRPFTEDDAADPNDSDIDPESRETDLLSGMDGKGSYQVKGWKLTQQQFVALLWKRLLIARRSRKGFFAQIVLPAVFVCIALVFSLIVPPFGKYPSLELQPWMYNEQYTFVSNDAPEDTGTLELLNALTKDPGFGTRCMEGNPIPDTPCQAGEEEWTTAPVPQTIMDLFQNGNWTMQNPSPACQCSSDKIKKMLPVCPPGAGGLPPPQRKQNTADILQDLTGRNISDYLVKTYVQIIAKSLKNKIWVNEFRYGGFSLGVSNTQALPPSQEVNDAIKQMKKHLKLAKDSSADRFLNSLGRFMTGLDTKNNVKVWFNNKGWHAISSFLNVINNAILRANLQKGENPSHYGITAFNHPLNLTKQQLSEVALMTTSVDVLVSICVIFAMSFVPASFVVFLIQERVSKAKHLQFISGVKPVIYWLSNFVWDMCNYVVPATLVIIIFICFQQKSYVSSTNLPVLALLLLLYGWSITPLMYPASFVFKIPSTAYVVLTSVNLFIGINGSVATFVLELFTDNKLNNINDILKSVFLIFPHFCLGRGLIDMVKNQAMADALERFGENRFVSPLSWDLVGRNLFAMAVEGVVFFLITVLIQYRFFIRPRPVNAKLSPLNDEDEDVRRERQRILDGGGQNDILEIKELTKIYRRKRKPAVDRICVGIPPGECFGLLGVNGAGKSSTFKMLTGDTTVTRGDAFLNKNSILSNIHEVHQNMGYCPQFDAITELLTGREHVEFFALLRGVPEKEVGKVGEWAIRKLGLVKYGEKYAGNYSGGNKRKLSTAMALIGGPPVVFLDEPTTGMDPKARRFLWNCALSVVKEGRSVVLTSHSMEECEALCTRMAIMVNGRFRCLGSVQHLKNRFGDGYTIVVRIAGSNPDLKPVQDFFGLAFPGSVLKEKHRNMLQYQLPSSLSSLARIFSILSQSKKRLHIEDYSVSQTTLDQVFVNFAKDQSDDDHLKDLSLHKNQTVVDVAVLTSFLQDEKVKESYV

SEQ ID NO: 61902 - protein, 55 aa, Homo sapiens
LQNTMKLLQLSKRQEKVIFDQLVVTHKILRKARGNLELRPGGAHPGTCSPSRPGS

SEQ ID NO: 61903 - protein, 476 aa, Homo sapiens
LQAVPLNELRQQAAELRLGPLFSLLNENHREKTTLCVSILERLLQAMEPVHVARNLRVDLQRGLIHPDDSVKILTLSQIGRIVENSDAVTEILNNAELLKQIVYCIGGENLSVAKAAIKSLSRISLTQAGLEALFESNLLDDLKSVMKTNDIVRYRVYELIIEISSVSPESLNYCTTSGLVTQLLRELTGEDVLVRATCIEMVTSLAYTHHGRQYLAQEGVIDQISNIIVGADSDPFSSFYLPGFVKFFGNLAVMDSPQQICERYPIFVEKVFEMIESQDPTMIGVAVDTVGILGSNVEGKQVLQKTGTRFERLLMRIGHQSKNAPVELKIRCLDAISSLLYLPPEQQTDDLLRMTESWFSSLSRDPLELFRGISSQPFPELHCAALKVFTAIANQPWAQKLMFNSPGFVEYVVDRSVEHDKASKDAKYELVKALANSKTIAEIFGNPNYLRLRTYLSEGPYYVKPVSTTAVEGAE

SEQ ID NO: 61904 - protein, 16 aa, Homo sapiens
RKILLASSIYRKKIYG

SEQ ID NO: 61905 - protein, 315 aa, Homo sapiens
LLAQRDPERARADTMTTLDDKLLGEKLQYYYSSSEDEDSDHEDKDRGRCAPASSSVPAEAELAGEGISVNTGPKGVINDWRRFKQLETEQREEQCREMERLIKKLSMTCRSHLDEEEEQQKQKDLQEKISGKMTLKEFAIMNEDQDDEEFLQQYRKQRMEEMRQQLHKGPQFKQVFEISSGEGFLDMIDKEQKSIVIMVHIYEDGIPGTEAMNGCMICLAAEYPAVKFCKVKSSVIGASSQFTRNALPALLIYKGGELIGNFVRVTDQLGDDFFAVDLEAFLQEFGLLPEKEVLVLTSVRNSATCHSEDSDLEID

SEQ ID NO: 61906 - skipped

SEQ ID NO: 61907 - protein, 386 aa, Homo sapiens
INDTEFQGHKVILAACSTFMRDQFLLTQSKHVRITILQSAEVGRKLLLSCYTGALEVKRKELLKYLTAASYLQMVHIVEKCTEALSKYLEIDLSMKNNNQHTDLCQSSDPDVKNEDENSDKDCEIIEISEDSPVNIDFHVKEEESNALQSTVESLTSERKEMKSPELSTVDIGFKDNEICILHVESISTAGVENGQFSQPCTSSKASMYFSETQHSLINSTVESRVAEVPGNQDQGLFCENTEGSYGTVSEIQNLEEGYSLRHQCPRCPRGFLHVENYLRHLKMHKLFLCLQCGKTFTQKKNLNRHIRGHMGIRPFQCTVCLKTFTAKSTLQDHLNIHSGDRPYKCHCCDMDFKHKSALKKHLTSVHGRSSGEKLSRPDLKRQSLL

SEQ ID NO: 61908 - protein, 12 aa, Homo sapiens
MDPKPWTCRAWH

SEQ ID NO: 61909 - protein, 13 aa, Homo sapiens
RPIVFAHPSWRTE

SEQ ID NO: 61910 - protein, 346 aa, Homo sapiens
LQSSDSRAFSTVPLTPVPRPSDSVSSTPAATSTPSKQALQFFCYICKASCSSQQEFQDHMSEPQHQQRLGEIQHMSQACLLSLLPVPRDVLETEDEEPPPRRWCNTCQLYYMGDLIQHRRTQDHKIAKQSLRPFCTVCNRYFKTPRKFVEHVKSQGHKDKAKELKSLEKEIAGQDEDHFITVDAVGCFEGDEEEEEDDEDEEEIEVEEELCKQVRSRDISREEWKGSETYSPNTAYGVDFLVPVMGYICRICHKFYHSNSGAQLSHCKSLGHFENLQKYKAAKNPSPTTRPVSRRCAINARNALTALFTSSGRPPSQPNTQDKTPSKVTARPSQPPLPRRSTRLKT

SEQ ID NO: 61911 - protein, 120 aa, Homo sapiens
LELQELVLRLVGDRNEWHGRFLAAAQNPADEPTSGAPAPQELGAANQQGDLCEVSLAGSVEPAQGEAREGSPRDNPTAQQIMQLLREMQNPRERPGLGSNPCIPFFYRADENDEVKITVI

SEQ ID NO: 61912 - protein, 7 aa, Homo sapiens
VALPMIL

SEQ ID NO: 61913 - protein, 307 aa, Homo sapiens
LTLCNFSIPEELEFQYRRVNELLLSILNPTRQDESIQRIAVHLCNALVCQVDNDHKEAVGKMGFVVTMLKLIQKKLLDKTCDQVMEFSWSALWNITDETPDNCEMFLNFNGMKLFLDCLKEFPEKQELHRNMLGLLGNVAEVKELRPQLMTSQFISVFSNLLESKADGIEVSYNACGVLSHIMFDGPEAWGVCEPQREEVEERMWAAIQSWDINSRRNINYRSFEPILRLLPQGISPVSQHWATWALYNLVSVYPDKYCPLLIKEGGMPLLRDIIKMATARQETKEMARKVIEHCSNFKEENMDTSR

SEQ ID NO: 61914 - protein, 512 aa, Homo sapiens [sequence omitted]

SEQ ID NO: 61915 - protein, 34 aa, Homo sapiens
RTVDRSQGCGVTSAARQSLSSSQVFPHQNDLRRF

SEQ ID NO: 61916 - protein, 620 aa, Homo sapiens
RTVVKPLGFLKPFSLMKASSRFKAHQDALPRLPVPPLQQSLDHYLKALQPIVSEEEWAHTKQLVDEFQASGGVGERLQKGLERRARKTENWLSEWWLKTAYLQYRQPVVIYSSPGVMLPKQDFVDLQGQLRFAAKLIEGVLDFKVMIDNETLPVEYLGGKPLCMNQYYQILSSCRVPGPKQDTVSNFSKTKKPPTHITVVHNYQFFELDVYHSDGTPLTADQIFVQLEKIWNSSLQTNKEPVGILTSNHRNSWAKAYNTLIKDKVNRDSVRSIQKSIFTVCLDATMPRVSEDVYRSHVAGQMLHGGGSRLNSGNRWFDKTLQFIVAEDGSCGLVYEHAAAEGPPIVTLLDYVIEYTKKPELVRSPLVPLPMPKKLRFNITPEIKSDIEKAKQNLSIMIQDLDITVMVFHHFGKDFPKSEKLSPDAFIQMALQLAYYRIYGQACATYESASLRMFHLGRTDTIRSASMDSLTFVKAMDDSSVTEHQKVELLRKAVQAHRGYTDRAIRGEAFDRHLLGLKLQAIEDLVSMPDIFMDTSYAIAMHFHLSTSQVPAKTDCVMFFGPVVPDGYGVCYNPMEAHINFSLSAYNSCAETNAARLAHYLEKALLDMRALLQSHPRAKL

SEQ ID NO: 61917 - protein, 18 aa, Homo sapiens
RPDRAGRPQMSPARAAPR

SEQ ID NO: 61918 - protein, 658 aa, Homo sapiens
LAGKMKLSLVAAMLLLLSAARAEEEDKKEDVGTVVGIDLGTTYSCVGVFKNGRVEIIANDQGNRITPSYVAFTPEGERLIGDAAKNQLTSNPENTVFDAKRLIGRTWNDPSVQQDIKFLPFKVVEKKTKPYIQVDIGGGQTKTFAPEEISAMVLTKMKETAEAYLGKKVTHAVVTVPAYFNDAQRQATKDAGTIAGLNVMRIINEPTAAAIAYGLDKREGEKNILVFDLGGGTFDVSLLTIDNGVFEVVATNGDTHLGGEDFDQRVMEHFIKLYKKKTGKDVRKDNRAVQKLRREVEKAKRALSSQHQARIEIESFYEGEDFSETLTRAKFEELNMDLFRSTMKPVQKVLEDSDLKKSDIDEIVLVGGSTRIPKIQQLVKEFFNGKEPSRGINPDEAVAYGAAVQAGVLSGDQDTGDLVLLDVCPLTLGIETVGGVMTKLIPRNTVVPTKKSQIFSTASDNQPTVTIKVYEGERPLTKDNHLLGTFDLTGIPPAPRGVPQIEVTFEIDVNGILRVTAEDKGTGNKNKITITNDQNRLTPEEIERMVNDAEKFAEEDKKLKERIDTRNELESYAYSLKNQIGDKEKLGGKLSSEDKETMEKAVEEKIEWLESHQDADIEDFKAKKKELEEIVQPIISKLYGSAGPPPTGEEDTAEKDEL

SEQ ID NO: 61919 - protein, 232 aa, Homo sapiens
IPVTAFGLGTWQVQRRKWKLNLIAELESRVLAEPVPLPADPMELKNLEYRPVKVRGCFDHSKELYMMPRTMVDPVREAREGGLISSSTQSGAYVVTPFHCTDLGVTILVNRGFVPRKKVNPETRQKGQIEGEVDLIGMVRLTETRQPFVPENNPERNHWHYRDLEAMARITGAEPIFIDANFQSTVPGGPIGGQTRVTLRNEHLQYIVTWYGLSAATSYLWFKKFLRGTPGV

SEQ ID NO: 61920 - protein, 2317 aa, Homo sapiens
VAPTTCPLQPVTDPFAFSRQALQSTPLGSSSKSSPPVLQGPAPAGFSQHPGLLVPHTHARDSSQGPCEPLPGPLTQPRAHASPFSGALTPSAPPGPEMNRSAEVGPSSEPEVQTLPYLPHYIPGVDPETSHGGHPHGNMPGLDRPLSRQNPHDGVVTPAASPSLPQPGLQMPGQWGPVQGGPQPSGQHRSPCPEGPVPSGVPCATSVPHFPTPSILHQGPGHEQHSPLVAPPAALPSDGRDEVSHLQSGSHLANNSDPESTFRQNPRIVNHWASPELRQNPGVKNEHRPASALVNPLARGDSPENRTHHPLGAGAGSGCAPLEADSGASGALAMFFQGGETENEENLSSEKAGLSGQADFDDFCSSPGLGRPPAPTHVGAGSLCQALLPGPSNEAAGDVWGDTASTGVPDASGSQYENVENLEFVQNQEVLPSEPLNLDPSSPSDQFRYGPLPGPAVPRHGAVCHTGAPDATLHTVHPDSVSSSYSSRSHGRLSGSARPQELVGTFIQQEVGKPEDEASGSFFKQIDSSPVGGETDETTVSQNYRGSVSQPSTPSPPKPTGIFQTSANSSFEPVKSHLVGVKPFEADRANVVGEVRETCVRQKQCRPAAALPDASPGNLEQPPDNMETLCAPQVCPLPLNSTTEAVHMLPHAGAPPLDTVYPAPEKRPSARTQGPVKCESPATTLWAQSELPDFGGNVLLAPAAPALYVCAKPQPPVVQPPEEAMSGQQSRNPSSAAPVQSRGGIGASENLENPPKMGEEEALQSQASSGYASLLSSPPTESLQNPPVLIAQPDHSYNLAQPINFSVSLSNSHEKNQSWREALVGDRPAVSSWALGGDSGENTSLSGIPTSSVLSLSLPSSVAQSNFPQGSGASEMVSNQPANLLVQPPSQPVPENLVPESQKDRKAGSALPGFANSPAGSTSVVLVPPAHGTLVPDGNKANHSSHQEDTYGALDFTLSRTLENPVNVYNPSHSDSLASQQSVASHPRQSGPGAPNLDRFYQQVTKDAQGQPGLERAQQELVPPQQQASPPQLPKAMFSELSNPESLPAQGQAQNSAQSPASLVLVDAGQQLPPRPPQSSSVSLVSSGSGQAAVPSEQPWPQPVPALAPGPPPQDLAAYYYYRPLYDAYQPQYSLPYPPEPGAASLYYQDVYSLYEPRYRPYDGAASAYAQNYRYPEPERPSSRASHSSERPPPRQGYPEGYYSSKSGWSSQSDYYASYYSSQYDYGDPGHWDRYHYSARVRDPRTYDRRYWCDAEYDAYRREHSAFGDRPEKRDNNWRYDPRFTGSFDDDPDPHRDPYGEEVDRRSVHSEHSARSLHSAHSLASRRSSLSSHSHQSQIYRSHNVAAGSYEAPLPPGSFHGDFAYGTYRSNFSSGPGFPEYGYPADTVWPAMEQVSSRPTSPEKFSVPHVCARFGPGGQLIKVIPNLPSEGQPALVEVHSMEALLQHTSEQEEMRAFPGPLAKDDTHKVDVINFAQNKAMKCLQNENLIDKESASLLWNFIVLLCRQNGTVVGTDIAELLLRDHRTVWLPGKSPNEANLIDFTNEAVEQVEEEESGEAQLSFLTGGPAAAASSLERETERFRELLLYGRKKDALESAMKNGLWGHALLLASKMDSRTHARVMTRFANSLPINDPLQTVYQLMSGRMPAASTCCGDEKWGDWRPHLAMVLSNLNNNMDVESRTMATMGDTLASRGLLDAAHFCYLMAQAGFGVYTKKTTKLVLIGSNHSLPFLKFATNEAIQRTEAYEYAQSLGAETCPLPSFQVFKFIYSCRLAEMGLATQAFHYCEAIAKSILTQPHLYSPVLISQLVQMASQLRLFDPQLKEKPEEESLAAPTWLVHLQQVERQIKEGAGVWHQDGALPQQCPGTPSSEMEQLDRPGLSQPGALGIANPLLAVPAPSPEHSSPSVRLLPSAPQTLPDGPLASPARVPMFPVPLPPGPLEPGPGCVTPGPALGFLEPSGPGLPPGVPPLQERRHLLQEARSPDPGIVPQEAPVGNSLSELSEENFDGKFANLTPSRTVPDSEAPPGWDRADSGPTQPPLSLSPAPETKRPGQAAKKETKEPKKGESWFFRWLPGKKKTEAYLPDDKNKSIVWDEKKNQWVNLNEPEEEKKAPPPPPTSMPKTVQAAPPALPGPPGAPVNMYSRRAAGTRARYVDVLNPSGTQRSEPALAPADFVAPLAPLPIPSNLFVPTPDAEEPQLPDGTGREGPAAARGLANPEPAPEPKVLSSAASLPGSELPSSRPEGSQGGELSRCSSMSSLSREVSQHFNQAPGDLPAAGGPPSGAMPFYNPAQLAQACATSGSSRLGRIGQRKHLVLN

SEQ ID NO: 61921 - protein, 207 aa, Homo sapiens
MVLLLKGVPFTLTTVDTRRSPDVLKDFAPGSQLPILLYDSDAKTDTLQIEDFLEETLGPPDFPSLAPRYRESNTAGNDVFHKFSAFIKNPVPAQDEALYQQLLRALARLDSYLRAPLEHELAGEPQLRESRRRFLDGDRLTLADCSLLPKLHIVDTVCAHFRQAPIPAELRGVRRYLDSAMQEKEFKYTCPHSAEILAAYRPAVHPR

SEQ ID NO: 61922 - protein, 19 aa, Homo sapiens
KKHCRERKRPFQHELEPER

SEQ ID NO: 61923 - protein, 830 aa, Homo sapiens
IKQAFYNTGAVLFVCLCCGAAVLVYFILEAFLRPLLWAVLCGTFLHPFKSSLTRLGRHWLQRLHRAHTPIVLAALLLPLCFVDYGVEALGEQALRRRRLLLLLGAGGPLLYGLYCLGSYLGVQVLLVHAATLICRGLDYFSSLWIWTLVVGYVLTVSFKWNASTERYLRAVSIPVWIILLFHLASLAGSWRIPVFLVIVFLMSVGTLYEKQNGKESSGAELPGQVISMAASTLANLAISITGYESSSEDQPSTQPAEAVDRGESAPTLSTSPSPSSPSPTSPSPTLGRRRPEIGTFLRKKKTSDIYFVSLVWAIVVMQIWLNLWIVQLLPVPIAVWILKKLVIHFGVVDFLEKRYHVWWGIIESFLKERQGALAPWPIVGLGKFLLKVDSKLWHWLNKKMIIWLEKMLDKIISIFIIFLLVIGTLLLALLLTAKVHQESVHMIEVTSNLINETLANHPEWANWLPEAQVVQRALNSAANNVYQYGREWITHKLHKILGDKVNNTAVIEKQVLELWDRLYHSWFVKNVTHSGRHKGQKLHVSRQNSWLGDILDWQDIVSFVHENIETFLSILESLWIVMSRNVSLLFTTVTTLLTILFYSGTALLNFVLSLIIFLTTLFYLLSSSDEYYKPVKWVISLTPLSQPGPSSNIIGQSVEEAIRGVFDASLKMAGFYGLYTWLTHTMFGINIVFIPSALAAILGAVPFLGTYWAAVPAVLDLWLTQGLGCKAILLLIFHLLPTYFVDTAIYSDISGGGHPYLTGLAVAGGAYYLGLEGAIIGPILLCILVVASNIYSAMLVSPTNSVPTPNQTPWPAQPQRTFRDISEDLKSSVG

SEQ ID NO: 61924 - protein, 84 aa, Homo sapiens
MWSTSSRRKCNCSRRTLSIWRHDHLLMLQWIHVGGFPEECLFRKWNMDITSYLQSCLSISMSEWGHLPTPKCLFLSRGLDGAPL

SEQ ID NO: 61925 - protein, 17 aa, Homo sapiens
LHSSLSERRSLCGPLPV

SEQ ID NO: 61926 - protein, 756 aa, Homo sapiens
VLTSGGDAQGMNAAVRAVVRMGIYVGAKVYFIYEGYQGMVDGGSNIAEADWESVSSILQVGGTIIGSARCQAFRTREGRLKAACNLLQRGITNLCVIGGDGSLTGANLFRKEWSGLLEELARNGQIDKEAVQKYAYLNVVGMVGSIDNDFCGTDMTIGTDSALHRIIEVVDAIMTTAQSHQRTFVLEVMGRHCGYLALVSALACGADWVFLPESPPEEGWEEQMCVKLSENRARKKRLNIIIVAEGAIDTQNKPITSEKIKELVVTQLGYDTRVTILGHVQRGGTPSAFDRILASRMGVEAVIALLEATPDTPACVVSLNGNHAVRLPLMECVQMTQDVQKAMDERRFQDAVRLRGRSFAGNLNTYKRLAIKLPDDQIPKTNCNVAVINVGAPAAGMNAAVRSAVRVGIADGHRMLAIYDGFDGFAKGQIKEIGWTDVGGWTGQGGSILGTKRVLPGKYLEEIATQMRTHSINALLIIGGFEAYLGLLELSAAREKHEEFCVPMVMVPATVSNNVPGSDFSIGADTALNTITDTCDRIKQSASGTKRRVFIIETMGGYCGYLANMGGLAAGADAAYIFEEPFDIRDLQSNVEHLTEKMKTTIQRGLVLRNESCSENYTTDFIYQLYSEEGKGVFDCRKNVLGHMQQGGAPSPFDRNFGTKISARAMEWITAKLKEARGRGKKFTTDDSICVLGISKRNVIFQPVAELKKQTDFEHRIPKEQWWLKLRPLMKILAKYKASYDVSDSGQLEHVQPWSV

SEQ ID NO: 61927 - protein, 15 aa, Homo sapiens
RTMSRILRVYLVKMN

SEQ ID NO: 61928 - protein, 133 aa, Homo sapiens
LKEIIKILEKLNGNGRWKWLLHYRENKKLKEDERVDSTAHKKNIMLKSFQSANIIELLHYHQCDSRSSTKAEILKCLLNLQIQHIDARFAVLLTDKPTIPREVFENSGILVTDVNNFIENIEKIAAPFRSSYW

SEQ ID NO: 61929 - protein, 640 aa, Homo sapiens
RIHYNIFYCLYLQENSCTQATKVKEEPSVWPGKKTIQLTHEQQLILNHKMEPLQVVKIMAFAGTGKTSTLVKYAEKWSQSRFLYVTFNKSIAKQAERVFPSNVICKTFHSMAYGHIGRKYQSKKKLNLFKLTPFMVNSVLAEGKGGFIRAKLVCKTLENFFASADEELTIDHVPIWCKNSQGQRVMVEQSEKLNGVLEASRLWDNMRKLGECTEEAHQMTHDGYLKLWQLSKPSLASFDAIFVDEAQDCTPAIMNIVLSQPCGKIFVGDPHQQIYTFRGAVNALFTVPHTHVFYLTQSFRFGVEIAYVGATILDVCKRVRKKTLVGGNHQSGIRGDAKGQVALLSRTNANVFDEAVRVTEGEFPSRIHLIGGIKSFGLDRIIDIWILLQPEEERRKQNLVIKDKFIRRWVHKEGFSGFKRYVTAAEDKELEAKIAVVEKYNIRIPELVQRIEKCHIEDLDFAEYILGTVHKAKGLEFDTVHVLDDFVKVPCARHNLPQLPHFRVESFSEDEWNLLYVAVTRAKKRLIMTKSLENILTLAGEYFLQAELTSNVLKTGVVRCCVGQCNNAIPVDTVLTMKKLPITYSNRKENKGGYLCHSCAEQRIGPLAFLTASPEQVRAMERTVENIVLPRHEALLFLVF

SEQ ID NO: 61930 - protein, 19 aa, Homo sapiens
VALIAGGATSWPWMSRTPL

SEQ ID NO: 61931 - protein, 5 aa, Homo sapiens
MKISQ

SEQ ID NO: 61932 - protein, 551 aa, Homo sapiens
LAHPNLDTFTPEELLQQMKELLTENHQLKEAMKLNNQAMKGRFEELSAWTEKQKEERQFFEIQSKEAKERLMALSHENEKLKEELGKLKGKSERSSEDPTDDSRLPRAEAEQEKDQLRTQVVRLQAEKADLLGIVSELQLKLNSSGSSEDSFVEIRMAEGEAEGSVKEIKHSPGPTRTVSTGTALSKYRSRSADGAKNYFEHEELTVSQLLLCLREGNQKVERLEVALKEAKERVSDFEKKTSNRSEIETQTEGSTEKENDEEKGPETVGSEVEALNLQVTSLFKELQEAHTKLSEAELMKKRLQEKCQALERKNSAIPSELNEKQELVYTNKKLELQVESMLSEIKMEQAKTEDEKSKLTVLQMTHNKLLQEHNNALKTIEELTRKESEKVDRAVLKELSEKLELAEKALASKQLQMDEMKQTIAKQEEDLETMTILRAQMEVYCSDFHAERAAREKIHEEKEQLALQLAVLLKENDAFEDGGRQSLMEMQSRHGARTSDSDQQAYLVQRGAEDRDWRQQRNIPIHSCPKCGEVLPDIDTLQIHVMDCII

SEQ ID NO: 61933 - protein, 321 aa, Homo sapiens [sequence omitted]

SEQ ID NO: 61934 - protein, 180 aa, Homo sapiens
VMGLIFAKLWSLFCNQEHKVIIVGLDNAGKTTILYQFLMNEVVHTSPTIGSNVEEIVVKNTHFLMWDIGGQESLRSSWNTYYSNTEFIILVVDSIDRERLAITKEELYRMLAHEDLRKAAVLIFANKQDMKGCMTAAEISKYLTLSSIKDHPWHIQSCCALTGEGLCQGLEWMTSRIGVR

SEQ ID NO: 61935 - protein, 12 aa, Homo sapiens
LSKMYIEQNACS

SEQ ID NO: 61936 - protein, 12 aa, Homo sapiens
IEKSNKEMNYLP

SEQ ID NO: 61937 - protein, 16 aa, Homo sapiens
RQNNRSETRLLCHRCG

SEQ ID NO: 61938 - protein, 168 aa, Homo sapiens
IPTLECCHEDMCNYRGLHDVLSPPRGEASGQGNRYQHDGSRNLITKVQELTSSKELWFRAAVIAVPIAGGLILVLLIMLALRMLRSENKRLQDQRQQMLSRLHYSFHGHHSKKGQVAKLDLECMVPVSGHENCCLTCDKMRQADLSNDKILSLVHWGMYSGHGKLEFV

SEQ ID NO: 61939 - protein, 19 aa, Homo sapiens
RQNTSAIKIMTLCHLEQHS

SEQ ID NO: 61940 - protein, 81 aa, Homo sapiens
IDSHKRREILSRRPSYRKILNELSSDVPGVPKIEEERSEEEGTPPSIATMAVPTSIYQTSTGQYSMYAAIRYDTVLALSLL

SEQ ID NO: 61941 - protein, 301 aa, Homo sapiens
LQHISDRENIDDLNMEFNPSDHPRASTIFLSKSQTDVREKRKSLFINHHPPGQIARKYSSCSTIFLDDSTVSQPNLKYTIKCVALAIYYHIKNRDPDGRMLLDIFDENLHPLSKSEVPPDYDKHNPEQKQIYRFVRTLFSAAQLTAECAIVTLVYLERLLTYAEIDICPANWKRIVLGAILLASKVWDDQAVWNVDYCQILKDITVEDMNELERQFLELLQFNINVPSSVYAKYYFDLRSLAEANNLSFPLEPLSRERAHKLEAISRLCEDKYKDLRRSARKRSASADNLTLPRWSPAIIS

SEQ ID NO: 61942 - protein, 8 aa, Homo sapiens
MLQIIILW

SEQ ID NO: 61943 - protein, 8 aa, Homo sapiens
IPVTTIRI

SEQ ID NO: 61944 - protein, 65 aa, Homo sapiens
LMEADLGVEVPHEVAQYIKFEMPVLDSFVEKLKEEEEREIIKLTMKFQALRLTMLQRLEQLVEAK

SEQ ID NO: 61945 - protein, 339 aa, Homo sapiens
LNVFTPQKSLEEFQDVYIVMELMDANLCQVIQMELDHERMSYLLYQMLCGIKHLHSAGIIHRDLKPSNIVVKSDCTLKILDFGLARTAGTSFMMTPYVVTRYYRAPEVILGMGYKENVDIWSVGCIMGEMIKGGVLFPGTDHIDQWNKVIEQLGTPCPEFMKKLQPTVRTYVENRPKYAGYSFEKLFPDVLFPADSEHNKLKASQARDLLSKMLVIDASKRISVDEALQHPYINVWYDPSEAEAPPPKIPDKQLDEREHTIEEWKELIYKEVMDLEERTKNGVIRGQPSPLGAAVINGSQHPSSSSSVNDVSSMSTDPTLASDTDSSLEAAAGPLGCCR

SEQ ID NO: 61946 - protein, 1317 aa, Homo sapiens
VEEIRRSSQSWSLAADAGLLQFLQEFSQQTISRTHEIKKQVDGLIRETKATDCRLHNVFNDFLMLSNTQFIENRVYDEEVEEPVLKAEAEKTEQEKTREQKEVDLIPKVQEAVNYGLQVLDSAFEQLDIKAGNSDSEEDDANGRVELILEPKDLYIDRPLPYLIGSKLFMEQEDVGLGELSSEEGSVGSDRGSIVDTEEEKEEEESDEDFAHHSDNEQNQHTTQMSDEEEDDDGCDLFADSEKEEEDIEDIEENTRPKRSRPTSFADELAARIKGDAMGRVDEEPTTLPSGEAKPRKTLKEKKERRTPSDDEEDNLFAPPKLTDEDFSPFGSGGGLFSGGKGLFDDEDEESDLFTEASQDRQAGASVKEESSSSKPGKKIPAGAVSVFLGDTDVFGAASVPSLKEPQKPEQPTPRKSPYGPPPTGLFDDDDGDDDDDFFSAPHSKPSKTRKVQSTADIFGDEEGDLFKEKAVASPEATVSQTDENKARAEKKVTLSYSKNLKPSSETKTQKGLFSDEEDSEDLFSSQSASNLKGASLLPGKLPTSVSLFDDEDEEDNLFGGTAAKKQTLSLQAQREEKAKASELSKKKASALLFSSDEEDQWNIPASQTHLASDSRSKGEPRDSGTLQSQEAKAVKKTSLFEEDKEDDLFAIAKDSQKKTQRVSLLFEDDVDSGGSLFGSPPTSVPPATKKKETVSEAPPLLFSDEEEKEAQLGVKSVDKKVESAKESLKFGRTDVAESEKEGLLTRSAQETVKHSDLFSSSSPWDKGTKPRTKTVLSLFDEEEDKMEDQNIIQAPQKEVGKGCDPDAHPKSTGVFQDEELLFSHKLQKDNDPDVDLFAGTKKTKLLEPSVGSLFGDDEDDDLFSSAKSQPLVQEKKRVVKKDHSVNSFKNQKHPESIQGSKEKGIWKPETPQDSSGLAPFKTKEPSTRIGKIQANLAINPAALLPTAASQISEVKPVLPELAFPSSEHRRSHGLESVPVLPGSGEAGVSFDLPAQADTLHSANKSRVKMRGKRRPQTRAARRLAAQESSEAEDMSVPRGPIAQWADGAISPNGHRPQLRAASGEDSTEEALAAAAAPWEGGPVPGVDTSPFAKSLGHSRGEADLFDSGDIFSTGTGSQSVERTKPKAKIAENPANPPVGGKAKSPMFPALGEASSDDDLFQSAKPKPAKKTNPFPLLEDEDDLFTDQKVKKNETKSSSQQDVILTTQDIFEDDIFATEAIKPSQKTREKEKTLESNLFDDNIDIFADLTVKPKEKSKKKVEAKSIFDDDMDDIFSTGIQAKTTKPKSRSAQAAPEPRFEHKVSNIFDDPLNAFGGQ

SEQ ID NO: 61947 - protein, 171 aa, Homo sapiens
MNPLSPYLNVDPRYLVQDTDEFILPTGANKTRGRFELAFFTIGGCCMTGAAFGAMNGLRLGLKETQNMAWSKPRNVQILNMVTRQGALWANTLGSLALLYSAFGVIIEKTRGAEDDLNTVAAGTMTGMLYKCTGGLRGIARGGLTGLTLTSLYALYNNWEHMKGSLLQQSL

SEQ ID NO: 61948 - protein, 1317 aa, Homo sapiens
VEEIRRSSQSWSLAADAGLLQFLQEFSQQTISRTHEIKKQVDGLIRETKATDCRLHNVFNDFLMLSNTQFIENRVYDEEVEEPVLKAEAEKTEQEKTREQKEVDLIPKVQEAVNYGLQVLDSAFEQLDIKAGNSDSEEDDANGRVELILEPKDLYIDRPLPYLIGSKLFMEQEDVGLGELSSEEGSVGSDRGSIVDTEEEKEEEESDEDFAHHSDNEQNRHTTQMSDEEEDDDGCDLFADSEKEEEDIEDIEENTRPKRSRPTSFADELAARIKGDAVGRVDEEPTTLPSGEAKPRKTLKEKKERRTPSDDEEDNLFAPPKLTDEDFSPFGSGGGLFSGGKGLFDDEDEESDLFTEAPQDRQAGASVKEESSSSKPGKKIPAGAVSVFLGDTDVFGAASVPSMKEPQKPEQPTPRKSPYGPPPTGLFDDDDGDDDDDFFSAPHSKPSKTGKVQSTADIFGDEEGDLFKEKAVASPEATVSQTDENKARAEKKVTLSSSKNLKPSSETKTQKGLFSDEEDSEDLFSSQSASKLKGASLLPGKLPTLVSLFDDEDEEDNLFGGTAAKKQTLCLQAQREEKAKASELSKKKASALLFSSDEEDQWNIPASQTHLASDSRSKGEPRDSGTLQSQEAKAVKKTSLFEEDEEDDLFAIAKDSQKKTQRVSLLFEDDVDSGGSLFGSPPTSVPPATKKKETVSEAPPLLFSDEEEKEAQLGVKSVDKKVESAKESLKFGRTDVAESEKEGLLTRSAQETVKHSDLFSSSSPWDKGTKPRTKTVLSLFDEEEDKMEDQNIIQAPQKEVGKGRDPDAHPKSTGVFQDEELLFSHKLQKDNDPDVDLFAGTKKTKLLEPSVGSLFGDDEDDDLFSSAKSQPLVQEKKRVVKKDHSVDSFKNQKHPESIQGSKEKGIWKPETPQDSSGLAPFKTKEPSTRIGKIQANLAINPAALLPTAASQISEVKPVLPELAFPSSEHRRSHGLESVPVLPGSGEAGVSFDLPAQADTLHSANKSRVKMRGKRRPQTRAARRLAAQESSETEDMSVPRGPIAQWADGAISPNGHRPQLRAASGEDSTEEALAAAAAPWEGGPVPGVDRSPFAKSLGHSRGEADLFDSGDIFSTGTGSQSVERTKPKAKIAENPANPPVGGKAKSPMFPALGEASSDDDLFQSAKPKPAKKTNPFPLLEDEDDLFTDQKVKKNETKSNSQQDVILTTQDIFEDDIFATEAIKPSQKTREKEKTLESNLFDDNIDIFADLTVKPKEKSKKKVEAKSIFDDDMDDIFSSGIQAKTTKPKSRSAQAAPEPRFEHKVSNIFDDPLNAFGGQ

SEQ ID NO: 61949 - protein, 83 aa, Homo sapiens
LALGAQRGAAVSAAASSSLAVPSMFPGATTPLPKAAAYPGVYGSNGRTPQPGSSTEQTSRPFISCRQIRRGYFLSQKGCSISF

SEQ ID NO: 61950 - protein, 300 aa, Homo sapiens
LALGAQRGAAVSAAASSSLAVPSMFPGATTPLPKAAAYPGVYGSNGRTPQPAYLSEAMKLTQSEQAHLSLELQRDSHMKQLLLIQERWKRAQREERLKAQQNTDKDAAAHLQTSHKPSAEDAEGQSPLSQKYSPSTEKCLPEIQGIFDRDPDTLLYLLQQKSEPAEPCIGSKAPKDDKTIIEEQATKIADLKRHVEFLVAENERLRKENKQLKAEKARLLKGPIEKELDVDADFVETSELWSLPPHAETATASSTWQKFAANTGKAKDIPIPNLPPLDFPSPELPLMELSEDILKGFMNN

SEQ ID NO: 61951 - protein, 491 aa, Homo sapiens
IVLTGAGVSVSCGIPDFRSRDGIYARLAVDFPDLPDPQAMFDIEYFRKDPRPFFKFAKEIYPGQFQPSLCHKFIALSDKEGKLLRNYTQNIDTLEQVAGIQRIIQCHGSFATASCLICKYKVDCEAVRGDIFNQVVPRCPRCPADEPLAIMKPEIVFFGENLPEQFHRAMKYDKDEVDLLIVIGSSLKVRPVALIPSSIPHEVPQILINREPLPHLHFDVELLGDCDVIINELCHRLGGEYAKLCCNPVKLSEITEKPPRTQKELAYLSELPPTPLHVSEDSSSPERTSPPDSSVIVTLLDQAAKSNDDLDVSESKGCMEEKPQEVQTSRNVESIAEQMENPDLKNVGSSTGEKNERTSVAGTVRKCWPNRVAKEQISRRLDGNQYLFLPPNRYIFHGAEVYSDSEDDVLSSSSCGSNSDSGTCQSPSLEEPMEDESEIEEFYNGLEDEPDVPERAGGAGFGTDGDDQEAINEAISVKQEVTDMNYPSNKS

SEQ ID NO: 61952 - protein, 271 aa, Homo sapiens
VIAGVVYCQEALRDWGRVTASSTGAMAFLRSMWGVLSALGRSGAELCTGCGSRLRSPFSFVYLPRWFSSVLASCPKKPVSSYLRFSKEQLPIFKAQNPDAKTTELIRRIAQRWRELPDSKKKIYQDAYRAEWQVYKEEISRFKEQLTPSQIMSLEKEIMDKHLKRKAMTKKKELTLLGKPKRPRSAYNVYVAERFQEAKGDSPQEKLKTVKENWKNLSDSEKELYIQHAKEDETRYHNEMKSWEEQMIEVGRKDLLRRTIKKQRKYGAEEC

SEQ ID NO: 61953 - protein, 1059 aa, Homo sapiens
LAGGGAATGPGPGPRPGVAGGVGGARGWDAPGAQWRRRRWRWRRRLQGDELAPRRWEPVEPGRRAEAAAQAERRRQREPERCAPTMAAQGEPGYLAAQSDPGSNSERSTDSPVPGSEDDLVAGATLHSPEWSEERFRVDRKKLEAMLQAAAEGKGRSGEDFFQKIMEETNTQIAWPSKLKIGAKSKKDPHIKVSGKKEDVKEAKEMIMSVLDTKSNRVTLKMDVSHTEHSHVIGKGGNNIKKVMEETGCHIHFPDSNRNNQAEKSNQVSIAGQPAGVESARVRIRELLPLVLMFELPIAGILQPVPDPNSPSIQHISQTYNISVSFKQRSRMYGATVIVRGSQNNTSAVKEGTAMLLEHLAGSLASAIPVSTQLDIAAQHHLFMMGRNGSNIKHIMQRTGAQIHFPDPSNPQKKSTVYLQGTIESVCLARQYLMGCLPLVLMFDMKEEIEVDPQFIAQLMEQLDVFISIKPKPKQPSKSVIVKSVERNALNMYEARKCLLGLESSGVTIATSPSPASCPAGLACPSLDILASAGLGLTGLGLLGPTTLSLNTSTTPNSLLNALNSSVSPLQSPSSGTPSPTLWAPPLANTSSATGFSAIPHLMIPSTAQATLTNILLSGVPTYGHTAPSPPPGLTPVDVHINSMQTEGKKISAALNGHAQSPDIKYGAISTSSLGEKVLSANHGDPSIQTSGSEQTSPKSSPTEGCNDAFVEVGMPRSPSHSGNAGDLKQMMCPSKVSCAKRQTVELLQGTKNSHLHSTDRLLSDPELSATESPLADKKAPGSERAAERAAAAQQNSERAHLAPRSSYVNMQAFDYEQKKLLATKAMLKKPVVTEVRTPTNTWSGLGFSKSMPAETIKELRRANHVSYKPTMTTTYEGSSMSLSRSNSREHLGGGSESDNWRDRNGIGPGSHSEFAASIGSPKRKQNKSTEHYLSSSNYMDCISSLTGSNGCNLNSSFKGSDLPELFSKLGLGKYTDVFQQQEIDLQTFLTLTDQDLKELGITTFGARRKMLLAISELNKNRRKLFESPNARTSFLEGGASGRLPRQYHSDIASVSGRW

SEQ ID NO: 61954 - skipped

SEQ ID NO: 61955 - protein, 298 aa, Homo sapiens
RIASWQNLGAVYCSTVVPSDDVTVVYQNGLPVISVRLPSRRERCQFTLKPISDSVGVFLRQLQEEDRGIDRVAIYSPDGVRVAASTGIDLLLLDDFKLVINDLTYHVRPPKRDLLSHENAATLNDVKTLVQQLYTTLCIEQHQLNKERELIERLEDLKEQLAPLEKVRIEISRKAEKRTTLVLWGGLAYMATQFGILARLTWWEYSWDIMEPVTYFITYGSAMAMYAYFVMTRQEYVYPEARDRQYLLFFHKGAKKSRFDLEKYNQLKDAIAQAEMDLKRLRDPLQVHLPLRQIGEKD

SEQ ID NO: 61956 - protein, 4 aa, Homo sapiens
VHLI

SEQ ID NO: 61957 - protein, 656 aa, Homo sapiens
IEESQAVEAAMANVPWAEVCEKFQAALALSRVELHKNPEKEPYKSKYSARALLEEVKALLGPAPEDEDERPEAEDGPGAGDHALGLPAEVVEPEGPVAQRAVRLAVIEFHLGVNHIDTEELSAGEEHLVKCLRLLRRYRLSHDCISLCIQAQRQGFTMLPRPQVIRLRWPPKVLGLQNNLGILWSEREEIETAQAYLESSEALYNQYMKEVGSPPLDPTERFLPEEEKLTEQERSKRFEKVYTHNLYYLAQVYQHLEMFEKAAHYCHSTLKRQLEHNAYHPIEWAINAATLSQFYINKLCFMEARHCLSAANVIFGQTGKISATEDTPEAEGEVPELYHQRKGEIARCWIKYCLTLMQNAQLSMQDNIGELDLDKQSELRALRKKELDEEESIRKKAVQFGTGELCDAISAVEEKVSYLRPLDFEEARELFLLGQHYVFEAKEFFQIDGYVTDHIEVVQDHSALFKVLAFFETDMERRCKMHKRRIAMLEPLTVDLNPQYYLLVNRQIQFEIAHAYYDMMDLKVAIADRLRDPDSHIVKKINNLNKSALKYYQLFLDSLRDPNKVFPEHIGEDVLRPAMLAKFRVARLYGKIITADPKKELENLATSLEHYKFIVDYCEKHPEAAQEIEVELELSKEMVSLLPTKMERFRTKMALT

SEQ ID NO: 61958 - protein, 5 aa, Homo sapiens
LGMLS

SEQ ID NO: 61959 - protein, 1095 aa, Homo sapiens
IMNVNQSVPPVPPFGQPQPIYPGYHQSSYGGQSGSTAPAIPYGAYNGPVPGYQQTPPQGMSRAPPSSGAPPASTAQAPCGQAAYGQFGQGDVQNGPSSTVQMQRLPGSQPFGSPLAPVGNQPPVLQPYGPPPTSAQVATQLSGMQISGAVAPAPPSSGLGFGPPTSLASASGSFPNSGLYGSYPQGQAPPLSQAQGHPGIQTPQRSAPSQASSFTPPASGGPRLPSMTGPLLPGQSFGGPSVSQPNHVSSPPQALPPGTQMTGPLGPLPPMHSPQQPGYQPQQNGSFGPARGPQSNYGGPYPAAPTFGSQPGPPQPLPPKRLDPDAIPSPIQVIEDDRNNRGTEPFVTGVRGQVPPLVTTNFLVKDQGNASPRYIRCTSYNIPCTSDMAKQAQVPLAAVIKPLARLPPEEASPYVVDHGESGPLRCNRCKAYMCPFMQFIEGGRRFQCCFCSCINDVPPQYFQHLDHTGKRVDAYDRPELSLGSYEFLATVDYCKNNKFPSPPAFIFMIDVSYNAIRTGLVRLLCEELKSLLDFLPREGGAEESAIRVGFVTYNKVLHFYNVKSSLAQPQMMVVSDVADMFVPLLDGFLVNVNESRAVITSLLDQIPEMFADTRETETVFVPVIQAGMEALKAAECAGKLFLFHTSLPIAEAPGKLKNRDDRKLINTDKEKTLFQPQTGAYQTLAKECVAQGCCVDLFLFPNQYVDVATLSVVPQLTGGSVYKYASFQVENDQERFLSDLRRDVQKVVGFDAVMRVRTSTGIRAVDFFGAFYMSNTTDVELAGLDGDKTVTVEFKHDDRLNEESGALLQCALLYTSCAGQRRLRIHNLALNCCTQLADLYRNCETDTLINYMAKFAYRGVLNSPVKAVRDTLITQCAQILACYRKNCASPSSAGQLILPECMKLLPVYLNCVLKSDVLQPGAEVTTDDRAYVRQLVTSMDVTETNVFFYPRLLPLTKSPVESTTEPPAVRASEERLSNGDIYLLENGLNLFLWVGASVQQGVVQSLFSVSSFSQITSGLSVLPVLDNPLSKKVRGLIDSLRAQRSRYMKLTVVKQEDKMEMLFKHFLVEDKSLSGGASYVDFLCHMHKEIRQLLS

SEQ ID NO: 61960 - protein, 414 aa, Homo sapiens
LWWSPGLFPHFPGDSERIECARGACVASRNRRALRDSRTRALLFYGTDFRASAAPLPRLAHQSWALLHEESPLNNFLLSHGPGIRLFNLTSTFSRHSDYPLSLQWLPGTAYLRRPVPPPMERAEWRRRGYAPLLYLQSHCDVPADRDRYVRELMRHIPVDSYGKCLQNRELPTARLQDTATATTEDPELLAFLSRYKFHLALENAICNDYMTEKLWRPMHLGAVPVYRGSPSVRDWMPNNHSVILIDDFESPQKLAEFIDFLDKNDEEYMKYLAYKQPGGITNQFLLDSLKHREWGVNDPLLPNYLNGFECFVCDYELARLDAEKAHAASPGDSPVFEPHIAQPSHMDCPVPTPGFGNVEEIPENDSWKEMWLQDYWQGLDQGEALTAMIHNNETEQTKFWDYLHEIFMKRQHL

SEQ ID NO: 61961 - protein, 10 aa, Homo sapiens
ITTFLKEIWG

SEQ ID NO: 61962 - protein, 85 aa, Homo sapiens
MYKTTPDVIFVFGFRTHFGGGKTTGFGMIYDSLDYAKKNEPKHRLARHGLYEKKKTSRKQRKERKNRMKKVRGTAKANVGAGKKK

SEQ ID NO: 61963 - protein, 1083 aa, Homo sapiens
LDNVHGSRVEPSETARMNSMDRHIQQTNDRLQCIKQHLQNPANFHNAATELLDWCGDPRAFQRPFEQSLMGCLTVVSRVAAQQGFDLDLGYRLLAVCAANRDKFTPKSAALLSSWCEELGRLLLLRHQKSRQSDPPGKLPMQPPLSSMSSMKPTLSHSDGSFPYDSVPWQQNTNQPPGSLSVVTTVWGVTNTSQSQVLGNPMANANNPMNPGGNPMASGMTTSNPGLNSPQFAGQQQQFSAKAGPAQPYIQQSMYGRPNYPGSGGFGASYPGGPNAPAGMGIPPHTRPPADFTQPAAAAAAAAVAAAAATATATATATVAALQETQNKDINQYGPMGPTQAYNSQFMNQPGPRGPASMGGSMNPASMAAGMTPSGMSGPPMGMNQPRPPGISPFGTHGQRMPQQTYPGPRPQSLPIQNIKRPYPGEPNYGNQQYGPNSQFPTQPGQYPAPNPPRPLTSPNYPGQRMPSQPSSGQYPPPTVNMGQYYKPEQFNGQNNTFSGSSYSNYSQGNVNRPPRPVPVANYPHSPVPGNPTPPMTPGSSIPPYLSPSQDVKPPFPPDIKPNMSALPPPPANHNDELRLTFPVRDGVVLEPFRLEHNLAVSNHVFHLRPTVHQTLMWRSDLELQFKCYHHEDRQMNTNWPASVQVSVNATPLTIERGDNKTSHKPLHLKHVCQPGRNTIQITVTACCCSHLFVLQLVHRPSVRSVLQGLLKKRLLPAEHCITKIKRNFSSVAASSGNTTLNGEDGVEQTAIKVSLKCPITFRRIQLPARGHDCKHVQCFDLESYLQLNCERGTWRCPVCNKTALLEGLEVDQYMWGILNAIQHSEFEEVTIDPTCSWRPVPIKSDLHIKDDPDGIPSKRFKTMSPSQMIMPNVMEMIAALGPGPSPYPLPPPPGGTNSNDYSSQGNNYQGHGNFDFPHGNPGGTSMNDFMHGPPQLSHPPDMPNNMAALEKPLSHPMQETMPHAGSSDQPHPSIQQGLHVPHPSSQSGPPLHHSGAPPPPPSQPPRQPPQAAPSSHPHSDLTFNPSSALEGQAGAQGASDMPEPSLDLLPELTNPDELLSYLDPPDLPSNSNDDLLSLFENN

SEQ ID NO: 61964 - protein, 195 aa, Homo sapiens
LLSVPRSVPLRLPAARACSKGSGDPSSSSSSGNPLVYLDVDANGKPLGRVVLELKADVVPKTAENFRALCTGEKGFGYKGSTFHRVIPSFMCQAGDFTNHNGTGGKSIYGSRFPDENFTLKHVGPGVLSMANAGPNTNGSQFFICTIKTDWLDGKHVVFGHVKEGMDVVKKIESFGSKSGRTSKKIVITDCGQLS

SEQ ID NO: 61965 - protein, 139 aa, Homo sapiens
MFNIRNIGKTLVTRTQGTKIASDGRVFEVSLADLQNDEVAFRKFKLITEDVQGKNCLTNFHGVDLTSDKMCSMVKKWQTMIEAHVDVKTTDGYLLRLFCVGFTKKRNNQIRKTSYAQHQQVLRNPEDLLCSVPAKSGRR

SEQ ID NO: 61966 - protein, 99 aa, Homo sapiens
KKMMEIMTREVQTNDLKEVVNKLIPDSIGKDVEKACQSIYPLHDVFVRKVKMLKKPKFELGKLMELHGEGCSSGKATGDETGVKVERADGYELPVQESV

SEQ ID NO: 61967 - protein, 492 aa, Homo sapiens
LTVPTMLRAPGCLLRTSVAPAAALAAALLSSLARCSLLEPRDPVASSLSPYFGTKTRYEDVNPVLLSGPEAPWRDPELLEGTCTPVQLVALIRHGTRYPTVKQIRKLRQLHGLLQARGSRDGGASSTGSRDLGAALADWPLWYADWMDGQLVEKGRQDMRQLALRLASLFPALFSRENYGRLRLITSSKHRCMDSSAAFLQGLWQHYHPGLPPPDVADMEFGPPTVNDKLMRFFDHCEKFLTEVEKNATALYHVEAFKTGPEMQNILKKVAATLQVPVNDLNADLIQVAFFTCSFDLAIKGVKSPWCDVFDIDDAKVLEYLNDLKQYWKRGYGYTINSRSSCTLFQDIFQHLDKAVEQKQRSQPISSPVILQFGHAETLLPLLSLMGYFKDKEPLTAYNYKKQMHRKFRSGLIVPYASNLIFVLYHCENAKTPKEQFRVQMLLNEKVLPLAYSQETVSFYEDLKNHYKDILQSCQTSEECELARANSTSDEL

SEQ ID NO: 61968 - protein, 249 aa, Homo sapiens
VRPCRCRGSTKWVHQACLQRWVDEKQRGNSTARVACPQCNAEYLIVFPKLGPVVYVLDLADRLISKACPFAAAGIMVGSIYWTAVTYGAVTVMQVVGHKEGLDVMERADPLFLLIGLPTIPVMLILGKMIRWEDYVLRLWRKYSNKLQILNSIFPGIGCPVPRIPAEANPLADHVSATRILCGALVFPTIATIVGKLMFSSVNSNLQRTILGGIAFVAIKGAFKVYFKQQQYLRQAHRKILNYPEQEEA

SEQ ID NO: 61969 - protein, 546 aa, Homo sapiens
LGTPESWSLPFYCLQHGGGGGWHIQGPGPVLNLPCAAAAPPVARAPEAAGGGSRSEDYSSSPHSAAAAARPLAAEEKQAQSLQPSSSRRSSHYPAAVQSQAAAERGASATAKSRAISILQKKPRHQQLLPSLSSFFFSHRLPDMTAIIKEIVSRNKRRYQEDGFDLDLTYIYPNIIAMGFPAERLEGVYRNNIDDVVRFLDSKHKNHYKIYNLCAERHYDTAKFNCRVAQYPFEDHNPPQLELIKPFCEDLDQWLSEDDNHVAAIHCKAGKGRTGVMICAYLLHRGKFLKAQEALDFYGEVRTRDKKGVTIPSQRRYVYYYSYLLKNHLDYRPVALLFHKMMFETIPMFSGGTCNPQFVVCQLKVKIYSSNSGPTRREDKFMYFEFPQPLPVCGDIKVEFFHKQNKMLKKDKMFHFWVNTFFIPGPEETSEKVENGSLCDQEIDSICSIERADNDKEYLVLTLTKNDLDKANKDKANRYFSPNFKVKLYFTKTVEEPSNPEASSSTSVTPDVSDNEPDHYRYSDTTDSDPENEPFDEDQHTQITKV

SEQ ID NO: 61970 - protein, 1113 aa, Homo sapiens
TAGRKSTPLHFAAGFGRKDVVEYLLQNGANVQARDDGGLIPLHNACSFGHAEVVNLLLRHGADPNARDNWNYTPLHEAAIKGKIDVCIVLLQHGAEPTIRNTDGRTALDLADPSAKAVLTGEYKKDELLESARSGNEEKMMALLTPLNVNCHASDGRKSTPLHLAAGYNRVKIVQLLLQHGADVHAKDKGDLVPLHNACSYGHYEVTELLVKHGACVNAMDLWQFTPLHEAASKNRVEVCSLLLSYGADPTLLNCHNKSAIDLAPTPQLKERLAYEFKGHSLLQAAREADVTRIKKHLSLEMVNFKHPQTHETALHCAAASPYPKRKQICELLLRKGANINEKTKEFLTPLHVASEKAHNDVVEVVVKHEAKVNALDNLGQTSLHRAAYCGHLQTCRLLLSYGCDPNIISLQGFTALQMGNENVQQLLQEGISLGNSEADRQLLEAAKAGDVETVKKLCTVQSVNCRDIEGRQSTPLHFAAGYNRVSVVEYLLQHGADVHAKDKGGLVPLHNACSYGHYEVAELLVKHGAVVNVADLWKFTPLHEAAAKGKYEICKLLLQHGADPTKKNRDGNTPLDLVKDGDTDIQDLLRGDAALLDAAKKGCLARVKKLSSPDNVNCRDTQGRHSTPLHLAAGYNNLEVAEYLLQHGADVNAQDKGGLIPLHNAASYGHVDVAALLIKYNACVNATDKWAFTPLHEAAQKGRTQLCALLLAHGADPTLKNQEGQTPLDLVSADDVSALLTAAMPPSALPSCYKPQVLNGVRSPGATADALSSGPSSPSSLSAASSLDNLSGSFSELSSVVSSSGTEGASSLEKKEVPGVDFSITQFVRNLGLEHLMDIFEREQITLDVLVEMGHKELKEIGINAYGHRHKLIKGVERLISGQQGLNPYLTLNTSGSGTILIDLSPDDKEFQSVEEEMQSTVREHRDGGHAGGIFNRYNILKIQKVCNKKLWERYTHRRKEVSEENHNHANERMLFHGSPFVNAIIHKGFDERHAYIGGMFGAGIYFAENSSKSNQYVYGIGGGTGCPVHKDRSCYICHRQLLFCRVTLGKSFLQFSAMKMAHSPPGHHSVTGRPSVNGLALAEYVIYRGEQAYPEYLITYQIMRPEGMVDG

SEQ ID NO: 61971 - protein, 419 aa, Homo sapiens
LLDRARGAAAQGQTQTVAAQAQALAAQAAAAAHAAQAHRERNEFPEDPEFEAVVRQAELAIERCIFPERIYQGSSGSYFVKDPQGRIIAVFKPKNEEPYGHLNPKWTKWLQKLCCPCCFGRDCLVLNQGYLSEAGASLVDQKLELNIVPRTKVVYLASETFNYSAIDRVKSRGKRLALEKVPKVGQRFNRIGLPPKVGSFQLFVEGYKDADYWLRRFEAEPLPENTNRQLLLQFERLVVLDYIIRNTDRGNDNWLIKYDCPMDSSSSRDTDWVVVKEPVIKVAAIDNGLAFPLKHPDSWRAYPFYWAWLPQAKVPFSQEIKDLILPKISDPNFVKDLEEDLYELFKKDPGFDRGQFHKQIAVMRGQILNLTQALKDNKSPLHLVQMPPVIVETARSHQRSSSESYTQSFQSRKPFFSWW

SEQ ID NO: 61972 - protein, 281 aa, Homo sapiens
IPPSYADLGKAARDIFNKGFGFGLVKLDVKTKSCSGVEFSTSGSSNTDTGKVTGTLETKYKWCEYGLTFTEKWNTDNTLGTEIAIEDQICQGLKLTFDTTFSPNTGKKSGKIKSSYKRECINLGCDVDFDFAGPAIHGSAVFGYEGWLAGYQMTFDSAKSKLTRNNFAVGYRTGDFQLHTNVNDGTEFGGSIYQKVCEDLDTSVNLAWTSGTNCTRFGIAAKYQLDPTASISAKVNNSSLIGVGYTQTLRPGVKLTLSALVDGKSINAGGHKVGLALELEA

SEQ ID NO: 61973 - protein, 296 aa, Homo sapiens
LVWTIIIILSCCCVCHHRRAKHRLQAQQRQHEINLIAYREAHNYSALPFYFRFLPNYLLPPYEEVVNRPPTPPPPYSAFQLQQQQLLPPQCGPAGGSPPGIDPTRGSQGAQSSPLSEPSRSSTRPPSIADPDPSDLPVDRAATKAPGMEPSGSVAGLGELDPGAFLDKDAECREELLKDDSSEHGAPDSKEKTPGRHRRFTGDSGIEVCVCNRGHHDDDLKEFNTLIDDALDGPLDFCDSCHVRPPGDEEEGLCQSSEEQAREPGHPHLPRPPACLLLNTINEQDSPNSQSSSSPS

SEQ ID NO: 61974 - protein, 39 aa, Homo sapiens
LTLTELHDGLPDETANLLNEQNCVTHSKANHSLHNEGAI

SEQ ID NO: 61975 - protein, 38 aa, Homo sapiens
MEHLFWSFILYMTYFILFAHFFCQTYIRPKVKAKTKSQ

SEQ ID NO: 61976 - protein, 1860 aa, Homo sapiens
KMVDKNIYIIQGEINIVVGAIKRNARWSTHTPLDEERDPLLHSFGHLKEVLNSITELSEIEPNVFLRPFLEVIRSEDTTGPITGLALTSVNKFLSYALIDPTHEGTAEGMENMADAVTHARFVGTDPASDEVVLMKILQVLRTLLLTPVGAHLTNESVCEIMQSCFRICFEMRLSELLRKSAEHTLVDMVQLLFTRLPQFKEEPKNYVGTNMKKLKMRAGGMSDSSKWKKQKRSPRPPRHMTKVTPGSELPTPNGTTLSSNLTGGMPFIDVPTPISSASSEAASAVVSPSTDSGLEFSSQTTSKEDLTDLEQPGSPGYSTATEPGSSELGVPEQPDLQEGTHVEKSQSASVESIPEVLEECTSPADHSDSASVHDMDYVNPRGVRFTQSSQKEGTALVPYGLPCIRELFRFLISLTNPHDRHNSEVMIHMGLHLLTVALESAPVAQCQTLLGLIKDEMCRHLFQLLSIERLNLYAASLRVCFLLFESMREHLKFQMEMYIKKLMEIITVENPKMPYEMKEMALEAIVQLWRIPSFVTELYINYDCDYYCSNLFEELTKLLSKNAFPVSGQLYTTHLLSLDALLTVIDSTEAHCQAKVLNSLTQQEKKETARPSCEIVDGTREASNTERTASDGKAVGMASDIPGLHLPGGGRLPPEHGKSGCSDLEEAVDSGADKKFARKPPRFSCLLPDPRELIEIKNKKKLLITGTEQFNQKPKKGIQFLQEKGLLTIPMDNTEVAQWLRENPRLDKKMIGEFVSDRKNIDLLESFVSTFSFQGLRLDEALRLYLEAFRLPGEAPVIQRLLEAFTERWMNCNGSPFANSDACFSLAYAVIMLNTDQHNHNVRKQNAPMTLEEFRKNLKGVNGGKDFEQDILEDMYHAIKNEEIVMPEEQTGLVRENYVWNVLLHRGATPEGIFLRVPTASYDLDLFTMTWGPTIAALSYVFDKSLEETIIQKAISGFRKCAMISAHYGLSDVFDNLIISLCKFTALSSESIENLPSVFGSNPKAHIAAKTVFHLAHRHGDILREGWKNIMEAMLQLFRAQLLPKAMIEVEDFVDPNGKISLQREETPSNRGESTVLSFVSWLTLSGPEQSSVRGPSTENQEAKRVALECIKQCDPEKMITESKFLQLESLQELMKALVSVTPDEETYDEEDAAFCLEMLLRIVLENRDRVGCVWQTVRDHLYHLCVQAQDFCFLVERAVVGLLRLAIRLLRREEISAQVLLSLRILLLMKPSVLSRVSHQVAYGLHELLKTNAANIHSGDDWATLFTLLECIGSGVKPPAALQATARADAPDAGAQSDSELPSYHQNDVSLDRGYTSDSEVYTDHGRPGKIHRSATDADVVNSGWLVVGKDDVDNSKPGPSRPGPSPLINQYSLTVGLDLGPHDTKSLLKCVESLSFIVRDAAHITPDNFELCVKTLRIFVEASLNGGCKSQEKRGKSHKYDSKGNRFKKKSKEGSMLRRPRTSSQHASRGGQSDDDEDEGVPASYHTVSLQVSQDLLDLMHTLHTRAASIYSSWAEEQRHLETGGQKIEADSRTLWAHCWCPLLQGIACLCCDARRQVRMQALTYLQRALLVHDLQKLDALEWESCFNKVLFPLLTKLLENISPADVGGMEETRMRASTLLSKVFLQHLSPLLSLSTFAALWLTILDFMDKYMHAGSSDLLSEAIPESLKNMLLVMDTAEIFHSADARGGGPSALWEITWERIDCFLPHLRDELFKQTVIQDPMPMEPQGQKPLASAHLTSAAGDTRTPGHPPPPEIPSELGACDFEKPESPRAASSSSPGSPVASSPSRLSPTPDGPPPLAQPPLILQPLASPLQVGVPPMTLPIILNPALIEATSPVPLLATPRPTDPIPTSEVN

SEQ ID NO: 61977 - protein, 42 aa, Homo sapiens
RPELLESADKFYGVKFRNKVSHIDVITAEMAKDFVEDDTTHG

SEQ ID NO: 61978 - protein, 8 aa, Homo sapiens
LPFIVFSP

SEQ ID NO: 61979 - protein, 1171 aa, Homo sapiens
IDTKSEEELEDYMVEIDILASCDHPNIVKLLDAFYYENNLWILIEFCAGGAVDAVMLELERPLTESQIQVVCKQTLDALNYLHDNKIIHRDLKAGNILFTLDGDIKLADFGVSAKNTRTIQRRDSFIGTPYWMAPEVVMCETSKDRPYDYKADVWSLGITLIEMAEIEPPHHELNPMRVLLKIAKSEPPTLAQPSRWSSNFKDFLKKCLEKNVDARWTTSQLLQHPFVTVDSNKPIRELIAEAKAEVTEEVEDGKEEDEEEETENSLPIPASKRASSDLSIASSEEDKLSQNACILESVSEKTERSNSEDKLNSKILNEKPTTDEPEKAVEDINEHITDAQLEAMTELHDRTAVIKENEREKRPKLENLPDTEDQETVDINSVSEGKENNIMITLETNIEHNLKSEEEKDQEKQQMFENKLIKSEEIKDTILQTVDLVSQETGEKEANIQAVDSEVGLTKEDTQEKLGEDDKTQKDVISNTSDVIGTCEAADVAQKVDEDSAEDTQSNDGKEVVEVGQKLINKPMVGPEAGGTKEVPIKEIVEMNEIEEGKNKEQAINSSENIMDINEEPGTTEGEEITESSSTEEMEVRSVVADTDQKALGSEVQDASKVTTQIDKEKKEIPVSIKKEPEVTVVSQPTEPQPVLIPSININSDSGENKEEIGSLSKTETILPPESENPKENDNDSGTGSTADTSSIDLNLSISSFLSKTKDSGSISLQETRRQKKTLKKTRKFIVDGVEVSVTTSKIVTDSDSKTEELRFLRRQELRELRFLQKEEQRAQQQLNSKLQQQREQIFRRFEQEMMSKKRQYDQEIENLEKQQKQTIERLEQEHTNRLRDEAKRIKGEQEKELSKFQNMLKNRKKEVINEVEKAPKELRKELMKRRKEELAQSQHAQEQEFVQKQQQELDGSLKKIIQQQKAELANIERECLNNKQQLMRAREAAIWELEERHLQEKHQLLKQQLKDQYFMQRHQLLKRHEKETEQMQRYNQRLIEELKNRQTQERARLPKIQRSEAKTRMAMFKKSLRINSTATPDQDRDKIKQFAAQEEKRQKNERMAQHQKHENQMRDLQLQCEANVRELHQLQNEKCHLLVEHETQKLKELDEEHSQELKEWREKLRPRKKTLEEEFARKLQEQEVFFKMTGESECLNPSTQSRISKFYPIPSLHSTGS

SEQ ID NO: 61980 - protein, 5 aa, Homo sapiens
KISIR

SEQ ID NO: 61981 - protein, 56 aa, Homo sapiens
TLTAVGCSVPRTLFKFFFWFGYCNSSLNPVIYTIFNHDFRRAFKKILCRGDRKRIV

SEQ ID NO: 61982 - protein, 228 aa, Homo sapiens
IKVVDPKTKNCTTLAGTGDTNNVTSSSFTESTFNEPGGLCIGENGELLYVADTNNHQIKVMDLETKMVSVLPIFRSENAVVDGPFLVEKQKTLPKLPKSAPSIRLSPVTACAGQTLQFKLRLDLPSGSKLTEGVSSCWFLTAEGNEWLLQGQIAAGDIENISSQPTISLQIPDDCLSLEAIVSVSVFLYYCSADSSACMMKAILFSQPLQITDTQQGCIAPVELRYVF

SEQ ID NO: 61983 - protein, 84 aa, Homo sapiens
LEHAFEKNHYVVGAERKQLAHSLSLTETQVKVWFQNRRTKFKRQKLEEEGSDSQQKKKGTHHINRWRIATKQASPEEIDVTSDD

SEQ ID NO: 61984 - protein, 53 aa, Homo sapiens
IPPPLISKRLMVIVEFTKSNTYYSALREAAAANAAAAAAAAAAAAAAVGLRLQ

SEQ ID NO: 61985 - protein, 103 aa, Homo sapiens
RAHLLDNTERLERSSRRLEAGYQIAVETEQIGQEMLENLSHDREKIQRARERLRETDANLGKSSRILTGMLRRIIQNRILLVILGIIVVITILMAITFSVRRH

SEQ ID NO: 61986 - protein, 650 aa, Homo sapiens
LGGQNFLGVIFFGFSSSFIFLPKLLLVGEKKMPQLNGGGGDDLGANDELISFKDEGEQEEKSSENSSAERDLADVKSSLVNESETNQNSSSDSEAERRPPPRSESFRDKSRESLEEAAKRQDGGLFKGPPYPGYPFIMIPDLTSPYLPNGSLSPTARTLHFQSGSTHYSAYKTIEHQIAVQYLQMKWPLLDVQAGSLQSRQALKDARSPSPAHIVSNKVPVVQHPHHVHPLTPLITYSNEHFTPGNPPPHLPADVDPKTGIPRPPHPPDISPYYPLSPGTVGQIPHPLGWLVPQQGQPVYPITTGGFRHPYPTALTVNASMSRFPPHMVPPHHTLHTTGIPHPAIVTPTVKQESSQSDVGSLHSSKHQDSKKEEEKKKPHIKKPLNAFMLYMKEMRAKVVAECTLKESAAINQILGRRWHALSREEQAKYYELARKERQLHMQLYPGWSARDNYGKKKKRKRDKQPGETNEHSECFLNPCLSLPPITDLSAPKKCRARFGLDQQNNWCGPCRRKKKCVRYIQGEGSCLSPPSSDGSLLDSPPPSPNLLGSPPRDAKSQTEQTQPLSLSLKPDPLAHLSMMPPPPALLLAEATHKASALCPNGALDLPPAALQPAAPSSSIAQPSTSSLHSHSSLAGTQPQPLSLVTKSLE

SEQ ID NO: 61987 - protein, 71 aa, Homo sapiens
KQTLKIGHGGTLDSAARGVLVVGIGSGTKMLTSMLSGSKRYTAIGELGKATDTLDSTGRVTEEKPYGMKLI

SEQ ID NO: 61988 - protein, 358 aa, Homo sapiens
KMAAAEVADTQLMLGVGLIEKDTNGEVLWVWCYPSTTATLRNLLLRKCCLTDENKLLHPFVFGQYRRTWFYITTIEVPDSSILKKVTHFSIVLTAKDFNPEKYAAFTRILCRMYLKHGSPVKMMESYIAVLTKGICQSEENGSFLSKDFDARKAYLAGSIKDIVSQFGMETVILHTALMLKKRIVVYHPKIEAVQEFTRTLPALVWHRQDWTILHSYVHLNADELEALQMCTGYVAGFVDLEVSNRPDLYDVFVNLAESEITIAPLAKEAMAMGKLHKEMGQLIVQSAEDPEKSESHVIQDIALKTREIFTNLAPFSEVSADGEKRVLNLEALKQKRFPPATENFLYHLAAAEQMLKI

SEQ ID NO: 61989 - protein, 5 aa, Homo sapiens
LSGTG

SEQ ID NO: 61990 - protein, 310 aa, Homo sapiens
RPIPRLSQSDPRAEELIENEEPVVLTDTNLVYPALKWDLEYLQENIGNGDFSVYSASTHKFLYYDEKKMANFQNFKPRSNREEMKFHEFVEKLQDIQQRGGEERLYLQQTLNDTVGRKIVMDFLGFNWNWINKQQGKRGWGQLTSNLLLIGMEGNVTPAHYDEQQNFFAQIKGYKRCILFPPDQFECLYPYPVHHPCDRQSQVDFDNPDYERFPNFQNVVGYETVVGPGDVLYIPMYWWHHIESLLNGGITITVNFWYKGAPTPKRIEYPLKAHQKVAIMRNIEKMLGEALGNPQEVGPLLNTMIKGRYN

SEQ ID NO: 61991 - protein, 47 aa, Homo sapiens
MLDVGPYMKALEYACGIKAEVVGKPSPEFFKSALQAIGVEAHQLLSV

SEQ ID NO: 61992 - protein, 40 aa, Homo sapiens
LQVRTGKFRPSDEHHPEVKADGYVDNLAEAVDLLLQHADK

SEQ ID NO: 61993 - protein, 155 aa, Homo sapiens
LQQAVLSRQMPSESLDPAFSPRMPSSGFAAEGRSTLGDAEASDPPPPYSDFHPNNQESTLSHSRMERSVFMPRPQAVGSSNYASTSAGLKYPGSGADLPPPQRAAGDSGEDSDDSDYENLIDPTEPSNSEYSHSKDSRPMAHPDEDPRNTQTSQI

SEQ ID NO: 61994 - protein, 57 aa, Homo sapiens
VHISGQHLVAVEEDAESEDEEEESAKLLSISGKQSVPGGGSKVPQKQVKLAADEDDE

SEQ ID NO: 61995 - protein, 31 aa, Homo sapiens
IMVIGVPNVGKSSLINSLRRQHLRKGTGACG

SEQ ID NO: 61996 - protein, 49 aa, Homo sapiens
KEPLRVIPLKEVHKVQECKQSDIMMRDNLFEIVTTSRTFYVQVRCLFGN

SEQ ID NO: 61997 - protein, 68 aa, Homo sapiens
IPPVLQNPNTLSVLPTQPPPPHIPQPLAATLWSQPLPWRSEDFTSLLPRSSQGTSRSRLSLQENQLPK

SEQ ID NO: 61998 - protein, 405 aa, Homo sapiens
IPPHVSKSSQSEALLNITNNGIHFAPLQTFTDEEMMIKSSVKKFAQEQIAPLVSTMDENSKMEKSVIQGLFQQGLMGIEVDPEYGGTGASFLSTVLVIEELAKVDASVAVFCEIQNTLINTLIRKHGTEEQKATYLPQLTTEKVGSFCLSEAGAGSDSFALKTRADKEGDYYVLNGSKMWISSAEHAGLFLVMANVDPTIGYKGITSFLVDRDTPGLHIGKPENKLGLRASSTCPLTFENVKVPEANILGQIGHGYKYAIGSLNEGRIGIAAQMLGLAQGCFDYTIPYIKERIQFGKRLFDFQGLQHQVAHVATQLEAARLLTYNAARLLEAGKPFIKEASMAKYYASEIAGQTTSKCIEWMGGVGYTKDYPVEKYFRDAKIGTIYEGASNIQLNTIAKHIDAEY

SEQ ID NO: 61999 - protein, 602 aa, Homo sapiens
LPENSETGGNESQPDSQEDPREVLKKTLEFCLSRENLASDMYLISQMDSDQYVPITTVANLDHIKKLSTDVDLIVEVLRSLPLVQVDEKGEKVRPNQNRCIVILREISESTPVEEVEALFKGDNLPKFINCEFAYNDNWFITFETEADAQQAYKYLREEVKTFQGKPIKARIKAKAIAINTFLPKNGFRPLDVSLYAQQRYATSFYFPPMYSPQQQFPLYSLITPQTWSATHSYLDPPLVTPFPNTGFINGFTSPAFKPAASPLTSLRQYPPRSRNPSKSHLRHAIPSAERGPGLLESPSIFNFTADRLINGVRSPQTRQAGQTRTRIQNPSAYAKREAGPGRVEPGSLESSPGLGRGRKNSFGYRKKREEKFTSSQTQSPTPPKPPSPSFELGLSSFPPLPGAAGNLKTEDLFENRLSSLIIGPSKERTLSADASVNTLPVVVSREPSVPASCAVSATYERSPSPAHLPDDPKVAEKQRETHSVDRLPSALTATACKSVQVNGAATELRKPSYAEICQRTSKEPPSSPLQPQKEQKPNTVGCGKEEKKLAEPAERYREPPALKSTPGAPRDQRRPAGGRPSPSAMGKRLSREQSTPPKSPQ

SEQ ID NO: 62000 - protein, 325 aa, Homo sapiens
LGHLGRPSAGAVVAHPTSGTISSASFHPQQFQYTLDNNVLTLEQRKFYEENGFLVIKNLVPDADIQRFRNEFEKICRKEVKPLGLTVMRDVTISKSEYAPSEKMITKVQDFQEDKELFRYCTLPEILKYVECFTGPNIMAMHTMLINKPPDSGKKTSRHPLHQDLHYFPFRPSDLIVCAWTAMEHISRNNGCLVVLPGTHKGSLKPHDYPKWEGGVNKMFHGIQDYEENKARVHLVMEKGDTVFFHPLLIHGSGQNKTQGFRKAISCHFASADCHYIDVKGTSQENIEKEVVGIAHKFFGAENSVNLKDIWMFRARLVKGERTNL

SEQ ID NO: 62001 - protein, 450 aa, Homo sapiens
KKKQKRKKEKPNSGGTKSDSASDSQEIKIQQPSKNPSVPMQKLQDIQRAMELLSACQGPARNIDEAAKHRYQFWDTQPVPKLDEVITSHGAIEPDKDNVRQEPYSLPQGFMWDTLDLSDAEVLKELYTLLNENYVEDDDNMFRFDYSPEFLLWALRPPGWLLQWHCGVRVSSNKKLVGFISAIPANIRIYDSVKKMVEINFLCVHKKLRSKRVAPVLIREITRRVNLEGIFQAVYTAGVVLPKPIATCRYWHRSLNPRKLVEVKFSHLSRNMTLQRTMKLYRLPDVTKTSGLRPMEPKDIKSVRELINTYLKQFHLAPVMDEEEVAHWFLPREHIIDTFVVESPNGKLTDFLSFYTLPSTVMHHPAHKSLKAAYSFYNIHTETPLLDLMSDALILAKSKGFDVFNALDLMENKTFLEKLKFGIGDGNLQYYLYNWRCPGTDSEKVGLVLQ

SEQ ID NO: 62002 - protein, 37 aa, Homo sapiens
LMLSGNLIKKELCLYYSSSRKVTYHMFRTKVHFYVEL

SEQ ID NO: 62003 - protein, 523 aa, Homo sapiens
LWLLLLLLAAVAPARGWESGDLELFDLVEEVQLNFYQFLGVQQDASSADIRKAYRKLSLTLHPDKNKDENAETQFRQLVAIYEVLKDDERRQRYDDILINGLPDWRQPVFYYRRVRKMSNAELALLLFIILTVGHYAVVWSIYLEKQLDELLSRKKREKKKKTGSKSVDVSKLGASEKNERLLMKPQWHDLLPCKLGIWFCLTLKALPHLIQDAGQFYAKYKETRLKEKEDALTRTELETLQKQKKVKKPKPEFPVYTPLETTYIQSYDHGTSIEEIEEQMDDWLENRNRTQKKQAPEWTEEDLSQLTRSMVKFPGGTPGRWEKIAHELGRSVTDVTTKAKQLKDSVTCSPGMVRLSELKSTVQNSRPIKTATTLPDDMITQREDAEGVAAEEEQEGDSGEQETGATDARPRRRKPARLLEATAKPEPEEKSRAKRQKDFDIAEQNESSDEESLRKERARSAEEPWTQNQQKLLELALQQYPRGSSDRWDKIARCVPSKSKEDCIARYKLLVELVQKKKQAKS

SEQ ID NO: 62004 - protein, 430 aa, Homo sapiens
KSSPGLSDTIFCRWTQGFVFSESEGSALEQFEGGPCAVIAPVQAFLLKKLLFSSEKSSWRDCSEEEQKELLCHTLCDILESACCDHSGSYCLVSWLRGKTTEETASISGSPAESSCQVEHSSALAVEELGFERFHALIQKRSFRSLPELKDAVLDQYSMWGNKFGVLLFLYSVLLTKGIENIKNEIEDASEPLIDPVYGHGSQSLINLLLTGHAVSNVWDGDRECSGMKLLGIHEQAAVGFLTLMEALRYCKVGSYLKSPKFPIWIVGSETHLTVFFAKDMALVAPEAPSEQARRVFQTYDPEDNGFIPDSLLEDVMKALDLVSDPEYINLMKNKLDPEGLGIILLGPFLQEFFPDQGSSGPESFTVYHYNGLKQSNYNEKVMYVEGTAVVMGFEDPMLQTDDTPIKRCLQTKWPYIELLWTTDRSPSLN

SEQ ID NO: 62005 - protein, 32 aa, Homo sapiens
VLGASADLAASVSLTREEAMQRGGKWQSCRCY

SEQ ID NO: 62006 - protein, 32 aa, Homo sapiens
VKENSCESSQSRPCLLHYQMLKFFKNQSFGGI

SEQ ID NO: 62007 - protein, 70 aa, Homo sapiens
VEDVLAKLCKTIYPLADLLARPLPEGVDPLKLEIYLTDEDFEFALDMTRDEYNALPAWKQVNLKKAKGLF

SEQ ID NO: 62008 - protein, 574 aa, Homo sapiens
LTRLNLCARRRTRVQRPIVRLLSCPGTVAKDLRRDEQPSGSVETGFEDKIPKRRFSEMQNERREQAQRTVLIHCPEKISENKFLKYLSQFGPINNHFFYESFGLYAVVEFCQKESIGSLQNGTHTPSTAMETAIPFRSRFFNLKLKNQTSERSRVRSSNQLPRSNKQLFELLCYAESIDDQLNTLLKEFQLTEENTKLRYLTCSLIEDMAAAYFPDCIVRPFGSSVNTFGKLGCDLDMFLDLDETRNLSAHKISGNFLMEFQVKNVPSERIATQKILSVLGECLDHFGPGCVGVQKILNARCPLVRFSHQASGFQCDLTTNNRIALTSSELLYIYGALDSRVRALVFSVRCWARAHSLTSSIPGAWITNFSLTMMVIFFLQRRSPPILPTLDSLKTLADAEDKCVIEGNNCTFVRDLSRIKPSQNTETLELLLKEFFEYFGNFAFDKNSINIRQGREQNKPDSSPLYIQNPFETSLNISKNVSQSQLQKFVDLARESAWILQQEDTDRPSISSNRPWGLVSLLLPSAPNRKSFTKKKSNKFAIETVKNLLESLKGNRTENFTKTSGKRTISTQT

SEQ ID NO: 62009 - protein, 11 aa, Homo sapiens
MELTTNFMQEQ

SEQ ID NO: 62010 - protein, 7 aa, Homo sapiens
KKRPKKK

SEQ ID NO: 62011 - protein, 82 aa, Homo sapiens
LMRLQEDMQNVLQRLQKLETLTALQAKSSTSTLQTAPQPTSQRPSWWPFEMSPGVLTFAIIWPFIAQWLVYLYYQRRRRKLN

SEQ ID NO: 62012 - protein, 47 aa, Homo sapiens
VAISTSTVLLCGLSAVSLLACYLKSRASVCSCHPRSAGHTCSVGSVC

SEQ ID NO: 62013 - protein, 790 aa, Homo sapiens
TDPVIGPSFSPFPPSLPPLSRRGAAAALDFAVFPRGDRFQHYTCTMSLKPRVVDFDETWNKLLTTIKAVVMLEYVERATWNDRFSDIYALCVAYPEPLGERLYTETKIFLENHVRHLHKRVLESEEQVLVMYHRYWEEYSKGADYMDCLYRYLNTQFIKKNKLTEADLQYGYGGVDMNEPLMEIGELALDMWRKLMVEPLQAILIRMLLREIKNDRGGEDPNQKVIHGVINSFVHVEQYKKKFPLKFYQEIFESPFLTETGEYYKQEASNLLQESNCSQYMEKVLGRLKDEEIRCRKYLHPSSYTKVIHECQQRMVADHLQFLHAECHNIIRQEKKNDMANMYVLLRAVSTGLPHMIQELQNHIHDEGLRATSNLTQENMPTLFVESVLEVHGKFVQLINTVLNGDQHFMSALDKALTSVVNYREPKSVCKAPELLAKYCDNLLKKSAKGMTENEVEDRLTSFITVFKYIDDKDVFQKFYARMLAKRLIHGLSMSMDSEEAMINKLKQACGYEFTSKLHRMYTDMSVSADLNNKFNNFIKNQDTVIDLGISFQIYVLQAGAWPLTQAPSSTFAIPQELEKSVQMFELFYSQHFSGRKLTWLHYLCTGEVKMNYLGKPYVAMVTTYQMAVLLAFNNSETVSYKELQDSTQMNEKELTKTIKSLLDVKMINHDSEKEDIDAESSFSLNMNFSSKRTKFKITTSMQKDTPQEMEQTRSAVDEDRKMYLQAAIVRIMKARKVLRHNALIQEVISQSRARFNPSISMIKKCIEVLIDKQYIERSQASADEYSYVA

SEQ ID NO: 62014 - protein, 424 aa, Homo sapiens
KYLKGKVVTKEKIQEAKDVYKEHFQDDVVNEKGWNYILEKYDGHLPIEIKAVPEGFVIPRGNVLFTVENTDPECYWLTNWIETILVQSWYPITVATNSREQKKILAKYLLETSGNLDGLEYKLHDFGYRGVSSQETAGIGASAHLVNFKGTDTVAGLALNKKYYGTKDPVPGYSVPAAEHSTITAWGKDHEKDAFEHIVTQFSSVPVSVVSNSYDIYNACEKIWGEDLRHLIVSRSTQAPLIIRPDSGNPLDTVLKVLEILGKKFPVTENSKGYKLLPPYLRVIQGDGVDINTLQEIVEGMKQKMWSIENIAFGSGGGLLQKLTRDLLNCSFKCSYVVTNGLGINVFKDPVADPNKRSKKGRLSLHRTPAGNFVTLEEGKGDLEEYGQDLLHTVFKNGKVTKSYSFDEIRKNAQLNIELEAAHH

SEQ ID NO: 62015 - protein, 436 aa, Homo sapiens
LQEPIVLTKWRHSTIVLDTNDKESPTASKPCFPENESSPSSPKHQDTASSPKDQEKYGLLNVTKIAENGKKVRKNWLSSWAVLQGSSLLFTKTQGSSTSWFGSNQSKPEFTVDLKGATIEMASKDKSSKKNVFELKTRQGTELLIQSDNDTVINDWFKVLSSTINNQAVETDEGIEEEIPDSPGIEKHDKEKEQKDPKKLRSFKVSSIDSSEQKKTKKNLKKFLTRRPTLQAVREKGYIKDQVFGSNLANLCQRENGTVPKFVKLCIEHVEEHGLDIDGIYRVSGNLAVIQKLRFAVNHDEKLDLNDSKWEDIHVITGALKMFFRELPEPLFTFNHFNDFVNAIKQEPRQRVAAVKDLIRQLPKPNQDTMQILFRHLRRVIENGEKNRMTYQSIAIVFGPTLLKPEKETGNIAVHTVYQNQIVELILLELSSIFGR

SEQ ID NO: 62016 - protein, 4 aa, Homo sapiens
MRGD

SEQ ID NO: 62017 - protein, 23 aa, Homo sapiens
KKNGGPKAAKKKKWHLQDLQLGD

SEQ ID NO: 62018 - protein, 268 aa, Homo sapiens
LSSSQRPHAGPPAGPSTLRPPSFPGASFGLDCPCSSILLPPPDLLSSRLPPPLARVMRSRLLLSVAHLPTIRETTEEMLLGGPGQEPPPSPSLDDYVRSISRLAQPTSVLDKATAQGQPRPPHRPAQACRKGRPAVSLRDITARFSGQQPTLPMADTVDPLDWLFGESQEKQPSQRDLPRRTGPSAGLWGPHRQMDSSKPMGAPRGRLCEARMPGHSLARPPQDGQQSSDLRSWTFGQSAQAMASRHRPRPSSVLRTLYSHLPVIHEL

SEQ ID NO: 62019 - protein, 12 aa, Homo sapiens
MKKNNSMIQAHH

SEQ ID NO: 62020 - protein, 211 aa, Homo sapiens
LLLKYKSIISRRFFCIVGTLYLYRCITMYVTTLPVPGMHFNCSPKLFGDWEAQLRRIMKLIAGGGLSITGSHNMCGDYLYSGHTVMLTLTYLFIKEYSPRRLWWYHWICWLLSVVGIFCILLAHDHYTVDVVVAYYITTRLFWWYHTMANQQVLKEASQMNLLARVWWYRPFQYFEKNVQGIVPRSYHWPFPWPVVHLSRQVKYSRLVNDT

SEQ ID NO: 62021 - protein, 267 aa, Homo sapiens
KDSLLAVRWFFAHSFDSQEALMVKMTKLRVVQYYGNFSRSAKRRRLRLLEEQRGALYRLSVLTLQPSDQGHYVCRVQEISRHRNKWTAWSNGSSATEMRVISLKASEESSFEKTKETWAFFEDLYVYAVLVCCVGILSILLFMLVIVWQSVFNKRKSRVRHYLVKCPQNSSGETVTSVTSLAPLQPKKGKRQKEKPDIPPAVPAKAPIAPTFHKPKLLKPQRKVTLPKIAEENLTYAELELIKPHRAAKGAPTSTVYAQILFEENKL

SEQ ID NO: 62022 - protein, 23 aa, Homo sapiens
KKIPAGAVSVFLGDTDVLPPFHQ

SEQ ID NO: 62023 - protein, 28 aa, Homo sapiens
LMPADSQKARRIQADDLPDGTAAMEMNR

SEQ ID NO: 62024 - protein, 45 aa, Homo sapiens
LGYRSVGKSSLTIQFVEGQFVDSYDPTIENTFTKLITVNGQEYHL

SEQ ID NO: 62025 - protein, 107 aa, Homo sapiens
INGYILVYSVTSIKSFEVIKVIHGKLLDMVGKVQIPIMLVGNKKDLHMERVISYEEGKALAESWNAAFLESSAKENQTAVDVFRRMILEAEKMDGAASQGKSSCSVM

SEQ ID NO: 62026 - protein, 67 aa, Homo sapiens
VSVDEVKALASLMTYKCAVVDVPFGGAKAGVKIYPKNYTDNKLEKITRRFTMELAKKGFIVFVSRQF

SEQ ID NO: 62027 - protein, 288 aa, Homo sapiens
IAGCCAKTTVAPLDRVKVLLQAHNHHYKHLGVFSALRAVPQKEGFLGLYKGNGAMMIRIFPYGAIQFMAFEHYKTLITTKLGISGHVHRLMAGSMAGMTAVICTYPLDMVRVRLAFQVKGEHSYTGIIHAFKTIYAKEGGFFGFYRGLMPTILGMAPYAGVSFFTFGTLKSVGLSHAPTLLGRPSSDNPNVLVLKTHVNLLCGGVAGAIAQTISYPFDVTRRRMQLGTVLPEFEKCLTMRDTMKYVYGHHGIRKGLYRGLSLNYIRCIPSQAVAFTTYELMKQFFHLN

SEQ ID NO: 62028 - protein, 39 aa, Homo sapiens
RTQDLKTKKHHIPVVDRTPLEPPPIVVVVMGPPKLERAL

SEQ ID NO: 62029 - protein, 401 aa, Homo sapiens
KNYVEELNRQLNSTVSSLHSRVDSLEKSNTKLIEELAIAKNNIIKLQEENHQLRSENKLILMKTQQHLEVTKVDVETELQTYKHSRQGLDEMYNEARRQLRDESQLRQDVENELAVQVSMKHEIELAMKLLEKDIHEKQDTLIGLRQQLEEVKAINIEMYQKLQGSEDGLKEKNEIIARLEEKTNKITAAMRQLEQRLQQAEKAQMEAEDEDEKYLQECLSKSDSLQKQISQKEKQLVQLETDLKIEKEWRQTLQEDLQKEKDALSHLRNETQQIISLKKEFLNLQDENQQLKKIYHEQEQALQELGNKLSESKLKIEDIKEANKALQGLVWLKDKEATHCKLCEKEFSLSKRKHHCRNCGEIFCNACSDNELPLPSSPKPVRVCDSCHALLIQRCSSNLP

SEQ ID NO: 62030 - protein, 9 aa, Homo sapiens
RPSTTTRGS

SEQ ID NO: 62031 - protein, 159 aa, Homo sapiens
LPLNEYREYIKVQTDKGTEVATNLVILCTGIKINSSAYRKAFESRLASSGALRVNEHLQVEGHSNVYAIGDCADVRTPKMAYLAGLHANIAVANIVNSVKQRPLQAYKPGALTFLLSMGRNDGVGQISGFYVGRLMVRLTKSRDLFVSTSWKTMRQSPP

SEQ ID NO: 62032 - protein, 587 aa, Homo sapiens
VPPSDPLRQANRLPIKVLKMLTARTGHILHPEYLQPLPSTPVSPIELDAKKSPLALLAQTCSQIGKPDPSPSSKLSSVASNGGGAGGAGGGAAGDKDTKSGPLKLSDIGVEDKSSFKPYSKPGSDKKEPGGGGGGGGGGGGGGGGVSSEKSGFRVPSATCQPFTPRTGSPSSSASACSPGGMLSSAGGAPEGKDDKKDTDVGGGGKGTGGASAEGGPTGLAHGRISCGGGINVDVNQHPDGGPGGKALGSDCGGSSGSSSGSGPSAPTSSSVLGSGLVAPVSPYKPGQTVFPLPPAGMTYPGSLAGAYAGYPPQFLPHGVALDPTKPGSLVGAQLAAAAAGSLGCSKPAGSSPLAGASPPSVMTASLCRDPYCLSYHCASHLAGAAAASASCAHDPAAAAAALKSGYPLVYPTHPLHGVHSSLTAAAAAGATPPSLAGHPLYPYGFMLPNDPLPHICNWVSANGPCDKRFATSEELLSHLRTHTAFPGTDKLLSGYPSSSSLASAAAAAMACHMHIPTSGAPGSPGTLALRSPHHALGLSSRYHPYSKSPLPTPGAPVPVPAATGPYYSPYALYGQRLTTASALGYQ

SEQ ID NO: 62033 - protein, 42 aa, Homo sapiens
MGIPMNIGTGLFKLLHKADRDPNPPKRPLIFDTNEFHIPLVT

SEQ ID NO: 62034 - protein, 5 aa, Homo sapiens
RRMAP

SEQ ID NO: 62035 - protein, 10 aa, Homo sapiens
IFLLLSVMMH

SEQ ID NO: 62036 - protein, 5 aa, Homo sapiens
MYYFT

SEQ ID NO: 62037 - protein, 175 aa, Homo sapiens
LQVLSVFVLCPAKAVELVRAGSGALRGAARRRHHGPPHCFSTATLLCKAYRGGHLTIRLALGGCTNRPFYRIVAAHNKCPRDGRFVEQLGSYDPLPNSHGEKLVALNLDRIRHWIGCGAHLSKPMEKLLGLAGFFPLHPMMITNAERLRRKRAREVLLASQKTDAEATDTEATET

SEQ ID NO: 62038 - protein, 5 aa, Homo sapiens
RRMAP

SEQ ID NO: 62039 - protein, 5 aa, Homo sapiens
MYYFT

SEQ ID NO: 62040 - protein, 325 aa, Homo sapiens
KTPSANMMVLKVEELVTGKKNGNGEAGEFLPEDFRDGEYEAAVTLEKQEDLKTLLAHPVTLGEQQWKSEKQREAELKKKKLEQRSKLENLEDLEIIIQLKKRKKYRKTKVPVVKEPEPEIITEPVDVPTFLKAALENKLPVVEKFLSDKNNPDVCDEYKRTALHRACLEGHLAIVEKLMEAGAQIEFRDMLESTAIHWASRGGNLDVLKLLLNKGAKISARDKLLSTALHVAVRTGHYECAEHLIACEADLNAKDREGDTPLHDAVRLNRYKMIRLLIMYGADLNIKNCAGKTPMDLVLHWQNGTKAIFDSLRENSYKTSRIATF

SEQ ID NO: 62041 - protein, 21 aa, Homo sapiens
VKAARRGSQVGHKNRRKDRRP

SEQ ID NO: 62042 - protein, 43 aa, Homo sapiens
VLLPYKPQVIRALAKPLDDKKRLVRKEAVSARGEWFLLGSPGS

SEQ ID NO: 62043 - protein, 130 aa, Homo sapiens
IEARGRKQASANIFQDAELLQIQALFQRSGDQLAEERAQIIWECAGDHRVAEALKRLRRKRPPRQKPLGHSLHHCSRLRILEPHSALANPQSATETASSEQYLHSRKKSARIRRNWRKSGPTSYLHQIRH

SEQ ID NO: 62044 - protein, 23 aa, Homo sapiens
VEEDAESEDEEEEDVKLLRISGK

SEQ ID NO: 62045 - protein, 407 aa, Homo sapiens
LLFPPLRALKGRQYLPLLAPRAAPRAQCDCIRRPLRPGQYSTISEVALQSGRGTVSLPSKAAERVVGRWLLVCSGTVAGAVILGGVTRLTESGLSMVDWHLIKEMKPPTSQEEWEAEFQRYQQFPEFKILNHDMTLTEFKFIWYMEYSHRMWGRLVGLVYILPAAYFWRKGWLSRGMKGRVLALCGLVCFQGLLGWYMVKSGLEEKSDSHDIPRVSQYRLAAHLGSALVLYCASLWTSLSLLLPPHKLPETHQLLQLRRFAHGTAGLVFLTALSGAFVAGLDAGLVYNSFPKMGESWIPEDLFTFSPILRNVFENPTMVQFDHRILGITSVTAITVLYFLSRRIPLPRRTKMAAVTLLALAYTQVGLGISTLLMYVPTPLAATHQSGSLALLTGALWLMNELRRVPK

SEQ ID NO: 62046 - protein, 131 aa, Homo sapiens
KQKIIDLLPKVEVALSNIKEADNTVMFMQGKRQKEIWHLLKIACTQSSARSLVGSSLEGAVTPQTSAWLPPTSAEHDHSLSCVVTPQDGETSAQMIEENLNCLGHLSTIIHEANEEQGNSMMNLDWSWLTE

SEQ ID NO: 62047 - protein, 34 aa, Homo sapiens
KSDWRQCQISKEDEETLARRFRKDFEPYDFTLDD

SEQ ID NO: 62048 - protein, 149 aa, Homo sapiens
LASVLHNGLGRYVQQLQRLSFSVSRDGASSRGAREFVEREVIDFARRNPGVVIYVNSRPCCVPRVVAEYLNGAVREESIHCKSVEEISTLVQKLADQSGLDVIRIRKPFHTDNPSIQGQWHPFTNKPTTFRGLRPREVQDPAPAQVQAQ

SEQ ID NO: 62049 - protein, 606 aa, Homo sapiens
IQELTIEEHLIERKKKLQEKKMHIAALASAILSDPENNIKKLKELRSMLMEQDPDVAVTVRKLVIVSLMELFKDITPSYKIRPLTEAEKSTKTRKETQKLREFEEGLVSQYKFYLENLEQMVKDWKQRKLKKSNVVSLKAYKGLAEVAVKSLCELLVALPHFNFHNNIIVLIVPLMNDMSKLISEMCCEAVKKLFKQDKLGQASLGVIKVISGFVKGRNYEVRPEMLKTFLCLRIKEVEVKKDTEDINKPKKFMTFKEKRKSLSRMQRKWKKAEEKLERELREAEASESTEKKLKLHTETLNIVFVTYFRILKKAQRSPLLPAVLEGLAKFAHLINVEFFDDLLVVLHTLIESGDLSYQESLHCVQTAFHILSGQGDVLNIDPLKFYTHLYKTLFKLHAGATNEGVEIVLQCLDVMLTKRRKQVSQQRALAFIKRLCTLALHVLPNSSIGILATTRILMHTFPKTDLLLDSESQGSGVFLPELDEPEYCNAQNTALWELHALRRHYHPIVQRFAAHLIAGAPSEGSGALKPELSRRSATELFEAYSMAEMTFNPPVESSNPKIKGKFLQGDSFLNEDLNQLIKRYSSEVATESPLDFTKYLKTSLH

SEQ ID NO: 62050 - protein, 126 aa, Homo sapiens
KVEEEDDAEHVLALTMLCLTEGAKDECNVVEVVARNHDHQEIAVPVANLKLSCQPMLSLDDFQLQPPVTFRLKSGSGPVRITGRHQIVTMSNDVSEEESEEEEEDSDEEEVELCPILPAKKQGGRP

SEQ ID NO: 62051 - protein, 377 aa, Homo sapiens
LLEALRSLCNRDTDMEVEDFIGVDSMYENWQVDRPLLCHLFVPFTPPEPYRFHPELWCSGRSVPLDRQGYGQIKVVRADGDTLSCICGKTKLGEDMLCLLHGRNSMAPPCGDMENLLCATDSLYLDTMQVMKWFQTALTRAWKGIAHKYEFDLAFGQLDSPGSLKIKFRSGKFMPFNLIPVIQCDDSDLYFVSHLPREPSEGTPASSTDWLLSFAVYERHFLRTTLKALPEGACHLSCLQIASFLLSKQSRLTGPSGLSSYHLKTALLHLLLLRQAADWKAGQLDARLHELLCFLEKSLLQKKLHHFFIGNRKVPEAMGLPEAVLRAEPLNLFRPFVLQRSLYRKTLDSFYEMLKNAPALISEYSLHVPSDQPTPKS

SEQ ID NO: 62052 - protein, 71 aa, Homo sapiens
MATSAHSWPQAGWSGAAGRLLDRRGVTAAEEEVLRDTRGWTRQGNTRPTTAGDKIAQPHPAVQRLPACAPS

SEQ ID NO: 62053 - protein, 325 aa, Homo sapiens
IAMAALIAENFRFLSLFFKSKDVMIFNGLVALGTVGSQELFSVVAFHCPCSPARNYLYGLAAIGVPALVLFIIGIILNNHTWNLVAECQHRRTKNCSAAPTFLLLSSILGRAAVAPVTWSVISLLRGEAYVCALSEFVDPSSLTAREEHFPSAHATEILARFPCKENPDNLSDFREEVSRRLRYESQLFGWLLIGVVAILVFLTKCLKHYCSPLSYRQEAYWAQYRANEDQLFQRTAEVHSRVLAANNVRRFFGFVALNKDDEELIANFPVEGTQPRPQWNAITGVYLYRENQGLPLYSRLHKWAQGLAGNGAAPDNVEMALLPS

SEQ ID NO: 62054 - protein, 1037 aa, Homo sapiens
IDEYCRALVRLPPHISQCDEVFRFFEARPEDVNPPKEDYGSSKRKSVWLSSWAESPKKDVTGADATAEPMILEQYVVVSNYKKQENSELSLQAGEVVDVIEKNESGWWFVSTSEEQGWVPATYLEAQNGTRDDSDINTSKTGEVSKRRKAHLRRLDRRWTLGGMVNRQHSREEKYVTVQPYTSQSKDEIGFEKGVTVEVIRKNLEGWWYIRYLGKEGWAPASYLKKAKDDLPTRKKNLAGPVEIIGNIMEISNLLNKKASGDKETPPAEGEGHEAPIAKKEISLPILCNASNGSAVGVPDRTVSRLAQGSPAVARIAPQRAQISSPNLRTRPPPRRESSLGFQLPKPPEPPSVEVEYYTIAEFQSCISDGISFRGGQKAEVIDKNSGGWWYVQIGEKEGWAPASYIDKRKKPNLSRRTSTLTRPKVPPPAPPSKPKEAEEGPTGASESQDSPRKLKYEEPEYDIPAFGFDSEPELSEEPVEDRASGERRPAQPHRPSPASSLQRARFKVGESSEDVALEEETIYENEGFRPYAEDTLSARGSSGDSDSPGSSSLSLTRKNSPKSGSPKSSSLLKLKAEKNAQAEMGKNHSSASFSSSITINTTCCSSSSSSSSSLSKTSGDLKPRSASDAGIRGTPKVRAKKDADANAGLTSCPRAKPSVRPKPFLNRAESQSQEKMDISTLRRQLRPTGQLRGGLKGSKSEDSELPPQTASEAPSEGSRRSSSDLITLPATTPPCPTKKEWEGPATSYMTCSAYQKVQDSEISFPAGVEVQVLEKQESGWWYVRFGELEGWAPSHYLVLDENEQPDPSGKELDTVPAKGRQNEGKSDSLEKIERRVQALNTVNQSKKATPPIPSKPPGGFGKTSGTPAVKMRNGVRQVAVRPQSVFVSPPPKDNNLSCALRRNESLTATDGLRGVRRNSSFSTARSAAAEAKGRLAERAASQGSDSPLLPAQRNSIPVSPVRPKPIEKSQFIHNNLKDVYVSIADYEGDEETAGFQEGVSMEVLERNPNGWWYCQILDGVKPFKGWVPSNYLEKKN

SEQ ID NO: 62055 - protein, 46 aa, Homo sapiens
RPRMVLGMTPTSTPLRLEKRRSMSPCSLTPAKARTRLALRRASQWR

SEQ ID NO: 62056 - protein, 21 aa, Homo sapiens
LELLEDQSDIVSTMEHYYTAF

SEQ ID NO: 62057 - protein, 405 aa, Homo sapiens
KFENLQELKRLCHWGPIIALGVIAICSTMAMIDSVLWYWPLHTTGGSVNFIMLINWTVMILYNYFNAMFVGPGFVPLGWKPEISQDTMYLQYCKVCQAYKAPRSHHCRKCNRCVMKMDHHCPWINNCCGYQNHASFTLFLLLAPLGCIHAAFIFVMTMYTQLYHRLSFGWNTVKIDMSAARRDPLPIVPFGLAAFATTLFALGLALGTTIAVGMLFFIQMKIILRNKTSIESWIEEKAKDRIQYYQLDEVFVFPYDMGSRWRNFKQVFTWSGVPEGDGLEWPVREGCHQYSLTIEQLKQKADKRVRSVRYKVIEDYSGACCPLNKGIKTFFTSPCTEEPRIQLQKGEFILATRGLRYWLYGDKILDDSFIEGVSRIRGWFPRKCVEKCPCDAETDQAPEGEKKNR

SEQ ID NO: 62058 - protein, 115 aa, Homo sapiens
LDKLQNEIDQELEHNNSLVREEKETTDTRKKSLLSAALAKSGERLQALTLLMIHYRAGIEDIETLESLSLDQHSKKISKYTDDTEEDLDNEISQLIDSQPFSSISDDLFGPSESV

SEQ ID NO: 62059 - protein, 24 aa, Homo sapiens
RVPECSKQCRRSISRKYWVLSSCG

SEQ ID NO: 62060 - protein, 137 aa, Homo sapiens
IERIVRLQKAHARKNEKIEFMEDHIKQLVEEIRKKTKIIQSYILREESGTLSSEASDFNKVHLSRRGGIMASLYTSHPADNGLTLELSLEINRKLQAVLEDTLLKNITLKENLQTLGTEIERLIKHQHELEQRTKKT

SEQ ID NO: 62061 - protein, 10 aa, Homo sapiens
IPDQRSSLMY

SEQ ID NO: 62062 - protein, 99 aa, Homo sapiens
LFNEVSRAREAVLDAHFLVLASDLGKEKAKQLRSDLSSFDMLRYVETLLTHMGVNPLEAEELIRDEDSPDFEFIVYDSWKITGRTAENTFNKTHTFHFL

SEQ ID NO: 62063 - protein, 666 aa, Homo sapiens
LGAGRPAALGPRIASARSSPAPAPGEMPCGEDWLSHPLGIVQGFFAQNGVNPDWEKKVIEYFKEKLKENNAPKWVPSLNEVPLHYLKPNSFVKFRCMIQDMFDPEFYMGVYETVNQNTKAHVLHFGKYRDVAECGPQQELDLNSPRNTTLERQTFYCVPVPGESTWVKEAYVNANQARVSPSTSYTPSRHKRSYEDDDDMDLQPNKQKDQHAGARQAGSVGGLQWCGEPKRLETEASTGQQLNSLNLSSPFDLNFPLPGEKGPACLVKVYEDWDCFKVNDILELYGILSVDPVLSILNNDERDASALLDPMECTDTAEEQRVHSPPASLVPRIHVILAQKLQHINPLLPACLNKEESKTFVSSFMSELSPVRAELLGFLTHALLGDSLAAEYLILHLISTVYTRRDVLPLGKFTVNLSGCPRNSTFTEHLYRIIQHLVPASFRLQMTIENMNHLKFIPHKDYTANRLVSGLLQLPSNTSLVIDETLLEQGQLDTPGVHNVTALSNLITWQKVDYDFSYHQMEFPCNINVFITSEGRSLLPADCQIHLQPQLIPPNMEEYMNSLLSAVLPSVLNKFRIYLTLLRFLEYSISDEITKAVEDDFVEMRKNDPQSITADDLHQLLVVARCLSLSAGQTTLSRERWLRAKQLESLRRTRLQQQKCVNGNEL

SEQ ID NO: 62064 - protein, 103 aa, Homo sapiens
MKYKGQYRPSDLLCPETYVWVPIEQCLPSLENSKYCRFNQDPEAVDEDRSTEPDRLQVFHKRAIMPYGVYKKQQKDPSEEAAVLQYASLVGQKCSERMLLFRN

SEQ ID NO: 62065 - protein, 443 aa, Homo sapiens
LKDTMFSKLAHLQRFAVLSRGVHSSVASATSVATKKTVQGPPTSDDIFEREYKYGAHNYHPLPVALERGKGIYLWDVEGRKYFDFLSSYSAVNQGHCHPKIVNALKSQVDKLTLTSRAFYNNVLGEYEEYITKLFNYHKVLPMNTGVEAGETACKLARKWGYTVKGIQKYKAKIVFAAGNFWGRTLSAISSSTDPTSYDGFGPFMPGFDIIPYNDLPALERALQDPNVAAFMVEPIQGEAGVVVPDPGYLMGVRELCTRHQVLFIADEIQTGLARTGRWLAVDYENVRPDIVLLGKALSGGLYPVSAVLCDDDIMLTIKPGEHGSTYGGNPLGCRVAIAALEVLEEENLAENADKLGIILRNELMKLPSDVVTAVRGKGLLNAIVIKETKDWDAWKVCLRLRDNGLLAKPTHGDIIRFAPPLVIKEDELRESIEIINKTILSF

SEQ ID NO: 62066 - protein, 306 aa, Homo sapiens
IAPAAFSLGLRDTAPRPGARCVPGRVLGTVPRVPYKDCQAIMKVLLLKDAKEDDCGQDPYIRELGLYGLEATLIPVLSFEFLSLPSFSEKLSHPEDYGGLIFTSPRAVEAAELCLEQNNKTEVWERSLKEKWNAKSVYVVGNATASLVSKIGLDTEGETCGNAEKLAEYICSRESSALPLLFPCGNLKREILPKALKDKGIAMESITVYQTVAHPGIQGNLNSYYSQQGVPASITFFSPSGLTYSLKHIQELSGDNIDQIKFAAIGPTTARALAAQGLPVSCTAESPTPQALATGIRKALQPHGCC

SEQ ID NO: 62067 - protein, 624 aa, Homo sapiens
KQTVVQLALRVADEMDVNIGHEVGYVIPFENCCTNETILRYCTDDMLQREMMSNPFLGSYGVIILDDIHERSIATDVLLGLLKDVLLARPELKLIINSSPHLISKLNSYYGNVPVIEVKNKHPVEVVYLSEAQKDSFESILRLIFEIHHSGEKGDIVVFLACEQDIEKVCETVYQGSNLNPDLGELVVVPLYPKEKCSLFKPLDETEKRCQVYQRRVVLTTSSGEFLIWSNSVRFVIDVGVERRKVYNPRIRANSLVMQPISQSQAEIRKQILGSSSSGKFFCLYTEEFASKDMTPLKPAEMQEANLTSMVLFMKRIDIAGLGHCDFMNRPAPESLMQALEDLDYLAALDNDGNLSEFGIIMSEFPLDPQLSKSILASCEFDCVDEVLTIAAMVTAPNCFSHVPHGAEEAALTCWKTFLHPEGDHFTLISIYKAYQDTTLNSSSEYCVEKWCRDYFLNCSALRMADVIRAELLEIIKRIELPYAEPAFGSKENTLNIKKALLSGYFMQIARDVDGSGNYLMLTHKQVAQLHPLSGYSITKKMPEWVLFHKFSISENNYIRITSEISPELFMQLVPQYYFSNLPPSESKDILQQVVDHLSPVSTMNKEQQMCETCPETEQRCTLQ

SEQ ID NO: 62068 - protein, 187 aa, Homo sapiens
IDFSTDEPKTETESNVNAYEECPSGIPIDMWNKFQELHKKHSEQKSTTSRFRGKRRKRSRKDKLKNEKELHSEPSSNETQWKELTQYFGVNDRFDPPVKRKKVEKSGLEKRIDQAVEEWNIEKAEELSNQLATRELGVKIAKAVACHNFVKAKKEVENSQAARKKKKLAWGFEAKKRWETKSNMGYM

SEQ ID NO: 62069 - protein, 353 aa, Homo sapiens [sequence omitted]

SEQ ID NO: 62070 - protein, 19 aa, Homo sapiens
VPASARRVEYSRTERTTGK

SEQ ID NO: 62071 - protein, 135 aa, Homo sapiens
LVTMNHIVQTFSPVNSGQPPNYEMLKEEQEVAMLGVPHNPAPPMSTVIHIRSETSVPDHVVWSLFNTLFMNTCCLGFIAFAYSVKSRDRKMVGDVTGAQAYASTAKCLNIWALILGIFMTILLIIIPVLVVQAQR

SEQ ID NO: 62072 - protein, 8 aa, Homo sapiens
MIFHVNRW

SEQ ID NO: 62073 - protein, 235 aa, Homo sapiens
KYLLFTYNCCFWLAGLAVMAVGIWTLALKSDYISLLASGTYLATAYILVVAGTVVMVTGVLGCCATFKERRNLLRLYFILLLIIFLLEIIAGILAYAYYQQLNTELKENLKDTMTKRYHQPGHEAVTSAVDQLQQEFHCCGSNNSQDWRDSEWIRSQEAGGRVVPDSCCKTVVALCGQRDHASNIYKGGCITKLETFIQEHLRVIGAVGIGIACVQVFGMIFTCCLYRSLKLEHY

SEQ ID NO: 62074 - protein, 390 aa, Homo sapiens [sequence omitted]

SEQ ID NO: 62075 - protein, 264 aa, Homo sapiens
LHPVILASIVDSYERRNEGAARVIGTLLGTVDKHSVEVTNCFSVPHNESEDEVAVDMEFAKNMYELHKKVSPNELILGWYATGHDITEHSVLIHEYYSREAPNPIHLTVDTSLQNGRMSIKAYVSTLMGVPGRTMGVMFTPLTVKYAYYDTERIGVDLIMKTCFSPNRVIGLSSDLQQVGGASARIQDALSTVLQYAEDVLSGKVSADNTVGRFLMSLVNQVPKIVPDDFETMLNSNINDLLMVTYLANLTQSQIALNEKLVNL

SEQ ID NO: 62076 - protein, 355 aa, Homo sapiens
KSRYTTEFHELEKIGSGEFGSVFKCVKRLDGCIYAIKRSKKPLAGSVDEQNALREVYAHAVLGQHSHVVRYFSAWAEDDHMLIQNEYCNGGSLADAISENYRIMSYFKEAELKDLLLQVGRGLRYIHSMSLVHMDIKPSNIFISRTSIPNAASEEGDEDDWASNKVMFKIGDLGHVTRISSPQVEEGDSRFLANEVLQENYTHLPKADIFALALTVVCAAGAEPLPRNGDQWHEIRQGRLPRIPQVLSQEFTELLKVMIHPDPERRPSAMALVKHSVLLSASRKSAEQLRIELNAEKFKNSLLQKELKKAQMAKAAAEERALFTDRMATRSTTQSNRTSRLIGKKMNRSVSLTIY

SEQ ID NO: 62077 - protein, 560 aa, Homo sapiens
KVSKSQLKVLSHNLCTVLKVPHDPVALEEHFRDDDEGPVSNQGYMPYLNRFILEKVQDNFDKIEFNRMCWTLCVKKNLTKNPLLITEEDAFKIWVIFNFLSEDKYPLIIVSEEIEYLLKKLTEAMGGGWQQEQFEHYKINFDDSKNGLSAWELIELIGNGQFSKGMDRQTVSMAINEVFNELILDVLKQGYMMKKGHRRKNWTERWFVLKPNIISYYVSEDLKDKKGDILLDENCCVESLPDKDGKKCLFLVKCFDKTFEISASDKKKKQEWIQAIHSTIHLLKLGSPPPHKEARQRRKELRKKQLAEQEELERQMKELQAANESKQQELEAVRKKLEEAASRAAEEEKKRLQTQVELQARFSTELEREKLIRQQMEEQVAQKSSELEQYLQRVRELEDMYLKLQEALEDERQARQDEETVRKLQARLLEEESSKRAELEKWHLEQQQAIQTTEAEKQELENQRVLKEQALQEAMEQLEQLELERKQALEQYEEVKKKLEMATNKTKSWKDKVAHHEGLIRLIEPGSKNPHLITNWGPAAFTEAELEEREKNWKEKKTTE

SEQ ID NO: 62078 - protein, 1330 aa, Homo sapiens
IIQDTTNSKTVNERITLNLPASTPVRKLFEDVANKVGYINGTFDLVWGNGINTADMAPLDHTSDKSLLDANFEPGKKNFLHLTDKDGEQPQILLEDSSAGEDSVHDRFIGPLPREGSGGSTSDYVSQSYSYSSILNKSETGYVGLVNQAMTCYLNSLLQTLFMTPEFRNALYKWEFEESEEDPVTSIPYQLQRLFVLLQTSKKRAIETTDVTRSFGWDSSEAWQQHDVQELCRVMFDALEQKWKQTEQADLINELYQGKLKDYVRCLECGYEGWRIDTYLDIPLVIRPYGSSQAFASVEEALHAFIQPEILDGPNQYFCERCKKKCDARKGLRFLHFPYLLTLQLKRFDFDYTTMHRIKLNDRMTFPEELDMSTFIDVEDEKSPQTESCTDSGAENEGSCHSDQMSNDFSNDDGVDEGICLETNSGTEKISKSGLEKNSLIYELFSVMVHSGSAAGGHYYACIKSFSDEQWYSFNDQHVSRITQEDIKKTHGGSSGSRGYYSSAFASSTNAYMLIYRLKDPARNAKFLEVDEYPEHIKNLVQKERELEEQEKRQREIERNTCKIKLFCLHPTKQVMMENKLEVHKDKTLKEAVEMAYKMMDLEEVIPLDCCRLVKYDEFHDYLERSYEGEEDTPMGLLLGGVKSTYMFDLLLETRKPDQVFQSYKPGEVMVKVHVVDLKAESVAAPITVRAYLNQTVTEFKQLISKAIHLPAETMRIVLERCYNDLRLLSVSSKTLKAEGFFRSNKVFVESSETLDYQMAFADSHLWKLLDRHANTIRLFVLLPEQSPVSYSKRTAYQKAGGDSGNVDDDCERVKGPVGSLKSVEAILEESTEKLKSLSLQQQQDGDNGDSSKSTETSDFENIESPLNERDSSASVDNRELEQHIQTSDPENFQSEERSDSDVNNDRSTSSVDSDILSSSHSSDTLCNADNAQIPLANGLDSHSITSSRRTKANEGKKETWDTAEEDSGTDSEYDESGKSRGEMQYMYFKAEPYAADEGSGEGHKWLMVHVDKRITLAAFKQHLEPFVGVLSSHFKVFRVYASNQEFESVRLNETLSSFSDDNKITIRLGRALKKGEYRVKVYQLLVNEQEPCKFLLDAVFAKGMTVRQSKEELIPQLREQCGLELSIDRFRLRKKTWKNPGTVFLDYHIYEEDINISSNWEVFLEVLDGVEKMKSMSQLAVLSRRWKPSEMKLDPFQEVVLESSSVDELREKLSEISGIPLDDIEFAKGRGTFPCDISVLDIHQDLDWNPKVSTLNVWPLYICDDGAVIFYRDKTEELMELTDEQRNELMKKESSRLQKTGHRVTYSPRKEKALKIYLDGAPNKDLTQD

SEQ ID NO: 62079 - protein, 174 aa, Homo sapiens
VDWHALERPKGCMGVLAREAPHLEKQPAAGPQRVLPGEREERPPTLSASFRTMAEFMDYTSSQCGKYYSSVPEEGGATHVYRYHRGESKLHMCLDIGNGQRKDRKKTSLGPGGSYQISEHAPEASQPAENISKDLYIEVYPGTYSVTVGSNDLTKKTHVVAVDSGQSVDLVFPV

SEQ ID NO: 62080 - protein, 6 aa, Homo sapiens
ISQASD

SEQ ID NO: 62081 - protein, 220 aa, Homo sapiens
ILGASGETGRVLLKEILEQGLFSKVTLIGRRKLTFDEEAYKNVNQEVVDFEKLDDYASAFQGHDVGFCCLGTTRGKAGAEGFVRVDRDYVLKSAELAKAGGCKHFNLLSSKGADKSSNFLYLQVKGEVEAKVEELKFDRYSVFRPGVLLCDRQESRPGEWLVRKFFGSLPDSWASGHSVPVVTVVRAMLNNVVRPRDKQMELLENKAIHDLGKAHGSLKP

SEQ ID NO: 62082 - protein, 35 aa, Homo sapiens
RRYRLFTSAEETFSHCKSEHQFNIDSMVHKHESYS

SEQ ID NO: 62083 - protein, 37 aa, Homo sapiens
LSCRCGGKYSVSKDEAEEVSLISCDTCSLIIELLHYN

SEQ ID NO: 62084 - protein, 40 aa, Homo sapiens
LRRARYPDAGVQSHMKPAGDWGPGSSKPAGTEADAVSGRR

SEQ ID NO: 62085 - protein, 332 aa, Homo sapiens
IYSPLLFKYFLAEGIVNGHTLLVASAKEDPANILQELPAPLLDDKCKKEFDEDVYNHKTPESNIKMKIAWRYQLLPKMEIGPVSSSRFGHYYDASKRMPQELIEASNWHGFFLPEKISSTLKVEPCSLTPGYTKLLQFIQNIIYEEGFDGSNPQKKQRNILRIGIQNLGSPLWGDDICCAENGGNSHSLTKFLYVLRGLLRTSLSACIITMPTHLIQNKAIIARVTTLSDVVVGLESFIGSERETNPLYKDYHGLIHIRQIPRLNNLICDESDVKDLAFKLKRKLFTIERLHLPPDLSDTVSRSSKMDLAESAKRLGPGCGMMAGGKKHLDF

SEQ ID NO: 62086 - protein, 39 aa, Homo sapiens
LNLLKTLDEDSKLSAKEKKKLLGQFYKCHPDIFIEHFGD

SEQ ID NO: 62087 - protein, 373 aa, Homo sapiens
IKETLLSFLLPGHTRLRNQITEVLDLDLIKQEAENGALDISKLAEFIIGMMGTLCAPARDEEVKKLKDIKEIVPLFREIFSVLDLMKVDMANFAISSIRPHLMQQSVEYERKKFQEILERQPNSLDFVTQWLEEASEDLMTQKYKHALPVGGMAAGSGDMPRLSPVAVQNYAYLKLLKWDHLQRPFPETVLMDQSRFHELQLQLEQLTILGAVLLVTFSMAAPGISSQADFAEKLKMIVKILLTDMHLPSFHLKDVLTTIGEKVCLEVSSCLSLCGSSPFTTDKETVLKGQIQAVASPDDPIRRIMESRILTFLETYLASGHQKPLPTVPGGLSPVQRELEEVAIKFARLVNYNKMVFCPYYDAILSKILVRS

SEQ ID NO: 62088 - protein, 66 aa, Homo sapiens
MPAINKRTICPWKIKPAFCSGYSSAKIDISIPAAAFELQSGSALWIWASRVEWKLWAQKTASLYSY

SEQ ID NO: 62089 - protein, 35 aa, Homo sapiens
MLTSKFSPAEIENIKELCKQQKRKDTSPDLEKSCD

SEQ ID NO: 62090 - protein, 48 aa, Homo sapiens
KGPPPLPPQLPTRDFQRPPRAHDALGHQPQRERQQVVRTATAVGFLRE

SEQ ID NO: 62091 - protein, 710 aa, Homo sapiens
KMPSATSHSGSGSKSSGPPPPSGSSGSEAAAGAGAAAPASQHPATGTGAVQTEAMKQILGVIDKKLRNLEKKKGKLDDYQERMNKGERLNQDQLDAVSKYQEVTNNLEFAKELQRSFMALSQDIQKTIKKTARREQLMREEAEQKRLKTVLELQYVLDKLGDDEVRTDLKQGLNGVPILSEEELSLLDEFYKLVDPERDMSLRLNEQYEHASIHLWDLLEGKEKPVCGTTYKVLKEIVERVFQSNYFDSTHNHQNGLCEEEEAASAPAVEDQVPEAEPEPAEEYTEQSEVESTEYVNRQFMAETQFTSGEKEQVDEWTVETVEVVNSLQQQPQAASPSVPEPHSLTPVAQADPLVRRQRVQDLMAQMQGPYNFIQDSMLDFENQTLDPAIVSAQPMNPTQNMDMPQLVCPPVHSESRLAQPNQVPVQPEATQVPLVSSTSEGYTASQPLYQPSHATEQRPQKEPIDQIQATISLNTDQTTASSSLPAASQPQVFQAGTSKPLHSSGINVNAAPFQSMQTVFNMNAPVPPVNEPETLKQQNQYQASYNQSFSSQPHQVEQTELQQEQLQTVVGTYHGSPDQSHQVTGNHQQPPQQNTGFPRSNQPYYNSRGVSRGGSRGARGLMNGYRGPANGFRGGYDGYRPSFSNTPNSGYTQSQFSAPRDYSGYQRDGYQQNFKRGSGQSGPRGAPRGRGGPPRPNRGMPQMNTQQVN

SEQ ID NO: 62092 - protein, 283 aa, Homo sapiens
VTSCTGFVEGSSRTGGMGSACIKVTKYFLFLFNLIFFILGAVILGFGVWILADKSSFISVLQTSSSSLRMGAYVFIGVGAVTMLMGFLGCIGAVNEVRCLLGLYFAFLLLILIAQVTAGALFYFNMGKLKQEMGGIVTELIRDYNSSREDSLQDAWDYVQAQVKCCGWVSFYNWTDNAELMNRPEVTYPCSCEVKGEEDNSLSVRKGFCEAPGNRTQSGNHPEDWPVYQEGCMEKVQAWLQENLGIILGVGVGVAIIELLGMVLSICLCRHVHSEDYSKVPKY

SEQ ID NO: 62093 - protein, 52 aa, Homo sapiens
LPFLSPPFSLRPLPVRPQPLLPSQVFSVLASPPYPIPLPCPVSCLRAPSGWE

SEQ ID NO: 62094 - protein, 330 aa, Homo sapiens
LLRALQIALVVSLYWVTSISMVFLNKYLLDSPSLRLDTPIFVTFYQCLVTTLLCKGLSALAACCPGAVDFPSLRLDLRVARSVLPLSVVFIGMITFNNLCLKYVGVAFYNVGRSLTTVFNVLLSYLLLKQTTSFYALLTCGIIIGGFWLGVDQEGAEGTLSWLGTVFGVLASLCVSLNAIYTTKVLPAVDGSIWRLTFYNNVNACILFLPLLLLLGELQALRDFAQLGSAHFWGMMTLGGLFGFAIGYVTGLQIKFTSPLTHNVSGTAKACAQTVLAVLYYEETKSFLWWTSNMMVLGGSSAYTWVRGWEMKKTPEEPSPKDSEKSAMGV

SEQ ID NO: 62095 - protein, 294 aa, Homo sapiens
ISQYGIARFFTEYFNSVCQGTHILFREFSFVQATPHNRVSFLRAFWRCFRTVGKNGDLLTMKEYHCLLQLLCPDFPLELTQKAARIVLMDDAMDCLMSFSDFLFAFQIQFYYSEFLDSVAAIYEDLLSGKNPNTVIVPTSSSGQHRQRPALGGAGTLEGVEASLFYQCLENLCDRHKYSCPPPALVKEALSNVQRLTFYGFLMALSKHRGINQALGALPDKGDLMHDPAMDEELERLLAQVPGLVNSVTASPEASCLPSRTPPRVGSPWRPLHHSRKVDGESDGSTEETDESET

SEQ ID NO: 62096 - protein, 105 aa, Homo sapiens
VMPHFVCLADEFPQPVRPAKLPKGRGRLRRPRQSRFKTQPVTFDEIQEVEEEGVSPMEEEKAKKSFLQSLECLRRSTQSLSLQREQLSSCKLRNSLDSSDSDSAL

SEQ ID NO: 62097 - protein, 114 aa, Homo sapiens
KGGPGSECAEWAWGPCTPSSKDCGVGFREGTCGAQTQRIRCRVPCNWKKEFGADCKYKFENWGACDGGTGTKVRQGTLKKARYNAQCQETIRVTKPCTPKTKAKAKAKKGKGKD

SEQ ID NO: 62098 - protein, 472 aa, Homo sapiens
TGSDWFNLAIKDIPEVTHEAKKALAGQLPAVGRSMCVEISLKTSEGDSMELEIWCLEMNEKCDKEIKVSYTVYNRLSLLLKSLLAITRVTPAYRLSRKQGHEYVILYRIYFGEVQLSGLGEGFQTVRVGTVGTPVGTITLSCAYRINLAFMSTRQFERTPPIMGIIIDHFVDRPYPSSSPMHPCNYRTAGEDTGVIYPSVEDSQEVCTTSFSTSPPSQLSSSRLSYQPAALGVGSADLAYPVVFAAGLNATHPHQLMVPGKEGGVPLAPNQPVHGTQADQERLATCTPSDRTHCAATPSSSEDTETVSNSSEGRASPHDVLETIFVRKVGAFVNKPINQVTLTSLDIPFAMFAPKNLELEDTDPMVNPPDSPETESPLQGSLHSDGSSGGSSGNTHDDFVMIDFKPAFSKDDILPMDLGTFYREFQNPPQLSSLSIDIGAQSMAEDLDSLPEKLAVHEKNVREFDAFVETLQ

SEQ ID NO: 62099 - protein, 1129 aa, Homo sapiens
LPPCSGPGWLLSLSALLSVAARGAFATTHWVVTEDGKIQQQVDSPMNLKHPHDLVILMRQEATVNYLKELEKQLVAQKIHIEENEDRDTGLEQRHNKEDPDCIKAKVPLGDLDLYDGTYITLESKDISPEDYIDTESPVPPDPEQPDCTKILELPYSIHAFQHLRGVQERVNLSAPLLPKEDPIFTYLSKRLGRSIDDIGHLIHEGLQKNTSSWVLYNMASFYWRIKNEPYQVVECAMRALHFSSRHNKDIALVNLANVLHRAHFSADAAVVVHAALDDSDFFTSYYTLGNIYAMLGEYNHSVLCYDHALQARPGFEQAIKRKHAVLCQQKLEQKLEAQHRSLQRTLNELKEYQKQHDHYLRQQEILEKHKLIQEEQILRNIIHETQMAKEAQLGNHQICRLVNQQHSLHCQWDQPVRYHRGDIFENVDYVQFGEDSSTSSMMSVNFDVQSNQSDINDSVKSSPVAHSILWIWGRDSDAYRDKQHILWPKRADCTESYPRVPVGGELPTYFLPPENKGLRIHELSSDDYSTEEEAQTPDCSITDFRKSHTLSYLVKELEVRMDLKAKMPDDHARKILLSRINNYTIPEEEIGSFLFHAINKPNAPIWLILNEAGLYWRAVGNSTFAIACLQRALNLAPLQYQDVPLVNLANLLIHYGLHLDATKLLLQALAINSSEPLTFLSLGNAYLALKNISGALEAFRQALKLTTKCPECENSLKLIRCMQFYPFLYNITSSVCSGTVVEESNGSDEMENSDETKMSEEILALVDEFQQAWPLEGFGGALEMKGRRLDLQGIRVLKKGPQDGVARSSCYGDCRSEDDEATEWITFQVKRVKKPKGDHKKTPGKKVETGQIENGHRYQANLEITGPKVASPGPQGKKRDYQRLGWPSPDECLKLRWVELTAIVSTWLAVSSKNIDITEHIDFATPIQQPAMEPLCNGNLPTSMHTLDHLHGVSNRASLHYTGESQLTEVLQNLGKDQYPQQSLEQIGTRIAKVLEKNQTSWVLSSMAALYWRVKGQGKKAIDCLRQALHYAPHQMKDVPLISLANILHNAKLWNDAVIVATMAVEIAPHFAVNHFTLGNVYVAMEEFEKALVWYESTLKLQPEFVPAKNRIQTIQCHLMLKKGRRSP

SEQ ID NO: 62100 - protein, 926 aa, Homo sapiens
VAARGAFATTHWVVTEDGKIQQQVDSPMNLKHPHDLVILMRQEATVNYLKELEKQLVAQKIHIEENEDRDTGLEQRHNKEDPDCIKAKVPLGDLDLYDGTYITLESKDISPEDYIDTESPVPPDPEQPDCTKILELPYSIHAFQHLRGVQERVNLSAPLLPKEDPIFTYLSKRLGRSIDDIGHLIHEGLQKNTSSWVLYNMASFYWRIKNEPYQVVECAMRALHFSSRHNKDIALVNLANVLHRAHFSADAAVVVHAALDDSDFFTSYYTLGNIYAMLGEYNHSVLCYDHALQARPGFEQAIKRKHAVLCQQKLEQKLEAQHRSLQRTLNELKEYQKQHDHYLRQQEILEKHKLIQEEQILRNIIHETQMAKEAQLGNHQICRLVNQQHSLHCQWDQPVRYHRGDIFENVDYVQFGEDSSTSSMMSVNFDVQSNQSDINDSVKSSPVAHSILWIWGRDSDAYRDKQHILWPKRADCTESYPRVPVGGELPTYFLPPENKGLRIHELSSDDYSTEEEAQTPDCSITDFRKSHTLSYLVKELEVRMDLKAKMPDDHARKILLSRINNYTIPEEEIGSFLFHAINKPNAPIWLILNEAGLYWRAVGNSTFAIACLQRALNLAPLQYQDVPLVNLANLLIHYGLHLDATKLLLQALAINSSEPLTFLSLGNAYLALKNISGALEAFRQALKLTTKCPECENSLKLIRCMQFYPFLYNITSSVCSGNCHEKTLDNSHDKQKYFDNSQSLDAAEEEPSERGTEEDPVFSVENSGRDSDALRLESTVVEESNGSDEMENSDETKMSEEILALVDEFQQAWPLEGFGGALEMKGRRLDLQGIRVLKKGPQDGVARSSCYGDCRSEDDEATEWITFQVKRVKKPKGDHKKTPGKKVETGQIENGHRYQANLEITGPKVASPGPQGLLDWKTRKVP

SEQ ID NO: 62101 - protein, 38 aa, Homo sapiens
KTPMAHEICYSVLCLFSYVAAVHSSEEDLRTPPRPVSS

SEQ ID NO: 62102 - protein, 484 aa, Homo sapiens
RPPDVPGQQPQAAKSPSPVQGKKSPRLLCIEKVTTDKDPKEEKEEEDDSALPQEVSIAASRPSRGWRSSRTSVSRHRDTENTRSSRSKTGSLQLICKSEPNTDQLDYDVGEEHQSPGGISSEEEEEEEEEMLISEEEIPFKDDPRDETYKPHLERETPKPRRKSGKVKEEKEKKEIKVEVEVEVKEEENEIREDEEPPRKRGRRRKDDKSPRLPKRRKKPPIQYVRCEMEGCGTVLAHPRYLQHHIKYQHLLKKKYVCPHPSCGRLFRLQKQLLRHAKHHTDQRDYICEYCARAFKSSHNLAVHRMIHTGEKPLQCEICGFTCRQKASLNWHMKKHDADSFYQFSCNICGKKFEKKDSVVAHKAKSHPEVLIAEALAANAGALITSTDILGTNPESLTQPSDGQGLPLLPEPLGNSTSGECLLLEAEGMSKSYCSGTERVSLMADGKIFVGSGSSGGTEGLVMNSDILGATTEVLIEDSDSAGP

SEQ ID NO: 62103 - protein, 35 aa, Homo sapiens
LARRAIPQVSSVLQPKCWIPRDWKGKSLKITSSGV

SEQ ID NO: 62104 - protein, 314 aa, Homo sapiens
KEEKPDSKKVEEDLKADEPSTEESDLEIDKEGVIEPDTDAPQEMGDENVEITEEMMDQANDKKVAAIEVLNDGELQKAIDLFTDAIKLNPRLAILYAKRASVFVKLQKPNAAIQDCDRAIEINPDSAQPYKWRGKAHRLLGHWEEAAHDLAFACKLDYDEDASAMLKEVQPRAQKIAEHWRKYERKHEEREIKERIERVKKAQEEQERAQREEEARRQSGAHYGPFPGGFPGGMPGNFPGGMPGMGGDMPGMAGMPGLNEILSDPEALAAMQDPEVMVAFQDVAQNPANMSKYQSNPKVMNLISKLSAKFGGQA

SEQ ID NO: 62105 - protein, 45 aa, Homo sapiens
RARLATSGHVPSDSSQPAMEARPPSNRGGGYCCGHWVSASSQQRL

SEQ ID NO: 62106 - protein, 296 aa, Homo sapiens
ISILMKDLADELALVDVIEDKLKGEMMDLQHGSLFLRTPKIVSGKDYNVTANSKLVIITAGARQQEGESRLNLVQRNVNIFKFIIPNVVKYSPNCKLLIVSNPVDILTYVAWKISGFPKNRVIGSGCNLDSARFRYLMGERLGVHPLSCHGWVLGEHGDSSVPVWSGMNVAGVSLKTLHPDLGTDKDKEQWKEVHKQVVESAYEVIKLKGYTSWAIGLSVADLAESIMKNLRRVHPVSTMIKGLYGIKDDVFLSVPCILGQNGISDLVKVTLTSEEEARLKKSADTLWGIQKELQF

SEQ ID NO: 62107 - protein, 163 aa, Homo sapiens
KMLQTSNYSLVLSLQFLLLSYDLFVNSFSELLQKTPVIQLVLFIIQDIAVLFNIIIIFLMFFNTFVFQAGLVNLLFHKFKGTIILTAVYFALSISLHVWVMNLRWKNSNSFIWTDGLQMLFVFQRLAAVLYCYFYKRTAVRLGDPHFYQDSLWLRKEFMQVRR

SEQ ID NO: 62108 - protein, 105 aa, Homo sapiens
VKRERLEDVVGGCCYRVNNSLDHEYQPRPVEVIISSAKEMVGQKMKYSIVSRNCEHFVTQLRYGKSRCKQVEKAKVEVGVATALGILVVAGCSFAIRRYQKKATA

SEQ ID NO: 62109 - protein, 178 aa, Homo sapiens
KTGFVFGTTLIMLLSLAAFSVISVVSYLILALLSVTISFRIYKSVIQAVQKSEEGHPFKAYLDVDITLSSEAFHNYMNAAMVHINRALKLIIRLFLVEDLVDSLKLAVFMWLMTYVGAVFNGITLLILAELLIFSVPIVYEKYKTQIDHYVGIARDQTKSIVEKIQAKLPGIAKKKAE

SEQ ID NO: 62110 - protein, 16 aa, Homo sapiens
MAFKNIASKIANELKL

SEQ ID NO: 62111 - protein, 141 aa, Homo sapiens
RLSWFRVLTVLSICLSAVATATGAEGKRKLQIGVKKRVDHCPIKSRKGDVLHMHYTGKLEDGTEFDSSLPQNQPFVFSLGTGQVIKGWDQGLLGMCEGEKRKLVIPSELGYGERGAPPKIPGGATLVFEVELLKIERRTEL

SEQ ID NO: 62112 - protein, 46 aa, Homo sapiens
LLLVRVLVSDSLFVICALSLAACLCLVARRAPSTSIYLEAKVGLQH

SEQ ID NO: 62113 - protein, 324 aa, Homo sapiens
VQRPISKHRDWGSIMGLCKCPKRKVTNLFCFEHRVNVCEHCLVANHAKCIVQSYLQWLQDSDYNPNCRLCNIPLASRETTRLVCYDLFHWACLNERAAQLPRNTAPAGYQCPSCNGPIFPPTNLAGPVASALREKLATVNWARAGLGLPLIDEVVSPEPEPLNTSDFSDWSSFNASSTPGPEEVDSASAAPAFYSQAPRPPASPGRPEQHTVIHMGNPEPLTHAPRKVYDTRDDDRTPGLHGDCDDDKYRRRPALGWLARLLRSRAGSRKRPLTLLQRAGLLLLLGLLGFLALLALMSRLGRAAADSDPNLDPLMNPHIRVGPS

SEQ ID NO: 62114 - protein, 687 aa, Homo sapiens
LGRHENAIKYLGQDYEQLRVRCLQSGTLFRDEAFPPVPQSLGYKDLGPNSSKTYGIKWKRPTELLSNPQFIVDGATRTDICQGALGDCWLLAAIASLTLNDTLLHRVVPHGQSFQNGYAGIFHFQLWQFGEWVDVVVDDLLPIKDGKLVFVHSAEGNEFWSALLEKAYAKVNGSYEALSGGSTSEGFEDFTGGVTEWYELRKAPSDLYQIILKALERGSLLGCSIDISSVLDMEAITFKKLVKGHAYSVTGAKQVNYRGQVVSLIRMRNPWGEVEWTGAWSDSSSEWNNVDPYERDQLRVKMEDGEFWMSFRDFMREFTRLEICNLTPDALKSRTIRKWNTTLYEGTWRRGSTAGGCRNYPATFWVNPQFKIRLDETDDPDDYGDRESGCSFVLALMQKHRRRERRFGRDMETIGFAVYEVPPELVGQPAVHLKRDFFLANASRARSEQFINLREVSTRFRLPPGEYVVVPSTFEPNKEGDFVLRFFSEKSAGTVELDDQIQANLPDEQVLSEEEIDENFKALFRQLAGEDMEISVKELRTILNRIISKHKDLRTKGFSLESCRSMVNLMDRDGNGKLGLVEFNILWNRIRNYLSIFRKFDLDKSGSMSAYEMRMAIESAGFKLNKKLYELIITRYSEPDLAVDFDNFVCCLVRLETMFRFFKTLDTDLDGVVTFDLFKWLQLTMFA

SEQ ID NO: 62115 - protein, 321 aa, Homo sapiens
LGTDEDSQDSSDGIPSAPRMTGSLVSDRSHDDIVTRMKNIECIELGRHRLKPWYFSPYPQELTTLPVLYLCEFCLKYGRSLKCLQRHLTKCDLRHPPGNEIYRKGTISFFEIDGRKNKSYSQNLCLLAKCFLDHKTLYYDTDPFLFYVMTEYDCKGFHIVGYFSKEKESTEDYNVACILTLPPYQRRGYGKLLIEFSYELSKVEGKTGTPEKPLSDLGLLSYRSYWSQTILEILMGLKSESGERPQITINEISEITSIKKEDVISTLQYLNLINYYKGQYILTLSEDIVDGHERAMLKRLLRIDSKCLHFTPKDWSKRGKW

SEQ ID NO: 62116 - protein, 262 aa, Homo sapiens
VPPHCSQKPVGELWHLQTTPWNECFLWLRVGEEVWSQQAARSLTARPGGEVTMSTKVPIYLKRGSRKGKKEKLRDLLSSDMISPPLGDFRHTIHIGSGGGSDMFGDISFLQGKFHLLPGTMVEGPEEDGTFDLPFQFTRTATVCGRELPDGPSPLLKNAISLPVIGGPQALTLPTAQAPPKPPRLHLETPQPSPQEGGSVDIWRIPETGSPNSGLTPESGAEEPFLSNASSLLSLHVDLGPSILDDVLQIMDQDLDSMQIPT

SEQ ID NO: 62117 - protein, 294 aa, Homo sapiens
IKPDTDQTLKKEGLISQDGSSLEALLRTDPLEKRGAPDPRVDDDSLGEFPVTNSRARKRILEPDDFLDDLDDEDYEEDTPKRRGKGKSKGKGVGSARKKLDASILEDRDKPYACDICGKRYKNRPGLSYHYAHSHLAEEEGEDKEDSQPPTPVSQRSEEQKSKKGPDGLALPNNYCDFCLGDSKINKKTGQPEELVSCSDCGRSGHPSCLQFTPVMMAAVKTYRWQCIECKCCNICGTSENDDQLLFCDDCDRGYHMYCLTPSMSEPPEGSWSCHLCLDLLKEKASIYQNQNSS

SEQ ID NO: 62118 - protein, 320 aa, Homo sapiens
LRLLYEEAKGNVLAARYPCDVEDCEALGALVCRVQLGPYQPGRPAACDLREKLDSFLPAHLCKRGQSLFAALRGRGARAGPGEQGLLNAYRQVQEVSSDGGCEAALGTHYRAYLLKCHELPFYGCAFFHGEVDKPAQGFLHRGGRKPVSVAISLEGVHVIDSREKHVLLGLRFQELSWDHTSPEEEEPILWLEFDGDSEGTPVNKLLKIYSKQAELMSSLIEYCIELSQAAEPAGPQDSATGSPSDPSSSLAPVQRPKLRRQGSVVSSRIQHLSTIDYVEDGKGIRRVKPKRTTSFFSRQLSLGQGSYTVVQPGDSLEQG

SEQ ID NO: 62119 - protein, 811 aa, Homo sapiens
VGTMWFFARDPVRDFPFELIPEPPEGGLPGPWALHRGRKKATGSPVSIFVYDVKPGAEEQTQVAKAAFKRFKTLRHPNILAYIDGLETEKCLHVVTEAVTPLGIYLKARVEAGGLKELEISWGLHQIVKALSFLVNDCSLIHNNVCMAAVFVDRAGEWKLGGLDYMYSAQGNGGGPPRKGIPELEQYDPPELADSSGRVVREKWSADMWRLGCLIWEVFNGPLPRAAALRNPGKIPKTLVPHYCELVGANPKVRPNPARFLQNCRAPGGFMSNRFVETNLFLEEIQIKEPAEKQKFFQELSKSLDAFPEDFCRHKVLPQLLTAFEFGNAGAVVLTPLFKVGKFLSAEEYQQKIIPVVVKMFSSTDRAMRIRLLQQMEQFIQYLDEPTVNTQIFPHVVHGFLDTNPAIREQTVKSMLLLAPKLNEANLNVELMKHFARLQAKDEQGPIRCNTTVCLGKIGSYLSASTRHRVLTSAFSRATRDPFAPSRVAGVLGFAATHNLYSMNDCAQKILPVLCGLTVDPEKSVRDQAFKAIRSFLSKLESVSEDPTQLEEVEKDVHAASSPGMGGAAASWAGWAVTGVSSLTSKLIRSHPTTAPTETNIPQRPTPEGVPAPAPTPVPATPTTSGHWETQEEDKDTAEDSSTADRWDDEDWGSLEQEAESVLAQQDDWSTGGQVSRASQVSNSDHKSSKSPESDWSSWEAEGSWEQGWQEPSSQEPPPDGTRLASEYNWGGPESSDKGDPFATLSARPSTQPRPDSWGEDNWEGLETDSRQVKAELARKKREERRREMEAKRAERKVAKGPMKLGARKLD

SEQ ID NO: 62120 - protein, 139 aa, Homo sapiens
IHDELSRAARAPDGPRHAAGAANAGPAAGPRRPVNLDSALAALRKEMVGLRQLDMSLLCQLWGLYESIQDYKHLCQDLSFCQDLSSSLHSDSSYPPDAGLSDDEEPPDASLPPDPPPLTVPQTHNARDQWLQDAFHISL

SEQ ID NO: 62121 - protein, 423 aa, Homo sapiens
IESYRDPFGSRGEFEGFVAVVNKAMSAKFERLVASAEQLLKELPWPPTFEKDKFLTPDFTSLDVLTFAGSGIPAGINIPNYDDLRQTEGFKNVSLGNVLAVAYATQREKLTFLEEDDKDLYILWKGPSFDVQVGLHELLGHGSGKLFVQDEKGAFNFDQETVINPETGEQIQSWYRSGETWDSKFSTIASSYEECRAESVGLYLCLHPQVLEIFGFEGADAEDVIYVNWLNMVRAGLLALEFYTPEAFNWRQAHMQARFVILRVLLEAGEGLVTITPTTGSDGRPDARVRLDRSKIRSVGKPALERFLRRLQVLKSTGDVAGGRALYEGYATVTDAPPECFLTLRDTVLLRKESRKLIVQPNTRLEGSDVQLLEYEASAAGLIRSFSERFPEDGPELEEILTQLATADARFWKGPSEAPSGQA

SEQ ID NO: 62122 - protein, 28 aa, Homo sapiens
VLVLREGQSAPLLSAHVNMPGSEGLAAA

SEQ ID NO: 62123 - protein, 225 aa, Homo sapiens
MVLVHTTLPSQEVQALLEGTGRQAVLKGMGSGQLQNLGAAVAILGGPGTVQGVVRFLQLTPERCLIEGTIDGLEPGLHGLHVHQYGDLTNNCNSCGNHFNPDGASHGGPQDSDRHRGDLGNVRADADGRAIFRMEDEQLKVWDVIGRSLIIDEGEDDLGRGGHPLSKITGNSGERLACGIIARSAGLFQNPKQICSCDGLTIWEERGRPIAGKGRKESAQPPAHL

SEQ ID NO: 62124 - protein, 230 aa, Homo sapiens
IDLSRCKAIVPQALSGIIKRQPVSLDLSWTNISKKQLTWLVNRLPGLKDLLLAGCSWSAVSALSTSSCPLLRTLDLRWAVGIKDPQIRDLLTPPADKPGQDNRSKLRNMTDFRLAGLDITDATLRLIIRHMPLLSRLDLSHCSHLTDQSSNLLTAVGSSTRYSLTELNMAGCNKLTDQTLIYLRRIANVTLIDLRGCKQITRKACEHFISDLSINSLYCLSDEKLIQKIS

SEQ ID NO: 62125 - protein, 102 aa, Homo sapiens
KEKDGYKPDVKIEYVDETGRKLTPKEAFRQLSHRFHGKGSGKMKTERRMKKLDEEALLKKMSSSDTPLGTVALLQEKQKAQKTPYIVLSGSGKSMNANTITK

SEQ ID NO: 62126 - protein, 918 aa, Homo sapiens
TPPKLAQATSSSSSTSAAAASSSSSSTSTSMAVAVASGSAPPGGPGPGRTPAPVQMNLYATWEVDRSSSSCVPRLFSLTLKKLVMLKEMDKDLNSVVIAVKLQGSKRILRSNEIVLPASGLVETELQLTFSLQYPHFLKRDANKLQIMLQRRKRYKNRTILGYKTLAVGLINMAEVMQHPNEGALVLGLHSNVKDVSVPVAEIKIYSLSSQPIDHEGIKSKLSDRSPDIDNYSEEEEESFSSEQEGSDDPLHGQDLFYEDEDLRKVKKTRRKLTSTSAITRQPNIKQKFVALLKRFKVSDEVGFGLEHVSREQIREVEEDLDELYDSLEMYNPSDSGPEMEETESILSTPKPKLKPFFEGMSQSSSQTEIGSLNSKGSLGKDTTSPMELAALEKIKSTWIKNQDDSLTETDTLEITDQDMFGDASTSLVVPEKVKTPMKSSKTDLQGSASPSKVEGVHTPRQKRSTPLKERQLSKPLSERTNSSDSERSPDLGHSTQIPRKVVYDQLNQILVSDAALPENVILVNTTDWQGQYVAELLQDQRKPVVCTCSTVEVQAVLSALLTRIQRYCNCNSSMPRPVKVAAVGGQSYLSSILRFFVKSLANKTSDWLGYMRFLIIPLGSHPVAKYLGSVDSKYSSSFLDSGWRDLFSRSEPPVSEQLDVAGRVMQYVNGAATTHQLPVAEAMLTCRHKFPDEDSYQKFIPFIGVVKVGLVEDSPSTAGDGDDSPVVSLTVPSTSPPSSSGLSRDATATPPSSPSMSSALAIVGSPNSPYGDVIGLQVDYWLGHPGERRREGDKRDASSKNTLKSVFRSVQVSRLPHSGEAQLSGTMAMTVVTKEKNKKVPTIFLSKKPREKEVDSKSQVIEGISRLICSAKQQQTMLRVSIDGVEWSDIKFFQLAAQWPTHVKHFPVGLFSGSKAT

SEQ ID NO: 62127 - protein, 329 aa, Homo sapiens
VKMAAVVEVEVGGGAAGERELDEVDMSDLSPEEQWRVEHARMHAKHRGHEAMHAEMVLILIATLVVAQLLLVQWKQRHPRSYNMVTLFQMWVVPLYFTVKLHWWRFLVIWILFSAVTAFVTFRATRKPLVQTTPRLVYKWFLLIYKISYATGIVGYMAVMFTLFGLNLLFKIKPEDAMDFGISLLFYGLYYGVLERDFAEMCADYMASTIGFYSESGMPTKHLSDSVCAVCGQQIFVDVSEEGIIENTYRLSCNHVFHEFCIRGWCIVGKKQTCPYCKEKVDLKRMFSNPWERPHVMYGQLLDWLRYLVAWQPVIIGVVQGINYILGLE

SEQ ID NO: 62128 - protein, 211 aa, Homo sapiens
KMRCLTTPMLLRALAQAARAGPPGGRSLHSSAVAATYKYVNMQDPEMDMKSVTDRAARTLLWTELFRGLGMTLSYLFREPATINYPFEKGPLSPRFRGEHALRRYPSGEERCIACKLCEAICPAQAITIEAEPRADGSRRTTRYDIDMTKCIYCGFCQEACPVDAIVEGPNFEFSTETHEELLYNKEKLLNNGDKWEAEIAANIQADYLYR

SEQ ID NO: 62129 - protein, 600 aa, Homo sapiens
KIRKITDCFHCHVFPFLQQEEARLGALQQLQQQSQELQEVLGETERFLSQVLGRVLQLLPPGQVQVHKMKAVYLALNQCSVSTTHKCLIAEAWCSVRDLPALQEALRDSSMEEGVSAVAHRIPCRDMPPTLIRTNRFTASFQGIVDAYGVGRYQEVNPAPYTIITFPFLFAVMFGDVGHGLLMFLFALAMVLAENRPAVKAAQNEIWQTFFRGRYLLLLMGLFSIYTGFIYNECFSRATSIFPSGWSVAAMANQSGWSDAFLAQHTMLTLDPNVTGVFLGPYPFGIDPIWSLAANHLSFLNSFKMKMSVILGVVHMAFGVVLGVFNHVHFGQRHRLLLETLPELTFLLGLFGYLVFLVIYKWLCVWAARAASAPSILIHFINMFLFSHSPSNRLLYPRQEVVQATLVVLALAMVPILLLGTPLHLLHRHRRRLRRRPADRQEENKAGLLDLPDASVNGWSSDEEKAGGLDDEEEAELVPSEVLMHQAIHTIEFCLGCVSNTASYLRLWALSLAHAQLSEVLWAMVMRIGLGLGREVGVAAVVLVPIFAAFAVMTVAILLVMEGLSAFLHALRLHWVEFQNKFYSGTGYKLSPFTFAATDD

SEQ ID NO: 62130 - protein, 179 aa, Homo sapiens
IYSVGGILLSISRPYKTKPTHGIGKYKHLIKAEEPKKKKGKVEVRAINLGTDYEYGVLNIHLTAYDMTLAESYAQYVHNLCNSLSIKVEESYAMPTKTIEVLQLQDQGSKMLLDSVLTTHERVVQISGLSATFAEIFLEIIQSSLPEGVRLSVKEHTEEDFKGRFKARPELEELLAKLK

SEQ ID NO: 62131 - protein, 202 aa, Homo sapiens
MHSLQHKAASSIYINSRSVFLRTDQPEGRYVIIPTTFEPGHTGEFLLRVFTDVPSNCRELRLDEPPHTCWSSLCGYPQLVTQVHVLGAAGLKDSPTGANSYVIIKCEGDKVRSAVQKGTSTPEYNVKGIFYRKKLSQPITVQVWNHRVLKDEFLGQVHLKADPDNLQALHTLHLRDRNSRQPSNLPGTVAVHILSSTSLMAV

SEQ ID NO: 62132 - protein, 155 aa, Homo sapiens
VLVWSNDRVIRWILSIGLKEYANNLIESGVHGALLALDETFDFSALALLLQIPTQNTQARAVLEREFNNLLVMGTDRRFDEDDDKSFRRAPSWRKKFRPKDIRGLAAGSAETLPANFRVTSSMSSPSMQPKKMQMDGNVSGTQRLDSATVRTYSC

SEQ ID NO: 62133 - protein, 201 aa, Homo sapiens
KMAASMHGQPSPSLEDAKLRRPMVIEIIEKNFDYLRKEMTQNIYQMATFGTTAGFSGIFSNFLFRRCFKVKHDALKTYASLATLPFLSTVVTDKLFVIDALYSDNISKENCVFRSSLIGIVCGVFYPSSLAFTKNGRLATKYHTVPLPPKGRVLIHWMTLCQTQMKLMAIPLVFQIMFGILNGLYHYAVFEETLEKTIHEE

SEQ ID NO: 62134 - protein, 198 aa, Homo sapiens
RLKMENHKSNNKENITIVDISRKINQLPEAERNLLENGSVYVGLNAALCGLIANSLFRRILNVTKARIAAGLPMAGIPFLTTDLTYRCFVSFPLNTGDLDCETCTITRSGLTGLVIGGLYPVFLAIPVNGGLAARYQSALLPHKGNILSYWIRTSKPVFRKMLFPILLQTMFSAYLGSEQYKLLIKALQLSEPGKEIH

SEQ ID NO: 62135 - protein, 72 aa, Homo sapiens
MDFWQKMLALGNQVGKLYVWDLEVEDPHKAKCTTLTHHKCGAAIRQTSFSRDSSILIAVCDDASIWRWDRLR

SEQ ID NO: 62136 - protein, 450 aa, Homo sapiens
RLFLSRHHWPPAAAPGVLAAQPRRRPGTPVLCAKPWPRGPGHGPGARGEAASRGAVTGRASAMKTLIAAYSGVLRGERQAEADRSQRSHGGPALSREGSGRWGTGSSILSALQDLFSVTWLNRSKVEKQLQVISVLQWVLSFLVLGVACSAILMYIFCTDCWLIAVLYFTWLVFDWNTPKKGGRRSQWVRNWAVWRYFRDYFPIQLVKTHNLLTTRNYIFGYHPHGIMGLGAFCNFSTEATEVSKKFPGIRPYLATLAGNFRMPVLREYLMSGGICPVSRDTIDYLLSKNGSGNAIIIVVGGAAESLSSMPGKNAVTLRNRKGFVKLALRHGADLVPIYSFGENEVYKQVIFEEGSWGRWVQKKFQKYIGFAPCIFHGRGLFSSDTWGLVPYSKPITTVVGEPITIPKLEHPTQQDIDLYHTMYMEALVKLFDKHKTKFGLPETEVLEVN

SEQ ID NO: 62137 - protein, 62 aa, Homo sapiens
KREGSTVSNSIQPPPPEYQLGSRTWLEAETPGQKRQCSAFMEFTEESRRASHFSSILKIEPV

SEQ ID NO: 62138 - protein, 389 aa, Homo sapiens
INEAEAITSVNSLGSKQALNTDYLDSDYQRGQLYPFSLSSDVQVATFTLTNSAPMTQSFQERWYVNLHSLMDRALTPQCGSGEDLYILTGTVPSDYRVKDKVAVPEFVWLAACCAVPGGGWAMGFVKHTRDSDIIEDVMVKDLQKLLPFNPQLFQNNCGETEQDTEKMKKILEVVNQIQDEERMVQSQKSSSPLSSTRSKRSTLLPPEASEGSSSFLGKLMGFIATPFIKLFQLIYYLVVAILKNIVYFLWCVTKQVINGIESCLYRLGSATISYFMAIGEELVSIPWKVLKVVAKVIRALLRILCCLLKAICRVLSIPVRVLVDVATFPVYTMGAIPIVCKDIALGLGGTVSLLFDTAFGTLGGLFQVVFSVCKRIGYKVTFDNSGEL

SEQ ID NO: 62139 - protein, 19 aa, Homo sapiens
IYHYLFEIVEGCTNSSPQS

SEQ ID NO: 62140 - protein, 901 aa, Homo sapiens
VEATSSIREKVVEDPLCNFHSPNFLRISEVEMRGSEDAAAGTVLQRLIQEQLRYGTPTENMNLLAIQHQATGSAGPAHPTNNFSSTENLTQEDPQMVYQSARQEPQGQEHQVDNTVMEKQVRSTQPQQNNEELPTYEEAKAQSQFFRGQQQQQQQQGAVGHGYYMAGGTSQKSRTEGRPTVNRANSGQAHKDEALKELKQGHVRSLSERIMQLSLERNGAKQHLPGSGNGKGFKVGGGPSPAQPAGKVLDPRGPPPEYPFKTKQMMSPVSKTQEHGLFYGDQHPGMLHEMVKPYPAPQPVRTDVAVLRYQPPPEYGVTSRPCQLPFPSTMQQHSPMSSQTSSASGPLHSVSLPLPLPMALGAPQPPPAASPSQQLGPDAFAIVERAQQMVEILTEENRVLHQELQGYYDNADKLHKFEKELQRISEAYESLVKSTTKRESLDKAMRNKLEGEIRRLHDFNRDLRDRLETANRQLSSREYEGHEDKAAEGHYASQNKEFLKEKEKLEMELAAVRTASEDHRRHIEILDQALSNAQARVIKLEEELREKQAYVEKVEKLQQALTQLQSACEKREQMERRLRTWLERELDALRTQQKHGNGQPANMPEYNAPALLELVREKEERILALEADMTKWEQKYLEESTIRHFAMNAAATAAAERDTTIINHSRNGSYGESSLEAHIWQEEEEVVQANRRCQDMEYTIKNLHAKIIEKDAMIKVLQQRSRKDAGKTDSSSLRPARSVPSIAAATGTHSRQTSLTSSQLAEEKKEEKTWKGSIGLLLGKEHHEHASAPLLPPPPTSALSSIASTTAASSAHAKTGSKDSSTQTDKSAELFWPSMASLPSRGRLSTTPAHSPVLKHPAAKGTAEKLENSPGHGKSPDHRGRVSSLLHKPEFPDGEMMEVLI

SEQ ID NO: 62141 - protein, 38 aa, Homo sapiens
IEINPDSAQPCKWRGKAHRLLGHWEEAAHDLALACRLD

SEQ ID NO: 62142 - protein, 50 aa, Homo sapiens
RSPDSTACSSSFLSSFSAVGSCFSWDTDPHWSSLWPSSYTHSSASSTVFF

SEQ ID NO: 62143 - protein, 601 aa, Homo sapiens
IKSIMEDSTILSDWTNSNKQKMKYDFSCELYRMSTYSTFPAGVPVSERSLARAGFYYTGVNDKVKCFCCGLMLDNWKLGDSPIQKHKQLYPSCSFIQNLVSASLGSTSKNTSPMRNSFAHSLSPTLEHSSLFSGSYSSLSPNPLNSRAVEDISSSRTNPYSYAMSTEEARFLTYHMWPLTFLSPSELARAGFYYIGPGDRVACFACGGKLSNWEPKDDAMSEHRRHFPNCPFLENSLETLRFSISNLSMQTHAARMRTFMYWPSSVPVQPEQLASAGFYYVGRNDDVKCFCCDGGLRCWESGDDPWVEHAKWFPRCEFLIRMKGQEFVDEIQGRYPHLLEQLLSTSDTTGEENADPPIIHFGPGESSSEDAVMMNTPVVKSALEMGFNRDLVKQTVQSKILTTGENYKTVNDIVSALLNAEDEKREEEKEKQAEEMASDDLSLIRKNRMALFQQLTCVLPILDNLLKANVINKQEHDIIKQKTQIPLQARELIDTILVKGNAAANIFKNCLKEIDSTLYKNLFVDKNMKYIPTEDVSGLSLEEQLRRLQEERTCKVCMDKEVSVVFIPCGHLVVCQECAPSLRKCPICRGIIKGTVRTFLS

SEQ ID NO: 62144 - protein, 27 aa, Homo sapiens
IDATGFININSLRLKEYHRLQSKVTAK

SEQ ID NO: 62145 - protein, 49 aa, Homo sapiens
TGPDCPRSPGLQEAPSSYDPLALSELPGLFDCEMLDAVDPQHNGYVLVN

SEQ ID NO: 62146 - protein, 105 aa, Homo sapiens
LDVSHFTPDEVTVRTVDNLLEVSARHPQRLDRHGFVSREFCRTYVLPADVDPWRVRAALSHDGILNLEAPRGGRHLDTEVNEVYISLLPAPPDPEEEEEAAIVEP

SEQ ID NO: 62147 - protein, 574 aa, Homo sapiens
LLQLLGSPGRRYYSLPPHQKVPLPSLSPTMQAGTIARWEKKEGDKINEGDLIAEVETDKATVGFESLEECYMAKILVAEGTRDVPIGAIICITVGKPEDIEAFKNYTLDSSAAPTPQAAPAPTPAATASPPTPSAQAPGSSYPPHMQVLLPALSPTMTMGTVQRWEKKVGEKLSEGDLLAEIETDKATIGFEVQEEGYLAKILVPEGTRDVPLGTPLCIIVEKEADISAFADYRPTEVTDLKPQVPPPTPPPVAAVPPTPQPLAPTPSAPCPATPAGPKGRVFVSPLAKKLAVEKGIDLTQVKGTGPDGRITKKDIDSFVPSKVAPAPAAVVPPTGPGMAPVPTGVFTDIPISNIRRVIAQRLMQSKQTIPHYYLSIDVNMGEVLLVRKELNKILEGRSKISVNDFIIKASALACLKVPEANSSWMDTVIRQNHVVDVSVAVSTPAGLITPIVFNAHIKGVETIANDVVSLATKAREGKLQPHEFQGGTFTISNLGMFGIKNFSAIINPPQACILAIGASEDKLVPADNEKGFDVASMMSVTLSCDHRVVDGAVGAQWLAEFRKYLEKPITMLL

SEQ ID NO: 62148 - protein, 38 aa, Homo sapiens
VESMLPLPSQVGSRYLLSIRRSGLPERVHEVFRVGKLR

SEQ ID NO: 62149 - protein, 775 aa, Homo sapiens
LLKNKGSLQFEDKWDFMRPIVLKLLRQESVTKQQWFDLFSDVHAVCLWDDKGPAKIHQALKEDILEFIKQAQARVLSHQDDTALLKAYIVEWRKFFTQCDILPKPFCQLEITLMGKQGSNKKSNVEDSIVRKLMLDTWNESIFSNIKNRLQDSAMKLVHAERLGEAFDSQLVIGVRESYVNLCSNPEDKLQIYRDNFEKAYLDSTERFYRTQAPSYLQQNGVQNYMKYADAKLKEEEKRALRYLETRRECNSVEALMECCVNALVTSFKETILAECQGMIKRNETEKLHLMFSLMDKVPNGIEPMLKDLEEHIISAGLADMVAAAETITTDSEKYVEQLLTLFNRFSKLVKEAFQDDPRFLTARDKAYKAVVNDATIFKLELPLKQKGVGLKTQPESKCPELLANYCDMLLRKTPLSKKLTSEEIEAKLKEVLLVLKYVQNKDVFMRYHKAHLTRRLILDISADSEIEENMVEWLREVGMPADYVNKLARMFQDIKVSEDLNQAFKEMHKNNKLALPADSVNIKILNAGAWSRSSEKVFVSLPTELEDLIPEVEEFYKKNHSGRKLHWHHLMSNGIITFKNEVGQYDLEVTTFQLAVLFAWNQRPREKISFENLKLATELPDAELRRTLWSLVAFPKLKRQVLLYEPQVNSPKDFTEGTLFSVNQEFSLIKNAKVQKRGKINLIGRLQLTTERMREEENEGIVQLRILRTQEAIIQIMKMRKKISNAQLQTELVEILKNMFLPQKKMIKEQIEWLIEHKYIRRDESDINTFIYMA

SEQ ID NO: 62150 - protein, 41 aa, Homo sapiens
IPSLPAPSRPPPPLRGPWEPLRGSWEGTFPNLRPGLKFWSW

SEQ ID NO: 62151 - protein, 32 aa, Homo sapiens
LEHQVFTVLSPAPRPLPKNFLLIMDIRFMDLK

SEQ ID NO: 62152 - protein, 41 aa, Homo sapiens
IGPGSPPSPATQSPEGKKASCLSRGEHHGSDKNGHDPAAEP

SEQ ID NO: 62153 - protein, 129 aa, Homo sapiens
ILGRALGAMAPRGRKRKAEAAVVAVAEKREKLANGGEGMEEATVVIEHCTSRVYGRNAAALSQALRLEAPELPVKVNPTKPRRGSFEVTLLRPDGSSAELWTGIKKGPPRKLKFPEPQEVVEELKKYLS

SEQ ID NO: 62154 - protein, 52 aa, Homo sapiens
VAKNQLPCWICLSQHLGEALGFFLKGLIFRTPHLRTAGLWAMLTLKDRNFQI

SEQ ID NO: 62155 - protein, 46 aa, Homo sapiens
MKKAGIDLPLRQFPGPPWCTQTTSWPCAPSCFSAPSASWRRPWPPR

SEQ ID NO: 62156 - protein, 71 aa, Homo sapiens
IQETMQATIHVPAQHEDGPEDDPQLVGITARNIPRGPQLAAQNLGISLANLLLSKGAKNILDVARQLNDAH

SEQ ID NO: 62157 - protein, 139 aa, Homo sapiens [sequence omitted]

SEQ ID NO: 62158 - protein, 4 aa, Homo sapiens
MAAP

SEQ ID NO: 62159 - protein, 365 aa, Homo sapiens
ITCAGDEKEIAAFCAHVSELDLSDNKLEDWHEVSKIVSNVPQLEFLNLSSNPLNLSVLERTCAGSFSGVRKLVLNNSKASWETVHMILQELPDLEELFLCLNDYETVSCPSICCHSLKLLHITDNNLQDWTEIRKLGVMFPSLDTLVLANNHLNAIEEPDDSLARLFPNLRSISLHKSGLQSWEDIDKLNSFPKLEEVRLLGIPLLQPYTTEERRKLVIARLPSVSKLNGSVVTDGEREDSERFFIRYYVDVPQEEVPFRYHELITKYGKLEPLAEVDLRPQSSAKVEVHFNDQVEEMSIRLDQTVAELKKQLKTLVQLPTSNMLLYYFDHEAPFGPEEMKYSSRALHSFGIRDGDKIYVESKTK

SEQ ID NO: 62160 - protein, 920 aa, Homo sapiens
LDPDINGRRYYWRGPEDSGDQGLIFQITAFQEDFYLHLTPDAQFLAPAFSTEHLGVPLQGLTGGSSDLRRCFYSGDVNAEPDSFAAVSLCGGLRGAFGYRGAEYVISPLPNASAPAAQRNSQGAHLLQRRGVPGGPSGDPTSRCGVASGWNPAILRALDPYKPRRAGFGESRSRRRSGRAKRFVSIPRYVETLVVADESMVKFHGADLEHYLLTLLATAARLYRHPSILNPINIVVVKVLLLRDRDSGPKVTGNAALTLRNFCAWQKKLNKVSDKHPEYWDTAILFTRQDLCGATTCDTLGMADVGTMCDPKRSCSVIEDDGLPSAFTTAHELGHVFNMPHDNVKVCEEVFGKLRANHMMSPTLIQIDRANPWSACSAAIITDFLDSGHGDCLLDQPSKPISLPEDLPGASYTLSQQCELAFGVGSKPCPYMQYCTKLWCTGKAKGQMVCQTRHFPWADGTSCGEGKLCLKGACVERHNLNKHRVDGSWAKWDPYGPCSRTCGGGVQLARRQCTNPTPANGGKYCEGVRVKYRSCNLEPCPSSASGKSFREEQCEAFNGYNHSTNRLTLAVAWVPKYSGVSPRDKCKLICRANGTGYFYVLAPKVVDGTLCSPDSTSVCVQGKCIKAGCDGNLGSKKRFDKCGVCGGDNKSCKKVTGLFTKPMHGYNFVVAIPAGASSIDIRQRGYKGLIGDDNYLALKNSQGKYLLNGHFVVSAVERDLVVKGSLLRYSGTGTAVESLQASRPILEPLTVEVLSVGKMTPPRVRYSFYLPKEPREDKSSHPKDPRGPSVLHNSVLSLSNQVEQPDDRPPARWVAGSWGPCSASCGSGLQKRAVDCRGSAGQRTVPACDAAHRPVETQACGEPCPTWELSAWSPCSKSCGRGFQRRSLKCVGHGGRLLARDQCNLHRKPQELDFCVLRPC

SEQ ID NO: 62161 - protein, 1379 aa, Homo sapiens
RTMDALNRNQIGPGCQTQTMVQKGPLDLIETGKGLKVQTDKPHLVSLGSGRLSTAITLLPLEEGRTVIGSAARDISLQGPGLAPEHCYIENLRGTLTLYPCGNACTIDGLPVRQPTRLTQGCMLCLGQSTFLRFNHPAEAKWMKSMIPAGGRAPGPPYSPVPAESESLVNGNHTPQTATRGPSACASHSSLVSSIEKDLQEIMDSLVLEEPGAAGKKPAATSPLSPMANGGRYLLSPPTSPGAMSVGSSYENTSPAFSPLSSPASSGSCASHSPSGQEPGPSVPPLVPARSSSYHLALQPPQSRPSGARSESPRLSRKGGHERPPSPGLRGLLTDSPAATVLAEARRATESPRLGGQLPVVAISLSEYPASGALSQPTSIPGSPKFQPPVPAPRNKIGTLQDRPPSPFREPPGSERVLTTSPSRQLVGRTFSDGLATRTLQPPESPRLGRRGLDSMRELPPLSPSLSRRALSPLPTRTTPDPKLNREVAESPRPRRWAAHGASPEDFSLTLGARGRRTRSPSPTLGESLAPHKGSFSGRLSPAYSLGSLTGASPCQSPCVQRKLSSGDLRVPVTRERKNSITEISDNEDDLLEYHRRQRQERLREQEMERLERQRLETILNLCAEYSRADGGPEAGELPSIGEATAALALAGRRPSRGLAGASGRSSEEPGVATQRLWESMERSDEENLKEECSSTESTQQEHEDAPSTKLQGEVLALEEERAQVLGHVEQLKVRVKELEQQLQESAREAEMERALLQGEREAERALLQKEQKAVDQLQEKLVALETGIQKERDKEAEALETETKLFEDLEFQQLERESRVEEERELAGQGLLRSKAELLRSIAKRKERLAILDSQAGQIRAQAVQESERLARDKNASLQLLQKEKEKLTVLERRYHSLTGGRPFPKTTSTLKEMEKLLLPAVDLEQWYQELMAGLGTGPAAASPHSSPPPLPAKASRQLQVYRSKMDGEATSPLPRTRSGPLPSSSGSSSSSSQLSVATLGRSPSPKSALLTQNGTGSLPRNLAATLQDIETKRQLALQQKGQQVIEEQRRRLAELKQKAAAEAQCQWDALHGAAPFPAGPSGFPPLMHHSILHHLPAGRERGEEGEHAYDTLSLESSDSMETSISTGGNSACSPDNMSSASGLDMGKIEEMEKMLKEAHAEKNRLMESREREMELRRQALEEERRRREQVERRLQSESARRQQLVEKEVKMREKQFSQARPLTRYLPIRKEDFDLKTHIESSGHGVDTCLHVVLSSKVCRGYLVKMGGKIKSWKKRWFVFDRLKRTLSYYVDKHETKLKGVIYFQAIEEVYYDHLRSAAKKRFFRFTMVTESPNPALTFCVKTHDRLYYMVAPSAEAMRIWMDVIVTGAEGYTQFMN

SEQ ID NO: 62162 - protein, 84 aa, Homo sapiens
LKETCEKLGYQWKKSCMNQVTISTTDRRNNKLIFKVNLLEMDDKILVDFRLSKGDGLEFKRHFLKIKGKLIDIVSSQKIWLPAT

SEQ ID NO: 62163 - protein, 13 aa, Homo sapiens
IHKVCVRVQAPAG

SEQ ID NO: 62164 - protein, 1036 aa, Homo sapiens
IQKEQLKQQSDELPASPDDSDNSVSESLDEFDYSVAEISRSFRSQQEICEQLNINHMIQRIFLITLDNSDPSLKSGNGIPSRCVYLEEMAVELEDQDWLDMSNVEQALFARLLLQDPGNHLINMTSSTTLNLSADRDAGERHIFCYLYSCFQRAKEEITKVPENLLPFAVQCRNLTVSNTRTVLLTPEIYVDQNIHEQLVDLMLEAIQGAHFEDVTEFLEEVIEALILDEEVRTFPEVMIPVFDILLGRIKDLELCQILLYAYLDILLYFTRQKDMAKVFVEYIQPKDPTNGQMYQKTLLGVILSISCLLKTPGVVENHGYFLNPSRSSPQEIKVQEANIHQFMAQFHEKIYQMLKNLLQLSPETKHCILSWLGNCLHANAGRTKIWANQMPEIFFQMYASDAFFLNLGAALLKLCQPFCKPRSSRLLTFNPTYCALKELNDEERKIKNVHMRGLDKETCLIPAVQEPKFPQNYNLVTENLALTEYTLYLGFHRLHDQMVKINQNLHRLQVAWRDAQQSSSPAADNLREQFERLMTIYLSTKTAMTEPQMLQNCLNLQVSMAVLLVQLAIGNEGSQPIELTFPLPDGYSSLAYVPEFFADNLGDFLIFLRRFADDILETSADSLEHVLHFITIFTGSIERMKNPHLRAKLAEVLEAVMPHLDQTPNPLVSSVFHRKRVFCNFQYAPQLAEALIKVFVDIEFTGDPHQFEQKFNYRRPMYPILRYMWGTDTYRESIKDLADYASKNLEAMNPPLFLRFLNLLMNDAIFLLDEAIQYLSKIKIQQIEKDRGEWDSLTPEARREKEAGLQMFGQLARFHNIMSNETIGTLAFLTSEIKSLFVHPFLAERIISMLNYFLQHLVGPKMGALKVKDFSEFDFKPQQLVSDICTIYLNLGDEENFCATVPKDGRSYSPTLFAQTVRVLKKINKPGNMIMAFSNLAERIKSLADLQQQEEETYADACDEFLDPIMSTLMCDPVVLPSSRVTVDRSTIARHLLSDQTDPFNRSPLTMDQIRPNTELKEKIQRWLAERKQQKEQLE

SEQ ID NO: 62165 - protein, 39 aa, Homo sapiens
IPAPKPKGPGEPDSPTPLHPPTPPILSKPPKGESSPISL

SEQ ID NO: 62166 - protein, 62 aa, Homo sapiens
LHVHFTALGFEAPGSGVERAHLLAEVIENLECDPRHYQQRTLTFALRADDPLLKLLQEAQQS

SEQ ID NO: 62167 - protein, 25 aa, Homo sapiens
MRCSRRSTRWLCWGRPTTLLPRRPP

SEQ ID NO: 62168 - protein, 202 aa, Homo sapiens
TGLHDVDQGWMRAVRKHAKGLHIVPRLLFEDWTYDDFRNVLDSEDEIEELSKTVVQVAKNQHFDGFVVEVWNQLLSQKRVGLIHMLTHLAEALHQARLLALLVIPPAITPGTDQLGMFTHKEFEQLAPVLDGFSLMTYDYSTAHQPGPNAPLSWVRACVQVLDPKSKWRSKILLGLNFYGMDYATSKDAREPVVGASVHGAS

SEQ ID NO: 62169 - protein, 486 aa, Homo sapiens
IIVNLFHLLQSGSKKGCLRPLFTSTMSLDIQSLDIQCEELSDARWAELLPLLQQCQVVRLDDCGLTEARCKDISSALRVNPALAELNLRSNELGDVGVHCVLQGLQTPSCKIQKLSLQNCCLTGAGCGVLSSTLRTLPTLQELHLSDNLLGDAGLQLLCEGLLDPQCRLEKLQLEYCSLSAASCEPLASVLRAKPDFKELTVSNNDINEAGVRVLCQGLKDSPCQLEALKLESCGVTSDNCRDLCGIVASKASLRELALGSNKLGDVGMAELCPGLLHPSSRLRTLWIWECGITAKGCGDLCRVLRAKESLKELSLAGNELGDEGARLLCETLLEPGCQLESLWVKSCSFTAACCSHFSSVLAQNRFLLELQISNNRLEDAGVRELCQGLGQPGSVLRVLWLADCDVSDSSCSSLAATLLANHSLRELDLSNNCLGDAGILQLVESVRQPGCLLEQLVLYDIYWSEEMEDRLQALEKDKPSLRVIS

SEQ ID NO: 62170 - protein, 178 aa, Homo sapiens
VATPGGKAMEFVDVTESNARWVQDFRLKAYASPAKLESIDGARYHALLIPSCPGALTDLASSGSLARILQHFHSESKPICAVGHGVAALCCATNEDRSWVFDSYSLTGPSVCELVRAPGFARLPLVVEDFVKDSGACFSASEPDAVHVVLDRHLVTGQNASSTVPAVQNLLFLCGSRK

SEQ ID NO: 62171 - protein, 85 aa, Homo sapiens
VYFTIVTTDHKEIDFRCAGESCWNAAIALALIDFQNRRALQDFRSRQERTAPAAPAEDAVAAAAAAPSEPSEPSRPSPQPKPRTP

SEQ ID NO: 62172 - protein, 29 aa, Homo sapiens
MPGPRSAEFVQGCDVGELQKLVLRWSHCL

SEQ ID NO: 62173 - protein, 5 aa, Homo sapiens
MRMWT

SEQ ID NO: 62174 - protein, 225 aa, Homo sapiens
LSLSLSLSPSREPVAGAPGCGTAGPPAMATLWGGLLRLGSLLSLSCLALSVLLLAQLSDAAKNFEDVRCKCICPPYKENSGHIYNKNISQKDCDCLHVVEPMPVRGPDVEAYCLRCECKYEERSSVTIKVTIIIYLSILGLLLLYMVYLTLVEPILKRRLFGHAQLIQSDDDIGDHQPFANAHDVLARSRSRANVLNKVEYAQQRWKLQVQEQRKSVFDRHVVLS

SEQ ID NO: 62175 - protein, 407 aa, Homo sapiens
VGKARAWVRLSMEKKLLSRHLKQLLSDHELTKKLYKRYAFLRCDDEKEQFLYHLLSFNAVDYFCFTNVFTTILIPYHILIVPSKKLGGSMFTANPWICISGELGETQIMQIPRNVLEMTFECQNLGKLTTVQIGHDNSGLYAKWLVEYVMVRNEITGHTYKFPCGRWLGKGMDDGSLERILVGELLTSQPEVDERPCRTPPLQQSPSVIRRLVTISPNNKPKLNTGQIQESIGEAVNGIVKHFHKPEKERGSLTLLLCGECGLVSALEQAFQHGFKSPRLFKNVFIWDFLEKAQTYYETLEKNEVVPEENWHTRARNFCRFVTAINNTPRNIGKDGKFQMLVCLGARDHLLHHWIALLADCPITAHMYEDVALIKDHTLVNSLIRVLQTLQEFNITLETSLVKGIDI

SEQ ID NO: 62176 - protein, 5 aa, Homo sapiens
IMPRI

SEQ ID NO: 62177 - protein, 922 aa, Homo sapiens
LKMFNKSFGTPFGGGTGGFGTTSTFGQNTGFGTTSGGAFGTSAFGSSNNTGGLFGNSQTKPGGLFGTSSFSQPATSTSTGFGFGTSTGTANTLFGTASTGTSLFSSQNNAFAQNKPTGFGNFGTSTSSGGLFGTTNTTSNPFGSTSGSLFGPSSFTAAPTGTTIKFNPPTGTDTMVKAGVSTNISTKHQCITAMKEYESKSLEELRLEDYQANRKGPQNQVGAGTTTGLFGSSPATSSATGLFSSSTTNSGFAYGQNKTAFGTSTTGFGTNPGGLFGQQNQQTTSLFSKPFGQATTTQNTGFSFGNTSTIGQPSTNTMGLFGVTQASQPGGLFGTATNTSTGTAFGTGTGLFGQTNTGFGAVGSTLFGNNKLTTFGSSTTSAPSFGTTSGGLFGFGTNTSGNSIFGSKPAPGTLGTGLGAGFGTALGAGQASLFGNNQPKIGGPLGTGAFGAPGFNTTTATLGFGAPQAPVALTDPNASAAQQAVLQQHINSLTYSPFGDSPLFRNPMSDPKKKEERLKPTNPAAQKALTTPTHYKLTPRPATRVRPKALQTTGTAKSHLFDGLDDDEPSLANGAFMPKKSIKKLVLKNLNNSNLFSPVNRDSENLASPSEYPENGERFSFLSKPVDENHQQDGDEDSLVSHFYTNPIAKPIPQTPESAGNKHSNSNSVDDTIVALNMRAALRNGLEGSSEETSFHDESLQDDREEIENNSYHMHPAGIILTKVGYYTIPSMDDLAKITNEKGECIVSDFTIGRKGYGSIYFEGDVNLTNLNLDDIVHIRRKEVVVYLDDNQKPPVGEGLNRKAEVTLDGVWPTDKTSRCLIKSPDRLADINYEGRLEAVSRKQGAQFKEYRPETGSWVFKVSHFSKYGLQDSDEEEEEHPSKTSTKKLKTAPLPPASQTTPLQMALNGKPAPPPQVEKKGQ

SEQ ID NO: 62178 - protein, 1819 aa, Homo sapiens
LKMFNKSFGTPFGGGTGGFGTTSTFGQNTGFGTTSGGAFGTSAFGSSNNTGGLFGNSQTKPGGLFGTSSFSQPATSTSTGFGFGTSTGTANTLFGTASTGTSLFSSQNNAFAQNKPTGFGNFGTSTSSGGLFGTTNTTSNPFGSTSGSLFGPSSFTAAPTGTTIKFNPPTGTDTMVKAGVSTNISTKHQCITAMKEYESKSLEELRLEDYQANRKGPQNQVGAGTTTGLFGSSPATSSATGLFSSSTTNSGFAYGQNKTAFGTSTTGFGTNPGGLFGQQNQQTTSLFSKPFGQATTTQNTGFSFGNTSTIGQPSTNTMGLFGVTQASQPGGLFGTATNTSTGTAFGTGTGLFGQTNTGFGAVGSTLFGNNKLTTFGSSTTSAPSFGTTSGGLFGNKPTLTLGTNTNTSNFGFGTNTSGNSIFGSKPAPGTLGTGLGAGFGTALGAGQASLFGNNQPKIGGPLGTGAFGAPGFNTTTATLGFGAPQAPVALTDPNASAAQQAVLQQHINSLTYSPFGDSPLFRNPMSDPKKKEERLKPTNPAAQKALTTPTHYKLTPRPATRVRPKALQTTGTAKSHLFDGLDDDEPSLANGAFMPKKSIKKLVLKNLNNSNLFSPVNRDSENLASPSEYPENGERFSFLSKPVDENHQQDGDEDSLVSHFYTNPIAKPIPQTPESAGNKHSNSNSVDDTIVALNMRAALRNGLEGSSEETSFHDESLQDDREEIENNSYHMHPAGIILTKVGYYTIPSMDDLAKITNEKGECIVSDFTIGRKGYGSIYFEGDVNLTNLNLDDIVHIRRKEVVVYLDDNQKPPVGEGLNRKAEVTLDGVWPTDKTSRCLIKSPDRLADINYEGRLEAVSRKQGAQFKEYRPETGSWVFKVSHFSKYGLQDSDEEEEEHPSKTSTKKLKTAPLPPASQTTPLQMALNGKPAPPPQSQSPEVEQLGRVVELDSDMVDITQEPVLDTMLEESMPEDQEPVSASTHIASSLGINPHVLQIMKASLLTDEEDVDMALDQRFSRLPSKADTSQEICSPRLPISASHSSKTRSLVGGLLQSKFTSGAFLSPSVSVQECRTPRAASLMNIPSTSSWSVPPPLTSVFTMPSPAPEVPLKTVGTRRQLGLVPREKSVTYGKGKLLMDMALFMGRSFRVGWGPNWTLANSGEQLNGSHELENHQIADSMEFGFLPNPVAVKPLTESPFKVHLEKLSLRQRKPDEDMKLYQTPLELKLKHSTVHVDELCPLIVPNLGVAVIHDYADWVKEASGDLPEAQIVKHWSLTWTLCEALWGHLKELDSQLNEPREYIQILERRRAFSRWLSCTATPQIEEEVSLTQKNSPVEAVFSYLTGKRISEACSLAQQSGDHRLALLLSQFVGSQSVRELLTMQLVDWHQLQADSFIQDERLRIFALLAGKPVWQLSEKKQINVCSQLDWKRSLAIHLWYLLPPTASISRALSMYEEAFQNTSDSDRYACSPLPSYLEGSGCVIAEEQNSQTPLRDVCFHLLKLYSDRHYDLNQLLEPRSITADPLDYRLSWHLWEVLRALNYTHLSAQCEGVLQASYAGQLESEGLWEWAIFVLLHIDNSGIREKAVRELLTRHCQLLETPESWAKETFLTQKLRVPAKWIHEAKAVRAHMESDKHLEALCLFKAEHWNRCHKLIIRHLASDAIINENYDYLKGFLEDLAPPERSSLIQDWETSGLVYLDYIRVIEMLRHIQQVDCSGNDLEQLHIKVTSLCSRIEQIQCYSAKDRLAQSDMAKRVANLLRVVLSLHHPPDRTSDSTPDPQRVPLRLLAPHIGRLPMPEDYAMDELRSLTQSYLRELAVGSL

SEQ ID NO: 62179 - skipped

SEQ ID NO: 62180 - protein, 206 aa, Homo sapiens
RPHSRKSPSAEAGLEEKMAAKQPPPLMKKHSQTDLVSRLKTRKILGVGGEDDDGEVHRSKISQVLGNEIKFTIREPLGLRVWQFVSAVLFSGIAIMALAFPDQLYDAVFDGAQVTSKTPIRLYGGALLSISLIMWNALYTAEKVIIRWTLLTEACYFGVQFLVVTATLAETGLMSLGILLLLVSRLLFVVISIYYYYQVGRRPKKA

SEQ ID NO: 62181 - protein, 327 aa, Homo sapiens
RLLISSLTRSFLCDTEREKFWKIGNKERDGEYGACFFPGRCSGGQQPLIYCARPGSRMWEVNFDGEVISTHQFKKLLSLPPLPVITLRSEPQYDHTAGSSQSLSFPKLLHLSEHCVLTWTERGIYIFIPQNVQVLLWSEVKDIQDVAVCRNELFCLHLNGKVSHLSLISVERCVERLLRRGLWNLAARTCCLFQNSVIASRARKTLTADKLEHLKSQLDHGTYNDLISQLEELILKFEPLDSACSSRRSSISSHESFSILDSGIYRIISSRRGSQSDEDSCSLHSQTLSEDERFKEFTSQQEEDLPDQCCGSHGNEGDECVCCWFLM

SEQ ID NO: 62182 - protein, 49 aa, Homo sapiens
LLQECGLALELSEKFTRTCDILRIAEKRQRALIQSMLEKCDRFLWSQQA

SEQ ID NO: 62183 - protein, 14 aa, Homo sapiens
ILNMADEAGQPHRP

SEQ ID NO: 62184 - protein, 358 aa, Homo sapiens
INQAERERNLTEENTEKELENFKASITSSASLWHHCEHRETYQKLLEDIAVLHRLAARLSSRAEVVGAVRQEKRMSKATEVMMQYVENLKRTYEKDHAELMEFKKLANQNSSRSCGPSEDGVPRTARSMSLTLGKNMPRRRVSVAVVPKFNALNLPGQTPSSSSIPSLPALSESPNGKGSLPVTSALPALLENGKTNGDPDCEASAPALTLSCLEELSQETKARMEEEAYSKGFQEGLKKTKELQDLKEEEEEQKSESPEEPEEVEETEEEEKGPRSSKLEELVHFLQVMYPKLCQHWQVIWMMAAVMLVLTVVLGLYNSYNSCAEQADGPLGRSTCSAAQRDSWWSSGLQHEQPTEQ

SEQ ID NO: 62185 - protein, 20 aa, Homo sapiens
KVFHFSCPLPSPPHLLILFF

SEQ ID NO: 62186 - protein, 292 aa, Homo sapiens
TDIWALWHDAENQTVVKYINFEHNVAGQWNPVFMQPLPEEEIVIRDDQDPREMYLQSLFTPGQFTNEALCKALQIFCRGTERNLDLSWSELKKEVTLAVENELQGSVTEYEFSQEEFRNLQQEFWCKFYACCLQYQEALSHPLALHLNPHTNMVCLLKKGYLSFLIPSSLVDHLYLLPYENLLTEDETTISDDVDIARDVICLIKCLRLIEESVTVDMSVIMEMSCYNLQSPEKAAEQILEDMITIDVENVMEDICSKLQEIRNPIHAIGLLIREMDYETEVEMEKGFNPGK

SEQ ID NO: 62187 - protein, 55 aa, Homo sapiens
VWLPYSSIDQLLQALGENSANSHNIALSQKILDKLEDYQQKVDKATRDLLYRRTL

SEQ ID NO: 62188 - protein, 386 aa, Homo sapiens
LLYRHGDRSPVKTYPKDPYQEEEWPQGFGQLTKEGMLQHWELGQALRQRYHGFLNTSYHRQEVYVRSTDFDRTLMSAEANLAGLFPPNGMQRFNPNISWQPIPVHTVPITEDRLLKFPLGPCPRYEQLQNETRQTPEYQNESSRNAQFLDMVANETGLTDLTLETVWNVYDTLFCEQTHGLRLPPWASPQTMQRLSRLKDFSFRFLFGIYQQAEKARLQGGVLLAQIRKNLTLMATTSQLPKLLVYSAHDTTLVALQMALDVYNGEQAPYASCHIFELYQEDSGNFSVEMYFRNESDKAPWPLSLPGCPHRCPLQDFLRLTEPVVPKDWQQECQLASGPADTEVIVALAVCGSILFLLIVLLLTVLFRMQAQPPGYRHVADGEDHA

SEQ ID NO: 62189 - protein, 82 aa, Homo sapiens
KETNLDETSEILSIQDNTSPLPAQLVYTTNIQELNVYSEAQEPKESPPPSKTSAAAQLDELMAHLTEMQAKVSAGQGECRPR

SEQ ID NO: 62190 - protein, 832 aa, Homo sapiens
VWGAPGGDGGSRRRFRSCISRRRRLMAATELRGVVGPGPAAIAALGGGGAGPPVVGGGGGRGDAGPGSGAASGTVVAAAAGGPGPGAGGVAAAGPAPAPPTGGSGGSGAGGSGSAREGWLFKWTNYIKGYQRRWFVLSNGLLSYYRSKAEMRHTCRGTINLATANITVEDSCNFIISNGGAQTYHLKASSEVERQRWVTALELAKAKAVKMLAESDESGDEESVSQTDKTELQNTLRTLSSKVEDLSTCNDLIAKHGTALQRSLSELESLKLPAESNEKIKQVNERATLFRITSNAMINACRDFLMLAQTHSKKWQKSLQYERDQRIRLEETLEQLAKQHNHLERAFRGATVLPANTPGNVGSGKDQCCSGKGDMSDEDDENEFFDAPEIITMPENLGHKRTGSNISGASSDISLDEQYKHQLEETKKEKRTRIPYKPNYSLNLWSIMKNCIGKELSKIPMPVNFNEPLSMLQRLTEDLEYHELLDRAAKCENSLEQLCYVAAFTVSSYSTTVFRTSKPFNPLLGETFELDRLEENGYRSLCEQVSHHPPAAAHHAESKNGWTLRQEIKITSKFRGKYLSIMPLGTIHCIFHATGHHYTWKKVTTTVHNIIVGKLWIDQSGEIDIVNHKTGDKCNLKFVPYSYFSRDVARKVTGEVTDPSGKVHFALLGTWDEKMECFKVQPVIGENGGDARQRGHEAEESRVMLWKRNPLPKNAENMYYFSELALTLNAWESGTAPTDSRLRPDQRLMENGRWDEANAEKQRLEEKQRLSRKKREAEAMKATEDGTPYDPYKALWFERKKDPVTKELTHIYRGEYWECKEKQDWSSCPDIF

SEQ ID NO: 62191 - protein, 1733 aa, Homo sapiens
LPHVMKVSTLRESSAMASPLPREMEEELVPTGSEPGDTRAKPPVKPKPRALPAKPALPAKPSLLVPVGPRPPRGPLAELPSARKMNMLAGPQPYGGSKRPLPFAPRPAVEASTGGEATQETGKEEAGKEEPPPLTPPARCAAPGGVRKAPAPFRPASERFAATTVEEILAKMEQPRKEVLASPDRLWGSRLTFNHDGSSRYGPRTYGTTTAPRDEDGSTLFRGWSQEGPVKSPAECREEHSKTPEERSLPSDLAFNGDLAKAASSELPADISKPWIPSSPAPSSENGGPASPGLPAEASGSGPGSPHLHPPDKSSPCHSQLLEAQTPEASQASPCPAVTPSAPSAALPDEGSRHTPSPGLPAEGAPEAPRPSSPPPEVLEPHSLDQPPATSPRPLIEVGELLDLTRTFPSGGEEEAKGDAHLRPTSLVQRRFSEGVLQSPSQDQEKLGGSLAALPQGQGSQLALDRPFGAESNWSLSQSFEWTFPTRPSGLGVWRLDSPPPSPITEASEAAEAAEAGNLAVSSREEGVSQQGQGAGSAPSGSGSSWVQGDDPSMSLTQKGDGESQPQFPAVPLEPLPTTEGTPGLPLQQAEERYESQEPLAGQESPLPLATREAALPILEPVLGQEQPAAPDQPCVLFADAPEPGQALPVEEEAVTLARAETTQARTEAQDLCRASPEPPGPESSSRWLDDLLASPPPSGGGARRGAGAELKDTQSPSTCSEGLLGWSQKDLQSEFGITGDPQPSSFSPSSWCQGASQDYGLGGASPRGDPGLGERDWTSKYGQGAGEGSTREWASRCGIGQEEMEASSSQDQSKVSAPGVLTAQDRVVGKPAQLGTQRSQEADVQDWEFRKRDSQGTYSSRDAELQDQEFGKRDSLGTYSSRDVSLGDWEFGKRDSLGAYASQDANEQGQDLGKRDHHGRYSSQDADEQDWEFQKRDVSLGTYGSRAAEPQEQEFGKSAWIRDYSSGGSSRTLDAQDRSFGTRPLSSGFSPEEAQQQDEEFEKKIPSVEDSLGEGSRDAGRPGERGSGGLFSPSTAHVPDGALGQRDQSSWQNSDASQEVGGHQERQQAGAQGPGSADLEDGEMGKRGWVGEFSLSVGPQREAAFSPGQQDWSRDFCIEASERSYQFGIIGNDRVSGAGFSPSSKMEGGHFVPPGKTTAGSVDWTDQLGLRNLEVSSCVGSGGSSEARESAVGQMGWSGGLSLRDMNLTGCLESGGSEEPGGIGVGEKDWTSDVNVKSKDLAEVGEGGGHSQARESGVGQTDWSGVEAGEFLKSRERGVGQADWTPDLGLRNMAPGAVCSPGESKELGVGQMDWGNNLGLRDLEVTCDPDSGGSQGLRGCGVGQMDWTQDLAPQNVELFGAPSEAREHGVGGVSQCPEPGLRHNGSLSPGLEARDPLEARELGVGETSGPETQGEDYSSSSLEPHPADPGMETGEALSFGASPGRCPARPPPSGSQGLLEEMLAASSSKAVARRESAASGLGGLLEEEGAGAGAAQEEVLEPGRDSPPSWRPQPDGEASQTEDVDGTWGSSAARWSDQGPAQTSRRPSQGPPARSPSQDFSFIEDTEILDSAMYRSRANLGRKRGHRAPVIRPGGTLGLSEAADSDAHLFQDSTEPRASRVPSSDEEVVEEPQSRRTRMSLGTKGLKVNLFPGLSPSALKAKLRPRNRSAEEGELAESKSSQKESAVQRSKSCKVPGLGKPLTLPPKPEKSSGSEGSSPNWLQALKLKKKKV

SEQ ID NO: 62192 - protein, 74 aa, Homo sapiens
MMADMYNRMTSACHRKCVPPHYKEAELSKGESVCLDRCVSKYLDIHERMGKKLTELSMQDEELMKRVQQSSGPA

SEQ ID NO: 62193 - protein, 454 aa, Homo sapiens
LHSRPRKLYKHSSTSSRIAKGGVDHTKMSLHGASGGHERSRDRRRSSDRSRDSSHERTESQLTPCIRNVTSPTRQHHVEREKDHSSSRPSSPRPQKASPNGSISSAGNSSRNSSQSSSDGSCKTAGEMVFVYENAKEGARNIRTSERVTLIVDNTRFVVDPSIFTAQPNTMLGRMFGSGREHNFTRPNEKGEYEVAEGIGSTVFRAILDYYKTGIIRCPDGISIPELREACDYLCISFEYSTIKCRDLSALMHELSNDGARRQFEFYLEEMILPLMVASAQSGERECHIVVLTDDDVVDWDEEYPPQMGEEYSQIIYSTKLYRFFKYIENRDVAKSVLKERGLKKIRLGIEGYPTYKEKVKKRPGGRPEVIYNYVQRPFIRMSWEKEEGKSRHVDFQCVKSKSITNLAAAAADIPQDQLVVMHPTPQVDELDILPIHPPSGNSDLDPDAQNPML

SEQ ID NO: 62194 - protein, 254 aa, Homo sapiens
LTGPPDASRYPGPQPGRSPAARRPHTSPEPGLGRAAAAARRSQAGLCSVPMAAAGWRDGSGQEKYRLVVVGGGGVGKSALTIQFIQSYFVTDYDPTIEDSYTKQCVIDDRAARLDILDTAGQEEFGAMREQYMRTGEGFLLVFSVTDRGSFEEIYKFQRQILRVKDRDEFPMILIGNKADLDHQRQVTQEEGQQLARQLKVTYMEASAKIRMNVDQAFHELVRVIRKFQEQECPPSPEPTRKEKDKKGCHCVIF

SEQ ID NO: 62195 - protein, 7 aa, Homo sapiens
RRCKVKD

SEQ ID NO: 62196 - protein, 253 aa, Homo sapiens
VTMWRLLARASAPLLRVPLSDSWALLPASAGVKTLLPVPSFEDVSIPEKPKLRFIERAPLVPKVRREPKNLSDIRGPSTEATEFTEGNFAILALGGGYLHWGHFEMMRLTINRSMDPKNMFAIWRVPAPFKPITRKSVGHRMGGGKGAIDHYVTPVKAGRLVVEMGGRCEFEEVQGFLDQVAHKLPFAAKAVSRGTLEKMRKDQEERERNNQNPWTFERIATANMLGIRKVLSPYDLTHKGKYWGKFYMPKRV

SEQ ID NO: 62197 - protein, 16 aa, Homo sapiens
LRAVGGHLSFRLCPSF

SEQ ID NO: 62198 - protein, 276 aa, Homo sapiens
LSLSLGLKECVIRMVSGRFYLSCLLLGSLGSMCILFTIYWMQYWRGGFAWNGSIYMFNWHPVLMVAGMVVFYGGASLVYRLPQSWVGPKLPWKLLHAALHLMAFVLTVVGLVAVFTFHNHGRTANLYSLHSWLGITTVFLFACQWFLGFAVFLLPWASMWLRSLLKPIHVFFGAAILSLSIASVISGINEKLFFSLKNTTRPYHSLPSEAVFANSTGMLVVAFGLLVLYILLASSWKRPEPGILTDRQLLLQLRPGSRPFPVTYVSVTGRQPYKSW

SEQ ID NO: 62199 - protein, 223 aa, Homo sapiens
LVITSTPASPNRELHPQLLSPTKAGPRKGHSRHKSTSSTLCPAVCPAAGHTLTPDREGKEVDTILFAEFQAWRESPTLDKTCPFLERVYREDVGPCLDFTMQELSVLVRAAVEDNTLTIEPVASQTLPTVKVAEVDCSSTNTCALSGLTRTCRHRIRLGDSKSHYYISPSSRARITAVCNFFTYIRYIQQGLVRQDAEPMFWEIMRLRKEMSLAKLGFFPQEA

SEQ ID NO: 62200 - protein, 242 aa, Homo sapiens
IASPPSPLHRTLGLPQGPRRRSSAAQPPPPPPPLLSRRHDDRVHLAGAPELPPGLRGRHQPPDQPGALRLLRLPVHDRHSYLSLGIPSITHSVFPFQSYYFDRDDVALKNFAKYFLHQSHEEREHAEKLMKLQNQRGGRIFLQDIKKPDCDDWESGLNAMECALHLEKNVNQSLLELHKLATDKNDPHLCDFIETHYLNEQVKAIKELGDHVTNLRKMGAPESGLAEYLFDKHTLGDSDNES

SEQ ID NO: 62201 - protein, 163 aa, Homo sapiens
VAQGGARRSHVAPAAAMADSGTAGGAALAAPAPGPGSGGPGPRVYFQSPPGAAGEGPGGADDEGPVRRQGKVTVKYDRKELRKRLNLEEWILEQLTRLYDCQEEEIPELEIDVDELLDMESDDARAARVKELLVDCYKPTEAFISGLLDKIRGMQKLSTPQKK

SEQ ID NO: 62202 - protein, 254 aa, Homo sapiens
TSAGGFPLHQGLPTVSMLGSPCLLWLLAVTFLVPRAQPLAPQDFEEEEADETETAWPPLPAVPCDYDHCRHLQVPCKELQRVGPAACLCPGLSSPAQPPDPPRMGEVRIAAEEGRAVVHWCAPFSPVLHYWLLLWDGSEAAQKGPPLNATVRRAELKGLKPGGIYVVCVVAANEAGASRVPQAGGEGLEGADIPAFGPCSRLAVPPNPRTLVHAAVGVGTALALLSCAALVWHFCLRDRWGCPRRAAARAAGAL

SEQ ID NO: 62203 - protein, 744 aa, Homo sapiens
KRLKVTELRSELQRRGLDSRGLKVDLAQRLQEALDAEMLEDEAGGGGAGPGGACKAEPRPVAASGGGPGGDEEEDEEEEEEDEEALLEDEDEEPPPAQALGQAAQPPPEPPEAAAMEAAAEPDASEKPAEATAGSGGVNGGEEQGLGKREEDEPEERSGDETPGSEVPGDKAAEEQGDDQDSEKSKPAGSDGERRGVKRQRDEKDEHGRAYYEFREEAYHSRSKSPLPPEEEAKDEEEDQTLVNLDTYTSDLHFQVSKDRYGGQPLFSEKFPTLWSGARSTYGVTKGKVCFEAKVTQNLPMKEGCTEVSLLRVGWSVDFSRPQLGEDEFSYGFDGRGLKAENGQFEEFGQTFGENDVIGCFANFETEEVELSFSKNGEDLGVAFWISKDSLADRALLPHVLCKNCVVELNFGQKEEPFFPPPEEFVFIHAVPVEERVRTAVPPKTIEECEVILMVGLPGSGKTQWALKYAKENPEKRYNVLGAETVLNQMRMKGLEEPEMDPKSRDLLVQQASQCLSKLVQIASRTKRNFILDQCNVYNSGQRRKLLLFKTFSRKVVVVVPNEEDWKKRLELRKEVEGDDVPESIMLEMKANFSLPEKCDYMDEVTYGELEKEEAQPIVTKYKEEARKLLPPSEKRTNRRNNRNKRNRQNRSRGQGYVGGQRRGYDNRAYGQQYWGQPGNRGGYRNFYDRYRGDYDRFYGRDYEYNRYRDYYRQYNRDWQSYYYHHPQDRDRYYRNYYGYQGYR

SEQ ID NO: 62204 - protein, 385 aa, Homo sapiens
VGQVLAGRARRLLLQFGVLFCTILLLLWVSVFLYGSFYYSYMPTVSHLSPVHFYYRTDCDSSTTSLCSFPVANVSLTKGGRDRVLMYGQPYRVTLELELPESPVNQDLGMFLVTISCYTRGGRIISTSSRSVMLHYRSDLLQMLDTLVFSSLLLFGFAEQKQLLEVELYADYRENSYVPTTGAIIEIHSKRIQLYGAYLRIHAHFTGLRYLLYNFPMTCAFIGVASNFTFLSVIVLFSYMQWVWGGIWPRHRFSLQVNIRKRDNSRKEVQRRISAHQPGAGPEGQEESTPQSDVTEDGESPEDPSGTEGQLSEEEKPDQQPLSGEEELEPEASDGSGSWEDAALLTEANLPAPAPASASAPVLETLGSSEPAGGALRQRPTCSSS

SEQ ID NO: 62205 - protein, 73 aa, Homo sapiens
KSWQAVPAGCCCSLGCSSAPSSFCSGCLSSSMAPSTIPICRQSATSALCISTTGPTVIPPPPHSAPSLLPMSR

SEQ ID NO: 62206 - protein, 280 aa, Homo sapiens
VNQDLGMFLVTISCYTRGGRIISTSSRSVMLHYRSDLLQMLDTLVFSSLLLFGFAEQKQLLEVELYADYRENSYVPTTGAIIEIHSKRIQLYGAYLRIHAHFTGLRYLLYNFPMTCAFIGVASNFTFLSVIVLFSYMQWVWGGIWPRHRFSLQVNIRKRDNSRKEVQRRISAHQPGPEGQEESTPQSDVTEDGESPEDPSGTEGQLSEEEKPDQQPLSGEEELEPEASDGSGSWEDAALLTEANLPAPAPASASAPVLETLGSSEPAGGALRQRPTCSSS

SEQ ID NO: 62207 - protein, 52 aa, Homo sapiens
LKQVSCMAHRGEVPAMLPLKVKGRRFYFLLDKTGHFPNTKLFDNTVGAYRSL

SEQ ID NO: 62208 - protein, 5 aa, Homo sapiens
KPALQ

SEQ ID NO: 62209 - protein, 203 aa, Homo sapiens
LDEFWPFRESALPRHAWRWSWWARRWPPQLPTPITQPDRWAWWTSHAAQPQWTPTPLDAATTTTDEPGPPPSWAPWPSSNGSVPGKYACGLWGLSPASRKRYDAATTYGHDAAAAAASQWAAPTPSLWSSSPMATTAAAASATPSAQQQYGFQYPLAMAAKIPPRGGDGPSHESEDFPRPLVTLPGRQPQQRPWWTGWFGKAA

SEQ ID NO: 62210 - protein, 108 aa, Homo sapiens
MALLQWVNQYLGSTPVGSGVYRLHQGKGMMPPPPMGMMPPPPPPPSGQPPPPPSGPLPPWQQQQQQPPPPPPPSSSMASSTPLPWQQRSLPAAAMARAMRVRTFRAHW

SEQ ID NO: 62211 - protein, 105 aa, Homo sapiens
TSAGTGSIPPWQQQQAAAAASPGAPQMQGNPTMVPLPPGVQPPLPPGAPPPPPPPPPGSAGMMIPPRGGDGPSHESEDFPRPLVTLPGRQPQQRPWWTGWFGKAA

SEQ ID NO: 62212 - protein, 53 aa, Homo sapiens
MKGMKELLVATKINSSAIKLQLTAQSQVQMKKQKVSTPSDYTLSFLKRQRKGL

SEQ ID NO: 62213 - protein, 90 aa, Homo sapiens
VPPGLVGYVMVTEEKKVSMGKPDPLRDSGTDDQEEEPLERDFDRFIGATANFSRFTLWGLETIPGPDAKVRGALTWPSLAAAIHAQVPED

SEQ ID NO: 62214 - protein, 12 aa, Homo sapiens
LSLMVSSRCSTT

SEQ ID NO: 62215 - protein, 70 aa, Homo sapiens
RPPGACCARMRLLLEWRVYLRLTCATKDGMARECPTTWLSPPAKPDFAQRHSVKPTALQGGRWSRLGASP

SEQ ID NO: 62216 - protein, 385 aa, Homo sapiens
LTKGTSAAHLNSMEVTTEDTSRTDVSEPATSGGAADGVTSIAPTAVASSTTAASITTAASSMTVASSAPTTAASSTTVASIAPTTAASSMTAASSTPMTLALPAPTSTSTGRTPSTTATGHPSLSTALAQVPKSSALPRTATLATLATRAQTVATTANTSSPMSTRPSPSKHMPSDTAASPVPPMRPQAQGPISQVSVDQPVVNTTNKSTPMPSNTTPEPAPTPTVVTTTKAQAREPTASPVPVPHTSPIPEMEAMSPTTQPSPMPYTQRAAGPGTSQAPEQVETEATPGTDSTGPTPRSSGGTKMPATDSCQPSTQGQYMVVTTEPLTQAVVDKTLLLVVLLLGVTLFITVLVLFALQAYESYKKKDYTQVDYLINGMYADSEM

SEQ ID NO: 62217 - protein, 775 aa, Homo sapiens
LKMAEAHQAVAFQFTVTPDGIDLRLSHEALRQIYLSGLHSWKKKFIRFKNGIITGVYPASPSSWLIVVVGVMTTMYAKIDPSLGIIAKINRTLETANCMSSQTKNVVSGVLFGTGLWVALIVTMRYSLKVLLSYHGWMFTEHGKMSRATKIWMGMVKIFSGRKPMLYSFQTSLPRLPVPAVKDTVNRYLQSVRPLMKEEDFKRMTALAQDFAVGLGPRLQWYLKLKSWWATNYVSDWWEEYIYLRGRGPLMVNSNYYAMDLLYILPTHIQAARAGNAIHAILLYRRKLDREEIKPIRLLGSTIPLCSAQWERMFNTSRIPGEETDTIQHMRDSKHIVVYHRGRYFKVWLYHDGRLLKPREMEQQMQRILDNTSEPQPGEARLAALTAGDRVPWARCRQAYFGRGKNKQSLDAVEKAAFFVTLDETEEGYRSEDPDTSMDSYAKSLLHGRCYDRWFDKSFTFVVFKNGKMGLNAEHSWADAPIVAHLWEYVMSIDSLQLGYAEDGHCKGDINPNIPYPTRLQWDIPGECQEVIETSLNTANLLANDVDFHSFPFVAFGKGIIKKCRTSPDAFVQLALQLAHYKDMGKFCLTYEASMTRLFREGRTETVRSCTTESCDFVRAMVDPAQTVEQRLKLFKLASEKHQHMYRLAMTGSGIDRHLFCLYVVSKYLAVESPFLKEVLSEPWRLSTSQTPQQQVELFDLENNPEYVSSGGGFGPVADDGYGVSYILVGENLINFHISSKFSCPETDSHRFGRHLKEAMTDIITLFGLSSNSKK

SEQ ID NO: 62218 - protein, 66 aa, Homo sapiens
VLGYSAGRRRRLPVCGESCCPPAGLLHRALQGPRELGARPSARLFRQLAGAASVREVSRLRRRPLL

SEQ ID NO: 62219 - protein, 81 aa, Homo sapiens [sequence omitted]

SEQ ID NO: 62220 - protein, 16 aa, Homo sapiens
MFPDLVQLICAYCHTR

SEQ ID NO: 62221 - protein, 172 aa, Homo sapiens
KEKLFRERLSQLRLRLEEVGAERAPEYTEPLGGLQRSLKIRIQVAGIYKGFCLDVIRNKYECELQGAKQHLESEKLLLYDTLQGELQERIQRLEEDRQSLDLSSEWWDDKLHARGSSRSWDSLPPSKRKKAPLVSGPYIVYMLQEIDILEDWTAIKKARAAVSPQKRKSDGP

SEQ ID NO: 62222 - protein, 326 aa, Homo sapiens
MDPNDVILATHASVDNLLHLSGLLERWEGPLSVSVFAATKEEAQLATVLAYALSSHCPDMRARVAMHLVCPSRYEAAVPDPREPGEFALLRSCQEVFDKLARVAQPGINYALGTNVSYPNNLLRNLAREGANYALVIDVDMVPSEGLWRGLREMLDQSNQWGGTALVVPAFEIRRARRMPMNKNELVQLYQVGEVRPFYYGLCTPCQAPTNYSRWVNLPEESLLRPAYVVPWQDPWEPFYVAGGKVPTFDERFRQYGFNRISQACELHVAGFDFEVLNEGFLVHKGFKEALKFHPQKEAENQHNKILYRQFKQELKAKYPNSPRRC

SEQ ID NO: 62223 - protein, 63 aa, Homo sapiens
LCLLLHAAGVLLHVSVLLGPALSALLRAHTPLHMAALLLLPWLMLLTAPSSLRNSDLQATCTS

SEQ ID NO: 62224 - protein, 105 aa, Homo sapiens
IPTYHSTDFEVHRNWLAITHSLPISQWYYEATSEWTLDYPPFFAWFEYILSHVAKYFDQEMLNVHNLNYSSSRTLLFQRFSVIFMDVLFVYAVRDCFCFFPNVSM

SEQ ID NO: 62225 - protein, 481 aa, Homo sapiens
ITHSLPISQWYYEATSEWTLDYPPFFAWFEYILSHVAKYFDQEMLNVHNLNYSSSRTLLFQRFSVIFMDVLFVYAVRECCKCIDGKKVGKELTEKPKFILSVLLLWNFGLLIVDHIHFQYNGFLFGLMLLSIARLFQKRHMEGAFLFAVLLHFKHIYLYVAPAYGVYLLRSYCFTANKPDGSIRWKSFSFVRVISLGLVVFLVSALSLGPFLALNQLPQVFSRLFPFKRGLCHAYWAPNFWALYNALDKVLSVIGLKLKFLDPNNIPKASMTSGLVQQFQHTVLPSVTPLATLICTLIAILPSIFCLWFKPQGPRGFLRCLTLCALSSFMFGWHVHEKAILLAILPMSLLSVGKAGDASIFLILTTTGHYSLFPLLFTAPELPIKILLMLLFTIYSISSLKTLFRKEKPLFNWMETFYLLGLGPLEVCCEFVFPFTSWKVKYPFIPLLLTSVYCAVGITYAWFKLYVSVLIDSAIGKTKKQ

SEQ ID NO: 62226 - protein, 202 aa, Homo sapiens
ILNFLRTSHLDLPEDFQEMGLLRREADFYQVQPLIEALQEKEVELSKAEKNAMLNITLNQRVQTVHFTVREAPQIYSLSSSSMEVFNANIFSTSCLFLKLLGSKLFYCSNGNLSSITSHLQDPNHLTLDWVANVEGLPEEEYTKQNLKRLWVVPANKQINSFQVFVEEVLKIALSDGFCIDSSHPHALDFMNNKIIRLIRYR

SEQ ID NO: 62227 - protein, 24 aa, Homo sapiens
VTLPALPLTHPVDLACMASLLLAV

SEQ ID NO: 62228 - protein, 18 aa, Homo sapiens
MTLTTMRSQRRGRGPQPE

SEQ ID NO: 62229 - protein, 27 aa, Homo sapiens
VVLPTLAVVVLLIVVFVYVATRPTITE

SEQ ID NO: 62230 - protein, 9 aa, Homo sapiens
LGTFSVFCR

SEQ ID NO: 62231 - protein, 120 aa, Homo sapiens
MEDYDFLFKIVLIGNAGVGKTCLVRRFTQGLFPPGQGATIGVDFMIKTVEINGEKVKLQIWDTAGQERFRSITQSYYRSANALILTYDITCEESFRCLPEWLREIEQYASNKVITVLVGK

SEQ ID NO: 62232 - protein, 6 aa, Homo sapiens
ILDLIL

SEQ ID NO: 62233 - protein, 668 aa, Homo sapiens
LCDFGAMRPQILLLLALLTLGLAAQHQDKVPCKMVDKKVSCQVLGLLQVPSVLPPDTETLDLSGNQLRSILASPLGFYTALRHLDLSTNEISFLQPGAFQALTHLEHLSLAHNRLAMATALSAGGLGPLPRVTSLDLSGNSLYSGLLERLLGEAPSLHTLSLAENSLTRLTRHTFRDMPALEQLDLHSNVLMDIEDGAFEGLPRLTHLNLSRNSLTCISDFSLQQLRVLDLSCNSIEAFQTASQPQAEFQLTWLDLRENKLLHFPDLAALPRLIYLNLSNNLIRLPTGPPQDSKGIHAPSEGWSALPLSAPSGNASGRPLSQLLNLDLSYNEIELIPDSFLEHLTSLCFLNLSRNCLRTFEARRLGSLPCLMLLDLSHNALETLELGARALGSLRTLLLQGNALRDLPPYTFANLASLQRLNLQGNRVSPCGGPDEPGPSGCVAFSGITSLRSLSLVDNEIELLRAGAFLHTPLTELDLSSNPGLEVATGALGGLEASLEVLALQGNGLMVLQVDLPCFICLKRLNLAENRLSHLPAWTQAVSLEVLDLRNNSFSLLPGSAMGGLETSLRRLYLQGNPLSCCGNGWLAAQLHQGRVDVDATQDLICRFSSQEEVSLSHVRPEDCEKGGLKNINLIIILTFILVSAILLTTLAACCCVRRQKFNQQYKA

SEQ ID NO: 62234 - protein, 35 aa, Homo sapiens
LPELPFPELERVLQAPPPDVGNGEVGQEAVQQLWL

SEQ ID NO: 62235 - protein, 11 aa, Homo sapiens
KHTLGDSDNES

SEQ ID NO: 62236 - protein, 125 aa, Homo sapiens
LLLLSGDGAVRCDTPANCTYLDLLGTWVFQVGSSGSQRDVNCSVMGPQEKKVVVYLQKLDTAYDDLGNSGHFTIIYNQGFEIVLNDYKWFAFFKDVTDFISHLFMQLGTVGIYDLPHLRNKLVIK

SEQ ID NO: 62237 - protein, 407 aa, Homo sapiens
MGPQEKKVVVYLQKLDTAYDDLGNSGHFTIIYNQGFEIVLNDYKWFAFFKYKEEGSKVTTYCNETMTGWVHDVLGRNWACFTGKKVGTASENVYVNIAHLKNSQEKYSNRLYKYDHNFVKAINAIQKSWTATTYMEYETLTLGDMIRRSGGHSRKIPRPKPAPLTAEIQQKILHLPTSWDWRNVHGINFVSPVRNQASCGSCYSFASMGMLEARIRILTNNSQTPILSPQEVVSCSQYAQGCEGGFPYLIAGKYAQDFGLVEEACFPYTGTDSPCKMKEDCFRYYSSEYHYVGGFYGGCNEALMKLELVHHGPMAVAFEVYDDFLHYKKGIYHHTGLRDPFNPFELTNHAVLLVGYGTDSASGMDYWIVKNSWGTGWGENGYFRIRRGTDECAIESIAVAATPIPKL

SEQ ID NO: 62238 - protein, 63 aa, Homo sapiens
IRWNPRMKPQEPIHNRYKELLAKRAELQKKVEELQREISNRSTSSSERASSPAQCVTPVQTVV

SEQ ID NO: 62239 - protein, 48 aa, Homo sapiens
TAPPQPLKTSIHVALNTELTLSKTDLPAIASSSLFPPHHPRGSNHCVR

SEQ ID NO: 62240 - protein, 57 aa, Homo sapiens
LSLVPYCGSCCGFDHVVTLGRSPACIGLLTARKPHFYLPDFYFGKFRFKRICRTLYR

SEQ ID NO: 62241 - protein, 469 aa, Homo sapiens
LQAAVVLPVRYFYLQAVNSEGQNLTRSPAGETPFKVVVKSLSPKELVRIHVPKPLDRNDGTFLMRYRMYETVDEGLKIEVLYGDEHVAQSPYILKGPVYHEYCECPEDPQAWQKTLSCPTKEPQIAKDFASFPSINLQQMLKEVPKRFGDERGAIVHYTILNNHVYRRSLGKYTDFKMFSDEILLSLTRKVLLPDLEFYVNLGDWPLEHRKVNGTPSPIPIISWCGSLDSRDVVLPTYDITHSMLEAMRGVTNDLLSIQGNTGPSWINKTERAFFRGRDSREERLQLVQLSKENPQLLDAGITGYFFFQEKEKELGKAKLMGFFDFFKYKYQVNVDGTVAAYRYPYLMLGDSLVLKQDSPYYEHFYMALEPWKHYVPIKRNLSDLLEKVKWAKENDEEAKKIAKEGQLMARDLLQPHRLYCYYYQVLQKYAERQSSKPEVRDGMELVPQPEDSTAICQCHRKKPSREEL

SEQ ID NO: 62242 - protein, 23 aa, Homo sapiens
KEVRHPHALGKFSMQEVWGELGD

SEQ ID NO: 62243 - protein, 5 aa, Homo sapiens
ISVLQ

SEQ ID NO: 62244 - protein, 32 aa, Homo sapiens
VKVMPFLHLHNMSVTWLARPGAQPHVESSPLL

SEQ ID NO: 62245 - protein, 476 aa, Homo sapiens
IRLPLRSGLGGAPLGLRLPRETDEEPEEPGRRGSFVEMVDNLRGKSGQGYYVEMTVGSPPQTLNILVDTGSSNFAVGAAPHPFLHRYYQRQLSSTYRDLRKGVYVPYTQGKWEGELGTDLVSIPHGPNVTVRANIAAITESDKFFINGSNWEGILGLAYAEIARPDDSLEPFFDSLVKQTHVPNLFSLQLCGAGFPLNQSEVLASVGGSMIIGGIDHSLYTGSLWYTPIRREWYYEVIIVRVEINGQDLKMDCKEYNYDKSIVDSGTTNLRLPKKVFEAAVKSIKAASSTEKFPDGFWLGEQLVCWQAGTTPWNIFPVISLYLMGEVTNQSFRITILPQQYLRPVEDVATSQDDCYKFAISQSSTGTVMGAVIMEGFYVVFDRARKRIGFAVSACHVHDEFRTAAVEGPFVTLDMEDCGYNIPQTDESTLMTIAYVMAAICALFMLPLCLMVCQWRCLRCLRQQHDDFADDISLLK

SEQ ID NO: 62246 - protein, 145 aa, Homo sapiens
ITQHMKVKSLEDAEKNPKAIDTWIESISELHRSKPPATVHYTRPMPDIDTLMQEWSPEFEELLGKVSLPTAEIDCSLAEYIDMICAILDIPVYKSRIQSLHLLFSLYSEFKNSQHFKALAEGKKAFTPSSNSTSQAGDMETLTFS

SEQ ID NO: 62247 - protein, 1517 aa, Homo sapiens
LAGPWARTGAVAPLCVGAMRILANKTRLPHPRRREAPGSPPLSPRGHCPPAPAKPMHPENKLTNHGKTGNGGAQSQHQNVNQGPTCNVGSKGVGAGNHGAKANQISPSNSSLKNPQAGVPPFSSLKGKVKRDRSVSVDSGEQREAGTPSLDSEAKEVAPRSKRRCVLERKQPYSGDEWCSGPDSEEDDKPIGATHNCNVADPAMAAPQLGPGQTTQLPLSESSVPGAPHGPPPGLRPDAPGGGGGGGGVPGKPPSQFVYVFTTHLANTAAEAVLQGRADSILAYHQQNVPRAKLDQAPKVPPTPEPLPLSTPSAGTPQSQPPPLPPPPPPAPGSAPPALPPEGPPEDSSQDLAPNSVGAASTGGGTGGTHPNTPTATTANNPLPPGGDPSSAPGPALLGEAAAPGNGQRSLVGSEGLSKEQLEHRERSLQTLRDIERLLLRSGETEPFLKGPPGGAGEGGPPAQAPPPPQQPPTAPPSGLKKYEEPLQSMISQTQSLGGPPLEHEVPGHPPGGDMGQQMNMMIQRLGQDSLTPEQVAWRKLQEEYYEEKRRKEEQIGLHGSRPLQDMMGMGGMMVRGPPPPYHSKPGDQWPPGMGAQLRGPMDVQDPMQLRGGPPFPGPRFPGNQIQRVPGFGGMQSMPMEVPMNAMQRPVRPGMGWTEDLPPMGGPSNFAQNTMPYPGGQGEAERFMTPRVREELLRHQLLEKRSMGMQRPLGMAGSGMGQSMEMERMMQAHRQMDPAMFPGQMAGGEGLAGTPMGMEFGGGRGLLSPPMGQSGLREVDPPMGPGNLNMNMNVNMNMNMNLNVQMTPQQQMLMSQKMRGPGDLMGPQGLSPEEMARVRAQNSSGVMGGPQKMLMPSQFPNQGQQGFSGGQGPYQAMSQDMGNTQDMFSPDQSSMPMSNVGTTRLSHMPLPPASNPPGTVHSAPNRGLGRRPSDLTISINQMGSPGMGHLKSPTLSQVHSPLVTSPSANLKSPQTPSQMVPLPSANPPGPLKSPQVLGSSLSVRSPTGSPSRLKSPSMAVPSPGWVASPKTAMPSPGVSQNKQPPLNMNSSTTLSNMEQGTLPPSGPRSSSSAPPANPPSGLMNPSLPFTSSPDPTPSQNPLSLMMTQMSKYAMPSSTPLYHNAIKTIATSDDELLPDRPLLPPPPPPQGSGPGISNSQPSQMHLNSAAAQSPMGMNLPGQQPLSHEPPPAMLPSPTPLGSNIPLHPNAQGTGGPPQNSMMMAPGGPDSLNAPCGPVPSSSQMMPFPPRLQQPHGAMAPTGGGGGGPGLQQHYPSGMALPPEDLPNQPPGPMPPQQHLMGKAMAGRMGDAYPPGVLPGVASVLNDPELSEVIRPTPTGIPEFDLSRIIPSEKPSSTLQYFPKSENQPPKAQPPNLHLMNLQNMMAEQTPSRPPNLPGQQGVQRGLNMSMCHPGQMSLLGRTGVPPQQGMVPHGLHQGVMSPPQGLMTQQNFMLMKQRGVGGEVYSQPPHMLSPQGSLMGPPPQQNLMVSHPLRQRSVSLDSQMGYLPAPGGMANLPF

SEQ ID NO: 62248 - protein, 103 aa, Homo sapiens
VNKSGGKAKKKKWSKGKVRDKLNNLVLFDKATYDKLCKEVPNYKLITPAVVSERLKIRGSLARAALQELLSKGLIKLVSKHRAQVIYTRNTKGGDAPAAGEDA

SEQ ID NO: 62249 - protein, 1017 aa, Homo sapiens
VPRLSQSWGRRSGGKRGTMADKVRRQRPRRRVCWALVAVLLADLLALSDTLAVMSVDLGSESMKVAIVKPGVPMEIVLNKESRRKTPVIVTLKENERFFGDSAASMAIKNPKATLRYFQHLLGKQADNPHVALYQARFPEHELTFDPQRQTVHFQISSQLQFSPEEVLGMVLNYSRSLAEDFAEQPIKDAVITVPVFFNQAERRAVLQAARMAGLKVLQLINDNTATALSYGVFRRKDINTTAQNIMFYDMGSGSTVCTIVTYQMVKTKEAGMQPQLQIRGVGFDRTLGGLEMELRLRERLAGLFNEQRKGQRAKDVRENPRAMAKLLREANRLKTVLSANADHMAQIEGLMDDVDFKAKVTRVEFEELCADLFERVPGPVQQALQSAEMSLDEIEQVILVGGATRVPRVQEVLLKAVGKEELGKNINADEAAAMGAVYQAAALSKAFKVKPFVVRDAVVYPILVEFTREVEEEPGIHSLKHNKRVLFSRMGPYPQRKVITFNRYSHDFNFHINYGDLGFLGPEDLRVFGSQNLTTVKLKGVGDSFKKYPDYESKGIKAHFNLDESGVLSLDRVESVFETLVEDSAEEESTLTKLGNTISSLFGGGTTPDAKENGTDTVQEEEESPAEGSKDEPGEQVELKEEAEAPVEDGSQPPPPEPKGDATPEGEKATEKENGDKSEAQKPSEKAEAGPEGVAPAPEGEKKQKPARKRRMVEEIGVELVVLDLPDLPEDKLAQSVQKLQDLTLRDLEKQEREKAANSLEAFIFETQDKLYQPEYQEVSTEEQREEISGKLSAASTWLEDEGVGATTVMLKEKLAELRKLCQGLFFRVEERKKWPERLSALDNLLNHSSMFLKGARLIPEMDQIFTEVEMTTLEKVINETWAWKNATLAEQAKLPATEKPVLLSKDIEAKMMALDREVQYLLNKAKFTKPRPRPKDKNGTRAEPPLNASASDQGEKVIPPAGQTEDAEPISEPEKVETGSEPGDTEPLELGGPGAEPEQKEQSTGQKRPLKNDEL

SEQ ID NO: 62250 - protein, 84 aa, Homo sapiens
RLATGLDGMRIENKGRMSTLTFFNVSEKDYGNYTCVATNKLGNTNASITLYGPGAVIDGVNSASRALACLWLSGTLLAHFFIKF

SEQ ID NO: 62251 - protein, 37 aa, Homo sapiens
TYDKAPVEKEGIHLLDWPFDDGAPPPNQIVDDWLNLL

SEQ ID NO: 62252 - protein, 22 aa, Homo sapiens
RNKDTPACSRRSLRKTPLKTAN

SEQ ID NO: 62253 - protein, 6 aa, Homo sapiens
MTSRFS

SEQ ID NO: 62254 - protein, 31 aa, Homo sapiens
MHLFQNPKLHKCVNILRNKMNPTRRMIFSHT

SEQ ID NO: 62255 - protein, 27 aa, Homo sapiens
MSSGEFAIKLAKLTYLGKKVIKQENMR

SEQ ID NO: 62256 - protein, 17 aa, Homo sapiens
RTKALQLPGIWLLTSHS

SEQ ID NO: 62257 - protein, 357 aa, Homo sapiens
LGTHTEIKRVAEEKVTLPCHHQLGLPEKDTLDIEWLLTDNEGNQKVVITYSSRHVYNNLTEEQKGRVAFASNFLAGDASLQIEPLKPSDEGRYTCKVKNSGRYVWSHVILKVLVRPSKPKCELEGELTEGSDLTLQCESSSGTEPIVYYWQRIREKEGEDERLPPKSRIDYNHPGRVLLQNLTMSYSGLYQCTAGNEAGKESCVVRVTVQYVQSIGMVAGAVTGIVAGALLIFLLVWLLIRRKDKERYEEEERPNEIREDAEAPKARLVKPSSSSSGSRSSRSGSSSTRSTANSASRSQRTLSTDAAPQPGLATQAYSLVGPEVRGSEPKKVHHANLTKAETTPSMIPSQSRAFQTV

SEQ ID NO: 62258 - protein, 50 aa, Homo sapiens
LQMEMWRQRLSVFSGAGTFLVASTAWLIVMPGSLKRNQSSQGCLSSSAIN

SEQ ID NO: 62259 - protein, 30 aa, Homo sapiens
VWHTRTEKPKMKQEEQLQRQGRGSDPAIEV

SEQ ID NO: 62260 - protein, 371 aa, Homo sapiens
VNCHTPHSNVILHGIDGPAAVLKPDEVHAPSVSSSVVEEDAENTVDTASKPGLQERLQKHDISESVNFDEETDGISQSACLERPNSASSQNSTDTGTSGSATAAQPADNLLGDIDDLEDFVYSPAPQGVTVRCRIIRDKRGMDRGLFPTYYMYLEKEENQKIFLLAARKRKKSKTANYLISIDPVDLSREGESYVGKLRSNLMGTKFTVYDRGICPMKGRGLVGAAHTRQELAAISYETNVLGFKGPRKMSVIIPGMTLNHKQIPYQPQNNHDSLLSRWQNRTMENLVELHNKAPVWNSDTQSYVLNFRGRVTQASVKNFQIVHKNDPDYIVMQFGRVADDVFTLDYNYPLCAVQAFGIGLSSFDSKLACE

SEQ ID NO: 62261 - protein, 204 aa, Homo sapiens
MEVLGLPPAGFIQTASRRQTFFDSKGFPKNITNNRGKKRYPDSKDLTMVLKTYDTSFLDFLRRCLVWEPSLRMTPDQALKHAWIHQSRNLKPQPRPQTLRKSNSFFPSETRKDKVQGCHHSSRKADEITKETTEKTKDSPTKHVQHSGDQQDCLQHGADTVQLPQLVDAPKKSEAAVGAEVSMTSPGQSKNFSLKNTNVLPPIV

SEQ ID NO: 62262 - protein, 9 aa, Homo sapiens
IVAFEGCPV

SEQ ID NO: 62263 - protein, 2050 aa, Homo sapiens
ICDSNATALELPGLPLSLPQPSIPAAVPQSAPPEPHREETVTATATSQVAQQPPAAAAPGEQAVAGPAPSTVPSSTSKDRPVSQPSLVGSKEEPPPARSGSGGGSAKEPQEERSQQQDDIEELETKAVGMSNDGRFLKFDIEIGRGSFKTVYKGLDTETTVEVAWCELQDRKLTKSERQRFKEEAEMLKGLQHPNIVRFYDSWESTVKGKKCIVLVTELMTSGTLKTYLKRFKVMKIKVLRSWCRQILKGLQFLHTRTPPIIHRDLKCDNIFITGPTGSVKIGDLGLATLKRASFAKSVIGTPEFMAPEMYEEKYDESVDVYAFGMCMLEMATSEYPYSECQNAAQIYRRVTSGVKPASFDKVAIPEVKEIIEGCIRQNKDERYSIKDLLNHAFFQEETGVRVELAEEDDGEKIAIKLWLRIEDIKKLKGKYKDNEAIEFSFDLERDVPEDVAQEMVESGYVCEGDHKTMAKAIKDRVSLIKRKREQRQLVREEQEKKKQEESSLKQQVEQSSASQTGIKQLPSASTGIPTASTTSASVSTQVEPEEPEADQHQQLQYQQPSISVLSDGTVDSGQGSSVFTESRVSSQQTVSYGSQHEQAHSTGTVPGHIPSTVQAQSQPHGVYPPSSVAQGQSQGQPSSSSLTGVSSSQPIQHPQQQGIQQTAPPQQTVQYSLSQTSTSSEATTAQPVSQPQAPQVLPQVSAGKQSTQGVSQVAPAEPVAVAQTQATQPTTLASSVDSAHSDVASGMSDGNENVPSSSGRHEGRTTKRHYRKSVRSRSRHEKTSRPKLRILNVSNKGDRVVECQLETHNRKMVTFKFDLDGDNPEEIATIMVNNDFILAIERESFVDQVREIIEKADEMLSEDVSVEPEGDQGLESLQGKDDYGFSGSQKLEGEFKQPIPASSMPQQIGIPTSSLTQVVHSAGRRFIVSPVPESRLRESKVFPSEITDTVAASTAQSPGMNLSHSASSLSLQQAFSELRRAQMTEGPNTAPPNFSHTGPTFPVVPPFLSSIAGVPTTAAATAPVPATSSPPNDISTSVIQSEVTVPTEEGIAGVATSTGVVTSGGLPIPPVSESPVLSSVVSSITIPAVVSISTTSPSLQVPTSTSEIVVSSTALYPSVTVSATSASAGGSTATPGPKPPAVVSQQAAGSTTVGATLTSVSTTTSFPSTASQLCIQLSSSTSTPTLAETVVVSAHSLDKTSHSSTTGLAFSLSAPSSSSSPGAGVSSYISQPGGLHPLVIPSVIASTPILPQAAGPTSTPLLPQVPSIPPLVQPVANVPAVQQTLIHSQPQPALLPNQPHTHCPEVDSDTQPKAPGIDDIKTLEEKLRSLFSEHSSSGAQHASVSLETSLVIESTVTPGIPTTAVAPSKLLTSTTSTCLPPTNLPLGTVALPVTPVVTPGQVSTPVSTTTSGVKPGTAPSKPPLTKAPVLPVGTELPAGTLPSEQLPPFPGPSLTQSQQPLEDLDAQLRRTLSPEMITVTSAVGPVSMAAPTAITEAGTQPQKVSQVKEGPVLATSSGAGVFKMGRFQVSVAADGAQKEGKNKSEDAKSVHFESSTSESSVLSSSSPESTLVKPEPNGITIPGISSDVPESAHKTTASEAKSDTGQPTKVGRFQVTTTANKVGRFSVSKTEDKITDTKKEGPVASPPFMDLEQAVLPAVIPKKEKPELSEPSHLNGPSSDPEAAFLSRDVDDGSGSPHSPHQLSSKSLPSQNLSQSLSNSFNSSYMSSDNESDIEDEDLKLELRRLRDKHLKEIQDLQSRQKHEIESLYTKLGKVPPAVIIPPAAPLSGRRRRPTKSKGSKSSRSSSLGNKSPQLSGNLSGQSAASVLHPQQTLHPPGNIPESGQNQLLQPLKPSPSSDNLYSAFTSDGAISVPSLSAPGQGTSSTNTVGATVNSQAAQAQPPAMTSSRKGTFTDDLHKLVDNWARDAMNLSGRRGSKGHMNYEGPGMARKFSAPGQLCISMTSNLGGSAPISAASATSLGHFTKSMCPPQQYGFPATPFGAQWSGTGGPAPQPLGQFQPVGTASLQNFNISNLQKSISNPPGSNLRTT

SEQ ID NO: 62264 - protein, 1319 aa, Homo sapiens
LASSVDSAHSDVASGMSDGNENVPSSSGRHEGRTTKRHYRKSVRSRSRHEKTSRPKLRILNVSNKGDRVVECQLETHNRKMVTFKFDLDGDNPEEIATIMVNNDFILAIERESFVDQVREIIEKADEMLSEDVSVEPEGDQGLESLQGKDDYGFSGSQKLEGEFKQPIPASSMPQQIGIPTSSLTQVVHSAGRRFIVSPVPESRLRESKVFPSEITDTVAASTAQSPGMNLSHSASSLSLQQAFSELRRAQMTEGPNTAPPNFSHTGPTFPVVPPFLSSIAGVPTTAAATAPVPATSSPPNDISTSVIQSEVTVPTEEGIAGVATSTGVVTSGGLPIPPVSESPVLSSVVSSITIPAVVSISTTSPSLQVPTSTSEIVVSSTALYPSVTVSATSASAGGSTATPGPKPPAVVSQQAAGSTTVGATLTSVSTTTSFPSTASQLCIQLSSSTSTPTLAETVVVSAHSLDKTSHSSTTGLAFSLSAPSSSSSPGAGVSSYISQPGGLHPLVIPSVIASTPILPQAAGPTSTPLLPQVPSIPPLVQPVANVPAVQQTLIHSQPQPALLPNQPHTHCPEVDSDTQPKAPGIDDIKTLEEKLRSLFSEHSSSGAQHASVSLETSLVIESTVTPGIPTTAVAPSKLLTSTTSTCLPPTNLPLGTVALPVTPVVTPGQVSTPVSTTTSGVKPGTAPSKPPLTKAPVLPVGTELPAGTLPSEQLPPFPGPSLTQSQQPLEDLDAQLRRTLSPEMITVTSAVGPVSMAAPTAITEAGTQPQKGVSQVKEGPVLATSSGAGVFKMGRFQVSVAADGAQKEGKNKSEDAKSVHFESSTSESSVLSSSSPESTLVKPEPNGITIPGISSDVPESAHKTTASEAKSDTGQPTKVGRFQVTTTANKVGRFSVSKTEDKITDTKKEGPVASPPFMDLEQAVLPAVIPKKEKPELSEPSHLNGPSSDPEAAFLSRDVDDGSGSPHSPHQLSSKSLPSQNLSQSLSNSFNSSYMSSDNESDIEDEDLKLELRRLRDKHLKEIQDLQSRQKHEIESLYTKLGKVPPAVIIPPAAPLSGRRRRPTKSKGSKSSRSSSLGNKSPQLSGNLSGQSAASVLHPQQTLHPPGNIPESGQNQLLQPLKPSPSSDNLYSAFTSDGAISVPSLSAPGQGTSSTNTVGATVNSQAAQAQPPAMTSSRKGTFTDDLHKLVDNWARDAMNLSGRRGSKGHMNYEGPGMARKFSAPGQLCISMTSNLGGSAPISAASATSLGHFTKSMCPPQQYGFPATPFGAQWSGTGGPAPQPLGQFQPVGTASLQNFNISNLQKSISNPPGSNLRTT

SEQ ID NO: 62265 - protein, 836 aa, Homo sapiens
LFLLRKTLEEMELRIETQKQTLNARDESIKKLLEMLQSKGLSAKATEEDHERTRRLAEAEMHVHHLESLLEQKEKENSMLREEMHRRFENAPDSAKTKALQTVIEMKDSKISSMERGLRDLEEEIQMLKSNGALSTEEREEEMKQMEVYRSHSKFMKNKVEQLKEELSSKEAQWEELKKKAAGLQAEIGQVKQELSRKDTELLALQTKLETLTNQFSDSKQHIEVLKESLTAKEQRAAILQTEVDALRLRLEEKETMLNKKTKQIQDMAEEKGTQAGEIHDLKDMLDVKERKVNVLQKKIENLQEQLRDKEKQMSSLKERVKSLQADTTNTDTALTTLEEALAEKERTIERLKEQRDRDEREKQEEIDNYKKDLKDLKEKVSLLQGDLSEKEASLLDLKEHASSLASSGLKKDSRLKTLEIALEQKKEECLKMESQLKKAHEAALEARASPEMSDRIQHLEREITRYKDESSKAQAEVDRLLEILKEVENEKNDKDKKIAELERQVKDQNKKVANLKHKEQVEKKKSAQMLEEARRREDNLNDSSQQLQDSLRKKDDRIEELEEALRESVQITAEREMVLAQEESARTNAEKQVEELLMAMEKVKQELESMKAKLSSTQQSLAEKETHLTNLRAERRKHLEEVLEMKQEALLAAISEKDANIALLELSSSKKKTQEEVAALKREKDRLVQQLKQQTQNRMKLMADNYEDDHFKSSHSNQTNHKPSPDQIIQPLLELDQNRSKLKLYIGHLTTLCHDRDPLILRGLTPPASYNLDDDQAAWENELQKMTRGQLQDELEKGERDNAELQEFANAILQQIADHCPDILEQVVNALEESS

SEQ ID NO: 62266 - protein, 109 aa, Homo sapiens
LLLLFTAALLSSWAQLLTDANSWWSLALNPVQRPEMFIIGAQPVCSQLPGLSPGQRKLCQLYQEHMAYIGEGAKTGIKECQHQFRQRRWNCSTADNASVFGRVMQIGCV

SEQ ID NO: 62267 - protein, 29 aa, Homo sapiens
VERCHCKFHWCCFVRCKKCTEIVDQYICK

SEQ ID NO: 62268 - protein, 23 aa, Homo sapiens
KRAAEEEDEADPKRQKTENGASA

SEQ ID NO: 62269 - protein, 18 aa, Homo sapiens
ICQATGLQKSGRKSAKGD

SEQ ID NO: 62270 - protein, 26 aa, Homo sapiens
KLPGSGPQSLTQALDILSPSPPHSVQ

SEQ ID NO: 62271 - protein, 62 aa, Homo sapiens
VNSYGHPQAPHLYPGPSPMYPIPTQDSAGYNRPAHHMVPRPSVPPPGANEEIPDDFDWDLIT

SEQ ID NO: 62272 - protein, 446 aa, Homo sapiens
KLTPLSHEVISRQATINIGTIGHVAHGKSTVVKAISGVHTVRFKNELERNITIKLGYANAKIYQLDDPSCPRPECYRSCGSSMPDEFPTDIPGTKGNFRLVRHVSFVDCPGHDILMATMLNGAAVMDAALLLIAGNESCPQPQTSEHLAAIEIMKLKHILILQNKIDLVKERQAKEQYEQILAFVQGTVAEGAPIIPISAQLKYNIEVVCEYIVKKIPVPPRDFTSEPRLIVIRSFDVNKPGCEVDDLKGGVAGGSILKGVLKVGQETEVRPGIVSKDSEGKLMCKSIFSKIVSLFAEHNDLQYAAPGGLIGVGTKIDPTLCRADRMVGQILGAVGALPEIFTELEISYFLLRRLLGVRTEGDKKAAKVQKLSKNEVLMVNIGSLSTGGRVSAVKADLGKIVLTNPVCTEVGEKIALSRRVEKHWRLIGWGQIRRGVTIKPTVDDD

SEQ ID NO: 62273 - protein, 177 aa, Homo sapiens
VTPSPAKHRAKMDDIVVVAQGSQASRNVSNDPDVIKLQEIPTFQPLLKGLLSGQTSPTNAKLEKLDSQQVLQLCLRYQDHLHQCAEAVAFDQNALVKRIKEMDLSVETLFSFMQERQKRYAKYAEQIQKVNEMSAILRRIQMGIDQTVPLLDRLNSMLPEGERLEPFSMKPDRELRL

SEQ ID NO: 62274 - protein, 425 aa, Homo sapiens
VTDVLCEACDQLGWTKPTKIQIEAIPLALQGRDIIGLAETGSGKTGAFALPILNALLETPQRLFALVLTPTRELAFQISEQFEALGSSIGVQSAVIVGGIDSMSQSLALAKKPHIIIATPGRLIDHLENTKGFNLRALKYLVMDEADRILNMDFETEVDKILKVIPRDRKTFLFSATMTKKVQKLQRAALKNPVKCAVSSKYQTVEKLQQYYIFIPSKFKDTYLVYILNELAGNSFMIFCSTCNNTQRTALLLRNLGFTAIPLHGQMSQSKRLGSLNKFKAKARSILLATDVASRGLDIPHVDVVVNFDIPTHSKDYIHRVGRTARAGRSGKAITFVTQYDVELFQRIEHLIGKKLPGFPTQDDEVMMLTERVAEAQRFARMELREHGEKKKRSREDAGDNDDTEGAIGVRNKVAGGKMKKRKGR

SEQ ID NO: 62275 - protein, 11 aa, Homo sapiens
ISRSLEKLYQH

SEQ ID NO: 62276 - protein, 299 aa, Homo sapiens [sequence omitted]

SEQ ID NO: 62277 - protein, 32 aa, Homo sapiens
LLPPPRPHRFCQSRRLCSIWQRRKCQEVSSNR

SEQ ID NO: 62278 - protein, 385 aa, Homo sapiens
LARGGSKGIPLKNIKHLAGVPLIGWVLRAALDSGAFQSVWVSTDHDEIENVAKQFGAQVHRRSSEVSKDSSTSLDAIIEFLNYHNEVDIVGNIQATSPCLHPTDLQKVAEMIREEGYDSVFSVVRRHQFRWSEIQKGVREVTEPLNLNPAKRPRRQDWDGELYENGSFYFAKRHLIEMGYLQGGKMAYYEMRAEHSVDIDVDIDWPIAEQRVLRYGYFGKEKLKEIKLLVCNIDGCLTNGHIYVSGDQKEIISYDVKDAIGISLLKKSGIEVRLISERACSKQTLSSLKLDCKMEVSVSDKLAVVDEWRKEMGLCWKEVAYLGNEVSDEECLKRVGLSGAPADACSTAQKAVGYICKCNGGRGAIREFAEHICLLMEKVNNSCQK

SEQ ID NO: 62279 - protein, 259 aa, Homo sapiens
IAYNCCWDQCQACFNSSPDLADHIRSIHVDGQRGGVFVCLWKGCKVYNTPSTSQSWLQRHMLTHSGDKPFKCVVGGCNASFASQGGLARHVPTHFSQQNSSKVSSQPKAKEESPSKAGMNKRRKLKNKRRRSLPRPHDFFDAQTLDAIRHRAICFNLSAHIESLGKGHSVVFHSTVIAKRKEDSGKIKLLLHWMPEDILPDVWVNESERHQLKTKVVHLSKLPKDTALLLDPNIYRTMPQKRLKRTLIRKVFNLYLSKQ

SEQ ID NO: 62280 - protein, 478 aa, Homo sapiens
LSRPRARPEAVSVTMAMTAGTTTTFPMSNHTRERVTVAKLTLENFYSNLILQHEERETRQKKLEVAMEEEGLADEEKKLRRSQHARKETEFLRLKRTRLGLDDFESLKVIGRGAFGEVRLVQKKDTGHIYAMKILRKSDMLEKEQVAHIRAERDILVEADGAWVVKMFYSFQDKRNLYLIMEFLPGGDMMTLLMKKDTLTEEETQFYISETVLAIDAIHQLGFIHRDIKPDNLLLDAKGHVKLSDFGLCTGLKKAHRTEFYRNLTHNPPSDFSFQNMNSKRKAETWKKNRRQLAYSTVGTPDYIAPEVFMQTGYNKLCDWWSLGVIMYEMLIGYPPFCSETPQETYRKVMNWKETLVFPPEVPISEKAKDLILRFCIDSENRIGNSGVEEIKGHPFFEGVDWEHIRERPAAIPIEIKSIDDTSNFDDFPESDILQPVPNTTEPDYKSKDWVFLNYTYKRFEGLTQRGSIPTYMKAGKL

SEQ ID NO: 62281 - protein, 264 aa, Homo sapiens [sequence omitted]

SEQ ID NO: 62282 - protein, 157 aa, Homo sapiens
IGGYTTRDRNMNILQYCPSSDMWTLFETCDVHIRKQQMVSVEETIYIVGGCLHELGPNRRSSQSEDMLTVQSYNTVTRQWLYLKENTSKSGLNLTCALHNDGIYIMSRDVTLSTSLEHRVFLKYNIFSDSWEAFRRFPAFGHNLLVSSLYLPNKAET

SEQ ID NO: 62283 - protein, 301 aa, Homo sapiens
LEIKLKVSEEEKQRIKQDVESLMEKHNVLEKGFLKEKEQEAISFQDRYKELQEKHKQELEDMRKAGHEALSIIVDEYKALLQSSVKQQVEAIEKQYISAIEKQAHKCEELLNAQHQRLLEMLDTEKELLKEKIKEALIQQSQEQKEILEKCLEEERQRNKEALVSAAKLEKEAVKDAVLKVVEEERKNLEKAHAEERELWKTEHAKDQEKVSQEIQKAIQEQRKISQETVKAAIIEEQKRSEKAVEEAVKRTRDELIEYIKEQKRLDQVIRQRSLSSLELFLSCAQKQLSALIATEPVDIE

SEQ ID NO: 62284 - protein, 770 aa, Homo sapiens
VGPGPIHCRGRRALGPRVFRVMEALIPVINKLQDVFNTVGADIIQLPQIVVVGTQSSGKSSVLESLVGRDLLPRGTGIVTRRPLILQLVHVSQEDKRKTTGEENDPATWKNSRHLSKGVEAEEWGKFLHTKNKLYTDFDEIRQEIENETERISGNNKGVSPEPIHLKIFSPNVVNLTLVDLPGMTKVPVGDQPKDIELQIRELILRFISNPNSIILAVTAANTDMATSEALKISREVDPDGRRTLAVITKLDLMDAGTDAMDVLMGRVIPVKLGIIGVVNRSQLDINNKKSVTDSIRDEYAFLQKKYPSLANRNGTKYLARTLNRLLMHHIRDCLPELKTRINVLAAQYQSLLNSYGEPVDDKSATLLQLITKFATEYCNTIEGTAKYIETSELCGGARICYIFHETFGRTLESVDPLGGLNTIDILTAIRNATGPRPALFVPEVSFELLVKRQIKRLEEPSLRCVELVHEEMQRIIQHCSNYSTQELLRFPKLHDAIVEVVTCLLRKRLPVTNEMVHNLVAIELAYINTKHPDFADACGLMNNNIEEQRRNRLARELPSAVSRDKSSKVPSALAPASQEPSPAASAEADGKLIQDSRRETKNVASGGGGVGDGVQEPTTGNWRGMLKTSKAEELLAEEKSKPIPIMPASPQKGHAVNLLDVPVPVARKLSAREQRDCEVIERLIKSYFLIVRKNIQDSVPKAVMHFLVNHVKDTLQSELVGQLYKSSLLDDLLTESEDMAQRRKEAADMLKALQGASQIIAEIRETHLW

SEQ ID NO: 62285 - protein, 769 aa, Homo sapiens
LGIGKAIAVLTSGGDAQGMNAAVRAVVRVGIFTGARVFFVHEGYQGLVDGGDHIKEATWESVSMMLQLGGTVIGSARCKDFREREGRLRAAYNLVKRGITNLCVIGGDGSLTGADTFRSEWSDLLSDLQKAGKITDEEATKSSYLNIVGLVGSIDNDFCGTDMTIGTDSALHRIMEIVDAITTTAQSHQRTFVLEVMGRHCGYLALVTSLSCGADWVFIPECPPDDDWEEHLCRRLSETRTRGSRLNIIIVAEGAIDKNGKPITSEDIKNLVVKRLGYDTRVTVLGHVQRGGTPSAFDRILGSRMGVEAVMALLEGTPDTPACVVSLSGNQAVRLPLMECVQVTKDVTKAMDEKKFDEALKLRGRSFMNNWEVYKLLAHVRPPVSKSGSHTVAVMNVGAPAAGMNAAVRSTVRIGLIQGNRVLVVHDGFEGLAKGQIEEAGWSYVGGWTGQGGSKLGTKRTLPKKSFEQISANITKFNIQGLVIIGGFEAYTGGLELMEGRKQFDELCIPFVVIPATVSNNVPGSDFSVGADTALNTICTTCDRIKQSAAGTKRRVFIIETMGGYCGYLATMAGLAAGADAAYIFEEPFTIRDLQANVEHLVQKMKTTVKRGLVLRNEKCNENYTTDFIFNLYSEEGKGIFDSRKNVLGHMQQGGSPTPFDRNFATKMGAKAMNWMSGKIKESYRNGRIFANTPDSGCVLGMRKRALVFQPVAELKDQTDFEHRIPKEQWWLKLRPILKILAKYEIDLDTSDHAHLEHITRKRSGEAAV

SEQ ID NO: 62286 - protein, 50 aa, Homo sapiens
TPDENEEMIVRIIGHFFASQTAQRKIREIVQQVKQQEQKYPQGVASQRSK

SEQ ID NO: 62287 - protein, 47 aa, Homo sapiens
IDKKMNDADSTSVEAMYSVASQCLHEKKNKRPDIKKVQQLLQEMTAS

SEQ ID NO: 62288 - protein, 64 aa, Homo sapiens
LQHPGDKMPTGKQLADIGYKTFSTSMMLLTVYGGYLCSVRVYHYFQWRRAQRQAAEEQKTSGIM

SEQ ID NO: 62289 - protein, 271 aa, Homo sapiens
IFSSREERSWFREAEIYQTVMLRHENILGFIAADNKDNGTWTQLWLVSDYHEHGSLFDYLNRYTVTIEGMIKLALSAASGLAHLHMEIVGTQGKPGIAHRDLKSKNILVKKNGMCAIADLGLAVRHDAVTDTIDIAPNQRVGTKRYMAPEVLDETINMKHFDSFKCADIYALGLVYWEIARRCNSGGVHEEYQLPYYDLVPSDPSIEEMRKVVCDQKLRPNIPNWWQSYEALRVMGKMMRECWYANGAARLTALRIKKTLSQLSVQEDVKI

SEQ ID NO: 62290 - protein, 171 aa, Homo sapiens
TRYMRTWLEPLSGAVSFPSFPAGGRHYALKPDAYPGRRADCGPGEGRSYPDYMYGSPGELRDRAPQTLPSPEADALAGSKHKEEKADLDPSNPVANWIHARSTRKKRCPYTKYQTLELEKEFLFNMYLTRDRRYEVARVLNLTERQVKIWFQNRRMKMKKMNKEKTDKEQS

SEQ ID NO: 62291 - protein, 50 aa, Homo sapiens
VKIWFQNRRMKWKKENNKDKLPGARDEEKVEEEGNEEEEKEEEEKEENKD

SEQ ID NO: 62292 - protein, 67 aa, Homo sapiens
LTRDDFQRVLNVNTMGPIGVTLALLPLLQQARGRVINITSVLGRLAANGGGYCVSKFGLEAFSDSLR

SEQ ID NO: 62293 - protein, 160 aa, Homo sapiens
KQAENGERAGSPDVLRCSSQGHRKDSDKSRSRKDDDSLSEASHSKKTVKKVVVVEQNGSFQVKIPKNFVCEHCFGAFRSSYHLKRHILIHTGEKPFECDICDMRFIQKYHLERHKRVHSGEKPYQCERCHQCFSRTDRLLRHKRMCQGCQSKTSDGQFSL

SEQ ID NO: 62294 - protein, 63 aa, Homo sapiens
IYLEVDNVPRHLSLALFQSFETGHCLNETNVTKDVVCLNDVSCYFSLLEGGRPEDKLECELPF

SEQ ID NO: 62295 - protein, 381 aa, Homo sapiens
MDDLNLSTSEALRIDPVPNTHPLLVFVNPKSGGKQGQRVLWKFQYILNPRQVFNLLKDGPEIGLRLFKDVPDSRILVCGGDGTVGWILETIDKANLPVLPPVAVLPLGTGNDLARCLRWGGGYEGQNLAKILKDLEMSKVVHMDRWSVEVIPQQTEEKSDPVPFQIINNYFSIGVDASIAHRFHIMREKYPEKFNSRMKNKLWYFEFATSESIFSTCKKLEESLTVEICGKPLDLSNLSLEGIAVLNIPSMHGGSNLWGDTRRPHGDIYGINQALGATAKVITDPDILKTCVPDLSDKRLEVVGLEGAIEMGQIYTKLKNAGRRLAKCSEITFHTTKTLPMQIDGEPWMQTPCTIKITHKNQMPMLMGPPPRSTNFFGFLS

SEQ ID NO: 62296 - protein, 205 aa, Homo sapiens
VKDIKPGLKNLNLIFIVLETGRVTKTKDGHEVRTCKVADKTGSINISVWDDVGNLIQPGDIIRLTKGYASVFKGCLTLYTGRGGDLQKIGEFCMVYSEVPNFSEPNPEYSTQQAPNKAVQNDSNPSASQPTTGPSAASPASENQNGNGLSAPPGPGGGPHPPHTPSHPPSTRITRSQPNHTPAGPPGPSSNPVSNGKETRRSSKR

SEQ ID NO: 62297 - protein, 78 aa, Homo sapiens
KWYTMLANEKAPVEGIGQPEKVGLLLEYEAQKLSLVDVSQVSVVHTLQTDFRGPVVPAFALWDGELLTHSGLEVPEGL

SEQ ID NO: 62298 - protein, 25 aa, Homo sapiens
MGPASAVWSVHLMSPRFSTLTLWPR

SEQ ID NO: 62299 - protein, 5 aa, Homo sapiens
IITAN

SEQ ID NO: 62300 - protein, 20 aa, Homo sapiens
ITVKDGKTLNDELEIIGHEV

SEQ ID NO: 62301 - protein, 394 aa, Homo sapiens
KKHWKRFLSELEVLLLFHHPNILELAAYFTETEKFCLIYPYMRNGTLFDRLQCVGDTAPLPWHIRIGILIGISKAIHYLHNVQPCSVICGSISSANILLDDQFQPKLTDFAMAHFRSHLEHQSCTINMTSSSSKHLWYMPEEYIRQGKLSIKTDVYSFGIVIMEVLTGCRVVLDDPKHIQLRDLLRELMEKRGLDSCLSFLDKKVPPCPRNFSAKLFCLAGRCAATRAKLRPSMDEVLNTLESTQASLYFAEDPPTSLKSFRCPSPLFLENVPSIPVEDDESQNNNLLPSDEGLRIDRMTQKTPFECSQSEVMFLSLDKKPESKRNEEACNMPSSSCEESWFPKYIVPSQDLRPYKVNIDPSSEAPGHSCRSRPVESSCSSKFSWDEYEQYKKE

SEQ ID NO: 62302 - protein, 983 aa, Homo sapiens
KKMAEGGAADLDTQRSDIATLLKTSLRKGDTWYLVDSRWFKQWKKYVGFDSWDKYQMGDQNVYPGPIDNSGLLKDGDAQSLKEHLIDELDYILLPTEGWNKLVSWYTLMEGQEPIARKVVEQGMFVKHCKVEVYLTELKLCENGNMNNVVTRRFSKADTIDTIEKEIRKIFSIPDEKETRLWNKYMSNTFEPLNKPDSTIQDAGLYQGQVLVIEQKNEDGTWPRGPSTPKSPGASNFSTLPKISPSSLSNNYNNMNNRNVKNSNYCLPSYTAYKNYDYSEPGRNNEQPGLCGLSNLGNTCFMNSAIQCLSNTPPLTEYFLNDKYQEELNFDNPLGMRGEIAKSYAELIKQMWSGKFSYVTPRAFKTQVGRFAPQFSGYQQQDCQELLAFLLDGLHEDLNRIRKKPYIQLKDADGRPDKVVAEEAWENHLKRNDSIIVDIFHGLFKSTLVCPECAKISVTFDPFCYLTLPLPMKKERTLEVYLVRMDPLTKPMQYKVVVPKIGNILDLCTALSALSGIPADKMIVTDIYNHRFHRIFAMDENLSSIMERDDIYVFEININRTEDTEHVIIPVCLREKFRHSSYTHHTGSSLFGQPFLMAVPRNNTEDKLYNLLLLRMCRYVKISTETEETEGSLHCCKDQNINGNGPNGIHEEGSPSEMETDEPDDESSQDQELPSENENSQSEDSVGGDNDSENGLCTEDTCKGQLTGHKKRLFTFQFNNLGNTDINYIKDDTRHIRFDDRQLRLDERSFLALDWDPDLKKRYFDENAAEDFEKHESVEYKPPKKPFVKLKDCIELFTTKEKLGAEDPWYCPNCKEHQQATKKLDLWSLPPVLVVHLKRFSYSRYMRDKLDTLVDFPINDLDMSEFLINPNAGPCRYNLIAVSNHYGGMGGGHYTAFAKNKDDGKWYYFDDSSVSTASEDQIVSKAAYVLFYQRQDTFSGTGFFPLDRETKGASAATGIPLESDEDSNDNDNDIENENCMHTN

SEQ ID NO: 62303 - protein, 207 aa, Homo sapiens
IGGRRLIVVLEGASLETVKVGKTYELLNCDKHKSILLKNGRDPGEARPDITHQSLLMLMDSPLNRAGLLQVYIHTQKNVLIEVNPQTRIPRTFDRFCGLMVQLLHKLSVRAADGPQKLLKVIKNPVSDHFPVGCMKVGTSFSIPVVSDVRELVPSSDPIVFVVGAFAHGKVSVEYTEKMVSISNYPLSAALTCAKLTTAFEEVWGVI

SEQ ID NO: 62304 - protein, 15 aa, Homo sapiens
IWSLLWSWIPWASKY

SEQ ID NO: 62305 - protein, 870 aa, Homo sapiens
KKIEKMKEKRQAKYSENKLKSIKARNEYLLTLEATNASVFKYYIHDLSDLIDCCDLGYHASLNRALRTYLSAEYNLETSRHEGLDIIENAVDNLEPRSDKQRFMEMYPAAFCPPMKFEFQSHMGDEVCQVSAQQPVQAELMLRYQQLQSRLATLKIENEEVKKTTEATLQTIQDMVTIEDYDVSECFQHSRSTESVKSTVSETYLSKPSIAKRRANQQETEQFYFMKLREYLEGSNLITKLQAKHDLLQRTLGEGHRAEYMTTRPPNVPPKPQKHRKSRPRSQYNTKLFNGDLETFVKDSGQVIPLIVESCIRFINLYGLQHQGIFRVSGSQVEVNDIKNSFERGENPLADDQSNHDINSVAGVLKLYFRGLENPLFPKERFNDLISCIRIDNLYERALHIRKLLLTLPRSVLIVMRYLFAFLNHLSQYSDENMMDPYNLAICFGPTLMPVPEIQDQVSCQAHVNEIIKTIIIHHETIFPDAKELDGPVYEKCMAGDDYCDSPYSEHGTLEEVDQDAGTEPHTSEDECEPIEAIAKFDYVGRSARELSFKKGASLLLYHRASEDWWEGRHNGIDGLVPHQYIVVQDMDDTFSDTLSQKADSEASSGPVTEDKSSSKDMNSPTDRHPDGYLARQRKRGEPPPPVRRPGRTSDGHCPLHPPHALSNSSVDLGSPSLASHPRGLLQNRGLNNDSPERRRRPGHGSLTNISRHDSLKKIDSPPIRRSTSSGQYTGFNDHKPLDPETIAQDIEETMNTALNELRELERQSTAKHAPDVVLDTLEQVKNSPTPATSTESLSPLHNVALRSSEPQIRRSTSSSSDTMSTFKPMVAPRMGVQLKPPALRPKPAVLPKTNPTIGPAPPPQGPTDKSCTM

SEQ ID NO: 62306 - protein, 635 aa, Homo sapiens
KDDSLSRHRPRRTHSKPLPPLTAKSAGGRLETSVQGGGGLAMNDRAAAAGSLDRSRNLEEAAAAEQGGGCDQVDSSPVPRYRVNAKKLTPLLPPPLTDMDSTLDSSTGSLLKTNNHIGGGAFSVDSPRIYSNSLPPSAAVAASSSLRINHANHTGSNHTYLKNTYNKPKLSEPEEELLQQFKREEVSPTGSFSAHYLSMFLLTAACLFFLILGLTYLGMRGTGVSEDGELSIENPFGETFGKIQESEKTLMMNTLYKLHDRLAQLAGDHECGSSSQRTLSVQEAAAYLKDLGPEYEGIFNTSLQWILENGKDVGIRCVGFGPEEELTNITDVQFLQSTRPLMSFWCRFRRAFVTVTHRLLLLCLGVVMVCVVLRYMKYRWTKEEEETRQMYDMVVKIIDVLRSHNEACQENKDLQPYMPIPHVRDSLIQPHDRKKMKKVWDRAVDFLAANESRVRTETRRIGGADFLVWRWIQPSASCDKILVIPSKVWQGQAFHLDRRNSPPNSLTPCLKIRNMFDPVMEIGDQWHLAIQEAILEKCSDNDGIVHIAVDKNSREGCVYVKCLSPEYAGKAFKALHGSWFDGKLVTVKYLRLDRYHHRFPQALTSNTPLKPSNKHMNSMSHLRLRTGLTNSQGSS

SEQ ID NO: 62307 - protein, 20 aa, Homo sapiens
VAPRVATRGERGATLAAGTR

SEQ ID NO: 62308 - protein, 18 aa, Homo sapiens
KSATRPGLICACHSWVRR

SEQ ID NO: 62309 - protein, 314 aa, Homo sapiens
IMALLVDRVRGHWRIAAGLLFNLLVSICIVFLNKWIYVYHGFPNMSLTLVHFVVTWLGLYICQKLDIFAPKSLPPSRLLLLALSFCGFVVFTNLSLQNNTIGTYQLAKAMTTPVIIAIQTFCYQKTFSTRIQLTLIPITLGVILNSYYDVKFNFLGMVFAALGVLVTSLYQVWVGAKQHELQVNSMQLLYYQAPMSSAMLLVAVPFFEPVFGEGGIFGPWSVSALLMVLLSGVIAFMVNLSIYWIIGNTSPVTYNMFGHFKFCITLFGGYVLFKDPLSINQALGILCTLFGILAYTHFKLSEQEGSRSKLAQRP

SEQ ID NO: 62310 - protein, 492 aa, Homo sapiens
VQLMKYGADPSLIDGEGCSCIHLAAQFGHTSIVAYLIAKGQDVDMMDQNGMTPLMWAAYRTHSVDPTRLLLTFNVSVNLGDKYHKNTALHWAVLAGNTTVISLLLEAGANVDAQNIKGESALDLAKQRKNVWMINHLQEARQAKGYDNPSFLRKLKADKEFRQKVMLGTPFLVIWLVGFIADLNIDSWLIKGLMYGGVWATVQFLSKSFFDHSMHSALPLGIYLATKFWMYVTWFFWFWNDLNFLFIHLPFLANSVALFYNFGKSWKSDPGIIKATEEQKKKTIVELAETGSLDLSIFCSTCLIRKPVRSKHCGVCNRCIAKFDHHCPWVGNCVGAGNHRYFMGYLFFLLFMICWMIYGCISYWGLHCETTYTKDGFWTYITQIATCSPWMFWMFLNSVFHFMWVAVLLMCQMYQISCLGITTNERMNARRYKHFKVTTTSIESPFNHGCVRNIIDFFEFRCCGLFRPVIVDWTRQYTIEYDQISGSGYQLV

SEQ ID NO: 62311 - protein, 341 aa, Homo sapiens
ISLFSMTDLNDNICKRYIKMITNIVILSLIICISLAFWIISMTASTYYGNLRPISPWRWLFSVVVPVLIVSNGLKKKSLDHSGALGGLVVGFILTIANFSFFTSLLMFFLSSSKLTKWKGEVKKRLDSEYKEGGQRNWVQVFCNGAVPTELALLYMIENGPGEIPVDFSKQYSASWMCLSLLAALACSAGDTWASEVGPVLSKSSPRLITTWEKVPVGTNGGVTVVGLVSSLLGGTFVGIAYFLTQLIFVNDLDISAPQWPIIAFGGLAGLLGSIVDSYLGATMQYTGLDESTGMVVNSPTNKARHIAGKPILDNNAVNLFSSVLIALLLPTAAWGFWPRG

SEQ ID NO: 62312 - protein, 663 aa, Homo sapiens
IYEQEGVYIHSSCGKTNDQDGLISGILRVLEKDAEVIVDWRPLDDALDSSSILYARKDSSSVVEWTQAPKERGHRGSEHLNSYEAEWDMVNTVSFKRKPHTNGDAPSHRNGKSKWSFLFSLTDLKSIKQNKEGMGWSYLVFCLKDDVVLPALHFHQGDSKLLIESLEKYVVLCESPQDKRTLLVNCQNKSLSQSFENLLDEPAYGLIQKIKKDPYTATMIGFSKVTNYIFDSLRGSDPSTHQRPPSEMADFLSDAIPGLKINQQEEPGFEVITRIDLGERPVVQRREPVSLEEWTKNIDSEGRILNVDNMKQMIFRGGLSHALRKQAWKFLLGYFPWDSTKEERTQLQKQKTDEYFRMKLQWKSISQEQEKRNSRLRDYRSLIEKDVNRTDRTNKFYEGQDNPGLILLHDILMTYCMYDFDLGYVQGMSDLLSPLLYVMENEVDAFWCFASYMDQMHQNFEEQMQGMKTQLIQLSTLLRLLDSGFCSYLESQDSGYLYFCFRWLLIRFKREFSFLDILRLWEVMWTELPCTNFHLLLCCAILESEKQQIMEKHYGFNEILKHINELSMKIDVEDILCKAEAISLQMVKCKELPQAVCEILGLQGSEVTTPDSDVGEDENVVMTPCPTSAFQSNALPTLSASGARNDSPTQIPVSSDVCRLTPA

SEQ ID NO: 62313 - protein, 17 aa, Homo sapiens
MKKLKISMDVLEVSLRW

SEQ ID NO: 62314 - protein, 353 aa, Homo sapiens
VTASGLLRDWTGRRSKARPPFALLVGLIMKRLGSVQRKMPCVFVTEVKEEPSSKREHQPFKVLATETVSHKALDADIYSAIPTEKVDGTCCYVTTYKDQPYLWARLDRKPNKQAEKRFKNFLHSKENPKEFFWNVEEDFKPAPECWIPAKETEQINGNPVPDENGHIPGWVPVEKNNKQYCWHSSVVNYEFEIALVLKHHPDDSGLLEISAVPLSDLLEQTLELIGTNINGNPYGLGSKKHPLHLLIPHGAFQIRNLPSLKHNDLVSWFEDCKEGKIEGIVWHCSDGCLIKVHRHHLGLCWPIPDTYMNSRPVIINMNLNKCDSAFDIKCLFNHFLKIDNQKFVRLKDIIFDV

SEQ ID NO: 62315 - protein, 915 aa, Homo sapiens
KMANINLKEITLIVGVVTACYWNSLFCGFVFDDVSAILDNKDLHPSTPLKTLFQNDFWGTPMSEERSHKSYRPLTVLTFRLNYLLSELKPMSYHLLNMIFHAVVSVIFLKVCKLFLDNKSSVIASLLFAVHPIHTEAVTGVVGRAELLSSIFFLAAFLSYTRSKGPDNSIIWTPIALTVFLVAVATLCKEQGITVVGICCVYEVFIAQGYTLPLLCTTAGQFLRGKGSIPFSMLQTLVKLIVLMFSTLLLVVIRVQVIQSQLPVFTRFDNPAAVSPTPTRQLTFNYLLPVNAWLLLNPSELCCDWTMGTIPLIESLLDIRNLATFTFFCFLGMLGVFSIRYSGDSSKTVLMALCLMALPFIPASNLFFPVGFVVAERVLYVPSMGFCILVAHGWQKISTKSVFKKLSWICLSMVILTHSLKTFHRNWDWESEYTLFMSALKVNKNNAKLWNNVGHALENEKNFERALKYFLQATHVQPDDIGAHMNVGRTYKNLNRTKEAEESYMMAKSLMPQIIPGKKYAARIAPNHLNVYINLANLIRANESRLEEADQLYRQAISMRPDFKQAYISRGELLLKMNKPLKAKEAYLKALELDRNNADLWYNLAIVHIELKEPNEALKNFNRALELNPKHKLALFNSAIVMQESGEVKLRPEARKRLLSYINEEPLDANGYFNLGMLAMDDKKDNEAEIWMKKAIKLQADFRSALFNLALLYSQTAKELKALPILEELLRYYPDHIKGLILKGDILMNQKKDILGAKKCFERILEMDPSNVQGKHNLCVVYFEEKDLLKAERCLLETLALAPHEEYIQRHLNIVRDKISSSSFIEPIFPTSKISSVEGKKIPTESVKEIRGESRQTQIVKTSDNKSQSKSNKQLGKNGDEETPHKTTKDIKEIEKKRVAALKRLEEIERILNGE

SEQ ID NO: 62316 - protein, 450 aa, Homo sapiens
VRARPVSPARQSQDPAASLSLHLSLPPAPGAGCARWRRRGPQAAMAAGAGAGSAPRWLRALSEPLSAAQLRRLEEHRYSAAGVSLLEPPLQLYWTWLLQWIPLWMAPNSITLLGLAVNVVTTLVLISYCPTATEEAPYWTYLLCALGLFIYQSLDAIDGKQARRTNSCSPLGELFDHGCDSLSTVFMAVGASIAARLGTYPDWFFFCSFIGMFVFYCAHWQTYVSGMLRFGKVDVTEIQIALVIVFVLSAFGGATMWDYTIPILEIKLKILPVLGFLGGVIFSCSNYFHVILHGGVGKNGSTIAGTSVLSPGLHIGLIIILAIMIYKKSATDVFEKHPCLYILMFGCVFAKVSQKLVVAHMTKSELYLQDTVFLGPGLLFLDQYFNNFIDEYVVLWMAMVISSFDMVIYFSALCLQISRHLHLNIFKTACHQAPEQVQVLSSKSHQNNMD

SEQ ID NO: 62317 - protein, 4 aa, Homo sapiens
MFSQ

SEQ ID NO: 62318 - protein, 401 aa, Homo sapiens
LWQFLLQLLLDQKHEHLICWTSNDGEFKLLKAEEVAKLWGLRKNKTNMNYDKLSRALRYYYDKNIIKKVIGQKFVYKFVSFPEILKMDPHAVEISRESLLLQDSDCKASPEGREAHKHGLAALRSTSRNEYIHSGLYSSFTINSLQNPPDAFKAIKTEKLEEPPEDSPPVEEVRTVIRFVTNKTDKHVTRPVVSLPSTSEAAAASAFLASSVSAKISSLMLPNAASISSASPFSSRSPSLSPNSPLPSEHRSLFLEAACHDSDSLEPLNLSSGSKTKSPSLPPKAKKPKGLEISAPPLVLSGTDIGSIALNSPALPSGSLTPAFFTAQTPNGLLLTPSPLLSSIHFWSSLSPVAPLSPARLQGPSTLFQFPTLLNGHMPVPIPSLDRAASPVLLSSNSQKS

SEQ ID NO: 62319 - protein, 582 aa, Homo sapiens
KQTCVNLNSTSMYLVSGGLNNTVNIWDLKSKRVHRSLKDHKDQVTCVTYNWNDCYIASGSLSGEIILHSVTTNLSSTPFGHGSNQSVRHLKYSLFKKSLLGSVSDNGIVTLWDVNSQSPYHNFDSVHKAPASGICFSPVNELLFVTIGLDKRIILYDTSSKKLVKTLVADTPLTAVDFMPDGATLAIGSSRGKIYQYDLRMLKSPVKTISAHKTSVQCIAFQYSTVLTKSSLNKGCSNKPTTVNKRSVNVNAASGGVQNSGIVREAPATSIATVLPQPMTSAMGKGTVAVQEKAGLPRSINTDTLSKETDSGKNQDFSSFDDTGKSSLGDMFSPIRDDAVVNKGSDESIGKGDGFDFLPQLNSVFPPRKNPVTSSTSVLHSSPLNVFMGSPGKEENENRDLTAESKKIYMGKQESKDSFKQLAKLVTSGAESGNLNTSPSSNQTRNSEKFEKPENEIEAQLICEPPINGSSTPNPKIASSVTAGVASSLSEKIADSIGNNRQNAPLTSIQIRFIQNMIQETLDDFREACHRDIVNLQVEMIKQFHMQLNEMHSLLERYSVNEGLVAEIERLREENKRLRAHF

SEQ ID NO: 62320 - protein, 364 aa, Homo sapiens
REKMFSSVAHLARANPFNTPHLQLVHDGLGDLRSSSPGPTGQPRRPRNLAAAAVEEYSCEFGSAKYYALCGFGGVLSCGLTHTAVVPLDLVKCRMQVDPQKYKGIFNGFSVTLKEDGVRGLAKGWAPTFLGYSMQGLCKFGFYEVFKVLYSNMLGEENTYLWRTSLYLAASASAEFFADIALAPMEAAKVRIQTQPGYANTLRDAAPKMYKEEGLKAFYKGVAPLWMRQIPYTMMKFACFERTVEALYKFVVPKPRSECSKPEQLVVTFVAGYIAGVFCAIVSHPADSVVSVLNKEKGSSASLVLKRLGFKGVWKGLFARIIMIGTLTALQWFIYDSVKVYFRLPRPPPPEMPESLKKKLGLTQ

SEQ ID NO: 62321 - protein, 372 aa, Homo sapiens
IPNCQFRSKTARLKTFTANQIDEIKDPSGLFYILPFQKGYLVNWDVQRQVWDYLFGKEMYQVDFLDTNIIITEPYFNFTSIQESMNEILFEEYQFQAVLRVNAGALSAHRYFRDNPSELCCIIVDSGYSFTHIVPYCRSKKKKEAIIRINVGGKLLTNHLKEIISYRQLHVMDETHVINQVKEDVCYVSQDFYRDMDIAKLKGEENTVMIDYVLPDFSTIKKGFCKPREEMVLSGKYKSGEQILRLANERFAVPEILFNPSDIGIQEMGIPEAIVYSIQNLPEEMQPHFFKNIVLTGGNSLFPGFRDRVYSEVRCLTPTDYDVSVVLPENPITYAWEGGKLISENDDFEDMVVTREDYEENGHSVCEEKFDI

SEQ ID NO: 62322 - protein, 304 aa, Homo sapiens
IIITEPYFNFTSIQESMNEILFEEYQFQAVLRVNAGALSAHRYFRDNPSELCCIIVDSGYSFTHIVPYCRSKKKKEAIIRINVGGKLLTNHLKEIISYRQLHVMDETHVINQVKEDVCYVSQDFYRDMDIAKLKGEENTVMIDYVLPDFSTIKKGFCKPREEMVLSGKYKSGEQILRLANERFAVPEILFNPSDIGIQEMGIPEAIVYSIQNLPEEMQPHFFKNIVLTGGNSLFPGFRDRVYSEVRCLTPTDYDVSVVLPENPITYAWEGGKLISENDDFEDMVVTREDYEENGHSVCEEKFDI

SEQ ID NO: 62323 - protein, 8 aa, Homo sapiens
MAAPWLPP

SEQ ID NO: 62324 - protein, 93 aa, Homo sapiens
IDGNGRTSRLLMNLILMQAGYPPITIRKEQRSDYYHVLEAANEGDVRPFIRFIAKCTETTLDTLLFATTEYSVALPEAQPNHSGFKETLPVKP

SEQ ID NO: 62325 - protein, 131 aa, Homo sapiens
KKVVDHYENPRNVGSLDKTSKNVGTGLVGAPACGDVMKLQIQVDEKGKIVDARFKTFGCGSAIASSSLATEWVKGKTVEEALTIKNTDIAKELCLPPVKLHCSMLAEDAIKAALADYKLKQEPKKGEAEKK

SEQ ID NO: 62326 - protein, 311 aa, Homo sapiens
LLGPVPQMGVFCLGPWGLGRKLRTPGKGPLQLLSRLCGDHLQAIPAKKAPAGQEEPGTPPSSPLSAEQLDRIQRNKAAALLRLAARNVPVGFGESWKKHLSGEFGKPYFIKLMGFVAEERKHYTVYPPPHQVFTWTQMCDIKDVKVVILGQDPYHGPNQAHGLCFSVQRPVPPPPSLENIYKELSTDIEDFVHPGHGDLSGWAKQGVLLLNAVLTVRAHQANSHKERGWEQFTDAVVSWLNQNSNGLVFLLWGSYAQKKGSAIDRKRHHVLQTAHPSPLSVYRGFFGCRHFSKTNELLQKSGKKPIDWKEL

SEQ ID NO: 62327 - protein, 21 aa, Homo sapiens
VQIPERVAAVRSWSLPMQPGF

SEQ ID NO: 62328 - protein, 12 aa, Homo sapiens
IPMLSLTFHGIS

SEQ ID NO: 62329 - protein, 204 aa, Homo sapiens
VNSHIAKLQELWKTPQNQTIHLSKSMMEASFFKHPDLTTGQKRYLCSIAKIYNANYLKMLMKRQYMHVLQHSSQKPGVLTHHRSRLSSRYSQKQHYPCTTWRHQLEREDSGSSDIAAASAPEMLIQHSLWRPVRNKEGIKTGYASKTRCKSLKIFRRPRKLFMQTVSSDDSESHMSEEKKEEDLLNNFMQSMSIEEQGEHLMLT

SEQ ID NO: 62330 - protein, 538 aa, Homo sapiens
TLSELAAETDLPVVFVKQRKIGGHGPTLKAYQEGRLQKLLKMNGPEDLPKSYDYDLIIIGGGSGGLAAAKEAAQYGKKVMVLDFVTPTPLGTRWGLGGTCVNVGCIPKKLMHQAALLGQALQDSRNYGWKVEETVKHDWDRMIEAVQNHIGSLNWGYRVALREKKVVYENAYGQFIGPHRIKATNNKGKEKIYSAERFLIATGERPRYLGIPGDKEYCISSDDLFSLPYCPGKTLVVGASYVALECAGFLAGIGLDVTVMVRSILLRGFDQDMANKIGEHMEEHGIKFIRQFVPIKVEQIEAGTPGRLRVVAQSTNSEEIIEGEYNTVMLAIGRDACTRKIGLETVGVKINEKTGKIPVTDEEQTNVPYIYAIGDILEDKVELTPVAIQAGRLLAQRLYAGSTVKCDYENVPTTVFTPLEYGACGLSEEKAVEKFGEENIEVYHSYFWPLEWTIPSRDNNKCYAKIICNTKDNERVVGFHVLGPNAGEVTQGFAAALKCGLTKKQLDSTIGIHPVCAEVFTTLSVTKRSGASILQAGC

SEQ ID NO: 62331 - protein, 334 aa, Homo sapiens
LATCLGSFILVIFYFQSMLHPVMRRNPFGVDICCRKGSRSPLQELYNPIQLELSNTAVLHQMRRDQVTDTCRANSATSRKRRVLTPNDLKHLVVDEDHELIYCYVPKVACTNWKRLMMVLTGRGKYSDPMEIPANEAHVSANLKTLNQYSIPEINHRLKSYMKFLFVREPFERLVSAYRNKFTQKYNISFHKRYGTKIIKRQRKNATQEALRKGDDVKFEEFVAYLIDPHTQREEPFNEHWQTVYSLCHPCHIHYDLVGKYETLEEDSNYVLQLAGVGSYLKFPTYAKSTRTTDEMTTEFFQNISSEHQTQLYEVYKLDFLMFNYSVPSYLKLE

SEQ ID NO: 62332 - protein, 140 aa, Homo sapiens
INSQPKSRKTSTLQTVRIERSPLLDQVQTFLPQMARANEKLRKEMAAAPPGRFNIENIDGPHSKVIQMDVALFEMNQSDSKEVDSSEESSQDSSENSSESEDEDDSIPSEVTIDNIKLPNSEGGKGKIEVLDSPASKKKK

SEQ ID NO: 62333 - protein, 1034 aa, Homo sapiens
VEEVLGHFGVNESTGLSLEQVKKLKERWGSNELPAEEGKTLLELVIEQFEDLLVRILLLAACISFVLAWFEEGEETITAFVEPFVILLILVANAIVGVWQERNAENAIEALKEYEPEMGKVYRQDRKSVQRIKAKDIVPGDIVEIAVGDKVPADIRLTSIKSTTLRVDQSILTGESVSVIKHTDPVPDPRAVNQDKKNMLFSGTNIAAGKAMGVVVATGVNTEIGKIRDEMVATEQERTPLQQKLDEFGEQLSKVISLICIAVWIINIGHFNDPVHGGSWIRGAIYYFKIAVALAVAAIPEGLPAVITTCLALGTRRMAKKNAIVRSLPSVETLGCTSVICSDKTGTLTTNQMSVCRMFILDRVEGDTCSLNEFTITGSTYAPIGEVHKDDKPVNCHQYDGLVELATICALCNDSALDYNEAKGVYEKVGEATETALTCLVEKMNVFDTELKGLSKIERANACNSVIKQLMKKEFTLEFSRDRKSMSVYCTPNKPSRTSMSKMFVKGAPEGVIDRCTHIRVGSTKVPMTSGVKQKIMSVIREWGSGSDTLRCLALATHDNPLRREEMHLEDSANFIKYETNLTFVGCVGMLDPPRIEVASSVKLCRQAGIRVIMITGDNKGTAVAICRRIGIFGQDEDVTSKAFTGREFDELNPSAQRDACLNARCFARVEPSHKSKIVEFLQSFDEITAMTGDGVNDAPALKKAEIGIAMGSGTAVAKTASEMVLADDNFSTIVAAVEEGRAIYNNMKQFIRYLISSNVGEVVCIFLTAALGFPEALIPVQLLWVNLVTDGLPATALGFNPPDLDIMNKPPRNPKEPLISGWLFFRYLAIGCYVGAATVGAAAWWFIAADGGPRVSFYQLSHFLQCKEDNPDFEGVDCAIFESPYPMTMALSVLVTIEMCNALNSLSENQSLLRMPPWENIWLVGSICLSMSLHFLILYVEPLPLIFQITPLNVTQWLMVLKISLPVILMDETLKFVARNYLEPGKECVQPATKSCSFSACTDGISWPFVLLIMPLVIWVYSTDTNFSDMFWS

SEQ ID NO: 62334 - protein, 989 aa, Homo sapiens
VEEVLGHFGVNESTGLSLEQVKKLKERWGSNELPAEEGKTLLELVIEQFEDLLVRILLLAACISFVLAWFEEGEETITAFVEPFVILLILVANAIVGVWQERNAENAIEALKEYEPEMGKVYRQDRKSVQRIKAKDIVPGDIVEIAVGDKVPADIRLTSIKSTTLRVDQSILTGESVSVIKHTDPVPDPRAVNQDKKNMLFSGTNIAAGKAMGVVVATGVNTEIGKIRDEMVATEQERTPLQQKLDEFGEQLSKVISLICIAVWIINIGHFNDPVHGGSWIRGAIYYFKIAVALAVAAIPEGLPAVITTCLALGTRRMAKKNAIVRSLPSVETLGCTSVICSDKTGTLTTNQMSVCRMFILDRVEGDTCSLNEFTITGSTYAPIGEVHKDDKPVNCHQYDGLVELATICALCNDSALDYNEAKGVYEKVGEATETALTCLVEKMNVFDTELKGLSKIERANACNSVIKQLMKKEFTLEFSRDRKSMSVYCTPNKPSRTSMSKMFVKGAPEGVIDRCTHIRVGSTKVPMTSGVKQKIMSVIREWGSGSDTLRCLALATHDNPLRREEMHLEDSANFIKYETNLTFVGCVGMLDPPRIEVASSVKLCRQAGIRVIMITGDNKGTAVAICRRIGIFGQDEDVTSKAFTGREFDELNPSAQRDACLNARCFARVEPSHKSKIVEFLQSFDEITAMTGDGVNDAPALKKAEIGIAMGSGTAVAKTASEMVLADDNFSTIVAAVEEGRAIYNNMKQFIRYLISSNVGEVVCIFLTAALGFPEALIPVQLLWVNLVTDGLPATALGFNPPDLDIMNKPPRNPKEPLISGWLFFRYLAIGCYVGAATVGAAAWWFIAADGGPRVSFYQLSHFLQCKEDNPDFEGVDCAIFESPYPMTMALSVLVTIEMCNALNSLSENQSLLRMPPWENIWLVGSICLSMSLHFLILYVEPLPLIFQITPLNVTQWLMVLKISLPVILMDETLKFVARNYLEPAILE

SEQ ID NO: 62335 - protein, 5 aa, Homo sapiens
LDIIS

SEQ ID NO: 62336 - protein, 271 aa, Homo sapiens
IMGNTSSERAALERHGGHKTPRRDSSGGTKDGDRPKILMDSPEDADLFHSEEIKAPEKEEFLAWQHDLEVNDKAPAQARPTVFRWTGGGKEVYLSGSFNNWSKLPLTRSHNNFVAILDLPEGEHQYKFFVDGQWTHDPSEPIVTSQLGTVNNIIQVKKTDFEVFDALMVDSQKCSDVSELSSSPPGPYHQEPYVCKPEERFRAPPILPPHLLQVILNKDTGISCDPALLPEPNHVMLNHLYALSIKDGVMVLSATHRYKKKYVTTLLYKPI

SEQ ID NO: 62337 - protein, 53 aa, Homo sapiens [sequence omitted]

SEQ ID NO: 62338 - protein, 357 aa, Homo sapiens
LNEVMGTGAVRGQQSAFAGATGPFRFTPNPEFSTYPPAATEGPNIVCKACGLSFSVFRKKHVCCDCKKDFCSVCSVLQENLRRCSTCHLLQETAFQRPQLMRLKVKDLRQYLILRNIPIDTCREKEDLVDLVLCHHGLGSEDDMDTSSLNSSRSQTSSFFTRSFFSNYTAPSATMSSFQGELMDGDQTSRSGVPAQVQSEITSANTEDDDDDDDEDDDDEEENAEDRNPGLSKERVRASLSDLSSLDDVEGMSVRQLKEILARNFVNYSGCCEKWELVEKVNRLYKENEENQKSYGERLQLQDEEDDSLCRICMDAVIDCVLLECGHMVTCTKCGKRMSECPICRQYVVRAVHVFKS

SEQ ID NO: 62339 - protein, 51 aa, Homo sapiens
LFELSSHEECREWQVFVLAFTFLILFLGNFLTTLKVVHAKLQKNRGKTKQP

SEQ ID NO: 62340 - protein, 202 aa, Homo sapiens
KKKSRKDTSRNCSASTSQASPSPCITERSKQKARRRTRSSSSSSSSSSSSSSSSSSSSSSSSSDGRKKRGKYKDKRRKKKKKRKKLKKKGKEKAEAQQVEALPGPSLDQWHRSAGEEEDGPVLTDEQKSRIQAMKPMTKEEWDARQSIIRKVVDPETGRTRLIKGDGEVLEEIVTKERHREINKQATRGDCLAFQMRAGLLP

SEQ ID NO: 62341 - protein, 122 aa, Homo sapiens
KKRKKLKKKGKEKAEAQQVEALPGPSLDQWHRSAGEEEDGPVLTDEQKSRIQAMKPMTKEEWDARQSIIRKVVDPETGRTRLIKGDGEVLEEIVTKERHREINKQATRGDCLAFQMRAGLLP

SEQ ID NO: 62342 - protein, 50 aa, Homo sapiens
ISFSYTTDPNMPGAMGTPALGEADVVIPRNSCHSGPDGRQEGLPCTAFLG

SEQ ID NO: 62343 - protein, 305 aa, Homo sapiens [sequence omitted]

SEQ ID NO: 62344 - protein, 194 aa, Homo sapiens
TEQELLALDTIRPEHVLRLSRVTENYLCKPEDNIYSIDFTRFKIRDLETGTVLFEIAKPCVSDQEEDEEEGGGDVDISAGRFVRYQFTPAFLRLRTVGATVEFTVGDKPVSNFRMIERHYFREHLLKNFDFDFGFCIPSSRNTCEHIYEFPQLSEDVIRLMIENPYETRSDSFYFVDNKLIMHNKADYAYNGGQ

SEQ ID NO: 62345 - protein, 655 aa, Homo sapiens [sequence omitted]

SEQ ID NO: 62346 - protein, 105 aa, Homo sapiens
VDVPKAPGLGLVLERVHFEKYNQRFGNDGLHEPLDWAQEEGKVAAFKEEHIYPTIIGTERDERSMAQWLSTLPIHNFSATALTAGGTGAKVPSPLEGSEGDGDTD

SEQ ID NO: 62347 - protein, 14 aa, Homo sapiens
VAPAQDPPLLDPLQ

SEQ ID NO: 62348 - protein, 15 aa, Homo sapiens
LAALFWYAYLASLGK

SEQ ID NO: 62349 - protein, 492 aa, Homo sapiens [sequence omitted]

SEQ ID NO: 62350 - protein, 28 aa, Homo sapiens
IQNDDNFLNIIYEAYLFSMTQAAMKKTM

SEQ ID NO: 62351 - protein, 70 aa, Homo sapiens
VKTHLRDMIILPKMVGSMVGVYNGKTFNQVEIKPEMISHYLGEFSITYKLVKHCRPGIGATHSSRFIPLK

SEQ ID NO: 62352 - protein, 465 aa, Homo sapiens
VKSGEVDLHQLASTWAKAYAETTLEHARPEEPSWDEDFADVYHDLIHSPASETLLNLEHNYFVSISELIGERDVELKKLRERQGIEMEKVMQELGKSLTDQDVNSLAAQHFESQQDLENKWSNELKQSTAIQKQEYQEWVIKLHQDLKNPNNSSLSEEIKVQPSQFRESVEAIGRIYEEQRKLEESFTIHLGAQLKTMHNLRLLRADMLDFCKHKRNHRSGVKLHRLQTALSLYSTSLCGLVLLVDNRINSYSGIKRDFATVCQECTDFHFPRIEEQLEVVQQVVLYARTQRRSKLKESLDSGNQNGGNDDKTKNAERNYLNVLPGEFYITRHSNLSEIHVAFHLCVDDHVKSGNITARDPAIMGLRNILKVCCTHDITTISIPLLLVHDMSEEMTIPWCLRRAELVFKCVKGFMMEMASWDGGISRTVQFLVPQSISEEMFYQLSNMLPQIFRVSSTLTLTSKH

SEQ ID NO: 62353 - protein, 248 aa, Homo sapiens
MSQEKQVTVLELFRVSSYRQPIIISIVLQLSQQLSGINAVFYYSTGIFKDAGVQQPIYATISAGVVNTIFTLLSLFLVERAGRRTLHMIGLGGMAFCSTLMTVSLLLKNHYNGMSFVCIGAILVFVACFEIGPGPIPWFIVAELFSQGPRPAAMAVAGCSNWTSNFLVGLLFPSAAYYLGAYVFIIFTGFLITFLAFTFFKVPETRGRTFEDITRAFEGQAHGADRSGKDGVMGMNSIEPAKETTTNV

SEQ ID NO: 62354 - protein, 36 aa, Homo sapiens
IPTFRAATLTLQRTGKRNRPDGPLSPNRALCGAPWS

SEQ ID NO: 62355 - protein, 383 aa, Homo sapiens
IRGNEPVYTSTQEDCINSCCSTKNISGDKACNLMIFDTRKTARQPNCYLFFCPNEEACPLKPAKGLMSYRIITDFPSLTRNLPSQELPQEDSLLHGQFSQAVTPLAHHHTDYSKPTDISWRDTLSQKFGSSDHLEKLFKMDEASAQLLAYKEKGHSQSSQFSSDQEIAHLLPENVSALPATVAVASPHTTSATPKPATLLPTNASVTPSGTSQPQLATTAPPVTTVTSQPPTTLISTVFTRAAATLQAMATTAVLTTTFQAPTDSKGSLETIPFTEISNLTLNTGNVYNPTALSMSNVESSTMNKTASWEGREASPGSSSQGSVPENQYGLPFEKWLLIGSLLFGVLFLVIGLVLLGRILSESLRRKRYSRLDYLINGIYVDI

SEQ ID NO: 62356 - protein, 70 aa, Homo sapiens
KDHHQPLGRAKGVEKQQLPEQPFEKAAFQKQNDTPKGPQPPTVSPIRSSRPPPAKRKKSQSRGNSQLLLS

SEQ ID NO: 62357 - protein, 632 aa, Homo sapiens
KSGKFMNPTDQARKEARKRELKKNKKQRMMVRAAVLKMKDPKQIIRDMEKLDEMEFNPVQQPQLNEKVLKDKRKKLRETFERILRLYEKENPDIYKELRKLEVEYEQKRAQLSQYFDAVKNAQHVEVESIPLPDMPHAPSNILIQDIPLPGAQPPSILKKTSAYGPPTRAVSILPLLGHGVPRLPPGRKPPGPPPGPPPPQVVQMYGRKVGFALDLPPRRRDEDMLYSPELAQRGHDDDVSSTSEDDGYPEDMDQDKHDDSTDDSDTDKSDGESDGDEFVHRDNGERDNNEEKKSGLSVRFADMPGKSRKKKKNMKELTPLQAMMLRMAGQEIPEEGREVEEFSEDDDEDDSDDSEAEKQSQKQHKEESHSDGTSTASSQQQAPPQSVPPSQIQAPPMPGPPPLGPPPAPPLRPPGPPTGLPPGPPPGAPPFLRPPGMPGLRGPLPRLLPPGPPPGRPPGPPPGPPPGLPPGPPPRGPPPRLPPPAPPGIPPPRPGMMRPPLVPPLGPAPPGLFPPAPLPNPGVLSAPPNLIQRPKADDTSAATIEKKATATISAKPQITNPKAEITRFVPTALRVRRENKGATAAPQRKSEDDSAVPLAKAAPKSGPSVPVSVQTKDDVYEAFMKEMEGLL

SEQ ID NO: 62358 - protein, 89 aa, Homo sapiens
VDVIGRNLDESQSRVAKRTVYSTICSTIPQWLGAPNAELYGSHNGTRSLSTGRICGKCSRTSAQTGNKKIIHRAFQCIRVSSSRWLCVQ

SEQ ID NO: 62359 - protein, 49 aa, Homo sapiens
MCYPPIIQSGGNYNLKFSVVSDKNHMYFGAITCAMGIRFESYCSNLFAL

SEQ ID NO: 62360 - protein, 24 aa, Homo sapiens
TIQLIQNHFVDEYDPTIEVLLSSM

SEQ ID NO: 62361 - protein, 12 aa, Homo sapiens
KKKKSKTKCVIM

SEQ ID NO: 62362 - protein, 346 aa, Homo sapiens
LETERVRANARALRLGLEALAANHQQLFTDGRSWGSFTVLDNSAWYQKQHLVDFLAAVGGHFRMGTLLSRQSVQLRLKSPEGMSLAEFFYQVLQAYDFYYLFQRYGCRVQLGGSDQLGNIMSGYEFINKLTGEDVFGITVPLITSTTGAKLGKSAGNAVWLNRDKTSPFELYQFFVRQPDDSVERYLKLFTFLPLPEIDHIMQLHVKEPERRGPQKRLAAEVTKLVHGREGLDSAKRCTQALYHSSIDALEVMSDQELKELFKEAPFSEFFLDPGTSVLDTCRKANAIPDGPRGYRMITEGGVSINHQQVTNPESVLIVGQHILKNGLSLLKIGKRNFYIIKWLQL

SEQ ID NO: 62363 - protein, 194 aa, Homo sapiens
KRQPKPSSDEGYWDCSVCTFRNSAEAFKCMMCDVRKGTSTRSTLFEVIVSASRTKEPLKFPISGRKPRPVSQLVAQQVTQQFVPPTQSKKEKKDKVEKEKSEKETTSKKNSHKKTRPRLKNVDRSSAQHLEVTVGDLTVIITDFKEKTKSPPASSAASADQHSQSGSSSDNTERGMSRSSSPRGEASSLNGESH

SEQ ID NO: 62364 - protein, 224 aa, Homo sapiens
RPNPPEEMSGGLAPSKSTVYVSNLPFSLTNNDLYRIFSKYGKVVKVTIMKDKDTRKSKGVAFILFLDKDSAQNCTRAINNKQLFGRVIKASIAIDNGRAAEFIRRRNYFDKSKCYECGESGHLSYACPKNMLGEREPPKKKEKKKKKKAPEPEEEIEEVEESEDEGEDPALDSLSQAIAFQQAKIEEEQKKWKPSSGVPSTSDDSRRPRIKKSTYFSDEEELSD

SEQ ID NO: 62365 - protein, 80 aa, Homo sapiens
LGLYGEDDDSWCSSSSSSSDSEEEGYFLGQPIPQPRPQRFAYYTDDLSSPPSALPTPQFGQRTTKSKKKKGHKGKNCIIS

SEQ ID NO: 62366 - protein, 7 aa, Homo sapiens
IPYEFMA

SEQ ID NO: 62367 - protein, 534 aa, Homo sapiens
LDALWQELLVSSTVGAAAVSALAGGALNGVFGRRAAILLASALFTAGSAVLAAANNKETLLAGRLVVGLGIGIASMTVPVYIAEVSPPNLRGRLVTINTLFITGGQFFASVVDGAFSYLQKDGWRYMLGLAAVPAVIQFFGFLFLPESPRWLIQKGQTQKARRILSQMRGNQTIDEEYDSIKNNIEEEEKEVGSAGPVICRMLSYPPTRRALIVGCGLQMFQQLSGINTIMYYSATILQMSGVEDDRLAIWLASVTAFTNFIFTLVGVWLVEKVGRRKLTFGSLAGTTVALIILALGFVLSAQVSPRITFKPIAPSGQNATCTRYSYCNECMLDPDCGFCYKMNKSTVIDSSCVPVNKASTNEAAWGRCENETKFKTEDIFWAYNFCPTPYSWTALLGLILYLVFFAPGMGPMPWTVNSEIYPLWARSTGNACSSGINWIFNVLVSLTFLHTAEYLTYYGAFFLYAGFAAVGLLFIYGCLPETKGKKLEEIESLFDNRLCTCGTSDSDEGRYIEYIRVKGSNYHLSDNDASDVE

SEQ ID NO: 62368 - protein, 370 aa, Homo sapiens
VSDRCKDFSLCYWNPYWMLPSDVCGMNCFWEAAFRYSLKIQPVEKMHLAVVACGERLEETMTMLKSAIIFSIKPLQFHIFAEDQLHHSFKGRLDNWSFLQTFNYTLYPITFPSENAAEWKKLFKPCASQRLFLPLILKEVDSLLYVDTDILFLRPVDDIWSLLKKFNSTQIAAMAPEHEEPRIGWYNRFARHPYYGKTGVNSGVMLMNMTRMRRKYFKNDMTTVRLQWGDILMPLLKKYKLNITWGDQDLLNIVFFHNPESLFVFPCQWNYRPDHCIYGSNCQEAEEGGIFILHGNRGVYHDDKQPAFRAVYEALRNCSFEDDNIRSLLKPLELELQKTVHTYCGKIYKIFIKQLAKSVRDRYARSPKEK

SEQ ID NO: 62369 - protein, 46 aa, Homo sapiens [sequence omitted]

SEQ ID NO: 62370 - protein, 641 aa, Homo sapiens [sequence omitted]

SEQ ID NO: 62371 - protein, 76 aa, Homo sapiens
VLLWEQQRLAGRLPRGSTGDTVLLPLAQGGHRPLSRAQSSPAAPASLSAPEPASQARVLSSSETPARTLPFTTGSL

SEQ ID NO: 62372 - protein, 69 aa, Homo sapiens
LEAVIRVHSKYWGCMQRLASCPDSWVPRVPGADKEEVEAVTALASLSVGILAEDRPSEQLVEEEEPMNL

SEQ ID NO: 62373 - protein, 447 aa, Homo sapiens
VRPHRRAPLGSTYLPPAPSGMEAMAASTSLPDPGDFDRNVPRICGVCGDRATGFHFNAMTCEGCKGFFRRSMKRKALFTCPFNGDCRITKDNRRHCQACRLKRCVDIGMMKEFILTDEEVQRKREMILKRKEEEALKDSLRPKLSEEQQRIIAILLDAHHKTYDPTYSDFCQFRPPVRVNDGGGSHPSRPNSRHTPSFSGDSSSSCSDHCITSSDMMDSSSFSNLDLSEEDSDDPSVTLELSQLSMLPHLADLVSYSIQKVIGFAKMIPGFRDLTSEDQIVLLKSSAIEVIMLRSNESFTMDDMSWTCGNQDYKYRVSDVTKAGHSLELIEPLIKFQVGLKKLNLHEEEHVLLMAICIVSPDRPGVQDAALIEAIQDRLSNTLQTYIRCRHPPPGSHLLYAKMIQKLADLRSLNEEHSKQYRCLSFQPECSMKLTPLVLEVFGNEIS

SEQ ID NO: 62374 - protein, 51 aa, Homo sapiens
KTRMHPSSSVVIYRRRMEKDVPMLPQSQRRKMGCPSVLNMSVGMPWHFMLK

SEQ ID NO: 62375 - protein, 156 aa, Homo sapiens
VDPDKELSYRQQAANLLQDMGQRLNVSQLTINTAIVYMHRFYMIQSFTQFPGNSVAPAALFLAAKVEEQPKKLEHVIKVAHTCLHPQESLPDTRSEAYLQQVQDLVILESIILQTLGFELTIDHPHTHVVKCTQLVRASKDLAQTSYFMATNRTDT

SEQ ID NO: 62376 - protein, 166 aa, Homo sapiens
LSSSFSSSSSTRKRGPSEETGGAVFDHPAKIAKSTKSSSLNFSFPSLPTMGQMPGHSSDTSGLSFSQPSCKTRVPHSKLDKGPTGANGHNTTQTIDYQDTVNMLHSLLSAQGVQPTQPTAFEFVRPYSDYLNPRSGGISSRSGNTDKPRPPPLPSEPPPPLPPLPK

SEQ ID NO: 62377 - protein, 37 aa, Homo sapiens
LESPVSSCPPELANHPDAQHKPGTILTKKRREETIFA

SEQ ID NO: 62378 - protein, 156 aa, Homo sapiens
VPRLPAPRPVMTLRPSLLPLHLLLLLLLSAAVCRAEAGLETESPVRTLQVETLVEPPEPCAEPAAFGDTLHIHYTGSLVDGRIIDTSLTRDPLVIELGQKQVIPGLEQSLLDMCVGEKRRAIIPSHLAYGKRGFPPSVPGTKDNLMRPPGMTSSSQ

SEQ ID NO: 62379 - protein, 211 aa, Homo sapiens
VPRLPAPRPVMTLRPSLLPLHLLLLLLLSAAVCRAEAGLETESPVRTLQVETLVEPPEPCAEPAAFGDTLHIHYTGSLVDGRIIDTSLTRDPLVIELGQKQVIPGLEQSLLDMCVGEKRRAIIPSHLAYGKRGFPPSVPADAVVQYDVELIALIRANYWLKLVKGILPLVGMAMVPALLGLIGYHLYRKANRPKVSKKKLKEEKRNKSKKK

SEQ ID NO: 62380 - protein, 340 aa, Homo sapiens
LAAGIFFVRLLFERFIAKPCALCIGIEDSGPYQAQPNAILEKVFISITKYPDKKRLEGLSKQLDWNVRKIQCWFRHRRNQDKPPTLTKFCESMWRFTFYLCIFCYGIRFLWSSPWFWDIRQCWHNYPFQPLSSGLYHYYIMELAFYWSLMFSQFTDIKRKDFLIMFVHHLVTIGLISFSYINNMVRVGTLIMCLHDVSDFLLEAAKLANYAKYQRLCDTLFVIFSAVFMVTRLGIYPFWILNTTLFESWEIIGPYASWWLLNGLLLTLQLLHVIWSYLIARIALKALIRGKVSKDDRSDVESSSEEEDVTTCTKSPCDSSSSNGANRVNGHMGGSYWAEE

SEQ ID NO: 62381 - protein, 16 aa, Homo sapiens
RRRCDSSDSRNIHRRS

SEQ ID NO: 62382 - protein, 24 aa, Homo sapiens
IQTFYVQFQGRLNFRLIIFTIESV

SEQ ID NO: 62383 - protein, 345 aa, Homo sapiens
LVPQYYSLDHQPGWLPDSVAYHADDGKLYNGRAKGRQFGSKCNSGDRIGCGIEPVSFDVQTAQIFFTKNGKRVGSTIMPMSPDGLFPAVGMHSLGEEVRLHLNAELGREDDSVMMVDSYEDEWGRLHDVRVCGTLLEYLGKGKSIVDVGLAQARHPLSTRSHYFEVEIVDPGEKCYIALGLARKDYPKNRHPGWSRGSVAYHADDGKIFHGSGVGDPFGPRCYKGDIMGCGIMFPRDYILDSEGDSDDSCDTVILSPTARAVRNVRNVMYLHQEGEEEEEEEEEEEDGEEIEPEHEGRKVVVFFTRNGKIIGKKDAVVPSGGFFPTIGMLSCGEKVKVDLHPLSG

SEQ ID NO: 62384 - protein, 6 aa, Homo sapiens
MGSWTR

SEQ ID NO: 62385 - protein, 470 aa, Homo sapiens
LGAGAYSMSDVLALPIFKQEESSLPPDNENKILPFQYVLCAATSPAVKLHDETLTYLNQGQSYEIRMLDNRKLGELPEINGKLVKSIFRVVFHDRRLQYTEHQQLEGWRWNRPGDRILDIDIPMSVGIIDPRANPTQLNTVEFLWDPAKRTSVFIQVHCISTEFTMRKHGGEKGVPFRVQIDTFKENENGEYTEHLHSASCQIKVFKPKGADRKQKTDREKMEKRTPHEKEKYQPSYETTILTECSPWPEITYVNNSPSPGFNSSHSSFSLGEGNGSPNHQPEPPPPVTDNLLPTTTPQEAQQWLHRNRFSTFTRLFTNFSGADLLKLTRDDVIQICGPADGIRLFNALKGRMVRPRLTIYVCQESLQLREQQQQQQQQQQKHEDGDSNGTFFVYHAIYLEELTAVELTEKIAQLFSISPCQISQIYKQGPTGIHVLISDEMIQNFQEEACFILDTMKAETNDSYHIILK

SEQ ID NO: 62386 - protein, 79 aa, Homo sapiens
ILQPTEALSPEDGASTALIAVVITVVFLTLLSVVILIFFYLYKNKGSYVTYEPTEGEPSAIVQMESDLAKGSEKEEYFI

SEQ ID NO: 62387 - protein, 110 aa, Homo sapiens
VCNAPGCGQRFTNEDHLAVHKHKHEMTLKFGPARTDSVIIADQTPTPTRFLKNCEEVGLFNELASSFEHEFKKAADEDEKKARSRTVAKKLVVFRPRLFLLCFGIIFLIG

SEQ ID NO: 62388 - protein, 28 aa, Homo sapiens
RLFRKPQGKLRANGFSSPCDSAQLSNSP

SEQ ID NO: 62389 - protein, 694 aa, Homo sapiens
KARMEESPLSRAPSRGGVNFLNVARTYIPNTKVECHYTLPPGTMPSASDWIGIFKVEAACVRDYHTFVWSSVPESTTDGSPIHTSVQFQASYLPKPGAQLYQFRYVNRQGQVCGQSPPFQFREPRPMDELVTLEEADGGSDILLVVPKATVLQNQLDESQQERNDLMQLKLQLEGQVTELRSRVQELERALATARQEHTELMEQYKGISRSHGEITEERDILSRQQGDHVARILELEDDIQTISEKVLTKEVELDRLRDTVKALTREQEKLLGQLKEVQADKEQSEAELQVAQQENHHLNLDLKEAKSWQEEQSAQAQRLKDKVAQMKDTLGQAQQRVAELEPLKEQLRGAQELAASSQQKATLLGEELASAAAARDRTIAELHRSRLEVAEVNGRLAELGLHLKEEKCQWSKERAGLLQSVEAEKDKILKLSAEILRLEKAVQEERTQNQVFKTELAREKDSSLVQLSESKRELTELRSALRVLQKEKEQLQEEKQELLEYMRKLEARLEKVADEKWNEDATTEDEEAAVGLSCPAALTDSEDESPEDMRLPPYGLCERGDPGSSPAGPREASPLVVISQPAPISPHLSGPAEDSSSDSEAEDEKSVLMAAVQSGGEEANLLLPELGSAFYDMASGFTVGTLSETSTGGPATPTWKECPICKERFPAESDKDALEDHMDGHFFFSTQDPFTFE

SEQ ID NO: 62390 - protein, 34 aa, Homo sapiens
IKIIFPACCWIWGNFLFVFYDLYLTERNPLKTSA

SEQ ID NO: 62391 - protein, 547 aa, Homo sapiens
IGKKVHWWEAEPVEKTPGRDSEATIMSLRVHTLPTLLGAVVRPGCRELLCLLMITVTVGPGASGVCPTACICATDIVSCTNKNLSKVPGNLFRLIKRLDLSYNRIGLLDSEWIPVSFAKLNTLILRHNNITSISTGSFSTTPNLKCLDLSSNKLKTVKNAVFQELKVLEVLLLYNNHISYLDPSAFGGLSQLQKLYLSGNFLTQFPMDLYVGRFKLAELMFLDVSYNRIPSMPMHHINLVPGKQLRGIYLHGNPFVCDCSLYSLLVFWYRRHFSSVMDFKNDYTCRLWSDSRHSRQVLLLQDSFMNCSDSIINGSFRALGFIHEAQVGERLMVHCDSKTGNANTDFIWVGPDNRLLEPDKEMENFYVFHNGSLVIESPRFEDAGVYSCIAMNKQRLLNETVDVTINVSNFTVSRSHAHEAFNTAFTTLAACVASIVLVLLYLYLTPCPCKCKTKRQKNMLHQSNAHSSILSPGPASDASADERKAGAGKRVVFLEPLKDTAAGQNGKVRLFPSEAVIAEGILKSTRGKSDSDSVNSVFSDTPFVAST

SEQ ID NO: 62392 - protein, 149 aa, Homo sapiens
RDYVFIEFCVEDSKDVNVNFEKSKLTFSCLGGSDNFKHLNEIDLFHCIDPNDSKHKRTDRSILCCLRKGESGQSWPRLTKERAKLNWLSVDFNNWKDWEDDSDEDMSNFDRFSEMMNNMGGDEDVDLPEVDGADDDSQDSDDEKMPDLE

SEQ ID NO: 62393 - protein, 18 aa, Homo sapiens
VAPHCRFSSFLPPFRKLN

SEQ ID NO: 62394 - protein, 37 aa, Homo sapiens
LECVEPNCRSKRMLAINRCKHFELGGYKKRKDQVIQF

SEQ ID NO: 62395 - protein, 209 aa, Homo sapiens
IRMAFLRKVYSILSLQVLLTTVTSTVFLYFESVRTFVHESPALILLFALGSLGLIFALILNRHKYPLNLYLLFGFTLLEALTVAVVVTFYDVYIILQAFILTTTVFFGLTVYTLQSKKDFSKFGAGLFALLWILCLSGFLKFFFYSEIMELVLAAAGALLFCGFIIYDTHSLMHKLSPEEYVLAAISLYLDIINLFLHLLRFLEAVNKK

SEQ ID NO: 62396 - protein, 91 aa, Homo sapiens
KQIKHMMAFIEQEANEKAEGIDAKAEEEFNIEKGQFVQTQRLKIMEYYEKKEKQIEQQKKIQMSNLMNQARLKVLRVRDDLTTGLYQLLEP

SEQ ID NO: 62397 - protein, 555 aa, Homo sapiens
LSAMRLLPLAPGRLRRGSPRHLPSCSPALLLLVLGGCLGVFGVAAGTRRPNVVLLLTDDQDEVLGGMTPLKKTKALIGEMGMTFSSAYVPSALCCPSRASILTGKYPHNHHVVNNTLEGNCSSKSWQKIQEPNTFPAILRSMCGYQTFFAGKYLNEYGAPDAGGLEHVPLGWSYWYALEKNSKYYNYTLSINGKARKHGENYSVDYLTDVLANVSLDFLDYKSNFEPFFMMIATPAPHSPWTAAPQYQKAFQNVFAPRNKNFNIHGTNKHWLIRQAKTPMTNSSIQFLDNAFRKRWQTLLSVDDLVEKLVKRLEFTGELNNTYIFYTSDNGYHTGQFSLPIDKRQLYEFDIKVPLLVRGPGIKPNQTSKMLVANIDLGPTILDIAGYDLNKTQMDGMSLLPILRGASNLTWRSDVLVEYQGEGRNVTDPTCPSLSPGVSQCFPDCVCEDAYNNTYACVRTMSALWNLQYCEFDDQEVFVEVYNLTADPDQITNIAKTIDPELLGKMNYRLMMLQSCSGPTCRTPGVFDPGYRFDPRLMFSNRGSVRTRRFSKHLL

SEQ ID NO: 62398 - protein, 17 aa, Homo sapiens
IPWAMELVTGKEYSVGE

SEQ ID NO: 62399 - protein, 169 aa, Homo sapiens
IAELEKTSAEHKHQLAEQKRDIQLLKAYMRAIRSVNPNLQNLEETIEYNEILEWVNSLQPARVTRWGGMISTPDAVLQAVIKRSLVESGCPASIVNELIENAHERSWPQGLATLETRQMNRRYYENYVAKRIPGKQAVVVMACENQHMGDDMVQEPGLVMIFAHGVEEI

SEQ ID NO: 62400 - protein, 168 aa, Homo sapiens
RADHQPLTEASYVNLPTIALCNTDSPLRYVDIAIPCNNKGAYSVGLMWWMLAREVLCMLGTISCEHPWEVMPDLYFYRDPEEIEKEEQAAAEKAVTKEEFQGEWTAPAPEFTAIQPEVADWSEGVQVPSVPIQQFPTEDWSSQPAMEDWSAAPTAQATEWVGATTDWS

SEQ ID NO: 62401 - protein, 214 aa, Homo sapiens
RNKNVRQKTWRPNHPQAFVGSVREGQGFAFRRKLKIQQSYKKLLRKEKKAQTSLESQFTDRYPDNLKHLYLAEEERHRKQARKVDHPLSEQVHQPLLEEQCSIDEPLFEDQCSFDQPQPEEQCIKTVNSFTIPKKNKKKTSNQKAQEEYEQIQAKRAAKKQEFERRKQEREEAQRQYKKKKMEVFKILNKKTKKGQPNLNVQMEYLLQKIQEKC

SEQ ID NO: 62402 - protein, 1017 aa, Homo sapiens
LKRWIGSETDLEPPVVKRQKTKVKFDDGAVFLAACSSGDTDEVLKLLHRGADINYANVDGLTALHQACIDDNVDMVKFLVENGANINQPDNEGWIPLHAAASCGYLDIAEFLIGQGAHVGAVNSEGDTPLDIAEEEAMEELLQNEVNRQGVDIEAARKEEERIMLRDARQWLNSGHINDVRHAKSGGTALHVAAAKGYTEVLKLLIQAGYDVNIKDYDGWTPLHAAAHWGKEEACRILVDNLCDMEMVNKVGQTAFDVADEDILGYLEELQKKQNLLHSEKRDKKSPLIESTANMDNNQSQKTFKNKETLIIEPEKNASRIESLEQEKVDEEEEGKKDESSCSSEEDEEDDSESEAETDKTKPLASVTNANTSSTQAAPVAVTTPTVSSGQATPTSPIKKFPTTATKISPKEEERKDESPATWRLGLRKTGSYGALAEITASKEGQKEKDTAGVTRSASSPRLSSSLDNKEKEKDSKGTRLAYVAPTIPRRLASTSDIEEKENRDSSSLRTSSSYTRRKWEDDLKKNSSVNEGSTYHKSCSFGRRQDDLISSSVPSTTSTPTVTSAAGLQKSLLSSTSTTTKITTGSSSAGTQSSTSNRLWAEDSTEKEKDSVPTAVTIPVAPTVVNAAASTTTLTTTTAGTVSSTTEVRERRRSYLTPVRDEESESQRKARSRQARQSRRSTQGVTLTDLQEAEKTIGRSRSTRTREQENEEKEKEEKEKQDKEKQEEKKESETSREDEYKQKYSRTYDETYQRYRPVSTSSSTTPSSSLSTMSSSLYASSQLNRPNSLVGITSAYSRGITKENEREGEKREEEKEGEDKSQPKSIRERRRPREKRRSTGVSFWTQDSDENEQEQQSDTEEGSNKKETQTDSISRYETSSTSAGDRYDSLLGRSGSYSYLEERKPYSSRLEKDDSTDFKKLYEQILAENEKLKAQLHDTNMELTDLKLQLEKATQRQERFADRSLLEMEKRERRALERRISEMEEELKMLPDLKADNQRLKDENGALIRVISKLSK

SEQ ID NO: 62403 - protein, 42 aa, Homo sapiens
IPPFTQRVFSNYTNDTDSDTGISSNHSQDSETTVGDVVLLST

SEQ ID NO: 62404 - protein, 196 aa, Homo sapiens
LERNRLTDYYEPLLKNNSTAYSTRGNRIEISYENLQVTNITRKGSMLPVSCKLPNMGTSQSYLSSSMPAGCVLPVGGNFEILLHYYLLNYAKKCHQSEETMVSMIIANALLGIPKVLYKSKTGKYSFPHTYIRAVHALQTNQPLVSSQTGLESVMGKYQLLTSVLQCLTKILTIDMVITVKRHPQKVHNQDSEDEL

SEQ ID NO: 62405 - protein, 960 aa, Homo sapiens
RLAPQLPPTTAAERSWGLTRRLRGLGPRRRGDLGGTGSLRPASLGAPHGICRFTEWLHINGKRSINLSSFIMEGGLADGEPDRTSLLGDSKDVLGPSTVVANSDESQLLTPGKMSQRQGKEAYPTPTKDLHQPSLSPASPHSQGFERGKEDISQNKDESSLSMSKSKSESKLYNGSEKDSSTSSKLTKKESLKVQKKNYREEKKRATKELLSTITDPSVIVMADWLKIRGTLKSWTKLWCVLKPGVLLIYKTQKNGQWVGTVLLNACEIIERPSKKDGFCFKLFHPLEQSIWAVKGPKGEAVGSITQPLPSSYLIIRATSESDGRCWMDALELALKCSSLLKRTMIREGKEHDLSVSSDSTHVTFYGLLRANNLHSGDNFQLNDSEIERQHFKDQDMYSDKSDKENDQEHDESDNEVMGKSEESDTDTSERQDDSYIEPEPVEPLKETTYTEQSHEELGEAGEASQTETVSEENKSLIWTLLKQVRPGMDLSKVVLPTFILEPRSFLDKLSDYYYHADFLSEAALEENPYFRLKKVVKWYLSGFYKKPKGLKKPYNPILGETFRCLWIHPRTNSKTFYIAEQVSHHPPISAFYVSNRKDGFCLSGSILAKSKFYGNSLSAILEGEARLTFLNRGEDYVMTMPYAHCKGILYGTMTLELGGTVNITCQKTGYSAILEFKLKPFLGSSDCVNQISGKLKLGKEVLATLEGHWDSEVFITDKKTDNSEVFWNPTPDIKQWRLIRHTVKFEEQGDFESEKLWQRVTRAINAKDQTEATQEKYVLEEAQRQAARDRKTKNEEWSCKLFELDPLTGEWHYKFADTRPWDPLNDMIQFEKDGVIQTKVKHRTPMVSVPKMKHKPTRQQKKVAKGYSSPEPDIQDSSGSEAQSVKPSTRRKKGIELGDIQSSIESIKQTQEEIKRNIMALRNHLVSSTPATDYFLQQKDYFIIFLLILLQVIINFMFK

SEQ ID NO: 62406 - protein, 4 aa, Homo sapiens
MAAH

SEQ ID NO: 62407 - protein, 463 aa, Homo sapiens
IRKNLVYSCRGSKDCIINKHHRNRCQYCRLQRCIAFGMKQDSVQCERKPIEVSREKSSNCAASTEKIYIRKDLRSPLTATPTFVTDSESTRSTGLLDSGMFMNIHPSGVKTESAVLMTSDKAESCQGDLSTLANVVTSLANLGKTKDLSQNSNEMSMIESLSNDDTSLCEFQEMQTNGDVSRAFDTLAKALNPGESTACQSSVAGMEGSVHLITGDSSINYTEKEGPLLSDSHVAFRLTMPSPMPEYLNVHYIGESASRLLFLSMHWALSIPSFQALGQENSISLVKAYWNELFTLGLAQCWQVMNVATILATFVNCLHNSLQQDKMSTERRKLLMEHIFKLQEFCNSMVKLCIDGYEYAYLKAIVLFSPDHPSLENMEQIEKFQEKAYVEFQDYITKTYPDDTYRLSRLLLRLPALRLMNATITEELFFKGLIGNIRIDSVIPHILKMEPADYNSQIIGHSI

SEQ ID NO: 62408 - protein, 488 aa, Homo sapiens
KMASSAEGDEGTVVALAGVLQSGFQELSLNKLATSLGASEQALRLIISIFLGYPFALFYRHYLFYKETYLIHLFHTFTGLSIAYFNFGNQLYHSLLCIVLQFLILRLMGRTITAVLTTFCFQMAYLLAGYYYTATGNYDIKWTMPHCVLTLKLIGLAVDYFDGGKDQNSLSSEQQKYAIRGVPSLLEVAGFSYFYGAFLVGPQFSMNHYMKLVQGELIDIPGKIPNSIIPALKRLSLGLFYLVGYTLLSPHITEDYLLTEDYDNHPFWFRCMYMLIWGKFVLYKYVTCWLVTEGVCILTGLGFNGFEEKGKAKWDACANMKVWLFETNPRFTGTIASFNINTNAWVARYIFKRLKFLGNKELSQGLSLLFLALWHGLHSGYLVCFQMEFLIVIVERQAARLIQESPTLSKLAAITVLQPFYYLVQQTIHWLFMGYSMTAFCLFTWDKWLKVYKSIYFLGHIFFLSLLFILPYIHKAMVPRKEKLKKME

SEQ ID NO: 62409 - protein, 26 aa, Homo sapiens
IETILLESPFRIGFVCPCRLTLFTPG

SEQ ID NO: 62410 - protein, 121 aa, Homo sapiens
ILYKVRWKGYTSDDDTWEPETHLEDCKEVLLEFRKKIAENKAKAVRKDIQRLSLNNDIFEANSDSGQQSKTKEDTSPKKKKKKLRQREEKSPDDLKKKKAKAGKLKDKSKPDLESSLESLV

SEQ ID NO: 62411 - protein, 102 aa, Homo sapiens
VLKIKILSAHDKGTHVEVNVKIKKVLKSTKLKIFRGKRTLYPESWTDRGCTCPILNPGLEYLVAGHEDIRTGKLIVNMKSFVQHWKPSLGRKVMDILKRECK

SEQ ID NO: 62412 - protein, 19 aa, Homo sapiens
MGRIFLDHIGGTCLCSCAN

SEQ ID NO: 62413 - protein, 427 aa, Homo sapiens
VTPKLPKESSGIMALQILVPFLLAGFGTVSAGMVLDIVQHWEVFRKVTEVFILVPALLGLKGNLEMTLASRLSTAVNIGKMDSPIEKWNLIIGNLALKQVQATVVGFLAAVAAIILGWIPEGKYYLDHSILLCSSSVATAFIASLLQGIIMVGVIVGSKKTGINPDNVATPIAASFGDLITLAILAWISQGLYSCLETYYYISPLVGVFFLALTPIWIIIAAKHPATRTVLHSGWEPVITAMVISSIGGLILDTTVSDPNLVGIVVYTPVINGIGGNLVAIQASRISTYLHLHSIPGELPDEPKGCYYPFRTFFGPGVNNKSAQVLLLLVIPGHLIFLYTIHLMKSGHTSLTIIFIVVYLFGAVLQVFTLLWIADWMVHHFWRKGKDPDSFSIPYLTALGDLLGTALLALSFHFLWLIGDRDGDVGD

SEQ ID NO: 62414 - protein, 680 aa, Homo sapiens
LPSVLPTQPSAEPRRTMPAVDKLLLEEALQDSPQTRSLLSVFEEDAGTLTDYTNQLLQAMQRVYGAQNEMCLATQQLSKQLLAYEKQNFALGKGDEEVISTLHYFSKVVDELNLLHTELAKQLADTMVLPIIQFREKDLTEVSTLKDLFGLASNEHDLSMAKYSRLPKKKENEKVKTEVGKEVAAARRKQHLSSLQYYCALNALQYRKQMAMMEPMIGFAHGQINFFKKGAEMFSKRMDSFLSSVADMVQSIQVELEAEAEKMRVSQQELLSVDESVYTPDSDVAAPQINRNLIQKAGYLNLRNKTGLVTTTWERLYFFTQGGNLMCQPRGAVAGGLIQDLDNCSVMAVDCEDRRYCFQITTPNGKSGIILQAESRKENEEWICAINNISRQIYLTDNPEAVAIKLNQTALQAVTPITSFGKKQESSCPSQNLKNSEMENENDKIVPKATASLPEAEELIAPGTPIQFDIVLPATEFLDQNRGSRRTNPFGETEDESFPEAEDSLLQQMFIVRFLGSMAVKTDSTTEVIYEAMRQVLAARAIHNIFRMTESHLMVTSQSLRLIDPQTQVSRANFELTSVTQFAAHQENKRLVGFVIRVPESTGEESLSTYIFESNSEGEKICYAINLGKEIIEVQKDPEALAQLMLSIPLTNDGKYVLLNDQPDDDDGNPNEHRGAESEA

SEQ ID NO: 62415 - protein, 206 aa, Homo sapiens
RPQPSSKTPRIPKIYTKTGDKGFSSTFTGERRPKDDQVFEAVGTTDELSSAIGFALELVTEKGHTFAEELQKIQCTLQDVGSALATPCSSAREAHLKYTTFKAGPILELEQWIDKYTSQLPPLTAFILPSGGKISSALHFCRAVCRRAERRVVPLVQMGETDANVAKFLNRLSDYLFTLARYAAMKEGNQEKIYMKNDPSAESEGL

SEQ ID NO: 62416 - protein, 349 aa, Homo sapiens
IVVLEDLSPLEARVTRIFLVVVYSIVCFLGILGNGLVIIIATFKMKKTVNMVWFLNLAVADFLFNVFLPIHITYAAMDYHWVFGTAMCKISNFLLIHNMFTSVFLLTIISSDRCISVLLPVWSQNHRSVRLAYMACMVIWVLAFFLSSPSLVFRDTANLHGKISCFNNFSLSTPGSSSWPTHSQMDPVGYSRHMVVTVTRFLCGFLVPVLIITACYLTIVCKLQRNRLAKTKKPFKIIVTIIITFFLCWCPYHTLNLLELHHTAMPGSVFSLGLPLATALAIANSCMNPILYVFMGQDFKKFKVALFSRLVNALSEDTGHSSYPSHRSFTKMSSMNERTSMNERETGML

SEQ ID NO: 62417 - protein, 74 aa, Homo sapiens
RKAPGGPMLLPQTYGARGKGRTQLSLLPRALQRPSAAAPQAENGPAAAPAVAAPAATEAPKMSNADFAKLFLRK

SEQ ID NO: 62418 - protein, 673 aa, Homo sapiens
LPSVARLAPRLDMEGAAAPVAGDRPDLGLGAPGSPREAVAGATAALEPRKPHGVKRHHHKHNLKHRYELQETLGKGTYGKVKRATERFSGRVVAIKSIRKDKIKDEQDMVHIRREIEIMSSLNHPHIISIYEVFENKDKIVIIMEYASKGELYDYISERRRLSERETRHFFRQIVSAVHYCHKNGVVHRDLKLENILLDDNCNIKIADFGLSNLYQKDKFLQTFCGSPLYASPEIVNGRPYRGPEVDSWALGVLLYTLVYGTMPFDGFDHKNLIRQISSGEYREPTQPSDARGLIRWMLMVNPDRRATIEDIANHWWVNWGYKSSVCDCDALHDSESPLLARIIDWHHRSTGLQADTEAKMKGLAKPTTSEVMLERQRSLKKSKKENDFAQSGQDAVPESPSKLSSKRPKGILKKRSNSEHRSHSTGFIEGVVGPALPSTFKMEQDLCRTGVLLPSSPEAEVPGKLSPKQSATMPKKGILKKTQQRESGYYSSPERSESSELLDSNDVMGSSIPSPSPPDPARVTSHSLSCRRKGILKHSSKYSAGTMDPALVSPEMPTLESLSEPGVPAEGLSRSYSRPSSVISDDSVLSSDSFDLLDLQENRPARQRIRSCVSAENFLQIQDFEGLQNRPRPQYLKRYRNRLADSSFSLLTDMDDVTQVYKQALEICSKLN

SEQ ID NO: 62419 - protein, 16 aa, Homo sapiens
LTRSHFEKKLERIPSG

SEQ ID NO: 62420 - protein, 1172 aa, Homo sapiens
VYGPLTMSLKPQQQQQQQQQQQQQQQQQQQQQQQPPPAAANVRKPGGSGLLASPAAAPSPSSSSVSSSSATAPSSVVAATSGGGRPGLGRGRNSNKGLPQSTISFDGIYANMRMVHILTSVVGSKCEVQVKNGGIYEGVFKTYSPKCDLVLDAAHEKSTESSSGPKREEIMESILFKCSDFVVVQFKDMDSSYAKRDAFTDSAISAKVNGEHKEKDLEPWDAGELTANEELEALENDVSNGWDPNDMFRYNEENYGVVSTYDSSLSSYTVPLERDNSEEFLKREARANQLAEEIESSAQYKARVALENDDRSEEEKYTAVQRNSSEREGHSINTRENKYIPPGQRNREVISWGSGRQNSPRMGQPGSGSMPSRSTSHTSDFNPNSGSDQRVVNGGVPWPSPCPSPSSRPPSRYQSGPNSLPPRAATPTRPPSRPPSRPSRPPSHPSAHGSPAPVSTMPKRMSSEGPPRMSPKAQRHPRNHRVSAGRGSISSGLEFVSHNPPSEAATPPVARTSPSGGTWSSVVSGVPRLSPKTHRPRSPRQNSIGNTPSGPVLASPQAGIIPTEAVAMPIPAASPTPASPASNRAVTPSSEAKDSRLQDQRQNSPAGNKENIKPNETSPSFSKAENKGISPVVSEHRKQIDDLKKFKNDFRLQPSSTSESMDQLLNKNREGEKSRDLIKDKIEPSAKDSFIENSSSNCTSGSSKPNSPSISPSILSNTEHKRGPEVTSQGVQTSSPACKQEKDDKEEKKDAAEQVRKSTLNPNAKEFNPRSFSQPKPSTTPTSPRPQAQPSPSMVGHQQPTPVYTQPVCFAPNMMYPVPVSPGVQPLYPIPMTPMPVNQAKTYRAGKVKYLELELLRYVPNMPQQRQDQHHQSAMMHPASAAGPPIAATPPAYSTQYVAYSPQQFPNQPLVQHVPHYQSQHPHVYSPVIQGNARMMAPPTHAQPGLVSSSATQYGAHEQTHAMYACPKLPYNKETSPSFYFAISTGSLAQQYAHPNATLHPHTPHPQPSATPTGQQQSQHGGSHPAPSPVQHHQHQAAQALHLASPQQQSAIYHAGLAPTPPSMTPASNTQSPQNSFPAAQQTVFTIHPSHVQPAYTNPPHMAHVPQAHVQSGMVPSHPTAHAPMMLMTTQPPGGPQAALAQSALQPIPVSTTAHFPYMTHPSVQAHHQQQL

SEQ ID NO: 62421 - protein, 414 aa, Homo sapiens
TEHKRGPEVTSQGVQTSSPACKQEKDDKEEKKDAAEQVRKSTLNPNAKEFNPRSFSQPKPSTTPTSPRPQAQPSPSMVGHQQPTPVYTQPVCFAPNMMYPVPVSPGVQPLYPIPMTPMPVNQAKTYRAGKVPNMPQQRQDQHHQSAMMHPASAAGPPIAATPPAYSTQYVAYSPQQFPNQPLVQHVPHYQSQHPHVYSPVIQGNARMMAPPTHAQPGLVSSSATQYGAHEQTHAMYACPKLPYNKETSPSFYFAISTGSLAQQYAHPNATLHPHTPHPQPSATPTGQQQSQHGGSHPAPSPVQHHQHQAAQALHLASPQQQSAIYHAGLAPTPPSMTPASNTQSPQNSFPAAQQTVFTIHPSHVQPAYTNPPHMAHVPQYKPTTNSSCKAALEEPKGQIPSSLLLLLPTGSTEN

SEQ ID NO: 62422 - protein, 5 aa, Homo sapiens
MCQIY

SEQ ID NO: 62423 - protein, 542 aa, Homo sapiens
RWPSLMKHYSPTDYVNWLEEYKVRQKAGLEARKIVASFSKRFFSEHVPCNGFSDIENLEGPEIFFEDELVCILNMEGRKALTWKYYAKKILYYLRQQKILNNLKAFLQQPDDYESYLEGAVYIDQYCNPLSDISLKDIQAQIDSIVELVCKTLRGINSRHPSLAFKAGESSMIMEIELQSQVLDAMNYVLYDQLKFKGNRMDYYNALNLYMHQVLIRRTGIPISMSLLYLTIARQLGVPLEPVNFPSHFLLRWCQGAEGATLDIFDYIYIDAFGKGKQLTVKECEYLIGQHVTAALYGVVNVKKVLQRMVGNLLSLGKREGIDQSYQLLRDSLDLYLAMYPDQVQLLLLQARLYFHLGIWPEKVLDILQHIQTLDPGQHGAVGYLVQHTLEHIERKKEEVGVEVKLRSDEKHRDVCYSIGLIMKHKRYGYNCVIYGWDPTCMMGHEWIRNMNVHSLPHGHHQPFYNVLVEDGSCRYAAQENLEYNVEPQEISHPDVGRYFSEFTGTHYIPNAELEIRYPEDLEFVYETVQNIYSAKKENIDE

SEQ ID NO: 62424 - protein, 287 aa, Homo sapiens
VPDVSCLVLATGLNDGQIKIWEVQTGLLLLNLSGHQDVVRDLSFTPSGSLILVSASRDKTLRIWDLNKHGKQIQVLSGHLQWVYCCSISPDCSMLCSAAGEKSVFLWSMRSYTLIRKLEGHQSSVVSCDFSPDSALLVTASYDTNVIMWDPYTGERLRSLHHTQVDPAMDDSDVHISSLRSVCFSPEGLYLATVADDRLLRIWALELKTPIAFAPMTNGLCCTFFPHGGVIATGTRDGHVQFWTAPRVLSSLKHLCRKALRSFLTTYQVLALPIPKKMKEFLTYRTF

SEQ ID NO: 62425 - protein, 216 aa, Homo sapiens
LENQLEYNKRRERELHRKHVMELRQQPKNLKAMEMQIKKQFQDTCKVQTKQYKALKNHQLEVTPKNEHKTILKTLKDEQTRKLAILAEQYEQSINEMMASQALRLDEAQEAECQALRLQLQQEMELLNAYQSKIKMQTEAQHERELQKLEQRVSLRRAHLEQKIEEELAALQKERSERIKNLLERQEREIETFDMESLRMGFGNLVTLDFPKEDYR

SEQ ID NO: 62426 - protein, 270 aa, Homo sapiens
KKVDAGGKVKKGNLKAKKPKKGKPHCSRNPVLVRGIGRYSRSAMYSRKAMYKRKYSAAKSKVEKKKKEKVLATVTKPVGGDKNGGTRVVKLRKMPRYYPTEDVPRKLLSHGKKPFSQHVRKLRASITPGTILIILTGRHRGKRVVFLKQLASGLLLVTGPLVLNRVPLRRTHQKFVIATSTKIDISNVKIPKHLTDAYFKKKKLRKPRHQEGEIFDTEKEKYEITEQRKIDQKAVDSQILPKIKAIPQLQGYLRSVFALTNGIYPHKLVF

SEQ ID NO: 62427 - protein, 189 aa, Homo sapiens
LFYKYGRIREIELKNRHGLVPFAFVRFEDPRDAEDAIYGRNGYDYGQCRLRVEFPRTYGGRGGWPRGGRNGPPTRRSDFRVLVSGLPPSGSWQDLKDHMREAGDVCYADVQKDGVGMVEYLRKEDMEYALRKLDDTKFRSHEGETSYIRVYPERSTSYGYSRSRSGSRGRDSPYQSRGSPHYFSPFRPY

SEQ ID NO: 62428 - protein, 58 aa, Homo sapiens
ILSACVVSSSLHHILGEQRTPLPMLFQHITCGRYNKNMSEVPNSVQQETAVDLVAELH

SEQ ID NO: 62429 - protein, 326 aa, Homo sapiens
KGSYGVVKLAYNENDNTYYAMKVLSKKKLIRQAGFPRRPPPRGTRPAPGGCIQPRGPIEQVYQEIAILKKLDHPNVVKLVEVLDDPNEDHLYMVFELVNQGPVMEVPTLKPLSEDQARFYFQDLIKGIEYLHYQKIIHRDIKPSNLLVGEDGHIKIADFGVSNEFKGSDALLSNTVGTPAFMAPESLSETRKIFSGKALDVWAMGVTLYCFVFGQCPFMDERIMCLHSKIKSQALEFPDQPDIAEDLKDLITRMLDKNPESRIVVPEIKILVKTMIRKRSFGNPFEGSRREERSLSAPGNLLTKQGSEDNLQGTDPPPVGEEEVLL

SEQ ID NO: 62430 - protein, 23 aa, Homo sapiens
LGQPLLNENPQLSEGWEIPKYPT

SEQ ID NO: 62431 - skipped

SEQ ID NO: 62432 - protein, 1357 aa, Homo sapiens
MPTPSVQQSVPLSALELGLETEAAVPVKQEPETVPTPALLNVRQQPPSTTTFVLNQINHLPPLGSTIVMTKTPPVTTNRQTITLTKFIQTTASTRPSVSAPTVRNAMTSAPSKDQVQLKDLLKNNSLNELMKLKPPANIAQPVATAATDVSNGTVKKESSNKEGARMWINDMKMRSFSPTMKVPVVKEDDEPEEEDEEEMGHAETYAEYMPIKLKIGLRHPDAVVETSSLSSVTPPDVWYKTSISEETIDNGWLSALQLEAITYAAQQHETFLPNGDRAGFLIGDGAGVGKGRTIAGIIYENYLLSRKRALWFSVSNDLKYDAERDLRDIGAKNILVHSLNKFKYGKISSKHNGSVKKGVIFATYSSLIGESQSGGKYKTRLKQLLHWCGDDFDGVIVFDECHKAKNLCPVGSSKPTKTGLAVLELQNKLPKARVVYASATGASEPRNMAYMNRLGIWGEGTPFREFSDFIQAVERRGVGAMEIVAMDMKLRGMYIARQLSFTGVTFKIEEVLLSQSYVKMYNKAVKLWVIARERFQQAADLIDAEQRMKKSMWGQFWSAHQRFFKYLCIASKVKRVVQLAREEIKNGKCVVIGLQSTGEARTLEALEEGGGELNDFVSTAKGVLQSLIEKHFPAPDRKKLYSLLGIDLTAPSNNSSPRDSPCKENKIKKRKGEEITREAKKARKVGGLTGSSSDDSGSESDASDNEESDYESSKNMSSGDDDDFNPFLDESNEDDENDPWLIRKDHKKNKEKKKKKSIDPDSIQSALLASGLGSKRPSFSSTPVISPAPNSTPANSNTNSNSSLITSQDAVERAQQMKKDLLDKLEKLAEDLPPNTLDELIDELGGPENVAEMTGRKGRVVSNDDGSISYESRSELDVPVEILNITEKQRFMDGDKNIAIISEAASSGISLQADRRAKNQRRRVHMTLELPWSADRAIQQFGRTHRSNQVTAPEYVFLISELAGEQRFASIVAKRLESLGALTHGDRRATESRDLSRFNFDNKYGRNALEIVMKSIVNLDSPMVSPPPDYPGEFFKDVRQGLIGVGLINVEDRSGILTLDKDYNNIGKFLNRILGMEVHQQNALFQYFADTLTAVVQNAKKNGRYDMGILDLGSGDEKVRKSDVKKFLTPGYSTSGHVELYTISVERGMSWEEATKIWAELTGPDDGFYLSLQIRNNKKTAILVKEVNPKKKLFLVYRPNTGKQLKLEIYADLKKKYKKVVSDDALMHWLDQYNSSADTCTHAYWRGNCKKASLGLVCEIGLRCRTYYVLCGSVLSVWTKVEGVLASVSGTNVKMQIVRLRTEDGQRIVGLIIPANCVSPLVNLLSTSDQSQQLAVQQKQLWQQHHPQSITNLSNA

SEQ ID NO: 62433 - protein, 80 aa, Homo sapiens
KSAVLCYSPSDRQSWPSPAVKGRFKSQLPDLSGPHSYSPGRNSVAGSNPAKPGLGSPGRYSPVHGSQLRRMARLAELAAL

SEQ ID NO: 62434 - protein, 544 aa, Homo sapiens
ILDPLDQWQPSSSRFIHQQPQSSSPVYGSSAKTSSVSNPQDSVGSPCSRVGEEEHVYSFPNKQKSAEPSPTVMSTSLGSNLSELDRLLLELNAVQHNPPGFPADEANSSPPLPGALSPLYGVPETNSPLGGKAGPLTKEKPKRNGGRGLEDVRPSVESLLDELESSVPSPVPAITVNQGEMSSPQRVTSTQQQTRISASSATRELDELMASLSDFKGSWPLEEVVLLVSISSSVQEGEKYPHPCAARHRTPSLRSPDQPPPCPQFMAQGKTGSSSPPGGPPKPGSQLDSMLGSLQSDLNKLGVATVAKGVCGACKKPIAGQVVTAMGKTWHPEHFVCTHCQEEIGSRNFFERDGQPYCEKDYHNLFSPRCYYCNGPILDKVVTALDRTWHPEHFFCAQCGAFFGPEGFHEKDGKAYCRKDYFDMFAPKCGGCARAILENYISALNTLWHPECFVCRECFTPFVNGSFFEHDGQPYCEVHYHERRGSLCSGCQKPITGRCITAMAKKFHPEHFVCAFCLKQLNKGTFKEQNDKPYCQNCFLKLFC

SEQ ID NO: 62435 - protein, 44 aa, Homo sapiens
TDVGLLEYQHHSRDYASHLSPGSIIQPQRRRPSLLSEFQPGNER

SEQ ID NO: 62436 - protein, 1539 aa, Homo sapiens
LSPRPSLLTPTGDPRANASPQKPLDLKQLKQRAAAIPPIQVTKVHEPPREDAAPTKPAPPAPPPPQNLQPESDAPQQPGSSPRGKSRSPAPPADKEAEKPVFFPAFAAEAQKLPGDPPCWTSGLPFPVPPREVIKASPHAPDPSAFSYAPPGHPLPLGLHDTARPVLPRPPTISNPPPLISSAKHPSVLERQIGAISQGMSVQLHVPYSEHAKAPVGPVTMGLPLPMDPKKLAPFSGVKQEQLSPRGQAGPPESLGVPTAQEASVLRGTALGSVPGGSITKGIPSTRVPSDSAITYRGSITHGTPADVLYKGTITRIIGEDSPSRLDRGREDSLPKGHVIYEGKKGHVLSYEGGMSVTQCSKEDGRSSSGPPHETAAPKRTYDMMEGRVGRAISSASIEGLMGRAIPPERHSPHHLKEQHHIRGSITQGIPRSYVEAQEDYLRREAKLLKREGTPPPPPPSRDLTEAYKTQALGPLKLKPAHEGLVATVKEAGRSIHEIPREELRHTPELPLAPRPLKEGSITQGTPLKYDTGASTTGSKKHDVRSLIGSPGRTFPPVHPLDVMADARALERACYEESLKSRPGTASSSGGSIARGAPVIVPELGKPRQSPLTYEDHGAPFAGHLPRGSPVTTREPTPRLQEGSLSSSKASQDRKLTSTPREIAKSPHSTVPEHHPHPISPYEHLLRGVSGVDLYRSHIPLAFDPTSIPRGIPLDAAAAYYLPRHLAPNPTYPHLYPPYLIRGYPDTAALENRQTIINDYITSQQMHHNAATAMAQRADMLRGLSPRESSLALNYAAGPRGIIDLSQVPHLPVLVPPTPGTPATAMDRLAYLPTAPQPFSSRHSSSPLSPGGPTHLTKPTTTSSSERERDRDRERDRDREREKSILTSTTTVEHAPIWRPGTEQSSGSSGGGGGSSSRPASHSHAHQHSPISPRTQDALQQRPSVLHNTGMKGIITAVEPSTPTVLRSTSTSSPVRPAATFPPATHCPLGGTLDGVYPTLMEPVLLPKEAPRVARPERPRADTGHAFLAKPPARSGLEPASSPSKGSEPRPLVPPVSGHATIARTPAKNLAPHHASPDPPAPPASASDPHREKTQSKPFSIQELELRSLGYHGSSYSPEGVEPVSPVSSPSLTHDKGLPKHLEELDKSHLEGELRPKQPGPVKLGGEAAHLPHLRPLPESQPSSSPLLQTAPGVKGHQRVVTLAQHISEVITQDYTRHHPQQLSAPLPAPLYSFPGASCPVLDLRRPPSDLYLPPPDHGAPARGSPHSEGGKRSPEPNKTSVLGGGEDGIEPVSPPEGMTEPGHSRSAVYPLLYRDGEQTEPSRMGSKSPGNTSQPPAFFSKLTESNSAMVKSKKQEINKKLNTHNRNEPEYNISQPGTEIFNMPAITGTGLMTYRSQAVQEHASTNMGLEAIIRKALMGGGGKAKVSGRPSSRKAKSPAPGLASGDRPPSVSSVHSEGDCNRRTPLTNRVWEDRPSSAGSTPFPYNPLIMRLQAGVMASPPPPGLPAGSGPLAGPHHAWDEEPKPLLCSQYETLSDSE

SEQ ID NO: 62437 - protein, 1223 aa, Homo sapiens
ILVMGDMANNSVAYSGVKNSLKEANHDGDFGITLAELRALMELRSTDALRKIQESYGDVYGICTKLKTSPNEGLSGNPADLERREAVFGKNFIPPKKPKTFLQLVWEALQDVTLIILEIAAIVSLGLSFYQPPEGDNALCGEVSVGEEEGEGETGWIEGAAILLSVVCVVLVTAFNDWSKEKQFRGLQSRIEQEQKFTVIRGGQVIQIPVADITVGDIAQVKYGDLLPADGILIQGNDLKIDESSLTGESDHVKKSLDKDPLLLSGTHVMEGSGRMVVTAVGVNSQTGIIFTLLGAGGEEEEKKDEKKKEKKNKKQDGAIENRNKAKAQDGAAMEMQPLKSEEGGDGDEKDKKKANLPKKEKSVLQGKLTKLAVQIGKAGLLMSAITVIILVLYFVIDTFWVQKRPWLAECTPIYIQYFVKFFIIGVTVLVVAVPEGLPLAVTISLAYSVKKMMKDNNLVRHLDACETMGNATAICSDKTGTLTMNRMTVVQAYINEKHYKKVPEPEAIPPNILSYLVTGISVNCAYTSKILPPEKEGGLPRHVGNKTECALLGLLLDLKRDYQDVRNEIPEEALYKVYTFNSVRKSMSTVLKNSDGSYRIFSKGASEIILKKCFKILSANGEAKVFRPRDRDDIVKTVIEPMASEGLRTICLAFRDFPAGEPEPEWDNENDIVTGLTCIAVVGIEDPVRPEVPDAIKKCQRAGITVRMVTGDNINTARAIATKCGILHPGEDFLCLEGKDFNRRIRNEKGEIEQERIDKIWPKLRVLARSSPTDKHTLVKGIIDSTVSDQRQVVAVTGDGTNDGPALKKADVGFAMGIAGTDVAKEASDIILTDDNFTSIVKAVMWGRNVYDSISKFLQFQLTVNVVAVIVAFTGACITQDSPLKAVQMLWVNLIMDTLASLALATEPPTESLLLRKPYGRNKPLISRTMMKNILGHAFYQLVVVFTLLFAGEKFFDIDSGRNAPLHAPPSEHYTIVFNTFVLMQLFNEINARKIHGERNVFEGIFNNAIFCTIVLGTFVVQIIIVQFGGKPFSCSELSIEQWLWSIFLGMGTLLWGQLISTIPTSRLKFLKEAGHGTQKEEIPEEELAEDVEEIDHAERELRRGQILWFRGLNRIQTQIRVVNAFRSSLYEGLEKPESRSSIHNFMTHPEFRIEDSEPHIPLIDDTDAEDDAPTKRNSSPPPSPNKNNNAVDSGIHLTIEMNKSATSSSPGSPLHSLETSL

SEQ ID NO: 62438 - protein, 800 aa, Homo sapiens
VEKILDMKTEGGKVLYKVRWKGYTSDDDTWEPEIHLEDCKEVLLEFRKKIAENKAKAVRKDIQRLSLNNDIFEANSDSDQQSETKEDTSPKKKKKKLRQREEKSPDDLKKKKAKAGKLKDKSKPDLESSLESLVFDLRTKKRISEAKEELKESKKPKKDEVKETKELKKVKKGEIRDLKTKTREDPKENRKTKKEKFVESQVESESSVLNDSPFPEDDSEGLHSDSREEKQNTKSARERAGQDMGLEHGFEKPLDSAMSAEEDTDVRGRRKKKTPRKAEDTRENRKLENKNAFLEKKTVPKKQRNQDRSKSAAELEKLMPVSAQTPKGRRLSGEERGLWSTDSAEEDKETKRNESKEKYQKRHDSDKEEKGRKEPKGLKTLKEIRNAFDLFKLTPEEKNDVSENNRKREEIPLDFKTIDDHKTKENKQSLKERRNTRDETDTWAYIAAEGDQEVLDSVCQADENSDGRQQILSLGMDLQLEWMKLEDFQKHLDGKDENFAATDAIPSNVLRDAVKNGDYITVKVALNSNEEYNLDQEDSSGMTLVMLAAAGGQDDLLRLLITKGAKVNGRQKNGTTALIHAAEKNFLTTVAILLEAGAFVNVQQSNGETALMKACKRGNSDIVRLVIECGADCNILSKHQNSALHFAKQSNNVLVYDLLKNHLETLSRVAEETIKDYFEARLALLEPVFPIACHRLCEGPDFSTDFNYKPPQNIPEGSGILLFIFHANFLGKEVIARLCGPCSVQAVVLNDKFQLPVFLDSHFVYSFSPVAGPNKLFIRLTEAPSAKVKLLIGAYRVQLQ

SEQ ID NO: 62439 - protein, 140 aa, Homo sapiens [sequence omitted]

SEQ ID NO: 62440 - protein, 148 aa, Homo sapiens
ICSFPDCSANYSKAWKLDAHLCKHTGERPFVCDYEGCGKAFIRDYHLSRHILTHTGEKPFVCAANGCDQKFNTKSNLKKHFERKHENQQKQYICSFEDCKKTFKKHQQLKIHQCQHTNEPLFKLCMSKRMFLCGKNMDGTSETCERNP

SEQ ID NO: 62441 - protein, 88 aa, Homo sapiens
VCEHAGCGKTFAMKQSLTRHAVVHDPDKKKMKLKVKKSREKRSLASHLSGYIPPKRKQGQGLSLCQNGESPNCVEDKMLSTVAVLTLG

SEQ ID NO: 62442 - protein, 119 aa, Homo sapiens
KTSMAEGERKTALEMVQAAGTDRHCVTFVLHEEDHTLGNSLRYMIMKNPEVEFCGYTTTHPSESKINLRIQTRGTLPAVEPFQRGLNELMNVCQHVLDKFEASIKDYKDQKASRNESTF

SEQ ID NO: 62443 - protein, 111 aa, Homo sapiens
IEELLKEAKRGKTRAETMGPMGWMKCPLASTNKRFLINTIKNTLPSHKEQDHEQKEGDKEPAKSQAQKEENPKKHRSHPYKHSFRARGSASYSPPRKRSSQDKYEKRSNRR

SEQ ID NO: 62444 - protein, 53 aa, Homo sapiens
MLLEIDNSELLYMLESPESLRSKVDEAVAVLQAHQAKEATQKAVNSATGVPTV

SEQ ID NO: 62445 - protein, 258 aa, Homo sapiens
KSDKTGTRPEDSKALKDENLPPVICQDVENLQKFVKEQKQVQEEISRMSSKAMLKVQEDIKALKQLLSLAANGIQRNTLNIDKLKIETAQELKNAEIALRTQKTPPGLQHEYAAPADYFRILVQQFEVQLQQYRQQIEELENHLATQANNSHITPQDLSMAMQKIYQTFVALAAQLQSIHENVKVLKEQYLGYRKMFLGDAVDVFETRRAEAKKWQNTPRVTTGPTPFSTMPNAAAVAMAATLTQQQQPATGLNAFKL

SEQ ID NO: 62446 - protein, 494 aa, Homo sapiens
RNIEPRHLCRGALPEGITSELECVTNSTLAAIIRQLSSLSKHAEDIFGELFNEANNFYIRANSLQDRIDRLAVKVTQLDSTVEEVSLQDINMKKAFKSSTVQDQQVVSKNSIPNPVADIYNQSDKPPPLNILTPYRDDKKDGLKFYTDPSYFFDLWKEKMLQDTEDKRKEKRRQKREKHKLNPNRNQQVNVRKVRTRKEEWERRKMGIEFMSDAKKLEQAGSAKEDRVPSGSHASDVTDYSYPATPNHSLHPQPVTPSYAAGDVPPHGPASQAAEHEYRPPSASARHMALNRPQQPPPPPPPQAPEGSQASAPMAPADYGMLPAQIIEYYNPSGPPPPPPPPVIPSAQTAFVSPLQMPMQPPFPASASSTHAAPPHPPSTGLLVTAPPPPGPPPPPPGPPGPGSSLSSSPMHGPPVAEAKRQEPAQPPISDARSDLLAAIRMGIQLKKVQEQREQEAKREPVGNDVATILSRRIAVEYSDSDDDSEFDENDWSD

SEQ ID NO: 62447 - protein, 53 aa, Homo sapiens
LARGIDVQQVSLVINYDLPTNRENYIHRIGRRGQFGRKGVAINMVTEEDKRTL

SEQ ID NO: 62448 - protein, 155 aa, Homo sapiens
KMAASRRLMKELEEIRKCGMENFRNIQVDEANLLTWQGLIVPDNPPYNKGAFRIEINFPAEYPFKPPRITFKTKIYHPNIDEKGQVCLPVISAENWKPATKTDQVIQSLIALVNDPQPEHPLRADLAEEYSNDRKKFCKNAEEFTKKYGEKRPVD

SEQ ID NO: 62449 - protein, 21 aa, Homo sapiens
VAKFMALYKKFMEDGLEGMMF

SEQ ID NO: 62450 - protein, 277 aa, Homo sapiens
KMAAGFKTVEPLEYYRRFLKENCRPDGRELGEFRTTTVNIGSISTADGSALVKLGNTTVICGVKAEFAAPSTDAPDKGYVVPNVDLPPLCSSRFRSGPPGEEAQVASQFIADVIENSQIIQKEDLCISPGKLVWVLYCDLICLDYDGNILDACTFALLAALKNVQLPEVTINEETALAEVNLKKKSYLNIRTHPVATSFAVFDDTLLIVDPTGEEEHLATGTLTIVMDEEGKLCCLHKPGGSGLTGAKLQDCMSRAVTRHKEVKKLMDEVIKSMKPK

SEQ ID NO: 62451 - protein, 27 aa, Homo sapiens
LSGPPPDTCGPSLSWLPVWSWRDSGSA

SEQ ID NO: 62452 - protein, 282 aa, Homo sapiens
LVMARFWVCVAGAGFFLAFLVLHSRFCGSPVLRNFTFAVSWRTEKILYRLDVGWPKHPEYFTGTTFCVAVDSLNGLVYIGQRGDNIPKILVFTEDGYFLRAWNYTVDTPHGIFAASTLYEQSVWITDVGSDFMILWLHGENGTGPAKFNIPHSVTLDSAGRVWVADRGNKRIQVFDKDTGEWLGAWNNCFTEEGPSSVRFTPDGKYLIVAQLNLSRLSVVAAPPVGSIGECSVISTIQLADQVLPHLLEVDRKTGAVYVAEIGAKQVQKYVPLNSYVPSFGS

SEQ ID NO: 62453 - protein, 274 aa, Homo sapiens
LVYIGQRGDNIPKILVFTEDGYFLRAWNYTVDTPHGIFAASTLYEQSVWITDVGSGFFGHTVKKYSSFGDLVQVLGTPGKKGTSLNPLQFDNPAELYVEDTGDIYIVDGDGGLNNRLIKLSQDFMILWLHGENGTGPAKFNIPHSVTLDSAGRVWVADRGNKRIQVFDKDTGEWLGAWNNCFTEEGPSSVRFTPDGKYLIVAQLNLSRLSVVAAPPVGSIGECSVISTIQLADQVLPHLLEVDRKTGAVYVAEIGAKQVQKYVPLNSYVPSFGS

SEQ ID NO: 62454 - protein, 285 aa, Homo sapiens
LYEEGNQESEEDDSGPTARKQRKNQDDDDDDDDGFFGPALPPGFKKQDDSPPRPIIGPALPPGFIKSTQKSDKGRDDPGQQETDSSEDEDIIGPMPAKGPVNYNVTTEFEKRAQRMKEKLTKGDDDSSKPIVRESWMTELPPEMKDFGLGPRTFKRRADDTSGDRSIWTDTPADRERKAKETQEARKSSSKKDEEHILSGRDKRLAEQVSSYNESKRSESLMDIHHKKLKSKAAEDKNKPQERIPFDRDKDLKVNRFDEAQKKALIKKSRELNTRFSHGKGNMFL

SEQ ID NO: 62455 - protein, 192 aa, Homo sapiens
LDLKKTRDAAFKILNPMTVPRFFRLNSNNALIEFLLEGTPEIREHYLDSKKDVDRHLKSACEQFIQQQTKLFVEQLEEFMTKVSALKTMASQGGPKYTLSQQPWAQPAKVNDLAATAYKTIKTKLPVTLRSMSLYLSNKDTEFILFKPVRNNIQQVFQKFHALLKEEFSPEDIQIIACPSMEQLSLLLLVSK

SEQ ID NO: 62456 - protein, 39 aa, Homo sapiens
TALYSGLKPTMIRAFPANGALFLAYEYSRKLMMNQLEAY

SEQ ID NO: 62457 - protein, 16 aa, Homo sapiens
VALNHTANYDVLANEI

SEQ ID NO: 62458 - protein, 99 aa, Homo sapiens
LADFASPFHERHFHYEEHLERMKRRSSASVSDSSGFSDSESADSLYRNSFSFSDEKLNSPTDSTPALLSATVTPQKAKLGDTKELEAFIADLDKTLASM

SEQ ID NO: 62459 - protein, 1163 aa, Homo sapiens
LVQVNPGEAFTIRREDGQFQCITGPAQVPMMSPNGSVPPIYVPPGYAPQVIEDNGVRRVVVVPQAPEFHPGSHTVLHRSPHPPLPGFIPVPTMMPPPPRHMYSPVTGAGDMTTQYMPQYQSSQVYGDVDAHSTHGRSNFRDERSSKTYERLQKKLKDRQGTQKDKMSSPPSSPQKCPSPINEHNGLIKGQIAGGINTGSAKIKSGKGKGGTQVDTEIEEKDEETKAFEALLSNIVKPVASDIQARTVVLTWSPPSSLINGETDESSVPELYGYEVLISSTGKDGKYKSVYVGEETNITLNDLKPAMDYHAKVQAEYNSIKGTPSEAEIFTTLSCEPDIPNPPRIANRTKNSLTLQWKAPSDNGSKIQNFVLEWDEGKGNGEFCQCYMGSQKQFKITKLSPAMGCKFRLSARNDYGTSGFSEEVLYYTSGCAPSMPASPVLTKAGITWLSLQWSKPSGTPSDEGISYILEMEEETSGYGFKPKYDGEDLAYTVKNLRRSTKYKFKVIAYNSEGKSNPSEVVEFTTCPDKPGIPVKPSVKGKIHSHSFKITWDPPKDNGGATINKYVVEMAEGSNGNKWEMIYSGATREHLCDRLNPGCFYRLRVYCISDGGQSAVSESLLVQTPAVPPGPCLPPRLQGRPKAKEIQLRWGPPLVDGGSPISCYSVEMSPIEKDEPREVYQGSEVECTVSSLLPGKTYSFRLRAANKMGFGPFSEKCDITTAPGPPDQCKPPQVTCRSATCAQVNWEVPLSNGTDVTEYRLEWGGVEGSMQICYCGPGLSYEIKGLSPATTYYCRVQALSVVGAGPFSEVVACVTPPSVPGIVTCLQEISDDEIENPHYSPSTCLAISWEKPCDHGSEILAYSIDFGDKQSLTVGKVTSYIINNLQPDTTYRIRIQALNSLGAGPFSHMIKLKTKPLPPDPPRLECVAFSHQNLKLKWGEGTPKTLSTDSIQYHLQMEDKNGRFVSLYRGPCHTYKVQRLNESTSYKFCIQACNEAGEGPLSQEYIFTTPKSVPAALKAPKIEKVNDHICEITWECLQPMKGDPVIYSLQVMLGKDSEFKQIYKGPDSSFRYSSLQLNCEYRFRVCAIRQCQDSLGHQDLVGPYSTTVLFISQRTEPPASTNRDTVESTRTRRALSDEQCAAVILVLFAFFSILIAFIIQYFVIK

SEQ ID NO: 62460 - protein, 20 aa, Homo sapiens
LGTFICAVFILDHTGDYKSS

SEQ ID NO: 62461 - protein, 213 aa, Homo sapiens
MRFLREWVESMGGTATQKAKSEENTKEEKPDSKVEEDLKADEPSSEESDLEIDKEGVIEPDTDAPQEMGDENAEITEEVMDQANDKKVAAIEALNDGELQKAIDLFTDAIKLNPRLAILYAKRASVFVKLQKPNAAIRDCDRAIEINPDSAQPYKRRGKAHRLLGHWEEAAHDLALACKFDYDEDASAMLKEVQPRAQKIAEHQRKYERKREE

SEQ ID NO: 62462 - protein, 46 aa, Homo sapiens
VITNRERHPGSFDIVHMEDANGNSFATQLSNIFVIGKGNKLWISLP

SEQ ID NO: 62463 - protein, 5 aa, Homo sapiens
KKKLI

SEQ ID NO: 62464 - protein, 114 aa, Homo sapiens
LSNSEKERYGKEFSQERQQEILRRAARALPICTTPVSKTIRYCEKCQLIKPDRAHHCSTCDSCILKMDHHCPWVNNCVGFSNYKFFLLFLLYSLLYCLFVAAYSFRVLYKILDE

SEQ ID NO: 62465 - protein, 114 aa, Homo sapiens
TESIAQLEKDVSNLNKEKSALLQTKNQMALDLEQLLNHREELAAMKQILVKMHSKHSENSLLLTKTEPKHVTENQKSKTLNVPKEHEDNIFTPKPTLFTKKEAPEWSKKQKMKT

SEQ ID NO: 62466 - protein, 11 aa, Homo sapiens
KECMRALGFKI

SEQ ID NO: 62467 - protein, 15 aa, Homo sapiens
TQVPQFILDDFIQND

SEQ ID NO: 62468 - protein, 162 aa, Homo sapiens
LALLWLAVVPGWSRVSGIPSRRHWPVPYKRFDFRPKPDPYCQAKYTFCPTGSPIPVMEGDDDIEVFRLQAPVWEFKYGDLLGHLKIMHDAIGFRSTLTGKNYTMEWYELFQLGNCTFPHLRPEMDAPFWCNQGAACFFEGIDDVHWKENGTLVQVATISGKL

SEQ ID NO: 62469 - protein, 121 aa, Homo sapiens
IPCIGSPACPTMSDAAVDASSEITIKDLKEKKEVVEEAENGRDAPANGNANEENGEQEADSEVDEEEEEGGEEEEEEEEGDGEEEDGDEDEEAESPTGKRAAEDDEDDDVDTKKQKTDEDD

SEQ ID NO: 62470 - protein, 14 aa, Homo sapiens
VSTLHLVLHLRGGC

SEQ ID NO: 62471 - protein, 94 aa, Homo sapiens
VERSTLKREFYITFAKGCILWFLCHPVLACISVIFSDYQRDKVITIGVILCQSVSMVILYRLFLSHSLYWEVSSLSSVTLPLTISSGHKSRPHF

SEQ ID NO: 62472 - protein, 1250 aa, Homo sapiens
LINKLKPGVIKKINRLSTPIAGLDNINVFLKACEQIGLKEAQLFHPGDLQDLSNRVTVKQEETDRRVKNVLITLYWLGRKAQSNPYYNGPHLNLKAFENLLGQALTKALEDSSFLKRSGRDSGYGDIWCPERGEFLAPPRHHKREDSFESLDSLGSRSLTSCSSDITLRGGREGFESDTDSEFTFKMQDYNKDDMSYRRISAVEPKTALPFNRFLPNKSRQPSYVPAPLRKKKPDKHEDNRRSWASPVYTEADGTFSRLFQKIYGENGSKSMSDVSAEDVQNLRQLRYEEMQKIKSQLKEQDQKWQDDLAKWKDRRKSYTSDLQKKKEEREEIEKQALEKSKRSSKTFKEMLQDRESQNQKSTVPSRRRMYSFDDVLEEGKRPPTMTVSEASYQSERVEEKGATYPSEIPKEDSTTFAKREDRVTTEIQLPSQSPVEEQSPASLSSLRSRSTQMESTRVSASLPRSYRKTDTVRLTSVVTPRPFGSQTRGISSLPRSYTMDDAWKYNGDVEDIKRTPNNVVSTPAPSPDASQLASSLSSQKEVAATEEDVTRLPSPTSPFSSLSQDQAATSKATLSSTSGLDLMSESGEGEISPQREVSRSQDQFSDMRISINQTPGKSLDFGFTIKWDIPGIFVASVEAGSPAEFSQLQVDDEIIAINNTKFSYNDSKEWEEAMAKAQETGHLVMDVRRYGKAGSPETKWIDATSGIYNSEKSSNLSVTTDFSESLQSSNIESKEINGIHDESNAFESKASESISLKNLKRRSQFFEQGSSDSVVPDLPVPTISAPSRWVWDQEEERKRQERWQKEQDRLLQEKYQREQEKLREEWQRAKQEAERENSKYLDEELMVLSSNSMSLTTREPSLATWEATWSEGSKSSDREGTRAGEEERRQPQEEVVHEDQGKKPQDQLVIERERKWEQQLQEEQEQKRLQAEAEEQKRPAEEQKRQAEIERETSVRIYQYRRPVDSYDIPKTEEASSGFLPGDRNKSRSTTELDDYSTNKNGNNKYLDQIGNMTSSQRRSKKEQVPSGAELERQQILQEMRKRTPLHNDNSWIRQRSASVNKEPVSLPGIMRRGESLDNLDSPRSNSWRQPPWLNQPTGFYASSSVQDFSRPPPQLVSTSNRAYMRNPSSSVPPPSAGSVKTSTTGVATTQSPTPRSHSPSASQSGSQLRNRSVSGKRICSYCNNILGKGAAMIIESLGLCYHLHCFKCVACECDLGGSSSGAEVRIRNHQLYCNDCYLRFKSGRPTAM

SEQ ID NO: 62473 - protein, 965 aa, Homo sapiens
LRYEEMQKIKSQLKEQDQKWQDDLAKWKDRRKSYTSDLQKKKEEREEIEKQALEKSKRSSKTFKEMLQDRESQNQKSTVPSRRRMYSFDDVLEEGKRPPTMTVSEASYQSERVEEKGATYPSEIPKEDSTTFAKREDRVTTEIQLPSQSPVEEQSPASLSSLRSRSTQMESTRVSASLPRSYRKTDTVRLTSVVTPRPFGSQTRGISSLPRSYTMDDAWKYNGDVEDIKRTPNNVVSTPAPSPDASQLASSLSSQKEVAATEEDVTRLPSPTSPFSSLSQDQAATSKATLSSTSGLDLMSESGEGEISPQREVSRSQDQFSDMRISINQTPGKSLDFGFTIKWDIPGIFVASVEAGSPAEFSQLQVDDEIIAINNTKFSYNDSKEWEEAMAKAQETGHLVMDVRRYGKAGSPETKWIDATSGIYNSEKSSNLSVTTDFSESLQSSNIESKEINGIHDESNAFESKASESISLKNLKRRSQFFEQGSSDSVVPDLPVPTISAPSRWVWDQEEERKRQERWQKEQDRLLQEKYQREQEKLREEWQRAKQEAERENSKYLDEELMVLSSNSMSLTTREPSLATWEATWSEGSKSSDREGTRAGEEERRQPQEEVVHEDQGKKPQDQLVIERERKWEQQLQEEQEQKRLQAEAEEQKRPAEEQKRQAEIERETSVRIYQYRRPVDSYDIPKTEEASSGFLPGDRNKSRSTTELDDYSTNKNGNNKYLDQIGNMTSSQRRSKKEQVPSGAELERQQILQEMRKRTPLHNDNSWIRQRSASVNKEPVSLPGIMRRGESLDNLDSPRSNSWRQPPWLNQPTGFYASSSVQDFSRPPPQLVSTSNRAYMRNPSSSVPPPSAGSVKTSTTGVATTQSPTPRSHSPSASQSGSQLRNRSVSGKRICSYCNNILGKGAAMIIESLGLCYHLHCFKCVACECDLGGSSSGAEVRIRNHQLYCNDCYLRFKSGRPTAM

SEQ ID NO: 62474 - protein, 14 aa, Homo sapiens
ISEWRMENSRKMVS

SEQ ID NO: 62475 - protein, 1725 aa, Homo sapiens
VGLTGAQSGRTASMGRDQRAVAGPALRRWLLLGTVTVGFLAQSVLAGVKKFDVPCGGRDCSGGCQCYPEKGGRGQPGPVGPQGYNGPPGLQGFPGLQGRKGDKGERGAPGVTGPKGDVGARGVSGFPGADGIPGHPGQGGPRGRPGYDGCNGTQGDSGPQGPPGSEGFTGPPGPQGPKGQKGEPYALPKEERDRYRGEPGEPGLVGFQGPPGRPGHVGQMGPVGAPGRPGPPGPPGPKGQQGNRGLGFYGVKGEKGDVGQPGPNGIPSDTLHPIIAPTGVTFHPDQYKGEKGSEGEPGIRGISLKGEEGIMGFPGLRGYPGLSGEKGSPGQKGSRGLDGYQGPDGPRGPKGEAGDPGPPGLPAYSPHPSLAKGARGDPGFPGAQGEPGSQGEPGDPGLPGPPGLSIGDGDQRRGLPGEMGPKGFIGDPGIPALYGGPPGPDGKRGPPGPPGLPGPPGPDGFLFGLKGAKGRAGFPGLPGSPGARGPKGWKGDAGECRCTEGDEAIKGLPGLPGPKGFAGINGEPGRKGDRGDPGQHGLPGFPGLKGVPGNIGAPGPKGAKGDSRTITTKGERGQPGVPGVPGMKGDDGSPGRDGLDGFPGLPGPPGDGIKGPPGDPGYPGIPGTKGTPGEMGPPGLGLPGLKGQRGFPGDAGLPGPPGFLGPPGPAGTPGQIDCDTDVKRAVGGDRQEAIQPGCIGGPKGLPGLPGPPGPTGAKGLRGIPGFAGADGGPGPRGLPGDAGREGFPGPPGFIGPRGSKGAVGLPGPDGSPGPIGLPGPDGPPGERGLPGEVLGAQPGPRGDAGVPGQPGLKGLPGDRGPPGFRGSQGMPGMPGLKGQPGLPGPSGQPGLYGPPGLHGFPGAPGQEGPLGLPGIPGREGLPGDRGDPGDTGAPGPVGMKGLSGDRGDAGFTGEQGHPGSPGFKGIDGMPGTPGLKGDRGSPGMDGFQGMPGLKGRPGFPGSKGEAGFFGIPGLKGLAGEPGFKGSRGDPGPPGPPPVILPGMKDIKGEKGDEGPMGLKGYLGAKGIQGMPGIPGLSGIPGLPGRPGHIKGVKGDIGVPGIPGLPGFPGVAGPPGITGFPGFIGSRGDKGAPGRAGLYGEIGATGDFGDIGDTINLPGRPGLKGERGTTGIPGLKGFFGEKGTEGDIGFPGITGVTGVQGPPGLKGQTGFPGLTGPPGSQGELGRIGLPGGKGDDGWPGAPGLPGFPGLRGIRGLHGLPGTKGFPGSPGSDIHGDPGFPGPPGERGDPGEANTLPGPVGVPGQKGDQGAPGERGPPGSPGLQGFPGITPPSNISGAPGDKGAPGIFGLKGYRGPPGPPGSAALPGSKGDTGNPGAPGTPGTKGWAGDSGPQGRPGVFGLPGEKGPRGEQGFMGNTGPTGAVGDRGPKGPKGDPGFPGAPGTVGAPGIAGIPQKIAVQPGTVGPQGRRGPPGAPGEMGPQGPPGEPGFRGAPGKAGPQGRGGVSAVPGFRGDEGPIGHQGPIGQEGAPGRPGSPGLPGMPGRSVSIGYLLVKHSQTDQEPMCPVGMNKLWSGYSLLYFEGQEKAHNQDLGLAGSCLARFSTMPFLYCNPGDVCYYASRNDKSYWLSTTAPLPMMPVAEDEIKPYISRCSVCEAPAIAIAVHSQDVSIPHCPAGWRSLWIGYSFLMHTAAGDEGGGQSLVSPGSCLEDFRATPFIECNGGRGTCHYYANKYSFWLTTIPEQSFQGSPSADTLKAGLIRTHISRCQVCMKNL

SEQ ID NO: 62476 - protein, 44 aa, Homo sapiens
RRFWIPWCRWNSWTPGARWAQGKAGLRWLQRNPGRLRSTGAPRL

SEQ ID NO: 62477 - protein, 58 aa, Homo sapiens
RLSRNTWNEGYSRRNGPPRTGPSRPQRPTWFPWRRRLTWTTRLPGPSWPRRDPRTNRL

SEQ ID NO: 62478 - protein, 12 aa, Homo sapiens
LEKSKKERAYNR

SEQ ID NO: 62479 - protein, 145 aa, Homo sapiens [sequence omitted]

SEQ ID NO: 62480 - protein, 514 aa, Homo sapiens
VRIEKNPARLRALESAVGESEPAAAAAMALALAGEPAPPAPAPPEDHPDEEMGFTIDIKSFLKPGEKTYTQRCRLFVGNLPTDITEEDFKRLFERYGEPSEVFINRDRGFGFIRLESRTLAEIAKAELDGTILKSRPLRIRFATHGAALTVKNLSPVVSNELLEQAFSQFGPVEKAVVVVDDRGRATGKGFVEFAAKPPARKALERCGDGAFLLTTTPRPVIVEPMEQFDDEDGLPEKLMQKTQQYHKEREQPPRFAQPGTFEFEYASRWKALDEMEKQQREQVDRNIREAKEKLEAEMEAARHEHQLMLMRQDLMRRQEELRRLEELRNQELQKRKQIQLRHEEEHRRREEEMIRHREQEELRRQQEGFKPNYMENREQEMRMGDMGPRGAINMGDAFSPAPAGNQGPPPMMGMNMNNRATIPGPPMGPGPAMGPEGAANMGTPMMPDNGAVHNDRFPQGPPSQMGSPMGSRTGSETPQAPMSGVGPVSGGPGGFGRGSQGGNFEGPNKRRRY

SEQ ID NO: 62481 - protein, 229 aa, Homo sapiens
IQECVPEDLELKKKIFAQLDSIIDDRVILSSSTSCLMPSKLFAGLVHVKQCIVAHPVNPPYYIPLVELVPHPETAPTTVDRTHALMKKIGQCPMRVQKEVAGFVLNRLQYAIISEAWRLVEEGIVSPSDLDLVMSEGLGMRYAFIGPLETMHLNAEGMLSYCDRYSEGIKHVLQTFGPIPEFSRATAEKVNQDMCMKVPDDPEHLAARRQWRDECLMRLAKLKSQVQPQ

SEQ ID NO: 62482 - protein, 147 aa, Homo sapiens
IAAVGEGGRIACVSAPSVYQKLRELCRENFSIYIFEYDKRFAMYGEEFIFYDYNNPLDLPERIAAHSFDIVIADPPYLSEECLRKTSETVKYLTRGKILLCTGAIMEEQAAELLGVKMCTFVPRHTRNLANEFRCYVNYDSGLDCGI

SEQ ID NO: 62483 - protein, 27 aa, Homo sapiens
LDRKQKMAFLKSLEEFMANVGGLLCVK

SEQ ID NO: 62484 - protein, 616 aa, Homo sapiens
TTKVEQVKLLDRFSTSNKSLTGTLYLTATHLLFIDSHQKETWILHHHIASVEKLALTTSGCPLVIQCKNFRTVHFIVPRERDCHDIYNSLLQLSKQAKYEDLYAFSYNPKQNDSERLQGWQLIDLAEEYKRMGVPNSHWQLSDANRDYKICETYPRELYVPRIASKPIIVGSSKFRSKGRFPVLSYYHQDKEAAICRCSQPLSGFSARCLEDEHLLQAISKANPVNRYMYVMDTRPKLNAMANRAAGKGYENEDNYSNIRFQFVGIENIHVMRSSLQKLLEVNGTKGLSVNDFYSGLESSGWLRHIKAVMDAAIFLAKAITVENASVLVHCSDGWDRTSQVCSLGSLLLDSYYRTIKGFMVLIEKDWISFGHKFSERCGQLDGDPKEVSPVFTQFLECVWHLTEQFPQAFEFSEAFLLQIHEHIHSCQFGNFLGNCQKEREELKLKEKTYSLWPFLLEDQKKYLNPLYSSESHRFTVLEPNTVSFNFKFWRNMYHQFDRTLHPRQSVFNIIMNMNEQNKQLEKDIKDLESKIKQRKNKQTDGILTKELLHSVHPESPNLKTSLCFKEQTLLPVNDALRTIEGSSPADNRYSEYAEEFSKSEPAVVSLEYGVARMTC

SEQ ID NO: 62485 - protein, 15 aa, Homo sapiens
KPQDSGSSANEQAVQ

SEQ ID NO: 62486 - protein, 82 aa, Homo sapiens
KYGPVFSFTMVGKTFTYLLGSDAAALLFNSKNEDLNAEDVYSHLTTPVFGKGVAYDVPNPVFLEQKKMLKSGLNKAHFKQHV

SEQ ID NO: 62487 - protein, 246 aa, Homo sapiens
ILTASHCLHGKEIRSQLNEKVAQLYADLDGGFSHAAWLLPGWLPLPSFRCRDRAHWEIKDIFYKAIQKRRQSQEKIDDILQTLLDATYKDGRPLTDDEVAGMLIGLLLAGQHSSSTTSAWMDFFLARDKTLQEKCYLEQKTVCGENLPPLTYDQLKDLNLLDRCIKETLRLRPPIMIMMRMARTPQTVVGYTIPPGHQVCVSPTVNQRPKDSWVERLDFNPDCYLQDNPASGEKFAYVPFGAGCHR

SEQ ID NO: 62488 - protein, 140 aa, Homo sapiens
VMALCSALMTIFTIKMGTAKQAIDQGRSPVIIDNTNIQAWEMKPYVEVAIGKGYRVEFHEPETWWKFDPEELEKRNKHGVSRKKIAQMLDRYEYQMSISIVMNSVEPSHKSTQRPPPPQGRQRWGGSLGSHNRVCVTNNH

SEQ ID NO: 62489 - protein, 77 aa, Homo sapiens
MSRAVASMVWKECFLQDPFNRAAGERYRREMLAHGGGREPMLMVEGMLQKCPSVDDFVSALVSDLDLDFETFLMDSE

SEQ ID NO: 62490 - protein, 937 aa, Homo sapiens
LSPAFSQGFLSASRRCPRGSRRLLTGRGCLCVLLSVRGTARPRGPEQNAARAESGGRRSRQGAGGRRPRPEAEADREPAMSVVGLDVGSQSCYIAVARAGGIETIANEFSDRCTPSVISFGSKNRTIGVAAKNQQITHANNTVSNFKRFHGRAFNDPFIQKEKENLSYDLVPLKNGGVGIKVMYMGEEHLFSVEQITAMLLTKLKETAENSLKKPVTDCVISVPSFFTDAERRSVLDAAQIVGLNCLRLMNDMTAVALNYGIYKQDLPSLDEKPRIVVFVDMGHSAFQVSACAFNKGKLKVLGTAFDPFLGGKNFDEKLVEHFCAEFKTKYKLDAKSKIRALLRLYQECEKLKKLMSSNSTDLPLNIECFMNDKDVSGKMNRSQFEELCAELLQKIEVPLYSLLEQTHLKVEDVSAVEIVGGATRIPAVKERIAKFFGKDISTTLNADEAVARGCALQCAILSPAFKVREFSVTDAVPFPISLIWNHDSEDTEGVHEVFSRNHAAPFSKVLTFLRRGPFELEAFYSDPQGVPYPEAKIGRFVVQNVSAQKDGEKSRVKVKVRVNTHGIFTISTASMVEKVPTEENEMSSEADMECLNQRPPENPDTDKNVQQDNSEAGTQPQVQTDAQQTSQSPPSPELTSEENKIPDADKANEKKVDQPPEAKKPKIKVVNVELPIEANLVWQLGKDLLNMYIETEGKMIMQDKLEKERNDAKNAVEEYVYEFRDKLCGPYEKFICEQDHQNFLRLLTETEDWLYEEGEDQAKQAYVDKLEELMKIGTPVKVRFQEAEERPKMFEELGQRLQHYAKIAADFRNKDEKYNHIDESEMKKVEKSVNEVMEWMNNVMNAQAKKSLDQDPVVRAQEIKTKIKELNNTCEPVVTQPKPKIESPKLERTPNGPNIDKKEEDLEDKNNFGAEPPHQNGECYPNEKNSVNMDLD

SEQ ID NO: 62491 - protein, 5 aa, Homo sapiens
MMSYL

SEQ ID NO: 62492 - protein, 364 aa, Homo sapiens
IMSFGRDMELEHFDERDKAQRYSRGSRVNGLPSPTHSAHCSFYRTRTLQTLSSEKKAKKVRFYRNGDRYFKGIVYAISPDRFRSFEALLADLTRTLSDNVNLPQGVRTIYTIDGLKKISSLDQLVEGESYVCGSIEPFKKLEYTKNVNPNWSVNVKTTSASRAVSSLATAKGSPSEVRENKDFIRPKLVTIIRSGVKPRKAVRILLNKKTAHSFEQVLTDITDAIKLDSGVVKRLYTLDGKQVMCLQDFFGDDDIFIACGPEKFRYQDDFLLDESECRVVKSTSYTKIASSSRRSTTKSPGPSRRSKSPASTSSVNGTPGSQLSTPRSGKSPSPSPTSPGSLRKQRDLYRPLSSDDLDSVGDSV

SEQ ID NO: 62493 - protein, 741 aa, Homo sapiens
IMSFGRDMELEHFDERDKAQRYSRGSRVNGLPSPTHSAHCSFYRTRTLQTLSSEKKAKKVRFYRNGDRYFKGIVYAISPDRFRSFEALLADLTRTLSDNVNLPQGVRTIYTIDGLKKISSLDQLVEGESYVCGSIEPFKKLEYTKNVNPNWSVNVKTTSASRAVSSLATAKGSPSEVRENKDFIRPKLVTIIRSGVKPRKAVRILLNKKTAHSFEQVLTDITDAIKLDSGVVKRLYTLDGKQVMCLQDFFGDDDIFIACGPEKFRYQDDFLLDESECRVVKSTSYTKIASSSRRSTTKSPGPSRRSKSPASTSSVNGTPGSQLSTPRSGKSPSPSPTSPGSLRKQRSSQHGGSSTSLASTKVCSSMDENDGPGEEVSEEGFQIPATITERYKVGRTIGDGNFAVVKECVERSTAREYALKIIKKSKCRGKEHMIQNEVSILRRVKHPNIVLLIEEMDVPTELYLVMELVKGGDLFDAITSTNKYTERDASGMLYNLASAIKYLHSLNIVHRDIKPENLLVYEHQDGSKSLKLGDFGLATIVDGPLYTVCGTPTYVAPEIIAETGYGLKVDIWAAGVITYILLCGFPPFRGSGDDQEVLFDQILMGQVDFPSPYWDNVSDSAKELITMMLLVDVDQRFSAVQVLEHPWVNDDGLPENEHQLSVAGKIKKHFNTGPKPNSTAAGVSVIATTALDKERQVFRRRRNQDVRSRYKAQPAPPELNSESEDYSPSSSETVRSPNSPF

SEQ ID NO: 62494 - protein, 124 aa, Homo sapiens
IKKEVSPEVVRSKLSPSPSLRKSSKSPKRKSSPKSSSASKKDRKTSAVSSPLLDQQRNSKTNQSKKKGPRTPSPPPPIPEDIALGKKYKEKYKVKDRIEEKTRDGKDRGRDFERQREKRDKPRT

SEQ ID NO: 62495 - protein, 5 aa, Homo sapiens
MGWTR

SEQ ID NO: 62496 - protein, 77 aa, Homo sapiens
LKKLCQQTIKQGICEENAIALLSAAVKYDAQDLEEFCFRFCINHLTVVTQTSGFAEMDHDLLKNFISKASRVGAFKN

SEQ ID NO: 62497 - protein, 106 aa, Homo sapiens
TSASMNQRSHLGTTYLDTAKGAVETFMKLRARDPASRGDRYMLVTFEEPPYAIKAGWKENHATFMNELKNLQAEGLTTLGQSLRTAFDLLNLNRLVTGIDNYGQVG

SEQ ID NO: 62498 - protein, 27 aa, Homo sapiens
ITGVVAQLFPPDIHQILRRKNIRSKVF

SEQ ID NO: 62499 - protein, 33 aa, Homo sapiens
LSSFQKERTDDEQFADEKNYLIKQIRDLKKTAP

SEQ ID NO: 62500 - skipped

SEQ ID NO: 62501 - protein, 185 aa, Homo sapiens
LAAIVAKQVLLGRKVVVVCCEGINISGNFYRNKLNYLAFLRKRMNTSPSRGPYHFRAPSRVFWRTVRGMLPHKTKRGQAALDRLKVSDGIPPPYDKKKRMVVPAALKVVRLKPTRKFAYLGRLAHEVGWKYQAVTATLEEKRKEKAKIHYRKKKQLMRLRKQAEKNVEKKIDKYTEVLKTHGLLV

SEQ ID NO: 62502 - protein, 1033 aa, Homo sapiens
IMDLRDFYLLAALIACLRLDSAIAQELIYTIREELPENVPIGNIPKDLNISHINAATGTSASLVYRLVSKAGDAPLVKVSSSTGEIFTTSNRIDREKLCAGASYAEENECFFELEVVILPNDFFRLIKIKIIVKDTNDNAPMFPSPVINISIPENTLINSRFPIPSATDPDTGFNGVQHYELLNGQSVFGLDIVETPEGEKWPQLIVQQNLDREQKDTYVMKIKVEDGGTPQKSSTAILQVTVSDVNDNRPVFKEGQVEVHIPENAPVGTSVIQLHATDADIGSNAEIRYIFGAQVAPATKRLFALNNTTGLITVQRSLDREETAIHKVTVLASDGSSTPARATVTINVTDVNDNPPNIDLRYIISPINGTVYLSEKDPVNTKIALITVSDKDTDVNGKVICFIEREVPFHLKAVYDNQYLLETSSLLDYEGTKEFSFKIVASDSGKPSLNQTALVRVKLEDENDNPPIFNQPVIELSVSENNRRGLYLTTISATDEDSGKNADIVYQLGPNASFFDLDRKTGVLTASRVFDREEQERFIFTVTARDNGTPPLQSQAAVIVTVLDENDNSPKFTHNHFQFFVSENLPKYSTVGVITVTDADAGENKAVTLSILNDNDNFVLDPYSGVIKSNVSFDREQQSSYTFDVKATDGGQPPRSSTAKVTINVMDVNDNSPVVISPPSNTSFKLVPLSAIPGSVVAEVFAVDVDTGMNAELKYTIVSGNNKGLFRIDPVTGNITLEEKPAPTDVGLHRLVVNISDLGYPKSLHTLVLVFLYVNDTAGNASYIYDLIRRTMETPLDRNIGDSSQPYQNEDYLTIMIAIIAGAMVVIVVIFVTVLVRCRHASRFKAAQRSKQGAEWMSPNQENKQNKKKKRKKRKSPKSSLLNFVTIEESKPDDAVHEPINGTISLPAELEEQSIGRFDWGPAPPTTFKPNSPDLAKHYKSASPQPAFHLKPDTPVSVKKHHVIQELPLDNTFVGGCDTLSKRSSTSSDHFSASECSSQGGFKTKGPLHTRQVNEHFYWSISTAYKCPVNQY

SEQ ID NO: 62503 - protein, 51 aa, Homo sapiens
IRTLEQEKMAYQKTVEQLRKLLPADALVNCDLLLRDLNCNPNNKAKIGNKP

SEQ ID NO: 62504 - protein, 9 aa, Homo sapiens
KSCIHGQQQ

SEQ ID NO: 62505 - protein, 5 aa, Homo sapiens
ISPSN

SEQ ID NO: 62506 - protein, 94 aa, Homo sapiens
IQWTKEGKLWEFPINNEAGFDDDGSEFHEHIFLEKHLESFPKQGPIRHFMELVTCGLSKNPYLSVKQKVEHIEWFRNYFNEKKDILKESNIQFN

SEQ ID NO: 62507 - protein, 18 aa, Homo sapiens
KAKKLERRKISEKLSQFD

SEQ ID NO: 62508 - protein, 224 aa, Homo sapiens
LKEVECYNVKRNQWALVAPLPHSFLSFDLMVIRDYLYALNSKRMFCYDPSHNMWLKCVSLKRNDFQEACVFNEEIYCICDIPVMKVYNPVRAEWRQMNNIPLVSETNNYRIIKHGQKLLLITSRTPQWKKNRVTVYEYDIRGDQWINIGTTLGLLQFDSNFFCLSARVYPSCLEPGQSFLTEEEEIPSESSTEWDLGGFSEPDSESGSSSSLSDDDFWVRVAPQ

SEQ ID NO: 62509 - protein, 428 aa, Homo sapiens
LVLACGLSRIWGEERGFPPDRATPLLQTAEIMTPPTKTLWPKGSNASLARSLAPAEVPKGDRTAGSPPRTISPPPCQGPIEIKETFKYINTVVSCLVFVLGIIGNSTLLRIIYKNKCMRNGPNILIASLALGDLLHIVIDIPINVYKLLAEDWPFGAEMCKLVPFIQKASVGITVLSLCALSIDRYRAVASWSRIKGIGVPKWTAVEIVLIWVVSVVLAVPEAIGFDIITMDYKGSYLRICLLHPVQKTAFMQFYKTAKDWWLFSFYFCLPLAITAFFYTLMTCEMLRKKSGMQIALNDHLKQRREVAKTVFCLVLVFALCWLPLHLSRILKLTLYNQNDPNRCELLSFLLVLDYIGINMASLNSCINPIALYLVSKRFKNCFKSCLCCWCQSFEEKQSLEEKQSCLKFKANDHGYDNFRSSNKYSSS

SEQ ID NO: 62510 - protein, 69 aa, Homo sapiens
LEENNRKIAEAQAKLAEEQLRIVEEQRKIHEERMKLEQERQRQQKEEQKIILGKGKSRPKLSFSLKTQD

SEQ ID NO: 62511 - protein, 73 aa, Homo sapiens
LADDFDTPRVVDAILGLAHHGNGQLRASLKEPEGPRSPAVFGAIISYFEQFFETVGISLANQQLANSRAQNQR

SEQ ID NO: 62512 - protein, 3847 aa, Homo sapiens
VKEMIPLDLLLAVPVPGVNIEEHLQLRQEEKRQRVIRRHRLEEGRGPLVFAGPIFMNHREQALARLRSHPAQLKHKRDKHKDGSGERGEKDASKITTYPPGSVRFDCELRAVQVSCGFHHSVVLMENGDVYTFGYGQHGQLGHGDVNSRGCPTLVQALPGPSTQVTAGSNHTAVLLMDGQVFTFGSFSKGQLGRPILDVPYWNAKPAPMPNIGSKYGRKATWIGASGDQTFLRIDEALINSHVLATSEIFASKHIIGLVPASISEPPPFKCLLINKVDGSCKTFNDSEQEDLQGFGVCLDPVYDVIWRFRPNTRELWCYNAVVADARLPSAADMQSRCSILSPELALPTGSRALTTRSHAALHILGCLDTLAAMQDLKMGVASTEEETQAVMKVYSKEDYSVVNRFESHGGGWGYSAHSVEAIRFSADTDILLGGLGLFGGRGEYTAKIKLFELGPDGGDHETDGDLLAETDVLAYDCAAREKYAMMFDEPVLLQAGWWYVAWARVSGPSSDCGSHGQASITTDDGVVFQFKSSKKSNNGTDVNAGQIPQLLYRLPTSDGSASKGKQQTSEPVHILKRSFARTVSVECFESLLSILHWSWTTLVLGVEELRGLKGFQFTATLLDLERLRFVGTCCLRLLRVYTCEIYPVSATGKAVVEETSKLAECIGKTRTLLRKILSEGVDHCMVKLDNDPQGYLSQPLSLLEAVLQECHNTFTACFHSFYPTPALQWACLCDLLNCLDQDIQEANFKTSSSRLLAAVMSALCHTSVKLTSIFPIAYDGEVLLRSIVKQVSTENDSTLVHRFPLLVAHMEKLSQSEENISGMTSFREVLEKMLVIVVLPVRNSLRRENELFSSHLVSNTCGLLASIVSELTASALGSEVDGLNSLHSVKASANRFTKTSQGRSWNTGNGSPDAICFSVDKPGIVVVGFSVYGGGGIHEYELEVLVDDSEHAGDSTHSHRWTSLELVKGTYTTDDSPSDIAEIRLDKVVPLKENVKYAVRLRNYGSRTANGDGGMTTVQCPDGVTFTFSTCSLSSNGTNQTRGQIPQILYYRSEFDGDLQSQLLSKANEEDKNCSRALSVVSTVVRASKDLLHRALAVDADDIPELLSSSSLFSMLLPLIIAYIGPVAAAIPKVAVEVFGLVQQLLPSVAILNQKYAPPAFNPNQSTDSTTGNQPEQGLSACTTSSHYAVIESEHPYKPACVMHYKVTFPECVRWMTIEFDPQCGTAQSEDVLRLLIPVRTVQNSGYGPKLTSVHENLNSWIELKKFSGSSGWPTMVLVLPGNEALFSLETASDYVKDDKASFYGFKCFAIGYEFSPGPDEGVIQLEKELANLGGVCAAALMKKDLALPIGNELEEDLEILEEAALQVCKTHSGILGKGLALSHSPTILEALEGNLPLQIQSNEQSFLDDFIACVPGSSGGRLARWLQPDSYADPQKTSLILNKDDIRCGWPTTITVQTKDQYGDVVHVPNMKVEVKAVPVSQKKMSLQQDQAKKPQRIPGSPAVTAASSNTDMTYGGLASPKLDVSYEPMIVKEARYIAITMMKVYENYSFEELRFASPTPKRPSENMLIRVNNDGTYCANWTPGAIGLYTLHVTIDGIEIDAGLEVKVKDPPKGMIPPGTQLVKPKSEPQPNKVRKFVAKDSAGLRIRSHPSLQSEQIGIVKVNGTITFIDEIHNDDGVWLRLNDETIKKYVPNMNGYTEAWCLSFNQHLGKSLLVPVDESKTNTDDFFKDINSCCPQEATMQEQDMPFLRGGPGMYKVVKTGPSGHNIRSCPNLRGIPIGMLVLGNKVKAVGEVTNSEGTWVQLDQNSMVEFCESDEGEAWSLARDRGGNQYLRHEDEQALLDQNSQTPPPSPFSVQAFNKGASCSAQGFDYGLGNSKGDRGNISTSSKPASTSGKSELSSKHSRSLKPDGRMSRTTADQKKPRGTESLSASESLILKSDAAKLRSDSHSRSLSPNHNTLQTLKSDGRMPSSSRAESPGPGSRLSSPKPKTLPANRSSPSGASSPRSSSPHDKNLPQKSTAPVKTKLDPPRERSKSDSYTLDPDTLRKKKMPLTEPLRGRSTSPKPKSVPKDSTDSPGSENRAPSPHVVQENLHSEVVEVCTSSTLKTNSLTDSTCDDSSEFKSVDEGSNKVHFSIGKAPLKDEQEMRASPKISRKCANRHTRPKKEKSSFLFKGDGSKPLEPAKQAMSPSVAECARAVFASFLWHEGIVHDAMACSSFLKFHPELSKEHAPIRSSLNSQQPTEEKETKLKNRHSLEISSALNMFNIAPHGPDISKMGSINKNKVLSMLKEPPLHEKCEDGKTETTFEMSMHNTMKSKSPLPLTLQHLVAFWEDISLATIKAASQNMIFPSPGSCAVLKKKECEKENKKSKKEKKKKEKAEVRPRGNLFGEMAQLAVGGPEKDTICELCGESHPYPVTYHMRQAHPGCGRYAGGQGYNSIGHFCGGWAGNCGDGGIGGSTWYLVCDRCREKYLREKQAAAREKVKQSRRKPMQVKTPRALPTMEAHQVIKANALFLLSLSSAAEPSILCYHPAKPFQSQLPSVKEGISEDLPVKMPCLYLQTLARHHHENFVGYQDDNLFQDEMRYLRSTSVPAPYISVTPDASPNVFEEPESNMKSMPPSLETSPITDTDLAKRTVFQRSYSVVASEYDKQHSILPARVKAIPRRRVNSGDTEVGSSLLRHPSPELSRLISAHSSLSKGERNFQWPVLAFVIQHHDLEGLEIAMKQALRKSACRVFAMEAFNWLLCNVIQTTSLHDILWHFVASLTPAPVEPEEEEDEENKTSKENSEQEKDTRVCEHPLSDIVIAGEAAHPLPHTFHRLLQTISDLMMSLPSGSSLQQMALRCWSLKFKQSDHQFLHQSNVFHHINNILSKSDDGDSEESFSISIQSGFEAMSQELCIVMCLKDLTSIVDIKTSSRPAMIGSLTDGSTETFWESGDEDKNKTKNITINCVKGINARYVSVHVDNSRDLGNKVTSMTFLTGKAVEDLCRIKQVDLDSRHIGWVTSELPGGDNHIIKIELKGPENTLRVRQVKVLGWKDGESTKIAGQISASVAQQRNCEAETLRVFRLITSQVFGKLISGDAEPTPEQEEKALLSSPEGEEKVYNATSDADLKEHMVGIIFSRSKLTNLQKQVCAHIVQAIRMEATRVREEWEHAISSKENANSQPNDEDASSDAYCFELLSMVLALSGSNVGRQYLAQQLTLLQDLFSLLHTASPRVQRQVTSLLRRVLPEVTPSRLASIIGVKSLPPADISDIIHSTEKGDWNKLGILDMFLGCIAKALTVQLKAKGTTITGTAGTTVGKGVTTVTLPMIFNSSYLRRGESHWWMKGSTPTQISEIIIKLIKDMAAGHLSEAWSRVTKNAIAETIIALTKMEEEFRSPVRCIATTRLWLALASLCVLDQDHVDRLSSGRWMGKDGQQKQMPMCDNHDDGETAAIILCNVCGNLCTDCDRFLHLHRRTKTHQRQVFKEEEEAIKVDLHEGCGRTKLFWLMALADSKTMKAMVEFREHTGKPTTSSSEACRFCGSRSGTELSAVGSVCSDADCQEYAKIACSKTHPCGHPCGGVKNEEHCLPCLHGCDKSATSLKQDADDMCMICFTEALSAAPAIQLDCSHIFHLQCCRRVLENRWLGPRITFGFISCPICKNKINHIVLKDLLDPIKELYEDVRRKALMRLEYEGLHKSEAITTPGVRFYNDPAGYAMNRYAYYVCYKCRKAYFGGEARCDAEAGRGDDYDPRELICGACSDVSRAQMCPKHGTDFLEYKCRYCCSVAVFFCFGTTHFCNACHDDFQRMTSIPKEELPHCPAGPKGKQLEGTECPLHVVHPPTGEEFALGCGVCRNAHTF

SEQ ID NO: 62513 - protein, 35 aa, Homo sapiens
IRGRKRPPCICWSYFYEPSRTGSSQTQIPSSTAKA

SEQ ID NO: 62514 - protein, 20 aa, Homo sapiens
TVNVTKTKISTKGFYRFPWI

SEQ ID NO: 62515 - protein, 150 aa, Homo sapiens
LECLVQLVRAGATLNVSTTRYAQTPAHIAAFGGHPQCLVWLIQAGANINKPDCEGETPIHKAARSGSLECISALVANGAHVEFISQSSVHSCLPGELQHGVTFDPSVLIQCLKPEKCQWPDSSRHCTNPGFPRVCPVSLEPPELSSEPFL

SEQ ID NO: 62516 - protein, 14 aa, Homo sapiens
LVYNRMNFMSLKKK

SEQ ID NO: 62517 - protein, 71 aa, Homo sapiens
IEKTCFLEEEKKTHEKLRKEIEVQHKRYDAILKRLHCQVNKLQSNRRQWQWNIQQLEKTAAELRKCIGMQE

SEQ ID NO: 62518 - protein, 1043 aa, Homo sapiens
RGSGSGSASALNAAGTGVGSNATSSEDFPPPSLLQPPPPAASSTSGPQPPPPQSLNLLSQAQLQAQPLAPGGTQMKKKSGFQITSVTPAQISASISSNNSIAEDTESYDDLDESHTEDLSSSEILDVSLSRATDLGEPERSSSEETLNNFQEAETPGAVSPNQPHLPQPHLPHLPQQNVVINGNAHPHHLHHHHQIHHGHHLQHGHHHPSHVAVASASITGGPPSSPVSRKLSTTGSSDSITPVAPTSAVSSSGSPASVMTNMRAPSTTGGIGINSVTGTSTVNNVNITAVGSFNPNVTSSMLGNVNISTSNIPSAAGVSVGPGVTSGVNVNILSGMGNGTISSSAAVSSVPNAAAGMTGGSVSSQQQQPTVNTSRFRVVKLDSSSEPFKKGRWTCTEFYEKENAVPATEGVLINKVVETVKQNPIEVTSERESTSGSSVSSSVSTLSHYTESVGSGEMGAPTVVVQQQQQQQQQQQQQPALQGVTLQQMDFGSTGPQSIPAVSIPQSISQSQISQVQLQSQELSYQQKQGLQPVPLQATMSAATGIQPSPVNVVGVTSALGQQPSISSLAQPQLPYSQAAPPVQTPLPGAPPPQQLQYGQQQPMVSTQMAPGHVKSVTQNPASEYVQQQPILQTAMSSGQPSSAGVGAGTTVIPVAQPQGIQLPVQPTAVPAQPAGASVQPVGQAPAAVSAVPTGSQIANIGQQANIPTAVQQPSTQVPPSVIQQGAPPSSQVVPPAQTGIIHQGVQTSAPSLPQQLVIASQSSLLTVPPQPQGVEPVAQGIVSQQLPAVSSLPSASSISVTSQVSSTGPSGMPSAPTNLVPPQNIAQTPATQNGNLVQSVSQPPLIATNTNLPLAQQIPLSSTQFSAQSLAQAIGSQIEDARRAAEPSLVGLPQTISGDSGGMSAVSDGSSSSLAASASLFPLKVLPLTTPLVDGEDESSSGASVVAIDNKIEQAMDLVKSHLMYAVREEVEVLKEQIKELIEKNSQLEQENNLLKTLASPEQLAQFQAQLQTGSPPATTQPQGTTQPPAQPASQGSGPTA

SEQ ID NO: 62519 - protein, 17 aa, Homo sapiens
LGSASAWDHQALEAGFL

SEQ ID NO: 62520 - protein, 174 aa, Homo sapiens
LRKARRFYLAYTRLLVFPLFFHEGVFGCNCMKSQWCRPVAMDLGVYQLRHFSISFLSSLLGTENASVRLDNSSSGASVVAIDNKIEQAMDLVKSHLMYAVREEVEVLKEQIKELIEKNSQLEQENNLLKTLASPEQLAQFQAQLQTGSPPATTQPQGTTQPPAQPASQGSGPTA

SEQ ID NO: 62521 - protein, 46 aa, Homo sapiens
LPRLEQELKDTAKFKDFYQFTFTFAKNPGQKGLGSPPFLNVKALHH

SEQ ID NO: 62522 - protein, 39 aa, Homo sapiens
VPQPPPPPPPRCDLQGRQDGMTGASAPRRPRLASASRAL

SEQ ID NO: 62523 - protein, 782 aa, Homo sapiens
VEKSLCPFYGEDFYCEIPRSFRHLSFYIFDRDVFRRDSIIGKVAIQKEDLQKYHNRDTWFQLQHVDADSEVQGKVHLELRLSEVITDTGVVCHKLATRIVECQGLPIVNGQCDPYATVTLAGPFRSEAKKTKVKRKTNNPQFDEVFYFEVTRPCSYSKKSHFDFEEEDVDKLEIRVDLWNASNLKFGDEFLGELRIPLKVLRQSSSYEAWYFLQPRDNGSKSLKPDDLGSLRLNVVYTEDHVFSSDYYSPLRDLLLKSADVEPVSASAAHILGEVCREKQEAAVPLVRLFLHYGRVVPFISAIASAEVKRTQDPNTIFRGNSLASKCIDETMKLAGMHYLHVTLKPAIEEICQSHKPCEIDPVKLKDGENLENNMENLRQYVDRVFHAITESGVSCPTVMCDIFFSLREAAAKRFQDDPDVRYTAVSSFIFLRFFAPAILSPNLFQLTPHHTDPQTSRTLTLISKTVQTLGSLSKSKSASFKESYMATFYEFFNEQKYADAVKNFLDLISSSGRRDPKSVEQPIVLKEGFMIKRAQGRKRFGMKNFKKRWFRLTNHEFTYHKSKGDQPLYSIPIENILAVEKLEEESFKMKNMFQVIQPERALYIQANNCVEAKDWIDILTKVSQCNQKRLTVYHPSAYLSGHWLCCRAPSDSAPGCSPCTGGLPANIQLDIDGDRETERIYSLFNLYMSKLEKMQEACGSKSVYDGPEQEEYSTFVIDDPQETYKTLKQVIAGVGALEQEHAQYKRDKFKKTKYGSQEHPIGDKSFQNYIRQQSETSTHSI

SEQ ID NO: 62524 - protein, 1278 aa, Homo sapiens
TAGGGSAPQPPRLEYYESEKKWRSKAGAPKRVIALDCCLNINKRADAKHKYLIALYTKDEYFAVAAENEQEQEGWYRALTDLVSEGRAAAGDAPPAAAPAASCSASLPGALGGSAGAAGAEDSYGLVAPATAAYREVWQVNLKPKGLGQSKNLTGVYRLCLSARTIGFVKLNCEQPSVTLQLMNIRRCGHSDSFFFIEVGRSAVTGPGELWMQADDSVVAQNIHETILEAMKALKELFEFRPRSKSQSSGSSATHPISVPGARRHHHLVNLPPSQTGLVRRSRTDSLAATPPAAKCSSCRVRTASEGDGGAAAGAAAAGARPVSVAGSPLSPGPVRAPLSRSHTLSGGCGGRGSKVALLPAGGALQHSRSMSMPVAHSPPAATSPGSLSSSSGHGSGSYPPPPGPHPPLPHPLHHGPGQRPSSGSASASGSPSDPGFMSLDEYGSSPGDLRAFCSHRSNTPESIAETPPARDGGGGGEFYGYMTMDRPLSHCGRSYRRVSGDAAQDLDRGLRKRTYSLTTPARQRPVPQPSSASLDEYTLMRATFSGSAGRLCPSCPASSPKVAYHPYPEDYGDIEIGSHRSSSSNLGADDGYMPMTPGAALAGSGSGSCRSDDYMPMSPASVSAPKQILQPRAAAAAAAAVPSAGPAGPAPTSAAGRTFPASGGGYKASSPAESSPEDSGYMRMWCGSKLSMEHADGKLLPNGDYLNVSPSDAVTTGTPPDFFSAALHPGGEPLRGVPGCCYSSLPRSYKAPYTCGGDSDQYVLMSSPVGRILEEERLEPQATPGPSQAASAFGAGPTQPPHPVVPSPVRPSGGRPEGFLGQRGRAVRPTRLSLEGLPSLPSMHEYPLPPEPKSPGEYINIDFGEPGARLSPPAPPLLASAASSSSLLSASSPASSLGSGTPGTSSDSRQRSPLSDYMNLDFSSPKSPKPGAPSGHPVGSLDGLLSPEASSPYPPLPPRPSASPSSSLQPPPPPPAPGELYRLPPASAVATAQGPGAASSLSSDTGDNGDYTEMAFGVAATPPQPIAAPPKPEAARVASPTSGVKRLSLMEQVSGVEAFLQASQPPDPHRGAKVIRADPQGGRRRHSSETFSSTTTVTPVSPSFAHNPKRHNSASVENVSLRKSSEGGVGVGPGGGDEPPTSPRQLQPAPPLAPQGRPWTPGQPGGLVGCPGSGGSPMRRETSAGFQNGLNYIAIDVREEPGLPPQPQPPPPPLPQPGDKSSWGRTRSLGGLISAVGVGSTGGGCGGPGPGALPPANTYASIDFLSHHLKEATIVKE

SEQ ID NO: 62525 - protein, 17 aa, Homo sapiens
RSSRISRSKRSSWPPGN

SEQ ID NO: 62526 - protein, 161 aa, Homo sapiens
LRTCSEAEEPVLEEMVMGLGVLLLVFVLGLGLTPPTLAQDNSRYTHFLTQHYDAKPQGRDDRYCESIMRRRGLTSPCKDINTFIHGNKRSIKAICENKNGNPHRENLRISKSSFQVTTCKLHGGSPWPPCQYRATAGFRNVVVACENGLPVHLDQSIFRRP

SEQ ID NO: 62527 - protein, 161 aa, Homo sapiens
IKLKWTSSIAQLLWRQAAHNKELRVQQMVSMGIGNKPFLDIKALGERTLSALLTGRAARTRASVAVSSFEHAGPSLPGLSPGACSLPARVEEEAWDLDVKQISLAPETLDSSGDVSPGPRNSPSLQPPHPGSSTPTLASRGILGLSRQSHARALSDPTTPL

SEQ ID NO: 62528 - protein, 17 aa, Homo sapiens
RRMKGPSWGLLATSAVS

SEQ ID NO: 62529 - protein, 87 aa, Homo sapiens
KHLEEKLRLDMGWSSRPENIPPKEFLFKHPKRTATLSMRNTSVMKKGGIFSAEFLKVFFPSLLLSHLLAIGLGIYIGRRLTTSTSTF

SEQ ID NO: 62530 - protein, 73 aa, Homo sapiens
RVNCLAPGLIKTSFSRMLWMDKEKEESMKETLRIRRLGEPEDSLGIVSFLCSEDASYLTGETVMVGGGTPSRL

SEQ ID NO: 62531 - protein, 46 aa, Homo sapiens
LIRDPFGHHVARNVALTTFLKRREAWEQQQGAVAKRRRALNSILED

SEQ ID NO: 62532 - protein, 56 aa, Homo sapiens
IYNSGEFQKAKKHVLPNSNNVGITDCLLEESSPKLPRQSPGSQSKDLLSSERESLL

SEQ ID NO: 62533 - protein, 26 aa, Homo sapiens
LKRMLNFNVPHIKNSTGEPVWKAFTL

SEQ ID NO: 62534 - protein, 133 aa, Homo sapiens
KRKDPFSPDKKKPVVVSGPYIVYMLQDLDILEDWTTIRKAMATLGPHRVKTEPPVKLEKHLHSARSEEGRLYYDGEWYIRGQTICIDKKDECPTSAVITTINHDEVWFKRPDGSKSKLYISQLQKGKYSIKHS

SEQ ID NO: 62535 - protein, 31 aa, Homo sapiens
KFSAYRRQRRPEGVAVRPQGVGPAAEPTLPG

SEQ ID NO: 62536 - protein, 589 aa, Homo sapiens
LTRWSRTMSPAPRPPRCLLLPLLTLGTALASLGSAQSSSFSPEAWLQQYGYLPPGDLRTHTQRSPQSLSAAIAAMQKFYGLQVTGKADADTMKAMRRPRCGVPDKFGAEIKANVRRKRYAIQGLKWQHNEITFCIQNYTPKVGEYATYEAIRKAFRVWESATPLRFREVPYAYIREGHEKQADIMIFFAEGFHGDSTPFDGEGGFLAHAYFPGPNIGGDTHFDSAEPWTVRNEDLNGNDIFLVAVHELGHALGLEHSSDPSAIMAPFYQWMDTENFVLPDDDRRGIQQLYGGESGFPTKMPPQPRTTSRPSVPDKPKNPTYGPNICDGNFDTVAMLRGEMFVFKERWFWRVRNNQVMDGYPMPIGQFWRGLPASINTAYERKDGKFVFFKGDKHWVFDEASLEPGYPKHIKELGRGLPTDKIDAALFWMPNGKTYFFRGNKYYRFNEELRAVDSEYPKNIKVWEGIPESPRGSFMGSDEVFTYFYKGNKYWKFNNQKLKVEPGYPKSALRDWMGCPSGGRPDEGTEEETEVIIIEVDEEGGGAVSAAAVVLPVLLLLLVLAVGLAVFFFRRHGTPRRLLYCQRSLLDKV

SEQ ID NO: 62537 - protein, 411 aa, Homo sapiens
KCSLKMADGNEDLRADDLPGPAFESYESMELACPAERSGHVAVSDGRHMFVWGGYKSNQVRGLYDFYLPREELWIYNMETGRWKKINTEGDVPPSMSGSCAVCVDRVLYLFGGHHSRGNTNKFYMLDSRSTDRVLQWERIDCQGIPPSSKDKLGVWVYKNKLIFFGGYGYLPEDKVLGTFEFDETSFWNSSHPRGWNDHVHILDTETFTWSQPITTGKAPSPRAAHACATVGNRGFVFGGRYRDARMNDLHYLNLDTWEWNELIPQGICPVGRSWHSLTPVSSDHLFLFGGFTTDKQPLSDAWTYCISKNEWIQFNHPYTEKPRLWHTACASDEGEVIVFGGCANNLLVHHRAAHSNEILIFSVQPKSLVRLSLEAVICFKEMLANSWNCLPKHLLHSVNQRFGSNNTSGS

SEQ ID NO: 62538 - protein, 17 aa, Homo sapiens
KVIICSFWYHRQFEENT

SEQ ID NO: 62539 - protein, 47 aa, Homo sapiens
IDQVAAALWDQALYKLYSAAATHRHLYHQAFPTPKSESTEQSEKKKM

SEQ ID NO: 62540 - protein, 59 aa, Homo sapiens
RKLVEQLKMEANIDRIKVSKAAADLMAYCEAHAKEDPLLTPVPASENPFREKKFFCAIL

SEQ ID NO: 62541 - protein, 43 aa, Homo sapiens
LETEITNKSALKLYENLGFVRDKRLFRYYLNGVDALRLKLWLR

SEQ ID NO: 62542 - protein, 36 aa, Homo sapiens
RSASHTKTRGTSKIDSKTHYKSGSRYEKELGKKRTT

SEQ ID NO: 62543 - protein, 51 aa, Homo sapiens
VNWVLLPCRHTCLCDGCVKYFQQCPMCRQFVQESFALCSQKEQDKDKPKTL

SEQ ID NO: 62544 - protein, 16 aa, Homo sapiens
VPRRNFLLEKMKKQYL

SEQ ID NO: 62545 - protein, 14 aa, Homo sapiens
VTLACCNPLPPGFK

SEQ ID NO: 62546 - protein, 177 aa, Homo sapiens
LMSYANDAFPEEYVPTVFDHYAVTVTVGGKQHLLGLYDTAGQEDYNQLRPLSYPNTDVFLICFSVVNPASYHNVQEEWVPELKDCMPHVPYVLIGTQIDLRDDPKTLARLLYMKEKPLTYEHGVKLAKAIGAQCYLECSALTQKGLKAVFDEAILTIFHPKKKKKRCSEGHSCCSII

SEQ ID NO: 62547 - protein, 38 aa, Homo sapiens
IFDIDEAEEGVKDLQIESNVRESAEPEDDLDIMLGNKK

SEQ ID NO: 62548 - protein, 597 aa, Homo sapiens
VAFTDTERLIGDAAKNQVAMNPTNTIFDAKRLIGRKFEDATVQSDMKHWPFRVVSEGGKPKVQVEYKGETKTFFPEEISSMVLTKMKEIAEAYLGGKVHSAVITVPAYFNDSQRQATKDAGTITGLNVLRIINEPTAAAIAYGLDKKGCAGGEKNVLIFDLGGGTFDVSILTIEDGIFEVKSTAGDTHLGGEDFDNRMVSHLAEEFKRKHKKDIGPNKRAVRRLRTACERAKRTLSSSTQASIEIDSLYEGVDFYTSITRARFEELNADLFRGTLEPVEKALRDAKLDKGQIQEIVLVGGSTRIPKIQKLLQDFFNGKELNKSINPDEAVAYGAAVQAAILIGDKSENVQDLLLLDVTPLSLGIETAGGVMTPLIKRNTTIPTKQTQTFTTYSDNQSSVLVQVYEGERAMTKDNNLLGKFDLTGIPPAPRGVPQIEVTFDIDANGILNVTAADKSTGKENKITITNDKGRLSKDDIDRMVQEAERYKSEDEANRDRVAAKNALESYTYNIKQTVEDEKLRGKISEQDKNKILDKCQEVINWLDRNQMAEKDEYEHKQKELERVCNPIISKLYQGGPGGGSGGGGSGASGGPTIEEVD

SEQ ID NO: 62549 - protein, 38 aa, Homo sapiens
VYNIGPDKVIQATTYFLQKPVPGFEELKDETSAEPATD

SEQ ID NO: 62550 - protein, 57 aa, Homo sapiens
IVIGDEHISFTTSKIGSLIDVNQSKDPEGLRVFYYLVQDLNCLVFSLIGLHFKINPI

SEQ ID NO: 62551 - protein, 529 aa, Homo sapiens
LAKLERLKQQNEDLRRMAESLRIPEGPIDQGPAIGRVRVLEEQLVKAKEQIENYKKQTRNGLGKDHEILRRRIENGAKELWFFLQSELKKLKNLEGNELQRHADEFLLDLGHHERSIMTDLYYLSQTDGAGDWREKEAKDLTELVQRRITYLQNPKDCSKAKKLVCNINKGCGYGCQLHHVVYCFMIAYGTQRTLILESQNWRYATGGWETVFRPVSETCTDRSGISTGHWSGEVKDKNVQVVELPIVDSLHPRPPYLPLAVPEDLADRLVRVHGDPAVWWVSQFVKYLIRPQPWLEKEIEEATKKLGFKHPVIGVHVRRTDKVGTEAAFHPIEEYMVHVEEHFQLLARRMQVDKKRVYLATDDPSLLKEAKTKYPNYEFISDNSISWSAGLHNRYTENSLRGVILDIHFLSQADFLVCTFSSQVCRVAYEIMQTLHPDASANFHSLDDIYYFGGQNAHNQIAIYAHQPRTADEIPMEPGDIIGVAGNHWDGYSKGVNRKLGRTGLYPSYKVREKIETVKYPTYPEAEK

SEQ ID NO: 62552 - protein, 733 aa, Homo sapiens
LEENILLLRKQLNCLRRRDAGLLNQLQELDKQISDLRLDVEKTSEEHLETDSRPSSGFYELSDGASGSLSNSSNSVFSECLSSCHSSTCFCSPLEATLSLSDGCPKSADLIGLLEYKEGHCEDQASGAVCRSLSTPQFNSLDVIADVNPKYQCDLVSKNGNDVYRYPSPLHAVAVQSPMFLLCLTGNPLREEDRLGNHASDICGGSELDAVKTDSSLPSPSSLWSASHPSSSKKMDGYILSLVQKKTHPVRTNKPRTSVNADPTKGLLRNGSVCVRAPGGVSQGNSVNLKNSKQACLPSGGIPSLNNGTFSPPKQWSKESKAEQAESKRVPLPEGCPSGAASDLQSKHLPKTAKPASQEHARCSAIGTGESPKESAQLSGASPKESPSRGPAPPQENKVVQPLKKMSQKNSLQGVPPATPPLLSTAFPVEERPALDFKSEGSSQSLEEAHLVKAQFIPGQQPSVRLHRGHRNMGVVKNSSLKHRGPALQGLENGLPTVREKTRAGSKKCRFPDDLDTNKKLKKASSKGRKSGGGPEAGVPGRPAGGGHRAGSRAHGHGREAVVAKPKHKRTDYRRWKSSAEISYEEALRRARRGRRENVGLYPAPVPLPYASPYAYVASDSEYSAECESLFHSTVVDTSEDEQSNYTTNCFGDSESSVSEGEFVGESTTTSDSEESGGLIWSQFVQTLPIQTVTAPDLHNHPAKTFVKIKASHNLKKKILRFRSGSLKLMTTV

SEQ ID NO: 62553 - protein, 77 aa, Homo sapiens
IRKFAMKEMGTPDVRIDTRLNKAVWAKGIRNVLYRIHVRLSRKRNEDEDSPNKLYTLVTYVTVTTFKNLQTVNVDEN

SEQ ID NO: 62554 - protein, 43 aa, Homo sapiens
IRPPQLFCLRIRALTNLPAGAPSPSLPAKMRSLGCLRVFSSLG

SEQ ID NO: 62555 - protein, 948 aa, Homo sapiens
LVVSIVGSGLIKAMAPAEILNGKEISAQIRARLKNQVTQLKEQVPGFTPRLAILQVGNRDDSNLYINVKLKAAEEIGIKATHIKLPRTTTESEVMKYITSLNEDSTVHGFLVQLPLDSENSINTEEVINAIAPEKDVDGLTSINAGKLARGDLNDCFIPCTPKGCLELIKETGVPIAGRHAVVVGRSKIVGAPMHDLLLWNNATVTTCHSKTAHLDEEVNKGDILVVATGQPEMVKGEWIKPGAIVIDCGINYVPDDKKPNGRKVVGDVAYDEAKERASFITPVPGGVGPMTVAMLMQSTVESAKRFLEKFKPGKWMIQYNNLNLKTPVPSDIDISRSCKPKPIGKLAREIGLLSEEVELYGETKAKVLLSALERLKHRPDGKYVVVTGITPTPLGEGKSTTTIGLVQALGAHLYQNVFACVRQPSQGPTFGIKGGAAGGGYSQVIPMEEFNLHLTGDIHAITAANNLVAAAIDARIFHELTQTDKALFNRLVPSVNGVRRFSDIQIRRLKRLGIEKTDPTTLTDEEINRFARLDIDPETITWQRVLDTNDRFLRKITIGQAPTEKGHTRTAQFDISVASEIMAVLALTTSLEDMRERLGKMVVASSKKGEPVSAEDLGVSGALTVLMKDAIKPNLMQTLEGTPVFVHAGPFANIAHGNSSIIADRIALKLVGPEGFVVTEAGFGADIGMEKFFNIKCRYSGLCPHVVVLVATVRALKMHGGGPTVTAGLPLPKAYIQENLELVEKGFSNLKKQIENARMFGIPVVVAVNAFKTDTESELDLISRLSREHGAFDAVKCTHWAEGGKGALALAQAVQRAAQAPSSFQLLYDLKLPVEDKIRIIAQKIYGADDIELLPEAQHKAEVYTKQGFGNLPICMAKTHLSLSHNPEQKGVPTGFILPIRDIRASVGAGFLYPLVGTMSTMPGLPTRPCFYDIDLDPETEQVNGLF

SEQ ID NO: 62556 - protein, 714 aa, Homo sapiens
KMAKPSHSSYVLQQLNNQREWGFLCDCCIAIDDIYFQAHKAVLAACSSYFRMFFMNHQHSTAQLNLSNMKISAECFDLILQFMYLGKIMTAPSSFEQFKVAMNYLQLYNVPDCLEDIQDADCSSSKCSSSASSKQNSKMIFGVRMYEDTVARNGNEANRWCAEPSSTVNTPHNREADEESLQLGNFPEPLFDVCKKSSVSKLSTPKERVSRRFGRSFTCDSCGFGFSCEKLLDEHVLTCTNRHLYQNTRSYHRIVDIRDGKDSNIKAEFGEKDSSKTFSAQTDKYRGDTSQAADDSASTTGSRKSSTVESEIASEEKSRAAERKRIIIKMEPEDIPTDELKDFNIIKVTDKDCNESTDNDELEDEPEEPFYRYYVEEDVSIKKSGRKTLKPRMSVSADERGGLENMRPPNNSSPVQEDAENASCELCGLTITEEDLSSHYLAKHIENICACGKCGQILVKGRQLQEHAQRCGEPQDLTMNGLGNTEEKMDLEENPDEQSEIRDMFVEMLDDFRDNHYQINSIQKKQLFKHSACPFRCPNCGQRFETENLVVEHMSSCLDQDMFKSAIMEENERDHRRKHFCNLCGKGFYQRCHLREHYTVHTKEKQFVCQTCGKQFLRERQLRLHNDMHKGMARYVCSICDQGNFRKHDHVRHMISHLSAGETICQVCFQIFPNNEQLEQHMDVHLYTCGICGAKFNLRKDMRSHYNAKHLKRT

SEQ ID NO: 62557 - protein, 645 aa, Homo sapiens
KMAKPSHSSYVLQQLNNQREWGFLCDCCIAIDDIYFQAHKAVLAACSSYFRMFFMNHQHSTAQLNLSNMKISAECFDLILQFMYLGKIMTAPSSFEQFKVAMNYLQLYNVPDCLEDIQDADCSSSKCSSSASSKQNSKMIFGVRMYEDTVARNGNEANRWCAEPSSTVNTPHNREADEESLQLGNFPEPLFDVCKKSSVSKLSTPKERVSRRFGRSFTCDSCGFGFSCEKLLDEHVLTCTNRHLYQNTRSYHRIVDIRDGKDSNIKAEFGEKDSSKTFSAQTDKYRGDTSQAADDSASTTGSRKSSTVESEIASEEKSRAAERKRIIIKMEPEDIPTDELKDFNIIKVTDKDCNESTDNDELEDEPEEPFYRYYVEEDVSIKKSGRKTLKPRMSVSADERGGLENMRPPNNSSPVQEDAENASCELCGLTITEEDLSSHYLAKHIENICACGKCGQILVKGRQLQEHAQRCGEPQDLTMNGLGNTEEKMDLEENPDEQSEIRDMFVEMLDDFRDNHYQINSIQKKQLFKHSACPFRCPNCGQRFETENLVVEHMSSCLDQDMFKSAIMEENERDHRRKHFCNLCGKGFYQRCHLREHYTVHTKEKQFVCQTCGKQFLRERQLRLHNDMHKGMASGEIGPSKPVEK

SEQ ID NO: 62558 - protein, 468 aa, Homo sapiens
RSEFKMASSPAVLRASRLYQWSLKSSAQFLGSPQLRQVGQIIRVPARMAATLILEPAGRCCWDEPVRIAVRGLAPEQPVTLRASLRDEKGALFQAHARYRADTLGELDLERAPALGGSFAGLEPMGLLWALEPEKPLVRLVKRDVRTPLAVELEVLDGHDPDPGRLLCQTRHERYFLPPGVRREPVRVGRVRGTLFLPPEPGPFPGIVDMFGTGGGLLEYRASLLAGKGFAVMALAYYNYEDLPKTMETLHLEYFEEAMNYLLSHPEVKGPGVGLLGISKGGELCLSMASFLKGITAAVVINGSVANVGGTLHYKGETLPPVGVNRNRIKVTKDGYADIVDVLNSPLEGPDQKSFIPVERAESTFLFLVGQDDHNWKSEFYANEACKRLQAHGRRKPQIICYPETGHYIEPPYFPLCRASLHALVGSPIIWGGEPRAHAMAQVDAWKQLQTFFHKHLGGHEGTIPSKV

SEQ ID NO: 62559 - protein, 147 aa, Homo sapiens
LSMLANCEKLSLSTNCIEKIANLNGLKNLRILSLGRNNIKNLNGLEAVGDTLEELWISYNFIEKLKGIHIMKKLKILYMSNNLVKDWAEFVKLAELPCLEDLVFVGNPLEEKHSAENNWIEEATKRVPKLKKLDGTPVIKGDEEEDN

SEQ ID NO: 62560 - protein, 44 aa, Homo sapiens
ILKTLAESLAPFKGLIINCLSGRPPMRLHLCGYTLLVWTLSKFR

SEQ ID NO: 62561 - protein, 257 aa, Homo sapiens
MSIMAPAPTVLVPTVSMVGKHLGARKDHPGLKAKENDENCGPTTTVFVGNISEKASDMLIRQLLAKCGLVLSWKRVQGASGKLQAFGFCEYKEPESTLRALRLLHDLQIGEKKLLVKVDAKTKAQLDEWKAKKKASNGNARPETVTNDDEEALDEETKRRDQMIKGAIEVLIREYSSELNAPSQESDSHPRKKKKEKKEDIFRRFPVAPLIPYPLITKEDINAIEMEEDKRDLISREISKFRDTHKVVFLSFHLIPI

SEQ ID NO: 62562 - protein, 178 aa, Homo sapiens
IGLSLKLGASNSPGQPNSVKRKKLPVDSVFNKFEDEDSDDVPRKRKLVPLDYGEDDKNATKGTVNTEEKRKHIKSLIEKIPTAKPELFAYPLDWSIVDSILMERRIRPWINKKIIEYIGEEEATLVDFVCSKVMAHSSPQSILDDVAMVLDEEAEVFIVKMWRLLIYETEAKKIGLVK

SEQ ID NO: 62563 - protein, 403 aa, Homo sapiens
VRIAVRGLAPEQPVTLRASLRDEKGALFQAHARYRADTLGELDLERAPALGGSFAGLEPMGLLWALEPEKPLVRLVKRDVRTPLAVELEVLDGHDPDPGRLLCRVRHERYFLPPGVRREPVRAGRVRGTLFLPPEPGPFPGIVDMFGTGGGLLEYRASLLAGKGFAVMALAYYNYEDLPKTMETLHLEYFEEAVNYLLSHPEVKGPGVGLLGISKGGELCLSMASFLKGITAAVVINGSVANVGGTLRYKGETLPPVGVNRNRIKVTKDGYADIVDVLNSPLEGPDQKSFIPVERAESTFLFLVGQDDHNWKSEFYANEACKRLQAHGRRKPQIICYPETGHYIEPPYFPLCRASLHALVGSPIIWGGEPRAHAMAQVDAWKQLQTFFHKHLGGHEGTIPSKV

SEQ ID NO: 62564 - protein, 5 aa, Homo sapiens
ITRCC

SEQ ID NO: 62565 - protein, 105 aa, Homo sapiens
IRLTDSCVQRLLEITEGSEFLRLQVEGGGCSGFQYKFSLDTVINPDDRVFEQGGARVVVDSDSLAFVKGAQVDFSQELIRSSFQVLNNPQAQQGCSCGSSFSIKL

SEQ ID NO: 62566 - protein, 329 aa, Homo sapiens
KRGGGPRSSEEMARETLGLLRQIITDHRWSNAGELMELIRREGRRMTAAQPSETTVGNMVRRVLKIIREEYGRLHGRSDESDQQESLHKLLTSGGLNEDFSFHYAQLQSNIIEAINELLVELEGTMENIAAQALEHIHSNEVIMTIGFSRTVEAFLKEAARKRKFHVIVAECAPFCQGHEMAVNLSKAGIETTVMTDAAIFAVMSRVNKVIIGTKTILANGALRAVTGTHTLALAAKHHSTPLIVCAPMFKLSPQFPNEEDSFHKFVAPEEVLPFTEGDILEKVSVHCPVFDYVPPELITLFISNIGGNAPSYIYRLMSELYHPDDHVL

SEQ ID NO: 62567 - protein, 142 aa, Homo sapiens
LTGLPSSALTVEELKYADIRNLGAMIAPLHFLEVKLGKRPQPVKSELDEEEERRKRRREKNKVAAARCRNKKKERTEFLQRESERLELMNAELKTQIEELKQERQQLILMLNRHRPTCIVRTDSVKTPESEGNPLLEQLEKK

SEQ ID NO: 62568 - protein, 199 aa, Homo sapiens
LDKFSDSTFLLPSRPAQRGYHTRLNRLPGAAARCLRKGRRRLVGKETSINTLGTERISHIISDPRQKEKNKALASDFPHISACAHEFNPLSPLYSLDVLADASHRRCSPAHCSARQANVHWGPPCSRDIKRKRKPVATASLSSPSAVHMDAVEPTTPASQAPKSPSSEWLVRTSAAEKATDATTATFFKMPQEKSPGYS

SEQ ID NO: 62569 - protein, 31 aa, Homo sapiens
ISSINKRLLVLEAFQVSHPCRQPDTPTELRA

SEQ ID NO: 62570 - protein, 71 aa, Homo sapiens [sequence omitted]

SEQ ID NO: 62571 - protein, 64 aa, Homo sapiens
IDLGLQLANFFAFTNSSLNPVIYVFVGRLFRTKVWELYKQCTPKSLAPISSSHRKEIFQLFWRN

SEQ ID NO: 62572 - protein, 35 aa, Homo sapiens
ILAYGHRKCIFGFVFLSLASNLGFWLRRLLNNDLS

SEQ ID NO: 62573 - protein, 286 aa, Homo sapiens
TMPFPVTTQGSQQTQPPQKHYGITSPISLAAPKETDCVLTQKLIETLKPFGVFEEEEELQRRILILGKLNNLVKEWIREISESKNLPQSVIENVGGKIFTFGSYRLGVHTKGADIDALCVAPRHVDRSDFFTSFYDKLKLQEEVKDLRAVEEAFVPVIKLCFDGIEIDILFARLALQTIPEDLDLRDDSLLKNLDIRCIRSLNGCRVTDEILHLVPNIDNFRLTLRAIKLWAKRHNIYSNILGFLGGVSWAMLVARTCQLYPNAIASTLVHKFFLVFSKWYVFRLY

SEQ ID NO: 62574 - protein, 728 aa, Homo sapiens
KHYGITSPISLAAPKETDCVLTQKLIETLKPFGVFEEEEELQRRILILGKLNNLVKEWIREISESKNLPQSVIENVGGKIFTFGSYRLGVHTKGADIDALCVAPRHVDRSDFFTSFYDKLKLQEEVKDLRAVEEAFVPVIKLCFDGIEIDILFARLALQTIPEDLDLRDDSLLKNLDIRCIRSLNGCRVTDEILHLVPNIDNFRLTLRAIKLWAKRHNIYSNILGFLGGVSWAMLVARTCQLYPNAIASTLVHKFFLVFSKWEWPNPVLLKQPEECNLNLPVWDPRVNPSDRYHLMPIITPAYPQQNSTYNVSVSTRMVMVEEFKQGLAITDEILLSKAEWSKLFEAPNFFQKYKHYIVLLASAPTEKQRLEWVGLVESKIRILVGSLEKNEFITLAHVNPQSFPAPKENPDKEEFRTMWVIGLVFKKTENSENLSVDLTYDIQSFTDTVYRQAINSKMFEVDMKIAAMHVKRKQLHQLLPNHVLQKKKKHSTEGVKLTALNDSSLDLSMDSDNSMSVPSPTSATKTSPLNSSGSSQGRNSPAPAVTAASVTNIQATEVSVPQVNSSESSGGTSSESIPQTATQPAISPPPKPTVSRVVSSTRLVNPPPRSSGNAATSGNAATKIPTPIVGVKRTSSPHKEESPKKTKTEEDETSEDANCLALSGHDKTEAKEQLDTETSTTQSETIQTAASLLASQKTSSTDLSDIPALPANPIPVIKNSIKLRLNR

SEQ ID NO: 62575 - protein, 266 aa, Homo sapiens
LQDTFVSAMKTLYLADTFPTNFRDSAGAMKQINDYVAKQTKGKIVDLLKNLDSNAVVIMVNYIFFKAKWETSFNHKGTQEQDFYVTSETVVRVPMMSREDQYHYLLDRNLSCRVVGVPYQGNATALFILPSEGKMQQVENGLSEKTLRKWLKMFKKRQLELYLPKFSIEGSYQLEKVLPSLGISNVFTSHADLSGISNHSNIQVSEMVHKAVVEVDESGTRAAAATGTIFTFRSARLNSQRLVFNRPFLMFIVDNNILFLGKVNRP

SEQ ID NO: 62576 - protein, 192 aa, Homo sapiens
MWSSDEKKDIDHETVVEEQIIGENSPPDYSEYMTGKKLPPGGIPGIDLSDPKQLAEFARMKPRKIKEDDAPRTIACPHKGCTKMFRDNSAMRKHLHTHGPRVHVCAECGKAFVESSKLKRHQLVHTGEKPFQCTFEGCGKRFSLDFNLRTHVRIHTGDRPYVCPFDGCNKKFAQSTNLKSHILTHAKAKNNQ

SEQ ID NO: 62577 - protein, 666 aa, Homo sapiens
LQSTSEAESEASMSEASSEDLVPPLEAGAAPYREEEEAAKKKKEKKKKSKGLANVFCVFTKGKKKKGQPSSAEPEDAAGSRQGLDGPPPTVEELKAALERGQLEAARPLLALERELAAAAAAGGVSEEELVRRQSKVEALYELLRDQVLGVLRRPLEAPPERLRQALAVVAEQEREDRQAAAAGPGTSGLAATRPRRWLQLWRRGVAEAAEERMGQRPAAGAEVPESVFLHLGRTMKEDLEAVVERLKPLFPAEFGVVAAYAESYHQHFAAHLAAVAQFELCERDTYMLLLWVQNLYPNDIINSPKLVGELQGMGLGSLLPPRQIRLLEATFLSSEAANVRELMDRALELEARRWAEDVPPQRLDGHCHSELAIDIIQITSQAQAKAESITLDLGSQIKRVLLVELPAFLRSYQRAFNEFLERGKQLTNYRANVIANINNCLSFRMSMEQNWQVPQDTLSLLLGPLGELKSHGFDTLLQNLHEDLKPLFKRFTHTRWAAPVETLENIIATVDTRLPEFSELQGCFREELMEALHLHLVKEYIIQLSKGRLVLKTAEQQQQLAGYILANADTIQHFCTQHGSPATWLQPALPTLAEIIRLQDPSAIKIEVATYATCYPDFSKGHLSAILAIKGNLSNSEVKRIRSILDVSMGAQEPSRPLFSLIKVG

SEQ ID NO: 62578 - protein, 44 aa, Homo sapiens
KKEKMSSRLAGAFRVLWRAVSTASIRRHIQVAPRPLQAGPAMGP

SEQ ID NO: 62579 - protein, 29 aa, Homo sapiens
LGPEDLRARTQLRNEFIGLQLLDVLARLR

SEQ ID NO: 62580 - protein, 153 aa, Homo sapiens
LEGAWPVTLGDAQALKPLKFSSNQPPAAGSSRQDAKDPTSLLGVLQAEADSTSEGLEDAVHSRGARPPAAGPGGDEDEDEEDTAPESALDTSLDKSFSEDAVTDSSGSGTLPRARGRASKGTGKRRKKRPSRSQEEVPPDSDDNKTKKLCVIQ

SEQ ID NO: 62581 - protein, 701 aa, Homo sapiens
IGNYRLLKTIGKGNFAKVKLARHILTGREVAIKIIDKTQLNPTSLQKLFREVRIMKILNHPNIVKLFEVIETEKTLYLIMEYASGGEVFDYLVAHGRMKEKEARSKFRQIVSAVQYCHQKRIVHRDLKAENLLLDADMNIKIADFGFSNEFTVGGKLDTFCGSPPYAAPELFQGKKYDGPEVDVWSLGVILYTLVSGSLPFDGQNLKELRERVLRGKYRIPFYMSTDCENLLKRFLVLNPIKRGTLEQIMKDRWINAGHEEDELKPFVEPELDISDQKRIDIMVGMGYSQEEIQESLSKMKYDEITATYLLLGRKSSELDASDSSSSSNLSLAKVRPSSDLNNSTGQSPHHKVQRSVSSSQKQRRYSDHAGPAIPSVVAYPKRSQTSTADSDLKEDGISSRKSSGSAVGGKGIAPASPMLGNASNPNKADIPERKKSSTVPSSNTASGGMTRRNTYVCSERTTADRHSVIQNGKENSTIPDQRTPVASTHSISSAATPDRIRFPRGTASRSTFHGQPRERRTATYNGPPASPSLSHEATPLSQTRSRGSTNLFSKLTSKLTRRNMSFRFIKRLPTEYERNGRYEGSSRNVSAEQKDENKEAKPRSLRFTWSMKTTSSMDPGDMMREIRKVLDANNCDYEQRERFLLFCVHGDGHAENLVQWEMEVCKLPRLSLNGVRFKRISGTSIAFKNIASKIANELKL

SEQ ID NO: 62582 - protein, 60 aa, Homo sapiens
LNAEEMADFYKEFLSKNFQKHMYYNRDWYKRNFAITFFMGKVALERIWNKLKQKQKKRSN

SEQ ID NO: 62583 - protein, 431 aa, Homo sapiens
LARRCSGDPSPGCRRRRRGDPLPGCRRRRLGRPGTCPPAAAPDLEDQDIMGAFLDKPKMEKHNAQGQGNGLRYGLSSMQGWRVEMEDAHTAVIGLPSGLESWSFFAVYDGHAGSQVAKYCCEHLLDHITNNQDFKGSAGAPSVENVKNGIRTGFLEIDEHMRVMSEKKHGADRSGSTAVGVLISPQHTYFINCGDSRGLLCRNRKVHFFTQDHKPSNPLEKERIQNAGGSVMIQRVNGSLAVSRALGDFDYKCVHGKGPTEQLVSPEPEVHDIERSEEDDQFIILACDGIWDVMGNEELCDFVRSRLEVTDDLEKVCNEVVDTCLYKGSRDNMSVILICFPNAPKVSPEAVKKEAELDKYLECRVEEIIKKQGEGVPDLVHVMRTLASENIPSLPPGGELASKRNVIEAVYNRLNPYKNDDTDSTSTDDMW

SEQ ID NO: 62584 - protein, 16 aa, Homo sapiens
IHKVNSMVAYKIPVND

SEQ ID NO: 62585 - protein, 26 aa, Homo sapiens
LTVALLASYSVHLLLSMCIQTAYLGP

SEQ ID NO: 62586 - protein, 380 aa, Homo sapiens
RVGPQYQAVVPDFDPAKLARRSQERDNLGMLVWSPNQNLSEAKLDEYIAIAKEKHGYNMEQALGMLFWHKHNIEKSLADLPNFTPFPDEWTVEDKVLFEQAFSFHGKTFHRIQQMLPDKSIASLVKFYYSWKKTRTKTSVMDRHARKQKREREESEDELEEANGNNPIDIEVDQNKESKKEVPPTETVPQVKKEKHSTQAKNRAKRKPPKGMFLSQEDVEAVSANATAATTVLRQLDMELVSVKRQIQNIKQTNSALKEKLDGGIEPYRLPEVIQKCNARWTTEEQLLAVQAIRKYGRDFQAISDVIGNKSVVQVKNFFVNYRRRFNIDEVLQEWEAEHGKEETNGPSNQKPVKSPDNSIKMPEEEDEAPVLDVRYASAS

SEQ ID NO: 62587 - protein, 339 aa, Homo sapiens
TELWRNMKFGTIFCGRMRNLEKNMFTKEALALAWRYFLPPYTFQIRVGALYLLYGLYNTQLCQPKQKIRVALKDWDEVLKFQQDLVNAQHFDAAYIFRKLRLDRAFHFTAMPKLLSYRMKKKIHRAEVTEEFKDPSDRVMKLITSDVLEEMLNVHDHYQNMKHVISVDKSKPDKALSLIKDDFFDNIKNIVLEHQQWHKDRKNPSLKSKTNDGEEKMEGNSQETERCERAESLAKIKSKAFSVVIQASKSRRHRQVKLDSSDSDSASGQGQVKATRKKEKKERLKPAGRKMSLRNKGNVQNIHKEDKPLSLSMPVITEEEENESLSGTEFTASKKRRKH

SEQ ID NO: 62588 - protein, 16 aa, Homo sapiens
KGSCLGAGPTTRCLPA

SEQ ID NO: 62589 - protein, 79 aa, Homo sapiens
TDPAKTLGTPLCPRMEDVPLLEPLICKKIAHERLTVLIFLEDCIVTACQEGFICTWGRPGKVGSLSSPSQASSPGGTVV

SEQ ID NO: 62590 - protein, 48 aa, Homo sapiens
LLSIQALLSAPNPDDPLANDVVETWKTHEAQAIETARAATRLYAMNNI

SEQ ID NO: 62591 - protein, 11 aa, Homo sapiens
KYTFHQPTHEG

SEQ ID NO: 62592 - protein, 60 aa, Homo sapiens
IEDLLRKGAYAAIMEEDDEGSKFCEEDIDQILLRRTTTITIESEGKGSTFAKACSVYARG

SEQ ID NO: 62593 - protein, 125 aa, Homo sapiens
ICRAILVYCLLHYRGDENIKGFIWDLISPAENGKTKELQNHSGLSIPVPRGRKGKKVKSQSTFDIHKADWIRKYNPDTLFQDESYKKHLKHQCNKVLLRVRMLYYLRQEVIGDQAEKVLGGAIAR

SEQ ID NO: 62594 - protein, 101 aa, Homo sapiens
KEHCLVGVKGNPQGFNQGLDCDVIVAEVRSTSHKPDEIYGMIERLSPGTRKIELFGRPHNVQPNWITLGNQLDGIHLLDPDVVARFKQRYPDGIISKPKNL

SEQ ID NO: 62595 - protein, 1041 aa, Homo sapiens
LKEFKEEGEEIPRVKPEEMMDERPKTRSQEQEVLERGGRFTRSQEEARKSHLARQQQEKEMKTTSPLEEEEREIKSSQGLKEKSKSPSPPRLTEDRKKASLVALPEQTASEEETPPPLLTKEASSPPPHPQLHSEEEIEPMEGPAPAVLIQLSPPNTDADTRELLVSQHTVQLVGGLSPLSSPSDTKAESPAEKVPEESVLPLVQKSTLADYSAQKDLEPESDRSAQPLPLKIEELALAKGITEECLKQPSLEQKEGRRASHTLLPSHRLKQSADSSSSRSSSSSSSSSRSRSRSPDSSGSRSHSPLRSKQRDVAQARTHANPRGRPKMGSRSTSESRSRSRSRSRSASSNSRKSLSPGVSRDSSTSYTETKDPSSGQEVATPPVPQLQVCEPKERTSTSSSSVQARRLSQPESAEKHVTQRLQPERGSPKKCEAEEAEPPAATQPQTSETQTSHLPESERIHHTVEEKEEVTMDTSENRPENDVPEPPMPIADQVSNDDRPEGSVEDEEKKESSLPKSFKRKISVVSATKGVPAGNSDTEGGQPGRKRRWGASTATTQKKPSISITTESLKSLIPDIKPLAGQEAVVDLHADDSRISEDETERNGDDGTHDKGLKICRTVTQVVPAEGQENGQREEEEEEKEPEAEPPVPPQVSVEVALPPPAEHEVKKVTLGDTLTRRSISQQKSGVSITIDDPVRTAQVPSPPRGKISNIVHISNLVRPFTLGQLKELLGRTGTLVEEAFWIDKIKSHCFVTYSTVEEAVATRTALHGVKWPQSNPKFLCADYAEQDELDYHRGLLVDRPSETKTEEQGIPRPLHPPPPPPVQPPQHPRAEQREQERAVREQWAEREREMERRERTRSEREWDRDKVREGPRSRSRSRDRRRKERAKSKEKKSEKKEKAQEEPPAKLLDDLFRKTKAAPCIYWLPLTDSQIVQKEAERAERAKEREKRRKEQEEEEQKEREKEAERERNRQLEREKRREHSRERDRERERERERDRGDRDRDRERDRERGRERDRRDTKRHSRSRSRSTPVRDRGGRR

SEQ ID NO: 62596 - protein, 28 aa, Homo sapiens
IRTEFQARAQRPSSPALCMDQTSKCHFG

SEQ ID NO: 62597 - protein, 16 aa, Homo sapiens
LEVHVCFHEDLSARSR

SEQ ID NO: 62598 - protein, 247 aa, Homo sapiens
LTPSAPPYGAGKHAPPQAFPPFPEGHPAVLPGEDPPPYSPLTSPDSGSAPMITCRVCQSLINVEGKMHQHVVKCGVCNEATPIKNAPPGKKYVRCPCNCLLICKVTSQRIACPRPYCKRIINLGPVHPGPLSPEPQPMGVRVICGHCKNTFLWTEFTDRTLARCPHCRKVSSIGRRYPRKRCICCFLLGLLLAVTATGLAFGTWKHARRYGGIYAAWAFVILLAVLCLGRALYWACMKVSHPVQNFS

SEQ ID NO: 62599 - protein, 565 aa, Homo sapiens
LSGRDWNTLIVGKLSPWIRPDSKVEKIRRNSEAAMLQELNFGAYLGLPAFLLPLNQEDNTNLARVLTNHIHTGHHSSMFWMRVPLVAPEDLRDDIIENAPTTHTEEYSGEEKTWMWWHNFRTLCDYSKRIAVALEIGADLPSNHVIDRWLGEPIKAAILPTSIFLTNKKGFPVLSKMHQRLIFRLLKLEVQFIITGTNHHSEKEFCSYLQYLEYLSQNRPPPNAYELFAKGYEDYLQSPLQPLMDNLESQTYEVFEKDPIKYSQYQQAIYKCLLDRVPEEEKDTNVQVLMVLGAGRGPLVNASLRAAKQADRRIKLYAVEKNPNAVVTLENWQFEEWGSQVTVVSSDMREWVAPEKADIIVSELLGSFADNELSPECLDGAQHFLKDDGVSIPGEYTSFLAPISSSKLYNEVRACREKDRDPEAQFEMPYVVRLHNFHQLSAPQPCFTFSHPNRDPMIDNNRYCTLEFPVEVNTVLHGFAGYFETVLYQDITLSIRPETHSPGMFSWFPILFPIKQPITVREGQTICVRFWRCSNSKKVWYEWAVTAPVCSAIHNPTGRSYTIGL

SEQ ID NO: 62600 - protein, 79 aa, Homo sapiens
KILSDTYTVEKVEVHRLIRDRLEGAIHLQEQDMENSRQVLNSYEVLGEEFDRLVKEYTVLKQATENKRWALQEFSKVYR

SEQ ID NO: 62601 - protein, 83 aa, Homo sapiens
KKMLIKVKTLTGKEIEIDIEPTDKVERIKERVEEKEGIPPQQQRLIYSGKQMNDEKTAADYKILGGSVLHLVLALRGGGGLRQ

SEQ ID NO: 62602 - protein, 77 aa, Homo sapiens
VALATDPNILSLSGKVLPSCDLARRYGLRDVDGRPVQDYLSLSSVLSHVSGLGWLASYLPSFLRVPKWIIALYTSKF

SEQ ID NO: 62603 - protein, 22 aa, Homo sapiens
ILGQIGDNAKGPPTNVEPPTLF

SEQ ID NO: 62604 - protein, 126 aa, Homo sapiens
ITKLENMGFRVGQGLIERFTKDTARFKDELDIMKFICKDFWTTVFKKQIDNLRTNHQGIYVLQDNKFRLLTQMSAGKQYLEHASKYLAFTCGLIRGGLSNLGIKSIVTAEVSSMPACKFQVMIQKL

SEQ ID NO: 62605 - skipped

SEQ ID NO: 62606 - protein, 202 aa, Homo sapiens
IKNGSLLMVSDSERTTEGTSQQKVKEGNGKTVPGETGLPGSMKDTCKIVLATPRLHITIPRRSKRNISKLSPPRIFQTVTNGLKKNQVVQLQEWMIKSINNNTAICVEGKLIDVTNIYWHSNVIIERIEHNKLRTISGNVYILKGMIDQISMKEAGYPNYLIRKFMFGFPENWKEHIDNFLEQLRDGVSSCWPDWSRTPGYK

SEQ ID NO: 62607 - protein, 7 aa, Homo sapiens
IGFIKLD

SEQ ID NO: 62608 - protein, 107 aa, Homo sapiens
KMVNVPKTRRTFCKKCGKHQPHKVTQYKKGKDSLYAQGRRRYDRKQSGYGGQTKPIFRKKAKTTKKIVLRLECVEPNCRSKRMLAIKRCKHFELGGDKKRKGQVIQF

SEQ ID NO: 62609 - protein, 733 aa, Homo sapiens
IPGILHYIQHEWARFEMERAHWEVERAELQARIAFLQGERKGQENLKKDLVRRIKMLEYALKQERAKYHKLKYGTELNQGDLKMPTFESEETKDTEAPTAPQNSQLTWKQGRQLLRQYLQEVGYTDTILDVRSQRVRSLLGLSNSEPNGSVETKNLEQILNGGESPKQKGQEIKRSSGDVLETFNFLENADDSDEDEENDMIEGIPEGKDKHRMNKHKIGNEGLAADLTDDPDTEEALKEFDFLVTAEDGEGAGEARSSGDGTEWDKDDLSPTAEVWDVDQGLISKLKEQYKKERKGKKGVKRANRTKLYDMIADLGDDELPHIPSGIINQSRSASTRMTDHEGARAEEAEPITFPSGGGKSFIMGSDDVLLSVLGLGDLADLTVTNDADYSYDLPANKDAFRKTWNPKYTLRSHFDGVRALAFHPVEPVLVTASEDHTLKLWNLQKTVPAKKSASLDVEPIYTFRAHIGPVLSLAISSNGEQCFSGGIDATIQWWNMPSPSVDPYDTYEPNVLAGTLVGHTDAVWGLAYSGIKNQLLSCSADGTVRLWNPQEKLPCICTYNGDKKHGIPTSVDFIGCDPAHMVTSFNTGSAVIYDLETSQSLVILSSQVDSGLQSNNHINRVVSHPTLPVTITAHEDRHIKFFDNKTGKMIHSMVAHLDAVTSLAVDPNGIYLMSGSHDCSIRLWNLDSKTCVQEITAHRKKLDESIYDVAFHSSKAYIASAGADALAKVFV

SEQ ID NO: 62610 - protein, 46 aa, Homo sapiens
VTLCEKEVAANSKCAEARVVVEHGTYGNRQVLKLDTNGPFTHLIEF

SEQ ID NO: 62611 - protein, 363 aa, Homo sapiens
LVFATLELCVCILVRQLPELNPKLTGSPGVKATKPQILLEDGSRLVSAALVILSELPAVCSPEGSISILPTILYLTIGVLRETAVKLPGGQLSSTVAASLQALKGILSSPMARAEKSRTAWTDLLRSALTTILDCWDPVDETHQELDEVSLLTAITVFILSTSPEVTTIPCLQKRCIDKFKATLEIKDPVVQIKTYQLLHSIFQYPNPAVSYPYIYSLASCIMEKLQEIDKRKPENTAELEIFQEGIKVLETLVTVAEEHHRAQLVACLLPILISFLLDENSLGSATSIMRNLHDFALQNLMQIGPQYSSVFKSLVASSPALKARLEAAIKGNQESVKVKIPTSKYTKSPGKNSSIQLKTSFL

SEQ ID NO: 62612 - protein, 345 aa, Homo sapiens
IMAAATELNRPSSGDRNLERRCRPNLSREVLYEIFRSLHTLVGQLDLRDDVVKITIDWNKLQSLSAFQPALLFSALEQHILYLQPFLAKLQSPIKEENTTAVEEIGRTEMGNKNEVNDKFSIGDLQEEEKHKESDLRDVKKTQIHFDPEVVQIKAGKAEIDRRISAFIERKQAEINENNVREFCNVIDCNQENSCARTDAIFTPYPGFKSHVKVSRVVNTYGPQTRPEGIPGSGHKPNSMLRDCGNQAVEERLQNIEAHLRLQTGGPVPRDIYQRIKKLEDKILELEGISPEYFQSVSFSGKRRKVQPPQQNYSLAELDEKISALKQALLRKSREAESMATHHLP

SEQ ID NO: 62613 - protein, 45 aa, Homo sapiens
LQDLLKMNINMNKHLVTGSVQAKGGRNRRLSFSTRLHTDGRLHIL

SEQ ID NO: 62614 - protein, 25 aa, Homo sapiens
KTYKRELSHPPLYRLPLLENAETPQ

SEQ ID NO: 62615 - protein, 53 aa, Homo sapiens
RVLQDQVDELQSELEEYRAQGRVLRLPLKNSPSEEVEANSGGIEPEHDATLCY

SEQ ID NO: 62616 - protein, 8 aa, Homo sapiens
RRRKNNCK

SEQ ID NO: 62617 - protein, 24 aa, Homo sapiens
IICFRNSGFYRYMQVFSQSFRTVR

SEQ ID NO: 62618 - protein, 49 aa, Homo sapiens
IICFRNSGFYRYMQKIEARVSADEDLKLSDLLKYYLRESQAAKVILIFF

SEQ ID NO: 62619 - protein, 125 aa, Homo sapiens
RDHIKDSFHSLRDSVPSLQGEKASRAQILDKATEYIQYMRRKNHTHQQDIDDLKRQNALLEQQVRALEKARSSAQLQTNYPSSDNSLYTNAKGSTISAFDGGSDSSSESEPEEPQSRKKLRMEAS

SEQ ID NO: 62620 - protein, 44 aa, Homo sapiens
MMLDSKSKYVLDGMVDTVCEDLETDKKELAKLQTVQLDEDMQDL

SEQ ID NO: 62621 - protein, 67 aa, Homo sapiens
LEACSSVHLVRNVAPNKEMLCITFQIPASVLYKNQTRNPENHEDPPLKRQRTAEAFSDEKTQIVSNT

SEQ ID NO: 62622 - protein, 1359 aa, Homo sapiens
VLLLLPLLMLRAAALHPDELFPHGESWGDQLLQEGDDESSAVVKLANPLHFYEARFSNLYVGTNGIISTQDFPRETQYVDYDFPTDFPAIAPFLADIDTSHGRGRVLYREDTSPAVLGLAARYVRAGFPRSARFTPTHAFLATWEQVGAYEEVKRGALPSGELNTFQAVLASDGSDSYALFLYPANGLQFLGTRPKESYNVQLQLPARVGFCRGEADDLKSEGPYFSLTSTEQSVKNLYQLSNLGIPGVWAFHIGSTSPLDNVRPAAVGDLSAAHSSVPLGRSFSHATALESDYNEDNLDYYDVNEEEAEYLPGEPEEALNGHSSIDVSFQSKVDTKPLEESSTLDPHTKEGTSLGEVGGPDLKGQVEPWDERETRSPAPPEVDRDSLAPSWETPPPYPENGSIQPYPDGGPVPSEMDVPPAHPEEEIVLRSYPASGHTTPLSRGTYEVGLEDNIGSNTEVFTYNAANKETCEHNHRQCSRHAFCTDYATGFCCHCQSKFYGNGKHCLPEGAPHRVNGKVSGHLHVGHTPVHFTDVDLHAYIVGNDGRAYTAISHIPQPAAQALLPLTPIGGLFGWLFALEKPGSENGFSLAGAAFTHDMEVTFYPGEETVRITQTAEGLDPENYLSIKTNIQGQVPYVSANFTAHISPYKELYHYSDSTVTSTSSRDYSLTFGAINQTWSYRIHQNITYQVCRHAPRHPSFPTTQQLNVDRVFALYNDEERVLRFAVTNQIGPVKEDSDPTPGNPCYDGSHMCDTTARCHPGTGVDYTCECASGYQGDGRNCVDENECATGFHRCGPNSVCINLPGSYRCECRSGYEFADDRHTCILITPPANPCEDGSHTCAPAGQARCVHHGGSTFSCACLPGYAGDGHQCTDVDECSENRCHPAATCYNTPGSFSCRCQPGYYGDGFQCIPDSTSSLTPCEQQQRHAQAQYAYPGARFHIPQCDEQGNFLPLQCHGSTGFCWCVDPDGHEVPGTQTPPGSTPPHCGPSPEPTQRPPTICERWRENLLEHYGGTPRDDQYVPQCDDLGHFIPLQCHGKSDFCWCVDKDGREVQGTRSQPGTTPACIPTVAPPMVRPTPRPDVTPPSVGTFLLYTQGQQIGYLPLNGTRLQKDAAKTLLSLHGSIIVGIDYDCRERMVYWTDVAGRTISRAGLELGAEPETIVNSGLISPEGLAIDHIRRTMYWTDSVLDKIESALLDGSERKVLFYTDLVNPRAIAVDPIRGNLYWTDWNREAPKIETSSLDGENRRILINTDIGLPNGLTFDPFSKLLCWADAGTKKLECTLPDGTGRRVIQNNLKYPFSIVSYADHFYHTDWRRDGVVSVNKHSGQFTDEYLPEQRSHLYGITAVYPYCPTGRK

SEQ ID NO: 62623 - protein, 228 aa, Homo sapiens
ILPREICNRLLNIFHPTDPVAYRLEPLILKHYSNISPVQIHWYNTSNPLPYEHMKPSFLNPAKEPTSVSENEGISTIPSPVTSPVLSRRHYGESITNIGKASILGAASIGKGLGGMLFSRFGRSSTTQSSETSKDSMEDEKKPVASPSATTVGTQTLPHSSSGFLDSALELDHRIDFELREGLVESRYWSAVTSHTAYWSSLDVALFLLTFMYKHEHDDDAKPNLDPI

SEQ ID NO: 62624 - protein, 55 aa, Homo sapiens
RIDFELREGLVESRYWSAVTSHTAYWSSLDVALFLLTFMYKHEHDDDAKPNLDPI

SEQ ID NO: 62625 - protein, 141 aa, Homo sapiens
VDYLVTEEEINLTRGPSGLGFNIVGGTDQQYVSNDSGIYVSRIKENGAAALDGRLQEGDKILSVNGQDLKNLLHQDAVDLFRNAGYAVSLRVQHRLQVQNGPIGHRGEGDPSGIPIFMVLVPVFALTMVAAWAFMRYRQQL

SEQ ID NO: 62626 - protein, 70 aa, Homo sapiens
RPAYWVPDHEILHCHNCRKEFSIKLSKHHCRACGQGFCDECSHDRRAVPSRGWDHPVRVCFNCNKKPGDL

SEQ ID NO: 62627 - protein, 630 aa, Homo sapiens
VKLRNLSKITQLVKGTAKIQSQAVKIKMNKLRQSFRRKKDVYVPEASRPHQWQTDEEGVRTGKCSFPVKYLGHVEVDESRGMHICEDAVKRLKAERKFFKGFFGKTGKKAVKAVLWVSADGLRVVDEKTKDLIVDQTIEKVSFCAPDRNFDRAFSYICRDGTTRRWICHCFMAVKDTGERLSHAVGCAFAACLERKQKREKECGVTATFDASRTTFTREGSFRVTTATEQAEREEIMKQMQDAKKAETDKIVVGSSVAPGNTAPSPSSPTSPTSDATTSLEMNNPHAIPRRHAPIEQLARQGSFRGFPALSQKMSPFKRQLSLRINELPSTMQRKTDFPIKNAVPEVEGEAESISSLCSQITNAFSTPEDPFSSAPMTKPVTVVAPQSPTFQGTEWGQSSGAASPGLFQAGHRRTPSEADRWLEEVSKSVRAQQPQASAAPLQPVLQPPPPTAISQPASPFQGNAFLTSQPVPVGVVPALQPAFVPAQSYPVANGMPYPAPNVPVVGITPSQMVANVFGTAGHPQAAHPHQSPSLVRQQTFPHYEASSATTSPFFKPPAQHLNGSAAFNGVDDGRLASADRHTEVPTGTCPVDPFEAQWAALENKSKQRTNPSPTNPFSSDLQKTFEIEL

SEQ ID NO: 62628 - protein, 6 aa, Homo sapiens
LLIVTA

SEQ ID NO: 62629 - protein, 41 aa, Homo sapiens
KDGFGFADSTVLQLTKKVNNIETGWALGATFHLLQSLGISH

SEQ ID NO: 62630 - protein, 657 aa, Homo sapiens
LAAPSGLERYGLSAAAAAAAAAAAAVEQRSRFEYPPPPVSLGSSSHTARLPNGLGGPNGFPKPTPEEGPPELNRQSPNSSSAAASVASRRGTHGGLVTGLPNPGGGGGPQLTVPPNLLPQTLLNGPASAAVLPPPPPHALGSRGPPTPAPPGAPGGPACLGGTPGVSATSSSASSSTSSSVAEVGVGAGGKRPGSVSSTDQERELKEKQRNAEALAELSESLRNRAEEWASKPKMVRDTLLTLAGCTPYEVRFKKDHSLLGRVFAFDAVSKPGMDYELKLFIEYPTGSGNVYSSASGVAKQMYQDCMKDFGRGLSSGFKYLEYEKKHGSGDWRLLGDLLPEAVRFFKEGVPGADMLPQPYLDASCPMLPTALVSLSRAPSAPPGTGALPPAAPSGRGAAASLRKRKASPEPPDSAEGALKLGEEQQRQQWMANQSEALKLTMSAGGFAAPGHAAGGPPPPPPPLGPHSNRTTPPESAPQNGPSPMAALMSVADTLGTAHSPKDGSSVHSTTASARRNSSSPVSPASVPGQRRLASRNGDLNLQVAPPPPSAHPGMDQVHPQNIPDSPMANSGPLCCTICHERLEDTHFVQCPSVPSHKFCFPCSRESIKAQGATGEVYCPSGEKCPLVGSNVPWAFMQGEIATILAGDVKVKKERDP

SEQ ID NO: 62631 - protein, 8 aa, Homo sapiens
MMVHFFKQ

SEQ ID NO: 62632 - protein, 345 aa, Homo sapiens
RDYSNDWSPSDTVRRLRKGKVCSLERFRSLQDKLQLLEEAVSMHDGNVITAVLIFLKRTLSKEILFRELEVRQVALRHLIHFLKEIGDQKLLLDLFRFLDRTEELALSHYREHLNIQDPDKRKEFLKTCVGLPFSAEDSAHIQDHYTLLERQIIIEANDRHLESAGQTEIFRKHPRKASILNMPLVTTLFYSCFYHYTEAEGTFSSPVNLKKTFKIPDKQYVLTALAARAKLRAWNDVDALFTTKNWLGYTKKRAPIGFHRVVEILHKNNAPVQILQEYVNLVEDVDTKLNLATKFKCHDVVIDTYRDLKDRQQLLAYRSKVDKGSAEEEKIDALLSSSQIRWKN

SEQ ID NO: 62633 - protein, 25 aa, Homo sapiens
MTCSLLPASPVFSEKLQIRVGKALY

SEQ ID NO: 62634 - protein, 8 aa, Homo sapiens
TTRSAPLE

SEQ ID NO: 62635 - protein, 48 aa, Homo sapiens
LQGPISKVRHMQEWLETRGSPKSHIDKANFNNEKVILKLDYSDFQIVK

SEQ ID NO: 62636 - protein, 42 aa, Homo sapiens
IPGLAKSPGIGRTPMRWATAWPSECIYSIRTGSLSLHIGLWD

SEQ ID NO: 62637 - protein, 5 aa, Homo sapiens
KMTTL

SEQ ID NO: 62638 - protein, 739 aa, Homo sapiens
LCGHLAKMPEETQTQDQPMEEEEVETFAFQAEIAQLMSLIINTFYSNKEIFLRELISNSSDALDKIRYESLTDPSKLDSGKELHINLIPNKQDRTLTIVDTGIGMTKADLINNLGTIAKSGTKAFMEALQAGADISMIGQFGVGFYSAYLVAEKVTVITKHNDDEQYAWESSAGGSFTVRTDTGEPMGRGTKVILHLKEDQTEYLEERRIKEIVKKHSQFIGYPITLFVEKERDKEVSDDEAEEKEDKEEEKEKEEKESEDKPEIEDVGSDEEEEKKDGDKKKKKKIKEKYIDQEELNKTKPIWTRNPDDITNEEYGEFYKSLTNDWEDHLAVKHFSVEGQLEFRALLFVPRRAPFDLFENRKKKNNIKLYVRRVFIMDNCEELIPEYLNFIRGVVDSEDLPLNISREMLQQSKILKVIRKNLVKKCLELFTELAEDKENYKKFYEQFSKNIKLGIHEDSQNRKKLSELLRYYTSASGDEMVSLKDYCTRMKENQKHIYYITGETKDQVANSAFVERLRKHGLEVIYMIEPIDEYCVQQLKEFEGKTLVSVTKEGLELPEDEEEKKKQEEKKTKFENLCKIMKDILEKKVEKVVVSNRLVTSPCCIVTSTYGWTANMERIMKAQALRDNSTMGYMAAKKHLEINPDHSIIETLRQKAEADKNDKSVKDLVILLYETALLSSGFSLEDPQTHANRIYRMIKLGLGIDEDDPTADDTSAAVTEEMPPLEGDDDTSRMEEVD

SEQ ID NO: 62639 - protein, 215 aa, Homo sapiens
VDLMEAKTLGTVTPRKPVLSVSARKIKDNAADWHNLILKWETLNDAGFTTANNIANLKISLLNKDKIELDSSSPASKENEEKVCLEYNEELEKLCEELQATLDGLTKIQVKMEKLSSTTKGICELENYHYGEESKRPPLFHTWPTTHFYEVSHKLLEMYRKELLLKRTVAKELAHTGDPDLTLSYLSMWLHQPYVESDSRLHLESMLLETGHRAL

SEQ ID NO: 62640 - protein, 6 aa, Homo sapiens
IGGFGN

SEQ ID NO: 62641 - protein, 19 aa, Homo sapiens
ILDESLRLLDEEEATDNDL

SEQ ID NO: 62642 - protein, 22 aa, Homo sapiens
IQVFKEFNFNLGEMNKSNMKTD

SEQ ID NO: 62643 - protein, 46 aa, Homo sapiens
LAGFPRRFSMEEAVRTASAPNARISHWTATKAVAVRAQDWAACVGV

SEQ ID NO: 62644 - protein, 349 aa, Homo sapiens
IGLGLAMSSSIFIGGSFILKKKGLLRLARKGSMRAGQGGHAYLKEWLWWAGLLSMGAGEVANFAAYAFAPATLVTPLGALSVLVSAILSSYFLNERLNLHGKIGCLLSILGSTVMVIHAPKEEEIETLNEMSHKLGDPGFVVFATLVVIVALILIFVVGPRHGQTNILVYITICSVIGAFSVSCVKGLGIAIKELFAGKPVLRHPLAWILLLSLIVCVSTQINYLNRALDIFNTSIVTPIYYVFFTTSVLTCSAILFKEWQDMPVDDVIGTLSGFFTIIVGIFLLHAFKDVSFSLASLPVSFRKDEKAMNGNLSNMYEVLNNNEESLTCGIEQHTGENVSRRNGNLTAF

SEQ ID NO: 62645 - protein, 51 aa, Homo sapiens
VEVQVKRRRTASLSNQECQLYPRRSQQQQVPVVDFQAELRQAFLAETPRGG

SEQ ID NO: 62646 - protein, 250 aa, Homo sapiens [sequence omitted]

SEQ ID NO: 62647 - protein, 88 aa, Homo sapiens
KRKAEGDAKGDKAKVKDEPQRRSARLSAKPAPPKPEPKPKKAPAKKGEKVPKGKKGKADAGKEGNNPAENGDAKTDQAQKAEGAGDAK

SEQ ID NO: 62648 - protein, 69 aa, Homo sapiens
IESKASFGDECSHHAYLHDQFWSYWNRFGPGLVIYWYGFIQELDCNRERGILLKACFPTNIVTLCHSIA

SEQ ID NO: 62649 - protein, 23 aa, Homo sapiens
LGNPPSKVYGNIRAVASRSADRF

SEQ ID NO: 62650 - protein, 65 aa, Homo sapiens
MSDSEGDFSDPCSCDTSDDKFCLRWLALVALSFIVPCMCCYVPLRMCHRCGEACGCCGGKHKAAG

SEQ ID NO: 62651 - protein, 99 aa, Homo sapiens
LAILESKGLDPALGSETLASRQESTTDHMDSMLLLETLQEELKLFNETAKKQMEELQALKVKLEMKEERVRFLEQQTLCNNQVNDLTTALKEMEQLLEM

SEQ ID NO: 62652 - protein, 4 aa, Homo sapiens
KNPQ

SEQ ID NO: 62653 - protein, 379 aa, Homo sapiens
LSTMFPRPLTPLAAPNGAEPLGRALRRAPLGRARAGLGGPPLLLPSMLMFAVIVASSGLLLMIERGILAEMKPLPLHPPGREGTAWRGKAPKPGGLSLRAGDADLQVRQDVRNRTLRAVCGQPGMPRDPWDLPVGQRRTLLRHILVSDRYRFLYCYVPKVACSNWKRVMKVLAGVLDSVDVRLKMDHRSDLVFLADLRPEEIRYRLQHYFKFLFVREPLERLLSAYRNKFGEIREYQQRYGAEIVRRYRAGAGPSPAGDDVTFPEFLRYLVDEDPERMNEHWMPVYHLCQPCAVHYDFVGSYERLEADANQVLEWVRAPPHVRFPARQAWYRPASPESLHYHLCSAPRALLQDVLPKYILDFSLFAYPLPNVTKEACQQ

SEQ ID NO: 62654 - protein, 29 aa, Homo sapiens
ICKIYDSPCLPEAEAMFAINADGVGDAKD

SEQ ID NO: 62655 - protein, 226 aa, Homo sapiens
VPGTMKQESAAPNTPPTSQSPTPSAQFPRNDGDPQALWIFGYGSLVWRPDFAYSDSRVGFVRGYSRRFWQGDTFHRGSDKMPGRVVTLLEDHEGCTWGVAYQVQGEQVSKALKYLNVREAVLGGYDTKEVTFYPQDAPDQPLKALAYVATPQNPGYLGPAPEEAIATQILACRGFSGHNLEYLLRLADFMQLCGPQAQDEHLAAIVDAVGTMLPCFCPTEQALALV

SEQ ID NO: 62656 - protein, 5 aa, Homo sapiens
TLVWA

SEQ ID NO: 62657 - protein, 452 aa, Homo sapiens
IQTQRTARAKRKYSEVDDSLPSGGEKPSKNETGLLSSIKKFIKGSTPKEERENPSKRSRIERDIDNNLITSTPRAGEKPNKQISRVRRKSQVNGEAGSYEMTNQHVKQNGKLEDNPSSGSPPRTTLLGTIFSPVFNFFSPANKNGTSGSDSPGQAVEAEEIVKQLDMEQVDEITTSTTTSTNGAAYSNQAVQVRPSLNNGLEEAEETVNRDIPPLTAPVTPDSGYSSAHAEATYEEDWEVFDPYYFIKHVPPLTEEQLNRKPALPLKTRSTPEFSLVLDLDETLVHCSLNELEDAALTFPVLFQDVIYQVYVRLRPFFREFLERMSQMYEIILFTASKKVYADKLLNILDPKKQLVRHRLFREHCVCVQGNYIKDLNILGRDLSKTIIIDNSPQAFAYQLSNGIPIESWFMDKNDNELLKLIPFLEKLVELNEDVRPHIRDRFRLHDLLPPD

SEQ ID NO: 62658 - protein, 22 aa, Homo sapiens
KGKADAGKEGNNPAENGDAKTD

SEQ ID NO: 62659 - protein, 18 aa, Homo sapiens
LAHVRRCRGPNQPKLWGK

SEQ ID NO: 62660 - protein, 68 aa, Homo sapiens
KEMFNSKFGSIPKFYVRAPGRVNIIGEHIDYCGYSVLPMAVEQDVLIAVEPVKTYALQLANTNPLYPK

SEQ ID NO: 62661 - protein, 73 aa, Homo sapiens
VDICRKFGAQGSRLTGAGWGGCTVSMVPADKLPSFLANVHKAYYQRSDGSLAPEKQSLFATKPGGGALVLLEA

SEQ ID NO: 62662 - protein, 46 aa, Homo sapiens
MRIYQQSYLRRNPVLLSGTKRIRLTIWKEQLLFLKSIYNSQIGRGQ

SEQ ID NO: 62663 - protein, 57 aa, Homo sapiens
IEIIGNEGLLACQLLPSIPCLLHCRVHADVLALWFRSSCSTLPDYLLYQCQKVMEGS

SEQ ID NO: 62664 - protein, 50 aa, Homo sapiens
MEIAQMLEENSRILKFGYQFTKQGPRTRVAAAITKNNDLVRKKRVEADRR

SEQ ID NO: 62665 - protein, 367 aa, Homo sapiens
ILQRDSNKSQKLLKKLMSGVENSGKVDISTKDLLPHQELRIKSGLEKAIKHKDKLLEFDRTSIRRTQVIDDESDYFASDSNQWLSKLERETLQKREEELRELRHASRLSKKVTIDFAGRKILEEENSLAEYHSRLDETIQAIANGTLNQPLTKLDRSSEEPLGVLVNPNMYQSPPQWVDHTGAASQKKAFRSSGFGLEFNSFQHQLRIQDQEFQEGFDGGWCLSVHQPWASLLVRGIKRVEGRSWYTPHRGRLWIAATAKKPSPQEVSELQATYRLLRGKDVEFPNDYPSGCLLGCVDLIDCLSQKQFKEQFPDISQESDSPFVFICKNPQEMVVKFPIKGNPKIWKLDSKIHQGAKKGLMKQNKAV

SEQ ID NO: 62666 - protein, 186 aa, Homo sapiens
LDRAQERLATALQKLEEAEKAADESERGMKVIESRAQKDEEKMEIQEIQLKEAKHIAEDADRKYEEVARKLVIIESDLERAEERAELSEGQVRQLEEQLRIMDQTLKALMAAEDKYSQKEDRYEEEIKVLSDKLKEAETRAEFAERSVTKLEKSIDDLEEKVAHAKEENLSMHQMLDQTLLELNNM

SEQ ID NO: 62667 - protein, 53 aa, Homo sapiens
VKNSLDDSAKKLLLEKYKYVENFGLIDGRLTICTISCFFAIVALIWDYMHPFP

SEQ ID NO: 62668 - protein, 293 aa, Homo sapiens
TTLTIVFSQLPLPSPQETQKFCEQVHAAIKAFIAVYYLLPKDQGITLRKLVRGATLDIVDGMAQLMEVLSVTPTQSPENNDLISYNSVWVACQQMPQIPRDNKAAALLMLTKNVDFVKDAHEEMEQAVEECDPYSGLLNDTEENNSDNHNHEDDVLGFPSNQDLYWSEDDQELIIPCLALVRASKACLKKIRMLVAENGKKDQVAQLDDIVDISDEISPSVDDLALSIYPPMCHLTVRINSAKLVSVLKKALEITKASHVTPQPEDSWIPLLINAIDHCMNRIKELTQSELEL

SEQ ID NO: 62669 - protein, 2914 aa, Homo sapiens
IILVNPSADSISSEVHHLLSSSSAYKLLILSGQSLEPGGDLILQSGTYSYENFAQVLHNPEISQLLSNRDPGIQAFLTVSCLGEGDWSHLGLSSSQETLHLRLNPEPTLPTMDGVAEFSEYVSETVDVPSPFDLLEPPTSGGFLKLSKPCCYIFPGGRGDSALFAVNGFNILVDGGSDRKSCFWKLVRHLDRIDSVLLTHIGADNLPGINGLLQRKVAELEEEQSQGSSSYSDWVKNLISPELGVVFFNVPEKLRLPDASRKAKRSIEEACLTLQHLNRLGIQAEPLYRVVSNTIEPLTLFHKMGVGRLDMYVLNPVKDSKEMQFLMQKWAGNSKAKTGIVLPNGKEAEISVPYLTSITALVVWLPANPTEKIVRVLFPGNAPQNKILEGLEKLRHLDFLRYPVATQKDLASGAVPTNLKPSKIKQRADSKESLKATTKTAVSKLAKREEVVEEGAKEARSELAKELAKTEKKAKESSEKPPEKPAKPERVKTESSEALKAEKRKLIKDKVGKKHLKEKISKLEEKKDKEKKEIKKERKELKKDEGRKEEKKDAKKEEKRKDTKPELKKISKPDLKPFTPEVRKTLYKAKVPGRVKIDRSRAIRGEKELSSEPQTPPAQKGTVPLPTISGHRELVLSSPEDLTQDFEEMKREERALLAEQRDTGLGDKPFPLDTAEEGPPSTAIQGTPPSVPGLGQEEHVMKEKELVPEVPEEQGSKDRGLDSGAETEEEKDTWEEKKQREAERLPDRTEAREESEPEVKEDVIEKAELEEMEEVHPSDEEEEDATKAEGFYQKHMQEPLKVTPRSREAFGGRELGLQGKAPEKETSLFLSSLTTPAGATEHVSYIQDETIPGYSETEQTISDEEIHDEPEERPAPPRFHTSTYDLPGPEGAGPFEASQPADSAVPATSGKVYGTPETELTYPTNIVAAPLAEEEHVSSATSITECDKLSSFATSVAEDQSVASLTAPQTEETGKSSLLLDTVTSIPSSRTEATQGLDYVPSAGTISPTSSLEEDKGFKSPPCEDFSVTGESEKRGEIIGKGLSGERAVEEEEEETANVEMSEKLCSQYGTPVFSAPGHALHPGEPALGEAEERCLSPDDSTVKMASPPPSGPPSATHTPFHQSPVEEKSEPQDFQEADSWGDTKRTPGVGKEDAAEETVKPGPEEGTLEKEEKVPPPRSPQAQEAPVNIDEGLTGCTIQLLPAQDKAIVFEIMEAGEPTGPILGAEALPGGLRTLPQEPGKPQKDEVLRYPDRSLSPEDAESLSVLSVPSPDTANQEPTPKSPCGLTEQYLHKDRWPEVSPEDTQSLSLSEESPSKETSLDVSSKQLSPESLGTLQFGELNLGKEEMGHLMQAEDTSHHTAPMSVPEPHAATASPPTDGTTRYSAQTDITDDSLDRKSPASSFSHSTPSGNGKYLPGAITSPDEHILTPDSSFSKSPESLPGPALEDIAIKWEDKVPGLKDRTSEQKKEPEPKDEVLQQKDKTLEHKEVVEPKDTAIYQKDEALHVKNEAVKQQDKALEQKGRDLEQKDTALEQKDKALEPKDKDLEEKDKALEQKDKIPEEKDKALEQKDTALEQKDKALEPKDKDLEQKDRVLEQKEKIPEEKDKALDQKVRSVEHKAPEDTVAEMKDRDLEQTDKAPEQKHQAQEQKDKVSEKKDQALEQKYWALGQKDEALEQNIQALEENHQTQEQESLVQEDKTRKPKMLEEKSPEKVKAMEEKLEALLEKTKALGLEESLVQEGRAREQEEKYWRGQDVVQEWQETSPTREEPAGEQKELAPAWEDTSPEQDNRYWRGREDVALEQDTYWRELSCERKVWFPHELDGQGARPHYTEERESTFLDEGPDDEQEVPLREHATRSPWASDFKDFQESSPQKGLEVERWLAESPVGLPPEEEDKLTRSPFEIISPPASPPEMVGQRVPSAPGQESPIPDPKLMPHMKNEPTTPSWLADIPPWVPKDRPLPPAPLSPAPGPPTPAPESHTPAPFSWGTAEYDSVVAAVQEGAAELEGGPYSPLGKDYRKAEGEREEEGRAEAPDKSSHSSKVPEASKSHATTEPEQTEPEQREPTPYPDERSFQYADIYEQMMLTGLGPACPTREPPLGAAGDWPPCLSTKEAAAGRNTSAEKELSSPISPKSLQSDTPTFSYAALAGPTVPPRPEPGPSMEPSLTPPAVPPRAPILSKGPSPPLNGNILSCSPDRRSPSPKESGRSHWDDSTSDSELEKGAREQPEKEAQSPSPPHPIPMGSPTLWPETEAHVSPPLDSHLGPARPSLDFPASAFGFSSLQPAPPQLPSPAEPRSAPCGSLAFSGDRALALAPGPPTRTRHDEYLEVTKAPSLDSSLPQLPSPSSPGAPLLSNLPRPASPALSEGSSSEATTPVISSVAERFSPSLEAAEQESGELDPGMEPAAHSLWDLTPLSPAPPASLDLALAPAPSLPGDMGDGILPCHLECSEAATEKPSPFQVPSEDCAANGPTETSPNPPGPAPAKAENEEAAACPAWERGAWPEGAERSSRPDTLLSPEQPVCPAGGSGGPPSSASPEVEAGPQGCATEPRPHRGELSPSFLNPPLPPSIDDRDLSTEEVRLVGRGGRRRVGGPGTTGGPCPVTDETPPTSASDSGSSQSDSDVPPETEECPSITAEAALDSDEDGDFLPVDKAGGVSGTHHPRPGHDPPPLPQPDPRPSPPRPDVCMADPEGLSSESGRVERLREKEKVQGRVGRRAPGKAKPASPARRLDLRGKRSPTPGKGPADRASRAPPRPRSTTSQVTPAEEKDGHSPMSKGLVNGLKAGPMALSSKGSSGAPVYVDLAYIPNHCSGKTADLDFFRRVRASYYVVSGNDPANGEPSRAVLDALLEGKAQWGENLQVTLIPTHDTEVTREWYQQTHEQQQQLNVLVLASSSTVVMQDESFPACKIEF

SEQ ID NO: 62670 - protein, 624 aa, Homo sapiens
LAGYVYKAASEGKVLTLAALLLNRSESDIRYLLGYVSQQGGQRSTPLIIAARNGHAKVVRLLLEHYRVQTQQTGTVRFDGYVIDGATALWCAAGAGHFEVVKLLVSHGANVNHTTVTNSTPLRAACFDGRLDIVKYLVENNANISIANKYDNTCLMIAAYKGHTDVVRYLLEQRADPNAKAHCGATALHFAAEAGHIDIVKELIKWRAAIVVNGHGMTPLKVAAESCKADVVELLLSHADCDRRSRIEALELLGASFANDRENYDIIKTYHYLYLAMLERFQDGDNILEKEVLPPIHAYGNRTECRNPQELESIRQDRDALHMEGLIVRERILGADNIDVSHPIIYRGAVYADNMEFEQCIKLWLHALHLRQKGNRNTHKDLLRFAQVFSQMIHLNETVKAPDIECVLRCSVLEIEQSMNRVKNISDADVHNAMDNYECNLYTFLYLVCISTKTQCSEEDQCKINKQIYNLIHLDPRTREGFTLLHLAVNSNTPVDDFHTNDVCSFPNALVTKLLLDCGAEVNAVDNEGNSALHIIVQYNRPISDFLTLHSIIISLVEAGAHTDMTNKQNKTPLDKSTTGVSEILLKTQMKMSLKCLAARAVRANDINYQDQIPRTLEEFVGFH

SEQ ID NO: 62671 - protein, 102 aa, Homo sapiens
LTPDEWLGGINRDPVLMSLKEGYKKSSKMVFKAPIKEKKSVVVNGIDLLENVPPRTENELLRMFFRQQDEIRRLKEELAQKDIRIRQLQLELKNLRNSPKNC

SEQ ID NO: 62672 - protein, 434 aa, Homo sapiens
RQPRGPRPGLGPAQRARGSAAGGSERCCPPPGVGSALPGSKMPKKKPTPIQLNPAPDGSAVNGTSSAETNLEALQKKLEELELDEQQRKRLEAFLTQKQKVGELKDDDFEKISELGAGNGGVVFKVSHKPSGLVMARKLIHLEIKPAIRNQIIRELQVLHECNSPYIVGFYGAFYSDGEISICMEHMDGGSLDQVLKKAGRIPEQILGKVSIAVIKGLTYLREKHKIMHRDVKPSNILVNSRGEIKLCDFGVSGQLIDSMANSFVGTRSYMSPERLQGTHYSVQSDIWSMGLSLVEMAVGRYPIPPPDAKELELMFGCQVEGDAAETPPRPRTPGRPLSSYGMDSRPPMAIFELLDYIVNEPPPKLPSGVFSLEFQDFVNKCLIKNPAERADLKQLMVHAFIKRSDAEEVDFAGWLCSTIGLNQPSTPTHAAGV

SEQ ID NO: 62673 - protein, 35 aa, Homo sapiens
MGHPFIVQFNDGNAAVVSMWVCRALEERRSQQGPP

SEQ ID NO: 62674 - protein, 47 aa, Homo sapiens
ITATRCSRPSRFYNTWWNVSGRSTRSSRIQQLSQEYSLATSIGIKRS

SEQ ID NO: 62675 - protein, 129 aa, Homo sapiens
VSEDNVAKVSDFGLTKEASSTQDTGKLPVKWTAPEALREKKFSTKSDVWSFGILLWEIYSFGRVPYPRIPLKDVVPRVEKGYKMDAPDGCPPAVYEVMKNCWHLDAAMRPSFLQLREQLEHIKTHELHL

SEQ ID NO: 62676 - protein, 45 aa, Homo sapiens
LAACCVSLSPCFPGLARCEAGHIHPWTRFRRLLLFSLPLLDFPDF

SEQ ID NO: 62677 - protein, 5 aa, Homo sapiens
MVVSE

SEQ ID NO: 62678 - protein, 414 aa, Homo sapiens
KPPLERQDSLASAKRGSVVGRNLNRFSCFVRSGVEAFILGDVPMMAKIAETYSIEMGPRGPQWKANPHPFACSVEDPTKQTKFKGIKSYISYKLTPTHAASPVYRRYKHFDWLYNRLLHKFTVISVPHLPEKQATGRFEEDFIEKRKRRLILWMDHMTSHPVLSQYEGFQHFLSCLDDKQWKMGKRRAEKDEMVGASFLLTFQIPTEHQDLQDVEDRVDTFKAFSKKMDDSVLQLSTVASELVRKHVGGFRKEFQKLGSAFQAISHSFQMDPPFCSEALNSAISHTGRTYEAIGEMFAEQPKNDLFQMLDTLSLYQGLLSNFPDIIHLQKGAFAKVKESQRMSDEGRMVQDEADGIRRRCRVVGFALQAEMNHFHQRRELDFKHMMQNYLRQQILFYQRVGQQLEKTLRMYDNL

SEQ ID NO: 62679 - protein, 225 aa, Homo sapiens
IEDLDHYEMKEEEPISGKKSEDEGIEKENLAILEKIRKTQRQDHLNGAVSGSVQASDRLMKELRDIYRSQSYKTGIYSVELINDSLYDWHVKLQKVDPDSPLHSDLQILKEKEGIEYILLNFSFKDNFPFDPPFVRVVLPVLSGGYVLGGGALCMELLTKQGWSSAYSIESVIMQINATLVKGKARVQFGANKNQYNLARAQQSYNSIVQIHEKNGWYTPPKEDG

SEQ ID NO: 62680 - protein, 275 aa, Homo sapiens [sequence omitted]

SEQ ID NO: 62681 - protein, 38 aa, Homo sapiens
VDTIDSYMNRLHSIILANPQDNENFIATVREVVNRLDR

SEQ ID NO: 62682 - protein, 80 aa, Homo sapiens
TGSPAVSRLTGRCCVGGAALAWVCMWVQPWEHCGSASQEPWRSRSLKTQWWHWWAPMPPCAAPSPLSLASAWHSSTSSGS

SEQ ID NO: 62683 - protein, 4 aa, Homo sapiens
LVPP

SEQ ID NO: 62684 - protein, 406 aa, Homo sapiens
IHNLPYGVFSTRGDPRPRIGVAIGDQILDLSIIKHLFTGPVLSKHQDVFNQPTLNSFMGLGQAAWKEARVFLQNLLSVSQARLRDDTELRKCAFISQASATMHLPATIGDYTDFYSSRQHATNVGIMFRDKENALMPNWLHLPVGYHGRASSVVVSGTPIRRPMGQMKPDDSKPPVYGACKLLDMELEMAFFVGPGNRLGEPIPISKAHEHIFGMVLMNDWSARDIQKWEYVPLGPFLGKSFGTTVSPWVVPMDALMPFAVPNPKQDPRPLPYLCHDEPYTFDINLSVNLKGEGMSQAATICKSNFKYMYWTMLQQLTHHSVNGCNLRPGDLLASGTISGPEPENFGSMLELSWKGTKPIDLGNGQTRKFLLDGDEVIITGYCQGDGYRIGFGQCAGKVLPALLPS

SEQ ID NO: 62685 - protein, 70 aa, Homo sapiens
KISKVTSPVLVIHGTEDEVIDFSHGLAMYERCPRAVEPLWVEGAGHNDIELYAQYLERLKQFISHELPNS

SEQ ID NO: 62686 - protein, 46 aa, Homo sapiens
IKQKVDSLLENLEKIEKEQSKHAVEMRNDKSEEEQSSSSVKKMRLM

SEQ ID NO: 62687 - protein, 21 aa, Homo sapiens
RTKFIYNLEDHEWCENMESVL

SEQ ID NO: 62688 - protein, 416 aa, Homo sapiens
IDMAMVVSTWRDPQDEVPGSQGSQASQAPPVPGPPPGAPHTPQTPGQGGPASTPAQTAAGGQGGPGGPGSDKQQQQQHIECVVCGDKSSGKHYGQFTCEGCKSFFKRSVRRNLSYTCRANRNCPIDQHHRNQCQYCRLKKCLKVGMRREAVQRGRMPPTQPTHGQFALTNGDPLNCHSYLSGYISLLLRAEPYPTSRFGSQCMQPNNIMGIENICELAARMLFSAVEWARNIPFFPDLQITDQVALLRLTWSELFVLNAAQCSMPLHVAPLLAAAGLHASPMSADRVVAFMDHIRIFQEQVEKLKALHVDSAEYSCLKAIVLFTSDACGLSDVAHVESLQEKSQCALEEYVRSQYPNQPTRFGKLLLRLPSLRTVSSSVIEQLFFVRLVGKTPIETLIRDMLLSGSSFNWPYMAIQ

SEQ ID NO: 62689 - protein, 511 aa, Homo sapiens
VAEPARRWKRVAERRDLGGLAMEEEGVKEAGEKPRGAQMVDKAGWIKKSSGGLLGFWKDRYLLLCQAQLLVYENEDDQKCVETVELGSYEKCQDLRALLKRKHRFILLRSPGNKVSDIKFQAPTGEEKESWIKALNEGINRGKNKAFDEVKVDKSCALEHVTRDRVRGGQRRRPPTRVHLKEVASAASDGLLRLDLDVPDSGPPVFAPSNHVSEAQPRETPRPLMPPTKPFLAPETTSPGDRVETPVGERAPTPVSASSEVSPESQEDSETPAEEDSGSEQPPNSVLPDKLKVSWENPSPQEAPAAESAEPSQAPCSETSEAAPREGGKPPTPPPKILSEKLKASMGEMQASGPPAPGTVQVSVNGMDDSPEPAKPSQAEGTPGTPPKDATTSTALPPWDLPPQFHPRCSSLGDLLGEGPRHPLQPRERLYRAQLEVKVASEQTEKLLNKVLGSEPAPVSAETLLSQAVEQLRQATQVLQEMRDLGELSQEAPGLREKRKELVTLYRRSAP

SEQ ID NO: 62690 - protein, 130 aa, Homo sapiens
LLPAGHSVSGSLLMPGHEASSKDPNHSTALKVIESDTHRTNTPRRRKGRNKEIQDLEESFVPVAAPLGHPRELQKYSSDSESPRGTGSGALPSGQKLEELKAEEPDNFSSKVVQRGREFFDSNGNFLYRI

SEQ ID NO: 62691 - protein, 23 aa, Homo sapiens
MTTGTAHGVRGKWLRWPTTVSVV

SEQ ID NO: 62692 - protein, 924 aa, Homo sapiens
VEQLRKEGNELFKCGDYGGALAAYTQALGLDATPQDQAVLHRNRAACHLKLEDYDKAETEASKAIEKDGGDVKALYRRSQALEKLGRLDQAVLDLQRCVSLEPKNKVFQEALRNIGGQIQEKVRYMSSTDAKVEQMFQILLDPEEKGTEKKQKASQNLVVLAREDAGAEKIFRSNGVQLLQRLLDMGETDLMLAALRTLVGICSEHQSRTVATLSILGTRRVVSILGVESQAVSLAACHLLQVMFDALKEGVKKGFRGKEGAIIVDPARELKVLISNLLDLLTEVGVSGQGRDNALTLLIKAVPRKSLKDPNNSLTLWVIDQGLKKILEVGGSLQDPPGELAVTANSRMSASILLSKLFDDLKCDAERENFHRLCENYIKSWFEGQGLAGKLRAIQTVSCLLQGPCDAGNRALELSGVMESVIALCASEQEEEQLVAVEALIHAAGKAKRASFITANGVSLLKDLYKCSEKDSIRIRALVGLCKLGSAGGTDFSMKQFAEGSTLKLAKQCRKWLCNDQIDAGTRRWAVEGLAYLTFDADVKEEFVEDAAALKALFQLSRLEERSVLFAVASALVNCTNSYDYEEPDPKMVELAKYAKQHVPEQHPKDKPSFVRARVKKLLAAGVVSAMVCMVKTESPVLTSSCRELLSRVFLALVEEVEDRGTVVAQGGGRALIPLALEGTDVGQTKAAQALAKLTITSNPEMTFPGERIYEVVRPLVSLLHLNCSGLQNFEALMALTNLAGISERLRQKILKEKAVPMIEGYMFEEHEMIRRAATECMCNLAMSKEVQDLFEAQGNDRLKLLVLYSGEDDELLQRAAAGGLAMLTSMRPTLCSRIPQVTTHWLEILQALLLSSNQELQHRGAVVVLNMVEASREIASTLMESEMMEILSVLAKGDHSPVTRAAAACLDKAVEYGLIQPNQDGE

SEQ ID NO: 62693 - protein, 328 aa, Homo sapiens
LNVRLSLREPPAGEGIILLQPGKHEFPFRFQLPSEPLVTSFTGKYGSIQYCVRAVLERPKVPDQSVKRELQVVSHVDVNTPALLTPVLKTQEKMVGCWFFTSGPVSLSAKIERKGYCNGEAIPIYAEIENCSSRLIVPKAAIFQTQTYLASGKTKTIRHMVANVRGNHIASGSTDTWNGKTLKIPPVTPSILDCCIIRVDYSLAVYIHIPGAKKLMLELPLVIGTIPYNGFGSRNSSIASQFSMDMSWLTLTLPEQPEAPPNYADVVSEEEFSRHIPPYPQPPNCEGEVCCPVFACIQEFRFQPPPLYSEVDPHPSDVEESQPVSFIL

SEQ ID NO: 62694 - protein, 479 aa, Homo sapiens
IFINNEWHESKSGKKFATCNPSTREQICEVEEGDKPDVDKAVEAAQVAFQRGSPWRRLDALSRGRLLHQLADLVERDRATLAALETMDTGKPFLHAFFIDLEGCIRTLRYFAGWADKIQGKTIPTDDNVVCFTRHEPIGVCGAITPWNFPLLMLVWKLAPALCCGNTMVLKPAEQTPLTALYLGSLIKEAGFPPGVVNIVPGFGPTVGAAISSHPQINKIAFTGSTEVGKLVKEAASRSNLKRVTLELGGKNPCIVCADADLDLAVECAHQGVFFNQGQCCTAASRVFVEEQVYSEFVRRSVEYAKKRPVGDPFDVKTEQGPQIDQKQFDKILELIESGKKEGAKLECGGSAMEDKGLFIKPTVFSEVTDNMRIAKEEIFGPVQPILKFKSIEEVIKRANSTDYGLTAAVFTKNLDKALKLASALESGTVWINCYNALYAQAPFGGFKMSGNGRELGEYALAEYTEVKTVTIKLGDKNP

SEQ ID NO: 62695 - protein, 349 aa, Homo sapiens
LYFNMGSPDQLMVHKGKCIGSDEQLGKLVYNALETATGGFVLLYEWVLQWQKKMGPFLTSQEKEKIDKCKKQIQGTETEFNSLVKLSHPNVVRYLAMNLKEQDDSIVVDILVEHISGVSLAAHLSHSGPIPVHQLRRYTAQLLSGLDYLHSNSVVHKVLSASNVLVDAEGTVKITDYSISKRLADICKEDVFEQTRVRFSDNALPYKTGKKGDVWRLGLLLLSLSQGQECGEYPVTIPSDLPADFQDFLKKCVCLDDKERWSPQQLLKHSFINPQPKMPLVEQSPEDSEGQDYVETVIPSNRLPSAAFFSETQRQFSRYFIEFEELQLLGKGAFGAVIKVWYRVIPSPL

SEQ ID NO: 62696 - protein, 35 aa, Homo sapiens
LERYFIALNRTVFQENVKVKWKSSGISLPPVDKKR

SEQ ID NO: 62697 - protein, 216 aa, Homo sapiens
VSELVQFLLIKDQKKIPIKRADILKHVIGDYKDIFPDLFKRAAERLQYVFGYKLVELEPKSNTYILINTLEPVEEDAEMRGDQGTPTTGLLMIVLGLIFMKGNTIKETEAWDFLRRLGVYPTKKHLIFGDPKKLITEDFVRQRYLEYRRIPHTDPVDYEFQWGPRTNLETSKMKVLKFVAKVHNQDPKDWPAQYCEALADEENRARPQPSGPAPSS

SEQ ID NO: 62698 - protein, 250 aa, Homo sapiens
KIVSNWDRYQDIEKEVNNESGESQRGTDFSVLLSSAGDSFSQFRFAEEKEWDSEASCPKQNSAFYVDSELLVRALQELPLCLRLNVAAELVQGTVPLEVPQVKPKRTDDGKGLGMQLKGPLGPGGRGPIFELKSVAAGCPVLLGKDNPSPGPSRDSQKPTSPLQSAGDHLEEELDLLLNLDAPIKEGDNILPDQTSQDLKSKEDGEVVQEEEVCAKPSVTEEKNMEPEQPSTSKNVTEEELEDWLDSMIS

SEQ ID NO: 62699 - protein, 1745 aa, Homo sapiens
VTLHRAPGFGFGIAISGGRDNPHFQSGETSIVISDVLKGGPAEGQLQENDRVAMVNGVSMDNVEHAFAVQQLRKSGKNAKITIRRKKKVQIPVSRPDPEPVSDNEEDSYDEEIHDPRSGRSGVVNRRSEKIWPRDRSASRERSLSPRSDRRSVASSQPAKPTKVTLVKSRKNEEYGLRLASHIFVKEISQDSLAARDGNIQEGDVVLKINGTVTENMSLTDAKTLIERSKGKLKMVVQRDERATLLNVPDLSDSIHSANASERDDISEIQSLASDHSGRSHDRPPRRSRSRSPDQRSEPSDHSRHSPQQPSNGSLRSRDEERISKPGAVSTPVKHADDHTPKTVEEVTVERNEKQTPSLPEPKPVYAQVGQPDVDLPVSPSDGVLPNSTHEDGILRPSMKLVKFRKGDSVGLRLAGGNDVGIFVAGVLEDSPAAKEGLEEGDQILRVNNVDFTNIIREEAVLFLLDLPKGEEVTILAQKKKDVYRRIVESDVGDSFYIRTHFEYEKESPYGLSFNKGEVFRVVDTLYNGKLGSWLAIRIGKNHKEVERGIIPNKNRAEQLASVQYTLPKTAGGDRADFWRFRGLRSSKRNLRKSREDLSAQPVQTKFPAYERVVLREAGFLRPVTIFGPIADVAREKLAREEPDIYQIAKSEPRDAGTDQRSSGIIRLHTIKQIIDQDKHALLDVTPNAVDRLNYAQWYPIVVFLNPDSKQGVKTMRMRLCPESRKSARKLYERSHKLRKNNHHLFTTTINLNSMNDGWYGALKEAIQQQQNQLVWVSEGKADGATSDDLDLHDDRLSYLSAPGSEYSMYSTDSRHTSDYEDTDTEGGAYTDQELDETLNDEVGTPPESAITRSSEPVREDSSGMHHENQTYPPYSPQAQPQPIHRIDSPGFKPASQQKAEASSPVPYLSPETNPASSTSAVNHNVNLTNVRLEEPTPAPSTSYSPQADSLRTPSTEAAHIMLRDQEPSLSSHVDPTKVYRKDPYPEEMMRQNHVLKQPAVSHPGHRPDKEPNLTYEPQLPYVEKQASRDLEQPTYRYESSSYTDQFSRNYEHRLRYEDRVPMYEEQWSYYDDKQPYPSRPPFDNQHSQDLDSRQHPEESSERGYFPRFEEPAPLSYDSRPRYEQAPRASALRHEEQPAPGYDTHGRLRPEAQPHPSAGPKPAESKQYFEQYSRSYEQVPPQGFTSRAGHFEPLHGAAAVPPLIPSSQHKPEALPSNTKPLPPPPTQTEEEEDPAMKPQSVLTRVKMFENKRSASLETKKDVNDTGSFKPPEVASKPSGAPIIGPKPTSQNQFSEHDKTLYRIPEPQKPQLKPPEDIVRSNHYDPEEDEEYYRKQLSYFDRRSFENKPPAHIAASHLSEPAKPAHSQNQSNFSSYSSKGKPPEADGVDRSFGEKRYEPIQATPPPPPLPSQYAQPSQPVTSASLHIHSKGAHGEGNSVSLDFQNSLVSKPDPPPSQNKPATFRPPNREDTAQAAFYPQKSFPDKAPVNGTEQTQKTVTPAYNRFTPKPYTSSARPFERKFESPKFNHNLLPSETAHKPDLSSKTPTSPKTLVKSHSLAQPPEFDSGVETFSIHAEKPKYQINNISTVPKAIPVSPSAVEEDEDEDGHTVVATARGIFNSNGGVLSSIETGVSIIIPQGAIPEGVEQEIYFKVCRDNSILPPLDKEKGETLLSPLVMCGPHGLKFLKPVELRLPHCASMTPDGWSFALKSSDSSSGDPKTWQNKCLPGDPNYLVGANCVSVLIDHF

SEQ ID NO: 62700 - protein, 7 aa, Homo sapiens
IIKDKMI

SEQ ID NO: 62701 - protein, 38 aa, Homo sapiens
LRPPHTSRGTSQTPNASSPGNPTALANGTVQAPKQKGD

SEQ ID NO: 62702 - protein, 119 aa, Homo sapiens
LLREMISSNIQAMIIKVAALGLDPDKHLGKTLDQMEPYLIELSKKYGVHVCGEGGEYETFTLDCPLFKKKIIVDSSEVVIHSADAFAPVAYLRFLELHLEDKVSSVPDNYRTSNYIYNF

SEQ ID NO: 62703 - protein, 28 aa, Homo sapiens
MTMSAQSPTMLNSVDPNVGGQVMDIHAQ

SEQ ID NO: 62704 - protein, 72 aa, Homo sapiens
VEDALQSFLKAEELQPGFSKAGRVYISKCYRELGKNSEARWWMKLALELPDVTKEDLAIQKDLEELEVILRD

SEQ ID NO: 62705 - protein, 41 aa, Homo sapiens
IDQKAVDSQIVRKIKAIPQLQGYLRSVFALTNGIYPHKLVF

SEQ ID NO: 62706 - protein, 59 aa, Homo sapiens
ITALAPSTMKIKIIAPPERKYSVWIGGSILASLSTFQQMWISKQEYDEAGPSIVHRKCF

SEQ ID NO: 62707 - protein, 862 aa, Homo sapiens
LPLQIDCLAAWEEWLLVGTKQGHLLLYRIRKDVGCNRFEVTLEKSNKNFSKKIQQIHVVSQFKILVSLLENNIYVHDLLTFQQITTVSKAKGASLFTCDLQHTETGEEVLRMCVAVKKKLQLYFWKDREFHELQGDFSVPDVPKSMAWCENSICVGFKRDYYLIRVDGKGSIKELFPTGKQLEPLVAPLADGKVAVGQDDLTVVLNEEGICTQKCALNWTDIPVAMEHQPPYIIAVLPRYVEIRTFEPRLLVQSIELQRPRFITSGGSNIIYVASNHFVWRLIPVPMATQIQQLLQDKQFELALQLAEMKDDSDSEKQQQIHHIKNLYAFNLFCQKRFDESMQVFAKLGTDPTHVMGLYPDLLPTDYRKQLQYPNPLPVLSGAELEKAHLALIDYLTQKRSQLVKKLNDSDHQSSTSPLMEGTPTIKSKKKLLQIIDTTLLKCYLHTNVALVAPLLRLENNHCHIEESEHVLKKAHKYSELIILYEKKGLHEKALQVLVDQSKKANSPLKGHERTVQYLQHLGTENLHLIFSYSVWVLRDFPEDGLKIFTEDLPEVESLPRDRVLGFLIENFKGLAIPYLEHIIHVWEETGSRFHNCLIQLYCEKVQGLMKEYLLSFPAGKTPVPAGEEEGELGEYRQKLLMFLEISSYYDPGRLICDFPFDGLLEERALLLGRMGKHEQALFIYVHILKDTRMAEEYCHKHYDRNKDGNKDVYLSLLRMYLSPPSIHCLGPIKLELLEPKANLQAALQVLELHHSKLDTTKALNLLPANTQINDIRIFLEKVLEENAQKKRFNQVLKNLLHAEFLRVQEERILHQQVKCIITEEKVCMVCKKKIGNSAFARYPNGVVVHYFCSKEVNPADT

SEQ ID NO: 62708 - protein, 245 aa, Homo sapiens
LSRGARMGNSALRAHVETAQKTGVFQLKDRGLTEFPADLQKLTSNLRTIDLSNNKIESLPPLLIGKFTLLKSLSLNNNKLTVLPDEICNLKKLETLSLNNNHLRELPSTFGQLSALKTLSLSGNQLGALPPQLCSLRHLDVMDLSKNQIRSIPDSVGELQVIELNLNQNQISQISVKISCCPRLKILRLEENCLELSMLPQSILSDSQICLLAVEGNLFEIKKLRELEGYDKYMERFTATKKKFA

SEQ ID NO: 62709 - protein, 104 aa, Homo sapiens
INLLNCDIMMYILRTVFERAIDTDSNLWTEGMLQMAFHILALGLLEEKQQLQKAPEEEVTFDFYHKASRLGSSAMNIQMLLEKLKGIPQLEGQKDMITWILQVN

SEQ ID NO: 62710 - protein, 43 aa, Homo sapiens
LVNKYAIVERLNFAYYLHNGRPSFAFGTFLVQELIKSKTPKQL

SEQ ID NO: 62711 - protein, 85 aa, Homo sapiens
VRAASTGRVTPLSSLFSLPTFSLLNWISSWSLVSRLGSVLQFSRTEQLADGQAGRGLPVQPHSGRSGLQGPDHRLLIGASSRRSQ

SEQ ID NO: 62712 - protein, 172 aa, Homo sapiens
KKILSKIASKTVANMLIDDTSSEIFDELYKVTKEHTHNKKEAHKIMKDLIKVAIKIGILYRNNQFSQEELVIVEKFRKKLNQTAMTIVSFYEVEYTFDRNVLSNLLHECKDLVHELVQRHLTPRTHGRINHVFNHFADVEFLSTLYSLDGDCRPNLKRICEGINKLLDEKVL

SEQ ID NO: 62713 - protein, 127 aa, Homo sapiens
MKDLIKVAIKIGILYRNNQFSQEELVIVEKFRKKLNQTAMTIVSFYEVEYTFDRNVLSNLLHECKDLVHELVQRHLTPRTHGRINHVFNHFADVEFLSTLYSLDGDCRPNLKRICEGINKLLDEKVL

SEQ ID NO: 62714 - protein, 245 aa, Homo sapiens
KMTALHWATEHNHQEVVELLIKYGADVHTQSKFCKTAFDISIDNGNEDLAEILQIAMQNQINTNPESPDTVTIHAATPQFIIGPGGVVNLTDETGVSAVQFGNSSTSVLATLAALAEASAPLSNSSETPVVATEEVVTAESVDGAIQQVVSSGGQQVITIVTDGIQLGNLHSIPTSGIGQPIIVTMPDGQQVLTVPATDIAEETVISEEPPAKRQCIEIIENRVESAEIEVRSLLPGVLCRSHPK

SEQ ID NO: 62715 - protein, 112 aa, Homo sapiens
RFPWAFLVRRPLLPPPETLPDRWLQAAEEEEVELLPFRSPPREENVPEILDRKHFDQEGMCIYYTKFQGPSQMPSRMSNLSATRQVFLWSLGQATCLFYCKSCHEILRCEIG

SEQ ID NO: 62716 - protein, 534 aa, Homo sapiens
LRRTVPSHPAPTSPMGPQRRLSPAGAALLWGFLLQLTAAQEAILHASGNGTTKDYCMLYNPYWTALPSTLENATSISLMNLTSTPLCNLSDIPPVGIKSKAVVVPWGSCHFLEKARIAQKGGAEAMLVVNNSVLFPPSGNRSEFPDVKILIAFISYKDFRDMNQTLGDNITVKMYSPSWPNFDYTMVVIFVIAVFTVALGGYWSGLVELENLKAVTTEDREMRKKKEEYLTFSPLTVVIFVVICCVMMVLLYFFYKWLVYVMIAIFCIASAMSLYNCLAALIHKIPYGQCTIACRGKNMEVRLIFLSGLCIAVAVVWAVFRNEDRWAWILQDILGIAFCLNLIKTLKLPNFKSCVILLGLLLLYDVFFVFITPFITKNGESIMVELAAGPFGNNEKLPVVIRVPKLIYFSVMSVCLMPVSILGFGDIIVPGLLIAYCRRFDVQTGSSYIYYVSSTVAYAIGMILTFVVLVLMKKGQPALLYLVPCTLITASVVAWRRKEMKKFWKGNSYQMMDHLDCATNEENPVISGEQIVQQ

SEQ ID NO: 62717 - protein, 63 aa, Homo sapiens
RKRLQKGQKYFDSGDYNMAKAKMKNKQLPTAAPDKTEVTGDHIPTPQDLPQRKPSLVASKLAG

SEQ ID NO: 62718 - protein, 489 aa, Homo sapiens
VTQPSEIEQGFLPKGWEVRHAPNGRPFFIDHNTKTTTWEDPRLKIPAHLRGKTSLDTSNDLGPLPPGWEERTHTDGRIFYINHNIKRTQWEDPRLENVAITGPAVPYSRDYKRKYEFFRRKLKKQNDIPNKFEMKLRRATVLEDSYRRIMGVKRADFLKARLWIEFDGEKGLDYGGVAREWFFLISKEMFNPYYGLFEYSATDNYTLQINPNSGLCNEDHLSYFKFIGRVAGMAVYHGKLLDGFFIRPFYKMMLHKPITLHDMESVDSEYYNSLRWILENDPTELDLRFIIDEELFGQTHQHELKNGGSEIVVTNKNKKEYIYLVIQWRFVNRIQKQMAAFKEGFFELIPQDLIKIFDENELELLMCGLGDVDVNDWREHTKYKNGYSANHQVIQWFWKAVLMMDSEKRIRLLQFVTGTSRVPMNGFAELYGSNGPQSFTVEQWGTPEKLPRAHTCFNRLDLPPYESFEELWDKLQMAIENTQGFDGVD

SEQ ID NO: 62719 - protein, 53 aa, Homo sapiens
INFHPESRSSDSSVIVQPFSKPVSVSKTIRPAQGSIGCCLSISTVPSYNSGLS

SEQ ID NO: 62720 - protein, 51 aa, Homo sapiens
IIRFTPTVPHCSLATLIGLCLRVKLQRCLPFKHKLEIYISEGTHSTEEDSK

SEQ ID NO: 62721 - protein, 24 aa, Homo sapiens
IYPLPAPPPPTLSRAAEDDKHPGQ

SEQ ID NO: 62722 - protein, 53 aa, Homo sapiens
KKSLTATDFYNGYLHPWYQKNSQAQPSQCRFQTLRLPTKKKQKKTVAMQQCIE

SEQ ID NO: 62723 - protein, 332 aa, Homo sapiens
IGSLDYQEFVVDIESRLRMEGVELKEEWQDEDFPIPLPEDDSIEADILAITGPEDQPGSLEVNGNKVRKKLMAPDISLTLDPSDGSVLSDDLDESGEIDLDGLDTPSENSNEFEWEDDLPKPKTTEVIRKGSITEYTAAEEKEDGRRWRMFRIGEQDHRVDMKAIEPYKKVISHGGYYGDGLNAIVVFAVCFMPESSQPNYRYLMDNLFKYVIGTLELLVAENYMIVYLNGATTRRKMPSLGWLRKCYQQIDRRLRKNLKSLIIVHPSWFIRTLLAVTRPFISSKFSQKIRYVFNLAELAELVPMEYVGIPECIKQVDQELNGKQDEPKNEQ

SEQ ID NO: 62724 - protein, 6 aa, Homo sapiens
LHPARD

SEQ ID NO: 62725 - protein, 51 aa, Homo sapiens
KTFFSRENYKDHSMAPSLKELRVLSNRESRGVMWTCWLNTQRFLQIPKLLE

SEQ ID NO: 62726 - protein, 851 aa, Homo sapiens
LEPFYVERYSWSQLKKLLADTRKYHGYMMAKAPHDFMFVKRNDPDGPHSDRIYYLAMSGENRENTLFYSEIPKTINRAAVLMLSWKPLLDLFQATLDYGMYSREEELLRERKRIGTVGIASYDYHQGSGTFLFQAGSGIYHVKDGGPQGFTQQPLRPNLVETSCPNIRMDPKLCPADPDWIAFIHSNDIWISNIVTREERRLTYVHNELANMEEDARSAGVATFVLQEEFDRYSGYWWCPKAETTPSGGKILRILYEENDESEVEIIHVTSPMLETRRADSFRYPKTGTANPKVTFKMSEIMIDAEGRIIDVIDKELIQPFEILFEGVEYIARAGWTPEGKYAWSILLDRSQTRLQIVLISPELFIPVEDDVMERQRLIESVPDSVTPLIIYEETTDIWINIHDIFHVFPQSHEEEIEFIFASECKTGFRHLYKITSILKESKYKRSSGGLPAPSDFKCPIKEEIAITSGEWEVLGRHGSNIQVDEVRRLVYFEGTKDSPLEHHLYVVSYVNPGEVTRLTDRGYSHSCCISQHCDFFISKYSNQKNPHCVSLYKLSSPEDDPTCKTKEFWATILDSAGPLPDYTPPEIFSFESTTGFTLYGMLYKPHDLQPGKKYPTVLFIYGGPQVQLVNNRFKGVKYFRLNTLASLGYVVVVIDNRGSCHRGLKFEGAFKYKMGQIEIDDQVEGLQYLASRYDFIDLDRVGIHGWSYGGYLSLMALMQRSDIFRVAIAGAPVTLWIFYDTGYTERYMGHPDQNEQGYYLGSVAMQAEKFPSEPNRLLLLHGFLDENVHFAHTSILLSFLVRAGKPYDLQIYPQERHSIRVPESGEHYELHLLHYLQENLGSRIAALKVI

SEQ ID NO: 62727 - protein, 272 aa, Homo sapiens
INTDLEIVGFIDIADISSPPVLSRHLVLPIALNKEGDEVGTGITDDNEDENSANQIAGKIPNFCVLLHGSLKVEGMVAIVQLGPEWHGMLYSQADSKKKSNLMMSLFEPGPEPLPWLGKMAQLGPISDAKENPYGEDDNKSPFPLQPKNKRSYAQNVTVWIKPSGLQTDVQKILRNARKLPEKTQTFYKELNRLRKAALAFGFLDLLKGVADMLERECTLLPETAHPDAAFQLTHAAQQLKLASTGTSEYAAYDQNITPLHTDFSGSSTERI

SEQ ID NO: 62728 - protein, 95 aa, Homo sapiens
ICSHVQNMIKGVTLGFRYKMRSVYAYFPIIVVIPENGSVVEIRNFLGEKYIRRVRMRPGVACSVSQAQKDELIFEGNDIELVSNSAALIQQATTV

SEQ ID NO: 62729 - protein, 60 aa, Homo sapiens
MISSRRGDEMLSSHTVPEQSHDMLVHVDNEASINQTTLELSTKSHVTEEEEEEEEEESDS

SEQ ID NO: 62730 - protein, 45 aa, Homo sapiens
RTPYGASIFQSKESSSVLSCDISADDKYIVTGSGDKKATVYEVIY

SEQ ID NO: 62731 - protein, 24 aa, Homo sapiens
LVQPAPPLLQPLPSTPCALALRSL

SEQ ID NO: 62732 - protein, 31 aa, Homo sapiens
ISGQHLVAVEEAAESEDEEKEDVKLLSISGK

SEQ ID NO: 62733 - protein, 150 aa, Homo sapiens
LIDSFELLYYYDEYLGHCMWYIPFFLILFMYFSGCFTASKAESLIPGPALLLVAPSGLYYWYLVTEGQIFILFIFTFFAMLALVLHQKRKRLFLDSNGLFLFSSFALTLLLVALWVAWLWNDPVLRKKYPGVIYVPEPWAFYTLHVSSRH

SEQ ID NO: 62734 - protein, 118 aa, Homo sapiens
VAIQSVRCYSHGSQETDEEFDARWVTYFNKPDIDAWELRKGINTLVTYDMVPEPKIIDAALRACRRLNDFASTVRILEVVKDKAGPHKEIYPYVIQELRPTLNELGISTPEELGLDKV

SEQ ID NO: 62735 - protein, 600 aa, Homo sapiens
VDFGQTEPHTVLFHEPGSSSVWVGGRGKVYLFDFPEGKNASVRTVNIGSTKGSCLDKRDCENYITLLERRSEGLLACGTNARHPSCWNLVNGTVVPLGEMRGYAPFSPDENSLVLFEGDEVYSTIRKQEYNGKIPRFRRIRGESELYTSDTVMQNPQFIKATIVHQDQAYDDKIYYFFREDNPDKNPEAPLNVSRVAQLCRGDQGGESSLSVSKWNTFLKAMLVCSDAATNKNFNRLQDVFLLPDPSGQWRDTRVYGVFSNPWNYSAVCVYSLGDIDKVFRTSSLKGYHSSLPNPRPGKCLPDQQPIPTETFQVADRHPEVAQRVEPMGPLKTPLFHSKYHYQKVAVHRMQASHGETFHVLYLTTDRGTIHKVVEPGEQEHSFAFNIMEIQPFRRAAAIQTMSLDAERRKLYVSSQWEVSQVPLDLCEVYGGGCHGCLMSRDPYCGWDQGRCISIYSSERSVLQSINPAEPHKECPNPKPDKAPLQKVSLAPNSRYYLSCPMESRHATYSWRHKENVEQSCEPGHQSPNCILFIENLTAQQYGHYFCEAQEGSYFREAQHWQLLPEDGIMAEHLLGHACALAASLWLGVLPTLTLGLLVH

SEQ ID NO: 62736 - protein, 310 aa, Homo sapiens
IPDTDFDFEGNLALFDKAAVFEEIDTYERRSGTRSRGIPNERPTRYRHDENILESEPIVYRRIIVPHNVSKEFCTDSGLVVPSISYELHKKLLSVAEKHGLTLERRLEMTGVCASQMALTLLGGPNRLNPKNVHQRPTVALLCGPHVKGAQGISCGRHLANHDVQVILFLPNFVKMLESITNELSLFSKTQGQQVSSLKDLPTSPVDLVINCLDCPENVFLRDQPWYKAAVAWANQNRAPVLSIDPPVHEVEQGIDAKWSLALGLPLPLGEHAGRIYLCDIGIPQQVFQEVGINYHSPFGCKFVIPLHSA

SEQ ID NO: 62737 - protein, 169 aa, Homo sapiens
LCGPHVKGAQGISCGRHLANHDVQVILFLPNFVKMLESITNELSLFSKTQGQQVSSLKDLPTSPVDLVINCLDCPENVFLRDQPWYKAAVAWANQNRAPVLSIDPPVHEVEQGIDAKWSLALGLPLPLGEHAGRIYLCDIGIPQQVFQEVGINYHSPFGCKFVIPLHSA

SEQ ID NO: 62738 - protein, 161 aa, Homo sapiens
IGNRALRLGERTPAAVEKRGPYMVTRAPSIQAKLQKHRDLAKAVLRRKGMLGASPNRPDSSGKRSVKFNKGYTALSQSPDENLVSLDSDSDGELGSRYSSGYSSAEQVNQDVSRQLLQDGYHLDEIPDDEDLDLIPPKPMASSTCSCCWCCLGDSSSCTLQ

SEQ ID NO: 62739 - protein, 34 aa, Homo sapiens
TWVGELFLELHNGTYTTHAQVRGRLQGCAGRVCP

SEQ ID NO: 62740 - protein, 26 aa, Homo sapiens
LNQFHDVVTGSCIQMVAEEAMCHYEG

SEQ ID NO: 62741 - protein, 103 aa, Homo sapiens
LNSYKMVYVIKSEDYMYRRTALLRAHQSHERVSKRLHQRFQAWVDKWTKEHVPREMAAETSKWLMGEGLEGLVPCTTTCDTETLHFVSINKYRVKYGTVFKAP

SEQ ID NO: 62742 - protein, 33 aa, Homo sapiens
VRPSGICPNWNLCCRHFFVVYLKTKVNIAIFRN

SEQ ID NO: 62743 - protein, 4 aa, Homo sapiens
LAVQ

SEQ ID NO: 62744 - protein, 164 aa, Homo sapiens
VIAHSEYQKSKRISIFLSMQDEIETEEIIKDIFQRGKICFIPRYRFQSNHMDMVRIESPEEISLLPKTSWNIPQPGEGDVREEALSTGGLDLIFMPGLGFDKHGNRLGRGKGYYDAYLKRCLQHQEVKPYTLALAFKEQICLQVPVNENDMKVDEVLYEDSSTA

SEQ ID NO: 62745 - protein, 38 aa, Homo sapiens
LLHPSVPVPEQSHGYGENRITRGNFFTSQNILEYPSAW

SEQ ID NO: 62746 - protein, 386 aa, Homo sapiens
LAAGSAVFDAMFNGGMATTSAEIELPDVEPAAFLALLRFLYSDEVQIGPETVMTTLYTAKKYAVPALEAHCVEFLTKHLRADNAFMLLTQARLFDEPQLASLCLDTIDKSTMDAISAEGFTDIDIDTLCAVLERDTLSIRESRLFGAVVRWAEAECQRQQLPVTFGNKQKVLGKALSLIRFPLMTIEEFAAGPAQSGILSDREVVNLFLHFTVNPKPRVEYIDRPRCCLRGKECCINRFQQVESRWGYSGTSDRIRFTVNRRISIVGFGLYGSIHGPTDYQVNIQIIEYEKKQTLGQNDTGFSCDGTANTFRVMFKEPIEILPNVCYTACATLKGPDSHYGTKGLKKVVHETPAASKTVFFFFSSPGNNNGTSIEDGQIPEIIFYT

SEQ ID NO: 62747 - protein, 182 aa, Homo sapiens
LAKKKADLHDEEDEQDILLAQDLEDMWEQKFLQFKLGARITEADEKNDRTSLNRKLDRNLVLLVREKFGDQDVWILPQAEWQPGETLRGTAERTLATLSENNMEAKFLGNAPCGHYTFKFPQAMRTESNLGAKVFFFKALLLTGDFSQAGNKGHHVWVTKDELGDYLKPKYLAQVRRFVSDL

SEQ ID NO: 62748 - protein, 340 aa, Homo sapiens
RKERYYVLYIRPSHIHRRKFDAKGNEIEPNFSATRKVNTGFLMSSYKVEAKGDTDRLTPEALKGLVNKPELLALTESLTPDHTVAFWMPESEMEVMELELGAGVRLKTRGDGPFLDSLAKLEAGTVTKCNFTGDGKTGASWTDNIMAQKCSKGAAAEIREQGDGAEDEEWPEEIQQQIVRETFHLVLKRDDNICNFLEGGSLIGGSDYKLIYRHYATLYFVFCVDSSESELGILDLIQVFVETLDKCFENVCELDLIFHMDKVHYILQEVVMGGMVLETNMNEIVAQIEAQNRLEKSEGGLSAAPARAVSAVKNINLPEIPRNINIGDLNIKVPNLSQFV

SEQ ID NO: 62749 - protein, 168 aa, Homo sapiens
KQEILLAHRRFCELLPQEQRSVESSLRAQVPFEQILSLPELKANPFKERICRVFSTSPAKDSLSFEDFLDLLSVFSDTATPDIKSHYAFRIFDFDDDGTLNREDLSRLVNCLTGEGEDTRLSASEMKQLIDNILEESDIDRDGTINLSEFQHVISRSPDFASSFKIVL

SEQ ID NO: 62750 - protein, 190 aa, Homo sapiens
LKTLLVNNNRICRIGEGLDQALPCLTELILTNNSLVELGDLDPLASLKSLTYLSILRNPVTNKKHYRLYVIYKVPQVRVLDFQKVKLKERQEAEKMFKGKRGAQLAKDIARRSKTFNPGAGLPTDKKKGGPSPGDVEAIKNAIANASTLAEVERLKGLLQSGQIPGRERRSGPTDDGEEEMEEDTVTNGS

SEQ ID NO: 62751 - protein, 21 aa, Homo sapiens
LKTEQCPAQNCQPWRIYVKPS

SEQ ID NO: 62752 - protein, 12 aa, Homo sapiens
RIHRDSLWTTCL

SEQ ID NO: 62753 - protein, 20 aa, Homo sapiens
RTRICHKRNYKWKAFLQRYQ

SEQ ID NO: 62754 - protein, 199 aa, Homo sapiens
LEMESYDEAIANLQRAYSLAKEQRLNFGDDIPSALRIAKKKRWNSIEERRIHQESELHSYLSRLIAAERERELEECQRNHEGDEDDSHVRAQQACIEAKHDKYMADMDELFSQVDEKRKKRDIPDYLCGKISFELMREPCITPSGITYDRKDIEEHLQRVGHFDPVTRSPLTQEQLIPNLAMKEVIDAFISENGWVEDY

SEQ ID NO: 62755 - protein, 61 aa, Homo sapiens
VAAFRFELREDGRPELPPQAHGLGVDGACRPCSDAELLLAACTSDFGECPRHGGSLEPAFP

SEQ ID NO: 62756 - protein, 178 aa, Homo sapiens
LRGLRCGPRAPGPSLLVRHGSGGPSWTRERTLVAVKPDGVQRRLVGDVIQRFERRGFTLVGMKMLQAPESVLAEHYQDLRRKPFYPALIRYMSSGPVVAMVWEGYNVVRASRAMIGHTDSAEAAPGTIRGDFSVHISRNVIHASDSVEGAQREIQLWFQSSELVSWADGGQHSSIHPA

SEQ ID NO: 62757 - protein, 55 aa, Homo sapiens
IDILINCAAGNFLCPAGALSFNAFKTVMDIDTSGTFNVSRVLYEKFFRVGASCAL

SEQ ID NO: 62758 - protein, 301 aa, Homo sapiens
LARLLLLLGLSAGGPAPAGAAKMKVVEEPNAFGVNNPFLPQASRLQAKRDPSPVSGPVHLFRLSGKCFSLVESTYKYEFCPFHNVTQHEQTFRWNAYSGILGIWHEWEIANNTFTGMWMRDGDACRSRSRQSKVELACGKSNRLAHVSEPSTCVYALTFETPLVCHPHALLVYPTLPEALQRQWDQVEQDLADELITPQGHEKLLRTLFEDAGYLKTPEENEPTQLEGGPDSLGFETLENCRKAHKELSKEIKRLKGLLTQHGIPYTRPTETSNLEHLGHETPRAKSPEQLRGDPGLRGSL

SEQ ID NO: 62759 - protein, 185 aa, Homo sapiens
ISLMSVGFLLEKPDEAVVWRGPKKNALIKQFVSDVAWGELDYLVVDTPPGTSDEHMATIEALRPYQPLGALVVTTPQAVSVGDVRRELTFCRKTGLRVMGIVENMSGFTCPHCTECTSVFSRGGGEELAQLAGVPFLGSVPLDPALMRTLEEGHDFIQEFPGSPAFAALTSIAQKILDATPACLP

SEQ ID NO: 62760 - protein, 25 aa, Homo sapiens
LWHNMKLPVPAAAPTPWETHKGALP

SEQ ID NO: 62761 - protein, 73 aa, Homo sapiens
IHLFSKFYPCEECAEDLRKRLCRNHPDTRTRACFTQWLCHLHNEVNRKLGKPDFDCSKVDERWRDGWKDGSCD

SEQ ID NO: 62762 - protein, 216 aa, Homo sapiens
KPDWAHTGSHSSEAGKKDVSGPLRELRPRLCHLRKGPQGYGFNLHSDKSRPGQYIRSVDPGSPAARSGLRAQDRLIEVNGQNVEGLRHAEVVASIKAREDEARLLVVDPETDEHFKRLRVTPTEEHVEGPLPSPVTNGTSPAQLNGGSACSSRSDLPGSDKDTEDGSAWKQDPFQESGLHLSPTAAEAKEKARAMRVNKRAPQMDWNRKREIFSNF

SEQ ID NO: 62763 - protein, 113 aa, Homo sapiens
VDTSVAKIVSDRNLPFVARQMALHANMASQVHHSRSNPTDIYPSKWIARLRHIKRLRQRICEEAAYSNPSLPLVHPPSHSKAPAQTPAEPTPGYEVGQRKRLISSVEDFTEFV

SEQ ID NO: 62764 - protein, 55 aa, Homo sapiens
TTFGPAFSAVTTITKADGTSTYKQHCRTPSSSSTLAYSPRDEEDSMVGPYPQEPV

SEQ ID NO: 62765 - protein, 174 aa, Homo sapiens
LKAIKVWDIVGTELKLKKELTGLNHWVRALVAAQSYLYSGSYQTIKIWDIRTLDCIHVLQTSGGSVYSIAVTNHHIVCGTYENLIHVWDIESKEQVRTLTGHVGTVYALAVISTPDQTKVFSASYDRSLRVWSMDNMICTQTLLRHQGSVTALAVSRGRLFSGAVDSTVKVWTC

SEQ ID NO: 62766 - protein, 70 aa, Homo sapiens
TMPQEREVHHPHRGDRRRGLPSCGADPVTMCPLPAGARPLIIHSSILEPVSASQTRREPSSSNHKGGGGR

SEQ ID NO: 62767 - protein, 90 aa, Homo sapiens
VKEFRKHGIGSLLLESLKDHISTTAQDHCKAIYLHVLTTNNTAINFYENRDFKQHHYLPYYYSIRGVLKDGFTYVLYINGGHPPWTILYP

SEQ ID NO: 62768 - protein, 287 aa, Homo sapiens
KFDLGSKIADLKAARQLASEITSKGASLYDLLGMEVELREMRTEAIARPLEINETEKVMRIAIKEILTQVQKTKDLLNNVASDEANLEAKIEKRKLELERNRKRLETLQSVRPCFMDEYEKTEEELQKQYDTYLEKFQNLTYLEQQLEDHHRMEQERFEEAKNTLCLIQNKLKEEEKRLLKSGSNDDSDIDIQEDDESDSELEERRLPKPQTAMEMLMQGRPGKRIVGTMQGGDSDDNEDSEESEIDMEDDDDEDDDLEDESISLSPTKPNRRVRKSEPLDESDNDF

SEQ ID NO: 62769 - protein, 14 aa, Homo sapiens
IPPGSVLLKPAVVN

SEQ ID NO: 62770 - protein, 386 aa, Homo sapiens
TGTLTGGWRTGDSDLRQSLAATPRLECNGAISAHCNLRFPDSSDSPASASRVGGTTGPEEREQQEPHPAAMSAEVETSEGVDESEKKNSGALEKENQMRMADLSELLKEGTKEAHDRAENTQFVKDFLKGNIKKELFKLATTALYFTYSALEEEMERNKDHPAFAPLYFPMELHRKEALTKDMEYFFGENWEEQVQCPKAAQKYVERIHYIGQNEPELLVAHAYTRYMGDLSGGQVLKKVAQRALKLPSTGEGTQFYLFENVDNAQQFKQLYRARMNALDLNMKTKERIVEEANKAFEYNMQIFNELDQAGSTLARETLEDGFPVHDGKGDMRKCPFYAAEQDKGALEGSSCPFRTAMAVLRKPSLQFILAAGVALAAGLLAWYYM

SEQ ID NO: 62771 - protein, 594 aa, Homo sapiens
LSPLPFRPWPLCPAAPRTMGSILSRRIAGVEDIDIQANSAYRYPPKSGNYFASHFFMGGEKFDTPHPEGYLFGENMDLNFLGSRPVQFPYVTPAPHEPVKTLRSLVNIRKDSLRLVRYKDDADSPTEDGDKPRVLYSLEFTFDADARVAITIYCQASEEFLNGRAVYSPKSPSLQSETVHYKRGVSQQFSLPSFKIDFSEWKDDELNFDLDRGVFPVVIQAVVDEGDVVEVTGHAHVLLAAFEKHMDGSFSVKPLKQKQIVDRVSYLLQEIYGIENKNNQETKPSDDENSDNSNECVVCLSDLRDTLILPCRHLCLCTSCADTLRYQANNCPICRLPFRALLQIRAVRKKPGALSPVSFSPVLAQSLEHDEHSCPFKKSKPHPASLASKKPKRETNSDSVPPGYEPISLLEALNGLRAVSPAIPSAPLYEEITYSGISDGLSQASCPLAAIDHILDSSRQKGRPQSKAPDSTLRSPSSPIHEEDEEKLSEDVDAPPPLGGAELALRESSSPESFITEEVDESSSPQQGTRAASIENVLQDSSPEHCGRGPPADIYLPGRPTSMETAHGLATTSPTWPPLGGPSPDPSAAELTPL

SEQ ID NO: 62772 - protein, 203 aa, Homo sapiens
LKQISRVEAMRLGPGWSHSCHAMLYAANPGQLFGRIPMRFSVLMQMRFDGLLGFPGGFVDRRFWSLEDGLNRVLGLGLGCLRLTEADYLSSHLTEGPHRVVAHLYARQLTLEQLHAVEISAVHSRDHGLEVLGLVRVPLYTQKDRVGGFPNFLSNAFVSTAKCQLLFALKVLNMMPEEKLVEALAAATEKQKKALEKLLPASS

SEQ ID NO: 62773 - protein, 150 aa, Homo sapiens
IDWHNYGYSIMGLVHGPNHPLVLLAKWYEKFFGRLSHLNLCVTNAMREDLADNWHIRAVTVYDKPASFFKETPLDLQHRLFMKLGSMHSPFRARSEPEDPVTERSAFTERDAGSGLVTRLRERPALLVSSTSWTEDEDFSILLAALESRV

SEQ ID NO: 62774 - protein, 28 aa, Homo sapiens
LRSSPRAMQSYSLPAWTCLQYLLWDLPC

SEQ ID NO: 62775 - protein, 300 aa, Homo sapiens
TTLPRGPRLRRTRRRWRRGRGRPRRMEERKEEGEAEIQEHGPEHWFSKWERQCLAEAEQDEQLPPELQEEAAAAAQPEHKQQKLWHLFQNSATAVAQLYKDRVCQQPGLSLWVPFQNAATAVTNLYKESVDTHQRSFDIGIQIGYQRRNKDVLAWVKKRRRTIRREDLISFLCGKVPPPRNSRAPPRLTVVSPNRATSTETSSSVETDLQPFREAIALHGLSGAMASISVRSSTPGSPTHVSSGSNASRRRNGLHDVDLNTFISEEMALHLDNGGTRKRTSAQCGDVITDSPTHKRNRMI

SEQ ID NO: 62776 - protein, 15 aa, Homo sapiens
LAAEPKVNRGKAGMK

SEQ ID NO: 62777 - protein, 152 aa, Homo sapiens
IPSVFLRGKAANAFHVYQVYIRIKDDEWNIYRRYTEFRSLHHKLQNKYPQVRAYNFPPKKAIGNKDAKFVEERRKQLQNYLRSVMNKVIQMVPEFAASPKKETLIQLMPFFVDITPPGEPVNSRPKAASRFPKLSRGQPRETRNVEPQSGDL

SEQ ID NO: 62778 - protein, 165 aa, Homo sapiens
VSFRMAKEEPQSISRDLQELQKKLSLLIDSFQNNSKVVAFMKSPVGQYLDSHPFLAFTLLVFIVMSAVPVGFFLLIVVLTTLAALLGVIILEGLVISVGGFSLLCILCGLGFVSLAMSGMMIASYVVVSSLISCWFSPRPLTQQNTSCDFLPAMKSAEFEGLYQE

SEQ ID NO: 62779 - protein, 34 aa, Homo sapiens
VKSIDDEDVDENEDDVYGNSSGRKHRGHSESPEK

SEQ ID NO: 62780 - protein, 234 aa, Homo sapiens
IALLDIDICGPSIPKIMGLEGEQVHQSGSGWSPVYVEDNLGVMSVGFLLSSPDDAVIWRGPKKNGMIKQFLRDVDWGEVDYLIVDTPPGTSDEHLSVVRYLATAHIDGAVIITTPQEVSLQDVRKEINFCRKVKLPIIGVVENMSGFICPKCKKESQIFPPTTGGAELMCQDLEVPLLGRVPLDPLIGKNCDKGQSFFIDAPDSPATLAYRSIIQRIQEFCNLHQSKEENLISS

SEQ ID NO: 62781 - protein, 302 aa, Homo sapiens
TEKSACKSSDLWALGCIIYQLVAGLPPFRAGNEYLIFQKIIKLEYDFPEKFFPKARDLVEKLLVLDATKRLGCEEMEGYGPLKAHPFFESVTWENLHQQTPPKLTAYLPAMSEDDEDCYGNYDNLLSQFGCMQVSSSSSSHSLSASDTGLPQRSGSNIEQYIHDLDSNSFELDLQFSEDEKRLLLEKQAGGNPWHQFVENNLILKMGPVDKRKGLFARRRQLLLTEGPHLYYVDPVNKVLKGEIPWSQELRPEAKNFKTFFVHTPNRTYYLMDPSGNAHKWCRKIQEVWRQRYQSHPDAAVQ

SEQ ID NO: 62782 - protein, 113 aa, Homo sapiens
VLEEAEFYNITSLIKLVKDKIRERDSKTSQVPVKHVYRVLQCQEEELTQMVSTMSDGWKFEQLVSIGSSYNYGNEDQAEFLCVVSKELHNTPYGTASEPSEKAKILQERGSRM

SEQ ID NO: 62783 - protein, 310 aa, Homo sapiens
IMAAAGAPDGMEEPGMDTEAETVATEAPARPVNCLEAEAAAGAAAEDSGAARGSLQPAPAQPPGDPAAQASVSNGEDAGGGAGRELVDLKIIWNKTKHDVKFPLDSTGSELKQKIHSITGLPPAMQKVMYKGLVPEDKTLREIKVTSGAKIMVVGSTINDVLAVNTPKDAAQQDAKAEENKKEPLCRQKQHRKVLDKGKPEDVMPSVKGAQERLPTVPLSGMYNKSGGKVRLTFKLEQDQLWIGTKERTEKLPMGSIKNVVSEPIEGHEDYHMMAFQLGPTEASYYWVYWVPTQYVDAIKDTVLGKWQYF

SEQ ID NO: 62784 - protein, 274 aa, Homo sapiens
RKAPEINRGYFARVHGVSQLIKAFLRKTECHCQIVNLGAGMDTTFWRLKDEDLLPSKYFEVDFPMIVTRKLHSIKCKPPLSSPILELHSEDTLQMDGHILDSKRYAVIGADLRDLSELEEKLKKCNMNTQLPTLLIAECVLVYMTPEQSANLLKWAANSFERAMFINYEQVNMGDRFGQIMIENLRRRQCDLAGVETCKSLESQKERLLSNGWETASAVDMMELYNRLPRAEVSRIESLEFLDEMELLEQLMRHYCLCWATKGGNELGLKEITY

SEQ ID NO: 62785 - protein, 207 aa, Homo sapiens
TRKLHSIKCKPPLSSPILELHSEDTLQMDGHILDSKRYAVIGADLRDLSELEEKLKKCNMNTQLPTLLIAECVLVYMTPEQSANLLKWAANSFERAMFINYEQVNMGDRFGQIMIENLRRRQCDLAGVETCKSLESQKERLLSNGWETASAVDMMELYNRLPRAEVSRIESLEFLDEMELLEQLMRHYCLCWATKGGNELGLKEITY

SEQ ID NO: 62786 - protein, 490 aa, Homo sapiens
RRGEERRESQEGRPGYVLLRCRHAVRQRFLPGSPRLEGHAAFSSRHFREPGLSILLESYYEHEVRLSPHVLGHSKAHVSRIVGELVRAGRARGSPGLIPGGALALAFRGDFIQVGSAYEQHKIRRPDSFDVLVPLRLPPLVALEPRSLGEEPALAPAFRGCFLCALKAPPSPSGASGGHWLRDCKPFADAFCVDVRGRRHLSATLVLRWFQSHLQRSLATVRYSLEGRCRVTLTPGGLEQPPTLHILPCRTDYGCCRLSMAVRLIPAVHLGDGVFLVAPPPPPLPSAPLLELPEGLRAEALWGVNTARQEQKLLSWLQERAAPGACYLKCLQLLKALRDLGARGLDSAAATQWGRILSSYVLKTVLLAVLLRKGAPGQGWDEEHLGRCLEELVQFLRDCLLRRHTLFHCVLGPGGAAAEVGPLPKALREAAPVDLLAAFDGHARELAAARLLSTWQRLPQLLRAYGGPRYLARCPPPRSQRTQGFLEGEP

SEQ ID NO: 62787 - protein, 16 aa, Homo sapiens
MEDDAVPAAKMKIPSS

SEQ ID NO: 62788 - protein, 302 aa, Homo sapiens
LARRMWTLRSPLTRSLYVNMTSGPGGPAAAAGGRKENHQWYVCNREKLCESLQAVFVQSYLDQGTQIFLNNSIEKSGWLFIQLYHSFVSSVFSLFMSRTSINGLLGRGSMFVFSPDQFQRLLKINPDWKTHRLLDLGAGDGEVTKIMSPHFEEIYATELSETMIWQLQKKKYRVLGINEWQNTGFQYDVISCLNLLDRCDQPLTLLKDIRSVLEPTRGRVILALVLPFHPYVENVGGKWEKPSEILEIKGQNWEEQVNSLPEVFRKAGFVIEAFTRLPYLCEGDMYNDYYVLDDAVFVLKPV

SEQ ID NO: 62789 - protein, 84 aa, Homo sapiens
LHLSSNSGCAGYCLGKTGTPGTWQTKISSSAWKALMAASPPELAMMVILMGTATMRKVTSSAPSRMTQARTRMSIPRLISTTAT

SEQ ID NO: 62790 - protein, 973 aa, Homo sapiens
IGSARGQSTGKGPPQSPVFEGVYNNSRMLHFLTAVVGSTCDVKVKNGTTYEGIFKTLSSKFELAVDAVHRKASEPAGGPRREDIVDTMVFKPSDVMLVHFRNVDFNYATKDKFTDSAIAMNSKVNGEHKEKVLQRWEGGDSNSDDYDLESDMSNGWDPNEMFKFNEENYGVKTTYDSSLSSYTVPLEKDNSEEFRQRELRAAQLAREIESSPQYRLRIAMENDDGRTEEEKHSAVQRQGSGRESPSLASREGKYIPLPQRVREGPRGGVRCSSSRGGRPGLSSLPPRGPHHLDNSSPGPGSEARGINGGPSRMSPKAQRPLRGAKTLSSPSNRPSGETSVPPPPAAPPFLPVGRMYPPRSPKSAAPAPISASCPEPPIGSAVPTSSASIPVTSSVSDPGVGSISPASPKISLAPTDVKELSTKEPGRTLEPQELARIAGKVPGLQNEQKRFQLEELRKFGAQFKLQPSSSPENSLDPFPPRILKEEPKGKEKEVDGLLTSEPMGSPVSSKTESVSDKEDKPPLAPSGGTEGPEQPPPPCPSQTGSPPVGLIKGEDKDEGPVAEQVKKSTLNPNAKEFNPTKPLLSVNKSTSTPTSPGPRTHSTPSIPVLTAGQSGLYSPQYISYIPQIHMGPAVQAPQMYPYPVSNSVPGQQGKYRGAKGSLPPQRSDQHQPASAPPMMQAAAAAGPPLVAATPYSSYIPYNPQQFPGQPAMMQPMAHYPSQPVFAPMLQSNPRMLTSGSHPQAIVSSSTPQYPSAEQPTPQALYATVHQSYPHHATQLHAHQPQPATTPTGSQPQSQHAAPSPVQHQAGQAPHLGSGQPQQNLYHPGALTGTPPSLPPGPSAQSPQSSFPQPAAVYAIHHQQLPHGFTNMAHVTQAHVQTGITAAPPPHPGAPHPPQVMLLHPPQSHGGPPQGAVPQSGVPALSASTPSPYPYIGHPQGEQPGQAPGFPGGADDRILQSHPSQQLPFHPPGN

SEQ ID NO: 62791 - protein, 381 aa, Homo sapiens
IPVLTAGQSGLYSPQYISYIPQIHMGPAVQAPQMYPYPVSNSVPGQQGKYRGAKGSLPPQRSDQHQPASAPPMMQAAAAAGPPLVAATPYSSYIPYNPQQFPGQPAMMQPMAHYPSQPVFAPMLQSNPRMLTSGSHPQAIVSSSTPQYPSAEQPTPQALYATVHQSYPHHATQLHAHQPQPATTPTGSQPQSQHAAPSPVQHQAGQAPHLGSGQPQQNLYHPGALTGTPPSLPPGPSAQSPQSSFPQPAAVYAIHHQQLPHGFTNMAHVTQAHVQTGITAAPPPHPGAPHPPQVMLLHPPQSHGGPPQGAVPQSGVPALSASTPSPYPYIGHPQGEQPGQAPGFPGGADDRIREFSLAGGIWHGRAEGLQVGQDARVLGGE

SEQ ID NO: 62792 - protein, 159 aa, Homo sapiens
LNYMDRFTVAGVLPDIEQFFNIGDSSSGLIQTVFISSYMVLAPVFGYLGDRYNRKYLMCGGIAFWSLVTLGSSFIPGEHFWLLLLTRGLVGVGEASYSTIAPTLIADLFVADQRSRMLSIFYFAIPVGSGLGYIAGSKVKDMAGDWHWALRVSLVLAWG

SEQ ID NO: 62793 - protein, 93 aa, Homo sapiens
VLQRLVDLSGGWDALVGPGPWKAGPGGRWPRMRPAPSMPCSRTPAPRPAVLVITTQSFFRHPRGSLGVGPCRAAPPLLTLSSQSYRHRWCRTA

SEQ ID NO: 62794 - protein, 47 aa, Homo sapiens
KKDAVLTKCFHVFCFECVRGRYEARQRKCPKCNAAFGAHDFHRIYIS

SEQ ID NO: 62795 - protein, 53 aa, Homo sapiens
TCLLPHIEAVSNIHNLNSVHQSPHQRLHRYVELAWGFSTALGTFLFLAEVVLR

SEQ ID NO: 62796 - protein, 44 aa, Homo sapiens [sequence omitted]

SEQ ID NO: 62797 - protein, 286 aa, Homo sapiens
IHTAGLVDVFGRASPKTIHEVNVQGTRNVIEACVQTGTRFLVYTSSMEVVGPNTKGHPFYRGNEDTPYEAVHRHPYPCSKALAEWLVLEANGRKVRGGLPLVTCALRPTGIYGEGHQIMRDFYRQGLRLGGWLFRAIPASVEHGRVYVGNVAWMHVLAARELEQRATLMGGQVYFCYDGSPYRSYEDFNMEFLGPCGLRLVGARPLLPYWLLVFLAALNALLQWLLRPLVLYAPLLNPYTLAVANTTFTVSTDKAQRHFGYEPLFSWEDSRTRTILWVQAATGSAQ

SEQ ID NO: 62798 - protein, 404 aa, Homo sapiens
VEIGETYLCRRPDSTWHSAEVIQSRVNDQEGREEFYVHYVGFNRRLDEWVDKNRLALTKTVKDAVQKNSEKYLSELAEQPERKITRNQKRKHDEINHVQKTYAEMDPTTAALEKEHEAITKVKYVDKIHIGNYEIDAWYFSPFPEDYGKQPKLWLCEYCLKYMKYEKSYRFHLGQCQWRQPPGKEIYRKSNISVYEVDGKDHKIYCQNLCLLAKLFLDHKTLYFDVEPFVFYILTEVDRQGAHIVGYFSKEKESPDGNNVACILTLPPYQRRGYGKFLIAFSYELSKLESTVGSPEKPLSDLGKLSYRSYWSWVLLEILRDFRGTLSIKDLSQMTSITQNDIISTLQSLNMVKYWKGQHVICVTPKLVEEHLKSAQYKKPPITVDSVCLKWAPPKHKQVKLSKK

SEQ ID NO: 62799 - protein, 90 aa, Homo sapiens
VGFNRRLDEWVDKNRLALTKTVKDAVQKNSEKYLSELAEQPERKITRNQKRKHDEINHVQKVRIPSHPRAQEAQLLCQFPWVSRAPVPKP

SEQ ID NO: 62800 - protein, 101 aa, Homo sapiens
KLLYGDVMLENYGNLVSLGLAVSKPDLITFLEQRKEPWNVKSAETVAIQPDIFSHDTQGLLRKKLIEASFQKVILDGYGSCGPQNLNLRKEWESEGKIILW

SEQ ID NO: 62801 - protein, 60 aa, Homo sapiens [sequence omitted]

SEQ ID NO: 62802 - protein, 65 aa, Homo sapiens
LFAPRHRPAPRHGGPGQGLGSLQEPRGTRTTCTARYASLGPQSLQPRRPLHSPLPAVSWVPGSVS

SEQ ID NO: 62803 - protein, 1070 aa, Homo sapiens
RSGSVYEPLKSINLPRPDNETLWDKLDHYYRIVKSTLLLYQSPTTGLFPTKTCGGDQKAKIQDSLYCAAGAWALALAYRRIDDDKGRTHELEHSAIKCMRGILYCYMRQADKVQQFKQDPRPTTCLHSVFNVHTGDELLSYEEYGHLQINAVSLYLLYLVEMISSGLQIIYNTDEVSFIQNLVFCVERVYRVPDFGVWERGSKYNNGSTELHSSSVGLAKAALEAINGFNLFGNQGCSWSVIFVDLDAHNRNRQTLCSLLPRESRSHNTDAALLPCISYPAFALDDEVLFSQTLDKVVRKLKGKYGFKRFLRDGYRTSLEDPNRCYYKPAEIKLFDGIECEFPIFFLYMMIDGVFRGNPKQVQEYQDLLTPVLHHTTEGYPVVPKYYYVPADFVEYEKNNPGSQKRFPSNCGRDGKLFLWGQALYIIAKLLADELISPKDIDPVQRYVPLKDQRNVSMRFSNQGPLENDLVVHVALIAESQRLQVFLNTYGIQTQTPQQVEPIQIWPQQELVKAYLQLGINEKLGLSGRPDRPIGCLGTSKIYRILGKTVVCYPIIFDLSDFYMSQDVFLLIDDIKNALQFIKQYWKMHGRPLFLVLIREDNIRGSRFNPILDMLAALKKGIIGGVKVHVDRLQTLISGAVVEQLDFLRISDTEELPEFKSFEELEPPKHSKVKRQSSTPSAPELGQQPDVNISEWKDKPTHEILQKLNDCSCLASQAILLGILLKREGPNFITKEGTVSDHIERVYRRAGSQKLWSVVRRAASLLSKVVDSLAPSITNVLVQGKQVTLGAFGHEEEVISNPLSPRVIQNIIYYKCNTHDEREAVIQQELVIHIGWIISNNPELFSGMLKIRIGWIIHAMEYELQIRGGDKPALDLYQLSPSEVKQLLLDILQPQQNGRCWLNRRQIDGSLNRTPTGFYDRVWQILERTPNGIIVAGKHLPQQPTLSDMTMYEMNFSLLVEDTLGNIDQPQYRQIVVELLMVVSIVLERNPELEFQDKVDLDRLVKEAFNEFQKDQSRLKEIEKQDDMTSFYNTPPLGKRGTCSYLTKAVMNLLLEGEVKPNNDDPCLIS

SEQ ID NO: 62804 - protein, 320 aa, Homo sapiens
MSKSESPKEPEQLRKLFIGGLSFETTDESLRSHFEQWGTLTDCVVMRDPNTKRSRGFGFVTYATVEEVDAAMNARPHKVDGRVVEPKRAVSREDSQRPDAHLTVKKIFVGGIKEDTEEHHLRDYFEQYGKIEVIEIMTDRGSGKKRGFAFVTFDDHDSVDKIVIQKYHTVNGHNCEVRKALSKQEMASASSSQRGRSGSGNFGGGRGGGFGGNDNFGRGGNFSGRGGFGGSRGGGGYGGSGDGYNGFGNDGSNFGGGGSYNDFGNYNNQSSNFGPMKGGNFEGRSSGPHGGGGQYFAKPRNQGGYGGSSSSSSYGSGRRF

SEQ ID NO: 62805 - protein, 21 aa, Homo sapiens
VKMNLRRFIAYQETVEKRLTS

SEQ ID NO: 62806 - protein, 50 aa, Homo sapiens
IQVTEETCTILQGLGYSCECRGLINVKGKGELRTYFVCTDTAKFQGLGLN

SEQ ID NO: 62807 - protein, 167 aa, Homo sapiens
LDIISMAETTMMPEEIELEMAKIQRLREVLVRRESELRFMMDDIQLCKDIMDLKQELQNLVAIPEKEKTKLQKQREDELIQKIHKLVQKRDFLVDDAEVERLREQEEDKEMADFLRIKLKPLDKVTKSPASSRAEKKAEPPPSKPTVAKTGLALIKDCCGATQCNIM

SEQ ID NO: 62808 - protein, 1545 aa, Homo sapiens
ITRRPVPAAARATGMALRGFCSADGSDPLWDWNVTWNTSNPDFTKCFQNTVLVWVPCFYLWACFPFYFLYLSRHDRGYIQMTPLNKTKTALGFLLWIVCWADLFYSFWERSRGIFLAPVFLVSPTLLGITMLLATFLIQLERRKGVQSSGIMLTFWLVALVCALAILRSKIMTALKEDAQVDLFRDITFYVYFSLLLIQLVLSCFSDRSPLFSETIHDPNPCPESSASFLSRITFWWITGLIVRGYRQPLEGSDLWSLNKEDTSEQVVPVLVKNWKKECAKTRKQPVKVVYSSKDPAQPKESSKVDANEEVEALIVKSPQKEWNPSLFKVLYKTFGPYFLMSFFFKAIHDLMMFSGPQILKLLIKFVNDTKAPDWQGYFYTVLLFVTACLQTLVLHQYFHICFVSGMRIKTAVIGAVYRKALVITNSARKSSTVGEIVNLMSVDAQRFMDLATYINMIWSAPLQVILALYLLWLNLGPSVLAGVAVMVLMVPVNAVMAMKTKTYQVAHMKSKDNRIKLMNEILNGIKVLKLYAWELAFKDKVLAIRQEELKVLKKSAYLSAVGTFTWVCTPFLVALCTFAVYVTIDENNILDAQTAFVSLALFNILRFPLNILPMVISSIVQASVSLKRLRIFLSHEELEPDSIERRPVKDGGGTNSITVRNATFTWARSDPPTLNGITFSIPEGALVAVVGQVGCGKSSLLSALLAEMDKVEGHVAIKGSVAYVPQQAWIQNDSLRENILFGCQLEEPYYRSVIQACALLPDLEILPSGDRTEIGEKGVNLSGGQKQRVSLARAVYSNADIYLFDDPLSAVDAHVGKHIFENVIGPKGMLKNKTRILVTHSMSYLPQVDVIIVMSGGKISEMGSYQELLARDGAFAEFLRTYASTEQEQDAEENGVTGVSGPGKEAKQMENGMLVTDSAGKQLQRQLSSSSSYSGDISRHHNSTAELQKAEAKKEETWKLMEADKAQTGQVKLSVYWDYMKAIGLFISFLSIFLFMCNHVSALASNYWLSLWTDDPIVNGTQEHTKVRLSVYGALGISQGIAVFGYSMAVSIGGILASRCLHVDLLHSILRSPMSFFERTPSGNLVNRFSKELDTVDSMIPEVIKMFMGSLFNVIGACIVILLATPIAAIIIPPLGLIYFFVQRFYVASSRQLKRLESVSRSPVYSHFNETLLGVSVIRAFEEQERFIHQSDLKVDENQKAYYPSIVANRWLAVRLECVGNCIVLFAALFAVISRHSLSAGLVGLSVSYSLQVTTYLNWLVRMSSEMETNIVAVERLKEYSETEKEAPWQIQETAPPSSWPQVGRVEFRNYCLRYREDLDFVLRHINVTINGGEKVGIVGRTGAGKSSLTLGLFRINESAEGEIIIDGINIAKIGLHDLRFKITIIPQDPVLFSGSLRMNLDPFSQYSDEEVWTSLELAHLKDFVSALPDKLDHECAEGGENLSVGQRQLVCLARALLRKTKILVLDEATAAVDLETDDLIQSTIRTQFEDCTVLTIAHRLNTIMDYTRVIVLDKGEIQEYGAPSDLLQQRGLFYSMAKDAGLV

SEQ ID NO: 62809 - protein, 1023 aa, Homo sapiens
ILKCSEQSLIEFFNKMKKWEDMANLPPHFRERTERLERNFTVSAVIFKKYEPIFQDIFKYPQEEQPRQQRGRKQRRQPCTVSEIFHFCWVLFIYAKGNFPMISDDLVNSYHLLLCALDLVYGNALQCSNRKELVNPNFKGLSEDFHAKDSKPSSDPPCIIEKLCSLHDGLVLEAKGIKEHFWKPYIRKLYEKKLLKGKEENLTGFLEPGNFGESFKAINKAYEEYVLSVGNLDERIFLGEDAEEEIGTLSRCLNAGSGTETAERVQMKNILQQHFDKSKALRISTPLTGVRYIKENSPCVTPVSTATHSLSRLHTMLTGLRNAPSEKLEQILRTCSRDPTQAIANRLKEMFEIYSQHFQPDEDFSNCAKEIASKHFRFAEMLYYKVLESVIEQEQKRLGDMDLSGILEQDAFHRSLLACCLEVVTFSYKPPGNFPFITEIFDVPLYHFYKVIEVFIRAEDGLCREVVKHLNQIEEQILDHLAWKPESPLWEKIRDNENRVPTCEEVMPPQNLERADEICIAGSPLTPRRVTEVRADTGGLGRSITSPTTLYDRYSSPPASTTRRRLFVENDSPSDGGTPGRMPPQPLVNAVPVQNVSGETVSVTPVPGQTLVTMATATVTANNGQTVTIPVQGIANENGGITFFPVQVNVGGQAQAVTGSIQPLSAQALAGSLSSQQVTGTTLQVPGQVAIQQISPGGQQQKQGQSVTSSSNRPRKTSSLSLFFRKVYHLAAVRLRDLCAKLDISDELRKKIWTCFEFSIIQCPELMMDRHLDQLLMCAIYVMAKVTKEDKSFQNIMRCYRTQPQARSQVYRSVLIKGKRKRRNSGSSDSRSHQNSPTELNKDRTSRDSSPVMRSSSTLPVPQPSSAPPTPTRLTGANSDMEEEERGDLIQFYNNIYIKQIKTFAMKYSQANMDAPPLSPYPFVRTGSPRRIQLSQNHPVYISPHKNETMLSPREKIFYYFSNSPSKRLREINSMIRTGETPTKKRGILLEDGSESPAKRICPENHSALLRRLQDVANDRGSH

SEQ ID NO: 62810 - protein, 16 aa, Homo sapiens
IPVTHHTHSAVQYGSH

SEQ ID NO: 62811 - protein, 23 aa, Homo sapiens
VGCAKCAQGCICKGASDKCSCCA

SEQ ID NO: 62812 - protein, 27 aa, Homo sapiens
VDLLWWSWMRPHERGAPGGLQQQRLRG

SEQ ID NO: 62813 - protein, 11 aa, Homo sapiens
MILHQLLELTS

SEQ ID NO: 62814 - protein, 556 aa, Homo sapiens
LTLEEHIAHFLGTGGAATTMGNSCICRDDSGTDDSVDTQQQQAENSAVPTADTRSQPRDPVRPPRRGRGPHEPRRKKQNVDGLVLDTLAVIRTLVDNDQEPPYSMITLHEMAETDEGWLDVVQSLIRVIPLEDPLGPAVITLLLDECPLPTKDALQKLTEILNLNGEVACQDSSHPAKHRNTSAVLGCLAEKLAGPASIGLLSPGILEYLLQCLKLQSHPTVMLFALIALEKFAQTSENKLTISESSISDRLVTLESWANDPDYLKRQVGFCAQWSLDNLFLKEGRQLTYEKVNLSSIRAMLNSNDVSEYLKISPHGLEARCDASSFESVRCTFCVDAGVWYYEVTVVTSGVMQIGWATRDSKFLNHEGYGIGDDEYSCAYDGCRQLIWYNARSKPHIHPCWKEGDTVGFLLDLNEKQMIFFLNGNQLPPEKQVFSSTVSGFFAAASFMSYQQCEFNFGAKPFKYPPSMKFSTFNDYAFLTAEEKIILPRHRRLALLKQVSIRENCCSLCCDEVADTQLKPCGHSDLCMDCALQLETCPLCRKEIVSRIRQISHIS

SEQ ID NO: 62815 - protein, 177 aa, Homo sapiens
LPRTMAPKGKVGTRGKKQIFEENRETLKFYLRIILGANAIYCLVTLVFFYSSASFWAWLALGFSLAVYGASYHSMSSMARAAFSEDGALMDGGMDLNMEQGMAEHLKDVILLTAIVQVLSCFSLYVWSFWLLAPGRALYLLWVNVLGPWFTADSGTPAPEHNEKRQRRQERRQMKRL

SEQ ID NO: 62816 - protein, 6 aa, Homo sapiens
MPFTAL

SEQ ID NO: 62817 - protein, 523 aa, Homo sapiens
KKTKKSKLRYTEEGKDVDVSVYDFEEEQQEGLLSEVNAEKVVGNMKPPKPTKIKKKGVKKTFQCELCSYTCPRRSNLDRHMKSHTDERPHKCHLCGRAFRTVTLLRNHLNTHTGTRPHKCPDCDMAFVTSGELVRHRRYKHTHEKPFKCSMCDYASVEVSKLKRHIRSHTGERPFQCSLCSYASRDTYKLKRHMRTHSGEKPYECYICHARFTQSGTMKMHILQKHTENVAKFHCPHCDTVIARKSDLGVHLRKQHSYIEQGKKCRYCDAVFHERYALIQHQKSHKNEKRFKCDQCDYACRQERHMIMHKRTHTGEKPYACSHCDKTFRQKQLLDMHFKRYHDPNFVPAAFVCSKCGKTFTRRNTMARHADNCAGPDGVEGENGGETKKSKRGRKRKMRSKKEDSSDSENAEPDLDDNEDEEEPAVEIEPEPEPQPVTPAPPPAKKRRGRPPGRTNQPKQNQPTAIIQVEDQNTGAIENIIVEVKKEPDAEPAEGEEEEAQPAATDAPNGDLTPEMILSMMDR

SEQ ID NO: 62818 - protein, 97 aa, Homo sapiens
LEAAECPMGPQLVVVGEEGFPDTGSDHSYSLSSGTTEEELLRKLNEQRDILALMEVKMKEMKGSIRHLRLTEAKLREELREKDRLLAMAVIRKKHGM

SEQ ID NO: 62819 - protein, 13 aa, Homo sapiens
RPFSLVRTVRMGP

SEQ ID NO: 62820 - protein, 5 aa, Homo sapiens
MPSCP

SEQ ID NO: 62821 - protein, 144 aa, Homo sapiens
LLPYNYTWSPEKVFVQTPTINYTLRDYRKFFQDIGFEDGWLMRQDTEGLVEATMPPGVQLHCLYGTGVPTPDSFYYESFPDRDPKICFGDGDGTVNLKSALQCQAWQSRQEHQVLLQELPGSEHIEMLANATTLAYLKRVLLGP

SEQ ID NO: 62822 - protein, 482 aa, Homo sapiens
RSSETMQLKKEISLLNGVSLVVGNMIGSGIFVSPKGVLVHTASYGMSLIVWAIGGLFSVVGALCYAELGTTITKSGASYAYILEAFGGFIAFIRLWVSLLVVEPTGQAIIAITFANYIIQPSFPSCDPPYLACRLLAAACICLLTFVNCAYVKWGTRVQDTFTYAKVVALIAIIVMGLVKLCQGHSEHFQDAFEGSSWDMGNLSLALYSALFSYSGWDTLNFVTEEIKNPERNLPLAIGISMPIVTLIYILTNVAYYTVLNISDVLSSDAVAVTFADQTFGMFSWTIPIAVALSCFGGLNASIFASSRLFFVGSREGHLPDLLSMIHIERFTPIPALLFNCTMALIYLIVEDVFQLINYFSFSYWFFVGLSVVGQLYLRWKEPKRPRPLKLSVFFPIVFCICSVFLVIVPLFTDTINSLIGIGIALSGVPFYFMGVYLPESRRPLFIRNVLAAITRGTQQLCFCVLTELDVAEEKKDERKTD

SEQ ID NO: 62823 - protein, 21 aa, Homo sapiens
VEFHPDTGDIIMEFRHADTPD

SEQ ID NO: 62824 - protein, 1222 aa, Homo sapiens
RFPAAMFLYNLTLQRATGISFAIHGNFSGTKQQEIVVSRGKILELLRPDPNTGKVHTLLTVEVFGVIRSLMAFRLTGGTKDYIVVGSDSGRIVILEYQPSKNMFEKIHQETFGKSGCRRIVPGQFLAVDPKGRAVMISAIEKQKLVYILNRDAAARLTISSPLEAHKANTLVYHVVGVDVGFENPMFACLEMDYEEADNDPTGEAAANTQQTLTFYELDLGLNHVVRKYSEPLEEHGNFLITVPGGSDGPSGVLICSENYITYKNFGDQPDIRCPIPRRRNDLDDPERGMIFVCSATHKTKSMFFFLAQTEQGDIFKITLETDEDMVTEIRLKYFDTVPVAAAMCVLKTGFLFVASEFGNHYLYQIAHLGDDDEEPEFSSAMPLEEGDTFFFQPRPLKNLVLVDELDSLSPILFCQIADLANEDTPQLYVACGRGPRSSLRVLRHGLEVSEMAVSELPGNPNAVWTVRRHIEDEFDAYIIVSFVNATLVLSIGETVEEVTDSGFLGTTPTLSCSLLGDDALVQVYPDGIRHIRADKRVNEWKTPGKKTIVKCAVNQRQVVIALTGGELVYFEMDPSGQLNEYTERKEMSADVVCMSLANVPPGEQRSRFLAVGLVDNTVRIISLDPSDCLQPLSMQALPAQPESLCIVEMGGTEKQDELGERGSIGFLYLNIGLQNGVLLRTVLDPVTGDLSDTRTRYLGSRPVKLFRVRMQGQEAVLAMSSRSWLSYSYQSRFHLTPLSYETLEFASGFASEQCPEGIVAISTNTLRILALEKLGAVFNQVAFPLQYTPRKFVIHPESNNLIIIETDHNAYTEATKAQRKQQMAEEMVEAAGEDERELAAEMAAAFLNENLPESIFGAPKAGNGQWASVIRVMNPIQGNTLDLVQLEQNEAAFSVAVCRFSNTGEDWYVLVGVAKDLILNPRSVAGGFVYTYKLVNNGEKLEFLHKTPVEEVPAAIAPFQGRVLIGVGKLLRVYDLGKKKLLRKCENKHIANYISGIQTIGHRVIVSDVQESFIWVRYKRNENQLIIFADDTYPRWVTTASLLDYDTVAGADKFGNICVVRLPPNTNDEVDEDPTGNKALWDRGLLNGASQKAEVIMNYHVGETVLSLQKTTLIPGGSESLVYTTLSGGIGILVPFTSHEDHDFFQHVEMHLRSEHPPLCGRDHLSFRSYYFPVKNVIDGDLCEQFNSMEPNKQKNVSEELDRTPPEVSKKLEDIRTRYAF

SEQ ID NO: 62825 - protein, 410 aa, Homo sapiens
KGGRENRMPILISKIFPGLAADQSRALRLGDAILSVNGTDLRQATHDQAVQALKRAGKEVLLEVKFIREVTPYIKKPSLVSDLPWEGAAPQSPSFSGSEDSGSPKHQNSTKDRKIIPLKMCFAARNLSMPDLENRLIELHSPDSRNTLILRCKDTATAHSWFVAIHTNIMALLPQVLAELNAMLGATSTAGGSKEVKHIAWLAEQAKLDGGRQQWRPVLMAVTEKDLLLYDCMPWTRDAWASPCHSYPLVATRLVHSGSGCRSPSLGSDLTFATRTGSRQGIEMHLFRVETHRDLSSWTRILVQGCHAAAELIKEVSLGCMLNGQEVRLTIHYENGFTISRENGGSSSILYRYPFERLKMSADDGIRNLYLDFGGPEGELTMDLHSCPKPIVFVLHTFLSAKVTRMGLLV

SEQ ID NO: 62826 - protein, 19 aa, Homo sapiens
MRPTATRPRRAFEPSACST

SEQ ID NO: 62827 - protein, 49 aa, Homo sapiens
KELQLPPSRETSVASMSQTSGGEAGSPPPAVVAAGFASEAGSVCIKNDL

SEQ ID NO: 62828 - protein, 10 aa, Homo sapiens
LWPRQMKQKG

SEQ ID NO: 62829 - protein, 45 aa, Homo sapiens
ILNVTAQSHLDLKVWSCHTLRNELLGTASVNLSNVLKNNGGKSTF

SEQ ID NO: 62830 - protein, 38 aa, Homo sapiens
IDIAGYRFQAKAKLYPVASLFTQKRRKDDMELSDLHGK

SEQ ID NO: 62831 - protein, 503 aa, Homo sapiens
VARLGPALRRGAAHIFTSGSPLSGTMATDSWALAVDEQEAAVKSMTNLQIKEEKVKADTNGIIKTSTTAEKTDEEEKEDRAAQSLLNKLIRSNLVDNTNQVEVLQRDPNSPLYSVKSFEELRLKPQLLQGVYAMGFNRPSKIQENALPMMLAEPPQNLIAQSQSGTGKTAAFVLAMLSRVEPSDRYPQCLCLSPTYELALQTGKVIEQMGKFYPELKLAYAVRGNKLERGQKISEQIVIGTPGTVLDWCSKLKFIDPKKIKVFVLDEADVMIATQGHQDQSIRIQRMLPRNCQMLLFSATFEDSVWKFAQKVVPDPNVIKLKREEETLDTIKQYYVLCSSRDEKFQALCNLYGAITIAQAMIFCHTRKTASWLAAELSKEGHQVALLSGEMMVEQRAAVIERFREGKEKVLVTTNVCARGIDVEQVSVVINFDLPVDKDGNPDNETYLHRIGRTGRFGKRGLAVNMVDSKHSMNILNRIQEHFNKKIERLDTDDLDEIEKIAN

SEQ ID NO: 62832 - protein, 93 aa, Homo sapiens
RWFSSHSGFKCPICSKSVASDEMEMHFIMCLSKPRLSYNDDVLTKDAGECVICLEELLQGDTIARLPCLCIYHKSCIDSWFEVNRSCPEHPAD

SEQ ID NO: 62833 - protein, 65 aa, Homo sapiens
MRTHTGEKPYECTECGKTFSQRSTLRLHLRIHTGEKPYECSECGKAFSRKSRLSVHQRVHIGEKP

SEQ ID NO: 62834 - protein, 371 aa, Homo sapiens
MSFYVRPSPAKRRLSTLILHGGGTVCRVQEPGAVLLAQPGEALAEASGDFISTQYILDCVERNERLELEAYRLGPASAADTGSEAKPGALAEGAAEPEPQRHAGRIAFTDADDVAILTYVKENARSPSSVTGNALWKAMEKSSLTQHSWQSLKDRYLKHLRGQEHKYLLGDAPVSPSSQKLKRKAEEDPEAADSGEPQNKRTPDLPEEEYVKEEIQENEEAVKKMLVEATREFEEVVVDESPPDFEIHITMCDDDPPTPEEDSETQPDEEEEEEEEKVSQPEVGAAIKIIRQLMEKFNLDLSTVTQAFLKNSGELEATSAFLASGQRADGYPIWSRQDDIDLQKDDEDTREALVKKFGAQNVARRIEFRKK

SEQ ID NO: 62835 - protein, 25 aa, Homo sapiens
MEILQGRDFTGKVVVVTGANSGIAF

SEQ ID NO: 62836 - protein, 203 aa, Homo sapiens
IRKNHACEMCGKAFRDVYHLNRHKLSHSDEKPYQCPVCQQRFKRKDRMSYHVRSHDGAVHKPYNCSHCGKSFSRPDHLNSHVRQVHSTERPFKCEKCEAAFATKDRLRAHTVRHEEKVPCHVCGKMLSSAYISDHMKVHSQGPHHVCELCNKGTGEVCPMAAAAAAAAAAAAAAVAAPPTAVGSLSGAEGVPVSSQPLPSQPW

SEQ ID NO: 62837 - protein, 32 aa, Homo sapiens
VTPTRPGPTLRAPRGHHASWGPGREPEGPRCG

SEQ ID NO: 62838 - protein, 120 aa, Homo sapiens
LKRKLKFLIYEHECFQEELRKAQRKLLKVSRDKSFLLDRLLQYENVDEDSSDSDATASSDNSETEGTPKLSDTPAPKRKRSPPLGGAPSPSSLSLPPSTGFPLQASGVPSPYLSSERGQA

SEQ ID NO: 62839 - protein, 29 aa, Homo sapiens
TVPRQMFSDAGSGDDALDGDDDLVIDIPE

SEQ ID NO: 62840 - protein, 33 aa, Homo sapiens
VSSSSMRHSTRRRMMGVPSPKLSNPRAVLWASR

SEQ ID NO: 62841 - protein, 10 aa, Homo sapiens
LLLSSSRGPS

SEQ ID NO: 62842 - protein, 11 aa, Homo sapiens
RRTGLRSRVYE

SEQ ID NO: 62843 - protein, 295 aa, Homo sapiens
LELYCDLLLARFGLIQSMKELDSGLAESVSTLIWAAPRLQSEVAELKIVADQLCAKYSKEYGKLCRTNQIGTVNDRLMHKLSVEAPPKILVERYLIEIAKNYNVPYEPDSVVMAEAPPGVETDLIDVGFTDDVKKGGPGRGGSGGFTAPVGGPDGTVPMPMPMPMPMPSANTPFSYPLPKGPSDFNGLPMGTYQAFPNIHPPQIPATPPSYESVDDINADKNISSAQIVGPGPKPEASAKLPSRPADNYDNFVLPELPSVPDTLPTASAGASTSASEDIDFDDLSRRFEELKKKT

SEQ ID NO: 62844 - protein, 32 aa, Homo sapiens
LGAVIALLLWGQLFAVDSGNDVTDIAGQSLVG

SEQ ID NO: 62845 - protein, 57 aa, Homo sapiens
VTLREGHSLSHRELKEWARNVLAPYAVPSELVLVEEIPRNQMGKIDKKALIRHFHPS

SEQ ID NO: 62846 - protein, 4 aa, Homo sapiens
MSFG

SEQ ID NO: 62847 - protein, 55 aa, Homo sapiens
KEKSKSVKQTCDKCNTIIWGLIQTWYTCTGGPRPRRGVRNERDQSSCLRWAHIQM

SEQ ID NO: 62848 - protein, 68 aa, Homo sapiens
LANALLEKEVINYEDIEALIGPPPHGPKKMIAPQRWIDAQREKQDLGEEETEETQQPPLGGEEPTWPK

SEQ ID NO: 62849 - protein, 5 aa, Homo sapiens
IAVRP

SEQ ID NO: 62850 - protein, 257 aa, Homo sapiens
LPCTLAMWELGHCDPRRCTGRKLARLGLVRCLRLGHRFGGLVLSPVGKQYASPADRQLVAQSGVAVIDCSWARLDETPFGKMRGSHLRLLPYLVAANPVNYGRPYRLSCVEAFAATFCIVGFPDLAVILLRKFKWGKGFLDLNRQLLDKYAACGSPEEVLQAEQEFLANAKESPQEEEIDPFDVDSGREFGNPNRPVASTRLPSDTDDSDASEDPGPGAERGGASSSCCEEEQTQGRGAEARAPAEVWKGIKKRQRD

SEQ ID NO: 62851 - protein, 11 aa, Homo sapiens
MNRVLCAPAAG

SEQ ID NO: 62852 - protein, 723 aa, Homo sapiens
IPHNEKLLSLKYESLDYDNSENQLFLEEERRINHTAFRTVEIKRWVICALIGILTGLVACFIDIVVENLAGLKYRVIKGNIDKFTEKGGLSFSLLLWATLNAAFVLVGSVIVAFIEPVAAGSGIPQIKCFLNGVKIPHVVRLKTLVIKVSGVILSVVGGLAVGKEGPMIHSGSVIAAGISQGRSTSLKRDFKIFEYFRRDTEKRDFVSAGAAAGVSAAFGAPVGGVLFSLEEGASFWNQFLTWRIFFASMISTFTLNFVLSIYHGNMWDLSSPGLINFGRFDSEKMAYTIHEIPVFIAMGVVGGVLGAVFNALNYWLTMFRIRYIHRPCLQVIEAVLVAAVTATVAFVLIYSSRDCQPLQGGSMSYPLQLFCADGEYNSMAAAFFNTPEKSVVSLFHDPPGSYNPLTLGLFTLVYFFLACWTYGLTVSAGVFIPSLLIGAAWGRLFGISLSYLTGAAIWADPGKYALMGAAAQLGGIVRMTLSLTVIMMEATSNVTYGFPIMLVLMTAKIVGDVFIEGLYDMHIQLQSVPFLHWEAPVTSHSLTAREVMSTPVTCLRRREKVGVIVDVLSDTASNHNGFPVVEHADDTQPARLQGLILRSQLIVLLKHKVFVERSNLGLVQRRLRLKDFRDAYPRFPPIQSIHVSQDERECTMDLSEFMNPSPYTVPQEASLPRVFKLFRALGLRHLVVVDNRNQVVGLVTRKDLARYRLGKRGLEELSLAQT

SEQ ID NO: 62853 - protein, 132 aa, Homo sapiens
LDTWHGTLTFFKNRKCIGVAATKLQNKRFYPMVCSTAARSSMKVTRSCASATSLQYLCCHRLRQLRPDSGDTLEGLPLPPGLKQVLHNKLGWVLSMSCSRRKAPVSDPQAATSAHPSSREPRPCQRKRCRRT

SEQ ID NO: 62854 - protein, 185 aa, Homo sapiens
VSICFQMTVLRDLEKLAGWHRIAIIYLLSGVTGNLASAIFLPYRAEVGPAGSQFGILACLFVELFQSWQILARPWRAFFKLLAVVLFLFTFGLLPWIDNFAHISGFISGLFLSFAFLPYISFGKFDLYRKRCQIIIFQVVFLGLLAGLVVLFYVYPVRCEWCEFLTCIPFTDKFCEKYELDAQLH

SEQ ID NO: 62855 - protein, 257 aa, Homo sapiens
ISAEVSAKAEKVHELNEEIGKLLAKAEQLGAEGNVDESQKILMEVEKVRAKKKEAEEEYRNSMPASSFQQQKLRVCEVCSAYLGLHDNDRRLADHFGGKLHLGFIQIREKLDQLRKTVAEKQEKRNQDRLRRREEREREERLSRRSGSRTRDRRRSRSRDRRRRRSRSTSRERRKLSRSRSRDRHRRHRSRSRSHSRGHRRASRDRSAKYKFSRERASREESWESGRSERGPPDWRLESSNGKMASRRSEEKEAGEI

SEQ ID NO: 62856 - protein, 7 aa, Homo sapiens
KVHPSST

SEQ ID NO: 62857 - protein, 175 aa, Homo sapiens
VNMDELKHQVMINQFVLTAGCAADQAKQLLQAAHWQFETALSAFFQETNIPYSHHHHQMMCTPANTPATPPNFPDALTMFSRLKASESFHSGGSGSPMAATATSPPPHFPHAATSSSAASSWPTAASPPGGPQHHQPQPPLWTPTPPSPASDWPPLAPQQATSEPRAHPAMEAER

SEQ ID NO: 62858 - protein, 159 aa, Homo sapiens
IYKIQKELEEKRRSRLHKQGILGNQPALPAPGAQPPVIPQAQPVRPPRMNSFNPMSLGNVQLPQAPMGPRAASPMNHSVQMNSMGSVPGMAISPSRMPQPPNMMGAHTNNMMAQAPAQSQFLPQNQFPSSSGAMSVGMGQPPAQTGVSQVLCPTGTVAP

SEQ ID NO: 62859 - protein, 55 aa, Homo sapiens
LYYAFLMEYIVLNVGLVFLPEDMDQALVDLGVLSDPGSGLYDADSELDVFDAYLE

SEQ ID NO: 62860 - protein, 36 aa, Homo sapiens
LHFIPERTCFPHFTFGEDTSNCGHTQKRLPAPFDVS

SEQ ID NO: 62861 - protein, 953 aa, Homo sapiens
LQFIQSPLSYPGTQEQYAVYLRALVRNLFNEGNDVYREHDWNNSISQYTEALNIADYAKSEEILIPKEIIEKLYINRIACYSNMGFHDKVLEDCNIVLSLNASNCKALYRKSKALSDLGRYKKAYDAVAKCSLAVPQDEHVIKLTQELAQKLGFKIRKAYVRAELSLKSVPGDGATKALNHSVEDIEPDLLTPRQEAVPVVSLPAPSFSHEVGSELASVPVMPLTSILPLQVEESALPSAVLANGGKMPFTMPEAFLDDGDMVLGDELDDLLDSAPETNETVMPSALVRGPLQTASVSPSMPFSASLLGTLPIGARYAPPPSFSEFYPPLTSSLEDFCSSLNSFSMSESKRDLSTSTSREGTPLNNSNSSLLLMNGPGSLFASENFLGISSQPRNDFGNFFGSAVTKPSSSVTPRHPLEGTHELRQACQICFVKSGPKLMDFTYHANIDHKCKKDILIGRIKNVEDKSWKKIRPRPTKTNYEGPYYICKDVAAEEECRYSGHCTFAYCQEEIDVWTLERKGAFSREAFFGGNGKINLTVFKLLQEHLGEFIFLCEKCFDHKPRMISKRNKDNSTACSHPVTKHEFEDNKCLVHILRETTVKYSKIRSFHGQCQLDLCRHEVRYGCLREDECFYAHSLVELKVWIMQNETGISHDAIAQESKRYWQNLEANVPGAQVLGNQIMPGFLNMKIKFVCAQCLRNGQVIEPDKNRKYCSAKARHSWTKDRRAMRVMSIERKKWMNIRPLPTKKQMPLQFDLCNHIASGKKCQYVGNCSFAHSPEEREVWTYMKENGIQDMEQFYELWLKSQKNEKSEDIASQSNKENGKQIHMPTDYAEVTVDFHCWMCGKNCNSEKQWQGHISSEKHKEKVFHTEDDQYCWQHRFPTGYFSICDRYMNGTCPEGNSCKFAHGNAELHEWEERRDALKMKLNKARKDHLIGPNDNDFGKYSFLFKDLN

SEQ ID NO: 62862 - protein, 1234 aa, Homo sapiens
LTPRPPTGRPPPPAGPRPRSPGPGPGGGRRAPRRRRRRPQRATRPPGPARRPPARLGAEIGRIASKYVRVSLPPPPPAAGRPGAAVADDAREEEEEAAPPPPPPPPPRLAAARPPGSQPRPPAAGEAQAAADMNHQQQQQQQKAGEQQLSEPEDMEMEAGDTDDPPRITQNPVINGNVALSDGHNTAEEDMEDDTSWRSEATFQFTVERFSRLSESVLSPPCFVRNLPWKIMVMPRFYPDRPHQKSVGFFLQCNAESDSTSWSCHAQAVLKIINYRDDEKSFSRRISHLFFHKENDWGFSNFMAWSEVTDPEKGFIDDDKVTFEVFVQADAPHGVAWDSKKHTGYVGLKNQGATCYMNSLLQTLFFTNQLRKAVYMMPTEGDDSSKSVPLALQRVFYELQHSDKPVGTKKLTKSFGWETLDSFMQHDVQELCRVLLDNVENKMKGTCVEGTIPKLFRGKMVSYIQCKEVDYRSDRREDYYDIQLSIKGKKNIFESFVDYVAVEQLDGDNKYDAGEHGLQEAEKGVKFLTLPPVLHLQLMRFMYDPQTDQNIKINDRFEFPEQLPLDEFLQKTDPKDPANYILHAVLVHSGDNHGGHYVVYLNPKGDGKWCKFDDDVVSRCTKEEAIEHNYGGHDDDLSVRHCTNAYMLVYIRESKLSEVLQAVTDHDIPQQLVERLQEEKRIEAQKRKERQEAHLYMQVQIVAEDQFCGHQGNDMYDEEKVKYTVFKVLKNSSLAEFVQSLSQTMGFPQDQIRLWPMQARSNGTKRPAMLDNEADGNKTMIELSDNENPWTIFLETVDPELAASGATLPKFDKDHDVMLFLKMYDPKTRSLNYCGHIYTPISCKIRDLLPVMCDRAGFIQDTSLILYEEVKPNLTERIQDYDVSLDKALDELMDGDIIVFQKDDPENDNSELPTAKEYFRDLYHRVDVIFCDKTIPNDPGFVVTLSNRMNYFQVAKTVAQRLNTDPMLLQFFKSQGYRDGPGNPLRHNYEGTLRDLLQFFKPRQPKKLYYQQLKMKITDFENRRSFKCIWLNSQFREEEITLYPDKHGCVRDLLEECKKAVELGEKASGKLRLLEIVSYKIIGVHQEDELLECLSPATSRTFRIEEIPLDQVDIDKENEMLVTVAHFHKEVFGTFGIPFLLRIHQGEHFREVMKRIQSLLDIQEKEFEKFKFAIVMMGRHQYINEDEYEVNLKDFEPQPGNMSHPRPWLGLDHFNKAPKRSRYTYLEKAIKIHN

SEQ ID NO: 62863 - protein, 19 aa, Homo sapiens
LARARPLQQSPKEESLHLP

SEQ ID NO: 62864 - protein, 112 aa, Homo sapiens
RTGISNMRALENDFFNSPPRKTVRFGGTVTEVLLKYKKGETNDFELLKNQLLDPDIKDDQIINWLLEFRSSVMYLTKDFEQLISIILRLPWLNRSQTVVEEYLAFLGNLVSA

SEQ ID NO: 62865 - protein, 16 aa, Homo sapiens
ISANMNLIQTLTRFLL

SEQ ID NO: 62866 - protein, 121 aa, Homo sapiens
VTPTGVLKEAGSPGLALVVWAACGVFSIVGALCYAELGTTISKSGGDYAYMLDVYGSLPAFLKLWIELLIIRPSSQYIVALVFATYLLKPLFPTCPVPEEAAKLVACHSVQLIVHQPTQVI

SEQ ID NO: 62867 - protein, 102 aa, Homo sapiens
LPSSFVEKLFIPSSKLLFLRYHKEKEVVAVARAVYQAVLSLKNIPVLETAYKLILGEMTCALNNLLHSLQLPESCSEIKHEAFKNHVFNVDNAKFVVKFDLN

SEQ ID NO: 62868 - protein, 844 aa, Homo sapiens
TVRSICHHSHKRLVACFQGQHGTDAERRHKKLPLTALAQNMQEASTQLEDSLLGKMLETCGDAENQLALELSQHEVFVEKEIVDPLYGIAEVEIPNIQKQRKQLARLVLDWDSVRARWNQAHKSSGTNFQGLPSKIDTLKEEMDEAGNKVEQCKDQLAADMYNFMAKEGEYGKFFVTLLEAQADYHRKALAVLEKTLPEMRAHQDKWAEKPAFGTPLEEHLKRSGREIALPIEACVMLLLETGMKEEGLFRIGAGASKLKKLKAALDCSTSHLDEFYSDPHAVAGALKSYLRELPEPLMTFNLYEEWTQVASVQDQDKKLQDLWRTCQKLPPQNFVNFRYLIKFLAKLAQTSDVNKMTPSNIAIVLGPNLLWARNEGTLAEMAAATSVHVVAVIEPIIQHADWFFPEEVEFNVSEAFVPLTTPSSNHSFHTGNDSDSGTLERKRPASMAVMEGDLVKKESFGVKLMDFQAHRRGGTLNRKHISPAFQPPLPPTDGSTVVPAGPEPPPQSSRAESSSGGGTVPSSAGILEQGPSPGDGSPPKPKDPVSAAVPAPGRNNSQIASGQNQPQAAAGSHQLSMGQPHNAAGPSPHTLRRAVKKPAPAPPKPGNPPPGHPGGQSSSGTSQHPPSLSPKPPTRSPSPPTQHTGQPPGQPSAPSQLSAPRRYSSSLSPIQAPNHPPPQPPTQATPLMHTKPNSQGPPNPMALPSEHGLEQPSHTPPQTPTPPSTPPLGKQNPSLPAPQTLAGGNPETAQPHAGTLPRPRPVPKPRNRPSVPPPPQPPGVHSAGDSSLTNTAPTASKIVTDSNSRVSEPHRSIFPEMHSDSASKDVPGRILLDIDNDTESTAL

SEQ ID NO: 62869 - protein, 184 aa, Homo sapiens
VFFSEAVLTAANECVGVLLGSLDPSMTIHCDMVITYGLDQLENCQTCGTDYIISVLNLLTLIVEQINTKLPSSFVEKLFIPSSKLLFLRYHKEKEVVAVAHAVYQAMLSLKNIPVLETAYKLILGEMTCALNNLLHSLQLPEACSEIKHEAFKNHVFNVDNAKFVVKFDLSALTTIGNAKNSSL

SEQ ID NO: 62870 - protein, 206 aa, Homo sapiens
LFVPNLIGYARIVFAIISFYFMPCCPLTASSFYLLSGLLDAFDGHAARALNQGTRFGAMLDMLTDRCSTMCLLVNLALLYPGATLFFQISMSLDVASHWLHLHSSVVRGSESHKMIDLSGNPVLRIYYTSRPALFTLCAGNELFYCLLYLFHFSEGPLVGSVGLFRMGLWVTAPIALLKSLISVIHLITAARNMAALDAADRAKKK

SEQ ID NO: 62871 - protein, 70 aa, Homo sapiens
IYLVALAARCRVDLPLAVLSKMDINRRRYPAHLARSSSRKYTELPHGAISEDQAVGPADIPCDSTGQTST

SEQ ID NO: 62872 - protein, 233 aa, Homo sapiens
VVNPWIIIGGVATVVCQPNEFIMPDSAVVGDVLVLTKPLGTQVAVNAHQWLDNPERWNKVKMVVSREEVELAYQEAMFNMATLNRTAAGLMHTFNAHAATDITGFGILGHSQNLAKQQRNEVSFVIHNLPIIAKMAAVSKASGRFGLLQGTSAETSGGLLICLPREQAARFCSEIKSSKYGEGHQAWIVGIVEKGNRTARIIDKPRVIEVLPRGATAAVLAPDSSNASSEPSS

SEQ ID NO: 62873 - protein, 10 aa, Homo sapiens
LYPEIFQECG

SEQ ID NO: 62874 - protein, 151 aa, Homo sapiens
LSMDALDLTDKLVSFYLETYGAELTANVLRDMGLQEMAGQLQAATHQGSGAAPAGIQAPPQSAAKPGLHFIDQHRAALIARVTNVEWLLDALYGKVLTDEQYQAVRAEPTNPSKMRKLFSFTPAWNWTCKDLLLQALRESQSYLVEDLERS

SEQ ID NO: 62875 - protein, 625 aa, Homo sapiens
MLSTVHSAKNTPSQHSHSIQHSPERSGSGSVGNGSSRYSPSQNSPIHHIPSRRSPAKTIAPQNAPRDESRGRSSFYPDGGDQETAKTGKFLKRFTDEESRVFLLDRGNTRDKEASKEKGSEKGRAEGEWEDQEALDYFSDKESGKQKFNDSEGDDTEETEDYRQFRKSVLADQGKSFATASHRNTEEEGLKYKSKVSLKGNRESDGFREEKNDKHKETGYVVERPSTTKDKHKEEDKNSERITVKKETQSPEQVKSEKLKDLFDYSPPLHKNLDAREKSTFREESPLRIKMIASDSHRPEVKLKMAPVPLDDSNRPASLTKDRLLASTLVHSVKKEQEFRSIFDHIKLPQASKSTSESFIQHIVSLVHHVKEQYFKSAAMTLSERFTSYQKATEEHSTRQKSPEIHRRIDISPSTLRKDTRLAGEERVFKEENQKGDKKLRCDSADLRHDIDHRRKERSKERGDSKGSRESRGSRKQEKTPKDYKEYKSYKDDSKHKREQDHSLSSSSSASPSSPSSREEKESKKEREEEFKTHHEMKEYSGFAGVSRPRGTFHDDRDDGVDYWAKRGRGRGTFQRGRGRFNFKKSGSSPKWNHDKYQGDGIVEDEEETMENNEEKKDRCKEEKE

SEQ ID NO: 62876 - protein, 113 aa, Homo sapiens
INLPGAVDWVMMQSCFGFHFMLVLEKQEKYDGHQQFFAIVQLIGTRKQAENFAYRLELNGHRRRLTWEATPRSIHEGIATAIMNSDCLVFDTSIAQLFAENGNLGINVTISMC

SEQ ID NO: 62877 - protein, 162 aa, Homo sapiens
IGVDFTMKTLEIQGKRVKLQIWDTAGQERFRTITQSYYRSANGAILAYDITKRSSFLSVPHWIEDVRKYAGSNIVQLLIGNKSDLSELREVSLAEAQSLAEHYDILCAIETSAKDSSNVEEAFLRVATELIMRHGGPLFSEKSPDHIQLNSKDIGEGWGCGC

SEQ ID NO: 62878 - protein, 942 aa, Homo sapiens
LLAALTVLLLQTLVVWNFSSLDSGAGERRGGAAVGGGEQPPPAPAPRRERRDLPAEPAAARGGGGGGGGGGGGRGPQARARGGGPGEPRGQQPASRGALPARALDPHPSPLITLETQDGYFSHRPKEKVRTDSNNENSVPKDFENVDNSNFAPRTQKQKHQPELAKKPPSRQKELLKRKLEQQEKGKGHTFPGKGPGEVLPPGDRAAANSSHGKDVSRPPHARKTGGSSPETKYDQPPKCDISGKEAISALSRAKSKHCRQEIGETYCRHKLGLLMPEKVTRFCPLEGKANKNVQWDEDSVEYMPANPVRIAFVLVVHGRASRQLQRMFKAIYHKDHFYYIHVDKRSNYLHRQVLQVSRQYSNVRVTPWRMATIWGGASLLSTYLQSMRDLLEMTDWPWDFFINLSAADYPIRTNDQLVAFLSRYRDMNFLKSHGRDNARFIRKQGLDRLFLECDAHMWRLGDRRIPEGIAVDGGSDWFLLNRRFVEYVTFSTDDLVTKMKQFYSYTLLPAESFFHTVLENSPHCDTMVDNNLRITNWNRKLGCKCQYKHIVDWCGCSPNDFKPQDFHRFQQTARPTFFARKFEAVVNQEIIGQLDYYLYGNYPAGTPGLRSYWENVYDEPDGIHSLSDVTLTLYHSFARLGLRRAETSLHTDGENSCRYYPMGHPASVHLYFLADRFQGFLIKHHATNLAVSKLETLETWVMPKKVFKIASPPSDFGRLQFSEVGTDWDAKERLFRNFGGLLGPMDEPVGMQKWGKGPNVTVTVIWVDPVNVIAATYDILIESTAEFTHYKPPLNLPLRPGVWTVKILHHWVPVAETKFLVAPLTFSNRQPIKPEEALKLHNGPLRNAYMEQSFQSLNPVLSLPINPAQVEQARRNAASTGTALEGWLDSLVGGMWTAMDICATGPTACPVMQTCSQTAWSSFSPDPKSELGAVKPDGRLR

SEQ ID NO: 62879 - protein, 370 aa, Homo sapiens
KNATRESTSTLKAWLNEHRKNPYPTKGEKIMLAIITKMTLTQVSTWFANARRRLKKENKMTWAPRSRTDEEGNAYGSEREEEDEEEDEEDGKRELELEEEELGGEEEDTGGEGLADDDEDEEIDLENLDGAATEPELSLAGAARRDGDLGLGPISDSKNSDSEDSSEGLEDRPLPVLSLAPAPPPVAVASPSLPSPPVSLDPCAPAPAPASALQKPKIWSLAETATSPDNPRRSPPGAGGSPPGAAVAPSALQLSPAAAAAAAHRLVSAPLGKFPAWTNRPFPGPPPGPRLHPLSLLGSAPPHLLGLPGAAGHPAAAAAFARPAEPEGGTDRCSALEVEKKLLKTAFQPVPRRPQNHLDAALVLSALSSS

SEQ ID NO: 62880 - protein, 413 aa, Homo sapiens
LALAAHENVVVVTIQYRLGIWGFFSTGDEHSRGNWGHLDQVAALRWVQDNIASFGGNPGSVTIFGESAGGESVSVLVLSPLAKNLFHRAISESGVALTSVLVKKGDVKPLAEQIAITAGCKTTTSAVMVHCLRQKTEEELLETTLKMKFLSLDLQGDPRESQPLLGTVIDGMLLLKTPEELQAERNFHTVPYMVGINKQEFGWLIPMQLMSYPLSEGQLDQKTAMSLLWKSYPLVCIAKELIPEATEKYLGGTDDTVKKKDLFLDLIADVMFGVPSVIVARNHRDAGAPTYMYEFQYRPSFSSDMKPKTVIGDHGDELFSVFGAPFLKEGASEEEIRLSKMVMKFWANFARNGNPNGEGLPHWPEYNQKEGYLQIGANTQAAQKLKDKEVAFWTNLFAKKAVEKPPQTEHIEL

SEQ ID NO: 62881 - protein, 17 aa, Homo sapiens
KENFQKPGNVKNSPGTK

SEQ ID NO: 62882 - protein, 21 aa, Homo sapiens
IEQVDKEDEITEKNAKKKSQD

SEQ ID NO: 62883 - protein, 103 aa, Homo sapiens
LYHIMTRPGIPESSLLRHYQGVLQPVAVLELLQGLESLGCIRKRWLRKPRPVSLFSTPVVEEVEVPSSLDESPMAFYEPTLDCTLRLGRVFPHEVNWNKWIHL

SEQ ID NO: 62884 - protein, 241 aa, Homo sapiens
RFVSEAELDERRKRRQEEWEKVRKPEDPEECPEEVYDPRSLYERLQEQKDRKQQEYEEQFKFKNMVRGLDEDETNFLDEVSRQQELIEKQRREEELKELKEYRNNLKKVGISQENKKEVEKKLTVKPIETKNKFSQAKLLAGAVKHKSSESGNSVKRLKPDPEPDDKNQEPSSCKSLGNTSLSGPSIHCPSAAVCIGILPGLGAYSGSSDSESSSDSEGTINATGKIVSSIFRTNTFLEAP

SEQ ID NO: 62885 - protein, 239 aa, Homo sapiens
LGLTQAGLSPQQTLLSMLGIPALLLASYFLLLTSPEAQDPGGEEEAESAARQPLIRTEAPESKPGSSSSLSLRERWTVFKGLLWYIVPLVVVYFAEYFINQGLFELLFFWNTSLSHAQQYRWYQMLYQAGVFASRSSLRCCRIRFTWALALLQCLNLVFLLADVWFGFLPSIYLVFLIILYEGLLGGAAYVNTFHNIALETSDEHREFAMAATCISDTLGISLSGLLALPLHDFLCQLS

SEQ ID NO: 62886 - protein, 419 aa, Homo sapiens
IQLICCSVDGEIRGYLPGTAEMRGNLMDTSAEQDLIRELSQKKQNLLLELRNYEENAKAELASPLNEADGHRGIIPANTRLHTTLSVSLGNETQTAHTELRISTSNDTIIRAVLIFAEGIFTGESHVVHPSIHNLSSSICIPIVPPKDVPVDLHLKAFVGYRSSTQFHVFESTRQLPRFSMYALTSLDPASEPISYVNFTIAERAQRVVVWLGQNFLLPEDTHIQNAPFQVCFTSLRNGGHLHIKIKLSGEITINTDDIDLAGDIIQSMASFFAIEDLQVEADFPVYFEELRKVLVKVDEYHSVHQKLSADMADHSNLIRSLLVGAEDARLMRDMKTMKSRYMELYDLNRDLLNGYKIRCNNHTELLGNLKAVNQAIQRAGRLRVGKPKNQVITACRDAIRSNNINTLFKIMRVGTASS

SEQ ID NO: 62887 - protein, 31 aa, Homo sapiens
KSCCSCCPVGCAKCAQGCICKGASEKCSCCA

SEQ ID NO: 62888 - protein, 102 aa, Homo sapiens
IFQSFQKSSRDILLCTDIASRGLDSTGVELVVNYDFPPTLQDYIHRAGRVGRVGSEVPGTVISFVTHPWDVSLVQKIELAARRRRSLPGLASSVKEPLPQAT

SEQ ID NO: 62889 - protein, 32 aa, Homo sapiens
IRPRPLIPSACPKMLKPALEPRGGFSFENCQR

SEQ ID NO: 62890 - protein, 1086 aa, Homo sapiens
TMPHFTVVPVDGPRRGDYDNLEGLSWVDYGERAELDDSDGHGNHRESSPFLSPLEASRGIDYYDRNLALFEEELDIRPKVSSLLGKLVSYTNLTQGAKEHEEAESGEGTRRRAAEAPSMGTLMGVYLPCLQNIFGVILFLRLTWMVGTAGVLQALLIVLICCCCTLLTAISMSAIATNGVVPAGGSYFMISRSLGPEFGGAVGLCFYLGTTFAAAMYILGAIEILLTYIAPPAAIFYPSGAHDTSNATLNNMRVYGTIFLTFMTLVVFVGVKYVNKFASLFLACVIISILSIYAGGIKSIFDPPVFPVCMLGNRTLSRDQFDICAKTAVVDNETVATQLWSFFCHSPNLTTDSCDPYFMLNNVTEIPGIPGAAAGVLQENLWSAYLEKGDIVEKHGLPSADAPSLKESLPLYVVADIATSFTVLVGIFFPSVTGIMAGSNRSGDLRDAQKSIPVGTILAIITTSLVYFSSVVLFGACIEGVVLRDKYGDGVSRNLVVGTLAWPSPWVIVIGSFFSTCGAGLQSLTGAPRLLQAIAKDNIIPFLRVFGHGKVNGEPTWALLLTALIAELGILIASLDMVAPILSMFFLMCYLFVNLACAVQTLLRTPNWRPRFKYYHWALSFLGMSLCLALMFVSSWYYALVAMLIAGMIYKYIEYQGAEKEWGDGIRGLSLSAARYALLRLEEGPPHTKNWRPQLLVLLKLDEDLHVKYPRLLTFASQLKAGKGLTIVGSVIQGSFLESYGEAQAAEQTIKNMMEIEKVKGFCQVVVASKVREGLAHLIQSCGLGGMRHNSVVLGWPYGWRQSEDPRAWKTFIDTVRCTTAAHLALLVPKNIAFYPSNHERYLEGHIDVWWIVHDGGMLMLLPFLLRQHKVWRKCRMRIFTVAQMDDNSIQMKKDLAVFLYHLRLEAEVEVVEMHNSDISAYTYERTLMMEQRSQMLRQMRLTKTEREREAQLVKDRHSALRLESLYSDEEDESAVGADKIQMTWTRDKYMTETWDPSHAPDNFRELVHIKPDQSNVRRMHTAVKLNEVIVTRSHDARLVLLNMPGPPRNSEGDENYMEFLEVLTEGLERVLLVRGGGREVITIYS

SEQ ID NO: 62891 - protein, 280 aa, Homo sapiens
LKPVKKKKIKREVKILENLRGGTNIIKLIDTVKDPVSKTPALVFEYINNTDFKQLYQILTDFDIRFYMYELLKALDYCHSKGIMHRDVKPHNVMIDHQQKKLRLIDWGLAEFYHPAQEYNVRVASRYFKGPELLVDYQMYDYSLDMWSLGCMLASMIFRREPFFHGQDNYDQLVRIAKVLGTEELYGYLKKYHIDLDPHFNDILGQHSRKRWENFIHSENRHLVSPEALDLLDKLLRYDHQQRLTAKEAMEHPYFYPVVKEQSQPCADNAVLSSGLTAAR

SEQ ID NO: 62892 - protein, 15 aa, Homo sapiens
MLTFCCATGNATSWS

SEQ ID NO: 62893 - protein, 121 aa, Homo sapiens
RFGRDEDPVCLQLDDILSKTSSDLSKMAAIYLVDVDQTAVYTQYFDISYIPSTVFFFNGQHMKVDYGSPDHTKFVGSFKTKQDFIDLIEVIYRGAMRGKLIVQSPIDPKNIPKYDLLYQDI

SEQ ID NO: 62894 - protein, 123 aa, Homo sapiens
KLMVQIVISSARAGGLAEWVLMELQGEIEARYSTGLAGNLLGDLHYTTEGIPVLIVGHHILYGKIIHLEKPFAVLVKHTPGDQDCDELGRETGTRYLVTALIKDKILFKTRPKPIITSVPKKV

SEQ ID NO: 62895 - protein, 348 aa, Homo sapiens [sequence omitted]

SEQ ID NO: 62896 - protein, 141 aa, Homo sapiens
MNSYMLISAPAILGTSNMPAAVPATQPGTLQPPMVLLDFPPLACFLNNILVAFNDLRLCCPVALAQDVTGALEDALAKVTKIILAFHRAEEAAFSSGEQELFVQFCTVFLEDLVPYLNRCLQVLFPPAQIAQTLGKRMKIL

SEQ ID NO: 62897 - protein, 32 aa, Homo sapiens
IQHEMDHLQGCLFIDKMDSRTFTNVYWMKVND

SEQ ID NO: 62898 - protein, 6 aa, Homo sapiens
TTFLHR

SEQ ID NO: 62899 - protein, 50 aa, Homo sapiens
ITAGILTSAAIAGVYRAAGKEMIPFEALTLGTGQTFCVLVVSFLRILATL

SEQ ID NO: 62900 - protein, 246 aa, Homo sapiens
KAQSIPARKRRQGGLSLEEEEEEDANSESEGSSSEEEDDAAEQEKGIGSEDARKKKEDELWASFLNDVGPKSKVPPSTQVKKGEETEETSSSKLLVKAEELEKPKETEKVKITKVFDFAGEEVRVTKEVDATSKEAKSFFKQNEKEKPQANVPSALPSLPAGSGLKRSSGMSSLLGKIGAKKQKMSTLEKSKLDWESFKEEEGIGEELAIHNRGKEGYIERKAFLDRVDHRQFEIERDLRLSKMKP

SEQ ID NO: 62901 - protein, 147 aa, Homo sapiens
LRMKFMQRGLDSETKKQLEEEEKKIISEEHWYLDLPELKEKESFIIEEQSFLLCEDLLYGRMSFRGFNPEVEKLMLQMNAKHKAEEVEDETVELDVSDEEMARRYETLVGTIGKKFARKRDHANYEEDENGDITPIKAKKMFLKPQD

SEQ ID NO: 62902 - protein, 13 aa, Homo sapiens
KLLAKKAQAQPVM

SEQ ID NO: 62903 - protein, 118 aa, Homo sapiens
VIRLKQKRRTLKNRGYAQSCRFKRVQQRHVLESEKNQLLQQVDHLKQEISRLVRERDAYKEKYEKLVSSGFRENGSSSDNPSSPEFFITEPTRKLEPSVGYATFWKPQHRVLTSVFTK

SEQ ID NO: 62904 - protein, 353 aa, Homo sapiens
ILSDTTLWLCRIFRYENGCAYFHEEEREGLAKICRLAIHSQYEDFVVDGFSGLYNKKPVIYLSAAARPGLGQYLCNQLGLPFPCLCRVPCNTMFGSQHQMDVAFLEKLIKDDIERGRLPLLLVANAGTAAVGHTDKIGRLKELCEQYGIWLHVEGVNLATLALGYVSSSVLAAAKCDSMTMTPGPWLGLPAVPAVTLYKHDPALTLVAGLISNKPTDKLRALPLWLSLQYLGLDGFVERIKHACQLSQWLQESLKKVNYIKILVEDELSSPVVVFRFFQELPGSDPVFKAVPVPNMTPSAVGRERHSCDALNLWLGEQLKQLVPASGLTVMDLEAEGTCLRFSPLMTAAGMIS

SEQ ID NO: 62905 - protein, 267 aa, Homo sapiens
IRDGCGMICAVMTWLLVAYADFVVTFVMLLPSKDFWYSVVNGVIFNCLAVLALSSHLRTMLTDPGAVPKGNATKEYMESLQLKPGEVIYKCPKCCCIKPERAHHCSICKRCIRKMDHHCPWVNNCVGEKNQRFFVLFTMYIALSSVHALILCGFQFISCVRGQWTECSDFSPPITVILLIFLCLEGLLFFTFTAVMFGTQIHSICNDETEIERLKSEKPTWERRLRWEGMKSVFGGPPSLLWMNPFVGFRFRRLPTRPRKGGPEFSV

SEQ ID NO: 62906 - protein, 25 aa, Homo sapiens
KETWTLVGSSAQARLTQMVLDTVPR

SEQ ID NO: 62907 - protein, 14 aa, Homo sapiens
VVQMEYRTQSSRPE

SEQ ID NO: 62908 - protein, 109 aa, Homo sapiens
KAYLDHFSRALQYEYASKGIFVQSLIPFYVATSMTAPSNFLHRCSWLVPSPKVYAHHAVSTLGISKRTTGYWSHSIQFLFAQYMPEWLWVWGANILNRSLRKEALSCTA

SEQ ID NO: 62909 - protein, 45 aa, Homo sapiens
VRFKECHCLPHFKMNSAAPSNKDMYTEMLKSIIEEGEYTPQVSLT

SEQ ID NO: 62910 - protein, 91 aa, Homo sapiens
LEDHTKLPLIFHLGRDPGERFPLSFASAEYQEALSRITSVVQQHQEALVPAQPQLNVCNWAVMNWAPPGCEKLGKCLTPPESIPKKCLWSH

SEQ ID NO: 62911 - protein, 9 aa, Homo sapiens
MIFLFCFDL

SEQ ID NO: 62912 - protein, 31 aa, Homo sapiens
LGSLRGGTMASEKPLAAVTCTAPVNIAVIKY

SEQ ID NO: 62913 - protein, 250 aa, Homo sapiens
VARRGSGSACRSLYGGFVEWQMGEQADGKDSIARQVAPESHWPELRVLILVVSAEKKLTGSTVGMRASVETSPLLRFRAESVVPARMAEMARCIRERDFPSFAQLTMKDSNQFHATCLDTFPPISYLNAISWRIIHLVHRFNAHHGDTKVAYTFDAGPNAVIFTLDDTVAEFVAAVWHGFPPGSNGDTFLKGLQVRPAPLSAELQAALAMEPTPGGVKYIIVTQVGPGPQILDDPCAHLLGPDGLPKPAA

SEQ ID NO: 62914 - protein, 96 aa, Homo sapiens
LGRVLIQLKQQHTLLYKVNGILTLATFLSCRILLFPFMYWSYGRQQGLSLLQVPFSIPFYCNVANAFLVAPQIYWFCLLCRKAVRLFDTPQAKKDG

SEQ ID NO: 62915 - protein, 35 aa, Homo sapiens
VDSLNSAMAASILLFEGKRQLRGRAEDLSRDRSYH

SEQ ID NO: 62916 - protein, 382 aa, Homo sapiens
IPKTIWRIQQAQAKKVALQMPEGLLLFACTIVDILERFTEAEVMVMGDVTYGACCVDDFTARALGADFLVHYGHSCLIPMDTSAQDFRVLYVFVDIRIDTTHLLDSLRLTFPPATALALVSTIQFVSTLQAAAQELKAEYRVSVPQCKPLSPGEILGCTSPRLSKEVEAVVYLGDGRFHLESVMIANPNVPAYRYDPYSKVLSREHYDHQRMQAARQEAIATARSAKSWGLILGTLGRQGSPKILEHLESRLRALGLSFVRLLLSEIFPSKLSLLPEVDVWVQVACPRLSIDWGTAFPKPLLTPYEAAVALRDISWQQPYPMDFYAGSSLGPWTVNHGQDRRPHAPGRPARGKVQEGSARPPSAVACEDCSCRDEKVAPLAP

SEQ ID NO: 62917 - protein, 23 aa, Homo sapiens
VLSQGAHLAAGPDGRTIDRFSPT

SEQ ID NO: 62918 - protein, 133 aa, Homo sapiens
RVTGRFYGEDGLPTPALTQVEAAITRGLEANKLQLQEKQTFPPCNAEWSSARGSRLWCSQKSGGVSRDWIGVPRKLYKPGAKEPRCVCVRTTGPPSGQMPDNPPHRNRGDLDHPNLAEYTGCPPLAITCSFPL

SEQ ID NO: 62919 - protein, 52 aa, Homo sapiens
TGHLDGVFMHKRAQRLKFLCERNDKVFFASVRSGGSSQVYFMTLNRNCIMNW

SEQ ID NO: 62920 - protein, 22 aa, Homo sapiens
LERIRAILNDTKLTDINQLPET

SEQ ID NO: 62921 - protein, 110 aa, Homo sapiens
MRNSRDRLLNRYRQAGSSGPGNSQNSFLVQEVMEEEWNALQSVENCPEDLAQLEELIDMAVLEEIQQELINQEQSIISEYEKSLQFDEKCLSIMLAEWEANPLICPVCTK

SEQ ID NO: 62922 - protein, 126 aa, Homo sapiens
LEEIQQELINQEQSIISEYEKSLQFDEKCLSIMLAEWEANPLICPVCTKYNLRITSGVVVCQCGLSIPSHSSELTEQKLRACLEGSINEHSAHCPHTPEFSVTGGTEEKSSLLMSCLACDTWAVIL

SEQ ID NO: 62923 - protein, 185 aa, Homo sapiens [sequence omitted]

SEQ ID NO: 62924 - protein, 148 aa, Homo sapiens
LTMQLHPVADSSPAGAKWTETEIEMLRAAVKRFGDDLNHISCVIKERTVAQIKATVKRKVYEDSGIPLPAESPKKGPKKVASGVLSPPPAAPPPSSSSVPEAGGPPIKKQKADVTLSALNDSDANSDVVDIEGLGETPPAKKLNFDQA

SEQ ID NO: 62925 - protein, 168 aa, Homo sapiens
LTMQLHPVADSSPAGAKWTETEIEMLRAAVKRFGDDLNHISCVIKERTVAQIKATVKRKVYEDSGIPLPAESPKKGPKKVASGVLSPPPAAPPPSSSSVPEAGGPPIKKQKADVTLSALNDSDANSDVVDIEGLGETPPAKKLNFDQDSLTLDSGLLMTSADPPLLSC

SEQ ID NO: 62926 - protein, 94 aa, Homo sapiens
LALRGRCQEAWVLSGKQQIAKENQQVAKDVTLHQALLRLPQYQTDLLLTFNQPPPDNRSSLGPENLSPAPWSLGDFEQLVTSLTLHDPNIFGPQ

SEQ ID NO: 62927 - protein, 161 aa, Homo sapiens
LESKPLKMADDLDFETGDAGASATFPMQCSALRKNGFVVLKGRPCKIVEMSTSKTGKHGHAKVHLVGIDIFTGKKYEDICPSTHNMDVPNIKRNDFQLIGIQDGYLSLLQDSGEVREDLRLPEGDLGKEIEQKYDCGEEILITVLSAMTEEAAVAIKAMAK

SEQ ID NO: 62928 - protein, 36 aa, Homo sapiens
LQLLPGNMSRAAAATAAAATWGRAAAAAAAAGTRGQ

SEQ ID NO: 62929 - protein, 244 aa, Homo sapiens
KGGTRALLEFLRVHPDVRAVGAEPHFFDRSYDKGLAWYRDLMPRTLDGQITMEKTPSYFVTREAPARISAMSKDTKLIVVVRDPVTRAISDYTQTLSKRPDIPTFESLTFKNRTAGLIDTSWSAIQIGIYAKHLEHWLRHFPIRQMLFVSGERLISDPAGELGRVQDFLGLKRIITDKHFYFNKTKGFPCLKKAEGSSRPHCLGKTKGRTHPEIDREVVRRLREFYRPFNLKFYQMTGHDFGWD

SEQ ID NO: 62930 - protein, 20 aa, Homo sapiens
RKFLDGIYVSEKGTVQQADE

SEQ ID NO: 62931 - protein, 42 aa, Homo sapiens
RNLVSLWLPVSKPESYNLENGKEPLKLERKAPKSSYSELPFC

SEQ ID NO: 62932 - protein, 79 aa, Homo sapiens
LVHNIIKCMDKDSPEVHQDLNALKSKFQEMRKLISTMPGIHLSPEQQQQQLQSLREQVRTKNELLQKYKSLCMFEIPKE

SEQ ID NO: 62933 - protein, 172 aa, Homo sapiens
LQYSLLLQYLVGDKRQPRLLEPGSLGGIPSPAKSEEQKMIEKAMESCAFKAALACVGGFVLGGAFGVFTAGIDTNVGFDPKDPYRTPTAKEVLKDMGQRGMSYAKNFAIVGAMFSCTECLIESYRGTSDWKNSVISGCITGGAIGFRAGLKAGAIGCGGFAAFSAAIDYYLR

SEQ ID NO: 62934 - protein, 598 aa, Homo sapiens
LHIAIEKRSLQCVKLLVENGANVHARACGRFFQKGQGTCFYFGELPLSLAACTKQWDVVSYLLENPHQPASLQATDSQGNTVLHALVMISDNSAENIALVTSMYDGLLQAGARLCPTVQLEDIRNLQDLTPLKLAAKEGKIEIFRHILQREFSGLSHLSRKFTEWCYGPVRVSLYDLASVDSCEENSVLEIIAFHCKSPHRHRMVVLEPLNKLLQAKWDLLIPKFFLNFLCNLIYMFIFTAVAYHQPTLKKQAAPHLKAEVGNSMLLTGHILILLGGIYLLVGQLWYFWRRHVFIWISFIDSYFEILFLFQALLTVVSQVLCFLAIEWYLPLLVSALVLGWLNLLYYTRGFQHTGIYSVMIQKVILRDLLRFLLIYLVFLFGFAVALVSLSQEAWRPEAPTGPNATESVQPMEGQEDEGNGAQYRGILEASLELFKFTIGMGELAFQEQLHFRGMVLLLLLAYVLLTYILLLNMLIALMSETVNSVATDSWSIWKLQKAISVLEMENGYWWCRKKQRAGVMLTVGTKPDGSPDERWCFRVEEVNWASWEQTLPTLCEDPSGAGVPRTLENPVLASPPKEDEDGASEENYVPVQLLQSN

SEQ ID NO: 62935 - protein, 43 aa, Homo sapiens
IPVVMEGHICQSLESAKAGTRFPGPQWGCANPRELGSAVRSDN

SEQ ID NO: 62936 - protein, 50 aa, Homo sapiens
IPVVMEGHICQSLESAKAGTRFPGPQWGCCKFVKNQHHVWQLSIGARSLP

SEQ ID NO: 62937 - protein, 1005 aa, Homo sapiens
KCQNCFKPRESHLLNDEDLTQAKPIYGGWLLLAPDGTDFDNPVHRSRKWQRRFFILYEHGLLRYALDEMPTTLPQGTINMNQCTDVVDGEGRTGQKFSLCILTPEKEHFIRAETKEIVSGWLEMLMVYPRTNKQNQKKKRKVEPPTPQEPGPAKVAVTSSSSSSSSSSSIPSAEKVPTTKSTLWQEEMRTKDQPDGSSLSPAQSPSQSQPPAASSLREPGLESKEEESAMSSDRMDCGRKVRVESGYFSLEKTKQDLKAEEQQLPPPLSPPSPSTPNHRRSQVIEKFEALDIEKAEHMETNAVGPSPSSDTRQGRSEKRAFPRKRDFTNEAPPAPLPDASASPLSPHRRAKSLDRRSTEPSVTPDLLNFKKGWLTKQYEDGQWKKHWFVLADQSLRYYRDSVAEEAADLDGEIDLSACYDVTEYPVQRNYGFQIHTKEGEFTLSAMTSGIRRNWIQTIMKHVHPTTAPDVTSSLPEEKNKSSCSFETCPRPTEKQEAELGEPDPEQKRSRARERRREGRSKTFDWAEFRPIQQALAQERVGGVGPADTHEPLRPEAEPGELERERARRREERRKRFGMLDATDGPGTEDAALRMEVDRSPGLPMSDLKTHNVHVEIEQRWHQVETTPLREEKQVPIAPVHLSSEDGGDRLSTHELTSLLEKELEQSQKEASDLLEQNRLLQDQLRVALGREQSAREGYVLQATCERGFAAMEETHQKKIEDLQRQHQRELEKLREEKDRLLAEETAATISAIEAMKNAHREEMERELEKSQRSQISSVNSDVEALRRQYLEELQSVQRELEVLSEQYSQKCLENAHLAQALEAERQALRQCQRENQELNAHNQELNNRLAAEITRLRTLLTGDGGGEATGSPLAQGKDAYELEVLLRVKESEIQYLKQEISSLKDELQTALRDKKYASDKYKDIYTELSIAKAKADCDISRLKEQLKAATEALGEKSPDSATVSGYDIMKSKSNPDFLKKDRSCVTRQLRNIRSKSVIEQVSWDT

SEQ ID NO: 62938 - protein, 267 aa, Homo sapiens
IEAMKNAHREEMERELEKSQRSQISSVNSDVEALRRQYLEELQSVQRELEVLSEQYSQKCLENAHLAQALEAERQALRQCQRENQELNAHNQELNNRLAAEITRLRTLLTGDGGGEATGSPLAQGKDAYELEVLLRVKESEIQYLKQEISSLKDELQTALRDKKYASDKYKDIYTELSIAKAKADCDISRLKEQLKAATEALGEKSPDSATVSGYDIMKSKSNPDFLKKDRSCVTRQLRNIRSKSLKEGLTVQERLKLFESRDLKKD

SEQ ID NO: 62939 - protein, 9 aa, Homo sapiens
MRLSPRPSA

SEQ ID NO: 62940 - protein, 86 aa, Homo sapiens
LSSFSVNRPFLFFIFEDTTGLPLFVGSVRNPNPSAPRELKEQQDSPGNKDFLQSLKGFPRGDKLFGPDLKLVPPMEEDYPQFGSPK

SEQ ID NO: 62941 - protein, 16 aa, Homo sapiens
IGYALYSGLQEPEGLL

SEQ ID NO: 62942 - protein, 473 aa, Homo sapiens
LSGRSRPLRFRLQQLEALRRMVQEREKDILTAIAADLCKSEFNVYSQEVITVLGEIDFMLENLPEWVTAKPVKKNVLTMLDEAYIQPQPLGVVLIIGAWNYPFVLTIQPLIGAIAAGNAVIIKPSELSENTAKILAKLLPQYLDQDLYIVINGGVEETTELLKQRFDHIFYTGNTAVGKIVMEAAAKHLTPVTLELGGKSPCYIDKDCDLDIVCRRITWGKYMNCGQTCIAPDYILCEASLQNQIVWKIKETVKEFYGENIKESPDYERIINLRHFKRILSLLEGQKIAFGGETDEATRYIAPTVLTDVDPKTKVMQEEIFGPILPIVPVKNVDEAINFINEREKPLALYVFSHNHKLIKRMIDETSSGGVTGNDVIMHFTLNSFPFGGVGSSGMGAYHGKHSFDTFSHQRPCLLKSLKREGANKLRYPPNSQSKVDWGKFFLLKRFNKEKLGLLLLTFLGIVAAVLVKAEYY

SEQ ID NO: 62943 - protein, 49 aa, Homo sapiens
KIPNAFDVVTNAKRTLRELKILKHFKHDNIIAIKDILRPTVPYGEFKSV

SEQ ID NO: 62944 - protein, 376 aa, Homo sapiens
IPQQNSESAMAKPQVVVAPVLRSKLSVNAPEFYPSGYSSSYTESYEVGCEDYPTPSEYVQDFLNHLTEQPGSFETEIEQFAETLNGCVTTDDALQELAELIYQQATSIPNFSYMGARLCNYLSHHLTISPQSGNFRQLLLQRCRTEYEVKDQAAKGDEVTRKRFHAFVFFLGELYLNLEIKGTNGQVTRADILQVGLRELLNALFSNPMDDNLICAVKLLKLTGSVLEDAWKEKGKMDMEEIIQRIENVVLDANCSRDVKQMLLKLVELRSSNWGRVHATSTYREATPENDPNYFMNEPTFYTSDGVPFTAADPDYQEKYQELLEREDFFPDYEENGTDLSGAGDPYLDDIDDEMDPEIEEAYEKFCLESERKRKQ

SEQ ID NO: 62945 - protein, 7 aa, Homo sapiens
VVPAGPW

SEQ ID NO: 62946 - protein, 175 aa, Homo sapiens
IRHPVASFFHLFFRVSAIIVYLLCGLLSSSFITCMVTIILLLSCDFWAVKNVTGRLMVGLRWWNHIDEDGKSHWVFESRKESSQENKTVSEAESRIFWLGLIACPVLWVIFAFSALFSFRVKWLAVVIMGVVLQGANLYGYIRCKVRSRKHLTSMATSYFGKQFLRQNTGDDQTS

SEQ ID NO: 62947 - protein, 16 aa, Homo sapiens
IFLDATYHLPPPDPFP

SEQ ID NO: 62948 - protein, 1962 aa, Homo sapiens
KRVQFGVLSPDELKRMSVTEGGIKYPETTEGGRPKLGGLMDPRQGVIERTGRCQTCAGNMTECPGHFGHIELAKPVFHVGFLVKTMKVLRCVCFFCSKLLVDSNNPKIKDILAKSKGQPKKRLTHVYDLCKGKNICEGGEEMDNKFGVEQPEGDEDLTKEKGHGGCGRYQPRIRRSGLELYAEWKHVNEDSQEKKILLSPERVHEIFKRISDEECFVLGMEPRYARPEWMIVTVLPVPPLSVRPAVVMQGSARNQDDLTHKLADIVKINNQLRRNEQNGAAAHVIAEDVKLLQFHVATMVDNELPGLPRAMQKSGRPLKSLKQRLKGKEGRVRGNLMGKRVDFSARTVITPDPNLSIDQVGVPRSIAANMTFAEIVTPFNIDRLQELVRRGNSQYPGAKYIIRDNGDRIDLRFHPKPSDLHLQTGYKVERHMCDGDIVIFNRQPTLHKMSMMGHRVRILPWSTFRLNLSVTTPYNADFDGDEMNLHLPQSLETRAEIQELAMVPRMIVTPQSNRPVMGIVQDTLTAVRKFTKRDVFLERGEVMNLLMFLSTWDGKVPQPAILKPRPLWTGKQIFSLIIPGHINCIRTHSTHPDDEDSGPYKHISPGDTKVVVENGELIMGILCKKSLGTSAGSLVHISYLEMGHDITRLFYSNIQTVINNWLLIEGHTIGIGDSIADSKTYQDIQNTIKKAKQDVIEVIEKAHNNELEPTPGNTLRQTFENQVNRILNDARDKTGSSAQKSLSEYNNFKSMVVSGAKGSKINISQVIAVVGQQNVEGKRIPFGFKHRTLPHFIKDDYGPESRGFVENSYLAGLTPTEFFFHAMGGREGLIDTAVKTAETGYIQRRLIKSMESVMVKYDATVRNSINQVVQLRYGEDGLAGESVEFQNLATLKPSNKAFEKKFRFDYTNERALRRTLQEDLVKDVLSNAHIQNELEREFERMREDREVLRVIFPTGDSKVVLPCNLLRMIWNAQKIFHINPRLPSDLHPIKVVEGVKELSKKLVIVNGDDPLSRQAQENATLLFNIHLRSTLCSRRMAEEFRLSGEAFDWLLGEIESKFNQAIAHPGEMVGALAAQSLGEPATQMTLNTFHYAGVSAKNVTLGVPRLKELINISKKPKTPSLTVFLLGQSARDAERAKDILCRLEHTTLRKVTANTAIYYDPNPQSTVVAEDQEWVNVYYEMPDFDVARISPWLLRVELDRKHMTDRKLTMEQIAEKINAGFGDDLNCIFNDDNAEKLVLRIRIMNSDENKMQEEEEVVDKMDDDVFLRCIESNMLTDMTLQGIEQISKVYMHLPQTDNKKKIIITEDGEFKALQEWILETDGVSLMRVLSEKDVDPVRTTSNDIVEIFTVLGIEAVRKALERELYHVISFDGSYVNYRHLALLCDTMTCRGHLMAITRHGVNRQDTGPLMKCSFEETVDVLMEAAAHGESDPMKGVSENIMLGQLAPAGTGCFDLLLDAEKCKYGMEIPTNIPGLGAAGPTGMFFGSAPSPMGGISPAMTPWNQGATPAYGAWSPSVGSGMTPGAAGFSPSAASDASGFSPGYSPAWSPTPGSPGSPGPSSPYIPSPGGAMSPSYSPTSPAYEPRSPGGYTPQSPSYSPTSPSYSPTSPSYSPTSPNYSPTSPSYSPTSPSYSPTSPSYSPTSPSYSPTSPSYSPTSPSYSPTSPSYSPTSPSYSPTSPSYSPTSPSYSPTSPSYSPTSPSYSPTSPSYSPTSPSYSPTSPSYSPTSPNYSPTSPNYTPTSPSYSPTSPSYSPTSPNYTPTSPNYSPTSPSYSPTSPSYSPTSPSYSPSSPRYTPQSPTYTPSSPSYSPSSPSYSPTSPTSTPQPVLLTVPAPQSIPQPLPSTHLPVPNIHPPLPSTRLPVPPIHPPPQNTPQHLLLIPQPLQSTPQPLPSTHLLAPLTRPLPPSTRPPAPPTRPPPPKAQPTLPLPLVTRPPAPPTVSQARLSARMTVTRRTEGTWGAAAG

SEQ ID NO: 62949 - protein, 212 aa, Homo sapiens
LIQSYQRMPGNAMVRGFRVAYKRHVLTMDDLGTLYGQNWLNDQVMNMYGDLVMDTVPEKVHFFNSFFYDKLRTKGYDGVKRWTKNVDIFNKELLLIPIHLEVHWSLISVDVRRRTITYFDSQRTLNRRCPKHIAKYLQAEAVKKDRLDFHQGWKGYFKMNVARQNNDSDCGAFVLQYCKHLALSQPFSFTQQDMPKLRRQIYKELCHCKLTV

SEQ ID NO: 62950 - protein, 403 aa, Homo sapiens
IGELLAPAAPFDKKCGRENWTVAFAPDGSYFAWSQGHRTVKLVPWSQCLQNFLLHGTKNVTNSSSLRLPRQNSDGGQKNKPREHIIDCGDIVWSLAFGSSVPEKQSRCVNIEWHRFRFGQDQLLLATGLNNGRIKIWDVYTGKLLLNLVDHTEVVRDLTFAPDGSLILVSASRDKTLRVWDLKDDGNMMKVLRGHQNWVYSCAFSPDSSMLCSVGASKAVFLWNMDKYTMIRKLEGHHHDVVACDFSPDGALLATASYDTRVYIWDPHNGDILMEFGHLFPPPTPIFAGGANDRWVRSVSFSHDGLHVASLADDKMVRFWRIDEDYPVQVAPLSNGLCCAFSTDGSVLAAGTHDGSVYFWATPRQVPSLQHLCRMSIRRVMPTQEVQELPIPSKLLEFLSYRI

SEQ ID NO: 62951 - protein, 176 aa, Homo sapiens
LYFHSDTCLPLRPQEMEVDSEDEKDPEWLREKTITQIEEFSDVNEGEKEVMKLWNLHVMKHGFIADNQMNHACMLFVENYGQKIIKKNLCRNFMLHLVSMHDFNLISIMSIDKAVTKLREMQQKLEKGESASPANEEITEEQNGTANGFSEINSKEKALETDSVSGVSKQSKKQKL

SEQ ID NO: 62952 - protein, 223 aa, Homo sapiens
MASKLLRAVILGPPGSGKGTVCQRIAQNFGLQHLSSGHFLRENIKASTEVGEMAKQYIEKSLLVPDHVITRLMMSELENRRGQHWLLDGFPRTLGQAEALDKICEVDLVISLNIPFETLKDRLSRRWIHPPSGRVYNLDFNPPHVHGIDDVTGEPLVQQEDDKPEAVAARLRQYKDVAKPVIELYKSRGVLHQFSGTETNKIWPYVYTLFSNKITPIQSKEAY

SEQ ID NO: 62953 - protein, 32 aa, Homo sapiens
VSESNVLLDEEVLTDPKIQALLLTVLVRISPF

SEQ ID NO: 62954 - protein, 324 aa, Homo sapiens
VVIYLQREMSGDTCLCPASGAKPKLSGFKGGGLGNKYVQLNVGGSLYYTTVRALTRHDTMLKAMFSGRMEVLTDKEGWILIDRCGKHFGTILNYLRDDTITLPQNRQEIKELMAEAKYYLIQGLVNMCQSALQDKKDSYQPVCNIPIITSLKEEERLIESSTKPVVKLLYNRSNNKYSYTSNSDDHLLKNIELFDKLSLRFNGRVLFIKDVIGDEICCWSFYGQGRKLAEVCCTSIVYATEKKQTKVEFPEARIYEETLNVLLYETPRVPDNSLLEATSRSRSQASPSEDEETFELRDRVRRIHVKRYSTYDDRQLGHQSTHRD

SEQ ID NO: 62955 - protein, 353 aa, Homo sapiens
VVMTFSSVKVSEEVEKGRAVKNQIALWDQLLEGRIKLQKALLTTNQLPQPDVFPLFKDKGGPEFSSALKNSHKALKALLRSLVGLQEELLFQYPDTRYLVDGTKPNAGSEEISSEDDELVEEKKQQRRRVPAKRKLEMEDYPSFMAKRFADFTVYRNRTLQKWHDKTKLASGKLGKGFGAFERSILTQIDHILMDKERLLRRTQTKRSVYRVLGKPEPAAQPVPESLPGEPEILPQAPANAHLKDLDEEIFDDDDFYHQLLRELIERKTSSLDPNDQVAMGRQWLAIQKLRSKIHKKVDRKASKGRKLRFHVLSKLLSFMAPIDHTTMNDDARTELYRSLFGQLHPPDEGHGD

SEQ ID NO: 62956 - protein, 24 aa, Homo sapiens
IKIDVNKTRKIYDFLIREGYITKG

SEQ ID NO: 62957 - protein, 17 aa, Homo sapiens
ILEGNDIEFVSNSTALI

SEQ ID NO: 62958 - protein, 56 aa, Homo sapiens
LDSTFYRSLLEDDDMGDLVDAEEYLVPQQGFFCPDPAPGAGGMVHHRHRSSSTRNM

SEQ ID NO: 62959 - protein, 211 aa, Homo sapiens
KSERDTLLARIERMERRMQLVKKDNEKERHKLFQGYETEEREETELSEKIKLECQPELSETSQTLPPKPFSCGRSGKGHKRKSPFGSTERKTPVKKLAPEFSKVKTKTPKHSPIKEEPCGSLSETVCKRELRSQETPEKPRSSVDTPPRLSTPQKGPSTHPKEKAFSSEIEDLPYLSTTEMYLCRWHQPPPSPLPLRESSPKKEETVASKA

SEQ ID NO: 62960 - protein, 42 aa, Homo sapiens
KYSFHPVEDFPAPEEYKHFQRIYPSKTNRAARGAPPLPPILR

SEQ ID NO: 62961 - protein, 117 aa, Homo sapiens
RTFSGSLSHLGESSSYQGTGSVQFPGDQDLRFARVPLALHPVVGQPFLKAEGSSNSVVHAETKLQNYGELGPGTTGASSSGAGLHWGGPTQSSAYGKLYRGPTRVPPRGGRGRGVPY

SEQ ID NO: 62962 - protein, 144 aa, Homo sapiens
KWGRLWWRQKWGWLWWGQRRRLWWGQRRRLWRRPRRWLWRRSRWLWRRPRWRLWWRPRRLWRRSRRLRRRSRRLWRRSRRLWRRQKPGGLWRRPWWWQWLRWRPKWRLWRRQEWWRLWRRPRWGLRRRPRWLWRQNGRKKRLQK

SEQ ID NO: 62963 - protein, 14 aa, Homo sapiens
LPSLDSSSRTGRVG

SEQ ID NO: 62964 - protein, 11 aa, Homo sapiens
IMEINHFSSGF

SEQ ID NO: 62965 - protein, 163 aa, Homo sapiens
LRSEDSTCLPPSPGLITVRLKFLNDTEELAVARPEDTVGALKSKYFPGQESQMKLIYQGRLLQDPARTLRSLNITDNCVIHCHRSPPGSAVPGPSASLAPSATEPPSLGVNVGSLMVPVFVVLLGVVWYFRINYRQFFTAPATVSLVGVTVFFSFLVFGMYGR

SEQ ID NO: 62966 - protein, 221 aa, Homo sapiens
LDPGLFVESTRKGSVVSRANSIGSTSASSVPNTDDEDSDYHQEAYKESYKDRRRRAHTQAEQKRRDAIKRGYDDLQTIVPTCQQQDFSIGSQKLSKAIVLQKTIDYIQFLHKEKKKQEEEVSTLRKDVTALKIMKVNYEQIVKAHQDNPHEGEDQVSDQVKFNVFQGIMDSLFQSFNASISVASFQELSACVFSWIEEHCKPQTLREIVIGVLHQLKNQLY

SEQ ID NO: 62967 - protein, 442 aa, Homo sapiens
LGQCGNQIGFEFWKQLCAEHGISPEGIVEEFATEGTDRKDVFFYQADDEHYIPRAVLLDLEPRVIHSILNSPYAKLYNPENIYLSEHGGGAGNNWASGFSQGEKIHEDIFDIIDREADGSDSLEGFVLCHSIAGGTGSGLGSYLLERLNDRYPKKLVQTYSVFPNQDEMSDVVVQPYNSLLTLKRLTQNADCVVVLDNTALNRIATDRLHIQNPSFSQINQLVSTIMSASTTTLRYPGYMNNDLIGLIASLIPTPRLHFLMTGYTPLTTDQSVASVRKTTVLDVMRRLLQPKNVMVSTGRDRQTNHCYIAILNIIQGEVDPTQVHKSLQRIRERKLANFIPWGPASIQVALSRKSPYLPSAHRVSGLMMANHTSISSLFERTCRQYDKLRKREAFLEQFRKEDMFKDNFDEMDTSREIVQQLIDEYHAATRPDYISWGTQEQ

SEQ ID NO: 62968 - protein, 55 aa, Homo sapiens
KLRKRDAFLEQFRKEDMFKDNFDEMDRSREVVQELIDEYHAATQPDYISWGTQEQ

SEQ ID NO: 62969 - protein, 9 aa, Homo sapiens
LEPKPELEP

SEQ ID NO: 62970 - protein, 94 aa, Homo sapiens
KKGNLEWLDKSKSSFLIMWRRPEEWGKLIYQWVSRSGQNNSVFTLYELTNGEDTEDEEFHGLDEATLLRALQALQQEHKAEIITVSDGRGVKFF

SEQ ID NO: 62971 - protein, 4 aa, Homo sapiens
KFGD

SEQ ID NO: 62972 - protein, 52 aa, Homo sapiens
LEIKVHHVLLHIQGTLTCSYLSHSEQLVFQSYEYVDCRGNASVPHQLTPHPP

SEQ ID NO: 62973 - protein, 440 aa, Homo sapiens
KKKKQKKKKEKGSETDSAQDQPVKMNSLPAERIQEIQKAIELFSVGQGPAKTMEEASKRSYQFWDTQPVPKLGEVVNTHGPVEPDKDNIRQEPYTLPQGFTWDALDLGDRGVLKELYTLLNENYVEDDDNMFRFDYSPEFLLWALRPPGWLPQWHCGVRVVSSRKLVGFISAIPANIHIYDTEKKMVEINFLCVHKKLRSKRVAPVLIREITRRVHLEGIFQAVYTAGVVLPKPVGTCRYWHRSLNPRKLIEVKFSHLSRNMTMQRTMKLYRLPETPKTAGLRPMETKDIPVVHQLLTRYLKQFHLTPVMSQEEVEHWFYPQENIIDTFVVENANGEVTDFLSFYTLPSTIMNHPTHKSLKAAYSFYNVHTQTPLLDLMSDALVLAKMKGFDVFNALDLMENKTFLEKLKFGIGDGNLQYYLYNWKCPSMGAEKVGLVLQ

SEQ ID NO: 62974 - protein, 757 aa, Homo sapiens
IESQPWDAIDLDNPQDRAQATQLLEGLVQELQKKAEHQVGEDGFLLKIKLGHYATQLQKTYDRCPLELVRCIRHILYNEQRLVREANNCSSPAGILVDAMSQKHLQINQTFEELRLVTQDTENELKKLQQTQEYFIIQYQESLRIQAQFAQLAQLSPQERLSRETALQQKQVSLEAWLQREAQTLQQYRVELAEKHQKTLQLLRKQQTIILDDELIQWKRRQQLAGNGGPPEGSLDVLQSWCEKLAEIIWQNRQQIRRAEHLCQQLPIPGPVEEMLAEVNATITDIISALVTSTFIIEKQPPQVLKTQTKFAATVRLLVGGKLNVHMNPPQVKATIISEQQAKSLLKNENTRNECSGEILNNCCVMEYHQATGTLSAHFRNMSLKRIKRADRRGAESVTEEKFTVLFESQFSVGSNELVFQVKTLSLPVVVIVHGSQDHNATATVLWDNAFAEPGRVPFAVPDKVLWPQLCEALNMKFKAEVQSNRGLTKENLVFLAQKLFNNSSSHLEDYSGLSVSWSQFNRENLPGWNYTFWQWFDGVMEVLKKHHKPHWNDGAILGFVNKQQAHDLLINKPDGTFLLRFSDSEIGGITIAWKFDSPERNLWNLKPFTTRDFSIRSLADRLGDLSYLIYVFPDRPKDEVFSKYYTPVLAKAVDGYVKPQIKQVVPEFVNASADAGGSSATYMDQAPSPAVCPQAPYNMYPQNPDHVLDQDGEFDLDETMDVARHVEELLRRPMDSLDSRLSPPAGLFTSARGSLS

SEQ ID NO: 62975 - protein, 8 aa, Homo sapiens
LERNPGTH

SEQ ID NO: 62976 - protein, 844 aa, Homo sapiens
LVPSATMGELFRSEEMTLAQLFLQSEAAYCCVSELGELGKVQFRDLNPDVNVFQRKFVNEVRRCEEMDRKLRFVEKEIRKANIPIMDTGENPEVPFPRDMIDLEANFEKIENELKEINTNQEALKRNFLELTELKFILRKTQQFFDEAELHHQQMADPDLLEESSSLLEPSEMGRGTPLRLGFVAGVINRERIPTFERMLWRVCRGNVFLRQAEIENPLEDPVTGDYVHKSVFIIFFQGDQLKNRVKKICEGFRASLYPCPETPQERKEMASGVNTRIDDLQMVLNQTEDHRQRVLQAAAKNIRVWFIKVRKMKAIYHTLNLCNIDVTQKCLIAEVWCPVTDLDSIQFALRRGTEHSGSTVPSILNRMQTNQTPPTYNKTNKFTYGFQNIVDAYGIGTYREINPAPYTIITFPFLFAVMFGDFGHGILMTLFAVWMVLRESRILSQKNENEMFSTVFSGRYIILLMGVFSMYTGLIYNDCFSKSLNIFGSSWSVRPMFTYNWTEETLRGNPVLQLNPALPGVFGGPYPFGIDPIWNIATNKLTFLNSFKMKMSVILGIIHMLFGVSLSLFNHIYFKKPLNIYFGFIPEIIFMTSLFGYLVILIFYKWTAYDAHTSENAPSLLIHFINMFLFSYPESGYSMLYSGQKGIQCFLVVVALLCVPWMLLFKPLVLRRQYLRRKHLGTLNFGGIRVGNGPTEEDAEIIQHDQLSTHSEDADEFDFGDTMVHQAIHTIEYCLGCISNTASYLRLWALSLAHAQLSEVLWTMVIHIGLSVKSLAGGLVLFFFFTAFATLTVAILLIMEGLSAFLHALRLHWVEFQNKFYSGTGFKFLPFSFEHIREGKFEE

SEQ ID NO: 62977 - protein, 33 aa, Homo sapiens
LLLEKTKELQKLIEADISKRYSGRPVNLMGTSL

SEQ ID NO: 62978 - protein, 53 aa, Homo sapiens
LESPTLPPLSSPLCCDFGRPKEGTSTLQSVRRAVGGDHAVPLDPGQLETVLEK

SEQ ID NO: 62979 - protein, 37 aa, Homo sapiens
LSTLRRLEDQATAYVCENQACSVPITDPCELRKLLHP

SEQ ID NO: 62980 - skipped

SEQ ID NO: 62981 - protein, 293 aa, Homo sapiens
LAPLPGLPPSAAAHGAALLSHWDPTLSSDWDGERTAPQCLLRIKRDIMSIYKEPPPGMFVVPDTVDMTKIHALITGPFDTPYEGGFFLFVFRCPPDYPIHPPRVKLMTTGNNTVRFNPNFYRNGKVCLSILGTWTGPAWSPAQSISSVLISIQSLMTENPYHNEPGFEQERHPGDSKNYNECIRHETIRVAVCDMMEGKCPCPEPLRGVMEKSFLEYYDFYEVACKDRLHLQGQTMQDPFGEKRGHFDYQSLLMRLGLIRQKVLERLHNENAEMDSDSSSSGTETDLHGSLRV

SEQ ID NO: 62982 - protein, 413 aa, Homo sapiens
LLLLLLLGVSLGGAKEACPTGLYTHSGECCKACNLGEGVAQPCGANQTVCEPCLDSVTFSDVVSATEPCKPCTECVGLQSMSAPCVEADDAVCRCAYGYYQDETTGRCEACRVCEAGSGLVFSCQDKQNTVCEECPDGTYSDEANHVDPCLPCTVCEDTERQLRECTRWADAECEEIPGRWITRSTPPEGSDSTAPSTQEPEAPPEQDLIASTVAGVVTTVMGSSQPVVTRGTTDNLIPVYCSILAAVVVGLVAYIAFKRWNSCKQNKQGANSRPVNQTPPPEGEKLHSDSGISVDSQSLHDQQPHTQTASGQALKGDGGLYSSLPPAKREEVEKLLNGSAGDTWRHLAGELGYQPEHIDSFTHEACPVRALLASWATQDSATLDALLAALRRIQRADLVESLCSESTATSPV

SEQ ID NO: 62983 - protein, 64 aa, Homo sapiens
TAVNPVDIVSTLQALQMLKYWKGKHLVLKRQDLIDEWIAKEAKRSNSNKTMDPSCLKWTPPKGT

SEQ ID NO: 62984 - protein, 197 aa, Homo sapiens
LCDKYYMASPDLEIQEINAANSKQPIHMVYVPSHLYHMLFELFKNAMRATVESHESSLILPPIKVMVALGEEDLSIKMSDRGGGVPLRKIERLFSYMYSTAPTPQPGTGGTPLAGFGYGLPISRLYAKYFQGDLQLFSMEGFGTDAVIYLKALSTDSVERLPVYNKSAWRHYQTIQEAGDWCVPSTEPKNTSTYRVS

SEQ ID NO: 62985 - protein, 745 aa, Homo sapiens
KMAGRSMQAARCPTDELSLTNCAVVNEKDFQSGQHVIVRTSPNHRYTFTLKTHPSVVPGSIAFSLPQRKWAGLSIGQEIEVSLYTFDKAKQCIGTMTIEIDFLQKKSIDSNPYDTDKMAAEFIQQFNNQAFSVGQQLVFSFNEKLFGLLVKDIEAMDPSILKGEPATGKRQKIEVGLVVGNSQVAFEKAENSSLNLIGKAKTKENRQSIINPDWNFEKMGIGGLDKEFSDIFRRAFASRVFPPEIVEQMGCKHVKGILLYGPPGCGKTLLARQIGKMLNAREPKVVNGPEILNKYVGESEANIRKLFADAEEEQRRLGANSGLHIIIFDEIDAICKQRGSMAGSTGVHDTVVNQLLSKIDGVEQLNNILVIGMTNRPDLIDEALLRPGRLEVKMEIGLPDEKGRLQILHIHTARMRGHQLLSADVDIKELAVETKNFSGAELEGLVRAAQSTAMNRHIKASTKVEVDMEKAESLQVTRGDFLASLENDIKPAFGTNQEDYASYIMNGIIKWGDPVTRVLDDGELLVQQTKNSDRTPLVSVLLEGPPHSGKTALAAKIAEESNFPFIKICSPDKMIGFSETAKCQAMKKIFDDAYKSQLSCVVVDDIERLLDYVPIGPRFSNLVLQALLVLLKKAPPQGRKLLIIGTTSRKDVLQEMEMLNAFSTTIHVPNIATGEQLLEALELLGNFKDKERTTIAQQVKGKKVWIGIKKLLMLIEMSLQMDPEYRVRKFLALLREEGASPLDFD

SEQ ID NO: 62986 - protein, 41 aa, Homo sapiens
RTRAQSAQTTSYTGYAHPNRINERPQCSCSRYSCMDCRQNL

SEQ ID NO: 62987 - protein, 490 aa, Homo sapiens
LKPGDQLVSVNKESMIGVSFEEAKSIITGAKLRLESAWEIAFIRQKSDNIQPENLSCTSLIEASGEYGPQASTLSLFSSPPEILIPKTSSTPKTNNDILSSCEIKTGYNKTVQIPITSENSTVGLSNTDVASAWTENYGLQEKISLNPSVRFKAEKLEMALNYLGIQPTKEQHQALRQQVQADSKGTVSFGDFVQVARNLFCLQLDEVNVGAHEISNILDSQLLPCDSSEADEMERLKCERDDALKEVNTLKEKLLESDKQRKQLTEELQNVKQEAKAVVEETRALRSRIHLAEAAQRQAHGMEMDYEEVIRLLEAKITELKAQLADYSDQNKESVQDLKKRIMVLDCQLRKSEMARKTFEASTEKLLHFVEAIQEVFSDNSTPLSNLSERRAVLASQTSLTPLGRNGRSIPATLALESKELVKSVRALLDMDCLPYGWEEAYTADGIKYFINHVTQTTSWIHPVMSVLNLSRSEENEEDCSRELPNQKS

SEQ ID NO: 62988 - protein, 463 aa, Homo sapiens
LVFGDVENDEDALLRRLRGPRVQEHEDSGDSEVENEAKGNFPPQKKPVWVDEEDEDEEMVDMMNNRFRKDMMKNASESKLSKDNLKKRLKEEFQHAMGGVPAWAETTKRKTSSDDESEEDEDDLLQRTGNFISTSTSLPRGILKMKNCQHANAERPTVARISSVQFHPGAQIVMVAGLDNAVSLFQVDGKTNPKIQSIYLERFPIFKACFSANGEEVLATSTHSKVLYVYDMLAGKLIPVHQVRGLKEKIVRSFEVSPDGSFLLINGIAGYLHLLAMKTKELIGSMKINGRVAASTFSSDSKKVYASSGDGEVYVWDVNSRKCLNRFVDEGSLYGLSIATSRNGQYVACGSNCGVVNIYNQDSCLQETNPKPIKAIMNLVTGVTSLTFNPTTEILAIASEKMKEAVRLVHLPSCTVFSNFPVIKNKNISHVHTMDFSPRSGYFALGNEKGKALMYRLHHYSDF

SEQ ID NO: 62989 - protein, 34 aa, Homo sapiens
MGAGMAGPRVAGDGTPVLWLRSAGSFVSTDTSGL

SEQ ID NO: 62990 - protein, 528 aa, Homo sapiens
INVPSLCGMDHTEKRGRIYLKAEVADEKLHVTVRDAKNLIPMDPNGLSDPYVKLKLIPDPKNESKQKTKTIRSTLNPQWNESFTFKLKPSDKDRRLSVEIWDWDRTTRNDFMGSLSFGVSELMKMPASGWYKLLNQEEGEYYNVPIPEGDEEGNMELRQKFEKAKLGPAGNKVISPSEDRKQPSNNLDRVKLTDFNFLMVLGKGSFGKVMLADRKGTEELYAIKILKKDVVIQDDDVECTMVEKRVLALLDKPPFLTQLHSCFQTVDRLYFVMEYVNGGDLMYHIQQVGKFKEPQAVFYAAEISIGLFFLHKRGIIYRDLKLDNVMLDSEGHIKIADFGMCKEHMMDGVTTRTFCGTPDYIAPEIIAYQPYGKSVDWWAYGVLLYEMLAGQPPFDGEDEDELFQSIMEHNVSYPKSLSKEAVSVCKGLMTKHPAKRLGCGPEGERDVREHAFFRRIDWEKLENREIQPPFKPKVCGKGAENFDKFFTRGQPVLTPPDQLVIANIDQSDFEGFSYVNPQFVHPILQSAV

SEQ ID NO: 62991 - protein, 36 aa, Homo sapiens
LPVMFWFWDQSILGLQPTAVTEFCAPCPSSPAASLD

SEQ ID NO: 62992 - protein, 96 aa, Homo sapiens
LSLMTSRIAPRSFWMTLLTDALPLLEQKQVIFSAEQTYELMRCLEDLTSRRPVHGESDTEQLQDDDIETTKVEMLRLSLARNLARAIIREGSLEGS

SEQ ID NO: 62993 - protein, 309 aa, Homo sapiens
KMAGKKNVLSSLAVYAEDSEPESDGEAGIEAVGSAAEEKGGLVSDAYGEDDFSRLGGDEDGYEEEEDENSRQSEDDDSETEKPEADDPKDNTEAEKRDPQELVASFSERVRNMSPDEIKIPPEPPGRCSNHLQDKIQKLYERKIKEGMDMNYIIQRKKEFRNPSIYEKLIQFCAIDELGTNYPKDMFDPHGWSEDSYYEALAKAQKIEMDKLEKAKKERTKIEFVTGTKKGTTTNATSTTTTTASTAVADAQKRKSKWDSAIPVTTIAQPTILTTTATLPAVVTVTTSASGSKTTVISAVGTIVKKAKQ

SEQ ID NO: 62994 - protein, 75 aa, Homo sapiens
LPSSGRPFPLLCFLHRVCASPRTWPGGGLAGGRCSRGGAGGAAGGTEGPAGRWAPVDRDSCWRTACSLPLPLAWS

SEQ ID NO: 62995 - protein, 151 aa, Homo sapiens
INQFVLAAGCAADQAKQLLQAAHWQFETALSTFFQETNIPNSHHHHQMMCTPSNTPATPPNFPDALAMFSKLRASEGLQSSNSPMTAAACSPPANFSPFWASSPPSHQAPWIPPSSPTTFHHLHRPQPTWPPGAQQGGAQQKAMAAMDGQR

SEQ ID NO: 62996 - protein, 418 aa, Homo sapiens
LGSTDKELKAGAAATGSAPTAPGTPWQREPRVEVMDPAGGPRGVLPRPCRVLVLLNPRGGKGKALQLFRSHVQPLLAEAEISFTLMLTERRNHARELVRSEELGRWDALVVMSGDGLMHEVVNGLMERPDWETAIQKPLCSLPAGSGNALAASLNHYAGYEQVTNEDLLTNCTLLLCRRLLSPMNLLSLHTASGLRLFSVLSLAWGFIADVDLESEKYRRLGEMRFTLGTFLRLAALRTYRGRLAYLPVGRVGSKTPASPVVVQQGPVDAHLVPLEEPVPSHWTVVPDEDFVLVLALLHSHLGSEMFAAPMGRCAAGVMHLFYVRAGVSRAMLLRLFLAMEKGRHMEYECPYLVYVPVVAFRLEPKDGKGVFAVDGELMVSEAVQGQVHPNYFWMVSGCVEPPPSWKPQQMPPPEEPL

SEQ ID NO: 62997 - protein, 158 aa, Homo sapiens
VSLPGILAAKCGAEVILSDSSELPHCLEVCRQSCQMNNLPHLQVVGLTWGHISWDLLALPPQDIILASDVFFEPEDFEDILATIYFLMHKNPKVQLWSTYQVRSADWSLEALLYKWDMKCVHIPLESFDADKEDIAESTLPGRHTVEMLVISFAKDSL

SEQ ID NO: 62998 - protein, 655 aa, Homo sapiens
LDVDAPRLLKKIAGVDYVYFVQKNSLNSRERTLHIEAYNETFSNRVIINEHCCYTVHPENEDWTCFEQSASLDIKSFFGFESTVEKIAMKQYTSNIKKGKEIIEYYLRQLEEEGITFVPRWSPPSITTSSETSSSSSKKQAASMAVVIPEAALKEGLSGDALSSPSAPEPVVGTPDDKLDADYIKRYLGDLTPLQESCLIRLRQWLQETHKGKIPKDEHILRFLRARDFNIDKAREIMCQSLTWRKQHQVDYILETWTPPQVLQDYYAGGWHHHDKDGRPLYVLRLGQMDTKGLVRALGEEALLRYVLSINEEGLRRCEENTKVFGRPISSWTCLVDLEGLNMRHLWRPGVKALLRIIEVVEANYPETLGRLLILRAPRVFPVLWTLVSPFIDDNTRRKFLIYAGNDYQGPGGLLDYIDKEIIPDFLSGECMCEVPEGGLVPKSLYRTAEELENEDLKLWTETIYQSASVFKGAPHEILIQIVDASSVITWDFDVCKGDIVFNIYHSKRSPQPPKKDSLGAHSITSPGGNNVQLIDKVWQLGRDYSMVESPLICKEGESVQGSHVTRWPGFYILQWKFHSMPACAASSLPRVDDVLASLQVSSHKCKVMYYTEVIGSEDFRGSMTSLESSHSGFSQLSAATTSSSQSHSSSMISR

SEQ ID NO: 62999 - protein, 50 aa, Homo sapiens
LPDSSGPTSGPLSCLLFLDFSPLLPFSSRFEETMLLQFGAQTYDQHMEMW

SEQ ID NO: 63000 - protein, 575 aa, Homo sapiens
LLNISVGMERDRISALKRSFEVEEVETPNSTPPRRVQTPLLRATVASSTQKFQDLGVKNSEPSARHVDSLSQRSPKASLRRVELSGPKAAEPVSRRTELSIDISSKQVENAGAIGPSRFGLKRAEVLGHKTPEPAPRRTEITIVKPQESAHRRMEPPASKVPEVPTAPATDAAPKRVEIQMPKPAEAPTAPSPAQTLENSEPAPVSQLQSRLEPKPQPPVAEATPRSQEATEAAPSCVGDMADTPRDAGLKQAPASRNEKAPVDFGYVGIDSILEQMRRKAMKQGFEFNIMVVGQSGLGKSTLINTLFKSKISRKSVQPTSEERIPKTIEIKSITHDIEEKGVRMKLTVIDTPGFGDHINNENCWQPIMKFINDQYEKYLQEEVNINRKKRIPDTRVHCCLYFIPATGHSLRPLDIEFMKRLSKVVNIVPVIAKADTLTLEERVHFKQRITADLLSNGIDVYPQKEFDEDSEDRLVNEKFREMIPFAVVGSDHEYQVNGKRILGRKTKWGTIEVENTTHCEFAYLRDLLIRTHMQNIKDITSSIHFEAYRVKRLNEGSSAMANGMEEKEPEAPEM

SEQ ID NO: 63001 - protein, 33 aa, Homo sapiens
LDDYGARSMSRNPFAHVQLKPTVTNDRSAPLLS

SEQ ID NO: 63002 - protein, 48 aa, Homo sapiens
THSRCSSTAPCAARNGSSRSEARPGSRWRGILRLLPHAGADGCWGQRP

SEQ ID NO: 63003 - protein, 36 aa, Homo sapiens
LYQEWLEGINSPKAREVLHTTYQSQERGTHSLDIKW

SEQ ID NO: 63004 - protein, 55 aa, Homo sapiens
LASLQTCRVLGWPRNFCRWMGWRTTPCTRRRSDSCRLEETHSLCWETLGLSWEWP

SEQ ID NO: 63005 - protein, 11 aa, Homo sapiens
ILLIWKRTQRW

SEQ ID NO: 63006 - protein, 57 aa, Homo sapiens
IYNSSGELINNIKYYDGFMGQRVGAISCLAFHPHWPHLAVGSNDYYISVYSVEKRVR

SEQ ID NO: 63007 - protein, 767 aa, Homo sapiens
RRQEEGERSRDLQEERLSAVCIADREEKGCTSQEGGTTPTFPIQKQRKKIIQAVRDNSFLIVTGNTGSGKTTQLPKYLYEAGFSQHGMIGVTQPRKVAAISVAQRVAEEMKCTLGSKVGYQVRFDDCSSKETAIKYMTDGCLLKHILGDPNLTKFSVIILDEAHERTLTTDILFGLLKKLFQEKSPNRKEHLKVVVMSATMELAKLSAFFGNCPIFDIPGRLYPVREKFCNLIGPRDRENTAYIQAIVKVTMDIHLNEMAGDILVFLTGQFEIEKSCELLFQMAESVDYDYDVQDTTLDGLLILPCYGSMTTDQQRRIFLPPPPGIRKCVISTNISATSLTIDGIRYVVDGGFVKQLNHNPRLGLDILEVVPISKSEALQRSGRAGRTSSGKCFRIYSKDFWNQCMPDHVIPEIKRTSLTSVVLTLKCLAIHDVIRFPYLDPPNERLILEALKQLYQCDAIDRSGHVTRLGLSMVEFPLPPHLTCAVIKAASLDCEDLLLPIAAMLSVENVFIRPVDPEYQKEAEQRHRELAAKAGGFNDFATLAVIFEQCKSSGAPASWCQKHWIHWRCLFSAFRVEAQLRELIRKLKQQSDFPKETFEGPKHEVLRRCLCAGYFKNVARRSVGRTFCTMDGRGSPVHIHPSSALHEQETKLEWIIFHEVLVTTKVYARIVCPIRYEWVRDLLPKLHEFNAHDLSSVARREVREDARRRWTNKENVKQLKDGISKDVLKKMQRRNDDKSISDARARFLERKQQRTQDHSDTRKETG

SEQ ID NO: 63008 - protein, 5 aa, Homo sapiens
MSLKK

SEQ ID NO: 63009 - protein, 50 aa, Homo sapiens
METSGIEQMDVTMSGEASAPLPIRQPNSGPYKKQAFPMISKRPEHLRMNL

SEQ ID NO: 63010 - protein, 121 aa, Homo sapiens
VEFDPLPPKEVRYTSLVKYDSERHFIDDVQLPLGLAVASCSQTVTCVPNGTWRNYKAEVRFEPRHRPTRFLSTTIVYPKYPKAVYTTTLDYNCRKTLRRFLSSVELEAAELPGSDDLSDEC

SEQ ID NO: 63011 - protein, 191 aa, Homo sapiens
KRPGGPSNVLRDACLVANILDPRIKQEIIKKFIKQHLSEYLVLFQENQDVAWLDKIDRRYAWIKRQLVDYEEKYGRMFPREWCMAERIAVEFCHVTRAELAKIMRTRAKEIEVKLLLFAIQRTTNFEGFLAKRFSGCTLTDGTLKKLESPPPSTNPFLEDEPTPEMEELATEKGDLDQLEVTVVRTKTCSF

SEQ ID NO: 63012 - protein, 299 aa, Homo sapiens
IMAARRALHFVFKVGNRFQTARFYRDVLGMKVLRHEEFEEGCKAACNGPYDGKWSKTMVGFGPEDDHFVAELTYNYGVGDYKLGNDFMGITLASSQAVSNARKLEWPLTEVAEGVFETEAPGGYKFYLQNRSLPQSDPVLKVTLAVSDLQKSLNYWCNLLGMKIYEKDEEKQRALLGYADNQCKLELQGVKGGVDHAAAFGRIAFSCPQKELPDLEDLMKRENQKILTPLVSLDTPGKATVQVVILADPDGHEICFVGDEAFRELSKMDPEGSKLLDDAMAADKSDEWFAKHNKPKASG

SEQ ID NO: 63013 - protein, 74 aa, Homo sapiens
TFWASWRAFAQIGPARSGFRLETLAGLRSRRLKQPKVSWSLCDSGKKWREHSVSPTSFLTLLPYLSFFPTGLSR

SEQ ID NO: 63014 - protein, 105 aa, Homo sapiens
MAMSICHRGTGIALSAGVSLFGMSAVLLPGNFESYLELVKSLCLGPALIHTAKFALVFPLMYHTWNGIRHLMWNLGKGLKIPQLYQSGVVVLVLTVLSSMGLAAM

SEQ ID NO: 63015 - protein, 164 aa, Homo sapiens
IDHLASLARLLESRKYILVVPLIVINELDGLAKGQETDHRAGGYARVVQEKARKSIEFLEQRFESRDSCLRALTSRGNELESIAFRSEDITGQLGNNDDLILSCCLHYCKDKAKDFMPASKEEPIRLLREVVLLTDDRNLRVKALTRNVPVRDIPAFLTWAQVG

SEQ ID NO: 63016 - protein, 761 aa, Homo sapiens
VRKELSRVDQRHRASQLRKQKKEAVLAEKRQLGGKDGPPHQVLVVPLHSRISLPEAMQLLQDRDTGTVHLNELGNTQNFMLLCPRLKHRWFFTSARPGDLHVVLDMAKVADTILFLLDPLEGWDSTGDYCLSCLFAQGLPTYTLAVQGISGLPLKKQIDTRKKLSKAVEKRFPHDKLLLLDTQQEAGMLLRQLANQKQQHLAFRDRRAYLFAHAVDFVPSEENNLVGTLKISGYVRGQTLNVNRLLHIVGYGDFQMKQIDAPGDPFPLNPRGIKPQKDPDMAMEICATDAVDDMEEGLKVLMKADPGRQESLQAEVIPDPMEGEQTWPTEEELSEAKDFLKESSKVVKKVPKGTSSYQAEWILDGGSQSGGEGDEYEYDDMEHEDFMEEESQDESSEEEEEYETMTIGESVHDDLYDKKVDEEAEAKMLEKYKQERLEEMFPDEVDTPRDVAARIRFQKYRGLKSFRTSPWDPKENLPQDYARIFQFQNFTNTRKSIFKEVEEKEVEGAEVGWYVTLHVSEVPVSVVECFRQGTPLIAFSLLPHEQKMSVLNMVVRRDPGNTEPVKAKEELIFHCGFRRFRASPLFSQHTAADKHKLQRFLTADMALVATVYAPITFPPASVLLFKQKSNGMHSLIATGHLMSVDPDRMVIKRVVLSGHPFKIFTKMAVVRYMFFNREDVLWFKPVELRTKWGRRGHIKEPLGTHGHMKCSFDGKLKSQDTVLMNLYKRVFPKWTYDPYVPEPVPWLKSEISSTVPQGGME

SEQ ID NO: 63017 - protein, 9 aa, Homo sapiens
KAALVDFWC

SEQ ID NO: 63018 - protein, 1161 aa, Homo sapiens
LEKHLMLLRQEYVKLQKKLAETEKRCALLAAQANKESSSESFISRLLAIVADLYEQEQYSDLKIKVGDRHISAHKFVLAARSDSWSLANLSSTKELDLSDANPEVTMTMLRWIYTDELEFREDDVFLTELMKLANRFQLQLLRERCEKGVMSLVNVRNCIRFYQTAEELNASTLMNYCAEIIASHWDDLRKEDFSSMSAQLLYKMIKSKTEYPLHKAIKVEREDVVFLYLIEMDSQLPGKLNEADHNGDLALDLALSRRLESIATTLVSHKADVDMVDKSGWSLLHKGIQRGDLFAATFLIKNGAFVNAATLGAQETPLHLVALYSSKKHSADVMSEMAQIAEALLQAGANPNMQDSKGRTPLHVSIMAGNEYVFSQLLQCKQLDLELKDHEGSTALWLAVQHITVSSDQSVNPFEDVPVVNGTSFDENSFAARLIQRGSHTDAPDTATGNCLLQRAAGAGNEAAALFLATNGAHVNHRNKWGETPLHTACRHGLANLTAELLQQGANPNLQTEEALPLPKEAASLTSLADSVHLQTPLHMAIAYNHPDVVSVILEQKANALHATNNLQIIPDFSLKDSRDQTVLGLALWTGMHTIAAQLLGSGAAINDTMSDGQTLLHMAIQRQDSKSALFLLEHQADINVRTQDGETALQLAIRNQLPLVVDAICTRGADMSVPDEKGNPPLWLALANNLEDIASTLVRHGCDATCWGPGPGGCLQTLLHRAIDENNEPTACFLIRSGCDVNSPRQPGANGEGEEEARDGQTPLHLAASWGLEETVQCLLEFGANVNAQDAEGRTPIHVAISSQHGVIIQLLVSHPDIHLNVRDRQGLTPFACAMTFKNNKSAEAILKRESGAAEQVDNKGRNFLHVAVQNSDIESVLFLISVHANVNSRVQDASKLTPLHLAVQAGSEIIVRNLLLAGAKVNELTKHRQTALHLAAQQDLPTICSVLLENGVDFAAVDENGNNALHLAVMHGRLNNIRVLLTECTVDAEAFNLRGQSPLHILGQYGKENAAAIFDLFLECMPGYPLDKPDADGSTVLLLAYMKGNANLCRAIVRSGARLGVNNNQGVNIFNYQVATKQLLFRLLDMLSKEPPWCDGSYCYECTARFGVTTRKHHCRHCGRLLCHKCSTKEIPIIKFDLNKPVRVCNICFDVLTLGGVS

SEQ ID NO: 63019 - protein, 29 aa, Homo sapiens
MRDLCVIDAQWLYEAAPEYFRRKLRTARN

SEQ ID NO: 63020 - protein, 271 aa, Homo sapiens
LVKNRMQLSGEGAKTREYKTSFHALTSILKAEGLRGIYTGLSAGLLRQATYTTTRLGIYTVLFERLTGADGTPPGFLLKAVIGMTAGATGAFVGTPAEVALIRMTADGRLPADQRRGYKNVFNALIRITREEGVLTLWRGCIPTMARAVVVNAAQLASYSQSKQFLLDSGYFSDNILCHFCASMISGLVTTAASMPVDIAKTRIQNMRMIDGKPEYKNGLDVLFKVVRYEGFFSLWKGFTPYYARLGPHTVLTFIFLEQMNKAYKRLFLSG

SEQ ID NO: 63021 - protein, 405 aa, Homo sapiens
VNCSTTPVAERFFTSSTSLTLKHAAWYPSEILDPHVVLLTSDNVIRIYSLREPQTPTNVIILSEAEEESLVLNKGRAYTASLGETAVAFDFGPLAAVPKTLFGQNGKDEVVAYPLYILYENGETFLTYISLLHSPGNIGKLLGPLPMHPAAEDNYGYDACAVLCLPCVPNILVIATESGMLYHCVVLEGEEEDDHTSEKSWDSRIDLIPSLYVFECVELELALKLASGEDDPFDSDFSCPVKLHRDPKCPSRYHCTHEAGVHSVGLTWIHKLHKFLGSDEEDKDSLQELSTEQKCFVEHILCTKPLPCRQPAPIRGFWIVPDILGPTMICITSTYECLIWPLLSTVHPASPPLLCTREDVEVAESPLRVLAETPDSFEKHIRSILQRSVANPAFLKYATLGIAVL

SEQ ID NO: 63022 - protein, 49 aa, Homo sapiens
RGLVAVCEALGLWSQTAGIRMASVRIREAKEGDCGDILRLIRVKTAGRS

SEQ ID NO: 63023 - protein, 133 aa, Homo sapiens
VRIREAKEGDCGDILRLIRELAEFEKLSDQVKISEEALRADGFGDNPFYHCLVAEILPAPGKLLGQGIGSKIIKKVAEVALDKGCSQFRLAVLDWNQRAMDLYKALGAQDLTEAEGWHFFCFQGEATRKLAGK

SEQ ID NO: 63024 - protein, 40 aa, Homo sapiens
IPPNPVCDQDPGLRWGPCTAVLPADCRAHPFGLRSSPDTP

SEQ ID NO: 63025 - protein, 118 aa, Homo sapiens
RMKFVYKEEHPFEKRRSEGEKIRKKYPDRVPVIVEKAPKARIGDLDKKKYLVPSDLTVGQFYFLIRKRIHLRAEDALFFFVNNVIPPTSATMGQLYQEHHEEDFFLYIAYSDESVYGL

SEQ ID NO: 63026 - protein, 48 aa, Homo sapiens
TKVSTVCEAAAPELEGGLILQRERWPPFLDLLLLQAQTPPPLFRTGTS

SEQ ID NO: 63027 - protein, 237 aa, Homo sapiens
KKVLHEEEKRRRKEQSDLTTLTSAAYQQSLTVHTGTHLLSMQGSPGGHNRPGTLMAADRAKQMFGPQVLTTRHYVGSAAAFAGTPEHGQFQGSPGGAYGTAQPPPHYGPTQPAYSPSQQLRAPSAFPAVQYLSQPQPQPYAVHGHFQPTQTGFLQPGGALSLQKQMEHANQQTGFSDSSSLRPMHPQALHPAPGLLASPQLPVQMQPAGKSGFAATSQPGPRLPFIQHSQNPRFYHK

SEQ ID NO: 63028 - protein, 100 aa, Homo sapiens
LSGAAALGFASYGAHGAQFPDAYGKELFDKANKHHFLHSLALLGVPHCRKPLWAGLLLASGTTLFCTSFYYQALSGDPSIQTLAPAGGTLLLLGWLALAL

SEQ ID NO: 63029 - protein, 353 aa, Homo sapiens
LGAPVRGAAQETLGRRRAQLPLRLCVCLCVCLAISEFASASRTKPPRHHHLENPSPSPMAGYLPPKGYAPSPPPPYPVTPGYPEPALHPGPGQAPVPAQVPAPAPGFALFPSPGPVALGSAAPFLPLPGVPSGLEFLVQIDQILIHQKAERVETFLGWETCNRYELRSGAGQPLGQAAEESNCCARLCCGARRPLRVRLADPGDREVLRLLRPLHCGCSCCPCGLQEMEVQAPPGTTIGHVLQTWHPFLPKFSIQDADRQTVLRVVGPCWTCGCGTDTNFEVKTRDESRSVGRISKQWGGLVREALTDADDFGLQFPLDLDVRVKAVLLGATFLIDYMFFEKRGGAGPSAVTS

SEQ ID NO: 63030 - protein, 54 aa, Homo sapiens
MVCSANRRKRPSRRDSLSHPPPHSMLAVLSGWHHAPPCRGDGPVPCPRRPAPAQ

SEQ ID NO: 63031 - protein, 71 aa, Homo sapiens
LELERLEVERVEMIRQHLCQYTQLRHETDMFNQSTVEPVDQLLRKVDPAKDRELWVREHKTGNIRPVDMEI

SEQ ID NO: 63032 - protein, 181 aa, Homo sapiens
VAGLTAPHVAGLTAPRRVLRAMAPALWRACNGLMAAFFALAALVQVNDPDAEVWVVVYTIPAVLTLLVGLNPEVTGNVIWKSISAIHILFCTVWAVGLASYLLHRTQQNILHEEEGRELSGLVIITAWIILCHSSSKNPVGGRIQLAIAIVITLFPFISWVYIYINKEMRSSWPTHCKTVI

SEQ ID NO: 63033 - protein, 702 aa, Homo sapiens
ILTLKETGLPKCVLSGPPQLEKYLEAIKIFSGPLKGIELAVRPHSAPEYEDETMTVYQIPIHSEQRRGKHQPWQSPERPLSRLSPERSSDSESNENEPHLPHGVSQRRGVRDSSLVVAFICKLHLKRGNFLVLKAKEMGLPVGTAAIAPIIAAVKDGKSITHEGREILAEELCTPPDPGAAFVVVECPDESFIQPICENATFQRYQGKADAPVALVVHMAPASVLVDSRYQQWMERFGPDTQHLVLNENCASVHNLRSHKIQTQLNLIHPDIFPLLTSFRCKKEGPTLSVPMVQGECLLKYQLRPRREWQRDAIITCNPEEFIVEALQLPNFQQSVQEYRRSAQDGPAPAEKRSQYPEIIFLGTGSAIPMKIRNVSATLVNISPDTSLLLDCGEGTFGQLCRHYGDQVDRVLGTLAAVFVSHLHADHHTGLPSILLQRERALASLGKPLHPLLVVAPNQLKAWLQQYHNQCQEVLHHISMIPAKCLQEGAEISSPAVERLISSLLRTCDLEEFQTCLVRHCKHAFGCALVHTSGWKVVYSGDTMPCEALVRMGKDATLLIHEATLEDGLEEEAVEKTHSTTSQAISVGMRMNAEFIMLNHFSQRYAKVPLFSPNFSEKVGVAFDHMKVCFGDFPTMPKLIPPLKALFAGDIEEMEERREKRELRQVRAALLSRELAGGLEDGEPQQKRAHTEEPQAKKVRAQ

SEQ ID NO: 63034 - protein, 27 aa, Homo sapiens
LRIGTAVPLGCRNSAEQNLPPECSSCC

SEQ ID NO: 63035 - protein, 7 aa, Homo sapiens
VVPAGPW

SEQ ID NO: 63036 - protein, 49 aa, Homo sapiens
MTLVHKFACKFSEPVYAAFWLSKKENAIRIVDLGEEPEKPAPSLVGTAP

SEQ ID NO: 63037 - protein, 94 aa, Homo sapiens
IEAALTNQNLSVDVVDQCLVCLKEEWMNKVKVLFKFTKVDSRPKEDTQKLLSILGASEEDNVKLLKFWMTGLSKTYKSHLMSTVRSPTASESRN

SEQ ID NO: 63038 - protein, 130 aa, Homo sapiens
RVAGIHKKVARTIGISVDPRRRNKSTESLQANVQRLKEYRSKLILFPRKPSAPKKGDSSAEELKLATQLTGPVMPIRNVYKKEKARVITEEEKNFKAFASLRMARANARLFGIRAKRAKEAAEQDVEKKK

SEQ ID NO: 63039 - protein, 22 aa, Homo sapiens
MYIREKASAGSQAKDKERCVIS

SEQ ID NO: 63040 - protein, 1163 aa, Homo sapiens
LGEPCDLDAALLTDIEGEVGAGRGRANGLDAPRAGADRGAMDCTFEDMLQLINNQDSDFPGLFDPPYAGSGAGGTDPASPDTSSPGSLSPPPATLSSSLEAFLSGPQAAPSPLSPPQPAPTPLKMYPSMPAFSPGPGIKEESVPLSILQTPTPQPLPGALLPQSFPAPAPPQFSSTPVLGYPSPPGGFSTGSPPGNTQQPLPGLPLASPPGVPPVSLHTQVQSVVPQQLLTVTAAPTAAPVTTTVTSQIQQVPVLLQPHFIKADSLLLTAMKTDGATVKAAGLSPLVSGTTVQTGPLPTLVSGGTILATVPLVVDAEKLPINRLAAGSKAPASAQSRGEKRTAHNAIEKRYRSSINDKIIELKDLVVGTEAKLNKSAVLRKAIDYIRFLQHSNQKLKQENLSLRTAVHKSKSLKDLVSACGSGGNTDVLMEGVKTEVEDTLTPPPSDAGSPFQSSPLSLGSRGSGSGGSGSDSEPDSPVFEDSKAKPEQRPSLHSRGMLDRSRLALCTLVFLCLSCNPLASLLGARGLPSPSDTTSVYHSPGRNVLGTESRDGPGWAQWLLPPVVWLLNGLLVLVSLVLLFVYGEPVTRPHSGPAVYFWRHRKQADLDLARGDFAQAAQQLWLALRALGRPLPTSHLDLACSLLWNLIRHLLQRLWVGRWLAGRAGGLQQDCALRVDASASARDAALVYHKLHQLHTMGKHTGGHLTATNLALSALNLAECAGDAVSVATLAEIYVAAALRVKTSLPRALHFLTRFFLSSARQACLAQSGSVPPAMQWLCHPVGHRFFVDGDWSVLSTPWESLYSLAGNPVDPLAQVTQLFREHLLERALNCVTQPNPSPGSADGDKEFSDALGYLQLLNSCSDAAGAPAYSFSISSSMATTTGVDPVAKWWASLTAVVIHWLRRDEEAAERLCPLVEHLPRVLQESERPLPRAALHSFKAARALLGCAKAESGPASLTICEKASGYLQDSLATTPASSSIDKAVQLFLCDLLLVVRTSLWRQQQPPAPAPAAQGTSSRPQASALELRGFQRDLSSLRRLAQSFRPAMRRVFLHEATARLMAGASPTRTHQLLDRSLRRRAGPGGKGGAVAELEPRPTRREHAEALLLASCYLPPGFLSAPGQRVGMLAEAARTLEKLGDRRLLHDCQQMLMRLGGGTTVTSS

SEQ ID NO: 63041 - protein, 49 aa, Homo sapiens
VDFTAQCLRKNPAERMSYLELMEHPFFTLHKTKKTDIAAFMKEILGEDS

SEQ ID NO: 63042 - protein, 54 aa, Homo sapiens
LSRLEEEYQIQKWGNIEWAHDYELQELRARTAAGTLFIHLCSESTTVKHKLLKE

SEQ ID NO: 63043 - protein, 205 aa, Homo sapiens
KESEIIDFFLGASLKDEVLKIMPVQKQTRAGQRTRFKAFVAIGDYNGHVGLGVKCSKEVATAIRGAIILAKLSIVPVRRGYWGNKIGKPHTVPCKVTGCCGSVLVRLIPAPRGTGIVSAPVPKKLLMMAGIDDCYTSARGCTATLGNFTKATFDAISKTYSYLTPDLWKETVFTKSPYQEFTDHLVKTHTRVSVQRTQAPAVATT

SEQ ID NO: 63044 - protein, 114 aa, Homo sapiens
LRVLDPEVTQQTIELKEECKDFVDKIGQFQKIVGGLIELVDQLAKEAENEKMKAIGARNLLKSIAKQREAQQQQLQALIAEKKMQLERYRVEYEALCKVEAEQNEFIDQFIFQK

SEQ ID NO: 63045 - protein, 44 aa, Homo sapiens
LALLGCNCRQPLMIVLLSVLGSERERTRSEWFFLLDGSMTETSS

SEQ ID NO: 63046 - protein, 31 aa, Homo sapiens
VTTSMPRATSQTACTSSTPRAPVCLCPSSVT

SEQ ID NO: 63047 - protein, 55 aa, Homo sapiens
TAAMSSRKLSGPKGRRLSIHVVTWNVASAAPPLDLSDLLQLNNRNLNLDIYVIGN

SEQ ID NO: 63048 - protein, 123 aa, Homo sapiens
VSAPLIVLMPEDLWTVENDMMVSYSSTSDFPSSPWDWIGLYKVGLRDVNDYVSYAWVGDSKVSCSDNLNQVYIDISNIPTTEDEFLLCYYSNSLRSVVGISRPFQIPPGSLREDPLGEAQPQI

SEQ ID NO: 63049 - protein, 559 aa, Homo sapiens [sequence omitted]

SEQ ID NO: 63050 - protein, 27 aa, Homo sapiens
LWLVNFSIPPLPRFSGYGRSVSLSRAG

SEQ ID NO: 63051 - protein, 246 aa, Homo sapiens
LHWGLRRLPTPESAARDRWQWWNLCVSLAHSLLSGTGALLGLSLYPQMAADPIHGHPRWALVLVAVSVGYFLADGADLLWNQTLGKTWDLLCHHLVVVSCLSTAVLSGHYVGFSMVSLLLELNSACLHLRKLLLLSRQAPSLAFSVTSWASLATLALFRLVPLGWMSLWLFRQHHQVPLALVTLGGIGLVTVGIMSIILGIRILVNDVLQSRPHPPSPGHEKTRGTRTRRDNGPVTSNSSTLSLKD

SEQ ID NO: 63052 - protein, 268 aa, Homo sapiens
RAPCKAAGRMNILAPVRRDRVLAELPQCLRKEAALHGHKDFHPRVTCACQEHRTGTVGFKISKVIVVGDLSVGKTCLINRFCKDTFDKNYKATIGVDFEMERFEVLGIPFSLQLWDTAGQERFKCIASTYYRGAQAIIIVFNLNDVASLEHTKQWLADALKENDPSSVLLFLVGSKKDLSTPAQYALMEKDALQVAQEMKAEYWAVSSLTGENVREFFFRVAALTFEANVLAELEKSGARRIGDVVRINSDDSNLYLTASKKKPTCCP

SEQ ID NO: 63053 - protein, 31 aa, Homo sapiens
MIIIYFSRLLRSDFCPEHVPKKQHKDKFLTE

SEQ ID NO: 63054 - protein, 280 aa, Homo sapiens
ILSFTIKDVYDKVDYLSSLGKTQTAVVQRDADIGVAEAERDAGIREAECKKEMLDVKFMADTKIADSKRAFELQKSAFSEEVNIKTAEAQLAYELQGAREQQKIRQEEIEIEVVQRKKQIAVEAQEILRTDKELIATVRRPAEAEAHRIQQIAEGEKVKQVLLAQAEAEKIRKIGEAEAAVIEAMGKAEAERMKLKAEAYQKYGDAAKMALVLEALPQIAAKIAAPLTKVDEIVVLSGDNSKVTSEVNRLLAELPASVHALTGVDLSKIPLIKKATGVQV

SEQ ID NO: 63055 - protein, 164 aa, Homo sapiens
KKQIAVEAQEILRTDKELIATVRRPAEAEAHRIQQIAEGEKVKQVLLAQAEAEKIRKIGEAEAAVIEAMGKAEAERMKLKAEAYQKYGDAAKMALVLEALPQIAAKIAAPLTKVDEIVVLSGDNSKVTSEVNRLLAELPASVHALTGVDLSKIPLIKKATGVQV

SEQ ID NO: 63056 - protein, 62 aa, Homo sapiens
TFDIEAVTLGTTSNNEGGHFKLRVTISSNNREVVFDWLLDQSCGSLYFGCSFFYPGWKVLVF

SEQ ID NO: 63057 - protein, 133 aa, Homo sapiens [sequence omitted]

SEQ ID NO: 63058 - protein, 52 aa, Homo sapiens
RKYLLKALFKALKRLKSLRDQFSFAENLYQIIGIDCFQKNDKKMFKSCRRLT

SEQ ID NO: 63059 - protein, 58 aa, Homo sapiens
IIGSVSEDNSEDEISNLVKLDLLEEKEGSLSPASVGSDTLSDLGISSLQDGLALHIRL

SEQ ID NO: 63060 - protein, 554 aa, Homo sapiens
LDFFGNKKSVPGVCGASQTHQKPQNGEKKEESLTERKREQSKKKRKTMTSEIASQEEGATIQWMSSVEAKIEDKKVQRESKLTSGKLENLRKEKINFLRNKHKIHVQGTDLPDPIATFQQLDQEYKINSRLLQNILDAGFQMPTPIQMQAIPVMLHGRELLASAPTGSGKTLAFSIPILMQLKQPANKGFRALIISPTRELASQIHRELIKISEGTGFRIHMIHKAAVAAKKFGPKSSKKFDILVTTPNRLIYLLKQDPPGIDLASVEWLVVDESDKLFEDGKTGFRDQLASIFLACTSHKVRRAMFSATFAYDVEQWCKLNLDNVISVSIGARNSAVETVEQELLFVGSETGKLLAVRELVKKGFNPPVLVFVQSIERAKELFHELIYEGINVDVIHAERTQQQRDNTVHSFRAGKIWVLICTALLARGIDFKGVNLVINYDFPTSSVEYIHRIGRTGRAGNKGKAITFFTEDDKPLLRSVANVIQQAGCPVPEYIKGFQKLLSKQKKKMIKKPLERESISTTPKCFLEKAKDKQKKVTGQNSKKKVALEDKS

SEQ ID NO: 63061 - protein, 478 aa, Homo sapiens
MWLAAAAPSLARRLLFLGPPPPPLLLLVFSRSSRRRLHSLGLAAMPEKRPFERLPADVSPINCSLCLKPDLLDFTFEGKLEAAAQVRQATNQIVMNCADIDIITASYAPEGDEEIHATGFNYQNEDEKVTLSFPSTLQTGTGTLKIDFVGELNDKMKGFYRSKYTTPSGEVPYAAVTQFEATDARRAFPCWDEPAIKATFDISLVVPKDRVALSNMNVIDRKPYPDDENLVEVKFARTPVTSTYLVAFVVGEYDFVETRSKDGVCVCVYTPVGKAEQGKFALEVAAKTLPFYKDYFNVPYPLPKIDLIAIADFAAGAMENWDLVTYRETALLIDPKNSCSSSRQWVALVVGHELAHQWFGNLVTMEWWTHLWLNEGFASWIEYLCVDHCFPEYDIWTQFVSADYTRAQELDALDNSHPIEVSVGHPSEVDEIFDAISYSKGASVIRMLHDYIGDKDFKKGMNMYLTKFQQKNAAAGNL

SEQ ID NO: 63062 - protein, 36 aa, Homo sapiens
RFCHYRTSSKGVCRLVAPDCIQCWQHCMILQYICKK

SEQ ID NO: 63063 - protein, 192 aa, Homo sapiens
VPASSPMYHTCVAFAWVSLNAWFWSTVFHTRDTDLTEKMDYFCASTVILHSIYLCCVRTVGLQHPAVVSAFRALLLLMLTVHVSYLSLIRFDYGYNLVANVAIGLVNVVWWLAWCLWNQRRLPHVRKCVVVVLLLQGLSLLELLDFPPLFWVLDAHAIWHISTIPVHVLFFSFLEDDSLYLLKESEDKFKLD

SEQ ID NO: 63064 - protein, 167 aa, Homo sapiens
LIFGPTRTAERGSRMNVGTAHSEVNPNTRVMNSRGIWLSYVLAIGLLHIVLLSIPFVSVPVVWTLTNLIHNMGMYIFLHTVKGTPFETPDQGKARLLTHWEQMDYGVQFTASRKFLTITPIVLYFLTSFYTKYDQIHFVLNTVSLMSVLIPKLPQLHGVRIFGINKY

SEQ ID NO: 63065 - protein, 38 aa, Homo sapiens
KLDHYAITKFPLTTESAMKKIEDNNTLVFIVNVKANKH

SEQ ID NO: 63066 - protein, 416 aa, Homo sapiens
IAASETRVAPSVLRLAMTSYSYRQSSATSSFGGLGGGSVRFGPGVAFRAPSIHGGSGGRGVSVSSARFVSSSSSGAYGGGYGGVLTASDGLLAGNEKLTMQNLNDRLASYLDKVRALEAANGELEVKIRDWYQKQGPGPSRDYSHYYTTIQDLRDKILGATIENSRIVLQIDNARLAADDFRTKFETEQALRMSVEADINGLRRVLDELTLARTDLEMQIEGLKEELAYLKKNHEEEISTLRGQVGGQVSVEVDSAPGTDLAKILSDMRSQYEVMAEQNRKDAEAWFTSRTEELNREVAGHTEQLQMSRSEVTDLRRTLQGLEIELQSQLSMKAALEDTLAETEARFGAQLAHIQALISGIEAQLGDVRADSERQNQEYQRLMDIKSRLEQEIATYRSLLEGQEDHYNNLSASKVL

SEQ ID NO: 63067 - protein, 38 aa, Homo sapiens
LACDPYLLPHIQKSVSTSSPAGAAIASTSGASNNSSSN

SEQ ID NO: 63068 - protein, 22 aa, Homo sapiens
MVASLLPSRLHSSAPGLRGRRA

SEQ ID NO: 63069 - protein, 112 aa, Homo sapiens
ITYWKRKVKSEYMRLRQLKRLQANMGAKALYVANFAKVQEKTQILNEEWKKLRVQPVQSMKPVSGHPFLKKCTIESIFPGFASQHMLMRSLNTVALVPIMYSWSPLQQNFMR

SEQ ID NO: 63070 - protein, 240 aa, Homo sapiens
TCKQVFQFAVKESLILKLPTDELMNPSQKKKRKHRLWAAHCRKIQLKKDNSSTQVYNYQPCDHPDRPCDSTCPCIMTQNFCEKFCQCNPDCQNRFPGCRCKTQCNTKQCPCYLAVRECDPDLCLTCGASEHWDCKVVSCKNCSIQRGLKKHLLLAPSDVAGWGTFIKESVQKNEFISEYCGELISQDEADRRGKVYDKYMSSFLFNLNNDFVVDATRKGNKIRFANHSVNPNCYAKGESQ

SEQ ID NO: 63071 - protein, 181 aa, Homo sapiens
ISPLELMRTKLQAQHVSYRELGACVRTAVAQGGWRSLWLGWGPTALRDVPFSALYWFNYELVKSWLNGFRPKDQTSVGMSFVAGGISGTVAAVLTLPFDVVKTQRQVALGAMEAVRVNPLHVDSTWLLLRRIRAESGTKGLFAGFLPRIIKAAPSCAIMISTYEFGKSFFQRLNQDRLLGG

SEQ ID NO: 63072 - protein, 86 aa, Homo sapiens
LEEDSLLNICKEIVERWSETQNVVTKVKKEDEVQAIATLIEKQAQIVVKPRMVSEEEKQRKAALLAQYADVTDEEEYPFWSLGTIP

SEQ ID NO: 63073 - protein, 9 aa, Homo sapiens
RCYHNEHWF

SEQ ID NO: 63074 - protein, 37 aa, Homo sapiens
KMEEPSRRCCRRCRRRCCRRRPRSRSSSRSGDAVLSA

SEQ ID NO: 63075 - protein, 64 aa, Homo sapiens
MKVFHPNIHIVSNYMDFNEDVEERRERYMDSYDIVLEKDETLDVVNGLLQHILCQGVQLEMQGP

SEQ ID NO: 63076 - protein, 73 aa, Homo sapiens
LGDSIGDLTMADGVPGVQNILKIGFLNDKVEERRERYMDSYDIVLEKDETLDVVNGLLQHILCQGVQLEMQGP

SEQ ID NO: 63077 - protein, 567 aa, Homo sapiens
KWSSEPGPEPDTVEAVIEYMYTGRIRVSTGSVHEVLELADRFLLIRLKEFCGEFLKKKLHLSNCVAIHSLAHMYTLSQLALKAADMIRRNFHKVIQDEEFYTLPFHLIRDWLSDLEITVDSEEVLFETVLKWVQRNAEERERYFEELFKLLRLSQMKPTYLTRHVKPERLVANNEVCVKLVADAVERHALRAENIQSGTCQHPTSHVSLLPRYGQNMDVIMVIGGVSEGGDYLSECVGYFVDEDRWVNLPHIHNHLDGHAVAVTESYVYVAGSMEPGFAKTVERYNPNLNTWEHVCSLMTRKHSFGLTEVKGKLYSIGGHGNFSPGFKDVTVYNPELDKWHNLESAPKILRDVKALAIEDRFVYIAARTPVDRDTEDGLKAVITCYDTETRQWQDVESLPLIDNYCFFQMSVVNSNFYQTASCCPKSYCLENEEAVRKIASQVSDEILESLPPEVLSIEGAAICYYKDDVFIIGGWKNSDDIDKQYRKEAYRYCAERKRWMLLPPMPQPRCRATACHVRIPYRYLHGTQRYPMPQNLMWQKDRIRQMQEIHRHALNMRRVPSSQIEC

SEQ ID NO: 63078 - protein, 879 aa, Homo sapiens
IKPVKTKKFTLMEQTLPVTVYEMDFLADLMDNSELIRNVTLCGHLHHGKTCFVDCLIEQTHPEIRKRYDQDLCYTDILFTEQERGVGIKSTPVTVVLPDTKGKSYLFNIMDTPGHVNFSDEVTAGLRISDGVVLFIDAAEGVMLNTERLIKHAVQERLAVTVCINKIDRLILELKLPPTDAYYKLRHIVDEVNGLISMYSTDENLILSPLLGNVCFSSSQYSICFTLGSFAKIYADTFGDINYQEFAKRLWGDIYFNPKTRKFTKKAPTSSSQRSFVEFILEPLYKILAQVVGDVDTSLPRTLDELGIHLTKEELKLNIRPLLRLVCKKFFGEFTGFVDMCVQHIPSPKVGAKPKIEHTYTGGVDSDLGEAMSDCDPDGPLMCHTTKMYSTDDGVQFHAFGRVLSGTIHAGQPVKVLGENYTLEDEEDSQICTVGRLWISVARYHIEVNRVPAGNWVLIEGVDQPIVKTATITEPRGNEEAQIFRPLKFNTTSVIKIAVEPVNPSELPKMLDGLRKVNKSYPSLTTKVEESGEHVILGTGELYLDCVMHDLRKMYSEIDIKVADPVVTFCETVVETSSLKCFAETPNKKNKITMIAEPLEKGLAEDIENEVVQITWNRKKLGEFFQTKYDWDLLAARSIWAFGPDATGPNILVDDTLPSEVDKALLGSVKDSIVQGFQWGTREGPLCDELIRNVKFKILDAVVAQEPLHRGGGQIIPTARRVVYSAFLMATPRLMEPYYFVEVQAPADCVSAVYTVLARRRGHVTQDAPIPGSPLYTIKAFIPAIDSFGFETDLRTHTQGQAFSLSVFHHWQIVPGDPLDKSIVIRPLEPQPAPHLAREFMIKTRRRKGLSEDVSISKFFDDPMLLELAKQDVVLNYPM

SEQ ID NO: 63079 - protein, 10 aa, Homo sapiens
MDPGDPVRSR

SEQ ID NO: 63080 - protein, 36 aa, Homo sapiens
RNSTLISTCAGHAASRSRPCWTSPKGRSKSGFRTGA

SEQ ID NO: 63081 - protein, 50 aa, Homo sapiens
MNGICRVRARGGERRKGGEICRLPLALGLDVNIYYVCLFSPRRWLRYSPG

SEQ ID NO: 63082 - protein, 5 aa, Homo sapiens
ILLIY

SEQ ID NO: 63083 - protein, 369 aa, Homo sapiens
KMNALLEQKEQQERLREAAALGDIREVQKLVESGVDVNSQNEVNGWTCLHWACKRNHGQVVSYLLKSGADKEILTTKGEMPVQLTSRREIRKIMGVEEEDDDDDDDDNLPQLKKESELPFVPNYLANPAFPFIYTPTAEDSAQMQNGGPSTPPASPPADGSPPLLPPGEPPLLGTFPRDHTSLALVQNGDVSAPSAILRTPESTKPGPVCQPPVSQSRSLFSSVPSKPPMSLEPQNGTYAGPAPAFQPFFFTGAFPFNMQELVLKVRIQNPSLRENDFIEIELDRQELTYQELLRVCCCELGVNPDQVEKIRKLPNTLLRKDKDVARLQDFQELELVLMISENNFLFRNAASTLTERPCYNRRASKLTY

SEQ ID NO: 63084 - protein, 134 aa, Homo sapiens
VHRLWSSISLLFFPSAKMALETVPKDLRHLRACLLCSLVKTIDQFEYDGCDNCDAYLQMKGNREMVYDCTSSSFDGIIAMMSPEDSWVSKWQRVSNFKPGVYAVSVTGRLPQGIVRELKSRGVAYKSRDTAIKT

SEQ ID NO: 63085 - protein, 133 aa, Homo sapiens
MLMPKKNWIAIYELLFKEGVMVAKKDVHMPKHPELADKNVPNLHVMKAMQSLKCRGYVKEHFAWRHFYWYLTNECIQYLRDYLHLPPEIVPATLRRSRPETGRPRPKGLYMRSAVLPGADKKAEAGAGSATEF

SEQ ID NO: 63086 - protein, 18 aa, Homo sapiens
MRGDRGLKQRHLGQRKSI

SEQ ID NO: 63087 - protein, 93 aa, Homo sapiens
LAPKIGPLGLSPKNVGGDIAKATGDWKGLRITVKLTIQNRQAQIEVVPSASALIIKALKEPPETERNRKTLNTVGISLLMRSSTLLDRWSTDP

SEQ ID NO: 63088 - protein, 330 aa, Homo sapiens
LYNKLPRRRVNIFGEELERLLKKKYEGHWYPEKPYKGSGFRCIHIGEKVDPVIEQASKESGLDIDDVRGNLPQDLSVWIDPFEVSYQIGEKGPVKVLYVDDNNENGCELDKEIKNSFNPEAQVFMPISDPASSVSSSPSPPFGHSAAVSPTFMPRSTQPLTFTTATFAATKFGSTKMKNSGRSNKVARTSPINLGLNVNDLLKQKAISSSMHSLYGLGLGSQQQPQQQQQPAQPPPPPPPPQQQQQQKTSALSPNAKEFIFPNMQGQGSSTNGMFPGDSPLNLSPLQYSNAFDVFAAYGGLNEKSFVDGLNFSLNNMQYSNQQFQPVMAN

SEQ ID NO: 63089 - protein, 46 aa, Homo sapiens
LKHQSLGAAASTANLLDDVEGHACDEDFRGRRQEAPKVEEGLREGQ

SEQ ID NO: 63090 - protein, 487 aa, Homo sapiens
VEPPDQKPLLPIPITQKPQGAPETLKDAIGIKKEKPKTSFVCTYCSKAFRDSYHLRRHESCHTGIKLVSRPKKTPTTVVPLISTIAGDSSRTSLVSTIAGILSTVTTSSSGTNPSSSASTTAMPVTQSVKKPSKPVKKNHACEMCGKAFRDVYHLNRHKLSHSDEKPFECPICNQRFKRKDRMTYHVRSHEGGITKPYTCSVCGKGFSRPDHLSCHVKHVHSTERPFKCQTCTAAFATKDRLRTHMVRHEGKVSCNICGKLLSAAYITSHLKTHGQSQSINCNTCKQGISKTCMSEETSNQKQQQQQQQQQQQQQQQQQQHVTSWPGKQVETLRLWEEAVKARKKEAANLCQTSTAATTPVTLTTPFSITSSVSSGTMSNPVTVAAAMSMRSPVNVSSAVNITSPMNIGHPVTITSPLSMTSPLTLTTPVNLPTPVTAPVNIAHPVTITSPMNLPTPMTLAAPLNIAMRPVESMPFLPQALPTSPPW

SEQ ID NO: 63091 - protein, 41 aa, Homo sapiens
LPCARLGGKACSRVRAFRHRHVGRWCDSWPRREQRLPHLRG

SEQ ID NO: 63092 - protein, 229 aa, Homo sapiens
LGLTLVAMTGAWLGLYRGGIAWESDLQFNAHPLCMVIGLIFLQGNALLVYRVFRNEAKRTTKVLHGLLHIFALVIALVGLVAVFDYHRKKGYADLYSLHSWCGILVFVLYFVQWLVGFSFFLFPGASFSLRSRYRPQHIFFGATIFLLSVGTALLGLKEALLFNLGGKYSAFEPEGVLANVLGLLLACFGGAVLYILTRADWKRPSQAEEQALSMDFKTLTEGDSPGSQ

SEQ ID NO: 63093 - protein, 26 aa, Homo sapiens
RPGRGVGRRALGRVSASATAFFLKVQ

SEQ ID NO: 63094 - protein, 10 aa, Homo sapiens
LNHSFFKQVS

SEQ ID NO: 63095 - protein, 42 aa, Homo sapiens
KDFFRLPDPFAKVVVDGSGQCHSTDTVKNTLDPKWNQHYDLQ

SEQ ID NO: 63096 - protein, 397 aa, Homo sapiens
VVSLCPDDTECLTVPRYKRDLVQKLKILRQELSQQQPQAGHCRIEVSREEIFEESYRQVMKMRPKDLWKRLMIKFRGEEGLDYGGVAREWLYLLSHEMLNPYYGLFQYSRDDIYTLQINPDSAVNPEHLSYFHFVGRIMGMAVFHGHYIDGGFTLPFYKQLLGKSITLDDMELVDPDLHNSLVWILENDITGVLDHTFCVEHNAYGEIIQHELKPNGKSIPVNEENKKEYVRLYVNWRFLRGIEAQFLALQKGFNEVIPQHLLKTFDEKELELIICGLGKIDVNDWKVNTRLKHCTPDSNIVKWFWKAVEFFDEERRARLLQFVTGSSRVPLQGFKALQGAAGPRLFTIHQIDACTNNLPKAHTCFNRIDIPPYESYEKLYEKLLTAIEETCGFAVE

SEQ ID NO: 63097 - protein, 325 aa, Homo sapiens
IKFRGEEGLDYGGVAREWLYLLSHEMLNPYYGLFQYSRDDIYTLQINPDSAVNPEHLSYFHFVGRIMGMAVFHGHYIDGGFTLPFYKQLLGKSITLDDMELVDPDLHNSLVWILENDITGVLDHTFCVEHNAYGEIIQHELKPNGKSIPVNEENKKEYVRLYVNWRFLRGIEAQFLALQKGFNEVIPQHLLKTFDEKELELIICGLGKIDVNDWKVNTRLKHCTPDSNIVKWFWKAVEFFDEERRARLLQFVTGSSRVPLQGFKALQGAAGPRLFTIHQIDACTNNLPKAHTCFNRIDIPPYESYEKLYEKLLTAIEETCGFAVE

SEQ ID NO: 63098 - protein, 128 aa, Homo sapiens
VELRKAKKDDQMLKRRNVSSFPDDATSPLQENCNNQTPALRAIGNIVTGTDEQTQVVIDAGALAVFPSLLTNPKTNIQKEATWTMSNITASRQDQIQQVVNHGLVPFLVSDLSKILRHKRKLYGPWNS

SEQ ID NO: 63099 - protein, 43 aa, Homo sapiens
LKKKKPEDAFCVVGITMIDLYPRDLWNFVFGQASLTDGTGEVD

SEQ ID NO: 63100 - protein, 359 aa, Homo sapiens
LLTSGEAEQQRKSKEIDKCLSREKTYVKRLVKILLLGAGESGKSTFLKQMRIIHGQDFDQRAREEFRPTIYSNVIKGMRVLVDAREKLHIPWGDNSNQQHGDKMMSFDTRAPMAAQGMVETRVFLQYLPAIRALWADSGIQNAYDRRREFQLGESVKYFLDNLDKLGEPDYIPSQQDILLARRPTKGIHEYDFEIKNVPFKMVDVGGQRSERKRWFECFDSVTSILFLVSSSEFDQVLMEDRLTNRLTESLNIFETIVNNRVFSNVSIILFLNKTDLLEEKVQIVSIKDYFLEFEGDPHCLRDVQKFLVECFRNKRRDQQQKPLYHHFTTAINTENIRLVFRDVKDTILHDNLKQLMLQ

SEQ ID NO: 63101 - protein, 439 aa, Homo sapiens
VDYSATVDQRLPECAKLAKEGRLQEVIETLLSLEKQTRTASDMVSTSRILVAVVKMCYEAKEWDLLNENIMLLSKRRSQLKQAVAKMVQQCCTYVEEITDLPIKLRLIDTLRMVTEGKIYVEIERARLTKTLATIKEQNGDVKEAASILQELQVETYGSMEKKERVEFILEQMRLCLAVKDYIRTQIISKKINTKFFQEENTEKLKLKYYNLMIQLDQHEGSYLSICKHYRAIYDTPCIQAESEKWQQALKSVVLYVILAPFDNEQSDLVHRISGDKKLEEIPKYKDLLKLFTTMELMRWSTLVEDYGMELRKGSLESPATDVFGSTEEGEKRWKDLKNRVVEHNIRIMAKYYTRITMKRMAQLLDLSVDESEAFLSNLVVNKTIFAKVDRLAGIINFQRPKDPNNLLNDWSQKLNSLMSLVNKTTHLIAKEEMIHNLQ

SEQ ID NO: 63102 - protein, 23 aa, Homo sapiens
LKKKMTQKWFPSQELPTSLSGHM

SEQ ID NO: 63103 - protein, 386 aa, Homo sapiens
TMPKKLLLLPPPSASSAFRVPRARPVPPPAMNAARTGYRVFSANSTAACTELAKRITERLGAELGKSVVYQETNGETRVEIKESVRGQDIFIIQTIPRDVNTAVMELLIMAYALKTACARNIIGVIPYFPYSKQSKMRKRGSIVCKLLASMLAKAGLTHIITMDLHQKEIQGFFSFPVDNLRASPFLLQYIQEEIPNYRNAVIVAKSPDAAKRAQSYAERLRLGLAVIHGEAQCTELDMDDGRHSPPMVKNATVHPGLELPLMMAKEKPPITVVGDVGGRIAIIVDDIIDDVESFVAAAEILKERGAYKIYVMATHGILSAEAPRLIEESSVDEVVVTNTVPHEVQKLQCPKIKTVDISLILSEAIRRIHNGESMAYLFRNITVDD

SEQ ID NO: 63104 - protein, 196 aa, Homo sapiens
LGLELLMEKVPGEMEIERRERSEELSEAERKAVQAMWARLYANCEDVGVAILVRFFVNFPSAKQYFSQFKHMEDPLEMERSPQLRKHACRVMGALNTVVENLHDPDKVSSVLALVGKAHALKHKVEPVYFKILSGVILEVVAEEFASDFPPETQRAWAKLRGLIYSHVTAAYKEVGWVQQVPNATTPPATLPSSGP

SEQ ID NO: 63105 - protein, 666 aa, Homo sapiens
VDSAVQHPELPVKTLGFFIMCVYVYLILPLPHYVSGLFLGIGLGFMTAVCVIWFFTPPSAHKYHKLHKNLRHWNTRSLDIKEPEILKGWMNEIYNYDPETYHATLTHSVFVRLEGGTLRLSKPNKNISRRASYNEPKPEVTYISQKIYDLSDSKIYLVPKTLARKRIWNKKYPICIELGQQDDFMSKAQTDKETSEEKPPAEGSEDPKKPPRPQEGTRSSQRDQILYLFGRTGREKEEWFRRFILASKLKSEIKKSSGVSGGKPGLLPAHSRHNSPSGHLTHSRSSSKGSVEEIMSQPKQKELAGSVRQKMLLDYSVYMGRCVPQESRSPQRSPLQSAESSPTAGKKLPEVPPSEEEEQEAWVNALLGRIFWDFLGEKYWSDLVSKKIQMKLSKIKLPYFMNELTLTELDMGVAVPKILQAFKPYVDHQGLWIDLEMSYNGSFLMTLETKMNLTKLGKEPLVEALKVGEIGKEGCRPRAFCLADSDEESSSAGSSEEDDAPEPSGGDKQLLPGAEGYVGGHRTSKIMRFVDKITKSKYFQKATETEFIKKKIEEVSNTPLLLTVEVQECRGTLAVNIPPPPTDRVWYGFRKPPHVELKARPKLGEREVTLVHVTDWIEKKLEQEFQKVFVMPNMDDVYITIMHSAMDPRSTSCLLKDPPVEAADQP

SEQ ID NO: 63106 - protein, 11 aa, Homo sapiens
IGTKTGLSRAI

SEQ ID NO: 63107 - protein, 626 aa, Homo sapiens
ILRSPPTATIDAMSGYSSDRDRGRDRGFGAPRFGGSRAGPLSGKKFGNPGEKLVKKKWNLDELPKFEKNFYQEHPDLARRTAQEVETYRRSKEITVRGHNCPKPVLNFYEANFPANVMDVIARQNFTEPTAIQAQGWPVALSGLDMVGVAQTGSGKTLSYLLPAIVHINHQPFLERGDGPICLVLAPTRELAQQVQQVAAEYCRACRLKSTCIYGGAPKGPQIRDLERGVEICIATPGRLIDFLECGKTNLRRTTYLVLDEADRMLDMGFEPQIRKIVDQIRPDRQTLMWSATWPKEVRQLAEDFLKDYIHINIGALELSANHNILQIVDVCHDVEKDEKLIRLMEEIMSEKENKTIVFVETKRRCDELTRKMRRDGWPAMGIHGDKSQQERDWVLNEFKHGKAPILIATDVASRGLDVEDVKFVINYDYPNSSEDYIHRIGRTARSTKTGTAYTFFTPNNIKQVSDLISVLREANQAINPKLLQLVEDRGSGRSRGRGGMKDDRRDRYSAGKRGGFNTFRDRENYDRGYSSLLKRDFGAKTQNGVYSAANYTNGSFGSNFVSAGIQTSFRTGNPTGTYQNGYDSTQQYGSNVPNMHNGMNQQAYAYPATAAAPMIGYPMPTGYSQ

SEQ ID NO: 63108 - protein, 157 aa, Homo sapiens
LAREQYRALRPDLADKVASVYEAPGFFLDLEPIPGALDAVREMNDLPDTQVFICTSPLLKYHHCVGEKYRWVEQHLGPQFVERIILTRDKTVVLGDLLIDDKDTVRGQEETPSWEHILFTCCHNRHLVLPPTRRRLLSWSDNWREILDSKRGAAQRE

SEQ ID NO: 63109 - protein, 16 aa, Homo sapiens
MSVPVGHFVKLKSFKR

SEQ ID NO: 63110 - protein, 417 aa, Homo sapiens
LRRGRSGTSWRPRRMNHKSKKRIREAKRSARPELKDSLDWTRHNYYESFSLSPAAVADNVERADALQLSVEEFVERYERPYKPVVLLNAQEGWSAQEKWTLERLKRKYRNQKFKCGEDNDGYSVKMKMKYYIEYMESTRDDSPLYIFDSSYGEHPKRRKLLEDYKVPKFFTDDLFQYAGEKRRPPYRWFVMGPPRSGTGIHIDPLGTSAWNALVQGHKRWCLFPTSTPRELIKVTRDEGGNQQDEAITWFNVIYPRTQLPTWPPEFKPLEILQKPGETVFVPGGWWHVVLNLDTTIAITQNFASSTNFPVVWHKTVRGRPKLSRKWYRILKQEHPELAVLADSVDLQESTGIASDSSSDSSSSSSSSSSDSDSECESGSEGDGTVHRRKKRRTCSMVGNGDTTSQDDCVSKERSSSR

SEQ ID NO: 63111 - protein, 186 aa, Homo sapiens
KYGRVGDVYIPRDRYTKESRGFAFVRFHDKRDAEDAMDAMDGAVLDGRELRVQMARYGRPPDSHHSRRGPPPRRYGGGGYGRRSRSPRRRRRSRSRSRSRSRSRSRSRYSRSKSRSRTRSRSRSTSKSRSARRSKSKSSSVSRSRSRSRSRSRSRSPPPVSKRESKSRSRSKSPPKSPEEEGAVSS

SEQ ID NO: 63112 - protein, 30 aa, Homo sapiens
IDPLQNLCEKDLKEIQHHLQKLEGRRLDFD

SEQ ID NO: 63113 - protein, 1616 aa, Homo sapiens
ISVCQQTWALLCKNFLKKWRMKRESLMEWLNSLLLLLCLYIYPHSHQVNDFSSLLTMDLGRVDTFNESRFSVVYTPVTNTTQQIMNKVASTPFLAGKEVLGLPDEESIKEFTANYPEEIVRVTFTNTYSYHLKFLLGHGMPAKKEHKDHTAHCYETNEDVYCEVSVFWKEGFVALQAAINAAIIEITTNHSVMEELMSVTGKNMKMHSFIGQSGVITDLYLFSCIISFSSFIYYASVNVTRERKRMKALMTMMGLRDSAFWLSWGLLYAGFIFIMALFLALVIRSTQFIILSGFMVVFSLFLLYGLSLVALAFLMSILVKKSFLTGLVVFLLTVFWGCLGFTSLYRHLPASLEWILSLLSPFAFMLGMAQLLHLDYDLNSNAFPHPSDGSNLIVATNFMLAFDTCLYLALAIYFEKILPNEYGHRRPPLFFLKSSFWSQTQKTDHVALEDEMDADPSFHDSFEQAPPEFQGKEAIRIRNVTKEYKGKPDKIEALKDLVFDIYEGQITAILGHSGAGKSTLLNILSGLSVPTKGSVTIYNNKLSEMADLENLSKLTGVCPQSNVQFDFLTVRENLRLFAKIKGILPQEVDKEIQRVLLELEMKNIQDVLAQNLSGGQKRKLTFGIAILGDPQIFLLDEPTAGLDPFSRHQVWNLLKERKTDRVILFSTQFMDEADILADRKVFLSQGKLKCAGSSLFLKKKWGIGYHLSLQLNEICVEENITSLVKQHIPDAKLSAKSEGKLIYTLPLERTNKFPELYKDLDSYPDLGIENYGVSMTTLNEVFLKLEGKSTINESDIAILGEVQAEKADDTERLVEMEQVLSSLNKMRKTIGGVALWRQQICAIARVRLLKLKHERKALLALLLILMAGFCPLLVEYTMVKIYQNSYTWELSPHLYFLAPGQQPHDPLTQLLIINKTGASIDDFIQSVEHQNIALEVDAFGTRNGTDDPSYNGAITVCCNEKNYSFSLACNAKRLNCFPVLMDIVSNGLLGMVKPSVHIRTERSTFLENGQDNPIGFLAYIMFWLVLTSSCPPYIAMSSIDDYKNRARSQLRISGLSPSAYWFGQALVDVSLYFLVFVFIYLMSYISNFEDMLLTIIHIIQIPCAVGYSFSLIFMTYVISFIFRKGRKNSGIWSFCFYVVTVFSVAGFAFSIFESDIPFIFTFLIPPATMIGCLFLSSHLLFSSLFSEERMDVQPFLVFLIPFLHFIIFLFTLRCLEWKFGKKSMRKDPFFRISPRSSDVCQNPEEPEGEDEDVQMERVRTANALNSTNFDEKPVIIASCLRKEYAGKRKGCFSKRKNKIATRNVSFCVRKGEVLGLLGHNGAGKSTSIKVITGDTKPTAGQVLLKGSGGGDALEFLGYCPQENALWPNLTVRQHLEVYAAVKGLRKGDAEVAITRLVDALKLQDQLKSPVKTLSEGIKRKLCFVLSILGNPSVVLLDEPSTGMDPEGQQQMWQAIRATFRNTERGALLTTHYMAEAEAVCDRVAIMVSGRLRCIGSIQHLKSKFGKDYLLEMKVKNLAQVEPLHAEILRLFPQAARQERYSSLMVYKLPVEDVQPLAQAFFKLEKVKQSFDLEEYSLSQSTLEQVFLELSKEQELGDFEEDFDPSVKWKLLPQEEP

SEQ ID NO: 63114 - protein, 26 aa, Homo sapiens
VARHGCRIRELLEQVDEQTFLQIIAI

SEQ ID NO: 63115 - protein, 566 aa, Homo sapiens
ILQIIKESQQQHGLRHGDFQRYRGYCSRRQRRLRKTLNFKMGNRHKFTGKKVTEELLTDNRYLLLVLMDAERAWSYAMQLKQEANTEPRKRFHLLSRLRKAVKHAEELERLCESNRVDAKTKLEAQAYTAYLSGMLRFEHQEWKAAIEAFNKCKTIYEKLASAFTEEQAVLYNQRVEEISPNIRYCAYNIGDQSAINELMQMRLRSGGTEGLLAEKLEALITQTRAKQAATMSEVEWRGRTVPVKIDKVRIFLLGLADNEAAIVQAESEETKERLFESMLSECRDAIQVVREELKPDQKQRDYILEGEPGKVSNLQYLHSYLTYIKLSTAIKRNENMAKGLQRALLQQQPEDDSKRSPRPQDLIRLYDIILQNLVELLQLPGLEEDKAFQKEIGLKTLVFKAYRCFFIAQSYVLVKKWSEALVLYDRVLKYANEVNSDAGAFKNSLKDLPDVQELITQVRSEKCSLQAAAILDANDAHQTETSSSQVKDNKPLVERFETFCLDPSLVTKQANLVHFPPGFQPIPCKPLFFDLALNHVAFPPLEDKLEQKTKSGLTGYIKGIFGFRS

SEQ ID NO: 63116 - protein, 211 aa, Homo sapiens
IGHLPESLTKPDQVAPFTFLQLLPLSPGVQSSTPDHSFSLELGSEVDITEEDRKPDSTAYVAMIPQCIKEEDTPSDNDSGICMSPESYLGSPQHSPSTRGSPNRSLPSPGVLCGSAHPKPYDPPGEKMVAAKVKGEKLDKKLKKMEQNKTAATRYRQKKRAEQEALTGECKELEKKNEALKERADSLAKEIQYLKDLIEEVRKARGKKRVP

SEQ ID NO: 63117 - protein, 41 aa, Homo sapiens
VSLAGSAALPGLGSEIHRRPARPSEGRMALRRPQGLAGSGG

SEQ ID NO: 63118 - protein, 33 aa, Homo sapiens
LGPVTVASGWASKAGRSPATPEASRPGPLDLSL

SEQ ID NO: 63119 - protein, 1109 aa, Homo sapiens
LITNIVNSIVGVSVLTMPFCFKQCGIVLGALLLVFCSWMTHQSCMFLVKSASLSKRRTYAGLAFHAYGKAGKMLVETSMIGLMLGTCIAFYVVIGDLGSNFFARLFGFQVGGTFRMFLLFAVSLCIVLPLSLQRNMMASIQSFSAMALLFYTVFMFVIVLSSLKHGLFSGQWLRRVSYVRWEGVFRCIPIFGMSFACQSQVLPTYDSLDEPSVKTMSSIFASSLNVVTTFYVMVGFFGYVSFTEATAGNVLMHFPSNLVTEMLRVGFMMSVAVGFPMMILPCRQALSTLLCEQQQKDGTFAAGGYMPPLRFKALTLSVVFGTMVGGILIPNVETILGLTGATMGSLICFICPALIYKKIHKNALSSQVVLWVGLGVLVVSTVTTLSVSEEVPEDLAEEAPGGRLGEAEGLMKVEAARLSAQDPVVAVAEDGREKPKLPKEREELEQAQIKGPVDVPGREDGKEAPEEAQLDRPGQGIAVPVGEAHRHEPPVPHDKVVVDEGQDREVPEENKPPSRHAGGKAPGVQGQMAPPLPDSEREKQEPEQGEVGKRPGQAQALEEAGDLPEDPQKVPEADGQPAVQPAKEDLGPGDRGLHPRPQAVLSEQQNGLAVGGGEKAKGGPPPGNAAGDTGQPAEDSDHGGKPPLPAEKPAPGPGLPPEPREQRDVERAGGNQAASQLEEAGRAEMLDHAVLLQVIKEQQVQQKRLLDQQEKLLAVIEEQHKEIHQQRQEDEEDKPRQVEVHQEPGAAVPRGQEAPEGKARETVENLPPLPLDPVLRAPGGRPAPSQDLNQRSLEHSEGPVGRDPAGPPDGGPDTEPRAAQAKLRDGQKDAAPRAAGTVKELPKGPEQVPVPDPAREAGGPEERLAEEFPGQSQDVTGGSQDRKKPGKEVAATGTSILKEANWLVAGPGAETGDPRMKPKQVSRDLGLAADLPGGAEGAAAQPQAVLRQPELRVISDGEQGGQQGHRLDHGGHLEMRKARGGDHVPVSHEQPRGGEDAAVQEPRQRPEPELGLKRAVPGGQRPDNAKPNRDLKLQAGSDLRRRRRDLGPHAEGQLAPRDGVIIGLNPLPDVQVNDLRGALDAQLRQAAGGALQVVHSRQLRQAPGPPEES

SEQ ID NO: 63120 - protein, 437 aa, Homo sapiens
VSFVCQRCSQPLKLDTSFKILDRVTIQELTAPLLTTAQAKPGETQEEETNSGEEPFIETPRQDGVSRRFIPPARMMSTESANSFTLIGEASDGGTMENLSRRLKVTGDLFDIMSGQTDVDHPLCEECTDTLLDQLDTQLNVTENECQNYKRCLEILEQMNEDDSEQLQMELKELALEEERLIQELEDVEKNRKIVAENLEKVQAEAERLDQEEAQYQREYSEFKRQQLELDDELKSVENQMRYAQTQLDKLKKTNVFNATFHIWHSGQFGTINNFRLGRLPSVPVEWNEINAAWGQTVLLLHALANKMGLKFQRYRLVPYGNHSYLESLTDKSKELPLYCSGGLRFFWDNKFDHAMVAFLDCVQQFKEEVEKGETRFCLPYRMDVEKGKIEDTGGSGGSYSIKTQFNSEEQWTKALKFMLTNLKWGLAWVSSQFYNK

SEQ ID NO: 63121 - protein, 59 aa, Homo sapiens
IYSGGEKIPLVLSRPLSSNVATLQHLCRKTVNGHLDSYEKVTQLPGPIREFLDQYDAPL

SEQ ID NO: 63122 - protein, 27 aa, Homo sapiens
IKAAISRDPFYEMLAARKKKVSSTKRH

SEQ ID NO: 63123 - protein, 419 aa, Homo sapiens
RAGANRAAAAMELRVGNRYRLGRKIGSGSFGDIYLGTDIAAGEEVAIKLECVKTKHPQLHIESKIYKMMQGGVGIPTIRWCGAEGDYNVMVMELLGPSLEDLFNFCSRKFSLKTVLLLADQMISRIEYIHSKNFIHRDVKPDNFLMGLGKKGNLVYIIDFGLAKKYRDARTHQHIPYRENKNLTGTARYASINTHLGIEQSRRDDLESLGYVLMYFNLGSLPWQGLKAATKRQKYERISEKKMSTPIEVLCKGYPSEFATYLNFCRSLRFDDKPDYSYLRQLFRNLFHRQGFSYDYVFDWNMLKFGASRAADDAERERRDREERLRHSRNPATRGLPSTASGRLRGTQEVAPPTPLTPTSHTANTSPRPVSGMERERKVSMRLHRGAPVNISSSDLTGRQDTSRMSTSQNSIPFEHHGK

SEQ ID NO: 63124 - protein, 182 aa, Homo sapiens
KLRAHGQESAIFNEVAPGYFSRDGWQLQVQGGVAQLVIKGARDSHAGLYMWHLVGHQRNNRQVTLEVSGAEPQSAPDTGFWPVPAVVTAVFILLVALVMFAWYRCRCSQQRREKKFFLLEPQMKVAALRAGAQQGLSRASAELWTPDSEPTPRPLALVFKPSPLGALELLSPQPLFPYAADP

SEQ ID NO: 63125 - protein, 283 aa, Homo sapiens
RLWQRPWLRTAGLGAGFVLTALLLWSSLGADDGVAEVLARRGEVVAGRFIEVPCSEDYDSHRRFEGCTPRKCGRGVTDVVITREEAERIRSVAEKGLSLGGSDGGASILDLHSGALSVGKHFVNLYRYFGDKIQNIFSEEDFRLYREVRQKVQLTIAEAFGISASSLHLTKPTFFSRINSTEARTAHDEYWHAHVDKVTYGSFDYTSLLYLSNYLEDFGGGRFMFMEEGANKTVEPRAGRVSFFTSGSENLHRVEKVHWGTRYAITIAFSCNPDHGIEDPAFP

SEQ ID NO: 63126 - protein, 206 aa, Homo sapiens
LSMAEQEPTAEQLAQIAAENEEDEHSVNYKPPAQKSIQEIQELDKDDESLRKYKEALLGRVAVSADPNVPNVVVTGLTLVCSSAPGPLELDLTGDLESFKKQSFVLKEGVEYRIKISFRVNREIVSGMKYIQHTYRKGVKIDKTDYMVGSYGPRAEEYEFLTPVEEAPKGMLARGSYSIKSRFTDDDKTDHLSWEWNLTIKKDWKD

SEQ ID NO: 63127 - protein, 179 aa, Homo sapiens
RPKQLPDKWQHDLFDSGFGGGAGVETGGKLLVSNLDFGVSDADIQELFAEFGTLKKAAVHYDRSGRSLGTADVHFERKADALKAMKQYNGVPLDGRPMNIQLVTSQIDAQRRPAQSVNRGGMTRNRGAGGFGGGGGTRRGTRGGARGRGRGAGRNSKQQLSAEELDAQLDAYNARMDTS

SEQ ID NO: 63128 - protein, 4 aa, Homo sapiens
RCGG

SEQ ID NO: 63129 - protein, 172 aa, Homo sapiens
VAGAFDLFHIGHVDFLEKVHRLAERPYIIAGLHFDQEVNHYKGKNYPIMNLHERTLSVLACRYVSEVVIGAPYAVTAELLSHFKVDLVCHGKTEIIPDRDGSDPYQEPKRRGIFRQIDSGSNLTTDLIVQRIITNRLEYEARNQKKEAKELAFLEAARQQAAQPLGERDGDF

SEQ ID NO: 63130 - protein, 4 aa, Homo sapiens
LVFV

SEQ ID NO: 63131 - protein, 579 aa, Homo sapiens
LKKVAKEFGFQNNGFSVYINRNKTGEITASSNKSLNLLKIKHGDLLFLFPSSLAGPSSEMETSVPPGFKVFGAPNVVEDEIDQYLSKQDGKIYRSRDPQLCRHGPLGKCVHCVPLEPFDEDYLNHLEPPVKHMSFHAYIRKLTGGADKGKFVALENISCKIKSGCEGHLPWPNGICTKCQPSAITLNRQKYRHVDNIMFENHTVADRFLDFWRKTGNQHFGYLYGRYTEHKDIPLGIRAEVAAIYEPPQIGTQNSLELLEDPKAEVVDEIAAKLGLRKVGWIFTDLVSEDTRKGTVRYSRNKDTYFLSSEECITAGDFQNKHPNMCRLSPDGHFGSKFVTAVATGGPDNQVHFEGYQVSNQCMALVRDECLLPCKDAPELGYAKESSSEQYVPDVFYKDVDKFGNEITQLARPLPVEYLIIDITTTFPKDPVYTFSISQNPFPIENRDVLGETQDFHSLATYLSQNTSSVFLDTISDFHLLLFLVTNEVMPLQDSISLLLEAVRTRNEELAQTWKRSEQWATIEQLCSTVGGQLPGLHEYGAVGGSTHTATAAMWACQHCTFMNQPGTGHCEMCSLPRT

SEQ ID NO: 63132 - protein, 25 aa, Homo sapiens
IPQLAKNQAWRFVVPVSLEPCWALI

SEQ ID NO: 63133 - protein, 341 aa, Homo sapiens
LPCNPHGNGLLYAGFNQDHGCFACGMENGFRVYNTDPLKEKEKQEFLEGGVGHVEMLFRCNYLALVGGGKKPKYPPNKVMIWDDLKKKTVIEIEFSTEVKAVKLRRDRIVVVLDSMIKVFTFTHNPHQLHVFETCYNPKGLCVLCPNSNNSLLAFPGTHTGHVQLVDLASTEKPPVDIPAHEGVLSCIALNLQGTRIATASEKGTLIRIFDTSSGHLIQELRRGSQAANIYCINFNQDASLICVSSDHGTVHIFAAEDPKRNKQSSLASASFLPKYFSSKWSFSKFQVPSGSPCICAFGTEPNAVIAICADGSYYKFLFNPKGECIRDVYAQFLEMTDDKL

SEQ ID NO: 63134 - protein, 267 aa, Homo sapiens
KTTRKNHGPRLRLLLRTWISRARQQTFIFTDGDDPELELQGGDRVINTNCSAVRTRQALCCKMSVEYDKFIESGRKWFCHVDDDNYVNARSLLHLLSSFSPSQDVYLGRPSLDHPIEATERVQGGRTVTTVKFWFATGGAGFCLSRGLALKMSPWASLGSFMSTAEQVRLPDDCTVGYIVEGLLGARLLHSPLFHSHLENLQRLPPDTLLQQVTLSHGGPENPHNVVNVAGGFSLHQDPTRFKSIHCLLYPDTDWCPRQKQGAPTSR

SEQ ID NO: 63135 - protein, 59 aa, Homo sapiens
KRLIKDYQQKEIEFLKKETAQRRVLEESELARKEEMDKLLDKISELEGNLQTLRNSNST

SEQ ID NO: 63136 - protein, 26 aa, Homo sapiens
ITAMPVCAFWSEERRPWPLPGKSIYF

SEQ ID NO: 63137 - protein, 258 aa, Homo sapiens
LSVFGMQARYSLRDEFPLLTTKRVFWKGVLEELLWFIKGSTNAKELSSKGVKIWDANGSRDFLDSLGFSTREEGDLGPVYGFQWRHFGAEYRDMESDYSGQGVDQLQRVIDTIKTNPDDRRIIMCAWNPRDLPLMALPPCHALCQFYVVNSELSCQLYQRSGDMGLGVPFNIASYALLTYMIAHITGLKPGDFIHTLGDAHIYLNHIEPLKIQLQREPRPFPKLRILRKVEKIDDFKAEDFQIEGYNPHPTIKMEMAV

SEQ ID NO: 63138 - protein, 146 aa, Homo sapiens
VYRAETEEIPKIFQILYANEGECRKDVEMEPVQEAEKTNFQNHKGHEFIPTLYHFPANCDACAKPLWHVFKPPPALECQRRHVKCHRDHLDKKEDLICPCKVSYDVTSARDMLLLACSQDEQKKWVTHLVKKIPKNPPSGFVRASP

SEQ ID NO: 63139 - protein, 1594 aa, Homo sapiens
LGLPVERRRAERARPRPRPPPRPRPAARVPGPGQGKGRGGELSNRNRGKILAPRARPPLPLPAAPDAEWGQGQGRRTQDPVPAPLEPLEFGLLQLLALWGLGLALCCLPVSPRCLGTKAPGPLRPRAPTHRRRGAARPALSTMRGLGTCLATLAGLLLTAAGETFSGGCLFDEPYSTCGYSQSEGDDFNWEQVNTLTKPTSDPWMPSGSFMLVNASGRPEGQRAHLLLPQLKENDTHCIDFHYFVSSKSNSPPGLLNVYVKVNNGPLGNPIWNISGDPTRTWNRAELAISTFWPNFYQVIFEVITSGHQGYLAIDEVKVLGHPCTRTPHFLRIQNVEVNAGQFATFQCSAIGRTVAGDRLWLQGIDVRDAPLKEIKVTSSRRFIASFNVVNTTKRDAGKYRCMIRTEGGVGISNYAELVVKEPPVPIAPPQLASVGATYLWIQLNANSINGDGPIVAREVEYCTASGSWNDRQPVDSTSYKIGHLDPDTEYEISVLLTRPGEGGTGSPGPALRTRTKCADPMRGPRKLEVVEVKSRQITIRWEPFGYNVTRCHSYNLTVHYCYQVGGQEQVREEVSWDTENSHPQHTITNLSPYTNVSVKLILMNPEGRKESQELIVQTDEDLPGAVPTESIQGSTFEEKIFLQWREPTQTYGVITLYEITYKAVSSFDPEIDLSNQSGRVSKLGNETHFLFFGLYPGTTYSFTIRASTAKGFGPPATNQFTTKISAPSMPAYELETPLNQTDNTVTVMLKPAHSRGAPVSVYQIVVEEERPRRTKKTTEILKCYPVPIHFQNASLLNSQYYFAAEFPADSLQAAQPFTIGDNKTYNGYWNTPLLPYKSYRIYFQAASRANGETKIDCVQVATKGAATPKPVPEPEKQTDHTVKIAGVIAGILLFVIIFLGVVLVMKKRKLAKKRKETMSSTRQEMTVMVNSMDKSYAEQGTNCDEAFSFMDTHNLNGRSVSSPSSFTMKTNTLSTSVPNSYYPDETHTMASDTSSLVQSHTYKKREPADVPYQTGQLHPAIRVADLLQHITQMKCAEGYGFKEEYESFFEGQSAPWDSAKKDENRMKNRYGNIIAYDHSRVRLQTIEGDTNSDYINGNYIDGYHRPNHYIATQGPMQETIYDFWRMVWHENTASIIMVTNLVEVGRVKCCKYWPDDTEIYKDIKVTLIETELLAEYVIRTFAVEKRGVHEIREIRQFHFTGWPDHGVPYHATGLLGFVRQVKSKSPPSAGPLVVHCSAGAGRTGCFIVIDIMLDMAEREGVVDIYNCVRELRSRRVNMVQTEEQYVFIHDAILEACLCGDTSVPASQVRSLYYDMNKLDPQTNSSQIKEEFRTLNMVTPTLRVEDCSIALLPRNHEKNRCMDILPPDRCLPFLITIDGESSNYINAALMDSYKQPSAFIVTQHPLPNTVKDFWRLVLDYHCTSVVMLNDVDPAQLCPQYWPENGVHRHGPIQVEFVSADLEEDIISRIFRIYNAARPQDGYRMVQQFQFLGWPMYRDTPVSKRSFLKLIRQVDKWQEEYNGGEGRTVVHCLNGGGRSGTFCAISIVCEMLRHQRTVDVFHAVKTLRNNKPNMVDLLDQYKFCYEVALEYLNSG

SEQ ID NO: 63140 - protein, 102 aa, Homo sapiens
LSNMERLLHAKAHGVRVIGSSTLALCHLASGAADAYYQFGLHCWDLAAATVIIREAGGIVIDTSGGPLDLMACRVVAASTREMAMLIAQALQTINYGRDDEK

SEQ ID NO: 63141 - protein, 16 aa, Homo sapiens
MSHRLRNMCPGPPWWT

SEQ ID NO: 63142 - protein, 43 aa, Homo sapiens
MLLSPGTAWLRAHDGDTGAQSVPSRGHWGWEIKHRVSICPGSL

SEQ ID NO: 63143 - protein, 35 aa, Homo sapiens
LSLRWRPPQGPWRSTSRSWSSIRPQTSNSKAPSQM

SEQ ID NO: 63144 - protein, 503 aa, Homo sapiens
LFPALLLHGLGEGSALLHPDSRSHPRSLEKSAWRAFKESQCHHMLKHLHNGARITVQMPPTIEGHWVSTGCEVRSGPEFITRSYRFYHNNTFKAYQFYYGSNRCTNPTYTLIIRGKIRLRQASWIIRGGTEADYQLHNVQVICHTEAVAEKLGQQVNRTCPGFLADGGPWVQDVAYDLWREENGCECTKAVNFAMHELQLIRVEKQYLHHNLDHLVEELFLGDIHTDATQRMFYRPSSYQPPLQNAKNHDHACIACRIIYRSDEHHPPILPPKADLTIGLHGEWVSQRCEVRPEVLFLTRHFIFHDNNNTWEGHYYHYSDPVCKHPTFSIYARGRYSRGVLSSRVMGGTEFVFKVNHMKVTPMDAATASLLNVFNGNECGAEGSWQVGIQQDVTHTNGCVALGIKLPHTEYEIFKMEQDARGRYLLFNGQRPSDGSSPDRPEKRATSYQMPLVQCASSSPRAEDLAEDSGSSLYGRAPGRHTWSLLLAALACLVPLLHWNIRR

SEQ ID NO: 63145 - protein, 10 aa, Homo sapiens
RQFKEKKKRN

SEQ ID NO: 63146 - protein, 310 aa, Homo sapiens
RQNEEIEAMAAIYGEEWCVIDDCAKIFCIRISDDIDDPKWTLCLQVMLPNEYPGTAPPIYQLNAPWLKGQERADLSNSLEEIYIQNIGESILYLWVEKIRDVLIQKSQMTEPGPDVKKKTEEEDVECEDDLILACQPESSLKALDFDISETRTEVEVEELPPIDHGIPITDRRSTFQAHLAPVVCPKQVKMVLSKLYENKKIASATHNIYAYRIYCEDKQTFLQDCEDDGETAAGGRLLHLMEILNVKNVMVVVSRWYGGILLGPDRFKHINNCARNILVEKNYTNSPEESSKALGKNKKVRKDKKRNEH

SEQ ID NO: 63147 - protein, 181 aa, Homo sapiens
KRDTLFGPCGHIATCSLCSPRVKKCLICKEQVQSRTKIEECVVCSDKKAAVLFQPCGHMCACENCANLMKKCVQCRAVVERRVPFIMCCGGKSSEDATDDISSGNIPVLQKDKDNTNVNADVQKLQQQLQDIKEQTMCPVCLDRLKNMIFLCGHGTCQLCGDRMSECPICRKAIERRILLY

SEQ ID NO: 63148 - protein, 200 aa, Homo sapiens
IQTPLWRRDGTGHYLCNACGLYSKMNGLSRPLIKPQKRVPSSRRLGLSCANCHTTTTTLWRRNAEGEPVCNACGLYMKLHGVPRPLAMKKEGIQTRKRKPKNINKSKTCSGNSNNSIPMTPTSTSSNSDDCSKNTSPTTQPTASGAGAPVMTGAGESTNPENSELKYSGQDGLYIGVSLASPAEVTSSVRPDSWCALALA

SEQ ID NO: 63149 - protein, 248 aa, Homo sapiens
IDLRQRIMVIKAKGMEPIEVPLEENSERTQIRQSRVCADRVSTYDCGEKISSWLSTFFGRPCHLIKQSSNSQRNAKKKHGKDQLPGTMATLSLVNEAQYLLINTSSILELHRQLNTSDENGKEELFSLKDLSLRFRANIIINGKRAFEEEKWDEISIGSLRFQVLGPCHRCQMICIDQQTGQRNQHVFQKLSESRETKVNFGMYLMHASLDLSSPCFLSVGSQVLPVLKENVEGHDLPASEKHQDVTS

SEQ ID NO: 63150 - protein, 56 aa, Homo sapiens
LREIELLCQEHGQENDDLVQRLMDILYASEEHEGHTEEPEAEEQAHEQQPPQQEEY

SEQ ID NO: 63151 - protein, 30 aa, Homo sapiens
MLFFLYLSSRCRWYLCRRCDGGSREVSLHL

SEQ ID NO: 63152 - protein, 67 aa, Homo sapiens
RFAGCEASQRSGDQVEDFSGGLVSEITSVVSTMIPFQAQWCPVASRSQTFMWTRKAYRGNGNSPLAH

SEQ ID NO: 63153 - protein, 26 aa, Homo sapiens
LTEESSSLRMFSRILKAKNSVNLGIN

SEQ ID NO: 63154 - protein, 207 aa, Homo sapiens
LHDSCPGQARYLLWAYTSSHDDKSTFEETCPYCFQLLVLDNSRVRLKPKARLTPKIQKLLNREARNYTLSFKEAKMVKKFKDSKSVLLITCKTCNRTVKHHGKSRSFVSTLKSNPATPTSKLSLKTPERRTANPNHDMSGSKGKSPASVFRTPTSGQSVSTCSSKNTSKTKKHFSQLKMLLSQNESQKIPKVDFRNFLSSLKGGLLK

SEQ ID NO: 63155 - protein, 234 aa, Homo sapiens
RVRDRDVYLVIEDLKQKASEYESEAKYLQDLLMESVNFSPANLSSTGSRYLNALVDSAVALETKDTSLASFIPAVNDLTSDLFRTKSKSEEIKIELEKLEKNLTATLVLEKCLQEDVKKAELHLSTERAKVDNRRQNMDFLKAKSEEFRFGIKAAEEQLSARGMDASLSHQSLVALSEKLARLKQQTIPLKKKLESYLDLMPNPSLAQVKIEEAKRELDSIEAELTRRVDMMEL

SEQ ID NO: 63156 - protein, 7 aa, Homo sapiens
RMSSAEK

SEQ ID NO: 63157 - protein, 154 aa, Homo sapiens
MIVSSALMIWKGLIVLTGSESPIVVVLSGSMEPAFHRGDLLFLTNFREDPIRAGEIVVFKVEGRDIPIVHRVIKVHEKDNGDIKFLTKGDNNEVDDRGLYKEGQNWLEKKDVVGRARGFLPYVGMVTIIMNDYPKFKYALLAVMGAYVLLKRES

SEQ ID NO: 63158 - protein, 85 aa, Homo sapiens
VRLRMRTAWTFPWTFLHPLAQAREGEGATYPRSLCRFFGIGCMSTVTMPILQSKKKRCCPSKHTCLRYRSVTGSSTPAAGSSLTC

SEQ ID NO: 63159 - protein, 136 aa, Homo sapiens
VVLFGISITGGLFYTIFKELFSSSSPSKIYGRALEKCRSHPEVIGVFGESVKGYGEVTRRGRRQHVRFTEYVKDGLKHTCVKFYIEGSEPGKQGTVYAQVKENPGSGEYDFRYIFVEIESYPRRTIIIEDNRSQDD

SEQ ID NO: 63160 - protein, 52 aa, Homo sapiens
LLDLELNRLTKALFLALVALSIVMVTLQGFVGPWYRNLFRFLLLFSYIIPIR

SEQ ID NO: 63161 - protein, 57 aa, Homo sapiens
LLSSLFWVWKIDVASFFGKRRYICMKAIKNHKPSVLLGFDMSELKNVKHRLNFEYEP

SEQ ID NO: 63162 - protein, 70 aa, Homo sapiens
ISVSASLENRVCEYVDHLHEHFKYPVMIQRASYMPPKDPGYSTEMKEESVKKHQYPDGEVWKKLLPAQEN

SEQ ID NO: 63163 - protein, 6 aa, Homo sapiens
MLNYQL

SEQ ID NO: 63164 - protein, 808 aa, Homo sapiens
VRREVTDKEQEFAARAAKQLEYQQLEDDKLSQKSSSSKLSRSPLKIVKKPKSMQCKVILLDGSEYTCDVEKRSRGQVLFDKVCEHLNLLEKDYFGLTYRDAENQKNWLDPAKEIKKQVRSGAWHFSFNVKFYPPDPAQLSEDITRYYLCLQLRDDIVSGRLPCSFVTLALLGSYTVQSELGDYDPDECGSDYISEFRFAPNHTKELEDKVIELHKSHRGMTPAEAEMHFLENAKKLSMYGVDLHHAKDSEGVEIMLGVCASGLLIYRDRLRINRFAWPKVLKISYKRNNFYIKIRPGEFEQFESTIGFKLPNHRAAKRLWKVCVEHHTFFRLLLPEAPPKKFLTLGSKFRYSGRTQAQTRRASALIDRPAPYFERSSSKRYTMSRSLDGASVNENHEIYMKDSMSAAEVGTGQYATTKGISQTNLITTVTPEKKAEEERDEEEDKRRKGEEVTPISAIRHEGKTDSERTDTAADGETTATEELEKTQDDLMKHQTNISELKRTFLETSTDTAVTNEWEKRLSTSPVRLAARQEDAPMIEPLVPEEKMETKTESSGIETEPTVHHLPLSTEKVVQETVLVEERRVVHASGDASYSAGDSGDAAAQPAFTGIKGKEGSALTEGAKEEGGEEVAKAVLEQEETAAASRERQEEQSAAIHISETLEQKPHFESSTVKTETISFGSVSPGGVKLEISTKEVPVVHTETKTITYESSQVDPGTDLEPGVLMSAQTITSETTSTTTTTHITKTVKGGISETRIEKRIVITGDADIDHDQALAQAIKEAKEQHPDMSVTKVVVHKETEITPEDGED

SEQ ID NO: 63165 - protein, 16 aa, Homo sapiens
LGLRIEMLKTRRTQKG

SEQ ID NO: 63166 - protein, 654 aa, Homo sapiens
INLISDPSRWVRQAAFQSLGPFISTFANPSSSGQYFKEESKSSEEMSVENKNRTRDQEAPEDVQVRPEDTPSDLSVSNSSVILENTMEDHAAEASGKPLGEISVPLDSSLLCTLSSESHQEAASNENDKKPGNYKSMLRPEVGTTSQDSALLDQELYNSFHFWRTPLPEIDLDIELEQNSGGKPSPEGPEEESEGPVPSSPNITMATRKELEEMIENLEPHIDDPDVKAQVEVLSAALRASSLDAHEETISIEKRSDLQDELDINELPNCKINQEDSVPLISDAVENMDSTLHYIHSDSDLSNNSSFSPDEERRTKVQDVVPQALLDQYLSMTDPSRAQTVDTEIAKHCAYSLPGVALTLGRQNWHCLRETYETLASDMQWKVRRTLAFSIHELAVILGDQLTAADLVPIFNGFLKDLDEVRIGVLKHLHDFLKLLHIDKRREYLYQLQEFLVTDNSRNWRFRAELAEQLILLLELYSPRDVYDYLRPIALNLCADKVSSVRWISYKLVSEMVKKLHAATPPTFGVDLINELVENFGRCPKWSGRQAFVFVCQTVIEDDCLPMDQFAVHLMPHLLTLANDRVPNVRVLLAKTLRQTLLEKDYFLASASCHQEAVEQTIMALQMDRDSDVKYFASIHPASTKISEDAMSTASSTY

SEQ ID NO: 63167 - protein, 24 aa, Homo sapiens
MKAMQSLKSKGYVKEQFAWRHFYW

SEQ ID NO: 63168 - protein, 750 aa, Homo sapiens
RASRNSLLTDIIAAYQRFCSRPPKGFEKYFPNGKNGKKASEPKEVMGEKKESKPAATTRSSGGGGGGGGKRGGKKDDSHWWSRFQKGDIPWDDKDFRMFFLWTALFWGGVMFYLLLKRSGREITWKDFVNNYLSKGVVDRLEVVNKRFVRVTFTPGKTPVDGQYVWFNIGSVDTFERNLETLQQELGIEGENRVPVVYIAESDGSFLLSMLPTVLIIAFLLYTIRRGPAGIGRTGRGMGGLFSVGETTAKVLKDEIDVKFKDVAGCEEAKLEIMEFVNFLKNPKQYQDLGAKIPKGAILTGPPGTGKTLLAKATAGEANVPFITVSGSEFLEMFVGVGPARVRDLFALARKNAPCILFIDEIDAVGRKRGRGNFGGQSEQENTLNQLLVEMDGFNTTTNVVILAGTNRPDILDPALLRPGRFDRQIFIGPPDIKGRASIFKVHLRPLKLDSTLEKDKLARKLASLTPGFSGADVANVCNEAALIAARHLSDSINQKHFEQAIERVIGGLEKKTQVLQPEEKKTVAYHEAGHAVAGWYLEHADPLLKVSIIPRGKGLGYAQYLPKEQYLYTKEQLLDRMCMTLGGRVSEEIFFGRITTGAQDDLRKVTQSAYAQIVQFGMNEKVGQISFDLPRQGDMVLEKPYSEATARLIDDEVRILINDAYKRTVALLTEKKADVEKVALLLLEKEVLDKNDMVELLGPRPFAEKSTYEEFVEGTGSLDEDTSLPEGLKDWNKEREKEKEEPPGEKVAN

SEQ ID NO: 63169 - protein, 28 aa, Homo sapiens
LKRKTQSFYMSSPGPSEYCPSERTISEI

SEQ ID NO: 63170 - protein, 14 aa, Homo sapiens
VATASGALGARVTA

SEQ ID NO: 63171 - protein, 420 aa, Homo sapiens
KKHRTSLPSPMFSRNDFSIWSILRKCIGMELSKITMPVIFNEPLSFLQRLTEYMEHTYLIHKASSLSDPVERMQCVAAFAVSAVASQWERTGKPFNPLLGETYELVRDDLGFRLISEQVSHHPPISAFHAEGLNNDFIFHGSIYPKLKFWGKSVEAEPKGTITLELLEHNEAYTWTNPTCCVHNIIVGKLWIEQYGNVEIINHKTGDKCVLNFKPCGLFGKELHKVEGYIQDKSKKKLCALYGKWTECLYSVDPATFDAYKKNDKKNTEEKKNSKQMSTSEELDEMPVPDSESVFIIPGSVLLWRIAPRPPNSAQMYNFTSFAMVLNEVDKDMESVIPKTDCRLRPDIRAMENGEIDQASEEKKRLEEKQRAARKNRSKSEEDWKTRWFHQGPNPYNGAQDWIYSGSYWDRNYFNLPDIY

SEQ ID NO: 63172 - protein, 402 aa, Homo sapiens
IWSILRKCIGMELSKITMPVIFNEPLSFLQRLTEYMEHTYLIHKASSLSDPVERMQCVAAFAVSAVASQWERTGKPFNPLLGETYELVRDDLGFRLISEQVSHHPPISAFHAEGLNNDFIFHGSIYPKLKFWGKSVEAEPKGTITLELLEHNEAYTWTNPTCCVHNIIVGKLWIEQYGNVEIINHKTGDKCVLNFKPCGLFGKELHKVEGYIQDKSKKKLCALYGKWTECLYSVDPATFDAYKKNDKKNTEEKKNSKQMSTSEELDEMPVPDSESVFIIPGSVLLWRIAPRPPNSAQMYNFTSFAMVLNEVDKDMESVIPKTDCRLRPDIRAMENGEIDQASEEKKRLEEKQRAARKNRSKSEEDWKTRWFHQGPNPYNGAQDWIYSGSYWDRNYFNLPDIY

SEQ ID NO: 63173 - protein, 320 aa, Homo sapiens
MSKSESPKEPEQLRKLFIGGLSFETTDESLRSHFEQWGTLTDCVVMRDPNTKRSRGFGFVTYATVEEVDAAMNARPHKVDGRVVEPKRAVSREDSQRPGAHLTVKKIFVGGIKEDTEEHHLRDYFEQYGKIEVIEIMTDRGSGKKRGFAFVTFDDHDSVDKIVIQKYHTVNGHNCEVRKALSKQEMASASSSQRGRSGSGNFGGGRGGGFGGNDNFGHGGNFSGRGGFGGSRAGGRYGGSGDGSNGFGNDGSNFGGGGSYNDFGNYNNQSSNFGPMKGGNFGGRNSGPYGGGGQYFAKPRNQGGYGGSSSSSSCVSGRRF

SEQ ID NO: 63174 - protein, 242 aa, Homo sapiens
LEDLESELDDPGQPVSLRRRKREVLVEDMVSQEEAQGLPSSELDAVENQLKWASWELHSLRHCDDDGRTENGALAPKQELPSALESHEVPGTLNMGVPQIFKYGETCFPKGRFERKRNPSRKKQHICDECGKHFSQGSALILHQRIHSGEKPYGCVECGKAFSRSSILVQHQRVHTGEKPYKCLECGKAFSQNSGLINHQRIHTGEKPYECVQCGKSYSQSSNLFRHQRRHNAEKLLNVVKV

SEQ ID NO: 63175 - protein, 151 aa, Homo sapiens
KKKASASSFAQGISMEAMSENKMVPSEFSTGPVEKAAKPLPFKDPNFVHSGHGGAVAGKKNRTWKNLKQILASERALPWQLNDPNYFSIDAPPSFKPAKKYSDVSGLLANYTDPQSKLRFSTIEEFSYIRRLPSDVVTGYLALRKATSIVP

SEQ ID NO: 63176 - protein, 809 aa, Homo sapiens
RGSQPNETTACSRLVEISRRHQWARSEPSGPPVWNQTCARGRAVGQRGRGDEGAMARKLSVILILTFALSVTNPLHELKAAAFPQTTEKISPNWESGINVDLAISTRQYHLQQLFYRYGENNSLSVEGFRKLLQNIGIDKIKRIHIHHDHDHHSDHEHHSDHERHSDHEHHSEHEHHSDHDHHSHHNHAASGKNKRKALCPDHDSDSSGKDPRNSQGKGAHRPEHASGRRNVKDSVSASEVTSTVYNTVSEGTHFLETIETPRPGKLFPKDVSSSTPPSVTSKSRVSRLAGRKTNESVSEPRKGFMYSRNTNENPQECFNASKLLTSHGMGIQVPLNATEFNYLCPAIINQIDARSCLIHTSEKKAEIPPKTYSLQIAWVGGFIAISIISFLSLLGVILVPLMNRVFFKFLLSFLVALAVGTLSGDAFLHLLPHSHASHHHSHSHEEPAMEMKRGPLFSHLSSQNIEESAYFDSTWKGLTALGGLYFMFLVEHVLTLIKQFKDKKKKNQKKPENDDDVEIKKQLSKYESQLSTNEEKVDTDDRTEGYLRADSQEPSHFDSQQPAVLEEEEVMIAHAHPQEVYNEYVPRGCKNKCHSHFHDTLGQSDDLIHHHHDYHHILHHHHHQNHHPHSHSQRYSREELKDAGVATLAWMVIMGDGLHNFSDGLAIGAAFTEGLSSGLSTSVAVFCHELPHELGDFAVLLKAGMTVKQAVLYNALSAMLAYLGMATGIFIGHYAENVSMWIFALTAGLFMYVALVDMVPEMLHNDASDHGCSRWGYFFLQNAGMLLGFGIMLLISIFEHKIVFRINF

SEQ ID NO: 63177 - protein, 49 aa, Homo sapiens
INKDQNVFDSKKKVKLINAERVEFELSKKQLQAIEFNKALLATYTNQAN

SEQ ID NO: 63178 - protein, 38 aa, Homo sapiens
KEEYSFQSEEDQRNTKLYQQLSHYHPEILQFFYANKIL

SEQ ID NO: 63179 - protein, 361 aa, Homo sapiens
REGARGGGRGRGRWKQAGRGGGVCGRGRGRGRGRGRGRGRGRGRGRPPSGGSGLGGDGGGCGGGGSGGGGAPRREPVPFPSGSAGPGPRGPRATESGKRMDCPALPPGWKKEEVIRKSGLSAGKSDVYYFSPSGKKFRSKPQLARYLGNTVDLSSFDFRTGKMMPSKLQKNKQRLRNDPLNQNKGKPDLNTTLPIRQTASIFKQPVTKVTNHPSNKVKSDPQRMNEQPRQLFWEKRLQGLSASDVTEQIIKTMELPKGLQGVGPGSNDETLLSAVASALHTSSAPITGQVSAAVEKNPAVWLNTSQPLCKAFIVTDEDIRKQEERVQQVRKKLEEALMADILSRAADTEEMDIEMDSGDEA

SEQ ID NO: 63180 - protein, 293 aa, Homo sapiens
KEPVFEVTGMPENVDRAREEIEMHIAMRTGNYIELNEENDFHYNGTDVSFEGGTLGSAWLSSNPVPPSRARMISNYRNDSSSSLGSGSTDSYFGSNRLADFSPTSPFSTGNFWFGDTLPSVGSEDLAVDSPAFDSLPTSAQTIWTPFEPVNPLSGFGSDPSGNMKTQRRGSQPSTPRLSPTFPESIEHPLARRVRSDPPSTGNHVGLPIYIPAFSNGTNSYSSSNGGSTSSSPPESRRKHDCVICFENEVIAALVPCGHNLFCMECANKICEKRTPSCPVCQTAVTQAIQIHS

SEQ ID NO: 63181 - protein, 113 aa, Homo sapiens
KKEVTLPFLFTPFKLLSDSKQFNILRKARSYIKHRKFDEVVSLCKELIHLALKGLSYYHTYDRFFLGVNVVIGFVGWISYASLLIIKSHSNLIKGVSKEVKVRLENVRIQMMV

SEQ ID NO: 63182 - protein, 160 aa, Homo sapiens
MKRKDSFIKEELLVHLLQVLSTVLSMYVVYSTQSSLLRKQGLPLMNQIISWATLASSLVVPLLSSPVLFQRLFSILLSLMSTYLLLSTGYEALFPLVLSCLMFVWINIEQETLQQSGVCCKQKLTSIQFSYNTDITQFRQLYLDDIRRAFFLVSFVETLV

SEQ ID NO: 63183 - protein, 188 aa, Homo sapiens [sequence omitted]

SEQ ID NO: 63184 - protein, 7 aa, Homo sapiens
MQLKELL

SEQ ID NO: 63185 - protein, 317 aa, Homo sapiens
LAPFIAKRRTPKIQEQYRRIGGGSPIKIWTSKQGEGMVKLLDELSPNTAPHKYYIGFRYVHPLTEEAIEEMERDGLERAIAFTQYPQYSCSTTGSSLNAIYRYYNQVGRKPTMKWSTIDRWPTHHLLIQCFADHILKELDHFPLEKRSEVVILFSAHSLPMSVVNRGDPYPQEVSATVQKVMERLEYCNPYRLVWQSKVGPMPWLGPQTDESIKGLCERGRKNILLVPIAFTSDHIETLYELDIEYSQVLAKECGVENIRRAESLNGNPLFSKALADLVHSHIQSNELCSKQLTLSCPLCVNPVCRETKSFFTSQQL

SEQ ID NO: 63186 - protein, 195 aa, Homo sapiens
VANILRILFWFGRRFESPLLWQSAIMILTMLLMLKLCTEVRVANELNARRRSFTDFDPHHFWQWSSFSDYVQCVLAFTGVAGYITYLSIDSALFVETLGFLAVLTEAMLGVPQLYRNHRHQSTEGMSIKMVLMWTSGDAFKTAYFLLKGAPLQFSVCGLLQVLVDLAILGQAYAFARHPQKPAPHAVHPTGTKAL

SEQ ID NO: 63187 - protein, 65 aa, Homo sapiens
VLMWTSGDAFKTAYFLLKGAPLQFSVCGLLQVLVDLAILGQAYAFARHPQKPAPHAVHPTGTKAL

SEQ ID NO: 63188 - protein, 28 aa, Homo sapiens
LLLLLSPAPAAPTRRPTSSWCAEVMFAP

SEQ ID NO: 63189 - protein, 433 aa, Homo sapiens
KMAAPMEVAVCTDSAAPMWSCIVWELHSGANLLTYRGGQAGPRGLALLNGEYLLAAQLGKNYISAWELQRKDQLQQKIMCPGPVTCLTASPNGLYVLAGVAESIHLWEVSTGNLLVILSRHYQDVSCLQFTGDSSHFISGGKDCLVLVWSLCSVLQADPSRIPAPRHVWSHHALPITDLHCGFGGPLARVATSSLDQTVKLWEVSSGELLLSVLFDVSIMAVTMDLAEHHMFCGGSEGSIFQVDLFTWPGQRERSFHPEQDAGKVFKGHRNQVTCLSVSTDGSVLLSGSHDETVRLWDVQSKQCIRTVALKGPVTNAAILLAPVSMLSSDFRPSLPLPHFNKHLLGAEHGDEPRHGGLTLRLGLHQQGSEPSYLDRTEQLQAVLCSTMEKSVLGGQDQLRVRVTELEDEVRNLRKINRDLFDFSTRFITRPAK

SEQ ID NO: 63190 - protein, 95 aa, Homo sapiens
VPTLQVLRPGLVVVHAEDGTTSKYFVSSGSIAVNADSSVQLLAEEAVTLDMLDLGAAKANLEKAQAELVGTADEATRAEIQIRIEANEALVKALE

SEQ ID NO: 63191 - protein, 409 aa, Homo sapiens
LSQRLKVPKERLALLHKDTRLSSGKLQEFGVGDGSKLTLVPTVEAGLMSQASRPEQSVMQALESLTETQVSDFLSGRSPLTLALRVGDHMMFVQLQLAAQHAPLQHRHVLAAAAAAAAARGDPSIASPVSSPCRPVSSAARVPPVPTSPSPASPSPITAGSFRSHAASTTCPEQMDCSPTASSSASPGASTTSTPGASPAPRSRKPGAVIESFVNHAPGVFSGTFSGTLHPNCQDSSGRPRRDIGTILQILNDLLSATRHYQGMPPSLAQLRCHAQCSPASPAPDLAPRTTSCEKLTAAPSASLLQGQSQIRMCKPPGDRLRQTENRATRCKVERLQLLLQQKRLRRKARRDARGPYHWSPSRKAGRSDSSSSGGGGSPSEASGLGLDFEDSVWKPEVNPDIKSEFVVA

SEQ ID NO: 63192 - protein, 189 aa, Homo sapiens
VRCLPACVRDLPDSVAAMASDEGKLFVGGLSFDTNEQSLEQVFSKYGQISEVVVVKDRETQRSRGFGFVTFENIDDAKDAMMAMNGKSVDGRQIRVDQAGKSSDNRSRGYRGGSAGGRGFFRGGRGRGRGFSRGGGDRGYGGNRFESRSGGYGGSRDYYSSRSQSGGYSDRSSGGSYRDSYDSYATHNE

SEQ ID NO: 63193 - protein, 382 aa, Homo sapiens
LRSYFSQYGEVVDCVIMKDKTTNQSRGFGFVKFKDPNCVGTVLASRPHTLDGRNIDPKPCTPRGMQPERTRPKEGWQKGPRSDNSKSNKIFVGGIPHNCGETELREYFKKFGVVTEVVMIYDAEKQRPRGFGFITFEDEQSVDQAVNMHFHDIMGKKVEVKRAEPRDSKSQAPGQPGASQWGSRVVPNAANGWAGQPPPTWQQGYGPQGMWVPAGQAIGGYGPPPAGRGAPPPPPPFTSYIVSTPPGGFPPPQGFPQGYGAPPQFSFGYGPPPPPPDQFAPPGVPPPPATPGAAPLAFPPPPSQAAPDMSKPPTAQPDFPYGQYAGYGQDLSGFGQGFSDPSQQPPSYGGPSVPGSGGPPAGGSGFGRGQNHNVQGFHPYRR

SEQ ID NO: 63194 - protein, 45 aa, Homo sapiens
VKTKAPAPDEGSDLFYDDYYEDGEVEEEADSCFGDDEDDSGTEES

SEQ ID NO: 63195 - protein, 346 aa, Homo sapiens
LQHLKSKALRERWLLEGTPSSASEGDEDLRRQMQDDEQKTRLLEDSVSRLEKEIEVLERGDSAPATAKENAAAPSPVRAPAPSPAKEERKTEVVMNSQQTPVGTPKDKRVSNTPLRTVDGSPMMKAAMYSVEITVEKDKVTGETRVLSSTTLLPRQPLPLGIKVYEDETKVVHAVDGTAENGIHPLSSSEVDELIHKADEVTLSEAGSTAGAAETRGAVEGAARTTPSRREITGVQAQPGEATSGPPGIQPGQEPPVTMIFMGYQNVEDEAETKKVLGLQDTITAELVVIEDAAEPKEPAPPNGSAAEPPTEAASREENQAGPEATTSDPQDLDMKKHRCKCCSIM

SEQ ID NO: 63196 - protein, 591 aa, Homo sapiens
LCAMDGIVPDIAVGTKRGSDELFSTCVTNGPFIMSSNSASAANGNDSKKFKGDSRSAGVPSRVIHIRKLPIDVTEGEVISLGLPFGKVTNLLMLKGKNQAFIEMNTEEAANTMVNYYTSVTPVLRGQPIYIQFSNHKELKTDSSPNQAVRGPAADPSSPGTSGVGPAAGAGDSRLCLPQRAQAALQAVNSVQSGNLALAASAAAVDAGMAMAGQSPVLRIIVENLFYPVTLDVLHQIFSKFGTVLKIITFTKNNQFQALLQYADPVSAQHAKLSLDGQNIYNACCTLRIDFSKLTSLNVKYNNDKSRDYTRPDLPSGDSQPSLDQTMAAAFGAPGIISASPYAGAGFPPTFAIPQAAGLSVPNVHGALAPLAIPSAAAAAAAAGRIAIPGLAGAGNSVLLVSNLNPERVTPQSLFILFGVYGDVQRVKILFNKKENALVQMADGNQAQLAMSHLNGHKLHGKPIRITLSKHQNVQLPREGQEDQGLTKDYGNSPLHRFKKPGSKNFQNIFPPSATLHLSNIPPSVSEEDLKVLFSSNGGVVKGFKFFQKDRKMALIQMGSVEEAVQALIDLHNHDLGENHHLRVSFSKSTI

SEQ ID NO: 63197 - protein, 193 aa, Homo sapiens
VLSAAHCLEDAADGKVQVLLGAHSLSQPEPSKRLYDVLRAVPHPDSQPDTIDHDLLLLQLSEKATLGPAVRPLPWQRVDRDVAPGTLCDVAGWGIVNHAGRRPDSLQHVLLPVLDRATCNRRTHHDGAITERLMCAESNRRDSCKGDSGGPLVCGGVLEGVVTSGSRVCGNRKKPGIYTRVASYAAWIDSVLA

SEQ ID NO: 63198 - protein, 140 aa, Homo sapiens
IEVLCENFPEEMATYLRYVRRLDFFEKPDYDYLRKLFTDLFDRSGFVFDYEYDWAGKPLPTPIGTVHTDLPSQPQLRDKTQPHSKNQALNSTNGELNADDPTAGHSNAPITAPAEVEVADETKCCCFFKRRKRKSLQRHK

SEQ ID NO: 63199 - protein, 255 aa, Homo sapiens
LQLRNWTASLLCSAADLPARGFSNQIPLVARGNCTFYEKVRLAQGSGARGLLIVSRERLVPPGGNKTQYDEIGIPVALLSYKDMLDIFTRFGRTVRAALYAPKEPVLDYNMVIIFIMAVGTVAIGGYWAGSRDVKKRYMKHKRDDGPEKQEDEAVDVTPVMTCVFVVMCCSMLVLLYYFYDLLVYVVIGIFCLASATGLYSCLAPCVRRLPFGKCRIPNNSLPYFHKRPQARMLLLALFCVAVSVVWGVFRNEDQ

SEQ ID NO: 63200 - protein, 65 aa, Homo sapiens
VACTIAYGVGLLVTFVALALMQRGQPALLYLVPCTLVTSCAVALWRRELGVFWTGSGFAVNTSLL

SEQ ID NO: 63201 - protein, 64 aa, Homo sapiens
TPLSPQPPSEEPATSPWPAEQSPKSRTSEEMGAGAPMREPGSPAESEGRDQAQPSPVTQPGASA

SEQ ID NO: 63202 - protein, 36 aa, Homo sapiens
IVTGAGDETLRFWNVFSKTRSTKESVSVLNLFTRIR

SEQ ID NO: 63203 - protein, 262 aa, Homo sapiens
RYPALGPRLAAHFPAQRPPQRTLQNGLALQRCLHATATRALPLIPIVVEQTGRGERAYDIYSRLLRERIVCVMGPIDDSVASLVIAQLLFLQSESNKKPIHMYINSPGGVVTAGLAIYDTMQYILNPICTWCVGQAASMGSLLLAAGTPGMRHSLPNSRIMIHQPSGGARGQATDIAIQAEEIMKLKKQLYNIYAKHTKQSLQVIESAMERDRYMSPMEAQEFGILDKVLVHPPQDGEDEPTLVQKEPVEAAPAAEPVPAST

SEQ ID NO: 63204 - protein, 222 aa, Homo sapiens
IMAGTGLLALRTLPGPSWVRGSGPSVLSRLQDAAVVRPGFLSTAEEETLSRELEPELRRRRYEYDHWDAAIHGFRETEKSRWSEASRAILQRVQAAAFGPGQTLLSSVHVLDLEARGYIKPHVDSIKFCGATIAGLSLLSPSVMRLVHTQEPGEWLELLLEPGSLYILRGSARYDFSHEILRDEESFFGERRIPRGRRISVICRSLPEGMGPGESGQPPPAC

SEQ ID NO: 63205 - protein, 26 aa, Homo sapiens
LDLLDRYVKFVKERTEVEQAYAKQLR

SEQ ID NO: 63206 - protein, 552 aa, Homo sapiens
VKKYLPKRPAKDDPESKFSQQQSFVQILQEVNDFAGQRELVAENLSVRVCLELTKYSQEMKQERKMHFQEGRRAQQQLENGFKQLENSKRKFERDCREAEKAAQTAERLDQDINATKADVEKAKQQAHLRSHMAEESKNEYAAQLQRFNRDQAHFYFSQMPQIFDKLQDMDERRATRLGAGYGLLSEAELEVVPIIAKCLEGMKVAANAVDPKNDSHVLIELHKSGFARPGDVEFEDFSQPMNRAPSDSSLGTPSDGRPELRGPGRSRTKRWPFGKKNKPRPPPLSPLGGPVPSALPNGPPSPRSGRDPLAILSEISKSVKPRLASFRSLRGSRGTVVTEDFSHLPPEQQRKRLQQQLEERSRELQKEVDQREALKKMKDVYEKTPQMGDPASLEPQIAETLSNIERLKLEVQKYEAWLAEAESRVLSNRGDSLSRHARPPDPPASAPPDSSSNSASQDTKESSEEPPSEESQDTPIYTEFDEDFEEEPTSPIGHCVAIYHFEGSSEGTISMAEGEDLSLMEEDKGDGWTRVRRKEGGEGYVPTSYLRVTLN

SEQ ID NO: 63207 - protein, 92 aa, Homo sapiens
IRPRSASPRMSSTRSSRPCCLTSAPSPTPGSTCRRGSASTSRSTRSGCRRTRSVRSRTSCWARSPRSSRSGRRGCWPSCARTSGPSAARTSC

SEQ ID NO: 63208 - protein, 423 aa, Homo sapiens
IEALLPHVRAFAYTWFNLQARKRKYFKKHEKRMSKDEERAVKDELLGEKPEVKQKWASRLLAKLRKDIRPECREDFVLSITGKKAPGCVLSNPDQKGKMRRIDCLRQADKVWRLDLVMVILFKGIPLESTDGERLVKAAQCGHPVLCVQPHHIGVAVKELDLYLAYFVRERDAEQSGSPRTGMGSDQEDSKPITLDTTDFQESFVTSGVFSVTELIQVSRTPVVTGTGPNFSLGELQGHLAYDLNPASTGLRRTLPSTSSSGSKRHKSGSMEEDVDTSPGGDYYTSPSSPTSSSRNWTEDMEGGISSPVKKTEMDKSPFNSPSPQDSPRLSSFTQHHRPVIAVHSGIARSPHPSSALHFPTTSILPQTASTYFPHTAIRYPPHLNPQDPLKDLVSLACDPASQQPGPPTLRPTRPLQTVPLWD

SEQ ID NO: 63209 - protein, 79 aa, Homo sapiens
LPLTEANLRMFQRAQDDLIPAVDRQFACSSCDHVWWRRVPQRKEVSRCRKCRKRYEPVPADKMWGLAEFHCPKCRHNFR

SEQ ID NO: 63210 - protein, 16 aa, Homo sapiens
VLRRVLEAGVKIGSGG

SEQ ID NO: 63211 - protein, 220 aa, Homo sapiens
RLDILHQVAMWQKNFKRISYAKTKTRAEVRGGGRKPWPQKGTGRARHGSIRSPLWRGGGVAHGPRGPTSYYYMLPMKVRALGLKVALTVKLAQDDLHIMDSLELPTGDPQYLTELAHYRRWGDSVLLVDLTHEEMPQSIVEATSRLKTFNLIPAVGLNVHSMLKHQTLVLTLPTVAFLEDKLLWQDSRYRPLYPFSLPYSDFPRPLPHATQGPAATPYHC

SEQ ID NO: 63212 - protein, 24 aa, Homo sapiens
IKKYRLQQAQKGTPMKPNTQATPP

SEQ ID NO: 63213 - protein, 7 aa, Homo sapiens
TGGMNWE

SEQ ID NO: 63214 - protein, 5 aa, Homo sapiens
MGLRP

SEQ ID NO: 63215 - protein, 606 aa, Homo sapiens [sequence omitted]

SEQ ID NO: 63216 - protein, 122 aa, Homo sapiens
MYVTLVFRVKGSRLVKPSLCLALLCPAFLVGVVRVAEYRNHWSDVLAGFLTGAAIATFLVTCVVHNFQSRPPSGRRLSPWEDLGQAPTMDSPLEKNPRSAGRIRHRHGSPHPSRRTAPAVAT

SEQ ID NO: 63217 - protein, 32 aa, Homo sapiens
LRKICNHPYMFQHIEVSPPRLGRLRPCCLLSS

SEQ ID NO: 63218 - protein, 225 aa, Homo sapiens
MYTMYSMMNVGQTAEKVEALPEQVAPESRNRIRVRQDLASLPAELINQIGNRCHPKLYDEGDPSEKLELVTGTNVYITRAQLMNCHVSAGTRHKVLLRRLLASFFDRNTLANSCGTGIRSSTNDPRRKPLDSRVLHAVKYYCQNFAPNFKESEMNAIAADMCTNARRVVRKSWMPKVKVLKAEDDAYTTFISETGKIEPDMMGVEHGFETASHEGEAGPSAEALQ

SEQ ID NO: 63219 - protein, 56 aa, Homo sapiens
VQQQKLKKNLEVGIRKKIEHDVVMKASSSLPKKLALLKAPAKKKGAAAATSSKTPS

SEQ ID NO: 63220 - protein, 693 aa, Homo sapiens
TPQKYDPTFKGPIYNRGCTDIICCVFLLLAIVGYVAVGIIAWTHGDPRKVIYPTDSRGEFCGQKGTKNENKPYLFYFNIVKCASPLVLLEFQCPTPQICVEKCPDRYLTYLNARSSRDFEYYKQFCVPGFKNNKGVAEVLQDGDCPAVLIPSKPLARRCFPAIHAYKGVLMVGNETTYEDGHGSRKNITDLVEGAKKANGVLEARQLAMRIFEDYTVSWYWIIIGLVIAMAMSLLFIILLRFLAGIMVWVMIIMVILVLGYGIFHCYMEYSRLRGEAGSDVSLVDLGFQTDFRVYLHLRQTWLAFMIILSILEVIIILLLIFLRKRILIAIALIKEASRAVGYVMCSLLYPLVTFFLLCLCIAYWASTAVFLSTSNEAVYKIFDDSPCPFTAKTCNPETFPSSNESRQCPNARCQFAFYGGESGYHRALLGLQIFNAFMFFWLANFVLALGQVTLAGAFASYYWALRKPDDLPAFPLFSAFGRALRYHTGSLAFGALILAIVQIIRVILEYLDQRLKAAENKFAKCLMTCLKCCFWCLEKFIKFLNRNAYIMIAIYGTNFCTSARNAFFLLMRNIIRVAVLDKVTDFLFLLGKLLIVGSVGILAFFFFTHRIRIVQDTAPPLNYYWVPILTVIVGSYLIAHGFFSVYGMCVDTLFLCFLEDLERNDGSAERPYFMSSTLKKLLNKTNKKAAES

SEQ ID NO: 63221 - protein, 876 aa, Homo sapiens
RALGPGAAGAMGNRGMEELIPLVNKLQDAFSSIGQSCHLDLPQIAVVGGQSAGKSSVLENFVGRDFLPRGSGIVTRRPLILQLIFSKTEHAEFLHCKSKKFTDFDEVRQEIEAETDRVTGTNKGISPVPINLRVYSPHVLNLTLIDLPGITKVPVGDQPPDIEYQIKDMILQFISRESSLILAVTPANMDLANSDALKLAKEVDPQGLRTIGVITKLDLMDEGTDARDVLENKLLPLRRGYIGVVNRSQKDIEGKKDIRAALAAERKFFLSHPAYRHMADRMGTPHLQKTLNQQLTNHIRESLPALRSKLQSQLLSLEKEVEEYKNFRPDDPTRKTKALLQMVQQFGVDFEKRIEGSGDQVDTLELSGGARINRIFHERFPFELVKMEFDEKDLRREISYAIKNIHGVRTGLFTPDLAFEAIVKKQVVKLKEPCLKCVDLVIQELINTVRQCTSKLSSYPRLREETERIVTTYIREREGRTKDQILLLIDIEQSYINTNHEDFIGFANAQQRSTQLNKKRAIPNQVIRRGWLTINNISLMKGGSKEYWFVLTAESLSWYKDEEEKEKKYMLPLDNLKIRDVEKGFMSNKHVFAIFNTEQRNVYKDLRQIELACDSQEDVDSWKASFLRAGVYPEKDQAENEDGAQENTFSMDPQLERQVETIRNLVDSYVAIINKSIRDLMPKTIMHLMINNTKAFIHHELLAYLYSSADQSSLMEESADQAQRRDDMLRMYHALKEALNIIGDISTSTVSTPVPPPVDDTWLQSASSHSPTPQRRPVSSIHPPGRPPAVRGPTPGPPLIPVPVGAAASFSAPPIPSRPGPQSVFANSDLFPAPPQIPSRPVRIPPGIPPGVPSRRPPAAPSRPTIIRPAEPSLLD

SEQ ID NO: 63222 - protein, 502 aa, Homo sapiens
VSRETECSRVGKQSFIITLGCNSVLIQFATPNDFCSFYNILKTCRGHTLERSVFSERTEESSAVQYFQFYGYLSQQQNMMQDYVRTGTYQRAILQNHTDFKDKIVLDVGCGSGILSFFAAQAGARKIYAVEASTMAQHAEVLVKSNNLTDRIVVIPGKVEEVSLPEQVDIIISEPMGYMLFNERMLESYLHAKKYLKPSGNMFPTIGDVHLAPFTDEQLYMEQFTKANFWYQPSFHGVDLSALRGAAVDEYFRQPVVDTFDIRILMAKSVKYTVNFLEAKEGDLHRIEIPFKFHMLHSGLVHGLAFWFDVAFIGSIMTVWLSTAPTEPLTHWYQVRCLFQSPLFAKAGDTLSGTCLLIANKRQSYDISIVAQVDQTGSKSSNLLDLKNPFFRYTGTTPSPPPGSHYTSPSENMWNTGSTYNLSSGMAVAGMPTAYDLSSVIASGSSVGHNNLIPLGSSGAQGSGGGSTSAHYAVNSQFTMGGPAISMASPMSIPTNTMHYGS

SEQ ID NO: 63223 - protein, 812 aa, Homo sapiens
RGCARWCPQNSSCVNATACRCNPGFSSFSEIITTPTETCDDINECATPSKVSCGKFSDCWNTEGSYDCVCSPGYEPVSGAKTFKNESENTCQDVDECQQNPRLCKSYGTCVNTLGSYTCQCLPGFKFIPEDPKVCTDVNECTSGQNPCHSSTHCLNNVGSYQCRCRPGWQPIPGSPNGPNNTVCEDVDECSSGQHQCDSSTVCFNTVGSYSCRCRPGWKPRHGIPNNQKDTVCEDMTFSTWTPPPGVHSQTLSRFFDKVQDLGRDSKTSSAEVTIQNVIKLVDELMEAPGDVEALAPPVRHLIATQLLSNLEDIMRILAKSLPKGPFTYISPSNTELTLMIQERGDKNVTMGQSSARMKLNWAVAAGAEDPGPAVAGILSIQNMTTLLANASLNLHSKKQAELEEIYESSIRGVQLRRLSAVNSIFLSHNNTKELNSPILFAFSHLESSDGEAGRDPPAKDVMPGPRQELLCAFWKSDSDRGGHWATEGCQVLGSKNGSTTCQCSHLSSFAILMAHYDVEDWKLTLITRVGLALSLFCLLLCILTFLLVRPIQGSRTTIHLHLCICLFVGSTIFLAGIENEGGQVGLRCRLVAGLLHYCFLAAFCWMSLEGLELYFLVVRVFQGQGLSTRWLCLIGYGVPLLIVGVSAAIYSKGYGRPRYCWLDFEQGFLWSFLGPVTFIILCNAVIFVTTVWKLTQKFSEINPDMKKLKKARALTITAIAQLFLLGCTWVFGLFIFDDRSLVLTYVFTILNCLQGAFLYLLHCLLNKKVREEYRKWACLVAGGSKYSEFTSTTSGTGHNQTRALRASESGI

SEQ ID NO: 63224 - protein, 446 aa, Homo sapiens
KDRKLLLTAQQMLQDSKTKIDIIRMQLRRALQAGQLENQAAPDDTQGSPDLGAVELRIEELRHHFRVEHAVAEGAKNVLRLLSAAKAPDRKAVSEAQEKLTESNQKLGLLREALERRLGELPADHPKGRLLREELAAASSAAFSTRLAGPFPATHYSTLCKPAPLTGTLEVRVVGCRDLPETIPWNPTPSMGGPGTPDSRPPFLSRPARGLYSRSGSLSGRSSLKAEAENTSEVSTVLKLDNTVVGQTSWKPCGPNAWDQSFTLELERARELELAVFWRDQRGLCALKFLKLEDFLDNERHEVQLDMEPQGCLVAEVTFRNPVIERIPRLRRQKKIFSKQQGKAFQRARQMNIDVATWVRLLRRLIPNATGTGTFSPGASPGSEARTTGDISVEKLNLGTDSDSSPQKSSRDPPSSPSSLSSPIQESTAPELPSETQETPGPALCR

SEQ ID NO: 63225 - protein, 639 aa, Homo sapiens
LAGPFPATHYSTLCKPAPLTGTLEVRVVGCRDLPETIPWNPTPSMGGPGTPDSRPPFLSRPARGLYSRSGSLSGRSSLKAEAENTSEVSTVLKLDNTVVGQTSWKPCGPNAWDQSFTLELERARELELAVFWRDQRGLCALKFLKLEDFLDNERHEVQLDMEPQGCLVAEVTFRNPVIERIPRLRRQKKIFSKQQGKAFQRARQMNIDVATWVRLLRRLIPNATGTGTFSPGASPGSEARTTGDISVEKLNLGTDSDSSPQKSSRDPPSSPSSLSSPIQESTAPELPSETQETPGPALCSPLRKSPLTLEDFKFLAVLGRGHFGKVLLSEFRPSGELFAIKALKKGDIVARDEVESLMCEKRILAAVTSAGHPFLVNLFGCFQTPEHVCFVMEYSAGGDLMLHIHSDVFSEPRAIFYSACVVLGLQFLHEHKIVYRDLKLDNLLLDTEGYVKIADFGLCKEGMGYGDRTSTFCGTPEFLAPEVLTDTSYTRAVDWWGLGVLLYEMLVGESPFPGDDEEEVFDSIVNDEVRYPRFLSAEAIGIMRRLLRRNPERRLGSSERDAEDVKKQPFFRTLGWEALLARRLPPPFVPTLSGRTDVSNFDEEFTGEAPTLSPPRDARPLTAAEQAAFLDFDFVAGGC

SEQ ID NO: 63226 - protein, 12 aa, Homo sapiens
MILFIRIMPKLK

SEQ ID NO: 63227 - protein, 242 aa, Homo sapiens
RVNCPEKVIICLDLSEEMSLPKLESFNGSKTNALNVSQKMIEMFVRTKHKIDKSHEFALVVVNDDTAWLSGLTSDPRELCSCLYDLETASCSTFNLEGLFSLIQQKTELPVTENVQTIPPPYVVRTILVYSRPPCQPQFSLTEPMKKMFQCPYFFFDVVYIHNGTEEKEEEMSWKDMFAFMGSLDTKGTSYKYEVALAGPALELHNCMAKLLAHPLQRPCQSHASYSLLEEEDEAIEVEATV

SEQ ID NO: 63228 - protein, 35 aa, Homo sapiens
IKRKNKHGWVRRLSTPAGVQVILRRMLKGRKSLSH

SEQ ID NO: 63229 - protein, 137 aa, Homo sapiens
VPWLEVTVRRRLRRRLWWRRWRLRRRPRRRRRKQKMADFLKGLPVYNKSNFSRFHADSVCKASNRRPSVYLPTREYPSEQIIVTEKTNILLRYLHQQWDKKNAAKKRDQEQVELEGESSAPPRKVARTDSPDMHEDT

SEQ ID NO: 63230 - protein, 243 aa, Homo sapiens
ISCTVEGAPASFGKSFAQKSGYFLCLSSLGSLENPQENVVADIQIVVDKSPLPLGFSPVCDPMDSKASVSKKKRMCVKLLPLGATDTAVFDVRLSGKTKTVPGYLRIGDMGGFAIWCKKAKAPRPVPKPRGLSRDMQGLSLDAASQPSKGGLLERTASRLGSRASTLRRNDSIYEASSLYGISAMDGVPFTLHPRFEGKSCSPLAFSAFGDLTIKSLADIEEEYNYGFVVEKTAAARLPPSVS

SEQ ID NO: 63231 - protein, 43 aa, Homo sapiens
LQREGFDPRQTSDRLFFLDLKQGHYLPLNEAVYTRICSGAFAL

SEQ ID NO: 63232 - protein, 22 aa, Homo sapiens
IKTMEAISEVLQDLRFDAESAE

SEQ ID NO: 63233 - protein, 14 aa, Homo sapiens
IEQSNSYWRETLQM

SEQ ID NO: 63234 - protein, 470 aa, Homo sapiens
VEQCRQLGLKQPTPVQLGCIPAILEGRDCLGCAKTGSGKTAAFVLPILQKLSEDPYGIFCLVLTPTRELAYQIAEQFRVLGKPLGLKDCIIVGGMDMVAQALELSRKPHVVIATPGRLADHLRSSNTFSIKKIRFLVMDEADRLLEQGCTDFTVDLEAILAAVPARRQTLLFSATLTDTLRELQGLATNQPFFWEAQAPVSTVEQLDQRYLLVPEKVKDAYLVHLIQRFQDEHEDWSIIIFTNTCKTCQILCMMLRKFSFPTVALHSMMKQKERFAALAKFKSSIYRILIATDVASRGLDIPTVQVVINHNTPGLPKIYIHRVGRTARAGRQGQAITLVTQYDIHLVHAIEEQIKKKLEEFSVEEAEVLQILTQVNVVRRECEIKLEAAHFDEKKEINKRKQLILEGKDPDLEAKRKAELAKIKQKNRRFKEKVEETLKRQKAGRAGHKGRPPRTPSGSHSGPVPSQGLV

SEQ ID NO: 63235 - protein, 118 aa, Homo sapiens
LLEWGADPHILAKERESALSLASTGGYTDIVGLLLERDVDINIYDWNGGTPLLYAVRGNHVKCVEALLARGADLTTEADSGYTPMDLAVALGYRKVQQVIENHILKLFQSNLVPADPE

SEQ ID NO: 63236 - protein, 219 aa, Homo sapiens [sequence omitted]

SEQ ID NO: 63237 - protein, 137 aa, Homo sapiens
VLKQVIKPRRKLAFRSGEARDWSNGAVLQASSQLSRGSATTPRGVLHTFSPSPKLQNSASATALVSRTGRHSERTVSAGKGSATSNWKKTPLSTGGTLAFVSPSLAVHKSSSAVDRQREYLLDMIPPRSIPQSATWK

SEQ ID NO: 63238 - protein, 282 aa, Homo sapiens
LETMVDHLANTEINSQRIAAVESCFGASGQPLALPGRVLLGEGVLTKECRKKAKPRIFFLFNDILVYGSIVLNKRKYRSQHIIPLEEVTLELLPETLQAKNRWMIKTAKKSFVVSAASATERQEWISHIEECVRRQLRATGRPPSTEHAAPWIPDKATDICMRCTQTRFSALTRRHHCRKCGFVVCAECSRQRFLLPRLSPKPVRVCSLCYRELAAQQRQEEAEEQGAGSPGQPAHLARPICGASSGDDDDSDEDKEGSRDGDWPSSVEFYASGVAWSAFHS

SEQ ID NO: 63239 - protein, 468 aa, Homo sapiens
LPDKLSYNIMVPFGPFAFMPGKLVHTNEVTVLLGDNWFAKCSAKQAVGLVEHRKEHVRKTIDDLKKVMKNFESRVEFTEDLQKMSDAAGDIVDIREEIKCDFEFKAKHRIAHKPHSKPKTSDIFEADIANDVKSKDLLADKELWARLEELERQEELLGELDSKPDTVIANGEDTTSSEEEKEDRNTNVNAMHQVTDSHTPCHKDVASSEPFSGQVNSQLNCSVNGSSSYHSDDDDDDDDDDDDDNIDDDDGDNDHEALGVGDNSIPTIYFSHTVEPKRVRINTGKNTTLKFSEKKEEAKRKRKNSTGSGHSAQELPTIRTPADIYRAFVDVVNGEYVPRKSILKSRSRENSVCSDTSESSAAEFDDRRGVLRSISCEEATCSDTSESILEEEPQENQKKLLPLSVTPEAFSGTVIEKEFVSPSLTPPPAIAHPALPTIPERKEVLLEASEETGKRVSKFKAARLQQKD

SEQ ID NO: 63240 - protein, 169 aa, Homo sapiens
IDHPALISTCSVLARESAQMSKISQQNSTPGVNGISVIHTQAHASGLQQVPQLVPAGPGGGGKAVAPSKQSKKSSPMDRNSDEYRQRRERNNMAVKKSRLKSKQKAQDTLQRVNQLKEENERLEAKIKLLTKELSVLKDLFLEHAHNLADNVQSISTENTTADGDNAGQ

SEQ ID NO: 63241 - protein, 51 aa, Homo sapiens
LERLFQRGFSVAASCGGGVDSSQFSEYVLCREERRPQPTPTAVRIKQEPLD

SEQ ID NO: 63242 - protein, 732 aa, Homo sapiens
VARRSDLENNACKSDIMMSIRQRREIRATEVSEDFPAQEENVKLENKLPSGCTSRRLWKILSLTIGGTIALCIGLLTSVYLATLHENDLWFSNIKEVEREISFRTECGLYYSYYKQMLQAPTLVQGFHGLIYDNKTESMKTINLLQRMNIYQEVFLSILYRVLPIQKYLEPVYFYIYTLFGLQAIYVTALYITSWLLSGTWLSGLLAAFWYVTNRIDTTRVEFTIPLRENWALPFFAIQIAAITYFLRPNLQPLSERLTLLAIFISTFLFSLTWQFNQFMMLMQALVLFTLDSLDMLPAVKATWLYGIQITSLLLVCILQFFNSMILGSLLISFNLSVFIARKLQKNLKTGSFLNRLGKLLLHLFMVLCLTLFLNNIIKKILNLKSDEHIFKFLKAKFGLGATRDFDANLYLCEEAFGLLPFNTFGRLSDTLLFYAYIFVLSITVIVAFVVAFHNLSDSTNQQSVGKMEKGTVDLKPETAYNLIHTILFGFLALSTMRMKYLWTSHMCVFASFGLCSPEIWELLLKSVHLYNPKRICIMRYSVPILILLYLCYKFWPGMMDELSELREFYDPDTVELMNWINSNTPRKAVFAGSMQLLAGVKLCTGRTLTNHPHYEDSSLRERTRAVYQIYAKRAPEEVHALLRSFGTDYVILEDSICYERRHRRGCRLRDLLDIANGHMMDGPGENDPDLKPADHPRFCEEIKRNLPPYVAYFTRVFQNKTFHVYKLSRNK

SEQ ID NO: 63243 - protein, 7 aa, Homo sapiens
MHVSLTS

SEQ ID NO: 63244 - protein, 83 aa, Homo sapiens
ILAQVLDQSARARLSNLALVKPEKTKAVENYLIQMARYGQLSEKVSEQGLIEILKKVSQQTEKTTTVKFNRRKVMDSDEDDDY

SEQ ID NO: 63245 - protein, 57 aa, Homo sapiens
LENLMSTEKKTEEIMKEGKQFHRIVTYHRHLYDIHVTVQPKYKHVYPKNSVVRKSHL

SEQ ID NO: 63246 - protein, 26 aa, Homo sapiens
LKNENALLRAQLQQHNLEMVGEGTRQ

SEQ ID NO: 63247 - protein, 99 aa, Homo sapiens
LQVESGVPLGFSTMAEDMETKIKNYKTAPFDSRFPNQNQTRNCWQNYLDFHRCQKAMTAKGGDISVCEWYQRVYQSLCPTSWVTDWDEQRAEGTFPGKI

SEQ ID NO: 63248 - protein, 150 aa, Homo sapiens
IKLFDRSVDLAQFSENTPLYPICRAWMRNSPSVRERECSPSSPLPPLPEDEEGSEVTNSKSRDVYKLPPPTPPGPPGDACRSRIPSPLQPEMQGTPDDEPSEPEPSPSTLIYRNMQRWKRIRQRWKEASHRNQLRYSESMKILREMYERQ

SEQ ID NO: 63249 - protein, 207 aa, Homo sapiens
KCKLELLVGSPASCMELELYGVDDKFYSKLDQEDALLGSYPVDDGCRIHVIDHSGARLGEYEDVSRVEKYTISQEAYDQRQDTVRSFLKRSKLGRYNEEERAQQEAEAAQRLAEEKAQASSIPVGSRCEVRAAGQSPRRGTVMYVGLTDFKPGYWIGVRYDEPLGKNDGSVNGKRYFECQAKYGAFVKPAVVTVGDFPEEDYGLDEI

SEQ ID NO: 63250 - protein, 210 aa, Homo sapiens
MRILGGVISAISEAAAQYNPEPPPPRTHYSNIEANESEEVRQFRRLFAQLAGDDMEVSATELMNILNKVVTRHPDLKTDGFGIDTCRSMVAVMDSDTTGKLGFEEFKYLWNNIKRWQAIYKQFDTDRSGTICSSELPGAFEAAGFHLNEHLYNMIIRRYSDESGNMDFDNFISCLVRLDAMFRAFKSLDKDGTGQIQVNIQEWLQLTMYS

SEQ ID NO: 63251 - protein, 444 aa, Homo sapiens
IRYEGILYTIDTENSTVALAKVRSFGTEDRPTDRPIPPRDEVFEYIIFRGSDIKDLTVCEPPKPQCSLPQDPAIVQSSLGSSTSSFQSMGSYGPFGRMPTYSQFSPSSLVGQQFGAVGVAGSSLTSFGTETSNSGTLPQSSAVGSAFTQDTRSLKTQLSQGRSSPQLDPLRKSPTMEQAVQTASAHLPAPAAVGRRSPVSTRPLPSASQKAGENQEHRRAEVHKVSRPENEQLRNDNKRQVAPGAPSAPRRGRGGHRGGRGRFGIRRDGPMKFEKDFDFESANAQFNKEEIDREFHNKLKLKEDKLEKQEKPVNGEDKGDSGVDTQNSEGNADEEDPLGPNCYYDKTKSFFDNISCDDNRERRPTWAEERRLNAETFGIPLRPNRGRGGYRGRGGLGFRGGRGRGGGRGGTFTAPRGFRGGFRGGRGGREFADFEYRKTTAFGP

SEQ ID NO: 63252 - protein, 439 aa, Homo sapiens
ILYTIDTENSTVALAKVRSFGTEDRPTDRPIPPRDEVFEYIIFRGSDIKDLTVCEPPKPQCSLPQDPAIVQSSLGSSTSSFQSMGSYGPFGRMPTYSQFSPSSLVGQQFGAVGVAGSSLTSFGTETSNSGTLPQSSAVGSAFTQDTRSLKTQLSQGRSSPQLDPLRKSPTMEQAVQTASAHLPAPAAVGRRSPVSTRPLPSASQKAGENQEHRRAEVHKVSRPENEQLRNDNKRQVAPGAPSAPRRGRGGHRGGRGRFGIRRDGPMKFEKDFDFESANAQFNKEEIDREFHNKLKLKEDKLEKQEKPVNGEDKGDSGVDTQNSEGNADEEDPLGPNCYYDKTKSFFDNISCDDNRERRPTWAEERRLNAETFGIPLRPNRGRGGYRGRGGLGFRGGRGRGGGRGGTFTAPRGFRGGFRGGRGGREFADFEYRKDNKVAA

SEQ ID NO: 63253 - protein, 32 aa, Homo sapiens
RKPLPQQTKGMEEETYNKRHLKKKEKLVFRKH

SEQ ID NO: 63254 - protein, 137 aa, Homo sapiens
IRNSKKMQSWYSMLSPTYKQRNEDFRKLFSKLPEAERLIVDYSCALQREILLQGRLYLSENWICFYSNIFRWETTISIQLKEVTCLKKEKTAKLIPNAIQICTESEKVTEDPVTGPRGPPLSRPPPPNMQSPICSAP

SEQ ID NO: 63255 - protein, 33 aa, Homo sapiens
LDEMKFSLEKLHQGITVSDPPFDTQPRPDDSFS

SEQ ID NO: 63256 - protein, 93 aa, Homo sapiens
KEIADYLAAGKDERARIRVEHIIREDYFVEAMEILELYCDLLLARFGLIQSMKELDSGLAESVSTLIWAAPRLQSEVAELKIVADQLCAKYSK

SEQ ID NO: 63257 - protein, 201 aa, Homo sapiens
KMAASQQQASAASSAAGVSGPSSAGGPGPQQQPQPPAQLVGPAQSGLLQQQQQDFDPVQRYKMLIPQLKESLQTLMKVAAQNLIQNTNIDNGQKSSDGPIQRFDKCLEEFYALCDQLELCLRLAHECLSQSCDSAKHSPTLVPTATKPDAVQPDSLPYPQYLAVIKAQISCAKDIHTALLDCANKVTGKTPAPPAGPGGTL

SEQ ID NO: 63258 - protein, 978 aa, Homo sapiens
IDNVVLDEDRSGARRLQNLWRDQREEELGEYYMKKYAKSSVGETVYGGSDELSDDITQQQLLPGVKDPNLWTVKCKIGEERATAISLMRKFIAYQFTDTPLQIKSVVAPEHVKGYIYVEAYKQTHVKQAIEGVGNLRLGYWNQQMVPIKEMTDVLKVVKEVANLKPKSWVRLKRGIYKDDIAQVDYVEPSQNTISLKMIPRIDYDRIKARMSLKDWFAKRKKFKRPPQRLFDAEKIRSLGGDVASDGDFLIFEGNRYSRKGFLFKSFAMSAVITEGVKPTLSELEKFEDQPEGIDLEVVTESTGKEREHNFQPGDNVEVCEGELINLQGKILSVDGNKITIMPKHEDLKDMLEFPAQELRKYFKMGDHVKVIAGRFEGDTGLIVRVEENFVILFSDLTMHELKVLPRDLQLCSETASGVDVGGQHEWGELVQLDPQTVGVIVRLERETFQVLNMYGKVVTVRHQAVTRKKDNRFAVALDSEQNNIHVKDIVKVIDGPHSGREGEIRHLFRSFAFLHCKKLVENGGMFVCKTRHLVLAGGSKPRDVTNFTVGGFAPMSPRISSPMHPSAGGQRGGFGSPGGGSGGMSRGRGRRDNELIGQTVRISQGPYKGYIGVVKDATESTARVELHSTCQTISVDRQRLTTVGSRRPGGMTSTYGRTPMYGSQTPMYGSGSRTPMYGSQTPLQDGSRTPHYGSQTPLHDGSRTPAQSGAWDPNNPNTPSRAEEEYEYAFDDEPTPSPQAYGGTPNPQTPGYPDPSSPQVNPQYNPQTPGTPAMYNTDQFSPYAAPSPQGSYQPSPSPQSYHQVAPSPAGYQNTHSPASYHPTPSPMAYQASPSPSPVGYSPMTPGAPSPGGYNPHTPGSGIEQNSSDWVTTDIQVKVRDTYLDTQVVGQTGVIRSVTGGMCSVYLKDSEKVVSISSEHLEPITPTKNNKVKVILGEDREATGVLLSIDGEDGIVRMDLDEQLKILNLRFLGKLLEA

SEQ ID NO: 63259 - protein, 58 aa, Homo sapiens
RLRMRSQHCPCPGPRPACPSWALSLRTWRTCTAATRSCSKSWSSWRCRRNTSKMSKRT

SEQ ID NO: 63260 - protein, 238 aa, Homo sapiens
RTPCRVSVSLQPWLWKATEVMAMFEQMRANVGKLLKGIDRYNPENLATLERYVETQAKENAYDLEANLAVLKLYQFNPAFFQTTVTAQILLKALTNLPHTDFTLCKCMIDQAHQEERPIRQILYLGDLLETCHFQAFWQALDENMDLLEGITGFEDSVRKFICHVVGITYQHIDRWLLAEMLGDLSDSQLKVWMSKYGWSADESGQIFICSQEESIKPKNIVEKIDFDSVSSIMASSQ

SEQ ID NO: 63261 - protein, 139 aa, Homo sapiens
RMSWSGLLHGLNTSLTCGPALVPRLWATCSMATLNQMHRLGPPKRPPRKLGPTEGRPQLKGVVLCTFTRKPKKPNSANRKCCRVRLSTGREAVCFIPGEGHTLQEHQIVLVEGGRTQDLPGVKLTVVRGKYDCGHVQKK

SEQ ID NO: 63262 - protein, 54 aa, Homo sapiens
KLGPTGGSCRRLRARPRPLREHPTQCPLLFCQFGDPDTPTFSPGLCVSPSLEGR

SEQ ID NO: 63263 - protein, 5 aa, Homo sapiens
TFFLL

SEQ ID NO: 63264 - protein, 223 aa, Homo sapiens
IAALSGRDRVMAETYDFLFKFLVIGSAGTGKSCLLHQFIENKFKQDSNHTIGVEFGSRVVNVGGKTVKLQIWDTAGQERFRSVTRSYYRGAAGALLVYDITSRETYNSLAAWLTDARTLASPNIVVILCGNKKDLDPEREVTFLEASRFAQENELMFLETSALTGENVEEAFLKCARTILNKIDSGELDPERMGSGIQYGDASLRQLRQPRSAQAVAPQPCGC

SEQ ID NO: 63265 - protein, 20 aa, Homo sapiens
IYSEFTASFTSVSLCGRKAI

SEQ ID NO: 63266 - protein, 442 aa, Homo sapiens
KECEKAFSYLKSFQRHERSHTGEKPYKCKQCGKTFIYHQPFQRHERTHIGEKPYECKQCGKALSCSSSLRVHERIHTGEKPYECKQCGKAFSCSSSIRVHERTHTGEKPYACKECGKAFISHTSVLTHMITHNGDRPYKCKECGKAFIFPSFLRVHERIHTGEKPYKCKQCGKAFRCSTSIQIHERIHTGEKPYKCKECGKSFSARPAFRVHVRVHTGEKPYKCKECGKAFSRISYFRIHERTHTGEKPYECKKCGKTFNYPLDLKIHKRNHTGEKPYECKECAKTFISLENFRRHMITHTGDGPYKCRDCGKVFIFPSALRTHERTHTGEKPYECKQCGKAFSCSSYIRIHKRTHTGEKPYECKECGKAFIYPTSFQGHMRMHTGEKPYKCKECGKAFSLHSSFQRHTRIHNYEKPLECKQCGKAFSVSTSLKKHMRMHNR

SEQ ID NO: 63267 - protein, 10 aa, Homo sapiens
LTSSSRRTTC

SEQ ID NO: 63268 - protein, 39 aa, Homo sapiens
RHCCLTSALSPTPGSTCRRGSASTSRSMKSGCRRTRSGR

SEQ ID NO: 63269 - protein, 106 aa, Homo sapiens
RKATQVGEKTPKDESANQEEPEARVPAQSESVRRPWEKNSTTLPRMKSSSSVTTSETQPCTPSSSDYSDLQRVKQELLEEVKKELQKVKEEIIEAFVQELRKRGSP

SEQ ID NO: 63270 - protein, 934 aa, Homo sapiens
VPGRQCQIRGAWSWGEGRGQPGPAPSPAGSPTTSEESLAPMAWRCPRMGRVPLAWCLALCGWACMAPRGTQAEESPFVGNPGNITGARGLTGTLRCQLQVQGEPPEVHWLRDGQILELADSTQTQVPLGEDEQDDWIVVSQLRITSLQLSDTGQYQCLVFLGHQTFVSQPGYVGLEGLPYFLEEPEDRTVAANTPFNLSCQAQGPPEPVDLLWLQDAVPLATAPGHGPQRSLHVPGLNKTSSFSCEAHNAKGVTTSRTATITVLPQQPRNLHLVSRQPTELEVAWTPGLSGIYPLTHCTLQAVLSDDGMGIQAGEPDPPEEPLTSQASVPPHQLRLGSLHPHTPYHIRVACTSSQGPSSWTHWLPVETPEGVPLGPPENISATRNGSQAFVHWQEPRAPLQGTLLGYRLAYQGQDTPEVLMDIGLRQEVTLELQGDGSVSNLTVCVAAYTAAGDGPWSLPVPLEAWRPGQAQPVHQLVKEPSTPAFSWPWWYVLLGAVVAAACVLILALFLVHRRKKETRYGEVFEPTVERGELVVRYRVRKSYSRRTTEATLNSLGISEELKEKLRDVMVDRHKVALGKTLGEGEFGAVMEGQLNQDDSILKVAVKTMKIAICTRSELEDFLSEAVCMKEFDHPNVMRLIGVCFQGSERESFPAPVVILPFMKHGDLHSFLLYSRLGDQPVYLPTQMLVKFMADIASGMEYLSTKRFIHRDLAARNCMLNENMSVCVADFGLSKKIYNGDYYRQGRIAKMPVKWIAIESLADRVYTSKSDVWSFGVTMWEIATRGQTPYPGVENSEIYDYLRQGNRLKQPADCLDGLYALMSRCWELNPQDRPSFTELREDLENTLKALPPAQEPDEILYVNMDEGGGYPEPPGAAGGADPPTQPDPKDSCSCLTAAEVHPAGRYVLCPSTTPSPAQPADRGSPAAPGQEDGA

SEQ ID NO: 63271 - protein, 65 aa, Homo sapiens
LILREEFTSRMHQRFLDGKDGDFDYSTVDDNPDFDNLDIVARDEEERYFDEEEPEDAPSPELDGD

SEQ ID NO: 63272 - protein, 56 aa, Homo sapiens
VMEAFEQAERKPKPNPNLLFSDVYQEMPAQLRKQQESLARHLQTYGEHYPLDHFDK

SEQ ID NO: 63273 - protein, 98 aa, Homo sapiens [sequence omitted]

SEQ ID NO: 63274 - protein, 16 aa, Homo sapiens
LIPVLRTPRASPWLTS

SEQ ID NO: 63275 - protein, 63 aa, Homo sapiens
IDVQLSSELTDSLRTLKPEGNILRDRFKSFQRRNMIEPRERAKFKRKYKVKLVEKRAFREIQL

SEQ ID NO: 63276 - protein, 1400 aa, Homo sapiens
IDDQTFQPHRSTALQPYIKRAAATKLASAEKLMYFCTDQLGLEQDFEQKQMPDGKLLVDGFLLGIDVSRGMNRNFDDQLKFVSNLYNQLAKTKKPIVVVLTKCDEGVERYIRDAHTFALSKKNLQVVETSARSNVNVDLAFSTLVQLIDKSRGKTKIIPYFEALKQQSQQIATAKDKYEWLVSRIVKNHNENWLSVSRKMQASPEYQDYVYLEGTQKAKKLFLQHIHRLKHEHIERRRKLYLAALPLAFEALIPNLDEIDHLSCIKAKKLLETKPEFLKWFVVLEETPWDATSHIDNMENERIPFDLMDTVPAEQLYEAHLEKLRNERKRVEMRRAFKENLETSPFITPGKPWEEARSFIMNEDFYQWLEESVYMDIYGKHQKQIIDKAKEEFQELLLEYSELFYELELDAKPSKEKMGVIQDVLGEEQRFKALQKLQAERDALILKHIHFVYHPTKETCPSCPACVDAKIEHLISSRFIRPSDRNQKNSLSDPNIDRINLVILGKDGLARELANEIRALCTNDDKYVIDGKMYELSLRPIEGNVRLPVNSFQTPTFQPHGCLCLYNSKESLSYVVESIEKSRESTLGRRDNHLVHLPLTLILVNKRGDTSGETLHSLIQQGQQIASKLQCVFLDPASAGIGYGRNINEKQISQVLKGLLDSKRNLNLVSSTASIKDLADVDLRIVMCLMCGDPFSADDILFPVLQSQTCKSSHCGSNNSVLLELPIGLHKKRIELSVLSYHSSFSIRKSRLVHGYIVFYSAKRKASLAMLRAFLCEVQDIIPIQLVALTDGAVDVLDNDLSREQLTEGEEIAQEIDGRFTSIPCSQPQHKLEIFHPFFKDVVEKKNIIEATHMYDNAAEACSTTEEVFNSPRAGSPLCNSNLQDSEEDIEPSYSLFREDTSLPSLSKDHSKLSMELEGNDGLSFIMSNFESKLNNKVPPPVKPKPPVHFEITKGDLSYLDQGHRDGQRKSVSSSPWLPQDGFDPSDYAEPMDAVVKPRNEEENIYSVPHDSTQGKIITIRNINKAQSNGSGNGSDSEMDTSSLERGRKVSIVSKPVLYRTRCTRLGRFASYRTSFSVGSDDELGPIRKKEEDQASQGYKGDNAVIPYETDEDPRRRNILRSLRRNTKKPKPKPRPSITKATWESNYFGVPLTTVVTPEKPIPIFIERCIEYIEATGLSTEGIYRVSGNKSEMESLQRQFDQDHNLDLAEKDFTVNTVAGAMKSFFSELPDPLVPYNMQIDLVEAHKINDREQKLHALKEVLKKFPKENHEVFKYVISHLNKVSHNNKVNLMTSENLSICFWPTLMRPDFSTMDALTATRTYQTIIELFIQQCPFFFYNRPITEPPGARPSSPSAVASTVPFLTSTPVTSQPSPPQSPPPTPQSPMQPLLPSQLQAEHTL

SEQ ID NO: 63277 - protein, 295 aa, Homo sapiens
INRVRVSWLGEEPVAGVWSEKGQVEVFALRRLLQVVEEPQALAAFLRDEQAQMKPIFSFAGHMGEGFALDWSPRVTGRLLTGDCQKNIHLWTPTDGGSWHVDQRPFVGHTRSVEDLQWSPTENTVFASCSADASIRIWDIRAAPSKACMLTTATAHDGDVNVISWSRREPFLLSGGDDGALKIWDLRQFKSGSPVATFKQHVAPVTSVEWHPQDSGVFAASGADHQITQWDLAVERDPEAGDVEADPGLADLPQQLLFVHQGETELKELHWHPQCPGLLVSTALSGFTIFRTISV

SEQ ID NO: 63278 - protein, 66 aa, Homo sapiens
IKACKTEADGRVVEGNHMVYRISAPTQEEKDEWIKSIQAAVSVDPFYEMLAARKKRISVKKKQEQP

SEQ ID NO: 63279 - protein, 26 aa, Homo sapiens
ISSKGSLSSTTKSLLSPATSEGPLAK

SEQ ID NO: 63280 - protein, 558 aa, Homo sapiens
ICTSLREPRERCAATMFSWLKRGGARGQQPEAIRTVTSALKELYRTKLLPLEEHYRFGAFHSPALEDADFDGKPMVLVAGQYSTGKTSFIQYLLEQEVPGSRVGPEPTTDCFVAVMHGDTEGTVPGNALVVDPDKPFRKLNPFGNTFLNRFMCAQLPNQVLESISIIDTPGILSGAKQRVSRGYDFPAVLRWFAERVDLIILLFDAHKLEISDEFSEAIGALRGHEDKIRVVLNKADMVETQQLMRVYGALMWALGKVVGTPEVLRVYIGSFWSQPLLVPDNRRLFELEEQDLFRDIQGLPRHAALRKLNDLVKRARLVRVHAYIISYLKKEMPSVFGKENKKKQLILKLPVIFAKIQLEHHISPGDFPDCQKMQELLMAHDFTKFHSLKPKLLEALDEMLTHDIAKLMPLLRQEELESTEVGVQGGAFEGTHMGPFVERGPDEAMEDGEEGSDDEAEWVVTKDKSKYDEIFYNLAPADGKLSGSKAKTWMVGTKLPNSVLGRIWKLSDVDRDGMLDDEEFALASHLIEAKLEGHGLPANLPRRLVPPSKRRHKGSAE

SEQ ID NO: 63281 - protein, 32 aa, Homo sapiens
LRAPTWARLWSGDLTRPWRTARRARTTRPSGW

SEQ ID NO: 63282 - protein, 255 aa, Homo sapiens
IECSSISDYAVKIVKANKLDHVVTIIKGKVEEVELPVEKVDIIISEWMGYCLFYESMLNTVLYARDKWLAPDGLIFPDRATLYVTAIEDRQYKDYKIHWWENVYGFDMSCIKDVAIKEPLVDVVDPKQLVTNACLIKEVDIYTVKVEDLTFTSPFCLQVKRNDYVHALVAYFNIEFTRCHKRTGFSTSPESPYTHWKQTVFYMEDYLTVKTGEEIFGTIGMRPNAKNNRDLDFTIDLDFKGQLCELSCSTDYRMR

SEQ ID NO: 63283 - protein, 291 aa, Homo sapiens
LLTTLGPLFRNSRMVQFHFTNKDLESLKGLYRIMGNGFAGCVHFPHTAPCEVRVLMLLYSSKKKIFMGLIPYDQSGFVNGIRQVITNHKQVQQQKLEQQQRGMGGQQAPPGLGPILEDQARPSQNLLQLRPPQPQPQGTVGASGATGQPQPQGTAQPPPGAPQGPPGAASGPPPPGPILRPQNPGANPQLRSLLLNPPPPQTGVPPPQASLHHLQPPGAPALLPPPHQGLGQPQLGPPLLHPPPAQSWPAQLPPRAPLPGQMLLSGGPRGPVPQPGLQPSVMEDDILMDLI

SEQ ID NO: 63284 - protein, 437 aa, Homo sapiens
VSLGELKSIRRSKPGLSWAYLVLVTQAGGSLPALHFHRGGTRALLRVLSRYLLLASSPQDSRLYLVFPHDSSALSNSFHHLQLFDQDSSNVVSRFLQDPYSTTFSSFSRVTNFFRGALQPQPEGAASDLPPPPDDEPEPGFEVISCVELGPRPTVERGPPVTEEEWARHVGPEGRLQQVPELKNRIFSGGLSPSLRREAWKFLLGYLSWEGTAEEHKAHIRKKTDEYFRMKLQWKSVSPEQERRNSLLHGYRSLIERDVSRTDRTNKFYEGPENPGLGLLNDILLTYCMYHFDLGYVQGMSDLLSPILYVIQNEVDAFWCFCGFMELVQGNFEESQETMKRQLGRLLLLLRVLDPLLCDFLDSQDSGSLCFCFRWLLIWFKREFPFPDVLRLWEVLWTGLPGPNLHLLVACAILDMERDTLMLSGFGSTRSSGTSTS

SEQ ID NO: 63285 - protein, 13 aa, Homo sapiens
RASARGWRHGIAS

SEQ ID NO: 63286 - protein, 13 aa, Homo sapiens
LAVSPVDLNLPLD

SEQ ID NO: 63287 - protein, 186 aa, Homo sapiens
IISVQEIVDFAKQVPGFLQLGREDQIALLKASTIEIMLLETARRYNHETECITFLKDFTYSKDDFHRAGLQVEFINPIFEFSRAMRRLGLDDAEYALLIAINIFSADRPNVQEPGRVEALQQPYVEALLSYTRIKRPQDQLRFPRMLMKLVSLRTLSSVHSEQVFALRLQDKKLPPLLSEIWDVHE

SEQ ID NO: 63288 - protein, 590 aa, Homo sapiens
KMAAADGDDSLYPIAVLIDELRNEDVQLRLNSIKKLSTIALALGVERTRSELLPFLTDTIYDEDEVLLALAEQLGTFTTLVGGPEYVHCLLPPLESLATVEETVVRDKAVESLRAISHEHSPSDLEAHFVPLVKRLAGGDWFTSRTSACGLFSVCYPRVSSAVKAELRQYFRNLCSDDTPMVRRAAASKLGEFAKVLELDNVKSEIIPMFSNLASDEQDSVRLLAVEACVNIAQLLPQEDLEALVMPTLRQAAEDKSWRVRYMVADKFTELQKAVGPEITKTDLVPAFQNLMKDCEAEVRAAASHKVKEFCENLSADCRENVIMSQILPCIKELVSDANQHVKSALASVIMGLSPILGKDNTIEHLLPLFLAQLKDECPEVRLNIISNLDCVNEVIGIRQLSQSLLPAIVELAEDAKWRVRLAIIEYMPLLAGQLGVEFFDEKLNSLCMAWLVDHVYAIREAATSNLKKLVEKFGKEWAHATIIPKVLAMSGDPNYLHRMTTLFCINVLSEVCGQDITTKHMLPTVLRMAGDPVANVRFNVAKSLQKIGPILDNSTLQSEVKPILEKLTQDQDVDVKYFAQEALTVLSLA

SEQ ID NO: 63289 - protein, 465 aa, Homo sapiens [sequence omitted]

SEQ ID NO: 63290 - protein, 78 aa, Homo sapiens
IKCTRNVCKECGNLYCHNMQLTLHKRNHTQKKCNQCLDCGKYFTRQSTLIQHQRIHTGERPYKCNECIKTFNQRAHLT

SEQ ID NO: 63291 - protein, 1541 aa, Homo sapiens
LEVWHGGRWGTVCDDGWDLRDAAVACRQLGCGGALAAPGGAFFGEGAGPVWLSELACRGNEGQLGLCHHRGWKAHICSHEEDAGVVCAGQRVANSRDDSTSPLDGAPWPGLLLELSPSTEEPLVTHAPRPAGNPQNASRKKSPRPKQAKSTRAPLLTTGAPRQERLRLVSGPHRCAGRLEVWHGGRWGTVCDDGWDLRDAAVACRELGCGGALAAPGGARFGPGAGPVWMDDVGCGGGEQALRDCPRSPWGRSNCDHSEDAGLVCTGPAPRLRLADGPHGCAGRLEVWHGGRWGSVCDDAWDLRDAAVACRELGCGGALAAPGGAFFGEGSGPIILDDLRCRGNETALRFCPARPWGQHDCHHREDAGAVCDGMPLGYVPPTAPTDSNNSTPREAASRPPSTMTSQAPGTAGVSPPPASPTVLWEPGPEAGSPQLRLVAGPSKCSGRLEVWHDQRWGTVCDDSWDMRDSAVVCRELGCGGPQQPDPAAGRFGWGAGPIWLDDVGCVGTEASLSDCPAAPWGKHNCAHNEDVGVTCTGPPGLDSISDPFSWSWIPGLGRDRDAWLPGELATKPSASVTASVLEKTTTKAPGKMPKSTKKWVTKNAKRPTTQPPVMPTTKHSRAQSPPDLTSQTTAALTTEASRRPTSEFTRRPTTEAPQRWTSHTTATLTPQAPRERTTKTMAMLTTQGPQEMTSESTIKSIPQASLEPSAEIPEGSPESPKDPAPSPSVSTTGESGLFRVRLADGPNRCAGRLEVWHAGRWGTVCDDNWDLRDATVACWELGCGKVRPRVGKTHYGPGTGPIWLDDMGCKGSEASLSDCPSGAWGKHNCDHEEDVGLTCTGYTDYDDYPPWTWDPTSREDLAKGTTTAGVPGHTLPWRTTRRPGSSSPAIRRLPDTGSKDGYKLPWTWDTPSGRGLAEGTPTAGKLGPTLGAGTTRSPGSPPTLRVHGDTGSPRKPWPERRPPRPAATRTAPPTPSPGPSASPGPPGPALTSDSSRELTPHSALTSEATSDAPDTSPPTPDPASRTNPDLILTSPDFALSTPDSSVVPALTPEPSPTPLPTLPKELTSDPSTPSEVTSLSPTSEQVPESDTTPDLDTTPYSSTVSEYSRSPDPSPSPHPTTTPDPTMAPDPITTLNPTVTPHFPTTPHPTTTPHPTTITHSTMIPDPTTTPQPFTTITHSTMIPDPTTTPQPFTTMQPTTTPHSTTPHPTTTPHPTTITHSTMIPDPTTTPQPFTTMQPTTMPHPTTTPHPTTTPHPTTTPHPTTTPHPTMTPDPTTTPYPTTTPDPTTTPHPTTPDPSSTPVITTVSLPTSLGTELSSPTLAPTVKPSLHPQLTFTAPAPHTSTSQIPTLEPSPALESSPSRSSTATSMDPLSTEDFKPPRSQSPNLTPPPTHTPHSASDLTVSPDPLLSPTAHPLDHPPLDPLTLGPTPGQSPGPHGPCVAPTPPVRVMACEPPALVELVAAVRDVGGQLQRLTQVVEQERQERQALLLGLTQLVEAARGLGQLGEAVKRLAEMAWTTSMPAPTTTTPEEEERPLRGDV

SEQ ID NO: 63292 - protein, 5 aa, Homo sapiens
MAAAG

SEQ ID NO: 63293 - protein, 19 aa, Homo sapiens
IGHQRTHNRTKRKKKQPTS

SEQ ID NO: 63294 - protein, 131 aa, Homo sapiens
VKLIRRTTNPWTGESAGGEYKEMDKPCGCPPGVCDHGTGDRRDPWYSTVGLLPPVRAMSQRNLNAKTEQGPTGVTMTSNPITWGQIKKTTQEAEKLLERQGQAKTPDSMFLAMLAVVSCASIGSGEPPTGN

SEQ ID NO: 63295 - protein, 570 aa, Homo sapiens
RRQMKNIVHNYSEAEIKVREATSNDPWGPSSSLMSEIADLTYNVVAFSEIMSMIWKRLNDHGKNWRHVYKAMTLMEYLIKTGSERVSQQCKENMYAVQTLKDFQYVDRDGKDQGVNVREKAKQLVALLRDEDRLREERAHALKTKEKLAQTATASSAAVGSGPPPEAEQAWPQSSGEEELQLQLALAMSKEEADQPPSCGPEDDAQLQLALSLSREEHDKEERIRRGDDLRLQMAIEESKRETGGKEESSLMDLADVFTAPAPAPTTDPWGGPAPMAAAVPTAAPTSDPWGGPPVPPAADPWGGPAPTPASGDPWRPAAPAGPSVDPWGGTPAPAAGEGPTPDPWGSSDGGVPVSGPSASDPWTPAPAFSDPWGGSPAKPSTNGTTAAGGFDTEPDEFSDFDRLRTALPTSGSSAGELELLAGEVPARSPGAFDMSGVRGSLAEAVGSPPPAATPTPTPPTRKTPESFLGPNAALVDLDSLVSRPGPTPPGAKASNPFLPGGGPATGPSVTNPFQPAPPATLTLNQLRLSPVPPVPGAPPTYISPLGGGPGLPPMMPPGPPAPNTNPFLL

SEQ ID NO: 63296 - protein, 16 aa, Homo sapiens
IMMLPPPPPPRSEKPR

SEQ ID NO: 63297 - protein, 149 aa, Homo sapiens
IPSLGPWGVLHSNPMDYAWGANGLDAIITQLLNQFENTGPPPADKEKIQALPTVPVTEEHVGSGLECPVCKDDYALGERVRQLPCNHLFHDGCIVPWLEQHDSCPVCRKSLTGQNTATNPPGLTGVSFSSSSSSSSSSSPSNENATSNS

SEQ ID NO: 63298 - protein, 218 aa, Homo sapiens
INQAVRNSDLVPKAKGRKSLQRLENTQYLLTLLETDGGLPGLEDGDLAPPASPGIFAEACNNATYVEVWNDFMNRSGEEQERVLRYLEDEGRSKARRRGPGRGEDRRREDPAYTPRECFQRISRRLRAVLKRSRIPMETLETWEERLLRFFSVSPQAVYTAMLDNSFERLLLHAVCQYMDLISASADLEGKRQMKVSNRHLDFLPPGLLLSAYLEQHS

SEQ ID NO: 63299 - protein, 198 aa, Homo sapiens
LYMTTRLIVNLSQTYMAMYLTYSLHLPKKFIATIPLVMYLSGFLSSFLMKPINKCIGRNMTYFSGLLVILAFAAWVALAEGLGVAVYAAAVLLGAGCATILVTSLAMTADLIGPHTNSGAFVYGSMSFLDKVANGLAVMAIQSLHPCPSELCCRACVSFYHWAMVAVTGGVGVAAALCLCSLLLWPTRLRRWDRDARP

SEQ ID NO: 63300 - protein, 394 aa, Homo sapiens
IPAHRFVLAVGSAVFDAMFNGGMATTSTEIELPDVEPAAFLALLKFLYSDEVQIGPETVMTTLYTAKKYAVPALEAHCVEFLKKNLRADNAFMLLTQARLFDEPQLASLCLENIDKNTADAITAEGFTDIDLDTLVAVLERDTLGIREVRLFNAVVRWSEAECQRQQLQVTPENRRKVLGKALGLIRFPLMTIEEFAAGPAQSGILVDREVVSLFLHFTVNPKPRVEFIDRPRCCLRGKECSINRFQQVESRWGYSGTSDRIRFSVNKRIFVVGFGLYGSIHGPTDYQVNIQIIHTDSNTVLGQNDTGFSCDGSASTFRVMFKEPVEVLPNVNYTACATLKGPDSHYGTKGLRKVTHESPTTGAKTCFTFCYAAGNNNGTSVEDGQIPEVIFYT

SEQ ID NO: 63301 - protein, 472 aa, Homo sapiens
LAGPGQKMVQKKPAELQGFHRSFKGQNPFELAFSLDQPDHGDSDFGLQCSARPDMPASQPIDIPDAKKRGKKKKRGRATDSFSGRFEDVYQLQEDVLGEGAHARVQTCINLITSQEYAVKIIEKQPGHIRSRVFREVEMLYQCQGHRNVLELIEFFEEEDRFYLVFEKMRGGSILSHIHKRRHFNELEASVVVQDVASALDFLHNKGIAHRDLKPENILCEHPNQVSPVKICDFDLGSGIKLNGDCSPISTPELLTPCGSAEYMAPEVVEAFSEEASIYDKRCDLWSLGVILYILLSGYPPFVGRCGSDCGWDRGEACPACQNMLFESIQEGKYEFPDKDWAHISCAAKDLISKLLVRDAKQRLSAAQVLQHPWVQGCAPENTLPTPMVLQRNSCAKDLTSFAAEAIAMNRQLAQHDEDLAEEEAAGQGQPVLVRATSRCLQLSPPSQSKLAQRRQRASLSSAPVVLVGDHA

SEQ ID NO: 63302 - protein, 11 aa, Homo sapiens
RGRTPSSWPSP

SEQ ID NO: 63303 - protein, 14 aa, Homo sapiens
VRPGGLVRTVTVNE

SEQ ID NO: 63304 - protein, 24 aa, Homo sapiens
KGHLCLVRGKTGGAQKALVWNSES

SEQ ID NO: 63305 - protein, 71 aa, Homo sapiens
IEDPERKYHFECSSEEQCQEWMEALRRASYEFMRRSLIFYRNEIRKVTGKDPLEQFGISEEARFQLSGLQA

SEQ ID NO: 63306 - protein, 556 aa, Homo sapiens
IAPPVFVFQKDKGQKSPAEQKNLSDSGEEPRGEAEAPHHGTGHPESAGEHALEPPAPAGASASTPPPPAPEAQLPPFPRELAGRSAGGSSPEGGEDSDREDGNYCPPVKRERTSSLTQFPPSQSEERSSGFRLKPPTLIHGQAPSAGLPSQKPKEQQRSVLRPAVLQAPQPKALSQTVPSSGTNGVSLPADCTGAVPAASPDTAAWRSPSEAADEVCALEEKEPQKNESSNASEEEACEKKDPATQQAFVFGQNLRDRVKLINESVDEADMENAGHPSADTPTATNYFLQYISSSLENSTNSADASSNKFVFGQNMSERVLSPPKLNEVSSDANRENAAAESGSESSSQEATPEKESLAESAAAYTKATARKCLLEKVEVITGEEAESNVLQMQCKLFVFDKTSQSWVERGRGLLRLNDMASTDDGTLQSRLVMRTQGSLRLILNTKLWAQMQIDKASEKSIRITAMDTEDQGVKVFLISASSKDTGQLYAALHHRILALRSRVEQEQEAKMPAPEPGAAPSNEEDDSDDDDVLAPSGATAAGAGDEGDGQTTGST

SEQ ID NO: 63307 - protein, 23 aa, Homo sapiens
IPAVSISYVVYENMKQALGVTSR

SEQ ID NO: 63308 - protein, 447 aa, Homo sapiens
LRSGWCRCPRRCLGSGIQFLSSHNLPHGSTYQMRRPGGELPLSKSYSSGNRKGFLSGLLDNVKQELAKNKEMKESIKKFRDEARRLEESDVLQEARRKYKTIESETVRTSEVLRKKLGELTGTVKESLHEVSKSDLGRKIKEGVEEAAKTAKQSAESVSKGGEKLGRTAAFRALSQGVESVKKEIDDSVLGQTGPYRRPQRLRKRTEFAGDKFKEEKVFEPNEEALGVVLHKDSKWYQQWKDFKENNVVFNRFFEMKMKYDESDNAFIRASRALTDKVTDLLGGLFSKTEMSEVLTEILRVDPAFDKDRFLKQCENDIIPNVLEAMISGELDILKDWCYEATYSQLAHPIQQAKALGLQFHSRILDIDNVDLAMGKMMEQGPVLIITFQAQLVMVVRNPKGEVVEGDPDKVLRMLYVWALCRDQDELNPYAAWRLLDISASSTEQIL

SEQ ID NO: 63309 - protein, 19 aa, Homo sapiens
MVMKTTWPKTAGVTSGERI

SEQ ID NO: 63310 - protein, 90 aa, Homo sapiens
LQLRYQEISKRTQPPPKLPVGPSHKLSNNYYCTRDGRRESVPPSIIMSSQKALVSGKPAESSAVAATEKKAVTPAPPIKRWELSSDQPYL

SEQ ID NO: 63311 - protein, 262 aa, Homo sapiens
LLLLLGLGLGLEAAASPLSTPTSAQAAGPSSGSCPPTKFQCRTSGLCVPLTWRCDRDLDCSDGSDEEECRIEPCTQKGQCPPPPGLPCPCTGVSDCSGGTDKKLRNCSRLACLAGELRCTLSDDCIPLTWRCDGHPDCPDSSDELGCGTNEILPEGDATTMGPPVTLESVTSLRNATTMGPPVTLESVPSVGNATSSSAGDQSGSPTAYGVIAAAAVLSASLVTATLLLLSWLRAQERLRPLGLLVAMKESLLLSEQKTSLP

SEQ ID NO: 63312 - protein, 392 aa, Homo sapiens
IQMAEIHNGGELCDFMENGEIFSEHSCLNAHMGTENTGDTYDCDEYGENFPMLHNSAPAGETLSVLNQCRKAFSLPPNVHQRTWIGDKSFEYSDCEEAFVDQSHLQANRITHNGETLYEQKQCGRAFTYSTSHAVSVKMHTVEKPYECKECGKFFRYSSYLNSHMRTHTGEKPYECKECGKCFTVSSHLVEHVRIHTGEKPYQCKECGRAFAGRSGLTKHVRIHTGEKPYECNECGKAYNRFYLLTEHFKTHTEEKPFECKVCGKSFRSSSCLKNHFRIHTGIKPYKCKECGKAFTVSSSLHNHVKIHTGEKPYECKDCGKAFATSSQLIEHIRTHTGEKPYICKECGKTFRASSHLQKHVRIHTGEKPYICNECGKAYNRFYLLTKHLKTH

SEQ ID NO: 63313 - protein, 12 aa, Homo sapiens
TPAAGMEALWTL

SEQ ID NO: 63314 - protein, 510 aa, Homo sapiens
LDKENTGSWRSFSLNSEGAERMATTGTPTADRGDAAATDDPAARFQVQKHSWDGLRSIIHGSRKYSGLIVNKAPHDFQFVQKTDESGPHSHRLYYLGMPYGSRENSLLYSEIPKKVRKEALLLLSWKQMLDHFQATPHHGVYSREEELLRERKRLGVFGITSYDFHSESGLFLFQASNSLFHCRDGGKNGFMVSPMKPLEIKTQCSGPRMDPKICPADPAFFSFINNSDLWVANIETGEERRLTFCHQGLSNVLDDPKSAGVATFVIQEEFDRFTGYWWCPTASWEGSEGLKTLRILYEEVDESEVEVIHVPSPALEERKTDSYRYPRTGSKNPKIALKLAEFQTDSQGKIVSTQEKELVQPFSSLFPKVEYIARAGWTRDGKYAWAMFLDRPQQWLQLVLLPPALFIPSTENEEQRLASARAVPRNVQPYVVYEEVTNVWINVHDIFYPFPQSEGEDELCFLRANECKTGFCHLYKVTAVLKSQGYDWSEPFSPGEGEQSLTNAVDSSR

SEQ ID NO: 63315 - protein, 30 aa, Homo sapiens
IYPNERHSIRCPESGEHYEVTLLHFLQEYL

SEQ ID NO: 63316 - protein, 446 aa, Homo sapiens
VEDHYEMGEELGSGQFAIVRKCRQKGTGKEYAAKFIKKRRLSSSRRGVSREEIEREVNILREIRHPNIITLHDIFENKTDVVLILELVSGGELFDFLAEKESLTEDEATQFLKQILDGVHYLHSKRIAHFDLKPENIMLLDKNVPNPRIKLIDFGIAHKIEAGNEFKNIFGTPEFVAPEIVNYEPLGLEADMWSIGVITYILLSGASPFLGETKQETLTNISAVNYDFDEEYFSNTSELAKDFIRRLLVKDPKRRMTIAQSLEHSWIKAIRRRNVRGEDSGRKPERRRLKTTRLKEYTIKSHSSLPPNNSYADFERFSKVLEEAAAAEEGLRELQRSRRLCHEDVEALAAIYEEKEAWYREESDSLGQDLRRLRQELLKTEALKRQAQEEAKGALLGTSGLKRRFSRLENRYEALAKQVASEMRFVQDLVRALEQEKLQGVECGLR

SEQ ID NO: 63317 - protein, 565 aa, Homo sapiens
ILSGLNEQRTQGLLCDVVILVEGREFPTHRSVLAACSQYFKKLFTSGAVVDQQNVYEIDFVSAEALTALMDFAYTATLTVSTANVGDILSAARLLEIPAVSHVCADLLDRQILAADAGADAGQLDLVDQIDQRNLLRAKEYLEFFQSNPMNSLPPAAAAAAASFPWSAFGASDDDLDATKEAVAAAVAAVAAGDCNGLDFYGPGPPAERPPTGDGDEGDSNPGLWPERDEDAPTGGLFPPPVAPPAATQNGHYGRGGEEEAASLSEAAPEPGDSPGFLSGAAEGEDGDGPDVDGLAASTLLQQMMSSVGRAGAAAGDSDEESRADDKGVMDYYLKYFSGAHDGDVYPAWSQKVEKKIRAKAFQKCPICEKVIQGAGKLPRHIRTHTGEKPYECNICKVRFTRQDKLKVHMRKHTGEKPYLCQQCGAAFAHNYDLKNHMRVHTGLRPYQCDSCCKTFVRSDHLHRHLKKDGCNGVPSRRGRKPRVRGGAPDPSPGATATPGAPAQPSSPDARRNGQEKHFKDEDEDEDVASPDGLGRLNVAGAGGGGDSGGGPGAATDGNFTAGLA

SEQ ID NO: 63318 - protein, 210 aa, Homo sapiens
TPLFSESGCCGLRSRFLTDCKMEEGGNLGGLIKMVHLLVLSGAWGMQMWVTFVSGFLLFRSLPRHTFGLVQSKLFPFYFHISMGCAFINLCILASQHAWAQLTFWEASQLYLLFLSLTLATVNARWLEPRTTAAMWALQTVEKERGLGGEVPGSHQGPDPYRQLREKDPKYSALRQNFFRYHGLSSLCNLGCVLSNGLCLAGLALEIRSL

SEQ ID NO: 63319 - protein, 33 aa, Homo sapiens
MNESLEPSSSSGSNGKGPAVGDAPAPQPSSCSC

SEQ ID NO: 63320 - protein, 111 aa, Homo sapiens
LELFKRKMEEEQRQRQEEPPPGPQRPDQSAAAAGPGDPKRKGGPGSTLSFVGKRRGGNKLALKTGIVAKKQKTEDEVLTSKGDAWAKYMAEVKKYKAHQCGDDDKTRPLVK

SEQ ID NO: 63321 - protein, 190 aa, Homo sapiens
LPAGRKQCFYQSAPANASLETEYQVIGGAGLDVDFTLESPQGVLLVSESRKADGVHTVEPTEAGDYKLCFDNSFSTISEKLVFFELIFDSLQDDEEVEGWAEAVEPEEMLDVKMEDIKESIETMRTRLERSIQMLTLLRAFEARDRNLQEGNLERVNFWSAVNVAVLLLVAVLQVCTLKRFFQDKRPVPT

SEQ ID NO: 63322 - protein, 5 aa, Homo sapiens
VDTEW

SEQ ID NO: 63323 - protein, 1728 aa, Homo sapiens
LAALQLLPGTQADPVDVLKALGVQGGQAGVPEGPGFCPQRTPEGDRAFRIGQASTLGIPTWELFPEGHFPENFSLLITLRGQPANQSVLLSIYDERGARQLGLALGPALGLLGDPFRPLPQQVNLTDGRWHRVAVSIDGEMVTLVADCEAQPPVLGHGPRFISIAGLTVLGTQDLGEKTFEGDIQELLISPDPQAAFQACERYLPDCDNLAPAATVAPQGEPETPRPRRKGKGKGRKKGRGRKGKGRKKNKEIWTSSPPPDSAENQTSTDIPKTETPAPNLPPTPTPLVVTSTVTTGLNATILERSLDPDSGTELGTLETKAAREDEEGDDSTMGPDFRAAEYPSRTQFQIFPGAGEKGAKGEPAVIEKGQQFEGPPGAPGPQGVVGPSGPPGPPGFPGDPGPPGPAGLPGIPGIDGIRGPPGTVIMMPFQFAGGSFKGPPVSFQQAQAQAVLQQTQLSMKGPPGPVGLTGRPGPVGLPGHPGLKGEEGAEGPQGPRGLQGPHGPPGRVGKMGRPGADGARGLPGDTGPKGDRGFDGLPGLPGEKGQRGDFGHVGQPGPPGEDGERGAEGPPGPTGQAGEPGPRGLLGPRGSPGPTGRPGVTGIDGAPGAKGNVGPPGEPGPPGQQGNHGSQGLPGPQGLIGTPGEKGPPGNPGIPGLPGSDGPLGHPGHEGPTGEKGAQGPPGSAGPPGYPGPRGVKGTSGNRGLQGEKGEKGEDGFPGFKGDVGLKGDQGKPGAPGPRGEDGPEGPKGQAGQAGEEGPPGSAGEKGKLGVPGLPGYPGRPGPKGSIGFPGPLGPIGEKGKSGKTGQPGLEGERGPPGSRGERGQPGATGQPGPKGDVGQDGAPGIPGEKGLPGLQGPPGFPGPKGPPGHQGKDGRPGHPGQRGELGFQGQTGPPGPAGVLGPQGKTGEVGPLGERGPPGPPGPPGEQGLPGLEGREGAKGELGPPGPLGKEGPAGLRGFPGPKGGPGDPGPTGLKGDKGPPGPVGANGSPGERGPLGPAGGIGLPGQSGSEGPVGPAGKKGSRGERGPPGPTGKDGIPGPLGPLGPPGAAGPSGEEGDKGDVGAPGHKGSKGDKGDAGPPGQPGIRGPAGHPGPPGADGAQGRRGPPGLFGQKGDDGVRGFVGVIGPPGLQGLPGPPGEKGEVGDVGSMGPHGAPGPRGPQGPTGSEGTPGLPGGVGQPGAVGEKGERGDAGDPGPPGAPGIPGPKGDIGEKGDSGPSGAAGPPGKKGPPGEDGAKGSVGPTGLPGDLGPPGDPGVSGIDGSPGEKGDPGDVGGPGPPGASGEPGAPGPPGKRGPSGHMGREGREGEKGAKGEPGPDGPPGRTGPMGARGPPGRVGPEGLRGIPGPVGEPGLLGAPGQMGPPGPLGPSGLPGLKGDTGPKGEKGHIGLIGLIGPPGEAGEKGDQGLPGVQGPPGPKGDPGPPGPIGSLGHPGPPGVAGPLGQKGSKGSPGSMGPRGDTGPAGPPGPPGAPAELHGLRRRRRFVPVPLPVVEGGLEEVLASLTSLSLELEQLRRPPGTAERPGLVCHELHRNHPHLPDGEYWIDPNQGCARDSFRVFCNFTAGGETCLYPDKKFEIVKLASWSKEKPGGWYSTFRRGKKFSYVDADGSPVNVVQLNFLKLLSATARQNFTYSCQNAAAWLDEATGDYSHSARFLGTNGEELSFNQTTAATVSVPQDGCRLRKGQTKTLFEFSSSRAGFLPLWDVAATDFGQTNQKFGFELGPVCFSS

SEQ ID NO: 63324 - protein, 61 aa, Homo sapiens
VKGGLQAPLDLLVNKVFLAWKAERGPRGNWDHQDPLGKKGQLDSGAFPAPKGALGTRDLLA

SEQ ID NO: 63325 - protein, 312 aa, Homo sapiens
KPSWADQVEEEGEDDKCVTSELLKGIPLATGDTSPEPELLPGAPLPPPKEVINGNIKTVTEYKIDEDGKKFKIVRTFRIETRKASKAVARRKNWKKFGNSEFDPPGPNVATTTVSDDVSMTFITSKEDLNCQEEEDPMNKLKGQKIVSCRICKGDHWTTRCPYKDTLGPMQKELAEQLGLSTGEKEKLPGELEPVQATQNKTGKYVPPSLRDGASRRGESMQPNRRADDNATIRVTNLSEDTRETDLQELFRPFGSISRIYLAKDKTTGQSKGFAFISFHRREDAARAIAGVSGFGYDHLILNVEWAKPSTN

SEQ ID NO: 63326 - protein, 17 aa, Homo sapiens
TSMQPTEAMGEEPSRAE

SEQ ID NO: 63327 - protein, 634 aa, Homo sapiens
VVVLLIFWNPMQPDPRPSGAGACCRFLPLQSQCPEGAGDAVMYASTECKAEVTPSQHGNRTFSYTLEDHTKQAFGIMNELRLSQQLCDVTLQVKYQDAPAAQFMAHKVVLASSSPVFKAMFTNGLREQGMEVVSIEGIHPKVMERLIEFAYTASISMGEKCVLHVMNGAVMYQIDSVVRACSDFLVQQLDPSNAIGIANFAEQIGCVELHQRAREYIYMHFGEVAKQEEFFNLSHCQLVTLISRDDLNVRCESEVFHACINWVKYDCEQRRFYVQALLRAVRCHSLTPNFLQMQLQKCEILQSDSRCKDYLVKIFEELTLHKPTQVMPCRAPKVGRLIYTAGGYFRQSLSYLEAYNPSDGTWLRLADLQVPRSGLAGCVVGGLLYAVGGRNNSPDGNTDSSALDCYNPMTNQWSPCAPMSVPRNRIGVGVIDGHIYAVGGSHGCIHHNSVERYEPERDEWHLVAPMLTRRIGVGVAVLNRLLYAVGGFDGTNRLNSAECYYPERNEWRMITAMNTIRSGAGVCVLHNCIYAAGGYDGQDQLNSVERYDVETETWTFVAPMKHRRSALGITVHQGRIYVLGGYDGHTFLDSVECYDPDTDTWSEVTRMTSGRSGVGVAVTMEPCRKQIDQQNCTC

SEQ ID NO: 63328 - protein, 163 aa, Homo sapiens
RVKEWTPCGPHQGQDEGRGPAPGSGTRQVFSMAAMNKEGGTASVATGPDSPSPVPLPPGKPALPGADGTPFGCPPGRKEKPSDPVEWTVMDVVEYFTEAGFPEQATAFQEQEIDGKSLLLMQRTDVLTGLSIRLGPALKIYEHHIKVLQQGHFEDDDPDGFLG

SEQ ID NO: 63329 - protein, 4 aa, Homo sapiens
MDCI

SEQ ID NO: 63330 - protein, 103 aa, Homo sapiens
IVDCGFEHPSEVQHECIPQAILGMDVLCQAKSGMGKTAVFVLATLQQIEPVNGQVTVLVMCHTRELAFQISKEYERFSKYMPSVKVSPSGQTGPGATWFLQLC

SEQ ID NO: 63331 - protein, 69 aa, Homo sapiens
TLHGLQQYYVKLKDSEKNRKLFDLLDVLEFNQVIIFVKSVQRCMALAQLLVEQNFPAIAIHRGMAQEER

SEQ ID NO: 63332 - protein, 102 aa, Homo sapiens
LSRYQQFKDFQRRILVATNLFGRGMDIERVNIVFNYDMPEDSDTYLHRVARAGRFGTKGLAITFVSDENDAKILNDVQDRFEVNVAELPEEIDISTYIEQSR

SEQ ID NO: 63333 - protein, 44 aa, Homo sapiens
IPDDFKNVFDQKTDNLPRKSKLVVGGKVFAEVCMVSQPRPCFQR

SEQ ID NO: 63334 - protein, 350 aa, Homo sapiens
RRRMETPFYGDEALSGLGGGASGSGGSFASPGRLFPGAPPTAAAGSMMKKDALTLSLSEQVAAALKPAAAPPPTPLRADGAPSAAPPDGLLASPDLGLLKLASPELERLIIQSNGLVTTTPTSSQFLYPKVAASEEQEFAEGFVKALEDLHKQNQLGAGAAAAAAAAAAGGPSGTATGSAPPGELAPAAAAPEAPVYANLSSYAGGAGGAGGAATVAFAAEPVPFPPPPPPGALGPPRLAALKDEPQTVPDVPSFGESPPLSPIDMDTQERIKAERKRLRNRIAASKCRKRKLERISRLEEKVKTLKSQNTELASTASLLREQVAQLKQKVLSHVNSGCQLLPQHQVPAY

SEQ ID NO: 63335 - protein, 116 aa, Homo sapiens
TYNGHLVSCDNWMNINLREVICTSRDGDKFWRMPECYIRGSTIKYLRIPDEIIDMVKEEVVAKGRGRGGLQQQKQQKGRGMGGAGRGVFGGRGRGGIPGTGRGQPEKKPGRQAGKQ

SEQ ID NO: 63336 - protein, 510 aa, Homo sapiens
IHQLALTGEKRADIQLNSFGFYTNGSLEVELSVLRLGLREAEEKSLLVGFSLSRVRSGRVRSYSTRDFQDCPLQKNSSSFLVLFLINTKDLQVQVRKYGEQKTLFIFPGLLPEAPSKPGLPKPQATVPRKVDGGGTSAASKPKSTPAVIQGPSGKDKDLVLGLSHLNNSYNFSFHVVIGSQAEEGQYSLNFHNCNNSVPGKEHPFDITVMIREKNPDGFLSAAEMPLFKLYMVMSACFLAAGIFWVSILCRNTYSVFKIHWLMAALAFTKSISLLFHSINYYFINSQGHPIEGLAVMYYIAHLLKGALLFITIALIGSGWAFIKYVLSDKEKKVFGIVIPMQVLANVAYIIIESREEGASDYVLWKEILFLVDLICCGAILFPVVWSIRHLQDASGTDGKVAVNLAKLKLFRHYYVMVICYVYFTRIIAILLQVAVPFQWQWLYQLLVEGSTLAFFVLTGYKFQPTGNNPYLQLPQEDEEDVQMEQVMTDSGFREGLSKVNKTASGRELL

SEQ ID NO: 63337 - protein, 1680 aa, Homo sapiens
ILSLCPSVPLTLHCPSTMGPTSGPSLLLLLLTHLPLALGSPMYSIITPNILRLESEETMVLEAHDAQGDVPVTVTVHDFPGKKLVLSSEKTVLTPATNHMGNVTFTIPANREFKSEKGRNKFVTVQATFGTQVVEKVVLVSLQSGYLFIQTDKTIYTPGSTVLYRIFTVNHKLLPVGRTVMVNIENPEGIPVKQDSLSSQNQLGVLPLSWDIPELVNMGQWKIRAYYENSPQQVFSTEFEVKEYVLPSFEVIVEPTEKFYYIYNEKGLEVTITARFLYGKKVEGTAFVIFGIQDGEQRISLPESLKRIPIEDGSGEVVLSRKVLLDGVQNPRAEDLVGKSLYVSATVILHSGSDMVQAERSGIPIVTSPYQIHFTKTPKYFKPGMPFDLMVFVTNPDGSPAYRVPVAVQGEDTVQSLTQGDGVAKLSINTHPSQKPLSITVRTKKQELSEAEQATRTMQALPYSTVGNSNNYLHLSVLRTELRPGETLNVNFLLRMDRAHEAKIRYYTYLIMNKGRLLKAGRQVREPGQDLVVLPLSITTDFIPSFRLVAYYTLIGASGQREVVADSVWVDVKDSCVGSLVVKSGQSEDRQPVPGQQMTLKIEGDHGARVVLVAVDKGVFVLNKKNKLTQSKIWDVVEKADIGCTPGSGKDYAGVFSDAGLTFTSSSGQQTAQRAELQCPQPAARRRRSVQLTEKRMDKVGKYPKELRKCCEDGMRENPMRFSCQRRTRFISLGEACKKVFLDCCNYITELRRQHARASHLGLARSNLDEDIIAEENIVSRSEFPESWLWNVEDLKEPPKNGISTKLMNIFLKDSITTWEILAVSMSDKKGICVADPFEVTVMQDFFIDLRLPYSVVRNEQVEIRAVLYNYRQNQELKVRVELLHNPAFCSLATTKRRHQQTVTIPPKSSLSVPYVIVPLKTGLQEVEVKAAVYHHFISDGVRKSLKVVPEGIRMNKTVAVRTLDPERLGREGVQKEDIPPADLSDQVPDTESETRILLQGTPVAQMTEDAVDAERLKHLIVTPSGCGEQNMIGMTPTVIAVHYLDETEQWEKFGLEKRQGALELIKKGYTQQLAFRQPSSAFAAFVKRAPSTWLTAYVVKVFSLAVNLIAIDSQVLCGAVKWLILEKQKPDGVFQEDAPVIHQEMIGGLRNNNEKDMALTAFVLISLQEAKDICEEQVNSLPGSITKAGDFLEANYMNLQRSYTVAIAGYALAQMGRLKGPLLNKFLTTAKDKNRWEDPGKQLYNVEATSYALLALLQLKDFDFVPPVVRWLNEQRYYGGGYGSTQATFMVFQALAQYQKDAPDHQELNLDVSLQLPSRSSKITHRIHWESASLLRSEETKENEGFTVTAEGKGQGTLSVVTMYHAKAKDQLTCNKFDLKVTIKPAPETEKRPQDAKNTMILEICTRYRGDQDATMSILDISMMTGFAPDTDDLKQLANGVDRYISKYELDKAFSDRNTLIIYLDKVSHSEDDCLAFKVHQYFNVELIQPGAVKVYAYYNLEESCTRFYHPEKEDGKLNKLCRDELCRCAEENCFIQKSDDKVTLEERLDKACEPGVDYVYKTRLVKVQLSNDFDEYIMAIEQTIKSGSDEVQVGQQRTFISPIKCREALKLEEKKHYLMWGLSSDFWGEKPNLSYIIGKDTWVEHWPEEDECQDEENQKQCQDLGAFTESMVVFGCPN

SEQ ID NO: 63338 - protein, 14 aa, Homo sapiens
LWESLLFSQFMSYP

SEQ ID NO: 63339 - protein, 116 aa, Homo sapiens
IGRLGYVCPQEVAPMLQQFIRPWCTSLRNIRDNEEKDSAFRGICMMIGVNPGGVVQDFIFFCDAVASWVSPKDDLRDMFYKILHGFKDQVGEDNWQQFSEQFPPLLKERLAAFYGV

SEQ ID NO: 63340 - protein, 1146 aa, Homo sapiens
LALLRRLTVLPFAGLLYPAWLGAAAAGCWGWGSSWVQIPEAALLVLATICLAHALTVLSGHWSVHAHCALTCTPEYDPSKATFVKVVPTPNNGSTELVALHRNEGEDGLEVLSFEFQKIKYSYDALEKKQFLPVAFPVGNAFSYYQSNRGFQEDSEIRAAEKKFGSNKAEMVVPDFSELFKERATAPFFVFQVFCVGLWCLDEYWYYSVFTLSMLVAFEASLVQQQMRNMSEIRKMGNKPHMIQVYRSRKWRPIASDEIVPGDIVSIGRSPQENLVPCDVLLLRGRCIVDEAMLTGESVPQMKEPIEDLSPDRVLDLQADSRLHVIFGGTKVVQHIPPQKATTGLKPVDSGCVAYVLRTGFNTSQGKLLRTILFGVKRVTANNLETFIFILFLLVFAIAAAAYVWIEGTKDPSRNRYKLFLECTLILTSVVPPELPIELSLAVNTSLIALAKLYMYCTEPFRIPFAGKVEVCCFDKTGTLTSDSLVVRGVAGLRDGKEVTPVSSIPVETHRALASCHSLMQLDDGTLVGDPLEKAMLTAVDWTLTKDEKVFPRSIKTQGLKIHQRFHFASALKRMSVLASYEKLGSTDLCYIAAVKGAPETLHSMFSQCPPDYHHIHTEISREGARVLALGYKELGHLTHQQAREVKREALECSLKFVGFIVVSCPLKADSKAVIREIQNASHRVVMITGDNPLTACHVAQELHFIEKAHTLILQPPSEKGRQCEWRSIDGSIVLPLARGSPKALALEYALCLTGDGLAHLQATDPQQLLRLIPHVQVFARVAPKQKEFVITSLKELGYVTLMCGDGTNDVGALKHADVGVALLANAPERVVERRRRPRDSPTLSNSGIRATSRTAKQRSGLPPSEEQPTSQRDRLSQVLRDLEDESTPIVKLGDASIAAPFTSKLSSIQCICHVIKQGRCTLVTTLQMFKILALNALILAYSQSVLYLEGVKFSDFQATLQGLLLAGCFLFISRSKPLKTLSRERPLPNIFNLYTILTVMLQFFVHFLSLVYLYREAQARSPEKQEQFVDLYKEFEPSLVNSTVYIMAMAMQMATFAINYKGPPFMESLPENKPLVWSLAVSLLAIIGLLLGSSPDFNSQFGLVDIPVEFKLVIAQVLLLDFCLALLADRVLQFFLGTPKLKVPS

SEQ ID NO: 63341 - protein, 16 aa, Homo sapiens
ILLRHFKETNLIDFQG

SEQ ID NO: 63342 - protein, 21 aa, Homo sapiens
IMSGSPPAGVCPADPDSTTDE

SEQ ID NO: 63343 - protein, 22 aa, Homo sapiens
VKMLCDVWIFLIEWNLCFDSQG

SEQ ID NO: 63344 - protein, 345 aa, Homo sapiens [sequence omitted]

SEQ ID NO: 63345 - protein, 665 aa, Homo sapiens
RQTNQLQYLLRVVLKTLWKHQFAWPFQQPVDAVKLNLPDYYKIIKTPMDMGTIKKRLENNYYWNAQECIQDFNTMFTNCYIYNKPGDDIVLMAEALEKLFLQKINELPTEETEIMIVQAKGRGRGRKETGTAKPGVSTVPNTTQASTPPQTQTPQPNPPPVQATPHPFPAVTPDLIVQTPVMTVVPPQPLQTPPPVPPQPQPPPAPAPQPVQSHPPIIAATPQPVKTKKGVKRKADTTTPTTIDPIHEPPSLPPEPKTTKLGQRRESSRPVKPPKKDVPDSQQHPAPEKSSKVSEQLKCCSGILKEMFAKKHAAYAWPFYKPVDVEALGLHDYCDIIKHPMDMSTIKSKLEAREYRDAQEFGADVRLMFSNCYKYNPPDHEVVAMARKLQDVFEMRFAKMPDEPEEPVVAVSSPAVPPPTKVVAPPSSSDSSSDSSSDSDSSTDDSEEERAQRLAELQEQLKAVHEQLAALSQPQQNKPKKKEKDKKEKKKEKHKRKEEVEENKKSKAKEPPPKKTKKNNSSNSNVSKKEPAPMKSKPPPTYESEEEDKCKPMSYEEKRQLSLDINKLPGEKLGRVVHIIQSREPSLKNSNPDEIEIDFETLKPSTLRELERYVTSCLRKKRKPQAEKVDVIAGSSKMKGFSSSESESSSESSSSDSEDSETGPA

SEQ ID NO: 63346 - protein, 5 aa, Homo sapiens
ICPRR

SEQ ID NO: 63347 - protein, 15 aa, Homo sapiens
INLPALWRSVANIMP

SEQ ID NO: 63348 - protein, 45 aa, Homo sapiens
LATVRTICSHVQNMIKGVTLGFHYKMRSVYAHFPHQRRYPEWVSC

SEQ ID NO: 63349 - protein, 575 aa, Homo sapiens
LVPSAVCPRICLKAAPNSAPAPRGPPRTMTKTDPAPMAPPPRGEEEEEEEEDEPVPEAPSPTQERRQKPVVHPSAPAPLPKDYAFTFFDPNDPACQEILFDPQTTIPELFAIVRQWVPQVQHKIDVIGNEILRRGCHVNDRDGLTDMTLLHYACKAGAHGVGDPAAAVRLSQQLLALGADVTLRSRWTNMNALHYAAYFDVPDLVRVLLKGARPRVVNSTCSDFNHGSALHIAASSLCLGAAKCLLEHGANPALRNRKGQVPAEVVPDPMDMSLDKAEAALVAKELRTLLEEAVPLSCALPKVTLPNYDNVPGNLMLSALGLRLGDRVLLDGQKTGTLRFCGTTEFASGQWVGVELDEPEGKNDGSVGGVRYFICPPKQGLFASVSKISKAVDAPPSSVTSTPRTPRMDFSRVTGKGRREHKGKKKTPSSPSLGSLQQRDGAKAEVGDQVLVAGQKQGIVRFYGKTDFAPGYWYGIELDQPTGKHDGSVFGVRYFTCPPRHGVFAPASRIQRIGGSTDSPGDSVGAKKVHQVTMTQPKRTFTTVRTPKDIASENSISRLLFCCWFPWMLRAEMQS

SEQ ID NO: 63350 - protein, 21 aa, Homo sapiens
MTAKLQTPYRKRVETQCGHAS

SEQ ID NO: 63351 - protein, 58 aa, Homo sapiens
IQTQAQREDGHRPNSHRTLPERSGVVCRVKYCNSLPDIPFDPKFITYPFDQNSSSRSS

SEQ ID NO: 63352 - protein, 76 aa, Homo sapiens
LENYPIAPGRIQELEERRRRFVEACRAREAAFDAEYQRNPHRVDLDILTFTIALTASEVINPLIEELGCDKFINRE

SEQ ID NO: 63353 - protein, 28 aa, Homo sapiens
RQLVDLVMEGVWQELLDSAQIEICVADW

SEQ ID NO: 63354 - protein, 39 aa, Homo sapiens
LDSSPFLSEANAERIVQTLCTVRGAALKVGQMLSIQGTA

SEQ ID NO: 63355 - protein, 498 aa, Homo sapiens
LSPEPPRILDPFSSRRRISLRPATDPLFKTTHLLVPDRAHLGYFRGILRHPRSKPPLHHCALLPEDLSFPSRPSYLLPGDPQPLQGRGLPTTPALFALSAVPGGAASPMPPSGLRLLPLLLPLLWLLVLTPGRPAAGLSTCKTIDMELVKRKRIEAIRGQILSKLRLASPPSQGEVPPGPLPEAVLALYNSTRDRVAGESAEPEPEPEADYYAKEVTRVLMVETHNEIYDKFKQSTHSIYMFFNTSELREAVPEPVLLSRAELRLLRLKLKVEQHVELYQKYSNNSWRYLSNRLLAPSDSPEWLSFDVTGVVRQWLSRGGEIEGFRLSAHCSCDSRDNTLQVDINGFTTGRRGDLATIHGMNRPFLLLMATPLERAQHLQSSRHRRALDTNYCFSSTEKNCCVRQLYIDFRKDLGWKWIHEPKGYHANFCLGPCPYIWSLDTQYSKVLALYNQHNPGASAAPCCVPQALEPLPIVYYVGRKPKVEQLSNMIVRSCKCS

SEQ ID NO: 63356 - protein, 24 aa, Homo sapiens
IPEESRLMAKKQSESEDTLPSFSS

SEQ ID NO: 63357 - protein, 5 aa, Homo sapiens
VWLPQ

SEQ ID NO: 63358 - protein, 557 aa, Homo sapiens
KPAYVPEASRPHQWQADEDAVRKGTCSFPVRYLGHVEVEESRGMHVCEDAVKKLKAMGRKSVKSVLWVSADGLRVVDDKTKDLLVDQTIEKVSFCAPDRNLDKAFSYICRDGTTRRWICHCFLALKDSGERLSHAVGCAFAACLERKQRREKECGVTAAFDASRTSFAREGSFRLSGGGRPAEREAPDKKKAEAAAAPTVAPGPAQPGHVSPTPATTSPGEKGEAGTPVAAGTTAAAIPRRHAPLEQLVRQGSFRGFPALSQKNSPFKRQLSLRLNELPSTLQRRTDFQVKGTVPEMEPPGAGDSDSINALCTQISSSFASAGAPAPGPPPATTGTSAWGEPSVPPAAAFQPGHKRTPSEAERWLEEVSQVAKAQQQQQQQQQQQQQQQQQQQQAASVAPVPTMPPALQPFPAPVGPFDAAPAQVAVFLPPPHMQPPFVPAYPGLGYPPMPRVPVVGITPSQMVANAFCSAAQLQPQPATLLGKAGAFPPPAIPSAPGSQARPRPNGAPWPPEPAPAPAPELDPFEAQWAALEGKATVEKPSNPFSGDLQKTFEIEL

SEQ ID NO: 63359 - protein, 29 aa, Homo sapiens
LIALLYPELLRSGRFGSPLVGSGPEWGGV

SEQ ID NO: 63360 - protein, 532 aa, Homo sapiens
KPESSPGSRQIQLWHFILELLRKEEYQGVIAWQGDYGEFVIKDPDEVARLWGVRKCKPQMNYDKLSRALRYYYNKRILHKTKGKRFTYKFNFNKLVLVNYPFIDVGLAGGAVPQSAPPVPSGGSHFRFPPSTPSEVLSPTEDPRSPPACSSSSSSLFSAVVARRLGRGSVSDCSDGTSELEEPLGEDPRARPPGPPDLGAFRGPPLARLPHDPGVFRVYPRPRGGPEPLSPFPVSPLAGPGSLLPPQLSPALPMTPTHLAYTPSPTLSPMYPSGGGGPSGSGGGSHFSFSPEDMKRYLQAHTQSVYNYHLSPRAFLHYPGLVVPQPQRPDKCPLPPMAPETPPVPSSASSSSSSSSSPFKFKLQPPPLGRRQRAAGEKAVAGADKSGGSAGGLAEGAGALAPPPPPPQIKVEPISEGESEEVEVTDISDEDEEDGEVFKTPRAPPAPPKPEPGEAPGASQCMPLKLRFKRRWSEDCRLEGGGGPAGGFEDEGEDKKVRGEGPGEAGGPLTPRRVSSDLQHATAQLSLEHRDS

SEQ ID NO: 63361 - protein, 50 aa, Homo sapiens
IKAQGPAGEVYCPSGDKCPLVGSSVPWAFMQGEIATILAGDIKVKKERDP

SEQ ID NO: 63362 - protein, 25 aa, Homo sapiens
VELVPEDDGTASAEGPDEAGRPPPE

SEQ ID NO: 63363 - protein, 5 aa, Homo sapiens
MRSWP

SEQ ID NO: 63364 - protein, 54 aa, Homo sapiens
LKFGTDLNQGEKKADVSEQVSNGPVESVTLENSPLVWKEGRQLLRHPVPAGFSF

SEQ ID NO: 63365 - protein, 273 aa, Homo sapiens
VEPIHAFRAHRGPVLAVAMGSNSEYCYSGGADACIHSWKIPDLSMDPYDGYDPSVLSHVLEGHGDAVWGLAFSPTSQRLASCSADGTVRIWDPSSSSPACLCTFPTASEHGVPTSVAFTSTEPAHIVASFRSGDTVLYDMEVGSALLTLESRGSSGPTQINQVVSHPNQPLTITAHDDRGIRFLDNRTGKPVHSMVAHLDAVTCLAVDPNGAFLMSGSHDCSLRLWSLDNKTCVQEITAHRKKHEEAIHAVACHPSKALIASAGADALAKVFV

SEQ ID NO: 63366 - protein, 67 aa, Homo sapiens
VDPNGAFLMSGSHDCSLRLWSLDNKTCVQEITAHRKKHEEAIHAVACHPSKALIASAGADALAKVFV

SEQ ID NO: 63367 - protein, 20 aa, Homo sapiens
LMNVAGLYYPKDSARSCCLA

SEQ ID NO: 63368 - protein, 49 aa, Homo sapiens
MNSVLENFTILQVVTNRDTQELLLCTAYVFEVSTSERGAQHHIYRLVRD

SEQ ID NO: 63369 - protein, 19 aa, Homo sapiens
LTMVFGLEWKCSLRPVLGF

SEQ ID NO: 63370 - protein, 292 aa, Homo sapiens
RAMANPKLLGMGLSEAEAIGADSARFEELLLQASKELQQAQTTRPESTQIQPQPGFCIKTNSSEGKVFINICHSPSIPPPADVTEEELLQMLEEDQAGFRIPMSLGEPHAELDAKGQGCTAYDVAVNSDFYRRMQNSDFLRELVITIAREGLEDKYNLQLNPEWRMMKNRPFMGSISQQNIRSEQRPRIQELGDLYTPAPGRAESGPEKPHLNLWLEAPDLLLAEVDLPKLDGALGLSLEIGENRLVMGGPQQLYHLDAYIPLQINSHESKAAFHRKRKQLMVAMPLLPVPS

SEQ ID NO: 63371 - protein, 303 aa, Homo sapiens
VRMTRHGKNCTAGAVYTYHEKKKDTAASGYGTQNIRLSRDAVKDFDCCCLSLQPCHDPVVTPDGYLYEREAILEYILHQKKEIARQMKAYEKQRGTRREEQKELQRAASQDHVRGFLEKESAIVSRPLNPFTAKALSGTSPDDVQPGPSVGPPSKDKDKVLPSFWIPSLTPEAKATKLEKPSRTVTCPMSGKPLRMSDLTPVHFTPLDSSVDRVGLITRSERYVCAVTRDSLSNATPCAVLRPSGAVVTLECVEKLIRKDMVDPVTGDKLTDRDIIVLQRGGTGFAGSGVKLQAEKSRPVMQA

SEQ ID NO: 63372 - protein, 127 aa, Homo sapiens
ILSQQKELEDLLSPLEELVKEQSGTIYLQHADEEREKTYKLAENIDAQLKRMAQDLKDIIEHLNTSGAPADTSDPLQQICKILNAHMDSLQWIDQNSALLQRKVEEVTKVCEGRRKEQERSFRITFD

SEQ ID NO: 63373 - protein, 83 aa, Homo sapiens
LVALVRTEHSPFHEHVLGALCSLVTDFPQGVRECREPELGLEELLRHRCQLLQQHEEYQEELEFCEKLLQTCFSSPADDSMDR

SEQ ID NO: 63374 - protein, 164 aa, Homo sapiens
LFRMKLLLGKDFPASPPKGYFLTKIFHPNVGANGEICVNVLKRDWTAELGIRHVLLTIKCLLIHPNPESALNEEAGRLLLENYEEYAARARLLTEIHGGAGGPSGRAEAGRALASGTEASSTDPGAPGGPGGAEGPMAKKHAGERDKKLAAKKKTDKKRALRRL

SEQ ID NO: 63375 - protein, 27 aa, Homo sapiens
VDLDSNPVADSRSRLLLRGFFPARPGP

SEQ ID NO: 63376 - protein, 204 aa, Homo sapiens
LFLCDMQEKFRHNIAYFPQIVSVAARMLKVARLLEVPVMLTEQYPQGLGPTVPELGTEGLRPLAKTCFSMVPALQQELDSRPQLRSVLLCGIEAQACILDPRSYPGLALTSLYPQNTTLDLLDRGLQVHVVVDACSSRSQVDRLVALARMRQSGAFLSTSEGLILQLVGDAVHPQFKEIQKLIKEPAPDSGLLGLFQGQNSLLH

SEQ ID NO: 63377 - protein, 20 aa, Homo sapiens
MEEEEVDSKAHLRGLGGLAS

SEQ ID NO: 63378 - protein, 23 aa, Homo sapiens
LPRKTILQYPPAVTAAAVSSSHP

SEQ ID NO: 63379 - protein, 55 aa, Homo sapiens
LEHKMERPGPSLKRVGPVAATYPMLNKKGPVPAATNGCTGDANGHLQEEPPMPTT

SEQ ID NO: 63380 - protein, 470 aa, Homo sapiens
VTLLTATLMHRLAPHCSFARWLLCNGSLFRYKHPSEEELRALAGKPRPRGRKERWANGLSEEKPLSVPRDAPFQLETCPLTTVDALVLRFFLEYQWFVDFAVYSGGVYLFTEAYYYMLGPAKETNIAVFWCLLTVTFSIKMFLTVTRLYFSAEEGGERSVCLTFAFLFLLLAMLVQVVREETLELGLEPGLASMTQNLEPLLKKQGWDWALPVAKLAIRVGLAVVGSVLGAFLTFPGLRLAQTHRDALTMSEDRPMLQFLLHTSFLSPLFILWLWTKPIARDFLHQPPFGETRFSLLSDSAFDSGRLWLLVVLCLLRLAVTRPHLQAYLCLAKARVEQLRREAGRIEAREIQQRVVRVYCYVTVVSLQYLTPLILTLNCTLLLKTLGGYSWGLGPAPLLSPDPSSASAAPIGSGEDEVQQTAARIAGALGGLLTPLFLRGVLAYLIWWTAACQLLASLFGLYFHQHLAGS

SEQ ID NO: 63381 - protein, 25 aa, Homo sapiens
TGRDASHPSGCSCGFPVQEEAVGVG

SEQ ID NO: 63382 - protein, 343 aa, Homo sapiens
KKRLELDDNLDTERPVQKRARSGPQPRLPPCLLPLSPPTAPDRATAVATASRLGPYVLLEPEEGGRAYQALHCPTGTEYTCKVYPVQEALAVLEPYARLPPHKHVARPTEVLAGTQLLYAFFTRTHGDMHSLVRSRHRIPEPEAAVLFRQMATALAHCHQHGLVLRDLKLCRFVFADRERKKLVLENLEDSCVLTGPDDSLWDKHACPAYVGPEILSSRASYSGKAADVWSLGVALFTMLAGHYPFQDSEPVLLFGKIRRGAYALPAGLSAPARCLVRCLLRREPAERLTATGILLHPWLRQDPMPLAPTRSHLWEAAQVVPDGLGLDEAREEEGDREVVLYG

SEQ ID NO: 63383 - protein, 40 aa, Homo sapiens
RTSMSEGIKQLLKDMLAANPQDRPDAFELETRMDQVTCAA

SEQ ID NO: 63384 - protein, 95 aa, Homo sapiens
LGSYSGPTSVSRQRVESLRKKRPLFPWFGLDIGGTLVKLVYFEPKDITAEEEEEEVESLKSIRKYLTSNVAYGSTGIRDVHLELKDLTLCGRKDR

SEQ ID NO: 63385 - protein, 349 aa, Homo sapiens
LVKLVYFEPKDITAEEEEEEVESLKSIRKYLTSNVAYGSTGIRDVHLELKDLTLCGRKGNLHFIRFPTHDMPAFIQMGRDKNFSSLHTVFCATGGGAYKFEQDFLTIGDLQLCKLDELDCLIKGILYIDSVGFNGRSQCYYFENPADSEKCQKLPFDLKNPYPLLLVNIGSGVSILAVYSKDNYKRVTGTSLGGGTFFGLCCLLTGCTTFEEALEMASRGDSTKVDKLVRDIYGGDYERFGLPGWAVASSFGNMMSKEKREAVSKEDLARATLITITNNIGSIARMCALNENINQVVFVGNFLRINTIAMRLLAYALDYWSKGQLKALFSEHEGYFGAVGALLELLKIP

SEQ ID NO: 63386 - protein, 254 aa, Homo sapiens
IMANLGCWMLVLFVATWSDLGLCKKRPKPGGWNTGGSRYPGQGSPGGNRYPPQGGGGWGQPHGGGWGQPHGGGWGQPHGGGWGQPHGGGWGQGGGTHSQWNKPSKPKTNMKHMAGAAAAGAVVGGLGGYMLGSAMSRPIIHFGSDYEDRYYRENMHRYPNQVYYRPMDEYSNQNNFVHDCVNITIKQHTVTTTTKGENFTETDVKMMERVVEQMCITQYERESQAYYQRGSSMVLFSSPPVILLISFLIFLIVG

SEQ ID NO: 63387 - protein, 166 aa, Homo sapiens
LALSKAIESGDTDLVFTVLLHLKNELNRGDFFMTLRNQPMALSLYRQFCKHQELETLKDLYNQDDNHQELGSFHIRASYAAEERIEGRVAALQTAADAFYKAKNEFAAKATEDQMRLLRLQRRLEDELGGQFLDLSLHDTVTTLILGGHNKRAEQLARDFRIPDKR

SEQ ID NO: 63388 - protein, 172 aa, Homo sapiens
LAKSKIERVNMPPAVDPAEFFVLMERYQHYRQTVRALRMEFVSEVQRKVHEARAGVLAERKALKDAAEHRELMAWNQAENRRLHELRIARLRQEEREQEQRQALEQARKAEEVQAWAQRKEREVLQLQEEVKNFITRENLEARVEAALDSRKNYNWAITREGLVVRPQRRDS

SEQ ID NO: 63389 - protein, 68 aa, Homo sapiens
IATFMIYHLIQTCMGKDVTLHVSASNPAMLLYQKFGFKTEEYVLDFYDKYYPLESTECKHAFFLRLRR

SEQ ID NO: 63390 - protein, 454 aa, Homo sapiens
LEFDRSMPLFGYEADTNSSLEDYEGESDQETMAPPIKSKKKRSSSFVLPKLVKSQLQKVSGVFSSFMTPEKRMVRRIAELSRDKCTYFGCLVQDYVSFLQENKECHVSSTDMLQTIRQFMTQVKNYLSQSSELDPPIESLIPEDQIDVVLEKAMHKCILKPLKGHVEAMLKDFHMADGSWKQLKENLQLVRQRNPQELGVFAPTPDFVDVEKIKVKFMTMQKMYSPEKKVMLLLRVCKLIYTVMENNSGRMYGADDFLPVLTYVIAQCDMLELDTEIEYMMELLDPSLLHGEGGYYLTSAYGALSLIKNFQEEQAARLLSSETRDTLRQWHKRRTTNRTIPSVDDFQNYLRVAFQEVNSGCTGKTLLVRPYITTEDVCQICAEKFKVGDPEEYSLFLFVDETWQQLAEDTYPQKIKAELHSRPQPHIFHFVYKRIKNDPYGIIFQNGEEDLTTS

SEQ ID NO: 63391 - protein, 269 aa, Homo sapiens
KMAVNVYSTSVTSDNLSRHDMLAWINESLQLNLTKIEQLCSGAAYCQFMDMLFPGSIALKKVKFQAKLEHEYIQNFKILQAGFKRMGVDKIIPVDKLVKGKFQDNFEFVQWFKKFFDANYDGKDYDPVAARQGQETAVAPSLVAPALNKPKKPLTSSSAAPQRPISTQRTAAAPKAGPGVVRKNPGVGNGDDEAAELMQQVNVLKLTVEDLEKERDFYFGKLRNIELICQENEGENDPVLQRIVDILYATDEGFVIPDEGGPQEEQEEY

SEQ ID NO: 63392 - protein, 468 aa, Homo sapiens
LSLPGLWVSDPHPALMALCLELLKQCSSCLVAYKKTPPPVPPRTTSKPFISVTVQSSTESAQDTYLDSQDHKSEVTSQSGLSNSSDSLDSSTRPPSVTRGGVAPAPEAPEPPPKHAALKSEQGTLTSSESHPEAAPKRKLSSIGIQVDCIQPVPKEEPSPATKFQSIGVQVEDDWRSSVPSHSMSSRRDTDSDTQDANDSSCKSSERSLPDCTPHPNSISIDAGPRQAPKIAQIKRNLSYGDNSDPALEASSLPPPDPWLETSSSSPAEPAQPGACRRDGYWFLKLLQAETERLEGWCCQMDKETKENNLSEEVLGKVLSAVGSAQLLMSQKFQQFRGLCEQNLNPDANPRPTAQDLAGFWDLLQLSIEDISMKFDELYHLKANSWQLVETPEKRKEEKKPPPPVPKKPAKSKPAVSRDKASDASDKQRQEARKRLLAAKRAASVRQNSATESADSIEIYVPEAQTRL

SEQ ID NO: 63393 - protein, 13 aa, Homo sapiens
LHTPIPLVSENPQ

SEQ ID NO: 63394 - protein, 103 aa, Homo sapiens
KVLRSDAAWEDKDEFLDVIYWFRQIIAVVLGVIWGVLPLRGFLGIAGFCLINAGVLYLYFSNYLQIDEEEYGGTWELTKEGFMTSFALFMVIWIIFYTAIHYD

SEQ ID NO: 63395 - protein, 423 aa, Homo sapiens
LPDFTGDLRIPHVGRGRYEFHSLNIHSCELLHSALRPVPGQGLSLSISDSSIRVQGRWKVRKSFFKLQGSFDVSVKGISISVNLLLGSESSGRPTVTASSCSSDIADVEVDMSGDLGWLLNLFHNQIESKFQKVLESRICEMIQKSVSSDLQPYLQTLPVTTEIDSFADIDYSLVEAPRATAQMLEVMFKGEIFHRNHRSPVTLLAAVMSLPEEHNKMVYFAISDYVFNTASLVYHEEGYLNFSITDDMIPPDSNIRLTTKSFRPFVPRLARLYPNMNLELQGSVPSAPLLNFSPGNLSVDPYMEIDAFVLLPSSSKEPVFRLSVATNVSATLTFNTSKITGFLKPGKVKVELKESKVGLFNAELLEALLNYYILNTFYPKFNDKLAEGFPLPLLKRVQLYDLGLQIHKDFLFLGANVQYMRV

SEQ ID NO: 63396 - protein, 7 aa, Homo sapiens
IMEHFPT

SEQ ID NO: 63397 - protein, 35 aa, Homo sapiens
VESPMQRNSTGRGRGQGAGVFMADNPRLSAWPEFL

SEQ ID NO: 63398 - protein, 14 aa, Homo sapiens
LVLIPVLISQQWKI

SEQ ID NO: 63399 - protein, 4 aa, Homo sapiens
RKEL

SEQ ID NO: 63400 - protein, 1425 aa, Homo sapiens
KMSGLGENLDPLASDSRKRKLPCDTPGQGLTCSGEKRRREQESKYIEELAELISANLSDIDNFNVKPDKCAILKETVRQIRQIKEQGKTISNDDDVQKADVSSTGQGVIDKDSLGPLLLQALDGFLFVVNRDGNIVFVSENVTQYLQYKQEDLVNTSVYNILHEEDRKDFLKNLPKSTVNGVSWTNETQRQKSHTFNCRMLMKTPHDILEDINASPEMRQRYETMQCFALSQPRAMMEEGEDLQSCMICVARRITTGERTFPSNPESFITRHDLSGKVVNIDTNSLRSSMRPGFEDIIRRCIQRFFSLNDGQSWSQKRHYQEAYLNGHAETPVYRFSLADGTIVTAQTKSKLFRNPVTNDRHGFVSTHFLQREQNGYRPNPNPVGQGIRPPMAGCNSSVGGMSMSPNQGLQMPSSRAYGLADPSTTGQMSGARYGGSSNIASLTPGPGMQSPSSYQNNNYGLNMSSPPHGSPGLAPNQQNIMISPRNRGSPKIASHQFSPVAGVHSPMASSGNTGNHSFSSSSLSALQAISEGVGTSLLSTLSSPGPKLDNSPNMNITQPSKVSNQDSKSPLGFYCDQNPVESSMCQSNSRDHLSDKESKESSVEGAENQRGPLESKGHKKLLQLLTCSSDDRGHSSLTNSPLDSSCKESSVSVTSPSGVSSSTSGGVSSTSNMHGSLLQEKHRILHKLLQNGNSPAEVAKITAEATGKDTSSITSCGDGNVVKQEQLSPKKKENNALLRYLLDRDDPSDALSKELQPQVEGVDNKMSQCTSSTIPSSSQEKDPKIKTETSEEGSGDLDNLDAILGDLTSSDFYNNSISSNGSHLGTKQQVFQGTNSLGLKSSQSVQSIRPPYNRAVSLDSPVSVGSSPPVKNISAFPMLPKQPMLGGNPRMMDSQENYGSSMGGPNRNVTVTQTPSSGDWGLPNSKAGRMEPMNSNSMGRPGGDYNTSLPRPALGGSIPTLPLRSNSIPGARPVLQQQQQMLQMRPGEIPMGMGANPYGQAAASNQLGSWPDGMLSMEQVSHGTQNRPLLRNSLDDLVGPPSNLEGQSDERALLDQLHTLLSNTDATGLEEIDRALGIPELVNQGQALEPKQDAFQGQEAAVMMDQKAGLYGQTYPAQGPPMQGGFHLQGQSPSFNSMMNQMNQQGNFPLQGMHPRANIMRPRTNTPKQLRMQLQQRLQGQQFLNQSRQALELKMENPTAGGAAVMRPMMQPQVSSQQGFLNAQMVAQRSRELLSHHFRQQRVAMMMQQQQQQQQQQQQQQQQQQQQQQQQQQQQQTQAFSPPPNVTASPSMDGLLAGPTMPQAPPQQFPYQPNYGMGQQPDPAFGRVSSPPNAMMSSRMGPSQNPMMQHPQAASIYQSSEMKGWPSGNLARNSSFSQQQFAHQGNPAVYSMVHMNGSSGHMGQMNMNPMPMSGMPMGPDQKYC

SEQ ID NO: 63401 - protein, 11 aa, Homo sapiens
IYSVITRPQIG

SEQ ID NO: 63402 - protein, 22 aa, Homo sapiens
LLKMGHTVTVWNRTAKKRDLFI

SEQ ID NO: 63403 - protein, 224 aa, Homo sapiens
LAAIPPPEILNPTASLPMLIWDSVLAPQAQPIAWASLRLQESPRVAELTSLSDEDSGKGSQPPSPPSPAPSSFSSTSVSSLEAEAYAAFPGLGQVPKQLAQLSEAKDLQARKAFNCKYCNKEYLSLGALKMHIRSHTLPCVCGTCGKAFSRPWLLQGHVRTHTGEKPFSCPHCSRAFADRSNLRAHLQTHSDVKKYQCQACARTFSRMSLLHKHQESGCSGCPR

SEQ ID NO: 63404 - protein, 253 aa, Homo sapiens
RCYHKVTELNNVKNVARLPKSTKKHAIGIYFNDDTSKTFACESDLEADEWCKVLQMECVGTRINDISLGEPDLLATGVEREQSERFNVYLMPSPNLDVHGECALQITYEYICLWDVQNPRVKLISWPLSALRRYGRDTTWFTFEAGRMCETGEGLFIFQTRDGEAIYQKVHSAALAIAEQHERLLQSVKNSMLQMKMSERAASLSTMVPLPRSAYWQHITRQHSTGQLYRLQDVSSPLKLHRTETFPAYRSEH

SEQ ID NO: 63405 - protein, 72 aa, Homo sapiens
LLLLTKTLKINDEKFKAHASMYYPYLCEIMQFDLIPELRAVLRKFFLRIGVVYKIWIPEEPSQVPAALSPVW

SEQ ID NO: 63406 - protein, 323 aa, Homo sapiens
IYEYIIFRGSDIKDITVCEPPKAQHTLPQDPAIVQSSLGSASASPFQPHVPYSPFRGMAPYGPLAASSLLSQQYAASLGLGAGFPSIPVGKSPMVEQAVQTGSADNLNAKKLLPGKGTTGTQLNGRQAQPSSKTASDVVQPAAVQAQGQVNDENRRPQRRRSGNRRTRNRSRGQNRPTNVKENTIKFEGDFDFESANAQFNREELDKEFKKKLNFKDDKAEKGEEKDLAVVTQSAEAPAEEDLLGPNCYYDKSKSFFDNISSELKTSSRRTTWAEERKLNTETFGVSGRFLRGRSSRGGFRGGRGNGTTRRNPTSHRAGTGRV

SEQ ID NO: 63407 - protein, 399 aa, Homo sapiens
KCVGLELSKITMPIAFNEPLSFLQRITEYMEHVYLIHRASCQPQPLERMQSVAAFAVSAVASQWERTGKPFNPLLGETYELIREDLGFRFISEQVSHHPPISAFHSEGLNHDFLFHGSIYPKLKFWGKSVEAEPRGTITLELLKHNEAYTWTNPTCCVHNVIIGKLWIEQYGTVEILNHRTGHKCVLHFKPCGLFGKELHKVEGHIQDKNKKKLFMIYGKWTECLWGIDPVSYESFKKQERRGDHLRKAKLDEDSGKADSDVADDVPVAQETVQVIPGSKLLWRINTRPPNSAQMYNFTSFTVSLNELETGMEKTLPPTDCRLRPDIRGMENGNMDLASQEKERLEEKQREARRERAKEEAEWQTRWFYPGNNPYTGTPDWLYAGDYFERNFSDCPDIY

SEQ ID NO: 63408 - protein, 122 aa, Homo sapiens
VDLASVLTPEIMAPILANADVQERLLPYLPSGESLPQTADEIQNTLTSPQFQQALGMFSAALASGQLGPLMCQFGLPAEAVEAANKGDVEAFAKAMQNNAKPEQKEGDTKDKKDEEEDMSLD

SEQ ID NO: 63409 - protein, 230 aa, Homo sapiens
IRMSYAEKPDEITKDEWMEKLNNLHVQRADMNRLIMNYLVTEGFKEAAEKFRMESGIEPSVDLETLDERIKIREMILKGQIQEAIALINSLHPELLDTNRYLYFHLQQQHLIELIRQRETEAALEFAQTQLAEQGEESRECLTEMERTLALLAFDSPEESPFGDLLHTMQRQKVWSEVNQAVLDYENRESTPKLAKLLKLLLWAQNELDQKKVKYPKMTDLSKGVIEEPK

SEQ ID NO: 63410 - protein, 407 aa, Homo sapiens
IMASPRTRKVLKEVRVQDENNVCFECGAFNPQWVSVTYGIWICLECSGRHRGLGVHLSFVRSVTMDKWKDIELEKMKAGGNAKFREFLESQEDYDPCWSLQEKYNSRAAALFRDKVVALAEGREWSLESSPAQNWTPPQPRTLPSMVHRVSGQPQSVTASSDKAFEDWLNDDLGSYQGAQGNRYVGFGNTPPPQKKEDDFLNNAMSSLYSGWSSFTTGASRFASAAKEGATKFGSQASQKASELGHSLNENVLKPAQEKVKEGKIFDDVSSGVSQLASKVQGVGSKGWRDVTTFFSGKAEGPLDSPSEGHSYQNSGLDHFQNSNIDQSFWETFGSAEPTKTRKSPSSDSWTCADTSTERRSSDSWEVWGSASTNRNSNSDGGEGGEGTKKAVPPAVPTDDGWDNQNW

SEQ ID NO: 63411 - protein, 143 aa, Homo sapiens
LIQPCHSESGKSRLVQLPPVAVRSLQDLARIAIRGTIKKIIHQETVSKNGNGLKNTPRFKRRRVRRRRMETIVFLDKEVFASRISNPSDDNSCEDLEEERREEEEKTPPETKPDPPVNFLRQKVLSLPLPDPLKYYLLYYREK

SEQ ID NO: 63412 - protein, 192 aa, Homo sapiens
LRELKVCLLGDTGVGKSSIVWRFVEDSFDPNINPTIGASFMTKTVQYQNELHKFLIWDTAGQERFRALAPMYYRGSAAAIIVYDITKEETFSTLKNWVKELRQHGPPNIVVAIAGNKCDLIDVREVMERDAKDYADSIHAIFVETSAKNAININELFIEISRRIPSTDANLPSGGKGFKLRRQPSEPKRSCC

SEQ ID NO: 63413 - protein, 44 aa, Homo sapiens
VALLLALFGRASEDPLLNLVSPLGCEVDVEEGDLGRDSKRRRLV

SEQ ID NO: 63414 - protein, 10 aa, Homo sapiens
VPSTSWTRST

SEQ ID NO: 63415 - protein, 105 aa, Homo sapiens
IHSGRIAAVHNVPLSVLIRPLPSVLDPAKVQSLVDTIREDPDSVPPIDVLWIKGAQGGDYFYSFGGCHRYAAYQQLQRETIPAKLVQSTLSDLRVYLGASTPDLQ

SEQ ID NO: 63416 - protein, 91 aa, Homo sapiens
KRGQTCVVHYTGMLEDGKKFDSSRDRNKPFKFMLGKQEVIRGWEEGVAQMSVGQRAKLTISPDYAYGATGHPGIIPPHATLVFDVELLKLE

SEQ ID NO: 63417 - protein, 355 aa, Homo sapiens
TGAEEDRARFFLESAGWDLQIALASFYEDGGDEDIVTISQATPSSVSRGTAPSDNRVTSFRDLIHDQDEDEEEEEGQRFYAGGSERSGQQIVGPPRKKSPNELVDDLFKGAKEHGAVAVERVTKSPGETSKPRPFAGGGYRLGAAPEEESAYVAGEKRQHSSQDVHVVLKLWKSGFSLDNGELRSYQDPSNAQFLESIRRGEVPAELRRLAHGGQVNLDMEDHRDEDFVKPKGAFKAFTGEGQKLGSTAPQVLSTSSPAQQAENEAKASSSILIDESEPTTNIQIRLADGGRLVQKFNHSHRISDIRLFIVDARPAMAATSFILMTTFPNKELADESQTLKEANLLNAVIVQRLT

SEQ ID NO: 63418 - protein, 322 aa, Homo sapiens
VTISQATPSSVSRGTAPSDNRVTSFRDLIHDQDEDEEEEEGQRSRFYAGGSERSGQQIVGPPRKKSPNELVDDLFKGAKEHGAVAVERVTKSPGETSKPRPFAGGGYRLGAAPEEESAYVAGEKRQHSSQDVHVVLKLWKSGFSLDNGELRSYQDPSNAQFLESIRRGEVPAELRRLAHGGQVNLDMEDHRDEDFVKPKGAFKAFTGEGQKLGSTAPQVLSTSSPAQQAENEAKASSSILIDESEPTTNIQIRLADGGRLVQKFNHSHRISDIRLFIVDARPAMAATSFILMTTFPNKELADESQTLKEANLLNAVIVQRLT

SEQ ID NO: 63419 - protein, 347 aa, Homo sapiens
LHCTVTSLIPVGPIQWFRGAGPGRELIYNQKEGHFPRVTTVSDLTKRNNMDFSIRISNITPADAGTYYCVKFRKGSPDHVEFKSGAGTELSVRAKPSAPVVSGPAARATPQHTVSFTCESHGFSPRDITLKWFKNGNELSDFQTNVDPAGDSVSYSIHSTAKVVLTREDVHSQVICEVAHVTLQGDPLRGTANLSETIRVPPTLEVTQQPVRAENQVNVTCQVRKFYPQRLQLTWLENGNVSRTETASTLTENKDGTYNWMSWLLVNVSAHRDDVKLTCQVEHDGQPAVSKSHDLKVSAHPKEQGSNTAPGPALASAAPLLIAFLLGPKVLLVVGVSVIYVYWKQKA

SEQ ID NO: 63420 - protein, 47 aa, Homo sapiens
IWHPNITETGEICLSLLREHSIDGTGWAPMRTLKDVVWGLNSLFTDF

SEQ ID NO: 63421 - protein, 674 aa, Homo sapiens
IRMTPSQVAFEIRGTLLPGEVFAICGSCDALGNWNPQNAVALLPENDTGESMLWKATIVLSRGVSVQYRYFKGYFLEPKTIGGPCQVIVHKWETHLQPRSITPLESEIIIDDGQFGIHNGVETLDSGWLTCQTEIRLRLHYSEKPPVSITKKKLKKSRFRVKLTLEGLEEDDDDRVSPTVLHKMSNSLEISLISDNEFKCRHSQPECGYGLQPDRWTEYSIQTMEPDNLELIFDFFEEDLSEHVVQGDALPGHVGTACLLSSTIAESGKSAGILTLPIMSRNSRKTIGKVRVDYIIIKPLPGYSCDMKSSFSKYWKPRIPLDVGHRGAGNSTTTAQLAKVQENTIASLRNAASHGAAFVEFDVHLSKDFVPVVYHDLTCCLTMKKKFDADPVELFEIPVKELTFDQLQLLKLTHVTALKSKDRKESVVQEENSFSENQPFPSLKMVLESLPEDVGFNIEIKWICQQRDGMWDGNLSTYFDMNLFLDIILKTVLENSGKRRIVFSSFDADICTMVRQKQNKYPILFLTQGKSEIYPELMDLRSRTTPIAMSFAQFENLLGINVHTEDLLRNPSYIQEAKAKGLVIFCWGDDTNDPENRRKLKELGVNGLIYDRIYDWMPEQPNIFQVEQLERLKQELPELKSCLCPTVSRFVPSSLCGESDIHVDANGIDNVENA

SEQ ID NO: 63422 - protein, 21 aa, Homo sapiens
LHNGSAKAEQISDTIFNSRKI

SEQ ID NO: 63423 - protein, 710 aa, Homo sapiens
VSSQSRFLASVPGTGVQRSTAADMAASTAAGKQRIPKVAKVKNKAPAEVQITAEQLLREAKERELELLPPPPQQKITDEEELNDYKLRKRKTFEDNIRKNRTVISNWIKYAQWEESLKEIQRARSIYERALDVDYRNITLWLKYAEMEMKNRQVNHARNIWDRAITTLPRVNQFWYKYTYMEEMLGNVAGARQVFERWMEWQPEEQAWHSYINFELRYKEVDRARTIYERFVLVHPDVKNWIKYARFEEKHAYFAHARKVYERAVEFFGDEHMDEHLYVAFAKFEENQKEFERVRVIYKYALDRISKQDAQELFKNYTIFEKKFGDRRGIEDIIVSKRRFQYEEEVKANPHNYDAWFDYLRLVESDAEAEAVREVYERAIANVPPIQEKRHWKRYIYLWINYALYEELEAKDPERTRQVYQASLELIPHKKFTFAKMWILYAQFEIRQKNLSLARRALGTSIGKCPKNKLFKVYIELELQLREFDRCRKLYEKFLEFGPENCTSWIKFAELETILGDIDRARAIYELAISQPRLDMPEVLWKSYIDFEIEQEETERTRNLYRRLLQRTQHVKVWISFAQFELSSGKEGSLTKCRQIYEEANKTMRNCEEKEERLMLLESWRSFEEEFGTASDKERVDKLMPEKVKKRRKVQTDDGSDAGWEEYFDYIFPEDAANQPNLKLLAMAKLWKKQQQEKEDAEHHPDEDVDESES

SEQ ID NO: 63424 - protein, 35 aa, Homo sapiens
RLETKLHKFTDCGHFQNTEFHELITVVKSLLKVPA

SEQ ID NO: 63425 - protein, 302 aa, Homo sapiens
TLVMEGEWMLKFYAPWCPSCQQTDSEWEAFAKNGEILQISVGKVDVIQEPGLSGRFFVTTLPAFFHAKDGIFRRYRGPGIFEDLQNYILEKKWQSVEPLTGWKSPASLTMSGMAGLFSISGKIWHLHNYFTVTLGIPAWCSYVFFVIATLVFGLFMGLVLVVISECFYVPLPRHLSERSEQNRRSEEAHRAEQLQDAEEEKDDSNEEENKDSLVDDEEEKEDLGDEDEAEEEEEEDNLAAGVDEERSEANDQGPPGEDGVTREEVEPEEAEEGISEQPCPADTEVVEDSLRQRKSQHADKGL

SEQ ID NO: 63426 - protein, 44 aa, Homo sapiens
IRKNWLLVAGISFIGVHLGTYFLQRSAKQSVKFQSQSKQKSIEE

SEQ ID NO: 63427 - protein, 404 aa, Homo sapiens
LRPQVVTDDDGQAPEAKDGSSFSGRVFRVTFLMLAVSLTVPLLGAMMLLESPIDPQPLSFKEPPLLLGVLHPNTKLRQAERLFENQLVGPESIAHIGDVMFTGTADGRVVKLENGEIETIARFGSGPCKTRDDEPVCGRPLGIRAGPNGTLFVADAYKGLFEVNPWKREVKLLLSSETPIEGKNMSFVNDLTVTQDGRKIYFTDSSSKWQRRDYLLLVMEGTDDGRLLEYDTVTREVKVLLDQLRFPNGVQLSPAEDFVLVAETTMARIRRVYVSGLMKGGADLFVENMPGFPDNIRPSSSGGYWVGMSTIRPNPGFSMLDFLSERPWIKRMIFKLFSQETVMKFVPRYSLVLELSDSGAFRRSLHDPDGLVATYISEVHEHDGHLYLGSFRSPFLCRLSLQAV

SEQ ID NO: 63428 - protein, 15 aa, Homo sapiens
LSVYQKCKDKQAAAK

SEQ ID NO: 63429 - protein, 154 aa, Homo sapiens
VERFLAQLSEFATTNQISLGSLRSIVKSLLLVPNGALKKSLTAKQVQADFITLGLSEEKATYFSEKWKQNAPTLARWAIGQTLMINQLIDMEWKFGVTSGSSELEKVGSIFLQLKLVVKKGNQTENVYIELTLPQFYSFLHEMERVRTSMECFC

SEQ ID NO: 63430 - protein, 17 aa, Homo sapiens
IIHSFLSAKVTRLGLLA

SEQ ID NO: 63431 - protein, 437 aa, Homo sapiens
VSVASRPCRGPAVGGLLVERSKARRPLLESRVAMAAVPELLQQQEEDRSKLRSVSVDLNVDPSLQIDIPDALSERDKVKFTVHTKTTLPTFQSPEFSVTRQHEDFVWLHDTLIETTDYAGLIIPPAPTKPDFDGPREKMQKLGEGEGSMTKEEFAKMKQELEAEYLAVFKKTVSSHEVFLQRLSSHPVLSKDRNFHVFLEYDQDLSVRRKNTKEMFGGFFKSVVKSADEVLFTGVKEVDDFFEQEKNFLINYYNRIKDSCVKADKMTRSHKNVADDYIHTAACLHSLALEEPTVIKKYLLKVAELFEKLRKVEGRVSSDEDLKLTELLRYYMLNIEAAKDLLYRRTKALIDYENSNKALDKARLKSKDVKLAEAHQQECCQKFEQLSESAKEELINFKRKRVAAFRKNLIEMSELEIKHARNNVSLLQSCIDLFKNN

SEQ ID NO: 63432 - protein, 341 aa, Homo sapiens
IETTHGVVHVTIRGLPKGNRPVILTYHDIGLNHKSCFNAFFNFEDMQEITQHFAVCHVDAPGQQEGAPSFPTGYQYPTMDELAEMLPPVLTHLSLKSIIGIGVGAGAYILSRFALNHPELVEGLVLINVDPCAKGWIDWAASKLSGLTTNVVDIILAHHFGQEELQANLDLIQTYRMHIAQDINQDNLQLFLNSYNGRRDLEIERPILGQNDNKSKTLKCSTLLVVGDNSPAVEAVVECNSRLNPINTTLLKMADCGGLPQVVQPGKLTEAFKYFLQGMGYIPSASMTRLARSRTHSTSSSLGSGESPFSRSVTSNQSDGTQESCESPDVLDRHQTMEVSC

SEQ ID NO: 63433 - protein, 148 aa, Homo sapiens
ICWQKLFQYLSHGAHFSGDVSKASALQGMMRTLVTSGVSSYQHTSVTLEFFETVVRYEKFFTVEPQHVPCVLMAFLDHRGLRHSSAKVQSKMAYLFSRFVKSLNKQMNPFIEDILNRIQDLLKLSPPENGHQSFLSSDDQILFMRQLE

SEQ ID NO: 63434 - protein, 47 aa, Homo sapiens
IEFLEARGHHVEKVDVLSWVHGSRRTNNFIIAVKDPRSPDAAGATIL

SEQ ID NO: 63435 - protein, 25 aa, Homo sapiens
VAALGSGKPFGLGLSAAGRRHSRGG

SEQ ID NO: 63436 - protein, 945 aa, Homo sapiens
ISCFIRCVWFQRSMAVVIRLQGLPIVAGTMDIRHFFSGLTIPDGGVHIVGGELGEAFIVFATDEDARLGMMRTGGTIKGSKVTLLLSSKTEMQNMIELSRRRFETANLDIPPANASRSGPPPSSGMSSRVNLPTTVSNFNNPSPSVVTATTSVHESNKNIQTFSTASVGTAPPNMGASFGSPTFSSTVPSTASPMNTVPPPPIPPIPAMPSLPPMPSIPPIPVPPPVPTLPPVPPVPPIPPVPSVPPMTPLPPMSGMPPLNPPPVAPLPAGMNGSGAPMNLNNNLNPMFLGPLNPVNPIQMNSQSSVKPLPINPDDLYVSVHGMPFSAMENDVRDFFHGLRVDAVHLLKDHVGRNNGNGLVKFLSPQDTFEALKRNRMLMIQRYVEVSPATERQWVAAGGHITFKQNMGPSGQTHPPPQTLPRSKSPSGQKRSRSRSPHEAGFCVYLKGLPFEAENKHVIDFFKKLDIVEDSIYIAYGPNGKATGEGFVEFRNEADYKAALCRHKQYMGNRFIQVHPITKKGMLEKIDMIRKRLQNFSYDQREMILNPEGDVNSAKVCAHITNIPFSITKMDVLQFLEGIPVDENAVHVLVDNNGQGLGQALVQFKNEDDARKSERLHRKKLNGREAFVHVVTLEDMREIEKNPPAQGKKGLKMPVPGNPAVPGMPNAGLPGVGLPSAGLPGAGLPSTGLPGSAITSAGLPGAGMPSAGIPSAGGEEHAFLTVGSKEANNGPPFNFPGNFGGSNAFGPPIPPPGLGGGAFGDARPGMPSVGNSGLPGLGLDVPGFGGGPNNLSGPSGFGGGPQNFGNGPGSLGGPPGFGSGPPGLGSAPGHLGGPPAFGPGPGPGPGPGPIHIGGPPGFASSSGKPGPTVIKVQNMPFTVSIDEILDFFYGYQVIPGSVCLKYNEKGMPTGEAMVAFESRDEATAAVIDLNDRPIGSRKVKLVLG

SEQ ID NO: 63437 - protein, 6 aa, Homo sapiens
KELKDQ

SEQ ID NO: 63438 - protein, 84 aa, Homo sapiens
LKPPLEQLNIVLIDFGLSFISALPEDKGVDLYVLEKAFLSTHPNTETVFEAFLKSYSTSSKKARPVLKKLDEVRLRGRKRSMVG

SEQ ID NO: 63439 - protein, 871 aa, Homo sapiens
KMGPPSLVLCLLSATVFSLLGGSSAFLSHHRLKGRFQRDRRNIRPNIILVLTDDQDVELGSMQVMNKTRRIMEQGGAHFINAFVTTPMCCPSRSSILTGKYVHNHNTYTNNENCSSPSWQAQHESRTFAVYLNSTGYRTAFFGKYLNEYNGSYVPPGWKEWVGLLKNSRFYNYTLCRNGVKEKHGSDYSKDYLTDLITNDSVSFFRTSKKMYPHRPVLMVISHAAPHGPEDSAPQYSRLFPNASQHITPSYNYAPNPDKHWIMRYTGPMKPIHMEFTNMLQRKRLQTLMSVDDSMETIYNMLVETGELDNTYIVYTADHGYHIGQFGLVKGKSMPYEFDIRVPFYVRGPNVEAGCLNPHIVLNIDLAPTILDIAGLDIPADMDGKSILKLLDTERPVNRFHLKKKMRVWRDSFLVERGKLLHKRDNDKVDAQEENFLPKYQRVKDLCQRAEYQTACEQLGQKWQCVEDATGKLKLHKCKGPMRLGGSRALSNLVPKYYGQGSEACTCDSGDYKLSLAGRRKKLFKKKYKASYVRSRSIRSVAIEVDGRVYHVGLGDAAQPRNLTKRHWPGAPEDQDDKDGGDFSGTGGLPDYSAANPIKVTHRCYILENDTVQCDLDLYKSLQAWKDHKLHIDHEIETLQNKIKNLREVRGHLKKKRPEECDCHKISYHTQHKGRLKHRGSSLHPFRKGLQEKDKVWLLREQKRKKKLRKLLKRLQNNDTCSMPGLTCFTHDNQHWQTAPFWTLGPFCACTSANNNTYWCMRTINETHNFLFCEFATGFLEYFDLNTDPYQLMNAVNTLDRDVLNQLHVQLMELRSCKGYKQCNPRTRNMDLGLKDGGSYEQYRQFQRRKWPEMKRPSSKSLGQLWEGWEG

SEQ ID NO: 63440 - protein, 105 aa, Homo sapiens
LLLFESEFVHIVAISFTSLILTELLMVALTIQTWHWLMTVAELLSLACYIASLVFLHEFIDVYFIATLSFLWKVSVITLVSCLPLYVLKYLRRRFSPPSYSKLTS

SEQ ID NO: 63441 - protein, 219 aa, Homo sapiens
LCFSLIAHNLVHLLLLARWEDTPLVILGVVAGALIADFLSGLVHWGADTWGSVELPIVGKAFIRPFREHHIDPTAITRHDFIETNGDNCLVTLLPLLNMAYKFRTHSPEALEQLYPWECFVFCLIIFGTFTNQIHKWSHTYFGLPRWVTLLQDWHVILPRKHHRIHHVSPHETYFCITTGWLNYPLEKIGFWRRLEDLIQGLTGEKPRADDMKWAQKIK

SEQ ID NO: 63442 - protein, 56 aa, Homo sapiens
KTIFCSVVCRQKFHQAAGWRCYSPTHNTSKKGMERQYFSPKSNSPPRSIQKQSPAF

SEQ ID NO: 63443 - protein, 52 aa, Homo sapiens
IGHYPGSSFQHQQSSGPPSLLEGTRLHHTHIAPLESAAIWSKEKDKQKGHPL

SEQ ID NO: 63444 - protein, 381 aa, Homo sapiens
MEFPLLKKRKLDDDSDSPSFFEEKPEEPVVLALDPKGHEDDSYEARKSFLTKYFNKQPYPTRREIEKLAASLWLWKSDIASHFSNKRKKCVRDCEKYKPGVLLGFNMKELNKVKHEMDFDAEWLFENHDEKDSRVNASKTADKKLNLGKEDDSSSDSFENLEEESNESGSPFDPVFEVEPKISNDNPEEHVLKVIPEDASESEEKLDQKEDGSKYETIHLTEEPTKLMHNASDSEVDQDDVVEWKDGASPSESGPGSQQVSDFEDNTCEMKPGTWSDESSQSEDARSSKPAAKKKATMQGDREQLKWKNSSYGKVEGFWSKDQSQWKNASENDERLSNPQIEWQNSTIDSEDGEQFDNMTDGVAEPMHGSLAGVKLSSQQA

SEQ ID NO: 63445 - protein, 32 aa, Homo sapiens
TLMHRDSYPRFLSSPTYRALLLQGPSQSSSEA

SEQ ID NO: 63446 - protein, 281 aa, Homo sapiens [sequence omitted]

SEQ ID NO: 63447 - protein, 27 aa, Homo sapiens
MKLRREQWLQKIEAIKLAEQKHREERR

SEQ ID NO: 63448 - protein, 133 aa, Homo sapiens
LISHYRRECLLKLNEQAAELFESGEDREVNNGLIIMNEFIVPFLPLLLVDEMEEKDILAVEDMRNRWCSYLGQEMEPHLQEKLTDFLPKLLDCSMEIKSFHEPPKLPSYSTHELCERFARIMLSLSRTPADGR

SEQ ID NO: 63449 - protein, 4 aa, Homo sapiens
VLDS

SEQ ID NO: 63450 - protein, 817 aa, Homo sapiens
KGKTVPIDDSSETLEPVCRHIRKGLEQGNLKKALVNVEWNICQDCKTDNKVKDKAEEETEEKPSVWLCLKCGHQGCGRNSQEQHALKHYLTPRSEPHCLVLSLDNWSVWCYVCDNEVQYCSSNQLGQVVDYVRKQASITTPKPAEKDNGNIELENKKLEKESKNEQEREKKENMAKENPPMNSPCQITVKGLSNLGNTCFFNAVMQNLSQTPVLRELLKEVKMSGTIVKIEPPDLALTEPLEINLEPPGPLTLAMSQFLNEMQETKKGVVTPKELFSQVCKKAVRFKGYQQQDSQELLRYLLDGMRAEEHQRVSKGILKAFGNSTEKLDEELKNKVKDYEKKKSMPSFVDRIFGGELTSMIMCDQCRTVSLVHESFLDLSLPVLDDQSGKKSVNDKNLKKTVEDEDQDSEEEKDNDSYIKERSDIPSGTSKHLQKKAKKQAKKQAKNQRRQQKIQGKVLHLNDICTIDHPEDSEYEAEMSLQGEVNIKSNHISQEGVMHKEYCVNQKDLNGQAKMIESVTDNQKSTEEVDMKNINMDNDLEVLTSSPTRNLNGAYLTEGSNGEVDISNGFKNLNLNAALHPDEINIEILNDSHTPGTKVYEVVNEDPETAFCTLANREVFNTDECSIQHCLYQFTRNEKLRDANKLLCEVCTRRQCNGPKANIKGERKHVYTNAKKQMLISLAPPVLTLHLKRFQQAGFNLRKVNKHIKFPEILDLAPFCTLKCKNVAEENTRVLYSLYGVVEHSGTMRSGHYTAYAKARTANSHLSNLVLHGDIPQDFEMESKGQWFHISDTHVQAVPTTKVLNSQAYLLFYERIL

SEQ ID NO: 63451 - protein, 290 aa, Homo sapiens
LFSTQVFRAPRSAMSSGIHVALVTGGNKGIGLAIVRDLCRLFSGDVVLTARDVTRGQAAVQQLQAEGLSPRFHQLDIDDLQSIRALRDFLRKEYGGLDVLVNNAGIAFKVADPTPFHIQAEVTMKTNFFGTRDVCTELLPLIKPQGRVVNVSSIMSVRALKSCSPELQQKFRSETITEEELVGLMNKFVEDTKKGVHQKEGWPSSAYGVTKIGVTVLSRIHARKLSEQRKGDKILLNACCPGWVRTDMAGPKATKSPEEGAETPVYLALLPPDAEGPHGQFVSEKRVEQW

SEQ ID NO: 63452 - protein, 11 aa, Homo sapiens
VSYAAGALTVH

SEQ ID NO: 63453 - protein, 346 aa, Homo sapiens
LSRRRAPGAMRPTLLWSLLLLLGVFAAAAAAPPDPLSQLPAPQHPKIRLYNAEQVLSWEPVALSNSTRPVVYQVQFKYTDSKWFTADIMSIGVNCTQITATECDFTAASPSAGFPMDFNVTLRLRAELGALHSAWVTMPWFQHYRNVTVGPPENIEVTPGEGSLIIRFSSPFDIADTSTAFFCYYVHYWEKGGIQQVKGPFRSNSISLDNLKPSRVYCLQVQAQLLWNKSNIFRVGHLSNISCYETMADASTELQQVILISVGTFSLLSVLAGACFFLVLKYRGLIKYWFHTPPSIPLQIEEYLKDPTQPILEALDKDSSPKDDVWDSVSIISFPEKEQEDVLQTL

SEQ ID NO: 63454 - protein, 147 aa, Homo sapiens
MRKMGWREGEGLGKNKEGNKEPILVDFKTDRKGLVAVGERAQKRSGNFSAAMKDLSGKHPVSALMEICNKRRWQPPEFLLVHDSGPDHRKHFLFRVLINGSAYQPSFASPNKKHAKATAATVVLQAMGLVPKDLMANATCFRSASRR

SEQ ID NO: 63455 - protein, 61 aa, Homo sapiens
IDWFCGFKSKSLSKRSLRDLMEEEAVCLQMLEETRQVKVILNIGLFAVCSLGIFMFVYFSL

SEQ ID NO: 63456 - protein, 5 aa, Homo sapiens
TSASL

SEQ ID NO: 63457 - protein, 39 aa, Homo sapiens
MTGIWRYLNNAYARDEFTNTCPADQEIEHAYSDVAKRMK

SEQ ID NO: 63458 - protein, 369 aa, Homo sapiens
KNPWLWSEQQVCQWLLWATNEFSLVNVNLQRFGMNGQMLCNLGKERFLELAPDFVGDILWEHLEQMIKENQEKTEDQYEENSHLTSVPHWINSNTLGFGTEQAPYGMQTQNYPKGGLLDSMCPASTPSVLSSEQEFQMFPKSRLSSVSVTYCSVSQDFPGSNLNLLTNNSGTPKDHDSPENGADSFESSDSLLQSWNSQSSLLDVQRVPSFESFEDDCSQSLCLNKPTMSFKDYIQERSDPVEQGKPVIPAAVLAGFTGSGPIQLWQFLLELLSDKSCQSFISWTGDGWEFKLADPDEVARRWGKRKNKPKMNYEKLSRGLRYYYDKNIIHKTSGKRYVYRFVCDLQNLLGFTPEELHAILGVQPDTED

SEQ ID NO: 63459 - protein, 455 aa, Homo sapiens
LEPALASPAGAANFLAMVDNLQGDSGRGYYLEMLIGTPPQKLQILVDTGSSNFAVAGTPHSYIDTYFDTERSSTYRSKGFDVTVKYTQGSWTGFVGEDLVTIPKGFNTSFLVNIATIFESENFFLPGIKWNGILGLAYATLAKPSSSLETFFDSLVTQANIPNVFSMQMCGAGLPVAGSGTNGGSLVLGGIEPSLYKGDIWYTPIKEEWYYQIEILKLEIGGQSLNLDCREYNADKAIVDSGTTLLRLPQKVFDAVVEAVARASLIPEFSDGFWTGSQLACWTNSETPWSYFPKISIYLRDENSSRSFRITILPQLYIQPMMGAGLNYECYRFGISPSTNALVIGATVMEGFYVIFDRAQKRVGFAASPCAEIAGAAVSEISGPFSTEDVASNCVPAQSLSEPILWIVSYALMSVCGAILLVLIVLLLLPFRCQRRPRDPEVVNDESSLVRHRWK

SEQ ID NO: 63460 - protein, 25 aa, Homo sapiens
ILKERIYRLTQARHALCQFSSKEIH

SEQ ID NO: 63461 - protein, 41 aa, Homo sapiens
MSYKTLMNHDGYTDIKYRQLSRWATDASSNRVKDRTRSKLL

SEQ ID NO: 63462 - protein, 10 aa, Homo sapiens
LVLENSDSLQ

SEQ ID NO: 63463 - protein, 294 aa, Homo sapiens
VGNRAATFPLQVLGFEIDAVNSVQFSNHTGYAHWKGQVLNSDELQELYEGLRLNNMNKYDYVLTGYTRDKSFLAMVVDIVQELKQQNPRLVYVCDPVLGDKWDGEGSMYVPEDLLPVYKEKVVPLADIITPNQFEAELLSGRKIHSQEEALRVMDMLHSMGPDTVVITSSDLPSPQGSNYLIVLGSQRRRNPAGSVVMERIRMDIRKVDAVFVGTGDLFAAMLLAWTHKHPNNLKVACEKTVSTLHHVLQRTIQCAKAQAGEGVRPSPMQLELRMVQSKRDIEDPEIVVQATVL

SEQ ID NO: 63464 - protein, 17 aa, Homo sapiens
VRKLRKYIVARTQRAAD

SEQ ID NO: 63465 - protein, 312 aa, Homo sapiens
LEWWSCTECTLFTDQATVERFGKEHAVIILNHNFEIDFLCGWTMCERFGVLGSSKVLAKKELLYVPLIGWTWYFLEIVFCKRKWEEDRDTVVEGLRRLSDYPEYMWFLLYCEGTRFTETKHRVSMEVAAAKGLPVLKYHLLPRTKGFTTAVKCLRGTVAAVYDVTLNFRGNKNPSLLGILYGKKYEADMCVRRFPLEDIPLDEKEAAQWLHKLYQEKDALQEIYNQKGMFPGEQFKPARRPWTLLNFLSWATILLSPLFSFVLGVFASGSPLLILTFLGFVGAASFGVRRLIGVTEIEKGSSYGNQEFKKKE

SEQ ID NO: 63466 - protein, 258 aa, Homo sapiens
RLAAASAFTSLSPGGRTPSQRAALHLSVPRPAARVALVLSGCGVYDGTEIHEASAILVHLSRGGAEVQIFAPDVPQMHVIDHTKGQPSEGESRNVLTESARIARGKITDLANLSAANHDAAIFPGGFGAAKNLSTFAVDGKDCKVNKEVERVLKEFHQAGKPIGLCCIAPVLAAKVLRGVEVTVGHEQEEGGKWPYAGTAEAIKALGAKHCVKEVVEAHVDQKNKVVTTPAFMCETALHYIHDGIGAMVRKVLELTGK

SEQ ID NO: 63467 - protein, 585 aa, Homo sapiens
RTLSVNTDFTSDQADFPDTLFNGFETPDKAEPPFYVGSNGDDSFSSSGDLSLSASPVPASLAQPPLPVLPPFPPPSGKNPVMILNELRPGLKYDFLSESGESHAKSFVMSVVVDGQFFEGSGRNKKLAKARAAQSALAAIFNLHLDQTPSRQPIPSEGLQLHLPQVLADAVSRLVLGKFGDLTDNFSSPHARRKVLAGVVMTTGTDVKDAKVISVSTGTKCINGEYMSDRGLALNDCHAEIISRRSLLRFLYTQLELYLNNKDDQKRSIFQKSERGGFRLKENVQFHLYISTSPCGDARIFSPHEPILEGSRSYTQAGVQWCNHGSLQPRPPGLLSDPSTSTFQGAGTTEPADRHPNRKARGQLRTKIESGEGTIPVRSNASIQTWDGVLQGERLLTMSCSDKIARWNVVGIQGSLLSIFVEPIYFSSIILGSLYHGDHLSRAMYQRISNIEDLPPLYTLNKPLLSGISNAEARQPGKAPNFSVNWTVGDSAIEVINATTGKDELGRASRLCKHALYCRWMRVHGKVPSHLLRSKITKPNVYHESKLAAKEYQAAKARLFTAFIKAGLGAWVEKPTEQDQFSLTP

SEQ ID NO: 63468 - protein, 78 aa, Homo sapiens
KDVLRHPTWPQKSVWHGSDPNGRRLTESYCETWRTEAPSATGQASSLLGGRLLGQSAASCHHAYIVLCIENSFMTASK

SEQ ID NO: 63469 - protein, 24 aa, Homo sapiens
REYSQRSLWPSRTTLPPMRPSSVF

SEQ ID NO: 63470 - protein, 15 aa, Homo sapiens
INARLTSEVTGMGTL

SEQ ID NO: 63471 - protein, 23 aa, Homo sapiens
RTPWPQGRPRCLWTERRKGRAWS

SEQ ID NO: 63472 - protein, 165 aa, Homo sapiens
VTAIGIGDMFHEKHESENLYSIACDKPQQVRNMTLFSDLVAEKFIDDMEDVLCPDPQIVCPDLPCQTDAPWPGGEPPVTFLRTEEGPDATFPRTIPLIQQLLNATELTQDPAAYSQLVAVLVYTAERAKFATGVERQDWMELFIDTFKLVHRDIVGDPETALALC

SEQ ID NO: 63473 - protein, 4 aa, Homo sapiens
KMHT

SEQ ID NO: 63474 - protein, 317 aa, Homo sapiens
IELSMQPWNPGYSSEGATAQETYTCPKMIEMEQAEAQLAELDLLASMFPGENELIVNDQLAVAELKDCIEKKTMEGRSSKVYFTINMNLDVSDEKMAMFSLACILPFKYPAVLPEITVRSVLLSRSQQTQLNTDLTAFLQKHCHGDVCILNATEWVREHASGYVSRDTSSSPTTGSTVQSVDLIFTRLWIYSHHIYNKCKRKNILEWAKELSLSGFSMPGKPGVVCVEGPQSACEEFWSRLRKLNWKRILIRHREDIPFDGTNDETERQRKFSIFEEKVFSVNGARGNHMDFGQLYQFLNTKGCGDVFQMFFGVEGQ

SEQ ID NO: 63475 - protein, 25 aa, Homo sapiens
KDRSIAVWDMASATDITLRGVLVVH

SEQ ID NO: 63476 - protein, 5 aa, Homo sapiens
IADSK

SEQ ID NO: 63477 - protein, 148 aa, Homo sapiens
LDQLRGAVMIVYPMGLPPYDPIRMEFENKEDLSGTQAGLNVIKEAEAQLWWAAKELRRTKKLSDYVGKNEKTKIIAKIQQRGQGAPAREPIISSEEQKQLMLYYHRRQEELKRLEENDDDAYLNSPWADNTALKRHFHGVKDIKWRPR

SEQ ID NO: 63478 - protein, 38 aa, Homo sapiens
ICYGPHDNQRLFLEYGFVSVHNPHACVYVSRGWNQLCS

SEQ ID NO: 63479 - protein, 11 aa, Homo sapiens
MLRNLILPKRR

SEQ ID NO: 63480 - protein, 130 aa, Homo sapiens
VISTACSLEDKQCLERFRPPIARVIDVSNGKVHVAESCLEETGGLGVDIVLDAGVRLYSKDDEPAVKLQLLPHKHDIITLLGVGGHWVTTEENLQLDPPDSHCLFLKGATLAFLNDEVWNLSNVQQGKYL

SEQ ID NO: 63481 - protein, 130 aa, Homo sapiens
IVLDAGVRLYSKDDEPAVKLQLLPHKHDIITLLGVGGHWVTTEENLQLDPPDSHCLFLKGATLAFLNDEVWNLSNVQQGKYLCILKDVMEKLSTGVFRPQLDEPIPLYEAKVSMEAVQKNQGRKKQVVQF

SEQ ID NO: 63482 - protein, 99 aa, Homo sapiens
IARYLSAGPCRRAAQVLVQELEQYQLLPKRLDWEGNEHNRSYEELVLSNKHVAPDHLLQICQRIGPMLDKEIPPSISRVTSLLGAGRQSLLRTAKGTLI

SEQ ID NO: 63483 - protein, 49 aa, Homo sapiens
LFVPQESDTLFYHAPPLSAITFKRQFMCKLCHRTFKTAFSLWSHEQTHN

SEQ ID NO: 63484 - protein, 50 aa, Homo sapiens
MRQIRFRFDGQPINETDTPAQLEMEDEDTIDVFQQQTGGVPESSLAGHSF

SEQ ID NO: 63485 - protein, 12 aa, Homo sapiens
IVIPIIIGGFGN

SEQ ID NO: 63486 - protein, 675 aa, Homo sapiens
LDTKNYFKDLPKAHTAFEGALNGMTFYVGLQAEDGHWTGDYGGPLFLLPGLLITCHVARIPLPAGYREEIVRYLRSVQLPDGGWGLHIEDKSTVFGTALNYVSLRILGVGPDDPDLVRARNILHKKGGAVAIPSWGKFWLAVLNVYSWEGLNTLFPEMWLFPDWAPAHPSTLWCHCRQVYLPMSYCYAVRLSAAEDPLVQSLRQELYVEDFASIDWLAQRNNVAPDELYTPHSWLLRVVYALLNLYEHHHSAHLRQRAVQKLYEHIVADDRFTKSISIGPISKTINMLVRWYVDGPASTAFQEHVSRIPDYLWMGLDGMKMQGTNGSQIWDTAFAIQALLEAGGHHRPEFSSCLQKAHEFLRLSQVPDNPPDYQKYYRQMRKGGFSFSTLDCGWIVSDCTAEALKAVLLLQEKCPHVTEHIPRERLCDAVAVLLNMRNPDGGFATYETKRGGHLLELLNPSEVFGDIMIDYTYVECTSAVMQALKYFHKRFPEHRAAEIRETLTQGLEFCRRQQRADGSWEGSWGVCFTYGTWFGLEAFACMGQTYRDGTACAEVSRACDFLLSRQMADGGWGEDFESCEERRYLQSAQSQIHNTCWAMMGLMAVRHPDIEAQERGVRCLLEKQLPNGDWPQENIAGVFNKSCAISYTSYRNIFPIWALGRFSQLYPERALAGHP

SEQ ID NO: 63487 - protein, 821 aa, Homo sapiens
IAGFVPAGGGTSAPWRHRSHCFYRGTVDGSPRSLAVFDLCGGLDGFFAVKHARYTLKPLLRGPWAEEEKGRVYGDGSARILHVYTREGFSFEALPPRASCETPASTPEAHEHAPAHSNPSGRAALASQLLDQSALSPAGGSGPQTWWRRRRRSISRARQVELLLVADASMARLYGRGLQHYLLTLASIANRLYSHASIENHIRLAVVKVVVLGDKDKSLEVSKNAATTLKNFCKWQHQHNQLGDDHEEHYDAAILFTREDLCGHHSCDTLGMADVGTICSPERSCAVIEDDGLHAAFTVAHEIGHLLGLSHDDSKFCEETFGSTEDKRLMSSILTSIDASKPWSKCTSATITEFLDDGHGNCLLDLPRKQILGPEELPGQTYDATQQCNLTFGPEYSVCPGMDVCARLWCAVVRQGQMVCLTKKLPAVEGTPCGKGRICLQGKCVDKTKKKYYSTSSHGNWGSWGSWGQCSRSCGGGVQFAYRHCNNPAPRNNGRYCTGKRAIYRSCSLMPCPPNGKSFRHEQCEAKNGYQSDAKGVKTFVEWVPKYAGVLPADVCKLTCRAKGTGYYVVFSPKVTDGTECRLYSNSVCVRGKCVRTGCDGIIGSKLQYDKCGVCGGDNSSCTKIVGTFNKKSKGYTDVVRIPEGATHIKVRQFKAKDQTRFTAYLALKKKNGEYLINGKYMISTSETIIDINGTVMNYSGWSHRDDFLHGMGYSATKEILIVQILATDPTKPLDVRYSFFVPKKSTPKVNSVTSHGSNKVGSHTSQPQWVTGPWLACSRTCDTGWHTRTVQCQDGNRKLAKGCPLSQRPSAFKQCLLKKC

SEQ ID NO: 63488 - protein, 12 aa, Homo sapiens
IPGMQESCKSDV

SEQ ID NO: 63489 - protein, 85 aa, Homo sapiens
LEGSVSHKFLSLPMLVRQLWDSAVSHFFSLPFKKSLLAALILCLLVVRFDPASPSSLHFLYKLAQLFRWIRKAAFSRLYQLRIRD

SEQ ID NO: 63490 - protein, 32 aa, Homo sapiens
LVSWEDIQCTYGNPNYHWQETAYLLVYMKMEC

SEQ ID NO: 63491 - protein, 68 aa, Homo sapiens
VLQILEAADKTQALDMKRHCLHIIVHQFTKVSKLPTLRSLSQQLLLDIIDSLASHISDKQCAELGADI

SEQ ID NO: 63492 - protein, 203 aa, Homo sapiens
LALLVPGGGAAKTGAELVTCGSVLKLLNTHHRVRLHSHDIKYGSGSGQQSVTGVEASDDANSYWRIRGGSEGGCPRGSPVRCGQAVRLTHVLTGKNLHTHHFPSPLSNNQEVSAFGEDGEGDDLDLWTVRCSGQHWEREAAVRFQHVGTSVFLSVTGEQYGSPIRGQHEVHGMPSANTHNTWKAMEGIFIKPSVEPSAGHDEL

SEQ ID NO: 63493 - protein, 32 aa, Homo sapiens
TKRAAEEEPSTSATVPMSKKKPSRGFGDFSSW

SEQ ID NO: 63494 - protein, 122 aa, Homo sapiens [sequence omitted]

SEQ ID NO: 63495 - protein, 161 aa, Homo sapiens [sequence omitted]

SEQ ID NO: 63496 - protein, 33 aa, Homo sapiens
IILSILEQAAKKTLPTPSPEAYQAMLLRIARIP

SEQ ID NO: 63497 - protein, 78 aa, Homo sapiens
RWPWWHAGRKRWPHGSWWSRWNVQRWPWWRQRWLPWWPGHGPRWLWWRKTRWPWGAPWTFDGTDGRKKRRTWRTWKNG

SEQ ID NO: 63498 - protein, 13 aa, Homo sapiens
MVALRPVQQLQGG

SEQ ID NO: 63499 - protein, 351 aa, Homo sapiens
KLGYQQCLLGSAFSEDDGDCQGKPSMGQLALYLLALRANCEFVRGHKGDRLVSQLKWFLEDEKRAIGHDHKGHPHTSYYQYGLGILALCLHQKRVHDSVVDKLLYAVEPFHQGHHSVDTAAMAGLAFTCLKRSNFNPGRRQRITMAIRTVREEILKAQTPEGHFGNVYSTPLALQFLMTSPMRGAELGTACLKARVALLASLQDGAFQNALMISQLLPVLNHKTYIDLIFPDCLAPRVMLEPAAETIPQTQEIISVTLQVLSLLPPYRQSISVLAGSTVEDVLKKAHELGGFTYETQASLSGPYLTSVMGKAAGEREFWQLLRDPNTPLLQGIADYRPKDGETIELRLVSW

SEQ ID NO: 63500 - protein, 899 aa, Homo sapiens
LLEVTADLAERRRIRSAIRELQRQELEREEEALASKRFRAERQDNKENWLHSQQREAEQRAALARLAGQLESMNDVEELTALLRSAGEYEERKLIRAAIRRVRAQEIEAATLAGRLYSGRPNSGSREDSKGLAAHRLEQCEVPEREEQEQQAEVSKPTPTPEGTSQDVTTVTLLLRAPPGSTSSSPASPSSSPTPASPEPPLEPAEAQCLTAEVPGSPEPPPSPPKTTSPEPQESPTLPSTEGQVVNKLLSGPKETPAAQSPTRGPSDTKRADVAGPRPCQRSLSVLSPRQPAQNRESTPLASGPSSFQRAGSVRDRVHKFTSDSPMAARLQDGTPQAALSPLTPARLLGPSLTSTTPASSSSGSSSRGPSDTSSRFSKEQRGVAQPLAQLRSCPQEEGPRGRGLAARPLENRAGGPVARSEEPGAPLPVAVGTAEPGGSMKTTFTIEIKDGRGQASTGRVLLPTGNQRAELTLGLRAPPTLLSTSSGGKSTITRVNSPGTLARLGSVTHVTSFSHAPPSSRGGCSIKMEAEPAEPLAAAVEAANGAEQTRVNKAPEGRSPLSAEELMTIEDEGVLDKMLDQSTDFEERKLIRAALRELRQRKRDQRDKERERRLQEARGRPGEGRGNTATETTTRHSQRAADGSAVSTVTKTERLVHSNDGTRTARTTTVESSFVRRSENGSGSTMMQTKTFSSSSSSKKMGSIFDREDQASPRAGSLAALEKRQAEKKKELMKAQSLPKTSASQARKAMIEKLEKEGAAGSPGGPRAAVQRSTSFGVPNANSIKQMLLDWCRAKTRGYEHVDIQNFSSSWSDGMAFCALVHNFFPEAFDYGQLSPQNRRQNFEVAFSSAETHADCPQLLDTEDMVRLREPDWKCVYTYIQEFYRCLVQKGLVKTKKS

SEQ ID NO: 63501 - protein, 40 aa, Homo sapiens
RAGQHFRVQHLLGHSQGCRHQPVWPPLLLAVFTSVVGDQT

SEQ ID NO: 63502 - protein, 27 aa, Homo sapiens
IFPALVGRPIIRSTTKVGNIEQGSYGW

SEQ ID NO: 63503 - protein, 499 aa, Homo sapiens
VAAAVAAMDFLLGNPFSSPVGQRIEKATDGSLQSEDWALNMEICDIINETEEGPKDALRAVKKRIVGNKNFHEVMLALTVLETCVKNCGHRFHVLVASQDFVESVLVRTILPKNNPPTIVHDKVLNLIQSWADAFRSSPDLTGVVTIYEDLRRKGLEFPMTDLDMLSPIHTPQRTVFNSETQSGQDSVGTDSSQQEDSGQHAAPLPAPPILSGDTPIAPTPEQIGKLRSELEMVSGNVRVMSEMLTELVPTQAEPADLELLQELNRTCRAMQQRVLELIPQIANEQLTEELLIVNDNLNNVFLRHERFERFRTGQTTKAPSEAEPAADLIDMGPDPAATGNLSSQLAGMNLGSSSVRAGLQSLEASGRLEDEFDMFALTRGSSLADQRKEVKYEAPQATDGLAGALDARQQSTGAIPVTQACLMEDIEQWLSTDVGNDAEEPKGVTSEEFDKFLEERAKAADRLPNLSSPSAEGPPGPPSGPAPRKKTQEKDDDMLFAL

SEQ ID NO: 63504 - protein, 345 aa, Homo sapiens
RLMDNQAERESEAGVGLQRDEDDAPLCEDVELQDGDLSPEEKIFLREFPRLKEDLKGNIDKLRALADDIDKTHKKFTKANMVATSTAVISGVMSLLGLALAPATGGGSLLLSTAGQGLATAAGVTSIVSGTLERSKNKEAQARAEDILPTYDQEDREDEEEKADYVTAAGKIIYNLRNTLKYAKKNVRAFWKLRANPRLANATKRLLTTGQVSSRSRVQVQKAFAGTTLAMTKNARVLGGVMSAFSLGYDLATLSKEWKHLKEGARTKFAEELRAKALELERKLTELTQLYKSLQQKVRSRARGVGKDLTGTCETEAYWKELREHVWMWLWLCVCLCVCVYVQFT

SEQ ID NO: 63505 - protein, 460 aa, Homo sapiens
IPRYILGTGGPVWLLYRRITGGGIHTAQNSWILLSLCQGKIPWRSTLSQPLFSCSRRRPCSDMEGAALLRVSVLCIWMSALFLGVGVRAEEAGARVQQNVPSGTDTGDPQSKPLGDWAAGTMDPESSIFIEDAIKYFKEKVSTQNLLLLLTDNEAWNGFVAAAELPRNEADELRKALDNLARQMIMKDKNWHDKGQQYRNWFLKEFPRLKSELEDNIRRLRALADGVQKVHKGTTIANVVSGSLSISSGILTLVGMGLAPFTEGGSLVLLEPGMELGITAALTGITSSTMDYGKKWWTQAQAHDLVIKSLDKLKEVREFLGENISNFLSLAGNTYQLTRGIGKDIRALRRARANLQSVPHASASRPRVTEPISAESGEQVERVNEPSILEMSRGVKLTDVAPVSFFLVLDVVYLVYESKHLHEGAKSETAEELKKVAQELEEKLNILNNNYKILQADQEL

SEQ ID NO: 63506 - protein, 235 aa, Homo sapiens
LPARKFPRSLLGAGARLTGWTMNVFRILGDLSHLLAMILLLGKIWRSKCCKGISGKSQILFALVFTTRYLDLFTNFISIYNTVMKVVFLLCAYVTVYMIYGKFRKTFDSENDTFRLEFLLVPVIGLSFLENYSFTLLEILWTFSIYLESVAILPQLFMISKTGEAETITTHYLFFLGLYRALYLANWIRRYQTENFYDQIAVVSGVVQTIFYCDFFYLYVTKVLKGKKLSLPMPI

SEQ ID NO: 63507 - protein, 58 aa, Homo sapiens
VDRREVQRLRRRNQQLEEENNLLRLKVDILLDMLSESTAESHLMEKELDELRISRKRK

SEQ ID NO: 63508 - protein, 153 aa, Homo sapiens
VFGSIVNEGYLNSASEGEEFCIYNRNPNACSYGVAVGVLAFLTCLLYLALDVYFPQISSVKDRKKAVLSDIGVSAFWAFLWFVGFCYLANQWQVSKPKDNPLNEGTDAARAAIAFSFFSIFTWSLTAALAVRRFKDLSFQEEYSTLFPASAQP

SEQ ID NO: 63509 - protein, 28 aa, Homo sapiens
TLGHLRSHLRQSLLCTWGYRFRAFFTPE

SEQ ID NO: 63510 - protein, 15 aa, Homo sapiens
VNVYCLVMLHNVHFL

SEQ ID NO: 63511 - protein, 62 aa, Homo sapiens
VLSLYRALLRQGRQLRYTDRDFYFASIRREFRKNQKLEDAEARERQLEKGLVFLNGKLGRII

SEQ ID NO: 63512 - protein, 358 aa, Homo sapiens
IPAKHRNMTEMSFLSSEVLVGDLMSPFDQSGLGAEESLGLLDDYLEVAKHFKPHGFSSDKAKAGSSEWLAVDGLVSPSNNSKEDAFSGTDWMLEKMDLKEFDLDALLGIDDLETMPDDLLTTLDDTCDLFAPLVQETNKQPPQTVNPIGHLPESLTKPDQVAPFTFLQPLPLSPGVLSSTPDHSFSLELGSEVDITEGDRKPDYTAYVAMIPQCIKEEDTPSDNDSGICMSPESYLGSPQHSPSTRGSPNRSLPSPGVLCGSARPKPYDPPGEKMVAAKVKGEKLDKKLKKMEQNKTAATRYRQKKRAEQEALTGECKELEKKNEALKERADSLAKEIQYLKDLIEEVRKARGKKRVP

SEQ ID NO: 63513 - protein, 452 aa, Homo sapiens
RYKFRTWRQLWLWLAEAEQTLGLPITDEQIQEMKSNLENIDFKMAAEEEKRLRHDVMAHVHTFGHCCPKAAGIIHLGATSCYVGDNTDLIILRNALDLLLPKLARVISRLADFAKERASLPTLGFTHFQPAQLTTVGKRCCLWIQDLCMDLQNLKRVRDDLRFRGVKGTTGTQASFLQLFEGDDHKVEQLDKMVTEKAGFKRAFIITGQTYTRKVDIEVLSVLASLGASVHKICTDIRLLANLKEMEEPFEKQQIGSSAMPYKRNPMRSERCCSLARHLMTLVMDPLQTASVQWFERTLDDSANRRICLAEAFLTADTILNTLQNISEGLVVYPKVIERRIRQELPFMATENIIMAMVKAGGSRQDCHEKIRVLSQQAASVVKQEGGDNDLIERIQVDAYFSPIHSQLDHLLDPSSFTGRASQQVQRFLEEEVYPLLKPYESVMKVKAELCL

SEQ ID NO: 63514 - protein, 6 aa, Homo sapiens
MTSTSV

SEQ ID NO: 63515 - protein, 85 aa, Homo sapiens
VKKWNAVALWAWDIVVDNCAICRNHIMDLCIECQANQASATSEECTVAWGVCNHAFHFHCISRWLKTRQVCPLDNREWEFQKYGH

SEQ ID NO: 63516 - protein, 13 aa, Homo sapiens
LNSNLSQSTLDIH

SEQ ID NO: 63517 - protein, 348 aa, Homo sapiens
KDESFLGKLGGTLARKRRAREVSDLQEEGKNAINSPMSPALVDVHPEDTQLEENEERTMIDPTSKEDPKFKELVKVLLDWINDVLVEERIIVKQLEEDLYDGQVLQKLLEKLAGCKLNVAEVTQSEIGQKQKLQTVLEAVHDLLRPRGWALRWSVDSIHGKNLVAILHLLVSLAMHFRAPIRLPEHVTVQVVVVRKREGLLHSSHISEELTTTTEMMMGRFERDAFDTLFDHAPDKLSVVKKSLITFVNKHLNKLNLEVTELETQFADGVYLVLLMGLLEDYFVPLHHFYLTPESFDQKVHNVSFAFELMLDGGLKKPKARPEDVVNLDLKSTLRVLYNLFTKYKNVE

SEQ ID NO: 63518 - protein, 472 aa, Homo sapiens
RFENMAKRNAEKELTDRNWDQEDEAEEVGTFSMASEEVLKNRAIKKAKRRNVGFESDTGGAFKGFKGLVVPSGGGRFSGFGSGAGGKPLEGLSNGNNITSAPPFASAKAAADPKVAFGSLAANGPTTLVDKVSNPKTNGDSQQPSSSGLASSKACVGNAYHKQLAALNCSVRDWIVKHVNTNPLCDLTPIFKDYEKYLANIEQQHGNSGRNSESESNKVAAETQSPSLFGSTKLQQESTFLFHGNKTEDTPDKKMEVASEKKTDPSSLGATSASFNFGKKVDSSVLGSLSSVPLTGFSFSPGNSSLFGKDTTQSKPVSSPFPTKPLEGQAEGDSGECKGGDEEENDEPPKVVVTEVKEEDAFYSKKCKLFYKKDNEFKEKGIGTLHLKPTANQKTQLLVRADTNLGNILLNVLIPPNMPCTRTGKNNVLIVCVPNPPIDEKNATMPVTMLIRVKTSEDADELHKILLEKKDA

SEQ ID NO: 63519 - protein, 32 aa, Homo sapiens
LIHAALNCTSSVHKNVARGKVSLGHPGWNAVV

SEQ ID NO: 63520 - protein, 184 aa, Homo sapiens
ICEYIEAEEVDTVDVSGVPAEVLCNIEADTYWCMSKLLDGIQDNYTFAQPGIQMKVKMLEELVSRIDEQVHRHLDQHEVRYLQFAFRWMNNLLMREVPLRCTIRLWDTYQSEPDGFSHFHLYVCAAFLVRWRKEILEEKDFQELLLFLQNLPTAHWDDEDISLLLAEAYRLKFAFADAPNHYKK

SEQ ID NO: 63521 - protein, 8 aa, Homo sapiens
MSTWISVL

SEQ ID NO: 63522 - protein, 21 aa, Homo sapiens
MEHFEKLIFLKVNLPLIYFQY

SEQ ID NO: 63523 - protein, 339 aa, Homo sapiens
LLLLPPAPEAAKKPTPCHRCRGLVDKFNQGMVDTAKKNFGGGNTAWEEKTLSKYESSEIRLLEILEGLCESSDFECNQMLEAQEEHLEAWWLQLKSEYPDLFEWFCVKTLKVCCSPGTYGPDCLACQGGSQRPCSGNGHCSGDGSRQGDGSCRCHMGYQGPLCTDCMDGYFSSLRNETHSICTACDESCKTCSGLTNRDCGECEVGWVLDEGACVDVDECAAEPPPCSAAQFCKNANGSYTCEECDSSCVGCTGEGPGNCKECISGYAREHGQCADVDECSLAEKTCVRKNENCYNTPGSYVCVCPDGFEETEDACVPPAEAEATEGESPTQLPSREDL

SEQ ID NO: 63524 - protein, 7 aa, Homo sapiens
LSTFVIN

SEQ ID NO: 63525 - protein, 783 aa, Homo sapiens
VHKMAPYSLLVTRLQKALGVRQYHVASVLCQRAKVAMSHFEPNEYIHYDLLEKNINIVRKRLNRPLTLSEKIVYGHLDDPASQEIERGKSYLRLRPDRVAMQDATAQMAMLQFISSGLSKVAVPSTIHCDHLIEAQVGGEKDLRRAKDINQEVYNFLATAGAKYGVGFWKPGSGIIHQIILENYAYPGVLLIGTDSHTPNGGGLGGICIGVGGADAVDVMAGIPWELKCPKVIGVKLTGSLSGWSSPKDVILKVAGILTVKGGTGAIVEYHGPGVDSISCTGMATICNMGAEIGATTSVFPYNHRMKKYLSKTGREDIANLADEFKDHLVPDPGCHYDQLIEINLSELKPHINGPFTPDLAHPVAEVGKVAEKEGWPLDIRVGLIGSCTNSSYEDMGRSAAVAKQALAHGLKCKSQFTITPGSEQIRATIERDGYAQILRDLGGIVLANACGPCIGQWDRKDIKKGEKNTIVTSYNRNFTGRNDANPETHAFVTSPEIVTALAIAGTLKFNPETDYLTGTDGKKFRLEAPDADELPKGEFDPGQDTYQHPPKDSSGQHVDVSPTSQRLQLLEPFDKWDGKDLEDLQILIKVKGKCTTDHISAAGPWLKFRGHLDNISNNLLIGAINIENGKANSVRNAVTQEFGPVPDTARYYKKHGIRWVVIGDENYGEGSSREHAALEPRHLGGRAIITKSFARIHETNLKKQGLLPLTFADPADYNKIHPVDKLTIQGLKDFTPGKPLKCIIKHPNGTQETILLNHTFNETQIEWFRAGSALNRMKELQQ

SEQ ID NO: 63526 - protein, 63 aa, Homo sapiens
VCTGVYNPRNPQSTEPVLGGGEPPFHGHRDLCFSPGLMEASHVVNDVNEAVQLVFRKEGWALE

SEQ ID NO: 63527 - protein, 44 aa, Homo sapiens
MNLLELIRKLQQRGCRAGNAALGLGGPWQSPAAQCDQKGSPVPP

SEQ ID NO: 63528 - protein, 472 aa, Homo sapiens
KEAVDPRQGRARGGDPSHFHAVNVAQPVRFSSFLGKCPTGWHHYEGTASCYRVYLSGENYWDAAQTCQRLNGSLATFSTDQELRFVLAQEWDQPERSFGWKDQRKLWVGYQYVITGRNRSLEGRWEVAFKGSSEVFLPPDPIFASAMSENDNVFCAQLQCFHFPTLRHHDLHSWHAESCYEKSSFLCKRSQTCVDIKDNVVDEGFYFTPKGDDPCLSCTCHGGEPEMCVAALCERPQGCQQYRKDPKECCKFMCLDPDGNSLFDSMASGMRLVVSCISSFLILSLLLFMVHRLRQRRRERIESLIGANLHHFNLGRRIPGFDYGPDGFGTGLTPLHLSDDGEGGTFHFHDPPPPYTAYKYPDIGQPDDPPPPYEASIHPDSVFYDPADDDAFEPVEVSLPAPGDGGSEGALLRRLEQPLPTAGASLADLEDSADSSSALLVPPDPAQSGSTPAAEALPGGGRHSRSSLNTVV

SEQ ID NO: 63529 - protein, 18 aa, Homo sapiens
LVSWEDIQCTYGNPNYHW

SEQ ID NO: 63530 - protein, 116 aa, Homo sapiens
VEAFLASLSNRLYISQESDKDAHLIPDHTIRALGHIAVALRDTPKVMEPILQILQQKFCQPPSPLDVLIIDQLGCLVITGNQYIYQEVWNLFQQISVKASSVVYSATKDYKDHGYR

SEQ ID NO: 63531 - protein, 11 aa, Homo sapiens
RVSWRPFWPGL

SEQ ID NO: 63532 - protein, 106 aa, Homo sapiens
KDIQAHLAQGHVAIVLVNSGVLHCDLCSSPVKYCCFTPSGHHCFCRTPDYQGHFIVLRGYNRATGCIFYNNPAYADRMCSTSISNFEEARTSYGTDEDILFVYLDS

SEQ ID NO: 63533 - protein, 92 aa, Homo sapiens
TDQVIKPVNLEALSKWTGHIPGDVVRDMAQIAPMLAQLGYDPYANPPNYGNPDPFVINNTQRVLKGDYKTPANLKGYFQVNQNSTSSHLGSS

SEQ ID NO: 63534 - protein, 33 aa, Homo sapiens; identical to SEQ ID NO: 63496

SEQ ID NO: 63535 - protein, 605 aa, Homo sapiens
IRPSVCPPAAPLLLGCRAMARGYGATVSLVLLGLGLALAVIVLAVVLSRHQAPCGPQAFAHAAVAADSKVCSDIGRAILQQQGSPVDATIAALVCTSVVNPQSMGLGGGVIFTIYNVTTGKVEVINARETVPASHAPSLLDQCAQALPLGTGAQWIGVPGELRGYAEAHRRHGRLPWAQLFQPTIALLRGGHVVAPVLSRFLHNSILRPSLQASTLRQLFFNGTEPLRPQDPLPWPALATTLETVATEGVEVFYTGRLGQMLVEDIAKEGSQLTLQDLAKFQPEVVDALEVPLGDYTLYSPPPPAGGAILSFILNVLRGFNFSTESMARPEGRVNVYHHLVETLKFAKGQRWRLGDPRSHPKLQNASRDLLGETLAQLIRQQIDGRGDHQLSHYSLAEAWGHGTGTSHVSVLGEDGSAVAATSTINTPFGAMVYSPRTGIILNNELLDLCERCPRGSGTTPSPAVSGDRVGGAPGRCWPPVPGERSPSSMVPSILINKAQGSKLVIGGAGGELIISAVAQAIMSKLWLGFDLRAAIAAPILHVNSKGCVEYEPNFSQEVQRGLQDRGQNQTQRPFFLNVVQAVSQEGACVYAVSDLRKSGEAAGY

SEQ ID NO: 63536 - protein, 119 aa, Homo sapiens
VAQAIMSKLWLGFDLRAAIAAPILHVNSKGCVEYEPNFSQKQDLAALPRLVSNSWPQVILLPQPPKLLALQEVQRGLQDRGQNQTQRPFFLNVVQAVSQEGACVYAVSDLRKSGEAAGY

SEQ ID NO: 63537 - protein, 16 aa, Homo sapiens
RTSPALICTCNSMIQI

SEQ ID NO: 63538 - protein, 339 aa, Homo sapiens
VYAPGLDIESSLKQLAERRTDIFGVEETAIGKKIGEEEIQKPEEKVTWDGHSGSMARTQQAAQANITLQEQIEAIHKAKGLVPEDDTKEKIGPSKPNEIPQQPPPPSSATNIPSSAPPITSVPRPPTMPPPVRTTVVSAVPVMPRPPMASVVRLPPGSVIAPMPPIIHAPRINVVPMPPSAPPIMAPRPPPMIVPTAFVPAPPVAPVPAPAPMPPVHPPPPMEDEPTSKKLKTEDSLMPEEEFLRRNKGPVSIKVQVPNMQDKTEWKLNGQVLVFTLPLTDQVSVIKVKIHEATGMPAGKQKLQYEGIFIKDSNSLAYYNMANGAVIHLALKERGGRKK

SEQ ID NO: 63539 - protein, 10 aa, Homo sapiens
LMFHVSALQI

SEQ ID NO: 63540 - protein, 40 aa, Homo sapiens
ITLRRHLGLRSWACLRILASRVAKTWLISFLTEVGKFPRW

SEQ ID NO: 63541 - protein, 151 aa, Homo sapiens
IICGRVPMSLLLPPLALLLLLAALVAPATAATAYRPDWNRLSGLTRARVETCGGQLNRLKEVKAFVTQDIPFYHNLVMKHLPGADPELVLLGRRYEELERIPLSEMTREEINALVQELGFYRKAAPDAQVPPEYVWAPAKPPEETSDHADL

SEQ ID NO: 63542 - protein, 29 aa, Homo sapiens
LLVGGQVGTETLVTHGKGGPAHSEGPGPP

SEQ ID NO: 63543 - protein, 903 aa, Homo sapiens
VIASMTVGKDVSALFPDVVNCMQTDNLELKKLVYLYLMNYAKSQPDMAIMAVNTFVKDCEDPNPLIRALAVRTMGCIRVDKITEYLCEPLRKCLKDEDPYVRKTAAVCVAKLHDINAQLVEDQGFLDTLKDLISDSNPMVVANAVAALSEIAESHPSSNLLDLNPQSINKLLTALNECTEWGQIFILDCLANYMPKDDREAQSICERVTPRLSHANSAVVLSAVKVLMKFMEMLSKDLDYYGTLLKKLAPPLVTLLSAEPELQYVALRNINLIVQKRPEILKHEMKVFFVKYNDPIYVKLEKLDIMIRLASQANIAQVLAELKEYATEVDVDFVRKAVRAIGRCAIKVEQSAERCVSTLLDLIQTKVNYVVQEAIVVIKDIFRKYPNKYESVIATLCENLDSLDEPEARAAMIWIVGEYAERIDNADELLESFLEGFHDESTQVQLQLLTAIVKLFLKKPTETQELVQQVLSLATQDSDNPDLRDRGYIYWRLLSTDPVAAKEVVLAEKPLISEETDLIEPTLLDELICYIGTLASVYHKPPSAFVEGGRGVVHKSLPPRTASSESAESPETAPTGAPPGEQPDVIPAQGDLLGDLLNLDLGPPVSGPPLATSSVQMGAVDLLGGGLDSLIGGTNFVAPPTAAVPANLGAPIGSGLSDLFDLTSGVGTLSGSYVAPKAVWLPAMKAKGLEISGTFTRQVGSISMDLQLTNKALQVMTDFAIQFNRNSFGLAPAAPLQVHAPLSPNQTVEISLPLSTVGSVMKMEPLNNLQVAVKNNIDVFYFSTLYPLHILFVEDGKMDRQMFLATWKDIPNENEAQFQIRDCPLNAEAASSKLQSSNIFTVAKRNVEGQDMLYQSLKLTNGIWVLAELRIQPGNPSCTLSLKCRAPEVSQHVYQAYETILKN

SEQ ID NO: 63544 - protein, 248 aa, Homo sapiens
KDNEGSWFRSLFVHKVDPRKDAHSTLLSKKETSNLYKIQFHNVKPEYLDAYNSLTEAVLPKLHLDEDYPCSLVGNWNTWYGEQDQAVHLWRFSGGYPALMDCMNKLKNNKEYLEFRRERSQMLLSRRNQLLLEFSFWNEPQPRMGPNIYELRTYKLKPGTMIEWGNNWARAIKYRQENQEAVGGFFSQIGELYVVHHLWAYKDLQSREETRNAAWRKRGWDENVYYTVPLVRHMESRIMIPLKISPLQ

SEQ ID NO: 63545 - protein, 564 aa, Homo sapiens
KKLQLSLADFRRLCILKGIYPHEPKHKKKVNKGSTAARTFYLIKDIRFLLHEPIVNKFREYKVFVRKLRKAYGKSEWNTVERLKDNKPNYKLDHIIKERYPTFIDALRDLDDALSMCFLFSTFPRTGKCHVQTIQLCRRLTVEFMHYIIAARALRKVFLSIKGIYYQAEVLGQPIVWITPYAFSHDHPTDVDYRVMATFTEFYTTLLGFVNFRLYQLLNLHYPPKLEGQAQAEAKAGEGTYALDSESCMEKLAALSASLARVVVPATEEEAEVDEFPTDGEMSAQEEDRRKELEAQEKHKKLFEGLKFFLNREVPREALAFIIRSFGGEVSWDKSLCIGATYDVTDSRITHQIVDRPGQQTSVIGRCYVQPQWVFDSVNARLLLPVAEYFSGVQLPPHLSPFVTEKEGDYVPPEKLKLLALQRGEDPGNLNESEEEEEEDDNNEGDGDEEGENEEEEEDAEAGSEKEEEARLAALEEQRMEGKKPRVMAGTLKLEDKQRLAQEEESEAKRLAIMMMKKREKYLYQKIMFGKRRKIREANKLAEKRKAHDEAVRSEKKAKKARPE

SEQ ID NO: 63546 - protein, 24 aa, Homo sapiens
LPKASPSGYFLSEPAHPPEGESFV

SEQ ID NO: 63547 - protein, 12 aa, Homo sapiens
IYEKEVRLMIPL

SEQ ID NO: 63548 - protein, 49 aa, Homo sapiens
LLTPLRSRSWPRSSRPGWCPLCVWTSTMQTSSSLKFPGSPINITLGFMV

SEQ ID NO: 63549 - protein, 172 aa, Homo sapiens
ISYTTNAFPGEYIPTVFDNYSANVMVDSKPVNLGLWDTAGQEDYDRLRPLSYPQTDVFLICFSLVSPASYENVRAKWFPEVRHHCPSTPIILVGTKLDLRDDKDTIEKLKEKKLAPITYPQGLALAKEIDSVKYLECSALTQRGLKTVFDEAIRAVLCPQPTRQQKRACSLL

SEQ ID NO: 63550 - protein, 237 aa, Homo sapiens
IEECRDTASPYEMMLPSEAGFAEYVGRLGISNHTHVVVYDGEHLGSFYAPRVWWMFRVFGHRTVSVLNGGFRNWLKEGHPVTSEPSRPEPAVFKATLDRSLLKTYEQVLENLESKRFQLVDSRSQGRFLGTEPEPDAVGLDSGHIRGAVNMPFMDFLTEDGFEKGPEELRALFQTKKVDLSQPLIATCRKGVTACHVALAAYLCGKPDVAVYDGSWSEWFRRAPPESRVSQGKSEKA

SEQ ID NO: 63551 - protein, 61 aa, Homo sapiens
ILYAQPSERSIMQSQSVMLDLAYGDRVWVRLFKRQRENAIYSNDFDTYITFSGHLIKAEDD

SEQ ID NO: 63552 - protein, 324 aa, Homo sapiens
VPHTQDYAGQTGEHNLTLYGSTQAHGEQSSNSPSTQNGSLTQTEGGAQTDGQQSQTQSSENSESKSTPKRLHVSNIPFRFRDPDLRQMFGQFGKILDVEIIFNERGSKGFGFVTFENSADADRAREKLHGTVVEGRKIEVNNATARVMTNKKMVTPYANGWKLSPVVGAVYGPELYAASSFQADVSLGNDAAVPLSGRGGINTYIPLIIPGFPYPTAATTAAAFRGAHLRGRGRTVYGAVRAVPPTAIPAYPGVDMQPTDMHSLLLQPQPPLLQPLQPLTVTVMAGCTQPTPTMPLPLPLAMELALWRVYTEVATADLPPTEVT

SEQ ID NO: 63553 - protein, 46 aa, Homo sapiens
MQMHGWRWDPHSSEQLDLAHTLSREASLDKRTLPWCESEGRGSWSK

SEQ ID NO: 63554 - protein, 442 aa, Homo sapiens
LPRIVRRRRHRHGLLRLACHFLQRFPSGSLLLPGTMTVRGDVLAPDPASPTTAAASPSVSVIPEGSPTAMEQPVFLMTTAAQAISGFFVWTALLITCHQIYMHLRCYSCPNEQRYIVRILFIVPIYAFDSWLSLLFFTNDQYYVYFGTVRDCYEALVIYNFLSLCYEYLGGESSIMSEIRGKPIESSCMYGTCCLWGKTYSIGFLRFCKQATLQFCVVKPLMAVSTVVLQAFGKYRDGDFDVTSGYLYVTIIYNISVSLALYALFLFYFATRELLSPYSPVLKFFMVKSVIFLSFWQGMLLAILEKCGAIPKIHSARVSVGEGTVAAGYQDFIICVEMFFAALALRHAFTYKVYADKRLDAQGRCAPMKSISSSLKETMNPHDIVQDAIHNFSPAYQQYTQQSTLEPGPTWRGGAHGLSRSHSLSGARDNEKTLLLSSDDEF

SEQ ID NO: 63555 - protein, 751 aa, Homo sapiens
VSPPSAGQRLRGVPVWAAGAFRFSSGEESTSHLIMSRRSQRLTRYSQGDDDGSSSSGGSSVAGSQSTLFKDSPLRTLKRKSSNMKRLSPAPQLGPSSDAHTSYYSESLVHESWFPPRSSLEELHGDANWGEDLRVRRRRGTGGSESSRASGLVGRKATEDFLGSSSGYSSEDDYVGYSDVDQQSSSSRLRSAVSRAGSLLWMVATSPGRLFRLLYWWAGTTWYRLTTAASLLDVFVLTRRFSSLKTFLWFLLPLLLLTCLTYGAWYFYPYGLQTFHPALVSWWAAKDSRRPDEGWEARDSSPHFQAEQRVMSRVHSLERRLEALAAEFSSNWQKEAMRLERLELRQGAPGQGGGGGLSHEDTLALLEGLVSRREAALKEDFRRETAARIQEELSALRAEHQQDSEDLFKKIVRASQESEARIQQLKSEWQSMTQESFQESSVKELRRLEDQLAGLQQELAALALKQSSVAEEVGLLPQQIQAVRDDVESQFPAWISQFLARGGGGRVGLLQREEMQAQLRELESKILTHVAEMQGKSAREAAASLSLTLQKEGVIGVTEEQVHHIVKQALQRYSEDRIGLADYALESGGASVISTRCSETYETKTALLSLFGIPLWYHSQSPRVILQPDVHPGNCWAFQGPQGFAVVRLSARIRPTAVTLEHVPKALSPNSTISSAPKDFAIFGFDEDLQQEGTLLGKFTYDQDGEPIQTFHFQAPTMATYQVVELRILTNWGHPEYTCIYRFRVHGEPAH

SEQ ID NO: 63556 - protein, 560 aa, Homo sapiens
KSLKLNTAEDAKDVIKEIEDFDSLEALRLEGNTVGVEAARVIAKALEKKSELKRCHWSDMFTGRLRTEIPPALISLGEGLITAGAQLVELDLSDNAFGPDGVQGFEALLKSSACFTLQELKLNNCGMGIGGGKILAAALTECHRKSSAQGKPLALKVFVAGRNRLENDGATALAEAFRVIGTLEEVHMPQNGINHPGITALAQAFAVNPLLRVINLNDNTFTEKGAVAMAETLKTLRQVEVINFGDCLVRSKGAVAIADAIRGGLPKLKELNLSFCEIKRDAALAVAEAMADKAELEKLDLNGNTLGEEGCEQLQEVLEGFNMAKVLASLSDDEDEEEEEEGEEEEEEAEEEEEEDEEEEEEEEEEEEEEPQQRGQGEKSATPSRKILDPNTGEPAPVLSSPPPADVSTFLAFPSPEKLLRLGPKSSVLIAQQTDTSDPEKVVSAFLKVSSVFKDEATVRMAVQDAVDALMQKAFNSSSFNSNTFLTRLLVHMGLLKSEDKVKAIANLYGPLMALNHMVQQDYFPKALAPLLLAFVTKPNSALESCSFARHSLLQTLYKV

SEQ ID NO: 63557 - protein, 190 aa, Homo sapiens
TGRSKPLPGARGPSWPPSPRVPMEPPNLYPVKLYVYDLSKGLARRLSPIMLGKQLEGIWHTSIVVHKDEFFFGSGGISSCPPGGTLLGPPDSVVDVGSTEVTEEIFLEYLSSLGESLFRGEAYNLFEHNCNTFSNEVAQFLTGRKIPSYITDLPSEVLSTPFGQALRPLLDSIQIQPPGGSSVGRPNGQS

SEQ ID NO: 63558 - protein, 422 aa, Homo sapiens
LVRSSEAESRAMLLKTVLLLGHVAQVLMLDNGLLQTPPMGWLAWERFRCNINCDEDPKNCISEQLFMEMADRMAQDGWRDMGYTYLNIDDCWIGGRDASGRLMPDPKRFPHGIPFLADYVHSLGLKLGIYADMGNFTCMGYPGTTLDKVVQDAQTFAEWKVDMLKLDGCFSTPEERAQGYPKMAAALNATGRPIAFSCSWPAYEGGLPPRVNYSLLADICNLWRNYDDIQDSWWSVLSILNWFVEHQDILQPVAGPGHWNDPDMLLIGNFGLSLEQSRAQMALWTVLAAPLLMSTDLRTISAQNMDILQNPLMIKINQDPLGIQGRRIHKEKSLIEVYMRPLSNKASALVFFSCRTDMPYRYHSSLGQLNFTGSVIYEAQDVYSGDIISGLRDETNFTVIINPSGVVMWYLYPIKNLEMSQQ

SEQ ID NO: 63559 - protein, 50 aa, Homo sapiens
IDKLEKVAVRGGDKKLKPKYDIMCKVKSWVIDQKNLFASIMIGMTKRLKC

SEQ ID NO: 63560 - protein, 180 aa, Homo sapiens
IEVLNKHLFLTSKPMVYLVNLSEKDYIRKKNKWLIKIKEWVDKYDPGALVIPFSGALELKLQELSAEERQQYLEANMTQSALPKIIKAGFAALQLKYFFTAGPDEVRARTIRKGTKAPQAAGKIHTDFEKGFIMAEVMKYEDFKEEGSENAVKAAGKYRQQGRNYIVEDGDIIFFKFNTP

SEQ ID NO: 63561 - protein, 155 aa, Homo sapiens
VFWLRFSNRAFALNDLDDYEKHFTVMNYDPDVVLKQVHCEEFIPEFEKQYPEFPWTDVQAEIFRAFTELFQVACAKPPPLGLCDYPSSRAMYAVDLMLKWDNGPDGRRVMQPQILEVNFNPDCERACRYHPTFFNDVFSTLFLDQPGGCHVTCLV

SEQ ID NO: 63562 - protein, 161 aa, Homo sapiens
ITPPISSITSNGTRPMTTPPTSLPEPFSGDPGRLAGFLMQMDRFMIFQASRFPGEAERVAFLVSRLTGEAEKWAIPHMQPDSPLRNNYQGFLAELRRTYKSPLRHARRAQIRKTSASNRAVRERQMLCRQLASAGTGPCPVHPASNGTSPAPALPARARNL

SEQ ID NO: 63563 - protein, 55 aa, Homo sapiens
MEAAPGLLALYRDTHRVLASVVGTTGVSLNLTQLPPFNVHLQTKLVLLERLPRPS

SEQ ID NO: 63564 - protein, 439 aa, Homo sapiens
KMADISLDELIRKRGAAAKGRLNARPGVGGVRSRVGIQQGLLSQSTRTATFQQRFDARQKIGLSDARLKLGVKDAREKLLQKDARFRIKGKVQDAREMLNSRKQQTTVPQKPRQVADAREKISLKRSSPAAFINPPIGTVTPALKLTKTIQRMHVDPVGWILTTECFQVPQQKAMAPLHPHPAGMRINVVNNHQAKQNLYDLDEDDDGIASVPTKQMKFAASGGFLHHMAGLSSSKLSMSKALPLTKVVQNDAYTAPALPSSIRTKALTNMSRTLVNKEEPPKELPAAEPVLSPLEGTKMTVNNLHPRVTEEDIVELFCVCGALKRARLVHPGVAEVVFVKKDDAITAYKKYNNRCLDGQPMKCNLHMNGNVITSDQPILLRLSDSPSMKKESELPRRVNSASSSNPPAEVDPDTILKALFKSSGASVTTQPTEFKIKL

SEQ ID NO: 63565 - protein, 21 aa, Homo sapiens
VGCQDPHLSAMGCPGWSVTSQ

SEQ ID NO: 63566 - protein, 318 aa, Homo sapiens
IMIYWHVVGEPKEKGQLYNLPAEIPCPTLTPPTPPSHGPTPGNIFFLETSDRTNPNFLFMCSVESAARTHPESHVLVLMKGLPGGNASLPRHLGISLLSCFPNVQMLPLDLRELFRDTPLADWYAAVQGRWEPYLLPVLSDASRIALMWKFGGIYLDTDFIVLKNLRNLTNVLGTQSRYVLNGAFLAFERRHEFMALCMRDFVDHYNGWIWGHQGPQLLTRVFKKWCSIRSLAESRACRGVTTLPPEAFYPIPWQDWKKYFEDINPEELPRLLSATYAVHVWNKKSQGTRFEATSRALLAQLHARYCPTTHEAMKMYL

SEQ ID NO: 63567 - protein, 479 aa, Homo sapiens
ITYGVFLCIDCSGSHRSLGVHLSFIRSTELDSNWSWFQLRCMQVGGNASASSFFHQHGCSTNDTNAKYNSRAAQLYREKIKSLASQATRKHGTDLWLDSCVVPPLSPPPKEEDFFASHVSPEVSDTAWASAIAEPSSLTSRPVETTLENNEGGQEQGPSVEGLNVPTKATLEVSSIIKKKPNQAKKGLGAKKGSLGAQKLANTCFNEIEKQAQAADKMKEQEDLAKVVSKEESIVSSLRLAYKDLEIQMKKDEKMNISGKKNVDSDRLGMGFGNCRSVISHSVTSDMQTIEQESPIMAKPRKKYNDDSDDSYFTSSSSYFDEPVELRSSSFSSWDDSSDSYWKKETSKDTETVLKTTGYSDRPTARRKPDYEPVENTDEAQKKFGNVKAISSDMYFGRQSQADYETRARLERLSASSSISSADLFEEPRKQPAGNYSLSSVLPNAPDMAQFKQGVRSVAGKLSVFANGVVTSIQDRYGS

SEQ ID NO: 63568 - protein, 15 aa, Homo sapiens
LSSPTSTPSATTAPA

SEQ ID NO: 63569 - protein, 32 aa, Homo sapiens
VKTTRRVYNFCAQDVPSAQQWVDRIQSCLSDA

SEQ ID NO: 63570 - protein, 18 aa, Homo sapiens
VLVTMVKLAAKCILADTR

SEQ ID NO: 63571 - protein, 1949 aa, Homo sapiens
VDKNFINNPLAQADWAAKKLVWVPSDKSGFEPASLKEEVGEEAIVELVENGKKVKVNKDDIQKMNPPKFSKVEDMAELTCLNEASVLHNLKERYYSGLIYTYSGLFCVVINPYKNLPIYSEEIVEMYKGKKRHEMPPHIYAITDTAYRSMMQDREDQSILCTGESGAGKTENTKKVIQYLAYVASSHKSKKDQGELERQLLQANPILEAFGNAKTVKNDNSSRFGKFIRINFDVNGYIVGANIETYLLEKSRAIRQAKEERTFHIFYYLLSGAGEHLKTDLLLEPYNKYRFLSNGHVTIPGQQDKDMFQETMEAMRIMGIPEEEQMGLLRVISGVLQLGNIVFKKERNTDQASMPDNTAAQKVSHLLGINVTDFTRGILTPRIKVGRDYVQKAQTKEQADFAIEALAKATYERMFRWLVLRINKALDKTKRQGASFIGILDIAGFEIFDLNSFEQLCINYTNEKLQQLFNHTMFILEQEEYQREGIEWNFIDFGLDLQPCIDLIEKPAGPPGILALLDEECWFPKATDKSFVEKVMQEQGTHPKFQKPKQLKDKADFCIIHYAGKVDYKADEWLMKNMDPLNDNIATLLHQSSDKFVSELWKDVDRIIGLDQVAGMSETALPGAFKTRKGMFRTVGQLYKEQLAKLMATLRNTNPNFVRCIIPNHEKKAGKLDPHLVLDQLRCNGVLEGIRICRQGFPNRVVFQEFRQRYEILTPNSIPKGFMDGKQACVLMIKALELDSNLYRIGQSKVFFRAGVLAHLEEERDLKITDVIIGFQACCRGYLARKAFAKRQQQLTAMKVLQRNCAAYLKLRNWQWWRLFTKVKPLLQVSRQEEEMMAKEEELVKVREKQLAAENRLTEMETLQSQLMAEKLQLQEQLQAETELCAEAEELRARLTAKKQELEEICHDLEARVEEEEERCQHLQAEKKKMQQNIQELEEQLEEEESARQKLQLEKVTTEAKLKKLEEEQIILEDQNCKLAKEKKLLEDRIAEFTTNLTEEEEKSKSLAKLKNKHEAMITDLEERLRREEKQRQELEKTRRKLEGDSTDLSDQIAELQAQIAELKMQLAKKEEELQAALARVEEEAAQKNMALKKIRELESQISELQEDLESERASRNKAEKQKRDLGEELEALKTELEDTLDSTAAQQELRSKREQEVNILKKTLEEEAKTHEAQIQEMRQKHSQAVEELAEQLEQTKRVKANLEKAKQTLENERGELANEVKVLLQGKGDSEHKRKKVEAQLQELQVKFNEGERVRTELADKVTKLQVELDNVTGLLSQSDSKSSKLTKDFSALESQLQDTQELLQEENRQKLSLSTKLKQVEDEKNSFREQLEEEEEAKHNLEKQIATLHAQVADMKKKMEDSVGCLETAEEVKRKLQKDLEGLSQRHEEKVAAYDKLEKTKTRLQQELDDLLVDLDHQRQSACNLEKKQKKFDQLLAEEKTISAKYAEERDRAEAEAREKETKALSLARALEEAMEQKAELERLNKQFRTEMEDLMSSKDDVGKSVHELEKSKRALEQQVEEMKTQLEELEDELQATEDAKLRLEVNLQAMKAQFERDLQGRDEQSEEKKKQLVRQVREMEAELEDERKQRSMAVAARKKLEMDLKDLEAHIDSANKNRDEAIKQLRKLQAQMKDCMRELDDTRASREEILAQAKENEKKLKSMEAEMIQLQEELAAAERAKRQAQQERDELADEIANSSGKGALALEEKRRLEARIAQLEEELEEEQGNTELINDRLKKANLQIDQINTDLNLERSHAQKNENARQQLERQNKELKVKLQEMEGTVKSKYKASITALEAKIAQLEEQLDNETKERQAACKQVRRTEKKLKDVLLQVDDERRNAEQYKDQADKASTRLKQLKRQLEEAEEEAQRANASRRKLQRELEDATETADAMNREVSSLKNKLRRGDLPFVVPRRMARKGAGDGSDEEVDGKADGAEAKPAE

SEQ ID NO: 63572 - protein, 508 aa, Homo sapiens
KLISETRRRFEAEYVTDKSDKYDARDVERLQQDDNWVESYLSWRHNIVDETLKMLDESFQWRKEISVNDLNESSIPRWLLEIGVIYLHGYDKEGNKLFWIRVKYHVKDQKTILDKKKLIAFWLERYAKRENGKPVTVMFDLSETGINSIDMDFVRFIINCFKVYYPKYLSKIVIFDMPWLMNAAFKIVKTWLGPEAVSLLKFTSKNEVQDYVSVEYLPPHMGGTDPFKYSYPPLVDDDFQTPLCENGPITSEDETSSKEDIESDGKETLETISNEEQTPLLKKINPTESTSKAEENEKVDSKVKAFKKPLSVFKGPLLHISPAEELYFGSTESGEKKTLIVLTNVTKNIVAFKVRTTAPEKYRVKPSNSSCDPGASVDIVVSPHGGLTVSAQDRFLIMAAEMEQSSGTGPAELTQFWKEVPRNKVMEHRLRCHTVESSKPNTLTLKDNAFNMSDKTSEDICLQLSRLLESNRKLEDQVQRCIWFQQLLLSLTMLLLAFVTSFFYLLYS

SEQ ID NO: 63573 - protein, 50 aa, Homo sapiens
MEMLHPSSRPRRWLSLRRRSCSKRETRSSSTRPKTSATIYLTLHLLPQKR

SEQ ID NO: 63574 - protein, 17 aa, Homo sapiens
IARLYMMLCKTWIRRLM

SEQ ID NO: 63575 - protein, 6 aa, Homo sapiens
MIRTNM

SEQ ID NO: 63576 - protein, 400 aa, Homo sapiens
LCFMRKMLAAVSRVLSGASQKPASRVLVASRNFANDATFEIKKCDLHRLEEGPPVTTVLTREDGLKYYRMMQTVRRMELKADQLYKQKIIRGFCHLCDGQFLLPLTQEACCVGLEAGINPTDHLITAYRAHGFTFTRGLSVREILAELTGRKGGCAKGKGGSMHMYAKNFYGGNGIVGAQVPLGAGIALACKYNGKDEVCLTLYGDGAANQGQIFEAYNMAALWKLPCIFICENNRYGMGTSVERAAASTDYYKRGDFIPGLRVDGMDILCVREATRFAAAYCRSGKGPILMELQTYRYHGHSMSDPGVSYRTREEIQEVRSKSDPIMLLKDRMVNSNLASVEELKEIDVEVRKEIEDAAQFATADPEPPLEELGYHIYSSDPPFEVRGANQWIKFKSVS

SEQ ID NO: 63577 - protein, 53 aa, Homo sapiens
LPPAVQVPDPLSVLIAPRRAGPELPGRLSCGRETLLHSCNEPGTVMKHFSRVV

SEQ ID NO: 63578 - protein, 45 aa, Homo sapiens
MGLNYNKSQTHFLMQQELMVHTWMVIKLLWKYKKLFLFQMLWIQT

SEQ ID NO: 63579 - protein, 18 aa, Homo sapiens
LLWKYKKLFLFQMLWIQT

SEQ ID NO: 63580 - protein, 755 aa, Homo sapiens
VHNFVPDDPDSVVIQDVIEDVVIEDVQCPDIMEEADVSETVIIPEQVLDSDVTEEVSLAHCTVPDDVLASDITSASMSMPEHVLTGDSIHVSDVGHVGHVGHVEHVVHDSVVEAEIVTDPLTTDVVSEEVLVADCASEAVIDANGIPVDQQDDDKGNCEDYLMISLDDAGKIEHDGSSGMTMDTESEIDPCKVDGTCPEVIKVYIFKADPGEDDLGGTVDIVESEPENDHGVELLDQNSSIRVPREKMVYMTVNDSQPEDEDLNVAEIADEVYMEVIVGEEDAAAAAAAAAVHEQQMDDNEIKTFMPIAWAAAYGNNSDGIENRNGTASALLHIDESAGLGRLAKQKPKKRRRPDSRQYQTAIIIGPDGHPLTVYPCMICGKKFKSRGFLKRHMKNHPEHLAKKKYRCTDCDYTTNKKISLHNHLESHKLTSKAEKAIECDECGKHFSHAGALFTHKMVHKEKGANKMHKCKFCEYETAEQGLLNRHLLAVHSKNFPHICVECGKGFRHPSELKKHMRIHTGEKPYQCQYCEYRSADSSNLKTHVKTKHSKEMPFKCDICLLTFSDTKEVQQHALIHQESKTHQCLHCDHKSSNSSDLKRHIISVHTKDYPHKCDMCDKGFHRPSELKKHVAAHKGKKMHQCRHCDFKIADPFVLSRHILSVHTKDLPFRCKRCRKGFRQQSELKKHMKTHSGRKVYQCEYCEYSTTDASGFKRHVISIHTKDYPHRCEYCKKGFRRPSEKNQHIMRHHKEVGLP

SEQ ID NO: 63581 - protein, 6 aa, Homo sapiens
MTQIQL

SEQ ID NO: 63582 - protein, 22 aa, Homo sapiens
LSRSGYSEVNLSKLFAGCAVKS

SEQ ID NO: 63583 - protein, 38 aa, Homo sapiens
KVPQKKVKLAADEDDDFDDDDDFDDEETEEKAPVKKSI

SEQ ID NO: 63584 - protein, 359 aa, Homo sapiens
TLDFMLGAKADGETILKGLQSIFQEQGMAESVHTWQDHGYLATYTNKNGSFANLRIYPHGLVLLDLQSYDGDAQGKEEIDSILNKVEERMKELSQDSTGRVKRLPPIVRGGAIDRYWPTADGRLVEYDIDEVVYDEDSPYQNIKILHSKQFGNILILSGDVNLAESDLAYTRAIMGSGKEDYTGKDVLILGGGDGGILCEIVKLKPKMVTMVEIDQMVIDGCKKYMRKTCGDVLDNLKGDCYQVLIEDCIPVLKRYAKEGREFDYVINDLTAVPISTSPEEDSTWEFLRLILDLSMKVLKQDGKYFTQGNCVNLTEALSLYEEQLGRLYCPVEFSKEIVCVPSYLELWVFYTVWKKAKP

SEQ ID NO: 63585 - protein, 136 aa, Homo sapiens
MEQYIYKRKSDGIYIINLKRTWEKFLLAARAVVAIENPADVSVISSGNTGQRAVLKFAAATGATPIAGHFTPGTFTNQIQAAFREPRLLVVTDPRADHQPLTESSYVNLPTIALCNTDSPLRYVDIATTRELTQWV

SEQ ID NO: 63586 - protein, 522 aa, Homo sapiens
KASIAGHMFDVVVIGGGISGLSAAKLLTEYGVSVLVLEARDRVGGRTYTIRNEHVDYVDVGGAYVGPTQNRILRLSKELGIETYKVNVSERLVQYVKGKTYPFRGAFPPVWNPIAYLDYNNLWRTIDNMGKEIPTDAPWEAQHADKWDKMTMKELIDKICWTKTARRFAYLFVNINVTSEPHEVSALWFLWYVKQCGGTTRIFSVTNGGQERKFVGGSGQVSERIMDLLGDQVKLNHPVTHVDQSSDNIIIETLNHEHYECKYVINAIPPTLTAKIHFRPELPAERNQLIQRLPMGAVIKCMMYYKEAFWKKKDYCGCMIIEDEDAPISITLDDTKPDGSLPAIMGFILARKADRLAKLHKEIRKKKICELYAKVLGSQEALHPVHYEEKNWCEEQYSGGCYTAYFPPGIMTQYGRVIRQPVGRIFFAGTETATKWSGYMEGAVEAGERAAREVLNGLGKVTEKDIWVQEPESKDVPAVEITHTFWERNLPSVSGLLKIIGFSTSVTALGFVLYKYKLLPRS

SEQ ID NO: 63587 - protein, 21 aa, Homo sapiens
IWCCGRIFFCYGFANKTFPAD

SEQ ID NO: 63588 - protein, 68 aa, Homo sapiens
IYVDKNSAQGNVYVKCSSIAAAIAAVNALHGRWFAGKMITAAYVPLPTYHNLFPDSMTATQLLVPSRR

SEQ ID NO: 63589 - protein, 31 aa, Homo sapiens
RGPTQSPPSAVTVQPLTAAAPLRSSRLQREH

SEQ ID NO: 63590 - protein, 16 aa, Homo sapiens
IPVPLRPCAPTSARPP

SEQ ID NO: 63591 - protein, 22 aa, Homo sapiens
LAVDHENVRPDIVLLGKALSGG

SEQ ID NO: 63592 - protein, 149 aa, Homo sapiens
LAEAFAVCQGYDPPEGFIPDLSKPLLDHSYDPDFNQLDGPTRIIVPFVTCGDLSSYDSDRSYPLDLEGGSEYKYTPPTQPPISPPYQEACTLKRKGQLAKEIRPQDCPISRVDTFPQPLAAPQCHTLLAPEVWKCDSQPALTPSPCAFF

SEQ ID NO: 63593 - protein, 242 aa, Homo sapiens
LPIHTQPSAHKDMTTNAGPLHPYWPQHLRLDNFVPNDRPTWHILAGLFSVTGVLVVTTWLLSGRAAVVPLGTWRRLSLCWFAVCGFIHLVIEGWFVLYYEDLLGDQAFLSQLWKEYAKGDSRYILGDNFTVCMETITACLWGPLSLWVVIAFLRQHPLRFILQLVVSVGQIYGDVLYFLTEHRDGFQHGELGHPLYFWFYFVFMNALWLVLPGVLVLDAVKHLTHAQSTLDAKATKAKSKKN

SEQ ID NO: 63594 - protein, 44 aa, Homo sapiens
LVLSYIDLSAWCYYCQAYVHHQALLDVKNIAHQNKFGEDMPHPH

SEQ ID NO: 63595 - protein, 349 aa, Homo sapiens
RKHFTILDAPGHKSFVPNMIGGASQADLAVLVISARKGEFETGFEKGGQTREHAMLAKTAGVKHLIVLINKMDDPTVNWSIERYEECKEKLVPFLKKVGFSPKKDIHFMPCSGLTGANIKEQSDFCPWYTGLPFIPYLDNLPNFNRSIDGPIRLPIVDKYKDMGTVVLGKLESGSIFKGQQLVMMPNKHNVEVLGILSDDTETDFVAPGENLKIRLKGIEEEEILPGFILCDPSNLCHSGRTFDVQIVIIEHKSIICPGYNAVLHIHTCIEEVEITALISLVDKKSGEKSKTRPRFVKQDQVCIARLRTAGTICLETFKDFPQMGRFTLRDEGKTIAIGKVLKLVPEKD

SEQ ID NO: 63596 - protein, 748 aa, Homo sapiens
MEAIQISEAPPTNQATAAASPQSSQPPTANEMADIQVSAAAARPKSAFKVQNATTKGPNGVYDFSQAHNAKDVPNTQPKAAFKSQNATPKGPNAAYDFSQAATTGELAANKSEMAFKAQNATTKVGPNATYNFSQSLNANDLANSRPKTPFKAWNDTTKAPTADTQTQNVNQAKMATSQADIETDPGISEPDGATAQTSADGSQAQNLESRTIIRGKRTRKINNLNVEENSSGDQRRAPLAAGTWRSAPVPVTTQNPPGAPPNVLWQTPLAWQNPSGWQNQTARQTPPARQSPPARQTPPAWQNPVAWQNPVIWPNPVIWQNPVIWPNPIVWPGPVVWPNPLAWQNPPGWQTPPGWQTPPGWQGPPDWQGPPDWPLPPDWPLPPDWPLPTDWPLPPDWIPADWPIPPDWQNLRPSPNLRPSPNSRASQNPGAAQPRDVALLQERANKLVKYLMLKDYTKVPIKRSEMLRDIIREYTDVYPEIIERACFVLEKKFGIQLKEIDKEEHLYILISTPESLAGILGTTKDTPKLGLLLVILGVIFMNGNRASEAVLWEALRKMGLRPGVRHPLLGDLRKLLTYEFVKQKYLDYRRVPNSNPPEYEFLWGLRSYHETSKMKVLRFIAEVQKRDPRDWTAQFMEAADEALDALDAAAAEAEARAEARTRMGIGDEAVSGPWSWDDIEFELLTWDEEGDFGDPWSRIPFTFWARYHQNARSRFPQTFAGPIIGPGGTASANFAANFGAIGFFWVE

SEQ ID NO: 63597 - protein, 143 aa, Homo sapiens
LEYKKIPNSNPPEYEFLWGLRARHETSKMRVLRFIAQNQNRDPREWKAHFLEAVDDAFKTMDVDMAEEHARAQMRAQMNIGDEALIGRWSWDDIQVELLTWDEDGDFGDAWARIPFAFWARYHQYILNSNRANRRATFFSWIQ

SEQ ID NO: 63598 - protein, 63 aa, Homo sapiens
LSQFVSPFTGCIYGRHVTGLCGKKQKEITKAIKRAQIMGFMPVTYKDPAYLKDPKVCNIRYQE

SEQ ID NO: 63599 - protein, 583 aa, Homo sapiens
IMMKLRHKNKKPGEGSKGHKKISWPYPQPAKQNGKKATSKVPSAPHFVHPNDHANREAELKKKWVEEMREKQQAAREQERQKRRTIESYCQDVLRRQEEFEHKEEVLQELNMFPQLDDEATRKAYYKEFRKVVEYSDVILEVLDARDPLGCRCFQMEEAVLRAQGNKKLVLVLNKIDLVPKEVVEKWLDYLRNELPTVAFKASTQHQVKNLNRCSVPVDQASESLLKSKACFGAENLMRVLGNYCRLGEVRTHIRVGVVGLPNVGKSSLINSLKRSRACSVGAVPGITKFMQEVYLDKFIRLLDAPGIVPGPNSEVGTILRNCVHVQKLADPVTPVETILQRCNLEEISNYYGVSGFQTTEHFLTAVAHRLGKKKKGGLYSQEQAAKAVLADWVSGKISFYIPPPATHTLPTHLSAEIVKEMTEVFDIEDTEQANEDTMECLATGESDELLGDTDPLEMEIKLLHSPMTKIADAIENKTTVYKIGDLTGYCTNPNRHQMGWAKRNVDHRPKSNSMVDVCSVDRRSVLQRIMETDPLQQGQALASALKNKKKMQKRADKIASKLSDSMMSALDLSGNADDGVGD

SEQ ID NO: 63600 - protein, 879 aa, Homo sapiens
IENGESGRERPLRAGESWFLVEKHWYKQWEAYVQGGDQDSSTFPGCINNATLFQDEINWRLKEGLVEGEDYVLLPAAAWHYLVSWYGLEHGQPPIERKVIELPNIQKVEVYPVELLLVRHNDLGKSHTVQFSHTDSIGLVLRTARERFLVEPQEDTRLWAKNSEGSLDRLYDTHITVLDAALETGQLIIMETRKKDGTWPSAQLHVMNNNMSEEDEDFKGQPGICGLTNLGNTCFMNSALQCLSNVPQLTEYFLNNCYLEELNFRNPLGMKGEIAEAYADLVKQAWSGHHRSIVPHVFKNKVGHFASQFLGYQQHDSQELLSFLLDGLHEDLNRVKKKEYVELCDAAGRPDQEVAQEAWQNHKRRNDSVIVDTFHGLFKSTLVCPDCGNVSVTFDPFCYLSVPLPISHKRVLEVFFIPMDPRRKPEQHRLVVPKKGKISDLCVALSKHTGISPERMMVADVFSHRFYKLYQLEEPLSSILDRDDIFVYEVSGRIEAIEGSREDIVVPVYLRERTPARDYNNSYYGLMLFGHPLLVSVPRDRFTWEGLYNVLMYRLSRYVTKPNSDDEDDGDEKEDDEEDKDDVPGPSTGGSLRDPEPEQAGPSSGVTNRCPFLLDNCLGTSQWPPRRRRKQLFTLQTVNSNGTSDRTTSPEEVHAQPYIAIDWEPEMKKRYYDEVEAEGYVKHDCVGYVMKKAPVRLQECIELFTTVETLEKENPWYCPSCKQHQLATKKLDLWMLPEILIIHLKRFSYTKFSREKLDTLVEFPIRDLDFSEFVIQPQNESNPELYKYDLIAVSNHYGGMRDGHYTTFACNKDSGQWHYFDDNSVSPVNENQIESKAAYVLFYQRQDVARRLLSPAGSSGAPASPACSSPPSSEFMDVN

SEQ ID NO: 63601 - protein, 40 aa, Homo sapiens
LLIKSHMVSVDFPEMMAEIISVQVPKILSGKVKPIYFHTQ

SEQ ID NO: 63602 - protein, 239 aa, Homo sapiens
RAKMAEAEESPGDPGTASPRPLFAGLSDISISQDIPVEGEITIPMRSRIREFDSSTLNESVRNTIMRDLKAVGKKFMHVLYPRKSNTLLRDWDLWGPLILCVTLALMLQRDSADSEKDGGPQFAEVFVIVWFGAVTITLNSKLLGGNISFFQSLCVLGYCILPLTVAMLICRLVLLADPGPVNFMVRLFVVIVMFAWSIVASTAFLADSQPPNRRALAVYPVFLFYFVISWMILTFTPQ

SEQ ID NO: 63603 - protein, 407 aa, Homo sapiens
KEKNRQVEFQAAWVGALAMGMIFFCSPIVSIFTDRLGCRITATAGAAVAFIGLHTSSFTSSLSLRYFTYGILFGCGCSFAFQPSLVILGHYFQRRLGLANGVVSAGSSIFSMSFPFLIRMLGDKIKLAQTFQVLSTFMFVLMLLSLTYRPLLPSSQDTPSKRGVRTLHQRFLAQLRKYFNMRVFRQRTYRIWAFGIAAAALGYFVPYVHLMKYVEEEFSEIKETWVLLVCIGATSGLGRLVSGHISDSIPGLKKIYLQVLSFLLLGLMSMMIPLCRDFGGLIVVCLFLGLCDGFFITIMAPIAFELVGPMQASQAIGYLLGMMALPMIAGPPIAGLLRNCFGDYHVAFYFAGVPPIIGAVILFFVPLMHQRMFKKEQRDSSKDKMLAPDPDPNGELLPGSPNPEEPI

SEQ ID NO: 63604 - protein, 16 aa, Homo sapiens
MGYSTKPQLAIVTQWC

SEQ ID NO: 63605 - protein, 199 aa, Homo sapiens
IEMAWAMRAMQHAEVYYKLISSVDPQFLKLTKVDDQIYSEFRKNFETLRIDVLDPEELKSESAKEKWRPFCLKFNGIVEDFNYGTLLRLDCSQGYTEENTIFAPRIQFFAIEIARNREGYNKAVYISVQDKEGEKGVNNGGEKRADSGEEENTKNGGEKGADSGEEKEEGINREDKTDKGGEKGKEADKEINKSGEKAM

SEQ ID NO: 63606 - protein, 1069 aa, Homo sapiens
TFLLVVAAAGPITSFLLSLEKLQMASSVGNVADSTEPTKRMLSFQGLAELAHREYQAGDFEAAERHCMQLWRQEPDNTGVLLLLSSIHFQCRRLDRSAHFSTLAIKQNPLLAEAYSNLGNVYKERGQLQEAIEHYRHALRLKPDFIDGYINLAAALVAAGDMEGAVQAYVSALQYNPDLYCVRSDLGNLLKALGRLEEAKACYLKAIETQPNFAVAWSNLGCVFNAQGEIWLAIHHFEKAVTLDPNFLDAYINLGNVLKEARIFDRAVAAYLRALSLSPNHAVVHGNLACVYYEQGLIDLAIDTYRRAIELQPHFPDAYCNLANALKEKGSVAEAEDCYNTALRLCPTHADSLNNLANIKREQGNIEEAVRLYRKALEVFPEFAAAHSNLASVLQQQGKLQEALMHYKEAIRISPTFADAYSNMGNTLKEMQDVQGALQCYTRAIQINPAFADAHSNLASIHKDSGNIPEAIASYRTALKLKPDFPDAYCNLAHCLQIVCDWTDYDERMKKLVSIVADQLEKNRLPSVHPHHSMLYPLSHGFRKAIAERHGNLCLDKINVLHKPPYEHPKDLKLSDGRLRVGYVSSDFGNHPTSHLMQSIPGMHNPDKFEVFCYALSPDDGTNFRVKVMAEANHFIDLSQIPCNGKAADRIHQDGIHILVNMNGYTKGARNELFALRPAPIQAMWLGYPGTSGALFMDYIITDQETSPAEVAEQYSEKLAYMPHTFFIGDHANMFPHLKKKAVIDFKSNGHIYDNRIVLNGIDLKAFLDSLPDVKIVKMKCPDGGDNADSSNTALNMPVIPMNTIAEAVIEMINRGQIQITINGFSISNGLATTQINNKAATGEEVPRTIIVTTRSQYGLPEDAIVYCNFNQLYKIDPSTLQMWANILKRVPNSVLWLLRFPAVGEPNIQQYAQNMGLPQNRIIFSPVAPKEEHVRRGQLADVCLDTPLCNGHTTGMDVLWAGTPMVTMPGETLASRVAASQLTCLGCLELIAKNRQEYEDIAVKLGTDLEYLKKVRGKVWKQRISSPLFNTKQYTMELERLYLQMWEHYAAGNKPDHMIKPVEVTESA

SEQ ID NO: 63607 - protein, 143 aa, Homo sapiens
LERFSVQQQASKMPPKGKSGSGKAGKGGAASGSDSADKKAQGPKGGGNAVKVRHILCEKHGKIMEAMEKLKSGMRFNEVAAQYSEDKARQGGDLGWMTRGSMVGPFQEAAFALPVSGMDKPVFTDPPVKTKFGYHIIMVEGRK

SEQ ID NO: 63608 - protein, 6 aa, Homo sapiens
IWLNKA

SEQ ID NO: 63609 - protein, 59 aa, Homo sapiens
RAQIFANTVDNACIVLHIDNARLAADDFRVKYETQLAMRQSVENDIHGLRKVIDDTNVT

SEQ ID NO: 63610 - protein, 350 aa, Homo sapiens
VKHLPEQKILNELAELKNEYDDLCEPEQFGVVMSSVKMLQPRLSSILFKLTFEEHINNIKPSIIAVTLACEELKKSESFNRLLELVLLVGNYMNSGSRNAQSLGFKINFLCKIRDTKSADQKTTLLHFIADICEEKYRDILKFPEELEHVESASKVSAQILKSNLASMEQQIVHLERDIKKFPQAENQHDKFVEKMTSFTKTAREQYEKLSTMHNNMMKLYENLGEYFIFDSKTVSIEEFFGDLNNFRTLFLEAVRENNKRREMEEKTRRAKLAKEKAEQEKLERQKKKKQLIDINKEGDETGVMDNLLEALQSGAAFRDRRKRIPRNPDNRRVPLERSRSRHNGAISSK

SEQ ID NO: 63611 - protein, 24 aa, Homo sapiens
ICQLIPELELLPEKENEKEKGKKR

SEQ ID NO: 63612 - protein, 23 aa, Homo sapiens
LPPEQRQSILILKEQIQKSTGAP

SEQ ID NO: 63613 - protein, 18 aa, Homo sapiens
IQSKLLKHKQIHTRNKAF

SEQ ID NO: 63614 - protein, 120 aa, Homo sapiens
ISKKEKKEGREVDRYKMKSCQKMEGKPENESEPKHEEEPKPEEKPEEEEKLEEEAKAKGTFRERLIQSLQEFKEDIHNRHLSNEDMFREVDEIDEIRRVRNKLIVMRWKVNRNHPYPYLM

SEQ ID NO: 63615 - protein, 54 aa, Homo sapiens
METERFSWKPLPHKRPSRTQWDGIHPQRAWFADVKESAEGATEDPALANHHLIG

SEQ ID NO: 63616 - protein, 1158 aa, Homo sapiens
LLSPEEDLVGGEAEGKRRVESEVRRASRSLLPGGTKFAMWLKPEEVLLKNALKLWLMERSNDYFVLQRRRGYGEEGGGGLTGLLVGTLDSVLDSTAKVAPFRILHQTPDSQVYLSIACGANREEITKHWDWLEQNIMKTLSVFDSNEDITNFVQGKIRGLIAEEGKHCFAKEDDPEKFREALLKFEKCFGLPEKEKLVTYYSCSYWKGRVPCQGWLYLSTNFLSFYSFLLGSEIKLIISWDEVSKLEKTSNVILTESIHVCSQGENHYFSMFLHINQTYLLMEQLANYAIRRLFDKETFDNDPVLYNPLQITKRGLENRAHSEQFNAFFRLPKGESLKEVHECFLWVPFSHFNTHGKMCISENYICFASQDGNQCSVIIPLREVLAIDKTNDSSKSVIISIKGKTAFRFHEVKDFEQLVAKLRLRCGAASTQYHDISTELAISSESTEPSDNFEVQSLTSQRECSKTVNTEALMTVFHPQNLETLNSKMLKEKMKEQSWKILFAECGRGVSMFRTKKTRDLVVRGIPETLRGELWMLFSGAVNDMATNPDYYTEVVEQSLGTCNLATEEIERDLRRSLPEHPAFQSDTGISALRRVLTAYAYRNPKIGYCQAMNILTSVLLLYAKEEEAFWLLVAVCERMLPDYFNRRIIGALVDQAVFEELIRDHLPQLTEHMTDMTFFSSVSLSWFLTLFISVLPIESAVNVVDCFFYDGIKAILQLGLAILDYNLDKLLTCKDDAEAVTALNRFFDNVTNKDSPLPSNVQQGSNVSDEKTSHTRVDITDLIRESNEKYGNIRYEDIHSMRCRNRLYVIQTLEETTKQNVLRVVSQDVKLSLQELDELYVIFKKELFLSCYWCLGCPVLKHHDPSLPYLEQYQIDCQQFRALYHLLSPWAHSANKDSLALWTFRLLDENSDCLINFKEFSSAIDIMYNGSFTEKLKLLFKLHIPPAYTEVKSKDASKGDELSKEELLYFSQLHVSKPANEKEAESAKHSPEKGKGKIDIQAYLSQWQDELFKKEENIKDLPRMNQSQFIQFSKTLYNLFHEDPEEESLYQAIAVVTSLLLRMEEVGRKLHSPTSSAKGFSGTVCGSGGPSEEKTGSHLEKDPCSFREEPQWSFAFEQILASLLNEPALVRFFEKPIDVKAKLENARISQLRSRTKM

SEQ ID NO: 63617 - protein, 61 aa, Homo sapiens
IDDTSRNSPKLGLLDRIVNYSRASINSLLSDKRSLNSVVTSEPDKHSLLVGDFREDDDTAL

SEQ ID NO: 63618 - protein, 24 aa, Homo sapiens
IGPGKRRDGAAYAEWRGRPPFGRR

SEQ ID NO: 63619 - protein, 165 aa, Homo sapiens
KKKIPNMDKPRKENEEEPQSAPKTDEERPPVEHSPEKQSPEEQSSEEQSSEEEFFPEELLPELLPEMLLSEERPPQEGLSRKDLFEGRPPMEQPPCGVGKHKLEEGSFKERLARSRPQFRGDIHGRNLSNEEMIQAADELEEMKRVRNKLMIMHWKAKRSRPYPI

SEQ ID NO: 63620 - protein, 173 aa, Homo sapiens
IDPSAQISPTDSEFIIELNCLTDEKLKQVRNYIKEHSPRQRPAREAWKRSNFSCASTSGVSGASASASSSSASMVSSASSSGSSVGNSASNSSANMSRAHSDSNLSASAAERIRDSKKRSKQRKLQQKAFRKRQLKEQRQARKERLSGLFLNEEVLSLKVTEEDHEADVDVLM

SEQ ID NO: 63621 - protein, 102 aa, Homo sapiens
IWSTYHDLSKFTSVRRDRNDFWEGIKAHNAVVTSAIFAPNPSLMLSLDVQSEKSEGNEKSEDAEVLDATPSGIMKTDNTEVLLSADFTGAIKVFVNKRKNVS

SEQ ID NO: 63622 - protein, 489 aa, Homo sapiens
VEGFFDRGASIVEDKLVKDLRTQESEEQKRNRVRGILRIIKPCNHVLSLSFPIRRDDGSWEVIEGYRAQHSQHRTPCKGGIRYSTDVSVDEVKALASLMTYKCAVVDVPFGGAKAGVKINPKNYTENELEKITRRFTMELAKKGFIGPGVDVPAPDMNTGEREMSWIADTYASTIGHYDINAHACVTGKPISQGGIHGRISATGRGVFHGIENFINEASYMSILGMTPGFRDKTFVVQGFGNVGLHSMRYLHRFGAKCIAVGESDGSIWNPDGIDPKELEDFKLQHGSILGFPKAKPYEGSILEVDCDILIPAATEKQLTKSNAPRVKAKIIAEGANGPTTPEADKIFLERNILVIPDLYLNAGGVTVSYFEWLKNLNHVSYGRLTFKYERDSNYHLLLSVQESLERKFGKHGGTIPIVPTAEFQDSISGASEKDIVHSALAYTMERSARQIMHTAMKYNLGLDLRTAAYVNAIEKVFKVYSEAGVTFT

SEQ ID NO: 63623 - protein, 175 aa, Homo sapiens
LLHEIFTSPLNLLLLGLCIFLLYKIVRGDQPAASGDSDDDEPPPLPRLKRRDFTPAELRRFDGVQDPRILMAINGKVFDVTKGRKFYGPEGPYGVFAGRDASRGLATFCLDKEALKDEYDDLSDLTAAQQETLSDWESQFTFKYHHVGKLLKEGEEPTVYSDEEEPKDESARKND

SEQ ID NO: 63624 - protein, 60 aa, Homo sapiens
IMFSTFEFCKRICLYQNGYILSPLSYKLTPGVDQSLQPQELRELKKFFKTRKPKPKKPTL

SEQ ID NO: 63625 - protein, 507 aa, Homo sapiens
IITESFSLSAEDYEMKKIIVTDSDDDDDDVIFCSEILPTKETLPSNNTVAQVQSNPGPVAISDVAPSASNNSPPLTNITPTQKLPTPVNQATLSQTQGSEKLLVSSAPTHLTPNIILLNQTPLSTPPNVSSSLPNHMPSSINLLVQNQQTPNSAILTGNKANEEEEEEIIDDDDDTISSSPDSAVSNTSLVPQADTSQNTSFDGSLIQKMQIPTLLQEPLSNSLKISDIITRNTNDPGVGSKHLMEGQKIITLDTATEIEGLSTGCKVYANIGEDTYDIVIPVKDDPDEGEARLENEIPKTSGSEMANKRMKVKHDDHYELIVDGRVYYICIVCKRSYVCLTSLRRHFNIHSWEKKYPCRYCEKVFPLAEYRTKHEIHHTGERRYQCLACGKSFINYQFMSSHIKSVHSQDPSGDSKLYRLHPCRSLQIRQYAYLSDRSSTIPAMKDDGIGYKVDTGKEPPVGTTTSTQNKPMTWEDIFIQQENDSIFKQNVTDGSTEFEFIIPESY

SEQ ID NO: 63626 - protein, 178 aa, Homo sapiens
MIKEAFAGDDVIRDFLKEKREAVEASKPKDVDLTLPGWGEWGGVGLKPSAKKRRRFLIKAPEGPPRKDKNLPNVIINEKRNIHAAAHQVRVLPYPFTHHWQFERTIQTPIGSTWNTQRAFQKLTTPKVVTKPGHIINPIKAEDVGYRSSSRSDLSVIQRNPKRITTRHKKQLKKCSVD

SEQ ID NO: 63627 - protein, 346 aa, Homo sapiens
MLGVGLIEKDTNGEVLWVWCYPSTTATLRNLLLRKCCLTDENKLLHPFVFGQYRRTWFYITIIEVPDSSILKKVTHFSIVLTAKDFNPEKYAAFTRILCRMYLKHGSPVKMMESYIAVLTKGICQSEENGSFLSKDFDARKAYPAGSIKDIVSQFGMETVILHTALMLKKRIVVYHPKIEAVQEFTRTLPALVWHRQDWTILHSYVHLNADELEALQMCTGYVAGFVDLEVSNRPDLYDVFVNLAESEITIAPLAKEAMAMGKLHKEMGQLIVQSAEDPEKSESQVIQDIALKTREIFTNLAPFSEVSADGEKRVLNLEALKQKRFPPATENFLYHLAAAEQMLKI

SEQ ID NO: 63628 - protein, 498 aa, Homo sapiens
KMTFNSFEGSKTCVPADINKEEEFVEEFNRLKTFANFPSGSPVSASTLARAGFLYTGEGDTVRCFSCHAAVDRWQYGDSAVGRHRKVSPNCRFINGFYLENSATQSTNSGIQNGQYKVENYLGSRDHFALDRPSETHADYLLRTGQVVDISDTIYPRNPAMYSEEARLKSFQNWPDYAHLTPRELASAGLYYTGIGDQVQCFCCGGKLKNWEPCDRAWSEHRRHFPNCFFVLGRNLNIRSESDAVSSDRNFPNSTNLPRNPSMADYEARIFTFGTWIYSVNKEQLARAGFYALGEGDKVKCFHCGGGLTDWKPSEDPWEQHAKWYPGCKYLLEQKGQEYINNIHLTHSLEECLVRTTEKTPSLTRRIDDTIFQNPMVQEAIRMGFSFKDIKKIMEEKIQISGSNYKSLEVLVADLVNAQKDSMQDESSQTSLQKEISTEEQLRRLQEEKLCKICMDRNIAIVFVPCGHLVTCKQCAEAVDKCPMCYTVITFKQKIFMS

SEQ ID NO: 63629 - protein, 33 aa, Homo sapiens
VHISGQHLVAVEEDAESEDEEEEDVKLLSISGK

SEQ ID NO: 63630 - protein, 14 aa, Homo sapiens
ITSRFAQIVQKGGQ

SEQ ID NO: 63631 - protein, 376 aa, Homo sapiens
KWHSKGNLKIMSSSVEQKKGPTRQRKCGFCKSNRDKECGQLLISENQKVAAHHKCMLFSSALVSSHSDNESLGGFSIEDVQKEIKRGTKLMCSLCHCPGATIGCDVKTCHRTYHYHCALHDKAQIREKPSQGIYMVYCRKHKKTAHNSEAADLEESFNEHELEPSSPKSKKKSRKGRPRKTNFKGLSEDTRSTSSHGTDEMESSSYRDRSPHRSSPSDTRPKCGFCHVGEEENEARGKLHIFNAKKAAAHYKCMLFSSGTVQLTTTSRAEFGDFDIKTVLQEIKRGKRMKCTLCSQPGATIGCEIKACVKTYHYHCGVQDKAKYIENMSRGIYKLYCKNHSGNDERDEEDEERESKSRGKVEIDQQQLTQQQLNGN

SEQ ID NO: 63632 - protein, 184 aa, Homo sapiens
VFIPHGLIMDRTERLARDVMKEMGGHHIVALCVLKGGYKFFADLLDYIKALNRNSDRSIPMTVDFIRLKSYCNDQSTGDIKVIGGDDLSTLTGKNVLIVEDIIDTGKTMQTLLSLVRQYNPKMVKVASLLVKRTPRSVGYKPDFVGFEIPDKFVVGYALDYNEYFRDLNHVCVISETGKAKYKA

SEQ ID NO: 63633 - protein, 140 aa, Homo sapiens
ITMALSWMTIVVPLLTFEILLVHKLDGHNAFSSIPIFVPLWLSLITLMATTFGQKGGNHWWFGIRKDFCQFLLEIFPFLREYGNISYDLHHEDNEETEETPVPEPPKIAPMFRKKARVVIAQSPGKYVLPPPKLNIEMPD

SEQ ID NO: 63634 - protein, 121 aa, Homo sapiens
LSAAAEPSSAAERLCRHGYTMERPDKAALNALQPPEFRNESSLASTLKTLLFFTALMITVPIGLYFTTKSYIFEGALGMSNRDSYFYAAIVAVVAVHVVLALFVYVAWNEGSRQWREGKQD

SEQ ID NO: 63635 - protein, 575 aa, Homo sapiens
VRGSNGAFYKAFVKDVHEDSITVAFENNWQPDRQIPFHDVRFPPPVGYNKDINESDEVEVYSRANEKEPCCWWLAKVRMIKGEFYVIEYAACDATYNEIVTIERLRSVNPNKPATKDTFHKIKLDVPEDLRQMCAKEAAHKDFKKAVGAFSVTYDPENYQLVILSINEVTSKRAHMLIDMHFRSLRTKLSLIMRNEEASKQLESSRQLASRFHEQFIVREDLMGLAIGTHGANIQQARKVPGVTAIDLDEDTCTFHIYGEDQDAVKKARSFLEFAEDVIQVPRNLVGKVIGKNGKLIQEIVDKSGVVRVRIEAENEKNVPQEEEIMPPNSLPSNNSRVGPNAPEEKKHLDIKENSTHFSQPNSTKVQRGMVPFVFVGTKDSIANATVLLDYHLNYLKEVDQLRLERLQIDEQLRQIGASSRPPPNRTDKEKSYVTDDGQGMGRGSRPYRNRGHGRRGPGYTSESDHRDELSDWSLAPTEEERESFLRRGDGRRRGGGGRGQGGRGRGGGFKGNDDHSRTDNRPRNPREAKGRTTDGSLQNTSSEGSRLRTGKDRNQKKEKPDSVDGQQPLVNGVP

SEQ ID NO: 63636 - protein, 442 aa, Homo sapiens
ILSINEVTSKRAHMLIDMHFRSLRTKLSLIMRNEEASKQLESSRQLASRFHEQFIVREDLMGLAIGTHGANIQQARKVPGVTAIDLDEDTCTFHIYGEDQDAVKKARSFLEFAEDVIQVPRNLVGKVIGKNGKLIQEIVDKSGVVRVRIEAENEKNVPQEEEIMPPNSLPSNNSRVGPNAPEEKKHLDIKENSTHFSQPNSTKVQRGMVPFVFVGTKDSIANATVLLDYHLNYLKEVDQLRLERLQIDEQLRQIGASSRPPPNRTDKEKSYVTDDGQGMGRGSRPYRNRGHGRRGPGYTSGTNSEASNASETESDHRDELSDWSLAPTEEERESFLRRGDGRRRGGGGRGQGGRGRGGGFKGNDDHSRTDNRPRNPREAKGRTTDGSLQIRVDCNNERSVHTKTLQNTSSEGSRLRTGKDRNQKKEKPDSVDGQQPLVNGVP

SEQ ID NO: 63637 - protein, 45 aa, Homo sapiens
MATHEKDTEAIKSLQVEMWPLLTAEQNHLLHLVLQETISPSGQGV

SEQ ID NO: 63638 - protein, 245 aa, Homo sapiens
RSDSKFAYTGTEMRTVAEKVDAVRIVHIHSVIILRRSDKRKDRVEISPEQLSAASTEAERLAELTGRPMRVVGWYHSHPHITVWPSHVDVRTQAMYQMMDQGFVGLIFSCFIEDKNTKTGRVLYTCFQSIQAQKSSEYERIEIPIHIVPHVTIGKVCLESAVELPKILCQEEQDAYRRIHSLTHLDSVTKIHNGSVFTKNLCSQMSAVSGPLLQWLEDRLEQNQQHLQELQQEKEELMQELSSLE

SEQ ID NO: 63639 - protein, 62 aa, Homo sapiens
TIELRRPENEFWVKLKPGRVLFIDNWRVLHGRECFTGYRQLCGCYLTRDDVLNTARLLGLQA

SEQ ID NO: 63640 - protein, 45 aa, Homo sapiens; identical to SEQ ID NO: 63637

SEQ ID NO: 63641 - protein, 4 aa, Homo sapiens
ISAS

SEQ ID NO: 63642 - protein, 440 aa, Homo sapiens
IVLGTGLTECILSGIMSVNGKKVLHMDRNPYYGGESSSITPLEELYKRFQLLEGPPESMGRGRDWNVDLIPKFLMANGQLVKMLLYTEVTRYLDFKVVEGSFVYKGGKIYKVPSTETEALASNLMGMFEKRRFRKFLVFVANFDENDPKTFEGVDPQTTSMRDVYRKFDLGQDVIDFTGHALALYRTDDYLDQPCLETVNRIKLYSESLARYGKSPYLYPLYGLGELPQGFARLSAIYGGTYMLNKPVDDIIMENGKVVGVKSEGEVARCKQLICDPSYIPDRVRKAGQVIRIICILSHPIKNTNDANSCQIIIPQNQVNRKSDIYVCMISYAHNVAAQGKYIAIASTTVETTDPEKEVEPALELLEPIDQKFVAISDLYEPIDDGCESQVFCSCSYDATTHFETTCNDIKDIYKRMAGTAFDFENMKRKQNDVFGEAEQ

SEQ ID NO: 63643 - protein, 360 aa, Homo sapiens
LPLSLSPPPPPAAAAAAAAAAMAQYKGAASEAGRAMHLMKKREKQREQMEQMKQRIAEENIMKSNIDKKFSAHYDAVEAELKSSTVGLVTLNDMKAKQEALVKEREKQLAKKEQSKELQMKLEKLREKERKKEAKRKISSLSFTLEEEEEGGEEEEEAAMYEEEMEREEITTKKRKLGKNPDVDTSFLPDRDREEEENRLREELRQEWEAKQEKIKSEEIEITFSYWDGSGHRRTVKMRKGNTMQQFLQKALEILRKDFSELRSAGVEQLMYIKEDLIIPHHHSFYDFIVTKARGKSGPLFNFDVHDDVRLLSDATVEKDESHAGKVVLRSWYEKNKHIFPASRWEPYDPEKKWDKYTIR

SEQ ID NO: 63644 - protein, 30 aa, Homo sapiens
VDVIPEDGAADVRVIISNSAYGKFRKLFPG

SEQ ID NO: 63645 - protein, 64 aa, Homo sapiens
ILSNAGLRFEVVPSKFKEKLDKASFATPYGYAMETAKQKALEVANRLYQARGPCPSALMKIPLL

SEQ ID NO: 63646 - protein, 23 aa, Homo sapiens
VNSQEIHMLPIKKQRLATFFPRK

SEQ ID NO: 63647 - protein, 97 aa, Homo sapiens
IYTISGDVYIGPDDAQQKIEPHHTAVLGEGDSVQVENKDPKRSHFVLIAGEPLREPVIQHGPFVMNTNEEISQAILDFRNAKNGFERAKTWKSKIGN

SEQ ID NO: 63648 - protein, 448 aa, Homo sapiens
IFKDKPIKLRPRSIEVENDFLPVEKTIGKKLPATTATPDSSKTEMDSRTKSKDYCKVIFPYEAQNDDELTIKEGDIVTLINKDCIDVGWWEGELNGRRGVFPDNFVKLLPPDFEKEGNRPKKPPPPSAPVIKQGAGTTERKHEIKKIPPERPEMLPNRTEEKERPEREPKLDLQKPSVPAIPPKKPRPPKTNSLSRPGALPPRRPERPVGPLTHTRGDSPKIDLAGSSLSGILDKDLSDRSNDIDLEGFDSVVSSTEKLSHPTTSRPKATGRRPPSQSLTSSSLSSPDIFDSPSPEEDKEEHISLAHRGVDASKKTSKTVTISQVSDNKASLPPKPGTMAAGGGGPAPLSSAAPSPLSSSLGTAGHRANSPSLFGTEGKPKMEPAASSQAAVEELRTQVRELRSIIETMKDQQKREIKQLLSELDEEKKIRLRLQMEVNDIKKALQSK

SEQ ID NO: 63649 - protein, 402 aa, Homo sapiens
KKNTPFLYDLVMTHALQWPSLTVQWLPEVTKPEGKDYALHWLVLGTHTSDEQNHLVVARVHIPNDDAQFDASHCDSDKGEFGGFGSVTGKIECEIKINHEGEVNRARYMPQNPHIIATKTPSSDVLVFDYTKHPAKPDPSGECNPDLRLRGHQKEGYGLSWNSNLSGHLLSASDDHTVCLWDINAGPKEGKIVDAKAIFTGHSAVVEDVAWHLLHESLFGSVADDQKLMIWDTRSNTTSKPSHLVDAHTAEVNCLSFNPYSEFILATGSADKTVALWDLRNLKLKLHTFESHKDEIFQVHWSPHNETILASSGTDRRLNVWDLSKIGEEQSAEDAEDGPPELLFIHGGHTAKISDFSWNPNEPWVICSVSEDNIMQIWQMAENIYNDEESDVTTSELEGQGS

SEQ ID NO: 63650 - protein, 155 aa, Homo sapiens
IFLALCLDLGAVLSPAWVTADHQYYLSLWESCRKPASLDIWHCESTLSSDWQIATLALLLGGAAIILIAFLVGLISICVGSRRRFYRPVAVMLFAAVVLQVCSLVLYPIKFIETVSLKIYHEFNWGYGLAWGATIFSFGGAILYCLNPKNYEDYY

SEQ ID NO: 63651 - protein, 66 aa, Homo sapiens
IKKLVYPPGFMGLAASLYYPQQAIVFAQVSGERLYDWGLRGYIVIEDLWKENFQKPGNVKNSPGTK

SEQ ID NO: 63652 - protein, 83 aa, Homo sapiens
LKMSSRIFRCNFPNVEIVTIAEAEFYRQVSASLLFSCSKDLEAFNPESKELLDLVEFTNEIQTLLGSSVEWLHPSDLASDNYW

SEQ ID NO: 63653 - protein, 261 aa, Homo sapiens
IRGRGRGRGRGRGRGRGARGGKAEDKEWMPVTKLGRLVKDMKIKSLEEIYLFSLPIKESEIIDFCLGASLKDEVLKIMPVQKQIRAGQRTRFKAFVAIGDYNGHVGLGVKCSKEVATAIRGAIILAKLSIVPVRRGYWRNKIGKPHTVPCKVTGRCGSVLVRLIPAPRGTGIVSAPVPKKLLMMAGIDDCYTSARGCTATLGNFAKATFDAISKTYSYLTPDLWKETVFTKSPYQEFTDHLVKTHTRVSVQRTQAPAVATT

SEQ ID NO: 63654 - protein, 120 aa, Homo sapiens
VFGHSSGPMVEKYSVATQIVMGGVTGWCAGFLFQKVGKLAATAVGGGFLLLQIASHSGYVQIDWKRVEKDVNKAKRQIKKRANKAAPEINNLIEEATEFIKQNIVISSGFVGGFLLGLAS

SEQ ID NO: 63655 - protein, 25 aa, Homo sapiens
LYIVANQSVAPHSSASLFNSTPGMA

SEQ ID NO: 63656 - protein, 51 aa, Homo sapiens
LWGLRKNKTNMNYDKLSRALRYYYDKNIIRKVSGQKFVYKFVSYPESHCAP

SEQ ID NO: 63657 - protein, 85 aa, Homo sapiens
LGVFEQNQDRKHRTYVYVLTVTELLEDWEDSVSIGRKREWFKVEDAIKVLQCHKPVHAEYLEKLKLGGSPTNGNSMAPSSPDSDP

SEQ ID NO: 63658 - protein, 22 aa, Homo sapiens
LAVDHENVRPDIVLLGKALSGG

SEQ ID NO: 63659 - protein, 143 aa, Homo sapiens; identical to SEQ ID NO: 63597

SEQ ID NO: 63660 - protein, 361 aa, Homo sapiens
RRLKYISLAVLVVQNASLILSIRYARTLPGDRFFATTAVVMAEVLKGLTCLLLLFAQKRGNVKHLVLFLHEAVLVQYVDTLKLAVPSLIYTLQNNLQYVAISNLPAATFQVTYQLKILTTALFSVLMLNRSLSRLQWASLLLLFTGVAIVQAQQAGGGGPRPLDQNPGAGLAAVVASCLSSGFAGVYFEKILKGSSGSVWLRNLQLGLFGTALGLVGLWWAEGTAVATRGFFFGYTPAVWGVVLNQAFGGLLVAVVVKYADNILKGFATSLSIVLSTVASIRLFGFHVDPLFALGAGLVIGAVYLYSLPRGAAKAIASASASASGPCVHQQPPGQPPPPQLSSHRGDLITEPFLPKSVLVK

SEQ ID NO: 63661 - protein, 482 aa, Homo sapiens
VPPGAVAGPRPQQASPPPCGGPGGPGGGPGDALGAAAAGVGAAGVVVGVGGAVGVGGCCSGPGHSKRRRQAPGVGAVGGGSPEREEVGAGYNSEDEYEAAAARIEAMDPATVEQQEHWFEKALRDKKGFIIKQMKEDGACLFRAVADQVYGDQDMHEVVRKHCMDYLMKNADYFSNYVTEDFTTYINRKRKNNCHGNHIEMQAMAEMYNRPVEVYQYSTEPINTFHGIHQNEDEPIRVSYHRNIHYNSVVNPNKATIGVGLGLPSFKPGFAEQSLMKNAIKTSEESWIEQQMLEDKKRATDWEATNEAIEEQVARESYLQWLRDQEKQARQVRGPSQPRKASATCSSATAAASSGLEEWTSRSPRQRSSASSPEHPELHAELGMKPPSPGTVLALAKPPSPCAPGTSSQFSAGADRATSPLVSLYPALECRALIQQMSPSAFGLNDWDDDEILASVLAVSQQEYLDSMKKNKVHRDPPPDKS

SEQ ID NO: 63662 - protein, 44 aa, Homo sapiens
MLEEQLTKNMHLHKDMEVLSQEIVRLSKECVGPPDPDLEPGETS

SEQ ID NO: 63663 - protein, 496 aa, Homo sapiens
ISLQATPATPATLSASSSAGGSRTPAMSSSSSSRVLLRQQLMRAQAQEQERRERREQAAAAPFPSPAPASPAISVVGVSAGGHTLSRPPPAQVPREVLKVQTHLENPTRYHLQQARRQQVKQYLSTTLGPKLASQALTPPPGPASAQPLPAPEAAHTTGPTGSAPNSPMALLTIGSSSEKEIDDVIDEIISLESSYNDEMLSYLPGGTTGLQLPSTLPVSGNLLDVYSSQGVATPAITVSNSCPAELPNIKREISETEAKALLKERQKKDNHNLIERRRRFNINDRIKELGTLIPKSSDPEMRWNKGTILKASVDYIRKLQKEQQRSKDLESRQRSLEQANRSLQLRIQELELQAQIHGLPVPPTPGLLSLATTSASDSLKPEQLDIEEEGRPGAATFHVGGGPAQNAPHQQPPAPPSDALLDLHFPSDHLGDLGDPFHLGLEDILMEEEEGVVGGLSGGALSPLRAASDPLLSSVSPAVSKASSRRSSFSMEEES

SEQ ID NO: 63664 - protein, 337 aa, Homo sapiens
METGVRIYNVEPLMEKGHLDHEQVGSMGLVEMLHRSNLLALVGGGSSPKFSEISAVLIWDDAREGKDSKEKLVLEFTFTKPVLSVRMRHDKIVIVLKNRIYVYSFPDNPRKLFEFDTRDNPKGLCDLCPSLEKQLLVFPGHKCGSLQLVDLASTKPGTSSAPFTINAHQSDIACVSLNQPGTVVASASQKGTLIRLFDTQSKEKLVELRRGTDPATLYCINFSHDSSFLCASSDKGTVHIFALKDTRLNRRSALARVGKVGPMIGQYVDSQWSLASFTVPAESACICAFGRNTSKNVNSVIAICVDGTFHKYVFTPDGNCNREAFDVYLDICDDDDF

SEQ ID NO: 63665 - protein, 276 aa, Homo sapiens
MDLVWSAWYGKCVKGKGSLPLSAHGIVVAWLSRAEWDQVTVYLFCDDHKLQRYALNRITVWRSRSGNELPLAVASTADLIRCKLLDVTGGLGTDELRLLYGMALVRFVNLISERKTKFAKVPLKCLAQEVNIPDWIVDLRHELTHKKMPHINDCRRGCYFVLDWLQKTYWCRQLENSLRETWELEEFREGIEEEDQEEDKNIVVDDITEQKPEPQDDGKSTESDVKADGDSKGSEEVDSHCKKALSHKELYERARELLVSYEEEQFTGGCAGCFSG

SEQ ID NO: 63666 - protein, 13 aa, Homo sapiens
IPGRRRNSLAPVP

SEQ ID NO: 63667 - protein, 163 aa, Homo sapiens
KMSDTAVADTRRLNSKPQDLTDAYGPPSNFLEIDIFNPQTVGVGRARFTTYEVRMRTNLPIFKLKESCVRRRYSDFEWLKNELERDSKIVVPPLPGKALKRQLPFRGDEGIFEESFIEERRQGLEQFINKIAGHPLAQNERCLHMFLQEEAIDRNYVPGKVRQ

SEQ ID NO: 63668 - protein, 11 aa, Homo sapiens
KKEKKKKKESS

SEQ ID NO: 63669 - protein, 56 aa, Homo sapiens
KMEEPEEPADSGQSLVPVYIYSPEYVSMCDSLAKIPKRASMVHSLIEAYALHKQMS

SEQ ID NO: 63670 - protein, 66 aa, Homo sapiens
LKLNFANPPFKSTARFTLNPNPTGVQNPHIERLRSHSIESSGKLKISPEQHWDFTAEDLKDLGEIG

SEQ ID NO: 63671 - protein, 5 aa, Homo sapiens
KIMAA

SEQ ID NO: 63672 - protein, 286 aa, Homo sapiens
MKEEDVLKFLAAGTHLGGTNLDFQMEQYIYKRKSDGIYIINLKRTWEKLLLTARAIVAIENPADVSVISSRNTGQRAVLKFAAATGATPIAGRFTPGTFTNQIQAAFREPRLLVVSDPRADHQPLTEASYVNLPTIALCNTDSPLHYVDIAIPCNNKGTHSVGLMWWMLAREVLRMRGTISREHPWEVMPDLYFYRDPEEIEKEEQAAAEKAMTREELQGEWTAPAPEFTATQPEVADWSEGVQVPSVPIQQFPTEDWSTQRATEDWSAAPTAQATEWVGATTDWS

SEQ ID NO: 63673 - protein, 154 aa, Homo sapiens
MKGTYLVHLTCTSSKTAREDLESVVQKLFVPYTEMEIENEQVEKPRILWALYFNMRDSSDISRSCYNDLPSNVYVCSGPDCGLGNDNAVKQAETLFQEICPNEDFCPPPPNPEDIILDGDSLQPEASESSAIPEANSETFKESTNLGNLEESSE

SEQ ID NO: 63674 - protein, 23 aa, Homo sapiens
LESDPRTRTLLSDPTYRELIEQL

SEQ ID NO: 63675 - protein, 43 aa, Homo sapiens
IDNADELLESFLEGFHDENTQVQLTLLTAIMKLFLKKPPKHKS

SEQ ID NO: 63676 - protein, 60 aa, Homo sapiens
MPGLNEILSDPEVLAAMQDPEVMVAFQDVAQNPANMSKYQSNPKVMNLISKLSAKFGGQA

SEQ ID NO: 63677 - protein, 21 aa, Homo sapiens
RSNSNKTMDPSCLKWTPPKGP

SEQ ID NO: 63678 - protein, 36 aa, Homo sapiens
LEFTSSGSANTETTKVTGSLETKYRWTEYGLTFTEK

SEQ ID NO: 63679 - protein, 98 aa, Homo sapiens
LTKQQMLISCVQRILMNRRLQQQYNQQQQQQMTYQQATLGHLMMPKPPNLIMNPSNYQQIDMRGMYQPVAGGMQPPPLQRAPPPMRSKNPGPSQGKSM

SEQ ID NO: 63680 - protein, 226 aa, Homo sapiens
MGITEYEPRVINQMLEFAFRYVTTILDDAKIYSSHAKKPNVDADDVRLAIQCRADQSFTSPPPRDFLLDIARQKNQTPLPLIKPYAGPRLPPDRYCLTAPNYRLKSLIKKGPNQGRLVPRLSVGAVSSKPTTPTIATPQTVSVPNKVATPMSVTSQRFTVQIPPSQSTPVKPVPATTAVQNVLINPSMIGPKNILITTNMVSSQNTANEANPLKRKHEDDDDNDIM

SEQ ID NO: 63681 - protein, 4 aa, Homo sapiens
MESV

SEQ ID NO: 63682 - protein, 69 aa, Homo sapiens
KQRFQQLVHQMTELCWEKCMDKPGPKLDSRAEACFVNCVERFIDTSQFILNRLEQTQKSKPVFSESLSD

SEQ ID NO: 63683 - protein, 426 aa, Homo sapiens
RNPELHLGCALALRFLALVSWDIPGARALDNGLARTPTMGWLHWERFMCNLDCQEEPDSCISEKLFMEMAELMVSEGWKDAGYEYLCIDDCWMAPQRDSEGRLQADPQRFPHGIRQLANYVHSKGLKLGIYADVGNKTCAGFPGSFGYYDIDAQTFADWGVDLLKFDGCYCDSLENLADGYKHMSLALNRTGRSIVYSCEWPLYMWPFQKPNYTEIRQYCNHWRNFADIDDSWKSIKSILDWTSFNQERIVDVAGPGGWNDPDMLVIGNFGLSWNQQVTQMALWAIMAAPLFMSNDLRHISPQAKALLQDKDVIAINQDPLGKQGYQLRQGDNFEVWERPLSGLAWAVAMINRQEIGGPRSYTIAVASLGKGVACNPACFITQLLPVKRKLGFYEWTSRLRSHINPTGTVLLQLENTMQMSLKDLL

SEQ ID NO: 63684 - protein, 639 aa, Homo sapiens
VNNPSCTMSRVRDAGCVAAGIVIGAGAWYCVYKYTRGRDQTKKRMAKPKNRAVAGTGARARAGLRAGFTIDLGSGFSPPTPVRAEAEDRAQDEASALDTVGAEAVAPAASSAEAQSGAGSQAQEADGAGVGPKAESVVGAAMASAIAPPPGVTEALGAAEAPAMAGAPKVAEAPREAETSRAAVPPGTVVPTEAAAPTEVTEGPGVAAPTKVAEAPGVASPTEAAEAPVPATPTGAAAPTGAAESPGTSGSPRTAVVPGTSAAKKATPGAHTGAIPKATSATGAVPKGGGKGVTRSRNGGKGKGKKSKVEVDELGMGFRPGDGAAAAAAASANGGQAFLAEVPDSEEGESGWTDTESDSDSEPETQRRGRGRRPVAMQKRPFPYEIDEILGVRDLRKVLALLQKSDDPFIQQVALLTLSNNANYSCNQETIRKLGGLPIIANMINKTDPHIKEKALMAMNNLSENYENQGRLQVYMNKVMDDIMASNLNSAVQVVGLKFLTNMTITNDYQHLLVNSIANFFRLLSQGGGKIKVEILKILSNFAENPDMLKKLLSTQVPASFSSLYNSYVESEILINALTLFEIIYDNLRAEVFNYREFNKGSLFYLCTTSGVCVKKIRALANHHDLLVKVKVIKLVNKF

SEQ ID NO: 63685 - protein, 68 aa, Homo sapiens
REKVTVISTINPTKDLLADLIGCQRLPEDQRKKVHQLKDLLDQILMLDPAKRISINQALQHAFIQEKI

SEQ ID NO: 63686 - protein, 409 aa, Homo sapiens
VGFDSLPDQLVNKSVSQGFCFNILCVGETGLGKSTLMDTLFNTKFEGEPATHTQPGVQLQSNTYDLQESNVRLKLTIVSTVGFGDQINKEDSYKPIVEFIDAQFEAYLQEELKIRRVLHTYHDSRIHVCLYFIAPTGHSLKSLDLVTMKKLDSKVNIIPIIAKADAISKSELTKFKIKITSELVSNGVQIYQFPTDDESVAEINGTMNAHLPFAVIGSTEELKIGNKMMRARQYPWGTVQVENEAHCDFVKLREMLIRVNMEDLREQTHTRHYELYRRCKLEEMGFKDTDPDSKPFSLQETYEAKRNEFLGELQKKEEEMRQMFVQRVKEKEAELKEAEKELHEKFDRLKKLHQDEKKKLEDKKKSLDDEVNAFKQRKTAAELLQSQGSQAGGSQTLKRDKEKKNLGFL

SEQ ID NO: 63687 - protein, 407 aa, Homo sapiens
LPDQLVNKSVSQGFCFNILCVGETGLGKSTLMDTLFNTKFEGEPATHTQPGVQLQSNTYDLQESNVRLKLTIVSTVGFGDQINKEDSYKPIVEFIDAQFEAYLQEELKIRRVLHTYHDSRIHVCLYFIAPTGHSLKSLDLVTMKKLDSKVNIIPIIAKADAISKSELTKFKIKITSELVSNGVQIYQFPTDDESVAEINGTMNAHLPFAVIGSTEELKIGNKMMRARQYPWGTVQVENEAHCDFVKLREMLIRVNMEDLREQTHTRHYELYRRCKLEEMGFKDTDPDSKPFSLQETYEAKRNEFLGELQKKEEEMRQMFVQRVKEKEAELKEAEKELHEKFDRLKKLHQDEKKKLEDKKKSLDDEVNAFKQRKTAAELLQSQGSQAGGSQTLKRDKEKKNNPWLCTE

SEQ ID NO: 63688 - protein, 7 aa, Homo sapiens
LSASKDY

SEQ ID NO: 63689 - protein, 469 aa, Homo sapiens
LKVLSPFAVVQMRKKWKMGGMKYIFSLLFFLLLEGGKTEQVKHSETYCMFQDKKYRVGERWHPYLEPYGLVYCVNCICSENGNVLCSRVRCPNVHCLSPVHIPHLCCPRCPEDSLPPVNNKVTSKSCEYNGTTYQHGELFVAEGLFQNRQPNQCTQCSCSEGNVYCGLKTCPKLTCAFPVSVPDSCCRVCRGDGELSWEHSDGDIFRQPANREARHSYHRSHYDPPPSRQAGGLSRFPGARSHRGALMDSQQASGTIVQIVINNKHKHGQVCVSNGKTYSHGESWHPNLRAFGIVECVLCTCNVTKQECKKIHCPNRYPCKYPQKIDGKCCKVCPGKKAKEELPGQSFDNKGYFCGEETMPVYESVFMEDGETTRKIALETERPPQVEVHVWTIRKGILQHFHIEKISKRMFEELPHFKLVTRTTLSQWKIFTEGEAQISQMCSSRVCRTELEDLVKVLYLERSEKGHC

SEQ ID NO: 63690 - protein, 75 aa, Homo sapiens
RRSDPDCRTFPDYRILGLLRGLHVKYQDSAWHMLYLPLHPSRPSQKIYKISSGKSLGVLGRERRKIVGWNKNRVE

SEQ ID NO: 63691 - protein, 6 aa, Homo sapiens
IKTMAC

SEQ ID NO: 63692 - protein, 12 aa, Homo sapiens
LQPLSDPFQKLH

SEQ ID NO: 63693 - protein, 21 aa, Homo sapiens
IMFETFNTPAMYVAIQAVLSL

SEQ ID NO: 63694 - protein, 35 aa, Homo sapiens
MARSSLEDTYGAGDGLKRGALSSSLRDLSDAGVCY

SEQ ID NO: 63695 - protein, 91 aa, Homo sapiens
KQAFEQIKKERFDRFNACFESVATNIDEIYKALSRNSSAQAFLGPENPEEPYLDGINYNCVAPGKRFRPMDNLSGGEKTVAALALLFAIHR

SEQ ID NO: 63696 - protein, 4375 aa, Homo sapiens
IMKVDRTKLKKTPTEAPADCRALIDKLKVCNDEQLLLELQQIKTWNIGKCELYHWVDLLDRFDGILADAGQTVENMSWMLVCDRPEREQLKMLLLAVLNFTALLIEYSFSRHLYSSIEHLTTLLASSDMQVVLAVLNLLYVFSKRSNYITRLGSDKRTPLLTRLQHLAESWGGKENGFGLAECCRDLHMMKYPPSATTLHFEFYADPGAEVKIEKRTTSNTLHYIHIEQLDKISESPSEIMESLTKMYSIPKDKQMLLFTHIRLAHGFSNHRKRLQAVQARLHAISILVYSNALQESANSILYNGLIEELVDVLQITDKQLMEIKAASLRTLTSIVHLERTPKLSSIIDCTGTASYHGFLPVLVRNCIQAMIDPSMDPYPHQFATALFSFLYHLASYDAGGEALVSCGMMEALLKVIKFLGDEQDQITFVTRAVRVVDLITNLDMAAFQSHSGLSIFIYRLEHEVDLCRKECPFVIKPKIQRPNTTQEGEEMETDMDGVQCIPQRAALLKSMLNFLKKAIQDPAFSDGIRHVMDGSLPTSLKHIISNAEYYGPSLFLLATEVVTVFVFQEPSLLSSLQDNGLTDVMLHALLIKDVPATREVLGSLPNVFSALCLNARGLQSFVQCQPFERLFKVLLSPDYLPAMRRRRSSDPLGDTASNLGSAVDELMRHQPTLKTDATTAIIKLLEEICNLGRDPKYICQKPSIQKADGTATAPPPRSNHAAEEASSEDEEEEEVQAMQSFNSTQQNETEPNQQVVGTEERIPIPLMDYILNVMKFVESILSNNTTDDHCQEFVNQKGLLPLVTILGLPNLPIDFPTSAACQAVAGVCKSILTLSHEPKVLQEGLLQLDSILSSLEPLHRPIESPGGSVLLRELACAGNVADATLSAQATPLLHALTAAHAYIMMFVHTCRVGQSEIRSISVNQWGSQLGLSVLSKLSQLYCSLVWESTVLLSLCTPNSLPSGCEFGQADMQKLVPKDEKAGTTQGGKRSDGEQDGAAGSMDASTQGLLEGIGLDGDTLAPMETDEPTASDSKGKSKITPAMAARIKQIKPLLSASSRLGRALAELFGLLVKLCVGSPVRQRRSHHAASTTTAPTPAARSTASALTKLLTKGLSWQPPPYTPTPRFRLTFFICSVGFTSPMLFDERKYPYHLMLQKFLCSGGHNALFETFNWALSMGGKVPVSEGLEHSDLPDGTGEFLDAWLMLVEKMVNPTTVLESPHSLPAKLPGGVQNFPQFSALRFLVVTQKAAFTCIKNLWNRKPLKVYGGRMAESMLAILCHILRGEPVIRERLSKEKEGSRGEEDTGQEEGGSRREPQVNQQQLQQLMDMGFTREHAMEALLNTSTMEQATEYLLTHPPPIMGGVVRDLSMSEEDQMMRAIAMSLGQDIPMDQRAESPEEVACRKEEEERKAREKQEEEEAKCLEKFQDADPLEQDELHTFTDTMLPGCFHLLDELPDTVYRVCDLIMTAIKRNGADYRDMILKQVVNQVWEAADVLIKAALPLTTSDTKTVSEWISQMATLPQASNLATRILLLTLLFEELKLPCAWVVESSGILNVLIKLLEVVQPCLQAAKEQKEVQTPKWITPVLLLIDFYEKTAISSKRRAQMTKYLQSNSNNWRWFDDRSGRWCSYSASNNSTIDSAWKSGETSVRFTAGRRRYTVQFTTMVQVNEETGNRRPVMLTLLRVPRLNKNSKNSNGQELEKTLEESKEMDIKRKENKGNDTPLALESTNTEKETSLEETKIGEILIQGLTEDMVTVLIRACVSMLGVPVDPDTLHATLRLCLRLTRDHKYAMMFAELKSTRMILNLTQSSGFNGFTPLVTLLLRHIIEDPCTLRHTMEKVVRSAATSGAGSTTSGVVSGSLGSREINYILRVLGPAACRNPDIFTEVANCCIRIALPAPRGSGTASDDEFENLRIKGPNAVQLVKTTPLKPSPLPVIPDTIKEVIYDMLNALAAYHAPEEADKSDPKPGVMTQEVGQLLQDMGDDVYQQYRSLTRQSSDFDTQSGFSINSQVFAADGASTETSASGTSQGEASTPEESRDGKKDKEGDRASEEGKQKGKGSKPLMPTSTILRLLAELVRSYVGIATLIANYSYTVGQSELIKEDCSVLAFVLDHLLPHTQNAEDKDTPALARLFLASLAAAGSGTDAQVALVNEVKAALGRALAMAESTEKHARLQAVMCIISTIMESCPSTSSFYSSATAKTQHNGMNNIIRLFLKKGLVNDLARVPHSLDLSSPNMANTVNAALKPLETLSRIVNQPSSLFGSKSASSKNKSEQDAQGASQDSSSNQQDPGEPGEAEVQEEDHDVTQTEVADGDIMDGEAETDSVVIAGQPEVLSSQEMQVENELEDLIDELLERDGGSGNSTIIVSRSGEDESQEDVLMDEAPSNLSQASTLQANREDSMNILDPEDEEEHTQEEDSSGSNEDEDDSQDEEEEEEEDEEDDQEDDEGEEGDEDDDDDGSEMELDEDYPDMNASPLVRFERFDREDDLIIEFDNMFSSATDIPPSPGNIPTTHPLMVRHADHSSLTLGSGSSTTRLTQGIGRSQRTLRQLTANTGHTIHVHYPGNRQPNPPLILQRLLGPSAAADILQLSSSLPLQSRGRARLLVGNDDVHIIARSDDELLDDFFHDQSTATSQAGTLSSIPTALTRWTEECKVLDAESMHDCVSVVKVSIVNHLEFLRDEELEERREKRRKQLAEEETKITDKGKEDKENRDQSAQCTASKSNDSTEQNLSDGTPMPDSYPTTPSSTDAATSESKETLGTLQSSQQQPTLPTPPALGEVPQELQSPAGEGGSSTQLLMPVEPEELGPTRPSGEAETTQMELSPAPTITSLSPERAEDSDALTAVSSQLEGSPMDTSSLASCTLEEAVGDTSAAGSSEQPRAGSSTPGDAPPAVAEVQGRSDGSGESAQPPEDSSPPASSESSSTRDSAVAISGADSRGILEEPLPSTSSEEEDPLAGISLPEGVDPSFLAALPDDIRREVLQNQLGIRPPTRTAPSTNSSAPAVVGNPGVTEVSPEFLAALPPAIQEEVLAQQRAEQQRRELAQNASSDTPMDPVTFIQTLPSDLRRSVLEDMEDSVLAVMPPDIAAEAQALRREQEARQRQLMHERLFGHSSTSALSAILRSPAFTSRLSGNRGVQYTRLAVQRGGTFQMGGSSSHNRPSGSNVDTLLRLRGRLLLDHEALSCLLVLLFVDEPKLNTSRLHRVLRNLCYHAQTRHWVIRSLLSILQRSSESELCIETPKLTTSEEKGKKSSKSCGSSSHENRPLDLLHKMESKSSNQLSWLSVSMDAALGCRTNIFQIQRSGGRKHTEKHASGGSTVHIHPQAAPVVCRHVLDTLIQLAKVFPSHFTQQRTKETNCESDRERGNKACSPCSSQSSSSGICTDFWDLLVKLDNMNVSRKGKNSVKSVPVSAGGEGETSPYSLEASPLGQLMNMLSHPVIRRSSLLTEKLLRLLSLISIALPENKVSEAQANSGSGASSTTTATSTTSTTTTTAASTTPTPPTAPTPVTSAPALVAATAISTIVVAASTTVTTPTTATTTVSISPTTKGSKSPAKVSDGGSSSTDFKMVSSGLTENQLQLSVEVLTSHSCSEEGLEDAANVLLQLSRGDSGTRDTVLKLLLNGARHLGYTLCKQIGTLLAELREYNLEQQRRAQCETLSPDGLPEEQPQTTKLKGKMQSRFDMAENVVIVASQKRPLGGRELQLPSMSMLTSKTSTQKFFLRVLQVIIQLRDDTRRANKKAKQTGRLGSSGLGSASSIQAAVRQLEAEADAIIQMVREGQRARRQQQAATSESSQSEASVRREESPMDVDQPSPSAQDTQSIASDGTPQGEKEKEERPPELPLLSEQLSLDELWDMLGECLKELEESHDQHAVLVLQPAVEAFFLVHATERESKPPVRDTRESQLAHIKDEPPPLSPAPLTPATPSSLDPFFSREPSSMHISSSLPPDTQKFLRFAETHRTVLNQILRQSTTHLADGPFAVLVDYIRVLDFDVKRKYFRQELERLDEGLRKEDMAVHVRRDHVFEDSYRELHRKSPEEMKNRLYIVFEGEEGQDAGGLLREWYMIISREMFNPMYALFRTSPGDRVTYTINPSSHCNPNHLSYFKFVGRIVAKAVYDNRLLECYFTRSFYKHILGKSVRYTDMESEDYHFYQGLVYLLENDVSTLGYDLTFSTEVQEFGVCEVRDLKPNGANILVTEENKKEYVHLVCQMRMTGAIRKQLAAFLEGFYEIIPKRLISIFTEQELELLISGLPTIDIDDLKSNTEYHKYQSNSIQIQWFWRALRSFDQADRAKFLQFVTGTSKVPLQGFAALEGMNGIQKFQIHRDDRSTDRLPSAHTCFNQLDLPAYESFEKLRHMLLLAIQECSEGFGLA

SEQ ID NO: 63697 - protein, 375 aa, Homo sapiens
TETNEKALEAVFGKYGRIVEVLLMKDRETNKSRGFAFVTFESPADAKDAARDMNGKSLDGKAIKVEQATKPSFESGRRGPPPPPRSRGPPRGLRGGRGGSGGTRGPPSRGGHMDDGGYSMNFNMSSSRGPLPVKRGPPPRSGGPPPKRSAPSGPVRSSSGMGGRAPVSRGRDSYGGPPRREPLPSRRDVYLSPRDDGYSTKDSYSSRDYPSSRDTRDYAPPPRDYTYRDYGHSSSRDDYPSRGYSDRDGYGRDRDYSDHPSGGSYRDSYESYGNSRSAPPTRGPPPSYGGSSRYDDYSSSRDGYGGSRDSYSSSRSDLYSSGRDRVGRQERGLPPSMERGYPPPRDSYSSSSRGAPRGGGRGGSRSDRGGGRSRY

SEQ ID NO: 63698 - protein, 1108 aa, Homo sapiens
VFVGNHPVSETEAYIAQRFCDNRIVSSKYTLWNFLPKNLFEQFRRIANFYFLIIFLVQVTVDTPTSPVTSGLPLFFVITVTAIKQGYEDCLRHRADNEVNKSTVYIIENAKRVRKESEKIKVGDVVEVQADETFPCDLILLSSCTTDGTCYVTTASLDGESNCKTHYAVRDTIALCTAESIDTLRAAIECEQPQPDLYKFVGRINIYSNSLEAVARSLGPENLLLKGATLKNTEKIYGVAVYTGMETKMALNYQGKSQKRSAVEKSINAFLIVYLFILLTKAAVCTTLKYVWQSTPYNDEPWYNQKTQKERETLKVLKMFTDFLSFMVLFNFIIPVSMYVTVEMQKFLGSFFISWDKDFYDEEINEGALVNTSDLNEELGQVDYVFTDKTGTLTENSMEFIECCIDGHKYKGVTQEVDGLSQTDGTLTYFDKVDKNREELFLRALCLCHTVEIKTNDAVDGATESAELTYISSSPDEIALVKGAKRYGFTFLGNRNGYMRVENQRKEIEEYELLHTLNFDAVRRRMSVIVKTQEGDILLFCKGADSAVFPRVQNHEIELTKVHVERNAMDGYRTLCVAFKEIAPDDYERINRQLIEAKMALQDREEKMEKVFDDIETNMNLIGATAVEDKLQDQAAETIEALHAAGLKVWVLTGDKMETAKSTCYACRLFQTNTELLELTTKTIEESERKEDRLHELLIEYRKKLLHEFPKSTRSFKKAWTEHQEYGLIIDGSTLSLILNSSQDSSSNNYKSIFLQICMKCTAVLCCRMAPLQKAQIVRMVKNLKGSPITLSIGDGANDVSMILESHVGIGIKGKEGRQAARNSDYSVPKFKHLKKLLLAHGHLYYVRIAHLVQYFFYKNLCFILPQFLYQFFCGFSQQPLYDAAYLTMYNICFTSLPILAYSLLEQHINIDTLTSDPRLYMKISGNAMLQLGPFLYWTFLAAFEGTVFFFGTYFLFQTASLEENGKVYGNWTFGTIVFTVLVFTVTLKLALDTRFWTWINHFVIWGSLAFYVFFSFFWGGIIWPFLKQQRMYFVFAQMLSSVSTWLAIILLIFISLFPEILLIVLKNVRRRSARRNLSCRRASDSLSARPSVRPLLLRTFSDESNVL

SEQ ID NO: 63699 - protein, 1092 aa, Homo sapiens
VFVGNHPVSETEAYIAQRFCDNRIVSSKYTLWNFLPKNLFEQFRRIANFYFLIIFLVQVTVDTPTSPVTSGLPLFFVITVTAIKQGYEDCLRHRADNEVNKSTVYIIENAKRVRKESEKIKVGDVVEVQADETFPCDLILLSSCTTDGTCYVTTASLDGESNCKTHYAVRDTIALCTAESIDTLRAAIECEQPQPDLYKFVGRINIYSNSLEAVARSLGPENLLLKGATLKNTEKIYGVAVYTGMETKMALNYQGKSQKRSAVEKSINAFLIVYLFILLTKAAVCTTLKYVWQSTPYNDEPWYNQKTQKERETLKVLKMFTDFLSFMVLFNFIIPVSMYVTVEMQKFLGSFFISWDKDFYDEEINEGALVNTSDLNEELGQVDYVFTDKTGTLTENSMEFIECCIDGHKYKGVTQEVDGLSQTDGTLTYFDKVDKNREELFLRALCLCHTVEIKTNDAVDGATESAELTYISSSPDEIALVKGAKRYGFTFLGNRNGYMRVENQRKEIEEYELLHTLNFDAVRRRMSVIVKTQEGDILLFCKGADSAVFPRVQNHEIELTKVHVERNAMDGYRTLCVAFKEIAPDDYERINRQLIEAKMALQDREEKMEKVFDDIETNMNLIGATAVEDKLQDQAAETIEALHAAGLKVWVLTGDKMETAKSTCYACRLFQTNTELLELTTKTIEESERKEDRLHELLIEYRKKLLHEFPKSTRSFKKAWTEHQEYGLIIDGSTLSLILNSSQDSSSNNYKSIFLQICMKCTAVLCCRMAPLQKAQIVRMVKNLKGSPITLSIGDGANDVSMILESHVGIGKEGRQAARNSDYSVPKFKHLKKLLLAHGHLYYVRIAHLVQYFFYKNLCFILPQFLYQFFCGFSQQPLYDAAYLTMYNICFTSLPILAYSLLEQHINIDTLTSDPRLYMKISGNAMLQLGPFLYWTFLAAFEGTVFFFGTYFLFQTASLEENGKVYGNWTFGTIVFTVLVFTVTLKLALDTRFWTWINHFVIWGSLAFYVFFSFFWGGIIWPFLKQQRMYFVFAQMLSSVSTWLAIILLIFISLFPEILLIVLKNVRRRSARNPNLELPMLLSYKHTDSGYS

SEQ ID NO: 63700 - protein, 162 aa, Homo sapiens
LAEPNRAESCPSRPFAMVDELVLLLHALLMRHRALSIENSQLMEQLRLLVCERASLLRQVRPPSCPVPFPETFNGESSRLPEFIVQTASYMLVNENRFCNDAMKVAFLISLLTGEAEEWVVPYIEMDSPILGDYRAFLDEMKQCFGWDDDEDDDDEEEEDDY

SEQ ID NO: 63701 - protein, 247 aa, Homo sapiens
LATLVQRGSGDFDDFNLEDAVKETSSVKQPWDHTTTTTTNRPGTTRAPAKPPGSGLDLADALDDQDDGRRKPGIGGRERWNHVTTTTKRPVTTRAPANTLGNDFDLADALDDRNDRDDGRRKPIAGGGGFSDKDLEDIVGGGEYKPDKGKGDGRYGSNDDPGSGMVAEPGTIAGVASALAMALIGAVSSYISYQQKKFCFSIQQGLNADYVKGENLEAVVCEEPQVKYSTLHTQSAEPPPPPEPARI

SEQ ID NO: 63702 - protein, 356 aa, Homo sapiens
LGGLSQGSRNQSYRSRSRSRSRERPSAPRGIPFASASSSVYYGSYSRPYGSDKPWPSLLDKEREESLRQKRLSERERIGELGAPEVWGLSPKNPEPDSDEHTPVEDEEPKKSTTSASTSEEEKKKKSSRSKERSKKRRKKKSSKRKHKKYSEDSDSDSDSETDSSDEDNKRRAKKAKKKEKKKKHRSKKYKKKRSKKSRKESSDSSSKESQEEFLENPWKDRTKAEEPSDLIGPEAPKTLTSQDDKPLNYGHALLPGEGAAMAEYVKAGKRIPRRGEIGLTSEEIASFECSGYVMSGSRHRRMEAVRLRKENQIYSADEKRALASFNQEERRKRENKILASFREMVYRKTKGKDDK

SEQ ID NO: 63703 - protein, 72 aa, Homo sapiens
IFLDMPQKDPCQKQACEIQKCLQANSYMESKCQAVIQELRKCCAQYPKGRSVVCSGFEKEEEENLTRKSASK

SEQ ID NO: 63704 - protein, 45 aa, Homo sapiens; identical to SEQ ID NO: 63637

SEQ ID NO: 63705 - protein, 217 aa, Homo sapiens
LAERISLIRETIYGRMWYFTSDFSRGDTAYTKLALDRHTDTTYFQEPCGIQVFHCLKHEGTGGRTLLVDGFYAAEQVLQKAPEEFELLSKVPLKHEYIEDVGECHNHMIGIGPVLNIYPWNKELYLIRYNNYDRAVINTVPYDVVHRWYTAHRTLTIELRRPENEFWVKLKPGRVLFIDNWRVLHGRECFTGYRQLCGCYLTRDDVLNTARLLGLQA

SEQ ID NO: 63706 - protein, 28 aa, Homo sapiens
LTLDDIERLASRFLHPEVTETMEKGFSK

SEQ ID NO: 63707 - protein, 59 aa, Homo sapiens; identical to SEQ ID NO: 63609

SEQ ID NO: 63708 - protein, 36 aa, Homo sapiens; identical to SEQ ID NO: 63678

SEQ ID NO: 63709 - protein, 42 aa, Homo sapiens
LIGLGYTQTLKPGIKLTLSALLDGKNVNAGGHKLGLGLEFQA

SEQ ID NO: 63710 - protein, 1052 aa, Homo sapiens
MLCALALMVAAGGCVVSAFNLDTRFLVVKEAGNPGSLFGYSVALHRQTERQQRYLLLAGAPRELAVPDGYTNRTGAVYLCPLTAHKDDCERMNITVKNDPGHHIIEDMWLGVTVASQGPAGRVLVCAHRYTQVLWSGSEDQRRMVGKCYVRGNDLELDSSDDWQTYHNEMCNSNTDYLETGMCQLGTSGGFTQNTVYFGAPGAYNWKGNSYMIQRKEWDLSEYSYKDPEDQGNLYIGYTMQVGSFILHPKNITIVTGAPRHRHMGAVFLLSQEAGGDLRRRQVLEGSQVGAYFGSAIALADLNNDGWQDLLVGAPYYFERKEEVGGAIYVFMNQAGTSFPAHPSLLLHGPSGSAFGLSVASIGDINQDGFQDIAVGAPFEGLGKVYIYHSSSKGLLRQPQQVIHGEKLGLPGLATFGYSLSGQMDVDENFYPDLLVGSLSDHIVLLRARPVINIVHKTLVPRPAVLDPALCTATSCVQVELCFAYNQSAGNPNYRRNITLAYTLEADRDRRPPRLRFAGSESAVFHGFFSMPEMRCQKLELLLMDNLRDKLRPIIISMNYSLPLRMPDRPRLGLRSLDAYPILNQAQALENHTEVQFQKECGPDNKCESNLQMRAAFVSEQQQKLSRLQYSRDVRKLLLSINVTNTRTSERSGEDAHEALLTLVVPPALLLSSVRPPGACQANETIFCELGNPFKRNQRMELLIAFEVIGVTLHTRDLQVQLQLSTSSHQDNLWPMILTLLVDYTLQTSLSMVNHRLQSFFGGTVMGESGMKTVEDVGSPLKYEFQVGPMGEGLVGLGTLVLGLEWPYEVSNGKWLLYPTEITVHGNGSWPCRPPGDLINPLNLTLSDPGDRPSSPQRRRRQLDPGGGQGPPPVTLAAAKKAKSETVLTCATGRAHCVWLECPIPDAPVVTNVTVKARVWNSTFIEDYRDFDRVRVNGWATLFLRTSIPTINMENKTTWFSVDIDSELVEELPAEIELWLVLVAVGAGLLLLGLIILLLWKCDFFKRTRYYQIMPKYHAVRIREEERYPPPGSTLPTKKHWVTSWQTRDQYY

SEQ ID NO: 63711 - protein, 61 aa, Homo sapiens
MISLIALFTNFYIQTYNKKGASRRKDHLKDHQNGSMAAVNGHTNSFSPLENNVKPRKLRKD

SEQ ID NO: 63712 - protein, 511 aa, Homo sapiens
MASFLAFLLLNFRVCLLLLQLLMPHSAQFSVLGPSGPILAMVGEDADLPCHLFPTMSAETMELKWVSSSLRQVVNVYADGKEVEDRQSAPYRGRTSILRDGITAGKAALRIHNVTASDSGKYLCYFQDGDFYEKALVELKVAALGSDLHVDVKGYKDGGIHLECRSTGWYPQPQIQWSNNKGENIPTVEAPVVADGVGLYAVAASVIMRGSSGEGVSCTIRSSLLGLEKTASISIADPFFRSAQRWIAALAGTLPVLLLLLGGAGYFLWQQQEEKKTQFRKKKREQELREMAWSTMKQEQSTRVKLLEELRWRSIQYASRGERHSAYNEWKKALFKPADVILDPKTANPILLVSEDQRSVQRAKEPQDLPDNPERFNWHYCVLGCESFISGRHYWEVEVGDRKEWHIGVCSKNVQRKGWVKMTPENGFWTMGLTDGNKYRTLTEPRTNLKLPKPPKKVGVFLDYETGDISFYNAVDGSHIHTFLDVSFSEALYPVFRILTLEPTALTICPA

SEQ ID NO: 63713 - protein, 459 aa, Homo sapiens
MASFLAFLLLNFRVCLLLLQLLMPHSAQFSVLGPSGPILAMVGEDADLPCHLFPTMSAETMELKWVSSSLRQVVNVYADGKEVEDRQSAPYRGRTSILRDGITAGKAALRIHNVTASDSGKYLCYFQDGDFYEKALVELKVADGVGLYAVAASVIMRGSSGEGVSCTIRSSLLGLEKTASISIADPFFRSAQRWIAALAGTLPVLLLLLGGAGYFLWQQQEEKKTQFRKKKREQELREMAWSTMKQEQSTRVKLLEELRWRSIQYASRGERHSAYNEWKKALFKPADVILDPKTANPILLVSEDQRSVQRAKEPQDLPDNPERFNWHYCVLGCESFISGRHYWEVEVGDRKEWHIGVCSKNVQRKGWVKMTPENGFWTMGLTDGNKYRTLTEPRTNLKLPKPPKKVGVFLDYETGDISFYNAVDGSHIHTFLDVSFSEALYPVFRILTLEPTALTICPA

SEQ ID NO: 63714 - protein, 376 aa, Homo sapiens
MASFLAFLLLNFRVCLLLLQLLMPHSAQFSVLGPSGPILAMVGEDADLPCHLFPTMSAETMELKWVSSSLRQVVNVYADGKEVEDRQSAPYRGRTSILRDGITAGKAALRIHNVTASDSGKYLCYFQDGDFYEKALVELKVAALGSDLHVDVKGYKDGGIHLECRSTGWYPQPQIQWSNNKGENIPTVEAPVVADGVGLYAVAASVIMRGSSGEGVSCTIRSSLLGLEKTASISIADPFFRSAQRWIAALAGTLPVLLLLLGGAGYFLWQQQEEKKTQFRKKKREQELREMAWSTMKQEQSTRVKLLEELRWRSIQYASRGERHSAYNEWKKALFKPGPPIGQTQQQTRGQGSPVALSQESAQRTDSWGPEEGGES

SEQ ID NO: 63715 - protein, 350 aa, Homo sapiens
MASFLAFLLLNFRVCLLLLQLLMPHSAQFSVLGPSGPILAMVGEDADLPCHLFPTMSAETMELKWVSSSLRQVVNVYADGKEVEDRQSAPYRGRTSILRDGITAGKAALRIHNVTASDSGKYLCYFQDGDFYEKALVELKVAALGSDLHVDVKGYKDGGIHLECRSTGWYPQPQIQWSNNKGENIPTVEAPVVADGVGLYAVAASVIMRGSSGEGVSCTIRSSLLGLEKTASISIADPFFRSAQRWIAALAGTLPVLLLLLGGAGYFLWQQQEEKKTQFRKKKREQELREMAWSTMKQEQSTRVKLLEELRWRSIQYASRGERHSAYNEWKKALFKPGEEMLQMRLHFVK

SEQ ID NO: 63716 - protein, 22 aa, Homo sapiens
MMSLFIARLYMMLCKTWIRRLM

SEQ ID NO: 63717 - protein, 788 aa, Homo sapiens [sequence omitted]

SEQ ID NO: 63718 - protein, 47 aa, Homo sapiens
MFGAAARSADLVLLEKNLQAAHGFIAPVTKGRTAAKKWNLKTLAIVR

SEQ ID NO: 63719 - protein, 1713 aa, Homo sapiens
MGWLWIFGAALGQCLGYSSQQQRVPFLQPPGQSQLQASYVEFRPSQGCSPGYYRDHKGLYTGRCVPCNCNGHSNQCQDGSGICVNCQHNTAGEHCERCQEGYYGNAVHGSCRACPCPHTNSFATGCVVNGGDVRCSCKAGYTGTQCERCAPGYFGNPQKFGGSCQPCSCNSNGQLGSCHPLTGDCINQEPKDSSPAEECDDCDSCVMTLLNDLATMGEQLRLVKSQLQGLSASAGLLEQMRHMETQAKDLRNQLLNYRSAISNHGSKIEGLERELTDLNQEFETLQEKAQVNSRKAQTLNNNVNRATQSAKELDVKIKNVIRNVHILLKQISGTDGEGNNVPSGDFSREWAEAQRMMRELRNRNFGKHLREAEADKRESQLLLNRIRTWQKTHQGENNGLANSIRDSLNEYEAKLSDLRARLQEAAAQAKQANGLNQENERALGAIQRQVKEINSLQSDFTKYLTTADSSLLQTNIALQLMEKSQKEYEKLAASLNEARQELSDKVRELSRSAGKTSLVEEAEKHARSLQELAKQLEEIKRNASGDELVRCAVDAATAYENILNAIKAAEDAANRAASASESALQTVIKEDLPRKAKTLSSNSDKLLNEAKMTQKKLKQEVSPALNNLQQTLNIVTVQKEVIDTNLTTLRDGLHGIQRGDIDAMISSAKSMVRKANDITDEVLDGLNPIQTDVERIKDTYGRTQNEDFKKALTDADNSVNKLTNKLPDLWRKIESINQQLLPLGNISDNMDRIRELIQQARDAASKVAVPMRFNGKSGVEVRLPNDLEDLKGYTSLSLFLQRPNSRENGGTENMFVMYLGNKDASRDYIGMAVVDGQLTCVYNLGDREAELQVDQILTKSETKEAVMDRVKFQRIYQFARLNYTKGATSSKPETPGVYDMDGRNSNTLLNLDPENVVFYVGGYPPDFKLPSRLSFPPYKGCIELDDLNENVLSLYNFKKTFNLNTTEVEPCRRRKEESDKNYFEGTGYARVPTQPHAPIPTFGQTIQTTVDRGLLFFAENGDRFISLNIEDGKLMVRYKLNSELPKERGVGDAINNGRDHSIQIKIGKLQKRMWINVDVQNTIIDGEVFDFSTYYLGGIPIAIRERFNISTPAFRGCMKNLKKTSGVVRLNDTVGVTKKCSEDWKLVRSASFSRGGQLSFTDLGLPPTDHLQASFGFQTFQPSGILLDHQTWTRNLQVTLEDGYIELSTSDSGGPIFKSPQTYMDGLLHYVSVISDNSGLRLLIDDQLLRNSKRLKHISSSRQSLRLGGSNFEGCISNVFVQRLSLSPEVLDLTSNSLKRDVSLGGCSLNKPPFLMLLKGSTRFNKTKTFRINQLLQDTPVASPRSVKVWQDACSPLPKTQANHGALQFGDIPTSHLLFKLPQELLKPRSQFAVDMQTTSSRGLVFHTGTKNSFMALYLSKGRLVFALGTDGKKLRIKSKEKCNDGKWHTVVFGHDGEKGRLVVDGLRAREGSLPGNSTISIRAPVYLGSPPSGKPKSLPTNSFVGCLKNFQLDSKPLYTPSSSFGVSSCLGGPLEKGIYFSEEGGHVVLAHSVLLGPEFKLVFSIRPRSLTGILIHIGSQPGKHLCVYLEAGKVTASMDSGAGGTSTSVTPKQSLCDGQWHSVAVTIKQHILHLELDTDSSYTAGQIPFPPASTQEPLHLGGAPANLTTLRIPVWKSFFGCLRNIHVNHIPVPVTEALEVQGPVSLNGCPDQ

SEQ ID NO: 63720 - protein, 34 aa, Homo sapiens
MWSWKCLLFWAVLVTATLCTARPSPTLPEQGWQL

SEQ ID NO: 63721 - protein, 34 aa, Homo sapiens
MRIFFLSSPGVDECLAPDRRDLAPSFVVRKKLGL

SEQ ID NO: 63722 - protein, 41 aa, Homo sapiens
MEAPGLGRWRRSRSAAMAGSLSARGGGVAYLLEPHAARSQA

SEQ ID NO: 63723 - protein, 1093 aa, Homo sapiens
MVLAGPLAVSLLLPSLTLLVSHLSSSQDVSSEPSSEQQLCALSKHPTVAFEDLQPWVSNFTYPGARDFSQLALDPSGNQLIVGARNYLFRLSLANVSLLQATEWASSEDTRRSCQSKGKTEEECQNYVRVLIVAGRKVFMCGTNAFSPMCTSRQVGNLSRTIEKINGVARCPYDPRHNSTAVISSQGELYAATVIDFSGRDPAIYRSLGSGPPLRTAQYNSKWLNEPNFVAAYDIGLFAYFFLRENAVEHDCGRTVYSRVARVCKNDVGGRFLLEDTWTTFMKARLNCSRPGEVPFYYNELQSAFHLPEQDLIYGVFTTNVNSIAASAVCAFNLSAISQAFNGPFRYQENPRAAWLPIANPIPNFQCGTLPETGPNENLTERSLQDAQRLFLMSEAVQPVTPEPCVTQDSVRFSHLVVDLVQAKDTLYHVLYIGTESGTILKALSTASRSLHGCYLEELHVLPPGRREPLRSLRILHSARALFVGLRDGVLRVPLERCAAYRSQGACLGARDPYCGWDGKQQRCSTLEDSSNMSLWTQNITACPVRNVTRDGGFGPWSPWQPCEHLDGDNSGSCLCRARSCDSPRPRCGGLDCLGPAIHIANCSRNGAWTPWSSWALCSTSCGIGFQVRQRSCSNPAPRHGGRICVGKSREERFCNENTPCPVPIFWASWGSWSKCSSNCGGGMQSRRRACENGNSCLGCGVEFKTCNPEGCPEVRRNTPWTPWLPVNVTQGGARQEQRFRFTCRAPLADPHGLQFGRRRTETRTCPADGSGSCDTDALVEVLLRSGSTSPHTVSGGWAAWGPWSSCSRDCELGFRVRKRTCTNPEPRNGGLPCVGDAAEYQDCNPQACPVRGAWSCWTSWSPCSASCGGGHYQRTRSCTSPAPSPGEDICLGLHTEEALCATQACPEGWSPWSEWSKCTDDGAQSRSRHCEELLPGSSACAGNSSQSRPCPYSEIPVILPASSMEEATDCAGFNLIHLVATGISCFLGSGLLTLAVYLSCQHCQRQSQESTLVHPATPNHLHYKGGGTPKNEKYTPMEFKTLNKNNLIPDDRANFYPLQQTNVYTTTYYPSPLNKHSFRPEASPGQRCFPNS

SEQ ID NO: 63724 - protein, 375 aa, Homo sapiens [sequence omitted]

SEQ ID NO: 63725 - protein, 1210 aa, Homo sapiens
MKKHRRALALVSCLFLCSLVWLPSWRVCCKESSSASASSYYSQDDNCALENEDVQFQKKNTESKKLSPPVVETLPTVDLHEESSNAVVDSETVENISSSSTSEITPISKLDEIEKSGTIPIAKPSETEQSETDCDVGEALDASAPIEQPSFVSPPDSLVGQHIENVSSSHGKGKITKSEFESKVSASEQGGGDPKSALNASDNLKNESSDYTKPGDIDPTSVASPKDPEDIPTFDEWKKKVMEVEKEKSQSMHASSNGGSHATKKVQKNRNNYASVECGAKILAANPEAKSTSAILIENMDLYMLNPCSTKIWFVIELCEPIQVKQLDIANYELFSSTPKDFLVSISDRYPTNKWIKLGTFHGRDERNVQSFPLDEQMYAKYVKVELLSHFGSEHFCPLSLIRVFGTSMVEEYEEIADSQYHSERQELFDEDYDYPLDYNTGEDKSSKNLLGSATNAILNMVNIAANILGAKTEDLTEGNKSISENATATAAPKMPESTPVSTPVPSPEYVTTEVHTHDMEPSTPDTPKESPIVQLVQEEEEEASPSTVTLLGSGEQEDESSPWFESETQIFCSELTTICCISSFSEYIYKWCSVRVALYRQRSRTALSKGKDYLVLAQPPLLLPAESVDVSVLQPLSGELENTNIEREAETVVLGDLSSSMHQDDLVNHTVDAVELEPSHSQTLSQSLLLDITPEINPLPKIEVSESVEYEAGHIPSPVIPQESSVEIDNETEQKSESFSSIEKPSITYETNKVNELMDNIIKEDVNSMQIFTKLSETIVPPINTATVPDNEDGEAKMNIADTAKQTLISVVDSSSLPEVKEEEQSPEDALLRGLQRTATDFYAELQNSTDLGYANGNLVHGSNQKESVFMRLNNRIKALEVNMSLSGRYLEELSQRYRKQMEEMQKAFNKTIVKLQNTSRIAEEQDQRQTEAIQLLQAQLTNMTQLVSNLSATVAELKREVSDRQSYLVISLVLCVVLGLMLCMQRCRNTSQFDGDYISKLPKSNQYPSPKRCFSSYDDMNLKRRTSFPLMRSKSLQLTGKEVDPNDLYIVEPLKFSPEKKKKRCKYKIEKIETIKPEEPLHPIANGDIKGRKPFTNQRDFSNMGEVYHSSYKGPPSEGSSETSSQSEESYFCGISACTSLCNGQSQKTKTEKRALKRRRSKVQDQGKLIKTLIQTKSGSLPSLHDIIKGNKEITVGTFGVTAVSGHI

SEQ ID NO: 63726 - protein, 249 aa, Homo sapiens
MPDPLFSAVQGKDEILHKALCFCPWLGKGGMEPLRLLILLFVTELSGAHNTTVFQGVAGQSLQVSCPYDSMKHWGRRKAWCRQLGEKGPCQRVVSTHNLWLLSFLRRWNGSTAITDDTLGGTLTITLRNLQPHDAGLYQCQSLHGSEADTLRKVLVEVLADPLDHRDAGDLWFPGESESFEDAHVEHSISRAERHVKEDDGRKSPGEVPPGTSPACILATWPPGLLVLLWQETTLPEHCFSWTLEAGTG

SEQ ID NO: 63727 - protein, 32 aa, Homo sapiens
MEYLEVLKLLFLMTLSCLTSLLSGGMILCTDG

SEQ ID NO: 63728 - protein, 37 aa, Homo sapiens
MLWACPLEPHRRAAQWPVELRRPQASWTRSCKTSQPC

SEQ ID NO: 63729 - protein, 22 aa, Homo sapiens
MPWFWWLCWAGCLSPSILRLGW

SEQ ID NO: 63730 - protein, 106 aa, Homo sapiens
MLNLGGFLCVLSLFLSELLRSHWYLYWGNIAYKQEAYSLSGENFFMSETENSCSRLCHPFFSRQKIPKSCNQRSLHLIDKATNKPKCLSMSTAACQTSSIATRCPV

SEQ ID NO: 63731 - protein, 49 aa, Homo sapiens
MAASPPELAMMVILMGTATMRKVTSSAPSRMTQARTRMSIPRLISTTAT

SEQ ID NO: 63732 - protein, 34 aa, Homo sapiens
MHQQNQNRVWWQILLFLHNLALNGEENRNGAGPR

SEQ ID NO: 63733 - protein, 336 aa, Homo sapiens
MPPPLLLLLLLASPPAASAPSARDPFAPQLGDTQNCQLRCRDRDLGPQPSQAGLEGASESPYDRAVLISACERGCRLFSICRFVARSSKPNATQTECEAACVEAYVKEAEQQACSHGCWSQPAEPEPEQKRKVLEAPSGALSLLDLFSTLCNDLVNSAQGFVSSTWTYYLQTDNGKVVVFQTQPIVESLGFQGGRLQRVEVTWRGSHPEALEVHVDPVGPLDKVRKAKIRVKTSSKAKVESEEPQDNDFLSCMSRRSGLPRWILACCLFLSVLVMLWLSCSTLVTAPGQHLKFQPLTLEQHKGFMMEPDWPLYPPPSHACEDSLPPYKLKLDLTKL

SEQ ID NO: 63734 - protein, 1383 aa, Homo sapiens
MHLRLFCILLAAVSGAEGWGYYGCDEELVGPLYARSLGASSYYSLLTAPRFARLHGISGWSPRIGDPNPWLQIDLMKKHRIRAVATQGSFNSWDWVTRYMLLYGDRVDSWTPFYQRGHNSTFFGNVNESAVVRHDLHFHFTARYIRIVPLAWNPRGKIGLRLGLYGCPYKADILYFDGDDAISYRFPRGVSRSLWDVFAFSFKTEEKDGLLLHAEGAQGDYVTLELEGAHLLLHMSLGSSPIQPRPGHTTVSAGGVLNDQHWHYVRVDRFGRDVNFTLDGYVQRFILNGDFERLNLDTEMFIGGLVGAARKNLAYRHNFRGCIENVIFNRVNIADLAVRRHSRITFEGKVAFRCLDPVPHPINFGGPHNFVQVPGFPRRGRLAVSFRFRTWDLTGLLLFSRLGDGLGHVELTLSEGQVNVSIAQSGRKKLQFAAGYRLNDGFWHEVNFVAQENHAVISIDDVEGAEVRVSYPLLIRTGTSYFFGGCPKPASRWDCHSNQTAFHGCMELLKVDGQLVNLTLVEGRRLGFYAEVLFDTCGITDRCSPNMCEHDGRCYQSWDDFICYCELTGYKGETCHTPLYKESCEAYRLSGKTSGNFTIDPDGSGPLKPFVVYCDIRENRAWTVVRHDRLWTTRVTGSSMERPFLGAIQYWNASWEEVSALANASQHCEQWIEFSCYNSRLLNTAGGYPYSFWIGRNEEQHFYWGGSQPGIQRCACGLDRSCVDPALYCNCDADQPQWRTDKGLLTFVDHLPVTQVVIGDTNRSTSEAQFFLRPLRCYGDRNSWNTISFHTGAALRFPPIRANHSLDVSFYFRTSAPSGVFLENMGGPYCQWRRPYVRVELNTSRDVVFAFDVGNGDENLTVHSDDFEFNDDEWHLVRAEINVKQARLRVDHRPWVLRPMPLQTYIWMEYDQPLYVGSAELKRRPFVGCLRAMRLNGVTLNLEGRANASEGTSPNCTGHCAHPRLPCFHGGRCVERYSYYTCDCDLTAFDGPYCNHDIGGFFEPGTWMRYNLQSALRSAAREFSHMLSRPVPGYEPGYIPGYDTPGYVPGYHGPGYRLPDYPRPGRPVPGYRGPVYNVTGEEVSFSFSTSSAPAVLLYVSSFVRDYMAVLIKDDGTLQLRYQLGTSPYVYQLTTRPVTDGQPHSINITRVYRNLFIQVDYFPLTEQKFSLLVDSQLDSPKALYLGRVMETGVIDPEIQRYNTPGFSGCLSGVRFNNVAPLKTHFRTPRPMTAELAEALRVQGELSESNCGAMPRLVSEVPPELDPWYLPPDFPYYHDEGWVAILLGFLVAFLLLGLVGMLVLFYLQNHRYKGSYHTNEPKAAHEYHPGSKPPLPTSGPAQVPTPTAAPNQAPASAPAPAPTPAPAPGPRDQNLPQILEESRSE

SEQ ID NO: 63735 - protein, 60 aa, Homo sapiens
MLICTLLEFCLAVLTAVLRWKQAYSDFPGSVLFLPHSYIGNSGMSSKMTHDCGYEELLTS

SEQ ID NO: 63736 - protein, 514 aa, Homo sapiens
MGLAGAAGRWWGLALGLTAFFLPGVHSQVVQVNDSMYGFIGTDVVLHCSFANPLPSVKITQVTWQKSTNGSKQNVAIYNPSMGVSVLAPYRERVEFLRPSFTDGTIRLSRLELEDEGVYICEFATFPTGNRESQLNLTVMAKPTNWIEGTQAVLRAKKGQDDKVLVATCTSANGKPPSVVSWETRLKGEAEYQEIRNPNGTVTVISRYRLVPSREAHQQSLACIVNYHMDRFKESLTLNVQYEPEVTIEGFDGNWYLQRMDVKLTCKADANPPATEYHWTTLNGSLPKGVEAQNRTLFFKGPINYSLAGTYICEATNPIGTRSGQVEVNITEFPYTPSPPEHGRRAGPVPTAIIGGVAGSILLVLIVVGGIVVALRRRRHTFKGDYSTKKHVYGNGYSKAGIPQHHPPMAQNLQYPDDSDDEKKAGPLGGSSYEEEEEEEEGGGGGERKVGGPHPKYDEDAKRPYFTVDEAEARQDGYGDRTLGYQYDPEQLDLAENMVSQNDGSFISKKEWYV

SEQ ID NO: 63737 - protein, 455 aa, Homo sapiens
MGLAGAAGRWWGLALGLTAFFLPGVHSQVVQVNDSMYGFIGTDVVLHCSFANPLPSVKITQVTWQKSTNGSKQNVAIYNPSMGVSVLAPYRERVEFLRPSFTDGTIRLSRLELEDEGVYICEFATFPTGNRESQLNLTVMAKPTNWIEGTQAVLRAKKGQDDKVLVATCTSANGKPPSVVSWETRLKGEAEYQEIRNPNGTVTVISRYRLVPSREAHQQSLACIVNYHMDRFKESLTLNVQYEPEVTIEGFDGNWYLQRMDVKLTCKADANPPATEYHWTTLNGSLPKGVEAQNRTLFFKGPINYSLAGTYICEATNPIGTRSGQVEVNITEKPRPQRGLGSAARLLAGTVAVFLILVAVLTVFFLYNRQQKSPPETDGAGTDQPLSQKPEPSPSRQSSLVPEDIQVVHLDPGRQQQQEEEDLQKLSLQPPYYDLGVSPSYHPSVRTTEPRGECP

SEQ ID NO: 63738 - protein, 35 aa, Homo sapiens
MAHEICYSVLCLFSYVAAVHSSEEDLRTPPRPVSS

SEQ ID NO: 63739 - protein, 293 aa, Homo sapiens [sequence omitted]

SEQ ID NO: 63740 - protein, 101 aa, Homo sapiens
MRILLGLCLWGPSSTTWKVSQAGVPNISELQVLETCVATVGRVSNVDHNKRVIGKAGRNRWLGKRPNSGRWHRKGGWAGRKIRPLPPMKSYVKLPSASAQS

SEQ ID NO: 63741 - protein, 76 aa, Homo sapiens
MRGNLALVGVLISLAFLSLLPSGHPQPAGDDACSVQILVPGLKGDAGEKGDKGAPGRPGRVGPTGEKAVTASRDSF

SEQ ID NO: 63742 - protein, 929 aa, Homo sapiens
MFPLTWVFLALYFSRHQVRGQPDPPCGGRLNSKDAGYITSPGYPQDYPSHQNCEWIVYAPEPNQKIVLNFNPHFEIEKHDCKYDFIEIRDGDSESADLLGKHCGNIAPPTIISSGSMLYIKFTSDYARQGAGFSLRYEIFKTGSEDCSKNFTSPNGTIESPGFPEKYPHNLDCTFTILAKPKMEIILQFLIFDLEHDPLQVGEGDCKYDWLDIWDGIPHVGPLIGKYCGTKTPSELRSSTGILSLTFHTDMAVAKDGFSARYYLVHQEPLENFQCNVPLGMESGRIANEQISASSTYSDGRWTPQQSRLHGDDNGWTPNLDSNKEYLQVDLRFLTMLTAIATQGAISRETQNGYYVKSYKLEVSTNGEDWMVYRHGKNHKVFQANNDATEVVLNKLHAPLLTRFVRIRPQTWHSGIALRLELFGCRVTDAPCSNMLGMLSGLIADSQISASSTQEYLWSPSAARLVSSRSGWFPRIPQAQPGEEWLQVDLGTPKTVKGVIIQGARGGDSITAVEARAFVRKFKVSYSLNGKDWEYIQDPRTQQPKLFEGNMHYDTPDIRRFDPIPAQYVRVYPERWSPAGIGMRLEVLGCDWTDSKPTVETLGPTVKSEETTTPYPTEEEATECGENCSFEDDKDLQLPSGFNCNFDFLEEPCGWMYDHAKWLRTTWASSSSPNDRTFPDDRNFLRLQSDSQREGQYARLISPPVHLPRSPVCMEFQYQATGGRGVALQVVREASQESKLLWVIREDQGGEWKHGRIILPSYDMEYQIVFEGVIGKGRSGEIAIDDIRISTDVPLENCMEPISAFAGENFKVDIPEIHEREGYEDEIDDEYEVDWSNSSSATSGSGAPSTDKEKSWLYTLDPILITIIAMSSLGVLLGATCAGLLLYCTCSYSGLSSRSCTTLENYNFELYDGLKHKVKMNHQKCCSEA

SEQ ID NO: 63743 - protein, 553 aa, Homo sapiens
MFPLTWVFLALYFSRHQVRGQPDPPCGGRLNSKDAGYITSPGYPQDYPSHQNCEWIVYAPEPNQKIVLNFNPHFEIEKHDCKYDFIEIRDGDSESADLLGKHCGNIAPPTIISSGSMLYIKFTSDYARQGAGFSLRYEIFKTGSEDCSKNFTSPNGTIESPGFPEKYPHNLDCTFTILAKPKMEIILQFLIFDLEHDPLQVGEGDCKYDWLDIWDGIPHVGPLIGKYCGTKTPSELRSSTGILSLTFHTDMAVAKDGFSARYYLVHQEPLENFQCNVPLGMESGRIANEQISASSTYSDGRWTPQQSRLHGDDNGWTPNLDSNKEYLQVDLRFLTMLTAIATQGAISRETQNGYYVKSYKLEVSTNGEDWMVYRHGKNHKVFQANNDATEVVLNKLHAPLLTRFVRIRPQTWHSGIALRLELFGCRVTDAPCSNMLGMLSGLIADSQISASSTQEYLWSPSAARLVSSRSGWFPRIPQAQPGEEWLQVDLGTPKTVKGVIIQGARGGDSITAVEARAFVRKFKVSYSLNGKDWEYIQDPRTQQPKVGCSWRPL

SEQ ID NO: 63744 - protein, 20 aa, Homo sapiens
MIVIFLTIAYLKLLFLKKYS

SEQ ID NO: 63745 - protein, 14 aa, Homo sapiens
MSFFLLASLTDLLP

SEQ ID NO: 63746 - protein, 19 aa, Homo sapiens
MLNLPPARTNKTARKSRFS

SEQ ID NO: 63747 - protein, 25 aa, Homo sapiens
MRALLARLLLCVLVVSDSKVSALLL

SEQ ID NO: 63748 - protein, 402 aa, Homo sapiens
MLMVVLLCQVLLGGASHASLIPETGKKKVAEIQGHAGGRRSGQSHELLRDFEATLLQMFGLRRRPQPSKSAVIPDYMRDLYRLQSGEEEEEQIHSTGLEYPERPASRANTVRSFHHEEHLENIPGTSENSAFRFLFNLSSIPENEVISSAELRLFREQVDQGPDWERGFHRINIYEVMKPPAEVVPGHLITRLLDTRLVHHNVTRWETFDVSPAVLRWTREKQPNYGLAIEVTHLHQTRTHQGQHVRISRSLPQGSGNWAQLRPLLVTFGHDGRGHALTRRRRAKRSPKHHSQRARKKNKNCRRHSLYVDFSDVGWNDWIVAPPGYQAFYCHGDCPFPLADHLNSTNHAIVQTLVNSVNSSIPKACCVPTELSAISMLYLDEYDKVVLKNYQEMVVEGCGCR

SEQ ID NO: 63749 - protein, 45 aa, Homo sapiens
MHSWTWDPHSSEQLDLAQSLSEEDPLDKRTLPWCESEGRGSWNEG

SEQ ID NO: 63750 - protein, 457 aa, Homo sapiens
MHPARKLLSLLFLILMGTELTQVLPTNPEESWQVYSSAQDSEGRCICTVVAPQQTMCSRDARTKQLRQLLEKVQNMSQSIEVLDRRTQRDLQYVEKMENQMKGLESKFKQVEESHKQHLARQFKAIKAKMDELRPLIPVLEEYKADAKLVLQFKEEVQNLTSVLNELQEEIGAYDYDELQSRVSNLEERLRACMQKLACGKLTGISDPVTVKTSGSRFGSWMTDPLAPEGDNRVWYMDGYHNNRFVREYKSMVDFMNTDNFTSHRLPHPWSGTGQVVYNGSIYFNKFQSHIIIRFDLKTETILKTRSLDYAGYNNMYHYAWGGHSDIDLMVDESGLWAVYATNQNAGNIVVSRLDPVSLQTLQTWNTSYPKRSAGEAFIICGTLYVTNGYSGGTKVHYAYQTNASTYEYIDIPFQNKYSHISMLDYNPKDRALYAWNNGHQILYNVTLFHVIRSDEL

SEQ ID NO: 63751 - protein, 125 aa, Homo sapiens
MHPARKLLSLLFLILMGTELTQVLPTNPEESWQVYSSAQDSEGRCICTVVAPQQTMCSRDARTKQLRQLLEKVQNMSQSIEVLDRRTQRDLQYVEKMENQMKGLESKFKQVEESHKQHLARQFKG

SEQ ID NO: 63752 - protein, 41 aa, Homo sapiens
MIPLVCRLRECLELFGGRCRTVTSQSAARSRCLVLKSSLRP

SEQ ID NO: 63753 - protein, 71 aa, Homo sapiens
MALGVALLIIQKKCLNKILKNPKKKILLKQKVQAQNPQLIQQSLRRILPNQILKGVREEMTPAPQETVPQD

SEQ ID NO: 63754 - protein, 646 aa, Homo sapiens
MRGRFAHAQYSRCLRGPCLAEVAAGGGTRSAMAEGSGEVVAVSATGAANGLNNGAGGTSATTCNPLSRKLHKILETRLDNDKEMLEALKALSTFFVENSLRTRRNLRGDIERKSLAINEEFVSIFKEVKEELESISEDVQAMSNCCQDMTSRLQAAKEQTQDLIVKTTKLQSESQKLEIRAQVADAFLSKFQLTSDEMSLLRGTREGPITEDFFKALGRVKQIHNDVKVLLRTNQQTAGLEIMEQMALLQETAYERLYRWAQSECRTLTQESCDVSPVLTQAMEALQDRPVLYKYTLDEFGTARRSTVVRGFIDALTRGGPGGTPRPIEMHSHDPLRYVGDMLAWLHQATASEKEHLEALLKHVTTQGVEENIQEVVGHITEGVCRPLKVRIEQVIVAEPGAVLLYKISNLLKFYHHTISGIVGNSATALLTTIEEMHLLSKKIFFNSLSLHASKLMDKVELPPPDLGPSSALNQTLMLLREVLASHDSSVVPLDARQADFVQVLSCVLDPLLQMCTVSASNLGTADMATFMVNSLYMMKTTLALFEFTDRRLEMLQFQIEAHLDTLINEQASYVLTRVGLSYIYNTVQQHKPEQGSLANMPNLDSVTLKAAMVQFDRYLSAPDNLLIPQLNFLLSATVKRPPNGP

SEQ ID NO: 63755 - protein, 239 aa, Homo sapiens
MLFYTLITAFLIGIQAEPHSESNVPAGHTIPQAHWTKLQHSLDTALRRARSAPAAAIAARVAGQTRNITVDPRLFKKRRLRSPRVLFSTQPPREAADTQDLDFEVGGAAPFNRTHRSKRSSSHPIFHRGEFSVCDSVSVWVGDKTTATDIKGKEVMVLGEVNINNSVFKQYFFETKCRDPNPVDSGCRGIDSKHWNSYCTTTHTFVKALTMDGKQAAWRFIRIDTACVCVLSRKAVRRA

SEQ ID NO: 63756 - protein, 20 aa, Homo sapiens
MTFRSRRLSFKSLLLHLLIL

SEQ ID NO: 63757 - protein, 32 aa, Homo sapiens
MVRMFVPLKIHVEIITAKVMVLRGKTMNYGIS

SEQ ID NO: 63758 - protein, 849 aa, Homo sapiens [sequence omitted]

SEQ ID NO: 63759 - protein, 796 aa, Homo sapiens [sequence omitted]

SEQ ID NO: 63760 - protein, 438 aa, Homo sapiens
MHSEYFPIHVQALPKRKAKHTFSFSHTRREERKAMADKVLKEKRKLFIRSMGEGTINGLLDELLQTRVLNKEEMEKVKRENATVMDKTRALIDSVIPKGAQACQICITYICEEDSYLAGTLGLSADQTSGNYLNMQDSQGVLSSFPAPQAVQDNPAMPTSSGSEGNVKLCSLEEAQRIWKQKSAEIYPIMDKSSRTRLALIICNEEFDSIPRRTGAEVDITGMTMLLQNLGYSVDVKKNLTASDMTTELEAFAHRPEHKTSDSTFLVFMSHGIREGICGKKHSEQVPDILQLNAIFNMLNTKNCPSLKDKPKVIIIQACRGDSPGVVWFKDSVGVSGNLSLPTTEEFEDDAIKKAHIEKDFIAFCSSTPDNVSWRHPTMGSVFIGRLIEHMQEYACSCDVEEIFRKVRFSFEQPDGRAQMPTTERVTLTRCFYLFPGH

SEQ ID NO: 63761 - protein, 148 aa, Homo sapiens
MERKFHVLVGVTGSVAALKLPLLVSKLLDIPGLEVAVVTTERAKHFYSPQDIPVTLYSDADEWETCVMRAWDRSKPLLFCPAMNTAMWEHPITAQQVDQLKAFGYVEIPCVAKKLVCGDEGLGAMAEVGTIVDKVKEVLFQHSGFQQS

SEQ ID NO: 63762 - protein, 291 aa, Homo sapiens
MWWLLLWGVLQACPTRGSVLLAQELPQQLTSPGYPEPYGKGQESSTDIKAPEGFAVRLVFQDFDLEPSQDCAGDSVTISFVGSDPSQFCGQQGSPLGRPPGQREFVSSGRSLRLTFRTQPSSENKTAHLHKGFLALYQTVAVNYSQPISEASRGSEAINAPGDNPAKVQNHCQEPYYQAAAAASTPSLFLCLSSFTPQGHSPVQPQGPGKTDRMGRRFFSVCLSADGQSPPLPRIRRPSVLPEPSWATSPGKPSPVSTAVGAGPCWGTDGSSLLPTPSTPRTVFLSGRTRV

SEQ ID NO: 63763 - protein, 13 aa, Homo sapiens
MKCSFLTFLLQLV

SEQ ID NO: 63764 - protein, 132 aa, Homo sapiens [sequence omitted]

SEQ ID NO: 63765 - protein, 915 aa, Homo sapiens
MPLLLLLLLLSLPHTQAAFPQDPLPLLISDLQGTSPLSWFRGLEDDAVAAELGLDFQRFLTLNRTLLVAARDHVFSFDLQAEEEGEGLVPNKYLTWRSQDVENCAVRGKLTDECYNYIRVLVPWDSQTLLACGTNSFSPVCRSYGITSLQQEGEELSGQARCPFDATQSNVAIFAEPHFVQALEHGDHVYFFFREVSVEDARLGRVQFSRVARVCKRDMGGSPRALDRHWTSFLKLRLNCSVPGDSTFYFDVLQALTGPVNLHGRSALFGVFTTQTNSIPGSAVCAFYLDEIERGFEGKFKEQRSLDGAWTPVSEDRVPSPRPGSCAGVGGAALFSSSRDLPDDVLTFIKAHPLLDPAVPPVTHQPLLTLTSRALLTQVAVDGMAGPHSNITVMFLGSNDGTVLKVLTPGGRSGGPEPILLEEIDAYSPARCSGKRTAQTARRIIGLELDTEGHRLFVAFSGCIVYLPLSRCARHGACQRSCLASQDPYCGWHSSRGCVDIRGSGGTDVDQAGNQESMEHGDCQDGATGSQSGPGDSAYVLPGPGPSPGTPSPPSDAHPRPQSSTLGVHTRGVRRDLPPASASRSVPIPLLLASVAAAFALGASVSGLLVSCACRRAHRRRGKDIETPGLPRPLSLRSLARLHGGGPEPPPPSKDGDAVQTPQLYTTFLPPPEGVPPPELACLPTPESTPELPVKHLRAAGDPWEWNQNRNNAKEGPGRSRGGHAAGGPAPRVLVRPPPPGCPGQAVEVTTLEELLRYLHGPQPPRKGAEPPAPLTSRALPPEPAPALLGGPSPRPHECASPLRLDVPPEGRCASAPARPALSAPAPRLGVGGGRRLPFSGHRAPPALLTRVPSGGPSRYSGGPGKHLLYLGRPEGYRGRALKRVDVEKPQLSLKPPLVGPSSRQAVPNGGRFNF

SEQ ID NO: 63766 - protein, 955 aa, Homo sapiens
MPLLLLLLLLSLPHTQAAFPQDPLPLLISDLQGTSPLSWFRGLEDDAVAAELGLDFQRFLTLNRTLLVAARDHVFSFDLQAEEEGEGLVPNKYLTWRSQDVENCAVRGKLTDECYNYIRVLVPWDSQTLLACGTNSFSPVCRSYGITSLQQEGEELSGQARCPFDATQSNVAIFAEGSLYSATAADFQASDAVVYRSLGPQPPLRSAKYDSKWLREPHFVQALEHGDHVYFFFREVSVEDARLGRVQFSRVARVCKRDMGGSPRALDRHWTSFLKLRLNCSVPGDSTFYFDVLQALTGPVNLHGRSALFGVFTTQTNSIPGSAVCAFYLDEIERGFEGKFKEQRSLDGAWTPVSEDRVPSPRPGSCAGVGGAALFSSSRDLPDDVLTFIKAHPLLDPAVPPVTHQPLLTLTSRALLTQVAVDGMAGPHSNITVMFLGSNDGTVLKVLTPGGRSGGPEPILLEEIDAYSPARCSGKRTAQTARRIIGLELDTEGHRLFVAFSGCIVYLPLSRCARHGACQRSCLASQDPYCGWHSSRGCVDIRGSGGTDVDQAGNQESMEHGDCQDGATGSQSGPGDSAYVLPGPGPSPGTPSPPSDAHPRPQSSTLGVHTRGVRRDLPPASASRSVPIPLLLASVAAAFALGASVSGLLVSCACRRAHRRRGKDIETPGLPRPLSLRSLARLHGGGPEPPPPSKDGDAVQTPQLYTTFLPPPEGVPPPELACLPTPESTPELPVKHLRAAGDPWEWNQNRNNAKEGPGRSRGGHAAGGPAPRVLVRPPPPGCPGQAVEVTTLEELLRYLHGPQPPRKGAEPPAPLTSRALPPEPAPALLGGPSPRPHECASPLRLDVPPEGRCASAPARPALSAPAPRLGVGGGRRLPFSGHRAPPALLTRVPSGGPSRYSGGPGKHLLYLGRPEGYRGRALKRVDVEKPQLSLKPPLVGPSSRQAVPNGGRFNF

SEQ ID NO: 63767 - protein, 103 aa, Homo sapiens
MGFTRFSLLCYGQAKLKYPYLWSTPVKGSEFFSAYRKINQTGSISRVSSVQEEFLKLLSATCVFLGICPCVTLQTSTLGSPGSASNQRSSLAAAELPISKVDT

SEQ ID NO: 63768 - protein, 1110 aa, Homo sapiens
MTAWRGMRPEVTLACLLLATAGCFADLNEVPQVTVQPASTVQKPGGTVILGCVVEPPRMNVTWRLNGKELNGSDDALGVLITHGTLVITALNNHTVGRYQCVARMPAGAVASVPATVTLANLQDFKLDVQHVIEVDEGNTAVIACHLPESHPKAQVRYSVKQEWLEASRGNYLIMPSGNLQIVNASQEDEGMYKCAAYNPVTQEVKTSGSSDRLRVRRSTAEAARIIYPPEAQTIIVTKGQSLILECVASGIPPPRVTWAKDGSSVTGYNKTRFLLSNLLIDTTSEEDSGTYRCMADNGVGQPGAAVILYNVQVFEPPEVTMELSQLVIPWGQSAKLTCEVRGNPPPSVLWLRNAVPLISSQRLRLSRRALRVLSMGPEDEGVYQCMAENEVGSAHAVVQLRTSRPSITPRLWQDAELATGTPPVSPSKLGNPEQMLRGQPALPRPPTSVGPASPQCPGEKGQGAPAEAPIILSSPRTSKTDSYELVWRPRHEGSGRAPILYYVVKHRKQVTNSSDDWTISGIPANQHRLTLTRLDPGSLYEVEMAAYNCAGEGQTAMVTFRTGRRPKPEIMASKEQQIQRDDPGASPQSSSQPDHGRLSPPEAPDRPTISTASETSVYVTWIPRGNGGFPIQSFRVEYKKLKKVGDWILATSAIPPSRLSVEITGLEKGTSYKFRVRALNMLGESEPSAPSRPYVVSGYSGRVYERPVAGPYITFTDAVNETTIMLKWMYIPASNNNTPIHGFYIYYRPTDSDNDSDYKKDMVEGDKYWHSISHLQPETSYDIKMQCFNEGGESEFSNVMICETKARKSSGQPGRLPPPTLAPPQPPLPETIERPVGTGAMVARSSDLPYLIVGVVLGSIVLIIVTFIPFCLWRAWSKQKHTTDLGFPRSALPPSCPYTMVPLGGLPGHQASGQPYLSGISGRACANGIHMNRGCPSAAVGYPGMKPQQHCPGELQQQSDTSSLLRQTHLGNGYDPQSHQITRGPKSSPDEGSFLYTLPDDSTHQLLQPHHDCCQRQEQPAAVGQSGVRRAPDSPVLEAVWDPPFHSGPPCCLGLVPVEEVDSPDSCQVSGGDWCPQHPVGAYVGQEPGMQLSPGPLVRVSFETPPLTI

SEQ ID NO: 63769 - protein, 152 aa, Homo sapiens
MTAWRGMRPEVTLACLLLATAGCFADLNEVPQVTVQPASTVQKPGGTVILGCVVEPPRMNVTWRLNGKELNGSDDALGVLITHGTLVITALNNHTVGRYQCVARMPAGAVASVPATVTLASESAPLPPCHGAVPPHLSHPEAPTIHAASCYS

SEQ ID NO: 63770 - protein, 1109 aa, Homo sapiens
MTAWRGMRPEVTLACLLLATAGCFADLNEVPQVTVQPASTVQKPGGTVILGCVVEPPRMNVTWRLNGKELNGSDDALGVLITHGTLVITALNNHTVGRYQCVARMPAGAVASVPATVTLANLQDFKLDVQHVIEVDEGNTAVIACHLPESHPKAQVRYSVKQEWLEASRGNYLIMPSGNLQIVNASQEDEGMYKCAAYNPVTQEVKTSGSSDRLRVRRSTAEAARIIYPPEAQTIIVTKGQSLILECVASGIPPPRVTWAKDGSSVTGYNKTRFLLSNLLIDTTSEEDSGTYRCMADNGVGQPGAAVILYNVQVFEPPEVTMELSQLVIPWGQSAKLTCEVRGNPPPSVLWLRNAVPLISSQRLRLSRRALRVLSMGPEDEGVYQCMAENEVGSAHAVVQLRTSRPSITPRLWQDAELATGTPPVSPSKLGNPEQMLRGQPALPRPPTSVGPASPQCPGEKGQGAPAEAPIILSSPRTSKTDSYELVWRPRHEGSGRAPILYYVVKHRKVTNSSDDWTISGIPANQHRLTLTRLDPGSLYEVEMAAYNCAGEGQTAMVTFRTGRRPKPEIMASKEQQIQRDDPGASPQSSSQPDHGRLSPPEAPDRPTISTASETSVYVTWIPRGNGGFPIQSFRVEYKKLKKVGDWILATSAIPPSRLSVEITGLEKGTSYKFRVRALNMLGESEPSAPSRPYVVSGYSGRVYERPVAGPYITFTDAVNETTIMLKWMYIPASNNNTPIHGFYIYYRPTDSDNDSDYKKDMVEGDKYWHSISHLQPETSYDIKMQCFNEGGESEFSNVMICETKARKSSGQPGRLPPPTLAPPQPPLPETIERPVGTGAMVARSSDLPYLIVGVVLGSIVLIIVTFIPFCLWRAWSKQKHTTDLGFPRSALPPSCPYTMVPLGGLPGHQASGQPYLSGISGRACANGIHMNRGCPSAAVGYPGMKPQQHCPGELQQQSDTSSLLRQTHLGNGYDPQSHQITRGPKSSPDEGSFLYTLPDDSTHQLLQPHHDCCQRQEQPAAVGQSGVRRAPDSPVLEAVWDPPFHSGPPCCLGLVPVEEVDSPDSCQVSGGDWCPQHPVGAYVGQEPGMQLSPGPLVRVSFETPPLTI

SEQ ID NO: 63771 - protein, 631 aa, Homo sapiens [sequence omitted]

SEQ ID NO: 63772 - protein, 62 aa, Homo sapiens
MWTLSFQGFLEPLQSLGARLLSGNCRIFLLTPACLAPAAPVESTDASSASSLGKSGVVSRRA

SEQ ID NO: 63773 - protein, 81 aa, Homo sapiens
MFLSLPHWFRRAGEQLSSLAARFPAQAVPLRRLISETASILICGEPLPYQGVLSARRWMLRACPPQPRSAVLRWGLRPRMH

SEQ ID NO: 63774 - protein, 22 aa, Homo sapiens
MKTGLFFLCLLGTAAAIPVKRR

SEQ ID NO: 63775 - protein, 344 aa, Homo sapiens
MKYLFFSWLVVFVGSWIIYVQYSTYTELCRGKDCKKIICDKYKTGVIDGPACNSLCVTETLYFGKCLSTKPNNQAKLGDQGNLSELVNLILTVADGDKDGQVSLGEAKSAWALLQLNEFLLMVILQDKEHTPKLMGFCGDLYVMESVEYTSLYGISLPWVIELFIPSGFRRSMDQLFTPSWPRKAKIAIGLLEFVEDVFHGPYGNFLMCDTSAKNLGYNDKYDLKMVDMRKIVPETNLKELIKDRHCESDLDCVYGTDCRTSCDQSTMKCTSEVIQPNLAKACQLLKDYLLRGAPSEIREELEKQLYSCIALKVTANQMEMEHSLILNNLKTLLWKKISYTNDS

SEQ ID NO: 63776 - protein, 40 aa, Homo sapiens
MRGCSYGLCRRGTCLLHSYVPTFAPCNHPLCLRLLFCVSK

SEQ ID NO: 63777 - protein, 84 aa, Homo sapiens
MLCNKFGHVGGQSKGQQVGYWRLDAHSEAKVYYCARGNPQLPSGLSVAAMQQVQPGLSLSLYSTKATTGQGSGWLWVTQVQTLN

SEQ ID NO: 63778 - protein, 51 aa, Homo sapiens
MLLCLLTPLFSCFQQVFLPPVPQLLLLLRRSDLPLMVIPAPLRPPLPRRES

SEQ ID NO: 63779 - protein, 283 aa, Homo sapiens [sequence omitted]

SEQ ID NO: 63780 - protein, 192 aa, Homo sapiens
MRIPLRTHTSNCLSYENFLLQNPCKFGIHLSTGLLHTFLHNALWCILGRVVNVSSIMSVRALKSCSPELQQKFRSETITEEELVGLMNKFVEDTKKGVHQKEGWPSSAYGVTKIGVTVLSRIHARKLSEQRKGDKILLNACCPGWVRTDMAGPKATKSPEEGAETPVYLALLPPDAEGPHGQFVSEKRVEQW

SEQ ID NO: 63781 - protein, 368 aa, Homo sapiens
MAPLSSAQQGNQVLHSFTAVCQDDGTWHRAMPRCKIKDCGQPRNLPNGDFRYTTTMGVNTYKARIQYYCHEPYYKMQTRAGSRESEQGVYTCTAQGIWKNEQKGEKIPRCLPVCGKPVNPVEQRQRIIGGQKAKMGNFPWQVFTNIHGRGGGALLGDRWILTAAHTLYPKEHEAQSNASLDVFLGHTNVEELMKLGNHPIRRVSVHPDYRQDESYNFEGDIALLELENSVTLGPNLLPICLPDNDTFYDLGLMGYVSGFGVMEEKIAHDLRFVRLPVANPQACENWLRGKNRMDVFSQNMFCAGHPSLKQDACQGDSGGVFAVRDPNTDRWVATGIVSWGIGCSRGYGFYTKVLNYVDWIKKEMEEED

SEQ ID NO: 63782 - protein, 106 aa, Homo sapiens
MSPFSATREKSHSWLSTGWFTMVIAVELCDHVHVYGMVPPNYCSQRPRLQRMPYHYYEPKGPDECVTYIQNEHSRKGNHHRFITEKRVFSSWAQLYGITFSHPSWT

SEQ ID NO: 63783 - protein, 115 aa, Homo sapiens
MLGLPTTCVWLGSGLGSLLPAEVPLLQVAVCPAQHHAHACVLEHTAGAAVPASCLPGPALAATRTLPPAVQGGLHGQEDSGTARVGTHVALPAAQFPAAATGVCPLQPCPPAGAA

SEQ ID NO: 63784 - protein, 35 aa, Homo sapiens
MYIIPVVLFLMMSGAPDTGGQGGGGGGGGGGGSGR

SEQ ID NO: 63785 - protein, 49 aa, Homo sapiens
MRPSSRAPVLLLLLLLRLLLRPERLSSRQAAALLSRAQTGPSQRDLSDS

SEQ ID NO: 63786 - protein, 53 aa, Homo sapiens
MLTQPVPLRAKKQEEIGAPWGKPADPRQGTTGIVRDASTATATFLWNPTPPAW

SEQ ID NO: 63787 - protein, 50 aa, Homo sapiens [sequence omitted]

SEQ ID NO: 63788 - protein, 90 aa, Homo sapiens
MCVLYLIFLFGGGGGRGEVLAGPALNSLDRATDLWGLEVPAEKGRRQQRGCRGNLQVPDHVSVGSGLQDAPRKSAAALCRLSPTPAASSG

SEQ ID NO: 63789 - protein, 308 aa, Homo sapiens
MCGVEGCCQGGATRRGSLPGGRQLATRKRSVVRRCLKMAAEEPQQQKQEPLGSDSEGVNCLAYDEAIMAQQDRIQQEIAVQNPLVSERLELSVLYKEYAEDDNIYQQKIKDLHKKYSYIRKTRPDGNCFYRAFGFSHLEALLDDSKELQRFKAVSAKSKEDLVSQGFTEFTIEDFHNTFMDLIEQVEKQTSVADLLASFNDQSTSDYLVVYLRLLTSGYLQRESKFFEHFIEGGRTVKEFCQQEVEPMCKESDHIHIIALAQALSVSIQVEYMDRGEGGTTNPHIFPEGSEPKVYLLYRPGHYDILYK

SEQ ID NO: 63790 - protein, 93 aa, Homo sapiens
MKDTARRGKRAIFSVWAYLLLGSPLPLLCRAITGPWLQTLGGFQAYKTKTERVSKKRRRKRCCWSWIPLLDFGGDEKKELPGVINTCTVPARL

SEQ ID NO: 63791 - protein, 39 aa, Homo sapiens
MWCLVIAVSVALPCFPGWVFASHHGAQGQSGHEREEADI

SEQ ID NO: 63792 - protein, 534 aa, Homo sapiens
MNHLARFVVCIMSGARSKLALFLCGCYVVALGAHTGEESVADHHEAEYYVAAVYEHPSILSLNPLALISRQEALELMNQNLDIYEQQVMTAAQKDVQIIVFPEDGIHGFNFTRTSIYPFLDFMPSPQVVRWNPCLEPHRFNDTEVLQRLSCMAIRGDMFLVANLGTKEPCHSSDPRCPKDGRYQFNTNVVFSNNGTLVDRYRKHNLYFEAAFDVPLKVDLITFDTPFAGRFGIFTCFDILFFDPAIRVLRDYKVKHVVYPTAWMNQLPLLAAIEIQKAFAVAFGINVLAANVHHPVLGMTGSGIHTPLESFWYHDMENPKSHLIIAQVAKNPVGLIGAENATGETDPSHSKFLKILSGDPYCEKDAQEVHCDEATKWNVNAPPTFHSEMMYDNFTLVPVWGKEGYLHVCSNGLCCYLLYERPTLSKELYALGVFDGLHTVHGTYYIQVCALVRCGGLGFDTCGQEITEATGIFEFHLWGNFSTSYIFPLFLTSGMTLEVPDQLGWENDHYFLRKSRLSSGLVTAALYGRLYERD

SEQ ID NO: 63793 - protein, 365 aa, Homo sapiens
MFVGLMAFLLSFYLIFTNEGRALKTATSLAEGLSLVVSPDSIHSVAPENEGRLVHIIGALRTSKLLSDPNYGVHLPAVKLRRHVEMYQWVETEESREYTEDGQVKKETRYSYNTEWRSEIINSKNFDREIGHKNPSAMAVESFMATAPFVQIGRFFLSSGLIDKVDNFKSLSLSKLEDPHVDIIRRGDFFYHSENPKYPEVGDLRVSFSYAGLSGDDPDLGPAHVVTVIARQRGDQLVPFSTKSGDTLLLLHHGDFSAEEVFHRELRSNSMKTWGLRAAGWMAMFMGLNLMTRILYTLVDWFPVFRDLVNIGLKAFAFCVATSLTLLTVAAGWLFYRPLWALLIAGLALVPILVARTRVPAKKLE

SEQ ID NO: 63794 - protein, 33 aa, Homo sapiens
MSPRRTLPRPLSLCLSLCLCLCLAAALGSAQSE

SEQ ID NO: 63795 - protein, 40 aa, Homo sapiens [sequence omitted]

SEQ ID NO: 63796 - protein, 417 aa, Homo sapiens
MSRRKILLLVLGCSTVSLLIHQGAQLSWYPKLFPLSCPPLRNSPPRPKHMTVAFLKTHKTAGTTVQNILFRFAERHNLTVALPHPSCEHQFCYPRNFSAHFVHPATRPPHVLASHLRFDRAELERLMPPSTVYVTILREPAAMFESLFSYYNQYCPAFRRVPNASLEAFLRAPEAYYRAGEHFAMFAHNTLAYDLGGDNERSPRDDAAYLAGLIRQVEEVFSLVMIAEYFDESLVLLRRLLAWDLDDVLYAKLNARAASSRLAAIPAALARAARTWNALDAGLYDHFNATFWRHVARAGRACVEREARELREARQRLLRRCFGDEPLLRPAAQIRTKQLQPWQPSRKVDIMGYDLPGGGAGPATEACLKLAMPEVQYSNYLLRKQKRRGGARARPEPVLDNPPPRPIRVLPRGPQGP

SEQ ID NO: 63797 - protein, 467 aa, Homo sapiens
MAGSLTGLLLLQAVSWASGARPCIPKSFGYSSVVCVCNATYCDSFDPPTFPALGTFSRYESTRSGRRMELSMGPIQANHTGTGIGYNIIRVPMASCDFSIRTYTYADTPDDFQLHNFSLPEEDTKLKIPLIHRALQLAQRPVSLLASPWTSPTWLKTNGAVNGKGSLKGQPGDIYHQTWARYFVKFLDAYAEHKLQFWAVTAENEPSAGLLSGYPFQCLGFTPEHQRDFIARDLGPTLANSTHHNVRLLMLDDQRLLLPHWAKVVLTDPEAAKYVHGIAVHWYLDFLAPAKATLGETHRLFPNTMLFASEACVGSKFWEQSVRLGSWDRGMQYSHSIITNLLYHVVGWTDWNLALNPEGGPNWVRNFVDSPIIVDITKDTFYKQPMFYHLGHFSKFIPEGSQRVGLVASQKNDLDAVALMHPDGSAVVVVLNRSSKDVPLTIKDPAVGFLETISPGYSIHTYLWRRQ

SEQ ID NO: 63798 - protein, 20 aa, Homo sapiens
MIGGIVCPRVPERVPEERRG

SEQ ID NO: 63799 - protein, 110 aa, Homo sapiens
MVPLLSASTLGTLASDLESVQLCPTATQLGKRSPSVGWGSRRRKAEPGADAGGSGRAQHPQAPSPSDRGARGPGGRCPGDCAARAPPRPLPWARARPGCHGGSGGDRPAA

SEQ ID NO: 63800 - protein, 80 aa, Homo sapiens
MIEALFVPDGGKVEGGTPLFTLRKTGAAPAKAKPAEAPAAAAPKAEPIAAAVPPHAAPIPTRCHQCPRPHNLLLANLCLQ

SEQ ID NO: 63801 - protein, 43 aa, Homo sapiens
MSVCGAILLVLIVLLLLPFRCQRRPRDPEVVNDESSLVRHRWK

SEQ ID NO: 63802 - protein, 95 aa, Homo sapiens
MVAMAAGPSGCLVPAFGLRLLLATVLQAVSAFGAEFSSEACRELGFSSNLLCSSCDLLGQFNLLQLDPDCRGCCQEEAQFETKKLYAGAILEVCG

SEQ ID NO: 63803 - protein, 309 aa, Homo sapiens
MAMLMLPLLLLGISGLLFIYQEVSRLWSKSAVQNKVVVITDAISGLGKECARVFHTGGARLVLCGKNWERLENLYDALISVADPSKQTFTPKLVLLDLSDISCVPDVAKEVLDCYGCVDILINNASVKVKGPAHKISLELDKKIMDANYFGPITLTKALLPNMISRRTGQIVLVNNIQGKFGIPFRTTYAASKHAALGFFDCLRAEVEEYDVVISTVSPTFIRSYHVYPEQGNWEASIWKFFFRKLTYGVHPVEVAEEVMRTVRRKKQEVFMANPIPKAAVYVRTFFPEFFFAVVACGVKEKLNVPEEG

SEQ ID NO: 63804 - protein, 308 aa, Homo sapiens
MAMLMLPLLLLGISGLLFIYQEVSRLWSKSAVQNKVVVITDAISGLGKECARVFHTGGARLVLCGKNWERLENLYDALISVADPSKTFTPKLVLLDLSDISCVPDVAKEVLDCYGCVDILINNASVKVKGPAHKISLELDKKIMDANYFGPITLTKALLPNMISRRTGQIVLVNNIQGKFGIPFRTTYAASKHAALGFFDCLRAEVEEYDVVISTVSPTFIRSYHVYPEQGNWEASIWKFFFRKLTYGVHPVEVAEEVMRTVRRKKQEVFMANPIPKAAVYVRTFFPEFFFAVVACGVKEKLNVPEEG

SEQ ID NO: 63805 - protein, 200 aa, Homo sapiens [sequence omitted]

SEQ ID NO: 63806 - protein, 108 aa, Homo sapiens
MAVWVLSRLLSAPRLALAKAVLRHVNGQDQIVPGLYACGEAACASVHGANRLGANSLLDLVVFGQACALSIEESCRPGDKVPPIKPNAGEESVMNLDKLRFADGSIRT

SEQ ID NO: 63807 - protein, 112 aa, Homo sapiens [sequence omitted]

SEQ ID NO: 63808 - protein, 145 aa, Homo sapiens
MFGSLLLFALLAAGVAPLSWDLPEPRSRASKIRVHSRGNLWATGHFMGKKSLEPSSPSPLGTAPHTSLRDQRLQLSHDLLGILLLKKALGVSLSRPAPQIQEAAGTNTAEMTPIMGQTQQRGLDCAHPGKVLNGTLLMAPSGCKS

SEQ ID NO: 63809 - protein, 44 aa, Homo sapiens
MALLPSWPLTGRFLPADRKGGSYSQAASSQSAQGSDVSLTACKV

SEQ ID NO: 63810 - protein, 335 aa, Homo sapiens
MAPRTLFLLLSGALTLTETWAGSHSMRYFSAAVSRPGRGEPRFIAMGYVDDTQFVRFDSDSACPRMEPRAPWVEQEGPEYWEEETRNTKAHAQTDRMNLQTLRGYYNQSEASSHTLQWMIGCDLGSDGRLLRGYEQYAYDGKDYLALNEDLRSWTAADTAAQISKRKCEAANVAEQRRAYLEGTCVEWLHRYLENGKEMLQRADPPKTHVTHHPVFDYEATLRCWALGFYPAEIILTWQRDGEDQTQDVELVETRPAGDGTFQKWAAVVVPSGEEQRYTCHVQHEGLPEPLMLRWKQSSLPTIPIMGIVAGLVVLAAVVTGAAVAAVLWRKKSSD

SEQ ID NO: 63811 - protein, 54 aa, Homo sapiens [sequence omitted]

SEQ ID NO: 63812 - protein, 142 aa, Homo sapiens
MQVKEVVEKHSQFLGYPITLYLEKEREKEISDGKAEEEKGEKEEENKDDEEKPKIEDVGSDEEDDSGKDKKKKTKKIKEKYIDQEELNKTKPIWTRNTEDITQEEYGEFYKSLTNDWKDHLAVRYFSVEGQLEFRALLFIPP

SEQ ID NO: 63813 - protein, 599 aa, Homo sapiens
MLLITLFLLLPLSMLKGEPWEGCLHCTHTTWSGNIMTKTLLYHTYYECAGTCLGTCTHNQTTYSVCDPGRGQPYVCYDPKSSPGTWFEIHVGSKEGDLLNQTKVFPSGKDVVSLYFDVCQIVSMGSLFPVIFSSMEYYSSCHKNRYAHPACSTDSPVTTCWDCTTWSTNQQSLGPIMLTKIPLEPDCKTSTCNSVNLTILEPDQPIWTTGLKAPLGARVSGEEIGPGAYVYLYIIKKTRTRSTQQFRVFESFYEHVNQKLPEPPPLASNLFAQLAENIASSLHVASCYVCGGMNMGDQWPWEARELMPQDNFTLTASSLEPAPSSQSIWFLKTSIIGKFCIARWGKAFTDPVGELTCLGQQYYNETLGKTLWRGKSNNSESPHPSPFSRFPSLNHSWYQLEAPNTWQAPSGLYWICGPQAYRQLPAKWSGACVLGTIRPSFFLMPLKQGEALGYPIYDETKRKSKRGITIGDWKDNEWPPERIIQYYGPATWAEDGMWGYRTPVYMLNRIIRLQAVLEIITNETAGALNLLAQQATKMRNVIYQNRLALDYLLAQEEGVCGKFNLTNCCLELDDEGKVIKEITAKIQKLAHIPVQTWKG

SEQ ID NO: 63814 - protein, 46 aa, Homo sapiens
MENMEQLLSMRMEDQSQRNMPLSVVLIREKAHSPFENRKQEQGEGA

SEQ ID NO: 63815 - protein, 231 aa, Homo sapiens
MACAINILMKDLADELDLVDVIEDKLKGEMMDLQHGSLFLRTPKIVSGKDYNGTANSKLVIIMAGTCQQEEESRLNLVQRNVNIFKFIILNVVKYSPNCKLLIVSNPVDILTYVAWKISGFPKNHVIGSGCNLDSAQFRYLMGERLGVHPLSCHGWVLGEHGDSSAPVWSGKNVAGVSLKTPHPDLETDKHKEQWKEVHKLVVESAYEVIKLKGYTSWAIGLSVADLAEVQ

SEQ ID NO: 63816 - protein, 150 aa, Homo sapiens
MEEDNWRWHFYDTVKGSDWLGDQDAIHYVTEQAPTAMVELENYGMPFSRTEDGKIYQRAFGGQSLKFGKGRQAHRCCCVADRTGHSILHTSYGRSLRYDTSCFVEYFALDLLIENRECRGVIALCIEDGSIHHIRAKNTVVATGVKKLFF

SEQ ID NO: 63817 - protein, 204 aa, Homo sapiens [sequence omitted]

SEQ ID NO: 63818 - protein, 1891 aa, Homo sapiens
MPWNWTCLLSHLLMVGMGSSTLLTRQPAPLSQKQRSFVTFRGEPAEGFNHLVVDERTGHIYLGAVNRIYKLSSDLKVLVTHETGPDEDNPKCYPPRIVQTCNEPLTTTNNVNKMLLIDYKENRLIACGSLYQGICKLLRLEDLFKLGEPYHKKEHYLSGVNESGSVFGVIVSYSNLDDKLFIATAVDGKPEYFPTISSRKLTKNSEADGMFAYVFHDEFVASMIKIPSDTFTIIPDFDIYYVYGFSSGNFVYFLTLQPEMVSPPGSTTKEQVYTSKLVRLCKEDTAFNSYVEVPIGCERSGVEYRLLQAAYLSKAGAVLGRTLGVHPDDDLLFTVFSKGQKRKMKSLDESALCIFILKQINDRIKERLQSCYRGEGTLDLAWLKVKDIPCSSALLTIDDNFCGLDMNAPLGVSDMVRGIPVFTEDRDRMTSVIAYVYKNHSLAFVGTKSGKLKKIRVDGPRGNALQYETVQVVDPGPVLRDMAFSKDHEQLYIMSERQLTRVPVESCGQYQSCGECLGSGDPHCGWCVLHNTCTRKERCERSKEPRRFASEMKQCVRLTVHPNNISVSQYNVLLVLETYNVPELSAGVNCTFEDLSEMDGLVVGNQIQCYSPAAKEVPRIITENGDHHVVQLQLKSKETGMTFASTSFVFYNCSVHNSCLSCVESPYRCHWCKYRHVCTHDPKTCSFQEGRVKLPEDCPQLLRVDKILVPVEVIKPITLKAKNLPQPQSGQRGYECILNIQGSEQRVPALRFNSSSVQCQNTSYSYEGMEINNLPVELTVVWNGHFNIDNPAQNKVHLYKCGAMRESCGLCLKADPDFACGWCQGPGQCTLRQHCPAQESQWLELSGAKSKCTNPRITEIIPVTGPREGGTKVTIRGENLGLEFRDIASHVKVAGVECSPLVDGYIPAEQIVCEMGEAKPSQHAGFVEICVAVCRPEFMARSSQLYYFMTLTLSDLKPSRGPMSGGTQVTITGTNLNAGSNVVVMFGKQPCLFHRRSPSYIVCNTTSSDEVLEMKVSVQVDRAKIHQDLVFQYVEDPTIVRIEPEWSIVSGNTPIAVWGTHLDLIQNPQIRAKHGGKEHINICEVLNATEMTCQAPALALGPDHQSDLTERPEEFGFILDNVQSLLILNKTNFTYYPNPVFEAFGPSGILELKPGTPIILKGKNLIPPVAGGNVKLNYTVLVGEKPCTVTVSDVQLLCESPNLIGRHKVMARVGGMEYSPGMVYIAPDSPLSLPAIVSIAVAGGLLIIFIVAVLIAYKRKSRESDLTLKRLQMQMDNLESRVALECKEAFAELQTDIHELTSDLDGAGIPFLDYRTYTMRVLFPGIEDHPVLRDLEVPGYRQERVEKGLKLFAQLINNKVFLLSFIRTLESQRSFSMRDRGNVASLIMTVLQSKLEYATDVLKQLLADLIDKNLESKNHPKLLLRRTESVAEKMLTNWFTFLLYKFLKECAGEPLFSLFCAIKQQMEKGPIDAITGEARYSLSEDKLIRQQIDYKTLVLSCVSPDNANSPEVPVKILNCDTITQVKEKILDAIFKNVPCSHRPKAADMDLEWRQGSGARMILQDEDITTKIENDWKRLNTLAHYQVPDGSVVALVSKQVTAYNAVNNSTVSRTSASKYENMIRYTGSPDSLRSRTPMITPDLESGVKMWHLVKNHEHGDQKEGDRGSKMVSEIYLTRLLATKGTLQKFVDDLFETIFSTAHRGSALPLAIKYMFDFLDEQADKHGIHDPHVRHTWKSNCLPLRFWVNMIKNPQFVFDIHKNSITDACLSVVAQTFMDSCSTSEHRLGKDSPSNKLLYAKDIPSYKNWVERYYSDIGKMPAISDQDMNAYLAEQSRMHMNEFNTMSALSEIFSYVGKYSEEILGPLDHDDQCGKQKLAYKLEQVITLMSLDS

SEQ ID NO: 63819 - protein, 519 aa, Homo sapiens
MPWNWTCLLSHLLMVGMGSSTLLTRQPAPLSQKQRSFVTFRGEPAEGFNHLVVDERTGHIYLGAVNRIYKLSSDLKVLVTHETGPDEDNPKCYPPRIVQTCNEPLTTTNNVNKMLLIDYKENRLIACGSLYQGICKLLRLEDLFKLGEPYHKKEHYLSGVNESGSVFGVIVSYSNLDDKLFIATAVDGKPEYFPTISSRKLTKNSEADGMFAYVFHDEFVASMIKIPSDTFTIIPDFDIYYVYGFSSGNFVYFLTLQPEMVSPPGSTTKEQVYTSKLVRLCKEDTAFNSYVEVPIGCERSGVEYRLLQAAYLSKAGAVLGRTLGVHPDDDLLFTVFSKGQKRKMKSLDESALCIFILKQINDRIKERLQSCYRGEGTLDLAWLKVKDIPCSSALLTIDDNFCGLDMNAPLGVSDMVRGIPVFTEDRDRMTSVIAYVYKNHSLAFVGTKSGKLKKSFGTGPQGGITQEWIGVEGDPPGANIASQEQMLCVYLQCSSHKAISDQRVQPLLCCFLNVPGNSS

SEQ ID NO: 63820 - protein, 489 aa, Homo sapiens
MPWNWTCLLSHLLMVGMGSSTLLTRQPAPLSQKQRSFVTFRGEPAEGFNHLVVDERTGHIYLGAVNRIYKLSSDLKVLVTHETGPDEDNPKCYPPRIVQTCNEPLTTTNNVNKMLLIDYKENRLIACGSLYQGICKLLRLEDLFKLGEPYHKKEHYLSGVNESGSVFGVIVSYSNLDDKLFIATAVDGKPEYFPTISSRKLTKNSEADGMFAYVFHDEFVASMIKIPSDTFTIIPDFDIYYVYGFSSGNFVYFLTLQPEMVSPPGSTTKEQVYTSKLVRLCKEDTAFNSYVEVPIGCERSGVEYRLLQAAYLSKAGAVLGRTLGVHPDDDLLFTVFSKGQKRKMKSLDESALCIFILKQINDRIKERLQSCYRGEGTLDLAWLKVKDIPCSSALLTIDDNFCGLDMNAPLGVSDMVRGIPVFTEDRDRMTSVIAYVYKNHSLAFVGTKSGKLKKMPGTSLCPTLELQTGPRSHRATVTLELLFSSCSSN

SEQ ID NO: 63821 - protein, 114 aa, Homo sapiens
MALEHLVVWHVHSEDQSFVVLKTDLGRRGCRPLRKTAPKAKEAPAPPKAEAKVKALKAKKAVLKGVRSHTQKRRSACHSPSGGPRHCDFGGSPDILGRAPPGETSLATMLSSFR

SEQ ID NO: 63822 - protein, 124 aa, Homo sapiens
MPAPPPKENAWVKRSSNPPARSQSSDAEQQSPTSGGGKVAPAQPSEEGPARQDENKVDGMNVPKGQTGNSSRGPGDGGNKDHWKESDRKDGKKDQDSRSAPEPKKPEENPASKFSSASNYAALS

SEQ ID NO: 63823 - protein, 50 aa, Homo sapiens
MTPVRMQHSLAGQTYAVPLIQPDLRREEAVQQMADALQYLQKVSGDIFSR

SEQ ID NO: 63824 - protein, 59 aa, Homo sapiens [sequence omitted]

SEQ ID NO: 63825 - protein, 288 aa, Homo sapiens [sequence omitted]

SEQ ID NO: 63826 - protein, 205 aa, Homo sapiens [sequence omitted]

SEQ ID NO: 63827 - protein, 319 aa, Homo sapiens
MIEERKQLITVREEAWKTRGRGAANDSTQFTVAGRMVKKGLASPTAITPVASAICGKTRGTTPVSKPLEDIEARPDTQLEWDLKLDRLETFLRRLNNKIGGMHETVLTVTGKSVKELMKPDDDETFAQFYRNVDCNMLRSPVELDEDFDVIFDPYAPKLTSSVAEHKWAVRPKRQVQASKNPLKMLAAREDLLQEYTEQRLNVAFMESKRIKVEKISSNSSFSEVTLAGLASKENFSNVSLRSVNLTEQNSNNSAVPFKRLMLLQIKGRRHVQTRLVEPRASALNSGDCFLLLSPHCCFLWVGEFANAIEKAKASELAA

SEQ ID NO: 63828 - protein, 165 aa, Homo sapiens
MKTILSNQTVDIPENVDITLKGRTVIVKGPRGTLRRDFNHINVELSLLGKKKKRLRVDKWWGNRKELATVRTICSHVQNMIKGVTLGFRYKMRSVYAHFPINVVIQENGSLVEIRNFLGEKYIRRVRMRPAALIQQATTVKNKDIRKFLDGIYVSEKGTVQQADE

SEQ ID NO: 63829 - protein, 36 aa, Homo sapiens [sequence omitted]

SEQ ID NO: 63830 - protein, 200 aa, Homo sapiens [sequence omitted]

SEQ ID NO: 63831 - protein, 161 aa, Homo sapiens
MPFSRTEDGKIYQRAFGGHSLKFGKGRQAHRCCCVADRTGHSILHTLYGRSLRYDTSCFVEYFALDLLMENGECRGVFALCIQDGSIHRIRAKNTIVATGLRAHLLELHVCPHQHQRRHGHDHQGRPSLPGPRVCSVPPHRHIWCWLSHYGRMSWRGRHSH

SEQ ID NO: 63832 - protein, 169 aa, Homo sapiens
MVEVENYGMPFSRTEDGKIYQRAFGGHSLKFGKGRQAHRCCCVADRTGHSILHTLYGRSLRYDTSCFVEYFALDLLMENGECRGVFALCIQDGSIHRIRAKNTIVATGLRAHLLELHVCPHQHQRRHGHDHQGRPSLPGPRVCSVPPHRHIWCWLSHYGRMSWRGRHSH

SEQ ID NO: 63833 - protein, 74 aa, Homo sapiens
MRQLANSTDPVKAAQFEPPGRQMIAIRKRQPEETNNDYETADGGYMTLNPRAPTDDDKNIYLTLPPNDHVNRLY

SEQ ID NO: 63834 - protein, 37 aa, Homo sapiens
MKLTIPVFLFKSLQFIMELLYWLLEGGDSEDKEVKPV

SEQ ID NO: 63835 - protein, 88 aa, Homo sapiens
MTPGQVQPQLLQRTPDPYPEPGVPAAKLMGPAGALAVRTESWSPWSPRSPRSCSRGSLLSAGSPALSRAQKLTARRSWCGRPGQVRLL

SEQ ID NO: 63836 - protein, 52 aa, Homo sapiens
MTPGQVQPQLLQRTPDPYPEPGVPAAKLMGPAGALAGPGNGGSPALTAHQYV

SEQ ID NO: 63837 - protein, 58 aa, Homo sapiens
MWRSLGLALALCLLPSGGTESQDQSSLCKQPPAWSIRDQDPMLNSNGSVTVVALLQAS

SEQ ID NO: 63838 - protein, 62 aa, Homo sapiens
MRRSGGCSQTFAHRWKPTRLSCKTYRVDAPGGAERRARPAQHRAGERRAFRKGRRDEFLLDL

SEQ ID NO: 63839 - protein, 53 aa, Homo sapiens
MGPIGVTLALLPLLQQARGRVINITSVLGRLAANGGGYCVSKFGLEAFSDSLR

SEQ ID NO: 63840 - protein, 94 aa, Homo sapiens [sequence omitted]

SEQ ID NO: 63841 - protein, 483 aa, Homo sapiens
MLERHEIHDIQDFYFREMQQNIHDFECQCHNDERNYREIPAIKIKNITGRRDQGDGRNAGNKPVENQLELSFWLHLAELQGFQIERKIYECNQIEKSVTRGSSVSLLQTNLPCVNTSISNIYRNDFMHPSLLTQDQKAYIREKPYKCSDCGKAFNQRSNLTTHQRIHTGQKPHKCDICGKGFRRIANLASHHRIHTGEKPYRCNECGKTFNQTFNLTTHQRIHTGQKPYKCDRCGKGFRQIGNLASHHRIHTGEKPYRCNECGKTFNRMFHLTRHQRIHTGQKPYKCDICGKGFRQIANLASHHRIHTGEKPYKCSDCGKTFNYRSHLTRHQRIHTGQKPYKCDTCGKDFSQNSYLENHQRIHTREKSYRCNECGKTFNKMTNLTTHQRIHTGQKTYKCDICGKGFRQIGNLASHHRIHTGEKPYRCNECGKTFNRMFHLTRHQRIHTGQKPYKCDICGKSFSQNSYLENHQRIHTGEKTYKL

SEQ ID NO: 63842 - protein, 15 aa, Homo sapiens
MKTLLPWTARASRSP

SEQ ID NO: 63843 - protein, 702 aa, Homo sapiens [sequence omitted]

SEQ ID NO: 63844 - protein, 643 aa, Homo sapiens
MPIVNISEVLGPLCLMLLMGTVHCQIVSTQITRPSGNNGNRRRRKLRKTVNGDGSRENGNNSSDKVRGIETLESVPIIGGFWETIFGNRIKRVKLISNKGTETDNDPSCVHPIIKRRQCRPEIRMWQTREKAKFSDGEKCRREAFRRLGNGVSDDLSSEEDGEARTQMILLRRSVEGASSDNGCEVKNRKSILSRHLNSQVKKTTTRWCHIVRDSDSLAESEFESAAFSQGSRSGVSGGSRSLNMSRRDSESTRHDSETEDMLWDDLLHGPECRSSVTSDSEGAHVNTLHSGTKRDPKEDVFQQNHLFWLQNSSPSSDRVSAIIWEGNECKKMDMSVLEISGIIMSRVNAYQQGVGYQMLGNVVTIGLAFFPFLHRLFREKSLDQLKSISAEEILTLFCGAPPVTPIIVLSIINFFERLCLTWMFFFMMCVAERTYKQRFLFAKLFSHITSARKARKYEIPHFRLKKVENIKIWLSLRSYLKRRGPQRSVDVVVSSVFLLTLSIAFICCAQVLQGHKTFLNDAYNWEFLIWETALLLFLLRLASLGSETNKKYSNVSILLTEQINLYLKMEKKPNKKEQLTLVNNVLKLSTKLLKELDTPFRLYGLTMNPLIYNITRVVILSAVSGVISDLLGFNIRLWKIKS

SEQ ID NO: 63845 - protein, 518 aa, Homo sapiens
MPIVNISEVLGPLCLMLLMGTVHCQIVSTQITRPSGNNGNRRRRKLRKTVNGDGSRENGNNSSDKVRGIETLESVPIIGGFWETIFGNRIKRVKLISNKGTETDNDPSCVHPIIKRRQCRPEIRMWQTREKAKFSDGEKCRREAFRRLGNGVSDDLSSEEDGEARTQMILLRRSVEGASSDNGCEVKNRKSILSRHLNSQVKKTTTRWCHIVRDSDSLAESEFESAAFSQGSRSGVSGGSRSLNMSRRDSESTRHDSETEDMLWDDLLHGPECRSSVTSDSEGAHVNTLHSGTKRDPKEDVFQQNHLFWLQNSSPSSDRVSAIIWEGNECKKMDMSVLEISGIIMSRVNAYQQGVGYQMLGNVVTIGLAFFPFLHRLFREKSLDQLKSISAEEILTLFCGAPPVTPIIVLSIINFFERLCLTWMFFFMMCVAERTYKQRFLFAKLFSHITSARKARKYEIPHFRLKKVENIKIWLSLRSYLKRRGPQRSVDVVVSSVFLLTLSIAFICCAQVKVSHLL

SEQ ID NO: 63846 - protein, 692 aa, Homo sapiens
MIWEYSVLIIVMACMEYEMGKKKCERYWAEPGEMQLEFGPFSVSCEAEKRKSDYIIRTLKVKFNSETRTIYQFHYKNWPDHDVPSSIDPILELIWDVRCYQEDDSVPICIHCSAGCGRTGVICAIDYTWMLLKDGIIPENFSVFSLIREMRTQRPSLVQTQEQYELVYNAVLELFKRQMDVIRDKHSGTESQAKHCIPEKNHTLQADSYSPNLPKSTTKAAKMMNQQRTKMEIKESSSFDFRTSEISAKEELVLHPAKSSTSFDFLELNYSFDKNADTTMKWQTKAFPIVGEPLQKHQSLDLGSLLFEGCSNSKPVNAAGRYFNSKVPITRTKSTPFELIQQRETKEVDSKENFSYLESQPHDSCFVEMQAQKVMHVSSAELNYSLPYDSKHQIRNASNVKHHDSSALGVYSYIPLVENPYFSSWPPSGTSSKMSLDLPEKQDGTVFPSSLLPTSSTSLFSYYNSHDSLSLNSPTNISSLLNQESAVLATAPRIDDEIPPPLPVWTPESFIVVEEAGEFSPNVPKSLSSAVKVKIGTSLEWGGTSEPKKFDDSVILRPSKSVKLRSPKSELHQDRSSPPPPLPERTLESFFLADEDCMQAQSIETYSTSYPDTMENSTSSKQTLKTPGKSFTRSKSLKILRNMKKSICNSCPPNKPAESVQSNNSSSFLNFGFANRFSKPKGPRNPPPTWNI

SEQ ID NO: 63847 - protein, 637 aa, Homo sapiens
MIWEYSVLIIVMACMEYEMGKKKCERYWAEPGEMQLEFGPFSVSCEAEKRKSDYIIRTLKVKFNSETRTIYQFHYKNWPDHDVPSSIDPILELIWDVRCYQEDDSVPICIHCSAGCGRTGVICAIDYTWMLLKDGSQAKHCIPEKNHTLQADSYSPNLPKSTTKAAKMMNQQRTKMEIKESSSFDFRTSEISAKEELVLHPAKSSTSFDFLELNYSFDKNADTTMKWQTKAFPIVGEPLQKHQSLDLGSLLFEGCSNSKPVNAAGRYFNSKVPITRTKSTPFELIQQRETKEVDSKENFSYLESQPHDSCFVEMQAQKVMHVSSAELNYSLPYDSKHQIRNASNVKHHDSSALGVYSYIPLVENPYFSSWPPSGTSSKMSLDLPEKQDGTVFPSSLLPTSSTSLFSYYNSHDSLSLNSPTNISSLLNQESAVLATAPRIDDEIPPPLPVWTPESFIVVEEAGEFSPNVPKSLSSAVKVKIGTSLEWGGTSEPKKFDDSVILRPSKSVKLRSPKSELHQDRSSPPPPLPERTLESFFLADEDCMQAQSIETYSTSYPDTMENSTSSKQTLKTPGKSFTRSKSLKILRNMKKSICNSCPPNKPAESVQSNNSSSFLNFGFANRFSKPKGPRNPPPTWNI

SEQ ID NO: 63848 - protein, 91 aa, Homo sapiens
MRLLSFVVLALFAVTQAEEGARLLASKSLLNRYAVEGRDLTLQYNIYNVGSSAALDVELSDDSFPPEDFGIVSGMLNVKWDRIAPYPLGTW

SEQ ID NO: 63849 - protein, 133 aa, Homo sapiens
MFETFNTAAMYVAIQALLSLYASGRTTGIMMDSGDEVTHTVPFYGGYALPHAILCLDLAGRDLTDYLMKILTERGYSFTTTAEQEIVHDIKEKPCYIALDFEQEMATGASSSSLEKSYKLPDSQVIIKAVLLL

SEQ ID NO: 63850 - protein, 488 aa, Homo sapiens
MPIIGRKIQDKLNKTKDDISKNMSFLKVDKEYVKALPSQGLSSSAVLEKLKEYSSMDAFWQEGRASGTVYSGEEKLTELLVKAYGDFAWSNPLHPDIFPGLRKIEAEIVRIACSLFNGGPDSCGCVTSGGTESILMACKAYRDLAFEKGIKTPEIVAPQSAHAAFNKAASYFGMKIVRVPLTKMMEVDVRAMRRAISRNTAMLVCSTPQFPHGVIDPVPEVAKLAVKYKIPLHVDACLGGFLIVFMEKAGYPLEHPFDFRVKGVTSISADTHKYGYAPKGSSLVLYSDKKYRNYQFFVDTDWQGGIYASPTIAGSRPGGISAACWAALMHFGENGYVEATKQIIKTARFLKSELENIKGIFVFGNPQLSVIALGSRDFDIYRLSNLMTAKGWNLNQLQFPPSIHFCITLLHARKRVAIQFLKDIRESVTQIMKNPKAKTTGMGAIYGMAQTTVDRNMVAELSSVFLDSLYSTDTVTQGSQMNGSPKPH

SEQ ID NO: 63851 - protein, 70 aa, Homo sapiens
MCPPCSKITQPVWRQRNRGWSLVSGIPQDLPTTIMSVHSATATRMQYYYVLTSAVQRQWTAHSRSGGQKS

SEQ ID NO: 63852 - protein, 336 aa, Homo sapiens
MVLATCLGSFILVIFYFQSMLHPVMRRNPFGVDICCRKGSRSPLQELYNPIQLELSNTAVLHQMRRDQVTDTCRANSATSRKRRVLTPNDLKHLVVDEDHELIYCYVPKVACTNWKRLMMVLTGRGKYSDPMEIPANEAHVSANLKTLNQYSIPEINHRLKSYMKFLFVREPFERLVSAYRNKFTQKYNISFHKRYGTKIIKRQRKNATQEALRKGDDVKFEEFVAYLIDPHTQREEPFNEHWQTVYSLCHPCHIHYDLVGKYETLEEDSNYVLQLAGVGSYLKFPTYAKSTRTTDEMTTEFFQNISSEHQTQLYEVYKLDFLMFNYSVPSYLKLE

SEQ ID NO: 63853 - protein, 331 aa, Homo sapiens
MVLATCLGSFILVIFYFQIMRRNPFGVDICCRKGSRSPLQELYNPIQLELSNTAVLHQMRRDQVTDTCRANSATSRKRRVLTPNDLKHLVVDEDHELIYCYVPKVACTNWKRLMMVLTGRGKYSDPMEIPANEAHVSANLKTLNQYSIPEINHRLKSYMKFLFVREPFERLVSAYRNKFTQKYNISFHKRYGTKIIKRQRKNATQEALRKGDDVKFEEFVAYLIDPHTQREEPFNEHWQTVYSLCHPCHIHYDLVGKYETLEEDSNYVLQLAGVGSYLKFPTYAKSTRTTDEMTTEFFQNISSEHQTQLYEVYKLDFLMFNYSVPSYLKLE

SEQ ID NO: 63854 - protein, 139 aa, Homo sapiens
MALCSALMTIFTIKMGTAKQAIDQGRSPVIIDNTNIQAWEMKPYVEVAIGKGYRVEFHEPETWWKFDPEELEKRNKHGVSRKKIAQMLDRYEYQMSISIVMNSVEPSHKSTQRPPPPQGRQRWGGSLGSHNRVCVTNNH

SEQ ID NO: 63855 - protein, 85 aa, Homo sapiens
MRLCLLQLYCFFLMQMVSRTEGNIDDSLIGGNASAEGPEGEGTESTVITGVDIVMNHHLQETSFTKEAYKKYIKDYMKSSLLVKT

SEQ ID NO: 63856 - protein, 564 aa, Homo sapiens [sequence omitted]

SEQ ID NO: 63857 - protein, 669 aa, Homo sapiens
MTAAAGSAGRAAVPLLLCALLAPGGAYVLDDSDGLGREFDGIGAVSGGGATSRLLVNYPEPYRSQILDYLFKPNFGASLHILKVEIGGDGQTTDGTEPSHMHYALDENYFRGYEWWLMKEAKKRNPNITLIGLPWSFPGWLGKGFDWPYVNLQLTAYYVVTWIVGAKRYHDLDIDYIGIWNERSYNANYIKILRKMLNYQGLQRVKIIASDNLWESISASMLLDAELFKVVDVIGAHYPGTHSAKDAKLTGKKLWSSEDFSTLNSDMGAGCWGRILNQNYINGYMTSTIAWNLVASYYEQLPYGRCGLMTAQEPWSGHYVVESPVWVSAHTTQFTQPGWYYLKTVGHLEKGGSYVALTDGLGNLTIIIETMSHKHSKCIRPFLPYFNVSQQFATFVLKGSFSEIPELQVWYTKLGKTSERFLFKQLDSLWLLDSDGSFTLSLHEDELFTLTTLTTGRKGSYPLPPKSQPFPSTYKDDFNVDYPFFSEAPNFADQTGVFEYFTNIEDPGEHHFTLRQVLNQRPITWAADASNTISIIGDYNWTNLTIKCDVYIETPDTGGVFIAGRVNKGGILIRSARGIFFWIFANGSYRVTGDLAGWIIYALGRVEVTAKKWYTLTLTIKGHFTSGMLNDKSLWTDIPVNFPKNGWAAIGTHSFEFAQFDNFLVEATR

SEQ ID NO: 63858 - protein, 56 aa, Homo sapiens
MYWTWRILFLVAAATGVHSQVQLVQSGPEVKKPGASLKVSCKASGYTFTSYAISWV

SEQ ID NO: 63859 - protein, 341 aa, Homo sapiens
MEENQRVARRRRFPFVRERSDSTGSSSVYFTASSGATFTDAESEGGYTTANAESDNERDSDKESEDGEDEVSCETVKMGRKDSLDLEEEAASGASSALEAGGSSGLEDVLPLLQQADELHRGDEQGKREGFQLLLNNKLVYGSRQDFLWRLARAYSDMCELTEEVSEKKSYALDGKEEAEAALEKGDESADCHLWYAVLCGQLAEHESIQRRIQSGFSFKEHVDKAIALQPENPMAHFLLGRWCYQVSHLSWLEKKTATALLESPLSATVEDALQSFLKAEELQPGFSKAGRVYISKCYRELGKNSEARWWMKLALELPDVTKEDLAIQKDLEELEVILRD

SEQ ID NO: 63860 - protein, 507 aa, Homo sapiens [sequence omitted]

SEQ ID NO: 63861 - protein, 1170 aa, Homo sapiens [sequence omitted]

SEQ ID NO: 63862 - protein, 520 aa, Homo sapiens [sequence omitted]

SEQ ID NO: 63863 - protein, 49 aa, Homo sapiens
MQVSTAALAVLLCTMALCNQFSASRESEFRCGYHHSLAMVRPHQSFLVA

SEQ ID NO: 63864 - protein, 695 aa, Homo sapiens
MELRQFLAPWIESQDWAYAASKESHATLVFHNLLGEIDQQYSRFLQESNVLYQHNLRRIKQFLQSRYLEKPMEIARIVARCLWEESRLLQTAATAAQQGGQANHPTAAVVTEKQQMLEQHLQDVRKRVQDLEQKMKVVENLQDDFDFNYKTLKSQGDMQDLNGNNQSVTRQKMQQLEQMLTALDQMRRSIVSELAGLLSAMEYVQKTLTDEELADWKRRQQIACIGGPPNICLDRLENWITSLAESQLQTRQQIKKLEELQQKVSYKGDPIVQHRPMLEERIVELFRNLMKSAFVVERQPCMPMHPDRPLVIKTGVQFTTKVRLLVKFPELNYQLKIKVCIDKDSGDVAALRGSRKFNILGTNTKVMNMEESNNGSLSAEFKHLTLREQRCGNGGRANCDASLIVTEELHLITFETEVYHQGLKIDLETHSLPVVVISNICQMPNAWASILWYNMLTNNPKNVNFFTKPPIGTWDQVAEVLSWQFSSTTKRGLSIEQLTTLAEKLLGPGVNYSGCQITWAKFCKENMAGKGFSFWVWLDNIIDLVKKYILALWNEGYIMGFISKERERAILSTKPPGTFLLRFSESSKEGGVTFTWVEKDISGKTQIQSVEPYTKQQLNNMSFAEIIMGYKIMDATNILVSPLVYLYPDIPKEEAFGKYCRPESQEHPEADPGSAAPYLKTKFICVTPFIDAVWK

SEQ ID NO: 63865 - protein, 285 aa, Homo sapiens
MVVAGVVVLILALVLAWLSTYVADSGSNQLLGAIVSAGDTSVLHLGHVDHLVAGQGNPEPTELPHPSEGNDEKAEEAGEGRGDSTGEAGAGGGVEPSLEHLLDIQGLPKRQAGAGSSSPEAPLRSEDSTCLPPSPGLITVRLKFLNDTEELAVARPEDTVGALKSKYFPGQESQMKLIYQGRLLQDPARTLRSLNITDNCVIHCHRSPPGSAVPGPSASLAPSATEPPSLGVNVGSLMVPVFVVLLGVVWYFRINYRQFFTAPATVSLVGVTVFFSFLVFGMYGR

SEQ ID NO: 63866 - protein, 248 aa, Homo sapiens
MVVAGVVVLILALVLAWLSTYVADSGSNQLLGAIVSAGDTSVLHLGHVDHLVAGQGNPEPTELPHPSEGLPKRQAGAGSSSPEAPLRSEDSTCLPPSPGLITVRLKFLNDTEELAVARPEDTVGALKSKYFPGQESQMKLIYQGRLLQDPARTLRSLNITDNCVIHCHRSPPGSAVPGPSASLAPSATEPPSLGVNVGSLMVPVFVVLLGVVWYFRINYRQFFTAPATVSLVGVTVFFSFLVFGMYGR

SEQ ID NO: 63867 - protein, 274 aa, Homo sapiens
MIQTLLIILFIIVPIFLLLDKDDSKAGMEEDHTYEGLDIDQTATYEDIVTLRTGEVKWSVGSRTSLLLAFGLLCLPWLQEGSAFPTIPLSRLFDNAMLRAHRLHQLAFDTYQEFEEAYIPKEQKYSFLQNPQTSLCFSESIPTPSNREETQQKSNLELLRISLLLIQSWLEPVQFLRSVFANSLVYGASDSNVYDLLKDLEEGIQTLMGRLEDGSPRTGQIFKQTYSKFDTNSHNDDALLKNYGLLYCFRKDMDKVETFLRIVQCRSVEGSCGF

SEQ ID NO: 63868 - protein, 622 aa, Homo sapiens
MILNDPDFQHEDLNFLTRSQRYEVAVRKSAIMVKKMREFGIADPDEIMWFKNFVHRGRPEPLDLHLGMFLPTLLHQATAEQQERFFMPAWNLEIIGTYAQTEMGHGTHLRGLETTATYDPETQEFILNSPTVTSIKWWPGGLGKTSNHAIVLAQLITKGKCYGLHAFIVPIREIGTHKPLPGITVGDIGPKFGYDEIDNGYLKMDNHRIPRENMLMKYAQVKPDGTYVKPLSNKLTYGTMVFVRSFLVGEAARALSKACTIAIRYSAVRHQSEIKPGEPEPQILDFQTQQYKLFPLLATAYAFQFVGAYMKETYHRINEGIGQGDLSELPELHALTAGLKAFTSWTANTGIEACRMACGGHGYSHCSGLPNIYVNFTPSCTFEGENTVMMLQTARFLMKSYDQVHSGKLVCGMVSYLNDLPSQRIQPQQVAVWPTMVDINSPESLTEAYKLRAARLVEIAAKNLQKEVIHRKSKEVAWNLTSVDLVRASEAHCHYVVVKLFSEKLLKIQDKAIQAVLRSLCLLYSLYGISQNAGDFLQGSIMTEPQITQVNQRVKELLTLIRSDAVALVDAFDFQDVTLGSVLGRYDGNVYENLFEWAKNSPLNKAEVHESYKHLKSLQSKL

SEQ ID NO: 63869 - protein, 95 aa, Homo sapiens
MAWAPACVQAQGLSCLCLFPDPSSCREWCCPLGMYLQVETRTSSRLHLKRAPGIRSWSLLVGKALHVPPQNPRTGSLTFKKDENETKYFLFFLLP

SEQ ID NO: 63870 - protein, 1933 aa, Homo sapiens
MGLLVVLLVGGCAAEEPPRFIKEPKDQIGVSGGVASFVCQATGDPKPRVTWNKKGKKVNSQRFETIEFDESAGAVLRIQPLRTPRDENVYECVAQNSVGEITVHAKLTVLREDQLPSGFPNIDMGPQLKVVERTRTATMLCAASGNPDPEITWFKDFLPVDPSASNGRIKQLRSETFESTPIRGALQIESSEETDQGKYECVATNSAGVRYSSPANLYVRELREVRRVAPRFSILPMSHEIMPGGNVNITCVAVGSPMPYVKWMQGAEDLTPEDDMPVGRNVLELTDVKDSANYTCVAMSSLGVIEAVAQITVKSLPKAPGTPMVTENTATSITITWDSGNPDPVSYYVIEYKSKSQDGPYQIKEDITTTRYSIGGLSPNSEYEIWVSAVNSIGQGPPSESVVTRTGEQAPASAPRNVQARMLSATTMIVQWEEPVEPNGLIRGYRVYYTMEPEHPVGNWQKHNVDDSLLTTVGSLLEDETYTVRVLAFTSVGDGPLSDPIQVKTQQGVPGQPMNLRAEARSETSITLSWSPPRQESIIKYELLFREGDHGREVGRTFDPTTSYVVEDLKPNTEYAFRLAARSPQGLGAFTPVVRQRTLQSKPSAPPQDVKCVSVRSTAILVSWRPPPPETHNGALVGYSVRYRPLGSEDPEPKEVNGIPPTTTQILLEALEKWTQYRITTVAHTEVGPGPESSPVVVRTDEDVPSAPPRKVEAEALNATAIRVLWRSPAPGRQHGQIRGYQVHYVRMEGAEARGPPRIKDVMLADAQWETDDTAEYEMVITNLQPETAYSITVAAYTMKGDGARSKPKVVVTKGAVLGRPTLSVQQTPEGSLLARWEPPAGTAEDQVLGYRLQFGREDSTPLATLEFPPSEDRYTASGVHKGATYVFRLAARSRGGLGEEAAEVLSIPEDTPRGHPQILEAAGNASAGTVLLRWLPPVPAERNGAIVKYTVAVREAGALGPARETELPAAAEPGAENALTLQGLKPDTAYDLQVRAHTRRGPGPFSPPVRYRTFLRDQVSPKNFKVKMIMKTSVLLSWEFPDNYNSPTPYKIQYNGLTLDVDGRTTKKLITHLKPHTFYNFVLTNRGSSLGGLQQTVTAWTAFNLLNGKPSVAPKPDADGFIMVYLPDGQSPVPVQSYFIVMVPLRKSRGGQFLTPLGSPEDMDLEELIQDISRLQRRSLRHSRQLEVPRPYIAARFSVLPPTFHPGDQKQYGGFDNRGLEPGHRYVLFVLAVLQKSEPTFAASPFSDPFQLDNPDPQPIVDGEEGLIWVIGPVLAVVFIICIVIAILLYKNKPDSKRKDSEPRTKCLLNNADLAPHHPKDPVEMRRINFQTPDSGLRSPLREPGFHFESMLSHPPIPIADMAEHTERLKANDSLKLSQEYESIDPGQQFTWEHSNLEVNKPKNRYANVIAYDHSRVILQPIEGIMGSDYINANYVDGYRCQNAYIATQGPLPETFGDFWRMVWEQRSATIVMMTRLEEKSRIKCDQYWPNRGTETYGFIQVTLLDTIELATFCVRTFSLHKNGSSEKREVRQFQFTAWPDHGVPEYPTPFLAFLRRVKTCNPPDAGPIVVHCSAGVGRTGCFIVIDAMLERIKPEKTVDVYGHVTLMRSQRNYMVQTEDQYSFIHEALLEAVGCGNTEVPARSLYAYIQKLAQVEPGEHVTGMELEFKRLANSKAHTSRFISANLPCNKFKNRLVNIMPYESTRVCLQPIRGVEGSDYINASFIDGYRQQKAYIATQGPLAETTEDFWRMLWENNSTIVVMLTKLREMGREKCHQYWPAERSARYQYFVVDPMAEYNMPQYILREFKVTDARDGQSRTVRQFQFTDWPEQGVPKSGEGFIDFIGQVHKTKEQFGQDGPISVHCSAGVGRTGVFITLSIVLERMRYEGVVDIFQTVKMLRTQRPAMVQTEDEYQFCYQAALEYLGSFDHYAT

SEQ ID NO: 63871 - protein, 2770 aa, Homo sapiens
MALVLALAVLGSLSPGARAGDCKGQRQVLREAPGFVTDGAGNYSVNGNCEWLIEAPSPQHRILLDFLFLDTECTYDYLFVYDGDSPRGPLLASLSGSTRPPPIEASSGKMLLHLFSDANYNLLGFNASFRFSLCPGGCQSHGQCQPPGVCACEPGWGGPDCGLQECSAYCGSHGTCASPLGPCRCEPGFLGRACDLHLWENQGAGWWHNVSARDPAFSARIGAAGAFLSPPGLLAVFGGQDLNNALGDLVLYNFSANTWESWDLSPAPAARHSHVAVAWAGSLVLMGGELADGSLTNDVWAFSPLGRGHWELLAPPASSSSGPPGLAGHAAALVDDVWLYVSGGRTPHDLFSSGLFRFRLDSTSGGYWEQVIPAGGRPPAATGHSMVFHAPSRALLVHGGHRPSTARFSVRVNSTELFHVDRHVWTTLKGRDGLQGPRERAFHTASVLGNYMVVYGGNVHTHYQEEKCYEDGIFFYHLGCHQWVSGAELAPPGTPEGRAAPPSGRYSHVAAVLGGSVLLVAGGYSGRPRGDLMAYKVPPFVFQAPAPDYHLDYCSMYTDHSVCSRDPECSWCQGACQAAPPPGTPLGACPAASCLGLGRLLGDCQACLAFSSPTAPPRGPGTLGWCVHNESCLPRPEQARCRGEQISGTVGWWGPAPVFVTSLEACVTQSFLPGLHLLTFQQPPNTSQPDKEEVGRWVAHQEKETRRLQRPGSARLFPLPGRDHKYAVEIQGQLNGSAGPGHSELTLLWDRTGVPGGSEISFFFLEPYRSSSCTSYSSCLGCLADQGCGWCLTSATCHLRQGGAHCGDDGAGGSLLVLVPTLCPLCEEHRDCHACTQDPFCEWHQSTSRKGDAACSRRGRGRGALKSPEECPPLCSQRLTCEDCLANSSQCAWCQSTHTCFLFAAYLARYPHGGCRGWDDSVHSEPRCRSCDGFLTCHECLQSHECGWCGNEDNPTLGRCLQGDFSGPLGGGNCSLWVGEGLGLPVALPARWAYARCPDVDECRLGLARCHPRATCLNTPLSYECHCQRGYQGDGISHCNRTCLEDCGHGVCSGPPDFTCVCDLGWTSDLPPPTPAPGPPAPRCSRDCGCSFHSHCRKRGPGFCDECQDWTWGEHCERCRPGSFGNATGSRGCRPCQCNGHGDPRRGHCDNLSGLCFCQDHTEGAHCQLCSPGYYGDPRAGGSCFRECGGRALLTNVSSVALGSRRVGGLLPPGGGAARAGPGLSYCVWVVSATEELQPCAPGTLCPPLTLTFSPDSSTPCTLSYVLAFDGFPRFLDTGVVQSDRSLIAAFCGQRRDRPLTVQALSGLLVLHWEANGSSSWGFNASVGSARCGSGGPGSCPVPQECVPQDGAAGAGLCRCPQGWAGPHCRMALCPENCNAHTGAGTCNQSLGVCICAEGFGGPDCATKLDGGQLVWETLMDSRLSADTASRFLHRLGHTMVDGPDATLWMFGGLGLPQGLLGNLYRYSVSERRWTQMLAGAEDGGPGPSPRSFHAAAYVPAGRGAMYLLGGLTAGGVTRDFWVLNLTTLQWRQEKAPQTVELPAVAGHTLTARRGLSLLLVGGYSPENGFNQQLLEYQLATGTWVSGAQSGTPPTGLYGHSAVYHEATDSLYVFGGFRFHVELAAPSPELYSLHCPDRTWSLLAPSQGAKRDRMRNVRGSSRGLGQVPGEQPGSWGFREVRKKMALWAALAGTGGFLEEISPHLKEPRPRLFHASALLGDTMVVLGGRSDPDEFSSDVLLYQVNCNAWLLPDLTRSASVGPPMEESVAHAVAAVGSRLYISGGFGGVALGRLLALTLPPDPCRLLSSPEACNQSGACTWCHGACLSGDQAHRLGCGGSPCSPMPRSPEECRRLRTCSECLARHPRTLQPGDGEASTPRCKWCTNCPEGACIGRNGSCTSENDCRINQREVFWAGNCSEAACGAADCEQCTREGKCMWTRQFKRTGETRRILSVQPTYDWTCFSHSLLNVSPMPVESSPPLPCPTPCHLLPNCTSCLDSKGADGGWQHCVWSSSLQQCLSPSYLPLRCMAGGCGRLLRGPESCSLGCAQATQCALCLRRPHCGWCAWGGQDGGGRCMEGGLSGPRDGLTCGRPGASWAFLSCPPEDECANGHHDCNETQNCHDQPHGYECSCKTGYTMDNMTGLCRPVCAQGCVNGSCVEPDHCRCHFGFVGRNCSTECRCNRHSECAGVGARDHCLLCRNHTKGSHCEQCLPLFVGSAVGGGTCRPCHAFCRGNSHICISRKELQMSKGEPKKYSLDPEEIENWVTEGPSEDEAVCVNCQNNSYGEKCESCLQGYFLLDGKCTKCQCNGHADTCNEQDGTGCPCQNNTETGTCQGSSPSDRRDCYKYQCAKCRESFHGSPLGGQQCYRLISVEQECCLDPTSQTNCFHEPKRRALGPGRTVLFGVQPKFTNVDIRLTLDVTFGAVDLYVSTSYDTFVVRVAPDTGVHTVHIQPPPAPPPPPPPADGGPRGAGDPGGAGASSGPGAPAEPRVREVWPRGLITYVTVTEPSAVLVVRGVRDRLVITYPHEHHALKSSRFYLLLLGVGDPSGPGANGSADSQGLLFFRQDQAHIDLFVFFSVFFSCFFLFLSLCVLLWKAKQALDQRQEQRRHLQEMTKMASRPFAKVTVCFPPDPTAPASAWKPAGLPPPAFRRSEPFLAPLLLTGAGGPWGPMGGGCCPPAIPATTAGLRAGPITLEPTEDGMAGVATLLLQLPGGPHAPNGACLGSALVTLRHRLHEYCGGGGGAGGSGHGTGAGRKGLLSQDNLTSMSL

SEQ ID NO: 63872 - protein, 424 aa, Homo sapiens
MPFNVAEGKEVLLLVHNLPQQLFGYSWYKGERVDGNRQIVGYAIGTQQATPGPANSGRETIYPNASLLIQNVTQNDTGFYTLQVIKSDLVNEEATGQFHVYPELPKPSISSNNSNPVEDKDAVAFTCEPETQDTTYLWWINNQSLPVSPRLQLSNGNRTLTLLSVTRNDTGPYECEIQNPVSANRSDPVTLNVTYGPDTPTISPSDTYYRPGANLSLSCYAASNPPAQYSWLINGTFQQSTQELFIPNITVNNSGSYTCHANNSVTGCNRTTVKTIIVTELSPVVAKPQIKASKTTVTGDKDSVNLTCSTNDTGISIRWFFKNQSLPSSERMKLSQGNTTLSINPVKREDAGTYWCEVFNPISKNQSDPIMLNVNYNALPQENGLSPGAIAGIVIGVVALVALIAVALACFLHFGKTGSSGPLQ

SEQ ID NO: 63873 - protein, 87 aa, Homo sapiens
MTQPPSSLSASVGDSVTITCRASQSFTNQLAWYQQKPGKAPKLLIYRVSSLQTGVPSLFSGSESGTDFTLTISSLQPDDVATYYCQQ

SEQ ID NO: 63874 - protein, 504 aa, Homo sapiens
MILPVLIMIALPSPSMEDEKPKVNPKLYMCVCEGLSCGNEDHCEGQQCFSSLSINDGFHVYQKGCFQVYEQGKMTCKTPPSPGQAVECCQGDWCNRNITAQLPTKGKSFPGTQNFHLEVGLIILSVVFAVCLLACLLGVALRKFKRRNQERLNPRDVEYGTIEGLITTNVGDSTLADLLDHSCTSGSGSGLPFLVQRTVARQITLLECVGKGRYGEVWRGSWQGENVAVKIFSSRDEKSWFRETELYNTVMLRHENILGFIASDMTSRHSSTQLWLITHYHEMGSLYDYLQLTTLDTVSCLRIVLSIASGLAHLHIEIFGTQGKPAIAHRDLKSKNILVKKNGQCCIADLGLAVMHSQSTNQLDVGNNPRVGTKRYMAPEVLDETIQVDCFDSYKRVDIWAFGLVLWEVARRMVSNGIVEDYKPPFYDVVPNDPSFEDMRKVVCVDQQRPNIPNRWFSDPTLTSLAKLMKECWYQNPSARLTALRIKKTLTKIDNSLDKLKTDC

SEQ ID NO: 63875 - protein, 28 aa, Homo sapiens
MLYILMNSEKECGVSLQMSSSVVSFPLQ

SEQ ID NO: 63876 - protein, 95 aa, Homo sapiens
MLWVSGSSGDIVMTQTPLSLPVTPGEPASISCRSSESLLDTDDEYTYLNWYLQKPGQSPQLLIYEVSNRASGVPDRFSGSGSGTDFTLKISRVEA

SEQ ID NO: 63877 - protein, 45 aa, Homo sapiens
MSFGLLRVFSIVIPFLYVGTLISKNFAALLEEHDIFVPEDDDDDD

SEQ ID NO: 63878 - protein, 437 aa, Homo sapiens [sequence omitted]

SEQ ID NO: 63879 - protein, 1143 aa, Homo sapiens
MIVTTLLQFMFACIGVQLFKGKFYRCTDEAKSNPEECRGLFILYKDGDVDSPVVRERIWQNSDFNFDNVLSAMMALFTVSTFEGWPALLYKAIDSNGENIGPIYNHRVEISIFFIIYIIIVAFFMMNIFVGFVIVTFQEQGEKEYKNCELDKNQRQCVEYALKARPLRRYIPKNPYQYKFWYVVNSSPFEYMMFVLIMLNTLCLAMQHYEQSKMFNDAMDILNMVFTGVFTVEMVLKVIAFKPKHYFTDAWNTFDALIVVGSVVDIAITEVNPTESENVPVPTATPGNSEESNRISITFFRLFRVMRLVKLLSRGEGIRTLLWTFIKSFQALPYVALLIAMLFFIYAVIGMQMFGKVAMRDNNQINRNNNFQTFPQAVLLLFRCATGEAWQEIMLACLPGKLCDPESDYNPGEEYTCGSNFAIVYFISFYMLCAFLIINLFVAVIMDNFDYLTRDWSILGPHHLDEFKRIWSEYDPEAKGRIKHLDVVTLLRRIQPPLGFGKLCPHRVACKRLVAMNMPLNSDGTVMFNATLFALVRTALKIKTEGNLEQANEELRAVIKKIWKKTSMKLLDQVVPPAGDDEVTVGKFYATFLIQDYFRKFKKRKEQGLVGKYPAKNTTIALQAGLRTLHDIGPEIRRAISCDLQDDEPEETKREEEDDVFKRNGALLGNHVNHVNSDRRDSLQQTNTTHRPLHVQRPSIPPASDTEKPLFPPAGNSVCHNHHNHNSIGKQVPTSTNANLNNANMSKAAHGKRPSIGNLEHVSENGHHSSHKHDREPQRRSSVKRTRYYETYIRSDSGDEQLPTICREDPEIHGYFRDPHCLGEQEYFSSEECYEDDSSPTWSRQNYGYYSRYPGRNIDSERPRGYHHPQGFLEDDDSPVCYDSRRSPRRRLLPPTPASHRRSSFNFECLRRQSSQEEVPSSPIFPHRTALPLHLMQQQIMAVAGLDSSKAQKYSPSHSTRSWATPPATPPYRDWTPCYTPLIQVEQSEALDQVNGSLPSLHRSSWYTDEPDISYRTFTPASLTVPSSFRNKNSDKQRSADSLVEAVLISEGLGRYARDPKFVSATKHEIADACDLTIDEMESAASTLLNGNVRPRANGDVGPLSHRQDYELQDFGPGYSDEEPDPGRDEEDLADEMICITTL

SEQ ID NO: 63880 - protein, 587 aa, Homo sapiens
MIVTTLLQFMFACIGVQLFKGKFYRCTDEAKSNPEECRGLFILYKDGDVDSPVVRERIWQNSDFNFDNVLSAMMALFTVSTFEGWPALLYKAIDSNGENIGPIYNHRVEISIFFIIYIIIVAFFMMNIFVGFVIVTFQEQGEKEYKNCELDKNQRQCVEYALKARPLRRYIPKNPYQYKFWYVVNSSPFEYMMFVLIMLNTLCLAMQHYEQSKMFNDAMDILNMVFTGVFTVEMVLKVIAFKPKHYFTDAWNTFDALIVVGSVVDIAITEVNPTESENVPVPTATPGNSEESNRISITFFRLFRVMRLVKLLSRGEGIRTLLWTFIKSFQALPYVALLIAMLFFIYAVIGMQMFGKVAMRDNNQINRNNNFQTFPQAVLLLFRCATGEAWQEIMLACLPGKLCDPESDYNPGEEYTCGSNFAIVYFISFYMLCAFLIINLFVAVIMDNFDYLTRDWSILGPHHLDEFKRIWSEYDPEAKGRIKHLDVVTLLRRIQPPLGFGKLCPHRVACKRLVAMNMPLNSDGTVMFNATLFALVRTALKIKTEGNLEQANEELRAVIKKIWKKTSMKLLDQVVPPAGGQCSLFPK

SEQ ID NO: 63881 - protein, 27 aa, Homo sapiens
MEYMLAFLLLLLDPFLMLLHFLSPMNM

SEQ ID NO: 63882 - protein, 67 aa, Homo sapiens
MGIMNSFVNDIFEHVAGEASRLAHYNKRSTITSREIQTAERLLLPEEVAKHAVSEGTKAITKYTSAK

SEQ ID NO: 63883 - protein, 19 aa, Homo sapiens
MLLCLCIWSLFGATVDRHL

SEQ ID NO: 63884 - protein, 1548 aa, Homo sapiens
MDERRRQNIAYEYLCHLEEAKRWMEVCLVEELPPTTELEEGLRNGVYLAKLAKFFAPKMVSEKKIYDVEQTRYKKSGLHFRHTDNTVQWLRAMESIGLPKIFYPETTDVYDRKNIPRMIYCIHALSLYLFKLGIAPQIQDLLGKVDFTEEEISNMRKELEKYGIQMPSFSKIGGILANELSVDEAALHAAVIAINEAVEKGIAEQTVVTLRNPNAVLTLVDDNLAPEYQKELWDAKKKKEENARLKNSCISEEERDAYEELLTQAEIQGNINKVNRQAAVDHINAVIPEGDPENTLLALKKPEAQLPAVYPFAAAMYQNELFNLQKQNTMNYLAHEELLIAVEMLSAVALLNQALESNDLVSVQNQLRSPAIGLNNLDKAYVERYANTLLSVKLEVLSQGQDNLSWNEIQNCIDMVNAQIQEENDRVVAVGYINEAIDEGNPLRTLETLLLPTANISDVDPAHAQHYQDVLYHAKSQKLGDSESVSKVLWLDEIQQAVDDANVDKDRAKQWVTLVVDVNQCLEGKKSSDILSVLKSSTSNANDIIPECADKYYDALVKAKELKSERVSSDGSWLKLNLHKKYDYYYNTDSKESSWVTPESCLYKESWLTGKEIEDIIEEVTVGYIRENIWSASEELLLRFQATSSGPILREEFEARKSFLHEQEENVVKIQAFWKGYKQRKEYMHRRQTFIDNTDSIVKIQSWFRMATARKSYLSRLQYFRDHNNEIVKIQSLLRANKARDDYKTLVGSENPPLTVIRKFVYLLDQSDLDFQEELEVARLREEVVTKIRANQQLEKDLNLMDIKIGLLVKNRITLEDVISHSKKLNKKKGGEMEILNNTDNQGIKSLSKERRKTLETYQQLFYLLQTNPLYLAKLIFQMPQNKSTKFMDTVIFTLYNYASNQREEYLLLKLFKTALEEEIKSKVDQVQDIVTGNPTVIKMVVSFNRGARGQNTLRQLLAPVVKEIIDDKSLIINTNPVEVYKAWVNQLETQTGEASKLPYDVTTEQALTYPEVKNKLEASIENLRRVTDKVLNSIISSLDLLPYGLRYIAKVLKNSIHEKFPDATEDELLKIVGNLLYYRYMNPAIVAPDGFDIIDMTAGGQINSDQRRNLGSVAKVLQHAASNKLFEGENEHLSSMNNYLSETYQEFRKYFKEACNVPEPEEKFNMDKYTDLVTVSKPVIYISIEEIISTHSLLLEHQDAIAPEKNDLLSELLGSLGEVPTVESFLGEGAVDPNDPNKANTLSQLSKTEISLVLTSKYDIEDGEAIDSRSLMIKTKKLIIDVIRNQPGNTLTEILETPATAQQEVDHATDMVSRAMIDSRTPEEMKHSQSMIEDAQLPLEQKKRKIQRNLRTLEQTGHVSSENKYQDILNEIAKDIRNQRIYRKLRKAELAKLQQTLNALNKKAAFYEEQINYYDTYIKTCLDNLKRKNTRRSIKLDGKGEPKGAKRAKPVKYTAAKLHEKGVLLDIDDLQTNQFKNVTFDIIATEDVGIFDVRSKFLGVEMEKVQLNIQDLLQMQYEGVAVMKMFDKVKVNVNLLIYLLNKKFYGK

SEQ ID NO: 63885 - protein, 946 aa, Homo sapiens [sequence omitted]

SEQ ID NO: 63886 - protein, 336 aa, Homo sapiens
MFNIHRGFYCLTAILPQICICSQFSVPSSYHFTEDPGAFPVATNGERFPWQELRLPSVVIPLHYDLFVHPNLTSLDFVASEKIEVLVSNATQFIILHSKDLEITNATLQSEEDSRYMKPGKELKVLSYPAHEQIALLVPEKLTPHLKYYVAMDFQAKLGDGFEGFYKSTYRTLGGETRILAVTDFEPTQARMAFPCFDEPLFKANFSIKIRRESRHIALSNMPKVKTIELEGGLLEDHFETTVKMSTYLVAYIVCDFHSLSGFTSSGVKVSIYASPDKRNQTHYALQASLKLLDFYEKYFDIYYPLSKLGMFKFHIIVFIFAHKTCFDLFPLSLSM

SEQ ID NO: 63887 - protein, 65 aa, Homo sapiens
MRARALASTSLLLLSRLEPPLADSGERECASHPPRPAAGPSASGNVSGAACTLLRPWTHHMMVLR

SEQ ID NO: 63888 - protein, 255 aa, Homo sapiens
MAKLTVTLMVLSSPLALAGDTRPRFLQQDKYECHFFNGTERVRFLHRDIYNQEEDLRFDSDVGEYRAVTELGRPDAEYWNSQKDFLEDRRAAVDTYCRHNYGVGESFTVQRRVEPKVTVYPARTQTLQHHNLLVCSVNGFYPGSIEVRWFRNSQEEKAGVVSTGLIQNGDWTFQTLVMLETVPRSGEVYTCQVEHPSVTSPLTVEWRAQSESAQSKMLSGVGGFVLGLLFLGAGLFIYFKNQKGHSGLHPTGLVS

SEQ ID NO: 63889 - protein, 257 aa, Homo sapiens
MVLQVSAAPRTVALTALLMVLLTSVVQGRATPENYLFQGRQECYAFNGTQRFLERYIYNREEFARFDSDVGEFRAVTELGRPAAEYWNSQKDILEEKRAVPDRMCRHNYELGGPMTLQRRVQPRVNVSPSKKGPLQHHNLLVCHVTDFYPGSIQVRWFLNGQEETAGVVSTNLIRNGDWTFQILVMLEMTPQQGDVYTCQVEHTSLDSPVTVEWKAQSDSARSKTLTGAGGFVLGLIICGVGIFMHRRSKKVQRGSA

SEQ ID NO: 63890 - protein, 344 aa, Homo sapiens
MGPVRVAFVVLLALCSRPAVGQNCSGPCRCPDEPAPRCPAGVSLVLDGCGCCRVCAKQLGELCTERDPCDPHKGLFCHFGSPANRKIGVCTAKDGAPCIFGGTVYRSGESFQSSCKYQCTCLDGAVGCMPLCSMDVRLPSPDCPFPRRVKLPGKCCEEWVCDEPKDQTVVGPALAAYRLEDTFGPDPTMIRANCLVQTTEWSACSKTCGMGISTRVTNDNASCRLEKQSRLCMVRPCEADLEENIKKGKKCIRTPKISKPIKFELSGCTSMKTYRAKFCGVCTDGRCCTPHRTTTLPVEFKCPDGEVMKKNMMFIKTCACHYNCPGDNDIFESLYYRKMYGDMA

SEQ ID NO: 63891 - protein, 1055 aa, Homo sapiens
MRKSIEIIYAITSVILASVSVINESENYEALLECVIILNGILYALPESERKLQSSIQDLCVTWWEKGLPAKEDTGKTAFVMLLRRSLETKTGADVCRLWRIHQALYCFDYDLEESGEIKDMLLECFININYIKKEEGRRFLSCLFNWNINFIKMIHGTIKNQLQGLQKSLMVYIAEIYFRAWKKASGKILEAIENDCIQDFMFHGIHLPRRSPVHSKVREVLSYFHHQKKVRQGVEEMLYRLYKPILWRGLKARNSEVRSNAALLFVEAFPIRDPNLHAIEMDSEIQKQFEELYSLLEDPYPMVRSTGILGVCKITSKYWEMMPPTILIDLLKKVTGELAFDTSSADVRCSVFKCLPMILDNKLSHPLLEQLLPALRYSLHDNSEKVRVAFVDMLLKIKAVRAAKFWKICPMEHILVRLETDSRPVSRRLVSLIFNSFLPVNQPEEVWCERCVTLVQMNHAAARRFYQYAHEHTACTNIAKLIHVIRHCLNACIQRAVREPPEDEEEEDGREKENVTVLDKTLSVNDVACMAGLLEIIVILWKSIDRSMENNKEAKLYTINKFASVLPEYLKVFKDDRCKIPLFMLMSFMPASAVPPFSCGVISTLRSREEGAVDKSYCTLLDCLCSWGQVGHILELVDNWLPTEHAQAKSNTASKGRVQIHDTRPVKPELALVYIEYLLTHPKNRECLLSAPRKKLNHLLKALETSKADLESLLQTPGGKPRGFSEAAAPRAFGLHCRLSIHLQHKFCSEGKVYLSMLEDTGFWLESKILSFIQDQEEDYLKLHRVIYQQIIQTYLTVCKDVVMVGLGDHQFQMQLLQRSLGIMQTVKGFFYVSLLLDILKEITGSSLIQKTDSDEEVAMLLDTVQKVFQKMLECIARSFRKQPEEGLRLLYSVQRPLHEFITAVQSRHTDTPVHRGVLSTLIAGPVVEISHQLRKVSDVEELTPPEHLSDLPPFSRCLIGIIIKSSNVVRSFLDELKACVASNDIEGIVCLTAAVHIILVINAGKHKSSKVREVAATVHRKLKTFMEITLEEDSIERFLYESSSRTLGELLNS

SEQ ID NO: 63892 - protein, 1068 aa, Homo sapiens
MRKSIEIIYAITSVILASVSVINESENYEALLECVIILNGILYALPESERKLQSSIQDLCVTWWEKGLPAKEDTGKTAFVMLLRRSLETKTGADVCRLWRIHQALYCFDYDLEESGEIKDMLLECFININYIKKEEGRRFLSCLFNWNINFIKMIHGTIKNQLQGLQKSLMVYIAEIYFRAWKKASGKILEAIENDCIQDFMFHGIHLPRRSPVHSKVREVLSYFHHQKKVRQGVEEMLYRLYKPILWRGLKARNSEVRSNAALLFVEAFPIRDPNLHAIEMDSEIQKQFEELYSLLEDPYPMVRSTGILGVCKITSKYWEMMPPTILIDLLKKVTGELAFDTSSADVRCSVFKCLPMILDNKLSHPLLEQLLPALRYSLHDNSEKVRVAFVDMLLKIKAVRAAKFWKICPMEHILVRLETDSRPVSRRLVSLIFNSFLPVNQPEEVWCERCVTLVQMNHAAARRFYQYAHEHTACTNIAKLIHVIRHCLNACIQRAVREPPEDEEEEDGREKENVTVLDKTLSVNDVACMAGLLEIIVILWKSIDRSMENNKEAKLYTINKFASVLPEYLKVFKDDRCKIPLFMLMSFMPASAVPPFSCGVISTLRSREEGAVDKSYCTLLDCLCSWGQVGHILELVDNWLPTEHAQAKSNTASKGRVQIHDTRPVKPELALVYIEYLLTHPKNRECLLSAPRKKLNHLLKALETSKADLESLLQTPGGKPRGFSEAAAPRAFGLHCRLSIHLQHKFCSEGKVYLSMLEDTGFWLESKILSFIQDQEEDYLKLHRVIYQQIIQTYLTVCKDVVMVGLGDHQFQMQLLQRSLGIMQTVKGFFYVSLLLDILKEITGSSLIQKTDSDEEVAMLLDTVQKVFQKMLECIARSFRKQPEEGLRLLYSVQRPLHEFITAVQSRHTDTPVHRGVLSTLIAGPVVEISHQLRKVSDVEELTPPEHLSDLPPFSRCLIGIIIKSSNVVRSFLDELKACVASNDIEGIVCLTAAVHIILVINAGKHKSSKVREVAATVHRKLKTFMEITLEEDSIERYEDLLCCPGWALTPGLLDSIYPSASVPIG

SEQ ID NO: 63893 - protein, 457 aa, Homo sapiens [sequence omitted]

SEQ ID NO: 63894 - protein, 664 aa, Homo sapiens [sequence omitted]

SEQ ID NO: 63895 - protein, 108 aa, Homo sapiens
MASLGALALLLLSSLSRCSGSGPAGASFLRASDPRQVVLGAGGMRGSGLSGSVAAGRAFPREAGGLGTGGPKHLAHVYRQPGFSLSAHTKRSPRASMVRPAPKLQHGT

SEQ ID NO: 63896 - protein, 36 aa, Homo sapiens
MASLGALALLLLSSLSRCSGICLLWSRPRAFSDVLC

SEQ ID NO: 63897 - protein, 450 aa, Homo sapiens
MLRAALLLISLPWGAQGTASTSLSTAGGHTVPPTGGRYLSIGDGSVMEFEFPEDSEGIIVISSQYPGQANRTAPGPMLRVTSLDTEVLTIKNVSAITWGGGGGFVVSIHSGLAGLAPLHIQLVDAHEAPPTLIEERRDFCIKVSPAEDTPATLSADLAHFSENPILYLLLPLIFVNKCSFGCKVELEVLKGLMQSPQPMLLGLLGQFLVMPLYAFLMAKVFMLPKALALGLIITCSSPGGGGSYLFSLLLGGDVTLAISMTFLSTVAATGFLPLSSAIYSRLLSIHETLHVPISKILGTLLFIAIPIAVGVLIKSKLPKFSQLLLQVVKPFSFVLLLGGLFLAYRMGVFILAGIRLPIVLVGITVPLVGLLVGYCLATCLKLPVAQRRTVSIEVGVQNSLLALAMLQLSLRRLQADYASQAPFIVALSGTSEMLALVIGHFIYSSLFPVP

SEQ ID NO: 63898 - protein, 227 aa, Homo sapiens
LSRCRSGLLHVLGLSFLLQTRRPILLCSPRLMKPLVVFVLGGPGAGKGTQCARIVEKYGYTHLSAGELLRDERKNPDSQYGELIEKYIKEGKIVPVEITISLLKREMDQTMAANAQKNKFLIDGFPRNQDNLQGWNKTMDGKADVSFVLFFDCNNEICIERCLERGKSSGRSDDNRESLEKRIQTYLQSTKPIIDLYEEMGKVKKIDASKSVDEVFDEVVQIFDKEG

SEQ ID NO: 63899 - protein, 32 aa, Homo sapiens
IVVTLLATFSFIITLVVKSSFPEKGHKRPGQV

SEQ ID NO: 63900 - protein, 25 aa, Homo sapiens
KYSVWISGSILASLSAFQQMWISKQ

SEQ ID NO: 63901 - protein, 40 aa, Homo sapiens
TVFSHAQMVVLCVGCSTVLCQPTGGKARLTEGCSFRKKQH

SEQ ID NO: 63902 - protein, 17 aa, Homo sapiens
IIIMAIAIKLGIAPFHF

SEQ ID NO: 63903 - protein, 720 aa, Homo sapiens
IPRSDSARPRSPRLPGASREPAGRRTPTPSSLCPSTRAPRPFRDPCPAGSAANLPAMETPSQRRATRSGAQASSTPLSPTRITRLQEKEDLQELNDRLAVYIDRVRSLETENAGLRLRITESEEVVSREVSGIKAAYEAELGDARKTLDSVAKERARLQLELSKVREEFKELKARNTKKEGDLIAAQARLKDLEALLNSKEAALSTALSEKRTLEGELHDLRGQVAKLEAALGEAKKQLQDEMLRRVDAENRLQTMKEELDFQKNIYSEELRETKRRHETRLVEIDNGKQREFESRLADALQELRAQHEDQVEQYKKELEKTYSAKLDNARQSAERNSNLVGAAHEELQQSRIRIDSLSAQLSQLQKQLAAKEAKLRDLEDSLARERDTSRRLLAEKEREMAEMRARMQQQLDEYQELLDIKLALDMEIHAYRKLLEGEEERLRLSPSPTSQRSRGRASSHSSQTQGGGSVTKKRKLESTESRSSFSQHARTSGRVAVEEVDEEGKFVRLRNKSNEDQSMGNWQIKRQNGDDPLLTYRFPPKFTLKAGQVVTIWAAGAGATHSPPTDLVWKAQNTWGCGNSLRTALINSTGEEVAMRKLVRSVTVVEDDEDEDGDDLLHHHHGSHCSSSGDPAEYNLRSRTVLCGTCGQPADKASASGSGAQVGGPISSGSSASSVTVTRSYRSVGGSGGGSFGDNLVTRSYLLGNSSPRTQSPQNCSIM

SEQ ID NO: 63904 - protein, 40 aa, Homo sapiens
LLLWLSLPVRLPSFVVSQRCAGLLLAALRIQGVGCQVQVS

SEQ ID NO: 63905 - protein, 16 aa, Homo sapiens
IFTLRKGIPRLIFFLL

SEQ ID NO: 63906 - protein, 13 aa, Homo sapiens
ILEGCWLLMLLLS

SEQ ID NO: 63907 - protein, 17 aa, Homo sapiens
MKLVFLGGDFSIVLSMC

SEQ ID NO: 63908 - protein, 333 aa, Homo sapiens
ITMKRLVCVLLVCSSAVAQLHKDPTLDHHWHLWKKTYGKQYKEKNEEAVRRLIWEKNLKFVMLHNLEHSMGMHSYDLGMNHLGDMTSEEVMSLMSSLRVPSQWQRNITYKSNPNRILPDSVDWREKGCVTEVKYQGSCGACWAFSAVGALEAQLKLKTGKLVSLSAQNLVDCSTEKYGNKGCNGGFMTTAFQYIIDNKGIDSDASYPYKAMDQKCQYDSKYRAATCSKYTELPYGREDVLKEAVANKGPVSVGVDARHPSFFLYRSGVYYEPSCTQNVNHGVLVVGYGDLNGKEYWLVKNSWGHNFGEEGYIRMARNKGNHCGIASFPSYPEI

SEQ ID NO: 63909 - protein, 574 aa, Homo sapiens
ISFCLRLGLLFLFADVDPLSFRDSGTPVVFSSSNDPEGMEFSSPSREECPKPLSRVSIMAGSLTGLLLLQAVSWASGARPCIPKSFGYSSVVCVCNATYCDSFDPPTFPALGTFSRYESTRSGRRMELSMGPIQANHTGTGLLLTLQPEQKFQKVKGFGGAMTDAAALNILALSPPAQNLLLKSYFSEEGIGYNIIRVPMASCDFSIRTYTYADTPDDFQLHNFSLPEEDTKLKIPLIHRALQLAQRPVSLLASPWTSPTWLKTNGAVNGKGSLKGQPGDIYHQTWARYFVKFLDAYAEHKLQFWAVTAENEPSAGLLSGYPFQCLGFTPEHQRDFIARDLGPTLANSTHHNVRLLMLDDQRLLLPHWAKVVLTDPEAAKYVHGIAVHWYLDFLAPAKATLGETHRLFPNTMLFASEACVGSKFWEQSVRLGSWDRGMQYSHSIITNLLYHVVGWTDWNLALNPEGGPNWVRNFVDSPIIVDITKDTFYKQPMFYHLGHFSKFIPEGSQRVGLVASQKNDLDAVALMHPDGSAVVVVLNRSSKDVPLTIKDPAVGFLETISPGYSIHTYLWRRQ

SEQ ID NO: 63910 - protein, 34 aa, Homo sapiens
IMAVALGAPGLMLLGGGLVLLLHHKKYSEYQSIN

SEQ ID NO: 63911 - protein, 217 aa, Homo sapiens
VPWAAALLLALGVERALALPEICTQCPGSVQNLSKVAFYCKTTRELMLHARCCLNQKGTILGLDLQNCSLEDPGPNFHQAHTTVIIDLQANPLKGDLANTFRGFTQLQTLILPQHVNCPGGINAWNTITSYIDNQICQGQKNLCNNTGDPEMCPENGSCVPDGPGLLQCVCADGFHGYKCMRQGSFSLLMFFGILGATTLSVSILLWATQRRKAKTS

SEQ ID NO: 63912 - protein, 14 aa, Homo sapiens
MEMVYLMLKMSLVF

SEQ ID NO: 63913 - protein, 22 aa, Homo sapiens
MDMRAPAQLLGLLLLWLPVTSR

SEQ ID NO: 63914 - protein, 34 aa, Homo sapiens
LYPFAPLILLYGLSLALGWNFTHTLCSFYKYRVK

SEQ ID NO: 63915 - protein, 19 aa, Homo sapiens
MYSITVAFWLLNSWLWFRR

SEQ ID NO: 63916 - protein, 311 aa, Homo sapiens
LFLLPLGAAAAMILLEVNNRIIEETLALKFENAAAGNKPEAVEVTFADFDGVLYHISNPNGDKTKVMVSISLKFYKELQAHGADELLKRVYGSFLVNPESGYNVSLLYDLENLPASKDSIVHQAGMLKRNCFASVFEKYFQFQEEGKEGENRAVIHYRDDETMYVESKKDRVTVVFSTVFKDDDDVVIGKVFMQEFKEGRRASHTAPQVLFSHREPPLELKDTDAAVGDNIGYITFVLFPRHTNASARDNTINLIHTFRDYLHYHIKCSKAYIHTRMRAKTSDFLKVLNRARPDAEKKEMKTITGKTFSSR

SEQ ID NO: 63917 - protein, 970 aa, Homo sapiens
LRSWNGERADGRVRGAAMITSAAGIISLLDEDEPQLKEFALHKLNAVVNDFWAEISESVDKIEVLYEDEGFRSRQFAALVASKVFYHLGAFEESLNYALGAGDLFNVNDNSEYVETIIAKCIDHYTKQCVENADLPEGEKKPIDQRLEGIVNKMFQRCLDDHKYKQAIGIALETRRLDVFEKTILESNDVPGMLAYSLKLCMSLMQNKQFRNKVLRVLVKIYMNLEKPDFINVCQCLIFLDDPQAVSDILEKLVKEDNLLMAYQICFDLYESASQQFLSSVIQNLRTVGTPIASVPGSTNTGTVPGSEKDSDSMETEEKTSSAFVGKTPEASPEPKDQTLKMIKILSGEMAIELHLQFLIRNNNTDLMILKNTKDAVRNSVCHTATVIANSFMHCGTTSDQFLRDNLEWLARATNWAKFTATASLGVIHKGHEKEALQLMATYLPKDTSPGSAYQEGGGLYALGLIHANHGGDIIDYLLNQLKNASNDIVRHGGSLGLGLAAMGTARQDVYDLLKTNLYQDDAVTGEAAGLALGLVMLGSKNAQAIEDMVGYAQETQHEKILRGLAVGIALVMYGRMEEADALIESLCRDKDPILRRSGMYTVAMAYCGSGNNKAIRRLLHVAVSDVNDDVRRAAVESLGFILFRTPEQCPSVVSLLSESYNPHVRYGAAMALGICCAGTGNKEAINLLEPMTNDPVNYVRQGALIASALIMIQQTEITCPKVNQFRQLYSKVINDKHDDVMAKFGAILAQGILDAGGHNVTISLQSRTGHTHMPSVVGVLVFTQFWFWFPLSHFLSLAYTPTCVIGLNKDLKMPKVQYKSNCKPSTFAYPAPLEVPKEKEKEKVSTAVLSITAKAKKKEKEKEKKEEEKMEVDEAEKKEEKEKKKEPEPNFQLLDNPARVMPAQLKVLTMPETCRYQPFKPLSIGGIIILKDTSEDIEELVEPVAAHGPKIEEEEQEPEPPEPFEYIDD

SEQ ID NO: 63918 - protein, 77 aa, Homo sapiens
IRLIWLARRVSPSSLTAPCASLPKLRARSKRTTIPDRGGPDFGQGYTSSCAPLLEPPNKLSRKEFEGELVVLNSNFY

SEQ ID NO: 63919 - protein, 13 aa, Homo sapiens
IMGKLLAWLAVGM

SEQ ID NO: 63920 - protein, 221 aa, Homo sapiens
LLSAEWKRVLLFVSLAMALQLSREQGITLRGSAEIVAEFFSFGINSILYQRGIYPSETFTRVQKYGLTLLVTTDLELIKYLNNVVEQLKDWLYKCSVQKLVVVISNIESGEVLERWQFDIECDKTAKDDSAPREKSQKAIQDEIRSVIRQITATVTFLPLLEVSCSFDLLIYTDKDLVVPEKWEESGPQFITNSEEVRLRSFTTTIHKVNSMVAYKIPVND

SEQ ID NO: 63921 - protein, 52 aa, Homo sapiens
VIAHDVDPIELVTFLPALCRKMGVPYCIIKGKARLGCLVYRKTCTKAQKGKG

SEQ ID NO: 63922 - protein, 596 aa, Homo sapiens
RLEIMEGKWLLCMLLVLGTAIVEAHDGHDDDVIDIEDDLDDVIEEVEDSKPDTTAPPSSPKVTYKAPVPTGEVYFADSFDRGTLSGWILSKAKKDDTDDEIAKYDGKWEVEEMKESKLPGDKGLVLMSRAKHHAISAKLNKPFLFDTKPLIVQYEVNFQNGIECGGAYVKLLSKTPELNLDQFHDKTPYTIMFGPDKCGEDYKLHFIFRHKNPKTGIYEEKHAKRPDADLKTYFTDKKTHLYTLILNPDNSFEILVDQSVVNSGNLLNDMTPPVNPSREIEDPEDRKPEDWDERPKIPDPEAVKPDDWDEDAPAKIPDEEATKPEGWLDDEPEYVPDPDAEKPEDWDEDMDGEWEAPQIANPRCESAPGCGVWQRPVIDNPNYKGKWKPPMIDNPSYQGIWKPRKIPNPDFFEDLEPFRMTPFSAIGLELWSMTSDIFFDNFIICADRRIVDDWANDGWGLKKAADGAAEPGVVGQMIEAAEERPWLWVVYILTVALPVFLVILFCCSGKKQTSGMEYKKTDAPQPDVKEEEEEKEEEKDKGDEEEEGEEKLEEKQKSDAEEDGGTVSQEEEDRKPKAEEDEILNRSPRNRKPRRE

SEQ ID NO: 63923 - protein, 237 aa, Homo sapiens
LARPLVLALLLVSAALSSVVSRTDSPSPTVLNSHISTPNVNALTHENQTKPSISQISTTLPPTTSTKKSGGASVVPHPSPTPLSQEEADNNEDPSIEEEDLLMLNSSPSTAKDTLDNGDYGEPDYDWTTGPRDDDESDDTLEENRGYMEIEQSVKSFKMPSSNIEEEDSHFFFHLIIFAFCIAVVYITYHNKRKIFLLVQSRKWRDGLCSKTVEYHRLDQNVNEAMPSLKITNDYIF

SEQ ID NO: 63924 - protein, 25 aa, Homo sapiens
ISWYDNEFGYSNRVVDLMAHIASKE

SEQ ID NO: 63925 - protein, 208 aa, Homo sapiens
ILVLAVLMLMYYCCRQNNKLGQLKPSALPSKLRQQFSCPFRVSQNSGTGHANPTFKLQTPQGKRKVINTPEILRKPSQPPPRPPPDYLRGGSPPAPLPAHLSRAARNSPGPGSQIERTESSRRPPPSRPIPPAPNCIVSQDFSRPRPPQKALPANPVPGRRSLPRPGGASPLRPPGAGPQQSRPLAALAPKFPEYRSQRAGGMISSKI

SEQ ID NO: 63926 - protein, 14 aa, Homo sapiens
ITALYSLYIFTTTQ

SEQ ID NO: 63927 - protein, 37 aa, Homo sapiens
RCLQDPTYSMSFQRNVRSLGADCQGKGWKEVFLAQPV

SEQ ID NO: 63928 - protein, 257 aa, Homo sapiens
KKKMAISGVPVLGFFIIAVLMSAQESWAIKEEHVIIQAEFYLNPDQSGEFMFDFDGDEIFHVDMAKKETVWRLEEFGRFASFEAQGALANIAVDKANLEIMTKRSNYTPITNVPPEVTVLTNSPVELREPNVLICFIDKFTPPVVNVTWLRNGKPVTTGVSETVFLPREDHLFRKFHYLPFLPSTEDVYDCRVEHWGLDEPLLKHWEFDAPSPLPETTENVVCALGLTVGLVGIIIGTIFIIKGLRKSNAAERRGPL

SEQ ID NO: 63929 - protein, 42 aa, Homo sapiens
IGSLLVLTMLTCLIIIMQNRLSVPRPFSRLQLQEDDDDPLIG

SEQ ID NO: 63930 - protein, 16 aa, Homo sapiens
MKTRKQIRLCIIGWFL

SEQ ID NO: 63931 - protein, 139 aa, Homo sapiens
VRSFSLLLLFSDSMPEPAKSAPAPKKGSKKAVTKAQKKDGKKRKRSRKESYSVYVYKVLKQVHPDTGISSKAMGIMNSFVNDIFERIAGEASRLAHYNKRSTITSREIQTAVRLLLPGELAKHAVSEGTKAVTKYTSSK

SEQ ID NO: 63932 - protein, 178 aa, Homo sapiens
VNPSLVSWLTTMMGLRLQVVLEHMPVGPDAILRYVRRVGDPPQPLPEEPMEVQGAERASPEPQRENASPAPGTTAEEAMSRGPPPAPEGGSRDEQDGASAETEPWAAAVPPEWVPIIQQDIQSQRKVKPQPPLSDAYLSGMPAKRRKLRSDIQKRLQEDPNYSPQRFPNAQRAFADDP

SEQ ID NO: 63933 - protein, 22 aa, Homo sapiens
VTLMVLSFPLALAGDTAFLGAD

SEQ ID NO: 63934 - protein, 49 aa, Homo sapiens
IAVSVFILFLPVVFYLSSFLHSEQKKRKLILPKRLKSSTSFANIQENSN

SEQ ID NO: 63935 - protein, 190 aa, Homo sapiens
LLWAATCLGVLCVLSADKNTTQHPNVTTLAPISNVTSAPVTSLPLVTTPAPETCEGRNSCVSCFNVSVVNTTCFWIECKDESYCSHNSTVSDCQVGNTTDFCSVSTATPVPTANSTAKPTVQPSPSTTSKTVTTSGTTNNTVTPTSQPVRKSTFDAASFIGGIVLVLGVQAVIFFLYKFCKSKERNYHTL

SEQ ID NO: 63936 - protein, 34 aa, Homo sapiens
IVTYVLNFLLLIINYKRLVYLNEAWKRQLQPKQD

SEQ ID NO: 63937 - protein, 19 aa, Homo sapiens
LGPTCCLTIPEPRWEPWLR

SEQ ID NO: 63938 - protein, 46 aa, Homo sapiens
LLVFRRTLSNLLYMPLLRGLLWLQVLCAGPLHTEAVVLLKQKVWCK

SEQ ID NO: 63939 - protein, 34 aa, Homo sapiens
MQNFFNLRLNTFLFCFILNDEPSCPPFPLFCPPT

SEQ ID NO: 63940 - protein, 654 aa, Homo sapiens
RPRSAPATMRPRKAFLLLLLLGLVQLLAVAGAEGPDEDSSNRENAIEDEEEEEEEDDDEEEDDLEVKEENGVLVLNDANFDNFVADKDTVLLEFYAPWCGHCKQFAPEYEKIANILKDKDPPIPVAKIDATSASVLASRFDVSGYPTIKILKKGQAVDYEGSRTQEEIVAKVREVSQPDWTPPPEVTLVLTKENFDEVVNDADIILVEFYAPWCGHCKKLAPEYEKAAKELSKRSPPIPLAKVDATAETDLAKRFDVSGYPTLKIFRKGRPYDYNGPREKYGIVDYMIEQSGPPSKEILTLKQVQEFLKDGDDVIIIGVFKGESDPAYQQYQDAANNLREDYKFHHTFSTEIAKFLKVSQGQLVVMQPEKFQSKYEPRSHMMDVQQGSTQDSAIKDFVLKYALPLVGHRKVSNDAKRYTRRPLVVVYYSVDFSFDYRAATQFWRSKVLEVAKDFPEYTFAIADEEDYAGEVKDLGLSESGEDVNAAILDESGKKFAMEPEEFDSDTLREFVTAFKKGKLKPVIKSQPVPKNNKGPVKVVVGKTFDSIVMDPKKDVLIEFYAPWCGHCKQLEPVYNSLAKKYKGQKGLVIAKMDATANDVPSDRYKVEGFPTIYFAPSGDKKNPVKFEGGDRDLEHLSKFIEEHATKLSRTKEEL

SEQ ID NO: 63941 - protein, 273 aa, Homo sapiens
VQLGRPQPLVTRVMLFLALGSPWAVELPLCGRRTALCAAAALRGPRASVSRASSSSGPSGPVAGWSTGPSGAARLLRRPGRAQIPVYWEGYVRFLNTPSDKSEDGRLIYTGNMARAVFGVKCFSYSTSLIGLTFLPYIFTQNNAISESVPLPIQIIFYGIMGSFTVITPVLLHFITKGYVIRLYHEATTDTYKAITYNAMLAETSTVFHQNDVKIPDAKHVFTTFYAKTKSLLVNPVLFPNREDYIHLMGYDKEEFILYMEETSEEKRHKDDK

SEQ ID NO: 63942 - protein, 99 aa, Homo sapiens
ITDKADIFAFGLTLWEMMTLSIPHINLSNDDDDEDKTFDESDFDDEAYYAALGTRPPINMEELDESYQKVIELFSVCTNEDPKDRPSAAHIVEALETDV

SEQ ID NO: 63943 - protein, 34 aa, Homo sapiens
ICVFIGFGWWFFLGPKFKKLQDEGSSSWKCKRSN

SEQ ID NO: 63944 - protein, 32 aa, Homo sapiens
LLIFVIALLSLGIAYYVSGVLPFVENQPELVH

SEQ ID NO: 63945 - protein, 140 aa, Homo sapiens
VNAGGWMGAMCLLHASLSEYVLLFGTALGSRGHSGRYWAEISDTIISGTFHQWREGTTKSEVFYPGETVVHGPGEATAVEWGPNTWMVEYGRGVIPSTLAFALADTVFSTQDFLTLFYTLRSYARGLRLELTTYLFGQDP

SEQ ID NO: 63946 - protein, 23 aa, Homo sapiens
IWAMDGGDLMSFFLLASLTDLLP

SEQ ID NO: 63947 - protein, 15 aa, Homo sapiens
VSAGSSLLACSLLLA

SEQ ID NO: 63948 - protein, 161 aa, Homo sapiens
KLVMMQKLLKCSRLVLALALILVLESSVQGYPTRRARYQWVRCNPDSNSANCLEEKGPMFELLPGESNKIPRLRTDLFPKTRIQDLNRIFPLSEDYSGSGFGSGSGSGSGSGSGFLTEMEQDYQLVDESDAFHDNLRSLDRNLPSDSQDLGQHGLEEDFML

SEQ ID NO: 63949 - protein, 156 aa, Homo sapiens
MKSVTEQGAELSNEERNLLSVAYKNVVGARRSSWRVISSIEQKTEGVEKKQQMAREYREKIEMELRDISNDVLSLLEKFLISNASQAESKVFYLKMKGDYYRYLAEVAAGDGKKGIVGQSQQAYQEAFEISKKEMQPTHTVRLGLALNFSCSIMRF

SEQ ID NO: 63950 - protein, 53 aa, Homo sapiens
LLIFFSWCVWWLFLSVEGKRRYHPRLSPTPLQNGFSDTPGSEGVGSPGCARSK

SEQ ID NO: 63951 - protein, 15 aa, Homo sapiens
ILLIIIPVLVVQAQR

SEQ ID NO: 63952 - protein, 16 aa, Homo sapiens
IPPGNADSLLGALMLL

SEQ ID NO: 63953 - protein, 11 aa, Homo sapiens
LFKWLQLTMFA

SEQ ID NO: 63954 - protein, 33 aa, Homo sapiens
KKFRSLFFGSILAPVRSPQGPSPVLAEDSEGEG

SEQ ID NO: 63955 - protein, 19 aa, Homo sapiens
VGLIVAFFILSYFLSRART

SEQ ID NO: 63956 - protein, 147 aa, Homo sapiens
VVVSNRLVTSPCCIVTSTYGWTENMERIMKAQALRDNSTMGYMAAKKHLEINPDDSIIETLRQKAEADKNDKSVKDLLILLYETALLSSGFSLEDPQTHANRTYRMIKLGLGIDEDDPAADDTSAAVTEEMPPLEGDDDTSCMEEVD

SEQ ID NO: 63957 - protein, 1168 aa, Homo sapiens
LLGATCLFACVPLSSVALESRRAAPSLDMSYNYVVTAQKPTAVNGCVTGHFTSAEDLNLLIAKNTRLEIYVVTAEGLRPVKEVGMYGKIAVMELFRPKGESKDLLFILTAKYNACILEYKQSGESIDIITRAHGNVQDRIGRPSETGIIGIIDPECRMIGLRLYDGLFKVIPLDRDNKELKAFNIRLEELHVIDVKFLYGCQAPTICFVYQDPQGRHVKTYEVSLREKEFNKGPWKQENVEAEASMVIAVPEPFGGAIIIGQESITYHNGDKYLAIAPPIIKQSTIVCHNRVDPNGSRYLLGDMEGRLFMLLLEKEEQMDGTVTLKDLRVELLGETSIAECLTYLDNGVVFVGSRLGDSQLVKLNVDSNEQGSYVVAMETFTNLGPIVDMCVVDLERQGQGQLVTCSGAFKEGSLRIIRNGIGIHEHASIDLPGIKGLWPLRSDPNRETDDTLVLSFVGQTRVLMLNGEEVEETELMGFVDDQQTFFCGNVAHQQLIQITSASVRLVSQEPKALVSEWKEPQAKNISVASCNSSQVVVAVGRALYYLQIHPQELRQISHTEMEHEVACLDITPLGDSNGLSPLCAIGLWTDISARILKLPSFELLHKEMLGGEIIPRSILMTTFESSHYLLCALGDGALFYFGLNIETGLLSDRKKVTLGTQPTVLRTFRSLSTTNVFACSDRPTVIYSSNHKLVFSNVNLKEVNYMCPLNSDGYPDSLALANNSTLTIGTIDEIQKLHIRTVPLYESPRKICYQEVSQCFGVLSSRIEVQDTSGGTTALRPSASTQALSSSVSSSKLFSSSTAPHETSFGEEVEVHNLLIIDQHTFEVLHAHQFLQNEYALSLVSCKLGKDPNTYFIVGTAMVYPEEAEPKQGRIVVFQYSDGKLQTVAEKEVKGAVYSMVEFNGKLLASINSTVRLYEWTTEKELRTECNHYNNIMALYLKTKGDFILVGDLMRSVLLLAYKPMEGNFEEIARDFNPNWMSAVEILDDDNFLGAENAFNLFVCQKDSAATTDEERQHLQEVGLFHLGEFVNVFCHGSLVMQNLGETSTPTQGSVLFGTVNGMIGLVTSLSESWYNLLLDMQNRLNKVIKSVGKIEHSFWRSFHTERKTEPATGFIDGDLIESFLDISRPKMQEVVANLQYDDGSGMKREATADDLIKVVEELTRIH

SEQ ID NO: 63958 - protein, 456 aa, Homo sapiens
LLAALLLLLSGDGAVRCDTPANCTYLDLLGTWVFQVGSSGSQRDVNCSVMGPQEKKVVVYLQKLDTAYDDLGNSGHFTIIYNQGFEIVLNDYKWFAFFKYKEEGSKVTTYCNETMTGWVHDVLGRNWACFTGKKVGTASENVYVNIAHLKNSQEKYSNRLYKYDHNFVKAINAIQKSWTATTYMEYETLTLGDMIRRSGGHSRKIPRPKPAPLTAEIQQKILHLPTSWDWRNVHGINFVSPVRNQASCGSCYSFASMGMLEARIRILTNNSQTPILSPQEVVSCSQYAQGCEGGFPYLIAGKYAQDFGLVEEACFPYTGTDSPCKMKEDCFRYYSSEYHYVGGFYGGCNEALMKLELVHHGPMAVAFEVYDDFLHYKKGIYHHTGLRDPFNPFELTNHAVLLVGYGTDSASGMDYWIVKNSWGTGWGENGYFRIRRGTDECAIESIAVAATPIPKL

SEQ ID NO: 63959 - protein, 216 aa, Homo sapiens
LPHPALGTMGLGARGAWAALLLGTLQVLALLGAAHESAAMAASANIENSGLPHNSSANSTETLQHVPSDHTNETSNSTVKPPTSVASDSSNTTVTTMKPTAASNTTTPGMVSTNMTSTTLKSTPKTTSVSQNTSQISTSTMTVTHNSSVTSAASSVTITTTMHSEAKKGSKFDTGSFVGGIVLTLGVLSILYIGCKMYYSRRGIRYRTIDEHDAII

SEQ ID NO: 63960 - protein, 55 aa, Homo sapiens
MLCLLIILGRYFARHKGTYFTHEAKGADDAADADTAIINAEGGQNNSEEKKEYFI

SEQ ID NO: 63961 - protein, 37 aa, Homo sapiens
LFHIFVVAGAFVHFHGVSNLQEFRFMIGGGCSEEDAL

SEQ ID NO: 63962 - protein, 29 aa, Homo sapiens
ISFKWAFLLSLYAHRYRADFADISILSDF

SEQ ID NO: 63963 - protein, 14 aa, Homo sapiens
MIPEAQGVVLPRAP

SEQ ID NO: 63964 - protein, 296 aa, Homo sapiens
VVAAMLGAWAVEGTAVALLRLLLLLLPPAIRGPGLGVAGVAGAAGAGLPESVIWAVNAGGEAHVDVHGIHFRKDPLEGRVGRASDYGMKLPILRSNPEDQILYQTERYNEETFGYEVPIKEEGDYVLVLKFAEVYFAQSQQKVFDVRLNGHVVVKDLDIFDRVGHSTAHDEIIPMSIRKGKLSVQGEVSTFTGKLYIEFVKGYYDNPKVCALYIMAGTVDDVPKLQPHPGLEKKEEEEEEEEYDEGSNLKKQTNKNRVQSGPRTPNPYASDNSSLMFPILVAFGVFIPTLFCLCRL

SEQ ID NO: 63965 - protein, 212 aa, Homo sapiens
LVPRLPAPRPVMTLRPSLLPLHLLLLLLLSAAVCRAEAGLETESPVRTLQVETLVEPPEPCAEPAAFGDTLHIHYTGSLVDGRIIDTSLTRDPLVIELGQKQVIPGLEQSLLDMCVGEKRRAIIPSHLAYGKRGFPPSVPADAVVQYDVELIALIRANYWLKLVKGILPLVGMAMVPALLGLIGYHLYRKANRPKVSKKKLKEEKRNKSKKK

SEQ ID NO: 63966 - protein, 10 aa, Homo sapiens
LCFGIIFLIG

SEQ ID NO: 63967 - protein, 13 aa, Homo sapiens
LILLQVIINFMFK

SEQ ID NO: 63968 - protein, 185 aa, Homo sapiens
RGFIMGGFFSSIFSSLFGTREMRILILGLDGAGKTTILYRLQVGEVVTTIPTIGFNVETVTYKNLKFQVWDLGGQTSIRPYWRCYYSNTDAVIYVVDSCDRDRIGISKSELVAMLEEEELRKAILVVFANKQDMEQAMTSSEMANSLGLPALKDRKWQIFKTSATKGTGLDEAMEWLVETLKSRQ

SEQ ID NO: 63969 - protein, 51 aa, Homo sapiens
LIFFLGGVTFAEIAALRFLSQLEDGGTEYVIATTKLMNGTSWIEALMEKPF

SEQ ID NO: 63970 - protein, 47 aa, Homo sapiens
LRTLPLLASRLVMARFWVCVAGAGFFLAFLVLHSRFCGSPVSWVVRK

SEQ ID NO: 63971 - protein, 27 aa, Homo sapiens
ILLAVLCLGRALYWACMKVSHPVQNFS

SEQ ID NO: 63972 - protein, 75 aa, Homo sapiens
ILFSWGCPLLFVLCVEMANSANTNTVPKLYRSVIEDVINDVRDIFLDDGVDEQVLMELKTILNKTVAAQKMFILW

SEQ ID NO: 63973 - protein, 19 aa, Homo sapiens
MEFVLSWVFLVAILKRYPV

SEQ ID NO: 63974 - protein, 50 aa, Homo sapiens
ILFLVAAATGVHSQVQLVQSGPEVKKPGASLKVSCKASGYTFTSYAISWV

SEQ ID NO: 63975 - protein, 27 aa, Homo sapiens
MESGLSWVFLVAILKGVQCEVQLVESG

SEQ ID NO: 63976 - protein, 53 aa, Homo sapiens
MKHLWFFLLLVAAPRWVLSQVQLQESGPGLVKPSETLSLICAVSGDSISSGNW

SEQ ID NO: 63977 - protein, 45 aa, Homo sapiens
MDWTWSILFLVAAATGAHSRVQLVQSGPEVKQPGASAKVSCKVSG

SEQ ID NO: 63978 - protein, 68 aa, Homo sapiens
ILKGVQCEVQLVESGGGLVQPGGSLRLSCAASGFTFSDYYMSWVRQAPGKGLEWVGFIRNKANGGTTE

SEQ ID NO: 63979 - protein, 85 aa, Homo sapiens
MKNLWFFLPLVAAPRRVLSQVQLQEWGPGLVKPSETLSLTCAVSGDSISSGNWWSWVRQSPGKGLEWIGYIYYSGRSYYTPSLRS

SEQ ID NO: 63980 - protein, 24 aa, Homo sapiens
MDWTWRILFLVAAATGAHSQVQLV

SEQ ID NO: 63981 - protein, 47 aa, Homo sapiens
ILLGLLLLYDVFFVFITPFITKNGESIMVELAAGPFGNNEKVGMAMK

SEQ ID NO: 63982 - protein, 331 aa, Homo sapiens
LPLLCAGAWLLGVPVCGAAELCVNSLEKFHFKSWMSKHRKTYSTEEYHHRLQTFASNWRKINAHNNGNHTFKMALNQFSDMSFAEIKHKYLWSEPQNCSATKSNYLRGTGPYPPSVDWRKKGNFVSPVKNQGACGSCWTFSTTGALESAIAIATGKMLSLAEQQLVDCAQDFNNHGCQGGLPSQAFEYILYNKGIMGEDTYPYQGKDGYCKFQPGKAIGFVKDVANITIYDEEAMVEAVALYNPVSFAFEVTQDFMMYRTGIYSSTSCHKTPDKVNHAVLAVGYGEKNGIPYWIVKNSWGPQWGMNGYFLIERGKNMCGLAACASYPIPLV

SEQ ID NO: 63983 - protein, 46 aa, Homo sapiens [sequence omitted]

SEQ ID NO: 63984 - protein, 1231 aa, Homo sapiens
VGLAGGGRAMLVGQGAGLLGPAVVTAAVVLLLSGVGPAHGSEDIVVGCGGFVKSDVEINYSLIEIKLYTKHGTLKYQTDCAPNNGYFMIPLYDKGDFILKIEPPLGWSFEPTTVELHVDGVSDICTKGGDINFVFTGFSVNGKVLSKGQPLGPAGVQVSLRNTGTEAKIQSTVTQPGGKFAFFKVLPGDYEILATHPTWALKEASTTVRVTNSNANAASPLIVAGYNVSGSVRSDGEPMKGVKFLLFSSLVTKEDVLGCNVSPVPGFQPQDESLVYLCYTVSREDGSFSFYSLPSGGYTVIPFYRGERITFDVAPSRLDFTVEHDSLKIEPVFHVMGFSVTGRVLNGPEGDGVPEAVVTLNNQIKVKTKADGSFRLENITTGTYTIHAQKEHLYFETVTIKIAPNTPQLADIVATGFSVCGRISIIRFPDTVKQMNKYKVVLSSQDKDKSLVTVETDAHGSFCFKAKPGTYKVQVMVPEAETRAGLTLKPQTFPLTVTDRPVMDVAFVQFLASVSGKVSCLDTCGDLLVTLQSLSRQGEKRSLQLSGKVNAMTFTFDNVLPGKYKISIMHEDWCWKNKSLEVEVLEDDVSAVEFRQTGYMLRCSLSHAITLEFYQDGNGRENVGIYNLSKGVNRFCLSKPGVYKVTPRSCHRFEQAFYTYDTSSPSILTLTAIRHHVLGTITTDKMMDVTVTIKSSIDSEPALVLGPLKSVQELRREQQLAEIEARRQEREKNGNEEGEERMTKPPVQEMVDELQGPFSYDFSYWARSGEKITVTPSSKELLFYPPSMEAVVSGESCPGKLIEIHGKAGLFLEGQIHPELEGVEIVISEKGASSPLITVFTDDKGAYSVGPLHSDLEYTVTSQKEGYVLTAVEGTIGDFKAYALAGVSFEIKAEDDQPLPGVLLSLSGGLFRSNLLTQDNGILTFSNLSPGQYYFKPMMKEFRFEPSSQMIEVQEGQNLKITITGYRTAYSCYGTVSSLNGEPEQGVAMEAVGQNDCSIYGEDTVTDEEGKFRLRGLLPGCVYHVQLKAEGNDHIERALPHHRVIEVGNNDIDDVNIIVFRQINQFDLSGNVITSSEYLPTLWVKLYKSENLDNPIQTVSLGQSLFFHFPPLLRDGENYVVLLDSTLPRSQYDYILPQVSFTAVGYHKHITLIFNPTRKLPEQDIAQGSYIALPLTLLVLLAGYNHDKLIPLLLQLTSRLQGVGALGQAASDNSGPEDAKRQAKKQKTRRT

SEQ ID NO: 63985 - protein, 1231 aa, Homo sapiens; identical to SEQ ID NO: 63984

SEQ ID NO: 63986 - protein, 57 aa, Homo sapiens
MEFGLSWVFLAAILKGVQCEVQLVESGGGLVQPGGSLRHSCAASGFTFSNSDMNWVL

SEQ ID NO: 63987 - protein, 289 aa, Homo sapiens
VFAVVSAMLPLLRCVPRVLGSSVAGLRAAAPASPFRQLLQPAPRLCTRPFGLLSVRAGSERRPGLLRPRGPCACGCGCGSLHTDGDKAFVDFLSDEIKEERKIQKHKTLPKMSGGWELELNGTEAKLVRKVAGEKITVTFNINNSIPPTFDGEEEPSQGQKVEEQEPELTSTPNFVVEVIKNDDGKKALVLDCHYPEDEVGQEDEAESDIFSIREVSFQSTGESEWKDTNYTLNTDSLDWALYDHLMDFLADRGVDNTFADELVELSTALEHQEYITFLEDLKSFVKSQ

SEQ ID NO: 63988 - protein, 40 aa, Homo sapiens
LGLWSQTAGIRMASVRIREAKEGDCGDILRLIRVKTAGRS

SEQ ID NO: 63989 - protein, 12 aa, Homo sapiens
KSVKFLFGGLAG

SEQ ID NO: 63990 - protein, 93 aa, Homo sapiens
ITTALVCLLLAGMWPEDVDSKSMQVPFSRCCFSFAEQEIPLRAILCYRNTSSICSNEGLIFKLKRGKEACALDTVGWVQRHRKMLRHCPSKRK

SEQ ID NO: 63991 - protein, 96 aa, Homo sapiens
LLRIMQVSTAALAVLLCTMALCNQFSASLAADTPTACCFSYTSRQIPQNFIADYFETSSQCSKPGVIFLTKRSRQVCADPSEEWVQKYVSDLELSA

SEQ ID NO: 63992 - protein, 16 aa, Homo sapiens
MHQLLGLNLLFLLSQD

SEQ ID NO: 63993 - protein, 20 aa, Homo sapiens
LALFCVAVSVVWGVFRNEDQ

SEQ ID NO: 63994 - protein, 233 aa, Homo sapiens
LAAAMTPQLLLALVLWASCPPCSGRKGPPAALTLPRVQCRASRYPIAVDCSWTLPPAPNSTSPVSFIATYRLGMAARGHSWPCLQQTPTSTSCTITDVQLFSMAPYVLNVTAVHPWGSSSSFVPFITEHIIKPDPPEGVRLSPLAERQLQVQWEPPGSWPFPEIFSLKYWIRYKRQGAARFHRVGPIEATSFILRAVRPRARYYVQVAAQDLTDYGELSDWSLPATATMSLGK

SEQ ID NO: 63995 - protein, 388 aa, Homo sapiens
KVVVCDNDTGFVKCGYAGSNFPEHIFPALVGRSIIRSTTKVGNIEIKDLMVGDEASELRSMLEVNYPMENGIVRNWDDTKHLWDYTFGPEKPNIDTRNCKILLTEPLMNPTKNREKMVEVMFETYQFSGVYVAIQAVLTLYARGLLTAVVVDSGDGVTHIYPVLEGFSLPHLTRRLDIAGRDITRYLIKLLLLQGYTFNHSADFETVRMIKEKLCYVGYNIVQEQKLALETTVLVESYTLPDGGIIKVGGERFETPEALFQPHLINVEGVGVAELLFNTIQAADIDTRSEFYKHIVLSGGSTMYPGLSSRLKRELKQLYLERVLKDDAEKLPKFKICIEDPSRRKHMVFLGGAVLADIMKDKDNFWMTRQEYQEKGVLVLEKLGVTVR

SEQ ID NO: 63996 - protein, 245 aa, Homo sapiens
RRSRAFLALLGSLLLSGVLAADRERSIHDFCLVSKVVGRCRASMPRWWYNVTDGSCQLFVYGGCDGNSNNYLTKEECLKKCATVTENATGDLATSRNAADSSVPSAPRRQDSEDHSSDMFNYEEYCTANAVTGPCRASFPRWYFDVERNSCNNFIYGGCRGNKNSYRSEEACMLRCFRQQENPPLPLGSKVVVLAGLFVMVLILFLGASMVYLIRVARRNQERALRTVWSSGDDKEQLVKNTYVL

SEQ ID NO: 63997 - protein, 449 aa, Homo sapiens [sequence omitted]

SEQ ID NO: 63998 - protein, 16 aa, Homo sapiens
LVLGYTVLAGMVFLKW

SEQ ID NO: 63999 - protein, 12 aa, Homo sapiens
VLLLVLILLFSL

SEQ ID NO: 64000 - protein, 285 aa, Homo sapiens
VTGLAVGAAVAMLSVASRSGPFAPVLSATSRGVAGALRPLVQATVPATPEQPVLDLKRPFLSRESLSGQAVRRPLVASVGLNVPASVCYSHTDIKVPDFSEYRRLEVLDSTKSSRESSEARKGFSYLVTGVTTVGVAYAAKNAVTQFVSSMSASADVLALAKIEIKLSDIPEGKNMAFKWRGKPLFVRHRTQKEIEQEAAVELSQLRDPQHDLDRVKKPEWVILIGVCTHLGCVPIANAGDFGGYYCPCHGSHYDASGRIRLGPAPLNLEVPTYEFTSDDMVIVG

SEQ ID NO: 64001 - protein, 160 aa, Homo sapiens
LCTGVMGVCCTALLVAVVARKLEFNKAEKHVHNFMMDIQYTKEMKESAARVLQEAWMFYKHTRRKESHAARRHQRKLLAAINAFRQVRLKHRKLREQVNSMVDISKMHMILYDLQQNLSSSHRALEKQIDTLAGKLDALTELLSTALGPRQLPEPSQQSK

SEQ ID NO: 64002 - protein, 40 aa, Homo sapiens
IHFLALAALGLGLALGGGSPSRRKAASQPTSLAPEKLREE

SEQ ID NO: 64003 - protein, 470 aa, Homo sapiens
LLLLLLLLLVSWASRGEAAPDQDEIQRLPGLAKQPSFRQYSGYLKGSGSKHLHYWFVESQKDPENSPVVLWLNGGPGCSSLDGLLTEHGPFLVQPDGVTLEYNPYSWNLIANVLYLESPAGVGFSYSDDKFYATNDTEVAQSNFEALQDFFRLFPEYKNNKLFLTGESYAGIYIPTLAVLVMQDPSMNLQGLAVGNGLSSYEQNDNSLVYFAYYHGLLGNRLWSSLQTHCCSQNKCNFYDNKDLECVTNLQEVARIVGNSGLNIYNLYAPCAGGVPSHFRYEKDTVVVQDLGNIFTRLPLKRMWHQALLRSGDKVRMDPPCTNTTAASTYLNNPYVRKALNIPEQLPQWDMCNFLVNLQYRRLYRSMNSQYLKLLSSQKYQILLYNGDVDMACNFMGDEWFVDSLNQKMEVQRRPWLVKYGDSGEQIAGFVKEFSHIAFLTIKGAGHMVPTDKPLAAFTMFSRFLNKQPY

SEQ ID NO: 64004 - protein, 83 aa, Homo sapiens
IVEAEAMNYEGSPIKVTLATLKMSVQPMISLRGFEIIPPVVLQLKCGSGPVHISGQHLVAVEEDAESEDEEEEDVKFLSISGR

SEQ ID NO: 64005 - protein, 13 aa, Homo sapiens
LLMLIVIGVFASN

SEQ ID NO: 64006 - protein, 57 aa, Homo sapiens
KLITWSPVCRNDVAWNFFEKFLVGPDGVPVCRYSCRFQTIDIEPDIEALLSQGPRCA

SEQ ID NO: 64007 - protein, 176 aa, Homo sapiens
VARGPTPYWRLRLGGAALLLLLIPVAAAQEPPGAACSQNTNKTCEECLKNVSCLWCNTNKACLDYPVTSVLPPASLCKLSSARWGVCWVNFEALIITMSVVGGTLLLGIAICCCCCCRRKRSRKPDRSEEKAMREREERRIRQEERRAEMKTRHDEIRKKYGLFKEENPYARFENN

SEQ ID NO: 64008 - protein, 57 aa, Homo sapiens
VLIGILLLVIWKALIHLSDLREYRRFEKEKLKSQWNNDNPLFKSATTTVMNPKFAES

SEQ ID NO: 64009 - protein, 18 aa, Homo sapiens
LCLCAGLLVLLPSCRCSS

SEQ ID NO: 64010 - protein, 9 aa, Homo sapiens
VIMFWLLIA

SEQ ID NO: 64011 - protein, 35 aa, Homo sapiens
LGYSLYWMGRRTASLVLSLPAAQYCLQRVTEARHK

SEQ ID NO: 64012 - protein, 249 aa, Homo sapiens
ISLTSPFKPKLEPTVHRPSIALAMALSDADVQKQIKHMMAFIEQEANEKAEEIDAKAEEEFNIEKGRLVQTQRLKIMEYYEKKEKQIEQQKKIQMSNLMNQARLKVLRARDDLITDLLNEAKQRLSKVVKDTTRYQVLLDGLVLQGLYQLLEPRMIVRCRKQDFPLVKAAVQKAIPMYKIATKNDVDVQIDQESYLPEDIAGGVEIYNGDRKIKVSNTLESRLDLIAQQMMPEVRGALFGANANRKFLD

SEQ ID NO: 64013 - protein, 40 aa, Homo sapiens
VASSYLSLTPEQWRSRRSYSCQVMQEGSTVEKSVAPAECS

SEQ ID NO: 64014 - protein, 132 aa, Homo sapiens
KKSLLMSILALIFIMGNSAKEALVWKVLGKLGMQPGRQHSIFGDPKKIVTEEFVRRGYLIYKPVPRSSPVEYEFFWGPRAHVESSKLKVMHFVARVRNRCSKDWPCNYDWDSDDDAEVEAILNSGARGYSAP

SEQ ID NO: 64015 - protein, 16 aa, Homo sapiens
VISSGFVGGFLLGLAS

SEQ ID NO: 64016 - protein, 1907 aa, Homo sapiens
MRITLRNLEEVEFCVEDKPGTHFTPVPPTPPDACRGMLCGFGAVCEPNAEGPGRASCVCKKSPCPSVVAPVCGSDASTYSNECELQRAQCSQQRRIRLLSRGPCGSRDPCSNVTCSFGSTCARSADGLTASCLCPATCRGAPEGTVCGSDGADYPGECQLLRRACARQENVFKKFDGPCDPCQGALPDPSRSCRVNPRTRRPEMLLRPESCPARQAPVCGDDGVTYENDCVMGRSGAARGLLLQKVRSGQCQGRDQCPEPCRFNAVCLSRRGRPRCSCDRVTCDGAYRPVCAQDGRTYDSDCWRQQAECRQQRAIPSKHQGPCDQAPSPCLGVQCAFGATCAVKNGQAACECLQACSSLYDPVCGSDGVTYGSACELEATACTLGREIQVARKGPCDRCGQCRFGALCEAETGRCVCPSECVALAQPVCGSDGHTYPSECMLHVHACTHQISLHVASAGPCETCGDAVCAFGAVCSAGQCVCPRCEHPPPGPVCGSDGVTYGSACELREAACLQQTQIEEARAGPCEQAECGSGGSGSGEDGDCEQELCRQRGGIWDEDSEDGPCVCDFSCQSVPGSPVCGSDGVTYSTECELKKARCESQRGLYVAAQGACRGPTFAPLPPVAPLHCAQTPYGCCQDNITAARGVGLAGCPSACQCNPHGSYGGTCDPATGQCSCRPGVGGLRCDRCEPGFWNFRGIVTDGRSGCTPCSCDPQGAVRDDCEQMTGLCSCKPGVAGPKCGQCPDGRALGPAGCEADASAPATCAEMRCEFGARCVEESGSAHCVCPMLTCPEANATKVCGSDGVTYGNECQLKTIACRQGLQISIQSLGPCQEAVAPSTHPTSASVTVTTPGLLLSQALPAPPGALPLAPSSTAHSQTTPPPSSRPRTTASVPRTTVWPVLTVPPTAPSPAPSLVASAFGESGSTDGSSDEELSGDQEASGGGSGGLEPLEGSSVATPGPPVERASCYNSALGCCSDGKTPSLDAEGSNCPATKVFQGVLELEGVEGQELFYTPEMADPKSELFGETARSIESTLDDLFRNSDVKKDFRSVRLRDLGPGKSVRAIVDVHFDPTTAFRAPDVARALLRQIQVSRRRSLGVRRPLQEHVRFMDFDWFPAFITGATSGAIAAGATARATTASRLPSSAVTPRAPHPSHTSQPVAKTTAAPTTRRPPTTAPSRVPGRRPPAPQQPPKPCDSQPCFHGGTCQDWALGGGFTCSCPAGRGGAVCEKVLGAPVPAFEGRSFLAFPTLRAYHTLRLALEFRALEPQGLLLYNGNARGKDFLALALLDGRVQLRFDTGSGPAVLTSAVPVEPGQWHRLELSRHWRRGTLSVDGETPVLGESPSGTDGLNLDTDLFVGGVPEDQAAVALERTFVGAGLRGCIRLLDVNNQRLELGIGPGAATRGSGVGECGDHPCLPNPCHGGAPCQNLEAGRFHCQCPPGRVGPTCADEKSPCQPNPCHGAAPCRVLPEGGAQCECPLGREGTFCQTASGQDGSGPFLADFNGFSHLELRGLHTFARDLGEKMALEVVFLARGPSGLLLYNGQKTDGKGDFVSLALRDRRLEFRYDLGKGAAVIRSREPVTLGAWTRVSLERNGRKGALRVGDGPRVLGESPVPHTVLNLKEPLYVGGAPDFSKLARAAAVSSGFDGAIQLVSLGGRQLLTPEHVLRQVDVTSFAGHPCTRASGHPCLNGASCVPREAAYVCLCPGGFSGPHCEKGLVEKSAGDVDTLAFDGRTFVEYLNAVTESEKALQSNHFELSLRTEATQGLVLWSGKATERADYVALAIVDGHLQLSYNLGSQPVVLRSTVPVNTNRWLRVVAHREQREGSLQVGNEAPVTGSSPLGATQLDTDGALWLGGLPELPVGPALPKAYGTGFVGCLRDVVVGRHPLHLLEDAVTKPELRPCPTP

SEQ ID NO: 64017 - protein, 179 aa, Homo sapiens [sequence omitted]

SEQ ID NO: 64018 - protein, 111 aa, Homo sapiens [sequence omitted]

SEQ ID NO: 64019 - protein, 498 aa, Homo sapiens
MGSLAAALWAVVHPRTLLLGTVAFLLAADFLKRRRPKNYPPGPWRLPFLGNFFLVDFEQSHLEVQLFVKKYGNLFSLELGDISAVLITGLPLIKEALIHMDQNFGNRPVTPMREHIFKKNGLIMSSGQAWKEQRRFTLTALRNFGLGKKSLEERIQEEAQHLTEAIKEENGQPFDPHFKINNAVSNIICSITFGERFEYQDSWFQQLLKLLDEVTYLEASKTCQLYNVFPWIMKFLPGPHQTLFSNWKKLKLFVSHMIDKHRKDWNPAETRDFIDAYLKEMSKHTGNPTSSFHEENLICSTLDLFFAGTETTSTTLRWALLYMALYPEIQEKVQAEIDRVIGQGQQPSTAARESMPYTNAVIHEVQRMGNIIPLNVPREVTVDTTLAGYHLPKGTMILTNLTALHRDPTEWATPDTFNPDHFLENGQFKKREAFMPFSIGKRACLGEQLARTELFIFFTSLMQKFTFRPPNNEKLSLKFRMGITISPVSHRLCAVPQV

SEQ ID NO: 64020 - protein, 869 aa, Homo sapiens
MLLLLLLLLVPLSQVRTMAPKQKKKTSRGKKRLKPVLAASEDMEPVNMESMGHPEIYPLVLTTKTQEIFNCRIDEDVTDEQPYKLINKEDIFEDLRNRAAVSDFHPVKKIVQEYPGNELLLVYDKDFKYGLNFYLIATEEGKENYLNPPEVPEEQEEYKEHIPEDVYIYKPPVSKPWVSLGSEKEIEEESVTESTKQITYMISRKRSEFGAPIKFSDQNASSVKDAYIECTAYPDKNFTLKQLEKDVGMQVIPQIKDISTQTKCVEIALQQNEIMNTFIDDWKYLAEEEGTFGDKTDTHLKEYQSFTDLHSPTEKMITCVSWHPTIYGLIAVSVAVRLSFEDRVHFSGKLLLQPSLILFWSFSDPIHPQLMLESPDDIFCFKFCPSDPNIIAGGCINGQIVMWDITAHADRIENIKAGGSRSKRATLKPMFLLEPESNKEAMYIRHCAVSSIENGHKKVITDIHWLSDTFEINRMGSVFENRSGICCQLVTCSADCTICFWDIRPQKPLTPQTTEKKKEESIEIPFDVPSTFLHLDLSWKPLTKVRLSKGETSLDHCPTKISLNEDHLLCKTQDKMLAQSKTEKAEEMNPYHNLESGMANLLKPIDDFCTKFFVGTEEGEVIYTDWKMEKDPETGRLMSKKPVSHHTIHDGTVHTIQRSPFYNDIILTVGGWNVAIWKEGVMTGPLLQSCCAPKRYTSGHWSLTRPGVFYIGREDGYIDIWDLLEKTHEPAQSQNICITMITYIKPWIFSSKQQFIATADYYGTLHILEIPWTLSRPSTNEMASVNHYFEREVKHLEYVEQRKKIREQEKKEMELEMAKKKVKTYQKSKEQMQAELKMDYESYLELEKTVLINLGLIKVTEKGSYMEVM

SEQ ID NO: 64021 - protein, 91 aa, Homo sapiens
MSAGNGTPWDATWNITVQWLAVDIACRTLMFLKLMATYSAAFLPVVIGLDRQAAVLNPLGSRSGVRKLLGAAWGLSFLLAFPQGSRTRNTI

SEQ ID NO: 64022 - protein, 148 aa, Homo sapiens [sequence omitted]

SEQ ID NO: 64023 - protein, 23 aa, Homo sapiens
MFILISLLVQCQLFKVVMPDNVF

SEQ ID NO: 64024 - protein, 129 aa, Homo sapiens
MDFWLWPLYFLPVSGALRILPEVKVEGELGGSVTIKCPLPEMHVRIYLCREMAGSGTCGTVVSTTNFIKAEYKGRVTLKQYPRKNLFLVEVTQLTESDSGVYACGAGMNTDRGKTQKVTLNVHSGRFLR

SEQ ID NO: 64025 - protein, 45 aa, Homo sapiens
MAASRRFTGVPDRRGGGAQARMKLELARSRKTIAGGTASVGAEET

SEQ ID NO: 64026 - protein, 27 aa, Homo sapiens
MLPLLVWFLASPCVSRASQTIHLWVPS

SEQ ID NO: 64027 - protein, 129 aa, Homo sapiens [sequence omitted]

SEQ ID NO: 64028 - protein, 158 aa, Homo sapiens [sequence omitted]

SEQ ID NO: 64029 - protein, 344 aa, Homo sapiens
MFCPLKLILLPVLLDYSLGLNDLNVSPPELTVHVGDSALMGCVFQSTEDKCIFKIDWTLSPGEHAKDEYVLYYYSNLSVPIGRFQNRVHLMGDILCNDGSLLLQDVQEADQGTYICEIRLKGESQVFKKAVVLHVLPEEPKELMVHVGGLIQMGCVFQSTEVKHVTKVEWIFSGRRAKEEIVFRYYHKLRMSVEYSQSWGHFQNRVNLVGDIFRNDGSIMLQGVRESDGGNYTCSIHLGNLVFKKTIVLHVSPEEPRTLVTPAALRPLVLGGNQLVIIVGIVCATILLLPVLILIVKKTCGNKSSVNSTVLVKNTKKTNPEIKEKPCHFERCEGEVNTRFSLKH

SEQ ID NO: 64030 - protein, 259 aa, Homo sapiens
MFCPLKLILLPVLLDYSLGLNDLNVSPPELTVHVGDSALMGCVFQSTEDKCIFKIDWTLSPGEHAKDEYVLYYYSNLSVPIGRFQNRVHLMGDILCNDGSLLLQDVQEADQGTYICEIRLKGESQVFKKAVVLHVLPEEPKELMVHVGGLIQMGCVFQSTEVKHVTKVEWIFSGRRAKEEIVFRYYHKLRMSVEYSQSWGHFQNRVNLVGDIFRNDGSIMLQGVRESDGGNYTCSIHLGNLVFKKTIVLHVSPEEPRSI

SEQ ID NO: 64031 - protein, 121 aa, Homo sapiens [sequence omitted]

SEQ ID NO: 64032 - protein, 981 aa, Homo sapiens
MWQSRGPMLFHLGLCVGAAGMIREWFVPIRREKGRSRLICPGGTMADKVRRQRPRRRVCWALVAVLLADLLALSDTLAVMSVDLGSESMKVAIVKPGVPMEIVLNKESRRKTPVIVTLKENERFFGDSAASMAIKNPKATLRYFQHLLGKQADNPHVALYQARFPEHELTFDPQRQTVHFQISSQLQFSPEEVLGMVLNYSRSLAEDFAEQPIKDAVITVPVFFNQAERRAVLQAARMAGLKVLQLINDNTATALSYGVFRRKDINTTAQNIMFYDMGSGSTVCTIVTYQMVKTKEAGMQPQLQIRGVGFDRTLGGLEMELRLRERLAGLFNEQRKGQRAKDVRENPRAMAKLLREANRLKTVLSANADHMAQIEGLMDDVDFKAKVTRVEFEELCADLFERVPGPVQQALQSAEMSLDEIEQVILVGGATRVPRVQEVLLKAVGKEELGKNINADEAAAMGAVYQAAALSKAFKVKPFVVRDAVVYPILVEFTREVEEEPGIHSLKHNKRVLFSRMGPYPQRKVITFNRYSHDFNFHINYGDLGFLGPEDLRVFGSQNLTTVKLKGVGDSFKKYPDYESKGIKAHFNLDESGVLSLDRVESVFETLVEDSAEEESTLTKLGNTISSLFGGGTTPDAKENGTDTVQKPSEKAEAGPEGVAPAPEGEKKQKPARKRRMVEEIGVELVVLDLPDLPEDKLAQSVQKLQDLTLRDLEKQEREKAANSLEAFIFETQDKLYQPEYQEVSTEEQREEISGKLSAASTWLEDEGVGATTVMLKEKLAELRKLCQGLFFRVEERKKWPERLSALDNLLNHSSMFLKGARLIPEMDQIFTEVEMTTLEKVINETWAWKNATLAEQAKLPATEKPVLLSKDIEAKMMALDREVQYLLNKAKFTKPRPRPKDKNGTRAEPPLNASASDQGEKVIPPAGQTEDAEPISEPEKVETGSEPGDTEPLELGGPGAEPEQKEQSTGQKRPLKNDEL

SEQ ID NO: 64033 - protein, 583 aa, Homo sapiens
MPMCAPTQDLSRSLPSCLYSCTDWPHRLVPCRVGDQVTHIRIQNSGDFYDLYGGEKFATLTELVEYYTQQQGVLQDRDGTIIHLKYPLNCSDPTSERWYHGHMSGGQAETLLQAKGEPWTFLVRESLSQPGDFVLSVLSDQPKAGPGSPLRVTHIKVMCEGGRYTVGGLETFDSLTDLVEHFKKTGIEEASGAFVYLRQPYYATRVNAADIENRVLELNKKQESEDTAKAGFWEEFESLQKQEVKNLHQRLEGQRPENKGKNRYKNILPFDHSRVILQGRDSNIPGSDYINANYIKNQLLGPDENAKTYIASQGCLEATVNDFWQMAWQENSRVIVMTTREVEKGRNKCVPYWPEVGMQRAYGPYSVTNCGEHDTTEYKLRTLQVSPLDNGDLIREIWHYQYLSWPDHGVPSEPGGVLSFLDQINQRQESLPHAGPIIVHCSAGIGRTGTIIVIDMLMENISTKGLDCDIDIQKTIQMVRAQRSGMVQTEAQYKFIYVAIAQFIETTKKKLEVLQSQKGQESEYGNITYPPAMKNAHAKASRTSSKHKEDVYENLHTKNKREEKVKKQRSADKEKSKGSLKRK

SEQ ID NO: 64034 - protein, 97 aa, Homo sapiens [sequence omitted]

SEQ ID NO: 64035 - protein, 152 aa, Homo sapiens [sequence omitted]

SEQ ID NO: 64036 - protein, 112 aa, Homo sapiens [sequence omitted]

SEQ ID NO: 64037 - protein, 33 aa, Homo sapiens
MAESAGASSFFPLVVLLLAGSGGSGPRGVQGCA

SEQ ID NO: 64038 - protein, 167 aa, Homo sapiens [sequence omitted]

SEQ ID NO: 64039 - protein, 383 aa, Homo sapiens
MNQLSIAWASVLWFNLLSPNLQAPWSLLGPALSWQFSSYVGRGLNSDQLSMLRNKLFGQNCRTEDPLLSWADFTKRESPPGKLPFWTWLDKILELVHDHLKDLWNDGRIMGFVSRSQERRLLKKTMSGTFLLRFSESSEGGITCSWVEHQDDDKVLIYSVQPYTKEVLQSLPLTEIIRHYQLLTEENIPENPLRFLYPRIPRDEAFGCYYQEKVNLQERRKYLKHRLIVVSNRQVDELQQPLELKPEPELESLELELGLVPEPELSLDLEPLLKAGLDLGPELESVLESTLEPVIEPTLCMVSQTVPEPDQGPVSQPVPEPDLPCDLRHLNTEPMEIFRNCVKIEEIMPNGDPLLAGQNTVDEVYVSRPSHFYTDGPLMPSDF

SEQ ID NO: 64040 - protein, 76 aa, Homo sapiens
MLRPALPWLYLGLCSLLVGEAEAPSPVDPLERSRPYAVLRGQNLESLSPRLECNGAISARCNLRVWGSSDSPASAP

SEQ ID NO: 64041 - protein, 378 aa, Homo sapiens
MLLPPASQASRGSGSTGCSLMAQEVDTAQGAEMRRGAGAARGRASWCWALALLWLAVVPGWSRVSGIPSRRHWPVPYKRFDFRPKPDPYCQAKYTFCPTGSPIPVMEGDDDIEVFRLQAPVWEFKYGDLLGHLKIMHDAIGFRSTLTGKNYTMEWYELFQLGNCTFPHLRPEMDAPFWCNQGAACFFEGIDDVHWKENGTLVQVATISGNMFNQMAKWVKQDNETGIYYETWNVKASPEKGAETWFDSYDCSKFVLRTFNKLAEFGAEFKNIETNYTRIFLYSGEPTYLGNETSVFGPTGNKTLGLAIKRFYYPFKPHLPTKEFLLSLLQIFDAVIVHKQFYLFYNFEYWFLPMKFPFIKITYEEIPLPIRNKTLSGL

SEQ ID NO: 64042 - protein, 57 aa, Homo sapiens
MLSSGPAWLAIVLLVTISLLPDVLKKVLCRQLWPTATERVQVRSVPSRGGGASGPWP

SEQ ID NO: 64043 - protein, 122 aa, Homo sapiens
MSRSVALAVLALLSLSGLEAIQRTPKIQVYSRHPAENGKSNFLNCYVSGFHPSDIEVDLLKNGERIEKVEHSDLSFSKDWSFYLLYYTEFTPTEKDEYACRVNHVTLSQPKIVKWGKSYILL

SEQ ID NO: 64044 - protein, 226 aa, Homo sapiens [sequence omitted]

SEQ ID NO: 64045 - protein, 172 aa, Homo sapiens [sequence omitted]

SEQ ID NO: 64046 - protein, 1349 aa, Homo sapiens
MTFGNYVLFNLLVAILVEGFQAEGDANRSDTDEDKTSVHFEEDFHKLRELQTTELKMCSLAVTPNGHLEGRGSLSPPLIMCTAATPMPTPKSSPFLDAAPSLPDSRRGSSSSGDPPLGDQKPPASLRSSPCAPWGPSGAWSSRRSSWSSLGRAPSLKRRGQCGERESLLSGEGKGSTDDEAEDGRAAPGPRATPLRRAESLDPRPLRPAALPPTKCRDRDGQVVALPSDFFLRIDSHREDAAELDDDSEDSCCLRLHKVLEPYKPQWCRSREAWALYLFSPQNRFRVSCQKVITHKMFDHVVLVFIFLNCVTIALERPDIDPGSTERVFLSVSNYIFTAIFVAEMMVKVVALGLLSGEHAYLQSSWNLLDGLLVLVSLVDIVVAMASAGGAKILGVLRVLRLLRTLRPLRVISRAPGLKLVVETLISSLRPIGNIVLICCAFFIIFGILGVQLFKGKFYYCEGPDTRNISTKAQCRAAHYRWVRRKYNFDNLGQALMSLFVLSSKDGWVNIMYDGLDAVGVDQQPVQNHNPWMLLYFISFLLIVSFFVLNMFVGVVVENFHKCRQHQEAEEARRREEKRLRRLERRRRKAQRRPYYADYSPTRRSIHSLCTSHYLDLFITFIICVNVITMSMEHYNQPKSLDEALKYCNYVFTIVFVFEAALKLVAFGFRRFFKDRWNQLDLAIVLLSLMGITLEEIEMSAALPINPTIIRIMRVLRIARVLKLLKMATGMRALLDTVVQALPQVGNLGLLFMLLFFIYAALGVELFGRLECSEDNPCEGLSRHATFSNFGMAFLTLFRVSTGDNWNGIMKDTLRECSREDKHCLSYLPALSPVYFVTFVLVAQFVLVNVVVAVLMKHLEESNKEAREDAELDAEIELEMAQGPGSARRVDADRPPLPQESPGARDAPNLVARKVSVSRMLSLPNDSYMFRPVVPASAPHPRPLQEVEMETYGAGTPLGSVASVHSPPAESCASLQIPLAVSSPARSGEPLHALSPRGTARSPSLSRLLCRQEAVHTDSLEGKIDSPRDTLDPAEPGEKTPVRPVTQGGSLQSPPRSPRPASVRTRKHTFGQRCVSSRPAAPGGEEAEASDPADEEVSHITSSACPWQPTAEPHGPEASPVAGGERDLRRLYSVDAQGFLDKPGRADEQWRPSAELGSGEPGEAKAWGPEAEPALGARRKKKMSPPCISVEPPAEDEGSARPSAAEGGSTTLRRRTPSCEATPHRDSLEPTEGSGAGGDPAAKGERWGQASCRAEHLTVPSFAFEPLDLGVPSGDPFLDGSHSVTPESRASSSGAIVPLEPPESEPPMPVGDPPEKRRGLYLTVPQCPLEKPGSPSATPAPGGGADDPV

SEQ ID NO: 64047 - protein, 143 aa, Homo sapiens
MCKRTDPVPVTIALDSLSWLLLRLPCTTLCQVLHAVSHQDSCPGDSSSVGKVSVLGLLHEELHGPGPVGALSSLAQTEVTLGGTMGQASAHILCRRPRQRPTDQTQWFSILPDFSLDLQEGPSVESQPYSDPHIPPTAGSPAA

SEQ ID NO: 64048 - protein, 170 aa, Homo sapiens
MCKRTDPVPVTIALDSLSWLLLRLPCTTLCQVLHAVSHQDSCPGDSSSVGKVSVLGLLHEELHGPGPVGALSSLAQTEVTLGGTMGQASAHILCRRPRQRPTDQTQWFSILPDFSLDLQEGPSVESQPYSDPHIPPVDPTTHLTFNLHLSKKEREARDSLILPFQFSSEK

SEQ ID NO: 64049 - protein, 352 aa, Homo sapiens
MLCVWLYMFLYSCAGSCAAAPGLLLLGSGSRAAHDPPALATAPDGTPPRLPFRAPPATPLASGKEMAEGAASPEEQSPEVPDSPSPISSFFSGSGSKQLPQAIIIGVKKGGTRALLEFLRVHPDVRAVGAEPHFFDRSYDKGLAWYRDLMPRTLDGQITMEKTPSYFVTREAPARISAMSKDTKLIVVVRDPVTRAISDYTQTLSKRPDIPTFESLTFKNRTAGLIDTSWSAIQIGIYAKHLEHWLRHFPIRQMLFVSGERLISDPAGELGRVQDFLGLKRIITDKHFYFNKTKGFPCLKKAEGSSRPHCLGKTKGRTHPEIDREVVRRLREFYRPFNLKFYQMTGHDFGWD

SEQ ID NO: 64050 - protein, 482 aa, Homo sapiens
MAGVGSPYVSRLLGICLTSTVQLVTQLMPYGCLLDHVRENRGRLGSQDLLNWCMQIAKGMSYLEDVRLVHRDLAARNVLVKSPNHVKITDFGLARLLDIDETEYHADGGKVPIKWMALESILRRRFTHQSDVWSYGVTVWELMTFGAKPYDGIPAREIPDLLEKGERLPQPPICTIDVYMIMVKCWMIDSECRPRFRELVSEFSRMARDPQRFVVIQNEDLGPASPLDSTFYRSLLEDDDMGDLVDAEEYLVPQQGFFCPDPAPGAGGMVHHRHRSSSTRSGGGDLTLGLEPSEEEAPRSPLAPSEGAGSDVFDGDLGMGAAKGLQSLPTHDPSPLQRYSEDPTVPLPSETDGYVAPLTCSPQPEYVNQPDVRPQPPSPREGPLPAARPAGATLERPKTLSPGKNGVVKDVFAFGGAVENPEYLTPQGGAAPQPHPPPAFSPAFDNLYYWDQDPPERGAPPSTFKGTPTAENPEYLGLDVPV

SEQ ID NO: 64051 - protein, 696 aa, Homo sapiens
MLGATLILAWVPNSRIQRQDEEALRYITPESSPVRKAPRPRGRRTRSSGASHQPSPTELRPTLTPKDEDILVVAQSVPDRMLASPAPEDEEKLAQGLGVDGAQPASQPACSPSGILSTVSPQDVTEEGREPRPEAGEEDGSLELSAEGVSRDSSFDSDSDTFSSPFCLSPISAALAESRGSVFLESDSSPPSSSDAGLRFPDSNGLLQTPRWDEPQRVCALEQICGVFRVDLGHMRSLRLFFSDEACTSGQLVVASRESQYKVFHFHHGGLDKLSDVFQQWKYCTEMQLKDQQVAPDKTCMQFSIRRPKLPSSETHPEESMYKRLGVSAWLNHLNELGQVEEEYKLRKAIFFGGIDVSIRGEVWPFLLRYYSHESTSEEREALRLQKRKEYSEIQQKRLSMTPEEHRAFWRNVQFTVDKDVVRTDRNNQFFRGEDNPNVESMRRILLNYAVYNPAVGYSQGMSDLVAPILAEVLDESDTFWCFVGLMQNTIFVSSPRDEDMEKQLLYLRELLRLTHVRFYQHLVSLGEDGLQMLFCHRWLLLCFKREFPEAEALRIWEACWAHYQTDYFHLFICVAIVAIYGDDVIEQQLATDQMLLHFGNLAMHMNGELVLRKARSLLYQFRLLPRIPCSLHDLCKLCGSGMWDSGSMPAVECTGHHPGSESCPYGGTVEMPSPKSLREGKKGPKTPQDGFGFRR

SEQ ID NO: 64052 - protein, 181 aa, Homo sapiens
MVLFGFLTLALFRRGTLLLQHTDPDYSAAYVVIETDAEDGIKGCGITFTLGKGTEVVVCAVNALAHHVLNKDLKDIVGDFRGFYRQLTSDGQLRWIGPEKGVVHLATAAVLNAVWDLWAKQEGKPVWKLLVDMDPRMLVSCIDFRYITDVLTEEDALGEFGSFLGYTTCTHSSGMLCFLKE

SEQ ID NO: 64053 - protein, 277 aa, Homo sapiens
MVLGLLVQIWALQEASSLSVQQGPNLLQVRQGSQATLVCQVDQATAWERLRVKWTKDGAILCQPYITNGSLSLGVCGPQGRLSWQAPSHLTLQLDPVSLNHSGAYVCWAAVEIPELEEAEGNITRLFVDPDDPTQNRNRIASFPGFLFVLLGVGSMGVAAIVWGAWFWGRRSCQQRDSGNSPGNAFYSNVLYRPRGAPKKSEDCSGEGKDQRGQSIYSTSFPQPAPRQPHLASRPCPSPRPCPSPRPGHPVSMVRVSPRPSPTQQPRPKGFPKVGEE

SEQ ID NO: 64054 - protein, 273 aa, Homo sapiens
MVLGLLVQIWALQEASSLSVQQGPNLLQVRQGSQATLVCQVDQATAWERLRVKWTKDGAILCQPYITNGSLSLGVCGPQGRLSWQAPSHLTLQLDPVSLNHSGAYVCWAAVEIPELEEAEGNITRLFVDPDDPTQNRNRIASFPGFLFVLLGVGSMGVAAIVWGAWFWGRRSCQQRDSGNAFYSNVLYRPRGAPKKSEDCSGEGKDQRGQSIYSTSFPQPAPRQPHLASRPCPSPRPCPSPRPGHPVSMVRVSPRPSPTQQPRPKGFPKVGEE

SEQ ID NO: 64055 - protein, 99 aa, Homo sapiens [sequence omitted]

SEQ ID NO: 64056 - protein, 290 aa, Homo sapiens [sequence omitted]

SEQ ID NO: 64057 - protein, 71 aa, Homo sapiens
MIGDILLFGTLLMNAGAVLNFKLKKKDTQGFGEESREPSTGDNIREFLLSLRYFRIFIALWNIFMMFCMIV

SEQ ID NO: 64058 - protein, 51 aa, Homo sapiens
METLTFRDVAIEFSLEEWECLNPAQQNLYMNVMLENYKNLVFLETFGQSKT

SEQ ID NO: 64059 - protein, 28 aa, Homo sapiens
MFISLWFICPRIFTAMAGTKGKRWSPTS

SEQ ID NO: 64060 - protein, 230 aa, Homo sapiens [sequence omitted]

SEQ ID NO: 64061 - protein, 114 aa, Homo sapiens [sequence omitted]

SEQ ID NO: 64062 - protein, 38 aa, Homo sapiens
MATWALLLLAAMLLGNPGKAFPSGSILMAHPASHSQAG

SEQ ID NO: 64063 - protein, 90 aa, Homo sapiens
MCKAGFAGDDAPGTMFPSTVRCPQHQGMMVGMGQKVFYLGDKAQSKHGILTMKYPIEHRIFTSWEGMEKIWHHTLQQAACVPGGAPGAAD

SEQ ID NO: 64064 - protein, 127 aa, Homo sapiens
MVVLLGATTLVLVAVAPWVLSAAAGGKNLKSPQKVEVDIIDDNFILRWNRSDESVGNVTFSFDYQKTGMDNWIKLSGCQNITSTKCNFSSLKLNVYEEIKLRIRAEKENTSSWYEVDSFTPFRKGKD

SEQ ID NO: 64065 - protein, 51 aa, Homo sapiens [sequence omitted]

SEQ ID NO: 64066 - protein, 423 aa, Homo sapiens
MGAGALLVLLVCLLLSLLGCCCACRGKDPTRRELSLGRKKAPHRLCGRFSRISMKLPRIPLRRQKLPKVVVAHHDLDNTLNCSFLEPPSGLEQPSPSWSSRASFSSFDTTDEGPVYCVPHEEAPAESRDPEVPTVPAEAPAPSPVPLTTPASAEEAIPLPASSDSERSASSVEGPGGALYARVARREARPARARGEIGGLSLSPSPERRKPPPPDPATKPKVSWIHGKHSAAAAGRAPSPPPPGSEAAPSPSKRKRTPSDKSAHTVEHGSPRTRDPTPRPPGLPEEATALAAPSPPRARARGRGPGLLEPTDAGGPPRSAPEAASMLAAELRGKTRSLGRAEVALGAQGPREKPAPPQKAKRSVPPASPARAPPATETPGPEKAATDLPAPETPRKKTPIQKPPRKKSREAAGELGRAGAPTL

SEQ ID NO: 64067 - protein, 131 aa, Homo sapiens
MAAPALSWRLPLLILLLPLATSWASAAVNGTSQFTCFYNSRANISCVWSQDGALQDTSCQVHAWPDRRRWNQTCELLPVSQASWACNLILGAPDSQKLTTVDIVTLRVLCREGVRWRVMAIQDFKPFENRE

SEQ ID NO: 64068 - protein, 520 aa, Homo sapiens
MAGLCLISFLHFFKTLSYVTFPRELASLSPNLVSSFFWNNAPVTPQASPEPGGPDLLRTPLYSHSPLLQPLPPSKAAEELHRVDLVLPEDTTEYFVRTKAGGVCFKPGTKMLERPPPGRPEEKPEGANGSSARRPPRYLLSARERTGGRGARRKWVECVCLPGWHGPSCGVPTVVQYSNLPTKERLVPREVPRRVINAINVNHEFDLLDVRFHELGDVVDAFVVCESNFTAYGEPRPLKFREMLTNGTFEYIRHKVLYVFLDHFPPGGRQDGWIADDYLRTFLTQDGVSRLRNLRPDDVFIIDDADEIPARDGVLFLKLYDGWTEPFAFHMRKSLYGFFWKQPGTLEVVSGCTVDMLQAVYGLDGIRLRRRQYYTMPNFRQYENRTGHILVQWSLGSPLHFAGWHCSWCFTPEGIYFKLVSAQNGDFPRWGDYEDKRDLNYIRGLIRTGGWFDGTQQEYPPADPSEHMYAPKYLLKNYDRFHYLLDNPYQEPRSTAAGGWRHRGPEGRPPARGKLDEAEV

SEQ ID NO: 64069 - protein, 532 aa, Homo sapiens [sequence omitted]

SEQ ID NO: 64070 - protein, 3311 aa, Homo sapiens
MARRPPWRGLGGRSTPILLLLLLSLFPLSQEELGGGGHQGWDPGLAATTGPRAHIGGGALALCPESSGVREDGGPGLGVREPIFVGLRGRRQSARNSRGPPEQPNEELGIEHGVQPLGSRERETGQGPGSVLYWRPEVSSCGRTGPLQRGSLSPGALSSGVPGSGNSSPLPSDFLIRHHGPKPVSSQRNAGTGSRKRVGTARCCGELWATGSKGQGERATTSGAERTAPRRNCLPGASGSGPELDSAPRTARTAPASGSAPRESRTAPEPAPKRMRSRGLFRCRFLPQRPGPRPPGLPARPEARKVTSANRARFRRAANRHPQFPQYNYQTLVPENEAAGTAVLRVVAQDPDAGEAGRLVYSLAALMNSRSLELFSIDPQSGLIRTAAALDRESMERHYLRVTAQDHGSPRLSATTMVAVTVADRNDHSPVFEQAQYRETLRENVEEGYPILQLRATDGDAPPNANLRYRFVGPPAARAAAAAAFEIDPRSGLISTSGRVDREHMESYELVVEASDQGQEPGPRSATVRVHITVLDENDNAPQFSEKRYVAQVREDVRPHTVVLRVTATDRDKDANGLVHYNIISGNSRGHFAIDSLTGEIQVVAPLDFEAEREYALRIRAQDAGRPPLSNNTGLASIQVVDINDHIPIFVSTPFQVSVLENAPLGHSVIHIQAVDADHGENARLEYSLTGVAPDTPFVINSATGWVSVSGPLDRESVEHYFFGVEARDHGSPPLSASASVTVTVLDVNDNRPEFTMKEYHLRLNEDAAVGTSVVSVTAVDRDANSAISYQITGGNTRNRFAISTQGGVGLVTLALPLDYKQERYFKLVLTASDRALHDHCYVHINITDANTHRPVFQSAHYSVSVNEDRPMGSTIVVISASDDDVGENARITYLLEDNLPQFRIDADSGAITLQAPLDYEDQVTYTLAITARDNGIPQKADTTYVEVMVNDVNDNAPQFVASHYTGLVSEDAPPFTSVLQISATDRDAHANGRVQYTFQNGEDGDGDFTIEPTSGIVRTVRRLDREAVSVYELTAYAVDRGVPPLRTPVSIQVMVQDVNDNAPVFPAEEFEVRVKENSIVGSVVAQITAVDPDEGPNAHIMYQIVEGNIPELFQMDIFSGELTALIDLDYEARQEYVIVVQATSAPLVSRATVHVRLVDQNDNSPVLNNFQILFNNYVSNRSDTFPSGIIGRIPAYDPDVSDHLFYSFERGNELQLLVVNQTSGELRLSRKLDNNRPLVASMLVTVTDGLHSVTAQCVLRVVIITEELLANSLTVRLENMWQERFLSPLLGRFLEGVAAVLATPAEDVFIFNIQNDTDVGGTVLNVSFSALAPRGAGAGAAGPWFSSEELQEQLYVRRAALAARSLLDVLPFDDNVCLREPCENYMKCVSVLRFDSSAPFLASASTLFRPIQPIAGLRCRCPPGFTGDFCETELDLCYSNPCRNGGACARREGGYTCVCRPRFTGEDCELDTEAGRCVPGVCRNGGTCTDAPNGGFRCQCPAGGAFEGPRCEVAARSFPPSSFVMFRGLRQRFHLTLSLSFATVQQSGLLFYNGRLNEKHDFLALELVAGQVRLTYSTGESNTVVSPTVPGGLSDGQWHTVHLRYYNKPRTDALGGAQGPSKDKVAVLSVDDCDVAVALQFGAEIGNYSCAAAGVQTSSKKSLDLTGPLLLGGVPNLPENFPVSHKDFIGCMRDLHIDGRRVDMAAFVANNGTMAGCQAKLHFCDSGPCKNSGFCSERWGSFSCDCPVGFGGKDCQLTMAHPHHFRGNGTLSWNFGSDMAVSVPWYLGLAFRTRATQGVLMQVQAGPHSTLLCQLDRGLLSVTVTRGSGRASHLLLDQVTVSDGRWHDLRLELQEEPGGRRGHHVLMVSLDFSLFQDTMAVGSELQGLKVKQLHVGGLPPGSAEEAPQGLVGCIQGVWLGSTPSGSPALLPPSHRVNAEPGCVVTNACASGPCPPHADCRDLWQTFSCTCQPGYYGPGCVDACLLNPCQNQGSCRHLPGAPHGYTCDCVGGYFGHHCEHRMDQQCPRGWWGSPTCGPCNCDVHKGFDPNCNKTNGQCHCKEFHYRPRGSDSCLPCDCYPVGSTSRSCAPHSGQCPCRPGALGRQCNSCDSPFAEVTASGCRVLYDACPKSLRSGVWWPQTKFGVLATVPCPRGALGAAVRLCDEAQGWLEPDLFNCTSPAFRELSLLLDGLELNKTALDTMEAKKLAQRLREVTGHTDHYFSQDVRVTARLLAHLLAFESHQQGFGLTATQDAHFNENLLWAGSALLAPETGDLWAALGQRAPGGSPGSAGLVRHLEEYAATLARNMELTYLNPMGLVTPNIMLSIDRMEHPSSPRGARRYPRYHSNLFRGQDAWDPHTHVLLPSQSPRPSPSEVLPTSSSIENSTTSSVVPPPAPPEPEPGISIIILLVYRTLGGLLPAQFQAERRGARLPQNPVMNSPVVSVAVFHGRNFLRGILESPISLEFRLLQTANRSKAICVQWDPPGLAEQHGVWTARDCELVHRNGSHARCRCSRTGTFGVLMDASPRERLEGDLELLAVFTHVVVAVSVAALVLTAAILLSLRSLKSNVRGIHANVAAALGVAELLFLLGIHRTHNQLVCTAVAILLHYFFLSTFAWLFVQGLHLYRMQVEPRNVDRGAMRFYHALGWGVPAVLLGLAVGLDPEGYGNPDFCWISVHEPLIWSFAGPVVLVIVMNGTMFLLAARTSCSTGQREAKKTSALTLRSSFLLLLLVSASWLFGLLAVNHSILAFHYLHAGLCGLQGLAVLLLFCVLNADARAAWMPACLGRKAAPEEARPAPGLGPGAYNNTALFEESGLIRITLGASTVSSVSSARSGRTQDQDSQRGRSYLRDNVLVRHGSAADHTDHSLQAHAGPTDLDVAMFHRDAGADSDSDSDLSLEEERSLSIPSSESEDNGRTRGRFQRPLCRAAQSERLLTHPKDVDGNDLLSYWPALGECEAAPCALQTWGSERRLGLDTSKDAANNNQPDPALTSGDETSLGRAQRQRKGILKNRLQYPLVPQTRGAPELSWCRAATLGHRAVPAASYGRIYAGGGTGSLSQPASRYSSREQLDLLLRRQLSRERLEEAPAPVLRPLSRPGSQECMDAAPGRLEPKDRGSTLPRRQPPRDYPGAMAGRFGSRDALDLGAPREWLSTLPPPRRTRDLDPQPPPLPLSPQRQLSRDPLLPSRPLDSLSRSSNSREQLDQVPSRHPSREALGPLPQLLRAREDSVSGPSHGPSTEQLDILSSILASFNSSALSSVQSSSTPLGPHTTATPSATASVLGPSTPRSATSHSISELSPDSEVPRSEGHS

SEQ ID NO: 64071 - protein, 103 aa, Homo sapiens [sequence omitted]

SEQ ID NO: 64072 - protein, 61 aa, Homo sapiens
MLAGEMLAIQGSSGFIRKPDFAGRPGVEERVLEKQTWEERHSQRSGRAGLLPEHRCHENHP

SEQ ID NO: 64073 - protein, 136 aa, Homo sapiens
MRGFFFFFGFWKVFEMDIAKQLQAYEVEYHVLQEELIDSSPLSDNQRMDKLEKTNSSLRKQNLDLLEQLQVANGRIQSLEATIEKLLSSESKLKQAMLTLELERSALLQTVEELRRRSAEPSDREPECTQPEPTGD

SEQ ID NO: 64074 - protein, 357 aa, Homo sapiens
MLLATMILVDIFQVKAEVLDMADNAFDDEYLKCTDRMEIKYVPQLLKEEKASHQQLDTVWENAKAKWAARKTQIFLPMNFKDNHGIALMAYISEAQEQTPFYHLFSEAVKMAGQSREDYIYGFQFKAFHFYLTRALQLLRKPCEASSKTVVYRTSQGTSFTFGGLNQARFGHFTLAYSAKPQAANDQLTVLSIYTCLGVDIENFLDKESERITLIPLNEVFQVSQEGAGNNLILQSINKTCSHYECAFLGGLKTENCIENLEYFQPIYVYNPGEKNQKLEDHSEKNWKLEDHGEKNQKLEDHGVKILEPTQIPAPGPVPVPGPKSHPSASSGKLLLPQFGMVIILISVSAINLFVAL

SEQ ID NO: 64075 - protein, 254 aa, Homo sapiens
MKVKPKHLSCIGVCSFLLAARIVEEDCNIPSTHDVIRISQCKCTASDIKRMEKIISEKLHYELEATTALNFLHLYHTIILCHTSERKEILSLDKLEAQLKACNCRLIFSKAKPSVLALCLLNLEVETLKSVELLEILLLVKKHSKINDTEFFYWRELVSKCLAEYSSPECCKPDLKKLVWIVSRRTAQNLHNSYYSVPELPTIPEGGCFDESESEDSCEDMSCGEESLSSSPPSDQECTFFFNFKVAQTLCFPS

SEQ ID NO: 64076 - protein, 53 aa, Homo sapiens
MAGNSILLAAVSILSACQQSYFALQVGKARLKYKVTPPAVTGSPEFERVFRAQ

SEQ ID NO: 64077 - protein, 34 aa, Homo sapiens
MFFLMCYLFVNLACAVQTLLRTPNWRPRFKFYHW

SEQ ID NO: 64078 - protein, 150 aa, Homo sapiens
MAGRVPSLLVLLVFPSSCLAFRSPLSVFKRFKETTRPFSNECLGTTRPVVPIDSSDFALDIRMPGVTPKQASLTLSLNLTAEGEKTNSLLGTSWWDIYYTLFEKMDPSSSRSSCAIAGKCLKKIPIQLQEPHGFPYHLCVVSSHGPAYLP

SEQ ID NO: 64079 - protein, 60 aa, Homo sapiens
MLWFQGNSMQLARSSFGLFLRNCSASKTTLPVLTLFTKVQSEKVKLLGEESCTFKKKGQS

SEQ ID NO: 64080 - protein, 132 aa, Homo sapiens
MLLHLSLLALGAAYVYAIPTEIPTSALVKETLALLSTHRTLLIANETLRIPVPVHKNHQLCTEEIFQGIGTLESQTVQGGTVERLFKNLSLIKKYIDGQKKKCGEERRRVNQFLDYLQEFLGVMNTEWIIES

SEQ ID NO: 64081 - protein, 64 aa, Homo sapiens
MFEYDSTHGKFHGTVKAEKGKLVINGNPITIFQEQDPSKIKWGDAGAEYVVKSTSVFHHGEGWG

SEQ ID NO: 64082 - protein, 369 aa, Homo sapiens
MAPRALLLLLSGGLALTETWACSHSMRYFDTAVSRPGRGEPRFISVGYVDDTQFVRFDSDAASPRGEPRAPWVEQEGPEYWDRETQKYKRQAQADRVSLRNLRGYYNQSEDGSHTLQRMSGCDLGPDGRLLRGYDQSAYDGKDYIALNEDLRSWTAADTAAQITQRKLEAARAAEQLRAYLEGTCVEWLRRYLENGKETLQRAEPPKTHVTHHPLSDHEATLRCWALGFYPAEITLTWQRDGEDQTQDTELVETRPAGDGTFQKWAAVVVPSGQEQRYTCHMQHEGLQEPLTLSWEPSSQPTIPIMGIVAGLAVLVVLAVLGAVVTAMMCRRKSSGHFLPTGGKGGSCSQAACSNSAQGSDESLITCKA

SEQ ID NO: 64083 - protein, 275 aa, Homo sapiens
MPEPASRCLLLLPLLLLLLLLLPAPELGPSQAGAEENDWVRLPSKCEVCKYVAVELKSAFEETGKTKEVIGTGYGILDQKASGVKYTKSDLRLIEVTETICKRLLDYSLHKERTGSNRFAKGMSETFETLHNLVHKGVKVVMDIPYELWNETSAEVADLKKQCDVLVEEFEEVIEDWYRNHQEEDLTEFLCANHVLKGKDTSCLAEQWSGKKGDTAALGGKKSKKKSSRAKAAGGRSSSSKQRKELGGLEGDPSPEEDEGIQKASPLTHSPPDEL

SEQ ID NO: 64084 - protein, 615 aa, Homo sapiens [sequence omitted]

SEQ ID NO: 64085 - protein, 256 aa, Homo sapiens [sequence omitted]

SEQ ID NO: 64086 - protein, 67 aa, Homo sapiens
MALLFLLPLVMQGVSRAEMGTADLGPSSVPTPTNVTIESYNMNPIVYWEYQIMPQVPVFTVEVKNYG

SEQ ID NO: 64087 - protein, 16 aa, Homo sapiens
MKWLLVAAWRTPAALL

SEQ ID NO: 64088 - protein, 29 aa, Homo sapiens
MLALLLFMVPSRRRRLLPGHWRPGPRNPV

SEQ ID NO: 64089 - protein, 34 aa, Homo sapiens [sequence omitted]

SEQ ID NO: 64090 - protein, 56 aa, Homo sapiens
MIEPGFESRQPGSRPCALNSRFASRTESYERLAQCLVLSRHSVSILVAIIPKDTVF

SEQ ID NO: 64091 - protein, 755 aa, Homo sapiens
MRKSIEIIYAITSVILASVSVINESENYEALLECVIILNGILYALPESERKLQSSIQDLCVTWWEKGLPAKEDTGKTAFVMLLRRSLETKTGADVCRLWRIHQALYCFDYDLEESGEIKDMLLECFININYIKKEEGRRFLSCLFNWNINFIKMIHGTIKNQLQGLQKSLMVYIAEIYFRAWKKASGKILEAIENDCIQDFMFHGIHLPRRSPVHSKVREVLSYFHHQKKVRQGVEEMLYRLYKPILWRGLKARNSEVRSNAALLFVEAFPIRDPNLHAIEMDSEIQKQFEELYSLLEDPYPMVRSTGILGVCKITSKYWEMMPPTILIDLLKKVTGELAFDTSSADVRCSVFKCLPMILDNKLSHPLLEQLLPALRYSLHDNSEKVRVAFVDMLLKIKAVRAAKFWKICPMEHILVRLETDSRPVSRRLVSLIFNSFLPVNQPEEVWCERCVTLVQMNHAAARRFYQYAHEHTACTNIAKLIHVIRHCLNACIQRAVREPPEDEEEEDGREKENVTVLDKTLSVNDVACMAGLLEIIVILWKSIDRSMENNKEAKLYTINKFASVLPEYLKVFKDDRCKIPLFMLMSFMPASAVPPFSCGVISTLRSREEGAVDKSYCTLLDCLCSWGQVGHILELVDNWLPTEHAQAKSNTASKGRVQIHDTRPVKPELALVYIEYLLTHPKNRECLLSAPRKKLNHLLKALETSKADLESLLQTPGGKPRGFSEAAAPRAFGLHCRLSIHLQHKVCLLLALY

SEQ ID NO: 64092 - protein, 302 aa, Homo sapiens
MWSWKCLLFWAVLVTATLCTARPSPTLPEQDALPSSEDDDDDDDSSSEEKETDNTKPNRMPVAPYWTSPEKMEKKLHAVPAAKTVKFKCPSSGTPNPTLRWLKNGKEFKPDHRIGGYKVRYATWSIIMDSVVPSDKGNYTCIVENEYGSINHTYQLDVVERSPHRPILQAGLPANKTVALGSNVEFMCKVYSDPQPHIQWLKHIEVNGSKIGPDNLPYVQILKVIMAPVFVGQSTGKETTVSGAQVPVGRLSCPRMGSFLTLQAHTLHLSRDLATSPRTSNRGHKVEVSWEQRAAGMGGAGL

SEQ ID NO: 64093 - protein, 15 aa, Homo sapiens
MVILLGWAVDLIRIY

SEQ ID NO: 64094 - protein, 152 aa, Homo sapiens [sequence omitted]

SEQ ID NO: 64095 - protein, 225 aa, Homo sapiens
MATVRASLRGALLLLLAVAGVAEVAGGLAPGSAGALCCNHSKDNQMCRDVCEQIFSSKSESRLKHLLQRAPDYCPETMVEIWNCMNSSLPGVFKKSDGWVGLGCCELAIALECRQACKQASSKNDISKVCRKEYENALFSCISRNEMGSVCCSYAGHHTNCREYCQAIFRTDSSPGPSQIKAVENYCASISPQLIHCVNNYTQSYPMRNPTDMFEFFANEQLLLL

SEQ ID NO: 64096 - protein, 41 aa, Homo sapiens
MASLGALALLLLSSLSRCSGNAGASLHLLSTGRGQRPFLSS

SEQ ID NO: 64097 - protein, 35 aa, Homo sapiens
ILFLFLFLFWPTAAAMALSSSAGVHPASWVPELPV

SEQ ID NO: 64098 - protein, 637 aa, Homo sapiens
VCWSLKSTRAAENRRDRTWAPRASPASQVGAGRQATSRPAPGMRVLLAALGLLFLGALRAFPQDRPFEDTCHGNPSHYYDKAVRRCCYRCPMGLFPTQQCPQRPTDCRKQCEPDYYLDEADRCTACVTCSRDDLVEKTPCAWNSSRVCECRPGMFCSTSAVNSCARCFFHSVCPAGMIVKFPGTAQKNTVCEPASPGVSPACASPENCKEPSSGTIPQAKPTPVSPATSSASTMPVRGGTRLAQEAASKLTRAPDSPSSVGRPSSDPGLSPTQPCPEGSGDCRKQCEPDYYLDEAGRCTACVSCSRDDLVEKTPCAWNSSRTCECRPGMICATSATNSCARCVPYPICAAETVTKPQDMAEKDTTFEAPPLGTQPDCNPTPENGEAPASTSPTQSLLVDSQASKTLPIPTSAPVALSSTGKPVLDAGPVLFWVILVLVVVVGSSAFLLCHRRACRKRIRQKLHLCYPVQTSQPKLELVDSRPRRSSTQLRSGASVTEPVAEERGLMSQPLMETCHSVGAAYLESLPLQDASPAGGPSSPRDLPEPRVSTEHTNNKIEKIYIMKADTVIVGTVKAELPEGRGLAGPAEPELEEELEADHTPHYPEQETEPPLGSCSDVMLSVEEEGKEDPLPTAASGK

SEQ ID NO: 64099 - protein, 155 aa, Homo sapiens
VLTRVLPALLLAPWPAGLFLAMGRSRRTGAHRAHSLARQMKAKRRRPDLDEIHRELRPQGSARPQPDPNAEFDPDLPGGGLHRCLACARYFIDSTNLKTHFRSKDHKKRLKQLSVEPYSQEEAERAAGMGSYVPPRRLAVPTEVSTEVPEMDTST

SEQ ID NO: 64100 - protein, 581 aa, Homo sapiens
LWGFLIQAAKNFEVWKIATVFVSKGSSPDPASLITMKNQDKKNGAAKQSNPKSSPGQPEAGPEGAQERPSQAAPAVEAEGPGSSQAPRKPEGAQARTAQSGALRDVSEELSRQLEDILSTYCVDNNQGGPGEDGAQGEPAEPEDAEKSRTYVARNGEPEPTPVVNGEKEPSKGDPNTEEIRQSDEVGDRDHRRPQEKKKAKGLGKEITLLMQTLNTLSTPEEKLAALCKKYAELLEEHRNSQKQMKLLQKKQSQLVQEKDHLRGEHSKAVLARSKLESLCRELQRHNRSLKEEGVQRAREEEEKRKEVTSHFQVTLNDIQLQMEQHNERNSKLRQENMELAERLKKLIEQYELREEHIDKVFKHKDLQQQLVDAKLQQAQEMLKEAEERHQREKDFLLKEAVESQRMCELMKQQETHLKQQLALYTEKFEEFQNTLSKSSEVFTTFKQEMEKMTKKIKKLEKETTMYRSRWESSNKALLEMAEEKTVRDKELEGLQVKIQRLEKLCRALQTERNDLNKRVQDLSAGGQGSLTDSGPERRPEGPGAQAPSSPRVTEAPCYPGAPSTEASGQTGPQEPTSARA

SEQ ID NO: 64101 - protein, 12 aa, Homo sapiens
LSMMCLLYVCFM

SEQ ID NO: 64102 - protein, 220 aa, Homo sapiens
LLHVLGLSFLLQTRRPILLCSPRLMKPLVVFVLGGPGAGKGTQCARIVEKYGYTHLSAGELLRDERKNPDSQYGELIEKYIKEGKIVPVEITISLLKREMDQTMAANAQKNKFLIDGFPRNQDNLQGWNKTMDGKADVSFVLFFDCNNEICIERCLERGKSSGRSDDNRESLEKRIQTYLQSTKPIIDLYEEMGKVKKIDASKSVDEVFDEVVQIFDKEG

SEQ ID NO: 64103 - protein, 14 aa, Homo sapiens
LPVFLIAALLPLWM

SEQ ID NO: 64104 - protein, 17 aa, Homo sapiens
MLSFTWYFLSVATPMKL

SEQ ID NO: 64105 - protein, 22 aa, Homo sapiens
VWISGSILASLSAFQQMWISKQ

SEQ ID NO: 64106 - protein, 763 aa, Homo sapiens
LSMALPALGLDPWSLLGLFLFQLLQLLLPTTTAGGGGQGPMPRVRYYAGDERRALSFFHQKGLQDFDTLLLSGDGNTLYVGAREAILALDIQDPGVPRLKNMIPWPASDRKKSECAFKKKSNETQCFNFIRVLVSYNVTHLYTCGTFAFSPACTFIELQDSYLLPISEDKVMEGKGQSPFDPAHKHTAVLVDGMLYSGTMNNFLGSEPILMRTLGSQPVLKTDNFLRWLHHDASFVAAIPSTQVVYFFFEETASEFDFFERLHTSRVARVCKNDVGGEKLLQKKWTTFLKAQLLCTQPGQLPFNVIRHAVLLPADSPTAPHIYAVFTSQWQVGGTRSSAVCAFSLLDIERVFKGKYKELNKETSRWTTYRGPETNPRPGSCSVGPSSDKALTFMKDHFLMDEQVVGTPLLVKSGVEYTRLAVETAQGLDGHSHLVMYLGTTTGSLHKAVVSGDSSAHLVEEIQLFPDPEPVRNLQLAPTQGAVFVGFSGGVWRVPRANCSVYESCVDCVLARDPHCAWDPESRTCCLLSAPNLNSWKQDMERGNPEWACASGPMSRSLRPQSRPQIIKEVLAVPNSILELPCPHLSALASYYWSHGPAAVPEASSTVYNGSLLLIVQDGVGGLYQCWATENGFSYPVISYWVDSQDQTLALDPELAGIPREHVKVPLTRVSGGAALAAQQSYWPHFVTVTVLFALVLSGALIILVASPLRALRARGKVQGCETLRPGEKAPLSREQHLQSPKECRTSASDVDADNNCLGTEVA

SEQ ID NO: 64107 - protein, 19 aa, Homo sapiens
LKFVAFLPISLLLSSLRKI

SEQ ID NO: 64108 - protein, 26 aa, Homo sapiens
RVVFLKQLASGLLLVTGPLALNRVPL

SEQ ID NO: 64109 - protein, 38 aa, Homo sapiens
ILVSLIIFIATTNLLGLLPHSFTPTTQLSINLAMAIPL

SEQ ID NO: 64110 - protein, 71 aa, Homo sapiens
LAVAACVLLLTSAQLGLHIWQLRSQCMWPRETQLLLEVPPSTEDARSCQFPEEERGERSAEEKGRLGDLWV

SEQ ID NO: 64111 - protein, 262 aa, Homo sapiens
LLLLGLGLSTVTGLHCVGDTYPSNDRCCHECRPGNGMVSRCSRSQNTVCRPCGPGFYNDVVSSKPCKPCTWCNLRSGSERKQLCTATQDTVCRCRAGTQPLDSYKPGVDCAPCPPGHFSPGDNQACKPWTNCTLAGKHTLQPASNSSDAICEDRDPPATQPQETQGPPARPITVQPTEAWPRTSQGPSTRPVEVPGGRAVAAILGLGLVLGLLGPLAILLALYLLRRDQRLPPDAHKPPGGGSFRTPIQEEQADAHSTLAKI

SEQ ID NO: 64112 - protein, 426 aa, Homo sapiens
KPLGARRRAMEQRPRGCAAVAAALLLVLLGARAQGGTRSPRCDCAGDFHKKIGLFCCRGCPAGHYLKAPCTEPCGNSTCLVCPQDTFLAWENHHNSECARCQACDEQASQVALENCSAVADTRCGCKPGWFVECQVSQCVSSSPFYCQPCLDCGALHRHTRLLCSRRDTDCGTCLPGFYEHGDGCVSCPTSTLGSCPERCAAVCGWRQMFWVQVLLAGLVVPLLLGATLTYTYRHCWPHKPLVTADEAGMEALTPPPATHLSPLDSAHTLLAPPDSSEKICTVQLVGNSWTPGYPETQEALCPQVTWSWDQLPSRALGPAAAPTLSPESPAGSPAMMLQPGPQLYDVMDAVPARRWKEFVRTLGLREAEIEAVEVEIGRFRDQQYEMLKRWRQQQPAGLGAVYAALERMGLDGCVEDLRSRLQRGP

SEQ ID NO: 64113 - protein, 165 aa, Homo sapiens
RMLISVMLHSLWLVIHLDTWRPESFFDKVKKNRQNGMHTLCLLDIKVKEQSLENLIKGRKIYEPPRYMSVNQAAQQLLEIVQNQRIRGEEPAVTEETLCVGLARVGADDQKIAAGTLRQMCTVDLGEPLHSLIITGGSIHPMEMEMLSLFSIPENSSESQSINGL

SEQ ID NO: 64114 - protein, 19 aa, Homo sapiens
LAAPRRALFFRLGMLLTAG

SEQ ID NO: 64115 - protein, 22 aa, Homo sapiens
TIFGMIFSMVLCCAIRNSRDVI

SEQ ID NO: 64116 - protein, 33 aa, Homo sapiens
ISPLSSAFTFLQMSLLVETVTLPGPCLPNHPEG

SEQ ID NO: 64117 - protein, 374 aa, Homo sapiens
LAVMMYLSLGGFRSLSALFGRDQGPTFDYSHPRDVYSNLSHLPGAPGGPPAPQGLPYCPERSPLLVGPVSVSFSPVPSLAEIVERNPRVEPGGRYRPAGCEPRSRTAIIVPHRAREHHLRLLLYHLHPFLQRQQLAYGIYVIHQAGNGTFNRAKLLNVGVREALRDEEWDCLFLHDVDLLPENDHNLYVCDPRGPRHVAVAMNKFGYSLPYPQYFGGVSALTPDQYLKMNGFPNEYWGWGGEDDDIATRVRLAGMKISRPPTSVGHYKMVKHRGDKGNEENPHRFDLLVRTQNSWTQDGMNSLTYQLLARELGPLYTNITADIGTDPRGPRAPSGPRYPPGSSQAFRQEMLQRRPPARPGPLSTANHTALRGSH

SEQ ID NO: 64118 - protein, 110 aa, Homo sapiens
ILALLGICSLTAYIVEGVGSEVSHRRTCVSLTTQRLPVSRIKTYTITEGSLRAVIFITKRGLKVCADPQATWVRDVVRSMDRKSNTRNNMIQTKPTGTQQSTNTAVTLTG

SEQ ID NO: 64119 - protein, 297 aa, Homo sapiens
KTWMAGILASGLGVLAHLERLETQVSRSRKQSEELQSVQAQEGALGTKIHKLRRLRDELRAVVRHRRASVKACIANVEPNQTVEINEQEALEEKLENVKAILQAYHFTGLSGKLTSRGVCVCISTAFEGNLLDSYFVDLVIQKPLRIHHHSVPVFIPLEEIAAKYLQTNIQHFLFSLCEYLNAYSGRKYQADRLQSDFAALLTGPLQRNPLCNLLSFTYKLDPGGQSFPFCARLLYKDLTATLPTDVTVTCQGVEVLSTSWEEQRASHETLFCTKPLHQVFASFTRKGEKLDMSLVS

SEQ ID NO: 64120 - protein, 427 aa, Homo sapiens
LVLMSDHGDVSLPPEDRVRALSQLGSAVEVNEDIPPRRYFRSGVEIIRMASIYSEEGNIEHAFILYNKYITLFIEKLPKHRDYKSAVIPEKKDTVKKLKEIAFPKAEELKAELLKRYTKEYTEYNEEKKKEAEELARNMAIQQELEKEKQRVAQQKQQQLEQEQFHAFEEMIRNQELEKERLKIVQEFGKVDPGLGGPLVPDLEKPSLDVFPTLTVSSIQPSDCHTTVRPAKPPVVDRSLKPGALSNSESIPTIDGLRHVVVPGRLCPQFLQLASANTARGVETCGILCGKLMRNEFTITHVLIPKQSAGSDYCNTENEEELFLIQDQQGLITLGWIHTHPTQTAFLSSVDLHTHCSYQMMLPESVAIVCSPKFQETGFFKLTDHGLEEISSCRQKGFHPHSKDPPLFCSCSHVTVVDRAVTITDLR

SEQ ID NO: 64121 - protein, 508 aa, Homo sapiens
VEAMGRVVAELVSSLLGLWLLLCSCGCPEGAELRAPPDKIAIIGAGIGGTSAAYYLRQKFGKDVKIDLFEREEVGGRLATMMVQGQEYEAGGSVIHPLNLHMKRFVKDLGLSAVQASGGLLGIYNGETLVFEESNWFIINVIKLVWRYGFQSLRMHMWVEDVLDKFMRIYRYQSHDYAFSSVEKLLHALGGDDFLGMLNRTLLETLQKAGFSEKFLNEMIAPVMRVNYGQSTDINAFVGAVSLSCSDSGLWAVEGGNKLVCSGLLQASKSNLISGSVMYIEEKTKTKYTGNPTKMYEVVYQIGTETRSDFYDIVLVATPLNRKMSNITFLNFDPPIEEFHQYYQHIVTTLVKGELNTSIFSSRPIDKFGLNTVLTTDNSDLFINSIGIVPSVREKEDPEPSTDGTYVWKIFSQETLTKAQILKLFLSYDYAVKKPWLAYPHYKPPEKCPSIILHDRLYYLNGIECAASAMEMSAIAAHNAALLAYHRWNGHTDMIDQDGLYEKLKTEL

SEQ ID NO: 64122 - protein, 22 aa, Homo sapiens
VCAFFFFSFLVVCTSLGMEGNK

SEQ ID NO: 64123 - protein, 317 aa, Homo sapiens
RIILCFLIVYMAILVGTDQDFYSLLGVSKTASSREIRQAFKKLALKLHPDKNPNNPNAHGDFLKINRAYEVLKDEDLRKKYDKYGEKGLEDNQGGQYESWNYYRYDFGIYDDDPEIITLERREFDAAVNSGELWFVNFYSPGCSHCHDLAPTWRDFAKEVDGLLRIGAVNCGDDRMLCRMKGVNSYPSLFIFRSGMAPVKYHGDRSKESLVSFAMQHVRSTVTELWTGNFVNSIQTAFAAGIGWLITFCSKGGDCLTSQTRLRLSGMLDGLVNVGWMDCATQDNLCKSLDITTSTTAYFPPGATLNNKEKNSILLLH

SEQ ID NO: 64124 - protein, 778 aa, Homo sapiens
RIILCFLIVYMAILVGTDQDFYSLLGVSKTASSREIRQAFKKLALKLHPDKNPNNPNAHGDFLKINRAYEVLKDEDLRKKYDKYGEKGLEDNQGGQYESWNYYRYDFGIYDDDPEIITLERREFDAAVNSGELWFVNFYSPGCSHCHDLAPTWRDFAKEVDGLLRIGAVNCGDDRMLCRMKGVNSYPSLFIFRSGMAPVKYHGDRSKESLVSFAMQHVRSTVTELWTGNFVNSIQTAFAAGIGWLITFCSKGGDCLTSQTRLRLSGMLDGLVNVGWMDCATQDNLCKSLDITTSTTAYFPPGATLNNKEKNSILFLNSLDAKEIYLEVIHNLPDFELLSANTLEDRLAHHRWLLFFHFGKNENSNDPELKKLKTLLKNDHIQVGRFDCSSAPDICSNLYVFQPSLAVFKGQGTKEYEIHHGKKILYDILAFAKESVNSHVTTLGPQNFPANDKEPWLVDFFAPWCPPCRALLPELRRASNLLYGQLKFGTLDCTVHEGLCNMYNIQAYPTTVVFNQSNIHEYEGHHSAEQILEFIEDLMNPSVVSLTPTTFNELVTQRKHNEVWMVDFYSPWCHPCQVLMPEWKRMARTLTGLINVGSIDCQQYHSFCAQENVQRYPEIRFFPPKSNKAYHYHSYNGWNRDAYSLRIWGLGFLPQVSTDLTPQTFSEKVLQGKNHWVIDFYAPWCGPCQNFAPEFELLARMIKGKVKAGKVDCQAYAQTCQKAGIRAYPTVKFYFYERAKRNFQEEQINTRDAKAIAALISEKLETLRNQGKRNKDEL

SEQ ID NO: 64125 - protein, 12 aa, Homo sapiens
MSPLLNQLIVLL

SEQ ID NO: 64126 - protein, 15 aa, Homo sapiens
RVMTCFLLALRIISI

SEQ ID NO: 64127 - protein, 35 aa, Homo sapiens
LGVFHDPALWPASTQIPPKAQDKATIIQIPVQNFE

SEQ ID NO: 64128 - protein, 823 aa, Homo sapiens
RQSLLFLTSVVPFVLAPRPPDDPGFGPHQRLEKLDSLLSDYDILSLSNIQQHSVRKRDLQTSTHVETLLTFSALKRHFKLYLTSSTERFSQNFKVVVVDGKNESEYTVKWQDFFTGHVVGEPDSRVLAHIRDDDVIIRINTDGAEYNIEPLWRFVNDTKDKRMLVYKSEDIKNVSRLQSPKVCGYLKVDNEELLPKGLVDREPPEELVHRVKRRADPDPMKNTCKLLVVADHRFYRYMGRGEESTTTNYLIELIDRVDDIYRNTSWDNAGFKGYGIQIEQIRILKSPQEVKPGEKHYNMAKSYPNEEKDAWDVKMLLEQFSFDIAEEASKVCLAHLFTYQDFDMGTLGLAYVGSPRANSHGGVCPKAYYSPVGKKNIYLNSGLTSTKNYGKTILTKEADLVTTHELGHNFGAEHDPDGLAECAPNEDQGGKYVMYPIAVSGDHENNKMFSNCSKQSIYKTIESKAQECFQERSNKVCGNSRVDEGEECDPGIMYLNNDTCCNSDCTLKEGVQCSDRNSPCCKNCQFETAQKKCQEAINATCKGVSYCTGNSSECPPPGNAEDDTVCLDLGKCKDGKCIPFCEREQQLESCACNETDNSCKVCCRDLSGRCVPYVDAEQKNLFLRKGKPCTVGFCDMNGKCEKRVQDVIERFWDFIDQLSINTFGKFLADNIVGSVLVFSLIFWIPFSILVHCVDKKLDKQYESLSLFHPSNVEMLSSMDSASVRIIKPFPAPQTPGRLQPAPVIPSAPAAPKLDHQRMDTIQEDPSTDSHMDEDGFEKDPFPNSSTAAKSFEDLTDHPVTRSEKAASFKLQRQNRVDSKETEC

SEQ ID NO: 64129 - protein, 14 aa, Homo sapiens
LSSLQPAKKKQVTV

SEQ ID NO: 64130 - protein, 53 aa, Homo sapiens
ILLLLLLLLLGSRCNFPSASLLLCLGTAKAWDRPRAASLCLPSSPRSIFPPLN

SEQ ID NO: 64131 - protein, 17 aa, Homo sapiens
LAALFSFTMWVMLQTQR

SEQ ID NO: 64132 - protein, 443 aa, Homo sapiens
KRYPSRMRFVVALVLLNVAAAGAVPLLATESVKQEEAGVRPSAGNVSTHPSLSQRPGGSTKSHPEPQTPKDSPSKSSAEAQTPEDTPNKSGAEAKTQKDSSNKSGAEAKTQKGSTSKSGSEAQTTKDSTSKSHPELQTPKDSTGKSGAEAQTPEDSPNRSGAEAKTQKDSPSKSGSEAQTTKDVPNKSGADGQTPKDGSSKSGAEDQTPKDVPNKSGAEKQTPKDGSNKSGAEEQGPIDGPSKSGAEEQTSKDSPNKVVPEQPSRKDHSKPISNPSDNKELPKADTNQLADKGKLSPHAFKTESGEETDLISPPQEEVKSSEPTEDVEPKEAEDDDTGPEEGSPPKEEKEKMSGSASSENREGTLSDSTGSEKDDLYPNGSGNGSAESSHFFAYLVTAAILVAVLYIAHHNKRKIIAFVLEGKRSKVTRRPKASDYQRLDQKS

SEQ ID NO: 64133 - protein, 49 aa, Homo sapiens
LAHLQGRVRAAGGYRQWSYCCGSGSPMQTQARTCSNKTDQLGKMPDQYG

SEQ ID NO: 64134 - protein, 16 aa, Homo sapiens
IFPLALCLYFCFVFDS

SEQ ID NO: 64135 - protein, 40 aa, Homo sapiens
TVSGVGAPPSRPDFPRRPPQVGSEPRRAPPAMSPDSRWPM

SEQ ID NO: 64136 - protein, 160 aa, Homo sapiens
IMSGARSKLALFLCGCYVVALGAHTGEESVADHHEAEYYVAAVYEHPSILSLNPLALISRQEALELMNQNLDIYEQQVMTAAQKDVQIIVFPEDGIHGFNFTRTSIYPFLDFMPSPQVVRWNPCLEPHRFNDTEVIPAFFLSRLRVHRGDLSQGPEAVTC

SEQ ID NO: 64137 - protein, 59 aa, Homo sapiens
ITGRLLAAPILSASWMCMRTCTMASAVSSSSWNAWKVVSCSAGFRSVATRLSLREKLQR

SEQ ID NO: 64138 - protein, 87 aa, Homo sapiens
IVHGVLINGLISALLGTKMPGPGCVFLSQEISFPAPLYIGEVVLASAEVKKLKRFIAIIAVSCSVIESKKTVMEGWVKVMVPEASKS

SEQ ID NO: 64139 - protein, 9 aa, Homo sapiens
LSWISFFVM

SEQ ID NO: 64140 - protein, 248 aa, Homo sapiens
LGRSMRWCLLLIWAQGLRQAPLASGMMTGTIETTGNISAEKGGSIILQCHLSSTTAQVTQVNWEQQDQLLAICNADLGWHISPSFKDRVAPGPGLGLTLQSLTVNDTGEYFCIYHTYPDGTYTGRIFLEVLESSVAEHGARFQIPLLGAMAATLVVICTAVIVVVALTRKKKALRIHSVEGDLRRKSAGQEEWSPSAPSPPGSCVQAEAAPAGLCGEQRGEDCAELHDYFNVLSYRSLGNCSFFTETG

SEQ ID NO: 64141 - protein, 173 aa, Homo sapiens
ILRGEDYGFSVDWWALGVLMFEMMAGRSPFDIVGSSDNPDQNTEDYLFQVILEKQIRIPRSLSVKAASVLKSFLNKDPKERLGCHPQTGFADIQGHPFFRNVDWDMMEQKQVVPPFKPNISGEFGLDNFDSQFTNEPVQLTPDDDDIVRKIDQSEFEGFEYINPLLMSAEECV

SEQ ID NO: 64142 - protein, 13 aa, Homo sapiens
MWLLKMLVLCPLK

SEQ ID NO: 64143 - protein, 679 aa, Homo sapiens
VVMPGFLVRILPLLLVLLLLGPTRGLRNATQRMFEIDYSRDSFLKDGQPFRYISGSIHYSRVPRFYWKDRLLKMKMAGLNAIQTYVPWNFHEPWPGQYQFSEDHDVEYFLRLAHELGLLVILRPGPYICAEWEMGGLPAWLLEKESILLRSSDPDYLAAVDKWLGVLLPKMKPLLYQNGGPVITVQVENEYGSYFACDFDYLRFLQKRFRHHLGDDVVLFTTDGAHKTFLKCGALQGLYTTVDFGTGSNITDAFLSQRKCEPKGPLINSEFYTGWLDHWGQPHSTIKTEAVASSLYDILARGASVNLYMFIGGTNFAYWNGANSPYAAQPTSYDYDAPLSEAGDLTEKYFALRNIIQKFEKVPEGPIPPSTPKFAYGKVTLEKLKTVGAALDILCPSGPIKSLYPLTFIQVKQHYGFVLYRTTLPQDCSNPAPLSSPLNGVHDRAYVAVDGIPQGVLERNNVITLNITGKAGATLDLLVENMGRVNYGAYINDFKGLVSNLTLSSNILTDWTIFPLDTEDAVCSHLGGWGHRDSGHHDEAWAHNSSNYTLPAFYMGNFSIPSGIPDLPQDTFIQFPGWTKGQVWINGFNLGRYWPARGPQLTLFVPQHILMTSAPNTITVLELEWAPCSSDDPELCAVTFVDRPVIGSSVTYDHPSKPVEKRLMPPPPQKNKDSWLDHV

SEQ ID NO: 64144 - protein, 43 aa, Homo sapiens
RRRAGVRGRVALPAARPLPLQLLAGLVVPCQWGPRSSRPGRRW

SEQ ID NO: 64145 - protein, 22 aa, Homo sapiens
IFFLNPFLMATLLDVYFCPSPA

SEQ ID NO: 64146 - protein, 232 aa, Homo sapiens
IPSRDYVYSIINGIVFNLLAFLALASHCRAMLTDPGAVPKGNATKEFIESLQLKPGQVVYKCPKCCSIKPDRAHHCSVCKRCIRKMDHHCPWVNNCVGENNQKYFVLFTMYIALISLHALIMVGFHFLHCFEEDWTKCSSFSPPTTVILLILLCFEGLLFLIFTSVMFGTQVHSICTDETGIEQLKKEERRWAKKTKWMNMKAVFGHPFSLGWASPFATPDQGKADPYQYVV

SEQ ID NO: 64147 - protein, 230 aa, Homo sapiens
LLPLLLLLLLTPPPGARGEVCMASRGLSLFPESCPDFCCGTCDDQYCCSDVLKKFVWSEERCAVPEASVPASVEPVEQLGSALRFRPGYNDPMSGFGATLAVGLTIFVLSVVTIIICFTCSCCCLYKTCRRPRPVVTTTTSTTVVHAPYPQPPSVPPSYPGPSYQGYHTMPPQPGMPAAPYPMQYPPPYPAQPMGPPAYHETLAGGAAAPYPASQPPYNPAYMDAPKAAL

SEQ ID NO: 64148 - protein, 531 aa, Homo sapiens
LQVAMLMLFVFGVLLHEVSLSGQNEAPPNTHSIPGEPLYNYASIRLPEEHIPFFLHNNRHIATVCRKDSLCPYKKHLEKLKYCWGYEKSCKPEFRFGYPVCSYVDMGWTDTLESAEDIFWKQADFGYARERLEEMHVLCQPKETSDSSLVCSRYLQYCRATNLYLDLRNIKRNHDRFKEDFFQSGEIGGHCKLDIRTLTSEGQRKSPLQSWFAELQSYTQLNFRPIEDAKCDIVIEKPTYFMKLDAGVNMYHHFCDFINLYITQHVNNSFSTDVYIVMWDTSSYGYGDLFSDTWNAFTDYDVIHLKTYDSKRVCFKEAVFSLLPRMRYGLFYNTPLISGCQNTGLFRAFAQHVLHRLNITQEGPKDGKIRVTILARSTEYRKILNQNELVNALKTVSTFEVQIVDYKYRELGFLDQLRITHNTDIFIGMHGAGLTHLLFLPDWAAVFELYNCEDERCYLDLARLRGVHYITWRRQNKVFPQDKGHHPTLGEHPKFTNYSFDVEEFMYLVLQAADHVLQHPKWPFKKKHDEL

SEQ ID NO: 64149 - protein, 58 aa, Homo sapiens
ISPRPVVRPSRRARTGVAIRARGRRGPGTHVPQGRLGGWRGQIPGYLWRLFSVASSLC

SEQ ID NO: 64150 - protein, 15 aa, Homo sapiens
IKNMMLLWKLFDWLL

SEQ ID NO: 64151 - protein, 13 aa, Homo sapiens
IHVLLILCFTGHL

SEQ ID NO: 64152 - protein, 20 aa, Homo sapiens
IIEDEGFFLFIFLMALQNLK

SEQ ID NO: 64153 - protein, 37 aa, Homo sapiens
MLSFSDALLSIIATVMILPVTHTEISPEQWTKAAPWK

SEQ ID NO: 64154 - protein, 58 aa, Homo sapiens
IFGGFISLIGAAFYPIYFRPLMRLEEYKKEQAINRAGIVQEDVQPPGLKVWSDPFGRK

SEQ ID NO: 64155 - protein, 23 aa, Homo sapiens
ILLNCFLRFFLCMHSFSVPFCPF

SEQ ID NO: 64156 - protein, 236 aa, Homo sapiens
LVQSCKQVYRSIAMKFVPCLLLVTLSCLGTLGQAPRQKQGSTGEEFHFQTGGRDSCTMRPSSLGQGAGEVWLRVDCRNTDQTYWCEYRGQPSMCQAFAADPKPYWNQALQELRRLHHACQGAPVLRPSVCREAGPQAHMQQVTSSLKGSPEPNQQPEAGTPSLRPKATVKLTEATQLGKDSMEELGKAKPTTRPTAKPTQPGPRPGGNEEAKKKAWEHCWKPFQALCAFLISFFRG

SEQ ID NO: 64157 - protein, 283 aa, Homo sapiens
VITFILILPEYFKTPKERTLELSCLEVCLQSNFTYSLSSLNFSFVTFLQPVRETQIIMRIFLNPSNFRNFTRTCQDITGEFKMCSSCLVCESKGNMDFISQEQTSKVLIRRGSMEVKANDFHSPCQHFNFSVAPLVDHLEEYNTTCHLKNHTGRSTIMEDEPSKEKSINYTCRIMEYPNDCIHISLHLEMDIKNITCSMKITWYILVLLVFIFLIILTIRKILEGQRRVQKWQSHRDKPTSVLLRGSDSEKLRALNVQVLSAETTQRLPLDQVQEVLPPIPEL

SEQ ID NO: 64158 - protein, 23 aa, Homo sapiens
VLLLLLMVMAAAVAATVQTPSPL

SEQ ID NO: 64159 - protein, 6 aa, Homo sapiens
LVLILF

SEQ ID NO: 64160 - protein, 20 aa, Homo sapiens
RFPKEILTRLLLWPSMFCFL

SEQ ID NO: 64161 - protein, 213 aa, Homo sapiens
VLLFVSLAMALQLSREQGITLRGSAEIVAEFFSFGINSILYQRGIYPSETFTRVQKYGLTLLVTTDLELIKYLNNVVEQLKDWLYKCSVQKLVVVISNIESGEVLERWQFDIECDKTAKDDSAPREKSQKAIQDEIRSVIRQITATVTFLPLLEVSCSFDLLIYTDKDLVVPEKWEESGPQFITNSEEVRLRSFTTTIHKVNSMVAYKIPVND

SEQ ID NO: 64162 - protein, 36 aa, Homo sapiens
LLALVAILWKLGFFKRKYEKMTKNPDEIDETTELSS

SEQ ID NO: 64163 - protein, 926 aa, Homo sapiens
KQRPSASGLWNLALAQLAAEMTAVHAGNINFKWDPKSLEIRTLAVERLLEPLVTQVTTLVNTNSKGPSNKKRGRSKKAHVLAASVEQATENFLEKGDKIAKESQFLKEELVAAVEDVRKQGDLMKAAAGEFADDPCSSVKRGNMVRAARALLSAVTRLLILADMADVYKLLVQLKVVEDGILKLRNAGNEQDLGIQYKALKPEVDKLNIMAAKRQQELKDVGHRDQMAAARGILQKNVPILYTASQACLQHPDVAAYKANRDLIYKQLQQAVTGISNAAQATASDDASQHQGGGGGELAYALNNFDKQIIVDPLSFSEERFRPSLEERLESIISGAALMADSSCTRDDRRERIVAECNAVRQALQDLLSEYMGNAGRKERSDALNSAIDKMTKKTRDLRRQLRKAVMDHVSDSFLETNVPLLVLIEAAKNGNEKEVKEYAQVFREHANKLIEVANLACSISNNEEGVKLVRMSASQLEALCPQVINAALALAAKPQSKLAQENMDLFKEQWEKQVRVLTDAVDDITSIDDFLAVSENHILEDVNKCVIALQEKDVDGLDRTAGAIRGRAARVIHVVTSEMDNYEPGVYTEKVLEATKLLSNTVMPRFTEQVEAAVEALSSDPAQPMDENEFIDASRLVYDGIRDIRKAVLMIRTPEELDDSDFETEDFDVRSRTSVQTEDDQLIAGQSARAIMAQLPQEQKAKIAEQVASFQEEKSKLDAEVSKWDDSGNDIIVLAKQMCMIMMEMTDFTRGKGPLKNTSDVISAAKKIAEAGSRMDKLGRTIADHCPDSACKQDLLAYLQRIALYCHQLNICSKVKAEVQNLGGELVVSGVDSAMSLIQAAKNLMNAVVQTVKASYVASTKYQKSQGMASLNLPAVSWKMKAPEKKPLVKREKQDETQTKIKRASQKKHVNPVQALSEFKAMDSI

SEQ ID NO: 64164 - protein, 14 aa, Homo sapiens
RRKPAVFGLFSRVL

SEQ ID NO: 64165 - protein, 87 aa, Homo sapiens
MGIALLQIFGICLAQNLVSDIKAVKANWSKWNDDFENHWLTPTISEVLSTAGPQQNSLTGAPGPAPPSRHVFFGLGGLYPEPTFKNW

SEQ ID NO: 64166 - protein, 10 aa, Homo sapiens
LILRLSGLFF

SEQ ID NO: 64167 - protein, 25 aa, Homo sapiens
LEYFLNTVLILFAIISKGRNHLDQN

SEQ ID NO: 64168 - protein, 183 aa, Homo sapiens
LLLLLLGAWAIPGGLGDRAPLTATAPQLDDEEMYSAHMPAHLRCDACRAVAYQMWQNLAKAETKLHTSNSGGRRELSELVYTDVLDRSCSRNWQDYGVREVDQVKRLTGPGLSEGPEPSISVMVTGGPWPTRLSRTCLHYLGEFGEDQIYEAHQQGRGALEALLCGGPQGACSEKVSATREEL

SEQ ID NO: 64169 - protein, 12 aa, Homo sapiens
LKALLGALTVFG

SEQ ID NO: 64170 - protein, 332 aa, Homo sapiens
MASSLAFLLLNFHVSLLLVQLLTPCSAQFSVLGPSGPILAMVGEDADLPCHLFPTMSAETMELKWVSSSLRQVVNVYADGKEVEDRQSAPYRGRTSILRDGITAGKAALRIHNVTASDSGKYLCYFQDGDFYEKALVELKVAALGSNLHVEVKGYEDGGIHLECRSTGWYPQPQIQWSNAKGENIPAVEAPVVADGVGLYEVAASVIMRGGSGEGVSCIIRNSLLGLEKTASISIADPFFRSAQPWIAALAGTLPILLLLLAGASYFLWRQQKEITALSSEIESEQEMKEMGYAATEREISLRESLQEELKRKKIQYLTRGEESSSDTNKSA

SEQ ID NO: 64171 - protein, 17 aa, Homo sapiens
LLLLGALALTETWAATP

SEQ ID NO: 64172 - protein, 37 aa, Homo sapiens
IKGVLCVPGMVLLWCPWCDPSPAGNSLREVGPLHQCC

SEQ ID NO: 64173 - protein, 256 aa, Homo sapiens
RMILNKALLLGALALTTVMSPCGGEDIVADHVASCGVNLYQFYGPSGQYTHEFDGDEQFYVDLERKETAWRWPEFSKFGGFDPQGALRNMAVAKHNLNIMIKRYNSTAATNEVPEVTVFSKSPVTLGQPNTLICLVDNIFPPVVNITWLSNGQSVTEGVSETSFLSKSDHSFFKISYLTFLPSADEIYDCKVEHWGLDQPLLKHWEPEIPAPMSELTETVVCALGLSVGLMGIVVGTVFIIQGLRSVGASRHQGPL

SEQ ID NO: 64174 - protein, 9 aa, Homo sapiens
LYSIFLIIS

SEQ ID NO: 64175 - protein, 50 aa, Homo sapiens
MIWKRLIILKVLLNQTCQTVQTVTPTSWVFSNQAGMTQAFLFLECHYQTQ

SEQ ID NO: 64176 - protein, 36 aa, Homo sapiens
IFMLFSPLVLYDCYLYEALVITKHFFCPFLPELCKL

SEQ ID NO: 64177 - protein, 33 aa, Homo sapiens
ILILVLQLLLRIRRNRQQRCRRVLSHRSLFPRM

SEQ ID NO: 64178 - protein, 10 aa, Homo sapiens
VVYFIFFILF

SEQ ID NO: 64179 - protein, 333 aa, Homo sapiens
LSKMEGAPPGSLALRLLLFVALPASGWLTTGAPEPPPLSGAPQDGIRINVTTLKDDGDISKQQVVLNITYESGQVYVNDLPVNSGVTRISCQTLIVKNENLENLEEKEYFGIVSVRILVHEWPMTSGSSLQLIVIQEEVVEIDGKQVQQKDVTEIDILVKNRGVLRHSNYTLPLEESMLYSISRDSDILFTLPNLSKKESVSSLQTTSQYLIRNVETTVDEDVLPGKLPETPLRAEPPSSYKVMCQWMEKFRKDLCRFWSNVFPVFFQFLNIMVVGITGAAVVITILKVFFPVSEYKGILQLDKVDVIPVTAINLYPDGPEKRAENLEDKTCI

SEQ ID NO: 64180 - protein, 166 aa, Homo sapiens
VASLLLSFVWMPALLPVASRLLLLPRVLLTMASGSPPTQPSPASDSGSGYVPGSVSAAFVTCPNEKVAKEIARAVVEKRLAACVNLIPQITSIYEWKGKIEEDSEVLMMIKTQSSLVPALTDFVRSVHPYEVAEVIALPVEQGNFPYLQWVRQVTESVSDSITVLP

SEQ ID NO: 64181 - protein, 62 aa, Homo sapiens
MCLFLNCFGLLIVNQVAALLFPLLAKEDSTFSGTYKQQLAPIMTLRAQTSVCPLCPLLKMSP

SEQ ID NO: 64182 - protein, 13 aa, Homo sapiens
LSVVDLSLICILL

SEQ ID NO: 64183 - protein, 652 aa, Homo sapiens
RILWLARYTASSFSSFLVQLFQVVLMKLSYESENYKLKTHESKDCESESYKSKSHESKAHASYYGRMNVREVLREDGHLSVNGEALCYFLLQILRRIGAVGQAVSRTAWSALWLAVVAPGKAASGVFWWLGIGWYQFVTLISWLNVFLLTRCLRNICKFLVLLIPLFLLLAGLSLRGQGNFFSFLPVLNWASMHRTQRVDDPQDVFKPTTSRLKQPLQGDSEAFPWHWMSGVEQQVASLSGQCHHHGENLRELTTLLQKLQARVDQMEGGAAGPSASVRDAVGQPPRETDFMAFHQEHEVRMSHLEDILGKLREKSEAIQKELEQTKQKTISAVGEQLLPTVEHLQLELDQLKSELSSWRHVKTGCETVDAVQERVDVQVREMVKLLFSEDQQGGSLEQLLQRFSSQFVSKGDLQTMLRDLQLQILRNVTHHVSVTKQLPTSEAVVSAVSEAGASGITEAQARAIVNSALKLYSQDKTGMVDFALESGGGSILSTRCSETYETKTALMSLFGIPLWYFSQSPRVVIQPDIYPGNCWAFKGSQGYLVVRLSMMIHPAAFTLEHIPKTLSPTGNISSAPKDFAVYGLENEYQEEGQLLGQFTYDQDGESLQMFQALKRPDDTAFQIVELRIFSNWGHPEYTCLYRFRVHGEPVK

SEQ ID NO: 64184 - protein, 23 aa, Homo sapiens
MQWIIVIAGSLLSTTLIVNLRTT

SEQ ID NO: 64185 - protein, 19 aa, Homo sapiens
ILIPAGLALWLVGYITKIS

SEQ ID NO: 64186 - protein, 236 aa, Homo sapiens
LWPGAALLVLLGVAASLCVRCSRPGAKRSEKIYQQRSLREDQQSFTGSRTYSLVGQAWPGPLADMAPTRKDKLLQFYPSLEDPASSRYQNFSKGSRHGSEEAYIDPIAMEYYNWGRFSKPPEDDDANSYENVLICKQKTTETGAQQEGIGGLCRGDLSLSLALKTGPTSGLCPSASPEEDEESEDYQNSASIHQWRESRKVMGQLQREASPGPVGSPDEEDGEPDYVNGEVAATEA

SEQ ID NO: 64187 - protein, 112 aa, Homo sapiens
IVAAGSWQSQAVHLLGVLVSYCDFIMENQLAKSTEERTFQYQDSLPSLPVPSLEESLKKYLESVKPFANQEEYKKTEEIVQKFQSGIGEKLHQKLLERAKGKRNWVFVVIIE

SEQ ID NO: 64188 - protein, 91 aa, Homo sapiens
LALLTFFLLQLSQTSRIPPLAKDQAVEAMFPPARGKELLSFEDVAMYFTREEWGHLNWGQKDLYRDVMLENYRNMVLLGRTRLEDWALSVF

SEQ ID NO: 64189 - protein, 59 aa, Homo sapiens
IGFFYTLFLHCLVFLVLYKLAWSESMERDCATFCAKKFADHLHKFHENDNGAAAGDLWQ

SEQ ID NO: 64190 - protein, 40 aa, Homo sapiens [sequence omitted]

SEQ ID NO: 64191 - protein, 29 aa, Homo sapiens
VVTVFYLVAYAAVDLSCLSLEWASAPNFR

SEQ ID NO: 64192 - protein, 13 aa, Homo sapiens
MLLFLQILKKHGI

SEQ ID NO: 64193 - protein, 325 aa, Homo sapiens
VGATRKDLIIMDLRQFLMCLSLCTAFALSKPTEKKDRVHHEPQLSDKVHNDAQSFDYDHDAFLGAEEAKTFDQLTPEESKERLGMIVDKIDADKDGFVTEGELKSWIKHAQKKYIYDNVENQWQEFDMNQDGLISWDEYRNVTYGTYLDDPDPDDGFNYKQMMVRDERRFKMADKDGDLIATKEEFTAFLHPEEYDYMKDIVVQETMEDIDKNADGFIDLEEYIGDMYSHDGNTDEPEWVKTEREQFVEFRDKNRDGKMDKEETKDWILPSDYDHAEAEARHLVYESDQNKDGKLTKEEIVDKYDLFVGSQATDFGEALVRHDEF

SEQ ID NO: 64194 - protein, 501 aa, Homo sapiens; identical to SEQ ID NO: 23962

SEQ ID NO: 64195 - protein, 692 aa, Homo sapiens
LFSFILIFIFIVCYRTSKMQTSSSRSVHLSEWQKNYFAITSGICTGPKADAYRAQILRIQYAWANSEISQVCATKLFKKYAEKYSAIIDSDNVESGLNNYAENILTLAGSQQTDSDKWQSGLSINNVFKMSSVQKMMQAGKKFKDSLLEPALASVVIHKEATVFDLPKFSVCGSSQESDSLPNSAHDRDRTQDFPESNRLKLLQNAQPPMVTNTARTCPTFSAPVGESATAKFHVTPLFGNVKKENHSSAKENIGLNVFLSNQSCFPAACENPQRKSFYGSGTIDALSNPILNKACSKTEDNGPKEDSSLPTFKTAKEQLWVDQQKKYHQPQRASGSSYGGVKKSLGASRSRGILGKFVPPIPKQDGGEQNGGMQCKPYGAGPTEPAHPVDERLKNLEPKMIELIMNEIMDHGPPVNWEDIAGVEFAKATIKEIVVWPMLRPDIFTGLRGPPKGILLFGPPGTGKTLIGKCIASQSGATFFSISASSLTSKWVGEGEKMVRALFAVARCQQPAVIFIDEIDSLLSQRGDGEHESSRRIKTEFLVQLDGATTSSEDRILVVGATNRPQEIDEAARRRLVKRLYIPLPEASARKQIVINLMSKEQCCLSEEEIEQIVQQSDAFSGADMTQLCREASLGPIRSLQTADIATITPDQVRPIAYIDFENAFRTVRPSVSPKDLELYENWNKTFGCGK

SEQ ID NO: 64196 - protein, 35 aa, Homo sapiens [sequence omitted]

SEQ ID NO: 64197 - protein, 32 aa, Homo sapiens
LANLLIFASLSAFRPAALPGYISFFPILQQPL

SEQ ID NO: 64198 - protein, 345 aa, Homo sapiens
LGIALALLGERLLALRNRLKASREVESVDLPHCHLIKGIEAGSEDIDILPNGLAFFSVGLKFPGLHSFAPDKPGGILMMDLKEEKPRARELRISRGFDLASFNPHGISTFIDNDDTVYLFVVNHPEFKNTVEIFKFEEAENSLLHLKTVKHELLPSVNDITAVGPAHFYATNDHYFSDPFLKYLETYLNLHWANVVYYSPNEVKVVAEGFDSANGINISPDDKYIYVADILAHEIHVLEKHTNMNLTQLKVLELDTLVDNLSIDPSSGDIWVGCHPNGQKLFVYDPNNPPSSEVLRIQNILSEKPTVTTVYANNGSVLQGSSVASVYDGKLLIGTLYHRALYCEL

SEQ ID NO: 64199 - protein, 322 aa, Homo sapiens
LGSAAAMASRLLLNNGAKMPILGLGTWKSPPGQVTEAVKVAIDVGYRHIDCAHVYQNENEVGVAIQEKLREQVVKREELFIVSKLWCTYHEKGLVKGACQKTLSDLKLDYLDLYLIHWPTGFKPGKEFFPLDESGNVVPSDTNILDTWAAMEELVDEGLVKAIGISNFNHLQVEMILNKPGLKYKPAVNQIECHPYLTQEKLIQYCQSKGIVVTAYSPLGSPDRPWAKPEDPSLLEDPRIKAIAAKHNKTTAQVLIRFPMQRNLVVIPKSVTPERIAENFKVFDFELSSQDMTTLLSYNRNWRVCALLSCTSHKDYPFHEEF

SEQ ID NO: 64200 - protein, 69 aa, Homo sapiens
LVLLGRPPVGMGLSVLLPLCLLGPGRFTSGQKPLDTPGLGAAVLSVRKAGLKMRSHLTPSVCTVPSPGS

SEQ ID NO: 64201 - protein, 153 aa, Homo sapiens
LMAQLGAVVAVASSFFCASLFSAVHKIEEGHIGVYYRGGALLTSTSGPGFHLMLPFITSYKSVQTTLQTDEVKNVPCGTSGGVMIYFDRIEVVNFLVPNAVYDIVKNYTADYDKALIFNKIHHELNQFCSVHTLQEVYIELFGLENDFSQESS

SEQ ID NO: 64202 - protein, 47 aa, Homo sapiens
ILGSEELWPVLLGFTILPAILQSAALPFCPESPRFLLINRKEEENAK

SEQ ID NO: 64203 - protein, 17 aa, Homo sapiens
IGLGGMAFCSMLMTVCY

SEQ ID NO: 64204 - protein, 709 aa, Homo sapiens
LKKMEMFTFLLTCIFLPLLRGHSLFTCEPITVPRCMKMAYNMTFFPNLMGHYDQSIAAVEMEHFLPLANLECSPNIETFLCKAFVPTCIEQIHVVPPCRKLCEKVYSDCKKLIDTFGIRWPEELECDRLQYCDETVPVTFDPHTEFLGPQKKTEQVQRDIGFWCPRHLKTSGGQGYKFLGIDQCAPPCPNMYFKSDELEFAKSFIGTVSIFCLCATLFTFLTFLIDVRRFRYPERPIIYYSVCYSIVSLMYFIGFLLGDSTACNKADEKLELGDTVVLGSQNKACTVLFMLLYFFTMAGTVWWVILTITWFLAAGRKWSCEAIEQKAVWFHAVAWGTPGFLTVMLLAMNKVEGDNISGVCFVGLYDLDASRYFVLLPLCLCVFVGLSLLLAGIISLNHVRQVIQHDGRNQEKLKKFMIRIGVFSGLYLVPLVTLLGCYVYEQVNRITWEITWVSDHCRQYHIPCPYQAKAKARPELALFMIKYLMTLIVGISAVFWVGSKKTCTEWAGFFKRNRKRDPISESRRVLQESCEFFLKHNSKVKHKKKHYKPSSHKLKVISKSMGTSTGATANHGTSAVAITSHDYLGQETLTEIQTSPETSMREVKADGASTPRLREQDCGEPASPAASISRLSGEQVDGKGQAGSVSESARSEGRISPKSDITDTGLAQSNNLQVPSSSEPSSLKGSTSLLVHPVSGVRKEQGGGCHSDT

SEQ ID NO: 64205 - protein, 463 aa, Homo sapiens [sequence omitted]

SEQ ID NO: 64206 - protein, 23 aa, Homo sapiens
MKWEFTAGMLQELALLLLKLVAC

SEQ ID NO: 64207 - protein, 35 aa, Homo sapiens
IICVFIGFGWWFFLGPKFKKLQDEGSSSWKCKRSN

SEQ ID NO: 64208 - protein, 17 aa, Homo sapiens
VESQCHIMLLLSLMEMV

SEQ ID NO: 64209 - protein, 19 aa, Homo sapiens
LIVLFFLLAVHFGGYYKEI

SEQ ID NO: 64210 - protein, 40 aa, Homo sapiens
VTLSSCKTSSLGRSGHRNQSETIASAIKTIVHHGGTHGYL

SEQ ID NO: 64211 - protein, 15 aa, Homo sapiens
LFLPALVLLQVTYSS

SEQ ID NO: 64212 - protein, 33 aa, Homo sapiens
LVVLVLFLLAEWRLVFSNPVWWSPLLQSTLQRK

SEQ ID NO: 64213 - protein, 16 aa, Homo sapiens
LVSAGSSLLACSLLLA

SEQ ID NO: 64214 - protein, 11 aa, Homo sapiens
LPLYLLILLMA

SEQ ID NO: 64215 - protein, 317 aa, Homo sapiens
TRGCRPWGSLLGLLGLVSAAAAAWDLASLRCTLGAFCECDFRPDLPGLECDLAQHLAGQHLAKALVVKALKAFVRDPAPTKPLVLSLHGWTGTGKSYVSSLLAHYLFQGGLRSPRVHHFSPVLHFPHPSHIERYKKDLKSWVQGNLTACGRSLFLFDEMDKMPPGLMEVLRPFLGSSWVVYGTNYRKAIFIFISNTGGKQINQVALEAWRSRRDREEILLQELEPVISRAVLDNPHHGFSNSGIMEERLLDAVVPFLPLQRHHVRHCVLNELAQLGLEPRDEVVQAVLDSTTFFPEDEQLFSSNGCKTVASRIAFFL

SEQ ID NO: 64216 - protein, 13 aa, Homo sapiens
LKTWIISIFVMDC

SEQ ID NO: 64217 - protein, 14 aa, Homo sapiens
VLRLMFPISLALPL

SEQ ID NO: 64218 - protein, 561 aa, Homo sapiens
IRDSSSMAARLLLLGILLLLLPLPVPAPCHTAARSECKRSHKFVPGAWLAGEGVDVTSLRRSGSFPVDTQRFLRPDGTCTLCENALQEGTLQRLPLALTNWRAQGSGCQRHVTRAKVSSTEAVARDAARSIRNDWKVGLDVTPKPTSNVHVSVAGSHSQAANFAAQKTHQDQYSFSTDTVECRFYSFHVVHTPPLHPDFKRALGDLPHHFNASTQPAYLRLISNYGTHFIRAVELGGRISALTALRTCELALEGLTDNEVEDCLTVEAQVNIGIHGSISAEAKACEEKKKKHKMTASFHQTYRERHSEVVGGHHTSINDLLFGIQAGPEQYSAWVNSLPGSPGLVDYTLEPLHVLLDSQDPRREALRRALSQYLTDRARWRDCSRPCPPGRQKSPRDPCQCVCHGSAVTTQDCCPRQRGLAQLEVTFIQAWGLWGDWFTATDAYVKLFFGGQELRTSTVWDNNNPIWSVRLDFGDVLLATGGPLRLQVWDQDSGRDDDLLGTCDQAPKSGSHEVRCNLNHGHLKFRYHARCLPHLGGGTCLDYVPQMLLGEPPGNRSGAVW

SEQ ID NO: 64219 - protein, 28 aa, Homo sapiens
VPACAAAAAIPHASRARPTLPIPGTKTG

SEQ ID NO: 64220 - protein, 1233 aa, Homo sapiens
LPALLSRARVPRPPAGRRERERRRRPVAKAPARLRGEYETGVKMTSRFGKTYSRKGGNGSSKFDEVFSNKRTTLSTKWGETTFMAKLGQKRPNFKPDIQEIPKKPKVEEESTGDPFGFDSDDESLPVSSKNLAQVKCSSYSESSEAAQLEEVTSVLEANSKISHVVVEDTVVSDKCFPLEDTLLGKEKSTNRIVEDDASISSCNKLITSDKVENFHEEHEKNSHHIHKNADDSTKKPNAETTVASEIKETNDTWNSQFGKRPESPSEISPIKGSVRTGLFEWDNDFEDIRSEDCILSLDSDPLLEMKDDDFKNRLENLNEAIEEDIVQSVLRPTNCRTYCRANKTKSSQGASNFDKLMDGTSQALAKANSESSKDGLNQAKKGGVSCGTSFRGTVGRTRDYTVLHPSCLSVCNVTIQDTMERSMDEFTASTPADLGEAGRLRKKADIATSKTTTRFRPSNTKSKKDVKLEFFGFEDHETGGDEGGSGSSNYKIKYFGFDDLSESEDDEDDDCQVERKTSKKRTKTAPSPSLQPPPESNDNSQDSQSGTNNAENLDFTEDLPGVPESVKKPINKQGDKSKENTRKIFSGPKRSPTKAVYNARHWNHPDSEELPGPPVVKPQSVTVRLSSKEPNQKDDGVFKAPAPPSKVIKTVTIPTQPYQDIVTALKCRREDKELYTVVQHVKHFNDVVEFGENQEFTDDIEYLLSGLKSTQPLNTRCLSVISLATKCAMPSFRMHLRAHGMVAMVFKTLDDSQHHQNLSLCTAALMYILSRDRLNMDLDRASLDLMIRLLELEQDASSAKLLNEKDMNKIKEKIRRLCETVHNKHLDLENITTGHLAMETLLSLTSKRAGDWFKEELRLLGGLDHIVDKVKECVDHLSRDEDEEKLVASLWGAERCLRVLESVTVHNPENQSYLIAYKDSQLIVSSAKALQHCEELIQQYNRAEDSICLADSKPLPHQNVTNHVGKAVEDCMRAIIGVLLNLTNDNEWGSTKTGEQDGLIGTALNCVLQVPKYLPQEQRFDIRVLGLGLLINLVEYSARNRHCLVNMETSCSFDSSICSGEGDDSLRIGGQVHAVQALVQLFLERERAAQLAESKTDELIKDAPTTQHDKSGEWQETSGEIQWVSTEKTDGTEEKHKKEEEDEELDLNKALQHAGKHMEDCIVASYTALLLGCLCQESPINVTTVREYLPEGDFSIMTEMLKKFLSFMNLTCAVGTTGQKSISRVIEYLEHC

SEQ ID NO: 64221 - protein, 412 aa, Homo sapiens
LRLETAARQDSSRMKMRFLGLVVCLVLWTLHSEGSGGKLTAVDPETNMNVSEIISYWGFPSEEYLVETEDGYILCLNRIPHGRKNHSDKGPKPVVFLQHGLLADSSNWVTNLANSSLGFILADAGFDVWMGNSRGNTWSRKHKTLSVSQDEFWAFSYDEMAKYDLPASINFILNKTGQEQVYYVGHSQGTTIGFIAFSQIPELAKRIKMFFALGPVASVAFCTSPMAKLGRLPDHLIKDLFGDKEFLPQSAFLKWLGTHVCTHVILKELCGNLCFLLCGFNERNLNMSRVDVYTTHSPAGTSVQNMLHWSQAVKFQKFQAFDWGSSAKNYFHYNQSYPPTYNVKDMLVPTAVWSGGHDWLADVYDVNILLTQITNLVFHESIPEWEHLDFIWGLDAPWRLYNKIINLMRKYQ

SEQ ID NO: 64222 - protein, 830 aa, Homo sapiens
LLPDPAMRGLGLWLLGAMMLPAIAPSRPWALMEQYEVVLPWRLPGPRVRRALPSHLGLHPERVSYVLGATGHNFTLHLRKNRDLLGSGYTETYTAANGSEVTEQPRGQDHCFYQGHVEGYPDSAASLSTCAGLRGFFQVGSDLHLIEPLDEGGEGGRHAVYQAEHLLQTAGTCGVSDDSLGSLLGPRTAAVFRPRPGDSLPSRETRYVELYVVVDNAEFQMLGSEAAVRHRVLEVVNHVDKLYQKLNFRVVLVGLEIWNSQDRFHVSPDPSVTLENLLTWQARQRTRRHLHDNVQLITGVDFTGTTVGFARVSAMCSHSSGAVNQDHSKNPVGVACTMAHEMGHNLGMDHDENVQGCRCQERFEAGRCIMAGSIGSSFPRMFSDCSQAYLESFLERPQSVCLANAPDLSHLVGGPVCGNLFVERGEQCDCGPPEDCRNRCCNSTTCQLAEGAQCAHGTCCQECKVKPAGELCRPKKDMCDLEEFCDGRHPECPEDAFQENGTPCSGGYCYNGACPTLAQQCQAFWGPGGQAAEESCFSYDILPGCKASRYRADMCGVLQCKGGQQPLGRAICIVDVCHALTTEDGTAYEPVPEGTRCGPEKVCWKGRCQDLHVYRSSNCSAQCHNHGVCNHKQECHCHAGWAPPHCAKLLTEVHAASGSLPVFVVVVLVLLAVVLVTLAGIIVYRKARSRILSRNVAPKTTMGRSNPLFHQAASRVPAKGGAPAPSRGPQELVPTTHPGQPARHPASSVALKRPPPAPPVTVSSPPFPVPVYTRQAPKQVIKPTFAPPVPPVKPGAGAANPGPAEGAVGPKVALKPPIQRKQGAGAPTAP

SEQ ID NO: 64223 - protein, 22 aa, Homo sapiens
RDELSYLFLSCCVLVVKSLCSS

SEQ ID NO: 64224 - protein, 41 aa, Homo sapiens
LPPSMSCILICLTVHVFHLQPFACVQPTVCLQFLNCTSCVS

SEQ ID NO: 64225 - protein, 25 aa, Homo sapiens
LLFFCGSELLLEVLTLAAFSSMDRI

SEQ ID NO: 64226 - protein, 49 aa, Homo sapiens
RSRGTTVGQAAWKISAGSPRQNSHAPGQAVPTAWWRGNLTSGRAPLLHS

SEQ ID NO: 64227 - protein, 475 aa, Homo sapiens
LQGSGSPPPVFSALFLVMAALSKSIPHNCYEIGHTWHPSCRVSFLQITGGALEESLKIYAPLYLIAAILRKRKLDYYLHKLLPEILQSASFLTANGALYMAFFCILRKILGKFYSWTPGFGAALPASYVAILIERKSRRGLLTIYMANLATETLFRMGVARGTITTLRNGEVLLFCITAAMYMFFFRCKDGLKGFTFSALRFIVGKEEIPTHSFSPEAAYAKVEQKREQHEEKPGRMNMIGLVRKFVDSICKHGPRHRCCKHYEDNCISYCIKGFIRMFSVGYLIQCCLRIPSAFRHLFTQPSRLLSLFYNKENFQLGAFLGSFVSIYKGTSCFLRWIRNLDDELHAIIAGFLAGISMMFYKSTTISMYLASKLVETMYFKGIEAGKVPYFPHADTIIYSISTAICFQAAVMEVQTLRPSYWKFLLRLTKGKFAVMNRKVLDVFGTGASKHFQDFIPRLDPRYTTVTPELPTEFS

SEQ ID NO: 64228 - protein, 577 aa, Homo sapiens
LPCLVVLLAALLSLRLGSDAHGTELPSPPSVWFEAEFFHHILHWTPIPNQSESTCYEVALLRYGIESWNSISNCSQTLSYDLTAVTLDLYHSNGYRARVRAVDGSRHSNWTVTNTRFSVDEVTLTVGSVNLEIHNGFILGKIQLPRPKMAPANDTYESIFSHFREYEIAIRKVPGNFTFTHKKVKHENFSLLTSGEVGEFCVQVKPSVASRSNKGMWSKEECISLTRQYFTVTNVIIFFAFVLLLSGALAYCLALQLYVRRRKKLPSVLLFKKPSPFIFISQRPSPETQDTIHPLDEEAFLKVSPELKNLDLHGSTDSGFGSTKPSLQTEEPQFLLPDPHPQADRTLGNREPPVLGDSCSSGSSNSTDSGICLQEPSLSPSTGPTWEQQVGSNSRGQDDSGIDLVQNSEGRAGDTQGGSALGHHSPPEPEVPGEEDPAAVAFQGYLRQTRCAEEKATKTGCLEEESPLTDGLGPKFGRCLVDEAGLHPPALAKGYLKQDPLEMTLASSGAPTGQWNQPTEEWSLLALSSCSDLGISDWSFAHDLAPLGCVAAPGGLLGSFNSDLVTLPLISSLQSSE

SEQ ID NO: 64229 - protein, 2207 aa, Homo sapiens
RESRLPFLFTLVALLPPGALCEVWTQRLHGGSAPLPQDRGFLVVQGDPRELRLWARGDARGASRADEKPLRRKRSAALQPEPIKVYGQVSLNDSHNQMVVHWAGEKSNVIVALARDSLALARPKSSDVYVSYDYGKSFKKISDKLNFGLGNRSEAVIAQFYHSPADNKRYIFADAYAQYLWITFDFCNTLQGFSIPFRAADLLLHSKASNLLLGFDRSHPNKQLWKSDDFGQTWIMIQEHVKSFSWGIDPYDKPNTIYIERHEPSGYSTVFRSTDFFQSRENQEVILEEVRDFQLRDKYMFATKVVHLLGSEQQSSVQLWVSFGRKPMRAAQFVTRHPINEYYIADASEDQVFVCVSHSNNRTNLYISEAEGLKFSLSLENVLYYSPGGAGSDTLVRYFANEPFADFHRVEGLQGVYIATLINGSMNEENMRSVITFDKGGTWEFLQAPAFTGYGEKINCELSQGCSLHLAQRLSQLLNLQLRRMPILSKESAPGLIIATGSVGKNLASKTNVYISSSAGARWREALPGPHYYTWGDHGGIITAIAQGMETNELKYSTNEGETWKTFIFSEKPVFVYGLLTEPGEKSTVFTIFGSNKENVHSWLILQVNATDALGVPCTENDYKLWSPSDERGNECLLGHKTVFKRRTPHATCFNGEDFDRPVVVSNCSCTREDYECDFGFKMSEDLSLEVCVPDPEFSGKSYSPPVPCPVGSTYRRTRGYRKISGDTCSGGDVEARLEGELVPCPLAEENEFILYAVRKSIYRYDLASGATEQLPLTGLRAAVALDFDYEHNCLYWSDLALDVIQRLCLNGSTGQEVIINSGLETVEALAFEPLSQLLYWVDAGFKKIEVANPDGDFRLTIVNSSVLDRPRALVLVPQEGVMFWTDWGDLKPGIYRSNMDGSAAYHLVSEDVKWPNGISVDDQWIYWTDAYLECIERITFSGQQRSVILDNLPHPYAIAVFKNEIYWDDWSQLSIFRASKYSGSQMEILANQLTGLMDMKIFYKGKNTGSNACVPRPCSLLCLPKANNSRSCRCPEDVSSSVLPSGDLMCDCPQGYQLKNNTCVKQENTCLRNQYRCSNGNCINSIWWCDFDNDCGDMSDERNCPTTICDLDTQFRCQESGTCIPLSYKCDLEDDCGDNSDESHCEMHQCRSDEYNCSSGMCIRSSWVCDGDNDCRDWSDEANCTAIYHTCEASNFQCRNGHCIPQRWACDGDTDCQDGSDEDPVNCEKKCNGFRCPNGTCIPSSKHCDGLRDCSDGSDEQHCEPLCTHFMDFVCKNRQQCLFHSMVCDGIIQCRDGSDEDAAFAGCSQDPEFHKVCDEFGFQCQNGVCISLIWKCDGMDDCGDYSDEANCENPTEAPNCSRYFQFRCENGHCIPNRWKCDRENDCGDWSDEKDCGDSHILPFSTPGPSTCLPNYYRCSSGTCVMDTWVCDGYRDCADGSDEEACPLLANVTAASTPTQLGRCDRFEFECHQPKTCIPNWKRCDGHQDCQDGRDEANCPTHSTLTCMSREFQCEDGEACIVLSERCDGFLDCSDESDEKACSDELTVYKVQNLQWTADFSGDVTLTWMRPKKMPSASCVYNVYYRVVGESIWKTLETHSNKTNTVLKVLKPDTTYQVKVQVQCLSKAHNTNDFVTLRTPEGLPDAPRNLQLSLPREAEGVIVGHWAPPIHTHGLIREYIVEYSRSGSKMWASQRAASNFTEIKNLLVNTLYTVRVAAVTSRGIGNWSDSKSITTIKGKVIPPPDIHIDSYGENYLSFTLTMESDIKVNGYVVNLFWAFDTHKQERRTLNFRGSILSHKVGNLTAHTSYEISAWAKTDLGDSPLAFEHVMTRGVRPPAPSLKAKAINQTAVECTWTGPRNVVYGIFYATSFLDLYRNPKSLTTSLHNKTVIVSKDEQYLFLVRVVVPYQGPSSDYVVVKMIPDSRLPPRHLHVVHTGKTSVVIKWESPYDSPDQDLLYAVAVKDLIRKTDRSYKVKSRNSTVEYTLNKLEPGGKYHIIVQLGNMSKDSSIKITTVSLSAPDALKIITENDHVLLFWKSLALKEKHFNESRGYEIHMFDSAMNITAYLGNTTDNFFKISNLKMGHNYTFTVQARCLFGNQICGEPAILLYDELGSGADASATQAARSTDVAAVVVPILFLILLSLGVGFAILYTKHRRLQSSFTAFANSHYSSRLGSAIFSSGDDLGEDDEDAPMITGFSDDVPMVIA

SEQ ID NO: 64230 - protein, 19 aa, Homo sapiens
VVFWGKPFDLLAILFNMAV

SEQ ID NO: 64231 - protein, 11 aa, Homo sapiens
TTLLLSLCTCV

SEQ ID NO: 64232 - protein, 566 aa, Homo sapiens
IPCPGRPRLGSAPSPRSQPPLCPAAASPVSGSMFSWVSKDARRKKEPELFQTVAEGLRQLYAQKLLPLEEHYRFHEFHSPALEDADFDNKPMVLLVGQYSTGKTTFIRHLIEQDFPGMRIGPEPTTDSFIAVMHGPTEGVVPGNALVVDPRRPFRKLNAFGNAFLNRFMCAQLPNPVLDSISIIDTPGILSGEKQRISRGYDFAAVLEWFAERVDRIILLFDAHKLDISDEFSEVIKALKNHEDKIRVVLNKADQIETQQLMRVYGALMWSLGKIINTPEVVRVYIGSFWSHPLLIPDNRKLFEAEEQDLFKDIQSLPRNAALRKLNDLIKRARLAKVHAYIISSLKKEMPNVFGKESKKKELVNNLGEIYQKIEREHQISPGDFPSLRKMQELLQTQDFSKFQALKPKLLDTVDDMLANDIARLMVMVRQEESLMPSQVVKGGAFDGTMNGPFGHGYGEGAGEGIDDVEWVVGKDKPTYDEIFYTLSPVNGKITGANAKKEMVKSKLPNTVLGKIWKLADVDKDGLLDDEEFALANHLIKVKLEGHELPADLPPHLVPPSKRRHE

SEQ ID NO: 64233 - protein, 521 aa, Homo sapiens
IATGTGNWFSALALGVTLLKCLLIPTYHSTDFEVHRNWLAITHSLPISQWYYEATSEWTLDYPPFFAWFEYILSHVAKYFDQEMLNVHNLNYSSSRTLLFQRFSVIFMDVLFVYAVRECCKCIDGKKVGKELTEKPKFILSVLLLWNFGLLIVDHIHFQYNGFLFGLMLLSIARLFQKRHMEGAFLFAVLLHFKHIYLYVAPAYGVYLLRSYCFTANKPDGSIRWKSFSFVRVISLGLVVFLVSALSLGPFLALNQLPQVFSRLFPFKRGLCHAYWAPNFWALYNALDKVLSVIGLKLKFLDPNNIPKASMTSGLVQQFQHTVLPSVTPLATLICTLIAILPSIFCLWFKPQGPRGFLRCLTLCALSSFMFGWHVHEKAILLAILPMSLLSVGKAGDASIFLILTTTGHYSLFPLLFTAPELPIKILLMLLFTIYSISSLKTLFRKEKPLFNWMETFYLLGLGPLEVCCEFVFPFTSWKVKYPFIPLLLTSVYCAVGITYAWFKLYVSVLIDSAIGKTKKQ

SEQ ID NO: 64234 - protein, 103 aa, Homo sapiens
IFLLLHLTVFYFFLFSSSINQSADSGGTDNFVLISQLKEEVMSLKRLLQQRDQTILEKDKKLTELKADFQYQESNLRTKMNSMEKAHKETVEQLQVTTIIYVK

SEQ ID NO: 64235 - protein, 131 aa, Homo sapiens
LLLAALLLLLSGDGAVRCDTPANCTYLDLLGTWVFQVGSSGSQRDVNCSVMGPQEKKVVVYLQKLDTAYDDLGNSGHFTIIYNQGFEIVLNDYKWFAFFKDVTDFISHLFMQLGTVGIYDLPHLRNKLVIK

SEQ ID NO: 64236 - protein, 135 aa, Homo sapiens
LLLAALLLLLSGDGAVRCDTPANCTYLDLLGTWVFQVGSSGSQRDVNCSVMGPQEKKVVVYLQKLDTAYDDLGNSGHFTIIYNQGFEIVLNDYKWFAFFKDVTDFISHLFMQLGTVGIYDLPHLRNKLAMNRRWG

SEQ ID NO: 64237 - protein, 457 aa, Homo sapiens
LLLAALLLLLSGDGAVRCDTPANCTYLDLLGTWVFQVGSSGSQRDVNCSVMGPQEKKVVVYLQKLDTAYDDLGNSGHFTIIYNQGFEIVLNDYKWFAFFKYKEEGSKVTTYCNETMTGWVHDVLGRNWACFTGKKVGTASENVYVNIAHLKNSQEKYSNRLYKYDHNFVKAINAIQKSWTATTYMEYETLTLGDMIRRSGGHSRKIPRPKPAPLTAEIQQKILHLPTSWDWRNVHGINFVSPVRNQASCGSCYSFASMGMLEARIRILTNNSQTPILSPQEVVSCSQYAQGCEGGFPYLIAGKYAQDFGLVEEACFPYTGTDSPCKMKEDCFRYYSSEYHYVGGFYGGCNEALMKLELVHHGPMAVAFEVYDDFLHYKKGIYHHTGLRDPFNPFELTNHAVLLVGYGTDSASGMDYWIVKNSWGTGWGENGYFRIRRGTDECAIESIAVAATPIPKL

SEQ ID NO: 64238 - protein, 178 aa, Homo sapiens
LDEFRWEMEHSTFLSGLVLATLLSQVSPFKIPIEELEDRVFVNCNTSITWVEGTVGTLLSDITRLDLGKRILDPRGIYRCNGTDIYKDKESTVQVHYRMCQSCVELDPATVAGIIVTDVIATLLLALGVFCFAGHETGRLSGAADTQALLRNDQVYQPLRDRDDAQYSHLGGNWARNK

SEQ ID NO: 64239 - protein, 8 aa, Homo sapiens
LFCSVLFF

SEQ ID NO: 64240 - protein, 274 aa, Homo sapiens
ISNWAQKGAAWAGTMARPHPWWLCVLGTLVGLSATPAPKSCPERHYWAQGKLCCQMCEPGTFLVKDCDQHRKAAQCDPCIPGVSFSPDHHTRPHCESCRHCNSGLLVRNCTITANAECACRNGWQCRDKECTECDPLPNPSLTARSSQALSPHPQPTHLPYVSEMLEARTAGHMQTLADFRQLPARTLSTHWPPQRSLCSSDFIRILVIFSGMFLVFTLAGALFLHQRRKYRSNKGESPVEPAEPCHYSCPREEEGSTIPIQEDYRKPEPACSP

SEQ ID NO: 64241 - protein, 19 aa, Homo sapiens
LAKRMSLSSVLWAALSFSV

SEQ ID NO: 64242 - protein, 339 aa, Homo sapiens
IAFTTMALLTIMEFSVYQDTWMKYEYEVDKDFSSKLRINIDITVAMKCQYVGADVLDLAETMVASADGLVYEPTVFDLSPQQKEWQRMLQLIQSRLQEEHSLQDVIFKSAFKSTSTALPPREDDSSQSPNACRIHGHLYVNKVAGNFHITVGKAIPHPRGHAHLAALVNHESYNFSHRIDHLSFGELVPAIINPLDGTEKIAIDHNQMFQYFITVVPTKLHTYKISADTHQFSVTERERIINHAAGSHGVSGIFMKYDLSSLMVTVTEEHMPFWQFFVRLCGIVGGIFSTTGMLHGIGKFIVEIICCRFRLGSYKPVNSVPFEDGHTDNHLPLLENNTH

SEQ ID NO: 64243 - protein, 71 aa, Homo sapiens
IVHALTLVWRGRSFALSISLKTRMHPSSSVVIYRRRMEKDVPMLPQSQRRKMGCPSVLNMSVGMPWHFMLK

SEQ ID NO: 64244 - protein, 66 aa, Homo sapiens
ILLFLDFFLIKRLLQCLSCDSGMDICPRLSCWGPSMSLQVPSWSPSPALEAWLRASWRRSFGSMLS

SEQ ID NO: 64245 - protein, 1098 aa, Homo sapiens
VSPVEPPPPPPGARCGRSPGRAMGILSITDQPPLVQAIFSRDVEEVRSLLSQKENINVLDQERRTPLHAAAYVGDVPILQLLLMSGANVNAKDTLWLTPLHRAAASRNEKVLGLLLAHSADVNARDKLWQTPLHVAAANRATKCAEALAPLLSSLNVADRSGRSALHHAVHSGHLETVNLLLNKGASLNVCDKKERQPLHWAAFLGHLEVLKLLVARGADLGCKDRKGYGLLHTAAASGQIEVVKYLLRMGAEIDEPNAFGNTALHIACYLGQDAVAIELVNAGANVNQPNDKGFTPLHVAAVSTNGALCLELLVNNGADVNYQSKEGKSPLHMAAIHGRFTRSQILIQNGSEIDCADKFGNTPLHVAARYGHELLISTLMTNGADTARRGIHDMFPLHLAVLFGFSDCCRKLLSSGQLYSIVSSLSNEHVLSAGFDINTPDNLGRTCLHAAASGGNVECLNLLLSSGADLRRRDKFGRTPLHYAAANGSYQCAVTLVTAGAGVNEADCKGCSPLHYAAASDTYRRAEPHTPSSHDAEEDEPLKESRRKEAFFCLEFLLDNGADPSLRDRQGYTAVHYAAAYGNRQNLELLLEMSFNCLEDVESTIPVSPLHLAAYNGHCEALKTLAETLVNLDVRDHKGRTALFLATERGSTECVEVLTAHGASALIKERKRKWTPLHAAAASGHTDSLHLLIDSGERADITDVMDAYGQTPLMLAIMNGHVDCVHLLLEKGSTADAADLRGRTALHRGAVTGCEDCLAALLDHDAFVLCRDFKGRTPIHLASACGHTAVLRTLLQAALSTDPLDAGVDYSGYSPMHWASYTGHEDCLELLLEHSPFSYLEGNPFTPLHCAVINNQDSTTEMLLGALGAKIVNSRDAKGRTPLHAAAFADNVSGLRMLLQHQAEVNATDHTGRTALMTAAENGQTAAVEFLLYRGKADLTVLDENKNTALHLACSKGHEKCALMILAETQDLGLINATNSALQMPLHIAARNGLASVVQALLSHGATVLAVDEEGHTPALACAPNKDVADCLALILSTMKPFPPKDAVSPFSFSLLKNCSIAAAKTVGGCGALPHGASCPYSQERPGAIGLDGCYSE

SEQ ID NO: 64246 - protein, 810 aa, Homo sapiens
LALLPLRLGISGMVALPMVLVLLLVLSRGESELDAKIPSTGDATEWRNPHLSMLGSCQPAPSCQKCILSHPSCAWCKQLNFTASGEAEARRCARREELLARGCPLEELEEPRGQQEVLQDQPLSQGARGEGATQLAPQRVRVTLRPGEPQQLQVRFLRAEGYPVDLYYLMDLSYSMKDDLERVRQLGHALLVRLQEVTHSVRIGFGSFVDKTVLPFVSTVPSKLRHPCPTRLERCQSPFSFHHVLSLTGDAQAFEREVGRQSVSGNLDSPEGGFDAILQAALCQEQIGWRNVSRLLVFTSDDTFHTAGDGKLGGIFMPSDGHCHLDSNGLYSRSTEFDYPSVGQVAQALSAANIQPIFAVTSAALPVYQELSKLIPKSAVGELSEDSSNVVQLIMDAYNSLSSTVTLEHSSLPPGVHISYESQCEGPEKREGKAEDRGQCNHVRINQTVTFWVSLQATHCLPEPHLLRLRALGFSEELIVELHTLCDCNCSDTQPQAPHCSDGQGHLQCGVCSCAPGRLGRLCECSVAELSSPDLESGCRAPNGTGPLCSGKGHCQCGRCSCSGQSSGHLCECDDASCERHEGILCGGFGRCQCGVCHCHANRTGRACECSGDMDSCISPEGGLCSGHGRCKCNRCQCLDGYYGALCDQCPGCKTPCERHRDCAECGAFRTGPLATNCSTACAHTNVTLALAPILDDGWCKERTLDNQLFFFLVEDDARGTVVLRVRPQEKGADHTQAIVLGCVGGIVAVGLGLVLAYRLSVEIYDRREYSRFEKEQQQLNWKQDSNPLYKSAITTTINPRFQEADSPTL

SEQ ID NO: 64247 - protein, 13 aa, Homo sapiens
MTISRLWLVMFIL

SEQ ID NO: 64248 - protein, 9 aa, Homo sapiens
LIAWGVLIT

SEQ ID NO: 64249 - protein, 108 aa, Homo sapiens
IGVHGYVLVYSVTSLHSFQVIESLYQKLHEGHGKTRVPVVLVGNKADLSPEREVQAVEGKKLAESWGATFMESSARENQLTQGIFTKVIQEIARVENSYGQERRCHLM

SEQ ID NO: 64250 - protein, 44 aa, Homo sapiens
IIGNCVCLLVLSSALPVFSRTLGLDRLPLPVSGFPQASRKTQHQ

SEQ ID NO: 64251 - protein, 406 aa, Homo sapiens
LVSVPFRTQSSCIQGGETGDRVFGPRADPLCRCKPLQPEAVRSSPRHLRTLPLLASRLVMARFWVCVAGAGFFLAFLVLHSRFCGSPVLRNFTFAVSWRTEKILYRLDVGWPKHPEYFTGTTFCVAVDSLNGLVYIGQRGDNIPKILVFTEDGYFLRAWNYTVDTPHGIFAASTLYEQSVWITDVGSGFFGHTVKKYSSFGDLVQVLGTPGKKGTSLNPLQFDNPAELYVEDTGDIYIVDGDGGLNNRLIKLSQDFMILWLHGENGTGPAKFNIPHSVTLDSAGRVWVADRGNKRIQVFDKDTGEWLGAWNNCFTEEGPSSVRFTPDGKYLIVAQLNLSRLSVVAAPPVGSIGECSVISTIQLADQVLPHLLEVDRKTGAVYVAEIGAKQVQKYVPLNSYVPSFGS

SEQ ID NO: 64252 - protein, 28 aa, Homo sapiens
ILMTSFFLEIVLMDISSLTAKIQNIRSF

SEQ ID NO: 64253 - protein, 12 aa, Homo sapiens
LVCFAHFFSFLY

SEQ ID NO: 64254 - protein, 16 aa, Homo sapiens
LWLSICSLLCLYGPIG

SEQ ID NO: 64255 - protein, 49 aa, Homo sapiens
MLLEHLLIILWMQLTWVSGQQLNQSPQSMFTQEGEDVSMNCTSSSIFNT

SEQ ID NO: 64256 - protein, 41 aa, Homo sapiens
MFGAAARSADLVLLEKNLQAAHGCRYSTSMPWTLLWEDPII

SEQ ID NO: 64257 - protein, 565 aa, Homo sapiens
IMLILFAWGTLLFYIGGHLVRDNDHPDHSSRELSKILAKLERLKQQNEDLRRMAESLRIPEGPIDQGPAIGRVRVLEEQLVKAKEQIENYKKQTRNGLGKDHEILRRRIENGAKELWFFLQSELKKLKNLEGNELQRHADEFLLDLGHHERSIMTDLYYLSQTDGAGDWREKEAKDLTELVQRRITYLQNPKDCSKAKKLVCNINKGCGYGCQLHHVVYCFMIAYGTQRTLILESQNWRYATGGWETVFRPVSETCTDRSGISTGHWSGEVKDKNVQVVELPIVDSLHPRPPYLPLAVPEDLADRLVRVHGDPAVWWVSQFVKYLIRPQPWLEKEIEEATKKLGFKHPVIGVHVRRTDKVGTEAAFHPIEEYMVHVEEHFQLLARRMQVDKKRVYLATDDPSLLKEAKTKYPNYEFISDNSISWSAGLHNRYTENSLRGVILDIHFLSQADFLVCTFSSQVCRVAYEIMQTLHPDASANFHSLDDIYYFGGQNAHNQIAIYAHQPRTADEIPMEPGDIIGVAGNHWDGYSKGVNRKLGRTGLYPSYKVREKIETVKYPTYPEAEK

SEQ ID NO: 64258 - protein, 48 aa, Homo sapiens
VEAVSAPIPEVSAGSRVNQLPADFRILLDFKFFLFKKTWTDKRCAMAG

SEQ ID NO: 64259 - protein, 45 aa, Homo sapiens
LLLLLLLLLACLLPSSEEDYSCTQANNFARSFYPMLRYTNGPPPT

SEQ ID NO: 64260 - protein, 22 aa, Homo sapiens
TPFLITSSWCSRLAALTFLLAG

SEQ ID NO: 64261 - protein, 7 aa, Homo sapiens
LFLVFII

SEQ ID NO: 64262 - protein, 391 aa, Homo sapiens
LFSWGCPLLFVLCVEMANSANTNTVPKLYRSVIEDVINDVRDIFLDDGVDEQVLMELKTLWENKLMQSRAVDGFHSEEQQLLLQVQQQHQPQQQQHHHHHHHQQAQPQQTVPQQAQTQQVLIPASQQATAPQVIVPDSKLIQHMNASNMSAAATAATLALPAGVTPVQQILTNSGQLLQVVRAANGAQYIFQPQQSVVLQQQVIPQMQPGGVQAPVIQQVLAPLPGGISPQTGVIIQPQQILFTGNKTQVIPTTVAAPTPAQAQITATGQQQPQAQPAQTQAPLVLQVDGTGDTSSEEDEDEEEDYDDDEEEDKEKDGAEDGQVEEEPLNSEDDVSDEEGQELFDTENVVVCQYDKIHRSKNKWKFHLKDGIMNLNGRDYIFSKAIGDAEW

SEQ ID NO: 64263 - protein, 30 aa, Homo sapiens
LYSQLFSFCKFFFFAVIPTLVTRSFSANCS

SEQ ID NO: 64264 - protein, 21 aa, Homo sapiens
VRSPLPPVVSSLAFWLCHALL

SEQ ID NO: 64265 - protein, 30 aa, Homo sapiens
MILSAAIFITLLGLLGYLHFVKIDQETVNH

SEQ ID NO: 64266 - protein, 556 aa, Homo sapiens
KMAAAAWLQVLPVILLLLGAHPSPLSFFSAGPATVAAADRSKWHIPIPSGKNYFSFGKILFRNTTIFLKFDGEPCDLSLNITWYLKSADCYNEIYNFKAEEVELYLEKLKEKRGLSGKYQTSSKLFQNCSELFKTQTFSGDFMHRLPLLGEKQEAKENGTNLTFIGDKTAMHEPLQTWQDAPYIFIVHIGISSSKESSKENSLSNLFTMTVEVKGPYEYLTLEDYPLMIFFMVMCIVYVLFGVLWLAWSACYWRDLLRIQFWIGAVIFLGMLEKAVFYAEFQNIRYKGESVQGALILAELLSAVKRSLARTLVIIVSLGYGIVKPRLGVTLHKVVVAGALYLLFSGMEGVLRVTGAQTDLASLAFIPLAFLDTALCWWIFISLTQTMKLLKLRRNIVKLSLYRHFTNTLILAVAASIVFIIWTTMKFRIVTCQSDWRELWVDDAIWRLLFSMILFVIMVLWRPSANNQRFAFSPLSEEEEEDEQKEPMLKESFEGMKMRSTKQEPNGNSKVNKAQEDDLKWVEENVPSSVTDVALPALLDSDEERMITHFERSKME

SEQ ID NO: 64267 - protein, 296 aa, Homo sapiens
LAPAHSLLGLLLGRMSGSSLPSALALSLLLVSGSLLPGPGAAQNEPRIVTSEEVIIRDSPVLPVTLQCNLTSSSHTLTYSYWTKNGVELSATRKNASNMEYRINKPRAEDSGEYHCVYHFVSAPKANATIEVKAAPDITGHKRSENKNEGQDATMYCKSVGYPHPDWIWRKKENGMPMDIVNTSGRFFIINKENYTELNIVNLQITEDPGEYECNATNAIGSASVVTVLRVRSHLAPLWPFLGILAEIIILVVIIVVYEKRKRPDEVPDDDEPAGPMKTNSTNNHKDKNLRQRNTN

SEQ ID NO: 64268 - protein, 226 aa, Homo sapiens
KWLLFLVPAMSCAGAAAAPRLWRLRPGARRSLSAYGRRTSVRFRSSGMTLDNISRAAVDRIIRVDHAGEYGANRIYAGQMAVLGRTSVGPVIQKMWDQEKDHLKKFNELMVTFRVRPTVLMPLWNVLGFALGAGTALLGKEGAMACTVAVEESIAHHYNNQIRTLMEEDPEKYEELLQLIKKFRDEELEHHDIGLDHDAELAPAYAVLKSIIQAGCRVAIYLSERL

SEQ ID NO: 64269 - protein, 13 aa, Homo sapiens
IFLLLVVFLPFPC

SEQ ID NO: 64270 - protein, 1159 aa, Homo sapiens
RFWLLPAMALRVLLLTALTLCHGFNLDTENAMTFQENARGFGQSVVQLQGSRVVVGAPQEIVAANQRGSLYQCDYSTGSCEPIRLQVPVEAVNMSLGLSLAATTSPPQLLACGPTVHQTCSENTYVKGLCFLFGSNLRQQPQKFPEALRGCPQEDSDIAFLIDGSGSIIPHDFRRMKEFVSTVMEQLKKSKTLFSLMQYSEEFRIHFTFKEFQNNPNPRSLVKPITQLLGRTHTATGIRKVVRELFNITNGARKNAFKILVVITDGEKFGDPLGYEDVIPEADREGVIRYVIGVGDAFRSEKSRQELNTIASKPPRDHVFQVNNFEALKTIQNQLREKIFAIEGTQTGSSSSFEHEMSQEGFSAAITSNGPLLSTVGSYDWAGGVFLYTSKEKSTFINMTRVDSDMNDAYLGYAAAIILRNRVQSLVLGAPRYQHIGLVAMFRQNTGMWESNANVKGTQIGAYFGASLCSVDVDSNGSTDLVLIGAPHYYEQTRGGQVSVCPLPRGRARWQCDAVLYGEQGQPWGRFGAALTVLGDVNGDKLTDVAIGAPGEEDNRGAVYLFHGTSGSGISPSHSQRIAGSKLSPRLQYFGQSLSGGQDLTMDGLVDLTVGAQGHVLLLRSQPVLRVKAIMEFNPREVARNVFECNDQVVKGKEAGEVRVCLHVQKSTRDRLREGQIQSVVTYDLALDSGRPHSRAVFNETKNSTRRQTQVLGLTQTCETLKLQLPNCIEDPVSPIVLRLNFSLVGTPLSAFGNLRPVLAEDAQRLFTALFPFEKNCGNDNICQDDLSITFSFMSLDCLVVGGPREFNVTVTVRNDGEDSYRTQVTFFFPLDLSYRKVSTLQNQRSQRSWRLACESASSTEVSGALKSTSCSINHPIFPENSEVTFNITFDVDSKASLGNKLLLKANVTSENNMPRTNKTEFQLELPVKYAVYMVVTSHGVSTKYLNFTASENTSRVMQHQYQVSNLGQRSLPISLVFLVPVRLNQTVIWDRPQVTFSENLSSTCHTKERLPSHSDFLAELRKAPVVNCSIAVCQRIQCDIPFFGIQEEFNATLKGNLSFDWYIKTSHNHLLIVSTAEILFNDSVFTLLPGQGAFVRSQTETKVEPFEVPNPLPLIVGSSVGGLLLLALITAALYKLGFFKRQYKDMMSEGGPPGAEPQ

SEQ ID NO: 64271 - protein, 27 aa, Homo sapiens
LDFFFFFFCTTLTRLLHLFFYEICEWQ

SEQ ID NO: 64272 - protein, 54 aa, Homo sapiens
VLPLSCFLVALIIWCYLREESEADQWLRQVWGEVPEPSDRSEEPETPAAYRART

SEQ ID NO: 64273 - protein, 170 aa, Homo sapiens
IMICLVLTIFANLFPAACTGAHERTFLAVKPDGVQRRLVGEIVRRFERKGFKLVALKLVQASEELLREHYAELRERPFYGRLVKYMASGPVVAMVWQGLDVVRTSRALIGATNPADAPPGTIRGDFCIEVGKNLIHGSDSVESARREIALWFRADELLCWEDSAGHWLYE

SEQ ID NO: 64274 - protein, 61 aa, Homo sapiens
MSLWSCLLFLCTPSPTTTSPSPDPSQPLRRQMSLWTPTSLNLIPTMPQMMTLCLRTLPGFG

SEQ ID NO: 64275 - protein, 37 aa, Homo sapiens
LCVLQIVTLMVAPMAWLEDKQIEDIGNGVIKMIDHEA

SEQ ID NO: 64276 - protein, 318 aa, Homo sapiens
KKRFNSEILCAALWGVNLLVGTENGLMLLDRSGQGKVYGLIGRRRFQQMDVLEGLNLLITISGKRNKLRVYYLSWLRNKILHNDPEVEKKQGWTTVGDMEGCGHYRVVKYERIKFLVIALKSSVEVYAWAPKPYHKFMAFKSFADLPHRPLLVDLTVEEGQRLKVIYGSSAGFHAVDVDSGNSYDIYIPVHIQSQITPHAIIFLPNTDGMEMLLCYEDEGVYVNTYGRIIKDVVLQWGEMPTSVAYICSNQIMGWGEKAIEIRSVETGHLDGVFMHKRAQRLKFLCERNDKVFFASVRSGGSSQVYFMTLNRNCIMNW

SEQ ID NO: 64277 - protein, 211 aa, Homo sapiens
IAAGLYLLLGGFSFCQVRLNKRKEYMVGEIFSAAGAAFTKLGELTMQLHPVADSSPAGAKWTETEIEMLRAAVKRFGDDLNHISCVIKERTVAQIKATVKRKVYEDSGIPLPAESPKKGPKKVASGVLSPPPAAPPPSSSSVPEAGGPPIKKQKADVTLSALNDSDANSDVVDIEGLGETPPAKKLNFDQDSLTLDSGLLMTSADPPLLSC

SEQ ID NO: 64278 - protein, 38 aa, Homo sapiens
VKVLTLISTIGWFTMTSSETLSTGQKLRRPFLGGRWEP

SEQ ID NO: 64279 - protein, 85 aa, Homo sapiens
KACKTAPALSCKTCPRSYEPHSALFPRPWSPMGPTTRSPTDTLTSEHSKQARRCRRSFGTVSRAIFADGKNNREIDDHSLCTRRK

SEQ ID NO: 64280 - protein, 54 aa, Homo sapiens
LALLTAALILYRRRQSIERGAFEGARYSRSSSSPTEATEKNILVSDMEMNEQQE

SEQ ID NO: 64281 - protein, 334 aa, Homo sapiens
LPLRLCVCLCVCLAISEFASASRTKPPRHHHLENPSPSPMAGYLPPKGYAPSPPPPYPVTPGYPEPALHPGPGQAPVPAQVPAPAPGFALFPSPGPVALGSAAPFLPLPGVPSGLEFLVQIDQILIHQKAERVETFLGWETCNRYELRSGAGQPLGQAAEESNCCARLCCGARRPLRVRLADPGDREVLRLLRPLHCGCSCCPCGLQEMEVQAPPGTTIGHVLQTWHPFLPKFSIQDADRQTVLRVVGPCWTCGCGTDTNFEVKTRDESRSVGRISKQWGGLVREALTDADDFGLQFPLDLDVRVKAVLLGATFLIDYMFFEKRGGAGPSAVTS

SEQ ID NO: 64282 - protein, 28 aa, Homo sapiens
ILMTSFFLEIVLMDISSLTAKIQNIRSF

SEQ ID NO: 64283 - protein, 123 aa, Homo sapiens
IQNSSLFPILLHFHIMEAMLYALLNKTFAQDGQHQVLSMNRNAVGKHFELMIGDSRTSGKELVKQFLFDSILKADPRVFFPSDKIVHYRQMFLSTELQRVEELYDSLLQAIAFYELAVFDSQP

SEQ ID NO: 64284 - protein, 13 aa, Homo sapiens
VWVLLSVVWLWDP

SEQ ID NO: 64285 - protein, 23 aa, Homo sapiens
MLMGPSPAAPMTRPPRRPCPGKS

SEQ ID NO: 64286 - protein, 15 aa, Homo sapiens
VRPRRPIPPRGPGRA

SEQ ID NO: 64287 - protein, 278 aa, Homo sapiens
LPEMSSFGYRTLTVALFTLICCPGSDEKVFEVHVRPKKLAVEPKGSLEVNCSTTCNQPEVGGLETSLDKILLDEQAQWKHYLVSNISHDTVLQCHFTCSGKQESMNSNVSVYQPPRQVILTLQPTLVAVGKSFTIECRVPTVEPLDSLTLFLFRGNETLHYETFGKAAPAPQEATATFNSTADREDGHRNFSCLAVLDLMSRGGNIFHKHSAPKMLEIYEPVSDSQMVIIVTVVSVLLSLFVTSVLLCFIFGQHLRQQRMGTYGVRAAWRRLPQAFRP

SEQ ID NO: 64288 - protein, 837 aa, Homo sapiens
RCPGAEARDGAGGSPGSPGSPARAMSLLGDPLQALPPSAAPTGPLLAPPAGATLNRLREPLLRRLSELLDQAPEGRGWRRLAELAGSRGRLRLSCLDLEQCSLKVLEPEGSPSLCLLKLMGEKGCTVTELSDFLQAMEHTEVLQLLSPPGIKITVNPESKAVLAGQFVKLCCRATGHPFVQYQWFKMNKEIPNGNTSELIFNAVHVKDAGFYVCRVNNNFTFEFSQWSQLDVCDIPESFQRSVDGVSESKLQICVEPTSQKLMPGSTLVLQCVAVGSPIPHYQWFKNELPLTHETKKLYMVPYVDLEHQGTYWCHVYNDRDSQDSKKVEIIIDELNNLGHPDNKEQTTDQPLAKDKVALLIGNMNYREHPKLKAPLVDVYELTNLLRQLDFKVVSLLDLTEYEMRNAVDEFLLLLDKGVYGLLYYAGHGYENFGNSFMVPVDAPNPYRSENCLCVQNILKLMQEKETGLNVFLLDMCRKRNDYDDTIPILDALKVTANIVFGYATCQGAEAFEIQHSGLANGIFMKFLKDRLLEDKKITVLLDEVAEDMGKCHLTKGKQALEIRSSLSEKRALTDPIQGTEYSAESLVRNLQWAKAHELPESMCLKFDCGVQIQLGFAAEFSNVMIIYTSIVYKPPEIIMCDAYVTDFPLDLDIDPKDANKGTPEETGSYLVSKDLPKHCLYTRLSSLQKLKEHLVFTVCLSYQYSGLEDTVEDKQEVNVGKPLIAKLDMHRGLGRKTCFQTCLMSNGPYQSSAATSGGAGHYHSLQDPFHGVYHSHPGNPSNVTPADSCHCSRTPDAFISSFAHHASCHFSRSNVPVETTDEIPFSFSDRLRISEK

SEQ ID NO: 64289 - protein, 18 aa, Homo sapiens
MNNAWKENFVILLLWLRM

SEQ ID NO: 64290 - protein, 1290 aa, Homo sapiens
TPPASAALRGHSMTARGLALGLLLLLLCPAQVFSQSCVWYGECGIAYGDKRYNCEYSGPPKPLPKDGYDLVQELCPGFFFGNVSLCCDVRQLQTLKDNLQLPLQFLSRCPSCFYNLLNLFCELTCSPRQSQFLNVTATEDYVDPVTNQTKTNVKELQYYVGQSFANAMYNACRDVEAPSSNDKALGLLCGKDADACNATNWIEYMFNKDNGQAPFTITPVFSDFPVHGMEPMNNATKGCDESVDEVTAPCSCQDCSIVCGPKPQPPPPPAPWTILGLDAMYVIMWITYMAFLLVFFGAFFAVWCYRKRYFVSEYTPIDSNIAFSVNASDKGEASCCDPVSAAFEGCLRRLFTRWGSFCVRNPGCVIFFSLVFITACSSGLVFVRVTTNPVDLWSAPSSQARLEKEYFDQHFGPFFRTEQLIIRAPLTDKHIYQPYPSGADVPFGPPLDIQILHQVLDLQIAIENITASYDNETVTLQDICLAPLSPYNTNCTILSVLNYFQNSHSVLDHKKGDDFFVYADYHTHFLYCVRAPASLNDTSLLHDPCLGTFGGPVFPWLVLGGYDDQNYNNATALVITFPVNNYYNDTEKLQRAQAWEKEFINFVKNYKNPNLTISFTAERSIEDELNRESDSDVFTVVISYAIMFLYISLALGHMKSCRRLLVDSKVSLGIAGILIVLSSVACSLGVFSYIGLPLTLIVIEVIPFLVLAVGVDNIFILVQAYQRDERLQGETLDQQLGRVLGEVAPSMFLSSFSETVAFFLGALSVMPAVHTFSLFAGLAVFIDFLLQITCFVSLLGLDIKRQEKNRLDIFCCVRGAEDGTSVQASESCLFRFFKNSYSPLLLKDWMRPIVIAIFVGVLSFSIAVLNKVDIGLDQSLSMPDDSYMVDYFKSISQYLHAGPPVYFVLEEGHDYTSSKGQNMVCGGMGCNNDSLVQQIFNAAQLDNYTRIGFAPSSWIDDYFDWVKPQSSCCRVDNITDQFCNASVVDPACVRCRPLTPEGKQRPQGGDFMRFLPMFLSDNPNPKCGKGGHAAYSSAVNILLGHGTRVGATYFMTYHTVLQTSADFIDALKKARLIASNVTETMGINGSAYRVFPYSVFYVFYEQYLTIIDDTIFNLGVSLGAIFLVTMVLLGCELWSAVIMCATIAMVLVNMFGVMWLWGISLNAVSLVNLVMSCGISVEFCSHITRAFTVSMKGSRVERAEEALAHMGSSVFSGITLTKFGGIVVLAFAKSQIFQIFYFRMYLAMVLLGATHGLIFLPVLLSYIGPSVNKAKSCATEERYKGTERERLLNF

SEQ ID NO: 64291 - protein, 16 aa, Homo sapiens
MGMVCHSLLLFFVRHT

SEQ ID NO: 64292 - protein, 844 aa, Homo sapiens
LPLLPAAPTMGGRVFLAFCVWLTLPGAETQDSRGCARWCPQNSSCVNATACRCNPGFSSFSEIITTPTETCDDINECATPSKVSCGKFSDCWNTEGSYDCVCSPGYEPVSGAKTFKNESENTCQDVDECQQNPRLCKSYGTCVNTLGSYTCQCLPGFKFIPEDPKVCTDVNECTSGQNPCHSSTHCLNNVGSYQCRCRPGWQPIPGSPNGPNNTVCEDVDECSSGQHQCDSSTVCFNTVGSYSCRCRPGWKPRHGIPNNQKDTVCEDMTFSTWTPPPGVHSQTLSRFFDKVQDLGRDSKTSSAEVTIQNVIKLVDELMEAPGDVEALAPPVRHLIATQLLSNLEDIMRILAKSLPKGPFTYISPSNTELTLMIQERGDKNVTMGQSSARMKLNWAVAAGAEDPGPAVAGILSIQNMTTLLANASLNLHSKKQAELEEIYESSIRGVQLRRLSAVNSIFLSHNNTKELNSPILFAFSHLESSDGEAGRDPPAKDVMPGPRQELLCAFWKSDSDRGGHWATEGCQVLGSKNGSTTCQCSHLSSFAILMAHYDVEDWKLTLITRVGLALSLFCLLLCILTFLLVRPIQGSRTTIHLHLCICLFVGSTIFLAGIENEGGQVGLRCRLVAGLLHYCFLAAFCWMSLEGLELYFLVVRVFQGQGLSTRWLCLIGYGVPLLIVGVSAAIYSKGYGRPRYCWLDFEQGFLWSFLGPVTFIILCNAVIFVTTVWKLTQKFSEINPDMKKLKKARALTITAIAQLFLLGCTWVFGLFIFDDRSLVLTYVFTILNCLQGAFLYLLHCLLNKKVREEYRKWACLVAGGSKYSEFTSTTSGTGHNQTRALRASESGI

SEQ ID NO: 64293 - protein, 140 aa, Homo sapiens
KRDHRQVLSSLLSGALAGALAKTAVAPLDRTKIIFQVSSKRFSAKEAFRVLYYTYLNEGFLSLWRGNSATMVRVVPYAAIQFSAHEEYKRILGSYYGFRGEALPPWPRLFAGALAGTTAASLTYPLDLVRARMAVTPKEM

SEQ ID NO: 64294 - protein, 44 aa, Homo sapiens
LILFLGASMVYLIRVARRNQERALRTVWSSGDDKEQLVKNTYVL

SEQ ID NO: 64295 - protein, 368 aa, Homo sapiens
LDLSPIAAMIPLLLAALLCVPAGALTCYGDSGQPVDWFVVYKLPALRGSGEAAQRGLQYKYLDESSGGWRDGRALINSPEGAVGRSLQPLYRSNTSQLAFLLYNDQPPQPSKAQDSSMRGHTKGVLLLDHDGGFWLVHSVPNFPPPASSAAYSWPHSACTYGQTLLCVSFPFAQFSKMGKQLTYTYPWVYNYQLEGIFAQEFPDLENVVKGHHVSQEPWNSSITLTSQAGAVFQSFAKFSKFGDDLYSGWLAAALGTNLQVQFWHKTVGILPSNCSDIWQVLNVNQIAFPGPAGPSFNSTEDHSKWCVSPKGPWTCVGDMNRNQGEEQRGGGTLCAQLPALWKAFQPLVKNYQPCNGMARKPSRAYKI

SEQ ID NO: 64296 - protein, 640 aa, Homo sapiens
TAMDWLPWSLLLFSLMCETSAFYVPGVAPINFHQNDPVEIKAVKLTSSRTQLPYEYYSLPFCQPSKITYKAENLGEVLRGDRIVNTPFQVLMNSEKKCEVLCSQSNKPVTLTVEQSRLVAERITEDYYVHLIADNLPVATRLELYSNRDSDDKKKEKDVQFEHGYRLGFTDVNKIYLHNHLSFILYYHREDMEEDQEHTYRVVRFEVIPQSIRLEDLKADEKSSCTLPEGTNSSPQEIDPTKENQLYFTYSVHWEESDIKWASRWDTYLTMSDVQIHWFSIINSVVVVFFLSGILSMIIIRTLRKDIANYNKEDDIEDTMEESGWKLVHGDVFRPPQYPMILSSLLGSGIQLFCMILIVIFVAMLGMLSPSSRGALMTTACFLFMFMGVFGGFSAGRLYRTLKGHRWKKGAFCTATLYPGVVFGICFVLNCFIWGKHSSGAVPFPTMVALLCMWFGISLPLVYLGYYFGFRKQPYDNPVRTNQIPRQIPEQRWYMNRFVGILMAGILPFGAMFIELFFIFSAIWENQFYYLFGFLFLVFIILVVSCSQISIVMVYFQLCAEDYRWWWRNFLVSGGSAFYVLVYAIFYFVNKLDIVEFIPSLLYFGYTALMVLSFWLLTGTIGFYAAYMFVRKIYAAVKID

SEQ ID NO: 64297 - protein, 379 aa, Homo sapiens
LSVSFLLLLLPLPGMPAGSWDPAGYLLYCPCMGRFGNQADHFLGSLAFAKLLNRTLAVPPWIEYQHHKPPFTNLHVSYQKYFKLEPLQAYHRVISLEDFMEKLAPTHWPPEKRVAYCFEVAAQRSPDKKTCPMKEGNPFGPFWDQFHVSFNKSELFTGISFSASYREQWSQRFSPKEHPVLALPGAPAQFPVLEEHRPLQKYMVWSDEMVKTGEAQIHAHLVRPYVGIHLRIGSDWKNACAMLKDGTAGSHFMASPQCVGYSRSTAAPLTMTMCLPDLKEIQRAVKLWVRSLDAQSVYVATDSESYVPELQQLFKGKVKVVSLKPEVAQVDLYILGQADHFIGNCVSSFTAFVKRERDLQGRPSSFFGMDRPPKLRDEF

SEQ ID NO: 64298 - protein, 58 aa, Homo sapiens
MDPNCSCTTGGSCTCAGSCKCKECKCTSCKKSCCSCCPMGCAKCAQGCVCKGACSCCV

SEQ ID NO: 64299 - protein, 16 aa, Homo sapiens
RRIHTIMMHGLITCAW

SEQ ID NO: 64300 - protein, 28 aa, Homo sapiens
LIWLLGCYLEIQALKMPASLDLEDDLDK

SEQ ID NO: 64301 - protein, 53 aa, Homo sapiens
LTWPLLLVKEIHLLFYQVCVVSAQHGCGHPFARSPNCGGDHGHSPLLLWIDHS

SEQ ID NO: 64302 - protein, 42 aa, Homo sapiens
RFRFNRRDLIGFEFTVLVALELALYLPENQVLPHYRRLTQQF

SEQ ID NO: 64303 - protein, 47 aa, Homo sapiens
TWSILAVLCLLVVVAVAIGWVCRDRCLQHSYAGAWAVSPETELTGHV

SEQ ID NO: 64304 - protein, 163 aa, Homo sapiens
LLVLSFVFGCNVLRILLPSFSSFMSRVLQKDAEQESQMRAEIQDMKQELSTVNMMDEFARYARLERKINKMTDKLKTHVKARTAQLAKIKWVISVAFYVLQAALMISLIWKYYSVPVAVVPSKWITPLDRLVAFPTRVAGGVGITCWILVCNKVVAIVLHPFS

SEQ ID NO: 64305 - protein, 754 aa, Homo sapiens
RVAMLPGLALLLLAAWTARALEVPTDGNAGLLAEPQIAMFCGRLNMHMNVQNGKWDSDPSGTKTCIDTKEGILQYCQEVYPELQITNVVEANQPVTIQNWCKRGRKQCKTHPHFVIPYRCLVGEFVSDALLVPDKCKFLHQERMDVCETHLHWHTVAKETCSEKSTNLHDYGMLLPCGIDKFRGVEFVCCPLAEESDNVDSADAEEDDSDVWWGGADTDYADGSEDKVVEVAEEEEVAEVEEEEADDDEDDEDGDEVEEEAEEPYEEATERTTSIATTTTTTTESVEEVVREVCSEQAETGPCRAMISRWYFDVTEGKCAPFFYGGCGGNRNNFDTEEYCMAVCGSAIPTTAASTPDAVDKYLETPGDENEHAHFQKAKERLEAKHRERMSQVMREWEEAERQAKNLPKADKKAVIQHFQEKVESLEQEAANERQQLVETHMARVEAMLNDRRRLALENYITALQAVPPRPRHVFNMLKKYVRAEQKDRQHTLKHFEHVRMVDPKKAAQIRSQVMTHLRVIYERMNQSLSLLYNVPAVAEEIQDEVDELLQKEQNYSDDVLANMISEPRISYGNDALMPSLTETKTTVELLPVNGEFSLDDLQPWHSFGADSVPANTENEVEPVDARPAADRGLTTRPGSGLTNIKTEEISEVKMDAEFRHDSGYEVHHQKLVFFAEDVGSNKGAIIGLMVGGVVIATVIVITLVMLKKKQYTSIHHGVVEVDAAVTPEERHLSKMQQNGYENPTYKFFEQMQN

SEQ ID NO: 64306 - protein, 47 aa, Homo sapiens; identical to SEQ ID NO: 64303

SEQ ID NO: 64307 - protein, 47 aa, Homo sapiens
LIILWYLACASASCFMSTSYSCQGMWTPGSLVSKDPGTWVGLSWTEA

SEQ ID NO: 64308 - protein, 411 aa, Homo sapiens
LRLPAALPAMRLPRRAALGLLPLLLLLPPAPEAAKKPTPCHRCRGLVDKFNQGMVDTAKKNFGGGNTAWEEKTLSKYESSEIRLLEILEGLCESSDFECNQMLEAQEEHLEAWWLQLKSEYPDLFEWFCVKTLKVCCSPGTYGPDCLACQGGSQRPCSGNGHCSGDGSRQGDGSCRCHMGYQGPLCTDCMDGYFSSLRNETHSICTVRTGLSDSYPPCCLSLGCWRGVGHAWIRGRNTHTQPGYSSRVWIAAFSPACDESCKTCSGLTNRDCGECEVGWVLDEGACVDVDECAAEPPPCSAAQFCKNANGSYTCEECDSSCVGCTGEGPGNCKECISGYAREHGQCADVDECSLAEKTCVRKNENCYNTPGSYVCVCPDGFEETEDACVPPAEAEATEGESPTQLPSREDL

SEQ ID NO: 64309 - protein, 264 aa, Homo sapiens
RMLLAWVQAFLVSNMLLAEAYGSGGCFWDNGHLYREDQTSPAPGLRCLNWLDAQSGLASAPVSGAGNHSYCRNPDEDPRGPWCYVSGEAGVPEKRPCEDLRCPETTSQALPAFTTEIQEASEGPGADEVQVFAPANALPARSEAAAVQPVIGISQRVRMNSKEKKDLGTLGYVLGITMMVIIIAIGAGIILGYSYKRGKDLKEQHDQKVCEREMQRITLPLSAFTNPTCEIVDEKTVVVHTSQTPVDPQEGTTPLMGQAGTPGA

SEQ ID NO: 64310 - protein, 80 aa, Homo sapiens
ILWANGIYLVCGRLYGLQEALEIAREMKCSHCQEAGATLGCYNKGCSFRYHYPCAIDADCLLHEENFSVRCPKHKVRLWR

SEQ ID NO: 64311 - protein, 1082 aa, Homo sapiens
IATAAALVLLPPNTFLLVVAAAGPITSFLLSLEKLQMASSVGNVADSTEPTKRMLSFQGLAELAHREYQAGDFEAAERHCMQLWRQEPDNTGVLLLLSSIHFQCRRLDRSAHFSTLAIKQNPLLAEAYSNLGNVYKERGQLQEAIEHYRHALRLKPDFIDGYINLAAALVAAGDMEGAVQAYVSALQYNPDLYCVRSDLGNLLKALGRLEEAKACYLKAIETQPNFAVAWSNLGCVFNAQGEIWLAIHHFEKAVTLDPNFLDAYINLGNVLKEARIFDRAVAAYLRALSLSPNHAVVHGNLACVYYEQGLIDLAIDTYRRAIELQPHFPDAYCNLANALKEKGSVAEAEDCYNTALRLCPTHADSLNNLANIKREQGNIEEAVRLYRKALEVFPEFAAAHSNLASVLQQQGKLQEALMHYKEAIRISPTFADAYSNMGNTLKEMQDVQGALQCYTRAIQINPAFADAHSNLASIHKDSGNIPEAIASYRTALKLKPDFPDAYCNLAHCLQIVCDWTDYDERMKKLVSIVADQLEKNRLPSVHPHHSMLYPLSHGFRKAIAERHGNLCLDKINVLHKPPYEHPKDLKLSDGRLRVGYVSSDFGNHPTSHLMQSIPGMHNPDKFEVFCYALSPDDGTNFRVKVMAEANHFIDLSQIPCNGKAADRIHQDGIHILVNMNGYTKGARNELFALRPAPIQAMWLGYPGTSGALFMDYIITDQETSPAEVAEQYSEKLAYMPHTFFIGDHANMFPHLKKKAVIDFKSNGHIYDNRIVLNGIDLKAFLDSLPDVKIVKMKCPDGGDNADSSNTALNMPVIPMNTIAEAVIEMINRGQIQITINGFSISNGLATTQINNKAATGEEVPRTIIVTTRSQYGLPEDAIVYCNFNQLYKIDPSTLQMWANILKRVPNSVLWLLRFPAVGEPNIQQYAQNMGLPQNRIIFSPVAPKEEHVRRGQLADVCLDTPLCNGHTTGMDVLWAGTPMVTMPGETLASRVAASQLTCLGCLELIAKNRQEYEDIAVKLGTDLEYLKKVRGKVWKQRISSPLFNTKQYTMELERLYLQMWEHYAAGNKPDHMIKPVEVTESA

SEQ ID NO: 64312 - protein, 26 aa, Homo sapiens
LSKVATLTVFSCCLCHLLCQKIPFQL

SEQ ID NO: 64313 - protein, 65 aa, Homo sapiens
ILPLDLAGQDLTDYFMKILKEGGYSFTTTAEREIMLDIKEKLCYITLDFEQEMATAASSSSLEKS

SEQ ID NO: 64314 - protein, 36 aa, Homo sapiens
RRLTFVRMTTLQSLMCLSPVSLIVTLQQLFMTLKRE

SEQ ID NO: 64315 - protein, 699 aa, Homo sapiens
TRFLFASFPSARRRPAAKTRWAAPPKKNAMAKRIKAKPTSDKPGSPYRSVTHFDSLAVIDIPGADTLDKLFDHAVSKFGKKDSLGTREILSEENEMQPNGKVFKKLILGNYKWMNYLEVNRRVNNFGSGLTALGLKPKNTIAIFCETRAEWMIAAQTCFKYNFPLVTLYATLGKEAVVHGLNESEASYLITSVELLESKLKTALLDISCVKHIIYVDNKAINKAEYPEGFEIHSMQSVEELGSNPENLGIPPSRPTPSDMAIVMYTSGSTGRPKGVMMHHSNLIAGMTGQCERIPGLGPKDTYIGYLPLAHVLELTAEISCFTYGCRIGYSSPLTLSDQSSKIKKGSKGDCTVLKPTLMAAVPEIMDRIYKNVMSKVQEMNYIQKTLFKIGYDYKLEQIKKGYDAPLCNLLLFKKVKALLGGNVRMMLSGGAPLSPQTHRFMNVCFCCPIGQGYGLTESCGAGTVTEVTDYTTGRVGAPLICCEIKLKDWQEGGYTINDKPNPRGEIVIGGQNISMGYFKNEEKTAEDYSVDENGQRWFCTGDIGEFHPDGCLQIIDRKKDLVKLQAGEYVSLGKVEAALKNCPLIDNICAFAKSDQSYVISFVVPNQKRLTLLAQQKGVEGTWVDICNNPAMEAEILKEIREAANAMKLERFEIPIKVRLSPEPWTPETGLVTDAFKLKRKELRNHYLKDIERMYGGK

SEQ ID NO: 64316 - protein, 59 aa, Homo sapiens
ILVFLLLFSSFVFFFSLETGSSYVGQAGLESPGSSDPPASASGKVGLQARIAAPGQSLF

SEQ ID NO: 64317 - protein, 312 aa, Homo sapiens
MCSTMRALVLLLSLFLLGGQAQHVSDWTYSEGALDEAHWPQHYPACGGQRQSPINLQRTKVRYNPSLKGLNMTGYETQAGEFPMVNNGHTVQISLPSTMRMTVADGTVYIAQQMHFHWGGASSEISGSEHTVDGIRHVIEIHIVHYNSKYKSYDIAQDAPDGLAVLAAFVEVKNYPENTYYSNFISHLANIKYPGQRTTLTGLDVQDMLPRNLQHYYTYHGSLTTPPCTENVHWFVLADFVKLSRTQVWKLENSLLDHRNKTIHNDYRRTQPLNHRVVESNFPNQEYTLGSEFQFYLHKIEEILDYLRRALN

SEQ ID NO: 64318 - protein, 141 aa, Homo sapiens
MVSEEKRSPQLSAKTWRRGLRLQKRRNALFLPEGDICVVGSTSGARALIPETSKLERSGTVIAYCNLELLASSDPPVWASQSTGMTGMSYRSQPQLGFKSTPPAHSSVFHHSVKAPKEDQAQEAASRPLTSQDGWNPNIKK

SEQ ID NO: 64319 - protein, 506 aa, Homo sapiens [sequence omitted]

SEQ ID NO: 64320 - protein, 246 aa, Homo sapiens
MNRPSARNALGNVFVSELLETLAQLREDRQVRVLLFRSGVKGVFCAGADLKEREQMSEAEVGVFVQRLRGLMNDIAAFPAPTIAAMDGFALGGGLELALACDLRVAASSAVMGLIETTRGLLPGAGGTQRLPRCLGVALAKELIFTGRRLSGTEAHVLGLVNHAVAQNEEGDAAYQRARALAQEILPQAPIAVRLGKVAIDRGTEVDIASGMAIEGMCYAQNIPTRDRLEGMAAFREKRTPKFVGK

SEQ ID NO: 64321 - protein, 45 aa, Homo sapiens
MGAFLLATSLKWNLLVALLPLQLWCYTEKLEVSKQTREKEKHQKV

SEQ ID NO: 64322 - protein, 524 aa, Homo sapiens
MPLPGVGEELKQAKEIEDAEKYSFMATVTKAPKKQIQFADDMQEFTKFPTKTGRRSLSRSISQSSTDSYSSAASYTDSSDDEVSPREKQQTNSKGSSNFCVKNIKQAEFGRREIEIAEQDMSALISLRKRAQGEKPLAGAKIVGCTHITAQTAVLIETLCALGAQCRWSACNIYSTQNEVAAALAEAGVAVFAWKGESEDDFWWCIDRCVNMDGWQANMILDDGGDLTHWVYKKYPNVFKKIRGIVEESVTGVHRLYQLSKAGKLCVPAMNVNDSVTKQKFDNLYCCRESILDGLKRTTDVMFGGKQVVVCGYGEVGKGCCAALKALGAIVYITEIDPICALQACMDGFRVVKLNEVIRQVDVVITCTGNKNVVTREHLDRMKNSCIVCNMGHSNTEIDVTSLRTPELTWERVRSQVDHVIWPDGKRVVLLAEGRLLNLSCSTVPTFVLSITATTQALALIELYNAPEGRYKQDVYLLPKKMDEYVASLHLPSFDAHLTELTDDQAKYLGLNKNGPFKPNYYRY

SEQ ID NO: 64323 - protein, 34 aa, Homo sapiens
MIALLKILLAAAPTSKAKTDSINILADVLPEEMP

SEQ ID NO: 64324 - protein, 317 aa, Homo sapiens
MSGSLLGIVGCMGIGATVVLKSKFSAGQFWEDCQQHRVTVFQYIGELCRYLVNQPPSKAERGHKVRLAVGSGLRPDTWERFVRRFGPLQVLETYGLTEGNVATINYTGQRGAVGRASWLYKHIFPFSLIRYDVTTGEPIRDPQGHCMATSPGEPGLLVAPVSQQSPFLGYAGGPELAQGKLLKDVFRPGDVFFNTGDLLVCDDQGFLRFHDRTGDTFRWKGENVATTEVAEVFEALDFLQEVNVYGVTVPGHEGRAGMAALVLRPPHALDLMQLYTHVSENLPPYARPRFLRLQAVGAYLPLTTARYSALLAGNLRI

SEQ ID NO: 64325 - protein, 40 aa, Homo sapiens [sequence omitted]

SEQ ID NO: 64326 - protein, 137 aa, Homo sapiens [sequence omitted]

SEQ ID NO: 64327 - protein, 25 aa, Homo sapiens
MFPGIMLRTAFRVAALFSSLHLGNT

SEQ ID NO: 64328 - protein, 239 aa, Homo sapiens
MPLHWSWILTASHLAAFFQGFRSLEDIRSQASLTTQQAIGLKHYSDFLERMPREEATEIEQTVQKAAQAFNSGLLCVACGSYRRGKATCGDVDVLITHPDGRSHRGIFSRLLDSLRQEGFLTDDLVSQEENGQQQKYLGVCRLPGPGRRHRRLDIIVVPYSEFACALLYFTGSAHFNRSMRALAKTKGMSLSEHALSTAVVRNTHGCKVGPGRVLPTPTEKDVFRLLGLPYREPAERDW

SEQ ID NO: 64329 - protein, 125 aa, Homo sapiens
MGEKGFGCKGSRFHRIIPGFMCQGGDFTRHNGTGGKSIYGEKFDDENFILKHTGPGILSMANAGPNTNGSQFFICTAKSEWLDGKHVVFGKMKEGINIVEATGRFGSRNGKTSKKITIADCGQLE

SEQ ID NO: 64330 - protein, 148 aa, Homo sapiens
MFLFVLANFSMATFMDPGIFPRAEEDEDKEDDFRAPLYKTVEIKGIQVRMKWCATCRFYRPPRCSHCSVCDNCVEEFDHHCPWVNNCIGRRNYRYFFLFLLSLTAHIMGVFGFGLLYVLYHIEELSGVRTAVTYPSRPFRLWDWKGEE

SEQ ID NO: 64331 - protein, 159 aa, Homo sapiens
MIKPEDAMDFGISLLFYGLYYGVLERDFAEMCADYMASTIGFYSESGMPTKHLSDSVCAVCGQQIFVDVSEEGIIENTYRLSCNHVFHEFCIRGWCIVGKKQTCPYCKEKVDLKRMFSNPWERPHVMYGQLLDWLRYLVAWQPVIIGVVQGINYILGLE

SEQ ID NO: 64332 - protein, 186 aa, Homo sapiens
MNLHWLHKGTAPFLHVGAVAAVTMLSWIVAGQFARAERTSSQVTILCTFFTVVFALYLAPLTISSPCIMEKKDLGPKPALIGHRGAPMLAPEHTLMSFRKALEQKLYGLQADITISLDGVPFLMHDTTLRRTTNVEEEFPELARRPASMLNWTTLQRLNAGQWFLKVWLHLIPILGMENTSRDCKE

SEQ ID NO: 64333 - protein, 57 aa, Homo sapiens
MVPRILNCAMLCMAADMWGLVVPRACLRELDEVTSECVIQSTEHDVLYHRDAYGYPS

SEQ ID NO: 64334 - protein, 164 aa, Homo sapiens
MWWLLLWGVLQACPTRGSVLLAQELPQQLTSPGYPEPYGKGQESSTDIKAPEGFAVRLVFQDFDLEPSQDCAGDSVTISFVGSDPSQFCGQQGSPLGRPPGQREFVSSGRSLRLTFRTQPSSENKTAHLHKGFLALYQTVGECPSWGCREGASVPSHDPGIFKP

SEQ ID NO: 64335 - protein, 154 aa, Homo sapiens [sequence omitted]

SEQ ID NO: 64336 - protein, 119 aa, Homo sapiens
MNVVFITILIIALIALSVGQYNCPGQYTFSMPSDSHVSSCSEDWVGYQRKCYFISTVKRSWTSAQNACSEHGATLAVIDSEKDMNFLKRYAGREEHWVGLKKEPGHPWKWSNGKEFNNW

SEQ ID NO: 64337 - protein, 90 aa, Homo sapiens
MNVVFITILIIALIALSVGQYNCPGQYTFSMPSDSHVSSCSEDWVGYQRKCYFISTVKRSWTSAQNACSEHGATLAVIDSEKDMVRIKKR

SEQ ID NO: 64338 - protein, 55 aa, Homo sapiens
MKGWGWLALLLGALLGTAWARRSQDLHCGGKGTTGKRSGGSRALGGHEIQGLGEG

SEQ ID NO: 64339 - protein, 162 aa, Homo sapiens [sequence omitted]

SEQ ID NO: 64340 - protein, 107 aa, Homo sapiens [sequence omitted]

SEQ ID NO: 64341 - protein, 22 aa, Homo sapiens
MFEQTALHLLWICWGMMEYSER

SEQ ID NO: 64342 - protein, 18 aa, Homo sapiens
MWSCTSWFQILALPLIPG

SEQ ID NO: 64343 - protein, 58 aa, Homo sapiens
MKKNKLRTTLYVHLQMPQLMLVGCLSAFCDNEHMDFCLLNSVDPFSQLPGAWIFTSNC

SEQ ID NO: 64344 - protein, 189 aa, Homo sapiens
MVSTMLSGLLFWLASGWTPAFAYSPRTPDRVSEADIQRLLHGVMEQLGIARPRVEYPAHQAMNLVGPQSIEGGAHEGLQHLGPFGNIPNIVAELTGDNIPKDFSEDQGYPDPPNPCPVGKTDDGCLENTPDTAEFSREFQLHQHLFDPEHDYPGLGKWSVNPYLQGQRLDNVVAKKSVPHFSDEDKDPE

SEQ ID NO: 64345 - protein, 476 aa, Homo sapiens
MGCWGQLLVWFGAAGAILCSSPGSQETFLRSSPLPLASPSPRDPKVSAPPSILEPASPLNSPGTEGSWLFSTCGASGRHGPTQTQCDGAYAGTSVVVTVGAAGQLRGVQLWRVPGPGQYLISAYGAAGGKGAKNHLSRAHGVFVSAIFSLGLGESLYILVGQQGEDACPGGSPESQLVCLGESRAVEEHAAMDGSEGVPGSRRWAGGGGGGGGATYVFRVRAGELEPLLVAAGGGGRAYLRPRDRGRTQASPEKLENRSEAPGSGGRGGAAGGGGGWTSRAPSPQAGRSLQEGAEGGQGCSEAWATLGWAAAGGFGGGGGACTAGGGGGGYRGGDASETDNLWADGEDGVSFIHPSSELFLQPLAVTENHGEVEIRRHLNCSHCPLRDCQWQAELQLAECLCPEGMELAVDNVTCMDLHKPPGPLVLMVAVVATSTLSLLMVCGVLILGTKRLAGTVDSRLLLSSELGWVSAGSRG

SEQ ID NO: 64346 - protein, 317 aa, Homo sapiens [sequence omitted]

SEQ ID NO: 64347 - protein, 193 aa, Homo sapiens
MSGSSLPSALALSLLLVSGSLLPGPGAAQNAAPDITGHKRSENKNEGQDATMYCKSVGYPHPDWIWRKKENGMPMDIVNTSGRFFIINKENYTELNIVNLQITEDPGEYECNATNAIGSASVVTVLRVRSHLAPLWPFLGILAEIIILVVIIVVYEKRKRPDEVPDDDEPAGPMKTNSTNNHKDKNLRQRNTN

SEQ ID NO: 64348 - protein, 163 aa, Homo sapiens
MFGCVRSFFLLVGSWSRWLRSEAADFRGLADCSECGAAKPTPTRNSSWPASASRSPGSRSRLSLHTSLQAEGVGSSLGQPRKGLPQCSGGLKGSSSAAKLGAQAEEVPRASEGSEDCQHAVTSQYNFISLSAMDTDGFTPSCILRTMIKFQTLGSFCVPRSRA

SEQ ID NO: 64349 - protein, 250 aa, Homo sapiens
MQFILILILVVEVGDLKELQTLDISTNRLLTLPERLHMCLSLQYLTVDRNRLWYVPRHLCQLPSLNELSMAGNRLAFLPLDLGRSRELQYVYVDNNIHLKGLPSYLYNKVIGCSGCGAPIQVSEVKLLSFSSGQRTVFLPAEVKAIGTEHDHVLPLQELAMRGLYHTYHSLLKDLNFLSPISLPRSLLELLHCPLGHCHRCSEPMFTIVYPKLFPLRETPMAGLHQWKTTVSFVAYCCSTQCLQTFDLLS

SEQ ID NO: 64350 - protein, 221 aa, Homo sapiens [sequence omitted]

SEQ ID NO: 64351 - protein, 80 aa, Homo sapiens
MRLLFIYLFYFDGVSLPSRRLECSDAILTREPPPPGFKRFSFLNHPSSWDYRRVPPCPANFCVFSRDRGRYGPSFEKNAE

SEQ ID NO: 64352 - protein, 259 aa, Homo sapiens
MRLRLRLLALLLLLLAPPARAPKPSAQDVSLGVDWLTRYGYLPPPHPAQAQLQSPEKLRDAIKVMQRFAGLPETGRMDPGTVATMRKPRCSLPDVLGVAGLVRRRRRYALSGSVWKKRTLTWRVRSFPQSSQLSQETVRVLMSYALMAWGMESGLTFHEVDSPQGQEPDILIDFARAFHQDSYPFDGLGGTLAHAFFPGEHPISGDTHFDDEETWTFGSKASQQLEQELAGGSPVDEELGFSRGWRVNPLGPGSPERLS

SEQ ID NO: 64353 - protein, 35 aa, Homo sapiens
MGIISLTVTCGLLVASHWRREATKYARWIAFTGSK

SEQ ID NO: 64354 - protein, 552 aa, Homo sapiens
MKHGERVGWPVGVSMPRGWAAPLLLLLLQGGWGCPDLVCYTDYLQTVICILEMWNLHPSTLTLTWQDQYEELKDEATSCSLHRSAHNATHATYTCHMDVFHFMADDIFSVNITDQSGNYSQECGSFLLAESIKPAPPFNVTVTFSGQYNISWRSDYEDPAFYMLKGKLQYELQYRNRGDPWAVSPRRKLISVDSRSVSLLPLEFRKDSSYELQVRAGPMPGSSYQGTWSEWSDPVIFQTQSEELKEGWNPHLLLLLLLVIVFIPAFWSLKTHPLWRLWKKIWAVPSPERFFMPLYKGCSGDFKKWVGAPFTGSSLELGPWSPEVPSTLEVYSCHPPRSPAKRLQLTELQEPAELVESDGVPKPSFWPTAQNSGGSAYSEERDRPYGLVSIDTVTVLDAEGPCTWPCSCEDDGYPALDLDAGLEPSPGLEDPLLDAGTTVLSCGCVSAGSPGLGGPLGSLLDRLKPPLADGEDWAGGLPWGGRSPGGVSESEAGSPLAGLDMDTFDSGFVGSDCSSPVECDFTSPGDEGPPRSYLRQWVVIPPPLSSPGPQAS

SEQ ID NO: 64355 - protein, 31 aa, Homo sapiens
MAELLPPTPRLLAASLFVPHRLPLSTSWGPS

SEQ ID NO: 64356 - protein, 367 aa, Homo sapiens
MTFGTVLLLSVLASYHGFNLDVEEPTIFQEDAGGFGQSVVQFGGSRLVVGAPLEVVAANQTGRLYDCAAATGMCQPIPLHIRPEAVNMSLGLTLAASTNGSRLLACGPTLHRVCGENSYSKGSCLLLGSRWEIIQTVPDATPECPHQEMDIVFLIDGSGSIDQNDFNQMKGFVQAVMGQFEGTDTLFALMQYSNLLKIHFTFTQFRTSPSQQSLVDPIVQLKGLTFTATGILTVVTQLFHHKNGARKSAKKILIVITDGQKYKDPLEYSDVIPQAEKAGIIRYAIGVRLFFTPAPGSACISFRCSAAGLILLGCLSAAGGTRFPGTHCQAGAEYHQLSASAGPRVQGGQLCSPWQHPEAAAGEDLCS

SEQ ID NO: 64357 - protein, 90 aa, Homo sapiens
MAEEVSTLMKATVLMRQPGRVQEIVGALRKGGGDRLQVPLGRAGAGRAGGGWRGFLPIGPSRFALPRTPPSSLPQEMAGSLKESGLVRLS

SEQ ID NO: 64358 - protein, 50 aa, Homo sapiens
MVALLIPGLLKSKERLSMLRHERICSCSSRENGWDRLLRNNSAGKSGRWL

SEQ ID NO: 64359 - protein, 149 aa, Homo sapiens
MQSSAKKNGFVVLKGRPRKIVEMSTSMTGKHGHAKVHLVGTDIFTGKKYGDICLSTHNMDVPSIKRNDFQLIGIQDGHLSLLQDSMEVREDFRLHEGDLGKETEQKYSCGEEILIMVLSAMTEEAAAAIKAAGITGVSHRARPPPTQFI

SEQ ID NO: 64360 - protein, 1209 aa, Homo sapiens
MFTGHLLFLALLMFAFSTFEESVSNYSEWAVFTDDIDQFKTQKVQDFRPNQKLKKSMLHPSLYFDAGEIQAMRQKSRASHLHLFRAIRSAVTVMLSNPTYYLPPPKHADFAAKWNEIYGNNLPPLALYCLLCPEDKVAFEFVLEYMDRMVGYKDWLVENAPGDEVPIGHSLTGFATAFDFLYNLLDNHRRQKYLEKIWVITEEMYEYSKVRSWGKQLLHNHQATNMIALLTGALVTGVDKGSKANIWKQAVVDVMEKTMFLLNHIVDGSLDEGVAYGSYTAKSVTQYVFLAQRHFNINNLDNNWLKMHFWFYYATLLPGFQRTVGIADSNYNWFYGPESQLVFLDKFILKNGAGNWLAQQIRKHRPKDGPMVPSTAQRWSTLHTEYIWYDPQLTPQPPADYGTAKIHTFPNWGVVTYGAGLPNTQTNTFVSFKSGKLGGRAVYDIVHFQPYSWIDGWRSFNPGHEHPDQNSFTFAPNGQVFVSEALYGPKLSHLNNVLVFAPSPSSQCNKPWEGQLGECAQWLKWTGEEVGDAAGEIITASQHGEMVFVSGEAVSAYSSAMRLKSVYRALLLLNSQTLLVVDHIERQEDSPINSVSAFFHNLDIDFKYIPYKFMNRYNGAMMDVWDAHYKMFWFDHHGNSPMASIQEAEQAAEFKKRWTQFVNVTFQMEPTITRIAYVFYGPYINVSSCRFIDSSNPGLQISLNVNNTEHVVSIVTDYHNLKTRFNYLGFGGFASVADQGQITRFGLGTQAIVKPVRHDRIIFPFGFKFNIAVGLILCISLVILTFQWRFYLSFRKLMRWILILVIALWFIELLDVWSTCSQPICAKWTRTEAEGSKKSLSSEGHHMDLPDVVITSLPGSGAEILKQLFFNSSDFLYIRVPTAYIDIPETELEIDSFVDACEWKVSDIRSGHFRLLRGWLQSLVQDTKLHLQNIHLHEPNRGKLAQYFAMNKDKKRKFKRRESLPEQRSQMKGAFDRDAEYIRALRRHLVYYPSARPVLSLSSGSWTLKLHFFQEVLGASMRALYIVRDPRAWIYSMLYNSKPSLYSLKNVPEHLAKLFKIEGGKGKCNLNSGYAFEYEPLRKELSKSKSNAVSLLSHLWLANTAAALRINTDLLPTSYQLVKFEDIVHFPQKTTERIFAFLGIPLSPASLNQILFATSTNLFYLPYEGEISPTNTNVWKQNLPRDEIKLIENICWTLMDRLGYPKFMD

SEQ ID NO: 64361 - protein, 80 aa, Homo sapiens
MRFLIKGSVAGGAVYLVYDQELLGPSDKSQAALQKAGEVVPPAMYQFSQYVCQQTGLQIPQLPAPPKIYFPIRDSWNAGI

SEQ ID NO: 64362 - protein, 135 aa, Homo sapiens
MCYVDEERDPHRHLPAGAFLQTPQLGVRVAPGLALQDVSRFIFPFQVLGACGSVNFGTICGTTMCDQTPNTPEAQWCRGASNLSRAGVEGLKVRVTDSHRTRSWTLLFLCKNSPSTSRVALQKKLRPSSLSVAFS

SEQ ID NO: 64363 - protein, 184 aa, Homo sapiens
MAAGAALALALWLLMPPVEVGGAGPPPIQDGEFTFLLPAGRKQCFYQSAPANASLETEYQVIGGAGLDVDFTLESPQGVLLVSESRKADGVHTSPLRPCGPGWSAASRCSRYCGPSRHVTATCKRATWSGSTSGQLSTWRCCCWWLCCRSARSSASSRTSARCPRSPCHGRKNGTKEGQQGVCI

SEQ ID NO: 64364 - protein, 323 aa, Homo sapiens [sequence omitted]

SEQ ID NO: 64365 - protein, 580 aa, Homo sapiens
MRVPALLVLLFCFRGRAGWSRYWISGNAANGQHDLHIRPVELEDEASYECQATQAGLRSRPAQLHVLVPPEAPQVLGGPSVSLVAGVPANLTCRSRGDARPTPELLWFRDGVLLDGATFHQTLLKEGTPGSVESTLTLTPFSHDDGATFVCRARSQALPTGRDTAITLSLQYPPEVTLSASPHTVQEGEKVIFLCQATAQPPVTGYRWAKGGSPVLGARGPRLEVVADASFLTEPVSCEVSNAVGSANRSTALDVLFGPILQAKPEPVSVDVGEDASFSCAWRGNPLPRVTWTRRGGAQVLGSGATLRLPSVGPEDAGDYVCRAEAGLSGLRGGAAEARLTVNAPPVVTALHSAPAFLRGPARLQCLVFASPAPDAVVWSWDEGFLEAGSQGRFLVETFPAPESRGGLGPGLISVLHISGTQESDFSRSFNCSARNRLGEGGAQASLGRRDLLPTVRIVAGVAAATTTLLMVITGVALCCWRHSKASASFSEQKNLMRIPGSSDGSSSRGPEEEETGSREDRGPIVHTDHSDLVLEEEGTLETKDPTNGYYKVRGVSPPASPDSRVTSFQWKSPGISNLP

SEQ ID NO: 64366 - protein, 138 aa, Homo sapiens
MKTSYFSLLSFFFFCLGFCLNQKICPHAGAQDKFSLSAWPSPVVPLGGRVTLSCHSHLRFVIWTIFQTTGTRSHELHTGLSNNITISPVTPEHAGTYRCVGIYKHASKWSAESNSLKIIVTGGPHDEAGREVDPLLQL

SEQ ID NO: 64367 - protein, 111 aa, Homo sapiens
MELLISSSSLSMIIAKALKMALVGPVRVMILSGQFPSEMLIRAPLSSRILLTDSPFFPMMLPTSFPCIRSRMRKTNIKMKCLIQGHTMSGMDLQISLLENKLRAPTDCTLW

SEQ ID NO: 64368 - protein, 169 aa, Homo sapiens
MLLLCHALAIAVVQIVIFSESWAFAKNINFYNVRPPLDPTPFPNSFKCFTCENAGDNYNCNRWAEDKWCPQNTQYCLTVHHFTSHGRSTSITKKCASRSECHFVGCHHSRDSEHTECRSCCEGMICNVELPTNHTNAVFAVMHAQRTSGSSAPTLYLPVLAWVFVLPLL

SEQ ID NO: 64369 - protein, 25 aa, Homo sapiens
MTEAGAGAVAAAAVAGGESGSQKVA

SEQ ID NO: 64370 - protein, 906 aa, Homo sapiens
MVFLATLGLWDVFFGFEENKCSMSYMFEYPEYQKIELPKKLAKRYPAYELYLYGEGSYAEEHKILPLTGIPVLFLPGNAGSYKQVRSIGSIALRKAEDIDFKYHFDFFSVNFNEELVALYGGSLQKQTKFVHECIKTILKLYKGQEFAPKSVAIIGHSMGGLVARALLTLKNFKHDLINLLITQATPHVAPVMPLDRFITDFYTTVNNYWILNARHINLTTLSVAGGFRDYQVRSGLTFLPKLSHHTSALSVVSSAVPKTWVSTDHLSIVWCKQLQLTTVRAFFDLIDADTKQITQNSKKKLSVLYHHFIRHPSKHFEENPAIISDLTGTSMWVLVKVSKWTYVAYNESEKIYFTFPLENHRKIYTHVYCQSTMLDTNSWIFACINSTSMCLQGVDLSWKAELLPTIKYLTLRLQDYPSLSHLVVYVPSVRGSKFVVDCEFFKKEKRYIQLPVTHLFSFGLSSRKVVLNTNGLYYNLELLNFGQIYQAFKINVVSKCSAVKEEITSIYRLHIPWSYEDSLTIAQAPSSTEISLKLHIAQPENNTHVALFKMYTSSDCRYEVTVKTSFSQILGQVVRFHGGALPAYVVSNILLAYRGQLYSLFSTGCCLEYATMLDKEAKPYKVDPFVIIIKFLLGYKWFKELWDVLLLPELDAVILTCQSMCFPLISLILFLFGTCTAYWSGLLSSASVRLLSSLWLALKRPSELPKDIKMISPDLPFLTIVLIIVSWTTCGALAILLSYLYYVFKVVHLQASLTTFKNSQPVNPKHSRRSEKKSNHHKDSSIHHLRLSANDAEDSLRMHSTVINLLTWIVLLSMPSLIYWLKNLRYYFKLNPDPCKPLAFILIPTMAILGNTYTVSIKSSKLLKTTSQFPLPLAVGVIAFGSAHLYRLPCFVFIPLLLHALCNFM

SEQ ID NO: 64371 - protein, 380 aa, Homo sapiens
MLAVSLTVPLLGAMMLLESPIDPQPLSFKEPPLLLGVLHPNTKLRQAERLFENQLVGPESIAHIGDVMFTGTADGRVVKLENGEIETIARFGSGPCKTRDDEPVCGRPLGIRAGPNGTLFVADAYKGLFEVNPWKREVKLLLSSETPIEGKNMSFVNDLTVTQDGRKIYFTDSSSKWQRRDYLLLVMEGTDDGRLLEYDTVTREVKVLLDQLRFPNGVQLSPAEDFVLVAETTMARIRRVYVSGLMKGGADLFVENMPGFPDNIRPSSSGGYWVGMSTIRPNPGFSMLDFLSERPWIKRMIFKGSCAGCDLLFSQETVMKFVPRYSLVLELSDSGAFRRSLHDPDGLVATYISEVHEHDGHLYLGSFRSPFLCRLSLQAV

SEQ ID NO: 64372 - protein, 244 aa, Homo sapiens
MDKSELVQKAKLAEQAERYDDMAAAMKAVTEQGHELSNEERNLLSVAYKNVVGARRSSWRVISSIEQKTERNEKKQQMGKEYREKIEAELQDICNDVLELLDKYLIPNATQPESKVFYLKMKGDYFRYLSEVASGDNKQTTVSNSQQAYQEAFEISKKEMQPTHPIRLGLALNFSVFYYEILNSPEKACSLAKTAFDEAIAELDTLNEESYKDSTLIMQLLRDNLTLWTSENQGDEGDAGEGEN

SEQ ID NO: 64373 - protein, 491 aa, Homo sapiens
MPLALLVLLLLGPGGWCLAEPPRDSLREELVITPLPSGDVAATFQFRTRWDSELQREGVSHYRLFPKALGQLISKYSLRELHLSFTQGFWRTRYWGPPFLQAPSGAELWVWFQDTVTDVDKSWKELSNVLSGIFCASLNFIDSTNTVTPTASFKPLGLANDTDHYFLRYAVLPREVVCTENLTPWKKLLPCSSKAGLSVLLKADRLFHTSYHSQAVHIRPVCRNARCTSISWELRQTLSVVFDAFITGQGKKDWSLFRMFSRTLTEPCPLASESRVYVDITTYNQDNETLEVHPPPTTTYQDVILGTRKTYAIYDLLDTAMINNSRNLNIQLKWKRPPENEAPPVPFLHAQRYVSGYGLQKGELSTLLYNTHPYRAFPVLLLDTVPWYLRLYVHTLTITSKGKENKPSYIHYQPAQDRLQPHLLEMLIQLPANSVTKVSIQFERALLKWTEYTPDPNHGFYVSPSVLSALVPSMVAAKPVDWEESPLFNSL

SEQ ID NO: 64374 - protein, 579 aa, Homo sapiens
MAVMCVAGLFFIPVIGLTGFHVVLVTRGRTTNEQVTGKFRGGVNPFTRGCCGNVEHVLCSPLAPRYVVEPPRLPLAVSLKPPFLRPELLDRAAPLKVKLSDNGLKAGLGRSKSKGSLDRLDEKPLDLGPPLPPKIEAGTFSSDLQTPRPGSAESALSVQRTSPPTPAMYKFRPAFPTGPKVPFCGPGEQVPGPDSLTLGDDSIRSLDFVSEPSLDLPDYGPGGLHAAYPPSPPLSASDAFSGALRSLSLKASSRRGGDHVALQPLRSEGGPPTPHRSIFAPHALPNRNGSLSYDSLLNPGSPGGHACPAHPAVGVAGYHSPYLHPGATGDPPRPLPRSFSPVLGPRPREPSPVRYDNLSRTIMASIQERKDREERERLLRSQADSLFGDSGVYDAPSSYSLQQASVLSEGPRGPALRYGSRDDLVAGPGFGGARNPALQTSLSSLSSSVSRAPRTSSSSLQADQASSNAPGPRPSSGSHRSPARQGLPSPPGTPHSPSYAGPKAVAFIHTDLPEPPPSLTVQRDHPQLKTPPSKLNGQSPGLARLGPATGPPGPSASPTRHTLVKKVSGVGGTTYEISV

SEQ ID NO: 64375 - protein, 174 aa, Homo sapiens
MKAYLEGAGAEFCDITLLLDGHPRPAHKAILAARSSYFEAMFRSFMPEDGQVNISIGEMVPSRQAFESMLRYIYYGEVNMPPEDSLHPHSPVNSQVPTKGSWHPPQVALRPALLPQLGDLGPAPPSRGFAGAWGWAWCSLKQLAAGKEGFAARRNQWVPDPHNCPEDGVGHCFV

SEQ ID NO: 64376 - protein, 480 aa, Homo sapiens
MSRSQVALLGLSLLLMLLLYVGLPGPPEQTSCLWGDPNVTVLAGLTPGNSPIFYREVLPLNQAHRVEVVLLHGKAFNSHTWEQLGTLQLLSQRGYRAVALDLPGAAVAFFEETARQLGLGCQKVEVAPGYVVTVLTWPGTNPTLSSILLNSHTDVVPVFKEHWSHDPFEAFKDSEGYIYARGAQDMKCVSIQYLEAVRRLKVEGHRFPRTIHMTFVPDEEVGGHQGMELFVQRPEFHALRAGFALDEGIANPTDAFTVFYSERSPWWVRVTSTGRPGHASRFMEDTAAEKLHKVVNSILAFREKEWQRLQSNPHLKEGSVTSVNLTKLEGGVAYNVIPATMSASFDFRVAPDVDFKAFEEQLQSWCQAAGEGVTLEFAQKWMHPQVTPTDDSNPWWAAFSRVCKDMNLTLEPEIMPAATDNRYIRAVGVPALGFSPMNRTPVLLHDHDERLHEAVFLRGVDIYTRLLPALASVPALPSDS

SEQ ID NO: 64377 - protein, 197 aa, Homo sapiens
MGAPDDRTRTPLEPSNCWSDLDGGSHTENVGEAAVTQVGEQADTVASCPLGHSDDTVYHDDRCMVEVPQQLETSIGHSLEKEFTNQEAAEPKEVPVQSTEAGRDHNEEEGEEKGLRDEKPIKTEVPGSPAGTESKGQEATGPSTVDTQSEPSDMKEPDEEKNDQQGEALDSLQKRKNKKKKKKRKKSPVPIETLKDV

SEQ ID NO: 64378 - protein, 221 aa, Homo sapiens
MCARGEGEPCGGGGAGRGYCAPGMECVKSRKRRKGKAGAAAGGPGVSGVCVCKSRYPVCGSDGTTYPSGCQLRAASQRAESRGEKAITQVSKGTCEQGPSIVTPPKDIWNVTGAQVYLSCEVIGIPTPVLIWNKVKRGHYGVQRTELLPGDRDNLAIQTRGGPEKHEVTGWVLVSPLSKEDAGEYECHASNSQGQASASAKITVVDALHEIPVKKGEGAEL

SEQ ID NO: 64379 - protein, 67 aa, Homo sapiens
MTSKLAVALLAAFLISAALCEGAVLPRSAKELRCQCIKTYSKPFHPKFIKELRVIESGPHCANTEIM

SEQ ID NO: 64380 - protein, 89 aa, Homo sapiens [sequence omitted]

SEQ ID NO: 64381 - protein, 38 aa, Homo sapiens
MFNFWLLSLKSVMIPSFAVFLPADWNVDLVVSYLGLCG

SEQ ID NO: 64382 - protein, 95 aa, Homo sapiens [sequence omitted]

SEQ ID NO: 64383 - protein, 173 aa, Homo sapiens
MCKASFTGDNAARAVFPSIVGHPRHQGVMVGMGQKDSYVGDEAQSKRGILTLKYPIEHGIVTNWDDMEKIWHHTFYNELRVAPEEQPMLLFEAPLNPRANCKKMTQIIFETFNTPAMYLAIQTMLSLYASGRTTGIVLDSSDGVTHTVPIYEGYALPNAILLLDLAGRDLTTS

SEQ ID NO: 64384 - protein, 292 aa, Homo sapiens
MSISLSSLILLPIWINMAQIQQGGPDEKEKTTALKDLLSRIDLDELMKKDEPPLDFPDTLEGFEYAFNEKGQLRHIKTGEPFVFNYREDLHRWNQKRYEALGEIITKYVYELLEKDCNLKKVSIPVDATESEPKSFIFMSEDALTNPQKLMVLIHGSGVVRAGQWARRLIINEDLDSGTQIPFIKRAVAEGYGVIVLNPNENYIEVEKPKIHVQSSSDSSDEPAEKRERKDKVSKETKKRRDFYEKYRNPQREKEMMQLYIRVSEITTFLYYFLYLVYILLYVDCFVFLQEY

SEQ ID NO: 64385 - protein, 19 aa, Homo sapiens
MLALLGLSQALNILLGLKV

SEQ ID NO: 64386 - protein, 55 aa, Homo sapiens
MEMSLVLLFLIRTALFAPQGAAADGASLCRQSWSAVARSRLTASSASRIQVIPLP

SEQ ID NO: 64387 - protein, 23 aa, Homo sapiens
MESRTLLLLFSGAVALIQTWAGP

SEQ ID NO: 64388 - protein, 123 aa, Homo sapiens
MMVLQVSAAPRTVALTALLMVLLTSVVQGRATPENYLFQGRQECYAFNGTQRFLERYIYNREEFARFDSDVGEFRAVTELGRPAAEYWNSQKDILEEKRAVPDRMCRHNYELGGPMTLQRRGE

SEQ ID NO: 64389 - protein, 1324 aa, Homo sapiens
MARLCLLILQLAALLAYALGWAAPGGPREPWAQEPLLPEDQEPEVAEDGESWLSRFSYAWLAPLLARGACGELRQPQDICRLPHRLQPTYLARVFQAHWQEGARLWRALYGAFGRCYLALGLLKLVGTMLGFSGPLLLSLLVGFLEEGQEPLSHGLLYALGLAGGAVLGAVLQNQYGYEVYKVTLQARGAVLNILYCKALQLGPSRPPTGEALNLLGTDSERLLNFAGSFHEAWGLPLQLAITLYLLYQQVGVAFVGGLILALLLVPVNKVIATRIMASNQEMLQHKDARVKLVTELLSGIRVIKFCGWEQALGARVEACRARELGRLRVIKYLDAACVYLWAALPVVISIVIFITYVLMGHQLTATKVFTALALVRMLILPLNNFPWVINGLLEAKVSLDRIQLFLDLPNHNPQAYYSPDPPAEPSTVLELHGALFSWDPVGTSLETFISHLEVKKGMLVGIVGKVGCGKSSLLAAIAGELHRLRGHVAVRGLSKGFGLATQEPWIQFATIRDNILFGKTFDAQLYKEVLEACALNDDLSILPAGDQTEVGEKGVTLSGGQRARIALARAVYQEKELYLLDDPLAAVDADVANHLLHRCILGMLSYTTRLLCTHRTEYLERADAVLLMEAGRLIRAGPPSEILPLVQAVPKAWAENGQESDSATAQSVQNPEKTKEGLEEEQSTSGRLLQEESKKEGAVALHVYQAYWKAVGQGLALAILFSLLLMQATRNAADWWLSHWISQLKAENSSQEAQPSTSPASMGLFSPQLLLFSPGNLYIPVFPLPKAAPNGSSDIRFYLTVYATIAGVNSLCTLLRAVLFAAGTLQAAATLHRRLLHRVLMAPVTFFNATPTGRILNRFSSDVACADDSLPFILNILLANAAGLLGLLAVLGSGLPWLLLLLPPLSIMYYHVQRHYRASSRELRRLGSLTLSPLYSHLADTLAGLSVLRATGATYRFEEENLRLLELNQRCQFATSATMQWLDIRLQLMGAAVVSAIAGIALVQHQQGLANPGLVGLSLSYALSLTGLLSGLVSSFTQTEAMLVSVERLEEYTCDLPQEPQGQPLQLGTGWLTQGGVEFQDVVLAYRPGLPNALDGVTFCVQPGEKLGIVGRTGSGKSSLLLVLFRLLEPSSGRVLLDGVDTSQLELAQLRSQLAIIPQEPFLFSGTVRENLDPQGLHKDRALWQALKQCHLSEVITSMGGLDGELGEGGRSLSLGQRQLLCLARALLTDAKILCIDEATASVDQKTDQLLQQTICKRFANKTVLTIAHRLNTILNSDRVLVLQAGRVVELDSPATLRNQPHSLFQQLLQSSQQGVPASLGGP

SEQ ID NO: 64390 - protein, 212 aa, Homo sapiens
MILWLKGVVFNVTTVDLKRKPADLHNLAPGTHPPFLTFNGDVKTDVNKIEEFLEETLTPEKYPKLAAKHRESNTAGIDIFSKFSAYIKNTKQQNNAALERGLTKALKKLDDYLNTPLPEEIDANTCGEDKGSRRKFLDGDELTLADCNLLPKLHVVKIVAKKYRNYDIPAEMTGLWRYLKNAYARDEFTNTCAADSEIELAYADVAKRLSRS

SEQ ID NO: 64391 - protein, 180 aa, Homo sapiens
MILWLKGVVFNVTTVDLKRKPADLHNLAPGTHPPFLTFNGDVKTDVNKIEEFLEETLTPEKYPKLAAKHRESNTAGIDIFSKFSAYIKNTKQQNNAALERGLTKALKKLDDYLNTPLPEEIDANTCGEDKGSRRKFLDGDELTLADCNLLPKLHVVKVRELYPQGPARSSSILGPGHLCG

SEQ ID NO: 64392 - protein, 151 aa, Homo sapiens [sequence omitted]

SEQ ID NO: 64393 - protein, 165 aa, Homo sapiens
MRPQELPRLAFPLLLLLLLLLPPPPCPAHSATRFDPTWESLDARQLPAWFDQAKFGIFIHWGVFSVPSFGSEWFWWYWQKEKIPKYVEFMKDNYPPSFKYEDFGPLFTAKFFNANQWADIFQASGAKYIVLTSKHHEATCRDSFMWRKSFDEYWAHTRWHHFCSF

SEQ ID NO: 64394 - protein, 472 aa, Homo sapiens [sequence omitted]

SEQ ID NO: 64395 - protein, 46 aa, Homo sapiens [sequence omitted]

SEQ ID NO: 64396 - protein, 653 aa, Homo sapiens [sequence omitted]

SEQ ID NO: 64397 - protein, 1178 aa, Homo sapiens
MPKKKRLSAGRVPLILFLCQMISALEVPLDLVQPPTITQQSPKDYIIDPRENIVIQCEAKGKPPPSFSWTRNGTHFDIDKDPLVTMKPGTGTLIINIMSEGKAETYEGVYQCTARNERGAAVSNNIVVRPSRSPLWTKEKLEPITLQSGQSLVLPCRPPIGLPPPIIFWMDNSFQRLPQSERVSQGLNGDLYFSNVLPEDTREDYICYARFNHTQTIQQKQPISVKVISVDELNDTIAANLSDTEFYGAKSSRERPPTFLTPEGNASNKEELRGNVLSLECIAEGLPTPIIYWAKEDGMLPKNRTVYKNFEKTLQIIHVSEADSGNYQCIAKNALGAIHHTISVRVKAAPYWITAPQNLVLSPGEDGTLICRANGNPKPRISWLTNGVPIEIAPDDPSRKIDGDTIIFSNVQERSSAVYQCNASNEYGYLLANAFVNVLAEPPRILTPANTLYQVIANRPALLDCAFFGSPLPTIEWFKGAKGSALHEDIYVLHENGTLEIPVAQKDSTGTYTCVARNKLGMAKNEVHLEIKDPTWIVKQPEYAVVQRGSMVSFECKVKHDHTLSLTVLWLKDNRELPSDERFTVDKDHLVVADVSDDDSGTYTCVANTTLDSVSASAVLSVVDVPNPPFDLELTDQLDKSVQLSWTPGDDNNSPITKFIIEYEDAMHKPGLWHHQTEVSGTQTTAQLKLSPYVNYSFRVMAVNSIGKSLPSEASEQYLTKASEPDKNPTAVEGLGSEPDNLVITWKPLNGFESNGPGLQYKVSWRQKDGDDEWTSVVVANVSKYIVSGTPTFVPYLIKVQALNDMGFAPEPAVVMGHSGEDLPMVAPGNVRVNVVNSTLAEVHWDPVPLKSIRGHLQGYRIYYWKTQSSSKRNRRHIEKKILTFQGSKTHGMLPGLEPFSHYTLNVRVVNGKGEGPASPDRVFNTPEGVPSAPSSLKIVNPTLDSLTLEWDPPSHPNGILTEYTLKYQPINSTHELGPLVDLKIPANKTRWTLKNLNFSTRYKFYFYAQTSAGSGSQITEEAVTTVDEAMASRQVDIATQGWFIGLMCAVALLILILLIVCFIRRNKGGKYPVKEKEDAHADPEIQPMKEDDGTFGEYSDAEDHKPLKKGSRTPSDRTVKKEDSDDSLVDYGEGVNGQFNEDGSFIGQYSGKKEKEPAEGNESSEAPSPVNAMNSFV

SEQ ID NO: 64398 - protein, 47 aa, Homo sapiens
MLGAGRGMGARMQPGVGKRGAGFRRGMRVYCIDHEPATKRVQPVGLR

SEQ ID NO: 64399 - protein, 47 aa, Homo sapiens
MKKPTPMGERDLLKFTQDHRAGQQEGAQVHALHHLPLRFADSPDAVR

SEQ ID NO: 64400 - protein, 111 aa, Homo sapiens
MAAMASLGALALLLLSSLSRCSGSGPAGASFLRASDPRQVVLGAGGMRGSGLSGSVAAGRAFPREAGGLGTGGPKHLAHVYRQPGFSLSAHTKRSPRASMVRPAPKLQHGT

SEQ ID NO: 64401 - protein, 57 aa, Homo sapiens
LLSLIFSALFILFGTVIVQAFSDSNDERESSPPEKEEAQEKTGKTEPSFTKENSRFL

SEQ ID NO: 64402 - protein, 38 aa, Homo sapiens
ISRLGLLGTATLTVWFQTPVPGWIPAIHAPSLISRSSQ

SEQ ID NO: 64403 - protein, 195 aa, Homo sapiens
TPPPPEQAMVAATVAAAWLLLWAAACAQQEQDFYDFKAVNIRGKLVSLEKYRGSVSLVVNVASECGFTDQHYRALQQLQRDLGPHHFNVLAFPCNQFGQQEPDSNKEIESFARRTYSVSFPMFSKIAVTGTGAHPAFKYLAQTSGKEPTWNFWKYLVAPDGKVVGAWDPTVSVEEVRPQITALVRKLILLKREDL

SEQ ID NO: 64404 - protein, 620 aa, Homo sapiens
LRGVLAVWVSLSALGPGSFCRRRVPSLAQLGHSEAAPSPDDVRWSRVPDRCPEERDRAWPPPPPPSLPPSFRRNMANNSPALTGNSQPQHQAAAAAAQQQQQCGGGGATKPAVSGKQGNVLPLWGNEKTMNLNPMILTNILSSPYFKVQLYELKTYHEVVDEIYFKVTHVEPWEKGSRKTAGQTGMCGGVRGVGTGGIVSTAFCLLYKLFTLKLTRKQVMGLITHTDSPYIRALGFMYIRYTQPPTDLWDWFESFLDDEEDLDVKAGGGCVMTIGEMLRSFLTKLEWFSTLFPRIPVPVQKNIDQQIKTRPRKIKKDGKEGAEEIDRHVERRRSRSPRRSLSPRRSPRRSRSRSHHREGHGSSSFDRELEREKERQRLEREAKEREKERRRSRSIDRGLERRRSRSRERHRSRSRSRDRKGDRRDRDREREKENERGRRRDRDYDKERGNEREKERERSRERSKEQRSRGEVEEKKHKEDKDDRRHRDDKRDSKKEKKHSRSRSRERKHRSRSRSRNAGKRSRSRSKEKSSKHKNESKEKSNKRSRSGSQGRTDSVEKSKKREHSPSKEKSRKRSRSKERSHKRDHSDSKDQSDKHDRRRSQSIEQESQEKQHKNKDETV

SEQ ID NO: 64405 - protein, 19 aa, Homo sapiens
TAMKLVFFGGGFSIVLSMC

SEQ ID NO: 64406 - protein, 84 aa, Homo sapiens
KTYCFDAFPNIEKVSKITSPVLIIHGREDEVIDFSHGLALYERCPKAVEPLWVEGAGHNDIELYSQYLERLRRFISQELPSQRA

SEQ ID NO: 64407 - protein, 20 aa, Homo sapiens
LNARWAPGMVLPVLCAAFTQ

SEQ ID NO: 64408 - protein, 707 aa, Homo sapiens
LPGASREPAGRRTPTPSSLCPSTRAPRPFRDPCPAGSAANLPAMETPSQRRATRSGAQASSTPLSPTRITRLQEKEDLQELNDRLAVYIDRVRSLETENAGLRLRITESEEVVSREVSGIKAAYEAELGDARKTLDSVAKERARLQLELSKVREEFKELKARNTKKEGDLIAAQARLKDLEALLNSKEAALSTALSEKRTLEGELHDLRGQVAKLEAALGEAKKQLQDEMLRRVDAENRLQTMKEELDFQKNIYSEELRETKRRHETRLVEIDNGKQREFESRLADALQELRAQHEDQVEQYKKELEKTYSAKLDNARQSAERNSNLVGAAHEELQQSRIRIDSLSAQLSQLQKQLAAKEAKLRDLEDSLARERDTSRRLLAEKEREMAEMRARMQQQLDEYQELLDIKLALDMEIHAYRKLLEGEEERLRLSPSPTSQRSRGRASSHSSQTQGGGSVTKKRKLESTESRSSFSQHARTSGRVAVEEVDEEGKFVRLRNKSNEDQSMGNWQIKRQNGDDPLLTYRFPPKFTLKAGQVVTIWAAGAGATHSPPTDLVWKAQNTWGCGNSLRTALINSTGEEVAMRKLVRSVTVVEDDEDEDGDDLLHHHHGSHCSSSGDPAEYNLRSRTVLCGTCGQPADKASASGSGAQVGGPISSGSSASSVTVTRSYRSVGGSGGGSFGDNLVTRSYLLGNSSPRTQSPQNCSIM

SEQ ID NO: 64409 - protein, 23 aa, Homo sapiens
LKKTLESWVTLKIFCMPGVAKGR

SEQ ID NO: 64410 - protein, 58 aa, Homo sapiens
LVLLCIATVFLSVGGTALYCTFGDMESPVCTDFADNMDFYYTKLLQGVAELKHWIYLS

SEQ ID NO: 64411 - protein, 229 aa, Homo sapiens
LCGLALLCALSLGQRPTGGPGCGPGRLLLGTGTDARCCRVHTTRCCRDYPGEECCSEWDCMCVQPEFHCGDPCCTTCRHHPCPPGQGVQSQGKFSFGFQCIDCASGTFSGGHEGHCKPWTDCTQFGFLTVFPGNKTHNAVCVPGSPPAEPLGWLTVVLLAVAACVLLLTSAQLGLHIWQLRSQCMWPRETQLLLEVPPSTEDARSCQFPEEERGERSAEEKGRLGDLWV

SEQ ID NO: 64412 - protein, 263 aa, Homo sapiens
IIPVPDFIMGNSCYNIVATLLLVLNFERTRSLQDPCSNCPAGTFCDNNRNQICSPCPPNSFSSAGGQRTCDICRQCKGVFRTRKECSSTSNAECDCTPGFHCLGAGCSMCEQDCKQGQELTKKGCKDCCFGTFNDQKRGICRPWTNCSLDGKSVLVNGTKERDVVCGPSPADLSPGASSVTPPAPAREPGHSPQIISFFLALTSTALLFLLFFLTLRFSVVKRGRKKLLYIFKQPFMRPVQTTQEEDGCSCRFPEEEEGGCEL

SEQ ID NO: 64413 - protein, 17 aa, Homo sapiens
ILVVFLMFSAVKHFKIY

SEQ ID NO: 64414 - protein, 336 aa, Homo sapiens
KMASPGCLWLLAVALLPWTCASRALQHLDPPAPLPLVIWHGMGSRYVAQTGLELLASSNPPASSYQSAGMIGDSCCNPLSMGAIKKMVEKKIPGIYVLSLEIGKTLMEDVENSFFLNVNSQVTTVCQALAKDPKLQQGYNAMGFSQGGQFLRAVAQRCPSPPMINLISVGGQHQGVFGLPRCPGESSHICDFIRKTLNAGAYSKVVQERLVQAEYWHDPIKEDVYRNHSIFLADINQERGINESYKKNLMALKKFVMVKFLNDSIVDPVDSEWFGFYRSGQAKETIPLQETSLYTQDRLGLKEMDNAGQLVFLATEGDHLQLSEEWFYAHIIPFLG

SEQ ID NO: 64415 - protein, 59 aa, Homo sapiens
IIPLMVFLTMVPYELQEILGTSPPCSAMILWTLVSLREHMLESQGTHLVGIALPEVMMA

SEQ ID NO: 64416 - protein, 12 aa, Homo sapiens
LEGCWLLMLLLS

SEQ ID NO: 64417 - protein, 504 aa, Homo sapiens
TWAAVGIPTGNSSYWCAAATLKDRVAAEAKDRELMEFAAENEGKSGGGLHSVAEGVRLSPEPGREGVRDLAGAEEFGGGEEGTGLTGIKEIGDGEEGSGQRPEEIPMDLTVVKQEIIDWPGTEGRLAGQWVEQEVEDRPEVKDENAGVLEVKQETDSSLVVKEAKVGEPEVKEEKVKEEVMDWSEVKEEKDNLEIKQEEKFVGQCIKEELMHGECVKEEKDFLKKEIVDDTKVKEEPPINHPVGCKRKLAMSRCETCGTEEAKYRCPRCMRYSCSLPCVKKHKAELTCNGVRDKTAYISIQQFTEMNLLSDYRFLEDVARTADHISRDAFLKRPISNKYMYFMKNRARRQGINLKLLPNGFTKRKENSTFFDKKKQQFCWHVKLQFPQSQAEYIEKRVPDDKTINEILKPYIDPEKSDPVIRQRLKAYIRSQTGVQILMKIEYMQQNLVRYYELDPYKSLLDNLRNKVIIEYPTLHVVLKGSNNDMKVLHQVKSESTKNVGNEN

SEQ ID NO: 64418 - protein, 845 aa, Homo sapiens
IAIFALMSSCLATAGPEPGALCELSPVSASHPVQALMESFTVLSGCASRGTTGLPQEVHVLNLRTAGQGPGQLQREVTLHLNPISSVHIHHKSVVFLLNSPHPLVWHLKTERLATGVSRLFLVSEGSVVQFSSANFSLTAETEERNFPHGNEHLLNWARKEYGAVTSFTELKIARNIYIKVGEDQVFPPKCNIGKNFLSLNYLAEYLQPKAAEGCVMSSQPQNEEVHIIELITPNSNPYSAFQVDITIDIRPSQEDLEVVKNLILILKCKKSVNWVIKSFDVKGSLKIIAPNSIGFGKESERSMTMTKSIRDDIPSTQGNLVKWALDNGYSPITSYTMAPVANRFHLRLENNAEEMGDEEVHTIPPELRILLDPGALPALQNPPIRGGEGQNGGLPFPFPDISRRVWNEEGEDGLPRPKDPVIPSIQLFPGLREPEEVQGSVDIALSVKCDNEKMIVAVEKDSFQASGYSGMDVTLLDPTCKAKMNGTHFVLESPLNGCGTRPRWSALDGVVYYNSIVIQVPALGDSSGWPDGYEDLESGDNGFPGDMDEGDASLFTRPEIVVFNCSLQQVRNPSSFQEQPHGNITFNMELYNTDLFLVPSQGVFSVPENGHVYVEVSVTKAEQELGFAIQTCFISPYSNPDRMSHYTIIENICPKDESVKFYSPKRVHFPIPQADMDKKRFSFVFKPVFNTSLLFLQCELTLCTKMEKHPQKLPKCVPPDEACTSLDASIIWAMMQNKKTFTKPLAVIHHEAESKEKGPSMKEPNPISPPIFHGLDTLTVMGIAFAAFVIGALLTGALWYIYSHTGETAGRQQVPTSPPASENSSAAHSIGSTQSTPCSSSSTA

SEQ ID NO: 64419 - protein, 82 aa, Homo sapiens
VLKQVHPDTGISSKTMGIMNSFVNDIFERIAGEASRLAHYNKRSTITSREIQTAVRLLLPGELAKHAVSEGTKAVTKYTSSK

SEQ ID NO: 64420 - protein, 26 aa, Homo sapiens
IAGLTIFGMIFSMVLCCAIRNSRDVI

SEQ ID NO: 64421 - protein, 20 aa, Homo sapiens
MAGSLTGLLLLQAVSWASDE

SEQ ID NO: 64422 - protein, 13 aa, Homo sapiens
KQEMASVSSSQRG

SEQ ID NO: 64423 - protein, 13 aa, Homo sapiens
ILMFRGLVLVHLS

SEQ ID NO: 64424 - protein, 12 aa, Homo sapiens
LFQILYTMLLSQ

SEQ ID NO: 64425 - protein, 16 aa, Homo sapiens
KIVFLLTLTMQRPPWL

SEQ ID NO: 64426 - protein, 67 aa, Homo sapiens
LAGDISLHPGAATSPALLLLLRLLLLHSPPLLPFVSSSTAPGKALKSGGQERQLSTFQFSMDMKIYS

SEQ ID NO: 64427 - protein, 310 aa, Homo sapiens
IVLFTLLYKILMDHQNLSEHVLCMVLYLIELGLENSAEEESDEEASVGGPERCHDSWFPGSNLVSNMRHFINYVRVRVPETAPEVKRDSPASTSSDNLGSLQNSGTAQVFSLVAERRKKFQEIINRSSSEANQVVRPKTSSKWSAPGSAPQLTTAILEIKESILSLLIKLHHKLSGKQNSYYPPWLDDIEILIQPEIPKYSHGDGITAVERILLKAASQSRMNKRIIEEICRKVTPPVPPKKVTAAEKKTLDKEERRQKARERQQKLLAEFASRQKSFMETAMDVVRQNKNNFLRNQLSNVPRADWVVLP

SEQ ID NO: 64428 - protein, 73 aa, Homo sapiens
MYFLVIWSFFFFNFKILRQALTMLPRWSQTPGFQRCSCLSLPKGWDYRCEPLCPAHLYISFGEYLGSFEGSCI

SEQ ID NO: 64429 - protein, 202 aa, Homo sapiens
LANMKSGLWYFFLFCLRIKVLTGEINGSANYEMFIFHNGGVQILCKYPDIVQQFKMQLLKGGQILCDLTKTKGSGNTVSIKSLKFCHSQLSNNSVSFFLYNLDHSHANYYFCNLSIFDPPPFKVTLTGGYLHIYESQLCCQLKFWLPIGCAAFVVVCILGCILICWLTKKKYSSSVHDPNGEYMFMRAVNTAKKSRLTDVTL

SEQ ID NO: 64430 - protein, 15 aa, Homo sapiens
KTQVFRWLLFFIFCF

SEQ ID NO: 64431 - protein, 151 aa, Homo sapiens
LCTMARALCRLPRRGLWLLLAHHLFMTTACQEANYGALLRELCLTQFQVDMEAVGETLWCDWGRTIRSYRELADCTWHMAEKLGCFWPNAEVDRFFLAVHGRYFRSCPISGRAVRDPPGSILYPFIVVPITVTLLVTALVVWQSKRTEGIV

SEQ ID NO: 64432 - protein, 30 aa, Homo sapiens
LPGSLLCSSALRTLRAGSSLIARLGSAGPD

SEQ ID NO: 64433 - protein, 16 aa, Homo sapiens
ILLSSLMMMLFSMLKN

SEQ ID NO: 64434 - protein, 507 aa, Homo sapiens
RRMSPWSWFLLQTLCLLPTGAASRRGAPGTANCELKPQQSELNSFLWTIKRDPPSYFFGTIHVPYTRVWDFIPDNSKEAFLQSSIVYFELDLTDPYTISALTSCQMLPQGENLQDVLPRDIYCRLKRHLEYVKLMMPLWMTPDQRGKGLYADYLFNAIAGNWERKRPVWVMLMVNSLTEVDIKSRGVPVLDLFLAQEAERLRKQTGAVEKVEEQCHPLNGLNFSQVIFALNQTLLQQESLRAGSLQIPYTTEDLIKHYNCGDLSSVILSHDSSQVPNFINATLPPQERITAQEIDSYLRRELIYKRNERIGKRVKALLEEFPDKGFFFAFGAGHFMGNNTVLDVLRREGYEVEHAPAGRPIHKGKSKKTSTRPTLSTIFAPKVPTLEVPAPEAVSSGHSTLPPLVSRPGSADTPSEAEQRFRKKRRRSQRRPRLRQFSDLWVRLEESDIVPQLQVPVLDRHISTELRLPRRGHSHHSQMVASSACLSLWTPVFWVLVLAFQTETPLL

SEQ ID NO: 64435 - protein, 211 aa, Homo sapiens
TMRPRLWLLLAAQLTVLHGNSVLQQTPAYIKVQTNKMVMLSCEAKISLSNMRIYWLRQRQAPSSDSHHEFLALWDSAKGTIHGEEVEQEKIAVFRDASRFILNLTSVKPEDSGIYFCMIVGSPELTFGKGTQLSVVDFLPTTAQPTKKSTLKKRVCRLPRPETQKGPLCSPITLGLLVAGVLVLLVSLGVAIHLCCRRRRARLRFMKQFYK

SEQ ID NO: 64436 - protein, 244 aa, Homo sapiens
TMRPRLWLLLAAQLTVLHGNSVLQQTPAYIKVQTNKMVMLSCEAKISLSNMRIYWLRQRQAPSSDSHHEFLALWDSAKGTIHGEEVEQEKIAVFRDASRFILNLTSVKPEDSGIYFCMIVGSPELTFGKGTQLSVVDFLPTTAQPTKKSTLKKRVCRLPRPETQKGPLCSPITLGLLVAGVLVLLVSLGVAIHLCCRRRRARLRFMKQPQGEGISGTFVPQCLHGYYSNTTTSQKLLNPWILKT

SEQ ID NO: 64437 - protein, 60 aa, Homo sapiens
VWFFFLFCFRFSSFEEQREIKRRPPGRGAFSQRLGRFPKSRVPASPAEFTSVPEAAVSSS

SEQ ID NO: 64438 - protein, 24 aa, Homo sapiens
TPGRLLAVGAAAAASAAAFRLPLH

SEQ ID NO: 64439 - protein, 13 aa, Homo sapiens
LDKGFLHLFLFFF

SEQ ID NO: 64440 - protein, 6 aa, Homo sapiens
ILALLL

SEQ ID NO: 64441 - protein, 18 aa, Homo sapiens
MKLPKELQPLVLLQGLLA

SEQ ID NO: 64442 - protein, 40 aa, Homo sapiens
LSLLPPPPSLRHGPLRGPAGARALAAPGCRERSSERTPAL

SEQ ID NO: 64443 - protein, 15 aa, Homo sapiens
LCFFLFQFILNAYFS

SEQ ID NO: 64444 - protein, 21 aa, Homo sapiens
MWIPLRNLYSQLWLKALWSLA

SEQ ID NO: 64445 - protein, 441 aa, Homo sapiens
LVLMVFVHLYLGNVLALLLFVHYSNGDESSDPGPQHRAQGPGPEPTLGPLTRLEGIKVGHERKVQLVTDRDHFIRTLSLKPLLFEIPGFLTDEECRLIIHLAQMKGLQRSQILPTEEYEEAMSTMQVSQLDLFRLLDQNRDGHLQLREVLAQTRLGNGWWMTPESIQEMYAAIKADPDGDGVLSLQEFSNMDLRDFHKYMRSHKAESSELVRNSHHTWLYQGEGAHHIMRAIRQRVLRLTRLSPEIVELSEPLQVVRYGEGGHYHAHVDSGPVYPETICSHTKLVANESVPFETSCRYMTVLFYLNNVTGGGETVFPVADNRTYDEMSLIQDDVDLRDTRRHCDKGNLRVKPQQGTAVFWYNYLPDGQGWVGDVDDYSLHGGCLVTRGTKWIANNWINVDPSRARQALFQQEMARLAREGGTDSQPEWALDRAYRDARVEL

SEQ ID NO: 64446 - protein, 13 aa, Homo sapiens
IEVFMIQHLLLFL

SEQ ID NO: 64447 - protein, 97 aa, Homo sapiens
LLLLHSALFWRLAPLRCRLLLDQASFSTSARGADPSGTLPPRLVLSPSPPRLRPWPRWLCATETPSWRMLEETLRMATTTMKELLSFWMLVLSTGKS

SEQ ID NO: 64448 - protein, 253 aa, Homo sapiens
LWTMSVIFFACVVRVRDGLPLSASTDFYHTQDFLEWRRRLKSLALRLAQYPGRGSAEGCDFSIHFSSFGDVACMAICSCQCPAAMAFCFLETLWWEFTASYDTTCIGLASRPYAFLEFDSIIQKVKWHFNYVSSSQMECSLEKIQEELKLQPPAVLTLEDTDVANGVMNGHTPMHLEPAPNFRMEPVTALGILSLILNIMCAALNLIRGVHLAEHSLQVAHEEIGNILAFLVPFVACIFQDPRSWFCWLDQTS

SEQ ID NO: 64449 - protein, 229 aa, Homo sapiens
LPLLLLLLLTPPPGARGEVCMASRGLSLFPESCPDFCCGTCDDQYCCSDVLKKFVWSEERCAVPEASVPASVEPVEQLGSALRFRPGYNDPMSGFGATLAVGLTIFVLSVVTIIICFTCSCCCLYKTCRRPRPVVTTTTSTTVVHAPYPQPPSVPPSYPGPSYQGYHTMPPQPGMPAAPYPMQYPPPYPAQPMGPPAYHETLAGGAAAPYPASQPPYNPAYMDAPKAAL

SEQ ID NO: 64450 - protein, 1532 aa, Homo sapiens
LCVCELWPLAGSGGGSGGAASDGKAMTTVVVHVDSKAELTTLLEQWEKEHGSGQDMVPILTRMSQLIEKETEEYRKGDPDPFDDRHPGRADPECMLGHLLRILFKNDDFMNALVNAYVMTSREPPLNTAACRLLLDIMPGLETAVVFQEKEGIVENLFKWAREADQPLRTYSTGLLGGAMENQDIAANYRDENSQLVAIVLRRLRELQLQEVALRQENKRPSPRKLSSEPLLPLDEEAVDMDYGDMAVDVVDGDQEEASGDMEISFHLDSGHKTSSRVNSTTKPEDGGLKKNKSAKQGDRENFRKAKQKLGFSSSDPDRMFVELSNSSWSEMSPWVIGTNYTLYPMTPAIEQRLILQYLTPLGEYQELLPIFMQLGSRELMMFYIDLKQTNDVLLTFEALKHLASLLLHNKFATEFVAHGGVQKLLEIPRPSMAATGVSMCLYYLSYNQDAMERVCMHPHNVLSDVVNYTLWLMECSHASGCCHATMFFSICFSFRAVLELFDRYDGLRRLVNLISTLEILNLEDQGALLSDDEIFASRQTGKHTCMALRKYFEAHLAIKLEQVKQSLQRTEGGILVHPQPPYKACSYTHEQIVEMMEFLIEYGPAQLYWEPAEVFLKLSCVQLLLQLISIACNWKTYYARNDTVRFALDVLAILTVVPKIQLQLAESVDVLDEAGSTVSTVGISIILGVAEGEFFIHDAEIQKSALQIIINCVCGPDNRISSIGKFISGTPRRKLPQNPKSSEHTLAKMWNVVQSNNGIKVLLSLLSIKMPITDADQIRALACKALVGLSRSSTVRQIISKLPLFSSCQIQQLMKEPVLQDKRSDHVKFCKYAAELIERVSGKPLLIGTDVSLARLQKADVVAQSRISFPEKELLLLIRNHLISKGLGETATVLTKEADLPMTAASHSSAFTPVTAAASPVSLPRTPRIANGIATRLGSHAAVGASAPSAPTAHPQPRPPQGPLALPGPSYAGNSPLIGRISFIRERPSPCNGRKIRVLRQKSDHGAYSQSPAIKKQLDRHLPSPPTLDSIITEYLREQHARCKNPVATCPPFSLFTPHQCPEPKQRRQAPINFTSRLNRRASFPKYGGVDGGCFDRHLIFSRFRPISVFREANEDESGFTCCAFSARERFLMLGTCTGQLKLYNVFSGQEEASYNCHNSAITHLEPSRDGSLLLTSATWSQPLSALWGMKSVFDMKHSFTEDHYVEFSKHSQDRVIGTKGDIAHIYDIQTGNKLLTLFNPDLANNYKRNCATFNPTDDLVLNDGVLWDVRSAQAIHKFDKFNMNISGVFHPNGLEVIINTEIWDLRTFHLLHTVPALDQCRVVFNHTGTVMYGAMLQADDEDDLMEERMKSPFGSSFRTFNATDYKPIATIDVKRNIFDLCTDTKDCYLAVIENQGSMDALNMDTVCRLYEVGRQRLAEDEDEEEDQEEEEQEEEDDDEDDDDTDDLDELDTDQLLEAELEEDDNNENAGEDGDNDFSPSDEELANLLEEGEDGEDEDSDADEEVELILGDTDSSDNSDLEDDIILSLNE

SEQ ID NO: 64451 - protein, 8 aa, Homo sapiens
KVFFFLFF

SEQ ID NO: 64452 - protein, 98 aa, Homo sapiens
LLAMAPPPACRSPMSPPPPPLLLLLLSLALLGARARAEPAGSAVPAQSRPCVDCHAFEFMQRALQDLRKTACSLDARTETLLLQAERRALCACWPAGH

SEQ ID NO: 64453 - protein, 17 aa, Homo sapiens
LMNFYITVHVLCFAVIP

SEQ ID NO: 64454 - protein, 29 aa, Homo sapiens
IMIMAAIFLSTYSTADTKCIHHMHALTHS

SEQ ID NO: 64455 - protein, 103 aa, Homo sapiens
LCVNMTSKLAVALLAAFLISAALCEGAVLPRSAKELRCQCIKTYSKPFHPKFIKELRVIESGPHCANTEIIVKLSDGRELCLDPKENWVQRVVEKFLKRAENS

SEQ ID NO: 64456 - protein, 80 aa, Homo sapiens
LEFQLGLGGKAQAAQVADTLTHPPCLAAPLRPGDPMKEENESHKEKSYRRRIPVPGLFSPNRRMHLSSSYICNFISVILL

SEQ ID NO: 64457 - protein, 27 aa, Homo sapiens
VFRRFRCRLFAVGKPRQLLLPLVLPLL

SEQ ID NO: 64458 - protein, 56 aa, Homo sapiens
ITLLILAELLIFSVPIVYEKYKTQIDHYVGIARHQTKSIVEKIQAKLPGIAKKKAE

SEQ ID NO: 64459 - protein, 22 aa, Homo sapiens
VSTAIRWACAFVLSACLGVTAG

SEQ ID NO: 64460 - protein, 284 aa, Homo sapiens
IVITFILILPEYFKTPKERTLELSCLEVCLQSNFTYSLSSLNFSFVTFLQPVRETQIIMRIFLNPSNFRNFTRTCQDITGEFKMCSSCLVCESKGNMDFISQEQTSKVLIRRGSMEVKANDFHSPCQHFNFSVAPLVDHLEEYNTTCHLKNHTGRSTIMEDEPSKEKSINYTCRIMEYPNDCIHISLHLEMDIKNITCSMKITWYILVLLVFIFLIILTIRKILEGQRRVQKWQSHRDKPTSVLLRGSDSEKLRALNVQVLSAETTQRLPLDQVQEVLPPIPEL

SEQ ID NO: 64461 - protein, 24 aa, Homo sapiens
LHRSNSFYRILLLVLILLSGNRPR

SEQ ID NO: 64462 - protein, 461 aa, Homo sapiens
RMAPGRAVAGLLLLAAAGLGGVAEGPGLAFSEDVLSVFGANLSLSAAQLQHLLEQMGAASRVGVPEPGQLHFNQCLTAEEIFSLHGFSNATQITSSKFSVICPAVLQQLNFHPCEDRPKHKTRPSHSEVWGYGFLSVTIINLASLLGLILTPLIKKSYFPKILTFFVGLAIGTLFSNAIFQLIPEAFGFDPKVDSYVEKAVAVFGGFYLLFFFERMLKMLLKTYGQNGHTHFGNDNFGPQEKTHQPKALPAINGVTCYANPAVTEANGHIHFDNVSVVSLQDGKKEPSSCTCLKGPKLSEIGTIAWMITLCDALHNFIDGLAIGASCTLSLLQGLSTSIAILCEEFPHELGDFVILLNAGMSTRQALLFNFLSACSCYVGLAFGILVGNNFAPNIIFALAGGMFLYISLADMFPEMNDMLREKVTGRKTDFTFFMIQNAGMLTGFTAILLITLYAGEIELE

SEQ ID NO: 64463 - protein, 10 aa, Homo sapiens
IWLNAILWIF

SEQ ID NO: 64464 - protein, 16 aa, Homo sapiens
ILVYVLAVLSLSIKNA

SEQ ID NO: 64465 - protein, 32 aa, Homo sapiens
LKFHGSLFLPLLKVLGIFDFSSFMSQWDTFSE

SEQ ID NO: 64466 - protein, 159 aa, Homo sapiens
VPPADPNMSRLPVLLLLQLLVRPGLQAPMTQTTPLKTSWVNCSNMIDEIITHLKQPPLPLLDFNNLNGEDQDILMENNLRRPNLEAFNRAVKSLQNASAIESILKNLLPCLPLATAAPTRHPIHIKDGDWNEFRRKLTFYLKTLENAQAQQTTLSLAIF

SEQ ID NO: 64467 - protein, 10 aa, Homo sapiens
IRPNIVWLAL

SEQ ID NO: 64468 - protein, 29 aa, Homo sapiens
MMERSMMILLMAASMTMTSTQLWSFCCVH

SEQ ID NO: 64469 - protein, 645 aa, Homo sapiens
LKSRIVVFPLASLCESWLAALCTPSLEADPRRQAGETVPPRGRPPREHSLRPRCTAGLGNMKEQPSCAGTGHPSMAGYGRMAPFELASGPVKRLRTESPFPCLFAEEAYQKLASETLEELDWCLDQLETLQTRHSVSEMASNKFKRMLNRELTHLSEMSRSGNQVSEFISNTFLDKQHEVEIPSPTQKEKEKKKRPMSQISGVKKLMHSSSLTNSSIPRFGVKTEQEDVLAKELEDVNKWGLHVFRIAELSGNRPLTVIMHTIFQERDLLKTFKIPVDTLITYLMTLEDHYHADVAYHNNIHAADVVQSTHVLLSTPALEAVFTDLEILAAIFASAIHDVDHPGVSNQFLINTNSELALMYNDSSVLENHHLAVGFKLLQEENCDIFQNLTKKQRQSLRKMVIDIVLATDMSKHMNLLADLKTMVETKKVTSSGVLLLDNYSDRIQVLQNMVHCADLSNPTKPLQLYRQWTDRIMEEFFRQGDRERERGMEISPMCDKHNASVEKSQVGFIDYIVHPLWETWADLVHPDAQDILDTLEDNREWYQSTIPQSPSPAPDDPEEGRQGQTEKFQFELTLEEDGESDTEKDSGSQVEEDTSCSDSKTLCTQDSESTEIPLDEQVEEEAVGEEEESQPEACVIDDRSPDT

SEQ ID NO: 64470 - protein, 430 aa, Homo sapiens
TAGAGLLRLLLGCGALVGGLRPVTMTTPANAQNASKTWELSLYELHRTPQEAIMDGTEIAVSPRSLHSELMCPICLDMLKNTMTTKECLHRFCSDCIVTALRSGNKECPTCRKKLVSKRSLRPDPNFDALISKIYPSREEYEAHQDRVLIRLSRLHNQQALSSSIEEGLRMQAMHRAQRVRRPIPGSDQTTTMSGGEGEPGEGEGDGEDVSSDSAPDSAPGPAPKRPRGGGAGGSSVGTGGGGTGGVGGGAGSEDSGDRGGTLGGGTLGPPSPPGAPSPPEPGGEIELVFRPHPLLVEKGEYCQTRYVKTTGNATVDHLSKYLALRIALERRQQQEAGEPGGPGGGASDTGGPDGCGGEGGGAGGGDGPEEPALPSLEGVSEKQYTIYIAPGGGAFTTLNGSLTLELVNEKFWKVSRPLELCYAPTKDPK

SEQ ID NO: 64471 - protein, 271 aa, Homo sapiens
LPHSRALLTPNRAPKKKMAISGVPVLGFFIIAVLMSAQESWAIKEEHVIIQAEFYLNPDQSGEFMFDFDGDEIFHVDMAKKETVWRLEEFGRFASFEAQGALANIAVDKANLEIMTKRSNYTPITNVPPEVTVLTNSPVELREPNVLICFIDKFTPPVVNVTWLRNGKPVTTGVSETVFLPREDHLFRKFHYLPFLPSTEDVYDCRVEHWGLDEPLLKHWEFDAPSPLPETTENVVCALGLTVGLVGIIIGTIFIIKGLRKSNAAERRGPL

SEQ ID NO: 64472 - protein, 456 aa, Homo sapiens
VFIMKLLVILLFSGLITGFRSDSSSSLPPKLLLVSFDGFRADYLKNYEFPHLQNFIKEGVLVEHVKNVFITKTFPNHYSIVTGLYEESHGIVANSMYDAVTKKHFSDSNDKDPFWWNEAVPIWVTNQLQENRSSAAAMWPGTDVPIHDTISSYFMNYNSSVSFEERLNNITMWLNNSNPPVTFATLYWEEPDASGHKYGPEDKENMSRVLKKIDDLIGDLVQRLKMLGLWENLNVIITSDHGMTQCSQDRLINLDSCIDHSYYTLIDLSPVAAILPKINRTEVYNKLKNCSPHMNVYLKEDIPNRFYYQHNDRIQPIILVADEGWTIVLNESSQKLGDHGYDNSLPSMHPFLAAHGPAFHKGYKHSTINIVDIYPMMCHILGLKPHPNNGTFGHTKCLLVDQWCINLPEAIAIVIGSLLVLTMLTCLIIIMQNRLSVPRPFSRLQLQEDDDDPLIG

SEQ ID NO: 64473 - protein, 66 aa, Homo sapiens
LGLSGYRKASLRCSLLRIILFFSRCLRKCTMERRRWRLLPFRQKLPNSCPSSSIPSIPTRRFSFGS

SEQ ID NO: 64474 - protein, 15 aa, Homo sapiens
VAALSPVAQSLLLLL

SEQ ID NO: 64475 - protein, 25 aa, Homo sapiens
KMTRSHRFEDLIYTIIPAKRMYFLF

SEQ ID NO: 64476 - protein, 14 aa, Homo sapiens
LLRQVYTTLFGVLC

SEQ ID NO: 64477 - protein, 743 aa, Homo sapiens
LPAPQPRLAASPASSGPLPEPAPLHAAPCLSPAMLSLQYPDVYRDETAVQDYHGHKICDPYAWLEDPDSEQTKAFVEAQNKITVPFLEQCPIRGLYKERMTELYDYPKYSCHFKKGKRYFYFYNTGLQNQRVLYVQDSLEGEARVFLDPNILSDDGTVALRGYAFSEDGEYFAYGLSASGSDWVTIKFMKVDGAKELPDVLERVKFSCMAWTHDGKGMFYNSYPQQDGKSDGTETSTNLHQKLYYHVLGTDQSEDILCAEFPDEPKWMGGAELSDDGRYVLLSIREGCDPVNRLWYCDLQQESSGIAGILKWVKLIDNFEGEYDYVTNEGTVFTFKTNRQSPNYRVINIDFRDPEESKWKVLVPEHEKDVLEWIACVRSNFLVLCYLHDVKNILQLHDLTTGALLKTFPLDVGSIVGYSGQKKDTEIFYQFTSFLSPGIIYHCDLTKEELEPRVFREVTVKGIDASDYQTVQIFYPSKDGTKIPMFIVHKKGIKLDGSHPAFLYGYGGFNISITPNYSVSRLIFVRHMGGILAVANIRGGGEYGETWHKGGILANKQNCFDDFQCAAEYLIKEGYTSPKRLTINGGSNGGLLVAACANQRPDLFGCVIAQVGVMDMLKFHKYTIGHAWTTDYGCSDSKQHFEWLVKYSPLHNVKLPEADDIQYPSMLLLTADHDDRVVPLHSLKFIATLQYIVGRSRKQSNPLLIHVDTKAGHGAGKPTAKVIEEVSDMFAFIARCLNVDWIP

SEQ ID NO: 64478 - protein, 27 aa, Homo sapiens
MIRVLMILLLAYQLLHFHFQKMIRALK

SEQ ID NO: 64479 - protein, 82 aa, Homo sapiens
LRRTSQLGQWLRRLPAPPLRHKRSRRVAAFLLGTHLGKGLIHLDSRLALNSASCTVILKYFCGREHGGVTVVPVMTQNPRST

SEQ ID NO: 64480 - protein, 767 aa, Homo sapiens
TRFGFPGLMAGLTLFVGRLPPSARSEQLEELFSQVGPVKQCFVVTEKGSKACRGFGYVTFSMLEDVQRALKEITTFEGCKINVTVAKKKLRNKTKEKGKNENSECPKKEPKAKKAKVADKKARLIIRNLSFKCSEDDLKTVFAQFGAVLEVNIPRKPDGKMRGFGFVQFKNLLEAGKALKGMNMKEIKGRTVAVDWAVAKDKYKDTQSVSAIGEEKSHESKHQESVKKKGREEEDMEEEENDDDDDDDDEEDGVFDDEDEEEENIESKVTKPVQIQKRAVKRPAPAKSSDHSEEDSDLEESDSIDDGEELAQSDTSTEEQEDKAVQVSNKKKRKLPSDVNEGKTVFIRNLSFDSEEEELGELLQQFGELKYVRIVLHPDTEHSKGCAFAQFMTQEAAQKCLLAASPENEAGGLKLDGRQLKVDLAVTRDEAAKLQTTKVKKPTGTRNLYLAREGLIRAGTKAAEGVSAADMAKRERFELLKHQKLKDQNIFVSRTRLCLHNLPKAVDDKQLRKLLLSATSGEKGVRIKECRVMRDLKGVHGNMKGQSLGYAFAEFQEHEHALKALRLINNNPEIFGPLKRPIVEFSLEDRRKLKMKELRIQRSLQKMRSKPATGEPQKGQPEPAKDQQQKAAQHHTEEQSKVPPEQKRKAGSTSWTGFQTKAEVEQVELPDGKKRRKVLALPSHRGPKIRLRDKGKVKPVHPKKPKPQINQWKQEKQQLSSEQVSRKKAKGNKTETRFNQLVEQYKQKLLGPSKGAPLAKRSKWFDS

SEQ ID NO: 64481 - protein, 52 aa, Homo sapiens
LGTLLQEYGLLQRRLENVENLLHNRNFWILRLPPGSKGESPKVPMTFDDVAV

SEQ ID NO: 64482 - protein, 56 aa, Homo sapiens
MPYQACITHKQPPTIGTANRYSELCAQLPCHSAEVGYFRDTSTYSVICQNHKTGLV

SEQ ID NO: 64483 - protein, 28 aa, Homo sapiens
LMIISAFEPLLPPLLLLFLISLTQRVNC

SEQ ID NO: 64484 - protein, 9 aa, Homo sapiens
MYNYLLLLI

SEQ ID NO: 64485 - protein, 54 aa, Homo sapiens
TDSAGPRARRRRYAGAAGGVAGPGARCLCAAGRLVPGAPSVRRAARAPAAAARP

SEQ ID NO: 64486 - protein, 12 aa, Homo sapiens
LPLFMSPTPKSS

SEQ ID NO: 64487 - protein, 1242 aa, Homo sapiens
LGTGQLRDVTWGPQGSGECEVPKTSNAPYPPRKPGSQAPRDRFMPLTGVEPARMNRKKGDKGFESPRPYKLTHQVVCINNINFQRKSVVGFVELTIFPTVANLNRIKLNSKQCRIYRVRINDLEAAFIYNDPTLEVCHSESKQRNLNYFSNAYAAAVSAVDPDAGNGELCIKVPSELWKHVDELKVLKIHINFSLDQPKGGLHFVVPSVEGSMAERGAHVFSCGYQNSTRFWFPCVDSYSELCTWKLEFTVDAAMVAVSNGDLVETVYTHDMRKKTFHYMLTIPTAASNISLAIGPFEILVDPYMHEVTHFCLPQLLPLLKHTTSYLHEVFEFYEEILTCRYPYSCFKTVFIDEAYVEVAAYASMSIFSTNLLHSAMIIDETPLTRRCLAQSLAQQFFGCFISRMSWSDEWVLKGISGYIYGLWMKKTFGVNEYRHWIKEELDKIVAYELKTGGVLLHPIFGGGKEKDNPASHLHFSIKHPHTLSWEYYSMFQCKAHLVMRLIENRISMEFMLQVFNKLLSLASTASSQKFQSHMWSQMLVSTSGFLKSISNVSGKDIQPLIKQWVDQSGVVKFYGSFAFNRKRNVLELEIKQDYTSPGTQKYVGPLKVTVQELDGSFNHTLQIEENSLKHDIPCHSKSRRNKKKKIPLMNGEEVDMDLSAMDADSPLLWIRIDPDMSVLRKVEFEQADFMWQYQLRYERDVVAQQESILALEKFPTPASRLALTDILEQEQCFYRVRMSACFCLAKIANSMVSTWTGPPAMKSLFTRMFCCKSCPNIVKTNNFMSFQSYFLQKTMPVAMALLRDVHNLCPKEVLTFILDLIKYNDNRKNKFSDNYYRAEMIDALANSVTPAVSVNNEVRTLDNLNPDVRLILEEITRFLNMEKLLPSYRHTITVSCLRAIRVLQKNGHVPSDPALFKSYAEYGHFVDIRIAALEAVVDYTKVDRSYEELQWLLNMIQNDPVPYVRHKILNMLTKNPPFTKNMESPLCNEALVDQLWKLMNSGTSHDWRLRCGAVDLYFTLFGLSRPSCLPLPELGLVLNLKEKKAVLNPTIIPESVAGNQEAANNPSSHPQLVGFQNPFSSSQDEEEIDMDTVHDSQAFISHHLNMLERPSTPGLSKYRPASSRSALIPQHSAGCDSTPTTKPQWSLELARKGTGKEQAPLEMSMHPAASAPLSVFTKESTASKHSDHHHHHHHEHKKKKKKHKHKHKHKHKHDSKEKDKEPFTFSSPASGRSIRSPSLSD

SEQ ID NO: 64488 - protein, 41 aa, Homo sapiens
VAAARAHLATWPLVAAHVVLVLQSAHPLPPRSSEQHFAVPS

SEQ ID NO: 64489 - protein, 8 aa, Homo sapiens
VIFILMVS

SEQ ID NO: 64490 - protein, 33 aa, Homo sapiens
ISFFYLFLLAPKLPGSHFLLLEFNQILPTPAPS

SEQ ID NO: 64491 - protein, 12 aa, Homo sapiens
IWCTLIPVTFGL

SEQ ID NO: 64492 - protein, 43 aa, Homo sapiens
RMEVAALLVFRTCWIRSLCVWPQPLETSYSAVSAHNSWSVLGV

SEQ ID NO: 64493 - protein, 105 aa, Homo sapiens
LSSSCLSGRAPFKSSDCKERRSRCPRVPGFQNKNRVAILAELDKEKRKLLMQNQSSTNHPGASMLMHIHLDTSSLKTLHLGTLFFLFYLALTQNEENICDGKVTL

SEQ ID NO: 64494 - protein, 14 aa, Homo sapiens
LLFIGLLSVYLLRL

SEQ ID NO: 64495 - protein, 56 aa, Homo sapiens
LLGLVSAAAAAWDLASLRCTLGAFCECDFRPDLPEGSEELGPREPHCLWPLPLPLR

SEQ ID NO: 64496 - protein, 305 aa, Homo sapiens
LLGLVSAAAAAWDLASLRCTLGAFCECDFRPDLPGLECDLAQHLAGQHLAKALVVKALKAFVRDPAPTKPLVLSLHGWTGTGKSYVSSLLAHYLFQGGLRSPRVHHFSPVLHFPHPSHIERYKKDLKSWVQGNLTACGRSLFLFDEMDKMPPGLMEVLRPFLGSSWVVYGTNYRKAIFIFISNTGGKQINQVALEAWRSRRDREEILLQELEPVISRAVLDNPHHGFSNSGIMEERLLDAVVPFLPLQRHHVRHCVLNELAQLGLEPRDEVVQAVLDSTTFFPEDEQLFSSNGCKTVASRIAFFL

SEQ ID NO: 64497 - protein, 26 aa, Homo sapiens
IPLVLFFILLGLRQKKPTISVKEVCK

SEQ ID NO: 64498 - protein, 12 aa, Homo sapiens
KTWIISIFVMDC

SEQ ID NO: 64499 - protein, 487 aa, Homo sapiens
IRVVLVLLGVLSVCAASGHGSVAEREAGGEAEWAEPWDGAVFRPPSALGAVGVTRSSGTPRPGREEAGDLPVLLWWSPGLFPHFPGDSERIECARGACVASRNRRALRDSRTRALLFYGTDFRASAAPLPRLAHQSWALLHEESPLNNFLLSHGPGIRLFNLTSTFSRHSDYPLSLQWLPGTAYLRRPVPPPMERAEWRRRGYAPLLYLQSHCDVPADRDRYVRELMRHIPVDSYGKCLQNRELPTARLQDTATATTEDPELLAFLSRYKFHLALENAICNDYMTEKLWRPMHLGAVPVYRGSPSVRDWMPNNHSVILIDDFESPQKLAEFIDFLDKNDEEYMKYLAYKQPGGITNQFLLDSLKHREWGVNDPLLPNYLNGFECFVCDYELARLDAEKAHAASPGDSPVFEPHIAQPSHMDCPVPTPGFGNVEEIPENDSWKEMWLQDYWQGLDQGEALTAMIHNNETEQTKFWDYLHEIFMKRQHL

SEQ ID NO: 64500 - protein, 1179 aa, Homo sapiens
LLALLLAVAAARIMSGRRCAGGGAACASAAAEAVEPAARELFEACRNGDVERVKRLVTPEKVNSRDTAGRKSTPLHFAAGFGRKDVVEYLLQNGANVQARDDGGLIPLHNACSFGHAEVVNLLLRHGADPNARDNWNYTPLHEAAIKGKIDVCIVLLQHGAEPTIRNTDGRTALDLADPSAKAVLTGEYKKDELLESARSGNEEKMMALLTPLNVNCHASDGRKSTPLHLAAGYNRVKIVQLLLQHGADVHAKDKGDLVPLHNACSYGHYEVTELLVKHGACVNAMDLWQFTPLHEAASKNRVEVCSLLLSYGADPTLLNCHNKSAIDLAPTPQLKERLAYEFKGHSLLQAAREADVTRIKKHLSLEMVNFKHPQTHETALHCAAASPYPKRKQICELLLRKGANINEKTKEFLTPLHVASEKAHNDVVEVVVKHEAKVNALDNLGQTSLHRAAYCGHLQTCRLLLSYGCDPNIISLQGFTALQMGNENVQQLLQEGISLGNSEADRQLLEAAKAGDVETVKKLCTVQSVNCRDIEGRQSTPLHFAAGYNRVSVVEYLLQHGADVHAKDKGGLVPLHNACSYGHYEVAELLVKHGAVVNVADLWKFTPLHEAAAKGKYEICKLLLQHGADPTKKNRDGNTPLDLVKDGDTDIQDLLRGDAALLDAAKKGCLARVKKLSSPDNVNCRDTQGRHSTPLHLAAGYNNLEVAEYLLQHGADVNAQDKGGLIPLHNAASYGHVDVAALLIKYNACVNATDKWAFTPLHEAAQKGRTQLCALLLAHGADPTLKNQEGQTPLDLVSADDVSALLTAAMPPSALPSCYKPQVLNGVRSPGATADALSSGPSSPSSLSAASSLDNLSGSFSELSSVVSSSGTEGASSLEKKEVPGVDFSITQFVRNLGLEHLMDIFEREQITLDVLVEMGHKELKEIGINAYGHRHKLIKGVERLISGQQGLNPYLTLNTSGSGTILIDLSPDDKEFQSVEEEMQSTVREHRDGGHAGGIFNRYNILKIQKVCNKKLWERYTHRRKEVSEENHNHANERMLFHGSPFVNAIIHKGFDERHAYIGGMFGAGIYFAENSSKSNQYVYGIGGGTGCPVHKDRSCYICHRQLLFCRVTLGKSFLQFSAMKMAHSPPGHHSVTGRPSVNGLALAEYVIYRGEQAYPEYLITYQIMRPEGMVDG

SEQ ID NO: 64501 - protein, 12 aa, Homo sapiens
ILPVGMNDQKWA

SEQ ID NO: 64502 - protein, 46 aa, Homo sapiens
TDSVTKHFFLFLVLCNVSGIGSVISMSISTRKHCLDEVWWKPGSPF

SEQ ID NO: 64503 - protein, 282 aa, Homo sapiens
LPRLVPRVRKMDSYLLMWGLLTFIMVPGCQAELCDDDPPEIPHATFKAMAYKEGTMLNCECKRGFRRIKSGSLYMLCTGNSSHSSWDNQCQCTSSATRNTTKQVTPQPEEQKERKTTEMQSPMQPVDQASLPGHCREPPPWENEATERIYHFVVGQMVYYQCVQGYRALHRGPAESVCKMTHGKTRWTQPQLICTGEMETSQFPGEEKPQASPEGRPESETSCLVTTTDFQIQTEMAATMETSIFTTEYQVAVAGCVFLLISVLLLSGLTWQRRQRKSRRTI

SEQ ID NO: 64504 - protein, 20 aa, Homo sapiens
MMMSNVMLMLQLQPLLAQPL

SEQ ID NO: 64505 - protein, 535 aa, Homo sapiens
KMIWYILIIGILLPQSLAHPGFFTSIGQMTDLIHTEKDLVTSLKDYIKAEEDKLEQIKKWAEKLDRLTSTATKDPEGFVGHPVNAFKLMKRLNTEWSELENLVLKDMSDGFISNLTIQRQYFPNDEDQVGAAKALLRLQDTYNLDTDTISKGNLPGVKHKSFLTAEDCFELGKVAYTEADYYHTELWMEQALRQLDEGEISTIDKVSVLDYLSYAVYQQGDLDKALLLTKKLLELDPEHQRANGNLKYFEYIMAKEKDVNKSASDDQSDQKTTPKKKGVAVDYLPERQKYEMLCRGEGIKMTPRRQKKLFCRYHDGNRNPKFILAPAKQEDEWDKPRIIRFHDIISDAEIEIVKDLAKPRLRRATISNPITGDLETVHYRISKSAWLSGYENPVVSRINMRIQDLTGLDVSTAEELQVANYGVGGQYEPHFDFARKDEPDAFKELGTGNRIATWLFYMSDVSAGGATVFPEVGASVWPKKGTAVFWYNLFASGEGDYSTRHAACPVLVGNKWVSNKWLHERGQEFRRPCTLSELE

SEQ ID NO: 64506 - protein, 535 aa, Homo sapiens
KMIWYILIIGILLPQSLAHPGFFTSIGQMTDLIHTEKDLVTSLKDYIKAEEDKLEQIKKWAEKLDRLTSTATKDPEGFVGHPVNAFKLMKRLNTEWSELENLVLKDMSDGFISNLTIQRQYFPNDEDQVGAAKALLRLQDTYNLDTDTISKGNLPGVKHKSFLTAEDCFELGKVAYTEADYYHTELWMEQALRQLDEGEISTIDKVSVLDYLSYAVYQQGDLDKALLLTKKLLELDPEHQRANGNLKYFEYIMAKEKDVNKSASDDQSDQKTTPKKKGVAVDYLPERQKYEMLCRGEGIKMTPRRQKKLFCRYHDGNRNPKFILAPAKQEDEWDKPRIIRFHDIISDAEIEIVKDLAKPRLSRATVHDPETGKLTTAQYRVSKSAWLSGYENPVVSRINMRIQDLTGLDVSTAEELQVANYGVGGQYEPHFDFARKDEPDAFKELGTGNRIATWLFYMSDVSAGGATVFPEVGASVWPKKGTAVFWYNLFASGEGDYSTRHAACPVLVGNKWVSNKWLHERGQEFRRPCTLSELE

SEQ ID NO: 64507 - protein, 93 aa, Homo sapiens
VRPGVGLQVLSVFVLCPAKAVELVRAGSGALRGAARRRHHGPPHYSPLQGLPWGPLNHPPCPGWLHQSAVLPHCGCSQQVSQGWPFRRAAGLL

SEQ ID NO: 64508 - protein, 34 aa, Homo sapiens
ITPKRLVFVLKVSLIVTMHSGGLLIEHRPLYYNF

SEQ ID NO: 64509 - protein, 167 aa, Homo sapiens
LTILGAVLLVTFSMAAPGISSQADFAEKLKMIVKILLTDMHLPSFHLKDVLTTIGEKVCLEVSSCLSLCGSSPFTTDKETVLKGQIQAVASPDDPIRRIMESRILTFLETYLASGHQKPLPTVPGGLSPVQRELEEVAIKFARLVNYNKMVFCPYYDAILSKILVRS

SEQ ID NO: 64510 - protein, 555 aa, Homo sapiens
LGPRVQVGVEPPSDRKLRRVAGSAGTMSQDTEVDMKEVELNELEPEKQPMNAASGAAMSLAGAEKNGLVKIKVAEDEAEAAAAAKFTGLSKEELLKVAGSPGWVRTRWALLLLFWLGWLGMLAGAVVIIVRAPRCRELPAQKWWHTGALYRIGDLQAFQGHGAGNLAGLKGRLDYLSSLKVKGLVLGPIHKNQKDDVAQTDLLQIDPNFGSKEDFDSLLQSAKKKSIRVILDLTPNYRGENSWFSTQVDTVATKVKDALEFWLQAGVDGFQVRDIENLKDASSFLAEWQNITKGFSEDRLLIAGTNSSDLQQILSLLESNKDLLLTSSYLSDSGSTGEHTKSLVTQYLNATGNRWCSWSLSQARLLTSFLPAQLLRLYQLMLFTLPGTPVFSYGDEIGLDAAALPGQPMEAPVMLWDESSFPDIPGAVSANMTVKGQSEDPGSLLSLFRRLSDQRSKERSLLHGDFHAFSAGPGLFSYIRHWDQNERFLVVLNFGDVGLSAGLQASDLPASASLPAKADLLLSTQPGREEGSPLELERLKLEPHEGLLLRFPYAA

SEQ ID NO: 64511 - protein, 13 aa, Homo sapiens
LPIFLFFCPSILL

SEQ ID NO: 64512 - protein, 11 aa, Homo sapiens
IYILAFEMLFI

SEQ ID NO: 64513 - protein, 32 aa, Homo sapiens
MGSQLFLFFLSCFVLRQSRSVAHAGVQLRDLS

SEQ ID NO: 64514 - protein, 896 aa, Homo sapiens
VSLALGVSCLGLIRAVAAAAAMGKTANSPGSGARPDPVRSFNRWKKKHSHRQNKKKQLRKQLKKPEWQVERESISRLMQNYEKINVNEITRFSDFPLSKKTLKGLQEAQYRLVTEIQKQTIGLALQGKDVLGAAKTGSGKTLAFLVPVLEALYRLQWTSTDGLGVLIISPTRELAYQTFEVLRKVGKNHDFSAGLIIGGKDLKHEAERINNINILVCTPGRLLQHMDETVSFHATDLQMLVLDEADRILDMGFADTMNAVIENLPKKRQTLLFSATQTKSVKDLARLSLKNPEYVWVHEKAKYSTPATLEQNYIVCELQQKISVLYSFLRSHLKKKSIVFFSSCKEVQYLYRVFCRLRPGVSILALHGRQQQMRRMEVYNEFVRKRAAVLFATDIAARGLDFPAVNWVLQFDCPEDANTYIHRAGRTARYKEDGEALLILLPSEKAMVQQLLQKKVPVKEIKINPEKLIDVQKKLESILAQDQDLKERAQRCFVSYVRSVYLMKDKEVFDVSKLPIPEYALSLGLAVAPRVRFLQKMQKQPTKELVRSQADKVIEPRAPSLTNDEVEEFRAYFNEKMSILQKGGKRLEGTEHRQDNDTGNEEQEEEEDDEEEMEEKLAKAKGSQAPSLPNTSEAQKIKEVPTQFLDRDEEEEDADFLKVKRHNVFGLDLKDEKTLQKKEPSKSSIKKKMTKVAEAKKVMKRNFKVNKKITFTDEGELVQQWPQMQKSAIKDAEEDDDTGGINLHKAKERLQEEDKFDKEEYRKKIKAKHREKRLKEREARREANKRQAKAKDEEEAFLDWSDDDDDDDDGFDPSTLPDPDKYRSSEDSDSEDMENKISDTKKKQGMKKRSNSEVEDVGPTSHNRKKARWDTLEPLDTGLSLAEDEELVLHLLRSQS

SEQ ID NO: 64515 - protein, 579 aa, Homo sapiens
RMLPCLVVLLAALLSLRLGSDAHGTELPSPPSVWFEAEFFHHILHWTPIPNQSESTCYEVALLRYGIESWNSISNCSQTLSYDLTAVTLDLYHSNGYRARVRAVDGSRHSNWTVTNTRFSVDEVTLTVGSVNLEIHNGFILGKIQLPRPKMAPANDTYESIFSHFREYEIAIRKVPGNFTFTHKKVKHENFSLLTSGEVGEFCVQVKPSVASRSNKGMWSKEECISLTRQYFTVTNVIIFFAFVLLLSGALAYCLALQLYVRRRKKLPSVLLFKKPSPFIFISQRPSPETQDTIHPLDEEAFLKVSPELKNLDLHGSTDSGFGSTKPSLQTEEPQFLLPDPHPQADRTLGNREPPVLGDSCSSGSSNSTDSGICLQEPSLSPSTGPTWEQQVGSNSRGQDDSGIDLVQNSEGRAGDTQGGSALGHHSPPEPEVPGEEDPAAVAFQGYLRQTRCAEEKATKTGCLEEESPLTDGLGPKFGRCLVDEAGLHPPALAKGYLKQDPLEMTLASSGAPTGQWNQPTEEWSLLALSSCSDLGISDWSFAHDLAPLGCVAAPGGLLGSFNSDLVTLPLISSLQSSE

SEQ ID NO: 64516 - protein, 46 aa, Homo sapiens
LPAFHRRSVTRILQPPQALLHRNLRLKECPPSGTSSVTTALHRKSF

SEQ ID NO: 64517 - protein, 176 aa, Homo sapiens
LAVLILAIILLQGTLAQSIKGNHLVKVYDYQEDGSVLLTCDAEAKNITWFKDGKMIGFLTEDKKKWNLGSNAKDPRGMYQCKGSQNKSKPLQVYYRMCQNCIELNAATISGFLFAEIVSIFVLAVGVYFIAGQDGVRQSRASDKQTLLPNDQLYQPLKDREDDQYSHLQGNQLRRN

SEQ ID NO: 64518 - protein, 18 aa, Homo sapiens
LATLLLRLLLSLGTGCQR

SEQ ID NO: 64519 - protein, 39 aa, Homo sapiens
LVNSQPQKWKLRLWMTFSLAAMSCWLSLVPSSLEASSWF

SEQ ID NO: 64520 - protein, 15 aa, Homo sapiens
ILMHLMWMFMVQTGI

SEQ ID NO: 64521 - protein, 86 aa, Homo sapiens
TATLLCLLSATALLCSLGHPRPHLLRLPDLPSFPAFLWIPASGHPSPPSLQGPLLVSLLLEPLPPPPSLQNFSFTPHPPPLPPFLF

SEQ ID NO: 64522 - protein, 528 aa, Homo sapiens
IGEMWEAQFLGLLFLQPLWVAPVKPLQPGAEVPVVWAQEGAPAQLPCSPTIPLQDLSLLRRAGVTWQHQPDSGPPAAAPGHPLAPGPHPAAPSSWGPRPRRYTVLSVGPGGLRSGRLPLQPRVQLDERGRQRGDFSLWLRPARRADAGEYRAAVHLRDRALSCRLRLRLGQASMTASPPGSLRASDWVILNCSFSRPDRPASVHWFRNRGQGRVPVRESPHHHLAESFLFLPQVSPMDSGPWGCILTYRDGFNVSIMYNLTVLGLEPPTPLTVYAGAGSRVGLPCRLPAGVGTRSFLTAKWTPPGGGPDLLVTGDNGDFTLRLEDVSQAQAGTYTCHIHLQEQQLNATVTLAIITVTPKSFGSPGSLGKLLCEVTPVSGQERFVWSSLDTPSQRSFSGPWLEAQEAQLLSQPWQCQLYQGERLLGAAVYFTELSSPGAQRSGRAPGALPAGHLLLFLILGVLSLLLLVTGAFGFHLWRRQWRPRRFSALEQGIHPPQAQSKIEELEQEPEPEPEPEPEPEPEPEPEQL

SEQ ID NO: 64523 - protein, 32 aa, Homo sapiens
IFSFACIIRVSTPLLSFLATLLQSSTNYPCPG

SEQ ID NO: 64524 - protein, 16 aa, Homo sapiens
LAGFSADLKTALLIAL

SEQ ID NO: 64525 - protein, 190 aa, Homo sapiens
KMLGSRAVMLLLLLPWTAQGRAVPGGSSPAWTQCQQLSQKLCTLAWSAHPLVGHMDLREEGDEETTNDVPHIQCGDGCDPQGLRDNSQFCLQRIHQGLIFYEKLLGSDIFTGEPSLLPDSPVGQLHASLLGLSQLLQPEGHHWETQQIPSLSPSQPWQRLLLRFKILRSLQAFVAVAARVFAHGAATLSP

SEQ ID NO: 64526 - protein, 119 aa, Homo sapiens
VGLMNRAVQLLILAYVIGWVFVWEKGYQETDSVVSSVTTKVKGVAVTNTSKLGFRIWDVADYVIPAQEENSLFVMTNVILTMNQTQGLCPEIPDATTVCKSDASCTAGSAGTHSNDLLF

SEQ ID NO: 64527 - protein, 23 aa, Homo sapiens
VKLAGTVPVIFLGLFGVLLKGGD

SEQ ID NO: 64528 - protein, 30 aa, Homo sapiens
MLGLKFMLVLASHCPLSKCDAHKQVSQHEM

SEQ ID NO: 64529 - protein, 29 aa, Homo sapiens
LPQLGWLVLGLGLELCLGASSLVMPGTLL

SEQ ID NO: 64530 - protein, 20 aa, Homo sapiens
IPNSFLFSFLDLCYFFVETC

SEQ ID NO: 64531 - protein, 171 aa, Homo sapiens
ILSETMKYTSYILAFQLCIVLGSLGCYCQDPYVKEAENLKKYFNAGHSDVADNGTLFLGILKNWKEESDRKIMQSQIVSFYFKLFKNFKDDQSIQKSVETIKEDMNVKFFNSNKKKRDDFEKLTNYSVTDLNVQRKAIHELIQVMAELSPAAKTGKRKRSQMLFRGRRASQ

SEQ ID NO: 64532 - protein, 21 aa, Homo sapiens
MGFMATGWAWLETLALGLCLL

SEQ ID NO: 64533 - protein, 331 aa, Homo sapiens
LSLLSLGTCLGLAWFVFQQSEKFAKVENQYQLLKLETNEFQQLQSKISLISEKLESTESILQEATSSMSLMTQFEQEVSNLQDIMHDIQNNEEVLTQRMQSLNEKFQNITDFWKRSLEEMNINTDIFKSEAKHIHSQVTVQINSAEQEIKLLTERLKDLEDSTLRNIRTVKRQEEEDLLRVEEQLGSDTKAIEKLEEEQHALFARDEDLTNKLSDYEPKVEECKTHLPTIESAIHSVLRVSQDLIETEKKMEDLTMQMFNMEDDMLKAVSEIMEMQKTLEGIQYDNSILKMQNELDILKEKVHDFIAYSSTGEKGTLKEYNIENKGIGGDF

SEQ ID NO: 64534 - protein, 325 aa, Homo sapiens
KAMADLDKLNIDSIIQRLLEVRGSKPGKNVQLQENEIRGLCLKSREIFLSQPILLELEAPLKICGDIHGQYYDLLRLFEYGGFPPESNYLFLGDYVDRGKQSLETICLLLAYKIKYPENFFLLRGNHECASINRIYGFYDECKRRYNIKLWKTFTDCFNCLPIAAIVDEKIFCCHGGLSPDLQSMEQIRRIMRPTDVPDQGLLCDLLWSDPDKDVLGWGENDRGVSFTFGAEVVAKFLHKHDLDLICRAHQVVEDGYEFFAKRQLVTLFSAPNYCGEFDNAGAMMSVDETLMCSFQILKPAEKKKPNATRPVTPPRGMITKQAKK

SEQ ID NO: 64535 - protein, 240 aa, Homo sapiens
KVWITVIFIFRVMILVVAAQEVWGDEQEDFVCNTLQPGCKNVCYDHFFPVSHIRLWALQLIFVSTPALLVAMHVAYYRHETTRKFRRGEKRNDFKDIEDIKKQKVRIEGSLWWTYTSSIFFRIIFEAAFMYVFYFLYNGYHLPWVLKCGIDPCPNLVDCFISRPTEKTVFTIFMISASVICMLLNVAELCYLLLKVCFRRSKRAQTQKNHPNHALKESKQNEMNELISDSGQNAITGFPS

SEQ ID NO: 64536 - protein, 14 aa, Homo sapiens
MAIILFQMSKFVIF

SEQ ID NO: 64537 - protein, 50 aa, Homo sapiens
LGLLLLLTTTTTTGAASAVPGVSSCSGHTAPGDCSSSNQNLGLTGTLAPK

SEQ ID NO: 64538 - protein, 26 aa, Homo sapiens
VDQLYMIMRTLAMLAHMLDLISFEGS

SEQ ID NO: 64539 - protein, 237 aa, Homo sapiens
RMEVGLPAITLFLTSASSPVVATTMDQEPVGGVERGEAVAASGAAAAAAFGESAGQMSNERGFENVELGVIGKKKKVPRRVIHFVSGETMEEYSTDEDEVDGLEKKDVLPTVDPTKLTWGPYLWFYMLRAATSTLSVCDFLGEKIASVLGISTPKYQYAIDEYYRMKKEEEEEEEENRMSEEAEKQYQQNKLQTDSIVQTDQPETVISSSFVNVNFEMEGDSEVIMESKQNPVSVPP

SEQ ID NO: 64540 - protein, 72 aa, Homo sapiens
VVFTCFIVTTGLVLGWFGWDVPVILRNSEETQFSTRVFKKQMRQVKNPFGLEITNPSSASITNFHGVSDSYS

SEQ ID NO: 64541 - protein, 10 aa, Homo sapiens
VIALLLFFLT

SEQ ID NO: 64542 - protein, 18 aa, Homo sapiens
MINTLFGLASFSCMQLDD

SEQ ID NO: 64543 - protein, 50 aa, Homo sapiens
IFLIFSYIFGFVRNLTIKHDGQQRYQQDRSSLHELPCIHWESQHSCGQEI

SEQ ID NO: 64544 - protein, 20 aa, Homo sapiens
LWELVFGGLMVMLKSYCVGN

SEQ ID NO: 64545 - protein, 53 aa, Homo sapiens
MFRFLGVLLGIAIRTGSPLSLNLAEPVWKQLAGMSLTIADLSEVTPWGGRRGL

SEQ ID NO: 64546 - protein, 12 aa, Homo sapiens
MLLIYFLFPFIH

SEQ ID NO: 64547 - protein, 20 aa, Homo sapiens
LRRLPVPAGLRMPGRLICTY

SEQ ID NO: 64548 - protein, 45 aa, Homo sapiens
MLEGLLGSFTAFSFLFSIRGLFGSNNDDYNKNLSCFARFFRRQSF

SEQ ID NO: 64549 - protein, 459 aa, Homo sapiens
LVLLALCLLLPLLLLGGWKRWRRGRAARHVVAVVLGDVGRSPRMQYHALSLAMHGFSVTLLGFCNSKPHDELLQNNRIQIVGLTELQSLAVGPRVFQYGVKVVLQAMYLLWKLMWREPGAYIFLQNPPGLPSIAVCWFVGCLCGSKLVIDWHNYGYSIMGLVHGPNHPLVLLAKWYEKFFGRLSHLNLCVTNAMREDLADNWHIRAVTVYDKPASFFKETPLDLQHRLFMKLGSMHSPFRARSEPEDPVTERSAFTERDAGSGLVTRLRERPALLVSSTSWTEDEDFSILLAALEKFEQLTLDGHNLPSLVCVITGKGPLREYYSRLIHQKHFQHIQVCTPWLEAEDYPLLLGSADLGVCLHTSSSGLDLPMKVVDMFGCCLPVCAVNFKCLHELVKHEENGLVFEDSEELAAQLQMLFSNFPDPAGKLNQFRKNLRESQQLRWDESWVQTVLPLVMDT

SEQ ID NO: 64550 - protein, 56 aa, Homo sapiens
VSPGRITSTVTSDKCTQQNGPSNVRNVRQLSPRRIGCGRTQYDTRRKCHVTCVARC

SEQ ID NO: 64551 - protein, 47 aa, Homo sapiens
LVASLWFLSGACNPWFTSFQVLAPSSHGSQSPSVNSLDLMSWVQLGH

SEQ ID NO: 64552 - protein, 22 aa, Homo sapiens
RPWRSWSCTVTCCWLGLALSSL

SEQ ID NO: 64553 - protein, 246 aa, Homo sapiens
VSIFLLLTGPTYLLFKLSPRVKRIFYQNVPSPAMFFQPLYSVHNGNFQTWMGAHRAGVLLSQDCAGTPQGALEPCVQEATALLTCGPAHPWKSVALEEEQEGPGTRLPGNLSSEDVLPAGCTEWRVQTLAYLPQEDWAPTSLTRPAPPDSEGSRSRSSSSSSSNNNNYCALGCYGGWHLSALPGNTQSSGPIPALACGLSCDHQGLETQQGVAWVLAGHCQRPGLHEDLQGMLLPSVLSKARSWTF

SEQ ID NO: 64554 - protein, 1271 aa, Homo sapiens
TRPARRPPAPPLPPAPGPAGPPRPARPPVRRARPEAGLTPRPPTGRPPPPAGPRPRSPGPGPGGGRRAPRRRRRRPQRATRPPGPARRPPARLGAEIGRIASKYVRVSLPPPPPAAGRPGAAVADDAREEEEEAAPPPPPPPPPRLAAARPPGSQPRPPAAGEAQAAADMNHQQQQQQQKAGEQQLSEPEDMEMEAGDTDDPPRITQNPVINGNVALSDGHNTAEEDMEDDTSWRSEATFQFTVERFSRLSESVLSPPCFVRNLPWKIMVMPRFYPDRPHQKSVGFFLQCNAESDSTSWSCHAQAVLKIINYRDDEKSFSRRISHLFFHKENDWGFSNFMAWSEVTDPEKGFIDDDKVTFEVFVQADAPHGVAWDSKKHTGYVGLKNQGATCYMNSLLQTLFFTNQLRKAVYMMPTEGDDSSKSVPLALQRVFYELQHSDKPVGTKKLTKSFGWETLDSFMQHDVQELCRVLLDNVENKMKGTCVEGTIPKLFRGKMVSYIQCKEVDYRSDRREDYYDIQLSIKGKKNIFESFVDYVAVEQLDGDNKYDAGEHGLQEAEKGVKFLTLPPVLHLQLMRFMYDPQTDQNIKINDRFEFPEQLPLDEFLQKTDPKDPANYILHAVLVHSGDNHGGHYVVYLNPKGDGKWCKFDDDVVSRCTKEEAIEHNYGGHDDDLSVRHCTNAYMLVYIRESKLSEVLQAVTDHDIPQQLVERLQEEKRIEAQKRKERQEAHLYMQVQIVAEDQFCGHQGNDMYDEEKVKYTVFKVLKNSSLAEFVQSLSQTMGFPQDQIRLWPMQARSNGTKRPAMLDNEADGNKTMIELSDNENPWTIFLETVDPELAASGATLPKFDKDHDVMLFLKMYDPKTRSLNYCGHIYTPISCKIRDLLPVMCDRAGFIQDTSLILYEEVKPNLTERIQDYDVSLDKALDELMDGDIIVFQKDDPENDNSELPTAKEYFRDLYHRVDVIFCDKTIPNDPGFVVTLSNRMNYFQVAKTVAQRLNTDPMLLQFFKSQGYRDGPGNPLRHNYEGTLRDLLQFFKPRQPKKLYYQQLKMKITDFENRRSFKCIWLNSQFREEEITLYPDKHGCVRDLLEECKKAVELGEKASGKLRLLEIVSYKIIGVHQEDELLECLSPATSRTFRIEEIPLDQVDIDKENEMLVTVAHFHKEVFGTFGIPFLLRIHQGEHFREVMKRIQSLLDIQEKEFEKFKFAIVMMGRHQYINEDEYEVNLKDFEPQPGNMSHPRPWLGLDHFNKAPKRSRYTYLEKAIKIHN

SEQ ID NO: 64555 - protein, 36 aa, Homo sapiens
VSAGLGSATAALFVLSPARWTSLPGSPSAVRRRKRY

SEQ ID NO: 64556 - protein, 1276 aa, Homo sapiens
VGLAGGGRAMLVGQGAGLLGPAVVTAAVVLLLSGVGPAHGSEDIVVGCGGFVKSDVEINYSLIEIKLYTKHGTLKYQTDCAPNNGYFMIPLYDKGDFILKIEPPLGWSFEPTTVELHVDGVSDICTKGGDINFVFTGFSVNGKVLSKGQPLGPAGVQVSLRNTGTEAKIQSTVTQPGGKFAFFKVLPGDYEILATHPTWALKEASTTVRVTNSNANAASPLIVAGYNVSGSVRSDGEPMKGVKFLLFSSLVTKEDVLGCNVSPVPGFQPQDESLVYLCYTVSREDGSFSFYSLPSGGYTVIPFYRGERITFDVAPSRLDFTVEHDSLKIEPVFHVMGFSVTGRVLNGPEGDGVPEAVVTLNNQIKVKTKADGSFRLENITTGTYTIHAQKEHLYFETVTIKIAPNTPQLADIVATGFSVCGRISIIRFPDTVKQMNKYKVVLSSQDKDKSLVTVETDAHGSFCFKAKPGTYKVQVMVPEAETRAGLTLKPQTFPLTVTDRPVMDVAFVQFLASVSGKVSCLDTCGDLLVTLQSLSRQGEKRSLQLSGKVNAMTFTFDNVLPGKYKISIMHEDWCWKNKSLEVEVLEDDVSAVEFRQTGYMLRCSLSHAITLEFYQDGNGRENVGIYNLSKGVNRFCLSKPGVYKVTPRSCHRFEQAFYTYDTSSPSILTLTAIRHHVLGTITTDKMMDVTVTIKSSIDSEPALVLGPLKSVQELRREQQLAEIEARRQEREKNGNEEGEERMTKPPVQEMVDELQGPFSYDFSYWARSGEKITVTPSSKELLFYPPSMEAVVSGESCPGKLIEIHGKAGLFLEGQIHPELEGVEIVISEKGASSPLITVFTDDKGAYSVGPLHSDLEYTVTSQKEGYVLTAVEGTIGDFKAYALAGVSFEIKAEDDQPLPGVLLSLSGGLFRSNLLTQDNGILTFSNLSPGQYYFKPMMKEFRFEPSSQMIEVQEGQNLKITITGYRTAYSCYGTVSSLNGEPEQGVAMEAVGQNDCSIYGEDTVTDEEGKFRLRGLLPGCVYHVQLKAEGNDHIERALPHHRVIEVGNNDIDDVNIIVFRQINQFDLSGNVITSSEYLPTLWVKLYKSENLDNPIQTVSLGQSLFFHFPPLLRDGENYVVLLDSTLPRSQYDYILPQVSFTAVGYHKHITLIFNPTRKLPEQDIAQGSYIALPLTLLVLLAGYNHDKLIPLLLQLTSRLQGVGALGQAASDNSGPEDAKRQAKKQKTRRTLRLQEEFQLMWCLVPWRGTLGIHLFSSLPFASEILLETTATCIHY

SEQ ID NO: 64557 - protein, 1276 aa, Homo sapiens; identical to SEQ ID NO: 64556

SEQ ID NO: 64558 - protein, 38 aa, Homo sapiens
MCRFLTWVHWMTLRFGVLLIPSCRLHCCDPSSSPKDAS

SEQ ID NO: 64559 - protein, 41 aa, Homo sapiens
KSFVKVLTLISTIGWFTMTSSETLSTGQKLRRPFLGGRWEP

SEQ ID NO: 64560 - protein, 30 aa, Homo sapiens
LWTFIIFTSVGTLVIFLDATYHLPPPDPFP

SEQ ID NO: 64561 - protein, 24 aa, Homo sapiens
IRIWRERGWSLLLPLCSLFRGLWW

SEQ ID NO: 64562 - protein, 49 aa, Homo sapiens
RSPTDTLTSEHSKQARRCRRSFGTVSRAIFADGKNNREIDDHSLCTRRK

SEQ ID NO: 64563 - protein, 1465 aa, Homo sapiens
LLRCVLLLGCLHLGRPGAPGDAALPEPNVFLIFSHGLQGCLEAQGGQVRVTPACNTSLPAQRWKWVSRNRLFNLGTMQCLGTGWPGTNTTASLGMYECDREALNLRWHCRTLGDQLSLLLGARTSNISKPGTLERGDQTRSGQWRIYGSEEDLCALPYHEVYTIQGNSHGKPCTIPFKYDNQWFHGCTSTGREDGHLWCATTQDYGKDERWGFCPIKSNDCETFWDKDQLTDSCYQFNFQSTLSWREAWASCEQQGADLLSITEIHEQTYINGLLTGYSSTLWIGLNDLDTSGGWQWSDNSPLKYLNWESDQPDNPSEENCGVIRTESSGGWQNRDCSIALPYVCKKKPNATAEPTPPDRWANVKVECEPSWQPFQGHCYRLQAEKRSWQESKKACLRGGGDLVSIHSMAELEFITKQIKQEVEELWIGLNDLKLQMNFEWSDGSLVSFTHWHPFEPNNFRDSLEDCVTIWGPEGRWNDSPCNQSLPSICKKAGQLSQGAAEEDHGCRKGWTWHSPSCYWLGEDQVTYSEARRLCTDHGSQLVTITNRFEQAFVSSLIYNWEGEYFWTALQDLNSTGSFFWLSGDEVMYTHWNRDQPGYSRGGCVALATGSAMGLWEVKNCTSFRARYICRQSLGTPVTPELPGPDPTPSLTGSCPQGWASDTKLRYCYKVFSSERLQDKKSWVQAQGACQELGAQLLSLASYEEEHFVANMLNKIFGESEPEIHEQHWFWIGLNRRDPRGGQSWRWSDGVGFSYHNFDRSRHDDDDIRGCAVLDLASLQWVAMQCDTQLDWICKIPRGTDVREPDDSPQGRREWLRFQEAEYKFFEHHSTWAQAQRICTWFQAELTSVHSQAELDFLSHNLQKFSRAQEQHWWIGLHTSESDGRFRWTDGSIINFISWAPGKPRPVGKDKKCVYMTASREDWGDQRCLTALPYICKRSNVTKETQPPDLPTTALGGCPSDWIQFLNKCFQVQGQEPQSRVKWSEAQFSCEQQEAQLVTITNPLEQAFITASLPNVTFDLWIGLHASQRDFQWVEQEPLMYANWAPGEPSGPSPAPSGNKPTSCAVVLHSPSAHFTGRWDDRSCTEETHGFICQKGTDPSLSPSPAALPPAPGTELSYLNGTFRLLQKPLRWHDALLLCESRNASLAYVPDPYTQAFLTQAARGLRTPLWIGLAGEEGSRRYSWVSEEPLNYVGWQDGEPQQPGGCTYVDVDGAWRTTSCDTKLQGAVCGVSSGPPPPRRISYHGSCPQGLADSAWIPFREHCYSFHMELLLGHKEARQRCQRAGGAVLSILDEMENVFVWEHLQSYEGQSRGAWLGMNFNPKGGTLVWQDNTAVNYSNWGPPGLGPSMLSHNSCYWIQSNSGLWRPGACTNITMGVVCKLPRAEQSSFSPSALPENPAALVVVLMAVLLLLALLTAALILYRRRQSIERGAFEGARYSRSSSSPTEATEKNILVSDMEMNEQQE

SEQ ID NO: 64564 - protein, 31 aa, Homo sapiens
IRMASVRIREAKEGDCGDILRLIRVKTAGRS

SEQ ID NO: 64565 - protein, 804 aa, Homo sapiens
LLTPLALLFYSTVLCTPHFPPDSDLLLKAASTYHRFLTWPVPYCSICQELLTFIDAELKAPGISYQRLVRAEQGLPIRSHRSSTVTVLLLNPVEVQAEFLAVANKLSTPGHSPHSAYTTLLLHAFQATFGAHCDVPGLHCRLQAKTLAELEDIFTETAEAQELASGIGDAAEARRWLRTKLQAVGEKAGFPGVLDTAKPGKLHTIPIPVARCYTYSWSQDSFDILQEILLKEQELLQPGILGDDEEEEEEEEEVEEDLETDGHCAERDSLLSTSSLASHDSTLSLASSQASGPALSRHLLTSFVSGLSDGMDSGYVEDSEESSSEWPWRRGSQERRGHRRPGQKFIRIYKLFKSTSQLVLRRDSRSLEGSSDTALPLRRAGSLCSPLDEPVSPPSRAQRSRSLPQPKLGTQLPSWLLAPASRPQRRRPFLSGDEDPKASTLRVVVFGSDRISGKVARAYSNLRRLENNRPLLTRFFKLQFFYVPVKRSHGTSPGACPPPRSQTPSPPTDSPRHASPGELGTTPWEESTNDISHYLGMLDPWYERNVLGLMHLPPEVLCQQSLKAEAQALEGSPTQLPILADMLLYYCRFAARPVLLQVYQTELTFITGEKTTEIFIHSLELGHSAATRAIKASGPGSKRLGIDGDREAVPLTLQIIYSKGAISGRSRWSNLEKVCTSVNLNKACRKQEELDSSMEALTLNLTEVVKRQNSKSKKGFNQISTSQIKVDKVQIIGSNSCPFAVCLDQDERKILQSVVRCEVSPCYKPEKSDLSSPPQTPPDLPAQAAPDLCSLLCLPIMTFSGALP

SEQ ID NO: 64566 - protein, 50 aa, Homo sapiens
ILFFSHLLAFFFLPPWLPSPNPAIPSSTPVLPSPAILSHPTCNLLSFAPP

SEQ ID NO: 64567 - protein, 17 aa, Homo sapiens
LSLLFMSCICILSATEE

SEQ ID NO: 64568 - protein, 97 aa, Homo sapiens
LLPIMQVSTAALAVLLCTMALCNQVLSAPLAADTPTACCFSYTSRQIPQNFIADYFETSSQCSKPSVIFLTKRGRQVCADPSEEWVQKYVSDLELSA

SEQ ID NO: 64569 - protein, 39 aa, Homo sapiens
LLTSQWGMLFTLQLTLGLPGALSLGCLMRDVQGFSWVGV

SEQ ID NO: 64570 - protein, 321 aa, Homo sapiens
RMAGLAARLVLLAGAAALASGSQGDREPVYRDCVLQCEEQNCSGGALNHFRSRQPIYMSLAGWTCRDDCKYECMWVTVGLYLQEGHKVPQFHGKWPFSRFLFFQEPASAVASFLNGLASLVMLCRYRTFVPASSPMYHTCVAFAWVSLNAWFWSTVFHTRDTDLTEKMDYFCASTVILHSIYLCCVRTVGLQHPAVVSAFRALLLLMLTVHVSYLSLIRFDYGYNLVANVAIGLVNVVWWLAWCLWNQRRLPHVRKCVVVVLLLQGLSLLELLDFPPLFWVLDAHAIWHISTIPVHVLFFSFLEDDSLYLLKESEDKFKLD

SEQ ID NO: 64571 - protein, 31 aa, Homo sapiens
MIAWLTAGLVSVCCCTLWRFSLELLPEKAPL

SEQ ID NO: 64572 - protein, 245 aa, Homo sapiens
LRYAASVRDATAATRLAAFLGATPPGDPTRRASSAAPIPLGLLGAALSSVTLYTRKLAGTMGKKQNKKKVEEVLEEEEEEYVVEKVLDRRVVKGKVEYLLKWKGFSDEDNTWEPEENLDCPDLIAEFLQSQKTAHETDKSEGGKRKADSDSEDKGEESKPKKKKEESEKPRGFARGLEPERIIGATDSSGELMFLMKWKNSDEADLVPAKEANVKCPQVVISFYEERLTWHSYPSEDDDKKDDKN

SEQ ID NO: 64573 - protein, 12 aa, Homo sapiens
MALAVLILSSLP

SEQ ID NO: 64574 - protein, 739 aa, Homo sapiens
RMQPRWAQGATMWLGVLLTLLLCSSLEGQENSFTINSVDMKSLPDWTVQNGKNLTLQCFADVSTTSHVKPQHQMLFYKDDVLFYNISSMKSTESYFIPEVRIYDSGTYKCTVIVNNKEKTTAEYQVLVEGVPSPRVTLDKKEAIQGGIVRVNCSVPEEKAPIHFTIEKLELNEKMVKLKREKNSRDQNFVILEFPVEEQDRVLSFRCQARIISGIHMQTSESTKSELVTVTESFSTPKFHISPTGMIMEGAQLHIKCTIQVTHLAQEFPEIIIQKDKAIVAHNRHGNKAVYSVMAMVEHSGNYTCKVESSRISKVSSIVVNITELFSKPELESSFTHLDQGERLNLSCSIPGAPPANFTIQKEDTIVSQTQDFTKIASKSDSGTYICTAGIDKVVKKSNTVQIVVCEMLSQPRISYDAQFEVIKGQTIEVRCESISGTLPISYQLLKTSKVLENSTKNSNDPAVFKDNPTEDVEYQCVADNCHSHAKMLSEVLRVKVIAPVDEVQISILSSKVVESGEDIVLQCAVNEGSGPITYKFYREKEGKPFYQMTSNATQAFWTKQKASKEQEGEYYCTAFNRANHASSVPRSKILTVRVILAPWKKGLIAVVIIGVIIALLIIAAKCYFLRKAKAKQMPVEMSRPAVPLLNSNNEKMSDPNMEANSHYGHNDDVRNHAMKPINDNKEPLNSDVQYTEVQVSSAESHKDLGKKDTETVYSEVRKAVPDAVESRYSRTEGSLDGT

SEQ ID NO: 64575 - protein, 216 aa, Homo sapiens
VLTLAILMFLTWLPESLSCNKALCASDVSKCLIQELCQCRPGEGNCSCCKECMLCLGALWDECCDCVGMCNPRNYSDTPPTSKSTVEELHEPIPSLFRALTEGDTQLNWNIVSFPVAEELSHHENLVSFLETVNQPHHQNVSVPSNNVHAPYSSDKEHMCTVVYFDDCMSIHQCKISCESMGASKYRWFHNACCECIGPECIDYGSKTVKCMNCMF

SEQ ID NO: 64576 - protein, 862 aa, Homo sapiens
LFFRPCLRGSEASGRCPGAEARDGAGGSPGSPGSPARAMSLLGDPLQALPPSAAPTGPLLAPPAGATLNRLREPLLRRLSELLDQAPEGRGWRRLAELAGSRGRLRLSCLDLEQCSLKVLEPEGSPSLCLLKLMGEKGCTVTELSDFLQAMEHTEVLQLLSPPGIKITVNPESKAVLAGQFVKLCCRATGHPFVQYQWFKMNKEIPNGNTSELIFNAVHVKDAGFYVCRVNNNFTFEFSQWSQLDVCDIPESFQRSVDGVSESKLQICVEPTSQKLMPGSTLVLQCVAVGSPIPHYQWFKNELPLTHETKKLYMVPYVDLEHQGTYWCHVYNDRDSQDSKKVEIIIGRTDEAVECTEDELNNLGHPDNKEQTTDQPLAKDKVALLIGNMNYREHPKLKAPLVDVYELTNLLRQLDFKVVSLLDLTEYEMRNAVDEFLLLLDKGVYGLLYYAGHGYENFGNSFMVPVDAPNPYRSENCLCVQNILKLMQEKETGLNVFLLDMCRKRNDYDDTIPILDALKVTANIVFGYATCQGAEAFEIQHSGLANGIFMKFLKDRLLEDKKITVLLDEVAEDMGKCHLTKGKQALEIRSSLSEKRALTDPIQGTEYSAESLVRNLQWAKAHELPESMCLKFDCGVQIQLGFAAEFSNVMIIYTSIVYKPPEIIMCDAYVTDFPLDLDIDPKDANKGTPEETGSYLVSKDLPKHCLYTRLSSLQKLKEHLVFTVCLSYQYSGLEDTVEDKQEVNVGKPLIAKLDMHRGLGRKTCFQTCLMSNGPYQSSAATSGGAGHYHSLQDPFHGVYHSHPGNPSNVTPADSCHCSRTPDAFISSFAHHASCHFSRSNVPVETTDEIPFSFSDRLRISEK

SEQ ID NO: 64577 - protein, 31 aa, Homo sapiens
VSIFLLLTGPTYLLFKLSPRLGWGPTGLVCC

SEQ ID NO: 64578 - protein, 668 aa, Homo sapiens
LVPNWLLLLPVASMAEDWLDCPALGPGWKRREVFRKSGATCGRSDTYYQSPTGDRIRSKVELTRYLGPACDLTLFDFKQGILCYPAPKAHPVAVASKKRKKPSRPAKTRKRQVGPQSGEVRKEAPRDETKADTDTAPASFPAPGCCENCGISFSGDGTQRQRLKTLCKDCRAQRIAFNREQRMFKRVGCGECAACQVTEDCGACSTCLLQLPHDVASGLFCKCERRRCLRIVERSRGCGVCRGCQTQEDCGHCPICLRPPRPGLRRQWKCVQRRCLRGKHARRKGGCDSKMAARRRPGAQPLPPPPPSQSPEPTEPHPRALAPSPPAEFIYYCVDEDELQPYTNRRQNRKCGACAACLRRMDCGRCDFCCDKPKFGGSNQKRQKCRWRQCLQFAMKRLLPSVWSESEDGAGSPPPYRRRKRPSSARRHHLGPTLKPTLATRTAQPDHTQAPTKQEAGGGFVLPPPGTDLVFLREGASSPVQVPGPVAASTEALLQEAQCSGLSWVVALPQVKQEKADTQDEWTPGTAVLTSPVLVPGCPSKAVDPGLPSVKQEPPDPEEDKEENKDDSASKLAPEEEAGGAGTPVITEIFSLGGTRFRDTAVWLPSLQGRHSGREDGCKVWETEDTVEPTSTSWNPRGWPGTHVSLSPPPASMMWVSCRRSWCPSSQS

SEQ ID NO: 64579 - protein, 584 aa, Homo sapiens
LARLLAAFLLLAAQVACEYGMVHVVSQAGGPEGKDYCILYNPQWAHLPHDLSKASFLQLRNWTASLLCSAADLPARGFSNQIPLVARGNCTFYEKVRLAQGSGARGLLIVSRERLVPPGGNKTQYDEIGIPVALLSYKDMLDIFTRFGRTVRAALYAPKEPVLDYNMVIIFIMAVGTVAIGGYWAGSRDVKKRYMKHKRDDGPEKQEDEAVDVTPVMTCVFVVMCCSMLVLLYYFYDLLVYVVIGIFCLASATGLYSCLAPCVRRLPFGKCRIPNNSLPYFHKRPQARMLLLALFCVAVSVVWGVFRNEDQWAWVLQDALGIAFCLYMLKTIRLPTFKACTLLLLVLFLYDIFFVFITPFLTKSGSSIMVEVATGPSDSATREKLPMVLKVPRLNSSPLALCDRPFSLLGFGDILVPGLLVAYCHRFDIQVQSSRVYFVACTIAYGVGLLVTFVALALMQRGQPALLYLVPCTLVTSCAVALWRRELGVFWTGSGFAKVLPPSPWAPAPADGPQPPKDSATPLSPQPPSEEPATSPWPAEQSPKSRTSEEMGAGAPMREPGSPAESEGRDQAQPSPVTQPGASA

SEQ ID NO: 64580 - protein, 12 aa, Homo sapiens
MAPAFSALLFFP

SEQ ID NO: 64581 - protein, 6 aa, Homo sapiens
IWILLM

SEQ ID NO: 64582 - protein, 133 aa, Homo sapiens
VAASSTLGFRVPRPEMGSKAKKRVLLPTRPAPPTVEQILEDVRGAPAEDPVFTILAPEDPPVPFRMMEDAEAPGEQLYQQSRAYVAANQRLQQAGNVLRQRCELLQRAGEDLEREVAQMKQAALPAAEAASSG

SEQ ID NO: 64583 - protein, 57 aa, Homo sapiens
LWGLVSVSWPLGLVSTPSQLAQDPSTEVQESRRHQDVQPLPEASLQQGQDIPPQAQV

SEQ ID NO: 64584 - protein, 28 aa, Homo sapiens
LSWMLSVLRFTMRIVFPALAPDPYYSVN

SEQ ID NO: 64585 - protein, 301 aa, Homo sapiens
LVRLRPGCTAGTWAMSPHPTALLGLVLCLAQTIHTQEEDLPRPSISAEPGTVIPLGSHVTFVCRGPVGVQTFRLERDSRSTYNDTEDVSQASPSESEARFRIDSVREGNAGLYRCIYYKPPKWSEQSDYLELLVKESSGGPDSPDTEPGSSAGPTQRPSDNSHNEHAPASQGLKAEHLYILIGVSVVFLFCLLLLVLFCLHRQNQIKQGPPRSKDEEQKPQQRPDLAVDVLERTADKATVNGLPEKDRETDTSALAAGSSQEVTYAQLDHWALTQRTARAVSPQSTKPMAESITYAAVARH

SEQ ID NO: 64586 - protein, 29 aa, Homo sapiens
LGSLSFPQAALLLPVAVIFQAGCSSEDHP

SEQ ID NO: 64587 - protein, 127 aa, Homo sapiens
LMFCLIALSTDFWFEAVGPTHSAHSGLWPTGHGDIISGHGPLVSTTAAFAAGKDSGLDWGIASQRIPAEELSHLSCPCPQPSPWWWPWRCTPASGGTSLHTPRSRPSSPGPSTWAGSQLSSCSVQVP

SEQ ID NO: 64588 - protein, 14 aa, Homo sapiens
LLGSDFCQCDYVPK

SEQ ID NO: 64589 - protein, 43 aa, Homo sapiens
LAVLCLLVVVAVAIGWVCRDRCLQHSYAGAWAVSPETELTGHV

SEQ ID NO: 64590 - protein, 37 aa, Homo sapiens
LIPVALRVLLAGRTPRPFTPGLADPRRLGPRRVQAAQ

SEQ ID NO: 64591 - protein, 43 aa, Homo sapiens; identical to SEQ ID NO: 64589

SEQ ID NO: 64592 - protein, 135 aa, Homo sapiens
ILLLWLLGTSWAKAPRRRDAPSSSVPRVTAGVGEDPSSCGAGAFQAGSHWRHPWDAEQPENPGVASAAARVCLPRPPGSAVHSRAALSVWRPRSRRAASEDAAGPEPRGKCWPSPLSAPRGVREALPRPQSRLPG

SEQ ID NO: 64593 - protein, 41 aa, Homo sapiens
IAFSFFSIFTWSLTAALAVRRFKDLSFQEEYSTLFPASAQP

SEQ ID NO: 64594 - protein, 54 aa, Homo sapiens
IRSMAAYSLLLFLLQIKDRHNGNIMLDKKGHIIHIGQPATAPPSSPFTPAPRGG

SEQ ID NO: 64595 - protein, 206 aa, Homo sapiens
VQPIMKVLAAGVVPLLLVLHWKHGAGSPLPITPVNATCAIRHPCHNNLMNQIRSQLAQLNGSANALFILYYTAQGEPFPNNLDKLCGPNVTDFPPFHANGTEKAKLVELYRIVVYLGTSLGNITRDQKILNPSALSLHSKLNATADILRGLLSNVLCRLCSKYHVGHVDVTYGPDTSGKDVFQKKKLGCQLLGKYKQIIAVLAQAF

SEQ ID NO: 64596 - protein, 267 aa, Homo sapiens
KEARMLLAWVQAFLVSNMLLAEAYGSGGCFWDNGHLYREDQTSPAPGLRCLNWLDAQSGLASAPVSGAGNHSYCRNPDEDPRGPWCYVSGEAGVPEKRPCEDLRCPETTSQALPAFTTEIQEASEGPGADEVQVFAPANALPARSEAAAVQPVIGISQRVRMNSKEKKDLGTLGYVLGITMMVIIIAIGAGIILGYSYKRGKDLKEQHDQKVCEREMQRITLPLSAFTNPTCEIVDEKTVVVHTSQTPVDPQEGTTPLMGQAGTPGA

SEQ ID NO: 64597 - protein, 17 aa, Homo sapiens
LTFFIIFVDFCFWKNPS

SEQ ID NO: 64598 - protein, 273 aa, Homo sapiens
VVMEALPLLAATTPDHGRHRRLLLLPLLLFLLPAGAVQGWETEERPRTREEECHFYAGGQVYPGEASRVSVADHSLHLSKAKISKPAPYWEGTAVIDGEFKELKLTDYRGKYLVFFFYPLDFTFVCPTEIIAFGDRLEEFRSINTEVVACSVDSQFTHLAWINTPRRQGGLGPIRIPLLSDLTHQISKDYGVYLEDSGHTLRGLFIIDDKGILRQITLNDLPVGRSVDETLRLVQAFQYTDKHGEVCPAGWKPGSETIIPDPAGKLKYFDKLN

SEQ ID NO: 64599 - protein, 22 aa, Homo sapiens
MVIKLLWKYKKLFLFQMLWIQT

SEQ ID NO: 64600 - protein, 41 aa, Homo sapiens
MGFGDPCKGWQIRNPATVPPWPWGAFWTSWMRISSVSRKPK

SEQ ID NO: 64601 - protein, 36 aa, Homo sapiens
KGQNRWGVRLLLVGGLPAFRASGGGEAAAPGSRHGE

SEQ ID NO: 64602 - protein, 13 aa, Homo sapiens
ISCIGLIIFNYMA

SEQ ID NO: 64603 - protein, 18 aa, Homo sapiens
ILFHASRFIFVLSTSLFL

SEQ ID NO: 64604 - protein, 27 aa, Homo sapiens
KEKLCYITLDFEQEMATAASSSSLEKS

SEQ ID NO: 64605 - protein, 261 aa, Homo sapiens
VAWRSAFLVCLAFSLATLVQRGSGDFDDFNLEDAVKETSSVKQPWDHTTTTTTNRPGTTRAPAKPPGSGLDLADALDDQDDGRRKPGIGGRERWNHVTTTTKRPVTTRAPANTLGNDFDLADALDDRNDRDDGRRKPIAGGGGFSDKDLEDIVGGGEYKPDKGKGDGRYGSNDDPGSGMVAEPGTIAGVASALAMALIGAVSSYISYQQKKFCFSIQQGLNADYVKGENLEAVVCEEPQVKYSTLHTQSAEPPPPPEPARI

SEQ ID NO: 64606 - protein, 55 aa, Homo sapiens
LWPKLYMTTVFWSATLLDPFTNTSWASQSDIQIWRVKITTSTKVWFICWKMMSPH

SEQ ID NO: 64607 - protein, 214 aa, Homo sapiens
RLFMILWLKGVVFSVTTVDLKRKPADLQNLAPGTHPPFITFNSEVKTDVNKIEEFLEEVLCPPKYLKLSPKHPESNTAGMDIFAKFSAYIKNSRPEANEALERGLLKTLQKLDEYLNSPLPDEIDENSMEDIKFSTRKFLDGNEMTLADCNLLPKLHIVKVVAKKYRNFDIPKEMTGIWRYLTNAYSRDEFTNTCPSDKEVEIAYSDVAKRLTK

SEQ ID NO: 64608 - protein, 268 aa, Homo sapiens [sequence omitted]

SEQ ID NO: 64609 - protein, 768 aa, Homo sapiens
MEPDRKAAVSHWQQQSYLDSGIHSGATTTAPSLSGKGNPEEEDVDTSQVLYEWEQGFSQSFTQEQVADIDGQYAMTRAQRVRAAMFPETLDEGMQIPSTQFDAAHPTNVQRLAEPSQMLKHAVVNLINYQDDAELATRAIPELTKLLNDEDQVVVNKAAVMVHQLSKKEASRHAIMRSPQMVSAIVRTMQNTNDVETARCTAGTLHNLSHHREGLLAIFKSGGIPALVKMLGSPVDSVLFYAITTLHNLLLHQEGAKMAVRLAGGLQKMVALLNKTNVKFLAITTDCLQILAYGNQESKLIILASGGPQALVNIMRTYTYEKLLWTTSRVLKVLSVCSSNKPAIVEAGGMQALGLHLTDPSQRLVQNCLWTLRNLSDAATKQEGMEGLLGTLVQLLGSDDINVVTCAAGILSNLTCNNYKNKMMVCQVGGIEALVRTVLRAGDREDITEPAICALRHLTSRHQEAEMAQNAVRLHYGLPVVVKLLHPPSHWPLIKATVGLIRNLALCPANHAPLREQGAIPRLVQLLVRAHQDTQRRTSMGGTQQQFVEGVRMEEIVEGCTGALHILARDVHNRIVIRGLNTIPLFVQLLYSPIENIQRVAAGVLCELAQDKEAAEAIEAEGATAPLTELLHSRNEGVATYAAAVLFRMSEDKPQDYKKRLSVELTSSLFRTEPMAWNETADLGLDIGAQGEPLGYRQDDPSYRSFHSGGYGQDALGMDPMMEHEMGGHHPGADYPVDGLPDLGHAQDLMDGLPPGDSNQLAWFDTDL

SEQ ID NO: 64610 - protein, 153 aa, Homo sapiens [sequence omitted]

SEQ ID NO: 64611 - protein, 673 aa, Homo sapiens
LVRILPLLLVLLLLGPTRGLRNATQRMFEIDYSRDSFLKDGQPFRYISGSIHYSRVPRFYWKDRLLKMKMAGLNAIQTYVPWNFHEPWPGQYQFSEDHDVEYFLRLAHELGLLVILRPGPYICAEWEMGGLPAWLLEKESILLRSSDPDYLAAVDKWLGVLLPKMKPLLYQNGGPVITVQVENEYGSYFACDFDYLRFLQKRFRHHLGDDVVLFTTDGAHKTFLKCGALQGLYTTVDFGTGSNITDAFLSQRKCEPKGPLINSEFYTGWLDHWGQPHSTIKTEAVASSLYDILARGASVNLYMFIGGTNFAYWNGANSPYAAQPTSYDYDAPLSEAGDLTEKYFALRNIIQKFEKVPEGPIPPSTPKFAYGKVTLEKLKTVGAALDILCPSGPIKSLYPLTFIQVKQHYGFVLYRTTLPQDCSNPAPLSSPLNGVHDRAYVAVDGIPQGVLERNNVITLNITGKAGATLDLLVENMGRVNYGAYINDFKGLVSNLTLSSNILTDWTIFPLDTEDAVCSHLGGWGHRDSGHHDEAWAHNSSNYTLPAFYMGNFSIPSGIPDLPQDTFIQFPGWTKGQVWINGFNLGRYWPARGPQLTLFVPQHILMTSAPNTITVLELEWAPCSSDDPELCAVTFVDRPVIGSSVTYDHPSKPVEKRLMPPPPQKNKDSWLDHV

SEQ ID NO: 64612 - protein, 7 aa, Homo sapiens
IENVASL

SEQ ID NO: 64613 - protein, 589 aa, Homo sapiens
KWLLCMLLVLGTAIVEAHDGHDDDVIDIEDDLDDVIEEVEDSKPDTTAPPSSPKVTYKAPVPTGEVYFADSFDRGTLSGWILSKAKKDDTDDEIAKYDGKWEVEEMKESKLPGDKGLVLMSRAKHHAISAKLNKPFLFDTKPLIVQYEVNFQNGIECGGAYVKLLSKTPELNLDQFHDKTPYTIMFGPDKCGEDYKLHFIFRHKNPKTGIYEEKHAKRPDADLKTYFTDKKTHLYTLILNPDNSFEILVDQSVVNSGNLLNDMTPPVNPSREIEDPEDRKPEDWDERPKIPDPEAVKPDDWDEDAPAKIPDEEATKPEGWLDDEPEYVPDPDAEKPEDWDEDMDGEWEAPQIANPRCESAPGCGVWQRPVIDNPNYKGKWKPPMIDNPSYQGIWKPRKIPNPDFFEDLEPFRMTPFSAIGLELWSMTSDIFFDNFIICADRRIVDDWANDGWGLKKAADGAAEPGVVGQMIEAAEERPWLWVVYILTVALPVFLVILFCCSGKKQTSGMEYKKTDAPQPDVKEEEEEKEEEKDKGDEEEEGEEKLEEKQKSDAEEDGGTVSQEEEDRKPKAEEDEILNRSPRNRKPRRE

SEQ ID NO: 64614 - protein, 667 aa, Homo sapiens [sequence omitted]

SEQ ID NO: 64615 - protein, 147 aa, Homo sapiens
KALIVLGLVLLSVTVQGKVFERCELARTLKRLGMDGYRGISLANWMCLAKWESGYNTRATNYNAGDRSTDYGIFQINSRYWCNDGKTPGAVNACHLSCSALLQDNIADAVACAKRVVRDPQGIRAWVAWRNRCQNRDVRQYVQGCGV

SEQ ID NO: 64616 - protein, 208 aa, Homo sapiens
MKVLLAAALIAGSVFFLLLPGPSAADEKKKGPKVTVKVYFDLRIGDEDVGRVIFGLFGKTVPKTVDNFVALATGEKGFGYKNSKFHRVIKDFMIQGGDFTRGDGTGGKSIYGERFPDENFKLKHYGPGWVSMANAGKDTNGSQFFITTVKTAWLDGKHVVFGKVLEGMEVVRKVESTKTDSRDKPLKDVIIADCGKIEVEKPFAIAKE

SEQ ID NO: 64617 - protein, 248 aa, Homo sapiens
LSPLLLFLPPLLLLLDVPTAAVQASPLQALDFFGNGPPVNYKTGNLYLRGPLKKSNAPLVNVTLYYEALCGGCRAFLIRELFPTWLLVMEILNVTLVPYGNAQEQNVSGRWEFKCQHGEEECKFNKVEACVLDELDMELAFLTIVCMEEFEDMERSLPLCLQLYAPGLSPDTIMECAMGDRGMQLMHANAQRTDALQPPHEYVPWVTVNGKPLEDQTQLLTLVCQLYQGKKPDVCPSSTSSLRSVCFK

SEQ ID NO: 64618 - protein, 104 aa, Homo sapiens
ILIALNVLLFYRLWSLERTAHTFESWHSLALAKGKFPQTATEWAEILALQKQFHSVEVHKWRQILRASVELLDEMKFSLEKLHQGITVSDPPFDTQPRPDDSFS

SEQ ID NO: 64619 - protein, 702 aa, Homo sapiens
MAPSHCAEHKDQFLQLSQYRQLKTAEDYQALNKDIEAQLQHAGLREAGRIFYFSVPPFAYEDIARNINSSCRPGPGAWLRVVLEKPFGHDHFSAQQLATELGTFFQEEEMYRVDHYLGKQAVAQILPFRDQNRKALDGLWNRHHVERVEIIMKETVDAEGRTSFYEEYGVIRDVLQNHLTEVLTLVAMELPHNVSSAEAVLRHKLQVFQALRGLQRGSAVVGQYQSYSEQVRRELQKPDSFHSLTPTFAAVLVHIDNLRWEGVPFILMSGKALDERVGYARILFKNQACCVQSEKHWAAAQSQCLPRQLVFHIGHGDLGSPAVLVSRNLFRPSLPSSWKEMEGPPGLRLFGSPLSDYYAYSPVRERDAHSVLLSHIFHGRKNFFITTENLLASWNFWTPLLESLAHKAPRLYPGGAENGRLLDFEFSSGRLFFSQQQPEQLVPGPGPAPMPSDFQVLRAKYRESPLVSAWSEELISKLANDIEATAVRAVRRFGQFHLALSGGSSPVALFQQLATAHYGFPWAHTHLWLVDERCVPLSDPESNFQGLQAHLLQHVRIPYYNIHPMPVHLQQRLCAEEDQGAQIYAREISALVANSSFDLVLLGMGADGHTASLFPQSPTGLDGEQLVVLTTSPSQPHRRMSLSLPLINRAKKVAVLVMGRMKREITTLVSRVGHEPKKWPISGVLPHSGQLVWYMDYDAFLG

SEQ ID NO: 64620 - protein, 292 aa, Homo sapiens [sequence omitted]

SEQ ID NO: 64621 - protein, 753 aa, Homo sapiens
MSTYKRATLDEEDLVDSLSEGDAYPNGLQVNFHSPRSGQRCWAARTQVEKRLVVLVVLLAAGLVACLAALGIQYQTRSPSVCLSEACVSVTSSILSSMDPTVDPCHDFFSYACGGWIKANPVPDGHSRWGTFSNLWEHNQAIIKHLLENSTASVSEAERKAQVYYRACMNETRIEELRAKPLMELIERLGGWNITGPWAKDNFQDTLQVVTAHYRTSPFFSVYVSADSKNSNSNVIQVDQSGLGLPSRDYYLNKTENEKVLTGYLNYMVQLGKLLGGGDEEAIRPQMQQILDFETALANITIPQEKRRDEELIYHKVTAAELQTLAPAINWLPFLNTIFYPVEINESEPIVVYDKEYLEQISTLINTTDRCLLNNYMIWNLVRKTSSFLDQRFQDADEKFMEVMYGTKKTCLPRWKFCVSDTENNLGFALGPMFVKATFAEDSKSIATEIILEIKKAFEESLSTLKWMDEETRKSAKEKADAIYNMIGYPNFIMDPKELDKVFNDYTAVPDLYFENAMRFFNFSWRVTADQLRKAPNRDQWSMTPPMVNAYYSPTKNEIVFPAGILQAPFYTRSSPKALNFGGIGVVVGHELTHAFDDQGREYDKDGNLRPWWKNSSVEAFKRQTECMVEQYSNYSVNGEPVNGRHTLGENIADNGGLKAAYRAYQNWVKKNGAEHSLPTLGLTNNQLFFLGFAQVWCSVRTPESSHEGLITDPHSPSRFRVIGSLSNSKEFSEHFRCPPGSPMNPPHKCEVW

SEQ ID NO: 64622 - protein, 4129 aa, Homo sapiens
MRQPPVTHAPQPLLPGSVRPLPCGPQEAACRNGHCIPRDYLCDGQEDCEDGSDELDCGPPPPCEPNEFPCGNGHCALKLWRCDGDFDCEDRTDEANCPTKRPEEVCGPTQFRCVSTNMCIPASFHCDEESDCPDRSDEFGCMPPQVVTPPRESIQASRGQTVTFTCVAIGVPTPIINWRLNWGHIPSHPRVTVTSEGGRGTLIIRDVKESDQGAYTCEAMNARGMVFGIPDGVLELVPQRGPCPDGHFYLEHSAACLPCFCFGITSVCQSTRRFRDQIRLRFDQPDDFKGVNVTMPAQPGTPPLSSTQLQIDPSLHEFQLVDLSRRFLVHDSFWALPEQFLGNKVDSYGGSLRYNVRYELARGMLEPVQRPDVVLMGAGYRLLSRGHTPTQPGALNQRQVQFSEEHWVHESGRPVQRAELLQVLQSLEAVLIQTVYNTKMASVGLSDIAMDTTVTHATSHGRAHSVEECRCPIGYSGLSCESCDAHFTRVPGGPYLGTCSGCNCNGHASSCDPVYGHCLNCQHNTEGPQCNKCKAGFFGDAMKATATSCRPCPCPYIDASRRFSDTCFLDTDGQATCDACAPGYTGRRCESCAPGYEGNPIQPGGKCRPVNQEIVRCDERGSMGTSGEACRCKNNVVGRLCNECADGSFHLSTRNPDGCLKCFCMGVSRHCTSSSWSRAQLHGASEEPGHFSLTNAASTHTTNEGIFSPTPGELGFSSFHRLLSGPYFWSLPSRFLGDKVTSYGGELRFTVTQRSQPGSTPLHGQPLVVLQGNNIILEHHVAQEPSPGQPSTFIVPFREQAWQRPDGQPATREHLLMALAGIDTLLIRASYAQQPAESRVSGISMDVAVPEETGQDPALEVEQCSCPPGYRGPSCQDCDTGYTRTPSGLYLGTCERCSCHGHSEACEPETGACQGCQHHTEGPRCEQCQPGYYGDAQRGTPQDCQLCPCYGDPAAGQAAHTCFLDTDGHPTCDACSPGHSGRHCERCAPGYYGNPSQGQPCQRDSQVPGPIGCNCDPQGSVSSQCDAAGQCQCKAQVEGLTCSHCRPHHFHLSASNPDGCLPCFCMGITQQCASSAYTRHLISTHFAPGDFQGFALVNPQRNSRLTGEFTVEPVPEGAQLSFGNFAQLGHESFYWQLPETYQGDKVAAYGGKLRYTLSYTAGPQGSPLSDPDVQITGNNIMLVASQPALQGPERRSYEIMFREEFWRRPDGQPATREHLLMALADLDELLIRATFSSVPLAASISAVSLEVAQPGPSNRPRALEVEECRCPPGYIGLSCQDCAPGYTRTGSGLYLGHCELCECNGHSDLCHPETGACSQCQHNAAGEFCELCAPGYYGDATAGTPEDCQPCACPLTNPENMFSRTCESLGAGGYRCTACEPGYTGQYCEQCGPGYVGNPSVQGGQCLPETNQAPLVVEVHPARSIVPQGGSHSLRCQVSGSPPHYFYWSREDGRPVPSGTQQRHQGSELHFPSVQPSDAGVYICTCRNLHQSNTSRAELLVTEAPSKPITVTVEEQRSQSVRPGADVTFICTAKSKSPAYTLVWTRLHNGKLPTRAMDFNGILTIRNVQLSDAGTYVCTGSNMFAMDQGTATLHVQASGTLSAPVVSIHPPQLTVQPGQLAEFRCSATGSPTPTLEWTGGPGGQLPAKAQIHGGILRLPAVEPTDQAQYLCRAHSSAGQQVARAVLHVHGGGGPRVQVSPERTQVHAGRTVRLYCRAAGVPSATITWRKEGGSLPPQARSERTDIATLLIPAITTADAGFYLCVATSPAGTAQARIQVVVLSASDASPPPVKIESSSPSVTEGQTLDLNCVVAGSAHAQVTWYRRGGSLPPHTQVHGSRLRLPQVSPADSGEYVCRVENGSGPKEASITVSVLHGTHSGPSYTPVPGSTRPIRIEPSSSHVAEGQTLDLNCVVPGQAHAQVTWHKRGGSLPARHQTHGSLLRLHQVTPADSGEYVCHVVGTSGPLEASVLVTIEASVIPGPIPPVRIESSSSTVAEGQTLDLSCVVAGQAHAQVTWYKRGGSLPARHQVRGSRLYIFQASPADAGQYVCRASNGMEASITVTVTGTQGANLAYPAGSTQPIRIEPSSSQVAEGQTLDLNCVVPGQSHAQVTWHKRGGSLPVRHQTHGSLLRLYQASPADSGEYVCRVLGSSVPLEASVLVTIEPAGSVPALGVTPTVRIESSSSQVAEGQTLDLNCLVAGQAHAQVTWHKRGGSLPARHQVHGSRLRLLQVTPADSGEYVCRVVGSSGTQEASVLVTIQQRLSGSHSQGVAYPVRIESSSASLANGHTLDLNCLVASQAPHTITWYKRGGSLPSRHQIVGSRLRIPQVTPADSGEYVCHVSNGAGSRETSLIVTIQGSGSSHVPSVSPPIRIESSSPTVVEGQTLDLNCVVARQPQAIITWYKRGGSLPSRHQTHGSHLRLHQMSVADSGEYVCRANNNIDALEASIVISVSPSAGSPSAPGSSMPIRIESSSSHVAEGETLDLNCVVPGQAHAQVTWHKRGGSLPSHHQTRGSRLRLHHVSPADSGEYVCRVMGSSGPLEASVLVTIEASGSSAVHVPAPGGAPPIRIEPSSSRVAEGQTLDLKCVVPGQAHAQVTWHKRGGNLPARHQVHGPLLRLNQVSPADSGEYSCQVTGSSGTLEASVLVTIEPSSPGPIPAPGLAQPIYIEASSSHVTEGQTLDLNCVVPGQAHAQVTWYKRGGSLPARHQTHGSQLRLHLVSPADSGEYVCRAASGPGPEQEASFTVTVPPSEGSSYRLRSPVISIDPPSSTVQQGQDASFKCLIHDGAAPISLEWKTRNQELEDNVHISPNGSIITIVGTRPSNHGTYRCVASNAYGVAQSVVNLSVHGPPTVSVLPEGPVWVKVGKAVTLECVSAGEPRSSARWTRISSTPAKLEQRTYGLMDSHAVLQISSAKPSDAGTYVCLAQNALGTAQKQVEVIVDTGAMAPGAPQVQAEEAELTVEAGHTATLRCSATGSPAPTIHWSKLRSPLPWQHRLEGDTLIIPRVAQQDSGQYICNATSPAGHAEATIILHVESPPYATTVPEHASVQAGETVQLQCLAHGTPPLTFQWSRVGSSLPGRATARNELLHFERAAPEDSGRYRCRVTNKVGSAEAFAQLLVQGPPGSLPATSIPAGSTPTVQVTPQLETKSIGASVEFHCAVPSDRGTQLRWFKEGGQLPPGHSVQDGVLRIQNLDQSCQGTYICQAHGPWGKAQASAQLVIQALPSVLINIRTSVQTVVVGHAVEFECLALGDPKPQVTWSKVGGHLRPGIVQSGGVVRIAHVELADAGQYRCTATNAAGTTQSHVLLLVQALPQISMPQEVRVPAGSAAVFPCIASGYPTPDISWSKLDGSLPPDSRLENNMLMLPSVRPQDAGTYVCTATNRQGKVKAFAHLQVPERVVPYFTQTPYSFLPLPTIKDAYRKFEIKITFRPDSADGMLLYNGQKRVPGSPTNLANRQPDFISFGLVGGRPEFRFDAGSGMATIRHPTPLALGHFHTVTLLRSLTQGSLIVGDLAPVNGTSQGKFQGLDLNEELYLGGYPDYGAIPKAGLSSGFIGCVRELRIQGEEIVFHDLNLTAHGISHCPTCRDRPCQNGGQCHDSESSSYVCVCPAGFTGSRCEHSQALHCHPEACGPDATCVNRPDGRGYTCRCHLGRSGLRCEEGVTVTTPSLSGAGSYLALPALTNTHHELRLDVEFKPLAPDGVLLFSGGKSGPVEDFVSLAMVGGHLEFRYELGSGLAVLRSAEPLALGRWHRVSAERLNKDGSLRVNGGRPVLRSSPGKSQGLNLHTLLYLGGVEPSVPLSPATNMSAHFRGCVGEVSVNGKRLDLTYSFLGSQGIGQCYDSSPCERQPCQHGATCMPAGEYEFQCLCRDGFKGDLCEHEENPCQLREPCLHGGTCQGTRCLCLPGFSGPRCQQGSGHGIAESDWHLEGSGGNDAPGQYGAYFHDDGFLAFPGHVFSRSLPEVPETIELEVRTSTASGLLLWQGVEVGEAGQGKDFISLGLQDGHLVFRYQLGSGEARLVSEDPINDGEWHRVTALREGRRGSIQVDGEELVSGRSPGPNVAVNAKGSVYIGGAPDVATLTGGRFSSGITGCVKNLVLHSARPGAPPPQPLDLQHRAQAGANTRPCPS

SEQ ID NO: 64623 - protein, 86 aa, Homo sapiens
MAVGGGLAVAGLPALGFTGAGIAANSVAASLMSWSAILNGGGVPAGGLVATLQSLGAGGSSVVIGNIGALMGYATHKYLDSEEDEE

SEQ ID NO: 64624 - protein, 561 aa, Homo sapiens
MPGYPVLAPAAYYDQTGALVVNAGARNGLGAPVRLVAPAPVIISSSAAQAAVAAAAASANGAAGGLAGTTNGPFRPLGTQQPQPQPQQQPNNNLASSSFYGNNSLNSNSQSSSLFSQGSAQPANTSLGFGSSSSLGATLGSALGGFGTAGGLTNGSGRYISAAPGAEAKYRSASSASSLFSPSSTLFSSSRLRYGMSDVMPSGRSRLLEDFRNNRYPNLQLREIAGHIMEFSQDQHGSRFIQLKLERATPAERQLVFNEILQAAYQLMVDVFGNYVIQKFFEFGSLEQKLALAERIRGHVLSLALQMYGCRVIQKALEFIPSDQQNEMVRELDGHVLKCVKDQNGNHVVQKCIECVQPQSLQFIIDAFKGQVFALSTHPYGCRVIQRILEHCLPDQTLPILEELHQHTEQLVQDQYGNYVIQHVLEHGRPEDKSKIVAEIRGNVLVLSQHKFASNVVEKCVTHASRTERAVLIDEVCTMNDGPHSALYTMMKDQYANYVVQKMIDVAEPGQRKIVMHKIRPHIATLRKYTYGKHILAKLEKYYMKNGVDLGPICGPPNGII

SEQ ID NO: 64625 - protein, 179 aa, Homo sapiens [sequence omitted]

SEQ ID NO: 64626 - protein, 483 aa, Homo sapiens
MTKFVKPGAENSRDYPDLAEEAGKKALADAQIPYSAVDQACVGYVFGVAECVLALGFEKMSKGSLGIKFSDRTIPTDKHVDLLINKYGLSAHPVAPQMFGYAGKEHMEKYGTKIEHFAKIGWKNHKHSVNNPYSQFQDEYSLDEVMASKEVFDFLTILQCCPTSDGAAAAILASEAFVQKYGLQSKAVEILAQEMMTDLPSSFEEKSIIKMVGFDMSKEAARKCYEKSGLTPNDIDVIELHDCFSTNELLTYEALGLCPEGQGATLVDRGDNTYGGKWVINPSGGLISKGHPLGATGLAQCAELCWQLRGEAGKRQVPGAKVALQHNLGIGGAVVVTLYKMGFPEAASSFRTHQIEAVPTSSASDGFKANLVFKEIEKKLEEEGEQFVKKIGGIFAFKVKDGPGGKEATWVVDVKNGKGSVLPNSDKKADCTITMADSDFLALMTGKMNPQSAFFQGKLKITGNMGLAMKLQNLQLQPGNAKL

SEQ ID NO: 64627 - protein, 300 aa, Homo sapiens
MALAGGSGTASAEAFDSVLGDTASCHRACQLTYPLHTYPKEEELYACQRGCRLFSICQFVDDGIDLNRTKLECESACTEAYSQSDEQYACHLGCQNQLPFAELRQEQLMSLMPKMHLLFPLTLVRSFWSDMMDSAQSFITSSWTFYLQADDGKIVIFQSKPEIQYAPHLEQEPTNLRESSLSKMSYLQMRNSQAHRNFLEDGESDGFLRCLSLNSGWILTTTLVLSVMVLLWICCATVATAVEQYVPSEKLSIYGDLEFMNEQKLNRYPASSLVVVRSKTEDHEEAGPLPTKVNLAHSEI

SEQ ID NO: 64628 - protein, 573 aa, Homo sapiens
MTCQPGVTAQEKVNQRVRRAATPAAVTCQLSNWSEWTDCFPCQDKKYRHRSLLQPNKFGGTICSGDIWDQASCSSSTTCVRQAQCGQDFQCKETGRCLKRHLVCNGDQDCLDGSDEDDCEDVRAIDEDCSQYEPIPGSQKAALGYNILTQEDAQSVYDASYYGGQCETVYNGEWRELRYDSTCERLYYGDDEKYFRKPYNFLKYHFEALADTGISSEFYDNANDLLSKVKKDKSDSFGVTIGIGPAGSPLLVGVGVSHSQDTSFLNELNKYNEKKFIFTRIFTKVQTAHFKMRKDDIMLDEGMLQSLMELPDQYNYGMYAKFINDYGTHYITSGSMGGIYEYILVIDKAKMESLGITSRDITTCFGGSLGIQYEDKINVGGGLSGDHCKKFGGGKTERARKAMAVEDIISRVRGGSSGWSGGLAQNRSTITYRSWGRSLKYNPVVIDFEMQPIHEVLRHTSLGPLEAKRQNLRRALDQYLMEFNACRCGPCFNNGVPILEGTSCRCQCRLGSLGAACEQTQTEGAKADGSWSCWSSWSVCRAGIQERRRECDNPAPQNGGASCPGRKVQTQAC

SEQ ID NO: 64629 - protein, 95 aa, Homo sapiens
MKNSRTWAWRAPVELFLLCAALGCLSLPGSRGERPHSFGSNAVNKSFAKSRQMRSVDVTLMPIDCELSSWSSWTTCDPCQKKRDQVQDHGFRGSL

SEQ ID NO: 64630 - protein, 288 aa, Homo sapiens
MRAVRVFEFGGPEVLKLRSDIAVPIPKDHQVLIKVHACGVNPVETYIRSGTYSRKPLLPYTPGSDVAGVIEAVGDNASAFKKGDRVFTSSTISGGYAEYALAADHTVYKLPEKLDFKQGAAIGIPYFTAYRALIHSACVKAGESVLVHGASGGVGLAACQIARAYGLKILGTAGTEEGQKIVLQNGAHEVFNHREVNYIDKIKVVGSRGTIEINPRDTMAKESSIIGVTLFSSTKEEFQQYAAALQAGMEIGWLKPVIGSQYPLEKVAEAHENIIHGSGATGKMILLL

SEQ ID NO: 64631 - protein, 315 aa, Homo sapiens
MLRTWSRNAGKLICVRYFQTCGNVHVLKPNYVCFFGYPSFKYSHPHHFLKTTAALRGQVVQFKLSDIGEGIREVTVKEWYVKEGDTVSQFDSICEVQSDKASVTITSRYDGVIKKLYYNLDDIAYVGKPLVDIETEALKDSEEDVVETPAVSHDEHTHQEIKGRKTLATPAVRRLAMENNIKLSEVVGSGKDGRILKEDILNYLEKQTGAILPPSPKVEIMPPPPKPKDMTVPILVSKPPVFTGKDKTEPIKGFQKAMVKTMSAALKIPHFGYCDEIDLTELVKLREELKPIAFARGIKLSFMPFFLKYYFSWKS

SEQ ID NO: 64632 - protein, 581 aa, Homo sapiens [sequence omitted]

SEQ ID NO: 64633 - protein, 983 aa, Homo sapiens
MDDHKLSLDELHRKYGTDLSRGLTSARAAEILARDGPNALTPPPTTPEWIKFCRQLFGGFSMLLWIGAILCFLAYSIQAATEEEPQNDNLYLGVVLSAVVIITGCFSYYQEAKSSKIMESFKNMVPQQALVIRNGEKMSINAEEVVVGDLVEVKGGDRIPADLRIISANGCKVDNSSLTGESEPQTRSPDFTNENPLETRNIAFFSTNCVEGTARGIVVYTGDRTVMGRIATLASGLEGGQTPIAAEIEHFIHIITGVAVFLGVSFFILSLILEYTWLEAVIFLIGIIVANVPEGLLATVTVCLTLTAKRMARKNCLVKNLEAVETLGSTSTICSDKTGTLTQNRMTVAHMWFDNQIHEADTTENQSGVSFDKTSATWLALSRIAGLCNRAVFQANQENLPILKRAVAGDASESALLKCIELCCGSVKEMRERYAKIVEIPFNSTNKYQLSIHKNPNTSEPQHLLVMKGAPERILDRCSSILLHGKEQPLDEELKDAFQNAYLELGGLGERVLGFCHLFLPDEQFPEGFQFDTDDVNFPIDNLCFVGLISMIDPPRAAVPDAVGKCRSAGIKVIMVTGDHPITAKAIAKGVGIISEGNETVEDIAARLNIPVSQVNPRDAKACVVHGSDLKDMTSEQLDDILKYHTEIVFARTSPQQKLIIVEGCQRQGAIVAVTGDGVNDSPALKKADIGVAMGIAGSDVSKQAADMILLDDNFASIVTGVEEGRLIFDNLKKSIAYTLTSNIPEITPFLIFIIANIPLPLGTVTILCIDLGTDMVPAISLAYEQAESDIMKRQPRNPKTDKLVNERLISMAYGQIGMIQALGGFFTYFVILAENGFLPIHLLGLRVDWDDRWINDVEDSYGQQWTYEQRKIVEFTCHTAFFVSIVVVQWADLVICKTRRNSVFQQGMKNKILIFGLFEETALAAFLSYCPGMGVALRMYPLKPTWWFCAFPYSLLIFVYDEVRKLIIRRRPGGWVEKETYY

SEQ ID NO: 64634 - protein, 873 aa, Homo sapiens
MGTFNPADYAEPANTDDNYGNSSGNTWNNTGHFEPDDGTSAWRTATEEWGTEDWNEDLSETKIFTASNVSSVPLPAENVTITAGQRIDLAVLLGKTPSTMENDSSNLDPSQAPSLAQPLVFSNSKQTAISQPASGNTFSHHSMVSMLGKGFGDVGEAKGGSTTGSQFLEQFKTAQALAQLAAQHSQSGSTTTSSWDMGSTTQSPSLVQYDLKNPSDSAVHSPFTKRQAFTPSSTMMEVFLQEKSPAVATSTAAPPPPSSPLPSKSTSAPQMSPGSSDNQSSSPQPAQQKLKQQKKKASLTSKIPALAVEMPGSADISGLNLQFGALQFGSEPVLSDYESTPTTSASSSQAPSSLYTSTASESSSTISSNQSQESGYQSGPIQSTTYTSQNNAQGPLYEQRSTQTRRYPSSISSSPQKDLTQAKNGFSSVQATQLQTTQSVEGATGSAVKSDSPSTSSIPPLNETVSAASLLTTTNQHSSSLGGLSHSEEIPNTTTTQHSSTLSTQQNTLSSSTSSGRTSTSTLLHTSVESEANLHSSSSTFSTTSSTVSAPPPVVSVSSSLNSGSSLGLSLGSNSTVTASTRSSVATTSGKAPPNLPPGVPPLLPNPYIMAPGLLHAYPPQVYGYDDLQMLQTRFPLDYYSIPFPTPTTPLTGRDGSLASNPYSGDLTKFGRGDASSPAPATTLAQPQQNQTQTHHTTQQTFLNPALPPGYSYTSLPYYTGVPGLPSTFQYGPAVFPVAPTSSKQHGVNVSVNASATPFQQPSGYGSHGYNTGVSVTSSNTGVPDISGSVYSKTQQSFEKQGFHSGTPAASFNLPSALGSGGPINPATAAAYPPAPFMHILTPHQQPHSQILHHHLQQDGQDILNFVDDQLGE

SEQ ID NO: 64635 - protein, 892 aa, Homo sapiens [sequence omitted]

SEQ ID NO: 64636 - protein, 109 aa, Homo sapiens
MIPSEAPLLHRQVKLVDPMDRKPTEIEWRFTEAGERVRVSTRSGRIIPKPEFPRADGIVPETWIDGPKDTSVEDALERTYVPCLKTLQEEVMEAMGIKETRKYKKVYWY

SEQ ID NO: 64637 - protein, 152 aa, Homo sapiens
MSEEELTKAMEGLGMDEGDGEGNILPIMQSIMQNLLSKDVLYPSLKEITEKYPEWLQSHRESLPPEQFEKYQEQHSVMCKICEQFEAETPTDSETTQKARFEMVLDLMQQLQDLGHPPKELAGEMPPGLNFDLDALNLSGPPGASGEQCLIM

SEQ ID NO: 64638 - protein, 297 aa, Homo sapiens [sequence omitted]

SEQ ID NO: 64639 - protein, 403 aa, Homo sapiens
MLYYQTEKYDLAIKDLKEALIQLRGNQLIDYKILGLQFKLFACEKQKLYEPVVIPVGKLFRPNERQVAQLAKKDYLGKATVVASVVDQDSFSGFAPLQPQAAEPPPRPKTPEIFRALEGEAHRVLFGFVPETKEELQVMPGNIVFVLKKGNDNWATVMFNGQKGLVPCNYLEPVELRIHPQQQPQEESSPQSDIPAPPSSKAPGRPQLSPGQKQKEEPKEVKLSVPMPYTLKVHYKYTVVMKTQPGLPYSQVRDMVSKKLELRLEHTKLSYRPRDSNELVPLSEDSMKDAWGQVKNYCLTLWCENTVGDQGFPDEPKESEKADANNQTTEPQLKKGSQVEALFSYEATQPEDLEFQEGDIILVLSKVNEEWLEGECKGKVGIFPKVFVEDCATTDLESTRREV

SEQ ID NO: 64640 - protein, 243 aa, Homo sapiens
MPLTALLRNLGKMTANSVLEPGNSEVSLVCEKLCNEKLLKKARIHPFHILIALETYKTGHGLRGKLKWRPDEEILKALDAAFYKTFKTVEPTGKRFLLAVDVSASMNQRVLGSILNASTVAAAMCMVVTRTEKDSYVVAFSDEMVPCPVTTDMTLQQVLMAMSQIPAGGTDCSLPMIWAQKTNTPADVFIVFTDNETFAGGVHPAIALREYRKKMDIPAKLIVCGMTSNGFTIADPDDRDTVK

SEQ ID NO: 64641 - protein, 293 aa, Homo sapiens
MRRPYFPVAVGKYYSYYCDEHFETPSGSYWDYIHCTQNGWSPAVPCLRKCYFPYLENGYNQNYGRKFVQGNSTEVACHPGYGLPKAQTTVTCTEKGWSPTPRCIRVRTCSKSDIEIENGFISESSSIYILNKEIQYKCKPGYATADGNSSGSITCLQNGWSAQPICINSSEKCGPPPPISNGDTTSFLLKVYVPQSRVEYQCQPYYELQGSNYVTCSNGEWSEPPRCIHPCIITEENMNKNNIKLKGRSDRKYYAKTGDTIEFMCKLGYNANTSILSFQAVCREGIVEYPRCE

SEQ ID NO: 64642 - protein, 428 aa, Homo sapiens
MPVFENSRAKSNGMWFKLHDTLDYECYDGYESSYGNTTDSIVCGEDGWSHLPTCYNSSENCGPPPPISNGDTTSFPQKVYLPWSRVEYQCQSYYELQGSKYVTCSNGDWSEPPRCISMKPCEFPEIQHGHLYYENTRRPYFPVATGQSYSYYCDQNFVTPSGSYWDYIHCTQDGWLPTVPCLRTCSKSDIEIENGFISESSSIYILNKEIQYKCKPGYATADGNSSGSITCLQNGWSAQPICIKFCDMPVFENSRAKSNGMRFKLHDTLDYECYDGYEISYGNTTGSIVCGEDGWSHFPTCYNSSEKCGPPPPISNGDTTSFLLKVYVPQSRVEYQCQSYYELQGSNYVTCSNGEWSEPPRCIHPCIITEENMNKNNIQLKGKSDIKYYAKTGDTIEFMCKLGYNANTSVLSFQAVCREGIVEYPRCE

SEQ ID NO: 64643 - protein, 613 aa, Homo sapiens
MSIDKKLSFFCLAGYTTESGRQEEQTTCTTEGWSPEPRCFKKCTKPDLSNGYISDVKLLYKIQENMRYGCASGYKTTGGKDEEVVQCLSDGWSSQPTCRKEHETCLAPELYNGNYSTTQKTFKVKDKVQYECATGYYTAGGKKTEEVECLTYGWSLTPKCTKLKCSSLRLIENGYFHPVKQTYEEGDVVQFFCHENYYLSGSDLIQCYNFGWYPESPVCEGRRNRCPPPPLPINSKIQTHSTTYRHGEIVHIECELNFEIHGSAEIRCEDGKWTEPPKCIEGQEKVACEEPPFIENGAANLHSKIYYNGDKVTYACKSGYLLHGSNEITCNRGKWTLPPECVENNENCKHPPVVMNGAVADGILASYATGSSVEYRCNEYYLLRGSKISRCEQGKWSSPPVCLEPCTVNVDYMNRNNIEMKWKYEGKVLHGDLIDFVCKQGYDLSPLTPLSELSVQCNRGEVKYPLCTRKESKGMCTSPPLIKHGVIISSTVDTYENGSSVEYRCFDHHFLEGSREAYCLDGMWTTPPLCLEPCTLSFTEMEKNNLLLKWDFDNRPHILHGEYIEFICRGDTYPAELYITGSILRMQCDRGQLKYPRCIPRQSTLSYQEPLRT

SEQ ID NO: 64644 - protein, 248 aa, Homo sapiens
MHFICNEGYYLIGEEILYCELKGSVAIWSGKPPICEKVLCTPPPKIKNGKHTFSEVEVFEYLDAVTYSCDPAPGPDPFSLIGESTIYCGDNSVWSRAAPECKVVKCRFPVVENGKQISGFGKKFYYKATVMFECDKGFYLDGSDTIVCDSNSTWDPPVPKCLKVSTSSTTKSPASSASGYPKPEEGILDSLDVWVIAVIVIAIVVGVAVICVVPYRYLQRRKKKGKADGGAEYATYQTKSTTPAEQRG

SEQ ID NO: 64645 - protein, 277 aa, Homo sapiens
MAYYYYSANEEFRPEMLQGKKVIVTGASKGIGREMAYHLAKMGAHVVVTARSKETLQKVVSHCLELGAASAHYIAGTMEDMTFAEQFVAQAGKLMGGLDMLILNHITNTSLNLFHDDIHHVRKSMEVNFLSYVVLTVAALPMLKQSNGSIVVVSSLAGKVAYPMVAAYSASKFALDGFFSSIRKEYSVSRVNVSITLCVLGLIDTETAMKAVSGIVHMQAAPKEECALEIIKGGALRQEEVYYDSSLWTTLLIRNPCRKILEFLYSTSYNMDRFINK

SEQ ID NO: 64646 - protein, 1440 aa, Homo sapiens
MEHTEIDHWLEFSATKLSSCDSFTSTINELNHCLSLRTYLVGNSLSLADLCVWATLKGNAAWQEQLKQKKAPVHVKRWFGFLEAQQAFQSVGTKWDVSTTKARVAPEKKQDVGKFVELPGAEMGKVTVRFPPEASGYLHIGHAKAALLNQHYQVNFKGKLIMRFDDTNPEKEKEDFEKVILEDVAMLHIKPDQFTYTSDHFETIMKYAEKLIQEGKAYVDDTPAEQMKAEREQRIDSKHRKNPIEKNLQMWEEMKKGSQFGQSCCLRAKIDMSSNNGCMRDPTLYRCKIQPHPRTGNKYNVYPTYDFACPIVDSIEGVTHALRTTEYHDRDEQFYWIIEALGIRKPYIWEYSRLNLNNTVLSKRKLTWFVNEGLVDGWDDPRFPTVRGVLRRGMTVEGLKQFIAAQGSSRSVVNMEWDKIWAFNKKVIDPVAPRYVALLKKEVIPVNVPEAQEEMKEVAKHPKNPEVGLKPVWYSPKVFIEGADAETFSEGEMVTFINWGNLNITKIHKNADGKIISLDAKLNLENKDYKKTTKVTWLAETTHALPIPVICVTYEHLITKPVLGKDEDFKQYVNKNSKHEELMLGDPCLKDLKKGDIIQLQRRGFFICDQPYEPVSPYSCKEAPCVLIYIPDGHTKEMPTSGSKEKTKVEATKNETSAPFKERPTPSLNNNCTTSEDSLVLYNRVAVQGDVVRELKAKKAPKEDVDAAVKQLLSLKAEYKEKTGQEYKPGNPPAEIGQNISSNSSASILESKSLYDEVAAQGEVVRKLKAEKSPKAKINEAVECLLSLKAQYKEKTGKEYIPGQPPLSQSSDSSPTRNSEPAGLETPEAKVLFDKVASQGEVVRKLKTEKAPKDQVDIAVQELLQLKAQYKSLIGVEYKPVSATGAEDKDKKKKEKENKSEKQNKPQKQNDGQRKDPSKNQGGGLSSSGAGEGQGPKKQTRLGLEAKKEENLADWYSQVITKSEMIEYHDISGCYILRPWAYAIWEAIKDFFDAEIKKLGVENCYFPMFVSQSALEKEKTHVADFAPEVAWVTRSGKTELAEPIAIRPTSETVMYPAYAKWVQSHRDLPIKLNQWCNVVRWEFKHPQPFLRTREFLWQEGHSAFATMEEAAEEVLQILDLYAQVYEELLAIPVVKGRKTEKEKFAGGDYTTTIEAFISASGRAIQGGTSHHLGQNFSKMFEIVFEDPKIPGEKQFAYQNSWGLTTRTIGVMTMVHGDNMGLVLPPRVACVQVVIIPCGITNALSEEDKEALIAKCNDYRRRLLSVNIRVRADLRDNYSPGWKFNHWELKGVPIRLEVGPRDMKSCQFVAVRRDTGEKLTVAENEAETKLQAILEDIQVTLFTRASEDLKTHMVVANTMEDFQKILDSGKIVQIPFCGEIDCEDWIKKTTARDQDLEPGAPSMGAKSLCIPFKPLCELQPGAKCVCGKNPAKYYTLFGRSY

SEQ ID NO: 64647 - protein, 504 aa, Homo sapiens
METLPPGKVRWPDFNQEAYVGGTMVRSGQDPYARNKFNQVESDKLRMDRAIPDTRHDQCQRKQWRVDLPATSVVITFHNEARSALLRTVVSVLKKSPPHLIKEIILVDDYSNDPEDGALLGKIEKVRVLRNDRREGLMRSRVRGADAAQAKVLTFLDSHCECNEHWLEPLLERVAEDRTRVVSPIIDVINMDNFQYVGASADLKGGFDWNLVFKWDYMTPEQRRSRQGNPVAPIKTPMIAGGLFVMDKFYFEELGKYDMMMDVWGGENLEISFRVWQCGGSLEIIPCSRVGHVFRKQHPYTFPGGSGTVFARNTRRAAEVWMDEYKNFYYAAVPSARNVPYGNIQSRLELRKKLSCKPFKWYLENVYPELRVPDHQDIAFGALQQGTNCLDTLGHFADGVVGVYECHNAGGNQEWALTKEKSVKHMDLCLTVVDRAPGSLIKLQGCRENDSRQKWEQIEGNSKLRHVGSNLCLDSRTAKSGGLSVEVCGPALSQQWKFTLNLQQ

SEQ ID NO: 64648 - protein, 249 aa, Homo sapiens [sequence omitted]

SEQ ID NO: 64649 - protein, 587 aa, Homo sapiens
MSTAIPGLKKGNNALQSIILQTLLEKENGQRKYGGPPPGWDAAPPERGCEIFIGKLPRDLFEDELIPLCEKIGKIYEMRMMMDFNGNNRGYAFVTFSNKVEAKNAIKQLNNYEIRNGRLLGVCASVDNCRLFVGGIPKTKKREEILSEMKKVTEGVVDVIVYPSAADKTKNRGFAFVEYESHRAAAMARRKLLPGRIQLWGHGIAVDWAEPEVEVDEDTMSSVKILYVRNLMLSTSEEMIEKEFNNIKPGAVERVKKIRDYAFVHFSNREDAVEAMKALNGKVLDGSPIEVTLAKPVDKDSYVRYTRGTGGRGTMLQGEYTYSLGQVYDPTTTYLGAPVFYAPQTYAAIPSLHFPATKGHLSNRAIIRAPSVREIYMNVPVGAAGVRGLGGRGYLAYTGLGRGYQVKGDKREDKLYDILPGMELTPMNPVTLKPQGIKLAPQILEEICQKNNWGQPVYQLHSAIGQDQRQLFLYKITIPALASQNPAIHPFTPPKLSAFVDEAKTYAAEYTLQTLGIPTDGGDGTMATAAAAATAFPGYAVPNATAPVSAAQLKQAVTLGQDLAAYTTYEVYPTFAVTARGDGYGTF

SEQ ID NO: 64650 - protein, 426 aa, Homo sapiens
MGGGAYPQVPSSGYPGAGGYPAPGGYPAPGGYPGAPQPGGAPSYPGVPPGQGFGVPPGGAGFSGYPQPPSQSYGGGPAQVPLPGGFPGGQMPSQYPGGQPTYPSQPATVTQVTQGTIRPAANFDAIRDAEILRKAMKGFGTDEQAIVDVVANRSNDQRQKIKAAFKTSYGKDLIKDLKSELSGNMEELILALFMPPTYYDAWSLRKAMQGAGTQERVLIEILCTRTNQEIREIVRCYQSEFGRDLEKDIRSDTSGHFERLLVSMCQGNRDENQSINHQMAQEDAQRLYQAGEGRLGTDESCFNMILATRSFPQLRATMEAYSRMANRDLLSSVSREFSGYVESGLKTILQCALNRPAFFAERLYYAMKGAGTDDSTLVRIVVTRSEIDLVQIKQMFAQMYQKTLGTMIAGDTSGDYRRLLLAIVGQ

SEQ ID NO: 64651 - protein, 830 aa, Homo sapiens
MSAEINEIIRVLQLTSWDEDAWASKDTEAMKRALASIDSKLNQAKGWLRDPSASPGDAGEQAIRQILDEAGKVGELCAGKERREILGTCKMLGQMTDQVADLRARGQGSSPVAMQKAQQVSQGLDVLTAKVENAARKLEAMTNSKQSIAKKIDAAQNWLADPNGGPEGEEQIRGALAEARKIAELCDDPKERDDILRSLGEISALTSKLADLRRQGKGDSPEARALAKQVATALQNLQTKTNRAVANSRPAKAAVHLEGKIEQAQRWIDNPTVDDRGVGQAAIRGLVAEGHRLANVMMGPYRQDLLAKCDRVDQLTAQLADLAARGEGESPQARALASQLQDSLKDLKARMQEAMTQEVSDVFSDTTTPIKLLAVAATAPPDAPNREEVFDERAANFENHSGKLGATAEKAAAVGTANKSTVEGIQASVKTARELTPQVVSAARILLRNPGNQAAYEHFETMKNQWIDNVEKMTGLVDEAIDTKSLLDASEEAIKKDLDKCKVAMANIQPQMLVAGATSIARRANRILLVAKREVENSEDPKFREAVKAASDELSKTISPMVMDAKAVAGNISDPGLQKSFLDSGYRILGAVAKVREAFQPQEPDFPPPPPDLEQLRLTDELAPPKPPLPEGEVPPPRPPPPEEKDEEFPEQKAGEVINQPMMMAARQLHDEARKWSSKGNDIIAAAKRMALLMAEMSRLVRGGSGTKRALIQCAKDIAKASDEVTRLAKEVAKQCTDKRIRTNLLQVCERIPTISTQLKILSTVKATMLGRTNISDEESEQATEMLVHNAQNLMQSVKETVREAEAASIKIRTDAGFTLRWVRKTPWYQ

SEQ ID NO: 64652 - protein, 365 aa, Homo sapiens
MNVSEIISYWGFPSEEYLVETEDGYILCLNRIPHGRKNHSDKGPKPVVFLQHGLLADSSNWVTNLANSSLGFILADAGFDVWMGNSRGNTWSRKHKTLSVSQDEFWAFSYDEMAKYDLPASINFILNKTGQEQVYYVGHSQGTTIGFIAFSQIPELAKRIKMFFALGPVASVAFCTSPMAKLGRLPDHLIKDLFGDKEFLPQSAFLKWLGTHVCTHVILKELCGNLCFLLCGFNERNLNMSRVDVYTTHSPAGTSVQNMLHWSQAVKFQKFQAFDWGSSAKNYFHYNQSYPPTYNVKDMLVPTAVWSGGHDWLADVYDVNILLTQITNLVFHESIPEWEHLDFIWGLDAPWRLYNKIINLMRKYQ

SEQ ID NO: 64653 - protein, 156 aa, Homo sapiens
MGKRSIEDRVQEEARCLVEELRKTKASPCDPTFILGCAPCNVICSIIFHKRFDYKDQQFLNLMEKLNENIKILSSPWIQICNNFSPIIDYFPGTHNKLLKNVAFMKSYILEKVKEHQESMDMNNPQDFIDCFLMKMEKVKCKQKLSYVTACEFVIC

SEQ ID NO: 64654 - protein, 188 aa, Homo sapiens
MAPGLTIQAVRVTKPKIPEAIRRNFELMEAEKTKLLIAAQKQKVVEKEAETERKKAVIEAEKIAQVAKIRFQQKVMEKETEKRISEIEDAAFLAREKAKADAEYYAAHKYATSNKHKLTPEYLELKKYQAIASNSKIYFGSNIPNMFVDSSCALKYSDIRTGRESSLPSKEALEPSGENVIQNKESTG

SEQ ID NO: 64655 - protein, 583 aa, Homo sapiens
MYEVFQRGLAVSDNGPCLGYRKPNQPYRWLSYKQVSDRAEYLGSCLLHKGYKSSPDQFVGIFAQNRPEWIISELACYTYSMVAVPLYDTLGPEAIVHIVNKADIAMVICDTPQKALVLIGNVEKGFTPSLKVIILMDPFDDDLKQRGEKSGIEILSLYDAENLGKEHFRKPVPPSPEDLSVICFTSGTTGDPKGAMITHQNIVSNAAAFLKCVEHAYEPTPDDVAISYLPLAHMFERIVQAVVYSCGARVGFFQGDIRLLADDMKTLKPTLFPAVPRLLNRIYDKVQNEAKTPLKKFLLKLAVSSKFKELQKGIIRHDSFWDKLIFAKIQDSLGGRVRVIVTGAAPMSTSVMTFFRAAMGCQVYEAYGQTECTGGCTFTLPGDWTSGHVGVPLACNYVKLEDVADMNYFTVNNEGEVCIKGTNVFKGYLKDPEKTQEALDSDGWLHTGDIGRWLPNGTLKIIDRKKNIFKLAQGEYIAPEKIENIYNRSQPVLQIFVHGESLRSSLVGVVVPDTDVLPSFAAKLGVKGSFEELCQNQVKAIFLHPEPFSIENGLLTPTLKAKRGELSKYFRTQIDSLYEHIQD

SEQ ID NO: 64656 - protein, 472 aa, Homo sapiens
MWRQVHSSWNLPPGPFPLPIIGNLFQLELKNIPKSFTRLAQRFGPVFTLYVGSQRMVVMHGYKAVKEALLDYKDEFSGRGDLPAFHAHRDRGIIFNNGPTWKDIRRFSLTTLRNYGMGKQGNESRIQREAHFLLEALRKTQGQPFDPTFLIGCAPCNVIADILFRKHFDYNDEKFLRLMYLFNENFHLLSTPWLQLYNNFPSFLHYLPGSHRKVIKNVAEVKEYVSERVKEHHQSLDPNCPRDLTDCLLVEMEKEKHSAERLYTMDGITVTVADLFFAGTETTSTTLRYGLLILMKYPEIEEKLHEEIDRVIGPSRIPAIKDRQEMPYMDAVVHEIQRFITLVPSNLPHEATRDTIFRGYLIPKGTVVVPTLDSVLYDNQEFPDPEKFKPEHFLNENGKFKYSDYFKPFSTGKRVCAGEGLARMELFLLLCAILQHFNLKPLVDPKDIDLSPIHIGFGCIPPRYKLCVIPRS

SEQ ID NO: 64657 - protein, 287 aa, Homo sapiens
MRTLFNLLWLALACSPVHTTLSKSDAKKAASKTLLEKSQFSDKPVQDRGLVVTDLKAESVVLEHRSYCSAKARDRHFAGDVLGYVTPWNSHGYDVTKVFGSKFTQISPVWLQLKRRGREMFEVTGLHDVDQGWMRAVRKHAKGLHIVPRLLFEDWTYDDFRNVLDSEDEIEELSKTVVQVAKNQHFDGFVVEVWNQLLSQKRVGLIHMLTHLAEALHQARLLALLVIPPAITPGPGPNAPLSWVRACVQVLDPKSKWRSKILLGLNFYGMDYATSKDAREPVVGARH

SEQ ID NO: 64658 - protein, 377 aa, Homo sapiens
MSEVGGSVEDLIAKGPVSKYSQAVPAVTEGPIPEVLKNYMDAQYYGEIGIGTPPQCFTVVFDTGSSNLWVPSIHCKLLDIACWIHHKYNSDKSSTYVKNGTSFDIHYGSGSLSGYLSQDTVSVPCQSASSASALGGVKVERQVFGEATKQPGITFIAAKFDGILGMAYPRISVNNVLPVFDNLMQQKLVDQNIFSFYLSRDPDAQPGGELMLGGTDSKYYKGSLSYLNVTRKAYWQVHLDQVEVASGLTLCKEGCEAIVDTGTSLMVGPVDEVRELQKAIGAVPLIQGEYMIPCEKVSTLPAITLKLGGKGYKLSPEDYTLKVSQAGKTLCLSGFMGMDIPPPSGPLWILGDVFIGRYYTVFDRDNNRVGFAEAARL

SEQ ID NO: 64659 - protein, 1535 aa, Homo sapiens
MKEYESKSLEELRLEDYQANRKGPQNQVGAGTTTGLFGSSPATSSATGLFSSSTTNSGFAYGQNKTAFGTSTTGFGTNPGGLFGQQNQQTTSLFSKPFGQATTTQNTGFSFGNTSTIGQPSTNTMGLFGVTQASQPGGLFGTATNTSTGTAFGTGTGLFGQTNTGFGAVGSTLFGNNKLTTFGSSTTSAPSFGTTSGGLFGFGTNTSGNSIFGSKPAPGTLGTGLGAGFGTALGAGQASLFGNNQPKIGGPLGTGAFGAPGFNTTTATLGFGAPQAPVALTDPNASAAQQAVLQQHINSLTYSPFGDSPLFRNPMSDPKKKEERLKPTNPAAQKALTTPTHYKLTPRPATRVRPKALQTTGTAKSHLFDGLDDDEPSLANGAFMPKKSIKKLVLKNLNNSNLFSPVNRDSENLASPSEYPENGERFSFLSKPVDENHQQDGDEDSLVSHFYTNPIAKPIPQTPESAGNKHSNSNSVDDTIVALNMRAALRNGLEGSSEETSFHDESLQDDREEIENNSYHMHPAGIILTKVGYYTIPSMDDLAKITNEKGECIVSDFTIGRKGYGSIYFEGDVNLTNLNLDDIVHIRRKEVVVYLDDNQKPPVGEGLNRKAEVTLDGVWPTDKTSRCLIKSPDRLADINYEGRLEAVSRKQGAQFKEYRPETGSWVFKVSHFSKYGLQDSDEEEEEHPSKTSTKKLKTAPLPPASQTTPLQMALNGKPAPPPQSQSPEVEQLGRVVELDSDMVDITQEPVLDTMLEESMPEDQEPVSASTHIASSLGINPHVLQIMKASLLTDEEDVDMALDQRFSRLPSKADTSQEICSPRLPISASHSSKTRSLVGGLLQSKFTSGAFLSPSVSVQECRTPRAASLMNIPSTSSWSVPPPLTSVFTMPSPAPEVPLKTVGTRRQLGLVPREKSVTYGKGKLLMDMALFMGRSFRVGWGPNWTLANSGEQLNGSHELENHQIADSMEFGFLPNPVAVKPLTESPFKVHLEKLSLRQRKPDEDMKLYQTPLELKLKHSTVHVDELCPLIVPNLGVAVIHDYADWVKEASGDLPEAQIVKHWSLTWTLCEALWGHLKELDSQLNEPREYIQILERRRAFSRWLSCTATPQIEEEVSLTQKNSPVEAVFSYLTGKRISEACSLAQQSGDHRLALLLSQFVGSQSVRELLTMQLVDWHQLQADSFIQDERLRIFALLAGKPVWQLSEKKQINVCSQLDWKRSLAIHLWYLLPPTASISRALSMYEEAFQNTSDSDRYACSPLPSYLEGSGCVIAEEQNSQTPLRDVCFHLLKLYSDSIREKAVRELLTRHCQLLETPESWAKETFLTQKLRVPAKWIHEAKAVRAHMESDKHLEALCLFKAEHWNRCHKLIIRHLASDAIINENYDYLKGFLEDLAPPERSSLIQDWETSGLVYLDYIRVIEMLRHIQQVDCSGNDLEQLHIKVTSLCSRIEQIQCYSAKDRLAQSDMAKRVANLLRVVLSLHHPPDRTSDSTPDPQRVPLRLLAPHIGRLPMPEDYAMDELRSLTQSYLRELAVGSL

SEQ ID NO: 64660 - protein, 505 aa, Homo sapiens
MTDRSHRQKLQLKALDTVLFGPPLLTRHNHLKDFMLVVSIVIGVGGCWFAYIQNRYSKEHMKKMMKDLEGLHRAEQSLHDLQERLHKAQEEHRTVEVEKVHLEKKLRDEINLAKQEAQRLKELREGTENERSRQKYAEEELEQVREALRKAEKELESHSSWYAPEALQKWLQLTHEVEVQYYNIKKQNAEKQLLVAKEGAEKIKKKRNTLFGTFHVAHSSSLDDVDHKILTAKQALSEVTAALRERLHRWQQIEILCGFQIVNNPGIHSLVAALNIDPSWMGSTRPNPAHFIMTDDVDDMDEEIVSPLSMQSPSLQSSVRQRLTEPQHGLGSQRDLTHSDSESSLHMSDRQRVAPKPPQMSRAADEALNAMTSNGSHRLIEGVHPGSLVEKLPDSPALAKKALLALNHGLDKAHSLMELSPSAPPGGSPHLDSSRSHSPSSPDPDTPSPVGDSRALQASRNTRIPHLAGKKAVAEEDNGSIGEETDSSPGRKKFPLKIFKKPLKK

SEQ ID NO: 64661 - protein, 516 aa, Homo sapiens [sequence omitted]

SEQ ID NO: 64662 - protein, 282 aa, Homo sapiens [sequence omitted]

SEQ ID NO: 64663 - protein, 1181 aa, Homo sapiens
MENEKTITVVHQPWCNITGLRPATSYVFSITPGIGNETWGDPRVIKVITEPIPVSDLRVALTGVRKAALSWSNGNGTASCRVLLESIGSHEELTQDSRLQVNISGLKPGVQYNINPYLLQSNKTKGDPLGTEGGLDASNTERSRAGSPTAPVHDESLVGPVDPSSGQQSRDTEVLLVGLEPGTRYNATVYSQAANGTEGQPQAIEFRTNAIQVFDVTAVNISATSLTLIWKVSDNESSSNYTYKIHVAGETDSSNLNVSEPRAVIPGLRSSTFYNITVCPVLGDIEGTPGFLQVHTPPVPVSDFRVTVVSTTEIGLAWSSHDAESFQMHITQEGAGNSRVEITTNQSIIIGGLFPGTKYCFEIVPKGPNGTEGASRTVCNRTVPSAVFDIHVVYVTTTEMWLDWKSPDGASEYVYHLVIESKHGSNHTSTYDKAITLQGLIPGTLYNITISPEVDHVWGDPNSTAQYTRPSNVSNIDVSTNTTAATLSWQNFDDASPTYSYCLLIEKAGNSSNATQVVTDIGITDATVTELIPGSSYTVEIFAQVGDGIKSLEPGRKSFCTDPASMASFDCEVVPKEPALVLKWTCPPGANAGFELEVSSGAWNNATHLESCSSENGTEYRTEVTYLNFSTSYNISITTVSCGKMAAPTRNTCTTGITDPPPPDGSPNITSVSHNSVKVKFSGFEASHGPIKAYAVILTTGEAGHPSADVLKYTYEDFKKGASDTYVTYLIRTEEKGRSQSLSEVLKYEIDVGNESTTLGYYNGKLEPLGSYRACVAGFTNITFHPQNKGLIDGAESYVSFSRYSDAVSLPQDPGVICGAVFGCIFGALVIVTVGGFIFWRKKRKDAKNNEVSFSQIKPKKSKLIRVENFEAYFKKQQADSNCGFAEEYEDLKLVGISQPKYAAELAENRGKNRYNNVLPYDISRVKLSVQTHSTDDYINANYMPGYHSKKDFIATQGPLPNTLKDFWRMVWEKNVYAIIMLTKCVEQGRTKCEEYWPSKQAQDYGDITVAMTSEIVLPEWTIRDFTVKNIQTSESHPLRQFHFTSWPDHGVPDTTDLLINFRYLVRDYMKQSPPESPILVHCSAGVGRTGTFIAIDRLIYQIENENTVDVYGIVYDLRMHRPLMVQTEDQYVFLNQCVLDIVRSQKDSKVDLIYQNTTAMTIYENLAPVTTFGKTNGYIA

SEQ ID NO: 64664 - protein, 295 aa, Homo sapiens [sequence omitted]

SEQ ID NO: 64665 - protein, 498 aa, Homo sapiens
MSLAGAEKNGLVKIKVAEDEAEAAAAAKFTGLSKEELLKVAGSPGWVRTRWALLLLFWLGWLGMLAGAVVIIVRAPRCRELPAQKWWHTGALYRIGDLQAFQGHGAGNLAGLKGRLDYLSSLKVKGLVLGPIHKNQKDDVAQTDLLQIDPNFGSKEDFDSLLQSAKKKSIRVILDLTPNYRGENSWFSTQVDTVATKVKDALEFWLQAGVDGFQVRDIENLKDASSFLAEWQNITKGFSEDRLLIAGTNSSDLQQILSLLESNKDLLLTSSYLSDSGSTGEHTKSLVTQYLNATGNRWCSWSLSQARLLTSFLPAQLLRLYQLMLFTLPGTPVFSYGDEIGLDAAALPGQPMEAPVMLWDESSFPDIPGAVSANMTVKGQSEDPGSLLSLFRRLSDQRSKERSLLHGDFHAFSAGPGLFSYIRHWDQNERFLVVLNFGDVGLSAGLQASDLPASASLPAKADLLLSTQPGREEGSPLELERLKLEPHEGLLLRFPYAA

SEQ ID NO: 64666 - protein, 524 aa, Homo sapiens
MLHLVFILPSLMLLIPHILLENFAAAIPGHRCWVHMLDNNTGSGNETGILSEDALLRISIPLDSNLRPEKCRRFVHPQWQLLHLNGTIHSTSEADTEPCVDGWVYDQSYFPSTIVTKWDLVCDYQSLKSVVQFLLLTGMLVGGIIGGHVSDRFGRRFILRWCLLQLAITDTCAAFAPTFPVYCVLRFLAGFSSMIIISNNSLPITEWIRPNSKALVVILSSGALSIGQIILGGLAYVFRDWQTLHVVASVPFFVFFLLSRWLVESARWLIITNKLDEGLKALRKVARTNGIKNAEETLNIEVVRSTMQEELDAAQTKTTVCDLFRNPSMRKRICILVFLRFANTIPFYGTMVNLQHVGSNIFLLQVLYGAVALIVRCLALLTLNHMGRRISQILFMFLVGLSILANTFVPKEMQTLRVALACLGIGCSAATFSSVAVHFIELIPTVLRARASGIDLTASRIGAALAPLLMTLTVFFTTLPWIIYGIFPIIGGLIVFLLPETKNLPLPDTIKDVENQKKNLKEKA

SEQ ID NO: 64667 - protein, 95 aa, Homo sapiens
MRLSWFRVLTVLSICLSAVATATGAEGKRKLQIGVKKRVDHCPIKSRKGDVLHMHYTGKLEDGTEFDSSLPQNQPFVFSLGTGQVIKGWDQGLLG

SEQ ID NO: 64668 - protein, 71 aa, Homo sapiens [sequence omitted]

SEQ ID NO: 64669 - protein, 1334 aa, Homo sapiens
MDIQVLSQERQPFFHTRCEEDNGGCSHLCLLSPSEPFYTCACPTGVQLQDNGRTCKAGAEEVLLLARRTDLRRISLDTPDFTDIVLQVDDIRHAIAIDYDPLEGYVYWTDDEVRAIRRAYLDGSGAQTLVNTEINDPDGIAVDWVARNLYWTDTGTDRIEVTRLNGTSRKILVSEDLDEPRAIALHPVMGLMYWTDWGENPKIECANLDGQERRVLVNASLGWPNGLALDLQEGKLYWGDAKTDKIEVINVDGTKRRTLLEDKLPHIFGFTLLGDFIYWTDWQRRSIERVHKVKASRDVIIDQLPDLMGLKAVNVAKVVGTNPCADRNGGCSHLCFFTPHATRCGCPIGLELLSDMKTCIVPEAFLVFTSRAAIHRISLETNNNDVAIPLTGVKEASALDFDVSNNHIYWTDVSLKTISRAFMNGSSVEHVVEFGLDYPEGMAVDWMGKNLYWADTGTNRIEVARLDGQFRQVLVWRDLDNPRSLALDPTKGYIYWTEWGGKPRIVRAFMDGTNCMTLVDKVGRANDLTIDYADQRLYWTDLDTNMIESSNMLGQERVVIADDLPHPFGLTQYSDYIYWTDWNLHSIERADKTSGRNRTLIQGHLDFVMDILVFHSSRQDGLNDCMHNNGQCGQLCLAIPGGHRCGCASHYTLDPSSRNCSPPTTFLLFSQKSAISRMIPDDQHSPDLILPLHGLRNVKAIDYDPLDKFIYWVDGRQNIKRAKDDGTQPFVLTSLSQGQNPDRQPHDLSIDIYSRTLFWTCEATNTINVHRLSGEAMGVVLRGDRDKPRAIVVNAERGYLYFTNMQDRAAKIERAALDGTEREVLFTTGLIRPVALVVDNTLGKLFWVDADLKRIESCDLSGANRLTLEDANIVQPLGLTILGKHLYWIDRQQQMIERVEKTTGDKRTRIQGRVAHLTGIHAVEEVSLEEFSAHPCARDNGGCSHICIAKGDGTPRCSCPVHLVLLQNLLTCGEPPTCSPDQFACATGEIDCIPGAWRCDGFPECDDQSDEEGCPVCSAAQFPCARGQCVDLRLRCDGEADCQDRSDEADCDAICLPNQFRCASGQCVLIKQQCDSFPDCIDGSDELMCEITKPPSDDSPAHSSAIGPVIGIILSLFVMGGVYFVCQRVVCQRYAGANGPFPHEYVSGTPHVPLNFIAPGGSQHGPFTGIACGKSMMSSVSLMGGRGGVPLYDRNHVTGASSSSSSSTKATLYPPILNPPPSPATDPSLYNMDMFYSSNIPATARPYRPYIIRGMAPPTTPCSTDVCDSDYSASRWKASKYYLDLNSDSDPYPPPPTPHSQYLSAEDSCPPSPATERSYFHLFPPPPSPCTDSS

SEQ ID NO: 64670 - protein, 130 aa, Homo sapiens [sequence omitted]

SEQ ID NO: 64671 - protein, 483 aa, Homo sapiens
MVHRLPVFKRYMGNTPQKKAVFGQCRGLPCVAPLLTTVEEAPRGISARVWGHFPKWLNGSLLRIGPGKFEFGKDKYNHWFDGMALLHQFRMAKGTVTYRSKFLQSDTYKANSAKNRIVISEFGTLALPDPCKNVFERFMSRFELPGKAAGFSYKVIRVPPEKVDLGETIHGVQVICSIASTEKGKPSYYHSFGMTRNYIIFIEQPLKMNLWKIATSKIRGKAFSDGISWEPQCNTRFHVVEKRTGQLLPGRYYSKPFVTFHQINAFEDQGCVIIDLCCQDNGRTLEVYQLQNLRKAGEGLDQVHNSAAKSFPRRFVLPLNVSLNAPEGDNLSPLSYTSASAVKQADGTIWCSHENLHQEDLEKEGGIEFPQIYYDRFSGKKYHFFYGCGFRHLVGDSLIKVDVVNKTLKVWREDGFYPSEPVFVPAPGTNEEDGGVILSVVITPNQNESNFILVLDAKNFEELGRAEVPVQMPYGFHGTFIPI

SEQ ID NO: 64672 - protein, 455 aa, Homo sapiens
MKKVTSVKAHSDTWMVVLDPMKPGGPFEVMAQQTLEKINFTLRVHDVLFGDVWLCSGQSNMQMTVLQIFNATRELSNTAAYQSVRILSVSPIQAEQELEDLVAVDLQWSKPTSENLGHGYFKYMSAVCWLFGRHLYDTLQYPIGLIASSWGGTPIEAWSSGRSLKACGVPKQGSIPYDSVTGPSKHSVLWNAMIHPLCNMTLKGVVWYQGESNINYNTDLYNCTFPALIEDWRETFHRGSQGQTERFFPFGLVQLSSDLSKKSSDDGFPQIRWHQTADFGYVPNPKMPNTFMAVAMDLCDRDSPFGSIHPRDKQTVAYRLHLGARALAYGEKNLTFEGPLPEKIELLAHKGLLNLTYYQQIQVQKKDNKIFEISCCSDHRCKWLPASMNTVSTQSLTLAIDSCHGTVVALRYAWTTWPCEYKQCPLYHPSSALPAPPFIAFITDQGPGHQSNVAK

SEQ ID NO: 64673 - protein, 681 aa, Homo sapiens [sequence omitted]

SEQ ID NO: 64674 - protein, 337 aa, Homo sapiens [sequence omitted]

SEQ ID NO: 64675 - protein, 345 aa, Homo sapiens [sequence omitted]

SEQ ID NO: 64676 - protein, 119 aa, Homo sapiens
MEDYLQALNISLAVRKIALLLKPDKEIEHQGNHMTVRTLSTFRNYTVQFDVGVEFEEDLRSVDGRKCQTIVTWEEEHLVCVQKGEVPNRGWRHWLEGEMLYLELTARDAVCEQVFRKVR

SEQ ID NO: 64677 - protein, 1116 aa, Homo sapiens [sequence omitted]

SEQ ID NO: 64678 - protein, 1208 aa, Homo sapiens
MDYIKDKEEVNGIEEICFDPEGSKAEWKETPCILSVNVKNKQDDDLNCEPLSPHNITPEPVSKLPAEPVSGDPAPGDLDAGDPASGVLASGDSTSGDPTSSEPSSSDAASGDATSGDAPSGDVSPGDATSGDATADDLSSGDPTSSDPIPGEPVPVEPISGDCAADDIASSEITSVDLASGAPASTDPASDDLASGDLSSSELASDDLATGELASDELTSESTFDRTFEPKSVPVCEPVPEIDNIEPSSNKDDDFLEKNGADEKLEQIQSKDSLDEKNKADNNIDANEETLETDDTTICSDRPPENEKKVEEDIITELALGEDAISSSMEIDQGEKNEDETSADLVETINENVIEDNKSENILENTDSMETDEIIPILEKLAPSEDELTCFSKTSLLPIDETNPDLEEKMESSFGSPSKQESSESLPKEAFLVLSDEEDISGEKDESEVISQNETCSPEVESNEKDNKPEEEEQVIHEDDERPSEKNEFSRRKRSKSEDMDNVQSKRRRYMEEEYEAEFQVKITAKGDINQKLQKVIQWLLEEKLCALQCAVFDKTLAELKTRVEKIECNKRHKTVLTELQAKIARLTKRFEAAKEDLKKRHEHPPNPPVSPGKTVNDVNSNNNMSYRNAGTVRQMLESKRNVSESAPPSFQTPVNTVSSTNLVTPPAVVSSQPKLQTPVTSGSLTATSVLPAPNTATVVATTQVPSGNPQPTISLQPLPVILHVPVAVSSQPQLLQSHPGTLVTNQPSGNVEFISVQSPPTVSGLTKNPVSLPSLPNPTKPNNVPSVPSPSIQRNPTASAAPLGTTLAVQAVPTAHSIVQATRTSLPTVGPSGLYSPSTNRGPIQMKIPISAFSTSSAAEQNSNTTPRIENQTNKTIDASVSKKAADSTSQCGKATGSDSSGVIDLTMDDEESGASQDPKKLNHTPVSTMSSSQPVSRPLQPIQPAPPLQPSGVPTSGPSQTTIHLLPTAPTTVNVTHRPVTQVTTRLPVPRAPANHQVVYTTLPAPPAQAPLRGTVMQAPAVRQVNPQNSVTVRVPQTTTYVVNNGLTLGSTGPQLTVHHRPPQVHTEPPRPVHPAPLPEAPQPQRLPPEAASTSLPQKPHLKLARVQSQNGIVLSWSVLEVDRSCATVDSYHLYAYHEEPSATVPSQWKKIGEVKALPLPMACTLTQFVSGSKYYFAVRAKDIYGRFGPFCDPQSTDVISSTQSS

SEQ ID NO: 64679 - protein, 271 aa, Homo sapiens
MDLQHGSLFLQTPKIVADKDYSVTANSKIVVVTAGVRQQEGESRLNLVQRNVNVFKFIIPQIVKYSPDCIIIVVSNPVDILTYVTWKLSGLPKHRVIGSGCNLDSARFRYLMAEKLGIHPSSCHGWILGEHGDSSVAVWSGVNVAGVSLQELNPEMGTDNDSENWKEVHKMVVESAYEVIKLKGYTNWAIGLSVADLIESMLKNLSRIHPVSTMVKGMYGIENEVFLSLPCILNARGLTSVINQKLKDDEVAQLKKSADTLWDIQKDLKDL

SEQ ID NO: 64680 - protein, 828 aa, Homo sapiens
MQTLEGKVHWSNVNESEPSFEATRSRNRYSVAYAAQKPWLLNATVEENITFGSPFNKQRYKAVTDACSLQPDIDLLPFGDQTEIGERGINLSGGQRQRICVARALYQNTNIVFLDDPFSALDIHLSDHLMQEGILKFLQDDKRTLVLVTHKLQYLTHADWIIAMKDGSVLREGTLKDIQTKDVELYEHWKTLMNRQDQELEKDMEADQTTLERKTLRRAMYSREAKAQMEDEDEEEEEEEDEDDNMSTVMRLRTKMPWKTCWRYLTSGGFFLLILMIFSKLLKHSVIVAIDYWLATWTSEYSINNTGKADQTYYVAGFSILCGAGIFLCLVTSLTVEWMGLTAAKNLHHNLLNKIILGPIRFFDTTPLGLILNRFSADTNIIDQHIPPTLESLTRSTLLCLSAIGMISYATPVFLVALLPLGVAFYFIQKYFRVASKDLQELDDSTQLPLLCHFSETAEGLTTIRAFRHETRFKQRMLELTDTNNIAYLFLSAANRWLEVRTDYLGACIVLTASIASISGSSNSGLVGLGLLYALTITNYLNWVVRNLADLEVQMGAVKKVNSFLTMESENYEGTMDPSQVPEHWPQEGEIKIHDLCVRYENNLKPVLKHVKAYIKPGQKVGICGRTGSGKSSLSLAFFRMVDIFDGKIVIDGIDISKLPLHTLRSRLSIILQDPILFSGSIRFNLDPECKCTDDRLWEALEIAQLKNMVKSLPGGLDAVVTEGGENFSVGQRQLFCLARAFVRKSSILIMDEATASIDMATENILQKVVMTAFADRTVVTIAHRVHTILTADLVIVMKRGNILEYDTPESLLAQENGVFASFVRADM

SEQ ID NO: 64681 - protein, 2555 aa, Homo sapiens
MRVSLDAAGNEGSWFYIHPFWKLRSEGDNIVVGDKVVLMPVNAGQPLHASNIELLDNPGCKEVNAVNCNTSWKITLFMKYSSYREDVLKGGDVVRLFHAEQEKFLTCDEYEKKQHIFLRTTLRQSATSATSSKALWEIEVVHHDPCRGGAGQWNSLFRFKHLATGNYLAAELNPDYRDAQNEGKNVRDGVPPTSKKKRQAGEKIMYTLVSVPHGNDIASLFELDATTLQRADCLVPRNSYVRLRHLCTNTWVTSTSIPIDTDEERPVMLKIGTCQTKEDKEAFAIVSVPLSEVRDLDFANDANKVLATTVKKLENGTITQNERRFVTKLLEDLIFFVADVPNNGQEVLDVVITKPNRERQKLMREQNILAQVFGILKAPFKEKAGEGSMLRLEDLGDQRYAPYKYMLRLCYRVLRHSQQDYRKNQEYIAKNFCVMQSQIGYDILAEDTITALLHNNRKLLEKHITAKEIETFVSLLRRNREPRFLDYLSDLCVSNTTAIPVTQELICKFMLSPGNADILIQTKVVSMQADNPMESSILSDDIDDEEVWLYWIDSNKEPHGKAIRHLAQEAKEGTKADLEVLTYYRYQLNLFARMCLDRQYLAINQISTQLSVDLILRCVSDESLPFDLRASFCRLMLHMHVDRDPQESVVPVRYARLWTEIPTKITIHEYDSITDSSRNDMKRKFALTMEFVEEYLKEVVNQPFPFGDKEKNKLTFEVVHLARNLIYFGFYSFSELLRLTRTLLAILDIVQAPMSSYFERLSKFQDGGNNVMRTIHGVGEMMTQMVLSRGSIFPMSVPDVPPSIHPSKQGSPTEHEDVTVMDTKLKIIEILQFILSVRLDYRISYMLSIYKKEFGEDNDNAETSASGSPDTLLPSAIVPDIDEIAAQAETMFAGRKEKNPVQLDDEGGRTFLRVLIHLIMHDYPPLLSGALQLLFKHFSQRAEVLQAFKQVQLLVSNQDVDNYKQIKADLDQLRLTVEKSELWVEKSSNYENGEIGESQVKGGEEPIEESNILSPVQDGTKKPQIDSNKSNNYRIVKEILIRLSKLCVQNKKCRNQHQRLLKNMGAHSVVLDLLQIPYEKNDEKMNEVMNLAHTFLQNFCRGNPQNQVLLHKHLNLFLTPGLLEAETMRHIFMNNYHLCNEISERVVQHFVHCIETHGRHVEYLRFLQTIVKADGKYVKKCQDMVMTELINGGEDVLIFYNDRASFPILLHMMCSERDRGDESGPLAYHITLVELLAACTEGKNVYTEIKCNSLLPLDDIVRVVTHDDCIPEVKIAYVNFVNHCYVDTEVEMKEIYTSNHIWKLFENFLVDMARVCNTTTDRKHADIFLEKCVTESIMNIVSGFFNSPFSDNSTSLQTHQPVFIQLLQSAFRIYNCTWPNPAQKASVESCIRTLAEVAKNRGIAIPVDLDSQVNTLFMKSHSNMVQRAAMGWRLSARSGPRFKEALGGPAWDYRNIIEKLQDVVASLEHQFSPMMQAEFSVLVDVLYSPELLFPEGSDARIRCGAFMSKLINHTKKLMEKEEKLCIKILQTLREMLEKKDSFVEEGNTLRKILLNRYFKGDYSIGVNGHLSGAYSKTAQVGGSFSGQDSDKMGISMSDIQCLLDKEGASELVIDVIVNTKNDRIFSEGIFLGIALLEGGNTQTQYSFYQQLHEQKKSEKFFKVLYDRMKAAQKEIRSTVTVNTIDLGNKKRDDDNELMTSGPRMRVRDSTLHLKEGMKGQLTEASSATSKAYCVYRREMDPEIDIMCTGPEAGNTEEKSAEEVTMSPAIAIMQPILRFLQLLCENHNRELQNFLRNQNNKTNYNLVCETLQFLDCICGSTTGGLGLLGLYINEKNVALVNQNLESLTEYCQGPCHENQTCIATHESNGIDIIIALILNDINPLGKYRMDLVLQLKNNASKLLLAIMESRHDSENAERILFNMRPRELVDVMKNAYNQGLECDHGDDEGGDDGVSPKDVGHNIYILAHQLARHNKLLQQMLKPGSDPDEGDEALKYYANHTAQIEIVRHDRTMEQIVFPVPNICEYLTRESKCRVFNTTERDEQGSKVNDFFQQTEDLYNEMKWQKKIRNNPALFWFSRHISLWGSISFNLAVFINLAVALFYPFGDDGDEGTLSPLFSVLLWIAVAICTSMLFFFSKPVGIRPFLVSIMLRSIYTIGLGPTLILLGAANLCNKIVFLVSFVGNRGTFTRGYRAVILDMAFLYHVAYVLVCMLGLFVHEFFYSFLLFDLVYREETLLNVIKSVTRNGRSIILTAVLALILVYLFSIIGFLFLKDDFTMEVDRLKNRTPVTGSHQVPTMTLTTMMEACAKENCSPTIPASNTADEEYEDGIERTCDTLLMCIVTVLNQGLRNGGGVGDVLRRPSKDEPLFAARVVYDLLFYFIVIIIVLNLIFGVIIDTFADLRSEKQKKEEILKTTCFICGLERDKFDNKTVSFEEHIKSEHNMWHYLYFIVLVKVKDPTEYTGPESYVAQMIVEKNLDWFPRMRAMSLVSNEGDSEQNEIRSLQEKLESTMSLVKQLSGQLAELKEQMTEQRKNKQRLGFLGSNTPHVNHHMPPH

SEQ ID NO: 64682 - protein, 116 aa, Homo sapiens
MRALGQNPTNAEVLKVLGNPKSDEMNVKVLDFEHFLPMLQTVAKNKDQGTYEDYVEGLRVFDKEGNGTVMGAEIRHVLVTLGEKMTEEEVEMLVAGHEDSNGCINYEELVRMVLNG

SEQ ID NO: 64683 - protein, 116 aa, Homo sapiens
MRALGQNPTNAEVLKVLGNPKSDEMNVKVLDFEHFLPMLQTVAKNKDQGTYEDYVEGLRVFDKEGNGTVMGAEIRHVLVTLGEKMTEEEVEMLVAGHEDSNGCINYEAFVRHILSG

SEQ ID NO: 64684 - protein, 813 aa, Homo sapiens
MLQNLDSPFQDQLHQLYSHSLLPVDIRQYLAVWIEDQNWQEAALGSDDSKATMLFFHFLDQLNYECGRCSQDPESLLLQHNLRKFCRDIQPFSQDPTQLAEMIFNLLLEEKRILIQAQRAQLEQGEPVLETPVESQQHEIESRILDLRAMMEKLVKSISQLKDQQDVFCFRYKIQAKGKTPSLDPHQTKEQKILQETLNELDKRRKEVLDASKALLGRLTTLIELLLPKLEEWKAQQQKACIRAPIDHGLEQLETWFTAGAKLLFHLRQLLKELKGLSCLVSYQDDPLTKGVDLRNAQVTELLQRLLHRAFVVETQPCMPQTPHRPLILKTGSKFTVRTRLLVRLQEGNESLTVEVSIDRNPPQLQGFRKFNILTSNQKTLTPEKGQSQGLIWDFGYLTLVEQRSGGSGKGSNKGPLGVTEELHIISFTVKYTYQGLKQELKNQQFFSNPPKAPWSLLGPALSWQFSSYVGRGLNSDQLSMLRNKLFGQNCRTEDPLLSWADFTKRESPPGKLPFWTWLDKILELVHDHLKDLWNDGRIMGFVSRSQERRLLKKTMSGTFLLRFSESSEGGITCSWVEHQDDDKVLIYSVQPYTKEVLQSLPLTEIIRHYQLLTEENIPENPLRFLYPRIPRDEAFGCYYQEKVNLQERRKYLKHRLIVVSNRQVDELQQPLELKPEPELESLELELGLVPEPELSLDLEPLLKAGLDLGPELESVLESTLEPVIEPTLCMVSQTVPEPDQGPVSQPVPEPDLPCDLRHLNTEPMEIFRNCVKIEEIMPNGDPLLAGQNTVDEVYVSRPSHFYTDGPLMPSDF

SEQ ID NO: 64685 - protein, 599 aa, Homo sapiens
MKALQKALSRAGSHCGRGGWGHPSRSPLLGGGVRHHLSEAAAQGRETPHSHQPQHQDHDSSESGMLSRLGDLLFYTIAEGQERIPIHKFTTALKATGLQTSDPRLRDCMSEMHRVVQESSSGGLLDRDLFRKCVSSNIVLLTQAFRKKFVIPDFEEFTGHVDRIFEDVKELTGGKVAAYIPQLAKSNPDLWGVSLCTVDGQRHSVGHTKIPFCLQSCVKPLTYAISISTLGTDYVHKFVGKEPSGLRYNKLSLNEEGIPHNPMVNAGAIVVSSLIKMDCNKAEKFDFVLQYLNKMAGNEYMGFSNATFQSEKETGDRNYAIGYYLKEKKCFPKGVDMMAALDLYFQLCSVEVTCESGSVMAATLANGGICPITGESVLSAEAVRNTLSLMHSCGMYDFSGQFAFHVGLPAKSAVSGAILLVVPNVMGMMCLSPPLDKLGNSHRGTSFCQKLVSLFNFHNYDNLRHCARKLDPRREGAEIRNKTVVNLLFAAYSGDVSALRRFALSAMDMEQKDYDSRTALHVAAAEGHIEVVKFLIEACKVNPFAKDRWGNIPLDDAVQFNHLEVVKLLQDYQDSYTLSETQAEAAAEALSKENLESMV

SEQ ID NO: 64686 - protein, 382 aa, Homo sapiens
MIEAVQNHIGSLNWGYRVALREKKVVYENAYGQFIGPHRIKATNNKGKEKIYSAERFLIATGERPRYLGIPGDKEYCISSDDLFSLPYCPGKTLVVGASYVALECAGFLAGIGLDVTVMVRSILLRGFDQDMANKIGEHMEEHGIKFIRQFVPIKVEQIEAGTPGRLRVVAQSTNSEEIIEGEYNTVMLAIGRDACTRKIGLETVGVKINEKTGKIPVTDEEQTNVPYIYAIGDILEDKVELTPVAIQAGRLLAQRLYAGSTVKCDYENVPTTVFTPLEYGACGLSEEKAVEKFGEENIEVYHSYFWPLEWTIPSRDNNKCYAKIICNTKDNERVVGFHVLGPNAGEVTQGFAAALKCGLTKKQLDSTIGIHPVCAEFFSFI

SEQ ID NO: 64687 - protein, 426 aa, Homo sapiens
MLYMQNSEVFQDLFTELKRYYTGGNVNLEEMLNDFWARLLERMFQLINPQYHFSEDYLECVSKYTDQLKPFGDVPRKLKIQVTRAFIAARTFVQGLTVGREVANRVSKVSPTPGCIRALMKMLYCPYCRGLPTVRPCNNYCLNVMKGCLANQADLDTEWNLFIDAMLLVAERLEGPFNIESVMDPIDVKISEAIMNMQENSMQVSAKVFQGCGQPKPAPALRSARSAPENFNTRFRPYNPEERPTTAAGTSLDRLVTDIKEKLKLSKKVWSALPYTICKDESVTAGTSNEEECWNGHSKARYLPEIMNDGLTNQINNPEVDVDITRPDTFIRQQIMALRVMTNKLKNAYNGNDVNFQDTSDESSGSGSGSGCMDDVCPTEFEFVTTEAPAVDPDRREVDSSAAQRGHSLLSWSLTCIVLALQRLCR

SEQ ID NO: 64688 - protein, 1399 aa, Homo sapiens
MPGVGEKGEPGKPGPRGKPGKDGDKGEKGSPGFPGEPGYPGLIGRQGPQGEKGEAGPPGPPGIVIGTGPLGEKGERGYPGTPGPRGEPGPKGFPGLPGQPGPPGLPVPGQAGAPGFPGERGEKGDRGFPGTSLPGPSGRDGLPGPPGSPGPPGQPGYTNGIVECQPGPPGDQGPPGIPGQPGFIGEIGEKGQKGESCLICDIDGYRGPPGPQGPPGEIGFPGQPGAKGDRGLPGRDGVAGVPGPQGTPGLIGQPGAKGEPGEFYFDLRLKGDKGDPGFPGQPGMPGRAGSPGRDGHPGLPGPKGSPGSVGLKGERGPPGGVGFPGSRGDTGPPGPPGYGPAGPIGDKGQAGFPGGPGSPGLPGPKGEPGKIVPLPGPPGAEGLPGSPGFPGPQGDRGFPGTPGRPGLPGEKGAVGQPGIGFPGPPGPKGVDGLPGDMGPPGTPGRPGFNGLPGNPGVQGQKGEPGVGLPGLKGLPGLPGIPGTPGEKGSIGVPGVPGEHGAIGPPGLQGIRGEPGPPGLPGSVGSPGVPGIGPPGARGPPGGQGPPGLSGPPGIKGEKGFPGFPGLDMPGPKGDKGAQGLPGITGQSGLPGLPGQQGAPGIPGFPGSKGEMGVMGTPGQPGSPGPVGAPGLPGEKGDHGFPGSSGPRGDPGLKGDKGDVGLPGKPGSMDKVDMGSMKGQKGDQGEKGQIGPIGEKGSRGDPGTPGVPGKDGQAGQPGQPGPKGDPGISGTPGAPGLPGPKGSVGGMGLPGTPGEKGVPGIPGPQGSPGLPGDKGAKGEKGQAGPPGIGIPGLRGEKGDQGIAGFPGSPGEKGEKGSIGIPGMPGSPGLKGSPGSVGYPGSPGLPGEKGDKGLPGLDGIPGVKGEAGLPGTPGPTGPAGQKGEPGSDGIPGSAGEKGEPGLPGRGFPGFPGAKGDKGSKGEVGFPGLAGSPGIPGSKGEQGFMGPPGPQGQPGLPGSPGHATEGPKGDRGPQGQPGLPGLPGPMGPPGLPGIDGVKGDKGNPGWPGAPGVPGPKGDPGFQGMPGIGGSPGITGSKGDMGPPGVPGFQGPKGLPGLQGIKGDQGDQGVPGAKGLPGPPGPPGPYDIIKGEPGLPGPEGPPGLKGLQGLPGPKGQQGVTGLVGIPGPPGIPGFDGAPGQKGEMGPAGPTGPRGFPGPPGPDGLPGSMGPPGTPSVDHGFLVTRHSQTIDDPQCPSGTKILYHGYSLLYVQGNERAHGQDLGTAGSCLRKFSTMPFLFCNINNVCNFASRNDYSYWLSTPEPMPMSMAPITGENIRPFISRCAVCEAPAMVMAVHSQTIQIPPCPSGWSSLWIGYSFVMHTSAGAEGSGQALASPGSCLEEFRSAPFIECHGRGTCNYYANAYSFWLATIERSEMFKKPTPSTLKAGELRTHVSRCQVCMRRT

SEQ ID NO: 64689 - protein, 432 aa, Homo sapiens
MPWKPGPHRVFVTQEEAHGVLHRRRRANAFLEELRPGSLERECKEEQCSFEEAREIFKDAERTKLFWISYSDGDQCASSPCQNGGSCKDQLQSYICFCLPAFEGRNCETHKDDQLICVNENGGCEQYCSDHTGTKRSCRCHEGYSLLADGVSCTPTVEYPCGKIPILEKRNASKPQGRIVGGKVCPKGECPWQVLLLVNGAQLCGGTLINTIWVVSAAHCFDKIKNWRNLIAVLGEHDLSEHDGDEQSRRVAQVIIPSTYVPGTTNHDIALLRLHQPVVLTDHVVPLCLPERTFSERTLAFVRFSLVSGWGQLLDRGATALELMVLNVPRLMTQDCLQQSRKVGDSPNITEYMFCAGYSDGSKDSCKGDSGGPHATHYRGTWYLTGIVSWGQGCATVGHFGVYTRVSQYIEWLQKLMRSEPRPGVLLRAPFP

SEQ ID NO: 64690 - protein, 135 aa, Homo sapiens
MTQKTGIVSGFGRTHEKGRQSTRLKMLEVPYVDRNSCKLSSSFIITQNMFCAGYDTKQEDACQGDSGGPHVTRFKDTYFVTGIVSWGEGCARKGKYGIYTKVTAFLKWIDRSMKTRGLPKAKSHAPEVITSSPLK

SEQ ID NO: 64691 - protein, 296 aa, Homo sapiens
MWDSTPLFQFEDMQEIIQNFVRVHVDAPGMEEGAPVFPLGYQYPSLDQLADMIPCVLQYLNFSTIIGVGVGAGAYILARYALNHPDTVEGLVLINIDPNAKGWMDWAAHKLTGLTSSIPEMILGHLFSQEELSGNSELIQKYRNIITHAPNLDNIELYWNSYNNRRDLNFERGGDITLRCPVMLVVGDQAPHEDAVVECNSKLDPTQTSFLKMADSGGQPQLTQPGKLTEAFKYFLQGMGYMASSCMTRLSRSRTASLTSAASVDGNRSRSRTLSQSSESGTLSSGPPGHTMEVSC

SEQ ID NO: 64692 - protein, 500 aa, Homo sapiens
MWIWPRGQVRLVQGGGAANLQFIQALLDSEEENDRAWDGRLGDRYNPPVDATPDTRELEFNEIKTQVELATGQLGLRRAAQKHSFPRMLHQRERGLCHRGSFSLGEQSRVISHFLPNDLGFTDSYSQKAFCGIYSKDGQIFMSACQDQTIRLYDCRYGRFRKFKSIKARDVGWSVLDVAFTPDGNHFLYSSWSDYIHICNIYGEGDTHTALDLRPDERRFAVFSIAVSSDGREVLGGANDGCLYVFDREQNRRTLQIESHEDDVNAVAFADISSQILFSGGDDAICKVWDRRTMREDDPKPVGALAGHQDGITFIDSKGDARYLISNSKDQTIKLWDIRRFSSREGMEASRQAATQQNWDYRWQQVPKKAWRKLKLPGDSSLMTYRGHGVLHTLIRCRFSPIHSTGQQFIYSGCSTGKVVVYDLLSGHIVKKLTNHKACVRDVSWHPFEEKIVSSSWDGNLRLWQYRQAEYFQDDMPESEECASAPAPVPQSSTPFSSPQ

SEQ ID NO: 64693 - protein, 247 aa, Homo sapiens [sequence omitted]

SEQ ID NO: 64694 - protein, 173 aa, Homo sapiens [sequence omitted]

SEQ ID NO: 64695 - protein, 339 aa, Homo sapiens
MDPVIIASEGVEKFKNENFEIIIVDTSGRHKQEDSLFEEMLQVANAIQPDNIVYVMDASIGQACEAQAKAFKDKVDVASVIVTKLDGHAKGGGALSAVAATKSPIIFIGTGEHIDDFEPFKTQPFISKLLGMGDIEGLIDKVNELKLDDNEALIEKLKHGQFTLRDMYEQFQNIMKMGPFSQILGMIPGFGTDFMSKGNEQESMARLKKLMTIMDSMNDQELDSTDGAKVFSKQPGRIQRVARGSGVSTRDVQELLTQYTKFAQMVKKMGGIKGLFKGGDMSKNVSQSQMAKLNQQMAKMMDPRVLHHMGGMAGLQSMMRQFQQGAAGNMKGMMGFNNM

SEQ ID NO: 64696 - protein, 221 aa, Homo sapiens
MKAVENSSTAIGIRCKDGVVFGVEKLVLSKLYEEGSNKRLFNVDRHVGMAVAGLLADARSLADIAREEASNFRSNFGYNIPLKHLADRVAMYVHAYTLYSAVRPFGCSVNDGAQLYMIDPSGVSYGYWGCAIGKARQAAKTEIEKLQMKEMTCRDIVKEVAKIIYIVHDEVKDKAFELELSWVGELTNGRHEIVPKDIREEAEKYAKESLKEEDESDDDNM

SEQ ID NO: 64697 - protein, 292 aa, Homo sapiens
MLSSGVCTSTVQLPGKVVVVTGANTGIGKETAKELAQRGARVYLACRDVEKGELVAKEIQTTTGNQQVLVRKLDLSDTKSIRAFAKGFLAEEKHLHVLINNAGVMMCPYSKTADGFEMHIGVNHLGHFLLTHLLLEKLKESAPSRIVNVSSLAHHLGRIHFHNLQGEKFYNAGLAYCHSKLANILFTQELARRLKGSGVTTYSVHPGTVQSELVRHSSFMRWMWWLFSFFIKTPQQGAQTSLHCALTEGLEILSGNHFSDCHVAWVSAQARNETIARRLWDVSCDLLGLPID

SEQ ID NO: 64698 - protein, 803 aa, Homo sapiens
MRVHKISNVNKALDFIASKGVKLVSIGAEEIVDGNVKMTLGMIWTIILRFAIQDISVEETSAKEGLLLWCQRKTAPYKNVNIQNFHISWKDGLGFCALIHRHRPELIDYGKLRKDDPLTNLNTAFDVAEKYLDIPKMLDAEDIVGTARPDEKAIMTYVSSFYHAFSGAQKAETAANRICKVLAVNQENEQLMEDYEKLASDLLEWIRRTIPWLENRVPENTMHAMQQKLEDFRDYRRLHKPPKVQEKCQLEINFNTLQTKLRLSNRPAFMPSEGRMVSDINNAWGCLEQVEKGYEEWLLNEIRRLERLDHLAEKFRQKASIHEAWTDGKEAMLRQKDYETATLSEIKALLKKHEAFESDLAAHQDRVEQIAAIAQELNELDYYDSPSVNARCQKICDQWDNLGALTQKRREALERTEKLLETIDQLYLEYAKRAAPFNNWMEGAMEDLQDTFIVHTIEEIQGLTTAHEQFKATLPDADKERLAILGIHNEVSKIVQTYHVNMAGTNPYTTITPQEINGKWDHVRQLVPRRDQALTEEHARQQHNERLRKQFGAQANVIGPWIQTKMEEIGRISIEMHGTLEDQLSHLRQYEKSIVNYKPKIDQLEGDHQLIQEALIFDNKHTNYTMEHIRVGWEQLLTTIARTINEVENQILTRDAKGISQEQMNEFRASFNHFDRKKTGMMDTDDFRACLISMGYNMGEAEFARIMSIVDPNRLGVVTFQAFIDFMSRETADTDTADQVMASFKILAGDKNYITMDELRRELPPDQAEYCIARMAPYTGPDSVPGALDYMSFSTALYGESDL

SEQ ID NO: 64699 - protein, 364 aa, Homo sapiens
MYDDIAYSEDNPTPGIVINRPNGTDVYQGVPKDYTGEDVTPQNFLAVLRGDAEAVKGIGSGKVLKSGPQDHVFIYFTDHGSTGILVFPNEDLHVKDLNETIHYMYKHKMYRKMVFYIEACESGSMMNHLPDNINVYATTAANPRESSYACYYDEKRSTYLGDWYSVNWMEDSDVEDLTKETLHKQYHLVKSHTNTSHVMQYGNKTISTMKVMQFQGMKRKASSPVPLPPVTHLDLTPSPDVPLTIMKRKLMNTNDLEESRQLTEEIQRHLDARHLIEKSVRKIVSLLAASEAEVEQLLSERAPLTGHSCYPEALLHFRTHCFNWHSPTYEYALRHLYVLVNLCEKPYPLHRIKLSMDHVCLGHY

SEQ ID NO: 64700 - protein, 376 aa, Homo sapiens
MASRQQLAKETSNFGFSLLRKISMRHDGNMVFSPFGMSLAMTGLMLGATGPTETQIKRGLHLQALKPTKPGLLPSLFKGLRETLSRNLELGLTQGSFAFIHKDFDVKETFFNLSKRYFDTECVPMNFRNASQAKRLMNHYINKETRGKIPKLFDEINPETKLILVDYILFKGKWLTPFDPVFTEVDTFHLDKYKTIKVPMMYGAGKFASTFDKNFRCHVLKLPYQGNATMLVVLMEKMGDHLALEDYLTTDLVETWLRNMKTRNMEVFFPKFKLDQKYEMHELLRQMGIRRIFSPFADLSELSATGRNLQVSRVLQRTVIEVDERGTEAVAGILSEITAYSMPPVIKVDRPFHFMIYEETSGMLLFLGRVVNPTLL

SEQ ID NO: 64701 - protein, 4435 aa, Homo sapiens
MITNVAKQCYERGEKPKVTDFGDKVEDPTFLNQLQSGVNRWIREIQKVTKLDRDPASGTALQEISFWLNLERALYRIQEKRESPEVLLTLDILKHGKRFHATVSFDTDTGLKQALETVNDYNPLMKDFPLNDLLSATELDKIRQALVAIFTHLRKIRNTKYPIQRALRLVEAISRDLSSQLLKVLGTRKLMHVAYEEFEKVMVACFEVFQTWDDEYEKLQVLLRDIVKRKREENLKMVWRINPAHRKLQARLDQMRKFRRQHEQLRAVIVRVLRPQVTAVAQQNQGEVPEPQDMKVAEVLFDAADANAIEEVNLAYENVKEVDGLDVSKEGTEAWEAAMKRYDERIDRVETRITARLRDQLGTAKNANEMFRIFSRFNALFVRPHIRGAIREYQTQLIQRVKDDIESLHDKFKVQYPQSQACKMSHVRDLPPVSGSIIWAKQIDRQLTAYMKRVEDVLGKGWENHVEGQKLKQDGDSFRMKLNTQEIFDDWARKVQQRNLGVSGRIFTIESTRVRGRTGNVLKLKVNFLPEIITLSKEVRNLKWLGFRVPLAIVNKAHQANQLYPFAISLIESVRTYERTCEKVEERNTISLLVAGLKKEVQALIAEGIALVWESYKLDPYVQRLAETVFNFQEKVDDLLIIEEKIDLEVRSLETCMYDHKTFSEILNRVQKAVDDLNLHSYSNLPIWVNKLDMEIERILGVRLQAGLRAWTQVLLGQAEDKAEVDMDTDAPQVSHKPGGEPKIKNVVHELRITNQVIYLNPPIEECRYKLYQEMFAWKMVVLSLPRIQSQRYQVGVHYELTEEEKFYRNALTRMPDGPVALEESYSAVMGIVSEVEQYVKVWLQYQCLWDMQAENIYNRLGEDLNKWQALLVQIRKARGTFDNAETKKEFGPVVIDYGKVQSKVNLKYDSWHKEVLSKFGQMLGSNMTEFHSQISKSRQELEQHSVDTASTSDAVTFITYVQSLKRKIKQFEKQVELYRNGQRLLEKQRFQFPPSWLYIDNIEGEWGAFNDIMRRKDSAIQQQVANLQMKIVQEDRAVESRTTDLLTDWEKTKPVTGNLRPEEALQALTIYEGKFGRLKDDREKCAKAKEALELTDTGLLSGSEERVQVALEELQDLKGVWSELSKVWEQIDQMKEQPWVSVQPRKLRQNLDALLNQLKSFPARLRQYASYEFVQRLLKGYMKINMLVIELKSEALKDRHWKQLMKRLHVNWVVSELTLGQIWDVDLQKNEAIVKDVLLVAQGEMALEEFLKQIREVWNTYELDLVNYQNKCRLIRGWDDLFNKVKEHINSVSAMKLSPYYKVFEEDALSWEDKLNRIMALFDVWIDVQRRWVYLEGIFTGSADIKHLLPVETQRFQSISTEFLALMKKVSKSPLVMDVLNIQGVQRSLERLADLLGKIQKALGEYLERERSSFPRFYFVGDEDLLEIIGNSKNVAKLQKHFKKMFAGVSSIILNEDNSVVLGISSREGEEVMFKTPVSITEHPKINEWLTLVEKEMRVTLAKLLAESVTEVEIFGKATSIDPNTYITWIDKYQAQLVVLSAQIAWSENVETALSSMGGGGDAAPLHSVLSNVEVTLNVLADSVLMEQPPLRRRKLEHLITELVHQRDVTRSLIKSKIDNAKSFEWLSQMRFYFDPKQTDVLQQLSIQMANAKFNYGFEYLGVQDKLVQTPLTDRCYLTMTQALEARLGGSPFGPAGTGKTESVKALGHQLGRFVLVFNCDETFDFQAMGRIFVGLCQVGAWGCFDEFNRLEERMLSAVSQQVQCIQEALREHSNPNYDKTSAPITCELLNKQVKVSPDMAIFITMNPGYAGRSNLPDNLKKLFRSLAMTKPDRQLIAQVMLYSQGFRTAEVLANKIVPFFKLCDEQLSSQSHYDFGLRALKSVLVSAGNVKRERIQKIKREKEERGEAVDEGEIAENLPEQEILIQSVCETMVPKLVAEDIPLLFSLLSDVFPGVQYHRGEMTALREELKKVCQEMYLTYGDGEEVGGMWVEKVLQLYQITQINHGLMMVGPSGSGKSMAWRVLLKALERLEGVEGVAHIIDPKAISKDHLYGTLDPNTREWTDGLFTHVLRKIIDSVRGELQKRQWIVFDGDVDPEWVENLNSVLDDNKLLTLPNGERLSLPPNVRIMFEVQDLKYATLATVSRCGMVWFSEDVLSTDMIFNNFLARLRSIPLDEGEDEAQRRRKGKEDEGEEAASPMLQIQRDAATIMQPYFTSNGLVTKALEHAFQLEHIMDLTRLRCLGSLFSMLHQACRNVAQYNANHPDFPMQIEQLERYIQRYLVYAILWSLSGDSRLKMRAELGEYIRRITTVPLPTAPNIPIIDYEVSISGEWSPWQAKVPQIEVETHKVAAPDVVVPTLDTVRHEALLYTWLAEHKPLVLCGPPGSGKTMTLFSALRALPDMEVVGLNFSSATTPELLLKTFDHYCEYRRTPNGVVLAPVQLGKWLVLFCDEINLPDMDKYGTQRVISFIRQMVEHGGFYRTSDQTWVKLERIQFVGACNPPTDPGRKPLSHRFLRHVPVVYVDYPGPASLTQIYGTFNRAMLRLIPSLRTYAEPLTAAMVEFYTMSQERFTQDTQPHYIYSPREMTRWVRGIFEALRPLETLPVEGLIRIWAHEALRLFQDRLVEDEERRWTDENIDTVALKHFPNIDREKAMSRPILYSNWLSKDYIPVDQEELRDYVKARLKVFYEEELDVPLVLFNEVLDHVLRIDRIFRQPQGHLLLIGVSGAGKTTLSRFVAWMNGLSVYQIKVHRKYTGEDFDEDLRTVLRRSGCKNEKIAFIMDESNVLDSGFLERMNTLLANGEVPGLFEGDEYATLMTQCKEGAQKEGLMLDSHEELYKWFTSQVIRNLHVVFTMNPSSEGLKDRAATSPALFNRCVLNWFGDWSTEALYQVGKEFTSKMDLEKPNYIVPDYMPVVYDKLPQPPSHREAIVNSCVFVHQTLHQANARLAKRGGRTMAITPRHYLDFINHYANLFHEKRSELEEQQMHLNVGLRKIKETVDQVEELRRDLRIKSQELEVKNAAANDKLKKMVKDQQEAEKKKVMSQEIQEQLHKQQEVIADKQMSVKEDLDKVEPAVIEAQNAVKSIKKQHLVEVRSMANPPAAVKLALESICLLLGESTTDWKQIRSIIMRENFIPTIVNFSAEEISDAIREKMKKNYMSNPSYNYEIVNRASLACGPMVKWAIAQLNYADMLKRVEPLRNELQKLEDDAKDNQQKANEVEQMIRDLEASIARYKEEYAVLISEAQAIKADLAAVEAKVNRSTALLKSLSAERERWEKTSETFKNQMSTIAGDCLLSAAFIAYAGYFDQQMRQNLFTTWSHHLQQANIQFRTDIARTEYLSNADERLRWQASSLPADDLCTENAIMLKRFNRYPLIIDPSGQATEFIMNEYKDRKITRTSFLDDAFRKNLESALRFGNPLLVQDVESYDPVLNPVLNREVRRTGGRVLITLGDQDIDLSPSFVIFLSTRDPTVEFPPDLCSRVTFVNFTVTRSSLQSQCLNEVLKAERPDVDEKRSDLLKLQGEFQLRLRQLEKSLLQALNEVKGRILDDDTIITTLENLKREAAEVTRKVEETDIVMQEVETVSQQYLPLSTACSSIYFTMESLKQIHFLYQYSLQFFLDIYHNVLYENPNLKGVTDHTQRLSIITKDLFQVAFNRVARGMLHQDHITFAMLLARIKLKGTVGEPTYDAEFQHFLRGNEIVLSAGSTPRIQGLTVEQAEAVVRLSCLPAFKDLIAKVQADEQFGIWLDSSSPEQTVPYLWSEETPATPIGQAIHRLLLIQAFRPDRLLAMAHMFVSTNLGESFMSIMEQPLDLTHIVGTEVKPNTPVLMCSVPGYDASGHVEDLAAEQNTQITSIAIGSAEGFNQADKAINTAVKSGRWVMLKNVHLAPGWLMQLEKKLHSLQPHACFRLFLTMEINPKVPVNLLRAGRIFVFEPPPGVKANMLRTFSSIPVSRICKSPNERARLYFLLAWFHAIIQERLRYAPLGWSKKYEFGESDLRSACDTVDTWLDDTAKGRQNISPDKIPWSALKTLMAQSIYGGRVDNEFDQRLLNTFLERLFTTRSFDSEFKLACKVDGHKDIQMPDGIRREEFVQWVELLPDTQTPSWLGLPNNAERVLLTTQGVDMISKMLKMQMLEDEDDLAYAETEKKTRTDSTSDGRPAWMRTLHTTASNWLHLIPQTLSHLKRTVENIKDPLFRFFEREVKMGAKLLQDVRQDLADVVQVCEGKKKQTNYLRTLINELVKGILPRSWSHYTVPAGMTVIQWVSDFSERIKQLQNISLAAASGGAKELKNIHVCLGGLFVPEAYITATRQYVAQANSWSLEELCLEVNVTTSQGATLDACSFGVTGLKLQGATCNNNKLSLSNAISTALPLTQLRWVKQTNTEKKASVVTLPVYLNFTRADLIFTVDFEIATKEDPRSFYERGVAVLCTE

SEQ ID NO: 64702 - protein, 593 aa, Homo sapiens
MEYVLYSLDLYNDSAHYALTRFNKQFLYDEIEAEVNLCFDQFVYKLADQIFAYYKVMAGSLLLDKRLRSECKNQGATIHLPPSNRYETLLKQRHVQLLGRSIDLNRLITQRVSAAMYKSLELAIGRFESEDLTSIVELDGLLEINRMTHKLLSRYLTLDGFDAMFREANHNVSAPYGRITLHVFWELNYDFLPNYCYNGSTNRFVRTVLPFSQEFQRDKQPNAQPQYLHGSKALNLAYSSIYGSYRNFVGPPHFQVICRLLGYQGIAVVMEELLKVVKSLLQGTILQYVKTLMEVMPKICRLPRHEYGSPGILEFFHHQLKDIVEYAELKTVCFQNLREVGNAILFCLLIEQSLSLEEVCDLLHAAPFQNILPRVHVKEGERLDAKMKRLESKYAPLHLVPLIERLGTPQQIAIAREGDLLTKERLCCGLSMFEVILTRIRSFLDDPIWRGPLPSNGVMHVDECVEFHRLWSAMQFVYCIPVGTHEFTVEQCFGDGLHWAGCMIIVLLGQQRRFAVLDFCYHLLKVQKHDGKDEIIKNVPLKKMVERIRKFQILNDEIITILDKYLKSGDGEGTPVEHVRCFQPPIHQSLASS

SEQ ID NO: 64703 - protein, 740 aa, Homo sapiens [sequence omitted]

SEQ ID NO: 64704 - protein, 8 aa, Homo sapiens
MTVPPEDD

SEQ ID NO: 64705 - protein, 248 aa, Homo sapiens
MDGGSLDQVLKKAGRIPEQILGKVSIAVIKGLTYLREKHKIMHRDVKPSNILVNSRGEIKLCDFGVSGQLIDSMANSFVGTRSYMSPERLQGTHYSVQSDIWSMGLSLVEMAVGRYPIPPPDAKELELMFGCQVEGDAAETPPRPRTPGRPLSSYGMDSRPPMAIFELLDYIVNEPPPKLPSGVFSLEFQDFVNKCLIKNPAERADLKQLMVHAFIKRSDAEEVDFAGWLCSTIGLNQPSTPTHAAGV

SEQ ID NO: 64706 - protein, 510 aa, Homo sapiens [sequence omitted]

SEQ ID NO: 64707 - protein, 423 aa, Homo sapiens
MLSSGRDKICIIWDLQSCQATRTVPVFESVEAAVLLPEEPVSQLGVKSPGLYFLTAGDQGTLRVWEAASGQCVYTQAQPPGPGQELTHCTLAHTAGVVLTATADHNLLLYEARSLRLQKQFAGYSEEVLDVRFLGPEDSHVVVASNSPCLKVFELQTSACQILHGHTDIVLALDVFRKGWLFASCAKDQSVRIWRMNKAGQVMCVAQGSGHTHSVGTVCCSRLKESFLVTGSQDCTVKLWPLPKALLSKNTAPDNGPILLQAQTTQRCHDKDINSVAIAPNDKLLATGSQDRTAKLWALPQCQLLGVFSGHRVASGASSSLPWTRCWPRPQLMAPSSSGHSRTSAVSRHLRGTMLCLKVAFVSRGTQLLSSGSDGLVKLWTIKNNECVRTLDAHEDKVWGLHAGWTTTPSLGPVTPESSSGRM

SEQ ID NO: 64708 - protein, 226 aa, Homo sapiens
MKFKNPPVNSLSLEFLTELVISLEKLENDKSFRGVILTSDRPGVFSAGLDLTEMCGRSPAHYAGYWKAVQELWLRLYQSNLVLVSAINGACPAGGCLVALTCDYRILADNPRLKDTLENTIGHRAAERALQLGLLFPPAEALQVGIVDQVVPEEQVQSTALSAIAQWMAIPDHARQLTKAMMRKATASRLVTQRDADVQNFVSFISKDSIQKSLQMYLERLKEEKG

SEQ ID NO: 64709 - protein, 266 aa, Homo sapiens
MTHGVLEEWDVKRLQTHCYKVHDRNATVDKLEDFINNINSVLESLYIEIKRGVTEDDGRPIYALVNLATTSISKMATDFAENELDLFRKALELIIDSETGFASSTNILNLVDQLKGKKMRKKEAEQVLQKFVQNKWLIEKEGEFTLHGRAILEMEQYIRETYPDAVKICNICHSLLIQVPAGQGTGAHHWALGSRGSVQVLPGILALGPALLHCWRILPQELAEAISQDVSGRLPAVPRRDALPPSSLVLLLGSKGPRLLYFSQEG

SEQ ID NO: 64710 - protein, 483 aa, Homo sapiens
MVQLCKDRFEYLSFSPTTPMSSHGRVLSLLVAMLLSCCGLAAVCSITGYTHGMHTLAFMAAESLLVTVRTAHVILRYVIHLWDLNHEGTWEGKGTYVYYTDFVMELTLLSLDLMHHIHMLLFGNIWLSMASLVIFMQLRYLFHEVQRRIRRHKNYLRVVGNMEARFAVATPEELAVNNDDCAICWDSMQAARKLPCGHLFHNSCLRSWLEQDTSCPTCRMSLNIADNNRVREEHQGENLDENLVPVAAAEGRPRLNQHNHFFHFDGSRIASWLPSFSVEVMHTTNILGITQASNSQLNAMAHQIQEMFPQVPYHLVLQDLQLTRSVEITTDNILEGRIQVPFPTQRSDSIRPALNSPVERPSSDQEEGETSAQTERVPLDLSPRLEETLDFGEVEVEPSEVEDFEARGSRFSKSADERQRMLVQRKDELLQQARKRFLNKSSEDDAASESFLPSEGASSDPVTLRRRMLAAAAERRLQKQQTS

SEQ ID NO: 64711 - protein, 371 aa, Homo sapiens [sequence omitted]

SEQ ID NO: 64712 - protein, 366 aa, Homo sapiens
MEQKITYRIWRDTANWLEINPDTGAISTRAELDREDFEHVKNSTYTALIIATDNGSPVATGTGTLLLILSDVNDNAPIPEPRTIFFCERNPKPQVINIIDADLPPNTSPFTAELTHGASANWTIQYNDPTQESIILKPKMALEVGDYKINLKLMDNQNKDQVTTLEVSVCDCEGAAGVCRKAQPVEAGLQIPAILGILGGILALLILILLLLLFLRRRAVVKEPLLPPEDDTRDNVYYYDEEGGGEEDQDFDLSQLHRGLDARPEVTRNDVAPTLMSVPRYLPRPANPDEIGNFIDENLKAADTDPTAPPYDSLLVFDYEGSGSEAASLSSLNSSESDKDQDYDYLNEWGNRFKKLADMYGGGEDD

SEQ ID NO: 64713 - protein, 923 aa, Homo sapiens
MNQFKPIFLNTIDPSHPMAKLSRAANTQKCIRAGGKHNDLDDVGKDVYHHTFFEMLGSWSFGDYFKELACKMALELLTQEFGIPIERLYVTYFGGDEAAGLEADLECKQIWQNLGLDDTKILPGNMKDNFWEMGDTGPCGPCSEIHYDRIGGRDAAHLVNQDDPNVLEIWNLVFIQYNREADGILKPLPKKSIDTGMGLERLVSVLQNKMSNYDTDLFVPYFEAIQKGTGARPYTGKVGAEDADGIDMAYRVLADHARTITVALADGGRPDNTGRGYVLRRILRRAVRYAHEKLNASRGFFATLVDVVVQSLGDAFPELKKDPDMVKDIINEEEVQFLKTLSRGRRILDRKIQSLGDSKTIPGDTAWLLYDTYGFPVDLTGLIAEEKGLVVDMDGFEEERKLAQLKSQGKGAGGEDLIMLDIYAIEELRARGLEVTDDSPKYNYHLDSSGSYVFENTVATVMALRREKMFVEEVSTGQECGVVLDKTCFYAEQGGQIYDEGYLVKVDDSSEDKTEFTVKNAQVRGGYVLHIGTIYGDLKVGDQVWLFIDEPRRRPIMSNHTATHILNFALRSVLGEADQKGSLVAPDRLRFDFTAKGAMSTQQIKKAEEIANEMIEAAKAVYTQDCPLAAAKAIQGLRAVFDETYPDPVRVVSIGVPVSELLDDPSGPAGSLTSVEFCGGTHLRNSSHAGAFVIVTEEAIAKGIRRIVAVTGAEAQKALRKAESLKKCLSVMEAKVKAQTAPNKDVQREIADLGEALATAVIPQWQKDELRETLKSLKKVMDDLDRASKADVQKRVLEKTKQFIDSNPNQPLVILEMESGASAKALNEALKLFKMHSPQTSAMLFTVDNEAGKITCLCQVPQNAANRGLKASEWVQQVSGLMDGKGGGKDVSAQATGKNVGCLQEALQLATSFAQLRLGDVKN

SEQ ID NO: 64714 - protein, 320 aa, Homo sapiens
MYTYLSGQELLPVDQKAVLVTGGDCGLGHALCKYLDELGFTVFAGVLNENGPGAEELRRTCSPRLSVLQMDITKPVQIKDAYSKVAAMLQDRGLWAVINNAGVLGFPTDGELLLMTDYKQCMAVNFFGTVEVTKTFLPLLRKSKGRLVNVSSMGGGAPMERLASYGSSKAAVTMFSSVMRLELSKWGIKVASIQPGGFLTNIAGTSDKWEKLEKDILDHLPAEVQEDYGQDYILAQRNFLLLINSLASKDFSPVLRDIQHAILAKSPFAYYTPGKGAYLWICLAHYLPIGIYDYFAKRHFGQDKPMPRALRMPNYKKKAT

SEQ ID NO: 64715 - protein, 1023 aa, Homo sapiens
MYLFVITAEDRQVSITASTRGFYLNQSTAYHFNPKPASPRFLSHSLVELLNQISPTFKKNFAVLQKKRVQRHPFERIATPFQVYSWTAPQAEHAMDCVRAEDAYTSRLGYEEHIPGQTRDWNEELQTTRELPRKNLPERLLRERAIFKVHSDFTAAATRGAMAVIDGNVMAINPSEETKMQMFIWNNIFFSLGFDVRDHYKDFGGDVAAYVAPTNDLNGVRTYNAVDVEGLYTLGTVVVDYRGYRVTAQSIIPGILERDQEQSVIYGSIDFGKTVVSHPRYLELLERTSRPLKILRHQVLNDRDEEVELCSSVECKGIIGNDGRHYILDLLRTFPPDLNFLPVPGEELPEECARAGFPRAHRHKLCCLRQELVDAFVEHRYLLFMKLAALQLMQQNASQLETPSSLENGGPSSLESKSEDPPGQEAGSEEEGSSASGLAKVKELAETIAADDGTADPRSREVIRNACKAVGSISSTAFDIRFNPDIFSPGVRFPESCQDEVRDQKQLLKDAAAFLLSCQIPGLKIGIGELITRSAKHIFKTYLQGVELSGLSAAISHFLNCFLSSYPNPVAHLPADELVSKKRNKRRKNRPPGAADNTAWAVMTPQELWKNICQEAKNYFDFDLECETVDQAVETYGLQKITLLREISLKTGIQVLLKEYSFDSRHKPAFTEEDVLNIFPVVKHVNPKASDAFHFFQSGQAKVQQGFLKEGCELINEALNLFNNVYGAMHVETCACLRLLARLHYIMGDYAEALSNQQKAVLMSERVMGTEHPNTIQEYMHLALYCFASSQLSTALSLLYRARYLMLLVFGEDHPEMALLDNNIGLVLHGVMEYDLSLRFLENALAVSTKYHGPKALKVALSHHLVARVYESKAEFRSALQHEKEGYTIYKTQLGEDHEKTKESSEYLKCLTQQAVALQRTMNEIYRNGSSANIPPLKFTAPSMASVLEQLNVINGILFIPLSQKDLENLKAEVARRHQLQEASRNRDRAEEPMATEPAPAGAPGDLGSQPPAAKDPSPSVQG

SEQ ID NO: 64716 - protein, 538 aa, Homo sapiens
MPAKFVRCAYVIILMAIYWCTEVIPLAVTSLMPVLLFPLFQILDSRQVCVQYMKDTNMLFLGGLIVAVAVERWNLHKRIALRTLLWVGAKPARLMLGFMGVTALLSMWISNTATTAMMVPIVEAILQQMEATSAATEAGLELVDKGKAKELPGSQVIFEGPTLGQQEDQERKRLCKAMTLCICYAASIGGTATLTGTGPNVVLLGQMNELFPDSKDLVNFASWFAFAFPNMLVMLLFAWLWLQFVYMRFNFKKSWGCGLESKKNEKAALKVLQEEYRKLGPLSFAEINVLICFFLLVILWFSRDPGFMPGWLTVAWVEGETKYVSDATVAIFVATLLFIVPSQKPKFNFRSQTEEERKTPFYPPPLLDWKVTQEKVPWGIVLLLGGGFALAKGSEASGLSVWMGKQMEPLHAVPPAAITLILSLLVAVFTECTSNVATTTLFLPIFASMSRSIGLNPLYIMLPCTLSASFAFMLPVATPPNAIVFTYGHLKVADMVKTGVIMNIIGVFCVFLAVNTWGRAIFDLDHFPDWANVTHIET

SEQ ID NO: 64717 - protein, 251 aa, Homo sapiens [sequence omitted]

SEQ ID NO: 64718 - protein, 1035 aa, Homo sapiens [sequence omitted]

SEQ ID NO: 64719 - protein, 149 aa, Homo sapiens
MDLQAVLPRELYPVEFRNLLKWYAKEFKDPLLQEPPAWFKSFLFCELVFQLPFFPIATYAFLKGSCKWIRTPAIIYSVHTMTTLIPILSTFLFEDFSKASGFKGQRPETLHERLTLVSVYAPYLLIPFILLIFMLRSPYYKYEEKRKKK

SEQ ID NO: 64720 - protein, 297 aa, Homo sapiens
MAKRLSQIGVENTEENRRLYRQVLFSADDRVKKCIGGVIFFHETLYQKDDNGVPFVRTIQDKGIVVGIKVDKGVVPLAGTDGETTTQGLDGLSERCAQYKKDGADFAKWRCVLKISERTPSALAILENANVLARYASICQQVLAAVYKALSDHHVYLEGTLLKPNMVTPGHACPIKYTPEEIAMATVTALRRTVPPAVPGVTFLSGGQSEEEASFNLNAINRCPLPRPWALTFSYGRALQASALNAWRGQRDNAGAATEEFIKRAEVNGLAAQGKYEGSGEDGGAAAQSLYIANHAY

SEQ ID NO: 64721 - protein, 359 aa, Homo sapiens
MRMEEGMNVLHDFGIQSTHYLQVNYQDSQDWFILVSVIADLRNAFYVLFPIWFHLQEAVGIKLLWVAVIGDWLNLVFKWILFGQRPYWWVLDTDYYSNTSVPLIKQFPVTCETGPGSPSGHAMGTAGVYYVMVTSTLSIFQGKIKPTYRFRCLNVILWLGFWAVQLNVCLSRIYLAAHFPHQVVAGVLSGIAVAETFSHIHSIYNASLKKYFLITFFLFSFAIGFYLLLKGLGVDLLWTLEKAQRWCEQPEWVHIDTTPFASLLKNLGTLFGLGLALNSSMYRESCKGKLSKWLPFRLSSIVASLVLLHVFDSLKPPSQVELVFYVLSFCKSAVVPLASVSVIPYCLAQVLGQPHKKSL

SEQ ID NO: 64722 - protein, 1412 aa, Homo sapiens
MLLATLLIQYERLQGVQSSGVLIIFWFLCVVCAIVPFRSKILLAKAEGEISDPFRFTTFYIHFALVLSALILACFREKPPFFSAKNVDPNPYPETSAGFLSRLFFWWFTKMAIYGYRHPLEEKDLWSLKEEDRSQMVVQQLLEAWRKQEKQTARHKASAAPGKNASGEDEVLLGARPRPRKPSFLKALLATFGSSFLISACFKLIQDLLSFINPQLLSILIRFISNPMAPSWWGFLVAGLMFLCSMMQSLILQHYYHYIFVTGVKFRTGIMGVIYRKALVITNSVKRASTVGEIVNLMSVDAQRFMDLAPFLNLLWSAPLQIILAIYFLWQNLGPSVLAGVAFMVLLIPLNGAVAVKMRAFQVKQMKLKDSRIKLMSEILNGIKVLKLYAWEPSFLKQVEGIRQGELQLLRTAAYLHTTTTFTWMCSPFLVTLITLWVYVYVDPNNVLDAEKAFVSVSLFNILRLPLNMLPQLISNLTQASVSLKRIQQFLSQEELDPQSVERKTISPGYAITIHSGTFTWAQDLPPTLHSLDIQVPKGALVAVVGPVGCGKSSLVSALLGEMEKLEGKVHMKGSVAYVPQQAWIQNCTLQENVLFGKALNPKRYQQTLEACALLADLEMLPGGDQTEIGEKGINLSGGQRQRVSLARAVYSDADIFLLDDPLSAVDSHVAKHIFDHVIGPEGVLAGKTRVLVTHGISFLPQTDFIIVLADGQVSEMGPYPALLQRNGSFANFLCNYAPDEDQGHLEDSWTALEGAEDKEALLIEDTLSNHTDLTDNDPVTYVVQKQFMRQLSALSSDGEGQGRPVPRRHLGPSEKVQVTEAKADGALTQEEKAAIGTVELSVFWDYAKAVGLCTTLAICLLYVGQSAAAIGANVWLSAWTNDAMADSRQNNTSLRLGVYAALGILQGFLVMLAAMAMAAGGIQAARVLHQALLHNKIRSPQSFFDTTPSGRILNCFSKDIYVVDEVLAPVILMLLNSFFNAISTLVVIMASTPLFTVVILPLAVLYTLVQRFYAATSRQLKRLESVSRSPIYSHFSETVTGASVIRAYNRSRDFEIISDTKVDANQRSCYPYIISNRWLSIGVEFVGNCVVLFAALFAVIGRSSLNPGLVGLSVSYSLQVTFALNWMIRMMSDLESNIVAVERVKEYSKTETEAPWVVEGSRPPEGWPPRGEVEFRNYSVRYRPGLDLVLRDLSLHVHGGEKVGIVGRTGAGKSSMTLCLFRILEAAKGEIRIDGLNVADIGLHDLRSQLTIIPQDPILFSGTLRMNLDPFGSYSEEDIWWALELSHLHTFVSSQPAGLDFQCSEGGENLSVGQRQLVCLARALLRKSRILVLDEATAAIDLETDNLIQATIRTQFDTCTVLTIAHRLNTIMDYTRVLVLDKGVVAEFDSPANLIAARGIFYGMARDAGLA

SEQ ID NO: 64723 - protein, 381 aa, Homo sapiens
MWLQGGPGGSSTGFGNFEEIGPLDSDLKPRKTTWLQAASLLFVDNPVGTGFSYVNGSGAYAKDLAMVASDMMVLLKTFFSCHKEFQTVPFYIFSESYGGKMAAGIGLELYKAIQRGTIKCNFAGVALGDSWISPVDSVLSWGPYLYSMSLLEDKGLAEVSKVAEQVLNAVNKGLYREATELWGKAEMIIEQNTDGVNFYNILTKSTPTSTMESSLEFTQSHLVCLCQRHVRHLQRDALSQLMNGPIRKKLKIIPEDQSWGGQATNVFVNMEEDFMKPVISIVDELLEAGINVTVYNGQLDLIVDTMGQEAWVRKLKWPELPKFSQLKWKALYSDPKSLETSAFVKSYKNLAFYWILKAGHMVPSDQGDMALKMMRLVTQQE

SEQ ID NO: 64724 - protein, 1621 aa, Homo sapiens
MNDPSNPIRRPISADSAIMNPASKVIALKAGKTLQIFNIEMKSKMKAHTMTDDVTFWKWISLNTVALVTDNAVYHWSMEGESQPVKMFDRHSSLAGCQIINYRTDAKQKWLLLTGISAQQNRVVGAMQLYSVDRKVSQPIEGHAASFAQFKMEGNAEESTLFCFAVRGQAGGKLHIIEVGTPPTGNQPFPKKAVDVFFPPEAQNDFPVAMQISEKHDVVFLITKYGYIHLYDLETGTCIYMNRISGETIFVTAPHEATAGIIGVNRKGQVLSVCVEEENIIPYITNVLQNPDLALRMAVRNNLAGAEELFARKFNALFAQGNYSEAAKVAANAPKGILRTPDTIRRFQSVPAQPGQTSPLLQYFGILLDQGQLNKYESLELCRPVLQQGRKQLLEKWLKEDKLECSEELGDLVKSVDPTLALSVYLRANVPNKVIQCFAETGQVQKIVLYAKKVGYTPDWIFLLRNVMRISPDQGQQFAQMLVQDEEPLADITQIVDVFMEYNLIQQCTAFLLDALKNNRPSEGPLQTRLLEMNLMHAPQVADAILGNQMFTHYDRAHIAQLCEKAGLLQRALEHFTDLYDIKRAVVHTHLLNPEWLVNYFGSLSVEDSLECLRAMLSANIRQNLQICVQVASKYHEQLSTQSLIELFESFKSFEGLFYFLGSIVNFSQDPDVHFKYIQAACKTGQIKEVERICRESNCYDPERVKNFLKEAKLTDQLPLIIVCDRFDFVHDLVLYLYRNNLQKYIEIYVQKVNPSRLPVVIGGLLDVDCSEDVIKNLILVVRGQFSTDELVAEVEKRNRLKLLLPWLEARIHEGCEEPATHNALAKIYIDSNNNPERFLRENPYYDSRVVGKYCEKRDPHLACVAYERGQCDLELINVCNENSLFKSLSRYLVRRKDPELWGSVLLESNPYRRPLIDQVVQTALSETQDPEEVSVTVKAFMTADLPNELIELLEKIVLDNSVFSEHRNLQNLLILTAIKADRTRVMEYINRLDNYDAPDIANIAISNELFEEAFAIFRKFDVNTSAVQVLIEHIGNLDRAYEFAERCNEPAVWSQLAKAQLQKGMVKEAIDSYIKADDPSSYMEVVQAANTSGNWEELVKYLQMARKKARESYVETELIFALAKTNRLAELEEFINGPNNAHIQQVGDRCYDEKMYDAAKLLYNNVSNFGRLASTLVHLGEYQAAVDGARKANSTRTWKEVCFACVDGKEFRLAQMCGLHIVVHADELEELINYYQDRGYFEELITMLEAALGLERAHMGMFTELAILYSKFKPQKMREHLELFWSRVNIPKVLRAAEQAHLWAELVFLYDKYEEYDNAIITMMNHPTDAWKEGQFKDIITKVANVELYYRAIQFYLEFKPLLLNDLLMVLSPRLDHTRAVNYFSKVKQLPLVKPYLRSVQNHNNKSVNESLNNLFITEEDYQALRTSIDAYDNFDNISLAQRLEKHELIEFRRIAAYLFKGNNRWKQSVELCKKDSLYKDAMQYASESKDTELAEELLQWFLQEEKRECFGACLFTCYDLLRPDVVLETAWRHNIMDFAMPYFIQVMKEYLTKVDKLDASESLRKEEEQATETQPIVYGQPQLMLTAGPSVAVPPQAPFGYGYTAPPYGQPQPGFGYSM

SEQ ID NO: 64725 - protein, 354 aa, Homo sapiens
MEIQEAIKKPLTQKRKLRIYISNTFSPSKAEGDSAGTAGTPGGTPAGDKVASWELRVEGKLLDDPSKQKRKFSSFFKSLVIELDKELYGPDNHLVEWHRMPTTQETDGFQVKRPGDLNVKCTLLLMLDHQPPQYKLDPRLARLLGVHTQTRAAIMQALWLYIKHNQLQDGHEREYINCNRYFRQIFSCGRLRFSEIPMKLAGLLQHPDPIVINHVISVDPNDQKKTACYDIDVEVDDPLKAQMSNFLASTTNQQEIASLDVKIHETIESINQLKTQRDFMLSFSTDPQDFIQEWLRSQRRDLKIITDVIGNPEEERRAAFYHQPWAQEAVGRHIFAKVQQRRQELEQVLGIRLT

SEQ ID NO: 64726 - protein, 1592 aa, Homo sapiens
MKRESLLEWGLSILLGLCIALFSSSMRNVQFPGMAPQNLGRVDKFNSSSLMVVYTPISNLTQQIMNKTALAPLLKGTSVIGAPNKTHMDEILLENLPYAMGIIFNETFSYKLIFFQGYNSPLWKEDFSAHCWDGYGEFSCTLTKYWNRGFVALQTAINTAIIEITTNHPVMEELMSVTAITMKTLPFITKNLLHNEMFILFFLLHFSPLVYFISLNVTKERKKSKNLMKMMGLQDSAFWLSWGLIYAGFIFIISIFVTIIITFTQIIVMTGFMVIFILFFLYGLSLVALVFLMSVLLKKAVLTNLVVFLLTLFWGCLGFTVFYEQLPSSLEWILNICSPFAFTTGMIQIIKLDYNLNGVIFPDPSGDSYTMIATFSMLLLDGLIYLLLALYFDKILPYGDERHYSPLFFLNSSSCFQHQRTNAKVIEKEIDAEHPSDDYFEPVAPEFQGKEAIRIRNVKKEYKGKSGKVEALKGLLFDIYEGQITAILGHSGAGKSSLLNILNGLSVPTEGSVTIYNKNLSEMQDLEEIRKITGVCPQFNVQFDILTVKENLSLFAKIKGIHLKEVEQEVQRILLELDMQNIQDNLAKHLSEGQKRKLTFGITILGDPQILLLDEPTTGLDPFSRDQVWSLLRERRADHVILFSTQSMDEADILADRKVIMSNGRLKCAGSSMFLKRRWGLGYHLSLHRNEICNPEQITSFITHHIPDAKLKTENKEKLVYTLPLERTNTFPDLFSDLDKCSDQGVTGYDISMSTLNEVFMKLEGQSTIEQDFEQVEMIRDSESLNEMELAHSSFSEMQTAVSDMGLWRMQVFAMARLRFLKLKRQTKVLLTLLLVFGIAIFPLIVENIMYAMLNEKIDWEFKNELYFLSPGQLPQEPRTSLLIINNTESNIEDFIKSLKHQNILLEVDDFENRNGTDGLSYNGAIIVSGKQKDYRFSVVCNTKRLHCFPILMNIISNGLLQMFNHTQHIRIESSPFPLSHIGLWTGLPDGSFFLFLVLCSISPYITMGSISDYKKNAKSQLWISGLYTSAYWCGQALVDVSFFILILLLMYLIFYIENMQYLLITSQIVFALVIVTPGYAASLVFFIYMISFIFRKRRKNSGLWSFYFFFASTIMFSITLINHFDLSILITTMVLVPSYTLLGFKTFLEVRDQEHYREFPEANFELSATDFLVCFIPYFQTLLFVFVLRCMELKCGKKRMRKDPVFRISPQSRDAKPNPEEPIDEDEDIQTERIRTATALTTSILDEKPVIIASCLHKEYAGQKKSCFSKRKKKIAARNISFCVQEGEILGLLGPNGAGKSSSIRMISGITKPTAGEVELKGCSSVLGHLGYCPQENVLWPMLTLREHLEVYAAVKGLRKADARLAIARLVSAFKLHEQLNVPVQKLTAGITRKLCFVLSLLGNSPVLLLDEPSTGIDPTGQQQMWQAIQAVVKNTERGVLLTTHNLAEAEALCDRVAIMVSGRLRCIGSIQHLKNKLGKDYILELKVKETSQVTLVHTEILKLFPQAAGQERYSSLLTYKLPVADVYPLSQTFHKLEAVKHNFNLEEYSLSQCTLEKVFLELSKEQEVGNFDEEIDTTMRWKLLPHSDEP

SEQ ID NO: 64727 - protein, 433 aa, Homo sapiens [sequence omitted]

SEQ ID NO: 64728 - protein, 622 aa, Homo sapiens
MILNDPDFQHEDLNFLTRSQRYEVAVRKSAIMVKKMREFGIADPDEIMWFKKLHLVNFVEPVGLNYSMFIPTLLNQGTTAQKEKWLLSSKGLQIIGTYAQTEMGHGTHLRGLETTATYDPETQEFILNSPTVTSIKWWPGGLGKTSNHAIVLAQLITKGKCYGLHAFIVPIREIGTHKPLPGITVGDIGPKFGYDEIDNGYLKMDNHRIPRENMLMKYAQVKPDGTYVKPLSNKLTYGTMVFVRSFLVGEAARALSKACTIAIRYSAVRHQSEIKPGEPEPQILDFQTQQYKLFPLLATAYAFQFVGAYMKETYHRINEGIGQGDLSELPELHALTAGLKAFTSWTANTGIEACRMACGGHGYSHCSGLPNIYVNFTPSCTFEGENTVMMLQTARFLMKSYDQVHSGKLVCGMVSYLNDLPSQRIQPQQVAVWPTMVDINSPESLTEAYKLRAARLVEIAAKNLQKEVIHRKSKEVAWNLTSVDLVRASEAHCHYVVVKLFSEKLLKIQDKAIQAVLRSLCLLYSLYGISQNAGDFLQGSIMTEPQITQVNQRVKELLTLIRSDAVALVDAFDFQDVTLGSVLGRYDGNVYENLFEWAKNSPLNKAEVHESYKHLKSLQSKL

SEQ ID NO: 64729 - protein, 499 aa, Homo sapiens [sequence omitted]

SEQ ID NO: 64730 - protein, 368 aa, Homo sapiens
MTKVEFETSEEVDVTPTFDTMGLREDLLRGIYAYGFEKPSAIQQRAIKQIIKGRDVIAQSQSGTGKTATFSISVLQCLDIQGLLALGDYMNVQCHACIGGTNVGEDIRKLDYGQHVVAGTPGRVFDMIRRRSLRTRAIKMLVLDEADEMLNKGFKEQIYDVYRYLPPATQVVLISATLPHEILEMTNKFMTDPIRILVKRDELTLEGIKQFFVAVEREEWKFDTLCDLYDTLTITQAVIFCNTKRKVDWLTEKMREANFTVSSMHGDMPQKERESIMKEFRSGASRVLISTDVWARGLDVPQVSLIINYDLPNNRELYIHRIGRSGRYGRKGVAINFVKNDDIRILRDIEQYYSTQIDEMPMNVADLI

SEQ ID NO: 64731 - protein, 351 aa, Homo sapiens
MDLRMLSRELSLYLEHQVRVGFFGSGVGLSLILGFSVAYAFYYLSSIAKKPQLVTGGESFSRFLQDHCPVVTETYYPTVWCWEGRGQTLLRPFITSKPPVQYRNELIKTADGGQISLDWFDNDNSTCYMDASTRPTILLLPGLTGTSKESYILHMIHLSEELGYRMLLLNYLGKIGSKTPLMAAATFSVGWNTFACSESLEKPLNWLLFNYYLTTCLQSSVNKHRHMFVKQVDMDHVMKAKSIREFDKRFTSVMFGYQTIDDYYTDASPSPRLKSVGIPVLCLNSVDDVFSPSHAIPIETAKQNPNVALVLTSYGGHIGFLEGIWPRQSTYMDRVFKQFVQAMVEHGHELS

SEQ ID NO: 64732 - protein, 776 aa, Homo sapiens
MYNACRDVEAPSSNDKALGLLCGKDADACNATNWIEYMFNKDNGQAPFTITPVFSDFPVHGMEPMNNATKGCDESVDEVTAPCSCQDCSIVCGPKPQPPPPPAPWTILGLDAMYVIMWITYMAFLLVFFGAFFAVWCYRKRYFVSEYTPIDSNIAFSVNASDKGEASCCDPVSAAFEGCLRRLFTRWGSFCVRNPGCVIFFSLVFITACSSGLVFVRVTTNPVDLWSAPSSQARLEKEYFDQHFGPFFRTEQLIIRAPLTDKHIYQPYPSGADVPFGPPLDIQILHQVLDLQIAIENITASYDNETVTLQDICLAPLSPYNTNCTILSVLNYFQNSHSVLDHKKGDDFFVYADYHTHFLYCVRAPASLNDTSLLHDPCLGTFGGPVFPWLVLGGYDDQNYNNATALVITFPVNNYYNDTEKLQRAQAWEKEFINFVKNYKNPNLTISFTAERSIEDELNRESDSDVFTVVISYAIMFLYISLALGHMKSCRRLLVDSKVSLGIAGILIVLSSVACSLGVFSYIGLPLTLIVIEVIPFLVLAVGVDNIFILVQAYQRDERLQGETLDQQLGRVLGEVAPSMFLSSFSETVAFFLGALSVMPAVHTFSLFAGLAVFIDFLLQITCFVSLLGLDIKRQEKNRLDIFCCVRGAEDGTSVQASESCLFRFFKNSYSPLLLKDWMRPIVIAIFVGVLSFSIAVLNKVDIGLDQSLSMPDDSYMVDYFKSISQYLHAGPPVYFVLEEGHDYTSSKGQNMVCGGMGCNNDSLVQQIFNAAQLDN

SEQ ID NO: 64733 - protein, 430 aa, Homo sapiens
MAVAADTLQRLGARVASVDMGPQQLPDGQSLPIPPVILAELGSDPTKGTVCFYGHLDVQPADRGDGWLTDPYVLTEVDGKLYGRGATDNKGPVLAWINAVSAFRALEQDLPVNIKFIIEGMEEAGSVALEELVEKEKDRFFSGVDYIVISDNLWISQRKPAITYGTRGNSYFMVEVKCRDQDFHSGTFGGILHEPMADLVALLGSLVDSSGHILVPGIYDEVVPLTEEEINTYKAIHLDLEEYRNSSRVEKFLFDTKEEILMHLWRYPSLSIHGIEGAFDEPGTKTVIPGRVIGKFSIRLVPHMNVSAVEKQVTRHLEDVFSKRNSSNKMVVSMTLGLHPWIANIDDTQYLAAKRAIRTVFGTEPDMIRDGSTIPIAKMFQEIVHKSVVLIPLGAVDDGEHSQNEKINRWNYIEGTKLFAAFFLEMAQLH

SEQ ID NO: 64734 - protein, 441 aa, Homo sapiens
MISVEKAKNEPVGKKTSDKRDSDGKKEKSSNSDRSTNLKRDDKCDRKDDAKKGDDGSGEKSKDQDDQKPGPSERSRATKSGSRGTERTVVMDKSKGVPVISVKTSGSKERASKSQDRKSASREKRSVVSFDKVKEPRKSRDSESHRVRERSEREQRMQAQWEREERERLEIARERLAFQRQRLERERMERERLERERMHVEHERRREQERIHREREELRRQQELRYEQERRPAVRRPYDLDRRDDAYWPEAKRAALDERYHSDFNRQDRFHDFDHRDRGRYPDHSVDRREGSRSMMGEREGQHYPERHGGPERHGRDSRDGWGGYGSDKRMSEGRGLPPPPRGRRDWGDHGRREDDRSWQGTADGGMMDRDHKRWQGGERSMSGHSGPGHMMNRGGMSGRGSFAPGGASRGHPIPHGGMQGGFGGQSRGSRPSDARFTRRY

SEQ ID NO: 64735 - protein, 523 aa, Homo sapiens
MEKVLAGETLSVNDPPDVLDRQKCLAALASLRHAKWFQARANGLKSCVIVIRVLRDLCTRVPTWGPLRGWPLELLCEKSIGTANRPMGAGEALRRVLECLASGIVMPDGSGIYDPCEKEATDAIGHLDRQQREDITQSAQHALRLAAFGQLHKVLGMDPLPSKMPKKPKNENPVDYTVQIPPSTTYAITPMKRPMEEDGEEKSPSKKKKKIQKKEEKAEPPQAMNALMRLNQLKPGLQYKLVSQTGPVHAPIFTMSVEVDGNSFEASGPSKKTAKLHVAVKVLQDMGLPTGAEGRDSSKGEDSAEETEAKPAVVAPAPVVEAVSTPSAAFPSDATAEQGPILTKHGKNPVMELNEKRRGLKYELISETGGSHDKRFVMEVEVDGQKFQGAGSNKKVAKAYAALAALEKLFPDTPLALDANKKKRAPVPVRGGPKFAAKPHNPGFGMGGPMHNEVPPPPNLRGRGRGGSIRGRGRGRGFGGANHGGYMNAGAGYGSYGYGGNSATAGYSDFFTDCYGYHDFGSS

SEQ ID NO: 64736 - protein, 715 aa, Homo sapiens
MEKVLAGETLSVNDPPDVLDRQKCLAALASLRHAKWFQARANGLKSCVIVIRVLRDLCTRVPTWGPLRGWPLELLCEKSIGTANRPMGAGEALRRVLECLASGIVMPDGSGIYDPCEKEATDAIGHLDRQQREDITQSAQHALRLAAFGQLHKVLGMDPLPSKMPKKPKNENPVDYTVQIPPSTTYAITPMKRPMEEDGEEKSPSKKKKKIQKKEEKAEPPQAMNALMRLNQLKPGLQYKLVSQTGPVHAPIFTMSVEVDGNSFEASGPSKKTAKLHVAVKVLQDMGLPTGAEGRDSSKGEDSAEETEAKPAVVAPAPVVEAVSTPSAAFPSDATAEQGPILTKHGKNPVMELNEKRRGLKYELISETGGSHDKRFVMEVEVDGQKFQGAGSNKKVAKAYAALAALEKLFPDTPLALDANKKKRAPVPVRGGPKFAAKPHNPGFGMGGPMHNEVPPPPNLRGRGRGGSIRGRGRGRGFGGANHGGYMNAGAGYGSYGYGGNSATAGYSQFYSNGGHSGNASGGGGGGGGGSSGYGSYYQGDNYNSPVPPKHAGKKQPHGGQQKPSYGSGYQSHQGQQQSYNQSPYSNYGPPQGKQKGYNHGQGSYSYSNSYNSPGGGGGSDYNYESKFNYSGSGGRSGGNSYGSGGASYNPGSHGGYGGGSGGGSSYQGKQGGYSQSNYNSPGSGQNYSGPPSSYQSSQGGYGRNADHSMNYQYR

SEQ ID NO: 64737 - protein, 383 aa, Homo sapiens [sequence omitted]

SEQ ID NO: 64738 - protein, 160 aa, Homo sapiens [sequence omitted]

SEQ ID NO: 64739 - protein, 386 aa, Homo sapiens
MALFEQEVLGAPVPGIPTAVPAVPTVPTVPTVEAMQVPAAPVIRPIIATNTYQQVQQTLEARAAAAATVVPPMVGGPPFVGPAAGPRPMALRPPHQALVGPPLPGPPGPPMMLPPMARAPGPPLGSMAALRPPLEEPAAPRELGLGLGLGLKEKEEAVVAAAAGLEEASAAVAVGAGGAPAGPAVIGPSLPLALAMPLPEPEPLPLPLEVVRGLLPPLRIPELLSLRPRPRPPRPEPPPGLMALEVPEPLGEDKKKGKPEKLKRCIRTAAGSSWEDPSLLEWDADDFRIFCGDLGNEVNDDILARAFSRFPSFLKAKVIRDKRTGKTKGYGFVSFKDPSDYVRAMREMNGKYVGSRPIKLRKSMWKDRNLDVVRKKQKEKKKLGLR

SEQ ID NO: 64740 - protein, 281 aa, Homo sapiens
MKRFFVNFVVGQDPGSDVAFHFNPRFDGWDKVVFNTLQGGKWGSEERKRSMPFKKGAAFELVFIVLAEHYKVVVNGNPFYEYGHRLPLQMVTHLQVDGDLQLQSINFIGGQPLRPQGPPMMPPYPGPGHCHQQLNSLPTMEGPPTFNPPVPYFGRLQGGLTARRTIIIKGYVPPTGKSFAINFKVGSSGDIALHINPRMGNGTVVRNSLLNGSWGSEEKKITHNPFGPGQFFDLSIRCGLDRFKVYANGQHLFDFAHRLSAFQRVDTLEIQGDVTLSYVQI

SEQ ID NO: 64741 - protein, 328 aa, Homo sapiens
MPFNVAEGKEVLLLVHNLPQQLFGYSWYKGERVDGNRQIVGYAIGTQQATPGPANSGRETIYPNASLLIQNVTQNDTGFYTLQVIKSDLVNEEATGQFHVYPELPKPSISSNNSNPVEDKDAVAFTCEPETQDTTYLWWINNQSLPVSPRLQLSNGNRTLTLLSVTRNDTGPYECEIQNPVSANRSDPVTLNVTYGPDTPTISPSDTYYRPGANLSLSCYAASNPPAQYSWLINGTFQQSTQELFIPNITVNNSGSYTCHANNSVTGCNRTTVKTIIVTDNALPQENGLSPGAIAGIVIGVVALVALIAVALACFLHFGKTGSSGPLQ

SEQ ID NO: 64742 - protein, 105 aa, Homo sapiens [sequence omitted]

SEQ ID NO: 64743 - protein, 731 aa, Homo sapiens [sequence omitted]

SEQ ID NO: 64744 - protein, 1272 aa, Homo sapiens
MNGGQCSSRDKCQCPPNFTGKLCQIPVHGASVPKLYQHSQQPGKALGTHVIHSTHTLPLTVTSQQGVKVKFPPNIVNIHVKHPPEASVQIHQVSRIDGPTGQKTKEAQPGQSQVSYQGLPVQKTQTIHSTYSHQQVIPHVYPVAAKTQLGRCFQETIGSQCGKALPGLSKQEDCCGTVGTSWGFNKCQKCPKKPSYHGYNQMMECLPGYKRVNNTFCQDINECQLQGVCPNGECLNTMGSYRCTCKIGFGPDPTFSSCVPDPPVISEEKGPCYRLVSSGRQCMHPLSVHLTKQLCCCSVGKAWGPHCEKCPLPGTAAFKEICPGGMGYTVSGVHRRRPIHHHVGKGPVFVKPKNTQPVAKSTHPPPLPAKEEPVEALTFSREHGPGVAEPEVATAPPEKEIPSLDQEKTKLEPGQPQLSPGISTIHLHPQFPVVIEKTSPPVPVEVAPEASTSSASQVIAPTQVTEINECTVNPDICGAGHCINLPVRYTCICYEGYRFSEQQRKCVDIDECTQVQHLCSQGRCENTEGSFLCICPAGFMASEEGTNCIDVDECLRPDVCGEGHCVNTVGAFRCEYCDSGYRMTQRGRCEDIDECLNPSTCPDEQCVNSPGSYQCVPCTEGFRGWNGQCLDVDECLEPNVCANGDCSNLEGSYMCSCHKGYTRTPDHKHCRDIDECQQGNLCVNGQCKNTEGSFRCTCGQGYQLSAAKDQCEDIDECQHRHLCAHGQCRNTEGSFQCVCDQGYRASGLGDHCEDINECLEDKSVCQRGDCINTAGSYDCTCPDGFQLDDNKTCQDINECEHPGLCGPQGECLNTEGSFHCVCQQGFSISADGRTCEDVNECELLSGVCGEAFCENVEGSFLCVCADENQEYSPMTGQCRSRTSTDLDVDVDQPKEEKKECYYNLNDASLCDNVLAPNVTKQECCCTSGVGWGDNCEIFPCPVLGTAEFTEMCPKGKGFVPAGESSSEAGGENYKDADECLLFGQEICKNGFCLNTRPGYECYCKQGTYYDPVKLQCFDMDECQDPSSCIDGQCVNTEGSYNCFCTHPMVLDASEKRCIRPAESNEQIEETDVYQDLCWEHLSDEYVCSRPLVGKQTTYTECCCLYGEAWGMQCALCPLKDSDDYAQLCNIPVTGRRQPYGRDALVDFSEQYTPEADPYFIQDRFLNSFEELQAEECGILNGCENGRCVRVQEGYTCDCFDGYHLDTAKMTCVDVNECDELNNRMSLCKNAKCINTDGSYKCLCLPGYVPSDKPNYCTPLNTALNLEKDSDLE

SEQ ID NO: 64745 - protein, 1307 aa, Homo sapiens [sequence omitted]

SEQ ID NO: 64746 - protein, 542 aa, Homo sapiens [sequence omitted]

SEQ ID NO: 64747 - protein, 242 aa, Homo sapiens
MNGRGELVESLKRFCASTRLPPTPLLLFPEEEATNGREGLLRFSSWPFSIQDVVQPLTLQVQRPLVSVTVSDASWVSELLWSLFVPFTVYQVRWLRPVHRQLGEANEEFALRVQQLVAKELGQTGTRLTPADKAEHMKRQRHPRLRPQSAQSSFPPSPGPSPDVQLATLAQRVKEVLPHVPLGVIQRDLAKTGCVDLTITNLLEGAVAFMPEDITKGTQSLPTASASKAFDACLMMMTPQAL

SEQ ID NO: 64748 - protein, 629 aa, Homo sapiens
MLGLCYRISCVLFLLPYWYVFLLDKTSWNNHSYLYGLLAFQLTFMDANHYWSVDGLLNAHRRNAHVPLWNYAVLRGQIFIVYFIAGVKKLDADWVEGYSMEYLSRHWLFSPFKLLLSEELTSLLVVHWGGLLLDLSAGFLLFFDVSRSIGLFFVSYFHCMNSQLFSIGMFSYVMLASSPLFCSPEWPRKLVSYCPRRLQQLLPLKAAPQPSVSCVYKRSRGKSGQKPGLRHQLGAAFTLLYLLEQLFLPYSHFLTQGYNNWTNGLYGYSWDMMVHSRSHQHVKITYRDGRTGELGYLNPGVFTQSRRWKDHADMLKQYATCLSRLLPKYNVTEPQIYFDIWVSINDRFQQRIFDPRVDIVQAAWSPFQRTSWVQPLLMDLSPWRAKLQEIKSSLDNHTEVVFIADFPGLHLENFVSEDLGNTSIQLLQGEVTVELVAEQKNQTLREGEKMQLPAGEYHKVYTTSPSPSCYMYVYVNTTELALEQDLAYLQELKEKVENGSETGPLPPELQPLLEGEVKGGPEPTPLVQTFLRRQQRLQEIERRRNTPFHERFFRFLLRKLYVFRRSFLMTCISLRNLILGRPSLEQLAQEVTYANLRPFEAVGELNPSNTDSSHSNPPESNPDPVHSEF

SEQ ID NO: 64749 - protein, 109 aa, Homo sapiens
MKAIGLPEELIQKGKDIKGVSEIVQNGKHFKFTITAGSKVIQNEFTVGEECELETMTGEKVKTVVQLEGDNKLVTTFKNIKSVTELNGDIITNTMTLGDIVFKRISKRI

SEQ ID NO: 64750 - protein, 612 aa, Homo sapiens
MSDSESEELPKPQVSDSESEEPPRHQASDSENEELPKPRISDSESEDPPRHQASDSENEELPKPRISDSESEDPPRNQASDSENEELPKPRVSDSESEGPQKGPASDSETEDASRHKQKPESDDDSDRENKGEDTEMQNDSFHSDSHMDRKKFHSSDSEEEEHKKQKMDSDEDEKEGEEEKVAKRKAAVLSDSEDEEKASAKKSRVVSDADDSDSDAVSDKSGKREKTIASDSEEEAGKELSDKKNEEKDLFGSDSESGNEEENLIADIFGESGDEEEEEFTGFNQEDLEEEKGETQVKEAEDSDSDDNIKRGKHMDFLSDFEMMLQRKKSMSGKRRRNRDGGTFISDADDVVSAMIVKMNEAAEEDRQLNNQKKPALKKLTLLPAVVMHLKKQDLKETFIDSGVMSAIKEWLSPLPDRSLPALKIREELLKILQELPSVSQETLKHSGIGRAVMYLYKHPKESRSNKDMAGKLINEWSRPIFGLTSNYKGMTREEREQRDLEQMPQRRRMNSTGGQTPRRDLEKVLTGEEKALRPGDPGFCARARVPMPSNKDYVVRPKWNVEMESSRFQATSKKGISRLDKQMRKFTDIRKKSRSAHAVKISIEGNKMPL

SEQ ID NO: 64751 - protein, 261 aa, Homo sapiens [sequence omitted]

SEQ ID NO: 64752 - protein, 230 aa, Homo sapiens
MRENNNITMRVWLGLSQHSVDCPSSTWIQFQDSCYIFLQEAIKVESIEDVRNQCTDHGADMISIHNEEENAFILDTLKKQWKGPDDILLGMFYDTDDASFKWFDNSNMTFDKWTDQDDDEDLVDTCAFLHIKTGEWKKGNCEVSSVEGTLCKTAIPYKRKYLSDNHILISALVIASTVILTVLGAIIWFLYKKHSDSRFTTVFSTAPQSPYNEDCVLVVGEENEYPVQFD

SEQ ID NO: 64753 - protein, 865 aa, Homo sapiens
MKQEREPVGTCFLQDGTKTVEYAPCRSRQLISDQVAEIVSKYDPNVYSIKYNNQLATRTAQAIFDDSYLGYSVAVGDFNGDGIDDFVSGVPRAARTLGMVYIYDGKNMSSLYNFTGEQMAAYFGFSVAATDINGDDYADVFIGAPLFMDRGSDGKLQEVGQVSVSLQRASGDFQTTKLNGFEVFARFGSAIAPLGDLDQDGFNDIAIAAPYGGEDKKGIVYIFNGRSTGLNAVPSQILEGQWAARSMPPSFGYSMKGATDIDKNGYPDLIVGAFGVDRAILYRARPVITVNAGLEVYPSILNQDNKTCSLPGTALKVSCFNVRFCLKADGKGVLPRKLNFQVELLLDKLKQKGAIRRALFLYSRSPSHSKNMTISRGGLMQCEELIAYLRDESEFRDKLTPITIFMEYRLDYRTAADTTGLQPILNQFTPANISRQAHILLDCGEDNVCKPKLEVSVDSDQKKIYIGDDNPLTLIVKAQNQGEGAYEAELIVSIPLQADFIGVVRNNEALARLSCAFKTENQTRQVVCDLGNPMKAGTQLLAGLRFSVHQQSEMDTSVKFDLQIQSSNLFDKVSPVVSHKVDLAVLAAVEIRGVSSPDHVFLPIPNWEHKENPETEEDVGPVVQHIYELRNNGPSSFSKAMLHLQWPYKYNNNTLLYILHYDIDGPMNCTSDMEINPLRIKISSLQTTEKNDTVAGQGERDHLITKRDLALSEGDIHTLGCGVAQCLKIVCQVGRLDRGKSAILYVKSLLWTETFMNKENQNHSYSLKSSASFNVIEFPYKNLPIEDITNSTLVTTNVTWGIQPAPMPVPVWVIILAVLAGLLLLAVLVFVMYRMGFFKRVRPPQEEQEREQLQPHENGEGNSET

SEQ ID NO: 64754 - protein, 255 aa, Homo sapiens
MHSFCAFKADDGPCKAIMKRFFFNIFTRQCEEFIYGGCEGNQNRFESLEECKKMCTRDNANRIIKTTLQQEKPDFCFLEEDPGICRGYITRYFYNNQTKQCERFKYGGCLGNMNNFETLEECKNICEDGPNGFQVDNYGTQLNAVNNSLTPQSTKVPSLFEFHGPSWCLTPADRGLCRANENRFYYNSVIGKCRPFKYSGCGGNENNFTSKQECLRACKKGFIQRISKGGLIKTKRKRKKQRVKIAYEEIFVKNM

SEQ ID NO: 64755 - protein, 1465 aa, Homo sapiens
MSFVQKGSWLLLALLHPTIILAQQEAVEGGCSHLGQSYADRDVWKPEPCQICVCDSGSVLCDDIICDDQELDCPNPEIPFGECCAVCPQPPTAPTRPPNGQGPQGPKGDPGPPGIPGRNGDPGIPGQPGSPGSPGPPGICESCPTGPQNYSPQYDSYDVKSGVAVGGLAGYPGPAGPPGPPGPPGTSGHPGSPGSPGYQGPPGEPGQAGPSGPPGPPGAIGPSGPAGKDGESGRPGRPGERGLPGPPGIKGPAGIPGFPGMKGHRGFDGRNGEKGETGAPGLKGENGLPGENGAPGPMGPRGAPGERGRPGLPGAAGARGNDGARGSDGQPGPPGPPGTAGFPGSPGAKGEVGPAGSPGSNGAPGQRGEPGPQGHAGAQGPPGPPGINGSPGGKGEMGPAGIPGAPGLMGARGPPGPAGANGAPGLRGGAGEPGKNGAKGEPGPRGERGEAGIPGVPGAKGEDGKDGSPGEPGANGLPGAAGERGAPGFRGPAGPNGIPGEKGPAGERGAPGPAGPRGAAGEPGRDGVPGGPGMRGMPGSPGGPGSDGKPGPPGSQGESGRPGPPGPSGPRGQPGVMGFPGPKGNDGAPGKNGERGGPGGPGPQGPPGKNGETGPQGPPGPTGPGGDKGDTGPPGPQGLQGLPGTGGPPGENGKPGEPGPKGDAGAPGAPGGKGDAGAPGERGPPGLAGAPGLRGGAGPPGPEGGKGAAGPPGPPGAAGTPGLQGMPGERGGLGSPGPKGDKGEPGGPGADGVPGKDGPRGPTGPIGPPGPAGQPGDKGEGGAPGLPGIAGPRGSPGERGETGPPGPAGFPGAPGQNGEPGGKGERGAPGEKGEGGPPGVAGPPGGSGPAGPPGPQGVKGERGSPGGPGAAGFPGARGLPGPPGSNGNPGPPGPSGSPGKDGPPGPAGNTGAPGSPGVSGPKGDAGQPGEKGSPGAQGPPGAPGPLGIAGITGARGLAGPPGMPGPRGSPGPQGVKGESGKPGANGLSGERGPPGPQGLPGLAGTAGEPGRDGNPGSDGLPGRDGSPGGKGDRGENGSPGAPGAPGHPGPPGPVGPAGKSGDRGESGPAGPAGAPGPAGSRGAPGPQGPRGDKGETGERGAAGIKGHRGFPGNPGAPGSPGPAGQQGAIGSPGPAGPRGPVGPSGPPGKDGTSGHPGPIGPPGPRGNRGERGSEGSPGHPGQPGPPGPPGAPGPCCGGVGAAAIAGIGGEKAGGFAPYYGDEPMDFKINTDEIMTSLKSVNGQIESLISPDGSRKNPARNCRDLKFCHPELKSGEYWVDPNQGCKLDAIKVFCNMETGETCISANPLNVPRKHWWTDSSAEKKHVWFGESMDGGFQFSYGNPELPEDVLDVHLAFLRLLSSRASQNITYHCKNSIAYMDQASGNVKKALKLMGSNEGEFKAEGNSKFTYTVLEDGCTKHTGEWSKTVFEYRTRKAVRLPIVDIAPYDIGGPDQEFGVDVGPVCFL

SEQ ID NO: 64756 - protein, 311 aa, Homo sapiens
MSKHTDAAEEVLLEKKGCTGVITLNRPKFLNALTLNMIRQIYPQLKKWEQDPETFLIIIKGAGGKAFCAGGDIRVISEAEKAKQKIAPVFFREEYMLNNAVGSCQKPYVALIHGITMGGGVGLSVHGQFRVATEKCLFAMPETAIGLFPDVGGGYFLPRLQGKLGYFLALTGFRLKGRDVYRAGIATHFVDSEKLAMLEEDLLALKSPSKENIASVLENYHTESKIDRDKSFILEEHMDKINSCFSANTVEEIIENLQQDGSSFALEQLKVINKMSPTSLKITLRQLMEGSSKTLQEVLTMEYRLSQACMF

SEQ ID NO: 64757 - protein, 957 aa, Homo sapiens
MSYVAAVCGKGAEVNQVKEQLLQSNPVLEAFGNAKTVRNDNSSRFGKYMDIEFDFKGDPLGGVISNYLLEKSRVVKQPRGERNFHVFYQLLSGASEELLNKLKLERDFSRYNYLSLDSAKVNGVDDAANFRTVRNAMQIVGFMDHEAESVLAVVAAVLKLGNIEFKPESRVNGLDESKIKDKNELKEICELTGIDQSVLERAFSFRTVEAKQEKVSTTLNVAQAYYARDALAKNLYSRLFSWLVNRINESIKAQTKVRKKVMGVLDIYGFEIFEDNSFEQFIINYCNEKLQQIFIELTLKEEQEEYIREDIEWTHIDYFNNAIICDLIENNTNGILAMLDEECLRPGTVTDETFLEKLNQVCATHQHFESRMSKCSRFLNDTSLPHSCFRIQHYAGKVLYQVEGFVDKNNDLLYRDLSQAMWKASHALIKSLFPEGNPAKINLKRPPTAGSQFKASVATLMKNLQTKNPNYIRCIKPNDKKAAHIFNEALVCHQIRYLGLLENVRVRRAGYAFRQAYEPCLERYKMLCKQTWPHWKGPARSGVEVLFNELEIPVEEYSFGRSKIFIRNPRTLFKLEDLRKQRLEDLATLIQKIYRGWKCRTHFLLMKKSQIVIAAWYRRYAQQKRYQQTKSSALVIQSYIRGWKARKILRELKHQKRCKEAVTTIAAYWHGTQVRREYRKFFRANAGKKIYEFTLQRIVQKYFLEMKNKMPSLSPIDKNWPSRPYLFLDSTHKELKRIFHLWRCKKYRDQFTDQQKLIYEEKLEASELFKDKKALYPSSVGQPFQGAYLEINKNPKYKKLKDAIEEKIIIAEVVNKINRANGKSTSRIFLLTNNNLLLADQKSGQIKSEVPLVDVTKVSMSSQNDGFFAVHLKEGSEAASKGDFLFSSDHLIEMATKLYRTTLSQTKQKLNIEISDEFLVQFRQDKVCVKFIQGNQKNGSVPTCKRKNNRLLEVAVP

SEQ ID NO: 64758 - protein, 1313 aa, Homo sapiens
MLLPYLRKKLRLTGTKYGCGGGGCGACTVMISRYNPITKRIRHHPANACLIPICSLYGAAVTTVEGIGSTHTRIHPVQERIAKCHGTQCGFCTPGMVMSIYTLLRNHPEPTLDQLTDALGGNLCRCTGYRPIIDACKTFCKTSGCCQSKENGVCCLDQGINGLPEFEEGSKTSPKLFAEEEFLPLDPTQELIFPPELMIMAEKQSQRTRVFGSERMMWFSPVTLKELLEFKFKYPQAPVIMGNTSVGPEVKFKGVFHPVIISPDRIEELSVVNHAYNGLTLGAGLSLAQVKDILADVVQKLPEEKTQMYHALLKHLGTLAGSQIRNMASLGGHIISRHPDSDLNPILAVGNCTLNLLSKEGKRQIPLNEQFLSKCPNADLKPQEILVSVNIPYSRKWEFVSAFRQAQRQENALAIVNSGMRVFFGEGDGIIRELCISYGGVGPATICAKNSCQKLIGRHWNEQMLDIACRLILNEVSLLGSAPGGKVEFKRTLIISFLFKFYLEVSQILKKMDPVHYPSLADKYESALEDLHSKHHCSTLKYQNIGPKQHPEDPIGHPIMHLSGVKHATGEAIYCDDMPLVDQELFLTFVTSSRAHAKIVSIDLSEALSMPGVVDIMTAEHLSDVNSFCFFTEAEKFLATDKVFCVGQLVCAVLADSEVQAKRAAKRVKIVYQDLEPLILTIEESIQHNSSFKPERKLEYGNVDEAFKVVDQILEGEIHMGGQEHFYMETQSMLVVPKGEDQEMDVYVSTQFPKYIQDIVASTLKLPANKVMCHVRRVGGAFGGKVLKTGIIAAVTAFAANKHGRAVRCVLERGEDMLITGGRHPYLGKYKAGFMNDGRILALDMEHYSNAGASLDESLFVIEMGLLKMDNAYKFPNLRCRGWACRTNLPSNTAFRGFGFPQAALITESCITEVAAKCGLSPEKVRIINMYKEIDQTPYKQEINAKNLIQCWRECMAMSSYSLRKVAVEKFNAENYWKKKGLAMVPLKFPVGLGSRAAGQAAALVHIYLDGSVLVTHGGIEMGQGVHTKMIQVVSRELRMPMSNVHLRGTSTETVPNANISGGSVVADLNGLAVKDACQTLLKRLEPIISKNPKGTWKDWAQTAFDESINLSAVGYFRGYESDMNWEKGEGQPFEYFVYGAACSEVEIDCLTGDHKNIRTDIVMDVGCSINPAIDIGQIEGAFIQGMGLYTIEELNYSPQGILHTRGPDQYKIPAICDMPTELHIALLPPSQNSNTLYSSKGLGESGVFLGCSVFFAIHDAVSAARQERGLHGPLTLNSPLTPEKIRMACEDKFTKMIPRDEPGSYVPWNVPI

SEQ ID NO: 64759 - protein, 693 aa, Homo sapiens [sequence omitted]

SEQ ID NO: 64760 - protein, 472 aa, Homo sapiens
MPEVSWQLGRSLNCTVKTYSTSYTLEDLDREFKAFAHAQWKAQVRSIYSLLMGSYNDIFDLFFSNCRSLFKDKKLVEYLKESSFDAVFLDPFDNCGLIVAKYFSLPSVVFARGILCHYLEEGAQCPAPLSYVPRILLGFSDAMTFKERVRNHIMHLEEHLLCHRFFKNALEIASEILQTPVTEYDLYSHTSIWLLRTDFVLDYPKPVMPNMIFIGGINCHQGKPLPMEFEAYINASGEHGIVVFSLGSMVSEIPEKKAMAIADALGKIPQTVLWRYTGTRPSNLANNTILVKWLPQNDLLGHPMTRAFITHAGSHGVYESICNGVPMVMMPLFGDQMDNAKRMETKGAGVTLNVLEMTSEDLENALKAVINDKSYKENIMRLSSLHKDRPVEPLDLAVFWVEFVMRHKGAPHLRPAAHDLTWYQYHSLDVIGFLLAVVLTVAFITFKCCAYGYRKCLGKKGRVKKAHKSKTH

SEQ ID NO: 64761 - protein, 417 aa, Homo sapiens
MIVIGLYFINCQSLLQDRDTLNFFKESKFDALFTDPALPCGVILAEYLGLPSVYLFRGFPCSLEHTFSRSPDPVSYIPRCYTKFSDHMTFSQRVANFLVNLLEPYLFYCLFSKYEELASAVLKRDVDIITLYQKVSVWLLRYDFVLEYPRPVMPNMVFIGGINCKKRKDLSQEFEAYINASGEHGIVVFSLGSMVSEIPEKKAMAIADALGKIPQTVLWRYTGTRPSNLANNTILVKWLPQNDLLGHPMTRAFITHAGSHGVYESICNGVPMVMMPLFGDQMDNAKRMETKGAGVTLNVLEMTSEDLENALKAVINDKSYKENIMRLSSLHKDRPVEPLDLAVFWVEFVMRHKGAPHLRPAAHDLTWYQYHSLDVIGFLLAVVLTVAFITFKCCAYGYRKCLGKKGRVKKAHKSKTH

SEQ ID NO: 64762 - protein, 468 aa, Homo sapiens
MHIKEENFFTLTTYAISWTQDEFDRHVLGHTQLYFETEHFLKKFFRSMAMLNNMSLVYHRSCVELLHNEALIRHLNATSFDVVLTDPVNLCAAVLAKYLSIPTVFFLRNIPCDLDFKGTQCPNPSSYIPRLLTTNSDHMTFMQRVKNMLYPLALSYICHAFSAPYASLASELFQREVSVVDILSHASVWLFRGDFVMDYPRPIMPNMVFIGGINCANRKPLSQEFEAYINASGEHGIVVFSLGSMVSEIPEKKAMAIADALGKIPQTVLWRYTGTRPSNLANNTILVKWLPQNDLLGHPMTRAFITHAGSHGVYESICNGVPMVMMPLFGDQMDNAKRMETKGAGVTLNVLEMTSEDLENALKAVINDKSYKENIMRLSSLHKDRPVEPLDLAVFWVEFVMRHKGAPHLRPAAHDLTWYQYHSLDVIGFLLAVVLTVAFITFKCCAYGYRKCLGKKGRVKKAHKSKTH

SEQ ID NO: 64763 - protein, 491 aa, Homo sapiens
MLGAIQQLQQRGHEIVVLAPDASLYIRDGAFYTLKTYPVPFQREDVKESFVSLGHNVFENDSFLQRVIKTYKKIKKDSAMLLSGCSHLLHNKELMASLAESSFDVMLTDPFLPCSPIVAQYLSLPTVFFLHALPCSLEFEATQCPNPFSYVPRPLSSHSDHMTFLQRVKNMLIAFSQNFLCDVVYSPYATLASEFLQREVTVQDLLSSASVWLFRSDFVKDYPRPIMPNMVFVGGINCLHQNPLSQEFEAYINASGEHGIVVFSLGSMVSEIPEKKAMAIADALGKIPQTVLWRYTGTRPSNLANNTILVKWLPQNDLLGHPMTRAFITHAGSHGVYESICNGVPMVMMPLFGDQMDNAKRMETKGAGVTLNVLEMTSEDLENALKAVINDKSYKENIMRLSSLHKDRPVEPLDLAVFWVEFVMRHKGAPHLRPAAHDLTWYQYHSLDVIGFLLAVVLTVAFITFKCCAYGYRKCLGKKGRVKKAHKSKTH

SEQ ID NO: 64764 - protein, 204 aa, Homo sapiens
MTMMMKILIMFALGMNYWSCSGFPVYDYDPSSLRDALSASVVKVNSQSLSPYLFRAFRSSLKRVEVLDENNLVMNLEFSIRETTCRKDSGEDPATCAFQRDYYVSTAVCRSTVKVSAQQVQGVHARCSWSSSTSESYSSEEMIFGDMLGSHKWRNNYLFGLISDESISEQFYDRSLGIMRRVLPPGNRRYPNHRHRARINTDFE

SEQ ID NO: 64765 - protein, 2272 aa, Homo sapiens
MKIKTGKALNLGYALDYAQRYIFVKSAGSRIEDGVLQFLVLLVAGRSSDRVDGPASNLKQSGVVPFIFQAKNADPAELEQIVLSPAFILAAESLPKIGDLHPQIVNLLKSVHNGAPAPVSGEKDVVFLLDGSEGVRSGFPLLKEFVQRVVESLDVGQDRVRVAVVQYSDRTRPEFYLNSYMNKQDVVNAVRQLTLLGGPTPNTGAALEFVLRNILVSSAGSRITEGVPQLLIVLTADRSGDDVRNPSVVVKRGGAVPIGIGIGNADITEMQTISFIPDFAVAIPTFRQLGTVQQVISERVTQLTREELSRLQPVLQPLPSPGVGGKRDVVFLIDGSQSAGPEFQYVRTLIERLVDYLDVGFDTTRVAVIQFSDDPKVEFLLNAHSSKDEVQNAVQRLRPKGGRQINVGNALEYVSRNIFKRPLGSRIEEGVPQFLVLISSGKSDDEVDDPAVELKQFGVAPFTIARNADQEELVKISLSPEYVFSVSTFRELPSLEQKLLTPITTLTSEQIQKLLASTRYPPPAVESDAADIVFLIDSSEGVRPDGFAHIRDFVSRIVRRLNIGPSKVRVGVVQFSNDVFPEFYLKTYRSQAPVLDAIRRLRLRGGSPLNTGKALEFVARNLFVKSAGSRIEDGVPQHLVLVLGGKSQDDVSRFAQVIRSSGIVSLGVGDRNIDRTELQTITNDPRLVFTVREFRELPNIEERIMNSFGPSAATPAPPGVDTPPPSRPEKKKADIVFLLDGSINFRRDSFQEVLRFVSEIVDTVYEDGDSIQVGLVQYNSDPTDEFFLKDFSTKRQIIDAINKVVYKGGRHANTKVGLEHLRVNHFVPEAGSRLDQRVPQIAFVITGGKSVEDAQDVSLALTQRGVKVFAVGVRNIDSEEVGKIASNSATAFRVGNVQELSELSEQVLETLHDAMHETLCPGVTDAAKACNLDVILGFDGSRDQNVFVAQKGFESKVDAILNRISQMHRVSCSGGRSPTVRVSVVANTPSGPVEAFDFDEYQPEMLEKFRNMRSQHPYVLTEDTLKVYLNKFRQSSPDSVKVVIHFTDGADGDLADLHRASENLRQEGVRALILVGLERVVNLERLMHLEFGRGFMYDRPLRLNLLDLDYELAEQLDNIAEKACCGVPCKCSGQRGDRGPIGSIGPKGIPGEDGYRGYPGDEGGPGERGPPGVNGTQGFQGCPGQRGVKGSRGFPGEKGEVGEIGLDGLDGEDGDKGLPGSSGEKGNPGRRGDKGPRGEKGERGDVGIRGDPGNPGQDSQERGPKGETGDLGPMGVPGRDGVPGGPGETGKNGGFGRRGPPGAKGNKGGPGQPGFEGEQGTRGAQGPAGPAGPPGLIGEQGISGPRGSGGAAGAPGERGRTGPLGRKGEPGEPGPKGGIGNRGPRGETGDDGRDGVGSEGRRGKKGERGFPGYPGPKGNPGEPGLNGTTGPKGIRGRRGNSGPPGIVGQKGDPGYPGPAGPKGNRGDSIDQCALIQSIKDKCPCCYGPLECPVFPTELAFALDTSEGVNQDTFGRMRDVVLSIVNDLTIAESNCPRGARVAVVTYNNEVTTEIRFADSKRKSVLLDKIKNLQVALTSKQQSLETAMSFVARNTFKRVRNGFLMRKVAVFFSNTPTRASPQLREAVLKLSDAGITPLFLTRQEDRQLINALQINNTAVGHALVLPAGRDLTDFLENVLTCHVCLDICNIDPSCGFGSWRPSFRDRRAAGSDVDIDMAFILDSAETTTLFQFNEMKKYIAYLVRQLDMSPDPKASQHFARVAVVQHAPSESVDNASMPPVKVEFSLTDYGSKEKLVDFLSRGMTQLQGTRALGSAIEYTIENVFESAPNPRDLKIVVLMLTGEVPEQQLEEAQRVILQAKCKGYFFVVLGIGRKVNIKEVYTFASEPNDVFFKLVDKSTELNEEPLMRFGRLLPSFVSSENAFYLSPDIRKQCDWFQGDQPTKNLVKFGHKQVNVPNNVTSSPTSNPVTTTKPVTTTKPVTTTTKPVTTTTKPVTIINQPSVKPAAAKPAPAKPVAAKPVATKMATVRPPVAVKPATAAKPVAAKPAAVRPPAAAAAKPVATKPEVPRPQAAKPAATKPATTKPMVKMSREVQVFEITENSAKLHWERAEPPGPYFYDLTVTSAHDQSLVLKQNLTVTDRVIGGLLAGQTYHVAVVCYLRSQVRATYHGSFSTKKSQPPPPQPARSASSSTINLMVSTEPLALTETDICKLPKDEGTCRDFILKWYYDPNTKSCARFWYGGCGGNENKFGSQKECEKVCAPVLAKPGVISVMGT

SEQ ID NO: 64766 - protein, 355 aa, Homo sapiens
MAAGGLQMIGSMSKDMYQIMDEIKEGIQYVFQTRNPLTLVISGSGHCALEAALVNVLEPGDSFLVGANGIWGQRAVDIGERIGARVHPMTKDPGGHYTLQEVEEGLAQHKPVLLFLTHGESSTGVLQPLDGFGELCHRYKCLLLVDSVASLGGTPLYMDRQGIDILYSGSQKALNAPPGTSLISFSDKAKKKMYSRKTKPFSFYLDIKWLANFWGCDDQPRMYHHTIPVISLYSLRESLALIAEQGLENSWRQHREAAAYLHGRLQALGLQLFVKDPALRLPTVTTVAVPAGYDWRDIVSYVIDHFDIEIMGGLGPSTGKVLRIGLLGCNATRENVDRVTEALRAALQHCPKKKL

SEQ ID NO: 64767 - protein, 1132 aa, Homo sapiens
MKARKDIVARLQTQASATVAIPKEHHRFVIGKNGEKLQDLELKTATKIQIPRPDDPSNQIKITGTKEGIEKARHEVLLISAEQDKRAVERLEVEKAFHPFIAGPYNRLVGEIMQETGTRINIPPPSVNRTEIVFTGEKEQLAQAVARIKKIYEEKKKKTTTIAVEVKKSQHKYVIGPKGNSLQEILERTGVSVEIPPSDSISETVILRGEPEKLGQALTEVYAKANSFTVSSVAAPSWLHRFIIGKKGQNLAKITQQMPKVHIEFTEGEDKITLEGPTEDVNVAQEQIEGMVKDLINRMDYVEINIDHKFHRHLIGKSGANINRIKDQYKVSVRIPPDSEKSNLIRIEGDPQGVQQAKRELLELASRMENERTKDLIIEQRFHRTIIGQKGERIREIRDKFPEVIINFPDPAQKSDIVQLRGPKNEVEKCTKYMQKMVADLVENSYSISVPIFKQFHKNIIGKGGANIKKIREESNTKIDLPAENSNSETIIITGKRANCEAARSRILSIQKDLANIAEVEVSIPAKLHNSLIGTKGRLIRSIMEECGGVHIHFPVEGSGSDTVVIRGPSSDVEKAKKQLLHLAEEKQTKSFTVDIRAKPEYHKFLIGKGGGKIRKVRDSTGARVIFPAAEDKDQDLITIIGKEDAVREAQKELEALIQNLDNVVEDSMLVDPKHHRHFVIRRGQVLREIAEEYGGVMVSFPRSGTQSDKVTLKGAKDCVEAAKKRIQEIIEDLEAQVTLECAIPQKFHRSVMGPKGSRIQQITRDFSVQIKFPDREENAVHSTEPVVQENGDEAGEGREAKDCDPGSPRRCDIIIISGRKEKCEAAKEALEALVPVTIEVEVPFDLHRYVIGQKGSGIRKMMDEFEVNIHVPAPELQSDIIAITGLAANLDRAKAGLLERVKELQAEQEDRALRSFKLSVTVDPKYHPKIIGRKGAVITQIRLEHDVNIQFPDKDDGNQPQDQITITGYEKNTEAARDAILRIVGELEQMVSEDVPLDHRVHARIIGARGKAIRKIMDEFKVDIRFPQSGAPDPNCVTVTGLPENVEEAIDHILNLEEEYLADVVDSEALQVYMKPPAHEEAKAPSRGFVVRDAPWTASSSEKAPDMSSSEEFPSFGAQVAPKTLPWGPKR

SEQ ID NO: 64768 - protein, 246 aa, Homo sapiens
MLVLFVATWSDLGLCKKRPKPGGWNTGGSRYPGQGSPGGNRYPPQGGGGWGQPHGGGWGQPHGGGWGQPHGGGWGQPHGGGWGQGGGTHSQWNKPSKPKTNMKHMAGAAAAGAVVGGLGGYMLGSAMSRPIIHFGSDYEDRYYRENMHRYPNQVYYRPMDEYSNQNNFVHDCVNITIKQHTVTTTTKGENFTETDVKMMERVVEQMCITQYERESQAYYQRGSSMVLFSSPPVILLISFLIFLIVG

SEQ ID NO: 64769 - protein, 358 aa, Homo sapiens [sequence omitted]

SEQ ID NO: 64770 - protein, 398 aa, Homo sapiens
MRERYSASKPLKGARIAGCLHMTVETAVLIETLVTLGAEVQWSSCNIFSTQDHAAAAIAKAGIPVYAWKGETDEEYLWCIEQTLYFKDGPLNMILDDGGDLTNLIHTKYPQLLPGIRGISEETTTGVHNLYKMMANGILKVPAINVNDSVTKSKFDNLYGCRESLIDGIKRATDVMIAGKVAVVAGYGDVGKGCAQALRGFGARVIITEIDPINALQAAMEGYEVTTMDEACQEGNIFVTTTGCIDIILGRHFEQMKDDAIVCNIGHFDVEIDVKWLNENAVEKVNIKPQVDRYRLKNGRRIILLAEGRLVNLGCAMGHPSFVMSNSFTNQVMAQIELWTHPDKYPVGVHFLPKKLDEAVAEAHLGKLNVKLTKLTEKQAQYLGMSCDGPFKPDHYRY

SEQ ID NO: 64771 - protein, 418 aa, Homo sapiens
MQRKEMETYLKKIPGFCEGGFKIHEADINADKDCDVLVGYKAVYRISFAMAIFFFVFSLLMFKVKTSKDLRAAVHNGFWFFKIAALIGIMVGSFYIPGGYFSSVWFVVGMIGAALFILIQLVLLVDFAHSWNESWVNRMEEGNPRLWYAALLSFTSAFYILSIICVGLLYTYYTKPDGCTENKFFISINLILCVVASIISIHPKIQEHQPRSGLLQSSLITLYTMYLTWSAMSNEPDRSCNPNLMSFITRITAPTLAPGNSTAVVPTPTPPSKSGSLLDSDNFIGLFVFVLCLLYSSIRTSTNSQVDKLTLSGSDSVILGDTTTSGASDEEDGQPRRAVDNEKEGVQYSYSLFHLMLCLASLYIMMTLTSWYSPDAKFQSMTSKWPAVWVKISSSWVCLLLYVWTLVAPLVLTSRDFS

SEQ ID NO: 64772 - protein, 284 aa, Homo sapiens [sequence omitted]

SEQ ID NO: 64773 - protein, 879 aa, Homo sapiens
MTEQIRQDRSKGTVHFAVVITDGHVTGSPCGGIKLQAERAREEGIRLFAVAPNQNLKEQGLRDIASTPHELYRNDYATMLPDSTEIDQDTINRIIKVMKHEAYGECYKVSCLEIPGPSGPKGYRGQKGAKGNMGEPGEPGQKGRQGDPGIEGPIGFPGPKGVPGFKGEKGEFGADGRKGAPGLAGKNGTDGQKGKLGRIGPPGCKGDPGNRGPDGYPGEAGSPGERGDQGGKGDPGRPGRRGPPGEIGAKGSKGYQGNSGAPGSPGVKGAKGGPGPRGPKGEPGRRGDPGTKGSPGSDGPKGEKGDPGPEGPRGLAGEVGNKGAKGDRGLPGPRGPQGALGEPGKQGSRGDPGDAGPRGDSGQPGPKGDPGRPGFSYPGPRGAPGEKGEPGPRGPEGGRGDFGLKGEPGRKGEKGEPADPGPPGEPGPRGPRGVPGPEGEPGPPGDPGLTECDVMTYVRETCGCCDCEKRCGALDVVFVIDSSESIGYTNFTLEKNFVINVVNRLGAIAKDPKSETGTRVGVVQYSHEGTFEAIQLDDERIDSLSSFKEAVKNLEWIAGGTWTPSALKFAYDRLIKESRRQKTRVFAVVITDGRHDPRDDDLNLRALCDRDVTVTAIGIGDMFHEKHESENLYSIACDKPQQVRNMTLFSDLVAEKFIDDMEDVLCPDPQIVCPDLPCQTELSVAQCTQRPVDIVFLLDGSERLGEQNFHKARRFVEQVARRLTLARRDDDPLNARVALLQFGGPGEQQVAFPLSHNLTAIHEALETTQYLNSFSHVGAGVVHAINAIVRSPRGGARRHAELSFVFLTDGVTGNDSLHESAHSMRKQNVVPTVLALGSDVDMDVLTTLSLGDRAAVFHEKDYDSLAQPGFFDRFIRWIC

SEQ ID NO: 64774 - protein, 834 aa, Homo sapiens
MAVNTFVKDCEDPNPLIRALAVRTMGCIRVDKITEYLCEPLRKCLKDEDPYVRKTAAVCVAKLHDINAQLVEDQGFLDTLKDLISDSNPMVVANAVAALSEIAESHPSSNLLDLNPQSINKLLTALNECTEWGQIFILDCLANYMPKDDREAQSICERVTPRLSHANSAVVLSAVKVLMKFMEMLSKDLDYYGTLLKKLAPPLVTLLSAEPELQYVALRNINLIVQKRPEILKHEMKVFFVKYNDPIYVKLEKLDIMIRLASQANIAQVLAELKEYATEVDVDFVRKAVRAIGRCAIKVEQSAERCVSTLLDLIQTKVNYVVQEAIVVIKDIFRKYPNKYESVIATLCENLDSLDEPEARAAMIWIVGEYAERIDNADELLESFLEGFHDESTQVQLQLLTAIVKLFLKKPTETQELVQQVLSLATQDSDNPDLRDRGYIYWRLLSTDPVAAKEVVLAEKPLISEETDLIEPTLLDELICYIGTLASVYHKPPSAFVEGGRGVVHKSLPPRTASSESAESPETAPTGAPPGEQPDVIPAQGDLLGDLLNLDLGPPVSGPPLATSSVQMGAVDLLGGGLDSLIGGTNFVAPPTAAVPANLGAPIGSGLSDLFDLTSGVGTLSGSYVAPKAVGSISMDLQLTNKALQVMTDFAIQFNRNSFGLAPAAPLQVHAPLSPNQTVEISLPLSTVGSVMKMEPLNNLQVAVKNNIDVFYFSTLYPLHILFVEDGKMDRQMFLATWKDIPNENEAQFQIRDCPLNAEAASSKLQSSNIFTVAKRNVEGQDMLYQSLKLTNGIWVLAELRIQPGNPSCTLSLKCRAPEVSQHVYQAYETILKN

SEQ ID NO: 64775 - protein, 380 aa, Homo sapiens
MLALTVLETCVKNCGHRFHVLVASQDFVESVLVRTILPKNNPPTIVHDKVLNLIQTVFNSETQSGQDSVGTDSSQQEDSGQHAAPLPAPPILSGDTPIAPTPEQIGKLRSELEMVSGNVRVMSEMLTELVPTQAEPADLELLQELNRTCRAMQQRVLELIPQIANEQLTEELLIVNDNLNNVFLRHERFERFRTGQTTKAPSEAEPAADLIDMGPDPAATGNLSSQLAGMNLGSSSVRAGLQSLEASGRLEDEFDMFALTRGSSLADQRKEVKYEAPQATDGLAGALDARQQSTGAIPVTQACLMEDIEQWLSTDVGNDAEEPKGVTSEEFDKFLEERAKAADRLPNLSSPSAEGPPGPPSGPAPRKKTQEKDDDMLFAL

SEQ ID NO: 64776 - protein, 339 aa, Homo sapiens
MDPESSIFIEDAIKYFKEKVSTQNLLLLLTDNEAWNGFVAAAELPRNEADELRKALDNLARQMIMKDKNWHDKGQQYRNWFLKEFPRLKSELEDNIRRLRALADGVQKVHKGTTIANVVSGSLSISSGILTLVGMGLAPFTEGGSLVLLEPGMELGITAALTGITSSTMDYGKKWWTQAQAHDLVIKSLDKLKEVREFLGENISNFLSLAGNTYQLTRGIGKDIRALRRARANLQSVPHASASRPRVTEPISAESGEQVERVNEPSILEMSRGVKLTDVAPVSFFLVLDVVYLVYESKHLHEGAKSETAEELKKVAQELEEKLNILNNNYKILQADQEL

SEQ ID NO: 64777 - protein, 1799 aa, Homo sapiens
MQDREDQSILCTGESGAGKTENTKKVIQYLAYVASSHKSKKDQGELERQLLQANPILEAFGNAKTVKNDNSSRFGKFIRINFDVNGYIVGANIETYLLEKSRAIRQAKEERTFHIFYYLLSGAGEHLKTDLLLEPYNKYRFLSNGHVTIPGQQDKDMFQETMEAMRIMGIPEEEQMGLLRVISGVLQLGNIVFKKERNTDQASMPDNTAAQKVSHLLGINVTDFTRGILTPRIKVGRDYVQKAQTKEQADFAIEALAKATYERMFRWLVLRINKALDKTKRQGASFIGILDIAGFEIFDLNSFEQLCINYTNEKLQQLFNHTMFILEQEEYQREGIEWNFIDFGLDLQPCIDLIEKPAGPPGILALLDEECWFPKATDKSFVEKVMQEQGTHPKFQKPKQLKDKADFCIIHYAGKVDYKADEWLMKNMDPLNDNIATLLHQSSDKFVSELWKDVDRIIGLDQVAGMSETALPGAFKTRKGMFRTVGQLYKEQLAKLMATLRNTNPNFVRCIIPNHEKKAGKLDPHLVLDQLRCNGVLEGIRICRQGFPNRVVFQEFRQRYEILTPNSIPKGFMDGKQACVLMIKALELDSNLYRIGQSKVFFRAGVLAHLEEERDLKITDVIIGFQACCRGYLARKAFAKRQQQLTAMKVLQRNCAAYLKLRNWQWWRLFTKVKPLLQVSRQEEEMMAKEEELVKVREKQLAAENRLTEMETLQSQLMAEKLQLQEQLQAETELCAEAEELRARLTAKKQELEEICHDLEARVEEEEERCQHLQAEKKKMQQNIQELEEQLEEEESARQKLQLEKVTTEAKLKKLEEEQIILEDQNCKLAKEKKLLEDRIAEFTTNLTEEEEKSKSLAKLKNKHEAMITDLEERLRREEKQRQELEKTRRKLEGDSTDLSDQIAELQAQIAELKMQLAKKEEELQAALARVEEEAAQKNMALKKIRELESQISELQEDLESERASRNKAEKQKRDLGEELEALKTELEDTLDSTAAQQELRSKREQEVNILKKTLEEEAKTHEAQIQEMRQKHSQAVEELAEQLEQTKRVKANLEKAKQTLENERGELANEVKVLLQGKGDSEHKRKKVEAQLQELQVKFNEGERVRTELADKVTKLQVELDNVTGLLSQSDSKSSKLTKDFSALESQLQDTQELLQEENRQKLSLSTKLKQVEDEKNSFREQLEEEEEAKHNLEKQIATLHAQVADMKKKMEDSVGCLETAEEVKRKLQKDLEGLSQRHEEKVAAYDKLEKTKTRLQQELDDLLVDLDHQRQSACNLEKKQKKFDQLLAEEKTISAKYAEERDRAEAEAREKETKALSLARALEEAMEQKAELERLNKQFRTEMEDLMSSKDDVGKSVHELEKSKRALEQQVEEMKTQLEELEDELQATEDAKLRLEVNLQAMKAQFERDLQGRDEQSEEKKKQLVRQVREMEAELEDERKQRSMAVAARKKLEMDLKDLEAHIDSANKNRDEAIKQLRKLQAQMKDCMRELDDTRASREEILAQAKENEKKLKSMEAEMIQLQEELAAAERAKRQAQQERDELADEIANSSGKGALALEEKRRLEARIAQLEEELEEEQGNTELINDRLKKANLQIDQINTDLNLERSHAQKNENARQQLERQNKELKVKLQEMEGTVKSKYKASITALEAKIAQLEEQLDNETKERQAACKQVRRTEKKLKDVLLQVDDERRNAEQYKDQADKASTRLKQLKRQLEEAEEEAQRANASRRKLQRELEDATETADAMNREVSSLKNKLRRGDLPFVVPRRMARKGAGDGSDEEVDGKADGAEAKPAE

SEQ ID NO: 64778 - protein, 668 aa, Homo sapiens [sequence omitted]

SEQ ID NO: 64779 - protein, 256 aa, Homo sapiens
MDSKGEESKISYPNIFFMIDSFEEVFSDMTVGEGEMVCVELVASDKTNTFQGVIFQGSIRYEALKKVYDNRVSVAARMAQKMSFGFYKYSNMEFVRMKGPQGKGHAEMAVSRVSTGDTSPCGTEEDSSPASPMHERVTSFSTPPTPERNNRPAFFSPSLKRKVPRNRIAEMKKSHSANDSEEFFREDDGGADLHNATNLRSRSLSGTGRSLVGSWLKLNRADGNFLLYAHLTYVTLPLHRILTDILEVRQKPILMT

SEQ ID NO: 64780 - protein, 400 aa, Homo sapiens
MDLEETSVLTQALAQSGQQLEWPEAWRQQLVDKHSTGGVGDKVSLVLAPALAACGCKVPMISGRGLGHTGGTLDKLESIPGFNVIQSPEQMQVLLDQAGCCIVGQSEQLVPADGILYAARDVTATVDSLPLITASILSKKLVEGLSALVVDVKFGGAAVFPNQEQARELAKTLVGVGASLGLRVAAALTAMDKPLGRCVGHALEVEEALLCMDGAGPPDLRDLVTTLGGALLWLSGHAGTQAQGAARVAAALDDGSALGRFERMLAAQGVDPGLARALCSGSPAERRQLLPRAREQEELLAPADGTVELVRALPLALVLHELGAGRSRAGEPLRLGVGAELLVDVGQRLRRGTPWLRVHRDGPALSGPQSRALQEALVLSDRAPFAAPSPFAELVLPPQQ

SEQ ID NO: 64781 - protein, 648 aa, Homo sapiens
MDCRAFHYNVSSHGCQLLPWTQHSPHTRLRRSGRCDLFQKKDYVRTCIMNNGVGYRGTMATTVGGLPCQAWSHKFPNDHKYTPTLRNGLEENFCRNPDGDPGGPWCYTTDPAVRFQSCGIKSCREAACVWCNGEEYRGAVDRTESGRECQRWDLQHPHQHPFEPGKFLDQGLDDNYCRNPDGSERPWCYTTDPQIEREFCDLPRCGSEAQPRQEATTVSCFRGKGEGYRGTANTTTAGVPCQRWDAQIPHQHRFTPEKYACKDLRENFCRNPDGSEAPWCFTLRPGMRAAFCYQIRRCTDDVRPQDCYHGAGEQYRGTVSKTRKGVQCQRWSAETPHKPQFTFTSEPHAQLEENFCRNPDGDSHGPWCYTMDPRTPFDYCALRRCADDQPPSILDPPDQVQFEKCGKRVDRLDQRRSKLRVVGGHPGNSPWTVSLRNRQGQHFCGGSLVKEQWILTARQCFSSCHMPLTGYEVWLGTLFQNPQHGEPSLQRVPVAKMVCGPSGSQLVLLKLERSVTLNQRVALICLPPEWYVVPPGTKCEIAGWGETKGTGNDTVLNVALLNVISNQECNIKHRGRVRESEMCTEGLLAPVGACEGDYGGPLACFTHNCWVLEGIIIPNRVCARSRWPAVFTRVSVFVDWIHKVMRLG

SEQ ID NO: 64782 - protein, 496 aa, Homo sapiens
MVELVPNGKHSEGLLPVITPMAGNQRVEDPARSCMEGKSFLQKSPSKEPHFTDFEGKTSFGMSVFNLSNAIMGSGILGLAYAMANTGIILFLFLLTAVALLSSYSIHLLLKSSGVVGIRAYEQLGYRAFGTPGKLAAALAITLQNIGAMSSYLYIIKSELPLVIQTFLNLEEKTSDWYMNGNYLVILVSVTIILPLALMRQLGYLGYSSGFSLSCMVFFLIAVIYKKFHVPCPLPPNFNNTTGNFSHVEIVKEKVQLQVEPEASAFCTPSYFTLNSQTAYTIPIMAFAFVCHPEVLPIYTELKDPSKKKMQHISNLSIAVMYIMYFLAALFGYLTFYNGVESELLHTYSKVDPFDVLILCVRVAVLTAVTLTVPIVLFPVRRAIQQMLFPNQEFSWLRHVLIAVGLLTCINLLVIFAPNILGIFGVIGATSAPFLIFIFPAIFYFRIMPTEKEPARSTPKILALCFAMLGFLLMTMSLSFIIIDWASGTSRHGGNH

SEQ ID NO: 64783 - protein, 907 aa, Homo sapiens
MGPRGLLLCMYLVSLLILQAMPALGSATGRSKSSEKRQAVDTAVDGVFIRSLKVNCKVTSRFAHYVVTSQVVNTANEAREVAFDLEIPKTAFISDFAVTADGNAFIGDIKDKVTAWKQYRKAAISGENAGLVRASGRTMEQFTIHLTVNPQSKVTFQLTYEEVLKRNHMQYEIVIKVKPKQLVHHFEIDVDIFEPQGISKLDAQASFLPKELAAQTIKKSFSGKKGHVLFRPTVSQQQSCPTCSTSLLNGHFKVTYDVSRDKICDLLVANNHFAHFFAPQNLTNMNKNVVFVIDISGSMRGQKVKQTKEALLKILGDMQPGDYFDLVLFGTRVQSWKGSLVQASEANLQAAQDFVRGFSLDEATNLNGGLLRGIEILNQVQESLPELSNHASILIMLTDGDPTEGVTDRSQILKNVRNAIRGRFPLYNLGFGHNVDFNFLEVMSMENNGRAQRIYEDHDATQQLQGFYSQVAKPLLVDVDLQYPQDAVLALTQNHHKQYYEGSEIVVAGRIADNKQSSFKADVQAHGEGQEFSITCLVDEEEMKKLLRERGHMLENHVERLWAYLTIQELLAKRMKVDREERANLSSQALQMSLDYGFVTPLTSMSIRGMADQDGLKPTIDKPSEDSPPLEMLGPRRTFVLSALQPSPTHSSSNTQRLPDRVTGVDTDPHFIIHVPQKEDTLCFNINEEPGVILSLVQDPNTGFSVNGQLIGNKARSPGQHDGTYFGRLGIANPATDFQLEVTPQNITLNPGFGGPVFSWRDQAVLRQDGVVVTINKKRNLVVSVDDGGTFEVVLHRVWKGSSVHQDFLGFYVLDSHRMSARTHGLLGQFFHPIGFEVSDIHPGSDPTKPDATMVVRNRRLTVTRGLQKDYSKDPWHGAEVSCWFIHNNGAGLIDGAYTDYIVPDIF

SEQ ID NO: 64784 - protein, 285 aa, Homo sapiens
MRICSFNVRSFGESKQEDKNAMDVIVKVIKRCDIILVMEIKDSNNRICPILMEKLNRNSRRGITYNYVISSRLGRNTYKEQYAFLYKEKLVSVKRSYHYHDYQDGDADVFSREPFVVWFQSPHTAVKDFVIIPLHTTPETSVKEIDELVEVYTDVKHRWKAENFIFMGDFNAGCSYVPKKAWKNIRLRTDPRFVWLIGDQEDTTVKKSTNCAYDRIVLRGQEIVSSVVPKSNSVFDFQKAYKLTEEEALDVSDHFPVEFKLQSSRAFTNSKKSVTLRKKTKSKRS

SEQ ID NO: 64785 - protein, 640 aa, Homo sapiens
MQSFDVERLTNILDGGAQNTALRRKVESIIHSYPEFSCKDNYFMTQNERYKAAMRRAFHIRLIARRLGWLEDGRELGYAYRALSGDVALNIHRVFVRALRSLGSEEQIAKWDPLCKNIQIIATYAQTELGHGTYLQGLETEATYDAATQEFVIHSPTLTATKWWPGDLGRSATHALVQAQLICSGARRGMHAFIVPIRSLQDHTPLPGIIIGDIGPKMDFDQTDNGFLQLNHVLPDGTYVKLGTAQSNYLPMVVVRVELLSGEILPILQKACVIAMRYSVIRRQSRLRPSDPEAKVLDYQTQQQKLFPQLAISYAFHFLAVSLLEFFQHSYTAILNQDFSFLPELHALSTGMKAMMSEFCTQGAEMCRRACGGHGYSKLSGLPSLVTKLSASCTYEGENTVLYLQVARFLVKSYLQTQMSPGSTPQRSLSPSVAYLTAPDLARCPAQRAADFLCPELYTTAWAHVAVRLIKDSVQHLQTLTQSGADQHEAWNQTTVIHLQAAKVHCYYVTVKGFTEALEKLENEPAIQQVLKRLCDLHAIHGILTNSGDFLHDAFLSGAQVDMARTAYLDLLRLIRKDAILLTDAFDFTDQCLNSALGCYDGNVYERLFQWAQKSPTNTQENPAYEEYIRPLLQSWRSKL

SEQ ID NO: 64786 - protein, 312 aa, Homo sapiens
MNVYSSEFENIKEEYSVRGFPTICYFEKGRFLFQYDNYGSTAEDIVEWLKNPQPPQPQVPETPWADEGGSVYHLTDEDFDQFVKEHSSVLVMFHAPWCGHCKKMKPEFEKAAEALHGEADSSGVLAAVDATVNKALAERFHISEFPTLKYFKNGEKYAVPVLRTKKKFLEWMQNPEAPPPPEPTWEEQQTSVLHLVGDNFRETLKKKKHTLVMFYAPWCPHCKKVIPHFTATADAFKDDRKIACAAVDCVKDKNQDLCQQEAVKGYPTFHYYHYGKFAEKYDSDRTELGFTNYIRALREGDHERLGKKKEEL

SEQ ID NO: 64787 - protein, 1671 aa, Homo sapiens
MSAELSIQGLDSANRSFVRETKATNSDVRKEVTNVISKESKLDSLEAAAKSKNCSSPQRGGSPPWAANSQPQPPRESKLESCKDSPRTAPQTPVLQKTSSSITLQAARVQPEPRAPGLGVLSPSGEERKRPAPPRPATFPTRQPGLGSQDVVSKAANRRIPMEGQRDSAFPKFESKPQSQEVKENQTVKFRCEVSGIPKPEVAWFLEGTPVRRQEGSIEVYEDAGSHYLCLLKARTRDSGTYSCTASNAQGQLSCSWTLQVERLAVMEVAPSFSSVLKDCAVIEGQDFVLQCSVRGTPVPRITWLLNGQPIQYARSTCEAGVAELHIQDALPEDHGTYTCLAENALGQVSCSAWVTVHEKKSSRKSEYLLPVAPSKPTAPIFLQGLSDLKVMDGSQVTMTVQVSGNPPPEVIWLHNGNEIQESEDFHFEQRGTQHSLCIQEVFPEDTGTYTCEAWNSAGEVRTQAVLTVQEPHDGTQPWFISKPRSVTASLGQSVLISCAIAGDPFPTVHWLRDGKALCKDTGHFEVLQNEDVFTLVLKKVQPWHAGQYEILLKNRVGECSCQVSLMLQNSSARALPRGREPASCEDLCGGGVGADGGGSDRYGSLRPGWPARGQGWLEEEDGEDVRGVLKRRVETRQHTEEAIRQQEVEQLDFRDLLGKKVSTKTLSEDDLKEIPAEQMDFRANLQRQVKPKTVSEEERKVHSPQQVDFRSVLAKKGTSKTPVPEKVPPPKPATPDFRSVLGGKKKLPAENGSSSAETLNAKAVESSKPLSNAQPSGPLKPVGNAKPAETLKPMGNAKPAETLKPMGNAKPDENLKSASKEELKKDVKNDVNCKRGHAGTTDNEKRSESQGTAPAFKQKLQDVHVAEGKKLLLQCQVSSDPPATIIWTLNGKTLKTTKFIILSQEGSLCSVSIEKALPEDRGLYKCVAKNDAGQAECSCQVTVDDAPASENTKAPEMKSRRPKSSLPPVLGTESDATVKKKPAPKTPPKAAMPPQIIQFPEDQKVRAGESVELFGKVTGTQPITCTWMKFRKQIQESEHMKVENSENGSKLTILAARQEHCGCYTLLVENKLGSRQAQVNLTVVDKPDPPAGTPCASDIRSSSLTLSWYGSSYDGGSAVQSYSIEIWDSANKTWKELATCRSTSFNVQDLLPDHEYKFRVRAINVYGTSEPSQESELTTVGEKPEEPKDEVEVSDDDEKEPEVDYRTVTINTEQKVSDFYDIEERLGSGKFGQVFRLVEKKTRKVWAGKFFKAYSAKEKENIRQEISIMNCLHHPKLVQCVDAFEEKANIVMVLEIVSGGELFERIIDEDFELTERECIKYMRQISEGVEYIHKQGIVHLDLKPENIMCVNKTGTRIKLIDFGLARRLENAGSLKVLFGTPEFVAPEVINYEPIGYATDMWSIGVICYILVSGLSPFMGDNDNETLANVTSATWDFDDEAFDEISDDAKDFISNLLKKDMKNRLDCTQCLQHPWLMKDTKNMEAKKLSKDRMKKYMARRKWQKTGNAVRAIGRLSSMAMISGLSGRKSSTGSPTSPLNAEKLESEEDVSQAFLEAVAEEKPHVKPYFSKTIRDLEVVEGSAARFDCKIEGYPDPEVVWFKDDQSIRESRHFQIDYDEDGNCSLIISDVCGDDDAKYTCKAVNSLGEATCTAELIVETMEEGEGEGEEEEE

SEQ ID NO: 64788 - protein, 592 aa, Homo sapiens
MRAYPIEQYPCQTKVAAAIMHMIMNNLDPAVAQFPQELVTYGGNGQVFSNWAQFWLTMFYLSKMTEEQTLVMYSGHPLGLFPSSRSAPRLVITNGMVIPNYSSRTEYEKLFALGVTMYGQMTAGSYCYIGPQGIVHGTVLTVLNAARRYLGIEDLAGKVFVTSGLGGMSGAQAKAAVIVGCIGVIAEVDKAALEKRHRQGWLMEVTDSLDRCIQRLREARKKKEVLSLGYHGNVVALWERLVHELDTTGECLVDLGSDQTSCHNPFNGGYYPVQLSFTEAQSLMASNPAVFKDLVQESLRRQVSAINRLAEEKFFFWDYGNAFLLEAQRAGADVEKKGAGRTEFRYPSYVQHIMGDIFSQGFGPFRWVCTSGDPQDLAVTDELATSVLEEAIADGVKVSVKLQYMDNIRWIREAARHRLVVGSQARILYSDQKGRVAIAVAINQAIACRRIKAPVVLSRDHHDVSGTDSPFRETSNIYDGSAFCADMAVQNFVGDACRGATWVALHNGGGVGWGEVINGGFGLVLDGTPEAEGRARLMLSWDVSNGVARRCWSGNQKAYEIICQTMQENSTLVVTLPHKVEDERVLQQALQL

SEQ ID NO: 64789 - protein, 780 aa, Homo sapiens
MSCIAEDVIIVTSSLTKDMTGKEDNYRGPAVRALCQITDSTMLQAIERYMKQAIVDKVPSVSSSALVSSLHLLKCSFDVVKRWVNEAQEAASSDNIMVQYHALGLLYHVRKNDRLAVNKMISKVTRHGLKSPFAYCMMIRVASKQLEEEDGSRDSPLFDFIESCLRNKHEMVVYEAASAIVNLPGCSAKELAPAVSVLQLFCSSPKAALRYAAVRTLNKVAMKHPSAVTACNLDLENLVTDSNRSIATLAITTLLKTGSESSIDRLMKQISSFMSEISDEFKVVVVQAISALCQKYPRKHAVLMNFLFTMLREEGGFEYKRAIVDCIISIIEENSESKETGLSHLCEFIEDCEFTVLATRILHLLGQEGPKTTNPSKYIRFIYNRVVLEHEEVRAGAVSALAKFGAQNEEMLPSILVLLKRCVMDDDNEVRDRATFYLNVLEQKQKALNAGYILNGLTVSIPGLERALQQYTLEPSEKPFDLKSVPLATAPMAEQRTESTPITAVKQPEKVAATRQEIFQEQLAAVPEFRGLGPLFKSSPEPVALTESETEYVIRCTKHTFTNHMVFQFDCTNTLNDQTLENVTVQMEPTEAYEVLCYVPARSLPYNQPGTCYTLVALPKEDPTAVACTFSCMMKFTVKDCDPTTGETDDEGYEDEYVLEDLEVTVADHIQKVMKLNFEAAWDEVGDEFEKEETFTLSTIKTLEEAVGNIVKFLGMHPCERSDKVPDNKNTHTLLLAGVFRGGHDILVRSRLLLLDTVTMQVTARSLEELPVDIILASVG

SEQ ID NO: 64790 - protein, 346 aa, Homo sapiens
MLSRENVGYASTCNSVGQTAGYFLGNVLFLALESADFCNKYLRFQPQPRGIVTLSDFLFFWGTVFLITTTLVALLKKENEVSVVKEETQGITDTYKLLFAIIKMPAVLTFCLLILTAKIGFSAADAVTGLKLVEEGVPKEHLALLAVPMVPLQIILPLIISKYTAGPQPLNTFYKAMPYRLLLGLEYALLVWWTPKVEHQGGFPIYYYIVVLLSYALHQVTVYSMYVSIMAFNAKVSDPLIGGTYMTLLNTVSNLGGNWPSTVALWLVDPLTVKECVGASNQNCRTPDAVELCKKLGGSCVTALDGYYVESIICVFIGFGWWFFLGPKFKKLQDEGSSSWKCKRNN

SEQ ID NO: 64791 - protein, 666 aa, Homo sapiens
MLYYELQTQLRKAEAVALKYQQHQESLSAQLQVVYEHRSRLEKSLQKERLEHKKAKEDFLVYKLEAQETLNKGRQDSNSRYSALNVQHQMLKSQHEELKKQHSDLEEEHRKQGEDFSRTFNDHKQKYLQLQQEKEQELSKLKETVYNLREENRQLRKAHQDIHTQLQDVKQQHKNLLSEHEQLVVTLEDHKSALAAAQTQVAEYKQLKDTLNRIPSLRKPDPAEQQNVTQVAHSPQGYNTAREKPTREVQEVSRNNDVWQNHEAVPGRAEDTKLYAPTHKEAEFQAPPEPIQQEVERREPEEHQVEEEHRKALEEEEMEQVGQAEHLEEEHDPSPEEQDREWKEQHEQREAANLLEGHARAEVYPSAKPMIKFQSPYEEQLEQQRLAVQQVEEAQQLREHQEALHQQRLQGHLLRQQEQQQQQVAREMALQRQAELEEGRPQHQEQLRQQAHYDAMDNDIVQGAEDQGIQGEEGAYERDNQHQDEAEGDPGNRHEPREQGPREADPESEADRAAVEDINPADDPNNQGEDEFEEAEQVREENLPDENEEQKQSNQKQENTEVEEHLVMAGNPDQQEDNVDEQYQEEAEEEVQEDLTEEKKRELEHNAEETYGENDENTDDKNNDGEEQEVRDDNRPKGREEHYEEEEEEEEDGAAVAEKSHRRAEM

SEQ ID NO: 64792 - protein, 522 aa, Homo sapiens
MGCDCFVQEVFCSDEELATVPLDIPPYTKNIIFVETSFTTLETRAFGSNPNLTKVVFLNTQLCQFRPDAFGGLPRLEDLEVTGSSFLNLSTNIFSNLTSLGKLTLNFNMLEALPEGLFQHLAALESLHLQGNQLQALPRRLFQPLTHLKTLNLAQNLLAQLPEELFHPLTSLQTLKLSNNALSGLPQGVFGKLGSLQELFLDSNNISELPPQVFSQLFCLERLWLQRNAITHLPLSIFASLGNLTFLSLQWNMLRVLPAGLFAHTPCLVGLSLTHNQLETVAEGTFAHLSNLRSLMLSYNAITHLPAGIFRDLEELVKLYLGSNNLTALHPALFQNLSKLELLSLSKNQLTTLPEGIFDTNYNLFNLALHGNPWQCDCHLAYLFNWLQQYTDRLLNIQTYCAGPAYLKGQVVPALNEKQLVCPVTRDHLGFQVTWPDESKAGGSWDLAVQERAARSQCTYSNPEGTVVLACDQAQCRWLNVQLSPQQGSLGLQYNASQEWDLRSSCGSLRLTVSIEARAAGP

SEQ ID NO: 64793 - protein, 456 aa, Homo sapiens
MSLYTCLVEITLPFHLEENVGGWDADGKGPCVWDTFTHQGGERVFKNQTGDVACGSYTLWEEDLKCIKQLGLTHYRFSLSWSRLLPDGTTGFINQKGIDYYNKIIDDLLKNGVTPIVTLYHFDLPQTLEDQGGWLSEAIIESFDKYAQFCFSTFGDRVKQWITINEANVLSVMSYDLGMFPPGIPHFGTGGYQAAHNLIKAHARSWHSYDSLFRKKQKGMVSLSLFAVWLEPADPNSVSDQEAAKRAITFHLDLFAKPIFIDGDYPEVVKSQIASMSQKQGYPSSRLPEFTEEEKKMIKGTADFFAVQYYTTRLIKYQENKKGELGILQDAEIEFFPDPSWKNVDWIYVVPWGVCKLLKYIKDTYNNPVIYITENGFPQSDPAPLDDTQRWEYFRQTFQELFKAIQLDKVNLQVYCAWSLLDNFEWNQGYSSRFGLFHVDFEDPARPRVPYTSAKE

SEQ ID NO: 64794 - protein, 340 aa, Homo sapiens
MIETTEDTIKKSFGQFNPGCVERVKKIRDYAFVHFTSREDAVHAMNNLNGTELEGSCLEVTLAKPVDKEQYSRYQKAARGGGAAEAAQQPSYVYSCDPYTLAYYGYPYNALIGPNRDYFVKAGSIRGRGRGAAGNRAPGPRGSYLGGYSAGRGIYSRYHEGKGKQQEKGYELVPNLEIPTVNPVAIKPGTVAIPAIGAQYSMFPAAPAPKMIEDGKIHTVEHMISPIAVQPDPASAAAAAAAAAAAAAAVIPTVSTPPPFQGRPITPVYTVAPNVQRIPTAGIYGASYVPFAAPATATIATLQKNAAAAAAMYGGYAGYIPQAFPAAAIQVPIPDVYQTY

SEQ ID NO: 64795 - protein, 526 aa, Homo sapiens
MKWTSALLLIQLSCYFSSGSCGKVLVWPTEFSHWMNIKTILDELVQRGHEVTVLASSASISFDPNSPSTLKFEVYPVSLTKTEFEDIIKQLVKRWAELPKDTFWSYFSQVQEIMWTFNDILRKFCKDIVSNKKLMKKLQESRFDVVLADAVFPFGELLAELLKIPFVYSLRFSPGYAIEKHSGGLLFPPSYVPVVMSELSDQMTFIERVKNMIYVLYFEFWFQIFDMKKWDQFYSEVLGRPTTLSETMAKADIWLIRNYWDFQFPHPLLPNVEFVGGLHCKPAKPLPKEMEEFVQSSGENGVVVFSLGSMVSNTSEERANVIASALAKIPQKVLWRFDGNKPDTLGLNTRLYKWIPQNDLLGHPKTRAFITHGGANGIYEAIYHGIPMVGVPLFADQPDNIAHMKAKGAAVSLDFHTMSSTDLLNALKTVINDPLYKENAMKLSRIHHDQPVKPLDRAVFWIEFVMRHKGAKHLRVAAHDLTWFQYHSLDVTGFLLACVATVIFIITKCLFCVWKFVRTGKKGKRD

SEQ ID NO: 64796 - protein, 326 aa, Homo sapiens [sequence omitted]

SEQ ID NO: 64797 - protein, 571 aa, Homo sapiens
MPLTISSLKDGGKAAQANVRIGDVVLSIDGINAQGMTHLEAQNKIKGCTGSLNMTLQRASAAPKPEPVPVQKGEPKEVVKPVPITSPAVSKVTSTNNMAYNKAPRPFGSVSSPKVTSIPSPSSAFTPAHATTSSHASPSPVAAVTPPLFAASGLHANANLSADQSPSALSAGKTAVNVPRQPTVTSVCSETSQELAEGQRRGSQGDSKQQNGPPRKHIVERYTEFYHVPTHSDASKKRLIEDTEDWRPRTGTTQSRSFRILAQITGTEHLKESEADNTKKANNSQEPSPQLASSVASTRSMPESLDSPTSGRPGVTSLTAAAAFKPVGSTGVIKSPSWQRPNQGVPSTGRISNSATYSGSVAPANSALGQTQPSDQDTLVQRAEHIPAGKRTPMCAHCNQVIRGPFLVALGKSWHPEEFNCAHCKNTMAYIGFVEEKGALYCELCYEKFFAPECGRCQRKILGEVISALKQTWHVSCFVCVACGKPIRNNVFHLEDGEPYCETDYYALFGTICHGCEFPIEAGDMFLEALGYTWHDTCFVCSVCCESLEGQTFFSKKDKPLCKKHAHSVNF

SEQ ID NO: 64798 - protein, 306 aa, Homo sapiens [sequence omitted]

SEQ ID NO: 64799 - protein, 215 aa, Homo sapiens
MNKRAKFELRKPLVLWSLTLAVFSIFGALRTGAYMVYILMTKGLKQSVCDQGFYNGPVSKFWAYAFVLSKAPELGDTIFIILRKQKLIFLHWYHHITVLLYSWYSYKDMVAGGGWFMTMNYGVHAVMYSYYALRAAGFRVSRKFAMFITLSQITQMLMGCVVNYLVFCWMQHDQCHSHFQNIFWSSLMYLSYLVLFCHFFFEAYIGKMRKTTKAE

SEQ ID NO: 64800 - protein, 241 aa, Homo sapiens
MLTINPAKRITASEALKHPWICQRSTVASMMHRQETVDCLKKFNARRKLKGAILTTMLATRNFSAAKSLLKKPDGVKEPQTTVIHNPDGNKESTESSNTTIEDEDVKARKQEIIKVTEQLIEAINNGDFEAYTKICDPGLTAFEPEALGNLVEGMDFHRFYFENALSKSNKPIHTIILNPHVHLVGDDAACIAYIRLTQYMDGSGMPKTMQSEETRVWHRRDGKWQNVHFHRSGSPTVPIK

SEQ ID NO: 64801 - protein, 79 aa, Homo sapiens
MAGWYFNQVFATCLGLVYIYGRHLYFWGYSEAAKKRITGFRLSLGILALLTLLGALGIANSFLDEYLDLNIAKKLRRQF

SEQ ID NO: 64802 - protein, 556 aa, Homo sapiens
MERFAEEADVVIVGAGPAGLSAAVRLKQLAVAHEKDIRVCLVEKAAQIGAHTLSGACLDPGAFKELFPDWKEKGAPLNTPVTEDRFGILTEKYRIPVPILPGLPMNNHGNYIVRLGHLVSWMGEQAEALGVEVYPGYAAAEVLFHDDGSVKGIATNDVGIQKDGAPKATFERGLELHAKVTIFAEGCHGHLAKQLYKKFDLRANCEPQTYGIGLKELWVIDEKNWKPGRVDHTVGWPLDRHTYGGSFLYHLNEGEPLVALGLVVGLDYQNPYLSPFREFQRWKHHPSIRPTLEGGKRIAYGARALNEGGFQSIPKLTFPGGLLIGCSPGFMNVPKIKGTHTAMKSGILAAESIFNQLTSENLQSKTIGLHVTEYEDNLKNSWVWKELYSVRNIRPSCHGVLGVYGGMIYTGIFYWILRGMEPWTLKHKGSDFERLKPAKDCTPIEYPKPDGQISFDLLSSVALSGTNHEHDQPAHLTLRDDSIPVNRNLSIYDGPEQRFCPAGVYEFVPVEQGDGFRLQINAQNCVHCKTCDIKDPSQNINWVVPEGGGGPAYNGM

SEQ ID NO: 64803 - protein, 311 aa, Homo sapiens
MHAARHGWDVEKDAPLFRNWAIHTGKHQPGVDKPDPKTWKANFRCAMNSLPDIEEVKDKSIKKGNNAFRVYRMLPLSERPSKKGKKPKTEKEDKVKHIKQEPVESSLGLSNGVSDLSPEYAVLTSTIKNEVDSTVNIIVVGQSHLDSNIENQEIVTNPPDICQVVEVTTESDEQPVSMSELYPLQISPVSSYAESETTDSVPSDEESAEGRPHWRKRNIEGKQYLSNMGTRGSYLLPGMASFVTSNKPDLQVTIKEESNPVPYNSSWPPFQDLPLSSSMTPASSSSRPDRETRASVIKKTSDITQARVKSC

SEQ ID NO: 64804 - protein, 146 aa, Homo sapiens
MQNHAAVFRVGSVLQEGCGKISKLYGDLKHLKTFDRGMVWNTDLVETLELQNLMLCALQTIYGAEARKESRGAHAREDYKVRIDEYDYSKPIQGQQKKPFEEHWRKHTLSYVDVGTGKVTLEYRPVIDKTLNEADCATVPPAIRSY

SEQ ID NO: 64805 - protein, 512 aa, Homo sapiens
MYGIVYTRPCSGDANCIQPYLARRPKLQLSVYTTTRSHLGAENNIDLVLNVEDFDVESKFERTVNVSVPKKTRNNGTLYAYIFLHHAGVLPWHDGKQVHLVSPLTTYMVPKPEEINLLTGESDTQQIEAEKKPTSALDEPVSHWRPRLALNVMADNFVFDGSSLPADVHRYMKMIQLGKTVHYLPILFIDQLSNRVKDLMVINRSTTELPLTVSYDKVSLGRLRFWIHMQDAVYSLQQFGFSEKDADEVKGIFVDTNLYFLALTFFVAAFHLLFDFLAFKNDISFWKKKKSMIGMSTKAVLWRCFSTVVIFLFLLDEQTSLLVLVPAGVGAAIELWKVKKALKMTIFWRGLMPEFQFGTYSESERKTEEYDTQAMKYLSYLLYPLCVGGAVYSLLNIKYKSWYSWLINSFVNGVYAFGFLFMLPQLFVNYKLKSVAHLPWKAFTYKAFNTFIDDVFAFIITMPTSHRLACFRDDVVFLVYLYQRWLYPVDKRRVNEFGESYEEKATRAPHTD

SEQ ID NO: 64806 - protein, 451 aa, Homo sapiens
MVELSKSQDDEIGDGTTGVVVLAGALLEEAEQLLDRGIHPIRIADGYEQAARVAIEHLDKISDSVLVDIKDTEPLIQTAKTTLGSKVVNSCHRQMAEIAVNAVLTVADMERRDVDFELIKVEGKVGGRLEDTKLIKGVIVDKDFSHPQMPKKVEDAKIAILTCPFEPPKPKTKHKLDVTSVEDYKALQKYEKEKFEEMIQQIKETGANLAICQWGFDDEANHLLLQNNLPAVRWVGGPEIELIAIATGGRIVPRFSELTAEKLGFAGLVQEISFGTTKDKMLVIEQCKNSRAVTIFIRGGNKMIIEEAKRSLHDALCVIRNLIRDNRVVYGGGAAEISCALAVSQEADKCPTLEQYAMRAFADALEVIPMALSENSGMNPIQTMTEVRARQVKEMNPALGIDCLHKGTNDMKQQHVIETLIGKKQQISLATQMVRMILKIDDIRKPGESEE

SEQ ID NO: 64807 - protein, 786 aa, Homo sapiens
MKLFAQQCKEVDILISTALIPGKKAPVLFNKEMIESMKEGSVVVDLAAEAGGNFETTKPGELYIHKGITHIGYTDLPSRMATQASTLYSNNITKLLKAISPDKDNFYFDVKDDFDFGTMGHVIRGTVVMKDGKVIFPAPTPKNIPQGAPVKQKTVAELEAEKAATITPFRKTMSTASAYTAGLTGILGLGIAAPNLAFSQMVTTFGLAGIVGYHTVWGVTPALHSPLMSVTNAISGLTAVGGLALMGGHLYPSTTSQGLAALAAFISSVNIAGGFLVTQRMLDMFKRPTDPPEYNYLYLLPAGTFVGGYLAALYSGYNIEQIMYLGSGLCCVGALAGLSTQGTARLGNALGMIGVAGGLAATLGVLKPGPELLAQMSGAMALGGTIGLTIAKRIQISDLPQLVAAFHSLVGLAAVLTCIAEYIIEYPHFATDAAANLTKIVAYLGTYIGGVTFSGSLIAYGKLQGLLKSAPLLLPGRHLLNAGLLAASVGGIIPFMVDPSFTTGITCLGSVSALSAVMGVTLTAAIGGADMPVVITVLNSYSGWALCAEGFLLNNNLLTIVGALIGSSGAILSYIMCVAMNRSLANVILGGYGTTSTAGGKPMEISGTHTEINLDNAIDMIREANSIIITPGYGLCAAKAQYPIADLVKMLTEQGKKVRFGIHPVAGRMPGQLNVLLAEAGVPYDIVLEMDEINHDFPDTDLVLVIGANDTVNSAAQEDPNSIIAGMPVLEVWKSKQVIVMKRSLGVGYAAVDNPIFYKPNTAMLLGDAKKTCDALQAKVRESYQK

SEQ ID NO: 64808 - protein, 777 aa, Homo sapiens
MRCEWDGGRETHLETNFTLKSEWATHKFADCKAKRDTPTSCTVDYSTVYFVNIEVWVEAENALGKVTSDHINFDPVYKVKPNPPHNLSVINSEELSSILKLTWTNPSIKSVIILKYNIQYRTKDASTWSQIPPEDTASTRSSFTVQDLKPFTEYVFRIRCMKEDGKGYWSDWSEEASGITYEDRPSKAPSFWYKIDPSHTQGYRTVQLVWKTLPPFEANGKILDYEVTLTRWKSHLQNYTVNATKLTVNLTNDRYLATLTVRNLVGKSDAAVLTIPACDFQATHPVMDLKAFPKDNMLWVEWTTPRESVKKYILEWCVLSDKAPCITDWQQEDGTVHRTYLRGNLAESKCYLITVTPVYADGPGSPESIKAYLKQAPPSKGPTVRTKKVGKNEAVLEWDQLPVDVQNGFIRNYTIFYRTIIGNETAVNVDSSHTEYTLSSLTSDTLYMVRMAAYTDEGGKDGPEFTFTTPKFAQGEIEAIVVPVCLAFLLTTLLGVLFCFNKRDLIKKHIWPNVPDPSKSHIAQWSPHTPPRHNFNSKDQMYSDGNFTDVSVVEIEANDKKPFPEDLKSLDLFKKEKINTEGHSSGIGGSSCMSSSRPSISSSDENESSQNTSSTVQYSTVVHSGYRHQVPSVQVFSRSESTQPLLDSEERPEDLQLVDHVDGGDGILPRQQYFKQNCSQHESSPDISHFERSKQVSSVNEEDFVRLKQQISDHISQSCGSGQMKMFQEVSAADAFGPGTEGQVERFETVGMEAATDEGMPKSYLPQTVRQGGYMPQ

SEQ ID NO: 64809 - protein, 519 aa, Homo sapiens
MISLAPEVQSSEEYIQLLKKLIRSPSIPHQYWLTLQYLLKHFFKLSQTSSKNLLNARVLSEIFSPMLFRFSAASSDNTENLIKVIEILISTEWNERQPAPALPPKPPKPTTVANNGMNNNMSLQDAEWYWGDISREEVNEKLRDTADGTFLVRDASTKMHGDYTLTLRKGGNNKLIKIFHRDGKYGFSDPLTFSSVVELINHYRNESLAQYNPKLDVKLLYPVSKYQQDQVVKEDNIEAVGKKLHEYNTQFQEKSREYDRLYEEYTRTSQEIQMKRTAIEAFNETIKIFEEQCQTQERYSKEYIEKFKREGNEKEIQRIMHNYDKLKSRISEIIDSRRRLEEDLKKQAAEYREIDKRMNSIKPDLIQLRKTRDQYLMWLTQKGVRQKKLNEWLGNENTEDQYSLVEDDEDLPHHDEKTWNVGSSNRNKAENLLRGKRDGTFLVRESSKQGCYACSVVVDGEVKHCVINKTATGYGFAEPYNLYSSLKELVLHYQHTSLVQHNDSLNVTLAYPVYAQQRR

SEQ ID NO: 64810 - protein, 725 aa, Homo sapiens
MTKLAKSASNYSQLGTFAPVWDVFKTSTEKLANCHLDLVRKLQELIKEVQKYGEEQVKSHKKTKEEVAGTLEAVQTIQSITQALQKSKENYNAKCVEQERLKKEGATQREIEKAAVKSKKATDTYKLYVEKYALAKADFEQKMTETAQVHEEFINNMANTTVESLIQKFAESKGTGKERPGLIEFEECDTASAVEGIKPRKRKTFALPGIIKKEKDAESVECPDADSLNIPDVDEEGYSIKPETNQNDTKENHFYSSSDSDSEDEEPKKYRIEIKPMHPNNSHHTMASLDELKVSIGNITLSPAISRHSPVQMNRNLSNEELTKSKPSAPPNEKGTSDLLAWDPLFGPSLDSSSSSSLTSSSSARPTTPLSVGTIVPPPRPASRPKLTSGKLSGINEIPRPFSPPVTSNTSPPPAAPLARAESSSSISSSASLSAANTPTVGVSRGPSPVSLGNQDTLPVAVALTESVNAYFKGADPTKCIVKITGDMTMSFPSGIIKVFTSNPTPAVLCFRVKNISRLEQILPNAQLVFSDPSQCDSNTKDFWMNMQAVTVYLKKLSEQNPAASYYNVDVLKYQVSSNGIQSTPLNLATYWKCSASTTDLRVDYKYNPEAMVAPSVLSNIQVVVPVDGGVTNMQSLPPAIWNAEQMKAFWKLSSISEKSENGGSGSLRAKFDLSEGPSKPTTLAVQFLSEGSTLSGVDFELVGTGYRLSLIKKRFATGRYLADC

SEQ ID NO: 64811 - protein, 492 aa, Homo sapiens
MTPNLLHLAPENFYISHSPNSTAGPSCTLLEEAFRRYHGYIFGFYKWHHEPAEFQAKTQVQQLLVSITLQSECDAFPNISSDESYTLLVKEPVAVLKANRVWGALRGLETFSQLVYQDSYGTFTINESTIIDSPRFSHRGILIDTSRHYLPVKIILKTLDAMAFNKFNVLHWHIVDDQSFPYQSITFPELSNKGSYSLSHVYTPNDVRMVIEYARLRGIRVLPEFDTPGHTLSWGKGQKDLLTPCYSRQNKLDSFGPINPTLNTTYSFLTTFFKEISEVFPDQFIHLGGDEVEFKCWESNPKIQDFMRQKGFGTDFKKLESFYIQKVLDIIATINKGSIVWQEVFDDKAKLAPGTIVEVWKDSAYPEELSRVTASGFPVILSAPWYLDLISYGQDWRKYYKVEPLDFGGTQKQKQLFIGGEACLWGEYVDATNLTPRLWPRASAVGERLWSSKDVRDMDDAYDRLTRHRCRMVERGIAAQPLYAGYCNHENM

SEQ ID NO: 64812 - protein, 783 aa, Homo sapiens
MVRAARALLSAVTRLLILADMADVYKLLVQLKVVEDGILKLRNAGNEQDLGIQYKALKPEVDKLNIMAAKRQQELKDVGHRDQMAAARGILQKNVPILYTASQACLQHPDVAAYKANRDLIYKQLQQAVTGISNAAQATASDDASQHQGGGGGELAYALNNFDKQIIVDPLSFSEERFRPSLEERLESIISGAALMADSSCTRDDRRERIVAECNAVRQALQDLLSEYMGNAGRKERSDALNSAIDKMTKKTRDLRRQLRKAVMDHVSDSFLETNVPLLVLIEAAKNGNEKEVKEYAQVFREHANKLIEVANLACSISNNEEGVKLVRMSASQLEALCPQVINAALALAAKPQSKLAQENMDLFKEQWEKQVRVLTDAVDDITSIDDFLAVSENHILEDVNKCVIALQEKDVDGLDRTAGAIRGRAARVIHVVTSEMDNYEPGVYTEKVLEATKLLSNTVMPRFTEQVEAAVEALSSDPAQPMDENEFIDASRLVYDGIRDIRKAVLMIRTPEELDDSDFETEDFDVRSRTSVQTEDDQLIAGQSARAIMAQLPQEQKAKIAEQVASFQEEKSKLDAEVSKWDDSGNDIIVLAKQMCMIMMEMTDFTRGKGPLKNTSDVISAAKKIAEAGSRMDKLGRTIADHCPDSACKQDLLAYLQRIALYCHQLNICSKVKAEVQNLGGELVVSGVDSAMSLIQAAKNLMNAVVQTVKASYVASTKYQKSQGMASLNLPAVSWKMKAPEKKPLVKREKQDETQTKIKRASQKKHVNPVQALSEFKAMDSI

SEQ ID NO: 64813 - protein, 450 aa, Homo sapiens
MAPLGMLLGLLMAACFTFCLSHQNLEFALTNPEKSSTKETERKETKAEEELDAEVLEVFHPTHEWQALQPGQAVPAGSHVRLNLQTGEREAKLQYEDKFRNNLKGKRLDINTNTYTSQDLKSALAKFKEGAEMESSKEDKARQAEVKRLFRPIEELKKDFDELNVVIETDMQIMVRLINKFNSSSSSLEEKIAALFDLEYYVHQMDNAQDLLSFGGLQVVINGLNSTEPLVKEYAAFVLGAAFSSNPKVQVEAIEGGALQKLLVILATEQPLTAKKKVLFALCSLLRHFPYAQRQFLKLGGLQVLRTLVQEKGTEVLAVRVVTLLYDLVTEKMFAEEEAELTQEMSPEKLQQYRQVHLLPGLWEQGWCEITAHLLALPEHDAREKVLQTLGVLLTTCRDRYRQDPQLGRTLASLQAEYQVLASLELQDGEDEGYFQELLGSVNSLLKELR

SEQ ID NO: 64814 - protein, 542 aa, Homo sapiens
MGRGPGPLQERSLFEKKRGAPPSSNIEDFHGLLPKGYPHLCSICDLPVHSNKEWSQHINGASHSRRCQLLLEIYPEWNPDNDTGHTMGDPFMLQQSTNPAPGILGPPPPSFHLGGPAVGPRGNLGAGNGNLQGPRHMQKGRVETSRVVHIMDFQRGKNLRYQLLQLVEPFGVISNHLILNKINEAFIEMATTEDAQAAVDYYTTTPALVFGKPVRVHLSQKYKRIKKPEGKPDQKFDQKQELGRVIHLSNLPHSGYSDSAVLKLAEPYGKIKNYILMRMKSQAFIEMETREDAMAMVDHCLKKALWFQGRCVKVDLSEKYKKLVLRIPNRGIDLLKKDKSRKRSYSPDGKESPSDKKSKTDGSQKTESSTEGKEQEEKSGEDGEKDTKDDQTEQEPNMLLESEDELLVDEEEAAALLESGSSVGDETDLANLGDVASDGKKEPSDKAVKKDGSASAAAKKKLKKVDKIEELDQENEAALENGIKNEENTEPGAESSENADDPNKDTSENADGQSDENKDDYTIPDEYRIGPYQPNVPVEISE

SEQ ID NO: 64815 - protein, 280 aa, Homo sapiens
MDDQRDLISNNEQLPMLGRRPGAPESKCSRGALYTGFSILVTLLLAGQATTAYFLYQQQGRLDKLTVTSQNLQLENLRMKLPKPPKPVSKMRMATPLLMQALPMGALPQGPMQNATKYGNMTEDHVMHLLQNADPLKVYPPLKGSFPENLRHLKNTMETIDWKVFESWMHHWLLFEMSRHSLEQKPTDAPPKVLTKCQEEVSHIPAVHPGSFRPKCDENGNYLPLQCYGSIGYCWCVFPNGTEVPNTRSRGHHNCSESLELEDPSSGLGVTKQDLGPVPM

SEQ ID NO: 64816 - protein, 216 aa, Homo sapiens
MDDQRDLISNNEQLPMLGRRPGAPESKCSRGALYTGFSILVTLLLAGQATTAYFLYQQQGRLDKLTVTSQNLQLENLRMKLPKPPKPVSKMRMATPLLMQALPMGALPQGPMQNATKYGNMTEDHVMHLLQNADPLKVYPPLKGSFPENLRHLKNTMETIDWKVFESWMHHWLLFEMSRHSLEQKPTDAPPKESLELEDPSSGLGVTKQDLGPVPM

SEQ ID NO: 64817 - protein, 576 aa, Homo sapiens
MLKDNKKNWRRVYKSLLLLAYLIRNGSERVVTSAREHIYDLRSLENYHFVDEHGKDQGINIRQKVKELVEFAQDDDRLREERKKAKKNKDKYVGVSSDSVGGFRYSERYDPEPKSKWDEEWDKNKSAFPFSDKLGELSDKIGSTIDDTISKFRRKDREDSPERCSDSDEEKKARRGRSPKGEFKDEEETVTTKHIHITQATETTTTRHKRTANPSKTIDLGAAAHYTGDKASPDQNASTHTPQSSVKTSVPSSKSSGDLVDLFDGTSQSTGGSADLFGGFADFGSAAASGSFPSQVTATSGNGDFGDWSAFNQAPSGPVASSGEFFGSASQPAVELVSGSQSALGPPPAASNSSDLFDLMGSSQATMTSSQSMNFSMMSTNTVGLGLPMSRSQPLQNVSTVLQKPNPLYNQNTDMVQKSVSKTLPSTWSDPSVNISLDNLLPGMQPSKPQQPSLNTMIQQQNMQQPMNVMTQSFGAVNLSSPSNMLPVRPQTNALIGGPMPMSMPNVMTGTMGMAPLGNTPMMNQSMMGMNMNIGMSAAGMGLTGTMGMGMPNIAMTSGTVQPKQDAFANFANFSK

SEQ ID NO: 64818 - protein, 308 aa, Homo sapiens [sequence omitted]

SEQ ID NO: 64819 - protein, 186 aa, Homo sapiens [sequence omitted]

SEQ ID NO: 64820 - protein, 448 aa, Homo sapiens
MLGTEGGEGFVVKVRGLPWSCSADEVQRFFSDCKIQNGAQGIRFIYTREGRPSGEAFVELESEDEVKLALKKDRETMGHRYVEVFKSNNVEMDWVLKHTGPNSPDTANDGFVRLRGLPFGCSKEEIVQFFSGLEIVPNGITLPVDFQGRSTGEAFVQFASQEIAEKALKKHKERIGHRYIEIFKSSRAEVRTHYDPPRKLMAMQRPGPYDRPGAGRGYNSIGRGAGFERMRRGAYGGGYGGYDDYNGYNDGYGFGSDRFGRDLNYCFSGMSDHRYGDGGSTFQSTTGHCVHMRGLPYRATENDIYNFFSPLNPVRVHIEIGPDGRVTGEADVEFATHEDAVAAMSKDKANMQHRYVELFLNSTAGASGGAYEHRYVELFLNSTAGASGGAYGSQMMGGMGLSNQSSYGGPASQQLSGGYGGGYGGQSSMSGYDQVLQENSSDFQSNIA

SEQ ID NO: 64821 - protein, 147 aa, Homo sapiens
MPKPGVFDLINKAKWDAWNALGSLPKEAARQNYVDLVSSLSPSLESSSQVEPGTDRKSTGFETLVVTSEDGITKIMFNRPKKKNAINTEMYHEIMRALKAASKDDSIITVLTGNGDYYSSGNDLTNFTDIPPGGVEEKAKNNAVLLR

SEQ ID NO: 64822 - protein, 363 aa, Homo sapiens
MFTHGIQSAAHFVMFFAPWCGHCQRLQPTWNDLGDKYNSMEDAKVYVAKVDCTAHSDVCSAQGVRGYPTLKLFKPGQEAVKYQGPRDFQTLENWMLQTLNEEPVTPEPEVEPPSAPELKQGLYELSASNFELHVAQGDHFIKFFAPWCGHCKALAPTWEQLALGLEHSETVKIGKVDCTQHYELCSGNQVRGYPTLLWFRDGKKVDQYKGKRDLESLREYVESQLQRTETGATETVTPSEAPVLAAEPEADKGTVLALTENNFDDTIAEGITFIKFYAPWCGHCKTLAPTWEELSKKEFPGLAGVKIAEVDCTAERNICSKYSVRGYPTLLLFRGGKKVSEHSGGRDLDSLHRFVLSQAKDEL

SEQ ID NO: 64823 - protein, 266 aa, Homo sapiens
MLDSYLPTFFLTVMYLLSIWLGNKYMKNRPALSLRGILTLYNLGITLLSAYMLAELILSTWEGGYNLQCQDLTSAGEADIRVAKVLWWYYFSKSVEFLDTIFFVLRKKTSQITFLHVYHHASMFNIWWCVLNWIPCGQSFFGPTLNSFIHILMYSYYGLSVFPSMHKYLWWKKYLTQAQLVQFVLTITHTMSAVVKPCGFPFGCLIFQSSYMLTLVILFLNFYVQTYRKKPMKKDMQEPPAGKEVKNGFSKAYFTAANGVMNKKAQ

SEQ ID NO: 64824 - protein, 419 aa, Homo sapiens
MVADCGVREARAAVRAAYEAFCRWREVSAKGKPLKEAHGEILYSAFFLEWFSEEARRVYGDIIHTPAKDRRALVLKQPIGVAAVITPWNFPSAMITRKVGAALAAGCTVVVKPAEDTPFSALALAELASQAGIPSGVYNVIPCSRKNAKEVGEAICTDPLVSKISFTGSTTTGKILLHHAANSVKRVSMELGGLAPFIVFDSANVDQAVAGAMASKFRNTGQTCVCSNQFLVQRGIHDAFVKAFAEAMKKNLRVGNGFEEGTTQGPLINEKAVEKVEKQVNDAVSKGATVVTGGKRHQLGKNFFEPTLLCNVTQDMLCTHEETFGPLAPVIKFDTEEEAIAIANAADVGLAGYFYSQDPAQIWRVAEQLEVGMVGVNEGLISSVECPFGGVKQSGLGREGSKYGIDEYLELKYVCYGGL

SEQ ID NO: 64825 - protein, 244 aa, Homo sapiens [sequence omitted]

SEQ ID NO: 64826 - protein, 748 aa, Homo sapiens
MVLFCLLFLYPGLADSAPSCPQNVNISGGTFTLSHGWAPGSLLTYSCPQGLYPSPASRLCKSSGQWQTPGATRSLSKAVCKPVRCPAPVSFENGIYTPRLGSYPVGGNVSFECEDGFILRGSPVRQCRPNGMWDGETAVCDNGAGHCPNPGISLGAVRTGFRFGHGDKVRYRCSSNLVLTGSSERECQGNGVWSGTEPICRQPYSYDFPEDVAPALGTSFSHMLGATNPTQKTKESLGRKIQIQRSGHLNLYLLLDCSQSVSENDFLIFKESASLMVDRIFSFEINVSVAIITFASEPKVLMSVLNDNSRDMTEVISSLENANYKDHENGTGTNTYAALNSVYLMMNNQMRLLGMETMAWQEIRHAIILLTDGKSNMGGSPKTAVDHIREILNINQKRNDYLDIYAIGVGKLDVDWRELNELGSKKDGERHAFILQDTKALHQVFEHMLDVSKLTDTICGVGNMSANASDQERTPWHVTIKPKSQETCRGALISDQWVLTAAHCFRDGNDHSLWRVNVGDPKSQWGKEFLIEKAVISPGFDVFAKKNQGILEFYGDDIALLKLAQKVKMSTHARPICLPCTMEANLALRRPQGSTCRDHENELLNKQSVPAHFVALNGSKLNINLKMGVEWTSCAEVVSQEKTMFPNLTDVREVVTDQFLCSGTQEDESPCKGESGGAVFLERRFRFFQVGLVSWGLYNPCLGSADKNSRKRAPRSKVPPPRDFHINLFRMQPWLRQHLGDVLNFLPL

SEQ ID NO: 64827 - protein, 324 aa, Homo sapiens
MVLFCLLFLYPGLADSAPSCPQNVNISGGTFTLSHGWAPGSLLTYSCPQGLYPSPASRLCKSSGQWQTPGATRSLSKAVCKPVRCPAPVSFENGIYTPRLGSYPVGGNVSFECEDGFILRGSPVRQCRPNGMWDGETAVCDNGAGHCPNPGISLGAVRTGFRFGHGDKVRYRCSSNLVLTGSSERECQGNGVWSGTEPICRQPYSYDFPEDVAPALGTSFSHMLGATNPTQKTKESLGRKIQIQRSGHLNLYLLLDCSQSVSENDFLIFKESASLMVDRVRNQESACSRGLPVLTISLCLLPLLRTPLTAHLLQEVFSDYTHAM

SEQ ID NO: 64828 - protein, 526 aa, Homo sapiens
MRIQQFRKADGSYAAWLSRGSSTWLTAFVLKVLSLAQEQVGGSPEKLQETSNWLLSQQQADGSFQDLSPVIHRSMQGGLVGNDETVALTAFVTIALHHGLAVFQDEGAEPLKQRVEASISKASSFLGEKASAGLLGAHAAAITAYALTLTKAPADLRGVAHNNLMAMAQETGDNLYWGSVTGSQSNAVSPTPAPRNPSDPMPQAPALWIETTAYALLHLLLHEGKAEMADQAAAWLTRQGSFQGGFRSTQDTVIALDALSAYWIASHTTEERGLNVTLSSTGRNGFKSHALQLNNRQIRGLEEELQFSLGSKINVKVGGNSKGTLKVLRTYNVLDMKNTTCQDLQIEVTVKGHVEYTMEANEDYEDYEYDELPAKDDPDAPLQPVTPLQLFEGRRNRRRREAPKVVEEQESRVHYTVCIWRNGKVGLSGMAIADVTLLSGFHALRADLEKLTSLSDRYVSHFETEGPHVLLYFDSSADVLCFTGHQVRADSWPPCVLLKSASVLRGSALASVAPWSGVCRTRMATG

SEQ ID NO: 64829 - protein, 238 aa, Homo sapiens
MSPCGGEDIVADHVASCGVNLYQFYGPSGQYTHEFDGDEQFYVDLERKETAWRWPEFSKFGGFDPQGALRNMAVAKHNLNIMIKRYNSTAATNEVPEVTVFSKSPVTLGQPNTLICLVDNIFPPVVNITWLSNGQSVTEGVSETSFLSKSDHSFFKISYLTFLPSADEIYDCKVEHWGLDQPLLKHWEPEIPAPMSELTETVVCALGLSVGLMGIVVGTVFIIQGLRSVGASRHQGPL

SEQ ID NO: 64830 - protein, 239 aa, Homo sapiens [sequence omitted]

SEQ ID NO: 64831 - protein, 136 aa, Homo sapiens
MASGSPPTQPSPASDSGSGYVPGSVSAAFVTCPNEKVAKEIARAVVEKRLAACVNLIPQITSIYEWKGKIEEDSEVLMMIKTQSSLVPALTDFVRSVHPYEVAEVIALPVEQGNFPYLQWVRQVTESVSDSITVLP

SEQ ID NO: 64832 - protein, 1659 aa, Homo sapiens
MGIADKTENTLERNKIEPLGYCEDAESNRQLESTEFNKSNLEVVDTSTFGPESNILENAICDVPDQNSKQLNAIESTKIESHETANLQDDRNSQSSSVSYLESKSVKSKHTKPVIHSKQNMTTDAPKKIVAAKYEVIHSKTKVNVKSVKRNTDVPESQQNFHRPVKVRKKQIDKEPKIQSCNSGVKSVKNQAHSVLKKTLQDQTLVQIFKPLTHSLSDKSHAHPGCLKEPHHPAQTGHVSHSSQKQCHKPQQQAPAMKTNSHVKEELEHPGVEHFKEEDKLKLKKPEKNLQPRQRRSSKSFSLDEPPLFIPDNIATIRREGSDHSSSFESKYMWTPSKQCGFCKKPHGNRFMVGCGRCDDWFHGDCVGLSLSQAQQMGEEDKEYVCVKCCAEEDKKTEILDPDTLENQATVEFHSGDKTMECEKLGLSKHTTNDRTKYIDDTVKHKVKILKRESGEGRNSSDCRDNEIKKWQLAPLRKMGQPVLPRRSSEEKSEKIPKESTTVTCTGEKASKPGTHEKQEMKKKKVEKGVLNVHPAASASKPSADQIRQSVRHSLKDILMKRLTDSNLKVPEEKAAKVATKIEKELFSFFRDTDAKYKNKYRSLMFNLKDPKNNILFKKVLKGEVTPDHLIRMSPEELASKELAAWRRRENRHTIEMIEKEQREVERRPITKITHKGEIEIESDAPMKEQEAAMEIQEPAANKSLEKPEGSEKQKEEVDSMSKDTTSQHRQHLFDLNCKICIGRMAPPVDDLSPKKVKVVVGVARKHSDNEAESIADALSSTSNILASEFFEEEKQESPKSTFSPAPRPEMPGTVEVESTFLARLNFIWKGFINMPSVAKFVTKAYPVSGSPEYLTEDLPDSIQVGGRISPQTVWDYVEKIKASGTKEICVVRFTPVTEEDQISYTLLFAYFSSRKRYGVAANNMKQVKDMYLIPLGATDKIPHPLVPFDGPGLELHRPNLLLGLIIRQKLKRQHSACASTSHIAETPESAPPIALPPDKKSKIEVSTEEAPEEENDFFNSFTTVLHKQRNKPQQNLQEDLPTAVEPLMEVTKQEPPKPLRFLPGVLIGWENQPTTLELANKPLPVDDILQSLLGTTGQVYDQAQSVMEQNTVKEIPFLNEQTNSKIEKTDNVEVTDGENKEIKVKVDNISESTDKSAEIETSVVGSSSISAGSLTSLSLRGKPPDVSTEAFLTNLSIQSKQEETVESKEKTLKRQLQEDQENNLQDNQTSNSSPCRSNVGKGNIDGNVSCSENLVANTARSPQFINLKRDPRQAAGRSQPVTTSESKDGDSCRNGEKHMLPGLSHNKEHLTEQINVEEKLCSAEKNSCVQQSDNLKVAQNSPSVENIQTSQAEQAKPLQEDILMQNIETVHPFRRGSAVATSHFEVGNTCPSEFPSKSITFTSRSTSPRTSTNFSPMRPQQPNLQHLKSSPPGFPFPGPPNFPPQSMFGFPPHLPPPLLPPPGFGFAQNPMVPWPPVVHLPGQPQRMMGPLSQASRYIGPQNFYQVKDIRRPERRHSDPWGRQDQQQLDRPFNRGKGDRQRFYSDSHHLKRERHEKEWEQESERHRRRDRSQDKDRDRKSREEGHKDKERARLSHGDRGTDGKASRDSRNVDKKPDKPKSEDYEKDKEREKSKHREGEKDRDRYHKDRDHTDRTKSKR

SEQ ID NO: 64833 - protein, 345 aa, Homo sapiens
MRGMVAILIAFMKQRRMGLNDFIQKIANNSYACKHPEVQSILKISQPQEPELMNANPSPPPSPSQQINLGPSSNPHAKPSDFHFLKVIGKGSFGKVLLARHKAEEVFYAVKVLQKKAILKKKEEKHIMSERNVLLKNVKHPFLVGLHFSFQTADKLYFVLDYINGGELFYHLQRERCFLEPRARFYAAEIASALGYLHSLNIVYRDLKPENILLDSQGHIVLTDFGLCKENIEHNSTTSTFCGTPEYLAPEVLHKQPYDRTVDWWCLGAVLYEMLYGLPPFYSRNTAEMYDNILNKPLQLKPNITNSARHLLEGLLQKDRTKRLGAKDDFVSDVFLSSWAGRDVH

SEQ ID NO: 64834 - protein, 219 aa, Homo sapiens
MGEHIHYGAGNMNATSGIRHAMGPGTVNGGHPPSALAPAARFNNSQFMGPPVASQGGSLPASMQLQKLNNQYFNHHPYPHNHYMPDLHPAAGHQMNGTNQHFRDCNPKHSGGSSTPGGSGGSSTPGGSGSSSGGGAGSSNSGGGSGSGNMPASVAHVPAAMLPPNVIDTDFIDEEVLMSLVIEMGLDRIKELPELWLGQNEFDFMTDFVCKQQPSRVSC

SEQ ID NO: 64835 - protein, 1155 aa, Homo sapiens
MWTLRAPTGYIIQITFNDFDIEEAPNCIYDSLSLDNGESQTKFCGATAKGLSFNSSANEMHVSFSSDFSIQKKGFNASYIRVAVSLRNQKVILPQTSDAYQVSVAKSISIPELSAFTLCFEATKVGHEDSDWTAFSYSNASFTQLLSFGKAKSGYFLSISDSKCLLNNALPVKEKEDIFAESFEQLCLVWNNSLGSIGVNFKRNYETVPCDSTISKVIPGNGKLLLGSNQNEIVSLKGDIYNFRLWNFTMNAKILSNLSCNVKGNVVDWQNDFWNIPNLALKAESNLSCGSYLIPLPAAELASCADLGTLCQDGIIYRISVVIQNILRHPEVKVQSKVAEWLNSTFQNWNYTVYVVNISFHLSAGEDKIKVKRSLEDEPRLVLWALLVYNATNNTNLEGKIIQQKLLKNNESLDEGLRLHTVNVRQLGHCLAMEEPKGYYWPSIQPSEYVLPCPDKPGFSASRICFYNATNPLVTYWGPVDISNCLKEANEVANQILNLTADGQNLTSANITNIVEQVKRIVNKEENIDITLGSTLMNIFSNILSSSDSDLLESSSEALKTIDELAFKIDLNSTSHVNITTRNLALSVSSLLPGTNAISNFSIGLPSNNESYFQMDFESGQVDPLASVILPPNLLENLSPEDSVLVRRAQFTFFNKTGLFQDVGPQRKTLVSYVMACSIGNITIQNLKDPVQIKIKHTRTQEVHHPICAFWDLNKNKSFGGWNTSGCVAHRDSDASETVCLCNHFTHFGVLMDLPRSASQLDARNTKVLTFISYIGCGISAIFSAATLLTYVAFEKLRRDYPSKILMNLSTALLFLNLLFLLDGWITSFNVDGLCIAVAVLLHFFLLATFTWMGLEAIHMYIALVKVFNTYIRRYILKFCIIGWGLPALVVSVVLASRNNNEVYGKESYGKEKGDEFCWIQDPVIFYVTCAGYFGVMFFLNIAMFIVVMVQICGRNGKRSNRTLREEVLRNLRSVVSLTFLLGMTWGFAFFAWGPLNIPFMYLFSIFNSLQGLFIFIFHCAMKENVQKQWRQHLCCGRFRLADNSDWSKTATNIIKKSSDNLGKSLSSSSIGSNSTYLTSKSKSSSTTYFKRNSHTDSASMDKSLSKLAHADGDQTSIIPVHQVIDKVKGYCNAHSDNFYKNIIMSDTFSHSTKF

SEQ ID NO: 64836 - protein, 228 aa, Homo sapiens
MAILLSYCSILCNYKAIEMPSHQTYGGSWKFLTFIDLVIQAVFFGICVLTDLSSLLTRGSGNQEQERQLKKLISLRDWMLAVLAFPVGVFVVAVFWIIYAYDREMIYPKLLDNFIPGWLNHGMHTTVLPFILIEMRTSHHQYPSRSSGLTAICTFSVGYILWVCWVHHVTGMWVYPFLEHIGPGARIIFFGSTTILMNFLYLLGEVLNNYIWDTQKSMEEEKEKPKLE

SEQ ID NO: 64837 - protein, 2407 aa, Homo sapiens [sequence omitted]

SEQ ID NO: 64838 - protein, 353 aa, Homo sapiens
MLLFRLLQGLVSKGNWMAGYTLITEFVGSGSRRTVAIMYQMAFTVGLVALTGLAYALPHWRWLQLAVSLPTFLFLLYYWCVPESPRWLLSQKRNTEAIKIMDHIAQKNGKLPPADLKMLSLEEDVTEKLSPSFADLFRTPRLRKRTFILMYLWFTDSVLYQGLILHMGATSGNLYLDFLYSALVEIPGAFIALITIDRVGRIYPMAMSNLLAGAACLVMIFISPDLHWLNIIIMCVGRMGITIAIQMICLVNAELYPTFVRNLGVMVCSSLCDIGGIITPFIVFRLREVWQALPLILFAVLGLLAAGVTLLLPETKGVALPETMKDAENLGRKAKPKENTIYLKVQTSEPSGT

SEQ ID NO: 64839 - protein, 87 aa, Homo sapiens
MSTHFWGPVANWGLPIAAINDMKKSPEIISGRMTFALCCYSLTFMRFAYKVQPRNWLLFACHATNEVAQLIQGGRLIKHEMTKTASA

SEQ ID NO: 64840 - protein, 301 aa, Homo sapiens
MRDPASKRSRGFGFVTFSSMAEVDAAMAARPHSIDGRVVEPKRAVAREESGKPGAHVTVKKLFVGGIKEDTEEHHLRDYFEEYGKIDTIEIITDRQSGKKRGFGFVTFDDHDPVDKIVLQKYHTINGHNAEVRKALSRQEMQEVQSSRSGRGGNFGFGDSRGGGGNFGPGPGSNFRGGSDGYGSGRGFGDGYNGYGGGPGGGNFGGSPGYGGGRGGYGGGGPGYGNQGGGYGGGYDNYGGGNYGSGNYNDFGNYNQQPSNYGPMKSGNFGGSRNMGGPYGGGNYGPGGSGGSGGYGGRSRY

SEQ ID NO: 64841 - protein, 893 aa, Homo sapiens
MEEDGVRKCKKCEGPCRKVCNGIGIGEFKDSLSINATNIKHFKNCTSISGDLHILPVAFRGDSFTHTPPLDPQELDILKTVKEITGFLLIQAWPENRTDLHAFENLEIIRGRTKQHGQFSLAVVSLNITSLGLRSLKEISDGDVIISGNKNLCYANTINWKKLFGTSGQKTKIISNRGENSCKATGQVCHALCSPEGCWGPEPRDCVSCRNVSRGRECVDKCNLLEGEPREFVENSECIQCHPECLPQAMNITCTGRGPDNCIQCAHYIDGPHCVKTCPAGVMGENNTLVWKYADAGHVCHLCHPNCTYGCTGPGLEGCPTNGPKIPSIATGMVGALLLLLVVALGIGLFMRRRHIVRKRTLRRLLQERELVEPLTPSGEAPNQALLRILKETEFKKIKVLGSGAFGTVYKGLWIPEGEKVKIPVAIKELREATSPKANKEILDEAYVMASVDNPHVCRLLGICLTSTVQLITQLMPFGCLLDYVREHKDNIGSQYLLNWCVQIAKGMNYLEDRRLVHRDLAARNVLVKTPQHVKITDFGLAKLLGAEEKEYHAEGGKVPIKWMALESILHRIYTHQSDVWSYGVTVWELMTFGSKPYDGIPASEISSILEKGERLPQPPICTIDVYMIMVKCWMIDADSRPKFRELIIEFSKMARDPQRYLVIQGDERMHLPSPTDSNFYRALMDEEDMDDVVDADEYLIPQQGFFSSPSTSRTPLLSSLSATSNNSTVACIDRNGLQSCPIKEDSFLQRYSSDPTGALTEDSIDDTFLPVPEYINQSVPKRPAGSVQNPVYHNQPLNPAPSRDPHYQDPHSTAVGNPEYLNTVQPTCVNSTFDSPAHWAQKGSHQISLDNPDYQQDFFPKEAKPNGIFKGSTAENAEYLRVAPQSSEFIGA

SEQ ID NO: 64842 - protein, 575 aa, Homo sapiens
MPVPSSFNDISQDWRLRHFVGWVWYEREVILPERWTQDLRTRVVLRIGSAHSYAIVWVNGVDTLEHEGGYLPFEADISNLVQVGPLPSRLRITIAINNTLTPTTLPPGTIQYLTDTSKYPKGYFVQNTYFDFFNYAGLQRSVLLYTTPTTYIDDITVTTSVEQDSGLVNYQISVKGSNLFKLEVRLLDAENKVVANGTGTQGQLKVPGVSLWWPYLMHERPAYLYSLEVQLTAQTSLGPVSDFYTLPVGIRTVAVTKSQFLINGKPFYFHGVNKHEDADIRGKGFDWPLLVKDFNLLRWLGANAFRTSHYPYAEEVMQMCDRYGIVVIDECPGVGLALPQFFNNVSLHHHMQVMEEVVRRDKNHPAVVMWSVANEPASHLESAGYYLKMVIAHTKSLDPSRPVTFVSNSNYAADKGAPYVDVICLNSYYSWYHDYGHLELIQLQLATQFENWYKKYQKPIIQSEYGAETIAGFHQDPPLMFTEEYQKSLLEQYHLGLDQKRRKYVVGELIWNFADFMTEQSPTRVLGNKKGIFTRQRQPKSAAFLLRERYWKIANETRYPHSVAKSQCLENSLFT

SEQ ID NO: 64843 - protein, 885 aa, Homo sapiens
MVLSGCAIIVRGQPRGGPPPERQINLSNIRAGNLARRAAATQPDAKDTPDEPWAFPAREFLRKKLIGKEVCFTIENKTPQGREYGMIYLGKDTNGENIAESLVAEGLATRREGMRANNPEQNRLSECEEQAKAAKKGMWSEGNGSHTIRDLKYTIENPRHFVDSHHQKPVNAIIEHVRDGSVVRALLLPDYYLVTVMLSGIKCPTFRREADGSETPEPFAAEAKFFTESRLLQRDVQIILESCHNQNILGTILHPNGNITELLLKEGFARCVDWSIAVYTRGAEKLRAAERFAKERRLRIWRDYVAPTANLDQKDKQFVAKVMQVLNADAIVVKLNSGDYKTIHLSSIRPPRLEGENTQDKNKKLRPLYDIPYMFEAREFLRKKLIGKKVNVTVDYIRPASPATETVPAFSERTCATVTIGGINIAEALVSKGLATVIRYRQDDDQRSSHYDELLAAEARAIKNGKGLHSKKEVPIHRVADISGDTQKAKQFLPFLQRAGRSEAVVEYVFSGSRLKLYLPKETCLITFLLAGIECPRGARNLPGLVQEGEPFSEEATLFTKELVLQREVEVEVESMDKAGNFIGWLHIDGANLSVLLVEHALSKVHFTAERSSYYKSLLSAEEAAKQKKEKVWAHYEEQPVEEVMPVLEEKERSASYKPVFVTEITDDLHFYVQDVETGTQLEKLMENMRNDIASHPPVEGSYAPRRGEFCIAKFVDGEWYRARVEKVESPAKIHVFYIDYGNREVLPSTRLGTLSPAFSTRVLPAQATEYAFAFIQVPQDDDARTDAVDSVVRDIQNTQCLLNVEHLSAGCPHVTLQFADSKGDVGLGLVKEGLVMVEVRKEKQFQKVITEYLNAQESAKSARLNLWRYGDFRADDADEFGYSR

SEQ ID NO: 64844 - protein, 621 aa, Homo sapiens
MDLIALGVGSTLGAGVYVLAGEVAKADSGPSIVVSFLIAALASVMAGLCYAEFGARVPKTGSAYLYTYVTVGELWAFITGWNLILSYVIGTSSVARAWSGTFDELLSKQIGQFLRTYFRMNYTGLAEYPDFFAVCLILLLAGLLSFGVKESAWVNKVFTAVNILVLLFVMVAGFVKGNVANWKISEEFLKNISASAREPPSENGTSIYGAGGFMPYGFTGTLAGAATCFYAFVGFDCIATTGEEVRNPQKAIPIGIVTSLLVCFMAYFGVSAALTLMMPYYLLDEKSPLPVAFEYVGWGPAKYVVAAGSLCALSTSLLGSMFPLPRILFAMARDGLLFRFLARVSKRQSPVAATLTAGVISALMAFLFDLKALVDMMSIGTLMAYSLVAACVLILRYQPGLSYDQPKCSPEKDGLGSSPRVTSKSESQVTMLQRQGFSMRTLFCPSLLPTQQSASLVSFLVGFLAFLVLGLSVLTTYGVHAITRLEAWSLALLALFLVLFVAIVLTIWRQPQNQQKVAFMVPFLPFLPAFSILVNIYLMVQLSADTWVRFSIWMAIGFLIYFSYGIRHSLEGHLRDENNEEDAYPDNVHAAAEEKSAIQANDHHPRNLSSPFIFHEKTSEF

SEQ ID NO: 64845 - protein, 409 aa, Homo sapiens
MERKESLPVKPRPKKENGKSVHWKLGADKEVWVWVMGEHHLDKPYDVLCNEIIAERARLKAEQEAEEPRKTHSEEFTNSLKTKSQYHDLQAPDNQQTKDIWKKVAEKEELEQGSRPAPTLEEEKIRSLSSSSRNIQQMLADSINRMKAYAFHQKKESMKKKQDEEINQIEEERTKQICKSWKEDSEWQASLRKSKAADEKRRSLAKQAREDYKRLSLGAQKGRGGERLQSPLRVPQKPERPPLPPKPQFLNSGAYPQKPLRNQGVVRTLSSSAQEDIIRWFKEEQLPLRAGYQKTSDTIAPWFHGILTLKKANELLLSTGMPGSFLIRVSERIKGYALSYLSEDGCKHFLIDASADAYSFLGVDQLQHATLADLVEYHKEEPITSLGKELLLYPCGQQDQLPDYLELFE

SEQ ID NO: 64846 - protein, 303 aa, Homo sapiens
MLLRDVKALTLHYDRYTTSRRLDPIPQLKCVGGTAGCDSYTPKVIQCQNKGWDGYDVQWECKTDLDIAYKFGKTVVSCEGYESSEDQYVLRGSCGLEYNLDYTELGLQKLKESGKQHGFASFSDYYYKWSSADSCNMSGLITIVVLLGIAFVVYKLFLSDGQYSPPPYSEYPPFSHRYQRFTNSAGPPPPGFKSEFTGPQNTGHGATSGFGSAFTGQQGYENSGPGFWTGLGTGGILGYLFGSNRAATPFSDSWYYPSYPPSYPGTWNRAYSPLHGGSGSYSVCSNSDTKTRTASGYGGTRRR

SEQ ID NO: 64847 - protein, 336 aa, Homo sapiens [sequence omitted]

SEQ ID NO: 64848 - protein, 445 aa, Homo sapiens
MGSRSIDDFHQGTKAALSGGTTMIIDFAIPQKGGSLIEAFETWRSWADPKVCCDYSLHVAVTWWSDQVKEEMKILVQDKGVNSFKMFMAYKDLYMVTDLELYEAFSRCKEIGAIAQVHAENGDLIAEGAKKMLALGITGPEGHELCRPEAVEAEATLRAITIASAVNCPLYIVHVMSKSAAKVIADARRDGKVVYGEPIAASLGTDGTHYWNKEWHHAAHHVMGPPLRPDPSTPDFLMNLLANDDLTTTGTDNCTFNTCQKALGKDDFTKIPNGVNGVEDRMSVIWEKGVHSGKMDENRFVAVTSTNAAKIFNLYPRKGRIAVGSDADIVIWDPKGTRTISAKTHHQAVNFNIFEGMVCHGVPLVTISRGKVVYEAGVFSVTAGDGKFIPRKPFAEYIYKRIKQRDRTCTPTPVERAPYKGEVATLKSRVTKEDATAGTRKQAHP

SEQ ID NO: 64849 - protein, 409 aa, Homo sapiens
MSSAYLSTKDQYPYLKSVCEMAENGVKTITSVAMTSALPIIQKLEPQIAVANTYACKGLDRIEERLPILNQPSTQIVANAKGAVTGAKDAVTTTVTGAKDSVASTITGVMDKTKGAVTGSVEKTKSVVSGSINTVLGSRMMQLVSSGVENALTKSELLVEQYLPLTEEELEKEAKKVEGFDLVQKPSYYVRLGSLSTKLHSRAYQQALSRVKEAKQKSQQTISQLHSTVHLIEFARKNVYSANQKIQDAQDKLYLSWVEWKRSIGYDDTDESHCAEHIESRTLAIARNLTQQLQTTCHTLLSNIQGVPQNIQDQAKHMGVMAGDIYSVFRNAASFKEVSDSLLTSSKGQLQKMKESLDDVMDYLVNNTPLNWLVGPFYPQLTESQNAQDQGAEMDKSSQETQRSEHKTH

SEQ ID NO: 64850 - protein, 723 aa, Homo sapiens
MNRVVRNNLRVRLGDVISIQPCPDVKYGKRIHVLPIDDTVEGITGNLFEVYLKPYFLEAYRPIRKGDIFLVRGGMRAVEFKVVETDPSPYCIVAPDTVIHCEGEPIKREDEEESLNEVGYDDIGGCRKQLAQIKEMVELPLRHPALFKAIGVKPPRGILLYGPPGTGKTLIARAVANETGAFFFLINGPEIMSKLAGESESNLRKAFEEAEKNAPAIIFIDELDAIAPKREKTHGEVERRIVSQLLTLMDGLKQRAHVIVMAATNRPNSIDPALRRFGRFDREVDIGIPDATGRLEILQIHTKNMKLADDVDLEQVANETHGHVGADLAALCSEAALQAIRKKMDLIDLEDETIDAEVMNSLAVTMDDFRWALSQSNPSALRETVVEVPQVTWEDIGGLEDVKRELQELVQYPVEHPDKFLKFGMTPSKGVLFYGPPGCGKTLLAKAIANECQANFISIKGPELLTMWFGESEANVREIFDKARQAAPCVLFFDELDSIAKARGGNIGDGGGAADRVINQILTEMDGMSTKKNVFIIGATNRPDIIDPAILRPGRLDQLIYIPLPDEKSRVAILKANLRKSPVAKDVDLEFLAKMTNGFSGADLTEICQRACKLAIRESIESEIRRERERQTNPSAMEVEEDDPVPEIRRDHFEEAMRFARRSVSDNDIRKYEMFAQTLQQSRGFGSFRFPSGNQGGAGPSQGSGGGTGGSVYTEDNDDDLYG

SEQ ID NO: 64851 - protein, 2518 aa, Homo sapiens
MVYDACRIIRERIPEAPAGPPSDFGLFLSDDDPKKGIWLEAGKALDYYMLRNGDTMEYRKKQRPLKIRMLDGTVKTIMVDDSKTVTDMLMTICARIGITNHDEYSLVRELMEEKKEEITGTLRKDKTLLRDEKKMEKLKQKLHTDDELNWLDHGRTLREQGVEEHETLLLRRKFFYSDQNVDSRDPVQLNLLYVQARDDILNGSHPVSFDKACEFAGFQCQIQFGPHNEQKHKAGFLDLKDFLPKEYVKQKGERKIFQAHKNCGQMSEIEAKVRYVKLARSLKTYGVSFFLVKEKMKGKNKLVPRLLGITKECVMRVDEKTKEVIQEWNLTNIKRWAASPKSFTLDFGDYQDGYYSVQTTEGEQIAQLIAGYIDIILKKKKSKDHFGLEGDEESTMLEDSVSPKKSTVLQQQYNRVGKVEHGSVALPAIMRSGASGPENFQVGSMPPAQQQITSGQMHRGHMPPLTSAQQALTGTINSSMQAVQAAQATLDDFDTLPPLGQDAASKAWRKNKMDESKHEIHSQVDAITAGTASVVNLTAGDPAETDYTAVGCAVTTISSNLTEMSRGVKLLAALLEDEGGSGRPLLQAAKGLAGAVSELLRSAQPASAEPRQNLLQAAGNVGQASGELLQQIGESDTDPHFQDALMQLAKAVASAAAALVLKAKSVAQRTEDSGLQTQVIAAATQCALSTSQLVACTKVVAPTISSPVCQEQLVEAGRLVAKAVEGCVSASQAATEDGQLLRGVGAAATAVTQALNELLQHVKAHATGAGPAGRYDQATDTILTVTENIFSSMGDAGEMVRQARILAQATSDLVNAIKADAEGESDLENSRKLLSAAKILADATAKMVEAAKGAAAHPDSEEQQQRLREAAEGLRMATNAAAQNAIKKKLVQRLEHAAKQAAASATQTIAAAQHAASTPKASAGPQPLLVQSCKAVAEQIPLLVQGVRGSQAQPDSPSAQLALIAASQSFLQPGGKMVAAAKASVPTIQDQASAMQLSQCAKNLGTALAELRTAAQKAQEACGPLEMDSALSVVQNLEKDLQEVKAAARDGKLKPLPGETMEKCTQDLGNSTKAVSSAIAQLLGEVAQGNENYAGIAARDVAGGLRSLAQAARGVAALTSDPAVQAIVLDTASDVLDKASSLIEEAKKAAGHPGDPESQQRLAQVAKAVTQALNRCVSCLPGQRDVDNALRAVGDASKRLLSDSLPPSTGTFQEAQSRLNEAAAGLNQAATELVQASRGTPQDLARASGRFGQDFSTFLEAGVEMAGQAPSQEDRAQVVSNLKGISMSSSKLLLAAKALSTDPAAPNLKSQLAAAARAVTDSINQLITMCTQQAPGQKECDNALRELETVRELLENPVQPINDMSYFGCLDSVMENSKVLGEAMTGISQNAKNGNLPEFGDAISTASKALCGFTEAAAQAAYLVGVSDPNSQAGQQGLVEPTQFARANQAIQMACQSLGEPGCTQAQVLSAATIVAKHTSALCNSCRLASARTTNPTAKRQFVQSAKEVANSTANLVKTIKALDGAFTEENRAQCRAATAPLLEAVDNLSAFASNPEFSSIPAQISPEGRAAMEPIVISAKTMLESAGGLIQTARALAVNPRDPPSWSVLAGHSRTVSDSIKKLITSMRDKAPGQLECETAIAALNSCLRDLDQASLAAVSQQLAPREGISQEALHTQMLTAVQEISHLIEPLANAARAEASQLGHKVSQMAQYFEPLTLAAVGAASKTLSHPQQMALLDQTKTLAESALQLLYTAKEAGGNPKQAAHTQEALEEAVQMMTEAVEDLTTTLNEAASAAGVVGGMVDSITQAINQLDEGPMGEPEGSFVDYQTTMVRTAKAIAVTVQEMVTKSNTSPEELGPLANQLTSDYGRLASEAKPAAVAAENEEIGSHIKHRVQELGHGCAALVTKAGALQCSPSDAYTKKELIECARRVSEKVSHVLAALQAGNRGTQACITAASAVSGIIADLDTTIMFATAGTLNREGTETFADHREGILKTAKVLVEDTKVLVQNAAGSQEKLAQAAQSSVATITRLADVVKLGAASLGAEDPETQVVLINAVKDVAKALGDLISATKAAAGKVGDDPAVWQLKNSAKVMVTNVTSLLKTVKAVEDEATKGTRALEATTEHIRQELAVFCSPEPPAKTSTPEDFIRMTKGITMATAKAVAAGNSCRQEDVIATANLSRRAIADMLRACKEAAYHPEVAPDVRLRALHYGRECANGYLELLDHVLLTLQKPSPELKQQLTGHSKRVAGSVTELIQAAEAMKGTEWVDPEDPTVIAENELLGAAAAIEAAAKKLEQLKPRAKPKEADESLNFEEQILEAAKSIAAATSALVKAASAAQRELVAQGKVGAIPANALDDGQWSQGLISAARMVAAATNNLCEAANAAVQGHASQEKLISSAKQVAASTAQLLVACKVKADQDSEAMKRLQAAGNAVKRASDNLVKAAQKAAAFEEQENETVVVKEKMVGGIAQIIAAQEEMLRKERELEEARKKLAQIRQQQYKFLPSELRDEH

SEQ ID NO: 64852 - protein, 344 aa, Homo sapiens [sequence omitted]

SEQ ID NO: 64853 - protein, 242 aa, Homo sapiens
MNGFQNRKPRKGKVFQEPLFYEAPRSVDWREKGYVTPVKNQGQCGSCWAFSATGALEGQMFRKTGRLISLSEQNLVDCSGPQGNEGCNGGLMDYAFQYVQDNGGLDSEESYPYEATEESCKYNPKYSVANDTGFVDIPKQEKALMKAVATVGPISVAIDAGHESFLFYKEGIYFEPDCSSEDMDHGVLVVGYGFESTESDNNKYWLVKNSWGEEWGMGGYVKMAKDRRNHCGIASAASYPTV

SEQ ID NO: 64854 - protein, 624 aa, Homo sapiens
MEEKFESFSSFPGVESSYNVLPGKKGHCLVKGITMYNKAVWSPEPCTTCLCSDGRVLCDETMCHPQRCPQTVIPEGECCPVCSATVSYSLLSGIALNDRNEFSGDSSEQREPTNLLHKQLPPPQVGMDRIVRKEALQSEEDEEVKEEDTEQKRETPESRNQGQLYSEGDSRGGDRKQRPGEERRLAHQQQRQGREEEEDEEEEGEEGEEDEEDEEDPVRGDMFRMPSRSPLPAPPRGTLRLPSGCSLSYRTISCINAMLTQIPPLTAPQITSLELTGNSIASIPDEAFNGLPNLERLDLSKNNITSSGIGPKAFKLLKKLMRLNMDGNNLIQIPSQLPSTLEELKVNENNLQAIDEESLSDLNQLVTLELEGNNLSEANVNPLAFKPLKSLAYLRLGKNKFRIIPQGLPGSIEELYLENNQIEEITEICFNHTRKINVIVLRYNKIEENRIAPLAWINQENLESIDLSYNKLYHVPSYLPKSLLHLVLLGNQIERIPGYVFGHMEPGLEYLYLSFNKLADDGMDRVSFYGAYHSLRELFLDHNDLKSIPPGIQEMKALHFLRLNNNKIRNILPEEICNAEEDDDSNLEHLHLENNYIKIREIPSYTFSCIRSYSSIVLKPQNIK

SEQ ID NO: 64855 - protein, 266 aa, Homo sapiens
MGQQVAKVVESKNVALPKGTIVLASPGWTTHSISDGKDLEKLLTEWPDTIPLSLALGTVGMPGLTAYFGLLEICGVKGGETVMVNAAAGAVGSVVGQIAKLKGCKVVGAVGSDEKVAYLQKLGFDVVFNYKTVESLEETLKKASPDGYDCYFDNVGGEFSNTVIGQMKKFGRIAICGAISTYNRTGPLPPGPPPEIVIYQELRMEAFVVYRWQGDARQKALKDLLKWVLEGKIQYKEYIIEGFENMPAAFMGMLKGDNLGKTIVKA

SEQ ID NO: 64856 - protein, 1561 aa, Homo sapiens
MTQLLAGVFLAFLALATEGGVLKKVIRHKRQSGVNATLPEENQPVVFNHVYNIKLPVGSQCSVDLESASGEKDLAPPSEPSESFQEHTVDGENQIVFTHRINIPRRACGCAAAPDVKELLSRLEELENLVSSLREQCTAGAGCCLQPATGRLDTRPFCSGRGNFSTEGCGCVCEPGWKGPNCSEPECPGNCHLRGRCIDGQCICDDGFTGEDCSQLACPSDCNDQGKCVNGVCICFEGYAGADCSREICPVPCSEEHGTCVDGLCVCHDGFAGDDCNKPLCLNNCYNRGRCVENECVCDEGFTGEDCSELICPNDCFDRGRCINGTCYCEEGFTGEDCGKPTCPHACHTQGRCEEGQCVCDEGFAGVDCSEKRCPADCHNRGRCVDGRCECDDGFTGADCGELKCPNGCSGHGRCVNGQCVCDEGYTGEDCSQLRCPNDCHSRGRCVEGKCVCEQGFKGYDCSDMSCPNDCHQHGRCVNGMCVCDDGYTGEDCRDRQCPRDCSNRGLCVDGQCVCEDGFTGPDCAELSCPNDCHGQGRCVNGQCVCHEGFMGKDCKEQRCPSDCHGQGRCVDGQCICHEGFTGLDCGQHSCPSDCNNLGQCVSGRCICNEGYSGEDCSEVSPPKDLVVTEVTEETVNLAWDNEMRVTEYLVVYTPTHEGGLEMQFRVPGDQTSTIIQELEPGVEYFIRVFAILENKKSIPVSARVATYLPAPEGLKFKSIKETSVEVEWDPLDIAFETWEIIFRNMNKEDEGEITKSLRRPETSYRQTGLAPGQEYEISLHIVKNNTRGPGLKRVTTTRLDAPSQIEVKDVTDTTALITWFKPLAEIDGIELTYGIKDVPGDRTTIDLTEDENQYSIGNLKPDTEYEVSLISRRGDMSSNPAKETFTTGLDAPRNLRRVSQTDNSITLEWRNGKAAIDSYRIKYAPISGGDHAEVDVPKSQQATTKTTLTGLRPGTEYGIGVSAVKEDKESNPATINAATELDTPKDLQVSETAETSLTLLWKTPLAKFDRYRLNYSLPTGQWVGVQLPRNTTSYVLRGLEPGQEYNVLLTAEKGRHKSKPARVKASTAMGSPKEVIFSDITENSATVSWRAPTAQVESFRITYVPITGGTPSMVTVDGTKTQTRLVKLIPGVEYLVSIIAMKGFEESEPVSGSFTTALDGPSGLVTANITDSEALARWQPAIATVDSYVISYTGEKVPEITRTVSGNTVEYALTDLEPATEYTLRIFAEKGPQKSSTITAKFTTDLDSPRDLTATEVQSETALLTWRPPRASVTGYLLVYESVDGTVKEVIVGPDTTSYSLADLSPSTHYTAKIQALNGPLRSNMIQTIFTTIGLLYPFPKDCSQAMLNGDTTSGLYTIYLNGDKAEALEVFCDMTSDGGGWIVFLRRKNGRENFYQNWKAYAAGFGDRREEFWLGLDNLNKITAQGQYELRVDLRDHGETAFAVYDKFSVGDAKTRYKLKVEGYSGTAGDSMAYHNGRSFSTFDKDTDSAITNCALSYKGAFWYRNCHRVNLMGRYGDNNHSQGVNWFHWKGHEHSIQFAEMKLRPSNFRNLEGRRKRA

SEQ ID NO: 64857 - protein, 237 aa, Homo sapiens
MCIKIIKEYERAIIFRLGRILQGGAKGPGLFFILPCTDSFIKVDMRTISFDIPPQEILTKDSVTISVDGVVYYRVQNATLAVANITNADSATRLLAQTTLRNVLGTKNLSQILSDREEIAHNMQSTLDDATDAWGIKVERVEIKDVKLPVQLQRAMAAEAEASREARAKVIAAEGEMNASRALKEASMVITESPAALQLRYLQTLTTIAAEKNSTIVFPLPIDMLQGIIGAKHSHLG

SEQ ID NO: 64858 - protein, 175 aa, Homo sapiens
MVAAGTKLFIHGGLAGDRFYDDLHCIDISDMKWQKLNPTGAAPAGCAAHSAVAMGKHVYIFGGMTPAGALDTMYQYHTEEQHWTLLKFDTLLPPGRLDHSMCIIPWPVTCASEKEDSNSLTLNHEAEKEDSADKVMSHSGDSHEESQTATLLCLVFGGMNTEGEIYDDCIVTVVD

SEQ ID NO: 64859 - protein, 2255 aa, Homo sapiens
MAAHEERVNEVNQFAAKLIQEQHPEEELIKTKQDEVNAAWQRLKGLALQRQGKLFGAAEVQRFNRDVDETISWIKEKEQLMASDDFGRDLASVQALLRKHEGLERDLAALEDKVKALCAEADRLQQSHPLSATQIQVKREELITNWEQIRTLAAERHARLNDSYRLQRFLADFRDLTSWVTEMKALINADELASDVAGAEALLDRHQEHKGEIDAHEDSFKSADESGQALLAAGHYASDEVREKLTVLSEERAALLELWELRRQQYEQCMDLQLFYRDTEQVDNWMSKQEAFLLNEDLGDSLDSVEALLKKHEDFEKSLSAQEEKITALDEFATKLIQNNHYAMEDVATRRDALLSRRNALHERAMRRRAQLADSFHLQQFFRDSDELKSWVNEKMKTATDEAYKDPSNLQGKVQKHQAFEAELSANQSRIDALEKAGQKLIDVNHYAKDEVAARMNEVISLWKKLLEATELKGIKLREANQQQQFNRNVEDIELWLYEVEGHLASDDYGKDLTNVQNLQKKHALLEADVAAHQDRIDGITIQARQFQDAGHFDAENIKKKQEALVARYEALKEPMVARKQKLADSLRLQQLFRDVEDEETWIREKEPIAASTNRGKDLIGVQNLLKKHQALQAEIAGHEPRIKAVTQKGNAMVEEGHFAAEDVKAKLHELNQKWEALKAKASQRRQDLEDSLQAQQYFADANEAESWMREKEPIVGSTDYGKDEDSAEALLKKHEALMSDLSAYGSSIQALREQAQSCRQQVAPTDDETGKELVLALYDYQEKSPREVTMKKGDILTLLNSTNKDWWKVEVNDRQGFVPAAYVKKLDPAQSASRENLLEEQGSIALRQEQIDNQYHSLLELGEKRKGMLEKSCKKFMLFREANELQQWINEKEAALTSEEVGADLEQVEVLQKKFDDFQKDLKANESRLKDINKVAEDLESEGLMAEEVQAVQQQEVYGMMPRDETDSKTASPWKSARLMVHTVATFNSIKELNERWRSLQQLAEERSQLLGSAHEVQRFHRDADETKEWIEEKNQALNTDNYGHDLASVQALQRKHEGFERDLAALGDKVNSLGETAERLIQSHPESAEDLQEKCTELNQAWSSLGKRADQRKAKLGDSHDLQRFLSDFRDLMSWINGIRGLVSSDELAKDVTGAEALLERHQEHRTEIDARAGTFQAFEQFGQQLLAHGHYASPEIKQKLDILDQERADLEKAWVQRRMMLDQCLELQLFHRDCEQAENWMAAREAFLNTEDKGDSLDSVEALIKKHEDFDKAINVQEEKIAALQAFADQLIAAGHYAKGDISSRRNEVLDRWRRLKAQMIEKRSKLGESQTLQQFSRDVDEIEAWISEKLQTASDESYKDPTNIQSKHQKHQAFEAELHANADRIRGVIDMGNSLIERGACAGSEDAVKARLAALADQWQFLVQKSAEKSQKLKEANKQQNFNTGIKDFDFWLSEVEALLASEDYGKDLASVNNLLKKHQLLEADISAHEDRLKDLNSQADSLMTSSAFDTSQVKDKRDTINGRFQKIKSMAASRRAKLNESHRLHQFFRDMDDEESWIKEKKLLVGSEDYGRDLTGVQNLRKKHKRLEAELAAHEPAIQGVLDTGKKLSDDNTIGKEEIQQRLAQFVEHWKELKQLAAARGQRLEESLEYQQFVANVEEEEAWINEKMTLVASEDYGDTLAAIQGLLKKHEAFETDFTVHKDRVNDVCTNGQDLIKKNNHHEENISSKMKGLNGKVSDLEKAAAQRKAKLDENSAFLQFNWKADVVESWIGEKENSLKTDDYGRDLSSVQTLLTKQETFDAGLQAFQQEGIANITALKDQLLAAKHVQSKAIEARHASLMKRWSQLLANSAARKKKLLEAQSHFRKVEDLFLTFAKKASAFNSWFENAEEDLTDPVRCNSLEEIKALREAHDAFRSSLSSAQADFNQLAELDRQIKSFRVASNPYTWFTMEALEETWRNLQKIIKERELELQKEQRRQEENDKLRQEFAQHANAFHQWIQETRTYLLDGSCMVEESGTLESQLEATKRKHQEIRAMRSQLKKIEDLGAAMEEALILDNKYTEHSTVGLAQQWDQLDQLGMRMQHNLEQQIQARNTTGVTEEALKEFSMMFKHFDKDKSGRLNHQEFKSCLRSLGYDLPMVEEGEPDPEFEAILDTVDPNRDGHVSLQEYMAFMISRETENVKSSEEIESAFRALSSEGKPYVTKEELYQNLTREQADYCVSHMKPYVDGKGRELPTAFDYVEFTRSLFVN

SEQ ID NO: 64860 - protein, 713 aa, Homo sapiens
MSTLETVRIFLTEQPLEGLEKLYQEPRELPPEERAQNVTRLLRKQAEEVNTEWEKLNLHSADWQRKIDETLERLRELQEATDELDLKLRQAEVIKGSWQPVGDLLIDSLQDHLEKVKALRGEIAPLKENVSHVNDLARQLTTLGIQLSPYNLSTLEDLNTRWKLLQVAVEDRVRQLHEAHRDFGPASQHFLSTSVQGPWERAISPNKVPYYINHETQTTCWDHPKMTELYQSLADLNNVRFSAYRTAMKLRRLQKALCLDLLSLSAACDALDQHNLKQNDQPMDILQIINCLTTIYDRLEQEHNNLVNVPLCVDMCLNWLLNVYDTGRTGRIRVLSFKTGIISLCKAHLEDKYRYLFKQVASSTGFCDQRRLGLLLHDSIQIPRQLGEVASFGGSNIEPSVRSCFQFANNKPEIEAALFLDWMRLEPQSMVWLPVLHRVAAAETAKHQAKCNICKECPIIGFRYRSLKHFNYDICQSCFFSGRVAKGHKMHYPMVEYCTPTTSGEDVRDFAKVLKNKFRTKRYFAKHPRMGYLPVQTVLEGDNMETNLQAEYDRLKQQHEHKGLSPLPSPPEMMPTSPQSPRDAELIAEAKLLRQHKGRLEARMQILEDHNKQLESQLHRLRQLLEQPQAEAKVNGTTVSSPSTSLQRSDSSQPMLLRVVGSQTSDSMGEEDLLSPPQDTSTGLEEVMEQLNNSFPSSRGRNTPGKPMREDTM

SEQ ID NO: 64861 - protein, 215 aa, Homo sapiens [sequence omitted]

SEQ ID NO: 64862 - protein, 515 aa, Homo sapiens
MFDVVVIGGGISGLSAAKLLTEYGVSVLVLEARDRVGGRTYTIRNEHVDYVDVGGAYVGPTQNRILRLSKELGIETYKVNVSERLVQYVKGKTYPFRGAFPPVWNPIAYLDYNNLWRTIDNMGKEIPTDAPWEAQHADKWDKMTMKELIDKICWTKTARRFAYLFVNINVTSEPHEVSALWFLWYVKQCGGTTRIFSVTNGGQERKFVGGSGQVSERIMDLLGDQVKLNHPVTHVDQSSDNIIIETLNHEHYECKYVINAIPPTLTAKIHFRPELPAERNQLIQRLPMGAVIKCMMYYKEAFWKKKDYCGCMIIEDEDAPISITLDDTKPDGSLPAIMGFILARKADRLAKLHKEIRKKKICELYAKVLGSQEALHPVHYEEKNWCEEQYSGGCYTAYFPPGIMTQYGRVIRQPVGRIFFAGTETATKWSGYMEGAVEAGERAAREVLNGLGKVTEKDIWVQEPESKDVPAVEITHTFWERNLPSVSGLLKIIGFSTSVTALGFVLYKYKLLPRS

SEQ ID NO: 64863 - protein, 246 aa, Homo sapiens
MDAPVSSVALRQSGGYVATIGTKFCALNWKEQSAVVLATVDNDKKNNRFNDGKVDPAGRYFAGTMAEETAPAVLERHQGALYSLFPDHHVKKYFDQVDISNGLDWSLDHKIFYYIDSLSYSVDAFDYDLQTGQISNRRSVYKLEKEEQIPDGMCIDAEGKLWVACYNGGRVIRLDPVTGKRLQTVKLPVDKTTSCCFGGKNYSEMYVTCARDGMDPEGLLRQPEAGGIFKITGLGVKGIAPYSYAG

SEQ ID NO: 64864 - protein, 4177 aa, Homo sapiens
MKYPPSATTLHFEFYADPGAEVKIEKRTTSNTLHYIHIEQLDKISESPSEIMESLTKMYSIPKDKQMLLFTHIRLAHGFSNHRKRLQAVQARLHAISILVYSNALQESANSILYNGLIEELVDVLQITDKQLMEIKAASLRTLTSIVHLERTPKLSSIIDCTGTASYHGFLPVLVRNCIQAMIDPSMDPYPHQFATALFSFLYHLASYDAGGEALVSCGMMEALLKVIKFLGDEQDQITFVTRAVRVVDLITNLDMAAFQSHSGLSIFIYRLEHEVDLCRKECPFVIKPKIQRPNTTQEGEEMETDMDGVQCIPQRAALLKSMLNFLKKAIQDPAFSDGIRHVMDGSLPTSLKHIISNAEYYGPSLFLLATEVVTVFVFQEPSLLSSLQDNGLTDVMLHALLIKDVPATREVLGSLPNVFSALCLNARGLQSFVQCQPFERLFKVLLSPDYLPAMRRRRSSDPLGDTASNLGSAVDELMRHQPTLKTDATTAIIKLLEEICNLGRDPKYICQKPSIQKADGTATAPPPRSNHAAEEASSEDEEEEEVQAMQSFNSTQQNETEPNQQVVGTEERIPIPLMDYILNVMKFVESILSNNTTDDHCQEFVNQKGLLPLVTILGLPNLPIDFPTSAACQAVAGVCKSILTLSHEPKVLQEGLLQLDSILSSLEPLHRPIESPGGSVLLRELACAGNVADATLSAQATPLLHALTAAHAYIMMFVHTCRVGQSEIRSISVNQWGSQLGLSVLSKLSQLYCSLVWESTVLLSLCTPNSLPSGCEFGQADMQKLVPKDEKADGEQDGAAGSMDASTQGLLEGIGLDGDTLAPMETDEPTASDSKGKSKITPAMAARIKQIKPLLSASSRLGRALAELFGLLVKLCVGSPVRQRRSHHAASTTTAPTPAARSTASALTKLLTKGLSWQPPPYTPTPRFRLTFFICSVGFTSPMLFDERKYPYHLMLQKFLCSGGHNALFETFNWALSMGGKVPVSEGLEHSDLPDGTGEFLDAWLMLVEKMVNPTTVLESPHSLPAKLPGGVQNFPQFSALRFLVVTQKAAFTCIKNLWNRKPLKVYGGRMAESMLAILCHILRGEPVIRERLSKEKEGSRGEEDTGQEEGGSRREPQVNQQQLQQLMDMGFTREHAMEALLNTSTMEQATEYLLTHPPPIMGGVVRDLSMSEEDQMMRAIAMSLGQDIPMDQRAESPEEVACRKEEEERKAREKQEEEEAKCLEKFQDADPLEQDELHTFTDTMLPGCFHLLDELPDTVYRVCDLIMTAIKRNGADYRDMILKQVVNQVWEAADVLIKAALPLTTSDTKTVSEWISQMATLPQASNLATRILLLTLLFEELKLPCAWVVESSGILNVLIKLLEVVQPCLQAAKEQKEVQTPKWITPVLLLIDFYEKTAISSKRRAQMTKYLQSNSNNWRWFDDRSGRWCSYSASNNSTIDSAWKSGETSVRFTAGRRRYTVQFTTMVQVNEETGNRRPVMLTLLRVPRLNKNSKNSNGQELEKTLEESKEMDIKRKENKGNDTPLALESTNTEKETSLEETKIGEILIQGLTEDMVTVLIRACVSMLGVPVDPDTLHATLRLCLRLTRDHKYAMMFAELKSTRMILNLTQSSGFNGFTPLVTLLLRHIIEDPCTLRHTMEKVVRSAATSGAGSTTSGVVSGSLGSREINYILRVLGPAACRNPDIFTEVANCCIRIALPAPRGSGTASDDEFENLRIKGPNAVQLVKTTPLKPSPLPVIPDTIKEVIYDMLNALAAYHAPEEADKSDPKPGVMTQEVGQLLQDMGDDVYQQYRSLTRQSSDFDTQSGFSINSQVFAADGASTETSASGTSQGEASTPEESRDGKKDKEGDRASEEGKQKGKGSKPLMPTSTILRLLAELVRSYVGIATLIANYSYTVGQSELIKEDCSVLAFVLDHLLPHTQNAEDKDTPALARLFLASLAAAGSGTDAQVALVNEVKAALGRALAMAESTEKHARLQAVMCIISTIMESCPSTSSFYSSATAKTQHNGMNNIIRLFLKKGLVNDLARVPHSLDLSSPNMANTVNAALKPLETLSRIVNQPSSLFGSKSASSKNKSEQDAQGASQDSSSNQQDPGEPGEAEVQEEDHDVTQTEVADGDIMDGEAETDSVVIAGQPEVLSSQEMQVENELEDLIDELLERDGGSGNSTIIVSRSGEDESQEDVLMDEAPSNLSQASTLQANREDSMNILDPEDEEEHTQEEDSSGSNEDEDDSQDEEEEEEEDEEDDQEDDEGEEGDEDDDDDGSEMELDEDYPDMNASPLVRFERFDREDDLIIEFDNMFSSATDIPPSPGNIPTTHPLMVRHADHSSLTLGSGSSTTRLTQGIGRSQRTLRQLTANTGHTIHVHYPGNRQPNPPLILQRLLGPSAAADILQLSSSLPLQSRGRARLLVGNDDVHIIARSDDELLDDFFHDQSTATSQAGTLSSIPTALTRWTEECKVLDAESMHDCVSVVKVSIVNHLEFLRDEELEERREKRRKQLAEEETKITDKGKEDKENRDQSAQCTASKSNDSTEQNLSDGTPMPDSYPTTPSSTDAATSESKETLGTLQSSQQQPTLPTPPALGEVPQELQSPAGEGGSSTQLLMPVEPEELGPTRPSGEAETTQMELSPAPTITSLSPERAEDSDALTAVSSQLEGSPMDTSSLASCTLEEAVGDTSAAGSSEQPRAGSSTPGDAPPAVAEVQGRSDGSGESAQPPEDSSPPASSESSSTRDSAVAISGADSRGILEEPLPSTSSEEEDPLAGISLPEGVDPSFLAALPDDIRREVLQNQLGIRPPTRTAPSTNSSAPAVVGNPGVTEVSPEFLAALPPAIQEEVLAQQRAEQQRRELAQNASSDTPMDPVTFIQTLPSDLRRSVLEDMEDSVLAVMPPDIAAEAQALRREQEARQRQLMHERLFGHSSTSALSAILRSPAFTSRLSGNRGVQYTRLAVQRGGTFQMGGSSSHNRPSGSNVDTLLRLRGRLLLDHEALSCLLVLLFVDEPKLNTSRLHRVLRNLCYHAQTRHWVIRSLLSILQRSSESELCIETPKLTTSEEKGKKSSKSCGSSSHENRPLDLLHKMESKSSNQLSWLSVSMDAALGCRTNIFQIQRSGGRKHTEKHASGGSTVHIHPQAAPVVCRHVLDTLIQLAKVFPSHFTQQRTKETNCESDRERGNKACSPCSSQSSSSGICTDFWDLLVKLDNMNVSRKGKNSVKSVPVSAGGEGETSPYSLEASPLGQLMNMLSHPVIRRSSLLTEKLLRLLSLISIALPENKVSEAQANSGSGASSTTTATSTTSTTTTTAASTTPTPPTAPTPVTSAPALVAATAISTIVVAASTTVTTPTTATTTVSISPTTKGSKSPAKVSDGGSSSTDFKMVSSGLTENQLQLSVEVLTSHSCSEEGLEDAANVLLQLSRGDSGTRDTVLKLLLNGARHLGYTLCKQIGTLLAELREYNLEQQRRAQCETLSPDGLPEEQPQTTKLKGKMQSRFDMAENVVIVASQKRPLGGRELQLPSMSMLTSKTSTQKFFLRVLQVIIQLRDDTRRANKKAKQTGRLGSSGLGSASSIQAAVRQLEAEADAIIQMVREGQRARRQQQAATSESSQSEASVRREESPMDVDQPSPSAQDTQSIASDGTPQGEKEKEERPPELPLLSEQLSLDELWDMLGECLKELEESHDQHAVLVLQPAVEAFFLVHATERESKPPVRDTRESQLAHIKDEPPPLSPAPLTPATPSSLDPFFSREPSSMHISSSLPPDTQKFLRFAETHRTVLNQILRQSTTHLADGPFAVLVDYIRVLDFDVKRKYFRQELERLDEGLRKEDMAVHVRRDHVFEDSYRELHRKSPEEMKNRLYIVFEGEEGQDAGGLLREWYMIISREMFNPMYALFRTSPGDRVTYTINPSSHCNPNHLSYFKFVGRIVAKAVYDNRLLECYFTRSFYKHILGKSVRYTDMESEDYHFYQGLVYLLENDVSTLGYDLTFSTEVQEFGVCEVRDLKPNGANILVTEENKKEYVHLVCQMRMTGAIRKQLAAFLEGFYEIIPKRLISIFTEQELELLISGLPTIDIDDLKSNTEYHKYQSNSIQIQWFWRALRSFDQADRAKFLQFVTGTSKVPLQGFAALEGMNGIQKFQIHRDDRSTDRLPSAHTCFNQLDLPAYESFEKLRHMLLLAIQECSEGFGLA

SEQ ID NO: 64865 - protein, 431 aa, Homo sapiens
MLSNPDLMRQLIMANPQMQQLIQRNPEISHLLNNPDIMRQTLEIARNPAMMQEMMRNQDLALSNLESIPGGYNALRRMYTDIQEPMLNAAQEQFGGNPFASVGSSSSSGEGTQPSRTENRDPLPNPWAPPPATQSSATTSTTTSTGSGSGNSSSNATGNTVAAANYVASIFSTPGMQSLLQQITENPQLIQNMLSAPYMRSMMQSLSQNPDLAAQMMLNSPLFTANPQLQEQMRPQLPAFLQQMQNPDTLSAMSNPRAMQALMQIQQGLQTLATEAPGLIPSFTPGVGVGVLGTAIGPVGPVTPIGPIGPIVPFTPIGPIGPIGPTGPAAPPGSTGSGGPTGPTVSSAAPSETTSPTSESGPNQQFIQQMVQALAGANAPQLPNPEVRFQQQLEQLNAMGFLNREANLQALIATGGDINAAIERLLGSQPS

SEQ ID NO: 64866 - protein, 387 aa, Homo sapiens
MIFFCSPIVSIFTDRLGCRITATAGAAVAFIGLHTSSFTSSLSLRYFTYGILFGCGCSFAFQPSLVILGHYFQRRLGLANGVVSAGSSIFSMSFPFLIRMLGDKIKLAQTFQVLSTFMFVLMLLSLTYRPLLPSSQDTPSKRGVRTLHQRFLAQLRKYFNMRVFRQRTYRIWAFGIAAAALGYFVPYVHLMKYVEEEFSEIKETWVLLVCIGATSGLGRLVSGHISDSIPGLKKIYLQVLSFLLLGLMSMMIPLCRDFGGLIVVCLFLGLCDGFFITIMAPIAFELVGPMQASQAIGYLLGMMALPMIAGPPIAGLLRNCFGDYHVAFYFAGVPPIIGAVILFFVPLMHQRMFKKEQRDSSKDKMLAPDPDPNGELLPGSPNPEEPI

SEQ ID NO: 64867 - protein, 280 aa, Homo sapiens
MNGDKFRRLVKAPPRNYSVIVMFTALQLHRQCVVCKQADEEFQILANSWRYSSAFTNRIFFAMVDFDEGSDVFQMLNMNSAPTFINFPAKGKPKRGDTYELQVRGFSAEQIARWIADRTDVNIRVIRPPNYAGPLMLGLLLAVIGGLVYLRRSNMEFLFNKTGWAFAALCFVLAMTSGQMWNHIRGPPYAHKNPHTGHVNYIHGSSQAQFVAETHIVLLFNGGVTLGMVLLCEAATSDMDIGKRKIMCVAGIGLVVLFFSWMLSIFRSKYHGYPYSFLMS

SEQ ID NO: 64868 - protein, 170 aa, Homo sapiens
MEVKVKIPEELKPWLVEDWDLVTRQKQLFQLPAKKNVDAILEEYANCKKSQGNVDNKEYAVNEVVAGIKEYFNVMLGTQLLYKFERPQYAEILLAHPDAPMSQVYGAPHLLRLFVRIGAMLAYTPLDEKSLALLLGYLHDFLKYLAKNSASLFTASDYKVASAEYHRKAL

SEQ ID NO: 64869 - protein, 627 aa, Homo sapiens [sequence omitted]

SEQ ID NO: 64870 - protein, 972 aa, Homo sapiens
MKADRAKRFEFLLKQTELFAHFIQPSAQKSPTSPLNMKLGRPRIKKDEKQSLISAGDYRHRRTEQEEDEELLSESRKTSNVCIRFEVSPSYVKGGPLRDYQIRGLNWLISLYENGVNGILADEMGLGKTLQTIALLGYLKHYRNIPGPHMVLVPKSTLHNWMNEFKRWVPSLRVICFVGDKDARAAFIRDEMMPGEWDVCVTSYEMVIKEKSVFKKFHWRYLVIDEAHRIKNEKSKLSEIVREFKSTNRLLLTGTPLQNNLHELWALLNFLLPDVFNSADDFDSWFDTKNCLGDQKLVERLHAVLKPFLLRRIKTDVEKSLPPKKEIKIYLGLSKMQREWYTKILMKDIDVLNSSGKMDKMRLLNILMQLRKCCNHPYLFDGAEPGPPYTTDEHIVSNSGKMVVLDKLLAKLKEQGSRVLIFSQMTRLLDILEDYCMWRGYEYCRLDGQTPHEEREEAIEAFNAPNSSKFIFMLSTRAGGLGINLASADVVILYDSDWNPQVDLQAMDRAHRIGQKKPVRVFRLITDNTVEERIVERAEIKLRLDSIVIQQGRLIDQQSNKLAKEEMLQMIRHGATHVFASKESELTDEDITTILERGEKKTAEMNERLQKMGESSLRNFRMDIEQSLYKFEGEDYREKQKLGMVEWIEPPKRERKANYAVDAYFREALRVSEPKIPKAPRPPKQPNVQDFQFFPPRLFELLEKEILYYRKTIGYKVPRNPDIPNPALAQREEQKKIDGAEPLTPEETEEKEKLLTQGFTNWTKRDFNQFIKANEKYGRDDIDNIAREVEGKSPEEVMEYSAVFWERCNELQDIEKIMAQIERGEARIQRRISIKKALDAKIARYKAPFHQLRIQYGTSKGKNYTEEEDRFLICMLHKMGFDRENVYEELRQCVRNAPQFRFDWFIKSRTAMEFQRRCNTLISLIEKENMEIEERERAEKKKRATKTPMSQKRKAESATESSGKKDVKKVKS

SEQ ID NO: 64871 - protein, 454 aa, Homo sapiens
MAESPGLITICLLGYLLSAECTVFLDHENANKILNRPKRYNSGKLEEFVQGNLERECMEEKCSFEEAREVFENTERTTEFWKQYVDGDQCESNPCLNGGSCKDDINSYECWCPFGFEGKNCELDVTCNIKNGRCEQFCKNSADNKVVCSCTEGYRLAENQKSCEPAVPFPCGRVSVSQTSKLTRAETVFPDVDYVNSTEAETILDNITQSTQSFNDFTRVVGGEDAKPGQFPWQVVLNGKVDAFCGGSIVNEKWIVTAAHCVETGVKITVVAGEHNIEETEHTEQKRNVIRIIPHHNYNAAINKYNHDIALLELDEPLVLNSYVTPICIADKEYTNIFLKFGSGYVSGWGRVFHKGRSALVLQYLRVPLVDRATCLRSTKFTIYNNMFCAGFHEGGRDSCQGDSGGPHVTEVEGTSFLTGIISWGEECAMKGKYGIYTKVSRYVNWIKEKTKLT

SEQ ID NO: 64872 - protein, 448 aa, Homo sapiens
MPWLPVFLSLAAAAAAAAAEQQVPLVLWSSDRDLWAPAADTHEGHITSDLQLSTYLDPALELGPRNVLLFLQDKLSIEDFTAYGGVFGNKQDSAFSNLENALDLAPSSLVLPAVDWYAVSTLTTYLQEKLGASPLHVDLATLRELKLNASLPALLLIRLPYTASSGLMAPREVLTGNDEVIGQVLSTLKSEDVPYTAALTAVRPSRVARDVAVVAGGLGRQLLQKQPVSPVIHPPVSYNDTAPRILFWAQNFSVAYKDQWEDLTPLTFGVQELNLTGSFWNDSFARLSLTYERLFGTTVTFKFILANRLYPVSARHWFTMERLEVHSNGSVAYFNASQVTGPSIYSFHCEYVSSLSKKGSLLVARTQPSPWQMMLQDFQIQAFNVMGEQFSYASDCASFFSPGIWMGLLTSLFMLFIFTYGLHMILSLKTMDRFDDHKGPTISLTQIV

SEQ ID NO: 64873 - protein, 7 aa, Homo sapiens
IHLFCFS

SEQ ID NO: 64874 - protein, 209 aa, Homo sapiens
LEAFAHTDLSGKVFVFPRESVTDHVNLITPLEKPLQNFTLCFRAYSDLSRAYSLFSYNTQGRDNELLVYKERVGEYSLYIGRHKVTSKVIEKFPAPVHICVSWESSSGIAEFWINGTPLVKKGLRQGYFVEAQPKIVLGQEQDSYGGKFDRSQSFVGEIGDLYMWDSVLPPENILSAYQGTPLPANILDWQALNYEIRGYVIIKPLVWV

SEQ ID NO: 64875 - protein, 452 aa, Homo sapiens
LLLLLLFLGAAESVRRAQPPRRYTPDWPSLDSRPLPAWFDEAKFGVFIHWGVFSVPAWGSEWFWWHWQGEGRPQYQRFMRDNYPPGFSYADFGPQFTARFFHPEEWADLFQAAGAKYVVLTTKHHEGFTNWPSPVSWNWNSKDVGPHRDLVGELGTALRKRNIRYGLYHSLLEWFHPLYLLDKKNGFKTQHFVSAKTMPELYDLVNSYKPDLIWSDGEWECPDTYWNSTNFLSWLYNDSPVKDEVVVNDRWGQNCSCHHGGYYNCEDKFKPQSLPDHKWEMCTSIDKFSWGYRRDMALSDVTEESEIISELVQTVSLGGNYLLNIGPTKDGLIVPIFQERLLAVGKWLSINGEAIYASKPWRVQWEKNTTSVWYTSKGSAVYAIFLHWPENGVLNLESPITTSTTKITMLGIQGDLKWSTDPDKGLFISLPQLPPSAVPAEFAWTIKLTGVK

SEQ ID NO: 64876 - protein, 11 aa, Homo sapiens
TIEQEKQAGES

SEQ ID NO: 64877 - protein, 84 aa, Homo sapiens
KGYTVGAEASIILGQEQDSFGGNFEGSQSLVGDIGNVNMWDFVLSPDEINTIYLGGPFSPNVLNWRALKYEVQGEVFTKPQLWP

SEQ ID NO: 64878 - protein, 15 aa, Homo sapiens
RTETLARPPSPLLPT

SEQ ID NO: 64879 - protein, 28 aa, Homo sapiens
KLKKTETQEKNTLPTKETIEQEKRSEIS

SEQ ID NO: 64880 - protein, 8 aa, Homo sapiens
LQDWEELG

SEQ ID NO: 64881 - protein, 333 aa, Homo sapiens
VQDPGLHVWRVEKLKPVPVAQENQGVFFSGDSYLVLHNGPEEVSHLHLWIGQQSSRDEQGACAVLAVHLNTLLGERPVQHREVQGNESDLFMSYFPRGLKYQEGGVESAFHKTSTGAPAAIKKLYQVKGKKNIRATERALNWDSFNTGDCFILDLGQNIFAWCGGKSNILERNKARDLALAIRDSERQGKAQVEIVTDGEEPAEMIQVLGPKPALKEGNPEEDLTADKANAQAAALYKVSDATGQMNLTKVADSSPFALELLISDDCFVLDNGLCGKIYIWKGRKANEKERQAALQVAEGFISRMQYAPNTQVEILPQGHESPIFKQFFKDWK

SEQ ID NO: 64882 - protein, 46 aa, Homo sapiens
TVTRGLQKDYSKDPWHGAEVSCWFIHNNGAGLIDGAYTDYIVPDIF

SEQ ID NO: 64883 - protein, 98 aa, Homo sapiens
KESNEELTESCETKKLGQSLDCNAEVYVVPWEKKIYPTVNCQPLGMISLMKRPPGFSPFRSSRIGEIKEETTSHLRSCEYKGRPPKAGAEPASEREVS

SEQ ID NO: 64884 - protein, 489 aa, Homo sapiens
RMVSWSFHKLKTMKHLLLLLLCVFLVKSQGVNDNEEGFFSARGHRPLDKKREEAPSLRPAPPPISGGGYRARPAKAAATQKKVERKAPDAGGCLHADPDLGVLCPTGCQLQEALLQQERPIRNSVDELNNNVEAVSQTSSSSFQYMYLLKDLWQKRQKQVKDNENVVNEYSSELEKHQLYIDETVNSNIPTNLRVLRSILENLRSKIQKLESDVSAQMEYCRTPCTVSCNIPVVSGKECEEIIRKGGETSEMYLIQPDSSVKPYRVYCDMNTENGGWTVIQNRQDGSVDFGRKWDPYKQGFGNVATNTDGKNYCGLPGEYWLGNDKISQLTRMGPTELLIEMEDWKGDKVKAHYGGFTVQNEANKYQISVNKYRGTAGNALMDGASQLMGENRTMTIHNGMFFSTYDRDNDGWLTSDPRKQCSKEDGGGWWYNRCHAANPNGRYYWGGQYTWDMAKHGTDDGVVWMNWKGSWYSMRKMSMKIRPFFPQQ

SEQ ID NO: 64885 - protein, 11 aa, Homo sapiens
TIEQEKQAGES

SEQ ID NO: 64886 - protein, 26 aa, Homo sapiens
IPLFTPQCGKCRVCKNPESNYCLKNE

SEQ ID NO: 64887 - protein, 487 aa, Homo sapiens
LHLAPENFYISHSPNSTAGPSCTLLEEAFRRYHGYIFGFYKWHHEPAEFQAKTQVQQLLVSITLQSECDAFPNISSDESYTLLVKEPVAVLKANRVWGALRGLETFSQLVYQDSYGTFTINESTIIDSPRFSHRGILIDTSRHYLPVKIILKTLDAMAFNKFNVLHWHIVDDQSFPYQSITFPELSNKGSYSLSHVYTPNDVRMVIEYARLRGIRVLPEFDTPGHTLSWGKGQKDLLTPCYSRQNKLDSFGPINPTLNTTYSFLTTFFKEISEVFPDQFIHLGGDEVEFKCWESNPKIQDFMRQKGFGTDFKKLESFYIQKVLDIIATINKGSIVWQEVFDDKAKLAPGTIVEVWKDSAYPEELSRVTASGFPVILSAPWYLDLISYGQDWRKYYKVEPLDFGGTQKQKQLFIGGEACLWGEYVDATNLTPRLWPRASAVGERLWSSKDVRDMDDAYDRLTRHRCRMVERGIAAQPLYAGYCNHENM

SEQ ID NO: 64888 - protein, 190 aa, Homo sapiens
KCSRGALYTGFSILVTLLLAGQATTAYFLYQQQGRLDKLTVTSQNLQLENLRMKLPKPPKPVSKMRMATPLLMQALPMGALPQGPMQNATKYGNMTEDHVMHLLQNADPLKVYPPLKGSFPENLRHLKNTMETIDWKVFESWMHHWLLFEMSRHSLEQKPTDAPPKESLELEDPSSGLGVTKQDLGPVPM

SEQ ID NO: 64889 - protein, 258 aa, Homo sapiens
TLRGYYNQSEAGSHTLQWMHGCELGPDGRFLRGYEQFAYDGKDYLTLNEDLRSWTAVDTAAQISEQKSNDASEAEHQRAYLEDTCVEWLHKYLEKGKETLLHLEPPKTHVTHHPISDHEATLRCWALGFYPAEITLTWQQDGEGHTQDTELVETRPAGDGTFQKWAAVVVPSGEEQRYTCHVQHEGLPEPVTLRWKPASQPTIPIVGIIAGLVLLGSVVSGAVVAAVIWRKKSSGGKGGSYSKAEWSDSAQGSESHSL

SEQ ID NO: 64890 - protein, 2418 aa, Homo sapiens
IVQCGPSSAVCMHDLKTRTYHSVGDSVLRSATRSLLEFNTTVSCDQQGTNHRVQSSIAFLCGKTLGTPEFVTATECVHYFEWRTTAACKKDIFKANKEVPCYVFDEELRKHDLNPLIKLSGAYLVDDSDPDTSLFINVCRDIDTLRDPGSQLRACPPGTAACLVRGHQAFDVGQPRDGLKLVRKDRLVLSYVREEAGKLDFCDGHSPAVTITFVCPSERREGTIPKLTAKSNCRYEIEWITEYACHRDYLESKTCSLSGEQQDVSIDLTPLAQSGGSSYISDGKEYLFYLNVCGETEIQFCNKKQAAVCQVKKSDTSQVKAAGRYHNQTLRYSDGDLTLIYFGGDECSSGFQRMSVINFECNKTAGNDGKGTPVFTGEVDCTYFFTWDTEYACVKEKEDLLCGATDGKKRYDLSALVRHAEPEQNWEAVDGSQTETEKKHFFINICHRVLQEGKARGCPEDAAVCAVDKNGSKNLGKFISSPMKEKGNIQLSYSDGDDCGHGKKIKTNITLVCKPGDLESAPVLRTSGEGGCFYEFEWHTAAACVLSKTEGENCTVFDSQAGFSFDLSPLTKKNGAYKVETKKYDFYINVCGPVSVSPCQPDSGACQVAKSDEKTWNLGLSNAKLSYYDGMIQLNYRGGTPYNNERHTPRATLITFLCDRDAGVGFPEYQEEDNSTYNFRWYTSYACPEEPLECVVTDPSTLEQYDLSSLAKSEGGLGGNWYAMDNSGEHVTWRKYYINVCRPLNPVPGCNRYASACQMKYEKDQGSFTEVVSISNLGMAKTGPVVEDSGSLLLEYVNGSACTTSDGRQTTYTTRIHLVCSRGRLNSHPIFSLNWECVVSFLWNTEAACPIQTTTDTDQACSIRDPNSGFVFNLNPLNSSQGYNVSGIGKIFMFNVCGTMPVCGTILGKPASGCEAETQTEELKNWKPARPVGIEKSLQLSTEGFITLTYKGPLSAKGTADAFIVRFVCNDDVYSGPLKFLHQDIDSGQGIRNTYFEFETALACVPSPVDCQVTDLAGNEYDLTGLSTVRKPWTAVDTSVDGRKRTFYLSVCNPLPYIPGCQGSAVGSCLVSEGNSWNLGVVQMSPQAAANGSLSIMYVNGDKCGNQRFSTRITFECAQISGSPAFQLQDGCEYVFIWRTVEACPVVRVEGDNCEVKDPRHGNLYDLKPLGLNDTIVSAGEYTYYFRVCGKLSSDVCPTSDKSKVVSSCQEKREPQGFHKVAGLLTQKLTYENGLLKMNFTGGDTCHKVYQRSTAIFFYCDRGTQRPVFLKETSDCSYLFEWRTQYACPPFDLTECSFKDGAGNSFDLSSLSRYSDNWEAITGTGDPEHYLINVCKSLAPQAGTEPCPPEAAACLLGGSKPVNLGRVRDGPQWRDGIIVLKYVDGDLCPDGIRKKSTTIRFTCSESQVNSRPMFISAVEDCEYTFAWPTATACPMKSNEHDDCQVTNPSTGHLFDLSSLSGRAGFTAAYSEKGLVYMSICGENENCPPGVGACFGQTRISVGKANKRLRYVDQVLQLVYKDGSPCPSKSGLSYKSVISFVCRPEARPTNRPMLISLDKQTCTLFFSWHTPLACEQATECSVRNGSSIVDLSPLIHRTGGYEAYDESEDDASDTNPDFYINICQPLNPMHGVPCPAGAAVCKVPIDGPPIDIGRVAGPPILNPIANEIYLNFESSTPCLADKHFNYTSLIAFHCKRGVSMGTPKLLRTSECDFVFEWETPVVCPDEVRMDGCTLTDEQLLYSFNLSSLSTSTFKVTRDSRTYSVGVCTFAVGPEQGGCKDGGVCLLSGTKGASFGRLQSMKLDYRHQDEAVVLSYVNGDRCPPETDDGVPCVFPFIFNGKSYEECIIESRAKLWCSTTADYDRDHEWGFCRHSNSYRTSSIIFKCDEDEDIGRPQVFSEVRGCDVTFEWKTKVVCPPKKLECKFVQKHKTYDLRLLSSLTGSWSLVHNGVSYYINLCQKIYKGPLGCSERASICRRTTTGDVQVLGLVHTQKLGVIGDKVVVTYSKGYPCGGNKTASSVIELTCTKTVGRPAFKRFDIDSCTYYFSWDSRAACAVKPQEVQMVNGTITNPINGKSFSLGDIYFKLFRASGDMRTNGDNYLYEIQLSSITSSRNPACSGANICQVKPNDQHFSRKVGTSDKTKYYLQDGDLDVVFASSSKCGKDKTKSVSSTIFFHCDPLVEDGIPEFSHETADCQYLFSWYTSAVCPLGVGFDSENPGDDGQMHKGLSERSQAVGAVLSLLLVALTCCLLALLLYKKERRETVISKLTTCCRRSSNVSYKYSKVNKEEETDENETEWLMEEIQLPPPRQGKEGQENGHITTKSVKALSSLHGDDQDSEDEVLTIPEVKVHSGRGAGAESSHPVRNAQSNALQEREDDRVGLVRGEKARKGKSSSAQQKTVSSTKLVSFHDDSDEDLLHI

SEQ ID NO: 64891 - protein, 726 aa, Homo sapiens
LEGVEIKGGSFRLLQEGQALEYVCPSGFYPYPVQTRTCRSTGSWSTLKTQDQKTVRKAECRAIHCPRPHDFENGEYWPRSPYYNVSDEISFHCYDGYTLRGSANRTCQVNGRWSGQTAICDNGAGYCSNPGIPIGTRKVGSQYRLEDSVTYHCSRGLTLRGSQRRTCQEGGSWSGTEPSCQDSFMYDTPQEVAEAFLSSLTETIEGVDAEDGHGPGEQQKRKIVLDPSGSMNIYLVLDGSDSIGASNFTGAKKCLVNLIEKVASYGVKPRYGLVTYATYPKIWVKVSEADSSNADWVTKQLNEINYEDHKLKSGTNTKKALQAVYSMMSWPDDVPPEGWNRTRHVIILMTDGLHNMGGDPITVIDEIRDLLYIGKDRKNPREDYLDVYVFGVGPLVNQVNINALASKKDNEQHVFKVKDMENLEDVFYQMIDESQSLSLCGMVWEHRKGTDYHKQPWQAKISVIRPSKGHESCMGAVVSEYFVLTAAHCFTVDDKEHSIKVSVGGEKRDLEIEVVLFHPNYNINGKKEAGIPEFYDYDVALIKLKNKLKYGQTIRPICLPCTEGTTRALRLPPTTTCQQQKEELLPAQDIKALFVSEEEKKLTRKEVYIKNGDKKGSCERDAQYAPGYDKVKDISEVVTPRFLCTGGVSPYADPNTCRGDSGGPLIVHKRSRFIQVGVISWGVVDVCKNQKRQKQVPAHARDFHINLFQVLPWLKEKLQDEDLGFL

SEQ ID NO: 64892 - protein, 132 aa, Homo sapiens
VSEEEKKLTRKEVYIKNGDKKGSCERDAQYAPGYDKVKDISEVVTPRFLCTGGVSPYADPNTCRGDSGGPLIVHKRSRFIQVGVISWGVVDVCKNQKRQKQVPAHARDFHINLFQVLPWLKEKLQDEDLGFL

SEQ ID NO: 64893 - protein, 96 aa, Homo sapiens
KWAAVVVPSGEEQRYTCHVQHEGLPKPLTLRWEPSSQSTVPIVGIVAGLAVLAVVVIGAVVAAVMCRRKSSGGKGGSYSQAACSDSAQGSDVSLTA

SEQ ID NO: 64894 - protein, 267 aa, Homo sapiens
VSLRNLRGYYNQSEDGSHTLQRMSGCDLGPDGRLLRGYDQSAYDGKDYIALNEDLRSWTAADTAAQITQRKLEAARAAEQLRAYLEGTCVEWLRRYLENGKETLQRAEPPKTHVTHHPLSDHEATLRCWALGFYPAEITLTWQRDGEDQTQDTELVETRPAGDGTFQKWAAVVVPSGQEQRYTCHMQHEGLQEPLTLSWEPSSQPTIPIMGIVAGLAVLVVLAVLGAVVTAMMCRRKSSGGKGGSCSQAACSNSAQGSDESLITCKA

SEQ ID NO: 64895 - protein, 251 aa, Homo sapiens
IRAVILRALSLAFLLSLRGAGAIKADHVSTYAAFVQTHRPTGEFMFEFDEDEMFYVDLDKKETVWHLEEFGQAFSFEAQGGLANIAILNNNLNTLIQRSNHTQATNDPPEVTVFPKEPVELGQPNTLICHIDKFFPPVLNVTWLCNGELVTEGVAESLFLPRTDYSFHKFHYLTFVPSAEDFYDCRVEHWGLDQPLLKHWEAQEPIQMPETTETVLCALGLVLGLVGIIVGTVLIIKSLRSGHDPRAQGTL

SEQ ID NO: 64896 - protein, 415 aa, Homo sapiens [sequence omitted]

SEQ ID NO: 64897 - protein, 565 aa, Homo sapiens
LGFLLLAARLPLDAAKRFHDVLGNERPSAYMREHNQLNGWSSDENDWNEKLYPVWKRGDMRWKNSWKGGRVQAVLTSDSPALVGSNITFAVNLIFPRCQKEDANGNIVYEKNCRNEAGLSADPYVYNWTAWSEDSDGENGTGQSHHNVFPDGKPFPHHPGWRRWNFIYVFHTLGQYFQKLGRCSVRVSVNTANVTLGPQLMEVTVYRRHGRAYVPIAQVKDVYVVTDQIPVFVTMFQKNDRNSSDETFLKDLPIMFDVLIHDPSHFLNYSTINYKWSFGDNTGLFVSTNHTVNHTYVLNGTFSLNLTVKAAAPGPCPPPPPPPRPSKPTPSLATTLKSYDSNTPGPAGDNPLELSRIPDENCQINRYGHFQATITIVEGILEVNIIQMTDVLMPVPWPESSLIDFVVTCQGSIPTEVCTIISDPTCEITQNTVCSPVDVDEMCLLTVRRTFNGSGTYCVNLTLGDDTSLALTSTLISVPDRDPASPLRMANSALISVGCLAIFVTVISLLVYKKHKEYNPIENSPGNVVRSKGLSVFLNRAKAVFFPGNQEKDPLLKNQEFKGVS

SEQ ID NO: 64898 - protein, 17 aa, Homo sapiens
KQEYDESGPSIVHRKCF

SEQ ID NO: 64899 - protein, 13 aa, Homo sapiens
VDYSKLKKERPDF

SEQ ID NO: 64900 - protein, 17 aa, Homo sapiens
VQHSSLAQPLVVPWEAS

SEQ ID NO: 64901 - protein, 124 aa, Homo sapiens
VNSFIWQTEPFLYIDTVCDRSDPVFPTTGYRWMRRSQENQWQKEECRAYMQMLRKLFTAIRALFLAVCVLKVIVSLVSLGVGLRNLCGQSSQPLNEEGSEKRLLGENSVPPSPSREQTSTAIVL

SEQ ID NO: 64902 - protein, 45 aa, Homo sapiens
LVANSWNTDWGDNGFFKILRGQDHCGIESEVVAGIPRTDQYWEKI

SEQ ID NO: 64903 - protein, 461 aa, Homo sapiens
LTEACKDSRIGGMMKTLLLFVGLLLTWESGQVLGDQTVSDNELQEMSNQGSKYVNKEIQNAVNGVKQIKTLIEKTNEERKTLLSNLEEAKKKKEDALNETRESETKLKELPGVCNETMMALWEECKPCLKQTCMKFYARVCRSGSGLVGRQLEEFLNQSSPFYFWMNGDRIDSLLENDRQQTHMLDVMQDHFSRASSIIDELFQDRFFTREPQDTYHYLPFSLPHRRPHFFFPKSRIVRSLMPFSPYEPLNFHAMFQPFLEMIHEAQQAMDIHFHSPAFQHPPTEFIREGDDDRTVCREIRHNSTGCLRMKDQCDKCREILSVDCSTNNPSQAKLRRELDESLQVAERLTRKYNELLKSYQWKMLNTSSLLEQLNEQFNWVSRLANLTQGEDQYYLRVTTVASHTSDSDVPSGVTEVVVKLFDSDPITVTVPVEVSRKNPKFMETVAEKALQEYRKKHREE

SEQ ID NO: 64904 - protein, 292 aa, Homo sapiens
MNEEGWRRAVWEKNMKMIELHNQEYREGKHSFTMAMNAFGDMTSEEFRQVMNGFQNRKPRKGKVFQEPLFYEAPRSVDWREKGYVTPVKNQGQCGSCWAFSATGALEGQMFRKTGRLISLSEQNLVDCSGPQGNEGCNGGLMDYAFQYVQDNGGLDSEESYPYEATEESCKYNPKYSVANDTGFVDIPKQEKALMKAVATVGPISVAIDAGHESFLFYKEGIYFEPDCSSEDMDHGVLVVGYGFESTESDNNKYWLVKNSWGEEWGMGGYVKMAKDRRNHCGIASAASYPTV

SEQ ID NO: 64905 - protein, 2535 aa, Homo sapiens
KISIGNVVKTMQFEPSTMVYDACRIIRERIPEAPAGPPSDFGLFLSDDDPKKGIWLEAGKALDYYMLRNGDTMEYRKKQRPLKIRMLDGTVKTIMVDDSKTVTDMLMTICARIGITNHDEYSLVRELMEEKKEEITGTLRKDKTLLRDEKKMEKLKQKLHTDDELNWLDHGRTLREQGVEEHETLLLRRKFFYSDQNVDSRDPVQLNLLYVQARDDILNGSHPVSFDKACEFAGFQCQIQFGPHNEQKHKAGFLDLKDFLPKEYVKQKGERKIFQAHKNCGQMSEIEAKVRYVKLARSLKTYGVSFFLVKEKMKGKNKLVPRLLGITKECVMRVDEKTKEVIQEWNLTNIKRWAASPKSFTLDFGDYQDGYYSVQTTEGEQIAQLIAGYIDIILKKKKSKDHFGLEGDEESTMLEDSVSPKKSTVLQQQYNRVGKVEHGSVALPAIMRSGASGPENFQVGSMPPAQQQITSGQMHRGHMPPLTSAQQALTGTINSSMQAVQAAQATLDDFDTLPPLGQDAASKAWRKNKMDESKHEIHSQVDAITAGTASVVNLTAGDPAETDYTAVGCAVTTISSNLTEMSRGVKLLAALLEDEGGSGRPLLQAAKGLAGAVSELLRSAQPASAEPRQNLLQAAGNVGQASGELLQQIGESDTDPHFQDALMQLAKAVASAAAALVLKAKSVAQRTEDSGLQTQVIAAATQCALSTSQLVACTKVVAPTISSPVCQEQLVEAGRLVAKAVEGCVSASQAATEDGQLLRGVGAAATAVTQALNELLQHVKAHATGAGPAGRYDQATDTILTVTENIFSSMGDAGEMVRQARILAQATSDLVNAIKADAEGESDLENSRKLLSAAKILADATAKMVEAAKGAAAHPDSEEQQQRLREAAEGLRMATNAAAQNAIKKKLVQRLEHAAKQAAASATQTIAAAQHAASTPKASAGPQPLLVQSCKAVAEQIPLLVQGVRGSQAQPDSPSAQLALIAASQSFLQPGGKMVAAAKASVPTIQDQASAMQLSQCAKNLGTALAELRTAAQKAQEACGPLEMDSALSVVQNLEKDLQEVKAAARDGKLKPLPGETMEKCTQDLGNSTKAVSSAIAQLLGEVAQGNENYAGIAARDVAGGLRSLAQAARGVAALTSDPAVQAIVLDTASDVLDKASSLIEEAKKAAGHPGDPESQQRLAQVAKAVTQALNRCVSCLPGQRDVDNALRAVGDASKRLLSDSLPPSTGTFQEAQSRLNEAAAGLNQAATELVQASRGTPQDLARASGRFGQDFSTFLEAGVEMAGQAPSQEDRAQVVSNLKGISMSSSKLLLAAKALSTDPAAPNLKSQLAAAARAVTDSINQLITMCTQQAPGQKECDNALRELETVRELLENPVQPINDMSYFGCLDSVMENSKVLGEAMTGISQNAKNGNLPEFGDAISTASKALCGFTEAAAQAAYLVGVSDPNSQAGQQGLVEPTQFARANQAIQMACQSLGEPGCTQAQVLSAATIVAKHTSALCNSCRLASARTTNPTAKRQFVQSAKEVANSTANLVKTIKALDGAFTEENRAQCRAATAPLLEAVDNLSAFASNPEFSSIPAQISPEGRAAMEPIVISAKTMLESAGGLIQTARALAVNPRDPPSWSVLAGHSRTVSDSIKKLITSMRDKAPGQLECETAIAALNSCLRDLDQASLAAVSQQLAPREGISQEALHTQMLTAVQEISHLIEPLANAARAEASQLGHKVSQMAQYFEPLTLAAVGAASKTLSHPQQMALLDQTKTLAESALQLLYTAKEAGGNPKQAAHTQEALEEAVQMMTEAVEDLTTTLNEAASAAGVVGGMVDSITQAINQLDEGPMGEPEGSFVDYQTTMVRTAKAIAVTVQEMVTKSNTSPEELGPLANQLTSDYGRLASEAKPAAVAAENEEIGSHIKHRVQELGHGCAALVTKAGALQCSPSDAYTKKELIECARRVSEKVSHVLAALQAGNRGTQACITAASAVSGIIADLDTTIMFATAGTLNREGTETFADHREGILKTAKVLVEDTKVLVQNAAGSQEKLAQAAQSSVATITRLADVVKLGAASLGAEDPETQVVLINAVKDVAKALGDLISATKAAAGKVGDDPAVWQLKNSAKVMVTNVTSLLKTVKAVEDEATKGTRALEATTEHIRQELAVFCSPEPPAKTSTPEDFIRMTKGITMATAKAVAAGNSCRQEDVIATANLSRRAIADMLRACKEAAYHPEVAPDVRLRALHYGRECANGYLELLDHVLLTLQKPSPELKQQLTGHSKRVAGSVTELIQAAEAMKGTEWVDPEDPTVIAENELLGAAAAIEAAAKKLEQLKPRAKPKEADESLNFEEQILEAAKSIAAATSALVKAASAAQRELVAQGKVGAIPANALDDGQWSQGLISAARMVAAATNNLCEAANAAVQGHASQEKLISSAKQVAASTAQLLVACKVKADQDSEAMKRLQAAGNAVKRASDNLVKAAQKAAAFEEQENETVVVKEKMVGGIAQIIAAQEEMLRKERELEEARKKLAQIRQQQYKFLPSELRDEH

SEQ ID NO: 64906 - protein, 363 aa, Homo sapiens [sequence omitted]

SEQ ID NO: 64907 - protein, 305 aa, Homo sapiens
LGFGTYAPAEVPKSKALEAVKLAIEAGFHHIDSAHVYNNEEQVGLAIRSKIADGSVKREDIFYTSKLWSNSHRPELVRPALERSLKNLQLDYVDLYLIHFPVSVKPGEEVIPKDENGKILFDTVDLCATWEAMEKCKDAGLAKSIGVSNFNHRLLEMILNKPGLKYKPVCNQVECHPYFNQRKLLDFCKSKDIVLVAYSALGSHREEPWVDPNSPVLLEDPVLCALAKKHKRTPALIALRYQLQRGVVVLAKSYNEQRIRQNVQVFEFQLTSEEMKAIDGLNRNVRYLTLDIFAGPPNYPFSDEY

SEQ ID NO: 64908 - protein, 208 aa, Homo sapiens
VGGFLGKMKWVWALLLLAALGSGRAERDCRVSSFRVKENFDKARFSGTWYAMAKKDPEGLFLQDNIVAEFSVDETGQMSATAKGRVRLLNNWDVCADMVGTFTDTEDPAKFKMKYWGVASFLQKGNDDHWIVDTDYDTYAVQYSCRLLNLDGTCADSYSFVFSRDPNGLPPEAQKIVRQRQEELCLARQYRLIVHNGYCDGRSERNLL

SEQ ID NO: 64909 - protein, 15 aa, Homo sapiens
IVSLPPSYQICFIPV

SEQ ID NO: 64910 - protein, 493 aa, Homo sapiens
LTLLLLLLAGDRASSNPNATSSSSQDPESLQDRGEGKVATTVISKMLFVEPILEVSSLPTTNSTTNSATKITANTTDEPTTQPTTEPTTQPTIQPTQPTTQLPTDSPTQPTTGSFCPGPVTLCSDLESHSTEAVLGDALVDFSLKLYHAFSAMKKVETNMAFSPFSIASLLTQVLLGAGENTKTNLESILSYPKDFTCVHQALKGFTTKGVTSVSQIFHSPDLAIRDTFVNASRTLYSSSPRVLSNNSDANLELINTWVAKNTNNKISRLLDSLPSDTRLVLLNAIYLSAKWKTTFDPKKTRMEPFHFKNSVIKVPMMNSKKYPVAHFIDQTLKAKVGQLQLSHNLSLVILVPQNLKHRLEDMEQALSPSVFKAIMEKLEMSKFQPTLLTLPRIKVTTSQDMLSIMEKLEFFDFSYDLNLCGLTEDPDLQVSAMQHQTVLELTETGVEAAAASAISVARTLLVFEVQQPFLFVLWDQQHKFPVFMGRVYDPRA

SEQ ID NO: 64911 - protein, 12 aa, Homo sapiens
IVIPVLIFQAYG

SEQ ID NO: 64912 - protein, 629 aa, Homo sapiens
VGVFQHGKVEIIANDQGNRTTPSYVAFTDTERLIGDAAKNQVAMNPTNTVFDAKRLIGRRFDDAVVQSDMKHWPFMVVNDAGRPKVQVEYKGETKSFYPEEVSSMVLTKMKEIAEAYLGKTVTNAVVTVPAYFNDSQRQATKDAGTIAGLNVLRIINEPTAAAIAYGLDKKVGAERNVLIFDLGGGTFDVSILTIEDGIFEVKSTAGDTHLGGEDFDNRMVNHFIAEFKRKHKKDISENKRAVRRLRTACERAKRTLSSSTQASIEIDSLYEGIDFYTSITRARFEELNADLFRGTLDPVEKALRDAKLDKSQIHDIVLVGGSTRIPKIQKLLQDFFNGKELNKSINPDEAVAYGAAVQAAILSGDKSENVQDLLLLDVTPLSLGIETAGGVMTVLIKRNTTIPTKQTQTFTTYSDNQPGVLIQVYEGERAMTKDNNLLGKFELTGIPPAPRGVPQIEVTFDIDANGILNVSAVDKSTGKENKITITNDKGRLSKEDIERMVQEAEKYKAEDEKQRDKVSSKNSLESYAFNMKATVEDEKLQGKINDEDKQKILDKCNEIINWLDKNQTAEKEEFEHQQKELEKVCNPIITKLYQSAGGMPGGMPGGFPGGGAPPSGGASSGPTIEEVD

SEQ ID NO: 64913 - protein, 5817 aa, Homo sapiens
LNTMGHHTVGLKLHRKGDRSPEPGQTWTREVFSSCSSEVVLSGDDEEYQRIYTTKIKPRLKSEDGVEGDLGETQSRTITVTRRVTAYTVDVTGREGAKDIDISSPEFKIKIPRHELTEISNVDVETQSGKTVIRLPSGSGAASPTGSAVDIRAGAISASGPELQGAGHSKLQVTMPGIKVGGSGVNVNAKGLDLGGRGGVQVPAVDISSSLGGRAVEVQGPSLESGDHGKIKFPTMKVPKFGVSTGREGQTPKAGLRVSAPEVSVGHKGGKPGLTIQAPQLEVSVPSANIEGLEGKLKGPQITGPSLEGDLGLKGAKPQGHIGVDASAPQIGGSITGPSVEVQAPDIDVQGPGSKLNVPKMKVPKFSVSGAKGEETGIDVTLPTGEVTVPGVSGDVSLPEIATGGLEGKMKGTKVKTPEMIIQKPKISMQDVDLSLGSPKLKGDIKVSAPGVQGDVKGPQVALKGSRVDIETPNLEGTLTGPRLGSPSGKTGTCRISMSEVDLNVAAPKVKGGVDVTLPRVEGKVKVPEVDVRGPKVDVSAPDVEAHGPEWNLKMPKMKMPTFSTPGAKGEGPDVHMTLPKGDISISGPKVNVEAPDVNLEGLGGKLKGPDVKLPDMSVKTPKISMPDVDLHVKGTKVKGEYDVTVPKLEGELKGPKVDIDAPDVDVHGPDWHLKMPKMKMPKFSVPGFKAEGPEVDVNLPKADVDISGPKIDVTAPDVSIEEPEGKLKGPKFKMPEMNIKVPKISMPDVDLHLKGPNVKGEYDVTMPKVESEIKVPDVELKSAKMDIDVPDVEVQGPDWHLKMPKMKMPKFSMPGFKAEGPEVDVNLPKADVDISGPKVGVEVPDVNIEGPEGKLKGPKFKMPEMNIKAPKISMPDVDLHMKGPKVKGEYDMTVPKLEGDLKGPKVDVSAPDVEMQGPDWNLKMPKIKMPKFSMPSLKGEGPEFDVNLSKANVDISAPKVDTNAPDLSLEGPEGKLKGPKFKMPEMHFRAPKMSLPDVDLDLKGPKMKGNVDISAPKIEGEMQVPDVDIRGPKVDIKAPDVEGQGLDWSLKIPKMKMPKFSMPSLKGEGPEVDVNLPKADVVVSGPKVDIEAPDVSLEGPEGKLKGPKFKMPEMHFKTPKISMPDVDLHLKGPKVKGDVDVSVPKVEGEMKVPDVEIKGPKMDIDAPDVEVQGPDWHLKMPKMKMPKFSMPGFKGEGREVDVNLPKADIDVSGPKVDVEVPDVSLEGPEGKLKGPKFKMPEMHFKAPKISMPDVDLNLKGPKLKGDVDVSLPEVEGEMKVPDVDIKGPKVDISAPDVDVHGPDWHLKMPKVKMPKFSMPGFKGEGPEVDVKLPKADVDVSGPKMDAEVPDVNIEGPDAKLKGPKFKMPEMSIKPQKISIPDVGLHLKGPKMKGDYDVTVPKVEGEIKAPDVDIKGPKVDINAPDVEVHGPDWHLKMPKVKMPKFSMPGFKGEGPEVDMNLPKADLGVSGPKVDIDVPDVNLEAPEGKLKGPKFKMPSMNIQTHKISMPDVGLNLKAPKLKTDVDVSLPKVEGDLKGPEIDVKAPKMDVNVGDIDIEGPEGKLKGPKFKMPEMHFKAPKISMPDVDLHLKGPKVKGDMDVSVPKVEGEMKVPDVDIKGPKVDIDAPDVEVHDPDWHLKMPKMKMPKFSMPGFKAEGPEVDVNLPKADIDVSGPSVDTDAPDLDIEGPEGKLKGSKFKMPKLNIKAPKVSMPDVDLNLKGPKLKGEIDASVPELEGDLRGPQVDVKGPFVEAEVPDVDLECPDAKLKGPKFKMPEMHFKAPKISMPDVDLHLKGPKVKGDADVSVPKLEGDLTGPSVGVEVPDVELECPDAKLKGPKFKMPDMHFKAPKISMPDVDLHLKGPKVKGDVDVSVPKLEGDLTGPSVGVEVPDVELECPDAKLKGPKFKMPEMHFKTPKISMPDVDLHLKGPKVKGDMDVSVPKVEGEMKVPDVDIKGPKMDIDAPDVDVHGPDWHLKMPKMKMPKFSMPGFKAEGPEVDVNLPKADVVVSGPKVDVEVPDVSLEGPEGKLKGPKLKMPEMHFKAPKISMPDVDLHLKGPKVKGDVDVSLPKLEGDLTGPSVDVEVPDVELECPDAKLKGPKFKMPEMHFKTPKISMPDVNLNLKGPKVKGDMDVSVPKVEGEMKVPDVDIRGPKVDIDAPDVDVHGPDWHLKMPKMKMPKFSMPGFKGEGPEVDVNLPKADVDVSGPKVDVEVPDVSLEGPEGKLKGPKFKMPEMHFKTPKISMPDVDFNLKGPKIKGDVDVSAPKLEGELKGPELDVKGPKLDADMPEVAVEGPNGKWKTPKFKMPDMHFKAPKISMPDLDLHLKSPKAKGEVDVDVPKLEGDLKGPHVDVSGPDIDIEGPEGKLKGPKFKMPDMHFKAPNISMPDVDLNLKGPKIKGDVDVSVPEVEGKLEVPDMNIRGPKVDVNAPDVQAPDWHLKMPKMKMPKFSMPGFKAEGPEVDVNLPKADVDISGPKVDIEGPDVNIEGPEGKLKGPKLKMPEMNIKAPKISMPDFDLHLKGPKVKGDVDVSLPKVEGDLKGPEVDIKGPKVDINAPDVGVQGPDWHLKMPKVKMPKFSMPGFKGEGPDGDVKLPKADIDVSGPKVDIEGPDVNIEGPEGKLKGPKFKMPEMNIKAPKISMPDIDLNLKGPKVKGDVDVSLPKVEGDLKGPEVDIKGPKVDIDAPDVDVHGPDWHLKMPKIKMPKISMPGFKGEGPDVDVNLPKADIDVSGPKVDVECPDVNIEGPEGKWKSPKFKMPEMHFKTPKISMPDIDLNLTGPKIKGDVDVTGPKVEGDLKGPEVDLKGPKVDIDVPDVNVQGPDWHLKMPKMKMPKFSMPGFKAEGPEVDVNLPKADVDVSGPKVDVEGPDVNIEGPEGKLKGPKFKMPEMNIKAPKIPMPDFDLHLKGPKVKGDVDISLPKVEGDLKGPEVDIRGPQVDIDVPDVGVQGPDWHLKMPKVKMPKFSMPGFKGEGPDVDVNLPKADLDVSGPKVDIDVPDVNIEGPEGKLKGPKFKMPEMNIKAPKISMPDIDLNLKGPKVKGDMDVSLPKVEGDMKVPDVDIKGPKVDINAPDVDVQGPDWHLKMPKIKMPKISMPGFKGEGPEVDVNLPKADLDVSGPKVDVDVPDVNIEGPDAKLKGPKFKMPEMNIKAPKISMPDLDLNLKGPKMKGEVDVSLANVEGDLKGPALDIKGPKIDVDAPDIDIHGPDAKLKGPKLKMPDMHVNMPKISMPEIDLNLKGSKLKGDVDVSGPKLEGDIKAPSLDIKGPEVDVSGPKLNIEGKSKKSRFKLPKFNFSGSKVQTPEVDVKGKKPDIDITGPKVDINAPDVEVQGKVKGSKFKMPFLSISSPKVSMPDVELNLKSPKVKGDLDIAGPNLEGDFKGPKVDIKAPEVNLNAPDVDVHGPDWNLKMPKMKMPKFSVSGLKAEGPDVAVDLPKGDINIEGPSMNIEGPDLNVEGPEGGLKGPKFKMPDMNIKAPKISMPDIDLNLKGPKVKGDVDISLPKLEGDLKGPEVDIKGPKVDINAPDVDVHGPDWHLKMPKVKMPKFSMPGFKGEGPEVDVTLPKADIDISGPNVDVDVPDVNIEGPDAKLKGPKFKMPEMNIKAPKISMPDFDLNLKGPKMKGDVVVSLPKVEGDLKGPEVDIKGPKVDIDTPDINIEGSEGKFKGPKFKIPEMHLKAPKISMPDIDLNLKGPKVKGDVDVSLPKMEGDLKGPEVDIKGPKVDINAPDVDVQGPDWHLKMPKVKMPKFSMPGFKGEGPDVDVNLPKADLDVSGPKVDIDVPDVNIEGPEGKLKGPKFKMPEMNIKAPKISMPDIDLNLKGPKVKGDMDVSLPKVEGDMQVPDLDIKGPKVDINAPDVDVRGPDWHLKMPKIKMPKISMPGFKGEGPEVDVNLPKADLDVSGPKVDVDVPDVNIEGPDAKLKGPKFKMPEMNIKAPKISMPDFDLHLKGPKVKGDVDVSLPKMEGDLKAPEVDIKGPKVDIDAPDVDVHGPDWHLKMPKVKMPKFSMPGFKGEGPEVDVNLPKADIDVSGPKVDIDTPDIDIHGPEGKLKGPKFKMPDLHLKAPKISMPEVDLNLKGPKMKGDVDVSLPKVEGDLKGPEVDIKGPKVDIDVPDVDVQGPDWHLKMPKVKMPKFSMPGFKGEGPDVDVNLPKADLDVSGPKVDIDVPDVNIEGPDAKLKGPKFKMPEMNIKAPKISMPDFDLHLKGPKVKGDVDVSLPKVEGDLKGPEVDIKGPKVDIDAPDVDVHGPDWHLKMPKVKMPKFSMPGFKGEGPDVDVTLPKADIEISGPKVDIDAPDVSIEGPDAKLKGPKFKMPEMNIKAPKISMPDIDFNLKGPKVKGDVDVSLPKVEGDLKGPEIDIKGPSLDIDTPDVNIEGPEGKLKGPKFKMPEMNIKAPKISMPDFDLHLKGPKVKGDVDVSLPKVESDLKGPEVDIEGPEGKLKGPKFKMPDVHFKSPQISMSDIDLNLKGPKIKGDMDISVPKLEGDLKGPKVDVKGPKVGIDTPDIDIHGPEGKLKGPKFKMPDLHLKAPKISMPEVDLNLKGPKVKGDMDISLPKVEGDLKGPEVDIRDPKVDIDVPDVDVQGPDWHLKMPKVKMPKFSMPGFKGEGPDVDVNLPKADIDVSGPKVDVDVPDVNIEGPDAKLKGPKFKMPEMSIKAPKISMPDIDLNLKGPKVKGDVDVTLPKVEGDLKGPEADIKGPKVDINTPDVDVHGPDWHLKMPKVKMPKFSMPGFKGEGPDVDVSLPKADIDVSGPKVDVDIPDVNIEGPDAKLKGPKFKMPEINIKAPKISIPDVDLDLKGPKVKGDFDVSVPKVEGTLKGPEVDLKGPRLDFEGPDAKLSGPSLKMPSLEISAPKVTAPDVDLHLKAPKIGFSGPKLEGGEVDLKGPKVEAPSLDVHMDSPDINIEGPDVKIPKFKKPKFGFGAKSPKADIKSPSLDVTVPEAELNLETPEISVGGKGKKSKFKMPKIHMSGPKIKAKKQGFDLNVPGGEIDASLKAPDVDVNIAGPDAALKVDVKSPKTKKTMFGKMYFPDVEFDIKSPKFKAEAPLPSPKLEGELQAPDLELSLPAIHVEGLDIKAKAPKVKMPDVDISVPKIEGDLKGPKVQANLGAPDINIEGLDAKVKTPSFGISAPQVSIPDVNVNLKGPKIKGDVPSVGLEGPDVDLQGPEAKIKFPKFSMPKIGIPGVKMEGGGAEVHAQLPSLEGDLRGPDVKLEGPDVSLKGPGVDLPSVNLSMPKVSGPDLDLNLKGPSLKGDLDASVPSMKVHAPGLNLSGVGGKMQVGGDGVKVPGIDATTKLNVGAPDVTLRGPSLQGDLAVSGDIKCPKVSVGAPDLSLEASEGSIKLPKMKLPQFGISTPGSDLHVNAKGPQVSGELKGPGVDVNLKGPRISAPNVDFNLEGPKVKGSLGATGEIKGPTVGGGLPGIGVQGLEGNLQMPGIKSSGCDVNLPGVNVKLPTGQISGPEIKGGLKGSEVGFHGAAPDISVKGPAFNMASPESDFGINLKGPKIKGGADVSGGVSAPDISLGEGHLSVKGSGGEWKGPQVSSALNLDTSKFAGGLHFSGPKVEGGVKGGQIGLQAPGLSVSGPQGHLESGSGKVTFPKMKIPKFTFSGRELVGREMGVDVHFPKAEASIQAGAGDGEWEESEVKLKKSKIKMPKFNFSKPKGKGGVTGSPEASISGSKGDLKSSKASLGSLEGEAEAEASSPKGKFSLFKSKKPRHRSNSFSDEREFSGPSTPTGTLEFEGGEVSLEGGKVKGKHGKLKFGTFGGLGSKSKGHYEVTGSDDETGKLQGSGVSLASKKSRLSSSSSNDSGNKVGIQLPEVELSVSTKKE

SEQ ID NO: 64914 - protein, 268 aa, Homo sapiens
RMKAAVLTLAVLFLTGSQARHFWQQDEPPQSPWDRVKDLATVYVDVLKDSGRDYVSQFEGSALGKQLNLKLLDNWDSVTSTFSKLREQLGPVTQEFWDNLEKETEGLRQEMSKDLEEVKAKVQPYLDDFQKKWQEEMELYRQKVEPLRAELQEGARQKLHELQEKLSPLGEEMRDRARAHVDALRTHLAPYSDELRQRLAARLEALKENGGARLAEYHAKATEHLSTLSEKAKPALEDLRQGLLPVLESFKVSFLSALEEYTKKLNTQ

SEQ ID NO: 64915 - protein, 303 aa, Homo sapiens
INDPFIDLNYMVYMFQYDSTHGKFHGTVKAENGKLVINGNPITIFQERDPSKIKWGDAGAEYVVESTGVFTTMEKAGAHLQGGAKRVIISAPSADAPMFVMGVNHEKYDNSLKIISNASCTTNCLAPLAKVIHDNFGIVEGLMTTVHAITATQKTVDGPSGKLWRDGRGALQNIIPASTGAAKAVGKVIPELNGKLTGMAFRVPTANVSVVDLTCRLEKPAKYDDIKKVVKQASEGPLKGILGYTEHQVVSSDFNSDTHSSTFDAGAGIALNDHFVKLISWYDNEFGYSNRVVDLMAHMASKE

SEQ ID NO: 64916 - protein, 91 aa, Homo sapiens
VKVEKPTADAEAYVFTPNMICAGGEKGMDSCKGDSGGAFAVQDPNDKTKFYAAGLVSWGPQCGTYGLYTRVKNYVDWIMKTMQENSTPRED

SEQ ID NO: 64917 - protein, 11 aa, Homo sapiens
VRPHIYGYAVK

SEQ ID NO: 64918 - protein, 890 aa, Homo sapiens
IAVGDKVPADIRLTSIKSTTLRVDQSILTGESVSVIKHTDPVPDPRAVNQDKKNMLFSGTNIAAGKAMGVVVATGVNTEIGKIRDEMVATEQERTPLQQKLDEFGEQLSKVISLICIAVWIINIGHFNDPVHGGSWIRGAIYYFKIAVALAVAAIPEGLPAVITTCLALGTRRMAKKNAIVRSLPSVETLGCTSVICSDKTGTLTTNQMSVCRMFILDRVEGDTCSLNEFTITGSTYAPIGEVHKDDKPVNCHQYDGLVELATICALCNDSALDYNEAKGVYEKVGEATETALTCLVEKMNVFDTELKGLSKIERANACNSVIKQLMKKEFTLEFSRDRKSMSVYCTPNKPSRTSMSKMFVKGAPEGVIDRCTHIRVGSTKVPMTSGVKQKIMSVIREWGSGSDTLRCLALATHDNPLRREEMHLEDSANFIKYETNLTFVGCVGMLDPPRIEVASSVKLCRQAGIRVIMITGDNKGTAVAICRRIGIFGQDEDVTSKAFTGREFDELNPSAQRDACLNARCFARVEPSHKSKIVEFLQSFDEITAMTGDGVNDAPALKKAEIGIAMGSGTAVAKTASEMVLADDNFSTIVAAVEEGRAIYNNMKQFIRYLISSNVGEVVCIFLTAALGFPEALIPVQLLWVNLVTDGLPATALGFNPPDLDIMNKPPRNPKEPLISGWLFFRYLAIGCYVGAATVGAAAWWFIAADGGPRVSFYQLSHFLQCKEDNPDFEGVDCAIFESPYPMTMALSVLVTIEMCNALNSLSENQSLLRMPPWENIWLVGSICLSMSLHFLILYVEPLPLIFQITPLNVTQWLMVLKISLPVILMDETLKFVARNYLEPGKECVQPATKSCSFSACTDGISWPFVLLIMPLVIWVYSTDTNFSDMFWS

SEQ ID NO: 64919 - protein, 64 aa, Homo sapiens
TEASGYISSLEYPRSYPPDLRCNYSIRVERGLTLHLKFLEPFDIDDHQQVHCPYDQLQVQPSYP

SEQ ID NO: 64920 - protein, 467 aa, Homo sapiens
VPSALCCPSRASILTGKYPHNHHVVNNTLEGNCSSKSWQKIQEPNTFPAILRSMCGYQTFFAGKYLNEYGAPDAGGLEHVPLGWSYWYALEKNSKYYNYTLSINGKARKHGENYSVDYLTDVLANVSLDFLDYKSNFEPFFMMIATPAPHSPWTAAPQYQKAFQNVFAPRNKNFNIHGTNKHWLIRQAKTPMTNSSIQFLDNAFRKRWQTLLSVDDLVEKLVKRLEFTGELNNTYIFYTSDNGYHTGQFSLPIDKRQLYEFDIKVPLLVRGPGIKPNQTSKMLVANIDLGPTILDIAGYDLNKTQMDGMSLLPILRGASNLTWRSDVLVEYQGEGRNVTDPTCPSLSPGVSQCFPDCVCEDAYNNTYACVRTMSALWNLQYCEFDDQEVFVEVYNLTADPDQITNIAKTIDPELLGKMNYRLMMLQSCSGPTCRTPGVFDPGYRFDPRLMFSNRGSVRTRRFSKHLL

SEQ ID NO: 64921 - protein, 179 aa, Homo sapiens
VGVFLFLVAFVGCCGACKENYCLMITFAIFLSLIMLVEVAAAIAGYVFRDKVMSEFNNNFRQQMENYPKNNHTASILDRMQADFKCCGAANYTDWEKIPSMSKNRVPDSCCINVTVGCGINFNEKAIHKEGCVEKIGGWLRKNVLVVAAAALGIAFVEVLGIVFACCLVKSIRSGYEVM

SEQ ID NO: 64922 - protein, 1047 aa, Homo sapiens
VCNNGWSMEAVSVICNQLGCPTAIKAPGWANSSAGSGRIWMDHVSCRGNESALWDCKHDGWGKHSNCTHQQDAGVTCSDGSNLEMRLTRGGNMCSGRIEIKFQGRWGTVCDDNFNIDHASVICRQLECGSAVSFSGSSNFGEGSGPIWFDDLICNGNESALWNCKHQGWGKHNCDHAEDAGVICSKGADLSLRLVDGVTECSGRLEVRFQGEWGTICDDGWDSYDAAVACKQLGCPTAVTAIGRVNASKGFGHIWLDSVSCQGHEPAIWQCKHHEWGKHYCNHNEDAGVTCSDGSDLELRLRGGGSRCAGTVEVEIQRLLGKVCDRGWGLKEADVVCRQLGCGSALKTSYQVYSKIQATNTWLFLSSCNGNETSLWDCKNWQWGGLTCDHYEEAKITCSAHREPRLVGGDIPCSGRVEVKHGDTWGSICDSDFSLEAASVLCRELQCGTVVSILGGAHFGEGNGQIWAEEFQCEGHESHLSLCPVAPRPEGTCSHSRDVGVVCSRYTEIRLVNGKTPCEGRVELKTLGAWGSLCNSHWDIEDAHVLCQQLKCGVALSTPGGARFGKGNGQIWRHMFHCTGTEQHMGDCPVTALGASLCPSEQVASVICSGNQSQTLSSCNSSSLGPTRPTIPEESAVACIESGQLRLVNGGGRCAGRVEIYHEGSWGTICDDSWDLSDAHVVCRQLGCGEAINATGSAHFGEGTGPIWLDEMKCNGKESRIWQCHSHGWGQQNCRHKEDAGVICSEFMSLRLTSEASREACAGRLEVFYNGAWGTVGKSSMSETTVGVVCRQLGCADKGKINPASLDKAMSIPMWVDNVQCPKGPDTLWQCPSSPWEKRLASPSEETWITCDNKIRLQEGPTSCSGRVEIWHGGSWGTVCDDSWDLDDAQVVCQQLGCGPALKAFKEAEFGQGTGPIWLNEVKCKGNESSLWDCPARRWGHSECGHKEDAAVNCTDISVQKTPQKATTGRSSRQSSFIAVGILGVVLLAIFVALFFLTKKRRQRQRLAVSSRGENLVHQIQYREMNSCLNADDLDLMNSSGGHSEPH

SEQ ID NO: 64923 - protein, 24 aa, Homo sapiens
RGNRSLFTDLEAENDVLHCVAFAK

SEQ ID NO: 64924 - protein, 681 aa, Homo sapiens
VKTLTGKTITLEVEPSDTIENVKAKIQDKEGIPPDQQRLIFAGKQLEDGRTLSDYNIQKESTLHLVLRLRGGMQIFVKTLTGKTITLEVEPSDTIENVKAKIQDKEGIPPDQQRLIFAGKQLEDGRTLSDYNIQKESTLHLVLRLRGGMQIFVKTLTGKTITLEVEPSDTIENVKAKIQDKEGIPPDQQRLIFAGKQLEDGRTLSDYNIQKESTLHLVLRLRGGMQIFVKTLTGKTITLEVEPSDTIENVKAKIQDKEGIPPDQQRLIFAGKQLEDGRTLSDYNIQKESTLHLVLRLRGGMQIFVKTLTGKTITLEVEPSDTIENVKAKIQDKEGIPPDQQRLIFAGKQLEDGRTLSDYNIQKESTLHLVLRLRGGMQIFVKTLTGKTITLEVEPSDTIENVKAKIQDKEGIPPDQQRLIFAGKQLEDGRTLSDYNIQKESTLHLVLRLRGGMQIFVKTLTGKTITLEVEPSDTIENVKAKIQDKEGIPPDQQRLIFAGKQLEDGRTLSDYNIQKESTLHLVLRLRGGMQIFVKTLTGKTITLEVEPSDTIENVKAKIQDKEGIPPDQQRLIFAGKQLEDGRTLSDYNIQKESTLHLVLRLRGGMQIFVKTLTGKTITLEVEPSDTIENVKAKIQDKEGIPPDQQRLIFAGKQLEDGRTLSDYNIQKESTLHLVLRLRGGV

SEQ ID NO: 64925 - protein, 366 aa, Homo sapiens
VNYDTKSGPKNMTFDLPSDATVVLNRSSCGKENTSDPSLVIAFGRGHTLTLNFTRNATRYSVQLMSFVYNLSDTHLFPNASSKEIKTVESITDIRADIDKKYRCVSGTQVHMNNVTVTLHDATIQAYLSNSSFSRGETRCEQDRPSPTTAPPAPPSPSPSPVPKSPSVDKYNVSGTNGTCLLASMGLQLNLTYERKDNTTVTRLLNINPNKTSASGSCGAHLVTLELHSEGTTVLLFQFGMNASSSRFFLQGIQLNTILPDARDPAFKAANGSLRALQATVGNSYKCNAEEHVRVTKAFSVNIFKVWVQAFKVEGGQFGSVEECLLDENSMLIPIAVGGALAGLVLIVLIAYLVGRKRSHAGYQTI

SEQ ID NO: 64926 - protein, 114 aa, Homo sapiens
LTQHYDAKPQGRDDRYCESIMRRRGLTSPCKDINTFIHGNKRSIKAICENKNGNPHRENLRISKSSFQVTTCKLHGGSPWPPCQYRATAGFRNVVVACENGLPVHLDQSIFRRP

SEQ ID NO: 64927 - protein, 414 aa, Homo sapiens
IDDPEDGGKHWVVIVAGSNGWYNYRHQADACHAYQIIHRNGIPDEQIVVMMYDDIAYSEDNPTPGIVINRPNGTDVYQGVPKDYTGEDVTPQNFLAVLRGDAEAVKGIGSGKVLKSGPQDHVFIYFTDHGSTGILVFPNEDLHVKDLNETIHYMYKHKMYRKMVFYIEACESGSMMNHLPDNINVYATTAANPRESSYACYYDEKRSTYLGDWYSVNWMEDSDVEDLTKETLHKQYHLVKSHTNTSHVMQYGNKTISTMKVMQFQGMKRKASSPVPLPPVTHLDLTPSPDVPLTIMKRKLMNTNDLEESRQLTEEIQRHLDARHLIEKSVRKIVSLLAASEAEVEQLLSERAPLTGHSCYPEALLHFRTHCFNWHSPTYEYALRHLYVLVNLCEKPYPLHRIKLSMDHVCLGHY

SEQ ID NO: 64928 - protein, 433 aa, Homo sapiens
TSSVAVGCLAQDFLPDSITFSWKYKNNSDISSTRGFPSVLRGGKYAATSQVLLPSKDVMQGTDEHVVCKVQHPNGNKEKNVPLPVIAELPPKVSVFVPPRDGFFGNPRKSKLICQATGFSPRQIQVSWLREGKQVGSGVTTDQVQAEAKESGPTTYKVTSTLTIKESDWLGQSMFTCRVDHRGLTFQQNASSMCVPDQDTAIRVFAIPPSFASIFLTKSTKLTCLVTDLTTYDSVTISWTRQNGEAVKTHTNISESHPNATFSAVGEASICEDDWNSGERFTCTVTHTDLPSPLKQTISRPKGVALHRPDVYLLPPAREQLNLRESATITCLVTGFSPADVFVQWMQRGQPLSPEKYVTSAPMPEPQAPGRYFAHSILTVSEEEWNTGETYTCVVAHEALPNRVTERTVDKSTGKPTLYNVSLVMSDTAGTCY

SEQ ID NO: 64929 - protein, 327 aa, Homo sapiens
LEGDHSTPPSAYGSVKAYTNFDAERDALNIETAIKTKGVDEVTIVNILTNRSNAQRQDIAFAYQRRTKKELASALKSALSGHLETVILGLLKTPAQYDASELKASMKGLGTDEDSLIEIICSRTNQELQEINRVYKEMYKTDLEKDIISDTSGDFRKLMVALAKGRRAEDGSVIDYELIDQDARDLYDAGVKRKGTDVPKWISIMTERSVPHLQKVFDRYKSYSPYDMLESIRKEVKGDLENAFLNLVQCIQNKPLYFADRLYDSMKGKGTRDKVLIRIMVSRSEVDMLKIRSEFKRKYGKSLYYYIQQDTKGDYQKALLYLCGGDD

SEQ ID NO: 64930 - protein, 288 aa, Homo sapiens
TEEYHHRLQTFASNWRKINAHNNGNHTFKMALNQFSDMSFAEIKHKYLWSEPQNCSATKSNYLRGTGPYPPSVDWRKKGNFVSPVKNQGACGSCWTFSTTGALESAIAIATGKMLSLAEQQLVDCAQDFNNHGCQGGLPSQAFEYILYNKGIMGEDTYPYQGKDGYCKFQPGKAIGFVKDVANITIYDEEAMVEAVALYNPVSFAFEVTQDFMMYRTGIYSSTSCHKTPDKVNHAVLAVGYGEKNGIPYWIVKNSWGPQWGMNGYFLIERGKNMCGLAACASYPIPLV

SEQ ID NO: 64931 - protein, 21 aa, Homo sapiens
VHASLDKFLASVSTVLTSKYR

SEQ ID NO: 64932 - protein, 21 aa, Homo sapiens
VHASLDKFLASVSTVLTSKYR

SEQ ID NO: 64933 - protein, 32 aa, Homo sapiens
KKSCCSCCPVGCAKCAQGCICKGASDKCSCCA

SEQ ID NO: 64934 - protein, 23 aa, Homo sapiens
VGCAKCAQGCVCKGASEKCSCCA

SEQ ID NO: 64935 - protein, 19 aa, Homo sapiens
KCAQGCVCKGASEKCSCCD

SEQ ID NO: 64936 - protein, 31 aa, Homo sapiens
KSCCSCCPVGCAKCAQGCICKGTSDKCSCCA

SEQ ID NO: 64937 - protein, 60 aa, Homo sapiens
LPSCSGDSFLQWTQAMMSRISQMTAARSPPRLHMAMWSTRFATSVRTTTNCAQKEMEYTP

SEQ ID NO: 64938 - protein, 17 aa, Homo sapiens
VKVTSIQHWVQKTIAEN

SEQ ID NO: 64939 - protein, 352 aa, Homo sapiens
LAVLFSGALLGLLAAQGTGNDCPHKKSATLLPSFTVTPTVTESTGTTSHRTTKSHKTTTHRTTTTGTTSHGPTTATHNPTTTSHGNVTVHPTSNSTATSQGPSTATHSPATTSHGNATVHPTSNSTATSPGFTSSAHPEPPPPSPSPSPTSKETIGDYTWTNGSQPCVHLQAQIQIRVMYTTQGGGEAWGISVLNPNKTKVQGSCEGAHPHLLLSFPYGHLSFGFMQDLQQKVVYLSYMAVEYNVSFPHAAQWTFSAQNASLRDLQAPLGQSFSCSNSSIILSPAVHLDLLSLRLQAAQLPHTGVFGQSFSCPSDRSILLPLIIGLILLGLLALVLIAFCIIRRRPSAYQAL

SEQ ID NO: 64940 - protein, 1607 aa, Homo sapiens
MNPASKVIALKGIKESGKTLQIFNIEMKSKMKAHTMTDDVTFWKWISLNTVALVTDNAVYHWSMEGESQPVKMFDRHSSLAGCQIINYRTDAKQKWLLLTGISAQQNRVVGAMQLYSVDRKVSQPIEGHAASFAQFKMEGNAEESTLFCFAVRGQAGGKLHIIEVGTPPTGNQPFPKKAVDVFFPPEAQNDFPVAMQISEKHDVVFLITKYGYIHLYDLETGTCIYMNRISGETIFVTAPHEATAGIIGVNRKGQVLSVCVEEENIIPYITNVLQNPDLALRMAVRNNLAGAEELFARKFNALFAQGNYSEAAKVAANAPKGILRTPDTIRRFQSVPAQPGQTSPLLQYFGILLDQGQLNKYESLELCRPVLQQGRKQLLEKWLKEDKLECSEELGDLVKSVDPTLALSVYLRANVPNKVIQCFAETGQVQKIVLYAKKVGYTPDWIFLLRNVMRISPDQGQQFAQMLVQDEEPLADITQIVDVFMEYNLIQQCTAFLLDALKNNRPSEGPLQTRLLEMNLMHAPQVADAILGNQMFTHYDRAHIAQLCEKAGLLQRALEHFTDLYDIKRAVVHTHLLNPEWLVNYFGSLSVEDSLECLRAMLSANIRQNLQICVQVASKYHEQLSTQSLIELFESFKSFEGLFYFLGSIVNFSQDPDVHFKYIQAACKTGQIKEVERICRESNCYDPERVKNFLKEAKLTDQLPLIIVCDRFDFVHDLVLYLYRNNLQKYIEIYVQKVNPSRLPVVIGGLLDVDCSEDVIKNLILVVRGQFSTDELVAEVEKRNRLKLLLPWLEARIHEGCEEPATHNALAKIYIDSNNNPERFLRENPYYDSRVVGKYCEKRDPHLACVAYERGQCDLELINVCNENSLFKSLSRYLVRRKDPELWGSVLLESNPYRRPLIDQVVQTALSETQDPEEVSVTVKAFMTADLPNELIELLEKIVLDNSVFSEHRNLQNLLILTAIKADRTRVMEYINRLDNYDAPDIANIAISNELFEEAFAIFRKFDVNTSAVQVLIEHIGNLDRAYEFAERCNEPAVWSQLAKAQLQKGMVKEAIDSYIKADDPSSYMEVVQAANTSGNWEELVKYLQMARKKARESYVETELIFALAKTNRLAELEEFINGPNNAHIQQVGDRCYDEKMYDAAKLLYNNVSNFGRLASTLVHLGEYQAAVDGARKANSTRTWKEVCFACVDGKEFRLAQMCGLHIVVHADELEELINYYQDRGYFEELITMLEAALGLERAHMGMFTELAILYSKFKPQKMREHLELFWSRVNIPKVLRAAEQAHLWAELVFLYDKYEEYDNAIITMMNHPTDAWKEGQFKDIITKVANVELYYRAIQFYLEFKPLLLNDLLMVLSPRLDHTRAVNYFSKVKQLPLVKPYLRSVQNHNNKSVNESLNNLFITEEDYQALRTSIDAYDNFDNISLAQRLEKHELIEFRRIAAYLFKGNNRWKQSVELCKKDSLYKDAMQYASESKDTELAEELLQWFLQEEKRECFGACLFTCYDLLRPDVVLETAWRHNIMDFAMPYFIQVMKEYLTKVDKLDASESLRKEEEQATETQPIVYGQPQLMLTAGPSVAVPPQAPFGYGYTAPPYGQPQPGFGYSM

SEQ ID NO: 64941 - protein, 20 aa, Homo sapiens
ICIFCCGCCHRSKCGMCCKT

SEQ ID NO: 64942 - protein, 24 aa, Homo sapiens
MRLFLSLPVLVVVLSIVLEGPAPA

SEQ ID NO: 64943 - protein, 115 aa, Homo sapiens
RTRDGWQWFWSLDTMGTRLLPALFLVLLVLGFEVQGTQQPQQDEMPSPTFLTQVKESLSSYWESAKTAAQNLYEKTYLPAVDEKLRDLYSKSTAAMSTYTGIFTDQVLSVLKGEE

SEQ ID NO: 64944 - protein, 20 aa, Homo sapiens
VPHTFESELSDPVELLVAES

SEQ ID NO: 64945 - protein, 399 aa, Homo sapiens
TPEGIALAYGSLLLMALLPIFFGALRSVRCARGKNASDMPETITSRDAARFPIIASCTLLGLYLFFKIFSQEYINLLLSMYFFVLGILALSHTISPFMNKFFPASFPNRQYQLLFTQGSGENKEEIINYEFDTKDLVCLGLSSIVGVWYLLRKHWIANNLFGLAFSLNGVELLHLNNVSTGCILLGGLFIYDVFWVFGTNVMVTVAKSFEAPIKLVFPQDLLEKGLEANNFAMLGLGDVVIPGIFIALLLRFDISLKKNTHTYFYTSFAAYIFGLGLTIFIMHIFKHAQPALLYLVPACIGFPVLVALAKGEVTEMFSYESSAEILPHTPRLTHFPTVSGSPASLADSMQQKLAGPRRRRPQNPSAIYEESNPKDPAAVTESKEGTEASASKGLEKKEK

SEQ ID NO: 64946 - protein, 438 aa, Homo sapiens
KQPSFRQYSGYLKGSGSKHLHYWFVESQKDPENSPVVLWLNGGPGCSSLDGLLTEHGPFLVQPDGVTLEYNPYSWNLIANVLYLESPAGVGFSYSDDKFYATNDTEVAQSNFEALQDFFRLFPEYKNNKLFLTGESYAGIYIPTLAVLVMQDPSMNLQGLAVGNGLSSYEQNDNSLVYFAYYHGLLGNRLWSSLQTHCCSQNKCNFYDNKDLECVTNLQEVARIVGNSGLNIYNLYAPCAGGVPSHFRYEKDTVVVQDLGNIFTRLPLKRMWHQALLRSGDKVRMDPPCTNTTAASTYLNNPYVRKALNIPEQLPQWDMCNFLVNLQYRRLYRSMNSQYLKLLSSQKYQILLYNGDVDMACNFMGDEWFVDSLNQKMEVQRRPWLVKYGDSGEQIAGFVKEFSHIAFLTIKGAGHMVPTDKPLAAFTMFSRFLNKQPY

SEQ ID NO: 64947 - protein, 673 aa, Homo sapiens
LRTNLTDRQLAEEYLYRYGYTRVAEMRGESKSLGPALLLLQKQLSLPETGELDSATLKAMRTPRCGVPDLGRFQTFEGDLKWHHHNITYWIQNYSEDLPRAVIDDAFARAFALWSAVTPLTFTRVYSRDADIVIQFGVAEHGDGYPFDGKDGLLAHAFPPGPGIQGDAHFDDDELWSLGKGVVVPTRFGNADGAACHFPFIFEGRSYSACTTDGRSDGLPWCSTTANYDTDDRFGFCPSERLYTQDGNADGKPCQFPFIFQGQSYSACTTDGRSDGYRWCATTANYDRDKLFGFCPTRADSTVMGGNSAGELCVFPFTFLGKEYSTCTSEGRGDGRLWCATTSNFDSDKKWGFCPDQGYSLFLVAAHEFGHALGLDHSSVPEALMYPMYRFTEGPPLHKDDVNGIRHLYGPRPEPEPRPPTTTTPQPTAPPTVCPTGPPTVHPSERPTAGPTGPPSAGPTGPPTAGPSTATTVPLSPVDDACNVNIFDAIAEIGNQLYLFKDGKYWRFSEGRGSRPQGPFLIADKWPALPRKLDSVFEERLSKKLFFFSGRQVWVYTGASVLGPRRLDKLGLGADVAQVTGALRSGRGKMLLFSGRRLWRFDVKAQMVDPRSASEVDRMFPGVPLDTHDVFQYREKAYFCQDRFYWRVSSRSELNQVDQVGYVTYDILQCPED

SEQ ID NO: 64948 - protein, 25 aa, Homo sapiens
KTETQEKNPLPSKETIEQEKQAGES

SEQ ID NO: 64949 - protein, 60 aa, Homo sapiens
KAVSFKSQVVAGTNYFIKVHVGDEDFVHLRVFQSLPHENKPLTLSNYQTNKAKHDELTYF

SEQ ID NO: 64950 - protein, 25 aa, Homo sapiens
KTETQEKNPLPSKETIEQEKQAGES

SEQ ID NO: 64951 - protein, 696 aa, Homo sapiens
LNSSDNQSGGSTASRRYIPPHLRNREATKGFYDKDSSGWSSSKDKDAYSSFGSRSDSRGKSSFFSDRGSGSRGRFDDRGRSDYDGIGSRGDRSGFGKFERGGNSRWCDKSDEDDWSKPLPPSERLEQELFSGGNTGINFEKYDDIPVEATGNNCPPHIESFSDVEMGEIIMGNIELTRYTRPTPVQKHAIPIIKEKRDLMACAQTGSGKTAAFLLPILSQIYSDGPGEALRAMKENGRYGRRKQYPISLVLAPTRELAVQIYEEARKFSYRSRVRPCVVYGGADIGQQIRDLERGCHLLVATPGRLVDMMERGKIGLDFCKYVLFCFCFFVLFCFVLLFLAELRSCCPGWSAMARSRLTTTSASRVQAILLPQPPRYLVLDEADRMLDMGFEPQIRRIVEQDTMPPKGVRHTMMFSATFPKEIQMLARDFLDEYIFLAVGRVGSTSENITQKVVWVEESDKRSFLLDLLNATGKDSLTLVFVETKKGADSLEDFLYHEGYACTSIHGDRSQRDREEALHQFRSGKSPILVATAVAARGLDISNVKHVINFDLPSDIEEYVHRIGRTGRVGNLGLATSFFNERNINITKDLLDLLVEAKQEVPSWLENMAYEHHYKGSSRGRSKSSRFSGGFGARDYRQSSGASSSSFSSSRASSSRSGGGGHGSSRGFGGGGYGGFYNSDGYGGNYNSQGVDWWGN

SEQ ID NO: 64952 - protein, 501 aa, Homo sapiens [sequence omitted]

SEQ ID NO: 64953 - protein, 502 aa, Homo sapiens [sequence omitted]

SEQ ID NO: 64954 - protein, 44 aa, Homo sapiens
MKFLKVAHTHLKGLMFLWKASQNISQFSVTCWFVCLLVYLLVYQ

SEQ ID NO: 64955 - protein, 599 aa, Homo sapiens
MGLVLALALALALALALSDSRVLWAPAEAHPLSPQGHPARLHRIVPRLRDVFGWGNLTCPICKGLFTAINLGLKKEPNVARVGSVAIKLCNLLKIAPPAVCQSIVHLFEDDMVEVWRRSVLSPSEACGLLLGSTCGHWDIFSSWNISLPTVPKPPPKPPSPPAPGAPVSRILFLTDLHWDHDYLEGTDPDCADPLCCRRGSGLPPASRPGAGYWGEYSKCDLPLRTLESLLSGLGPAGPFDMVYWTGDIPAHDVWHQTRQDQLRALTTVTALVRKFLGPVPVYPAVGNHESTPVNSFPPPFIEGNHSSRWLYEAMAKAWEPWLPAEALRTLRIGGFYALSPYPGLRLISLNMNFCSRENFWLLINSTDPAGQLQWLVGELQAAEDRGDKVHIIGHIPPGHCLKSWSWNYYRIVARYENTLAAQFFGHTHVDEFEVFYDEETLSRPLAVAFLAPSATTYIGLNPGYRVYQIDGNYSGSSHVVLDHETYILNLTQANIPGAIPHWQLLYRARETYGLPNTLPTAWHNLVYRMRGDMQLFQTFWFLYHKGHPPSEPCGTPCRLATLCAQLSARADSPALCRHLMPDGSLPEAQSLWPRPLFC

SEQ ID NO: 64956 - protein, 493 aa, Homo sapiens
MGSLQPLATLYLLGMLVASCLGRLSWYDPDFQARLTRSNSKCQGQLEVYLKDGWHMVCSQSWGRSSKQWEDPSQASKVCQRLNCGVPLSLGPFLVTYTPQSSIICYGQLGSFSNCSHSRNDMCHSLGLTCLEPQKTTPPTTRPPPTTTPEPTAPPRLQLVAQSGGQHCAGVVEFYSGSLGGTISYEAQDKTQDLENFLCNNLQCGSFLKHLPETEAGRAQDPGEPREHQPLPIQWKIQNSSCTSLEHCFRKIKPQKSGRVLALLCSGFQPKVQSRLVGGSSICEGTVEVRQGAQWAALCDSSSARSSLRWEEVCREQQCGSVNSYRVLDAGDPTSRGLFCPHQKLSQCHELWERNSYCKKVFVTCQDPNPAGLAAGTVASIILALVLLVVLLVVCGPLAYKKLVKKFRQKKQRQWIGPTGMNQNMSFHRNHTATVRSHAENPTASHVDNEYSQPPRNSHLSAYPALEGALHRSSMQPDNSSDSDYDLHGAQRL

SEQ ID NO: 64957 - protein, 18 aa, Homo sapiens
MRPLLRICAYLVPLLSTS

SEQ ID NO: 64958 - protein, 285 aa, Homo sapiens
MTGILLCAAGLPVCLTRAPKPILHPPPVSKSDVKPVPGVPGVCRKTKKKHLKKSKNPEDVVRRYMQKVKNPPDEDCTICMERLVTASGYEGVLRHKGVRPELVGRLGRCGHMYHLLCLVAMYSNGNKDGSLQCPTCKAIYGEKTGTQPPGKMEFHLIPHSLPGFPDTQTIRIVYDIPTGIQGPEHPNPGKKFTARGFPRHCYLPNNEKGRKVLRLLITAWERRLIFTIGTSNTTGESDTVVWNEIHHKTEFGSNLTGHGYPDASYLDNVLAELTAQGVSEAAAKA

SEQ ID NO: 64959 - protein, 71 aa, Homo sapiens
MLSSGPAWLAIVLLVTISLLPDVLKKVLCRQLWPTATERVQRGVKHKAPVQAAQSSDGPLLKDLLRRPRRS

SEQ ID NO: 64960 - protein, 4529 aa, Homo sapiens
MLSAILLLLQLWDSGAQETDNERSAQGTSAPLLPLLQRFQSIICRKDAPHSEGDMHLLSGPLSPNESFLRYLTLPQDNELAIDLRQTAVVVMAHLDRLATPCMPPLCSSPTSHKGSLQEVIGWGLIGWKYYANVIGPIQCEGLANLGVTQIACAEKRFLILSRNGRVYTQAYNSDTLAPQLVQGLASRNIVKIAAHSDGHHYLALAATGEVYSWGCGDGGRLGHGDTVPLEEPKVISAFSGKQAGKHVVHIACGSTYSAAITAEGELYTWGRGNYGRLGHGSSEDEAIPMLVAGLKGLKVIDVACGSGDAQTLAVTENGQVWSWGDGDYGKLGRGGSDGCKTPKLIEKLQDLDVVKVRCGSQFSIALTKDGQVYSWGKGDNQRLGHGTEEHVRYPKLLEGLQGKKVIDVAAGSTHCLALTEDSEVHSWGSNDQCQHFDTLRVTKPEPAALPGLDTKHIVGIACGPAQSFAWSSCSEWSIGLRVPFVVDICSMTFEQLDLLLRQVSEGMDGSADWPPPQEKECVAVATLNLLRLQLHAAISHQVDPEFLGLGLGSILLNSLKQTVVTLASSAGVLSTVQSAAQAVLQSGWSVLLPTAEERARALSALLPCAVSGNEVNISPGRRFMIDLLVGSLMADGGLESALHAAITAEIQDIEAKKEAQKEKEIDEQEANASTFHRSRTPLDKDLINTGICESSGKQCLPLVQLIQQLLRNIASQTVARLKDVARRISSCLDFEQHSRERSASLDLLLRFQRLLISKLYPGESIGQTSDISSPELMGVGSLLKKYTALLCTHIGDILPVAASIASTSWRHFAEVAYIVEGDFTGVLLPELVVSIVLLLSKNAGLMQEAGAVPLLGGLLEHLDRFNHLAPGKERDDHEELAWPGIMESFFTGQNCRNNEEVTLIRKADLENHNKDGGFWTVIDGKVYDIKDFQTQSLTGNSILAQFAGEDPVVALEAALQFEDTRESMHAFCVGQYLEPDQEIVTIPDLGSLSSPLIDTERNLGLLLGLHASYLAMSTPLSPVEIECAKWLQSSIFSGGLQTSQIHYSYNEEKDEDHCSSPGGTPASKSRLCSHRRALGDHSQAFLQAIADNNIQDHNVKDFLCQIERYCRQCHLTTPIMFPPEHPVEEVGRLLLCCLLKHEDLGHVALSLVHAGALGIEQVKHRTLPKSVVDVCRVVYQAKCSLIKTHQEQGRSYKEVCAPVIERLRFLFNELRPAVCNDLSIMSKFKLLSSLPRWRRIAQKIIRERRKKRVPKKPESTDDEEKIGNEESDLEEACILPHSPINVDKRPIAIKSPKDKWQPLLSTVTGVHKYKWLKQNVQGLYPQSPLLSTIAEFALKEEPVDVEKMRKCLLKQLERAEVRLEGIDTILKLASKNFLLPSVQYAMFCGWQRLIPEGIDIGEPLTDCLKDVDLIPPFNRMLLEVTFGKLYAWAVQNIRNVLMDASAKFKELGIQPVPLQTITNENPSGPSLGTIPQARFLLVMLSMLTLQHGANNLDLLLNSGMLALTQTALRLIGPSCDNVEEDMNASAQGASATVLEETRKETAPVQLPVSGPELAAMMKIGTRVMRGVDWKWGDQDGPPPGLGRVIGELGEDGWIRVQWDTGSTNSYRMGKEGKYDLKLAELPAAAQPSAEDSDTEDDSEAEQTERNIHPTAMMFTSTINLLQTLCLSAGVHAEIMQSEATKTLCGLLRMLVESGTTDKTSSPNRLVYREQHRSWCTLGFVRSIALTPQVCGALSSPQWITLLMKVVEGHAPFTATSLQRQILAVHLLQAVLPSWDKTERARDMKCLVEKLFDFLGSLLTTCSSDVPLLRESTLRRRRVRPQASLTATHSSTLAEEVVALLRTLHSLTQWNGLINKYINSQLRSITHSFVGRPSEGAQLEDYFPDSENPEVGGLMAVLAVIGGIDGRLRLGGQVMHDEFGEGTVTRITPKGKITVQFSDMRTCRVCPLNQLKPLPAVAFNVNNLPFTEPMLSVWAQLVNLAGSKLEKHKIKKSTKQAFAGQVDLDLLRCQQLKLYILKAGRALLSHQDKLRQILSQPAVQETGTVHTDDGAVVSPDLGDMSPEGPQPPMILLQQLLASATQPSPVKAIFDKQELEAAALAVCQCLAVESTHPSSPGFEDCSSSEATTPVAVQHIRPARVKRRKQSPVPALPIVVQLMEMGFSRRNIEFALKSLTGASGNASSLPGVEALVGWLLDHSDIQVTELSDADTVSDEYSDEEVVEDVDDAAYSMSTGAVVTESQTYKKRADFLSNDDYAVYVRENIQVGMMVRCCRAYEEVCEGDVGKVIKLDRDGLHDLNVQCDWQQKGGTYWVRYIHVELIGYPPPSSSSHIKIGDKVRVKASVTTPKYKWGSVTHQSVGVVKAFSANGKDIIVDFPQQSHWTGLLSEMELVPSIHPGVTCDGCQMFPINGSRFKCRNCDDFDFCETCFKTKKHNTRHTFGRINEPGQSAVFCGRSGKQLKRCHSSQPGMLLDSWSRMVKSLNVSSSVNQASRLIDGSEPCWQSSGSQGKHWIRLEIFPDVLVHRLKMIVDPADSSYMPSLVVVSGGNSLNNLIELKTININPSDTTVPLLNDCTEYHRYIEIAIKQCRSSGIDCKIHGLILLGRIRAEEEDLAAVPFLASDNEEEEDEKGNSGSLIRKKAAGLESAATIRTKVFVWGLNDKDQLGGLKGSKIKVPSFSETLSALNVVQVAGGSKSLFAVTVEGKVYACGEATNGRLGLGISSGTVPIPRQITALSSYVVKKVAVHSGGRHATALTVDGKVFSWGEGDDGKLGHFSRMNCDKPRLIEALKTKRIRDIACGSSHSAALTSSGELYTWGLGEYGRLGHGDNTTQLKPKMVKVLLGHRVIQVACGSRDAQTLALTDEGLVFSWGDGDFGKLGRGGSEGCNIPQNIERLNGQGVCQIECGAQFSLALTKSGVVWTWGKGDYFRLGHGSDVHVRKPQVVEGLRGKKIVHVAVGALHCLAVTDSGQVYAWGDNDHGQQGNGTTTVNRKPTLVQGLEGQKITRVACGSSHSVAWTTVDVATPSVHEPVLFQTARDPLGASYLGVPSDADSSAASNKISGASNSKPNRPSLAKILLSLDGNLAKQQALSHILTALQIMYARDAVVGALMPAAMIAPVECPSFSSAAPSDASAMASPMNGEECMLAVDIEDRLSPNPWQEKREIVSSEDAVTPSAVTPSAPSASARPFIPVTDDLGAASIIAETMTKTKEDVESQNKAAGPEPQALDEFTSLLIADDTRVVVDLLKLSVCSRAGDRGRDVLSAVLSGMGTAYPQVADMLLELCVTELEDVATDSQSGRLSSQPVVVESSHPYTDDTSTSGTVKIPGAEGLRVEFDRQCSTERRHDPLTVMDGVNRIVSVRSGREWSDWSSELRIPGDELKWKFISDGSVNGWGWRFTVYPIMPAAGPKELLSDRCVLSCPSMDLVTCLLDFRLNLASNRSIVPRLAASLAACAQLSALAASHRMWALQRLRKLLTTEFGQSININRLLGENDGETRALSFTGSALAALVKGLPEALQRQFEYEDPIVRGGKQLLHSPFFKVLVALACDLELDTLPCCAETHKWAWFRRYCMASRVAVALDKRTPLPRLFLDEVAKKIRELMADSENMDVLHESHDIFKREQDEQLVQWMNRRPDDWTLSAGGSGTIYGWGHNHRGQLGGIEGAKVKVPTPCEALATLRPVQLIGGEQTLFAVTADGKLYATGYGAGGRLGIGGTESVSTPTLLESIQHVFIKKVAVNSGGKHCLALSSEGEVYSWGEAEDGKLGHGNRSPCDRPRVIESLRGIEVVDVAAGGAHSACVTAAGDLYTWGKGRYGRLGHSDSEDQLKPKLVEALQGHRVVDIACGSGDAQTLCLTDDDTVWSWGDGDYGKLGRGGSDGCKVPMKIDSLTGLGVVKVECGSQFSVALTKSGAVYTWGKGDYHRLGHGSDDHVRRPRQVQGLQGKKVIAIATGSLHCVCCTEDGEVYTWGDNDEGQLGDGTTNAIQRPRLVAALQGKKVNRVACGSAHTLAWSTSKPASAGKLPAQVPMEYNHLQEIPIIALRNRLLLLHHLSELFCPCIPMFDLEGSLDETGLGPSVGFDTLRGILISQGKEAAFRKVVQATMVRDRQHGPVVELNRIQVKRSRSKGGLAGPDGTKSVFGQMCAKMSSFGPDSLLLPHRVWKVKFVGESVDDCGGGYSESIAEICEELQNGLTPLLIVTPNGRDESGANRDCYLLSPAARAPVHSSMFRFLGVLLGIAIRTGSPLSLNLAEPVWKQLAGMSLTIADLSEVDKDFIPGLMYIRDNEATSEEFEAMSLPFTVPSASGQDIQLSSKHTHITLDNRAEYVRLAINYRLHEFDEQVAAVREGMARVVPVPLLSLFTGYELETMVCGSPDIPLHLLKSVATYKGIEPSASLIQWFWEVMESFSNTERSLFLRFVWGRTRLPRTIADFRGRDFVIQVLDKYNPPDHFLPESYTCFFLLKLPRYSCKQVLEEKLKYAIHFCKSIDTDDYARIALTGEPAADDSSDDSDNEDVDSFASDSTQDYLTGH

SEQ ID NO: 64961 - protein, 306 aa, Homo sapiens
MFAVIVASSGLLLMIERGILAEMKPLPLHPPGREGTAWRGKAPKPGGLSLRAGDADLQVRQDVRNRTLRAVCGQPGMPRDPWDLPVGQRRTLLRHILVLAGVLDSVDVRLKMDHRSDLVFLADLRPEEIRYRLQHYFKFLFVREPLERLLSAYRNKFGEIREYQQRYGAEIVRRYRAGAGPSPAGDDVTFPEFLRYLVDEDPERMNEHWMPVYHLCQPCAVHYDFVGSYERLEADANQVLEWVRAPPHVRFPARQAWYRPASPESLHYHLCSAPRALLQDVLPKYILDFSLFAYPLPNVTKEACQQ

SEQ ID NO: 64962 - protein, 656 aa, Homo sapiens [sequence omitted]

SEQ ID NO: 64963 - protein, 74 aa, Homo sapiens
MLIMLGIFFNVHSAVLIEDVPFTEKDFENGPQNIYNLYEQVSYNCFIAAGLYLLLGGFSFCQVRLNKRKEYMVR

SEQ ID NO: 64964 - protein, 541 aa, Homo sapiens
MLPTVLIIAFLLYTIRRGPAGIGRTGRGMGGLFSVGETTAKVLKDEIDVKFKDVAGCEEAKLEIMEFVNFLKNPKQYQDLGAKIPKGAILTGPPGTGKTLLAKATAGEANVPFITVSGSEFLEMFVGVGPARVRDLFALARKNAPCILFIDEIDAVGRKRGRGNFGGQSEQENTLNQLLVEMDGFNTTTNVVILAGTNRPDILDPALLRPGRFDRQIFIGPPDIKGRASIFKVHLRPLKLDSTLEKDKLARKLASLTPGFSGADVANVCNEAALIAARHLSDSINQKHFEQAIERVIGGLEKKTQVLQPEEKKTVAYHEAGHAVAGWYLEHADPLLKVSIIPRGKGLGYAQYLPKEQYLYTKEQLLDRMCMTLGGRVSEEIFFGRITTGAQDDLRKVTQSAYAQIVQFGMNEKVGQISFDLPRQGDMVLEKPYSEATARLIDDEVRILINDAYKRTVALLTEKKADVEKVALLLLEKEVLDKNDMVELLGPRPFAEKSTYEEFVEGTGSLDEDTSLPEGLKDWNKEREKEKEEPPGEKVAN

SEQ ID NO: 64965 - protein, 75 aa, Homo sapiens
MVICYVYFTRIIAILLQVAVPFQWQWLYQPTGNNPYLQLPQEDEEDVQMEQVMTDSGFREGLSKVNKTASGRELL

SEQ ID NO: 64966 - protein, 327 aa, Homo sapiens
MKVRGAPAIALVGCLSLAVELQAGAGGPGLAALVAFVRDKLSFLVTARPTAVNMARAARDLADVAAREAEREGATEEAVRERVICCTEDMLEKDLRDNRSIGDLGARHLLERVAPSGGKVTVLTHCNTGALATAGYGTALGVIRSLHSLGRLEHAFCTETRPYNQGARLTAFELVYEQIPATLITDSMVAAAMAHRGVSAVVVGADRVVANGDTANKVGTYQLAIVAKHHGIPFYVAAPSSSCDLRLETGKEIIIEERPGQELTDVNGVRIAAPGIGVWNPAFDVTPHDLITGGIITELGVFAPEELRTALTTTISSRDGTLDGPQM

SEQ ID NO: 64967 - protein, 300 aa, Homo sapiens [sequence omitted]

SEQ ID NO: 64968 - protein, 960 aa, Homo sapiens
MVVSAIGIFLVSTFSMKETSYEEALANQRKEMAKTHHQKVEKKKKEKTVEKKGKTKKKEEKPNGKIPDHDPAPNVTVLLREPVRAPAVAVAPTPVQPPIIVAPVATVPAMPQEKLASSPKDKKKKEKKVAKVEPAVSSVVNSIQVLTSKAAILETAPKEGRNTDVAQSPEAPKQEAPAKKKSGSKKKGPPDADGPLYLPYKTLVSTVGSMVFNEGEAQRLIEILSEKAGIIQDTWHKATQKGDPVAILKRQLEEKEKLLATEQEDAAVAKSKLRELNKEMAAEKAKAAAGEAKVKKQLVAREQEITAVQARMQASYREHVKEVQQLQGKIRTLQEQLENGPNTQLARLQQENSILRDALNQATSQVESKQNAELAKLRQELSKVSKELVEKSEAVRQDEQQRKALEAKAAAFEKQVLQLQASHRESEEALQKRLDEVSRELCHTQSSHASLRADAEKAQEQQQQMAELHSKLQSSEAEVRSKCEELSGLHGQLQEARAENSQLTERIRSIEALLEAGQARDAQDVQASQAEADQQQTRLKELESQVSGLEKEAIELREAVEQQKVKNNDLREKNWKAMEALATAEQACKEKLLSLTQAKEESEKQLCLIEAQTMEALLALLPELSVLAQQNYTEWLQDLKEKGPTLLKHPPAPAEPSSDLASKLREAEETQSTLQAECDQYRSILAETEGMLRDLQKSVEEEEQVWRAKVGAAEEELQKSRVTVKHLEEIVEKLKGELESSDQVREHTSHLEAELEKHMAAASAECQNYAKEVAGLRQLLLESQSQLDAAKSEAQKQSDELALVRQQLSEMKSHVEDGDIAGAPASSPEAPPAEQDPVQLKTQLEWTEAILEDEQTQRQKLTAEFEEAQTSACRLQEELEKLRTAGPLESSETEEASQLKERLEKEKKLTSDLGRAATRLQELLKTTQEQLAREKDTVKKLQEQLEKAEDGSSSKEGTSV

SEQ ID NO: 64969 - protein, 1393 aa, Homo sapiens
MVVSAIGIFLVSTFSMKETSYEEALANQRKEMAKTHHQKVEKKKKEKTVEKKGKTKKKEEKPNGKIPDHDPAPNVTVLLREPVRAPAVAVAPTPVQPPIIVAPVATVPAMPQEKLASSPKDKKKKEKKVAKVEPAVSSVVNSIQVLTSKAAILETAPKEVPMVVVPPVGAKGNTPATGTTQGKKAEGTQNQSKKAEGAPNQGRKAEGTPNQGKKTEGTPNQGKKAEGTPNQGKKAEGTPNQGKKAEGAQNQGKKVDTTPNQGKKVEGAPTQGRKAEGAQNQAKKVEGAQNQGKKAEGAQNQGKKGEGAQNQGKKAEGAQNQGKKAEGAQNQGKKAEGAQNQGKKAEGAQNQGKKAEGAQNQGKKAEGAQNQGKKVEGAQNQGKKAEGAQNQGKKAEGAQNQGKKAEGAQNQGKKAEGAQNQGKKAEGAQNQGKKAEGAQNQGKKAEGAQNQGKKVEGAQNQGKKAEGAQNQGKKAEGAQNQGKKAEGAQNQGQKGEGAQNQGKKTEGAQGKKAERSPNQGKKGEGAPIQGKKADSVANQGTKVEGITNQGKKAEGSPSEGKKAEGSPNQGKKADAAANQGKKTESASVQGRNTDVAQSPEAPKQEAPAKKKSGSKKKGEPGPPDADGPLYLPYKTLVSTVGSMVFNEGEAQRLIEILSEKAGIIQDTWHKATQKGDPVAILKRQLEEKEKLLATEQEDAAVAKSKLRELNKEMAAEKAKAAAGEAKVKKQLVAREQEITAVQARMQASYREHVKEVQQLQGKIRTLQEQLENGPNTQLARLQQENSILRDALNQATSQVESKQNAELAKLRQELSKVSKELVEKSEAVRQDEQQRKALEAKAAAFEKQVLQLQASHRESEEALQKRLDEVSRELCHTQSSHASLRADAEKAQEQQQQMAELHSKLQSSEAEVRSKCEELSGLHGQLQEARAENSQLTERIRSIEALLEAGQARDAQDVQASQAEADQQQTRLKELESQVSGLEKEAIELREAVEQQKVKNNDLREKNWKAMEALATAEQACKEKLLSLTQAKEESEKQLCLIEAQTMEALLALLPELSVLAQQNYTEWLQDLKEKGPTLLKHPPAPAEPSSDLASKLREAEETQSTLQAECDQYRSILAETEGMLRDLQKSVEEEEQVWRAKVGAAEEELQKSRVTVKHLEEIVEKLKGELESSDQVREHTSHLEAELEKHMAAASAECQNYAKEVAGLRQLLLESQSQLDAAKSEAQKQSDELALVRQQLSEMKSHVEDGDIAGAPASSPEAPPAEQDPVQLKTQLEWTEAILEDEQTQRQKLTAEFEEAQTSACRLQEELEKLRTAGPLESSETEEASQLKERLEKEKKLTSDLGRAATRLQELLKTTQEQLAREKDTVKKLQEQLEKAEDGSSSKEGTSV

SEQ ID NO: 64970 - protein, 410 aa, Homo sapiens
MLWGLSLFLNLPGPIWLQPSPPPQSSPPPQPHPCHTCRGLVDSFNKGLERTIRDNFGGGNTAWEEENLSKYKDSETRLVEVLEGVCSKSDFECHRLLELSEELVESWWFHKQQEAPDLFQWLCSDSLKLCCPAGTFGPSCLPCPGGTERPCGGYGQCEGEGTRGGSGHCDCQAGYGGEACGQCGLGYFEAERNASHLVCSACFGPCARCSGPEESNCLQCKKGWALHHLKCVDIDECGTEGANCGADQFCVNTEGSYECRDCAKACLGCMGAGPGRCKKCSPGYQQVGSKCLDVDECETEVCPGENKQCENTEGGYRCICAEGYKQMEGICVKEQIPGAFPILTDLTPETTRRWKLGSHPHSTYVKMKMQRDEATFPGLYGKQVAKLGSQSRQSDRGTRLIHSQQASSQR

SEQ ID NO: 64971 - protein, 408 aa, Homo sapiens
MLWGLSLFLNLPGPIWLQPSPPPQSSPPPQPHPCHTCRGLVDSFNKGLERTIRDNFGGGNTAWEEENLSKYKDSETRLVEVLEGVCSKSDFECHRLLELSEELVESWWFHKQQEAPDLFQWLCSDSLKLCCPAGTFGPSCLPCPGGTERPCGGYGQCEGEGTRGGSGHCDCQAGYGGEACGQCGLGYFEAERNASHLVCSACFGPCARCSGPEESNCLQCKKGWALHHLKCVDIDECGTEGANCGADQFCVNTEGSYECRDCAKACLGCMGAGPGRCKKCSPGYQQVGSKCLDVDECETEVCPGENKQCENTEGGYRCICAEGYKQMEGICVKEQIPESAGFFSEMTEDELVVLQQMFFGIIICALATLAAKGDLVFTAIFIGAVAAMTGYWLSERSDRVLEGFIKGR

SEQ ID NO: 64972 - protein, 134 aa, Homo sapiens [sequence omitted]

SEQ ID NO: 64973 - protein, 641 aa, Homo sapiens
MRIVCLVLSVVGTAWTADSGEGDFLAEGGGVRGPRVVERHQSACKDSDWPFCSDEDWNYKCPSGCRMKGLIDEVNQDFTNRINKLKNSLFEYQKNNKDSHSLTTNIMEILRGDFSSANNRDNTYNRVSEDLRSRIEVLKRKVIEKVQHIQLLQKNVRAQLVDMKRLEVDIDIKIRSCRGSCSRALAREVDLKDYEDQQKQLEQVIAKDLLPSRDRQHLPLIKMKPVPDLVPGNFKSQLQKVPPEWKALTDMPQMRMELERPGGNEITRGGSTSYGTGSETESPRNPSSAGSWNSGSSGPGSTGNRNPGSSGTGGTATWKPGSSGPGSTGSWNSGSSGTGSTGNQNPGSPRPGSTGTWNPGSSERGSAGHWTSESSVSGSTGQWHSESGSFRPDSPGSGNARPNNPDWGTFEEVSGNVSPGTRREYHTEKLVTSKGDKELRTGKEKVTSGSTTTTRRSCSKTVTKTVIGPDGHKEVTKEVVTSEDGSDCPEAMDLGTLSGIGTLDGFRHRHPDEAAFFDTASTGKTFPGFFSPMLGEFVSETESRGSESGIFTNTKESSSHHPGIAEFPSRGKSSSYSKQFTSSTSYNRGDSTFESKSYKMADEAGSEADHEGTHSTKRGHAKSRPVRGIHTSPLGKPSLSP

SEQ ID NO: 64974 - protein, 171 aa, Homo sapiens
MSELMGLSVLLGLLALMATAAVARGWLRAGEERSGRPACQKANGFPPDKSSGSKKQKQYQRIRKEKPQQHNFTHRLLAAALKSHSGNISCMDFSSNGKYLATCADDRTIRIWSTKDFLQREHRSMRANVELDHATLSLHRLAGQRGHPPCLQDDQAGGWGLHLHSHPRGLP

SEQ ID NO: 64975 - protein, 1032 aa, Homo sapiens [sequence omitted]

SEQ ID NO: 64976 - protein, 13 aa, Homo sapiens
LLWAMVLLVKHVS

SEQ ID NO: 64977 - protein, 128 aa, Homo sapiens
IIFLLCTLFISLRSSDHRQVNSLMQTEECPPMLDATQQQQQVAACEGRAFDNEQDGVTYSYSFFHFCLVLASLHVMMTLTNWYKPGETRKMISTWTAVWVKICASWAGLLLYLWTLVAPLLLRNRDFS

SEQ ID NO: 64978 - protein, 46 aa, Homo sapiens
ILSVLAGLAAMVGYALLSGIVSIQRATPARAPGTRTLGMAEEDEEE

SEQ ID NO: 64979 - protein, 12 aa, Homo sapiens
MVYLMLKMSLVF

SEQ ID NO: 64980 - protein, 40 aa, Homo sapiens
MGGLIWFLFQRHRLHLAGFSSVRYAQGVNEDEIMLPSFHD

SEQ ID NO: 64981 - protein, 49 aa, Homo sapiens
KMRLLLLLLVAASAMVRSEASANLGGVPSKRLKMQYATGPLLKFQICVS

SEQ ID NO: 64982 - protein, 594 aa, Homo sapiens
KIMEGKWLLCMLLVLGTAIVEAHDGHDDDVIDIEDDLDDVIEEVEDSKPDTTAPPSSPKVTYKAPVPTGEVYFADSFDRGTLSGWILSKAKKDDTDDEIAKYDGKWEVEEMKESKLPGDKGLVLMSRAKHHAISAKLNKPFLFDTKPLIVQYEVNFQNGIECGGAYVKLLSKTPELNLDQFHDKTPYTIMFGPDKCGEDYKLHFIFRHKNPKTGIYEEKHAKRPDADLKTYFTDKKTHLYTLILNPDNSFEILVDQSVVNSGNLLNDMTPPVNPSREIEDPEDRKPEDWDERPKIPDPEAVKPDDWDEDAPAKIPDEEATKPEGWLDDEPEYVPDPDAEKPEDWDEDMDGEWEAPQIANPRCESAPGCGVWQRPVIDNPNYKGKWKPPMIDNPSYQGIWKPRKIPNPDFFEDLEPFRMTPFSAIGLELWSMTSDIFFDNFIICADRRIVDDWANDGWGLKKAADGAAEPGVVGQMIEAAEERPWLWVVYILTVALPVFLVILFCCSGKKQTSGMEYKKTDAPQPDVKEEEEEKEEEKDKGDEEEEGEEKLEEKQKSDAEEDGGTVSQEEEDRKPKAEEDEILNRSPRNRKPRRE

SEQ ID NO: 64983 - protein, 368 aa, Homo sapiens
TPRMAVMAPRTLLLLLSGALALTQTWAGSHSMRYFFTSVSRPGRGEPRFIAVGYVDDTQFVRFDSDAASQRMEPRAPWIEQEGPEYWDQETRNVKAQSQTDRVDLGTLRGYYNQSEAGSHTIQIMYGCDVGSDGRFLRGYRQDAYDGKDYIALNEDLRSWTAADMAAQITKRKWEAAHEAEQLRAYLDGTCVEWLRRYLENGKETLQRTDPPKTHMTHHPISDHEATLRCWALGFYPAEITLTWQRDGEDQTQDTELVETRPAGDGTFQKWAAVVVPSGEEQRYTCHVQHEGLPKPLTLRWELSSQPTIPIVGIIAGLVLLGAVITGAVVAAVMWRRKSSDRKGGSYTQAASSDSAQGSDVSLTACKV

SEQ ID NO: 64984 - protein, 23 aa, Homo sapiens
LPFPVSIFLYFLSFYYHHAMPLE

SEQ ID NO: 64985 - protein, 71 aa, Homo sapiens
IAVSMLTYPFLLVGDLMAVNNCGLQAGLPPYSPVFKSWIHCWKYLSVQGQLFRGSSLLFRRVSSGSCFALE

SEQ ID NO: 64986 - protein, 361 aa, Homo sapiens
LVMAPRTVLLLLSAALALTETWAGSHSMRYFYTSVSRPGRGEPRFISVGYVDDTQFVRFDSDAASPREEPRAPWIEQEGPEYWDRNTQIYKAQAQTDRESLRNLRGYYNQSEAGSHTLQSMYGCDVGPDGRLLRGHDQYAYDGKDYIALNEDLRSWTAADTAAQITQRKWEAAREAEQRRAYLEGECVEWLRRYLENGKDKLERADPPKTHVTHHPISDHEATLRCWALGFYPAEITLTWQRDGEDQTQDTELVETRPAGDRTFQKWAAVVVPSGEEQRYTCHVQHEGLPKPLTLRWEPSSQSTVPIVGIVAGLAVLAVVVIGAVVAAVMCRRKSSGGKGGSYSQAACSDSAQGSDVSLTA

SEQ ID NO: 64987 - protein, 15 aa, Homo sapiens
MPCKWGWALALTNVI

SEQ ID NO: 64988 - protein, 309 aa, Homo sapiens
LEKNKAMGRPLLLPLLPLLLPPAFLQPSGSTGSGPSYLYGVTQPKHLSASMGGSVEIPFSFYYPWELATAPDVRISWRRGHFHRQSFYSTRPPSIHKDYVNRLFLNWTEGQKSGFLRISNLQKQDQSVYFCRVELDTRSSGRQQWQSIEGTKLSITQAVTTTTQRPSSMTTTWRLSSTTTTTGLRVTQGKRRSDSWHISLETAVGVAVAVTVLGIMILGLICLLRWRRRKGQQRTKATTPAREPFQNTEEPYENIRNEGQNTDPKLNPKDDGIVYASLALSSSTSPRAPPSHRPLKSPQNETLYSVLKA

SEQ ID NO: 64989 - protein, 12 aa, Homo sapiens
LLLVDGPRGIQS

SEQ ID NO: 64990 - protein, 13 aa, Homo sapiens
LQGLSYRKPRDRK

SEQ ID NO: 64991 - protein, 41 aa, Homo sapiens
ISRSHYSPIYLSFVMLLAALSWQYLTTLSQVTEDYVQTGEH

SEQ ID NO: 64992 - protein, 24 aa, Homo sapiens
LCYVALDFEQEMATAASSSSLEKI

SEQ ID NO: 64993 - protein, 47 aa, Homo sapiens
LVLWCVVLVLQVVQWKSEATPYRPLERGDPEWSSETDALVGSRLSHS

SEQ ID NO: 64994 - protein, 24 aa, Homo sapiens
ILMILAVLSILPAIFQKKLKQKFE

SEQ ID NO: 64995 - protein, 155 aa, Homo sapiens
LRPEKMVLCFPLLLLLLVLWGPVCPLHAWPKRLTKAHWFEIQHIQPSPLQCNRAMSGINNYTQHCKHQNTFLHDSFQNVAAVCDLLSIVCKNRRHNCHQSSKPVNMTDCRLTSGKYPQCRYSAAAQYKFFIVACDPPQKSDPPYKLVPVHLDSIL

SEQ ID NO: 64996 - protein, 436 aa, Homo sapiens
RCRMVWKVAVFLSVALGIGAVPIDDPEDGGKHWVVIVAGSNGWYNYRHQADACHAYQIIHRNGIPDEQIVVMMYDDIAYSEDNPTPGIVINRPNGTDVYQGVPKDYTGEDVTPQNFLAVLRGDAEAVKGIGSGKVLKSGPQDHVFIYFTDHGSTGILVFPNEDLHVKDLNETIHYMYKHKMYRKMVFYIEACESGSMMNHLPDNINVYATTAANPRESSYACYYDEKRSTYLGDWYSVNWMEDSDVEDLTKETLHKQYHLVKSHTNTSHVMQYGNKTISTMKVMQFQGMKRKASSPVPLPPVTHLDLTPSPDVPLTIMKRKLMNTNDLEESRQLTEEIQRHLDARHLIEKSVRKIVSLLAASEAEVEQLLSERAPLTGHSCYPEALLHFRTHCFNWHSPTYEYALRHLYVLVNLCEKPYPLHRIKLSMDHVCLGHY

SEQ ID NO: 64997 - protein, 283 aa, Homo sapiens
RMSGSSLPSALALSLLLVSGSLLPGPGAAQNEPRIVTSEEVIIRDSPVLPVTLQCNLTSSSHTLTYSYWTKNGVELSATRKNASNMEYRINKPRAEDSGEYHCVYHFVSAPKANATIEVKAAPDITGHKRSENKNEGQDATMYCKSVGYPHPDWIWRKKENGMPMDIVNTSGRFFIINKENYTELNIVNLQITEDPGEYECNATNAIGSASVVTVLRVRSHLAPLWPFLGILAEIIILVVIIVVYEKRKRPDEVPDDDEPAGPMKTNSTNNHKDKNLRQRNTN

SEQ ID NO: 64998 - protein, 353 aa, Homo sapiens
RLAVLFSGALLGLLAAQGTGNDCPHKKSATLLPSFTVTPTVTESTGTTSHRTTKSHKTTTHRTTTTGTTSHGPTTATHNPTTTSHGNVTVHPTSNSTATSQGPSTATHSPATTSHGNATVHPTSNSTATSPGFTSSAHPEPPPPSPSPSPTSKETIGDYTWTNGSQPCVHLQAQIQIRVMYTTQGGGEAWGISVLNPNKTKVQGSCEGAHPHLLLSFPYGHLSFGFMQDLQQKVVYLSYMAVEYNVSFPHAAQWTFSAQNASLRDLQAPLGQSFSCSNSSIILSPAVHLDLLSLRLQAAQLPHTGVFGQSFSCPSDRSILLPLIIGLILLGLLALVLIAFCIIRRRPSAYQAL

SEQ ID NO: 64999 - protein, 318 aa, Homo sapiens
KMKVLWAALLVTFLAGCQAKVEQAVETEPEPELRQQTEWQSGQRWELALGRFWDYLRWVQTLSEQVQEELLSSQVTQELRALMDETMKELKAYKSELEEQLTPVAEETRARLSKELQAAQARLGADMEDVCGRLVQYRGEVQAMLGQSTEELRVRLASHLRKLRKRLLRDADDLQKRLAVYQAGAREGAERGLSAIRERLGPLVEQGRVRAATVGSLAGQPLQERAQAWGERLRARMEEMGSRTRDRLDEVKEQVAEVRAKLEEQAQQIRLQAEAFQARLKSWFEPLVEDMQRQWAGLVEKVQAAVGTSAAPVPSDNH

SEQ ID NO: 65000 - protein, 53 aa, Homo sapiens
VRFLLFFTCGLPALHGDSRVECSKAHPPAMYYPPTRPGWSDRVWGAEPRFSLR

SEQ ID NO: 65001 - protein, 149 aa, Homo sapiens
LIIVILGVPLIIFTIKANSEACRDGLRAVMECRNVTHLLQQELTEAQKGFQDVEAQAATCNHTVMALMASLDAEKAQGQKKVEELEGEITTLNHKLQDASAEVERLRRENQVLSVRIADKKYYPSSQDSSSAAAPQLLIVLLGLSALLQ

SEQ ID NO: 65002 - protein, 22 aa, Homo sapiens
LFLLLFLLLRHRHQSKHRTSGE

SEQ ID NO: 65003 - protein, 402 aa, Homo sapiens
KVSRMPVPASWPHLPSPFLLMTLLLGRLTGVAGEEELQVIQPDKSISVAAGESATLHCTVTSLIPVGPIQWFRGAGPGRELIYNQKEGHFPRVTTVSDLTKRNNMDFSIRISNITPADAGTYYCVKFRKGSPDHVEFKSGAGTELSVRAKPSAPVVSGPAARATPQHTVSFTCESHGFSPRDITLKWFKNGNELSDFQTNVDPAGDSVSYSIHSTAKVVLTREDVHSQVICEVAHVTLQGDPLRGTANLSETIRVPPTLEVTQQPVRAENQVNVTCQVRKFYPQRLQLTWLENGNVSRTETASTLTENKDGTYNWMSWLLVNVSAHRDDVKLTCQVEHDGQPAVSKSHDLKVSAHPKEQGSNTAPGPALASAAPLLIAFLLGPKVLLVVGVSVIYVYWKQKA

SEQ ID NO: 65004 - protein, 19 aa, Homo sapiens
LTGMTVAGVVLLGSLFSRK

SEQ ID NO: 65005 - protein, 271 aa, Homo sapiens
VRAGRECALLRVAAEGARPPPAGMSYDRAITVFSPDGHLFQVEYAQEAVKKGSTAVGVRGRDIVVLGVEKKSVAKLQDERTVRKICALDDNVCMAFAGLTADARIVINRARVECQSHRLTVEDPVTVEYITRYIASLKQRYTQSNGRRPFGISALIVGFDFDGTPRLYQTDPSGTYHAWKANAIGRGAKSVREFLEKNYTDEAIETDDLTIKLVIKALLEVVQSGGKNIELAVMRRDQSLKILNPEEIEKYVAEIEKEKEENEKKKQKKAS

SEQ ID NO: 65006 - protein, 376 aa, Homo sapiens
IVFWTWMFSTYFMEKWAPRQDDMLFYVRRKLAYSGSESGADGRKAAEPEVEVEVYRRDSKKLPGLGDPDIDWEESVCLNLILQKLDYMVTCAVCTRADGGDIHIHKKKSQQVFASPSKHPMDSKGEESKISYPNIFFMIDSFEEVFSDMTVGEGEMVCVELVASDKTNTFQGVIFQGSIRYEALKKVYDNRVSVAARMAQKMSFGFYKYSNMEFVRMKGPQGKGHAEMAVSRVSTGDTSPCGTEEDSSPASPMHERVTSFSTPPTPERNNRPAFFSPSLKRKVPRNRIAEMKKSHSANDSEEFFREDDGGADLHNATNLRSRSLSGTGRSLVGSWLKLNRADGNFLLYAHLTYVTLPLHRILTDILEVRQKPILMT

SEQ ID NO: 65007 - protein, 472 aa, Homo sapiens
RAGGNRTPPAPMAPVAVWAALAVGLELWAAAHALPAQVAFTPYAPEPGSTCRLREYYDQTAQMCCSKCSPGQHAKVFCTKTSDTVCDSCEDSTYTQLWNWVPECLSCGSRCSSDQVETQACTREQNRICTCRPGWYCALSKQEGCRLCAPLRKCRPGFGVARPGTETSDVVCKPCAPGTFSNTTSSTDICRPHQICNVVAIPGNASMDAVCTSTSPTRSMAPGAVHLPQPVSTRSQHTQPTPEPSTAPSTSFLLPMGPSPPAEGSTGDFALPVGLIVGVTALGLLIIGVVNCVIMTQVKKKPLCLQREAKVPHLPADKARGTQGPEQQHLLITAPSSSSSSLESSASALDRRAPTRNQPQAPGVEASGAGEARASTGSSDSSPGGHGTQVNVTCIVNVCSSSDHSSQCSSQASSTMGDTDSSPSESPKDEQVPFSKEECAFRSQLETPETLLGSTEEKPLPLGVPDAGMKPS

SEQ ID NO: 65008 - protein, 615 aa, Homo sapiens
LPGASREPAGRRTPTPSSLCPSTRAPRPFRDPCPAGSAANLPAMETPSQRRATRSGAQASSTPLSPTRITRLQEKEDLQELNDRLAVYIDRVRSLETENAGLRLRITESEEVVSREVSGIKAAYEAELGDARKTLDSVAKERARLQLELSKVREEFKELKARNTKKEGDLIAAQARLKDLEALLNSKEAALSTALSEKRTLEGELHDLRGQVAKLEAALGEAKKQLQDEMLRRVDAENRLQTMKEELDFQKNIYSEELRETKRRHETRLVEIDNGKQREFESRLADALQELRAQHEDQVEQYKKELEKTYSAKLDNARQSAERNSNLVGAAHEELQQSRIRIDSLSAQLSQLQKQLAAKEAKLRDLEDSLARERDTSRRLLAEKEREMAEMRARMQQQLDEYQELLDIKLALDMEIHAYRKLLEGEEERLRLSPSPTSQRSRGRASSHSSQTQGGGSVTKKRKLESTESRSSFSQHARTSGRVAVEEVDEEGKFVRLRNKSNEDQSMGNWQIKRQNGDDPLLTYRFPPKFTLKAGQVVTIWAAGAGATHSPPTDLVWKAQNTWGCGNSLRTALINSTGEEVAMRKLVRSVTVVEDDEDEDGDDLLHHHHVSGSRR

SEQ ID NO: 65009 - protein, 42 aa, Homo sapiens
LLLLLWLSLPVRLPSFVVSQRCAGLLLAALRIQGVGCQVQVS

SEQ ID NO: 65010 - protein, 370 aa, Homo sapiens
LPLLGELPRLLLLVLLCLPAVWGDCGLPPDVPNAQPALEGRTSFPEDTVITYKCEESFVKIPGEKDSVICLKGSQWSDIEEFCNRSCEVPTRLNSASLKQPYITQNYFPVGTVVEYECRPGYRREPSLSPKLTCLQNLKWSTAVEFCKKKSCPNPGEIRNGQIDVPGGILFGATISFSCNTGYKLFGSTSSFCLISGSSVQWSDPLPECREIYCPAPPQIDNGIIQGERDHYGYRQSVTYACNKGFTMIGEHSIYCTVNNDEGEWSGPPPECRGKSLTSKVPPTVQKPTTVNVPTTEVSPTSQKTTTKTTTPNAQATRSTPVSRTTKHFHETTPNKGSGTTSGTTRLLSGHTCFTLTGLLGTLVTMGLLT

SEQ ID NO: 65011 - protein, 441 aa, Homo sapiens
RKMEPSTAARAWALFWLLLPLLGAVCASGPRTLVLLDNLNVRETHSLFFRSLKDRGFELTFKTADDPSLSLIKYGEFLYDNLIIFSPSVEDFGGNINVETISAFIDGGGSVLVAASSDIGDPLRELGSECGIEFDEEKTAVIDHHNYDISDLGQHTLIVADTENLLKAPTIVGKSSLNPILFRGVGMVADPDNPLVLDILTGSSTSYSFFPDKPITQYPHAVGKNTLLIAGLQARNNARVIFSGSLDFFSDSFFNSAVQKAAPGSQRYSQTGNYELAVALSRWVFKEEGVLRVGPVSHHRVGETAPPNAYTVTDLVEYSIVIQQLSNGKWVPFDGDDIQLEFVRIDPFVRTFLKKKGGKYSVQFKLPDVYGVFQFKVDYNRLGYTHLYSSTQVSVRPLQHTQYERFIPSAYPYYASAFSMMLGLFIFSIVFLHMKEKEKSD

SEQ ID NO: 65012 - protein, 319 aa, Homo sapiens
KGSLWVRTQLGLPPLLLLTMALAGGSGTASAEAFDSVLGDTASCHRACQLTYPLHTYPKEEELYACQRGCRLFSICQFVDDGIDLNRTKLECESACTEAYSQSDEQYACHLGCQNQLPFAELRQEQLMSLMPKMHLLFPLTLVRSFWSDMMDSAQSFITSSWTFYLQADDGKIVIFQSKPEIQYAPHLEQEPTNLRESSLSKMSYLQMRNSQAHRNFLEDGESDGFLRCLSLNSGWILTTTLVLSVMVLLWICCATVATAVEQYVPSEKLSIYGDLEFMNEQKLNRYPASSLVVVRSKTEDHEEAGPLPTKVNLAHSEI

SEQ ID NO: 65013 - protein, 190 aa, Homo sapiens
KAFGMPTMRLLSFVVLALFAVTQAEEGARLLASKSLLNRYAVEGRDLTLQYNIYNVGSSAALDVELSDDSFPPEDFGIVSGMLNVKWDRIAPASNVSHTVVLRPLKAGYFNFTSATITYLAQEDGPVVIGSTSAPGQGGILAQREFDRRFSPHFLDWAAFGVMTLPSIGIPLLLWYSSKRKYDTPKTKKN

SEQ ID NO: 65014 - protein, 332 aa, Homo sapiens
KGLLSLTFVLFLSLAFGASYGTGGRMMNCPKILRQLGSKVLLPLTYERINKSMNKSIHIVVTMAKSLENSVENKIVSLDPSEAGPPRYLGDRYKFYLENLTLGIRESRKEDEGWYLMTLEKNVSVQRFCLQLRLYEQVSTPEIKVLNKTQENGTCTLILGCTVEKGDHVAYSWSEKAGTHPLNPANSSHLLSLTLGPQHADNIYICTVSNPISNNSQTFSPWPGCRTDPSETKPWAVYAGLLGGVIMILIMVVILQLRRRGKTNHYQTTVEKKSLTIYAQVQKPGPLQKKLDSFPAQDPCTTIYVAATEPVPESVQETNSITVYASVTLPES

SEQ ID NO: 65015 - protein, 233 aa, Homo sapiens
RERKMAPHDPGSLTTLVPWAAALLLALGVERALALPEICTQCPGSVQNLSKVAFYCKTTRELMLHARCCLNQKGTILGLDLQNCSLEDPGPNFHQAHTTVIIDLQANPLKGDLANTFRGFTQLQTLILPQHVNCPGGINAWNTITSYIDNQICQGQKNLCNNTGDPEMCPENGSCVPDGPGLLQCVCADGFHGYKCMRQGSFSLLMFFGILGATTLSVSILLWATQRRKAKTS

SEQ ID NO: 65016 - protein, 367 aa, Homo sapiens
KYQLFLAGLMLVTGSINTLSAKWADNFMAEGCGGSKEHSFQHPFLQAVGMFLGEFSCLAAFYLLRCRAAGQSDSSVDPQQPFNPLLFLPPALCDMTGTSLMYVALNMTSASSFQMLRGAVIIFTGLFSVAFLGRRLVLSQWLGILATIAGLVVVGLADLLSKHDSQHKLSEVITGDLLIIMAQIIVAIQMVLEEKFVYKHNVHPLRAVGTEGLFGFVILSLLLVPMYYIPAGSFSGNPRGTLEDALDAFCQVGQQPLIAVALLGNISSIAFFNFAGISVTKELSATTRMVLDSLRTVVIWALSLALGWEAFHALQILGFLILLIGTALYNGLHRPLLGRLSRGRPLAEESEQERLLGGTRTPINDAS

SEQ ID NO: 65017 - protein, 399 aa, Homo sapiens
LLALLRCASTMLSLRVPLAPITDPQQLQLSPLKGLSLVDKENTPPALSGTRVLASKTARRIFQEPTEPKTKAAAPGVEDEPLLRENPRRFVIFPIEYHDIWQMYKKAEASFWTAEEVDLSKDIQHWESLKPEERYFISHVLAFFAASDGIVNENLVERFSQEVQITEARCFYGFQIAMENIHSEMYSLLIDTYIKDPKEREFLFNAIETMPCVKKKADWALRWIGDKEATYGERVVAFAAVEGIFFSGSFASIFWLKKRGLMPGLTFSNELISRDEGLHCDFACLMFKHLVHKPSEERVREIIINAVRIEQEFLTEALPVKLIGMNCTLMKQYIEFVADRLMLELGFSKVFRVENPFDFMENISLEGKTNFFEKRVGEYQRMGVMSSPTENSFTLDADF

SEQ ID NO: 65018 - protein, 223 aa, Homo sapiens
RTKMLRLLLALNLFPSIQVTGNKILVKQSPMLVAYDNAVNLSCKYSYNLFSREFRASLHKGLDSAVEVCVVYGNYSQQLQVYSKTGFNCDGKLGNESVTFYLQNLYVNQTDIYFCKIEVMYPPPYLDNEKSNGTIIHVKGKHLCPSPLFPGPSKPFWVLVVVGGVLACYSLLVTVAFIIFWVRSKRSRLLHSDYMNMTPRRPGPTRKHYQPYAPPRDFAAYRS

SEQ ID NO: 65019 - protein, 76 aa, Homo sapiens
MKLLLGIALLAYVASVWGNFVNMRSIQENGELKIESKIEEMVEPLREKIRDLEKSFTQKYPPVKFLSEKDRKRILF

SEQ ID NO: 65020 - protein, 200 aa, Homo sapiens [sequence omitted]

SEQ ID NO: 65021 - protein, 21 aa, Homo sapiens
LAILTLAVATLYGLSLATPGE

SEQ ID NO: 65022 - protein, 183 aa, Homo sapiens
RMRRMWATQGLAVALALSVLPGSRALRPGDCEVCISYLGRFYQDLKDRDVTFSPATIENELIKFCREARGKENRLCYYIGATDDAATKIINEVSKPLAHHIPVEKICEKLKKKDSQICELKYDKQIDLSTVDLKKLRVKELKKILDDWGETCKGCAEKSDYIRKINELMPKYAPKAASARTDL

SEQ ID NO: 65023 - protein, 44 aa, Homo sapiens
LDLLFLLGLTSSVCIVAEIIKKVERSREKIQKHVSSTSSSFLEV

SEQ ID NO: 65024 - protein, 30 aa, Homo sapiens
ILPLLLVLLLLGPTRGLRVSLRDPGTGRHC

SEQ ID NO: 65025 - protein, 42 aa, Homo sapiens
ILKCCLLILVYDYWPFSFIYNLPKITNQKSSCYQYLEANYDY

SEQ ID NO: 65026 - protein, 600 aa, Homo sapiens
LFLLLLLGTWAPAPGSASSEAPPLINEDVKRTVDLSSHLAKVTAEVVLAHLGGGSTSRATSFLLALEPELEARLAHLGVQVKGEDEEENNLEVRETKIKGKSGRFFTVKLPVALDPGAKISVIVETVYTHVLHPYPTQITQSEKQFVVFEGNHYFYSPYPTKTQTMRVKLASRNVESYTKLGNPTRSEDLLDYGPFRDVPAYSQDTFKVHYENNSPFLTITSMTRVIEVSHWGNIAVEENVDLKHTGAVLKGPFSRYDYQRQPDSGISSIRSFKTILPAAAQDVYYRDEIGNVSTSHLLILDDSVEMEIRPRFPLFGGWKTHYIVGYNLPSYEYLYNLGDQYALKMRFVDHVFDEQVIDSLTVKIILPEGAKNIEIDSPYEISRAPDELHYTYLDTFGRPVIVAYKKNLVEQHIQDIVVHYTFNKVLMLQEPLLVVAAFYILFFTVIIYVRLDFSITKDPAAEARMKVACITEQVLTLVNKRIGLYRHFDETVNRYKQSRDISTLNSGKKSLETEHKALTSEIALLQSRLKTEGSDLCDRVSEMQKLDAQVKELVLKSAVEAERLVAGKLKKDTYIENEKLISGKRQELVTKIDHILDAL

SEQ ID NO: 65027 - protein, 20 aa, Homo sapiens
LAKHLHSKGFLVFAGCLMKL

SEQ ID NO: 65028 - protein, 22 aa, Homo sapiens
IGGIVFLAFAFSALFISPDSGF

SEQ ID NO: 65029 - protein, 348 aa, Homo sapiens
LRGLPALLLLLLFLGPWPAASHGGKYSREKNQPKPSPKRESGEEFRMEKLNQLWEKAQRLHLPPVRLAELHADLKIQERDELAWKKLKLDGLDEDGEKEARLIRNLNVILAKYGLDGKKDARQVTSNSLSGTQEDGLDDPRLEKLWHKAKTSGKFSGEELDKLWREFLHHKEKVHEYNVLLETLSRTEEIHENVISPSDLSDIKGSVLHSRHTELKEKLRSINQGLDRLRRVSHQGYSTEAEFEEPRVIDLWDLAQSANLTDKELEAFREELKHFEAKIEKHNHYQKQLEIAHEKLRHAESVGDGERVSRSREKHALLEGRTKELGYTVKKHLQDLSGRISRARHNEL

SEQ ID NO: 65030 - protein, 44 aa, Homo sapiens
ILVAWMVIALILFLLRPPNLRGSSLPGKPTSPHNGQDPPAPPVD

SEQ ID NO: 65031 - protein, 475 aa, Homo sapiens
LFPGLWLLVLSGPGGLLRAQEQPSCRRAFDLYFVLDKSGSVANNWIEIYNFVQQLAERFVSPEMRLSFIVFSSQATIILPLTGDRGKISKGLEDLKRVSPVGETYIHEGLKLANEQIQKAGGLKTSSIIIALTDGKLDGLVPSYAEKEAKISRSLGASVYCVGVLDFEQAQLERIADSKEQVFPVKGGFQALKGIINSILAQSCTEILELQPSSVCVGEEFQIVLSGRGFMLGSRNGSVLCTYTVNETYTTSVKPVSVQLNSMLCPAPILNKAGETLDVSVSFNGGKSVISGSLIVTATECSNGIAAIIVILVLLLLLGIGLMWWFWPLCCKVVIKDPPPPPAPAPKEEEEEPLPTKKWPTVDASYYGGRGVGGIKRMEVRWGDKGSTEEGARLEKAKNAVVKIPEETEEPIRPRPPRPKPTHQPPQTKWYTPIKGRLDALWALLRRQYDRVSLMRPQEGDEVCIWECIEKELTA

SEQ ID NO: 65032 - protein, 223 aa, Homo sapiens
LWLLSAEWKRVLLFVSLAMALQLSREQGITLRGSAEIVAEFFSFGINSILYQRGIYPSETFTRVQKYGLTLLVTTDLELIKYLNNVVEQLKDWLYKCSVQKLVVVISNIESGEVLERWQFDIECDKTAKDDSAPREKSQKAIQDEIRSVIRQITATVTFLPLLEVSCSFDLLIYTDKDLVVPEKWEESGPQFITNSEEVRLRSFTTTIHKVNSMVAYKIPVND

SEQ ID NO: 65033 - protein, 16 aa, Homo sapiens
ITKIKRDIVFAASLYL

SEQ ID NO: 65034 - protein, 542 aa, Homo sapiens
LALLLATLLAAMLALLTQVALVVQVAEAARAPSVSAKPGPALWPLPLLVKMTPNLLHLAPENFYISHSPNSTAGPSCTLLEEAFRRYHGYIFGFYKWHHEPAEFQAKTQVQQLLVSITLQSECDAFPNISSDESYTLLVKEPVAVLKANRVWGALRGLETFSQLVYQDSYGTFTINESTIIDSPRFSHRGILIDTSRHYLPVKIILKTLDAMAFNKFNVLHWHIVDDQSFPYQSITFPELSNKGSYSLSHVYTPNDVRMVIEYARLRGIRVLPEFDTPGHTLSWGKGQKDLLTPCYSRQNKLDSFGPINPTLNTTYSFLTTFFKEISEVFPDQFIHLGGDEVEFKCWESNPKIQDFMRQKGFGTDFKKLESFYIQKVLDIIATINKGSIVWQEVFDDKAKLAPGTIVEVWKDSAYPEELSRVTASGFPVILSAPWYLDLISYGQDWRKYYKVEPLDFGGTQKQKQLFIGGEACLWGEYVDATNLTPRLWPRASAVGERLWSSKDVRDMDDAYDRLTRHRCRMVERGIAAQPLYAGYCNHENM

SEQ ID NO: 65035 - protein, 19 aa, Homo sapiens
ICWILMQFITSFMIFSPML

SEQ ID NO: 65036 - protein, 50 aa, Homo sapiens
IYLSCIVLFGACIEGVVLRDKYVSTCSFRAKPVVFKGFPEDEFGFEITSP

SEQ ID NO: 65037 - protein, 311 aa, Homo sapiens
VSSDFSSASSMFSHLPFDCVLLLLLLLLTRSSEVEYRAEVGQNAYLPCFYTPAAPGNLVPVCWGKGACPVFECGNVVLRTDERDVNYWTSRYWLNGDFRKGDVSLTIENVTLADSGIYCCRIQIPGIMNDEKFNLKLVIKPAKVTPAPTRQRDFTAAFPRMLTTRGHGPAETQTLGSLPDINLTQISTLANELRDSRLANDLRDSGATIRIGIYIGAGICAGLALALIFGALIFKWYSHSKEKIQNLSLISLANLPPSGLANAVAEGIRSEENIYTIEENVYEVEEPNEYYCYVSSRQQPSQPLGCRFAMP

SEQ ID NO: 65038 - protein, 340 aa, Homo sapiens
LGRPGLLGPGPGPTTPLFLLLLLGSVTADITDGNSEHLKREHSLIKPYQGVGSSSMPLWDFQGSTMLTSQYVRLTPDERSKEGSIWNHQPCFLKDWEMHVHFKVHGTGKKNLHGDGIALWYTRDRLVPGPVFGSKDNFHGLAIFLDTYPNDETTERVFPYISVMVNNGSLSYDHSKDGRWTELAGCTADFRNRDHDTFLAVRYSRGRLTVMTDLEDKNEWKNCIDITGVRLPTGYYFGASAGTGDLSDNHDIISMKLFQLMVEHTPDEESIDWTKIEPSVNFLKSPKDNVDDPTGNFRSGPLTGWRVFLLLLCALLGIVVCAVVGAVVFQKRQERNKRFY

SEQ ID NO: 65039 - protein, 40 aa, Homo sapiens
VRSLRGLSVSTHLLCFTIYIMNPSMKQKQEEIKENIKVCD

SEQ ID NO: 65040 - protein, 113 aa, Homo sapiens
MAPRTVLLLLSAALALTETWAGSHSMRYFYTSVSRPGRGEPRFISVGYVDDTQFVRFDSDAASPREEPRAPWIEQEGPEYWDRNTQIYKAQAQTDRESLRNLRGYYNQSEAGE

SEQ ID NO: 65041 - protein, 57 aa, Homo sapiens
LFRVLRAALPLQLLLLLLIGLACLVPMSEEDYSCALSNNFARSFHPMLRYTNGPPPL

SEQ ID NO: 65042 - protein, 151 aa, Homo sapiens
LGVSGVLLFGCVYLLHLLRRHKHRPAPRLQPSRTSPQAPRARAWAPSQASQAALHVPYATINTSCRPATLDTAHPHGGPSWWASLPTHAAHRPQGPAAWASTPIPARGSFVSVENGLYAQAGERPPHTGPGLTLFPDPRGPRAMEGPLGVR

SEQ ID NO: 65043 - protein, 24 aa, Homo sapiens
MMLRVLIMTMMPSWVLKKQRPLIS

SEQ ID NO: 65044 - protein, 30 aa, Homo sapiens
RRRWLFGGSEERLLLLLLLLVAPLQMYCCP

SEQ ID NO: 65045 - protein, 653 aa, Homo sapiens
RPRSAPATMRPRKAFLLLLLLGLVQLLAVAGAEGPDEDSSNRENAIEDEEEEEEEDDDEEEDDLEVKEENGVLVLNDANFDNFVADKDTVLLEFYAPWCGHCKQFAPEYEKIANILKDKDPPIPVAKIDATSASVLASRFDVSGYPTIKILKKGQAVDYEGSRTQEEIVAKVREVSQPDWTPPPEVTLVLTKENFDEVVNDADIILVEFYAPWCGHCKKLAPEYEKAAKELSKRSPPIPLAKVDATAETDLAKRFDVSGYPTLKIFRKGRPYDYNGPREKYGIVDYMIEQSGPPSKEILTLKQVQEFLKDGDDVIIIGVFKGESDPAYQQYQDAANNLREDYKFHHTFSTEIAKFLKVSQGQLVVMQPEKFQSKYEPRSHMMDVQGSTQDSAIKDFVLKYALPLVGHRKVSNDAKRYTRRPLVVVYYSVDFSFDYRAATQFWRSKVLEVAKDFPEYTFAIADEEDYAGEVKDLGLSESGEDVNAAILDESGKKFAMEPEEFDSDTLREFVTAFKKGKLKPVIKSQPVPKNNKGPVKVVVGKTFDSIVMDPKKDVLIEFYAPWCGHCKQLEPVYNSLAKKYKGQKGLVIAKMDATANDVPSDRYKVEGFPTIYFAPSGDKKNPVKFEGGDRDLEHLSKFIEEHATKLSRTKEEL

SEQ ID NO: 65046 - protein, 103 aa, Homo sapiens
LSLILSMLLFKPAPIYILDEVDAALDLSHTQNIGQMLRTHFTHSQFIVVSLKEGMFNNANVLFKTKFVDGVSTVARFTQCQNGKISKEAKSKAKPPKGAHVEV

SEQ ID NO: 65047 - protein, 334 aa, Homo sapiens
LGIWTLLPLVLTSVARLSSKSVNAQVTDINSKGLELRKTVTTVETQNLEGLHHDGQFCHKPCPPGERKARDCTVNGDEPDCVPCQEGKEYTDKAHFSSKCRRCRLCDEGHGLEVEINCTRTQNTKCRCKPNFFCNSTVCEHCDPCTKCEHGIIKECTLTSNTKCKEEGSRSNLGWLCLLLLPIPLIVWVKRKEVQKTCRKHRKENQGSHESPTLNPETVAINLSDVDLSKYITTIAGVMTLSQVKGFVRKNGVNEAKIDEIKNDNVQDTAEQKVQLLRNWHQLHGKKEAYDTLIKDLKKANLCTLAEKIQTIILKDITSDSENSNFRNEIQSLV

SEQ ID NO: 65048 - protein, 20 aa, Homo sapiens
VGFCLVFATPLCCALFPQKR

SEQ ID NO: 65049 - protein, 567 aa, Homo sapiens
LCSRFSIRDSSSMAARLLLLGILLLLLPLPVPAPCHTAARSECKRSHKFVPGAWLAGEGVDVTSLRRSGSFPVDTQRFLRPDGTCTLCENALQEGTLQRLPLALTNWRAQGSGCQRHVTRAKVSSTEAVARDAARSIRNDWKVGLDVTPKPTSNVHVSVAGSHSQAANFAAQKTHQDQYSFSTDTVECRFYSFHVVHTPPLHPDFKRALGDLPHHFNASTQPAYLRLISNYGTHFIRAVELGGRISALTALRTCELALEGLTDNEVEDCLTVEAQVNIGIHGSISAEAKACEEKKKKHKMTASFHQTYRERHSEVVGGHHTSINDLLFGIQAGPEQYSAWVNSLPGSPGLVDYTLEPLHVLLDSQDPRREALRRALSQYLTDRARWRDCSRPCPPGRQKSPRDPCQCVCHGSAVTTQDCCPRQRGLAQLEVTFIQAWGLWGDWFTATDAYVKLFFGGQELRTSTVWDNNNPIWSVRLDFGDVLLATGGPLRLQVWDQDSGRDDDLLGTCDQAPKSGSHEVRCNLNHGHLKFRYHARCLPHLGGGTCLDYVPQMLLGEPPGNRSGAVW

SEQ ID NO: 65050 - protein, 11 aa, Homo sapiens
MISIGFLGFIV

SEQ ID NO: 65051 - protein, 23 aa, Homo sapiens
LMILAVLSILPAIFQKKLKQKFE

SEQ ID NO: 65052 - protein, 22 aa, Homo sapiens
ILASLLLHLLSLPSPLPRKPPI

SEQ ID NO: 65053 - protein, 35 aa, Homo sapiens [sequence omitted]

SEQ ID NO: 65054 - protein, 663 aa, Homo sapiens
TLLSSLLGLLLLGLLLPASLTGGVGSLNLEELSEMRYGIEILPLPVMGGQSQSSDVVIVSSKYKQRYECRLPAGAIHFQREREEETPAYQGPGIPELLSPMRDAPCLLKTKDWWTYEFCYGRHIQQYHMEDSEIKGEVLYLGYYQSAFDWDDETAKASKQHRLKRYHSQTYGNGSKCDLNGRPREAEVRFLCDEGAGISGDYIDRVDEPLSCSYVLTIRTPRLCPHPLLRPPPSAAPQAILCHPSLQPEEYMAYVQRQADSKQYGDKIIEELQDLGPQVWSETKSGVAPQKMAGASPTKDDSKDSDFWKMLNEPEDQAPGGEEVPAEEQDPSPEAADSASGAPNDFQNNVQVKVIRSPADLIRFIEELKGGTKKGKPNIGQEQPVDDAAEVPQREPEKERGDPERQREMEEEEDEDEDEDEDEDERQLLGEFEKELEGILLPSDRDRLRSEVKAGMERELENIIQETEKELDPDGLKKESERDRAMLALTSTLNKLIKRLEEKQSPELVKKHKKKRVVPKKPPPSPQPTEEDPEHRVRVRVTKLRLGGPNQDLTVLEMKRENPQLKQIEGLVKELLEREGLTAAGKIEIKIVRPWAEGTEEGARWLTDEDTRNLKEIFFNILVPGAEEAQKERQRQKELESNYRRVWGSPGGEGTGDLDEFDF

SEQ ID NO: 65055 - protein, 144 aa, Homo sapiens
LRPSLLPLHLLLLLLLSAAVCRAEAGLETESPVRTLQVETLVEPPEPCAEPAAFGDTLHIHYTGSLVDGRIIDTSLTRDPLVIELGQKQVIPGLEQSLLDMCVGEKRRAIIPSHLAYGKRGFPPSVPGTKDNLMRPPGMTSSSQ

SEQ ID NO: 65056 - protein, 50 aa, Homo sapiens
IIYNMILSHLLHLCAHTCEGLGPASTTALPQTQLSTSRQDGITVTGGPEV

SEQ ID NO: 65057 - protein, 40 aa, Homo sapiens
VCALSYFSFWWWWWKGGGASRASLELAGQSYRPMGPGSAR

SEQ ID NO: 65058 - protein, 8 aa, Homo sapiens
LFIVIFVL

SEQ ID NO: 65059 - protein, 41 aa, Homo sapiens
KAALLLLLTFLAKQHTDSFQAALGSLPVDKAQELQAVLGLS

SEQ ID NO: 65060 - protein, 314 aa, Homo sapiens [sequence omitted]

SEQ ID NO: 65061 - protein, 36 aa, Homo sapiens
VDSGLELSWGSLFAAAAAAATAVLGARSPGKKPSHV

SEQ ID NO: 65062 - protein, 46 aa, Homo sapiens
LQLLLLLFLLLLFLLPIREEDRSCTLANNFARSFTLMLRYNGPPPT

SEQ ID NO: 65063 - protein, 791 aa, Homo sapiens
RPWLLWVVAATGTLVLLAADAQGQKVFTNTWAVRIPGGPAVANSVARKHGFLNLGQIFGDYYHFWHRGVTKRSLSPHRPRHSRLQREPQVQWLEQQVAKRRTKRDVYQEPTDPKFPQQWYLSGVTQRDLNVKAAWAQGYTGHGIVVSILDDGIEKNHPDLAGNYDPGASFDVNDQDPDPQPRYTQMNDNRHGTRCAGEVAAVANNGVCGVGVAYNARIGGVRMLDGEVTDAVEARSLGLNPNHIHIYSASWGPEDDGKTVDGPARLAEEAFFRGVSQGRGGLGSIFVWASGNGGREHDSCNCDGYTNSIYTLSISSATQFGNVPWYSEACSSTLATTYSSGNQNEKQIVTTDLRQKCTESHTGTSASAPLAAGIIALTLEANKNLTWRDMQHLVVQTSKPAHLNANDWATNGVGRKVSHSYGYGLLDAGAMVALAQNWTTVAPQRKCIIDILTEPKDIGKRLEVRKTVTACLGEPNHITRLEHAQARLTLSYNRRGDLAIHLVSPMGTRSTLLAARPHDYSADGFNDWAFMTTHSWDEDPSGEWVLEIENTSEANNYGTLTKFTLVLYGTAPEGLPVPPESSGCKTLTSSQACVVCEEGFSLHQKSCVQHCPPGFAPQVLDTHYSTENDVETIRASVCAPCHASCATCQGPALTDCLSCPSHASLDPVEQTCSRQSQSSRESPPQQQPPRLPPEVEAGQRLRAGLLPSHLPEVVAGLSCAFIVLVFVTVFLVLQLRSGFSFRGVKVYTMDRGLISYKGLPPEAWQEECPSDSEEDEGRGERTAFIKDQSAL

SEQ ID NO: 65064 - protein, 749 aa, Homo sapiens
KMVLLRVLILLLSWAAGMGGQYGNPLNKYIRHYEGLSYNVDSLHQKHQRAKRAVSHEDQFLRLDFHAHGRHFNLRMKRDTSLFSDEFKVETSNKVLDYDTSHIYTGHIYGEEGSFSHGSVIDGRFEGFIQTRGGTFYVEPAERYIKDRTLPFHSVIYHEDDINYPHKYGPQGGCADHSVFERMRKYQMTGVEEVTQIPQEEHAANGPELLRKKRTTSAEKNTCQLYIQTDHLFFKYYGTREAVIAQISSHVKAIDTIYQTTDFSGIRNISFMVKRIRINTTADEKDPTNPFRFPNIGVEKFLELNSEQNHDDYCLAYVFTDRDFDDGVLGLAWVGAPSGSSGGICEKSKLYSDGKKKSLNTGIITVQNYGSHVPPKVSHITFAHEVGHNFGSPHDSGTECTPGESKNLGQKENGNYIMYARATSGDKLNNNKFSLCSIRNISQVLEKKRNNCFVESGQPICGNGMVEQGEECDCGYSDQCKDECCFDANQPEGRKCKLKPGKQCSPSQGPCCTAQCAFKSKSEKCRDDSDCAREGICNGFTALCPASDPKPNFTDCNRHTQVCINGQCAGSICEKYGLEECTCASSDGKDDKELCHVCCMKKMDPSTCASTGSVQWSRHFSGRTITLQPGSPCNDFRGYCDVFMRCRLVDADGPLARLKKAIFSPELYENIAEWIVAHWWAVLLMGIALIMLMAGFIKICSVHTPSSNPKLPPPKPLPGTLKRRRPPQPIQQPQRQRPRESYQMGHMRR

SEQ ID NO: 65065 - protein, 83 aa, Homo sapiens
LPSALALSLLLVSGSLLPGPGAAQNEPRIVTSEEVIIRDSPVLPVTLQCNLTSSSHTLTYSYWTKNGVELSATRKNASNMEYR

SEQ ID NO: 65066 - protein, 49 aa, Homo sapiens
VTPGLGVVAVLLLFLVVREPPRGAVERHSDLPPLNPTSWWADLRALARK

SEQ ID NO: 65067 - protein, 229 aa, Homo sapiens
ILVPCVLGLLLLPILAMLMALCVHCHRLPGSYDSTSSDSLYPRGIQFKRPHTVAPWPPAYPPVTSYPPLSQPDLLPIPRSPQPLGGSHRTPSSRRDSDGANSVASYENEEPACEDADEDEDDYHNPGYLVVLPDSTPATSTAAPSAPALSTPGIRDSAFSMESIDDYVNVPESGESAEASLDGSREYVNVSQELHPGAAKTEPAALSSQEAEEVEEEGAPDYENLQELN

SEQ ID NO: 65068 - protein, 204 aa, Homo sapiens
VELGHLRPWLLELLAAMCFPKVLSDDMKKLKARMHQAIERFYDKMQNAESGRGQVMSSLAELEDDFKEGYLETVAAYYEEQHPELTPLLEKERDGLRCRGNRSPVPDVEDPATEEPGESFCDKVMRWFQAMLQRLQTWWHGVLAWVKEKVVALVHAVQALWKQFQSFCCSLSELFMSSFQSYGAPRGDKEELTPQKCSEPQSSK

SEQ ID NO: 65069 - protein, 54 aa, Homo sapiens
LLIIRPSSQYIVALVFATYLLKPLFPTCPVPEEAAKLVACHSVQLIVHQPTQVI

SEQ ID NO: 65070 - protein, 1191 aa, Homo sapiens
LSAALHLLLLFAAGAEKLPGQGVHSQGQGPGANFVSFVGQAGGGGPAGQQLPQLPQSSQLQQQQQQQQQQQQPQPPQPPFPAGGPPARRGGAGAGGGWKLAEEESCREDVTRVCPKHTWSNNLAVLECLQDVREPENEISSDCNHLLWNYKLNLTTDPKFESVAREVCKSTITEIKECADEPVGKGYMVSCLVDHRGNITEYQCHQYITKMTAIIFSDYRLICGFMDDCKNDINILKCGSIRLGEKDAHSQGEVVSCLEKGLVKEAEEREPKIQVSELCKKAILRVAELSSDDFHLDRHLYFACRDDRERFCENTQAGEGRVYKCLFNHKFEESMSEKCREALTTRQKLIAQDYKVSYSLAKSCKSDLKKYRCNVENLPRSREARLSYLLMCLESAVHRGRQVSSECQGEMLDYRRMLMEDFSLSPEIILSCRGEIEHHCSGLHRKGRTLHCLMKVVRGEKGNLGMNCQQALQTLIQETDPGADYRIDRALNEACESVIQTACKHIRSGDPMILSCLMEHLYTEKMVEDCEHRLLELQYFISRDWKLDPVLYRKCQGDASRLCHTHGWNETSEFMPQGAVFSCLYRHAYRTEEQGRRLSRECRAEVQRILHQRAMDVKLDPALQDKCLIDLGKWCSEKTETGQELECLQDHLDDLVVECRDIVGNLTELESEDIQIEALLMRACEPIIQNFCHDVADNQIDSGDLMECLIQNKHQKDMNEKCAIGVTHFQLVQMKDFRFSYKFKMACKEDVLKLCPNIKKKVDVVICLSTTVRNDTLQEAKEHRVSLKCRRQLRVEELEMTEDIRLEPDLYEACKSDIKNFCSAVQYGNAQIIECLKENKKQLSTRCHQKVFKLQETEMMDPELDYTLMRVCKQMIKRFCPEADSKTMLQCLKQNKNSELMDPKCKQMITKRQITQNTDYRLNPMLRKACKADIPKFCHGILTKAKDDSELEGQVISCLKLRYADQRLSSDCEDQIRIIIQESALDYRLDPQLQLHCSDEISSLCAEEAAAQEQTGQVEECLKVNLLKIKTELCKKEVLNMLKESKADIFVDPVLHTACALDIKHHCAAITPGRGRQMSCLMEALEDKRVRLQPECKKRLNDRIEMWSYAAKVAPADGFSDLAMQVMTSPSKNYILSVISGSICILFLIGLMCGRITKRVTRELKDRLQYRSETMAYKGLVWSQDVTGSPA

SEQ ID NO: 65071 - protein, 20 aa, Homo sapiens
LAVLFSGALLGLLAGKEEGG

SEQ ID NO: 65072 - protein, 18 aa, Homo sapiens
MQVRVMTCFLLALRIISI

SEQ ID NO: 65073 - protein, 23 aa, Homo sapiens
VLLWAFSCFIFVTANIILSETKL

SEQ ID NO: 65074 - protein, 291 aa, Homo sapiens
KFLFGGLAGMGATVFVQPLDLVKNRMQLSGEGAKTREYKTSFHALTSILKAEGLRGIYTGLSAGLLRQATYTTTRLGIYTVLFERLTGADGTPPGFLLKAVIGMTAGATGAFVGTPAEVALIRMTADGRLPADQRRGYKNVFNALIRITREEGVLTLWRGCIPTMARAVVVNAAQLASYSQSKQFLLDSGYFSDNILCHFCASMISGLVTTAASMPVDIAKTRIQNMRMIDGKPEYKNGLDVLFKVVRYEGFFSLWKGFTPYYARLGPHTVLTFIFLEQMNKAYKRLFLSG

SEQ ID NO: 65075 - protein, 18 aa, Homo sapiens
RCFVVSVFLLFTLPESVL

SEQ ID NO: 65076 - protein, 41 aa, Homo sapiens
VFAKIWWIVPGAGSMLPVLSPIWVPWSPAIQHYSLSTTQLR

SEQ ID NO: 65077 - protein, 43 aa, Homo sapiens
LRPPERLREPRPEGVGVAAAETQPPLFPLFAERRRVASIRQLP

SEQ ID NO: 65078 - protein, 330 aa, Homo sapiens
LLAAAFLVAFVLLLYMVSPLISPKPLALPGAHVVVTGGSSGIGKCIAIECYKQGAFITLVARNEDKLLQAKKEIEMHSINDKQVVLCISVDVSQDYNQVENVIKQAQEKLGPVDMLVNCAGMAVSGKFEDLEVSTFERLMSINYLGSVYPSRAVITTMKERRVGRIVFVSSQAGQLGLFGFTAYSASKFAIRGLAEALQMEVKPYNVYITVAYPPDTDTPGFAEENRTKPLETRLISETTSVCKPEQVAKQIVKDAIQGNFNSSLGSDGYMLSALTCGMAPVTSITEGLQQVVTMGLFRTIALFYLGSFDSIVRRCMMQREKSENADKTA

SEQ ID NO: 65079 - protein, 71 aa, Homo sapiens
VKLEIFRMIIYLTFPVAMFWVSNQAEWFEDDVIQRKRELWPPEKLQEIEEFKERLRKRREEKLLRDAQQNS

SEQ ID NO: 65080 - protein, 190 aa, Homo sapiens
IRVLLLYILLRNGVSEENLAKLIQHANVQAHSSLIRNLEQLGGTVTNPGGSGTSSRLEPRERMEPTYQLSRWTPVIKDVMEDAVEDRLDRNLWPFVSDPAPTASSQAAVSARFGHWHKNKAGIEARAGPRLIVYVMGGVAMSEMRAAYEVTRATEGKWEVLIGSSHILTPTRFLDDLKALDKKLEDIALP

SEQ ID NO: 65081 - protein, 534 aa, Homo sapiens
LLPLLLLLPMCWAVEVKRPRGVSLTNHHFYDESKPFTCLDGSATIPFDQVNDDYCDCKDGSDEPGTAACPNGSFHCTNTGYKPLYIPSNRVNDGVCDCCDGTDEYNSGVICENTCKEKGRKERESLQQMAEVTREGFRLKKILIEDWKKAREEKQKKLIELQAGKKSLEDQVEMLRTVKEEAEKPEREAKEQHQKLWEEQLAAAKAQQEQELAADAFKELDDDMDGTVSVTELQTHPELDTDGDGALSEAEAQALLSGDTQTDATSFYDRVWAAIRDKYRSEALPTDLPAPSAPDLTEPKEEQPPVPSSPTEEEEEEEEEEEEEAEEEEEEEDSEVQGEQPKEAPPPLSPPQPASPAEEDKMPPYDEQTQAFIDAAQEARNKFEEAERSLKDMEESIRNLEQEISFDFGPNGEFAYLYSQCYELTTNEYVYRLCPFKLVSQKPKLGGSPTSLGTWGSWIGPDHDKFSAMKYEQGTGCWQGPNRSTTVRLLCGKETMVTSTTEPSRCEYLMELMTPAACPEPPPEAPTEDDHDEL

SEQ ID NO: 65082 - protein, 17 aa, Homo sapiens
LALSTLALYVAVVNVHS

SEQ ID NO: 65083 - protein, 450 aa, Homo sapiens
LLPLLLLLLLRAVLAVPLERGAPNKEETPATESPDTGLYYHRYLQEVIDVLETDGHFREKLQAANAEDIKSGKLSRELDFVSHHVRTKLDELKRQEVSRLRMLLKAKMDAEQDPNVQVDHLNLLKQFEHLDPQNQHTFEARDLELLIQTATRDLAQYDAAHHEEFKRYEMLKEHERRRYLESLGEEQRKEAERKLEEQQRRHREHPKVNVPGSQAQLKEVWEELDGLDPNRFNPKTFFILHDINSDGVLDEQELEALFTKELEKVYDPKNEEDDMREMEEERLRMREHVMKNVDTNQDRLVTLEEFLASTQRKEFGDTGEGWETVEMHPAYTEEELRRFEEELAAREAELNAKAQRLSQETEALGRSQGRLEAQKRELQQAVLHMEQRKQQQQQQQGHKAPAAHPEGQLKFHPDTDDVPVPAPAGDQKEVDTSEKKLLERLPEVEVPQHL

SEQ ID NO: 65084 - protein, 50 aa, Homo sapiens
MELQEIQLKEAKHIADEADGKYEEVARKLVIIEGDMGCTEERAELAESRC

SEQ ID NO: 65085 - protein, 243 aa, Homo sapiens
RHEGPPAEMTVLAPAWSPTTYLLLLLLLSSGLSGTQDCSFQHSPISSDFAVKIRELSDYLLQDYPVTVASNLQDEELCGGLWRLVLAQRWMERLKTVAGSKMQGLLERVNTEIHFVTKCAFQPPPSCLRFVQTNISRLLQETSEQLVALKPWITRQNFSRCLELQCQPDSSTLPPPWSPRPLEATAPTAPQPPLLLLLLLPVGLLLLAAAWCLHWQRTRRRTPRPGEQVPPVPSPQDLLLVEH

SEQ ID NO: 65086 - protein, 40 aa, Homo sapiens
LVFLAALFLICYSCWGNCFLYHCSDSPLPESAHDPGVVGT

SEQ ID NO: 65087 - protein, 90 aa, Homo sapiens
LALLGCFALLWCVYKKTKYAFSPRNSLPQHLKEFLGHPHHNTLLFFSFPLSDENDVFDKLSVIAEDSESGKQNPGDSCSLGTPPGQGPQS

SEQ ID NO: 65088 - protein, 459 aa, Homo sapiens
LTLLLAGYLAQQYLPLPTPKVIGIDLGTTYCSVGVFFPGTGKVKVIPDENGHISIPSMVSFTDNDVYVGYESVELADSNPQNTIYDAKRFIGKIFTAEELEAEIGRYPFKVLNKNGMVEFSVTSNETITVSPEYVGSRLLLKLKEMAEAYLGMPVANAVISVPAEFDLKQRNSTIEAANLAGLKILRVINEPTAAAMAYGLHKADVFHVLVIDLGGGTLDVSLLNKQGGMFLTRAMSGNNKLGGQDFNQRLLQYLYKQIYQTYGFVPSRKEEIHRLRQAVEMVKLNLTLHQSAQLSVLLTVEEQDRKEPHSSDTELPKDKLSSADDHRVNSGFGRGLSDKKSGESQVLFETEISRKLFDTLNEDLFQKILVPIQQVLKEGHLEKTEIDEVVLVGGSTRIPRIRQVIQEFFGKDPNTSVDPDLAVVTGVAIQAGIDGGSWPLQVSALEIPNKHLQKTNFN

SEQ ID NO: 65089 - protein, 13 aa, Homo sapiens
VGFLLCLFLLMPP

SEQ ID NO: 65090 - protein, 13 aa, Homo sapiens
KIIYNATLLFLVS

SEQ ID NO: 65091 - protein, 171 aa, Homo sapiens
IFTSPLNLLLLGLCIFLLYKIVRGDQPAASGDSDDDEPPPLPRLKRRDFTPAELRRFDGVQDPRILMAINGKVFDVTKGRKFYGPEGPYGVFAGRDASRGLATFCLDKEALKDEYDDLSDLTAAQQETLSDWESQFTFKYHHVGKLLKEGEEPTVYSDEEEPKDESARKND

SEQ ID NO: 65092 - protein, 235 aa, Homo sapiens
MGAFRALCGLALLCALSLGQRPTGGPGCGPGRLLLGTGTDARCCRVHTTRCCRDYPGEECCSEWDCMCVQPEFHCGDPCCTTCRHHPCPPGQGVQSQGKFSFGFQCIDCASGTFSGGHEGHCKPWTDCTQFGFLTVFPGNKTHNAVCVPGSPPAEPLGWLTVVLLAVAACVLLLTSAQLGLHIWQLRSQCMWPRETQLLLEVPPSTEDARSCQFPEEERGERSAEEKGRLGDLWV

SEQ ID NO: 65093 - protein, 170 aa, Homo sapiens
MEKEKEGFPITSLREINTILKAQHPNIVTVREIVVGSNMDKIYIVMNYVEHDLKSLMETMKQPFLPGEVKTLMIQLLRGVKHLHDNWILHRDLKTSNLLLSHAGILKPPTASRALAFLNTSPGVLGILHGRGHVVSGLHLRGAADSEASVPREFGNRSDQQSVQGAGDPQ

SEQ ID NO: 65094 - protein, 258 aa, Homo sapiens
MEIIANDQGNRIMPSYVAFTPEGECLIGDAAKNQLTSNPKNTVFDAKRLIGRRWHDPSVQQDIEFLPFKVVEKNTKSYIQIDVGGGQTKTFAPKEISAMVLTKMKENAEAYLGKVTHAVVTAPAYFNDAQCQATKDAGTIADLNVMRIINKPTAAAIAYGLDKREGEKNILVFDLGGGTFDVSLLTIDNGVFKVVATNGDTYLGGEDFDQRVMEHFIKLYKKKTGKDVRKDNRAVQKLWRKVEKAKRALSSQHQASSN

SEQ ID NO: 65095 - protein, 188 aa, Homo sapiens [sequence omitted]

SEQ ID NO: 65096 - protein, 421 aa, Homo sapiens
MRLWTPVGVLTSLAYCLHQRRVALAELQEADGQCPVDRSLLKLKMVQVVFRHGARSPLKPLPLEEQVEWNPQLLEVPPQTQFDYTVTNLAGGPKPYSPYDSQYHETTLKGGMFAGQLTKVGMQQMFALGERLRKNYVEDIPFLSPTFNPQEVFIRSTNIFRNLESTRCLLAGLFQCQKEGPIIIHTDEADSEVLYPNYQSCWSLRQRTRGRRQTASLQPGISEDLKKVKDRMGIDSSDKVDFFILLDNVAAEQAHNLPSCPMLKRFARMIEQRAVDTSLYILPKEDRESLQMAVGPFLHILESNLLKAMDSATAPDKIRKLYLYAAHDVTFIPLLMTLGIFDHKWPPFAVDLTMELYQHLESKEWFVQLYYHGKEQVPRGCPDGLCPLDMFLNAMSVYTLSPEKYHALCSQTQVMEVGNEE

SEQ ID NO: 65097 - protein, 264 aa, Homo sapiens
MRLWTPVGVLTSLAYCLHQRRVALAELQEADGQCPVDRSLLKLKMVQVVFRHGARSPLKPLPLEEQVEWNPQLLEVPPQTQFDYTVTNLAGGPKPYSPYDSQYHETTLKGGMFAGQLTKVGMQQMFALGERLRKNYVEDIPFLSPTFNPQEVFIRSTNIFRNLESTRCLLAGLFQCQKEGPIIIHTDEADSEVLYPNYQSCWSLRQRTRGRRQTASLQPGISEDLKKVKDRMGIDSSDKVDFFILLDNVAAEQEKMGSCRFHGS

SEQ ID NO: 65098 - protein, 144 aa, Homo sapiens
MAFLLPLIIVLMVKHSDSRTHSLRYFRLGVSDPIHGVPEFISVGYVDSHPITTYDSVTRQKEPRAPWMAENLAPDHWERYTQLLRGWQQMFKVELKRLQRHYNHSGVHAAETDASPIPPQPAETPGLASNKRMLNCTCCSFGKA

SEQ ID NO: 65099 - protein, 1143 aa, Homo sapiens
MYLWLKLLAFGFAFLDTEVFVTGQSPTPSPTDAYLNASETTTLSPSGSAVISTTTIATTPSKPTCDEKYANITVDYLYNKETKLFTAKLNVNENVECGNNTCTNNEVHNLTECKNASVSISHNSCTAPDKTLILDVPPGVEKFQLHDCTQVEKADTTICLKWKNIETFTCDTQNITYRFQCGNMIFDNKEIKLENLEPEHEYKCDSEILYNNHKFTNASKIIKTDFGSPGEPQIIFCRSEAAHQGVITWNPPQRSFHNFTLCYIKETEKDCLNLDKNLIKYDLQNLKPYTKYVLSLHAYIIAKVQRNGSAAMCHFTTKSAPPSQVWNMTVSMTSDNSMHVKCRPPRDRNGPHERYHLEVEAGNTLVRNESHKNCDFRVKDLQYSTDYTFKAYFHNGDYPGEPFILHHSTSYNSKALIAFLAFLIIVTSIALLVVLYKIYDLHKKRSCNLDEQQELVERDDEKQLMNVEPIHADILLETYKRKIADEGRLFLAEFQSIPRVFSKFPIKEARKPFNQNKNRYVDILPYDYNRVELSEINGDAGSNYINASYIDGFKEPRKYIAAQGPRDETVDDFWRMIWEQKATVIVMVTRCEEGNRNKCAEYWPSMEEGTRAFGDVVVKINQHKRCPDYIIQKLNIVNKKEKATGREVTHIQFTSWPDHGVPEDPHLLLKLRRRVNAFSNFFSGPIVVHCSAGVGRTGTYIGIDAMLEGLEAENKVDVYGYVVKLRRQRCLMVQVEAQYILIHQALVEYNQFGETEVNLSELHPYLHNMKKRDPPSEPSPLEAEFQRLPSYRSWRTQHIGNQEENKSKNRNSNVIPYDYNRVPLKHELEMSKESEHDSDESSDDDSDSEEPSKYINASFIMSYWKPEVMIAAQGPLKETIGDFWQMIFQRKVKVIVMLTELKHGDQEICAQYWGEGKQTYGDIEVDLKDTDKSSTYTLRVFELRHSKRKDSRTVYQYQYTNWSVEQLPAEPKELISMIQVVKQKLPQKNSSEGNKHHKSTPLLIHCRDGSQQTGIFCALLNLLESAETEEVVDIFQVVKALRKARPGMVSTFEQYQFLYDVIASTYPAQNGQVKKNNHQEDKIEFDNEVDKVKQDANCVNPLGAPEKLPEAKEQAEGSEPTSGTEGPEHSVNGPASPALNQGS

SEQ ID NO: 65100 - protein, 1304 aa, Homo sapiens
MYLWLKLLAFGFAFLDTEVFVTGQSPTPSPTGLTTAKMPSVPLSSDPLPTHTTAFSPASTFERENDFSETTTSLSPDNTSTQVSPDSLDNASAFNTTGVSSVQTPHLPTHADSQTPSAGTDTQTFSGSAANAKLNPTPGSNAISDVPGERSTASTFPTDPVSPLTTTLSLAHHSSAALPARTSNTTITANTSDAYLNASETTTLSPSGSAVISTTTIATTPSKPTCDEKYANITVDYLYNKETKLFTAKLNVNENVECGNNTCTNNEVHNLTECKNASVSISHNSCTAPDKTLILDVPPGVEKFQLHDCTQVEKADTTICLKWKNIETFTCDTQNITYRFQCGNMIFDNKEIKLENLEPEHEYKCDSEILYNNHKFTNASKIIKTDFGSPGEPQIIFCRSEAAHQGVITWNPPQRSFHNFTLCYIKETEKDCLNLDKNLIKYDLQNLKPYTKYVLSLHAYIIAKVQRNGSAAMCHFTTKSAPPSQVWNMTVSMTSDNSMHVKCRPPRDRNGPHERYHLEVEAGNTLVRNESHKNCDFRVKDLQYSTDYTFKAYFHNGDYPGEPFILHHSTSYNSKALIAFLAFLIIVTSIALLVVLYKIYDLHKKRSCNLDEQQELVERDDEKQLMNVEPIHADILLETYKRKIADEGRLFLAEFQSIPRVFSKFPIKEARKPFNQNKNRYVDILPYDYNRVELSEINGDAGSNYINASYIDGFKEPRKYIAAQGPRDETVDDFWRMIWEQKATVIVMVTRCEEGNRNKCAEYWPSMEEGTRAFGDVVVKINQHKRCPDYIIQKLNIVNKKEKATGREVTHIQFTSWPDHGVPEDPHLLLKLRRRVNAFSNFFSGPIVVHCSAGVGRTGTYIGIDAMLEGLEAENKVDVYGYVVKLRRQRCLMVQVEAQYILIHQALVEYNQFGETEVNLSELHPYLHNMKKRDPPSEPSPLEAEFQRLPSYRSWRTQHIGNQEENKSKNRNSNVIPYDYNRVPLKHELEMSKESEHDSDESSDDDSDSEEPSKYINASFIMSYWKPEVMIAAQGPLKETIGDFWQMIFQRKVKVIVMLTELKHGDQEICAQYWGEGKQTYGDIEVDLKDTDKSSTYTLRVFELRHSKRKDSRTVYQYQYTNWSVEQLPAEPKELISMIQVVKQKLPQKNSSEGNKHHKSTPLLIHCRDGSQQTGIFCALLNLLESAETEEVVDIFQVVKALRKARPGMVSTFEQYQFLYDVIASTYPAQNGQVKKNNHQEDKIEFDNEVDKVKQDANCVNPLGAPEKLPEAKEQAEGSEPTSGTEGPEHSVNGPASPALNQGS

SEQ ID NO: 65101 - protein, 119 aa, Homo sapiens
MYLWLKLLAFGFAFLDTEVFVTGQSPTPSPTGVSSVQTPHLPTHADSQTPSAGTDTQTFSGSAANAKLNPTPGSNAISDAYLNASETTTLSPSGSAVISTTTIGDITLSQAATPSPCAW

SEQ ID NO: 65102 - protein, 51 aa, Homo sapiens
MTGRYRAHHRNAPSMLVCCVLSFISSQLKLALLTWCTQSKNCKKTGAKPLP

SEQ ID NO: 65103 - protein, 105 aa, Homo sapiens
MPQLGLSLLYAVLAAINLQKLHQDTFNQLHKVQPVRSRQPVNMENLPINNGSGQSYGLVLYEKSICSGGRLRAHAHDVAQVFLDETMIGILNENNKDLHIPELRE

SEQ ID NO: 65104 - protein, 149 aa, Homo sapiens [sequence omitted]

SEQ ID NO: 65105 - protein, 15 aa, Homo sapiens
MHQHAWLSILCFLFF

SEQ ID NO: 65106 - protein, 26 aa, Homo sapiens
MGPGGALHARGMKTLLPWTARASRSP

SEQ ID NO: 65107 - protein, 2417 aa, Homo sapiens
MALVLALAVLGSLSPGARAGDCKGQRQVLREAPGFVTDGAGNYSVNGNCEWLIEAPSPQHRILLDFLFLDTECTYDYLFVYDGDSPRGPLLASLSGSTRPPPIEASSGKMLLHLFSDANYNLLGFNASFRFSLCPGGCQSHGQCQPPGVCACEPGWGGPDCGLQECSAYCGSHGTCASPLGPCRCEPGFLGRACDLHLWENQGAGWWHNVSARDPAFSARIGAAGAFLSPPGLLAVFGGQDLNNALGDLVLYNFSANTWESWDLSPAPAARHSHVAVAWAGSLVLMGGELADGSLTNDVWAFSPLGRGHWELLAPPASSSSGPPGLAGHAAALVDDVWLYVSGGRTPHDLFSSGLFRFRLDSTSGGYWEQVIPAGGRPPAATGHSMVFHAPSRALLVHGGHRPSTARFSVRVNSTELFHVDRHVWTTLKGRDGLQGPRERAFHTASVLGNYMVVYGGNVHTHYQEEKCYEDGIFFYHLGCHQWVSGAELAPPGTPEGRAAPPSGRYSHVAAVLGGSVLLVAGGYSGRPRGDLMAYKVPPFVFQAPAPDYHLDYCSMYTDHSVCSRDPECSWCQGACQAAPPPGTPLGACPAASCLGLGRLLGDCQACLAFSSPTAPPRGPGTLGWCVHNESCLPRPEQARCRGEQISGTVGWWGPAPVFVTSLEACVTQSFLPGLHLLTFQQPPNTSQPDKVSIVRSTTITLTPSAETDVSLVYRGFIYPMLPGGPGGPGAEDVAVWTRAQRLHVLARMARGPDTENMEEVGRWVAHQEKETRRLQRPGSARLFPLPGRDHKYAVEIQGQLNGSAGPGHSELTLLWDRTGVPGGSEISFFFLEPYRSSSCTSYSSCLGCLADQGCGWCLTSATCHLRQGGAHCGDDGAGGSLLVLVPTLCPLCEEHRDCHACTQDPFCEWHQSTSRKGDAACSRRGRGRGALKSPEECPPLCSQRLTCEDCLANSSQCAWCQSTHTCFLFAAYLARYPHGGCRGWDDSVHSEPRCRSCDGFLTCHECLQSHECGWCGNEDNPTLGRCLQGDFSGPLGGGNCSLWVGEGLGLPVALPARWAYARCPDVDECRLGLARCHPRATCLNTPLSYECHCQRGYQGDGISHCNRTCLEDCGHGVCSGPPDFTCVCDLGWTSDLPPPTPAPGPPAPRCSRDCGCSFHSHCRKRGPGFCDECQDWTWGEHCERCRPGSFGNATGSRGCRPCQCNGHGDPRRGHCDNLSGLCFCQDHTEGAHCQLCSPGYYGDPRAGGSCFRECGGRALLTNVSSVALGSRRVGGLLPPGGGAARAGPGLSYCVWVVSATEELQPCAPGTLCPPLTLTFSPDSSTPCTLSYVLAFDGFPRFLDTGVVQSDRSLIAAFCGQRRDRPLTVQALSGLLVLHWEANGSSSWGFNASVGSARCGSGGPGSCPVPQECVPQDGAAGAGLCRCPQGWAGPHCRMALCPENCNAHTGAGTCNQSLGVCICAEGFGGPDCATKLDGGQLVWETLMDSRLSADTASRFLHRLGHTMVDGPDATLWMFGGLGLPQGLLGNLYRYSVSERRWTQMLAGAEDGGPGPSPRSFHAAAYVPAGRGAMYLLGGLTAGGVTRDFWVLNLTTLQWRQEKAPQTVELPAVAGHTLTARRGLSLLLVGGYSPENGFNQQLLEYQLATGTWVSGAQSGTPPTGLYGHSAVYHEATDSLYVFGGFRFHVELAAPSPELYSLHCPDRTWSLLAPSQGAKRDRMRNVRGSSRGLGQVPGEQPGSWGFREVRKKMALWAALAGTGGFLEEISPHLKEPRPRLFHASALLGDTMVVLGGRSDPDEFSSDVLLYQVNCNAWLLPDLTRSASVGPPMEESVAHAVAAVGSRLYISGGFGGVALGRLLALTLPPDPCRLLSSPEACNQSGACTWCHGACLSGDQAHRLGCGGSPCSPMPRSPEECRRLRTCSECLARHPRTLQPGDGEASTPRCKWCTNCPEGACIGRNGSCTSENDCRINQREVFWAGNCSEAACGAADCEQCTREGKCMWTRQFKRTGETRRILSVQPTYDWTCFSHSLLNVSPMPVESSPPLPCPTPCHLLPNCTSCLDSKGADGGWQHCVWSSSLQQCLSPSYLPLRCMAGGCGRLLRGPESCSLGCAQATQCALCLRRPHCGWCAWGGQDGGGRCMEGGLSGPRDGLTCGRPGASWAFLSCPPEDECANGHHDCNETQNCHDQPHGYECSCKTGYTMDNMTGLCRPVCAQGCVNGSCVEPDHCRCHFGFVGRNCSTECRCNRHSECAGVGARDHCLLCRNHTKGSHCEQCLPLFVGSAVGGGTCRPCHAFCRGNSHICISRKELQMSKGEPKKYSLDPEEIENWVTEGPSEDEAVCVNCQNNSYGEKCESCLQGYFLLDGKCTNAPSAGNHFTGVRWAASSATASSRWSRSAAWTPRPRPTASMSPNAGR

SEQ ID NO: 65108 - protein, 360 aa, Homo sapiens
MAAAWPLLLVALLVLSWPPPGTGDVVVQAPTQVPGFLGDSVTLPCYLQVPNMEVTHVSQLTWARHGESGSMAVFHQTQGPSYSESKRLEFVAARLGAELRNASLRMFGLRVEDEGNYTCLFVTFPQGSRSVDIWLRVLAKPQNTAEVQKVQLTGEPVPMARCVSTGGRPPAQITWHSDLGGMPNTSQVPGFLSGTVTVTSLWILVPSSQVDGKNVTCKVEHESFEKPQLLTVNLTVYYPPEVSISGYDNNWYLGQNEATLTCDARSNPEPTGYNWSTTMGPLPPFAVAQGAQLLIRPVDKPINTTLICNVTNALGARQAELTVQVKGTEHASASANGHVSYSAVSRENSSSQDPQTEGTR

SEQ ID NO: 65109 - protein, 331 aa, Homo sapiens
MLPLLLPLLWAGALAQERRFQLEGPESLTVQEGLCVLVPCRLPTTLPASYYGYGYWFLEGADVPVATNDPDEEVQEETRGRFHLLWDPRRKNCSLSIRDARRRDNAAYFFRLKSKWMKYGYTSSKLSVRVMGTLESGHPSNLTCSVPWVCEQGTPPIFSWMSAAPTSLGPRTTQSSVLTITPRPQDHSTNLTCQVTFPGAGVTMERTIQLNVSYAPQKVAISIFQGNSAAFKILQNTSSLPVLEGQALRLLCDADGNPPAHLSWFQGFPALNATPISNTGVLELPQVGSAEEGDFTCRAQHPLGSLQISLSLFVHWSSAPVPDRHSFRPPC

SEQ ID NO: 65110 - protein, 664 aa, Homo sapiens
MLENFALVATLAFIFPVPCSCAVGGGRKPWVPDRADITAATVKETYRGHGPAEWELEEGFWCEAEHEAPSEQSVSVEGVSQVRTAESGLFQKAHPCEMCDPLLKDILHLAEHQGSHLTQKLCTRGLCRRRFSFSANFYQHQKQHNGENCFRGDDGGASFVKSCTVHMLGRSFTCREEGMDLPDSSGLFQHQTTYNRVSPCRRTECMESFPHSSSLRQHQGDYDGQMLFSCGDEGKAFLDTFTLLDSQMTHAEVRPFRCLPCGNVFKEKSALINHRKIHSGEISHVCKECGKAFIHLHHLKMHQKFHTGKRHYTCSECGKAFSRKDTLVQHQRVHTGERSYDCSECGKAYSRSSHLVQHQRIHTGERPYKCNKCGKAFSRKDTLVQHQRFHTGERPYECSECGKFFSQSSHLIEHWRIHTGARPYECIECGKFFSHNSSLIKHRRVHTGARSYVCSKCGKAFGCKDTLVQHQIIHTGARPYECSECGKAFSRKDTLVQHQKIHTGERPYECGECGKFFSHSSNLIVHQRIHTGAKPYECNECGKCFSHNSSLILHQRVHTGARPYVCSECGKAYISSSHLVQHKKVHTGARPYECSECGKFFSRNSGLILHQRVHTGEKPYVCSECGKAYSRSSHLVRHQKAHTGERAHECNSFGGPLAASLKLV

SEQ ID NO: 65111 - protein, 59 aa, Homo sapiens
MISYIVLLSILLWPLVVYHELIQRMYTRLEPLLMQLDYSMKAEANALHHKHDKRSKGLP

SEQ ID NO: 65112 - protein, 282 aa, Homo sapiens
MAAAALTSLSTSPLLLGAPVAAFSPEPGLEPWKEALVRPPGSYSSSSNSGDWGWDLASDQSSPSTPSPPLPPEAAHFLFGEPTLRKRKSPAQVMFQCLWKSCGKVLSTASAMQRHIRLVHLGRQAEPEQSDGEEDFYYTELDVGVDTLTDGLSSLTPVSPTASMPPAFPRLELPELLEPPALPSPLRPPAPPLPPPPVLSTVANPQSCHSDRVYQGCLTPARLEPQPTEVGACPPALSSRIGVTLRKPRGDAKKCRKVYGMERRDLWCTACRWKKACQRFLD

SEQ ID NO: 65113 - protein, 161 aa, Homo sapiens
MFEVFNTLAMYMAIQAVLSLYTSGRTTGIAMDSGDGVAHTVPIYEGYTLPHAILHLDLAGWDLTDYFMKILMECSYRFTTMAEQEIVCDIKEKLCNIALDFEHKMATGASSSSLEKSYEVPDGQVITIGNEWFWYRRHCFSLPGHGILWHPRDHLQLHHEV

SEQ ID NO: 65114 - protein, 74 aa, Homo sapiens
MTIFHIFKTILVLLDLSRSPHHITQPLCPMGGQTVFQCRRKGCKVRAVCEEGTNESYCEKVCMVKKWITKNKAS

SEQ ID NO: 65115 - protein, 83 aa, Homo sapiens
MEDKLKGEMMNLQHGSLFLGMPKIVSGKDYNVTANSKLVIITAGAHQQEGESSLNWVQCNVNIFKFIISNVVKYSPTASCLLF

SEQ ID NO: 65116 - protein, 40 aa, Homo sapiens
MVYVALWMLSPLFGDRAWSLSPGTSCQPHVVPCPLLAVAR

SEQ ID NO: 65117 - protein, 46 aa, Homo sapiens
MHSPILQLERKHKVSSDSNQTETTAEKLPEDSFLKNKQKQSLDTWP

SEQ ID NO: 65118 - protein, 97 aa, Homo sapiens
VCWSLKSTRAAENRRDRTWAPRASPASQVGAGRQATSRPAPGMRVLLAALGLLFLGALRAFPQGCSRHSSAHRGLLTAGSSVSLTTTWMRPTAVQPA

SEQ ID NO: 65119 - protein, 38 aa, Homo sapiens
LPQYMIALLKILLAAAPTSKAKTDSINILADVLPEEMP

SEQ ID NO: 65120 - protein, 17 aa, Homo sapiens
MKLVFFGGGFSIVLSMC

SEQ ID NO: 65121 - protein, 20 aa, Homo sapiens
LNARWAPGMVLPVLCAAFTQ

SEQ ID NO: 65122 - protein, 22 aa, Homo sapiens
ISWHICITALGSVLCSYRLQPC

SEQ ID NO: 65123 - protein, 52 aa, Homo sapiens
LESPAAVGLLLLLWLSLPVRLPSFVVSQRCAGLLLAALRIQGVGCQVQDLQL

SEQ ID NO: 65124 - protein, 171 aa, Homo sapiens
VGPAPRRRLRPLAALALVLALAPGLPTARAGQTPRPAERGPPVRLFTEEELARYGGEEEDQPIYLAVKGVVFDVTSGKEFYGRGAPYNALTGKDSTRGVAKMSLDPADLTHDTTGLTAKELEALDEVFTKVYKAKYPIVGYTARRILNEDGSPNLDFKPEDQPHFDIKDEF

SEQ ID NO: 65125 - protein, 276 aa, Homo sapiens
LLLMAVAVFLVYRTITDFREKLKHPVMSVSYKEVDRYDAPGIALYPGQAQLLSCKHHYEVIPPLTSPGQPGDMNCTTQRINYTDPFSNQTVKSALIVQGPREVKKRELVFLQFRLNKSSEDFSAIDYLLFSSFQEFLQSPNRVGFMQACESAYSSWKFSGGFRTWVKMSLVKTKEEDGREAVEFRQETSVVNYIDQRPAAKKSAQLFFVVFEWKDPFIQKVQDIVTANPWNTIALLCGAFLALFKAAEFAKLSIKWMIKIRKRYLKRRGQATSHIS

SEQ ID NO: 65126 - protein, 37 aa, Homo sapiens
LPPSPAALLLLLRLRLLVPRLREPSSPPPPPPGCGGC

SEQ ID NO: 65127 - protein, 104 aa, Homo sapiens
LLLTILVCLAHTCFGCFKHLSPLNYKTEEPASDKGSEAEAHMPPPFTPYVPRILNGLASERTALSPQQQQQQTYGAIHNISGTIPGQCLAQSATGSVAAAPQEA

SEQ ID NO: 65128 - protein, 364 aa, Homo sapiens
LFLAGLMLVTGSINTLSAKWADNFMAEGCGGSKEHSFQHPFLQAVGMFLGEFSCLAAFYLLRCRAAGQSDSSVDPQQPFNPLLFLPPALCDMTGTSLMYVALNMTSASSFQMLRGAVIIFTGLFSVAFLGRRLVLSQWLGILATIAGLVVVGLADLLSKHDSQHKLSEVITGDLLIIMAQIIVAIQMVLEEKFVYKHNVHPLRAVGTEGLFGFVILSLLLVPMYYIPAGSFSGNPRGTLEDALDAFCQVGQQPLIAVALLGNISSIAFFNFAGISVTKELSATTRMVLDSLRTVVIWALSLALGWEAFHALQILGFLILLIGTALYNGLHRPLLGRLSRGRPLAEESEQERLLGGTRTPINDAS

SEQ ID NO: 65129 - protein, 10 aa, Homo sapiens
LPPAWRMSRC

SEQ ID NO: 65130 - protein, 13 aa, Homo sapiens
LGSLSIFFFLTAF

SEQ ID NO: 65131 - protein, 13 aa, Homo sapiens
VGRLPLLFPLSFL

SEQ ID NO: 65132 - protein, 348 aa, Homo sapiens
KQKANLIVLGAVPRLLYLLQQETSSTELKTECAVVLGSLAMGTENNVKSLLDCHIIPALLQGLLSPDLKFIEACLRCLRTIFTSPVTPEELLYTDATVIPHLMALLSRSRYTQEYICQIFSHCCKGPDHQTILFNHGAVQNIAHLLTSLSYKVRMQALKCFSVLAFENPQVSMTLVNVLVDGELLPQIFVKMLQRDKPIEMQLTSAKCLTYMCRAGAIRTDDNCIVLKTLPCLVRMCSKERLLEERVEGAETLAYLIEPDVELQRIASITDHLIAMLADYFKYPSSVSAITDIKRLDHDLKHAHELRQAAFKLYASLGANDEDIRKKVSLGEGRPPVLTASRQGVTST

SEQ ID NO: 65133 - protein, 12 aa, Homo sapiens
MHWTTLLLILLI

SEQ ID NO: 65134 - protein, 41 aa, Homo sapiens
RAGVRGRVALPAARPLPLQLLAGLVVPCQWGPRSSRPGRRW

SEQ ID NO: 65135 - protein, 22 aa, Homo sapiens
LVTLSLPPQRRRRDLTAKMTVS

SEQ ID NO: 65136 - protein, 7 aa, Homo sapiens
MLSFLLI

SEQ ID NO: 65137 - protein, 97 aa, Homo sapiens
LAMAPPPACRSPMSPPPPPLLLLLLSLALLGARARAEPAGSAVPAQSRPCVDCHAFEFMQRALQDLRKTACSLDARTETLLLQAERRALCACWPAGH

SEQ ID NO: 65138 - protein, 19 aa, Homo sapiens
LKILEISVLLHTWIMAKVL

SEQ ID NO: 65139 - protein, 299 aa, Homo sapiens
LFQHRRTIGSAGLNLFWKLCVTVMRLVILDNYDLASEWAAKYICNRIIQFKPGQDRYFTLGLPTGSTPLGCYKKLIEYHKNGHLSFKYVKTFNMDEYVGLPRNHPESYHSYMWNNFFKHIDIDPNNAHILDGNAADLQAECDAFENKIKEAGGIDLFVGGIGPDGHIAFNEPGSSLVSRTRLKTLAMDTILANAKYFDGDLSKVPTMALTVGVGTVMDAREVMILITGAHKAFALYKAIEEGVNHMWTVSAFQQHPRTIFVCDEDATLELRVKTVKYFKGLMHVHNKLVDPLFSMKDGN

SEQ ID NO: 65140 - protein, 83 aa, Homo sapiens
IMLIVGIITPVFYLLYYEILAKVDVSHHSTVDSSHLHSKITPPSQQREMENGIVPTKGIHFSQQDDHKLYSQDSQSPAAQQET

SEQ ID NO: 65141 - protein, 17 aa, Homo sapiens
LALATQHWLLLVGSLAM

SEQ ID NO: 65142 - protein, 19 aa, Homo sapiens
INKNEPRYRVTIMSLLTTL

SEQ ID NO: 65143 - protein, 8 aa, Homo sapiens
ILTAVIVF

SEQ ID NO: 65144 - protein, 163 aa, Homo sapiens
LLLSFVWMPALLPVASRLLLLPRVLLTMASGSPPTQPSPASDSGSGYVPGSVSAAFVTCPNEKVAKEIARAVVEKRLAACVNLIPQITSIYEWKGKIEEDSEVLMMIKTQSSLVPALTDFVRSVHPYEVAEVIALPVEQGNFPYLQWVRQVTESVSDSITVLP

SEQ ID NO: 65145 - protein, 58 aa, Homo sapiens
LNCFGLLIVNQVAALLFPLLAKEDSTFSGTYKQQLAPIMTLRAQTSVCPLCPLLKMSP

SEQ ID NO: 65146 - protein, 115 aa, Homo sapiens
RRASLAGQREPRLRGCSSHPRISLGPKARRTNPHNLRTMDADEGQDMSQVSGKESPPVSDTPDEGDEPMPIPEDLSTTSGGQQSSKSDRVVVTYGADDFRDFHAIIPKSFSLLEL

SEQ ID NO: 65147 - protein, 66 aa, Homo sapiens
KRFSCSHCWQMIEPGFESRQPGSRPCALNSRFASRTESYERLAQCLVLSRHSVSILVAIIPKDTVF

SEQ ID NO: 65148 - protein, 22 aa, Homo sapiens
MTCLLTGSTSLLTLWTAPSVTS

SEQ ID NO: 65149 - protein, 106 aa, Homo sapiens
MLSLIFCCYFISKLRNQAQSERYGYKEVVLKGDAKKLQLYGQTCAVCLEDFKGKDELGVLPCQHAFHRKCLVKWLEVRCVCPMCNKPIASPSEATQNIGILLDELV

SEQ ID NO: 65150 - protein, 44 aa, Homo sapiens
KVPEGFFSGLILLSELLPLPLPMQTTQVSLPYNMHLINDCSNTF

SEQ ID NO: 65151 - protein, 23 aa, Homo sapiens
IGLVARLLSFLVYDFRLCGIRLR

SEQ ID NO: 65152 - protein, 112 aa, Homo sapiens
LGVVGLLLVSALSGVLGDRANPDLRAHPGNAAHPGSGATEPRRRPPLKDQRERTRAGSLPLGALYTAAVAAFVLYKCLQGKDETAVLHEEASKQQPLQSGGFSRSLCWVGGV

SEQ ID NO: 65153 - protein, 441 aa, Homo sapiens
VFKSALVAAAVLTPVLGGQTGEMAAEVLPSARWQYCGAPDGSQRAVLVQFSNGKLQSPGNMRFTLYENKDSTNPRKRNQRILAAETDRLSYVGNNFGTGALKCNTLCRHFVGILNKTSGQMEVYDAELFNMQPLFSDVSVESELALESQTKTYREKMDSCIEAFGTTKQKRALNTRRMNRVGNESLNRAVAKAAETIIDTKGVTALVSDAIHNDLQDDSLYLPPCYDDAAKPEDVYKFEDLLSPAEYEALQSPSEAFRNVTSEEILKMIEENSHCTFVIEALKSLPSDVESRDRQARCIWFLDTLIKFRAHRVVKRKSALGPGVPHIINTKLLKHFTCLTYNNGRLRNLISDSMKAKITAYVIILALHIHDFQIDLTVLQRDLKLSEKRMMEIAKAMRLKISKRRVSVAAGSEEDHKLGTLSLPLPPAQTSDRLAKRRKIT

SEQ ID NO: 65154 - protein, 8 aa, Homo sapiens
KFSAFILF

SEQ ID NO: 65155 - protein, 30 aa, Homo sapiens
LVLFLLAEWRLVFSNPVWWSPLLQSTLQRK

SEQ ID NO: 65156 - protein, 16 aa, Homo sapiens
IYPPLLGALSFIAASS

SEQ ID NO: 65157 - protein, 17 aa, Homo sapiens
MLLVGGLGWCFMVFVDM

SEQ ID NO: 65158 - protein, 323 aa, Homo sapiens
TPLPPPSPRHLRLLRLLLSGLVLGAALRGAAAGHPDVAACPGSLDCALKRRARCPPGAHACGPCLQPFQEDQQGLCVPRMRRPPGGGRPQPRLEDEIDFLAQELARKESGHSTPPLPKDRQRLPEPATLGFSARGQGLELGLPSTPGTPTPTPHTSLGSPVSSDPVHMSPLEPRGGQGDGLALVLILAFCVAGAAALSVASLCWCRLQREIRLTQKADYATAKAPGSPAAPRISPGDQRLAQSAEMYHYQHQRQQMLCLERHKEPPKELDTASSDEENEDGDFTVYECPGLAPTGEMEVRNPLFDHAALSAPLPAPSSPPALP

SEQ ID NO: 65159 - protein, 45 aa, Homo sapiens
LAGFPVAVRCAAGLAALQSFVMVTSDSPAVVNVKPRRSDALSEHV

SEQ ID NO: 65160 - protein, 10 aa, Homo sapiens
LVLQILVVIS

SEQ ID NO: 65161 - protein, 10 aa, Homo sapiens
IFLLLSVLMH

SEQ ID NO: 65162 - protein, 18 aa, Homo sapiens
IMHWFINLLVYCHPAAQI

SEQ ID NO: 65163 - protein, 750 aa, Homo sapiens
RLLLLLLVGLTAPALALAGYIEALAANAGTGFAVAEPQIAMFCGKLNMHVNIQTGKWEPDPTGTKSCFETKEEVLQYCQEMYPELQITNVMEANQRVSIDNWCRRDKKQCKSRFVTPFKCLVGEFVSDVLLVPEKCQFFHKERMEVCENHQHWHTVVKEACLTQGMTLYSYGMLLPCGVDQFHGTEYVCCPQTKIIGSVSKEEEEEDEEEEEEEDEEEDYDVYKSEFPTEADLEDFTEAAVDEDDEDEEEGEEVVEDRDYYYDTFKGDDYNEENPTEPGSDGTMSDKEITHDVKAVCSQEAMTGPCRAVMPRWYFDLSKGKCVRFIYGGCGGNRNNFESEDYCMAVCKAMIPPTPLPTNDVDVYFETSADDNEHARFQKAKEQLEIRHRNRMDRVKKEWEEAELQAKNLPKAERQTLIQHFQAMVKALEKEAASEKQQLVETHLARVEAMLNDRRRMALENYLAALQSDPPRPHRILQALRRYVRAENKDRLHTIRHYQHVLAVDPEKAAQMKSQVMTHLHVIEERRNQSLSLLYKVPYVAQEIQEEIDELLQEQRADMDQFTASISETPVDVRVSSEESEEIPPFHPFHPFPALPENEDTQPELYHPMKKGSGVGEQDGGLIGAEEKVINSKNKVDENMVIDETLDVKEMIFNAERVGGLEEERESVGPLREDFSLSSSALIGLLVIAVAIATVIVISLVMLRKRQYGTISHGIVEVDPMLTPEERHLNKMQNHGYENPTYKYLEQMQI

SEQ ID NO: 65164 - protein, 46 aa, Homo sapiens
LGLLLFSLLGFLLPSYLFYYRARLQQEYAANGMGPLKVLSGSEVTA

SEQ ID NO: 65165 - protein, 33 aa, Homo sapiens
VSRAGCLALTLPALLLVTHQVPAEAAVSAPWRS

SEQ ID NO: 65166 - protein, 14 aa, Homo sapiens
LRLCGLLLLLLAHF

SEQ ID NO: 65167 - protein, 13 aa, Homo sapiens
LSGLTAIFSLVLI

SEQ ID NO: 65168 - protein, 813 aa, Homo sapiens
RGLETHRPHAMRALWVLGLCCVLLTFGSVRADDEVDVDGTVEEDLGKSREGSRTDDEVVQREEEAIQLDGLNASQIRELREKSEKFAFQAEVNRMMKLIINSLYKNKEIFLRELISNASDALDKIRLISLTDENALSGNEELTVKIKCDKEKNLLHVTDTGVGMTREELVKNLGTIAKSGTSEFLNKMTEAQEDGQSTSELIGQFGVGFYSAFLVADKVIVTSKHNNDTQHIWESDSNEFSVIADPRGNTLGRGTTITLVLKEEASDYLELDTIKNLVKKYSQFINFPIYVWSSKTETVEEPMEEEEAAKEEKEESDDEAAVEEEEEEKKPKTKKVEKTVWDWELMNDIKPIWQRPSKEVEEDEYKAFYKSFSKESDDPMAYIHFTAEGEVTFKSILFVPTSAPRGLFDEYGSKKSDYIKLYVRRVFITDDFHDMMPKYLNFVKGVVDSDDLPLNVSRETLQQHKLLKVIRKKLVRKTLDMIKKIADDKYNDTFWKEFGTNIKLGVIEDHSNRTRLAKLLRFQSSHHPTDITSLDQYVERMKEKQDKIYFMAGSSRKEAESSPFVERLLKKGYEVIYLTEPVDEYCIQALPEFDGKRFQNVAKEGVKFDESEKTKESREAVEKEFEPLLNWMKDKALKDKIEKAVVSQRLTESPCALVASQYGWSGNMERIMKAQAYQTGKDISTNYYASQKKTFEINPRHPLIRDMLRRIKEDEDDKTVLDLAVVLFETATLRSGYLLPDTKAYGDRIERMLRLSLNIDPDAKVEEEPEEEPEETAEDTTEDTEQDEDEEMDVGTDEEEETAKESTAEKDEL

SEQ ID NO: 65169 - protein, 170 aa, Homo sapiens
LVNFILRCGLLLVTLSLAIAKHKQSSFTKSCYPRGTLSQAVDALYIKAAWLKATIPEDRIKNIRLLKKKTKKQFMKNCQFQEQLLSFFMEDVFGQLQLQGCKKIRFVEDFHSLRQKLSHCISCASSAREMKSITRMKRIFYRIGNKGIYKAISELDILLSWIKKLLESSQ

SEQ ID NO: 65170 - protein, 16 aa, Homo sapiens
IKFYLLFVEFIFPSVM

SEQ ID NO: 65171 - protein, 62 aa, Homo sapiens
KLILLTWLLQKILLQLMSLELADLPLKMKDVHLNWKCHWRANVHHFPRLYVSSGKMLMLSVG

SEQ ID NO: 65172 - protein, 31 aa, Homo sapiens
ILGILMTSFFLEIVLMDISSLTAKIQNIRSF

SEQ ID NO: 65173 - protein, 286 aa, Homo sapiens
LLGRMSGSSLPSALALSLLLVSGSLLPGPGAAQNEPRIVTSEEVIIRDSPVLPVTLQCNLTSSSHTLTYSYWTKNGVELSATRKNASNMEYRINKPRAEDSGEYHCVYHFVSAPKANATIEVKAAPDITGHKRSENKNEGQDATMYCKSVGYPHPDWIWRKKENGMPMDIVNTSGRFFIINKENYTELNIVNLQITEDPGEYECNATNAIGSASVVTVLRVRSHLAPLWPFLGILAEIIILVVIIVVYEKRKRPDEVPDDDEPAGPMKTNSTNNHKDKNLRQRNTN

SEQ ID NO: 65174 - protein, 57 aa, Homo sapiens
LARLLLLLGLSAGGPAPAGAAKMKVVEEPNAFGVNNPFLPQASRLQAKRDPSPVSGE

SEQ ID NO: 65175 - protein, 679 aa, Homo sapiens
TTLFLLSLLFLVQGAHGRGHREDFRFCSQRNQTHRSSLHYKPTPDLRISIENSEEALTVHAPFPAAHPASRSFPDPRGLYHFCLYWNRHAGRLHLLYGKRDFLLSDKASSLLCFQHQEESLAQGPPLLATSVTSWWSPQNISLPSAASFTFSFHSPPHTAAHNASVDMCELKRDLQLLSQFLKHPQKASRRPSAAPASQQLQSLESKLTSVRFMGDMVSFEEDRINATVWKLQPTAGLQDLHIHSRQEEEQSEIMEYSVLLPRTLFQRTKGRSGEAEKRLLLVDFSSQALFQDKNSSQVLGEKVLGIVVQNTKVANLTEPVVLTFQHQLQPKNVTLQCVFWVEDPTLSSPGHWSSAGCETVRRETQTSCFCNHLTYFAVLMVSSVEVDAVHKHYLSLLSYVGCVVSALACLVTIAAYLCSRRKPRDYTIKVHMNLLLAVFLLDTSFLLSEPVALTGSEAGCRASAIFLHFSLLTCLSWMGLEGYNLYRLVVEVFGTYVPGYLLKLSAMGWGFPIFLVTLVALVDVDNYGPIILAVHRTPEGVIYPSMCWIRDSLVSYITNLGLFSLVFLFNMAMLATMVVQILRLRPHTQKWSHVLTLLGLSLVLGLPWALIFFSFASGTFQLVVLYLFSIITSFQGFLIFIWYWSMRLQARGGPSPLKSNSDSARLPISSGSTSSSRI

SEQ ID NO: 65176 - protein, 18 aa, Homo sapiens
LIFVLFSSLKYSFLLSPK

SEQ ID NO: 65177 - protein, 14 aa, Homo sapiens
LMFLLWLCLFSVLL

SEQ ID NO: 65178 - protein, 17 aa, Homo sapiens
RPAVGAGRASVLVLSWL

SEQ ID NO: 65179 - protein, 31 aa, Homo sapiens; identical to SEQ ID NO: 65172

SEQ ID NO: 65180 - protein, 15 aa, Homo sapiens
LFFIIALYIVCYLTR

SEQ ID NO: 65181 - protein, 171 aa, Homo sapiens
ILVVTVQLILFGLSNQLAVTFREENTIAFRHLFLLGYSDGADDTFAAYTREQLYQAIFHAVDQYLALPDVSLGRYAYVRGGGDPWTNGSGLALCQRYYHRGHVDPANDTFDIDPMVVTDCIQVDPPERPPPPPSDDLTLLESSSSYKNLTLKFHKYCLLTRGGPRVGEAAH

SEQ ID NO: 65182 - protein, 14 aa, Homo sapiens
MALKTFILFRTMLG

SEQ ID NO: 65183 - protein, 232 aa, Homo sapiens
LAPAWSPTTYLLLLLLLSSGLSGTQDCSFQHSPISSDFAVKIRELSDYLLQDYPVTVASNLQDEELCGGLWRLVLAQRWMERLKTVAGSKMQGLLERVNTEIHFVTKCAFQPPPSCLRFVQTNISRLLQETSEQLVALKPWITRQNFSRCLELQCQPDSSTLPPPWSPRPLEATAPTAPQPPLLLLLLLPVGLLLLAAAWCLHWQRTRRRTPRPGEQVPPVPSPQDLLLVEH

SEQ ID NO: 65184 - protein, 178 aa, Homo sapiens
VFGSPAITAPQMGPGRCLLTALLLLALAPPPEASQYCGRLEYWNPDNKCCSSCLQRFGPPPCPELSSLASQPLSRLLDELEVLEELIVLLDPEPGPGGGMAHGTTRHLAARYGLPAAWSTFAYSLRPSRSPLRALIEMVVAREPSASLGQLGTHLAQLGRADALRVLSKLGSSGVCWA

SEQ ID NO: 65185 - protein, 91 aa, Homo sapiens
KNRGGCLLLLVLHPSRHSAVSCLGVAAAMARKALPPTHLGQSWFCSCCRDTELAISALRARTATGSPGSCRCTAGPLPCASALESCCCRVT

SEQ ID NO: 65186 - protein, 24 aa, Homo sapiens
MEGVKTASGAVAPSSTSGSPWARW

SEQ ID NO: 65187 - protein, 44 aa, Homo sapiens
IVGILFAVFLILLLMYRMKKKDEGSYDLGKKPIYKKAPTNEFYA

SEQ ID NO: 65188 - protein, 307 aa, Homo sapiens
LQARSPSVAAMASPQLCRALVSAQWVAEALRAPRAGQPLQLLDASWYLPKLGRDARREFEERHIPGAAFFDIDQCSDRTSPYDHMLPGAEHFAEYAGRLGVGAATHVVIYDASDQGLYSAPRVWWMFRAFGHHAVSLLDGGLRHWLRQNLPLSSGKSQPAPAEFRAQLDPAFIKTYEDIKENLESRRFQVVDSRATGRFRGTEPEPRDGIEPGHIPGTVNIPFTDFLSQEGLEKSPEEIRHLFQEKKVDLSKPLVATCGSGVTACHVALGAYLCGKPDVPIYDGSWVEWYMRARPEDVISEGRGKTH

SEQ ID NO: 65189 - protein, 385 aa, Homo sapiens
IWMSALFLGVGVRAEEAGARVQQNVPSGTDTGDPQSKPLGDWAAGTMDPESSIFIEDAIKYFKEKVSTQNLLLLLTDNEAWNGFVAAAELPRNEADELRKALDNLARQMIMKDKNWHDKGQQYRNWFLKEFPRLKSELEDNIRRLRALADGVQKVHKGTTIANVVSGSLSISSGILTLVGMGLAPFTEGGSLVLLEPGMELGITAALTGITSSTMDYGKKWWTQAQAHDLVIKSLDKLKEVREFLGENISNFLSLAGNTYQLTRGIGKDIRALRRARANLQSVPHASASRPRVTEPISAESGEQVERVNEPSILEMSRGVKLTDVAPVSFFLVLDVVYLVYESKHLHEGAKSETAEELKKVAQELEEKLNILNNNYKILQADQEL

SEQ ID NO: 65190 - protein, 231 aa, Homo sapiens
LDMDLLQFLAFLFVLLLSGMGATGTLRTSLDPSLEIYKKMFEVKRREQLLALKNLAQLNDIHQQYKILDVMLKGLFKVLEDSRTVLTAADVLPDGPFPQDEKLKDAFSHVVENTAFFGDVVLRFPRIVHYYFDHNSNWNLLIRWGISFCNQTGVFNQGPHSPILSLMAQELGISEKDSNFQNPFKIDRTEFIPSTDPFQKALREEEKRRKKEEKRKEIRKGPRISRSQSEL

SEQ ID NO: 65191 - protein, 249 aa, Homo sapiens
LLTQRTLLSLVLALLFPSMASMAAIGSCSKEYRVLLGQLQKQTDLMQDTSRLLDPYIRIQGLDVPKLREHCRERPGAFPSEETLRGLGRRGFLQTLNATLGCVLHRLADLEQRLPKAQDLERSGLNIEDLEKLQMARPNILGLRNNIYCMAQLLDNSDTAEPTKAGRGASQPPTPTPASDAFQRKLEGCRFLHGYHRFMHSVGRVFSKWGESPNRSRRHSPHQALRKGVRRTRPSRKGKRLMTRGQLPR

SEQ ID NO: 65192 - protein, 44 aa, Homo sapiens
MLSRGWLLLVQVLPPTPRISARLCHGGQRPPRVKKKNEPFQSGQ

SEQ ID NO: 65193 - protein, 420 aa, Homo sapiens
LGCALALRFLALVSWDIPGARALDNGLARTPTMGWLHWERFMCNLDCQEEPDSCISEKLFMEMAELMVSEGWKDAGYEYLCIDDCWMAPQRDSEGRLQADPQRFPHGIRQLANYVHSKGLKLGIYADVGNKTCAGFPGSFGYYDIDAQTFADWGVDLLKFDGCYCDSLENLADGYKHMSLALNRTGRSIVYSCEWPLYMWPFQKPNYTEIRQYCNHWRNFADIDDSWKSIKSILDWTSFNQERIVDVAGPGGWNDPDMLVIGNFGLSWNQQVTQMALWAIMAAPLFMSNDLRHISPQAKALLQDKDVIAINQDPLGKQGYQLRQGDNFEVWERPLSGLAWAVAMINRQEIGGPRSYTIAVASLGKGVACNPACFITQLLPVKRKLGFYEWTSRLRSHINPTGTVLLQLENTMQMSLKDLL

SEQ ID NO: 65194 - protein, 281 aa, Homo sapiens [sequence omitted]

SEQ ID NO: 65195 - protein, 19 aa, Homo sapiens
MNLCKSCSLGISLFVTLAS

SEQ ID NO: 65196 - protein, 50 aa, Homo sapiens
MHGPGSPAPEGGREAAPRVVLLEKGVSIQTPREGSWVYFREELEASHRAQ

SEQ ID NO: 65197 - protein, 109 aa, Homo sapiens [sequence omitted]

SEQ ID NO: 65198 - protein, 578 aa, Homo sapiens
MAFILLVLLCLLLYYCRRKCLKPRQHHRKLQLPAGLESSKRDQSTSMSHINLLFSRRASEFPGPLSVTSHGRPEAPGTKELMSGVHLEMMSPGGEGDLHTPMLKLSYSTSQEFSSREELLSCKEEDKSQISFDNLTPSGTLGKDYHKSVEVFPLKARKSMEREGYESSGNDDYRGSYNTVLSQPLFEKQDREGPASTGSKLTIQEHLYPAPSSPEKEQLLDRRPTECMMSRSVDHLERPTSFPRPGQLICCSSVDQVNDSVYRKVLPALVIPAHYMKLPGDHSYVSQPLVVPADQQLEIERLQAELSNPHAGIFPHPSSQIQPQPLSSQAISQQHLQDAGTREWSPQNASMSESLSIPASLNDAALAQMNSEVQLLTEKALMELGGGKPLPHPRAWFVSLDGRSNAHVRHSYIDLQRAGRNGSNDASLDSGVDMNEPKSARKGRGDALSLQQNYPPVQEHQQKEPRAPDSTAYTQLVYLDDVEQSGSECGTTVCTPEDSALRCLLEGSSRRSGGQLPSLQEETTRRTADAPSEPAASPHQRRSAHEEEEDDDDDDQGEDKKSPWQKREERPLMAFNIK

SEQ ID NO: 65199 - protein, 54 aa, Homo sapiens
MWESLTVFISLSFFFFFFLDGVSLLSRLECSSAIIALCSLHLPGPNHPPASASE

SEQ ID NO: 65200 - protein, 28 aa, Homo sapiens
MSYLHWGISITLRFLLLMRTLSAYAKKF

SEQ ID NO: 65201 - protein, 129 aa, Homo sapiens
MFLFQLILGIPEQALSLLHMAIEPILADGAILDKGRAMFLVAKCQVASAASYDQPKKAEALEAAIENLNEAKNYFAKVDCKERIRDVVYFQARLYHTLGKTQERNRCAMLFRQLHQELPSHGVPLINHL

SEQ ID NO: 65202 - protein, 1348 aa, Homo sapiens [sequence omitted]

SEQ ID NO: 65203 - protein, 128 aa, Homo sapiens
MLRRALLCLAVAALVRADAPEEEDHVLVLRKSNFAEALAAHKYLLVEFYAPWCGHCKALAPEYAKAAGKLKAEGSEIRLAKVDATEESDLAQQYGVRGYPTIKFFRNGDTASPKEYTGVAVALPLNCL

SEQ ID NO: 65204 - protein, 21 aa, Homo sapiens
MSHVCYFMFLLCFCSFPPMCL

SEQ ID NO: 65205 - protein, 47 aa, Homo sapiens
MNGSWTWFFWIIAMPSLGVPTQMPVVPAPPACSLSLPGGSTKVPYDC

SEQ ID NO: 65206 - protein, 1128 aa, Homo sapiens
MHFRFVFALLIVSFNHDVLGKNLKYRIYEEQRVGSVIARLSEDVADVLLKLPNPSTVRFRAMQRGNSPLLVVNEDNGEISIGATIDREQLCQKNLNCSIEFDVITLPTEHLQLFHIEVEVLDINDNSPQFSRSLIPIEISESAAVGTRIPLDSAFDPDVGENSLHTYSLSANDFFNIEVRTRTDGAKYAELIVVRELDRELKSSYELQLTASDMGVPQRSGSSILKISISDSNDNSPAFEQQSYIIQLLENSPVGTLLLDLNATDPDEGANGKIVYSFSSHVSPKIMETFKIDSERGHLTLFKQVDYEITKSYEIDVQAQDLGPNSIPAHCKIIIKVVDVNDNKPEININLMSPGKEEISYIFEGDPIDTFVALVRVQDKDSGLNGEIVCKLHGHGHFKLQKTYENNYLILTNATLDREKRSEYSLTVIAEDRGTPSLSTVKHFTVQINDINDNPPHFQRSRYEFVISENNSPGAYITTVTATDPDLGENGQVTYTILESFILGSSITTYVTIDPSNGAIYALRIFDHEEVSQITFVVEARDGGSPKQLVSNTTVVLTIIDENDNVPVVIGPALRNNTAEITIPKGAESGFHVTRIRAIDRDSGVNAELSCAIVAGNEENIFIIDPRSCDIHTNVSMDSVPYTEWELSVIIQDKGNPQLHTKVLLKCMIFEYAESVTSTAMTSVSQASLDVSMIIIISLGAICAVLLVIMVLFATRCNREKKDTRSYNCRVAESTYQHHPKRPSRQIHKGDITLVPTINGTLPIRSHHRSSPSSSPTLERGQMGSRQSHNSHQSLNSLVTISSNHVPENFSLELTHATPAVEQVSQLLSMLHQGQYQPRPSFRGNKYSRSYRYALQDMDKFSLKDSGRGDSEAGDSDYDLGRDSPIDRLLGEGFSDLFLTDGRIPAAMRLCTEECRVLGHSDQCWMPPLPSPSSDYRSNMFIPGEEFPTQPQQQHPHQSLEDDAQPADSGEKKKSFSTFGKDSPNDEDTGDTSTSSLLSEMSSVFQRLLPPSLDTYSECSEVDRSNSLERRKGPLPAKTVGYPQGVAAWAASTHFQNPTTNCGPPLGTHSSVQPSSKWLPAMEEIPENYEEDDFDNVLNHLNDGKHELMDASELVAEINKLLQDVRQS

SEQ ID NO: 65207 - protein, 1127 aa, Homo sapiens
MHFRFVFALLIVSFNHDVLGKNLKYRIYEEQRVGSVIARLSEDVADVLLKLPNPSTVRFRAMQRGNSPLLVVNEDNGEISIGATIDREQLCQKNLNCSIEFDVITLPTEHLQLFHIEVEVLDINDNSPQFSRSLIPIEISESAAVGTRIPLDSAFDPDVGENSLHTYSLSANDFFNIEVRTRTDGAKYAELIVVRELDRELKSSYELQLTASDMGVPQRSGSSILKISISDSNDNSPAFEQQSYIIQLLENSPVGTLLLDLNATDPDEGANGKIVYSFSSHVSPKIMETFKIDSERGHLTLFKQVDYEITKSYEIDVQAQDLGPNSIPAHCKIIIKVVDVNDNKPEININLMSPGKEEISYIFEGDPIDTFVALVRVQDKDSGLNGEIVCKLHGHGHFKLQKTYENNYLILTNATLDREKRSEYSLTVIAEDRGTPSLSTVKHFTVQINDINDNPPHFQRSRYEFVISENNSPGAYITTVTATDPDLGENGQVTYTILESFILGSSITTYVTIDPSNGAIYALRIFDHEEVSQITFVVEARDGGSPKQLVSNTTVVLTIIDENDNVPVVIGPALRNNTAEITIPKGAESGFHVTRIRAIDRDSGVNAELSCAIVAGNEENIFIIDPRSCDIHTNVSMDSVPYTEWELSVIIQDKGNPQLHTKVLLKCMIFEYAESVTSTAMTSVSQASLDVSMIIIISLGAICAVLLVIMVLFATRCNREKKDTRSYNCRVAESTYQHHPKRPSRQIHKGDITLVPTINGTLPIRSHHRSSPSSSPTLERGQMGSRQSHNSHQSLNSLVTISSNHVPENFSLELTHATPAVEVSQLLSMLHQGQYQPRPSFRGNKYSRSYRYALQDMDKFSLKDSGRGDSEAGDSDYDLGRDSPIDRLLGEGFSDLFLTDGRIPAAMRLCTEECRVLGHSDQCWMPPLPSPSSDYRSNMFIPGEEFPTQPQQQHPHQSLEDDAQPADSGEKKKSFSTFGKDSPNDEDTGDTSTSSLLSEMSSVFQRLLPPSLDTYSECSEVDRSNSLERRKGPLPAKTVGYPQGVAAWAASTHFQNPTTNCGPPLGTHSSVQPSSKWLPAMEEIPENYEEDDFDNVLNHLNDGKHELMDASELVAEINKLLQDVRQS

SEQ ID NO: 65208 - protein, 86 aa, Homo sapiens [sequence omitted]

SEQ ID NO: 65209 - protein, 58 aa, Homo sapiens
MHSPILQLERKHKVSSDSNQTETTAEKLPEDSFLKNKQKQVYIGLHPKKHHLMHLREQ

SEQ ID NO: 65210 - protein, 262 aa, Homo sapiens
RLVLYLTFLGAPCYAPALPSCKEDEYPVGSECCPKCSPGYRVKEACGELTGTVCEPCPPGTYIAHLNGLSKCLQCQMCDPAMGLRASRNCSRTENAVCGCSPGHFCIVQDGDHCAACRAYATSSPGQRVQKGGTESQDTLCQNCPPGTFSPNGTLEECQHQTKCSWLVTKAGAGTSSSHWVWWFLSGSLVIVIVCSTVGLIICVKRRKPRGDVVKVIVSVQRKRQEAEGEATVIEALQAPPDVTTVAVEETIPSFTGRSPNH

SEQ ID NO: 65211 - protein, 52 aa, Homo sapiens
LLSVLRVLLGGFFALVGLAKLSEEISAPVSERMVRDEQQCWGPGCWRLQPLG

SEQ ID NO: 65212 - protein, 22 aa, Homo sapiens
LDLSLIFWSLASCIFLEPQLNS

SEQ ID NO: 65213 - protein, 14 aa, Homo sapiens
VMTCFLLALRIISI

SEQ ID NO: 65214 - protein, 38 aa, Homo sapiens
LIQWLHTTLVETLSLPMLAAYLDALQTLKGKVILTFCG

SEQ ID NO: 65215 - protein, 38 aa, Homo sapiens
RTGWATPRRPAGLLMLLFWFFDLAEPSGRAAKLSYHLV

SEQ ID NO: 65216 - protein, 328 aa, Homo sapiens
ICDSTMGLSNILFVMAFLLSGAAPLKIQAYFNETADLPCQFANSQNQSLSELVVFWQDQENLVLNEVYLGKEKFDSVHSKYMGRTSFDSDSWTLRLHNLQIKDKGLYQCIIHHKKPTGMIRIHQMNSELSVLANFSQPEIVPISNITENVYINLTCSSIHGYPEPKKMSVLLRTKNSTIEYDGVMQKSQDNVTELYDVSISLSVSFPDVTSNMTIFCILETDKTRLLSSPFSIELEDPQPPPDHIPWITAVLPTVIICVMVFCLILWKWKKKKRPRNSYKCGTNTMEREESEQTKKREKIHIPERSDEAQRVFKSSKTSSCDKSDTCF

SEQ ID NO: 65217 - protein, 45 aa, Homo sapiens
IHLSAACGHIGVLGALLQSAASMDANPATADNHGYTALHWACYNG

SEQ ID NO: 65218 - protein, 27 aa, Homo sapiens
IFGVLSVATIKFEMLSTAPQSQVSLGA

SEQ ID NO: 65219 - protein, 40 aa, Homo sapiens
MDECTHSSWVSWLLFGVCYTPVLCPVSSEKVCICYSSESS

SEQ ID NO: 65220 - protein, 256 aa, Homo sapiens
KKMAISGVPVLGFFIIAVLMSAQESWAIKEEHVIIQAEFYLNPDQSGEFMFDFDGDEIFHVDMAKKETVWRLEEFGRFASFEAQGALANIAVDKANLEIMTKRSNYTPITNVPPEVTVLTNSPVELREPNVLICFIDKFTPPVVNVTWLRNGKPVTTGVSETVFLPREDHLFRKFHYLPFLPSTEDVYDCRVEHWGLDEPLLKHWEFDAPSPLPETTENVVCALGLTVGLVGIIIGTIFIIKGLRKSNAAERRGPL

SEQ ID NO: 65221 - protein, 19 aa, Homo sapiens
LHIVTRIKSTKYVHIGKKI

SEQ ID NO: 65222 - protein, 72 aa, Homo sapiens
RLLFLLLTIVFCQILMAEEGVPAPLPPEDAPNAASLAPTPVSAVLEPFNLTSEPSDYALDLSTFLQQHPAAF

SEQ ID NO: 65223 - protein, 24 aa, Homo sapiens
LTPSLMFFIMILMQGIQMIMDRII

SEQ ID NO: 65224 - protein, 33 aa, Homo sapiens
LSLQLRCPGTDVARGKCGTPRAISEQWRFQVIH

SEQ ID NO: 65225 - protein, 30 aa, Homo sapiens
ITVEDMVLLMVWVVMAVVVEAVEVTMGKAA

SEQ ID NO: 65226 - protein, 25 aa, Homo sapiens
MGQKDSNVGDEAQSKRGILTLKYPI

SEQ ID NO: 65227 - protein, 19 aa, Homo sapiens
LKTIKSQNLLVLQILVVIS

SEQ ID NO: 65228 - protein, 318 aa, Homo sapiens
LGLLLALVLAPRVLRAKPTVRKERVVRPDSELGERPPEDNQSFQYDHEAFLGKEDSKTFDQLTPDESKERLGKIVDRIDNDGDGFVTTEELKTWIKRVQKRYIFDNVAKVWKDYDRDKDDKISWEEYKQATYGYYLGNPAEFHDSSDHHTFKKMLPRDERRFKAADLNGDLTATREEFTAFLHPEEFEHMKEIVVLETLEDIDKNGDGFVDQDEYIADMFSHEENGPEPDWVLSEREQFNEFRDLNKDGKLDKDEIRHWILPQDYDHAQAEARHLVYESDKNKDEKLTKEEILENWNMFVGSQATNYGEDLTKNHDEL

SEQ ID NO: 65229 - protein, 45 aa, Homo sapiens
IEPGERASARRRVSRAGCLALTLPALLLVTHQVPAEAAVSAPWRS

SEQ ID NO: 65230 - protein, 1435 aa, Homo sapiens
VVPAVVLIMLLPSDVARLVLGYLQQENLISTCQTFILESSDLKEYAEHCTDEGFIPACLLSLFGKNLTTILNEYVAMKTKETSNNVPAIMSSLWKKLDHTLSQIRSMQSSPRFAGSQRARTRTGIAEIKRQRKLASQTAPASAELLTLPYLSGQFTTPPSTGTQVTRPSGQISDPSRSYFVVVNHSQSQDTVTTGEALNVIPGAQEKKAHASLMSPGRRKSESQRKSTTLSGPHSTIRNFQDPNAFAVEKQMVIENAREKILSNKSLQEKLAENINKFLTSDNNIAQVPKQTDNNPTEPETSIDEFLGLPSEIHMSEEAIQDILEQTESDPAFQALFDLFDYGKTKNNKNISQSISSQPMESNPSIVLADETNLAVKGSFETEESDGQSGQPAFCTSYQNDDPLNALKNSNNHDVLRQEDQENFSQISTSIQKKAFKTAVPTEQKCDIDITFESVPNLNDFNQRGNSNAECNPHCAELYTNQMSTETEMAIGIEKNSLSSNVPSESQLQPDQPDIPITSFVSLGCEANNENLILSGKSSQLLSQDTSLTGKPSKKSQFCENSNDTVKLKINFHGSKSSDSSEVHKSKIEINVLEPVMSQLSNCQDNSCLQSEILPVSVESSHLNVSGQVEIHLGDSLSSTKQPSNDSASVELNHTENEAQASKSENSQEPSSSVKEENTIFLSLGGNANCEKVALTPPEGTPVENSHSLPPESVCSSVGDSHPESQNTDDKPSSNNSAEIDASNIVSLKVIISDDPFVSSDTELTSAVSSINGENLPTIILSSPTKSPTKNAELVKCLSSEETVGAVVYAEVGDSASMEQSLLTFKSEDSAVNNTQNEDGIAFSANVTPCVSKDGGYIQLMPATSTAFGNSNNILIATCVTDPTALGTSVSQSNVVVLPGNSAPMTAQPLPPQLQTPPRSNSVFAVNQAVSPNFSQGSAIIIASPVQPVLQGMVGMIPVSVVGQNGNNFSTPPRQVLHMPLTAPVCNRSIPQFPVPPKSQKAQGLRNKPCIGKQVNNLVDSSGHSVGCHAQKTEVSDKSIATDLGKKSEETTVPFPEESIVPAAKPCHRRVLCFDSTTAPVANTQGPNHKMVSQNKERNAVSFPNLDSPNVSSTLKPPSNNAIKREKEKPPLPKILSKSESAISRHTTIRETQSEKKVSPTEIVLESFHKATANKENELCSDVERQKNPENSKLSIGQQNGGLRSEKSIASLQEMTKKQGTSSNNKNVLSVGTAVKDLKQEQTKSASSLITTEMLQDIQRHSSVSRLADSSDLPVPRTPGSGAGEKHKEEPIDIIKAPSSRRFSEDSSTSKVMVPPVTPDLPACSPASETGSENSVNMAAHTLMILSRAAISRTTSATPLKDNTQQFRASSRSTTKKRKIEELDERERNSRPSSKNLTNSSIPMKKKKIKKKKLPSSFPAGMDVDKFLLSLHYDE

SEQ ID NO: 65231 - protein, 13 aa, Homo sapiens
ISHLLWYLAGTVC

SEQ ID NO: 65232 - protein, 377 aa, Homo sapiens
LCRCKPLQPEAVRSSPRHLRTLPLLASRLVMARFWVCVAGAGFFLAFLVLHSRFCGSPVLRNFTFAVSWRTEKILYRLDVGWPKHPEYFTGTTFCVAVDSLNGLVYIGQRGDNIPKILVFTEDGYFLRAWNYTVDTPHGIFAASTLYEQSVWITDVGSGFFGHTVKKYSSFGDLVQVLGTPGKKGTSLNPLQFDNPAELYVEDTGDIYIVDGDGGLNNRLIKLSQDFMILWLHGENGTGPAKFNIPHSVTLDSAGRVWVADRGNKRIQVFDKDTGEWLGAWNNCFTEEGPSSVRFTPDGKYLIVAQLNLSRLSVVAAPPVGSIGECSVISTIQLADQVLPHLLEVDRKTGAVYVAEIGAKQVQKYVPLNSYVPSFGS

SEQ ID NO: 65233 - protein, 157 aa, Homo sapiens
LFTSQICLLLLLGLLAVEGSLHVKPPQFTWAQWFETQHINMTSQQCTNAMQVINNYQRRCKNQNTFLLTTFANVVNVCGNPNMTCPSNKTRKNCHHSGSQVPLIHCNLTTPSPQNISNCRYAQTPANMFYIVACDNRDQRRDPPQYPVVPVHLDRII

SEQ ID NO: 65234 - protein, 333 aa, Homo sapiens
LGPRTAALGLLLLCAAAAGAGKAEELHYPLGERRSDYDREALLGVQEDVDEYVKLGHEEQQKRLQAIIKKIDLDSDGFLTESELSSWIQMSFKHYAMQEAKQQFVEYDKNSDDTVTWDEYNIQMYDRVIDFDENTALDDAEEESFRKEFAICKKQSFCFWLLRFNLHLKDKKRFEKANQDSGPGLSLEEFIAFEHPEEVDYMTEFVIQEALEEHDKNGDGFVSLEEFLGDYRWDPTANEDPEWILVEKDRFVNDYDKDNDGRLDPQELLPWVVPNNQGIAQEEALHLIDEMDLNGDKKLSEEEILENPDLFLTSEATDYGRQLHDDYFYHDEL

SEQ ID NO: 65235 - protein, 49 aa, Homo sapiens
LLTLLSVVWVIFPVMHVHLSHQTQVDCRHQKHRVALHTPPPSQTCGVFT

SEQ ID NO: 65236 - protein, 204 aa, Homo sapiens
LAAYAVWALLLQPGFRRVPLRLQVPYVGASARQVEHVLSLLRGRPGKTVDLGSGDGRIVLAAHRCGLRPAVGYELNPWLVALARLHAWRAGCAGSVCYRRKDLWKVSLRDCRNVSVFLAPSVLPLLEDKLRTELPAGARVVSGRFPLPTWQPVTAVGEGLDRVWAYDVPEGGQAGEAASSRIPIQAAPGPSSAPIPGGLISQAS

SEQ ID NO: 65237 - protein, 457 aa, Homo sapiens
LLALCLLLPLLLLGGWKRWRRGRAARHVVAVVLGDVGRSPRMQYHALSLAMHGFSVTLLGFCNSKPHDELLQNNRIQIVGLTELQSLAVGPRVFQYGVKVVLQAMYLLWKLMWREPGAYIFLQNPPGLPSIAVCWFVGCLCGSKLVIDWHNYGYSIMGLVHGPNHPLVLLAKWYEKFFGRLSHLNLCVTNAMREDLADNWHIRAVTVYDKPASFFKETPLDLQHRLFMKLGSMHSPFRARSEPEDPVTERSAFTERDAGSGLVTRLRERPALLVSSTSWTEDEDFSILLAALEKFEQLTLDGHNLPSLVCVITGKGPLREYYSRLIHQKHFQHIQVCTPWLEAEDYPLLLGSADLGVCLHTSSSGLDLPMKVVDMFGCCLPVCAVNFKCLHELVKHEENGLVFEDSEELAAQLQMLFSNFPDPAGKLNQFRKNLRESQQLRWDESWVQTVLPLVMDT

SEQ ID NO: 65238 - protein, 10 aa, Homo sapiens
IFFFFFFVQP

SEQ ID NO: 65239 - protein, 34 aa, Homo sapiens
MYPLESSGLASWLWGLWTTLSESSPWIPQTVCNL

SEQ ID NO: 65240 - protein, 877 aa, Homo sapiens
LEQSRGRIEGLFGVSLAVLGALGAEEPLPARIWLQLCGAQEAVHSAKEYIKGICEPELEERECYPKDMHCIFVGAESLFLKSLIQDTCADLCILDIGLLGIRGSAEAVVMARSHIQQFVKLFENKENLPSSQKESEVKREFKQFVEAHADNYTMDLLILPTSLKKELLTLTQGEENLFETGDDEVIEMRDSQQTEFTQNAATGLNISRDETVLQEEARNKAGTPVSELTKQMDTVLSSSPDVLFDPINGLTPDEEALSNERICQKRRFSDSEERHTKKQFSLENVQEGEILHDAKTLAGNVIADLSDSSADSENLSPDIKETTEEMEYNILVNFFKTMGYSQEIVEKVIKVYGPSTEPLLLLEEIEKENKRFQEDREFSAGTVYPETNKTKNKGVYSSTNELTTDSTPKKTQAHTQQNMVEKFSQLPFKVEAKPCTSNCRINTFRTVPIEQKHEVWGSNQNYICNTDPETDGLSPSVASPSPKEVNFVSRGASSHQPRVPLFPENGLHQQPEPLLPNNMKSACEKRLGCCSSPHSKPNCSTLSPPMPLPQLLPSVTDARSAGPSDHIDSSVTGVQRFRDTLKIPYKLELKNEPGRTDLKHIVIDGSNVAITHGLKKFFSCRGIAIAVEYFWKLGNRNITVFVPQWRTRRDPNVTEQHFLTQLQELGILSLTPARMVFGERIASHDDRFLLHLADKTGGIIVTNDNFREFVNESVSWREIITKRLLQYTFVGDIFMVPDDPLGRSGPRLEEFLQKEVCLRDMQPLLSALPNVGMFDPSFRVPGTQAASTSHQPPTRIQGAPSSHWLPQQPHFPLLPALPSLQQNLPMPAQRSSAETNELREALLKIFPDSEQRLKIDQILVAHPYMKDLNALSAMVLD

SEQ ID NO: 65241 - protein, 239 aa, Homo sapiens
ILALVLAWLSTYVADSGSNQLLGAIVSAGDTSVLHLGHVDHLVAGQGNPEPTELPHPSEGLPKRQAGAGSSSPEAPLRSEDSTCLPPSPGLITVRLKFLNDTEELAVARPEDTVGALKSKYFPGQESQMKLIYQGRLLQDPARTLRSLNITDNCVIHCHRSPPGSAVPGPSASLAPSATEPPSLGVNVGSLMVPVFVVLLGVVWYFRINYRQFFTAPATVSLVGVTVFFSFLVFGMYGR

SEQ ID NO: 65242 - protein, 12 aa, Homo sapiens
KIWGSAIQLGWL

SEQ ID NO: 65243 - protein, 36 aa, Homo sapiens
LSLVIQLALLFHCWDMYIARQIGLPKDQNVTKRALV

SEQ ID NO: 65244 - protein, 639 aa, Homo sapiens
RDAMRGGRGAPFWLWPLPKLALLPLLWVLFQRTRPQGSAGPLQCYGVGPLGDLNCSWEPLGDLGAPSELHLQSQKYRSNKTQTVAVAAGRSWVAIPREQLTMSDKLLVWGTKAGQPLWPPVFVNLETQMKPNAPRLGPDVDFSEDDPLEATVHWAPPTWPSHKVLICQFHYRRCQEAAWTLLEPELKTIPLTPVEIQDLELATGYKVYGRCRMEKEEDLWGEWSPILSFQTPPSAPKDVWVSGNLCGTPGGEEPLLLWKAPGPCVQVSYKVWFWVGGRELSPEGITCCCSLIPSGAEWARVSAVNATSWEPLTNLSLVCLDSASAPRSVAVSSIAGSTELLVTWQPGPGEPLEHVVDWARDGDPLEKLNWVRLPPGNLSALLPGNFTVGVPYRITVTAVSASGLASASSVWGFREELAPLVGPTLWRLQDAPPGTPAIAWGEVPRHQLRGHLTHYTLCAQSGTSPSVCMNVSGNTQSVTLPDLPWGPCELWVTASTIAGQGPPGPILRLHLPDNTLRWKVLPGILFLWGLFLLGCGLSLATSGRCYHLRHKVLPRWVWEKVPDPANSSSGQPHMEQVPEAQPLGDLPILEVEEMEPPPVMESSQPAQATAPLDSGYEKHFLPTPEELGLLGPPRPQVLA

SEQ ID NO: 65245 - protein, 36 aa, Homo sapiens
KPPISIMLSWMKIVLGLAACKTSGGTSEKKNWASIT

SEQ ID NO: 65246 - protein, 669 aa, Homo sapiens
VGLYVDPMEPLVTWVVPLLFLFLLSRQGAACRTSECCFQDPPYPDADSGSASGPRDLRCYRISSDRYECSWQYEGPTAGVSHFLRCCLSSGRCCYFAAGSATRLQFSDQAGVSVLYTVTLWVESWARNQTEKSPEVTLQLYNSVKYEPPLGDIKVSKLAGQLRMEWETPDNQVGAEVQFRHRTPSSPWKLGDCGPQDDDTESCLCPLEMNVAQEFQLRRRQLGSQGSSWSKWSSPVCVPPENPPQPQVRFSVEQLGQDGRRRLTLKEQPTQLELPEGCQGLAPGTEVTYRLQLHMLSCPCKAKATRTLHLGKMPYLSGAAYNVAVISSNQFGPGLNQTWHIPADTHTEPVALNISVGTNGTTMYWPARAQSMTYCIEWQPVGQDGGLATCSLTAPQDPDPAGMATYSWSRESGAMGQEKCYYITIFASAHPEKLTLWSTVLSTYHFGGNASAAGTPHHVSVKNHSLDSVSVDWAPSLLSTCPGVLKEYVVRCRDEDSKQVSEHPVQPTETQVTLSGLRAGVAYTVQVRADTAWLRGVWSQPQRFSIEVQVSDWLIFFASLGSFLSILLVGVLGYLGLNRAARHLCPPLPTPCASSAIEFPGGKETWQWINPVDFQEEASLQEALVVEMSWDKGERTEPLEKTELPEGAPELALDTELSLEDGDRCKAKM

SEQ ID NO: 65247 - protein, 171 aa, Homo sapiens
TAPQMGPGRCLLTALLLLALAPPPEASQYCGRLEYWNPDNKCCSSCLQRFGPPPCPELSSLASQPLSRLLDELEVLEELIVLLDPEPGPGGGMAHGTTRHLAARYGLPAAWSTFAYSLRPSRSPLRALIEMVVAREPSASLGQLGTHLAQLGRADALRVLSKLGSSGVCWA

SEQ ID NO: 65248 - protein, 83 aa, Homo sapiens
VSSTSTALLGMKLTSGSAARTGSLGPLPPTSSLTMRPTVAGHRLIRTTISSCLGPWTTPSCAPMPWGCTSVASLGSACRLGIT

SEQ ID NO: 65249 - protein, 208 aa, Homo sapiens
LLGLLLALLVPGGGAAKTGAELVTCGSVLKLLNTHHRVRLHSHDIKYGSGSGQQSVTGVEASDDANSYWRIRGGSEGGCPRGSPVRCGQAVRLTHVLTGKNLHTHHFPSPLSNNQEVSAFGEDGEGDDLDLWTVRCSGQHWEREAAVRFQHVGTSVFLSVTGEQYGSPIRGQHEVHGMPSANTHNTWKAMEGIFIKPSVEPSAGHDEL

SEQ ID NO: 65250 - protein, 50 aa, Homo sapiens
IVLPWLSLWVQSLSSYLFPPCQPLMPARLLPLLEPLPDQLPLPVWLGFGG

SEQ ID NO: 65251 - protein, 11 aa, Homo sapiens
MISIGFLGFIV

SEQ ID NO: 65252 - protein, 27 aa, Homo sapiens
VDTKLFQQCRQLSVLLWAMVLLVKHVS

SEQ ID NO: 65253 - protein, 13 aa, Homo sapiens
MTCFLLALRIISI

SEQ ID NO: 65254 - protein, 13 aa, Homo sapiens
MTCFLLALRIISI

SEQ ID NO: 65255 - protein, 66 aa, Homo sapiens
MTYVGAFFNGITLLILAELLIFSVPIVYEKYKTQIDHYVGIARHQTKSIVEKIQAKLPGIAKKKAE

SEQ ID NO: 65256 - protein, 11 aa, Homo sapiens
MGVVMFITLLG

SEQ ID NO: 65257 - protein, 26 aa, Homo sapiens
TWSGLFLLPFFLLQKLSYPAQTLKAE

SEQ ID NO: 65258 - protein, 13 aa, Homo sapiens
RRKMENLMFWMIF

SEQ ID NO: 65259 - protein, 47 aa, Homo sapiens
IQGLWALISGLAMGLFYLLEYSRRKRSKSQNILSTEEERTTLLPNET

SEQ ID NO: 65260 - protein, 197 aa, Homo sapiens
TDYWTFRKMFTIQLALIGFAEFVLHLNRLNPEMLQIAQDTGKLNVAYFRFDINDATGDLDANRPVPFRLTPNISEFLTTIGVSGPLTASMIAVARCFAQPNFKVDGILKTVLRDEIIAWHKKTQEDTSSPLSAAGQPENMDSQQLVSLVQKAVTAIMTRLHNLAQFEGGESKVNTLVAAANSLDNLCRMDPAWHPWL

SEQ ID NO: 65261 - protein, 35 aa, Homo sapiens
KMLMMMALLVPLVYTIKRHKWSVLKSRKLAYRPPK

SEQ ID NO: 65262 - protein, 60 aa, Homo sapiens
LESDPGIREPRCRPTCCRTISLAPIPPPPPLQRLPPGSCRMEEISWRRCPSTWKTTFALI

SEQ ID NO: 65263 - protein, 62 aa, Homo sapiens
LLIALLTWGYIRYSGQYRELGGAIDFGAAYVLEQASSHIGNSTQATVRDAVVGRPSMDKKAQ

SEQ ID NO: 65264 - protein, 13 aa, Homo sapiens
ILALSSIIFGCCI

SEQ ID NO: 65265 - protein, 28 aa, Homo sapiens
VALFPLLGYWLLRRRCYRGCCCMVVHCC

SEQ ID NO: 65266 - protein, 88 aa, Homo sapiens
LLLGLCMIFVADCLCPSKRRRPQPYPYPSKKLLSESAQPLKKVEEEQEADEEDVSEEEAESKEGTNKDFPQNAIRQRSLGPSLATDKS

SEQ ID NO: 65267 - protein, 17 aa, Homo sapiens
VVVLVLTVLSSMGLAAM

SEQ ID NO: 65268 - protein, 18 aa, Homo sapiens
LAPAGGTLLLLGWLALAL

SEQ ID NO: 65269 - protein, 28 aa, Homo sapiens
ILAKDFAIYFSAFSGRISLLPEGLGRAL

SEQ ID NO: 65270 - protein, 410 aa, Homo sapiens
LLKTVLLLGHVAQVLMLDNGLLQTPPMGWLAWERFRCNINCDEDPKNCISEQLFMEMADRMAQDGWRDMGYTYLNIDDCWIGGRDASGRLMPDPKRFPHGIPFLADYVHSLGLKLGIYADMGNFTCMGYPGTTLDKVVQDAQTFAEWKVDMLKLDGCFSTPEERAQGYPKMAAALNATGRPIAFSCSWPAYEGGLPPRVNYSLLADICNLWRNYDDIQDSWWSVLSILNWFVEHQDILQPVAGPGHWNDPDMLLIGNFGLSLEQSRAQMALWTVLAAPLLMSTDLRTISAQNMDILQNPLMIKINQDPLGIQGRRIHKEKSLIEVYMRPLSNKASALVFFSCRTDMPYRYHSSLGQLNFTGSVIYEAQDVYSGDIISGLRDETNFTVIINPSGVVMWYLYPIKNLEMSQQ

SEQ ID NO: 65271 - protein, 132 aa, Homo sapiens
LLLIILLAEVTLAILLFVYEQKLNEYVAKGLTDSIHRYHSDNSTKAAWDSIQSFLQCCGINGTSDWTSGPPASCPSDRKVEGCYAKARLWFHSNFLYIGIITICVCVIEVLGMSFALTLNCQIDKTSQTIGL

SEQ ID NO: 65272 - protein, 1302 aa, Homo sapiens
LWLKLLAFGFAFLDTEVFVTGQSPTPSPTGLTTAKMPSVPLSSDPLPTHTTAFSPASTFERENDFSETTTSLSPDNTSTQVSPDSLDNASAFNTTGVSSVQTPHLPTHADSQTPSAGTDTQTFSGSAANAKLNPTPGSNAISDVPGERSTASTFPTDPVSPLTTTLSLAHHSSAALPARTSNTTITANTSDAYLNASETTTLSPSGSAVISTTTIATTPSKPTCDEKYANITVDYLYNKETKLFTAKLNVNENVECGNNTCTNNEVHNLTECKNASVSISHNSCTAPDKTLILDVPPGVEKFQLHDCTQVEKADTTICLKWKNIETFTCDTQNITYRFQCGNMIFDNKEIKLENLEPEHEYKCDSEILYNNHKFTNASKIIKTDFGSPGEPQIIFCRSEAAHQGVITWNPPQRSFHNFTLCYIKETEKDCLNLDKNLIKYDLQNLKPYTKYVLSLHAYIIAKVQRNGSAAMCHFTTKSAPPSQVWNMTVSMTSDNSMHVKCRPPRDRNGPHERYHLEVEAGNTLVRNESHKNCDFRVKDLQYSTDYTFKAYFHNGDYPGEPFILHHSTSYNSKALIAFLAFLIIVTSIALLVVLYKIYDLHKKRSCNLDEQQELVERDDEKQLMNVEPIHADILLETYKRKIADEGRLFLAEFQSIPRVFSKFPIKEARKPFNQNKNRYVDILPYDYNRVELSEINGDAGSNYINASYIDGFKEPRKYIAAQGPRDETVDDFWRMIWEQKATVIVMVTRCEEGNRNKCAEYWPSMEEGTRAFGDVVVKINQHKRCPDYIIQKLNIVNKKEKATGREVTHIQFTSWPDHGVPEDPHLLLKLRRRVNAFSNFFSGPIVVHCSAGVGRTGTYIGIDAMLEGLEAENKVDVYGYVVKLRRQRCLMVQVEAQYILIHQALVEYNQFGETEVNLSELHPYLHNMKKRDPPSEPSPLEAEFQRLPSYRSWRTQHIGNQEENKSKNRNSNVIPYDYNRVPLKHELEMSKESEHDSDESSDDDSDSEEPSKYINASFIMSYWKPEVMIAAQGPLKETIGDFWQMIFQRKVKVIVMLTELKHGDQEICAQYWGEGKQTYGDIEVDLKDTDKSSTYTLRVFELRHSKRKDSRTVYQYQYTNWSVEQLPAEPKELISMIQVVKQKLPQKNSSEGNKHHKSTPLLIHCRDGSQQTGIFCALLNLLESAETEEVVDIFQVVKALRKARPGMVSTFEQYQFLYDVIASTYPAQNGQVKKNNHQEDKIEFDNEVDKVKQDANCVNPLGAPEKLPEAKEQAEGSEPTSGTEGPEHSVNGPASPALNQGS

SEQ ID NO: 65273 - protein, 333 aa, Homo sapiens
ILCKLSLEGDHSTPPSAYGSVKAYTNFDAERDALNIETAIKTKGVDEVTIVNIVTNRDNAQRQDIVFSYQRRTKKELASALKSALSGHLETVILGLLKTPAQYDASELKASMKGLGTDEDSLIEIICSRTNQELQEINRVYKEMYKTDLEKDIISDTSGDFRKLMVALAKGRRAEDGSVIDYELIDQDAQDLYDAGVKRKGTDVPKWISIMTERSVPHLQKVFDRYKSYSPYDMLESIRKEVKGDLENAFLNLVQRIQNKPLYFADQLYDSMKGKGTRDKVLIRIMVSRSEVDMLKIRSEFKRKYGKSLYYYIQQDTKGDYQKALLYLCGGDD

SEQ ID NO: 65274 - protein, 394 aa, Homo sapiens
LGLVVCLVLWTLHSEGSGGKLTAVDPETNMNVSEIISYWGFPSEEYLVETEDGYILCLNRIPHGRKNHSDKGPKPVVFLQHGLLADSSNWVTNLANSSLGFILADAGFDVWMGNSRGNTWSRKHKTLSVSQDEFWAFSYDEMAKYDLPASINFILNKTGQEQVYYVGHSQGTTIGFIAFSQIPELAKRIKMFFALGPVASVAFCTSPMAKLGRLPDHLIKDLFGDKEFLPQSAFLKWLGTHVCTHVILKELCGNLCFLLCGFNERNLNMSRVDVYTTHSPAGTSVQNMLHWSQAVKFQKFQAFDWGSSAKNYFHYNQSYPPTYNVKDMLVPTAVWSGGHDWLADVYDVNILLTQITNLVFHESIPEWEHLDFIWGLDAPWRLYNKIINLMRKYQ

SEQ ID NO: 65275 - protein, 449 aa, Homo sapiens
LLLVLQLALLPAATQGKKVVLGKKGDTVELTCTASQKKSIQFHWKNSNQIKILGNQGSFLTKGPSKLNDRADSRRSLWDQGNFPLIIKNLKIEDSDTYICEVEDQKEEVQLLVFGLTANSDTHLLQGQSLTLTLESPPGSSPSVQCRSPRGKNIQGGKTLSVSQLELQDSGTWTCTVLQNQKKVEFKIDIVVLAFQKASSIVYKKEGEQVEFSFPLAFTVEKLTGSGELWWQAERASSSKSWITFDLKNKEVSVKRVTQDPKLQMGKKLPLHLTLPQALPQYAGSGNLTLALEAKTGKLHQEVNLVVMRATQLQKNLTCEVWGPTSPKLMLSLKLENKEAKVSKREKAVWVLNPEAGMWQCLLSDSGQVLLESNIKVLPTWSTPVQPMALIVLGGVAGLLLFIGLGIFFCVRCRHRRRQAERMSQIKRLLSEKKTCQCPHRFQKTCSPI

SEQ ID NO: 65276 - protein, 402 aa, Homo sapiens
LLLLLGLMHCASAAMFMVKNGNGTACIMANFSAAFSVNYDTKSGPKNMTFDLPSDATVVLNRSSCGKENTSDPSLVIAFGRGHTLTLNFTRNATRYSVQLMSFVYNLSDTHLFPNASSKEIKTVESITDIRADIDKKYRCVSGTQVHMNNVTVTLHDATIQAYLSNSSFSRGETRCEQDRPSPTTAPPAPPSPSPSPVPKSPSVDKYNVSGTNGTCLLASMGLQLNLTYERKDNTTVTRLLNINPNKTSASGSCGAHLVTLELHSEGTTVLLFQFGMNASSSRFFLQGIQLNTILPDARDPAFKAANGSLRALQATVGNSYKCNAEEHVRVTKAFSVNIFKVWVQAFKVEGGQFGSVEECLLDENSMLIPIAVGGALAGLVLIVLIAYLVGRKRSHAGYQTI

SEQ ID NO: 65277 - protein, 115 aa, Homo sapiens
VALAVLALLSLSGLEAIQRTPKIQVYSRHPAENGKSNFLNCYVSGFHPSDIEVDLLKNGERIEKVEHSDLSFSKDWSFYLLYYTEFTPTEKDEYACRVNHVTLSQPKIVKWDRDM

SEQ ID NO: 65278 - protein, 9 aa, Homo sapiens
RVIIMLTWT

SEQ ID NO: 65279 - protein, 413 aa, Homo sapiens
VPLLLGLLGLAVAEPAVYFKEQFLDGDGWTSRWIESKHKSDFGKFVLSSGKFYGDEEKDKGLQTSQDARFYALSASFEPFSNKGQTLVVQFTVKHEQNIDCGGGYVKLFPNSLDQTDMHGDSEYNIMFGPDICGPGTKKVHVIFNYKGKNVLINKDIRCKDDEFTHLYTLIVRPDNTYEVKIDNSQVESGSLEDDWDFLPPKKIKDPDASKPEDWDERAKIDDPTDSKPEDWDKPEHIPDPDAKKPEDWDEEMDGEWEPPVIQNPEYKGEWKPRQIDNPDYKGTWIHPEIDNPEYSPDPSIYAYDNFGVLGLDLWQVKSGTIFDNFLITNDEAYAEEFGNETWGVTKAAEKQMKDKQDEEQRLKEEEEDKKRKEEEEAEDKEDDEDKDEDEEDEEDKEEDEEEDVPGQAKDEL

SEQ ID NO: 65280 - protein, 301 aa, Homo sapiens
RRGPGWRPLLLLVLLAGAAQGGLYFRRGQTCYRPLRGDGLAPLGRSTYPRPHEYLSPADLPKSWDWRNVDGVNYASITRNQHIPQYCGSCWAHASTSAMADRINIKRKGAWPSTLLSVQNVIDCGNAGSCEGGNDLSVWDYAHQHGIPDETCNNYQAKDQECDKFNQCGTCNEFKECHAIRNYTLWRVGDYGSLSGREKMMAEIYANGPISCGIMATERLANYTGGIYAEYQDTTYINHVVSVAGWGISDGTEYWIVRNSWGEPWGERGWLRIVTSTYKDGKGARYNLAIEEHCTFGDPIV

SEQ ID NO: 65281 - protein, 41 aa, Homo sapiens
IVAGVLGLIATCLFGYDAYVTFPVRQPRHTAAPTDPADGPV

SEQ ID NO: 65282 - protein, 370 aa, Homo sapiens
MGLVLALALALALALALSDSRVLWAPAEAHPLSPQGHPARLHRIVPRLRDVFGWGNLTCPICKGLFTAINLGLKKEPNVARVGSVAIKLCNLLKIAPPAVCQSIVHLFEDDMVEVWRRSVLSPSEACGLLLGSTCGHWDIFSSWNISLPTVPKPPPKPPSPPAPGAPVSRILFLTDLHWDHDYLEGTDPDCADPLCCRRGSGLPPASRPGAGYWGEYSKCDLPLRTLESLLSGLGPAGPFDMVYWTGDIPAHDVWHQTRQDQLRALTTVTALVRKFLGPVPVYPAVGNHESTPVNSFPPPFIEGNHSSRWLYEAMAKAWEPWLPAEALRTLRYLSSVETQEGKRKNWGVLCSFPIPRSPPHLSQYEFLFP

SEQ ID NO: 65283 - protein, 61 aa, Homo sapiens [sequence omitted]

SEQ ID NO: 65284 - protein, 39 aa, Homo sapiens
MRTGWATPRRPAGLLMLLFWFFDLAEPSGRAAKLSYHLV

SEQ ID NO: 65285 - protein, 417 aa, Homo sapiens
MGNADYVAAFLHLLLPLAFEGQMQATPECFAHLTQLLQVLAGGRVCAVLEGGYHLESLAESVCMTVQTLLGDPAPPLSGPMAPCQSALESIQSARAAQAPHWKSLQQQDVTAVPMSPSSHSPEGRPPPLLPGGPVCKAAASAPSSLLDQPCLCPAPSVRTAVALTTPDITLVLPPDVIQQEASALREETEAWARPHESLAREEALTALGKLLYLLDGMLDGQVNSGIAATPASAAAATLDVAVRRGLSHGAQRLLCVALGQLDRPPDLAHDGRSLWLNIRGKEAAALSMFHVSTPLPVMTGGFLSCILGLVLPLAYGFQPDLVLVALGPGHGLQGPHAALLAAMLRGLAGGRVLALLEENSTPQLAGILARVLNGEAPPSLGPSSVASPEDVQALMYLRGQLEPQWKMLQCHPHLVA

SEQ ID NO: 65286 - protein, 1100 aa, Homo sapiens
MPALALKGELLLLSLLLLLEPQISQGLVVTPPGPELVLNVSSTFVLTCSGSAPVVWERMSQEPPQEMAKAQDGTFSSVLTLTNLTGLDTGEYFCTHNDSRGLETDERKRLYIFVPDPTVGFLPNDAEELFIFLTEITEITIPCRVTDPQLVVTLHEKKGDVALPVPYDHQRGFSGIFEDRSYICKTTIGDREVDSDAYYVYRLQVSSINVSVNAVQTVVRQGENITLMCIVIGNEVVNFEWTYPRKESGRLVEPVTDFLLDMPYHIRSILHIPSAELEDSGTYTCNVTESVNDHQDEKAINITVVESGYVRLLGEVGTLQFAELHRSRTLQVVFEAYPPPTVLWFKDNRTLGDSSAGEIALSTRNVSETRYVSELTLVRVKVAEAGHYTMRAFHEDAEVQLSFQLQINVPVRVLELSESHPDSGEQTVRCRGRGMPQPNIIWSACRDLKRCPRELPPTLLGNSSEEESQLETNVTYWEEEQEFEVVSTLRLQHVDRPLSVRCTLRNAVGQDTQEVIVVPHSLPFKVVVISAILALVVLTIISLIILIMLWQKKPRYEIRWKVIESVSSDGHEYIYVDPMQLPYDSTWELPRDQLVLGRTLGSGAFGQVVEATAHGLSHSQATMKVAVKMLKSTARSSEKQALMSELKIMSHLGPHLNVVNLLGACTKGGPIYIITEYCRYGDLVDYLHRNKHTFLQHHSDKRRPPSAELYSNALPVGLPLPSHVSLTGESDGGYMDMSKDESVDYVPMLDMKGDVKYADIESSNYMAPYDNYVPSAPERTCRATLINESPVLSYMDLVGFSYQVANGMEFLASKNCVHRDLAARNVLICEGKLVKICDFGLARDIMRDSNYISKGSTFLPLKWMAPESIFNSLYTTLSDVWSFGILLWEIFTLGGTPYPELPMNEQFYNAIKRGYRMAQPAHASDEIYEIMQKCWEEKFEIRPPFSQLVLLLERLLGEGYKKKYQQVDEEFLRSDHPAILRSQARLPGFHGLRSPLDTSSVLYTAVQPNEGDNDYIIPLPDPKPEVADEGPLEGSPSLASSTLNEVNTSSTISCDSPLEPQDEPEPEPQLELQVEPEPELEQLPDSGCPAPRAEAEDSFL

SEQ ID NO: 65287 - protein, 58 aa, Homo sapiens [sequence omitted]

SEQ ID NO: 65288 - protein, 40 aa, Homo sapiens
IGFVIGSISSVLYLLSRLPQIRTNSCTPPVCQAPSWTLEP

SEQ ID NO: 65289 - protein, 21 aa, Homo sapiens
KLNARWAPGMVLPVLCAAFTQ

SEQ ID NO: 65290 - protein, 21 aa, Homo sapiens
KLNARWAPGMVLPVLCAAFTQ

SEQ ID NO: 65291 - protein, 93 aa, Homo sapiens
KSSILIAMAVYTYLRLIVDHHGTAQLQALRQKEVDFCISLLRERFMECLMIGRDLVRLLQNVARIPEFELLWKDIIHNPQALSPQFTGWCAMA

SEQ ID NO: 65292 - protein, 24 aa, Homo sapiens
LVVAKVAAMVTCTSCLHLHLGKLV

SEQ ID NO: 65293 - protein, 58 aa, Homo sapiens
KITSLSAVGTALVTVGVLLYNKARQHQQEALQSLAAATGRAPDDTVEPLLPQDPRQHP

SEQ ID NO: 65294 - protein, 456 aa, Homo sapiens
IASCAAMVPLLLPLSTENGEEEEEQSECQTSVGTLLAKMKTCVDTYTNRLRSKRENVKTGVKPDASDQEPEGLTLLVPDIQKTAEIVYAATTSLRQANQEKKLGEYSKKAAMKPKPLSVLKSLEEKYVAVMKKLQFDTFEMVSEDEDGKLGFKVNYHYMSQVKNANDANSAARARRLAQEAVTLSTSLPLSSSSSVFVRCDEERLDIMKVLITGPADTPYANGCFEFDVYFPQDYPSSPPLVNLETTGGHSVRFNPNLYNDGKVCLSILNTWHGRPEEKWNPQTSSFLQVLVSVQSLILVAEPYFNEPGYERSRGTPSGTQSSREYDGNIRQATVKWAMLEQIRNPSPCFKEVIHKHFYLKRVEIMAQCEEWIADIQQYSSDKRVGRTMSHHAAALKRHTAQLREELLKLPCPEGLDPDTDDAPEVCRATTGAEETLMHDQVKPSSSKELPSDFQL

SEQ ID NO: 65295 - protein, 473 aa, Homo sapiens
LVPGGPVLLVLCGLLEASGGGRALPQLSDDIPFRVNWPGTEFSLPTTGVLYKEDNYVIMTTAHKEKYKCILPLVTSGDEEEEKDYKGPNPRELLEPLFKQSSCSYRIESYWTYEVCHGKHIRQYHEEKETGQKINIHEYYLGNMLAKNLLFEKEREAEEKEKSNEIPTKNIEGQMTPYYPVGMGNGTPCSLKQNRPRSSTVMYICHPESKHEILSVAEVTTCEYEVVILTPLLCSHPKYRFRASPVNDIFCQSLPGSPFKPLTLRQLEQQEEILRVPFRRNKEEDLQSTKEERFPAIHKSIAIGSQPVLTVGTTHISKLTDDQLIKEFLSGSYCFRGGVGWWKYEFCYGKHVHQYHEDKDSGKTSVVVGTWNQEEHIEWAKKNTARAYHLQDDGTQTVRMVSHFYGNGDICDITDKPRQVTVKLKCKESDSPHAVTVYMLEPHSCQYILGVESPVICKILDTADENGLLSLPN

SEQ ID NO: 65296 - protein, 66 aa, Homo sapiens
LKDFSTTSSQMWWRRQHLPWSISRSWTGTLSWAARSLSRTAQDSWWLPMGSLSPTPMWWLIGAESV

SEQ ID NO: 65297 - protein, 15 aa, Homo sapiens
VTGGFFGGFLLGMAS

SEQ ID NO: 65298 - protein, 457 aa, Homo sapiens
LAPRALGLSRLAVLLTLPVALPVGQLLELAARPGRLRERVLELARGGGDPYSDLSKGVLRCRTVEDVLTPLEDCFMLDASTVLDFGVLASIMQSGHTRIPVYEEERSNIVDMLYLKDLAFVDPEDCTPLSTITRFYNHPLHFVFNDTKLDAVLEEFKRGKSHLAIVQKVNNEGEGDPFYEVLGLVTLEDVIEEIIRSEILDESEDYRDTVVKRKPASLMAPLKRKEEFSLFKVSDDEYKVTISPQLLLATQRFLSREVDVFSPLRISEKVLLHLLKHPSVNQEVRFDESNRLATHHYLYQRSQPVDYFILILQGRVEVEIGKEGLKFENGAFTYYGVSALTVPSSVHQSPVSSLQPIRHDLQPDPGDGTHSSAYCPDYTVRALSDLQLIKVTRLQYLNALLATRAQNLPQSPENTDLQVIPGSQTRLLGEKTTTAAGSSHSRPGVPVEGSPGRNPGV

SEQ ID NO: 65299 - protein, 18 aa, Homo sapiens
MQVRVMTCFLLALRIISI

SEQ ID NO: 65300 - protein, 15 aa, Homo sapiens
MSYGLTASTVAVILC

SEQ ID NO: 65301 - protein, 19 aa, Homo sapiens
VVSLGVLLTLLWCRRFKIS

SEQ ID NO: 65302 - protein, 421 aa, Homo sapiens
ISAFTFCRKLYFLLLHAKFLPLDLFGSVAEKPDIPGLPETSHKLNRESGLNKDAFPQYIHNMLSTSRSRFIRNTNESGEEVTTFFDYDYGAPCHKFDVKQIGAQLLPPLYSLVFIFGFVGNMLVVLILINCKKLKCLTDIYLLNLAISDLLFLITLPLWAHSAANEWVFGNAMCKLFTGLYHIGYFGGIFFIILLTIDRYLAIVHAVFALKARTVTFGVVTSVITWLVAVFASVPGIIFTKCQKEDSVYVCGPYFPRGWNNFHTIMRNILGLVLPLLIMVICYSGILKTLLRCRNEKKRHRAVRVIFTIMIVYFLFWTPYNIVILLNTFQEFFGLSNCESTSQLDQATQVTETLGMTHCCINPIIYAFVGEKFRRYLSVFFRKHITKRFCKQCPVFYRETVDGVTSTNTPSTGEQEVSAGL

SEQ ID NO: 65303 - protein, 22 aa, Homo sapiens
VWILFFLVMCSFSLLFLDWYDS

SEQ ID NO: 65304 - protein, 225 aa, Homo sapiens
IAMKFVPCLLLVTLSCLGTLGQAPRQKQGSTGEEFHFQTGGRDSCTMRPSSLGQGAGEVWLRVDCRNTDQTYWCEYRGQPSMCQAFAADPKPYWNQALQELRRLHHACQGAPVLRPSVCREAGPQAHMQQVTSSLKGSPEPNQQPEAGTPSLRPKATVKLTEATQLGKDSMEELGKAKPTTRPTAKPTQPGPRPGGNEEAKKKAWEHCWKPFQALCAFLISFFRG

SEQ ID NO: 65305 - protein, 12 aa, Homo sapiens
LLGFVAANLLFW

SEQ ID NO: 65306 - protein, 35 aa, Homo sapiens
VAGILAKTLSLPPYSSRVVIFFFHQEISLAGNLSN

SEQ ID NO: 65307 - protein, 39 aa, Homo sapiens
MVNPTMFFDIAVDGEPLGRISFEGCLQTRSQRQQKIFVL

SEQ ID NO: 65308 - protein, 13 aa, Homo sapiens
IWWLWLCSKYCLC

SEQ ID NO: 65309 - protein, 36 aa, Homo sapiens
LSLLLAPLCLASACILSVLRPLGVPCWPGSCVLRTR

SEQ ID NO: 65310 - protein, 72 aa, Homo sapiens
IQTTNPDFLLLLFMSVPVVSAPPFCPPAEGSRDGRPKASVARPAAVHEHHSPRDCGHLPDVLRSSLGGWQPH

SEQ ID NO: 65311 - protein, 653 aa, Homo sapiens
TLLLAVFAAVLHWSHITHLFENDRHFSHLSTLEREMAFRTEMGLYYSYFKTIVEAPSFLNGVWMIMNDKLTEYPLVINTLKRFNLYPEVILASWYRIYTKIMDLIGIQTKICWTVTRGEGLSPIESCEGLGDPACFYVAVIFILNGLMMALFFIYGTYLSGSRLGGLVTVLCFFFNHGECTRVMWTPPLRESFSYPFLVLQMLLVTHILRATKLYRGSLIALCISNVFFMLPWQFAQFVLLTQIASLFAVYVVGYIDICKLRKIIYIHMISLALCFVLMFGNSMLLTSYYASSLVIIWGILAMKPHFLKINVSELSLWVIQGCFWLFGTVILKYLTSKIFGIADDAHIGNLLTSKFFSYKDFDTLLYTCAAEFDFMEKETPLRYTKTLLLPVVLVVFVAIVRKIISDMWGVLAKQQTHVRKHQFDHGELVYHALQLLAYTALGILIMRLKLFLTPHMCVMASLICSRQLFGWLFCKVHPGAIVFAILAAMSIQGSANLQTQWNIVGEFSNLPQEELIEWIKYSTKPDAVFAGAMPTMASVKLSALRPIVNHPHYEDAGLRARTKIVYSMYSRKAAEEVKRELIKLKVNYYILEESWCVRRSKPGCSMPEIWDVEDPANAGKTPLCNLLVKDSKPHFTTVFQNSVYKVLEVVKE

SEQ ID NO: 65312 - protein, 202 aa, Homo sapiens
LCGQAALLLGNLLLLHCVSRSHSQNATAEPELTSAGAAQPEGPGGAASWEYGDPHSPVILCSYLPDEFIECEDPVDHVGNATASQELGYGCLKFGGQAYSDVEHTSVQCHALDGIECASPRTFLRENKPCIKYTGHYFITTLLYSFFLGCFGVDRFCLGHTGTAVGKLLTLGGLGIWWFVDLILLITGGLMPSDGSNWCTVY

SEQ ID NO: 65313 - protein, 297 aa, Homo sapiens
VGSLLALMAHTILFLKLFSYRDVNSWCRRARAKAASAGKKASSAAAPHTVSYPDNLTYRDLYYFLFAPTLCYELNFPRSPRIRKRFLLRRILEMLFFTQLQVGLIQQWMVPTIQNSMKPFKDMDYSRIIERLLKLAVPNHLIWLIFFYWLFHSCLNAVAELMQFGDREFYRDWWNSESVTYFWQNWNIPVHKWCIRHFYKPMLRRGSSKWMARTGVFLASAFFHEYLVSVPLRMFRLWAFTGMMAQIPLAWFVGRFFQGNYGNAAVWLSLIIGQPIAVLMYVHDYYVLNYEAPAAEA

SEQ ID NO: 65314 - protein, 68 aa, Homo sapiens
TRGCRPWGSLLGLLGLVSAAAAAWDLASLRCTLGAFCECDFRPDLPEGSEELGPREPHCLWPLPLPLR

SEQ ID NO: 65315 - protein, 16 aa, Homo sapiens
KVVFPGRGLFIALQMC

SEQ ID NO: 65316 - protein, 50 aa, Homo sapiens
LRPTSPLKTSSTCSLAAASLLVTSTSTATAACAIPTSKGRTAGTTRVMAG

SEQ ID NO: 65317 - protein, 43 aa, Homo sapiens
LLFSLLGFLLPSYLFYYRARLQQEYAANGMGPLKVLSGSEVTA

SEQ ID NO: 65318 - protein, 101 aa, Homo sapiens
VGFLVLMVVLGLVRIHSLHRRVSGAGGPPGASSDPKDPDLFWDDSALTIIVNPMESYQNRQSCVTGAVGGQQEDEDSSDSEVADSPSSDERRIIETPPHRY

SEQ ID NO: 65319 - protein, 12 aa, Homo sapiens
ILLVVSVLWLEI

SEQ ID NO: 65320 - protein, 66 aa, Homo sapiens
LVFLQKFPPWAVVEVVTVIVAAPAAATATTRDGGGCSRNCNIPEVFPELLGCPNRRGPPGGVRGAD

SEQ ID NO: 65321 - protein, 58 aa, Homo sapiens
LRLPSSALLPVRSDAAAAVALSAPRWGRGAQAGSSENPLRRLPVPAGLRMPGRLICTY

SEQ ID NO: 65322 - protein, 55 aa, Homo sapiens
IGETIARWEVFLFLAILLQRVEFSVPLGVKVDMTPIYGLTMKHACCEHFQMQLRS

SEQ ID NO: 65323 - protein, 11 aa, Homo sapiens
TFSVGLTLFFL

SEQ ID NO: 65324 - protein, 870 aa, Homo sapiens
IEGLFGVSLAVLGALGAEEPLPARIWLQLCGAQEAVHSAKEYIKGICEPELEERECYPKDMHCIFVGAESLFLKSLIQDTCADLCILDIGLLGIRGSAEAVVMARSHIQQFVKLFENKENLPSSQKESEVKREFKQFVEAHADNYTMDLLILPTSLKKELLTLTQGEENLFETGDDEVIEMRDSQQTEFTQNAATGLNISRDETVLQEEARNKAGTPVSELTKQMDTVLSSSPDVLFDPINGLTPDEEALSNERICQKRRFSDSEERHTKKQFSLENVQEGEILHDAKTLAGNVIADLSDSSADSENLSPDIKETTEEMEYNILVNFFKTMGYSQEIVEKVIKVYGPSTEPLLLLEEIEKENKRFQEDREFSAGTVYPETNKTKNKGVYSSTNELTTDSTPKKTQAHTQQNMVEKFSQLPFKVEAKPCTSNCRINTFRTVPIEQKHEVWGSNQNYICNTDPETDGLSPSVASPSPKEVNFVSRGASSHQPRVPLFPENGLHQQPEPLLPNNMKSACEKRLGCCSSPHSKPNCSTLSPPMPLPQLLPSVTDARSAGPSDHIDSSVTGVQRFRDTLKIPYKLELKNEPGRTDLKHIVIDGSNVAITHGLKKFFSCRGIAIAVEYFWKLGNRNITVFVPQWRTRRDPNVTEQHFLTQLQELGILSLTPARMVFGERIASHDDRFLLHLADKTGGIIVTNDNFREFVNESVSWREIITKRLLQYTFVGDIFMVPDDPLGRSGPRLEEFLQKEVCLRDMQPLLSALPNVGMFDPSFRVPGTQAASTSHQPPTRIQGAPSSHWLPQQPHFPLLPALPSLQQNLPMPAQRSSAETNELREALLKIFPDSEQRLKIDQILVAHPYMKDLNALSAMVLD

SEQ ID NO: 65325 - protein, 19 aa, Homo sapiens
LLLTFLGIVAAVLVKAEYY

SEQ ID NO: 65326 - protein, 12 aa, Homo sapiens
LRLIRVKTAGRS

SEQ ID NO: 65327 - protein, 14 aa, Homo sapiens
KILMRWMMMTTTMT

SEQ ID NO: 65328 - protein, 9 aa, Homo sapiens
MGFIWTFFS

SEQ ID NO: 65329 - protein, 730 aa, Homo sapiens
VPPPAAPLPAAAARMPSTSFPVPSKFPLGPAAAVFGRGETLGPAPRAGGTMKSAEEEHYGYASSNVSPALPLPTAHSTLPAPCHNLQTSTPGIIPPADHPSGYGAALDGGPAGYFLSSGHTRPDGAPALESPRIEITSCLGLYHNNNQFFHDVEVEDVLPSSKRSPSTATLSLPSLEAYRDPSCLSPASSLSSRSCNSEASSYESNYSYPYASPQTSPWQSPCVSPKTTDPEEGFPRGLGACTLLGSPRHSPSTSPRASVTEESWLGARSSRPASPCNKRKYSLNGRQPPYSPHHSPTPSPHGSPRVSVTDDSWLGNTTQYTSSAIVAAINALTTDSSLDLGDGVPVKSRKTTLEQPPSVALKVEPVGEDLGSPPPPADFAPEDYSSFQHIRKGGFCDQYLAVPQHPYQWAKPKPLSPTSYMSPTLPALDWQLPSHSGPYELRIEVQPKSHHRAHYETEGSRGAVKASAGGHPIVQLHGYLENEPLMLQLFIGTADDRLLRPHAFYQVHRITGKTVSTTSHEAILSNTKVLEIPLLPENSMRAVIDCAGILKLRNSDIELRKGETDIGRKNTRVRLVFRVHVPQPSGRTLSLQVASNPIECSQRSAQELPLVEKQSTDSYPVVGGKKMVLSGHNFLQDSKVIFVEKAPDGHHVWEMEAKTDRDLCKPNSLVVEIPPFRNQRITSPVHVSFYVCNGKRKRSQYQRFTYLPANGNAIFLTVSREHERVGCFF

SEQ ID NO: 65330 - protein, 29 aa, Homo sapiens
IFLLLTGPTYLLFKLSPRLGWGPTGLVCC

SEQ ID NO: 65331 - protein, 23 aa, Homo sapiens
KLLLWSLLEYLYLSWLTLHLSKM

SEQ ID NO: 65332 - protein, 97 aa, Homo sapiens
IKFCGATIAGLSLLSPSVMRLVHTQEPGEWLELLLEPGSLYILRGSARYDFSHEILRDEESFFGERRIPRGRRISVICRSLPEGMGPGESGQPPPAC

SEQ ID NO: 65333 - protein, 356 aa, Homo sapiens
LLAALPLALVLLAMRLAFERFIGLPLSRWLGVRDQTRRQVKPNATLEKHFLTEGHRPKEPQLSLLAAQCGLTLQQTQRWFRRRRNQDRPQLTKKFCEASWRFLFYLSSFVGGLSVLYHESWLWAPVMCWDRYPNQTLKPSLYWWYLLELGFYLSLLIRLPFDVKRKDFKEQVIHHFVAVILMTFSYSANLLRIGSLVLLLHDSSDYLLEACKMVNYMQYQQVCDALFLIFSFVFFYTRLVLFPTQILYTTYYESISNRGPFFGYYFFNGLLMLLQLLHVFWSCLILRMLYSFMKKGQMEKDIRSDVEESDSSEEAAAAQEPLQLKNGAAGGPRPAPTDGPRSRVAGRLTNRHTTAT

SEQ ID NO: 65334 - protein, 102 aa, Homo sapiens
IALNVLLFYRLWSLERTAHTFESWHSLALAKGKFPQTATEWAEILALQKQFHSVEVHKWRQILRASVELLDEMKFSLEKLHQGITVSDPPFDTQPRPDDSFS

SEQ ID NO: 65335 - protein, 781 aa, Homo sapiens
RSTAEDSSTPRDMLGLRPPLLALVGLLSLGCVLSQECTKFKVSSCRECIESGPGCTWCQKLNFTGPGDPDSIRCDTRPQLLMRGCAADDIMDPTSLAETQEDHNGGQKQLSPQKVTLYLRPGQAAAFNVTFRRAKGYPIDLYYLMDLSYSMLDDLRNVKKLGGDLLRALNEITESGRIGFGSFVDKTVLPFVNTHPDKLRNPCPNKEKECQPPFAFRHVLKLTNNSNQFQTEVGKQLISGNLDAPEGGLDAMMQVAACPEEIGWRNVTRLLVFATDDGFHFAGDGKLGAILTPNDGRCHLEDNLYKRSNEFDYPSVGQLAHKLAENNIQPIFAVTSRMVKTYEKLTEIIPKSAVGELSEDSSNVVHLIKNAYNKLSSRVFLDHNALPDTLKVTYDSFCSNGVTHRNQPRGDCDGVQINVPITFQVKVTATECIQEQSFVIRALGFTDIVTVQVLPQCECRCRDQSRDRSLCHGKGFLECGICRCDTGYIGKNCECQTQGRSSQELEGSCRKDNNSIICSGLGDCVCGQCLCHTSDVPGKLIYGQYCECDTINCERYNGQVCGGPGRGLCFCGKCRCHPGFEGSACQCERTTEGCLNPRRVECSGRGRCRCNVCECHSGYQLPLCQECPGCPSPCGKYISCAECLKFEKGPFGKNCSAACPGLQLSNNPVKGRTCKERDSEGCWVAYTLEQQDGMDRYLIYVDESRECVAGPNIAAIVGGTVAGIVLIGILLLVIWKALIHLSDLREYRRFEKEKLKSQWNNDNPLFKSATTTVMNPKFAES

SEQ ID NO: 65336 - protein, 45 aa, Homo sapiens
ILWYLACASASCFMSTSYSCQGMWTPGSLVSKDPGTWVGLSWTEA

SEQ ID NO: 65337 - protein, 100 aa, Homo sapiens
LQRRLGPRGLVVLGFPCNQFGHQENAKNEEILNSLKYVRPGGGFEPNFMLFEKGEVNGAGAHTLFAFLREALPAPSDDATALMTDPKLITWSPVCRNDVA

SEQ ID NO: 65338 - protein, 247 aa, Homo sapiens
MASRWGPLIGLAPCCLWLLGAVLLMDASARPANHSSTRERVANREENEILPPDHLNGVKLEMDGHLNRGFHQEVFLGKDLGGFDEDAEPRRSRRKLMVIFSKVDVNTDRKISAKEMQRWIMEKTAEHFQEAMEESKTHFRAVDPDGDGHVSWDEYKVKFLASKGHSEKEVADAIRLNEELKVDEESCAPLSTGSPGEPEGPLVPGGQPPCRPAADGGGVPVVPPPRAQPGNAQVHGEGDRPGPGPGR

SEQ ID NO: 65339 - protein, 489 aa, Homo sapiens
MLVPAALTGLLVFLSGFSLFEASQISKEICEAHDILMCPLGDHSRRYQRLSETCTFAKVCRLRVHPRACGRWERCIHPKRGRSRPGALQSCSAFPTGLTGRPSPSPPAHFLSPPAPFPGFPASLPGSPAPLPSSPTSSPAHLSPPQLTHLFDNDGTVVFAIFMALWGELLRDASAGPGEVPAQAPRSTWRSAVMPLLAPAAATVFLEIWKRQRARVVLHWDLYVWDEEQEEMALQLINCPDYKLRPYQHSYLRSTVILVLTLLMICLMIGMAHVLVVYRVLASALFSSSAVPFLEEQVTTAVVVTGALVHYVTIIIMTKINRCVALKLCDFEMPRTFSERESRFTIRFFTLQFFTHFSSLIYIAFILGRINGHPGKSTRLAGLWKLEECHASGCMMDLFVQMAIIMGLKQTLSNCVEYLVPWVTHKCRSLRASESGHLPRDPELRDWRRNYLLNPVNTFSLFDEFMEMSAWALRGGGSRRRMRGGGPRT

SEQ ID NO: 65340 - protein, 27 aa, Homo sapiens
MLAMDMWFIWPLQVRSQELVQPVSCPP

SEQ ID NO: 65341 - protein, 90 aa, Homo sapiens
MFLTIIVCGMVAALSAIRANCHQEPSVCLQAACPESWIGFQRKCFYFSDDTKNWTSSQRFCDSQDADLAQVESFQELVSYPGSRRVCLFE

SEQ ID NO: 65342 - protein, 36 aa, Homo sapiens
MGPAWFPFSIWMGWSTMCAPASPKWSWSLPGSPSTA

SEQ ID NO: 65343 - protein, 207 aa, Homo sapiens [sequence omitted]

SEQ ID NO: 65344 - protein, 323 aa, Homo sapiens
MSRALRPPLPPLCFFLLLLAAAGARAGGYETCPTVQPNMLNVHLLPHTHDDVGWLKTVDQYFYGIKNDIQHAGVQYILDSVISALLADPTRRFIYVEIAFFSRWWHQQTNATQEVVRDLVRQGRLEFANGGWVMNDEAATHYGAIVDQMTLGLRFLEDTFGNDGRPRVAWHIDPFGHSREQASLFAQMGFDGFFFGRLDYQDKWVRMQKLEMEQVWRASTSLKPPTADLFTGVLPNGYNPPRNLCWDVLCVDQPLVEDPRSPEYNAKELVDYFLNVATAQGRYYRTNHTVMTMGSDFQYENANMWFKNLDKLIRLVNAQVSET

SEQ ID NO: 65345 - protein, 24 aa, Homo sapiens
MAGPLSLAVAGVPGLSSLLCVLCS

SEQ ID NO: 65346 - protein, 43 aa, Homo sapiens
MSTPVLPFSGIGLAFLCLCLAASMVDLKCLGMNSTLLQPSIKE

SEQ ID NO: 65347 - protein, 44 aa, Homo sapiens
MTLNRAALEISERQSFTMLPSPVLNSWTQAIFPPLPTRVLGLQV

SEQ ID NO: 65348 - protein, 238 aa, Homo sapiens
MPLALLVLLLLGPGGWCLAEPPRDSLREELVITPLPSGDVAATFQFRTRWDSELQREGVSHYRLFPKALGQLISKYSLRELHLSFTQGFWRTRYWGPPFLQAPSGAELWVWFQDTVTDVDKSWKELSNVLSGIFCASLNFIDSTNTVTPTASFKPLGLANDTDHYFLRYAVLPREVVCTENLTPWKKLLPCSSKGFSYLFPSPPGRPLCAAEGRSLVPHQLPLPGSAYPPCLQKCTLY

SEQ ID NO: 65349 - protein, 33 aa, Homo sapiens
MRPAALRGALLGCLCLALLCLGGADKRLRLLPA

SEQ ID NO: 65350 - protein, 306 aa, Homo sapiens
MGHRTLVLPWVLLTLCVTAGTPEVWVQVRMEATELSSFTIRCGFLGSGSISLVTVSWGGPNGAGGTTLAVLHPERGIRQWAPARQARWETQSSISLILEGSGASSPCANTTFCCKFASFPEGSWEACGSLPPSSDPGLSAPPTPAPILRADLAGILGVSGVLLFGCVYLLHLLRRHKHRPAPRLQPSRTSPQAPRARAWAPSQASQAALHVPYATINTSCRPATLDTAHPHGGPSWWASLPTHAAHRPQGPAAWASTPIPARGSFVSVENGLYAQAGERPPHTGPGLTLFPDPRGPRAMEGPLGVR

SEQ ID NO: 65351 - protein, 324 aa, Homo sapiens
MALMNTLLYLCLDHFFIAPRQSTVDPTHCPYGHFRIGQMKNCSPWLSCEELRTEVRQLKRVGEGAVKRVFLSEWKEHKVALSQLTSLEMKDDFLHGLQMLKSLQGTHVVTLLGYCEDDNTMLTEYHPLGSLSNLEETLNLSKYQNVNTWQHRLELAMDYVSIINYLHHSPVGTRVMCDSNDLPKTLSQYLLTSNFSILANDLDALPLVNHSSGMLVKCGHRELHGDFVAPEQLWPYGEDVPFHDDLMPSYDEKIDIWKIPDISSFLLGHIEGSDMVRFHLFDIHKACKSQTPSERPTAQDVLETYQKVLDTLRDAMMSQAREML

SEQ ID NO: 65352 - protein, 199 aa, Homo sapiens [sequence omitted]

SEQ ID NO: 65353 - protein, 130 aa, Homo sapiens [sequence omitted]

SEQ ID NO: 65354 - protein, 327 aa, Homo sapiens
MLSAYLRMKYPHLVAGALAASAPVLAVAGLGDSNQFFRDVTADFEGQSPKCTQGVREAFRQIKDLFLQGAYDTVRWEFGTCQPLSDEKDLTQLFMFARNAFTVLAMMDYPYPTDFLGPLPANPVKVGCDRLLSEAQRITGLRALAGLVYNASGSEHCYDIYRLYHSCADPTGCGTGPDARAWDYQACTEINLTFASNNVTDMFPDLPFTDELRQRYCLDTWGVWPRPDWLLTSFWGGDLRAASNIIFSNGNLDPWAGGGIRRNLSASVIAVTIQGGAHHLDLRASHPEDPASVVEARKLEATIIGEWVKAARREQQPALRGGPRLSL

SEQ ID NO: 65355 - protein, 9 aa, Homo sapiens
ISKIFFVLM

SEQ ID NO: 65356 - protein, 22 aa, Homo sapiens
LFTGCPGLRARRRPSSVADGRI

SEQ ID NO: 65357 - protein, 41 aa, Homo sapiens
IRFTIYCSGCFLIPVLLGPGSFAPCPAPRRGGWCGNGWARW

SEQ ID NO: 65358 - protein, 367 aa, Homo sapiens
VEMLGQVVTLILLLLLKVYQGKGCQGSADHVVSISGVPLQLQPNSIQTKVDSIAWKKLLPSQNGFHHILKWENGSLPSNTSNDRFSFIVKNLSLLIKAAQQQDSGLYCLEVTSISGKVQTATFQVFVFDKVEKPRLQGQGKILDRGRCQVALSCLVSRDGNVSYAWYRGSKLIQTAGNLTYLDEEVDINGTHTYTCNVSNPVSWESHTLNLTQDCQNAHQEFRFWPFLVIIVILSALFLGTLACFCVWRRKRKEKQSETSPKEFLTIYEDVKDLKTRRNHEQEQTFPGGGSTIYSMIQSQSSAPTSQEPAYTLYSLIQPSRKSGSRKRNHSPSFNSTIYEVIGKSQPKAQNPARLSRKELENFDVYS

SEQ ID NO: 65359 - protein, 67 aa, Homo sapiens
VSTLISCVASSLVLVPPGSGSQDRLSSDPSAATVAAAGCTPGPVLTTSTCHWGCKEEWRPWAACLAG

SEQ ID NO: 65360 - protein, 68 aa, Homo sapiens
VVTMFLSAVFFAKSKSKNILVRMVSEAGTGFCFNTKRNRLREKLTLLHYDPVVKQRVLFVEKKKIRSL

SEQ ID NO: 65361 - protein, 57 aa, Homo sapiens
VVTMFLSAVFFAKSKSNETKSPLRGKEKNTLPLNGGLKMTLIYKEKTEGGDTDSEIL

SEQ ID NO: 65362 - protein, 368 aa, Homo sapiens
LGLLTRPWRREEDVWVGSGVRGQRAAKWAERAGVGWRLRRLIVFRCRGAEGGTRVGRVRLWKRAAAAHNMHSLATAAPVPTTLAQVDREKIYQWINELSSPETRENALLELSKKRESVPDLAPMLWHSFGTIAALLQEIVNIYPSINPPTLTAHQSNRVCNALALLQCVASHPETRSAFLAAHIPLFLYPFLHTVSKTRPFEYLRLTSLGVIGALVKTDEQEVINFLLTTEIIPLCLRIMESGSELSKTVATFILQKILLDDTGLAYICQTYERFSHVAMILGKMVLQLSKEPSARLLKHVVRCYLRLSDNPRAREALRQCLPDQLKDTTFAQVLKDDTTTKRWLAQLVKNLQEGQVTDPRGIPLPPQ

SEQ ID NO: 65363 - protein, 634 aa, Homo sapiens
LCRLVWPVSPRTTAPGPRRAQYSQAAAAGSGAGGARRRRAAAAARAARGTAGPRRSAARLPALPASSLGAAAMAASAKRKQEEKHLKMLRDMTGLPHNRKCFDCDQRGPTYVNMTVGSFVCTSCSGSLRGLNPPHRVKSISMTTFTQQEIEFLQKHGNEVCKQIWLGLFDDRSSAIPDFRDPQKVKEFLQEKYEKKRWYVPPEQAKVVASVHASISGSSASSTSSTPEVKPLKSLLGDSAPTLHLNKGTPSQSPVVGRSQGQQQEKKQFDLLSDLGSDIFAAPAPQSTATANFANFAHFNSHAAQNSANADFANFDAFGQSSGSSNFGGFPTASHSPFQPQTTGGSAASVNANFAHFDNFPKSSSADFGTFNTSQSHQTASAVSKVSTNKAGLQTADKYAALANLDNIFSAGQGGDQGSGFGTTGKAPVGSVVSVPSQSSASSDKYAALAELDSVFSSAATSSNAYTSTSNASSNVFGTVPVVASAQTQPASSSVPAPFGATPSTNPFVAAAGPSVASSTNPFQTNARGATAATFGTASMSMPTGFGTPAPYSLPTSFSGSFQQPAFPAQAAFPQQTAFSQQPNGAGFAAFGQTKPVVTPFGQVAAAGVSSNPFMTGAPTGQFPTGSSSTNPFL

SEQ ID NO: 65364 - protein, 399 aa, Homo sapiens
IGWMPWISEGRATRPCLRVPSARRGDEGLHQRDEASQKMSKQQPTQFINPETPGYVGFANLPNQVHRKSVKKGFEFTLMVVGESGLGKSTLINSLFLTDLYPERVIPGAAEKIERTVQIEASTVEIEERGVKLRLTVVDTPGYGDAINCRDCFKTIISYIDEQFERYLHDESGLNRRHIIDNRVHCCFYFISPFGHGLKPLDVAFMKAIHNKVNIVPVIAKADTLTLKERERLKKRILDEIEEHNIKIYHLPDAESDEDEDFKEQTRLLKASIPFSVVGSNQLIEAKGKKVRGRLYPWGVVEVENPEHNDFLKLRTMLITHMQDLQEVTQDLHYENFRSERLKRGGRKVENEDMNKDQILLEKEAELRRMQEMIARMQAQMQMQMQGGDGDGGALGHHV

SEQ ID NO: 65365 - protein, 29 aa, Homo sapiens
LLIPYVWFTVCRLGVSADHLECCPLEQEE

SEQ ID NO: 65366 - protein, 1879 aa, Homo sapiens
LLLTLSVLLAAGPSAAAAKLNIPKVLLPFTRATRVNFTLEASEGCYRWLSTRPEVASIEPLGLDEQQCSQKAVVQARLTQPARLTSIIFAEDITTGQVLRCDAIVDLIHDIQIVSTTRELYLEDSPLELKIQALDSEGNTFSTLAGLVFEWTIVKDSEADRFSDSHNALRILTFLESTYIPPSYISEMEKAAKQGDTILVSGMKTGSSKLKARIQEAVYKNVRPAEVRLLILENILLNPAYDVYLMVGTSIHYKVQKIRQGKITELSMPSDQYELQLQNSIPGPEGDPARPVAVLAQDTSMVTALQLGQSSLVLGHRSIRMQGASRLPNSTIYVVEPGYLGFTVHPGDRWVLETGRLYEITIEVFDKFSNKVYVSDNIRIETVLPAEFFEVLSSSQNGSYHRIRALKRGQTAIDAALTSVVDQDGGVHILQVPVWNQQEVEIHIPITLYPSILTFPWQPKTGAYQYTIRAHGGSGNFSWSSSSHLVATVTVKGVMTTGSDIGFSVIQAHDVQNPLHFGEMKVYVIEPHSMEFAPCQVEARVGQALELPLRISGLMPGGASEVVTLSDCSHFDLAVEVENQGVFQPLPGRLPPGSEHCSGIRVKAEAQGSTTLLVSYRHGHVHLSAKITIAAYLPLKAVDPSSVALVTLGSSKEMLFEGGPRPWILEPSKFFQNVTAEDTDSIGLALFAPHSSRNYQQHWILVTCQALGEQVIALSVGNKPSLTNPFPAVEPAVVKFVCAPPSRLTLAPVYTSPQLDMSCPLLQQNKQVVPVSSHRNPRLDLAAYDQEGRRFDNFSSLSIQWESTRPVLASIEPELPMQLVSQDDESGQKKLHGLQAILVHEASGTTAITATATGYQESHLSSARTKQPHDPLVPLSASIELILVEDVRVSPEEVTIYNHPGIQAELRIREGSGYFFLNTSTADVVKVAYQEARGVAMVHPLLPGSSTIMIHDLCLVFPAPAKAVVYVSDIQELYIRVVDKVEIGKTVKAYVRVLDLHKKPFLAKYFPFMDLKLRAASPIITLVALDEALDNYTITFLIRGVAIGQTSLTASVTNKAGQRINSAPQQIEVFPPFRLMPRKVTLLIGATMQVTSEGGPQPQSNILFSISNESVALVSAAGLVQGLAIGNGTVSGLVQAVDAETGKVVIISQDLVQVEVLLLRAVRIRAPIMRMRTGTQMPIYVTGITNHQNPFSFGNAVPGLTFHWSVTKRDVLDLRGRHHEASIRLPSQYNFAMNVLGRVKGRTGLRVVVKAVDPTSGQLYGLARELSDEIQVQVFEKLQLLNPEIEAEQILMSPNSYIKLQTNRDGAASLSYRVLDGPEKVPVVHVDEKGFLASGSMIGTSTIEVIAQEPFGANQTIIVAVKVSPVSYLRVSMSPVLHTQNKEALVAVPLGMTVTFTVHFHDNSGDVFHAHSSVLNFATNRDDFVQIGKGPTNNTCVVRTVSVGLTLLRVWDAEHPGLSDFMPLPVLQAISPELSGAMVVGDVLCLATVLTSLEGLSGTWSSSANSILHIDPKTGVAVARAVGSVTVYYEVAGHLRTYKEVVVSVPQRIMARHLHPIQTSFQEATASKVIVAVGDRSSNLRGECTPTQREVIQALHPETLISCQSQFKPAVFDFPSQDVFTVEPQFDTALGQYFCSITMHRLTDKQRKHLSMKKTALVVSASLSSSHFSTEQVGAEVPFSPGLFADQAEILLSNHYTSSEIRVFGAPEVLENLEVKSGSPAVLAFAKEKSFGWPSFITYTVGVLDPAAGSQGPLSTTLTFSSPVTNQAIAIPVTVAFVVDRRGPGPYGASLFQHFLDSYQVMFFTLFALLAGTAVMIIAYHTVCTPRDLAVPAALTPRASPGHSPHYFAASSPTSPNALPPARKASPPSGLWSPAYASH

SEQ ID NO: 65367 - protein, 1592 aa, Homo sapiens
VNLLLGVFQVLLPCCRPGGAQGQAIEPLPNVVELWQAEEGELLLPTQGDSEEGLEEPSQEQSFSDKLFSGKGLHFQPSVLDFGIQFLGHPVAKILHAYNPSRDSEVVVNSVFAAAGHFHVPPVPCRVIPAMGKTSFRIIFLPTEEGSIESSLFINTSSYGVLSYHVSGIGTRRISTEGSAKQLPNAYFLLPKVQSIQLSQMQAETTNTSLLQVQLECSLHNKVCQQLKGCYLESDDVLRLQMSIMVTMENFSKEFEENTQHLLDHLSIVYVATDESETSDDSAVNMYILHSGNSLIWIQDIRHFSQRDALSLQFEPVLLPTSTTNFTKIASFTCKAATSCDSGIIEDVKKTTHTPTLKACLFSSVAQGYFRMDSSATQFHIETHENTSGLWSIWYRNHFDRSVVLNDVFLSKETKHMLKILNFTGPLFLPPGCWNIFSLKLAVKDIAINLFTNVFLTTNIGAIFAIPLQIYSAPTKEGSLGFEVIAHCGMHYFMGKSKAGNPNWNGSLSLDQSTWNVDSELANKLYERWKKYKNGDVCKRNVLGTTRFAHLKKSKESESFVFFLPRLIAEPGLMLNFSATALRSRMIKYFVVQNPSSWPVSLQLLPLSLYPKPEALVHLLHRWFGTDMQMINFTTGEFQLTEACPYLGTHSEESRFGILHLHLQPLEMKRVGVVFTPADYGKVTSLILIRNNLTVIDMIGVEGFGARELLKVGGRLPGAGGSLRFKVPESTLMDCRRQLKDSKQILSITKNFKVENIGPLPITVSSLKINGYNCQGYGFEVLDCHQFSLDPNTSRDISIVFTPDFTSSWVIRDLSLVTAADLEFRFTLNVTLPHHLLPLCADVVPGPSWEESFWRLTVFFVSLSLLGVILIAFQQAQYILMEFMKTRQRQNASSSSQQNNGPMDVISPHSYKSNCKNFLDTYGPSDKGRGKNCLPVNTPQSRIQNAAKRSPATYGHSQKKHKCSVYYSKHKTSTAAASSTSTTTEEKQTSPLGSSLPAAKEDICTDAMRENWISLRYASGINVNLQKNLTLPKNLLNKEENTLKNTIVFSNPSSECSMKEGIQTCMFPKETDIKTSENTAEFKERELCPLKTSKKLPENHLPRNSPQYHQPDLPEISRKNNGNNQQVPVKNEVDHCENLKKVDTKPSSEKKIHKTSREDMFSEKQDIPFVEQEDPYRKKKLQEKREGNLQNLNWSKSRTCRKNKKRGVAPVSRPPEQSDLKLVCSDFERSELSSDINVRSWCIQESTREVCKADAEIASSLPAAQREAEGYYQKPEKKCVDKFCSDSSSDCGSSSGSVRASRGSWGSWSSTSSSDGDKKPMVDAQHFLPAGDSVSQNDFPSEAPISLNLSHNICNPMTVNSLPQYAEPSCPSLPAGPTGVEEDKGLYSPGDLWPTPPVCVTSSLNCTLENGVPCVIQESAPVHNSFIDWSATCEGQFSSAYCPLELNDYNAFPEENMNYANGFPCPADVQTDFIDHNSQSTWNTPPNMPAAWGHASFISSPPYLTSTRSLSPMSGLFGSIWAPQSDVYENCCPINPTTEHSTHMENQAVVCKEYYPGFNPFRAYMNLDIWTTTANRNANFPLSRDSSYCGNV

SEQ ID NO: 65368 - protein, 30 aa, Homo sapiens
VMVVSSEGELSPARLVSTVELVATPAGWRA

SEQ ID NO: 65369 - protein, 235 aa, Homo sapiens
VQSCKQVYRSIAMKFVPCLLLVTLSCLGTLGQAPRQKQGSTGEEFHFQTGGRDSCTMRPSSLGQGAGEVWLRVDCRNTDQTYWCEYRGQPSMCQAFAADPKPYWNQALQELRRLHHACQGAPVLRPSVCREAGPQAHMQQVTSSLKGSPEPNQQPEAGTPSLRPKATVKLTEATQLGKDSMEELGKAKPTTRPTAKPTQPGPRPGGNEEAKKKAWEHCWKPFQALCAFLISFFRG

SEQ ID NO: 65370 - protein, 166 aa, Homo sapiens
VALVALVLLGAYRLWVRWGRRGLGAGAGAGEESPATSLPRMKKRDFSLEQLRQYDGSRNPRILLAVNGKVFDVTKGSKFYGPAGPYGIFAGRDASRGLATFCLDKDALRDEYDDLSDLNAVQMESVREWEMQFKEKYDYVGRLLKPGEEPSEYTDEEDTKDHNKQD

SEQ ID NO: 65371 - protein, 19 aa, Homo sapiens
KRLKEYRVFFLLSFIYVEI

SEQ ID NO: 65372 - protein, 10 aa, Homo sapiens
IFFLFLLFGS

SEQ ID NO: 65373 - protein, 256 aa, Homo sapiens
LFFLIVGAYMTHVCFNMEIIGGKEVSPHSRPFMASIQYGGHHVCGGVLIDPQWVLTAAHCQYRFTKGQSPTVVLGAHSLSKNEASKQTLEIKKFIPFSRVTSDPQSNDIMLVKLQTAAKLNKHVKMLHIRSKTSLRSGTKCKVTGWGATDPDSLRPSDTLREVTVTVLSRKLCNSQSYYNGDPFITKDMVCAGDAKGQKDSCKGDSGGPLICKGVFHAIVSGGHECGVATKPGIYTLLTKKYQTWIKSNLVPPHTN

SEQ ID NO: 65374 - protein, 48 aa, Homo sapiens
TFQELPRAEVPGLGVASSCQIPCSPGDPEKHRAIPDPGTFRRLAAIWE

SEQ ID NO: 65375 - protein, 604 aa, Homo sapiens
TGTPAVPGRLEIMEGKWLLCMLLVLGTAIVEAHDGHDDDVIDIEDDLDDVIEEVEDSKPDTTAPPSSPKVTYKAPVPTGEVYFADSFDRGTLSGWILSKAKKDDTDDEIAKYDGKWEVEEMKESKLPGDKGLVLMSRAKHHAISAKLNKPFLFDTKPLIVQYEVNFQNGIECGGAYVKLLSKTPELNLDQFHDKTPYTIMFGPDKCGEDYKLHFIFRHKNPKTGIYEEKHAKRPDADLKTYFTDKKTHLYTLILNPDNSFEILVDQSVVNSGNLLNDMTPPVNPSREIEDPEDRKPEDWDERPKIPDPEAVKPDDWDEDAPAKIPDEEATKPEGWLDDEPEYVPDPDAEKPEDWDEDMDGEWEAPQIANPRCESAPGCGVWQRPVIDNPNYKGKWKPPMIDNPSYQGIWKPRKIPNPDFFEDLEPFRMTPFSAIGLELWSMTSDIFFDNFIICADRRIVDDWANDGWGLKKAADGAAEPGVVGQMIEAAEERPWLWVVYILTVALPVFLVILFCCSGKKQTSGMEYKKTDAPQPDVKEEEEEKEEEKDKGDEEEEGEEKLEEKQKSDAEEDGGTVSQEEEDRKPKAEEDEILNRSPRNRKPRRE

SEQ ID NO: 65376 - protein, 60 aa, Homo sapiens
IAPSLGFVLFALFVAFLLRGKLMETYCSQKHTRLDYIGDSKNVLNDVQHGREDEDGLFTL

SEQ ID NO: 65377 - protein, 6 aa, Homo sapiens
LIFFFL

SEQ ID NO: 65378 - protein, 51 aa, Homo sapiens
LHFACLFGLLQALVLAVSLREPNGDEAATDWESEGLEREGEEQRGDPGKGL

SEQ ID NO: 65379 - protein, 75 aa, Homo sapiens
VLIFFWCLAFLWGLLILLKYRWRKLEEEEQAMYEMVKKIIDVVQDHYVDWEQDMERYPYVGILHVRDSLIPPQSR

SEQ ID NO: 65380 - protein, 31 aa, Homo sapiens
LVVLVLFLFRVETGVLPVWWSPLLQSTLQRK

SEQ ID NO: 65381 - protein, 28 aa, Homo sapiens
IDTPSSLAVVSAFLLTAWLPPPLLLGSW

SEQ ID NO: 65382 - protein, 22 aa, Homo sapiens
MLWNLFSFINIYLLFVLKLESV

SEQ ID NO: 65383 - protein, 189 aa, Homo sapiens
MFTIQLALIGFAEFVLHLNRLNPEMLQIAQDTGKLNVAYFRFDINDATGDLDANRPVPFRLTPNISEFLTTIGVSGPLTASMIAVARCFAQPNFKVDGILKTVLRDEIIAWHKKTQEDTSSPLSAAGQPENMDSQQLVSLVQKAVTAIMTRLHNLAQFEGGESKVNTLVAAANSLDNLCRMDPAWHPWL

SEQ ID NO: 65384 - protein, 51 aa, Homo sapiens
ISFALLFFSQVSIYEVDKQDCRKFCTTGIDGAMTIWDFKTLESSIQGLRIM

SEQ ID NO: 65385 - protein, 340 aa, Homo sapiens
LMAQLGAVVAVASSFFCASLFSAVHKIEEGHIGVYYRGGALLTSTSGPGFHLMLPFITSYKSVQTTLQTDEVKNVPCGTSGGVMIYFDRIEVVNFLVPNAVYDIVKNYTADYDKALIFNKIHHELNQFCSVHTLQEVYIELFDQIDENLKLALQQDLTSMAPGLVIQAVRVTKPNIPEAIRRNYELMESEKTKLLIAAQKQKVVEKEAETERKKALIEAEKVAQVAEITYGQKVMEKETEKKISEIEDAAFLAREKAKADAECYTAMKIAEANKLKLTPEYLQLMKYKAIASNSKIYFGKDIPNMFMDSAGSVSKQFEGLADKLSFGLEDEPLETATKEN

SEQ ID NO: 65386 - protein, 529 aa, Homo sapiens
VAAFLSLVALLRRRRNEAEAERVKTKTAAKYGLSAQPRLVDIIAAVPPQYRKVLMPKLKAKPIRTASGIAVVAVMCKPHRCPHISFTGNICVYCPGGPDSDFEYSTQSYTGYEPTSMRAIRARYDPFLQTRHRIEQLKQLGHSVDKVEFIVMGGTFMALPEEYRDYFIRNLHDALSGHTSNNIYEAVKYSERSLTKCIGITIETRPDYCMKRHLSDMLTYGCTRLEIGVQSVYEDVARDTNRGHTVKAVCESFHLAKDSGFKVVAHMMPDLPNVGLERDIEQFTEFFENPAFRPDGLKLYPTLVIRGTGLYELWKSGRYKSYSPSDLVELVARILALVPPWTRVYRVQRDIPMPLVSSGVEHGNLRELALARMKDLGIQCRDVRTREVGIQEIHHKVRPYQVELVRRDYVANGGWETFLSYEDPDQDILIGLLRLRKCSEETFRFELGGGVSIVRELHVYGSVVPVSSRDPTKFQHQGFGMLLMEEAERIAREEHGSGKIAVISGVGTRNYYRKIGYRLQGPYMVKMLK

SEQ ID NO: 65387 - protein, 140 aa, Homo sapiens
VWSFGVLLWEIFTLGGSPYPGVPVEELFKLLKEGHRMDKPSNCTNELYMMMRDCWHAVPSQRPTFKQLVEDLDRIVALTSNQEYLDLSMPLDQYSPSFPDTRSSTCSSGEDSVFSHEPLPEEPCLPRHPAQLANGGLKRR

SEQ ID NO: 65388 - protein, 52 aa, Homo sapiens
IFFYWLFHSCLNAVAELMQFGDREFYRDWWNSESVTYFWQNWNIPVHKWCIR

SEQ ID NO: 65389 - protein, 81 aa, Homo sapiens
LVPVWCFLFAATAVNLGIGTNQKQSLQQSRPLFIMEEPMDTSEPLSALPFTGQQSFEPSGKFGQYPSMQMNHIQALGKWRT

SEQ ID NO: 65390 - protein, 22 aa, Homo sapiens
VFTSPPLLFLPALVLLQVTYSS

SEQ ID NO: 65391 - protein, 32 aa, Homo sapiens
TWPLVAAHVVLVLQSAHPLPPRSSEQHFAVPS

SEQ ID NO: 65392 - protein, 318 aa, Homo sapiens
MAPRRARGCRTLGLPALLLLLLLRPPATRDARDRLAVLAGRSRISESFNHEVQTHEACVRLRTMENCPQCHHHRTSRQQAGITCPPPMSVEHADIWVKSYSLYSRERYICNSGFKRKAGTSSLTECVLNKATNVAHWTTPSLKCIRDPALVHQRPAPPSTVTTAGVTPQPESLSPSGKEPAASSPSSNNTAATTAAIVPGSQLMPSKSPSTGTTEISSHESSHGTPSQTTAKNWELTASASHQPPGVYPQGHSDTTVAISTSTVLLCGLSAVSLLACYLKSRQTPPLASVEMEAMEALPVTWGTSSRDEDLENCSHHL

SEQ ID NO: 65393 - protein, 26 aa, Homo sapiens
LVPQELSRRHCLRGRETKEESCSKMR

SEQ ID NO: 65394 - protein, 588 aa, Homo sapiens
RPLPGALGVAAAAALWLLLLLLPRTRADEHEHTYQDKEEVVLWMNTVGPYHNRQETYKYFSLPFCVGSKKSISHYHETLGEALQGVELEFSGLDIKFKDDVMPATYCEIDLDKEKRDAFVYAIKNHYWYQMYIDDLPIWGIVGEADENGEDYYLWTYKKLEIGFNGNRIVDVNLTSEGKVKLVPNTKIQMSYSVKWKKSDVKFEDRFDKYLDPSFFQHRIHWFSIFNSFMMVIFLVGLVSMILMRTLRKDYARYSKEEEMDDMDRDLGDEYGWKQVHGDVFRPSSHPLIFSSLIGSGCQIFAVSLIVIIVAMIEDLYTERGSMLSTAIFVYAATSPVNGYFGGSLYARQGGRRWIKQMFIGAFLIPAMVCGTAFFINFIAIYYHASRAIPFGTMVAVCCICFFVILPLNLVGTILGRNLSGQPNFPCRVNAVPRPIPEKKWFMEPAVIVCLGGILPFGSIFIEMYFIFTSFWAYKIYYVYGFMMLVLVILCIVTVCVTIVCTYFLLNAEDYRWQWTSFLSAASTAIYVYMYSFYYYFFKTKMYGLFQTSFYFGYMAVFSTALGIMCGAIGYMGTSAFVRKIYTNVKID

SEQ ID NO: 65395 - protein, 47 aa, Homo sapiens
RGTTVGQAAWKISAGSPRQNSHAPGQAVPTAWWRGNLTSGRAPLLHS

SEQ ID NO: 65396 - protein, 1183 aa, Homo sapiens
TCLWGGGSGSGVRCALLGATCLFACVPLSSVALESRRAAPSLDMSYNYVVTAQKPTAVNGCVTGHFTSAEDLNLLIAKNTRLEIYVVTAEGLRPVKEVGMYGKIAVMELFRPKGESKDLLFILTAKYNACILEYKQSGESIDIITRAHGNVQDRIGRPSETGIIGIIDPECRMIGLRLYDGLFKVIPLDRDNKELKAFNIRLEELHVIDVKFLYGCQAPTICFVYQDPQGRHVKTYEVSLREKEFNKGPWKQENVEAEASMVIAVPEPFGGAIIIGQESITYHNGDKYLAIAPPIIKQSTIVCHNRVDPNGSRYLLGDMEGRLFMLLLEKEEQMDGTVTLKDLRVELLGETSIAECLTYLDNGVVFVGSRLGDSQLVKLNVDSNEQGSYVVAMETFTNLGPIVDMCVVDLERQGQGQLVTCSGAFKEGSLRIIRNGIGIHEHASIDLPGIKGLWPLRSDPNRETDDTLVLSFVGQTRVLMLNGEEVEETELMGFVDDQQTFFCGNVAHQQLIQITSASVRLVSQEPKALVSEWKEPQAKNISVASCNSSQVVVAVGRALYYLQIHPQELRQISHTEMEHEVACLDITPLGDSNGLSPLCAIGLWTDISARILKLPSFELLHKEMLGGEIIPRSILMTTFESSHYLLCALGDGALFYFGLNIETGLLSDRKKVTLGTQPTVLRTFRSLSTTNVFACSDRPTVIYSSNHKLVFSNVNLKEVNYMCPLNSDGYPDSLALANNSTLTIGTIDEIQKLHIRTVPLYESPRKICYQEVSQCFGVLSSRIEVQDTSGGTTALRPSASTQALSSSVSSSKLFSSSTAPHETSFGEEVEVHNLLIIDQHTFEVLHAHQFLQNEYALSLVSCKLGKDPNTYFIVGTAMVYPEEAEPKQGRIVVFQYSDGKLQTVAEKEVKGAVYSMVEFNGKLLASINSTVRLYEWTTEKELRTECNHYNNIMALYLKTKGDFILVGDLMRSVLLLAYKPMEGNFEEIARDFNPNWMSAVEILDDDNFLGAENAFNLFVCQKDSAATTDEERQHLQEVGLFHLGEFVNVFCHGSLVMQNLGETSTPTQGSVLFGTVNGMIGLVTSLSESWYNLLLDMQNRLNKVIKSVGKIEHSFWRSFHTERKTEPATGFIDGDLIESFLDISRPKMQEVVANLQYDDGSGMKREATADDLIKVVEELTRIH

SEQ ID NO: 65397 - protein, 50 aa, Homo sapiens
LLFIGLGIFFCVRCRHRRRQAERMSQIKRLLSEKKTCQCPHRFQKTCSPI

SEQ ID NO: 65398 - protein, 172 aa, Homo sapiens
LWRLISGTLGIICLSLMSTLGILLKNSFTKLSIEPAFTPGPNIELQKDSDCCSCQEKWVGYRCNCYFISSEQKTWNESRHLCASQKSSLLQLQNTDELDFMSSSQQFYWIGLSYSEEHTAWLWENGSALSQYLFPSFETFNTKNCIAYNPNGNALDESCEDKNRYICKQQLI

SEQ ID NO: 65399 - protein, 48 aa, Homo sapiens
LEFLLLSLLCLFQLPSIRLAADSTLPLPQMEPYSWQVQAQMEYRDFRH

SEQ ID NO: 65400 - protein, 16 aa, Homo sapiens
RTQIPALLLLVLHGHL

SEQ ID NO: 65401 - protein, 46 aa, Homo sapiens
IWSMFVSLYLISPESGNYLYLLSVYCVPGTISMCIEKPWKAIQQYI

SEQ ID NO: 65402 - protein, 25 aa, Homo sapiens
LLLFYLNFLVVALLTEFGVIHLKSM

SEQ ID NO: 65403 - protein, 19 aa, Homo sapiens
LFTLWLSICSLLCLYGPIG

SEQ ID NO: 65404 - protein, 11 aa, Homo sapiens
LLSVAVTALFL

SEQ ID NO: 65405 - protein, 22 aa, Homo sapiens
IFLFVCIFFPLLVEVRFPPTRP

SEQ ID NO: 65406 - protein, 18 aa, Homo sapiens
IFGEWTVMGSMIIHSFLL

SEQ ID NO: 65407 - protein, 29 aa, Homo sapiens
ILSAAIFITLLGLLGYLHFVKIDQETVNH

SEQ ID NO: 65408 - protein, 49 aa, Homo sapiens
LPPVTPRRLRNQTLRTVSPDAFLPAILFGIQSLVAIDYACVRQSWWHHP

SEQ ID NO: 65409 - protein, 557 aa, Homo sapiens
VKMAAAAWLQVLPVILLLLGAHPSPLSFFSAGPATVAAADRSKWHIPIPSGKNYFSFGKILFRNTTIFLKFDGEPCDLSLNITWYLKSADCYNEIYNFKAEEVELYLEKLKEKRGLSGKYQTSSKLFQNCSELFKTQTFSGDFMHRLPLLGEKQEAKENGTNLTFIGDKTAMHEPLQTWQDAPYIFIVHIGISSSKESSKENSLSNLFTMTVEVKGPYEYLTLEDYPLMIFFMVMCIVYVLFGVLWLAWSACYWRDLLRIQFWIGAVIFLGMLEKAVFYAEFQNIRYKGESVQGALILAELLSAVKRSLARTLVIIVSLGYGIVKPRLGVTLHKVVVAGALYLLFSGMEGVLRVTGAQTDLASLAFIPLAFLDTALCWWIFISLTQTMKLLKLRRNIVKLSLYRHFTNTLILAVAASIVFIIWTTMKFRIVTCQSDWRELWVDDAIWRLLFSMILFVIMVLWRPSANNQRFAFSPLSEEEEEDEQKEPMLKESFEGMKMRSTKQEPNGNSKVNKAQEDDLKWVEENVPSSVTDVALPALLDSDEERMITHFERSKME

SEQ ID NO: 65410 - protein, 134 aa, Homo sapiens
LVLLALCLLLPLLLLGGWKRWRRGRAARHVVAVVLGDVGRSPRMQYHALSLAMHGFSVTLLGFCNSKPHDELLQNNRIQIVGLTELQSLAVGPRVFQYGVKVVLQAMYLLWKLMWREPGAYIFLQVCISLCLPL

SEQ ID NO: 65411 - protein, 16 aa, Homo sapiens
ILCTWFPLLLMWLKDG

SEQ ID NO: 65412 - protein, 80 aa, Homo sapiens
LPYWLLVFLAALNALLQWLLRPLVLYAPLLNPYTLAVANTTFTVSTDKAQRHFGYEPLFSWEDSRTRTILWVQAATGSAQ

SEQ ID NO: 65413 - protein, 13 aa, Homo sapiens
VTCCWLGLALSSL

SEQ ID NO: 65414 - protein, 17 aa, Homo sapiens
LVLLTDVLLFFMARENY

SEQ ID NO: 65415 - protein, 85 aa, Homo sapiens
LPTPMAPGTGGNLSSNQKASISLIHQGSLAWSLPPFSQVFLRELFLLDFAKAEPPSSLLSPVVSSLYSWQHQLTAPVHPSGRRIS

SEQ ID NO: 65416 - protein, 17 aa, Homo sapiens
ICLLMFLLWLCLFSVLL

SEQ ID NO: 65417 - protein, 23 aa, Homo sapiens
LAFVFVVLGGLWGLRAAAVSHVG

SEQ ID NO: 65418 - protein, 768 aa, Homo sapiens
KKYLTEGLLQFTILLSLIGVRVDVDTYLTSQLPPLREIILGPSSAYTQTQFHNLRNTLDGYGIHPKSIDLDNYFTARRLLSQVRALDRFQVPTTEVNAWLVHRDPEGSVSGSQPNSGLALESSSGLQDVTGPDNGVRESETEQGFGEDLEDLGAVAPPVSGDLTKEDIDLIDILWRQDIDLGAGREVFDYSHRQKEQDVEKELRDGGEQDTWAGEGAEALARNLLVDGETGESFPAQVPSGEDQTALSLEECLRLLEATCPFGENAEFPADISSITEAVPSESEPPALQNNLLSPLLTGTESPFDLEQQWQDLMSIMEMQAMEVNTSASEILYSAPPGDPLSTNYSLAPNTPINQNVSLHQASLGGCSQDFLLFSPEVESLPVASSSTLLPLAPSNSTSLNSTFGSTNLTGLFFPPQLNGTANDTAGPELPDPLGGLLDEAMLDEISLMDLAIEEGFNPVQASQLEEEFDSDSGLSLDSSHSPSSLSSSEGSSSSSSSSSSSSSSASSSASSSFSEEGAVGYSSDSETLDLEEAEGAVGYQPEYSKFCRMSYQDPAQLSCLPYLEHVGHNHTYNMAPSALDSADLPPPSALKKGSKEKQADFLDKQMSRDEHRARAMKIPFTNDKIINLPVEEFNELLSKYQLSEAQLSLIRDIRRRGKNKMAAQNCRKRKLDTILNLERDVEDLQRDKARLLREKVEFLRSLRQMKQKVQSLYQEVFGRLRDENGRPYSPSQYALQYAGDGSVLLIPRTMADQQARRQERKPKDRRK

SEQ ID NO: 65419 - protein, 56 aa, Homo sapiens
LLLALLTAALILYRRRQSIERGAFEGARYSRSSSSPTEATEKNILVSDMEMNEQQE

SEQ ID NO: 65420 - protein, 94 aa, Homo sapiens
TFHAKGLWLYLAGSSLPCLTLIGSPNFGYRSVHRDLEAQIAIVTENQALQQQLHQEQEQLYLRSGVVSSATFEQPSRQVKLWVKMVTPLIKNFF

SEQ ID NO: 65421 - protein, 30 aa, Homo sapiens
IRMASVRIREAKEGDCGDILRLIRVKTAGR

SEQ ID NO: 65422 - protein, 22 aa, Homo sapiens
LFLLALVLAWEASPHYPTPPAP

SEQ ID NO: 65423 - protein, 11 aa, Homo sapiens
KHSMGLWLMTY

SEQ ID NO: 65424 - protein, 8 aa, Homo sapiens
LLFILCVI

SEQ ID NO: 65425 - protein, 669 aa, Homo sapiens
VFLLLAIVGYVAVGIIAWTHGDPRKVIYPTDSRGEFCGQKGTKNENKPYLFYFNIVKCASPLVLLEFQCPTPQICVEKCPDRYLTYLNARSSRDFEYYKQFCVPGFKNNKGVAEVLQDGDCPAVLIPSKPLARRCFPAIHAYKGVLMVGNETTYEDGHGSRKNITDLVEGAKKANGVLEARQLAMRIFEDYTVSWYWIIIGLVIAMAMSLLFIILLRFLAGIMVWVMIIMVILVLGYGIFHCYMEYSRLRGEAGSDVSLVDLGFQTDFRVYLHLRQTWLAFMIILSILEVIIILLLIFLRKRILIAIALIKEASRAVGYVMCSLLYPLVTFFLLCLCIAYWASTAVFLSTSNEAVYKIFDDSPCPFTAKTCNPETFPSSNESRQCPNARCQFAFYGGESGYHRALLGLQIFNAFMFFWLANFVLALGQVTLAGAFASYYWALRKPDDLPAFPLFSAFGRALRYHTGSLAFGALILAIVQIIRVILEYLDQRLKAAENKFAKCLMTCLKCCFWCLEKFIKFLNRNAYIMIAIYGTNFCTSARNAFFLLMRNIIRVAVLDKVTDFLFLLGKLLIVGSVGILAFFFFTHRIRIVQDTAPPLNYYWVPILTVIVGSYLIAHGFFSVYGMCVDTLFLCFLEDLERNDGSAERPYFMSSTLKKLLNKTNKKAAES

SEQ ID NO: 65426 - protein, 61 aa, Homo sapiens
KRMKMTLMIPLLLLTPITATSTSRWPEIGVVAIRSQLRALHTCGQEPVPAMGSEGAVYASR

SEQ ID NO: 65427 - protein, 62 aa, Homo sapiens
LCSTPRMHRLWIGPAFFLMTSLSVSGAVIPRNGGPGGVSSGPCLLQLLCGQAGSSTIRKIPS

SEQ ID NO: 65428 - protein, 24 aa, Homo sapiens
LGSLSARGGGVAYLLEPHAARSQA

SEQ ID NO: 65429 - protein, 21 aa, Homo sapiens
LSARGGGVAYLLEPHAARSQA

SEQ ID NO: 65430 - protein, 20 aa, Homo sapiens
LSLAAAGAPVSSSLLFVLCS

SEQ ID NO: 65431 - protein, 93 aa, Homo sapiens
TSFYTTNRMTRKKTGFCFLEYEDHKTAAQARRRLMSGKVKVWGNVGTVEWADPMEDPDPEVMAKVKVLFVRNLANTVTEEILEKAFSQFGKLE

SEQ ID NO: 65432 - protein, 27 aa, Homo sapiens
LKLFLSLQNLILALDLRRESLTRDETQ

SEQ ID NO: 65433 - protein, 29 aa, Homo sapiens
ILIWLLGCYLEIQALKMPASLDLEDDLDK

SEQ ID NO: 65434 - protein, 209 aa, Homo sapiens
VLLGLLLALLVPGGGAAKTGAELVTCGSVLKLLNTHHRVRLHSHDIKYGSGSGQQSVTGVEASDDANSYWRIRGGSEGGCPRGSPVRCGQAVRLTHVLTGKNLHTHHFPSPLSNNQEVSAFGEDGEGDDLDLWTVRCSGQHWEREAAVRFQHVGTSVFLSVTGEQYGSPIRGQHEVHGMPSANTHNTWKAMEGIFIKPSVEPSAGHDEL

SEQ ID NO: 65435 - protein, 362 aa, Homo sapiens
LRLPAALPAMRLPRRAALGLLPLLLLLPPAPEAAKKPTPCHRCRGLVDKFNQGMVDTAKKNFGGGNTAWEEKTLSKYESSEIRLLEILEGLCESSDFECNQMLEAQEEHLEAWWLQLKSEYPDLFEWFCVKTLKVCCSPGTYGPDCLACQGGSQRPCSGNGHCSGDGSRQGDGSCRCHMGYQGPLCTDCMDGYFSSLRNETHSICTACDESCKTCSGLTNRDCGECEVGWVLDEGACVDVDECAAEPPPCSAAQFCKNANGSYTCEECDSSCVGCTGEGPGNCKECISGYAREHGQCADVDECSLAEKTCVRKNENCYNTPGSYVCVCPDGFEETEDACVPPAEAEATEGESPTQLPSREDL

SEQ ID NO: 65436 - protein, 49 aa, Homo sapiens
LASHFFWGLWSILQASMSTIEFGYLDYAQSRFQFYFQQKGQLTSVHSSS

SEQ ID NO: 65437 - protein, 459 aa, Homo sapiens
LTLATAVVQLYLALPPGAEHWTKEHCGAVCFVKDNPQKSYFIRLYGLQAGRLLWEQELYSQLVYSTPTPFFHTFAGDDCQAGLNFADEDEAQAFRALVQEKIQKRNQRQSGDRRQLPPPPTPANEERRGGLPPLPLHPGGDQGGPPVGPLSLGLATVDIQNPDITSSRYRGLPAPGPSPADKKRSGKKKISKADIGAPSGFKHVSHVGWDPQNGFDVNNLDPDLRSLFSRAGISEAQLTDAETSKLIYDFIEDQGGLEAVRQEMRRQEPLPPPPPPSRGGNQLPRPPIVGGNKGRSGPLPPVPLGIAPPPPTPRGPPPPGRGGPPPPPPPATGRSGPLPPPPPGAGGPPMPPPPPPPPPPPSSGNGPAPPPLPPALVPAGGLAPGGGRGALLDQIRQGIQLNKTPGAPESSALQPPPQSSEGLVGALMHVMQKRSRAIHSSDEGEDQAGDEDEDDEWDD

SEQ ID NO: 65438 - protein, 122 aa, Homo sapiens
MGGPLVSRDKKCFFRNASFLSKMKVLDSISFHLKISSVYLMASVVSFLKLLLTYWELKKGSVKASRGACPSQGGASLLSPAARALVLHQLQPQCPDTGGGKGSARTSRSTHRSCLVPICKIS

SEQ ID NO: 65439 - protein, 19 aa, Homo sapiens
MITKVVFPEQGLAVLLWMC

SEQ ID NO: 65440 - protein, 15 aa, Homo sapiens
MNVTTLVTSYLFAVT

SEQ ID NO: 65441 - protein, 39 aa, Homo sapiens
MKERASLCSCVSFSSLALIPCLASSKWPGPWAVKKCKVQ

SEQ ID NO: 65442 - protein, 106 aa, Homo sapiens [sequence omitted]

SEQ ID NO: 65443 - protein, 193 aa, Homo sapiens [sequence omitted]

SEQ ID NO: 65444 - protein, 122 aa, Homo sapiens
MCYLLLLLIQTAELLIHPQGLQAVSNGESALKGTRPTFSSPFILVTEGRKEWEGVFLSSGWKGNTLSNYYISLVFYYSRILQPYFYCLWGKLEMVTLIRSVWRGINGGDKIQLVLENVKVLK

SEQ ID NO: 65445 - protein, 168 aa, Homo sapiens
MAEVNLPQKAGGFLMKKELNYFAEALESPERPFLAILGRTKVADKIQLIKNMLGKVNEMIIGSGMACTFLKVLSNMEIGTSLFDEEGAKTVKDLMSKAEKNGVKIILPVDFVTAGKFDENTKTGQATVASGIPAGWLGLDCGPESSKKYAGAVTQAKQIVWNGPVGGF

SEQ ID NO: 65446 - protein, 36 aa, Homo sapiens
MAARSPARASQATLPHCARALFSFPFLDQGAAIRSL

SEQ ID NO: 65447 - protein, 69 aa, Homo sapiens
MNVAKLLVCVQASLIIMRSTLERNISNVMNVANSSATIHILYVIRDFMPERNLTHVINVAECSVSIKAL

SEQ ID NO: 65448 - protein, 192 aa, Homo sapiens [sequence omitted]

SEQ ID NO: 65449 - protein, 98 aa, Homo sapiens
MLRIWMIVIFLKHLLEGGESMMGKKASELRTMLKATGRNSDYRDIIDTPMDFGTVRETLDAGNYDSPLEFCKDIRLIFSNAKAYTPNKRSKVIFYVVY

SEQ ID NO: 65450 - protein, 178 aa, Homo sapiens [sequence omitted]

SEQ ID NO: 65451 - protein, 91 aa, Homo sapiens
MVSLDIHPNCYRTTRCPITARGNLFSLSLGFSSQRLQESWPASTWGATSGSLPPAFPWAPWQLLASRGFCTSSSSSSWAPSALERPFAMTS

SEQ ID NO: 65452 - protein, 153 aa, Homo sapiens
MVKYLLLSILGLAFLSEAAARKIPKVGHTFFQKPESCPPVPGGSMKLDIGIINENQRVSMSRNIESRSTSPWNYTVTWDPNRYPSEVVQAQCRNLGCINAQGKEDISMNSVPIQQETLVVRRKHQGCSVSFQLEKVLVTVGCTCVTPVIHHVQ

SEQ ID NO: 65453 - protein, 153 aa, Homo sapiens [sequence omitted]

SEQ ID NO: 65454 - protein, 46 aa, Homo sapiens
MTLFCLLQLFYHLQRERCFLEPRARFYAAEIASALGYLHSLNIVYR

SEQ ID NO: 65455 - protein, 215 aa, Homo sapiens [sequence omitted]

SEQ ID NO: 65456 - protein, 798 aa, Homo sapiens [sequence omitted]

SEQ ID NO: 65457 - protein, 289 aa, Homo sapiens
MSALRPLLLLLLPLCPGPGPGPGSEAKVTRSCAETRQVLGARGYSLNLIPPALISGEHLRVCPQEYTCCSSETEQRLIRETEATFRGLVEDSGSFLVHTLAARHRKFDEFFLEMLSVAQHSLTQLFSHSYGRLYAQHALIFNGLFSRLRDFYGESGEGLDDTLADFWAQLLERVFPLLHPQYSFPPDYLLCLSRLASSTDGSLQPFGDSPRRLRLQITRTLVAARAFVQGLETGRNVVSEALKVGGCLSMGRAQGGRGGSERDPTRKKQPPASRTGLGLCLPPGPGVLG

SEQ ID NO: 65458 - protein, 101 aa, Homo sapiens [sequence omitted]

SEQ ID NO: 65459 - protein, 390 aa, Homo sapiens
LVISSVFFSSLLLSRFSMQEKDASSQGFLPHFQHFATQAIHVGQDPEQWTSRAVVPPISLSTTFKQGAPGQHSGFEYSRSGNPTRNCLEKAVAALDGAKYCTNRYFRQVASEFGLKISFVDCSKIKLLEAAITPETKLVWIETPTNPTQKVIDIEGCAHIVHKHGDIILVVDNTFMSPYFQRPLALGADISMYSATKYMNGHSDVVMGLVSVNCESLHNRLRFLQNSLGAVPSPIDCYLCNRGLKTLHVRMEKHFKNGMAVAQFLESNPWVEKVIYPGLPSHPQHELVKRQCTGCTGMVTFYIKGTLQHAEIFLKNLKLFTLAESLGGFESLAELPAIMTHASVLKNDRDVLGISDTLIRLSVGLEDEEDLLEDLDQALKAAHPPSGSHS

SEQ ID NO: 65460 - protein, 9 aa, Homo sapiens
IAALLPLWM

SEQ ID NO: 65461 - protein, 282 aa, Homo sapiens
LPPEATYSLVPEPELGPGGAGAAPLGTLRASSGAPGRWKLHLTERADFQYSQRELDTIEVFPTKSARGNRVSCMYVRCVPGARYTVLFSHGNAVDLGQMSSFYIGLGSRLHCNIFTYDSSGYGASSGRPSERNLYADIDATWQALRTRYGISPDSIILYGQSIGTVPTMDLASRYECAAVVLHSPLTSGMRVAFRDTKKTYCFDAFPNIEKVSKITSPVLIIHGREDEVIDFSHGLALYERCPKAVEPLWVEGAGHNDIELYSQYLERLRRFISQELPSQRA

SEQ ID NO: 65462 - protein, 808 aa, Homo sapiens
LEIQTTLRNILQTMVQLLGALTGCVQHICATQESIILENIQSLPSSVLHIIKSTFVHCKNSESVYSGCLHLVSDLLQALFKEAYSLQKQLMELLDMVCMDPLVDDNDDILNMVIVIHSLLDICSVISSMDHAFHANTWKFIIKQSLKHQSIIKSQLKHKDIITSLCEDILFSFHSCLQLAEQMTQSDAQDNADYRLFQKTLKLCRFFANSLLHYAKEFLPFLSDSCCTLHQLYLQIHSKFPPSLYATRISKAHQEEIAGAFLVTLDPLISQLLTFQPFMQVVLDSKLDLPCELQFPQCLLLVVVMDKLPSQPKEVQTLWCTDSQVSETTTRISLLKAVFYSFEQCSGELSLPVHLQGLKSKGKAEVAVTLYQHVCVHLCTFITSFHPSLFAELDAALLNAVLSANMITSLLAMDAWCFLARYGTAELCAHHVTIVAHLIKSCPGECYQLINLSILLKRLFFFMAPPHQLEFIQKFSPKEAENLPLWQHISFQALPPELREQTVHEVTTVGTAECRKWLSRSRTLGELESLNTVLSALLAVCNSAGEALDTGKQTAIIEVVSQLWAFLNIKQVADQPYVQQTFSLLLPLLGFFIQTLDPKLILQAVTLQTSLLKLELPDYVRLAMLDFVSSLGKLFIPEAIQDRILPNLSCMFALLLADRSWLLEQHTLEAFTQFAEGTNHEEIVPQCLSSEETKNKVVSFLEKTGFVDETEAAKVERVKQEKGIFWEPFANVTVEEAKRSSLQPYAKRARQEFPWEEEYRSALHTIAGALEATESLLQKGPAPAWLSMEMEALQERMDKLKRYIHTLG

SEQ ID NO: 65463 - protein, 37 aa, Homo sapiens
RNGSKFSSLGCLLRSLLSTASTATTSSPCRCTNYNSN

SEQ ID NO: 65464 - protein, 23 aa, Homo sapiens
KTWMAGILASGLARTLESLSPVA

SEQ ID NO: 65465 - protein, 67 aa, Homo sapiens
LVPACTSEGLQMWWRRQHLPWSISRSWTGTLSWAARSLSRTAQDSWWLPMGSLSPTPMWWLIGAESV

SEQ ID NO: 65466 - protein, 135 aa, Homo sapiens
ITTLMAGILRLVVQWPPGRLQTVTKGVESLICTDWIRHKFTRSRIPEKVFQASPEDHEKYGGDPQNPHKLHIVTRIKSTRRRPYWEKDIIKMLGLEKAHTPQVHKNIPSVNAKLKVVKHLIRFVVSSQLFLKCIA

SEQ ID NO: 65467 - protein, 50 aa, Homo sapiens
LNLLSKMSVSLLLFWMLLSVHLQFQKGPSAKRPMFIQQNAGAEGVPTVGS

SEQ ID NO: 65468 - protein, 18 aa, Homo sapiens
VCFGKPRSWWWLQLVLGA

SEQ ID NO: 65469 - protein, 780 aa, Homo sapiens
LKRIILCFLIVYMAILVGTDQDFYSLLGVSKTASSREIRQAFKKLALKLHPDKNPNNPNAHGDFLKINRAYEVLKDEDLRKKYDKYGEKGLEDNQGGQYESWNYYRYDFGIYDDDPEIITLERREFDAAVNSGELWFVNFYSPGCSHCHDLAPTWRDFAKEVDGLLRIGAVNCGDDRMLCRMKGVNSYPSLFIFRSGMAPVKYHGDRSKESLVSFAMQHVRSTVTELWTGNFVNSIQTAFAAGIGWLITFCSKGGDCLTSQTRLRLSGMLDGLVNVGWMDCATQDNLCKSLDITTSTTAYFPPGATLNNKEKNSILFLNSLDAKEIYLEVIHNLPDFELLSANTLEDRLAHHRWLLFFHFGKNENSNDPELKKLKTLLKNDHIQVGRFDCSSAPDICSNLYVFQPSLAVFKGQGTKEYEIHHGKKILYDILAFAKESVNSHVTTLGPQNFPANDKEPWLVDFFAPWCPPCRALLPELRRASNLLYGQLKFGTLDCTVHEGLCNMYNIQAYPTTVVFNQSNIHEYEGHHSAEQILEFIEDLMNPSVVSLTPTTFNELVTQRKHNEVWMVDFYSPWCHPCQVLMPEWKRMARTLTGLINVGSIDCQQYHSFCAQENVQRYPEIRFFPPKSNKAYHYHSYNGWNRDAYSLRIWGLGFLPQVSTDLTPQTFSEKVLQGKNHWVIDFYAPWCGPCQNFAPEFELLARMIKGKVKAGKVDCQAYAQTCQKAGIRAYPTVKFYFYERAKRNFQEEQINTRDAKAIAALISEKLETLRNQGKRNKDEL

SEQ ID NO: 65470 - protein, 17 aa, Homo sapiens
MFLHLIFQTSLAFFCKL

SEQ ID NO: 65471 - protein, 299 aa, Homo sapiens
VFLMMLSFYYFSRHVEKLARTLFLWKIEVHDQKERVYEMRRWNEALVTNMLPEHVARHFLGSKKRDEELYSQTYDEIGVMFASLPNFADFYTEESINNGGIECLRFLNEIISDFDSLLDNPKFRVITKIKTIGSTYMAASGVTPDVNTNGFASSNKEDKSERERWQHLADLADFALAMKDTLTNINNQSFNNFMLRIGMNKGGVLAGVIGARKPHYDIWGNTVNVASRMESTGVMGNIQVVEETQVILREYGFRFVRRGPIFVKGKGELLTFFLKGRDKLATFPNGPSVTLPHQVVDNS

SEQ ID NO: 65472 - protein, 18 aa, Homo sapiens
KFILLSSLMMMLFSMLKN

SEQ ID NO: 65473 - protein, 53 aa, Homo sapiens
MDKPCLLLFLHQLQVLMCMFQLQSHSFDQSPWCLVFQESQVLPLPNQYSQKQK

SEQ ID NO: 65474 - protein, 263 aa, Homo sapiens
RMPFSHLSTYSLVWVMAAVVLCTAQVQVVTQDEREQLYTPASLKCSLQNAQEALIVTWQKKKAVSPENMVTFSENHGVVIQPAYKDKINITQLGLQNSTITFWNITLEDEGCYMCLFNTFGFGKISGTACLTVYVQPIVSLHYKFSEDHLNITCSATARPAPMVFWKVPRSGIENSTVTLSHPNGTTSVTSILHIKDPKNQVGKEVICQVLHLGTVTDFKQTVNKGYWFSVPLLLSIVSLVILLVLISILLYWKRHRNQDREP

SEQ ID NO: 65475 - protein, 19 aa, Homo sapiens
LLLLALAALLAFVSLSLQF

SEQ ID NO: 65476 - protein, 16 aa, Homo sapiens
MDSMEFSLIIVTVSVL

SEQ ID NO: 65477 - protein, 12 aa, Homo sapiens
LAPVPVAPRASS

SEQ ID NO: 65478 - protein, 276 aa, Homo sapiens
KCPYLNFFQLLVLAGLSHFCSGVIHVTKEVKEVATLSCGHNVSVEELAQTRIYWQKEKKMVLTMMSGDMNIWPEYKNRTIFDITNNLSIVILALRPSDEGTYECVVLKYEKDAFKREHLAEVTLSVKADFPTPSISDFEIPTSNIRRIICSTSGGFPEPHLSWLENGEELNAINTTVSQDPETELYAVSSKLDFNMTTNHSFMCLIKYGHLRVNQTFNWNTTKQEHFPDNLLPSWAITLISVNGIFVICCLTYCFAPRCRERRRNERLRRESVRPV

SEQ ID NO: 65479 - protein, 12 aa, Homo sapiens
MAMIGVVLIFSQ

SEQ ID NO: 65480 - protein, 22 aa, Homo sapiens
LWLRVVIFLVVVQKMVRFESFG

SEQ ID NO: 65481 - protein, 32 aa, Homo sapiens
LLLVWSLVTARLPRSLLVSSPGVPRGLEEAAA

SEQ ID NO: 65482 - protein, 29 aa, Homo sapiens
TSREAQPYLMVLLLCSGVLGSNLMPKVAA

SEQ ID NO: 65483 - protein, 62 aa, Homo sapiens
IAWPRPGIPAIRFLLGFLELWSVWASTSDSCAGSAGPEHGCVRSGSSQKWLQKKILSTFQGT

SEQ ID NO: 65484 - protein, 880 aa, Homo sapiens
KMRLHLLLLLALCGAGTTAAELSYSLRGNWSICNGNGSLELPGAVPGCVHSALFQQGLIQDSYYRFNDLNYRWVSLDNWTYSKEFKIPFEISKWQKVNLILEGVDTVSKILFNEVTIGETDNMFNRYSFDITNVVRDVNSIELRFQSAVLYAAQQSKAHTRYQVPPDCPPLVQKGECHVNFVRKEQCSFSWDWGPSFPTQGIWKDVRIEAYNICHLNYFTFSPIYDKSAQEWNLEIESTFDVVSSKPVGGQVIVAIPKLQTQQTYSIELQPGKRIVELFVNISKNITVETWWPHGHGNQTGYNMTVLFELDGGLNIEKSAKVYFRTVELIEEPIKGSPGLSFYFKINGFPIFLKGSNWIPADSFQDRVTSELLRLLLQSVVDANMNTLRVWGGGIYEQDEFYELCDELGIMVWQDFMFACALYPTDQGFLDSVTAEVAYQIKRLKSHPSIIIWSGNNENEEALMMNWYHISFTDRPIYIKDYVTLYVKNIRELVLAGDKSRPFITSSPTNGAETVAEAWVSQNPNSNYFGDVHFYDYISDCWNWKVFPKARFASEYGYQSWPSFSTLEKVSSTEDWSFNSKFSLHRQHHEGGNKQMLYQAGLHFKLPQSTDPLRTFKDTIYLTQVMQAQCVKTETEFYRRSRSEIVDQQGHTMGALYWQLNDIWQAPSWASLEYGGKWKMLHYFAQNFFAPLLPVGFENENTFYIYGVSDLHSDYSMTLSVRVHTWSSLEPVCSRVTERFVMKGGEAVCLYEEPVSELLRRCGNCTRESCVVSFYLSADHELLSPTNYHFLSSPKEAVGLCKAQITAIISQQGDIFVFDLETSAVAPFVWLDVGSIPGRFSDNGFLMTEKTRTILFYPWEPTSKNELEQSFHVTSLTDIY

SEQ ID NO: 65485 - protein, 36 aa, Homo sapiens
LLAWGFPAVLALSSPTPAAPRRTPLSGCRQAPAALS

SEQ ID NO: 65486 - protein, 22 aa, Homo sapiens
KLRFPKEILTRLLLWPSMFCFL

SEQ ID NO: 65487 - protein, 21 aa, Homo sapiens
MQLLGVLFHSCGFLASLFVDH

SEQ ID NO: 65488 - protein, 67 aa, Homo sapiens
KGSTLALVIITLELERLMPGWCAPISDLLKKAQVGDMQYSCCKELVMQQLRSLQSSSCTDNFVSPAN

SEQ ID NO: 65489 - protein, 587 aa, Homo sapiens
LHASQCSPRPACNPARPPQLCPLQLQPRAAPPRPDTSSPACSSRMAAAKAEMQLMSPLQISDPFGSFPHSPTMDNYPKLEEMMLLSNGAPQFLGAAGAPEGSGSNSSSSSSGGGGGGGGGSNSSSSSSTFNPQADTGEQPYEHLTAESFPDISLNNEKVLVETSYPSQTTRLPPITYTGRFSLEPAPNSGNTLWPEPLFSLVSGLVSMTNPPASSSSAPSPAASSASASQSPPLSCAVPSNDSSPIYSAAPTFPTPNTDIFPEPQSQAFPGSAGTALQYPPPAYPAAKGGFQVPMIPDYLFPQQQGDLGLGTPDQKPFQGLESRTQQPSLTPLSTIKAFATQSGSQDLKALNTSYQSQLIKPSRMRKYPNRPSKTPPHERPYACPVESCDRRFSRSDELTRHIRIHTGQKPFQCRICMRNFSRSDHLTTHIRTHTGEKPFACDICGRKFARSDERKRHTKIHLRQKDKKADKSVVASSATSSLSSYPSPVATSYPSPVTTSYPSPATTSYPSPVPTSFSSPGSSTYPSPVHSGFPSPSVATTYSSVPPAFPAQVSSFPSSAVTNSFSASTGLSDMTATFSPRTIEIC

SEQ ID NO: 65490 - protein, 14 aa, Homo sapiens
ILLVRGLCMIMGVD

SEQ ID NO: 65491 - protein, 29 aa, Homo sapiens
IVWTSFVGIQVILTYLLRRPEIKPFASGM

SEQ ID NO: 65492 - protein, 76 aa, Homo sapiens
MSISLSSLILLPIWINMAQIQQGGPDEKEKTTALKDLLSRIDLDELMKKDEPPLDFPDTLEGFEYAFNENHHEVCI

SEQ ID NO: 65493 - protein, 29 aa, Homo sapiens
IVWTSFVGIQVILTYLLRRPEIKPFASGM

SEQ ID NO: 65494 - protein, 276 aa, Homo sapiens
TRVPVLRLLLGSALVGRLLDSLKRDYAGKPQPPIKSERRNPPSYAMAGKKVLIVYAHQEPKSFNGSLKNVAVDELSRQGCTVTVSDLYAMNLEPRATDKDITGTLSNPEVFNYGVETHEAYKQRSLASDITDEQKKVREADLVIFQFPLYWFSVPAILKGWMDRVLCQGFAFDIPGFYDSGLLQGKLALLSVTTGGTAEMYTKTGVNGDSRYFLWPLQHGTLHFCGFKVLAPQISFAPEIASEEERKGMVAAWSQRLQTIWKEEPIPCTAHWHFGQ

SEQ ID NO: 65495 - protein, 51 aa, Homo sapiens
ITGMHRSLLLMYGLCSPTAISTIPQITMLWQWHESYRMYLSSVMPRCQMNH

SEQ ID NO: 65496 - protein, 21 aa, Homo sapiens
IGIFVFFSSAEFLVPRLVLGT

SEQ ID NO: 65497 - protein, 325 aa, Homo sapiens
LDGTMAPAFLLLLLLWPQGCVSGPSADSVYTKVRLLEGETLSVQCSYKGYKNRVEGKVWCKIRKKKCEPGFARVWVKGPRYLLQDDAQAKVVNITMVALKLQDSGRYWCMRNTSGILYPLMGFQLDVSPAPQTERNIPFTHLDNILKSGTVTTGQAPTSGPDAPFTTGVMVFTPGLITLPRLLASTRPASKTGYSFTATSTTSQGPRRTMGSQTVTASPSNARDSSAGPESISTKSGDLSTRSPTTGLCLTSRSLLNRLPSMPSIRHQDVYSTVLGVVLTLLVLMLIMVYGFWKKRHMASYSMCSDPSTRDPPGRPEPYVEVYLI

SEQ ID NO: 65498 - protein, 33 aa, Homo sapiens; identical to SEQ ID NO: 64212

SEQ ID NO: 65499 - protein, 29 aa, Homo sapiens
LGYVYLNSLVVLVSAGFCQNEDTVFSFVS

SEQ ID NO: 65500 - protein, 21 aa, Homo sapiens
IIFLPFWSAYVPLQFLFANAV

SEQ ID NO: 65501 - protein, 9 aa, Homo sapiens
VRALLLLMM

SEQ ID NO: 65502 - protein, 22 aa, Homo sapiens
VRALLLLMMKLLRRTLKEKPIK

SEQ ID NO: 65503 - protein, 95 aa, Homo sapiens
VAAFLSLVALLRRRRNEAEAERVKTKTAAKYGLSAQPRLVDIIAAVPPQYRKVLMPKLKAKPIRTASGIAVVAVMCKPHRCPHISFTGNICVQPP

SEQ ID NO: 65504 - protein, 49 aa, Homo sapiens
RLPKTLLVYVAPLCVLGSEVLEALAGAAPHSLFFKDALRDQGVLASPQL

SEQ ID NO: 65505 - protein, 628 aa, Homo sapiens
LAALLLAASVLSAALLAPGGSSGRDAQAAPPRDLDKKRHAELKMDQALLLIHNELLWTNLTVYWKSECCYHCLFQVLVNVPQSPKAGKPSAAAASVSTQHGSILQLNDTLEEKEVCRLEYRFGEFGNYSLLVKNIHNGVSEIACDLAVNEDPVDSNLPVSIAFLIGLAVIIVISFLRLLLSLDDFNNWISKAISSRETDRLINSELGSPSRTDPLDGDVQPATWRLSALPPRLRSVDTFRGIALILMVFVNYGGGKYWYFKHASWNGLTVADLVFPWFVFIMGSSIFLSMTSILQRGCSKFRLLGKIAWRSFLLICIGIIIVNPNYCLGPLSWDKVRIPGVLQRLGVTYFVVAVLELLFAKPVPEHCASERSCLSLRDITSSWPQWLLILVLEGLWLGLTFLLPVPGCPTGYLGPGGIGDFGKYPNCTGGAAGYIDRLLLGDDHLYQHPSSAVLYHTEVAYDPEGILGTINSIVMAFLGVQAGKILLYYKARTKDILIRFTAWCCILGLISVALTKVSENEGFIPVNKNLWSLSYVTTLSSFAFFILLVLYPVVDVKGLWTGTPFFYPGMNSILVYVGHEVFENYFPFQWKLKDNQSHKEHLTQNIVATALWVLIAYILYRKKIFWKI

SEQ ID NO: 65506 - protein, 45 aa, Homo sapiens
LLLPAESRSSVFALRAFNVELAQAGLLLLLSCCTVCHWDLNTKHC

SEQ ID NO: 65507 - protein, 80 aa, Homo sapiens [sequence omitted]

SEQ ID NO: 65508 - protein, 373 aa, Homo sapiens
VLVVAAVLLLVSAESALITQQDLAPQQRAAPQQKRSSPSEGLCPPGHHISEDGRDCISCKYGQDYSTHWNDLLFCLRCTRCDSGEVELSPCTTTRNTVCQCEEGTFREEDSPEMCRKCRTGCPRGMVKVGDCTPWSDIECVHKESGIIIGVTVAAVVLIVAVFVCKSLLWKKVLPYLKGICSGGGGDPERVDRSSQRPGAEDNVLNEIVSILQPTQVPEQEMEVQEPAEPTGVNMLSPGESEHLLEPAEAERSQRRRLLVPANEGDPTETLRQCFDDFADLVPFDSWEPLMRKLGLMDNEIKVAKAEAAGHRDTLYTMLIKWVNKTGRDASVHTLLDALETLGERLAKQKIEDHLLSSGKFMYLEGNADSAMS

SEQ ID NO: 65509 - protein, 9 aa, Homo sapiens
VASVLLLWW

SEQ ID NO: 65510 - protein, 15 aa, Homo sapiens
LPSLLMLFPFLLKAS

SEQ ID NO: 65511 - protein, 290 aa, Homo sapiens
TDDLEGDVSTTWHSNDDDVYRASPIDRSILPTAPRAAREPNIDRSHLPKSPPYTAFLGNLPYDVTEESIKEFFRGLNISAVRLPCEPSNPVRLKGFGYAEFEDLDSLLSALSLKEESLGNRRIRVDVADQAQDKDRDDCSFGRDRNRDSDKTGTDWRARPATDSFDDYPPRRGDDSFGDKYRDRYDSDRYRDGYRDGYRDGQRRDMDPYGGRDRYDDRGSRDYDRGYDSRIGSGRRAFGSGYRRDDVSEEAGTTMKTDMTDGMIGLGAPEMITLWMIIGVMVEVPPKDPN

SEQ ID NO: 65512 - protein, 1135 aa, Homo sapiens
LADFLFCTYIILYILYMMTSVSSDHCRGAREKPQISAAQSTQPQKQVVQATAEQMRLAQVIFDKNDSDFEAKVKQLMEVTGKNQDECIVALHDCNGDVNKAINILLEGNSDTTSWETVGCKKKNFAKENSENKENREKKSEKESSRGRGNNNRKGRGGNRGREFRGEENGIDCNQVDKPSDRGKRARGRGFGRGRGRGAGRFSTQGMGTFNPADYSDSTSTDVCGTKLVVWEAAQNGADEGTELASNTHNIAQDLSNKSSYGLKGAWKNSVEEWTTEDWTEDLSETKVFTASSAPAENHILPGQSIDLVALLQKPVPHSQASEANSFETSQQQGFGQALVFTNSQHNNQMAPGTGSSTAVNSCSPQSLSSVLGSGFGELAPPKMANITSSQILDQLKAPSLGQFTTTPSTQQNSTSHPTTTTSWDLKPPTSQSSVLSHLDFKSQPEPSPVLSQLSQRQQHQSQAVTVPPPGLESFPSQAKLRESTPGDSPSTVNKLLQLPSTTIENISVSVHQPQPKHIKLAKRRIPPASKIPASAVEMPGSADVTGLNVQFGALEFGSEPSLSEFGSAPSSENSNQIPISLYSKSLSEPLNTSLSMTSAVQNSTYTTSVITSCSLTSSSLNSASPVAMSSSYDQSSVHNRIPYQSPVSSSESAPGTIMNGHGGGRSQQTLDTPKTTGPPSALPSVSSLPSTTSCTALLPSTSQHTGDLTSSPLSQLSSSLSSHQSSLSAHAALSSSTSHTHASVESASSHQSSATFSTAATSVSSSASSGASLSSSMNTANSLCLGGTPASASSSSSRAAPLVTSGKAPPNLPQGVPPLLHNQYLVGPGGLLPAYPIYGYDELQMLQSRLPVDYYGIPFAAPTALASRDGSLANNPYPGDVTKFGRGDSASPAPATTPAQPQQSQSQTHHTAQQPFVNPALPPGYSYTGLPYYTGMPSAFQYGPTMFVPPASAKQHGVNLSTPTPPFQQASGYGQHGYSTGYDDLTQGTAAGDYSKGGYAGSSQAPNKSAGSGPGKGVSVSSSTTGLPDMTGSVYNKTQTFDKQGFHAGTPPPFSLPSVLGSTGPLASGAAPGYAPPPFLHILPAHQQPHSQLLHHHLPQDAQSGSGQRSQPSSLQPKSQASKPAYGNSPYWTN

SEQ ID NO: 65513 - protein, 15 aa, Homo sapiens
LFLPALVLLQVTYSS

SEQ ID NO: 65514 - protein, 13 aa, Homo sapiens
LSAIWMILNFLQS

SEQ ID NO: 65515 - protein, 20 aa, Homo sapiens
ILKTIKSQNLLVLQILVVIS

SEQ ID NO: 65516 - protein, 9 aa, Homo sapiens
IFFFLFFLF

SEQ ID NO: 65517 - protein, 27 aa, Homo sapiens
INILAVVVTMTQLMCVKLEARYVQEVK

SEQ ID NO: 65518 - protein, 38 aa, Homo sapiens
TPPAAARRSQVPACAAAAAIPHASRARPTLPIPGTKTG

SEQ ID NO: 65519 - protein, 1460 aa, Homo sapiens
LATWALGLAGLVGEAEDSEGEEEEEEEEPPLWLEKRFLRLSDGALLLRVLGIIAPSSRGGPRMLRGLDGPAAWRVWNLNHLWGRLRDFYQEELQLLILSPPPDLQTLGFDPLSEEAVEQLEGVLRLLLGASVQCEHRELFIRHIQGLSLEVQSELAAAIQEVTQPGAGVVLALSGPDPGELAPAELEMLSRSLMGTLSKLARERDLGAQRLAELLLEREPLCLRPEAPSRAPAEGPSHHLALQLANAKAQLRRLRQELEEKAELLLDSQAEVQGLEAEIRRLRQEAQALSGQAKRAELYREEAEALRERAGRLPRLQEELRRCRERLQAAEAYKSQLEEERVLSGVLEASKALLEEQLEAARERCARLHETQRENLLLRTRLGEAHAELDSLRHQVDQLAEENVELELELQRSLEPPPGSPGEAPLAGAAPSLQDEVREAEAGRLRTLERENRELRGLLQVLQGQPGGQHPLLEAPREDPVLPVLEEAPQTPVAFDHSPQGLVQKARDGGPQALDLAPPALDSVLEASAECPQAPDSDPQEAESPLQAAAMDPQASDWSPQESGSPVETQESPEKAGRRSSLQSPASVAPPQGPGTKIQAPQLLGGETEGREAPQGELVPEAWGLRQEGPEHKPGPSEPSSVQLEEQEGPNQGLDLATGQAEAREHDQRLEGTVRDPAWQKPQQKSEGALEVQVWEGPIPGESLASGVAEQEALREEVAQLRRKAEALGDELEAQARKLEAQNTEAARLSKELAQARRAEAEAHREAEAQAWEQARLREAVEAAGQELESASQEREALVEALAAAGRERRQWEREGSRLRAQSEAAEERMQVLESEGRQHLEEAERERREKEALQAELEKAVVRGKELGDRLEHLQRELEQAALERQEFLREKESQHQRYQGLEQRLEAELQAAATSKEEALMELKTRALQLEEELFQLRQGPAGLGPKKRAEPQLVETQNVRLIEVERSNAMLVAEKAALQGQLQHLEGQLGSLQGRAQELLLQSQRAQEHSSRLQAEKSVLEIQGQELHRKLEVLEEEVRAARQSQEETRGQQQALLRDHKALAQLQRRQEAELEGLLVRHRDLKANMRALELAHRELQGRHEQLQAQRASVEAQEVALLAERERLMQDGHRQRGLEEELRRLQSEHDRAQMLLAELSRERGELQGERGELRGRLARLELERAQLEMQSQQLRESNQQLDLSACRLTTQCELLTQLRSAQEEENRQLLAEVQALSRENRELLERSLESRDHLHREQREYLDQLNALRREKQKLVEKIMDQYRVLEPVPLPRTKKGSWLADKVKRLMRPRREGGPPGGLRLGADGAGSTESLGGPPETELPEGREADGTGSPSPAPMRRAQSSLCLRDETLAGGQRRKLSSRFPVGRSSESFSPGDTPRQRFRQRHPGPLGAPVSHSKGPGVGWENSAETLQEHETDANREGPEVQEPEKRPLTPSLSQ

SEQ ID NO: 65520 - protein, 14 aa, Homo sapiens
TLVVLSWCQWVMFG

SEQ ID NO: 65521 - protein, 17 aa, Homo sapiens
IITITIVTAVAITKSAI

SEQ ID NO: 65522 - protein, 13 aa, Homo sapiens
MGPPHRLSLHTRT

SEQ ID NO: 65523 - protein, 14 aa, Homo sapiens
MFAEKPTLFLLAAM

SEQ ID NO: 65524 - protein, 1235 aa, Homo sapiens
VCFLGVVVTIVSAFQFGEVVLEWSRDQYHVLFDSYRDNIAGKSFQNRLCLPMPIDVVYTWVNGTDLELLKELQQVREQMEEEQKAMREILGKNTTEPTKKSEKQLECLLTHCIKVPMLVLDPALPANITLKDLPSLYPSFHSASDIFNVAKPKNPSTNVSVVVFDSTKDVEDAHSGLLKGNSRQTVWRGYLTTDKEVPGLVLMQDLAFLSGFPPTFKETNQLKTKLPENLSSKVKLLQLYSEASVALLKLNNPKDFQELNKQTKKNMTIDGKELTISPAYLLWDLSAISQSKQDEDISASRFEDNEELRYSLRSIERHAPWVRNIFIVTNGQIPSWLNLDNPRVTIVTHQDVFRNLSHLPTFSSPAIESHIHRIEGLSQKFIYLNDDVMFGKDVWPDDFYSHSKGQKVYLTWPVPNCAEGCPGSWIKDGYCDKACNNSACDWDGGDCSGNSGGSRYIAGGGGTGSIGVGQPWQFGGGINSVSYCNQGCANSWLADKFCDQACNVLSCGFDAGDCGQDHFHELYKVILLPNQTHYIIPKGECLPYFSFAEVAKRGVEGAYSDNPIIRHASIANKWKTIHLIMHSGMNATTIHFNLTFQNTNDEEFKMQITVEVDTREGPKLNSTAQKGYENLVSPITLLPEAEILFEDIPKEKRFPKFKRHDVNSTRRAQEEVKIPLVNISLLPKDAQLSLNTLDLQLEHGDITLKGYNLSKSALLRSFLMNSQHAKIKNQAIITDETNDSLVAPQEKQVHKSILPNSLGVSERLQRLTFPAVSVKVNGHDQGQNPPLDLETTARFRVETHTQKTIGGNVTKEKPPSLIVPLESQMTKEKKITGKEKENSRMEENAENHIGVTEVLLGRKLQHYTDSYLGFLPWEKKKYFQDLLDEEESLKTQLAYFTDSKNTGRQLKDTFADSLRYVNKILNSKFGFTSRKVPAHMPHMIDRIVMQELQDMFPEEFDKTSFHKVRHSEDMQFAFSYFYYLMSAVQPLNISQVFDEVDTDQSGVLSDREIRTLATRIHELPLSLQDLTGLEHMLINCSKMLPADITQLNNIPPTQESYYDPNLPPVTKSLVTNCKPVTDKIHKAYKDKNKYRFEIMGEEEIAFKMIRTNVSHVVGQLDDIRKNPRKFVCLNDNIDHNHKDAQTVKAVLRDFYESMFPIPSQFELPREYRNRFLHMHELQEWRAYRDKLKFWTHCVLATLIMFTIFSFFAEQLIALKRKIFPRRRIHKEASPNRIRV

SEQ ID NO: 65525 - protein, 16 aa, Homo sapiens
IVLLVILGIILATTLS

SEQ ID NO: 65526 - protein, 239 aa, Homo sapiens
VWITVIFIFRVMILVVAAQEVWGDEQEDFVCNTLQPGCKNVCYDHFFPVSHIRLWALQLIFVSTPALLVAMHVAYYRHETTRKFRRGEKRNDFKDIEDIKKQKVRIEGSLWWTYTSSIFFRIIFEAAFMYVFYFLYNGYHLPWVLKCGIDPCPNLVDCFISRPTEKTVFTIFMISASVICMLLNVAELCYLLLKVCFRRSKRAQTQKNHPNHALKESKQNEMNELISDSGQNAITGFPS

SEQ ID NO: 65527 - protein, 74 aa, Homo sapiens
LNLRRFLRGAAWMLLSPTRCISCCHQESSLASQGLRKYHQSDSTVLCPLRGRRKRMPCRTAHSVPLCSRTPSIM

SEQ ID NO: 65528 - protein, 75 aa, Homo sapiens
LKLFFCLFCSLGLGEDLEVWAPSSPLETAMVSSNHHHLTTLHGGCPLRAASAAALSSPLYLSAPEPQSSFRPRDR

SEQ ID NO: 65529 - protein, 66 aa, Homo sapiens
IVTTGLVLGWFGWDVPVILRNSEETQFSTRVFKKQMRQVKNPFGLEITNPSSASITNFHGVSDSYS

SEQ ID NO: 65530 - protein, 41 aa, Homo sapiens
LFWVLAFSVELLWQSSCLKEYMPFMKIFLRENTTKQVKHIM

SEQ ID NO: 65531 - protein, 20 aa, Homo sapiens
MTFLLFAFGLASFIFLIHRG

SEQ ID NO: 65532 - protein, 18 aa, Homo sapiens
MITIQLRNHLQDTQQLKN

SEQ ID NO: 65533 - protein, 16 aa, Homo sapiens
TTLAPLITLTILHGMM

SEQ ID NO: 65534 - protein, 33 aa, Homo sapiens
MPTLMPLLYQWVLMKKLFMPNQLPYRHGSLVMN

SEQ ID NO: 65535 - protein, 21 aa, Homo sapiens
LRHTALHVMLYMTTWVRQQGS

SEQ ID NO: 65536 - protein, 18 aa, Homo sapiens
IKHWLILWIMRTTPTIPL

SEQ ID NO: 65537 - protein, 11 aa, Homo sapiens
TGASWVLFLKL

SEQ ID NO: 65538 - protein, 554 aa, Homo sapiens
IAGVCGWLLLSGPCGVGLDLDSRLLGASAMRRSEVLAEESIVCLQKALNHLREIWELIGIPEDQRLQRTEVVKKHIKEEGETTILQLEKDLRTQVELMRKQKKERKQELKLLQEQDQELCEILCMPHYDIDSASVPSLEELNQFRQHVTTLRETKASRREEFVSIKRQIILCMEALDHTPDTSFERDVVCEDEDAFCLSLENIATLQKLLRQLEMQKSQNEAVCEGLRTQIRELWDRLQIPEEEREAVATIMSGSKAKVRKALQLEVDRLEELKMQNMKKVIEAIRVELVQYWDQCFYSQEQRQAFAPFCAEDYTESLLQLHDAEIVRLKNYYEVHKELFEGVQKWEETWRLFLEFERKASDPNRFTNRGGNLLKEEKQRAKLQKMLPKLEEELKARIELWEQEHSKAFMVNGQKFMEYVAEQWEMHRLEKERAKQERQLKNKKQTETEMLYGSAPRTPSKRRGLAPNTPGKARKLNTTTMSNATANSSIRPIFGGTVYHSPVSRLPPSGSKPVAASTCSGKKTPRTGRHGANKENLELNGSILSARTFKGFQI

SEQ ID NO: 65539 - protein, 85 aa, Homo sapiens
LLASLLSLVSAVSACRVFKLWPLSFLGSKLSTCEQLRHRLEHLTLIFSTRKAENPAQLMRCGPALVSAGLGACPLAPSPSPSAPR

SEQ ID NO: 65540 - protein, 233 aa, Homo sapiens
IGQFRSTKWLLFLVPAMSCAGAAAAPRLWRLRPGARRSLSAYGRRTSVRFRSSGMTLDNISRAAVDRIIRVDHAGEYGANRIYAGQMAVLGRTSVGPVIQKMWDQEKDHLKKFNELMVTFRVRPTVLMPLWNVLGFALGAGTALLGKEGAMACTVAVEESIAHHYNNQIRTLMEEDPEKYEELLQLIKKFRDEELEHHDIGLDHDAELAPAYAVLKSIIQAGCRVAIYLSERL

SEQ ID NO: 65541 - protein, 10 aa, Homo sapiens
VFCSAAWILA

SEQ ID NO: 65542 - protein, 10 aa, Homo sapiens
VFCSAAWILA

SEQ ID NO: 65543 - protein, 9 aa, Homo sapiens
IILPVFLIA

SEQ ID NO: 65544 - protein, 17 aa, Homo sapiens
LIIAVLMWLPSSVILSL

SEQ ID NO: 65545 - protein, 38 aa, Homo sapiens
ILEFFWVFFFFFETVLLYCPGWSVVAQSQLIASSITQA

SEQ ID NO: 65546 - protein, 1517 aa, Homo sapiens
LGLGGWVGVAFWSAGELFSLLQVRGKGMPNSERHGGKKDGSGGASGTLQPSSGGGSSNSRERHRLVSKHKRHKSKHSKDMGLVTPEAASLGTVIKPLVEYDDISSDSDTFSDDMAFKLDRRENDERRGSDRSDRLHKHRHHQHRRSRDLLKAKQTEKEKSQEVSSKSGSMKDRISGSSKRSNEETDDYGKAQVAKSSSKESRSSKLHKEKTRKERELKSGHKDRSKSHRKRETPKSYKTVDSPKRRSRSPHRKWSDSSKQDDSPSGASYGQDYDLSPSRSHTSSNYDSYKKSPGSTSRRQSVSPPYKEPSAYQSSTRSPSPYSRRQRSVSPYSRRRSSSYERSGSYSGRSPSPYGRRRSSSPFLSKRSLSRSPLPSRKSMKSRSRSPAYSRHSSSHSKKKRSSSRSRHSSISPVRLPLNSSLGAELSRKKKERAAAAAAAKMDGKESKGSPVFLPRKENSSVEAKDSGLESKKLPRSVKLEKSAPDTELVNVTHLNTEVKNSSDTGKVKLDENSEKHLVKDLKAQGTRDSKPIALKEEIVTPKETETSEKETPPPLPTIASPPPPLPTTTPPPQTPPLPPLPPIPALPQQPPLPPSQPAFSQVPASSTSTLPPSTHSKTSAVSSQANSQPPVQVSVKTQVSVTAAIPHLKTSTLPPLPLPPLLPGDDDMDSPKETLPSKPVKKEKEQRTRHLLTDLPLPPELPGGDLSPPDSPEPKAITPPQQPYKKRPKICCPRYGERRQTESDWGKRCVDKFDIIGIIGEGTYGQVYKAKDKDTGELVALKKVRLDNEKEGFPITAIREIKILRQLIHRSVVNMKEIVTDKQDALDFKKDKGAFYLVFEYMDHDLMGLLESGLVHFSEDHIKSFMKQLMEGLEYCHKKNFLHRDIKCSNILLNNSGQIKLADFGLARLYNSEESRPYTNKVITLWYRPPELLLGEERYTPAIDVWSCGCILGELFTKKPIFQANLELAQLELISRLCGSPCPAVWPDVIKLPYFNTMKPKKQYRRRLREEFSFIPSAALDLLDHMLTLDPSKRCTAEQTLQSDFLKDVELSKMAPPDLPHWQDCHELWSKKRRRQRQSGVVVEEPPPSKTSRKETTSGTSTEPVKNSSPAPPQPAPGKVESGAGDAIGLADITQQLNQSELAVLLNLLQSQTDLSIPQMAQLLNIHSNPEMQQQLEALNQSISALTEATSQQQDSETMAPEESLKEAPSAPVILPSAEQTTLEASSTPADMQNILAVLLSQLMKTQEPAGSLEENNSDKNSGPQGPRRTPTMPQEEAAACPPHILPPEKRPPEPPGPPPPPPPPPLVEGDLSSAPQELNPAVTAALLQLLSQPEAEPPGHLPHEHQALRPMEYSTRPRPNRTYGNTDGPETGFSAIDTDERNSGPALTESLVQTLVKNRTFSGSLSHLGESSSYQGTGSVQFPGDQDLRFARVPLALHPVVGQPFLKAEGSSNSVVHAETKLQNYGELGPGTTGASSSGAGLHWGGPTQSSAYGKLYRGPTRVPPRGGRGRGVPY

SEQ ID NO: 65547 - protein, 16 aa, Homo sapiens
VRCKISLVFFISFSFL

SEQ ID NO: 65548 - protein, 20 aa, Homo sapiens
IFLLSAPCLALSFLIPLEFS

SEQ ID NO: 65549 - protein, 93 aa, Homo sapiens
LAVGTPRGALARARPPGTTFPSGPSGRRRGCGQVTRSPGRSESGWEGGAAPAAAAGTWPFNPLRGPLNLERINSWRFSGGCALPYSDRFLGVS

SEQ ID NO: 65550 - protein, 10 aa, Homo sapiens
LIRVKTAGRS

SEQ ID NO: 65551 - protein, 23 aa, Homo sapiens
IHMFGFLSLLFMSCICILSATEE

SEQ ID NO: 65552 - protein, 15 aa, Homo sapiens
VVSVFLLFTLPESVL

SEQ ID NO: 65553 - protein, 41 aa, Homo sapiens
IMVCRALAAAFLLLEAAKGGSGESTWSFQRWGSGCSRPKPS

SEQ ID NO: 65554 - protein, 33 aa, Homo sapiens
KTWRQLFTMYTACTLLLLSWQQGFQWEGKVFPF

SEQ ID NO: 65555 - protein, 503 aa, Homo sapiens
LARLLAAFLLLAAQVACEYGMVHVVSQAGGPEGKDYCILYNPQWAHLPHDLSKASFLQLRNWTASLLCSAADLPARGFSNQIPLVARGNCTFYEKVRLAQGSGARGLLIVSRERLVPPGGNKTQYDEIGIPVALLSYKDMLDIFTRFGRTVRAALYAPKEPVLDYNMVIIFIMAVGTVAIGGYWAGSRDVKKRYMKHKRDDGPEKQEDEAVDVTPVMTCVFVVMCCSMLVLLYYFYDLLVYVVIGIFCLASATGLYSCLAPCVRRLPFGKCRIPNNSLPYFHKRPQARMLLLALFCVAVSVVWGVFRNEDQWAWVLQDALGIAFCLYMLKTIRLPTFKACTLLLLVLFLYDIFFVFITPFLTKSGSSIMVEVATGPSDSATREKLPMVLKVPRLNSSPLALCDRPFSLLGFGDILVPGLLVAYCHRFDIQVQSSRVYFVACTIAYGVGLLVTFVALALMQRGQPALLYLVPCTLVTSCAVALWRRELGVFWTGSGFAVNTSLL

SEQ ID NO: 65556 - protein, 79 aa, Homo sapiens
MPTAACPPVFPVPFLHEGISRQGKLKSLARYKTFPATKEVVPTCCFPSPAAARQGAQGGCLCSSTVQAACHPGPASSPE

SEQ ID NO: 65557 - protein, 64 aa, Homo sapiens
MGLGPGLLTGLLSGAVAGGALSPLPATRSTPTPPLPGQAGRRCWRGPRWRPGLGGARHEWAVAE

SEQ ID NO: 65558 - protein, 72 aa, Homo sapiens
MAGTSWALLPIWYSPAAPCAGSILGPLGLWELVQDLHLGPSCAGQMLRSGACLGTELLATASSNLIHSSDTR

SEQ ID NO: 65559 - protein, 45 aa, Homo sapiens
LTPPHSLLWTPRRLVPGRQAQPTPICTEKRSFGALPPRIKIQRVK

SEQ ID NO: 65560 - protein, 47 aa, Homo sapiens
TRPRAADGAVGREGGAAAALARHGDGKGVRADRQVRELGGHLPGYPT

SEQ ID NO: 65561 - protein, 27 aa, Homo sapiens
MPLPILKKVERNRPGSTSTLEKMLQEH

SEQ ID NO: 65562 - protein, 317 aa, Homo sapiens
LVLMVYISLVFGISYDSPDYTDESCTFKISLRNFRSILSWELKNHSIVPTHYTLLYTIMSKPEDLKVVKNCANTTRSFCDLTDEWRSTHEAYVTVLEGFSGNTTLFSCSHNFWLAIDMSFEPPEFEIVGFTNHINVMVKFPSIVEEELQFDLSLVIEEQSEGIVKKHKPEIKGNMSGNFTYIIDKLIPNTNYCVSVYLEHSDEQAVIKSPLKCTLLPPGQESESAESAKIGGIITVFLIALVLTSTIVTLKWIGYICLRNSLPKVLRQGLAKGWNAVAIHRCSHNALQSETPELKQSSCLSFPSSWDYKRASLCPSD

SEQ ID NO: 65563 - protein, 56 aa, Homo sapiens
RIWSLKICLTWYIRLLSQSQVTEHAFPTIYLQMHSILTLLELKRQIGEEDKINICK

SEQ ID NO: 65564 - protein, 241 aa, Homo sapiens
IDLFKNIFQLVGLDLFVFPYRVVATAPGCGVIECIPDCTSRDQLGRQTDFGMYDYFTRQYGDESTLAFQQARYNFIRSMAAYSLLLFLLQIKDRHNGNIMLDKKGHIIHIDFGFMFESSPGGNLGWEPDIKLTDEMVMIMGGKMEATPFKWFMEMCVQATWLCGEPGPYMDVVVSLVTIMLDTGLPCFRGQTIKLLKHRFSPNMTEREAANFIMKVIQSCFLSNRSRTYNMIQYYQNDIPY

SEQ ID NO: 65565 - protein, 55 aa, Homo sapiens
LVAKTLLFRSLTTLAGVRWLRPRLRPPQEQHPPGKDIFCSHRVGRACFLNLLGVS

SEQ ID NO: 65566 - protein, 42 aa, Homo sapiens
MLLAGLTSLLPTSALMVVPQDLEEEIQQHEAPVPSATAGPVL

SEQ ID NO: 65567 - protein, 17 aa, Homo sapiens
LFHASRFIFVLSTSLFL

SEQ ID NO: 65568 - protein, 682 aa, Homo sapiens
KTRWAAPPKKNAMAKRIKAKPTSDKPGSPYRSVTHFDSLAVIDIPGADTLDKLFDHAVSKFGKKDSLGTREILSEENEMQPNGKVFKKLILGNYKWMNYLEVNRRVNNFGSGLTALGLKPKNTIAIFCETRAEWMIAAQTCFKYNFPLVTLYATLGKEAVVHGLNESEASYLITSVELLESKLKTALLDISCVKHIIYVDNKAINKAEYPEGFEIHSMQSVEELGSNPENLGIPPSRPTPSDMAIVMYTSGSTGRPKGVMMHHSNLIAGMTGQCERIPGLGPKDTYIGYLPLAHVLELTAEISCFTYGCRIGYSSPLTLSDQSSKIKKGSKGDCTVLKPTLMAAVPEIMDRIYKNVMSKVQEMNYIQKTLFKIGYDYKLEQIKKGYDAPLCNLLLFKKVKALLGGNVRMMLSGGAPLSPQTHRFMNVCFCCPIGQGYGLTESCGAGTVTEVTDYTTGRVGAPLICCEIKLKDWQEGGYTINDKPNPRGEIVIGGQNISMGYFKNEEKTAEDYSVDENGQRWFCTGDIGEFHPDGCLQIIDRKKDLVKLQAGEYVSLGKVEAALKNCPLIDNICAFAKSDQSYVISFVVPNQKRLTLLAQQKGVEGTWVDICNNPAMEAEILKEIREAANAMKLERFEIPIKVRLSPEPWTPETGLVTDAFKLKRKELRNHYLKDIERMYGGK

SEQ ID NO: 65569 - protein, 199 aa, Homo sapiens
ISGMKVPWLYVGMVFSAFCWHIEDHWSYSINYLHWGEPKTWYGVPSLAAEHLEEVMKMLTPELFDSQPDLLHQLVTLMNPNTLMSHGVPVVRTNQCAGEFVITFPRAYHSGFNQGYNFAEAVNFCTADWLPAGRQCIEHYRRLRRYCVFSHEELICKMAAFPETLDLNLAVAVHKEMFIMVQEERRLRKALLEKLSLQG

SEQ ID NO: 65570 - protein, 12 aa, Homo sapiens
ITSEVFFFAGFF

SEQ ID NO: 65571 - protein, 83 aa, Homo sapiens
VPAFGLRLLLATVLQAVSAFGAEFSSEACRELGFSSNLLCSSCDLLGQFNLLQLDPDCRGCCQEEAQFETKKLYAGAILEVCG

SEQ ID NO: 65572 - protein, 37 aa, Homo sapiens
VWIGGSILASLSTFQQMWITKQEYDEAGPSIVHRKCF

SEQ ID NO: 65573 - protein, 25 aa, Homo sapiens
MLGVSLFLLVVLYHYVAVNNPKKQE

SEQ ID NO: 65574 - protein, 18 aa, Homo sapiens
TVAAILLGLAVTAMKSRP

SEQ ID NO: 65575 - protein, 40 aa, Homo sapiens
VLSSVCLLVIVGLLMFRYHRRGGYDVENEEKVKLGMTNSH

SEQ ID NO: 65576 - protein, 463 aa, Homo sapiens
IAGAVIGAVLAVFGGILMPVGDLLIQKTIKKQVVLEEGTIAFKNWVKTGTEVYRQFWIFDVQNPQEVMMNSSNIQVKQRGPYTYRVRFLAKENVTQDAEDNTVSFLQPNGAIFEPSLSVGTEADNFTVLNLAVAAASHIYQNQFVQMILNSLINKSKSSMFQVRTLRELLWGYRDPFLSLVPYPVTTTVGLFYPYNNTADGVYKVFNGKDNISKVAIIDTYKGKRNLSYWESHCDMINGTDAASFPPFVEKSQVLQFFSSDICRSIYAVFESDVNLKGIPVYRFVLPSKAFASPVENPDNYCFCTEKIISKNCTSYGVLDISKCKEGRPVYISLPHFLYASPDVSEPIDGLNPNEEEHRTYLDIEPITGFTLQFAKRLQVNLLVKPSEKIQVLKNLKRNYIVPILWLNETGTIGDEKANMFRSQVTGKINLLGLIEMILLSVGVVMFVAFMISYCACRSKTIK

SEQ ID NO: 65577 - protein, 319 aa, Homo sapiens
MARGLAVLLVLFLHIKNLPAQAADTCPEVKVVGLEGSDKLTILRGCPGLPGAPGPKGEAGVIGERGERGLPGAPGKAGPVGPKGDRGEKGMRGEKGDAGQSQSCATGPRNCKDLLDRGYFLSGWHTIYLPDCRPLTVLCDMDTDGGGWTVFQRRMDGSVDFYRDWAAYKQGFGSQLGEFWLGNDNIHALTAQGSSELRVDLVDFEGNHQFAKYKSFKVADEAEKYKLVLGAFVGGSAGNSLTGHNNNFFSTKDQDNDVSSSNCAEKFQGAWWYADCHASNLNGLYLMGPHESYANGINWSAAKGYKYSYKVSEMKVRPA

SEQ ID NO: 65578 - protein, 183 aa, Homo sapiens
LVSVALMYLGSLAFLGADTARLDVASEFRKKWNKWALSRGKRELRMSSSYPTGLADVKAGPAQTLIRPQDMKGASRSPEDSSPDAARIRVKRYRQSMNNFQGLRSFGCRFGTCTVQKLAHQIYQFTDKDKDNVAPRSKISPQGYGRRRRRSLPEAGPGRTLVSSKPQAHGAPAPPSGSAPHFL

SEQ ID NO: 65579 - protein, 748 aa, Homo sapiens
LLLLLVGLTAPALALAGYIEALAANAGTGFAVAEPQIAMFCGKLNMHVNIQTGKWEPDPTGTKSCFETKEEVLQYCQEMYPELQITNVMEANQRVSIDNWCRRDKKQCKSRFVTPFKCLVGEFVSDVLLVPEKCQFFHKERMEVCENHQHWHTVVKEACLTQGMTLYSYGMLLPCGVDQFHGTEYVCCPQTKIIGSVSKEEEEEDEEEEEEEDEEEDYDVYKSEFPTEADLEDFTEAAVDEDDEDEEEGEEVVEDRDYYYDTFKGDDYNEENPTEPGSDGTMSDKEITHDVKAVCSQEAMTGPCRAVMPRWYFDLSKGKCVRFIYGGCGGNRNNFESEDYCMAVCKAMIPPTPLPTNDVDVYFETSADDNEHARFQKAKEQLEIRHRNRMDRVKKEWEEAELQAKNLPKAERQTLIQHFQAMVKALEKEAASEKQQLVETHLARVEAMLNDRRRMALENYLAALQSDPPRPHRILQALRRYVRAENKDRLHTIRHYQHVLAVDPEKAAQMKSQVMTHLHVIEERRNQSLSLLYKVPYVAQEIQEEIDELLQEQRADMDQFTASISETPVDVRVSSEESEEIPPFHPFHPFPALPENEDTQPELYHPMKKGSGVGEQDGGLIGAEEKVINSKNKVDENMVIDETLDVKEMIFNAERVGGLEEERESVGPLREDFSLSSSALIGLLVIAVAIATVIVISLVMLRKRQYGTISHGIVEVDPMLTPEERHLNKMQNHGYENPTYKYLEQMQI

SEQ ID NO: 65580 - protein, 65 aa, Homo sapiens
IIVTDVIATLLLALGVFCFAGHETGRLSGAADTQALLRNDQVYQPLRDRDDAQYSHLGGNWARNK

SEQ ID NO: 65581 - protein, 40 aa, Homo sapiens
IKILLFVVVAVFLFLVYQAMETNQVNPFSNFLHVDPRKSN

SEQ ID NO: 65582 - protein, 44 aa, Homo sapiens
IIMIGTLTALQWFIYDSVKVYFRLPRPPPPEMPESLKKKLGLTQ

SEQ ID NO: 65583 - protein, 61 aa, Homo sapiens
LLAIFVALFFLTKKRRQRQRLAVSSRGENLVHQIQYREMNSCLNADDLDLMNSSGGHSEPH

SEQ ID NO: 65584 - protein, 10 aa, Homo sapiens
LALLLASTLA

SEQ ID NO: 65585 - protein, 62 aa, Homo sapiens [sequence omitted]

SEQ ID NO: 65586 - protein, 225 aa, Homo sapiens
ILGFQLGPRFAEDGSQGDRNMWLLPALLLLCLSGCLSLKGPGSVTGTAGDSLTVWCQYESMYKGYNKYWCRGQYDTSCESIVETKGEEKVERNGRVSIRDHPEALAFTVTMQNLNEDDAGSYWCKIQTVWVLDSWSRDPSDLVRVYVSPAITTPRRTTHPATPPIFLVVNPGRNLSTGEVLTQNSGFRLSSPHFLLVVLLKLPLLLSMLGAVFWVNRPQWAPPGR

SEQ ID NO: 65587 - protein, 36 aa, Homo sapiens
VGICLGVGLLELGFMTLSIFLCRNLDHVYNRLARYR

SEQ ID NO: 65588 - protein, 330 aa, Homo sapiens
LLPLLLLLHTCVPASWGLRCMQCKTNGDCRVEECALGQDLCRTTIVRLWEEGEELELVEKSCTHSEKTNRTLSYRTGLKITSLTEVVCGLDLCNQGNSGRAVTYSRSRYLECISCGSSDMSCERGRHQSLQCRSPEEQCLDVVTHWIQEGEEGRPKDDRHLRGCGYLPGCPGSNGFHNNDTFHFLKCCNTTKCNEGPILELENLPQNGRQCYSCKGNSTHGCSSEETFLIDCRGPMNQCLVATGTHEPKNQSYMVRGCATASMCQHAHLGDAFSMNHIDVSCCTKSGCNHPDLDVQYRSGAAPQPGPAHLSLTITLLMTARLWGGTLLWT

SEQ ID NO: 65589 - protein, 14 aa, Homo sapiens
VILLISFLIFLIVG

SEQ ID NO: 65590 - protein, 138 aa, Homo sapiens
LLLLAILAVALAVSPAAGSSPGKPPRLVGGPMDASVEEEGVRRALDFAVGEYNKASNDMYHSRALQVVRARKQIVAGVNYFLDVELGRTTCTKTQPNLDNCPFHDQPHLKRKAFCSFQIYAVPWQGTMTLSKSTCQDA

SEQ ID NO: 65591 - protein, 44 aa, Homo sapiens [sequence omitted]

SEQ ID NO: 65592 - protein, 500 aa, Homo sapiens
LCFLLLAVAMSFFGSALSIDETRAHLLLKEKMMRLGGRLVLNTKEELANERLMTLKIAEMKEAMRTLIFPPSMHFFQAKHLIERSQVFNILRMMPKGAALHLHDIGIVTMDWLVRNVTYRPHCHICFTPRGIMQFRFAHPTPRPSEKCSKWILLEDYRKRVQNVTEFDDSLLRNFTLVTQHPEVIYTNQNVVWSKFETIFFTISGLIHYAPVFRDYVFRSMQEFYEDNVLYMEIRARLLPVYELSGEHHDEEWSVKTYQEVAQKFVETHPEFIGIKIIYSDHRSKDVAVIAESIRMAMGLRIKFPTVVAGFDLVGHEDTGHSLHDYKEALMIPAKDGVKLPYFFHAGETDWQGTSIDRNILDALMLNTTRIGHGFALSKHPAVRTYSWKKDIPIEVCPISNQVLKLVSDLRNHPVATLMATGHPMVISSDDPAMFGAKGLSYDFYEVFMGIGGMKADLRTLKQLAMNSIKYSTLLESEKNTFMEIWKKRWDKFIADVATK

SEQ ID NO: 65593 - protein, 147 aa, Homo sapiens
TALLSLFGIPLWYHSQSPRVILQPDVHPGNCWAFQGPQGFAVVRLSARIRPTAVTLEHVPKALSPNSTISSAPKDFAIFGFDEDLQQEGTLLGKFTYDQDGEPIQTFHFQAPTMATYQVVELRILTNWGHPEYTCIYRFRVHGEPAH

SEQ ID NO: 65594 - protein, 769 aa, Homo sapiens [sequence omitted]

SEQ ID NO: 65595 - protein, 680 aa, Homo sapiens
MIWEYSVLIIVMACMEYEMGKKKCERYWAEPGEMQLEFGPFSVSCEAEKRKSDYIIRTLKVKFNSETRTIYQFHYKNWPDHDVPSSIDPILELIWDVRCYQEDDSVPICIHCSAGCGRTGVICAIDYTWMLLKDGIIPENFSVFSLIREMRTQRPSLVQTQEQYELVYNAVLELFKRQMDVIRDKHSGTESQAKHCIPEKNHTLQADSYSPNLPKSTTKAAKMMNQQRTKMEIKESSSFDFRTSEISAKEELVLHPAKSSTSFDFLELNYSFDKNADTTMKWQTKAFPIVGEPLQKHQSLDLGSLLFEGCSNSKPVNAAGRYFNSKVPITRTKSTPFELIQQRETKEVDSKENFSYLESQPHDSCFVEMQAQKVMHVSSAELNYSLPYDSKHQIRNASNVKHHDSSALGVYSYIPLVENPYFSSWPPSGTSSKMSLDLPEKQDGTVFPSSLLPTSSTSLFSYYNSHDSLSLNSPTNISSLLNQESAVLATAPRIDDEIPPPLPVWTPESFIVVEEAGEFSPNVPKSLSSAVKVKIGTSLEWGGTSEPKKFDDSVILRPSKSVKLRSPKSELHQDRSSPPPPLPERTLESFFLADEDCMQAQSIETYSTSYPDTMENSTSSKQTLKTPGKSFTRSKSLKILRNMKKSICNSCPPNKPAESVQSNNSSSFLNFGMCVILLKS

SEQ ID NO: 65596 - protein, 576 aa, Homo sapiens
MIWEYSVLIIVMACMEYEMGKKKCERYWAEPGEMQLEFGPFSVSCEAEKRKSDYIIRTLKVKFNSETRTIYQFHYKNWPDHDVPSSIDPILELIWDVRCYQEDDSVPICIHCSAGCGRTGVICAIDYTWMLLKDGIIPENFSVFSLIREMRTQRPSLVQTQEQYELVYNAVLELFKRQMDVIRDKHSGTESQAKHCIPEKNHTLQADSYSPNLPKSTTKAAKMMNQQRTKMEIKESSSFDFRTSEISAKEELVLHPAKSSTSFDFLELNYSFDKNADTTMKWQTKAFPIVGEPLQKHQSLDLGSLLFEGCSNSKPVNAAGRYFNSKVPITRTKSTPFELIQQRETKEVDSKENFSYLESQPHDSCFVEMQAQKVMHVSSAELNYSLPYDSKHQIRNASNVKHHDSSALGVYSYIPLVENPYFSSWPPSGTSSKMSLDLPEKQDGTVFPSSLLPTSSTSLFSYYNSHDSLSLNSPTNISSLLNQESAVLATAPRIDDEIPPPLPVWTPESFIVVEEAGEFSPNVPKSLSSAVKVKIGTSLEWGGTSEPKKFDDSVILRPSKSVKLRSPKSGKNFSWL

SEQ ID NO: 65597 - protein, 84 aa, Homo sapiens
MGTTARAALVLTYLAVASAASEGGFTATGQRQLRPEHFQEVGYAAPPSPPLSRSLPMDHPDSSQHGPPFEGQSQGKVTIPCPPQ

SEQ ID NO: 65598 - protein, 120 aa, Homo sapiens
METQELRGALALLLLCFFTSASQDLQVIDLLTVGESRQMVAVAEKIRTALLTAGDIYLLSTFRLPPKQGGVLFGLYSRQDNTRWLEASVVGKINKGDCTGAIPAGGWQSPRREPTASGPG

SEQ ID NO: 65599 - protein, 311 aa, Homo sapiens
MSQNVCPRNLWLLQPLTVLLLLASADSQAAAPPKAVLKLEPPWINVLQEDSVTLTCQGARSPESDSIQWFHNGNLIPTHTQPSYRFKANNNDSGEYTCQTGQTSLSDPVHLTVLSEWLVLQTPHLEFQEGETIMLRCHSWKDKPLVKVTFFQNGKSQKFSHLDPTFSIPQANHSHSGDYHCTGNIGYTLFSSKPVTITVQVPSMGSSSPMGIIVAVVIATAVAAIVAAVVALIYCRKKRISANSTDPVKAAQFEPPGRQMIAIRKRQLEETNNDYETADGGYMTLNPRAPTDDDKNIYLTLPPNDHVNSNN

SEQ ID NO: 65600 - protein, 130 aa, Homo sapiens
MSQNVCPRNLWLLQPLTVLLLLASADSQAAPPKAVLKLEPPWINVLQEDSVTLTCQGARSPESDSIQWFHNGNLIPTHTQPSYRFKANNNDSGEYTCQTGQTSLSDPVHLTVLSGQWRKAPGWTWEGQDG

SEQ ID NO: 65601 - protein, 131 aa, Homo sapiens
MSQNVCPRNLWLLQPLTVLLLLASADSQAAAPPKAVLKLEPPWINVLQEDSVTLTCQGARSPESDSIQWFHNGNLIPTHTQPSYRFKANNNDSGEYTCQTGQTSLSDPVHLTVLSGQWRKAPGWTWEGQDG

SEQ ID NO: 65602 - protein, 52 aa, Homo sapiens
MAASSGAIAGGGGGEQGGSREPIRGKVRGAGTLRPGVTVIPKGRPQFHPFIL

SEQ ID NO: 65603 - protein, 3285 aa, Homo sapiens
MKSPRPHLLLPLLLLLLLLLGAGVPGAWGQAGSLDLQIDEEQPAGTLIGDISAGLPAGTAAPLMYFISAQEGSGVGTDLAIDEHSGVVRTARVLDREQRDRYRFTAVTPDGATVEVTVRVADINDHAPAFPQARAALQVPEHTAFGTRYPLEPARDADAGRLGTQGYALSGDGAGETFRLETRPGPDGTPVPELVVTGELDRENRSHYMLQLEAYDGGSPPRRAQALLDVTLLDINDHAPAFNQSRYHAVVSESLAPGSPVLQVFASDADAGVNGAVTYEINRRQSEGDGPFSIDAHTGLLQLERPLDFEQRRVHELVVQARDGGAHPELGSAFVTVHVRDANDNQPSMTVIFLSADGSPQVSEAAPPGQLVARISVSDPDDGDFAHVNVSLEGGEGHFALSTQDSVIYLVCVARRLDREERDAYNLRVTATDSGSPPLRAEAAFVLHVTDVNDNAPAFDRQLYRPEPLPEVALPGSFVVRVTARDPDQGTNGQVTYSLAPGAHTHWFSIDPTSGIITTAASLDYELEPQPQLIVVATDGGLPPLASSATVSVALQDVNDNEPQFQRTFYNASLPEGTQPGTCFLQVTATDADSGPFGLLSYSLGAGLGSSGSPPFRIDAHSGDVCTTRTLDRDQGPSSFDFTVTAVDGGGLKSMVYVKVFLSDENDNPPQFYPREYAASISAQSPPGTAVLRLRAHDPDQGSHGRLSYHILAGNSPPLFTLDEQSGLLTVAWPLARRANSVVQLEIGAEDGGGLQAEPSARVDISIVPGTPTPPIFEQLQYVFSVPEDVAPGTSVGIVQAHNPPGRLAPVTLSLSGGDPRGLFSLDAVSGLLQTLRPLDRELLGPVLELEVRAGSGVPPAFAVARVRVLLDDVNDNSPAFPAPEDTVLLPPNTAPGTPIYTLRALDPDSGVNSRVTFTLLAGGGGAFTVDPTTGHVRLMRPLGPSGGPAHELELEARDGGSPPRTSHFRLRVVVQDVGTRGLAPRFNSPTYRVDLPSGTTAGTQVLQVQAQAPDGGPITYHLAAEGASSPFGLEPQSGWLWVRAALDREAQELYILKVMAVSGSKAELGQQTGTATVRVSILNQNEHSPRLSEDPTFLAVAENQPPGTSVGRVFATDRDSGPNGRLTYSLQQLSEDSKAFRIHPQTGEVTTLQTLDREQQSSYQLLVQVQDGGSPPRSTTGTVHVAVLDLNDNSPTFLQASGAAGGGLPIQVPDRVPPGTLVTTLQAKDPDEGENGTILYTLTGPGSELFSLHPHSGELLTAAPLIRAERPHYVLTLSAHDQGSPPRSASLQLLVQVLPSARLAEPPPDLAERDPAAPVPVVLTVTAAEGLRPGSLLGSVAAPEPAGVGALTYTLVGGADPEGTFALDAASGRLYLARPLDFEAGPPWRALTVRAEGPGGAGARLLRVQVQVQDENEHAPAFARDPLALALPENPEPGAALYTFRASDADGPGPNSDVRYRLLRQEPPVPALRLDARTGALSAPRGLDRETTPALLLLVEATDRPANASRRRAARVSARVFVTDENDNAPVFASPSRVRLPEDQPPGPAALHVVARDPDLGEAARVSYRLASGGDGHFRLHSSTGALSVVRPLDREQRAEHVLTVVASDHGSPPRSATQVLTVSVADVNDEAPTFQQQEYSVLLRENNPPGTSLLTLRATDPDVGANGQVTYGGVSSESFSLDPDTGVLTTLRALDREEQEEINLTVYAQDRGSPPQLTHVTVRVAVEDENDHAPTFGSAHLSLEVPEGQDPQTLTMLRASDPDVGANGQLQYRILDGDPSGAFVLDLASGEFGTMRPLDREVEPAFQLRIEARDGGQPALSATLLLTVTVLDANDHAPAFPVPAYSVEVPEDVPAGTLLLQLQAHDPDAGANGHVTYYLGAGTAGAFLLEPSSGELRTAAALDREQCPSYTFSVSAVDGAAAGPLSTTVSVTITVRDVNDHAPTFPTSPLRLRLPRPGPSFSTPTLALATLRAEDRDAGANASILYRLAGTPPPGTTVDSYTGEIRVARSPVALGPRDRVLFIVATDLGRPARSATGVIIVGLQGEAERGPRFPRASSEATIRENAPPGTPIVSPRAVHAGGTNGPITYSILSGNEKGTFSIQPSTGAITVRSAEGLDFEVSPRLRLVLQAESGGAFAFTVLTLTLQDANDNAPRFLRPHYVAFLPESRPLEGPLLQVEADDLDQGSGGQISYSLAASQPARGLFHVDPTTGTITTTAILDREIWAETRLVLMATDRGSPALVGSATLTVMVIDTNDNRPTIPQPWELRVSEDALLGSEIAQVTGNDVDSGPVLWYVLSPSGPQDPFSVGRYGGRVSLTGPLDFEQCDRYQLQLLAHDGPHEGRANLTVLVEDVNDNAPAFSQSLYQVMLLEHTPPGSAILSVSATDRDSGANGHISYHLASPADGFSVDPNNGTLFTIVGTVALGHDGSGAVDVVLEARDHGAPGRAARATVHVQLQDQNDHAPSFTLSHYRVAVTEDLPPGSTLLTLEATDADGSRSHAAVDYSIISGNWGRVFQLEPRLAEAGESAGPGPRALGCLVLLEPLDFESLTQYNLTVAAADRGQPPQSSVVPVTVTVLDVNDNPPVFTRASYRVTVPEDTPVGAELLHVEASDADPGPHGLVRFTVSSGDPSGLFELDESSGTLRLAHALDCETQARHQLVVQAADPAGAHFALAPVTIEVQDVNDHGPAFPLNLLSTSVAENQPPGTLVTTLHAIDGDAGAFGRLRYSLLEAGPGPEGREAFALNSSTGELRARVPFDYEHTESFRLLVGAADAGNLSASVTVSVLVTGEDEYDPVFLAPAFHFQVPEGARRGHSLGHVQATDEDGGADGLVLYSLATSSPYFGINQTTGALYLRVDSRAPGSGTATSGGGGRTRREAPRELRLEVIARGPLPGSRSATVPVTVDITHTALGLAPDLNLLLVGAVAASLGVVVVLALAALVLGLVRARSRKAEAAPGPMSQAAPLASDSLQKLGREPPSPPPSEHLYHQTLPSYGGPGAGGPYPRGGSLDPSHSSGRGSAEAAEDDEIRMINEFPRVASVASSLAARGPDSGIQQDADGLSDTSCEPPAPDTWYKGRKAGLLLPGAGATLYREEGPPATATAFLGGCGLSPAPTGDYGFPADGKPCVAGALTAIVAGEEELRGSYNWDYLLSWCPQFQPLASVFTEIARLKDEARPCPPAPRIDPPPLITAVAHPGAKSVPPKPANTAAARAIFPPASHRSPISHEGSLSSAAMSPSFSPSLSPLAARSPVVSPFGVAQGPSASALSAESGLEPPDDTELHI

SEQ ID NO: 65604 - protein, 615 aa, Homo sapiens
MRTASSSCWGRMPGLRRRASWRVSIPGSWPSQTRARLVSSTWATHAMSTASFRPYSWRLSSFRHCVLRLTENNSQPLMTKLQWLFGFLEHSQRPAISPENFLSASWTPWFSPGTQQDCSEYLKYLLDRLHEEEKTGTRICQKLKQSSSPSPPEEPPAPSSTSVEKMFGGKIVTRICCLCCLNVSSREEAFTDLSLAFPPPERCRRRRLGSVMRPTEDITARELPPPTSAQGPGRVGPRRQRKHCITEDTPPTSLYIEGLDSKEAGGQSSQEERIEREEEGKEERTEKEEVGEEEESTRGEGEREKEEEVEEEEEKVEKETEKEAEQEKEEDSLGAGTHPDAAIPSGERTCGSEGSRSVLDLVNYFLSPEKLTAENRYYCESCASLQDAEKVVELSQGPCYLILTLLRFSFDLRTMRRRKILDDVSIPLLLRLPLAGGRGQAYDLCSVVVHSGVSSESGHYYCYAREGAARPAASLGTADRPEPENQWYLFNDTRVSFSSFESVSNVTSFFPKDTAYVLFYRQRPREGPEAELGSSRVRTEPTLHKDLMEAISKDNILYLQEQEKEARSRAAYISALPTSPHWGRGFDEDKDEDEGSPGGCNPAGGNGGDFHRLVF

SEQ ID NO: 65605 - protein, 16 aa, Homo sapiens
MASHRWRLPPTLLLAL

SEQ ID NO: 65606 - protein, 24 aa, Homo sapiens
MRHPFLLCILCLGVQWGARDGAWG

SEQ ID NO: 65607 - protein, 17 aa, Homo sapiens
MRHPFLLCILCLGLWTS

SEQ ID NO: 65608 - protein, 71 aa, Homo sapiens [sequence omitted]

SEQ ID NO: 65609 - protein, 192 aa, Homo sapiens
MDLVLKRCLLHLAVIGALLAVGATKVPRNQDWLGVSRQLRTKAWNRQLYPEWTEAQRLDCWRGGQVSLKVSNDGPTLIGANASFSIALNFPGSQKVLPDGQVIWVNNTIINGSQVWGGQPVYPQETDDACIFPDGGPCPSGSWSQKRSFVYVWKTWGEGLPSQPIIHTCVYFFLPDHLSFGRPFHLNFCDFL

SEQ ID NO: 65610 - protein, 127 aa, Homo sapiens
MFYDIAEPLSHISSELAADKVPNIAGNIHAVRSGENGFGHKGSCFHRIIPGLMCQGGDFTRHHDTGSKSIYGQKFDGENFILKHSGPGILCMANAGPDTNGSQVFICTAKTEWWASSQVVFARCKEA

SEQ ID NO: 65611 - protein, 29 aa, Homo sapiens
MGLGVLLLVFVLGLGLTPPTLAQDNSRHL

SEQ ID NO: 65612 - protein, 208 aa, Homo sapiens
MVSTMLSGLLFWLASGWTPAFAYSPRTPDRVSEADIQRLLHGVMEQLGIARPRVEYPAHQAMNLVGPQSIEGGAHEGLQHLGPFGNIPNIVAELTGDNIPKDFSEDQGYPDPPNPCPVGKTADDGCLENTPDTAEFSREFQLHQHLFDPEHDYPGLGKWNKKLLYEKMKGGERRKRRSVNPYLQGQRLDNVVAKKSVPHFSDEDKDPE

SEQ ID NO: 65613 - protein, 170 aa, Homo sapiens
MCKRTDPVPVTIALDSLSWLLLRLPCTTLCQVLHAVSHQDSCPGDSSSVGKVSVLGLLHEELHGPGPVGALSSLAQTEVTLGGTMGQASAHILCRRPRQRPTDQTQWFSILPDFSLDLQEGPSVESQPYSDPHIPPVSKNAKARTRKCSLVSGHGRENKSCRGWGWGQGF

SEQ ID NO: 65614 - protein, 165 aa, Homo sapiens
MVVAGVVVLILALVLAWLSTYVADSGSNQLLGAIVSAGDTSVLHLGHVDHLVAGQGNPEPTELPHPSEGNDEKAEEAGEGRGDSTGEAGAGGGVEPSLEHLLDIQGLPKRQAGAGSSSPEAPLRSEDSTCLPPSPGLITVRLKFLNDTEELAVARPEDTVGALKR

SEQ ID NO: 65615 - protein, 253 aa, Homo sapiens
MLILGSMFSLVEPVLTIAAALSVQSPFTRSAQSSPECAAARRPLESDQGDPFTLFNVFNAWVQVKSERSRNSRKWCRRRGIEEHRLYEMANLRRQFKELLEDHGLLAGAQAAQVGDSYSRLQQRRERRALHQLKRQHEEGAGRRRKVLRLQEEQDGGSSDEDRAGPAPPGASDGVDIQDVKFKLRHDLAQLQAAASSAQDLSREQLALLKLVLGRGLYPQLAVPDAFNSSRKDSDQVGPVLPHPMFCPPTHEP

SEQ ID NO: 65616 - protein, 271 aa, Homo sapiens
MSPTVIILACLGFFLDQSVWAHVGGQDKPFCSAWPSAVVPQGGHVTLRCHYRRGFNIFTLYKKDGVPVPELYNRIFWNSFLISPVTPAHAGTYRCRGFHPHSPTEWSAPSNPLVIMVTGLYEKPSLTARPGPTVRAGENVTLSCSSQSSFDIYHLSREGEAHELRLPAVPSINGTFQADFPLGPATHGETYRCFGSFHGSPYEWSDPSDPLPVSVTGNPSSSWPSPTEPSFKTGIARHLHAVIRYSVAIILFTILPFFLLHRWCSKKKMLL

SEQ ID NO: 65617 - protein, 254 aa, Homo sapiens
MSPTVIILACLGFFLDQSVWAHVGGQDKPFCSAWPSAVVPQGGHVTLRCHYRRGFNIFTLYKKDGVPVPELYNRIFWNSFLISPVTPAHAGTYRCRGFHPHSPTEWSAPSNPLVIMVTGLYEKPSLTARPGPTVRAGENVTLSCSSQSSFDIYHLSREGEAHELRLPAVPSINGTFQADFPLGPATHGETYRCFGSFHGSPYEWSDPSDPLPVSVTGIARHLHAVIRYSVAIILFTILPFFLLHRWCSKKKMLL

SEQ ID NO: 65618 - protein, 384 aa, Homo sapiens
MQTVLCTIICNLTVTAAVTACLREPGAVSNPGLTSFTVLCVNWQGEKRRLGNERGYSSHQWPQKHPYHLLPELPTQISSSRPTRPRRCKSSSRPHLARGRRSPLKAAQQDRGLPAWGVWLLSRAEVRPRSALGSSRRGLGDKGPRSRRAAEFTQARPTRKRRTPGGGRPEAGCWLENRRQRRRKAGAERAGAGPTLTPPLPAGSPDPPSPAATAAPQPEQRPHLSRGQWRLLPRRRPERAAGSAGSCSSRRALPASGSGAAMTGSWAAPPRPAWAGLGPFWHLRRSRRQDGLCCPGPRPPSSTVASHCKKAWIRNLIRATLLCEARRLRTSGLVPKSLSRGQALWEHGLPATHPVRMQCPRHHLELIIAKYVSTLMLDFPTSRP

SEQ ID NO: 65619 - protein, 951 aa, Homo sapiens
MGFHLLVTVSLLFSHVDHVIAETEMEGEGNETGECTGSYYCKKGVILPIWEPQDPSFGDKIARATVYFVAMVYMFLGVSIIADRFMSSIEVITSQEKEITIKKPNGETTKTTVRIWNETVSNLTLMALGSSAPEILLSVIEVCGHNFTAGDLGPSTIVGSAAFNMFIIIALCVYVVPDGETRKIKHLRVFFVTAAWSIFAYTWLYIILSVISPGVVEVWEGLLTFFFFPICVVFAWVADRRLLFYKYVYKRYRAGKQRGMIIEHEGDRPSSKTEIEMDGKVVNSHVENFLDGALVLEVDERDQDDEEARREMARILKELKQKHPDKEIEQLIELANYQVLSQQQKSRAFYRIQATRLMTGAGNILKRHAADQARKAVSMHEVNTEVTENDPVSKIFFEQGTYQCLENCGTVALTIIRRGGDLTNTVFVDFRTEDGTANAGSDYEFTEGTVVFKPGDTQKEIRVGIIDDDIFEEDENFLVHLSNVKVSSEASEDGILEANHVSTLACLGSPSTATVTIFDDDHAGIFTFEEPVTHVSESIGIMEVKVLRTSGARGNVIVPYKTIEGTARGGGEDFEDTCGELEFQNDEIVKIITIRIFDREEYEKECSFSLVLEEPKWIRRGMKGGFTITGKYLFGQPVFRKVHAREHPILSTVITIADEYDDKQPLTSKEEEERRIAEMGRPILGEHTKLEVIIEESYEFKSTVDKLIKKTNLALVVGTNSWREQFIEAITVSAGEDDDDDECGEEKLPSCFDYVMHFLTVFWKVLFAFVPPTEYWNGWACFIVSILMIGLLTAFIGDLASHFGCTIGLKDSVTAVVFVALGTSVPDTFASKVAATQDQYADASIGNVTGSNAVNVFLGIGVAWSIAAIYHAANGEQFKVSPGTLAFSVTLFTIFAFINVGVLLYRRRPEIGGELGGPRTAKLLTSCLFVLLWLLYIFFSSLEAYCHIKGF

SEQ ID NO: 65620 - protein, 110 aa, Homo sapiens
MELLISSSSLSMIIAKALKMALVGPVRVMILSGQFPSEMLIRAPLSSRILLTDSPFFPMMLPTSFPCIRSRMRKTNIKMKCLIQGHTMSGMDLQISLLVRRGLVTQWLRM

SEQ ID NO: 65621 - protein, 20 aa, Homo sapiens
MRAPAQLLGLLLLWLPVTSR

SEQ ID NO: 65622 - protein, 140 aa, Homo sapiens [sequence omitted]

SEQ ID NO: 65623 - protein, 97 aa, Homo sapiens
MSKNSKLLSTSAKRIQKELADITLDPPPNCSAGPKGDNIYEWRSTILGPPGSVYEGGVFFLDITFTPEYPFKPPKVRNLPVCSNLLIPTREQLLRFF

SEQ ID NO: 65624 - protein, 1239 aa, Homo sapiens
MFPLFGKISLGILIFVLIEGDFPSLTAQTYLSIEEIQEPKSAVSFLLPEESTDLSLATKKKQPLDRRETERQWLIRRRRSILFPNGVKICPDESVAEAVANHVKYFKVRVCQEAVWEAFRTFWDRLPGREEYHYWMNLCEDGVTSIFEMGTNFSESVEHRSLIMKKLTYAKETVSSSELSSPVPVGDTSTLGDTTLSVPHPEVDAYEGASESSLERPEESISNEIENVIEEATKPAGEQIAEFSIHLLGKQYREELQDSSSFHHQHLEEEFISEVENAFTGLPGYKEIRVLEFRSPKENDSGVDVYYAVTFNGEAISNTTWDLISLHSNKVENHGLVELDDKPTVVYTISNFRDYIAETLQQNFLLGNSSLNPDPDSLQLINVRGVLRHQTEDLVWNTQSSSLQATPSSILDNTFQAAWPSADESITSSIPPLDFSSGPPSATGRELWSESPLGDLVSTHKLAFPSKMGLSSSPEVLEVSSLTLHSVTPAVLQTGLPVASEERTSGSHLVEDGLANVEESEDFLSIDSLPSSSFTQPVPKETIPSMEDSDVSLTSSPYLTSSIPFGLDSLTSKVKDQLKVSPFLPDASMEKELIFDGGLGSGSGQKVDLITWPWSETSSEKSAEPLSKPWLEDDDSLLPAEIEDKKLVLVDKMDSTDQISKHSKYEHDDRSTHFPEEEPLSGPAVPIFADTAAESASLTLPKHISEVPGVDDYSVTKAPLILTSVAISASTDKSDQADAILREDMEQITESSNYEWFDSEVSMVKPDMQTLWTILPESERVWTRTSSLEKLSRDILASTPQSADRLWLSVTQSTKLPPTTISTLLEDEVIMGVQDISLELDRIGTDYYQPEQVQEQNGKVGSYVEMSTSVHSTEMVSVAWPTEGGDDLSYTQTSGALVVFFSLRVTNMMFSEDLFNKNSLEYKALEQRFLELLVPYLQSNLTGFQNLEILNFRNGSIVVNSRMKFANSVPPNVNNAVYMILEDFCTTAYNTMNLAIDKYSLDVESGDEANPCKFQACNEFSECLVNPWSGEAKCRCFPGYLSVEERPCQSLCDLQPDFCLNDGKCDIMPGHGAICRCRVGENWWYRGKHCEEFVSEPVIIGITIASVVGLLVIFSAIIYFFIRTLQAHHDRSERESPFSGSSRQPDSLSSIENAVKYNPVYESHRAGCEKYEGPYPQHPFYSSASGDVIGGLSREEIRQMYESSELSREEIQERMRVLELYANDPEFAAFVREQQVEEV

SEQ ID NO: 65625 - protein, 149 aa, Homo sapiens [sequence omitted]

SEQ ID NO: 65626 - protein, 51 aa, Homo sapiens [sequence omitted]

SEQ ID NO: 65627 - protein, 358 aa, Homo sapiens
MLLATMILVDIFQVKAEVLDMADNAFDDEYLKCTDRMEIKYVPQLLKEEKASHQQLDTVWENAKAKWAARKTQIFLPMNFKDNHGIALMAYISEAQEQTPFYHLFSEAVKMAGQSREDYIYGFQFKAFHFYLTRALQLLRKPCEASSKTVVYRTSQGTSFTFGGLNQARFGHFTLAYSAKPQAANDQLTVLSIYTCLGVDIENFLDKESERITLIPLNEVFQVSQEGAGNNLILQSINKTCSHYECAFLGGLKTENCIENLEYFQPIYVYNPGEYVLIFKNNLGWAWWLTPVIPALWKAEVSGSLEPRSLRPAWATWRNPISTKNTKLSQAWWCAPVVPATWEAEAGGSLESGRQRLQ

SEQ ID NO: 65628 - protein, 150 aa, Homo sapiens
MQLLSCIALSLALVTNSAPTSSSTKKTQLQLEHLLLDLQMILNGINNYKNPKLTRMLTFKFYMPKKATELKHLQCLEEELKPLEEVLNLAQSKNFHLRPRDLISNINVIVLELKGSETTFMCEYADETATIVEFLNRWITFCQSIISTLT

SEQ ID NO: 65629 - protein, 218 aa, Homo sapiens [sequence omitted]

SEQ ID NO: 65630 - protein, 12 aa, Homo sapiens
MENLWISGLWAV

SEQ ID NO: 65631 - protein, 164 aa, Homo sapiens [sequence omitted]

SEQ ID NO: 65632 - protein, 41 aa, Homo sapiens
MRLNLQLTMGTFSLSLFGLMGVAFGMNLESSLEEVRMYYYF

SEQ ID NO: 65633 - protein, 35 aa, Homo sapiens
MVGYVLGPFFLITLVGVVVAVGGPAAPSPAPHVQL

SEQ ID NO: 65634 - protein, 38 aa, Homo sapiens [sequence omitted]

SEQ ID NO: 65635 - protein, 29 aa, Homo sapiens
MRTTGNEPGTQAPMSLCKASLLPSAESRD

SEQ ID NO: 65636 - protein, 187 aa, Homo sapiens
MGRPLLLPLLPLLLPPAFLQPSGSTGSGPSYLYGVTQPKHLSASMGGSVEIPFSFYYPWELATAPDVRISWRRGHFHRQSFYSTRPPSIHKDYVNRLFLNWTEGQKSGFLRISNLQKQDQSVYFCRVELDTRSSGRQQWQSIEGTKLSITQGESSCPGTRFAHRSEAFMITGDIVPSTSDPTSSDDP

SEQ ID NO: 65637 - protein, 20 aa, Homo sapiens
MLIVLFFLLAVHFGGYYKEI

SEQ ID NO: 65638 - protein, 10 aa, Homo sapiens
ILWFLLFTPC

SEQ ID NO: 65639 - protein, 878 aa, Homo sapiens
LFRTCCPRPARSAAAMRLALLWALGLLGAGSPLPSWPLPNIGGTEEQQAESEKAPREPLEPQVLQDDLPISLKKVLQTSLPEPLRIKLELDGDSHILELLQNRELVPGRPTLVWYQPDGTRVVSEGHTLENCCYQGRVRGYAGSWVSICTCSGLRGLVVLTPERSYTLEQGPGDLQGPPIISRIQDLHLPGHTCALSWRESVHTQKPPEHPLGQRHIRRRRDVVTETKTVELVIVADHSEAQKYRDFQHLLNRTLEVALLLDTFFRPLNVRVALVGLEAWTQRDLVEISPNPAVTLENFLHWRRAHLLPRLPHDSAQLVTGTSFSGPTVGMAIQNSICSPDFSGGVNMDHSTSILGVASSIAHELGHSLGLDHDLPGNSCPCPGPAPAKTCIMEASTDFLPGLNFSNCSRRALEKALLDGMGSCLFERLPSLPPMAAFCGNMFVEPGEQCDCGFLDDCVDPCCDSLTCQLRPGAQCASDGPCCQNCQLRPSGWQCRPTRGDCDLPEFCPGDSSQCPPDVSLGDGEPCAGGQAVCMHGRCASYAQQCQSLWGPGAQPAAPLCLQTANTRGNAFGSCGRNPSGSYVSCTPRDAICGQLQCQTGRTQPLLGSIRDLLWETIDVNGTELNCSWVHLDLGSDVAQPLLTLPGTACGPGLVCIDHRCQRVDLLGAQECRSKCHGHGVCDSNRHCYCEEGWAPPDCTTQLKATSSLTTGLLLSLLVLLVLVMLGASYWYRARLHQRLCQLKGPTCQYRAAQSGPSERPGPPQRALLARGTKQASALSFPAPPSRPLPPDPVSKRLQAELADRPNPPTRPLPADPVVRSPKSQGPAKPPPPRKPLPADPQGRCPSGDLPGPGAGIPPLVVPSRPAPPPPTVSSLYL

SEQ ID NO: 65640 - protein, 58 aa, Homo sapiens
IFFILLIIFLSWIILKHRKGNNAHENPKEVAIHLHSQGGSSVHPRTLQTNEENSRVLP

SEQ ID NO: 65641 - protein, 13 aa, Homo sapiens
IRIAWLVLVSIFG

SEQ ID NO: 65642 - protein, 344 aa, Homo sapiens
LCQFILLGTTSVVTAALYSVYRQKARVSQELKGAKKVHLGEDLKSILSEAPGKCVPYAVIEGAVRSVKETLNSQFVENCKGVIQRLTLQEHKMVWNRTTHLWNDCSKIIHQRTNTVPFDLVPHEDGVDVAVRVLKPLDSVDLGLETVYEKFHPSIQSFTDVIGHYISGERPKGIQETEEMLKVGATLTGVGELVLDNNSVRLQPPKQGMQYYLSSQDFDSLLQRQESSVRLWKVLALVFGFATCATLFFILRKQYLQRQERLRLKQMQEEFQEHEAQLLSRAKPEDRESLKSACVVCLSSFKSCVFLECGHVCSCTECYRALPEPKKCPICRQAITRVIPLYNS

SEQ ID NO: 65643 - protein, 20 aa, Homo sapiens
IIGILVVFLMFSAVKHFKIY

SEQ ID NO: 65644 - protein, 36 aa, Homo sapiens
VFFFFLFILPPSKDTKVASAERFGGGGSFSPRRATV

SEQ ID NO: 65645 - protein, 22 aa, Homo sapiens
LSIFIFYFFLTKTRFMSLDFEG

SEQ ID NO: 65646 - protein, 172 aa, Homo sapiens; identical to SEQ ID NO: 33455

SEQ ID NO: 65647 - protein, 330 aa, Homo sapiens
RMWGLKVLLLPVVSFALYPEEILDTHWELWKKTHRKQYNNKVDEISRRLIWEKNLKYISIHNLEASLGVHTYELAMNHLGDMTSEEVVQKMTGLKVPLSHSRSNDTLYIPEWEGRAPDSVDYRKKGYVTPVKNQGQCGSCWAFSSVGALEGQLKKKTGKLLNLSPQNLVDCVSENDGCGGGYMTNAFQYVQKNRGIDSEDAYPYVGQEESCMYNPTGKAAKCRGYREIPEGNEKALKRAVARVGPVSVAIDASLTSFQFYSKGVYYDESCNSDNLNHAVLAVGYGIQKGNKHWIIKNSWGENWGNKGYILMARNKNNACGIANLASFPKM

SEQ ID NO: 65648 - protein, 474 aa, Homo sapiens
LLLLLTVLTATTAPKPATVVTGSGHASSTPGGEKETSATQRSSVPSSTEKNAVSMTSSVLSSHSPGSGSSTTQGQDVTLAPATEPASGSAATWGQDVTSVPVTRPALGSTTPPAHDVTSAPDNKPAPGSTAPPAHGVTSAPDTRPAPGSTAPPAHGVTSAPDNRPALGSTAPPVHNVTSASGSASGSASTLVHNGTSARATTTPASKSTPFSIPSHHSDTPTTLASHSTKTDASSTHHSTVPPLTSSNHSTSPQLSTGVSFFFLSFHISNLQFNSSLEDPSTDYYQELQRDISEMFLQIYKQGGFLGLSNIKFRPGSVVVQLTLAFREGTINVHDVETQFNQYKTEAASRYNLTISDVSVSDVPFPFSAQSGAGVPGWGIALLVLVCVLVALAIVYLIALAVCQCRRKNYGQLDIFPARDTYHPMSEYPTYHTHGRYVPPSSTDRSPYEKVSAGNGGSSLSYTNPAVAATSANL

SEQ ID NO: 65649 - protein, 13 aa, Homo sapiens
MCPVNLAFFVWLG

SEQ ID NO: 65650 - protein, 26 aa, Homo sapiens
VPWAAALLLALGVERALALPEVQKQV

SEQ ID NO: 65651 - protein, 23 aa, Homo sapiens
LFLAIFIYAFPNYAAMKLVKPFS

SEQ ID NO: 65652 - protein, 37 aa, Homo sapiens
VMVASAKMGRAGTMAVAAEVAGAGRLAVEEAVVLRGL

SEQ ID NO: 65653 - protein, 17 aa, Homo sapiens
LLMWVNLSLIQLLPYID

SEQ ID NO: 65654 - protein, 19 aa, Homo sapiens
RAPAQLLGLLLLWLPVTSR

SEQ ID NO: 65655 - protein, 9 aa, Homo sapiens
LLLFLILLS

SEQ ID NO: 65656 - protein, 3259 aa, Homo sapiens
TALRHWFAGAFLLEVATAAGLSAGLTRLGSQVGGAMRRSKADVERYIASVQGSTPSPRQKSMKGFYFAKLYYEAKEYDLAKKYICTYINVQERDPKAHRFLGLLYELEENTDKAVECYRRSVELNPTQKDLVLKIAELLCKNDVTDGRAKYWLERAAKLFPGSPAIYKLKEQLLDCEGEDGWNKLFDLIQSELYVRPDDVHVNIRLVEVYRSTKRLKDAVAHCHEAERNIALRSSLEWNSCVVQTLKEYLESLQCLESDKSDWRATNTDLLLAYANLMLLTLSTRDVQESRELLQSFDSALQSVKSLGGNDELSATFLEMKGHFYMHAGSLLLKMGQHSSNVQWRALSELAALCYLIAFQVPRPKIKLIKGEAGQNLLEMMACDRLSQSGHMLLNLSRGKQDFLKEIVETFANKSGQSALYDALFSSQSPKDTSFLGSDDIGNIDVREPELEDLTRYDVGAIRAHNGSLQHLTWLGLQWNSLPALPGIRKWLKQLFHHLPHETSRLETNAPESICILDLEVFLLGVVYTSHLQLKEKCNSHHSSYQPLCLPLPVCKQLCTERQKSWWDAVCTLIHRKAVPGNVAKLRLLVQHEINTLRAQEKHGLQPALLVHWAECLQKTGSGLNSFYDQREYIGRSVHYWKKVLPLLKIIKKKNSIPEPIDPLFKHFHSVDIQASEIVEYEEDAHITFAILDAVNGNIEDAVTAFESIKSVVSYWNLALIFHRKAEDIENDALSPEEQEECKNYLRKTRDYLIKIIDDSDSNLSVVKKLPVPLESVKEMLNSVMQELEDYSEGGPLYKNGSLRNADSEIKHSTPSPTRYSLSPSKSYKYSPKTPPRWAEDQNSLLKMICQQVEAIKKEMQELKLNSSNSASPHRWPTENYGPDSVPDGYQGSQTFHGAPLTVATTGPSVYYSQSPAYNSQYLLRPAANVTPTKGPVYGMNRLPPQQHIYAYPQQMHTPPVQSSSACMFSQEMYGPPALRFESPATGILSPRGDDYFNYNVQQTSTNPPLPEPGYFTKPPIAAHASRSAESKTIEFGKTNFVQPMPGEGLRPSLPTQAHTTQPTPFKFNSNFKSNDGDFTFSSPQVVTQPPPAAYSNSESLLGLLTSDKPLQGDGYSGAKPIPGGQTIGPRNTFNFGSKNVSGISFTENMGSSQQKNSGFRRSDDMFTFHGPGKSVFGTPTLETANKNHETDGGSAHGDDDDDGPHFEPVVPLPDKIEVKTGEEDEEEFFCNRAKLFRFDVESKEWKERGIGNVKILRHKTSGKIRLLMRREQVLKICANHYISPDMKLTPNAGSDRSFVWHALDYADELPKPEQLAIRFKTPEEAALFKCKFEEAQSILKAPGTNVAMASNQAVRIVKEPTSHDNKDICKSDAGNLNFEFQVAKKEGSWWHCNSCSLKNASTAKKCVSCQNLNPSNKELVGPPLAETVFTPKTSPENVQDRFALVTPKKEGHWDCSICLVRNEPTVSRCIACQNTKSANKSGSSFVHQASFKFGQGDLPKPINSDFRSVFSTKEGQWDCSACLVQNEGSSTKCAACQNPRKQSLPATSIPTPASFKFGTSETSKTLKSGFEDMFAKKEGQWDCSSCLVRNEANATRCVACQNPDKPSPSTSVPAPASFKFGTSETSKAPKSGFEGMFTKKEGQWDCSVCLVRNEASATKCIACQNPGKQNQTTSAVSTPASSETSKAPKSGFEGMFTKKEGQWDCSVCLVRNEASATKCIACQNPGKQNQTTSAVSTPASSETSKAPKSGFEGMFTKKEGQWDCSVCLVRNEASATKCIACQCPSKQNQTTAISTPASSEISKAPKSGFEGMFIRKGQWDCSVCCVQNESSSLKCVACDASKPTHKPIAEAPSAFTLGSEMKLHDSSGSQVGTGFKSNFSEKASKFGNTEQGFKFGHVDQENSPSFMFQGSSNTEFKSTKEGFSIPVSADGFKFGISEPGNQEKKSEKPLENGTGFQAQDISGQKNGRGVIFGQTSSTFTFADLAKSTSGEGFQFGKKDPNFKGFSGAGEKLFSSQYGKMANKANTSGDFEKDDDAYKTEDSDDIHFEPVVQMPEKVELVTGEEDEKVLYSQRVKLFRFDAEVSQWKERGLGNLKILKNEVNGKLRMLMRREQVLKVCANHWITTTMNLKPLSGSDRAWMWLASDFSDGDAKLEQLAAKFKTPELAEEFKQKFEECQRLLLDIPLQTPHKLVDTGRAAKLIQRAEEMKSGLKDFKTFLTNDQTKVTEEENKGSGTGAAGASDTTIKPNPENTGPTLEWDNYDLREDALDDSVSSSSVHASPLASSPVRKNLFRFGESTTGFNFSFKSALSPSKSPAKLNQSGTSVGTDEESDVTQEEERDGQYFEPVVPLPDLVEVSSGEENEQVVFSHRAKLYRYDKDVGQWKERGIGDIKILQNYDNKQVRIVMRRDQVLKLCANHRITPDMTLQNMKGTERVWLWTACDFADGERKVEHLAVRFKLQDVADSFKKIFDEAKTAQEKDSLITPHVSRSSTPRESPCGKIAVAVLEETTRERTDVIQGDDVADATSEVEVSSTSETTPKAVVSPPKFVFGSESVKSIFSSEKSKPFAFGNSSATGSLFGFSFNAPLKSNNSETSSVAQSGSESKVEPKKCELSKNSDIEQSSDSKVKNLFASFPTEESSINYTFKTPEKAKEKKKPEDSPSDDDVLIVYELTPTAEQKALATKLKLPPTFFCYKNRPDYVSEEEEDDEDFETAVKKLNGKLYLDGSEKCRPLEENTADNEKECIIVWEKKPTVEEKAKADTLKLPPTFFCGVCSDTDEDNGNGEDFQSELQKVQEAQKSQTEEITSTTDSVYTGGTEVMVPSFCKSEEPDSITKSISSPSVSSETMDKPVDLSTRKEIDTDSTSQGESKIVSFGFGSSTGLSFADLASSNSGDFAFGSKDKNFQWANTGAAVFGTQSVGTQSAGKVGEDEDGSDEEVVHNEDIHFEPIVSLPEVEVKSGEEDEEILFKERAKLYRWDRDVSQWKERGVGDIKILWHTMKNYYRILMRRDQVFKVCANHVITKTMELKPLNVSNNALVWTASDYADGEAKVEQLAVRFKTKEVADCFKKTFEECQQNLMKLQKGHVSLAAELSKETNPVVFFDVCADGEPLGRITMELFSNIVPRTAENFRALCTGEKGFGFKNSIFHRVIPDFVCQGGDITKHDGTGGQSIYGDKFEDENFDVKHTGPGLLSMANQGQNTNNSQFVITLKKAEHLDFKHVVFGFVKDGMDTVKKIESFGSPKGSVCRRITITECGQI

SEQ ID NO: 65657 - protein, 63 aa, Homo sapiens
ISLHPGAATSPALLLLLRLLLLHSPPLLPFVSSSTAPGKALKSGGQERQLSTFQFSMDMKIYS

SEQ ID NO: 65658 - protein, 10 aa, Homo sapiens
LISVRVALLL

SEQ ID NO: 65659 - protein, 67 aa, Homo sapiens
ILITIIAMSSLGVLLGATCAGLLLYCTCSYSGLSSRSCTTLENYNFELYDGLKHKVKMNHQKCCSEA

SEQ ID NO: 65660 - protein, 108 aa, Homo sapiens
LGDTEPSGAGAGAQAKTKAAPGPTAAAAAQASAAARRQPREPLGSRPPAQPPPPREPVAGSRSGRKTTEGPSVRATPRGPNEQPEAAAAEDGDSDDAEAEKGTPGPAP

SEQ ID NO: 65661 - protein, 40 aa, Homo sapiens
LWILALGVFHDPALWPASTQIPPKAQDKATIIQIPVQNFE

SEQ ID NO: 65662 - protein, 19 aa, Homo sapiens
MVLCSVFVLLISLEVLDEG

SEQ ID NO: 65663 - protein, 380 aa, Homo sapiens
LVSRLPFLGALGVAVAVAEIGCTMSAFEKPQIIAHIQKGFNYTVFDCKWVPCSAKFVTMGNFARGTGVIQLYEIQHGDLKLLREIEKAKPIKCGTFGATSLQQRYLATGDFGGNLHIWNLEAPEMPVYSVKGHKEIINAIDGIGGLGIGEGAPEIVTGSRDGTVKVWDPRQKDDPVANMEPVQGENKRDCWTVAFGNAYNQEERVVCAGYDNGDIKLFDLRNMALRWETNIKNGVCSLEFDRKDISMNKLVATSLEGKFHVFDMRTQHPTKGFASVSEKAHKSTVWQVRHLPQNRELFLTAGGAGGLHLWKYEYPIQRSKKDSEGIEMGVAGSVSLLQNVTLSTQPISSLDWSPDKRGLCVCSSFDQTVRVLIVTKLNKI

SEQ ID NO: 65664 - protein, 506 aa, Homo sapiens
RMSPWSWFLLQTLCLLPTGAASRRGAPGTANCELKPQQSELNSFLWTIKRDPPSYFFGTIHVPYTRVWDFIPDNSKEAFLQSSIVYFELDLTDPYTISALTSCQMLPQGENLQDVLPRDIYCRLKRHLEYVKLMMPLWMTPDQRGKGLYADYLFNAIAGNWERKRPVWVMLMVNSLTEVDIKSRGVPVLDLFLAQEAERLRKQTGAVEKVEEQCHPLNGLNFSQVIFALNQTLLQQESLRAGSLQIPYTTEDLIKHYNCGDLSSVILSHDSSQVPNFINATLPPQERITAQEIDSYLRRELIYKRNERIGKRVKALLEEFPDKGFFFAFGAGHFMGNNTVLDVLRREGYEVEHAPAGRPIHKGKSKKTSTRPTLSTIFAPKVPTLEVPAPEAVSSGHSTLPPLVSRPGSADTPSEAEQRFRKKRRRSQRRPRLRQFSDLWVRLEESDIVPQLQVPVLDRHISTELRLPRRGHSHHSQMVASSACLSLWTPVFWVLVLAFQTETPLL

SEQ ID NO: 65665 - protein, 9 aa, Homo sapiens
LLLFLILLS

SEQ ID NO: 65666 - protein, 395 aa, Homo sapiens
KFVLVVAGSVCFMLILYQYAGPGLSLGAPGGRAPPDDLDLFPTPDPHYEKKYYFPVRELERSLRFDMKGDDVIVFLHIQKTGGTTFGRHLVQNVRLEVPCDCRPGQKKCTCYRPNRRETWLFSRFSTGWSCGLHADWTELTNCVPGVLDRRDSAALRTPRKFYYITLLRDPVSRYLSEWRHVQRGATWKTSLHMCDGRTPTPEELPPCYEGTDWSGCTLQEFMDCPYNLANNRQVRMLADLSLVGCYNLSFIPEGKRAQLLLESAKKNLRGMAFFGLTEFQRKTQYLFERTFNLKFIRPFMQYNSTRAGGVEVDEDTIRRIEELNDLDMQLYDYAKDLFQQRYQYKRQLERREQRLRSREERLLHRAKEALPREDADEPGRVPTEDYMSHIIEKW

SEQ ID NO: 65667 - protein, 135 aa, Homo sapiens
LPSLLQAFQVKLKSKGQASSSGNQESSGQNRIILFDVIKSAIRYEKTISEAWIKAIENTASVSEHKVIDLVMLFIIYSTNTQTKKYIERVLRNKIRSGCIQEQLLQSTFSVHYLVLKDMCSSIMSLAQSLLHSLD

SEQ ID NO: 65668 - protein, 26 aa, Homo sapiens
LLGVVVRPWLGEPRLMRGAQRLVSHL

SEQ ID NO: 65669 - protein, 904 aa, Homo sapiens
IDLSKLGPGMRMSVGLSLLLPLSGRTFLLLLSVVMAQSHWPSEPSEAVRDWENQLEASMHSVLSDLHEAVPTVVGIPDGTAVVGRSFRVTIPTDLIASSGDIIKVSAAGKEALPSWLHWDSQSHTLEGLPLDTDKGVHYISVSATRLGANGSHIPQTSSVFSIEVYPEDHSELQSVRTASPDPGEVVSSACAADEPVTVLTVILDADLTKMTPKQRIDLLHRMRSFSEVELHNMKLVPVVNNRLFDMSAFMAGPGNAKKVVENGALLSWKLGCSLNQNSVPDIHGVEAPAREGAMSAQLGYPVVGWHIANKKPPLPKRVRRQIHATPTPVTAIGPPTTAIQEPPSRIVPTPTSPAIAPPTETMAPPVRDPVPGKPTVTIRTRGAIIQTPTLGPIQPTRVSEAGTTVPGQIRPTMTIPGYVEPTAVATPPTTTTKKPRVSTPKPATPSTDSTTTTTRRPTKKPRTPRPVPRVTTKVSITRLETASPPTRIRTTTSGVPRGGEPNQRPELKNHIDRVDAWVGTYFEVKIPSDTFYDHEDTTTDKLKLTLKLREQQLVGEKSWVQFNSNSQLMYGLPDSSHVGKHEYFMHATDKGGLSAVDAFEIHVHRRPQGDRAPARFKAKFVGDPALVLNDIHKKIALVKKLAFAFGDRNCSTITLQNITRGSIVVEWTNNTLPLEPCPKEQIAGLSRRIAEDDGKPRPAFSNALEPDFKATSITVTGSGSCRHLQFIPVVPPRRVPSEAPPTEVPDRDPEKSSEDDVYLHTVIPAVVVAAILLIAGIIAMICYRKKRKGKLTLEDQATFIKKGVPIIFADELDDSKPPPSSSMPLILQEEKAPLPPPEYPNQSVPETTPLNQDTMGEYTPLRDEDPNAPPYQPPPPFTAPMEGKGSRPKNMTPYRSPPPYVPP

SEQ ID NO: 65670 - protein, 62 aa, Homo sapiens
LSPAFPPHLRTARCSAASGPTGWLARCADPAICPGGCHSRQPPSVFPRVTYLPQASPTQATH

SEQ ID NO: 65671 - protein, 20 aa, Homo sapiens
IKSANYVKLAYLPLLCLSLA

SEQ ID NO: 65672 - protein, 359 aa, Homo sapiens
LGLVLLLLLLSLLCGAAGSQEAGTGAGAGSLAGSCGCGTPQRPGAHGSSAAAHRYSREANAPGPVPGERQLAHSKMVPIPAGVFTMGTDDPQIKQDGEAPARRVTIDAFYMDAYEVSNTEFEKFVNSTGYLTEAEKFGDSFVFEGMLSEQVKTNIQQAVAAAPWWLPVKGANWRHPEGPDSTILHRPDHPVLHVSWNDAVAYCTWAGKRLPTEAEWEYSCRGGLHNRLFPWGNKLQPKGQHYANIWQGEFPVTNTGEDGFQGTAPVDAFPPNGYGLYNIVGNAWEWTSDWWTVHHSVEETLNPKGPPSGKDRVKKGGSYMCHRSYCYRYRCAARSQNTPDSSASNLGFRCAADRLPTMD

SEQ ID NO: 65673 - protein, 12 aa, Homo sapiens
KMKMLLAFAVST

SEQ ID NO: 65674 - protein, 13 aa, Homo sapiens
LKLYTGLMVVLLC

SEQ ID NO: 65675 - protein, 23 aa, Homo sapiens
VTLLVALSLITSKSLAAELLVLK

SEQ ID NO: 65676 - protein, 105 aa, Homo sapiens
ISLCVNMTSKLAVALLAAFLISAALCEGAVLPRSAKELRCQCIKTYSKPFHPKFIKELRVIESGPHCANTEIIVKLSDGRELCLDPKENWVQRVVEKFLKRAENS

SEQ ID NO: 65677 - protein, 14 aa, Homo sapiens
ICVFSVKIGMLVSL

SEQ ID NO: 65678 - protein, 19 aa, Homo sapiens
LFAVGKPRQLLLPLVLPLL

SEQ ID NO: 65679 - protein, 35 aa, Homo sapiens
ISWLCTYIIFARCFLNLQVTLSNLFSEMRCMRWKK

SEQ ID NO: 65680 - protein, 885 aa, Homo sapiens
VARDLKMRLHLLLLLALCGAGTTAAELSYSLRGNWSICNGNGSLELPGAVPGCVHSALFQQGLIQDSYYRFNDLNYRWVSLDNWTYSKEFKIPFEISKWQKVNLILEGVDTVSKILFNEVTIGETDNMFNRYSFDITNVVRDVNSIELRFQSAVLYAAQQSKAHTRYQVPPDCPPLVQKGECHVNFVRKEQCSFSWDWGPSFPTQGIWKDVRIEAYNICHLNYFTFSPIYDKSAQEWNLEIESTFDVVSSKPVGGQVIVAIPKLQTQQTYSIELQPGKRIVELFVNISKNITVETWWPHGHGNQTGYNMTVLFELDGGLNIEKSAKVYFRTVELIEEPIKGSPGLSFYFKINGFPIFLKGSNWIPADSFQDRVTSELLRLLLQSVVDANMNTLRVWGGGIYEQDEFYELCDELGIMVWQDFMFACALYPTDQGFLDSVTAEVAYQIKRLKSHPSIIIWSGNNENEEALMMNWYHISFTDRPIYIKDYVTLYVKNIRELVLAGDKSRPFITSSPTNGAETVAEAWVSQNPNSNYFGDVHFYDYISDCWNWKVFPKARFASEYGYQSWPSFSTLEKVSSTEDWSFNSKFSLHRQHHEGGNKQMLYQAGLHFKLPQSTDPLRTFKDTIYLTQVMQAQCVKTETEFYRRSRSEIVDQQGHTMGALYWQLNDIWQAPSWASLEYGGKWKMLHYFAQNFFAPLLPVGFENENTFYIYGVSDLHSDYSMTLSVRVHTWSSLEPVCSRVTERFVMKGGEAVCLYEEPVSELLRRCGNCTRESCVVSFYLSADHELLSPTNYHFLSSPKEAVGLCKAQITAIISQQGDIFVFDLETSAVAPFVWLDVGSIPGRFSDNGFLMTEKTRTILFYPWEPTSKNELEQSFHVTSLTDIY

SEQ ID NO: 65681 - protein, 17 aa, Homo sapiens
IGGMSNPSSRMREHSAV

SEQ ID NO: 65682 - protein, 11 aa, Homo sapiens
LKSFNMILILS

SEQ ID NO: 65683 - protein, 15 aa, Homo sapiens
IYIIIFYLIRTPQSI

SEQ ID NO: 65684 - protein, 39 aa, Homo sapiens
LGVASSCQIPCSPGDPEKHRAIPDPGTFRRLAAIWVPSS

SEQ ID NO: 65685 - protein, 48 aa, Homo sapiens
VAAAAVVFSWCPAETAAAQGVAGPTQDLPGPSALRDKGPALAKADGQE

SEQ ID NO: 65686 - protein, 145 aa, Homo sapiens
KMLLAMVLTSALLLCSVAGQGCPTLAGILDINFLINKMQEDPASKCHCSANVTSCLCLGIPSDNCTRPCFSERLSQMTNTTMQTRYPLIFSRVKKSVEVLKNNKCPYFSCEQPCNQTTAGNALTFLKSLLEIFQKEKMRGMRGKI

SEQ ID NO: 65687 - protein, 26 aa, Homo sapiens
LFYDSLVVFLSVFLSFLSPMPVACRK

SEQ ID NO: 65688 - protein, 110 aa, Homo sapiens
VTLVIAYIMTVTDFGWEDALHTVRAGRSCANPNVGFQRQLQEFEKHEVHQYRQWLKEEYGESPLQDAEEAKNILGKYKEQGRTEPQPGARRWSSFPALAPLTYDNYTTET

SEQ ID NO: 65689 - protein, 365 aa, Homo sapiens
LLLVIVWTLFGPSGLGEELLSLSLASLLPAPASPGPPLALPRLLIPNQEACSGPGAPPFLLILVCTAPENLNQRNAIRASWGGLREARGLRVQTLFLLGEPNAQHPVWGSQGSDLASESAAQGDILQAAFQDSYRNLTLKTLSGLNWAEKHCPMARYVLKTDDDVYVNVPELVSELVLRGGRWGQWERSTEPQREAEQEGGQVLHSEEVPLLYLGRVHWRVNPSRTPGGRHRVSEEQWPHTWGPFPPYASGTGYVLSASAVQLILKVASRAPLLPLEDVFVGVSARRGGLAPTQCVKLAGATHYPLDRCCYGKFLLTSHRLDPWKMQEAWKLVGGSDGERTAPFCSWFQGVLGILRCRAIAWLQS

SEQ ID NO: 65690 - protein, 34 aa, Homo sapiens
KSNFSQKEKSFPFLLHSLGKLTLKGCSSLNTVLS

SEQ ID NO: 65691 - protein, 21 aa, Homo sapiens
RSRLEEVAALSPVAQSLLLLL

SEQ ID NO: 65692 - protein, 13 aa, Homo sapiens
VSLSAALATWLSF

SEQ ID NO: 65693 - protein, 24 aa, Homo sapiens
TATAAQDPRCPHPSRAGAPMARPR

SEQ ID NO: 65694 - protein, 1240 aa, Homo sapiens
LFYLPFLWFCGWTFTTKADSMGDQQLYKTNHVAHGSENLFYQQPPLGVHSGLNHNYGNAVTGGGMDAPQASPISPHFPQDTRDGLGLPVGSKNLGQMDTSRQGGWGSHAGPGNHVQLRGNLANSNMMWGAPAQAEPTDGYQYTYSQASEIRTQKLTSGVLHKLDSFTQVFANQNLRIQVNNMAQVLHTQSAVMDGAPDSALRQLLSQKPMEPPAPAIPSRYQQVPQQPHPGFTGGLSKPALQVGQHPTQGHLYYDYQQPLAQVPVQGGQPLQAPQMLSQHMQQMQQHQYYPPQQQQQAGQQRISMQEIQTQPQQIRPSQPQPPPQQQQPQQLQLQQRQGSMQIPQYYQPQPMMQHLQEQQQQQMHLQPPSYHRDPHQYTPEQAHTVQLIPLGSMSQYYYQEPQQPYSHPLYQQSHLSQHQQREDSQLKTYSSDRQAQAMLSSHGDLGPPDTGMGDPASSDLTRVSSTLPHRPLLSPSGIHLNNMGPQHQQLSPSAMWPQMHLPDGRAQPGSPESSGQPKGAFGEQFDAKNKLTCSICLKEFKNLPALNGHMRSHGGMRASPNLKQEEGEKVLPPQPQPPLPPPPPPPPPPQLPPEAESLTPMVMPVSVPVKLLPPKPSSQGFTNSTVAAPSARDKPASSMSDDEMPVLVRMTLSPPHSPQGAAPRTPAEIPRKHQPSVPKAEEPLKTVQEKKKFRHRPEPLFIPPPPSYNPNPAASYSGATLYQSQLRSPRVLGDHLLLDPTHELPPYTPPPMLSPVRQGSGLFSNVLISGHGPGAHPQLPLTPLTPTPRVLLCRSNSIDGSNVTVTPGPGEQTVDVEPRINIGLRFQAEIPELQDISALAQDTHKATLVWKPWPELENHDLQQRVENLLNLCCSSALPGGGTNSEFALHSLFEAKGDVMVALEMLLLRKPVRLKCHPLANYHYAGSDKWTSLERKLFNKALATYSKDFIFVQKMVKSKTVAQCVEYYYTWKKIMRLGRKHRTRLAEIIDDCVTSEEEEELEEEEEEDPEEDRKSTKEEESEVPKSPEPPPVPVLAPTEGPPLQALGQPSGSFICEMPNCGAVFSSRQALNGHARIHGGTNQVTKARGAIPSGKQKPGGTQSGYCSVKSSPSHSTTSGETDPTTIFPCKECGKVFFKIKSRNAHMKTHRQQEEQQRQKAQKAAFAAEMAATIERTTGPVGAPGLLPLDQLSLIKPIKDVDILDDDVVQQLGGVMEEAEVVDTDLLLDDQDSVLLQGDAEL

SEQ ID NO: 65695 - protein, 21 aa, Homo sapiens
IAYLKTVFPTFVKLCMFLLPM

SEQ ID NO: 65696 - protein, 1449 aa, Homo sapiens
LLETSPKLGMDTTAAAALPAFVALLLLSPWPLLGSAQGQFSAGGCTFDDGPGACDYHQDLYDDFEWVHVSAQEPHYLPPEMPQGSYMIVDSSDHDPGEKARLQLPTMKENDTHCIDFSYLLYSQKGLNPGTLNILVRVNKGPLANPIWNVTGFTGRDWLRAELAVSTFWPNEYQVIFEAEVSGGRSGYIAIDDIQVLSYPCDKSPHFLRLGDVEVNAGQNATFQCIATGRDAVHNKLWLQRRNGEDIPVAQTKNINHRRFAASFRLQEVTKTDQDLYRCVTQSERGSGVSNFAQLIVREPPRPIAPPQLLGVGPTYLLIQLNANSIIGDGPIILKEVEYRMTSGSWTETHAVNAPTYKLWHLDPDTEYEIRVLLTRPGEGGTGLPGPPLITRTKCAEPMRTPKTLKIAEIQARRIAVDWESLGYNITRCHTFNVTICYHYFRGHNESKADCLDMDPKAPQHVVNHLPPYTNVSLKMILTNPEGRKESEETIIQTDEDVPGPVPVKSLQGTSFENKIFLNWKEPLDPNGIITQYEISYSSIRSFDPAVPVAGPPQTVSNLWNSTHHVFMHLHPGTTYQFFIRASTVKGFGPATAINVTTNISAPTLPDYEGVDASLNETATTITVLLRPAQAKGAPISAYQIVVEELHPHRTKREAGAMECYQVPVTYQNAMSGGAPYYFAAELPPGNLPEPAPFTVGDNRTYQGFWNPPLAPRKGYNIYFQAMSSVEKETKTQCVRIATKAAATEEPEVIPDPAKQTDRVVKIAGISAGILVFILLLLVVILIVKKSKLAKKRKDAMGNTRQEMTHMVNAMDRSYADQSTLHAEDPLSITFMDQHNFSPRYENHSATAESSRLLDVPRYLCEGTESPYQTGQLHPAIRVADLLQHINLMKTSDSYGFKEEYESFFEGQSASWDVAKKDQNRAKNRYGNIIAYDHSRVILQPVEDDPSSDYINANYIDGYQRPSHYIATQGPVHETVYDFWRMIWQEQSACIVMVTNLVEVGRVKCYKYWPDDTEVYGDFKVTCVEMEPLAEYVVRTFTLERRGYNEIREVKQFHFTGWPDHGVPYHATGLLSFIRRVKLSNPPSAGPIVVHCSAGAGRTGCYIVIDIMLDMAEREGVVDIYNCVKALRSRRINMVQTEEQYIFIHDAILEACLCGETAIPVCEFKAAYFDMIRIDSQTNSSHLKDEFQTLNSVTPRLQAEDCSIACLPRNHDKNRFMDMLPPDRCLPFLITIDGESSNYINAALMDSYRQPAAFIVTQYPLPNTVKDFWRLVYDYGCTSIVMLNEVDLSQGCPQYWPEEGMLRYGPIQVECMSCSMDCDVINRIFRICNLTRPQEGYLMVQQFQYLGWASHREVPGSKRSFLKLILQVEKWQEECEEGEGRTIIHCLNGGGRSGMFCAIGIVVEMVKRQNVVDVFHAVKTLRNSKPNMVEAPEQYRFCYDVALEYLESS

SEQ ID NO: 65697 - protein, 13 aa, Homo sapiens
LRIMCVGVSWTLL

SEQ ID NO: 65698 - protein, 24 aa, Homo sapiens
KISTLKMLILFMDLWPNGTCTGSG

SEQ ID NO: 65699 - protein, 75 aa, Homo sapiens; identical to SEQ ID NO: 24174

SEQ ID NO: 65700 - protein, 12 aa, Homo sapiens
LLLCIQIFMCLF

SEQ ID NO: 65701 - protein, 938 aa, Homo sapiens
LPIPGCPTFVRLSSALYSRAPSPSRPPRSPRRAPATQVALKSSPSERESNGRGRTKAPSDRAMGDSDDEYDRRRRDKFRRERSDYDRSRERDERRRGDDWNDREWDRGRERRSRGEYRDYDRNRRERFSPPRHELSPPQKRMRRDWDEHSSDPYHSGYEMPYAGGGGGPTYGPPQPWGHPDVHIMQHHVLPIQARLGSIAEIDLGVPPPVMKTFKEFLLSLDDSVDETEAVKRYNDYKLDFRRQQMQDFFLAHKDEEWFRSKYHPDEVGKRRQEARGALQNRLRVFLSLMETGWFDNLLLDIDKADAIVKMLDAAVIKMEGGTENDLRILEQEEEEEQAGKPGEPSKKEEGRAGAGLGDGERKTNDKDEKKEDGKQAENDSSNDDKTKKSEGDGDKEEKKEDSEKEAKKSSKKRNRKHSGDDSFDEGSVSESESESESGQAEEEKEEAEEALKEKEKPKEEEWEKPKDAAGLECKPRPLHKTCSLFMRNIAPNISRAEIISLCKRYPGFMRVALSEPQPERRFFRRGWVTFDRSVNIKEICWNLQNIRLRECELSPGVNRDLTRRVRNINGITQHKQIVRNDIKLAAKLIHTLDDRTQLWASEPGTPPLPTSLPSQNPILKNITDYLIEEVSAEEEELLGSSGGAPPEEPPKEGNPAEINVERDEKLIKVLDKLLLYLRIVHSLDYYNTCEYPNEDEMPNRCGIIHVRGPMPPNRISHGEVLEWQKTFEEKLTPLLSVRESLSEEEAQKMGRKDPEQEVEKFVTSNTQELGKDKWLCPLSGKKFKGPEFVRKHIFNKHAEKIEEVKKEVAFFNNFLTDAKRPALPEIKPAQPPGPAQILPPGLTPGLPYPHQTPQGLMPYGQPRPPILGYGAGAVRPAVPTGGPPYPHAPYGAGRGNYDAFRGQGGYPGKPRNRMVRGDPRAIVEYRDLDAPDDVDFF

SEQ ID NO: 65702 - protein, 258 aa, Homo sapiens
LAPTMSAELNVPIDPSAPACPEPGHKGMDYRDWVRRSYLELVTSNHHSVQALSWRKLYLSRAKLKASSRTSALLSGFAMVAMVEVQLETQYQYPRPLLIAFSACTTVLVAVHLFALLISTCILPNVEAVSNIHNLNSISESPHERMHPYIELAWGFSTVLGILLFLAEVVLLCWIKFLPVDARRQPGPPPGPGSHTGWQAALVSTIIMVPVGLIFVVFTIHFYRSLVRHKTERHNREIEELHKLKVQLDGHERSLQVL

SEQ ID NO: 65703 - protein, 160 aa, Homo sapiens
VTLNSAICVLSTVLIMEFPDLGKHCSEKTCKQLDFLPVKCDACKQDFCKDHFPYAAHKCPFAFQKDVHVPVCPLCNTPIPVKKGQIPDVVVGDHIDRDCDSHPGKKKEKIFTYRCSKEGCKKKEMLQMVCAQCHGNFCIQHRHPLDHSCRHGSRPTIKAG

SEQ ID NO: 65704 - protein, 458 aa, Homo sapiens
VGAARLRFPGGSRPLRARACVLALAVLALPERNNADSMSAHSMLCERIAIAKELIKRAESLSRSRKGGIEGGAKLCSKLKAELKFLQKVEAGKVAIKESHLQSTNLTHLRAIVESAENLEEVVSVLHVFGYTDTLGEKQTLVVDVVANGGHTWVKAIGRKAEALHNIWLGRGQYGDKSIIEQAEDFLQASHQQPVQYSNPHIIFAFYNSVSSPMAEKLKEMGISVRGDIVAVNALLDHPEELQPSESESDDEGPELLQVTRVDRENILASVAFPTEIKVDVCKRVNLDITTLITYVSALSYGGCHFIFKEKVLTEQAEQERKEQVLPQLEAFMKDKELFACESAVKDFQSILDTLGGPGERERATVLIKRINVVPDQPSERALRLVASSKINSRSLTIFGTGDTLKAITMTANSGFVRAANNQGVKFSVFIHQPRALTESKEALATPLPKDYTTDSEH

SEQ ID NO: 65705 - protein, 55 aa, Homo sapiens
LSILLAVVLTVLLAVLIYSCFNSCRSTSLSGPEETGSVRRYTTHLAFSTLAEGDS

SEQ ID NO: 65706 - protein, 33 aa, Homo sapiens
MPLLRGLLWLQVLCAGPLHTEAVVLLKQKVWCK

SEQ ID NO: 65707 - protein, 946 aa, Homo sapiens
VCFLKMAGAAAAVAAGAAAGAAAAAVSVAAPGRASAPPPPPPVYCVCRQPYDVNRFMIECDICKDWFHGSCVGVEEHHAVDIDLYHCPNCAVLHGSSLMKKRRNWHRHDYTEIDDGSKPVQAGTRTFIKELRSRVFPSADEIIIKMHGSQLTQRYLEKHGFDVPIMVPKLDDLGLRLPSPTFSVMDVERYVGGDKVIDVIDVARQADSKMTLHNYVKYFMNPNRPKVLNVISLEFSDTKMSELVEVPDIAKKLSWVENYWPDDSVFPKPFVQKYCLMGVQDSYTDFHIDFGGTSVWYHVLWGEKIFYLIKPTDENLARYESWSSSVTQSEVFFGDKVDKCYKCVVKQGHTLFVPTGWIHAVLTSQDCMAFGGNFLHNLNIGMQLRCYEMEKRLKTPDLFKFPFFEAICWFVAKNLLETLKELREDGFQPQTYLVQGVKALHTALKLWMKKELVSEHAFEIPDNVRPGHLIKELSKVIRAIEEENGKPVKSQGIPIVCPVSRSSNEATSPYHSRRKMRKLRDHNVRTPSNLDILELHTREVLKRLEMCPWEEDILSSKLNGKFNKHLQPSSTVPEWRAKDNDLRLLLTNGRIIKDERQPFADQSLYTADSENEEDKRRTKKAKMKIEESSGVEGVEHEESQKPLNGFFTRVKSELRSRSSGYSDISESEDSGPECTALKSIFTTEESESSGDEKKQEITSNFKEESNVMRNFLQKSQKPSRSEIPIKRECPTSTSTEEEAIQGMLSMAGLHYSTCLQRQIQSTDCSGERNSLQDPSSCHGSNHEVRQLYRYDKPVECGYHVKTEDPDLRTSSWIKQFDTSRFHPQDLSRSQKCIRKEGSSEISQRVQSRNYVDSSGSSLQNGKYMQNSNLTSGACQISNGSLSPERPVGETSFSVPLHPTKRPASNPPPISNQATKGKRPKKGMATAKQRLGKILKLNRNGHARFFV

SEQ ID NO: 65708 - protein, 466 aa, Homo sapiens
ISQLPAVATMSWVLLPVLWLIVQTQAIAIKQTPELTLHEIVCPKKLHILHKREIKNNQTEKHGKEERYEPEVQYQMILNGEEIILSLQKTKHLLGPDYTETLYSPRGEEITTKPENMEHCYYKGNILNEKNSVASISTCDGLRGYFTHHHQRYQIKPLKSTDEKEHAVFTSNQEEQDPANHTCGVKSTDGKQGPIRISRSLKSPEKEDFLRAQKYIDLYLVLDNAFYKNYNENLTLIRSFVFDVMNLLNVIYNTIDVQVALVGMEIWSDGDKIKVVPSASTTFDNFLRWHSSNLGKKIHDHAQLLSGISFNNRRVGLAASNSLCSPSSVAVIEAKKKNNVALVGVMSHELGHVLGMPDVPFNTKCPSGSCVMNQYLSSKFPKDFSTSCRAHFERYLLSQKPKCLLQAPIPTNIMTTPVCGNHLLEVGEDCDCGSPKECTNLCCEALTCKLKPGTDCGGDAPNHTTE

SEQ ID NO: 65709 - protein, 25 aa, Homo sapiens
VAGFLLPALMSKTPWMVSLSVGCSS

SEQ ID NO: 65710 - protein, 60 aa, Homo sapiens
TAAWASSLLIMWRCCPQMRSLSPSSPRPTRCWSMERLWPSTPSRGTWRWSCPSARESTSA

SEQ ID NO: 65711 - protein, 306 aa, Homo sapiens
RFLLARVLGYLVVMEAVLTEELDEEEQLLRRHRKEKKELQAKIQGMKNAVPKNDKKRRKQLTEDVAKLEKEMEQKHREELEQLKLTTKENKIDSVAVNISNLVLENQPPRISKAQKRREKKAALEKEREERIAEAEIENLTGARHMESEKLAQILAARQLEIKQIPSDGHCMYKAIEDQLKEKDCALTVVALRSQTAEYMQSHVEDFLPFLTNPNTGDMYTPEEFQKYCEDIVNTAAWGGQLELRALSHILQTPIEIIQADSPPIIVGEEYSKKPLILVYMRHAYGLGEHYNSVTRLVNIVTENCS

SEQ ID NO: 65712 - protein, 580 aa, Homo sapiens
ISVLAAAVSLLYFSVVIIRNKYGRLTRDKKFQRYLARVTDIEATDTNNPNVNYGIVVDCGSSGSRVFVYCWPRHNGNPHDLLDIRQMRDKNRKPVVMKIKPGISEFATSPEKVSDYISPLLNFAAEHVPRAKHKETPLYILCTAGMRILPESQQKAILEDLLTDIPVHFDFLFSDSHAEVISGKQEGVYAWIGINFVLGRFEHIEDDDEAVVEVNIPGSESSEAIVRKRTAGILDMGGVSTQIAYEVPKTVSFASSQQEEVAKNLLAEFNLGCDVHQTEHVYRVYVATFLGFGGNAARQRYEDRIFANTIQKNRLLGKQTGLTPDMPYLDPCLPLDIKDEIQQNGQTIYLRGTGDFDLCRETIQPFMNKTNETQTSLNGVYQPPIHFQNSEFYGFSEFYYCTEDVLRMGGDYNAAKFTKAAKDYCATKWSILRERFDRGLYASHADLHRLKYQCFKSAWMFEVFHRGFSFPVNYKSLKTALQVYDKEVQWTLGAILYRTRFLPLRDIQQEAFRASHTHWRGVSFVYNHYLFSGCFLVVLLAILLYLLRLRRIHRRTPRSSSAAALWMEEGLPAQNAPGTL

SEQ ID NO: 65713 - protein, 21 aa, Homo sapiens
MFAVLQTFKSSFGLIMLICEF

SEQ ID NO: 65714 - protein, 85 aa, Homo sapiens
TADSLKMDLFIGSTLKQPTWMGKRVVSLFPVYLQCPFFHMKRISRLLNQSPSVVSVLVQKNKTEKRSQRNSSPVPTVATVAIHPV

SEQ ID NO: 65715 - protein, 1595 aa, Homo sapiens
IMKLYVFLVNTGTTLTFDTELTVQTVADLKHAIQSKYKIAIQHQVLVVNGGECMAADRRVCTYSAGTDTNPIFLFNKEMILCDRPPAIPKTTFSTENDMEIKVEESLMMPAVFHTVASRTQLALEMYEVAKKLCSFCEGLVHDEHLQHQGWAAIMANLEDCSNSYQKLLFKFESIYSNYLQSIEDIKLKLTHLGTAVSVMAKIPLLECLTRHSYRECLGRLDSLPEHEDSEKAEMKRSTELVLSPDMPRTTNESLLTSFPKSVEHVSPDTADAESGKEIRESCQSTVHQQDETTIDTKDGDLPFFNVSLLDWINVQDRPNDVESLVRKCFDSMSRLDPRIIRPFIAECRQTIAKLDNQNMKAIKGLEDRLYALDQMIASCGRLVNEQKELAQGFLANQKRAENLKDASVLPDLCLSHANQLMIMLQNHRKLLDIKQKCTTAKQELANNLHVRLKWCCFVMLHADQDGEKLQALLRLVIELLERVKIVEALSTVPQMYCLAVVEVVRRKMFIKHYREWAGALVKDGKRLYEAEKSKRESFGKLFRKSFLRNRLFRGLDSWPPSFCTQKPRKFDCELPDISLKDLQFLQSFCPSEVQPFLRVPLLCDFEPLHQHVLALHNLVKAAQSLDEMSQTITDLLSEQKASVSQTSPQSASSPRMESTAGITTTTSPRTPPPLTVQDPLCPAVCPLEELSPDSIDAHTFDFETIPHPNIEQTIHQVSLDLDSLAESPESDFMSAVNEFVIEENLSSPNPISDPQSPEMMVESLYSSVINAIDSRRMQDTNVCGKEDFGDHTSLNVQLERCRVVAQDSHFSIQTIKEDLCHFRTFVQKEQCDFSNSLKCTAVEIRNIIEKVKCSLEITLKEKHQKELLSLKNEYEGKLDGLIKETEENENKIKKLKGELVCLEEVLQNKDNEFALVKHEKEAVICLQNEKDQKLLEMENIMHSQNCEIKELKQSREIVLEDLKKLHVENDEKLQLLRAELQSLEQSHLKELEDTLQVRHIQEFEKVMTDHRVSLEELKKENQQIINQIQESHAEIIQEKEKQLQELKLKVSDLSDTRCKLEVELALKEAETDEIKILLEESRAQQKETLKSLLEQETENLRTEISKLNQKIQDNNENYQVGLAELRTLMTIEKDQCISELISRHEEESNILKAELNKVTSLHNQAFEIEKNLKEQIIELQSKLDSELSALERQKDEKITQQEEKYEAIIQNLEKDRQKLVSSQEQDREQLIQKLNCEKDEAIQTALKEFKLEREVVEKELLEKVKHLENQIAKSPAIDSTRGDSSSLVAELQEKLQEEKAKFLEQLEEQEKRKNEEMQNVRTSLIAEQQTNFNTVLTREKMRKENIINDLSDKLKSTMQQQERDKDLIESLSEDRARLLEEKKKLEEEVSKLRSSSFVPSPYVATAPELYGACAPELPGESDRSAVETADEGRVDSAMETSMMSVQENIHMLSEEKQRIMLLERTLQLKEEENKRLNQRLMSQSMSSVSSRHSEKIAIRDFQVGDLVLIILDERHDNYVLFTVSPTLYFLHSESLPALDLKPGEGASGASRRPWVLGKVMEKEYCQAKKAQNRFKVPLGTKFYRVKAVSWNKKV

SEQ ID NO: 65716 - protein, 64 aa, Homo sapiens
LQLAVWNVAQEALIFLAGTVAAVLACGPGQPLPSRRAGEDWCMLGFVVRPHEARPGNIMGRNGA

SEQ ID NO: 65717 - protein, 44 aa, Homo sapiens
LHHMYLIRESHASGSSSVTSSCSLPSESPTLRQWRPCSCLPHPR

SEQ ID NO: 65718 - protein, 427 aa, Homo sapiens
LDGSRMGKAKVPASKRAPSSPVAKPGPVKTLTRKKNKKKKRFWKSKAREVSKKPASGPGAVVRPPKAPEDFSQNWKALQEWLLKQKSQAPEKPLVISQMGSKKKPKIIQQNKKETSPQVKGEEMPAGKDQEASRGSVPSGSKMDRRAPVPRTKASGTEHNKKGTKERTNGDIVPERGDIEHKKRKAKEAAPAPPTEEDIWFDDVDPADIEAAIGPEAAKIARKQLGQSEGSVSLSLVKEQAFGGLTRALALDCEMVGVGPKGEESMAARVSIVNQYGKCVYDKYVKPTEPVTDYRTAVSGIRPENLKQGEELEVVQKEVAEMLKGRILVGHALHNDLKVLFLDHPKKKIRDTQKYKPFKSQVKSGRPSLRLLSEKILGLQVQQAEHCSIQDAQAAMRLYVMVKKEWESMARDRRPLLTAPDHCSDDA

SEQ ID NO: 65719 - protein, 39 aa, Homo sapiens
IRMAGLVWLQMMPVTELLQLLLLTQKMKRLLDWQQNKVE

SEQ ID NO: 65720 - protein, 71 aa, Homo sapiens
MGWIRRQSLNSWNSVFRMAQFSKSPTKALPPIRTQTTLGAFHQLNQALFLSQPRGLEDHVMISAMWIGINF

SEQ ID NO: 65721 - protein, 22 aa, Homo sapiens
MRVLGLGFFSSCFFFFDLRIKL

SEQ ID NO: 65722 - protein, 39 aa, Homo sapiens
ILLIYFLIMLISNEDSCLKIFFNLMVSIFCKNHVNLFHS

SEQ ID NO: 65723 - protein, 33 aa, Homo sapiens
MMLLIRMMSMTTILHLSGTADGKGGAAEFPCSS

SEQ ID NO: 65724 - protein, 52 aa, Homo sapiens
LIFFSWCVWWLFLSVEGKRRYHPRLSPTPLQNGFSDTPGSEGVGSPGCARSK

SEQ ID NO: 65725 - protein, 539 aa, Homo sapiens; identical to SEQ ID NO: 58831

SEQ ID NO: 65726 - protein, 9 aa, Homo sapiens
IVITSLLVL

SEQ ID NO: 65727 - protein, 1603 aa, Homo sapiens
LLLLLLLLALCGCPAPAAASPLLLFANRRDVRLVDAGGVKLESTIVVSGLEDAAAVDFQFSKGAVYWTDVSEEAIKQTYLNQTGAAVQNVVISGLVSPDGLACDWVGKKLYWTDSETNRIEVANLNGTSRKVLFWQDLDQPRAIALDPAHGYMYWTDWGETPRIERAGMDGSTRKIIVDSDIYWPNGLTIDLEEQKLYWADAKLSFIHRANLDGSFRQKVVEGSLTHPFALTLSGDTLYWTDWQTRSIHACNKRTGGKRKEILSALYSPMDIQVLSQERQPFFHTRCEEDNGGCSHLCLLSPSEPFYTCACPTGVQLQDNGRTCKAGAEEVLLLARRTDLRRISLDTPDFTDIVLQVDDIRHAIAIDYDPLEGYVYWTDDEVRAIRRAYLDGSGAQTLVNTEINDPDGIAVDWVARNLYWTDTGTDRIEVTRLNGTSRKILVSEDLDEPRAIALHPVMGLMYWTDWGENPKIECANLDGQERRVLVNASLGWPNGLALDLQEGKLYWGDAKTDKIEVINVDGTKRRTLLEDKLPHIFGFTLLGDFIYWTDWQRRSIERVHKVKASRDVIIDQLPDLMGLKAVNVAKVVGTNPCADRNGGCSHLCFFTPHATRCGCPIGLELLSDMKTCIVPEAFLVFTSRAAIHRISLETNNNDVAIPLTGVKEASALDFDVSNNHIYWTDVSLKTISRAFMNGSSVEHVVEFGLDYPEGMAVDWMGKNLYWADTGTNRIEVARLDGQFRQVLVWRDLDNPRSLALDPTKGYIYWTEWGGKPRIVRAFMDGTNCMTLVDKVGRANDLTIDYADQRLYWTDLDTNMIESSNMLGQERVVIADDLPHPFGLTQYSDYIYWTDWNLHSIERADKTSGRNRTLIQGHLDFVMDILVFHSSRQDGLNDCMHNNGQCGQLCLAIPGGHRCGCASHYTLDPSSRNCSPPTTFLLFSQKSAISRMIPDDQHSPDLILPLHGLRNVKAIDYDPLDKFIYWVDGRQNIKRAKDDGTQPFVLTSLSQGQNPDRQPHDLSIDIYSRTLFWTCEATNTINVHRLSGEAMGVVLRGDRDKPRAIVVNAERGYLYFTNMQDRAAKIERAALDGTEREVLFTTGLIRPVALVVDNTLGKLFWVDADLKRIESCDLSGANRLTLEDANIVQPLGLTILGKHLYWIDRQQQMIERVEKTTGDKRTRIQGRVAHLTGIHAVEEVSLEEFSAHPCARDNGGCSHICIAKGDGTPRCSCPVHLVLLQNLLTCGEPPTCSPDQFACATGEIDCIPGAWRCDGFPECDDQSDEEGCPVCSAAQFPCARGQCVDLRLRCDGEADCQDRSDEADCDAICLPNQFRCASGQCVLIKQQCDSFPDCIDGSDELMCEITKPPSDDSPAHSSAIGPVIGIILSLFVMGGVYFVCQRVVCQRYAGANGPFPHEYVSGTPHVPLNFIAPGGSQHGPFTGIACGKSMMSSVSLMGGRGGVPLYDRNHVTGASSSSSSSTKATLYPPILNPPPSPATDPSLYNMDMFYSSNIPATARPYRPYIIRGMAPPTTPCSTDVCDSDYSASRWKASKYYLDLNSDSDPYPPPPTPHSQYLSAEDSCPPSPATERSYFHLFPPPPSPCTDSS

SEQ ID NO: 65728 - protein, 80 aa, Homo sapiens
RASGDRQGEMTELDETRGRAGGARRKLGKETRSRGTTVGQAAWKISAGSPRQNSHAPGQAVPTAWWRGNLTSGRAPLLHS

SEQ ID NO: 65729 - protein, 829 aa, Homo sapiens
LGLPFLVLLVASVESHLGVLGPKNVSQKDAEFERTYVDEVNSELVNIYTFNHTVTRNRTEGVRVSVNVLNKQKGAPLLFVVRQKEAVVSFQVPLILRGMFQRKYLYQKVERTLCQPPTKNESEIQFFYVDVSTLSPVNTTYQLRVSRMDDFVLRTGEQFSFNTTAAQPQYFKYEFPEGVDSVIVKVTSNKAFPCSVISIQDVLCPVYDLDNNVAFIGMYQTMTKKAAITVQRKDFPSNSFYVVVVVKTEDQACGGSLPFYPFAEDEPVDQGHRQKTLSVLVSQAVTSEAYVSGMLFCLGIFLSFYLLTVLLACWENWRQKKKTLLVAIDRACPESGHPRVLADSFPGSSPYEGYNYGSFENVSGSTDGLVDSAGTGDLSYGYQGRSFEPVGTRPRVDSMSSVEEDDYDTLTDIDSDKNVIRTKQYLYVADLARKDKRVLRKKYQIYFWNIATIAVFYALPVVQLVITYQTVVNVTGNQDICYYNFLCAHPLGNLSAFNNILSNLGYILLGLLFLLIILQREINHNRALLRNDLCALECGIPKHFGLFYAMGTALMMEGLLSACYHVCPNYTNFQFDTSFMYMIAGLCMLKLYQKRHPDINASAYSAYACLAIVIFFSVLGVVFGKGNTAFWIVFSIIHIIATLLLSTQLYYMGRWKLDSGIFRRILHVLYTDCIRQCSGPLYVDRMVLLVMGNVINWSLAAYGLIMRPNDFASYLLAIGICNLLLYFAFYIIMKLRSGERIKLIPLLCIVCTSVVWGFALFFFFQGLSTWQKTPAESREHNRDCILLDFFDDHDIWHFLSSIAMFGSFLVLLTLDDDLDTVQRDKIYVF

SEQ ID NO: 65730 - protein, 14 aa, Homo sapiens
MGMFCISCLVLNFL

SEQ ID NO: 65731 - protein, 18 aa, Homo sapiens
VLLNTLVVLSWCQWVMFG

SEQ ID NO: 65732 - protein, 19 aa, Homo sapiens
MKAIFLNELKFFMMLLICH

SEQ ID NO: 65733 - protein, 27 aa, Homo sapiens
IPAEFLYLVLLLIKGAPVSSFSPSPGT

SEQ ID NO: 65734 - protein, 21 aa, Homo sapiens
ILRGSIFVLYLKQLLGPPWLL

SEQ ID NO: 65735 - protein, 17 aa, Homo sapiens
MDSFCPIPEGSLVPACK

SEQ ID NO: 65736 - protein, 515 aa, Homo sapiens
LLTLGISMILVLLCAFLIPCPPRDLHSTWSRHLGSQGGGDLSPLELADVNGDGLRDVLLSFVMSRNGSAVGVSRPAANLVCLSGMNGSTLWSSLLPEEARDITCLELMPGSLAETICLVTGTHKMLSAFNATSGKAIWTLNPNYLSNGTLAAPVVVLPDLDEDGVRDLVVLAIGELQPDLCFLLVSGRTGNPVGRPVKYNIVGVGNLIGPQVYITTNGAVYILFGFGNIQAVALRDIFVQAQNRDSSPPSLQIEEPEWEKRRSINLSELIDVYSDGVELLQMVKAPDSNCSNLLITTRQSLVLLRGQNLTPYWALRLQGLRSQPTPGYFTDDQTLDFLLQIQDGVGMKKMMVVDGDSGSIVWSYRAPCHMKETPATSAVTSDQKSVFLFWAEGLSAASPNSDIILGTEPPSLHHLYLLHPAFPSILLDLANTTGTVTASEVGINDLWKDAFYVTRTTGPSSEGHPAALVVSKLSLRWALMEGQMAQLQESTPKIGRGELRRFLSRIKFVEAPYEI

SEQ ID NO: 65737 - protein, 30 aa, Homo sapiens
VKEGMNIVEAMKRFGSSGKTSKKITIADCG

SEQ ID NO: 65738 - protein, 20 aa, Homo sapiens
LKTLMGLIVKLYKWMWLCLR

SEQ ID NO: 65739 - protein, 100 aa, Homo sapiens
LTSVETLEDNSEKWAVTPDAGDGVVKPSSRADPAQTSDTLALNNQMVTQNRTPHSVCHQKPQAKSGSWDLQTYSADQRTTGNWESHRKSQDMKKRKYDPS

SEQ ID NO: 65740 - protein, 18 aa, Homo sapiens
MPRTQIPALLLLVLHGHL

SEQ ID NO: 65741 - protein, 191 aa, Homo sapiens
IPILFLSACFITRCVVTFRIFQTCDEKKFQLPENFTELSCYNYGSGSVKNCCPLNWEYFQSSCYFFSTDTISWALSLKNCSAMGAHLVVINSQEEQEFLSYKKPKMREFFIGLSDQVVEGQWQWVDGTPLTKSLSFWDVGEPNNIATLEDCATMRDSSNPRQNWNDVTCFLNYFRICEMVGINPLNKGKSL

SEQ ID NO: 65742 - protein, 198 aa, Homo sapiens
LGILCLVILVIAVVLGTMAIWRSNSGSNTLENGYFLSRNKENHSQPTQSSLEDSVTPTKAVKTTGVLSSPCPPNWIIYEKSCYLFSMSLNSWDGSKRQCWQLGSNLLKIDSSNELGFIVKQVSSQPDNSFWIGLSRPQTEVPWLWEDGSTFSSNLFQIRTTATQENPSPNCVWIHVSVIYDQLCSVPSYSICEKKFSM

SEQ ID NO: 65743 - protein, 29 aa, Homo sapiens
ILLFLDFFLIKRLLQCLSYGVSLCQPGWS

SEQ ID NO: 65744 - protein, 53 aa, Homo sapiens
LGKLEFPAELTALALPLLVLIPRAPKYPPWRNLGQDVHSRPIGAVLLKVGSGI

SEQ ID NO: 65745 - protein, 52 aa, Homo sapiens
RMSTAFCPIHSSLGSMVMCLCILSPLCIASKSLRVCTKSYMKAMGKPGCQWF

SEQ ID NO: 65746 - protein, 29 aa, Homo sapiens
LRQVMGIFSLFFRLTELLCAQNLHSRLRI

SEQ ID NO: 65747 - protein, 34 aa, Homo sapiens
RSFFFSFLFFFLRGGVSSRRPPHHPHPSPPPPPA

SEQ ID NO: 65748 - protein, 676 aa, Homo sapiens
KVLGRSFFWVLFPVLPWAVQAVEHEEVAQRVIKLHRGRGVAAMQSRQWVRDSCRKLSGLLRQKNAVLNKLKTAIGAVEKDVGLSDEEKLFQVHTFEIFQKELNESENSVFQAVYGLQRALQGDYKDVVNMKESSRQRLEALREAAIKEETEYMELLAAEKHQVEALKNMQHQNQSLSMLDEILEDVRKAADRLEEEIEEHAFDDNKSVKGVNFEAVLRVEEEEANSKQNITKREVEDDLGLSMLIDSQNNQYILTKPRDSTIPRADHHFIKDIVTIGMLSLPCGWLCTAIGLPTMFGYIICGVLLGPSGLNSIKSIVQVETLGEFGVFFTLFLVGLEFSPEKLRKVWKISLQGPCYMTLLMIAFGLLWGHLLRIKPTQSVFISTCLSLSSTPLVSRFLMGSARGDKEGDIDYSTVLLGMLVTQDVQLGLFMAVMPTLIQAGASASSSIVVEVLRILVLIGQILFSLAAVFLLCLVIKKYLIGPYYRKLHMESKGNKEILILGISAFIFLMLTVTELLDVSMELGCFLAGALVSSQGPVVTEEIATSIEPIRDFLAIVFFASIGLHVFPTFVAYELTVLVFLTLSVVVMKFLLAALVLSLILPRSSQYIKWIVSAGLAQVSEFSFVLGSRARRAGVISREVYLLILSVTTLSLLLAPVLWRAAITRCVPRPERRSSL

SEQ ID NO: 65749 - protein, 13 aa, Homo sapiens
MFLVLIFSIVMPV

SEQ ID NO: 65750 - protein, 13 aa, Homo sapiens
MLVLLTFCFFIYL

SEQ ID NO: 65751 - protein, 313 aa, Homo sapiens
VVFTCFIVTTGLVLGWFGWDVPVILRNSEETQFSTRVFKKQMRQVKNPFGLEITNPSSASITTGITLTTDCLEDSLLTCYWGCSVQKLYEALQKHVYCFRISTPQALEDALYSEYLYQEQYFIKKDSKEEIYCQLPRDTKIEDFGTVPRSRYPLVALLTLADEDDREIYDIISMVSVIHIPDRTYKLSCRILYQYLLLAQGQFHDLKQLFMSANNNFTPSNNSSSEEKNTDRSLLEKVGLSESEVEPSEENSKDCVVCQNGTVNWVLLPCRHTCLCDGCVKYFQQCPMCRQFVQESFALCSQKEQDKDKPKTL

SEQ ID NO: 65752 - protein, 28 aa, Homo sapiens
IPEATVFLLLSVWHDAFFCRVGALQNTC

SEQ ID NO: 65753 - protein, 56 aa, Homo sapiens
LFWVLAFSVELLWQSSCLKEYMPFMKIFLRVLRIIGSQKVCMPKAEDIWEFFHHEL

SEQ ID NO: 65754 - protein, 16 aa, Homo sapiens
LILTITTVFLAIVCSD

SEQ ID NO: 65755 - protein, 19 aa, Homo sapiens
LRSLPRLFLAITISLPWMM

SEQ ID NO: 65756 - protein, 30 aa, Homo sapiens
VLLHGLFTLLSQTLQLGAWAPLTILIEKGK

SEQ ID NO: 65757 - protein, 21 aa, Homo sapiens
MVMMMMIMTLMIFNRIKIEFF

SEQ ID NO: 65758 - protein, 32 aa, Homo sapiens
VGLLEFYYPWMLLLTWKRLRNNLLICTLLNVP

SEQ ID NO: 65759 - protein, 801 aa, Homo sapiens
IFVFTPGASSVTIIWWVCFLTSVSMSAQTSPAEKGLNPGLMCQESYACSGTDEAIFECDECCSLQCLRCEEELHRQERLRNHERIRLKPGHVPYCDLCKGLSGHLPGVRQRAIVRCQTCKINLCLECQKRTHSGGNKRRHPVTVYNVSNLQESLEAEEMDEETKRKKMTEKVVSFLLVDENEEIQVTNEEDFIRKLDCKPDQHLKVVSIFGNTGDGKSHTLNHTFFYGREVFKTSPTQESCTVGVWAAYDPVHKVAVIDTEGLLGATVNLSQRTRLLLKVLAISDLVIYRTHADRLHNDLFKFLGDASEAYLKHFTKELKATTARCGLDVPLSTLGPAVIIFHETVHTQLLGSDHPSEVPEKLIQDRFRKLGRFPEAFSSIHYKGTRTYNPPTDFSGLRRALEQLLENNTTRSPRHPGVIFKALKALSDRFSGEIPDDQMAHSSFFPDEYFTCSSLCLSCGVGCKKSMNHGKEGVPHEAKSRCRYSHQYDNRVYTCKACYERGEEVSVVPKTSASTDSPWMGLAKYAWSGYVIECPNCGVVYRSRQYWFGNQDPVDTVVRTEIVHVWPGTDGFLKDNNNAAQRLLDGMNFMAQSVSELSLGPTKAVTSWLTDQIAPAYWRPNSQILSCNKCATSFKDNDTKHHCRACGEGFCDSCSSKTRPVPERGWGPAPVRVCDNCYEARNVQLAVTEAQVDDEGGTLIARKVGEAVQNTLGAVVTAIDIPLGLVKDAARPAYWVPDHEILHCHNCRKEFSIKLSKHHCRACGQGFCDECSHDRRAVPSRGWDHPVRVCFNCNKKPGDL

SEQ ID NO: 65760 - protein, 37 aa, Homo sapiens
IDFLPSTQFYSLLYPQCLGRCLERDSLIPGKSEEQAT

SEQ ID NO: 65761 - protein, 1177 aa, Homo sapiens
LGTNSSTMGLAWGLGVLFLMHVCGTNRIPESGGDNSVFDIFELTGAARKGSGRRLVKGPDPSSPAFRIEDANLIPPVPDDKFQDLVDAVRAEKGFLLLASLRQMKKTRGTLLALERKDHSGQVFSVVSNGKAGTLDLSLTVQGKQHVVSVEEALLATGQWKSITLFVQEDRAQLYIDCEKMENAELDVPIQSVFTRDLASIARLRIAKGGVNDNFQGVLQNVRFVFGTTPEDILRNKGCSSSTSVLLTLDNNVVNGSSPAIRTNYIGHKTKDLQAICGISCDELSSMVLELRGLRTIVTTLQDSIRKVTEENKELANELRRPPLCYHNGVQYRNNEEWTVDSCTECHCQNSVTICKKVSCPIMPCSNATVPDGECCPRCWPSDSADDGWSPWSEWTSCSTSCGNGIQQRGRSCDSLNNRCEGSSVQTRTCHIQECDKRFKQDGGWSHWSPWSSCSVTCGDGVITRIRLCNSPSPQMNGKPCEGEARETKACKKDACPINGGWGPWSPWDICSVTCGGGVQKRSRLCNNPTPQFGGKDCVGDVTENQICNKQDCPIDGCLSNPCFAGVKCTSYPDGSWKCGACPPGYSGNGIQCTDVDECKEVPDACFNHNGEHRCENTDPGYNCLPCPPRFTGSQPFGQGVEHATANKQVCKPRNPCTDGTHDCNKNAKCNYLGHYSDPMYRCECKPGYAGNGIICGEDTDLDGWPNENLVCVANATYHCKKDNCPNLPNSGQEDYDKDGIGDACDDDDDNDKIPDDRDNCPFHYNPAQYDYDRDDVGDRCDNCPYNHNPDQADTDNNGEGDACAADIDGDGILNERDNCQYVYNVDQRDTDMDGVGDQCDNCPLEHNPDQLDSDSDRIGDTCDNNQDIDEDGHQNNLDNCPYVPNANQADHDKDGKGDACDHDDDNDGIPDDKDNCRLVPNPDQKDSDGDGRGDACKDDFDHDSVPDIDDICPENVDISETDFRRFQMIPLDPKGTSQNDPNWVVRHQGKELVQTVNCDPGLAVGYDEFNAVDFSGTFFINTERDDDYAGFVFGYQSSSRFYVVMWKQVTQSYWDTNPTRAQGYSGLSVKVVNSTTGPGEHLRNALWHTGNTPGQVRTLWHDPRHIGWKDFTAYRWRLSHRPKTGFIRVVMYEGKKIMADSGPIYDKTYAGGRLGLFVFSQEMVFFSDLKYECRDP

SEQ ID NO: 65762 - protein, 21 aa, Homo sapiens
IKMSQMWWFQNVLLLYMLCSS

SEQ ID NO: 65763 - protein, 13 aa, Homo sapiens
LMPVFFLVYTSSI

SEQ ID NO: 65764 - protein, 297 aa, Homo sapiens
RLVCVDMAVTLSLLLGGRVCAAVTRCGFATRGVAGPGPIGREPDPDSDWEPEERELQEVESTLKRQKQAIRFQKIRRQMEAPGAPPRTLTWEAMEQIRYLHEEFPESWSVPRLAEGFDVSTDVIRRVLKSKFLPTLEQKLKQDQKVLKKAGLAHSLQHLRGSGNTSKLLPAGHSVSGSLLMPGHEASSKDPNHSTALKVIESDTHRTNTPRRRKGRNKEIQDLEESFVPVAAPLGHPRELQKYSSDSESPRGTGSGALPSGQKLEELKAEEPDNFSSKVVQRGREFFDSNGNFLYRI

SEQ ID NO: 65765 - protein, 25 aa, Homo sapiens
VCSFRMCLQSFVFLMLCYFAPDFHL

SEQ ID NO: 65766 - protein, 642 aa, Homo sapiens
LGLPLRLRLLLLLWAAAASAQGHLRSGPRIFAVWKGHVGQDRVDFGQTEPHTVLFHEPGSSSVWVGGRGKVYLFDFPEGKNASVRTVNIGSTKGSCLDKRDCENYITLLERRSEGLLACGTNARHPSCWNLVNGTVVPLGEMRGYAPFSPDENSLVLFEGDEVYSTIRKQEYNGKIPRFRRIRGESELYTSDTVMQNPQFIKATIVHQDQAYDDKIYYFFREDNPDKNPEAPLNVSRVAQLCRGDQGGESSLSVSKWNTFLKAMLVCSDAATNKNFNRLQDVFLLPDPSGQWRDTRVYGVFSNPWNYSAVCVYSLGDIDKVFRTSSLKGYHSSLPNPRPGKCLPDQQPIPTETFQVADRHPEVAQRVEPMGPLKTPLFHSKYHYQKVAVHRMQASHGETFHVLYLTTDRGTIHKVVEPGEQEHSFAFNIMEIQPFRRAAAIQTMSLDAERRKLYVSSQWEVSQVPLDLCEVYGGGCHGCLMSRDPYCGWDQGRCISIYSSERSVLQSINPAEPHKECPNPKPDKAPLQKVSLAPNSRYYLSCPMESRHATYSWRHKENVEQSCEPGHQSPNCILFIENLTAQQYGHYFCEAQEGSYFREAQHWQLLPEDGIMAEHLLGHACALAASLWLGVLPTLTLGLLVH

SEQ ID NO: 65767 - protein, 61 aa, Homo sapiens
LKPVLGLFQFIISGRLLLVLLGEVLDLLLEPLLPLFQSFHGAGKVLQLLLRVGELQGQRPG

SEQ ID NO: 65768 - protein, 83 aa, Homo sapiens
LKCQRLEINCQDPSIKSFLYSINQTICLRLDSIEAKLQALEATCKSLEEKLDLVTNKQHSPIQVPMVAGSPLRTTQMCNKVRW

SEQ ID NO: 65769 - protein, 32 aa, Homo sapiens
IAPPALGFWPRRWRLWLAVTLAFQARPGEATR

SEQ ID NO: 65770 - protein, 328 aa, Homo sapiens
LAGVGTQAPPRRPGGEMAAGQNGHEEWVGSAYLFVESSLDKVVLSDAYAHPQQKVAVYRALQAALAESGGSPDVLQMLKIHRSDPQLIVQLRFCGRQPCGRFLRAYREGALRAALQRSLAAALAQHSVPLQLELRAGAERLDALLADEERCLSCILAQQPDRLRDEELAELEDALRNLKCGSGARGGDGEVASAPLQPPVPSLSEVKPPPPPPPAQTFLFQGQPVVNRPLSLKDQQTFARSVGLKWRKVGRSLQRGCRALRDPALDSLAYEYEREGLYEQAFQLLRRFVQAEGRRATLQRLVEALEENELTSLAEDLLGLTDPNGGLA

SEQ ID NO: 65771 - protein, 23 aa, Homo sapiens
MIKDDVSLFLLFLRRLSCLLFGE

SEQ ID NO: 65772 - protein, 1852 aa, Homo sapiens
TGFREAGSMVGVLAMAAAAAPPPVKDCEIEPCKKRKKDDDTSTCKTITKYLSPLGKTRDRVFAPPKPSNILDYFRKTSPTNEKTQLGKECKIKSPESVPVDSNKDCTTPLEMFSNVEFKKKRKRVNLSHQLNNIKTENEAPIEISSDDSKEDYSLNNDFVESSTSVLRYKKQVEVLAENIQDTKSQPNTMTSLQNSKKVNPKQGTTKNDFKKLRKRKCRDVVDLSESLPLAEELNLLKKDGKDTKQMENTTSHANSRDNVTEAAQLNDSIITVSYEEFLKSHKENKVEEIPDSTMSICVPSETVDEIVKSGYISESENSEISQQVRFKTVTVLAQVHPIPPKKTGKIPRIFLKQKQFEMENSLSDPENEQTVQKRKSNVVIQEEELELAVLEAGSSEAVKPKCTLEERQQFMKAFRQPASDALKNGVKKSSDKQKDLNEKCLYEVGRDDNSKKIMENSGIQMVSKNGNLQLHTDKGSFLKEKNKKLKKKNKKTLDTGAIPGKNREGNTQKKETTFFLKEKQYQNRMSLRQRKTEFFKSSTLFNNESLVYEDIANDDLLKVSSLCNNNKLSRKTSIPVKDIKLTQSKAESEASLLNVSTPKSTRRSGRISSTPTTETIRGIDSDDVQDNSQLKASTQKAANLSEKHSLYTAELITVPFDSESPIRMKFTRISTPKKSKKKSNKRSEKSEATDGGFTSQIRKASNTSKNISKAKQLIEKAKALHISRSKVTEEIAIPLRRSSRHQTLPERKKLSETEDSVIIIDSSPTALKHPEKNQKKLQCLNDVLGKKLNTSTKNVPGKMKVAPLFLVRKAQKAADPVPSFDESSQDTSEKSQDCDVQCKAKRDFLMSGLPDLLKRQIAKKAAALDVYNAVSTSFQRVVHVQQKDDGCCLWHLKPPSCPLLTKFKELNTKVIDLSKCGIALGEFSTLNSKLKSGNSAAVFMRTRKEFTEEVRNLLLEEIRWSNPEFSLKKYFPLLLKKQIEHQVLSSECHSKQELEADVSHKETKRKLVEAENSKSKRKKPNEYSKNLEKTNRKSEELSKRNNSSGIKLDSSKDSGTEDMLWTEKYQPQTASELIGNELAIKKLHSWLKDWKRRAELEERQNLKGKRDEKHEDFSGGIDFKGSSDDEEESRLCNTVLITGPTGVGKTAAVYACAQELGFKIFEVNASSQRSGRQILSQLKEATQSHQVDKQGVNSQKPCFFNSYYIGKSPKKISSPKKVVTSPRKVPPPSPKSSGPKRALPPKTLANYFKVSPKPKNNEEIGMLLENNKGIKNSFEQKQITQTKSTNATNSNVKDVGAEEPSRKNATSLILFEEVDVIFDEDAGFLNAIKTFMATTKRPVILTTSDPTFSLMFDGCFEEIKFSTPSLLNVASYLQMICLTENFRTDVKDFVTLLTANTCDIRKSILYLQFWIRSGGGVLEERPLTLYRGNSRNVQLVCSEHGLDNKIYPKNTKKKRVDLPKCDSGCAETLFGLKNIFSPSEDLFSFLKHKITMKEEWHKFIQLLTEFQMRNVDFLYSNLEFILPLPVDTIPETKNFCGPSVTVDASAATKSMNCLARKHSEREQPLKKSQKKKQKKTLVILDDSDLFDTDLDFPDQSISLSSVSSSSNAEESKTGDEESKARDKGNNPETKKSIPCPPKTTAGKKCSALVSHCLNSLSEFMDNMSFLDALLTDVREQNKYGRNDFSWTNGKVTSGLCDEFSLESNDGWTSQSSGELKAAAEALSFTKCSSAISKALETLNSCKKLGRDPTNDLTFYVSQKRNNVYFSQSAANLDNAWKRISVIKSVFSSRSLLYVGNRQASIIEYLPTLRNICKTEKLKEQGKSKRRFLHYFEGIHLDIPKETVNTLAADFP

SEQ ID NO: 65773 - protein, 31 aa, Homo sapiens
MARRFLSRRSSQGYGPRRSGLHQPKGHDRSG

SEQ ID NO: 65774 - protein, 106 aa, Homo sapiens
LTPSVFRLQRKFTERLRAEDSKACKTAPALSCKTCPRSYEPHSALFPRPWSPMGPTTRSPTDTLTSEHSKQARRCRRSFGTVSRAIFADGKNNREIDDHSLCTRRK

SEQ ID NO: 65775 - protein, 297 aa, Homo sapiens
LPWALLLLWVPGCFALSKCRTVAGPVGGSLSVQCPYEKEHRTLNKYWCRPPQIFLCDKIVETKGSAGKRNGRVSIRDSPANLSFTVTLENLTEEDAGTYWCGVDTPWLRDFHDPVVEVEVSVFPASTSMTPASITAAKTSTITTAFPPVSSTTLFAVGATHSASIQEETEEVVNSQLPLLLSLLALLLLLLVGASLLAWRMFQKWIKAGDHSELSQNPKQAATQSELHYANLELLMWPLQEKPAPPREVEVEYSTVASPREELHYASVVFDSNTNRIAAQRPREEEPDSDYSVIRKT

SEQ ID NO: 65776 - protein, 35 aa, Homo sapiens
LGGLLLLTILVLAMWKVGFFKRNRPPLEEDDEEGE

SEQ ID NO: 65777 - protein, 28 aa, Homo sapiens
KDRYVSRQVLLALLWWTAPIGHTCPALQ

SEQ ID NO: 65778 - protein, 27 aa, Homo sapiens
KDRYVSRVLLALLWWTAPIGHTCPALQ

SEQ ID NO: 65779 - protein, 16 aa, Homo sapiens
ILISSLMYFCALGAVV

SEQ ID NO: 65780 - protein, 16 aa, Homo sapiens
LIFSVKPLITNFMALF

SEQ ID NO: 65781 - protein, 55 aa, Homo sapiens
LSLFKWILCPPLESVLHLLLLTLPLSQRMMMEEIMKCSHENLFFDLNCLMSPNLI

SEQ ID NO: 65782 - protein, 618 aa, Homo sapiens
LVPNWLLLLPVASMAEDWLDCPALGPGWKRREVFRKSGATCGRSDTYYQSPTGDRIRSKVELTRYLGPACDLTLFDFKQGILCYPAPKAHPVAVASKKRKKPSRPAKTRKRQVGPQSGEVRKEAPRDETKADTDTAPASFPAPGCCENCGISFSGDGTQRQRLKTLCKDCRAQRIAFNREQRMFKRVGCGECAACQVTEDCGACSTCLLQLPHDVASGLFCKCERRRCLRIVERSRGCGVCRGCQTQEDCGHCPICLRPPRPGLRRQWKCVQRRCLRGKHARRKGGCDSKMAARRRPGAQPLPPPPPSQSPEPTEPHPRALAPSPPAEFIYYCVDEDELQPYTNRRQNRKCGACAACLRRMDCGRCDFCCDKPKFGGSNQKRQKCRWRQCLQFAMKRLLPSVWSESEDGAGSPPPYRRRKRPSSARRHHLGPTLKPTLATRTAQPDHTQAPTKQEAGGGFVLPPPGTDLVFLREGASSPVQVPGPVAASTEALLQEAQCSGLSWVVALPQVKQEKADTQDEWTPGTAVLTSPVLVPGCPSKAVDPGLPSVKQEPPDPEEDKEENKDDSASKLAPEEEAGGAGTPVITEIFSLGGTRFRDTAVWLPRSKDLKKPGARKQ

SEQ ID NO: 65783 - protein, 38 aa, Homo sapiens
LRNSISAFLFTVTFAWCPPGLSNLTILSCPERWLMNGA

SEQ ID NO: 65784 - protein, 52 aa, Homo sapiens
ILLIAVLQAATTNRLELACEETGEAWLDQDLPPCEQASSSPNNRCHHAQKRP

SEQ ID NO: 65785 - protein, 7 aa, Homo sapiens
LIWILLM

SEQ ID NO: 65786 - protein, 542 aa, Homo sapiens
LLGPWLHAASEMAATLDLKSKEEKDAELDKRIEALRRKNEALIRRYQEIEEDRKKAELEGVAVTAPRKGRSVEKENVAVESEKNLGPSRRSPGTPRPPGASKGGRTPPQQGGRAGMGRASRSWEGSPGEQPRGGGAGGRGRRGRGRGSPHLSGAGDTSISDRKSKEWEERRRQNIEKMNEEMEKIAEYERNQREGVLEPNPVRNFLDDPRRRSGPLEESERDRREESRRHGRNWGGPDFERVRCGLEHERQGRRAGLGSAGDMTLSMTGRERSEYLRWKQEREKIDQERLQRHRKPTGQWRREWDAEKTDGMFKDGPVPAHEPSHRYDDQAWARPPKPPTFGEFLSQHKAEASSRRRRKSSRPQAKAAPRAYSDHDDRWETKEGAASPAPETPQPTSPETSPKETPMQPPEIPAPAHRPPEDEGEENEGEEDEEWEDISEDEEEEEIEVEEGDEEEPAQDHQAPEAAPTGIPCSEQAHGVPFSPEEPLLEPQAPGTPSSPFSPPSGHQPVSDWGEEVELNSPRTTHLAGALSPGEAWPFESV

SEQ ID NO: 65787 - protein, 17 aa, Homo sapiens
KMLKTQILETKCVSEEG

SEQ ID NO: 65788 - protein, 16 aa, Homo sapiens
IASMWILFGAYVTQPL

SEQ ID NO: 65789 - protein, 27 aa, Homo sapiens
ILAGFCFLLADMIMQSTDAISGFPVCL

SEQ ID NO: 65790 - protein, 53 aa, Homo sapiens
MAPIALITLTPPHSLLWTPRRLVPGRQAQPTPICTEKRSFGALPPRIKIQRVK

SEQ ID NO: 65791 - protein, 16 aa, Homo sapiens
VCSLTFSLAFLLCGCL

SEQ ID NO: 65792 - protein, 19 aa, Homo sapiens
LPPLLFLPALVLLRVTYSS

SEQ ID NO: 65793 - protein, 313 aa, Homo sapiens
RSPRPEVSARTMRLGSPGLLFLLFSSLRADTQEKEVRAMVGSDVELSCACPEGSRFDLNDVYVYWQTSESKTVVTYHIPQNSSLENVDSRYRNRALMSPAGMLRGDFSLRLFNVTPQDEQKFHCLVLSQSLGFQEVLSVEVTLHVAANFSVPVVSAPHSPSQDELTFTCTSINGYPRPNVYWINKTDNSLLDQALQNDTVFLNMRGLYDVVSVLRIARTPSVNIGCCIENVLLQQNLTVGSQTGNDIGERDKITENPVSTGEKNAATWSILAVLCLLVVVAVAIGWVCRDRCLQHSYAGAWAVSPETELTGHV

SEQ ID NO: 65794 - protein, 313 aa, Homo sapiens; identical to SEQ ID NO: 65793

SEQ ID NO: 65795 - protein, 45 aa, Homo sapiens
RTHASCQTLLGVGFLREPGVRLAFLLLSSALGTCQTKSHTCTELG

SEQ ID NO: 65796 - protein, 144 aa, Homo sapiens [sequence omitted]

SEQ ID NO: 65797 - protein, 14 aa, Homo sapiens
LPALQLPYFRRLFS

SEQ ID NO: 65798 - protein, 24 aa, Homo sapiens
MRPSAGLGLLAVGVVPRLQRVPPA

SEQ ID NO: 65799 - protein, 268 aa, Homo sapiens
TKEARMLLAWVQAFLVSNMLLAEAYGSGGCFWDNGHLYREDQTSPAPGLRCLNWLDAQSGLASAPVSGAGNHSYCRNPDEDPRGPWCYVSGEAGVPEKRPCEDLRCPETTSQALPAFTTEIQEASEGPGADEVQVFAPANALPARSEAAAVQPVIGISQRVRMNSKEKKDLGTLGYVLGITMMVIIIAIGAGIILGYSYKRGKDLKEQHDQKVCEREMQRITLPLSAFTNPTCEIVDEKTVVVHTSQTPVDPQEGTTPLMGQAGTPGA

SEQ ID NO: 65800 - protein, 80 aa, Homo sapiens
VITMALAAVVTEVALANLNVVETVAGVTNQMKMIGQNHSHQVNAWNRNSFLEATLGLILRNTMTFQLRQQATTVLHILKV

SEQ ID NO: 65801 - protein, 50 aa, Homo sapiens
MFEKGSPGQCEMAAVWLSLLLLHTGLQPMACYLSQQKNQKINSEVNRMGK

SEQ ID NO: 65802 - protein, 41 aa, Homo sapiens
LERRLKKGQNRWGVRLLLVGGLPAFRASGGGEAAAPGSSVC

SEQ ID NO: 65803 - protein, 476 aa, Homo sapiens
VQGAVLNMITEGAQAPRLLLPPLLLLLTLPATGSDPVLCFTQYEESSGKCKGLLGGGVSVEDCCLNTAFAYQKRSGGLCQPCRSPRWSLWSTWAPCSVTCSEGSQLRYRRCVGWNGQCSGKVAPGTLEWQLQACEDQQCCPEMGGWSGWGPWEPCSVTCSKGTRTRRRACNHPAPKCGGHCPGQAQESEACDTQQVCPTHGAWATWGPWTPCSASCHGGPHEPKETRSRKCSAPEPSQKPPGKPCPGLAYEQRRCTGLPPCPVAGGWGPWGPVSPCPVTCGLGQTMEQRTCNHPVPQHGGPFCAGDATRTHICNTAVPCPVDGEWDSWGEWSPCIRRNMKSISCQEIPGQQSRGRTCRGRKFDGHRCAGQQQDIRHCYSIQHCPLKGSWSEWSTWGLCMPPCGPNPTRARQRLCTPLLPKYPPTVSMVEGQGEKNVTFWGRPLPRCEELQGQKLVVEEKRPCLHVPACKDPEEEEL

SEQ ID NO: 65804 - protein, 15 aa, Homo sapiens
VAAGWMLDFLCLSLC

SEQ ID NO: 65805 - protein, 8 aa, Homo sapiens
LVLAMWYM

SEQ ID NO: 65806 - protein, 33 aa, Homo sapiens
MGFCCLLFWLMNSTEMEWLQQPEQATISPGLSQ

SEQ ID NO: 65807 - protein, 207 aa, Homo sapiens
MVSTMLSGLLFWLASGWTPAFAYSPRTPDRVSEADIQRLLHGVMEQLGIARPRVEYPAHQAMNLVGPQSIEGGAHEGLQHLGPFGNIPNIVAELTGDNIPKDFSEDQGYPDPPNPCPVGKTDDGCLENTPDTAEFSREFQLHQHLFDPEHDYPGLGKWNKKLLYEKMKGGERRKRRSVNPYLQGQRLDNVVAKKSVPHFSDEDKDPE

SEQ ID NO: 65808 - protein, 34 aa, Homo sapiens
MQTWAKGQLEDSSKSSVQGPNRHRRTSCGLQSFI

SEQ ID NO: 65809 - protein, 33 aa, Homo sapiens
MLRHERICSCSSRENGWDRLLRNNSAGKSGRWL

SEQ ID NO: 65810 - protein, 363 aa, Homo sapiens
MQGAQEASASEMLPLLLPLLWAGALAQERRFQLEGPESLTVQEGLCVLVPCRLPTTLPASYYGYGYWFLEGADVPVATNDPDEEVQEETRGRFHLLWDPRRKNCSLSIRDARRRDNAAYFFRLKSKWMKYGYTSSKLSVRVMALTHRPNISIPGTLESGHPSNLTCSVPWVCEQGTPPIFSWMSAAPTSLGPRTTQSSVLTITPRPQDHSTNLTCQVTFPGAGVTMERTIQLNVSYAPQKVAISIFQGNSAAFKILQNTSSLPVLEGQALRLLCDADGNPPAHLSWFQGFPALNATPISNTGVLELPQVGSAEEGDFTCRAQHPLGSLQISLSLFVHCECGGRCARVWAAGRELHSIQRRGPC

SEQ ID NO: 65811 - protein, 1682 aa, Homo sapiens [sequence omitted]

SEQ ID NO: 65812 - protein, 213 aa, Homo sapiens [sequence omitted]

SEQ ID NO: 65813 - protein, 684 aa, Homo sapiens
MKHDFKVTIYLLPHILVYVLLGCNQEDQQEVYAEIMAVLKHDDQHTINTQDIASDLCQLSTQTVFSMLDHLTQWARHKFQALKAEKCPHSKSNRNKVDSMVSTVDYEDYQSVTRFLDLIPQDTLAVASFRSKAYTRAVMHFESFITEKKQNIQEHLGFLQKLYAAMHEPDGVAGVSAIRKAEPSLKEQILEHESLGLLRDATACYDRAIQLEPDQIIHYHGVVKSMLGLGQLSTVITQVNGVHANRSEWTDELNTYRVEAAWKLSQWDLVENYLAADGKSTTWSVRLGQLLLSAKKRDITAFYDSLKLVRAEQIVPLSAASFERGSYQRGYEYIVRLHMLCELEHSIKPLFQHSPGDSSQEDSLNWVARLEMTQNSYRAKEPILALRRALLSLNKRPDYNEMVGECWLQSARVARKAGHHQTAYNALLNAGESRLAELYVERAKWLWSKGDVHQALIVLQKGVELCFPENETPPEGKNMLIHGRAMLLVGRFMEETANFESNAIMKKYKDVTACLPEWEDGHFYLAKYYDKLMPMVTDNKMEKQGDLIRYIVLHFGRSLQYGNQFIYQSMPRMLTLWLDYGTKAYEWEKAGRSDRVQMRNDLGKINKVITEHTNYLAPYQFLTAFSQLISRICHSHDEVFVVLMEIIAKVFLAYPQQAMWMMTAVSKVKGSFTFLYEKIFYHFI

SEQ ID NO: 65814 - protein, 45 aa, Homo sapiens
MCHHARLILYFQSRRGFPMLVRLVLNSRPQVICSPRPPKVLGLQA

SEQ ID NO: 65815 - protein, 461 aa, Homo sapiens
MAAGFLGGNLAPFPRNSSPFPASSGSLASNPAPFPAGARDPSMASFPRGMNPTGTGAVSFPRPGGFLGPGPGRGPTLNPRTGALPGLGPLSNPRLGGLPGPGPISNLRAGSLLGAGPDPRSGGPMGPGSGPNLRAGVLLTSGNGPPNPWPVGLGPGPNPNLRSGFLGTNPAPTLGVFPRPSGLGLGRNLDARAGGLLGTGPGLKNSWTSRPRSFPHSKSGRSFRSKFSLSQASGNMGTSPSSMARVPGPMGPNLGPGPREIGLPGPNPSPMSRAPGPIGPNSAHFSRPGGPMGVNANPFPRGAGSSAFSQSSGTLASNPAIFQRSAGLQGSNPTVFPRASGPLGPNPANFPRAAGLQGPSLTTFPRSTGPLGSGQVTFSRSAAGHLGSSPAGPVGTNPAPFARPTGTLGLNPASFPRMNGPAGKSLVPFPRVGSLPGTNPAAFPRPGGPMAAVYPNGMLPP

SEQ ID NO: 65816 - protein, 314 aa, Homo sapiens
LGTLALCGAALLYLARCAAEPGDPRAMSGRSPPPPAPARAAAFLAVLVASAPRAAERRSVIRSTWLARRGAPGDVWARFAVGTAGLGAEERRALEREQARHGDLLLLPALRDAYENLTAKVLAMLAWLDEHVAFEFVLKADDDSFARLDALLAELRAREPARRRRLYWGFFSGRGRVKPGGRWREAAWQLCDYYLPYALGGGYVLSADLVHYLRLSRDYLRAWHSEDVSLGAWLAPVDVQREHDPRFDTEYRSRGCSNQYLVTHKQSLEDMLEKHATLAREGRLCKREVQLRLSYVYDWSAPPSQCCQRREGIP

SEQ ID NO: 65817 - protein, 11 aa, Homo sapiens
KMIMGTAIVVM

SEQ ID NO: 65818 - protein, 778 aa, Homo sapiens
KLSISWQFLIVLVLILQILSALDFDPYRVLGVSRTASQADIKKAYKKLAREWHPDKNKDPGAEDKFIQISKAYEILSNEEKRSNYDQYGDAGENQGYQKQQQQREYRFRHFHENFYFDESFFHFPFNSERRDSIDEKYLLHFSHYVNEVVPDSFKKPYLIKITSDWCFSCIHIEPVWKEVIQELEELGVGIGVVHAGYERRLAHHLGAHSTPSILGIINGKISFFHNAVVRENLRQFVESLLPGNLVEKVTNKNYVRFLSGWQQENKPHVLLFDQTPIVPLLYKLTAFAYKDYLSFGYVYVGLRGTEEMTRRYNINIYAPTLLVFKEHINRPADVIQARGMKKQIIDDFITRNKYLLAARLTSQKLFHELCPVKRSHRQRKYCVVLLTAETTKLSKPFEAFLSFALANTQDTVRFVHVYSNRQQEFADTLLPDSEAFQGKSAVSILERRNTAGRVVYKTLEDPWIGSESDKFILLGYLDQLRKDPALLSSEAVLPDLTDELAPVFLLRWFYSASDYISDCWDSIFHNNWREMMPLLSLIFSALFILFGTVIVQAFSDSNDERESSPPEKEEAQEKTGKTEPSFTKENSSKIPKKGFVEVTELTDVTYTSNLVRLRPGHMNVVLILSNSTKTSLLQKFALEVYTFTGSSCLHFSFLSLDKHREWLEYLLEFAQDAAPIPNQYDKHFMERDYTGYVLALNGHKKYFCLFKPQKTVEEEEAIGSCSDVDSSLYLGESRGKPSCGLGSRPIKGKLSKLSLWMERLLEGSLQRFYIPSWPELD

SEQ ID NO: 65819 - protein, 1052 aa, Homo sapiens
LGCRSRVLSRLLFIAQTALLLLPAAGAGLCPAPCSCRIPLLDCSRRKLPAPSWRALSGLLPPDTAILDFSHNRLSNWNISLESQTLQEVKMNYNELTEIPYFGEPTSNITLLSLVHNIIPEINAQALQFYPALESLDLSSNIISEIKTSSFPRMQLKYLNLSNNRITTLEAGCFDNLSSSLLVVKLNRNRMSMIPPKIFKLPHLQFLELKRNRIKIVEGLTFQGLDSLRSLKMQRNGISKLKDGAFFGLNNMEELELEHNNLTRVNKGWLYGLRMLQQLYVSQNAIERISPDAWEFCQRLSELDLSYNQLTRLDESAFVGLSLLERLNLGDNRVTHIADGVFRFLSNLQTLDLRNNEISWAIEDASEAFAGLTSLTKLILQGNQIKSITKKAFIGLESLEHLDLNNNAIMSIQENAFSQTHLKELILNTSSLLCDCHLKWLLQWLVDNNFQHSVNVSCAHPEWLAGQSILNVDLKDFVCDDFLKPQIRTHPETIIALRGMNVTLTCTAVSSSDSPMSTVWRKDSEILYDVDTENFVRYWQQAGEALEYTSILHLFNVNFTDEGKYQCIVTNHFGSNYSQKAKLTVNEMPSFLKTPMDLTIRTGAMARLECAAEGHPAPQISWQKDGGTDFPAARERRMHVMPEDDVFFIANVKIEDMGIYSCMAQNTAGGLSANASLTVLETPSFIRPLEDKTVTRGETAVLQCIAGGSPAPRLNWTKDDGPLLVTERHFFAAANQLLIIVDAGLEDAGKYTCIMSNTLGTERGHIYLNVISSPNCDSSQSSIGHEDDGWTTVGIVIIVVVCCVVGTSLIWVIVIYHMRRKNEDYSITNTEELNLPADIPSYLSSQGTLSEPQEGYSNSEAGSHQQLMPPANGYIHKGTDGGTGTRVICSDCYDNANIYSRTREYCPYTYIAEEDVLDQTLSSLMVQMPKETYLVHPPQDTTALESLIPSANREPSAFPTNHERISEKKLPSTQMSGETLQRPVWNINRELGLPHPPFSQQPVHESPQLHQNEGLAGREPDCSASSMSCHRLQDHAFDFSRTRNIQDGSEGT

SEQ ID NO: 65820 - protein, 282 aa, Homo sapiens
RRRPRRCPPCAALLWALLALWLCCATPAHALQCRDGYEPCVNEGMCVTYHNGTGYCKCPEGFLGEYCQHRDPCEKNRCQNGGTCVAQAMLGKATCRCASGFTGEDCQYSTSHPCFVSRPCLNGGTCHMLSRDTYECTCQVGFTGKECQWTDACLSHPCANGSTCTTVANQFSCKCLTGFTGQKCETDVNECDIPGHCQHGGTCLNLPGSYQCQCLQGFTGQYCDSLYVPCAPSPCVNGGTCRQTGDFTFECNCLPDGYLARWPHSASLLSESELLAVLSALS

SEQ ID NO: 65821 - protein, 679 aa, Homo sapiens
LLLPLLLLLPLLLLKLHLWPQLRWLPADLAFAVRALCCKRALRARALAAAAADPEGPEGGCSLAWRLAELAQQRAAHTFLIHGSRRFSYSEAERESNRAARAFLRALGWDWGPDGGDSGEGSAGEGERAAPGAGDAAAGSGAEFAGGDGAARGGGAAAPLSPGATVALLLPAGPEFLWLWFGLAKAGLRTAFVPTALRRGPLLHCLRSCGARALVLAPEFLESLEPDLPALRAMGLHLWAAGPGTHPAGISDLLAEVSAEVDGPVPGYLSSPQSITDTCLYIFTSGTTGLPKAARISHLKILQCQGFYQLCGVHQEDVIYLALPLYHMSGSLLGIVGCMGIGATVVLKSKFSAGQFWEDCQQHRVTVFQYIGELCRYLVNQPPSKAERGHKVRLAVGSGLRPDTWERFVRRFGPLQVLETYGLTEGNVATINYTGQRGAVGRASWLYKHIFPFSLIRYDVTTGEPIRDPQGHCMATSPGEPGLLVAPVSQQSPFLGYAGGPELAQGKLLKDVFRPGDVFFNTGDLLVCDDQGFLRFHDRTGDTFRWKGENVATTEVAEVFEALDFLQEVNVYGVTVPGHEGRAGMAALVLRPPHALDLMQLYTHVSENLPPYARPRFLRLQESLATTETFKQQKVRMANEGFDPSTLSDPLYVLDQAVGAYLPLTTARYSALLAGNLRI

SEQ ID NO: 65822 - protein, 50 aa, Homo sapiens
TFFISSGLILSVAGFFYLKRSSKLPRACYRRNKAPALQPGEAVSNPHHPG

SEQ ID NO: 65823 - protein, 284 aa, Homo sapiens
LATAETRMCVGARRLGRGPCAALLLLGLGLSTVTGLHCVGDTYPSNDRCCHECRPGNGMVSRCSRSQNTVCRPCGPGFYNDVVSSKPCKPCTWCNLRSGSERKQLCTATQDTVCRCRAGTQPLDSYKPGVDCAPCPPGHFSPGDNQACKPWTNCTLAGKHTLQPASNSSDAICEDRDPPATQPQETQGPPARPITVQPTEAWPRTSQGPSTRPVEVPGGRAVAAILGLGLVLGLLGPLAILLALYLLRRDQRLPPDAHKPPGGGSFRTPIQEEQADAHSTLAKI

SEQ ID NO: 65824 - protein, 276 aa, Homo sapiens
KIPALRPALLWALLALWLCCATPAHALQCRDGYEPCVNEGMCVTYHNGTGYCKCPEGFLGEYCQHRDPCEKNRCQNGGTCVAQAMLGKATCRCASGFTGEDCQYSTSHPCFVSRPCLNGGTCHMLSRDTYECTCQVGFTGKECQWTDACLSHPCANGSTCTTVANQFSCKCLTGFTGQKCETDVNECDIPGHCQHGGTCLNLPGSYQCQCLQGFTGQYCDSLYVPCAPSPCVNGGTCRQTGDFTFECNCLPETVRRGTELWERDREVWNGKEHDEN

SEQ ID NO: 65825 - protein, 424 aa, Homo sapiens
VFSMRLWTPVGVLTSLAYCLHQRRVALAELQEADGQCPVDRSLLKLKMVQVVFRHGARSPLKPLPLEEQVEWNPQLLEVPPQTQFDYTVTNLAGGPKPYSPYDSQYHETTLKGGMFAGQLTKVGMQQMFALGERLRKNYVEDIPFLSPTFNPQEVFIRSTNIFRNLESTRCLLAGLFQCQKEGPIIIHTDEADSEVLYPNYQSCWSLRQRTRGRRQTASLQPGISEDLKKVKDRMGIDSSDKVDFFILLDNVAAEQAHNLPSCPMLKRFARMIEQRAVDTSLYILPKEDRESLQMAVGPFLHILESNLLKAMDSATAPDKIRKLYLYAAHDVTFIPLLMTLGIFDHKWPPFAVDLTMELYQHLESKEWFVQLYYHGKEQVPRGCPDGLCPLDMFLNAMSVYTLSPEKYHALCSQTQVMEVGNEE

SEQ ID NO: 65826 - protein, 44 aa, Homo sapiens
VAVEEVVESAIHTLVPLFFLAVVVTQTEGTTTEVECPTEGTTTR

SEQ ID NO: 65827 - protein, 16 aa, Homo sapiens
MIMEMVYLMLKMSLVF

SEQ ID NO: 65828 - protein, 18 aa, Homo sapiens
LDYTQSPADLLLFLILLS

SEQ ID NO: 65829 - protein, 35 aa, Homo sapiens
ILVREVFLLSSLAPLASFPENWAQTRKCGFVWSTH

SEQ ID NO: 65830 - protein, 49 aa, Homo sapiens
RLLSTFILRPLLFLFQNVEILGRDTNIIKPDQQKFLRFAPTGVPSGGSP

SEQ ID NO: 65831 - protein, 18 aa, Homo sapiens
LDYTQSPADLLLFLILLS

SEQ ID NO: 65832 - protein, 81 aa, Homo sapiens
LGLQQLKCSVFLGLAVCTSLPGSISPRPVVRPSRRARTGVAIRARGRRGPGTHVPQGRLGGWRGQIPGYLWRLFSVASSLC

SEQ ID NO: 65833 - protein, 21 aa, Homo sapiens
LWAIWTVLLIQLVIMYGKSLS

SEQ ID NO: 65834 - protein, 21 aa, Homo sapiens
VNSVTIDQKVIEPRQPHPLKG

SEQ ID NO: 65835 - protein, 56 aa, Homo sapiens
MKLFLKMLCASFILIWNLTNLPTQELMGKRWLHYSLSMCVKHFKSYTVLIAQLKMF

SEQ ID NO: 65836 - protein, 10 aa, Homo sapiens
LLVLVLLMST

SEQ ID NO: 65837 - protein, 94 aa, Homo sapiens
IVVAGVFMGIALLQIFGICLAQNLVSDIKAVKANWSKWNDDFENHWLTPTISEVLSTAGPQQNSLTGAPGPAPPSRHVFFGLGGLYPEPTFKNW

SEQ ID NO: 65838 - protein, 333 aa, Homo sapiens
ISRPDTAQLDGTMAPAFLLLLLLWPQGCVSGPSADSVYTKVRLLEGETLSVQCSYKGYKNRVEGKVWCKIRKKKCEPGFARVWVKGPRYLLQDDAQAKVVNITMVALKLQDSGRYWCMRNTSGILYPLMGFQLDVSPAPQTERNIPFTHLDNILKSGTVTTGQAPTSGPDAPFTTGVMVFTPGLITLPRLLASTRPASKTGYSFTATSTTSQGPRRTMGSQTVTASPSNARDSSAGPESISTKSGDLSTRSPTTGLCLTSRSLLNRLPSMPSIRHQDVYSTVLGVVLTLLVLMLIMVYGFWKKRHMASYSMCSDPSTRDPPGRPEPYVEVYLI

SEQ ID NO: 65839 - protein, 47 aa, Homo sapiens
VAVALVAAAAAAAAALERFLSGSAGGPPGWSTCKSRSGAPGIDGDEL

SEQ ID NO: 65840 - protein, 40 aa, Homo sapiens
LVFFGASILVLPKCPDPKQELIGSPQNMLLGTDLAPAYSA

SEQ ID NO: 65841 - protein, 76 aa, Homo sapiens
VEALGLHSSPPWELLARASEPALAPCSRKVAAAGAPEAQDTGLLLLQNPQVFLEEICRQNFVLRFYLGKEQKSVVS

SEQ ID NO: 65842 - protein, 57 aa, Homo sapiens
VAQEALIFLAGTVAAVLACGPGQPLPSRRAGEDWCMLGFVVRPHEARPGNIMGRNGA

SEQ ID NO: 65843 - protein, 19 aa, Homo sapiens
IRKPGYSGTRLFSPSSAPP

SEQ ID NO: 65844 - protein, 135 aa, Homo sapiens
VPLSSAPASVCSEHLCSSRQQLPSLTVSGAERGRCQPPLASVTSPGHSPPGGPRFMLTQAMGMVGSRSALQGACLCGTHTPALPGRLWLSEHHGGPLTLSLLSQQRPRARDRRTGVLLHHRTQTSGLTPVACDYE

SEQ ID NO: 65845 - protein, 50 aa, Homo sapiens
LVQMKKPTPMGERDLLKFTQDHRAGQQEGAQVHALHHLPLRFADSPDAVR

SEQ ID NO: 65846 - protein, 48 aa, Homo sapiens
KWMQMEMVLRYLPMPLTRTEEGALGDSFMSCCGGCFQAVSAPRHWAPG

SEQ ID NO: 65847 - protein, 69 aa, Homo sapiens
LVHSHHPQLWLLHMGCLLASEYPLSEPWAPGPLHSVLGGPPSHPPVQWVLACLADSCGRVLVCHSIVQA

SEQ ID NO: 65848 - protein, 47 aa, Homo sapiens
LFPRVTPRLVVSSSALFLLYFIHNSQRCWTRMGRPPVAMSPPRCSWG

SEQ ID NO: 65849 - protein, 32 aa, Homo sapiens
MLLIRMMSMTTILHLSGTADGKGGAAEFPCSS

SEQ ID NO: 65850 - protein, 19 aa, Homo sapiens
IFRIPPGNADSLLGALMLL

SEQ ID NO: 65851 - protein, 56 aa, Homo sapiens
IVIWRQLLVVFFSHADGLAEHLRLTCISRLITQADSTRNTIFLLICCFHYDTAAPL

SEQ ID NO: 65852 - protein, 47 aa, Homo sapiens
VWSWIQPPWLASLSLMSLPLCSLLWESSALLDMRLEGCLGLPTHKLC

SEQ ID NO: 65853 - protein, 19 aa, Homo sapiens
ILLFLDFFLIKRLLQCLSC

SEQ ID NO: 65854 - protein, 44 aa, Homo sapiens
LTALALPLLVLIPRAPKYPPWRNLGQDVHSRPIGAVLLKVGSGI

SEQ ID NO: 65855 - protein, 108 aa, Homo sapiens [sequence omitted]

SEQ ID NO: 65856 - protein, 137 aa, Homo sapiens
LLLLLTLLGLGLVQPSYGQDGMYQRFLRQHVHPEETGGSDRYCNLMMQRRKMTLYHCKRFNTFIHEDIWNIRSICSTTNIQCKNGKMNCHEGVVKVTDCRDTGSSRAPNCRYRAIASTRRVVIACEGNPQVPVHFDG

SEQ ID NO: 65857 - protein, 50 aa, Homo sapiens
MGSCINSSQPGCSMDSSWTSMKNSLSNRGHLLVMSVPSQKRTRRIWALGD

SEQ ID NO: 65858 - protein, 296 aa, Homo sapiens
LVCVDMAVTLSLLLGGRVCAAVTRCGFATRGVAGPGPIGREPDPDSDWEPEERELQEVESTLKRQKQAIRFQKIRRQMEAPGAPPRTLTWEAMEQIRYLHEEFPESWSVPRLAEGFDVSTDVIRRVLKSKFLPTLEQKLKQDQKVLKKAGLAHSLQHLRGSGNTSKLLPAGHSVSGSLLMPGHEASSKDPNHSTALKVIESDTHRTNTPRRRKGRNKEIQDLEESFVPVAAPLGHPRELQKYSSDSESPRGTGSGALPSGQKLEELKAEEPDNFSSKVVQRGREFFDSNGNFLYRI

SEQ ID NO: 65859 - protein, 600 aa, Homo sapiens
VVLLSLRLLAKFLGFVAFLPYRGPEPPPTGELQDSILALRSQVPPVLDVRTLLQRGLQARRAVLTVPWLVEFLSFADHVVPLLEYYRDIFTLLLRLHRSLVLSQESEGKMCFLNKLLLLAVLGWLFQIPTVPEDLFFLEEGPSYAFEVDTVAPEHGLDNAPVVDQQLLYTCCPYIGELRKLLASWVSGSSGRSGGFMRKITPTTTTSLGAQPSQTSQGLQAQLAQAFFHNQPPSLRRTVEFVAERIGSNCVKHIKATLVADLVRQAESLLQEQLVTQGEEGGDPAQLLEILCSQLCPHGAQALALGREFCQRKSPGAVRALLPEETPAAVLSSAENIAVGLATEKACAWLSANITALIRREVKAAVSRTLRAQGPEPAARGERRGCSRACEHHAPLPSHLISEIKDVLSLAVGPRDPDEGVSPEHLEQLLGQLGQTLRCRQFLCPPAEQHLAKCSVELASLLVADQIPILGPPAQYRLERGQARRLLHMLLSLWKEDFQGPVPLQLLLSPRNVGLLADTRPREWDLLLFLLRELVEKGLMGRMEIEACLGSLHQAQWPGDFAEELATLSNLFLAEPHLPEPQLRACELVQPNRGTVLAQS

SEQ ID NO: 65860 - protein, 31 aa, Homo sapiens
KVVALIAIIVMGLVKLCQEICPWPLGFLCQL

SEQ ID NO: 65861 - protein, 39 aa, Homo sapiens
VGLPCPGLWPPTRGPWRWTSRKRLSSRYYQNQYHCRENR

SEQ ID NO: 65862 - protein, 35 aa, Homo sapiens
LSMLRHERICSCSSRENGWDRLLRNNSAGKSGRWL

SEQ ID NO: 65863 - protein, 12 aa, Homo sapiens
LQLGLKFVLFLS

SEQ ID NO: 65864 - protein, 24 aa, Homo sapiens
MGVALGLDPRGSSASPNHPKLSVQ

SEQ ID NO: 65865 - protein, 125 aa, Homo sapiens
LFPLGKGGRWGAGAEGSRCWAPMDLSHGGPRDGPPGGLLGEQVRGITGAGGRGAGAPIPLAWIRPQRSHSCPSEPALGLPGHCLSTLLCRSSLHPTTSPPSSGPCSTRTHSTLSCTAWVILSPTM

SEQ ID NO: 65866 - protein, 32 aa, Homo sapiens
LSILGTNMLLFPLFLLLSLDLCQKEGYAESLI

SEQ ID NO: 65867 - protein, 112 aa, Homo sapiens
KRTLTTLCPLVLCGGVMAPGPAVDQEARDGQGCAHVPQGLGRNGPGRGCLLPGEYCGPAHFQQPPTLPHLRPVQGLPAGLGGGHGFPGPWGELSPRSSWCASNPPVPHHLNQ

SEQ ID NO: 65868 - protein, 1230 aa, Homo sapiens
LGAGLRLPRLLSPPLRPRLLLLLLLLSPPLLLLLLPCEAEAAAAAAAVSGSAAAEAKECDRPCVNGGRCNPGTGQCVCPAGWVGEQCQHCGGRFRLTGSSGFVTDGPGNYKYKTKCTWLIEGQPNRIMRLRFNHFATECSWDHLYVYDGDSIYAPLVAAFSGLIVPERDGNETVPEVVATSGYALLHFFSDAAYNLTGFNITYSFDMCPNNCSGRGECKISNSSDTVECECSENWKGEACDIPHCTDNCGFPHRGICNSSDVRGCSCFSDWQGPGCSVPVPANQSFWTREEYSNLKLPRASHKAVVNGNIMWVVGGYMFNHSDYNMVLAYDLASREWLPLNRSVNNVVVRYGHSLALYKDKIYMYGGKIDSTGNVTNELRVFHIHNESWVLLTPKAKEQYAVVGHSAHIVTLKNGRVVMLVIFGHCPLYGYISNVQEYDLDKNTWSILHTQGALVQGGYGHSSVYDHRTRALYVHGGYKAFSANKYRLADDLYRYDVDTQMWTILKDSRFFRYLHTAVIVSGTMLVFGGNTHNDTSMSHGAKCFSSDFMAYDIACDRWSVLPRPDLHHDVNRFGHSAVLHNSTMYVFGGFNSLLLSDILVFTSEQCDAHRSEAACLAAGPGIRCVWNTGSSQCISWALATDEQEEKLKSECFSKRTLDHDRCDQHTDCYSCTANTNDCHWCNDHCVPRNHSCSEGQISIFRYENCPKDNPMYYCNKKTSCRSCALDQNCQWEPRNQECIALPENICGIGWHLVGNSCLKITTAKENYDNAKLFCRNHNALLASLTTQKKVEFVLKQLRIMQSSQSMSKLTLTPWVGLRKINVSYWCWEDMSPFTNSLLQWMPSEPSDAGFCGILSEPSTRGLKAATCINPLNGSVCERPANHSAKQCRTPCALRTACGDCTSGSSECMWCSNMKQCVDSNAYVASFPFGQCMEWYTMSTCPPENCSGYCTCSHCLEQPGCGWCTDPSNTGKGKCIEGSYKGPVKMPSQAPTGNFYPQPLLNSSMCLEDSRYNWSFIHCPACQCNGHSKCINQSICEKCENLTTGKHCETCISGFYGDPTNGGKCQPCKCNGHASLCNTNTGKCFCTTKGVKGDECQLCEVENRYQGNPLRGTCYYTLLIDYQFTFSLSQEDDRYYTAINFVATPDEQNRDLDMFINASKNFNLNITWAASFSAGTQAGEEMPVVSKTNIKEYKDSFSNEKFDFRNHPNITFFVYVSNFTWPIKIQVQTEQ

SEQ ID NO: 65869 - protein, 131 aa, Homo sapiens
RMLAGEVLLLLLSSPSNTRFTAPAQSTSCLEPRKSIATCPKQMPWCWWPEIMSVTRMSAGRRNVRRLPDRQPRWPMKPSCRKEREEALRRECVGATLQPSRASSTCWQTTGTSLLKRLTRSSTTCESGRSG

SEQ ID NO: 65870 - protein, 300 aa, Homo sapiens
LGSPGLLFLLFSSLRADTQEKEVRAMVGSDVELSCACPEGSRFDLNDVYVYWQTSESKTVVTYHIPQNSSLENVDSRYRNRALMSPAGMLRGDFSLRLFNVTPQDEQKFHCLVLSQSLGFQEVLSVEVTLHVAANFSVPVVSAPHSPSQDELTFTCTSINGYPRPNVYWINKTDNSLLDQALQNDTVFLNMRGLYDVVSVLRIARTPSVNIGCCIENVLLQQNLTVGSQTGNDIGERDKITENPVSTGEKNAATWSILAVLCLLVVVAVAIGWVCRDRCLQHSYAGAWAVSPETELTGHV

SEQ ID NO: 65871 - protein, 37 aa, Homo sapiens
ILLVLIVLLLLPFRCQRRPRDPEVVNDESSLVRHRWK

SEQ ID NO: 65872 - protein, 300 aa, Homo sapiens; identical to SEQ ID NO: 65870

SEQ ID NO: 65873 - protein, 134 aa, Homo sapiens
LLLWLLGTSWAKAPRRRDAPSSSVPRVTAGVGEDPSSCGAGAFQAGSHWRHPWDAEQPENPGVASAAARVCLPRPPGSAVHSRAALSVWRPRSRRAASEDAAGPEPRGKCWPSPLSAPRGVREALPRPQSRLPG

SEQ ID NO: 65874 - protein, 302 aa, Homo sapiens
LVLFVWYCYHVGREQPRPYVSVNSLMQAADANGLQNGYVYCQSPECVRCTHNEGLNQKLYHNLQEYAKRYSWSGMGRIHKGIREQGRYLNSRPSIQKPEVFFLPDLPTTPYFSRDAQKHDVEVLERNFQTILCEFETLYKAFSNCSLPQGWKMNSTPSGEWFTFYLVNQGVCVPRNCRKCPRTYRLLGSLRTCIGNNVFGNACISVLSPGTVITEHYGPTNIRIRCHLGLKTPNGCELVVGGEPQCWAEGRCLLFDDSFLHAAFHEGSAEDGPRVVFMVDLWHPNVAAAERQALDFIFAPGR

SEQ ID NO: 65875 - protein, 41 aa, Homo sapiens
VSDCLFLLLYDTAPRGKEIRKLPLIQAEKVDLSPGLWNCQL

SEQ ID NO: 65876 - protein, 45 aa, Homo sapiens
TWGLRYVAAALSFISTSQTFDLPTLSSLLMKLKLLCDAYCPRSFC

SEQ ID NO: 65877 - protein, 26 aa, Homo sapiens
MTAEKLARSVVLSARTASREGKPSAC

SEQ ID NO: 65878 - protein, 65 aa, Homo sapiens
MEAMILILVMMNAVENPAKGKKGQLKMTYCSKNHFRKKNMERWPINKLQQNCWIGKKQEIEGFIS

SEQ ID NO: 65879 - protein, 40 aa, Homo sapiens
MSDEFGFSWGLCWHPAKLLPAGLSVLGCLGVGPIRRGGDR

SEQ ID NO: 65880 - protein, 118 aa, Homo sapiens
MHIQVFVDMCFLLSWINVSTWASWVSRTSPADVAGPGLAMEKAEPASQWVPVRNSSTGLSSFWEMHFASSRNLPDDPECSPPTFPALCGHLISTGLGKQMQSAFQNVFVLHMTLLWKK

SEQ ID NO: 65881 - protein, 32 aa, Homo sapiens
MKEKRKEQNPPGTRDFQAPKTGNLHQETQEKP

SEQ ID NO: 65882 - protein, 24 aa, Homo sapiens
MAAQTFLPHKSPSLGCSFLATHTD

SEQ ID NO: 65883 - protein, 20 aa, Homo sapiens
MRALFRVYMFSTLFLASGNE

SEQ ID NO: 65884 - protein, 40 aa, Homo sapiens
MVTPVIQRIGIGNCIVDLVNFINIQVLPRVLLKEELTTPK

SEQ ID NO: 65885 - protein, 34 aa, Homo sapiens
MLPQPPELVRVLQGPAPRHRHLLSSEFPSDETTV

SEQ ID NO: 65886 - protein, 69 aa, Homo sapiens [sequence omitted]

SEQ ID NO: 65887 - protein, 48 aa, Homo sapiens
MLLFFVAAAALALGAEPEGRRWRDDCRVGEQRSGARLVSQHPECGFLL

SEQ ID NO: 65888 - protein, 44 aa, Homo sapiens [sequence omitted]

SEQ ID NO: 65889 - protein, 67 aa, Homo sapiens
MGTISKQRSGGCSQTFAHRWKPTRLSCKTYRVDAPGGAERRARPAQHRAGERRAFRKGRRDEFLLDL

SEQ ID NO: 65890 - protein, 106 aa, Homo sapiens
MCVLYLIFLFGGGGGRGEVLAGPALNSLDRATDLWGLEVPAEKGRRQQRGCRGSSWSAPTPSAATWLVPYFQTLSSTFRPRWESRGRGAPSCNTSAPLRAYIRGTP

SEQ ID NO: 65891 - protein, 47 aa, Homo sapiens
MIITIILGGKICRIDKKTEALPQQPLKAVRVSTQGKQAIADDRTSAD

SEQ ID NO: 65892 - protein, 52 aa, Homo sapiens
MWRREGTRRLLRLLQDSARRPRVPPHPEEERLRAGLRGGRRAEPESQPRHGT

SEQ ID NO: 65893 - protein, 60 aa, Homo sapiens
MQLLQECLCYPKRNRCTKRRNEMLGDILSRKPANRLFPEDLLRLGQAAVYKSRTVLRFEL

SEQ ID NO: 65894 - protein, 57 aa, Homo sapiens
MGPISSEPKDPAQVQPCAAAHQAARRRAGRPRLREDDCRIVQASGWGIFFRGRDRLP

SEQ ID NO: 65895 - protein, 58 aa, Homo sapiens
MAAEGDPHRDGVSPCCPGWCRTPELRRSARLSFPKCWDYRREPLHLAQKFPRKLYFLH

SEQ ID NO: 65896 - protein, 111 aa, Homo sapiens
MHFVVGPLEGKMGLYLLRGVHWSEGGGRAASRISVFPCRRCVSWPCPSSLQYEGSRDTQHFPAVLSGTLRAAPATPPGPACQSRQSRWLAVWPSRPAPPQDPGPGRCRAQP

SEQ ID NO: 65897 - protein, 19 aa, Homo sapiens
MKFIHDLDRTERRQVWTGQ

SEQ ID NO: 65898 - protein, 37 aa, Homo sapiens
MSRLLSLRSQDWHVMREMSRRQEGTPWEVLMLSWGGS

SEQ ID NO: 65899 - protein, 29 aa, Homo sapiens
MALFFLHSTHLLLDFCCTSWQTLAGTGLQ

SEQ ID NO: 65900 - protein, 117 aa, Homo sapiens
MQPGGAPDSGKDEVAEWGGRHGLHLPGGRAGGARCGQECHRAPVLVQRVQRGLRPHHRPPPLPACCRHERPRARPPDPRLSTHQRLPCQYAPGVGRHLLQGTPECPRLHPGLRHLLL

SEQ ID NO: 65901 - protein, 51 aa, Homo sapiens
MRGALGRTGDGARVLLPIGRHLGGRGRLRLVAPGVSPPRGNRRLPGTGAWR

SEQ ID NO: 65902 - protein, 21 aa, Homo sapiens
MAIVDVKAMFKICCLDMRPRS

SEQ ID NO: 65903 - protein, 104 aa, Homo sapiens
MIDDPSKGKEALAESGGLVGAGNGVFFPSTEAFWDGGAVLASRGLELAGSSVPCCERFQDFDLAQPASLHPTCATAFSQCDVECYSMSLYFPLLFLVMGTLEPS

SEQ ID NO: 65904 - protein, 46 aa, Homo sapiens [sequence omitted]

SEQ ID NO: 65905 - protein, 96 aa, Homo sapiens
MATVARAPRAPPGPLIAGSQNGGVSQDVEPQGAPRLGPAVPRALHSLLQGAAAPPPNTGIPLESGREGGFGGVLGPRGLLHPVPLPPNPGPAAGLI

SEQ ID NO: 65906 - protein, 21 aa, Homo sapiens
MQRPLPSSGLLAPTRRRLRQL

SEQ ID NO: 65907 - protein, 173 aa, Homo sapiens
MTPLRDYGRDWAAGAADAARAQLGARLGPFRAEPPAGRGRGAAWLPEHGRGGDAEPRTGARAAPPPLRIRSLGRGHPRLPRDREVALVRSQPGHPAARAGGRLWPRPDPALLRARAGPGSPRLHQAPRGQHQVLRGHHRRPVSPVSQRYAAGAHPGAGGVAGTLAGAGLPLHP

SEQ ID NO: 65908 - protein, 27 aa, Homo sapiens
MQPLSRTACLLKSMTTLSCEIFGVVSP

SEQ ID NO: 65909 - protein, 19 aa, Homo sapiens
MNLIHQLTCWFMILMMNEH

SEQ ID NO: 65910 - protein, 83 aa, Homo sapiens [sequence omitted]

SEQ ID NO: 65911 - protein, 83 aa, Homo sapiens [sequence omitted]

SEQ ID NO: 65912 - protein, 31 aa, Homo sapiens
MNSGFFFFLCFFLTFTKGYCSLMCPSQGHEI

SEQ ID NO: 65913 - protein, 28 aa, Homo sapiens
MLGCKTELQSMKITLSSDICRDRALGWG

SEQ ID NO: 65914 - protein, 27 aa, Homo sapiens
MRLYLWLFVPSSTVAPAPSASRDGTSD

SEQ ID NO: 65915 - protein, 58 aa, Homo sapiens
MDQIRLGLTKAESCSHSRHHFCHENIGPFQNMPSGRCSLFKQKSNDCITLLDHILHFL

SEQ ID NO: 65916 - protein, 103 aa, Homo sapiens
MQDNWQVPGTARRARRLEQRKLADPLMRGRNWPISHGSCRQAMRLSFMRGEITRHGRVVSGGLACSRSEFLPLECKKHGSRDFVLLPAISTALEKRRAIDSSQ

SEQ ID NO: 65917 - protein, 36 aa, Homo sapiens
MVALVSTPPFLGTLLVANVCSSLQVSPPHSDKCKKS

SEQ ID NO: 65918 - protein, 32 aa, Homo sapiens
MTMATMLFLVSLGIVLAVERKASVTSRNSPII

SEQ ID NO: 65919 - protein, 20 aa, Homo sapiens
MSEPALCSCPGREWQAVSAE

SEQ ID NO: 65920 - protein, 44 aa, Homo sapiens
MRALGPGKRGEGERRKPENGEIKSFPWIIPSVNRDHKARASASS

SEQ ID NO: 65921 - protein, 76 aa, Homo sapiens
MSRLGIILRHHLASPASHFKWVTRMELRCCLQEKLTTGFYFSNLIGGYAGTVSRLSIFNPVSKNFFTTITFRFLPL

SEQ ID NO: 65922 - protein, 127 aa, Homo sapiens
MPRWLLLSLTFAGLFPLRRRQLLGSCGGREGGGPDQPAGSPAPLRPPLPRTLRLRKYRGNPLPPEVRGSLPEGAPWSRAPLGGHLEARCGPRTREERAAGAAATAGGGAGSPGAAEGRPVLHMLPLG

SEQ ID NO: 65923 - protein, 95 aa, Homo sapiens
MGPMGLFLSSVLSLWSECLSEANTTVPNAIALEEVLKSDERNENKVSLHKIMKKKGSIIMIMQEPRTGLEDGPPSSQGHQQALLLDMEPQFQNVP

SEQ ID NO: 65924 - protein, 173 aa, Homo sapiens
MRLLWSSIALTFSASARRRLRISSSLLHCSSSSSDTLDRSSTGAGGAADEPAGAGEQLSAAAAAAAAPPAAFDMVLWQKWPGKGLSNHQEYAKKRGPASLPLRLLRCQVSFGSWKQLFCPLPNPRLTATLYGERTKGRLLPEEISIWKSCRSQTTHTAIVTPACLVTCVSEKP

SEQ ID NO: 65925 - protein, 21 aa, Homo sapiens
MLNIGLFLQLRCIALTNQGLS

SEQ ID NO: 65926 - protein, 68 aa, Homo sapiens
MISSHLELTLTGLPAIYSRNKTCKPLFADSSMPGEDPQSRRQKVSSVPKALPVESYSLNPKGKTRATL

SEQ ID NO: 65927 - protein, 35 aa, Homo sapiens
MFCYRDPRYQIAPGLIWGLGICHSAVQTLIFFSSF

SEQ ID NO: 65928 - protein, 76 aa, Homo sapiens
MATLYLLIYSFCIYQMESHSVTQDGVQWRDLGSLQAPPPGFMPFSCLSLPSSWDYRRLPPRPANFCIFSRDRVSPH

SEQ ID NO: 65929 - protein, 52 aa, Homo sapiens
MATLYLLIYSFCIYQAMVQDPLEHAQLSYGKNKNTTFALLYTQNQQLFLRFA

SEQ ID NO: 65930 - protein, 34 aa, Homo sapiens
MATLYLLIYSFCIYQSCFHDFPVALSTFTSLYDC

SEQ ID NO: 65931 - protein, 33 aa, Homo sapiens
MYPQQPELPDMSVIAALLIILPTADPFCETPGC

SEQ ID NO: 65932 - protein, 23 aa, Homo sapiens
MRQPLFSFRRGKLDYQFFCKCVW

SEQ ID NO: 65933 - protein, 43 aa, Homo sapiens
MWLDLGGLRSRGFVAVASAATGRRRETDPGRGSDGDQRLPQSP

SEQ ID NO: 65934 - protein, 120 aa, Homo sapiens
MSLPHPQTLLNIREFIQERNPTNVKNVENPLIGPQLLRHIRESILERNPTHVKNVEKPLIGPQPLMYTREFTLEKIPTNVKIVAKPLKCLQTCIIIRKFILERNPTYVNNVAKPLNSPHT

SEQ ID NO: 65935 - protein, 24 aa, Homo sapiens
MAPECVLGRDLPQGHTPAGRAGVQ

SEQ ID NO: 65936 - protein, 19 aa, Homo sapiens
MDSRAHEFTTFLCLLTLCR

SEQ ID NO: 65937 - protein, 23 aa, Homo sapiens
MVDPPPGASLTFCPGRKTSARAP

SEQ ID NO: 65938 - protein, 37 aa, Homo sapiens
MAQFVLIRIALIFNSACFSSGHTILIINQSTSTLSKL

SEQ ID NO: 65939 - protein, 17 aa, Homo sapiens
MMMMTRVSLILLETHKH

SEQ ID NO: 65940 - protein, 144 aa, Homo sapiens
MGTRPPCTGPQWWGTRRSSRRSSTKGVPWTDKTRMGIQPCMKHPGMVSASQPSCSLKQEPTCLPRTRRGTQLCTWPARTATPRARASSCWPGPALTSKIMQETPVCTLLRAIITCPSLGSSSLLSVLSMKRTRLETQHFTLLLP

SEQ ID NO: 65941 - protein, 33 aa, Homo sapiens
MLSSEEKKLPGIKSFFLLVGSRLMGSVQNHSMW

SEQ ID NO: 65942 - protein, 26 aa, Homo sapiens
MPPAPELLSGEPGVRRRLRRREGGSG

SEQ ID NO: 65943 - protein, 40 aa, Homo sapiens
MRPRTPGQRTQDLPPSRKWPVTILEATCHHLGNLGSKDPQ

SEQ ID NO: 65944 - protein, 41 aa, Homo sapiens
MLFVAWCFCCSQVCCYQLVQATTSSAMEPFNWTPCFHSCPF

SEQ ID NO: 65945 - protein, 62 aa, Homo sapiens
MRRTCPGRVGVCSLPLVPGTSLDPLPCCRREMTGNGVFSETGPACKSFKVNGMKCIPIVRKK

SEQ ID NO: 65946 - protein, 21 aa, Homo sapiens
MGHWPTHRAVPSPGRGHTWLG

SEQ ID NO: 65947 - protein, 18 aa, Homo sapiens
MVLWCPIFLSQTVLSSIL

SEQ ID NO: 65948 - protein, 17 aa, Homo sapiens
MKRPRTSFLAASLFCVA

SEQ ID NO: 65949 - protein, 49 aa, Homo sapiens
MPSHVCLILRRLPQVSIVWEERSNESHAEKGLESTLWRTQCNCDVEITV

SEQ ID NO: 65950 - protein, 50 aa, Homo sapiens
MLPFYMVLVWSTSIIMHFSGQLKHFRRCFMLIPAFVEPRKFIYDLGLCSK

SEQ ID NO: 65951 - protein, 74 aa, Homo sapiens
MVHHPGNPLGLCSISLLLPVLWSRGTTASCPGIATRVSWTGSMGAWTPVLQAMGAPTVLPSSLGSSGCWKVWWS

SEQ ID NO: 65952 - protein, 73 aa, Homo sapiens
MTLFPAPFHFFLLCSYVSIPPCKAFQISQEGRCKQKKEKQPTTKDNQGSQQKCGISQDFKPWKIKAINSRKRC

SEQ ID NO: 65953 - protein, 77 aa, Homo sapiens
MRSVLPMGWIRRQSLNSWNSVFRMAQFSKSPTKALPPIRTQTTLGAFHQLNQALFLSQPRGLEDHVMISAMWIGINF

SEQ ID NO: 65954 - protein, 39 aa, Homo sapiens
MYLLLCFFSLSRLDHFICCLEKKRTFVSKEVSEMILDFL

SEQ ID NO: 65955 - protein, 31 aa, Homo sapiens
MNIRVFPAGDAAESPQQGASKGLAVDGTRIL

SEQ ID NO: 65956 - protein, 22 aa, Homo sapiens
MYRIVNLILDLPALVIVTHASV

SEQ ID NO: 65957 - protein, 116 aa, Homo sapiens
MWVPTKIPPLSPQLLTPGSGKVDATVFTDSSSFLEKGLRKAGAAVTMETDVLWAQALPANTSAQKAELIALTQALRWGKDINVNTDSRYAFATVHVRGAIYQERGLLTSAGGCNPL

SEQ ID NO: 65958 - protein, 20 aa, Homo sapiens
MVLLLVTFLSMDDLLGTQNS

SEQ ID NO: 65959 - protein, 154 aa, Homo sapiens [sequence omitted]

SEQ ID NO: 65960 - protein, 28 aa, Homo sapiens
MQSHPAVPTLRGCRSTYFTMEGRLQASR

SEQ ID NO: 65961 - protein, 26 aa, Homo sapiens
MLTLPIWYSYLVMYLFSQYPVSVCLS

SEQ ID NO: 65962 - protein, 48 aa, Homo sapiens
MDPGGAREHCLSPGQPERTKQDLGGGGGTGCNGVQSRAWLALSSGHVL

SEQ ID NO: 65963 - protein, 253 aa, Homo sapiens [sequence omitted]

SEQ ID NO: 65964 - protein, 253 aa, Homo sapiens
MWQLLLPTALLLLVSAGMRTDLPKAVVFLEPQWYRVLEKDSVTLKCQGAYSPEDNSTQWFHNESLISSQASSYFIDAATVDDSGEYRCQTNLSTLSDPVQLEVHIGWLLLQAPRWVFKEEDPIHLRCHSWKNTALHKVTYLQNGKGRKYFHHNSDFYIPKATLKDSGSYFCRGLFGSKNVSSETVNITITQGLAVSTISSFFPPGYQVSFCLVMVLLFAVDTGLYFSVKTNIRSSTRDWKDHKFKWRKDPQDK

SEQ ID NO: 65965 - protein, 581 aa, Homo sapiens
MAAWPFSRLWKVSDPILFQMTLIAALLPAVLGNCGPPPTLSFAAPMDITLTETRFKTGTTLKYTCLPGYVRSHSTQTLTCNSDGEWVYNTFCIYKRCRHPGELRNGQVEIKTDLSFGSQIEFSCSEGFFLIGSTTSRCEVQDRGVGWSHPLPQCEIVKCKPPPDIRNGRHSGEENFYAYGFSVTYSCDPRFSLLGHASISCTVENETIGVWRPSPPTCEKITCRKPDVSHGEMVSGFGPIYNYKDTIVFKCQKGFVLRGSSVIHCDADSKWNPSPPACEPNSCINLPDIPHASWETYPRPTKEDVYVVGTVLRYRCHPGYKPTTDEPTTVICQKNLRWTPYQGCEALCCPEPKLNNGEITQHRKSRPANHCVYFYGDEISFSCHETSRFSAICQGDGTWSPRTPSCGDICNFPPKIAHGHYKQSSSYSFFKEEIIYECDKGYILVGQAKLSCSYSHWSAPAPQCKALCRKPELVNGRLSVDKDQYVEPENVTIQCDSGYGVVGPQSITCSGNRTWYPEVPKCEWETPEGCEQVLTGKRLMQCLPNPEDVKMALEVYKLSLEIEQLELQRDSARQSTLDKEL

SEQ ID NO: 65966 - protein, 157 aa, Homo sapiens [sequence omitted]

SEQ ID NO: 65967 - protein, 600 aa, Homo sapiens
MPLTLLILSCLAELTMAEAEGNASCTVSLGGANMAETHKAMILQLNPSENCTWTIERPENKSIRIIFSYVQLDPDGSCESENIKVFDGTSSNGPLLGQVCSKNDYVPVFESSSSTLTFQIVTDSARIQRTVFVFYYFFSPNISIPNCGGYLDTLEGSFTSPNYPKPHPELAYCVWHIQVEKDYKIKLNFKEIFLEIDKQCKFDFLAIYDGPSTNSGLIGQVCGRVTPTFESSSNSLTVVLSTDYANSYRGFSASYTSIYAENINTTSLTCSSDRMRVIISKSYLEAFNSNGNNLQLKDPTCRPKLSNVVEFSVPLNGCGTIRKVEDQSITYTNIITFSASSTSEVITRQKQLQIIVKCEMGHNSTVEIIYITEDDVIQSQNALGKYNTSMALFESNSFEKTILESPYYVDLNQTLFVQVSLHTSDPNLVVFLDTCRASPTSDFASPTYDLIKSGCSRDETCKVYPLFGHYGRFQFNAFKFLRSMSSVYLQCKVLICDSSDHQSRCNQGCVSRSKRDISSYKWKTDSIIGPIRLKRDRSASGNSGFQHETHAEETPNQPFNSVHLFSFMVLALNVVTVATITVRHFVNQRADYKYQKLQNY

SEQ ID NO: 65968 - protein, 127 aa, Homo sapiens [sequence omitted]

SEQ ID NO: 65969 - protein, 265 aa, Homo sapiens
MFLLFLLTCELAAEVAAEVEKSSDGPGAAQEPTWLTDVPAAMEFIAATEVAVIGFFQDLEIPAVPILHSMVQKFPGVSFGISTDSEVLTHYNITGNTICLFRLVDNEQLNLEDEDIESIDATKLSRFIEINSLHMVTEYNPVTVIGLFNSVIQIHLLLIMNKASPEYEENMHRYQKAAKLFQGKILFILVDSGMKENGKVISFFKLKESQLPALAIYQTLDDEWDTLPTAEVSVEHVQNFCDGFLSGKLLKENRESEGKTPKVEL

SEQ ID NO: 65970 - protein, 1016 aa, Homo sapiens
MWLLVSHLVIISITTCLAEFTWYRRYGHGVSEEDKGFGPIFEEQPINTIYPEESLEGKVSLNCRARASPFPVYKWRMNNGDVDLTSDRYSMVGGNLVINNPDKQKDAGIYYCLASNNYGMVRSTEATLSFGYLDPFPPEERPEVRVKEGKGMVLLCDPPYHFPDDLSYRWLLNEFPVFITMDKRRFVSQTNGNLYIANVEASDKGNYSCFVSSPSITKSVFSKFIPLIPIPERTTKPYPADIVVQFKDVYALMGQNVTLECFALGNPVPDIRWRKVLEPMPSTAEISTSGAVLKIFNIQLEDEGIYECEAENIRGKDKHQARIYVQAFPEWVEHINDTEVDIGSDLYWPCVATGKPIPTIRWLKNGYAYHKGELRLYDVTFENAGMYQCIAENTYGAIYANAELKILALAPTFEMNPMKKKILAAKGGRVIIECKPKAAPKPKFSWSKGTEWLVNSSRILIWEDGSLEINNITRNDGGIYTCFAENNRGKANSTGTLVITDPTRIILAPINADITVGENATMQCAASFDPALDLTFVWSFNGYVIDFNKENIHYQRNFMLDSNGELLIRNAQLKHAGRYTCTAQTIVDNSSASADLVVRGPPGPPGGLRIEDIRATSVALTWSRGSDNHSPISKYTIQTKTILSDDWKDAKTDPPIIEGNMEAARAVDLIPWMEYEFRVVATNTLGRGEPSIPSNRIKTDGAAPNVAPSDVGGGGGRNRELTITWAPLSREYHYGNNFGYIVAFKPFDGEEWKKVTVTNPDTGRYVHKDETMSPSTAFQVKVKAFNNKGDGPYSLVAVINSAQDAPSEAPTEVGVKVLSSSEISVHWEHVLEKIVESYQIRYWAAHDKEEAANRVQVTSQEYSARLENLLPDTQYFIEVGACNSAGCGPPSDMIEAFTKKAPPSQPPRIISSVRSGSRYIITWDHVVALSNESTVTGYKVLYRPDGQHDGKLYSTHKHSIEVPIPRDGEYVVEVRAHSDGGDGVVSQVKISGAPTLSPSLLGLLLPAFGILVYLEF

SEQ ID NO: 65971 - protein, 427 aa, Homo sapiens
MVLGSLLALLLPLGAVEEQCLAVLKGLYLLRSKPDRAQHAATKCTSPSTELSITSRGATLLVAKTKASPAGKLEARAALNQALEMKRQGKREKAQKLFMHALKMDPDFVDALTEFGIFSEEDKDIIQADYLYTRALTISPYHEKALVNRDRTLPLVEEIDQRYFSIIDSKVKKVMSIPKGNSALRRVMEETYYHHIYHTVAIEGNTLTLSEIRHILETRYAVPGKSLEEQNEVIGMHAAMKYINTTLVSRIGSVTISDVLEIHRRVLGYVDPVEAGRFRTTQVLVGHHIPPHPQDVEKQMQEFVQWLNSEEAMNLHPVEFAALAHYKLVYIHPFIDGNGRTSRLLMNLILMQAGYPPITIRKEQRSDYYHVLEAANEGDVRPFIRFIAKCTETTLDTLLFATTEYSVALPEAQPNHSGFKETLPVKP

SEQ ID NO: 65972 - protein, 449 aa, Homo sapiens
MLILFAWGTLLFYIGGHLVRDNDHPDHSSRELSKILAKLERLKQQNEDLRRMAESLRIPEGPIDQGPAIGRVRVLEEQLVKAKEQIENYKKQTRNGLGKDHEILRRRIENGAKELWFFLQSELKKLKNLEGNELQRHADEFLLDLGHHERSIMTDLYYLSQTDGAGDWREKEAKDLTELVQRRITYLQNPKDCSKAKKLVCNINKGCGYGCQLHHVVYCFMIAYGTQRTLILESQNWRYATGGWETVFRPVSETCTDRSGISTGHWSGEVKDKNVQVVELPIVDSLHPRPPYLPLAVPEDLADRLVRVHGDPAVWWVSQFVKYLIRPQPWLEKEIEEATKKLGFKHPVIGVHVRRTDKVGTEAAFHPIEEYMVHVEEHFQLLARRMQVDKKRVYLATDDPSLLKEAKTNWTAQSIHRKFTSWSDPGYTFSLSGRLPSVYFFIPGLSSCL

SEQ ID NO: 65973 - protein, 279 aa, Homo sapiens [sequence omitted]

SEQ ID NO: 65974 - protein, 263 aa, Homo sapiens [sequence omitted]

SEQ ID NO: 65975 - protein, 102 aa, Homo sapiens
MPSSPRPASRTSWTAKGTCCSITNSSWNTSSLICSWSEKQRQCIGKPHKVILPGPPLPQVSRRLPGLVTPPPMQMWPLCTWDPSGRDGPHGRGGSWSCFEDG

SEQ ID NO: 65976 - protein, 1591 aa, Homo sapiens
MKRESLMEWLNSLLLLLCLYIYPHSHQVNDFSSLLTMDLGRVDTFNESRFSVVYTPVTNTTQQIMNKVASTPFLAGKEVLGLPDEESIKEFTANYPEEIVRVTFTNTYSYHLKFLLGHGMPAKKEHKDHTAHCYETNEDVYCEVSVFWKEGFVALQAAINAAIIEITTNHSVMEELMSVTGKNMKMHSFIGQSGVITDLYLFSCIISFSSFIYYASVNVTRERKRMKALMTMMGLRDSAFWLSWGLLYAGFIFIMALFLALVIRSTQFIILSGFMVVFSLFLLYGLSLVALAFLMSILVKKSFLTGLVVFLLTVFWGCLGFTSLYRHLPASLEWILSLLSPFAFMLGMAQLLHLDYDLNSNAFPHPSDGSNLIVATNFMLAFDTCLYLALAIYFEKILPNEYGHRRPPLFFLKSSFWSQTQKTDHVALEDEMDADPSFHDSFEQAPPEFQGKEAIRIRNVTKEYKGKPDKIEALKDLVFDIYEGQITAILGHSGAGKSTLLNILSGLSVPTKGSVTIYNNKLSEMADLENLSKLTGVCPQSNVQFDFLTVRENLRLFAKIKGILPQEVDKEIQRVLLELEMKNIQDVLAQNLSGGQKRKLTFGIAILGDPQIFLLDEPTAGLDPFSRHQVWNLLKERKTDRVILFSTQFMDEADILADRKVFLSQGKLKCAGSSLFLKKKWGIGYHLSLQLNEICVEENITSLVKQHIPDAKLSAKSEGKLIYTLPLERTNKFPELYKDLDSYPDLGIENYGVSMTTLNEVFLKLEGKSTINESDIAILGEVQAEKADDTERLVEMEQVLSSLNKMRKTIGGVALWRQQICAIARVRLLKLKHERKALLALLLILMAGFCPLLVEYTMVKIYQNSYTWELSPHLYFLAPGQQPHDPLTQLLIINKTGASIDDFIQSVEHQNIALEVDAFGTRNGTDDPSYNGAITVCCNEKNYSFSLACNAKRLNCFPVLMDIVSNGLLGMVKPSVHIRTERSTFLENGQDNPIGFLAYIMFWLVLTSSCPPYIAMSSIDDYKNRARSQLRISGLSPSAYWFGQALVDVSLYFLVFVFIYLMSYISNFEDMLLTIIHIIQIPCAVGYSFSLIFMTYVISFIFRKGRKNSGIWSFCFYVVTVFSVAGFAFSIFESDIPFIFTFLIPPATMIGCLFLSSHLLFSSLFSEERMDVQPFLVFLIPFLHFIIFLFTLRCLEWKFGKKSMRKDPFFSSDVCQNPEEPEGEDEDVQMERVRTANALNSTNFDEKPVIIASCLRKEYAGKRKGCFSKRKNKIATRNVSFCVRKGEVLGLLGHNGAGKSTSIKVITGDTKPTAGQVLLKGSGGGDALEFLGYCPQENALWPNLTVRQHLEVYAAVKGLRKGDAEVAITRLVDALKLQDQLKSPVKTLSEGIKRKLCFVLSILGNPSVVLLDEPSTGMDPEGQQQMWQAIRATFRNTERGALLTTHYMAEAEAVCDRVAIMVSGRLRCIGSIQHLKSKFGKDYLLEMKVKNLAQVEPLHAEILRLFPQAARQERYSSLMVYKLPVEDVQPLAQAFFKLEKVKQSFDLEEYSLSQSTLEQVFLELSKEQELGDFEEDFDPSVKWKLLPQEEP

SEQ ID NO: 65977 - protein, 1902 aa, Homo sapiens
MVSVVGPMGLLVVLLVGGCAAEEPPRFIKEPKDQIGVSGGVASFVCQATGDPKPRVTWNKKGKKVNSQRFETIEFDESAGAVLRIQPLRTPRDENVYECVAQNSVGEITVHAKLTVLREDQLPSGFPNIDMGPQLKVVERTRTATMLCAASGNPDPEITWFKDFLPVDPSASNGRIKQLRSGALQIESSEETDQGKYECVATNSAGVRYSSPANLYVRVRRVAPRFSILPMSHEIMPGGNVNITCVAVGSPMPYVKWMQGAEDLTPEDDMPVGRNVLELTDVKDSANYTCVAMSSLGVIEAVAQITVKSLPKAPGTPMVTENTATSITITWDSGNPDPVSYYVIEYKSKSQDGPYQIKEDITTTRYSIGGLSPNSEYEIWVSAVNSIGQGPPSESVVTRTGEQAPASAPRNVQARMLSATTMIVQWEEPVEPNGLIRGYRVYYTMEPEHPVGNWQKHNVDDSLLTTVGSLLEDETYTVRVLAFTSVGDGPLSDPIQVKTQQGVPGQPMNLRAEARSETSITLSWSPPRQESIIKYELLFREGDHGREVGRTFDPTTSYVVEDLKPNTEYAFRLAARSPQGLGAFTPVVRQRTLQSKPSAPPQDVKCVSVRSTAILVSWRPPPPETHNGALVGYSVRYRPLGSEDPEPKEVNGIPPTTTQILLEALEKWTQYRITTVAHTEVGPGPESSPVVVRTDEDVPSAPPRKVEAEALNATAIRVLWRSPAPGRQHGQIRGYQVHYVRMEGAEARGPPRIKDVMLADAQEMVITNLQPETAYSITVAAYTMKGDGARSKPKVVVTKGAVLGRPTLSVQQTPEGSLLARWEPPAGTAEDQVLGYRLQFGREDSTPLATLEFPPSEDRYTASGVHKGATYVFRLAARSRGGLGEEAAEVLSIPEDTPRGHPQILEAAGNASAGTVLLRWLPPVPAERNGAIVKYTVAVREAGALGPARETELPAAAEPGAENALTLQGLKPDTAYDLQVRAHTRRGPGPFSPPVRYRTFLRDQVSPKNFKVKMIMKTSVLLSWEFPDNYNSPTPYKIQYNGLTLDVDGRTTKKLITHLKPHTFYNFVLTNRGSSLGGLQQTVTAWTAFNLLNGKPSVAPKPDADGFIMVYLPDGQSPVPVQSYFIVMVPLRKSRGGQFLTPLGSPEDMDLEELIQDISRLQRRSLRHSRQLEVPRPYIAARFSVLPPTFHPGDQKQYGGFDNRGLEPGHRYVLFVLAVLQKSEPTFAASPFSDPFQLDNPDPQPIVDGEEGLIWVIGPVLAVVFIICIVIAILLYKNKPDSKRKDSEPRTKCLLNNADLAPHHPKDPVEMRRINFQTPGMLSHPPIPIADMAEHTERLKANDSLKLSQEYESIDPGQQFTWEHSNLEVNKPKNRYANVIAYDHSRVILQPIEGIMGSDYINANYVDGYRCQNAYIATQGPLPETFGDFWRMVWEQRSATIVMMTRLEEKSRIKCDQYWPNRGTETYGFIQVTLLDTIELATFCVRTFSLHKNGSSEKREVRQFQFTAWPDHGVPEYPTPFLAFLRRVKTCNPPDAGPIVVHCSAGVGRTGCFIVIDAMLERIKPEKTVDVYGHVTLMRSQRNYMVQTEDQYSFIHEALLEAVGCGNTEVPARSLYAYIQKLAQVEPGEHVTGMELEFKRLANSKAHTSRFISANLPCNKFKNRLVNIMPYESTRVCLQPIRGVEGSDYINASFIDGYRQQKAYIATQGPLAETTEDFWRMLWENNSTIVVMLTKLREMGREKCHQYWPAERSARYQYFVVDPMAEYNMPQYILREFKVTDARDGQSRTVRQFQFTDWPEQGVPKSGEGFIDFIGQVHKTKEQFGQDGPISVHCSAGVGRTGVFITLSIVLERMRYEGVVDIFQTVKMLRTQRPAMVQTEDEYQFCYQAALEYLGSFDHYAT

SEQ ID NO: 65978 - protein, 64 aa, Homo sapiens [sequence omitted]

SEQ ID NO: 65979 - protein, 987 aa, Homo sapiens
MSRALRPPLPPLCFFLLLLAAAGARAGGYETCPTVQPNMLNVHLLPHTHDDVGWLKTVDQYFYGIKNDIQHAGVQYILDSVISALLADPTRRFIYVEIAFFSRWWHQQTNATQEVVRDLVRQGRLEFANGGWVMNDEAATHYGAIVDQMTLGLRFLEDTFGNDGRPRVAWHIDPFGHSREQASLFAQMGFDGFFFGRLDYQDKWVRMQKLEMEQVWRASTSLKPPTADLFTGVLPNGYNPPRNLCWDVLCVDQPLVEDPRSPEYNAKELVDYFLNVATAQGRYYRTNHTVMTMGSDFQYENANMWFKNLDKLIRLVNAQAKGSSVHVLYSTPACYLWELNKANLTWSVKHDDFFPYADGPHQFWTGYFSSRPALKRYERLSYNFLQVCNQLEALVGLAANVGPYGSGDSAPLNEAMAVLQHHDAVSGTSRQHVANDYARQLAAGWGPCEVLLSNALARLRGFKDHFTFCQQLNISICPLSQTAARFQVIVYNPLGRKVNWMVRLPVSEGVFVVKDPNGRTVPSDVVIFPSSDSQAHPPELLFSASLPALGFSTYSVAQVPRWKPQARAPQPIPRRSWSPALTIENEHIRATFDPDTGLLMEIMNMNQQLLLPVRQTFFWYNASIGDNESDQASGAYIFRPNQQKPLPVSRWAQIHLVKTPLVQEVHQNFSAWCSQVVRLYPGQRHLELEWSVGPIPVGDTWGKEVISRFDTPLETKGRFYTDSNGREILERRRDYRPTWKLNQTEPVAGNYYPVNTRIYITDGNMQLTVLTDRSQGGSSLRDGSLELMVHRRLLKDDGRGVSEPLMENGSGAWVRGRHLVLLDTAQAAAAGHRLLAEQEVLAPQVVLAPGGGAAYNLGAPPRTQFSGLRRDLPPSVHLLTLASWGPEMVLLRLEHQFAVGEDSGRNLSAPVTLNLRDLFSTFTITRLQETTLVANQLREAASRLKWTTNTGPTPHQTPYQLDPANITLEPMEIRTFLASVQWKEVDG

SEQ ID NO: 65980 - protein, 178 aa, Homo sapiens [sequence omitted]

SEQ ID NO: 65981 - protein, 158 aa, Homo sapiens
MLISSLMFLSLSQGQESQTELPNPRISCPEGTNAYRSYCYYFNEDPETWVDADLYCQNMNSGNLVSVLTQAEGAFVASLIKESSTDDSNVWIGLHDPKKNRRWHWSSGSLVSYKSWDTGSPSSANAGYCASLTSCSGFKKWKDESCEKKFSFVCKFKN

SEQ ID NO: 65982 - protein, 150 aa, Homo sapiens
MKLWPLVIFLSYFPGKPGELTLFSVLPELSQSLGLREQELQVVRASGKESSGLVLLSSCPQTASRLQKYFTHARRAQRPTATYCAVTDGIPAASEGKIQAALKLEHIDGVNLVSPGLGRGGVLLDIVPLQRGVRGMDLGWLALLSPKTGK

SEQ ID NO: 65983 - protein, 360 aa, Homo sapiens
MAFLLSFYLIFTNEGRALKTATSLAEGLSLVVSPDSIHSVAPENEGRLVHIIGALRTSKLLSDPNYGVHLPAVKLRRHVEMYQWVETEESREYTEDGQVKKETRYSYNTEWRSEIINSKNFDREIGHKNPSAMAVESFMATAPFVQIGRFFLSSGLIDKVDNFKSLSLSKLEDPHVDIIRRGDFFYHSENPKYPEVGDLRVSFSYAGLSGDDPDLGPAHVVTVIARQRGDQLVPFSTKSGDTLLLLHHGDFSAEEVFHRELRSNSMKTWGLRAAGWMAMFMGLNLMTRILYTLVDWFPVFRDLVNIGLKAFAFCVATSLTLLTVAAGWLFYRPLWALLIAGLALVPILVARTRVPAKKLE

SEQ ID NO: 65984 - protein, 438 aa, Homo sapiens [sequence omitted]

SEQ ID NO: 65985 - protein, 360 aa, Homo sapiens [sequence omitted]

SEQ ID NO: 65986 - protein, 187 aa, Homo sapiens
MLLLLLSALAGLFGAAEGQAFHLGKCPNPPVQENFDVNKYLGRWYEIEKIPTTFENGRCIQANYSLMENGKIKVLNQELRADGTVNQIEGEATPVNLTEPAKLEVKFSWFMPSAPYWILATDYENYALVYSCTCIIQLFHVDFAWILARNPNLPPETVDSLKNILTSNNIDVKKMTVTDQVNCPKLS

SEQ ID NO: 65987 - protein, 1518 aa, Homo sapiens
MLSLSLGLVLAILNKVAPQACPAQCSCSGSTVDCHGLALRSVPRNIPRNTERLDLNGNNITRITKTDFAGLRHLRVLQLMENKISTIERGAFQDLKELERLRLNRNHLQLFPELLFLGTAKLYRLDLSENQIQAIPRKAFRGAVDIKNLQLDYNQISCIEDGAFRALRDLEVLTLNNNNITRLSVASFNHMPKLRTFRLHSNNLYCDCHLAWLSDWLRQRPRVGLYTQCMGPSHLRGHNVAEVQKREFVCSDEEEGHQSFMAPSCSVLHCPAACTCSNNIVDCRGKGLTEIPTNLPETITEIRLEQNTIKVIPPGAFSPYKKLRRIDLSNNQISELAPDAFQGLRSLNSLVLYGNKITELPKSLFEGLFSLQLLLLNANKINCLRVDAFQDLHNLNLLSLYDNKLQTIAKGTFSPLRAIQTMHLAQNPFICDCHLKWLADYLHTNPIETSGARCTSPRRLANKRIGQIKSKKFRCSGTEDYRSKLSGDCFADLACPEKCRCEGTTVDCSNQKLNKIPEHIPQYTAELRLNNNEFTVLEATGIFKKLPQLRKINFSNNKITDIEEGAFEGASGVNEILLTSNRLENVQHKMFKGLESLKTLMLRSNRITCVGNDSFIGLSSVRLLSLYDNQITTVAPGAFDTLHSLSTLNLLANPFNCNCYLAWLGEWLRKKRIVTGNPRCQKPYFLKEIPIQDVAIQDFTCDDGNDDNSCSPLSRCPTECTCLDTVVRCSNKGLKVLPKGIPRDVTELYLDGNQFTLVPKELSNYKHLTLIDLSNNRISTLSNQSFSNMTQLLTLILSYNRLRCIPPRTFDGLKSLRLLSLHGNDISVVPEGAFNDLSALSHLAIGANPLYCDCNMQWLSDWVKSEYKEPGIARCAGPGEMADKLLLTTPSKKFTCQGPVDVNILAKCNPCLSNPCKNDGTCNSDPVDFYRCTCPYGFKGQDCDVPIHACISNPCKHGGTCHLKEGEEDGFWCICADGFEGENCEVNVDDCEDNDCENNSTCVDGINNYTCLCPPEYTGELCEEKLDFCAQDLNPCQHDSKCILTPKGFKCDCTPGYVGEHCDIDFDDCQDNKCKNGAHCTDAVNGYTCICPEGYSGLFCEFSPPMVLPRTSPCDNFDCQNGAQCIVRINEPICQCLPGYQGEKCEKLVSVNFINKESYLQIPSAKVRPQTNITLQIATDEDSGILLYKGDKDHIAVELYRGRVRASYDTGSHPASAIYSVETINDGNFHIVELLALDQSLSLSVDGGNPKIITNLSKQSTLNFDSPLYVGGMPGKSNVASLRQAPGQNGTSFHGCIRNLYINSELQDFQKVPMQTGILPGCEPCHKKVCAHGTCQPSSQAGFTCECQEGWMGPLCDQRTNDPCLGNKCVHGTCLPINAFSYSCKCLEGHGGVLCDEEEDLFNPCQAIKCKHGKCRLSGLGQPYCECSSGYTGDSCDREISCRGERIRDYYQKQQGYAACQTTKKVSRLECRGGCAGGQCCGPLRSKRRKYSFECTDGSSFVDEVEKVVKCGCTRCVS

SEQ ID NO: 65988 - protein, 403 aa, Homo sapiens
MSLIQACCSLALSTWLLSFCFVHLLCLDFTVAEKEEWYTAFVNITYAEPAPDPGAGAAGGGGAELHTEKTECGRYGEHSPKQDARGEVVMASSAHDRLACDPNTKFAAPTRGKNWIALIPKGNCTYRDKIRNAFLQNASAVVIFNVGSNTNETITMPHAGVEDIVAIMIPEPKGKEIVSLLERNITVTMYITIGTRNLQKYVSRTSVVFVSISFIVLMIISLAWLVFYYIQRFRYANARDRNQRRLGDAAKKAISKLQIRTIKKGDKETESDFDNCAVCIEGYKPNDVVRILPCRHLFHKSCVDPWLLDHRTCPMCKMNILKALGIPPNADCMDDLPTDFEGSLGGPPTNQITGASDTTVNESSVTLDPAVRTVGALQVVQDTDPIPQEGDVIFTTNSEFCHT

SEQ ID NO: 65989 - protein, 1048 aa, Homo sapiens [sequence omitted]

SEQ ID NO: 65990 - protein, 1196 aa, Homo sapiens [sequence omitted]

SEQ ID NO: 65991 - protein, 753 aa, Homo sapiens [sequence omitted]

SEQ ID NO: 65992 - protein, 4490 aa, Homo sapiens
MPAQYALTSSLVLLVLLSTARAGPFSSRSNVTLPAPRPPPQPGGHTVGAGVGSPSSQLYEHTVEGGEKQVVFTHRINLPPSTGCGCPPGTEPPVLASEVQALRVRLEILEELVKGLKEQCTGGCCPASAQAGTGQTDVRTLCSLHGVFDLSRCTCSCEPGWGGPTCSDPTDAEIPPSSPPSASGSCPDDCNDQGRCVRGRCVCFPGYTGPSCGWPSCPGDCQGRGRCVQGVCVCRAGFSGPDCSQRSCPRGCSQRGRCEGGRCVCDPGYTGDDCGMRSCPRGCSQRGRCENGRCVCNPGYTGEDCGVRSCPRGCSQRGRCKDGRCVCDPGYTGEDCGTRSCPWDCGEGGRCVDGRCVCWPGYTGEDCSTRTCPRDCRGRGRCEDGECICDTGYSGDDCGVRSCPGDCNQRGRCEDGRCVCWPGYTGTDCGSRACPRDCRGRGRCENGVCVCNAGYSGEDCGVRSCPGDCRGRGRCESGRCMCWPGYTGRDCGTRACPGDCRGRGRCVDGRCVCNPGFTGEDCGSRRCPGDCRGHGLCEDGVCVCDAGYSGEDCSTRSCPGGCRGRGQCLDGRCVCEDGYSGEDCGVRQCPNDCSQHGVCQDGVCICWEGYVSEDCSIRTCPSNCHGRGRCEEGRCLCDPGYTGPTCATRMCPADCRGRGRCVQGVCLCHVGYGGEDCGQEEPPASACPGGCGPRELCRAGQCVCVEGFRGPDCAIQTCPGDCRGRGECHDGSCVCKDGYAGEDCGEEVPTIEGMRMHLLEETTVRTEWTPAPGPVDAYEIQFIPTTEGASPPFTARVPSSASAYDQRGLAPGQEYQVTVRALRGTSWGLPASKTITTMIDGPQDLRVVAVTPTTLELGWLRPQAEVDRFVVSYVSAGNQRVRLEVPPEADGTLLTDLMPGVEYVVTVTAERGRAVSYPASVRANTAPGHYSYPEVRPPAPPPKSRPRPAPAPRPPRPPWPSRPAEEREEESPPRPSLSQPPRRPWGNLTAELSRFRGTVQDLERHLRAHGYPLRANQTYTSVARHIHEYLQRRLLAAAPAGSPAPPPRHPRPTASPDPGTRKRDSNQGIYGLSPEGVDRVAASRHPKPEVLGSSADGALLVSLDGLRGQFERVVLRWRPQPPAEGPGGELTVPGTTRTVSLPDLRPGTTYHVEVHGVRAGQTSKSYAFITTTGSSPLGLLGTTDEPPPSGPSTTQGAQAPLLQQRPQELGELRVLGRDETGRLRVVWTAQPDTFAYFQLRMRVPEGPGAHEEVLPGDVRQALVPPPPPGTPYELSLHGVPPGGKPSDPIIYQGIMDKDEEKPGKSSGPPRLGELTVTDRTSDSLLLRWTVPEGEFDSFVIQYKDRDGQPQVVPVEGPQRSAVITSLDPGRKYKFVLYGFVGKKRHGPLVAEAKILPQSDPSPGTPPHLGNLWVTDPTPDSLHLSWTVPEGQFDTFMVQYRDRDGRPQVVPVEGPERSFVVSSLDPDHKYRFTLFGIANKKRYGPLTADGTTAPERKEEPPRPEFLEQPLLGELTVTGVTPDSLRLSWTVAQGPFDSFMVQYKDAQGQPQAVPVAGDENEVTVPGLDPDRKYKMNLYGLRGRQRVGPESVVAKTAPQEDVDETPSPTELGTEAPESPEEPLLGELTVTGSSPDSLSLFWTVPQGSFDSFTVQYKDRDGRPRAVRVGGKESEVTVGGLEPGHKYKMHLYGLHEGQRVGPVSAVGVTAPQQEETPPATESPLEPRLGELTVTDVTPNSVGLSWTVPEGQFDSFIVQYKDKDGQPQVVPVAADQREVTVYNLEPERKYKMNMYGLHDGQRMGPLSVVIVTAPLPPAPATEASKPPLEPRLGELTVTDITPDSVGLSWTVPEGEFDSFVVQYKDRDGQPQVVPVAADQREVTIPDLEPSRKYKFLLFGIQDGKRRSPVSVEAKTVARGDASPGAPPRLGELWVTDPTPDSLRLSWTVPEGQFDSFVVQFKDKDGPQVVPVEGHERSVTVTPLDAGRKYRFLLYGLLGKKRHGPLTADGTTEARSAMDDTGTKRPPKPRLGEELQVTTVTQNSVGLSWTVPEGQFDSFVVQYKDRDGQPQVVPVEGSLREVSVPGLDPAHRYKLLLYGLHHGKRVGPISAVAITAGREETETETTAPTPPAPEPHLGELTVEEATSHTLHLSWMVTEGEFDSFEIQYTDRDGQLQMVRIGGDRNDITLSGLESDHRYLVTLYGFSDGKHVGPVHVEALTVPEEEKPSEPPTATPEPPIKPRLGELTVTDATPDSLSLSWTVPEGQFDHFLVQYRNGDGQPKAVRVPGHEEGVTISGLEPDHKYKMNLYGFHGGQRMGPVSVVGVTAAEEETPSPTEPSMEAPEPAEEPLLGELTVTGSSPDSLSLSWTVPQGRFDSFTVQYKDRDGRPQVVRVGGEESEVTVGGLEPGRKYKMHLYGLHEGRRVGPVSAVGVTAPEEESPDAPLAKLRLGQMTVRDITSDSLSLSWTVPEGQFDHFLVQFKNGDGQPKAVRVPGHEDGVTISGLEPDHKYKMNLYGFHGGQRVGPVSAVGLTAPGKDEEMAPASTEPPTPEPPIKPRLEELTVTDATPDSLSLSWTVPEGQFDHFLVQYKNGDGQPKATRVPGHEDRVTISGLEPDNKYKMNLYGFHGGQRVGPVSAIGVTAAEEETPSPTEPSMEAPEPPEEPLLGELTVTGSSPDSLSLSWTVPQGRFDSFTVQYKDRDGRPQVVRVGGEESEVTVGGLEPGRKYKMHLYGLHEGRRVGPVSTVGVTAPQEDVDETPSPTEPGTEAPGPPEEPLLGELTVTGSSPDSLSLSWTVPQGRFDSFTVQYKDRDGRPQAVRVGGQESKVTVRGLEPGRKYKMHLYGLHEGRRLGPVSAVGVTEDEAETTQAVPTMTPEPPIKPRLGELTMTDATPDSLSLSWTVPEGQFDHFLVQYRNGDGQPKAVRVPGHEDGVTISGLEPDHKYKMNLYGFHGGQRVGPISVIGVTAAEEETPSPTELSTEAPEPPEEPLLGELTVTGSSPDSLSLSWTIPQGHFDSFTVQYKDRDGRPQVMRVRGEESEVTVGGLEPGRKYKMHLYGLHEGRRVGPVSTVGVTAPEDEAETTQAVPTTTPEPPNKPRLGELTVTDATPDSLSLSWMVPEGQFDHFLVQYRNGDGQPKVVRVPGHEDGVTISGLEPDHKYKMNLYGFHGGQRVGPISVIGVTAAEEETPAPTEPSTEAPEPPEEPLLGELTVTGSSPDSLSLSWTIPQGRFDSFTVQYKDRDGRPQVVRVRGEESEVTVGGLEPGCKYKMHLYGLHEGQRVGPVSAVGVTAPKDEAETTQAVPTMTPEPPIKPRLGELTVTDATPDSLSLSWMVPEGQFDHFLVQYRNGDGQPKAVRVPGHEDGVTISGLEPDHKYKMNLYGFHGGQRVGPVSAIGVTEEETPSPTEPSTEAPEAPEEPLLGELTVTGSSPDSLSLSWTVPQGRFDSFTVQYKDRDGQPQVVRVRGEESEVTVGGLEPGRKYKMHLYGLHEGQRVGPVSTVGITAPLPTPLPVEPRLGELAVAAVTSDSVGLSWTVAQGPFDSFLVQYRDAQGQPQAVPVSGDLRAVAVSGLDPARKYKFLLFGLQNGKRHGPVPVEARTAPDTKPSPRLGELTVTDATPDSVGLSWTVPEGEFDSFVVQYKDKDGRLQVVPVAANQREVTVQGLEPSRKYRFLLYGLSGRKRLGPISADSTTAPLEKELPPHLGELTVAEETSSSLRLSWTVAQGPFDSFVVQYRDTDGQPRAVPVAADQRTVTVEDLEPGKKYKFLLYGLLGGKRLGPVSALGMTAPEEDTPAPELAPEAPEPPEEPRLGVLTVTDTTPDSMRLSWSVAQGPFDSFVVQYEDTNGQPQALLVDGDQSKILISGLEPSTPYRFLLYGLHEGKRLGPLSAEGTTGLAPAGQTSEESRPRLSQLSVTDVTTSSLRLNWEAPPGAFDSFLLRFGVPSPSTLEPHPRPLLQRELMVPGTRHSAVLRDLRSGTLYSLTLYGLRGPHKADSIQGTARTLSPVLESPRDLQFSEIRETSAKVNWMPPPSRADSFKVSYQLADGGEPQSVQVDGQARTQKLQGLIPGARYEVTVVSVRGFEESEPLTGFLTTVPDGPTQLRALNLTEGFAVLHWKPPQNPVDTYDVQVTAPGAPPLQAETPGSAVDYPLHDLVLHTNYTATVRGLRGPNLTSPASITFTTGLEAPRDLEAKEVTPRTALLTWTEPPVRPAGYLLSFHTPGGQNQEILLPGGITSHQLLGLFPSTSYNARLQAMWGQSLLPPVSTSFTTGGLRIPFPRDCGEEMQNGAGASRTSTIFLNGNRERPLNVFCDMETDGGGWLVFQRRMDGQTDFWRDWEDYAHGFGNISGEFWLGNEALHSLTQAGDYSMRVDLRAGDEAVFAQYDSFHVDSAAEYYRLHLEGYHGTAGDSMSYHSGSVFSARDRDPNSLLISCAVSYRGAWWYRNCHYANLNGLYGSTVDHQGVSWYHWKGFEFSVPFTEMKLRPRNFRSPAGGG

SEQ ID NO: 65993 - protein, 245 aa, Homo sapiens
MTLFPVLLFLVAGLLPSFPANEDKDPAFTALLTTQTQVQREIVNKHNELRRAVSPPARNMLKMEWNKEAAANAQKWANQCNYRHSNPKDRMTSLKCGENLYMSSASSSWSQAIQSWFDEYNDFDFGVGPKTPNAVVGHYTQVVWYSSYLVGCGNAYCPNQKVLKYYYVCQYCPAGNWANRLYVPYEQGAPCASCPDNCDDGLCTNGCKYEDLYSNCKSLKLTLTCKHQLVRDSCKASCNCSNSIY

SEQ ID NO: 65994 - protein, 841 aa, Homo sapiens
MIFWSFVAGVVTFYCSLGPDSLLPNIFFTIKYKPKQLGLQELFPQGHSCAVCGKVKCKRHRPSLLLENYQPWLDLKISSKVDASLSEVDIPSIITKKLLKAAMKHIEVIVKARQKVKNTEFLQQAALEEYGPELHVALRSRRDELHYLRKLTELLFPYILPPKATDCRSLTLLIREILSGSVFLPSLDFLADPDTVNHLLIIFIDDSPPEKATEPASPLVPFLQKFAEPRNKKPSVLKLELKQIREQQDLLFRFMNFLKQEGAVHVLQFCLTVEEFNDRILRPELSNDEMLSLHEELQKIYKTYCLDESIDKIRFDPFIVEEIQRIAEGPYIDVVKLQTMRCLFEAYEHVLSLLENVFTPMFCHSDEYFRQLLRGAESPTRNSKLNRNTQKRGESFGISRIGSKIKGVFKSTTMEGAMLPNYGVAEGEDDFIEEGIVVMEDDSPVEAVSTPNTPRNLAAWKISIPYVDFFEDPSSERKEKKERIPVFCIDVERNDRRAVGHEPEHWSVYRRYLEFYVLESKLTEFHGAFPDAQLPSKRIIGPKNYEFLKSKREEFQEYLQKLLQHPELSNSQLLADFLSPNGGETQFLDKILPDVNLGKIIKSVPGKLMKEKGQHLEPFIMNFINSCESPKPKPSRPELTILSPTSENNKKLFNDLFKNNANRAENTERKQNQNYFMEVMTVEGVYDYLMYVGRVVFQVPDWLHHLLMGTRILFKNTLEMYTDYYLQCKLEQLFQEHRLVSLITLLRDAIFCENTEPRSLQDKQKGAKQTFEEMMNYIPDLLVKCIGEETKYESIRLLFDGLQQPVLNKQLTYVLLDIVIQELFPELNKVQKEVTSVTSWM

SEQ ID NO: 65995 - protein, 1243 aa, Homo sapiens
MWSCHWKWKPSPLLFLFALYIMCVPHSVWGCANCRVVLSNPSGTFTSPCYPNDYPNSQACMWTLRAPTGYIIQITFNDFDIEEAPNCIYDSLSLDNGESQTKFCGATAKGLSFNSSANEMHVSFSSDFSIQKKGFNASYIRVAVSLRNQKVILPQTSDAYQVSVAKSISIPELSAFTLCFEATKVGHEDSDWTAFSYSNASFTQLLSFGKAKSGYFLSISDSKCLLNNALPVKEKEDIFAESFEQLCLVWNNSLGSIGVNFKRNYETVPCDSTISKVIPGNGKLLLGSNQNEIVSLKGDIYNFRLWNFTMNAKILSNLSCNVKGNVVDWQNDFWNIPNLALKAESNLSCGSYLIPLPAAELASCADLGTLCQATVNSPSTTPPTVTTNMPVTNRIDKQRNDGIIYRISVVIQNILRHPEVKVQSKVAEWLNSTFQNWNYTVYVVNISFHLSAGEDKIKVKRSLEDEPRLVLWALLVYNATNNTNLEGKIIQQKLLKNNESLDEGLRLHTVNVRQLGHCLAMEEPKGYYWPSIQPSEYVLPCPDKPGFSASRICFYNATNPLVTYWGPVDISNCLKEANEVANQILNLTADGQNLTSANITNIVEQVKRIVNKEENIDITLGSTLMNIFSNILSSSDSDLLESSSEALKTIDELAFKIDLNSTSHVNITTRNLALSVSSLLPGTNAISNFSIGLPSNNESYFQMDFESGQVDPLASVILPPNLLENLSPEDSVLVRRAQFTFFNKTGLFQDVGPQRKTLVSYVMACSIGNITIQNLKDPVQIKIKHTRTQEVHHPICAFWDLNKNKSFGGWNTSGCVAHRDSDASETVCLCNHFTHFGVLMDLPRSASQLDARNTKVLTFISYIGCGISAIFSAATLLTYVAFEKLRRDYPSKILMNLSTALLFLNLLFLLDGWITSFNVDGLCIAVAVLLHFFLLATFTWMGLEAIHMYIALVKVFNTYIRRYILKFCIIGWGLPALVVSVVLASRNNNEVYGKESYGKEKGDEFCWIQDPVIFYVTCAGYFGVMFFLNIAMFIVVMVQICGRNGKRSNRTLREEVLRNLRSVVSLTFLLGMTWGFAFFAWGPLNIPFMYLFSIFNSLQGLFIFIFHCAMKENVQKQWRQHLCCGRFRLADNSDWSKTATNIIKKSSDNLGKSLSSSSIGSNSTYLTSKSKSSSTTYFKRNSHTDSASMDKSLSKLAHADGDQTSIIPVHQVIDKVKGYCNAHSDNFYKNIIMSDTFSHSTKF

SEQ ID NO: 65996 - protein, 650 aa, Homo sapiens [sequence omitted]

SEQ ID NO: 65997 - protein, 400 aa, Homo sapiens
MSPALTCLVLGLALVFGEGSAVHHPPSYVAHLASDFGVRVFQQVAQASKDRNVVFSPYGVASVLAMLQLTTGGETQQQIQAAMGFKIDDKGMAPALRHLYKELMGPWNKDEISTTDAIFVQRDLKLVQGFMPHFFRLFRSTVKQVDFSEVERARFIINDWVKTHTKGMISNLLGKGAVDQLTRLVLVNALYFNGQWKTPFPDSSTHRRLFHKSDGSTVSVPMMAQTNKFNYTEFTTPDGHYYDILELPYHGDTLSMFIAAPYEKEVPLSALTNILSAQLISHWKGNMTRLPRLLVLPKFSLETEVDLRKPLENLGMTDMFRQFQADFTSLSDQEPLHVAQALQKVKIEVNESGTVASSSTAVIVSARMAPEEIIMDRPFLFVVRHNPTGTVLFMGQVMEP

SEQ ID NO: 65998 - protein, 92 aa, Homo sapiens
MIDFVVTLVATFLWLVSTSAWAKALTDIKIATGHNIIDELPPCKKKAVLCYFGSVTSMGSLNVSVMEFRYVAQTGVQWHDLGTLQPPPPGFK

SEQ ID NO: 65999 - protein, 137 aa, Homo sapiens
MVTVALSVALLALLKWYSTSAFSRLEKLGLRHPKPSPFIGNLTFFRQGFWESQMELRKLYGPLCGYYLGRRMFIVISEPDMIKQVLVENFSNFTNRMPQSIMPNSRHHVASRGMWPGGRRLACYLHPFRMAEGIAEV

SEQ ID NO: 66000 - protein, 2198 aa, Homo sapiens
MTQLLAGVFLAFLALATEGGVLKKVIRHKRQSGVNATLPEENQPVVFNHVYNIKLPVGSQCSVDLESASGEKDLAPPSEPSESFQEHTVDGENQIVFTHRINIPRRACGCAAAPDVKELLSRLEELENLVSSLREQCTAGAGCCLQPATGRLDTRPFCSGRGNFSTEGCGCVCEPGWKGPNCSEPECPGNCHLRGRCIDGQCICDDGFTGEDCSQLACPSDCNDQGKCVNGVCICFEGYAGADCSREICPVPCSEEHGTCVDGLCVCHDGFAGDDCNKPLCLNNCYNRGRCVENECVCDEGFTGEDCSELICPNDCFDRGRCINGTCYCEEGFTGEDCGKPTCPHACHTQGRCEEGQCVCDEGFAGVDCSEKRCPADCHNRGRCVDGRCECDDGFTGADCGELKCPNGCSGHGRCVNGQCVCDEGYTGEDCSQLRCPNDCHSRGRCVEGKCVCEQGFKGYDCSDMSCPNDCHQHGRCVNGMCVCDDGYTGEDCRDRQCPRDCSNRGLCVDGQCVCEDGFTGPDCAELSCPNDCHGQGRCVNGQCVCHEGFMGKDCKEQRCPSDCHGQGRCVDGQCICHEGFTGLDCGQHSCPSDCNNLGQCVSGRCICNEGYSGEDCSEVSPPKDLVVTEVTEETVNLAWDNEMRVTEYLVVYTPTHEGGLEMQFRVPGDQTSTIIQELEPGVEYFIRVFAILENKKSIPVSARVATYLPAPEGLKFKSIKETSVEVEWDPLDIAFETWEIIFRNMNKEDEGEITKSLRRPETSYRQTGLAPGQEYEISLHIVKNNTRGPGLKRVTTTRLDAPSQIEVKDVTDTTALITWFKPLAEIDGIELTYGIKDVPGDRTTIDLTEDENQYSIGNLKPDTEYEVSLISRRGDMSSNPAKETFTTGLDAPRNLRRVSQTDNSITLEWRNGKAAIDSYRIKYAPISGGDHAEVDVPKSQQATTKTTLTGLRPGTEYGIGVSAVKEDKESNPATINAATELDTPKDLQVSETAETSLTLLWKTPLAKFDRYRLNYSLPTGQWVGVQLPRNTTSYVLRGLEPGQEYNVLLTAEKGRHKSKPARVKASTEQAPELENLTVTEVGWDGLRLNWTAADQAYEHFIIQVQEANKVEAARNLTVPGSLRAVDIPGLKAATPYTVSIYGVIQGYRTPVLSAEASTGETPNLGEVVVAEVGWDALKLNWTAPEGAYEYFFIQVQEADTVEAAQNLTVPGGLRSTDLPGLKAATHYTITIRGVTQDFSTTPLSVEVLTEEVPDMGNLTVTEVSWDALRLNWTTPDGTYDQFTIQVQEADQVEEAHNLTVPGSLRSMEIPGLRAGTPYTVTLHGEVRGHSTRPLAVEVVTEDLPQLGDLAVSEVGWDGLRLNWTAADNAYEHFVIQVQEVNKVEAAQNLTLPGSLRAVDIPGLEAATPYRVSIYGVIRGYRTPVLSAEASTAKEPEIGNLNVSDITPESFNLSWMATDGIFETFTIEIIDSNRLLETVEYNISGAERTAHISGLPPSTDFIVYLSGLAPSIRTKTISATATTEALPLLENLTISDINPYGFTVSWMASENAFDSFLVTVVDSGKLLDPQEFTLSGTQRKLELRGLITGIGYEVMVSGFTQGHQTKPLRAEIVTEAEPEVDNLLVSDATPDGFRLSWTADEGVFDNFVLKIRDTKKQSEPLEITLLAPERTRDITGLREATEYEIELYGISKGRRSQTVSAIATTAMGSPKEVIFSDITENSATVSWRAPTAQVESFRITYVPITGGTPSMVTVDGTKTQTRLVKLIPGVEYLVSIIAMKGFEESEPVSGSFTTALDGPSGLVTANITDSEALARWQPAIATVDSYVISYTGEKVPEITRTVSGNTVEYALTDLEPATEYTLRIFAEKGPQKSSTITAKFTTDLDSPRDLTATEVQSETALLTWRPPRASVTGYLLVYESVDGTVKEVIVGPDTTSYSLADLSPSTHYTAKIQALNGPLRSNMIQTIFTTIGLLYPFPKDCSQAMLNGDTTSGLYTIYLNGDKAEALEVFCDMTSDGGGWIVFLRRKNGRENFYQNWKAYAAGFGDRREEFWLGLDNLNKITAQGQYELRVDLRDHGETAFAVYDKFSVGDAKTRYKLKVEGYSGTAGDSMAYHNGRSFSTFDKDTDSAITNCALSYKGAFWYRNCHRVNLMGRYGDNNHSQGVNWFHWKGHEHSIQFAEMKLRPSNFRNLEGRRKRA

SEQ ID NO: 66001 - protein, 620 aa, Homo sapiens
MIYGLIVGVILRYGTPATSGRDKSLSCTQEDRAFSTLLVNVSGKFFEYTLKGEISPGKINSVEQNDMLRKVTFDPEVFFNILLPPIIFHAGYSLKKRHFFRNLGSILAYAFLGTAVSCFIIGNLMYGVVKLMKIMGQLSDKFYYTDCLFFGAIISATDPVTVLAIFNELHADVDLYALLFGESVLNDAVAIVLSSSIVAYQPAGLNTHAFDAAAFFKSVGIFLGIFSGSFTMGAVTGVNANVTKFTKLHCFPLLETALFFLMSWSTFLLAEACGFTGVVAVLFCGITQAHYTYNNLSVESRSRTKQLFEVLHFLAENFIFSYMGLALFTFQKHVFSPIFIIGAFVAIFLGRAAHIYPLSFFLNLGRRHKIGWNFQHMMMFSGLRGAMAFALAIRDTASYARQMMFTTTLLIVFFTVWIIGGGTTPMLSWLNIRVGVEEPSEEDQNEHHWQYFRVGVDPDQDPPPNNDSFQVLQGDGPDSARGNRTKQESAWIFRLWYSFDHNYLKPILTHSGPPLTTTLPAWCGLLARCLTSPQVYDNQEPLREEDSDFILTEGDLTLTYGDSTVTANGSSSSHTASTSLEGSRRTKSSSEEVLERDLGMGDQKVSSRGTRLVFPLEDNA

SEQ ID NO: 66002 - protein, 32 aa, Homo sapiens
ITICVCVIEVLGMSFALTLNCQIDKTSQTIGL

SEQ ID NO: 66003 - protein, 59 aa, Homo sapiens
LDAILFLYGIVLTLLYCRLKIQVRKAAITSYEKSDGVYTGLSTRNQETYETLKHEKPPQ

SEQ ID NO: 66004 - protein, 1051 aa, Homo sapiens
ILFSVIIVVLVTAFNDWSKEKQFRGLQCRIEQEQKFSIIRNGQLIQLPVAEIVVGDIAQVKYGDLLPADGILIQGNDLKIDESSLTGESDHVKKSLDKDPMLLSGTHVMEGSGRMVVTAVGVNSQTGIILTLLGVNEDDEGEKKKKGKKQGVPENRNKAKTQDGVALEIQPLNSQEGIDNEEKDKKAVKVPKKEKSVLQGKLTRLAVQIGKAGLLMSALTVFILILYFVIDNFVINRRPWLPECTPIYIQYFVKFFIIGITVLVVAVPEGLPLAVTISLAYSVKKMMKDNNLVRHLDACETMGNATAICSDKTGTLTMNRMTVVQAYIGGIHYRQIPSPDVFLPKVLDLIVNGISINSAYTSKILPPEKEGGLPRQVGNKTECALLGFVTDLKQDYQAVRNEVPEEKLYKVYTFNSVRKSMSTVIRNPNGGFRMYSKGASEIILRKCNRILDRKGEAVPFKNKDRDDMVRTVIEPMACDGLRTICIAYRDFDDTEPSWDNENEILTELTCIAVVGIEDPVRPEVPDAIAKCKQAGITVRMVTGDNINTARAIATKCGILTPGDDFLCLEGKEFNRLIRNEKGEVEQEKLDKIWPKLRVLARSSPTDKHTLVKGIIDSTVGEHRQVVAVTGDGTNDGPALKKADVGFAMGIAGTDVAKEASDIILTDDNFTSIVKAVMWGRNVYDSISKFLQFQLTVNVVAVIVAFTGACITQDSPLKAVQMLWVNLIMDTFASLALATEPPTESLLKRRPYGRNKPLISRTMMKNILGHAFYQLIVIFILVFAGEKFFDIDSGRKAPLHSPPSQHYTIVFNTFVLMQLFNEINSRKIHGEKNVFSGIYRNIIFCSVVLGTFICQIFIVEFGGKPFSCTSLSLSQWLWCLFIGIGELLWGQFISAIPTRSLKFLKEAGHGTTKEEITKDAEGLDEIDHAEMELRRGQILWFRGLNRIQTQIKVVKAFHSSLHESIQKPYNQKSIHSFMTHPEFAIEEELPRTPLLDEEEEENPDKASKFGTRVLLLDGEVTPYANTNNNAVDCNQVQLPQSDSSLQSLETSV

SEQ ID NO: 66005 - protein, 15 aa, Homo sapiens
LTGLLGTLVTMGLLT

SEQ ID NO: 66006 - protein, 70 aa, Homo sapiens
IAFITVLIFKVYMFKCVWRCYRLIKCMNSVEEKRNSKMLQKVVLPSYEEALSLPSKTPEGGPAPPPYSEV

SEQ ID NO: 66007 - protein, 626 aa, Homo sapiens
LLLSLLLSVWLSKEKDILDKPQSICCLHTMLSLLSKMKVAIDETWDSQSVSPWWQQMRTACIQSENNGAALLSAHVGHSVAAQISNNMTEKKFSQTVLGADSEALTDSWEALSLDTEYWKLLLKQLEDCLILQTLLHSKGNTQTSKVSSLQAEPLPRLSVKKLLEGGKGGIADSVAKWIFKQDFSPEVLKLANEERDAENPDEPKEGVNRSFLEVSEMEMDLGAIPDLLHLAYEQFPCSLELDVLHAHCCWEYVVQWNKDPEEARFFVRSIEHLKQIFNAHVQNGIALMMWNTFLVKRFSAATYLMDKVGKSPKDRLCRRDVGMSDTAMTSFLGSCLDLLQILMEADVSRDEIQVPVLDTEDAWLSVEGPISIVELALEQKHIHYPLVEHHSILCSILYAVMRFSLKTVKPLSLFDSKGKNAFFKDLTSIQLLPSGEMDPNFISVRQQFLLKVVSAAVQAQHSATKVKDPTEEATPTPFGKDQDWPALAVDLAHHLQVSEDVVRRHYVGELYNYGVDHLGEEAILQVHDKEVLASQLLVLTGQRLAHALLHTQTKEGMELLARLPPTLCTWLKAMDPQDLQNTEVPIATTAKLVNKVIELLPEKHGQYGLALHLIEAVEAISLPSL

SEQ ID NO: 66008 - protein, 158 aa, Homo sapiens
MLISCLMFLSQSQGQEAQTELPQARISCPEGTNAYRSYCYYFNEDRETWVDADLYCQNMNSGNLVSVLTQAEGAFVASLIKESGTDDFNVWIGLHDPKKNRRWHWSSGSLVSYKSWGIGAPSSVNPGYCVSLTSSTGFQKWKDVPCEDKFSFVCKFKN

SEQ ID NO: 66009 - protein, 1462 aa, Homo sapiens
VQKGSWLLLALLHPTIILAQQEAVEGGCSHLGQSYADRDVWKPEPCQICVCDSGSVLCDDIICDDQELDCPNPEIPFGECCAVCPQPPTAPTRPPNGQGPQGPKGDPGPPGIPGRNGDPGIPGQPGSPGSPGPPGICESCPTGPQNYSPQYDSYDVKSGVAVGGLAGYPGPAGPPGPPGPPGTSGHPGSPGSPGYQGPPGEPGQAGPSGPPGPPGAIGPSGPAGKDGESGRPGRPGERGLPGPPGIKGPAGIPGFPGMKGHRGFDGRNGEKGETGAPGLKGENGLPGENGAPGPMGPRGAPGERGRPGLPGAAGARGNDGARGSDGQPGPPGPPGTAGFPGSPGAKGEVGPAGSPGSNGAPGQRGEPGPQGHAGAQGPPGPPGINGSPGGKGEMGPAGIPGAPGLMGARGPPGPAGANGAPGLRGGAGEPGKNGAKGEPGPRGERGEAGIPGVPGAKGEDGKDGSPGEPGANGLPGAAGERGAPGFRGPAGPNGIPGEKGPAGERGAPGPAGPRGAAGEPGRDGVPGGPGMRGMPGSPGGPGSDGKPGPPGSQGESGRPGPPGPSGPRGQPGVMGFPGPKGNDGAPGKNGERGGPGGPGPQGPPGKNGETGPQGPPGPTGPGGDKGDTGPPGPQGLQGLPGTGGPPGENGKPGEPGPKGDAGAPGAPGGKGDAGAPGERGPPGLAGAPGLRGGAGPPGPEGGKGAAGPPGPPGAAGTPGLQGMPGERGGLGSPGPKGDKGEPGGPGADGVPGKDGPRGPTGPIGPPGPAGQPGDKGEGGAPGLPGIAGPRGSPGERGETGPPGPAGFPGAPGQNGEPGGKGERGAPGEKGEGGPPGVAGPPGGSGPAGPPGPQGVKGERGSPGGPGAAGFPGARGLPGPPGSNGNPGPPGPSGSPGKDGPPGPAGNTGAPGSPGVSGPKGDAGQPGEKGSPGAQGPPGAPGPLGIAGITGARGLAGPPGMPGPRGSPGPQGVKGESGKPGANGLSGERGPPGPQGLPGLAGTAGEPGRDGNPGSDGLPGRDGSPGGKGDRGENGSPGAPGAPGHPGPPGPVGPAGKSGDRGESGPAGPAGAPGPAGSRGAPGPQGPRGDKGETGERGAAGIKGHRGFPGNPGAPGSPGPAGQQGAIGSPGPAGPRGPVGPSGPPGKDGTSGHPGPIGPPGPRGNRGERGSEGSPGHPGQPGPPGPPGAPGPCCGGVGAAAIAGIGGEKAGGFAPYYGDEPMDFKINTDEIMTSLKSVNGQIESLISPDGSRKNPARNCRDLKFCHPELKSGEYWVDPNQGCKLDAIKVFCNMETGETCISANPLNVPRKHWWTDSSAEKKHVWFGESMDGGFQFSYGNPELPEDVLDVHLAFLRLLSSRASQNITYHCKNSIAYMDQASGNVKKALKLMGSNEGEFKAEGNSKFTYTVLEDGCTKHTGEWSKTVFEYRTRKAVRLPIVDIAPYDIGGPDQEFGVDVGPVCFL

SEQ ID NO: 66010 - protein, 169 aa, Homo sapiens
LPSVSWMLLSCLMLLSQVQGEEPQRELPSARIRCPKGSKAYGSHCYALFLSPKSWTDADLACQKRPSGNLVSVLSGAEGSFVSSLVKSIGNSYSYVWIGLHDPTQGTEPNGEGWEWSSSDVMNYFAWERNPSTISSPGHCASLSRSTAFLRWKDYNCNVRLPYVCKFTD

SEQ ID NO: 66011 - protein, 26 aa, Homo sapiens
LTTSFLSFFCFFLPAVISVSSFCHTA

SEQ ID NO: 66012 - protein, 50 aa, Homo sapiens
MAGFAFSCLLTLPPWPIYRRHPLKWLPVQESSTDDKKPGERKIKRHAKNN

SEQ ID NO: 66013 - protein, 22 aa, Homo sapiens
IFGACFLIDFMYFERSPPQRSR

SEQ ID NO: 66014 - protein, 33 aa, Homo sapiens
LALLTLLGALGIANSFLDEYLDLNIAKKLRRQF

SEQ ID NO: 66015 - protein, 370 aa, Homo sapiens
ILMIIVVLTFVFGANVEKLICEPYTSKELFRVLDTPYLLNEDWEYYLSGKLFNKSKMKLTFEQVYSDCKKNRGTYGTLHLQNSFNISEHLNINEHTGSISSELESLKVNLNIFLLGAAGRKNLQDFAACGIDRMNYDSYLAQTGKSPAGVNLLSFAYDLEAKANSLPPGNLRNSLKRDAQTIKTIHQQRVLPIEQSLSTLYQSVKILQRTGNGLLERVTRILASLDFAQNFITNNTSSVIIEETKKYGRTIIGYFEHYLQWIEFSISEKVASCKPVATALDTAVDVFLCSYIIDPLNLFWFGIGKATVFLLPALIFAVKLAKYYRRMDSEDVYDDVETIPMKNMENGNNGYHKDHVYGIHNPVMTSPSQH

SEQ ID NO: 66016 - protein, 26 aa, Homo sapiens
MPAGLIAGASLLMVAKVGVSMFNRPH

SEQ ID NO: 66017 - protein, 19 aa, Homo sapiens
LQSTASLFVVSLSLLHLYS

SEQ ID NO: 66018 - protein, 18 aa, Homo sapiens
ILVIGVAIISLIIWGLNH

SEQ ID NO: 66019 - protein, 34 aa, Homo sapiens
RIHCKEQQALFHCWGLMCGSTLTTFSIKMSGLII

SEQ ID NO: 66020 - protein, 58 aa, Homo sapiens
VASGQKREMGASLYVGWAASGLLLLGGGLLCCNCPPRTDKPYSAKYSAARSAAASNYV

SEQ ID NO: 66021 - protein, 1356 aa, Homo sapiens
LLLAVTLCLATCQSLQEETVRKGPAGDRGPRGERGPPGPPGRDGEDGPTGPPGPPGPPGPPGLGGNFAAQYDGKGVGLGPGPMGLMGPRGPPGAAGAPGPQGFQGPAGEPGEPGQTGPAGARGPAGPPGKAGEDGHPGKPGRPGERGVVGPQGARGFPGTPGLPGFKGIRGHNGLDGLKGQPGAPGVKGEPGAPGENGTPGQTGARGLPGERGRVGAPGPAGARGSDGSVGPVGPAGPIGSAGPPGFPGAPGPKGEIGAVGNAGPAGPAGPRGEVGLPGLSGPVGPPGNPGANGLTGAKGAAGLPGVAGAPGLPGPRGIPGPVGAAGATGARGLVGEPGPAGSKGESGNKGEPGSAGPQGPPGPSGEEGKRGPNGEAGSAGPPGPPGLRGSPGSRGLPGADGRAGVMGPPGSRGASGPAGVRGPNGDAGRPGEPGLMGPRGLPGSPGNIGPAGKEGPVGLPGIDGRPGPIGPAGARGEPGNIGFPGPKGPTGDPGKNGDKGHAGLAGARGAPGPDGNNGAQGPPGPQGVQGGKGEQGPPGPPGFQGLPGPSGPAGEVGKPGERGLHGEFGLPGPAGPRGERGPPGESGAAGPTGPIGSRGPSGPPGPDGNKGEPGVVGAVGTAGPSGPSGLPGERGAAGIPGGKGEKGEPGLRGEIGNPGRDGARGAPGAVGAPGPAGATGDRGEAGAAGPAGPAGPRGSPGERGEVGPAGPNGFAGPAGAAGQPGAKGERGAKGPKGENGVVGPTGPVGAAGPAGPNGPPGPAGSRGDGGPPGMTGFPGAAGRTGPPGPSGISGPPGPPGPAGKEGLRGPRGDQGPVGRTGEVGAVGPPGFAGEKGPSGEAGTAGPPGTPGPQGLLGAPGILGLPGSRGERGLPGVAGAVGEPGPLGIAGPPGARGPPGAVGSPGVNGAPGEAGRDGNPGNDGPPGRDGQPGHKGERGYPGNIGPVGAAGAPGPHGPVGPAGKHGNRGETGPSGPVGPAGAVGPRGPSGPQGIRGDKGEPGEKGPRGLPGLKGHNGLQGLPGIAGHHGDQGAPGSVGPAGPRGPAGPSGPAGKDGRTGHPGTVGPAGIRGPQGHQGPAGPPGPPGPPGPPGVSGGGYDFGYDGDFYRADQPRSAPSLRPKDYEVDATLKSLNNQIETLLTPEGSRKNPARTCRDLRLSHPEWSSGYYWIDPNQGCTMDAIKVYCDFSTGETCIRAQPENIPAKNWYRSSKDKKHVWLGETINAGSQFEYNVEGVTSKEMATQLAFMRLLANYASQNITYHCKNSIAYMDEETGNLKKAVILQGSNDVELVAEGNSRFTYTVLVDGCSKKTNEWGKTIIEYKTNKPSRLPFLDIAPLDIGGADQEFFVDIGPVCFK

SEQ ID NO: 66022 - protein, 415 aa, Homo sapiens
LILFFGALFGHIYCLETFVGDQVLEIVPSNEEQIKNLLQLEAQEHLQLDFWKSPTTPGETAHVRVPFVNVQAVKVFLESQGIAYSIMIEDVQVLLDKENEEMLFNRRRERSGNFNFGAYHTLEEISQEMDNLVAEHPGLVSKVNIGSSFENRPMNVLKFSTGGDKPAIWLDAGIHAREWVTQATALWTANKIVSDYGKDPSITSILDALDIFLLPVTNPDGYVFSQTKNRMWRKTRSKVSGSLCVGVDPNRNWDAGFGGPGASSNPCSDSYHGPSANSEVEVKSIVDFIKSHGKVKAFITLHSYSQLLMFPYGYKCTKLDDFDELSEVAQKAAQSLRSLHGTKYKVGPICSVIYQASGGSIDWSYDYGIKYSFAFELRDTGRYGFLLPARQILPTAEETWLGLKAIMEHVRDHPY

SEQ ID NO: 66023 - protein, 21 aa, Homo sapiens
MSLLFIASVFMLHIWGKYTRS

SEQ ID NO: 66024 - protein, 952 aa, Homo sapiens
RMDGRWQCSCWAWFLLVLAVVAGDTVSTGSTDNSPTSNSLEGGTDATAFWWGEWTKWTACSRSCGGGVTSQERHCLQQRRKSVPGPGNRTCTGTSKRYQLCRVQECPPDGRSFREEQCVSFNSHVYNGRTHQWKPLYPDDYVHISSKPCDLHCTTVDGQRQLMVPARDGTSCKLTDLRGVCVSGKCEPIGCDGVLFSTHTLDKCGICQGDGSSCTHVTGNYRKGNAHLGYSLVTHIPAGARDIQIVERKKSADVLALADEAGYYFFNGNYKVDSPKNFNIAGTVVKYRRPMDVYETGIEYIVAQGPTNQGLNVMVWNQNGKSPSITFEYTLLQPPHESRPQPIYYGFSESAESQGLDGAGLMGFVPHNGSLYGQASSERLGLDNRLFGHPGLDMELGPSQGQETNEVCEQAGGGACEGPPRGKGFRDRNVTGTPLTGDKDDEEVDTHFASQEFFSANAISDQLLGAGSDLKDFTLNETVNSIFAQGAPRSSLAESFFVDYEENEGAGPYLLNGSYLELSSDRVANSSSEAPFPNVSTSLLTSAGNRTHKARTRPKARKQGVSPADMYRWKLSSHEPCSATCTTGVMSAYAMCVRYDGVEVDDSYCDALTRPEPVHEFCAGRECQPRWETSSWSECSRTCGEGYQFRVVRCWKMLSPGFDSSVYSDLCEAAEAVRPEERKTCRNPACGPQWEMSEWSECTAKCGERSVVTRDIRCSEDEKLCDPNTRPVGEKNCTGPPCDRQWTVSDWGPCSGSCGQGRTIRHVYCKTSDGRVVPESQCQMETKPLAIHPCGDKNCPAHWLAQDWERCNTTCGRGVKKRLVLCMELANGKPQTRSGPECGLAKKPPEESTCFERPCFKWYTSPWSECTKTCGVGVRMRDVKCYQGTDIVRGCDPLVKPVGRQACDLQPCPTEPPDDSCQDQPGTNCALAIKVNLCGHWYYSKACCRSCRPPHS

SEQ ID NO: 66025 - protein, 676 aa, Homo sapiens
LRCAPVLRPVAGLPAAAQLAGKMKLSLVAAMLLLLSAARAEEEDKKEDVGTVVGIDLGTTYSCVGVFKNGRVEIIANDQGNRITPSYVAFTPEGERLIGDAAKNQLTSNPENTVFDAKRLIGRTWNDPSVQQDIKFLPFKVVEKKTKPYIQVDIGGGQTKTFAPEEISAMVLTKMKETAEAYLGKKVTHAVVTVPAYFNDAQRQATKDAGTIAGLNVMRIINEPTAAAIAYGLDKREGEKNILVFDLGGGTFDVSLLTIDNGVFEVVATNGDTHLGGEDFDQRVMEHFIKLYKKKTGKDVRKDNRAVQKLRREVEKAKRALSSQHQARIEIESFYEGEDFSETLTRAKFEELNMDLFRSTMKPVQKVLEDSDLKKSDIDEIVLVGGSTRIPKIQQLVKEFFNGKEPSRGINPDEAVAYGAAVQAGVLSGDQDTGDLVLLDVCPLTLGIETVGGVMTKLIPRNTVVPTKKSQIFSTASDNQPTVTIKVYEGERPLTKDNHLLGTFDLTGIPPAPRGVPQIEVTFEIDVNGILRVTAEDKGTGNKNKITITNDQNRLTPEEIERMVNDAEKFAEEDKKLKERIDTRNELESYAYSLKNQIGDKEKLGGKLSSEDKETMEKAVEEKIEWLESHQDADIEDFKAKKKELEEIVQPIISKLYGSAGPPPTGEEDTAEKDEL

SEQ ID NO: 66026 - protein, 87 aa, Homo sapiens
LETQFADGVYLVLLMGLLEGYFVPLHSFFLTPDSFEQKVLNVSFAFELMQDGGLEKPKPRPEDIVNCDLKSTLRVLYNLFTKYRNVE

SEQ ID NO: 66027 - protein, 65 aa, Homo sapiens
LVIAVAIATVIVISLVMLRKRQYGTISHGIVEVDPMLTPEERHLNKMQNHGYENPTYKYLEQMQI

SEQ ID NO: 66028 - protein, 31 aa, Homo sapiens
LAFIVGLLILLSRRFRCGGNKKRRQINEDEP

SEQ ID NO: 66029 - protein, 685 aa, Homo sapiens
IVLFSLLAWVYAEPTMYGEILSPNYPQAYPSEVEKSWDIEVPEGYGIHLYFTHLDIELSENCAYDSVQIISGDTEEGRLCGQRSSNNPHSPIVEEFQVPYNKLQVIFKSDFSNEERFTGFAAYYVATDINECTDFVDVPCSHFCNNFIGGYFCSCPPEYFLHDDMKNCGVNCSGDVFTALIGEIASPNYPKPYPENSRCEYQIRLEKGFQVVVTLRREDFDVEAADSAGNCLDSLVFVAGDRQFGPYCGHGFPGPLNIETKSNALDIIFQTDLTGQKKGWKLRYHGDPMPCPKEDTPNSVWEPAKAKYVFRDVVQITCLDGFEVVEGRVGATSFYSTCQSNGKWSNSKLKCQPVDCGIPESIENGKVEDPESTLFGSVIRYTCEEPYYYMENGGGGEYHCAGNGSWVNEVLGPELPKCVPVCGVPREPFEEKQRIIGGSDADIKNFPWQVFFDNPWAGGALINEYWVLTAAHVVEGNREPTMYVGSTSVQTSRLAKSKMLTPEHVFIHPGWKLLEVPEGRTNFDNDIALVRLKDPVKMGPTVSPICLPGTSSDYNLMDGDLGLISGWGRTEKRDRAVRLKAARLPVAPLRKCKEVKVEKPTADAEAYVFTPNMICAGGEKGMDSCKGDSGGAFAVQDPNDKTKFYAAGLVSWGPQCGTYGLYTRVKNYVDWIMKTMQENSTPRED

SEQ ID NO: 66030 - protein, 102 aa, Homo sapiens
KSLILLAILAALAVVTLCYESHESMESYELNPFINRRNANTFISPQQRWRAKVQERIRERSKPVHELNREACDDYRLCERYAMVYGYNAAYNRYFRKRRGTK

SEQ ID NO: 66031 - protein, 1472 aa, Homo sapiens
KNKLLHPSLVLLLLVLLPTDASVSGKPQYMVLVPSLLHTETTEKGCVLLSYLNETVTVSASLESVRGNRSLFTDLEAENDVLHCVAFAVPKSSSNEEVMFLTVQVKGPTQEFKKRTTVMVKNEDSLVFVQTDKSIYKPGQTVKFRVVSMDENFHPLNELIPLVYIQDPKGNRIAQWQSFQLEGGLKQFSFPLSSEPFQGSYKVVVQKKSGGRTEHPFTVEEFVLPKFEVQVTVPKIITILEEEMNVSVCGLYTYGKPVPGHVTVSICRKYSDASDCHGEDSQAFCEKFSGQLNSHGCFYQQVKTKVFQLKRKEYEMKLHTEAQIQEEGTVVELTGRQSSEITRTITKLSFVKVDSHFRQGIPFFGQVRLVDGKGVPIPNKVIFIRGNEANYYSNATTDEHGLVQFSINTTNVMGTSLTVRVNYKDRSPCYGYQWVSEEHEEAHHTAYLVFSPSKSFVHLEPMSHELPCGHTQTVQAHYILNGGTLLGLKKLSFYYLIMAKGGIVRTGTHGLLVKQEDMKGHFSISIPVKSDIAPVARLLIYAVLPTGDVIGDSAKYDVENCLANKVDLSFSPSQSLPASHAHLRVTAAPQSVCALRAVDQSVLLMKPDAELSASSVYNLLPEKDLTGFPGPLNDQDNEDCINRHNVYINGITYTPVSSTNEKDMYSFLEDMGLKAFTNSKIRKPKMCPQLQQYEMHGPEGLRVGFYESDVMGRGHARLVHVEEPHTETVRKYFPETWIWDLVVVNSAGVAEVGVTVPDTITEWKAGAFCLSEDAGLGISSTASLRAFQPFFVELTMPYSVIRGEAFTLKATVLNYLPKCIRVSVQLEASPAFLAVPVEKEQAPHCICANGRQTVSWAVTPKSLGNVNFTVSAEALESQELCGTEVPSVPEHGRKDTVIKPLLVEPEGLEKETTFNSLLCPSGGEVSEELSLKLPPNVVEESARASVSVLGDILGSAMQNTQNLLQMPYGCGEQNMVLFAPNIYVLDYLNETQQLTPEIKSKAIGYLNTGYQRQLNYKHYDGSYSTFGERYGRNQGNTWLTAFVLKTFAQARAYIFIDEAHITQALIWLSQRQKDNGCFRSSGSLLNNAIKGGVEDEVTLSAYITIALLEIPLTVTHPVVRNALFCLESAWKTAQEGDHGSHVYTKALLAYAFALAGNQDKRKEVLKSLNEEAVKKDNSVHWERPQKPKAPVGHFYEPQAPSAEVEMTSYVLLAYLTAQPAPTSEDLTSATNIVKWITKQQNAQGGFSSTQDTVVALHALSKYGAATFTRTGKAAQVTIQSSGTFSSKFQVDNNNRLLLQQVSLPELPGEYSMKVTGEGCVYLQTSLKYNILPEKEEFPFALGVQTLPQTCDEPKAHTSFQISLSVSYTGSRSASNMAIVDVKMVSGFIPLKPTVKMLERSNHVSRTEVSSNHVLIYLDKVSNQTLSLFFTVLQDVPVRDLKPAIVKVYDYYETDEFAIAEYNAPCSKDLGNA

SEQ ID NO: 66032 - protein, 35 aa, Homo sapiens
LLLLVLAVGLAVFFFRRHGTPRRLLYCQRSLLDKV

SEQ ID NO: 66033 - protein, 154 aa, Homo sapiens
LEKSLVRLLLLVLILLVLGWVQPSLGKESRAKKFQRQHMDSDSSPSSSSTYCNQMMRRRNMTQGRCKPVNTFVHEPLVDVQNVCFQEKVTCKNGQGNCYKSNSSMHITDCRLTNGSRYPNCAYRTSPKERHIIVACEGSPYVPVHFDASVEDST

SEQ ID NO: 66034 - protein, 410 aa, Homo sapiens
ILLLAGLCCLVPVSLAEDPQGDAAQKTDTSHHDQDHPTFNKITPNLAEFAFSLYRQLAHQSNSTNIFFSPVSIATAFAMLSLGTKADTHDEILEGLNFNLTEIPEAQIHEGFQELLRTLNQPDSQLQLTTGNGLFLSEGLKLVDKFLEDVKKLYHSEAFTVNFGDTEEAKKQINDYVEKGTQGKIVDLVKELDRDTVFALVNYIFFKGKWERPFEVKDTEEEDFHVDQVTTVKVPMMKRLGMFNIQHCKKLSSWVLLMKYLGNATAIFFLPDEGKLQHLENELTHDIITKFLENEDRRSASLHLPKLSITGTYDLKSVLGQLGITKVFSNGADLSGVTEEAPLKLSKAVHKAVLTIDEKGTEAAGAMFLEAIPMSIPPEVKFNKPFVFLMIEQNTKSPLFMGKVVNPTQK

SEQ ID NO: 66035 - protein, 55 aa, Homo sapiens
LGILAEIIILVVIIVVYEKRKRPDEVPDDDEPAGPMKTNSTNNHKDKNLRQRNTN

SEQ ID NO: 66036 - protein, 377 aa, Homo sapiens
LWLALVSCILTQASAVQRVPRDPSTVEDKCEKACRPEEECLALNSTWGCFCRQDLNSSDVHSLQPQLDCGPREIKVKVDKCLLGGLGLGEEVIAYLRDPNCSSILQTEERNWVSVTSPVQASACRNILERNQTHAIYKNTLSLVNDFIIRDTILNINFQCAYPLDMKVSLQAALQPIVSSLNVSVDGNGEFIVRMALFQDQNYTNPYEGDAVELSVESVLYVGAILEQGDTSRFNLVLRNCYATPTEDKADLVKYFIIRNSCSNQRDSTIHVEENGQSSESRFSVQMFMFAGHYDLVFLHCEIHLCDSLNEQCQPSCSRSQVRSEVPAIDLARVLDLGPITRRGAQSPGVMNGTPSTAGFLVAWPMVLLTVLLAWLF

SEQ ID NO: 66037 - protein, 37 aa, Homo sapiens
LALKFVFFPLAMAPFSTSAFHSNSHRLGINRIKAKLG

SEQ ID NO: 66038 - protein, 28 aa, Homo sapiens
IAAGLYLLLGGFSFCQVRLNKRKEYMVR

SEQ ID NO: 66039 - protein, 27 aa, Homo sapiens
LILLGLLALVLIAFCIIRRRPSAYQAL

SEQ ID NO: 66040 - protein, 1590 aa, Homo sapiens [sequence omitted]

SEQ ID NO: 66041 - protein, 197 aa, Homo sapiens
ILLLLWLIAPSRACTCVPPHPQTAFCNSDLVIRAKFVGTPEVNQTTLYQRYEIKMTKMYKGFQALGDAADIRFVYTPAMESVCGYFHRSHNRSEEFLIAGKLQDGLLHITTCSFVAPWNSLSLAQRRGFTKTYTVGCEECTVFPCLSIPCKLQSGTHCLWTDQLLQGSEKGFQSRHLACLPREPGLCTWQSLRSQIA

SEQ ID NO: 66042 - protein, 35 aa, Homo sapiens
MLFIFTYGLHMILSLKTMDRFDDHKGPTISLTQIV

SEQ ID NO: 66043 - protein, 27 aa, Homo sapiens
LGVLFMAVSLGFMFANWATGQSRMSGH

SEQ ID NO: 66044 - protein, 19 aa, Homo sapiens
LQSTASLFVVSLSLLHLYS

SEQ ID NO: 66045 - protein, 71 aa, Homo sapiens
MQEAAGIRKSSLLTFLAWWFEWTSQASAGPLIGEEAREVARRQEGAPPQQSARRDRMPCRNFFWKTFSSCK

SEQ ID NO: 66046 - protein, 240 aa, Homo sapiens [sequence omitted]

SEQ ID NO: 66047 - protein, 192 aa, Homo sapiens
MEFLWAPLLGLCCSLAAADRHTVFWNSSNPKFRNEDYTIHVQLNDYVDIICPHYEDHSVADAAMEQYILYLVEHEEYQLCQPQSKDQVRWQCNRPSAKHGPEKLSEKFQRFTPFTLGKEFKEGHSYYYISKPIHQHEDRCLRLKVTVSGKISECQSPVGLLPPSLCWVRSSDLGWYRSLAAQPTHTYSPLPL

SEQ ID NO: 66048 - protein, 25 aa, Homo sapiens
MAFGLLTWGGWVLHHPPTLLPPCGR

SEQ ID NO: 66049 - protein, 28 aa, Homo sapiens
MISFTWLGVLVRMAGQPVHRFASWTLSK

SEQ ID NO: 66050 - protein, 849 aa, Homo sapiens [sequence omitted]

SEQ ID NO: 66051 - protein, 1346 aa, Homo sapiens
MLIGINLILLGSMIKPSECQLEVTTERVQRQSVEEEGGIANYNTSSKEQPVVFNHVYNINVPLDNLCSSGLEASAEQEVSAEDETLAEYMGQTSDHESQVTFTHRINFPKKACPCASSAQVLQELLSRIEMLEREVSVLRDQCNANCCQESAATGQLDYIPHCSGHGNFSFESCGCICNEGWFGKNCSEPYCPLGCSSRGVCVDGQCICDSEYSGDDCSELRCPTDCSSRGLCVDGECVCEEPYTGEDCRELRCPGDCSGKGRCANGTCLCEEGYVGEDCGQRQCLNACSGRGQCEEGLCVCEEGYQGPDCSAVAPPEDLRVAGISDRSIELEWDGPMAVTEYVISYQPTALGGLQLQQRVPGDWSGVTITELEPGLTYNISVYAVISNILSLPITAKVATHLSTPQGLQFKTITETTVEVQWEPFSFSFDGWEISFIPKNNEGGVIAQVPSDVTSFNQTGLKPGEEYIVNVVALKEQARSPPTSASVSTVIDGPTQILVRDVSDTVAFVEWIPPRAKVDFILLKYGLVGGEGGRTTFRLQPPLSQYSVQALRPGSRYEVSVSAVRGTNESDSATTQFTTEIDAPKNLRVGSRTATSLDLEWDNSEAEVQEYKVVYSTLAGEQYHEVLVPRGIGPTTRATLTDLVPGTEYGVGISAVMNSQQSVPATMNARTELDSPRDLMVTASSETSISLIWTKASGPIDHYRITFTPSSGIASEVTVPKDRTSYTLTDLEPGAEYIISVTAERGRQQSLESTVDAFTGFRPISHLHFSHVTSSSVNITWSDPSPPADRLILNYSPRDEEEEMMEVSLDATKRHAVLMGLQPATEYIVNLVAVHGTVTSEPIVGSITTGIDPPKDITISNVTKDSVMVSWSPPVASFDYYRVSYRPTQVGRLDSSVVPNTVTEFTITRLNPATEYEISLNSVRGREESERICTLVHTAMDNPVDLIATNITPTEALLQWKAPVGEVENYVIVLTHFAVAGETILVDGVSEEFRLVDLLPSTHYTATMYATNGPLTSGTISTNFSTLLDPPANLTASEVTRQSALISWQPPRAEIENYVLTYKSTDGSRKELIVDAEDTWIRLEGLLENTDYTVLLQAAQDTTWSSITSTAFTTGGRVFPHPQDCAQHLMNGDTLSGVYPIFLNGELSQKLQVYCDMTTDGGGWIVFQRRQNGQTDFFRKWADYRVGFGNVEDEFWLGLDNIHRITSQGRYELRVDMRDGQEAAFASYDRFSVEDSRNLYKLRIGSYNGTAGDSLSYHQGRPFSTEDRDNDVAVTNCAMSYKGAWWYKNCHRTNLNGKYGESRHSQGINWYHWKGHEFSIPFVEMKMRPYNHRLMAGRKRQSLQF

SEQ ID NO: 66052 - protein, 1212 aa, Homo sapiens [sequence omitted]

SEQ ID NO: 66053 - protein, 283 aa, Homo sapiens
MGNACIPLKRIAYFLCLLSALLLTEGKKPAKPKCPAVCTCTKDNALCENARSIPRTVPPDVISLSFVRSGFTEISEGSFLFTPSLQLLLFTSNSFDVISDDAFIGLPHLEYLFIENNNIKSISRHTFRGLKSLIHLSLANNNLQTLPKDIFKGLDSLTNVDLRGNSFNCDCKLKWLVEWLGHTNATVEDIYCEGPPEYKKRKINSLSSKDFDCIITEFAKSQDLPYQSLSIDTFSYLNDEYVVIAQPFTGKCIFLEWDHVEKTFRNYDNITVLREIHRFTNMS

SEQ ID NO: 66054 - protein, 549 aa, Homo sapiens [sequence omitted]

SEQ ID NO: 66055 - protein, 524 aa, Homo sapiens
MPSSNSRPPACLAPGALYLALLLHLSLSSQAGDRRPLPVDRAAGLKEKTLILLDVSTKNPVRTVNENFLSLQLDPSIIHDGWLDFLSSKRLVTLARGLSPAFLRFGGKRTDFLQFQNLRNPAKSRGGPGPDYYLKNYEDDIVRSDVALDKQKGCKIAQHPDVMLELQREKAAQMHLVLLKEQFSNTYSNLILTEPNNYRTMHGRAVNGSQLGKDYIQLKSLLQPIRIYSRASLYGPNIGRPRKNVIALLDGFMKVAGSTVDAVTWQHCYIDGRVVKVMDFLKTRLLDTLSDQIRKIQKVVNTYTPGKKIWLEGVVTTSAGGTNNLSDSYAAGFLWLNTLGMLANQGIDVVIRHSFFDHGYNHLVDQNFNPLPDYWLSLLYKRLIGPKVLAVHVAGLQRKPRPGRVIRDKLRIYAHCTNHHNHNYVRGSITLFIINLHRSRKKIKLAGTLRDKLVHQYLLQPYGQEGLKSKSVQLNGQPLVMVDDGTLPELKPRPLRAGRTLVIPPVTMGFYVVKNVNALACRYR

SEQ ID NO: 66056 - protein, 176 aa, Homo sapiens [sequence omitted]

SEQ ID NO: 66057 - protein, 320 aa, Homo sapiens
MVLSRHWLAWEQGLLLGYQYVLLQAFAQNVLSKADVIQATGDAICIFRELQCLTPRGRYDIRIYPTFLHLHGKTFDYKIPYTTVLRLFLLPHKDQRQMFFVISLDPPIKQGQTRYHFLILLFSKDEDISLTLNMNEEEVEKRFEGRLTKNMSGSLYEMVSRVMKALVNRKITVPGNFQGHSGAQCITCSYKASSGLLYPLERGFIYVHKPPVHIRFDEISFVNFARGTTTTRSFDFEIETKQGTQYTFSSIEREEYGKLFDFVNAKKLNIKNRGLKEVLLCGEDETLSWSFYRGERGGDFFRLLFHSFFSSYPYRKKRCV

SEQ ID NO: 66058 - protein, 250 aa, Homo sapiens [sequence omitted]

SEQ ID NO: 66059 - protein, 625 aa, Homo sapiens
MWLLVSHLVIISITTCLAEFTWYRRYGHGVSEEDKGFGPIFEEQPINTIYPEESLEGKVSLNCRARASPFPVYKWRMNNGDVDLTSDRYSMVGGNLVINNPDKQKDAGIYYCLASNNYGMVRSTEATLSFGYLDPFPPEERPEVRVKEGKGMVLLCDPPYHFPDDLSYRWLLNEFPVFITMDKRRFVSQTNGNLYIANVEASDKGNYSCFVSSPSITKSVFSKFIPLIPIPERTTKPYPADIVVQFKDVYALMGQNVTLECFALGNPVPDIRWRKVLEPMPSTAEISTSGAVLKIFNIQLEDEGIYECEAENIRGKDKHQARIYVQAFPEWVEHINDTEVDIGSDLYWPCVATGKPIPTIRWLKNGYAYHKGELRLYDVTFENAGMYQCIAENTYGAIYANAELKILALAPTFEMNPMKKKILAAKGGRVIIECKPKAAPKPKFSWSKGTEWLVNSSRILIWEDGSLEINNITRNDGGIYTCFAENNRGKANSTGTLVITDPTRIILAPINADITVGENATMQCAASFDPALDLTFVWSFNGYVIDFNKENIHYQRNFMLDSNGELLIRNAQLKHAGRYTCTAQTIVDNSSASADLVVRGKNRKGGEKNMVDSFLPVCASLPPTW

SEQ ID NO: 66060 - protein, 166 aa, Homo sapiens
MKIQLVCMLLLAFSSWSLCSDSEEEMKALEADFLTNMHTSKISKAHVPSWKMTLLNVCSLVNNLNSPAEETGEVHEEELVARRKLPTALDGFSLEAMLTIYQLHKICHSRAFQHWELIQEDILDTGNDKNGKEEVIKRKIPYILKRQLYENKPRRPYILKRDSYYY

SEQ ID NO: 66061 - protein, 301 aa, Homo sapiens
MFPLLLLLLPFLLYMAAPQIRKMLSSGVCTSTVQLPGKVVVVTGANTGARVYLACRDVEKGELVAKEIQTTTGNQQVLVRKLDLSDTKSIRAFAKGFLAEEKHLHVLINNAGVMMCPYSKTADGFEMHIGVNHLGHFLLTHLLLEKLKESAPSRIVNVSSLAHHLGRIHFHNLQGEKFYNAGLAYCHSKLANILFTQELARRLKGSGVTTYSVHPGTVQSELVRHSSFMRWMWWLFSFFIKTPQQGAQTSLHCALTEGLEILSGNHFSDCHVAWVSAQARNETIARRLWDVSCDLLGLPID

SEQ ID NO: 66062 - protein, 31 aa, Homo sapiens
MKPESACALPRALLCLSIGLLAAPLPTACRC

SEQ ID NO: 66063 - protein, 606 aa, Homo sapiens
MPSPLLACWQPILLLVLGSVLSGSATGCPPRCECSAQDRAVLCHRKRFVAVPEGIPTETRLLDLGKNRIKTLNQDEFASFPHLEELELNENIVSAVEPGAFNNLFNLRTLGLRSNRLKLIPLGVFTGLSNLTKLDISENKIVILLDYMFQDLYNLKSLEVGDNDLVYISHRAFSGLNSLEQLTLEKCNLTSIPTEALSHLHGLIVLRLRHLNINAIRDYSFKRLYRLKVLEISHWPYLDTMTPNCLYGLNLTSLSITHCNLTAVPYLAVRHLVYLRFLNLSYNPISTIEGSMLHELLRLQEIQLVGGQLAVVEPYAFRGLNYLRVLNVSGNQLTTLEESVFHSVGNLETLILDSNPLACDCRLLWVFRRRWRLNFNRQQPTCATPEFVQGKEFKDFPDVLLPNYFTCRRARIRDRKAQQVFVDEGHTVQFVCRADGDPPPAILWLSPRKHLVSAKSNGRLTVFPDGTLEVRYAQVQDNGTYLCIAANAGGNDSMPAHLHVRSYSPDWPHQPNKTFAFISNQPGEGEANSTRATVPFPFDIKTLIIATTMGFISFLGVVLFCLVLLFLWSRGKGNTKHNIEIEYVPRKSDAGISSADAPRKFNMKMI

SEQ ID NO: 66064 - protein, 433 aa, Homo sapiens [sequence omitted]

SEQ ID NO: 66065 - protein, 2356 aa, Homo sapiens
MWGLLGCCFVCAWALGGPRPIRSLPPLSSQVKPGSVPMQVPLEGAEAALAYLYSGDAQQLSQVNCSERYEARGAGAMPGLPPSLQGAAGTLAQAANFLNMLLQANDIRESSVEEDVEWYQALVRSVAEGDPRVYRALLTFNPPPGASHLQLALQATRTGEETILQDLSGNWVQEENPPGDLDTPALKKRVLTNDLGSLGSPKWPQADGYVGDTQQVRLSPPFLECQEGRLRPGWLITLSATFYGLKPDLSPEVRGQVQMDVDLQSVDINQCASGPGWYSNTHLCDLNSTQCVPLESQGFVLGRYLCRCRPGFYGASPSGGLEESDFQTTGQFGFPEGRSGRLLQCLPCPEGCTSCMDATPCLVEEAAVLRAAVLACQACCMLAIFLSMLVSYRCRRNKRIWASGVVLLETVLFGFLLLYFPVFILYFKPSVFRCIALRWVRLLGFAIVYGTIILKLYRVLQLFLSRTAQRSALLSSGRLLRHLGLLLLPVLGFLAVWTVGALERGIQHAPLVIRGHTPSGRHFYLCHHDRWDYIMVVAELLLLCWGSFLCYATRAVLSAFHEPRYMGIALHNELLLSAAFHTARFVLVPSLHPDWTLLLFFFHTHSTVTTTLALIFIPKFWKLGAPPREEMVDEVCEDELDLQHSGSYLGSSIASAWSEHSLDPGDIRDELKKLYAQLEVHKTKEMAANNPHLPKKRGSSCQGLGRSFMRYLAEFPEALARQHSRDSGSPGHGSLPGSSRRRLLSSSLQEPEGTPALHKSRSTYDQRREQDPPLLDSLLRRKLAKKASRTESRESVEGPPALGFRSASAHNLTVGERLPRARPASLQKSLSVASSREKALLMASQAYLEETYRQAKEREERKKAKAAMASLVRRPSARRLERPRGAPLSAPPSPAKSSSVDSSHTSGRLHEEARRRLPHPPIRHQVSTPILALSGGLGEPRMLSPTSTLAPALLPALAPTPAPALAPVPVSPQSPNLLTYICPWENAELPAKQENVPQEGPSGPERGHHSPAPARARLWRALSVAVEKSRAGENEMDAEDAHHQREANDVDEDRPKIFPKSHSLKAPVQQGSMRSLGLAIKALTRSRSTYREKESVEESPEGQNSGTAGESMGAPSRSPRLGRPKAVSKQAALIPSDDKESLQNQQNAHTSRMLQVCQREGSREQEDRGRRMTQGLGERKAERAGKTGLAMLRQVSRDKNIKQSKETPVGWQELPKAGLQSLGSADHRVAEVCPWEVTESETRQPDSGNKAEICPWETSEGAPESRALRQDPGDSQKKRGEARGKSEPIDVVPMMRKKPERLVREQEAVCPWESADRGGLSPGSAPQDPGRIRDKSEAGDSVEARKVEKPGWEAAGPEAHTPDITKAEPCPWEASEGGEDGKPAQEAVKDLPQEKQKTRKATFWKEQKPGGDLESLCPWESTDFRGPSAVSIQAPGSSECSGSLGSGIAEVCLWEAGDAPAIQKAEICPWELDDNVMGQEMLSLGTGRESLQEKEKASRKGSFGEMGEQTVKAVQKLSQQQESVCPRESTVPGHSSPCLDNSSSKAGSQFLCNGGSRATQVCPQEDLRPEAQEATPAKTEICPWEVNERTREEWTSAQVPRGGESQKDKEKMPGKSEIEDVTAWEKPEGQIQKQEAVGPWESVDPGSFSPQPRPQDTERPQTLLQMSGSVGSKAADICPLDVEENLTAGKAEICPWEVGAGAGEERALGAEAIRKSPNDTGKVSADLGPRERAVTAPEKPQKPTPEWEVACPWGSVGPGACSQHPGTLDADGPKAGFQELDHMGCRPGEVCPWEAQEAATSEKAKICPWEVSEGTTGKGLDQKAGSESAEQREKALEKGRLTSLGEDVSKGMAKLCQQQETICIWENKDLRESPAQAPKISDLPSSMSSEVAEGHSLEATEKGDLRQDPKTGSFPEHITQEKAPAADTEEFTTEDGEKTSHELQSVCPWETTAPADSVSHLDRQRPDQPKASSQRLVSTGGRAADVCPWDVPDAGVYKSDSSAKAETCPWEVTERIPVKGVSRQDGKGDSQEEKGRAPEKSEPKGVPVQKKPEMADFRQQEAVCPWESQDGKGLSPQPAPDASDRSRGSSEAAGSVETRVAEVCLWEVVEAPSAKKAEICPWEAGGGAAEEGEQERESQGQGEMFLQKAGPGGTEEHFSKAAAKPREQEAVCPGEGTGSGGLLPQSGALDPELKVSPKEAGSMGSRMAELCQWEITDPEGNKIKGTMADICPGEETGVPSEESGLLALTATRREFFPTAPEKPLCLLVHGPLDHFFPESKIPCPKVSRPASTFTLEGVRELQGPSGLEPRTSLAPEPSLQEAESQSSSLTEDSGQVAFEAQYEEFTPPTVYPWDWE

SEQ ID NO: 66066 - protein, 739 aa, Homo sapiens
MHLRLFCILLAAVSGAEGWGYYGCDEELVGPLYARSLGASSYYSLLTAPRFARLHGISGWSPRIGDPNPWLQIDLMKKHRIRAVATQGSFNSWDWVTRYMLLYGDRVDSWTPFYQRGHNSTFFGNVNESAVVRHDLHFHFTARYIRIVPLAWNPRGKIGLRLGLYGCPYKADILYFDGDDAISYRFPRGVSRSLWDVFAFSFKTEEKDGLLLHAEGAQGDYVTLELEGAHLLLHMSLGSSPIQPRPGHTTVSAGGVLNDQHWHYVRVDRFGRDVNFTLDGYVQRFILNGDFERLNLDTEMFIGGLVGAARKNLAYRHNFRGCIENVIFNRVNIADLAVRRHSRITFEGKVAFRCLDPVPHPINFGGPHNFVQVPGFPRRGRLAVSFRFRTWDLTGLLLFSRLGDGLGHVELTLSEGQVNVSIAQSGRKKLQFAAGYRLNDGFWHEVNFVAQENHAVISIDDVEGAEVRVSYPLLIRTGTSYFFGGCPKPASRWDCHSNQTAFHGCMELLKVDGQLVNLTLVEGRRLGFYAEVLFDTCGITDRCSPNMCEHDGRCYQSWDDFICYCELTGYKGETCHTPLYKESCEAYRLSGKTSGNFTIDPDGSGPLKPFVVYCDIRENRAWTVVRHDRLWTTRVTGSSMERPFLGAIQYWNASWEEVSALANASQHCEQWIEFSCYNSRLLNTAAFGLAEMRSSTSTGEAPSLGSSAVPVVWTGAVWTLPCTATVTLTSPSGELTRDC

SEQ ID NO: 66067 - protein, 1585 aa, Homo sapiens
MEWLNSLLLLLCLYIYPHSHQVNDFSSLLTMDLGRVDTFNESRFSVVYTPVTNTTQQIMNKVASTPFLAGKEVLGLPDEESIKEFTANYPEEIVRVTFTNTYSYHLKFLLGHGMPAKKEHKDHTAHCYETNEDVYCEVSVFWKEGFVALQAAINAAIIEITTNHSVMEELMSVTGKNMKMHSFIGQSGVITDLYLFSCIISFSSFIYYASVNVTRERKRMKALMTMMGLRDSAFWLSWGLLYAGFIFIMALFLALVIRSTQFIILSGFMVVFSLFLLYGLSLVALAFLMSILVKKSFLTGLVVFLLTVFWGCLGFTSLYRHLPASLEWILSLLSPFAFMLGMAQLLHLDYDLNSNAFPHPSDGSNLIVATNFMLAFDTCLYLALAIYFEKILPNEYGHRRPPLFFLKSSFWSQTQKTDHVALEDEMDADPSFHDSFEQAPPEFQGKEAIRIRNVTKEYKGKPDKIEALKDLVFDIYEGQITAILGHSGAGKSTLLNILSGLSVPTKGSVTIYNNKLSEMADLENLSKLTGVCPQSNVQFDFLTVRENLRLFAKIKGILPQEVDKEIQRVLLELEMKNIQDVLAQNLSGGQKRKLTFGIAILGDPQIFLLDEPTAGLDPFSRHQVWNLLKERKTDRVILFSTQFMDEADILADRKVFLSQGKLKCAGSSLFLKKKWGIGYHLSLQLNEICVEENITSLVKQHIPDAKLSAKSEGKLIYTLPLERTNKFPELYKDLDSYPDLGIENYGVSMTTLNEVFLKLEGKSTINESDIAILGEVQAEKADDTERLVEMEQVLSSLNKMRKTIGGVALWRQQICAIARVRLLKLKHERKALLALLLILMAGFCPLLVEYTMVKIYQNSYTWELSPHLYFLAPGQQPHDPLTQLLIINKTGASIDDFIQSVEHQNIALEVDAFGTRNGTDDPSYNGAITVCCNEKNYSFSLACNAKRLNCFPVLMDIVSNGLLGMVKPSVHIRTERSTFLENGQDNPIGFLAYIMFWLVLTSSCPPYIAMSSIDDYKNRARSQLRISGLSPSAYWFGQALVDVSLYFLVFVFIYLMSYISNFEDMLLTIIHIIQIPCAVGYSFSLIFMTYVISFIFRKGRKNSGIWSFCFYVVTVFSVAGFAFSIFESDIPFIFTFLIPPATMIGCLFLSSHLLFSSLFSEERMDVQPFLVFLIPFLHFIIFLFTLRCLEWKFGKKSMRKDPFFSSDVCQNPEEPEGEDEDVQMERVRTANALNSTNFDEKPVIIASCLRKEYAGKRKGCFSKRKNKIATRNVSFCVRKGEVLGLLGHNGAGKSTSIKVITGDTKPTAGQVLLKGSGGGDALEFLGYCPQENALWPNLTVRQHLEVYAAVKGLRKGDAEVAITRLVDALKLQDQLKSPVKTLSEGIKRKLCFVLSILGNPSVVLLDEPSTGMDPEGQQQMWQAIRATFRNTERGALLTTHYMAEAEAVCDRVAIMVSGRLRCIGSIQHLKSKFGKDYLLEMKVKNLAQVEPLHAEILRLFPQAARQERYSSLMVYKLPVEDVQPLAQAFFKLEKVKQSFDLEEYSLSQSTLEQVFLELSKEQELGDFEEDFDPSVKWKLLPQEEP

SEQ ID NO: 66068 - protein, 364 aa, Homo sapiens
MLSVALLILSLISYVSLKKENIFTTPKYASPGAPRMYMFHAGFRSQFALKFLDPSFVPITNSLTQELQEKPSKWKFNRTAFLHQRQEILQHVDVIKNFSLTKNSVRIGQLMHYDYSSHKYVFSISNNFRSLLPDVSPIMNKHYNICAVVGNSGILTGSQCGQEIDKSDFVFRCNFAPTEAFQRDVGRKTNLTTFNPSILEKYYNNLLTIQDRNNFFLSLKKLDGAILWIPAFFFHTSATVTRTLVDFFVEHRGQLKVQLAWPGNIMQHVNRYWKNKHLSPKRLSTGILMYTLASAICEEIHLYGFWPFGFDPNTREDLPYHYYDKKGTKFTTKWQESHQLPAEFQLLYRMHGEGLTKLTLSHCA

SEQ ID NO: 66069 - protein, 784 aa, Homo sapiens
MSLYFWGLMDLTTTVLSDTPTPQGELEALLSDKPQSHQRTKRSWVWNQFFVLEEYTGTDPLYVGKLHSDMDRGDGSIKYILSGEGAGIVFTIDDTTGDIHAIQRLDREERAQYTLRAQALDRRTGRPMEPESEFIIKIQDINDNEPKFLDGPYVATVPEMSPVGTSVIQVTATDADDPTYGNSARVVYSILQGQPYFSVDSKTGVIRTALMNMDREAKEYYEVIIQAKDMGGQLGGLAGTTTVNITLSDVNDNPPRFPQKHYQMSVLESAPISSTVGRVFAKDLDEGINAEMKYTIVDGDGADAFDISTDPNFQVGIITVKKPLSFESKKSYTLKVEGANPHLEMRFLNLGPFQDTTTVHISVEDVDEPPVFEPGFYFVEVPEDVAIGTTIQIISAKDPDVTNNSIRYSIDRSSDPGRFFYVDITTGALMTARPLDREEFSWHNITVLAMEMNNPSQVGSVPVTIKVLDVNDNAPEFPRFYEAFVCENAKAGQLIQTVSAVDQDDPRNGQHFYYSLAPEAANNPNFTIRDNQDNTARILTRRSGFRQQEQSVFHLPILIADSGQPVLSSTGTLTIQVCSCDDDGHVMSCSPEAYMLPVSLSRGALIAILACIFVLLVLVLLILSMRRHRKQPYIIDDEENIHENIVRYDDEGGGEEDTEAFDIAAMWNPREAQAGAAPKTRQDMLPEIESLSRYVPQTCAVNSTVHSYVLAKLYEADMDLWAPPFDSLQTYMFEGDGSVAGSLSSLQSATSDSEQSFDFLTDWGPRFRKLAELYGASEGPAPLW

SEQ ID NO: 66070 - protein, 210 aa, Homo sapiens
MPGRRGALREPGGCGSCLGVALALLLLLLPACCPVRAQNDTEPIVLEGKCLVVCDSSPSADGAVTSSLGISVRSGSAKVAFSATRSTNHEPSEMSNRTMTIYFDQVLVNIGNHFDLASSIFVAPRKGIYSFSFHVVKVYNRQTIQVSLMQNGYPVISAFAGDQDVTREAASNGVLLLMEREDKVHLKLERGNLMGGWKYSTFSGFLVFPL

SEQ ID NO: 66071 - protein, 402 aa, Homo sapiens
MSLFVGGTLVVLSGVLLLCKRCWDVHQRLNRAMEEAEKTTTTYLDNGTHPAQDPDFRGEDPECQDAETERFLSTSSTGRRVSFNEAALFEQSRKTQDKGRRYTLTEGDFHHLKNARLTHLHLPPLKIVTIHECDSGEASSATTPHPATSPKATLAIFQPPGKALTGRSVGPSSALPGDPYNSAAGATDFAEISPSASSDSGEGTSLDAGTRSTKAGGPGAAAGPGEAGPGSGAGTVLQFLTRLRRHASLDGASPYFKVKKWKLEPSQRAASLDTRGSPKRHHFQRQRAASESTEQEEGDAPQEDFIQYIARAGDAVAFPHPRPFLASPPPALGRYFSVDGGARGGPVGPCPPSPPPRRPRERSPGPVDTRSPASSGKAPPRGGLTGATSPAWTRGGKQGETG

SEQ ID NO: 66072 - protein, 552 aa, Homo sapiens [sequence omitted]

SEQ ID NO: 66073 - protein, 48 aa, Homo sapiens
MCVLSLTVVFGIFFLGCNLLIKSEGMINFLVKDRRPSKEVEAVVVGPY

SEQ ID NO: 66074 - protein, 541 aa, Homo sapiens
MWVLVDVFLLLYFSECNKCDDKKERSLLPALRAVISRNQEGPGEMGKAVLIPKDDQEKMKELFKINQFNLMASDLIALNRSLPDVRLEGCKTKVYPDELPNTSVVIVFHNEAWSTLLRTVYSVINRSPHYLLSEVILVDDASERDFLKLTLENYVKNLEVPVKIIRMEERSGLIRARLRGAAASKGQVITFLDAHCECTLGWLEPLLARIKEDRKTVVCPIIDVISDDTFEYMAGSDMTYGGFNWKLNFRWYPVPQREMDRRKGDRTLPVRTPTMAGGLFSIDRNYFEEIGTYDAGMDIWGGENLEMSFRIWQCGGSLEIVTCSHVGHVFRKATPYTFPGGTGHVINKNNRRLAEVWMDEFKDFFYIISPGVVKVDYGDVSVRKTLRENLKCKPFSWYLENIYPDSQIPRRYYSLGEIRNVETNQCLDNMGRKENEKVGIFNCHGMGGNQVFSYTADKEIRTDDLCLDVSRLNGPVIMLKCHHMRGNQLWEYDAERLTLRHVNSNQCLDEPSEEDKMVPTMQDCSGSRSQQWLLRNMTLGT

SEQ ID NO: 66075 - protein, 546 aa, Homo sapiens
MWVLVDVFLLLYFSECNKCDDKKERSLLPALRAVISRNQEGPGEMGKAVLIPKDDQEKMKELFKINQFNLMASDLIALNRSLPDVRLEGCKTKVYPDELPNTSVVIVFHNEAWSTLLRTVYSVINRSPHYLLSEVILVDDASERDFLKLTLENYVKNLEVPVKIIRMEERSGLIRARLRGAAASKGQVITFLDAHCECTLGWLEPLLARIKEDRKTVVCPIIDVISDDTFEYMAGSDMTYGGFNWKLNFRWYPVPQREMDRRKGDRTLPVRTPTMAGGLFSIDRNYFEEIGTYDAGMDIWGGENLEMSFRIWQCGGSLEIVTCSHVGHVFRKATPYTFPGGTGHVINKNNRRLAEVWMDEFKDFFYIISPGVVKVDYGDVSVRKTLRENLKCKPFSWYLENIYPDSQIPRRYYSLGEIRNVETNQCLDNMGRKENEKVGIFNCHGMGGNQVFSYTADKEIRTDDLCLDVSRLNGPVIMLKCHHMRGNQLWEYDAESCLSVNKVADGSQHPTVETCNDSTLQKWLLRNYTRMEIFRNIFGNSTDYIL

SEQ ID NO: 66076 - protein, 128 aa, Homo sapiens
MACLVILLLFALIQWLAVPDEEEDKTMLAERIPVPSSPVPIATIDLVQQQTEDVMPRIEPRLPPKKTKHQEEQEDVNKPAWGVSSSPWVTFVYALYQIKEMMQLTRDNRASEIQPLQLHIGKEMKGDQ

SEQ ID NO: 66077 - protein, 467 aa, Homo sapiens
MRLGLLLLARHWCIAGVFPQKFDGDSAYVGMSDGNPELLSTSQTYNGQSENNEDYEIPPITPPNLPEPSLLHLGDHEASYHSLCHGLTPNGLLPAYSYQAMDLPAIMVSNMLAQDSHLLSGQLPTIQEMVHSEVAAYDSGRPGPLLGRPAMLASHMSALSQSQLISQMGIRSSIAHSSPSPPGSKSATPSPSSSTQEEESEVHFKISGEKRPSADPGKKAKNPKKKKKKDPNEPQKPVSAYALFFRDTQAAIKGQNPSATFGDVSKIVASMWDSLGEEQKQSSPDQGETKSTQANPPAKMLPPKQPMYAMPGLASFLTPSDLQAFRSGASPASLARTLGSKSLLPGLSASPPPPPSFPLSPTLHQQLSLPPHAQGALLSPPVSMSPAPQPPVLPTPMALQVQLAMSPSPPGPQDFPHISEFPSSSGSCSPGPSNPTSSGDWDSSYPSGECGISTCSLLPRDKSLYLT

SEQ ID NO: 66078 - protein, 507 aa, Homo sapiens
MPLALLVLLLLGPGGWCLAEPPRDSLREELVITPLPSGDVAATFQFRTRWDSELQREGVSHYRLFPKALGQLISKYSLRELHLSFTQGFWRTRYWGPPFLQAPSGAELWVWFQDTVTDVDKSWKELSNVLSGIFCASLNFIDSTNTVTPTASFKPLGLANDTDHYFLRYAVLPREVVCTENLTPWKKLLPCSSKAGLSVLLKADRLFHTSYHSQAVHIRPVCRNARCTSISWELRQTLSVVFDAFITGQGKKDWSLFRMFSRTLTEPCPLASESRVYVDITTYNQDNETLEVHPPPTTTYQDVILGTRKTYAIYDLLDTAMINNSRNLNIQLKWKRPPENGYIHYQPAQDRLQPHLLEMLIQLPANSVTKVSIQFERALLKWTEYTPDPNHGFYVSPSVLSALVPSMVAAKPVDWEESPLFNSLFPVSDGSNYFVRLYTEPLLVNLPTPDFSMPYNVICLTCTVVAVCYGSFYNLLTRTFHIEEPRTGGLAKRLANLIRRARGVPPL

SEQ ID NO: 66079 - protein, 106 aa, Homo sapiens
MILASLLIAYCSQLAAGTCEIVTLDRDSSQPRRTIARQTARCACRKGQIAGTTRARPACVDARIIKTKQWCDMLPCLEGEGCDLLINRSGWTCTQPGGRIKTTTVS

SEQ ID NO: 66080 - protein, 135 aa, Homo sapiens [sequence omitted]

SEQ ID NO: 66081 - protein, 1383 aa, Homo sapiens
MWTWAPGLLMMTVVFWGHQGNGQGQGSRLRQEDFPPRIVEHPSDVIVSKGEPTTLNCKAEGRPTPTIEWYKDGERVETDKDDPRSHRMLLPSGSLFFLRIVHGRRSKPDEGSYVCVARNYLGEAVSRNASLEVALLRDDFRQNPTDVVVAAGEPAILECQPPRGHPEPTIYWKKDKVRIDDKEERISIRGGKLMISNTRKSDAGMYTCVGTNMVGERDSDPAELTVFERPTFLRRPINQVVLEEEAVEFRCQVQGDPQPTVRWKKDDADLPRGRYDIKDDYTLRIKKTMSTDEGTYMCIAENRVGKMEASATLTVRAPPQFVVRPRDQIVAQGRTVTFPCETKGNPQPAVFWQKEGSQNLLFPNQPQQPNSRCSVSPTGDLTITNIQRSDAGYYICQALTVAGSILAKAQLEVTDVLTDRPPPIILQGPANQTLAVDGTALLKCKATGDPLPVISWLKEGFTFPGRDPRATIQEQGTLQIKNLRISDTGTYTCVATSSSGETSWSAVLDVTESGATISKNYDLSDLPGPPSKPQVTDVTKNSVTLSWQPGTPGTLPASAYIIEAFSQSVSNSWQTVANHVKTTLYTVRGLRPNTIYLFMVRAINPQGLSDPSPMSDPVRTQDISPPAQGVDHRQVQKELGDVLVRLHNPVVLTPTTVQVTWTVDRQPQFIQGYRVMYRQTSGLQATSSWQNLDAKVPTERSAVLVNLKKGVTYEIKVRPYFNEFQGMDSESKTVRTTEEAPSAPPQSVTVLTVGSYNSTSISVSWDPPPPDHQNGIIQEYKIWCLGNETRFHINKTVDAAIRSVIIGGLFPGIQYRVEVAASTSAGVGVKSEPQPIIIGRRNEVVITENNNSITEQITDVVKQPAFIAGIGGACWVILMGFSIWLYWRRKKRKGLSNYAVTFQRGDGGLMSNGSRPGLLNAGDPSYPWLADSWPATSLPVNNSNSGPNEIGNFGRGDVLPPVPGQGDKTATMLSDGAIYSSIDFTTKTSYNSSSQITQATPYATTQILHSNSIHELAVDLPDPQWKSSIQQKTDLMGFGYSLPDQNKGNNGGKGGKKKKNKNSSKPQKNNGSTWANVPLPPPPVQPLPGTELEHYAVEQQENGYDSDSWCPPLPVQTYLHQGLEDELEEDDDRVPTPPVRGVASSPAISFGQQSTATLTPSPREEMQPMLQAHLDELTRAYQFDIAKQTWHIQSNNQPPQPPVPPLGYVSGALISDLETDVADDDADDEEEALEIPRPLRALDQTPGSSMDNLDSSVTGKAFTSSQRPRPTSPFSTDSNTSAALSQSQRPRPTKKHKGGRMDQQPALPHRREGMTDEEALVPYSKPSFPSPGGHSSSGTASSKGSTGPRKTEVLRAGHQRNASDLLDIGYMGSNSQGQFTGEL

SEQ ID NO: 66082 - protein, 373 aa, Homo sapiens [sequence omitted]

SEQ ID NO: 66083 - protein, 964 aa, Homo sapiens [sequence omitted]

SEQ ID NO: 66084 - protein, 207 aa, Homo sapiens
MLEIFYFAFPFPLLSAAFALPSGGSESGRSTPSLSVLSDSKPPPSTYQQAPRHFHVPDTGVKDNIYRKPPIYRQHAARRSDGEDGSLDQDNRKQKSSWLMLKGDADTRTNSPDLDTQSLSHSSGTDRDPLQRMAGDSFHSQYKIYPYDSLIVTNRIRVKLPKDVDRTRLERHLSPEEFQEVFGMSIEEFDRLALWKRNDLKKKALLF

SEQ ID NO: 66085 - protein, 879 aa, Homo sapiens
MHISVLLSPVLWGLIFGVSSNSIQIGGLFPRGADQEYSAFRVGMVQFSTSEFRLTPHIDNLEVANSFAVTNAFCSQFSRGVYAIFGFYDKKSVNTITSFCGTLHVSFITPSFPTDGTHPFVIQMRPDLKGALLSLIEYYQWDKFAYLYDSDRGLSTLQAVLDSAAEKKWQVTAINVGNINNDKKDEMYRSLFQDLELKKERRVILDCERDKVNDIVDQVITIGKHVKGYHYIIANLGFTDGDLLKIQFGGANVSGFQIVDYDDSLVSKFIERWSTLEEKEYPGAHTTTIKYTSALTYDAVQVMTEAFRNLRKQRIEISRRGNAGDCLANPAVPWGQGVEIERALKQVQVEGLSGNIKFDQNGKRINYTINIMELKTNGPRKIGYWSEVDKMVVTLTELPSGNDTSGLENKTVVVTTILESPYVMMKKNHEMLEGNERYEGYCVDLAAEIAKHCGFKYKLTIVGDGKYGARDADTKIWNGMVGELVYGKADIAIAPLTITLVREEVIDFSKPFMSLGISIMIKKPQKSKPGVFSFLDPLAYEIWMCIVFAYIGVSVVLFLVSRFSPYEWHTEEFEDGRETQSSESTNEFGIFNSLWFSLGAFMQQGCDISPRSLSGRIVGGVWWFFTLIIISSYTANLAAFLTVERMVSPIESAEDLSKQTEIAYGTLDSGSTKEFFRRSKIAVFDKMWTYMRSAEPSVFVRTTAEGVARVRKSKGKYAYLLESTMNEYIEQRKPCDTMKVGGNLDSKGYGIATPKGSSLRTPVNLAVLKLSEQGVLDKLKNKWWYDKGECGAKDSGSKEKTSALSLSNVAGVFYILVGGLGLAMLVALIEFCYKSRAEAKRMKVAKNAQNINPSSSQNSQNFATYKEGYNVYGIESVKI

SEQ ID NO: 66086 - protein, 30 aa, Homo sapiens
MGGKSWLFFYSLVFCALLPLPRREDPFKLF

SEQ ID NO: 66087 - protein, 1215 aa, Homo sapiens
MEHLRHSPGPGGQRLLLPSMLLALLLLLAPSPGHATRVVYKVPEEQPPNTLIGSLAADYGFPDVGHLYKLEVGAPYLRVDGKTGDIFTTETSIDREGLRECQNQLPGDPCILEFEVSITDLVQNGSPRLLEGQIEVQDINDNTPNFASPVITLAIPENTNIGSLFPIPLASDRDAGPNGVASYELQAGPEAQELFGLQVAEDQEEKQPQLIVMGNLDRERWDSYDLTIKVQDGGSPPRASSALLRVTVLDTNDNAPKFERPSYEAELSENSPIGHSVIQVKANDSDQGANAEIEYTFHQAPEVVRRLLRLDRNTGLITVQGPVDREDLSTLRFSVLAKDRGTNPKSARAQVVVTVKDMNDNAPTIEIRGIGLVTHQDGMANISEDVAEETAVALVQVSDRDEGENAAVTCVVAGDVPFQLRQASETGSDSKKKYFLQTTTPLDYEKVKDYTIEIVAVDSGNPPLSSTNSLKVQVVDVNDNAPVFTQSVTEVAFPENNKPGEVIAEITASDADSGSNAELVYSLEPEPAAKGLFTISPETGEIQVKTSLDREQRESYELKVVAADRGSPSLQGTATVLVNVLDCNDNDPKFMLSGYNFSVMENMPALSPVGMVTVIDGDKGENAQVQLSVEQDNGDFVIQNGTGTILSSLSFDREQQSTYTFQLKAVDGGVPPRSAYVGVTINVLDENDNAPYITAPSNTSHKLLTPQTRLGETVSQVAAEDFDSGVNAELIYSIAGGNPYGLFQIGSHSGAITLEKEIERRHHGLHRLVVKVSDRGKPPRYGTALVHLYVNETLANRTLLETLLGHSLDTPLDIDIAGDPEYERSKQRGNILFGVVAGVVAVALLIALAVLVRYCRQREAKSGYQAGKKETKDLYAPKPSGKASKGNKSKGKKSKSPKPVKPVEDEDEAGLQKSLKFNLMSDAPGDSPRIHLPLNYPPGSPDLGRHYRSNSPLPSIQLQPQSPSASKKHQVVQDLPPANTFVGTGDTTSTGSEQYSDYSYRTNPPKYPSKQLPHRRVTFSATSQAQELQDPSQHSYYDSGLEESETPSSKSSSGPRLGPLALPEDHYERTTPDGSIGEMEHPENDLRPLPDVAMTGTCTRECSEFGHSDTCWMPGQSSPSRRTKSSALKLSTFVPYQDRGGQEPAGAGSPSPPEDRNTKTAPVRLLPSYSAFSHSSHDSCKDSATLEEIPLTQTSDFPPAATPASAQTAKREIYL

SEQ ID NO: 66088 - protein, 360 aa, Homo sapiens
MEHLRHSPGPGGQRLLLPSMLLALLLLLAPSPGHATRVVYKVPEEQPPNTLIGSLAADYGFPDVGHLYKLEVGAPYLRVDGKTGDIFTTETSIDREGLRECQNQLPGDPCILEFEVSITDLVQNGSPRLLEGQIEVQDINDNTPNFASPVITLAIPENTNIGSLFPIPLASDRDAGPNGVASYELQAGPEAQELFGLQVAEDQEEKQPQLIVMGNLDRERWDSYDLTIKVQDGGSPPRASSALLRVTVLDTNDNAPKFERPSYEAELSENSPIGHSVIQLPHRRVTFSATSQAQELQDPSQHSYYDSGLEESETPSSKSSSGPRLGPLALPEDHYERTTPDGSIGEMEHPENEPAGRSRP

SEQ ID NO: 66089 - protein, 214 aa, Homo sapiens [sequence omitted]

SEQ ID NO: 66090 - protein, 243 aa, Homo sapiens
MGIFLVYVGFVFFSVLYVQQGLSSQAKFTEFPRNVTATEGQNVEMSCAFQSGSASVYLEIQWWFLRGPEDLDPGAEGAGAQVELLPDRDPDSDGTKISTVKVQGNDISHKLQISKVRKKDEGLYECRVTDANYGELQEHKAQAYLKVNANSHARRMQAFEASPMWLQDMKPRKNVSAAIPSSIHGSANQRTHSTSSPQVVAKIPKQSPQSGMETHFEPFILPLTNAPQKGQSYRVDRFMNGDF

SEQ ID NO: 66091 - protein, 239 aa, Homo sapiens [sequence omitted]

SEQ ID NO: 66092 - protein, 235 aa, Homo sapiens
MGIFLVYVGFVFFSVLYVQQGLSSQAKFTEFPRNVTATEGQNVEMSCAFQSGSASVYLEIQWWFLRGPEDLDPGAEGAGAQVELLPDRDPDSDGTKISTVKVQGNDISHKLQISKVRKKDEGLYECRVTDANYGELQEHKAQAYLKVNANSHARRMQAFEASPMWLQDMKPRKNVSAAIPSSIHGSANQRTHSTSSPQVVAKIPKQSPQSGARIATSHGLSVLLLVCGFVKGALL

SEQ ID NO: 66093 - protein, 877 aa, Homo sapiens
MLTRLQVLTLALFSKGFLLSLGDHNFLRREIKIEGDLVLGGLFPINEKGTGTEECGRINEDRGIQRLEAMLFAIDEINKDDYLLPGVKLGVHILDTCSRDTYALEQSLEFVRASLTKVDEAEYMCPDGSYAIQENIPLLIAGVIGGSYSSVSIQVANLLRLFQIPQISYASTSAKLSDKSRYDYFARTVPPDFYQAKAMAEILRFFNWTYVSTVASEGDYGETGIEAFEQEARLRNICIATAEKVGRSNIRKSYDSVIRELLQKPNARVVVLFMRSDDSRELIAAASRANASFTWVASDGWGAQESIIKGSEHVAYGAITLELASQPVRQFDRYFQSLNPYNNHRNPWFRDFWEQKFQCSLQNKRNHRRVCDKHLAIDSSNYEQESKIMFVVNAVYAMAHALHKMQRTLCPNTTKLCDAMKILDGKKLYKDYLLKINFTAPFNPNKDADSIVKFDTFGDGMGRYNVFNFQNVGGKYSYLKVGHWAETLSLDVNSIHWSRNSVPTSQCSDPCAPNEMKNMQPGDVCCWICIPCEPYEYLADEFTCMDCGSGQWPTADLTGCYDLPEDYIRWEDAWAIGPVTIACLGFMCTCMVVTVFIKHNNTPLVKASGRELCYILLFGVGLSYCMTFFFIAKPSPVICALRRLGLGSSFAICYSALLTKTNCIARIFDGVKNGAQRPKFISPSSQVFICLGLILVQIVMVSVWLILEAPGTRRYTLAEKRETVILKCNVKDSSMLISLTYDVILVILCTVYAFKTRKCPENFNEAKFIGFTMYTTCIIWLAFLPIFYVTSSDYRVQTTTMCISVSLSGFVVLGCLFAPKVHIILFQPQKNVVTHRLHLNRFSVSGTGTTYSQSSASTYVPTVCNGREVLDSTTSSL

SEQ ID NO: 66094 - protein, 475 aa, Homo sapiens [sequence omitted]

SEQ ID NO: 66095 - protein, 603 aa, Homo sapiens
MSRLLLLLLLKVSASSALGVAPASRNETCLGESCAPTVIQRRGRDAWGPGNSARDVLRARAPREEQGAAFLAGPSWDLPAAPGRDPAAGRGAEASAAGPPGPPTRPPGPWRWKGARGQEPSETLGRGNPTALQLFLQISEEEEKGPRGAGISGRSQEQSVKTVPGASDLFYWPRRAGKLQGSHHKPLSKTANGLAGHEGWTIALPGRALAQNGSLGEGIHEPGGPRRGNSTNRRVRLKNPFYPLTQESYGAYAVMCLSVVIFGTGIIGNLAVMCIVCHNYYMRSISNSLLANLAFWDFLIIFFCLPLVIFHELTKKWLLEDFSCKIVPYIEVASLGVTTFTLCALCIDRFRAATNVQMYYEMIENCSSTTAKLAVIWVGALLLALPEVVLRQLSKEDLGFSGRAPAERCIIKISPDLPDTIYVLALTYDSARLWWYFGCYFCLPTLFTITCSLVTARKIRKAEKACTRGNKRQIQLESQMNCTVVALTILYGFCIIPENICNIVTAYMATGVSQQTMDLLNIISQFLLFFKSCVTPVLLFCLCKPFSRAFMECCCCCCEECIQKSSTVTSDDNDNEYTTELELSPFSTIRREMSTFASVGTHC

SEQ ID NO: 66096 - protein, 27 aa, Homo sapiens
MIISAFEPLLPPLLLLFLISLTQRVNC

SEQ ID NO: 66097 - protein, 851 aa, Homo sapiens [sequence omitted]

SEQ ID NO: 66098 - protein, 293 aa, Homo sapiens
MARPPRQHPGVWASLLLLLLTGPAACAASPADDGAGPGGRGPRGRARGDTGADEAVPRHDSSYGTFAGEFYDLRYLSEEGYPFPTAPPVDPFAKIKVDDCGKTKGCFRYGKPGCNAETCDYFLSYRMIGADVEFELSADTDGWVAVGFSSDKKMGGDDVMACVHDDNGRVRIQHFYNVGQWAKEIQRNPARDEEGVFENNRVTCRFKRPVNVPRDETIVDLHLSWYYLFAWGPAIQGSITRHDIDSPPASERVVSIYKYEDIFMPSAAYQTFSSPFCLLLIVALTFYLLMGTP

SEQ ID NO: 66099 - protein, 935 aa, Homo sapiens [sequence omitted]

SEQ ID NO: 66100 - protein, 465 aa, Homo sapiens
MLGRKCLTLATAVVQLYLALPPGAEHWTKEHCGAVCFVKDNPQKSYFIRLYGLQAGRLLWEQELYSQLVYSTPTPFFHTFAGDDCQAGLNFADEDEAQAFRALVQEKIQKRNQRQSGDRRQLPPPPTPANEERRGGLPPLPLHPGGDQGGPPVGPLSLGLATVDIQNPDITSSRYRGLPAPGPSPADKKRSGKKKISKADIGAPSGFKHVSHVGWDPQNGFDVNNLDPDLRSLFSRAGISEAQLTDAETSKLIYDFIEDQGGLEAVRQEMRRQEPLPPPPPPSRGGNQLPRPPIVGGNKGRSGPLPPVPLGIAPPPPTPRGPPPPGRGGPPPPPPPATGRSGPLPPPPPGAGGPPMPPPPPPPPPPPSSGNGPAPPPLPPALVPAGGLAPGGGRGALLDQIRQGIQLNKTPGAPESSALQPPPQSSEGLVGALMHVMQKRSRAIHSSDEGEDQAGDEDEDDEWDD

SEQ ID NO: 66101 - protein, 1506 aa, Homo sapiens
MLLGLAALHIYITVSATRPSQKISLKNVEKEWGLEPFLPPSLLQVIKEKNLRKSLSQQLKAHQTHPSCGTKGSAIQAKLQYLRILNELPTFTGVLFNTVGLDEKQSATTLLVGPRHGISHVIDLKTNLTTVLSEFSKISKIQLFRENQGVARVETSIMDAKPLVLLMEWPEATNFACLIAGYCRLLLDSRKMVFSRPASQPLPPPMIKADYMHSAHRPVTGGHLGKKESSYVGSVGTSPRKSSRCTPPPADSELVSFCYLHMREQRKEQESRTDVNENLIFFEETRPRTKSDPTSKSSGQGYEVVPDDFDAASLDHEPCASRARSYTLDNSLGAEALNFYCDSCKAKLQEQLGPRKGGKPGSSRDNIVDLMSLPPPGSEEEEEEEDETTSLLPAIAAPPPGFRDNSSDEDDPKRRAVQSQEQGRHLRGLLYDEIPVTLIDSVQTRTVRDHAQELDDALVSTLQALEALAASEDGPHPPPPQTAGLIVLATITPESSLDSGHETNSSELTDMSEMMSAMKQHQNTTYFLAQHLNKDSLLARKDLPFRIQSCAAQAVLTAPYSLGRPDPNPSLQPIATGQSPGPPGARRKLPQSEGQVQGERTYSLAVHPALSPQLSEQKNLSLLSPVPEDKGPGHTRAGLEMSLRAATSSLSEEQVSELRDNLPKEVRLSPKLILDPKSSVTPAIISAALQQVVHNKSLVTAGGALGNPPSRGERRLEASMGRPEVSMMSSSASKNLKFKISPSAPETSWNSQHQLGAEVSSSPRAPTGSRADSLHLSQQEDSLPVQNFPPKSYLLRTSRESVGKQATGEVAGKGGPVGGKPTLQKQGTISSQGEKAQLESTPKRSKLEETSLVPRATYPMALQSPSCQSRSHSPSCQPHGHSPSSQSRGQSPSCQPRGQSPLRSQAASRQVSTMPSRKLETTLNGAHSTSEGPAKPKSSRGPFRLRNLFSATFPTRQKKETDERQAQLQKVKQYELEFLEELLKPPSQGELPGTEYLQPPAPGRCSCQLRSSPVQQGPGMSREQRRSCDCKRICRGGRPQATQTPVPSLRGRERDRVLPSQRQPEAGPGVSLSSPINVQRIRSTSLESRECRSDPESGVSCLTTCASGGECLGAPNYRKLMRRYSISELDQGDRASLTSDVYPHPPLGMLPREAKEVEASLPIALGPKSRSLESPTLGDPSYVQVAPETKGPRQMAVFSLPEEVYRKPAELDEDSESSKCCSIRYCFYYRKCDMADDASDGKDELSYSIPMKILPGMKLDEQVVPVVSRTLQVLDAATCSSSSPEASRTQEIDLRVSTFEGSLAKINALRAHAYGLPDGFLAARLDTNELLTVLRQCVASPEARAPKPYVSQISEYKLELALKFKELRASCRRVANVDKSPTHMLAAITGSFQVLSSLIETFVRLVFIVRSEAQRQELLAKVEEVVRNYTFLLRAAEESTARNLNQQQQQQQQQQQQQQQQQQQQQQQQQQQVAAAAGAATEHPPGSPTSATVMSTFTHSLKTLIK

SEQ ID NO: 66102 - protein, 447 aa, Homo sapiens
MKYIFSLLFFLLLEGGKTEQVKHSETYCMFQDKKYRVGERWHPYLEPYGLVYCVNCICSENGNVLCSRVRCPNVHCLSPVHIPHLCCPRCPDSLPPVNNKVTSKSCEYNGTTYQHGELFVAEGLFQNRQPNQCTQCSCSEGNVYCGLKTCPKLTCAFPVSVPDSCCRVCRGDGELSWEHSDGDIFRQPANREARHSYHRSHYDPPPSRQAGGLSRFPGARSHRGALMDSQQASGTIVQIVINNKHKHGQVCVSNGKTYSHGESWHPNLRAFGIVECVLCTCNVTKQECKKIHCPNRYPCKYPQKIDGKCCKVCPGKKAKELPGQSFDNKGYFCGEETMPVYESVFMEDGETTRKIALETERPPQVEVHVWTIRKGILQHFHIEKISKRMFEELPHFKLVTRTTLSQWKIFTEGEAQISQMCSSRVCRTELEDLVKVLYLERSEKGHC

SEQ ID NO: 66103 - protein, 482 aa, Homo sapiens [sequence omitted]

SEQ ID NO: 66104 - protein, 32 aa, Homo sapiens
LRTRDFSCTTLSACFPPCPEKCDRSPKEFPRS

SEQ ID NO: 66105 - protein, 60 aa, Homo sapiens [sequence omitted]

SEQ ID NO: 66106 - protein, 12 aa, Homo sapiens
INVVLIFLLAFR

SEQ ID NO: 66107 - protein, 17 aa, Homo sapiens
IQLQFKSLQNLRLSLLL

SEQ ID NO: 66108 - protein, 16 aa, Homo sapiens
VVVLWLFLSFFDRIFD

SEQ ID NO: 66109 - protein, 199 aa, Homo sapiens
RSLLQPPSPKMVMLLLLLSALAGLFGAAEGQAFHLGKCPNPPVQENFDVNKYLGRWYEIEKIPTTFENGRCIQANYSLMENGKIKVLNQELRADGTVNQIEGEATPVNLTEPAKLEVKFSWFMPSAPYWILATDYENYALVYSCTCIIQLFHVDFAWILARNPNLPPETVDSLKNILTSNNIDVKKMTVTDQVNCPKLS

SEQ ID NO: 66110 - protein, 8 aa, Homo sapiens
IFIFSISL

SEQ ID NO: 66111 - protein, 13 aa, Homo sapiens
LFNLVYWVSYLYL

SEQ ID NO: 66112 - protein, 247 aa, Homo sapiens
LLGTVVALKVVLYLLRVCLAMAWKSGGASHSELIHNLRKNGIIKTDKVFEVMLATDRSHYAKCNPYMDSPQSIGFQATISAPHMHAYALELLFDQLHEGAKALDVGSGSGILTACFARMVGCTGKVIGIDHIKELVDDSVNNVRKDDPTLLSSGRVQLVVGDGRMGYAEEAPYDAIHVGAAAPVVPQALIDQLKPGGRLILPVGPAGGNQMLEQYDKLQDGSIKMKPLMGVIYVPLTDKEKQWSRWK

SEQ ID NO: 66113 - protein, 15 aa, Homo sapiens
RDKILSYFQKLLLVL

SEQ ID NO: 66114 - protein, 16 aa, Homo sapiens
VVISALLWCWWAETSS

SEQ ID NO: 66115 - protein, 23 aa, Homo sapiens
LVMSLLFIASVFMLHIWGKYTRS

SEQ ID NO: 66116 - protein, 30 aa, Homo sapiens
LGFIMFGLYFVFLVVSVLLEDRILTCPVSI

SEQ ID NO: 66117 - protein, 58 aa, Homo sapiens
VGFLLLLLWVILCWACHSRSADVDSLSESSPNSSPGPCPEKAPPPQKPSHEGSYLLQP

SEQ ID NO: 66118 - protein, 18 aa, Homo sapiens
IQTGFFLALWNLLQLLRI

SEQ ID NO: 66119 - protein, 12 aa, Homo sapiens
IVFFIIFVVFLA

SEQ ID NO: 66120 - protein, 14 aa, Homo sapiens
LVPWVICLLLCPCK

SEQ ID NO: 66121 - protein, 157 aa, Homo sapiens
ISIALLLTVLQVSRGQKVTSLTACLVDQSLRLDCRHENTSSSPIQYEFSLTRETKKHVLFGTVGVPEHTYRSRTNFTSKYNMKVLYLSAFTSKDEGTYTCALHHSGHSPPISSQNVTVLRDKLVKCEGISLLAQNTSWLLLLLLSLSLLQATDFMSL

SEQ ID NO: 66122 - protein, 22 aa, Homo sapiens
ILFLWLLVYCLLLFPQLDVSRL

SEQ ID NO: 66123 - protein, 43 aa, Homo sapiens
KITTVFSHAQTVVLCVGCSTVLCQPTGGKARLTEGCSFRRKQH

SEQ ID NO: 66124 - protein, 18 aa, Homo sapiens
LGSLFVPTCRAAQGEWAS

SEQ ID NO: 66125 - protein, 42 aa, Homo sapiens
LVLILAVVGFGALMTQLFLWEYGDLHLFGPNQRPAPCYDPCE

SEQ ID NO: 66126 - protein, 68 aa, Homo sapiens
IGWYIFRVLLQVFLECCIYWVGFAFRNPPGTQPIARSEVFRYSLQKLAYTVSRTGRQVLGERRQRAPN

SEQ ID NO: 66127 - protein, 18 aa, Homo sapiens
LVKTMKIIYNATLLFLVS

SEQ ID NO: 66128 - protein, 163 aa, Homo sapiens
MILGASVVMAIACLMDMNALLDRFHNYILPHLRGEDRVCHCNCGRHHIHYVIPYDGDQSVVDASENYFVTDSVTKQEIDLMLGLLLGFCISWFLVWMDGVLHCAVRAWRAGRRYDGSWTWLPKLCSLRELGRRPHRPFEEAAGNMVHVKQKLYHNGHPSPRHL

SEQ ID NO: 66129 - protein, 14 aa, Homo sapiens
MAIFLLIAISWMLG

SEQ ID NO: 66130 - protein, 84 aa, Homo sapiens [sequence omitted]

SEQ ID NO: 66131 - protein, 34 aa, Homo sapiens
MPWRFLWRIFCFRKLLGSFYSAAVVLSRISECLI

SEQ ID NO: 66132 - protein, 37 aa, Homo sapiens
MPWRFLWRIFCFRKLLGSFYSAAVVLSRISECLLKDH

SEQ ID NO: 66133 - protein, 315 aa, Homo sapiens
METQMSQNVCPRNLWLLQPLTVLLLLASADSQAAAPPKAVLKLEPPWINVLQEDSVTLTCQGARSPESDSIQWFHNGNLIPTHTQPSYRFKANNNDSGEYTCQTGQTSLSDPVHLTVLSEWLVLQTPHLEFQEGETIMLRCHSWKDKPLVKVTFFQNGKSQKFSHLDPTFSIPQANHSHSGDYHCTGNIGYTLFSSKPVTITVQVPSMGSSSPMGIIVAVVIATAVAAIVAAVVALIYCRKKRISANSTDPVKAAQFEPPGRQMIAIRKRQLEETNNDYETADGGYMTLNPRAPTDDDKNIYLTLPPNDHVNSNN

SEQ ID NO: 66134 - protein, 314 aa, Homo sapiens
METQMSQNVCPRNLWLLQPLTVLLLLASADSQAAPPKAVLKLEPPWINVLQEDSVTLTCQGARSPESDSIQWFHNGNLIPTHTQPSYRFKANNNDSGEYTCQTGQTSLSDPVHLTVLSEWLVLQTPHLEFQEGETIMLRCHSWKDKPLVKVTFFQNGKSQKFSHLDPTFSIPQANHSHSGDYHCTGNIGYTLFSSKPVTITVQVPSMGSSSPMGIIVAVVIATAVAAIVAAVVALIYCRKKRISANSTDPVKAAQFEPPGRQMIAIRKRQLEETNNDYETADGGYMTLNPRAPTDDDKNIYLTLPPNDHVNSNN

SEQ ID NO: 66135 - protein, 352 aa, Homo sapiens [sequence omitted]

SEQ ID NO: 66136 - protein, 373 aa, Homo sapiens
MLPGGLLVLGVFIITTLELANDFQNALRRLMFAVEKSINRKRLWNFTEEEVSERVTLHICASTKKIFCRTYDIHDPKSSARPADWKYQSGLSSSWLSLECTVHINIHIPLSATSVSYTLEKNTKNGLTRWAKEIENGVYLINGQVKDEDCDLLEGQKKSSRGNTQATSHSFDVRVLTQLLLNSDHRSTATVQICSGSVNLKGAVKCRAYIHSSKPKVKDAVQAVKRDILNTVADRCEMLFEDLLLNEIPEKKDSEKEFHVLPYRVFVPLPGSTVMLCDYKFDDESAEEIRDHFMEMLDHTIQIEDLEIAEETNTACMSSSMNSQASLDNTDDEQPKQPIKTTMLLKIQQNIGVIAAFTVAVLAAGISFHYFSD

SEQ ID NO: 66137 - protein, 850 aa, Homo sapiens
MICVALVVLPIQFEQLAYLWMERQKSGGNYSRHRAQTEKHVVLCVSSLKIDLLMDFLNEFYAHPRLQDYYVVILCPTEMDVQVRRVLQIPMWSQRVIYLQGSALKDQDLLRAKMDDAEACFILSSRCEVDRTSSDHQTILRAWAVKDFAPNCPLYVQILKPENKFHIKFADHVVCEEEFKYAMLALNCICPATSTLITLLVHTSRGQEGQQSPEQWQKMYGRCSGNEVYHIVLEESTFFAEYEGKSFTYASFHAHKKFGVCLIGVRREDNKNILLNPGPRYIMNSTDICFYINITKEENSAFKNQDQQRKSNVSRSFYHGPSRLPVHSIIASMGTVAIDLQDTSCRSASGPTLSLPTEGSKEIRRPSIAPVLEVADTSSIQTCDLLSDQSEDETTPDEEMSSNLEYAKGYPPYSPYIGSSPTFCHLLHEKVPFCCLRLDKSCQHNYYEDAKAYGFKNKLIIVAAETAGNGLYNFIVPLRAYYRPKKELNPIVLLLDNPLDDLLRCGVTFAANMVVVDKESTMSAEEDYMADAKTIVNVQTLFRLFSSLSIITELTHPANMRFMQFRAKDCYSLALSKLEKKERERGSNLAFMFRLPFAAGRVFSISMLDTLLYQSFVKDYMISITRLLLGLDTTPGSGFLCSMKITADDLWIRTYARLYQKLCSSTGDVPIGIYRTESQKLTTSESQISISVEEWEDTKDSKEQGHHRSNHRNSTSSDQSDHPLLRRKSMQWARRLSRKGPKHSGKTAEKITQQRLNLYRRSERQELAELVKNRMKHLGLSTVGYDEMNDHQSTLSYILINPSPDTRIELNDVVYLIRPDPLAYLPNSEPSRRNSICNVTGQDSREETQL

SEQ ID NO: 66138 - protein, 816 aa, Homo sapiens
MICVALVVLPIQFEQLAYLWMERQKSGGNYSRHRAQTEKHVVLCVSSLKIDLLMDFLNEFYAHPRLQDYYVVILCPTEMDVQVRRVLQIPMWSQRVIYLQGSALKDQDLLRAKMDDAEACFILSSRCEVDRTSSDHQTILRAWAVKDFAPNCPLYVQILKPENKFHIKFADHVVCEEEFKYAMLALNCICPATSTLITLLVHTSRGQCVCLCCREGQQSPEQWQKMYGRCSGNEVYHIVLEESTFFAEYEGKSFTYASFHAHKKFGVCLIGVRREDNKNILLNPGPRYIMNSTDICFYINITKEENSAFKNQDQQRKSNVSRSFYHGPSRLPVHSIIASMGTVAIDLQDTSCRSASGPTLSLPTEGSKEIRRPSIAPVLEVADTSSIQTCDLLSDQSEDETTPDEEMSSNLEYAKGYPPYSPYIGSSPTFCHLLHEKVPFCCLRLDKSCQHNYYEDAKAYGFKNKLIIVAAETAGNGLYNFIVPLRAYYRPKKELNPIVLLLDNPLDDLLRCGVTFAANMVVVDKESTMSAEEDYMADAKTIVNVQTLFRLFSSLSIITELTHPANMRFMQFRAKDCYSLALSKLEKKERERGSNLAFMFRLPFAAGRVFSISMLDTLLYQSFVKDYMISITRLLLGLDTTPGSGFLCSMKITADDLWIRTYARLYQKLCSSTGDVPIGIYRTESQKLTTSESRKIASQSQISISVEEWEDTKDSKEQGHHRSNHRNSTSSDQSDHPLLRRKSMQWARRLSRKGPKHSGKTAEKITQQRLNLYRRSERQELAELVKNRMKHLGLSTVGYGMLFKNYCIYGLVISCH

SEQ ID NO: 66139 - protein, 284 aa, Homo sapiens
MLALAKILLISTLFYSLLSGSHGKENQDINTTQNIAEVFKTMENKPISLESEANLNSDKENITTSNLKASHSPPLNLPNNSHGITDFSSNSSAEHSLGSLKPTSTISTSPPLIHSFVSKVPWNAPIADEDLLPISAHPNATPALSSENFTWSLVNDTVKTPDNSSITVSILSSEPTSPSVTPLIVEPSGWLTTNSDSFTGFTPYQEKTTLQPTLKFTNNSKLFPNTSDPQKVLRLDNAPEPYDVSFGNSSYYNPTLNDSAMPESEENARDGIPMDDIPPLRTSV

SEQ ID NO: 66140 - protein, 110 aa, Homo sapiens
MLPCASCLPGSLLLWALLLLLLGSASPQDSEEPDSYTECTDGYEWDPDSQHCRGVCAWGTKHPQEPGKGLIAAFQGTAPPPRTAVGAQQPVLCPALLHRGQLWLSGGQLS

SEQ ID NO: 66141 - protein, 489 aa, Homo sapiens
MTGQIPRLSKVNLFTLLSLWMELFPAEAQRQKSQKNEEGKHGPLGDNEERTRVSTDKRQVKRTGLVVVKNMKIVGLHCSSEDLHAGQIALIKHGSRLKNCDLYFSRKPCSACLKMIVNAGVNRISYWPADPEISLLTEASSSEDAKLDAKAVERLKSNSRAHVCVLLQPLVCYMVQFVEETSYKCDFIQKITKTLPDANTDFYYECKQERIKEYEMLFLVSNEEMHKQILMTIGLENLCENPYFSNLRQNMKDLILLLATVASSVPNFKHFGFYRSNPEQINEIHNQSLPQEIARHCMVQARLLAYRTEDHKTGVGAVIWAEGKSRSCDGTGAMYFVGCGYNAFPVGSEYADFPHMDDKQKDREIRKFRYIIHAEQNALTFRCQEIKPEERSMIFVTKCPCDECVPLIKGAGIKQIYAGDVDVGKKKADISYMRFGELEGVSKFTWQLNPSGAYGLEQNEPERRENGVLRPVPQKEEQHQDKKLRLGIH

SEQ ID NO: 66142 - protein, 146 aa, Homo sapiens [sequence omitted]

SEQ ID NO: 66143 - protein, 167 aa, Homo sapiens [sequence omitted]

SEQ ID NO: 66144 - protein, 488 aa, Homo sapiens
MVAFFLGCSFSLEEALEKAGLPRRDPAGHSQAGAYKTTVPCVTHAGFCCPLVVTMRPIPKDKLEGLVRACCSLGGEQGQPVHMGDPELLGIKELSKPAYGDAMVCPPGEVPVFWPSPLTSLGAVSSCETPLAFASIPGCTVMTDLKDAKAPPGCLTPERIPEVHHISQDPLHYSIASVSASQKIRELESMIGIDPVLITTGFPTHFNHEPPEETDGPPGAVALVAFLQALEKEVAIIVDQRAWNLHQKIVEDAVEQGVLKTQIPILTYQGGSVEAAQAFLCKNGDPQTPRFDHLVAIERAGRAADGNYYNARKMNIKHLVDPIDDLFLAAKKIPGISSTGVGDGGNELGMGKVKEAVRRHIRHGDVIACDVEADFAVIAGEHSDGRPVRPATQGVSNWGGYALACALYILYSCAVHSQYLRKAVGPSRAPGDQAWTQALPSVIKVTNPSQPLAWKQLLPWMSSRPEVPSRKPRAGTLLPLKSQRQSQP

SEQ ID NO: 66145 - protein, 1912 aa, Homo sapiens
MEEIKKVLLLVLGCAVQCERKEEFIERIKQLDIETQAGIVAHIQEVTHNQENVFDLQWLELPDVAPEELEALSRSMVLHLRRLIDQRDECTELIVDLTQERDYLQAQHPPSPIKSSSADSTPSPTSSLSSEDKQHLAVELADTKARLRRVRQELEDKTEQLVDTRHEVDQLVLELQKVKQENIQLAADARSARAYRDELDSLREKANRVERLELELTRCKEKLHDVDFYKARMEELREDNIILIETKAMLEEQLTAARARGDKVHELEKENLQLKSKLHDLELDRDTDKKRIEELLEENMVLEIAQKQSMNESAHLGWELEQLSKNADLSDASRKSFVFELNECASSRILKLEKENQSLQSTIQGLRDASLVLEESGLKCGELEKENHQLSKKIEKLQTQLEREKQSNQDLETLSEELIREKEQLQSDMETLKADKARQIKDLEQEKDHLNRAMWSLRERSQVSSEARMKDVEKENKALHQTVTEANGKLSQLEFEKRQLHRDLEQAKEKGERAEKLERELQRLQEENGRLARKVTSLETATEKVEALEHESQGLQLENRTLRKSLDTLQNVSLQLEGLERDNKQLDAENLELRRLVETMRFTSTKLAQMERENQQLEREKEELRKNVDLLKALGKKSERLELSYQSVSAENLRLQQSLESSSHKTQTLESELGELEAERQALRRDLEALRLANAQLEGAEKDRKALEQEVAQLEKDKKLLEKEAKRLWQQVELKDAVLDDSTAKLSAVEKESRALDKELARCRDAAGKLKELEKDNRDLTKQVTVHARTLTTLREDLVLEKLKSQQLSSELDKLSQELEKVGLNRELLLQEDDSGSDTKYKILEGRNESALKTTLAMKEEKIVLLEAQMEEKASLNRQLESELQMLKKECETLRQNQGEGQHLQNSFKHPAGKTAASHQGKEAWGPGHKEATMELLRVKDRAIELERNNAALQAEKQLLKEQLQHLETQNVTFSSQILTLQKQSAFLQEHNTTLQTQTAKLQVENSTLSSQSAALTAQYTLLQNHHTAKETENESLQRQQEQLTAAYEALLQDHEHLGTLHERQSAEYEALIRQHSCLKTLHRNLELEHKELGERHGDMLKRKAELEEREKVLTTEREALQQEQRTNALAMGENQRLRGELDRVNFLHHQLKGEYEELHAHTKELKTSLNNAQLELNRWQARFDELKEQHQTMDISLTKLDNHCELLSRLKGNLEEENHHLLSQIQLLSQQNQMLLEQNMENKEQYHEEQKQYIDKLNALRRHKEKLEEKIMDQYKFYDPPPKKKNHWIGAKALVKLIKPKKEGSRERLKSTVDSPPWQLESSDPASPAASQPLRSQAENPDTPALGSNCAEERDAHNGSVGKGPGDLKPKRGSPHRGSLDRTDASTDLAMRSWPSELGSRTCSTSATTTAPSNSTPIARHPGRTKGYNSDDNLCEPSLEFEVPNHRQYVSRPSSLESSRNTSSNSSPLNLKGSSEQLHGRSESFSSEDLIPSRDLATLPREASTPGRNALGRHEYPLPRNGPLPQEGAQKRGTAPPYVGVRPCSASPSSEMVTLEEFLEESNRSSPTHDTPSCRDDLLSDYFRKASDPPAIGGQPGPPAKKEGAKMPTNFVAPTVKMAAPTSEGRPLKPGQYVKPNFRLTEAEAPPSVAPRQAQPPQSLSLGRPRQAPVPPASHAPASRSASLSRAFSLASADLLRASGPEACKQESPQKLGAPEALGGRETGSHTLQSPAPPSSHSLARERTPLVGKAGSSCQGPGPRSRPLDTRRFSLAPPKEERLAPLHQSATAPAIATAGAGAAAAGSGSNSQLLHFSPAAAPAARTKPKAPPRSGEVATITPVRAGLSLSEGDGVPGQGCSEGLPAKSPGRSPDLAPHLGRALEDCSRGSVSKSSPASPEPGGDPQTVWYEYGCV

SEQ ID NO: 66146 - protein, 40 aa, Homo sapiens
MGPSGLIYRGGLGPCEVTSSWPRYCSSKSWGFCKSLLPVD

SEQ ID NO: 66147 - protein, 1570 aa, Homo sapiens
MASWTSPWWVLIGMVFMHSPLPQTTAEKSPGAYFLPEFALSPQGSFLEDTTGEQFLTYRYDDQTSRNTRSDEDKDGNWDAWGDWSDCSRTCGGGASYSLRRCLTGRNCEGQNIRYKTCSNHDCPPDAEDFRAQQCSAYNDVQYQGHYYEWLPRYNDPAAPCALKCHAQGQNLVVELAPKVLDGTRCNTDSLDMCISGICQAVGCDRQLGSNAKEDNCGVCAGDGSTCRLVRGQSKSHVSPEKREENVIAVPLGSRSVRITVKGPAHLFIESKTLQGSKGEHSFNSPGVFLVENTTVEFQRGSERQTFKIPGPLMADFIFKTRYTAAKDSVVQFFFYQPISHQWRQTDFFPCTVTCGGGYQLNSAECVDIRLKRVVPDHYCHYYPENVKPKPKLKECSMDPCPSSDGFKEIMPYDHFQPLPRWEHNPWTACSVSCGGGIQRRSFVCVEESMHGEILQVEEWKCMYAPKPKVMQTCNLFDCPKWIAMEWSQCTVTCGRGLRYRVVLCINHRGEHVGGCNPQLKLHIKEECVIPIPCYKPKEKSPVEAKLPWLKQAQELEETRIATEEPTFIPEPWSACSTTCGPGVQVREVKCRVLLTFTQTETELPEEECEGPKLPTERPCLLEACDESPASRELDIPLPEDSETTYDWEYAGFTPCTATCVGGHQEAIAVCLHIQTQQTVNDSLCDMVHRPPAMSQACNTEPCPPRWHVGSWGPCSATCGVGIQTRDVYCLHPGETPAPPEECRDEKPHALQACNQFDCPPGWHIEEWQQCSRTCGGGTQNRRVTCRQLLTDGSFLNLSDELCQGPKASSHKSCARTDCPPHLAVGDWSKCSVSCGVGIQRRKQVCQRLAAKGRRIPLSEMMCRDLPGLPLVRSCQMPECSKIKSEMKTKLGEQGPQILSVQRVYIQTREEKRINLTIGSRAYLLPNTSVIIKCPVRRFQKSLIQWEKDGRCLQNSKRLGITKSGSLKIHGLAAPDIGVYRCIAGSAQETVVLKLIGTDNRLIARPALREPMREYPGMDHSEANSLGVTWHKMRQMWNNKNDLYLDDDHISNQPFLRALLGHCSNSAGSTNSWELKNKQFEAAVKQGAYSMDTAQFDELIRNMSQLMETGEVSDDLASQLIYQLVAELAKAQPTHMQWRGIQEETPPAAQLRGETGSVSQSSHAKNSGKLTFKPKGPVLMRQSQPPSISFNKTINSRIGNTVYITKRTEVINILCDLITPSEATYTWTKDGTLLQPSVKIILDGTGKIQIQNPTRKEQGIYECSVANHLGSDVESSSVLYAEAPVILSVERNITKPEHNHLSVVVGGIVEAALGANVTIRCPVKGVPQPNITWLKRGGSLSGNVSLLFNGSLLLQNVSLENEGTYVCIATNALGKAVATSVLHLLERRWPESRIVFLQGHKKYILQATNTRTNSNDPTGEPPPQEPFWEPGNWSHCSATCGHLGARIQRPQCVMANGQEVSEALCDHLQKPLAGFEPCNIRDCPARWFTSVWSQCSVSCGEGYHSRQVTCKRTKANGTVQVVSPRACAPKDRPLGRKPCFGHPCVQWEPGNRVKLTHLVCGQHYLSTQIV

SEQ ID NO: 66148 - protein, 192 aa, Homo sapiens
MSWPGTGCVVMVLGLSLLPLQVVYVARNAKDVAVSYYHFYHMAKVHPEPGTWDSFLEKFMVGEVSYGSWYQHVQEWWELSRTHPVLYLFYEDMKENPKREIQKILEFVGRSLPEETVDFVVQHTSFKEMKKNPMTNYTTVPQEFMDHSISPFMRKGMAGDWKTTFTVAQNERFDADYAEKMAGCSLSFRSEL

SEQ ID NO: 66149 - protein, 728 aa, Homo sapiens [sequence omitted]

SEQ ID NO: 66150 - protein, 94 aa, Homo sapiens
MVVESAQAVVSSTSLAVPGIAGGGKGMIARCRLGASQIRFTSLASPGTISPPCASSSERLRALSAHCNLCNLCLQGQAVLLPQPSEYLGLQDRK

SEQ ID NO: 66151 - protein, 334 aa, Homo sapiens
MLLRGLMKSYFGGLLCVCWSPDGRYVVTGGEDDLVTVWSFTEGRVVARGHGHKSWVNAVAFDPYTTRAEEAATAAGADGERSGEEEEEEPEAAGTGSAGGAPLSPLPKAGSITYRFGSAGQDTQFCLWDLTEDVLYPHPPLARTRTLPGTPGTTPPAASSSRGGEPGPGPLPRSLSRSNSLPHPAGGGKAGGPGVAAEPGTPFSIGRFATLTLQERRDRGAEKEHKRYHSLGNISRGGSGGSGSGGEKPSGPVPRSRLDPAKVLGTALCPRIHEVPLLEPLVCKKIAQERLTVLLFLEDCIITACQEGLICTWARPGKAGISSQPGNSPSGTVV

SEQ ID NO: 66152 - protein, 77 aa, Homo sapiens
MRLLWSSIALTFSASARRRLRISSSLLHCSSSSSDTLDRSSTGAGGAADEPAGAGEQLSAAAAAAAAPPAAFDMEKS

SEQ ID NO: 66153 - protein, 220 aa, Homo sapiens
MAVVVLLFIAVLKQFGILEPISMEDSSDSELELSTVRHQPEGLDQLQAQTKFTKKELQSLYRGFKNECPTGLVDEDTFKLIYAQFFPQGDATTYAHFLFNAFDADGNGAIHFEDFVVGLSILLRGTVHEKLKWAFNLYDINKDGYITKEEMLAIMKSIYDMMGRHTYPILREDAPAEHVERFFEKMDRNQDGVVTIEEFLEACQKDENIMSSMQLFENVI

SEQ ID NO: 66154 - protein, 40 aa, Homo sapiens
MIRFFAEECSCIKGRKKTKLQLLIIQQAFKRFIKMVQLCI

SEQ ID NO: 66155 - protein, 247 aa, Homo sapiens [sequence omitted]

SEQ ID NO: 66156 - protein, 460 aa, Homo sapiens [sequence omitted]

SEQ ID NO: 66157 - protein, 430 aa, Homo sapiens
MRVYIFLCLMCWVRSDNKRPCLEFSQLSVKDSFRDLFIPRIETILMMYTRNNLNCAEPLFEQNNSLNVNFNTQKKTVWLIHGYRPVGSIPLWLQNFVRILLNEEDMNVIVVDWSRGATTFIYNRAVKNTRKVAVSLSVHIKNLLKHGASLDNFHFIGVSLGAHISGFVGKIFHGQLGRITGLDPAGPRFSRKPPYSRLDYTDAKFVDVIHSDSNGIQFIKCNHQRAVHLFMASLETNCNFISFPCRSYKDYKTSLCVDCDCFKEKSCPRLGYQAKLFKGVLKERMEGRPLRTTVFLDTSGTYPFCTYYFVLSIIVPDKTMMDGSFSFKLLNQLGMIEEPRLYEKNKPFYKLQEVKILAQFYNDFVNISSIGLTYFQSSNLQCSTCTYKIQSLMLKSLTYPERPPLCRYNIVLKDREEVFLNPNTCTPKNT

SEQ ID NO: 66158 - protein, 946 aa, Homo sapiens
MGPRFTMLLAMWLVCGSEPHPHATIRGSHGGRKVPLVSPDSSRPARFLRHTGRSRGIERSTLEEPNLQPLQRRRSVPVLRLARPTEPPARSDINGAAVRPEQRPAARGSPREMIRDEGSSARSRMLRFPSGSSSPNILASFAGKNRVWVISAPHASEGYYRLMMSLLKDDVYCELAERHIQQIVLFHQAGEEGGKVRRITSEGQILEQPLDPSLIPKLMSFLKLEKGKFGMVLLKKTLQVEERYPYPVRLEAMYEVIDQGPIRRIEKIRQKGFVQKCKASGVEGQVVAEGNDGGGGAGRPSLGSEKKKEDPRRAQVPPTRESRVKVLRKLAATAPALPQPPSTPRATTLPPAPATTVTRSTSRAVTVAARPMTTTAFPTTQRPWTPSPSHRPPTTTEVITARRPSVSENLYPPSRKDQHRERPQTTRRPSKATSLESFTNAPPTTISEPSTRAAGPGRFRDNRMDRREHGHRDPNVVPGPPKPAKEKPPKKKAQDKILSNEYEEKYDLSRPTASQLEDELQVGNVPLKKAKESKKHEKLEKPEKEKKKKMKNENADKLLKSEKQMKKSEKKSKQEKEKSKKKKGGKTEQDGYQKPTNKHFTQSPKKSVADLLGSFEGKRRLLLITAPKAENNMYVQQRDEYLESFCKMATRKISVITIFGPVNNSTMKIDHFQLDNEKPMRVVDDEDLVDQRLISELRKEYGMTYNDFFMVLTDVDLRVKQYYEVPITMKSVFDLIDTFQSRIKDMEKQKKEGIVCKEDKKQSLENFLSRFRWRRRLLVISAPNDEDWAYSQQLSALSGQACNFGLRHITILKLLGVGEEVGGVLELFPINGSSVVEREDVPAHLVKDIRNYFQVSPEYFSMLLVGKDGNVKSWYPSPMWSMVIVYDLIDSMQLRRQEMAIQQSLGMRCPEDEYAGYGYHSYHQGYQDGYQDDYRHHESYHHGYPY

SEQ ID NO: 66159 - protein, 85 aa, Homo sapiens
MSPPPPPLLLLLLSLALLGARARAEPAGSAVPAQSRPCVDCHAFEFMQRALQDLRKTACSLDARTETLLLQAERRALCACWPAGH

SEQ ID NO: 66160 - protein, 1514 aa, Homo sapiens
MLSLSLGLVLAILNKVAPQACPAQCSCSGSTVDCHGLALRSVPRNIPRNTERLDLNGNNITRITKTDFAGLRHLRVLQLMENKISTIERGAFQDLKELERLRLNRNHLQLFPELLFLGTAKLYRLDLSENQIQAIPRKAFRGAVDIKNLQLDYNQISCIEDGAFRALRDLEVLTLNNNNITRLSVASFNHMPKLRTFRLHSNNLYCDCHLAWLSDWLRQRPRVGLYTQCMGPSHLRGHNVAEVQKREFVCSGHQSFMAPSCSVLHCPAACTCSNNIVDCRGKGLTEIPTNLPETITEIRLEQNTIKVIPPGAFSPYKKLRRIDLSNNQISELAPDAFQGLRSLNSLVLYGNKITELPKSLFEGLFSLQLLLLNANKINCLRVDAFQDLHNLNLLSLYDNKLQTIAKGTFSPLRAIQTMHLAQNPFICDCHLKWLADYLHTNPIETSGARCTSPRRLANKRIGQIKSKKFRCSGTEDYRSKLSGDCFADLACPEKCRCEGTTVDCSNQKLNKIPEHIPQYTAELRLNNNEFTVLEATGIFKKLPQLRKINFSNNKITDIEEGAFEGASGVNEILLTSNRLENVQHKMFKGLESLKTLMLRSNRITCVGNDSFIGLSSVRLLSLYDNQITTVAPGAFDTLHSLSTLNLLANPFNCNCYLAWLGEWLRKKRIVTGNPRCQKPYFLKEIPIQDVAIQDFTCDDGNDDNSCSPLSRCPTECTCLDTVVRCSNKGLKVLPKGIPRDVTELYLDGNQFTLVPKELSNYKHLTLIDLSNNRISTLSNQSFSNMTQLLTLILSYNRLRCIPPRTFDGLKSLRLLSLHGNDISVVPEGAFNDLSALSHLAIGANPLYCDCNMQWLSDWVKSEYKEPGIARCAGPGEMADKLLLTTPSKKFTCQGPVDVNILAKCNPCLSNPCKNDGTCNSDPVDFYRCTCPYGFKGQDCDVPIHACISNPCKHGGTCHLKEGEEDGFWCICADGFEGENCEVNVDDCEDNDCENNSTCVDGINNYTCLCPPEYTGELCEEKLDFCAQDLNPCQHDSKCILTPKGFKCDCTPGYVGEHCDIDFDDCQDNKCKNGAHCTDAVNGYTCICPEGYSGLFCEFSPPMVLPRTSPCDNFDCQNGAQCIVRINEPICQCLPGYQGEKCEKLVSVNFINKESYLQIPSAKVRPQTNITLQIATDEDSGILLYKGDKDHIAVELYRGRVRASYDTGSHPASAIYSVETINDGNFHIVELLALDQSLSLSVDGGNPKIITNLSKQSTLNFDSPLYVGGMPGKSNVASLRQAPGQNGTSFHGCIRNLYINSELQDFQKVPMQTGILPGCEPCHKKVCAHGTCQPSSQAGFTCECQEGWMGPLCDQRTNDPCLGNKCVHGTCLPINAFSYSCKCLEGHGGVLCDEEEDLFNPCQAIKCKHGKCRLSGLGQPYCECSSGYTGDSCDREISCRGERIRDYYQKQQGYAACQTTKKVSRLECRGGCAGGQCCGPLRSKRRKYSFECTDGSSFVDEVEKVVKCGCTRCVS

SEQ ID NO: 66161 - protein, 1522 aa, Homo sapiens
MLSLSLGLVLAILNKVAPQACPAQCSCSGSTVDCHGLALRSVPRNIPRNTERLDLNGNNITRITKTDFAGLRHLRVLQLMENKISTIERGAFQDLKELERLRLNRNHLQLFPELLFLGTAKLYRLDLSENQIQAIPRKAFRGAVDIKNLQLDYNQISCIEDGAFRALRDLEVLTLNNNNITRLSVASFNHMPKLRTFRLHSNNLYCDCHLAWLSDWLRQRPRVGLYTQCMGPSHLRGHNVAEVQKREFVCSGHQSFMAPSCSVLHCPAACTCSNNIVDCRGKGLTEIPTNLPETITEIRLEQNTIKVIPPGAFSPYKKLRRIDLSNNQISELAPDAFQGLRSLNSLVLYGNKITELPKSLFEGLFSLQLLLLNANKINCLRVDAFQDLHNLNLLSLYDNKLQTIAKGTFSPLRAIQTMHLAQNPFICDCHLKWLADYLHTNPIETSGARCTSPRRLANKRIGQIKSKKFRCSAKEQYFIPGTEDYRSKLSGDCFADLACPEKCRCEGTTVDCSNQKLNKIPEHIPQYTAELRLNNNEFTVLEATGIFKKLPQLRKINFSNNKITDIEEGAFEGASGVNEILLTSNRLENVQHKMFKGLESLKTLMLRSNRITCVGNDSFIGLSSVRLLSLYDNQITTVAPGAFDTLHSLSTLNLLANPFNCNCYLAWLGEWLRKKRIVTGNPRCQKPYFLKEIPIQDVAIQDFTCDDGNDDNSCSPLSRCPTECTCLDTVVRCSNKGLKVLPKGIPRDVTELYLDGNQFTLVPKELSNYKHLTLIDLSNNRISTLSNQSFSNMTQLLTLILSYNRLRCIPPRTFDGLKSLRLLSLHGNDISVVPEGAFNDLSALSHLAIGANPLYCDCNMQWLSDWVKSEYKEPGIARCAGPGEMADKLLLTTPSKKFTCQGPVDVNILAKCNPCLSNPCKNDGTCNSDPVDFYRCTCPYGFKGQDCDVPIHACISNPCKHGGTCHLKEGEEDGFWCICADGFEGENCEVNVDDCEDNDCENNSTCVDGINNYTCLCPPEYTGELCEEKLDFCAQDLNPCQHDSKCILTPKGFKCDCTPGYVGEHCDIDFDDCQDNKCKNGAHCTDAVNGYTCICPEGYSGLFCEFSPPMVLPRTSPCDNFDCQNGAQCIVRINEPICQCLPGYQGEKCEKLVSVNFINKESYLQIPSAKVRPQTNITLQIATDEDSGILLYKGDKDHIAVELYRGRVRASYDTGSHPASAIYSVETINDGNFHIVELLALDQSLSLSVDGGNPKIITNLSKQSTLNFDSPLYVGGMPGKSNVASLRQAPGQNGTSFHGCIRNLYINSELQDFQKVPMQTGILPGCEPCHKKVCAHGTCQPSSQAGFTCECQEGWMGPLCDQRTNDPCLGNKCVHGTCLPINAFSYSCKCLEGHGGVLCDEEEDLFNPCQAIKCKHGKCRLSGLGQPYCECSSGYTGDSCDREISCRGERIRDYYQKQQGYAACQTTKKVSRLECRGGCAGGQCCGPLRSKRRKYSFECTDGSSFVDEVEKVVKCGCTRCVS

SEQ ID NO: 66162 - protein, 53 aa, Homo sapiens
MYHSGWKDARCGGAAVLFSPDPAPGEPALQGGLGEPNCVPGAGLRVSLTDLIR

SEQ ID NO: 66163 - protein, 6298 aa, Homo sapiens
MPSASLLVNLLSALLILFVFGETEIRFTGQTEFVVNETSTTVIRLIIERIGEPANVTAIVSLYGEDAGDFFDTYAAAFIPAGETNRTVYIAVCDDDLPEPDETFIFHLTLQKPSANVKLGWPRTVTVTILSNDNAFGIISFNMLPSIAVSEPKGRNESMPLTLIREKGTYGMVMVTFEVEGGPNPPDEDLSPVKGNITFPPGRATVIYNLTVLDDEVPENDEIFLIQLKSVEGGAEINTSRNSIEIIIKKNDSPVRFLQSIYLVPEEDHILIIPVVRGKDNNGNLIGSDEYEVSISYAVTTGNSTAHAQQNLDFIDLQPNTTVVFPPFIHESHLKFQIVDDTIPEIAESFHIMLLKDTLQGDAVLISPSVVQVTIKPNDKPYGVLSFNSVLFERTVIIDEDRISRYEEITVVRNGGTHGNVSANWVLTRNSTDPSPVTADIRPSSGVLHFAQGQMLATIPLTVVDDDLPEEAEAYLLQILPHTIRGGAEVSEPAELLFYIQDSDDVYGLITFFPMENQKIESSPGERYLSLSFTRLGGTKGDVRLLYSVLYIPAGAVDPLQAKEGILNISRRNDLIFPEQKTQVTTKLPIRNDAFLQNGAHFLVQLETVELLNIIPLIPPISPRFGEICNISLLVTPAIANGEIGFLSNLPIILHEPEDFAAEVVYIPLHRDGTDGQATVYWSLKPSGFNSKAVTPDDIGPFNGSVLFLSGQSDTTINITIKGDDIPEMNETVTLSLDRVNVENQVLKSGYTSRDLIILENDDPGGVFEFSPASRGPYVIKEGESVELHIIRSRGSLVKQFLHYRVEPRDSNEFYGNTGVLEFKPGEREIVITLLARLDGIPELDEHYWVVLSSHGERESKLGSATIVNITILKNDDPHGIIEFVSDGLIVMINESKGDAIYSAVYDVVRNRGNFGDVSVSWVVSPDFTQDVFPVQGTVVFGDQEFSKNITIYSLPDEIPEEMEEFTVILLNGTGGAKVGNRTTATLRIRRNDDPIYFAEPRVVRVQEGETANFTVLRNGSVDVTCMVQYATKDGKATARERDFIPVEKGETLIFEVGSRQQSISIFVNEDGIPETDEPFYIILLNSTGDTVVYQYGVATVIIEANDDPNGIFSLEPIDKAVEEGKTNAFWILRHRGYFGSVSVSWQLFQNDSALQPGQEFYETSGTVNFMDGEEAKPIILHAFPDKIPEFNEFYFLKLVNISGGSPGPGGQLAETNLQVTVMVPFNDDPFGVFILDPECLEREVAEDVLSEDDMSYITNFTILRQQGVFGDVQLGWEILSSEFPAGLPPMIDFLLVGIFPTTVHLQQHMRRHHSGTDALYFTGLEGAFGTVNPKYHPSRNNTIANFTFSAWVMPNANTNGFIIAKDDGNGSIYYGVKIQTNESHVTLSLHYKTLGSNATYIAKTTVMKYLEESVWLHLLIILEDGIIEFYLDGNAMPRGIKSLKGEAITDGPGILRIGAGINGNDRFTGLMQDVRSYERKLTLEEIYELHAMPAKSDLHPISGYLEFRQGETNKSFIISARDDNDEEGEELFILKLVSVYGGARISEENTTARLTIQKSDNANGLFGFTGACIPEIAEEGSTISCVVERTRGALDYVHVFYTISQIETDGINYLVDDFANASGTITFLPWQRSEVLNIYVLDDDIPELNEYFRVTLVSAIPGDGKLGSTPTSGASIDPEKETTDITIKASDHPYGLLQFSTGLPPQPKDAMTLPASSVPHITVEEEDGEIRLLVIRAQGLLGRVTAEFRTVSLTAFSPEDYQNVAGTLEFQPGERYKYIFINITDNSIPELEKSFKVELLNLEGGVAELFRVDGSGSGDGDMEFFLPTIHKRASLGVASQILVTIAASDHAHGVFEFSPESLFVSGTEPEDGYSTVTLNVIRHHGTLSPVTLHWNIDSDPDGDLAFTSGNITFEIGQTSANITVEILPDEDPELDKAFSVSVLSVSSGSLGAHINATLTVLASDDPYGIFIFSEKNRPVKVEEATQNITLSIIRLKGLMGKVLVSYATLDDMEKPPYFPPNLARATQGRDYIPASGFALFGANQSEATIAISILDDDEPERSESVFIELLNSTLVAKVQSRSIPNSPRLGPKVETIAQLIIIANDDAFGTLQLSAPIVRVAENHVGPIINVTRTGGAFADVSVKFKAVPITAIAGEDYSIASSDVVLLEGETSKAVPIYVINDIYPELEESFLVQLMNETTGGARLGALTEAVIIIEASDDPYGLFGFQITKLIVEEPEFNSVKVNLPIIRNSGTLGNVTVQWVATINGQLATGDLRVVSGNVTFAPGETIQTLLLEVLADDVPEIEEVIQVQLTDASGGGTIGLDRIANIIIPANDDPYGTVAFAQMVYRVQEPLERSSCANITVRRSGGHFGRLLLFYSTSDIDVVALAMEEGQDLLSYYESPIQGVPDPLWRTWMNVSAVGEPLYTCATLCLKEQACSAFSFFSASEGPQCFWMTSWISPAVNNSDFWTYRKNMTRVASLFSGQAVAGSDYEPVTRQWAIMQEGDEFANLTVSILPDDFPEMDESFLISLLEVHLMNISASLKNQPTIGQPNISTVVIALNGDAFGVFVIYNISPNTSEDGLFVEVQEQPQTLVELMIHRTGGSLGQVAVEWRVVGGTATEGLDFIGAGEILTFAEGETKKTVILTILDDSEPEDDESIIVSLVYTEGGSRILPSSDTVRVNILANDNVAGIVSFQTASRSVIGHEGEILQFHVIRTFPGRGNVTVNWKIIGQNLELNFANFSGQLFFPEGSLNTTLFVHLLDDNIPEEKEVYQVILYDVRTQGVPPAGIALLDAQGYAAVLTVEASDEPHGVLNFALSSRFVLLQEANITIQLFINREFGSLGAINVTYTTVPGMLSLKNQTVGNLAEPEVDFVPIIGFLILEEGETAAAINITILEDDVPELEEYFLVNLTYVGLTMAASTSFPPRLDSEGLTAQVIIDANDGARGVIEWQQSRFEVNETHGSLTLVAQRSREPLGHVSLFVYAQNLEAQVGLDYIFTPMILHFADGERYKNVNIMILDDDIPEGDEKFQLILTNPSPGLELGKNTIALIIVLANDDGPGVLSFNNSEHFFLREPTALYVQESVAVLYIVREPAQGLFGTVTVQFIVTEVNSSNESKDLTPSKGYIVLEEGVRFKALQISAILDTEPEMDEYFVCTLFNPTGGARLGVHVQTLITVLQNQAPLGLFSISAVENRATSIDIEEANRTVYLNVSRTNGIDLAVSVQWETVSETAFGMRGMDVVFSVFQSFLDESASGWCFFTLENLIYGIMLRKSSVTVYRWQGIFIPVEDLNIENPKTCEAFNIGFSPYFVITHEERNEEKPSLNSVFTFTSGFKLFLVQTIIILESSQVRYFTSDSQDYLIIASQRDDSELTQVFRWNGGSFVLHQKLPVRGVLTVALFNKGGSVFLAISQANARLNSLLFRWSGSGFINFQEVPVSGTTEVEALSSANDIYLIFAENVFLGDQNSIDIFIWEMGQSSFRYFQSVDFAAVNRIHSFTPASGIAHILLIGQDMSALYCWNSERNQFSFVLEVPSAYDVASVTVKSLNSSKNLIALVGAHSHIYELAYISSHSDFIPSSGELIFEPGEREATIAVNILDDTVPEKEESFKVQLKNPKGGAEIGINDSVTITILSNDDAYGIVAFAQNSLYKQVEEMEQDSLVTLNVERLKGTYGRITIAWEADGSISDIFPTSGVILFTEGQVLSTITLTILADNIPELSEVVIVTLTRITTEGVEDSYKGATIDQDRSKSVITTLPNDSPFGLVGWRAASVFIRVAEPKENTTTLQLQIARDKGLLGDIAIHLRAQPNFLLHVDNQATENEDYVLQETIIIMKENIKEAHAEVSILPDDLPELEEGFIVTITEVNLVNSDFSTGQPSVRRPGMEIAEIMIEENDDPRGIFMFHVTRGAGEVITAYEVPPPLNVLQVPVVRLAGSFGAVNVYWKASPDSAGLEDFKPSHGILEFADKQVTAMIEITIIDDAEFELTETFNISLISVAGGGRLGDDVVVTVVIPQNDSPFGVFGFEEKTVMIDESLSSDDPDSYVTLTVVRSPGGKGTVRLEWTIDEKAKHNLSPLNGTLHFDETESQKTIVLHTLQDTVLEEDRRFTIQLISIDEVEISPVKGSASIIIRGDKRASGEVGIAPSSRHILIGEPSAKYNGTAIISLVRGPGILGEVTVFWRIFPPSVGEFAETSGKLTMRDEQSAVIVVIQALNDDIPEEKSFYEFQLTAVSEGGVLSESSSTANITVVASDSPYGRFAFSHEQLRVSEAQRVNITIIRSSGDFGHVRLWYKTMSGTAEAGLDFVPAAGELLFEAGEMRKSLHVEILDDDYPEGPEEFSLTITKVELQGRGYDFTIQENGLQIDQPPEIGNISIVRIIIMKNDNAEGIIEFDPKYTAFEVEEDVGLIMIPVVRLHGTYGYVTADFISQSSSASPGGVDYILHGSTVTFQHGQNLSFINISIIDDNESEFEEPIEILLTGATGGAVLGRHLVSRIIIAKSDSPFGVIRFLNQSKISIANPNSTMILSLVLERTGGLLGEIQVNWETVGPNSQEALLPQNRDIADPVSGLFYFGEGEGGVRTIILTIYPHEEIEVEETFIIKLHLVKGEAKLDSRAKDVTLTIQEFGDPNGVVQFAPETLSKKTYSEPLALEGPLLITFFVRRVKGTFGEIMVYWELSSEFDITEDFLSTSGFFTIADGESEASFDVHLLPDEVPEIEEDYVIQLVSVEGGAELDLEKSITWFSVYANDDPHGVFALYSDRQSILIGQNLIRSIQINITRLAGTFGDVAVGLRISSDHKEQPIVTENAERQLVVKDGATYKVDVVPIKNQVFLSLGSNFTLQLVTVMLVGGRFYGMPTILQEAKSAVLPVSEKAANSQVGFESTAFQLMNITAGTSHVMISRRGTYGALSVAWTTGYAPGLEIPEFIVVGNMTPTLGSLSFSHGEQRKGVFLWTFPSPGWPEAFVLHLSGVQSSAPGGAQLRSGFIVAEIEPMGVFQFSTSSRNIIVSEDTQMIRLHVQRLFGFHSDLIKVSYQTTAGSAKPLEDFEPVQNGELFFQKFQTEVDFEITIINDQLSEIEEFFYINLTSVEIRGLQKFDVNWSPRLNLDFSVAVITILDNDDLAGMDISFPETTVAVAVDTTLIPVETESTTYLSTSKTTTILQPTNVVAIVTEATGVSAIPEKLVTLHGTPAVSEKPDVATVTANVSIHGTFSLGPSIVYIEEEMKNGTFNTAEVLIRRTGGFTGNVSITVKTFGERCAQMEPNALPFRGIYGISNLTWAVEEEDFEEQTLTLIFLDGERERKVSVQILDDDEPEGQEFFYVFLTNPQGGAQIVEEKDDTGFAAFAMVIITGSDLHNGIIGFSEESQSGLELREGAVMRRLHLIVTRQPNRAFEDVKVFWRVTLNKTVVVLQKDGVNLVEELQSVSGTTTCTMGQTKCFISIELKPEKVPQVEVYFFVELYEATAGAAINNSARFAQIKILESDESQSLVYFSVGSRLAVAHKKATLISLQVARDSGTGLMMSVNFSTQELRSAETIGRTIISPAISGKDFVITEGTLVFEPGQRSTVLDVILTPETGSLNSFPKRFQIVLFDPKGGARIDKVYGTANITLVSDADSQAIWGLADQLHQPVNDDILNRVLHTISMKVATENTDEQLSAMMHLIEKITTEGKIQAFSVASRTLFYEILCSLINPKRKDTRGFSHFAEVTENFAFSLLTNVTCGSPGEKSKTILDSCPYLSILALHWYPQQINGHKFEGKEGDYIRIPERLLDVQDAEIMAGKSTCKLVQFTEYSSQQWFISGNNLPTLKNKVLSLSVKGQSSQLLTNDNEVLYRIYAAEPRIIPQTSLCLLWNQAAASWLSDSQFCKVVEETADYVECACSHMSVYAVYARTDNLSSYNEAFFTSGFICISGLCLAVLSHIFCARYSMFAAKLLTHMMAASLGTQILFLASAYASPQLAEESCSAMAAVTHYLYLCQFSWMLIQSVNFWYVLVMNDEHTERRYLLFFLLSWGLPAFVVILLIVILKGIYHQSMSQIYGLIHGDLCFIPNVYAALFTAALVPLTCLVVVFVVFIHAYQVKPQWKAYDDVFRGRTNAAEIPLILYLFALISVTWLWGGLHMAYRHFWMLVLFVIFNSLQGLYVFMVYFILHNQMCCPMKASYTVEMNGHPGPSTAFFTPGSGMPPAGGEISKSTQNLIGAMEEVPPDWERASFQQGSQASPDLKPSPQNGATFPSSGGYGQGSLIADEESQEFDDLIFALKTGAGLSVSDNESGQGSQEGGTLTDSQIVELRRIPIADTHL

SEQ ID NO: 66164 - protein, 781 aa, Homo sapiens
MFLAILLLLWEAGSEAVRYSIPEETESGYSVANLAKDLGLGVGELATRGARMHYKGNKELLQLDIKTGNLLLYEKLDREVMCGATEPCILHFQLLLENPVQFFQTDLQLTDINDHAPEFPEKEMLLKIPESTQPGTVFPLKIAQDFDIGSNTVQNYTISPNSHFHVATHNRGDGRKYPELVLDKALDREERPELSLTLTALDGGAPPRSGTTTIRIVVLDNNDNAPEFLQSFYEVQVPENSPLNSLVVVVSARDLDAGAYGSVAYALFQGDEVTQPFVIDEKTAEIRLKRALDFEATPYYNVEIVATDGGGLSGKCTVAIEVVDVNDNAPELTMSTLSSPTPENAPETVVAVFSVSDPDSGDNGRMICSIQNDLPFLLKPTLKNFYTLVTQRTLDRESQAEYNITITVTDMGTPRLKTEHNITVLVSDVNDNAPAFTQTSYTLFVRENNSPALHIGSVSATDRDSGTNAQVTYSLLPPQNPHLRLASLVSINADNGHLFALRSLDYEALQAFEFRVGATDRGSPALSSEALVRVLVLDANDNSPFVLYPLQNGSAPCTELVPRAAEPGYLVTKVVAVDGDSGQNAWLSYQLLKATEPGLFSMWAHNGEVRTARLLSERDAAKHRLVVLVKDNGEPPRSATATLHVLLVDGFSQPYLPLPEAAPAQAQADSLTVYLVVALASVSSLFLFSVLLFVAVRLCRRSRAAPVGRCSVPEGPFPGHLVDVSGTGTLSQSYHYEVCLTGDSGAGEFKFLKPIIPNLLPQGAGEEIGKTAAFRNSFGLN

SEQ ID NO: 66165 - protein, 1038 aa, Homo sapiens
MEHLRHSPGPGGQRLLLPSMLLALLLLLAPSPGHATRVVYKVPEEQPPNTLIGSLAADYGFPDVGHLYKLEVGAPYLRVDGKTGDIFTTETSIDREGLRECQNQLPGDPCILEFEVSITDLVQNGSPRLLEGQIEVQDINDNTPNFASPVITLAIPENTNIGSLFPIPLASDRDAGPNGVASYELQAGPEAQELFGLQVAEDQEEKQPQLIVMGNLDRERWDSYDLTIKVQDGGSPPRASSALLRVTVLDTNDNAPKFERPSYEAELSENSPIGHSVIQVKANDSDQGANAEIEYTFHQAPEVVRRLLRLDRNTGLITVQGPVDREDLSTLRFSVLAKDRGTNPKSARAQVVVTVKDMNDNAPTIEIRGIGLVTHQDGMANISEDVAEETAVALVQVSDRDEGENAAVTCVVAGDVPFQLRQASETGSDSKKKYFLQTTTPLDYEKVKDYTIEIVAVDSGNPPLSSTNSLKVQVVDVNDNAPVFTQSVTEVAFPENNKPGEVIAEITASDADSGSNAELVYSLEPEPAAKGLFTISPETGEIQVKTSLDREQRESYELKVVAADRGSPSLQGTATVLVNVLDCNDNDPKFMLSGYNFSVMENMPALSPVGMVTVIDGDKGENAQVQLSVEQDNGDFVIQNGTGTILSSLSFDREQQSTYTFQLKAVDGGVPPRSAYVGVTINVLDENDNAPYITAPSNTSHKLLTPQTRLGETVSQVAAEDFDSGVNAELIYSIAGGNPYGLFQIGSHSGAITLEKEIERRHHGLHRLVVKVSDRGKPPRYGTALVHLYVNETLANRTLLETLLGHSLDTPLDIDIAGDPEYERSKQRGNILFGVVAGVVAVALLIALAVLVRYCRQREAKSGYQAGKKETKDLYAPKPSGKASKGNKSKGKKSKSPKPVKPVEDEDEAGLQKSLKFNLMSDAPGDSPRIHLPLNYPPGSPDLGRHYRSNSPLPSIQLQPQSPSASKKHQVVQDLPPANTFVGTGDTTSTGSEQYSDYSYRTNPPKYPSKQVGQPFQLSTPQPLPHPYHGAIWTEVWE

SEQ ID NO: 66166 - protein, 20 aa, Homo sapiens
MGGMKEESRLDIQLRLRDMF

SEQ ID NO: 66167 - protein, 81 aa, Homo sapiens [sequence omitted]

SEQ ID NO: 66168 - protein, 82 aa, Homo sapiens
MGVVTLLIWLFEVTITIGLRYLQTSLDGVSNPEESESESQGWLLERSVPETWKAFLESVKKLGKGNQVEAEGADAGQAPEAG

SEQ ID NO: 66169 - protein, 783 aa, Homo sapiens
MCFLALLFLFSILRKVAWDYGRLALVTDADRLRRQERDRVEQEYVASAMHGDSHDRYERLTSVSSSVDFDQRDNGFCSWLTAIFRIKDDEIRDKCGGDAVHYLSFQRHIIGLLVVVGVLSVGIVLPVNFSGDLLENNAYSFGRTTIANLKSGNNLLWLHTSFAFLYLLLTVYSMRRHTSKMRYKEDDLVKRTLFINGISKYAESEKIKKHFEEAYPNCTVLEARPCYNVARLMFLDAERKKAERGKLYFTNLQSKENVPTMINPKPCGHLCCCVVRGCEQVEAIEYYTKLEQKLKEDYKREKEKVNEKPLGMAFVTFHNETITAIILKDFNVCKCQGCTCRGEPRPSSCSESLHISNWTVSYAPDPQNIYWEHLSIRGFIWWLRCLVINVVLFILLFFLTTPAIIITTMDKFNVTKPVEYLNNPIITQFFPTLLLWCFSALLPTIVYYSAFFEAHWTRSGENRTTMHKCYTFLIFMVLLLPSLGLSSLDLFFRWLFDKKFLAEAAIRFECVFLPDNGAFFVNYVIASAFIGNAMDLLRIPGLLMYMIRLCLARSAAERRNVKRHQAYEFQFGAAYAWMMCVFTVVMTYSITCPIIVPFGLMYMLLKHLVDRYNLYYAYLPAKLDKKIHSGAVNQVVAAPILCLFWLLFFSTMRTGFLAPTSMFTFVVLVITIVICLCHVCFGHFKYLSAHNYKIEHTETDTVDPRSNGRPPTAAAVPKSAKYIAQVLQDSEVDGDGDGAPGSSGDEPPSSSSQDEELLMPPDALTDTDFQSCEDSLIENEIHQ

SEQ ID NO: 66170 - protein, 54 aa, Homo sapiens
MALVRALVCCLLTAWHCRSGLGLPVAPAGGRNPPPAIGIAHLMFLYLNSQQTLL

SEQ ID NO: 66171 - protein, 291 aa, Homo sapiens [sequence omitted]

SEQ ID NO: 66172 - protein, 1187 aa, Homo sapiens
MPKKKRLSAGRVPLILFLCQMISALEVPLDPKLLEDLVQPPTITQQSPKDYIIDPRENIVIQCEAKGKPPPSFSWTRNGTHFDIDKDPLVTMKPGTGTLIINIMSEGKAETYEGVYQCTARNERGAAVSNNIVVRPSRSPLWTKEKLEPITLQSGQSLVLPCRPPIGLPPPIIFWMDNSFQRLPQSERVSQGLNGDLYFSNVLPEDTREDYICYARFNHTQTIQQKQPISVKVISAKSSRERPPTFLTPEGNASNKEELRGNVLSLECIAEGLPTPIIYWAKEDGMLPKNRTVYKNFEKTLQIIHVSEADSGNYQCIAKNALGAIHHTISVRVKAAPYWITAPQNLVLSPGEDGTLICRANGNPKPRISWLTNGVPIEIAPDDPSRKIDGDTIIFSNVQERSSAVYQCNASNEYGYLLANAFVNVLAEPPRILTPANTLYQVIANRPALLDCAFFGSPLPTIEWFKGAKGSALHEDIYVLHENGTLEIPVAQKDSTGTYTCVARNKLGMAKNEVHLEIKDPTWIVKQPEYAVVQRGSMVSFECKVKHDHTLSLTVLWLKDNRELPSDERFTVDKDHLVVADVSDDDSGTYTCVANTTLDSVSASAVLSVVAPTPTPAPVYDVPNPPFDLELTDQLDKSVQLSWTPGDDNNSPITKFIIEYEDAMHKPGLWHHQTEVSGTQTTAQLKLSPYVNYSFRVMAVNSIGKSLPSEASEQYLTKASEPDKNPTAVEGLGSEPDNLVITWKPLNGFESNGPGLQYKVSWRQKDGDDEWTSVVVANVSKYIVSGTPTFVPYLIKVQALNDMGFAPEPAVVMGHSGEDLPMVAPGNVRVNVVNSTLAEVHWDPVPLKSIRGHLQGYRIYYWKTQSSSKRNRRHIEKKILTFQGSKTHGMLPGLEPFSHYTLNVRVVNGKGEGPASPDRVFNTPEGVPSAPSSLKIVNPTLDSLTLEWDPPSHPNGILTEYTLKYQPINSTHELGPLVDLKIPANKTRWTLKNLNFSTRYKFYFYAQTSAGSGSQITEEAVTTVDEAGILPPDVGAGKAMASRQVDIATQGWFIGLMCAVALLILILLIVCFIRRNKGGKYPVKEKEDAHADPEIQPMKEDDGTFGEYSDAEDHKPLKKGSRTPSDRTVKKEDSDDSLVDYGEGVNGQFNEDGSFIGQYSGKKEKEPAEGNESSEAPSPVNAMNSFV

SEQ ID NO: 66173 - protein, 29 aa, Homo sapiens
MVFFGYMVFSILFGLLADRYGRWKVNHKD

SEQ ID NO: 66174 - protein, 129 aa, Homo sapiens
MGWTMRLVTAALLLGLMMVVTGDEDENSPCAHEALLDEDTLFCQGLEVFYPELGNIGCKVVPDCNNYRQKITSWMEPIVKFPGAVDGATYILVMVDPDAPSRAEPRQRFWRHWLVTDIKMGKAEPREVE

SEQ ID NO: 66175 - protein, 404 aa, Homo sapiens
MTVSAATRVMLLFSVAGWGHLSLAGDHILASNWGAKAALQLEGPGLHSLTSCSTAKSLGKKPCVGMREAELSRVRVGPKQVNSPLAPQTCSAHGGRTGVLLSPPPKATCVFLSSNLQPGEEMEACEELALALSRGLQLDTQRSSRDSLQCSSGYSTQTTTPCCSEDTIPSQVSDYDYFSVSGDQEADQQEFDKSSTIPRNSDISQSYRRMFQAKRPASTAGLPTTLGPAMVTPGVATIRRTPSTKPSVRRGTIGAGPIPIKTPVIPVKTPTVPDLPGVLPAPPDGPEERGEHSPESPSVGEGPQGVTSMPSSMWSGQASVNPPLPGPKPSIPEEHRQAIPESEAEDQEREPPSATVSPGQIPESDPADLSPRDTPQGEDMLNAIRRGVKLKKTTTNDRSAPRFS

SEQ ID NO: 66176 - protein, 2016 aa, Homo sapiens
MTQLLAGVFLAFLALATEGGVLKKVIRHKRQSGVNATLPEENQPVVFNHVYNIKLPVGSQCSVDLESASGEKDLAPPSEPSESFQEHTVDGENQIVFTHRINIPRRACGCAAAPDVKELLSRLEELENLVSSLREQCTAGAGCCLQPATGRLDTRPFCSGRGNFSTEGCGCVCEPGWKGPNCSEPECPGNCHLRGRCIDGQCICDDGFTGEDCSQLACPSDCNDQGKCVNGVCICFEGYAGADCSREICPVPCSEEHGTCVDGLCVCHDGFAGDDCNKPLCLNNCYNRGRCVENECVCDEGFTGEDCSELICPNDCFDRGRCINGTCYCEEGFTGEDCGKPTCPHACHTQGRCEEGQCVCDEGFAGVDCSEKRCPADCHNRGRCVDGRCECDDGFTGADCGELKCPNGCSGHGRCVNGQCVCDEGYTGEDCSQLRCPNDCHSRGRCVEGKCVCEQGFKGYDCSDMSCPNDCHQHGRCVNGMCVCDDGYTGEDCRDRQCPRDCSNRGLCVDGQCVCEDGFTGPDCAELSCPNDCHGQGRCVNGQCVCHEGFMGKDCKEQRCPSDCHGQGRCVDGQCICHEGFTGLDCGQHSCPSDCNNLGQCVSGRCICNEGYSGEDCSEVSPPKDLVVTEVTEETVNLAWDNEMRVTEYLVVYTPTHEGGLEMQFRVPGDQTSTIIQELEPGVEYFIRVFAILENKKSIPVSARVATYLPAPEGLKFKSIKETSVEVEWDPLDIAFETWEIIFRNMNKEDEGEITKSLRRPETSYRQTGLAPGQEYEISLHIVKNNTRGPGLKRVTTTRLDAPSQIEVKDVTDTTALITWFKPLAEIDGIELTYGIKDVPGDRTTIDLTEDENQYSIGNLKPDTEYEVSLISRRGDMSSNPAKETFTTGLDAPRNLRRVSQTDNSITLEWRNGKAAIDSYRIKYAPISGGDHAEVDVPKSQQATTKTTLTGLRPGTEYGIGVSAVKEDKESNPATINAATELDTPKDLQVSETAETSLTLLWKTPLAKFDRYRLNYSLPTGQWVGVQLPRNTTSYVLRGLEPGQEYNVLLTAEKGRHKSKPARVKASTEQAPELENLTVTEVGWDGLRLNWTAADQAYEHFIIQVQEANKVEAARNLTVPGSLRAVDIPGLKAATPYTVSIYGVIQGYRTPVLSAEASTGETPNLGEVVVAEVGWDALKLNWTAPEGAYEYFFIQVQEADTVEAAQNLTVPGGLRSTDLPGLKAATHYTITIRGVTQDFSTTPLSVEVLTEDLPQLGDLAVSEVGWDGLRLNWTAADNAYEHFVIQVQEVNKVEAAQNLTLPGSLRAVDIPGLEAATPYRVSIYGVIRGYRTPVLSAEASTAKEPEIGNLNVSDITPESFNLSWMATDGIFETFTIEIIDSNRLLETVEYNISGAERTAHISGLPPSTDFIVYLSGLAPSIRTKTISATATTEAEPEVDNLLVSDATPDGFRLSWTADEGVFDNFVLKIRDTKKQSEPLEITLLAPERTRDITGLREATEYEIELYGISKGRRSQTVSAIATTAMGSPKEVIFSDITENSATVSWRAPTAQVESFRITYVPITGGTPSMVTVDGTKTQTRLVKLIPGVEYLVSIIAMKGFEESEPVSGSFTTALDGPSGLVTANITDSEALARWQPAIATVDSYVISYTGEKVPEITRTVSGNTVEYALTDLEPATEYTLRIFAEKGPQKSSTITAKFTTDLDSPRDLTATEVQSETALLTWRPPRASVTGYLLVYESVDGTVKEVIVGPDTTSYSLADLSPSTHYTAKIQALNGPLRSNMIQTIFTTIGLLYPFPKDCSQAMLNGDTTSGLYTIYLNGDKAEALEVFCDMTSDGGGWIVFLRRKNGRENFYQNWKAYAAGFGDRREEFWLGLDNLNKITAQGQYELRVDLRDHGETAFAVYDKFSVGDAKTRYKLKVEGYSGTAGDSMAYHNGRSFSTFDKDTDSAITNCALSYKGAFWYRNCHRVNLMGRYGDNNHSQGVNWFHWKGHEHSIQFAEMKLRPSNFRNLEGRRKRA

SEQ ID NO: 66177 - protein, 96 aa, Homo sapiens
MPLGLLWLGLALLGALHAQAQDSTSDLIPAPPLSKVPLQQNFQDNQVRADISWGCESQTDVTGKGWPKLRDPVVHLAVLPGIHLCSSFLCSLEQRL

SEQ ID NO: 66178 - protein, 1537 aa, Homo sapiens
MLLEIIFLYYAYFEMAPSDLLVLTKMFKEQGFGSRQTNRHLVDETMDPFVDRIGYFSALILVEGMDIESLHKCALDDRRELHQFAQDGLICQDMDCLMLTFGDIPHHAPVLLAWALLRHTLNPEETSSVVRKIGGTAIQLNVFQYLTRLLQSLASGGNDCTTSTACMCVYGLLSFVLTSLELHTLGNQQDIIDTACEVLADPSLPELFWGTEPTSGLGIILDSVCGMFPHLLSPLLQLLRALVSGKSTAKKVYSFLDKMSFYNELYKHKPHDVISHEDGTLWRRQTPKLLYPLGGQTNLRIPQGTVGQVMLDDRAYLVRWEYSYSSWTLFTCEIEMLLHVVSTADVIQHCQRVKPIIDLVHKVISTDLSIADCLLPITSRIYMLLQRLTTVISPPVDVIASCVNCLTVLAARNPAKVWTDLRHTGFLPFVAHPVSSLSQMISAEGMNAGGYGNLLMNSEQPQGEYGVTIAFLRLITTLVKGQLGSTQSQGLVPCVMFVLKEMLPSYHKWRYNSHGVREQIGCLILELIHAILNLCHETDLHSSHTPSLQFLCICSLAYTEAGQTVINIMGIGVDTIDMVMAAQPRSDGAEGQGQGQLLIKTVKLAFSVTNNVIRLKPPSNVVSPLEQALSQHGAHGNNLIAVLAKYIYHKHDPALPRLAIQLLKRLATVAPMSVYACLGNDAAAIRDAFLTRLQSKIEDMRIKVMILEFLTVAVETQPGLIELFLNLEVKDGSDGSKEFSLGMWSCLHAVLELIDSQQQDRYWCPPLLHRAAIAFLHALWQDRRDSAMLVLRTKPKFWENLTSPLFGTLSPPSETSEPSILETCALIMKIICLEIYYVVKGSLDQSLKDTLKKFSIEKRFAYWSGYVKSLAVHVAETEGSSCTSLLEYQMLVSAWRMLLIIATTHADIMHLTDSVVRRQLFLDVLDGTKALLLVPASVNCLRLGSMKCTLLLILLRQWKRELGSVDEILGPLTEILEGVLQADQQLMEKTKAKVFSAFITVLQMKEMKVSDIPQYSQLVLNVCETLQEEVIALFDQTRHSLALGSATEDKDSMETDDCSRSRHRDQRDGVCVLGLHLAKELCEVDEDGDSWLQVTRRLPILPTLLTTLEVSLRMKQNLHFTEATLHLLLTLARTQQGATAVAGAGITQSICLPLLSVYQLSTNGTAQTPSASRKSLDAPSWPGVYRLSMSLMEQLLKTLRYNFLPEALDFVGVHQERTLQCLNAVRTVQSLACLEEADHTVGFILQLSNFMKEWHFHLPQLMRDIQVNLGYLCQACTSLLHSRKMLQHYLQNKNGDGLPSAVAQRVQRPPSAASAAPSSSKQPAADTEASEQQALHTVQYGLLKILSKTLAALRHFTPDVCQILLDQSLDLAEYNFLFALSFTTPTFDSEVAPSFGTLLATVNVALNMLGELDKKKEPLTQAVGLSTQAEGTRTLKSLLMFTMENCFYLLISQAMRYLRDPAVHPRDKQRMKQELSSELSTLLSSLSRYFRRGAPSSPATGVLPSPQGKSTSLSKASPESQEPLIQLVQAFVRHMQR

SEQ ID NO: 66179 - protein, 146 aa, Homo sapiens [sequence omitted]

SEQ ID NO: 66180 - protein, 355 aa, Homo sapiens
MRLLCGLWLWLSLLKVLQAQTPTPLPLPPPMQSFQGNQFQGEWFVLGLAGNSFRPEHRALLNAFTATFELSDDGRFEVWNAMTRGQHCDTWSYVLIPAAQPGQFTVDHGVEPGADREETRVVDSDYTQFALMLSRRHTSRLAVLRISLLGRSWLLPPGTLDQFICLGRAQGLSDDNIVFPDVTGNMVHLQACWAVGTGPAGMSLVDPRGAGPSVYPGSSAPACAQGSPGSWVPVLNPGSEPPPAAPGPLSWATSSHPGSPVPGHLLPPQVPCPGPPPPAPPAPGPLSRPTSSHPGSPVLGYLLPPQVPCPGPSPPSGSPVLGHLLPSPIPAHKELGLIPGGALDLSSLPWVAAPA

SEQ ID NO: 66181 - protein, 14 aa, Homo sapiens
MKIIYNATLLFLVS

SEQ ID NO: 66182 - protein, 23 aa, Homo sapiens
MNFPYFYIVASVMLNVRLQVRIE

SEQ ID NO: 66183 - protein, 303 aa, Homo sapiens
IFRILILGLAGESVWGDEQSDFECNTAQPGCTNVCYDQAFPISHIRYWVLQFLFVSTPTLVYLGHVIYLSRREERLRQKEGELRALPAKDPQVERALAAVERQMAKISVAEDGRLRIRGALMGTYVASVLCKSVLEAGFLYGQWRLYGWTMEPVFVCQRAPCPYLVDCFVSRPTEKTIFIIFMLVVGLISLVLNLLELVHLLCRCLSRGMRARQGQDAPPTQGTSSDPYTDQVFFYLPVGQGPSSPPCPTYNGLSSSEQNWANLTTEERLASSRPPLFLDPPPQNGQKPPSRPSSSASKKQYV

SEQ ID NO: 66184 - protein, 219 aa, Homo sapiens
RRPASPLGLARPRAMEFLWAPLLGLCCSLAAADRHTVFWNSSNPKFRNEDYTIHVQLNDYVDIICPHYEDHSVADAAMEQYILYLVEHEEYQLCQPQSKDQVRWQCNRPSAKHGPEKLSEKFQRFTPFTLGKEFKEGHSYYYISKPIHQHEDRCLRLKVTVSGKITHSPQAHDNPQEKRLAADDPEVRVLHSIGHSAAPRLFPLAWTVLLLPLLLLQTP

SEQ ID NO: 66185 - protein, 983 aa, Homo sapiens
LAMLRRPAPALAPAARLLLAGLLCGGGVWAARVNKHKPWLEPTYHGIVTENDNTVLLDPPLIALDKDAPLRFAESFEVTVTKEGEICGFKIHGQNVPFDAVVVDKSTGEGVIRSKEKLDCELQKDYSFTIQAYDCGKGPDGTNVKKSHKATVHIQVNDVNEYAPVFKEKSYKATVIEGKQYDSILRVEAVDADCSPQFSQICSYEIITPDVPFTVDKDGYIKNTEKLNYGKEHQYKLTVTAYDCGKKRATEDVLVKISIKPTCTPGWQGWNNRIEYEPGTGALAVFPNIHLETCDEPVASVQATVELETSHIGKGCDRDTYSEKSLHRLCGAAAGTAELLPSPSGSLNWTMGLPTDNGHDSDQVFEFNGTQAVRIPDGVVSVSPKEPFTISVWMRHGPFGRKKETILCSSDKTDMNRHHYSLYVHGCRLIFLFRQDPSEEKKYRPAEFHWKLNQVCDEEWHHYVLNVEFPSVTLYVDGTSHEPFSVTEDYPLHPSKIETQLVVGACWQEFSGVENDNETEPVTVASAGGDLHMTQFFRGNLAGLTLRSGKLADKKVIDCLYTCKEGLDLQVLEDSGRGVQIQAHPSQLVLTLEGEDLGELDKAMQHISYLNSRQFPTPGIRRLKITSTIKCFNEATCISVPPVDGYVMVLQPEEPKISLSGVHHFARAASEFESSEGVFLFPELRIISTITREVEPEGDGAEDPTVQESLVSEEIVHDLDTCEVTVEGEELNHEQESLEVDMARLQQKGIEVSSSELGMTFTGVDTMASYEEVLHLLRYRNWHARSLLDRKFKLICSELNGRYISNEFKVEVNVIHTANPMEHANHMAAQPQFVHPEHRSFVDLSGHNLANPHPFAVVPSTATVVIVVCVSFLVFMIILGVFRIRAAHRRTMRDQDTGKENEMDWDDSALTITVNPMETYEDQHSSEEEEEEEEEEESEDGEEEDDITSAESESSEEEEGEQGDPQNATRQQQLEWDDSTLSY

SEQ ID NO: 66186 - protein, 293 aa, Homo sapiens
VMFPLQMIYLVVKAAVGLVLPAKLRDLSRENVLITGGGRGIGRQLAREFAERGARKIVLWGRTEKCLKETTEEIRQMGTECHYFICDVGNREEVYQTAKAVREKVGDITILVNNAAVVHGKSLMDSDDDALLKSQHINTLGQFWTTKAFLPRMLELQNGHIVCLNSVLALSAIPGAIDYCTSKASAFAFMESLTLGLLDCPGVSATTVLPFHTSTEMFQGMRVRFPNLFPPLKPETVARRTVEAVQLNQALLLLPWTMHALVILKSILPQAALEEIHKFSGTYTCMNTFKGRT

SEQ ID NO: 66187 - protein, 15 aa, Homo sapiens
LSLVFYSPWLLLISR

SEQ ID NO: 66188 - protein, 80 aa, Homo sapiens
IAVAVFLVLVAIAFAVNHFWCQEEPEPAHMILTVGNKADGVLVGTDGRYSSMAASFRSSEHENAYENVPEEEGKVRSTPM

SEQ ID NO: 66189 - protein, 250 aa, Homo sapiens
VILVVLVVAVVASSVNSYYSSPAQQVPKNPALEAFLAQFSQLEDKFPGQSSFLWQRGRKFLQKHLNASNPTEPATIIFTAAREGRETLKCLSHHVADAYTSSQKVSPIQIDGAGRTWQDSDTVKLLVDLELSYGFENGQKAAVVHHFESFPAGSTLIFYKYCDHENAAFKDVALVLTVLLEEETLEASVGPRETEEKVRDLLWAKFTNSDTPTSFNHMDSDKLSGLWSRISHLVLPVQPVSSIEEQGCLF

SEQ ID NO: 66190 - protein, 22 aa, Homo sapiens
IGSLTAVLFLTGTWAGPQTQEL

SEQ ID NO: 66191 - protein, 13 aa, Homo sapiens
MRVPAQLLGLLLL

SEQ ID NO: 66192 - protein, 438 aa, Homo sapiens
VPSSPRALFLLLLILACPEPRASQNCLSKQQLLSAIRQLQQLLKGQETRFAEGIRHMKSRLAALQNSVGRVGPDALPVSCPALNTPADGRKFGSKYLVDHEVHFTCNPGFRLVGPSSVVCLPNGTWTGEQPHCRGISECSSQPCQNGGTCVEGVNQYRCICPPGRTGNRCQHQAQTAAPEGSVAGDSAFSRAPRCAQVERAQHCSCEAGFHLSGAAGDSVCQDVNECELYGQEGRPRLCMHACVNTPGSYRCTCPGGYRTLADGKSCEDVDECVGLQPVCPQGTTCINTGGSFQCVSPECPEGSGNVSYVKTSPFQCERNPCPMDSRPCRHLPKTISFHYLSLPSNLKTPITLFRMATASAPGRAGPNSLRFGIVGGNSRGHFVMQRSDRQTGDLILVQNLEGPQTLEVDVDMSEYLDRSFQANHVSKVTIFVSPYDF

SEQ ID NO: 66193 - protein, 36 aa, Homo sapiens; identical to SEQ ID NO: 20612

SEQ ID NO: 66194 - protein, 18 aa, Homo sapiens
MRVPAQLLGLLLLWLTCR

SEQ ID NO: 66195 - protein, 58 aa, Homo sapiens
VIASTVILTVLGAIIWFLYKKHSDSRFTTVFSTAPQSPYNEDCVLVVGEENEYPVQFD

SEQ ID NO: 66196 - protein, 458 aa, Homo sapiens
KCTLYFLVLLPFFMILVTAELEESPEDSIQLGVTRNKIMTAQYECYQKIMQDPIQQAEGVYCNRTWDGWLCWNDVAAGTESMQLCPDYFQDFDPSEKVTKICDQDGNWFRHPASNRTWTNYTQCNVNTHEKVKTALNLFYLTIIGHGLSIASLLISLGIFFYFKSLSCQRITLHKNLFFSFVCNSVVTIIHLTAVANNQALVATNPVSCKVSQFIHLYLMGCNYFWMLCEGIYLHTLIVVAVFAEKQHLMWYYFLGWGFPLIPACIHAIARSLYYNDNCWISSDTHLLYIIHGPICAALLVNLFFLLNIVRVLITKLKVTHQAESNLYMKAVRATLILVPLLGIEFVLIPWRPEGKIAEEVYDYIMHILMHFQGLLVSTIFCFFNGEVQAILRRNWNQYKIQFGNSFSNSEALRSASYTVSTISDGPGYSHDCPSEHLNGKSIHDIENVLLKPENLYN

SEQ ID NO: 66197 - protein, 46 aa, Homo sapiens
VALTARVALASVTALGWPSQQPSVGPFLLYSVQTSPRQGQGTGWSC

SEQ ID NO: 66198 - protein, 40 aa, Homo sapiens
MNTVNILSTMLEVLYLWLIMARTPMDLSSSSPMANSHIWT

SEQ ID NO: 66199 - protein, 48 aa, Homo sapiens
LLLLTSALRLFSIGVEAPPVLSCLWREANLPLDQREEKAETGSNAVDW

SEQ ID NO: 66200 - protein, 140 aa, Homo sapiens
LEMWSLGVTLYTLVFEENPFCELEETVEAAIHPPYLVSKELMSLVSGLLQPVPERRTTLEKLVTDPWVTQPVNLADYTWEEVFRVNKPESGVLSAASLEMGNRSLSDVAQAQELCGGPVPGEAPNGQGCLHPGDPRLLTS

SEQ ID NO: 66201 - protein, 4664 aa, Homo sapiens
TARPGTVAEMDRGPAAVACTLLLALVACLAPASGQECDSAHFRCGSGHCIPADWRCDGTKDCSDDADEIGCAVVTCQQGYFKCQSEGQCIPNSWVCDQDQDCDDGSDERQDCSQSTCSSHQITCSNGQCIPSEYRCDHVRDCPDGADENDCQYPTCEQLTCDNGACYNTSQKCDWKVDCRDSSDEINCTEICLHNEFSCGNGECIPRAYVCDHDNDCQDGSDEHACNYPTCGGYQFTCPSGRCIYQNWVCDGEDDCKDNGDEDGCESGPHDVHKCSPREWSCPESGRCISIYKVCDGILDCPGREDENNTSTGKYCSMTLCSALNCQYQCHETPYGGACFCPPGYIINHNDSRTCVEFDDCQIWGICDQKCESRPGRHLCHCEEGYILERGQYCKANDSFGEASIIFSNGRDLLIGDIHGRSFRILVESQNRGVAVGVAFHYHLQRVFWTDTVQNKVFSVDINGLNIQEVLNVSVETPENLAVDWVNNKIYLVETKVNRIDMVNLDGSYRVTLITENLGHPRGIAVDPTVGYLFFSDWESLSGEPKLERAFMDGSNRKDLVKTKLGWPAGVTLDMISKRVYWVDSRFDYIETVTYDGIQRKTVVHGGSLIPHPFGVSLFEGQVFFTDWTKMAVLKANKFTETNPQVYYQASLRPYGVTVYHSLRQPYATNPCKDNNGGCEQVCVLSHRTDNDGLGFRCKCTFGFQLDTDERHCIAVQNFLIFSSQVAIRGIPFTLSTQEDVMVPVSGNPSFFVGIDFDAQDSTIFFSDMSKHMIFKQKIDGTGREILAANRVENVESLAFDWISKNLYWTDSHYKSISVMRLADKTRRTVVQYLNNPRSVVVHPFAGYLFFTDWFRPAKIMRAWSDGSHLLPVINTTLGWPNGLAIDWAASRLYWVDAYFDKIEHSTFDGLDRRRLGHIEQMTHPFGLAIFGEHLFFTDWRLGAIIRVRKADGGEMTVIRSGIAYILHLKSYDVNIQTGSNACNQPTHPNGDCSHFCFPVPNFQRVCGCPYGMRLASNHLTCEGDPTNEPPTEQCGLFSFPCKNGRCVPNYYLCDGVDDCHDNSDEQLCGTLNNTCSSSAFTCGHGECIPAHWRCDKRNDCVDGSDEHNCPTHAPASCLDTQYTCDNHQCISKNWVCDTDNDCGDGSDEKNCNSTETCQPSQFNCPNHRCIDLSFVCDGDKDCVDGSDEVGCVLNCTASQFKCASGDKCIGVTNRCDGVFDCSDNSDEAGCPTRPPGMCHSDEFQCQEDGICIPNFWECDGHPDCLYGSDEHNACVPKTCPSSYFHCDNGNCIHRAWLCDRDNDCGDMSDEKDCPTQPFRCPSWQWQCLGHNICVNLSVVCDGIFDCPNGTDESPLCNGNSCSDFNGGCTHECVQEPFGAKCLCPLGFLLANDSKTCEDIDECDILGSCSQHCYNMRGSFRCSCDTGYMLESDGRTCKVTASESLLLLVASQNKIIADSVTSQVHNIYSLVENGSYIVAVDFDSISGRIFWSDATQGKTWSAFQNGTDRRVVFDSSIILTETIAIDWVGRNLYWTDYALETIEVSKIDGSHRTVLISKNLTNPRGLALDPRMNEHLLFWSDWGHHPRIERASMDGSMRTVIVQDKIFWPCGLTIDYPNRLLYFMDSYLDYMDFCDYNGHHRRQVIASDLIIRHPYALTLFEDSVYWTDRATRRVMRANKWHGGNQSVVMYNIQWPLGIVAVHPSKQPNSVNPCAFSRCSHLCLLSSQGPHFYSCVCPSGWSLSPDLLNCLRDDQPFLITVRQHIIFGISLNPEVKSNDAMVPIAGIQNGLDVEFDDAEQYIYWVENPGEIHRVKTDGTNRTVFASISMVGPSMNLALDWISRNLYSTNPRTQSIEVLTLHGDIRYRKTLIANDGTALGVGFPIGITVDPARGKLYWSDQGTDSGVPAKIASANMDGTSVKTLFTGNLEHLECVTLDIEEQKLYWAVTGRGVIERGNVDGTDRMILVHQLSHPWGIAVHDSFLYYTDEQYEVIERVDKATGANKIVLRDNVPNLRGLQVYHRRNAAESSNGCSNNMNACQQICLPVPGGLFSCACATGFKLNPDNRSCSPYNSFIVVSMLSAIRGFSLELSDHSETMVPVAGQGRNALHVDVDVSSGFIYWCDFSSSVASDNAIRRIKPDGSSLMNIVTHGIGENGVRGIAVDWVAGNLYFTNAFVSETLIEVLRINTTYRRVLLKVTVDMPRHIVVDPKNRYLFWADYGQRPKIERSFLDCTNRTVLVSEGIVTPRGLAVDRSDGYVYWVDDSLDIIARIRINGENSEVIRYGSRYPTPYGITVFENSIIWVDRNLKKIFQASKEPENTEPPTVIRDNINWLRDVTIFDKQVQPRSPAEVNNNPCLENNGGCSHLCFALPGLHTPKCDCAFGTLQSDGKNCAISTENFLIFALSNSLRSLHLDPENHSPPFQTINVERTVMSLDYDSVSDRIYFTQNLASGVGQISYATLSSGIHTPTVIASGIGTADGIAFDWITRRIYYSDYLNQMINSMAEDGSNRTVIARVPKPRAIVLDPCQGYLYWADWDTHAKIERATLGGNFRVPIVNSSLVMPSGLTLDYEEDLLYWVDASLQRIERSTLTGVDREVIVNAAVHAFGLTLYGQYIYWTDLYTQRIYRANKYDGSGQIAMTTNLLSQPRGINTVVKNQKQQCNNPCEQFNGGCSHICAPGPNGAECQCPHEGNWYLANNRKHCIVDNGERCGASSFTCSNGRCISEEWKCDNDNDCGDGSDEMESVCALHTCSPTAFTCANGRCVQYSYRCDYYNDCGDGSDEAGCLFRDCNATTEFMCNNRRCIPREFICNGVDNCHDNNTSDEKNCPDRTCQSGYTKCHNSNICIPRVYLCDGDNDCGDNSDENPTYCTTHTCSSSEFQCASGRCIPQHWYCDQETDCFDASDEPASCGHSERTCLADEFKCDGGRCIPSEWICDGDNDCGDMSDEDKRHQCQNQNCSDSEFLCVNDRPPDRRCIPQSWVCDGDVDCTDGYDENQNCTRRTCSENEFTCGYGLCIPKIFRCDRHNDCGDYSDERGCLYQTCQQNQFTCQNGRCISKTFVCDEDNDCGDGSDELMHLCHTPEPTCPPHEFKCDNGRCIEMMKLCNHLDDCLDNSDEKGCGINECHDPSISGCDHNCTDTLTSFYCSCRPGYKLMSDKRTCVDIDECTEMPFVCSQKCENVIGSYICKCAPGYLREPDGKTCRQNSNIEPYLIFSNRYYLRNLTIDGYFYSLILEGLDNVVALDFDRVEKRLYWIDTQRQVIERMFLNKTNKETIINHRLPAAESLAVDWVSRKLYWLDARLDGLFVSDLNGGHRRMLAQHCVDANNTFCFDNPRGLALHPQYGYLYWADWGHRAYIGRVGMDGTNKSVIISTKLEWPNGITIDYTNDLLYWADAHLGYIEYSDLEGHHRHTVYDGALPHPFAITIFEDTIYWTDWNTRTVEKGNKYDGSNRQTLVNTTHRPFDIHVYHPYRQPIVSNPCGTNNGGCSHLCLIKPGGKGFTCECPDDFRTLQLSGSTYCMPMCSSTQFLCANNEKCIPIWWKCDGQKDCSDGSDELALCPQRFCRLGQFQCSDGNCTSPQTLCNAHQNCPDGSDEDRLLCENHHCDSNEWQCANKRCIPESWQCDTFNDCEDNSDEDSSHCASRTCRPGQFRCANGRCIPQAWKCDVDNDCGDHSDEPIEECMSSAHLCDNFTEFSCKTNYRCIPKWAVCNGVDDCRDNSDEQGCEERTCHPVGDFRCKNHHCIPLRWQCDGQNDCGDNSDEENCAPRECTESEFRCVNQQCIPSRWICDHYNDCGDNSDERDCEMRTCHPEYFQCTSGHCVHSELKCDGSADCLDASDEADCPTRFPDGAYCQATMFECKNHVCIPPYWKCDGDDDCGDGSDEELHLCLDVPCNSPNRFRCDNNRCIYSHEVCNGVDDCGDGTDETEEHCRKPTPKPCTEYEYKCGNGHCIPHDNVCDDADDCGDWSDELGCNKGKERTCAENICEQNCTQLNEGGFICSCTAGFETNVFDRTSCLDINECEQFGTCPQHCRNTKGSYECVCADGFTSMSDRPGKRCAAEGSSPLLLLPDNVRIRKYNLSSERFSEYLQDEEYIQAVDYDWDPKDIGLSVVYYTVRGEGSRFGAIKRAYIPNFESGRNNLVQEVDLKLKYVMQPDGIAVDWVGRHIYWSDVKNKRIEVAKLDGRYRKWLISTDLDQPAAIAVNPKLGLMFWTDWGKEPKIESAWMNGEDRNILVFEDLGWPTGLSIDYLNNDRIYWSDFKEDVIETIKYDGTDRRVIAKEAMNPYSLDIFEDQLYWISKEKGEVWKQNKFGQGKKEKTLVVNPWLTQVRIFHQLRYNKSVPNLCKQICSHLCLLRPGGYSCACPQGSSFIEGSTTECDAAIELPINLPPPCRCMHGGNCYFDETDLPKCKCPSGYTGKYCEMAFSKGISPGTTAVAVLLTILLIVVIGALAIAGFFHYRRTGSLLPALPKLPSLSSLVKPSENGNGVTFRSGADLNMDIGVSGFGPETAIDRSMAMSEDFVMEMGKQPIIFENPMYSARDSAVKVVQPIQVTVSENVDNKNYGSPINPSEIVPETNPTSPAADGTQVTKWNLFKRKSKQTTNFENPIYAQMENEQKESVAATPPPSPSLPAKPKPPSRRDPTPTYSATEDTFKDTANLVKEDSEV

SEQ ID NO: 66202 - protein, 265 aa, Homo sapiens
VIRMPFSHLSTYSLVWVMAAVVLCTAQVQVVTQDEREQLYTPASLKCSLQNAQEALIVTWQKKKAVSPENMVTFSENHGVVIQPAYKDKINITQLGLQNSTITFWNITLEDEGCYMCLFNTFGFGKISGTACLTVYVQPIVSLHYKFSEDHLNITCSATARPAPMVFWKVPRSGIENSTVTLSHPNGTTSVTSILHIKDPKNQVGKEVICQVLHLGTVTDFKQTVNKGYWFSVPLLLSIVSLVILLVLISILLYWKRHRNQDREP

SEQ ID NO: 66203 - protein, 508 aa, Homo sapiens
LLFPLLLFSRLCGALAGPIIVEPHVTAVWGKNVSLKCLIEVNETITQISWEKIHGKSSQTVAVHHPQYGFSVQGEYQGRVLFKNYSLNDATITLHNIGFSDSGKYICKAVTFPLGNAQSSTTVTVLVEPTVSLIKGPDSLIDGGNETVAAICIAATGKPVAHIDWEGDLGEMESTTTSFPNETATIISQYKLFPTRFARGRRITCVVKHPALEKDIRYSFILDIQYAPEVSVTGYDGNWFVGRKGVNLKCNADANPPPFKSVWSRLDGQWPDGLLASDNTLHFVHPLTFNYSGVYICKVTNSLGQRSDQKVIYISDPPTTTTLQPTIQWHPSTADIEDLATEPKKLPFPLSTLATIKDDTIATIIASVVGGALFIVLVSVLAGIFCYRRRRTFRGDYFAKNYIPPSDMQKESQIDVLQQDELDSYPDSVKKENKNPVNNLIRKDYLEEPEKTQWNNVENLNRFERPMDYYEDLKMGMKFVSDEHYDENEDDLVSHVDGSVISRREWYV

SEQ ID NO: 66204 - protein, 954 aa, Homo sapiens
LDYTMTWRMGPRFTMLLAMWLVCGSEPHPHATIRGSHGGRKVPLVSPDSSRPARFLRHTGRSRGIERSTLEEPNLQPLQRRRSVPVLRLARPTEPPARSDINGAAVRPEQRPAARGSPREMIRDEGSSARSRMLRFPSGSSSPNILASFAGKNRVWVISAPHASEGYYRLMMSLLKDDVYCELAERHIQQIVLFHQAGEEGGKVRRITSEGQILEQPLDPSLIPKLMSFLKLEKGKFGMVLLKKTLQVEERYPYPVRLEAMYEVIDQGPIRRIEKIRQKGFVQKCKASGVEGQVVAEGNDGGGGAGRPSLGSEKKKEDPRRAQVPPTRESRVKVLRKLAATAPALPQPPSTPRATTLPPAPATTVTRSTSRAVTVAARPMTTTAFPTTQRPWTPSPSHRPPTTTEVITARRPSVSENLYPPSRKDQHRERPQTTRRPSKATSLESFTNAPPTTISEPSTRAAGPGRFRDNRMDRREHGHRDPNVVPGPPKPAKEKPPKKKAQDKILSNEYEEKYDLSRPTASQLEDELQVGNVPLKKAKESKKHEKLEKPEKEKKKKMKNENADKLLKSEKQMKKSEKKSKQEKEKSKKKKGGKTEQDGYQKPTNKHFTQSPKKSVADLLGSFEGKRRLLLITAPKAENNMYVQQRDEYLESFCKMATRKISVITIFGPVNNSTMKIDHFQLDNEKPMRVVDDEDLVDQRLISELRKEYGMTYNDFFMVLTDVDLRVKQYYEVPITMKSVFDLIDTFQSRIKDMEKQKKEGIVCKEDKKQSLENFLSRFRWRRRLLVISAPNDEDWAYSQQLSALSGQACNFGLRHITILKLLGVGEEVGGVLELFPINGSSVVEREDVPAHLVKDIRNYFQVSPEYFSMLLVGKDGNVKSWYPSPMWSMVIVYDLIDSMQLRRQEMAIQQSLGMRCPEDEYAGYGYHSYHQGYQDGYQDDYRHHESYHHGYPY

SEQ ID NO: 66205 - protein, 22 aa, Homo sapiens
MDSLGRQAVITTHTVLPGRHRL

SEQ ID NO: 66206 - protein, 248 aa, Homo sapiens
LERCPTPAMLALLCSCLLLAAGASDAWTGEDSAEPNSDSAEWIRDMYAKVTEIWQEVMQRRDDDGALHAACQVQPSATLDAAQPRVTGVVLFRQLAPRAKLDAFFALEGFPTEPNSSSRAIHVHQFGDLSQGCESTGPHYNPLAVPHPQHPGDFGNFAVRDGSLWRYRAGLAASLAGPHSIVGRAVVVHAGEDDLGRGGNQASVENGNAGRRLACCVVGVCGPGLWERQAREHSERKKRRRESECKAA

SEQ ID NO: 66207 - protein, 88 aa, Homo sapiens
TFEMKKVLLLITAILAVAVGFPVSQDQEREKRSISDSDELASGFFVFPYPYPFRPLPPIPFPRFPWFRRNFPIPIPESAPTTPLPSEK

SEQ ID NO: 66208 - protein, 345 aa, Homo sapiens
LGKALAAVSLSLALASVTIRSSRCRGIQAFRNSFSSSWFHLNTNVMSGSNGSKENSHNKARTSPYPGSKVERSQVPNEKVGWLVEWQDYKPVEYTAVSVLAGPRWADPQISESNFSPKFNEKDGHVERKSKNGLYEIENGRPRNPAGRTGLVGRGLLGRWGPNHAADPIITRWKRDSSGNKIMHPVSGKHILQFVAIKRKDCGEWAIPGGMVDPGEKISATLKREFGEEALNSLQKTSAEKREIEEKLHKLFSQDHLVIYKGYVDDPRNTDNAWMETEAVNYHDETGEIMDNLMLEAGDDAGKVKWVDINDKLKLYASHSQFIKLVAEKRDAHWSEDSEADCHAL

SEQ ID NO: 66209 - protein, 52 aa, Homo sapiens
IRFLLGFLELWSVWASTSDSCAGSAGPEHGCVRSGSSQKWLQKKILSTFQGT

SEQ ID NO: 66210 - protein, 10 aa, Homo sapiens
MVKRVLLLTV

SEQ ID NO: 66211 - protein, 47 aa, Homo sapiens
IILVIGVCTCCHPLRKRRKRKKKEEEMETLGKDITPINEDIEETNIA

SEQ ID NO: 66212 - protein, 25 aa, Homo sapiens
RPGHRRGEDPFLRRQGRNPCRARKL

SEQ ID NO: 66213 - protein, 270 aa, Homo sapiens
KILTPSTGTMELLQVTILFLLPSICSSNSTGVLEAANNSLVVTTTKPSITTPNTESLQKNVVTPTTGTTPKGTITNELLKMSLMSTATFLTSKDEGLKATTTDVRKNDSIISNVTVTSVTLPNAVSTLQSSKPKTETQSSIKTTEIPGSVLQPDASPSKTGTLTSIPVTIPENTSQSQVIGTEGGKNASTSATSRSYSSIILPVVIALIVITLSVFVLVGLYRMCWKADPGTPENGNDQPQSDKESVKLLTVKTISHESGEHSAQGKTKN

SEQ ID NO: 66214 - protein, 20 aa, Homo sapiens
RLTPCYILSCLALAGFAESS

SEQ ID NO: 66215 - protein, 116 aa, Homo sapiens
MRGRCSAGQKVLASLIIRLALAETFCLNCGIIALDEPTTNLDRENIESLAHALVEIIKSRSQQRNFQLLVITHDEDFVELLGRSEYVEKFYRIKKNIDQCSEIVKCSVSSLGFNVH

SEQ ID NO: 66216 - protein, 565 aa, Homo sapiens
LQLQPRAAPPRPDTSSPACSSRMAAAKAEMQLMSPLQISDPFGSFPHSPTMDNYPKLEEMMLLSNGAPQFLGAAGAPEGSGSNSSSSSSGGGGGGGGGSNSSSSSSTFNPQADTGEQPYEHLTAESFPDISLNNEKVLVETSYPSQTTRLPPITYTGRFSLEPAPNSGNTLWPEPLFSLVSGLVSMTNPPASSSSAPSPAASSASASQSPPLSCAVPSNDSSPIYSAAPTFPTPNTDIFPEPQSQAFPGSAGTALQYPPPAYPAAKGGFQVPMIPDYLFPQQQGDLGLGTPDQKPFQGLESRTQQPSLTPLSTIKAFATQSGSQDLKALNTSYQSQLIKPSRMRKYPNRPSKTPPHERPYACPVESCDRRFSRSDELTRHIRIHTGQKPFQCRICMRNFSRSDHLTTHIRTHTGEKPFACDICGRKFARSDERKRHTKIHLRQKDKKADKSVVASSATSSLSSYPSPVATSYPSPVTTSYPSPATTSYPSPVPTSFSSPGSSTYPSPVHSGFPSPSVATTYSSVPPAFPAQVSSFPSSAVTNSFSASTGLSDMTATFSPRTIEIC

SEQ ID NO: 66217 - protein, 50 aa, Homo sapiens
IATGGKWRLCKSCHTAESWSCCASFWRPCGRPGPGRFAILCGKRSTEAPS

SEQ ID NO: 66218 - protein, 917 aa, Homo sapiens
LTLQTWLVQALFIFLTTESTGELLDPCGYISPESPVVQLHSNFTAVCVLKEKCMDYFHVNANYIVWKTNHFTIPKEQYTIINRTASSVTFTDIASLNIQLTCNILTFGQLEQNVYGITIISGLPPEKPKNLSCIVNEGKKMRCEWDGGRETHLETNFTLKSEWATHKFADCKAKRDTPTSCTVDYSTVYFVNIEVWVEAENALGKVTSDHINFDPVYKVKPNPPHNLSVINSEELSSILKLTWTNPSIKSVIILKYNIQYRTKDASTWSQIPPEDTASTRSSFTVQDLKPFTEYVFRIRCMKEDGKGYWSDWSEEASGITYEDRPSKAPSFWYKIDPSHTQGYRTVQLVWKTLPPFEANGKILDYEVTLTRWKSHLQNYTVNATKLTVNLTNDRYLATLTVRNLVGKSDAAVLTIPACDFQATHPVMDLKAFPKDNMLWVEWTTPRESVKKYILEWCVLSDKAPCITDWQQEDGTVHRTYLRGNLAESKCYLITVTPVYADGPGSPESIKAYLKQAPPSKGPTVRTKKVGKNEAVLEWDQLPVDVQNGFIRNYTIFYRTIIGNETAVNVDSSHTEYTLSSLTSDTLYMVRMAAYTDEGGKDGPEFTFTTPKFAQGEIEAIVVPVCLAFLLTTLLGVLFCFNKRDLIKKHIWPNVPDPSKSHIAQWSPHTPPRHNFNSKDQMYSDGNFTDVSVVEIEANDKKPFPEDLKSLDLFKKEKINTEGHSSGIGGSSCMSSSRPSISSSDENESSQNTSSTVQYSTVVHSGYRHQVPSVQVFSRSESTQPLLDSEERPEDLQLVDHVDGGDGILPRQQYFKQNCSQHESSPDISHFERSKQVSSVNEEDFVRLKQQISDHISQSCGSGQMKMFQEVSAADAFGPGTEGQVERFETVGMEAATDEGMPKSYLPQTVRQGGYMPQ

SEQ ID NO: 66219 - protein, 48 aa, Homo sapiens [sequence omitted]

SEQ ID NO: 66220 - protein, 20 aa, Homo sapiens
LAQDLFPRLCPLALPSLLVL

SEQ ID NO: 66221 - protein, 42 aa, Homo sapiens
VLLCSLQLSNFGLFWFLHCVCITCESECCVSGYGRFKYNFRR

SEQ ID NO: 66222 - protein, 123 aa, Homo sapiens
LLVFGLIWGLMLLHYTFQQPRHQSSVKLREQILDLSKRYVKALAEENKNTVDVENGASMAGYADLKRTIAVLLDDILQRLVKLENKVDYIVVNGSAANTTNGTSGNLVPVTTNKRTNVSGSIR

SEQ ID NO: 66223 - protein, 55 aa, Homo sapiens
LLGVVLTLLSIFVRVMESLEGLLESPSPGTSWTTRSQLANTEPTKGLPDHPSRSM

SEQ ID NO: 66224 - protein, 445 aa, Homo sapiens
LAGAMVHIKKGELTQEEKELLEVIGKGTVQEAGTLLSSKNVRVNCLDENGMTPLMHAAYKGKLDMCKLLLRHGADVNCHQHEHGYTALMFAALSGNKDITWVMLEAGAETDVVNSVGRTAAQMAAFVGQHDCVTIINNFFPRERLDYYTKPQGLDKEPKLPPKLAGPLHKIITTTNLHPVKIVMLVNENPLLTEEAALNKCYRVMDLICEKCMKQRDMNEVLAMKMHYISCIFQKCINFLKDGENKLDTLIKSLLKGRASDGFPVYQEKIIRESIRKFPYCEATLLQQLVRSIAPVEIGSDPTAFSVLTQAITGQVGFVDVEFCTTCGEKGASKRCSVCKMVIYCDQTCQKTHWFTHKKICKNLKDIYEKQQLEAAKEKRQEENHGKLDVNSNCVNEEQPEAEVGISQKDSNPEDSGEGKKESLESEAELEGLQDAPAGPQVSEE

SEQ ID NO: 66225 - protein, 163 aa, Homo sapiens
KAFCKGFFVAVPVAVTFLDRVACVARVEGASMQPSLNPGGSQSSDVVLLNHWKVRNFEVHRGDIVSLVSPKNPEQKIIKRVIALEGDIVRTIGHKNRYVKVPRGHIWVEGDHHGHSFDSNSFGPVSLGLLHAHATHILWPPERWQKLESVLPPERLPVQREEE

SEQ ID NO: 66226 - protein, 160 aa, Homo sapiens
LLIPLALWLGAVGVGVAELTEAQRRGLQVALEEFHKHPPVQWAFQETSVESAVDTPFPAGIFVRLEFKLQQTSCRKRDWKKPECKVRPNGRKRKCLACIKLGSEDKVLGRLVHCPIETQVLREAEEHQETQCLRVQRAGEDPHSFYFPGQFAFSKALPRS

SEQ ID NO: 66227 - protein, 535 aa, Homo sapiens
LLALSALGFCLMLQVSAKRPPKTPPCPPSCSCTRDTAFCVDSKAVPRNLPSEVISLTLVNAAFSEIQDGAFSHLPLLQFLLLNSNKFTLIGDNAFTGLSHLQYLFIENNDIWALSKFTFRGLKSLTHLSLANNNLQTLPRDIFRPLDILNDLDLRGNSLNCDCKVKWLVEWLAHTNTTVAPIYCASPPRFQEHKVQDLPLREFDCITTDFVLYQTLAFPAVSAEPFLYSSDLYLALAQPGVSACTILKWDYVERQLRDYDRIPAPSAVHCKPMVVDSQLYVVVAQLFGGSYIYHWDPNTTRFTRLQDIDPQRVRKPNDLEAFRIDGDWYFAVADSSKAGATSLYRWHQNGFYSHQALHPWHRDTDLEFVDGEGKPRLIVSSSSQAPVIYQWSRTQKQFVAQGEVTQVPDAQAVKHFRAGRDSYLCLSRYIGDSKILRWEGTRFSEVQALPSRGSLALQPFLVGGRRYLALGSDFSFTQIYQWDEGRQKFVRFQELAVQAPRAFCYMPAGDAQLLLAPSFKGQTLVYRHIVVDLSA

SEQ ID NO: 66228 - protein, 84 aa, Homo sapiens
MRLLCGLWLWLSLLKVLQAQTPTPLPLPPPMQSFQGNQFQGEWFVLGLAGNSFRPEHRALLNAFTATFELSDDGRFEVWNAMTR

SEQ ID NO: 66229 - protein, 144 aa, Homo sapiens
LASYSPSTTDMAQSLALSLLILVLAFGIPRTQGSDGGAQDCCLKYSQRKIPAKVVRSYRKQEPSLGCSIPAILFLPRKRSQAELCADPKELWVQQLMQHLDKTPSPQKPAQGCRKDRGASKTGKKGKGSKGCKRTERSQTPKGP

SEQ ID NO: 66230 - protein, 41 aa, Homo sapiens
KNWPESLEVWVLVLAVPLTHCDLGILCCEDISQVLHVSQQI

SEQ ID NO: 66231 - protein, 350 aa, Homo sapiens
LPRLVILKMAPLDLDKYVEIARLCKYLPENDLKVSPICGLAPSGCGAPAGRPFLSPGPPPVFHFLRFLKERLCDYVCDLLLEESNVQPVSTPVTVCGDIHGQFYDLCELFRTGGQVPDTNYIFMGDFVDRGYYSLETFTYLLALKAKWPDRITLLRGNHESRQITQVYGFYDECQTKYGNANAWRYCTKVFDMLTVAALIDEQILCVHGGLSPDIKTLDQIRTIERNQEIPHKGAFCDLVWSDPEDVDTWAISPRGAGWLFGAKVTNEFVHINNLKLICRAHQLVHEGYKFMFDEKLVTVWSAPNYCYRCGNIASIMVFKDVNTREPKLFRAVPDSERVIPPRTTTPYFL

SEQ ID NO: 66232 - protein, 295 aa, Homo sapiens
VWTIIIILSCCCVCHHRRAKHRLQAQQRQHEINLIAYREAHNYSALPFYFRFLPNYLLPPYEEVVNRPPTPPPPYSAFQLQQQQLLPPQCGPAGGSPPGIDPTRGSQGAQSSPLSEPSRSSTRPPSIADPDPSDLPVDRAATKAPGMEPSGSVAGLGELDPGAFLDKDAECREELLKDDSSEHGAPDSKEKTPGRHRRFTGDSGIEVCVCNRGHHDDDLKEFNTLIDDALDGPLDFCDSCHVRPPGDEEEGLCQSSEEQAREPGHPHLPRPPACLLLNTINEQDSPNSQSSSSPS

SEQ ID NO: 66233 - protein, 9 aa, Homo sapiens
MFLCVLHLL

SEQ ID NO: 66234 - protein, 86 aa, Homo sapiens
KVVVVLVLVLTALCLSDGKPVSLSYRCPCRFFESHVARANVKHLKILNTPNCALQIVARLKNNNRQVCIDPKLKWIQEYLEKALNK

SEQ ID NO: 66235 - protein, 29 aa, Homo sapiens
LALTALLSQVIIYTFRVRLCIMCNHGTVS

SEQ ID NO: 66236 - protein, 152 aa, Homo sapiens
LPTRGNRPRMQHRGFLLLTLLALLALTSAVAKKKDKVKKGGPGSECAEWAWGPCTPSSKDCGVGFREGTCGAQTQRIRCRVPCNWKKEFGADCKYKFENWGACDGGTGTKVRQGTLKKARYNAQCQETIRVTKPCTPKTKAKAKAKKGKGKD

SEQ ID NO: 66237 - protein, 20 aa, Homo sapiens
LAGWAQPVSKSPNTFSSSST

SEQ ID NO: 66238 - protein, 509 aa, Homo sapiens
LESADVAAQMASRLTLLTLLLLLLAGDRASSNPNATSSSSQDPESLQDRGEGKVATTVISKMLFVEPILEVSSLPTTNSTTNSATKITANTTDEPTTQPTTEPTTQPTIQPTQPTTQLPTDSPTQPTTGSFCPGPVTLCSDLESHSTEAVLGDALVDFSLKLYHAFSAMKKVETNMAFSPFSIASLLTQVLLGAGENTKTNLESILSYPKDFTCVHQALKGFTTKGVTSVSQIFHSPDLAIRDTFVNASRTLYSSSPRVLSNNSDANLELINTWVAKNTNNKISRLLDSLPSDTRLVLLNAIYLSAKWKTTFDPKKTRMEPFHFKNSVIKVPMMNSKKYPVAHFIDQTLKAKVGQLQLSHNLSLVILVPQNLKHRLEDMEQALSPSVFKAIMEKLEMSKFQPTLLTLPRIKVTTSQDMLSIMEKLEFFDFSYDLNLCGLTEDPDLQVSAMQHQTVLELTETGVEAAAASAISVARTLLVFEVQQPFLFVLWDQQHKFPVFMGRVYDPRA

SEQ ID NO: 66239 - protein, 55 aa, Homo sapiens
KLGKETRSRGTTVGQAAWKISAGSPRQNSHAPGQAVPTAWWRGNLTSGRAPLLHS

SEQ ID NO: 66240 - protein, 68 aa, Homo sapiens
ILLSLGVGFAILYTKHRRLQSSFTAFANSHYSSRLGSAIFSSGDDLGEDDEDAPMITGFSDDVPMVIA

SEQ ID NO: 66241 - protein, 789 aa, Homo sapiens
LVLLGIGFLVWHLQYRDVRVQKVFNGYMRITNENFVDAYENSNSTEFVSLASKVKDALKLLYSGVPFLGPYHKESAVTAFSEGSVIAYYWSEFSIPQHLVEEAERVMAEERVVMLPPRARSLKSFVVTSVVAFPTDSKTVQRTQDNSCSFGLHARGVELMRFTTPGFPDSPYPAHARCQWALRGDADSVLSLTFRSFDLASCDERGSDLVTVYNTLSPMEPHALVQLCGTYPPSYNLTFHSSQNVLLITLITNTERRHPGFEATFFQLPRMSSCGGRLRKAQGTFNSPYYPGHYPPNIDCTWNIEVPNNQHVKVRFKFFYLLEPGVPAGTCPKDYVEINGEKYCGERSQFVVTSNSNKITVRFHSDQSYTDTGFLAEYLSYDSSDPCPGQFTCRTGRCIRKELRCDGWADCTDHSDELNCSCDAGHQFTCKNKFCKPLFWVCDSVNDCGDNSDEQGCSCPAQTFRCSNGKCLSKSQQCNGKDDCGDGSDEASCPKVNVVTCTKHTYRCLNGLCLSKGNPECDGKEDCSDGSDEKDCDCGLRSFTRQARVVGGTDADEGEWPWQVSLHALGQGHICGASLISPNWLVSAAHCYIDDRGFRYSDPTQWTAFLGLHDQSQRSAPGVQERRLKRIISHPFFNDFTFDYDIALLELEKPAEYSSMVRPICLPDASHVFPAGKAIWVTGWGHTQYGGTGALILQKGEIRVINQTTCENLLPQQITPRMMCVGFLSGGVDSCQGDSGGPLSSVEADGRIFQAGVVSWGDGCAQRNKPGVYTRLPLFRDWIKENTGV

SEQ ID NO: 66242 - protein, 43 aa, Homo sapiens
ILFVMFLFAVTVGSLILGYTRSRKVDKRSDPYHVYIKNRVSMI

SEQ ID NO: 66243 - protein, 29 aa, Homo sapiens
LTAHLAGAGQDGRTRPWPSSRGPFSAGPC

SEQ ID NO: 66244 - protein, 418 aa, Homo sapiens
VLGLFGLLAASQPQAVPPYASENQTCRDQEKEYYEPQHRICCSRCPPGTYVSAKCSRIRDTVCATCAENSYNEHWNYLTICQLCRPCDPVMGLEEIAPCTSKRKTQCRCQPGMFCAAWALECTHCELLSDCPPGTEAELKDEVGKGNNHCVPCKAGHFQNTSSPSARCQPHTRCENQGLVEAAPGTAQSDTTCKNPLEPLPPEMSGTMLMLAVLLPLAFFLLLATVFSCIWKSHPSLCRKLGSLLKRRPQGEGPNPVAGSWEPPKAHPYFPDLVQPLLPISGDVSPVSTGLPAAPVLEAGVPQQQSPLDLTREPQLEPGEQSQVAHGTNGIHVTGGSMTITGNIYIYNGPVLGGPPGPGDLPATPEPPYPIPEEGDPGPPGLSTPHQEDGKAWHLAETEHCGATPSNRGPRNQFITHD

SEQ ID NO: 66245 - protein, 419 aa, Homo sapiens
LVIICFLTLRLSASQNCLKKSLEDVVIDIQSSLSKGIRGNEPVYTSTQEDCINSCCSTKNISGDKACNLMIFDTRKTARQPNCYLFFCPNEEACPLKPAKGLMSYRIITDFPSLTRNLPSQELPQEDSLLHGQFSQAVTPLAHHHTDYSKPTDISWRDTLSQKFGSSDHLEKLFKMDEASAQLLAYKEKGHSQSSQFSSDQEIAHLLPENVSALPATVAVASPHTTSATPKPATLLPTNASVTPSGTSQPQLATTAPPVTTVTSQPPTTLISTVFTRAAATLQAMATTAVLTTTFQAPTDSKGSLETIPFTEISNLTLNTGNVYNPTALSMSNVESSTMNKTASWEGREASPGSSSQGSVPENQYGLPFEKWLLIGSLLFGVLFLVIGLVLLGRILSESLRRKRYSRLDYLINGIYVDI

SEQ ID NO: 66246 - protein, 447 aa, Homo sapiens
LLLPLVLLELLVGIYPSGVIGLVPHLGDREKRDSVCPQGKYIHPQNNSICCTKCHKGTYLYNDCPGPGQDTDCRECESGSFTASENHLRHCLSCSKCRKEMGQVEISSCTVDRDTVCGCRKNQYRHYWSENLFQCFNCSLCLNGTVHLSCQEKQNTVCTCHAGFFLRENECVSCSNCKKSLECTKLCLPQIENVKGTEDSGTTVLLPLVIFFGLCLLSLLFIGLMYRYQRWKSKLYSIVCGKSTPEKEGELEGTTTKPLAPNPSFSPTPGFTPTLGFSPVPSSTFTSSSTYTPGDCPNFAAPRREVAPPYQGADPILATALASDPIPNPLQKWEDSAHKPQSLDTDDPATLYAVVENVPPLRWKEFVRRLGLSDHEIDRLELQNGRCLREAQYSMLATWRRRTPRREATLELLGRVLRDMDLLGCLEDIEEALCGPAALPPAPSLLR

SEQ ID NO: 66247 - protein, 360 aa, Homo sapiens
IMKATIILLLLAQVSWAGPFQQRGLFDFMLEDEASGIGPEVPDDRDFEPSLGPVCPFRCQCHLRVVQCSDLGLDKVPKDLPPDTTLLDLQNNKITEIKDGDFKNLKNLHALILVNNKISKVSPGAFTPLVKLERLYLSKNQLKELPEKMPKTLQELRAHENEITKVRKVTFNGLNQMIVIELGTNPLKSSGIENGAFQGMKKLSYIRIADTNITSIPQGLPPSLTELHLDGNKISRVDAASLKGLNNLAKLGLSFNSISAVDNGSLANTPHLRELHLDNNKLTRVPGGLAEHKYIQVVYLHNNNISVVGSSDFCPPGHNTKKASYSGVSLFSNPVQYWEIQPSTFRCVYVRSAIQLGNYK

SEQ ID NO: 66248 - protein, 67 aa, Homo sapiens
VTHLGRAVLSLGAALVGRGFRDESPGAVRAGSGRRGGSSSWNLLRLRRSEALEVMRRLQAVAAGAGS

SEQ ID NO: 66249 - protein, 359 aa, Homo sapiens
LRTLPLLASRLVMARFWVCVAGAGFFLAFLVLHSRFCGSPVLRNFTFAVSWRTEKILYRLDVGWPKHPEYFTGTTFCVAVDSLNGLVYIGQRGDNIPKILVFTEDGYFLRAWNYTVDTPHGIFAASTLYEQSVWITDVGSGFFGHTVKKYSSFGDLVQVLGTPGKKGTSLNPLQFDNPAELYVEDTGDIYIVDGDGGLNNRLIKLSQDFMILWLHGENGTGPAKFNIPHSVTLDSAGRVWVADRGNKRIQVFDKDTGEWLGAWNNCFTEEGPSSVRFTPDGKYLIVAQLNLSRLSVVAAPPVGSIGECSVISTIQLADQVLPHLLEVDRKTGAVYVAEIGAKQVQKYVPLNSYVPSFGS

SEQ ID NO: 66250 - protein, 831 aa, Homo sapiens
LWGICIFIAAVDLDEMSFTFTELQKNIEISVHKFFNLLKEIDTSTKVDNAMSRLLKKYDVLFALFSKLERTCELIYLTQPSSSISTEINSALVLKVSWITFLLAKGEVLQMEDDLVISFQLMLCVLDYFIKLSPPMLLKEPYKTAVIPINGSPRTPRRGQNRSARIAKQLENDTRIIEVLCKEHECNIDEVKNVYFKNFIPFMNSLGLVTSNGLPEVENLSKRYEEIYLKNKDLDARLFLDHDKTLQTDSIDSFETQRTPRKSNLDEEVNVIPPHTPVRTVMNTIQQLMMILNSASDQPSENLISYFNNCTVNPKESILKRVKDIGYIFKEKFAKAVGQGCVEIGSQRYKLGVRLYYRVMESMLKSEEERLSIQNFSKLLNDNIFHMSLLACALEVVMATYSRSTSQNLDSGTDLSFPWILNVLNLKAFDFYKVIESFIKAEGNLTREMIKHLERCEHRIMESLAWLSDSPLFDLIKQSKDREGPTDHLESACPLNLPLQNNHTAADMYLSPVRSPKKKGSTTRVNSTANAETQATSAFQTQKPLKSTSLSLFYKKVYRLAYLRLNTLCERLLSEHPELEHIIWTLFQHTLQNEYELMRDRHLDQIMMCSMYGICKVKNIDLKFKIIVTAYKDLPHAVQETFKRVLIKEEEYDSIIVFYNSVFMQRLKTNILQYASTRPPTLSPIPHIPRSPYKFPSSPLRIPGGNIYISPLKSPYKISEGLPTPTKMTPRSRILVSIGESFGTSEKFQKINQMVCNSDRVLKRSAEGSNPPKPLKKLRFDIEGSDEADGSKHLPGESKFQQKLAEMTSTRTRMQKQKMNDSMDTSNKEEK

SEQ ID NO: 66251 - protein, 105 aa, Homo sapiens
LPGSCGTALQPGRRRRGTGASRPPGSAPSSSRGRRQLGRLPGLRLGARRTLACVLDVPGVRSAPSATCWEDWPSAPPSGASGLHPRGLPGRPGRSHADQVRGRGG

SEQ ID NO: 66252 - protein, 12 aa, Homo sapiens
MRPGLRLLAVVI

SEQ ID NO: 66253 - protein, 57 aa, Homo sapiens
VGGLAWGGYRRLQWEVLLGFLPLMAYTPPAHHVGVRRGRRGVRPNSIFIGCHCCRPL

SEQ ID NO: 66254 - protein, 149 aa, Homo sapiens
VLCFPLLLLLLVLWGPVCPLHAWPKRLTKAHWFEIQHIQPSPLQCNRAMSGINNYTQHCKHQNTFLHDSFQNVAAVCDLLSIVCKNRRHNCHQSSKPVNMTDCRLTSGKYPQCRYSAAAQYKFFIVACDPPQKSDPPYKLVPVHLDSIL

SEQ ID NO: 66255 - protein, 234 aa, Homo sapiens
VGLPAITLFLTSASSPVVATTMDQEPVGGVERGEAVAASGAAAAAAFGESAGQMSNERGFENVELGVIGKKKKVPRRVIHFVSGETMEEYSTDEDEVDGLEKKDVLPTVDPTKLTWGPYLWFYMLRAATSTLSVCDFLGEKIASVLGISTPKYQYAIDEYYRMKKEEEEEEEENRMSEEAEKQYQQNKLQTDSIVQTDQPETVISSSFVNVNFEMEGDSEVIMESKQNPVSVPP

SEQ ID NO: 66256 - protein, 19 aa, Homo sapiens
LGTRRQETLFLLSSFLLVG

SEQ ID NO: 66257 - protein, 30 aa, Homo sapiens
LSWGSLFAAAAAAATAVLGARSPGKKPSHV

SEQ ID NO: 66258 - protein, 1183 aa, Homo sapiens
VGTKAWVFSFLVLEVTSVLGRQTMLTQSVRRVQPGKKNPSIFAKPADTLESPGEWTTWFNIDYPGGKGDYERLDAIRFYYGDRVCARPLRLEARTTDWTPAGSTGQVVHGSPREGFWCLNREQRPGQNCSNYTVRFLCPPGSLRRDTERIWSPWSPWSKCSAACGQTGVQTRTRICLAEMVSLCSEASEEGQHCMGQDCTACDLTCPMGQVNADCDACMCQDFMLHGAVSLPGGAPASGAAIYLLTKTPKLLTQTDSDGRFRIPGLCPDGKSILKITKVKFAPIVLTMPKTSLKAATIKAEFVRAETPYMVMNPETKARRAGQSVSLCCKATGKPRPDKYFWYHNDTLLDPSLYKHESKLVLRKLQQHQAGEYFCKAQSDAGAVKSKVAQLIVIASDETPCNPVPESYLIRLPHDCFQNATNSFYYDVGRCPVKTCAGQQDNGIRCRDAVQNCCGISKTEEREIQCSGYTLPTKVAKECSCQRCTETRSIVRGRVSAADNGEPMRFGHVYMGNSRVSMTGYKGTFTLHVPQDTERLVLTFVDRLQKFVNTTKVLPFNKKGSAVFHEIKMLRRKKPITLEAMETNIIPLGEVVGEDPMAELEIPSRSFYRQNGEPYIGKVKASVTFLDPRNISTATAAQTDLNFINDEGDTFPLRTYGMFSVDFRDEVTSEPLNAGKVKVHLDSTQVKMPEHISTVKLWSLNPDTGLWEEEGDFKFENQRRNKREDRTFLVGNLEIRERRLFNLDVPESRRCFVKVRAYRSERFLPSEQIQGVVISVINLEPRTGFLSNPRAWGRFDSVITGPNGACVPAFCDDQSPDAYSAYVLASLAGEELQAVESSPKFNPNAIGVPQPYLNKLNYRRTDHEDPRVKKTAFQISMAKPRPNSAEESNGPIYAFENLRACEEAPPSAAHFRFYQIEGDRYDYNTVPFNEDDPMSWTEDYLAWWPKPMEFRACYIKVKIVGPLEVNVRSRNMGGTHRQTVGKLYGIRDVRSTRDRDQPNVSAACLEFKCSGMLYDQDRVDRTLVKVIPQGSCRRASVNPMLHEYLVNHLPLAVNNDTSEYTMLAPLDPLGHNYGIYTVTDQDPRTAKEIALGRCFDGTSDGSSRIMKSNVGVALTFNCVERQVGRQSAFQYLQSTPAQSPAAGTVQGRVPSRRQQRASRGGQRQGGVVASLRFPRVAQQPLIN

SEQ ID NO: 66259 - protein, 1265 aa, Homo sapiens
VGQGAGPLGPAVVTAAVVLLLSGVGPAHGSEDIVVGCGGFVKSDVEINYSLIEIKLYTKHGTLKYQTDCAPNNGYFMIPLYDKGDFILKIEPPLGWSFEPTTVELHVDGVSDICTKGGDINFVFTGFSVNGKVLSKGQPLGPAGVQVSLRNTGTEAKIQSTVTQPGGKFAFFKVLPGDYEILATHPTWALKEASTTVRVTNSNANAASPLIVAGYNVSGSVRSDGEPMKGVKFLLFSSLVTKEDVLGCNVSPVPGFQPQDESLVYLCYTVSREDGSFSFYSLPSGGYTVIPFYRGERITFDVAPSRLDFTVEHDSLKIEPVFHVMGFSVTGRVLNGPEGDGVPEAVVTLNNQIKVKTKADGSFRLENITTGTYTIHAQKEHLYFETVTIKIAPNTPQLADIVATGFSVCGQISIIRFPDTVKQMNKYKVVLSSQDKDKSLVTVETDAHGSFCFKANPGTYKVQVMVPEAETRAGLTLKPQTFPLTVTDRPVMDVAFVQFLASVSGKVSCLDTCGDLLVTLQSLSRQGEKRSLQLSGKVNAMTFTFDNVLPGKYKISIMHEDWCWKNKSLEVEVLEDDVSAVEFRQTGYMLRCSLSHAITLEFYQDGNGRENVGIYNLSKGVNRFCLSKPGVYKVTPRSCHRFEQAFYTYDTSSPSILTLTAIRHHVLGTITTDKMMDVTVTIKSSIDSEPALVLGPLKSVQELRREQQLAEIEARRQEREKNGNEEGEERMTKPPVQEMVDELQGPFSYDFSYWARSGEKITVTPSSKELLFYPPSMEAVVSGESCPGKLIEIHGKAGLFLEGQIHPELEGVEIVISEKGASSPLITVFTDDKGAYSVGPLHSDLEYTVTSQKEGYVLTAVEGTIGDFKAYALAGVSFEIKAEDDQPLPGVLLSLSGGLFRSNLLTQDNGILTFSNLSPGQYYFKPMMKEFRFEPSSQMIEVQEGQNLKITITGYRTAYSCYGTVSSLNGEPEQGVAMEAVGQNDCSIYGEDTVTDEEGKFRLRGLLPGCVYHVQLKAEGNDHIERALPHHRVIEVGNNDIDDVNIIVFRQINQFDLSGNVITSSEYLPTLWVKLYKSENLDNPIQTVSLGQSLFFHFPPLLRDGENYVVLLDSTLPRSQYDYILPQVSFTAVGYHKHITLIFNPTRKLPEQDIAQGSYIALPLTLLVLLAGYNHDKLIPLLLQLTSRLQGVGALGQAASDNSGPEDAKRQAKKQKTRRTLRLQEEFQLMWCLVPWRGTLGIHLFSSLPFASEILLETTATCIHY

SEQ ID NO: 66260 - protein, 1220 aa, Homo sapiens
VGQGAGPLGPAVVTAAVVLLLSGVGPAHGSEDIVVGCGGFVKSDVEINYSLIEIKLYTKHGTLKYQTDCAPNNGYFMIPLYDKGDFILKIEPPLGWSFEPTTVELHVDGVSDICTKGGDINFVFTGFSVNGKVLSKGQPLGPAGVQVSLRNTGTEAKIQSTVTQPGGKFAFFKVLPGDYEILATHPTWALKEASTTVRVTNSNANAASPLIVAGYNVSGSVRSDGEPMKGVKFLLFSSLVTKEDVLGCNVSPVPGFQPQDESLVYLCYTVSREDGSFSFYSLPSGGYTVIPFYRGERITFDVAPSRLDFTVEHDSLKIEPVFHVMGFSVTGRVLNGPEGDGVPEAVVTLNNQIKVKTKADGSFRLENITTGTYTIHAQKEHLYFETVTIKIAPNTPQLADIIATGFSVCGQISIIRFPDTVKQMNKYKVVLSSQDKDKSLVTVETDAHGSFCFKAKPGTYKVQVMVPEAETRAGLTLKPQTFPLTVTNRPMMDVAFVQFLASVSGKVSCLDTCGDLLVTLQSLSRQGEKRSLQLSGKVNAMTFTFDNVLPGKYKISIMHEDWCWKNKSLEVEVLEDDMSAVEFRQTGYMLRCSLSHAITLEFYQDGNGRENVGIYNLSKGVNRFCLSKPGVYKVTPRSCHRFEQAFYTYDTSSPSILTLTAIRHHVLGTITTDKMMDVTVTIKSSIDSEPALVLGPLKSVQELRREQQLAEIEARRQEREKNGNEEGEERMTKPPVQEMVDELQGPFSYDFSYWARSGEKITVTPSSKELLFYPPSMEAVVSGESCPGKLIEIHGKAGLFLEGQIHPELEGVEIVISEKGASSPLITVFTDDKGAYSVGPLHSDLEYTVTSQKEGYVLTAVEGTIGDFKAYALAGVSFEIKAEDDQPLPGVLLSLSGGLFRSNLLTQDNGILTFSNLSPGQYYFKPMMKEFRFEPSSQMIEVQEGQNLKITITGYRTAYSCYGTVSSLNGEPEQGVAMEAVGQNDCSIYGEDTVTDEEGKFRLRGLLPGCVYHVQLKAEGNDHIERALPHHRVIEVGNNDIDDVNIIVFRQINQFDLSGNVITSSEYLPTLWVKLYKSENLDNPIQTVSLGQSLFFHFPPLLRDGENYVVLLDSTLPRSQYDYILPQVSFTAVGYHKHITLIFNPTRKLPEQDIAQGSYIALPLTLLVLLAGYNHDKLIPLLLQLTSRLQGVRALGQAASDNSGPEDAKRQAKKQKTRRT

SEQ ID NO: 66261 - protein, 168 aa, Homo sapiens
ICLVLTIFANLFPAACTGAHERTFLAVKPDGVQRRLVGEIVRRFERKGFKLVALKLVQASEELLREHYAELRERPFYGRLVKYMASGPVVAMVWQGLDVVRTSRALIGATNPADAPPGTIRGDFCIEVGKNLIHGSDSVESARREIALWFRADELLCWEDSAGHWLYE

SEQ ID NO: 66262 - protein, 1265 aa, Homo sapiens
VGQGAGLLGPAVVTAAVVLLLSGVGPAHGSEDIVVGCGGFVKSDVEINYSLIEIKLYTKHGTLKYQTDCAPNNGYFMIPLYDKGDFILKIEPPLGWSFEPTTVELHVDGVSDICTKGGDINFVFTGFSVNGKVLSKGQPLGPAGVQVSLRNTGTEAKIQSTVTQPGGKFAFFKVLPGDYEILATHPTWALKEASTTVRVTNSNANAASPLIVAGYNVSGSVRSDGEPMKGVKFLLFSSLVTKEDVLGCNVSPVPGFQPQDESLVYLCYTVSREDGSFSFYSLPSGGYTVIPFYRGERITFDVAPSRLDFTVEHDSLKIEPVFHVMGFSVTGRVLNGPEGDGVPEAVVTLNNQIKVKTKADGSFRLENITTGTYTIHAQKEHLYFETVTIKIAPNTPQLADIVATGFSVCGRISIIRFPDTVKQMNKYKVVLSSQDKDKSLVTVETDAHGSFCFKAKPGTYKVQVMVPEAETRAGLTLKPQTFPLTVTDRPVMDVAFVQFLASVSGKVSCLDTCGDLLVTLQSLSRQGEKRSLQLSGKVNAMTFTFDNVLPGKYKISIMHEDWCWKNKSLEVEVLEDDVSAVEFRQTGYMLRCSLSHAITLEFYQDGNGRENVGIYNLSKGVNRFCLSKPGVYKVTPRSCHRFEQAFYTYDTSSPSILTLTAIRHHVLGTITTDKMMDVTVTIKSSIDSEPALVLGPLKSVQELRREQQLAEIEARRQEREKNGNEEGEERMTKPPVQEMVDELQGPFSYDFSYWARSGEKITVTPSSKELLFYPPSMEAVVSGESCPGKLIEIHGKAGLFLEGQIHPELEGVEIVISEKGASSPLITVFTDDKGAYSVGPLHSDLEYTVTSQKEGYVLTAVEGTIGDFKAYALAGVSFEIKAEDDQPLPGVLLSLSGGLFRSNLLTQDNGILTFSNLSPGQYYFKPMMKEFRFEPSSQMIEVQEGQNLKITITGYRTAYSCYGTVSSLNGEPEQGVAMEAVGQNDCSIYGEDTVTDEEGKFRLRGLLPGCVYHVQLKAEGNDHIERALPHHRVIEVGNNDIDDVNIIVFRQINQFDLSGNVITSSEYLPTLWVKLYKSENLDNPIQTVSLGQSLFFHFPPLLRDGENYVVLLDSTLPRSQYDYILPQVSFTAVGYHKHITLIFNPTRKLPEQDIAQGSYIALPLTLLVLLAGYNHDKLIPLLLQLTSRLQGVGALGQAASDNSGPEDAKRQAKKQKTRRTLRLQEEFQLMWCLVPWRGTLGIHLFSSLPFASEILLETTATCIHY

SEQ ID NO: 66263 - protein, 34 aa, Homo sapiens
MGSERLGMEGQSQEDPPEKKATEETGAPPGWQQQ

SEQ ID NO: 66264 - protein, 414 aa, Homo sapiens
VLLLCIGALLGHSSCQNPASPPEEGSPDPDSTGALVEEEDPFFKVPVNKLAAAVSNFGYDLYRVRSSTSPTTNVLLSPLSVATALSALSLGAEQRTESIIHRALYYDLISSPDIHGTYKELLDTVTAPQKNLKSASRIVFEKKLRIKSSFVAPLEKSYGTRPRVLTGNPRLDLQEINNWVQAQMKGKLARSTKEIPDEISILLLGVAHFKGQWVTKFDSRKTSLEDFYLDEERTVRVPMMSDPKAVLRYGLDSDLSCKIAQLPLTGSMSIIFFLPLKVTQNLTLIEESLTSEFIHDIDRELKTVQAVLTVPKLKLSYEGEVTKSLQEMKLQSLFDSPDFSKITGKPIKLTQVEHRAGFEWNEDGAGTTPSPGLQPAHLTFPLDYHLNQPFIFVLRDTDTGALLFIGKILDPRGP

SEQ ID NO: 66265 - protein, 339 aa, Homo sapiens
VPPSRVAPHGRGPGLLPLLAALAWFSRPAAAEEEEQQGADGAAAEDGADEAEAEIIQLLKRAKLSIMKDEPEEAELILHDALRLAYQTDNKKAITYTYDLMANLAFIRGQLENAEQLFKATMSYLLGGGMKQEDNAIIEISLKLASIYAAQNRQEFAVAGYEFCISTLEEKIEREKELAEDIMSVEEKANTHLLLGMCLDACARYLLFSKQPSQAQRMYEKALQISEEIQGERHPQTIVLMSDLATTLDAQGRFDEAYIYMQRASDLARQINHPELHMVLSNLAAVLMHRERYTQAKEIYQEALKQAKLKKDEISVQHIREELAELSKKSRPLTNSVKL

SEQ ID NO: 66266 - protein, 49 aa, Homo sapiens
RQEDRPTDLRKGSESAAVKLAGAGGTKPISATERSGRRVPVSSGGAGSR

SEQ ID NO: 66267 - protein, 764 aa, Homo sapiens
TEGLLQFTILLSLIGVRVDVDTYLTSQLPPLREIILGPSSAYTQTQFHNLRNTLDGYGIHPKSIDLDNYFTARRLLSQVRALDRFQVPTTEVNAWLVHRDPEGSVSGSQPNSGLALESSSGLQDVTGPDNGVRESETEQGFGEDLEDLGAVAPPVSGDLTKEDIDLIDILWRQDIDLGAGREVFDYSHRQKEQDVEKELRDGGEQDTWAGEGAEALARNLLVDGETGESFPAQVPSGEDQTALSLEECLRLLEATCPFGENAEFPADISSITEAVPSESEPPALQNNLLSPLLTGTESPFDLEQQWQDLMSIMEMQAMEVNTSASEILYSAPPGDPLSTNYSLAPNTPINQNVSLHQASLGGCSQDFLLFSPEVESLPVASSSTLLPLAPSNSTSLNSTFGSTNLTGLFFPPQLNGTANDTAGPELPDPLGGLLDEAMLDEISLMDLAIEEGFNPVQASQLEEEFDSDSGLSLDSSHSPSSLSSSEGSSSSSSSSSSSSSSASSSASSSFSEEGAVGYSSDSETLDLEEAEGAVGYQPEYSKFCRMSYQDPAQLSCLPYLEHVGHNHTYNMAPSALDSADLPPPSALKKGSKEKQADFLDKQMSRDEHRARAMKIPFTNDKIINLPVEEFNELLSKYQLSEAQLSLIRDIRRRGKNKMAAQNCRKRKLDTILNLERDVEDLQRDKARLLREKVEFLRSLRQMKQKVQSLYQEVFGRLRDENGRPYSPSQYALQYAGDGSVLLIPRTMADQQARRQERKPKDRRK

SEQ ID NO: 66268 - protein, 14 aa, Homo sapiens
MWGDRALSLMVLIF

SEQ ID NO: 66269 - protein, 316 aa, Homo sapiens
LSRKMRMLLALLALSAARPSASAESHWCYEVQAESSNYPCLVPVKWGGNCQKDRQSPINIVTTKAKVDKKLGRFFFSGYDKKQTWTVQNNGHSVMMLLENKASISGGGLPAPYQAKQLHLHWSDLPYKGSEHSLDGEHFAMEMHIVHEKEKGTSRNVKEAQDPEDEIAVLAFLVEAGTQVNEGFQPLVEALSNIPKPEMSTTMAESSLLDLLPKEEKLRHYFRYLGSLTTPTCDEKVVWTVFREPIQLHREQILAFSQKLYYDKEQTVSMKDNVRPLQQLGQRTVIKSGAPGRPLPWALPALLGPMLACLLAGFLR

SEQ ID NO: 66270 - protein, 49 aa, Homo sapiens
LGRRRAQLPLRLCVCLCVCLAISEFASASRTKPPRHHHLENPSPSPMAD

SEQ ID NO: 66271 - protein, 106 aa, Homo sapiens
LLTLEPTFRHLLRIMQVSTAALAVLLCTMALCNQFSASLAADTPTACCFSYTSRQIPQNFIADYFETSSQCSKPGVIFLTKRSRQVCADPSEEWVQKYVSDLELSA

SEQ ID NO: 66272 - protein, 153 aa, Homo sapiens
LALLLAWLLVRRGAAASPEPARAPPEPAPPAEATGAPAPSRPCAPEPAASPAGPEEPGEPAGLGELGEPAGPGEPEGPGDPAAAPAEAEEQAVEARQEEEQDLDGEKGPSSEGPEEEDGEGFSFKYSPGKLRGNQYKKMMTKEELEEEQRTEE

SEQ ID NO: 66273 - protein, 498 aa, Homo sapiens
VPACCALLLVLGLCRARPRNALLLLADDGGFESGAYNNSAIATPHLDALARRSLLFRNAFTSVSSCSPSRASLLTGLPQHQNGMYGLHQDVHHFNSFDKVRSLPLLLSQAGVRTGIIGKKHVGPETVYPFDFAYTEENGSVLQVGRNITRIKLLVRKFLQTQDDRPFFLYVAFHDPHRCGHSQPQYGTFCEKFGNGESGMGRIPDWTPQAYDPLDVLVPYFVPNTPAARADLAAQYTTVGRMDQGVGLVLQELRDAGVLNDTLVIFTSDNGIPFPSGRTNLYWPGTAEPLLVSSPEHPKRWGQVSEAYVSLLDLTPTILDWFSIPYPSYAIFGSKTIHLTGRSLLPALEAEPLWATVFGSQSHHEVTMSYPMRSVQHRHFRLVHNLNFKMPFPIDQDFYVSPTFQDLLNRTTAGQPTGWYKDLRHYYYRARWELYDRSRDPHETQNLATDPRFAQLLEMLRDQLAKWQWETHDPWVCAPDGVLEEKLSPQCQPLHNEL

SEQ ID NO: 66274 - protein, 179 aa, Homo sapiens
LPDSVAAMASDEGKLFVGGLSFDTNEQSLEQVFSKYGQISEVVVVKDRETQRSRGFGFVTFENIDDAKDAMMAMNGKSVDGRQIRVDQAGKSSDNRSRGYRGGSAGGRGFFRGGRGRGRGFSRGGGDRGYGGNRFESRSGGYGGSRDYYSSRSQSGGYSDRSSGGSYRDSYDSYATHNE

SEQ ID NO: 66275 - protein, 1551 aa, Homo sapiens
LLWVSLLVLLAQLGPQPGLGRLGERLRVRFTPVVCGLRCVHGPTGSRCTPTCAPRNATSVDSGAPGGAAPGGPGFRAFLCPLICHNGGVCVKPDRCLCPPDFAGKFCQLHSSGARPPAPAVPGLTRSVYTMPLANHRDDEHGVASMVSVHVEHPQEASVVVHQVERVSGPWEEADAEAVARAEAAARAEAAAPYTVLAQSAPREDGYSDASGFGYCFRELRGGECASPLPGLRTQEVCCRGAGLAWGVHDCQLCSERLGNSERVSAPDGPCPTGFERVNGSCEDVDECATGGRCQHGECANTRGGYTCVCPDGFLLDSSRSSCISQHVISEAKGPCFRVLRDGGCSLPILRNITKQICCCSRVGKAWGRGCQLCPPFGSEGFREICPAGPGYHYSASDLRYNTRPLGQEPPRVSLSQPRTLPATSRPSAGFLPTHRLEPRPEPRPDPRPGPELPLPSIPAWTGPEIPESGPSSGMCQRNPQVCGPGRCISRPSGYTCACDSGFRLSPQGTRCIDVDECRRVPPPCAPGRCENSPGSFRCVCGPGFRAGPRAAECLDVDECHRVPPPCDLGRCENTPGSFLCVCPAGYQAAPHGASCQDVDECTQSPGLCGRGACKNLPGSFRCVCPAGFRGSACEEDVDECAQEPPPCGPGRCDNTAGSFHCACPAGFRSRGPGAPCQDVDECARSPPPCTYGRCENTEGSFQCVCPMGFQPNTAGSECEDVDECENHLACPGQECVNSPGSFQCRTCPSGHHLHRGRCTDVDECSSGAPPCGPHGHCTNTEGSFRCSCAPGYRAPSGRPGPCADVNECLEGDFCFPHGECLNTDGSFACTCAPGYRPGPRGASCLDVDECSEEDLCQSGICTNTDGSFECICPPGHRAGPDLASCLDVDECRERGPALCGSQRCENSPGSYRCVRDCDPGYHAGPEGTCDDVDECQEYGPEICGAQRCENTPGSYRCTPACDPGYQPTPGGGCQDVDECRNRSFCGAHAVCQNLPGSFQCLCDQGYEGARDGRHCVDVNECETLQGVCGAALCENVEGSFLCVCPNSPEEFDPMTGRCVPPRTSAGTFPGSQPQAPASPVLPARPPPPPLPRRPSTPRQGPVGSGRRECYFDTAAPDACDNILARNVTWQECCCTVGEGWGSGCRIQQCPGTETAEYQSLCPHGRGYLAPSGDLSLRRDVDECQLFRDQVCKSGVCVNTAPGYSCYCSNGYYYHTQRLECIDNDECADEEPACEGGRCVNTVGSYHCTCEPPLVLDGSQRRCVSNESQSLDDNLGVCWQEVGADLVCSHPRLDRQATYTECCCLYGEAWGMDCALCPAQDSDDFEALCNVLRPPAYSPPRPGGFGLPYEYGPDLGPPYQGLPYGPELYPPPALPYDPYPPPPGPFARREAPYGAPRFDMPDFEDDGGPYGESEAPAPPGPGTRWPYRSRDTRRSFPEPEEPPEGGSYAGSLAEPYEELEAEECGILDGCTNGRCVRVPEGFTCRCFDGYRLDMTRMACVDINECDEAEAASPLCVNARCLNTDGSFRCICRPGFAPTHQPHHCAPARPRA

SEQ ID NO: 66276 - protein, 33 aa, Homo sapiens
INPGTLRRLLGCLTLTLSGRILNPSWVSSTGMP

SEQ ID NO: 66277 - protein, 1216 aa, Homo sapiens
LRPRLLLLLLLLSPPLLLLLLPCEAEAAAAAAAVSGSAAAEAKECDRPCVNGGRCNPGTGQCVCPAGWVGEQCQHCGGRFRLTGSSGFVTDGPGNYKYKTKCTWLIEGQPNRIMRLRFNHFATECSWDHLYVYDGDSIYAPLVAAFSGLIVPERDGNETVPEVVATSGYALLHFFSDAAYNLTGFNITYSFDMCPNNCSGRGECKISNSSDTVECECSENWKGEACDIPHCTDNCGFPHRGICNSSDVRGCSCFSDWQGPGCSVPVPANQSFWTREEYSNLKLPRASHKAVVNGNIMWVVGGYMFNHSDYNMVLAYDLASREWLPLNRSVNNVVVRYGHSLALYKDKIYMYGGKIDSTGNVTNELRVFHIHNESWVLLTPKAKEQYAVVGHSAHIVTLKNGRVVMLVIFGHCPLYGYISNVQEYDLDKNTWSILHTQGALVQGGYGHSSVYDHRTRALYVHGGYKAFSANKYRLADDLYRYDVDTQMWTILKDSRFFRYLHTAVIVSGTMLVFGGNTHNDTSMSHGAKCFSSDFMAYDIACDRWSVLPRPDLHHDVNRFGHSAVLHNSTMYVFGGFNSLLLSDILVFTSEQCDAHRSEAACLAAGPGIRCVWNTGSSQCISWALATDEQEEKLKSECFSKRTLDHDRCDQHTDCYSCTANTNDCHWCNDHCVPRNHSCSEGQISIFRYENCPKDNPMYYCNKKTSCRSCALDQNCQWEPRNQECIALPENICGIGWHLVGNSCLKITTAKENYDNAKLFCRNHNALLASLTTQKKVEFVLKQLRIMQSSQSMSKLTLTPWVGLRKINVSYWCWEDMSPFTNSLLQWMPSEPSDAGFCGILSEPSTRGLKAATCINPLNGSVCERPANHSAKQCRTPCALRTACGDCTSGSSECMWCSNMKQCVDSNAYVASFPFGQCMEWYTMSTCPPENCSGYCTCSHCLEQPGCGWCTDPSNTGKGKCIEGSYKGPVKMPSQAPTGNFYPQPLLNSSMCLEDSRYNWSFIHCPACQCNGHSKCINQSICEKCENLTTGKHCETCISGFYGDPTNGGKCQPCKCNGHASLCNTNTGKCFCTTKGVKGDECQLCEVENRYQGNPLRGTCYYTLLIDYQFTFSLSQEDDRYYTAINFVATPDEQNRDLDMFINASKNFNLNITWAASFSAGTQAGEEMPVVSKTNIKEYKDSFSNEKFDFRNHPNITFFVYVSNFTWPIKIQVQTEQ

SEQ ID NO: 66278 - protein, 1373 aa, Homo sapiens
LRPRLLLLLLLLSPPLLLLLLPCEAEAAAAAAAVSGSAAAEAKECDRPCVNGGRCNPGTGQCVCPAGWVGEQCQHCGGRFRLTGSSGFVTDGPGNYKYKTKCTWLIEGQPNRIMRLRFNHFATECSWDHLYVYDGDSIYAPLVAAFSGLIVPERDGNETVPEVVATSGYALLHFFSDAAYNLTGFNITYSFDMCPNNCSGRGECKISNSSDTVECECSENWKGEACDIPHCTDNCGFPHRGICNSSDVRGCSCFSDWQGPGCSVPVPANQSFWTREEYSNLKLPRASHKAVVNGNIMWVVGGYMFNHSDYNMVLAYDLASREWLPLNRSVNNVVVRYGHSLALYKDKIYMYGGKIDSTGNVTNELRVFHIHNESWVLLTPKAKEQYAVVGHSAHIVTLKNGRVVMLVIFGHCPLYGYISNVQEYDLDKNTWSILHTQGALVQGGYGHSSVYDHRTRALYVHGGYKAFSANKYRLADDLYRYDVDTQMWTILKDSRFFRYLHTAVIVSGTMLVFGGNTHNDTSMSHGAKCFSSDFMAYDIACDRWSVLPRPDLHHDVNRFGHSAVLHNSTMYVFGGFNSLLLSDILVFTSEQCDAHRSEAACLAAGPGIRCVWNTGSSQCISWALATDEQEEKLKSECFSKRTLDHDRCDQHTDCYSCTANTNDCHWCNDHCVPRNHSCSEGQISIFRYENCPKDNPMYYCNKKTSCRSCALDQNCQWEPRNQECIALPENICGIGWHLVGNSCLKITTAKENYDNAKLFCRNHNALLASLTTQKKVEFVLKQLRIMQSSQSMSKLTLTPWVGLRKINVSYWCWEDMSPFTNSLLQWMPSEPSDAGFCGILSEPSTRGLKAATCINPLNGSVCERPANHSAKQCRTPCALRTACGDCTSGSSECMWCSNMKQCVDSNAYVASFPFGQCMEWYTMSTCPPENCSGYCTCSHCLEQPGCGWCTDPSNTGKGKCIEGSYKGPVKMPSQAPTGNFYPQPLLNSSMCLEDSRYNWSFIHCPACQCNGHSKCINQSICEKCENLTTGKHCETCISGFYGDPTNGGKCQPCKCNGHASLCNTNTGKCFCTTKGVKGDECQLCEVENRYQGNPLRGTCYYTLLIDYQFTFSLSQEDDRYYTAINFVATPDEQNRDLDMFINASKNFNLNITWAASFSAGTQAGEEMPVVSKTNIKEYKDSFSNEKFDFRNHPNITFFVYVSNFTWPIKIQIAFSQHSNFMDLVQFFVTFFSCFLSLLLVAAVVWKIKQSCWASRRREQLLREMQQMASRPFASVNVALETDEEPPDLIGGSIKTVPKPIALEPCFGNKAAVLSVFVRLPRGLGGIPPPGQSGLAVASALVDISQQMPIVYKEKSGAVRNRKQQPPAQPGTCI

SEQ ID NO: 66279 - protein, 15 aa, Homo sapiens
MADSCLAPQGPQTRS

SEQ ID NO: 66280 - protein, 34 aa, Homo sapiens
VALRVLLAGRTPRPFTPGLADPRRLGPRRVQAAQ

SEQ ID NO: 66281 - protein, 437 aa, Homo sapiens
LLTAHPPAAAMRHLGAFLFLLGVLGALTEMCEIPEMDSHLVEKLGQHLLPWMDRLSLEHLNPSIYVGLRLSSLQAGTKEDLYLHSLKLGYQQCLLGSAFSEDDGDCQGKPSMGQLALYLLALRANCEFVRGHKGDRLVSQLKWFLEDEKRAIGHDHKGHPHTSYYQYGLGILALCLHQKRVHDSVVDKLLYAVEPFHQGHHSVDTAAMAGLAFTCLKRSNFNPGRRQRITMAIRTVREEILKAQTPEGHFGNVYSTPLALQFLMTSPMRGAELGTACLKARVALLASLQDGAFQNALMISQLLPVLNHKTYIDLIFPDCLAPRVMLEPAAETIPQTQEIISVTLQVLSLLPPYRQSISVLAGSTVEDVLKKAHELGGFTYETQASLSGPYLTSVMGKAAGEREFWQLLRDPNTPLLQGIADYRPKDGETIELRLVSW

SEQ ID NO: 66282 - protein, 143 aa, Homo sapiens
TAALGCISLLCLQLPGSLSRSLGGDPRPVKPREPPARSPSSSLQPRHPAPRPVVWKLHRALQAQRGAGLAPVMGQPLRDGGRQHSGPRRHSGPRRTQAQLLRVGCVLGTCQVQNLSHRLWQLMGPAGRQDSAPVDPSSPHSYG

SEQ ID NO: 66283 - protein, 24 aa, Homo sapiens
MTQLCLVPKACPMISMRSSWALGG

SEQ ID NO: 66284 - protein, 524 aa, Homo sapiens
LRRGSQLTMGDPSKQDILTIFKRLRSVPTNKVCFDCGAKNPSWASITYGVFLCIDCSGSHRSLGVHLSFIRSTELDSNWSWFQLRCMQVGGNASASSFFHQHGCSTNDTNAKYNSRAAQLYREKIKSLASQATRKHGTDLWLDSCVVPPLSPPPKEEDFFASHVSPEVSDTAWASAIAEPSSLTSRPVETTLENNEGGQEQGPSVEGLNVPTKATLEVSSIIKKKPNQAKKGLGAKKGSLGAQKLANTCFNEIEKQAQAADKMKEQEDLAKVVSKEESIVSSLRLAYKDLEIQMKKDEKMNISGKKNVDSDRLGMGFGNCRSVISHSVTSDMQTIEQESPIMAKPRKKYNDDSDDSYFTSSSSYFDEPVELRSSSFSSWDDSSDSYWKKETSKDTETVLKTTGYSDRPTARRKPDYEPVENTDEAQKKFGNVKAISSDMYFGRQSQADYETRARLERLSASSSISSADLFEEPRKQPAGNYSLSSVLPNAPDMAQFKQGVRSVAGKLSVFANGVVTSIQDRYGS

SEQ ID NO: 66285 - protein, 10 aa, Homo sapiens
KVRFPWILAL

SEQ ID NO: 66286 - protein, 1080 aa, Homo sapiens
TAAALVLLPPNTFLLVVAAAGPITSFLLSLEKLQMASSVGNVADSTEPTKRMLSFQGLAELAHREYQAGDFEAAERHCMQLWRQEPDNTGVLLLLSSIHFQCRRLDRSAHFSTLAIKQNPLLAEAYSNLGNVYKERGQLQEAIEHYRHALRLKPDFIDGYINLAAALVAAGDMEGAVQAYVSALQYNPDLYCVRSDLGNLLKALGRLEEAKACYLKAIETQPNFAVAWSNLGCVFNAQGEIWLAIHHFEKAVTLDPNFLDAYINLGNVLKEARIFDRAVAAYLRALSLSPNHAVVHGNLACVYYEQGLIDLAIDTYRRAIELQPHFPDAYCNLANALKEKGSVAEAEDCYNTALRLCPTHADSLNNLANIKREQGNIEEAVRLYRKALEVFPEFAAAHSNLASVLQQQGKLQEALMHYKEAIRISPTFADAYSNMGNTLKEMQDVQGALQCYTRAIQINPAFADAHSNLASIHKDSGNIPEAIASYRTALKLKPDFPDAYCNLAHCLQIVCDWTDYDERMKKLVSIVADQLEKNRLPSVHPHHSMLYPLSHGFRKAIAERHGNLCLDKINVLHKPPYEHPKDLKLSDGRLRVGYVSSDFGNHPTSHLMQSIPGMHNPDKFEVFCYALSPDDGTNFRVKVMAEANHFIDLSQIPCNGKAADRIHQDGIHILVNMNGYTKGARNELFALRPAPIQAMWLGYPGTSGALFMDYIITDQETSPAEVAEQYSEKLAYMPHTFFIGDHANMFPHLKKKAVIDFKSNGHIYDNRIVLNGIDLKAFLDSLPDVKIVKMKCPDGGDNADSSNTALNMPVIPMNTIAEAVIEMINRGQIQITINGFSISNGLATTQINNKAATGEEVPRTIIVTTRSQYGLPEDAIVYCNFNQLYKIDPSTLQMWANILKRVPNSVLWLLRFPAVGEPNIQQYAQNMGLPQNRIIFSPVAPKEEHVRRGQLADVCLDTPLCNGHTTGMDVLWAGTPMVTMPGETLASRVAASQLTCLGCLELIAKNRQEYEDIAVKLGTDLEYLKKVRGKVWKQRISSPLFNTKQYTMELERLYLQMWEHYAAGNKPDHMIKPVEVTESA

SEQ ID NO: 66287 - protein, 464 aa, Homo sapiens
TARVRMGPRCAQALWRMPWLPVFLSLAAAAAAAAAEQQVPLVLWSSDRDLWAPAADTHEGHITSDLQLSTYLDPALELGPRNVLLFLQDKLSIEDFTAYGGVFGNKQDSAFSNLENALDLAPSSLVLPAVDWYAVSTLTTYLQEKLGASPLHVDLATLRELKLNASLPALLLIRLPYTASSGLMAPREVLTGNDEVIGQVLSTLKSEDVPYTAALTAVRPSRVARDVAVVAGGLGRQLLQKQPVSPVIHPPVSYNDTAPRILFWAQNFSVAYKDQWEDLTPLTFGVQELNLTGSFWNDSFARLSLTYERLFGTTVTFKFILANRLYPVSARHWFTMERLEVHSNGSVAYFNASQVTGPSIYSFHCEYVSSLSKKGSLLVARTQPSPWQMMLQDFQIQAFNVMGEQFSYASDCASFFSPGIWMGLLTSLFMLFIFTYGLHMILSLKTMDRFDDHKGPTISLTQIV

SEQ ID NO: 66288 - protein, 22 aa, Homo sapiens
VLAGSWSSVFTPIQLLTLAFVP

SEQ ID NO: 66289 - protein, 410 aa, Homo sapiens
LEERTEVALAVMGILLGLLLLGHLTVDTYGRPILEVPESVTGPWKGDVNLPCTYDPLQGYTQVLVKWLVQRGSDPVTIFLRDSSGDHIQQAKYQGRLHVSHKVPGDVSLQLSTLEMDDRSHYTCEVTWQTPDGNQVVRDKITELRVQKLSVSKPTVTTGSGYGFTVPQGMRISLQCQARGSPPISYIWYKQQTNNQEPIKVATLSTLLFKPAVIADSGSYFCTAKGQVGSEQHSDIVKFVVKDSSKLLKTKTEAPTTMTYPLKATSTVKQSWDWTTDMDGYLGETSAGPGKSLPVFAIILIISLCCMVVFTMAYIMLCRKTSQQEHVYEAARAHAREANDSGETMRVAIFASGCSSDEPTSQNLGNNYSDEPCIGQEYQIIAQINGNYARLLDTVPLDYEFLATEGKSVC

SEQ ID NO: 66290 - protein, 691 aa, Homo sapiens
IYSALIFIPWYFLTNAKKKNAMAKRIKAKPTSDKPGSPYRSVTHFDSLAVIDIPGADTLDKLFDHAVSKFGKKDSLGTREILSEENEMQPNGKVFKKLILGNYKWMNYLEVNRRVNNFGSGLTALGLKPKNTIAIFCETRAEWMIAAQTCFKYNFPLVTLYATLGKEAVVHGLNESEASYLITSVELLESKLKTALLDISCVKHIIYVDNKAINKAEYPEGFEIHSMQSVEELGSNPENLGIPPSRPTPSDMAIVMYTSGSTGRPKGVMMHHSNLIAGMTGQCERIPGLGPKDTYIGYLPLAHVLELTAEISCFTYGCRIGYSSPLTLSDQSSKIKKGSKGDCTVLKPTLMAAVPEIMDRIYKNVMSKVQEMNYIQKTLFKIGYDYKLEQIKKGYDAPLCNLLLFKKVKALLGGNVRMMLSGGAPLSPQTHRFMNVCFCCPIGQGYGLTESCGAGTVTEVTDYTTGRVGAPLICCEIKLKDWQEGGYTINDKPNPRGEIVIGGQNISMGYFKNEEKTAEDYSVDENGQRWFCTGDIGEFHPDGCLQIIDRKKDLVKLQAGEYVSLGKVEAALKNCPLIDNICAFAKSDQSYVISFVVPNQKRLTLLAQQKGVEGTWVDICNNPAMEAEILKEIREAANAMKLERFEIPIKVRLSPEPWTPETGLVTDAFKLKRKELRNHYLKDIERMYGGK

SEQ ID NO: 66291 - protein, 551 aa, Homo sapiens
LPALLCTLAVLSAALLAAELKSKSCSEVRRLYVSKGFNKNDAPLHEINGDHLKICPQGSTCCSQEMEEKYSLQSKDDFKSVVSEQCNHLQAVFASRYKKFDEFFKELLENAEKSLNDMFVKTYGHLYMQNSELFKDLFVELKRYYVVGNVNLEEMLNDFWARLLERMFRLVNSQYHFTDEYLECVSKYTEQLKPFGDVPRKLKLQVTRAFVAARTFAQGLAVAGDVVSKVSVVNPTAQCTHALLKMIYCSHCRGLVTVKPCYNYCSNIMRGCLANQGDLDFEWNNFIDAMLMVAERLEGPFNIESVMDPIDVKISDAIMNMQDNSVQVSQKVFQGCGPPKPLPAGRISRSISESAFSARFRPHHPEERPTTAAGTSLDRLVTDVKEKLKQAKKFWSSLPSNVCNDERMAAGNGNEDDCWNGKGKSRYLFAVTGNGLANQGNNPEVQVDTSKPDILILRQIMALRVMTSKMKNAYNGNDVDFFDISDESSGEGSGSGCEYQQCPSEFDYNATDHAGKSANEKADSAGVRPGAQAYLLTVFCILFLVMQREWR

SEQ ID NO: 66292 - protein, 229 aa, Homo sapiens
KTFTVLLFCIRMSLGMTSIVMDPQPELWIESNYPQAPWENITLWCRSPSRISSKFLLLKDKTQMTWIRPSHKTFQVSFLIGALTESNAGLYRCCYWKETGWSKPSKVLELEAPGQLPKPIFWIQAETPALPGCNVNILCHGWLQDLVFMLFKEGYAEPVDYQVPTGTMAIFSIDNLTPEDEGVYICRTHIQMLPTLWSEPSNPLKLVVAGGCGYGCWHLAIVVPGIMAG

SEQ ID NO: 66293 - protein, 173 aa, Homo sapiens
KELQVSLFQTLVLLMFNEGEEFSLEEIKQATGIEDGELRRTLQSLACGKARVLAKNPKGKDIEDGDKFICNDDFKHKLFRIKINQIQMKETVEEQASTTERVFQDRQYQIDAAIVRIMKMRKTLSHNLLVSEVYNQLKFPVKPADLKKRIESLIDRDYMERDKENPNQYNYIA

SEQ ID NO: 66294 - protein, 120 aa, Homo sapiens
MAAGPSGCLVPAFGLRLLLATVLQAVSAFGAEFSSEACRELGFSSNLLCSSCDLLGQFNLLQLDPDCRGCCQEEAQFETKKLYAGAILEVCGKLGRFPQVQVCPWFRPCIKAFGRQWEHC

SEQ ID NO: 66295 - protein, 216 aa, Homo sapiens
MWSIGAGALGAAALALLLANTDVFLSKPQKAALEYLEDIDLKTLEKEPRTFKAKELWEKNGAVIMAVRRPGCFLCREEAADLSSLKSMLDQLGVPLYAVVKEHIRTEVKDFQPYFKGEIFLDEKKKFYGPQRRKMMFMGFIRLGVWYNFFRAWNGGFSGNLEGEGFILGGVFVVGSGKQGILLEHREKEFGDKVNLLSVLEAAKMIKPQTLASEKK

SEQ ID NO: 66296 - protein, 172 aa, Homo sapiens [sequence omitted]

SEQ ID NO: 66297 - protein, 278 aa, Homo sapiens
MWPALLLSHLLPLWPLLLLPLPPPAQGSSSSPRTPPAPARPPCARGGPSAPRHVCVWERAPPPSRSPRVPRSRRQVLPGTAPPATPSGFEEGPPSSQYPWAIVWGPTVSREDGGDPNSANPGFLDYGFAAPHGLATPHPNSDSMRGDGDGLILGEAPATLRPFLFGGRGEGVDPQLYVTITISIIIVLVATGIIFKFCWDRSQKRRRPSGQQGALRQEESQQPLTDLSPAGVTVLGAFGDSPTPTPDHEEPRGGPRPGMPHPKGAPAFQLNRIPLVNL

SEQ ID NO: 66298 - protein, 525 aa, Homo sapiens
MLLDLWTPLIILWITLPPCIYMAPMNQSQVLMSGSPLELNSLGEEQRILNRSKRGWVWNQMFVLEEFSGPEPILVGRLHTDLDPGSKKIKYILSGDGAGTIFQINDVTGDIHAIKRLDREEKAEYTLTAQAVDWETSKPLEPPSEFIIKVQDINDNAPEFLNGPYHATVPEMSILGTSVTNVTATDADDPVYGNSAKLVYSILEGQPYFSIEPETAIIKTALPNMDREAKEEYLVVIQAKDMGGHSGGLSGTTTLTVTLTDVNDNPPKFAQSLYHFSVPEDVVLGTAIGRVKANDQDIGENAQSSYDIIDGDGTALFEITSDAQAQDGIIRLRKPLDFETKKSYTLKVEAANVHIDPRFSGRGPFKDTATVKIVVEDADEPPVFSSPTYLLEVHENAALNSVIGQVTARDPDITSSPIRFSIDRHTDLERQFNINADDGKITLATPLDRELSVWHNITIIATEIRNHSQISRVPVAIKVLDVNDNAPEFASEYEAFLCENGKPGQVNISMLLMLNMFVYNCLIFD

SEQ ID NO: 66299 - protein, 228 aa, Homo sapiens
MYLGLSFLIWEVIAFEETHLTSLDPVKQFAAWFEEAVQCPDIGEANAMCLATCTRDGKPSARMLLLKGFGKDGFRFFTNFESRKGKELDSNPFASLVFYWEPLNRQVRVEGPVKKLPEEEAECYFHSRPKSSQIGAVVSHQSSVIPDREYLRKKNEELEQLYQDQEVPKPKSWGGYVLYPQVMEFWQGQTNRLHDRIVFRRGLPTGDSPLGPMTHRGEEDWLYERLAP

SEQ ID NO: 66300 - protein, 1940 aa, Homo sapiens
MVSVVGPMGLLVVLLVGGCAAEEPPRFIKEPKDQIGVSGGVASFVCQATGDPKPRVTWNKKGKKVNSQRFETIEFDESAGAVLRIQPLRTPRDENVYECVAQNSVGEITVHAKLTVLREDQLPSGFPNIDMGPQLKVVERTRTATMLCAASGNPDPEITWFKDFLPVDPSASNGRIKQLRSETFESTPIRGALQIESSEETDQGKYECVATNSAGVRYSSPANLYVRELREVRRVAPRFSILPMSHEIMPGGNVNITCVAVGSPMPYVKWMQGAEDLTPEDDMPVGRNVLELTDVKDSANYTCVAMSSLGVIEAVAQITVKSLPKAPGTPMVTENTATSITITWDSGNPDPVSYYVIEYKSKSQDGPYQIKEDITTTRYSIGGLSPNSEYEIWVSAVNSIGQGPPSESVVTRTGEQAPASAPRNVQARMLSATTMIVQWEEPVEPNGLIRGYRVYYTMEPEHPVGNWQKHNVDDSLLTTVGSLLEDETYTVRVLAFTSVGDGPLSDPIQVKTQQGVPGQPMNLRAEARSETSITLSWSPPRQESIIKYELLFREGDHGREVGRTFDPTTSYVVEDLKPNTEYAFRLAARSPQGLGAFTPVVRQRTLQSKPSAPPQDVKCVSVRSTAILVSWRPPPPETHNGALVGYSVRYRPLGSEDPEPKEVNGIPPTTTQILLEALEKWTQYRITTVAHTEVGPGPESSPVVVRTDEDVPSAPPRKVEAEALNATAIRVLWRSPAPGRQHGQIRGYQVHYVRMEGAEARGPPRIKDVMLADAQWETDDTAEYEMVITNLQPETAYSITVAAYTMKGDGARSKPKVVVTKGAVLGRPTLSVQQTPEGSLLARWEPPAGTAEDQVLGYRLQFGREDSTPLATLEFPPSEDRYTASGVHKGATYVFRLAARSRGGLGEEAAEVLSIPEDTPRGHPQILEAAGNASAGTVLLRWLPPVPAERNGAIVKYTVAVREAGALGPARETELPAAAEPGAENALTLQGLKPDTAYDLQVRAHTRRGPGPFSPPVRYRTFLRDQVSPKNFKVKMIMKTSVLLSWEFPDNYNSPTPYKIQYNGLTLDVDGRTTKKLITHLKPHTFYNFVLTNRGSSLGGLQQTVTAWTAFNLLNGKPSVAPKPDADGFIMVYLPDGQSPVPVQSYFIVMVPLRKSRGGQFLTPLGSPEDMDLEELIQDISRLQRRSLRHSRQLEVPRPYIAARFSVLPPTFHPGDQKQYGGFDNRGLEPGHRYVLFVLAVLQKSEPTFAASPFSDPFQLDNPDPQPIVDGEEGLIWVIGPVLAVVFIICIVIAILLYKNKPDSKRKDSEPRTKCLLNNADLAPHHPKDPVEMRRINFQTPDSGLRSPLREPGFHFESMLSHPPIPIADMAEHTERLKANDSLKLSQEYESIDPGQQFTWEHSNLEVNKPKNRYANVIAYDHSRVILQPIEGIMGSDYINANYVDGYRCQNAYIATQGPLPETFGDFWRMVWEQRSATIVMMTRLEEKSRIKCDQYWPNRGTETYGFIQVTLLDTIELATFCVRTFSLHKNGSSEKREVRQFQFTAWPDHGVPEYPTPFLAFLRRVKTCNPPDAGPIVVHCSAGVGRTGCFIVIDAMLERIKPEKTVDVYGHVTLMRSQRNYMVQTEDQYSFIHEALLEAVGCGNTEVPARSLYAYIQKLAQVEPGEHVTGMELEFKRLANSKAHTSRFISANLPCNKFKNRLVNIMPYESTRVCLQPIRGVEGSDYINASFIDGYRQQKAYIATQGPLAETTEDFWRMLWENNSTIVVMLTKLREMGREKCHQYWPAERSARYQYFVVDPMAEYNMPQYILREFKVTDARDGQSRTVRQFQFTDWPEQGVPKSGEGFIDFIGQVHKTKEQFGQDGPISVHCSAGVGRTGVFITLSIVLERMRYEGVVDIFQTVKMLRTQRPAMVQTEDEYQFCYQAALEYLGSFDHYAT

SEQ ID NO: 66301 - protein, 48 aa, Homo sapiens
MTLATILFLLGILIVISKKVKCRKADSSPTCKSCKSELPSSAPGGGGV

SEQ ID NO: 66302 - protein, 653 aa, Homo sapiens
MGFHLLVTVSLLFSHVDHVIAETEMEGEGNETGECTGSYYCKKGVILPIWEPQDPSFGDKIARATVYFVAMVYMFLGVSIIADRFMSSIEVITSQEKEITIKKPNGETTKTTVRIWNETVSNLTLMALGSSAPEILLSVIEVCGHNFTAGDLGPSTIVGSAAFNMFIIIALCVYVVPDGETRKIKHLRVFFVTAAWSIFAYTWLYIILSVISPGVVEVWEGLLTFFFFPICVVFAWVADRRLLFYKYVYKRYRAGKQRGMIIEHEGDRPSSKTEIEMDGKVVNSHVENFLDGALVLEVDERDQDDEEARREMARILKELKQKHPDKEIEQLIELANYQVLSQQQKSRAFYRIQATRLMTGAGNILKRHAADQARKAVSMHEVNTEVTENDPVSKIFFEQGTYQCLENCGTVALTIIRRGGDLTNTVFVDFRTEDGTANAGSDYEFTEGTVVFKPGDTQKEIRVGIIDDDIFEEDENFLVHLSNVKVSSEASEDGILEANHVSTLACLGSPSTATVTIFDDDHAGIFTFEEPVTHVSESIGIMEVKVLRTSGARGNVIVPYKTIEGTARGGGEDFEDTCGELEFQNDEIVKTISVKVIDDEEYEKNKTFFLEIGEPRLVEMSEKKGRSLPLEYLTVRNMRKSAVSPLCLRNQNG

SEQ ID NO: 66303 - protein, 236 aa, Homo sapiens
MPLALLVLLLLGPGGWCLAEPPRDSLREELVITPLPSGDVAATFQFRTRWDSELQREGVSHYRLFPKALGQLISKYSLRELHLSFTQGFWRTRYWGPPFLQAPSGAELWVWFQDTVTDVDKSWKELSNVLSGIFCASLNFIDSTNTVTPTASFKPLGLANDTDHYFLRYAVLPREVVCTENLTPWKKLLPCSSKAGLSVLLKADRLFHTSYHSQAVHIRPVCRHLLGAEADPVSCI

SEQ ID NO: 66304 - protein, 648 aa, Homo sapiens
MKPPRPVRTCSKVLVLLSLLAIHQTTTAEKNGIDIYSLTVDSRVSSRFAHTVVTSRVVNRANTVQEATFQMELPKKAFITNFSMIIDGMTYPGIIKEKAEAQAQYSAAVAKGKSAGLVKATGRNMEQFQVSVSVAPNAKITFELVYEELLKRRLGVYELLLKVRPQQLVKHLQMDIHIFEPQGISFLETESTFMTNQLVDALTTWQNKTKAHIRFKPTLSQQQKSPEQQETVLDGNLIIRYDVDRAISGGSIQIENGYFVHYFAPEGLTTMPKNVVFVIDKSGSMSGRKIQQTREALIKILDDLSPRDQFNLIVFSTEATQWRPSLVPASAENVNKARSFAAGIQALGGTNINDAMLMAVQLLDSSNQEERLPEGSVSLIILLTDGDPTVGETNPRSIQNNVREAVSGRYSLFCLGFGFDVSYAFLEKLALDNGGLARRIHEDSDSALQLQDFYQEVANPLLTAVTFEYPSNAVEEVTQNNFRLLFKGSEMVVAGKLQDRGPDVLTATVSGKLPTQNITFQTESSVAEQEAEFQSPKYIFHNFMERLWAYLTIQQLLEQTVSASDADQQALRNQALNLSLAYSFVTPLTSMVVTKPDDQEQSQVAEKPMEGESRNRNVHSGSTFFKYYLQGAKIPKPGDKVGGGGRGD

SEQ ID NO: 66305 - protein, 345 aa, Homo sapiens
MRYFLLRPETLFLLCISLALWSYFFHTDEVKTIVKSSRDAVKMVKGKVAEIMQNDRLGGLDVLEAEFSKTWEFKNHNVAVYSIQGRRDHMEDRFEVLTDLANKTHPSIFGIFDGHGGETAAEYVKSRLPEALKQHLQDYEKDKENSVLSYQTILEQQILSIDREMLEKLTVSYDEAGTTCLIALLSDKDLTVANVGDSRGVLCDKDGNAIPLSHDHKPYQLKERKRIKRAGGFISFNGSWRVQGILAMSRSLGDYPLKNLNVVIPDPDILTFDLDKLQPEFMILASDGLWDAFSNEEAVRFIKERLDEPHFGAKSIVLQSFYRGCPDNITVMVVKFRNSSKTEEQ

SEQ ID NO: 66306 - protein, 41 aa, Homo sapiens
MLTFFFSFFIFTNFLFCPHPSIPRGLSEFKIGFSWKSPVHR

SEQ ID NO: 66307 - protein, 488 aa, Homo sapiens [sequence omitted]

SEQ ID NO: 66308 - protein, 1206 aa, Homo sapiens
MPKKKRLSAGRVPLILFLCQMISALEVPLDPKLLEDLVQPPTITQQSPKDYIIDPRENIVIQCEAKGKPPPSFSWTRNGTHFDIDKDPLVTMKPGTGTLIINIMSEGKAETYEGVYQCTARNERGAAVSNNIVVRPSRSPLWTKEKLEPITLQSGQSLVLPCRPPIGLPPPIIFWMDNSFQRLPQSERVSQGLNGDLYFSNVLPEDTREDYICYARFNHTQTIQQKQPISVKVISVDELNDTIAANLSDTEFYGAKSSRERPPTFLTPEGNASNKEELRGNVLSLECIAEGLPTPIIYWAKEDGMLPKNRTVYKNFEKTLQIIHVSEADSGNYQCIAKNALGAIHHTISVRVKAAPYWITAPQNLVLSPGEDGTLICRANGNPKPRISWLTNGVPIEIAPDDPSRKIDGDTIIFSNVQERSSAVYQCNASNEYGYLLANAFVNVLAEPPRILTPANTLYQVIANRPALLDCAFFGSPLPTIEWFKGAKGSALHEDIYVLHENGTLEIPVAQKDSTGTYTCVARNKLGMAKNEVHLEIKDPTWIVKQPEYAVVQRGSMVSFECKVKHDHTLSLTVLWLKDNRELPSDERFTVDKDHLVVADVSDDDSGTYTCVANTTLDSVSASAVLSVVAPTPTPAPVYDVPNPPFDLELTDQLDKSVQLSWTPGDDNNSPITKFIIEYEDAMHKPGLWHHQTEVSGTQTTAQLKLSPYVNYSFRVMAVNSIGKSLPSEASEQYLTKASEPDKNPTAVEGLGSEPDNLVITWKPLNGFESNGPGLQYKVSWRQKDGDDEWTSVVVANVSKYIVSGTPTFVPYLIKVQALNDMGFAPEPAVVMGHSGEDLPMVAPGNVRVNVVNSTLAEVHWDPVPLKSIRGHLQGYRIYYWKTQSSSKRNRRHIEKKILTFQGSKTHGMLPGLEPFSHYTLNVRVVNGKGEGPASPDRVFNTPEGVPSAPSSLKIVNPTLDSLTLEWDPPSHPNGILTEYTLKYQPINSTHELGPLVDLKIPANKTRWTLKNLNFSTRYKFYFYAQTSAGSGSQITEEAVTTVDEAGILPPDVGAGKAMASRQVDIATQGWFIGLMCAVALLILILLIVCFIRRNKGGKYPVKEKEDAHADPEIQPMKEDDGTFGEYSDAEDHKPLKKGSRTPSDRTVKKEDSDDSLVDYGEGVNGQFNEDGSFIGQYSGKKEKEPAEGNESSEAPSPVNAMNSFV

SEQ ID NO: 66309 - protein, 445 aa, Homo sapiens
MVTVALSVALLALLKWYSTSAFSRLEKLGLRHPKPSPFIGNLTFFRQGFWESQMELRKLYGPLCGYYLGRRMFIVISEPDMIKQVLVENFSNFTNRMASGLEFKSVADSVLFLRDKRWEEVRGALMSAFSPEKLNEMVPLISQACDLLLAHLKRYAESGDAFDIQRCYCNYTTDVVASVAFGTPVDSWQAPEDPFVKHCKRFFEFCIPRPILVLLLSFPSIMVPLARILPNKNRDELNGFFNKLIRNVIALRDQQAAEERRRDFLQMVLDARHSASPMGVQDFDIVRDVFSSTGCKPNPSRQHQPSPMARPLTVDEIVGQAFIFLIAGYEIITNTLSFATYLLATNPDCQEKLLREVDVFKEKHMAPEFCSLEEGLPYLDMVIAETLRMYPPAFRFTREAAQDCEVLGQRIPAGAVLEMAVGALHHDPEHWPSPETFNPERYRCS

SEQ ID NO: 66310 - protein, 135 aa, Homo sapiens [sequence omitted]

SEQ ID NO: 66311 - protein, 811 aa, Homo sapiens [sequence omitted]

SEQ ID NO: 66312 - protein, 353 aa, Homo sapiens
MRLLTLALLFSCSVARAACDPKIVNIGAVLSTRKHEQMFREAVNQANKRHGSWKIQLNATSVTHKPNAIQMALSVCEDLISSQVYAILVSHPPTPNDHFTPTPVSYTAGFYRIPVLGLTTRMSIYSDKSIHLSFLRTVPPYSHQSSVWFEMMRVYSWNHIILLVSDDHEGRAAQKRLETLLEERESKSKKRNYENLDQLSYDNKRGPKAEKVLQFDPGTKNVTALLMEAKELEARVIILSASEDDAATVYRAAAMLNMTGSGYVWLVGEREISGNALRYAPDAHQRQERVGPHQRRRGRGGPGRARAPREGEHHRPAAGLRGQHQHLEDRAALQESADVFQVCGWGDWSRGVQ

SEQ ID NO: 66313 - protein, 529 aa, Homo sapiens
MPPLLLLSAFIFLVSVLGGAPGHNPDRRTKMVSIHSLSELERLKLQETAYHELVARHFLSEFKPDRALPIDRPNTLDKWFLILRGQQRAVSHKTFGISLEEVLVNEFTRRKHLELTATMQVEEATGQAAGRRRGNVVRRVFGRIRRFFSRRRNEPTLPREFTRRGRRGAVSVDSLAELEDGALLLQTLQLSKISFPIGQRLLGSKRKMSLNPIAKQIPQVVEACCQFIEKHGLSAVGIFTLEYSVQRVRQLREEFDQGLDVVLDDNQNVHDVAALLKEFFRDMKDSLLPDDLYMSFLLTATLKPQDQLSALQLLVYLMPPCHSDTLERLLKALHKITENCEDSIGIDGQLVPGNRMTSTNLALVFGSALLKKGKFGKRESRKTKLGIDHYVASVNVVRAMIDNWDVLFQVPPHIQRQVAKRVWKSSPEALDFIRRRNLRKIQSARIKMEEDALLSDPVETSAEARAAVLAQSKPSDEGSSEEPAVPSGTARSHDDEEGAGNPPIPEQDRPLLRVPREKEAKTGVSYFFP

SEQ ID NO: 66314 - protein, 1325 aa, Homo sapiens
MLKTFTVLLFCIRMSLGMTSIVMDPQPELWIESNYPQAPWENITLWCRSPSRISSKFLLLKDKTQMTWIRPSHKTFQVSFLIGALTESNAGLYRCCYWKETGWSKPSKVLELEAPGQLPKPIFWIQAETPALPGCNVNILCHGWLQDLVFMLFKEGYAEPVDYQVPTGTMAIFSIDNLTPEDEGVYICRTHIQMLPTLWSEPSNPLKLVVAGLYPKPTLTAHPGPIMAPGESLNLRCQGPIYGMTFALMRVEDLEKSFYHKKTIKNEANFFFQSLKIQDTGHYLCFYYDASYRGSLLSDVLKIWVTDTFPKTWLLARPSAVVQMGQNVSLRCRGPVDGVGLALYKKGEDKPLQFLDATSIDDNTSFFLNNVTYSDTGIYSCHYLLTWKTSIRMPSHNTVELMVVDKPPKPSLSAWPSTVFKLGKAITLQCRVSHPVLEFSLEWEERETFQKFSVNGDFIISNVDGKGTGTYSCSYRVETHPNIWSHRSEPLKLMGPAGYLTWNYVLNEAIRLSLIMQLVALLLVVLWIRWKCRRLRIREAWLLGTAQGVTMLFIVTALLCCGLCNGVLIEETEIVMPTPKPELWAETNFPLAPWKNLTLWCRSPSGSTKEFVLLKDGTGWIATRPASEQVRAAFPLGALTQSHTGSYHCHSWEEMAVSEPSEALELVGTDILPKPVISASPTIRGQELQLRCKGWLAGMGFALYKEGEQEPVQQLGAVGREAFFTIQRMEDKDEGNYSCRTHTEKRPFKWSEPSEPLELVIKEMYPKPFFKTWASPVVTPGARVTFNCSTPHQHMSFILYKDGSEIASSDRSWASPGASAAHFLIISVGIGDGGNYSCRYYDFSIWSEPSDPVELVVTEFYPKPTLLAQPGPVVFPGKSVILRCQGTFQGMRFALLQEGAHVPLQFRSVSGNSADFLLHTVGAEDSGNYSCIYYETTMSNRGSYLSMPLMIWVTDTFPKPWLFAEPSSVVPMGQNVTLWCRGPVHGVGYILHKEGEATSMQLWGSTSNDGAFPITNISGTSMGRYSCCYHPDWTSSIKIQPSNTLELLVTGLLPKPSLLAQPGPMVAPGENMTLQCQGELPDSTFVLLKEGAQEPLEQQRPSGYRADFWMPAVRGEDSGIYSCVYYLDSTPFAASNHSDSLEIWVTDKPPKPSLSAWPSTMFKLGKDITLQCRGPLPGVEFVLEHDGEEAPQQFSEDGDFVINNVEGKGIGNYSCSYRLQAYPDIWSEPSDPLELVGAAGPVAQECTVGNIVRSSLIVVVVVALGVVLAIEWKKWPRLRTRGSETDGRDQTIALEECNQEGEPGTPANSPSSTSQRISVELPVPI

SEQ ID NO: 66315 - protein, 40 aa, Homo sapiens
VAIYGIIMAIVISNMAEPFSATDPKAIGHRNYHAGGWMGV

SEQ ID NO: 66316 - protein, 25 aa, Homo sapiens
IFGSAIGLFGVIVAILQTSRVKMGD

SEQ ID NO: 66317 - protein, 71 aa, Homo sapiens
KHPSLIPLFVFIGTGASGATLYLLHLALFNPDVCWDRNNPEPWNKLGPNDQYKFCSVNVDYSKLKKECPDF

SEQ ID NO: 66318 - protein, 39 aa, Homo sapiens
VDWWALGVLIYEMAAGYPPFFADQPIQIYEKIVSGKQNF

SEQ ID NO: 66319 - protein, 14 aa, Homo sapiens
LVLTVLSSMGLAAM

SEQ ID NO: 66320 - protein, 208 aa, Homo sapiens
VGALLVCAVLGLCLAVPDKTVRWCAVSEHEATKCQSFRDHMKSVIPSDGPSVACVKKASYLDCIRAIAANEADAVTLDAGLVYDAYLAPNNLKPVVAEFYGSKEDPQTFYYAVAVVKKDSGFQMNQLRGKKSCHTGLGRSAGWNIPIGLLYCDLPEPRKPLEKAVANFFSGSCAPCADGTDFPQLCQLCPGCGCSTLNQYFGYSGAFK

SEQ ID NO: 66321 - protein, 185 aa, Homo sapiens
LLLLSALAGLFGAAEGQAFHLGKCPNPPVQENFDVNKYLGRWYEIEKIPTTFENGRCIQANYSLMENGKIKVLNQELRADGTVNQIEGEATPVNLTEPAKLEVKFSWFMPSAPYWILATDYENYALVYSCTCIIQLFHVDFAWILARNPNLPPETVDSLKNILTSNNIDVKKMTVTDQVNCPKLS

SEQ ID NO: 66322 - protein, 20 aa, Homo sapiens
VLFRHKIISLILSPFAFASR

SEQ ID NO: 66323 - protein, 608 aa, Homo sapiens
KWVTFISLLFLFSSAYSRGVFRRDAHKSEVAHRFKDLGEENFKALVLIAFAQYLQQCPFEDHVKLVNEVTEFAKTCVADESAENCDKSLHTLFGDKLCTVATLRETYGEMADCCAKQEPERNECFLQHKDDNPNLPRLVRPEVDVMCTAFHDNEETFLKKYLYEIARRHPYFYAPELLFFAKRYKAAFTECCQAADKAACLLPKLDELRDEGKASSAKQRLKCASLQKFGERAFKAWAVARLSQRFPKAEFAEVSKLVTDLTKVHTECCHGDLLECADDRADLAKYICENQDSISSKLKECCEKPLLEKSHCIAEVENDEMPADLPSLAADFVESKDVCKNYAEAKDVFLGMFLYEYARRHPDYSVVLLLRLAKTYETTLEKCCAAADPHECYAKVFDEFKPLVEEPQNLIKQNCELFEQLGEYKFQNALLVRYTKKVPQVSTPTLVEVSRNLGKVGSKCCKHPEAKRMPCAEDYLSVVLNQLCVLHEKTPVSDRVTKCCTESLVNRRPCFSALEVDETYVPKEFNAETFTFHADICTLSEKERQIKKQTALVELVKHKPKATKEQLKAVMDDFAAFVEKCCKADDKETCFAEEGKKLVAASQAALGL

SEQ ID NO: 66324 - protein, 9 aa, Homo sapiens
VFLFVYFLP

SEQ ID NO: 66325 - protein, 645 aa, Homo sapiens
KMFSMRIVCLVLSVVGTAWTADSGEGDFLAEGGGVRGPRVVERHQSACKDSDWPFCSDEDWNYKCPSGCRMKGLIDEVNQDFTNRINKLKNSLFEYQKNNKDSHSLTTNIMEILRGDFSSANNRDNTYNRVSEDLRSRIEVLKRKVIEKVQHIQLLQKNVRAQLVDMKRLEVDIDIKIRSCRGSCSRALAREVDLKDYEDQQKQLEQVIAKDLLPSRDRQHLPLIKMKPVPDLVPGNFKSQLQKVPPEWKALTDMPQMRMELERPGGNEITRGGSTSYGTGSETESPRNPSSAGSWNSGSSGPGSTGNRNPGSSGTGGTATWKPGSSGPGSTGSWNSGSSGTGSTGNQNPGSPRPGSTGTWNPGSSERGSAGHWTSESSVSGSTGQWHSESGSFRPDSPGSGNARPNNPDWGTFEEVSGNVSPGTRREYHTEKLVTSKGDKELRTGKEKVTSGSTTTTRRSCSKTVTKTVIGPDGHKEVTKEVVTSEDGSDCPEAMDLGTLSGIGTLDGFRHRHPDEAAFFDTASTGKTFPGFFSPMLGEFVSETESRGSESGIFTNTKESSSHHPGIAEFPSRGKSSSYSKQFTSSTSYNRGDSTFESKSYKMADEAGSEADHEGTHSTKRGHAKSRPVRGIHTSPLGKPSLSP

SEQ ID NO: 66326 - protein, 63 aa, Homo sapiens
VTTPAMWRSLGLALALCLLPSGGTESQDQSSLCKQPPAWSIRDQDPMLNSNGSVTVVALLQAS

SEQ ID NO: 66327 - protein, 184 aa, Homo sapiens
LYTGFSILVTLLLAGQATTAYFLYQQQGRLDKLTVTSQNLQLENLRMKLPKPPKPVSKMRMATPLLMQALPMGALPQGPMQNATKYGNMTEDHVMHLLQNADPLKVYPPLKGSFPENLRHLKNTMETIDWKVFESWMHHWLLFEMSRHSLEQKPTDAPPKESLELEDPSSGLGVTKQDLGPVPM

SEQ ID NO: 66328 - protein, 299 aa, Homo sapiens
IFFLLCLAGRALAAPQQEALPDETEVVEETVAEVTEVSVGANPVQVEVGEFDDGAEETEEEVVAENPCQNHHCKHGKVCELDENNTPMCVCQDPTSCPAPIGEFEKVCSNDNKTFDSSCHFFATKCTLEGTKKGHKLHLDYIGPCKYIPPCLDSELTEFPLRMRDWLKNVLVTLYERDEDNNLLTEKQKLRVKKIHENEKRLEAGDHPVELLARDFEKNYNMYIFPVHWQFGQLDQHPIDGYLSHTELAPLRAPLIPMEHCTTRFFETCDLDNDKYIALDEWAGCFGIKQKDIDKDLVI

SEQ ID NO: 66329 - protein, 71 aa, Homo sapiens
KTLTFFVALPGVAVSMLNVYLKSHHGEHERPEFIAYPHLRIRTKPFPWGDGNHTLFHNPHVNPLPTGYEDE

SEQ ID NO: 66330 - protein, 11 aa, Homo sapiens
LSYFQKLLLVL

SEQ ID NO: 66331 - protein, 63 aa, Homo sapiens
VPSATFFTALLSLLVSGPRLFLLQQPLAPSGLTLKSEALRNWQATMEGGVRITAEETGTQSVK

SEQ ID NO: 66332 - protein, 67 aa, Homo sapiens
LIPLFVFIGTGATGATLYLLRLALFNPDVCWDRNNPEPWNKLGPNDQYKFYSVNVDYSKLKKERPDF

SEQ ID NO: 66333 - protein, 18 aa, Homo sapiens
LFIASVFMLHIWGKYTRS

SEQ ID NO: 66334 - protein, 7 aa, Homo sapiens
ILLLLAV

SEQ ID NO: 66335 - protein, 346 aa, Homo sapiens
LLLLLSACLAVSAGPVPTPPDNIQVQENFNISRIYGKWYNLAIGSTCPWLKKIMDRMTVSTLVLGEGATEAEISMTSTRWRKGVCEETSGAYEKTDTDGKFLYHKSKWNITMESYVVHTNYDEYAIFLTKKFSRHHGPTITAKLYGRAPQLRETLLQDFRVVAQGVGIPEDSIFTMADRGECVPGEQEPEPILIPRVRRAVLPQEEEGSGGGQLVTEVTKKEDSCQLGYSAGPCMGMTSRYFYNGTSMACETFQYGGCMGNGNNFVTEKECLQTCRTVAACNLPIVRGPCRAFIQLWAFDAVKGKCVLFPYGGCQGNGNKFYSEKECREYCGVPGDGDEELLRFSN

SEQ ID NO: 66336 - protein, 130 aa, Homo sapiens
ITMGIQGGSVLFGLLLVLAVFCHSGHSLQCYNCPNPTADCKTAVNCSSDFDACLITKAGLQVYNKCWKFEHCNFNDVTTRLRENELTYYCCKKDLCNFNEQLENGGTSLSEKTVLLLVTPFLAAAWSLHP

SEQ ID NO: 66337 - protein, 16 aa, Homo sapiens
IFLLILLQVIINFMFK

SEQ ID NO: 66338 - protein, 438 aa, Homo sapiens
LESTSYIQLPEAELRMERMLPLLALGLLAAGFCPAVLCHPNSPLDEENLTQENQDRGTHVDLGLASANVDFAFSLYKQLVLKAPDKNVIFSPLSISTALAFLSLGAHNTTLTEILKGLKFNLTETSEAEIHQSFQHLLRTLNQSSDELQLSMGNAMFVKEQLSLLDRFTEDAKRLYGSEAFATDFQDSAAAKKLINDYVKNGTRGKITDLIKDLDSQTMMVLVNYIFFKAKWEMPFDPQDTHQSRFYLSKKKWVMVPMMSLHHLTIPYFRDEELSCTVVELKYTGNASALFILPDQDKMEEVEAMLLPETLKRWRDSLEFREIGELYLPKFSISRDYNLNDILLQLGIEEAFTSKADLSGITGARNLAVSQVVHKAVLDVFEEGTEASAATAVKITLLSALVETRTIVRFNRPFLMIIVPTDTQNIFFMSKVTNPKQA

SEQ ID NO: 66339 - protein, 344 aa, Homo sapiens
ISPVLILFSSFLCHVAIAGRTCPKPDDLPFSTVVPLKTFYEPGEEITYSCKPGYVSRGGMRKFICPLTGLWPINTLKCTPRVCPFAGILENGAVRYTTFEYPNTISFSCNTGFYLNGADSAKCTEEGKWSPELPVCAPIICPPPSIPTFATLRVYKPSAGNNSLYRDTAVFECLPQHAMFGNDTITCTTHGNWTKLPECREVKCPFPSRPDNGFVNYPAKPTLYYKDKATFGCHDGYSLDGPEEIECTKLGNWSAMPSCKASCKVPVKKATVVYQGERVKIQEKFKNGMLHGDKVSFFCKNKEKKCSYTEDAQCIDGTIEVPKCFKEHSSLAFWKTDASDVKPC

SEQ ID NO: 66340 - protein, 67 aa, Homo sapiens
MASHRLLLLCLAGLVFVSEAGPTGTGESKCPLMVKVLDAVRGSPAINVAVHVFRKAADDTWEPFASG

SEQ ID NO: 66341 - protein, 41 aa, Homo sapiens
IGWYIFRVLLQVFRYSLQKLAYTVSRTGRQVLGERRQRAPN

SEQ ID NO: 66342 - protein, 51 aa, Homo sapiens
LLFRRTSTFALTIIVGVMFFERAFDQGADAIYDHINEGKLWKHIKHKYENK

SEQ ID NO: 66343 - protein, 32 aa, Homo sapiens
LTATLTFGLFAGLGGAGASTSGSSGACGFSYK

SEQ ID NO: 66344 - protein, 469 aa, Homo sapiens
MGRVRRIYPQLLLALLIQVHYHIGLNLPGCVAPPKDTKKGAQPSPFVPVRWVVKVVKTLLLRMGCSYETTFLEDQGGWELMEQVESHHRGVALLARAMVQYSCQELCRILYLLIPLLERGDEKHRITATAFFVELLQMEQVRRIPEEYSLGRMAEGLSHHDPIMKVLSIRGLVILARRSEKTAKVKALLPSMVKGLKNMDGMLVVEAVHNLKAVFKGRDQKLMDSAVYVEMLQILLPHFSDAREVVRSSCINLYGKVVQKLRAPRTQAMEEQLVSTLVPLLLTMQEGNSKVSQKCVKTLLRCSYFMAWELPKRAYSRKPWDNQQQTVAKICKCLVNTHRDSAFIFLSQSLEYAKNSRASLRKCSVMFIGSLVPCMESIMTEDRLNEVKAALDNLRHDPEASVCIYAAQVQDHILASCWQNSWLPHGNSWVCYSATTHRWSPSCENLPTSHQRRSWIMQALGSWKMSLKK

SEQ ID NO: 66345 - protein, 176 aa, Homo sapiens
MLFSALLLEVIWILAADGGQHWTYEGEQISRPPDNPFTLGPPHLAGRHTVRPHGYDQPGTEPLDLHNNGHTVQLSLPSTLYLGGLPRKYVAAQLHLHWGQKGSPGGSEHQINSEATFAELHIVHYDSDSYDSLSEAAERPQGLAVLGILIEVGETKNIAYEHILSHLHEVRHKGEP

SEQ ID NO: 66346 - protein, 1790 aa, Homo sapiens [sequence omitted]

SEQ ID NO: 66347 - protein, 20 aa, Homo sapiens
MFFLYLGWLFLHSYLRRITS

SEQ ID NO: 66348 - protein, 54 aa, Homo sapiens
MASYALGAVGGVCALANVLGAQVCQLERLCCTGQWEDAQKLQHRLIEPNAAKIL

SEQ ID NO: 66349 - protein, 793 aa, Homo sapiens
MVLVLLLVLSRGESELDAKIPSTGDATEWRNPHLSMLGSCQPAPSCQKCILSHPSCAWCKQLNFTASGEAEARRCARREELLARGCPLEELEEPRGQQEVLQDQPLSQGARGEGATQLAPQRVRVTLRPGEPQQLQVRFLRAEGYPVDLYYLMDLSYSMKDDLERVRQLGHALLVRLQEVTHSVRIGFGSFVDKTVLPFVSTVPSKLRHPCPTRLERCQSPFSFHHVLSLTGDAQAFEREVGRQSVSGNLDSPEGGFDAILQAALCQEQIGWRNVSRLLVFTSDDTFHTAGDGKLGGIFMPSDGHCHLDSNGLYSRSTEFDYPSVGQVAQALSAANIQPIFAVTSAALPVYQELSKLIPKSAVGELSEDSSNVVQLIMDAYNSLSSTVTLEHSSLPPGVHISYESQCEGPEKREGKAEDRGQCNHVRINQTVTFWVSLQATHCLPEPHLLRLRALGFSEELIVELHTLCDCNCSDTQPQAPHCSDGQGHLQCGVCSCAPGRLGRLCECSVAELSSPDLESGCRAPNGTGPLCSGKGHCQCGRCSCSGQSSGHLCECDDASCERHEGILCGGFGRCQCGVCHCHANRTGRACECSGDMDSCISPEGGLCSGHGRCKCNRCQCLDGYYGALCDQCPGCKTPCERHRDCAECGAFRTGPLATNCSTACAHTNVTLALAPILDDGWCKERTLDNQLFFFLVEDDARGTVVLRVRPQEKGADHTQAIVLGCVGGIVAVGLGLVLAYRLSVEIYDRREYSRFEKEQQQLNWKQDSNPLYKSAITTTINPRFQEADSPTL

SEQ ID NO: 66350 - protein, 539 aa, Homo sapiens
MGSPVSHLLAGFCVWVVLGWVGGSVPNLGPAEQEQNHYLAQLFGLYGENGTLTAGGLARLLHSLGLGRVQGLRLGQHGPLTGRAASPAADNSTHRPQNPELSVDVWAGMPLGPSGWGDLEESKAPHLPRGPAPSGLDLLHRLLLLDHSLADHLNEDCLNGSQLLVNFGLSPAAPLTPRQFALLCPALLYQIDSRVCIGAPAPAPPGDLLSALLQSALAVLLLSLPSPLSLLLLRLLGPRLLRPLLGFLGALAVGTLCGDALLHLLPHAQEGRHAGPGGLPEKDLGPGLSVLGGLFLLFVLENMLGLLRHRGLRPRCCRRKRRNLETRNLDPENGSGMALQPLQAAPEPGAQGQREKNSQHPPALAPPGHQGHSHGHQGGTDITWMVLLGDGLHNLTDGLAIGAAFSDGFSSGLSTTLAVFCHELPHELGDFAMLLQSGLSFRRLLLLSLVSGALGLGGAVLGVGLSLGPVPLTPWVFGVTAGVFLYVALVDMLPALLRPPEPLPTPHVLLQGLGLLLGGGLMLAITLLEERLLPVTTEG

SEQ ID NO: 66351 - protein, 64 aa, Homo sapiens
MCVLYLIFLFGGGGGRGEVLAGPALNSLDRATDLWGLEVPAEKGRRQQRGCREKGLLEEPEQEG

SEQ ID NO: 66352 - protein, 39 aa, Homo sapiens
MPMCVFLLVWSISRRSLAAELSQWKLVRGTQMRNGPRPS

SEQ ID NO: 66353 - protein, 156 aa, Homo sapiens
MHRSGHLSWVTSLVAIGLGSGAACTERRPWAQRAAGAPGGSFTEAGLGLAPEPVRSGVGSGAGDSAMATAGAACVSAVAPSDPIGARDLSGAAAAGPGRTGEGDAGRHGDLGRRAGGGGHAGGSAGRGRGGHRAAEKVPMAWGSGARVGKTQDIAS

SEQ ID NO: 66354 - protein, 397 aa, Homo sapiens
MGAIFAGHLVVHLTAVSIDPADANVRDKSYAGPLPIFNRSQHAHVIEDLHCNLCNVDVSARSKHCSACNKCVCGFDHHCKWLNNCVGERNYRLFLHSVASALLGVLLLVLVATYVFVEFFVNPMRLRTNRHFEVLKNHTDVWFVFLPAAPVETQAPAILALAALLILLGLLSTALLGHLLCFHIYLMWHKLTTYEYIVQHRPPQEAKGVHRELESCPPKMRPIQEMEFYMRTFRHMRPEPPGQAGPAAVNANPSQFLATRGQAEPPPPSSPDTLALPPRIRPQKKRKRRVYKVRTSETSDPASGPRAPSRRSSSSTDSADASPVHAAGPAGAYHSASAESVDEIPVAQTRLGSAALAAPRGRGRQPTLARQARAPAVFVSPSSGEPRAPGGREAGLA

SEQ ID NO: 66355 - protein, 400 aa, Homo sapiens
MGAIFAGHLVVHLTAVSIDPADANVRDKSYAGPLPIFNRSQHAHVIEDLHCNLCNVDVSARSKHCSACNKCVCGFDHHCKWLNNCVGERNYRLFLHSVASALLGVLLLVLVATYVFVEFFVNPMRLRTNRHFEVLKNHTDVWFVFLPAAPVETQAPAILALAALLILLGLLSTALLGHLLCFHIYLMWHKLTTYEYIVQHRPPQEAKGVHRELESCPPKMRPIQEMEFYMRTFRHMRPEPPGQAGPAAVNAKHSRPASPDPTPGRRDCAGPPVQVEWDRKKPLPWRSPLLLLAMWGPQAPPCLCRKRGRGACIKCERLRPRIRRRGLGPPAAAPARRRIPRTPALCTPLALPAPTTRRRQSPWTRFQWRRRAWAAPLWPPRGAGADSPRWRGRRVRPPFS

SEQ ID NO: 66356 - protein, 58 aa, Homo sapiens [sequence omitted]

SEQ ID NO: 66357 - protein, 311 aa, Homo sapiens
MYRERLRTLLVIAVVMSLLNALSTSGGSISWNDFVHEMLAKGEVQRVQVVPESDVVEVYLHPGAVVFGRPRLALMYRMQVANIDKFEEKLRAAEDELNIEAKDRIPVSYKRTGFFGNALYSVGMTAVGLAILWYVFRLAGMTGREGGFSAFNQLKMARFTIVDGKMGKGVSFKDVAGMHEAKLEVREFVDYLKSPERFLQLGAKVPKGALLLGPPGCGKTLLAKAVATEAQVPFLAMAGPEFVEVIGGLGAARVRSLFKEARARAPCIVYIDEIDAVGKKRSTTMSGFSNTEEEQTLNQLLVEMDGEAGDF

SEQ ID NO: 66358 - protein, 228 aa, Homo sapiens
MLGFMGVTALLSMWISNTATTAMMVPIVEAILQQMEATSAATEAGLELVDKGKAKELPGSQVIFEGPTLGQQEDQERKRLCKAMTLCICYAASIGGTATLTGTGPNVVLLGQMNELFPDSKDLVNFASWFAFAFPNMLVMLLFAWLWLQFVYMRFNFKKSWGCGLESKKNEKAALKVLQEEYRKLGPLSFAEINVLICFFLLVILWFSRDPGFMPGWLTVAWVEGETK

SEQ ID NO: 66359 - protein, 158 aa, Homo sapiens [sequence omitted]

SEQ ID NO: 66360 - protein, 1070 aa, Homo sapiens
MSGRGGAALLCLSALLAHASGRSHPASPSPPGPQASPVLPVSYRLSHTRLAFFLREARPPSPAVANSSLQRSEPFVVFQTKELPVLNVSLGPFSTSQVVARELLQPSSTLDIPERLTVNWKVRAFIVRSHVPASQPVVQVLFYVAGRDWDDFGVTERLPCVRLHAFRDAREVKSSCRLSGGLATCLVRAELPLAWFGPPAPAAPPTARRKSPDGLEPEATGESQQAELYYTLHAPDASGGCGGSRRGAGPGVGARAESPTQHPLLRIGSISLFRPPPRRTLQEHRLDSNLMIRLPDRPLKPGEVLSILLYLAPNSSSPSSPSVEHFTLRVKAKKGVTLLGTKSRSGQWHVTSELLTGAKHSTATVDVAWAQSTPLPPREGQGPLEILQLDFEMENFTSQSVKRRIMWHIDYRGHGALPDLERAVTELTVIQRDVQAILPLAMDTEIINTAILTGRTVAIPVKVIAIEVNGLVLDISALVECESDNEDIIKVSSSCDYVFVSGKESRGSMNARVTFRYDVLNAPLEMTVWVPKLPLHIELSDARLSQVKGWRVPILPDRRSVRESEDEDEEEEERRQSASRGCTLQYQHATLQVFTQFHTTSSEGTDQVVTMLGPDWLVEVTDLVSDFMRVGDPRVAHMVDSSTLAGLEPGTTPFKVVSPLTEAVLGETLLTVTEEKVSITQLQAQVVASLALSLRPSPGSSHTILATTAAQQTLSFLKQEALLSLWLSYSDGTTAPLSLYSPRDYGLLVSSLDEHVATVTQDRAFPLVVAEAEGSGELLRAELTIAESCQKTKRKSVLATTPVGLRVHFGRDEEDPTYDYPGPSQPGPGGGEDEARGAGPPGSALPAPEAPGPGTASPVVPPTEDFLPLPTGFLQVPRGLTDLEIGMYALLGVFCLAILVFLINCIVFVLRYRHKRIPPEGQTSMDHSHHWVFLGNGQPLRVQGELSPPAGNPLETVPAFCHGDHHSSGSSQTSVQSQVHGRGDGSSGGSARDQAEDPASSPTSKRKRVKFTTFTTLPSEELAYDSVPAGEEDEEEEEDLGWGCPDVAGPTRPTAPPDLHNYMRRIKEIA

SEQ ID NO: 66361 - protein, 224 aa, Homo sapiens [sequence omitted]

SEQ ID NO: 66362 - protein, 500 aa, Homo sapiens
MAASLLAVLLLLLERGMFSSPSPPPALLEKVFQYIDLHQDEFVQTLKEWVAIESDSVQPVPRFRQELFRMMAVAADTLQRLGARVASVDMGPQQLPDGQSLPIPPVILAELGSDPTKGTVCFYGHLDVQPADRGDGWLTDPYVLTEVDGKLYGRGATDNKGPVLAWINAVSAFRALEQDLPVNIKFIIEGMEEAGSVALEELVEKEKDRFFSGVDYIVISDNLWISQRKPAITYGTRGNSYFMVEVKCRDQDFHSGTFGGILHEPMADLVALLGSLVDSSGHILVPGIYDEVVPLTEEEINTYKAIHLDLEEYRNSSRVEKFLFDTKEEILMHLWRYPSLSIHGIEGAFDEPGTKTVIPGRVIGKFSIRLVPHMNVSAVEKQVTRHLEDVFSKRNSSNKMVVSMTLGLHPWIANIDDTQYLAAKRAIRTVFGTEPDMIRDGSTIPIAKMFQEIVHKSVVLIPLGAVDDGEHSQNEKINRWNYIEGTKLFAAFFLEMAQLH

SEQ ID NO: 66363 - protein, 30 aa, Homo sapiens
METLGALLVLEFLLLSPVEAQQGWWGKGVF

SEQ ID NO: 66364 - protein, 1486 aa, Homo sapiens
MGLLVVLLVGGCAAEEPPRFIKEPKDQIGVSGGVASFVCQATGDPKPRVTWNKKGKKVNSQRFETIEFDESAGAVLRIQPLRTPRDENVYECVAQNSVGEITVHAKLTVLREDQLPSGFPNIDMGPQLKVVERTRTATMLCAASGNPDPEITWFKDFLPVDPSASNGRIKQLRSGALQIESSEETDQGKYECVATNSAGVRYSSPANLYVRVRRVAPRFSILPMSHEIMPGGNVNITCVAVGSPMPYVKWMQGAEDLTPEDDMPVGRNVLELTDVKDSANYTCVAMSSLGVIEAVAQITVKSLPKAPGTPMVTENTATSITITWDSGNPDPVSYYVIEYKSKSQDGPYQIKEDITTTRYSIGGLSPNSEYEIWVSAVNSIGQGPPSESVVTRTGEQAPASAPRNVQARMLSATTMIVQWEEPVEPNGLIRGYRVYYTMEPEHPVGNWQKHNVDDSLLTTVGSLLEDETYTVRVLAFTSVGDGPLSDPIQVKTQQGVPGQPMNLRAEARSETSITLSWSPPRQESIIKYELLFREGDHGREVGRTFDPTTSYVVEDLKPNTEYAFRLAARSPQGLGAFTPVVRQRTLQSISPKNFKVKMIMKTSVLLSWEFPDNYNSPTPYKIQYNGLTLDVDGRTTKKLITHLKPHTFYNFVLTNRGSSLGGLQQTVTAWTAFNLLNGKPSVAPKPDADGFIMVYLPDGQSPVPVQSYFIVMVPLRKSRGGQFLTPLGSPEDMDLEELIQDISRLQRRSLRHSRQLEVPRPYIAARFSVLPPTFHPGDQKQYGGFDNRGLEPGHRYVLFVLAVLQKSEPTFAASPFSDPFQLDNPDPQPIVDGEEGLIWVIGPVLAVVFIICIVIAILLYKKKPHSKRKDSEPRTKCLLNNADLAPHHPKDPVEMRRINFQTPGMLSHPPIPIADMAEHTERLKANDSLKLSQEYESIDPGQQFTWEHSNLEVNKPKNRYANVIAYDHSRVILQPIEGIMGSDYINANYVDGYRCQNAYIATQGPLPETFGDFWRMVWEQRSATIVMMTRLEEKSRIKCDQYWPNRGTETYGFIQVTLLDTIELATFCVRTFSLHKNGSSEKREVRQFQFTAWPDHGVPEYPTPFLAFLRRVKTCNPPDAGPIVVHCSAGVGRTGCFIVIDAMLERIKPEKTVDVYGHVTLMRSQRNYMVQTEDQYSFIHEALLEAVGCGNTEVPARSLYAYIQKLAQVEPGEHVTGMELEFKRLANSKAHTSRFISANLPCNKFKNRLVNIMPYESTRVCLQPIRGVEGSDYINASFIDGYRQQKAYIATQGPLAETTEDFWRMLWENNSTIVVMLTKLREMGREKCHQYWPAERSARYQYFVVDPMAEYNMPQYILREFKVTDARDGQSRTVRQFQFTDWPEQGVPKSGEGFIDFIGQVHKTKEQFGQDGPISVHCSAGVGRTGVFITLSIVLERMRYEGVVDIFQTVKMLRTQRPAMVQTEDEYQFCYQAALEYLGSFDHYAT

SEQ ID NO: 66365 - protein, 1895 aa, Homo sapiens
MGLLVVLLVGGCAAEEPPRFIKEPKDQIGVSGGVASFVCQATGDPKPRVTWNKKGKKVNSQRFETIEFDESAGAVLRIQPLRTPRDENVYECVAQNSVGEITVHAKLTVLREDQLPSGFPNIDMGPQLKVVERTRTATMLCAASGNPDPEITWFKDFLPVDPSASNGRIKQLRSGALQIESSEETDQGKYECVATNSAGVRYSSPANLYVRVRRVAPRFSILPMSHEIMPGGNVNITCVAVGSPMPYVKWMQGAEDLTPEDDMPVGRNVLELTDVKDSANYTCVAMSSLGVIEAVAQITVKSLPKAPGTPMVTENTATSITITWDSGNPDPVSYYVIEYKSKSQDGPYQIKEDITTTRYSIGGLSPNSEYEIWVSAVNSIGQGPPSESVVTRTGEQAPASAPRNVQARMLSATTMIVQWEEPVEPNGLIRGYRVYYTMEPEHPVGNWQKHNVDDSLLTTVGSLLEDETYTVRVLAFTSVGDGPLSDPIQVKTQQGVPGQPMNLRAEARSETSITLSWSPPRQESIIKYELLFREGDHGREVGRTFDPTTSYVVEDLKPNTEYAFRLAARSPQGLGAFTPVVRQRTLQSKPSAPPQDVKCVSVRSTAILVSWRPPPPETHNGALVGYSVRYRPLGSEDPEPKEVNGIPPTTTQILLEALEKWTQYRITTVAHTEVGPGPESSPVVVRTDEDVPSAPPRKVEAEALNATAIRVLWRSPAPGRQHGQIRGYQVHYVRMEGAEARGPPRIKDVMLADAQEMVITNLQPETAYSITVAAYTMKGDGARSKPKVVVTKGAVLGRPTLSVQQTPEGSLLARWEPPAGTAEDQVLGYRLQFGREDSTPLATLEFPPSEDRYTASGVHKGATYVFRLAARSRGGLGEEAAEVLSIPEDTPRGHPQILEAAGNASAGTVLLRWLPPVPAERNGAIVKYTVAVREAGALGPARETELPAAAEPGAENALTLQGLKPDTAYDLQVRAHTRRGPGPFSPPVRYRTFLRDQVSPKNFKVKMIMKTSVLLSWEFPDNYNSPTPYKIQYNGLTLDVDGRTTKKLITHLKPHTFYNFVLTNRGSSLGGLQQTVTAWTAFNLLNGKPSVAPKPDADGFIMVYLPDGQSPVPVQSYFIVMVPLRKSRGGQFLTPLGSPEDMDLEELIQDISRLQRRSLRHSRQLEVPRPYIAARFSVLPPTFHPGDQKQYGGFDNRGLEPGHRYVLFVLAVLQKSEPTFAASPFSDPFQLDNPDPQPIVDGEEGLIWVIGPVLAVVFIICIVIAILLYKNKPDSKRKDSEPRTKCLLNNADLAPHHPKDPVEMRRINFQTPGMLSHPPIPIADMAEHTERLKANDSLKLSQEYESIDPGQQFTWEHSNLEVNKPKNRYANVIAYDHSRVILQPIEGIMGSDYINANYVDGYRCQNAYIATQGPLPETFGDFWRMVWEQRSATIVMMTRLEEKSRIKCDQYWPNRGTETYGFIQVTLLDTIELATFCVRTFSLHKNGSSEKREVRQFQFTAWPDHGVPEYPTPFLAFLRRVKTCNPPDAGPIVVHCSAGVGRTGCFIVIDAMLERIKPEKTVDVYGHVTLMRSQRNYMVQTEDQYSFIHEALLEAVGCGNTEVPARSLYAYIQKLAQVEPGEHVTGMELEFKRLANSKAHTSRFISANLPCNKFKNRLVNIMPYESTRVCLQPIRGVEGSDYINASFIDGYRQQKAYIATQGPLAETTEDFWRMLWENNSTIVVMLTKLREMGREKCHQYWPAERSARYQYFVVDPMAEYNMPQYILREFKVTDARDGQSRTVRQFQFTDWPEQGVPKSGEGFIDFIGQVHKTKEQFGQDGPISVHCSAGVGRTGVFITLSIVLERMRYEGVVDIFQTVKMLRTQRPAMVQTEDEYQFCYQAALEYLGSFDHYAT

SEQ ID NO: 66366 - protein, 256 aa, Homo sapiens [sequence omitted]

SEQ ID NO: 66367 - protein, 544 aa, Homo sapiens [sequence omitted]

SEQ ID NO: 66368 - protein, 295 aa, Homo sapiens
MELSVLLFLALLTGLLLLLVQRHPNSHGTLPPGPRPLPLLGNLLQMDRRGLLKSFLRFREKYGDVFTVHLGPRPVVMLCGVEAIREALVDNAEAFSGRGKIVIMDPVYQGYGMLFANGNRWKVLRRFSVTTMRDFGMGKRSVEERIQDEAQCLIEELRKSKGALVDPTFLFHSITANIICSIIFGKRFHYQDQEFLKTLNLFCQSFLLISSISSQVQEREKEREGGGEVNIQDTREKDDLTWGLRNAAYPWKKCRDHVESGTWRPGGRGGGETGIETVRERMGHDGEAETESERD

SEQ ID NO: 66369 - protein, 377 aa, Homo sapiens
MELSVLLFLALLTGLLLLLVQRHPNSHGTLPPGPRPLPLLGNLLQMDRRGLLKSFLRFREKYGDVFTVHLGPRPVVMLCGVEAIREALVDNAEAFSGRGKIVIMDPVYQGYGMLFANGNRWKVLRRFSVTTMRDFGMGKRSVEERIQDEAQCLIEELRKSKGALVDPTFLFHSITANIICSIIFGKRFHYQDQEFLKTLNLFCQSFLLISSISSQLFELFSGFLKYFPGAHRQVYKNLQEINAYIGHSVEKHRETLDPSAPRDLIDTYLLHMEKEKSNPHSEFSHQNLIINTLSLFFAGTETTSTTLRYGFLLMLKYPHVAERVYKEIEQVVGPHRPPALDDRAKMPYTEAVIREIQRFADLLPMGVPHIVTQHTSF

SEQ ID NO: 66370 - protein, 84 aa, Homo sapiens
MTPPQCSRSLDTMGTRLLPALFLVLLVLGFEVQGTQQPQQDEMPSPTFLTQVKESLSSYWESAKTAAQNLYEKTYLPAVDEKLR

SEQ ID NO: 66371 - protein, 686 aa, Homo sapiens
MLLLPLLLPVLGAGSLNKDPSYSLQVQRQVPVPEGLCVIVSCNLSYPRDGWDESTAAYGYWFKGRTSPKTGAPVATNNQSREVEMSTRDRFQLTGDPGKGSCSLVIRDAQREDEAWYFFRVERGSRVRHSFLSNAFFLKVTALTKKPDVYIPETLEPGQPVTVICVFNWAFKKCPAPSFSWTGAALSPRRTRPSTSHFSVLSFTPSPQDHDTDLTCHVDFSRKGVSAQRTVRLRVAYAPKDLIISISHDNTSALELQGNVIYLEVQKGQFLRLLCAADSQPPATLSWVLQDRVLSSSHPWGPRTLGLELRGVRAGDSGRYTCRAENRLGSQQQALDLSVQYPPENLRVMVSQANRTVLENLGNGTSLPVLEGQSLRLVCVTHSSPPARLSWTRWGQTVGPSQPSDPGVLELPPIQMEHEGEFTCHAQHPLGSQHVSLSLSVHYPPQLLGPSCSWEAEGLHCSCSSQASPAPSLRWWLGEELLEGNSSQGSFEVTPSSAGPWANSSLSLHGGLSSGLRLRCKAWNVHGAQSGSVFQLLPGKLEHGGGLGLGAALGAGVAALLAFCSCLVVFRVKICRKEARKRAAAEQDVPSTLGPISQGHQHECSAGSSQDHPPPGAATYTPGKGEEQELHYASLSFQGLRLWEPADQEAPSTTEYSEIKIHTGQPLRGPGFGLQLEREMSGMVPK

SEQ ID NO: 66372 - protein, 697 aa, Homo sapiens
MSWPHGALLFLWLFSPPLGAGGGGVAVTSAAGGGSPPATSCPVACSCSNQASRVICTRRDLAEVPASIPVNTRYLNLQENGIQVIRTDTFKHLRHLEILQLSKNLVRKIEVGAFNGLPSLNTLELFDNRLTTVPTQAFEYLSKLRELWLRNNPIESIPSYAFNRVPSLRRLDLGELKRLEYISEAAFEGLVNLRYLNLGMCNLKDIPNLTALVRLEELELSGNRLDLIRPGSFQGLTSLRKLWLMHAQVATIERNAFDDLKSLEELNLSHNNLMSLPHDLFTPLHRLERVHLNHNPWHCNCDVLWLSWWLKETVPSNTTCCARCHAPAGLKGRYIGELDQSHFTCYAPVIVEPPTDLNVTEGMAAELKCRTGTSMTSVNWLTPNGTLMTHGSYRVRISVLHDGTLNFTNVTVQDTGQYTCMVTNSAGNTTASATLNVSAVDPVAAGGTGSGGGGPGGSGGVGGGSGGYTYFTTVTVETLETQPGEEALQPRGTEKEPPGPTTDGVWGGGRPGDAAGPASSSTTAPAPRSSRPTEKAFTVPITDVTENALKDLDDVMKTTKIIIGCFVAITFMAAVMLVAFYKLRKQHQLHKHHGPTRTVEIINVEDELPAASAVSVAAAAAVASGGGVGGDSHLALPALERDHLNHHHYVAAAFKAHYSSNPSGGGCGGKGPPGLNSIHEPLLFKSGSKENVQETQI

SEQ ID NO: 66373 - protein, 250 aa, Homo sapiens
MSMLVVFLLLWGVTWGPVTEAAIFYETQPSLWAESESLLKPLANVTLTCQAHLETPDFQLFKNGVAQEPVHLDSPAIKHQFLLTGDTQGRYRCRSGLSTGWTQLSKLLELTGPKSLPAPWLSMAPVSWITPGLKTTAVCRGVLRGVTFLLRREGDHEFLEVPEAQEDVEATFPVHQPGNYSCSYRTDGEGALSEPSATVTIEELGDCGNHLWGLLGEEDTGGMTTFILTSMLNVLAQDQVQEAGHTVAWV

SEQ ID NO: 66374 - protein, 223 aa, Homo sapiens
MRGNLALVGVLISLAFLSLLPSGHPQPAGDDACSVQILVPGLKGEKGDSGDIGPPGPNGEPGLPCECSQLRKAIGEMDNQVSQLTSELKFIKNAVAGVRETESKIYLLVKEEKRYADAQLSCQGRGGTLSMPKDEAANGLMAAYLAQAGLARVFIGINDLEKEGAFVYSDHSPMRTFNKWRSGEPNNAYDEEDCVEMVASGGWNDVACHTTMYFMCEFDKENM

SEQ ID NO: 66375 - protein, 247 aa, Homo sapiens
MRGNLALVGVLISLAFLSLLPSGHPQPAGDDACSVQILVPGLKGDMGDKGQKGSVGRHGKIGPIGSKGEKGDSGDIGPPGPNGEPGLPCECSQLRKAIGEMDNQVSQLTSELKFIKNAVAGVRETESKIYLLVKEEKRYADAQLSCQGRGGTLSMPKDEAANGLMAAYLAQAGLARVFIGINDLEKEGAFVYSDHSPMRTFNKWRSGEPNNAYDEEDCVEMVASGGWNDVACHTTMYFMCEFDKENM

SEQ ID NO: 66376 - protein, 13 aa, Homo sapiens
MTDICGFLLLILH

SEQ ID NO: 66377 - protein, 96 aa, Homo sapiens
MEHKEVVLLLLLFLKSGQGEPLDDYVNAQGASLFSVTKKQLGAGSREECAAKCEEDKEFTCRAFQYHSKEQQCVIMAENKKSSIIIRMRDVVLFEK

SEQ ID NO: 66378 - protein, 1498 aa, Homo sapiens [sequence omitted]

SEQ ID NO: 66379 - protein, 113 aa, Homo sapiens
MSPSPRWGFLCVLFTAVHPAPSTAPVQDKCPVNTWEAMQASSQQLLQTDPRPKPFLLPPLPPLLLISAGTEVSSLVFQKSPLHTQPEGAIKTVGQPTSVHSKVLSKGSLLLGE

SEQ ID NO: 66380 - protein, 73 aa, Homo sapiens
MLGLVLALLSSSSAEEYVGLSANQCAVPAKDRVDCGYPHVTPKECNNRGCCFDSRIPGVPWCFKPLQEAECTF

SEQ ID NO: 66381 - protein, 119 aa, Homo sapiens [sequence omitted]

SEQ ID NO: 66382 - protein, 525 aa, Homo sapiens [sequence omitted]

SEQ ID NO: 66383 - protein, 18 aa, Homo sapiens
MAYKMLQVVLCSTLLIGS

SEQ ID NO: 66384 - protein, 242 aa, Homo sapiens
MGFLFLLGLYISSLASCMGGLYGAPRILQCIAQEKVIPALACLGQGISDRLPAASWEGQESCWNKQTSKSEGTQPEGTYGEQLVPELCNQSESSGEDFFLKSRLQEQDVWRRSTSFYTHMCNPWVSLLGAVGSLLIMFVIQWVYTLVNMGVAAIVYFYIGRASPGLHLGSASNFSFFRWMRSLLLPSCRSLRSPQEQIILAPSLAKVDMEMTQLTQENADFATRDRYHHSSLVNREQLMPHY

SEQ ID NO: 66385 - protein, 2262 aa, Homo sapiens
MLLILFLVIICSHISVNQDSGPEYADVVFLVDSSDRLGSKSFPFVKMFITKMISSLPIEADKYRVALAQYSDKLHSEFHLSTFKGRSPMLNHLRKNFGFIGGSLQIGKALQEAHRTYFSAPANGRDKKQFPPILVVLASSESEDNVEEASKALRKDGVKIISVGVQKASEENLKAMATSQFHFNLRTVRDLSMFSQNMTHIIKDVIKYKEGAVDDIFVEACQGPSMADVVFLLDMSINGSEENFDYLKGFLEESVSALDIKENCMRVGLVAYSNETKVINSLSMGINKSEVLQHIQNLSPRTGKAYTGAAIKKLRKEVFSARNGSRKNQGVPQIAVLVTHRDSEDNVTKAAVNLRREGVTIFTLGIEGASDTQLEKIASHPAEQYVSKLKTFADLAAHNQTFLKKLRNQITHTVSVFSERTETLKSGCVDTEEADIYLLIDGSGSTQATDFHEMKTFLSEVVGMFNIAPHKVRVGAVQYADSWDLEFEINKYSNKQDLGKAIENIRQMGGNTNTGAALNFTLSLLQKAKKQRGNKVPCHLVVLTNGMSKDSILEPANRLREEHIRVYAIGIKEANQTQLREIAGEEKRVYYVHDFDALKDIRNQVVQEICTEEACKEMKADIMFLVDSSGSIGPENFSKMKTFMKNLVSKSQIGPDRVQIGVVQFSDINKEEFQLNRFMSQSDISNAIDQMAHIGQTTLTGSALSFVSQYFSPTKGARPNIRKFLILITDGEAQDIVKEPAVVLRQEGVIIYSVGVFGSNVTQLEEISGRPEMVFYVENFDILQRIEDDLVFGICSPREECKRIEVLDVVFVIDSSGSIDYDEYNIMKDFMIGLVKKADVGKNQVRFGALKYADDPEVLFYLDDFGTKLEVISVLQNDQAMGGSTYTAEALGFSDHMFTEARGSRLNKGVPQVLIVITDGESHDADKLNATAKALRDKGILVLAVGIDGANPVELLAMAGSSDKYFFVETFGGLKGIFSDVTASVCNSSKVDCEIDKVDLVFLMDGSTSIQPNDFKKMKEFLASVVQDFDVSLNRVRIGAAQFSDTYHPEFPLGTFIGEKEISFQIENIKQIFGNTHIGAALREVEHYFRPDMGSRINTGTPQVLLVLTDGQSQDEVAQAAEALRHRGIDIYSVGIGDVDDQQLIQITGTAEKKLTVHNFDELKKVNKRIVRNICTTAGESNCFVDVVVGFDVSTQEKGQTLLEGQPWMETYLQDILRAISSLNGVSCEVGTETQVSVAFQVTNAMEKYSPKFEIYSENILNSLKDITVKGPSLLNANLLDSLWDTFQNKSAARGKVVLLFSDGLDDDVEKLEQKSDELRKEGLNALITVALDGPADSSDLADLPYIEFGKGFEYRTQLSIGMRELGSRLSKQLVNVAERTCCCLFCKCIGGDGTMGDPGPPGKRGPPGFKGSEGYLGEEGIAGERGAPGPVGEQGTKGCYGTKGPKGNRGLNGQEGEVGENGIDGLNGEQGDNGLPGRKGEKGDEGSQGSPGKRGTPGDRGAKGLRGDPGAPGVDSSIEGPTGLKGERGRQGRRGWPGPPGTPGSRRKTAAHGRRGHTGPQGTAGIPGPDGLEGSLGLKGPQGPRGEAGVKGEKGGVGSKGPQGPPGPGGEAGNQGRLGSQGNKGEPGDLGEKGAVGFPGPRGLQGNDGSPGYGSVGRKGAKGQEGFPGESGPKGEIGDPGGPGETGLKGARGKMISAGLPGEMGSPGEPGPPGRKGVKGAKGLASFSTCELIQYVRDRSPGRHGKPECPVHPTELVFALDHSRDVTEQEFERMKEMMAFLVRDIKVRENSCPVGAHIAILSYNSHARHLVRFSDAYKKSQLLREIETIPYERSSASREIGRAMRFISRNVFKRTLPGAHTRKIATFFSSGQSADAHSITTAAMEFGALEIIPVVITFSNVPSVRRAFAIDDTGTFQVIVVPSGADYIPALERLQRCTFCYDVCKPDASCDQARPPPVQSYMDAAFLLDASRNMGSAEFEDIRAFLGALLDHFEITPEPETSVTGDRVALLSHAPPDFLPNTQKSPVRAEFNLTTYRSKRLMKRHVHESVKQLNGDAFIGHALQWTLDNVFLSTPNLRRNKVIFVISAGETSHLDGEILKKESLRAKCQGYALFVFSLGPIWDDKELEDLASHPLDHHLVQLGRIHKPDHSYGVKFVKSFINSIRRAINKYPPINLKIKCNRLNSIDPKQPPRPFRSFVPGPLKATLKEDVLQKAKFFQDKKYLSRVARSGRDDAIQNFMRSTSHTFKNGRMIESAPKQHD

SEQ ID NO: 66386 - protein, 69 aa, Homo sapiens
MRGANAWAPLCLLLAAATQLSRQQSPERPVFTCGGILTGESGFIGSEGFPGVYPPNSKCTWKITEKSVL

SEQ ID NO: 66387 - protein, 114 aa, Homo sapiens
MALKGTQTSVLLLIQLSCYFSSGSCGKVLVWAAEYSPWMNMKTILKELVQRGHEVTVLASSASILFDPNDSSTLKLEVYPTSLTKTELENITMQHSKRYILVIFFTRTRNHVGI

SEQ ID NO: 66388 - protein, 576 aa, Homo sapiens
MLVLPALALLSASGTGSAAQDDDFFHELPETFPSDPPEPLPHFLIEPEEAYIVKNKPVNLYCKASPATQIYFKCNSEWVHQKDHIVDERVDETSGLIVREVSIEISRQQVEELFGPEDYWCQCVAWSSAGTTKSRKAYVRIAYLRKTFEQEPLGKEVSLEQEVLLQCRPPEGIPVAEVEWLKNEDIIDPVEDRNFYITIDHNLIIKQARLSDTANYTCVAKNIVAKRKSTTATVIVYVNGGWSTWTEWSVCNSRCGRGYQKRTRTCTNPAPLNGGAFCEGQSVQKIACTTLCPVDGRWTPWSKWSTCGTECTHWRRRECTAPAPKNGGKDCDGLVLQSKNCTDGLCMQSFIYPISTEQRTQNEYGFSSAPDSDDVALYVGIVIAVIVCLAISVVVALFVYRKNHRDFESDIIDSSALNGGFQPVNIKAARQDLLAVPPDLTSAAAMYRGPVYALHDVSDKIPMTNSPILDPLPNLKIKVYNTSGAVTPQDDLSEFTSKLSPQMTQSLLENEALSLKNQSLARQTDPSCTAFGSFNSLGGHLIVPNSGVSLLIPAGAIPQGRVYEMYVTVHRKETMR

SEQ ID NO: 66389 - protein, 141 aa, Homo sapiens
MNKHLNLVPALVVVFYELDWDEPQWKEKQSECATRVEIVRQSLQGRNTKVAVVLIQKKTPLPPGEDVIASERAAALCNACELSGKSLFVLPHTDHLVGYIIRLENAFYEHAQTYYYTEIRRVKSHKEFLNKTTHQVRDFLQ

SEQ ID NO: 66390 - protein, 268 aa, Homo sapiens
MILFKQATYFISLFATVSCGCLTQLYENAFFRGGDVASMYTPNAQYCQMRCTFHPRCLLFSFLPASSINDMEKRFGCFLKDSVTGTLPKVHRTGAVSGHSLKQCGHQISACHRDIYKGVDMRGVNFNVSKVSSVEECQKRCTSNIRCQFFSYATQTFHKAEYRNNCLLKYSPGGTPTAIKVLSNVESGFSLKPCALSEIGCHMNIFQHLAFSDVDVARVLTPDAFVCRTICTYHPNCLFFTFYTNVWKIESQRRVCMENRITKKCLSS

SEQ ID NO: 66391 - protein, 988 aa, Homo sapiens [sequence omitted]

SEQ ID NO: 66392 - protein, 169 aa, Homo sapiens [sequence omitted]

SEQ ID NO: 66393 - protein, 131 aa, Homo sapiens [sequence omitted]

SEQ ID NO: 66394 - protein, 45 aa, Homo sapiens
MFAKSLLSPNSLLLAVSLCQLLLSIGEDCFSSPLNMGWACNLLDQ

SEQ ID NO: 66395 - protein, 222 aa, Homo sapiens
MEHKEVVLLLLLFLKSAPTETGPSVQECYHSNGQSYRGTYFTTVTGRTCQAWSSMTPHQHSRTPEKYPNDGLISNYCRNPDCSAGPWCYTTDPNVRWEYCNLTRCSDDEGTVFVPLTVIPVPSLEDSFIQAPTEPRPSVQECYHGNGQSYRGTYFTTVTGRTCQAWSSMTPHQHSRTPEQYPNWLDLQLLQESGLFGRPLVLYNGSQSQVGVLQPDRMLRQE

SEQ ID NO: 66396 - protein, 51 aa, Homo sapiens
MRRPLRVVLFLHPLRLGLALGFSGYLDTPFLCGQVSRGSQHQQPTLGHTSL

SEQ ID NO: 66397 - protein, 449 aa, Homo sapiens
MSPATTGTFLLTAFLLSCADGINGTVNWKTRQANNFIISRKMAAGMKDVYSIFSKVHSDRNVYPSAGVLFVHVLEREYFKGEFPPYPKPGEISNDPITFNTNLMGYPDRPGWLRYIQRTPYSDGVLYGSPTAENVGKPTIIEITAYNRRTFETARHNLIINIMSAEDFPLPYQAEFFIKNMNVEEMLASEVLGDFLGAVKNVWQPERLNAINITSALDRGGRVPLPINDLKEGVYVMVGADVPFSSCLREVENPQNQLRCSQEMEPVITCDKKFRTQFYIDWCKISLVDKTKQVSTYQEVIRGEGILPDGGEYKPPSDSLKSRDYYTDFLITLAVPSAVALVLFLILAYIMCCRREGVEKRNMQTPDIQLVHHSAIQKSTKELRDMSKNREIAWPLSTLPVFHPVTGEIIPPLHTDNYDSTNMPLMQTQQNLPHQTQIPQQQTTGKWYP

SEQ ID NO: 66398 - protein, 150 aa, Homo sapiens
MVSVLLSLLLLLGPAVLQETRDGHYSLTYLYTGLSRSGKGTHRLQGTVFLNGHAFFHYNSEDRKAEPLGPWRHAEGVEDWEKQSQVQKAREDIFMETLNNIMEYYNDGNGSHALQERFGCEIQNNRSTGAFWKNAYDGKDYIEFNKEIPA

SEQ ID NO: 66399 - protein, 92 aa, Homo sapiens
MLVLVLFGYGVLSPRSLMPGSLERGFCMAVREPDHLQRVSLPRMVYPQPKVLTPCRKDVLVVPLGWLPLSGRAHSTSTSSTSSSGSRTPPLG

SEQ ID NO: 66400 - protein, 1038 aa, Homo sapiens
MFLQSSMLTCIFLLISGSCELCAEENFSRSYPCDEKKQNDSVIAECSNRRLQEVPQTVGKYVTELDLSDNFITHITNESFQGLQNLTKINLNHNPNVQHQNGNPGIQSNGLNITDGAFLNLKNLRELLLEDNQLPQIPSGLPESLTELSLIQNNIYNITKEGISRLINLKNLYLAWNCYFNKVCEKTNIEDGVFETLTNLELLSLSFNSLSHVPPKLPSSLRKLFLSNTQIKYISEEDFKGLINLTLLDLSGNCPRCFNAPFPCVPCDGGASINIDRFAFQNLTQLRYLNLSSTSLRKINAAWFKNMPHLKVLDLEFNYLVGEIASGAFLTMLPRLEILDLSFNYIKGSYPQHINISRNFSKLLSLRALHLRGYVFQELREDDFQPLMQLPNLSTINLGINFIKQIDFKLFQNFSNLEIIYLSENRISPLVKDTRQSYANSSSFQRHIRKRRSTDFEFDPHSNFYHFTRPLIKPQCAAYGKALDLSLNSIFFIGPNQFENLPDIACLNLSANSNAQVLSGTEFSAIPHVKYLDLTNNRLDFDNASALTELSDLEVLDLSYNSHYFRIAGVTHHLEFIQNFTNLKVLNLSHNNIYTLTDKYNLESKSLVELVFSGNRLDILWNDDDNRYISIFKGLKNLTRLDLSLNRLKHIPNEAFLNLPASLTELHINDNMLKFFNWTLLQQFPRLELLDLRGNKLLFLTDSLSDFTSSLRTLLLSHNRISHLPSGFLSEVSSLKHLDLSSNLLKTINKSALETKTTTKLSMLELHGNPFECTCDIGDFRRWMDEHLNVKIPRLVDVICASPGDQRGKSIVSLELTTCVSDVTAVILFFFTFFITTMVMLAALAHHLFYWDVWFIYNVCLAKVKGYRSLSTSQTFYDAYISYDTKDASVTDWVINELRYHLEESRDKNVLLCLEERDWDPGLAIIDNLMQSINQSKKTVFVLTKKYAKSWNFKTAFYLALQRLMDENMDVIIFILLEPVLQHSQYLRLRQRICKSSILQWPDNPKAEGLFWQTLRNVVLTENDSRYNNMYVDSIKQY

SEQ ID NO: 66401 - protein, 452 aa, Homo sapiens [sequence omitted]

SEQ ID NO: 66402 - protein, 451 aa, Homo sapiens
MGGMKYIFSLLFFLLLEGGKTEQVKHSETYCMFQDKKYRVGERWHPYLEPYGLVYCVNCICSENGNVLCSRVRCPNVHCLSPVHIPHLCCPRCPDSLPPVNNKVTSKSCEYNGTTYQHGELFVAEGLFQNRQPNQCTQCSCSEGNVYCGLKTCPKLTCAFPVSVPDSCCRVCRGDGELSWEHSDGDIFRQPANREARHSYHRSHYDPPPSRQAGGLSRFPGARSHRGALMDSQQASGTIVQIVINNKHKHGQVCVSNGKTYSHGESWHPNLRAFGIVECVLCTCNVTKQECKKIHCPNRYPCKYPQKIDGKCCKVCPGKKAKEELPGQSFDNKGYFCGEETMPVYESVFMEDGETTRKIALETERPPQVEVHVWTIRKGILQHFHIEKISKRMFEELPHFKLVTRTTLSQWKIFTEGEAQISQMCSSRVCRTELEDLVKVLYLERSEKGHC

SEQ ID NO: 66403 - protein, 455 aa, Homo sapiens
LPSAPRPSRAMLPWTALGLALSLRLALARSGAERGPPASAPRGDLMFLLDSSASVSHYEFSRVREFVGQLVAPLPLGTGALRASLVHVGSRPYTEFPFGQHSSGEAAQDAVRASAQRMGDTHTGLALVYAKEQLFAEASGARPGVPKVLVWVTDGGSSDPVGPPMQELKDLGVTVFIVSTGRGNFLELSAAASAPAEKHLHFVDVDDLHIIVQELRGSILDAMRPQQLHATEITSSGFRLAWPPLLTADSGYYVLELVPSAQPGAARRQQLPGNATDWIWAGLDPDTDYDVALVPESNVRLLRPQILRVRTRPGEAGPGASGPESGAGPAPTQLAALPAPEEAGPERIVISHARPRSLRVSWAPALGSAAALGYHVQFGPLRGGEAQRVEVPAGRNCTTLQGLAPGTAYLVTVTAAFRSGRESALSAKACTPDGPRPRPRPVPRAPTPGTASREP

SEQ ID NO: 66404 - protein, 481 aa, Homo sapiens
RFAVSCRILTLMLQALFNAIIPDHHAEAFSPPRLAPSGFVDQLVEGLLGGLSHWDAEHFLFIAEHGYLYEHNFAFFPGFPLALLVGTELLRPLRGLLSLRSCLLISVASLNFLFFMLAAVALHDLGCLVLHCPHQSFYAALLFCLSPANVFLAAGYSEALFALLTFSAMGQLERGRVWTSVLLFAFATGVRSNGLVSVGFLMHSQCQGFFSSLTMLNPLRQLFKLMASLFLSVFTLGLPFALFQYYAYTQFCLPGSARPIPEPLVQLAVDKGYRIAEGNEPPWCFWDVPLIYSYIQDVYWNVGFLKYYELKQVPNFLLAAPVAILVAWATWTYVTTHPWLCLTLGLQRSKNNKTLEKPDLGFLSPQVFVYVVHAAVLLLFGGLCMHVQVLTRFLGSSTPIMYWFPAHLLQDQEPLLRSLKTVPWKPLAEDSPPGQKVPRNPIMGLLYHWKTCSPVTRYILGYFLTYWLLGLLLHCNFLPWT

SEQ ID NO: 66405 - protein, 336 aa, Homo sapiens
LFSALLLEVIWILAADGGQHWTYEGPHGQDHWPASYPECGNNAQSPIDIQTDSVTFDPDLPALQPHGYDQPGTEPLDLHNNGHTVQLSLPSTLYLGGLPRKYVAAQLHLHWGQKGSPGGSEHQINSEATFAELHIVHYDSDSYDSLSEAAERPQGLAVLGILIEVGETKNIAYEHILSHLHEVRHKDQKTSVPPFNLRELLPKQLGQYFRYNGSLTTPPCYQSVLWTVFYRRSQISMEQLEKLQGTLFSTEEEPSKLLVQNYRALQPLNQRMVFASFIQAGSSYTTGEMLSLGVGILVGCLCLLLAVYFIARKIRKKRLENRKSVVFTSAQATTEA

SEQ ID NO: 66406 - protein, 532 aa, Homo sapiens
IKQVLGCTMISPFLVLAIGTCLTNSLVPEKEKDPKYWRDQAQETLKYALELQKLNTNVAKNVIMFLGDGMGVSTVTAARILKGQLHHNPGEETRLEMDKFPFVALSKTYNTNAQVPDSAGTATAYLCGVKANEGTVGVSAATERSRCNTTQGNEVTSILRWAKDAGKSVGIVTTTRVNHATPSAAYAHSADRDWYSDNEMPPEALSQGCKDIAYQLMHNIRDIDVIMGGGRKYMYPKNKTDVEYESDEKARGTRLDGLDLVDTWKSFKPRYKHSHFIWNRTELLTLDPHNVDYLLGLFEPGDMQYELNRNNVTDPSLSEMVVVAIQILRKNPKGFFLLVEGGRIDHGHHEGKAKQALHEAVEMDRAIGQAGSLTSSEDTLTVVTADHSHVFTFGGYTPRGNSIFGLAPMLSDTDKKPFTAILYGNGPGYKVVGGERENVSMVDYAHNNYQAQSAVPLRHETHGGEDVAVFSKGPMAHLLHGVHEQNYVPHVMAYAACIGANLGHCAPASSAGSLAAGPLLLALALYPLSVLF

SEQ ID NO: 66407 - protein, 211 aa, Homo sapiens
LARPRAMEFLWAPLLGLCCSLAAADRHTVFWNSSNPKFRNEDYTIHVQLNDYVDIICPHYEDHSVADAAMEQYILYLVEHEEYQLCQPQSKDQVRWQCNRPSAKHGPEKLSEKFQRFTPFTLGKEFKEGHSYYYISKPIHQHEDRCLRLKVTVSGKITHSPQAHDNPQEKRLAADDPEVRVLHSIGHSAAPRLFPLAWTVLLLPLLLLQTP

SEQ ID NO: 66408 - protein, 259 aa, Homo sapiens
IAAPDSRRWLWSVLAAALGLLTAGVSALEVYTPKEIFVANGTQGKLTCKFKSTSTTGGLTSVSWSFQPEGADTTVSFFHYSQGQVYLGNYPPFKDRISWAGDLDKKDASINIENMQFIHNGTYICDVKNPPDIVVQPGHIRLYVVEKENLPVFPVWVVVGIVTAVVLGLTLLISMILAVLYRRKNSKRDYTGCSTSESLSPVKQAPRKSPSDTEGLVKSLPSGSHQGPVIYAQLDHSGGHHSDKINKSESVVYADIRKN

SEQ ID NO: 66409 - protein, 1599 aa, Homo sapiens
LRPRGRLWPVLAVLAAAAAAGCAQAAMDECTDEGGRPQRCMPEFVNAAFNVTVVATNTCGTPPEEYCVQTGVTGVTKSCHLCDAGQPHLQHGAAFLTDYNNQADTTWWQSQTMLAGVQYPSSINLTLHLGKAFDITYVRLKFHTSRPESFAIYKRTREDGPWIPYQYYSGSCENTYSKANRGFIRTGGDEQQALCTDEFSDISPLTGGNVAFSTLEGRPSAYNFDNSPVLQEWVTATDIRVTLNRLNTFGDEVFNDPKVLKSYYYAISDFAVGGRCKCNGHASECMKNEFDKLVCNCKHNTYGVDCEKCLPFFNDRPWRRATAESASECLPCDCNGRSQECYFDPELYRSTGHGGHCTNCQDNTDGAHCERCRENFFRLGNNEACSSCHCSPVGSLSTQCDSYGRCSCKPGVMGDKCDRCQPGFHSLTEAGCRPCSCDPSGSIDECNIETGRCVCKDNVEGFNCERCKPGFFNLESSNPRGCTPCFCFGHSSVCTNAVGYSVYSISSTFQIDEDGWRAEQRDGSEASLEWSSERQDIAVISDSYFPRYFIAPAKFLGKQVLSYGQNLSFSFRVDRRDTRLSAEDLVLEGAGLRVSVPLIAQGNSYPSETTVKYVFRLHEATDYPWRPALTPFEFQKLLNNLTSIKIRGTYSERSAGYLDDVTLASARPGPGVPATWVESCTCPVGYGGQFCEMCLSGYRRETPNLGPYSPCVLCACNGHSETCDPETGVCNCRDNTAGPHCEKCSDGYYGDSTAGTSSDCQPCPCPGGSSCAVVPKTKEVVCTNCPTGTTGKRCELCDDGYFGDPLGRNGPVRLCRLCQCSDNIDPNAVGNCNRLTGECLKCIYNTAGFYCDRCKDGFFGNPLAPNPADKCKACNCNLYGTMKQQSSCNPVTGQCECLPHVTGQDCGACDPGFYNLQSGQGCERCDCHALGSTNGQCDIRTGQCECQPGITGQHCERCEVNHFGFGPEGCKPCDCHPEGSLSLQCKDDGRCECREGFVGNRCDQCEENYFYNRSWPGCQECPACYRLVKDKVADHRVKLQELESLIANLGTGDEMVTDQAFEDRLKEAEREVMDLLREAQDVKDVDQNLMDRLQRVNNTLSSQISRLQNIRNTIEETGNLAEQARAHVENTERLIEIASRELEKAKVAAANVSVTQPESTGDPNNMTLLAEEARKLAERHKQEADDIVRVAKTANDTSTEAYNLLLRTLAGENQTAFEIEELNRKYEQAKNISQDLEKQAARVHEEAKRAGDKAVEIYASVAQLSPLDSETLENEANNIKMEAENLEQLIDQKLKDYEDLREDMRGKELEVKNLLEKGKTEQQTADQLLARADAAKALAEEAAKKGRDTLQEANDILNNLKDFDRRVNDNKTAAEEALRKIPAINQTITEANEKTREAQQALGSAAADATEAKNKAHEAERIASAVQKNATSTKAEAERTFAEVTDLDNEVNNMLKQLQEAEKELKRKQDDADQDMMMAGMASQAAQEAEINARKAKNSVTSLLSIINDLLEQLGQLDTVDLNKLNEIEGTLNKAKDEMKVSDLDRKVSDLENEAKKQEAAIMDYNRDIEEIMKDIRNLEDIRKTLPSGCFNTPSIEKP

SEQ ID NO: 66410 - protein, 462 aa, Homo sapiens
IKMFTIKLLLFIVPLVISSRIDQDNSSFDSLSPEPKSRFAMLDDVKILANGLLQLGHGLKDFVHKTKGQINDIFQKLNIFDQSFYDLSLQTSEIKEEEKELRRTTYKLQVKNEEVKNMSLELNSKLESLLEEKILLQQKVKYLEEQLTNLIQNQPETPEHPEVTSLKTFVEKQDNSIKDLLQTVEDQYKQLNQQHSQIKEIENQLRRTSIQEPTEISLSSKPRAPRTTPFLQLNEIRNVKHDGIPAECTTIYNRGEHTSGMYAIRPSNSQVFHVYCDVISGSPWTLIQHRIDGSQNFNETWENYKYGFGRLDGEFWLGLEKIYSIVKQSNYVLRIELEDWKDNKHYIEYSFYLGNHETNYTLHLVAITGNVPNAIPENKDLVFSTWDHKAKGHFNCPEGYSGGWWWHDECGENNLNGKYNKPRAKSKPERRRGLSWKSQNGRLYSIKSTKMLIHPTDSESFE

SEQ ID NO: 66411 - protein, 592 aa, Homo sapiens
IVRWLLAEMFAVVFFILSLMTCQPGVTAQEKVNQRVRRAATPAAVTCQLSNWSEWTDCFPCQDKKYRHRSLLQPNKFGGTICSGDIWDQASCSSSTTCVRQAQCGQDFQCKETGRCLKRHLVCNGDQDCLDGSDEDDCEDVRAIDEDCSQYEPIPGSQKAALGYNILTQEDAQSVYDASYYGGQCETVYNGEWRELRYDSTCERLYYGDDEKYFRKPYNFLKYHFEALADTGISSEFYDNANDLLSKVKKDKSDSFGVTIGIGPAGSPLLVGVGVSHSQDTSFLNELNKYNEKKFIFTRIFTKVQTAHFKMRKDDIMLDEGMLQSLMELPDQYNYGMYAKFINDYGTHYITSGSMGGIYEYILVIDKAKMESLGITSRDITTCFGGSLGIQYEDKINVGGGLSGDHCKKFGGGKTERARKAMAVEDIISRVRGGSSGWSGGLAQNRSTITYRSWGRSLKYNPVVIDFEMQPIHEVLRHTSLGPLEAKRQNLRRALDQYLMEFNACRCGPCFNNGVPILEGTSCRCQCRLGSLGAACEQTQTEGAKADGSWSCWSSWSVCRAGIQERRRECDNPAPQNGGASCPGRKVQTQAC

SEQ ID NO: 66412 - protein, 80 aa, Homo sapiens
VKLYVLGSVLALFGVVLGLMETVCSPFTAARRLRDQEAAVAELQAALERQALQKQALQEKGKQQDTVLGGRALSNRQHAS

SEQ ID NO: 66413 - protein, 26 aa, Homo sapiens
MGWLPLLLLLTQCLGVPGQRSPLNDF

SEQ ID NO: 66414 - protein, 584 aa, Homo sapiens
ILLRISNMLLLINVILTLWVSCANGQVKPCDFPEIQHGGLYYKSLRRLYFPAAAGQSYSYYCDQNFVTPSGSYWDYIHCTQDGWSPTVPCLRTCSKSDVEIENGFISESSSIYILNEETQYNCKPGYATAEGNSSGSITCLQNGWSTQPICIKFCDMPVFENSRAKSNGMWFKLHDTLDYECYDGYESSYGNTTDSIVCGEDGWSHLPTCYNSSENCGPPPPISNGDTTSFPQKVYLPWSRVEYQCQSYYELQGSKYVTCSNGDWSEPPRCISMKPCEFPEIQHGHLYYENTRRPYFPVATGQSYSYYCDQNFVTPSGSYWDYIHCTQDGWLPTVPCLRTCSKSDIEIENGFISESSSIYILNKEIQYKCKPGYATADGNSSGSITCLQNGWSAQPICIKFCDMPVFENSRAKSNGMRFKLHDTLDYECYDGYEISYGNTTGSIVCGEDGWSHFPTCYNSSEKCGPPPPISNGDTTSFLLKVYVPQSRVEYQCQSYYELQGSNYVTCSNGEWSEPPRCIHPCIITEENMNKNNIQLKGKSDIKYYAKTGDTIEFMCKLGYNANTSVLSFQAVCREGIVEYPRCE

SEQ ID NO: 66415 - protein, 281 aa, Homo sapiens
IFSYIRLELPSMWLLVSVILISRISSVGGEAMFCDFPKINHGILYDEEKYKPFSQVPTGEVFYYSCEYNFVSPSKSFWTRITCAEEGWSPTPKCLRLCFFPFVENGHSESSGQTHLEGDTVQIICNTGYRLQNNENNISCVERGWSTPPKCRSTISAEKCGPPPPIDNGDITSFLLSVYAPGSSVEYQCQNLYQLEGNNQITCRNGQWSEPPKCLDPCVISQEIMEKYNIKLKWTNQQKLYSRTGDIVEFVCKSGYHPTKSHSFRAMCQNGKLVYPSCEEK

SEQ ID NO: 66416 - protein, 337 aa, Homo sapiens
ILLRISNMLLLINVILTLWVSCANGQVKPCDFPDIKHGGLFHENMRRPYFPVAVGKYYSYYCDEHFETPSGSYWDYIHCTQNGWSPAVPCLRKCYFPYLENGYNQNYGRKFVQGNSTEVACHPGYGLPKAQTTVTCTEKGWSPTPRCIRVRTCSKSDIEIENGFISESSSIYILNKEIQYKCKPGYATADGNSSGSITCLQNGWSAQPICINSSEKCGPPPPISNGDTTSFLLKVYVPQSRVEYQCQPYYELQGSNYVTCSNGEWSEPPRCIHPCIITEENMNKNNIKLKGRSDRKYYAKTGDTIEFMCKLGYNANTSILSFQAVCREGIVEYPRCE

SEQ ID NO: 66417 - protein, 435 aa, Homo sapiens
LLWKLVLLQSSAVLLHSGSSVPAAAGSSVVSESAVSWEAGARAVLRCQSPRMVWTQDRLHDRQRVLHWDLRGPGGGPARRLLDLYSAGEQRVYEARDRGRLELSASAFDDGNFSLLIRAVEETDAGLYTCNLHHHYCHLYESLAVRLEVTDGPPATPAYWDGEKEVLAVARGAPALLTCVNRGHVWTDRHVEEAQQVVHWDRQPPGVPHDRADRLLDLYASGERRAYGPLFLRDRVAVGADAFERGDFSLRIEPLEVADEGTYSCHLHHHYCGLHERRVFHLTVAEPHAEPPPRGSPGNGSSHSGAPGPDPTLARGHNVINVIVPESRAHFFQQLGYVLATLLLFILLLVTVLLAARRRRGGYEYSDQKSGKSKGKDVNLAEFAVAAGDQMLYRSEDIQLDYKNNILKERAELAHSPLPAKYIDLDKGFRKENCK

SEQ ID NO: 66418 - protein, 691 aa, Homo sapiens
LDGHTMRLLTLLGLLCGSVATPLGPKWPEPVFGRLASPGFPGEYANDQERRWTLTAPPGYRLRLYFTHFDLELSHLCEYDFVKLSSGAKVLATLCGQESTDTERAPGKDTFYSLGSSLDITFRSDYSNEKPFTGFEAFYAAEDIDECQVAPGEAPTCDHHCHNHLGGFYCSCRAGYVLHRNKRTCSALCSGQVFTQRSGELSSPEYPRPYPKLSSCTYSISLEEGFSVILDFVESFDVETHPETLCPYDFLKIQTDREEHGPFCGKTLPHRIETKSNTVTITFVTDESGDHTGWKIHYTSTAQPCPYPMAPPNGHVSPVQAKYILKDSFSIFCETGYELLQGHLPLKSFTAVCQKDGSWDRPMPACSIVDCGPPDDLPSGRVEYITGPGVTTYKAVIQYSCEETFYTMKVNDGKYVCEADGFWTSSKGEKSLPVCEPVCGLSARTTGGRIYGGQKAKPGDFPWQVLILGGTTAAGALLYDNWVLTAAHAVYEQKHDASALDIRMGTLKRLSPHYTQAWSEAVFIHEGYTHDAGFDNDIALIKLNNKVVINSNITPICLPRKEAESFMRTDDIGTASGWGLTQRGFLARNLMYVDIPIVDHQKCTAAYEKPPYPRGSVTANMLCAGLESGGKDSCRGDSGGALVFLDSETERWFVGGIVSWGSMNCGEAGQYGVYTKVINYIPWIENIISDF

SEQ ID NO: 66419 - protein, 413 aa, Homo sapiens
LLLPPLLLLLLAGRAAGAQRWRSENFERPVDLEGSGDDDSFPDDELDDLYSGSGSGYFEQESGIETAMRFSPDVALAVSTTPAVLPTTNIQPVGTPFEELPSERPTLEPATSPLVVTEVPEEPSQRATTVSTTMATTAATSTGDPTVATVPATVATATPSTPAAPPFTATTAVIRTTGVRRLLPLPLTTVATARATTPEAPSPPTTAAVLDTEAPTPRLVSTATSRPRALPRPATTQEPDIPERSTLPLGTTAPGPTEVAQTPTPETFLTTIRDEPEVPVSGGPSGDFELPEEETTQPDTANEVVAVGGAAAKASSPPGTLPKGARPGPGLLDNAIDSGSSAAQLPQKSILERKEVLVAVIVGGVVGALFAAFLVTLLIYRMKKKDEGSYTLEEPKQASVTYQKPDKQEEFYA

SEQ ID NO: 66420 - protein, 135 aa, Homo sapiens
IPTILGLFLLALLGLVVKRAVERRKALSRRARRLAVRMRALESSQRPRGSPRPRSQNNIYSACPRRARGADAAGTGEAPVPGPGAPLPPAPLQVSESPWLHAPSLKTSCEYVSLYHQPAAMMEDSDSDDYINVPA

SEQ ID NO: 66421 - protein, 416 aa, Homo sapiens
RSSHGSPPTLSTLTLLLLLCGHAHSQCKILRCNAEYVSSTLSLRGGGSSGALRGGGGGGRGGGVGSGGLCRALRSYALCTRRTARTCRGDLAFHSAVHGIEDLMIQHNCSRQGPTAPPPPRGPALPGAGSGLPAPDPCDYEGRFSRLHGRPPGFLHCASFGDPHVRSFHHHFHTCRVQGAWPLLDNDFLFVQATSSPMALGANATATRKLTIIFKNMQECIDQKVYQAEVDNLPVAFEDGSINGGDRPGGSSLSIQTANPGNHVEIQAAYIGTTIIIRQTAGQLSFSIKVAEDVAMAFSAEQDLQLCVGGCPPSQRLSRSERNRRGAITIDTARRLCKEGLPVEDAYFHSCVFDVLISGDPNFTVAAQAALEDARAFLPDLEKLHLFPSDAGVPLSSATLLAPLLSGLFVLWLCIQ

SEQ ID NO: 66422 - protein, 185 aa, Homo sapiens
ISMKLLSLVAVVGCLLVPPAEANKSSEDIRCKCICPPYRNISGHIYNQNVSQKDCNCLHVVEPMPVPGHDVEAYCLLCECRYEERSTTTIKVIIVIYLSVVGALLLYMAFLMLVDPLIRKPDAYTEQLHNEEENEDARSMAAAAASLGGPRANTVLERVEGAQQRWKLQVQEQRKTVFDRHKMLS

SEQ ID NO: 66423 - protein, 594 aa, Homo sapiens
IGKMKNSRTWAWRAPVELFLLCAALGCLSLPGSRGERPHSFGSNAVNKSFAKSRQMRSVDVTLMPIDCELSSWSSWTTCDPCQKKRYRYAYLLQPSQFHGEPCNFSDKEVEDCVTNRPCGSQVRCEGFVCAQTGRCVNRRLLCNGDNDCGDQSDEANCRRIYKKCQHEMDQYWGIGSLASGINLFTNSFEGPVLDHRYYAGGCSPHYILNTRFRKPYNVESYTPQTQGKYEFILKEYESYSDFERNVTEKMASKSGFSFGFKIPGIFELGISSQSDRGKHYIRRTKRFSHTKSVFLHARSDLEVAHYKLKPRSLMLHYEFLQRVKRLPLEYSYGEYRDLFRDFGTHYITEAVLGGIYEYTLVMNKEAMERGDYTLNNVHACAKNDFKIGGAIEEVYVSLGVSVGKCRGILNEIKDRNKRDTMVEDLVVLVRGGASEHITTLAYQELPTADLMQEWGDAVQYNPAIIKVKVEPLYELVTATDFAYSSTVRQNMKQALEEFQKEVSSCHCAPCQGNGVPVLKGSRCDCICPVGSQGLACEVSYRKNTPIDGKWNCWSNWSSCSGRRKTRQRQCNNPPPQNGGSPCSGPASETLDCS

SEQ ID NO: 66424 - protein, 813 aa, Homo sapiens
LLPIVPLSWLVWLLLLLLASLLPSARLASPLPREEEIVFPEKLNGSVLPGSGAPARLLCRLQAFGETLLLELEQDSGVQVEGLTVQYLGQAPELLGGAEPGTYLTGTINGDPESVASLHWDGGALLGVLQYRGAELHLQPLEGGTPNSAGGPGAHILRRKSPASGQGPMCNVKAPLGSPSPRPRRAKRFASLSRFVETLVVADDKMAAFHGAGLKRYLLTVMAAAAKAFKHPSIRNPVSLVVTRLVILGSGEEGPQVGPSAAQTLRSFCAWQRGLNTPEDSDPDHFDTAILFTRQDLCGVSTCDTLGMADVGTVCDPARSCAIVEDDGLQSAFTAAHELGHVFNMLHDNSKPCISLNGPLSTSRHVMAPVMAHVDPEEPWSPCSARFITDFLDNGYGHCLLDKPEAPLHLPVTFPGKDYDADRQCQLTFGPDSRHCPQLPPPCAALWCSGHLNGHAMCQTKHSPWADGTPCGPAQACMGGRCLHMDQLQDFNIPQAGGWGPWGPWGDCSRTCGGGVQFSSRDCTRPVPRNGGKYCEGRRTRFRSCNTEDCPTGSALTFREEQCAAYNHRTDLFKSFPGPMDWVPRYTGVAPQDQCKLTCQAQALGYYYVLEPRVVDGTPCSPDSSSVCVQGRCIHAGCDRIIGSKKKFDKCMVCGGDGSGCSKQSGSFRKFRYGYNNVVTIPAGATHILVRQQGNPGHRSIYLALKLPDGSYALNGEYTLMPSPTDVVLPGAVSLRYSGATAASETLSGHGPLAQPLTLQVLVAGNPQDTRLRYSFFVPRPTPSTPRPTPQDWLHRRAQILEILRRRPWAGRK

SEQ ID NO: 66425 - protein, 276 aa, Homo sapiens
LPALRMRGNLALVGVLISLAFLSLLPSGHPQPAGDDACSVQILVPGLKGDAGEKGDKGAPGRPGRVGPTGEKGDMGDKGQKGSVGRHGKIGPIGSKGEKGDSGDIGPPGPNGEPGLPCECSQLRKAIGEMDNQVSQLTSELKFIKNAVAGVRETESKIYLLVKEEKRYADAQLSCQGRGGTLSMPKDEAANGLMAAYLAQAGLARVFIGINDLEKEGAFVYSDHSPMRTFNKWRSGEPNNAYDEEDCVEMVASGGWNDVACHTTMYFMCEFDKENM

SEQ ID NO: 66426 - protein, 24 aa, Homo sapiens
ITTLMAGILRLVVQWPPGRLQACF

SEQ ID NO: 66427 - protein, 165 aa, Homo sapiens
ITTLMAGILRLVVQWPPGRLQTVTKGVESLICTDWIRHKFTRSRIPEKVFQASPEDHEKYGGDPQNPHKLHIVTRIKSTRRRPYWEKDIIKMLGLEKAHTPQVHKNIPSVNAKLKVVKHLIRIKPLKLPQGLPAEENMSNTCLKSTGELVVQWHLKPVEQKAHES

SEQ ID NO: 66428 - protein, 16 aa, Homo sapiens
ITVAFWLLNSWLWFRR

SEQ ID NO: 66429 - protein, 1467 aa, Homo sapiens
LLALVLFCAWGTLAVVAQKPGAGCPSRCLCFRTTVRCMHLLLEAVPAVAPQTSILDLRFNRIREIQPGAFRRLRNLNTLLLNNNQIKRIPSGAFEDLENLKYLYLYKNEIQSIDRQAFKGLASLEQLYLHFNQIETLDPDSFQHLPKLERLFLHNNRITHLVPGTFNHLESMKRLRLDSNTLHCDCEILWLADLLKTYAESGNAQAAAICEYPRRIQGRSVATITPEELNCERPRITSEPQDADVTSGNTVYFTCRAEGNPKPEIIWLRNNNELSMKTDSRLNLLDDGTLMIQNTQETDQGIYQCMAKNVAGEVKTQEVTLRYFGSPARPTFVIQPQNTEVLVGESVTLECSATGHPPPRISWTRGDRTPLPVDPRVNITPSGGLYIQNVVQGDSGEYACSATNNIDSVHATAFIIVQALPQFTVTPQDRVVIEGQTVDFQCEAKGNPPPVIAWTKGGSQLSVDRRHLVLSSGTLRISGVALHDQGQYECQAVNIIGSQKVVAHLTVQPRVTPVFASIPSDTTVEVGANVQLPCSSQGEPEPAITWNKDGVQVTESGKFHISPEGFLTINDVGPADAGRYECVARNTIGSASVSMVLSVNVPDVSRNGDPFVATSIVEAIATVDRAINSTRTHLFDSRPRSPNDLLALFRYPRDPYTVEQARAGEIFERTLQLIQEHVQHGLMVDLNGTSYHYNDLVSPQYLNLIANLSGCTAHRRVNNCSDMCFHQKYRTHDGTCNNLQHPMWGASLTAFERLLKSVYENGFNTPRGINPHRLYNGHALPMPRLVSTTLIGTETVTPDEQFTHMLMQWGQFLDHDLDSTVVALSQARFSDGQHCSNVCSNDPPCFSVMIPPNDSRARSGARCMFFVRSSPVCGSGMTSLLMNSVYPREQINQLTSYIDASNVYGSTEHEARSIRDLASHRGLLRQGIVQRSGKPLLPFATGPPTECMRDENESPIPCFLAGDHRANEQLGLTSMHTLWFREHNRIATELLKLNPHWDGDTIYYETRKIVGAEIQHITYQHWLPKILGEVGMRTLGEYHGYDPGINAGIFNAFATAAFRFGHTLVNPLLYRLDENFQPIAQDHLPLHKAFFSPFRIVNEGGIDPLLRGLFGVAGKMRVPSQLLNTELTERLFSMAHTVALDLAAINIQRGRDHGIPPYHDYRVYCNLSAAHTFEDLKNEIKNPEIREKLKRLYGSTLNIDLFPALVVEDLVPGSRLGPTLMCLLSTQFKRLRDGDRLWYENPGVFSPAQLTQIKQTSLARILCDNADNITRVQSDVFRVAEFPHGYGSCDEIPRVDLRVWQDCCEDCRTRGQFNAFSYHFRGRRSLEFSYQEDKPTKKTRPRKIPSVGRQGEHLSNSTSAFSTRSDASGTNDFREFVLEMQKTITDLRTQIKKLESRLSTTECVDAGGESHANNTKWKKDACTICECKDGQVTCFVEACPPATCAVPVNIPGACCPVCLQKRAEEKP

SEQ ID NO: 66430 - protein, 14 aa, Homo sapiens
LPISLVIYFYICFL

SEQ ID NO: 66431 - protein, 20 aa, Homo sapiens
RHHFLQLRPNILMSLQLLIL

SEQ ID NO: 66432 - protein, 10 aa, Homo sapiens
MLTLLFLVLF

SEQ ID NO: 66433 - protein, 3176 aa, Homo sapiens
RKHRHLPLVAVFCLFLSGFPTTHAQQQQADVKNGAAADIIFLVDSSWTIGEEHFQLVREFLYDVVKSLAVGENDFHFALVQFNGNPHTEFLLNTYRTKQEVLSHISNMSYIGGTNQTGKGLEYIMQSHLTKAAGSRAGDGVPQVIVVLTDGHSKDGLALPSAELKSADVNVFAIGVEDADEGALKEIASEPLNMHMFNLENFTSLHDIVGNLVSCVHSSVSPERAGDTETLKDITAQDSADIIFLIDGSNNTGSVNFAVILDFLVNLLEKLPIGTQQIRVGVVQFSDEPRTMFSLDTYSTKAQVLGAVKALGFAGGELANIGLALDFVVENHFTRAGGSRVEEGVPQVLVLISAGPSSDEIRYGVVALKQASVFSFGLGAQAASRAELQHIATDDNLVFTVPEFRSFGDLQEKLLPYIVGVAQRHIVLKPPTIVTQVIEVNKRDIVFLVDGSSALGLANFNAIRDFIAKVIQRLEIGQDLIQVAVAQYADTVRPEFYFNTHPTKREVITAVRKMKPLDGSALYTGSALDFVRNNLFTSSAGYRAAEGIPKLLVLITGGKSLDEISQPAQELKRSSIMAFAIGNKGADQAELEEIAFDSSLVFIPAEFRAAPLQGMLPGLLAPLRTLSGTPEVHSNKRDIIFLLDGSANVGKTNFPYVRDFVMNLVNSLDIGNDNIRVGLVQFSDTPVTEFSLNTYQTKSDILGHLRQLQLQGGSGLNTGSALSYVYANHFTEAGGSRIREHVPQLLLLLTAGQSEDSYLQAANALTRAGILTFCVGASQANKAELEQIAFNPSLVYLMDDFSSLPALPQQLIQPLTTYVSGGVEEVPLAQPESKRDILFLFDGSANLVGQFPVVRDFLYKIIDELNVKPEGTRIAVAQYSDDVKVESRFDEHQSKPEILNLVKRMKIKTGKALNLGYALDYAQRYIFVKSAGSRIEDGVLQFLVLLVAGRSSDRVDGPASNLKQSGVVPFIFQAKNADPAELEQIVLSPAFILAAESLPKIGDLHPQIVNLLKSVHNGAPAPVSGEKDVVFLLDGSEGVRSGFPLLKEFVQRVVESLDVGQDRVRVAVVQYSDRTRPEFYLNSYMNKQDVVNAVRQLTLLGGPTPNTGAALEFVLRNILVSSAGSRITEGVPQLLIVLTADRSGDDVRNPSVVVKRGGAVPIGIGIGNADITEMQTISFIPDFAVAIPTFRQLGTVQQVISERVTQLTREELSRLQPVLQPLPSPGVGGKRDVVFLIDGSQSAGPEFQYVRTLIERLVDYLDVGFDTTRVAVIQFSDDPKVEFLLNAHSSKDEVQNAVQRLRPKGGRQINVGNALEYVSRNIFKRPLGSRIEEGVPQFLVLISSGKSDDEVDDPAVELKQFGVAPFTIARNADQEELVKISLSPEYVFSVSTFRELPSLEQKLLTPITTLTSEQIQKLLASTRYPPPAVESDAADIVFLIDSSEGVRPDGFAHIRDFVSRIVRRLNIGPSKVRVGVVQFSNDVFPEFYLKTYRSQAPVLDAIRRLRLRGGSPLNTGKALEFVARNLFVKSAGSRIEDGVPQHLVLVLGGKSQDDVSRFAQVIRSSGIVSLGVGDRNIDRTELQTITNDPRLVFTVREFRELPNIEERIMNSFGPSAATPAPPGVDTPPPSRPEKKKADIVFLLDGSINFRRDSFQEVLRFVSEIVDTVYEDGDSIQVGLVQYNSDPTDEFFLKDFSTKRQIIDAINKVVYKGGRHANTKVGLEHLRVNHFVPEAGSRLDQRVPQIAFVITGGKSVEDAQDVSLALTQRGVKVFAVGVRNIDSEEVGKIASNSATAFRVGNVQELSELSEQVLETLHDAMHETLCPGVTDAAKACNLDVILGFDGSRDQNVFVAQKGFESKVDAILNRISQMHRVSCSGGRSPTVRVSVVANTPSGPVEAFDFDEYQPEMLEKFRNMRSQHPYVLTEDTLKVYLNKFRQSSPDSVKVVIHFTDGADGDLADLHRASENLRQEGVRALILVGLERVVNLERLMHLEFGRGFMYDRPLRLNLLDLDYELAEQLDNIAEKACCGVPCKCSGQRGDRGPIGSIGPKGIPGEDGYRGYPGDEGGPGERGPPGVNGTQGFQGCPGQRGVKGSRGFPGEKGEVGEIGLDGLDGEDGDKGLPGSSGEKGNPGRRGDKGPRGEKGERGDVGIRGDPGNPGQDSQERGPKGETGDLGPMGVPGRDGVPGGPGETGKNGGFGRRGPPGAKGNKGGPGQPGFEGEQGTRGAQGPAGPAGPPGLIGEQGISGPRGSGGAAGAPGERGRTGPLGRKGEPGEPGPKGGIGNRGPRGETGDDGRDGVGSEGRRGKKGERGFPGYPGPKGNPGEPGLNGTTGPKGIRGRRGNSGPPGIVGQKGDPGYPGPAGPKGNRGDSIDQCALIQSIKDKCPCCYGPLECPVFPTELAFALDTSEGVNQDTFGRMRDVVLSIVNDLTIAESNCPRGARVAVVTYNNEVTTEIRFADSKRKSVLLDKIKNLQVALTSKQQSLETAMSFVARNTFKRVRNGFLMRKVAVFFSNTPTRASPQLREAVLKLSDAGITPLFLTRQEDRQLINALQINNTAVGHALVLPAGRDLTDFLENVLTCHVCLDICNIDPSCGFGSWRPSFRDRRAAGSDVDIDMAFILDSAETTTLFQFNEMKKYIAYLVRQLDMSPDPKASQHFARVAVVQHAPSESVDNASMPPVKVEFSLTDYGSKEKLVDFLSRGMTQLQGTRALGSAIEYTIENVFESAPNPRDLKIVVLMLTGEVPEQQLEEAQRVILQAKCKGYFFVVLGIGRKVNIKEVYTFASEPNDVFFKLVDKSTELNEEPLMRFGRLLPSFVSSENAFYLSPDIRKQCDWFQGDQPTKNLVKFGHKQVNVPNNVTSSPTSNPVTTTKPVTTTKPVTTTTKPVTTTTKPVTIINQPSVKPAAAKPAPAKPVAAKPVATKMATVRPPVAVKPATAAKPVAAKPAAVRPPAAAAAKPVATKPEVPRPQAAKPAATKPATTKPMVKMSREVQVFEITENSAKLHWERAEPPGPYFYDLTVTSAHDQSLVLKQNLTVTDRVIGGLLAGQTYHVAVVCYLRSQVRATYHGSFSTKKSQPPPPQPARSASSSTINLMVSTEPLALTETDICKLPKDEGTCRDFILKWYYDPNTKSCARFWYGGCGGNENKFGSQKECEKVCAPVLAKPGVISVMGT

SEQ ID NO: 66434 - protein, 271 aa, Homo sapiens
VLLTAVLLLLAAYAGPAQSLGSFVHCEPCDEKALSMCPPSPLGCELVKEPGCGCCMTCALAEGQSCGVYTERCAQGLRCLPRQDEEKPLHALLHGRGVCLNEKSYREQVKIERDSREHEEPTTSEMAEETYSPKIFRPKHTRISELKAEAVKKDRRKKLTQSKFVGGAENTAHPRIISAPEMRQESEQGPCRRHMEASLQELKASPRMVPRAVYLPNCDRKGFYKRKQCKPSRGRKRGICWCVDKYGMKLPGMEYVDGDFQCHTFDSSNVE

SEQ ID NO: 66435 - protein, 1024 aa, Homo sapiens
RLRALLLALVVAGIPAGAYNLDPQRPVHFQGPADSFFGYAVLEHFHDNTRWVLVGAPKADSKYSPSVKSPGAVFKCRVHTNPDRRCTELDMARGKNRGTSCGKTCREDRDDEWMGVSLARQPKADGRVLACAHRWKNIYYEADHILPHGFCYIIPSNLQAKGRTLIPCYEEYKKKYGEEHGSCQAGIAGFFTEELVVMGAPGSFYWAGTIKVLNLTDNTYLKLNDEVIMNRRYTYLGYAVTAGHFSHPSTIDVVGGAPQDKGIGKVYIFRADRRSGTLIKIFQASGKKMGSYFGSSLCAVDLNGDGLSDLLVGAPMFSEIRDEGQVTVYINRGNGALEEQLALTGDGAYNAHFGESIASLDDLDNDGFPDVAIGAPKEDDFAGAVYIYHGDAGGIVPQYSMKLSGQKINPVLRMFGQSISGGIDMDGNGYPDVTVGAFMSDSVVLLRARPVITVDVSIFLPGSINITAPQCHDGQQPVNCLNVTTCFSFHGKHVPGEIGLNYVLMADVAKKEKGQMPRVYFVLLGETMGQVTEKLQLTYMEETCRHYVAHVKRRVQDVISPIVFEAAYSLSEHVTGEEERELPPLTPVLRWKKGQKIAQKNQTVFERNCRSEDCAADLQLQGKLLLSSMDEKTLYLALGAVKNISLNISISNLGDDAYDANVSFNVSRELFFINMWQKEEMGISCELLESDFLKCSVGFPFMRSKSKYEFSVIFDTSHLSGEEEVLSFIVTAQSGNTERSESLHDNTLVLMVPLMHEVDTSITGIMSPTSFVYGESVDAANFIQLDDLECHFQPINITLQVYNTGPSTLPGSSVSISFPNRLSSGGAEMFHVQEMVVGQEKGNCSFQKNPTPCIIPQEQENIFHTIFAFFTKSGRKVLDCEKPGISCLTAHCNFSALAKEESRTIDIYMLLNTEILKKDSSSVIQFMSRAKVKVDPALRVVEIAHGNPEEVTVVFEALHNLEPRGYVVGWIIAISLLVGILIFLLLAVLLWKMGFFRRRYKEIIEAEKNRKENEDSWDWVQKNQ

SEQ ID NO: 66436 - protein, 16 aa, Homo sapiens
VSSRATGMRLLITLMI

SEQ ID NO: 66437 - protein, 12 aa, Homo sapiens
LAFLFWCFGPLW

SEQ ID NO: 66438 - protein, 354 aa, Homo sapiens
LLLLLSLLCGAAGSQEAGTGAGAGSLAGSCGCGTPQRPGAHGSSAAAHRYSREANAPGPVPGERQLAHSKMVPIPAGVFTMGTDDPQIKQDGEAPARRVTIDAFYMDAYEVSNTEFEKFVNSTGYLTEAEKFGDSFVFEGMLSEQVKTNIQQAVAAAPWWLPVKGANWRHPEGPDSTILHRPDHPVLHVSWNDAVAYCTWAGKRLPTEAEWEYSCRGGLHNRLFPWGNKLQPKGQHYANIWQGEFPVTNTGEDGFQGTAPVDAFPPNGYGLYNIVGNAWEWTSDWWTVHHSVEETLNPKGPPSGKDRVKKGGSYMCHRSYCYRYRCAARSQNTPDSSASNLGFRCAADRLPTMD

SEQ ID NO: 66439 - protein, 279 aa, Homo sapiens
RGPRPTAPLLALLLLLAPVAAPAGSGDPDDPGQPQDAGVPRRLLQQAARAALHFFNFRSGSPSALRVLAEVQEGRAWINPKEGCKVHVVFSTERYNPESLLQEGEGRLGKCSARVFFKNQKPRPTINVTCTRLIEKKKRQQEDYLLYKQMKQLKNPLEIVSIPDNHGHIDPSLRLIWDLAFLGSSYVMWEMTTQVSHYYLAQLTSVRQWKTNDDTIDFDYTVLLHELSTQEIIPCRIHLVWYPGKPLKVKYHCQELQTPEEASGTEEGSAVVPTELSNF

SEQ ID NO: 66440 - protein, 186 aa, Homo sapiens
LLLLLSALAGLFGAAEGQAFHLGKCPNPPVQENFDVNKYLGRWYEIEKIPTTFENGRCIQANYSLMENGKIKVLNQELRADGTVNQIEGEATPVNLTEPAKLEVKFSWFMPSAPYWILATDYENYALVYSCTCIIQLFHVDFAWILARNPNLPPETVDSLKNILTSNNIDVKKMTVTDQVNCPKLS

SEQ ID NO: 66441 - protein, 1901 aa, Homo sapiens
TPPRCPVPLLLLLLLGAARAGALEIQRRFPSPTPTNNFALDGAAGTVYLAAVNRLYQLSGANLSLEAEAAVGPVPDSPLCHAPQLPQASCEHPRRLTDNYNKILQLDPGQGLVVVCGSIYQGFCQLRRRGNISAVAVRFPPAAPPAEPVTVFPSMLNVAANHPNASTVGLVLPPAAGAGGSRLLVGATYTGYGSSFFPRNRSLEDHRFENTPEIAIRSLDTRGDLAKLFTFDLNPSDDNILKIKQGAKEQHKLGFVSAFLHPSDPPPGAQSYAYLALNSEARAGDKESQARSLLARICLPHGAGGDAKKLTESYIQLGLQCAGGAGRGDLYSRLVSVFPARERLFAVFERPQGSPAARAAPAALCAFRFADVRAAIRAARTACFVEPAPDVVAVLDSVVQGTGPACERKLNIQLQPEQLDCGAAHLQHPLSILQPLKATPVFRAPGLTSVAVASVNNYTAVFLGTVNGRLLKINLNESMQVVSRRVVTVAYGEPVHHVMQFDPADSGYLYLMTSHQMARVKVAACNVHSTCGDCVGAADAYCGWCALETRCTLQQDCTNSSQQHFWTSASEGPSRCPAMTVLPSEIDVRQEYPGMILQISGSLPSLSGMEMACDYGNNIRTVARVPGPAFGHQIAYCNLLPRDQFPPFPPNQDHVTVEMSVRVNGRNIVKANFTIYDCSRTAQVYPHTACTSCLSAQWPCFWCSQQHSCVSNQSRCEASPNPTSPQDCPRTLLSPLAPVPTGGSQNILVPLANTAFFQGAALECSFGLEEIFEAVWVNESVVRCDQVVLHTTRKSQVFPLSLQLKGRPARFLDSPEPMTVMVYNCAMGSPDCSQCLGREDLGHLCMWSDGCRLRGPLQPMAGTCPAPEIHAIEPLSGPLDGGTLLTIRGRNLGRRLSDVAHGVWIGGVACEPLPDRYTVSEEIVCVTGPAPGPLSGVVTVNASKEGKSRDRFSYVLPLVHSLEPTMGPKAGGTRITIHGNDLHVGSELQVLVNDTDPCTELMRTDTSIACTMPEGALPAPVPVCVRFERRGCVHGNLTFWYMQNPVITAISPRRSPVSGGRTITVAGERFHMVQNVSMAVHHIGREPTLCKVLNSTLITCPSPGALSNASAPVDFFINGRAYADEVAVAEELLDPEEAQRGSRFRLDYLPNPQFSTAKREKWIKHHPGEPLTLVIHKEQDSLGLQSHEYRVKIGQVSCDIQIVSDRIIHCSVNESLGAAVGQLPITIQVGNFNQTIATLQLGGSETAIIVSIVICSVLLLLSVVALFVFCTKSRRAERYWQKTLLQMEEMESQIREEIRKGFAELQTDMTDLTKELNRSQGIPFLEYKHFVTRTFFPKCSSLYEERYVLPSQTLNSQGSSQAQETHPLLGEWKIPESCRPNMEEGISLFSSLLNNKHFLIVFVHALEQQKDFAVRDRCSLASLLTIALHGKLEYYTSIMKELLVDLIDASAAKNPKLMLRRTESVVEKMLTNWMSICMYSCLRETVGEPFFLLLCAIKQQINKGSIDAITGKARYTLSEEWLLRENIEAKPRNLNVSFQGCGMDSLSVRAMDTDTLTQVKEKILEAFCKNVPYSQWPRAEDVDLEWFASSTQSYILRDLDDTSVVEDGRKKLNTLAHYKIPEGASLAMSLIDKKDNTLGRVKDLDTEKYFHLVLPTDELAEPKKSHRQSHRKKVLPEIYLTRLLSTKGTLQKFLDDLFKAILSIREDKPPLAVKYFFDFLEEQAEKRGISDPDTLHIWKTNSLPLRFWVNILKNPQFVFDIDKTDHIDACLSVIAQAFIDACSISDLQLGKDSPTNKLLYAKEIPEYRKIVQRYYKQIQDMTPLSEQEMNAHLAEESRKYQNEFNTNVAMAEIYKYAKRYRPQIMAALEANPTARRTQLQHKFEQVVALMEDNIYECYSEA

SEQ ID NO: 66442 - protein, 96 aa, Homo sapiens
LGIWVIGWLAGGHITCCPHPSLKMTAMPPAPAPVPVPTLKPSAPAMVEAWAPRARTASWTSYCPRPRWAVAGAAAVALGPAVAPWPGGPGEGQRPL

SEQ ID NO: 66443 - protein, 67 aa, Homo sapiens
LGKFMTLVITIPLSTSMSLTKIPHGTYRGKDMWGHNERTAICKPRRESSPETNLTGILILNFLLPEL

SEQ ID NO: 66444 - protein, 624 aa, Homo sapiens
IFLYQVVHFILFTSVSGECVTQLLKDTCFEGGDITTVFTPSAKYCQVVCTYHPRCLLFTFTAESPSEDPTRWFTCVLKDSVTETLPRVNRTAAISGYSFKQCSHQISACNKDIYVDLDMKGINYNSSVAKSAQECQERCTDDVHCHFFTYATRQFPSLEHRNICLLKHTQTGTPTRITKLDKVVSGFSLKSCALSNLACIRDIFPNTVFADSNIDSVMAPDAFVCGRICTHHPGCLFFTFFSQEWPKESQRNLCLLKTSESGLPSTRIKKSKALSGFSLQSCRHSIPVFCHSSFYHDTDFLGEELDIVAAKSHEACQKLCTNAVRCQFFTYTPAQASCNEGKGKCYLKLSSNGSPTKILHGRGGISGYTLRLCKMDNECTTKIKPRIVGGTASVRGEWPWQVTLHTTSPTQRHLCGGSIIGNQWILTAAHCFYGVESPKILRVYSGILNQSEIKEDTSFFGVQEIIIHDQYKMAESGYDIALLKLETTVNYTDSQRPICLPSKGDRNVIYTDCWVTGWGYRKLRDKIQNTLQKAKIPLVTNEECQKRYRGHKITHKMICAGYREGGKDACKGDSGGPLSCKHNEVWHLVGITSWGEGCAQRERPGVYTNVVEYVDWILEKTQAV

SEQ ID NO: 66445 - protein, 15 aa, Homo sapiens
MKIKSLFICFSFSLV

SEQ ID NO: 66446 - protein, 19 aa, Homo sapiens
LGRTQPMCSAWTLLILCLA

SEQ ID NO: 66447 - protein, 19 aa, Homo sapiens
LVLMTWYILILWIHQLLKL

SEQ ID NO: 66448 - protein, 487 aa, Homo sapiens
VAERSPARSPGSWLFPGLWLLVLSGPGGLLRAQEQPSCRRAFDLYFVLDKSGSVANNWIEIYNFVQQLAERFVSPEMRLSFIVFSSQATIILPLTGDRGKISKGLEDLKRVSPVGETYIHEGLKLANEQIQKAGGLKTSSIIIALTDGKLDGLVPSYAEKEAKISRSLGASVYCVGVLDFEQAQLERIADSKEQVFPVKGGFQALKGIINSILAQSCTEILELQPSSVCVGEEFQIVLSGRGFMLGSRNGSVLCTYTVNETYTTSVKPVSVQLNSMLCPAPILNKAGETLDVSVSFNGGKSVISGSLIVTATECSNGIAAIIVILVLLLLLGIGLMWWFWPLCCKVVIKDPPPPPAPAPKEEEEEPLPTKKWPTVDASYYGGRGVGGIKRMEVRWGDKGSTEEGARLEKAKNAVVKIPEETEEPIRPRPPRPKPTHQPPQTKWYTPIKGRLDALWALLRRQYDRVSLMRPQEGDEGRCINFSRVPSQ

SEQ ID NO: 66449 - protein, 663 aa, Homo sapiens
KTGLFFLCLLGTAAAIPTNARLLSDHSKPTAETVAPDNTAIPSLRAEAEENEKETAVSTEDDSHHKAEKSSVLKSKEESHEQSAEQGKSSSQELGLKDQEDSDGHLSVNLEYAPTEGTLDIKEDMSEPQEKKLSENTDFLAPGVSSFTDSNQQESITKREENQEQPRNYSHHQLNRSSKHSQGLRDQGNQEQDPNISNGEEEEEKEPGEVGTHNDNQERKTELPREHANSKQEEDNTQSDDILEESDQPTQVSKMQEDEFDQGNQEQEDNSNAEMEEENASNVNKHIQETEWQSQEGKTGLEAISNHKETEEKTVSEALLMEPTDDGNTTPRNHGVDDDGDDDGDDGGTDGPRHSASDDYFIPSQAFLEAERAQSIAYHLKIEEQREKVHENENIGTTEPGEHQEAKKAENSSNEEETSSEGNMRVHAVDSCMSFQCKRGHICKADQQGKPHCVCQDPVTCPPTKPLDQVCGTDNQTYASSCHLFATKCRLEGTKKGHQLQLDYFGACKSIPTCTDFEVIQFPLRMRDWLKNILMQLYEANSEHAGYLNEKQRNKVKKIYLDEKRLLAGDHPIDLLLRDFKKNYHMYVYPVHWQFSELDQHPMDRVLTHSELAPLRASLVPMEHCITRFFEECDPNKDKHITLKEWGHCFGIKEEDIDENLLF

SEQ ID NO: 66450 - protein, 338 aa, Homo sapiens
VLLVPFLLCQALVRCSSPLPLVVNTWPFKNATEAAWRALASGGSALDAVESGCAMCEREQCDGSVGFGGSPDELGETTLDAMIMDGTTMDVGAVGDLRRIKNAIGVARKVLEHTTHTLLVGESATTFAQSMGFINEDLSTTASQALHSDWLARNCQPNYWRNVIPDPSKYCGPYKPPGILKQDIPIHKETEDDRGHDTIGMVVIHKTGHIAAGTSTNGIKFKIHGRVGDSPIPGAGAYADDTAGAAAATGNGDILMRFLPSYQAVEYMRRGEDPTIACQKVISRIQKHFPEFFGAVICANVTGSYGAACNKLSTFTQFSFMVYNSEKNQPTEEKVDCI

SEQ ID NO: 66451 - protein, 15 aa, Homo sapiens
LVIFFTITRIVLGIL

SEQ ID NO: 66452 - protein, 22 aa, Homo sapiens
IMLLLLQGTLLLLQLRLTFQKK

SEQ ID NO: 66453 - protein, 523 aa, Homo sapiens
KSALVFLLLQLFCVGCGFCGKVLVWPCDMSHWLNVKVILEELIVRGHEVTVLTHSKPSLIDYRKPSALKFEVVHMPQDRTEENEIFVDLALNVLPGLSTWQSVIKLNDFFVEIRGTLKMMCESFIYNQTLMKKLQETNYDVMLIDPVIPCGDLMAELLAVPFVLTLRISVGGNMERSCGKLPAPLSYVPVPMTGLTDRMTFLERVKNSMLSVLFHFWIQDYDYHFWEEFYSKALGRPTTLCETVGKAEIWLIRTYWDFEFPQPYQPNFEFVGGLHCKPAKALPKEMENFVQSSGEDGIVVFSLGSLFQNVTEEKANIIASALAQIPQKVLWRYKGKKPSTLGANTRLYDWIPQNDLLGHPKTKAFITHGGMNGIYEAIYHGVPMVGVPIFGDQLDNIAHMKAKGAAVEINFKTMTSEDLLRALRTVITDSSYKENAMRLSRIHHDQPVKPLDRAVFWIEFVMRHKGAKHLRSAAHDLTWFQHYSIDVIGFLLACVATAIFLFTKCFLFSCQKFNKTRKIEKRE

SEQ ID NO: 66454 - protein, 158 aa, Homo sapiens
KNHLLFWGVLAVFIKAVHVKAQEDERIVLVDNKCKCARITSRIIRSSEDPNEDIVERNIRIIVPLNNRENISDPTSPLRTRFVYHLSDLCKKCDPTEVELDNQIVTATQSNICDEDSATETCYTYDRNKCYTAVVPLVYGGETKMVETALTPDACYPD

SEQ ID NO: 66455 - protein, 261 aa, Homo sapiens
RNSYRFLASSLSVVVSLLLIPEDVCEKIIGGNEVTPHSRPYMVLLSLDRKTICAGALIAKDWVLTAAHCNLNKRSQVILGAHSITREEPTKQIMLVKKEFPYPCYDPATREGDLKLLQLMEKAKINKYVTILHLPKKGDDVKPGTMCQVAGWGRTHNSASWSDTLREVNITIIDRKVCNDRNHYNFNPVIGMNMVCAGSLRGGRDSCNGDSGSPLLCEGVFRGVTSFGLENKCGDPRGPGVYILLSKKHLNWIIMTIKGAV

SEQ ID NO: 66456 - protein, 368 aa, Homo sapiens
ILSHFPMKLHCCLFTLVASIIVPAAFVLEDVDFDQMVSLEANRSSYNASFPSSFELSASSHSDDDVIIAKEGTSVSIECLLTASHYEDVHWHNSKGQQLDGRSRGGKWLVSDNFLNITNVAFDDRGLYTCFVTSPIRASYSVTLRVIFTSGDMSVYYMIVCLIAFTITLILNVTRLCMMSSHLRKTEKAINEFFRTEGAEKLQKAFEIAKRIPIITSAKTLELAKVTQFKTMEFARYIEELARSVPLPPLILNCRAFVEEMFEAVRVDDPDDLGERIKERPALNAQGGIYVINPEMGRSNSPGGDSDDGSLNEQGQEIAVQVSVHLQSETKSIDTESQGSSHFSPPDDIGSAESNCNYKDGAYENCQL

SEQ ID NO: 66457 - protein, 488 aa, Homo sapiens
LAWSVLISRLAMATYTCITCRVAFRDADMQRAHYKTDWHRYNLRRKVASMAPVTAEGFQERVRAQRAVAEEESKGSATYCTVCSKKFASFNAYENHLKSRRHVELEKKAVQAVNRKVEMMNEKNLEKGLGVDSVDKDAMNAAIQQAIKAQPSMSPKKAPPAPAKEARNVVAVGTGGRGTHDRDPSEKPPRLQWFEQQAKKLAKQQEEDSEEEEEDLDGDDWEDIDSDEELECEDTEAMDDVVEQDAEEEEAEEGPPLGAIPITDCLFCSHHSSSLMKNVAHMTKDHSFFIPDIEYLSDIKGLIKYLGEKVGVGKICLWCNEKGKSFYSTEAVQAHMNDKSHCKLFTDGDAALEFADFYDFRSSYPDHKEGEDPNKAEELPSEKNLEYDDETMELILPSGARVGHRSLMRYYKQRFGLSRAVAVAKNRKAVGRVLQQYRALGWTGSTGAALMRERDMQYVQRMKSKWMLKTGMKNNATKQMHFRVQVRF

SEQ ID NO: 66458 - protein, 17 aa, Homo sapiens
IHFTKSTAAALSMLFYT

SEQ ID NO: 66459 - protein, 12 aa, Homo sapiens
MLGLCVCVCLAV

SEQ ID NO: 66460 - protein, 14 aa, Homo sapiens
VWIIVTGIWWSIEI

SEQ ID NO: 66461 - protein, 27 aa, Homo sapiens
IYTLFILHTYFFPNNLQLRSEDTTNSA

SEQ ID NO: 66462 - protein, 18 aa, Homo sapiens
VGLALLGLLFAFFVKVYN

SEQ ID NO: 66463 - protein, 76 aa, Homo sapiens
LLLLLAGASYFLWRQQKEITALSSEIESEQEMKEMGYAATEREISLRESLQEELKRKKIQYLTRGEESSSDTNKSA

SEQ ID NO: 66464 - protein, 179 aa, Homo sapiens
TALLLLLASQVLSPGSCADEEEVPEEWVLLHVVQGQIGAGNYSYLRLNHEGKIVLRMRSLKGDADLYVSASSLHPSFDDYELQSATCGPDAVSIPAHFRRPVGIGVYGHPSHLESEFEMKVYYDGTVEQHPFGEAAYPADGADAGQKHAGAPEDASQEEESVLWTILISILKLVLEILF

SEQ ID NO: 66465 - protein, 807 aa, Homo sapiens
KEVVLLLLLFLKSGQGEPLDDYVNTQGASLFSVTKKQLGAGSIEECAAKCEEDEEFTCRAFQYHSKEQQCVIMAENRKSSIIIRMRDVVLFEKKVYLSECKTGNGKNYRGTMSKTKNGITCQKWSSTSPHRPRFSPATHPSEGLEENYCRNPDNDPQGPWCYTTDPEKRYDYCDILECEEECMHCSGENYDGKISKTMSGLECQAWDSQSPHAHGYIPSKFPNKNLKKNYCRNPDRELRPWCFTTDPNKRWELCDIPRCTTPPPSSGPTYQCLKGTGENYRGNVAVTVSGHTCQHWSAQTPHTHNRTPENFPCKNLDENYCRNPDGKRAPWCHTTNSQVRWEYCKIPSCDSSPVSTEQLAPTAPPELTPVVQDCYHGDGQSYRGTSSTTTTGKKCQSWSSMTPHRHQKTPENYPNAGLTMNYCRNPDADKGPWCFTTDPSVRWEYCNLKKCSGTEASVVAPPPVVLLPDVETPSEEDCMFGNGKGYRGKRATTVTGTPCQDWAAQEPHRHSIFTPETNPRAGLEKNYCRNPDGDVGGPWCYTTNPRKLYDYCDVPQCAAPSFDCGKPQVEPKKCPGRVVGGCVAHPHSWPWQVSLRTRFGMHFCGGTLISPEWVLTAAHCLEKSPRPSSYKVILGAHQEVNLEPHVQEIEVSRLFLEPTRKDIALLKLSSPAVITDKVIPACLPSPNYVVADRTECFITGWGETQGTFGAGLLKEAQLPVIENKVCNRYEFLNGRVQSTELCAGHLAGGTDSCQGDSGGPLVCFEKDKYILQGVTSWGLGCARPNKPGVYVRVSRFVTWIEGVMRNN

SEQ ID NO: 66466 - protein, 12 aa, Homo sapiens
LTLAVARFVWAW

SEQ ID NO: 66467 - protein, 16 aa, Homo sapiens
LFPRLCPLALPSLLVL

SEQ ID NO: 66468 - protein, 498 aa, Homo sapiens
LEPATVGSSMALLFLLPLVMQGVSRAEMGTADLGPSSVPTPTNVTIESYNMNPIVYWEYQIMPQVPVFTVEVKNYGVKNSEWIDACINISHHYCNISDHVGDPSNSLWVRVKARVGQKESAYAKSEEFAVCRDGKIGPPKLDIRKEEKQIMIDIFHPSVFVNGDEQEVDYDPETTCYIRVYNVYVRMNGSEIQYKILTQKEDDCDEIQCQLAIPVSSLNSQYCVSAEGVLHVWGVTTEKSKEVCITIFNSSIKGSLWIPVVAALLLFLVLSLVFICFYIKKINPLKEKSIILPKSLISVVRSATLETKPESKYVSLITSYQPFSLEKEVVCEEPLSPATVPGMHTEDNPGKVEHTEELSSITEVVTTEENIPDVVPGSHLTPIERESSSPLSSNQSEPGSIALNSYHSRNCSESDHSRNGFDTDSSCLESHSSLSDSEFPPNNKGEIKTEGQELITVIKAPTSFGYDKPHVLVDLLVDDSGKESLIGYRPTEDSKEFS

SEQ ID NO: 66469 - protein, 70 aa, Homo sapiens
LPVAPLHLWLIQMLLLTRTLHITKPCLLRGCRQMLQKFTPAHPHPRSSMNRDWSHPLLPNWVICSVLGKP

SEQ ID NO: 66470 - protein, 2045 aa, Homo sapiens
LASPKMEHKEVVLLLLLFLKSAAPEQSHVVQDCYHGDGQSYRGTYSTTVTGRTCQAWSSMTPHQHNRTTENYPNAGLIMNYCRNPDAVAAPYCYTRDPGVRWEYCNLTQCSDAEGTAVAPPTVTPVPSLEAPSEQAPTEQRPGVQECYHGNGQSYRGTYSTTVTGRTCQAWSSMTPHSHSRTPEYYPNAGLIMNYCRNPDAVAAPYCYTRDPGVRWEYCNLTQCSDAEGTAVAPPTVTPVPSLEAPSEQAPTEQRPGVQECYHGNGQSYRGTYSTTVTGRTCQAWSSMTPHSHSRTPEYYPNAGLIMNYCRNPDAVAAPYCYTRDPGVRWEYCNLTQCSDAEGTAVAPPTVTPVPSLEAPSEQAPTEQRPGVQECYHGNGQSYRGTYSTTVTGRTCQAWSSMTPHSHSRTPEYYPNAGLIMNYCRNPDAVAAPYCYTRDPGVRWEYCNLTQCSDAEGTAVAPPTVTPVPSLEAPSEQAPTEQRPGVQECYHGNGQSYRGTYSTTVTGRTCQAWSSMTPHSHSRTPEYYPNAGLIMNYCRNPDAVAAPYCYTRDPGVRWEYCNLTQCSDAEGTAVAPPTVTPVPSLEAPSEQAPTEQRPGVQECYHGNGQSYRGTYSTTVTGRTCQAWSSMTPHSHSRTPEYYPNAGLIMNYCRNPDAVAAPYCYTRDPGVRWEYCNLTQCSDAEGTAVAPPTVTPVPSLEAPSEQAPTEQRPGVQECYHGNGQSYRGTYSTTVTGRTCQAWSSMTPHSHSRTPEYYPNAGLIMNYCRNPDAVAAPYCYTRDPGVRWEYCNLTQCSDAEGTAVAPPTVTPVPSLEAPSEQAPTEQRPGVQECYHGNGQSYRGTYSTTVTGRTCQAWSSMTPHSHSRTPEYYPNAGLIMNYCRNPDPVAAPYCYTRDPSVRWEYCNLTQCSDAEGTAVAPPTITPIPSLEAPSEQAPTEQRPGVQECYHGNGQSYQGTYFITVTGRTCQAWSSMTPHSHSRTPAYYPNAGLIKNYCRNPDPVAAPWCYTTDPSVRWEYCNLTRCSDAEWTAFVPPNVILAPSLEAFFEQALTEETPGVQDCYYHYGQSYRGTYSTTVTGRTCQAWSSMTPHQHSRTPENYPNAGLTRNYCRNPDAEIRPWCYTMDPSVRWEYCNLTQCLVTESSVLATLTVVPDPSTEASSEEAPTEQSPGVQDCYHGDGQSYRGSFSTTVTGRTCQSWSSMTPHWHQRTTEYYPNGGLTRNYCRNPDAEISPWCYTMDPNVRWEYCNLTQCPVTESSVLATSTAVSEQAPTEQSPTVQDCYHGDGQSYRGSFSTTVTGRTCQSWSSMTPHWHQRTTEYYPNGGLTRNYCRNPDAEIRPWCYTMDPSVRWEYCNLTQCPVMESTLLTTPTVVPVPSTELPSEEAPTENSTGVQDCYRGDGQSYRGTLSTTITGRTCQSWSSMTPHWHRRIPLYYPNAGLTRNYCRNPDAEIRPWCYTMDPSVRWEYCNLTRCPVTESSVLTTPTVAPVPSTEAPSEQAPPEKSPVVQDCYHGDGRSYRGISSTTVTGRTCQSWSSMIPHWHQRTPENYPNAGLTENYCRNPDSGKQPWCYTTDPCVRWEYCNLTQCSETESGVLETPTVVPVPSMEAHSEAAPTEQTPVVRQCYHGNGQSYRGTFSTTVTGRTCQSWSSMTPHRHQRTPENYPNDGLTMNYCRNPDADTGPWCFTMDPSIRWEYCNLTRCSDTEGTVVAPPTVIQVPSLGPPSEQDCMFGNGKGYRGKKATTVTGTPCQEWAAQEPHRHSTFIPGTNKWAGLEKNYCRNPDGDINGPWCYTMNPRKLFDYCDIPLCASSSFDCGKPQVEPKKCPGSIVGGCVAHPHSWPWQVSLRTRFGKHFCGGTLISPEWVLTAAHCLKKSSRPSSYKVILGAHQEVNLESHVQEIEVSRLFLEPTQADIALLKLSRPAVITDKVMPACLPSPDYMVTARTECYITGWGETQGTFGTGLLKEAQLLVIENEVCNHYKYICAEHLARGTDSCQGDSGGPLVCFEKDKYILQGVTSWGLGCARPNKPGVYARVSRFVTWIEGMMRNN

SEQ ID NO: 66471 - protein, 59 aa, Homo sapiens
LVASGQKREMGASLYVGWAASGLLLLGGGLLCCNCPPRTDKPYSAKYSAARSAAASNYV

SEQ ID NO: 66472 - protein, 1150 aa, Homo sapiens
LLSCLLALLALCPGGRPQTVLTDDEIEEFLEGFLSELEPEPREDDVEAPPPPEPTPRVRKAQAGGKPGKRPGTAAEVPPEKTKDKGKKGKKDKGPKVPKESLEGSPRPPKKGKEKPPKATKKPKEKPPKATKKPKEKPPKATKKPKEKPPKATKKPPSGKRPPILAPSETLEWPLPPPPSPGPEELPQEGGAPLSNNWQNPGEETHVEAREHQPEPEEETEQPTLDYNDQIEREDYEDFEYIRRQKQPRPPPSRRRRPERVWPEPPEEKAPAPAPEERIEPPVKPLLPPLPPDYGDGYVIPNYDDMDYYFGPPPPQKPDAERQTDEEKEELKKPKKEDSSPKEETDKWAVEKGKDHKEPRKGEELEEEWTPTEKVKCPPIGMESHRIEDNQIRASSMLRHGLGAQRGRLNMQTGATEDDYYDGAWCAEDDARTQWIEVDTRRTTRFTGVITQGRDSSIHDDFVTTFFVGFSNDSQTWVMYTNGYEEMTFHGNVDKDTPVLSELPEPVVARFIRIYPLTWNGSLCMRLEVLGCSVAPVYSYYAQNEVVATDDLDFRHHSYKDMRQLMKVVNEECPTITRTYSLGKSSRGLKIYAMEISDNPGEHELGEPEFRYTAGIHGNEVLGRELLLLLMQYLCREYRDGNPRVRSLVQDTRIHLVPSLNPDGYEVAAQMGSEFGNWALGLWTEEGFDIFEDFPDLNSVLWGAEERKWVPYRVPNNNLPIPERYLSPDATVSTEVRAIIAWMEKNPFVLGANLNGGERLVSYPYDMARTPTQEQLLAAAMAAARGEDEDEVSEAQETPDHAIFRWLAISFASAHLTLTEPYRGGCQAQDYTGGMGIVNGAKWNPRTGTINDFSYLHTNCLELSFYLGCDKFPHESELPREWENNKEALLTFMEQVHRGIKGVVTDEQGIPIANATISVSGINHGVKTASGGDYWRILNPGEYRVTAHAEGYTPSAKTCNVDYDIGATQCNFILARSNWKRIREIMAMNGNRPIPHIDPSRPMTPQQRRLQQRRLQHRLRLRAQMRLRRLNATTTLGPHTVPPTLPPAPATTLSTTIEPWGLIPPTTAGWEESETETYTEVVTEFGTEVEPEFGTKVEPEFETQLEPEFETQLEPEFEEEEEEEKEEEIATGQAFPFTTVETYTVNFGDF

SEQ ID NO: 66473 - protein, 52 aa, Homo sapiens
VVLTLLSIFVRVMESLEGLLESPSPGTSWTTRSQLANTEPTKGLPDHPSRSM

SEQ ID NO: 66474 - protein, 706 aa, Homo sapiens
LGRGSLSGHSPLTLLTFLTSCALGDQQLLPPRTSGSLCQESMSEQSCQMSELRLLLLGKCRSGKSATGNAILGKHVFKSKFSDQTVIKMCQRESWVLRERKVVVIDTPDLFSSIACAEDKQRNIQHCLELSAPSLHALLLVIAIGHFTREDEETAKGIQQVFGAEARRHIIIVFTRKDDLGDDLLQDFIEKNKPLKQLVQDYEGRYCIFNNKTNSKDEQITQVLELLRKVESLVNTNGGPYHVNFKTEGSRFQDCVNEAASQEGDKPQGPRERQLQSTGPEQNPGTSELTVLLVGKRGAGKSAAGNSILGRQAFQTGFSEQSVTQSFLSESRSWRKKKVSIIDAPDISSLKNIDSEVRKHICTGPHAFLLVTPLGFYTKNDEAVLSTIQNNFGEKFFEYMIILLTRKEDLGDQDLDTFLRNSNKALYGLIQKCKNRYSAFNYRATGEEEQRQADELLEKIESMVHQNGNKHCVFREKETLNIVLVGRSGTGKSATGNSILGSLVFTSRLRAQPVTKTSQSGRRTWDGQEVVVVDTPSFNQMLDVEKDPSRLEEEVKRCLSCCEKGDTFFVLVFQLGRFTEEDKTAVAKLEAIFGADFTKYAIMLFTRKEDLGAGNLEDFMKNSDNKALRRIFKKCGRRVCAFNNKETGQAQETQVKALLTKVNDLRKESGWSGYPHTQENVSKLIKNVQEMSQAEKLLKNLIGILQ

SEQ ID NO: 66475 - protein, 216 aa, Homo sapiens
LSLRLFHLLLTSAAWVPDESQVTLNSAICVLSTVLIMEFPDLGKHCSEKTCKQLDFLPVKCDACKQDFCKDHFPYAAHKCPFAFQKDVHVPVCPLCNTPIPVKKGQIPDVVVGDHIDRDCDSHPGKKKEKIFTYRCSKEGCKKKEMLQMVCAQCHGNFCIQHRHPLDHSCRHGSRPTIKAGCSPMTVSESRPLGDFLTLAPGGLAQRLGYWFTRLM

SEQ ID NO: 66476 - protein, 168 aa, Homo sapiens
VKRYIKAFCKGFFVAVPVAVTFLDRVACVARVEGASMQPSLNPGGSQSSDVVLLNHWKVRNFEVHRGDIVSLVSPKNPEQKIIKRVIALEGDIVRTIGHKNRYVKVPRGHIWVEGDHHGHSFDSNSFGPVSLGLLHAHATHILWPPERWQKLESVLPPERLPVQREEE

SEQ ID NO: 66477 - protein, 442 aa, Homo sapiens [sequence omitted]

SEQ ID NO: 66478 - protein, 18 aa, Homo sapiens
LSCWLIRFMCMKSMLIGL

SEQ ID NO: 66479 - protein, 43 aa, Homo sapiens
LTLIMRQMALKLALSMLLPMQHMQAIREDSRLGAAAVESVFTV

SEQ ID NO: 66480 - protein, 41 aa, Homo sapiens
KFEVALRLETLAMRLTALLARALVHLSLVPPAEELYQYLET

SEQ ID NO: 66481 - protein, 27 aa, Homo sapiens
LVVFFFSFLLSIFRSKYHGYPYSFLIK

SEQ ID NO: 66482 - protein, 402 aa, Homo sapiens
VLVVAAVLLLVSAESALITQQDLAPQQRAAPQQKRSSPSEGLCPPGHHISEDGRDCISCKYGQDYSTHWNDLLFCLRCTRCDSGEVELSPCTTTRNTVCQCEEGTFREEDSPEMCRKCRTGCPRGMVKVGDCTPWSDIECVHKESGTKHSGEVPAVEETVTSSPGTPASPCSLSGIIIGVTVAAVVLIVAVFVCKSLLWKKVLPYLKGICSGGGGDPERVDRSSQRPGAEDNVLNEIVSILQPTQVPEQEMEVQEPAEPTGVNMLSPGESEHLLEPAEAERSQRRRLLVPANEGDPTETLRQCFDDFADLVPFDSWEPLMRKLGLMDNEIKVAKAEAAGHRDTLYTMLIKWVNKTGRDASVHTLLDALETLGERLAKQKIEDHLLSSGKFMYLEGNADSAMS

SEQ ID NO: 66483 - protein, 40 aa, Homo sapiens
KPPSRWRPTVDIFFVVPALLLTGDMVHGLGQSVVQSVDKR

SEQ ID NO: 66484 - protein, 32 aa, Homo sapiens
KMGFAVSVVGTSGGLIVSLLPAFLRPGAERCL

SEQ ID NO: 66485 - protein, 28 aa, Homo sapiens
LAFLCMWAARFTIAMKARMFQSTNGIWP

SEQ ID NO: 66486 - protein, 35 aa, Homo sapiens
VGFCLLVMLFLLKLARHSKFGMKGFVLFHKIPLDG

SEQ ID NO: 66487 - protein, 20 aa, Homo sapiens
LLLFFLQGLTSLSLGFCCRD

SEQ ID NO: 66488 - protein, 11 aa, Homo sapiens
MRKFIKGVLFL

SEQ ID NO: 66489 - protein, 597 aa, Homo sapiens
MYSTAVAIFLVILVAALQGSAPRESPLPYHIPLDPEGSLELSWNVSYTQEAIHFQLLVRRLKAGVLFGMSDRGELENADLVVLWTDGDTAYFADAWSDQKGQIHLDPQQDYQLLQVQRTPEGLTLLFKRPFGTCDPKDYLIEDGTVHLVYGILEEPFRSLEAINGSGLQMGLQRVQLLKPNIPEPELPSDACTMEVQAPNIQIPSQETTYWCYIKELPKGFSRHHIIKYEPIVTKGNEALVHHMEVFQCAPEMDSVPHFSGPCDSKMKPDRLNYCRHVLAAWALGAKAFYYPEEAGLAFGGPGSSRYLRLEVHYHNPLVIEGRNDSSGIRLYYTAKLRRFNAGIMELGLVYTPVMAIPPRETAFILTGYCTDKCTQLALPPSGIHIFASQLHTHLTGRKVVTVLVRDGREWEIVNQDNHYSPHFQEIRMLKKVVSVHPGDVLITSCTYNTEDRELATVGGFGILEEMCVNYVHYYPQTQLELCKSAVDAGFLQKYFHLINRFNNEDVCTCPQASVSQQFTSVPWNSFNRDVLKALYSFAPISMHCNKSSAVRFQGEWNLQPLPKVISTLEEPTPQCPTSQGRSPAGPTVVSIGGGKG

SEQ ID NO: 66490 - protein, 379 aa, Homo sapiens
KEYVLLLFLALCSAKPFFSPSHIALKNMMLKDMEDTDDDDDDDDDDDDDDEDNSLFPTREPRSHFFPFDLFPMCPFGCQCYSRVVHCSDLGLTSVPTNIPFDTRMLDLQNNKIKEIKENDFKGLTSLYGLILNNNKLTKIHPKAFLTTKKLRRLYLSHNQLSEIPLNLPKSLAELRIHENKVKKIQKDTFKGMNALHVLEMSANPLDNNGIEPGAFEGVTVFHIRIAEAKLTSVPKGLPPTLLELHLDYNKISTVELEDFKRYKELQRLGLGNNKITDIENGSLANIPRVREIHLENNKLKKIPSGLPELKYLQIIFLHSNSIARVGVNDFCPTVPKMKKSLYSAISLFNNPVKYWEMQPATFRCVLSRMSVQLGNFGM

SEQ ID NO: 66491 - protein, 113 aa, Homo sapiens
LALTHSPLACLCSPSMALLLALSLLVLWTSPAPTLSGTNDAEDCCLSVTQKPIPGYIVRNFHYLLIKDGCRVPAVVFTTLRGRQLCAPPDQPWVERIIQRLQRTSAKMKRRSS

SEQ ID NO: 66492 - protein, 2236 aa, Homo sapiens
LLEVAWPLFIFLILISVRLSYPPYEQHECHFPNKAMPSAGTLPWVQGIICNANNPCFRYPTPGEAPGVVGNFNKSIVARLFSDARRLLLYSQKDTSMKDMRKVLRTLQQIKKSSSNLKLQDFLVDNETFSGFLYHNLSLPKSTVDKMLRADVILHKVFLQGYQLHLTSLCNGSKSEEMIQLGDQEVSELCGLPREKLAAAERVLRSNMDILKPILRTLNSTSPFPSKELAEATKTLLHSLGTLAQELFSMRSWSDMRQEVMFLTNVNSSSSSTQIYQAVSRIVCGHPEGGGLKIKSLNWYEDNNYKALFGGNGTEEDAETFYDNSTTPYCNDLMKNLESSPLSRIIWKALKPLLVGKILYTPDTPATRQVMAEVNKTFQELAVFHDLEGMWEELSPKIWTFMENSQEMDLVRMLLDSRDNDHFWEQQLDGLDWTAQDIVAFLAKHPEDVQSSNGSVYTWREAFNETNQAIRTISRFMECVNLNKLEPIATEVWLINKSMELLDERKFWAGIVFTGITPGSIELPHHVKYKIRMDIDNVERTNKIKDGYWDPGPRADPFEDMRYVWGGFAYLQDVVEQAIIRVLTGTEKKTGVYMQQMPYPCYVDDIFLRVMSRSMPLFMTLAWIYSVAVIIKGIVYEKEARLKETMRIMGLDNSILWFSWFISSLIPLLVSAGLLVVILKLGNLLPYSDPSVVFVFLSVFAVVTILQCFLISTLFSRANLAAACGGIIYFTLYLPYVLCVAWQDYVGFTLKIFASLLSPVAFGFGCEYFALFEEQGIGVQWDNLFESPVEEDGFNLTTSVSMMLFDTFLYGVMTWYIEAVFPGQYGIPRPWYFPCTKSYWFGEESDEKSHPGSNQKRISEICMEEEPTHLKLGVSIQNLVKVYRDGMKVAVDGLALNFYEGQITSFLGHNGAGKTTTMSILTGLFPPTSGTAYILGKDIRSEMSTIRQNLGVCPQHNVLFDMLTVEEHIWFYARLKGLSEKHVKAEMEQMALDVGLPSSKLKSKTSQLSGGMQRKLSVALAFVGGSKVVILDEPTAGVDPYSRRGIWELLLKYRQGRTIILSTHHMDEADVLGDRIAIISHGKLCCVGSSLFLKNQLGTGYYLTLVKKDVESSLSSCRNSSSTVSYLKKEDSVSQSSSDAGLGSDHESDTLTIDVSAISNLIRKHVSEARLVEDIGHELTYVLPYEAAKEGAFVELFHEIDDRLSDLGISSYGISETTLEEIFLKVAEESGVDAETSDGTLPARRNRRAFGDKQSCLRPFTEDDAADPNDSDIDPESRETDLLSGMDGKGSYQVKGWKLTQQQFVALLWKRLLIARRSRKGFFAQIVLPAVFVCIALVFSLIVPPFGKYPSLELQPWMYNEQYTFVSNDAPEDTGTLELLNALTKDPGFGTRCMEGNPIPDTPCQAGEEEWTTAPVPQTIMDLFQNGNWTMQNPSPACQCSSDKIKKMLPVCPPGAGGLPPPQRKQNTADILQDLTGRNISDYLVKTYVQIIAKSLKNKIWVNEFRYGGFSLGVSNTQALPPSQEVNDAIKQMKKHLKLAKDSSADRFLNSLGRFMTGLDTKNNVKVWFNNKGWHAISSFLNVINNAILRANLQKGENPSHYGITAFNHPLNLTKQQLSEVALMTTSVDVLVSICVIFAMSFVPASFVVFLIQERVSKAKHLQFISGVKPVIYWLSNFVWDMCNYVVPATLVIIIFICFQQKSYVSSTNLPVLALLLLLYGWSITPLMYPASFVFKIPSTAYVVLTSVNLFIGINGSVATFVLELFTDNKLNNINDILKSVFLIFPHFCLGRGLIDMVKNQAMADALERFGENRFVSPLSWDLVGRNLFAMAVEGVVFFLITVLIQYRFFIRPRPVNAKLSPLNDEDEDVRRERQRILDGGGQNDILEIKELTKIYRRKRKPAVDRICVGIPPGECFGLLGVNGAGKSSTFKMLTGDTTVTRGDAFLNKNSILSNIHEVHQNMGYCPQFDAITELLTGREHVEFFALLRGVPEKEVGKVGEWAIRKLGLVKYGEKYAGNYSGGNKRKLSTAMALIGGPPVVFLDEPTTGMDPKARRFLWNCALSVVKEGRSVVLTSHSMEECEALCTRMAIMVNGRFRCLGSVQHLKNRFGDGYTIVVRIAGSNPDLKPVQDFFGLAFPGSVLKEKHRNMLQYQLPSSLSSLARIFSILSQSKKRLHIEDYSVSQTTLDQVFVNFAKDQSDDDHLKDLSLHKNQTVVDVAVLTSFLQDEKVKESYV

SEQ ID NO: 66493 - protein, 11 aa, Homo sapiens
LGWCFMVFVDM

SEQ ID NO: 66494 - protein, 661 aa, Homo sapiens
VDSMDRGTLPLAVALLLASCSLSPTSLAETVHCDLQPVGPERGEVTYTTSQVSKGCVAQAPNAILEVHVLFLEFPTGPSQLELTLQASKQNGTWPREVLLVLSVNSSVFLHLQALGIPLHLAYNSSLVTFQEPPGVNTTELPSFPKTQILEWAAERGPITSAAELNDPQSILLRLGQAQGSLSFCMLEASQDMGRTLEWRPRTPALVRGCHLEGVAGHKEAHILRVLPGHSAGPRTVTVKVELSCAPGDLDAVLILQGPPYVSWLIDANHNMQIWTTGEYSFKIFPEKNIRGFKLPDTPQGLLGEARMLNASIVASFVELPLASIVSLHASSCGGRLQTSPAPIQTTPPKDTCSPELLMSLIQTKCADDAMTLVLKKELVAHLKCTITGLTFWDPSCEAEDRGDKFVLRSAYSSCGMQVSASMISNEAVVNILSSSSPQRKKVHCLNMDSLSFQLGLYLSPHFLQASNTIEPGQQSFVQVRVSPSVSEFLLQLDSCHLDLGPEGGTVELIQGRAAKGNCVSLLSPSPEGDPRFSFLLHFYTVPIPKTGTLSCTVALRPKTGSQDQEVHRTVFMRLNIISPDLSGCTSKGLVLPAVLGITFGAFLIGALLTAALWYIYSHTRSPSKREPVVAVAAPASSESSSTNHSIGSTQSTPCSTSSMA

SEQ ID NO: 66495 - protein, 950 aa, Homo sapiens
LSSKMKRLTCFFICFFLSEVSGFEIPINGLSEFVDYEDLVELAPGKFQLVAENRRYQRSLPGESEEMMEEVDQVTLYSYKVQSTITSRMATTMIQSKVVNNSPQPQNVVFDVQIPKGAFISNFSMTVDGKTFRSSIKEKTVGRALYAQARAKGKTAGLVRSSALDMENFRTEVNVLPGAKVQFELHYQEVKWRKLGSYEHRIYLQPGRLAKHLEVDVWVIEPQGLRFLHVPDTFEGHFDGVPVISKGQQKAHVSFKPTVAQQRICPNCRETAVDGELVVLYDVKREEKAGELEVFNGYFVHFFAPDNLDPIPKNILFVIDVSGSMWGVKMKQTVEAMKTILDDLRAEDHFSVIDFNQNIRTWRNDLISATKTQVADAKRYIEKIQPSGGTNINEALLRAIFILNEANNLGLLDPNSVSLIILVSDGDPTVGELKLSKIQKNVKENIQDNISLFSLGMGFDVDYDFLKRLSNENHGIAQRIYGNQDTSSQLKKFYNQVSTPLLRNVQFNYPHTSVTDVTQNNFHNYFGGSEIVVAGKFDPAKLDQIESVITATSANTQLVLETLAQMDDLQDFLSKDKHADPDFTRKLWAYLTINQLLAERSLAPTAAAKRRITRSILQMSLDHHIVTPLTSLVIENEAGDERMLADAPPQDPSCCSGALYYGSKVVPDSTPSWANPSPTPVISMLAQGSQVLESTPPPHVMRVENDPHFIIYLPKSQKNICFNIDSEPGKILNLVSDPESGIVVNGQLVGAKKPNNGKLSTYFGKLGFYFQSEDIKIEISTETITLSHGSSTFSLSWSDTAQVTNQRVQISVKKEKVVTITLDKEMSFSVLLHRVWKKHPVNVDFLGIYIPPTNKFSPKAHGLIGQFMQEPKIHIFNERPGKDPEKPEASMEVKGQKLIITRGLQKDYRTDLVFGTDVTCWFVHNSGKGFIDGHYKDYFVPQLYSFLKRP

SEQ ID NO: 66496 - protein, 539 aa, Homo sapiens; identical to SEQ ID NO: 29852

SEQ ID NO: 66497 - protein, 535 aa, Homo sapiens; identical to SEQ ID NO: 64505

SEQ ID NO: 66498 - protein, 10 aa, Homo sapiens
KKMVGLFFLW

SEQ ID NO: 66499 - protein, 735 aa, Homo sapiens
LGCWTQLGLTFLQLLLISSLPREYTVINEACPGAEWNIMCRECCEYDQIECVCPGKREVVGYTIPCCRNEENECDSCLIHPGCTIFENCKSCRNGSWGGTLDDFYVKGFYCAECRAGWYGGDCMRCGQVLRAPKGQILLESYPLNAHCEWTIHAKPGFVIQLRFVMLSLEFDYMCQYDYVEVRDGDNRDGQIIKRVCGNERPAPIQSIGSSLHVLFHSDGSKNFDGFHAIYEEITACSSSPCFHDGTCVLDKAGSYKCACLAGYTGQRCENLLEAGKSKIKASEDSLSVLEERNCSDPGGPVNGYQKITGGPGLINGRHAKIGTVVSFFCNNSYVLSGNEKRTCQQNGEWSGKQPICIKACREPKISDLVRRRVLPMQVQSRETPLHQLYSAAFSKQKLQSAPTKKPALPFGDLPMGYQHLHTQLQYECISPFYRRLGSSRRTCLRTGKWSGRAPSCIPICGKIENITAPKTQGLRWPWQAAIYRRTSGVHDGSLHKGAWFLVCSGALVNERTVVVAAHCVTDLGKVTMIKTADLKVVLGKFYRDDDRDEKTIQSLQISAIILHPNYDPILLDADIAILKLLDKARISTRVQPICLAASRDLSTSFQESHITVAGWNVLADVRSPGFKNDTLRSGVVSVVDSLLCEEQHEDHGIPVSVTDNMFCASWEPTAPSDICTAETGGIAAVSFPGRASPEPRWHLMGLVSWSYDKTCSHRLSTAFTKVLPFKDWIERNMK

SEQ ID NO: 66500 - protein, 25 aa, Homo sapiens
VELQRLLVFQVFLFIQLDTMMHRSS

SEQ ID NO: 66501 - protein, 287 aa, Homo sapiens
LPFLLCAVLLSAVQAQAGWLQHDFGHLSVFSTSKWNHLLHHFVIGHLKGAPASWWNHMHFQHHAKPNCFRKDPDINMHPFFFALGKILSVELGKQKKKYMPYNHQHKYFFLIGPPALLPLYFQWYIFYFVIQRKKWVDLAWMITFYVRFFLTYVPLLGLKAFLGLFFIVRFLESNWFVWVTQMNHIPMHIDHDRNMDWVSTQLQATCNVHKSAFNDWFSGHLNFQIEHHLFPTMPRHNYHKVAPLVQSLCAKHGIEYQSKPLLSAFADIIHSLKESGQLWLDAYLHQ

SEQ ID NO: 66502 - protein, 438 aa, Homo sapiens
VAAMLLPWATSAPGLAWGPLVLGLFGLLAASQPQAVPPYASENQTCRDQEKEYYEPQHRICCSRCPPGTYVSAKCSRIRDTVCATCAENSYNEHWNYLTICQLCRPCDPVMGLEEIAPCTSKRKTQCRCQPGMFCAAWALECTHCELLSDCPPGTEAELKDEVGKGNNHCVPCKAGHFQNTSSPSARCQPHTRCENQGLVEAAPGTAQSDTTCKNPLEPLPPEMSGTMLMLAVLLPLAFFLLLATVFSCIWKSHPSLCRKLGSLLKRRPQGEGPNPVAGSWEPPKAHPYFPDLVQPLLPISGDVSPVSTGLPAAPVLEAGVPQQQSPLDLTREPQLEPGEQSQVAHGTNGIHVTGGSMTITGNIYIYNGPVLGGPPGPGDLPATPEPPYPIPEEGDPGPPGLSTPHQEDGKAWHLAETEHCGATPSNRGPRNQFITHD

SEQ ID NO: 66503 - protein, 17 aa, Homo sapiens
IWSLISFRLACCLPWAP

SEQ ID NO: 66504 - protein, 31 aa, Homo sapiens
LLSGLPLSWSSIPRALALSLLGELLNVYSKA

SEQ ID NO: 66505 - protein, 182 aa, Homo sapiens
LHIFLLICGLRQVKDPLYLVDAFSAWHQEEPNVHLVIVGPEVDPVFTREVKAKVKRAAGVRLIGEMPQEDLHAVVKNCFAVVNSSVSEGMSAAILEAMDLEVPVLARNIPGNAAVVKHEVTGLLFSNPQEFVHLAKRLVSDPALEKEIVVNGREYVRMYHSWQVERDTYQQLIRKLEGSTED

SEQ ID NO: 66506 - protein, 304 aa, Homo sapiens
ILLPTTVPPATMRIWLLGGLLPFLLLLSGLQRPTEGSEVAIKIDFDFAPGSFDDQYQGCSKQVMEKLTQGDYFTKDIEAQKNYFRMWQKAHLAWLNQGKVLPQNMTTTHAVAILFYTLNSNVHSDFTRAMASVARTPQQYERSFHFKYLHYYLTSAIQLLRKDSIMENGTLCYEVHYRTKDVHFNAYTGATIRFGQFLSTSLLKEEAQEFGNQTLFTIFTCLGAPVQYFSLKKEVLIPPYELFKVINMSYHPRGDWLQLRSTGNLSTYNCQLLKASSKKCIPDPIAIASLSFLTSVIIFSKSRV

SEQ ID NO: 66507 - protein, 44 aa, Homo sapiens
MPSTWSLMSFCCLSLFQYCLLGGGAKAQKYKFTTTHGFIFRDIT

SEQ ID NO: 66508 - protein, 85 aa, Homo sapiens
KMKGWGWLALLLGALLGTAWARRSQDLHCGACRALVDELEWEIAQVDPKKTIQMGSFRINPDGSQSVVEVTVTVPPNKVAHSGFG

SEQ ID NO: 66509 - protein, 183 aa, Homo sapiens
KMKGWGWLALLLGALLGTAWARRSQDLHCGACRALVDELEWEIAQVDPKKTIQMGSFRINPDGSQSVVEVPYARSEAHLTELLEEICDRMKEYGEQIDPSTHRKNYVRVVGRNGESSELDLQGIRIDSDISGTLKFACESIVEEYEDELIEFFSREADNVKDKLCSKRTDLCDHALHISHDEL

SEQ ID NO: 66510 - protein, 445 aa, Homo sapiens
IMVSQALRLLCLLLGLQGCLAAVFVTQEEAHGVLHRRRRANAFLEELRPGSLERECKEEQCSFEEAREIFKDAERTKLFWISYSDGDQCASSPCQNGGSCKDQLQSYICFCLPAFEGRNCETHKDDQLICVNENGGCEQYCSDHTGTKRSCRCHEGYSLLADGVSCTPTVEYPCGKIPILEKRNASKPQGRIVGGKVCPKGECPWQVLLLVNGAQLCGGTLINTIWVVSAAHCFDKIKNWRNLIAVLGEHDLSEHDGDEQSRRVAQVIIPSTYVPGTTNHDIALLRLHQPVVLTDHVVPLCLPERTFSERTLAFVRFSLVSGWGQLLDRGATALELMVLNVPRLMTQDCLQQSRKVGDSPNITEYMFCAGYSDGSKDSCKGDSGGPHATHYRGTWYLTGIVSWGQGCATVGHFGVYTRVSQYIEWLQKLMRSEPRPGVLLRAPFP

SEQ ID NO: 66511 - protein, 17 aa, Homo sapiens
LPTRLPSGLLIVDILLA

SEQ ID NO: 66512 - protein, 14 aa, Homo sapiens
LAGLFGFLLGWRRR

SEQ ID NO: 66513 - protein, 56 aa, Homo sapiens
RPWTASTTPSALFAALVGELCVARLSTVSMALCTVRKIICFQGFRRQLRNAVSVVT

SEQ ID NO: 66514 - protein, 486 aa, Homo sapiens
IKRILTVTILALCLPSPGNAQAQCTNGFDLDRQSGQCLDGVSLSSPRLECNGAISAHCNLCLPGSSDSSASASQVAGITDIDECRTIPEACRGDMMCVNQNGGYLCIPRTNPVYRGPYSNPYSTPYSGPYPAAAPPLSAPNYPTISRPLICRFGYQMDESNQCVDVDECATDSHQCNPTQICINTEGGYTCSCTDGYWLLEGQCLDIDECRYGYCQQLCANVPGSYSCTCNPGFTLNEDGRSCQDVNECATENPCVQTCVNTYGSFICRCDPGYELEEDGVHCSDMDECSFSEFLCQHECVNQPGTYFCSCPPGYILLDDNRSCQDINECEHRNHTCNLQQTCYNLQGGFKCIDPIRCEEPYLRISDNRCMCPAENPGCRDQPFTILYRDMDVVSGRSVPADIFQMQATTRYPGAYYIFQIKSGNEGREFYMRQTGPISATLVMTRPIKGPREIQLDLEMITVNTVINFRGSSVIRLRIYVSQYPF

SEQ ID NO: 66515 - protein, 451 aa, Homo sapiens
LASAADHMKVVPSLLLSVLLAQVWLVPGLAPSPQSPETPAPQNQTSRVVQAPKEEEEDEQEASEEKASEEEKAWLMASRQQLAKETSNFGFSLLRKISMRHDGNMVFSPFGMSLAMTGLMLGATGPTETQIKRGLHLQALKPTKPGLLPSLFKGLRETLSRNLELGLTQGSFAFIHKDFDVKETFFNLSKRYFDTECVPMNFRNASQAKRLMNHYINKETRGKIPKLFDEINPETKLILVDYILFKGKWLTPFDPVFTEVDTFHLDKYKTIKVPMMYGAGKFASTFDKNFRCHVLKLPYQGNATMLVVLMEKMGDHLALEDYLTTDLVETWLRNMKTRNMEVFFPKFKLDQKYEMHELLRQMGIRRIFSPFADLSELSATGRNLQVSRVLQRTVIEVDERGTEAVAGILSEITAYSMPPVIKVDRPFHFMIYEETSGMLLFLGRVVNPTLL

SEQ ID NO: 66516 - protein, 16 aa, Homo sapiens
IKVLFFAVIWYNLPQK

SEQ ID NO: 66517 - protein, 425 aa, Homo sapiens
LHLLWWALLLGLAQACPEPCDCGEKYGFQIADCAYRDLESVPPGFPANVTTLSLSANRLPGLPEGAFREVPLLQSLWLAHNEIRTVAAGALASLSHLKSLDLSHNLISDFAWSDLHNLSALQLLKMDSNELTFIPRDAFRSLRALRSLQLNHNRLHTLAEGTFTPLTALSHLQINENPFDCTCGIVWLKTWALTTAVSIPEQDNIACTSPHVLKGTPLSRLPPLPCSAPSVQLSYQPSQDGAELRPGFVLALHCDVDGQPAPQLHWHIQIPSGIVEITSPNVGTDGRALPGTPVASSQPRFQAFANGSLLIPDFGKLEEGTYSCLATNELGSAESSVDVALATPGEGGEDTLGRRFHGKAVEGKGCYTVDNEVQPSGPEDNVVIIYLSRAGNPEAAVAEGVPGQLPPGLLLLGQSLLLFFFLTSF

SEQ ID NO: 66518 - protein, 18 aa, Homo sapiens
LLLLPRLLLLLHLQIGSR

SEQ ID NO: 66519 - protein, 25 aa, Homo sapiens
MVAAGCVVFLASLWMLTETREFLLK

SEQ ID NO: 66520 - protein, 41 aa, Homo sapiens
LACFVFLCLFLVVMIIRCAKVIMDPYSAIPTSTWEEQHLDD

SEQ ID NO: 66521 - protein, 239 aa, Homo sapiens
RGLRALCRVLLFLSQFCILSGGEQSQALAQSIKDPGPTRTFTVVPRAAESTEIPPYVMKCPSNGLCSRLPADCIDCTTNFSCTYGKPVTFDCAVKPSVTCVDQDFKSQKNFIINMTCRFCWQLPETDYECTNSTSCMTVSCPRQRYPANCTVRDHVHCLGNRTFPKMLYCNWTGGYKWSTALALSITLGGFGADRFYLGQWREGLGKLFSFGGLGIWTLIDVLLIGVGYVGPADGSLYI

SEQ ID NO: 66522 - protein, 97 aa, Homo sapiens
IYATRSGGTLVLVGLGSEMTTVPLLHAAIREVDIKGVFRYCNTWPVAISMLASKSVNVKPLVTHRFPLEKALEAFETFKKGLGLKIMLKCDPSDQNP

SEQ ID NO: 66523 - protein, 8 aa, Homo sapiens
MTFWLWMI

SEQ ID NO: 66524 - protein, 41 aa, Homo sapiens
KLGMTVLVSALWSISRRSLAAELSQWKLVRGTQMRNGPRPS

SEQ ID NO: 66525 - protein, 1169 aa, Homo sapiens
KDSCITVMAMALLSGFFFFAPASSYNLDVRGARSFSPPRAGRHFGYRVLQVGNGVIVGAPGEGNSTGSLYQCQSGTGHCLPVTLRGSNYTSKYLGMTLATDPTDGSILACDPGLSRTCDQNTYLSGLCYLFRQNLQGPMLQGRPGFQECIKGNVDLVFLFDGSMSLQPDEFQKILDFMKDVMKKLSNTSYQFAAVQFSTSYKTEFDFSDYVKRKDPDALLKHVKHMLLLTNTFGAINYVATEVFREELGARPDATKVLIIITDGEATDSGNIDAAKDIIRYIIGIGKHFQTKESQETLHKFASKPASEFVKILDTFEKLKDLFTELQKKIYVIEGTSKQDLTSFNMELSSSGISADLSRGHAVVGAVGAKDWAGGFLDLKADLQDDTFIGNEPLTPEVRAGYLGYTVTWLPSRQKTSLLASGAPRYQHMGRVLLFQEPQGGGHWSQVQTIHGTQIGSYFGGELCGVDVDQDGETELLLIGAPLFYGEQRGGRVFIYQRRQLGFEEVSELQGDPGYPLGRFGEAITALTDINGDGLVDVAVGAPLEEQGAVYIFNGRHGGLSPQPSQRIEGTQVLSGIQWFGRSIHGVKDLEGDGLADVAVGAESQMIVLSSRPVVDMVTLMSFSPAEIPVHEVECSYSTSNKMKEGVNITICFQIKSLIPQFQGRLVANLTYTLQLDGHRTRRRGLFPGGRHELRRNIAVTTSMSCTDFSFHFPVCVQDLISPINVSLNFSLWEEEGTPRDQRAQGKDIPPILRPSLHSETWEIPFEKNCGEDKKCEANLRVSFSPARSRALRLTAFASLSVELSLSNLEEDAYWVQLDLHFPPGLSFRKVEMLKPHSQIPVSCEELPEESRLLSRALSCNVSSPIFKAGHSVALQMMFNTLVNSSWGDSVELHANVTCNNEDSDLLEDNSATTIIPILYPINILIQDQEDSTLYVSFTPKGPKIHQVKHMYQVRIQPSIHDHNIPTLEAVVGVPQPPSEGPITHQWSVQMEPPVPCHYEDLERLPDAAEPCLPGALFRCPVVFRQEILVQVIGTLELVGEIEASSMFSLCSSLSISFNSSKHFHLYGSNASLAQVVMKVDVVYEKQMLYLYVLSGIGGLLLLLLIFIVLYKVGFFKRNLKEKMEAGRGVPNGIPAEDSEQLASGQEAGDPGCLKPLHEKDSESGGGKD

SEQ ID NO: 66526 - protein, 27 aa, Homo sapiens
LLFFLFSLRVSFLTPSPFMLAQPSPCC

SEQ ID NO: 66527 - protein, 166 aa, Homo sapiens
LTVALLALLCASASGNAIQARSSSYSGEYGGGGGKRFSHSGNQLDGPITALRVRVNTYYIVGLQVRYGKVWSDYVGGRNGDLEEIFLHPGESVIQVSGKYKWYLKKLVFVTDKGRYLSFGKDSGTSFNAVPLHPNTVLRFISGRSGSLIDAIGLHWDVYPSSCSRC

SEQ ID NO: 66528 - protein, 198 aa, Homo sapiens [sequence omitted]

SEQ ID NO: 66529 - protein, 33 aa, Homo sapiens
LGIVVFALGAVLAIKGYRKVRKLKEKPAEMFEF

SEQ ID NO: 66530 - protein, 48 aa, Homo sapiens
IWHILLAGSAALLLPPPDQPAEPWACSQKFPCHYQICKNDREELYAVT

SEQ ID NO: 66531 - protein, 57 aa, Homo sapiens
LLALWALAAVALPGSGAEGDGGWRPGGPGAVAEEERCTVERRADLTYAEFVQQYVRP

SEQ ID NO: 66532 - protein, 229 aa, Homo sapiens
LQTNLILFCVGAVGACTLSVTQPWYLEVDYTHEAVTIKCTFSATGCPSEQPTCLWFRYGAHQPENLCLDGCKSEADKFTVREALKENQVSLTVNRVTSNDSAIYICGIAFPSVPEARAKQTGGGTTLVVREIKLLSKELRSFLTALVSLLSVYVTGVCVAFILLSKSKSNPLRNKEIKEDSQKKKSARRIFQEIAQELYHKRHVETNQQSEKDNNTYENRRVLSNYERP

SEQ ID NO: 66533 - protein, 598 aa, Homo sapiens
LALALLLLSWVALGPRSLEGADPGTPGEAEGPACPAACVCSYDDDADELSVFCSSRNLTRLPDGVPGGTQALWLDGNNLSSVPPAAFQNLSSLGFLNLQGGQLGSLEPQALLGLENLCHLHLERNQLRSLALGTFAHTPALASLGLSNNRLSRLEDGLFEGLGSLWDLNLGWNSLAVLPDAAFRGLGSLRELVLAGNRLAYLQPALFSGLAELRELDLSRNALRAIKANVFVQLPRLQKLYLDRNLIAAVAPGAFLGLKALRWLDLSHNRVAGLLEDTFPGLLGLRVLRLSHNAIASLRPRTFKDLHFLEELQLGHNRIRQLAERSFEGLGQLEVLTLDHNQLQEVKAGAFLGLTNVAVMNLSGNCLRNLPEQVFRGLGKLHSLHLEGSCLGRIRPHTFTGLSGLRRLFLKDNGLVGIEEQSLWGLAELLELDLTSNQLTHLPHRLFQGLGKLEYLLLSRNRLAELPADALGPLQRAFWLDVSHNRLEALPNSLLAPLGRLRYLSLRNNSLRTFTPQPPGLERLWLEGNPWDCGCPLKALRDFALQNPSAVPRFVQAICEGDDCQPPAYTYNNITCASPPEVVGLDLRDLSEAHFAPC

SEQ ID NO: 66534 - protein, 31 aa, Homo sapiens
LSGAALAAVAAAGALWSLPRALPLEAAAAVL

SEQ ID NO: 66535 - protein, 11 aa, Homo sapiens
VAILVFAWAVP

SEQ ID NO: 66536 - protein, 91 aa, Homo sapiens
KLCVTVLSLLVLVAAFCSLALSAPMGSDPPTACCFSYTARKLPRNFVVDYYETSSLCSQPAVVFQTKRGKQVCADPSESWVQEYVYDLELN

SEQ ID NO: 66537 - protein, 14 aa, Homo sapiens
VMTCFLLALRIISI

SEQ ID NO: 66538 - protein, 220 aa, Homo sapiens
IILSLFSVLVTGMGEGGAGSEKGGERECKLNQLPHCPSVSPSAQPWTHPGQSQLFADLSREELTAVMRFLTQQLGPGLVDAAQAQPSDNCVFSVELQLPPKAAALAHLDRGSPPPAREALAIVFFGRQPQPNVSELVVGPLPHPSYMRDVTVERHGGPLPYHRRPMLFQEYLDIDQMIFDRELPQASGLLHHCCFYKRRGRNLVTMTTAPRGLQSGDRAT

SEQ ID NO: 66539 - protein, 105 aa, Homo sapiens
LTLEPTFRHLLRIMQVSTAALAVLLCTMALCNQFSASLAADTPTACCFSYTSRQIPQNFIADYFETSSQCSKPGVIFLTKRSRQVCADPSEEWVQKYVSDLELSA

SEQ ID NO: 66540 - protein, 213 aa, Homo sapiens
LRLALGLLLLATLLRPADACSCSPVHPQQAFCNADVVIRAKAVSEKEVDSGNDIYGNPIKRIQYEIKQIKMFKGPEKDIEFIYTAPSSAVCGVSLDVGGKKEYLIAGKAEGDGKMHITLCDFIVPWDTLSTTQKKSLNHRYQMGCECKITRCPMIPCYISSPDECLWMDWVTEKNINGHQAKFFACIKRSDGSCAWYRGAAPPKQEFLDIEDP

SEQ ID NO: 66541 - protein, 14 aa, Homo sapiens
LVLTVFLECFLLFS

SEQ ID NO: 66542 - protein, 496 aa, Homo sapiens
LLAVLLLLLERGMFSSPSPPPALLEKVFQYIDLHQDEFVQTLKEWVAIESDSVQPVPRFRQELFRMMAVAADTLQRLGARVASVDMGPQQLPDGQSLPIPPVILAELGSDPTKGTVCFYGHLDVQPADRGDGWLTDPYVLTEVDGKLYGRGATDNKGPVLAWINAVSAFRALEQDLPVNIKFIIEGMEEAGSVALEELVEKEKDRFFSGVDYIVISDNLWISQRKPAITYGTRGNSYFMVEVKCRDQDFHSGTFGGILHEPMADLVALLGSLVDSSGHILVPGIYDEVVPLTEEEINTYKAIHLDLEEYRNSSRVEKFLFDTKEEILMHLWRYPSLSIHGIEGAFDEPGTKTVIPGRVIGKFSIRLVPHMNVSAVEKQVTRHLEDVFSKRNSSNKMVVSMTLGLHPWIANIDDTQYLAAKRAIRTVFGTEPDMIRDGSTIPIAKMFQEIVHKSVVLIPLGAVDDGEHSQNEKINRWNYIEGTKLFAAFFLEMAQLH

SEQ ID NO: 66543 - protein, 372 aa, Homo sapiens
LGFSVAYAFYYLSSIAKKPQLVTGGESFSRFLQDHCPVVTETYYPTVWCWEGRGQTLLRPFITSKPPVQYRNELIKTADGGQISLDWFDNDNSTCYMDASTRPTILLLPGLTGTSKESYILHMIHLSEELGYRCVVFNNRGVAGENLLTPRTYCCANTEDLETVIHHVHSLYPSAPFLAAGVSMGGMLLLNYLGKIGSKTPLMAAATFSVGWNTFACSESLEKPLNWLLFNYYLTTCLQSSVNKHRHMFVKQVDMDHVMKAKSIREFDKRFTSVMFGYQTIDDYYTDASPSPRLKSVGIPVLCLNSVDDVFSPSHAIPIETAKQNPNVALVLTSYGGHIGFLEGIWPRQSTYMDRVFKQFVQAMVEHGHELS

SEQ ID NO: 66544 - protein, 29 aa, Homo sapiens
IFLVFLNGLAQLLTTKKLRLCGKPKSHFM

SEQ ID NO: 66545 - protein, 38 aa, Homo sapiens
MILIYLFLFLPTLETKQKELSFLRSNFSSVPFYSSTLF

SEQ ID NO: 66546 - protein, 12 aa, Homo sapiens
MMTWSIWNVLML

SEQ ID NO: 66547 - protein, 15 aa, Homo sapiens
LCRILAVFLAEYLGL

SEQ ID NO: 66548 - protein, 197 aa, Homo sapiens
LWVSVLAGLLLGACQAHPIPDSSPLLQFGGQVRQRYLYTDDAQQTEAHLEIREDGTVGGAADQSPESLLQLKALKPGVIQILGVKTSRFLCQRPDGALYGSLHFDPEACSFRELLLEDGYNVYQSEAHGLPLHLPGNKSPHRDPAPRGPARFLPLPGLPPALPEPPGILAPQPPDVGSSDPLSMVGPSQGRSPSYAS

SEQ ID NO: 66549 - protein, 277 aa, Homo sapiens
LAVITTLPSVVRLLVTAGASPMALDRHGQTAAHLACEHRSPTCLRALLDSAAPGTLDLEARNYDGLTALHVAVNTECQETVQLLLERGADIDAVDIKSGRSPLIHAVENNSLSMVQLLLQHGANVNAQMYSGSSALHSASGRGLLPLVRTLVRSGADSSLKNCHNDTPLMVARSRRVIDILRGKATRPASTSQPDPSPDRSANTSPESSSRLSSNGLLSASPSSSPSQSPPRDPPGFPMAPPNFFLPSPSPPAFLPFAGVLRGPGRPVPPSPAPGGS

SEQ ID NO: 66550 - protein, 599 aa, Homo sapiens
LSPVGADAMTLTLSVLICLGLSVGPRTCVQAGTLPKPTLWAEPASVIARGKPVTLWCQGPLETEEYRLDKEGLPWARKRQNPLEPGAKAKFHIPSTVYDSAGRYRCYYETPAGWSEPSDPLELVATGFYAEPTLLALPSPVVASGGNVTLQCDTLDGLLTFVLVEEEQKLPRTLYSQKLPKGPSQALFPVGPVTPSCRWRFRCYYYYRKNPQVWSNPSDLLEILVPGVSRKPSLLIPQGSVVARGGSLTLQCRSDVGYDIFVLYKEGEHDLVQGSGQQPQAGLSQANFTLGPVSRSHGGQYRCYGAHNLSPRWSAPSDPLDILIAGLIPDIPALSVQPGPKVASGENVTLLCQSWHQIDTFFLTKEGAAHPPLCLKSKYQSYRHQAEFSMSPVTSAQGGTYRCYSAIRSYPYLLSSPSYPQELVVSGPSGDPSLSPTGSTPTPAGPEDQPLTPTGLDPQSGLGRHLGVVTGVSVAFVLLLFLLLFLLLRHRHQSKHRTSAHFYRPAGAAGPEPKDQGLQKRASPVADIQEEILNAAVKDTQPKDGVEMDAPAAASEAPQDVTYAQLHSLTLRREATEPPPSQEREPPAEPSIYAPLAIH

SEQ ID NO: 66551 - protein, 129 aa, Homo sapiens
VGVVCTLLVALLMAALYLVRIRQKKAQGSTSSTRLHEPEKNAREITQDTNDITYADLNLPKGKKPAPQAAEPNNHTEYASIQTSPQPASEDTLTYADLDMVHLNRTPKQPAPKPEPSFSEYASVQVPRK

SEQ ID NO: 66552 - protein, 13 aa, Homo sapiens
IVLIVVLVGVKSR

SEQ ID NO: 66553 - protein, 16 aa, Homo sapiens
IHSFLSAKVTRLGLLA

SEQ ID NO: 66554 - protein, 28 aa, Homo sapiens
LYCVAGFCHLTFLPARVLSSCCCLYLNE

SEQ ID NO: 66555 - protein, 648 aa, Homo sapiens
ISAAWSIFLIGTKIGLFLQVAPLSVMAKSCPSVCRCDAGFIYCNDRFLTSIPTGIPEDATTLYLQNNQINNAGIPSDLKNLLKVERIYLYHNSLDEFPTNLPKYVKELHLQENNIRTITYDSLSKIPYLEELHLDDNSVSAVSIEEGAFRDSNYLRLLFLSRNHLSTIPWGLPRTIEELRLDDNRISTISSPSLQGLTSLKRLVLDGNLLNNHGLGDKVFFNLVNLTELSLVRNSLTAAPVNLPGTNLRKLYLQDNHINRVPPNAFSYLRQLYRLDMSNNNLSNLPQGIFDDLDNITQLILRNNPWYCGCKMKWVRDWLQSLPVKVNVRGLMCQAPEKVRGMAIKDLNAELFDCKDSGIVSTIQITTAIPNTVYPAQGQWPAPVTKQPDIKNPKLTKDHQTTGSPSRKTITITVKSVTSDTIHISWKLALPMTALRLSWLKLGHSPAFGSITETIVTGERSEYLVTALEPDSPYKVCMVPMETSNLYLFDETPVCIETETAPLRMYNPTTTLNREQEKEPYKNPNLPLAAIIGGAVALVTIALLALVCWYVHRNGSLFSRNCAYSKGRRRKDDYAEAGTKKDNSILEIRETSFQMLPISNEPISKEEFVIHTIFPPNGMNLYKNNHSESSSNRSYRDSGIPDSDHSHS

SEQ ID NO: 66556 - protein, 472 aa, Homo sapiens
VMAREMTILGSAVLTLLLAGYLAQQYLPLPTPKVIGIDLGTTYCSVGVFFPGTGKVKVIPDENGHISIPSMVSFTDNDVYVGYESVELADSNPQNTIYDAKRFIGKIFTAEELEAEIGRYPFKVLNKNGMVEFSVTSNETITVSPEYVGSRLLLKLKEMAEAYLGMPVANAVISVPAEFDLKQRNSTIEAANLAGLKILRVINEPTAAAMAYGLHKADVFHVLVIDLGGGTLDVSLLNKQGGMFLTRAMSGNNKLGGQDFNQRLLQYLYKQIYQTYGFVPSRKEEIHRLRQAVEMVKLNLTLHQSAQLSVLLTVEEQDRKEPHSSDTELPKDKLSSADDHRVNSGFGRGLSDKKSGESQVLFETEISRKLFDTLNEDLFQKILVPIQQVLKEGHLEKTEIDEVVLVGGSTRIPRIRQVIQEFFGKDPNTSVDPDLAVVTGVAIQAGIDGGSWPLQVSALEIPNKHLQKTNFN

SEQ ID NO: 66557 - protein, 131 aa, Homo sapiens
IGWRLFLLLWHPALGAQARPPRRAPGGRWRSRRVFLLVRRTRAAAYAFAIRRGVVRVVGGGGQLLRPAPGEAAAAAAAGFGAAGEAGVAGAGLEAWRHPSGPARTQLGGQEGAGGWLVVGFLLCLFLLMPP

SEQ ID NO: 66558 - protein, 16 aa, Homo sapiens
LEMKRPWLHMGLFLGT

SEQ ID NO: 66559 - protein, 47 aa, Homo sapiens
MVQRMVLLQGSALATLGLTASTTLTQLTMLLQHHLQLQGHQLKMTVT

SEQ ID NO: 66560 - protein, 12 aa, Homo sapiens
IIYNATLLFLVS

SEQ ID NO: 66561 - protein, 16 aa, Homo sapiens
MCSFLKKVRFPWILAL

SEQ ID NO: 66562 - protein, 684 aa, Homo sapiens
IHPAPASGDPMARAHWGCCPWLVLLCACAWGHTKPVDLGGQDVRNCSTNPPYLPVTVVNTTMSLTALRQQMQTQNLSAYIIPGTDAHMNEYIGQHDERRAWITGFTGSAGTAVVTMKKAAVWTDSRYWTQAERQMDCNWELHKEVGTTPIVTWLLTEIPAGGRVGFDPFLLSIDTWESYDLALQGSNRQLVSITTNLVDLVWGSERPPVPNQPIYALQEAFTGSTWQEKVSGVRSQMQKHQKVPTAVLLSALEETAWLFNLRASDIPYNPFFYSYTLLTDSSIRLFANKSRFSSETLSYLNSSCTGPMCVQIEDYSQVRDSIQAYSLGDVRIWIGTSYTMYGIYEMIPKEKLVTDTYSPVMMTKAVKNSKEQALLKASHVRDAVAVIRYLVWLEKNVPKGTVDEFSGAEIVDKFRGEEQFSSGPSFETISASGLNAALAHYSPTKELNRKLSSDEMYLLDSGGQYWDGTTDITRTVHWGTPSAFQKEAYTRVLIGNIDLSRLIFPAATSGRMVEAFARRALWDAGLNYGHGTGHGIGNFLCVHEWPVGFQSNNIAMAKGMFTSIEPGYYKDGEFGIRLEDVALVVEAKTKYPGSYLTFEVVSFVPYDRNLIDVSLLSPEHLQYLNRYYQTIREKVGPELQRRQLLEEFEWLQQHTEPLAARAPDTASWASVLVVSTLAILGWSV

SEQ ID NO: 66563 - protein, 469 aa, Homo sapiens
KRPLAMGSPAHRPALLLLLPPLLLLLLLRVPPSRSFPGSGDSPLEDDEVGYSHPRYKDTPWCSPIKVKYGDVYCRAPQGGYYKTALGTRCDIRCQKGYELHGSSLLICQSNKRWSDKVICKQKRCPTLAMPANGGFKCVDGAYFNSRCEYYCSPGYTLKGERTVTCMDNKAWSGRPASCVDMEPPRIKCPSVKERIAEPNKLTVRVSWETPEGRDTADGILTDVILKGLPPGSNFPEGDHKIQYTVYDRAENKGTCKFRVKVRVKRCGKLNAPENGYMKCSSDGDNYGATCEFSCIGGYELQGSPARVCQSNLAWSGTEPTCAAMNVNVGVRTAAALLDQFYEKRRLLIVSTPTARNLLYRLQLGMLQQAQCGLDLRHITVVELVGVFPTLIGRIGAKIMPPALALQLRLLLRIPLYSFSMVLVDKHGMDKERYVSLVMPVALFNLIDTFPLRKEEMVLQAEMSQTCNT

SEQ ID NO: 66564 - protein, 9 aa, Homo sapiens
LVALLVWLF

SEQ ID NO: 66565 - protein, 2349 aa, Homo sapiens
IELSTCFFLCLLRFCFSATRRYYLGAVELSWDYMQSDLGELPVDARFPPRVPKSFPFNTSVVYKKTLFVEFTDHLFNIAKPRPPWMGLLGPTIQAEVYDTVVITLKNMASHPVSLHAVGVSYWKASEGAEYDDQTSQREKEDDKVFPGGSHTYVWQVLKENGPMASDPLCLTYSYLSHVDLVKDLNSGLIGALLVCREGSLAKEKTQTLHKFILLFAVFDEGKSWHSETKNSLMQDRDAASARAWPKMHTVNGYVNRSLPGLIGCHRKSVYWHVIGMGTTPEVHSIFLEGHTFLVRNHRQASLEISPITFLTAQTLLMDLGQFLLFCHISSHQHDGMEAYVKVDSCPEEPQLRMKNNEEAEDYDDDLTDSEMDVVRFDDDNSPSFIQIRSVAKKHPKTWVHYIAAEEEDWDYAPLVLAPDDRSYKSQYLNNGPQRIGRKYKKVRFMAYTDETFKTREAIQHESGILGPLLYGEVGDTLLIIFKNQASRPYNIYPHGITDVRPLYSRRLPKGVKHLKDFPILPGEIFKYKWTVTVEDGPTKSDPRCLTRYYSSFVNMERDLASGLIGPLLICYKESVDQRGNQIMSDKRNVILFSVFDENRSWYLTENIQRFLPNPAGVQLEDPEFQASNIMHSINGYVFDSLQLSVCLHEVAYWYILSIGAQTDFLSVFFSGYTFKHKMVYEDTLTLFPFSGETVFMSMENPGLWILGCHNSDFRNRGMTALLKVSSCDKNTGDYYEDSYEDISAYLLSKNNAIEPRSFSQNSRHPSTRQKQFNATTIPENDIEKTDPWFAHRTPMPKIQNVSSSDLLMLLRQSPTPHGLSLSDLQEAKYETFSDDPSPGAIDSNNSLSEMTHFRPQLHHSGDMVFTPESGLQLRLNEKLGTTAATELKKLDFKVSSTSNNLISTIPSDNLAAGTDNTSSLGPPSMPVHYDSQLDTTLFGKKSSPLTESGGPLSLSEENNDSKLLESGLMNSQESSWGKNVSSTESGRLFKGKRAHGPALLTKDNALFKVSISLLKTNKTSNNSATNRKTHIDGPSLLIENSPSVWQNILESDTEFKKVTPLIHDRMLMDKNATALRLNHMSNKTTSSKNMEMVQQKKEGPIPPDAQNPDMSFFKMLFLPESARWIQRTHGKNSLNSGQGPSPKQLVSLGPEKSVEGQNFLSEKNKVVVGKGEFTKDVGLKEMVFPSSRNLFLTNLDNLHENNTHNQEKKIQEEIEKKETLIQENVVLPQIHTVTGTKNFMKNLFLLSTRQNVEGSYDGAYAPVLQDFRSLNDSTNRTKKHTAHFSKKGEEENLEGLGNQTKQIVEKYACTTRISPNTSQQNFVTQRSKRALKQFRLPLEETELEKRIIVDDTSTQWSKNMKHLTPSTLTQIDYNEKEKGAITQSPLSDCLTRSHSIPQANRSPLPIAKVSSFPSIRPIYLTRVLFQDNSSHLPAASYRKKDSGVQESSHFLQGAKKNNLSLAILTLEMTGDQREVGSLGTSATNSVTYKKVENTVLPKPDLPKTSGKVELLPKVHIYQKDLFPTETSNGSPGHLDLVEGSLLQGTEGAIKWNEANRPGKVPFLRVATESSAKTPSKLLDPLAWDNHYGTQIPKEEWKSQEKSPEKTAFKKKDTILSLNACESNHAIAAINEGQNKPEIEVTWAKQGRTERLCSQNPPVLKRHQREITRTTLQSDQEEIDYDDTISVEMKKEDFDIYDEDENQSPRSFQKKTRHYFIAAVERLWDYGMSSSPHVLRNRAQSGSVPQFKKVVFQEFTDGSFTQPLYRGELNEHLGLLGPYIRAEVEDNIMVTFRNQASRPYSFYSSLISYEEDQRQGAEPRKNFVKPNETKTYFWKVQHHMAPTKDEFDCKAWAYFSDVDLEKDVHSGLIGPLLVCHTNTLNPAHGRQVTVQEFALFFTIFDETKSWYFTENMERNCRAPCNIQMEDPTFKENYRFHAINGYIMDTLPGLVMAQDQRIRWYLLSMGSNENIHSIHFSGHVFTVRKKEEYKMALYNLYPGVFETVEMLPSKAGIWRVECLIGEHLHAGMSTLFLVYSNKCQTPLGMASGHIRDFQITASGQYGQWAPKLARLHYSGSINAWSTKEPFSWIKVDLLAPMIIHGIKTQGARQKFSSLYISQFIIMYSLDGKKWQTYRGNSTGTLMVFFGNVDSSGIKHNIFNPPIIARYIRLHPTHYSIRSTLRMELMGCDLNSCSMPLGMESKAISDAQITASSYFTNMFATWSPSKARLHLQGRSNAWRPQVNNPKEWLQVDFQKTMKVTGVTTQGVKSLLTSMYVKEFLISSSQDGHQWTLFFQNGKVKVFQGNQDSFTPVVNSLDPPLLTRYLRIHPQSWVHQIALRMEVLGCEAQDLY

SEQ ID NO: 66566 - protein, 26 aa, Homo sapiens
MGCLLFLLLWALLQAWGSAEDLVLRQ

SEQ ID NO: 66567 - protein, 27 aa, Homo sapiens
MIPAVVLLLLLLVEQADPSAKGSYNQL

SEQ ID NO: 66568 - protein, 456 aa, Homo sapiens
MPEWVFVGLVLLGVFLFFVLVGICWCQCCPHSCCCYVRCPCCPDSCCCPQALYEAGKAAKAGYPPSVSGVPGPYSIPSVPLGGAPSSGMLMDKPHPPPLAPSDSTGGSHSVRKGYRIQADKERDSMKVLYYVEKELAQFDPARRMRGRYNNTISELSSLHEEDSNFRQSFHQMRSKQFPVSGDLESNPDYWSGVMGGSSGASRGPSAMEYNKEDRESFRHSQPRSKSEMLSRKNFATGVPAVSMDELAAFADSYGQRPRRADGNSHEARGGSRFERSESRAHSGFYQDDSLEEYYGQRSRSREPLTDADRGWAFSPARRRPAEDAHLPRLVSRTPGTAPKYDHSYLGSARERQARPEGASRGGSLETPSKRSAQLGPRSASYYAWSPPGTYKAGSSQDDQEDASDDALPPYSELELTRGPSYRGRDLPYHSNSEKKRKKEPAKKTNDFPTRMSLVV

SEQ ID NO: 66569 - protein, 490 aa, Homo sapiens
MPAVQLLLLACLVWDVGARTAQLRKANDQSGRCQYTFSVASPNESSCPEQSQAMSVIHNLQRDSSTQRLDLEATKARLSSLESLLHQLTLDQAARPQETQEGLQRELGTLRRERDQLETQTRELETAYSNLLRDKSVLEEEKKRLRQENENLARRLESSSQEVARLRRGQCPQTRDTARAVPPGSREVSTWNLDTLAFQELKSELTEVPASRILKESPSGYLRSGEGDTGCGELVWVGEPLTLRTAETITGKYGVWMRDPKPTYPYTQETTWRIDTVGTDVRQVFEYDLISQFMQGYPSKVHILPRPLESTGAVVYSGSLYFQGAESRTVIRYELNTETVKAEKEIPGAGYHGQFPYSWGGYTDIDLAVDEAGLWVIYSTDEAKGAIVLSKLNPENLELEQTWETNIRKQSVANAFIICGTLYTVSSYTSADATVNFAYDTGTGISKTLTIPFKNRYKYSSMIDYNPLEKKLFAWDNLNMVTYDIKLSKM

SEQ ID NO: 66570 - protein, 1289 aa, Homo sapiens
MGLLLGSVLLVASAPATLEPPGCSNKEQQVTVSHTYKIDVPKSALVQVDADPQPLSDDGASLLALGEAREEQNIIFRHNIRLQTPQKDCELAGSVQDLLARVKKLEEEMVEMKEQCSAQRCCQGVTDLSRHCSGHGTFSLETCSCHCEEGREGPACERLACPGACSGHGRCVDGRCLCHEPYVGADCGYPACPENCSGHGECVRGVCQCHEDFMSEDCSEKRCPGDCSGHGFCDTGECYCEEGFTGLDCAQVVTPQGLQLLKNTEDSLLVSWEPSSQVDHYLLSYYPLGKELSGKQIQVPKEQHSYEILGLLPGTKYIVTLRNVKNEVSSSPQHLLATTDLAVLGTAWVTDETENSLDVEWENPSTEVDYYKLRYGPMTGQEVAEVTVPKSSDPKSRYDITGLHPGTEYKITVVPMRGELEGKPILLNGRTEIDSPTNVVTDRVTEDTATVSWDPVQAVIDKYVVRYTSADGDTKEMAVHKDESSTVLTGLKPGEAYKVYVWAERGNQGSKKADTNALTEIDSPANLVTDRVTENTATISWDPVQATIDKYVVRYTSADDQETREVLVGKEQSSTVLTGLRPGVEYTVHVWAQKGDRESKKADTNAPTDIDSPKNLVTDRVTENMATVSWDPVQAAIDKYVVRYTSAGGETREVPVGKEQSSTVLTGLRPGMEYMVHVWAQKGDQESKKADTKAQTDIDSPQNLVTDRVTENMATVSWDPVRATIDRYVVRYTSAKDGETREVPVGKEQSSTVLTGLRPGVEYTVHVWAQKGAQESKKADTKAQTDIDSPQNLVTDWVTENTATVSWDPVQATIDRYVVHYTSANGETREVPVGKEQSSTVLTGLRPGMEYTVHVWAQKGNQESKKADTKAQTEIDGPKNLVTDWVTENMATVSWDPVQATIDKYMVRYTSADGETREVPVGKEHSSTVLTGLRPGMEYMVHVWAQKGAQESKKADTKAQTELDPPRNLRPSAVTQSGGILTWTPPSAQIHGYILTYQFPDGTVKEMQLGREDQRFALQGLEQGATYPVSLVAFKGGRRSRNVSTTLSTVGARFPHPSDCSQVQQNSNAASGLYTIYLHGDASRPLQVYCDMETDGGGWIVFQRRNTGQLDFFKRWRSYVEGFGDPMKEFWLGLDKLHNLTTGTPARYEVRVDLQTANESAYAIYDFFQVASSKERYKLTVGKYRGTAGDALTYHNGWKFTTFDRDNDIALSNCALTHHGGWWYKNCHLANPNGRYGETKHSEGVNWEPWKGHEFSIPYVELKIRPHGYSREPVLGRKKRTLRGRLRTF

SEQ ID NO: 66571 - protein, 33 aa, Homo sapiens
MMQKLLKCSRLVLALALILVLESSVQERRESRT

SEQ ID NO: 66572 - protein, 169 aa, Homo sapiens
MMVALRGASALLVLFLAAFLPPPQCTQDPAMVHYIYQRFRVLEQGLEKCTQATRAYIQEFQEFSKNISVMLGRCQTYTSEYKSAVGNLALRVERAQREIDYIQYLREADECIESEDKTLAEMLLQEAEEEKKIRTLLNASKKTASFPSPSRDYYAQKHTDSEQSGSIIE

SEQ ID NO: 66573 - protein, 349 aa, Homo sapiens
MGLAGAAGRWWGLALGLTAFFLPGVHSQVVQVNDSMYGFIGTDVVLHCSFANPLPSVKITQVTWQKSTNGSKQNVAIYNPSMGVSVLAPYRERVEFLRPSFTDGTIRLSRLELEDEGVYICEFATFPTGNRESQLNLTVMAKPTNWIEGTQAVLRAKKGQDDKVLVATCTSANGKPPSVVSWETRLKGEAEYQEIRNPNGTVTVISRYRLVPSREAHQQSLACIVNYHMDRFKESLTLNVQYEPEVTIEGFDGNWYLQRMDVKLTCKADANPPATEYHWTTLNGSLPKGVEAQNRTLFFKGPINYSLAGTYICEATNPIGTRSGQVEVNITAFCQLIYPGKGRTRARMF

SEQ ID NO: 66574 - protein, 14 aa, Homo sapiens
MRVQLYYLLALIRL

SEQ ID NO: 66575 - protein, 2057 aa, Homo sapiens
MLLLTYSGFFCITNLQLLKIQQAIENVDFSTAKKLQGQIKSSFISTENYHTLGCLSLVAGDLASEVPVIIGGTGNCAFSKWEPDSSKKGMTVKNLIDAEIIKGAKKFQLIDNLLFVLDTDNVLSLWDIYTLTPVWNWPSLHVEEFLLTTEADSPSSVTWQGITNLKLIALTASANKKMKNLMVYSLPTMEILYSLEVSSVSSLVQTGISTDTIYLLEGVCKNDPKLSEDSVSVLVLRCLTEALPENRLSRLLHKHRFAEAESFAIQFGLDVELVYKVKSNHILEKLALSSVDASEQTEWQQLVDDAKENLHKIQDDEFVVNYCLKAQWITYETTQEMLNYAKTRLLKKEDKTALIYSDGLKEVLRAHAKLTTFYGAFGPEKFSGSSWIEFLNNEDDLKDIFLQLKEGNLVCAQYLWLRHRANFESRFDVKMLESLLNSMSASVSLQKLCPWFKNDVIPFVRRTVPEGQIILAKWLEQAARNLELTDKANWPENGLQLAEIFFTAEKTDELGLASSWHWISLKDYQNTEEVCQLRTLVNNLRELITLHRKYNCKLALSDFEKENTTTIVFRMFDKVLAPELIPSILEKFIRVYMREHDLQEEELLLLYIEDLLNRCSSKSTSLFETAWEAKAMAVIACLSDTDLIFDAVLKIMYAAVVPWSAAVEQLVKQHLEMDHPKVKLLQESYKLMEMKKLLRGYGIREVNLLNKEIMRVVRYILKQDVPSSLEDALKVAQAFMLSDDEIYSLRIIDLIDREQGEDCLLLLKSLPPAEAEKTAERVIIWARLALQEEPDHSKEGKAWRMSVAKTSVDILKILCDIQKDNLQKKDECEEMLKLFKEVASLQENFEVFLSFEDYSNSSLVADLREQHIKAHEVAQAKHKPGSTPEPIAAEVRSPSMESKLHRQALALQMSKQELEAELTLRALKDGNIKTALKKCSDLFKYHCNADTGKLLFLTCQKLCQMLADNVPVTVPVGLNLPSMIHDLASQAATICSPDFLLDALELCKHTLMAVELSRQCQMDDCGILMKASFGTHKDPYEEWSYSDFFSEDGIVLESQMVLPVIYELISSLVPLAESKRYPLESTSLPYCSLNEGDGLVLPVINSISALLQNLQESSQWELALRFVVGSFGTCLQHSVSNFMNATLSEKLFGETTLVKSRHVVMELKEKAVIFIRENATTLLHKVFNCRLVDLDLALGYCTLLPQKDVFENLWKLIDKAWQNYDKILAISLVGSELASLYQEIEMGLKFRELSTDAQWGIRLGKLGISFQPVFRQHFLTKKDLIKALVENIDMDTSLILEYCSTFQLDCDAVLQLFIETLLHNTNAGQGQGDASMDSAKRRHPKLLAKALEMVPLLTSTKDLVISLSGILHKLDPYDYEMIEVVLKVIERADEKITNININQALSILKHLKSYRRISPPVDLEYQYMLEHVITLPSAAQTRLPFHLIFFGTAQNFWKILSTELSEESFPTLLLISKLMKFSLDTLYVSTAKHVFEKKLKPKLLKLTQAKSSTLINKEITKITQTIESCLLSIVNPEWAVAIAISLAQDIPEGSFKISALKFCLYLAERWLQNIPSQDEKREKAEALLKKLHIQYRRSGTEAVLIAHKLNTEEYLRVIGKPAHLIVSLYEHPSINQRIQNSSGTDYPDIHAAAKEIAEVNEINLEKVWDMLLEKWLCPSTKPGEKPSELFELQEDEALRRVQYLLLSRPIDYSSRMLFVFATSTTTTLGMHQLTFAHRTRALQCLFYLADKETIESLFKKPIEEVKSYLRCITFLASFETLNIPITYELFCSSPKEGMIKGLWKNHSHESMAVRLVTELCLEYKIYDLQLWNGLLQKLLGFNMIPYLRKVLKAISSIHSLWQVPYFSKAWQRVIQIPLLSASCPLSPDQLSDCSESLIAVLECPVSGDLDLIGVARQYIQLELPAFALACLMLMPHSEKRHQQIKNFLGSCDPQVILKQLEEHMNTGQLAGFSHQIRSLILNNIINKKEFGILAKTKYFQMLKMHAMNTNNITELVNYLANDLSLDEASVLITEYSKHCGKPVPPDTAPCEILKMFLSGLS

SEQ ID NO: 66576 - protein, 92 aa, Homo sapiens
MAPSGSLAVPLAVLVLLLWGAPWTHGRRSNVRVITDENWRELLEGDWMIEFYAPWCPACQNLQPEWESFAEWGEDLEVNIAKVDVTEQPGTD

SEQ ID NO: 66577 - protein, 307 aa, Homo sapiens
MHLQRALVVLALLNFATVSLSLSTCTTLDFGHIKKKRVEAIRGQILSKLRLTSPPEPTVMTHVPYQVLALYNSTRELLEEMHGEREEGCTQENTESEYYAKEIHKFDMIQGLAEHNELAVCPKGITSKVFRFNVSSVEKNRTNLFRAEFRVLRVPNPSSKRNEQRIELFQILRPDEHIAKQRYIGGKNLPTRGTAEWLSFDVTDTVREWLLRRESNLGLEISIHCPCHTFQPNGDILENIHEVMEIKFKGVDNEDDHGRGDLGRLKKQKDHHNPHLILMMIPPHRLDNPGQGGQRKKRALDTNYCFR

SEQ ID NO: 66578 - protein, 29 aa, Homo sapiens [sequence omitted]

SEQ ID NO: 66579 - protein, 1162 aa, Homo sapiens
MAMALLSGFFFFAPASSYNLDVRGARSFSPPRAGRHFGYRVLQVGNGVIVGAPGEGNSTGSLYQCQSGTGHCLPVTLRGSNYTSKYLGMTLATDPTDGSILACDPGLSRTCDQNTYLSGLCYLFRQNLQGPMLQGRPGFQECIKGNVDLVFLFDGSMSLQPDEFQKILDFMKDVMKKLSNTSYQFAAVQFSTSYKTEFDFSDYVKRKDPDALLKHVKHMLLLTNTFGAINYVATEVFREELGARPDATKVLIIITDGEATDSGNIDAAKDIIRYIIGIGKHFQTKESQETLHKFASKPASEFVKILDTFEKLKDLFTELQKKIYVIEGTSKQDLTSFNMELSSSGISADLSRGHAVVGAVGAKDWAGGFLDLKADLQDDTFIGNEPLTPEVRAGYLGYTVTWLPSRQKTSLLASGAPRYQHMGRVLLFQEPQGGGHWSQVQTIHGTQIGSYFGGELCGVDVDQDGETELLLIGAPLFYGEQRGGRVFIYQRRQLGFEEVSELQGDPGYPLGRFGEAITALTDINGDGLVDVAVGAPLEEQGAVYIFNGRHGGLSPQPSQRIEGTQVLSGIQWFGRSIHGVKDLEGDGLADVAVGAESQMIVLSSRPVVDMVTLMSFSPAEIPVHEVECSYSTSNKMKEGVNITICFQIKSLIPQFQGRLVANLTYTLQLDGHRTRRRGLFPGGRHELRRNIAVTTSMSCTDFSFHFPVCVQDLISPINVSLNFSLWEEEGTPRDQRAQGKDIPPILRPSLHSETWEIPFEKNCGEDKKCEANLRVSFSPARSRALRLTAFASLSVELSLSNLEEDAYWVQLDLHFPPGLSFRKVEMLKPHSQIPVSCEELPEESRLLSRALSCNVSSPIFKAGHSVALQMMFNTLVNSSWGDSVELHANVTCNNEDSDLLEDNSATTIIPILYPINILIQDQEDSTLYVSFTPKGPKIHQVKHMYQVRIQPSIHDHNIPTLEAVVGVPQPPSEGPITHQWSVQMEPPVPCHYEDLERLPDAAEPCLPGALFRCPVVFRQEILVQVIGTLELVGEIEASSMFSLCSSLSISFNSSKHFHLYGSNASLAQVVMKVDVVYEKQMLYLYVLSGIGGLLLLLLIFIVLYKVGFFKRNLKEKMEAGRGVPNGIPAEDSEQLASGQEAGDPGCLKPLHEKDSESGGGKD

SEQ ID NO: 66580 - protein, 355 aa, Homo sapiens
MLLLSLGLLAGLLPALAACPQNCHCHSDLQHVICDKVGLQKIPKVSEKTKLLNLQRNNFPVLAANSFRAMPNLVSLHLQHCQIREVAAGAFRGLKQLIYLYLSHNDIRVLRAGAFDDLTELTYLYLDHNKVTELPRGLLSPLVNLFILQLNNNKIRELRAGAFQGAKDLRWLYLSENALSSLQPGALDDVENLAKFHVDRNQLSSYPSAALSKLRVVEELKLSHNPLKSIPDNAFQSFGRYLETLWLDNTNLEKFSDGAFLGVTTLKHVHLENNRLNQLPSNFPFDSLETLALTNNPWKCTCQLRGLRRWLEAKASRPDATCASPAKFKGQHIRDTDAFRSCKFPTKRSKKAGRH

SEQ ID NO: 66581 - protein, 618 aa, Homo sapiens
MPAFLATYRTFVPTACLLGFLLPPMPPPPPPGVEIKKTAVQDLSFNKNLRAVVSVLGSWLQDHPQDFRDHPAHSDLGSVRTFLGWAAPGSAEAQKAEKLLEDFLEEAEREQEEEPPQVWTGPPRVAQTSDPDSSEACAEEEEGLMPQGPQLLDFSVDEVAEQLTLIDLELFSKVRLYECLGSVWSQRDRPGAAGASPTVRATVAQFNTVTGCVLGSVLGAPGLAAPQRAQRLEKWIRIAQRCRELRNFSSLRAILSALQSNPIYRLKRSWGAVSREPLSTFRKLSQIFSDENNHLSSREILFQEEATEGSQEEDNTPGSLPSKPPPGPVPYLGTFLTDLVMLDTALPDMLEGDLINFEKRRKEWEILARIQQLQRRCQSYTLSPHPPILAALHAQNQLTEEQSYRLSRVIEPPAASCPSSPRIRRRISLTKRLSAKLAREKSSSPSGSPGDPSSPTSSVSPGSPPSSPRSRDAPAGSPPASPGPQGPSTKLPLSLDLPSPRPFALPLGSPRIPLPAQQSSEARVIRVSIDNDHGNLYRSILLTSQDKAPSVVRRALQKHNVPQPWACDYQLFQVLPGDRVLLIPDNANVFYAMSPVAPRDFMLRRKEGTRNTLSVSPS

SEQ ID NO: 66582 - protein, 35 aa, Homo sapiens [sequence omitted]

SEQ ID NO: 66583 - protein, 878 aa, Homo sapiens [sequence omitted]

SEQ ID NO: 66584 - protein, 417 aa, Homo sapiens
MGHLSAPLHRVRVPWQGLLLTASLLTFWNPPTTAQLTTESMPFNVAEGKEVLLLVHNLPQQLFGYSWYKGERVDGNRQIVGYAIGTQQATPGPANSGRETIYPNASLLIQNVTQNDTGFYTLQVIKSDLVNEEATGQFHVYPELPKPSISSNNSNPVEDKDAVAFTCEPETQDTTYLWWINNQSLPVSPRLQLSNGNRTLTLLSVTRNDTGPYECEIQNPVSANRSDPVTLNVTYGPDTPTISPSDTYYRPGANLSLSCYAASNPPAQYSWLINGTFQQSTQELFIPNITVNNSGSYTCHANNSVTGCNRTTVKTIIVTELSPVVAKPQIKASKTTVTGDKDSVNLTCSTNDTGISIRWFFKNQSLPSSERMKLSQGNTTLSINPVKREDAGTYWCEVFNPISKNQSDPIMLNVNCK

SEQ ID NO: 66585 - protein, 351 aa, Homo sapiens
MGHLSAPLHRVRVPWQGLLLTASLLTFWNPPTTAQLTTESMPFNVAEGKEVLLLVHNLPQQLFGYSWYKGERVDGNRQIVGYAIGTQQATPGPANSGRETIYPNASLLIQNVTQNDTGFYTLQVIKSDLVNEEATGQFHVYPELPKPSISSNNSNPVEDKDAVAFTCEPETQDTTYLWWINNQSLPVSPRLQLSNGNRTLTLLSVTRNDTGPYECEIQNPVSANRSDPVTLNVTYGPDTPTISPSDTYYRPGANLSLSCYAASNPPAQYSWLINGTFQQSTQELFIPNITVNNSGSYTCHANNSVTGCNRTTVKTIIVTESPVLGEDEAVPGQHHPQHKPCQEGGCWDVLV

SEQ ID NO: 66586 - protein, 52 aa, Homo sapiens
MLKSLWLSLVAWHWGEAVLLSPHLPAAAEWPRAACDSGGEHHHPGLCPLGPG

SEQ ID NO: 66587 - protein, 98 aa, Homo sapiens
MEICRGLRSHLITLLLFLFHSETICRPSGRKSSKMQAFRIWDVNQKTFYLRNNQLVAGYLQGPNVNLEGEWLPGKPMYVGITSLCPSVCSSMACLHKP

SEQ ID NO: 66588 - protein, 13 aa, Homo sapiens
MFFMLVEALMSLY

SEQ ID NO: 66589 - protein, 81 aa, Homo sapiens
MGVIAGIAICICMCMKNHRATRVGILRTTHINTVSSYPGPPPYGHDHEMEYCADLPPPYSPTPQGPAQRSPPPPYPGNARK

SEQ ID NO: 66590 - protein, 1535 aa, Homo sapiens
MLSLSLGLVLAILNKVAPQACPAQCSCSGSTVDCHGLALRSVPRNIPRNTERLDLNGNNITRITKTDFAGLRHLRVLQLMENKISTIERGAFQDLKELERLRLNRNHLQLFPELLFLGTAKLYRLDLSENQIQAIPRKAFRGAVDIKNLQLDYNQISCIEDGAFRALRDLEVLTLNNNNITRLSVASFNHMPKLRTFRLHSNNLYCDCHLAWLSDWLRQRPRVGLYTQCMGPSHLRGHNVAEVQKREFVCSDEEEGHQSFMAPSCSVLHCPAACTCSNNIVDCRGKGLTEIPTNLPETITEIRLEQNTIKVIPPGAFSPYKKLRRIDLSNNQISELAPDAFQGLRSLNSLVLYGNKITELPKSLFEGLFSLQLLLLNANKINCLRVDAFQDLHNLNLLSLYDNKLQTIAKGTFSPLRAIQTMHLAQNPFICDCHLKWLADYLHTNPIETSGARCTSPRRLANKRIGQIKSKKFRCSAKEQYFIPGTEDYRSKLSGDCFADLACPEKCRCEGTTVDCSNQKLNKIPEHIPQYTAELRLNNNEFTVLEATGIFKKLPQLRKINFSNNKITDIEEGAFEGASGVNEILLTSNRLENVQHKMFKGLESLKTLMLRSNRITCVGNDSFIGLSSVRLLSLYDNQITTVAPGAFDTLHSLSTLNLLANPFNCNCYLAWLGEWLRKKRIVTGNPRCQKPYFLKEIPIQDVAIQDFTCDDGNDDNSCSPLSRCPTECTCLDTVVRCSNKGLKVLPKGIPRDVTELYLDGNQFTLVPKELSNYKHLTLIDLSNNRISTLSNQSFSNMTQLLTLILSYNRLRCIPPRTFDGLKSLRLLSLHGNDISVVPEGAFNDLSALSHLAIGANPLYCDCNMQWLSDWVKSEYKEPGIARCAGPGEMADKLLLTTPSKKFTCQGPVDVNILAKCNPCLSNPCKNDGTCNSDPVDFYRCTCPYGFKGQDCDVPIHACISNPCKHGGTCHLKEGEEDGFWCICADGFEGENCEVNVDDCEDNDCENNSTCVDGINNYTCLCPPEYTAANLNEVEKGELCEEKLDFCAQDLNPCQHDSKCILTPKGFKCDCTPGYVGEHCDIDFDDCQDNKCKNGAHCTDAVNGYTCICPEGYSGLFCEFSPPMVLPRTSPCDNFDCQNGAQCIVRINEPICQCLPGYQGEKCEKLVSVNFINKESYLQIPSAKVRPQTNITLQIATDEDSGILLYKGDKDHIAVELYRGRVRASYDTGSHPASAIYSVETINDGNFHIVELLALDQSLSLSVDGGNPKIITNLSKQSTLNFDSPLYVGGMPGKSNVASLRQAPGQNGTSFHGCIRNLYINSELQDFQKVPMQTGILPGCEPCHKKVCAHGTCQPSSQAGFTCECQEGWMGPLCDQRTNDPCLGNKCVHGTCLPINAFSYSCKCLEGHGGVLCDEEEDLFNPCQAIKCKHGKCRLSGLGQPYCECSSGYTGDSCDREISCRGERIRDYYQKQQGYAACQTTKKVSRLECRGGCAGGQCCGPLRSKRRKYSFECTDGSSFVDEVEKVVKCGCTRCVS

SEQ ID NO: 66591 - protein, 22 aa, Homo sapiens
MTSKLAVALLLSWQLHAFCSTV

SEQ ID NO: 66592 - protein, 199 aa, Homo sapiens
MQLCWVILGFLLFRGHNSQPTMTQTSSSQGGLGGLSLTTEPVSSNPGYIPSSEANRPSHLSSTGTPGAGVPSSGRDGGTSRDTFQTVPPNSTTMSLSMREDATILPSPTSETVLTVAAFGVISFIVILVVVVIILVGVVSLRFKCRKSKESEDPQKPGSSGLSESCSTANGEKDSITLISMKNINMNNGKQSLSAEKVL

SEQ ID NO: 66593 - protein, 163 aa, Homo sapiens
MSLVLLFLIRTALFAPQGAAAEPHSLCYNLTVLSQDGSVQSGFLAEGHLDGQLFLLCDRQKGRAGPRGQWAEAVLGAETWDTETEDLTENGQELRRTLAHIKGQKGGRGDKYMKVLFGTEFNREERDSITHQCWVSSSCNFRTTMNTKRILKSQSCLERGSHL

SEQ ID NO: 66594 - protein, 4243 aa, Homo sapiens
MPAQYALTSSLVLLVLLSTARAGPFSSRSNVTLPAPRPPPQPGGHTVGAGVGSPSSQLYEHTVEGGEKQVVFTHRINLPPSTGCGCPPGTEPPVLASEVQALRVRLEILEELVKGLKEQCTGGCCPASAQAGTGQTDVRTLCSLHGVFDLSRCTCSCEPGWGGPTCSDPTDAEIPPSSPPSASGSCPDDCNDQGRCVRGRCVCFPGYTGPSCGWPSCPGDCQGRGRCVQGVCVCRAGFSGPDCSQRSCPRGCSQRGRCEGGRCVCDPGYTGDDCGMRSCPRGCSQRGRCENGRCVCNPGYTGEDCGVRSCPRGCSQRGRCKDGRCVCDPGYTGEDCGTRSCPWDCGEGGRCVDGRCVCWPGYTGEDCSTRTCPRDCRGRGRCEDGECICDTGYSGDDCGVRSCPGDCNQRGRCEDGRCVCWPGYTGTDCGSRACPRDCRGRGRCENGVCVCNAGYSGEDCGVRSCPGDCRGRGRCESGRCMCWPGYTGRDCGTRACPGDCRGRGRCVDGRCVCNPGFTGEDCGSRRCPGDCRGHGLCEDGVCVCDAGYSGEDCSTRSCPGGCRGRGQCLDGRCVCEDGYSGEDCGVRQCPNDCSQHGVCQDGVCICWEGYVSEDCSIRTCPSNCHGRGRCEEGRCLCDPGYTGPTCATRMCPADCRGRGRCVQGVCLCHVGYGGEDCGQEEPPASACPGGCGPRELCRAGQCVCVEGFRGPDCAIQTCPGDCRGRGECHDGSCVCKDGYAGEDCGEEVPTIEGMRMHLLEETTVRTEWTPAPGPVDAYEIQFIPTTEGASPPFTARVPSSASAYDQRGLAPGQEYQVTVRALRGTSWGLPASKTITTMIDGPQDLRVVAVTPTTLELGWLRPQAEVDRFVVSYVSAGNQRVRLEVPPEADGTLLTDLMPGVEYVVTVTAERGRAVSYPASVRANTGSSPLGLLGTTDEPPPSGPSTTQGAQAPLLQQRPQELGELRVLGRDETGRLRVVWTAQPDTFAYFQLRMRVPEGPGAHEEVLPGDVRQALVPPPPPGTPYELSLHGVPPGGKPSDPIIYQGIMDKDEEKPGKSSGPPRLGELTVTDRTSDSLLLRWTVPEGEFDSFVIQYKDRDGQPQVVPVEGPQRSAVITSLDPGRKYKFVLYGFVGKKRHGPLVAEAKILPQSDPSPGTPPHLGNLWVTDPTPDSLHLSWTVPEGQFDTFMVQYRDRDGRPQVVPVEGPERSFVVSSLDPDHKYRFTLFGIANKKRYGPLTADGTTAPERKEEPPRPEFLEQPLLGELTVTGVTPDSLRLSWTVAQGPFDSFMVQYKDAQGQPQAVPVAGDENEVTVPGLDPDRKYKMNLYGLRGRQRVGPESVVAKTAPQEDVDETPSPTELGTEAPESPEEPLLGELTVTGSSPDSLSLFWTVPQGSFDSFTVQYKDRDGRPRAVRVGGKESEVTVGGLEPGHKYKMHLYGLHEGQRVGPVSAVGVTAPQQEETPPATESPLEPRLGELTVTDVTPNSVGLSWTVPEGQFDSFIVQYKDKDGQPQVVPVAADQREVTVYNLEPERKYKMNMYGLHDGQRMGPLSVVIVTAPLPPAPATEASKPPLEPRLGELTVTDITPDSVGLSWTVPEGEFDSFVVQYKDRDGQPQVVPVAADQREVTIPDLEPSRKYKFLLFGIQDGKRRSPVSVEAKTVARGDASPGAPPRLGELWVTDPTPDSLRLSWTVPEGQFDSFVVQFKDKDGPQVVPVEGHERSVTVTPLDAGRKYRFLLYGLLGKKRHGPLTADGTTEARSAMDDTGTKRPPKPRLGEELQVTTVTQNSVGLSWTVPEGQFDSFVVQYKDRDGQPQVVPVEGSLREVSVPGLDPAHRYKLLLYGLHHGKRVGPISAVAITAGREETETETTAPTPPAPEPHLGELTVEEATSHTLHLSWMVTEGEFDSFEIQYTDRDGQLQMVRIGGDRNDITLSGLESDHRYLVTLYGFSDGKHVGPVHVEALTVPEEEKPSEPPTATPEPPIKPRLGELTVTDATPDSLSLSWTVPEGQFDHFLVQYRNGDGQPKAVRVPGHEEGVTISGLEPDHKYKMNLYGFHGGQRMGPVSVVGVTAAEEETPSPTEPSMEAPEPAEEPLLGELTVTGSSPDSLSLSWTVPQGRFDSFTVQYKDRDGRPQVVRVGGEESEVTVGGLEPGRKYKMHLYGLHEGRRVGPVSAVGVTAPEEESPDAPLAKLRLGQMTVRDITSDSLSLSWTVPEGQFDHFLVQFKNGDGQPKAVRVPGHEDGVTISGLEPDHKYKMNLYGFHGGQRVGPVSAVGLTAPGKDEEMAPASTEPPTPEPPIKPRLEELTVTDATPDSLSLSWTVPEGQFDHFLVQYKNGDGQPKATRVPGHEDRVTISGLEPDNKYKMNLYGFHGGQRVGPVSAIGVTAAEEETPSPTEPSMEAPEPPEEPLLGELTVTGSSPDSLSLSWTVPQGRFDSFTVQYKDRDGRPQVVRVGGEESEVTVGGLEPGRKYKMHLYGLHEGRRVGPVSTVGVTAPQEDVDETPSPTEPGTEAPGPPEEPLLGELTVTGSSPDSLSLSWTVPQGRFDSFTVQYKDRDGRPQAVRVGGQESKVTVRGLEPGRKYKMHLYGLHEGRRLGPVSAVGVTEDEAETTQAVPTMTPEPPIKPRLGELTMTDATPDSLSLSWTVPEGQFDHFLVQYRNGDGQPKAVRVPGHEDGVTISGLEPDHKYKMNLYGFHGGQRVGPISVIGVTAAEEETPSPTELSTEAPEPPEEPLLGELTVTGSSPDSLSLSWTIPQGHFDSFTVQYKDRDGRPQVMRVRGEESEVTVGGLEPGRKYKMHLYGLHEGRRVGPVSTVGVTAPEDEAETTQAVPTTTPEPPNKPRLGELTVTDATPDSLSLSWMVPEGQFDHFLVQYRNGDGQPKVVRVPGHEDGVTISGLEPDHKYKMNLYGFHGGQRVGPISVIGVTAAEEETPAPTEPSTEAPEPPEEPLLGELTVTGSSPDSLSLSWTIPQGRFDSFTVQYKDRDGRPQVVRVRGEESEVTVGGLEPGCKYKMHLYGLHEGQRVGPVSAVGVTAPKDEAETTQAVPTMTPEPPIKPRLGELTVTDATPDSLSLSWMVPEGQFDHFLVQYRNGDGQPKAVRVPGHEDGVTISGLEPDHKYKMNLYGFHGGQRVGPVSAIGVTEEETPSPTEPSTEAPEAPEEPLLGELTVTGSSPDSLSLSWTVPQGRFDSFTVQYKDRDGQPQVVRVRGEESEVTVGGLEPGRKYKMHLYGLHEGQRVGPVSTVGITAPLPTPLPVEPRLGELAVAAVTSDSVGLSWTVAQGPFDSFLVQYRDAQGQPQAVPVSGDLRAVAVSGLDPARKYKFLLFGLQNGKRHGPVPVEARTAPDTKPSPRLGELTVTDATPDSVGLSWTVPEGEFDSFVVQYKDKDGRLQVVPVAANQREVTVQGLEPSRKYRFLLYGLSGRKRLGPISADSTTAPLEKELPPHLGELTVAEETSSSLRLSWTVAQGPFDSFVVQYRDTDGQPRAVPVAADQRTVTVEDLEPGKKYKFLLYGLLGGKRLGPVSALGMTAPEEDTPAPELAPEAPEPPEEPRLGVLTVTDTTPDSMRLSWSVAQGPFDSFVVQYEDTNGQPQALLVDGDQSKILISGLEPSTPYRFLLYGLHEGKRLGPLSAEGTTGLAPAGQTSEESRPRLSQLSVTDVTTSSLRLNWEAPPGAFDSFLLRFGVPSPSTLEPHPRPLLQRELMVPGTRHSAVLRDLRSGTLYSLTLYGLRGPHKADSIQGTARTLSPVLESPRDLQFSEIRETSAKVNWMPPPSRADSFKVSYQLADGGEPQSVQVDGQARTQKLQGLIPGARYEVTVVSVRGFEESEPLTGFLTTVPDGPTQLRALNLTEGFAVLHWKPPQNPVDTYDVQVTAPGAPPLQAETPGSAVDYPLHDLVLHTNYTATVRGLRGPNLTSPASITFTTGLEAPRDLEAKEVTPRTALLTWTEPPVRPAGYLLSFHTPGGQNQEILLPGGITSHQLLGLFPSTSYNARLQAMWGQSLLPPVSTSFTTGGLRIPFPRDCGEEMQNGAGASRTSTIFLNGNRERPLNVFCDMETDGGGWLVFQRRMDGQTDFWRDWEDYAHGFGNISGEFWLGNEALHSLTQAGDYSMRVDLRAGDEAVFAQYDSFHVDSAAEYYRLHLEGYHGTAGDSMSYHSGSVFSARDRDPNSLLISCAVSYRGAWWYRNCHYANLNGLYGSTVDHQGVSWYHWKGFEFSVPFTEMKLRPRNFRSPAGGG

SEQ ID NO: 66595 - protein, 1220 aa, Homo sapiens
MFRSDRMWSCHWKWKPSPLLFLFALYIMCVPHSVWGCANCRVVLSNPSGTFTSPCYPNDYPNSQACMWTLRAPTGYIIQITFNDFDIEEAPNCIYDSLSLDNGESQTKFCGATAKGLSFNSSANEMHVSFSSDFSIQKKGFNASYIRVAVSLRNQKVILPQTSDAYQVSVAKSISIPELSAFTLCFEATKVGHEDSDWTAFSYSNASFTQLLSFGKAKSGYFLSISDSKCLLNNALPVKEKEDIFAESFEQLCLVWNNSLGSIGVNFKRNYETVPCDSTISKVIPGNGKLLLGSNQNEIVSLKGDIYNFRLWNFTMNAKILSNLSCNVKGNVVDWQNDFWNIPNLALKAESNLSCGSYLIPLPAAELASCADLGTLCQATVNSPSTTPPTVTTNMPVTNRIDKQRNDGIIYRISVVIQNILRHPEVKVQSKVAEWLNSTFQNWNYTVYVVNISFHLSAGEDKIKVKRSLEDEPRLVLWALLVYNATNNTNLEGKIIQQKLLKNNESLDEGLRLHTVNVRQLGHCLAMEEPKGYYWPSIQPSEYVLPCPDKPGFSASRICFYNATNPLVTYWGPVDISNCLKEANEVANQILNLTADGQNLTSANITNIVEQVKRIVNKEENIDITLGSTLMNIFSNILSSSDSDLLESSSEALKTIDELAFKIDLNSTSHVNITTRNLALSVSSLLPGTNAISNFSIGLPSNNESYFQMDFESGQVDPLASVILPPNLLENLSPEDSVLVRRAQFTFFNKTGLFQDVGPQRKTLVSYVMACSIGNITIQNLKDPVQIKIKHTRTQEVHHPICAFWDLNKNKSFGGWNTSGCVAHRDSDASETVCLCNHFTHFGVLMDLPRSASQLDARNTKVLTFISYIGCGISAIFSAATLLTYVAFEKLRRDYPSKILMNLSTALLFLNLLFLLDGWITSFNVDGLCIAVAVLLHFFLLATFTWMGLEAIHMYIALVKVFNTYIRRYILKFCIIGWGLPALVVSVVLASRNNNEVYGKESYGKEKGDEFCWIQDPVIFYVTCAGYFGVMFFLNIAMFIVVMVQICGRNGKRSNRTLREEVLRNLRSVVSLTFLLGMTWGFAFFAWGPLNIPFMYLFSIFNSLQGLFIFIFHCAMKENVQKQWRQHLCCGRFRLADNSDWSKTATNIIKKSSDNLGKSLSSSSIGSNSTYLTSKSKSSSTTYFKRNSHTDNVSYEHSFNKSGSLRQCFHGQVLVKTGPC

SEQ ID NO: 66596 - protein, 1192 aa, Homo sapiens
MFRSDRMWSCHWKWKPSPLLFLFALYIMCVPHSVWGCANCRVVLSNPSGTFTSPCYPNDYPNSQACMWTLRAPTGYIIQITFNDFDIEEAPNCIYDSLSLDNGESQTKFCGATAKGLSFNSSANEMHVSFSSDFSIQKKGFNASYIRVAVSLRNQKVILPQTSDAYQVSVAKSISIPELSAFTLCFEATKVGHEDSDWTAFSYSNASFTQLLSFGKAKSGYFLSISDSKCLLNNALPVKEKEDIFAESFEQLCLVWNNSLGSIGVNFKRNYETVPCDSTISKVIPGNGKLLLGSNQNEIVSLKGDIYNFRLWNFTMNAKILSNLSCNVKGNVVDWQNDFWNIPNLALKAESNLSCGSYLIPLPAAELASCADLGTLCQDGIIYRISVVIQNILRHPEVKVQSKVAEWLNSTFQNWNYTVYVVNISFHLSAGEDKIKVKRSLEDEPRLVLWALLVYNATNNTNLEGKIIQQKLLKNNESLDEGLRLHTVNVRQLGHCLAMEEPKGYYWPSIQPSEYVLPCPDKPGFSASRICFYNATNPLVTYWGPVDISNCLKEANEVANQILNLTADGQNLTSANITNIVEQVKRIVNKEENIDITLGSTLMNIFSNILSSSDSDLLESSSEALKTIDELAFKIDLNSTSHVNITTRNLALSVSSLLPGTNAISNFSIGLPSNNESYFQMDFESGQVDPLASVILPPNLLENLSPEDSVLVRRAQFTFFNKTGLFQDVGPQRKTLVSYVMACSIGNITIQNLKDPVQIKIKHTRTQEVHHPICAFWDLNKNKSFGGWNTSGCVAHRDSDASETVCLCNHFTHFGVLMDLPRSASQLDARNTKVLTFISYIGCGISAIFSAATLLTYVAFEKLRRDYPSKILMNLSTALLFLNLLFLLDGWITSFNVDGLCIAVAVLLHFFLLATFTWMGLEAIHMYIALVKVFNTYIRRYILKFCIIGWGLPALVVSVVLASRNNNEVYGKESYGKEKGDEFCWIQDPVIFYVTCAGYFGVMFFLNIAMFIVVMVQICGRNGKRSNRTLREEVLRNLRSVVSLTFLLGMTWGFAFFAWGPLNIPFMYLFSIFNSLQGLFIFIFHCAMKENVQKQWRQHLCCGRFRLADNSDWSKTATNIIKKSSDNLGKSLSSSSIGSNSTYLTSKSKSSSTTYFKRNSHTDNVSYEHSFNKSGSLRQCFHGQVLVKTGPC

SEQ ID NO: 66597 - protein, 1221 aa, Homo sapiens
MFRSDRMWSCHWKWKPSPLLFLFALYIMCVPHSVWGCANCRVVLSNPSGTFTSPCYPNDYPNSQACMWTLRAPTGYIIQITFNDFDIEEAPNCIYDSLSLDNGESQTKFCGATAKGLSFNSSANEMHVSFSSDFSIQKKGFNASYIRVAVSLRNQKVILPQTSDAYQVSVAKSISIPELSAFTLCFEATKVGHEDSDWTAFSYSNASFTQLLSFGKAKSGYFLSISDSKCLLNNALPVKEKEDIFAESFEQLCLVWNNSLGSIGVNFKRNYETVPCDSTISKVIPGNGKLLLGSNQNEIVSLKGDIYNFRLWNFTMNAKILSNLSCNVKGNVVDWQNDFWNIPNLALKAESNLSCGSYLIPLPAAELASCADLGTLCQDGIIYRISVVIQNILRHPEVKVQSKVAEWLNSTFQNWNYTVYVVNISFHLSAGEDKIKVKRSLEDEPRLVLWALLVYNATNNTNLEGKIIQQKLLKNNESLDEGLRLHTVNVRQLGHCLAMEEPKGYYWPSIQPSEYVLPCPDKPGFSASRICFYNATNPLVTYWGPVDISNCLKEANEVANQILNLTADGQNLTSANITNIVEQVKRIVNKEENIDITLGSTLMNIFSNILSSSDSDLLESSSEALKTIDELAFKIDLNSTSHVNITTRNLALSVSSLLPGTNAISNFSIGLPSNNESYFQMDFESGQVDPLASVILPPNLLENLSPEDSVLVRRAQFTFFNKTGLFQDVGPQRKTLVSYVMACSIGNITIQNLKDPVQIKIKHTRTQEVHHPICAFWDLNKNKSFGGWNTSGCVAHRDSDASETVCLCNHFTHFGVLMDLPRSASQLDARNTKVLTFISYIGCGISAIFSAATLLTYVAFEKLRRDYPSKILMNLSTALLFLNLLFLLDGWITSFNVDGLCIAVAVLLHFFLLATFTWMGLEAIHMYIALVKVFNTYIRRYILKFCIIGWGLPALVVSVVLASRNNNEVYGKESYGKEKGDEFCWIQDPVIFYVTCAGYFGVMFFLNIAMFIVVMVQICGRNGKRSNRTLREEVLRNLRSVVSLTFLLGMTWGFAFFAWGPLNIPFMYLFSIFNSLQGLFIFIFHCAMKENVQKQWRQHLCCGRFRLADNSDWSKTATNIIKKSSDNLGKSLSSSSIGSNSTYLTSKSKSSSTTYFKRNSHTDSASMDKSLSKLAHADGDQTSIIPVHQVIDKVKGYCNAHSDNFYKNIIMSDTFSHSTKF

SEQ ID NO: 66598 - protein, 1249 aa, Homo sapiens
MFRSDRMWSCHWKWKPSPLLFLFALYIMCVPHSVWGCANCRVVLSNPSGTFTSPCYPNDYPNSQACMWTLRAPTGYIIQITFNDFDIEEAPNCIYDSLSLDNGESQTKFCGATAKGLSFNSSANEMHVSFSSDFSIQKKGFNASYIRVAVSLRNQKVILPQTSDAYQVSVAKSISIPELSAFTLCFEATKVGHEDSDWTAFSYSNASFTQLLSFGKAKSGYFLSISDSKCLLNNALPVKEKEDIFAESFEQLCLVWNNSLGSIGVNFKRNYETVPCDSTISKVIPGNGKLLLGSNQNEIVSLKGDIYNFRLWNFTMNAKILSNLSCNVKGNVVDWQNDFWNIPNLALKAESNLSCGSYLIPLPAAELASCADLGTLCQATVNSPSTTPPTVTTNMPVTNRIDKQRNDGIIYRISVVIQNILRHPEVKVQSKVAEWLNSTFQNWNYTVYVVNISFHLSAGEDKIKVKRSLEDEPRLVLWALLVYNATNNTNLEGKIIQQKLLKNNESLDEGLRLHTVNVRQLGHCLAMEEPKGYYWPSIQPSEYVLPCPDKPGFSASRICFYNATNPLVTYWGPVDISNCLKEANEVANQILNLTADGQNLTSANITNIVEQVKRIVNKEENIDITLGSTLMNIFSNILSSSDSDLLESSSEALKTIDELAFKIDLNSTSHVNITTRNLALSVSSLLPGTNAISNFSIGLPSNNESYFQMDFESGQVDPLASVILPPNLLENLSPEDSVLVRRAQFTFFNKTGLFQDVGPQRKTLVSYVMACSIGNITIQNLKDPVQIKIKHTRTQEVHHPICAFWDLNKNKSFGGWNTSGCVAHRDSDASETVCLCNHFTHFGVLMDLPRSASQLDARNTKVLTFISYIGCGISAIFSAATLLTYVAFEKLRRDYPSKILMNLSTALLFLNLLFLLDGWITSFNVDGLCIAVAVLLHFFLLATFTWMGLEAIHMYIALVKVFNTYIRRYILKFCIIGWGLPALVVSVVLASRNNNEVYGKESYGKEKGDEFCWIQDPVIFYVTCAGYFGVMFFLNIAMFIVVMVQICGRNGKRSNRTLREEVLRNLRSVVSLTFLLGMTWGFAFFAWGPLNIPFMYLFSIFNSLQGLFIFIFHCAMKENVQKQWRQHLCCGRFRLADNSDWSKTATNIIKKSSDNLGKSLSSSSIGSNSTYLTSKSKSSSTTYFKRNSHTDSASMDKSLSKLAHADGDQTSIIPVHQVIDKVKGYCNAHSDNFYKNIIMSDTFSHSTKF

SEQ ID NO: 66599 - protein, 115 aa, Homo sapiens
MTIVTSLLFLGVCAHHIIPTGSVVIPSPCCMFFVSKRIPENRVVSYQLSSRSTCLKAGVIFTTKKGQQFCGDPKQEWVQRYMKNLDAKQKKASPRARAVAVKGPVQRYPGNQTTC

SEQ ID NO: 66600 - protein, 458 aa, Homo sapiens
MSPATTGTFLLTAFLLSCADGINGTVNWKTRQANNFIISRKMAAGMKDVYSIFSKVHSDRNVYPSAGVLFVHVLEREYFKGEFPPYPKPGEISNDPITFNTNLMGYPDRPGWLRYIQRTPYSDGVLYGSPTAENVGKPTIIEITAYNRRTFETARHNLIINIMSAEDFPLPYQAEFFIKNMNVEEMLASEVLGDFLGAVKNVWQPERLNAINITSALDRGGRVPLPINDLKEGVYVMVGADVPFSSCLREVENPQNQLRCSQEMEPVITCDKKFRTQFYIDWCKISLVDKTKQVSTYQEVIRGEGILPDGGEYKPPSDSLKSRDYYTDFLITLAVPSAVALVLFLILAYIMCCRREGVIQLVHHSAIQKSTKELRDMSKNREIAWPLSTLPVFHPVTGEIIPPLHTDNYDSTNMPLMQTQQNLPHQTQIPQQQTTEIIFSITAFVNLRRFSFDNFSKI

SEQ ID NO: 66601 - protein, 13 aa, Homo sapiens
MLGLFLIIILWVK

SEQ ID NO: 66602 - protein, 153 aa, Homo sapiens
MVRMVSVLLSLLLLLGPAVLQETRDGHYSLTYLYTGLSRSGKGTHRLQGTVFLNGHAFFHYNSEDRKAEPLGPWRHAEGVEDWEKQSQVQKAREDIFMETLNNIMEYYNDGNGSHALQERFGCEIQNNRSTGAFWKNAYDGKDYIEFNKEIPA

SEQ ID NO: 66603 - protein, 434 aa, Homo sapiens
MPGVTIYELLFLFLWKWKGPLHPPLPPPHQPQPQQPQQQPPPQHQPPHQPPHQPPPQHQPPPQHPPQHPPQHQHHHHHHHLSVPPPPLMPMSQPQFRPHVQTAQPQASSSRMQCPQRQGLRHNTTSQNVSKRPMQQMQPTAPRNSNLRELPIAPSHVIEMSSSRCSATPSAQVKPIVSASPPSRAVAGSRSSQGKTEVKVKPASPVAQPKEEAKTETEFPDEDEETRLYRLKIEEQKRLREEILKQKELRRQQQAGARKKELLERLAQQQQQLYAPPPPAEQEEQALSPSPTNGNPLLPFPGAQVRQNVKNRLLVKNQDVSISNVQPKTSNFVPSSANMQYQGQQMKALKHLRQTRTVPQSQTQPLHKVLPIKPADVEEPAVPQTPRVASIQGRPQDTKPGVKRTVTHRTNSGGGDGPHISSKVRVIKLSGGVS

SEQ ID NO: 66604 - protein, 912 aa, Homo sapiens
MLAGCFLLILGQIVLLPAEARERSRGRSISRGRHARTHPQTALLESSCENKRADLVFIIDSSRSVNTHDYAKVKEFIVDILQFLDIGPDVTRVGLLQYGSTVKNEFSLKTFKRKSEVERAVKRMRHLSTGTMTGLAIQYALNIAFSEAEGARPLRENVPRVIMIVTDGRPQDSVAEVAAKARDTGILIFAIGVGQVDFNTLKSIGSEPHEDHVFLVANFSQIETLTSVFQKKLCTAHMCSTLEHNCAHFCINIPGSYVCRCKQGYILNSDQTTCRIQDLCAMEDHNCEQLCVNVPGSFVCQCYSGYALAEDGKRCVAVDYCASENHGCEHECVNADGSYLCQCHEGFALNPDKKTCTRINYCALNKPGCEHECVNMEESYYCRCHRGYTLDPNGKTCSRVDHCAQQDHGCEQLCLNTEDSFVCQCSEGFLINEDLKTCSRVDYCLLSDHGCEYSCVNMDRSFACQCPEGHVLRSDGKTCAKLDSCALGDHGCEHSCVSSEDSFVCQCFEGYILREDGKTCRRKDVCQAIDHGCEHICVNSDDSYTCECLEGFRLAEDGKRCRRKDVCKSTHHGCEHICVNNGNSYICKCSEGFVLAEDGRRCKKCTEGPIDLVFVIDGSKSLGEENFEVVKQFVTGIIDSLTISPKAARVGLLQYSTQVHTEFTLRNFNSAKDMKKAVAHMKYMGKGSMTGLALKHMFERSFTQGEGARPLSTRVPRAAIVFTDGRAQDDVSEWASKAKANGITMYAVGVGKAIEEELQEIASEPTNKHLFYAEDFSTMDEISEKLKKGICEALEDSDGRQDSPAGELPKTVQQPTESEPVTINIQDLLSCSNFAVQHRYLFEEDNLLRSTQKLSHSTKPSGSPLEEKHDQCKCENLIMFQNLANEEVRKLTQRLEEMTQRMEALENRLRYR

SEQ ID NO: 66605 - protein, 732 aa, Homo sapiens
ILGASNILWIMFAASQAFKIETTPESRYLAQIGDSVSLTCSTTGCESPFFSWRTQIDSPLNGKVTNEGTTSTLTMNPVSFGNEHSYLCTATCESRKLEKGIQVEIYSFPKDPEIHLSGPLEAGKPITVKCSVADVYPFDRLEIDLLKGDHLMKSQEFLEDADRKSLETKSLEVTFTPVIEDIGKVLVCRAKLHIDEMDSVPTVRQAVKELQVYISPKNTVISVNPSTKLQEGGSVTMTCSSEGLPAPEIFWSKKLDNGNLQHLSGNATLTLIAMRMEDSGIYVCEGVNLIGKNRKEVELIVQEKPFTVEISPGPRIAAQIGDSVMLTCSVMGCESPSFSWRTQIDSPLSGKVRSEGTNSTLTLSPVSFENEHSYLCTVTCGHKKLEKGIQVELYSFPRDPEIEMSGGLVNGSSVTVSCKVPSVYPLDRLEIELLKGETILENIEFLEDTDMKSLENKSLEMTFIPTIEDTGKALVCQAKLHIDDMEFEPKQRQSTQTLYVNVAPRDTTVLVSPSSILEEGSSVNMTCLSQGFPAPKILWSRQLPNGELQPLSENATLTLISTKMEDSGVYLCEGINQAGRSRKEVELIIQVTPKDIKLTAFPSESVKEGDTVIISCTCGNVPETWIILKKKAETGDTVLKSIDGAYTIRKAQLKDAGVYECESKNKVGSQLRSLTLDVQGRENNKDYFSPELLVLYFASSLIIPAIGMIIYFARKANMKGSYSLVEAQKSKV

SEQ ID NO: 66606 - protein, 483 aa, Homo sapiens
LSASAGPWSGSRGGSMLAVGCALLAALLAAPGAALAPRRCPAQEVARGVLTSLPGDSVTLTCPGVEPEDNATVHWVLRKPAAGSHPSRWAGMGRRLLLRSVQLHDSGNYSCYRAGRPAGTVHLLVDVPPEEPQLSCFRKSPLSNVVCEWGPRSTPSLTTKAVLLVRKFQNSPAEDFQEPCQYSQESQKFSCQLAVPEGDSSFYIVSMCVASSVGSKFSKTQTFQGCGILQPDPPANITVTAVARNPRWLSVTWQDPHSWNSSFYRLRFELRYRAERSKTFTTWMVKDLQHHCVIHDAWSGLRHVVQLRAQEEFGQGEWSEWSPEAMGTPWTESRSPPAENEVSTPMQALTTNKDDDNILFRDSANATSLPVQDSSSVPLPTFLVAGGSLAFGTLLCIAIVLRFKKTWKLRALKEGKTSMHPPYSLGQLVPERPRPTPVLVPLISPPVSPSSLGSDNTSSHNRPDARDPRSPYDISNTDYFFPR

SEQ ID NO: 66607 - protein, 260 aa, Homo sapiens
VIAAPDSRRWLWSVLAAALGLLTAGVSALEVYTPKEIFVANGTQGKLTCKFKSTSTTGGLTSVSWSFQPEGADTTVSFFHYSQGQVYLGNYPPFKDRISWAGDLDKKDASINIENMQFIHNGTYICDVKNPPDIVVQPGHIRLYVVEKENLPVFPVWVVVGIVTAVVLGLTLLISMILAVLYRRKNSKRDYTGCSTSESLSPVKQAPRKSPSDTEGLVKSLPSGSHQGPVIYAQLDHSGGHHSDKINKSESVVYADIRKN

SEQ ID NO: 66608 - protein, 15 aa, Homo sapiens
TKRSLAPFLSLSLSL

SEQ ID NO: 66609 - protein, 360 aa, Homo sapiens
LLLVLLCLPAVWGDCGLPPDVPNAQPALEGRTSFPEDTVITYKCEESFVKIPGEKDSVICLKGSQWSDIEEFCNRSCEVPTRLNSASLKQPYITQNYFPVGTVVEYECRPGYRREPSLSPKLTCLQNLKWSTAVEFCKKKSCPNPGEIRNGQIDVPGGILFGATISFSCNTGYKLFGSTSSFCLISGSSVQWSDPLPECREIYCPAPPQIDNGIIQGERDHYGYRQSVTYACNKGFTMIGEHSIYCTVNNDEGEWSGPPPECRGKSLTSKVPPTVQKPTTVNVPTTEVSPTSQKTTTKTTTPNAQATRSTPVSRTTKHFHETTPNKGSGTTSGTTRLLSGHTCFTLTGLLGTLVTMGLLT

SEQ ID NO: 66610 - protein, 60 aa, Homo sapiens
ISDARGTATVLSATLILVTASAITALGQEYEQAAALDLCPHQPPGSLCSHRPQWEGVCIS

SEQ ID NO: 66611 - protein, 341 aa, Homo sapiens
IFSYIRLELPSMWLLVSVILISRISSVGGEATFCDFPKINHGILYDEEKYKPFSQVPTGEVFYYSCEYNFVSPSKSFWTRITCTEEGWSPTPKCLRLCFFPFVENGHSESSGQTHLEGDTVQIICNTGYRLQNNENNISCVERGWSTPPKCRSTDTSCVNPPTVQNAHILSRQMSKYPSGERVRYECRSPYEMFGDEEVMCLNGNWTEPPQCKDSTGKCGPPPPIDNGDITSFPLSVYAPASSVEYQCQNLYQLEGNKRITCRNGQWSEPPKCLHPCVISREIMENYNIALRWTAKQKLYLRTGESAEFVCKRGYRLSSRSHTLRTTCWDGKLEYPTCAKR

SEQ ID NO: 66612 - protein, 582 aa, Homo sapiens
LRISNMLLLINVILTLWVSCANGQVKPCDFPEIQHGGLYYKSLRRLYFPAAAGQSYSYYCDQNFVTPSGSYWDYIHCTQDGWSPTVPCLRTCSKSDVEIENGFISESSSIYILNEETQYNCKPGYATAEGNSSGSITCLQNGWSTQPICIKFCDMPVFENSRAKSNGMWFKLHDTLDYECYDGYESSYGNTTDSIVCGEDGWSHLPTCYNSSENCGPPPPISNGDTTSFPQKVYLPWSRVEYQCQSYYELQGSKYVTCSNGDWSEPPRCISMKPCEFPEIQHGHLYYENTRRPYFPVATGQSYSYYCDQNFVTPSGSYWDYIHCTQDGWLPTVPCLRTCSKSDIEIENGFISESSSIYILNKEIQYKCKPGYATADGNSSGSITCLQNGWSAQPICIKFCDMPVFENSRAKSNGMRFKLHDTLDYECYDGYEISYGNTTGSIVCGEDGWSHFPTCYNSSEKCGPPPPISNGDTTSFLLKVYVPQSRVEYQCQSYYELQGSNYVTCSNGEWSEPPRCIHPCIITEENMNKNNIQLKGKSDIKYYAKTGDTIEFMCKLGYNANTSVLSFQAVCREGIVEYPRCE

SEQ ID NO: 66613 - protein, 97 aa, Homo sapiens
IFSYIRLELPSMWLLVSVILISRISSVGGEAMFCDFPKINHGILYDEEKYKPFSQVPTGEVFYYSCEYNFVSPSKSFWTRITCAEEGWSPTPKCLSE

SEQ ID NO: 66614 - protein, 35 aa, Homo sapiens
IIFLICFLVLYALFLTLTTKLTNTNISDAQEIETV

SEQ ID NO: 66615 - protein, 443 aa, Homo sapiens
RRRKMEPSTAARAWALFWLLLPLLGAVCASGPRTLVLLDNLNVRETHSLFFRSLKDRGFELTFKTADDPSLSLIKYGEFLYDNLIIFSPSVEDFGGNINVETISAFIDGGGSVLVAASSDIGDPLRELGSECGIEFDEEKTAVIDHHNYDISDLGQHTLIVADTENLLKAPTIVGKSSLNPILFRGVGMVADPDNPLVLDILTGSSTSYSFFPDKPITQYPHAVGKNTLLIAGLQARNNARVIFSGSLDFFSDSFFNSAVQKAAPGSQRYSQTGNYELAVALSRWVFKEEGVLRVGPVSHHRVGETAPPNAYTVTDLVEYSIVIQQLSNGKWVPFDGDDIQLEFVRIDPFVRTFLKKKGGKYSVQFKLPDVYGVFQFKVDYNRLGYTHLYSSTQVSVRPLQHTQYERFIPSAYPYYASAFSMMLGLFIFSIVFLHMKEKEKSD

SEQ ID NO: 66616 - protein, 331 aa, Homo sapiens
VCLLCLVAGTAVAVKMASTSRLDALPRVTCPNHPDAILVEDYRAGDMICPECGLVVGDRVIDVGSEWRTFSNDKATKDPSRVGDSQNPLLSDGDLSTMIGKGTGAASFDEFGNSKYQNRRTMSSSDRAMMNAFKEITTMADRINLPRNIVDRTNNLFKQVYEQKSLKGRANDAIASACLYIACRQEGVPRTFKEICAVSRISKKEIGRCFKLILKALETSVDLITTGDFMSRFCSNLCLPKQVQMAATHIARKAVELDLVPGRSPISVAAAAIYMASQASAEKRTQKEIGDIAGVADVTIRQSYRLIYPRAPDLFPTDFKFDTPVDKLPQL

SEQ ID NO: 66617 - protein, 193 aa, Homo sapiens
VTARLVGVLWFVSVTTGPWGAVATSAGGEESLKCEDLKVGQYICKDPKINDATQEPVNCTNYTAHVSCFPAPNITCKDSSGNETHFTGNEVGFFKPISCRNVNGYSYKVAVALSLFLGWLGADRFYLGYPALGLLKFCTVGFCGIGSLIDFILISMQIVGPSDGSSYIIDYYGTRLTRLSITNETFRKTQLYP

SEQ ID NO: 66618 - protein, 50 aa, Homo sapiens
IWVSCSWLLHFSMWQTEQSHNAFSAGLKTAHRPELPLYYLKLHRWLVKFN

SEQ ID NO: 66619 - protein, 177 aa, Homo sapiens
RRLPSRHCRMFWKLSLSLFLVAVLVKVAEARKNRPAGAIPSPYKDGSSNNSERWQHQIKEVLASSQEALVVTERKYLKSDWCKTQPLRQTVSEEGCRSRTILNRFCYGQCNSFYIPRHVKKEEESFQSCAFCKPQRVTSVLVELECPGLDPPFRLKKIQKVKQCRCMSVNLSDSDKQ

SEQ ID NO: 66620 - protein, 1246 aa, Homo sapiens
LASSSRIRAAWTRALLLPLLLAGPVGCLSRQELFPFGPGQGDLELEDGDDFVSPALELSGALRFYDRSDIDAVYVTTNGIIATSEPPAKESHPGLFPPTFGAVAPFLADLDTTDGLGKVYYREDLSPSITQRAAECVHRGFPEISFQPSSAVVVTWESVAPYQGPSRDPDQKGKRNTFQAVLASSDSSSYAIFLYPEDGLQFHTTFSKKENNQVPAVVAFSQGSVGFLWKSNGAYNIFANDRESVENLAKSSNSGQQGVWVFEIGSPATTNGVVPADVILGTEDGAEYDDEDEDYDLATTRLGLEDVGTTPFSYKALRRGGADTYSVPSVLSPRRAATERPLGPPTERTRSFQLAVETFHQQHPQVIDVDEVEETGVVFSYNTDSRQTCANNRHQCSVHAECRDYATGFCCSCVAGYTGNGRQCVAEGSPQRVNGKVKGRIFVGSSQVPIVFENTDLHSYVVMNHGRSYTAISTIPETVGYSLLPLAPVGGIIGWMFAVEQDGFKNGFSITGGEFTRQAEVTFVGHPGNLVIKQRFSGIDEHGHLTIDTELEGRVPQIPFGSSVHIEPYTELYHYSTSVITSSSTREYTVTEPERDGASPSRIYTYQWRQTITFQECVHDDSRPALPSTQQLSVDSVFVLYNQEEKILRYALSNSIGPVREGSPDALQNPCYIGTHGCDTNAACRPGPRTQFTCECSIGFRGDGRTCYDIDECSEQPSVCGSHTICNNHPGTFRCECVEGYQFSDEGTCVAVVDQRPINYCETGLHNCDIPQRAQCIYTGGSSYTCSCLPGFSGDGQACQDVDECQPSRCHPDAFCYNTPGSFTCQCKPGYQGDGFRCVPGEVEKTRCQHEREHILGAAGATDPQRPIPPGLFVPECDAHGHYAPTQCHGSTGYCWCVDRDGREVEGTRTRPGMTPPCLSTVAPPIHQGPAVPTAVIPLPPGTHLLFAQTGKIERLPLEGNTMRKTEAKAFLHVPAKVIIGLAFDCVDKMVYWTDITEPSIGRASLHGGEPTTIIRQDLGSPEGIAVDHLGRNIFWTDSNLDRIEVAKLDGTQRRVLFETDLVNPRGIVTDSVRGNLYWTDWNRDNPKIETSYMDGTNRRILVQDDLGLPNGLTFDAFSSQLCWVDAGTNRAECLNPSQPSRRKALEGLQYPFAVTSYGKNLYFTDWKMNSVVALDLAISKETDAFQPHKQTRLYGITTALSQCPQGHNYCSVNNGGCTHLCLATPGSRTCRCPDNTLGVDCIEQK

SEQ ID NO: 66621 - protein, 16 aa, Homo sapiens
VHMVCALLILHWESFS

SEQ ID NO: 66622 - protein, 15 aa, Homo sapiens
TGPPTAAWVLFLAWP

SEQ ID NO: 66623 - protein, 567 aa, Homo sapiens
VLLRLICFIALLISSLEADKCKEREEKIILVSSANEIDVRPCPLNPNEHKGTITWYKDDSKTPVSTEQASRIHQHKEKLWFVPAKVEDSGHYYCVVRNSSYCLRIKISAKFVENEPNLCYNAQAIFKQKLPVAGDGGLVCPYMEFFKNENNELPKLQWYKDCKPLLLDNIHFSGVKDRLIVMNVAEKHRGNYTCHASYTYLGKQYPITRVIEFITLEENKPTRPVIVSPANETMEVDLGSQIQLICNVTGQLSDIAYWKWNGSVIDEDDPVLGEDYYSVENPANKRRSTLITVLNISEIESRFYKHPFTCFAKNTHGIDAAYIQLIYPVTNFQKHMIGICVTLTVIIVCSVFIYKIFKIDIVLWYRDSCYDFLPIKASDGKTYDAYILYPKTVGEGSTSDCDIFVFKVLPEVLEKQCGYKLFIYGRDDYVGEDIVEVINENVKKSRRLIIILVRETSGFSWLGGSSEEQIAMYNALVQDGIKVVLLELEKIQDYEKMPESIKFIKQKHGAIRWSGDFTQGPQSAKTRFWKNVRYHMPVQRRSPSSKHQLLSPATKEKLQREAHVPLG

SEQ ID NO: 66624 - protein, 112 aa, Homo sapiens
ILGLGHTFWALLASPKMEHKEVVLLLLLFLKSGQGEPLDDYVNTQGPSLFSVTKKQLGAGSREECAAKCEEDKEFTCRAFQYHSKEQQCVIMAENRKSSIIIRMRDAVLFEK

SEQ ID NO: 66625 - protein, 419 aa, Homo sapiens
LTLCALFCLAAYLVSGSPIMNLEQSPLEEDMSLFGDVFSEQDGVDFNTLLQSMKDEFLKTLNLSDIPTQDSAKVDPPEYMLELYNKFATDRTSMPSANIIRSFKNEDLFSQPVSFNGLRKYPLLFNVSIPHHEEVIMAELRLYTLVQRDRMIYDGVDRKITIFEVLESKGDNEGERNMLVLVSGEIYGTNSEWETFDVTDAIRRWQKSGSSTHQLEVHIESKHDEAEDASSGRLEIDTSAQNKHNPLLIVFSDDQSSDKERKEELNEMISHEQLPELDNLGLDSFSSGPGEEALLQMRSNIIYDSTARIRRNAKGNYCKRTPLYIDFKEIGWDSWIIAPPGYEAYECRGVCNYPLAEHLTPTKHAIIQALVHLKNSQKASKACCVPTKLEPISILYLDKGVVTYKFKYEGMAVSECGCR

SEQ ID NO: 66626 - protein, 15 aa, Homo sapiens
MPCFYYVVVVLSCLN

SEQ ID NO: 66627 - protein, 112 aa, Homo sapiens; identical to SEQ ID NO: 66624

SEQ ID NO: 66628 - protein, 18 aa, Homo sapiens
LSCLFVVLKGRSFVLWVC

SEQ ID NO: 66629 - protein, 11 aa, Homo sapiens
MKKKMLLYWIL

SEQ ID NO: 66630 - protein, 8 aa, Homo sapiens
IASFLICF

SEQ ID NO: 66631 - protein, 588 aa, Homo sapiens
LLRGLWPLHIVLWTRIASTIPPHVQKSDVEMEAQKDEIICPSCNRTAHPLRHINNDMIVTDNNGAVKFPQLCKFCDVRFSTCDNQKSCMSNCSITSICEKPQEVCVAVWRKNDENITLETVCHDPKLPYHDFILEDAASPKCIMKEKKKPGETFFMCSCSSDECNDNIIFSEEYNTSNPDLLLVIFQVTGISLLPPLGVAISVIIIFYCYRVNRQQKLSSTWETGKTRKLMEFSEHCAIILEDDRSDISSTCANNINHNTELLPIELDTLVGKGRFAEVYKAKLKQNTSEQFETVAVKIFPYEEYASWKTEKDIFSDINLKHENILQFLTAEERKTELGKQYWLITAFHAKGNLQEYLTRHVISWEDLRKLGSSLARGIAHLHSDHTPCGRPKMPIVHRDLKSSNILVKNDLTCCLCDFGLSLRLDPTLSVDDLANSGQVGTARYMAPEVLESRMNLENVESFKQTDVYSMALVLWEMTSRCNAVGEVKDYEPPFGSKVREHPCVESMKDNVLRDRGRPEIPSFWLNHQGIQMVCETLTECWDHDPEARLTAQCVAERFSELEHLDRLSGRSCSEEKIPEDGSLNTTK

SEQ ID NO: 66632 - protein, 41 aa, Homo sapiens
KALPQFIFLPVYFPFAFLESCCITEAGSSDVPLKSQWKVLT

SEQ ID NO: 66633 - protein, 15 aa, Homo sapiens
IDHLFLMITHLAHMM

SEQ ID NO: 66634 - protein, 53 aa, Homo sapiens
ILSLLTVYITTLVHSGHFSFLESPVDLTPMPMIFFSWLIKNSLFLLRHPCHYK

SEQ ID NO: 66635 - protein, 546 aa, Homo sapiens
KMLPGAWLLWTSLLLLARPAQPCPMGCDCFVQEVFCSDEELATVPLDIPPYTKNIIFVETSFTTLETRAFGSNPNLTKVVFLNTQLCQFRPDAFGGLPRLEDLEVTGSSFLNLSTNIFSNLTSLGKLTLNFNMLEALPEGLFQHLAALESLHLQGNQLQALPRRLFQPLTHLKTLNLAQNLLAQLPEELFHPLTSLQTLKLSNNALSGLPQGVFGKLGSLQELFLDSNNISELPPQVFSQLFCLERLWLQRNAITHLPLSIFASLGNLTFLSLQWNMLRVLPAGLFAHTPCLVGLSLTHNQLETVAEGTFAHLSNLRSLMLSYNAITHLPAGIFRDLEELVKLYLGSNNLTALHPALFQNLSKLELLSLSKNQLTTLPEGIFDTNYNLFNLALHGNPWQCDCHLAYLFNWLQQYTDRLLNIQTYCAGPAYLKGQVVPALNEKQLVCPVTRDHLGFQVTWPDESKAGGSWDLAVQERAARSQCTYSNPEGTVVLACDQAQCRWLNVQLSPQQGSLGLQYNASQEWDLRSSCGSLRLTVSIEARAAGP

SEQ ID NO: 66636 - protein, 313 aa, Homo sapiens
LDQTTMWKRWLALALALVAVAWVRAEEELRSKSKICANVFCGAGRECAVTEKGEPTCLCIEQCKPHKRPVCGSNGKTYLNHCELHRDACLTGSKIQVDYDGHCKEKKSVSPSASPVVCYQSNRDELRRRIIQWLEAEIIPDGWFSKGSNYSEILDKYFKNFDNGDSRLDSSEFLKFVEQNETAINITTYPDQENNKLLRGLCVDALIELSDENADWKLSFQEFLKCLNPSFNPPEKKCALEDETYADGAETEVDCNRCVCACGNWVCTAMTCDGKNQKGAQTQTEEEMTRYVQELQKHQETAEKTKRVSTKEI

SEQ ID NO: 66637 - protein, 640 aa, Homo sapiens
LGPFLLLLLLLLLLPRGFQPQPGGNRTESPEPNATATPAIPTILVTSVTSETPATSAPEAEGPQSGGLPPPPRAVPSSSSPQAQALTEDGRPCRFPFRYGGRMLHACTSEGSAHRKWCATTHNYDRDRAWGYCVEATPPPGGPAALDPCASGPCLNGGSCSNTQDPQSYHCSCPRAFTGKDCGTEKCFDETRYEYLEGGDRWARVRQGHVEQCECFGGRTWCEGTRHTACLSSPCLNGGTCHLIVATGTTVCACPPGFAGRLCNIEPDERCFLGNGTGYRGVASTSASGLSCLAWNSDLLYQELHVDSVGAAALLGLGPHAYCRNPDNDERPWCYVVKDSALSWEYCRLEACESLTRVQLSPDLLATLPEPASPGRQACGRRHKKRTFLRPRIIGGSSSLPGSHPWLAAIYIGDSFCAGSLVHTCWVVSAAHCFSHSPPRDSVSVVLGQHFFNRTTDVTQTFGIEKYIPYTLYSVFNPSDHDLVLIRLKKKGDRCATRSQFVQPICLPEPGSTFPAGHKCQIAGWGHLDENVSGYSSSLREALVPLVADHKCSSPEVYGADISPNMLCAGYFDCKSDACQGDSGGPLACEKNGVAYLYGIISWGDGCGRLHKPGVYTRVANYVDWINDRIRPPRRLVAPS

SEQ ID NO: 66638 - protein, 530 aa, Homo sapiens
RMSVKWTSVILLIQLSFCFSSGNCGKVLVWAAEYSHWMNIKTILDELIQRGHEVTVLASSASILFDPNNSSALKIEIYPTSLTKTELENFIMQQIKRWSDLPKDTFWLYFSQVQEIMSIFGDITRKFCKDVVSNKKFMKKVQESRFDVIFADAIFPCSELLAELFNIPFVYSLSFSPGYTFEKHSGGFIFPPSYVPVVMSELTDQMTFMERVKNMIYVLYFDFWFEIFDMKKWDQFYSEVLGRPTTLSETMGKADVWLIRNSWNFQFPYPLLPNVDFVGGLHCKPAKPLPKEMEDFVQSSGENGVVVFSLGSMVSNMTEERANVIASALAQIPQKVLWRFDGNKPDTLGLNTRLYKWIPQNDLLGHPKTRAFITHGGANGIYEAIYHGIPMVGIPLFADQPDNIAHMKARGAAVRVDFNTMSSTDLLNALKRVINDPSYKENVMKLSRIQHDQPVKPLDRAVFWIEFVMRHKGAKHLRVAAHDLTWFQYHSLDVIGFLLVCVATVIFIVTKCCLFCFWKFARKAKKGKND

SEQ ID NO: 66639 - protein, 14 aa, Homo sapiens
IKLVVLVSASCGCL

SEQ ID NO: 66640 - protein, 467 aa, Homo sapiens
LSLLLLVTSVTLLVARVFQKAVDQSIEKKIVLRNGTEAFDSWEKPPLPVYTQFYFFNVTNPEEILRGETPRVEEVGPYTYRELRNKANIQFGDNGTTISAVSNKAYVFERDQSVGDPKIDLIRTLNIPVLTVIEWSQVHFLREIIEAMLKAYQQKLFVTHTVDELLWGYKDEILSLIHVFRPDISPYFGLFYEKNGTNDGDYVFLTGEDSYLNFTKIVEWNGKTSLDWWITDKCNMINGTDGDSFHPLITKDEVLYVFPSDFCRSVYITFSDYESVQGLPAFRYKVPAEILANTSDNAGFCIPEGNCLGSGVLNVSICKNGAPIIMSFPHFYQADERFVSAIEGMHPNQEDHETFVDINPLTGIILKAAKRFQINIYVKKLDDFVETGDIRTMVFPVMYLNESVHIDKETASRLKSMINTTLIITNIPYIIMALGVFFGLVFTWLACKGQGSMDEGTADERAPLIRT

SEQ ID NO: 66641 - protein, 531 aa, Homo sapiens
RMSLKWTSVFLLIQLSCYFSSGSCGKVLVWPTEYSHWINMKTILEELVQRGHEVTVLTSSASTLVNASKSSAIKLEVYPTSLTKNYLEDSLLKILDRWIYGVSKNTFWSYFSQLQELCWEYYDYSNKLCKDAVLNKKLMMKLQESKFDVILADALNPCGELLAELFNIPFLYSLRFSVGYTFEKNGGGFLFPPSYVPVVMSELSDQMIFMERIKNMIHMLYFDFWFQIYDLKKWDQFYSEVLGRPTTLFETMGKAEMWLIRTYWDFEFPRPFLPNVDFVGGLHCKPAKPLPKEMEEFVQSSGENGIVVFSLGSMISNMSEESANMIASALAQIPQKVLWRFDGKKPNTLGSNTRLYKWLPQNDLLGHPKTKAFITHGGTNGIYEAIYHGIPMVGIPLFADQHDNIAHMKAKGAALSVDIRTMSSRDLLNALKSVINDPVYKENVMKLSRIHHDQPMKPLDRAVFWIEFVMRHKGAKHLRVAAHNLTWIQYHSLDVIAFLLACVATVIFIITKFCLFCFRKLAKKGKKKKRD

SEQ ID NO: 66642 - protein, 16 aa, Homo sapiens
ILVIFFTITRIVLGIL

SEQ ID NO: 66643 - protein, 529 aa, Homo sapiens
RMSMKWTSALLLIQLSCYFSSGSCGKVLVWPTEFSHWMNIKTILDELVQRGHEVTVLASSASISFDPNSPSTLKFEVYPVSLTKTEFEDIIKQLVKRWAELPKDTFWSYFSQVQEIMWTFNDILRKFCKDIVSNKKLMKKLQESRFDVVLADAVFPFGELLAELLKIPFVYSLRFSPGYAIEKHSGGLLFPPSYVPVVMSELSDQMTFIERVKNMIYVLYFEFWFQIFDMKKWDQFYSEVLGRPTTLSETMAKADIWLIRNYWDFQFPHPLLPNVEFVGGLHCKPAKPLPKEMEEFVQSSGENGVVVFSLGSMVSNTSEERANVIASALAKIPQKVLWRFDGNKPDTLGLNTRLYKWIPQNDLLGHPKTRAFITHGGANGIYEAIYHGIPMVGVPLFADQPDNIAHMKAKGAAVSLDFHTMSSTDLLNALKTVINDPLYKENAMKLSRIHHDQPVKPLDRAVFWIEFVMRHKGAKHLRVAAHDLTWFQYHSLDVTGFLLACVATVIFIITKCLFCVWKFVRTGKKGKRD

SEQ ID NO: 66644 - protein, 524 aa, Homo sapiens
VFVVYVVHTCWVMYGIVYTRPCSGDANCIQPYLARRPKLQLSVYTTTRSHLGAENNIDLVLNVEDFDVESKFERTVNVSVPKKTRNNGTLYAYIFLHHAGVLPWHDGKQVHLVSPLTTYMVPKPEEINLLTGESDTQQIEAEKKPTSALDEPVSHWRPRLALNVMADNFVFDGSSLPADVHRYMKMIQLGKTVHYLPILFIDQLSNRVKDLMVINRSTTELPLTVSYDKVSLGRLRFWIHMQDAVYSLQQFGFSEKDADEVKGIFVDTNLYFLALTFFVAAFHLLFDFLAFKNDISFWKKKKSMIGMSTKAVLWRCFSTVVIFLFLLDEQTSLLVLVPAGVGAAIELWKVKKALKMTIFWRGLMPEFQFGTYSESERKTEEYDTQAMKYLSYLLYPLCVGGAVYSLLNIKYKSWYSWLINSFVNGVYAFGFLFMLPQLFVNYKLKSVAHLPWKAFTYKAFNTFIDDVFAFIITMPTSHRLACFRDDVVFLVYLYQRWLYPVDKRRVNEFGESYEEKATRAPHTD

SEQ ID NO: 66645 - protein, 369 aa, Homo sapiens
LMIEFWWLYLTPVTSETVVTEVLGHRVTLPCLYSSWSHNSNSMCWGKDQCPYSGCKEALIRTDGMRVTSRKSAKYRLQGTIPRGDVSLTILNPSESDSGVYCCRIEVPGWFNDVKINVRLNLQRASTTTHRTATTTTRRTTTTSPTTTRQMTTTPAALPTTVVTTPDLTTGTPLQMTTIAVFTTANTCLSLTPSTLPEEATGLLTPEPSKEGPILTAESETVLPSDSWSSVESTSADTVLLTSKESKVWDLPSTSHVSMWKTSDSVSSPQPGASDTAVPEQNKTTKTGQMDGIPMSMKNEMPISQLLMIIAPSLGFVLFALFVAFLLRGKLMETYCSQKHTRLDYIGDSKNVLNDVQHGREDEDGLFTL

SEQ ID NO: 66646 - protein, 926 aa, Homo sapiens
VIWKYPRKMLTLQTWLVQALFIFLTTESTGELLDPCGYISPESPVVQLHSNFTAVCVLKEKCMDYFHVNANYIVWKTNHFTIPKEQYTIINRTASSVTFTDIASLNIQLTCNILTFGQLEQNVYGITIISGLPPEKPKNLSCIVNEGKKMRCEWDGGRETHLETNFTLKSEWATHKFADCKAKRDTPTSCTVDYSTVYFVNIEVWVEAENALGKVTSDHINFDPVYKVKPNPPHNLSVINSEELSSILKLTWTNPSIKSVIILKYNIQYRTKDASTWSQIPPEDTASTRSSFTVQDLKPFTEYVFRIRCMKEDGKGYWSDWSEEASGITYEDRPSKAPSFWYKIDPSHTQGYRTVQLVWKTLPPFEANGKILDYEVTLTRWKSHLQNYTVNATKLTVNLTNDRYLATLTVRNLVGKSDAAVLTIPACDFQATHPVMDLKAFPKDNMLWVEWTTPRESVKKYILEWCVLSDKAPCITDWQQEDGTVHRTYLRGNLAESKCYLITVTPVYADGPGSPESIKAYLKQAPPSKGPTVRTKKVGKNEAVLEWDQLPVDVQNGFIRNYTIFYRTIIGNETAVNVDSSHTEYTLSSLTSDTLYMVRMAAYTDEGGKDGPEFTFTTPKFAQGEIEAIVVPVCLAFLLTTLLGVLFCFNKRDLIKKHIWPNVPDPSKSHIAQWSPHTPPRHNFNSKDQMYSDGNFTDVSVVEIEANDKKPFPEDLKSLDLFKKEKINTEGHSSGIGGSSCMSSSRPSISSSDENESSQNTSSTVQYSTVVHSGYRHQVPSVQVFSRSESTQPLLDSEERPEDLQLVDHVDGGDGILPRQQYFKQNCSQHESSPDISHFERSKQVSSVNEEDFVRLKQQISDHISQSCGSGQMKMFQEVSAADAFGPGTEGQVERFETVGMEAATDEGMPKSYLPQTVRQGGYMPQ

SEQ ID NO: 66647 - protein, 67 aa, Homo sapiens
LEVVVTTPAMWRSLGLALALCLLPSGGTESQDQSSLCKQPPAWSIRDQDPMLNSNGSVTVVALLQAS

SEQ ID NO: 66648 - protein, 29 aa, Homo sapiens
INIYTLFILHTYFFPNNLQLRSEDTTNSA

SEQ ID NO: 66649 - protein, 114 aa, Homo sapiens
IFAAIFVGVLVMSGRGKGGKGLGKGGAKRHRKVLRDNIQGITKPAIRRLARRGGVKRISGLIYEETRGVLKVFLENVIRDAVTYTEHAKRKTVTAMDVVYALKRQGRTLYGFGG

SEQ ID NO: 66650 - protein, 362 aa, Homo sapiens
MAPRTLLLLLSGALALTQTWAGSHSMRYFFTSVSRPGRGEPRFIAVGYVDDTQFVRFDSDAASQRMEPRAPWIEQEGPEYWDQETRNVKAQSQTDRVDLGTLRGYYNQSEAGSHTIQIMYGCDVGSDGRFLRGYRQDAYDGKDYIALNEDLRSWTAADMAAQITKRKWEAAHEAEQLRAYLDGTCVEWLRRYLENGKETLQRTDPPKTHMTHHPISDHEATLRCWALGFYPAEITLTWQRDGEDQTQDTELVETRPAGDGTFQKWAAVVVPSGEEQRYTCHVQHEGLPKPLTLRWELSSQPTIPIVGIIAGLVLLGAVITGAVVAAVMWRRKSSDRKGGSYTQAASSDSAQGSDVSLTACKV

SEQ ID NO: 66651 - protein, 51 aa, Homo sapiens
KKPTGFLIVLQLLEALHLPFLPSQEHGYGRRKAGSRQIFHSLASGFIPLKS

SEQ ID NO: 66652 - protein, 2469 aa, Homo sapiens
LLLLQLLLLVAAPGSTQAQAAPFPELCSYTWEAVDTKNNVLYKINICGSVDIVQCGPSSAVCMHDLKTRTYHSVGDSVLRSATRSLLEFNTTVSCDQQGTNHRVQSSIAFLCGKTLGTPEFVTATECVHYFEWRTTAACKKDIFKANKEVPCYVFDEELRKHDLNPLIKLSGAYLVDDSDPDTSLFINVCRDIDTLRDPGSQLRACPPGTAACLVRGHQAFDVGQPRDGLKLVRKDRLVLSYVREEAGKLDFCDGHSPAVTITFVCPSERREGTIPKLTAKSNCRYEIEWITEYACHRDYLESKTCSLSGEQQDVSIDLTPLAQSGGSSYISDGKEYLFYLNVCGETEIQFCNKKQAAVCQVKKSDTSQVKAAGRYHNQTLRYSDGDLTLIYFGGDECSSGFQRMSVINFECNKTAGNDGKGTPVFTGEVDCTYFFTWDTEYACVKEKEDLLCGATDGKKRYDLSALVRHAEPEQNWEAVDGSQTETEKKHFFINICHRVLQEGKARGCPEDAAVCAVDKNGSKNLGKFISSPMKEKGNIQLSYSDGDDCGHGKKIKTNITLVCKPGDLESAPVLRTSGEGGCFYEFEWHTAAACVLSKTEGENCTVFDSQAGFSFDLSPLTKKNGAYKVETKKYDFYINVCGPVSVSPCQPDSGACQVAKSDEKTWNLGLSNAKLSYYDGMIQLNYRGGTPYNNERHTPRATLITFLCDRDAGVGFPEYQEEDNSTYNFRWYTSYACPEEPLECVVTDPSTLEQYDLSSLAKSEGGLGGNWYAMDNSGEHVTWRKYYINVCRPLNPVPGCNRYASACQMKYEKDQGSFTEVVSISNLGMAKTGPVVEDSGSLLLEYVNGSACTTSDGRQTTYTTRIHLVCSRGRLNSHPIFSLNWECVVSFLWNTEAACPIQTTTDTDQACSIRDPNSGFVFNLNPLNSSQGYNVSGIGKIFMFNVCGTMPVCGTILGKPASGCEAETQTEELKNWKPARPVGIEKSLQLSTEGFITLTYKGPLSAKGTADAFIVRFVCNDDVYSGPLKFLHQDIDSGQGIRNTYFEFETALACVPSPVDCQVTDLAGNEYDLTGLSTVRKPWTAVDTSVDGRKRTFYLSVCNPLPYIPGCQGSAVGSCLVSEGNSWNLGVVQMSPQAAANGSLSIMYVNGDKCGNQRFSTRITFECAQISGSPAFQLQDGCEYVFIWRTVEACPVVRVEGDNCEVKDPRHGNLYDLKPLGLNDTIVSAGEYTYYFRVCGKLSSDVCPTSDKSKVVSSCQEKREPQGFHKVAGLLTQKLTYENGLLKMNFTGGDTCHKVYQRSTAIFFYCDRGTQRPVFLKETSDCSYLFEWRTQYACPPFDLTECSFKDGAGNSFDLSSLSRYSDNWEAITGTGDPEHYLINVCKSLAPQAGTEPCPPEAAACLLGGSKPVNLGRVRDGPQWRDGIIVLKYVDGDLCPDGIRKKSTTIRFTCSESQVNSRPMFISAVEDCEYTFAWPTATACPMKSNEHDDCQVTNPSTGHLFDLSSLSGRAGFTAAYSEKGLVYMSICGENENCPPGVGACFGQTRISVGKANKRLRYVDQVLQLVYKDGSPCPSKSGLSYKSVISFVCRPEARPTNRPMLISLDKQTCTLFFSWHTPLACEQATECSVRNGSSIVDLSPLIHRTGGYEAYDESEDDASDTNPDFYINICQPLNPMHGVPCPAGAAVCKVPIDGPPIDIGRVAGPPILNPIANEIYLNFESSTPCLADKHFNYTSLIAFHCKRGVSMGTPKLLRTSECDFVFEWETPVVCPDEVRMDGCTLTDEQLLYSFNLSSLSTSTFKVTRDSRTYSVGVCTFAVGPEQGGCKDGGVCLLSGTKGASFGRLQSMKLDYRHQDEAVVLSYVNGDRCPPETDDGVPCVFPFIFNGKSYEECIIESRAKLWCSTTADYDRDHEWGFCRHSNSYRTSSIIFKCDEDEDIGRPQVFSEVRGCDVTFEWKTKVVCPPKKLECKFVQKHKTYDLRLLSSLTGSWSLVHNGVSYYINLCQKIYKGPLGCSERASICRRTTTGDVQVLGLVHTQKLGVIGDKVVVTYSKGYPCGGNKTASSVIELTCTKTVGRPAFKRFDIDSCTYYFSWDSRAACAVKPQEVQMVNGTITNPINGKSFSLGDIYFKLFRASGDMRTNGDNYLYEIQLSSITSSRNPACSGANICQVKPNDQHFSRKVGTSDKTKYYLQDGDLDVVFASSSKCGKDKTKSVSSTIFFHCDPLVEDGIPEFSHETADCQYLFSWYTSAVCPLGVGFDSENPGDDGQMHKGLSERSQAVGAVLSLLLVALTCCLLALLLYKKERRETVISKLTTCCRRSSNVSYKYSKVNKEEETDENETEWLMEEIQLPPPRQGKEGQENGHITTKSVKALSSLHGDDQDSEDEVLTIPEVKVHSGRGAGAESSHPVRNAQSNALQEREDDRVGLVRGEKARKGKSSSAQQKTVSSTKLVSFHDDSDEDLLHI

SEQ ID NO: 66653 - protein, 11 aa, Homo sapiens
MVKVSAFLLFG

SEQ ID NO: 66654 - protein, 20 aa, Homo sapiens
LGWWGGLVWVQVGLIELVLC

SEQ ID NO: 66655 - protein, 1342 aa, Homo sapiens
RRTTLCLMFIVIYSSKAALNWNYESTIHPLSLHEHEPAGEEALRQKRAVATKSPTAEEYTVNIEISFENASFLDPIKAYLNSLSFPIHGNNTDQITDILSINVTTVCRPAGNEIWCSCETGYGWPRERCLHNLICQERDVFLPGHHCSCLKELPPNGPFCLLQEDVTLNMRVRLNVGFQEDLMNTSSALYRSYKTDLETAFRKGYGILPGFKGVTVTGFKSGSVVVTYEVKTTPPSLELIHKANEQVVQSLNQTYKMDYNSFQAVTINESNFFVTPEIIFEGDTVSLVCEKEVLSSNVSWRYEEQQLEIQNSSRFSIYTALFNNMTSVSKLTIHNITPGDAGEYVCKLILDIFEYECKKKIDVMPIQILANEEMKVMCDNNPVSLNCCSQGNVNWSKVEWKQEGKINIPGTPETDIDSSCSRYTLKADGTQCPSGSSGTTVIYTCEFISAYGARGSANIKVTFISVANLTITPDPISVSEGQNFSIKCISDVSNYDEVYWNTSAGIKIYQRFYTTRRYLDGAESVLTVKTSTREWNGTYHCIFRYKNSYSIATKDVIVHPLPLKLNIMVDPLEATVSCSGSHHIKCCIEEDGDYKVTFHTGSSSLPAAKEVNKKQVCYKHNFNASSVSWCSKTVDVCCHFTNAANNSVWSPSMKLNLVPGENITCQDPVIGVGEPGKVIQKLCRFSNVPSSPESPIGGTITYKCVGSQWEEKRNDCISAPINSLLQMAKALIKSPSQDEMLPTYLKDLSISIDKAEHEISSSPGSLGAIINILDLLSTVPTQVNSEMMTHVLSTVNVILGKPVLNTWKVLQQQWTNQSSQLLHSVERFSQALQSGDSPPLSFSQTNVQMSSMVIKSSHPETYQQRFVFPYFDLWGNVVIDKSYLENLQSDSSIVTMAFPTLQAILAQDIQENNFAESLVMTTTVSHNTTMPFRISMTFKNNSPSGGETKCVFWNFRLANNTGGWDSSGCYVEEGDGDNVTCICDHLTSFSILMSPDSPDPSSLLGILLDIISYVGVGFSILSLAACLVVEAVVWKSVTKNRTSYMRHTCIVNIAASLLVANTWFIVVAAIQDNRYILCKTACVAATFFIHFFYLSVFFWMLTLGLMLFYRLVFILHETSRSTQKAIAFCLGYGCPLAISVITLGATQPREVYTRKNVCWLNWEDTKALLAFAIPALIIVVVNITITIVVITKILRPSIGDKPCKQEKSSLFQISKSIGVLTPLLGLTWGFGLTTVFPGTNLVFHIIFAILNVFQGLFILLFGCLWDLKVQEALLNKFSLSRWSSQHSKSTSLGSSTPVFSMSSPISRRFNNLFGKTGTYNVSTPEATSSSLENSSSASSLLN

SEQ ID NO: 66656 - protein, 16 aa, Homo sapiens
IAGMQMGSVLLTLAMG

SEQ ID NO: 66657 - protein, 272 aa, Homo sapiens
ISHFPKCVAVFALLALSVGALDTFIAAVYEHAVILPNRTETPVSKEEALLLMNKNIDVLEKAVKLAAKQGAHIIVTPEDGIYGWIFTRESIYPYLEDIPDPGVNWIPCRDPWRFGNTPVQQRLSCLAKDNSIYVVANIGDKKPCNASDSQCPPDGRYQYNTDVVFDSQGKLLARYHKYNLFAPEIQFDFPKDSELVTFDTPFGKFGIFTCFDIFSHDPAVVVVDEFQLTAFSTPQHGTTRCPSSRLFPSIQHGPRPWESIYLLQIPTTPACT

SEQ ID NO: 66658 - protein, 8 aa, Homo sapiens
LKFLVMIL

SEQ ID NO: 66659 - protein, 365 aa, Homo sapiens
KQNLLLACLVISSVTVFYLGQHAMECHHRIEERSQPVKLESTRTTVRTGLDLKANKTFAYHKDMPLIFIGGVPRSGTTLMRAMLDAHPDIRCGEETRVIPRILALKQMWSRSSKEKIRLDEAGVTDEVLDSAMQAFLLEIIVKHGEPAPYLCNKDPFALKSLTYLSRLFPNAKFLLMVRDGRASVHSMISRKVTIAGFDLNSYRDCLTKWNRAIETMYNQCMEVGYKKCMLVHYEQLVLHPERWMRTLLKFLQIPWNHSVLHHEEMIGKAGGVSLSKVERSTDQVIKPVNVGALSKWVGKIPPDVLQDMAVIAPMLAKLGYDPYANPPNYGKPDPKIIENTRRVYKGEFQLPDFLKEKPQTEQVE

SEQ ID NO: 66660 - protein, 13 aa, Homo sapiens
LPAISLPLLLSGV

SEQ ID NO: 66661 - protein, 20 aa, Homo sapiens
IFLPFWSAYVPLQFLFANAV

SEQ ID NO: 66662 - protein, 170 aa, Homo sapiens
KMLLLLLLYYNAEASMCHRWSRAVLFPAAHRPKRSSSLPLNPVLQTSLEEVELLYEFLLAELEISPDLQISIKDEELASLRKASDFRTVCNNVIPKSIPDIRRLSASLSSHPGILKKEDFERTVLTLAYTAYRTALSHGHQKDIWAQSLVSLFQALRHDLMRSSQPGVPP

SEQ ID NO: 66663 - protein, 1794 aa, Homo sapiens
IFQRKMRYWLLPPFLAIVYFCTIVQGQVAPPTRLRYNVISHDSIQISWKAPRGKFGGYKLLVTPTSGGKTNQLNLQNTATKAIIQGLMPDQNYTVQIIAYNKDKESKPAQGQFRIKDLEKRKDPKPRVKVVDRGNGSRPSSPEEVKFVCQTPAIADIVILVDGSWSIGRFNFRLVRHFLENLVTAFDVGSEKTRIGLAQYSGDPRIEWHLNAFSTKDEVIEAVRNLPYKGGNTLTGLALNYIFENSFKPEAGSRTGVSKIGILITDGKSQDDIIPPSRNLRESGVELFAIGVKNADVNELQEIASEPDSTHVYNVAEFDLMHTVVESLTRTLCSRVEEQDREIKASAHAITGPPTELITSEVTARSFMVNWTHAPGNVEKYRVVYYPTRGGKPDEVVVDGTVSSTVLKNLMSLTEYQIAVFAIYAHTASEGLRGTETTLALPMASDLLLYDVTENSMRVKWDAVPGASGYLILYAPLTEGLAGDEKEMKIGETHTDIELSGLLPNTEYTVTVYAMFGEEASDPVTGQETTLALSPPRNLRISNVGSNSARLTWDPTSRQINGYRIVYNNADGTEINEVEVDPITTFPLKGLTPLTEYTIAIFSIYDEGQSEPLTGVFTTEEVPAQQYLEIDEVTTDSFRVTWHPLSADEGLHKLMWIPVYGGKTEEVVLKEEQDSHVIEGLEPGTEYEVSLLAVLDDGSESEVVTAVGTTLDSFWTEPATTIVPTTSVTSVFQTGIRNLVVGDETTSSLRVKWDISDSDVQQFRVTYMTAQGDPEEEVIGTVMVPGSQNNLLLKPLLPDTEYKVTVTPIYTDGEGVSVSAPGKTLPSSGPQNLRVSEEWYNRLRITWDPPSSPVKGYRIVYKPVSVPGPTLETFVGADINTILITNLLSGMDYNVKIFASQASGFSDALTGMVKTLFLGVTNLQAKHVEMTSLCAHWQVHRHATAYRVVIESLQDRQKQESTVGGGTTRHCFYGLQPDSEYKISVYTKLQEIEGPSVSIMEKTQSLPTRPPTFPPTIPPAKEVCKAAKADLVFMVDGSWSIGDENFNKIISFLYSTVGALNKIGTDGTQVAMVQFTDDPRTEFKLNAYKTKETLLDAIKHISYKGGNTKTGKAIKYVRDTLFTAESGTRRGIPKVIVVITDGRSQDDVNKISREMQLDGYSIFAIGVADADYSELVSIGSKPSARHVFFVDDFDAFKKIEDELITFVCETASATCPVVHKDGIDLAGFKMMEMFGLVEKDFSSVEGVSMEPGTFNVFPCYQLHKDALVSQPTRYLHPEGLPSDYTISFLFRILPDTPQEPFALWEILNKNSDPLVGVILDNGGKTLTYFNYDQSGDFQTVTFEGPEIRKIFYGSFHKLHIVVSETLVKVVIDCKQVGEKAMNASANITSDGVEVLGKMVRSRGPGGNSAPFQLQMFDIVCSTSWANTDKCCELPGLRDDESCPDLPHSCSCSETNEVALGPAGPPGGPGLRGPKGQQGEPGPKGPDGPRGEIGLPGPQGPPGPQGPSGLSIQGMPGMPGEKGEKGDTGLPGPQGIPGGVGSPGRDGSPGQRGLPGKDGSSGPPGPPGPIGIPGTPGVPGITGSMGPQGALGPPGVPGAKGERGERGDLQSQAMVRSVARQVCEQLIQSHMARYTAILNQIPSHSSSIRTVQGPPGEPGRPGSPGAPGEQGPPGTPGFPGNAGVPGTPGERGLTGIKGEKGNPGVGTQGPRGPPGPAGPSGESRPGSPGPPGSPGPRGPPGHLGVPGPQGPSGQPGYCDPSSCSAYGVRAPHPDQPEFTPVQDELEAMELWGPGV

SEQ ID NO: 66664 - protein, 213 aa, Homo sapiens
VLGGCPVSYLLLCGQAALLLGNLLLLHCVSRSHSQNATAEPELTSAGAAQPEGPGGAASWEYGDPHSPVILCSYLPDEFIECEDPVDHVGNATASQELGYGCLKFGGQAYSDVEHTSVQCHALDGIECASPRTFLRENKPCIKYTGHYFITTLLYSFFLGCFGVDRFCLGHTGTAVGKLLTLGGLGIWWFVDLILLITGGLMPSDGSNWCTVY

SEQ ID NO: 66665 - protein, 437 aa, Homo sapiens
IRKLFIVLLLLLVTIEEARMSSLSFLNIEKTEILFFTKTEETILVSSSYENKRPNSSHLFVKIEDPKILQMVNVAKKISSDATNFTINLVTDEEGETNVTIQLWDSEGRQERLIEEIKNVKVKVLKQKDSLLQAPMHIDRNILMLILPLILLNKCAFGCKIELQLFQTVWKRPLPVILGAVTQFFLMPFCGFLLSQIVALPEAQAFGVVMTCTCPGGGGGYLFALLLDGDFTLAILMTCTSTLLALIMMPVNSYIYSRILGLSGTFHIPVSKIVSTLLFILVPVSIGIVIKHRIPEKASFLERIIRPLSFILMFVGIYLTFTVGLVFLKTDNLEVILLGLLVPALGLLFGYSFAKVCTLPLPVCKTVAIESGMLNSFLALAVIQLSFPQSKANLASVAPFTVAMCSGCEMLLIILVYKAKKRCIFFLQDKRKRNFLI

SEQ ID NO: 66666 - protein, 35 aa, Homo sapiens
IIGKCCTMPLSVWFLVVAGLGPSDSWRLCRLPASL

SEQ ID NO: 66667 - protein, 904 aa, Homo sapiens
IISLFTFAVGVNICLGFTAHRIKRAEGWEEGPPTVLSDSPWTNISGSCKGRCFELQEAGPPDCRCDNLCKSYTSCCHDFDELCLKTARGWECTKDRCGEVRNEENACHCSEDCLARGDCCTNYQVVCKGESHWVDDDCEEIKAAECPAGFVRPPLIIFSVDGFRASYMKKGSKVMPNIEKLRSCGTHSPYMRPVYPTKTFPNLYTLATGLYPESHGIVGNSMYDPVFDATFHLRGREKFNHRWWGGQPLWITATKQGVKAGTFFWSVVIPHERRILTILQWLTLPDHERPSVYAFYSEQPDFSGHKYGPFGPEESSYGSPFTPAKRPKRKVAPKRRQERPVAPPKKRRRKIHRMDHYAAETRQDKMTNPLREIDKIVGQLMDGLKQLKLHRCVNVIFVGDHGMEDVTCDRTEFLSNYLTNVDDITLVPGTLGRIRSKFSNNAKYDPKAIIANLTCKKPDQHFKPYLKQHLPKRLHYANNRRIEDIHLLVERRWHVARKPLDVYKKPSGKCFFQGDHGFDNKVNSMQTVFVGYGSTFKYKTKVPPFENIELYNVMCDLLGLKPAPNNGTHGSLNHLLRTNTFRPTMPEEVTRPNYPGIMYLQSDFDLGCTCDDKVEPKNKLDELNKRLHTKGSTEERHLLYGRPAVLYRTRYDILYHTDFESGYSEIFLMPLWTSYTVSKQAEVSSVPDHLTSCVRPDVRVSPSFSQNCLAYKNDKQMSYGFLFPPYLSSSPEAKYDAFLVTNMVPMYPAFKRVWNYFQRVLVKKYASERNGVNVISGPIFDYDYDGLHDTEDKIKQYVEGSSIPVPTHYYSIITSCLDFTQPADKCDGPLSVSSFILPHRPDNEESCNSSEDESKWVEELMKMHTARVRDIEHLTSLDFFRKTSRSYPEILTLKTYLHTYESEI

SEQ ID NO: 66668 - protein, 877 aa, Homo sapiens
IISLFTFAVGVNICLGFTAHRIKRAEGWEEGPPTVLSDSPWTNISGSCKGRCFELQEAGPPDCRCDNLCKSYTSCCHDFDELCLKTARGWECTKDRCGEVRNEENACHCSEDCLARGDCCTNYQVVCKGESHWVDDDCEEIKAAECPAGFVRPPLIIFSVDGFRASYMKKGSKVMPNIEKLRSCGTHSPYMRPVYPTKTFPNLYTLATGLYPESHGIVGNSMYDPVFDATFHLRGREKFNHRWWGGQPLWITATKQGVKAGTFFWSVVIPHERRILTILQWLTLPDHERPSVYAFYSEQPDFSGHKYGPFGPEMTNPLREIDKIVGQLMDGLKQLKLHRCVNVIFVGDHGMEDVTCDRTEFLSNYLTNVDDITLVPGTLGRIRSKFSNNAKYDPKAIIANLTCKKPDQHFKPYLKQHLPKRLHYANNRRIEDIHLLVERRWHVARKPLDVYKKPSGKCFFQGDHGFDNKVNSMQTVFVGYGSTFKYKTKVPPFENIELYNVMCDLLGLKPAPNNGTHGSLNHLLRTNTFRPTMPEEVTRPNYPGIMYLQSDFDLGCTCDDKVEPKNKLDELNKRLHTKGSTEAETRKFRGSRNENKENINGNFEPRKERHLLYGRPAVLYRTRYDILYHTDFESGYSEIFLMPLWTSYTVSKQAEVSSVPDHLTSCVRPDVRVSPSFSQNCLAYKNDKQMSYGFLFPPYLSSSPEAKYDAFLVTNMVPMYPAFKRVWNYFQRVLVKKYASERNGVNVISGPIFDYDYDGLHDTEDKIKQYVEGSSIPVPTHYYSIITSCLDFTQPADKCDGPLSVSSFILPHRPDNEESCNSSEDESKWVEELMKMHTARVRDIEHLTSLDFFRKTSRSYPEILTLKTYLHTYESEI

SEQ ID NO: 66669 - protein, 31 aa, Homo sapiens
LNLPQVTWLLPLVTCQLTRSELLLLLCHREW

SEQ ID NO: 66670 - protein, 70 aa, Homo sapiens
MVTRQGALWANTLGSLALLYSAFGVIIEKTRGAEDDLNTVAAGTMTGMLYKCTVSEMALDSPFCVLLSGS

SEQ ID NO: 66671 - protein, 19 aa, Homo sapiens
VCLGLTLGSACSTLLVHLI

SEQ ID NO: 66672 - protein, 41 aa, Homo sapiens
IEFLWCSLACSSVFCISCSVMFKLRNALCGSSESHLWFSRH

SEQ ID NO: 66673 - protein, 287 aa, Homo sapiens
KLREESAARVVLTSLLACLPAGPRVYFLKGGYETFYSEYPECCVDVKPISQEKIESERALISQCGKPVVNVSYRPAYDQGGPVEILPFLYLGSAYHASKCEFLANLHITALLNVSRRTSEACATHLHYKWIPVEDSHTADISSHFQEAIDFIDCVREKGGKVLVHCEAGISRSPTICMAYLMKTKQFRLKEAFDYIKQRRSMVSPNFGFMGQLLQYESEILPSTPNPQPPSCQGEAAGSSLIGHLQTLSPDMQGAYCTFPASVLAPVPTHSTVSELSRSPVATATSC

SEQ ID NO: 66674 - protein, 156 aa, Homo sapiens
TRTPDMRRLLLVTSLVVVLLWEAGAVPAPKVPIKMQVKHWPSEQDPEKAWGARVVEPPEKDDQLVVLFPVQKPKLLTTEEKPRGQGRGPILPGTKAWMETEDTLGHVLSPEPDHDSLYHPPPEEDQGEERPRLWVMPNHQVLLGPEEDQDHIYHPQ

SEQ ID NO: 66675 - protein, 11 aa, Homo sapiens
LTSILFIFQCL

SEQ ID NO: 66676 - protein, 33 aa, Homo sapiens
LWIFSTKIIMTVIFLMEKMKFSEEQIYNLARRL

SEQ ID NO: 66677 - protein, 462 aa, Homo sapiens
KPSKMSDLLSVFLHLLLLFKLVAPVTFRHHRYDDLVRTLYKVQNECPGITRVYSIGRSVEGRHLYVLEFSDHPGIHEPLEPEVKYVGNMHGNEALGRELMLQLSEFLCEEFRNRNQRIVQLIQDTRIHILPSMNPDGYEVAAAQGPNKPGYLVGRNNANGVDLNRNFPDLNTYIYYNEKYGGPNHHLPLPDNWKSQVEPETRAVIRWMHSFNFVLSANLHGGAVVANYPYDKSFEHRVRGVRRTASTPTPDDKLFQKLAKVYSYAHGWMFQGWNCGDYFPDGITNGASWYSLSKGMQDFNYLHTNCFEITLELSCDKFPPEEELQREWLGNREALIQFLEQVHQGIKGMVLDENYNNLANAVISVSGINHDVTSGDHGDYFRLLLPGIYTVSATAPGYDPETVTVTVGPAEPTLVNFHLKRSIPQVSPVRRAPSRRHGVRAKVQPQARKKEMEMRQLQRGPA

SEQ ID NO: 66678 - protein, 261 aa, Homo sapiens
LQGQKDMVWKWMPLLLLLVCVATMCSAQDRTDLLNVCMDAKHHKTKPGPEDKLHDQCSPWKKNACCTASTSQELHKDTSRLYNFNWDHCGKMEPACKRHFIQDTCLYECSPNLGPWIQQVNQSWRKERFLDVPLCKEDCQRWWEDCHTSHTCKSNWHRGWDWTSGVNKCPAGALCRTFESYFPTPAALCEGLWSHSYKVSNYSRGSGRCIQMWFDSAQGNPNEEVARFYAAAMHVNAGEMLHGTGGLLLSLALMLQLWLLG

SEQ ID NO: 66679 - protein, 72 aa, Homo sapiens
VDICITGGLLLLVYYWSKNRKAKAKPVTRGAGAGGRQRGQNKERPPPVPNPDYEPIRKGQRDLYSGLNQRRI

SEQ ID NO: 66680 - protein, 16 aa, Homo sapiens
LFILGALWTLVIINQE

SEQ ID NO: 66681 - protein, 125 aa, Homo sapiens
ISTMKLLTGLVFCSLVLGVSSRSFFSFLGEAFDGARDMWRAYSDMREANYIGSDKYFHARGNYDAAKRGPGGAWAAEVITDARENIQRFFGHGAEDSLADQAANEWGRSGKDPNHFRPAGLPEKY

SEQ ID NO: 66682 - protein, 115 aa, Homo sapiens
RTSASRWWIWRPWAGCWVRCCCWLSLASPSLSTSTMAPGSSAAVAKLRSPSPKALTTRRSSLTTRPTGRPSPAPRTTPSPRRHRCPQSPHPPALPPQAVPLSPPQRPELAEAPRR

SEQ ID NO: 66683 - protein, 718 aa, Homo sapiens
LGCWTQLGLTFLQLLLISSLPREYTVINEACPGAEWNIMCRECCEYDQIECVCPGKREVVGYTIPCCRNEENECDSCLIHPGCTIFENCKSCRNGSWGGTLDDFYVKGFYCAECRAGWYGGDCMRCGQVLRAPKGQILLESYPLNAHCEWTIHAKPGFVIQLRFVMLSLEFDYMCQYDYVEVRDGDNRDGQIIKRVCGNERPAPIQSIGSSLHVLFHSDGSKNFDGFHAIYEEITACSSSPCFHDGTCVLDKAGSYKCACLAGYTGQRCENLLEERNCSDPGGPVNGYQKITGGPGLINGRHAKIGTVVSFFCNNSYVLSGNEKRTCQQNGEWSGKQPICIKACREPKISDLVRRRVLPMQVQSRETPLHQLYSAAFSKQKLQSAPTKKPALPFGDLPMGYQHLHTQLQYECISPFYRRLGSSRRTCLRTGKWSGRAPSCIPICGKIENITAPKTQGLRWPWQAAIYRRTSGVHDGSLHKGAWFLVCSGALVNERTVVVAAHCVTDLGKVTMIKTADLKVVLGKFYRDDDRDEKTIQSLQISAIILHPNYDPILLDADIAILKLLDKARISTRVQPICLAASRDLSTSFQESHITVAGWNVLADVRSPGFKNDTLRSGVVSVVDSLLCEEQHEDHGIPVSVTDNMFCASWEPTAPSDICTAETGGIAAVSFPGRASPEPRWHLMGLVSWSYDKTCSHRLSTAFTKVLPFKDWIERNMK

SEQ ID NO: 66684 - protein, 316 aa, Homo sapiens
LVLLLTSIWTTRLLVQGSLRAEELSIQVSCRIMGITLVSKKANQQLNFTEAKEACRLLGLSLAGKDQVETALKASFETCSYGWVGDGFVVISRISPNPKCGKNGVGVLIWKVPVSRQFAAYCYNSSDTWTNSCIPEIITTKDPIFNTQTATQTTEFIVSDSTYSVASPYSTIPAPTTTPPAPASTSIPRRKKLICVTEVFMETSTMSTETEPFVENKAAFKNEAAGFGGVPTALLVLALLFFGAAAGLGFCYVKRYVKAFPFTNKNQQKEMIETKVVKEEKANDSNPNEESKKTDKNPEESKSPSKTTVRCLEAEV

SEQ ID NO: 66685 - protein, 411 aa, Homo sapiens
IQCGKKLLQPSKQLRMFLKAVVLTLALVAVAGARAEVSADQVATVMWDYFSQLSNNAKEAVEHLQKSELTQQLNALFQDKLGEVNTYAGDLQKKLVPFATELHERLAKDSEKLKEEIGKELEELRARLLPHANEVSQKIGDNLRELQQRLEPYADQLRTQVSTQAEQLRRQLTPYAQRMERVLRENADSLQASLRPHADELKAKIDQNVEELKGRLTPYADEFKVKIDQTVEELRRSLAPYAQDTQEKLNHQLEGLTFQMKKNAEELKARISASAEELRQRLAPLAEDVRGNLRGNTEGLQKSLAELGGHLDQQVEEFRRRVEPYGENFNKALVQQMEQLRQKLGPHAGDVEGHLSFLEKDLRDKVNSFFSTFKEKESQDKTLSLPELEQQQEQQQEQQQEQVQMLAPLES

SEQ ID NO: 66686 - protein, 316 aa, Homo sapiens
LPLLLGALLWAVLWLLRDRQSLPASNAFVFITGCDSGFGRLLALQLDQRGFRVLASCLTPSGAEDLQRVASSRLHTTLLDITDPQSVQQAAKWVEMHVKEAGLFGLVNNAGVAGIIGPTPWLTRDDFQRVLNVNTMGPIGVTLALLPLLQQARGRVINITSVLGRLAANGGGYCVSKFGLEAFSDSLRRDVAHFGIRVSIVEPGFFRTPVTNLESLEKTLQACWARLPPATQAHYGGAFLTKYLKMQQRIMNLICDPDLTKVSRCLEHALTARHPRTRYSPGWDAKLLWLPASYLPASLVDAVLTWVLPKPAQAVY

SEQ ID NO: 66687 - protein, 19 aa, Homo sapiens
MSIWSLISFRLACCLPWAP

SEQ ID NO: 66688 - protein, 24 aa, Homo sapiens
MKSIRKAFVLCGFLYFEFFDQKTD

SEQ ID NO: 66689 - protein, 12 aa, Homo sapiens
MESLFWWMLCSL

SEQ ID NO: 66690 - protein, 243 aa, Homo sapiens
LLIFYYSFAIVGMEFFCGIVFPNCCNTSTVADAYRWRNHTVGNRTVVEEGYYYLNNFDNILNSFVTLFELTVVNNWYIIMEGVTSQTSHWSRLYFMTFYIVTMVVMTIIVAFILEAFVFRMNYSRKNQDSEVDGGITLEKEISKEELVAVLELYREARGASSDVTRLLETLSQMERYQQHSMVFLGRRSRTKSDLSLKMYQEEIQEWYEEHAREQEQQRQLSSSAAPAAQQPPGSRQRSQTVT

SEQ ID NO: 66691 - protein, 62 aa, Homo sapiens
VGILLVLMAVVLASLIYRRRLMKQDFSVPQLPHSSSHWLRLPRIFCSCPIGENSPLLSGQQV

SEQ ID NO: 66692 - protein, 8 aa, Homo sapiens
LTLLLWLG

SEQ ID NO: 66693 - protein, 53 aa, Homo sapiens
VYYKIPALWMPSTWSLMSFCCLSLFQYCLLGGGAKAQKYKFTTTHGFIFRDIT

SEQ ID NO: 66694 - protein, 497 aa, Homo sapiens
RALNFLFYLALVAAAAFSGWCVHHVLEEVQQVRRSHQDFSRQREELGQGLQGVEQKVQSLQATFGTFESILRSSQHKQDLTEKAVKQGESEVSRISEVLQKLQNEILKDLSDGIHVVKDARERDFTSLENTVEERLTELTKSINDNIAIFTEVQKRSQKEINDMKAKVASLEESEGNKQDLKALKEAVKEIQTSAKSREWDMEALRSTLQTMESDIYTEVRELVSLKQEQQAFKEAADTERLALQALTEKLLRSEESVSRLPEEIRRLEEELRQLKSDSHGPKEDGGFRHSEAFEALQQKSQGLDSRLQHVEDGVLSMQVASARQTESLESLLSKSQEHEQRLAALQGRLEGLGSSEADQDGLASTVRSLGETQLVLYGDVEELKRSVGELPSTVESLQKVQEQVHTLLSQDQAQAARLPPQDFLDRLSSLDNLKASVSQVEADLKMLRTAVDSLVAYSVKIETNENNLESAKGLLDDLRNDLDRLFVKVEKIHEKV

SEQ ID NO: 66695 - protein, 49 aa, Homo sapiens
RLNLRWALSVLCVLLMAETVSGTRGSSTGAHISPQFPASVPQGVWPECL

SEQ ID NO: 66696 - protein, 9 aa, Homo sapiens
IFFGKVFLV

SEQ ID NO: 66697 - protein, 30 aa, Homo sapiens
VTTLSLLLAPVLWRAAITRCVPRPERRSSL

SEQ ID NO: 66698 - protein, 32 aa, Homo sapiens
ILAKRLRAVLAFAATWLGQLTQVSCLPSSACL

SEQ ID NO: 66699 - protein, 15 aa, Homo sapiens
VSFAIILLFLNADGQ

SEQ ID NO: 66700 - protein, 57 aa, Homo sapiens
KKNKLRTTLYVHLQMPQLMLVGCLSAFCDNEHMDFCLLNSVDPFSQLPGAWIFTSNC

SEQ ID NO: 66701 - protein, 435 aa, Homo sapiens
LTLVVAACGFVLWSSNGRQRKNEALAPPLLDAEPARGAGGRGGDHPSVAVGIRRVSNVSAASLVPAVPQPEADNLTLRYRSLVYQLNFDQTLRNVDKAGTWAPRELVLVVQVHNRPEYLRLLLDSLRKAQGIDNVLVIFSHDFWSTEINQLIAGVNFCPVLQVFFPFSIQLYPNEFPGSDPRDCPRDLPKNAALKLGCINAEYPDSFGHYREAKFSQTKHHWWWKLHFVWERVKILRDYAGLILFLEEDHYLAPDFYHVFKKMWKLKQQECPECDVLSLGTYSASRSFYGMADKVDVKTWKSTEHNMGLALTRNAYQKLIECTDTFCTYDDYNWDWTLQYLTVSCLPKFWKVLVPQIPRIFHAGDCGMHHKKTCRPSTQSAQIESLLNNNKQYMFPETLTISEKFTVVAISPPRKNGGWGDIRDHELCKSYRRLQ

SEQ ID NO: 66702 - protein, 299 aa, Homo sapiens
RIAPKSTSVFAVASVGHGVFLPLVILCTLLGDGLASVCPLPPEPENGGYICHPRPCRDPLTAGSVIEYLCAEGYMLKGDYKYLTCKNGEWKPAMEISCRLNEDKDTHTSLGVPTLSIVASTASSVALILLLVVLFVLLQPKLKSFHHSRRDQGVSGDQVSIMVDGVQVALPSYEEAVYGSSGHCVPPADPRVQIVLSEGSGPSGRSVPREQQLPDQGACSSAGGEDEAPGQSGLCEAWGSRASETVMVHQATTSSWVAGSGNRQLAHKETADSENSDIQSLLSLTSEEYTDDIPLLKEA

SEQ ID NO: 66703 - protein, 434 aa, Homo sapiens
LPARCARLLTPHLLLVLVQLSPARGHRTTGPRFLISDRDPQCNLHCSRTQPKPICASDGRSYESMCEYQRAKCRDPTLGVVHRGRCKDAGQSKCRLERAQALEQAKKPQEAVFVPECGEDGSFTQVQCHTYTGYCWCVTPDGKPISGSSVQNKTPVCSGSVTDKPLSQGNSGRKDDGSKPTPTMETQPVFDGDEITAPTLWIKHLVIKDSKLNNTNIRNSEKVYSCDQERQSALEEAQQNPREGIVIPECAPGGLYKPVQCHQSTGYCWCVLVDTGRPLPGTSTRYVMPSCESDARAKTTEADDPFKDRELPGCPEGKKMEFITSLLDALTTDMVQAINSAAPTGGGRFSEPDPSHTLEERVVHWYFSQLDSNSSNDINKREMKPFKRYVKKKAKPKKCARRFTDYCDLNKDKVISLPELKGCLGVSKEVGRLV

SEQ ID NO: 66704 - protein, 435 aa, Homo sapiens
LCRLRVQRMHLIDYLLLLLVGLLALSHGQLHVEHDGESCSNSSHQQILETGEGSPSLKIAPANADFAFRFYYLIASETPGKNIFFSPLSISAAYAMLSLGACSHSRSQILEGLGFNLTELSESDVHRGFQHLLHTLNLPGHGLETRVGSALFLSHNLKFLAKFLNDTMAVYEAKLFHTNFYDTVGTIQLINDHVKKETRGKIVDLVSELKKDVLMVLVNYIYFKALWEKPFISSRTTPKDFYVDENTTVRVPMMLQDQEHHWYLHDRYLPCSVLRMDYKGDATVFFILPNQGKMREIEEVLTPEMLMRWNNLLRKRNFYKKLELHLPKFSISGSYVLDQILPRLGFTDLFSKWADLSGITKQQKLEASKSFHKATLDVDEAGTEAAAATSFAIKFFSAQTNRHILRFNRPFLVVIFSTSTQSVLFLGKVVDPTKP

SEQ ID NO: 66705 - protein, 415 aa, Homo sapiens
TGHKQRTATMQLFLLLCLVLLSPQGASLHRHHPREMKKRVEDLHVGATVAPSSRRDFTFDLYRALASAAPSQSIFFSPVSISMSLAMLSLGAGSSTKMQILEGLGLNLQKSSEKELHRGFQQLLQELNQPRDGFQLSLGNALFTDLVVDLQDTFVSAMKTLYLADTFPTNFRDSAGAMKQINDYVAKQTKGKIVDLLKNLDSNAVVIMVNYIFFKAKWETSFNHKGTQEQDFYVTSETVVRVPMMSREDQYHYLLDRNLSCRVVGVPYQGNATALFILPSEGKMQQVENGLSEKTLRKWLKMFKKRQLELYLPKFSIEGSYQLEKVLPSLGISNVFTSHADLSGISNHSNIQVSEMVHKAVVEVDESGTRAAAATGTIFTFRSARLNSQRLVFNRPFLMFIVDNNILFLGKVNRP

SEQ ID NO: 66706 - protein, 7 aa, Homo sapiens
LKLWFLL

SEQ ID NO: 66707 - protein, 46 aa, Homo sapiens
KFCLRWLALVALSFIVPCMCCYVPLRMCHRCGEACGCCGGKHKAAG

SEQ ID NO: 66708 - protein, 604 aa, Homo sapiens
IIICALFTLVTVLLWNKCSSDKAIQFPRRSSSGFRVDGFEKRAAASESNNYMNHVAKQQSEEAFPQEQQKAPPVVGGFNSNVGSKVLGLKYEEIDCLINDEHTIKGRREGNEVFLPFTWVEKYFDVYGKVVQYDGYDRFEFSHSYSKVYAQRAPYHPDGVFMSFEGYNVEVRDRVKCISGVEGVPLSTQWGPQGYFYPIQIAQYGLSHYSKNLTEKPPHIEVYETAEDRDKNKPNDWTVPKGCFMANVADKSRFTNVKQFIAPETSEGVSLQLGNTKDFIISFDLKFLTNGSVSVVLETTEKNQLFTIHYVSNAQLIAFKERDIYYGIGPRTSWSTVTRDLVTDLRKGVGLSNTKAVKPTKIMPKKVVRLIAKGKGFLDNITISTTAHMAAFFAASDWLVRNQDEKGGWPIMVTRKLGEGFKSLEPGWYSAMAQGQAISTLVRAYLLTKDHIFLNSALRATAPYKFLSEQHGVKAVFMNKHDWYEEYPTTPSSFVLNGFMYSLIGLYDLKETAGEKLGKEARSLYERGMESLKAMLPLYDTGSGTIYDLRHFMLGIAPNLARWDYHTTHINQLQLLSTIDESPVFKEFVKRWKSYLKGSRAKHN

SEQ ID NO: 66709 - protein, 45 aa, Homo sapiens
IQGFRFCLGFPFLSFLFFFFLQGVRRELGVSTSLPFGSCGKSPCS

SEQ ID NO: 66710 - protein, 66 aa, Homo sapiens
LITLILCSFLSAVCVCVRACVFSSSPPPLPELPPFSGCRTAFFPLFHSFSPSFSPPSAHEGCASRW

SEQ ID NO: 66711 - protein, 25 aa, Homo sapiens
VLVLPVLLLMLALFPMTCKLDRREK

SEQ ID NO: 66712 - protein, 831 aa, Homo sapiens
VPWHLPMGWLCSGLLFPVSCLVLLQVASSGNMKVLQEPTCVSDYMSISTCEWKMNGPTNCSTELRLLYQLVFLLSEAHTCIPENNGGAGCVCHLLMDDVVSADNYTLDLWAGQQLLWKGSFKPSEHVKPRAPGNLTVHTNVSDTLLLTWSNPYPPDNYLYNHLTYAVNIWSENDPADFRIYNVTYLEPSLRIAASTLKSGISYRARVRAWAQCYNTTWSEWSPSTKWHNSYREPFEQHLLLGVSVSCIVILAVCLLCYVSITKIKKEWWDQIPNPARSRLVAIIIQDAQGSQWEKRSRGQEPAKCPHWKNCLTKLLPCFLEHNMKRDEDPHKAAKEMPFQGSGKSAWCPVEISKTVLWPESISVVRCVELFEAPVECEEEEEVEEEKGSFCASPESSRDDFQEGREGIVARLTESLFLDLLGEENGGFCQQDMGESCLLPPSGSTSAHMPWDEFPSAGPKEAPPWGKEQPLHLEPSPPASPTQSPDNLTCTETPLVIAGNPAYRSFSNSLSQSPCPRELGPDPLLARHLEEVEPEMPCVPQLSEPTTVPQPEPETWEQILRRNVLQHGAAAAPVSAPTSGYQEFVHAVEQGGTQASAVVGLGPPGEAGYKAFSSLLASSAVSPEKCGFGASSGEEGYKPFQDLIPGCPGDPAPVPVPLFTFGLDREPPRSPQSSHLPSSSPEHLGLEPGEKVEDMPKPPLPQEQATDPLVDSLGSGIVYSALTCHLCGHLKQCHGQEDGGQTPVMASPCCGCCCGDRSSPPTTPLRAPDPSPGGVPLEASLCPASLAPSGISEKSKSSSSFHPAPGNAQSSSQTPKIVNFVSVGPTYMRVS

SEQ ID NO: 66713 - protein, 16 aa, Homo sapiens
IIAVLMWLPSSVILSL

SEQ ID NO: 66714 - protein, 21 aa, Homo sapiens
VAGSLCVLQIVTLMVAPVFHD

SEQ ID NO: 66715 - protein, 160 aa, Homo sapiens
RTRVGRPAALRLLLLLGAVLNPHEALAQPLPTTGTPGSEGGTVKNYETAVQFCWNHYKDQMDPIEKDWCDWAMISRPYSTLRDCLEHFAELFDLGFPNPLAERIIFETHQIHFANCSLVQPTFSDPPEDVLLAMIIAPICLIPFLITLVVWRSKDSEAQA

SEQ ID NO: 66716 - protein, 88 aa, Homo sapiens
KGLAAALLVLVCTMALCSCAQVGTNKELCCLVYTSWQIPQKFIVDYSETSPQCPKPGVILLTKRGRQICADPNKKWVQKYISDLKLNA

SEQ ID NO: 66717 - protein, 19 aa, Homo sapiens
LFFFSFFFFKSSFPFFCSI

SEQ ID NO: 66718 - protein, 40 aa, Homo sapiens
ILLLILPVILGWKTLSGRLSWEALMTKLRIMELSCPSLWE

SEQ ID NO: 66719 - protein, 31 aa, Homo sapiens
RVKAVLLGATFLIDYMFFEKRGGAGPSAVTS

SEQ ID NO: 66720 - protein, 106 aa, Homo sapiens
LTLEPTFHHLLPIMQVSTAALAVLLCTMALCNQVLSAPLAADTPTACCFSYTSRQIPQNFIADYFETSSQCSKPSVIFLTKRGRQVCADPSEEWVQKYVSDLELSA

SEQ ID NO: 66721 - protein, 109 aa, Homo sapiens
VAALSCLMLVAVLGSQAQFTNDAETELMMSKLPLENPVVLNSFHFAADCCTSYISQSIPCSLMKSYFETSSECSKPGVIFLTKKGRQVCAKPSGPGVQDCMKKLKPYSI

SEQ ID NO: 66722 - protein, 133 aa, Homo sapiens
VAALSCLMLVTALGSQARVTKDAETEFMMSKLPLENPVLLDMLWRRKIGPQMTLSHAAGFHATSADCCISYTPRSIPCSLLESYFETNSECSKPGVIFLTKKGRRFCANPSDKQVQVCMRMLKLDTRIKTRKN

SEQ ID NO: 66723 - protein, 37 aa, Homo sapiens
LVAFWCLRLLWPLLSLWRQMMLEIDFGFSWSWNLCNV

SEQ ID NO: 66724 - protein, 461 aa, Homo sapiens
LQLSRASMAAWKSWTALRLCATVVVLDMVVCKGFVEDLDESFKENRNDDIWLVDFYAPWCGHCKKLEPIWNEVGLEMKSIGSPVKVGKMDATSYSSIASEFGVRGYPTIKLLKGDLAYNYRGPRTKDDIIEFAHRVSGALIRPLPSQQMFEHMQKRHRVFFVYVGGESPLKEKYIDAASELIVYTYFFSASEEVVPEYVTLKEMPAVLVFKDETYFVYDEYEDGDLSSWINRERFQNYLAMDGFLLYELGDTGKLVALAVIDEKNTSVEHTRLKSIIQEVARDYRDLFHRDFQFGHMDGNDYINTLLMDELTVPTVVVLNTSNQQYFLLDRQIKNVEDMVQFINNILDGTVEAQGGDSILQRLKRIVFDAKSTIVSIFKSSPLMGCFLFGLPLGVISIMCYGIYTADTDGGYIEERYEVSKSENENQEQIEESKEQQEPSSGGSVVPTVQEPKDVLEKKKD

SEQ ID NO: 66725 - protein, 331 aa, Homo sapiens
LLLAAAFLVAFVLLLYMVSPLISPKPLALPGAHVVVTGGSSGIGKCIAIECYKQGAFITLVARNEDKLLQAKKEIEMHSINDKQVVLCISVDVSQDYNQVENVIKQAQEKLGPVDMLVNCAGMAVSGKFEDLEVSTFERLMSINYLGSVYPSRAVITTMKERRVGRIVFVSSQAGQLGLFGFTAYSASKFAIRGLAEALQMEVKPYNVYITVAYPPDTDTPGFAEENRTKPLETRLISETTSVCKPEQVAKQIVKDAIQGNFNSSLGSDGYMLSALTCGMAPVTSITEGLQQVVTMGLFRTIALFYLGSFDSIVRRCMMQREKSENADKTA

SEQ ID NO: 66726 - protein, 903 aa, Homo sapiens
IAGALRTLLPLLAALLQASVEASGEIALCKTGFPEDVYSAVLSKDVHEGQPLLNVKFSNCNGKRKVQYESSEPADFKVDEDGMVYAVRSFPLSSEHAKFLIYAQDKETQEKWQVAVKLSLKPTLTEESVKESAEVEEIVFPRQFSKHSGHLQRQKRDWVIPPINLPENSRGPFPQELVRIRSDRDKNLSLRYSVTGPGADQPPTGIFIINPISGQLSVTKPLDREQIARFHLRAHAVDINGNQVENPIDIVINVIDMNDNRPEFLHQVWNGTVPEGSKPGTYVMTVTAIDADDPNALNGMLRYRIVSQAPSTPSPNMFTINNETGDIITVAAGLDREKVQQYTLIIQATDMEGNPTYGLSNTATAVITVTDVNDNPPEFTAMTFYGEVPENRVDIIVANLTVTDKDQPHTPAWNAVYRISGGDPTGRFAIQTDPNSNDGLVTVVKPIDFETNRMFVLTVAAENQVPLAKGIQHPPQSTATVSVTVIDVNENPYFAPNPKIIRQEEGLHAGTMLTTFTAQDPDRYMQQNIRYTKLSDPANWLKIDPVNGQITTIAVLDRESPNVKNNIYNATFLASDNGIPPMSGTGTLQIYLLDINDNAPQVLPQEAETCETPDPNSINITALDYDIDPNAGPFAFDLPLSPVTIKRNWTITRLNGDFAQLNLKIKFLEAGIYEVPIIITDSGNPPKSNISILRVKVCQCDSNGDCTDVDRIVGAGLGTGAIIAILLCIIILLILVLMFVVWMKRRDKERQAKQLLIDPEDDVRDNILKYDEEGGGEEDQDYDLSQLQQPDTVEPDAIKPVGIRRMDERPIHAEPQYPVRSAAPHPGDIGDFINEGLKAADNDPTAPPYDSLLVFDYEGSGSTAGSLSSLNSSSSGGEQDYDYLNDWGPRFKKLADMYGGGDD

SEQ ID NO: 66727 - protein, 25 aa, Homo sapiens
MKTIFSMLLSLSLNLAPTRFGRRRM

SEQ ID NO: 66728 - protein, 57 aa, Homo sapiens
MAVAGLVLVALLAILVENWHSHTALNKEASADVAEPSWSQQMCQPGLTFARTPSVCK

SEQ ID NO: 66729 - protein, 104 aa, Homo sapiens
LDTMGTRLLPALFLVLLVLGFEVQGTQQPQQDEMPSPTFLTQVKESLSSYWESAKTAAQNLYEKTYLPAVDEKLRDLYSKSTAAMSTYTGIFTDQVLSVLKGEE

SEQ ID NO: 66730 - protein, 613 aa, Homo sapiens
LLLLAVLLAAHPDAQAEVRLSVPPLVEVMRGKSVILDCTPTGTHDHYMLEWFLTDRSGARPRLASAEMQGSELQVTMHDTRGRSPPYQLDSQGRLVLAEAQVGDERDYVCVVRAGAAGTAEATARLNVFAKPEATEVSPNKGTLSVMEDSAQEIATCNSRNGNPAPKITWYRNGQRLEVPVEMNPEGYMTSRTVREASGLLSLTSTLYLRLRKDDRDASFHCAAHYSLPEGRHGRLDSPTFHLTLHYPTEHVQFWVGSPSTPAGWVREGDTVQLLCRGDGSPSPEYTLFRLQDEQEEVLNVNLEGNLTLEGVTRGQSGTYGCRVEDYDAADDVQLSKTLELRVAYLDPLELSEGKVLSLPLNSSAVVNCSVHGLPTPALRWTKDSTPLGDGPMLSLSSITFDSNGTYVCEASLPTVPVLSRTQNFTLLVQGSPELKTAEIEPKADGSWREGDEVTLICSARGHPDPKLSWSQLGGSPAEPIPGRQGWVSSSLTLKVTSALSRDGISCEASNPHGNKRHVFHFGTVSPQTSQAGVAVMAVAVSVGLLLLVVAVFYCVRRKGGPCCRQRREKGAPPPGEPGLSHSGSEQPEQTGLLMGGASGGARGGSGGFGDEC

SEQ ID NO: 66731 - protein, 49 aa, Homo sapiens
VVTIVLALMYVFREHQRSGSYHVREESTYLPLTSMQPTEAMGEEPSRAE

SEQ ID NO: 66732 - protein, 1655 aa, Homo sapiens
LLLLLLTHLPLALGSPMYSIITPNILRLESEETMVLEAHDAQGDVPVTVTVHDFPGKKLVLSSEKTVLTPATNHMGNVTFTIPANREFKSEKGRNKFVTVQATFGTQVVEKVVLVSLQSGYLFIQTDKTIYTPGSTVLYRIFTVNHKLLPVGRTVMVNIENPEGIPVKQDSLSSQNQLGVLPLSWDIPELVNMGQWKIRAYYENSPQQVFSTEFEVKEYVLPSFEVIVEPTEKFYYIYNEKGLEVTITARFLYGKKVEGTAFVIFGIQDGEQRISLPESLKRIPIEDGSGEVVLSRKVLLDGVQNPRAEDLVGKSLYVSATVILHSGSDMVQAERSGIPIVTSPYQIHFTKTPKYFKPGMPFDLMVFVTNPDGSPAYRVPVAVQGEDTVQSLTQGDGVAKLSINTHPSQKPLSITVRTKKQELSEAEQATRTMQALPYSTVGNSNNYLHLSVLRTELRPGETLNVNFLLRMDRAHEAKIRYYTYLIMNKGRLLKAGRQVREPGQDLVVLPLSITTDFIPSFRLVAYYTLIGASGQREVVADSVWVDVKDSCVGSLVVKSGQSEDRQPVPGQQMTLKIEGDHGARVVLVAVDKGVFVLNKKNKLTQSKIWDVVEKADIGCTPGSGKDYAGVFSDAGLTFTSSSGQQTAQRAELQCPQPAARRRRSVQLTEKRMDKVGKYPKELRKCCEDGMRENPMRFSCQRRTRFISLGEACKKVFLDCCNYITELRRQHARASHLGLARSNLDEDIIAEENIVSRSEFPESWLWNVEDLKEPPKNGISTKLMNIFLKDSITTWEILAVSMSDKKGICVADPFEVTVMQDFFIDLRLPYSVVRNEQVEIRAVLYNYRQNQELKVRVELLHNPAFCSLATTKRRHQQTVTIPPKSSLSVPYVIVPLKTGLQEVEVKAAVYHHFISDGVRKSLKVVPEGIRMNKTVAVRTLDPERLGREGVQKEDIPPADLSDQVPDTESETRILLQGTPVAQMTEDAVDAERLKHLIVTPSGCGEQNMIGMTPTVIAVHYLDETEQWEKFGLEKRQGALELIKKGYTQQLAFRQPSSAFAAFVKRAPSTWLTAYVVKVFSLAVNLIAIDSQVLCGAVKWLILEKQKPDGVFQEDAPVIHQEMIGGLRNNNEKDMALTAFVLISLQEAKDICEEQVNSLPGSITKAGDFLEANYMNLQRSYTVAIAGYALAQMGRLKGPLLNKFLTTAKDKNRWEDPGKQLYNVEATSYALLALLQLKDFDFVPPVVRWLNEQRYYGGGYGSTQATFMVFQALAQYQKDAPDHQELNLDVSLQLPSRSSKITHRIHWESASLLRSEETKENEGFTVTAEGKGQGTLSVVTMYHAKAKDQLTCNKFDLKVTIKPAPETEKRPQDAKNTMILEICTRYRGDQDATMSILDISMMTGFAPDTDDLKQLANGVDRYISKYELDKAFSDRNTLIIYLDKVSHSEDDCLAFKVHQYFNVELIQPGAVKVYAYYNLEESCTRFYHPEKEDGKLNKLCRDELCRCAEENCFIQKSDDKVTLEERLDKACEPGVDYVYKTRLVKVQLSNDFDEYIMAIEQTIKSGSDEVQVGQQRTFISPIKCREALKLEEKKHYLMWGLSSDFWGEKPNLSYIIGKDTWVEHWPEEDECQDEENQKQCQDLGAFTESMVVFGCPN

SEQ ID NO: 66733 - protein, 570 aa, Homo sapiens
LLVLLLLGPGGWCLAEPPRDSLREELVITPLPSGDVAATFQFRTRWDSELQREGVSHYRLFPKALGQLISKYSLRELHLSFTQGFWRTRYWGPPFLQAPSGAELWVWFQDTVTDVDKSWKELSNVLSGIFCASLNFIDSTNTVTPTASFKPLGLANDTDHYFLRYAVLPREVVCTENLTPWKKLLPCSSKAGLSVLLKADRLFHTSYHSQAVHIRPVCRNARCTSISWELRQTLSVVFDAFITGQGKKDWSLFRMFSRTLTEPCPLASESRVYVDITTYNQDNETLEVHPPPTTTYQDVILGTRKTYAIYDLLDTAMINNSRNLNIQLKWKRPPENEAPPVPFLHAQRYVSGYGLQKGELSTLLYNTHPYRAFPVLLLDTVPWYLRLYVHTLTITSKGKENKPSYIHYQPAQDRLQPHLLEMLIQLPANSVTKVSIQFERALLKWTEYTPDPNHGFYVSPSVLSALVPSMVAAKPVDWEESPLFNSLFPVSDGSNYFVRLYTEPLLVNLPTPDFSMPYNVICLTCTVVAVCYGSFYNLLTRTFHIEEPRTGGLAKRLANLIRRARGVPPL

SEQ ID NO: 66734 - protein, 8 aa, Homo sapiens
IMAIILAI

SEQ ID NO: 66735 - protein, 15 aa, Homo sapiens
IIIVLIVVLVGVKSR

SEQ ID NO: 66736 - protein, 20 aa, Homo sapiens
IVFIIHSFLSAKVTRLGLLA

SEQ ID NO: 66737 - protein, 55 aa, Homo sapiens
LLTAVVWGLVLWLFEYHRSTLQPSLQSSMTYLYEDSNVWHDISDFLVYNKSRPSN

SEQ ID NO: 66738 - protein, 15 aa, Homo sapiens
LKMFFMLVEALMSLY

SEQ ID NO: 66739 - protein, 194 aa, Homo sapiens
ILGVVAGALIADFLSGLVHWGADTWGSVELPIVGKAFIRPFREHHIDPTAITRHDFIETNGDNCLVTLLPLLNMAYKFRTHSPEALEQLYPWECFVFCLIIFGTFTNQIHKWSHTYFGLPRWVTLLQDWHVILPRKHHRIHHVSPHETYFCITTGWLNYPLEKIGFWRRLEDLIQGLTGEKPRADDMKWAQKIK

SEQ ID NO: 66740 - protein, 656 aa, Homo sapiens
KTSTLLTMISAAWSIFLIGTKIGLFLQVAPLSVMAKSCPSVCRCDAGFIYCNDRFLTSIPTGIPEDATTLYLQNNQINNAGIPSDLKNLLKVERIYLYHNSLDEFPTNLPKYVKELHLQENNIRTITYDSLSKIPYLEELHLDDNSVSAVSIEEGAFRDSNYLRLLFLSRNHLSTIPWGLPRTIEELRLDDNRISTISSPSLQGLTSLKRLVLDGNLLNNHGLGDKVFFNLVNLTELSLVRNSLTAAPVNLPGTNLRKLYLQDNHINRVPPNAFSYLRQLYRLDMSNNNLSNLPQGIFDDLDNITQLILRNNPWYCGCKMKWVRDWLQSLPVKVNVRGLMCQAPEKVRGMAIKDLNAELFDCKDSGIVSTIQITTAIPNTVYPAQGQWPAPVTKQPDIKNPKLTKDHQTTGSPSRKTITITVKSVTSDTIHISWKLALPMTALRLSWLKLGHSPAFGSITETIVTGERSEYLVTALEPDSPYKVCMVPMETSNLYLFDETPVCIETETAPLRMYNPTTTLNREQEKEPYKNPNLPLAAIIGGAVALVTIALLALVCWYVHRNGSLFSRNCAYSKGRRRKDDYAEAGTKKDNSILEIRETSFQMLPISNEPISKEEFVIHTIFPPNGMNLYKNNHSESSSNRSYRDSGIPDSDHSHS

SEQ ID NO: 66741 - protein, 119 aa, Homo sapiens
LLALALIGLIIFCCRKKRREEKYEKEVHHDIREDVPPPKSRTSTARSYIGSNHSSLGSMSPSNMEGYSKTQYNQVPSEDFERTPQSPTLPPAKVAAPNLSRMGAIPVMIPAQSKDGSIV

SEQ ID NO: 66742 - protein, 106 aa, Homo sapiens
LLALALIGLIIFCCRKKRREEKYEKEVHHDIREDVPPPKSRTSTARSYIGSNHSSLGSMSPSNMEGYSKTQYNQVPSEDFERTPQSPTLPPAKFKYPYKTDGITVV

SEQ ID NO: 66743 - protein, 1012 aa, Homo sapiens
VLLLWGILGAIQAQQQEVISPDTTERNNNCPEKTDCPIHVYFVLDTSESVTMQSPTDILLFHMKQFVPQFISQLQNEFYLDQVALSWRYGGLHFSDQVEVFSPPGSDRASFIKNLQGISSFRRGTFTDCALANMTEQIRQDRSKGTVHFAVVITDGHVTGSPCGGIKLQAERAREEGIRLFAVAPNQNLKEQGLRDIASTPHELYRNDYATMLPDSTEIDQDTINRIIKVMKHEAYGECYKVSCLEIPGPSGPKGYRGQKGAKGNMGEPGEPGQKGRQGDPGIEGPIGFPGPKGVPGFKGEKGEFGADGRKGAPGLAGKNGTDGQKGKLGRIGPPGCKGDPGNRGPDGYPGEAGSPGERGDQGGKGDPGRPGRRGPPGEIGAKGSKGYQGNSGAPGSPGVKGAKGGPGPRGPKGEPGRRGDPGTKGSPGSDGPKGEKGDPGPEGPRGLAGEVGNKGAKGDRGLPGPRGPQGALGEPGKQGSRGDPGDAGPRGDSGQPGPKGDPGRPGFSYPGPRGAPGEKGEPGPRGPEGGRGDFGLKGEPGRKGEKGEPADPGPPGEPGPRGPRGVPGPEGEPGPPGDPGLTECDVMTYVRETCGCCDCEKRCGALDVVFVIDSSESIGYTNFTLEKNFVINVVNRLGAIAKDPKSETGTRVGVVQYSHEGTFEAIQLDDERIDSLSSFKEAVKNLEWIAGGTWTPSALKFAYDRLIKESRRQKTRVFAVVITDGRHDPRDDDLNLRALCDRDVTVTAIGIGDMFHEKHESENLYSIACDKPQQVRNMTLFSDLVAEKFIDDMEDVLCPDPQIVCPDLPCQTELSVAQCTQRPVDIVFLLDGSERLGEQNFHKARRFVEQVARRLTLARRDDDPLNARVALLQFGGPGEQQVAFPLSHNLTAIHEALETTQYLNSFSHVGAGVVHAINAIVRSPRGGARRHAELSFVFLTDGVTGNDSLHESAHSMRKQNVVPTVLALGSDVDMDVLTTLSLGDRAAVFHEKDYDSLAQPGFFDRFIRWIC

SEQ ID NO: 66744 - protein, 11 aa, Homo sapiens
LALMCTRILLF

SEQ ID NO: 66745 - protein, 768 aa, Homo sapiens
LGLRPPLLALVGLLSLGCVLSQECTKFKVSSCRECIESGPGCTWCQKLNFTGPGDPDSIRCDTRPQLLMRGCAADDIMDPTSLAETQEDHNGGQKQLSPQKVTLYLRPGQAAAFNVTFRRAKGYPIDLYYLMDLSYSMLDDLRNVKKLGGDLLRALNEITESGRIGFGSFVDKTVLPFVNTHPDKLRNPCPNKEKECQPPFAFRHVLKLTNNSNQFQTEVGKQLISGNLDAPEGGLDAMMQVAACPEEIGWRNVTRLLVFATDDGFHFAGDGKLGAILTPNDGRCHLEDNLYKRSNEFDYPSVGQLAHKLAENNIQPIFAVTSRMVKTYEKLTEIIPKSAVGELSEDSSNVVHLIKNAYNKLSSRVFLDHNALPDTLKVTYDSFCSNGVTHRNQPRGDCDGVQINVPITFQVKVTATECIQEQSFVIRALGFTDIVTVQVLPQCECRCRDQSRDRSLCHGKGFLECGICRCDTGYIGKNCECQTQGRSSQELEGSCRKDNNSIICSGLGDCVCGQCLCHTSDVPGKLIYGQYCECDTINCERYNGQVCGGPGRGLCFCGKCRCHPGFEGSACQCERTTEGCLNPRRVECSGRGRCRCNVCECHSGYQLPLCQECPGCPSPCGKYISCAECLKFEKGPFGKNCSAACPGLQLSNNPVKGRTCKERDSEGCWVAYTLEQQDGMDRYLIYVDESRECVAGPNIAAIVGGTVAGIVLIGILLLVIWKALIHLSDLREYRRFEKEKLKSQWNNDNPLFKSATTTVMNPKFAES

SEQ ID NO: 66746 - protein, 18 aa, Homo sapiens
VPIQLCIIFLISLLENQC

SEQ ID NO: 66747 - protein, 18 aa, Homo sapiens
TRTILMATTLMMWRRMKG

SEQ ID NO: 66748 - protein, 688 aa, Homo sapiens
LLGGLALLAAGVDADVLLEACCADGHRMATHQKDCSLPYATESKECRMVQEQCCHSQLEELHCATGISLANEQDRCATPHGDNASLEATFVKRCCHCCLLGRAAQAQGQSCEYSLMVGYQCGQVFQACCVKSQETGDLDVGGLQETDKIIEVEEEQEDPYLNDRCRGGGPCKQQCRDTGDEVVCSCFVGYQLLSDGVSCEDVNECITGSHSCRLGESCINTVGSFRCQRDSSCGTGYELTEDNSCKDIDECESGIHNCLPDFICQNTLGSFRCRPKLQCKSGFIQDALGNCIDINECLSISAPCPIGHTCINTEGSYTCQKNVPNCGRGYHLNEEGTRCVDVDECAPPAEPCGKGHRCVNSPGSFRCECKTGYYFDGISRMCVDVNECQRYPGRLCGHKCENTLGSYLCSCSVGFRLSVDGRSCEDINECSSSPCSQECANVYGSYQCYCRRGYQLSDVDGVTCEDIDECALPTGGHICSYRCINIPGSFQCSCPSSGYRLAPNGRNCQDIDECVTGIHNCSINETCFNIQGGFRCLAFECPENYRRSAATLQQEKTDTVRCIKSCRPNDVTCVFDPVHTISHTVISLPTFREFTRPEEIIFLRAITPPHPASQANIIFDITEGNLRDSFDIIKRYMDGMTVGVVRQVRPIVGPFHAVLKLEMNYVVGGVVSHRNVVNVHIFVSEYWF

SEQ ID NO: 66749 - protein, 44 aa, Homo sapiens
LLPPLALLLLLAALVAPATAATAYRPDWNRLSGLTRARVETCGG

SEQ ID NO: 66750 - protein, 11 aa, Homo sapiens
LVVVYRLAIAV

SEQ ID NO: 66751 - protein, 11 aa, Homo sapiens
KFRKIIIPFLF

SEQ ID NO: 66752 - protein, 576 aa, Homo sapiens
LPVLLFLCLLLKTCEPKTANAFKPNILLIMADDLGTGDLGCYGNNTLRTPNIDQLAEEGVRLTQHLAAAPLCTPSRAAFLTGRHSFRSGMDASNGYRALQWNAGSGGLPENETTFARILQQHGYATGLIGKWHQGVNCASRGDHCHHPLNHGFDYFYGMPFTLTNDCDPGRPPEVDAALRAQLWGYTQFLALGILTLAAGQTCGFFSVSARAVTGMAGVGCLFFISWYSSFGFVRRWNCILMRNHDVTEQPMVLEKTASLMLKEAVSYIERHKHGPFLLFLSLLHVHIPLVTTSAFLGKSQHGLYGDNVEEMDWLIGKVLNAIEDNGLKNSTFTYFTSDHGGHLEARDGHSQLGGWNGIYKGGKGMGGWEGGIRVPGIFHWPGVLPAGRVIGEPTSLMDVFPTVVQLVGGEVPQDRVIDGHSLVPLLQGAEARSAHEFLFHYCGQHLHAARWHQKDSGSVWKVHYTTPQFHPEGAGACYGRGVCPCSGEGVTHHRPPLLFDLSRDPSEARPLTPDSEPLYHAVIARVGAAVSEHRQTLSPVPQQFSMSNILWKPWLQPCCGHFPFCSCHEDGDGTP

SEQ ID NO: 66753 - protein, 411 aa, Homo sapiens
RLEERTEVALAVMGILLGLLLLGHLTVDTYGRPILEVPESVTGPWKGDVNLPCTYDPLQGYTQVLVKWLVQRGSDPVTIFLRDSSGDHIQQAKYQGRLHVSHKVPGDVSLQLSTLEMDDRSHYTCEVTWQTPDGNQVVRDKITELRVQKLSVSKPTVTTGSGYGFTVPQGMRISLQCQARGSPPISYIWYKQQTNNQEPIKVATLSTLLFKPAVIADSGSYFCTAKGQVGSEQHSDIVKFVVKDSSKLLKTKTEAPTTMTYPLKATSTVKQSWDWTTDMDGYLGETSAGPGKSLPVFAIILIISLCCMVVFTMAYIMLCRKTSQQEHVYEAARAHAREANDSGETMRVAIFASGCSSDEPTSQNLGNNYSDEPCIGQEYQIIAQINGNYARLLDTVPLDYEFLATEGKSVC

SEQ ID NO: 66754 - protein, 455 aa, Homo sapiens
LLLLLPPLLLLLLLRVPPSRSFPGSGDSPLEDDEVGYSHPRYKDTPWCSPIKVKYGDVYCRAPQGGYYKTALGTRCDIRCQKGYELHGSSLLICQSNKRWSDKVICKQKRCPTLAMPANGGFKCVDGAYFNSRCEYYCSPGYTLKGERTVTCMDNKAWSGRPASCVDMEPPRIKCPSVKERIAEPNKLTVRVSWETPEGRDTADGILTDVILKGLPPGSNFPEGDHKIQYTVYDRAENKGTCKFRVKVRVKRCGKLNAPENGYMKCSSDGDNYGATCEFSCIGGYELQGSPARVCQSNLAWSGTEPTCAAMNVNVGVRTAAALLDQFYEKRRLLIVSTPTARNLLYRLQLGMLQQAQCGLDLRHITVVELVGVFPTLIGRIGAKIMPPALALQLRLLLRIPLYSFSMVLVDKHGMDKERYVSLVMPVALFNLIDTFPLRKEEMVLQAEMSQTCNT

SEQ ID NO: 66755 - protein, 17 aa, Homo sapiens
IFLFFVANAIIHLFCFS

SEQ ID NO: 66756 - protein, 483 aa, Homo sapiens
VLRFAVSCRILTLMLQALFNAIIPDHHAEAFSPPRLAPSGFVDQLVEGLLGGLSHWDAEHFLFIAEHGYLYEHNFAFFPGFPLALLVGTELLRPLRGLLSLRSCLLISVASLNFLFFMLAAVALHDLGCLVLHCPHQSFYAALLFCLSPANVFLAAGYSEALFALLTFSAMGQLERGRVWTSVLLFAFATGVRSNGLVSVGFLMHSQCQGFFSSLTMLNPLRQLFKLMASLFLSVFTLGLPFALFQYYAYTQFCLPGSARPIPEPLVQLAVDKGYRIAEGNEPPWCFWDVPLIYSYIQDVYWNVGFLKYYELKQVPNFLLAAPVAILVAWATWTYVTTHPWLCLTLGLQRSKNNKTLEKPDLGFLSPQVFVYVVHAAVLLLFGGLCMHVQVLTRFLGSSTPIMYWFPAHLLQDQEPLLRSLKTVPWKPLAEDSPPGQKVPRNPIMGLLYHWKTCSPVTRYILGYFLTYWLLGLLLHCNFLPWT

SEQ ID NO: 66757 - protein, 225 aa, Homo sapiens
VGTQTHRRPASPLGLARPRAMEFLWAPLLGLCCSLAAADRHTVFWNSSNPKFRNEDYTIHVQLNDYVDIICPHYEDHSVADAAMEQYILYLVEHEEYQLCQPQSKDQVRWQCNRPSAKHGPEKLSEKFQRFTPFTLGKEFKEGHSYYYISKPIHQHEDRCLRLKVTVSGKITHSPQAHDNPQEKRLAADDPEVRVLHSIGHSAAPRLFPLAWTVLLLPLLLLQTP

SEQ ID NO: 66758 - protein, 20 aa, Homo sapiens
ITWTSIHLMYMVLMTSLVNR

SEQ ID NO: 66759 - protein, 18 aa, Homo sapiens
IFLAIFFIMETSAATSTR

SEQ ID NO: 66760 - protein, 564 aa, Homo sapiens
LLCFAFLWVLGIAYYMYSGGGSALAGGAGGGAGRKEDWNEIDPIKKKDLHHSNGEEKAQSMETLPPGKVRWPDFNQEAYVGGTMVRSGQDPYARNKFNQVESDKLRMDRAIPDTRHDQCQRKQWRVDLPATSVVITFHNEARSALLRTVVSVLKKSPPHLIKEIILVDDYSNDPEDGALLGKIEKVRVLRNDRREGLMRSRVRGADAAQAKVLTFLDSHCECNEHWLEPLLERVAEDRTRVVSPIIDVINMDNFQYVGASADLKGGFDWNLVFKWDYMTPEQRRSRQGNPVAPIKTPMIAGGLFVMDKFYFEELGKYDMMMDVWGGENLEISFRVWQCGGSLEIIPCSRVGHVFRKQHPYTFPGGSGTVFARNTRRAAEVWMDEYKNFYYAAVPSARNVPYGNIQSRLELRKKLSCKPFKWYLENVYPELRVPDHQDIAFGALQQGTNCLDTLGHFADGVVGVYECHNAGGNQEWALTKEKSVKHMDLCLTVVDRAPGSLIKLQGCRENDSRQKWEQIEGNSKLRHVGSNLCLDSRTAKSGGLSVEVCGPALSQQWKFTLNLQQ

SEQ ID NO: 66761 - protein, 466 aa, Homo sapiens
LKIKIKMFTIKLLLFIVPLVISSRIDQDNSSFDSLSPEPKSRFAMLDDVKILANGLLQLGHGLKDFVHKTKGQINDIFQKLNIFDQSFYDLSLQTSEIKEEEKELRRTTYKLQVKNEEVKNMSLELNSKLESLLEEKILLQQKVKYLEEQLTNLIQNQPETPEHPEVTSLKTFVEKQDNSIKDLLQTVEDQYKQLNQQHSQIKEIENQLRRTSIQEPTEISLSSKPRAPRTTPFLQLNEIRNVKHDGIPAECTTIYNRGEHTSGMYAIRPSNSQVFHVYCDVISGSPWTLIQHRIDGSQNFNETWENYKYGFGRLDGEFWLGLEKIYSIVKQSNYVLRIELEDWKDNKHYIEYSFYLGNHETNYTLHLVAITGNVPNAIPENKDLVFSTWDHKAKGHFNCPEGYSGGWWWHDECGENNLNGKYNKPRAKSKPERRRGLSWKSQNGRLYSIKSTKMLIHPTDSESFE

SEQ ID NO: 66762 - protein, 583 aa, Homo sapiens
LRISNMLLLINVILTLWVSCANGQEVKPCDFPEIQHGGLYYKSLRRLYFPAAAGQSYSYYCDQNFVTPSGSYWDYIHCTQDGWSPTVPCLRTCSKSDVEIENGFISESSSIYILNEETQYNCKPGYATAEGNSSGSITCLQNGWSTQPICIKFCDMPVFENSRAKSNGMWFKLHDTLDYECYDGYESSYGNTTDSIVCGEDGWSHLPTCYNSSENCGPPPPISNGDTTSFPQKVYLPWSRVEYQCQSYYELQGSKYVTCSNGDWSEPPRCISMKPCEFPEIQHGHLYYENTRRPYFPVATGQSYSYYCDQNFVTPSGSYWDYIHCTQDGWLPTVPCLRTCSKSDIEIENGFISESSSIYILNKEIQYKCKPGYATADGNSSGSITCLQNGWSAQPICIKFCDMPVFENSRAKSNGMRFKLHDTLDYECYDGYEISYGNTTGSIVCGEDGWSHFPTCYNSSEKCGPPPPISNGDTTSFLLKVYVPQSRVEYQCQSYYELQGSNYVTCSNGEWSEPPRCIHPCIITEENMNKNNIQLKGKSDIKYYAKTGDTIEFMCKLGYNANTSVLSFQAVCREGIVEYPRCE

SEQ ID NO: 66763 - protein, 275 aa, Homo sapiens
LELPSMWLLVSVILISRISSVGGEAMFCDFPKINHGILYDEEKYKPFSQVPTGEVFYYSCEYNFVSPSKSFWTRITCAEEGWSPTPKCLRLCFFPFVENGHSESSGQTHLEGDTVQIICNTGYRLQNNENNISCVERGWSTPPKCRSTISAEKCGPPPPIDNGDITSFLLSVYAPGSSVEYQCQNLYQLEGNNQITCRNGQWSEPPKCLDPCVISQEIMEKYNIKLKWTNQQKLYSRTGDIVEFVCKSGYHPTKSHSFRAMCQNGKLVYPSCEEK

SEQ ID NO: 66764 - protein, 296 aa, Homo sapiens
LWILPSLWLLLLGGPACLKTQEHPSCPGPRELEASKVVLLPSCPGAPGSPGEKGAPGPQGPPGPPGKMGPKGEPGDPVNLLRCQEGPRNCRELLSQGATLSGWYHLCLPEGRALPVFCDMDTEGGGWLVFQRRQDGSVDFFRSWSSYRAGFGNQESEFWLGNENLHQLTLQGNWELRVELEDFNGNRTFAHYATFRLLGEVDHYQLALGKFSEGTAGDSLSLHSGRPFTTYDADHDSSNSNCAVIVHGAWWYASCYRSNLNGRYAVSEAAAHKYGIDWASGRGVGHPYRRVRMMLR

SEQ ID NO: 66765 - protein, 20 aa, Homo sapiens
LNALWAPGMVLPVLCAAFTH

SEQ ID NO: 66766 - protein, 319 aa, Homo sapiens
KWLRSLYLFYTCFCFSVLWLSTDASESRCQQGKTQFGVGLRSGGENHLWLLEGTPSLQSCWAACCQDSACHVFWWLEGMCIQADCSRPQSCRAFRTHSSNSMLVFLKKFQTADDLGFLPEDDVPHLLGLGWNWASWRQSPPRAALRPAVSSSDQQSLIRKLQKRGSPSDVVTPIVTQHSKVNDSNELGGLTTSGSAEVHKAITISSPLTTDLTAELSGGPKNVSVQPEISEGLATTPSTQQVKSSEKTQIAVPQPVAPSYSYATPTPQASFQSTSAPYPVIKELVVSAGESVQITLPKNEVQLNAYVLQEPPKAHSRPV

SEQ ID NO: 66767 - protein, 382 aa, Homo sapiens
LATVLLLSFGSVAASHIEDQAEQFFRSGHTNNWAVLVCTSRFWFNYRHVANTLSVYRSVKRLGIPDSHIVLMLADDMACNPRNPKPATVFSHKNMELNVYGDDVEVDYRSYEVTVENFLRVLTGRIPPSTPRSKRLLSDDRSNILIYMTGHGGNGFLKFQDSEEITNIELADAFEQMWQKRRYNELLFIIDTCQGASMYERFYSPNIMALASSQVGEDSLSHQPDPAIGVHLMDRYTFYVLEFLEEINPASQTNMNDLFQVCPKSLCVSTPGHRTDLFQRDPKNVLITDFFGSVRKVEITTETIKLQQDSEIMESSYKEDQMDEKLMEPLKYAEQLPVAQIIHQKPKLKDWHPPGGFILGLWALIIMVFFKTYGIKHMKFIF

SEQ ID NO: 66768 - protein, 349 aa, Homo sapiens
LVMALLFSLILAICTRPGFLASPSGVRLVGGLHRCEGRVEVEQKGQWGTVCDDGWDIKDVAVLCRELGCGAASGTPSGILYEPPAEKEQKVLIQSVSCTGTEDTLAQCEQEEVYDCSHDEDAGASCENPESSFSPVPEGVRLADGPGHCKGRVEVKHQNQWYTVCQTGWSLRAAKVVCRQLGCGRAVLTQKRCNKHAYGRKPIWLSQMSCSGREATLQDCPSGPWGKNTCNHDEDTWVECEDPFDLRLVGGDNLCSGRLEVLHKGVWGSVCDDNWGEKEDQVVCKQLGCGKSLSPSFRDRKCYGPGVGRIWLDNVRCSGEEQSLEQCQHRFWGFHDCTHQEDVAVICSG

SEQ ID NO: 66769 - protein, 13 aa, Homo sapiens
LSLAVTLLSVLSF

SEQ ID NO: 66770 - protein, 165 aa, Homo sapiens
KLSLSLFLVAVLVKVAEARKNRPAGAIPSPYKDGSSNNSERWQHQIKEVLASSQEALVVTERKYLKSDWCKTQPLRQTVSEEGCRSRTILNRFCYGQCNSFYIPRHVKKEEESFQSCAFCKPQRVTSVLVELECPGLDPPFRLKKIQKVKQCRCMSVNLSDSDKQ

SEQ ID NO: 66771 - protein, 14 aa, Homo sapiens
LLGFCLLLWRCSVC

SEQ ID NO: 66772 - protein, 41 aa, Homo sapiens
LIYASYFALIAVVFLASGAVSVMKKCRKLEDPQSSSQVTTS

SEQ ID NO: 66773 - protein, 16 aa, Homo sapiens
LGKEFLSFFSFFLSQF

SEQ ID NO: 66774 - protein, 105 aa, Homo sapiens
IFVPLWLSLLTLMATTFRRKGGNHWWFGIRRDFCQFLLEIFPFLREYGNISYDLHHEDSEDAEETSVPEAPKIAPIFGKKARVVITQSPGKYVPPPPKLNIDMPD

SEQ ID NO: 66775 - protein, 12 aa, Homo sapiens
MTRIYLKLWMLL

SEQ ID NO: 66776 - protein, 354 aa, Homo sapiens
RNWAILTPVATMLATRLSRPLSRLPGKTLSACDRENGARRPLLLGSTSFIPIGRRTYASAAEPVGSKAVLVTGCDSGFGFSLAKHLHSKGFLVFAGCLMKDKGHDGVKELDSLNSDRLRTVQLNVCSSEEVEKVVEIVRSSLKDPEKGMWGLVNNAGISTFGEVEFTSLETYKQVAEVNLWGTVRMTKSFLPLIRRAKGRVVNISSMLGRMANPARSPYCITKFGVEAFSDCLRYEMYPLGVKVSVVEPGNFIAATSLYSPESIQAIAKKMWEELPEVVRKDYGKKYFDEKIAKMETYCSSGSTDTSPVIDAVTHALTATTPYTRYHPMDYYWWLRMQIMTHLPGAISDMIYIR

SEQ ID NO: 66777 - protein, 56 aa, Homo sapiens
ISSSKTGFNLINLLLISLTGTPRPGCPGMTLPLQSTGRRLVMWHVTSSSAGTSQKL

SEQ ID NO: 66778 - protein, 39 aa, Homo sapiens
IFKSIFFLSKTCLWGTFEIWNQSCTLYIYCDTQSKIPQD

SEQ ID NO: 66779 - protein, 89 aa, Homo sapiens
KNLPVNVRWLLCGCLCCCCTLGCSMWPVICLSKRTRRSIEKLLEWENNRLYHKLCLHWRLSKRKCETNNMMEYVILIEFLPKTPIFRPD

SEQ ID NO: 66780 - protein, 110 aa, Homo sapiens
LSPMARATLSAAPSNPRLLRVALLLLLLVAASRRAAGAPLATELRCQCLQTLQGIHLKNIQSVKVKSPGPHCAQTEVIATLKNGQKACLNPASPMVKKIIEKMLKNGKSN

SEQ ID NO: 66781 - protein, 454 aa, Homo sapiens
VAGLLLLAAAGLGGVAEGPGLAFSEDVLSVFGANLSLSAAQLQHLLEQMGAASRVGVPEPGQLHFNQCLTAEEIFSLHGFSNATQITSSKFSVICPAVLQQLNFHPCEDRPKHKTRPSHSEVWGYGFLSVTIINLASLLGLILTPLIKKSYFPKILTFFVGLAIGTLFSNAIFQLIPEAFGFDPKVDSYVEKAVAVFGGFYLLFFFERMLKMLLKTYGQNGHTHFGNDNFGPQEKTHQPKALPAINGVTCYANPAVTEANGHIHFDNVSVVSLQDGKKEPSSCTCLKGPKLSEIGTIAWMITLCDALHNFIDGLAIGASCTLSLLQGLSTSIAILCEEFPHELGDFVILLNAGMSTRQALLFNFLSACSCYVGLAFGILVGNNFAPNIIFALAGGMFLYISLADMFPEMNDMLREKVTGRKTDFTFFMIQNAGMLTGFTAILLITLYAGEIELE

SEQ ID NO: 66782 - protein, 533 aa, Homo sapiens
LHCIRMSMKWTSALLLIQLSCYFSSGSCGKVLVWPTEFSHWMNIKTILDELVQRGHEVTVLASSASISFDPNSPSTLKFEVYPVSLTKTEFEDIIKQLVKRWAELPKDTFWSYFSQVQEIMWTFNDILRKFCKDIVSNKKLMKKLQESRFDVVLADAVFPFGELLAELLKIPFVYSLRFSPGYAIEKHSGGLLFPPSYVPVVMSELSDQMTFIERVKNMIYVLYFEFWFQIFDMKKWDQFYSEVLGRPTTLSETMAKADIWLIRNYWDFQFPHPLLPNVEFVGGLHCKPAKPLPKEMEEFVQSSGENGVVVFSLGSMVSNTSEERANVIASALAKIPQKVLWRFDGNKPDTLGLNTRLYKWIPQNDLLGHPKTRAFITHGGANGIYEAIYHGIPMVGVPLFADQPDNIAHMKAKGAAVSLDFHTMSSTDLLNALKTVINDPLYKENAMKLSRIHHDQPVKPLDRAVFWIEFVMRHKGAKHLRVAAHDLTWFQYHSLDVTGFLLACVATVIFIITKCLFCVWKFVRTGKKGKRD

SEQ ID NO: 66783 - protein, 28 aa, Homo sapiens
RLMKFAFRSLLPLCAILMPLLSILNLRA

SEQ ID NO: 66784 - protein, 62 aa, Homo sapiens
MIIAPSLGFVLFALFVAFLLRGKLMETYCSQKHTRLDYIGDSKNVLNDVQHGREDEDGLFTL

SEQ ID NO: 66785 - protein, 311 aa, Homo sapiens
LPLRVPSTMRAWIFFLLCLAGRALAAPQQEALPDETEVVEETVAEVTEVSVGANPVQVEVGEFDDGAEETEEEVVAENPCQNHHCKHGKVCELDENNTPMCVCQDPTSCPAPIGEFEKVCSNDNKTFDSSCHFFATKCTLEGTKKGHKLHLDYIGPCKYIPPCLDSELTEFPLRMRDWLKNVLVTLYERDEDNNLLTEKQKLRVKKIHENEKRLEAGDHPVELLARDFEKNYNMYIFPVHWQFGQLDQHPIDGYLSHTELAPLRAPLIPMEHCTTRFFETCDLDNDKYIALDEWAGCFGIKQKDIDKDLVI

SEQ ID NO: 66786 - protein, 96 aa, Homo sapiens
LAAALLLLLLALYTARVDGSKCKCSRKGPKIRYSDVKKLEMKPKYPHCEEKMVIITTKSVSRYRGQEHCLHPKLQSTKRFIKWYNAWNEKRRVYEE

SEQ ID NO: 66787 - protein, 17 aa, Homo sapiens
ILIFLILLLIIKESLLD

SEQ ID NO: 66788 - protein, 41 aa, Homo sapiens
VSLPWVRSSHSMTMTFLVLSSAISSFCESGALVNFLDIAPR

SEQ ID NO: 66789 - protein, 190 aa, Homo sapiens
LKMFHQIWAALLYFYGIILNSIYQCPEHSQLTTLGVDGKEFPEVHLGQWYFIAGAAPTKEELATFDPVDNIVFNMAAGSAPMQLHLRATIRMKDGLCVPRKWIYHLTEGSTDLRTEGRPDMKTELFSSSCPGGIMLNETGQGYQRFLLYNRSPHPPEKCVEEFKSLTSCLDSKAFLLTPRNQEACELSNN

SEQ ID NO: 66790 - protein, 10 aa, Homo sapiens
VKVSAFLLFG

SEQ ID NO: 66791 - protein, 143 aa, Homo sapiens
LRRPQLLPLLLLLCGGCPRAGGCNETGMLERLPLCGKAFADMMGKVDVWKWCNLSEFIVYYESFTNCTEMEANVVGCYWPNPLAQGFITGIHRQFFSNCTVDRVHLEDPPDEVLIPLIVIPVVLTVAMAGLVVWRSKRTDTLL

SEQ ID NO: 66792 - protein, 25 aa, Homo sapiens
MASAWSFITTFFTSLIPEGPPQVAN

SEQ ID NO: 66793 - protein, 487 aa, Homo sapiens
LHPAFQSCLLLTLLGLWRTTPEAHASSLGAPAISAASFLQDLIHRYGEGDSLTLQQLKALLNHLDVGVGRGNVTQHVQGHRNLSTCFSSGDLFTAHNFSEQSRIGSSELQEFCPTILQQLDSRACTSENQENEENEQTEEGRPSAVEVWGYGLLCVTVISLCSLLGASVVPFMKKTFYKRLLLYFIALAIGTLYSNALFQLIPEAFGFNPLEDYYVSKSAVVFGGFYLFFFTEKILKILLKQKNEHHHGHSHYASESLPSKKDQEEGVMEKLQNGDLDHMIPQHCSSELDGKAPMVDEKVIVGSLSVQDLQASQSACYWLKGVRYSDIGTLAWMITLSDGLHNFIDGLAIGASFTVSVFQGISTSVAILCEEFPHELGDFVILLNAGMSIQQALFFNFLSACCCYLGLAFGILAGSHFSANWIFALAGGMFLYISLADMFPEMNEVCQEDERKGSILIPFIIQNLGLLTGFTIMVVLTMYSGQIQIG

SEQ ID NO: 66794 - protein, 22 aa, Homo sapiens
LLLLILSAFPVLYLDLAPSTFL

SEQ ID NO: 66795 - protein, 697 aa, Homo sapiens
IAVLFCFFLLIIFQTDFGKNEEIPRKQRRKIYHRRLRKSSTSHKHRSNRQLGIQQTTVFTPVARLPIVNFDYSMEEKFESFSSFPGVESSYNVLPGKKGHCLVKGITMYNKAVWSPEPCTTCLCSDGRVLCDETMCHPQRCPQTVIPEGECCPVCSATVSYSLLSGIALNDRNEFSGDSSEQREPTNLLHKQLPPPQVGMDRIVRKEALQSEEDEEVKEEDTEQKRETPESRNQGQLYSEGDSRGGDRKQRPGEERRLAHQQQRQGREEEEDEEEEGEEGEEDEEDEEDPVRGDMFRMPSRSPLPAPPRGTLRLPSGCSLSYRTISCINAMLTQIPPLTAPQITSLELTGNSIASIPDEAFNGLPNLERLDLSKNNITSSGIGPKAFKLLKKLMRLNMDGNNLIQIPSQLPSTLEELKVNENNLQAIDEESLSDLNQLVTLELEGNNLSEANVNPLAFKPLKSLAYLRLGKNKFRIIPQGLPGSIEELYLENNQIEEITEICFNHTRKINVIVLRYNKIEENRIAPLAWINQENLESIDLSYNKLYHVPSYLPKSLLHLVLLGNQIERIPGYVFGHMEPGLEYLYLSFNKLADDGMDRVSFYGAYHSLRELFLDHNDLKSIPPGIQEMKALHFLRLNNNKIRNILPEEICNAEEDDDSNLEHLHLENNYIKIREIPSYTFSCIRSYSSIVLKPQNIK

SEQ ID NO: 66796 - protein, 30 aa, Homo sapiens
VGLLLGIALVMRVDGAVSSWFRQLFLAQQR

SEQ ID NO: 66797 - protein, 17 aa, Homo sapiens
LGLTLGSACSTLLVHLI

SEQ ID NO: 66798 - protein, 12 aa, Homo sapiens
MLTSTLFIFQCL

SEQ ID NO: 66799 - protein, 11 aa, Homo sapiens
LTSILFILQCL

SEQ ID NO: 66800 - protein, 149 aa, Homo sapiens
RLLLVTSLVVVLLWEAGAVPAPKVPIKMQVKHWPSEQDPEKAWGARVVEPPEKDDQLVVLFPVQKPKLLTTEEKPRGQGRGPILPGTKAWMETEDTLGHVLSPEPDHDSLYHPPPEEDQGEERPRLWVMPNHQVLLGPEEDQDHIYHPQ

SEQ ID NO: 66801 - protein, 193 aa, Homo sapiens
LASGFLVLWLSLGGGLAQSDTSPDTEESYSDWGLRHLRGSFESVNSYFDSFLELLGGKNGVCQYRCRYGKAPMPRPGYKPQEPNGCGSYFLGLKVPESMDLGIPAMTKCCNQLDVCYDTCGANKYRCDAKFRWCLHSICSDLKRSLGFVSKVEAACDSLVDTVFNTVWTLGCRPFMNSQRAACICAEEEKEEL

SEQ ID NO: 66802 - protein, 417 aa, Homo sapiens
RTILLQYCFLLITCLLTALEAVPIDIDKTKVQNIHPVESAKIEPPDTGLYYDEYLKQVIDVLETDKHFREKLQKADIEEIKSGRLSKELDLVSHHVRTKLDELKRQEVGRLRMLIKAKLDSLQDIGMDHQALLKQFDHLNHLNPDKFESTDLDMLIKAATSDLEHYDKTRHEEFKKYEMMKEHERREYLKTLNEEKRKEEESKFEEMKKKHENHPKVNHPGSKDQLKEVWEETDGLDPNDFDPKTFFKLHDVNSDGFLDEQELEALFTKELEKVYDPKNEEDDMVEMEEERLRMREHVMNEVDTNKDRLVTLEEFLKATEKKEFLEPDSWETLDQQQFFTEEELKEYENIIALQENELKKKADELQKQKEELQRQHDQLEAQKLEYHQVIQQMEQKKLQQGIPPSGPAGELKFEPHI

SEQ ID NO: 66803 - protein, 25 aa, Homo sapiens
MELQRLLVFQVFLFIQLDTMMHRSS

SEQ ID NO: 66804 - protein, 23 aa, Homo sapiens
LQRLLVFQVFLFIQLDTMMHRSS

SEQ ID NO: 66805 - protein, 42 aa, Homo sapiens
TGRDRGALLELSLSFVPLLLHVNLARGSGRHSQGTPCFGGDC

SEQ ID NO: 66806 - protein, 47 aa, Homo sapiens
RFALASHFLWGLWSIVQAKISSIEFGYMDYAQARFDAYFHQKRKLGV

SEQ ID NO: 66807 - protein, 46 aa, Homo sapiens
VVLLLGVTLFITVLVLFALQAYESYKKKDYTQVDYLINGMYADSEM

SEQ ID NO: 66808 - protein, 933 aa, Homo sapiens
RRSWASLVLAFLGVCLGITLAVDRSNFKTCEESSFCKRQRSIRPGLSPYRALLDSLQLGPDSLTVHLIHEVTKVLLVLELQGLQKNMTRFRIDELEPRRPRYRVPDVLVADPPIARLSVSGRDENSVELTMAEGPYKIILTARPFRLDLLEDRSLLLSVNARGLLEFEHQRAPRVSQGSKDPAEGDGAQPEETPRDGDKPEETQGKAEKDEPGAWEETFKTHSDSKPYGPMSVGLDFSLPGMEHVYGIPEHADNLRLKVTEGGEPYRLYNLDVFQYELYNPMALYGSVPVLLAHNPHRDLGIFWLNAAETWVDISSNTAGKTLFGKMMDYLQGSGETPQTDVRWMSETGIIDVFLLLGPSISDVFRQYASLTGTQALPPLFSLGYHQSRWNYRDEADVLEVDQGFDDHNLPCDVIWLDIEHADGKRYFTWDPSRFPQPRTMLERLASKRRKLVAIVDPHIKVDSGYRVHEELRNLGLYVKTRDGSDYEGWCWPGSAGYPDFTNPTMRAWWANMFSYDNYEGSAPNLFVWNDMNEPSVFNGPEVTMLKDAQHYGGWEHRDVHNIYGLYVHMATADGLRQRSGGMERPFVLARAFFAGSQRFGAVWTGDNTAEWDHLKISIPMCLSLGLVGLSFCGADVGGFFKNPEPELLVRWYQMGAYQPFFRAHAHLDTGRREPWLLPSQHNDIIRDALGQRYSLLPFWYTLLYQAHREGIPVMRPLWVQYPQDVTTFNIDDQYLLGDALLVHPVSDSGAHGVQVYLPGQGEVWYDIQSYQKHHGPQTLYLPVTLSSIPVFQRGGTIVPRWMRVRRSSECMKDDPITLFVALSPQGTAQGELFLDDGHTFNYQTRQEFLLRRFSFSGNTLVSSSADPEGHFETPIWIERVVIIGAGKPAAVVLQTKGSPESRLSFQHDPETSVLVLRKPGINVASDWSIHLR

SEQ ID NO: 66809 - protein, 291 aa, Homo sapiens
LGAWAVEGTAVALLRLLLLLLPPAIRGPGLGVAGVAGAAGAGLPESVIWAVNAGGEAHVDVHGIHFRKDPLEGRVGRASDYGMKLPILRSNPEDQILYQTERYNEETFGYEVPIKEEGDYVLVLKFAEVYFAQSQQKVFDVRLNGHVVVKDLDIFDRVGHSTAHDEIIPMSIRKGKLSVQGEVSTFTGKLYIEFVKGYYDNPKVCALYIMAGTVDDVPKLQPHPGLEKKEEEEEEEEYDEGSNLKKQTNKNRVQSGPRTPNPYASDNSSLMFPILVAFGVFIPTLFCLCRL

SEQ ID NO: 66810 - protein, 139 aa, Homo sapiens
IVGVLITTNIITLIVKLTRDSQSLCPYDWIGFQNKCYYFSKEEGDWNSSKYNCSTQHADLTIIDNIEEMNFLRRYKCSSDHWIGLKMAKNRTGQWVDGATFTKSFGMRGSEGCAYLSDDGAATARCYTERKWICRKRIH

SEQ ID NO: 66811 - protein, 18 aa, Homo sapiens
TLFPCWIFLFSAATVKTK

SEQ ID NO: 66812 - protein, 16 aa, Homo sapiens
TFTCPCLTTLTAMMWL

SEQ ID NO: 66813 - protein, 143 aa, Homo sapiens
LGVLLLVFVLGLGLTPPTLAQDNSRYTHFLTQHYDAKPQGRDDRYCESIMRRRGLTSPCKDINTFIHGNKRSIKAICENKNGNPHRENLRISKSSFQVTTCKLHGGSPWPPCQYRATAGFRNVVVACENGLPVHLDQSIFRRP

SEQ ID NO: 66814 - protein, 54 aa, Homo sapiens
VVRAALPLQLLLLLLLLLACLLPSSEEDYSCTQANNFARSFYPMLRYTNGPPPT

SEQ ID NO: 66815 - protein, 50 aa, Homo sapiens
LWFFLLLVAAPRWVLSQVQLQESGPGLVKPSETLSLICAVSGDSISSGNW

SEQ ID NO: 66816 - protein, 289 aa, Homo sapiens
LGLLLGRMSGSSLPSALALSLLLVSGSLLPGPGAAQNEPRIVTSEEVIIRDSPVLPVTLQCNLTSSSHTLTYSYWTKNGVELSATRKNASNMEYRINKPRAEDSGEYHCVYHFVSAPKANATIEVKAAPDITGHKRSENKNEGQDATMYCKSVGYPHPDWIWRKKENGMPMDIVNTSGRFFIINKENYTELNIVNLQITEDPGEYECNATNAIGSASVVTVLRVRSHLAPLWPFLGILAEIIILVVIIVVYEKRKRPDEVPDDDEPAGPMKTNSTNNHKDKNLRQRNTN

SEQ ID NO: 66817 - protein, 28 aa, Homo sapiens
ISLYLLLLLIVSVINSSAFQHFWNRAKR

SEQ ID NO: 66818 - protein, 250 aa, Homo sapiens
VELGHLRPWLLELLAAMCFPKVLSDDMKKLKARMVMLLPTSAQGLGAWVSACDTEDTVGHLGPWRDKDPALWCQLCLSSQHQAIERFYDKMQNAESGRGQVMSSLAELEDDFKEGYLETVAAYYEEQHPELTPLLEKERDGLRCRGNRSPVPDVEDPATEEPGESFCDKVMRWFQAMLQRLQTWWHGVLAWVKEKVVALVHAVQALWKQFQSFCCSLSELFMSSFQSYGAPRGDKEELTPQKCSEPQSSK

SEQ ID NO: 66819 - protein, 782 aa, Homo sapiens
RLMMLLATSGACLGLLAVAAVAAAGANPAQRDTHSLLPTHRRQKRDWIWNQMHIDEEKNTSLPHHVGKIKSSVSRKNAKYLLKGEYVGKVFRVDAETGDVFAIERLDRENISEYHLTAVIVDKDTGENLETPSSFTIKVHDVNDNWPVFTHRLFNASVPESSAVGTSVISVTAVDADDPTVGDHASVMYQILKGKEYFAIDNSGRIITITKSLDREKQARYEIVVEARDAQGLRGDSGTATVLVTLQDINDNFPFFTQTKYTFVVPEDTRVGTSVGSLFVEDPDEPQNRMTKYSILRGDYQDAFTIETNPAHNEGIIKPMKPLDYEYIQQYSFIVEATDPTIDLRYMSPPAGNRAQVIINITDVDEPPIFQQPFYHFQLKENQKKPLIGTVLAMDPDAARHSIGYSIRRTSDKGQFFRVTKKGDIYNEKELDREVYPWYNLTVEAKELDSTGTPTGKESIVQVHIEVLDENDNAPEFAKPYQPKVCENAVHGQLVLQISAIDKDITPRNVKFKFILNTENNFTLTDNHDNTANITVKYGQFDREHTKVHFLPVVISDNGMPSRTGTSTLTVAVCKCNEQGEFTFCEDMAAQVGVSIQAVVAILLCILTITVITLLIFLRRRLRKQARAHGKSVPEIHEQLVTYDEEGGGEMDTTSYDVSVLNSVRRGGAKPPRPALDARPSLYAQVQKPPRHAPGAHGGPGEMAAMIEVKKDEADHDGDGPPYDTLHIYGYEGSESIAESLSSLGTDSSDSDVDYDFLNDWGPRFKMLAELYGSDPREELLY

SEQ ID NO: 66820 - protein, 206 aa, Homo sapiens
VVRRAANVSLGVLLAWLSVPVVLNLLSSRQVMNTHFNSLHIVNTYGAFGSITKERAEVILQGTASSNASAPDAMWEDYEFKCKPGDPSRRPCLISPYHYRLDWLMWFAAFQTYEHNDWIIHLAGKLLASDAEALSLLAHNPFAGRPPPRWVRGEHYRYKFSRPGGRHAAEGKWWVRKRIGAYFPPLSLEELRPYFRDRGWPLPGPL

SEQ ID NO: 66821 - protein, 38 aa, Homo sapiens
VLGLARLRHWVYLLCFSAVFRRELSEYTEGLTSEPLTA

SEQ ID NO: 66822 - protein, 51 aa, Homo sapiens
MCTVRKSLLSLGKLILCLRIFLNGLLLNQLRRTCSPCWMRPIFSHSLWEWC

SEQ ID NO: 66823 - protein, 22 aa, Homo sapiens
MILFNLLVPLLNYSSFKWLMNQ

SEQ ID NO: 66824 - protein, 43 aa, Homo sapiens
VLLSLFVTSVLLCFIFGQHLRQQRMGTYGVRAAWRRLPQAFRP

SEQ ID NO: 66825 - protein, 1586 aa, Homo sapiens
LEWGLSILLGLCIALFSSSMRNVQFPGMAPQNLGRVDKFNSSSLMVVYTPISNLTQQIMNKTALAPLLKGTSVIGAPNKTHMDEILLENLPYAMGIIFNETFSYKLIFFQGYNSPLWKEDFSAHCWDGYGEFSCTLTKYWNRGFVALQTAINTAIIEITTNHPVMEELMSVTAITMKTLPFITKNLLHNEMFILFFLLHFSPLVYFISLNVTKERKKSKNLMKMMGLQDSAFWLSWGLIYAGFIFIISIFVTIIITFTQIIVMTGFMVIFILFFLYGLSLVALVFLMSVLLKKAVLTNLVVFLLTLFWGCLGFTVFYEQLPSSLEWILNICSPFAFTTGMIQIIKLDYNLNGVIFPDPSGDSYTMIATFSMLLLDGLIYLLLALYFDKILPYGDERHYSPLFFLNSSSCFQHQRTNAKVIEKEIDAEHPSDDYFEPVAPEFQGKEAIRIRNVKKEYKGKSGKVEALKGLLFDIYEGQITAILGHSGAGKSSLLNILNGLSVPTEGSVTIYNKNLSEMQDLEEIRKITGVCPQFNVQFDILTVKENLSLFAKIKGIHLKEVEQEVQRILLELDMQNIQDNLAKHLSEGQKRKLTFGITILGDPQILLLDEPTTGLDPFSRDQVWSLLRERRADHVILFSTQSMDEADILADRKVIMSNGRLKCAGSSMFLKRRWGLGYHLSLHRNEICNPEQITSFITHHIPDAKLKTENKEKLVYTLPLERTNTFPDLFSDLDKCSDQGVTGYDISMSTLNEVFMKLEGQSTIEQDFEQVEMIRDSESLNEMELAHSSFSEMQTAVSDMGLWRMQVFAMARLRFLKLKRQTKVLLTLLLVFGIAIFPLIVENIMYAMLNEKIDWEFKNELYFLSPGQLPQEPRTSLLIINNTESNIEDFIKSLKHQNILLEVDDFENRNGTDGLSYNGAIIVSGKQKDYRFSVVCNTKRLHCFPILMNIISNGLLQMFNHTQHIRIESSPFPLSHIGLWTGLPDGSFFLFLVLCSISPYITMGSISDYKKNAKSQLWISGLYTSAYWCGQALVDVSFFILILLLMYLIFYIENMQYLLITSQIVFALVIVTPGYAASLVFFIYMISFIFRKRRKNSGLWSFYFFFASTIMFSITLINHFDLSILITTMVLVPSYTLLGFKTFLEVRDQEHYREFPEANFELSATDFLVCFIPYFQTLLFVFVLRCMELKCGKKRMRKDPVFRISPQSRDAKPNPEEPIDEDEDIQTERIRTATALTTSILDEKPVIIASCLHKEYAGQKKSCFSKRKKKIAARNISFCVQEGEILGLLGPNGAGKSSSIRMISGITKPTAGEVELKGCSSVLGHLGYCPQENVLWPMLTLREHLEVYAAVKGLRKADARLAIARLVSAFKLHEQLNVPVQKLTAGITRKLCFVLSLLGNSPVLLLDEPSTGIDPTGQQQMWQAIQAVVKNTERGVLLTTHNLAEAEALCDRVAIMVSGRLRCIGSIQHLKNKLGKDYILELKVKETSQVTLVHTEILKLFPQAAGQERYSSLLTYKLPVADVYPLSQTFHKLEAVKHNFNLEEYSLSQCTLEKVFLELSKEQEVGNFDEEIDTTMRWKLLPHSDEP

SEQ ID NO: 66826 - protein, 41 aa, Homo sapiens
LKTMILIYLFLFLPTLETKQKELSFLRSNFSSVPFYSSTLF

SEQ ID NO: 66827 - protein, 411 aa, Homo sapiens
RLPKRMSGAPTAGAALMLCAATAVLLSAQGGPVQSKSPRFASWDEMNVLAHGLLQLGQGLREHAERTRSQLSALERRLSACGSACQGTEGSTDLPLAPESRVDPEVLHSLQTQLKAQNSRIQQLFHKVAQQQRHLEKQHLRIQHLQSQFGLLDHKHLDHEVAKPARRKRLPEMAQPVDPAHNVSRLHRLPRDCQELFQVGERQSGLFEIQPQGSPPFLVNCKMTSDGGWTVIQRRHDGSVDFNRPWEAYKAGFGDPHGEFWLGLEKVHSITGDRNSRLAVQLRDWDGNAELLQFSVHLGGEDTAYSLQLTAPVAGQLGATTVPPSGLSVPFSTWDQDHDLRRDKNCAKSLSGGWWFGTCSHSNLNGQYFRSIPQQRQKLKKGIFWKTWRGRYYPLQATTMLIQPMAAEAAS

SEQ ID NO: 66828 - protein, 12 aa, Homo sapiens
VLCFLFCLFVCF

SEQ ID NO: 66829 - protein, 348 aa, Homo sapiens
VLQLLSFMLLAGVLVAILVQVSKVPSSLSQEQSEQDAIYQNLTQLKAAVGELSEKSKLQEIYQELTQLKAAVGELPEKSKLQEIYQELTRLKAAVGELPEKSKLQEIYQELTRLKAAVGELPEKSKLQEIYQELTRLKAAVGELPEKSKLQEIYQELTELKAAVGELPEKSKLQEIYQELTQLKAAVGELPDQSKQQQIYQELTDLKTAFERLCRHCPKDWTFFQGNCYFMSNSQRNWHDSVTACQEVRAQLVVIKTAEEQNFLQLQTSRSNRFSWMGLSDLNQEGTWQWVDGSPLSPSFQRYWNSGEPNNSGNEDCAEFSGSGWNDNRCDVDNYWICKKPAACFRDE

SEQ ID NO: 66830 - protein, 71 aa, Homo sapiens
VGLLLLVVAVFYCVRRKGGPCCRQRREKGAPPPGEPGLSHSGSEQPEQTGLLMGGASGGARGGSGGFGDEC

SEQ ID NO: 66831 - protein, 465 aa, Homo sapiens
TPLLWPLLLLLLLETGAQDVRVQVLPEVRGQLGGTVELPCHLLPPVPGLYISLVTWQRPDAPANHQNVAAFHPKMGPSFPSPKPGSERLSFVSAKQSTGQDTEAELQDATLALHGLTVEDEGNYTCEFATFPKGSVRGMTWLRVIAKPKNQAEAQKVTFSQDPTTVALCISKEGRPPARISWLSSLDWEAKETQVSGTLAGTVTVTSRFTLVPSGRADGVTVTCKVEHESFEEPALIPVTLSVRYPPEVSISGYDDNWYLGRTDATLSCDVRSNPEPTGYDWSTTSGTFPTSAVAQGSQLVIHAVDSLFNTTFVCTVTNAVGMGRAEQVIFVRETPRASPRDVGPLVWGAVGGTLLVLLLLAGGSLAFILLRVRRRRKSPGGAGGGASGDGGFYDPKAQVLGNGDPVFWTPVVPGPMEPDGKDEEEEEEEEKAEKGLMLPPPPALEDDMESQLDGSLISRRAVYV

SEQ ID NO: 66832 - protein, 483 aa, Homo sapiens
LGIRGERVGRSAAMGKPWLRALQLLLLLGASWARAGAPRCTYTFVLPPQKFTGAVCWSGPASTRATPEAANASELAALRMRVGRHEELLRELQRLAAADGAVAGEVRALRKESRGLSARLGQLRAQLQHEAGPGAGPGADLGAEPAAALALLGERVLNASAEAQRAAARFHQLDVKFRELAQLVTQQSSLIARLERLCPGGAGGQQQVLPPPPLVPVVPVRLVGSTSDTSRMLDPAPEPQRDQTQRQQEPMASPMPAGHPAVPTKPVGPWQDCAEARQAGHEQSGVYELRVGRHVVSVWCEQQLEGGGWTVIQRRQDGSVNFFTTWQHYKAGFGRPDGEYWLGLEPVYQLTSRGDHELLVLLEDWGGRGARAHYDGFSLEPESDHYRLRLGQYHGDAGDSLSWHNDKPFSTVDRDRDSYSGNCALYQRGGWWYHACAHSNLNGVWHHGGHYRSRYQDGVYWAEFRGGAYSLRKAAMLIRPLKL

SEQ ID NO: 66833 - protein, 984 aa, Homo sapiens
LRPPLPPLCFFLLLLAAAGARAGGYETCPTVQPNMLNVHLLPHTHDDVGWLKTVDQYFYGIKNDIQHAGVQYILDSVISALLADPTRRFIYVEIAFFSRWWHQQTNATQEVVRDLVRQGRLEFANGGWVMNDEAATHYGAIVDQMTLGLRFLEDTFGNDGRPRVAWHIDPFGHSREQASLFAQMGFDGFFFGRLDYQDKWVRMQKLEMEQVWRASTSLKPPTADLFTGVLPNGYNPPRNLCWDVLCVDQPLVEDPRSPEYNAKELVDYFLNVATAQGRYYRTNHTVMTMGSDFQYENANMWFKNLDKLIRLVNAQQAKGSSVHVLYSTPACYLWELNKANLTWSVKHDDFFPYADGPHQFWTGYFSSRPALKRYERLSYNFLQVCNQLEALVGLAANVGPYGSGDSAPLNEAMAVLQHHDAVSGTSRQHVANDYARQLAAGWGPCEVLLSNALARLRGFKDHFTFCQQLNISICPLSQTAARFQVIVYNPLGRKVNWMVRLPVSEGVFVVKDPNGRTVPSDVVIFPSSDSQAHPPELLFSASLPALGFSTYSVAQVPRWKPQARAPQPIPRRSWSPALTIENEHIRATFDPDTGLLMEIMNMNQQLLLPVRQTFFWYNASIGDNESDQASGAYIFRPNQQKPLPVSRWAQIHLVKTPLVQEVHQNFSAWCSQVVRLYPGQRHLELEWSVGPIPVGDTWGKEVISRFDTPLETKGRFYTDSNGREILERRRDYRPTWKLNQTEPVAGNYYPVNTRIYITDGNMQLTVLTDRSQGGSSLRDGSLELMVHRRLLKDDGRGVSEPLMENGSGAWVRGRHLVLLDTAQAAAAGHRLLAEQEVLAPQVVLAPGGGAAYNLGAPPRTQFSGLRRDLPPSVHLLTLASWGPEMVLLRLEHQFAVGEDSGRNLSAPVTLNLRDLFSTFTITRLQETTLVANQLREAASRLKWTTNTGPTPHQTPYQLDPANITLEPMEIRTFLASVQWKEVDG

SEQ ID NO: 66834 - protein, 33 aa, Homo sapiens
LPSVRLLQWWGQMLWTLGPAALPLLAGRCTREV

SEQ ID NO: 66835 - protein, 16 aa, Homo sapiens
MTVAGVVLLGSLFSRK

SEQ ID NO: 66836 - protein, 52 aa, Homo sapiens
MNLMGVLLLSLAMNTWAQTIFQLGTFPDWADMYSVNVTALPPTLANDTFRTL

SEQ ID NO: 66837 - protein, 47 aa, Homo sapiens
MELFLFFTSLLQHFSFSVAAGQPRPSHSRVVSFLVTPSPYELCAVPR

SEQ ID NO: 66838 - protein, 420 aa, Homo sapiens
RSSEAESRAMLLKTVLLLGHVAQVLMLDNGLLQTPPMGWLAWERFRCNINCDEDPKNCISEQLFMEMADRMAQDGWRDMGYTYLNIDDCWIGGRDASGRLMPDPKRFPHGIPFLADYVHSLGLKLGIYADMGNFTCMGYPGTTLDKVVQDAQTFAEWKVDMLKLDGCFSTPEERAQGYPKMAAALNATGRPIAFSCSWPAYEGGLPPRVNYSLLADICNLWRNYDDIQDSWWSVLSILNWFVEHQDILQPVAGPGHWNDPDMLLIGNFGLSLEQSRAQMALWTVLAAPLLMSTDLRTISAQNMDILQNPLMIKINQDPLGIQGRRIHKEKSLIEVYMRPLSNKASALVFFSCRTDMPYRYHSSLGQLNFTGSVIYEAQDVYSGDIISGLRDETNFTVIINPSGVVMWYLYPIKNLEMSQQ

SEQ ID NO: 66839 - protein, 16 aa, Homo sapiens
MLLLAFVTSFFYLLYS

SEQ ID NO: 66840 - protein, 365 aa, Homo sapiens
LWRLVSLLALSQALPFEQRGFWDFTLDDGPFMMNDEEASGADTSGVLDPDSVTPTYSAMCPFGCHCHLRVVQCSDLGLKSVPKEISPDTTLLDLQNNDISELRKDDFKGLQHLYALVLVNNKISKIHEKAFSPLRKLQKLYISKNHLVEIPPNLPSSLVELRIHDNRIRKVPKGVFSGLRNMNCIEMGGNPLENSGFEPGAFDGLKLNYLRISEAKLTGIPKDLPETLNELHLDHNKIQAIELEDLLRYSKLYRLGLGHNQIRMIENGSLSFLPTLRELHLDNNKLARVPSGLPDLKLLQVVYLHSNNITKVGVNDFCPMGFGVKRAYYNGISLFNNPVPYWEVQPATFRCVTDRLAIQFGNYKK

SEQ ID NO: 66841 - protein, 463 aa, Homo sapiens
KVMQRVNMIMAESPGLITICLLGYLLSAECTVFLDHENANKILNRPKRYNSGKLEEFVQGNLERECMEEKCSFEEAREVFENTERTTEFWKQYVDGDQCESNPCLNGGSCKDDINSYECWCPFGFEGKNCELDVTCNIKNGRCEQFCKNSADNKVVCSCTEGYRLAENQKSCEPAVPFPCGRVSVSQTSKLTRAETVFPDVDYVNSTEAETILDNITQSTQSFNDFTRVVGGEDAKPGQFPWQVVLNGKVDAFCGGSIVNEKWIVTAAHCVETGVKITVVAGEHNIEETEHTEQKRNVIRIIPHHNYNAAINKYNHDIALLELDEPLVLNSYVTPICIADKEYTNIFLKFGSGYVSGWGRVFHKGRSALVLQYLRVPLVDRATCLRSTKFTIYNNMFCAGFHEGGRDSCQGDSGGPHVTEVEGTSFLTGIISWGEECAMKGKYGIYTKVSRYVNWIKEKTKLT

SEQ ID NO: 66842 - protein, 231 aa, Homo sapiens
LPCVFHPERMLWLLFFLVTAIHAELCQPGAENAFKVRLSIRTALGDKAYAWDTNEEYLFKAMVAFSMRKVPNREATEISHVLLCNVTQRVSFWFVVTDPSKNHTLPAVEVQSAIRMNKNRINNAFFLNDQTLEFLKIPSTLAPPMDPSVPIWIIIFGVIFCIIIVAIALLILSGIWQRRRKNKEPSEVDDAEDKCENMITIENGIPSDPLDMKGGHINDAFMTEDERLTPL

SEQ ID NO: 66843 - protein, 579 aa, Homo sapiens
RDSLPVLLFLCLLLKTCEPKTANAFKPNILLIMADDLGTGDLGCYGNNTLRTPNIDQLAEEGVRLTQHLAAAPLCTPSRAAFLTGRHSFRSGMDASNGYRALQWNAGSGGLPENETTFARILQQHGYATGLIGKWHQGVNCASRGDHCHHPLNHGFDYFYGMPFTLTNDCDPGRPPEVDAALRAQLWGYTQFLALGILTLAAGQTCGFFSVSARAVTGMAGVGCLFFISWYSSFGFVRRWNCILMRNHDVTEQPMVLEKTASLMLKEAVSYIERHKHGPFLLFLSLLHVHIPLVTTSAFLGKSQHGLYGDNVEEMDWLIGKVLNAIEDNGLKNSTFTYFTSDHGGHLEARDGHSQLGGWNGIYKGGKGMGGWEGGIRVPGIFHWPGVLPAGRVIGEPTSLMDVFPTVVQLVGGEVPQDRVIDGHSLVPLLQGAEARSAHEFLFHYCGQHLHAARWHQKDSGSVWKVHYTTPQFHPEGAGACYGRGVCPCSGEGVTHHRPPLLFDLSRDPSEARPLTPDSEPLYHAVIARVGAAVSEHRQTLSPVPQQFSMSNILWKPWLQPCCGHFPFCSCHEDGDGTP

SEQ ID NO: 66844 - protein, 402 aa, Homo sapiens
LAVMGILLGLLLLGHLTVDTYGRPILEVPESVTGPWKGDVNLPCTYDPLQGYTQVLVKWLVQRGSDPVTIFLRDSSGDHIQQAKYQGRLHVSHKVPGDVSLQLSTLEMDDRSHYTCEVTWQTPDGNQVVRDKITELRVQKLSVSKPTVTTGSGYGFTVPQGMRISLQCQARGSPPISYIWYKQQTNNQEPIKVATLSTLLFKPAVIADSGSYFCTAKGQVGSEQHSDIVKFVVKDSSKLLKTKTEAPTTMTYPLKATSTVKQSWDWTTDMDGYLGETSAGPGKSLPVFAIILIISLCCMVVFTMAYIMLCRKTSQQEHVYEAARAHAREANDSGETMRVAIFASGCSSDEPTSQNLGNNYSDEPCIGQEYQIIAQINGNYARLLDTVPLDYEFLATEGKSVC

SEQ ID NO: 66845 - protein, 45 aa, Homo sapiens
IERHKHGPFLLFLSLLHVHIPLVTTSAFLGKSHHDLYGDNVEEMD

SEQ ID NO: 66846 - protein, 643 aa, Homo sapiens
MVVILGASNILWIMFAASQAFKIETTPESRYLAQIGDSVSLTCSTTGCESPFFSWRTQIDSPLNGKVTNEGTTSTLTMNPVSFGNEHSYLCTATCESRKLEKGIQVEIYSFPKDPEIHLSGPLEAGKPITVKCSVADVYPFDRLEIDLLKGDHLMKSQEFLEDADRKSLETKSLEVTFTPVIEDIGKVLVCRAKLHIDEMDSVPTVRQAVKELQVYISPKNTVISVNPSTKLQEGGSVTMTCSSEGLPAPEIFWSKKLDNGNLQHLSGNATLTLIAMRMEDSGIYVCEGVNLIGKNRKEVELIVQAFPRDPEIEMSGGLVNGSSVTVSCKVPSVYPLDRLEIELLKGETILENIEFLEDTDMKSLENKSLEMTFIPTIEDTGKALVCQAKLHIDDMEFEPKQRQSTQTLYVNVAPRDTTVLVSPSSILEEGSSVNMTCLSQGFPAPKILWSRQLPNGELQPLSENATLTLISTKMEDSGVYLCEGINQAGRSRKEVELIIQVTPKDIKLTAFPSESVKEGDTVIISCTCGNVPETWIILKKKAETGDTVLKSIDGAYTIRKAQLKDAGVYECESKNKVGSQLRSLTLDVQGRENNKDYFSPELLVLYFASSLIIPAIGMIIYFARKANMKGSYSLVEAQKSKV

SEQ ID NO: 66847 - protein, 529 aa, Homo sapiens [sequence omitted]

SEQ ID NO: 66848 - protein, 266 aa, Homo sapiens [sequence omitted]

SEQ ID NO: 66849 - protein, 628 aa, Homo sapiens [sequence omitted]

SEQ ID NO: 66850 - protein, 69 aa, Homo sapiens
MTLRPSLLPLHLLLLLLLSAAVCRAEAGLETESPVRTLQVETLSDRRWSPQNHVPSPLLLETRFTYTTR

SEQ ID NO: 66851 - protein, 193 aa, Homo sapiens
MTHNHPTGFLGSLCTALFVSFAAQGKPLVQWGRDMLRAVPLAEEYCRKTIRHTAEYQEHWFYFEAKWQFYLEERKISKDSENKAIFPDNYDAEEREKTYRKWSSEGRGGRRGHDAPMIAYDALLAAGNSWTELCHRAMFHGGESAATGTIAGCLFGLLYGLDLVPKGLYQDLEDKEKLEDLGAALYRLSTEEK

SEQ ID NO: 66852 - protein, 231 aa, Homo sapiens [sequence omitted]

SEQ ID NO: 66853 - protein, 33 aa, Homo sapiens
MIASCLCYLLLPATRLFRALSEMKFRYVAQAGL

SEQ ID NO: 66854 - protein, 73 aa, Homo sapiens
MGGIIVGLILRLPFWGQPSDENCFEDAVYWEMPEGNSTVYIPEDPTFKPSGPSVPSVPMVSPLPMASSVPLVP

SEQ ID NO: 66855 - protein, 780 aa, Homo sapiens
MMLLATSGACLGLLAVAAVAAAGANPAQRDTHSLLPTHRRQKRDWIWNQMHIDEEKNTSLPHHVGKIKSSVSRKNAKYLLKGEYVGKVFRVDAETGDVFAIERLDRENISEYHLTAVIVDKDTGENLETPSSFTIKVHDVNDNWPVFTHRLFNASVPESSAVGTSVISVTAVDADDPTVGDHASVMYQILKGKEYFAIDNSGRIITITKSLDREKQARYEIVVEARDAQGLRGDSGTATVLVTLQDINDNFPFFTQTKYTFVVPEDTRVGTSVGSLFVEDPDEPQNRMTKYSILRGDYQDAFTIETNPAHNEGIIKPMKPLDYEYIQQYSFIVEATDPTIDLRYMSPPAGNRAQVIINITDVDEPPIFQQPFYHFQLKENQKKPLIGTVLAMDPDAARHSIGYSIRRTSDKGQFFRVTKKGDIYNEKELDREVYPWYNLTVEAKELDSTGTPTGKESIVQVHIEVLDENDNAPEFAKPYQPKVCENAVHGQLVLQISAIDKDITPRNVKFKFILNTENNFTLTDNHDNTANITVKYGQFDREHTKVHFLPVVISDNGMPSRTGTSTLTVAVCKCNEQGEFTFCEDMAAQVGVSIQAVVAILLCILTITVITLLIFLRRRLRKQARAHGKSVPEIHEQLVTYDEEGGGEMDTTSYDVSVLNSVRRGGAKPPRPALDARPSLYAQVQKPPRHAPGAHGGPGEMAAMIEVKKDEADHDGDGPPYDTLHIYGYEGSESIAESLSSLGTDSSDSDVDYDFLNDWGPRFKMLAELYGSDPREELLY

SEQ ID NO: 66856 - protein, 70 aa, Homo sapiens
MCKRTDPVPVTIALDSLSWLLLRLPCTTLCQVLHAVSHQDSCPGETPPSLFPLIHLPLPRSVPLFLSTLE

SEQ ID NO: 66857 - protein, 310 aa, Homo sapiens
MLLALLALSAARPSASAESHWCYEVQAESSNYPCLVPVKWGGNCQKDRQSPINIVTTKAKVDKKLGRFFFSGYDKKQTWTVQNNGHSVMMLLENKASISGGGLPAPYQAKQLHLHWSDLPYKGSEHSLDGEHFAMEMHIVHEKEKGTSRNVKEAQDPEDEIAVLAFLVEAGTQVNEGFQPLVEALSNIPKPEMSTTMAESSLLDLLPKEEKLRHYFRYLGSLTTPTCDEKVVWTVFREPIQLHREQILAFSQKLYYDKEQTVSMKDNVRPLQQLGQRTVIKSGAPGRPLPWALPALLGPMLACLLAGFLR

SEQ ID NO: 66858 - protein, 162 aa, Homo sapiens
MDYGHRISTADLRDMMASHRLLLLCLAGLVFVSEAGPTGTGESKCPLMVKVLDAVRGSPAINVAVHVFRKAADDTWEPFASGKTSESGELHGLTTEEEFVEGIYKVEIDTKSYWKALGISPFHEHAEVVFTANDSGPRRYTIAALLSPYSYSTTAVVTNPKE

SEQ ID NO: 66859 - protein, 64 aa, Homo sapiens
MFSLSLSLSLSLSLSLSLSQAGHHSVISSNKTSQVPKTFNSKRNPPSPRQKRRSHRPDGVEWTL

SEQ ID NO: 66860 - protein, 1493 aa, Homo sapiens
MVSVVGPMGLLVVLLVGGCAAEEPPRFIKEPKDQIGVSGGVASFVCQATGDPKPRVTWNKKGKKVNSQRFETIEFDESAGAVLRIQPLRTPRDENVYECVAQNSVGEITVHAKLTVLREDQLPSGFPNIDMGPQLKVVERTRTATMLCAASGNPDPEITWFKDFLPVDPSASNGRIKQLRSGALQIESSEETDQGKYECVATNSAGVRYSSPANLYVRVRRVAPRFSILPMSHEIMPGGNVNITCVAVGSPMPYVKWMQGAEDLTPEDDMPVGRNVLELTDVKDSANYTCVAMSSLGVIEAVAQITVKSLPKAPGTPMVTENTATSITITWDSGNPDPVSYYVIEYKSKSQDGPYQIKEDITTTRYSIGGLSPNSEYEIWVSAVNSIGQGPPSESVVTRTGEQAPASAPRNVQARMLSATTMIVQWEEPVEPNGLIRGYRVYYTMEPEHPVGNWQKHNVDDSLLTTVGSLLEDETYTVRVLAFTSVGDGPLSDPIQVKTQQGVPGQPMNLRAEARSETSITLSWSPPRQESIIKYELLFREGDHGREVGRTFDPTTSYVVEDLKPNTEYAFRLAARSPQGLGAFTPVVRQRTLQSISPKNFKVKMIMKTSVLLSWEFPDNYNSPTPYKIQYNGLTLDVDGRTTKKLITHLKPHTFYNFVLTNRGSSLGGLQQTVTAWTAFNLLNGKPSVAPKPDADGFIMVYLPDGQSPVPVQSYFIVMVPLRKSRGGQFLTPLGSPEDMDLEELIQDISRLQRRSLRHSRQLEVPRPYIAARFSVLPPTFHPGDQKQYGGFDNRGLEPGHRYVLFVLAVLQKSEPTFAASPFSDPFQLDNPDPQPIVDGEEGLIWVIGPVLAVVFIICIVIAILLYKKKPHSKRKDSEPRTKCLLNNADLAPHHPKDPVEMRRINFQTPGMLSHPPIPIADMAEHTERLKANDSLKLSQEYESIDPGQQFTWEHSNLEVNKPKNRYANVIAYDHSRVILQPIEGIMGSDYINANYVDGYRCQNAYIATQGPLPETFGDFWRMVWEQRSATIVMMTRLEEKSRIKCDQYWPNRGTETYGFIQVTLLDTIELATFCVRTFSLHKNGSSEKREVRQFQFTAWPDHGVPEYPTPFLAFLRRVKTCNPPDAGPIVVHCSAGVGRTGCFIVIDAMLERIKPEKTVDVYGHVTLMRSQRNYMVQTEDQYSFIHEALLEAVGCGNTEVPARSLYAYIQKLAQVEPGEHVTGMELEFKRLANSKAHTSRFISANLPCNKFKNRLVNIMPYESTRVCLQPIRGVEGSDYINASFIDGYRQQKAYIATQGPLAETTEDFWRMLWENNSTIVVMLTKLREMGREKCHQYWPAERSARYQYFVVDPMAEYNMPQYILREFKVTDARDGQSRTVRQFQFTDWPEQGVPKSGEGFIDFIGQVHKTKEQFGQDGPISVHCSAGVGRTGVFITLSIVLERMRYEGVVDIFQTVKMLRTQRPAMVQTEDEYQFCYQAALEYLGSFDHYAT

SEQ ID NO: 66861 - protein, 39 aa, Homo sapiens
MIIYLTFPVAMFWVSNQAEWFEDDVIQRKRELWPPEKKF

SEQ ID NO: 66862 - protein, 42 aa, Homo sapiens
MIIYLTFPVAMFWVSNQAEWFEDDVIQRKRELWPPEKFLGAE

SEQ ID NO: 66863 - protein, 72 aa, Homo sapiens
MAWTKYQLFLAGLMLVTGSINTLSAKRFLPSTQSAETRLAKGDPKASEEHTPLDKEAALQPPGSRSISSSSL

SEQ ID NO: 66864 - protein, 63 aa, Homo sapiens
MCCTKSLLLAALMSVLLLHLCGESEASNFDCCLGYTDRILHPKFIVGFTRQLANEGCDINAIM

SEQ ID NO: 66865 - protein, 35 aa, Homo sapiens
MQKWFAELAVHLHLLSAGCIIMRKSPLFPTIGSLC

SEQ ID NO: 66866 - protein, 306 aa, Homo sapiens
MVLEEIWTSLFMWFFYALIPCLLTDEVAILPAPQNLSVLSTNMKHLLMWSPVIAPGETVYYSVEYQGEYESLYTSHIWIPSSWCSLTEGPECDVTDDITATVPYNLRVRATLGSQTSAWSILKHPFNRNSTILTRPGMEITKDGFHLVIELEDLGPQFEFLVAYWRREPGAEEHVKMVRSGGIPVHLETMEPGAAYCVKAQTFVKAIGRYSAFSQTECVEVQGEAIPLVLALFAFVGFMLILVVVPLFVWKMGRLLQYSCCPVVVLPDTLKITNSPQKLISCRREEVDACATAVMSPEELLRAWIS

SEQ ID NO: 66867 - protein, 64 aa, Homo sapiens
MVSEKWVFTILLPQLCCAGCGFCEKVLGQHCNISHWLNVNNILEELIERGHQVTVLTHTHRLFH

SEQ ID NO: 66868 - protein, 573 aa, Homo sapiens [sequence omitted]

SEQ ID NO: 66869 - protein, 14 aa, Homo sapiens
MIQLMLKIFVMCGT

SEQ ID NO: 66870 - protein, 451 aa, Homo sapiens
MAPLGMLLGLLMAACFTFCLSHQNLKEFALTNPEKSSTKETERKETKAEEELDAEVLEVFHPTHEWQALQPGQAVPAGSHVRLNLQTGEREAKLQYEDKFRNNLKGKRLDINTNTYTSQDLKSALAKFKEGAEMESSKEDKARQAEVKRLFRPIEELKKDFDELNVVIETDMQIMVRLINKFNSSSSSLEEKIAALFDLEYYVHQMDNAQDLLSFGGLQVVINGLNSTEPLVKEYAAFVLGAAFSSNPKVQVEAIEGGALQKLLVILATEQPLTAKKKVLFALCSLLRHFPYAQRQFLKLGGLQVLRTLVQEKGTEVLAVRVVTLLYDLVTEKMFAEEEAELTQEMSPEKLQQYRQVHLLPGLWEQGWCEITAHLLALPEHDAREKVLQTLGVLLTTCRDRYRQDPQLGRTLASLQAEYQVLASLELQDGEDEGYFQELLGSVNSLLKELR

SEQ ID NO: 66871 - protein, 156 aa, Homo sapiens
MILQVSGGPWTVALTALLMVLLISVVQSRATPENSVYQERQECYAFNGTQRVVDGLIYNREEYVHFDSAVGEFLAVMELGRPIGEYFNSQKDFMERKRAEVDKVCRHKYELMEPLIRQRRGDVTITAVRGCWTTILSGYFLLKRGVVSGGCSWGSS

SEQ ID NO: 66872 - protein, 76 aa, Homo sapiens
MVARLGLGLLLLALLLPTQIYSSETTTGTSSNSSQSTSNSGLAPNPTNATTKAAGGALQSTASLFVVSLSLLHLYS

SEQ ID NO: 66873 - protein, 24 aa, Homo sapiens
MSILPGLWVSLLSYTSFQVTWDHG

SEQ ID NO: 66874 - protein, 13 aa, Homo sapiens
MSCLILLALHLCK

SEQ ID NO: 66875 - protein, 291 aa, Homo sapiens
MAAGLMIGAGACYCVYKLTIGRDDSEKLEEEGEEEWDDDQELDEEEPDIWFDFETMARPWTEDGDWTEPGAPGGTEDRPSGGGKANRAHPIKQRPFPYEHKNTWSAQNCKNGSCVLDLSKCLFIQGKLLFAEPKDAGFPFSQDINSHLASLSMARNTSPTPDPTVREALCAPDNLNASIESQGQIKMYINEVCRETVSRCCNSFLQQAGLNLLISMTVINNMLAKSASDLKFPLISEGSGCAKVQVLKPLMGLSEKPVLAGELVGAQMLFSFMSLFIRNGNREILLETPAP

SEQ ID NO: 66876 - protein, 192 aa, Homo sapiens
LPLLLLLLLLLGPAGARAQEDEDGDYEELVLALRSEEDGLAEAPEHGTTATFHRCAKDPWRLPGTYVVVLKEETHLSQSERTARRLQAQAARRGYLTKILHVFHGLLPGFLVKMSGDLLELALKLPHVDYIEEDSSVFAQSIPWNLERITPPRYRADEYQPPGVPGPGHFRWRRTLLAATCLKSSFGLAESF

SEQ ID NO: 66877 - protein, 44 aa, Homo sapiens
KWWNTWSSISSLRSLVIASLCMMERRTFTLSQHCPLATNGSTLR

SEQ ID NO: 66878 - protein, 489 aa, Homo sapiens
LSLVLLQALTLDLRWLPHLSGAMATGADVRDILELGGPEGDAASGTISKKDIINPDKKKSKKSSETLTFKRPEGMHREVYALLYSDKKDAPPLLPSDTGQGYRTVKAKLGSKKVRPWKWMPFTNPARKDGAMFFHWRRAAEEGKDYPFARFNKTVQVPVYSEQEYQLYLHDDAWTKAETDHLFDLSRRFDLRFVVIHDRYDHQQFKKRSVEDLKERYYHICAKLANVRAVPGTDLKIPVFDAGHERRRKEQLERLYNRTPEQVAEEEYLLQELRKIEARKKEREKRSQDLQKLITAADTTAEQRRTERKAPKKKLPQKKEAEKPAVPETAGIKFPDFKSAGVTLRSQRMKLPSSVGQKKIKALEQMLLELGVELSPTPTEELVHMFNELRSDLVLLYELKQACANCEYELQMLRHRHEALARAGVLGGPATPASGPGPASAEPAVTEPGLGPDPKDTIIDVVGAPLTPNSRKRRESASSSSSVKKAKKP

SEQ ID NO: 66879 - protein, 201 aa, Homo sapiens
KDTSRANICFKFLGLLTACRMLLEPGRGCCALAILLAIVDIQSGGCINITSSASQEGTRLNLICTVWHKKEEAEGFVVFLCKDRSGDCSPETSLKQLRLKRDPGIDGVGEISSQLMFTISQVTPLHSGTYQCCARSQKSGIRLQGHFFSILFTETGNYTVTGLKQRQHLEFSHNEGTLSSGFLQEKVWVMLVTSLVALQAL

SEQ ID NO: 66880 - protein, 1134 aa, Homo sapiens
VPPFLLPILFLASHVGAAVDLTLLANLRLTDPQRFFLTCVSGEAGAGRGSDAWGPPLLLEKDDRIVRTPPGPPLRLARNGSHQVTLRGFSKPSDLVGVFSCVGGAGARRTRVIYVHNSPGAHLLPDKVTHTVNKGDTAVLSARVHKEKQTDVIWKSNGSYFYTLDWHEAQDGRFLLQLPNVQPPSSGIYSATYLEASPLGSAFFRLIVRGCGAGRWGPGCTKECPGCLHGGVCHDHDGECVCPPGFTGTRCEQACREGRFGQSCQEQCPGISGCRGLTFCLPDPYGCSCGSGWRGSQCQEACAPGHFGADCRLQCQCQNGGTCDRFSGCVCPSGWHGVHCEKSDRIPQILNMASELEFNLETMPRINCAAAGNPFPVRGSIELRKPDGTVLLSTKAIVEPEKTTAEFEVPRLVLADSGFWECRVSTSGGQDSRRFKVNVKVPPVPLAAPRLLTKQSRQLVVSPLVSFSGDGPISTVRLHYRPQDSTMDWSTIVVDPSENVTLMNLRPKTGYSVRVQLSRPGEGGEGAWGPPTLMTTDCPEPLLQPWLEGWHVEGTDRLRVSWSLPLVPGPLVGDGFLLRLWDGTRGQERRENVSSPQARTALLTGLTPGTHYQLDVQLYHCTLLGPASPPAHVLLPPSGPPAPRHLHAQALSDSEIQLTWKHPEALPGPISKYVVEVQVAGGAGDPLWIDVDRPEETSTIIRGLNASTRYLFRMRASIQGLGDWSNTVEESTLGNGLQAEGPVQESRAAEEGLDQQLILAVVGSVSATCLTILAALLTLVCIRRSCLHRRRTFTYQSGSGEETILQFSSGTLTLTRRPKLQPEPLSYPVLEWEDITFEDLIGEGNFGQVIRAMIKKDGLKMNAAIKMLKEYASENDHRDFAGELEVLCKLGHHPNIINLLGACKNRGYLYIAIEYAPYGNLLDFLRKSRVLETDPAFAREHGTASTLSSRQLLRFASDAANGMQYLSEKQFIHRDLAARNVLVGENLASKIADFGLSRGEEVYVKKTMGRLPVRWMAIESLNYSVYTTKSDVWSFGVLLWEIVSLGGTPYCGMTCAELYEKLPQGYRMEQPRNCDDEVYELMRQCWRDRPYERPPFAQIALQLGRMLEARKAYVNMSLFENFTYAGIDATAEEA

SEQ ID NO: 66881 - protein, 339 aa, Homo sapiens
TPGDMGCLLFLLLWALLQAWGSAEVPQRLFPLRCLQISSFANSSWTRTDGLAWLGELQTHSWSNDSDTVRSLKPWSQGTFSDQQWETLQHIFRVYRSSFTRDVKEFAKMLRLSYPLELQVSAGCEVHPGNASNNFFHVAFQGKDILSFQGTSWEPTQEAPLWVNLAIQVLNQDKWTRETVQWLLNGTCPQFVSGLLESGKSELKKQVKPKAWLSRGPSPGPGRLLLVCHVSGFYPKPVWVKWMRGEQEQQGTQPGDILPNADETWYLRATLDVVAGEAAGLSCRVKHSSLEGQDIVLYWGGSYTSMGLIALAVLACLLFLLIVGFTSRFKRQTSYQGVL

SEQ ID NO: 66882 - protein, 27 aa, Homo sapiens
KEKSSCHWWWLGWLITSMLSCKEEFPD

SEQ ID NO: 66883 - protein, 464 aa, Homo sapiens
IKIKMFTIKLLLFIVPLVISSRIDQDNSSFDSLSPEPKSRFAMLDDVKILANGLLQLGHGLKDFVHKTKGQINDIFQKLNIFDQSFYDLSLQTSEIKEEEKELRRTTYKLQVKNEEVKNMSLELNSKLESLLEEKILLQQKVKYLEEQLTNLIQNQPETPEHPEVTSLKTFVEKQDNSIKDLLQTVEDQYKQLNQQHSQIKEIENQLRRTSIQEPTEISLSSKPRAPRTTPFLQLNEIRNVKHDGIPAECTTIYNRGEHTSGMYAIRPSNSQVFHVYCDVISGSPWTLIQHRIDGSQNFNETWENYKYGFGRLDGEFWLGLEKIYSIVKQSNYVLRIELEDWKDNKHYIEYSFYLGNHETNYTLHLVAITGNVPNAIPENKDLVFSTWDHKAKGHFNCPEGYSGGWWWHDECGENNLNGKYNKPRAKSKPERRRGLSWKSQNGRLYSIKSTKMLIHPTDSESFE

SEQ ID NO: 66884 - protein, 59 aa, Homo sapiens
LGLMPRVLWLFWISSFTHYQSTRKGIPIETSSCGWTIEQSVKLTGSMRPSTVSSSTSGG

SEQ ID NO: 66885 - protein, 54 aa, Homo sapiens
ILVMFYYLMMNSSKAQEYGMRALSLAKEQQLDVHEQSTIQELLSLISTEDHPIT

SEQ ID NO: 66886 - protein, 24 aa, Homo sapiens
LLSVCLLCLVAGTAVAVKMASTSR

SEQ ID NO: 66887 - protein, 499 aa, Homo sapiens
IILQPHFKMKTFTWTLGVLFFLLVDTGHCRGGQFKIKKINQRRYPRATDGKEEAKKCAYTFLVPEQRITGPICVNTKGQDASTIKDMITRMDLENLKDVLSRQKREIDVLQLVVDVDGNIVNEVKLLRKESRNMNSRVTQLYMQLLHEIIRKRDNSLELSQLENKILNVTTEMLKMATRYRELEVKYASLTDLVNNQSVMITLLEEQCLRIFSRQDTHVSPPLVQVVPQHIPNSQQYTPGLLGGNEIQRDPGYPRDLMPPPDLATSPTKSPFKIPPVTFINEGPFKDCQQAKEAGHSVSGIYMIKPENSNGPMQLWCENSLDPGGWTVIQKRTDGSVNFFRNWENYKKGFGNIDGEYWLGLENIYMLSNQDNYKLLIELEDWSDKKVYAEYSSFRLEPESEFYRLRLGTYQGNAGDSMMWHNGKQFTTLDRDKDMYAGNCAHFHKGGWWYNACAHSNLNGVWYRGGHYRSKHQDGIFWAEYRGGSYSLRAVQMMIKPID

SEQ ID NO: 66888 - protein, 15 aa, Homo sapiens
IQRKLMELWIVSAWL

SEQ ID NO: 66889 - protein, 614 aa, Homo sapiens
RMGALRPTLLPPSLPLLLLLMLGMGCWAREVLVPEGPLYRVAGTAVSISCNVTGYEGPAQQNFEWFLYRPEAPDTALGIVSTKDTQFSYAVFKSRVVAGEVQVQRLQGDAVVLKIARLQAQDAGIYECHTPSTDTRYLGSYSGKVELRVLPDVLQVSAAPPGPRGRQAPTSPPRMTVHEGQELALGCLARTSTQKHTHLAVSFGRSVPEAPVGRSTLQEVVGIRSDLAVEAGAPYAERLAAGELRLGKEGTDRYRMVVGGAQAGDAGTYHCTAAEWIQDPDGSWAQIAEKRAVLAHVDVQTLSSQLAVTVGPGERRIGPGEPLELLCNVSGALPPAGRHAAYSVGWEMAPAGAPGPGRLVAQLDTEGVGSLGPGYEGRHIAMEKVASRTYRLRLEAARPGDAGTYRCLAKAYVRGSGTRLREAASARSRPLPVHVREEGVVLEAVAWLAGGTVYRGETASLLCNISVRGGPPGLRLAASWWVERPEDGELSSVPAQLVGGVGQDGVAELGVRPGGGPVSVELVGPRSHRLRLHSLGPEDEGVYHCAPSAWVQHADYSWYQAGSARSGPVTVYPYMHALDTLFVPLLVGTGVALVTGATVLGTITCCFMKRLRKR

SEQ ID NO: 66890 - protein, 389 aa, Homo sapiens
KLLGILMMANVFIYFIMEVSKSSSQEKNGKGEVIIPKEKFWKISTPPEAYWNREQEKLNRQYNPILSMLTNQTGEAGRLSNISHLNYCEPDLRVTSVVTGFNNLPDRFKDFLLYLRCRNYSLLIDQPDKCAKKPFLLLAIKSLTPHFARRQAIRESWGQESNAGNQTVVRVFLLGQTPPEDNHPDLSDMLKFESEKHQDILMWNYRDTFFNLSLKEVLFLRWVSTSCPDTEFVFKGDDDVFVNTHHILNYLNSLSKTKAKDLFIGDVIHNAGPHRDKKLKYYIPEVVYSGLYPPYAGGGGFLYSGHLALRLYHITDQVHLYPIDDVYTGMCLQKLGLVPEKHKGFRTFDIEEKNKNNICSYVDLMLVHSRKPQEMIDIWSQLQSAHLKC

SEQ ID NO: 66891 - protein, 23 aa, Homo sapiens
KCIFLSFLFSSWGLQFTVVSGQS

SEQ ID NO: 66892 - protein, 16 aa, Homo sapiens
ILSTPYKLLLLLVLAG

SEQ ID NO: 66893 - protein, 38 aa, Homo sapiens
LNLTFLFVLLTPLPRSLQRRSSELEKFYEMPFSLEHLT

SEQ ID NO: 66894 - protein, 15 aa, Homo sapiens
LMLTTSVYFLLTSYT

SEQ ID NO: 66895 - protein, 64 aa, Homo sapiens
MATGPQVPLLWLATGVLLLLSAQPWAESGKVLVVPIDGSHWLACGRPCGSSMPEATRRWSSPQR

SEQ ID NO: 66896 - protein, 67 aa, Homo sapiens
LAQAALFTLLPRSAWMLKSLWLSLVAWHWGEAVLLSPHLPAAAEWPRAACDSGGEHHHPGLCPLGPG

SEQ ID NO: 66897 - protein, 14 aa, Homo sapiens
MPLPSLLASVLCVT

SEQ ID NO: 66898 - protein, 231 aa, Homo sapiens
VTALLLPLALLLHAARPSQFRVSPLDRTWNLGETVELKCQVLLSNPTSGCSWLFQPRGAAASPTFLLYLSQNKPKAAEGLDTQRFSGKRLGDTFVLTLSDFRRENEGYYFCSALSNSIMYFSHFVPVFLPAKPTTTPAPRPPTPAPTIASQPLSLRPEACRPAAGGAVHTRGLDFACDIYIWAPLAGTCGVLLLSLVITLYCNHRNRRRVCKCPRPVVKSGDKPSLSARYV

SEQ ID NO: 66899 - protein, 468 aa, Homo sapiens
IFHFGLMMEKKCTLYFLVLLPFFMILVTAELEESPEDSIQLGVTRNKIMTAQYECYQKIMQDPIQQAEGVYCNRTWDGWLCWNDVAAGTESMQLCPDYFQDFDPSEKVTKICDQDGNWFRHPASNRTWTNYTQCNVNTHEKVKTALNLFYLTIIGHGLSIASLLISLGIFFYFKSLSCQRITLHKNLFFSFVCNSVVTIIHLTAVANNQALVATNPVSCKVSQFIHLYLMGCNYFWMLCEGIYLHTLIVVAVFAEKQHLMWYYFLGWGFPLIPACIHAIARSLYYNDNCWISSDTHLLYIIHGPICAALLVNLFFLLNIVRVLITKLKVTHQAESNLYMKAVRATLILVPLLGIEFVLIPWRPEGKIAEEVYDYIMHILMHFQGLLVSTIFCFFNGEVQAILRRNWNQYKIQFGNSFSNSEALRSASYTVSTISDGPGYSHDCPSEHLNGKSIHDIENVLLKPENLYN

SEQ ID NO: 66900 - protein, 87 aa, Homo sapiens
MTAWILLPVSLSAFSITGIWTVYAMAVMNHHVCPVENWSYNESCPPDPAEQGGPKTCCTLDDVPLISGPDLPPALRAAPGAESALLG

SEQ ID NO: 66901 - protein, 112 aa, Homo sapiens
VDIFSLGLILFELLYPFSTQMERVRTLTDVRNLKFPPLFTQKYPCEYVMVQDMLSPSPMERPEAINIIENAVFEDLDFPGKTVLRQRSRSLSSSGTKHSRQSNNSHSPLPSN

SEQ ID NO: 66902 - protein, 402 aa, Homo sapiens
VEGTMNWHLPLFLLASVTLPSICSHFNPLSLEELGSNTGIQVFNQIVKSRPHDNIVISPHGIASVLGMLQLGADGRTKKQLAMVMRYGVNGVGKILKKINKAIVSKKNKDIVTVANAVFVKNASEIEVPFVTRNKDVFQCEVRNVNFEDPASACDSINAWVKNETRDMIDNLLSPDLIDGVLTRLVLVNAVYFKGLWKSRFQPENTKKRTFVAADGKSYQVPMLAQLSVFRCGSTSAPNDLWYNFIELPYHGESISMLIALPTESSTPLSAIIPHISTKTIDSWMSIMVPKRVQVILPKFTAVAQTDLKEPLKVLGITDMFDSSKANFAKITTGSENLHVSHILQKAKIEVSEDGTKASAATTAILIARSSPPWFIVDRPFLFFIRHNPTGAVLFMGQINKP

SEQ ID NO: 66903 - protein, 14 aa, Homo sapiens
MMLTVLVLFLYCNF

SEQ ID NO: 66904 - protein, 461 aa, Homo sapiens
ISSSAMPPGPWESCFWVGGLILWLSVGSSGDAPPTPQPKCADFQSANLFEGTDLKVQFLLFVPSNPSCGQLVEGSSDLQNSGFNATLGTKLIIHGFRVLGTKPSWIDTFIRTLLRATNANVIAVDWIYGSTGVYFSAVKNVIKLSLEISLFLNKLLVLGVSESSIHIIGVSLGAHVGGMVGQLFGGQLGQITGLDPAGPEYTRASVEERLDAGDALFVEAIHTDTDNLGIRIPVGHVDYFVNGGQDQPGCPTFFYAGYSYLICDHMRAVHLYISALENSCPLMAFPCASYKAFLAGRCLDCFNPFLLSCPRIGLVEQGGVKIEPLPKEVKVYLLTTSSAPYCMHHSLVEFHLKELRNKDTNIEVTFLSSNITSSSKITIPKQQRYGKGIIAHATPQCQINQVKFKFQSSNRVWKKDRTTIIGKFCTALLPVNDREKMVCLPEPVNLQASVTVSCDLKIACV

SEQ ID NO: 66905 - protein, 9 aa, Homo sapiens
LFLIVYVLW

SEQ ID NO: 66906 - protein, 44 aa, Homo sapiens
KPLNFFGLALGSVAPGTPSVSILGWTLDRNLCSTVVVKCGCLAS

SEQ ID NO: 66907 - protein, 25 aa, Homo sapiens
MLCLLILGTMHCRTFRLELSMVLRF

SEQ ID NO: 66908 - protein, 28 aa, Homo sapiens
TGLSSLWSSILLTPSHFLASVSPVCNCV

SEQ ID NO: 66909 - protein, 24 aa, Homo sapiens
ILAFFFFFFFSSPFLLPLVLQSQK

SEQ ID NO: 66910 - protein, 263 aa, Homo sapiens
VAWLSRSPGLAVLLCLPLSSAAVLCAVPHLACRMKNPMLEVVSLLLEKLLLISNFTLFSSGAAGEDKGRNSFYETSSFHRGDVLEVPRTHLTHYGIYLGDNRVAHMMPDILLALTDDMGRTQKVVSNKRLILGVIVKVASIRVDTVEDFAYGANILVNHLDESLQKKALLNEEVARRAEKLLGFTPYSLLWNNCEHFVTYCRYGTPISPQSDKFCETVKIIIRDQRSVLASAVLGLASIVCTGLVSYTTLPAIFIPFFLWMAG

SEQ ID NO: 66911 - protein, 23 aa, Homo sapiens
LVPWVYFVFLSLLHLSRPFRAAL

SEQ ID NO: 66912 - protein, 34 aa, Homo sapiens
ILSMRELLLCLLMEVFTAQGFLILIQEIRSWYGD

SEQ ID NO: 66913 - protein, 612 aa, Homo sapiens
INMHFQAFWLCLGLLFISINAEFMDDDVETEDFEENSEEIDVNESELSSEIKYKTPQPIGEVYFAETFDSGRLAGWVLSKAKKDDMDEEISIYDGRWEIEELKENQVPGDRGLVLKSRAKHHAISAVLAKPFIFADKPLIVQYEVNFQDGIDCGGAYIKLLADTDDLILENFYDKTSYIIMFGPDKCGEDYKLHFIFRHKHPKTGVFEEKHAKPPDVDLKKFFTDRKTHLYTLVMNPDDTFEVLVDQTVVNKGSLLEDVVPPIKPPKEIEDPNDKKPEEWDERAKIPDPSAVKPEDWDESEPAQIEDSSVVKPAGWLDDEPKFIPDPNAEKPDDWNEDTDGEWEAPQILNPACRIGCGEWKPPMIDNPKYKGVWRPPLVDNPNYQGIWSPRKIPNPDYFEDDHPFLLTSFSALGLELWSMTSDIYFDNFIICSEKEVADHWAADGWRWKIMIANANKPGVLKQLMAAAEGHPWLWLIYLVTAGVPIALITSFCWPRKVKKKHKDTEYKKTDICIPQTKGVLEQEEKEEKAALEKPMDLEEEKKQNDGEMLEKEEESEPEEKSEEEIEIIEGQEESNQSNKSGSEDEMKEADESTGSGDGPIKSVRKRRVRKD

SEQ ID NO: 66914 - protein, 188 aa, Homo sapiens
LLSIVLCTVTLFLLQLKFLKPKINSFYAFEVKDAKGRTVSLEKYKGKVSLVVNVASDCQLTDRNYLGLKELHKEFGPSHFSVLAFPCNQFGESEPRPSKEVESFARKNYGVTFPIFHKIKILGSEGEPAFRFLVDSSKKEPRWNFWKYLVNPEGQVVKFWKPEEPIEVIRPDIAALVRQVIIKKKEDL

SEQ ID NO: 66915 - protein, 15 aa, Homo sapiens
LLSLPNLLLPLMFLP

SEQ ID NO: 66916 - protein, 68 aa, Homo sapiens
LPYILMGSLTILTAILTLFLPESFGTPLPDTIDQMLRVKGMKHRKTPSHTRMLKDGQERPTILKSTAF

SEQ ID NO: 66917 - protein, 329 aa, Homo sapiens
LTSSLVFLMHLLLLQPGEPSSEVKVLGPEYPILALVGEEVEFPCHLWPQLDAQQMEIRWFRSQTFNVVHLYQEQQELPGRQMPAFRNRTKLVKDDIAYGSVVLQLHSIIPSDKGTYGCRFHSDNFSGEALWELEVAGLGSDPHLSLEGFKEGGIQLRLRSSGWYPKPKVQWRDHQGQCLPPEFEAIVWDAQDLFSLETSVVVRAGALSNVSVSIQNLLLSQKKELVVQIADVFVPGASAWKSAFVATLPLLLVLAALALGVLRKQRRSREKLRKQAEKRQEKLTAELEKLQTELDWRRAEGQAECFVLASHPPGEGIQAASNSTTTLNA

SEQ ID NO: 66918 - protein, 817 aa, Homo sapiens
LVGSPAWVPESCEKEMRLLLALLGVLLSVPGPPVLSLEASEEVELEPCLAPSLEQQEQELTVALGQPVRLCCGRAERGGHWYKEGSRLAPAGRVRGWRGRLEIASFLPEDAGRYLCLARGSMIVLQNLTLITGDSLTSSNDDEDPKSHRDPSNRHSYPQQAPYWTHPQRMEKKLHAVPAGNTVKFRCPAAGNPTPTIRWLKDGQAFHGENRIGGIRLRHQHWSLVMESVVPSDRGTYTCLVENAVGSIRYNYLLDVLERSPHRPILQAGLPANTTAVVGSDVELLCKVYSDAQPHIQWLKHIVINGSSFGADGFPYVQVLKTADINSSEVEVLYLRNVSAEDAGEYTCLAGNSIGLSYQSAWLTVLPEEDPTWTAAAPEARYTDIILYASGSLALAVLLLLAGLYRGQALHGRHPRPPATVQKLSRFPLARQFSLESGSSGKSSSSLVRGVRLSSSGPALLAGLVSLDLPLDPLWEFPRDRLVLGKPLGEGCFGQVVRAEAFGMDPARPDQASTVAVKMLKDNASDKDLADLVSEMEVMKLIGRHKNIINLLGVCTQEGPLYVIVECAAKGNLREFLRARRPPGPDLSPDGPRSSEGPLSFPVLVSCAYQVARGMQYLESRKCIHRDLAARNVLVTEDNVMKIADFGLARGVHHIDYYKKTSNGRLPVKWMAPEALFDRVYTHQSDVWSFGILLWEIFTLGGSPYPGIPVEELFSLLREGHRMDRPPHCPPELYGLMRECWHAAPSQRPTFKQLVEALDKVLLAVSEEYLDLRLTFGPYSPSGGDASSTCSSSDSVFSHDPLPLGSSSFPFGSGVQT

SEQ ID NO: 66919 - protein, 918 aa, Homo sapiens
VGVLLLLGALNKASTVIHYEIPEEREKGFAVGNVVANLGLDLGSLSARRFRVVSGASRRFFEVNRETGEMFVNDRLDREELCGTLPSCTVTLELVVENPLELFSVEVVIQDINDNNPAFPTQEMKLEISEAVAPGTRFPLESAHDPDVGSNSLQTYELSRNEYFALRVQTREDSTKYAELVLERALDREREPSLQLVLTALDGGTPALSASLPIHIKVLDANDNAPVFNQSLYRARVLEDAPSGTRVVQVLATDLDEGPNGEIIYSFGSHNRAGVRQLFALDLVTGMLTIKGRLDFEDTKLHEIYIQAKDKGANPEGAHCKVLVEVVDVNDNAPEITVTSVYSPVPEDAPLGTVIALLSVTDLDAGENGLVTCEVPPGLPFSLTSSLKNYFTLKTSADLDRETVPEYNLSITARDAGTPSLSALTIVRVQVSDINDNPPQSSQSSYDVYIEENNLPGAPILNLSVWDPDAPQNARLSFFLLEQGAETGLVGRYFTINRDNGIVSSLVPLDYEDRREFELTAHISDGGTPVLATNISVNIFVTDRNDNAPQVLYPRPGGSSVEMLPRGTSAGHLVSRVVGWDADAGHNAWLSYSLLGSPNQSLFAIGLHTGQISTARPVQDTDSPRQTLTVLIKDNGEPSLSTTATLTVSVTEDSPEARAEFPSGSAPREQKKNLTFYLLLSLILVSVGFVVTVFGVIIFKVYKWKQSRDLYRAPVSSLYRTPGPSLHADAVRGGLMSPHLYHQVYLTTDSRRSDPLLKKPGAASPLASRQNTLRSCDPVFYRQVLGAESAPPGQQAPPNTDWRFSQAQRPGTSGSQNGDDTGTWPNNQFDTEMLQAMILASASEAADGSSTLGGGAGTMGLSARYGPQFTLQHVPDYRQNVYIPGSNATLTNAAGKRDGKAPAGGNGNKKKSGKKEKK

SEQ ID NO: 66920 - protein, 41 aa, Homo sapiens
VQAVFSVFFMASKILQKRFMAASLPVVSAFSEISHSNCLLF

SEQ ID NO: 66921 - protein, 78 aa, Homo sapiens
KVTGIFLLSALALLSLSGNTGADSLGREAKCYNELNGCTKIYDPVCGTDGNTYPNECVLCFENRKRQTSILIQKSGPC

SEQ ID NO: 66922 - protein, 25 aa, Homo sapiens
MASSEILGCFWLLLASPVGEAADYI

SEQ ID NO: 66923 - protein, 19 aa, Homo sapiens
KDILIFLILLLIIKESLLD

SEQ ID NO: 66924 - protein, 112 aa, Homo sapiens
LKSSFLRGLGSWKSNPLRLGGWTILLTLTMGQGEPGGPQGDPWVPHELLLPSLCDSSHASSWGSGSITCAWRGGDSSSHPLVSGHILSNSPVAAVMCSSMGTHLSPFKGTLL

SEQ ID NO: 66925 - protein, 25 aa, Homo sapiens
IIKKAAAFSRRLFLMICILARGDQL

SEQ ID NO: 66926 - protein, 43 aa, Homo sapiens [sequence omitted]

SEQ ID NO: 66927 - protein, 55 aa, Homo sapiens
LVSGSLCLSLTLFLAFSVSLSLSLSLPRPLPQTCPPAPSAMWRTFKRWRCWNVTG

SEQ ID NO: 66928 - protein, 20 aa, Homo sapiens
LFFFSFFYFLWILWLITQQV

SEQ ID NO: 66929 - protein, 138 aa, Homo sapiens
RTHTRGAPSVFFIYLLCFVSAYITDENPEVMIPFTNANYDSHPMLYFSRAEVAELQLRAASSHEHIAARLTEAVHTMLSSPLEYLPPWDPKDYSARWNEIFGNNLGALAMFCVLYPENIEARDMAKDYMERMAAQPSW

SEQ ID NO: 66930 - protein, 17 aa, Homo sapiens
LGTVAVMLPVLSLETAV

SEQ ID NO: 66931 - protein, 31 aa, Homo sapiens
TSSSSSLHRDFSINLLVCLLLLSCTLSTKSL

SEQ ID NO: 66932 - protein, 31 aa, Homo sapiens
MMFGYCLIMTIFSGKEQPMHLHSITWTSLLQ

SEQ ID NO: 66933 - protein, 40 aa, Homo sapiens
KGHRPSGLLSTACLCLATQCSAGSSAMCSTNSSEMDTRTS

SEQ ID NO: 66934 - protein, 9 aa, Homo sapiens
MKTYFMFLI

SEQ ID NO: 66935 - protein, 10 aa, Homo sapiens
KRFLKCLWFL

SEQ ID NO: 66936 - protein, 460 aa, Homo sapiens
LLARCLLLVLVSSLLVCSGLACGPGRGFGKRRHPKKLTPLAYKQFIPNVAEKTLGASGRYEGKISRNSERFKELTPNYNPDIIFKDEENTGADRLMTQRCKDKLNALAISVMNQWPGVKLRVTEGWDEDGHHSEESLHYEGRAVDITTSDRDRSKYGMLARLAVEAGFDWVYYESKAHIHCSVKAENSVAAKSGGCFPGSATVHLEQGGTKLVKDLSPGDRVLAADDQGRLLYSDFLTFLDRDDGAKKVFYVIETREPRERLLLTAAHLLFVAPHNDSATGEPEASSGSGPPSGGALGPRALFASRVRPGQRVYVVAERDGDRRLLPAAVHSVTLSEEAAGAYAPLTAQGTILINRVLASCYAVIEEHSWAHRAFAPFRLAHALLAALAPARTDRGGDSGGGDRGGGGGRVALTAPGAADAPGAGATAGIHWYSQLLYQIGTWLLDSEALHPLGMAVKSS

SEQ ID NO: 66937 - protein, 329 aa, Homo sapiens
LPTGSFPFLLLLLLLCIQLGGGQKKKENLLAEKVEQLMEWSSRRSIFRMNGDKFRKFIKAPPRNYSMIVMFTALQPQRQCSVCRQANEEYQILANSWRYSSAFCNKLFFSMVDYDEGTDVFQQLNMNSAPTFMHFPPKGRPKRADTFDLQRIGFAAEQLAKWIADRTDVHIRVFRPPNYSGTIALALLVSLVGGLLYLRRNNLEFIYNKTGWAMVSLCIVFAMTSGQMWNHIRGPPYAHKNPHNGQVSYIHGSSQAQFVAESHIILVLNAAITMGMVLLNEAATSKGDVGKRRIICLVGLGLVVFFFSFLLSIFRSKYHGYPYSDLDFE

SEQ ID NO: 66938 - protein, 27 aa, Homo sapiens
VAAFLSLVALLRRRRNEAEAERRSQPC

SEQ ID NO: 66939 - protein, 935 aa, Homo sapiens
KMLAGCFLLILGQIVLLPAEARERSRGRSISRGRHARTHPQTALLESSCENKRADLVFIIDSSRSVNTHDYAKVKEFIVDILQFLDIGPDVTRVGLLQYGSTVKNEFSLKTFKRKSEVERAVKRMRHLSTGTMTGLAIQYALNIAFSEAEGARPLRENVPRVIMIVTDGRPQDSVAEVAAKARDTGILIFAIGVGQVDFNTLKSIGSEPHEDHVFLVANFSQIETLTSVFQKKLCTAHMCSTLEHNCAHFCINIPGSYVCRCKQGYILNSDQTTCRIQDLCAMEDHNCEQLCVNVPGSFVCQCYSGYALAEDGKRCVAVDYCASENHGCEHECVNADGSYLCQCHEGFALNPDKKTCTKIDYCASSNHGCQHECVNTDDSYSCHCLKGFTLNPDKKTCRRINYCALNKPGCEHECVNMEESYYCRCHRGYTLDPNGKTCSRVDHCAQQDHGCEQLCLNTEDSFVCQCSEGFLINEDLKTCSRVDYCLLSDHGCEYSCVNMDRSFACQCPEGHVLRSDGKTCAKLDSCALGDHGCEHSCVSSEDSFVCQCFEGYILREDGKTCRRKDVCQAIDHGCEHICVNSDDSYTCECLEGFRLAEDGKRCRRKDVCKSTHHGCEHICVNNGNSYICKCSEGFVLAEDGRRCKKCTEGPIDLVFVIDGSKSLGEENFEVVKQFVTGIIDSLTISPKAARVGLLQYSTQVHTEFTLRNFNSAKDMKKAVAHMKYMGKGSMTGLALKHMFERSFTQGEGARPLSTRVPRAAIVFTDGRAQDDVSEWASKAKANGITMYAVGVGKAIEEELQEIASEPTNKHLFYAEDFSTMDEISEKLKKGICEALEDSDGRQDSPAGELPKTVQQPTVQHRYLFEEDNLLRSTQKLSHSTKPSGSPLEEKHDQCKCENLIMFQNLANEEVRKLTQRLEEMTQRMEALENRLRYR

SEQ ID NO: 66940 - protein, 913 aa, Homo sapiens
KMLAGCFLLILGQIVLLPAEARERSRGRSISRGRHARTHPQTALLESSCENKRADLVFIIDSSRSVNTHDYAKVKEFIVDILQFLDIGPDVTRVGLLQYGSTVKNEFSLKTFKRKSEVERAVKRMRHLSTGTMTGLAIQYALNIAFSEAEGARPLRENVPRVIMIVTDGRPQDSVAEVAAKARDTGILIFAIGVGQVDFNTLKSIGSEPHEDHVFLVANFSQIETLTSVFQKKLCTAHMCSTLEHNCAHFCINIPGSYVCRCKQGYILNSDQTTCRIQDLCAMEDHNCEQLCVNVPGSFVCQCYSGYALAEDGKRCVAVDYCASENHGCEHECVNADGSYLCQCHEGFALNPDKKTCTRINYCALNKPGCEHECVNMEESYYCRCHRGYTLDPNGKTCSRVDHCAQQDHGCEQLCLNTEDSFVCQCSEGFLINEDLKTCSRVDYCLLSDHGCEYSCVNMDRSFACQCPEGHVLRSDGKTCAKLDSCALGDHGCEHSCVSSEDSFVCQCFEGYILREDGKTCRRKDVCQAIDHGCEHICVNSDDSYTCECLEGFRLAEDGKRCRRKDVCKSTHHGCEHICVNNGNSYICKCSEGFVLAEDGRRCKKCTEGPIDLVFVIDGSKSLGEENFEVVKQFVTGIIDSLTISPKAARVGLLQYSTQVHTEFTLRNFNSAKDMKKAVAHMKYMGKGSMTGLALKHMFERSFTQGEGARPLSTRVPRAAIVFTDGRAQDDVSEWASKAKANGITMYAVGVGKAIEEELQEIASEPTNKHLFYAEDFSTMDEISEKLKKGICEALEDSDGRQDSPAGELPKTVQQPTESEPVTINIQDLLSCSNFAVQHRYLFEEDNLLRSTQKLSHSTKPSGSPLEEKHDQCKCENLIMFQNLANEEVRKLTQRLEEMTQRMEALENRLRYR

SEQ ID NO: 66941 - protein, 272 aa, Homo sapiens
TWFMVIALLGVWTSVAVVWFDLVDYEEVLAKAKDFRYNLSEVLQGKLGIYDADGDGDFDVDDAKVLLGLKERSTSEPAVPPEEAEPHTEPEEQVPVEAEPQNIEDEAKEQIQSLLHEMVHAEHVEGEDLQQEDGPTGEPQQEDDEFLMATDVDDRFETLEPEVSHEETEHSYHVEETVSQDCNQDMEEMMSEQENPDSSEPVVEDERLHHDTDDVTYQVYEEQVYEPLENEGIEITEVTAPPEDNPVEDSQVIVEEVSIFPVEEQQEVPPDT

SEQ ID NO: 66942 - protein, 73 aa, Homo sapiens
IYLFGCFLSFLGVFLVTRNREKEHLQQSYIDFGNIPGKQMLDKIQPDSHSLSYGTLPDGSDSTKSQSGEKKEV

SEQ ID NO: 66943 - protein, 33 aa, Homo sapiens
LQALGCSAGVLLCLPGWCAVVRPRLTAASATQM

SEQ ID NO: 66944 - protein, 281 aa, Homo sapiens
KSSYQIQNMIFLLLMLSLELQLHQIAALFTVTVPKELYIIEHGSNVTLECNFDTGSHVNLGAITASLQKVENDTSPHRERATLLEEQLPLGKASFHIPQVQVRDEGQYQCIIIYGVAWDYKYLTLKVKASYRKINTHILKVPETDEVELTCQATGYPLAEVSWPNVSVPANTSHSRTPEGLYQVTSVLRLKPPPGRNFSCVFWNTHVRELTLASIDLQSQMEPRTHPTWLLHIFIPFCIIAFIFIATVIALRKQLCQKLYSSKDTTKRPVTTTKREVNSAI

SEQ ID NO: 66945 - protein, 17 aa, Homo sapiens
LFLFCWQFGVLYPPLPQ

SEQ ID NO: 66946 - protein, 50 aa, Homo sapiens
RSLMMKSLLFISIVIIRQEANLRVSRRLSSPLLVINRPRAMAFRINLGRN

SEQ ID NO: 66947 - protein, 33 aa, Homo sapiens
VVVCKCYSLFLFLFLFFEMESYSVVQAGVSAVA

SEQ ID NO: 66948 - protein, 24 aa, Homo sapiens
LEAYGWKMKRPRTSFLAASLFCVA

SEQ ID NO: 66949 - protein, 139 aa, Homo sapiens
LILAFCVAGAAALSVASLCWCRLQREIRLTQKADYATAKAPGSPAAPRISPGDQRLAQSAEMYHYQHQRQQMLCLERHKEPPKELDTASSDEENEDGDFTVYECPGLAPTGEMEVRNPLFDHAALSAPLPAPSSPPALP

SEQ ID NO: 66950 - protein, 588 aa, Homo sapiens
LGGLALLCCAAAAAAAAVASAASAGNVTGGGGAAGQVDASPGPGLRGEPSHPFPRATAPTAQAPRTGPPRATVHRPLAATSPAQSPETTPLWATAGPSSTTFQAPLGPSPTTPPAAERTSTTSQAPTRPAPTTLSTTTGPAPTTPVATTVPAPTTPRTPTPDLPSSSNSSVLPTPPATEAPSSPPPEYVCNCSVVGSLNVNRCNQTTGQCECRPGYQGLHCETCKEGFYLNYTSGLCQPCDCSPHGALSIPCNSSGKCQCKVGVIGSICDRCQDGYYGFSKNGCLPCQCNNRSASCDALTGACLNCQENSKGNHCEECKEGFYQSPDATKECLRCPCSAVTSTGSCSIKSSELEPECDQCKDGYIGPNCNKCENGYYNFDSICRKCQCHGHVDPVKTPKICKPESGECINCLHNTTGFWCENCLEGYVHDLEGNCIKKEVILPTPEGSTILVSNASLTTSVPTPVINSTFTPTTLQTIFSVSTSENSTSALADVSWTQFNIIILTVIIIVVVLLMGFVGAVYMYREYQNRKLNAPFWTIELKEDNISFSSYHDSIPNADVSGLLEDDGNEVAPNGQLTLTTPIHNYKA

SEQ ID NO: 66951 - protein, 196 aa, Homo sapiens
LGIWTLLPLVLTSVARLSSKSVNAQVTDINSKGLELRKTVTTVETQNLEGLHHDGQFCHKPCPPGERKARDCTVNGDEPDCVPCQEGKEYTDKAHFSSKCRRCRLCDEGHGLEVEINCTRTQNTKCRCKPNFFCNSTVCEHCDPCTKCEHGIIKECTLTSNTKCKEEGSRSNLGWLCLLLLPIPLIVWGNSGNKFI

SEQ ID NO: 66952 - protein, 146 aa, Homo sapiens
LVTSLVVVLLWEAGAVPAPKVPIKMQVKHWPSEQDPEKAWGARVVEPPEKDDQLVVLFPVQKPKLLTTEEKPRGQGRGPILPGTKAWMETEDTLGHVLSPEPDHDSLYHPPPEEDQGEERPRLWVMPNHQVLLGPEEDQDHIYHPQ

SEQ ID NO: 66953 - protein, 47 aa, Homo sapiens
MTVCSEVLLASFFCLPLLLSLKPFLQKKWKRGTGNPYSNSITWNEFL

SEQ ID NO: 66954 - protein, 29 aa, Homo sapiens
LQLSFLWGIIHLSLSVMPFLTCHLTFSLP

SEQ ID NO: 66955 - protein, 308 aa, Homo sapiens
VRTAALALLLGALHWAPARCEEYDYYGWQAEPLHGRSYSKPPQCLDIPADLPLCHTVGYKRMRLPNLLEHESLAEVKQQASSWLPLLAKRCHSDTQVFLCSLFAPVCLDRPIYPCRSLCEAVRAGCAPLMEAYGFPWPEMLHCHKFPLDNDLCIAVQFGHLPATAPPVTKICAQCEMEHSADGLMEQMCSSDFVVKMRIKEIKIENGDRKLIGAQKKKKLLKPGPLKRKDTKRLVLHMKNGAGCPCPQLDSLAGSFLVMGRKVDGQLLLMAVYRWDKKNKEMKFAVKFMFSYPCSLYYPFFYGAAEPH

SEQ ID NO: 66956 - protein, 44 aa, Homo sapiens
RQEYCILKVPGLLFFLITNDLGSSDHSCLPRVKVPFKALLPGEL

SEQ ID NO: 66957 - protein, 123 aa, Homo sapiens
LVFGLILFVWELLPTTLLVGFFRVHRPPQDLSTSHILNGQVFASRSYFFDRAGHCEDEGCSWEHSRGESTSMSGSLGSGSWYGAIGREPGWYGGSQTKTTPLLFSQVPGPGGHHHSLYSTPQT

SEQ ID NO: 66958 - protein, 856 aa, Homo sapiens
IPPSQQITMLQTKDLIWTLFFLGTAVSLQVDIVPSQGEISVGESKFFLCQVAGDAKDKDISWFSPNGEKLTPNQQRISVVWNDDSSSTLTIYNANIDDAGIYKCVVTGEDGSESEATVNVKIFQKLMFKNAPTPQEFREGEDAVIVCDVVSSLPPTIIWKHKGRDVILKKDVRFIVLSNNYLQIRGIKKTDEGTYRCEGRILARGEINFKDIQVIVNVPPTIQARQNIVNATANLGQSVTLVCDAEGFPEPTMSWTKDGEQIEQEEDDEKYIFSDDSSQLTIKKVDKNDEAEYICIAENKAGEQDATIHLKVFAKPKITYVENQTAMELEEQVTLTCEASGDPIPSITWRTSTRNISSEEKTLDGHMVVRSHARVSSLTLKSIQYTDAGEYICTASNTIGQDSQSMYLEVQYAPKLQGPVAVYTWEGNQVNITCEVFAYPSATISWFRDGQLLPSSNYSNIKIYNTPSASYLEVTPDSENDFGNYNCTAVNRIGQESLEFILVQADTPSSPSIDQVEPYSSTAQVQFDEPEATGGVPILKYKAEWRAVGEEVWHSKWYDAKEASMEGIVTIVGLKPETTYAVRLAALNGKGLGEISAASEFKTQPVQGEPSAPKLEGQMGEDGNSIKVNLIKQDDGGSPIRHYLVRYRALSSEWKPEIRLPSGSDHVMLKSLDWNAEYEVYVVAENQQGKSKAAHFVFRTSAQPTAIPANGSPTSGLSTGAIVGILIVIFVLLLVVVDITCYFLNKCGLFMCIAVNLCGKAGPGAKGKDMEEGKAAFSKDESKEPIVEVRTEEERTPNHDGGKHTEPNETTPLTEPEKGPVEAKPECQETETKPAPAEVKTVPNDATQTKENESKA

SEQ ID NO: 66959 - protein, 25 aa, Homo sapiens
IPVYLILLIFFPVFILSPSGCILHH

SEQ ID NO: 66960 - protein, 8 aa, Homo sapiens
LGFLLVAA

SEQ ID NO: 66961 - protein, 54 aa, Homo sapiens
KKSSLLLLLLLLLLRVPASSCQGGQPASSRRGARELKESQFPQNCCSEKRSLLL

SEQ ID NO: 66962 - protein, 26 aa, Homo sapiens
VLRWAILFMALYPNIQVLERPRSVPS

SEQ ID NO: 66963 - protein, 400 aa, Homo sapiens
LKVESSMFCPLKLILLPVLLDYSLGLNDLNVSPPELTVHVGDSALMGCVFQSTEDKCIFKIDWTLSPGEHAKDEYVLYYYSNLSVPIGRFQNRVHLMGDILCNDGSLLLQDVQEADQGTYICEIRLKGESQVFKKAVVLHVLPEEPKELMVHVGGLIQMGCVFQSTEVKHVTKVEWIFSGRRAKEEIVFRYYHKLRMSVEYSQSWGHFQNRVNLVGDIFRNDGSIMLQGVRESDGGNYTCSIHLGNLVFKKTIVLHVSPEEPRTLVTPAALRPLVLGGNQLVIIVGIVCATILLLPVLILIVKKTCGNKSSVNSTVLVKNTKKTNPEIKEKPCHFERCEGEKHIYSPIIVREVIEEEEPSEKSEATYMTMHPVWPSLRSDRNNSLEKKSGGGMPKTQQAF

SEQ ID NO: 66964 - protein, 29 aa, Homo sapiens
TLSKWGLVHLSHICMWFVQRLLSQGIKCC

SEQ ID NO: 66965 - protein, 642 aa, Homo sapiens
RLVCAFLLAACCCCPRVAGVPGEAEQPAPELVEVEVGSTALLKCGLSQSQGNLSHVDWFSVHKEKRTLIFRVRQGQGQSEPGEYEQRLSLQDRGATLALTQVTPQDERIFLCQGKRPRSQEYRIQLRVYKAPEEPNIQVNPLGIPVNSKEPEEVATCVGRNGYPIPQVIWYKNGRPLKEEKNRVHIQSSQTVESSGLYTLQSILKAQLVKEDKDAQFYCELNYRLPSGNHMKESREVTVPVFYPTEKVWLEVEPVGMLKEGDRVEIRCLADGNPPPHFSISKQNPSTREAEEETTNDNGVLVLEPARKEHSGRYECQGLDLDTMISLLSEPQELLVNYVSDVRVSPAAPERQEGSSLTLTCEAESSQDLEFQWLREETGQVLERGPVLQLHDLKREAGGGYRCVASVPSIPGLNRTQLVNVAIFGPPWMAFKERKVWVKENMVLNLSCEASGHPRPTISWNVNGTASEQDQDPQRVLSTLNVLVTPELLETGVECTASNDLGKNTSILFLELVNLTTLTPDSNTTTGLSTSTASPHTRANSTSTERKLPEPESRGVVIVAVIVCILVLAVLGAVLYFLYKKGKLPCRRSGKQEITLPPSRKSELVVEVKSDKLPEEMGLLQGSSGDKRAPGDQGEKYIDLRH

SEQ ID NO: 66966 - protein, 242 aa, Homo sapiens
RPLLVLLLLGLAAGSPPLDDNKIPSLCPGHPGLPGTPGHHGSQGLPGRDGRDGRDGAPGAPGEKGEGGRPGLPGPRGDPGPRGEAGPAGPTGPAGECSVPPRSAFSAKRSESRVPPPSDAPLPFDRVLVNEQGHYDAVTGKFTCQVPGVYYFAVHATVYRASLQFDLVKNGESIASFFQFFGGWPKPASLSGGAMVRLEPEDQVWVQVGVGDYIGIYASIKTDSTFSGFLVYSDWHSSPVFA

SEQ ID NO: 66967 - protein, 14 aa, Homo sapiens
LALPTPLFLFSLGL

SEQ ID NO: 66968 - protein, 934 aa, Homo sapiens
RRRSWASLVLAFLGVCLGITLAVDRSNFKTCEESSFCKRQRSIRPGLSPYRALLDSLQLGPDSLTVHLIHEVTKVLLVLELQGLQKNMTRFRIDELEPRRPRYRVPDVLVADPPIARLSVSGRDENSVELTMAEGPYKIILTARPFRLDLLEDRSLLLSVNARGLLEFEHQRAPRVSQGSKDPAEGDGAQPEETPRDGDKPEETQGKAEKDEPGAWEETFKTHSDSKPYGPMSVGLDFSLPGMEHVYGIPEHADNLRLKVTEGGEPYRLYNLDVFQYELYNPMALYGSVPVLLAHNPHRDLGIFWLNAAETWVDISSNTAGKTLFGKMMDYLQGSGETPQTDVRWMSETGIIDVFLLLGPSISDVFRQYASLTGTQALPPLFSLGYHQSRWNYRDEADVLEVDQGFDDHNLPCDVIWLDIEHADGKRYFTWDPSRFPQPRTMLERLASKRRKLVAIVDPHIKVDSGYRVHEELRNLGLYVKTRDGSDYEGWCWPGSAGYPDFTNPTMRAWWANMFSYDNYEGSAPNLFVWNDMNEPSVFNGPEVTMLKDAQHYGGWEHRDVHNIYGLYVHMATADGLRQRSGGMERPFVLARAFFAGSQRFGAVWTGDNTAEWDHLKISIPMCLSLGLVGLSFCGADVGGFFKNPEPELLVRWYQMGAYQPFFRAHAHLDTGRREPWLLPSQHNDIIRDALGQRYSLLPFWYTLLYQAHREGIPVMRPLWVQYPQDVTTFNIDDQYLLGDALLVHPVSDSGAHGVQVYLPGQGEVWYDIQSYQKHHGPQTLYLPVTLSSIPVFQRGGTIVPRWMRVRRSSECMKDDPITLFVALSPQGTAQGELFLDDGHTFNYQTRQEFLLRRFSFSGNTLVSSSADPEGHFETPIWIERVVIIGAGKPAAVVLQTKGSPESRLSFQHDPETSVLVLRKPGINVASDWSIHLR

SEQ ID NO: 66969 - protein, 273 aa, Homo sapiens
RLHARQSMRVTLATIAWMVSFVSNYSHTANILPDIENEDFIKDCVRIHNKFRSEVKPTASDMLYMTWDPALAQIAKAWASNCQFSHNTRLKPPHKLHPNFTSLGENIWTGSVPIFSVSSAITNWYDEIQDYDFKTRICKKVCGHYTQVVWADSYKVGCAVQFCPKVSGFDALSNGAHFICNYGPGGNYPTWPYKRGATCSACPNNDKCLDNLCVNRQRDQVKRYYSVVYPGWPIYPRNRYTSLFLIVNSVILILSVIITILVQHKYPNLVLLD

SEQ ID NO: 66970 - protein, 211 aa, Homo sapiens
LAPLSFGLRFLTSCSLLLPRAAQILAAEAGLPSSRSFMGFAAPFTNKRKAYSERRIMGYSMQEMYEVVSNVQEYREFVPWCKKSLVVSSRKGHLKAQLEVGFPPVMERYTSAVSMVKPHMVKAVCTDGKLFNHLETIWRFSPGIPAYPRTCTVDFSISFEFRSLLHSQLATMFFDEVVKQNVAAFERRAATKFGPETAIPRELMFHEVHQT

SEQ ID NO: 66971 - protein, 10 aa, Homo sapiens
LRWTLCLVMA

SEQ ID NO: 66972 - protein, 306 aa, Homo sapiens
KKILLPTTVPPATMRIWLLGGLLPFLLLLSGLQRPTEGSEVAIKIDFDFAPGSFDDQYQGCSKQVMEKLTQGDYFTKDIEAQKNYFRMWQKAHLAWLNQGKVLPQNMTTTHAVAILFYTLNSNVHSDFTRAMASVARTPQQYERSFHFKYLHYYLTSAIQLLRKDSIMENGTLCYEVHYRTKDVHFNAYTGATIRFGQFLSTSLLKEEAQEFGNQTLFTIFTCLGAPVQYFSLKKEVLIPPYELFKVINMSYHPRGDWLQLRSTGNLSTYNCQLLKASSKKCIPDPIAIASLSFLTSVIIFSKSRV

SEQ ID NO: 66973 - protein, 73 aa, Homo sapiens
VFLCFALSYIPFLLLNILDARVQAPRVVHMLAANLTWLNGCINPVLYAAMNRQFRQAYGSILKRGPRSFHRLH

SEQ ID NO: 66974 - protein, 33 aa, Homo sapiens
LVTLPTLTFVPVSSLLLGLQLIETGIQRSLGGL

SEQ ID NO: 66975 - protein, 94 aa, Homo sapiens
VCVCMCVLYLIFLFGGGGGRGEVLAGPALNSLDRATDLWGLEVPAEKGRRQQRGCRGNLQVPDHVSVGSGLQDAPRKSAAALCRLSPTPAASSG

SEQ ID NO: 66976 - protein, 67 aa, Homo sapiens
IPMIGLICLGMGSAALYLLRLALRSPDVCWDRKNNPEPWNRLSPNDQYKFLAVSTDYKKLKKDRPDF

SEQ ID NO: 66977 - protein, 34 aa, Homo sapiens
IWKAWAVLGLGTGGYGLIDDSEGEKTPWVPSQKE

SEQ ID NO: 66978 - protein, 925 aa, Homo sapiens
LAWELLGASVLLIAVRWLVRRLGPRPGGLGRSGTPVPPPSAAAAPASGEMTMDALLARLKLLNPDDLREEIVKAGLKCGPITSTTRFIFEKKLAQALLEQGGRLSSFYHHEAGVTALSQDPQRILKPAEGNPTDQAGFSEDRDFGYSVGLNPPEEEAVTSKTCSVPPSDTDTYRAGATASKEPPLYYGVCPVYEDVPARNERIYVYENKKEALQAVKMIKGSRFKAFSTREDAEKFARGICDYFPSPSKTSLPLSPVKTAPLFSNDRLKDGLCLSESETVNKERANSYKNPRTQDLTAKLRKAVEKGEEDTFSDLIWSNPRYLIGSGDNPTIVQEGCRYNVMHVAAKENQASICQLTLDVLENPDFMRLMYPDDDEAMLQKRIRYVVDLYLNTPDKMGYDTPLHFACKFGNADVVNVLSSHHLIVKNSRNKYDKTPEDVICERSKNKSVELKERIREYLKGHYYVPLLRAEETSSPVIGELWSPDQTAEASHVSRYGGSPRDPVLTLRAFAGPLSPAKAEDFRKLWKTPPREKAGFLHHVKKSDPERGFERVGRELAHELGYPWVEYWEFLGCFVDLSSQEGLQRLEEYLTQQEIGKKAQQETGEREASCRDKATTSGSNSISVRAFLDEDDMSLEEIKNRQNAARNNSPPTVGAFGHTRCSAFPLEQEADLIEAAEPGGPHSSRNGLCHPLNHSRTLAGKRPKAPRGEEAHLPPVSDLTVEFDKLNLQNIGRSVSKTPDESTKTKDQILTSRINAVERDLLEPSPADQLGNGHRRTESEMSARIAKMSLSPSSPRHEDQLEVTREPARRLFLFGEEPSKLDQDVLAALECADVDPHQFPAVHRWKSAVLCYSPSDRQSWPSPAVKGRFKSQLPDLSGPHSYSPGRNSVAGSNPAKPGLGSPGRYSPVHGSQLRRMARLAELAAL

SEQ ID NO: 66979 - protein, 15 aa, Homo sapiens
LPWGTSLGCIILVQA

SEQ ID NO: 66980 - protein, 28 aa, Homo sapiens
MINFSFLFFWTVILFTHSALLQVPINSS

SEQ ID NO: 66981 - protein, 16 aa, Homo sapiens
VDLLKVMIFFGKVFLV

SEQ ID NO: 66982 - protein, 68 aa, Homo sapiens
IKLQIHPALLASLIVPLYLLEIIHQDTLVSRLVHRKLSTMKKIAWKTYPTAWASYLSHGKLINLNLMG

SEQ ID NO: 66983 - protein, 21 aa, Homo sapiens
TCTTLFPCWIFLFSAATVKTK

SEQ ID NO: 66984 - protein, 126 aa, Homo sapiens
VVFTCFIVTTGLVLGWFGWDVPVILRNSEETQFSTRVFKKQMRQVKNPFGLEITNPSSASITTGITLTTDCLEDSLLTCYWGCSVQKLYEALQKHVYCFRISTPQALEDALYSEYLYQEQYLYPFV

SEQ ID NO: 66985 - protein, 129 aa, Homo sapiens
VLAFGLLWAPYHAVNLLQAVAALAPPEGALAKLGGAGQAARAGTTALAFFSSSVNPVLYVFTAGDLLPRAGPRFLTRLFEGSGEARGGGRSREGTMELRTTPQLKVVGQGRGNGDPGGGMEKDGPEWDL

SEQ ID NO: 66986 - protein, 438 aa, Homo sapiens
VLILTLVVAACGFVLWSSNGRQRKNEALAPPLLDAEPARGAGGRGGDHPSVAVGIRRVSNVSAASLVPAVPQPEADNLTLRYRSLVYQLNFDQTLRNVDKAGTWAPRELVLVVQVHNRPEYLRLLLDSLRKAQGIDNVLVIFSHDFWSTEINQLIAGVNFCPVLQVFFPFSIQLYPNEFPGSDPRDCPRDLPKNAALKLGCINAEYPDSFGHYREAKFSQTKHHWWWKLHFVWERVKILRDYAGLILFLEEDHYLAPDFYHVFKKMWKLKQQECPECDVLSLGTYSASRSFYGMADKVDVKTWKSTEHNMGLALTRNAYQKLIECTDTFCTYDDYNWDWTLQYLTVSCLPKFWKVLVPQIPRIFHAGDCGMHHKKTCRPSTQSAQIESLLNNNKQYMFPETLTISEKFTVVAISPPRKNGGWGDIRDHELCKSYRRLQ

SEQ ID NO: 66987 - protein, 244 aa, Homo sapiens
ILLLLAFLLLPRADAGEIIGGHEAKPHSRPYMAYLMIWDQKSLKRCGGFLIRDDFVLTAAHCWGSSINVTLGAHNIKEQEPTQQFIPVKRPIPHPAYNPKNFSNDIMLLQLERKAKRTRAVQPLRLPSNKAQVKPGQTCSVAGWGQTAPLGKHSHTLQEVKMTVQEDRKCESDLRHYYDSTIELCVGDPEIKKTSFKGDSGGPLVCNKVAQGIVSYGRNNGMPPRACTKVSSFVHWIKKTMKRY

SEQ ID NO: 66988 - protein, 318 aa, Homo sapiens
IALPLFFCAGLAFIGLGLGLYYSSNGIKELEYDYTGDPGTGNCSVCAAAGQGRALPPPCSCAWYFSLPELFQGPVYLYYELTNFYQNNRRYGVSRDDAQLSGLPSALRHPVNECAPYQRSAAGLPIAPCGAIANSLFNDSFSLWHQRQPGGPYVEVPLDRSGIAWWTDYHVKFRNPPLVNGSLALAFQGTAPPPNWRRPVYELSPDPNNTGFINQDFVVWMRTAALPTFRKLYARIRQGNYSAGLPRGAYRVNITYNYPVRAFGGHKLLIFSSISWMGGKNPFLGIAYLVVGSLCILTGFVMLVVYIRYQDQDDDDEE

SEQ ID NO: 66989 - protein, 501 aa, Homo sapiens
LGAALRAGPQRMRPAFALCLLWQALWPGPGGGEHPTADRAGCSASGACYSLHHATMKRQAAEEACILRGGALSTVRAGAELRAVLALLRAGPGPGGGSKDLLFWVALERRRSHCTLENEPLRGFSWLSSDPGGLESDTLQWVEEPQRSCTARRCAVLQATGGVEPAGWKEMRCHLRANGYLCKYQFEVLCPAPRPGAASNLSYRAPFQLHSAALDFSPPGTEVSALCRGQLPISVTCIADEIGARWDKLSGDVLCPCPGRYLRAGKCAELPNCLDDLGGFACECATGFELGKDGRSCVTSGEGQPTLGGTGVPTRRPPATATSPVPQRTWPIRVDEKLGETPLVPEQDNSVTSIPEIPRWGSQSTMSTLQMSLQAESKATITPSGSVISKFNSTTSSATPQAFDSSSAVVFIFVSTAVVVLVILTMTVLGLVKLCFHESPSSQPRKESMGPPGLESDPEPAALGSSSAHCTNNGVKVGDCDLRDRAEGALLAESPLGSSDA

SEQ ID NO: 66990 - protein, 28 aa, Homo sapiens
LWSGPFALVVNLQLLCRSVFPQNLWLSQ

SEQ ID NO: 66991 - protein, 19 aa, Homo sapiens
LAAIKVLFFAVIWYNLPQK

SEQ ID NO: 66992 - protein, 315 aa, Homo sapiens
LGPRTAALGLLLLCAAAAGAGKAEELHYPLGERRSDYDREALLGVQEDVDEYVKLGHEEQQKRLQAIIKKIDLDSDGFLTESELSSWIQMSFKHYAMQEAKQQFVEYDKNSDDTVTWDEYNIQMYDRVIDFDENTALDDAEEESFRKLHLKDKKRFEKANQDSGPGLSLEEFIAFEHPEEVDYMTEFVIQEALEEHDKNGDGFVSLEEFLGDYRWDPTANEDPEWILVEKDRFVNDYDKDNDGRLDPQELLPWVVPNNQGIAQEEALHLIDEMDLNGDKKLSEEEILENPDLFLTSEATDYGRQLHDDYFYHDEL

SEQ ID NO: 66993 - protein, 24 aa, Homo sapiens
KWEIKMSQMWWFQNVLLLYMLCSS

SEQ ID NO: 66994 - protein, 683 aa, Homo sapiens
LRRRRLPGQKMCSRVPLLLPLLLLLALGPGVQGCPSGCQCSQPQTVFCTARQGTTVPRDVPPDTVGLYVFENGITMLDAGSFAGLPGLQLLDLSQNQIASLPSGVFQPLANLSNLDLTANRLHEITNETFRGLRRLERLYLGKNRIRHIQPGAFDTLDRLLELKLQDNELRALPPLRLPRLLLLDLSHNSLLALEPGILDTANVEALRLAGLGLQQLDEGLFSRLRNLHDLDVSDNQLERVPPVIRGLRGLTRLRLAGNTRIAQLRPEDLAGLAALQELDVSNLSLQALPGDLSGLFPRLRLLAAARNPFNCVCPLSWFGPWVRESHVTLASPEETRCHFPPKNAGRLLLELDYADFGCPATTTTATVPTTRPVVREPTALSSSLAPTWLSPTEPATEAPSPPSTAPPTVGPVPQPQDCPPSTCLNGGTCHLGTRHHLACLCPEGFTGLYCESQMGQGTRPSPTPVTPRPPRSLTLGIEPVSPTSLRVGLQRYLQGSSVQLRSLRLTYRNLSGPDKRLVTLRLPASLAEYTVTQLRPNATYSVCVMPLGPGRVPEGEEACGEAHTPPAVHSNHAPVTQAREGNLPLLIAPALAAVLLAALAAVGAAYCVRRGRAMAAAAQDKGQVGPGAGPLELEGVKVPLEPGPKATEGGGEALPSGSECEVPLMGFPGPGLQSPLHAKPYI

SEQ ID NO: 66995 - protein, 1171 aa, Homo sapiens
RMKDSCITVMAMALLSGFFFFAPASSYNLDVRGARSFSPPRAGRHFGYRVLQVGNGVIVGAPGEGNSTGSLYQCQSGTGHCLPVTLRGSNYTSKYLGMTLATDPTDGSILACDPGLSRTCDQNTYLSGLCYLFRQNLQGPMLQGRPGFQECIKGNVDLVFLFDGSMSLQPDEFQKILDFMKDVMKKLSNTSYQFAAVQFSTSYKTEFDFSDYVKRKDPDALLKHVKHMLLLTNTFGAINYVATEVFREELGARPDATKVLIIITDGEATDSGNIDAAKDIIRYIIGIGKHFQTKESQETLHKFASKPASEFVKILDTFEKLKDLFTELQKKIYVIEGTSKQDLTSFNMELSSSGISADLSRGHAVVGAVGAKDWAGGFLDLKADLQDDTFIGNEPLTPEVRAGYLGYTVTWLPSRQKTSLLASGAPRYQHMGRVLLFQEPQGGGHWSQVQTIHGTQIGSYFGGELCGVDVDQDGETELLLIGAPLFYGEQRGGRVFIYQRRQLGFEEVSELQGDPGYPLGRFGEAITALTDINGDGLVDVAVGAPLEEQGAVYIFNGRHGGLSPQPSQRIEGTQVLSGIQWFGRSIHGVKDLEGDGLADVAVGAESQMIVLSSRPVVDMVTLMSFSPAEIPVHEVECSYSTSNKMKEGVNITICFQIKSLIPQFQGRLVANLTYTLQLDGHRTRRRGLFPGGRHELRRNIAVTTSMSCTDFSFHFPVCVQDLISPINVSLNFSLWEEEGTPRDQRAQGKDIPPILRPSLHSETWEIPFEKNCGEDKKCEANLRVSFSPARSRALRLTAFASLSVELSLSNLEEDAYWVQLDLHFPPGLSFRKVEMLKPHSQIPVSCEELPEESRLLSRALSCNVSSPIFKAGHSVALQMMFNTLVNSSWGDSVELHANVTCNNEDSDLLEDNSATTIIPILYPINILIQDQEDSTLYVSFTPKGPKIHQVKHMYQVRIQPSIHDHNIPTLEAVVGVPQPPSEGPITHQWSVQMEPPVPCHYEDLERLPDAAEPCLPGALFRCPVVFRQEILVQVIGTLELVGEIEASSMFSLCSSLSISFNSSKHFHLYGSNASLAQVVMKVDVVYEKQMLYLYVLSGIGGLLLLLLIFIVLYKVGFFKRNLKEKMEAGRGVPNGIPAEDSEQLASGQEAGDPGCLKPLHEKDSESGGGKD

SEQ ID NO: 66996 - protein, 41 aa, Homo sapiens
VTMPMCVFLLVWSISRRSLAAELSQWKLVRGTQMRNGPRPS

SEQ ID NO: 66997 - protein, 381 aa, Homo sapiens
IILGGGGLLFASYLMATGDERFYAEHLMPTLQGLLDPESAHRLAVRFTSLGLLPRARFQDSDMLEVRVLGHKFRNPVGIAAGFDKHGEAVDGLYKMGFGFVEIGSVTPKPQEGNPRPRVFRLPEDQAVINRYGFNSHGLSVVEHRLRARQQKQAKLTEDGLPLGVNLGKNKTSVDAAEDYAEGVRVLGPLADYLVVNVSSPNTAGLRSLQGKAELRRLLTKVLQERDGLRRVHRPAVLVKIAPDLTSQDKEDIASVVKELGIDGLIVTNTTVSRPAGLQGALRSETGGLSGKPLRDLSTQTIREMYALTQGRVPIIGVGGVSSGQDALEKIRAGASLVQLYTALTFWGPPVVGKVKRELEALLKEQGFGGVTDAIGADHRR

SEQ ID NO: 66998 - protein, 24 aa, Homo sapiens
MTFLGNLWSIVFLLSCFFPATERT

SEQ ID NO: 66999 - protein, 35 aa, Homo sapiens
MCKALSGAALAAVAAAGALWSLPRALPLEAAAAVL

SEQ ID NO: 67000 - protein, 514 aa, Homo sapiens
RWWQLLLVLSAAGMGASGAPQPPNILLLLMDDMGWGDLGVYGEPSRETPNLDRMAAEGLLFPNFYSANPLCSPSRAALLTGRLPIRNGFYTTNAHARNAYTPQEIVGGIPDSEQLLPELLKKAGYVSKIVGKWHLGHRPQFHPLKHGFDEWFGSPNCHFGPYDNKARPNIPVYRDWEMVGRYYEEFPINLKTGEANLTQIYLQEALDFIKRQARHHPFFLYWAVDATHAPVYASKPFLGTSQRGRYGDAVREIDDSIGKILELLQDLHVADNTFVFFTSDNGAALISAPEQGGSNGPFLCGKQTTFEGGMREPALAWWPGHVTAGQVSHQLGSIMDLFTTSLALAGLTPPSDRAIDGLNLLPTLLQGRLMDRPIFYYRGDTLMAATLGQHKAHFWTWTNSWENFRQGIDFCPGQNVSGVTTHNLEDHTKLPLIFHLGRDPGERFPLSFASAEYQEALSRITSVVQQHQEALVPAQPQLNVCNWAVMNWAPPGCEKLGKCLTPPESIPKKCLWSH

SEQ ID NO: 67001 - protein, 23 aa, Homo sapiens
VLRRKALLIFLVVHRLRWSSKQR

SEQ ID NO: 67002 - protein, 217 aa, Homo sapiens
TRRASSAAPIPLGLLGAALSSVTLYTRKLAGTMGKKQNKKKVEEVLEEEEEEYVVEKVLDRRVVKGKVEYLLKWKGFSDEDNTWEPEENLDCPDLIAEFLQSQKTAHETDKSEGGKRKADSDSEDKGEESKPKKKKEESEKPRGFARGLEPERIIGATDSSGELMFLMKWKNSDEADLVPAKEANVKCPQVVISFYEERLTWHSYPSEDDDKKDDKN

SEQ ID NO: 67003 - protein, 274 aa, Homo sapiens
LSLGLGLLLLVIICVVGFQNSKFQRDLVTLRTDFSNFTSNTVAEIQALTSQGSSLEETIASLKAEVEGFKQERQAGVSELQEHTTQKAHLGHCPHCPSVCVPVHSEMLLRVQQLVQDLKKLTCQVATLNNNASTEGTCCPVNWVEHQDSCYWFSHSGMSWAEAEKYCQLKNAHLVVINSREEQNFVQKYLGSAYTWMGLSDPEGAWKWVDGTDYATGFQNWKPGQPDDWQGHGLGGGEDCAHFHPDGRWNDDVCQRPYHWVCEAGLGQTSQESH

SEQ ID NO: 67004 - protein, 250 aa, Homo sapiens
LSLGLGLLLLVIICVVGFQNSKFQRDLVTLRTDFSNFTSNTVAEIQALTSQGSSLEETIASLKAEVEGFKQERQAVHSEMLLRVQQLVQDLKKLTCQVATLNNNGEEASTEGTCCPVNWVEHQDSCYWFSHSGMSWAEAEKYCQLKNAHLVVINSREEQNFVQKYLGSAYTWMGLSDPEGAWKWVDGTDYATGFQNWKPGQPDDWQGHGLGGGEDCAHFHPDGRWNDDVCQRPYHWVCEAGLGQTSQESH

SEQ ID NO: 67005 - protein, 23 aa, Homo sapiens
LLFLGLACCACCCWAPRSDLKDR

SEQ ID NO: 67006 - protein, 232 aa, Homo sapiens
LLPLLLALARGLPGALAAQEVQQSPHCTTVPVGASVNITCSTSGGLRGIYLRQLGPQPQDIIYYEDGVVPTTDRRFRGRIDFSGSQDNLTITMHRLQLSDTGTYTCQAITEVNVYGSGTLVLVTEEQSQGWHRCSDAPPRASALPAPPTGSALPDPQTASALPDPPAASALPAALAVISFLLGLGLGVACVLARTQIKKLCSWRDKNSAACVVYEDMSHSRCNTLSSPNQYQ

SEQ ID NO: 67007 - protein, 25 aa, Homo sapiens
MKKFFGFFLHLGILWKIFVPLQDNH

SEQ ID NO: 67008 - protein, 885 aa, Homo sapiens
LLLLTLAILIFASDACKNVTLHVPSKLDAEKLVGRVNLKECFTAANLIHSSDPDFQILEDGSVYTTNTILLSSEKRSFTILLSNTENQEKKKIFVFLEHQTKVLKKRHTKEKVLRRAKRRWAPIPCSMLENSLGPFPLFLQQVQSDTAQNYTIYYSIRGPGVDQEPRNLFYVERDTGNLYCTRPVDREQYESFEIIAFATTPDGYTPELPLPLIIKIEDENDNYPIFTEETYTFTIFENCRVGTTVGQVCATDKDEPDTMHTRLKYSIIGQVPPSPTLFSMHPTTGVITTTSSQLDRELIDKYQLKIKVQDMDGQYFGLQTTSTCIINIDDVNDHLPTFTRTSYVTSVEENTVDVEILRVTVEDKDLVNTANWRANYTILKGNENGNFKIVTDAKTNEGVLCVVKPLNYEEKQQMILQIGVVNEAPFSREASPRSAMSTATVTVNVEDQDEGPECNPPIQTVRMKENAEVGTTSNGYKAYDPETRSSSGIRYKKLTDPTGWVTIDENTGSIKVFRSLDREAETIKNGIYNITVLASDQGGRTCTGTLGIILQDVNDNSPFIPKKTVIICKPTMSSAEIVAVDPDEPIHGPPFDFSLESSTSEVQRMWRLKAINDTAARLSYQNDPPFGSYVVPITVRDRLGMSSVTSLDVTLCDCITENDCTHRVDPRIGGGGVQLGKWAILAILLGIALLFCILFTLVCGASGTSKQPKVIPDDLAQQNLIVSNTEAPGDDKVYSANGFTTQTVGASAQGVCGTVGSGIKNGGQETIEMVKGGHQTSESCRGAGHHHTLDSCRGGHTEVDNCRYTYSEWHSFTQPRLGEKVYLCNQDENHKHAQDYVLTYNYEGRGSVAGSVGCCSERQEEDGLEFLDNLEPKFRTLAEACMKR

SEQ ID NO: 67009 - protein, 36 aa, Homo sapiens
LGLSFHICTMGVTIPALLAARSGCESSGVDAAWGKP

SEQ ID NO: 67010 - protein, 15 aa, Homo sapiens
LISFFCLFCFGFQLG

SEQ ID NO: 67011 - protein, 108 aa, Homo sapiens
LLLLAGGSLAFILLRVRRRRKSPGGAGGGASGDGGFYDPKAQVLGNGDPVFWTPVVPGPMEPDGKDEEEEEEEEKAEKGLMLPPPPALEDDMESQLDGSLISRRAVYV

SEQ ID NO: 67012 - protein, 470 aa, Homo sapiens
LAPLTPDMLLLLLPLLWGRERAEGQTSKLLTMQSSVTVQEGLCVHVPCSFSYPSHGWIYPGPVVHGYWFREGANTDQDAPVATNNPARAVWEETRDRFHLLGDPHTKNCTLSIRDARRSDAGRYFFRMEKGSIKWNYKHHRLSVNVTALTHRPNILIPGTLESGCPQNLTCSVPWACEQGTPPMISWIGTSVSPLDPSTTRSSVLTLIPQPQDHGTSLTCQVTFPGASVTTNKTVHLNVSYPPQNLTMTVFQGDGTVSTVLGNGSSLSLPEGQSLRLVCAVDAVDSNPPARLSLSWRGLTLCPSQPSNPGVLELPWVHLRDAAEFTCRAQNPLGSQQVYLNVSLQSKATSGVTQGVVGGAGATALVFLSFCVIFVVVRSCRKKSARPAAGVGDTGIEDANAVRGSASQGPLTEPWAEDSPPDQPPPASARSSVGEGELQYASLSFQMVKPWDSRGQEATDTEYSEIKIHR

SEQ ID NO: 67013 - protein, 474 aa, Homo sapiens
LAPPTPDMLLLLLLPLLWGRERVEGQKSNRKDYSLTMQSSVTVQEGMCVHVRCSFSYPVDSQTDSDPVHGYWFRAGNDISWKAPVATNNPAWAVQEETRDRFHLLGDPQTKNCTLSIRDARMSDAGRYFFRMEKGNIKWNYKYDQLSVNVTALTHRPNILIPGTLESGCFQNLTCSVPWACEQGTPPMISWMGTSVSPLHPSTTRSSVLTLIPQPQHHGTSLTCQVTLPGAGVTTNRTIQLNVSYPPQNLTVTVFQGEGTASTALGNSSSLSVLEGQSLRLVCAVDSNPPARLSWTWRSLTLYPSQPSNPLVLELQVHLGDEGEFTCRAQNSLGSQHVSLNLSLQQEYTGKMRPVSGVLLGAVGGAGATALVFLSFCVIFIVVRSCRKKSARPAADVGDIGMKDANTIRGSASQGNLTESWADDNPRHHGLAAHSSGEEREIQYAPLSFHKGEPQDLSGQEATNNEYSEIKIPK

SEQ ID NO: 67014 - protein, 456 aa, Homo sapiens
LGPLGGDAMIPTFTALLCLGLSLGPRTHMQAGPLPKPTLWAEPGSVISWGNSVTIWCQGTLEAREYRLDKEESPAPWDRQNPLEPKNKARFSIPSMTEDYAGRYRCYYRSPVGWSQPSDPLELVMTGAYSKPTLSALPSPLVTSGKSVTLLCQSRSPMDTFLLIKERAAHPLLHLRSEHGAQQHQAEFPMSPVTSVHGGTYRCFSSHGFSHYLLSHPSDPLELIVSGSLEGPRPSPTRSVSTAAGPEDQPLMPTGSVPHSGLRRHWEVLIGVLVVSILLLSLLLFLLLQHWRQGKHRTLAQRQADFQRPPGAAEPEPKDGGLQRRSSPAADVQGENFCAAVKNTQPEDGVEMDTRQSPHDEDPQAVTYAKVKHSRPRREMASPPSPLSGEFLDTKDRQAEEDRQMDTEAAASEAPQDVTYARLHSFTLRQKATEPPPSQEGASPAEPSVYATLAIH

SEQ ID NO: 67015 - protein, 46 aa, Homo sapiens
LLLPVGLLLLAAAWCLHWQRTRRRTPRPGEQVPPVPSPQDLLLVEH

SEQ ID NO: 67016 - protein, 185 aa, Homo sapiens
LTLAVIAILLFILLWHLCWPKEKADPYPYPGLVCGVPNTHTPSSSHLSSPGALETGDTWKEASLLPLLSRELSSLASQPLSRLLDELEVLEELIVLLDPEPGPGGGMAHGTTRHLAARYGLPAAWSTFAYSLRPSRSPLRALIEMVVAREPSASLGQLGTHLAQLGRADALRVLSKLGSSGVCWA

SEQ ID NO: 67017 - protein, 491 aa, Homo sapiens
LLCLLLAASCAWSGVAGEEELQVIQPDKSVLVAAGETATLRCTATSLIPVGPIQWFRGAGPGRELIYNQKEGHFPRVTTVSDLTKRNNMDFSIRIGNITPADAGTYYCVKFRKGSPDDVEFKSGAGTELSVRAKPSAPVVSGPAARATPQHTVSFTCESHGFSPRDITLKWFKNGNELSDFQTNVDPVGESVSYSIHSTAKVVLTREDVHSQVICEVAHVTLQGDPLRGTANLSETIRVPPTLEVTQQPVRAENQVNVTCQVRKFYPQRLQLTWLENGNVSRTETASTVTENKDGTYNWMSWLLVNVSAHRDDVKLTCQVEHDGQPAVSKSHDLKVSAHPKEQGSNTAAENTGSNERNIYIVVGVVCTLLVALLMAALYLVRIRQKKAQGSTSSTRLHEPEKNAREITQDTNDITYADLNLPKGKKPAPQAAEPNNHTEYASIQTSPQPASEDTLTYADLDMVHLNRTPKQPAPKPEPSFSEYASVQVPRK

SEQ ID NO: 67018 - protein, 11 aa, Homo sapiens
LLRIMAIILAI

SEQ ID NO: 67019 - protein, 37 aa, Homo sapiens
VDPGPVVLGLSLWVLAGGMGEGGEQLPAPLLCGSSFF

SEQ ID NO: 67020 - protein, 699 aa, Homo sapiens
LVLLVLGCCFAAPRQRQSTLVLFPGDLRTNLTDRQLAEEYLYRYGYTRVAEMRGESKSLGPALLLLQKQLSLPETGELDSATLKAMRTPRCGVPDLGRFQTFEGDLKWHHHNITYWIQNYSEDLPRAVIDDAFARAFALWSAVTPLTFTRVYSRDADIVIQFGVAEHGDGYPFDGKDGLLAHAFPPGPGIQGDAHFDDDELWSLGKGVVVPTRFGNADGAACHFPFIFEGRSYSACTTDGRSDGLPWCSTTANYDTDDRFGFCPSERLYTQDGNADGKPCQFPFIFQGQSYSACTTDGRSDGYRWCATTANYDRDKLFGFCPTRADSTVMGGNSAGELCVFPFTFLGKEYSTCTSEGRGDGRLWCATTSNFDSDKKWGFCPDQGYSLFLVAAHEFGHALGLDHSSVPEALMYPMYRFTEGPPLHKDDVNGIRHLYGPRPEPEPRPPTTTTPQPTAPPTVCPTGPPTVHPSERPTAGPTGPPSAGPTGPPTAGPSTATTVPLSPVDDACNVNIFDAIAEIGNQLYLFKDGKYWRFSEGRGSRPQGPFLIADKWPALPRKLDSVFEERLSKKLFFFSGRQVWVYTGASVLGPRRLDKLGLGADVAQVTGALRSGRGKMLLFSGRRLWRFDVKAQMVDPRSASEVDRMFPGVPLDTHDVFQYREKAYFCQDRFYWRVSSRSELNQVDQVGYVTYDILQCPED

SEQ ID NO: 67021 - protein, 112 aa, Homo sapiens
ILSLLFCCYLIRLRHQAHKEFYAYKQVILKEKVKELNLHELCAVCLEDFKPRDELGICPCKHAFHRKCLIKWLEVRKVCPLCNMPVLQLAQLHSKQDRGPPQGPLPGAENIV

SEQ ID NO: 67022 - protein, 12 aa, Homo sapiens
KCSRTAWTLILM

SEQ ID NO: 67023 - protein, 162 aa, Homo sapiens
LVLSFVFGCNVLRILLPSFSSFMSRVLQKDAEQESQMRAEIQDMKQELSTVNMMDEFARYARLERKINKMTDKLKTHVKARTAQLAKIKWVISVAFYVLQAALMISLIWKYYSVPVAVVPSKWITPLDRLVAFPTRVAGGVGITCWILVCNKVVAIVLHPFS

SEQ ID NO: 67024 - protein, 79 aa, Homo sapiens
IALVLTSTIVTLKWIGYICLRNSLPKVLRQGLAKGWNAVAIHRCSHNALQSETPELKQSSCLSFPSSWDYKRASLCPSD

SEQ ID NO: 67025 - protein, 332 aa, Homo sapiens
LWSLLLLLGVFAAAAAAPPDPLSQLPAPQHPKIRLYNAEQVLSWEPVALSNSTRPVVYQVQFKYTDSKWFTADIMSIGVNCTQITATECDFTAASPSAGFPMDFNVTLRLRAELGALHSAWVTMPWFQHYRNVTVGPPENIEVTPGEGSLIIRFSSPFDIADTSTAFFCYYVHYWEKGGIQQVKGPFRSNSISLDNLKPSRVYCLQVQAQLLWNKSNIFRVGHLSNISCYETMADASTELQQVILISVGTFSLLSVLAGACFFLVLKYRGLIKYWFHTPPSIPLQIEEYLKDPTQPILEALDKDSSPKDDVWDSVSIISFPEKEQEDVLQTL

SEQ ID NO: 67026 - protein, 74 aa, Homo sapiens
LGFISSSLSLIGGTLLCLSCQDEAPYRPYQAPPRATTTTANTAPAYQPPAAYKDNRAPSVTSATHSGYRLNDYV

SEQ ID NO: 67027 - protein, 59 aa, Homo sapiens
VPRSTSLTLIVFLFHRLSKAPGKMVENSPSPLPERAIYGFVLFLSSQFGFKNLKGSRVC

SEQ ID NO: 67028 - protein, 27 aa, Homo sapiens
TCGFYLLAILLCGRVVLTLHPRGPFLA

SEQ ID NO: 67029 - protein, 17 aa, Homo sapiens
VKTMKIIYNATLLFLVS

SEQ ID NO: 67030 - protein, 18 aa, Homo sapiens
IVVLLLVNVILMFFLGTR

SEQ ID NO: 67031 - protein, 373 aa, Homo sapiens
IGCLYTFLISTTFGCTSSSDTEIKVNPPQDFEIVDPGYLGYLYLQWQPPLSLDHFKECTVEYELKYRNIGSETWKTIITKNLHYKDGFDLNKGIEAKIHTLLPWQCTNGSEVQSSWAETTYWISPQGIPETKVQDMDCVYYNWQYLLCSWKPGIGVLLDTNYNLFYWYEGLDHALQCVDYIKADGQNIGCRFPYLEASDYKDFYICVNGSSENKPIRSSYFTFQLQNIVKPLPPVYLTFTRESSCEIKLKWSIPLGPIPARCFDYEIEIREDDTTLVTATVENETYTLKTTNETRQLCFVVRSKVNIYCSDDGIWSEWSDKQCWEGEDLSKKTLLRFWLPFGFILILVIFVTGLLLRKPNTYPKMIPEFFCDT

SEQ ID NO: 67032 - protein, 76 aa, Homo sapiens
VLGSVLALFGVVLGLMETVCSPFTAARRLRDQEAAVAELQAALERQALQKQALQEKGKQQDTVLGGRALSNRQHAS

SEQ ID NO: 67033 - protein, 21 aa, Homo sapiens
MVRFFPISWVLCAQLSYCSFI

SEQ ID NO: 67034 - protein, 292 aa, Homo sapiens
KFWWHAAWGLCLVPLSLAQIDLNITCRFAGVFHVEKNGRYSISRTEAADLCKAFNSTLPTMAQMEKALSIGFETCRYGFIEGHVVIPRIHPNSICAANNTGVYILTSNTSQYDTYCFNASAPPEEDCTSVTDLPNAFDGPITITIVNRDGTRYVQKGEYRTNPEDIYPSNPTDDDVSSGSSSERSSTSGGYIFYTFSTVHPIPDEDSPWITDSTDRIPATRDQDTFHPSGGSHTTHGSESDGHSHGSQEGGANTTSGPIRTPQIPEWLIILASLLALALILAVCIAVNSRRS

SEQ ID NO: 67035 - protein, 92 aa, Homo sapiens
LIILASLLALALILAVCIAVNSRRRCGQKKKLVINSGNGAVEDRKPSGLNGEASKSQEMVHLVNKESSETPDQFMTADETRNLQNVDMKIGV

SEQ ID NO: 67036 - protein, 72 aa, Homo sapiens
ILFLILLSLGVGFAILYTKHRRLQSSFTAFANSHYSSRLGSAIFSSGDDLGEDDEDAPMITGFSDDVPMVIA

SEQ ID NO: 67037 - protein, 58 aa, Homo sapiens
ICTLLEFCLAVLTAVLRWKQAYSDFPGSVLFLPHSYIGNSGMSSKMTHDCGYEELLTS

SEQ ID NO: 67038 - protein, 117 aa, Homo sapiens
IVGIVCATILLLPVLILIVKKTCGNKSSVNSTVLVKNTKKTNPEIKEKPCHFERCEGEKHIYSPIIVREVIEEEEPSEKSEATYMTMHPVWPSLRSDRNNSLEKKSGGGMPKTQQAF

SEQ ID NO: 67039 - protein, 113 aa, Homo sapiens
ILAFSRSLHSLLVDVPAFACLSALVLITDRHGLQEPRRVEELQNRIASCLKEHVAAVAGEPQPASCLSRLLGKLPELRTLCTQGLQRIFYLKLEDLVPPPPIIDKIFMDTLPF

SEQ ID NO: 67040 - protein, 61 aa, Homo sapiens
LTVLIALAVYFLGRLVPRGRGAAEAATRKQRITETESPYQELQGQRSDVYSDLNTQRPYYK

SEQ ID NO: 67041 - protein, 12 aa, Homo sapiens
IWIIFYTAIHYD

SEQ ID NO: 67042 - protein, 165 aa, Homo sapiens
LLTLLLGLTGVAGEDELQVIQPEKSVSVAAGESATLRCAMTSLIPVGPIMWFRGAGAGRELIYNQKEGHFPRVTTVSELTKRNNLDFSISISNITPADAGTYYCVKFRKGSPDDVEFKSGAGTELSVREAALAPTAPLLVALLLGPKLLLVVGVSAIYICWKQKA

SEQ ID NO: 67043 - protein, 58 aa, Homo sapiens
IVLIGILLLVIWKALIHLSDLREYRRFEKEKLKSQWNNDNPLFKSATTTVMNPKFAES

SEQ ID NO: 67044 - protein, 409 aa, Homo sapiens
VCFRLFPVPGSGLVLVCLVLGAVRSYALELNLTDSENATCLYAKWQMNFTVRYETTNKTYKTVTISDHGTVTYNGSICGDDQNGPKIAVQFGPGFSWIANFTKAASTYSIDSVSFSYNTGDNTTFPDAEDKGILTVDELLAIRIPLNDLFRCNSLSTLEKNDVVQHYWDVLVQAFVQNGTVSTNEFLCDKDKTSTVAPTIHTTVPSPTTTPTPKEKPEAGTYSVNNGNDTCLLATMGLQLNITQDKVASVININPNTTHSTGSCRSHTALLRLNSSTIKYLDFVFAVKNENRFYLKEVNISMYLVNGSVFSIANNNLSYWDAPLGSSYMCNKEQTVSVSGAFQINTFDLRVQPFNVTQGKYSTAQECSLDDDTILIPIIVGAGLSGLIIVIVIAYVIGRRKSYAGYQTL

SEQ ID NO: 67045 - protein, 291 aa, Homo sapiens
KSPQPWGHMLLWTAVLFLAPVAGTPAAPPKAVLKLEPQWINVLQEDSVTLTCRGTHSPESDSIQWFHNGNLIPTHTQPSYRFKANNNDSGEYTCQTGQTSLSDPVHLTVLSEWLVLQTPHLEFQEGETIVLRCHSWKDKPLVKVTFFQNGKSKKFSRSDPNFSIPQANHSHSGDYHCTGNIGYTLYSSKPVTITVQAPSSSPMGIIVAVVTGIAVAAIVAAVVALIYCRKKRISALPGYPECREMGETLPEKPANPTNPDEADKVGAENTITYSLLMHPDALEEPDDQNRI

SEQ ID NO: 67046 - protein, 533 aa, Homo sapiens
LPRLLLLVLLCLPAVWGDCGLPPDVPNAQPALEGRTSFPEDTVITYKCEESFVKIPGEKDSVICLKGSQWSDIEEFCNRSCEVPTRLNSASLKQPYITQNYFPVGTVVEYECRPGYRREPSLSPKLTCLQNLKWSTAVEFCKKKSCPNPGEIRNGQIDVPGGILFGATISFSCNTGYKLFGSTSSFCLISGSSVQWSDPLPECREIYCPAPPQIDNGIIQGERDHYGYRQSVTYACNKGFTMIGEHSIYCTVNNDEGEWSGPPPECRGKSLTSKVPPTVQKPTTVNVPTTEVSPTSQKTTTKTTTPNAQGTETPSVLQKHTTENVSATRTPPTPQKPTTVNVPATIVTPTPKPTTINVPATGVSSTPQRHTIVNVSATGTLPTLQKPTRANDSATKSPAAAQTSFISKTLSTKTPSAAQNPMMTNASATQATLTAQKFTTAKVAFTQSPSAARKSTNVHSPVTNGLKSTQRFPSAHITATRSTPVSRTTKHFHETTPNKGSGTTSGTTRLLSGHTCFTLTGLLGTLVTMGLLT

SEQ ID NO: 67047 - protein, 24 aa, Homo sapiens
LLFLAIFIYAFPNYAAMKLVKPFS

SEQ ID NO: 67048 - protein, 22 aa, Homo sapiens
IVQFLLLVGFLSCVSLVFVKFN

SEQ ID NO: 67049 - protein, 3394 aa, Homo sapiens
INIKSILWMCSTLIVTHALHKVKVGKSPPVRGSLSGKVSLPCHFSTMPTLPPSYNTSEFLRIKWSKIEVDKNGKDLKETTVLVAQNGNIKIGQDYKGRVSVPTHPEAVGDASLTVVKLLASDAGLYRCDVMYGIEDTQDTVSLTVDGVVFHYRAATSRYTLNFEAAQKACLDVGAVIATPEQLFAAYEDGFEQCDAGWLADQTVRYPIRAPRVGCYGDKMGKAGVRTYGFRSPQETYDVYCYVDHLDGDVFHLTVPSKFTFEEAAKECENQDARLATVGELQAAWRNGFDQCDYGWLSDASVRHPVTVARAQCGGGLLGVRTLYRFENQTGFPPPDSRFDAYCFKPKEATTIDLSILAETASPSLSKEPQMVSDRTTPIIPLVDELPVIPTEFPPVGNIVSFEQKATVQPQAITDSLATKLPTPTGSTKKPWDMDDYSPSASGPLGKLDISEIKEEVLQSTTGVSHYATDSWDGVVEDKQTQESVTQIEQIEVGPLVTSMEILKHIPSKEFPVTETPLVTARMILESKTEKKMVSTVSELVTTGHYGFTLGEEDDEDRTLTVGSDESTLIFDQIPEVITVSKTSEDTIHTHLEDLESVSASTTVSPLIMPDNNGSSMDDWEERQTSGRITEEFLGKYLSTTPFPSQHRTEIELFPYSGDKILVEGISTVIYPSLQTEMTHRRERTETLIPEMRTDTYTDEIQEEITKSPFMGKTEEEVFSGMKLSTSLSEPIHVTESSVEMTKSFDFPTLITKLSAEPTEVRDMEEDFTATPGTTKYDENITTVLLAHGTLSVEAATVSKWSWDEDNTTSKPLESTEPSASSKLPPALLTTVGMNGKDKDIPSFTEDGADEFTLIPDSTQKQLEEVTDEDIAAHGKFTIRFQPTTSTGIAEKSTLRDSTTEEKVPPITSTEGQVYATMEGSALGEVEDVDLSKPVSTVPQFAHTSEVEGLAFVSYSSTQEPTTYVDSSHTIPLSVIPKTDWGVLVPSVPSEDEVLGEPSQDILVIDQTRLEATISPETMRTTKITEGTTQEEFPWKEQTAEKPVPALSSTAWTPKEAVTPLDEQEGDGSAYTVSEDELLTGSERVPVLETTPVGKIDHSVSYPPGAVTEHKVKTDEVVTLTPRIGPKVSLSPGPEQKYETEGSSTTGFTSSLSPFSTHITQLMEETTTEKTSLEDIDLGSGLFEKPKATELIEFSTIKVTVPSDITTAFSSVDRLHTTSAFKPSSAITKKPPLIDREPGEETTSDMVIIGESTSHVPPTTLEDIVAKETETDIDREYFTTSSPPATQPTRPPTVEDKEAFGPQALSTPQPPASTKFHPDINVYIIEVRENKTGRMSDLSVIGHPIDSESKEDEPCSEETDPVHDLMAEILPEFPDIIEIDLYHSEENEEEEEECANATDVTTTPSVQYINGKHLVTTVPKDPEAAEARRGQFESVAPSQNFSDSSESDTHPFVIAKTELSTAVQPNESTETTESLEVTWKPETYPETSEHFSGGEPDVFPTVPFHEEFESGTAKKGAESVTERDTEVGHQAHEHTEPVSLFPEESSGEIAIDQESQKIAFARATEVTFGEEVEKSTSVTYTPTIVPSSASAYVSEEEAVTLIGNPWPDDLLSTKESWVEATPRQVVELSGSSSIPITEGSGEAEEDEDTMFTMVTDLSQRNTTDTLITLDTSRIITESFFEVPATTIYPVSEQPSAKVVPTKFVSETDTSEWISSTTVEEKKRKEEEGTTGTASTFEVYSSTQRSDQLILPFELESPNVATSSDSGTRKSFMSLTTPTQSEREMTDSTPVFTETNTLENLGAQTTEHSSIHQPGVQEGLTTLPRSPASVFMEQGSGEAAADPETTTVSSFSLNVEYAIQAEKEVAGTLSPHVETTFSTEPTGLVLSTVMDRVVAENITQTSREIVISERLGEPNYGAEIRGFSTGFPLEEDFSGDFREYSTVSHPIAKEETVMMEGSGDAAFRDTQTSPSTVPTSVHISHISDSEGPSSTMVSTSAFPWEEFTSSAEGSGEQLVTVSSSVVPVLPSAVQKFSGTASSIIDEGLGEVGTVNEIDRRSTILPTAEVEGTKAPVEKEEVKVSGTVSTNFPQTIEPAKLWSRQEVNPVRQEIESETTSEEQIQEEKSFESPQNSPATEQTIFDSQTFTETELKTTDYSVLTTKKTYSDDKEMKEEDTSLVNMSTPDPDANGLESYTTLPEATEKSHFFLATALVTESIPAEHVVTDSPIKKEESTKHFPKGMRPTIQESDTELLFSGLGSGEEVLPTLPTESVNFTEVEQINNTLYPHTSQVESTSSDKIEDFNRMENVAKEVGPLVSQTDIFEGSGSVTSTTLIEILSDTGAEGPTVAPLPFSTDIGHPQNQTVRWAEEIQTSRPQTITEQDSNKNSSTAEINETTTSSTDFLARAYGFEMAKEFVTSAPKPSDLYYEPSGEGSGEVDIVDSFHTSATTQATRQESSTTFVSDGSLEKHPEVPSAKAVTADGFPTVSVMLPLHSEQNKSSPDPTSTLSNTVSYERSTDGSFQDRFREFEDSTLKPNRKKPTENIIIDLDKEDKDLILTITESTILEILPELTSDKNTIIDIDHTKPVYEDILGMQTDIDTEVPSEPHDSNDESNDDSTQVQEIYEAAVNLSLTEETFEGSADVLASYTQATHDESMTYEDRSQLDHMGFHFTTGIPAPSTETELDVLLPTATSLPIPRKSATVIPEIEGIKAEAKALDDMFESSTLSDGQAIADQSEIIPTLGQFERTQEEYEDKKHAGPSFQPEFSSGAEEALVDHTPYLSIATTHLMDQSVTEVPDVMEGSNPPYYTDTTLAVSTFAKLSSQTPSSPLTIYSGSEASGHTEIPQPSALPGIDVGSSVMSPQDSFKEIHVNIEATFKPSSEEYLHITEPPSLSPDTKLEPSEDDGKPELLEEMEASPTELIAVEGTEILQDFQNKTDGQVSGEAIKMFPTIKTPEAGTVITTADEIELEGATQWPHSTSASATYGVEAGVVPWLSPQTSERPTLSSSPEINPETQAALIRGQDSTIAASEQQVAARILDSNDQATVNPVEFNTEVATPPFSLLETSNETDFLIGINEESVEGTAIYLPGPDRCKMNPCLNGGTCYPTETSYVCTCVPGYSGDQCELDFDECHSNPCRNGATCVDGFNTFRCLCLPSYVGALCEQDTETCDYGWHKFQGQCYKYFAHRRTWDAAERECRLQGAHLTSILSHEEQMFVNRVGHDYQWIGLNDKMFEHDFRWTDGSTLQYENWRPNQPDSFFSAGEDCVVIIWHENGQWNDVPCNYHLTYTCKKGTVACGQPPVVENAKTFGKMKPRYEINSLIRYHCKDGFIQRHLPTIRCLGNGRWAIPKITCMNPSAYQRTYSMKYFKNSSSAKDNSINTSKHDHRWSRRWQESRR

SEQ ID NO: 67050 - protein, 1309 aa, Homo sapiens
IQCFCCSLILFGAGLTRLPIEDHKRFHPDCGFLLNKDVGNIAKYDIRVKNLKSRLRGGKMRYQEEEARLASFRNWPFYVQGISPCVLSEAGFVFTGKQDTVQCFSCGGCLGNWEEGDDPWKEHAKWFPKCEFLRSKKSSEEITQYIQSYKGFVDITGEHFVNSWVQRELPMASAYCNDSIFAYEELRLDSFKDWPRESAVGVAALAKAGLFYTGIKDIVQCFSCGGCLEKWQEGDDPLDDHTRCFPNCPFLQNMKSSAEVTPDLQSRGELCELLETTSESNLEDSIAVGPIVPEMAQGEAQWFQEAKNLNEQLRAAYTSASFRHMSLLDISSDLATDHLLGCDLSIASKHISKPVQEPLVLPEVFGNLNSVMCVEGEAGSGKTVLLKKIAFLWASGCCPLLNRFQLVFYLSLSSTRPDEGLASIICDQLLEKEGSVTEMCVRNIIQQLKNQVLFLLDDYKEICSIPQVIGKLIQKNHLSRTCLLIAVRTNRARDIRRYLETILEIKAFPFYNTVCILRKLFSHNMTRLRKFMVYFGKNQSLQKIQKTPLFVAAICAHWFQYPFDPSFDDVAVFKSYMERLSLRNKATAEILKATVSSCGELALKGFFSCCFEFNDDDLAEAGVDEDEDLTMCLMSKFTAQRLRPFYRFLSPAFQEFLAGMRLIELLDSDRQEHQDLGLYHLKQINSPMMTVSAYNNFLNYVSSLPSTKAGPKIVSHLLHLVDNKESLENISENDDYLKHQPEISLQMQLLRGLWQICPQAYFSMVSEHLLVLALKTAYQSNTVAACSPFVLQFLQGRTLTLGALNLQYFFDHPESLSLLRSIHFPIRGNKTSPRAHFSVLETCFDKSQVPTIDQDYASAFEPMNEWERNLAEKEDNVKSYMDMQRRASPDLSTGYWKLSPKQYKIPCLEVDVNDIDVVGQDMLEILMTVFSASQRIELHLNHSRGFIESIRPALELSKASVTKCSISKLELSAAEQELLLTLPSLESLEVSGTIQSQDQIFPNLDKFLCLKELSVDLEGNINVFSVIPEEFPNFHHMEKLLIQISAEYDPSKLVKLIQNSPNLHVFHLKCNFFSDFGSLMTMLVSCKKLTEIKFSDSFFQAVPFVASLPNFISLKILNLEGQQFPDEETSEKFAYILGSLSNLEELILPTGDGIYRVAKLIIQQCQQLHCLRVLSFFKTLNDDSVVEIAKVAISGGFQKLENLKLSINHKITEEGYRNFFQALDNMPNLQELDISRHFTECIKAQATTVKSLSQCVLRLPRLIRLNMLSWLLDADDIALLNVMKERHPQSKYLTILQKWILPFSPIIQK

SEQ ID NO: 67051 - protein, 37 aa, Homo sapiens
RNDFRRNLILNLGLFAAGVWLARNLSDIDLMAPQPGV

SEQ ID NO: 67052 - protein, 324 aa, Homo sapiens
LLNFHVSLLLVQLLTPCSAQFSVLGPSGPILAMVGEDADLPCHLFPTMSAETMELKWVSSSLRQVVNVYADGKEVEDRQSAPYRGRTSILRDGITAGKAALRIHNVTASDSGKYLCYFQDGDFYEKALVELKVAALGSNLHVEVKGYEDGGIHLECRSTGWYPQPQIQWSNAKGENIPAVEAPVVADGVGLYEVAASVIMRGGSGEGVSCIIRNSLLGLEKTASISIADPFFRSAQPWIAALAGTLPILLLLLAGASYFLWRQQKEITALSSEIESEQEMKEMGYAATEREISLRESLQEELKRKKIQYLTRGEESSSDTNKSA

SEQ ID NO: 67053 - protein, 11 aa, Homo sapiens
LSCCWLWLFST

SEQ ID NO: 67054 - protein, 840 aa, Homo sapiens
IFWSFVAGVVTFYCSLGPDSLLPNIFFTIKYKPKQLGLQELFPQGHSCAVCGKVKCKRHRPSLLLENYQPWLDLKISSKVDASLSEVDIPSIITKKLLKAAMKHIEVIVKARQKVKNTEFLQQAALEEYGPELHVALRSRRDELHYLRKLTELLFPYILPPKATDCRSLTLLIREILSGSVFLPSLDFLADPDTVNHLLIIFIDDSPPEKATEPASPLVPFLQKFAEPRNKKPSVLKLELKQIREQQDLLFRFMNFLKQEGAVHVLQFCLTVEEFNDRILRPELSNDEMLSLHEELQKIYKTYCLDESIDKIRFDPFIVEEIQRIAEGPYIDVVKLQTMRCLFEAYEHVLSLLENVFTPMFCHSDEYFRQLLRGAESPTRNSKLNRNTQKRGESFGISRIGSKIKGVFKSTTMEGAMLPNYGVAEGEDDFIEEGIVVMEDDSPVEAVSTPNTPRNLAAWKISIPYVDFFEDPSSERKEKKERIPVFCIDVERNDRRAVGHEPEHWSVYRRYLEFYVLESKLTEFHGAFPDAQLPSKRIIGPKNYEFLKSKREEFQEYLQKLLQHPELSNSQLLADFLSPNGGETQFLDKILPDVNLGKIIKSVPGKLMKEKGQHLEPFIMNFINSCESPKPKPSRPELTILSPTSENNKKLFNDLFKNNANRAENTERKQNQNYFMEVMTVEGVYDYLMYVGRVVFQVPDWLHHLLMGTRILFKNTLEMYTDYYLQCKLEQLFQEHRLVSLITLLRDAIFCENTEPRSLQDKQKGAKQTFEEMMNYIPDLLVKCIGEETKYESIRLLFDGLQQPVLNKQLTYVLLDIVIQELFPELNKVQKEVTSVTSWM

SEQ ID NO: 67055 - protein, 32 aa, Homo sapiens
IAVGSISFLLGVVLLVINHKYRNSSNTADITI

SEQ ID NO: 67056 - protein, 443 aa, Homo sapiens
LLLAVALGLATAVSAGPAVIECWFVEDASGKGLAKRPGALLLRQGPGEPPPRPDLDPELYLSVHDPAGALQAAFRRYPRGAPAPHCEMSRFVPLPASAKWASGLTPAQNCPRALDGAWLMVSISSPVLSLSSLLRPQPEPQQEPVLITMATVVLTVLTHTPAPRVRLGQDALLDLSFAYMPPTSEAASSLAPGPPPFGLEWRRQHLGKGHLLLAATPGLNGQMPAAQEGAVAFAAWDDDEPWGPWTGNGTFWLPTVQPFQEGTYLATIHLPYLQGQVTLELAVYKPPKVSLMPATLARAAPGEAPPELLCLVSHFYPSGGLEVEWELRGGPGGRSQKAEGQRWLSALRHHSDGSVSLSGHLQPPPVTTEQHGARYACRIHHPSLPASGRSAEVTLEVAGLSGPSLEDSVGLFLSAFLLLGLFKALGWAAVYLSTCKDSKKKAE

SEQ ID NO: 67057 - protein, 251 aa, Homo sapiens
LLQMLPLLWLLPHSWAVPEAPTPMWPDDLQNHTFLHTVYCQDGSPSVGLSEAYDEDQLFFFDFSQNTRVPRLPEFADWAQEQGDAPAILFDKEFCEWMIQQIGPKLDGKIPVSRGFPIAEVFTLKPLEFGKPNTLVCFVSNLFPPMLTVNWQHHSVPVEGFGPTFVSAVDGLSFQAFSYLNFTPEPSDIFSCIVTHEIDRYTAIAYWVPRNALPSDLLENVLCGVAFGLGVLGIIVGIVLIIYFRKPCSGD

SEQ ID NO: 67058 - protein, 36 aa, Homo sapiens
LGLIIFSLGVISWRRAGHSSYTPLPGSNYSEGWHIS

SEQ ID NO: 67059 - protein, 18 aa, Homo sapiens
MTALQIASFILLRLFAED

SEQ ID NO: 67060 - protein, 230 aa, Homo sapiens
KEPLGFIKVLEWIASIFAFATCGGFKGQTEIQVNCPPAVTENKTVTATFGYPFRLNEASFQPPPGVNICDVNWKDYVLIGDYSSSAQFYVTFAVFVFLYCIAALLLYVGYTSLYLDSRKLPMIDFVVTLVATFLWLVSTSAWAKALTDIKIATGHNIIDELPPCKKKAVLCYFGSVTSMGSLNVSVIFGFLNMILWGGNAWFVYKETSLHSPSNTSAPHSQGGIPPPTGI

SEQ ID NO: 67061 - protein, 14 aa, Homo sapiens
IFLYILTIIGRAKE

SEQ ID NO: 67062 - protein, 27 aa, Homo sapiens
LATYGSIALIVLYFKLRSKKTPAVKAT

SEQ ID NO: 67063 - protein, 427 aa, Homo sapiens
KFWWHAAWGLCLVPLSLAQIDLNITCRFAGVFHVEKNGRYSISRTEAADLCKAFNSTLPTMAQMEKALSIGFETCRYGFIEGHVVIPRIHPNSICAANNTGVYILTSNTSQYDTYCFNASAPPEEDCTSVTDLPNAFDGPITITIVNRDGTRYVQKGEYRTNPEDIYPSNPTDDDVSSGSSSERSSTSGGYIFYTFSTVHPIPDEDSPWITDSTDRIPATNRNDVTGGRRDPNHSEGSTTLLEGYTSHYPHTKESRTFIPVTSAKTGSFGVTAVTVGDSNSNVNRSLSGDQDTFHPSGGSHTTHGSESDGHSHGSQEGGANTTSGPIRTPQIPEWLIILASLLALALILAVCIAVNSRRRCGQKKKLVINSGNGAVEDRKPSGLNGEASKSQEMVHLVNKESSETPDQFMTADETRNLQNVDMKIGV

SEQ ID NO: 67064 - protein, 35 aa, Homo sapiens
IWHFLSSIAMFGSFLVLLTLDDDLDTVQRDKIYVF

SEQ ID NO: 67065 - protein, 38 aa, Homo sapiens
RVVSVLLLGLLPAAYLNPCSAMDYSLAAALTLHGHWQV

SEQ ID NO: 67066 - protein, 19 aa, Homo sapiens
ITLRFLLLMRTLSAYAKKF

SEQ ID NO: 67067 - protein, 18 aa, Homo sapiens
LFFLKKYTSCLLYFALGT

SEQ ID NO: 67068 - protein, 112 aa, Homo sapiens
LAFSRSLHSLLVDVPAFACLSALVLITDRHGLQEPRRVEELQNRIASCLKEHVAAVAGEPQPASCLSRLLGKLPELRTLCTQGLQRIFYLKLEDLVPPPPIIDKIFMDTLPF

SEQ ID NO: 67069 - protein, 1098 aa, Homo sapiens
VTSGLPLFFVITVTAIKQGYEDWLRHKADNAMNQCPVHFIQHGKLVRKQSRKLRVGDIVMVKEDETFPCDLIFLSSNRGDGTCHVTTASLDGESSHKTHYAVQDTKGFHTEEDIGGLHATIECEQPQPDLYKFVGRINVYSDLNDPVVRPLGSENLLLRGATLKNTEKIFGVAIYTGMETKMALNYQSKSQKRSAVEKSMNAFLIVYLCILISKALINTVLKYMWQSEPFRDEPWYNQKTESERQRNLFLKAFTDFLAFMVLFNYIIPVSMYVTVEMQKFLGSYFITWDEDMFDEETGEGPLVNTSDLNEELGQVEYIFTDKTGTLTENNMEFKECCIEGHVYVPHVICNGQVLPESSGIDMIDSSPSVNGREREELFFRALCLCHTVQVKDDDSVDGPRKSPDGGKSCVYISSSPDEVALVEGVQRLGFTYLRLKDNYMEILNRENHIERFELLEILSFDSVRRRMSVIVKSATGEIYLFCKGADSSIFPRVIEGKVDQIRARVERNAVEGLRTLCVAYKRLIQEEYEGICKLLQAAKVALQDREKKLAEAYEQIEKDLTLLGATAVEDRLQEKAADTIEALQKAGIKVWVLTGDKMETAAATCYACKLFRRNTQLLELTTKRIEEQSLHDVLFELSKTVLRHSGSLTRDNLSGLSADMQDYGLIIDGAALSLIMKPREDGSSGNYRELFLEICRSCSAVLCCRMAPLQKAQIVKLIKFSKEHPITLAIGDGANDVSMILEAHVGIGVIGKEGRQAARNSDYAIPKFKHLKKMLLVHGHFYYIRISELVQYFFYKNVCFIFPQFLYQFFCGFSQQTLYDTAYLTLYNISFTSLPILLYSLMEQHVGIDVLKRDPTLYRDVAKNALLRWRVFIYWTLLGLFDALVFFFGAYFVFENTTVTSNGQIFGNWTFGTLVFTVMVFTVTLKLALDTHYWTWINHFVIWGSLLFYVVFSLLWGGVIWPFLNYQRMYYVFIQMLSSGPAWLAIVLLVTISLLPDVLKKVLCRQLWPTATERVQNGCAQPRDRDSEFTPLASLQSPGYQSTCPSAAWYSSHSQQVTLAAWKEKVSTEPPPILGGSHHHCSSIPSHSCPRSRVGMLV

SEQ ID NO: 67070 - protein, 30 aa, Homo sapiens
KWSLLAKMCLYFGSAFATPFLVVRQQLLKT

SEQ ID NO: 67071 - protein, 55 aa, Homo sapiens
RVVRAALPLQLLLLLLLLLACLLPSSEEDYSCTQANNFARSFYPMLRYTNGPPPT

SEQ ID NO: 67072 - protein, 310 aa, Homo sapiens
LLLLLPFLLYMAAPQIRKMLSSGVCTSTVQLPGKVVVVTGANTGIGKETAKELAQRGARVYLACRDVEKGELVAKEIQTTTGNQQVLVRKLDLSDTKSIRAFAKGFLAEEKHLHVLINNAGVMMCPYSKTADGFEMHIGVNHLGHFLLTHLLLEKLKESAPSRIVNVSSLAHHLGRIHFHNLQGEKFYNAGLAYCHSKLANILFTQELARRLKGSGVTTYSVHPGTVQSELVRHSSFMRWMWWLFSFFIKTPQQGAQTSLHCALTEGLEILSGNHFSDCHVAWVSAQARNETIARRLWDVSCDLLGLPID

SEQ ID NO: 67073 - protein, 14 aa, Homo sapiens
LMKMTLLLMIPVLL

SEQ ID NO: 67074 - protein, 152 aa, Homo sapiens
IVSSALMIWKGLMVITGSESPIVVVLSGSMEPAFHRGDLLFLTNRVEDPIRVGEIVVFRIEGREIPIVHRVLKIHEKQNGHIKFLTKGDNNAVDDRGLYKQGQHWLEKKDVVGRARGFVPYIGIVTILMNDYPKFKYAVLFLLGLFVLVHRE

SEQ ID NO: 67075 - protein, 809 aa, Homo sapiens
KGTYDLLTPLALLFYSTVLCTPHFPPDSDLLLKAASTYHRFLTWPVPYCSICQELLTFIDAELKAPGISYQRLVRAEQGLPIRSHRSSTVTVLLLNPVEVQAEFLAVANKLSTPGHSPHSAYTTLLLHAFQATFGAHCDVPGLHCRLQAKTLAELEDIFTETAEAQELASGIGDAAEARRWLRTKLQAVGEKAGFPGVLDTAKPGKLHTIPIPVARCYTYSWSQDSFDILQEILLKEQELLQPGILGDDEEEEEEEEEVEEDLETDGHCAERDSLLSTSSLASHDSTLSLASSQASGPALSRHLLTSFVSGLSDGMDSGYVEDSEESSSEWPWRRGSQERRGHRRPGQKFIRIYKLFKSTSQLVLRRDSRSLEGSSDTALPLRRAGSLCSPLDEPVSPPSRAQRSRSLPQPKLGTQLPSWLLAPASRPQRRRPFLSGDEDPKASTLRVVVFGSDRISGKVARAYSNLRRLENNRPLLTRFFKLQFFYVPVKRSHGTSPGACPPPRSQTPSPPTDSPRHASPGELGTTPWEESTNDISHYLGMLDPWYERNVLGLMHLPPEVLCQQSLKAEAQALEGSPTQLPILADMLLYYCRFAARPVLLQVYQTELTFITGEKTTEIFIHSLELGHSAATRAIKASGPGSKRLGIDGDREAVPLTLQIIYSKGAISGRSRWSNLEKVCTSVNLNKACRKQEELDSSMEALTLNLTEVVKRQNSKSKKGFNQISTSQIKVDKVQIIGSNSCPFAVCLDQDERKILQSVVRCEVSPCYKPEKSDLSSPPQTPPDLPAQAAPDLCSLLCLPIMTFSGALP

SEQ ID NO: 67076 - protein, 2576 aa, Homo sapiens
KSGVSVSDASAIWYWSLLTSLVTASMETNPAFVQTVLHNTQKALRHMPPLSLSPGSTDFSTFLSPNVLEEVDSFLIRITSCCSTPEVELTLLAFALARGSVAKVMSSLCTITDHLDTQYDASSLILSMASVRQNLLLKYGKPLQLTLQACDVKGKEDKSGPENLLVEPWTRDGFLTETGKTRASTIFSTGTESAFQVTQIRIMVRRGGIGAQCGLVFAYNSSSDKFCAEEHFKRFEKYDKWKLQELRQFVKSRIGCSSDDLGEDDPIGWFELEEEWDEADVKLQQCRVAKYLMVKFLCTRQESAERLGVQGLTISGYLRPARAEAEQSVTCAHCRKDTEESVCGATLLLRTLQFIQQLAHDLVQQKESGLKYKSFLDFAGLDLQIFWNFYSKLKQNPREECVSAQTLLLQLLQSCFSVLQGDVLAASEEEKAPIQSPKGVEAAKELYTHLCDVVDKVDGDSVPMEILKQEVRNTLLNGAAIFFPNRQTRRNHLFTMMNVTEQEHKQSLQLTFRSLCTYFSDKDPGGLLLLPEKNDLAKMNISEVLAVMDTLVSVAARECELLMLSGAPGEVGSVLFSLFWSVQGSLLSWCYLQLKSTDSGAKDLAVDLIEKYVGQFLASMRAILESLFSQYSGKTIVERLCNSVFSMAARQLVIFLLDFCTLDIPHCVLLREFSVLTELLKKLCSGPEGGLRKLDVETWQQEQPVVLHTWTKESAHNYENNCHEVSVFVSPGATYFEVEFDDRCETEKRYDYLEFTDARGRKTRYDTKVGTDKWPKKVTFKAGPRLQFLFHSDSSHNEWGYKFTVTACGLPDVAVSWGLDLQLLVSRLMGRLASQCMALKSVRQLGSNMVVPQAKMALVLSSPLWKPVFRHQVCPELELEASWPTHPHRNSKEVKNIPDDPCRHFLLDFAQSEPAQNFCGPYSELFKGFIQACRKQAPKTDIVAGSTIDQAVNATFAALVYRTPDLYEKLQKYVNSGGKIALSEEFAQVYSLADGIRIWMLEMKQKSLMSLGNEAEEKHSSEATEVNPESLAKECIEKSLLLLKFLPTGISSKESCEKLETADETSHLQPLNKRQRTSSVVEEHFQASVSPTEAAPPATGDQSPGLGTQPKLPSSSGLPAADVSPATAEEPLSPSTPTRRPPFTRGRLRLLSFRSMEEARLVPTVKEKYPVLKDVMDFIKDQSLSHRSVVKVLSLRKAQAQSILEVLKITQHCAESLGQPHCFHPPFILFLLELLTCQKDFTNYFGHLEGCGADLHKEIRDTYYQLVLFLVKAVKGFSSLNDRSLLPALSCVQTALLHLLDMGWEPNDLAFFVDIQLPDLLMKMSQENISVHDSVISQWSEEDELADAKQNSEWMDECQDGMFEAWYEKIAQEDPEKQRKMHMFIARYCDLLNVDISCDGCDEIAPWHRYRCLQCSDMDLCKTCFLGGVKPEGHGDDHEMVNMEFTCDHCQGLIIGRRMNCNVCDDFDLCYGCYAAKKYSYGHLPTHSITAHPMVTIRISDRQRLIQPYIHNYSWLLFAALALYSAHLASAEDVDGEKLDPQTRSSATTLRSQCMQLVGDCLMKAHQGKGLKALALLGVLPDGDSSLEDQALPVTVPTGASEEQLEKKAVQGAELSEAGNGKRAVHEEIRPVDFKQRNKADKGVSLSKDPSCQTQISDSPADASPPTGLPDAEDSEVSSQKPIEEKAVTPSPEQVFAECSQKRILGLLAAMLPPLKSGPTVPLIDLEHVLPLMFQVVISNAGHLNETYHLTLGLLGQLIIRLLPAEVDAAVIKVLSAKHNLFAAGDSSIVPDGWKTTHLLFSLGAVCLDSRVGLDWACSMAEILRSLNSAPLWRDVIATFTDHCIKQLPFQLKHTNIFTLLVLVGFPQVLCVGTRCVYMDNANEPHNVIILKHFTEKNRAVIVDVKTRKRKTVKDYQLVQKGGGQECGDSRAQLSQYSQHFAFIASHLLQSSMDSHCPEAVEATWVLSLALKGLYKTLKAHGFEEIRATFLQTDLLKLLVKKCSKGTGFSKTWLLRDLEILSIMLYSSKKEINALAEHGDLELDERGDREEEVERPVSSPGDPEQKKLDPLEGLDEPTRICFLMAHDALNAPLHILRAIYELQMKKTDYFFLEVQKRFDGDELTTDERIRSLAQRWQPSKSLRLEEQSAKAVDTDMIILPCLSRPARCDQATAESNPVTQKLISSTESELQQSYAKQRRSKSAALLHKELNCKSKRAVRDYLFRVNEATAVLYARHVLASLLAEWPSHVPVSEDILELSGPAHMTYILDMFMQLEEKHEWEKILQKVLQGCREDMLGTMALAACQFMEEPGMEVQVRESKHPYNNNTNFEDKVHIPGAIYLSIKFDSQCNTEEGCDELAMSSSSDFQQDRHSFSGSQQKWKDFELPGDTLYYRFTSDMSNTEWGYRFTVTAGHLGRFQTGFEILKQMLSEERVVPHLPLAKIWEWLVGVACRQTGHQRLKAIHLLLRIVRCCGHSDLCDLALLKPLWQLFTHMEYGLFEDVTQPGILLPLHRALTELFFVTENRAQELGVLQDYLLALTTDDHLLRCAAQALQNIAAISLAINYPNKATRLWNVEC

SEQ ID NO: 67077 - protein, 203 aa, Homo sapiens
LLPALLLLCLSGCLSLKGPGSVTGTAGDSLTVWCQYESMYKGYNKYWCRGQYDTSCESIVETKGEEKVERNGRVSIRDHPEALAFTVTMQNLNEDDAGSYWCKIQTVWVLDSWSRDPSDLVRVYVSPAITTPRRTTHPATPPIFLVVNPGRNLSTGEVLTQNSGFRLSSPHFLLVVLLKLPLLLSMLGAVFWVNRPQWAPPGR

SEQ ID NO: 67078 - protein, 525 aa, Homo sapiens
LLLLLLLLPTLALLRQQRSQDARLSWLAGLQHRVAWGALVWAATWQRRRLEQSTLHVHQSQQQALRWCLQGAQRPHCSLRRSTDISTFRNHLPLTKASQTQQEDSGEQPLPPTSNQDLGEASLQATLLGLAALNKAYPEVLAQGRTARVTLTSPWPRPLPWPGNTLGQVGTPGTKDPRALLLDALRSPGLRALEAGTAVELLDVFLGLETDGEELAGAIAAGNPGAPLRERAAELREALEQGPRGLALRLWPKLQVVVTLDAGGQAEAVAALGALWCQGLAFFSPAYAASGGVLGLNLQPEQPHGLYLLPPGAPFIELLPVKEGTQEEAASTLLLAEAQQGKEYELVLTDRASLTRCRLGDVVRVVGAYNQCPVVRFICRLDQTLSVRGEDIGEDLFSEALGRAVGQWAGAKLLDHGCVESSILDSSAGSAPHYEVFVALRGLRNLSEENRDKLDHCLQEASPRYKSLRFWGSVGPARVHLVGQGAFRALRAALAACPSSPFPPAMPRVLRHRHLAQCLQERVVS

SEQ ID NO: 67079 - protein, 67 aa, Homo sapiens
IFRMIIYLTFPVAMFWVSNQAEWFEDDVIQRKRELWPPEKLQEIEEFKERLRKRREEKLLRDAQQNS

SEQ ID NO: 67080 - protein, 28 aa, Homo sapiens
LLPLLLLLPMCWAVEVKRPRGVSLTNVY

SEQ ID NO: 67081 - protein, 387 aa, Homo sapiens
VVVVCLAAFLIFLLLGICWCQCCPHTCCCYVRCPCCPDKCCCPEALYAAGKAATSGVPSIYAPSTYAHLSPAKTPPPPAMIPMGPAYNGYPGGYPGDVDRSSSAGGQGSYVPLLRDTDSSVASEVRSGYRIQASQQDDSMRVLYYMEKELANFDPSRPGPPSGRVERAMSEVTSLHEDDWRSRPSRGPALTPIRDEEWGGHSPRSPRGWDQEPAREQAGGGWRARRPRARSVDALDDLTPPSTAESGSRSPTSNGGRSRAYMPPRSRSRDDLYDQDDSRDFPRSRDPHYDDFRSRERPPADPRSHHHRTRDPRDNGSRSGDLPYDGRLLEEAVRKKGSEERRRPHKEEEEEAYYPPAPPPYSETDSQASRERRLKKNLALSRESLVV

SEQ ID NO: 67082 - protein, 66 aa, Homo sapiens
LVVSFVVGGLAVILPPLSPYFKYSVMINKATPYNYPVPVRDDGNMPDVPSHPQDPQGPSLEWLKKL

SEQ ID NO: 67083 - protein, 463 aa, Homo sapiens
ILTVLICLGLSLGPRTHVQAGHLPKPTLWAEPGSVIIQGSPVTLRCQGSLQAEEYHLYRENKSASWVRRIQEPGKNGQFPIPSITWEHAGRYHCQYYSHNHSSEYSDPLELVVTGAYSKPTLSALPSPVVTSGGNVTLQCVSQVAFDGFILCKEGEDEHPQRLNSHSHARGWSWAIFSVGPVSPSRRWSYRCYAYDSNSPYVWSLPSDLLELLVPGVSKKPSLSVQPGPMVAPGESLTLQCVSDVGYDRFVLYKEGERDFLQRPGWQPQAGLSQANFTLGPVSPSHGGQYRCYSAHNLSSEWSAPSDPLDILITGQFYDRPSLSVQPVPTVAPGKNVTLLCQSRGQFHTFLLTKEGAGHPPLHLRSEHQAQQNQAEFRMGPVTSAHVGTYRCYSSLSSNPYLLSLPSDPLELVVSASLGQHPQDYTVENLIRMGVAGLVLVVLGILLFEAQHSQRSLQDAAGR

SEQ ID NO: 67084 - protein, 657 aa, Homo sapiens
RAVGGDAMTPILTVLICLGLSLGPRTHVQAGHLPKPTLWAEPGSVITQGSPVTLRCQGGQETQEYRLYREKKTAPWITRIPQELVKKGQFPIPSITWEHTGRYRCYYGSDTAGRSESSDPLELVVTGAYIKPTLSAQPSPVVNSGGNVTLQCDSQVAFDGFILCKEGEDEHPQCLNSQPHARGSSRAIFSVGPVSPSRRWWYRCYAYDSNSPYEWSLPSDLLELLVLGVSKKPSLSVQPGPIVAPEETLTLQCGSDAGYNRFVLYKDGERDFLQLAGAQPQAGLSQANFTLGPVSRSYGGQYRCYGAHNLSSEWSAPSDPLDILIAGQFYDRVSLSVQPGPTVASGENVTLLCQSQGWMQTFLLTKEGAADDPWRLRSTYQSQKYQAEFPMGPVTSAHAGTYRCYGSQSSKPYLLTHPSDPLELVVSGPSGGPSSPTTGPTSTSGPEDQPLTPTGSDPQSGLGRHLGVVIGILVAVILLLLLLLLLFLILRHRRQGKHWTSTQRKADFQHPAGAVGPEPTDRGLQWRSSPAADAQEENLYAAVKHTQPEDGVEMDTRSPHDEDPQAVTYAEVKHSRPRREMASPPSPLSGEFLDTKDRQAEEDRQMDTEAAASEAPQDVTYAQLHSLTLRREATEPPPSQEGPSPAVPSIYATLAIH

SEQ ID NO: 67085 - protein, 16 aa, Homo sapiens
LWNIFMMFCMIVLFGS

SEQ ID NO: 67086 - protein, 29 aa, Homo sapiens
MAGLILVVLGILIFQDWHSQRSPQAAAGR

SEQ ID NO: 67087 - protein, 556 aa, Homo sapiens
LGKFHSIVRLVAFCPFASSQVALENANAVSEGVVHEDLRLLLETHLPSKKKKVLLGVGDPKIGAAIQEELGYNCQTGGVIAEILRGVRLHFHNLVKGLTDLSACKAQLGLGHSYSRAKVKFNVNRVDNMIIQSISLLDQLDKDINTFSMRVREWYGYHFPELVKIINDNATYCRLAQFIGNRRELNEDKLEKLEELTMDGAKAKAILDASRSSMGMDISAIDLINIESFSSRVVSLSEYRQSLHTYLRSKMSQVAPSLSALIGEAVGARLIAHAGSLTNLAKYPASTVQILGAEKALFRALKTRGNTPKYGLIFHSTFIGRAAAKNKGRISRYLANKCSIASRIDCFSEVPTSVFGEKLREQVEERLSFYETGEIPRKNLDVMKEAMVQAEEAAAEITRKLEKQEKKRLKKEKKRLAALALASSENSSSTPEECEEMSEKPKKKKKQKPQEVPQENGMEDPSISFSKPKKKKSFSKEELMSSDLEETAGSTSIPKRKKSTPKEETVNDPEEAGHRSGSKKKRKFSKEEPVSSGPEEAVGKSSSKKKKKFHKASQED

SEQ ID NO: 67088 - protein, 368 aa, Homo sapiens
LKPSLPFTSLLFLQLPLLGVGLNTTILTPNGNEDTTADFFLTTMPTDSLSVSTLPLPEVQCFVFNVEYMNCTWNSSSEPQPTNLTLHYWYKNSDNDKVQKCSHYLFSEEITSGCQLQKKEIHLYQTFVVQLQDPREPRRQATQMLKLQNLVIPWAPENLTLHKLSESQLELNWNNRFLNHCLEHLVQYRTDWDHSWTEQSVDYRHKFSLPSVDGQKRYTFRVRSRFNPLCGSAQHWSEWSHPIHWGSNTSKENPFLFALEAVVISVGSMGLIISLLCVYFWLERTMPRIPTLKNLEDLVTEYHGNFSAWSGVSKGLAESLQPDYSERLCLVSEIPPKGGALGEGPGASPCNQHSPYWAPPCYTLKPET

SEQ ID NO: 67089 - protein, 79 aa, Homo sapiens
ILRRHGLLFLHLFALMRAAGLPELSCSKDIQYLKDSLALGKTEEEALKHFRVKFNEALRESWKTKVNWLAHNVSKDNRQ

SEQ ID NO: 67090 - protein, 23 aa, Homo sapiens
VPLVILIVLVLWFKKHCSYQDIL

SEQ ID NO: 67091 - protein, 44 aa, Homo sapiens
VGLLLLLWLSLPVRLPSFVVSQRCAGLLLAALRIQGVGCQVQVS

SEQ ID NO: 67092 - protein, 58 aa, Homo sapiens
IIFTVLLVLFFIFTYFKVPETKGRTFDEIASGFRQGGASQSDKTPEELFHPLGADSQV

SEQ ID NO: 67093 - protein, 19 aa, Homo sapiens
LTWAALIILLLPGSEYGQG

SEQ ID NO: 67094 - protein, 234 aa, Homo sapiens
IMWQLLLPTALLLLVSAGMRTEDLPKAVVFLEPQWYSVLEKDSVTLKCQGAYSPEDNSTQWFHNENLISSQASSYFIDAATVNDSGEYRCQTNLSTLSDPVQLEVHIGWLLLQAPRWVFKEEDPIHLRCHSWKNTALHKVTYLQNGKDRKYFHHNSDFHIPKATLKDSGSYFCRGLVGSKNVSSETVNITITQGLAVSTISSFSPPGYQVSFCLVMVLLFAVDTGLYFSVKTNI

SEQ ID NO: 67095 - protein, 29 aa, Homo sapiens
MPALRPALLWALLALWLCCATPAHVSRWL

SEQ ID NO: 67096 - protein, 29 aa, Homo sapiens
TTLVPWAAALLLALGVERALALPEVQKQV

SEQ ID NO: 67097 - protein, 27 aa, Homo sapiens
LAPLGLLAILTLAVATLYGLSLATPGE

SEQ ID NO: 67098 - protein, 39 aa, Homo sapiens
LPQFIFLPVYFPFAFLESCCITEAGSSDVPLKSQWKVLT

SEQ ID NO: 67099 - protein, 321 aa, Homo sapiens
LSNILFVMAFLLSGAAPLKIQAYFNETADLPCQFANSQNQSLSELVVFWQDQENLVLNEVYLGKEKFDSVHSKYMGRTSFDSDSWTLRLHNLQIKDKGLYQCIIHHKKPTGMIRIHQMNSELSVLANFSQPEIVPISNITENVYINLTCSSIHGYPEPKKMSVLLRTKNSTIEYDGVMQKSQDNVTELYDVSISLSVSFPDVTSNMTIFCILETDKTRLLSSPFSIELEDPQPPPDHIPWITAVLPTVIICVMVFCLILWKWKKKKRPRNSYKCGTNTMEREESEQTKKREKIHIPERSDEAQRVFKSSKTSSCDKSDTCF

SEQ ID NO: 67100 - protein, 37 aa, Homo sapiens
MPGFLVRILPLLLVLLLLGPTRGLRVSLRDPGTGRHC

SEQ ID NO: 67101 - protein, 163 aa, Homo sapiens
MEMLCAGRVPALLLCLGFHLLQAVLSTTVIPSCIPGESSDNCTALVQTEDNPRVAQVSITKCSSDMNGYCLHGQCIYLVDMSQNYCRCEVGYTGVRCEHFFLTVHQPLSKEYVALTVILIILFLITVVGSTYYFCRWYRNRKSKEPKKEYERVTSGDPELPQV

SEQ ID NO: 67102 - protein, 20 aa, Homo sapiens
RSRWWDLTVGPISLFSALLA

SEQ ID NO: 67103 - protein, 13 aa, Homo sapiens
IKRDIVFAASLYL

SEQ ID NO: 67104 - protein, 12 aa, Homo sapiens
LNLLSLAVYIFT

SEQ ID NO: 67105 - protein, 30 aa, Homo sapiens
LVLHLASLQLGLLLNGVCSLAEELRHIHSR

SEQ ID NO: 67106 - protein, 207 aa, Homo sapiens
KLLPSVVLKLFLAAVLSALVTGESLERLRRGLAAGTSNPDPPTVSTDQLLPLGGGRDRKVRDLQEADLDLLRVTLSSKPQALATPNKEEHGKRKKKGKGLGKKRDPCLRKYKDFCIHGECKYVKELRAPSCICHPGYHGERCHGLSLPVENRLYTYDHTTILAVVAVVLSSVCLLVIVGLLMFRYHRRGGYDVENEEKVKLGMTNSH

SEQ ID NO: 67107 - protein, 237 aa, Homo sapiens
LLWPGAALLVLLGVAASLCVRCSRPGAKRSEKIYQQRSLREDQQSFTGSRTYSLVGQAWPGPLADMAPTRKDKLLQFYPSLEDPASSRYQNFSKGSRHGSEEAYIDPIAMEYYNWGRFSKPPEDDDANSYENVLICKQKTTETGAQQEGIGGLCRGDLSLSLALKTGPTSGLCPSASPEEDEESEDYQNSASIHQWRESRKVMGQLQREASPGPVGSPDEEDGEPDYVNGEVAATEA

SEQ ID NO: 67108 - protein, 41 aa, Homo sapiens
LWVCECLCVLLFTSHLLKSVYVRGWGVCVKESEEEKEREIN

SEQ ID NO: 67109 - protein, 880 aa, Homo sapiens
LVFFPLIAHYYLTTLDEADEAGKRIFGPRVGNELCEVKHVLDLCRIRESVSEELLQLEAKRQELNSEIAKLNLKIEACKKSIENAKQDLLQLKNVISQTEHSYKELMAQNQPKLSLPIRLLPEKDDAGLPPPKATRGCRLHNCFDYSRCPLTSGFPVYVYDSDQFVFGSYLDPLVKQAFQATARANVYVTENADIACLYVILVGEMQEPVVLRPAELEKQLYSLPHWRTDGHNHVIINLSRKSDTQNLLYNVSTGRAMVAQSTFYTVQYRPGFDLVVSPLVHAMSEPNFMEIPPQVPVKRKYLFTFQGEKIESLRSSLQEARSFEEEMEGDPPADYDDRIIATLKAVQDSKLDQVLVEFTCKNQPKPSLPTEWALCGEREDRLELLKLSTFALIITPGDPRLVISSGCATRLFEALEVGAVPVVLGEQVQLPYQDMLQWNEAALVVPKPRVTEVHFLLRSLSDSDLLAMRRQGRFLWETYFSTADSIFNTVLAMIRTRIQIPAAPIREEAAAEIPHRSGKAAGTDPNMADNGDLDLGPVETEPPYASPRYLRNFTLTVTDFYRSWNCAPGPFHLFPHTPFDPVLPSEAKFLGSGTGFRPIGGGAGGSGKEFQAALGGNVPREQFTVVMLTYEREEVLMNSLERLNGLPYLNKVVVVWNSPKLPSEDLLWPDIGVPIMVVRTEKNSLNNRFLPWNEIETEAILSIDDDAHLRHDEIMFGFRVWREARDRIVGFPGRYHAWDIPHQSWLYNSNYSCELSMVLTGAAFFHKYYAYLYSYVMPQAIRDMVDEYINCEDIAMNFLVSHITRKPPIKVTSRWTFRCPGCPQALSHDDSHFHERHKCINFFVKVYGYMPLLYTQFRVDSVLFKTRLPHDKTKCFKFI

SEQ ID NO: 67110 - protein, 21 aa, Homo sapiens
ILRDRAVHELQAVLLALVLGR

SEQ ID NO: 67111 - protein, 40 aa, Homo sapiens
KILLIYFLIMLISNEDSCLKIFFNLMVSIFCKNHVNLFHS

SEQ ID NO: 67112 - protein, 630 aa, Homo sapiens
VIFFGFSSSFIFLPKLLLVGEKKMPQLNGGGGDDLGANDELISFKDEGEQEEKSSENSSAERDLADVKSSLVNESETNQNSSSDSEAERRPPPRSESFRDKSRESLEEAAKRQDGGLFKGPPYPGYPFIMIPDLTSPYLPNGSLSPTARTLHFQSGSTHYSAYKTIEHQIAVQYLQMKWPLLDVQAGSLQSRQALKDARSPSPAHIVSNKVPVVQHPHHVHPLTPLITYSNEHFTPGNPPPHLPADVDPKTGIPRPPHPPDISPYYPLSPGTVGQIPHPLGWLVPQQGQPVYPITTGGFRHPYPTALTVNASMSSFLSSRFPPHMVPPHHTLHTTGIPHPAIVTPTVKQESSQSDVGSLHSSKHQDSKKEEEKKKPHIKKPLNAFMLYMKEMRAKVVAECTLKESAAINQILGRRWHALSREEQAKYYELARKERQLHMQLYPGWSARDNYGKKKKRKRDKQPGETNDANTPKKCRALFGLDRQTLWCKPCRRKKKCVRYIQGEGSCLSPPSSDGSLLDSPPPSPNLLGSPPRDAKSQTEQTQPLSLSLKPDPLAHLSMMPPPPALLLAEATHKASALCPNGALDLPPAALQPAAPSSSIAQPSTSSLHSHSSLAGTQPQPLSLVTKSLE

SEQ ID NO: 67113 - protein, 619 aa, Homo sapiens
VIFFGFSSSFIFLPKLLLVGEKKMPQLNGGGGDDLGANDELISFKDEGEQEEKSSENSSAERDLADVKSSLVNESETNQNSSSDSEAERRPPPRSESFRDKSRESLEEAAKRQDGGLFKGPPYPGYPFIMIPDLTSPYLPNGSLSPTARTYLQMKWPLLDVQAGSLQSRQALKDARSPSPAHIVSNKVPVVQHPHHVHPLTPLITYSNEHFTPGNPPPHLPADVDPKTGIPRPPHPPDISPYYPLSPGTVGQIPHPLGWLVPQQGQPVYPITTGGFRHPYPTALTVNASMSRFPPHMVPPHHTLHTTGIPHPAIVTPTVKQESSQSDVGSLHSSKHQDSKKEEEKKKPHIKKPLNAFMLYMKEMRAKVVAECTLKESAAINQILGRRWHALSREEQAKYYELARKERQLHMQLYPGWSARDNYGKKKKRKRDKQPGETNEHSECFLNPCLSLPPITDLSAPKKCRARFGLDQQNNWCGPCRRKKKCVRYIQGEGSCLSPPSSDGSLLDSPPPSPNLLGSPPRDAKSQTEQTQPLSLSLKPDPLAHLSMMPPPPALLLAEATHKASALCPNGALDLPPAALQPAAPSSSIAQPSTSSLHSHSSLAGTQPQPLSLVTKSLE

SEQ ID NO: 67114 - protein, 13 aa, Homo sapiens
LLIFVFVLSIHLL

SEQ ID NO: 67115 - protein, 166 aa, Homo sapiens
KGKYLVLFFYPLDFTFVCPTEIVAFSDKANEFHDVNCEVVAVSVDSHFSHLAWINTPRKNGGLGHMNIALLSDLTKQISRDYGVLLEGSGLALRGLFIIDPNGVIKHLSVNDLPVGRSVEETLRLVKAFQYVETHGEVCPANWTPDSPTIKPSPAASKEYFQKVNQ

SEQ ID NO: 67116 - protein, 466 aa, Homo sapiens
LHFAAKYGLKNLTALLLTCPGALQAYSVANKHGHYPNTIAEKHGFRDLRQFIDEYVETVDMLKSHIKEELMHGEEADAVYESMAHLSTDLLMKCSLNPGCDEDLYESMAAFVPAATEDLYVEMLQASTSNPIPGDGFSRATKDSMIRKFLEGNSMGMTNLERDQCHLGQEEDVYHTVDDDEAFSVDLASRPPVPVPRPETTAPGAHQLPDNEPYIFKVFAEKSQERPGNFYVSSESIRKGPPVRPWRDRPQSSIYDPFAGMKTPGQRQLITLQEQVKLGIVNVDEAVLHFKEWQLNQKKRSESFRFQQENLKRLRDSITRRQREKQKSGKQTDLEITVPIRHSQHLPAKVEFGVYESGPRKSVIPPRTELRRGDWKTDSTSSTASSTSNRSSTRSLLSVSSGMEGDNEDNEVPEVTRSRSPGPPQVDGTPTMSLERPPRVPPRAASQRPPTRETFHPPPPVPPRGR

SEQ ID NO: 67117 - protein, 239 aa, Homo sapiens
MMQLLLLALVTAAGSAQPRSARARTDLLNVCMNAKHHKTQPSPEDELYGQCSPWKKNACCTASTSQELHKDTSRLYNFNWDHCGKMEPTCKRHFIQDSCLYECSPNLGPWIRQVNQSWRKERILNVPLCKEDCERWWEDCRTSYTCKSNWHKGWNWTSGINECPAGALCSTFESYFPTPAALCEGLWSHSFKVSNYSRGSGRCIQMWFDSAQGNPNEEVAKFYAAAMNAGAPSRGIIDS

SEQ ID NO: 67118 - protein, 938 aa, Homo sapiens
VAARRRRSWASLVLAFLGVCLGITLAVDRSNFKTCEESSFCKRQRSIRPGLSPYRALLDSLQLGPDSLTVHLIHEVTKVLLVLELQGLQKNMTRFRIDELEPRRPRYRVPDVLVADPPIARLSVSGRDENSVELTMAEGPYKIILTARPFRLDLLEDRSLLLSVNARGLLEFEHQRAPRVSQGSKDPAEGDGAQPEETPRDGDKPEETQGKAEKDEPGAWEETFKTHSDSKPYGPMSVGLDFSLPGMEHVYGIPEHADNLRLKVTEGGEPYRLYNLDVFQYELYNPMALYGSVPVLLAHNPHRDLGIFWLNAAETWVDISSNTAGKTLFGKMMDYLQGSGETPQTDVRWMSETGIIDVFLLLGPSISDVFRQYASLTGTQALPPLFSLGYHQSRWNYRDEADVLEVDQGFDDHNLPCDVIWLDIEHADGKRYFTWDPSRFPQPRTMLERLASKRRKLVAIVDPHIKVDSGYRVHEELRNLGLYVKTRDGSDYEGWCWPGSAGYPDFTNPTMRAWWANMFSYDNYEGSAPNLFVWNDMNEPSVFNGPEVTMLKDAQHYGGWEHRDVHNIYGLYVHMATADGLRQRSGGMERPFVLARAFFAGSQRFGAVWTGDNTAEWDHLKISIPMCLSLGLVGLSFCGADVGGFFKNPEPELLVRWYQMGAYQPFFRAHAHLDTGRREPWLLPSQHNDIIRDALGQRYSLLPFWYTLLYQAHREGIPVMRPLWVQYPQDVTTFNIDDQYLLGDALLVHPVSDSGAHGVQVYLPGQGEVWYDIQSYQKHHGPQTLYLPVTLSSIPVFQRGGTIVPRWMRVRRSSECMKDDPITLFVALSPQGTAQGELFLDDGHTFNYQTRQEFLLRRFSFSGNTLVSSSADPEGHFETPIWIERVVIIGAGKPAAVVLQTKGSPESRLSFQHDPETSVLVLRKPGINVASDWSIHLR

SEQ ID NO: 67119 - protein, 21 aa, Homo sapiens
IRKAFVLCGFLYFEFFDQKTD

SEQ ID NO: 67120 - protein, 61 aa, Homo sapiens
LGVIFASSLFLLALMFLGLQRRQAPTGLGLLQAERWETTSCADTQSSHLHEDRTARVSQPS

SEQ ID NO: 67121 - protein, 542 aa, Homo sapiens
LPQPPPLLLLLLLLPLLLVTAEPPKPAGVYYATAYWMPAEKTVQVKNVMDKNGDAYGFYNNSVKTTGWGILEIRAGYGSQTLSNEIIMFVAGFLEGYLTAPHMNDHYTNLYPQLITKPSIMDKVQDFMEKQDKWTRKNIKEYKTDSFWRHTGYVMAQIDGLYVGAKKRAILEGTKPMTLFQIQFLNSVGDLLDLIPSLSPTKNGSLKVFKRWDMGHCSALIKVLPGFENILFAHSSWYTYAAMLRIYKHWDFNVIDKDTSSSRLSFSSYPGFLESLDDFYILSSGLILLQTTNSVFNKTLLKQVIPETLLSWQRVRVANMMADSGKRWADIFSKYNSGTYNNQYMVLDLKKVKLNHSLDKGTLYIVEQIPTYVEYSEQTDVLRKGYWPSYNVPFHEKIYNWSGYPLLVQKLGLDYSYDLAPRAKIFRRDQGKVTDTASMKYIMRYNNYKKDPYSRGDPCNTICCREDLNSPNPSPGGCYDTKVADIYLASQYTSYAISGPTVQGGLPVFRWDRFNKTLHQGMPEVYNFDFITMKPILKLDIK

SEQ ID NO: 67122 - protein, 16 aa, Homo sapiens
KNQKSSPLLTLLLWLG

SEQ ID NO: 67123 - protein, 660 aa, Homo sapiens
RLPVLSPPRWPRLLLLSLLLLGAVPGPRRSGAFYLPGLAPVNFCDEEKKSDECKAEIELFVNRLDSVESVLPYEYTAFDFCQASEGKRPSENLGQVLFGERIEPSPYKFTFNKKETCKLVCTKTYHTEKAEDKQKLEFLKKSMLLNYQHHWIVDNMPVTWCYDVEDGQRFCNPGFPIGCYITDKGHAKDACVISSDFHERDTFYIFNHVDIKIYYHVVETGSMGARLVAAKLEPKSFKHTHIDKPDCSGPPMDISNKASGEIKIAYTYSVSFEEDDKIRWASRWDYILESMPHTHIQWFSIMNSLVIVLFLSGMVAMIMLRTLHKDIARYNQMDSTEDAQEEFGWKLVHGDIFRPPRKGMLLSVFLGSGTQILIMTFVTLFFACLGFLSPANRGALMTCAVVLWVLLGTPAGYVAARFYKSFGGEKWKTNVLLTSFLCPGIVFADFFIMNLILWGEGSSAAIPFGTLVAILALWFCISVPLTFIGAYFGFKKNAIEHPVRTNQIPRQIPEQSFYTKPLPGIIMGGILPFGCIFIQLFFILNSIWSHQMYYMFGFLFLVFIILVITCSEATILLCYFHLCAEDYHWQWRSFLTSGFTAVYFLIYAVHYFFSKLQITGTASTILYFGYTMIMVLIFFLFTGTIGFFACFWFVTKIYSVVKVD

SEQ ID NO: 67124 - protein, 21 aa, Homo sapiens
RPCYAVYLGVLYVLLPMPSLK

SEQ ID NO: 67125 - protein, 291 aa, Homo sapiens
VFAVASVGHGVFLPLVILCTLLGDGLASVCPLPPEPENGGYICHPRPCRDPLTAGSVIEYLCAEGYMLKGDYKYLTCKNGEWKPAMEISCRLNEDKDTHTSLGVPTLSIVASTASSVALILLLVVLFVLLQPKLKSFHHSRRDQGVSGDQVSIMVDGVQVALPSYEEAVYGSSGHCVPPADPRVQIVLSEGSGPSGRSVPREQQLPDQGACSSAGGEDEAPGQSGLCEAWGSRASETVMVHQATTSSWVAGSGNRQLAHKETADSENSDIQSLLSLTSEEYTDDIPLLKEA

SEQ ID NO: 67126 - protein, 29 aa, Homo sapiens
MQPILLLLAFLLLPRADADFSFRGDHRGT

SEQ ID NO: 67127 - protein, 202 aa, Homo sapiens [sequence omitted]

SEQ ID NO: 67128 - protein, 31 aa, Homo sapiens
TIALFVVSFSQVLLLKSFFTEKRPISRAVHS

SEQ ID NO: 67129 - protein, 81 aa, Homo sapiens
MNPMVMMMVLPLLIFVLLPKVVNTSDPDMRREMEQSMNMLNSNHELPDVSEFMTRLFSSKSSGKSSSGSSKTGKSGAGKRR

SEQ ID NO: 67130 - protein, 11 aa, Homo sapiens
VVSFLRILATL

SEQ ID NO: 67131 - protein, 63 aa, Homo sapiens
KLCVTVLSLLVLVAAFCSLALSAPMGSDPPTACCFSYTARKLPRNFVVDYYETSSLCSQPAVV

SEQ ID NO: 67132 - protein, 31 aa, Homo sapiens
LLPISLKGLLLVGLLCTVLQVSSAKGASRGK

SEQ ID NO: 67133 - protein, 14 aa, Homo sapiens
LVLTVLSSMGLAAM

SEQ ID NO: 67134 - protein, 45 aa, Homo sapiens
VLILFLGASMVYLIRVARRNQERALRTVWSSGDDKEQLVKNTYVL

SEQ ID NO: 67135 - protein, 670 aa, Homo sapiens
VGGDAMTPILTVLICLGLSLGPRTHVQAGHLPKPTLWAEPGSVITQGSPVTLRCQGGQETQEYRLYREKKTAPWITRIPQELVKKGQFPIPSITWEHTGRYRCYYGSDTAGRSESSDPLELVVTGAYIKPTLSAQPSPVVNSGGNVTLQCDSQVAFDGFILCKEGEDEHPQCLNSQPHARGSSRAIFSVGPVSPSRRWWYRCYAYDSNSPYEWSLPSDLLELLVLGVSKKPSLSVQPGPIVAPEETLTLQCGSDAGYNRFVLYKDGERDFLQLAGAQPQAGLSQANFTLGPVSRSYGGQYRCYGAHNLSSEWSAPSDPLDILIAGQFYDRVSLSVQPGPTVASGENVTLLCQSQGWMQTFLLTKEGAADDPWRLRSTYQSQKYQAEFPMGPVTSAHAGTYRCYGSQSSKPYLLTHPSDPLELVVSGPSGGPSSPTTGPTSTSAGPEDQPLTPTGSDPQSAPGLGSGAGTRAAGLGRHLGVVIGILVAVILLLLLLLLLFLILRHRRQGKHWTSTQRKADFQHPAGAVGPEPTDRGLQWRSSPAADAQEENLYAAVKHTQPEDGVEMDTRQSPHDEDPQAVTYAEVKHSRPRREMASPPSPLSGEFLDTKDRQAEEDRQMDTEAAASEAPQDVTYAQLHSLTLRREATEPPPSQEGPSPAVPSIYATLAIH

SEQ ID NO: 67136 - protein, 76 aa, Homo sapiens
ILLFCAVVPGTLLLFRKRWQNEKLGLDAGDEYEDENLYEGLNLDDCSMYEDISRGLQGTYQDVGSLNIGDVQLEKP

SEQ ID NO: 67137 - protein, 355 aa, Homo sapiens
LGLLLFLLPGSLGAESHLSLLYHLTAVSSPAPGTPAFWVSGWLGPQQYLSYNSLRGEAEPCGAWVWENQVSWYWEKETTDLRIKEKLFLEAFKALGGKGPYTLQGLLGCELGPDNTSVPTAKFALNGEEFMNFDLKQGTWGGDWPEALAISQRWQQQDKAANKELTFLLFSCPHRLREHLERGRGNLEWKEPPSMRLKARPSSPGFSVLTCSAFSFYPPELQLRFLRNGLAAGTGQGDFGPNSDGSFHASSSLTVKSGDEHHYCCIVQHAGLAQPLRVELESPAKSSVLVVGIVIGVLLLTAAAVGGALLWRRMRSGLPAPWISLRGDDTGVLLPTPGEAQDADLKDVNVIPATA

SEQ ID NO: 67138 - protein, 37 aa, Homo sapiens
MQRPWVCVFIALSCWLPAAPPVPGRALGQRLSAPPPS

SEQ ID NO: 67139 - protein, 44 aa, Homo sapiens
KIYFPIRDSWNAGIMTVMSALSVAPSKAREYSKEGWEYVKARTK

SEQ ID NO: 67140 - protein, 341 aa, Homo sapiens
RSCPRDMGHPPLLPLLLLLHTCVPASWGLRCMQCKTNGDCRVEECALGQDLCRTTIVRLWEEGEELELVEKSCTHSEKTNRTLSYRTGLKITSLTEVVCGLDLCNQGNSGRAVTYSRSRYLECISCGSSDMSCERGRHQSLQCRSPEEQCLDVVTHWIQEGEEGRPKDDRHLRGCGYLPGCPGSNGFHNNDTFHFLKCCNTTKCNEGPILELENLPQNGRQCYSCKGNSTHGCSSEETFLIDCRGPMNQCLVATGTHEPKNQSYMVRGCATASMCQHAHLGDAFSMNHIDVSCCTKSGCNHPDLDVQYRSGAAPQPGPAHLSLTITLLMTARLWGGTLLWT

SEQ ID NO: 67141 - protein, 755 aa, Homo sapiens
RVAMLPGLALLLLAAWTARALEVPTDGNAGLLAEPQIAMFCGRLNMHMNVQNGKWDSDPSGTKTCIDTKEGILQYCQEVYPELQITNVVEANQPVTIQNWCKRGRKQCKTHPHFVIPYRCLVGEFVSDALLVPDKCKFLHQERMDVCETHLHWHTVAKETCSEKSTNLHDYGMLLPCGIDKFRGVEFVCCPLAEESDNVDSADAEEDDSDVWWGGADTDYADGSEDKVVEVAEEEEVAEVEEEEADDDEDDEDGDEVEEEAEEPYEEATERTTSIATTTTTTTESVEEVVREVCSEQAETGPCRAMISRWYFDVTEGKCAPFFYGGCGGNRNNFDTEEYCMAVCGSAMSQSLLKTTQEPLARDPVKLPTTAASTPDAVDKYLETPGDENEHAHFQKAKERLEAKHRERMSQVMREWEEAERQAKNLPKADKKAVIQHFQEKVESLEQEAANERQQLVETHMARVEAMLNDRRRLALENYITALQAVPPRPRHVFNMLKKYVRAEQKDRQHTLKHFEHVRMVDPKKAAQIRSQVMTHLRVIYERMNQSLSLLYNVPAVAEEIQDEVDELLQKEQNYSDDVLANMISEPRISYGNDALMPSLTETKTTVELLPVNGEFSLDDLQPWHSFGADSVPANTENEGSGLTNIKTEEISEVKMDAEFRHDSGYEVHHQKLVFFAEDVGSNKGAIIGLMVGGVVIATVIVITLVMLKKKQYTSIHHGVVEVDAAVTPEERHLSKMQQNGYENPTYKFFEQMQN

SEQ ID NO: 67142 - protein, 50 aa, Homo sapiens
KTMLVLALLLAKKVASHTPSLLRDVFHTTVNFINQNLRTYVRSLARNGMD

SEQ ID NO: 67143 - protein, 69 aa, Homo sapiens
IVGTLVCGIVLGFLFKRFLRIQRLFPPVPQIKDKLNDNHEVEDEIIWEEFTPEEGKGYREEVLTVKEIT

SEQ ID NO: 67144 - protein, 73 aa, Homo sapiens
VCLMGHERRQTLNLISLLALRVLAEQNIIPSATNVTCYYQPAPYVSDGNFSNYYVAHPPVTYSQPYPTWLPCN

SEQ ID NO: 67145 - protein, 25 aa, Homo sapiens
VITFYSTMYMYGIVLINELGKDVIN

SEQ ID NO: 67146 - protein, 151 aa, Homo sapiens
LKKLWLVNSGLTSVCCSALSSVLSTNQNLTHLYLRGNTLGDKGIKLLCEGLLHPDCKLQVLELDNCNLTSHCCWDLSTLLTSSQSLRKLSLGNNDLGDLGVMMFCEVLKQQSCLLQNLGLSEMYFNYETKSALETLQEEKPELTVVFEPSW

SEQ ID NO: 67147 - protein, 28 aa, Homo sapiens
MARLGNCSLTWAALIILLLPGRPSHPHQ

SEQ ID NO: 67148 - protein, 11 aa, Homo sapiens
TVPTILGLLLT

SEQ ID NO: 67149 - protein, 38 aa, Homo sapiens
IFSMVGLYYINKISSTLYQAAAPVLTPAKVTGKSKKRN

SEQ ID NO: 67150 - protein, 22 aa, Homo sapiens
VLLWLLYIFFSSLEAYCHIKGF

SEQ ID NO: 67151 - protein, 44 aa, Homo sapiens
ILVLMGGLIWFLFQRHRLHLAGFSSVRYAQGVNEDEIMLPSFHD

SEQ ID NO: 67152 - protein, 318 aa, Homo sapiens
ILFVMAFLLSGAAPLKIQAYFNETADLPCQFANSQNQSLSELVVFWQDQENLVLNEVYLGKEKFDSVHSKYMGRTSFDSDSWTLRLHNLQIKDKGLYQCIIHHKKPTGMIRIHQMNSELSVLANFSQPEIVPISNITENVYINLTCSSIHGYPEPKKMSVLLRTKNSTIEYDGVMQKSQDNVTELYDVSISLSVSFPDVTSNMTIFCILETDKTRLLSSPFSIELEDPQPPPDHIPWITAVLPTVIICVMVFCLILWKWKKKKRPRNSYKCGTNTMEREESEQTKKREKIHIPERSDEAQRVFKSSKTSSCDKSDTCF

SEQ ID NO: 67153 - protein, 62 aa, Homo sapiens
IIFAFCIAVVYITYHNKRKIFLLVQSRKWRDGLCSKTVEYHRLDQNVNEAMPSLKITNDYIF

SEQ ID NO: 67154 - protein, 249 aa, Homo sapiens
LLLGALALTTVMSPCGGEDIVADHVASCGVNLYQFYGPSGQYTHEFDGDEQFYVDLERKETAWRWPEFSKFGGFDPQGALRNMAVAKHNLNIMIKRYNSTAATNEVPEVTVFSKSPVTLGQPNTLICLVDNIFPPVVNITWLSNGQSVTEGVSETSFLSKSDHSFFKISYLTFLPSADEIYDCKVEHWGLDQPLLKHWEPEIPAPMSELTETVVCALGLSVGLMGIVVGTVFIIQGLRSVGASRHQGPL

SEQ ID NO: 67155 - protein, 51 aa, Homo sapiens
VFQSEFFSGLMWFWILWRFWHDSEEVLGHFPYPDPSQWTDEELGIPPDDED

SEQ ID NO: 67156 - protein, 693 aa, Homo sapiens
VHSSEMQSPWKILTVAPLFLLLSLQSSASPANDDQSRPSLSNGHTCVGCVLVVSVIEQLAQVHNSTVQASMERLCSYLPEKLFLKTTCYLVIDKFGSDIIKLLSADMNADVVCHTLEFCKQNTGQPLCHLYPLPKETWKFTLQKARQIVKKSPILKYSRSGSDICSLPVLAKICQKIKLAMEQSVPFKDVDSDKYSVFPTLRGYHWRGRDCNDSDESVYPGRRPNNWDVHQDSNCNGIWGVDPKDGVPYEKKFCEGSQPRGIILLGDSAGAHFHISPEWITASQMSLNSFINLPTALTNELDWPQLSGATGFLDSTVGIKEKSIYLRLWKRNHCNHRDYQNISRNGASSRNLKKFIESLSRNKVLDYPAIVIYAMIGNDVCSGKSDPVPAMTTPEKLYSNVMQTLKHLNSHLPNGSHVILYGLPDGTFLWDNLHNRYHPLGQLNKDMTYAQLYSFLNCLQVSPCHGWMSSNKTLRTLTSERAEQLSNTLKKIAASEKFTNFNLFYMDFAFHEIIQEWQKRGGQPWQLIEPVDGFHPNERKSILLKGILMTSQTLDNQEWTQLTSWIKGNLTCDSRTREWLCCCWRIISGKRCSSSGPKSWERRIRSTPRLNRCLETKAGTEPLRSMHPWGAQGGRGLGKLIPQTLWGLPRHRPKGLFFSSIFAKCLSLNEEHIWTTVQCCVLPGSVTLPLFLK

SEQ ID NO: 67157 - protein, 33 aa, Homo sapiens
KVFIPSLFLSHVLALGLGIYIGKRLSTPSASTY

SEQ ID NO: 67158 - protein, 170 aa, Homo sapiens
IFFLELAVAVLAFLFQDWVRDRFREFFESNIKSYRDDIDLQNLIDSLQKANQCCGAYGPEDWDLNVYFNCSGASYSREKCGVPFSCCVPDPAQKVVNTQCGYDVRIQLKSKWDESIFTKGCIQALESWLPRNIYIVAGVFIAISLLQIFGIFLARTLISDIEAVKAGHHF

SEQ ID NO: 67159 - protein, 551 aa, Homo sapiens
LLLLGILLLLLPLPVPAPCHTAARSECKRSHKFVPGAWLAGEGVDVTSLRRSGSFPVDTQRFLRPDGTCTLCENALQEGTLQRLPLALTNWRAQGSGCQRHVTRAKVSSTEAVARDAARSIRNDWKVGLDVTPKPTSNVHVSVAGSHSQAANFAAQKTHQDQYSFSTDTVECRFYSFHVVHTPPLHPDFKRALGDLPHHFNASTQPAYLRLISNYGTHFIRAVELGGRISALTALRTCELALEGLTDNEVEDCLTVEAQVNIGIHGSISAEAKACEEKKKKHKMTASFHQTYRERHSEVVGGHHTSINDLLFGIQAGPEQYSAWVNSLPGSPGLVDYTLEPLHVLLDSQDPRREALRRALSQYLTDRARWRDCSRPCPPGRQKSPRDPCQCVCHGSAVTTQDCCPRQRGLAQLEVTFIQAWGLWGDWFTATDAYVKLFFGGQELRTSTVWDNNNPIWSVRLDFGDVLLATGGPLRLQVWDQDSGRDDDLLGTCDQAPKSGSHEVRCNLNHGHLKFRYHARCLPHLGGGTCLDYVPQMLLGEPPGNRSGAVW

SEQ ID NO: 67160 - protein, 37 aa, Homo sapiens
LVVAFGLLVLYILLASSWKRPEPGILTDRQPLLHDGE

SEQ ID NO: 67161 - protein, 22 aa, Homo sapiens
MIFGMIFSMILCCAIRRNREMV

SEQ ID NO: 67162 - protein, 560 aa, Homo sapiens
KFQAGVRFLLGLRFLGAPAKPPLVRADMVTEKQARELSVPQGPGAGAESTGEIINNTVPLENSIPGNCCSALFKNLLLKKIKRCERKGTESVTEEKCAVLFSASFTLGPGKLPIQLQALSLPLVVIVHGNQDNNAKATILWDNAFSEMDRVPFVVAERVPWEKMCETLNLKFMAEVGTNRGLLPEHFLFLAQKIFNDNSLSMEAFQHRSVSWSQFNKEILLGRGFTFWQWFDGVLDLTKRCLRSYWSDRLIIGFISKQYVTSLLLNEPDGTFLLRFSDSEIGGITIAHVIRGQDGSPQIENIQPFSAKDLSIRSLGDRIRDLAQLKNLYPKKPKDEAFRSHYKPEQMGKDGRGYVPATIKMTVERDQPLPTPELQMPTMVPSYDLGMAPDSSMSMQLGPDMVPQVYPPHSHSIPPYQGLSPEESVNVLSAFQEPHLQMPPSLGQMSLPFDQPHPQGLLPCQPQEHAVSSPDPLLCSDVTMVEDSCLSQPVTAFPQGTWIGEDIFPPLLPPTEQDLTKLLLEGQGESGGGSLGAQPLLQPSHYGQSGISMSHMDLRANPSW

SEQ ID NO: 67163 - protein, 150 aa, Homo sapiens
LLLLLGLLAVEGSLHVKPPQFTWAQWFETQHINMTSQQCTNAMQVINNYQRRCKNQNTFLLTTFANVVNVCGNPNMTCPSNKTRKNCHHSGSQVPLIHCNLTTPSPQNISNCRYAQTPANMFYIVACDNRDQRRDPPQYPVVPVHLDRII

SEQ ID NO: 67164 - protein, 13 aa, Homo sapiens
MKMTLLLMIPVLL

SEQ ID NO: 67165 - protein, 202 aa, Homo sapiens
LGHLRPWLLELLAAMCFPKVLSDDMKKLKARMHQAIERFYDKMQNAESGRGQVMSSLAELEDDFKEGYLETVAAYYEEQHPELTPLLEKERDGLRCRGNRSPVPDVEDPATEEPGESFCDKVMRWFQAMLQRLQTWWHGVLAWVKEKVVALVHAVQALWKQFQSFCCSLSELFMSSFQSYGAPRGDKEELTPQKCSEPQSSK

SEQ ID NO: 67166 - protein, 1159 aa, Homo sapiens
RAALLLFTALATSLGFNLDTEELTAFRVDSAGFGDSVVQYANSWVVVGAPQKITAANQTGGLYQCGYSTGACEPIGLQVPPEAVNMSLGLSLASTTSPSQLLACGPTVHHECGRNMYLTGLCFLLGPTQLTQRLPVSRQECPRQEQDIVFLIDGSGSISSRNFATMMNFVRAVISQFQRPSTQFSLMQFSNKFQTHFTFEEFRRSSNPLSLLASVHQLQGFTYTATAIQNVVHRLFHASYGARRDAAKILIVITDGKKEGDSLDYKDVIPMADAAGIIRYAIGVGLAFQNRNSWKELNDIASKPSQEHIFKVEDFDALKDIQNQLKEKIFAIEGTETTSSSSFELEMAQEGFSAVFTPDGPVLGAVGSFTWSGGAFLYPPNMSPTFINMSQENVDMRDSYLGYSTELALWKGVQSLVLGAPRYQHTGKAVIFTQVSRQWRMKAEVTGTQIGSYFGASLCSVDVDSDGSTDLVLIGAPHYYEQTRGGQVSVCPLPRGWRRWWCDAVLYGEQGHPWGRFGAALTVLGDVNGDKLTDVVIGAPGEEENRGAVYLFHGVLGPSISPSHSQRIAGSQLSSRLQYFGQALSGGQDLTQDGLVDLAVGARGQVLLLRTRPVLWVGVSMQFIPAEIPRSAFECREQVVSEQTLVQSNICLYIDKRSKNLLGSRDLQSSVTLDLALDPGRLSPRATFQETKNRSLSRVRVLGLKAHCENFNLLLPSCVEDSVTPITLRLNFTLVGKPLLAFRNLRPMLAADAQRYFTASLPFEKNCGADHICQDNLGISFSFPGLKSLLVGSNLELNAEVMVWNDGEDSYGTTITFSHPAGLSYRYVAEGQKQGQLRSLHLTCDSAPVGSQGTWSTSCRINHLIFRGGAQITFLATFDVSPKAVLGDRLLLTANVSSENNTPRTSKTTFQLELPVKYAVYTVVSSHEQFTKYLNFSESEEKESHVAMHRYQVNNLGQRDLPVSINFWVPVELNQEAVWMDVEVSHPQNPSLRCSSEKIAPPASDFLAHIQKNPVLDCSIAGCLRFRCDVPSFSVQEELDFTLKGNLSFGWVRQILQKKVSVVSVAEITFDTSVYSQLPGQEAFMRAQTTTVLEKYKVHNPTPLIVGSSIGGLLLLALITAVLYKVGFFKRQYKEMMEEANGQIAPENGTQTPSPPSEK

SEQ ID NO: 67167 - protein, 60 aa, Homo sapiens
ILRTFYMLGVRYLTLTHTCNTPWAESSAKGVHSFYNNISGLTDFGEMLWHGGPWKCHRHL

SEQ ID NO: 67168 - protein, 233 aa, Homo sapiens
IARHLQTNLILFCVGAVGACTLSVTQPWYLEVDYTHEAVTIKCTFSATGCPSEQPTCLWFRYGAHQPENLCLDGCKSEADKFTVREALKENQVSLTVNRVTSNDSAIYICGIAFPSVPEARAKQTGGGTTLVVREIKLLSKELRSFLTALVSLLSVYVTGVCVAFILLSKSKSNPLRNKEIKEDSQKKKSARRIFQEIAQELYHKRHVETNQQSEKDNNTYENRRVLSNYERP

SEQ ID NO: 67169 - protein, 350 aa, Homo sapiens
VLFSGALLGLLAAQGTGNDCPHKKSATLLPSFTVTPTVTESTGTTSHRTTKSHKTTTHRTTTTGTTSHGPTTATHNPTTTSHGNVTVHPTSNSTATSQGPSTATHSPATTSHGNATVHPTSNSTATSPGFTSSAHPEPPPPSPSPSPTSKETIGDYTWTNGSQPCVHLQAQIQIRVMYTTQGGGEAWGISVLNPNKTKVQGSCEGAHPHLLLSFPYGHLSFGFMQDLQQKVVYLSYMAVEYNVSFPHAAQWTFSAQNASLRDLQAPLGQSFSCSNSSIILSPAVHLDLLSLRLQAAQLPHTGVFGQSFSCPSDRSILLPLIIGLILLGLLALVLIAFCIIRRRPSAYQAL

SEQ ID NO: 67170 - protein, 60 aa, Homo sapiens
LKLLLLLLLFGVAGGLVACRVTELQQQPLCTSVNTIYDNAVQGLRRHEILQWVLQTDSQQ

SEQ ID NO: 67171 - protein, 20 aa, Homo sapiens
VTIFVAGVLTASLTIWKKMG

SEQ ID NO: 67172 - protein, 31 aa, Homo sapiens
MGVAGLVLVVLGILLFEAQHSQRSLQDAAGR

SEQ ID NO: 67173 - protein, 41 aa, Homo sapiens
LAGAGSAVFWVLGATLVVIGSHAAFHQIEAVDGEELQMEPV

SEQ ID NO: 67174 - protein, 19 aa, Homo sapiens
VTGVLVVTLLVVLYRRRLH

SEQ ID NO: 67175 - protein, 60 aa, Homo sapiens
ILRSQWSPALTLSKVLLSICSLLCDPNPDDPLVPEIARIYKTDRDKYNRISREWTQKYAM

SEQ ID NO: 67176 - protein, 61 aa, Homo sapiens
VAPVSFFLVLDVVYLVYESKHLHEGAKSETAEELKKVAQELEEKLNILNNNYKILQADQEL

SEQ ID NO: 67177 - protein, 123 aa, Homo sapiens
VTMVVALLIVCDVPSASAQRKKEMVLSEKVSQLMEWTNKRPVIRMNGDKFRRLVKAPPRNYSVIVMFTALQLHRQCVVCKQADEEFQILANSWRYSSAFTNRIFFAMVDFDEGSDVFQMFQVF

SEQ ID NO: 67178 - protein, 15 aa, Homo sapiens
VVFPEQGLAILLWMC

SEQ ID NO: 67179 - protein, 9 aa, Homo sapiens
MCLLYVCFM

SEQ ID NO: 67180 - protein, 12 aa, Homo sapiens
LLGTLVTMGLLT

SEQ ID NO: 67181 - protein, 60 aa, Homo sapiens
VAEVILLVATILLCEKYTQKKKKHSDEGKEFEQIEQLKSDDSNGIENNVPRHRKNESLGQ

SEQ ID NO: 67182 - protein, 268 aa, Homo sapiens
LCLFILAILLCSLALGSVTVHSSEPEVRIPENNPVKLSCAYSGFSSPRTPSYEDRVTFLPTGITFKSVTREDTGTYTCMVSEEGGNSYGEVKVKLIVLVPPSKPTVNIPSSATIGNRAVLTCSEQDGSPPSEYTWFKDGIVMPTNPKSTRAFSNSSYVLNPTTGELVFDPLSASDTGEYSCEARNGYGTPMTSNAVRMEAVERNVGVIVAAVLVTLILLGILVFGIWFAYSRGHFDRTKKGTSSKKVIYSQPSARSEGEFKQTSSFLV

SEQ ID NO: 67183 - protein, 137 aa, Homo sapiens
IVILSALFLGTLACFCVWRRKRKEKQSETSPKEFLTIYEDVKDLKTRRNHEQEQTFPGGGSTIYSMIQSQSSAPTSQEPAYTLYSLIQPSRKSGSRKRNHSPSFNSTIYEVIGKSQPKAQNPARLSRKELENFDVYS

SEQ ID NO: 67184 - protein, 14 aa, Homo sapiens
LRFPMGLACGAWAL

SEQ ID NO: 67185 - protein, 480 aa, Homo sapiens
RMRFVVALVLLNVAAAGAVPLLATESVKQEEAGVRPSAGNVSTHPSLSQRPGGSTKSHPEPQTPKDSPSKSSAEAQTPEDTPNKSGAEAKTQKDSSNKSGAEAKTQKGSTSKSGSEAQTTKDSTSKSHPELQTPKDSTGKSGAEAQTPEDSPNRSGAEAKTQKDSPSKSGSEAQTTKDVPNKSGADGQTPKDGSSKSGAEDQTPKDVPNKSGAEKQTPKDGSNKSGAEEQGPIDGPSKSGAEEQTSKDSPNKVVPEQPSRKDHSKPISNPSDNKELPKADTNQLADKGKLSPHAFKTESGEETDLISPPQEEVKSSEPTEDVEPKEAEDDDTGPEEGSPPKEEKEKMSGSASSENREGTLSDSTGSEKDDLYPNGSGNGSAESSHFFAYLVTAAILVAVLYIAHHNKRKIIAFVLEGKRSKVTRRPKASDYQRLDQKYVLILNVFPAPPKRSFFPVLTEWYIPLEKDERHQWIVLLSFQL

SEQ ID NO: 67186 - protein, 19 aa, Homo sapiens
LLLGTASRAVSAFALLAAS

SEQ ID NO: 67187 - protein, 39 aa, Homo sapiens
VVMPGFLVRILPLLLVLLLLGPTRGLRVSLRDPGTGRHC

SEQ ID NO: 67188 - protein, 49 aa, Homo sapiens
ISVTMILVAWMVIALILFLLRPPNLRGSSLPGKPTSPHNGQDPPAPPVD

SEQ ID NO: 67189 - protein, 241 aa, Homo sapiens
LKVVLYLLRVCLAMAWKSGGASHSELIHNLRKNGIIKTDKVFEVMLATDRSHYAKCNPYMDSPQSIGFQATISAPHMHAYALELLFDQLHEGAKALDVGSGSGILTACFARMVGCTGKVIGIDHIKELVDDSVNNVRKDDPTLLSSGRVQLVVGDGRMGYAEEAPYDAIHVGAAAPVVPQALIDQLKPGGRLILPVGPAGGNQMLEQYDKLQDGSIKMKPLMGVIYVPLTDKEKQWSRDEL

SEQ ID NO: 67190 - protein, 17 aa, Homo sapiens
TKVVFPGRGLSIALWMC

SEQ ID NO: 67191 - protein, 197 aa, Homo sapiens
KAQLQLLGAVCMLLASKLRETTPLTIEKLCIYTDHAVSPRQLRDWEVLVLGKLKWDLAAVIAHDFLAFILHRLSLPRDRQALVKKHAQTFLALCATDYTFAMYPPSMIATGSIGAAVQGLGACSMSGDELTELLAGITGTEVDCLRACQEQIEAALRESLREASQTSSSPAPKAPRGSSSQGPSQTSTPTDVTAIHL

SEQ ID NO: 67192 - protein, 13 aa, Homo sapiens
LLLSLLAFAMYRP

SEQ ID NO: 67193 - protein, 34 aa, Homo sapiens
MLMMMALLVPLVYTIKRHKWSVLKSRKLAYRPPK

SEQ ID NO: 67194 - protein, 41 aa, Homo sapiens
LGSIAGVFVYQLMIGCHLEQPPPSNEEENVKLAHVKHKEQI

SEQ ID NO: 67195 - protein, 15 aa, Homo sapiens
VAFFILSYFLSRART

SEQ ID NO: 67196 - protein, 185 aa, Homo sapiens
LLSLSCLALSVLLLAQLSDAAKNFEDVRCKCICPPYKENSGHIYNKNISQKDCDCLHVVEPMPVRGPDVEAYCLRCECKYEERSSVTIKVTIIIYLSILGLLLLYMVYLTLVEPILKRRLFGHAQLIQSDDDIGDHQPFANAHDVLARSRSRANVLNKVEYAQQRWKLQVQEQRKSVFDRHVVLS

SEQ ID NO: 67197 - protein, 20 aa, Homo sapiens
KGPKLTLVLQMWMFMAQIGT

SEQ ID NO: 67198 - protein, 18 aa, Homo sapiens
ILVAFGVFIPTLFCLCRL

SEQ ID NO: 67199 - protein, 64 aa, Homo sapiens
IIFTGFLITFLAFTFFKVPETRGRTFEDITRAFEGQAHGADRSGKDGVMGMNSIEPAKETTTNV

SEQ ID NO: 67200 - protein, 25 aa, Homo sapiens
VLFSLVSIPLVIYDWACSSSSDEGH

SEQ ID NO: 67201 - protein, 152 aa, Homo sapiens
ICLLLLLGLLAVEGSLHVKPPQFTWAQWFETQHINMTSQQCTNAMQVINNYQRRCKNQNTFLLTTFANVVNVCGNPNMTCPSNKTRKNCHHSGSQVPLIHCNLTTPSPQNISNCRYAQTPANMFYIVACDNRDQRRDPPQYPVVPVHLDRII

SEQ ID NO: 67202 - protein, 44 aa, Homo sapiens
IALLLGTVIAYRQRQHQDMPAPRPPGPRPAPPQQEGPPEQQPPQ

SEQ ID NO: 67203 - protein, 238 aa, Homo sapiens
LWGFFPVLLLLLLSGDVQSSEVPGAAAEGSGGSGVGIGDRFKIEGRAVVPGVKPQDWISAARVLVDGEEHVGFLKTDGSFVVHDIPSGSYVVEVVSPAYRFDPVRVDITSKGKMRARYVNYIKTSEVVRLPYPLQMKSSGPPSYFIKRESWGWTDFLMNPMVMMMVLPLLIFVLLPKVVNTSDPDMRREMEQSMNMLNSNHELPDVSEFMTRLFSSKSSGKSSSGSSKTGKSGAGKRR

SEQ ID NO: 67204 - protein, 32 aa, Homo sapiens
IGGGHIPLGLVFLVQPAAGGRALLLDQPAVAG

SEQ ID NO: 67205 - protein, 212 aa, Homo sapiens
TFLTKQEILLSVYVVLAPHLVDNEQQARSGNEHTGRPIAENTDSSPLSTRAHRRFCELLPQEQRSVESSLRAQVPFEQILSLPELKANPFKERICRVFSTSPAKDSLSFEDFLDLLSVFSDTATPDIKSHYAFRIFDFDDDGTLNREDLSRLVNCLTGEGEDTRLSASEMKQLIDNILEESDIDRDGTINLSEFQHVISRSPDFASSFKIVL

SEQ ID NO: 67206 - protein, 47 aa, Homo sapiens
LTVGGGVFALVTAVCCLADGALIYRKLLFNPSGPYQKKPVHEKKEVL

SEQ ID NO: 67207 - protein, 233 aa, Homo sapiens
LLLPLLLALARGLPGALAAQEVQQSPHCTTVPVGASVNITCSTSGGLRGIYLRQLGPQPQDIIYYEDGVVPTTDRRFRGRIDFSGSQDNLTITMHRLQLSDTGTYTCQAITEVNVYGSGTLVLVTEEQSQGWHRCSDAPPRASALPAPPTGSALPDPQTASALPDPPAASALPAALAVISFLLGLGLGVACVLARTQIKKLCSWRDKNSAACVVYEDMSHSRCNTLSSPNQYQ

SEQ ID NO: 67208 - protein, 107 aa, Homo sapiens
VLGALLFVKGAVWKALFGKEADKLEQANDDARTFYIIEREPLINTYISVPKENSTLNCASFTAGIVEAVLTHSGFPAKVTAHWHKGTTLMIKFEEAVIARDRALEGR

SEQ ID NO: 67209 - protein, 69 aa, Homo sapiens
LEIFRMIIYLTFPVAMFWVSNQAEWFEDDVIQRKRELWPPEKLQEIEEFKERLRKRREEKLLRDAQQNS

SEQ ID NO: 67210 - protein, 253 aa, Homo sapiens
VSSLLVLALGALSVGSSFGTQIIGGREVIPHSRPYMASLQRNGSHLCGGVLVHPKWVLTAAHCLAQRMAQLRLVLGLHTLDSPGLTFHIKAAIQHPRYKPVPALENDLALLQLDGKVKPSRTIRPLALPSKRQVVAAGTRCSMAGWGLTHQGGRLSRVLRELDLQVLDTRMCNNSRFWNGSLSPSMVCLAADSKDQAPCKGDSGGPLVCGKGRVLARVLSFSSRVCTDIFKPPVATAVAPYVSWIRKVTGRSA

SEQ ID NO: 67211 - protein, 379 aa, Homo sapiens
LLPLLWLLVLTPGRPAAGLSTCKTIDMELVKRKRIEAIRGQILSKLRLASPPSQGEVPPGPLPEAVLALYNSTRDRVAGESAEPEPEPEADYYAKEVTRVLMVETHNEIYDKFKQSTHSIYMFFNTSELREAVPEPVLLSRAELRLLRLKLKVEQHVELYQKYSNNSWRYLSNRLLAPSDSPEWLSFDVTGVVRQWLSRGGEIEGFRLSAHCSCDSRDNTLQVDINGFTTGRRGDLATIHGMNRPFLLLMATPLERAQHLQSSRHRRALDTNYCFSSTEKNCCVRQLYIDFRKDLGWKWIHEPKGYHANFCLGPCPYIWSLDTQYSKVLALYNQHNPGASAAPCCVPQALEPLPIVYYVGRKPKVEQLSNMIVRSCKCS

SEQ ID NO: 67212 - protein, 238 aa, Homo sapiens
IPVFFAFRMRFYVAWIAAECGCIAAGFGAYPVAAKARAGGGPTLQCPPPSSPEKAASLEYDYETIRNIDCYSTDFCVRVRDGMRYWNMTVQWWLAQYIYKSAPARSYVLRSAWTMLLSAYWHGLHPGYYLSFLTIPLCLAAEGRLESALRGRLSPGGQKAWDWVHWFLKMRAYDYMCMGFVLLSLADTLRYWASIYFCIHFLALAALGLGLALGGGSPSRRKAASQPTSLAPEKLREE

SEQ ID NO: 67213 - protein, 25 aa, Homo sapiens
ILVVLGILIFQDWHSQRSPQAAAGR

SEQ ID NO: 67214 - protein, 37 aa, Homo sapiens
MSPTSLLLLARLYFTWDMLLCWDSCMSTGLSSTCSRP

SEQ ID NO: 67215 - protein, 309 aa, Homo sapiens
RSRRGAMARRGPGWRPLLLLVLLAGAAQGGLYFRRGQTCYRPLRGDGLAPLGRSTYPRPHEYLSPADLPKSWDWRNVDGVNYASITRNQHIPQYCGSCWAHASTSAMADRINIKRKGAWPSTLLSVQNVIDCGNAGSCEGGNDLSVWDYAHQHGIPDETCNNYQAKDQECDKFNQCGTCNEFKECHAIRNYTLWRVGDYGSLSGREKMMAEIYANGPISCGIMATERLANYTGGIYAEYQDTTYINHVVSVAGWGISDGTEYWIVRNSWGEPWGERGWLRIVTSTYKDGKGARYNLAIEEHCTFGDPIV

SEQ ID NO: 67216 - protein, 39 aa, Homo sapiens [sequence omitted]

SEQ ID NO: 67217 - protein, 27 aa, Homo sapiens
IIVSIVFIYIIVSPLCGGFTWPSCVKK

SEQ ID NO: 67218 - protein, 34 aa, Homo sapiens
LRIVVTLLATFSFIITLVVKSSFPEKGHKRPGQV

SEQ ID NO: 67219 - protein, 12 aa, Homo sapiens
MLVTSLVALQAL

SEQ ID NO: 67220 - protein, 51 aa, Homo sapiens
IEVQFMCLWVWMAQSVSGLRKADLAPTLTLTDPGIYSRNWKPSATGAWRSS

SEQ ID NO: 67221 - protein, 1027 aa, Homo sapiens
RTVLAQMAGISYVASFFLLLTKLSIGQREVTVQKGPLFRAEGYPVSIGCNVTGHQGPSEQHFQWSVYLPTNPTQEVQIISTKDAAFSYAVYTQRVRSGDVYVERVQGNSVLLHISKLQMKDAGEYECHTPNTDEKYYGSYSAKTNLIVIPDTLSATMSSQTLGKEEGEPLALTCEASKATAQHTHLSVTWYLTQDGGGSQATEIISLSKDFILVPGPLYTERFAASDVQLNKLGPTTFRLSIERLQSSDQGQLFCEATEWIQDPDETWMFITKKQTDQTTLRIQPAVKDFQVNITADSLFAEGKPLELVCLVVSSGRDPQLQGIWFFNGTEIAHIDAGGVLGLKNDYKERASQGELQVSKLGPKAFSLKIFSLGPEDEGAYRCVVAEVMKTRTGSWQVLQRKQSPDSHVHLRKPAARSVVMSTKNKQQVVWEGETLAFLCKAGGAESPLSVSWWHIPRDQTQPEFVAGMGQDGIVQLGASYGVPSYHGNTRLEKMDWATFQLEITFTAITDSGTYECRVSEKSRNQARDLSWTQKISVTVKSLESSLQVSLMSRQPQVMLTNTFDLSCVVRAGYSDLKVPLTVTWQFQPASSHIFHQLIRITHNGTIEWGNFLSRFQKKTKVSQSLFRSQLLVHDATEEETGVYQCEVEVYDRNSLYNNRPPRASAISHPLRIAVTLPESKLKVNSRSQVQELSINSNTDIECSILSRSNGNLQLAIIWYFSPVSTNASWLKILEMDQTNVIKTGDEFHTPQRKQKFHTEKVSQDLFQLHILNVEDSDRGKYHCAVEEWLLSTNGTWHKLGEKKSGLTELKLKPTGSKVRVSKVYWTENVTEHREVAIRCSLESVGSSATLYSVMWYWNRENSGSKLLVHLQHDGLLEYGEEGLRRHLHCYRSSSTDFVLKLHQVEMEDAGMYWCRVAEWQLHGHPSKWINQASDESQRMVLTVLPSEPTLPSRICSSAPLLYFLFICPFVLLLLLLISLLCLYWKARKLSTLRSNTRKEKALWVDLKEAGGVTTNRREDEEEDEGN

SEQ ID NO: 67222 - protein, 226 aa, Homo sapiens
KIWLPFPVLLLAALPPVLLPGAAGFTPSLDSDFTFTLPAGQKECFYQPMPLKASLEIEYQVLDGAGLDIDFHLASPEGKTLVFEQRKSDGVHTVETEVGDYMFCFDNTFSTISEKVIFFELILDNMGEQAQEQEDWKKYITGTDILDMKLEDILESINSIKSRLSKSGHIQTLLRAFEARDRNIQESNFDRVNFWSMVNLVVMVVVSAIQVYMLKSLFEDKRKSRT

SEQ ID NO: 67223 - protein, 524 aa, Homo sapiens
KPLSRVSIMAGSLTGLLLLQAVSWASGARPCIPKSFGYSSVVCVCNATYCDSFDPPTFPALGTFSRYESTRSGRRMELSMGPIQANHTGTGLLLTLQPEQKFQKVKGFGGAMTDAAALNILALSPPAQNLLLKSYFSEEGIGYNIIRVPMASCDFSIRTYTYADTPDDFQLHNFSLPEEDTKLKIPLIHRALQLAQRPVSLLASPWTSPTWLKTNGAVNGKGSLKGQPGDIYHQTWARYFVKFLDAYAEHKLQFWAVTAENEPSAGLLSGYPFQCLGFTPEHQRDFIARDLGPTLANSTHHNVRLLMLDDQRLLLPHWAKVVLTDPEAAKYVHGIAVHWYLDFLAPAKATLGETHRLFPNTMLFASEACVGSKFWEQSVRLGSWDRGMQYSHSIITNLLYHVVGWTDWNLALNPEGGPNWVRNFVDSPIIVDITKDTFYKQPMFYHLGHFSKFIPEGSQRVGLVASQKNDLDAVALMHPDGSAVVVVLNRSSKDVPLTIKDPAVGFLETISPGYSIHTYLWRRQ

SEQ ID NO: 67224 - protein, 31 aa, Homo sapiens
VALIFACLVIIRQRQLDRKALEKVRKQIESI

SEQ ID NO: 67225 - protein, 234 aa, Homo sapiens
LALELLLLPLSLLVTSIQGHLVHMTVVSGSNVTLNISESLPENYKQLTWFYTFDQKIVEWDSRKSKYFESKFKGRVRLDPQSGALYISKVQKEDNSTYIMRVLKKTGNEQEWKIKLQVLDPVPKPVIKIEKIEDMDDNCYLKLSCVIPGESVNYTWYGDKRPFPKELQNSVLETTLMPHNYSRCYTCQVSNSVSSKNGTVCLSPPCTLARSFGVEWIASWLVVTVPTILGLLLT

SEQ ID NO: 67226 - protein, 609 aa, Homo sapiens
LPAAAMLARALLLCAVLALSHTANPCCSHPCQNRGVCMSVGFDQYKCDCTRTGFYGENCSTPEFLTRIKLFLKPTPNTVHYILTHFKGFWNVVNNIPFLRNAIMSYVLTSRSHLIDSPPTYNADYGYKSWEAFSNLSYYTRALPPVPDDCPTPLGVKGKKQLPDSNEIVEKLLLRRKFIPDPQGSNMMFAFFAQHFTHQFFKTDHKRGPAFTNGLGHGVDLNHIYGETLARQRKLRLFKDGKMKYQIIDGEMYPPTVKDTQAEMIYPPQVPEHLRFAVGQEVFGLVPGLMMYATIWLREHNRVCDVLKQEHPEWGDEQLFQTSRLILIGETIKIVIEDYVQHLSGYHFKLKFDPELLFNKQFQYQNRIAAEFNTLYHWHPLLPDTFQIHDQKYNYQQFIYNNSILLEHGITQFVESFTRQIAGRVAGGRNVPPAVQKVSQASIDQSRQMKYQSFNEYRKRFMLKPYESFEELTGEKEMSAELEALYGDIDAVELYPALLVEKPRPDAIFGETMVEVGAPFSLKGLMGNVICSPAYWKPSTFGGEVGFQIINTASIQSLICNNVKGCPFTSFSVPDPELIKTVTINASSSRSGLDDINPTVLLKERSTEL

SEQ ID NO: 67227 - protein, 1020 aa, Homo sapiens
RAAVRETVMLLLCLGVPTGRPYNVDTESALLYQGPHNTLFGYSVVLHSHGANRWLLVGAPTANWLANASVINPGAIYRCRIGKNPGQTCEQLQLGSPNGEPCGKTCLEERDNQWLGVTLSRQPGENGSIVTCGHRWKNIFYIKNENKLPTGGCYGVPPDLRTELSKRIAPCYQDYVKKFGENFASCQAGISSFYTKDLIVMGAPGSSYWTGSLFVYNITTNKYKAFLDKQNQVKFGSYLGYSVGAGHFRSQHTTEVVGGAPQHEQIGKAYIFSIDEKELNILHEMKGKKLGSYFGASVCAVDLNADGFSDLLVGAPMQSTIREEGRVFVYINSGSGAVMNAMETNLVGSDKYAARFGESIVNLGDIDNDGFEDVAIGAPQEDDLQGAIYIYNGRADGISSTFSQRIEGLQISKSLSMFGQSISGQIDADNNGYVDVAVGAFRSDSAVLLRTRPVVIVDASLSHPESVNRTKFDCVENGWPSVCIDLTLCFSYKGKEVPGYIVLFYNMSLDVNRKAESPPRFYFSSNGTSDVITGSIQVSSREANCRTHQAFMRKDVRDILTPIQIEAAYHLGPHVISKRSTEEFPPLQPILQQKKEKDIMKKTINFARFCAHENCSADLQVSAKIGFLKPHENKTYLAVGSMKTLMLNVSLFNAGDDAYETTLHVKLPVGLYFIKILELEEKQINCEVTDNSGVVQLDCSIGYIYVDHLSRIDISFLLDVSSLSRAEEDLSITVHATCENEEEMDNLKHSRVTVAIPLKYEVKLTVHGFVNPTSFVYGSNDENEPETCMVEKMNLTFHVINTGNSMAPNVSVEIMVPNSFSPQTDKLFNILDVQTTTGECHFENYQRVCALEQQKSAMQTLKGIVRFLSKTDKRLLYCIKADPHCLNFLCNFGKMESGKEASVHIQLEGRPSILEMDETSALKFEIRATGFPEPNPRVIELNKDENVAHVLLEGLHHQRPKRYFTIVIISSSLLLGLIVLLLISYVMWKAGFFKRQYKSILQEENRRDSWSYINSKSNDD

SEQ ID NO: 67228 - protein, 98 aa, Homo sapiens
VIVVGLIVSLLTGRMRGRSLNPATIYPVLPKLLSLLPLSCQKRLHCRSYGQDHLDTGLFPEKPRNGVLGDSRDKEAMALDGTAYQGSSSTCILQETSL

SEQ ID NO: 67229 - protein, 48 aa, Homo sapiens
KYILQLFKTCRGLFVLCQYCGLLQIYSADTPSSSYTQSTMDHDLHDAL

SEQ ID NO: 67230 - protein, 52 aa, Homo sapiens
ISYLMIALTVVGCIFMVIEGKKAAQRHETLTSLNLEKKARLKEEAAMKAKTE

SEQ ID NO: 67231 - protein, 69 aa, Homo sapiens
ITDFFWGIAEFVVLFFKTLLQQDVKKRRSYGNSSDSRYDDGRGPPGNPPRRMGRINHLRGPSPPPMAGG

SEQ ID NO: 67232 - protein, 302 aa, Homo sapiens
LVAALLLGSACCGSAQLLFNKTKSVEFTFCNDTVVIPCFVTNMEAQNTTEVYVKWKFKGRDIYTFDGALNKSTVPTDFSSAKIEVSQLLKGDASLKMDKSDAVSHTGNYTCEVTELTREGETIIELKYRVVSWFSPNENILIVIFPIFAILLFWGQFGIKTLKYRSGGMDEKTIALLVAGLVITVIVIVGAILFVPGEYSLKNATGLGLIVTSTGILILLHYYVFSTAIGLTSFVIAILVIQVIAYILAVVGLSLCIAACIPMHGPLLISGLSILALAQLLGLVYMKFVASNQKTIQPPRNN

SEQ ID NO: 67233 - protein, 36 aa, Homo sapiens
MALGVFFGLVFTWLACKGQGSMDEGTADERAPLIRT

SEQ ID NO: 67234 - protein, 106 aa, Homo sapiens
KLCRSMSSAAGFCASRPGLLFLGLLLLPLVVAFASAEAEEDGDLQCLCVKTTSQVRPRHITSLEVIKAGPHCPTAQLIATLKNGRKICLDLQAPLYKKIIKKLLES

SEQ ID NO: 67235 - protein, 17 aa, Homo sapiens
LKEYRVFFLLSFIYVEI

SEQ ID NO: 67236 - protein, 36 aa, Homo sapiens
LLVFSLFFLISFIMYATIRTESIRWLIPGQEQEHVE

SEQ ID NO: 67237 - protein, 16 aa, Homo sapiens
ILMQFITSFMIFSPML

SEQ ID NO: 67238 - protein, 535 aa, Homo sapiens
LLAAMLALLTQVALVVQVAEAARAPSVSAKPGPALWPLPLLVKMTPNLLHLAPENFYISHSPNSTAGPSCTLLEEAFRRYHGYIFGFYKWHHEPAEFQAKTQVQQLLVSITLQSECDAFPNISSDESYTLLVKEPVAVLKANRVWGALRGLETFSQLVYQDSYGTFTINESTIIDSPRFSHRGILIDTSRHYLPVKIILKTLDAMAFNKFNVLHWHIVDDQSFPYQSITFPELSNKGSYSLSHVYTPNDVRMVIEYARLRGIRVLPEFDTPGHTLSWGKGQKDLLTPCYSRQNKLDSFGPINPTLNTTYSFLTTFFKEISEVFPDQFIHLGGDEVEFKCWESNPKIQDFMRQKGFGTDFKKLESFYIQKVLDIIATINKGSIVWQEVFDDKAKLAPGTIVEVWKDSAYPEELSRVTASGFPVILSAPWYLDLISYGQDWRKYYKVEPLDFGGTQKQKQLFIGGEACLWGEYVDATNLTPRLWPRASAVGERLWSSKDVRDMDDAYDRLTRHRCRMVERGIAAQPLYAGYCNHENM

SEQ ID NO: 67239 - protein, 57 aa, Homo sapiens; identical to SEQ ID NO: 42256

SEQ ID NO: 67240 - protein, 302 aa, Homo sapiens
RAWIFFLLCLAGRALAAPQQEALPDETEVVEETVAEVTEVSVGANPVQVEVGEFDDGAEETEEEVVAENPCQNHHCKHGKVCELDENNTPMCVCQDPTSCPAPIGEFEKVCSNDNKTFDSSCHFFATKCTLEGTKKGHKLHLDYIGPCKYIPPCLDSELTEFPLRMRDWLKNVLVTLYERDEDNNLLTEKQKLRVKKIHENEKRLEAGDHPVELLARDFEKNYNMYIFPVHWQFGQLDQHPIDGYLSHTELAPLRAPLIPMEHCTTRFFETCDLDNDKYIALDEWAGCFGIKQKDIDKDLVI

SEQ ID NO: 67241 - protein, 249 aa, Homo sapiens
LLPGSAIQALVGLARPLVLALLLVSAALSSVVSRTDSPSPTVLNSHISTPNVNALTHENQTKPSISQISTTLPPTTSTKKSGGASVVPHPSPTPLSQEEADNNEDPSIEEEDLLMLNSSPSTAKDTLDNGDYGEPDYDWTTGPRDDDESDDTLEENRGYMEIEQSVKSFKMPSSNIEEEDSHFFFHLIIFAFCIAVVYITYHNKRKIFLLVQSRKWRDGLCSKTVEYHRLDQNVNEAMPSLKITNDYIF

SEQ ID NO: 67242 - protein, 148 aa, Homo sapiens
KTRLWGLLWMLFVSELRAATKLTEEKYELKEGQTLDVKCDYTLEKFASSQKAWQIIRDGEMPKTLACTERPSKNSHPVQVGRIILEDYHDHGLLRVRMVNLQVEDSGLYQCVIYQPPKEPHMLFDRIRLVVTKGFRCSTLSFSWLVDS

SEQ ID NO: 67243 - protein, 232 aa, Homo sapiens
KTRLWGLLWMLFVSELRAATKLTEEKYELKEGQTLDVKCDYTLEKFASSQKAWQIIRDGEMPKTLACTERPSKNSHPVQVGRIILEDYHDHGLLRVRMVNLQVEDSGLYQCVIYQPPKEPHMLFDRIRLVVTKGFSGTPGSNENSTQNVYKIPPTTTKALCPLYTSPRTVTQAPPKSTADVSTPDSEINLTNVTDIIRVPVFNIVILLAGGFLSKSLVFSVLFAVTLRSFVP

SEQ ID NO: 67244 - protein, 440 aa, Homo sapiens
KMKLANWYWLSSAVLATYGFLVVANNETEEIKDERAKDVCPVRLESRGKCEEAGECPYQVSLPPLTIQLPKQFSRIEEVFKEVQNLKEIVNSLKKSCQDCKLQADDNGDPGRNGLLLPSTGAPGEVGDNRVRELESEVNKLSSELKNAKEEINVLHGRLEKLNLVNMNNIENYVDSKVANLTFVVNSLDGKCSKCPSQEQIQSRPVQHLIYKDCSDYYAIGKRSSETYRVTPDPKNSSFEVYCDMETMGGGWTVLQARLDGSTNFTRTWQDYKAGFGNLRREFWLGNDKIHLLTKSKEMILRIDLEDFNGVELYALYDQFYVANEFLKYRLHVGNYNGTAGDALRFNKHYNHDLKFFTTPDKDNDRYPSGNCGLYYSSGWWFDACLSANLNGKYYHQKYRGVRNGIFWGTWPGVSEAHPGGYKSSFKEAKMMIRPKHFKP

SEQ ID NO: 67245 - protein, 29 aa, Homo sapiens
RPGLMASAWSFITTFFTSLIPEGPPQVAN

SEQ ID NO: 67246 - protein, 12 aa, Homo sapiens
IIVLIVLLIVFV

SEQ ID NO: 67247 - protein, 468 aa, Homo sapiens
IFAFFGGVHLLSLCSGKAICKNGISKRTFEEIKEEIASCGDVAKAIINLAVYGKAQNRSYERLALLVDTVGPRLSGSKNLEKAIQIMYQNLQQDGLEKVHLEPVRIPHWERGEESAVMLEPRIHKIAILGLGSSIGTPPEGITAEVLVVTSFDELQRRASEARGKIVVYNQPYINYSRTVQYRTQGAVEAAKVGALASLIRSVASFSIYSPHTGIQEYQDGVPKIPTACITVEDAEMMSRMASHGIKIVIQLKMGAKTYPDTDSFNTVAEITGSKYPEQVVLVSGHLDSWDVGQGAMDDGGGAFISWEALSLIKDLGLRPKRTLRLVLWTAEEQGGVGAFQYYQLHKVNISNYSLVMESDAGTFLPTGLQFTGSEKARAIMEEVMSLLQPLNITQVLSHGEGTDINFWIQAGVPGASLLDDLYKYFFFHHSHGDTMTVMDPKQMNVAAAVWAVVSYVVADMEEMLPRS

SEQ ID NO: 67248 - protein, 34 aa, Homo sapiens
MMSASRLAGTLIPAMAFLSCVRPESWEPCVETWP

SEQ ID NO: 67249 - protein, 11 aa, Homo sapiens
IYQIALFWISW

SEQ ID NO: 67250 - protein, 46 aa, Homo sapiens
MYELLSLGLPLLWAFSEVLAAMYRESEGSLESICNWVLRCFPVKLR

SEQ ID NO: 67251 - protein, 374 aa, Homo sapiens
LTAHPSCLLALLVAGLAQGIRGPLRAQDLGPQPLELKEAFKLFQIQFNRSYLSPEEHAHRLDIFAHNLAQAQRLQEEDLGTAEFGVTPFSDLTEEEFGQLYGYRRAAGGVPSMGREIRSEEPEESVPFSCDWRKVASAISPIKDQKNCNCCWAMAAAGNIETLWRISFWDFVDVSVQELLDCGRCGDGCHGGFVWDAFITVLNNSGLASEKDYPFQGKVRAHRCHPKKYQKVAWIQDFIMLQNNEHRIAQYLATYGPITVTINMKPLQLYRKGVIKATPTTCDPQLVDHSVLLVGFGSVKSEEGIWAETVSSQSQPQPPHPTPYWILKNSWGAQWGEKGYFRLHRGSNTCGITKFPLTARVQKPDMKPRVSCPP

SEQ ID NO: 67252 - protein, 85 aa, Homo sapiens
KSYSQAVTGFFASMLTYPFVLVSNLMAVNNCGLAGGCPPYSPIYTSWIDCWCMLQKEGNMSRGNSLFFRKVPFGKTYCCDLKMLI

SEQ ID NO: 67253 - protein, 380 aa, Homo sapiens
VVAVAVVVVVVSAVAWAMANYIHVPPGSPEVPKLNVTVQDQEEHRCREGALSLLQHLRPHWDPQEVTLQLFTDGITNKLIGCYVGNTMEDVVLVRIYGNKTELLVDRDEEVKSFRVLQAHGCAPQLYCTFNNGLCYEFIQGEALDPKHVCNPAIFRLIARQLAKIHAIHAHNGWIPKSNLWLKMGKYFSLIPTGFADEDINKRFLSDIPSSQILQEEMTWMKEILSNLGSPVVLCHNDLLCKNIIYNEKQGDVQFIDYEYSGYNYLAYDIGNHFNEFAGVSDVDYSLYPDRELQSQWLRAYLEAYKEFKGFGTEVTEKEVEILFIQVNQFALASHFFWGLWALIQAKYSTIEFDFLGYAIVRFNQYFKMKPEVTALKVPE

SEQ ID NO: 67254 - protein, 143 aa, Homo sapiens
RTHSLLLLLLLTLLGLGLVQPSYGQDGMYQRFLRQHVHPEETGGSDRYCNLMMQRRKMTLYHCKRFNTFIHEDIWNIRSICSTTNIQCKNGKMNCHEGVVKVTDCRDTGSSRAPNCRYRAIASTRRVVIACEGNPQVPVHFDG

SEQ ID NO: 67255 - protein, 54 aa, Homo sapiens
ISCITLIGLFFAGIHKRVVAPSIIAARCRTVLAEYNMSCDDTGKLILKPRPHVQ

SEQ ID NO: 67256 - protein, 39 aa, Homo sapiens
ILVPCVLGLLLLPILAMLMALCVHCHRLPGSYDSTSSDR

SEQ ID NO: 67257 - protein, 1160 aa, Homo sapiens
RFWLLPAMALRVLLLTALTLCHGFNLDTENAMTFQENARGFGQSVVQLQGSRVVVGAPQEIVAANQRGSLYQCDYSTGSCEPIRLQVPVEAVNMSLGLSLAATTSPPQLLACGPTVHQTCSENTYVKGLCFLFGSNLRQQPQKFPEALRGCPQEDSDIAFLIDGSGSIIPHDFRRMKEFVSTVMEQLKKSKTLFSLMQYSEEFRIHFTFKEFQNNPNPRSLVKPITQLLGRTHTATGIRKVVRELFNITNGARKNAFKILVVITDGEKFGDPLGYEDVIPEADREGVIRYVIGVGDAFRSEKSRQELNTIASKPPRDHVFQVNNFEALKTIQNQLREKIFAIEGTQTGSSSSFEHEMSQEGFSAAITSNGPLLSTVGSYDWAGGVFLYTSKEKSTFINMTRVDSDMNDAYLGYAAAIILRNRVQSLVLGAPRYQHIGLVAMFRQNTGMWESNANVKGTQIGAYFGASLCSVDVDSNGSTDLVLIGAPHYYEQTRGGQVSVCPLPRGQRARWQCDAVLYGEQGQPWGRFGAALTVLGDVNGDKLTDVAIGAPGEEDNRGAVYLFHGTSGSGISPSHSQRIAGSKLSPRLQYFGQSLSGGQDLTMDGLVDLTVGAQGHVLLLRSQPVLRVKAIMEFNPREVARNVFECNDQVVKGKEAGEVRVCLHVQKSTRDRLREGQIQSVVTYDLALDSGRPHSRAVFNETKNSTRRQTQVLGLTQTCETLKLQLPNCIEDPVSPIVLRLNFSLVGTPLSAFGNLRPVLAEDAQRLFTALFPFEKNCGNDNICQDDLSITFSFMSLDCLVVGGPREFNVTVTVRNDGEDSYRTQVTFFFPLDLSYRKVSTLQNQRSQRSWRLACESASSTEVSGALKSTSCSINHPIFPENSEVTFNITFDVDSKASLGNKLLLKANVTSENNMPRTNKTEFQLELPVKYAVYMVVTSHGVSTKYLNFTASENTSRVMQHQYQVSNLGQRSLPISLVFLVPVRLNQTVIWDRPQVTFSENLSSTCHTKERLPSHSDFLAELRKAPVVNCSIAVCQRIQCDIPFFGIQEEFNATLKGNLSFDWYIKTSHNHLLIVSTAEILFNDSVFTLLPGQGAFVRSQTETKVEPFEVPNPLPLIVGSSVGGLLLLALITAALYKLGFFKRQYKDMMSEGGPPGAEPQ

SEQ ID NO: 67258 - protein, 21 aa, Homo sapiens
LGISLSGLLALPLHDFLCQLS

SEQ ID NO: 67259 - protein, 1171 aa, Homo sapiens
RMFRLSAALHLLLLFAAGAEKLPGQGVHSQGQGPGANFVSFVGQAGGGGPAGQQLPQLPQSSQLQQQQQQQQQQQQPQPPQPPFPAGGPPARRGGAGAGGGWKLAEEESCREDVTRVCPKHTWSNNLAVLECLQDVREPENEISSDCNHLLWNYKLNLTTDPKFESVAREVCKSTITEIKECADEPVGKGYMVSCLVDHRGNITEYQCHQYITKMTAIIFSDYRLICGFMDDCKNDINILKCGSIRLGEKDAHSQGEVVSCLEKGLVKEAEEREPKIQVSELCKKAILRVAELSSDDFHLDRHLYFACRDDRERFCENTQAGEGRVYKCLFNHKFEESMSEKCREALTTRQKLIAQDYKVSYSLAKSCKSDLKKYRCNVENLPRSREARLSYLLMCLESAVHRGRQVSSECQGEMLDYRRMLMEDFSLSPEIILSCRGEIEHHCSGLHRKGRTLHCLMKVVRGEKGNLGMNCQQALQTLIQETDPGADYRIDRALNEACESVIQTACKHIRSGDPMILSCLMEHLYTEKMVEDCEHRLLELQYFISRDWKLDPVLYRKCQGDASRLCHTHGWNETSEFMPQGAVFSCLYRHAYRTEEQGRRLSRECRAEVQRILHQRAMDVKLDPALQDKCLIDLGKWCSEKTETGQELECLQDHLDDLVVECRDIVGNLTELESEDIQIEALLMRACEPIIQNFCHDVADNQIDSGDLMECLIQNKHQKDMNEKCAIGVTHFQLVQMKDFRFSYKFKMACKEDVLKLCPNIKKKVDVVICLSTTVRNDTLQEAKEHRVSLKCRRQLRVEELEMTEDIRLEPDLYEACKSDIKNFCSAVQYGNAQIIECLKENKKQLSTRCHQKVFKLQETEMMDPELDYTLMRVCKQMIKRFCPEADSKTMLQCLKQNKNSELMDPKCKQMITKRQITQNTDYRLNPMLRKACKADIPKFCHGILTKAKDDSELEGQVISCLKLRYADQRLSSDCEDQIRIIIQESALDYRLDPQLQLHCSDEISSLCAEEAAAQEQTGQVEECLKVNLLKIKTELCKKEVLNMLKESKADIFVDPVLHTACALDIKHHCAAITPGRGRQMSCLMEALEDKRVRLQPECKKRLNDRIEMWSYAAKVAPADGFSDLAMQVMTSPSKNYILSVISGSICILFLIGLMCGRITKRVTRELKDR

SEQ ID NO: 67260 - protein, 62 aa, Homo sapiens
MGAILLIGLAALLIWKLLITIHDRKEFAKFEEERARAKWDTANNPLYKEATSTFTNITYRGT

SEQ ID NO: 67261 - protein, 30 aa, Homo sapiens
VLAALIVASVVGLAELYVMVRAMEGELGEL

SEQ ID NO: 67262 - protein, 31 aa, Homo sapiens
KYTLWPCLVLALVPWAVHMFSAQEAPPIHSS

SEQ ID NO: 67263 - protein, 35 aa, Homo sapiens
IYIPLFLPMAVPILLSLVKIFLETRKSWRKPEKTD

SEQ ID NO: 67264 - protein, 291 aa, Homo sapiens
KMPLLTLYLLLFWLSGYSIVTQITGPTTVNGLERGSLTVQCVYRSGWETYLKWWCRGAIWRDCKILVKTSGSEQEVKRDRVSIKDNQKNRTFTVTMEDLMKTDADTYWCGIEKTGNDLGVTVQVTIDPAPVTQEETSSSPTLTGHHLDNRHKLLKLSVLLPLIFTILLLLLVAASLLAWRMMKYQQKAAGMSPEQVLQPLEGDLCYADLTLQLAGTSPQKATTKLSSAQVDQVEVEYVTMASLPKEDISYASLTLGAEDQEPTYCNMGHLSSHLPGRGPEEPTEYSTISRP

SEQ ID NO: 67265 - protein, 36 aa, Homo sapiens
LSPVPSHWMVALLLLLSAEPVPAARSEDRYRNPKGQ

SEQ ID NO: 67266 - protein, 416 aa, Homo sapiens
LLSVPLLLGLLGLAVAEPAVYFKEQFLDGDGWTSRWIESKHKSDFGKFVLSSGKFYGDEEKDKGLQTSQDARFYALSASFEPFSNKGQTLVVQFTVKHEQNIDCGGGYVKLFPNSLDQTDMHGDSEYNIMFGPDICGPGTKKVHVIFNYKGKNVLINKDIRCKDDEFTHLYTLIVRPDNTYEVKIDNSQVESGSLEDDWDFLPPKKIKDPDASKPEDWDERAKIDDPTDSKPEDWDKPEHIPDPDAKKPEDWDEEMDGEWEPPVIQNPEYKGEWKPRQIDNPDYKGTWIHPEIDNPEYSPDPSIYAYDNFGVLGLDLWQVKSGTIFDNFLITNDEAYAEEFGNETWGVTKAAEKQMKDKQDEEQRLKEEEEDKKRKEEEEAEDKEDDEDKDEDEEDEEDKEEDEEEDVPGQAKDEL

SEQ ID NO: 67267 - protein, 359 aa, Homo sapiens
IPLLLAALLCVPAGALTCYGDSGQPVDWFVVYKLPALRGSGEAAQRGLQYKYLDESSGGWRDGRALINSPEGAVGRSLQPLYRSNTSQLAFLLYNDQPPQPSKAQDSSMRGHTKGVLLLDHDGGFWLVHSVPNFPPPASSAAYSWPHSACTYGQTLLCVSFPFAQFSKMGKQLTYTYPWVYNYQLEGIFAQEFPDLENVVKGHHVSQEPWNSSITLTSQAGAVFQSFAKFSKFGDDLYSGWLAAALGTNLQVQFWHKTVGILPSNCSDIWQVLNVNQIAFPGPAGPSFNSTEDHSKWCVSPKGPWTCVGDMNRNQGEEQRGGGTLCAQLPALWKAFQPLVKNYQPCNGMARKPSRAYKI

SEQ ID NO: 67268 - protein, 595 aa, Homo sapiens
IVTVLICLGLSLGPRTRVQTGTIPKPTLWAEPDSVITQGSPVTLSCQGSLEAQEYRLYREKKSASWITRIRPELVKNGQFHIPSITWEHTGRYGCQYYSRARWSELSDPLVLVMTGAYPKPTLSAQPSPVVTSGGRVTLQCESQVAFGGFILCKEGEDEHPQCLNSQPHARGSSRAIFSVGPVSPNRRWSHRCYGYDLNSPYVWSSPSDLLELLVPGVSKKPSLSVQPGPVMAPGESLTLQCVSDVGYDRFVLYKEGERDLRQLPGRQPQAGLSQANFTLGPVSRSYGGQYRCYGAHNLSSECSAPSDPLDILITGQIRGTPFISVQPGPTVASGENVTLLCQSWRQFHTFLLTKAGAADAPLRLRSIHEYPKYQAEFPMSPVTSAHAGTYRCYGSLNSDPYLLSHPSEPLELVVSGPSMGSSPPPTGPISTPAGPEDQPLTPTGSDPQSGLGRHLGVVIGILVAVVLLLLLLLLLFLILRHRRQGKHWTSTQRKADFQHPAGAVGPEPTDRGLQWRSSPAADAQEENLYAAVKDTQPEDGVEMDTRAAASEAPQDVTYAQLHSLTLRRKATEPPPSQEREPPAEPSIYATLAIH

SEQ ID NO: 67269 - protein, 289 aa, Homo sapiens
LQPVGGDAVSPALMVLLCLGLSLGPRTHVQAGNLSKATLWAEPGSVISRGNSVTIRCQGTLEAQEYRLVKEGSPEPWDTQNPLEPKNKARFSIPSMTEHHAGRYRCYYYSPAGWSEPSDPLELVVTGFYNKPTLSALPSPVVTSGENVTLQCGSRLRFDRFILTEEGDHKLSWTLDSQLTPSGQFQALFPVGPVTPSHRWMLRCYGSRRHILQVWSEPSDLLEIPVSGAADNLSPSQNKSDSGTASHLQDYAVENLIRMGMAGLILVVLGILIFQDWHSQRSPQAAAGR

SEQ ID NO: 67270 - protein, 31 aa, Homo sapiens
LGLAGLVLISLGALVTFDWRSQNRAPAGIRP

SEQ ID NO: 67271 - protein, 127 aa, Homo sapiens
VVCTLLVALLMAALYLVRIRQKKAQGSTSSTRLHEPEKNAREITQDTNDITYADLNLPKGKKPAPQAAEPNNHTEYASIQTSPQPASEDTLTYADLDMVHLNRTPKQPAPKPEPSFSEYASVQVPRK

SEQ ID NO: 67272 - protein, 39 aa, Homo sapiens
LAALLLALATSRRSPGQEDVKTTGPAGAMNTLAWSKGQE

SEQ ID NO: 67273 - protein, 402 aa, Homo sapiens
KVSRMPVPASWPHLPSPFLLMTLLLGRLTGVAGEDELQVIQPEKSVSVAAGESATLRCAMTSLIPVGPIMWFRGAGAGRELIYNQKEGHFPRVTTVSELTKRNNLDFSISISNITPADAGTYYCVKFRKGSPDDVEFKSGAGTELSVRAKPSAPVVSGPAVRATPEHTVSFTCESHGFSPRDITLKWFKNGNELSDFQTNVDPAGDSVSYSIHSTARVVLTRGDVHSQVICEIAHITLQGDPLRGTANLSEAIRVPPTLEVTQQPMRAENQANVTCQVSNFYPRGLQLTWLENGNVSRTETASTLIENKDGTYNWMSWLLVNTCAHRDDVVLTCQVEHDGQQAVSKSYALEISAHQKEHGSDITHEAALAPTAPLLVALLLGPKLLLVVGVSAIYICWKQKA

SEQ ID NO: 67274 - protein, 46 aa, Homo sapiens [sequence omitted]

SEQ ID NO: 67275 - protein, 12 aa, Homo sapiens
VALVIMFWLLIA

SEQ ID NO: 67276 - protein, 204 aa, Homo sapiens
ITGLFGAGLGGAWLALRAEKERLQQQKRTEALRQAAVGQGDFHLLDHRGRARCKADFRGQWVLMYFGFTHCPDICPDELEKLVQVVRQLEAEPGLPPVQPVFITVDPERDDVEAMARYVQDFHPRLLGLTGSTKQVAQASHSYRVYYNAGPKDEDQDYIVDHSIAIYLLNPDGLFTDYYGRSRSAEQISDSVRRHMAAFRSVLS

SEQ ID NO: 67277 - protein, 25 aa, Homo sapiens
LLFLVFVIVLFFIYHFMQAEEGNPF

SEQ ID NO: 67278 - protein, 29 aa, Homo sapiens
LSQAHSVQPLSLTVLLLLSLLSPQLCPAA

SEQ ID NO: 67279 - protein, 173 aa, Homo sapiens
LRLVLYLTFLGAPCYAPALPSCKEDEYPVGSECCPKCSPGYRVKEACGELTGTVCEPCPPGTYIAHLNGLSKCLQCQMCDPAMGLRASRNCSRTENAVCGCSPGHFCIVQDGDHCAACRAYATSSPGQRVQKGGTESQDTLCQNCPPGTFSPNGTLEECQHQTNRAWKSQTDL

SEQ ID NO: 67280 - protein, 74 aa, Homo sapiens
MTQALVSTAWTSMWCWVGQVSASQTRSAGQAALGPNTESAKRRPCAGSSRSMMGSSFLANKFPFLSKRAIKSFQ

SEQ ID NO: 67281 - protein, 50 aa, Homo sapiens
LLHVLGLSFLLQTRRPILLCSPRLMKPLVVFVLGGPGAGKGTQCARIVEG

SEQ ID NO: 67282 - protein, 43 aa, Homo sapiens
VLAGLAAMVGYALLSGIVSIQRATPARAPGTRTLGMAEEDEEE

SEQ ID NO: 67283 - protein, 112 aa, Homo sapiens
LILFSWWVCTLALSCSRIFPWIVWSGAGTAAAAVERPAGKMMEEISIMVAYDAHVFSQLHDEDFLTSLVAISKPRSMVPTKKLKKYEKEYQTMRESQLQQEDPMDRYKFVYL

SEQ ID NO: 67284 - protein, 55 aa, Homo sapiens
RSSLIEVQFMCLWVWMAQSVSGLRKADLAPTLTLTDPGIYSRNWKPSATGAWRSS

SEQ ID NO: 67285 - protein, 1031 aa, Homo sapiens
LGRKRTVLAQMAGISYVASFFLLLTKLSIGQREVTVQKGPLFRAEGYPVSIGCNVTGHQGPSEQHFQWSVYLPTNPTQEVQIISTKDAAFSYAVYTQRVRSGDVYVERVQGNSVLLHISKLQMKDAGEYECHTPNTDEKYYGSYSAKTNLIVIPDTLSATMSSQTLGKEEGEPLALTCEASKATAQHTHLSVTWYLTQDGGGSQATEIISLSKDFILVPGPLYTERFAASDVQLNKLGPTTFRLSIERLQSSDQGQLFCEATEWIQDPDETWMFITKKQTDQTTLRIQPAVKDFQVNITADSLFAEGKPLELVCLVVSSGRDPQLQGIWFFNGTEIAHIDAGGVLGLKNDYKERASQGELQVSKLGPKAFSLKIFSLGPEDEGAYRCVVAEVMKTRTGSWQVLQRKQSPDSHVHLRKPAARSVVMSTKNKQQVVWEGETLAFLCKAGGAESPLSVSWWHIPRDQTQPEFVAGMGQDGIVQLGASYGVPSYHGNTRLEKMDWATFQLEITFTAITDSGTYECRVSEKSRNQARDLSWTQKISVTVKSLESSLQVSLMSRQPQVMLTNTFDLSCVVRAGYSDLKVPLTVTWQFQPASSHIFHQLIRITHNGTIEWGNFLSRFQKKTKVSQSLFRSQLLVHDATEEETGVYQCEVEVYDRNSLYNNRPPRASAISHPLRIAVTLPESKLKVNSRSQVQELSINSNTDIECSILSRSNGNLQLAIIWYFSPVSTNASWLKILEMDQTNVIKTGDEFHTPQRKQKFHTEKVSQDLFQLHILNVEDSDRGKYHCAVEEWLLSTNGTWHKLGEKKSGLTELKLKPTGSKVRVSKVYWTENVTEHREVAIRCSLESVGSSATLYSVMWYWNRENSGSKLLVHLQHDGLLEYGEEGLRRHLHCYRSSSTDFVLKLHQVEMEDAGMYWCRVAEWQLHGHPSKWINQASDESQRMVLTVLPSEPTLPSRICSSAPLLYFLFICPFVLLLLLLISLLCLYWKARKLSTLRSNTRKEKALWVDLKEAGGVTTNRREDEEEDEGN

SEQ ID NO: 67286 - protein, 22 aa, Homo sapiens
LKQLASGLLLVTGPLALNRVPL

SEQ ID NO: 67287 - protein, 24 aa, Homo sapiens
RVSIMAGSLTGLLLLQAVSWASDE

SEQ ID NO: 67288 - protein, 432 aa, Homo sapiens
LVLMLPRLLLLICAPLCEPAELFLIASPSHPTEGSPVTLTCKMPFLQSSDAQFQFCFFRDTRALGPGWSSSPKLQIAAMWKEDTGSYWCEAQTMASKVLRSRRSQINVHRVPVADVSLETQPPGGQVMEGDRLVLICSVAMGTGDITFLWYKGAVGLNLQSKTQRSLTAEYEIPSVRESDAEQYYCVAENGYGPSPSGLVSITVRIPVSRPILMLRAPRAQAAVEDVLELHCEALRGSPPILYWFYHEDITLGSRSAPSGGGASFNLSLTEEHSGNYSCEANNGLGAQRSEAVTLNFTVPTGARSNHLTSGVIEGLLSTLGPATVALLFCYGLKRKIGRRSARDPLRSLPSPLPQEFTYLNSPTPGQLQPIYENVNVVSGDEVYSLAYYNQPEQESVAAETLGTHMEDKVSLDIYSRLRKANITDVDYEDAM

SEQ ID NO: 67289 - protein, 255 aa, Homo sapiens
IMWQLLLPTALLLLVSAGMRTEDLPKAVVFLEPQWYRVLEKDSVTLKCQGAYSPEDNSTQWFHNESLISSQASSYFIDAATVDDSGEYRCQTNLSTLSDPVQLEVHIGWLLLQAPRWVFKEEDPIHLRCHSWKNTALHKVTYLQNGKGRKYFHHNSDFYIPKATLKDSGSYFCRGLFGSKNVSSETVNITITQGLAVSTISSFFPPGYQVSFCLVMVLLFAVDTGLYFSVKTNIRSSTRDWKDHKFKWRKDPQDK

SEQ ID NO: 67290 - protein, 10 aa, Homo sapiens
MMYLFMLNFL

SEQ ID NO: 67291 - protein, 14 aa, Homo sapiens
LFLFGHLGTGLSLF

SEQ ID NO: 67292 - protein, 388 aa, Homo sapiens
LLGILMMANVFIYFIMEVSKSSSQEKNGKGEVIIPKEKFWKISTPPEAYWNREQEKLNRQYNPILSMLTNQTGEAGRLSNISHLNYCEPDLRVTSVVTGFNNLPDRFKDFLLYLRCRNYSLLIDQPDKCAKKPFLLLAIKSLTPHFARRQAIRESWGQESNAGNQTVVRVFLLGQTPPEDNHPDLSDMLKFESEKHQDILMWNYRDTFFNLSLKEVLFLRWVSTSCPDTEFVFKGDDDVFVNTHHILNYLNSLSKTKAKDLFIGDVIHNAGPHRDKKLKYYIPEVVYSGLYPPYAGGGGFLYSGHLALRLYHITDQVHLYPIDDVYTGMCLQKLGLVPEKHKGFRTFDIEEKNKNNICSYVDLMLVHSRKPQEMIDIWSQLQSAHLKC

SEQ ID NO: 67293 - protein, 15 aa, Homo sapiens
IPVLLMLVFLALFFL

SEQ ID NO: 67294 - protein, 19 aa, Homo sapiens
MASFPWRMTLTSVMWSLMT

SEQ ID NO: 67295 - protein, 83 aa, Homo sapiens
VDLYALGLILAELLHVCDTAFETSKFFTDLRDGIISDIFDKKEKTLLQKLLSKKPEDRPNTSEILRTLTVWKKSPEKNERHTC

SEQ ID NO: 67296 - protein, 31 aa, Homo sapiens
ISLISGMFFCLMNAILNAVLERGVGVRVYSI

SEQ ID NO: 67297 - protein, 22 aa, Homo sapiens
IVLILLVVLLTGELNMYLQESG

SEQ ID NO: 67298 - protein, 184 aa, Homo sapiens
RRMRRMWATQGLAVALALSVLPGSRALRPGDCEVCISYLGRFYQDLKDRDVTFSPATIENELIKFCREARGKENRLCYYIGATDDAATKIINEVSKPLAHHIPVEKICEKLKKKDSQICELKYDKQIDLSTVDLKKLRVKELKKILDDWGETCKGCAEKSDYIRKINELMPKYAPKAASARTDL

SEQ ID NO: 67299 - protein, 88 aa, Homo sapiens
VLAAGALLGLVAGALYLRARGKPMGFGFSAFQAEDDADDDFSPWQEGTNPTLVSVPNPVFGSDTFCEPFDDSLLEEDFPDTQRILTVK

SEQ ID NO: 67300 - protein, 23 aa, Homo sapiens
MTLLWCVVSLYFYGILQSDASGK

SEQ ID NO: 67301 - protein, 689 aa, Homo sapiens
LPLWLCLGFHFLTVGWRNRSGTATAASQGVCKLVGGAADCRGQSLASVPSSLPPHARMLTLDANPLKTLWNHSLQPYPLLESLSLHSCHLERISRGAFQEQGHLRSLVLGDNCLSENYEETAAALHALPGLRRLDLSGNALTEDMAALMLQNLSSLRSVSLAGNTIMRLDDSVFEGLERLRELDLQRNYIFEIEGGAFDGLAELRHLNLAFNNLPCIVDFGLTRLRVLNVSYNVLEWFLATGGEAAFELETLDLSHNQLLFFPLLPQYSKLRTLLLRDNNMGFYRDLYNTSSPREMVAQFLLVDGNVTNITTVSLWEEFSSSDLADLRFLDMSQNQFQYLPDGFLRKMPSLSHLNLHQNCLMTLHIREHEPPGALTELDLSHNQLSELHLAPGLASCLGSLRLFNLSSNQLLGVPPGLFANARNITTLDMSHNQISLCPLPAASDRVGPPSCVDFRNMASLRSLSLEGCGLGALPDCPFQGTSLTYLDLSSNWGVLNGSLAPLQDVAPMLQVLSLRNMGLHSSFMALDFSGFGNLRDLDLSGNCLTTFPRFGGSLALETLDLRRNSLTALPQKAVSEQLSRGLRTIYLSQNPYDCCGVDGWGALQHGQTVADWAMVTCNLSSKIIRVTELPGGVPRDCKWERLDLGLLYLVLILPSCLTLLVACTVIVLTFKKPLLQVIKSRCHWSSVY

SEQ ID NO: 67302 - protein, 21 aa, Homo sapiens
ITILCSTLILVAVFKYGHFSL

SEQ ID NO: 67303 - protein, 22 aa, Homo sapiens
LTSLLLGTASRAVSAFALLAAS

SEQ ID NO: 67304 - protein, 243 aa, Homo sapiens
IACVLSLISTIYMAASIGTDFWYEYRSPVQENSSDLNKSIWDEFISDEADEKTYNDALFRYNGTVGLWRRCITIPKNMHWYSPPERTESFDVVTKCVSFTLTEQFMEKFVDPGNHNSGIDLLRTYLWRCQFLLPFVSLGLMCFGALIGLCACICRSLYPTIATGILHLLAGLCTLGSVSCYVAGIELLHQKLELPDNVSGEFGWSFCLACVSAPLQFMASALFIWAAHTNRKEYTLMKAYRVA

SEQ ID NO: 67305 - protein, 105 aa, Homo sapiens
LCCAPLLLLLLLPPLLLTPRAGDAAVITGACDKDSQCGGGMCCAVSIWVKSIRICTPMGKLGDSCHPLTRKVPFFGRRMHHTCPCLPGLACLRTSFNRFICLAQK

SEQ ID NO: 67306 - protein, 270 aa, Homo sapiens
LVLILVVVLAVVVPRWRQQWSGPGTTKRFPETVLARCVKYTEIHPEMRHVDCQSVWDAFKGAFISKHPCNITEEDYQPLMKLGTQTVPCNKILLWSRIKDLAHQFTQVQRDMFTLEDTLLGYLADDLTWCGEFNTSKINYQSCPDWRKDCSNNPVSVFWKTVSRRFAEAACDVVHVMLNGSRSKIFDKNSTFGSVEVHNLQPEKVQTLEAWVIHGGREDSRDLCQDPTIKELESIISKRNIQFSCKNIYRPDKFLQCVKNPEDSSCTSEI

SEQ ID NO: 67307 - protein, 26 aa, Homo sapiens
IQNAGMLTGFTAILLITLYAGEIELE

SEQ ID NO: 67308 - protein, 887 aa, Homo sapiens
ISVARDLKMRLHLLLLLALCGAGTTAAELSYSLRGNWSICNGNGSLELPGAVPGCVHSALFQQGLIQDSYYRFNDLNYRWVSLDNWTYSKEFKIPFEISKWQKVNLILEGVDTVSKILFNEVTIGETDNMFNRYSFDITNVVRDVNSIELRFQSAVLYAAQQSKAHTRYQVPPDCPPLVQKGECHVNFVRKEQCSFSWDWGPSFPTQGIWKDVRIEAYNICHLNYFTFSPIYDKSAQEWNLEIESTFDVVSSKPVGGQVIVAIPKLQTQQTYSIELQPGKRIVELFVNISKNITVETWWPHGHGNQTGYNMTVLFELDGGLNIEKSAKVYFRTVELIEEPIKGSPGLSFYFKINGFPIFLKGSNWIPADSFQDRVTSELLRLLLQSVVDANMNTLRVWGGGIYEQDEFYELCDELGIMVWQDFMFACALYPTDQGFLDSVTAEVAYQIKRLKSHPSIIIWSGNNENEEALMMNWYHISFTDRPIYIKDYVTLYVKNIRELVLAGDKSRPFITSSPTNGAETVAEAWVSQNPNSNYFGDVHFYDYISDCWNWKVFPKARFASEYGYQSWPSFSTLEKVSSTEDWSFNSKFSLHRQHHEGGNKQMLYQAGLHFKLPQSTDPLRTFKDTIYLTQVMQAQCVKTETEFYRRSRSEIVDQQGHTMGALYWQLNDIWQAPSWASLEYGGKWKMLHYFAQNFFAPLLPVGFENENTFYIYGVSDLHSDYSMTLSVRVHTWSSLEPVCSRVTERFVMKGGEAVCLYEEPVSELLRRCGNCTRESCVVSFYLSADHELLSPTNYHFLSSPKEAVGLCKAQITAIISQQGDIFVFDLETSAVAPFVWLDVGSIPGRFSDNGFLMTEKTRTILFYPWEPTSKNELEQSFHVTSLTDIY

SEQ ID NO: 67309 - protein, 25 aa, Homo sapiens
ISAFVFVVFFSVFFPSFYEDFCCWI

SEQ ID NO: 67310 - protein, 17 aa, Homo sapiens
IISLLWFFGLTLCGPLR

SEQ ID NO: 67311 - protein, 25 aa, Homo sapiens
ISAFVFVVFFSVFFPSFYEDFCCWI

SEQ ID NO: 67312 - protein, 33 aa, Homo sapiens
LLKFHGSLFLPLLKVLGIFDFSSFMSQWDTFSE

SEQ ID NO: 67313 - protein, 107 aa, Homo sapiens
INPGLFIMTPAGVFLAESALHMAGLAEYPMQGELASAISSGKKKRKRCGMCAPCRRRINCEQCSSCRNRKTGHQICKFRKCEELKKKPSAALEKVMLPTGAAFRWFQ

SEQ ID NO: 67314 - protein, 27 aa, Homo sapiens
RFLFLFCLDNFFILVWELNDLNLGLDM

SEQ ID NO: 67315 - protein, 353 aa, Homo sapiens
RWTICTISLLLIFYKTKEIARTEEHQETQLIGDGELSLSRSLVNSSDKIIRKAGSSIFQHNVEGWKINSSLVLEIRKNILRFLDAERDVSVVKSSFKPGDVIHYVLDRRRTLNISHDLHSLLPEVSPMKNRRFKTCAVVGNSGILLDSECGKEIDSHNFVIRCNLAPVVEFAADVGTKSDFITMNPSVVQRAFGGFRNESDREKFVHRLSMLNDSVLWIPAFMVKGGEKHVEWVNALILKNKLKVRTAYPSLRLIHAVRGYWLTNKVPIKRPSTGLLMYTLATRFCDEIHLYGFWPFPKDLNGKAVKYHYYDDLKYRYFSNASPHRMPLEFKTLNVLHNRGALKLTTGKCVKQ

SEQ ID NO: 67316 - protein, 17 aa, Homo sapiens
TVALACFLGVMAAAGGR

SEQ ID NO: 67317 - protein, 95 aa, Homo sapiens
RLGGWTILLTLTMGQGEPGGPQGDPWVPHELLLPSLCDSSHASSWGSGSITCAWRGGDSSSHPLVSGHILSNSPVAAVMCSSMGTHLSPFKGTLL

SEQ ID NO: 67318 - protein, 328 aa, Homo sapiens
LAFLLLNFHVSLLLVQLLTPCSAQFSVLGPSGPILAMVGEDADLPCHLFPTMSAETMELKWVSSSLRQVVNVYADGKEVEDRQSAPYRGRTSILRDGITAGKAALRIHNVTASDSGKYLCYFQDGDFYEKALVELKVAALGSNLHVEVKGYEDGGIHLECRSTGWYPQPQIQWSNAKGENIPAVEAPVVADGVGLYEVAASVIMRGGSGEGVSCIIRNSLLGLEKTASISIADPFFRSAQPWIAALAGTLPILLLLLAGASYFLWRQQKEITALSSEIESEQEMKEMGYAATEREISLRESLQEELKRKKIQYLTRGEESSSDTNKSA

SEQ ID NO: 67319 - protein, 16 aa, Homo sapiens
LVASTLLLWLSTQTTS

SEQ ID NO: 67320 - protein, 84 aa, Homo sapiens
MIYVSTGAWGWAGSCFWQWSFCPPACVGCIEEAQGSSEQELHYASLQRLPVPSSEGPDLRGRDKRGTKEDPRADYACIAENKPT

SEQ ID NO: 67321 - protein, 59 aa, Homo sapiens
LSLLTAHPLHFACLFGLLQALVLAVSLREPNGDEAATDWESEGLEREGEEQRGDPGKGL

SEQ ID NO: 67322 - protein, 476 aa, Homo sapiens
KCCRLSVSLSLAALLEGAAASRTDQGQVALGGHYMAEGEGYFAMSEDELACSPYIPLGGDFGGGDFGGGDFGGGDFGGGGSFGGHCLDYCESPTAHCNVLNWEQVQRLDGILSETIPIHGRGNFPTLELQPSLIVKVVRRRLAEKRIGVRDVRLNGSAASHVLHQDSGLGYKDLDLIFCADLRGEGEFQTVKDVVLDCLLDFLPEGVNKEKITPLTLKEAYVQKMVKVCNDSDRWSLISLSNNSGKNVELKFVDSLRRQFEFSVDSFQIKLDSLLLFYECSENPMTETFHPTIIGESVYGDFQEAFDHLCNKIIATRNPEEIRGGGLLKYCNLLVRGFRPASDEIKTLQRYMCSRFFIDFSDIGEQQRKLESYLQNHFVGLEDRKYEYLMTLHGVVNESTVCLMGHERRQTLNLITMLAIRVLADQNVIPNVANVTCYYQPAPYVADANFSNYYIAQVQPVFTCQQQTYSTWLPCN

SEQ ID NO: 67323 - protein, 14 aa, Homo sapiens
IGTQALQLISILVL

SEQ ID NO: 67324 - protein, 50 aa, Homo sapiens
ILILTVPLRMVVLTRIFTDREMKCLDANEAEPVFDEREGVDEYNEMPMPV

SEQ ID NO: 67325 - protein, 17 aa, Homo sapiens
IILLLFCLLSMRVMFPV

SEQ ID NO: 67326 - protein, 87 aa, Homo sapiens
TYLLRMMTSWAIVCSVWYLPPMTREADEDAVQFANRVKSAIARQGGLVDLLWDGGLKREKVKDTFKEEQQKLYSKMIVGNHKDRSRS

SEQ ID NO: 67327 - protein, 30 aa, Homo sapiens
ISCFLLLSFLILSKFSDSRKRNHSPLPPTT

SEQ ID NO: 67328 - protein, 135 aa, Homo sapiens
ILSRMKIFLPVLLAALLGVERASSLMCFSCLNQKSNLYCLKPTICSDQDNYCVTVSASAGIGNLVTFGHSLSKTCSPACPIPEGVNVGVASMGISCCQSFLCNFSAADGGLRASVTLLGAGLLLSLLPALLRFGP

SEQ ID NO: 67329 - protein, 115 aa, Homo sapiens
TPLLTLILVVLMGLPLAQALDCHVCAYNGDNCFNPMRCPAMVAYCMTTRTYYTPTRMKVSKSCVPRCFETVYDGYSKHASTTSCCQYDLCNGTGLATPATLALAPILLATLWGLL

SEQ ID NO: 67330 - protein, 14 aa, Homo sapiens
ILSNLSNYLSIFLI

SEQ ID NO: 67331 - protein, 53 aa, Homo sapiens
LSISSATRHQKRSLLLWFLLFLLLLPPLPVLLADPGAPTPGASLGGSRRHQGK

SEQ ID NO: 67332 - protein, 65 aa, Homo sapiens
IGTYVFAIVYAAADGTLETSPDVVMALLPKKEEKHPEIFVNFMEPCYGSCTERQHHYYLSYIEEW

SEQ ID NO: 67333 - protein, 527 aa, Homo sapiens
RFPKADLAAAGVMLLCHFFTDQFQFADGKPGDQILDWQYGVTQAFPHTEEEVEVDSHAYSHRWKRNLDFLKAVDTNRASVGQDSPEPRSFTDLLLDDGQDNNTQIEEDTDHNYYISRIYGPSDSASRDLWVNIDQMEKDKVKIHGILSNTHRQAARVNLSFDFPFYGHFLREITVATGGFIYTGEVVHRMLTATQYIAPLMANFDPSVSRNSTVRYFDNGTALVVQWDHVHLQDNYNLGSFTFQATLLMDGRIIFGYKEIPVLVTQISSTNHPVKVGLSDAFVVVHRIQQIPNVRRRTIYEYHRVELQMSKITNISAVEMTPLPTCLQFNRCGPCVSSQIGFNCSWCSKLQRCSSGFDRHRQDWVDSGCPEESKEKMCENTEPVETSSRTTTTVGATTTQFRVLTTTRRAVTSQFPTSLPTEDDTKIALHLKDNGASTDDSAAEKKGGTLHAGLIIGILILVLIVATAILVTVYMYHHPTSAASIFFIERRPSRWPAMKFRRGSGHPAYAEVEPVGEKEGFIVSEQC

SEQ ID NO: 67334 - protein, 464 aa, Homo sapiens
VAWDLWSTLCMILFLMIEVWRQDHQEGPSPECLGGEEDELPGLGGAPLQGLTLPNKATLGHFYERCIRGATADAARTREFLEGFVDDLLEALRSLCNRDTDMEVEDFIGVDSMYENWQVDRPLLCHLFVPFTPPEPYRFHPELWCSGRSVPLDRQGYGQIKVVRADGDTLSCICGKTKLGEDMLCLLHGRNSMAPPCGDMENLLCATDSLYLDTMQVMKWFQTALTRAWKGIAHKYEFDLAFGQLDSPGSLKIKFRSGKFMPFNLIPVIQCDDSDLYFVSHLPREPSEGTPASSTDWLLSFAVYERHFLRTTLKALPEGACHLSCLQIASFLLSKQSRLTGPSGLSSYHLKTALLHLLLLRQAADWKAGQLDARLHELLCFLEKSLLQKKLHHFFIGNRKVPEAMGLPEAVLRAEPLNLFRPFVLQRSLYRKTLDSFYEMLKNAPALISEYSLHVPSDQPTPKS

SEQ ID NO: 67335 - protein, 52 aa, Homo sapiens
IFLLLLLLLLPPPLPLGSFAPTPSRRPAPSPTQDVRGFSKAAGKLQSSAPAS

SEQ ID NO: 67336 - protein, 434 aa, Homo sapiens
KTPPGRTQTTMRAPGCGRLVLPLLLLAAAALAEGDAKGLKEGETPGNFMEDEQWLSSISQYSGKIKHWNRFRDEVEDDYIKSWEDNQQGDEALDTTKDPCQKVKCSRHKVCIAQGYQRAMCISRKKLEHRIKQPTVKLHGNKDSICKPCHMAQLASVCGSDGHTYSSVCKLEQQACLSSKQLAVRCEGPCPCPTEQAATSTADGKPETCTGQDLADLGDRLRDWFQLLHENSKQNGSASSVAGPASGLDKSLGASCKDSIGWMFSKLDTSADLFLDQTELAAINLDKYEVCIRPFFNSCDTYKDGRVSTAEWCFCFWREKPPCLAELERIQIQEAAKKKPGIFIPSCDEDGYYRKMQCDQSSGDCWCVDQLGLELTGTRTHGSPDCDDIVGFSGDFGSGVGWEDEEEKETEEAGEEAEEEEGEAGEADDGGYIW

SEQ ID NO: 67337 - protein, 73 aa, Homo sapiens
IGLALTVSALLFSSFLWFAIRCGCSLDRKGKYTLTPRMWPPAPGAQPLEMLPGWTHTLSPLRSSCYWSKRMLG

SEQ ID NO: 67338 - protein, 43 aa, Homo sapiens
ISIRQLQLILFKVALMLGVEIHVNVEFVKVLEPPEDQENQSTV

SEQ ID NO: 67339 - protein, 46 aa, Homo sapiens
KSFLWWTSNMMVLGGSSAYTWVRGWEMKKTPEEPSPKDSEKSAMGV

SEQ ID NO: 67340 - protein, 17 aa, Homo sapiens
LLCAGIVVMVLFSLFVD

SEQ ID NO: 67341 - protein, 38 aa, Homo sapiens
VGLFLLLLQPLTDPKLYGSLPLCVLLERAGDSEAPLCS

SEQ ID NO: 67342 - protein, 2208 aa, Homo sapiens
RRESRLPFLFTLVALLPPGALCEVWTQRLHGGSAPLPQDRGFLVVQGDPRELRLWARGDARGASRADEKPLRRKRSAALQPEPIKVYGQVSLNDSHNQMVVHWAGEKSNVIVALARDSLALARPKSSDVYVSYDYGKSFKKISDKLNFGLGNRSEAVIAQFYHSPADNKRYIFADAYAQYLWITFDFCNTLQGFSIPFRAADLLLHSKASNLLLGFDRSHPNKQLWKSDDFGQTWIMIQEHVKSFSWGIDPYDKPNTIYIERHEPSGYSTVFRSTDFFQSRENQEVILEEVRDFQLRDKYMFATKVVHLLGSEQQSSVQLWVSFGRKPMRAAQFVTRHPINEYYIADASEDQVFVCVSHSNNRTNLYISEAEGLKFSLSLENVLYYSPGGAGSDTLVRYFANEPFADFHRVEGLQGVYIATLINGSMNEENMRSVITFDKGGTWEFLQAPAFTGYGEKINCELSQGCSLHLAQRLSQLLNLQLRRMPILSKESAPGLIIATGSVGKNLASKTNVYISSSAGARWREALPGPHYYTWGDHGGIITAIAQGMETNELKYSTNEGETWKTFIFSEKPVFVYGLLTEPGEKSTVFTIFGSNKENVHSWLILQVNATDALGVPCTENDYKLWSPSDERGNECLLGHKTVFKRRTPHATCFNGEDFDRPVVVSNCSCTREDYECDFGFKMSEDLSLEVCVPDPEFSGKSYSPPVPCPVGSTYRRTRGYRKISGDTCSGGDVEARLEGELVPCPLAEENEFILYAVRKSIYRYDLASGATEQLPLTGLRAAVALDFDYEHNCLYWSDLALDVIQRLCLNGSTGQEVIINSGLETVEALAFEPLSQLLYWVDAGFKKIEVANPDGDFRLTIVNSSVLDRPRALVLVPQEGVMFWTDWGDLKPGIYRSNMDGSAAYHLVSEDVKWPNGISVDDQWIYWTDAYLECIERITFSGQQRSVILDNLPHPYAIAVFKNEIYWDDWSQLSIFRASKYSGSQMEILANQLTGLMDMKIFYKGKNTGSNACVPRPCSLLCLPKANNSRSCRCPEDVSSSVLPSGDLMCDCPQGYQLKNNTCVKQENTCLRNQYRCSNGNCINSIWWCDFDNDCGDMSDERNCPTTICDLDTQFRCQESGTCIPLSYKCDLEDDCGDNSDESHCEMHQCRSDEYNCSSGMCIRSSWVCDGDNDCRDWSDEANCTAIYHTCEASNFQCRNGHCIPQRWACDGDTDCQDGSDEDPVNCEKKCNGFRCPNGTCIPSSKHCDGLRDCSDGSDEQHCEPLCTHFMDFVCKNRQQCLFHSMVCDGIIQCRDGSDEDAAFAGCSQDPEFHKVCDEFGFQCQNGVCISLIWKCDGMDDCGDYSDEANCENPTEAPNCSRYFQFRCENGHCIPNRWKCDRENDCGDWSDEKDCGDSHILPFSTPGPSTCLPNYYRCSSGTCVMDTWVCDGYRDCADGSDEEACPLLANVTAASTPTQLGRCDRFEFECHQPKTCIPNWKRCDGHQDCQDGRDEANCPTHSTLTCMSREFQCEDGEACIVLSERCDGFLDCSDESDEKACSDELTVYKVQNLQWTADFSGDVTLTWMRPKKMPSASCVYNVYYRVVGESIWKTLETHSNKTNTVLKVLKPDTTYQVKVQVQCLSKAHNTNDFVTLRTPEGLPDAPRNLQLSLPREAEGVIVGHWAPPIHTHGLIREYIVEYSRSGSKMWASQRAASNFTEIKNLLVNTLYTVRVAAVTSRGIGNWSDSKSITTIKGKVIPPPDIHIDSYGENYLSFTLTMESDIKVNGYVVNLFWAFDTHKQERRTLNFRGSILSHKVGNLTAHTSYEISAWAKTDLGDSPLAFEHVMTRGVRPPAPSLKAKAINQTAVECTWTGPRNVVYGIFYATSFLDLYRNPKSLTTSLHNKTVIVSKDEQYLFLVRVVVPYQGPSSDYVVVKMIPDSRLPPRHLHVVHTGKTSVVIKWESPYDSPDQDLLYAVAVKDLIRKTDRSYKVKSRNSTVEYTLNKLEPGGKYHIIVQLGNMSKDSSIKITTVSLSAPDALKIITENDHVLLFWKSLALKEKHFNESRGYEIHMFDSAMNITAYLGNTTDNFFKISNLKMGHNYTFTVQARCLFGNQICGEPAILLYDELGSGADASATQAARSTDVAAVVVPILFLILLSLGVGFAILYTKHRRLQSSFTAFANSHYSSRLGSAIFSSGDDLGEDDEDAPMITGFSDDVPMVIA

SEQ ID NO: 67343 - protein, 37 aa, Homo sapiens
RPHRETLQSRIPAEFLYLVLLLIKGAPVSSFSPSPGT

SEQ ID NO: 67344 - protein, 61 aa, Homo sapiens
KALWLSIAFIVLFAALMSFLTGQLFQKSVDAAPTQQEDSWTSLEHILWPFTRLRHNGPPPV

SEQ ID NO: 67345 - protein, 569 aa, Homo sapiens
LALALVLALLVGPFLSGLAGAIPAPGGRWARDGQVPPASRSRSVLLDVSAGQLLMVDGRHPDAVAWANLTNAIRETGWAFLELGTSGQYNDSLQAYAAGVVEAAVSEELIYMHWMNTVVNYCGPFEYEVGYCERLKSFLEANLEWMQEEMESNPDSPYWHQVRLTLLQLKGLEDSYEGRVSFPAGKFTIKPLGFLLLQLSGDLEDLELALNKTKIKPSLGSGSCSALIKLLPGQSDLLVAHNTWNNYQHMLRVIKKYWLQFREGPWGDYPLVPGNKLVFSSYPGTIFSCDDFYILGSGLVTLETTIGNKNPALWKYVRPRGCVLEWVRNIVANRLASDGATWADIFKRFNSGTYNNQWMIVDYKAFIPGGPSPGSRVLTILEQIPGMVVVADKTSELYQKTYWASYNIPSFETVFNASGLQALVAQYGDWFSYDGSPRAQIFRRNQSLVQDMDSMVRLMRYNDFLHDPLSLCKACNPQPNGENAISARSDLNPANGSYPFQALRQRSHGGIDVKVTSMSLARILSLLAASGPTWDQVPPFQWSTSPFSGLLHMGQPDLWKFAPVKVSWD

SEQ ID NO: 67346 - protein, 31 aa, Homo sapiens
LPFVCLWRLQGPMSIWSLISFRLACCLPWAP

SEQ ID NO: 67347 - protein, 9 aa, Homo sapiens
IVLLVILLK

SEQ ID NO: 67348 - protein, 43 aa, Homo sapiens
LKSWLSRSVTSFFRFLLGSSLSLQPLQVNPRACYRLAVVPYEI

SEQ ID NO: 67349 - protein, 185 aa, Homo sapiens
TLKMKGWGWLALLLGALLGTAWARRSQDLHCGACRALVDELEWEIAQVDPKKTIQMGSFRINPDGSQSVVEVPYARSEAHLTELLEEICDRMKEYGEQIDPSTHRKNYVRVVGRNGESSELDLQGIRIDSDISGTLKFACESIVEEYEDELIEFFSREADNVKDKLCSKRTDLCDHALHISHDEL

SEQ ID NO: 67350 - protein, 16 aa, Homo sapiens
TRWCTSRWKALLSTCL

SEQ ID NO: 67351 - protein, 15 aa, Homo sapiens
ISSIFAVRIPWMFLL

SEQ ID NO: 67352 - protein, 18 aa, Homo sapiens
KLADRVLALICWLFPAPL

SEQ ID NO: 67353 - protein, 51 aa, Homo sapiens
ILPIRDIRASVGAGFLYPLVGTMSTMPGLPTRPCFYDIDLDPETEQVNGLF

SEQ ID NO: 67354 - protein, 16 aa, Homo sapiens
LMFLTLLCLTLLAEEL

SEQ ID NO: 67355 - protein, 58 aa, Homo sapiens
VSIFGYFILGTVVNKTLMGPIVMKLVHQEKLEGDFRFKHMQIRVNAEPAAFYSRHQHL

SEQ ID NO: 67356 - protein, 38 aa, Homo sapiens
LLLLLTFLAKQHTDSFQAALGSLPVDKAQELQAVLGLS

SEQ ID NO: 67357 - protein, 64 aa, Homo sapiens
KVLALDSASILLMVQGTVIASTPTTQTPIPLQRGGVLFIGANESVSLKLTEPKDLLIFRACCLL

SEQ ID NO: 67358 - protein, 234 aa, Homo sapiens
LCRVLLFLSQFCILSGGEQSQALAQSIKDPGPTRTFTVVPRAAESTEIPPYVMKCPSNGLCSRLPADCIDCTTNFSCTYGKPVTFDCAVKPSVTCVDQDFKSQKNFIINMTCRFCWQLPETDYECTNSTSCMTVSCPRQRYPANCTVRDHVHCLGNRTFPKMLYCNWTGGYKWSTALALSITLGGFGADRFYLGQWREGLGKLFSFGGLGIWTLIDVLLIGVGYVGPADGSLYI

SEQ ID NO: 67359 - protein, 68 aa, Homo sapiens
LLSAVSSVLLSLPAARLLEDLMDELLEARSWLADVAEKDPDEDCRTLALRALLLLQRLKNRLLPPASP

SEQ ID NO: 67360 - protein, 257 aa, Homo sapiens
ILVPCVLGLLLLPILAMLMALCVHCHRLPGSYDSTSSDSLYPRGIQFKRPHTVAPWPPAYPPVTSYPPLSQPDLLPIPSPQPLGGSHRTPSSRRDSDGANSVASYENEGASGIRGAQAGWGVWGPSWTRLTPVSLPPEPACEDADEDEDDYHNPGYLVVLPDSTPATSTAAPSAPALSTPGIRDSAFSMESIDDYVNVPESGESAEASLDGSREYVNVSQELHPGAAKTEPAALSSQEAEEVEEEGAPDYENLQELN

SEQ ID NO: 67361 - protein, 29 aa, Homo sapiens
LLLFCGLLCCVTAMCFHPRRESHWSRTRL

SEQ ID NO: 67362 - protein, 7 aa, Homo sapiens
ISFFFFF

SEQ ID NO: 67363 - protein, 15 aa, Homo sapiens
KRQRTFSVGLTLFFL

SEQ ID NO: 67364 - protein, 59 aa, Homo sapiens
LPLTLLVLLAGYNHDKLIPLLLQLTSRLQGVGALGQAASDNSGPEDAKRQAKKQKTRRT

SEQ ID NO: 67365 - protein, 59 aa, Homo sapiens; identical to SEQ ID NO: 67364

SEQ ID NO: 67366 - protein, 16 aa, Homo sapiens
LFSTKTSLLAFFFVDI

SEQ ID NO: 67367 - protein, 34 aa, Homo sapiens
IHFLLPISLKGLLLVGLLCTVLQVSSAKGASRGK

SEQ ID NO: 67368 - protein, 115 aa, Homo sapiens
RMERGAGAKLLPLLLLLRATGFTCAQTDGRNGYTAVIEVTSGGPWGDWAWPEMCPDGFFASGFSLKVEPPQGIPGDDTALNGIRLHCARGNVLGNTHVVESQSGRWGAGVEDPLG

SEQ ID NO: 67369 - protein, 268 aa, Homo sapiens
VFESIGKFGLALAVAGGVVNSALYNVDAGHRAVIFDRFRGVQDIVVGEGTHFLIPWVQKPIIFDCRSRPRNVPVITGSKDLQNVNITLRILFRPVASQLPRIFTSIGEDYDERVLPSITTEILKSVVARFDAGELITQRELVSRQVSDDLTERAATFGLILDDVSLTHLTFGKEFTEAVEAKQVAQQEAERARFVVEKAEQQKKAAIISAEGDSKAAELIANSLATAGDGLIELRKLEAAEDIAYQLSRSRNITYLPAGQSVLLQLPQ

SEQ ID NO: 67370 - protein, 46 aa, Homo sapiens
LLLACFGGAVLYILTRADWKRPSQAEEQALSMDFKTLTEGDSPGSQ

SEQ ID NO: 67371 - protein, 295 aa, Homo sapiens
LSEEKMPLLTLYLLLFWLSGYSIVTQITGPTTVNGLERGSLTVQCVYRSGWETYLKWWCRGAIWRDCKILVKTSGSEQEVKRDRVSIKDNQKNRTFTVTMEDLMKTDADTYWCGIEKTGNDLGVTVQVTIDPAPVTQEETSSSPTLTGHHLDNRHKLLKLSVLLPLIFTILLLLLVAASLLAWRMMKYQQKAAGMSPEQVLQPLEGDLCYADLTLQLAGTSPQKATTKLSSAQVDQVEVEYVTMASLPKEDISYASLTLGAEDQEPTYCNMGHLSSHLPGRGPEEPTEYSTISRP

SEQ ID NO: 67372 - protein, 96 aa, Homo sapiens
MPARRLLLLLTLLLPGLGIFGSTSTVTLPETLLFVSTLDGSLHAVSKRTGSIKWTLKEGNLDLVLGRHGHLLNWFHRNIFWRKRKHYSLSNKINKK

SEQ ID NO: 67373 - protein, 84 aa, Homo sapiens
TAFLHLRRYSNLILNLFSLMVDANIPDIALEPDKTVKKVQDKFRLDLSDEEAVHYMQSLIDESVHALFAAVVEQIHKFAQYWRK

SEQ ID NO: 67374 - protein, 20 aa, Homo sapiens
IPAISAVAVALMYRLYMAED

SEQ ID NO: 67375 - protein, 626 aa, Homo sapiens
LWPLPKLALLPLLWVLFQRTRPQGSAGPLQCYGVGPLGDLNCSWEPLGDLGAPSELHLQSQKYRSNKTQTVAVAAGRSWVAIPREQLTMSDKLLVWGTKAGQPLWPPVFVNLETQMKPNAPRLGPDVDFSEDDPLEATVHWAPPTWPSHKVLICQFHYRRCQEAAWTLLEPELKTIPLTPVEIQDLELATGYKVYGRCRMEKEEDLWGEWSPILSFQTPPSAPKDVWVSGNLCGTPGGEEPLLLWKAPGPCVQVSYKVWFWVGGRELSPEGITCCCSLIPSGAEWARVSAVNATSWEPLTNLSLVCLDSASAPRSVAVSSIAGSTELLVTWQPGPGEPLEHVVDWARDGDPLEKLNWVRLPPGNLSALLPGNFTVGVPYRITVTAVSASGLASASSVWGFREELAPLVGPTLWRLQDAPPGTPAIAWGEVPRHQLRGHLTHYTLCAQSGTSPSVCMNVSGNTQSVTLPDLPWGPCELWVTASTIAGQGPPGPILRLHLPDNTLRWKVLPGILFLWGLFLLGCGLSLATSGRCYHLRHKVLPRWVWEKVPDPANSSSGQPHMEQVPEAQPLGDLPILEVEEMEPPPVMESSQPAQATAPLDSGYEKHFLPTPEELGLLGPPRPQVLA

SEQ ID NO: 67376 - protein, 27 aa, Homo sapiens
RFIRGWGLCIFLPFVLSQLEPGCKKVS

SEQ ID NO: 67377 - protein, 1279 aa, Homo sapiens
VVTAVLILLVVRRLRVPKTPAPDGPRYRFRKRDKVLFYGRKIMRKVSQSTSSLVDTSVSATSRPRMRKKLKMLNIAKKILRIQKETPTLQRKEPPPAVLEADLTEGDLANSHLPSEVLYMLKNVRVLGHFEKPLFLELCRHMVFQRLGQGDYVFRPGQPDASIYVVQDGLLELCLPGPDGKECVVKEVVPGDSVNSLLSILDVITGHQHPQRTVSARAARDSTVLRLPVEAFSAVFTKYPESLVRVVQIIMVRLQRVTFLALHNYLGLTNELFSHEIQPLRLFPSPGLPTRTSPVRGSKRMVSTSATDEPRETPGRPPDPTGAPLPGPTGDPVKPTSLETPSAPLLSRCVSMPGDISGLQGGPRSDFDMAYERGRISVSLQEEASGGSLAAPARTPTQEPREQPAGACEYSYCEDESATGGCPFGPYQGRQTSSIFEAAKQELAKLMRIEDVSLHFVLWGCLHVYQRMIDKAEDVCLFVAQPGELVGQLAVLTGEPLIFTLRAQRDCTFLRISKSDFYEIMRAQPSVVLSAAHTVAARMSPFVRQMDFAIDWTAVEAGRALYRQGDRSDCTYIVLNGRLRSVIQRGSGKKELVGEYGRGDLIGVVEALTRQPRATTVHAVRDTELAKLPEGTLGHIKRRYPQVVTRLIHLLSQKILGNLQQLQGPFPGSGLGVPPHSELTNPASNLATVAILPVCAEVPMVAFTLELQHALQAIGPTLLLNSDIIRARLGASALDSIQEFRLSGWLAQQEDAHRIVLYQTDASLTPWTVRCLRQADCILIVGLGDQEPTLGQLEQMLENTAVRALKQLVLLHREEGAGPTRTVEWLNMRSWCSGHLHLRCPRRLFSRRSPAKLHELYEKVFSRRADRHSDFSRLARVLTGNTIALVLGGGGARGCSHIGVLKALEEAGVPVDLVGGTSIGSFIGALYAEERSASRTKQRAREWAKSMTSVLEPVLDLTYPVTSMFTGSAFNRSIHRVFQDKQIEDLWLPYFNVTTDITASAMRVHKDGSLWRYVRASMTLSGYLPPLCDPKDGHLLMDGGYINNLPADIARSMGAKTVIAIDVGSQDETDLSTYGDSLSGWWLLWKRLNPWADKVKVPDMAEIQSRLAYVSCVRQLEVVKSSSYCEYLRPPIDCFKTMDFGKFDQIYDVGYQYGKAVFGGWSRGNVIEKMLTDRRSTDLNESRRADVLAFPSSGFTDLAEIVSRIEPPTSYVSDGCADGEESDCLTEYEEDAGPDCSRDEGGSPEGASPSTASEMEEEKSILRQRRCLPQEPPGSATDA

SEQ ID NO: 67378 - protein, 42 aa, Homo sapiens
KTPTPALTFFAALVLVDSPWERVPESLVRLHVEQRHQNMGLQ

SEQ ID NO: 67379 - protein, 16 aa, Homo sapiens
VSSPGAWLFVILASVT

SEQ ID NO: 67380 - protein, 473 aa, Homo sapiens
RAVGGDAMTPILTVLICLGLSLGPRTHVQAGHLPKPTLWAEPGSVIIQGSPVTLRCQGSLQAEEYHLYRENKSASWVRRIQEPGKNGQFPIPSITWEHAGRYHCQYYSHNHSSEYSDPLELVVTGAYSKPTLSALPSPVVTSGGNVTLQCVSQVAFDGFILCKEGEDEHPQRLNSHSHARGWSWAIFSVGPVSPSRRWSYRCYAYDSNSPYVWSLPSDLLELLVPGVSKKPSLSVQPGPMVAPGESLTLQCVSDVGYDRFVLYKEGERDFLQRPGWQPQAGLSQANFTLGPVSPSHGGQYRCYSAHNLSSEWSAPSDPLDILITGQFYDRPSLSVQPVPTVAPGKNVTLLCQSRGQFHTFLLTKEGAGHPPLHLRSEHQAQQNQAEFRMGPVTSAHVGTYRCYSSLSSNPYLLSLPSDPLELVVSASLGQHPQDYTVENLIRMGVAGLVLVVLGILLFEAQHSQRSLQDAAGR

SEQ ID NO: 67381 - protein, 486 aa, Homo sapiens
IVTVLICLRLSLGPRTHVQAGTLPKPTLWAEPGSVITQGSPVTLWCQGILETQEYRLYREKKTAPWITRIPQEIVKKGQFPIPSITWEHTGRYRCFYGSHTAGWSEPSDPLELVVTGAYIKPTLSALPSPVVTSGGNVTLHCVSQVAFGSFILCKEGEDEHPQCLNSQPRTHGWSRAIFSVGPVSPSRRWSYRCYAYDSNSPHVWSLPSDLLELLVLGVSKKPSLSVQPGPIVAPGESLTLQCVSDVSYDRFVLYKEGERDFLQLPGPQPQAGLSQANFTLGPVSRSYGGQYRCSGAYNLSSEWSAPSDPLDILIAGQFRGRPFISVHPGPTVASGENVTLLCQSWGPFHTFLLTKAGAADAPLRLRSIHEYPKYQAEFPMSPVTSAHSGTYRCYGSLSSNPYLLSHPSDSLELMVSGAAETLSPPQNKSDSKAGAANTLSPSQNKTASHPQDYTVENLIRMGIAGLVLVVLGILLFEAQHSQRSL

SEQ ID NO: 67382 - protein, 40 aa, Homo sapiens
LVELLWPLFLFFILVAVRHSHPPLEHHECEPPQGPGTLCV

SEQ ID NO: 67383 - protein, 359 aa, Homo sapiens
TAPQMGPGRCLLTALLLLALAPPPEASQYCGRLEYWNPDNKCCSSCLQRFGPPPCPDYEFRENCGLNDHGDFVTPPFRKCSSGQCNPDGAELCSPCGGGAVTPTPAAGGGRTPWRCRERPVPAKGHCPLTPGNPGAPSSQERSSPASSIAWRTPEPVPQQAWPNFLPLVVLVLLLTLAVIAILLFILLWHLCWPKEKADPYPYPGLVCGVPNTHTPSSSHLSSPGALETGDTWKEASLLPLLSRELSSLASQPLSRLLDELEVLEELIVLLDPEPGPGGGMAHGTTRHLAARYGLPAAWSTFAYSLRPSRSPLRALIEMVVAREPSASLGQLGTHLAQLGRADALRVLSKLGSSGVCWA

SEQ ID NO: 67384 - protein, 630 aa, Homo sapiens
TPALTALLCLGLSLGPRTRMQAGPFPKPTLWAEPGSVISWGSPVTIWCQGSLEAQEYQLDKEGSPEPWDRNNPLEPKNKARFSIPSMTQHHAGRYRCHYYSSAGWSEPSDPLELVMTGFYNKPTLSALPSPVVASGGNMTLRCGSQKGYHHFVLMKEGEHQLPRTLDSQQLHSGGFQALFPVGPVTPSHRWRFTCYYYYTNTPWVWSHPSDPLEILPSGVSRKPSLLTLQGPVLAPGQSLTLQCGSDVGYDRFVLYKEGERDFLQRPGQQPQAGLSQANFTLGPVSRSYGGQYRCYGAHNLSSEWSAPSDPLDILITGQIYDTVSLSAQPGPTVASGENMTLLCQSRGYFDTFLLTKEGAAHPPLRLRSMYGAHKYQAEFPMSPVTSAHAGTYRCYGSRSSNPHLLSFPSEPLELMVSGHSGGSSLPPTGPPSTPGLGRYLEVLIGVSVAFVLLLFLLLFLLLLRQRHSKHRTSDQRKTDFQRPAGAAETEPKDRGLLRRSSPAADVQEENLYAAVKDTQSEDRVELDSQSPHDEDPQAVTYAPVKHSSPRREMASPPSSLSGEFLDTKDRQVEEDRQMDTEAAASEASQDVTYAQLHSLTLRRKATEPPPSQEGEPPAEPSIYATLAIH

SEQ ID NO: 67385 - protein, 34 aa, Homo sapiens
KQAHRMHILLGLMGLQVGELHGNLSQTQRLEALR

SEQ ID NO: 67386 - protein, 45 aa, Homo sapiens
ISVAWRINPRIPSLALGASSLTSLCLLSQPSSSLTLQPCWLPPCS

SEQ ID NO: 67387 - protein, 574 aa, Homo sapiens
LLIPLGLLCALLPQHHGAPGPDGSAPDPAHYRERVKAMFYHAYDSYLENAFPFDELRPLTCDGHDTWGSFSLTLIDALDTLLILGNVSEFQRVVEVLQDSVDFDIDVNASVFETNIRVVGGLLSAHLLSKKAGVEVEAGWPCSGPLLRMAEEAARKLLPAFQTPTGMPYGTVNLLHGVNPGETPVTCTAGIGTFIVEFATLSSLTGDPVFEDVARVALMRLWESRSDIGLVGNHIDVLTGKWVAQDAGIGAGVDSYFEYLVKGAILLQDKKLMAMFLEYNKAIRNYTRFDDWYLWVQMYKGTVSMPVFQSLEAYWPGLQSLIGDIDNAMRTFLNYYTVWKQFGGLPEFYNIPQGYTVEKREGYPLRPELIESAMYLYRATGDPTLLELGRDAVESIEKISKVECGFATIKDLRDHKLDNRMESFFLAETVKYLYLLFDPTNFIHNNGSTFDAVITPYGECILGAGGYIFNTEAHPIDPAALHCCQRLKEEQWEVEDLMREFYSLKRSRSKFQKNTVSSGPWEPPARPGTLFSPENHDQARERKPAKQKVPLLSCPSQPFTSKLALLGQVFLDSS

SEQ ID NO: 67388 - protein, 62 aa, Homo sapiens
IQIMAKRIWSLKICLTWYIRLLSQSQVTEHAFPTIYLQMHSILTLLELKRQIGEEDKINICK

SEQ ID NO: 67389 - protein, 902 aa, Homo sapiens
VLAQGLLSMALLALCWERSLAGAEETIPLQTLRCYNDYTSHITCRWADTQDAQRLVNVTLIRRVNEDLLEPVSCDLSDDMPWSACPHPRCVPRRCVIPCQSFVVTDVDYFSFQPDRPLGTRLTVTLTQHVQPPEPRDLQISTDQDHFLLTWSVALGSPQSHWLSPGDLEFEVVYKRLQDSWEDAAILLSNTSQATLGPEHLMPSSTYVARVRTRLAPGSRLSGRPSKWSPEVCWDSQPGDEAQPQNLECFFDGAAVLSCSWEVRKEVASSVSFGLFYKPSPDAGSAVLLREEECSPVLREGLGSLHTRHHCQIPVPDPATHGQYIVSVQPRRAEKHIKSSVNIQMAPPSLNVTKDGDSYSLRWETMKMRYEHIDHTFEIQYRKDTATWKDSKTETLQNAHSMALPALEPSTRYWARVRVRTSRTGYNGIWSEWSEARSWDTESVLPMWVLALIVIFLTIAVLLALRFCGIYGYRLRRKWEEKIPNPSKSHLFQNGSAELWPPGSMSAFTSGSPPHQGPWGSRFPELEGVFPVGFGDSEVSPLTIEDPKHVCDPPSGPDTTPAASDLPTEQPPSPQPGPPAASHTPEKQASSFDFNGPYLGPPHSRSLPDILGQPEPPQEGGSQKSPPPGSLEYLCLPAGGQVQLVPLAQAMGPGQAVEVERRPSQGAAGSPSLESGGGPAPPALGPRVGGQDQKDSPVAIPMSSGDTEDPGVASGYVSSADLVFTPNSGASSVSLVPSLGLPSDQTPSLCPGLASGPPGAPGPVKSGFEGYVELPPIEGRSPRSPRNNPVPPEAKSPVLNPGERPADVSPTSPQPEGLLVLQQVGDYCFLPGLGPGPLSLRSKPSSPGPGPEIKNLDQAFQVKKPPGQAVPQVPVIQLFKALKQQDYLSLPPWEVNKPGEVC

SEQ ID NO: 67390 - protein, 29 aa, Homo sapiens
MTTLFLFQLHVTAWKLLPSLISLLQVRMN

SEQ ID NO: 67391 - protein, 43 aa, Homo sapiens
LPPLALLLLLAALVAPATAATAYRPDWNRLSGLTRARVETCGG

SEQ ID NO: 67392 - protein, 204 aa, Homo sapiens
TAAALVLLPPNTFLLVVAAAGPITSFLLSLEKLQMASSVGNVADSTGLAELAHREYQAGDFEAAERHCMQLWRQEPDNTGVLLLLSSIHFQCRRLDRSAHFSTLAIKQNPLLAEAYSNLGNVYKERGQLQEAIEHYRHALRLKPDFIDGYINLAAALVAAGDMEGAVQAYVSALQYNPDLYCVRSDLGNLLKALGRLEEAKVGV

SEQ ID NO: 67393 - protein, 17 aa, Homo sapiens
LLLFQMLHLVLAITRPL

SEQ ID NO: 67394 - protein, 52 aa, Homo sapiens
LMLLCLLTPLFSCFQQVFLPPVPQLLLLLRRSDLPLMVIPAPLRPPLPRRES

SEQ ID NO: 67395 - protein, 58 aa, Homo sapiens
LVFLLLFSSFVFFFSLETGSSYVGQAGLESPGSSDPPASASGKVGLQARIAAPGQSLF

SEQ ID NO: 67396 - protein, 1572 aa, Homo sapiens
MTPACPLLLSVILSLRLATAFDPAPSACSALASGVLYGAFSLQDLFPTIASGCSWTLENPDPTKYSLYLRFNRQEQVCAHFAPRLLPLDHYLVNFTCLRPSPEEAVAQAESEVGRPEEEEAEAAAGLELCSGSGPFTFLHFDKNFVQLCLSAEPSEAPRLLAPAALAFRFVEVLLINNNNSSQFTCGVLCRWSEECGRAAGRACGFAQPGCSCPGEAGAGSTTTTSPGPPAAHTLSNALVPGGPAPPAEADLHSGSSNDLFTTEMRYGEEPEEEPKVKTQWPRSADEPGLYMAQTGDPAAEEWSPWSVCSLTCGQGLQVRTRSCVSSPYGTLCSGPLRETRPCNNSATCPVHGVWEEWGSWSLCSRSCGRGSRSRMRTCVPPQHGGKACEGPELQTKLCSMAACPVEGQWLEWGPWGPCSTSCANGTQQRSRKCSVAGPAWATCTGALTDTRECSNLECPATDSKWGPWNAWSLCSKTCDTGWQRRFRMCQATGTQGYPCEGTGEEVKPCSEKRCPAFHEMCRDEYVMLMTWKKAAAGEIIYNKCPPNASGSASRRCLLSAQGVAYWGLPSFARCISHEYRYLYLSLREHLAKGQRMLAGEGMSQVVRSLQELLARRTYYSGDLLFSVDILRNVTDTFKRATYVPSADDVQRFFQVVSFMVDAENKEKWDDAQQVSPGSVHLLRVVEDFIHLVGDALKAFQSSLIVTDNLVISIQREPVSAVSSDITFPMRGRRGMKDWVRHSEDRLFLPKEVLSLSSPGKPATSGAAGSPGRGRGPGTVPPGPGHSHQRLLPADPDESSYFVIGAVLYRTLGLILPPPRPPLAVTSRVMTVTVRPPTQPPAEPLITVELSYIINGTTDPHCASWDYSRADASSGDWDTENCQTLETQAAHTRCQCQHLSTFAVLAQPPKDLTLELAGSPSVPLVIGCAVSCMALLTLLAIYAAFWRFIKSERSIILLNFCLSILASNILILVGQSRVLSKGVCTMTAAFLHFFFLSSFCWVLTEAWQSYLAVIGRMRTRLVRKRFLCLGWGLPALVVAVSVGFTRTKGYGTSSYCWLSLEGGLLYAFVGPAAVIVLVNMLIGIIVFNKLMARDGISDKSKKQRAGSERCPWASLLLPCSACGAVPSPLLSSASARNAMASLWSSCVVLPLLALTWMSAVLAMTDRRSVLFQALFAVFNSAQGFVITAVHCFLRREVQDVVKCQMGVCRADESEDSPDSCKNGQLQILSDFEKDVDLACQTVLFKEVNTCNPSTITGTLSRLSLDEDEEPKSCLVGPEGSLSFSPLPGNILVPMAASPGLGEPPPPQEANPVYMCGEGGLRQLDLTWLRPTEPGSEGDYMVLPRRTLSLQPGGGGGGGEDAPRARPEGTPRRAAKTVAHTEGYPSFLSVDHSGLGLGPAYGSLQNPYGMTFQPPPPTPSARQVPEPGERSRTMPRTVPGSTMKMGSLERKKLRYSDLDFEVMHTRKRHSELYHELNQKFHTFDRYRSQSTAKREKRWSVSSGGAAERSVCTDKPSPGERPSLSQHRRHQSWSTFKSMTLGSLPPKPRERLTLHRAAAWEPTEPPDGDFQTEV

SEQ ID NO: 67397 - protein, 232 aa, Homo sapiens
MRHGLAVCLALTTMCTSLLLVYSSLGGQKERPPQQQQQQQQQQQQASATGSSQPAAESSTQQRPGVPAGPRPLDGYLGVADHKPLKMHCRDCALVTSSGHLLHSRQGSQIDQTECVIRMNDAPTRGYGRDVGNRTSLRVIAHSSIQRILRNRHDLLNVSQGTVFIFWGPSSYMRRDGKGQVYNNLHLLSQVLPRLKAFMITRHKMLQFDELFKQETGKDRYPTLGSALAGLQ

SEQ ID NO: 67398 - protein, 332 aa, Homo sapiens
MRHGLAVCLALTTMCTSLLLVYSSLGGQKERPPQQQQQQQQQQQQASATGSSQPAAESSTQQRPGVPAGPRPLDGYLGVADHKPLKMHCRDCALVTSSGHLLHSRQGSQIDQTECVIRMNDAPTRGYGRDVGNRTSLRVIAHSSIQRILRNRHDLLNVSQGTVFIFWGPSSYMRRDGKGQVYNNLHLLSQVLPRLKAFMITRHKMLQFDELFKQETGKDRKISNTWLSTGWFTMTIALELCDRINVYGMVPPDFCRDPNHPSVPYHYYEPFGPDECTMYLSHERGRKGSHHRFITEKRVFKNWARTFNIHFFQPDWKPESLAINHPENKPVF

SEQ ID NO: 67399 - protein, 19 aa, Homo sapiens
MITKVVFPEQGLAILLWMC

SEQ ID NO: 67400 - protein, 33 aa, Homo sapiens
MKLVSVALMYLGSLAFLGADTARLDVASEFRKK

SEQ ID NO: 67401 - protein, 166 aa, Homo sapiens
MQRLGATLLCLLLAAAVPTAPAPAPTATSAPVKPGPALSYPQEEATLNEMFREVEELMEDTQHKLRSAVEEMEAEEAAAKASSEVNLANLPPSYHNETNTDTKVGNNTIHVHREIHKVSHGQHFLLSIASSPIRELRFFCFCFFICDIQAQTTIENHKIRIENQKE

SEQ ID NO: 67402 - protein, 646 aa, Homo sapiens
MDLRDWLFLCYGLIAFLTEVIDSTTCPSVCRCDNGFIYCNDRGLTSIPADIPDDATTLYLQNNQINNAGIPQDLKTKVNVQVIYLYENDLDEFPINLPRSLRELHLQDNNVRTIARDSLARIPLLEKLHLDDNSVSTVSIEEDAFADSKQLKLLFLSRNHLSSIPSGLPHTLEELRLDDNRISTIPLHAFKGLNSLRRLVLDGNLLANQRIADDTFSRLQNLTELSLVRNSLAAPPLNLPSAHLQKLYLQDNAISHIPYNTLAKMRELERLDLSNNNLTTLPRGLFDDLGNLAQLLLRNNPWFCGCNLMWLRDWVKARAAVVNVRGLMCQGPEKVRGMAIKDITSEMDECFETGPQGGVANAAAKTTASNHASATTPQGSLFTLKAKRPGLRLPDSNIDYPMATGDGAKTLAIHVKALTADSIRITWKATLPASSFRLSWLRLGHSPAVGSITETLVQGDKTEYLLTALEPKSTYIICMVTMETSNAYVADETPVCAKAETADSYGPTTTLNQEQNAGPMASLPLAGIIGGAVALVFLFLVLGAICWYVHQAGELLTRERAYNRGSRKKDDYMESGTKKDNSILEIRGPGLQMLPINPYRAKEEYVVHTIFPSNGSSLCKATHTIGYGTTRGYRDGGIPDIDYSYT

SEQ ID NO: 67403 - protein, 48 aa, Homo sapiens
MEIHLSLLWLLLAESCPPKIHMLECTSGCGISGYLSTSGCGVVWRKGR

SEQ ID NO: 67404 - protein, 4553 aa, Homo sapiens
MGHCVGTRPPACCLILLLFKLLATVSQGLPGTGPLGFHFTHSIYNATVYENSAARTYVNSQSRMGITLIDLSWDIKYRIVSGDEEGFFKAEEVIIADFCFLRIRTKGGNSAILNREIQDNYLLIVKGSVRGEDLEAWTKVNIQVLDMNDLRPLFSPTTYSVTIAESTPLRTSVAQVTATDADIGSNGEFYYYFKNKVDLFSVHPTSGVISLSGRLNYDEKNRYDLEILAVDRGMKLYGNNGVSSTAKLYVHIERINEHAPTIHVVTHVPFSLEKEPTYAVVTVDDLDDGANGEIESVSIVAGDPLDQFFLAKEGKWLNEYKIKERKQIDWESFPYGYNLTLQAKDKGSPQKCSALKAVYIGNPTRDTVPIRFEKEVYDVSISEFSPPGVVVAIVKLSPEPIDVEYKLSPGEDAVYFKINPRSGLIVTARPLNTVKKEVYKLEVTNKEGDLKAQVTISIEDANDHTPEFQQPLYDAYVNESVPVGTSVLTVSASDKDKGENGYITYSIASLNLLPFVINQFTGVISTTEELDFESSPEIYRFIVRASDWGSPYRHESEVNVTIRIGNVNDNSPLFEKVACQGVISYDFPVGGHITAVSAIDIDELELVKYKIISGNELGFFYLNPDSGVLQLKKSLTNSGIKNGNFALRITATDGENLADPMSINISVLHGKVSSKSFSCRETRVAQKLAEKLLIKAKANGKLNLEDGFLDFYSINRQGPYFDKSFPSDVAVKEDLPVGANILKIKAYDADSGFNGKVLFTISDGNTDSCFNIDMETGQLKVLMPMDREHTDLYLLNITIYDLGNPQKSSWRLLTINVEDANDNSPVFIQDSYSVNILESSGIGTEIIQVEARDKDLGSNGEVTYSVLTDTQQFAINSSTGIVYVADQLDRESKANYSLKIEARDKAESGQQLFSVVTLKVFLDDVNDCSPAFIPSSYSVKVLEDLPVGTVIAWLETHDPDLGLGGQVRYSLVNDYNGRFEIDKASGAIRLSKELDYEKQQFYNLTVRAKDKGRPVSLSSVSFVEVEVVDVNENLHTPYFPDFAVVGSVKENSRIGTSVLQVTARDEDSGRDGEIQYSIRDGSGLGRFSIDDESGVITAADILDRETMGSYWLTVYATDRGVVPLYSTIEVYIEVEDVNDNAPLTSEPIYYPVVMENSPKDVSVIQIQAEDPDSSSNEKLTYRITSGNPQNFFAINIKTGLITTTSRKLDREQQAEHFLEVTVTDGGPSPKQSTIWVVVQVLDENDNKPQFPEKVYQIKLPERDRKKRGEPIYRAFAFDRDEGPNAEISYSIVDGNDDGKFFIDPKTGMVSSRKQFTAGSYDILTIKAVDNGRPQKSSTARLHIEWIKKPPPSPIPLTFDEPFYNFTVMESDRVTEIVGVVSVQPANTPLWFDIVGGNFDSAFDAEKGVGTIVIAKPLDAEQRSIYNMSVEVTDGTNVAVTQVFIKVLDNNDNGPEFSQPNYDVTISEDVLPDTEILQIEATDRDEKHKLSYTVHSSIDSISMRKFRIDPSTGVLYTAERLDHEAQDKHILNIMVRDQEFPYRRNLARVIVNVEDANDHSPYFTNPLYEASVFESAALGSAVLQVTALDKDKGENAELIYTIEAGNTGNMFKIEPVLGIITICKEPDMTTMGQFVLSIKVTDQGSPPMSATAIVRISVTMSDNSHPKFIHKDYQAEVNENVDIGTSVILISAISQSTLIYEVKDGDINGIFTINPYSGVITTQKALDYERTSSYQLIIQATNMAGMASNATVNIQIVDENDNAPVFLFSQYSGSLSEAAPINSIVRSLDNSPLVIRATDADSNRNALLVYQIVESTAKKFFTVDSSTGAIRTIANLDHETIAHFHFHVHVRDSGSPQLTAESPVEVNIEVTDVNDNPPVFTQAVFETILLLPTYVGVEVLKVSATDPDSEVPPELTYSLMEGSLDHFLIDSNSGVLTIKNNNLSKDHYMLIVKVSDGKFYSTSMVTIMVKEAMDSGLHFTQSFYSTSISENNTNITKVAIVNAVGNRLNEPLKYSILNPGNKFKIKSTSGVIQTTGVPFDREEQELYELVVEASRELDHLRVARVVVRVNIEDINDNSPVFVGLPYYAAVQVDAEPGTLIYQVTAIDKDKGPNGEVTYVLQDDYGHFEINPNSGNVILKEAFNSDLSNIEYGVTILAKDGGKPSLSTSVELPITIVNKAMPVFDKPFYTASVNEDIRMNTPILSINATSPEGQGIIYIIIDGDPFKQFNIDFDTGVLKVVSPLDYEVTSAYKLTIRASDALTGARAEVTVDLLVNDVNDNPPIFDQPTYNTTLSEASLIGTPVLQVVSIDADSENNKMVHYQIVQDTYNSTDYFHIDSSSGLILTARMLDHELVQHCTLKVRSIDSGFPSLSSEVLVHIYISDVNDNPPVFNQLIYESYVSELAPRGHFVTCVQASDADSSDFDRLEYSILSGNDRTSFLMDSKSGVITLSNHRKQRMEPLYSLNVSVSDGLFTSTAQVHIRVLGANLYSPAFSQSTYVAEVRENVAAGTKVIHVRATDGDPGTYGQISYAIINDFAKDRFLIDSNGQVITTERLDRENPLEGDVSIFVRALDGGGRTTFCTVRVIVVDENDNAPQFMTVEYRASVRADVGRGHLVTQVQAIDPDDGANSRITYSLYSEASVSVADLLEIDPDNGWMVTKGNFNQLKNTVLSFFVKAVDGGIPVKHSLIPVYIHVLPPETFLPSFTQSQYSFTIAEDTAIGSTVDTLRILPSQNVWFSTVNGERPENNKGGIFVIEQETGTIKLDKRLDRETSPAFHFKVAATIPLDKVDIVFTVDVDIKVLDLNDNKPVFETSSYDTIIMEGMPVGTKLTQVRAIDMDWGANGQVTYSLHSDSQPEKVMEAFNIDSNTGWISTLKDLDHETDPTFTFSVVASDLGEAFSLSSTALVSVRVTDINDNAPVFAQEVYRGNVKESDPPGEVVAVLSTWDRDTSDVNRQVSYHITGGNPRGRFALGLVQSEWKVYVKRPLDREEQDIYFLNITATDGLFVTQAMVEVSVSDVNDNSPVCDQVAYTALLPEDIPSNKIILKVSAKDADIGSNGYIRYSLYGSGNSEFFLDPESGELKTLALLDRERIPVYSLMAKATDGGGRFCQSNIHLILEDVNDNPPVFSSDHYNTCVYENTATKALLTRVQAVDPDIGINRKVVYSLADSAGGVFSIDSSSGIIILEQPLDREQQSSYNISVRATDQSPGQSLSSLTTVTITVLDINDNPPVFERRDYLVTVPEDTSPGTQVLAVFATSKDIGTNAEITYLIRSGNEQGKFKINPKTGGISVSEVLDYELCKRFYLVVEAKDGGTPALSAVATVNINLTDVNDNPPKFSQDVYSAVISEDALVGDSVILLIAEDVDSQPNGQIHFSIVNGDRDNEFTVDPVLGLVKVKKKLDRERVSGYSLLVQAVDSGIPAMSSTATVNIDISDVNDNSPVFTPANYTAVIQENKPVGTSILQLVVTDRDSFHNGPPFSFSILSGNEEEEFVLDPHGILRSAVVFQHTESLEYVLCVQAKDSGKPQQVSHTYIRVRVIEESTHKPTAIPLEIFIVTMEDDFPGGVIGKIHATDQDMYDVLTFALKSEQKSLFKVNSHDGKIIALGGLDSGKYVLNVSVSDGRFQVPIDVVVHVEQLVHEMLQNTVTIRFENVSPEDFVGLHMHGFRRTLRNAVLTQKQDSLRIISIQPVAGTNQLDMLFAVEMHSSEFYKPAYLIQKLSNARRHLENIMRISAILEKNCSGLDCQEQHCEQGLSLDSHALMTYSTARISFVCPRFYRNVRCTCNGGLCPGSNDPCVEKPCPGDMQCVSYEASRRPFLCQCPPGKLGECSGHTSLSFAGNSYIKYRLSENSKEEDFKLALRLRTLQSNGIIMYTRANPCIILKIVDGKLWFQLDCGSGPGILGISGRAVNDGSWHSVFLELNRNFTSLSLDDSYVERRRAPLYFQTLSTESSIYFGALVQADNIRSLTDTRVTQVLSGFQGCLDSVILNNNELPLQNKRSSFAEVVGLTELKLGCVLYPDACKRSPCQHGGSCTGLPSGGYQCTCLSQFTGRNCESEITACFPNPCRNGGSCDPIGNTFICNCKAGLTGVTCEEDINECEREECENGGSCVNVFGSFLCNCTPGYVGQYCGLRPVVVPNIQAGHSYVGKEELIGIAVVLFVIFILVVLFIVFRKKVFRKNYSRNNITLVQDPATAALLNKSNGIPFRNLRGSGDGRNVYQEVGPPQVPVRPMAYTPCFQSDSRSNLDKIVDGLGGEHQEMTTFHPESPRILTARRGVVVCSVAPNLPAVSPCRSDCDSIRKNGWDAGTENKGVDDPGEVTCFAGSNKGSNSEVQSLSSFQSDSGDDNAYHWDTSDWMPGARLSDIEEVPNYENQDGGSAHQGSTRELESDYYLGGYDIDSEYPPPHEEEFLSQDQLPPPLPEDFPDQYEALPPSQPVSLASTLSPDCRRRPQFHPSQYLPPHPFPNETDLVGPPASCEFSTFAVSMNQGTEPTGPADSVSLSLHNSRGTSSSDVSANCGFDDSEVAMSDYESVGELSLASLHIPFVETQHQTQV

SEQ ID NO: 67405 - protein, 51 aa, Homo sapiens
MSTAFCPIHSSLGSMVMCLCILSPLCIASKSLRVCTKSYMKAMGKPGCQWF

SEQ ID NO: 67406 - protein, 483 aa, Homo sapiens
MITAHCSLDLLGSVAVLCVCDLSPAQCDINCCCDPDCSSVDFSVFSACSVPVVTGDSQFCSQKAVIYSLNFTANPPQRVFELVDQINPSIFCIHITNYKPALSFINPEVPDENNFDTLMKTSDGFTLNAESYVSFTTKLDIPTAAKYEYGVPLQTSDSFLRFPSSLTSSLCTDNNPAAFLVNQAVKCTRKINLEQCEEIEALSMAFYSSPEILRVPDSRKKVPITVQSIVIQSLNKTLTRREDTDVLQPTLVNAGHFSLCVNVVLEVKYSLTYTDAGEVTKADLSFVLGTVSSVVVPLQQKFEIHFLQENTQPVPLSGNPGYVVGLPLAAGFQPHKGGALPCQLVAQKVKSLLWGQGFPDYVAPFGNSQAQDMLDWVPIHFITQSFNRKHFVLQDSCQLPGALVIEVKWTKYGSLLNPQAKIVNVTANLISSSFPEANSGNERTILISTAVTFVDVSAPAEAGFRAPPAINARLPFNFFFPFV

SEQ ID NO: 67407 - protein, 773 aa, Homo sapiens
MFSLLLLLIVNPINANNHYDKILAHSRIRGRDQGPNVCALQQILGTKKKYFSTCKNWYKKSICGQKTTVLYECCPGYMRMEGMKGCPAVLPIDHVYGTLGIVGATTTQRYSDASKLREEIEGKGSFTYFAPSNEAWDNLDSDIRRGLESNVNVELLNALHSHMINKRMLTKDLKNGMIIPSMYNNLGLFINHYPNGVVTVNCARIIHGNQIATNGVVHVIDRVLTQIGTSIQDFIEAEDDLSSFRAAAITSDILEALGRDGHFTLFAPTNEAFEKLPRGVLERIMGDKVASEALMKYHILNTLQCSESIMGGAVFETLEGNTIEIGCDGDSITVNGIKMVNKKDIVTNNGVIHLIDQVLIPDSAKQVIELAGKQQTTFTDLVAQLGLASALRPDGEYTLLAPVNNAFSDDTLSMDQRLLKLILQNHILKVKVGLNELYNGQILETIGGKQLRVFVYRTAVCIENSCMEKGSKQGRNGAIHIFREIIKPAEKSLHEKLKQDKRFSTFLSLLEAADLKELLTQPGDWTLFVPTNDAFKGMTSEEKEILIRDKNALQNIILYHLTPGVFIGKGFEPGVTNILKTTQGSKIFLKEVNDTLLVNELKSKESDIMTTNGVIHVVDKLLYPADTPVGNDQLLEILNKLIKYIQIKFVRGSTFKEIPVTVYKPIIKKYTKIIDGVPVEITEKETREERIITGPEIKYTRISTGGGETEETLKKLLQEEVTKVTKFIEGGDGHLFEDEEIKRLLQGDTPVRKLQANKKVQGSRRRLREGRSQ

SEQ ID NO: 67408 - protein, 803 aa, Homo sapiens
MFSLLLLLIVNPINANNHYDKILAHSRIRGRDQGPNVCALQQILGTKKKYFSTCKNWYKKSICGQKTTVLYECCPGYMRMEGMKGCPAVLPIDHVYGTLGIVGATTTQRYSDASKLREEIEGKGSFTYFAPSNEAWDNLDSDIRRGLESNVNVELLNALHSHMINKRMLTKDLKNGMIIPSMYNNLGLFINHYPNGVVTVNCARIIHGNQIATNGVVHVIDRVLTQIGTSIQDFIEAEDDLSSFRAAAITSDILEALGRDGHFTLFAPTNEAFEKLPRGVLERIMGDKVASEALMKYHILNTLQCSESIMGGAVFETLEGNTIEIGCDGDSITVNGIKMVNKKDIVTNNGVIHLIDQVLIPDSAKQVIELAGKQQTTFTDLVAQLGLASALRPDGEYTLLAPVNNAFSDDTLSMDQRLLKLILQNHILKVKVGLNELYNGQILETIGGKQLRVFVYRTAVCIENSCMEKGSKQGRNGAIHIFREIIKPAEKSLHEKLKQDKRFSTFLSLLEAADLKELLTQPGDWTLFVPTNDAFKGMTSEEKEILIRDKNALQNIILYHLTPGVFIGKGFEPGVTNILKTTQGSKIFLKEVNDTLLVNELKSKESDIMTTNGVIHVVDKLLYPADTPVGNDQLLEILNKLIKYIQIKFVRGSTFKEIPVTVYRPTLTKVKIEGEPEFRLIKEGETITEVIHGEPIIKKYTKIIDGVPVEITEKETREERIITGPEIKYTRISTGGGETEETLKKLLQEEVTKVTKFIEGGDGHLFEDEEIKRLLQGDTPVRKLQANKKVQGSRRRLREGRSQ

SEQ ID NO: 67409 - protein, 775 aa, Homo sapiens
MFSLLLLLIVNPINANNHYDKILAHSRIRGRDQGPNVCALQQILGTKKKYFSTCKNWYKKSICGQKTTVLYECCPGYMRMEGMKGCPAVLPIDHVYGTLGIVGATTTQRYSDASKLREEIEGKGSFTYFAPSNEAWDNLDSDIRRGLESNVNVELLNALHSHMINKRMLTKDLKNGMIIPSMYNNLGLFINHYPNGVVTVNCARIIHGNQIATNGVVHVIDRVLTQIGTSIQDFIEAEDDLSSFRAAAITSDILEALGRDGHFTLFAPTNEAFEKLPRGVLERIMGDKVASEALMKYHILNTLQCSESIMGGAVFETLEGNTIEIGCDGDSITVNGIKMVNKKDIVTNNGVIHLIDQVLIPDSAKQVIELAGKQQTTFTDLVAQLGLASALRPDGEYTLLAPVNNAFSDDTLSMDQRLLKLILQNHILKVKVGLNELYNGQILETIGGKQLRVFVYRTAVCIENSCMEKGSKQGRNGAIHIFREIIKPAEKSLHEKLKQDKRFSTFLSLLEAADLKELLTQPGDWTLFVPTNDAFKGMTSEEKEILIRDKNALQNIILYHLTPGVFIGKGFEPGVTNILKTTQGSKIFLKEVNDTLLVNELKSKESDIMTTNGVIHVVDKLLYPADTPVGNDQLLEILNKLIKYIQIKFVRGSTFKEIPVTVYRPTLTKVKIEGEPEFRLIKEGETITEVIHGEPIIKKYTKIIDGVPVEITEKETREERIITGPEIKYTRISTGGGETEETLKKLLQEDTPVRKLQANKKVQGSRRRLREGRSQ

SEQ ID NO: 67410 - protein, 66 aa, Homo sapiens
MGRPASLARGMSVWMAAAGLSAVITSWTRPSRRTSVCGVGVTARPATPSQAPLTLMTSAEATTRSS

SEQ ID NO: 67411 - protein, 1135 aa, Homo sapiens
MLLRALLLLLLLSPLPGVWCFSELSFVKEPQDVTVTRKDPVVLDCQAHGEVPIKVTWLKNGAKMSENKRIEVLSNGSLYISEVEGRRGEQSDEGFYQCLAMNKYGAILSQKAHLALSTISAFEVQPISTEVHEGGVARFACKISSHPPAVITWEFNRTTLPMTMDRITALPTGVLQIYDVSQRDSGNYRCIAATVAHRRKSMEASLTVIPAKESKSFHTPTIIAGPQNITTSLHQTVVLECMATGNPKPIISWSRLDHKSIDVFNTRVLGNGNLMISDVRLQHAGVYVCRATTPGTRNFTVAMATLTVLAPPSFVEWPESLTRPRAGTARFVCQAEGIPSPKMSWLKNGRKIHSNGRIKMYNSKLVINQIIPEDDAIYQCMAENSQGSILSRARLTVVMSEDRPSAPYNVHAETMSSSAILLAWERPLYNSDKVIAYSVHYMKAEGLNNEEYQVVIGNDTTHYIIDDLEPASNYTFYIVAYMPMGASQMSDHVTQNTLEDVPLRPPEISLTSRSPTDILISWLPIPAKYRRGQVVLYRLSFRLSTENSIQVLELPGTTHEYLLEGLKPDSVYLVRITAATRVGLGESSVWTSHRTPKATSVKAPKSPELHLEPLNCTTISVRWQQDVEDTAAIQGYKLYYKEEGQQENGPIFLDTKDLLYTLSGLDPRRKYHVRLLAYNNIDDGYQADQTVSTPGCVSVRDRMVPPPPPPHHLYAKANTSSSIFLHWRRPAFTAAQIINYTIRCNPVGLQNASLVLYLQTSETHMLVQGLEPNTKYEFAVRLHVDQLSSPWSPVVYHSTLPEAPAGPPVGVKVTLIEDDTALVSWKPPDGPETVVTRYTILYASRKAWIAGEWQVLHREGAITMALLENLVAGNVYIVKISASNEVGEGPFSNSVELAVLPKETSESNQRPKRLDSADAKVYSGYYHLDQKSMTGIAVGVGIALTCILICVLILIYRSKARKSSASKTAQNGTQQLPRTSASLASGNEVGKNLEGAVGNEESLMPMIMPNSFIDAKGGTDLIINSYGPIIKNNSKKKWFFFQDSKKIQVEQPQRRFTPAVCFYQPGTTVLISDEDSPSSPGQTTSFSRPFGVAADTEHSANSEGSHETGDSGRFSHESNDEIHLSSVISTTPPNL

SEQ ID NO: 67412 - protein, 525 aa, Homo sapiens
MGVHVGAALGALWFCLTGALEVQVPEDPVVALVGTDATLCCSFSPEPGFSLAQLNLIWQLTDTKQLVHSFAEGQDQGSAYANRTALFPDLLAQGNASLRLQRVRVADEGSFTCFVSIRDFGSAAVSLQVAAPYSKPSMTLEPNKDLRPGDTVTITCSSYQGYPEAEVFWQDGQGVPLTGNVTTSQMANEQGLFDVHSILRVVLGANGTYSCLVRNPVLQQDAHSSVTITPQRSPTGAVEVQVPEDPVVALVGTDATLRCSFSPEPGFSLAQLNLIWQLTDTKQLVHSFTEGRDQGSAYANRTALFPDLLAQGNASLRLQRVRVADEGSFTCFVSIRDFGSAAVSLQVAAPYSKPSMTLEPNKDLRPGDTVTITCSSYRGYPEAEVFWQDGQGVPLTGNVTTSQMANEQGLFDVHSVLRVVLGANGTYSCLVRNPVLQQDAHGSVTITGQPMTFPPEALWVTVGLSVCLIALLVALAFVCWRKIKQSCEEENAGAEDQDGEGEGSKTALQPLKHSDSKEDDGQEIA

SEQ ID NO: 67413 - protein, 29 aa, Homo sapiens
MGVHVGAALGALWFCLTADRYQTAGAQLC

SEQ ID NO: 67414 - protein, 1044 aa, Homo sapiens
MYLTGLCFLLGPTQLTQRLPVSRQECPRQEQDIVFLIDGSGSISSRNFATMMNFVRAVISQFQRPSTQFSLMQFSNKFQTHFTFEEFRRSSNPLSLLASVHQLQGFTYTATAIQNVVHRLFHASYGARRDAAKILIVITDGKKEGDSLDYKDVIPMADAAGIIRYAIGVGLAFQNRNSWKELNDIASKPSQEHIFKVEDFDALKDIQNQLKEKIFAIEGTETTSSSSFELEMAQEGFSAVFTPDGPVLGAVGSFTWSGGAFLYPPNMSPTFINMSQENVDMRDSYLGYSTELALWKGVQSLVLGAPRYQHTGKAVIFTQVSRQWRMKAEVTGTQIGSYFGASLCSVDVDSDGSTDLVLIGAPHYYEQTRGGQVSVCPLPRGWRRWWCDAVLYGEQGHPWGRFGAALTVLGDVNGDKLTDVVIGAPGEEENRGAVYLFHGVLGPSISPSHSQRIAGSQLSSRLQYFGQALSGGQDLTQDGLVDLAVGARGQVLLLRTRPVLWVGVSMQFIPAEIPRSAFECREQVVSEQTLVQSNICLYIDKRSKNLLGSRDLQSSVTLDLALDPGRLSPRATFQETKNRSLSRVRVLGLKAHCENFNLLLPSCVEDSVTPITLRLNFTLVGKPLLAFRNLRPMLAADAQRYFTASLPFEKNCGADHICQDNLGISFSFPGLKSLLVGSNLELNAEVMVWNDGEDSYGTTITFSHPAGLSYRYVAEGQKQGQLRSLHLTCDSAPVGSQGTWSTSCRINHLIFRGGAQITFLATFDVSPKAVLGDRLLLTANVSSENNTPRTSKTTFQLELPVKYAVYTVVSSHEQFTKYLNFSESEEKESHVAMHRYQVNNLGQRDLPVSINFWVPVELNQEAVWMDVEVSHPQNPSLRCSSEKIAPPASDFLAHIQKNPVLDCSIAGCLRFRCDVPSFSVQEELDFTLKGNLSFGWVRQILQKKVSVVSVAEITFDTSVYSQLPGQEAFMRAQTTTVLEKYKVHNPTPLIVGSSIGGLLLLALITAVLYKVGFFKRQYKEMMEEANGQIAPENGTQTPSPPSEK

SEQ ID NO: 67415 - protein, 1050 aa, Homo sapiens
MYLTGLCFLLGPTQLTQRLPVSRQECPRQEQDIVFLIDGSGSISSRNFATMMNFVRAVISQFQRPSTQFSLMQFSNKFQTHFTFEEFRRSSNPLSLLASVHQLQGFTYTATAIQNVVHRLFHASYGARRDAAKILIVITDGKKEGDSLDYKDVIPMADAAGIIRYAIGVGLAFQNRNSWKELNDIASKPSQEHIFKVEDFDALKDIQNQLKEKIFAIEGTETTSSSSFELEMAQEGFSAVFTPDGPVLGAVGSFTWSGGAFLYPPNMSPTFINMSQENVDMRDSYLGYSTELALWKGVQSLVLGAPRYQHTGKAVIFTQVSRQWRMKAEVTGTQIGSYFGASLCSVDVDSDGSTDLVLIGAPHYYEQTRGGQVSVCPLPRGWRRWWCDAVLYGEQGHPWGRFGAALTVLGDVNGDKLTDVVIGAPGEEENRGAVYLFHGVLGPSISPSHSQRIAGSQLSSRLQYFGQALSGGQDLTQDGLVDLAVGARGQVLLLRTRPVLWVGVSMQFIPAEIPRSAFECREQVVSEQTLVQSNICLYIDKRSKNLLGSRDLQSSVTLDLALDPGRLSPRATFQETKNRSLSRVRVLGLKAHCENFNLLLPSCVEDSVTPITLRLNFTLVGKPLLAFRNLRPMLAADAQRYFTASLPFEKNCGADHICQDNLGISFSFPGLKSLLVGSNLELNAEVMVWNDGEDSYGTTITFSHPAGLSYRYVAEGQKQGQLRSLHLTCDSAPVGSQGTWSTSCRINHLIFRGGAQITFLATFDVSPKAVLGDRLLLTANVSSENNTPRTSKTTFQLELPVKYAVYTVVSSHEQFTKYLNFSESEEKESHVAMHRYQVNNLGQRDLPVSINFWVPVELNQEAVWMDVEVSHPQNPSLRCSSEKIAPPASDFLAHIQKNPVLDCSIAGCLRFRCDVPSFSVQEELDFTLKGNLSFGWVRQILQKKVSVVSVAEITFDTSVYSQLPGQEAFMRAQTTTVLEKYKVHNPTPLIVGSSIGGLLLLALITAVLYKVGFFKRQYKEMMEEANGQIAPENGTQTPSPPTPHYPQDNV

SEQ ID NO: 67416 - protein, 603 aa, Homo sapiens [sequence omitted]

SEQ ID NO: 67417 - protein, 362 aa, Homo sapiens [sequence omitted]

SEQ ID NO: 67418 - protein, 65 aa, Homo sapiens
MSLFVGGTLVVLSGVLLLCKRCWDVHQRLNRAMEEAEKTTTTYLDNGTHPAQDWAQLDSDSSLFP

SEQ ID NO: 67419 - protein, 38 aa, Homo sapiens
MIIYLTFPVAMFWVSNQAEWFEDDVIQRKRELWPPEKP

SEQ ID NO: 67420 - protein, 507 aa, Homo sapiens
MGRVPLAWCLALCGWACMAPRGTQAEESPFVGNPGNITGARGLTGTLRCQLQVQGEPPEVHWLRDGQILELADSTQTQVPLGEDEQDDWIVVSQLRITSLQLSDTGQYQCLVFLGHQTFVSQPGYVGLEGLPYFLEEPEDRTVAANTPFNLSCQAQGPPEPVDLLWLQDAVPLATAPGHGPQRSLHVPGLNKTSSFSCEAHNAKGVTTSRTATITVLPQQPRNLHLVSRQPTELEVAWTPGLSGIYPLTHCTLQAVLSDDGMGIQAGEPDPPEEPLTSQASVPPHQLRLGSLHPHTPYHIRVACTSSQGPSSWTHWLPVETPEGVPLGPPENISATRNGSQAFVHWQEPRAPLQGTLLGYRLAYQGQDTPEVLMDIGLRQEVTLELQGDGSVSNLTVCVAAYTAAGDGPWSLPVPLEAWRPGQAQPVHQLVKEPSTPAFSWPWWYVLLGAVVAAACVLILALFLVHRRKKETRYGEVFEPTVERGELVVRYRVRKSYSRRTTEATCK

SEQ ID NO: 67421 - protein, 335 aa, Homo sapiens [sequence omitted]

SEQ ID NO: 67422 - protein, 127 aa, Homo sapiens
MTVLILLLLPTGQAAPKDGVTRPDSEVQHQLLPNPFQPGQEQLGLLQSYLKGLGRTEVQLEHLSREQVLLYLFALHDYDQSGQLDGLELLSMLTAALAPGAANSPTTNPGNLDARLDGGEKAMQPQW

SEQ ID NO: 67423 - protein, 430 aa, Homo sapiens
MLGFLGGVSWAMLVARTCQLYPNAAASTLVHKFFLVFSKWEWPNPVLLKQPEESNLNLPVWDPRVNPSDRYHLMPIITPAYPQQNSTYNVSTSTRTVMVEEFKQGLAVTDEILQGKSDWSKLLEPPNFFQKYRHYIVLTASASTEENHLEWVGLVESKIRVLVGNLERNEFITLAHVNPQSFPGNKEHHKDNNYVSMWFLGIIFRRVENAESVNIDLTYDIQSFTDTVYRQANNINMLKEGMKIEATHVKKKQLHHYLPAEILQKKKKQSLSDVNRSSGGLQSKRLSLDSSCLDSSRDTDNGTPFNSPASKSDSPSVGETERNSAEPAAVIVEKPLSVPPAQGLSIPVIGAKVDSTVKTVSPPTVCTIPTVVGRNVIPRITTPHNPAQGQPHLNGMSNITKTVTPKRSHSPSIDGTPKRLKDVEKVKLQL

SEQ ID NO: 67424 - protein, 99 aa, Homo sapiens [sequence omitted]

SEQ ID NO: 67425 - protein, 47 aa, Homo sapiens
MVSVSGGLAAFLLSFLECFGGEDYGSQGRHFRQPVRGEQCFGPAISV

SEQ ID NO: 67426 - protein, 269 aa, Homo sapiens
MVVLLGATTLVLVAVAPWVLSAAAGGKNLKSPQKVEVDIIDDNFILRWNRSDESVGNVTFSFDYQKTGMDNWIKLSGCQNITSTKCNFSSLKLNVYEEIKLRIRAEKENTSSWYEVDSFTPFRKAQIGPPEVHLEAEDKAIVIHISPGTKDSVMWALDGLSFTYSLVIWKNSSGVEERIENIYSRHKIYKLSPETTYCLKVKAALLTSWKIGVYSPVHCIKTTVENELPPPENIEVSVQNQNYVLKWDYTYANMTFQVQWLHLYFRRPR

SEQ ID NO: 67427 - protein, 39 aa, Homo sapiens
MAAGAVFLALSAQLLQARLMKEESPVVSWRLEPEDGTAL

SEQ ID NO: 67428 - protein, 259 aa, Homo sapiens
MGTAALGPVWAALLLFLLMCEIPMVELTFDRAVASGCQRCCDSEDPLDPAHVSSASSSGRPHALPEIRPYINITILKGDKGDPGPMGLPGYMGREGPQGEPGPQGSKGDKGEMGSPGAPCQKRFFAFSVGRKTALHSGEDFQTLLFERVFVNLDGCFDMATGQFAAPLRGIYFFSLNVHSWNYKETYVHIMHNQKEAVILYAQPSERSIMQSQSVMLDLAYGDRVWVRLFKRQRENAIYSNDFDTYITFSGHLIKAEDD

SEQ ID NO: 67429 - protein, 213 aa, Homo sapiens
MRPLRPRAALLALLASLLAAPPVAPAEAPHLVHVDAARALWPLRRFWRSTGFCPPLPHSQADQYVLSWDQQLNLAYVGAVPHRGIKQVRTHWLLELVTTRGSTGRGLSYNFTHLDGYLDLLRENQLLPGFELMGSASGHFTDFEDKQQVFEWKDLVSSLARRYIGGRAQALGPWPGRGYSWAGCTPITQAAAWSGDTLVGRRRPLWGDGGDKG

SEQ ID NO: 67430 - protein, 89 aa, Homo sapiens
MNFLTELSFGLLPFTLDVTCSSLPPAMIVRPPKPCGTMGVYLHKTLFLPATIHVRYDLLLLAFHHDCEACPDMWNSDISLLRYSLAQKG

SEQ ID NO: 67431 - protein, 51 aa, Homo sapiens
MVVFIILVIGVCTCCHPLRKRRKRKKKEEEMETLGKDITPINEDIEETNIA

SEQ ID NO: 67432 - protein, 1084 aa, Homo sapiens
MVDNKRMRTASNFQWLLSTFILLYLMNQVNSQKKGAPHDLKCVTNNLQVWNCSWKAPSGTGRGTDYEVCIENRSRSCYQLEKTSIKIPALSHGDYEITINSLHDFGSSTSKFTLNEQNVSLIPDTPEILNLSADFSTSTLYLKWNDRGSVFPHRSNVIWEIKVLRKESMELVKLVTHNTTLNGKDTLHHWSWASDMPLECAIHFVEIRCYIDNLHFSGLEEWSDWSPVKNISWIPDSQTKVFPQDKVILVGSDITFCCVSQEKVLSALIGHTNCPLIHLDGENVAIKIRNISVSASSGTNVVFTTEDNIFGTVIFAGYPPDTPQQLNCETHDLKEIICSWNPGRVTALVGPRATSYTLVESFSGKYVRLKRAEAPTNESYQLLFQMLPNQEIYNFTLNAHNPLGRSQSTILVNITEKVYPHTPTSFKVKDINSTAVKLSWHLPGNFAKINFLCEIEIKKSNSVQEQRNVTIKGVENSSYLVALDKLNPYTLYTFRIRCSTETFWKWSKWSNKKQHLTTEASPSKGPDTWREWSSDGKNLIIYWKPLPINEANGKILSYNVSCSSDEETQSLSEIPDPQHKAEIRLDKNDYIISVVAKNSVGSSPPSKIASMEIPNDDLKIEQVVGMGKGILLTWHYDPNMTCDYVIKWCNSSRSEPCLMDWRKVPSNSTETVIESDEFRPGIRYNFFLYGCRNQGYQLLRSMIGYIEELAPIVAPNFTVEDTSADSILVKWEDIPVEELRGFLRGYLFYFGKGERDTSKMRVLESGRSDIKVKNITDISQKTLRIADLQGKTSYHLVLRAYTDGGVGPEKSMYVVTKENSVGLIIAILIPVAVAVIVGVVTSILCYRKREWIKETFYPDIPNPENCKALQFQKSVCEGSSALKTLEMNPCTPNNVEVLETRSAFPKIEDTEIISPVAERPEDRSDAEPENHVVVSYCPPIIEEEIPNPAADEAGGTAQVIYIDVQSMYQPQAKPEEEQENDPVGGAGYKPQMHLPINSTVEDIAAEEDLDKTAGYRPQANVNTWNLVSPDSPRSIDSNSEIVSFGSPCSINSRQFLIPPKDEDSPKSNGGGWSFTNFFQNKPND

SEQ ID NO: 67433 - protein, 550 aa, Homo sapiens [sequence omitted]

SEQ ID NO: 67434 - protein, 732 aa, Homo sapiens
MMWTWALWMLPSLCKFSLAALPAKPENISCVYYYRKNLTCTWSPGKETSYTQYTVKRTYAFGEKHDNCTTNSSTSENRASCSFFLPRITIPDNYTIEVEAENGDGVIKSHMTYWRLENIAKTEPPKIFRVKPVLGIKRMIQIEWIKPELAPVSSDLKYTLRFRTVNSTSWMEVNFAKNRKDKNQTYNLTGLQPFTEYVIALRCAVKESKFWSDWSQEKMGMTEEEAPCGLELWRVLKPAEADGRRPVRLLWKKARGAPVLEKTLGYNIWYYPESNTNLTETMNTTNQQLELHLGGESFWVSMISYNSLGKSPVATLRIPAIQEKSFQCIEVMQACVAEDQLVVKWQSSALDVNTWMIEWFPDVDSEPTTLSWESVSQATNWTIQQDKLKPFWCYNISVYPMLHDKVGEPYSIQAYAKEGVPSEGPETKVENIGVKTVTITWKEIPKSERKGIICNYTIFYQAEGGKGFSKTVNSSILQYGLESLKRKTSYIVQVMASTSAGGTNGTSINFKTLSFSVFEIILITSLIGGGLLILIILTVAYGLKKPNKLTHLCWPTVPNPAESSIATWHGDDFKDKLNLKESDDSVNTEDRILKPCSTPSDKLVIDKLVVNFGNVLQEIFTDEARTGQENNLGGEKNGYVTCPFRPDCPLGKSFEELPVSPEIPPRKSQYLRSRMPEGTRPEAKEQLLFSGQSLVPDHLCEEGAPNPYLKNSVTAREFLVSEKLPEHTKGEV

SEQ ID NO: 67435 - protein, 518 aa, Homo sapiens
MFNIHRGFYCLTAILPQICICSQFSVPSSYHFTEDPGAFPVATNGERFPWQELRLPSVVIPLHYDLFVHPNLTSLDFVASEKIEVLVSNATQFIILHSKDLEITNATLQSEEDSRYMKPGKELKVLSYPAHEQIALLVPEKLTPHLKYYVAMDFQAKLGDGFEGFYKSTYRTLGGETRILAVTDFEPTQARMAFPCFDEPLFKANFSIKIRRESRHIALSNMPKVKTIELEGGLLEDHFETTVKMSTYLVAYIVCDFHSLSGFTSSGVKVSIYASPDKRNQTHYALQASLKLLDFYEKYFDIYYPLSKLDLIAIPDFAPGAMENWGLITYRETSLLFDPKTSSASDKLWVTRVIAHELAHQWFGNLVTMEWWNDIWLKEGFAKYMELIAVNATYPELQFDDYFLNVCFEVITKDSLNSSRPISKPAETPTQIQEMFDEVSYNKGACILNMLKDFLGEEKFQKGIIQYLKKFSYRNAKNDDLWSSLSNSCLESDFTSGGVCHSDPKMTSNMVRIKRVTE

SEQ ID NO: 67436 - protein, 35 aa, Homo sapiens
MCYLVSSFLIIWCLSKMRHRLVCRVEWERHFDLLA

SEQ ID NO: 67437 - protein, 48 aa, Homo sapiens
MRDSTALTFFLATAMAVQWMEMERTVFLRMRPLNTQLELWLCLRKPHL

SEQ ID NO: 67438 - protein, 203 aa, Homo sapiens
MEPAAALHFSRPASLLLLLSLCALVSAQVTVVGPTDPILAMVGENTTLRCCLSPEENAEDMEVRWFQSQFSPAVFVYKGGRERTEEQKEEYRGRTTFVSKDSRGSVALIIHNVTAEDNGIYQCYFQEGRSCNEAILHLVVAGALLHFALLLWHCVTLGKASLLNSSPLQTSTILFPGSPFRRDTLPMKRRFQGKILPPAQGPP

SEQ ID NO: 67439 - protein, 18 aa, Homo sapiens
MLLSGPGSVACVLLLAAP

SEQ ID NO: 67440 - protein, 377 aa, Homo sapiens
MAFRGWRPPPPPLLLLLLWVTGQAAPVAGLGSDAELQIERRFVPDECPRTVRSGDFVRYHYVGTFPDGQKFDSSYDRDSTFNVFVGKGQLITGMDQALVGMCVNERRFVKIPPKLAYGNEGVSGVIPPNSVLHFDVLLMDIWNSEDQVQIHTYFKPPSCPRTIQVSDFVRYHYNGTFLDGTLFDSSHNRMKTYDTYVGIGWLIPGMDKGLLGMCVGEKRIITIPPFLAYGEDGDGKDIPGQASLVFDVALLDLHNPKDSISIENKVVPENCERISQSGDFLRYHYNGTLLDGTLFDSSYSRNRTFDTYIGQGYVIPGMDEGLLGVCIGEKRRIVVPPHLGYGEEGRGEHQHHLPSSLAVAASTLLETGLLFLFLLSF

SEQ ID NO: 67441 - protein, 15 aa, Homo sapiens
MPPRAAWAWLLCGAS

SEQ ID NO: 67442 - protein, 391 aa, Homo sapiens
MPFITYLSGLLTAQMLSDDQLISGVEIRCEEKGRCPSTCHLCRRPGKEQLSPTPVLLEINRVVPLYTLIQDNGTKEAFKSALMSSYWCSGKGDVIDDWCRCDLSAFDANGLPNCSPLLQPVLRLSPTVEPSSTVVSLEWVDVQPAIGTKVSDYILQHKKVDEYTDTDLYTGEFLSFADDLLSGLGTSCVAAGRSHGEVPEVSIYSVIFKCLEPDGLYKFTLYAVDTRGRHSELSTVTLRTACPLVDDNKAEEIADKIYNLYNGYTSGKEQQMAYNTLMEVSASMLFRVQHHYNSHYEKFGDFVWRSEDELGPRKAHLILRRLERVSSHCSSLLRSAYIQSRVETVPYLFCRSEEVRPAGMVWYSILKDTKITCEEKMVSMARNTYGESKGR

SEQ ID NO: 67443 - protein, 38 aa, Homo sapiens
RLWWALIQLGYLRSIGHTLLETGKMANTCRLFCVTHWG

SEQ ID NO: 67444 - protein, 516 aa, Homo sapiens
LTWTTLLLLARPFNSPPLRSGLAPPPDLSLVLLQALTLDLRWLPHLSGAMATGADVRDILELGGPEGDAASGTISKKDIINPDKKKSKKSSETLTFKRPEGMHREVYALLYSDKKDAPPLLPSDTGQGYRTVKAKLGSKKVRPWKWMPFTNPARKDGAMFFHWRRAAEEGKDYPFARFNKTVQVPVYSEQEYQLYLHDDAWTKAETDHLFDLSRRFDLRFVVIHDRYDHQQFKKRSVEDLKERYYHICAKLANVRAVPGTDLKIPVFDAGHERRRKEQLERLYNRTPEQVAEEEYLLQELRKIEARKKEREKRSQDLQKLITAADTTAEQRRTERKAPKKKLPQKKEAEKPAVPETAGIKFPDFKSAGVTLRSQRMKLPSSVGQKKIKALEQMLLELGVELSPTPTEELVHMFNELRSDLVLLYELKQACANCEYELQMLRHRHEALARAGVLGGPATPASGPGPASAEPAVTEPGLGPDPKDTIIDVVGAPLTPNSRKRRESASSSSSVKKAKKP

SEQ ID NO: 67445 - protein, 209 aa, Homo sapiens
RPRAMEFLWAPLLGLCCSLAAADRHTVFWNSSNPKFRNEDYTIHVQLNDYVDIICPHYEDHSVADAAMEQYILYLVEHEEYQLCQPQSKDQVRWQCNRPSAKHGPEKLSEKFQRFTPFTLGKEFKEGHSYYYISKPIHQHEDRCLRLKVTVSGKITHSPQAHDNPQEKRLAADDPEVRVLHSIGHSAAPRLFPLAWTVLLLPLLLLQTP

SEQ ID NO: 67446 - protein, 546 aa, Homo sapiens
VVSCPRMGTTARAALVLTYLAVASAASEGGFTATGQRQLRPEHFQEVGYAAPPSPPLSRSLPMDHPDSSQHGPPFEGQSQVQPPPSQEATPLQQEKLLPAQLPAEKEVGPPLPQEAVPLQKELPSLQHPNEQKEGTPAPFGDQSHPEPESWNAAQHCQQDRSQGGWGHRLDGFPPGRPSPDNLNQICLPNRQHVVYGPWNLPQSSYSHLTRQGETLNFLEIGYSRCCHCRSHTNRLECAKLVWEEAMSRFCEAEFSVKTRPHWCCTRQGEARFSCFQEEAPQPHYQLRACPSHQPDISSGLELPFPPGVPTLDNIKNICHLRRFRSVPRNLPATDPLQRELLALIQLEREFQRCCRQGNNHTCTWKAWEDTLDKYCDREYAVKTHHHLCCRHPPSPTRDECFARRAPYPNYDRDILTIDIGRVTPNLMGHLCGNQRVLTKHKHIPGLIHNMTARCCDLPFPEQACCAEEEKLTFINDLCGPRRNIWRDPALCCYLSPGDEQVNCFNINYLRNVALVSGDTENAKGQGEQGSTGGTNISSTSEPKEE

SEQ ID NO: 67447 - protein, 2033 aa, Homo sapiens
LLPLLVVAACVLPGAGGTCPERALERREEEANVVLTGTVEEILNVDPVQHTYSCKVRVWRYLKGKDLVARESLLDGGNKVVISGFGDPLICDNQVSTGDTRIFFVNPAPPYLWPAHKNELMLNSSLMRITLRNLEEVEFCVEDKPGTHFTPVPPTPPDACRGMLCGFGAVCEPNAEGPGRASCVCKKSPCPSVVAPVCGSDASTYSNECELQRAQCSQQRRIRLLSRGPCGSRDPCSNVTCSFGSTCARSADGLTASCLCPATCRGAPEGTVCGSDGADYPGECQLLRRACARQENVFKKFDGPCDPCQGALPDPSRSCRVNPRTRRPEMLLRPESCPARQAPVCGDDGVTYENDCVMGRSGAARGLLLQKVRSGQCQGRDQCPEPCRFNAVCLSRRGRPRCSCDRVTCDGAYRPVCAQDGRTYDSDCWRQQAECRQQRAIPSKHQGPCDQAPSPCLGVQCAFGATCAVKNGQAACECLQACSSLYDPVCGSDGVTYGSACELEATACTLGREIQVARKGPCDRCGQCRFGALCEAETGRCVCPSECVALAQPVCGSDGHTYPSECMLHVHACTHQISLHVASAGPCETCGDAVCAFGAVCSAGQCVCPRCEHPPPGPVCGSDGVTYGSACELREAACLQQTQIEEARAGPCEQAECGSGGSGSGEDGDCEQELCRQRGGIWDEDSEDGPCVCDFSCQSVPGSPVCGSDGVTYSTECELKKARCESQRGLYVAAQGACRGPTFAPLPPVAPLHCAQTPYGCCQDNITAARGVGLAGCPSACQCNPHGSYGGTCDPATGQCSCRPGVGGLRCDRCEPGFWNFRGIVTDGRSGCTPCSCDPQGAVRDDCEQMTGLCSCKPGVAGPKCGQCPDGRALGPAGCEADASAPATCAEMRCEFGARCVEESGSAHCVCPMLTCPEANATKVCGSDGVTYGNECQLKTIACRQGLQISIQSLGPCQEAVAPSTHPTSASVTVTTPGLLLSQALPAPPGALPLAPSSTAHSQTTPPPSSRPRTTASVPRTTVWPVLTVPPTAPSPAPSLVASAFGESGSTDGSSDEELSGDQEASGGGSGGLEPLEGSSVATPGPPVERASCYNSALGCCSDGKTPSLDAEGSNCPATKVFQGVLELEGVEGQELFYTPEMADPKSELFGETARSIESTLDDLFRNSDVKKDFRSVRLRDLGPGKSVRAIVDVHFDPTTAFRAPDVARALLRQIQVSRRRSLGVRRPLQEHVRFMDFDWFPAFITGATSGAIAAGATARATTASRLPSSAVTPRAPHPSHTSQPVAKTTAAPTTRRPPTTAPSRVPGRRPPAPQQPPKPCDSQPCFHGGTCQDWALGGGFTCSCPAGRGGAVCEKVLGAPVPAFEGRSFLAFPTLRAYHTLRLALEFRALEPQGLLLYNGNARGKDFLALALLDGRVQLRFDTGSGPAVLTSAVPVEPGQWHRLELSRHWRRGTLSVDGETPVLGESPSGTDGLNLDTDLFVGGVPEDQAAVALERTFVGAGLRGCIRLLDVNNQRLELGIGPGAATRGSGVGECGDHPCLPNPCHGGAPCQNLEAGRFHCQCPPGRVGPTCADEKSPCQPNPCHGAAPCRVLPEGGAQCECPLGREGTFCQTASGQDGSGPFLADFNGFSHLELRGLHTFARDLGEKMALEVVFLARGPSGLLLYNGQKTDGKGDFVSLALRDRRLEFRYDLGKGAAVIRSREPVTLGAWTRVSLERNGRKGALRVGDGPRVLGESPVPHTVLNLKEPLYVGGAPDFSKLARAAAVSSGFDGAIQLVSLGGRQLLTPEHVLRQVDVTSFAGHPCTRASGHPCLNGASCVPREAAYVCLCPGGFSGPHCEKGLVEKSAGDVDTLAFDGRTFVEYLNAVTESEKALQSNHFELSLRTEATQGLVLWSGKATERADYVALAIVDGHLQLSYNLGSQPVVLRSTVPVNTNRWLRVVAHREQREGSLQVGNEAPVTGSSPLGATQLDTDGALWLGGLPELPVGPALPKAYGTGFVGCLRDVVVGRHPLHLLEDAVTKPELRPCPTP

SEQ ID NO: 67448 - protein, 33 aa, Homo sapiens
ITPWWTLWNFLITTHPLFIPISCVGCCGELWRW

SEQ ID NO: 67449 - protein, 144 aa, Homo sapiens
LPLLTKMNSLVSWQLLLFLCATHFGEPLEKVASVGNSRPTGQQLESLGLLAPGEQSLPCTERKPAATARLSRRGTSLSPPPESSGSPQQPGLSAPHSRQIPAPQGAVLVQREKDLPNYNWNSFGLRFGKREAAPGNHGRSAGRG

SEQ ID NO: 67450 - protein, 14 aa, Homo sapiens
LLSLAVTLLSVLSF

SEQ ID NO: 67451 - protein, 12 aa, Homo sapiens
LLVVFVFFSAVL

SEQ ID NO: 67452 - protein, 296 aa, Homo sapiens
KAQVERKLLCLFILAILLCSLALGSVTVHSSEPEVRIPENNPVKLSCAYSGFSSPRVEWKFDQGDTTRLVCYNNKITASYEDRVTFLPTGITFKSVTREDTGTYTCMVSEEGGNSYGEVKVKLIVLVPPSKPTVNIPSSATIGNRAVLTCSEQDGSPPSEYTWFKDGIVMPTNPKSTRAFSNSSYVLNPTTGELVFDPLSASDTGEYSCEARNGYGTPMTSNAVRMEAVERNVGVIVAAVLVTLILLGILVFGIWFAYSRGHFDRTKKGTSSKKVIYSQPSARSEGEFKQTSSFLV

SEQ ID NO: 67453 - protein, 378 aa, Homo sapiens
VGSQLAVMMYLSLGGFRSLSALFGRDQGPTFDYSHPRDVYSNLSHLPGAPGGPPAPQGLPYCPERSPLLVGPVSVSFSPVPSLAEIVERNPRVEPGGRYRPAGCEPRSRTAIIVPHRAREHHLRLLLYHLHPFLQRQQLAYGIYVIHQAGNGTFNRAKLLNVGVREALRDEEWDCLFLHDVDLLPENDHNLYVCDPRGPRHVAVAMNKFGYSLPYPQYFGGVSALTPDQYLKMNGFPNEYWGWGGEDDDIATRVRLAGMKISRPPTSVGHYKMVKHRGDKGNEENPHRFDLLVRTQNSWTQDGMNSLTYQLLARELGPLYTNITADIGTDPRGPRAPSGPRYPPGSSQAFRQEMLQRRPPARPGPLSTANHTALRGSH

SEQ ID NO: 67454 - protein, 106 aa, Homo sapiens
LAALLSFLGLSLPPGLALAVLVTTFHKYSCQEGDKFKLSKGEMKELLHKELPSFVGEKVDEEGLKKLMGSLDENSDQQVDFQEYAVFLALITVMCNDFFQGCPDRP

SEQ ID NO: 67455 - protein, 296 aa, Homo sapiens
TWMAGILASGLGVLAHLERLETQVSRSRKQSEELQSVQAQEGALGTKIHKLRRLRDELRAVVRHRRASVKACIANVEPNQTVEINEQEALEEKLENVKAILQAYHFTGLSGKLTSRGVCVCISTAFEGNLLDSYFVDLVIQKPLRIHHHSVPVFIPLEEIAAKYLQTNIQHFLFSLCEYLNAYSGRKYQADRLQSDFAALLTGPLQRNPLCNLLSFTYKLDPGGQSFPFCARLLYKDLTATLPTDVTVTCQGVEVLSTSWEEQRASHETLFCTKPLHQVFASFTRKGEKLDMSLVS

SEQ ID NO: 67456 - protein, 492 aa, Homo sapiens
LKALFLTMLTLALVKSQDTEETITYTQCTDGYEWDPVRQQCKDIDECDIVPDACKGGMKCVNHYGGYLCLPKTAQIIVNNEQPQQETQPAEGTSGATTGVVAASSMATSGVLPGGGFVASAAAVAGPEMQTGRNNFVIRRNPADPQRIPSNPSHRIQCAAGYEQSEHNVCQDIDECTAGTHNCRADQVCINLRGSFACQCPPGYQKRGEQCVDIDECTIPPYCHQRCVNTPGSFYCQCSPGFQLAANNYTCVDINECDASNQCAQQCYNILGSFICQCNQGYELSSDRLNCEDIDECRTSSYLCQYQCVNEPGKFSCMCPQGYQVVRSRTCQDINECETTNECREDEMCWNYHGGFRCYPRNPCQDPYILTPENRCVCPVSNAMCRELPQSIVYKYMSIRSDRSVPSDIFQIQATTIYANTINTFRIKSGNENGEFYLRQTSPVSAMLVLVKSLSGPREHIVDLEMLTVSSIGTFRTSSVLRLTIIVGPFSF

SEQ ID NO: 67457 - protein, 211 aa, Homo sapiens
IVFFYLWGLFTAQRQKKEESTEEVKIEVLHRPENCSKTSKKGDLLNAHYDGYLAKDGSKFYCSRTQNEGHPKWFVLGVGQVIKGLDIAMTDMCPGEKRKVVIPPSFAYGKEGYAEGKIPPDATLIFEIELYAVTKGPRSIETFKQIDMDNDRQLSKAEINLYLQREFEKDEKPRDKSYQDAVLEDIFKKNDHDGDGFISPKEYNVYQHDEL

SEQ ID NO: 67458 - protein, 409 aa, Homo sapiens
IQRARSSLVEGTMNWHLPLFLLASVTLPSICSHFNPLSLEELGSNTGIQVFNQIVKSRPHDNIVISPHGIASVLGMLQLGADGRTKKQLAMVMRYGVNGVGKILKKINKAIVSKKNKDIVTVANAVFVKNASEIEVPFVTRNKDVFQCEVRNVNFEDPASACDSINAWVKNETRDMIDNLLSPDLIDGVLTRLVLVNAVYFKGLWKSRFQPENTKKRTFVAADGKSYQVPMLAQLSVFRCGSTSAPNDLWYNFIELPYHGESISMLIALPTESSTPLSAIIPHISTKTIDSWMSIMVPKRVQVILPKFTAVAQTDLKEPLKVLGITDMFDSSKANFAKITRSENLHVSHILQKAKIEVSEDGTKASAATTAILIARSSPPWFIVDRPFLFFIRHNPTGAVLFMGQINKP

SEQ ID NO: 67459 - protein, 43 aa, Homo sapiens
MFFSWMVLMVVDVLQCLDIKILGMQHHMRGLKNKIKKEKRTQS

SEQ ID NO: 67460 - protein, 31 aa, Homo sapiens
KALLIPYVWFTVCRLGVSADHLECCPLEQEE

SEQ ID NO: 67461 - protein, 893 aa, Homo sapiens
RNFWPARLATRLLKLRYLILGSAVGGGYTAKKTFDQWKDMIPDLSEYKWIVPDIVWEIDEYIDFEKIRKALPSSEDLVKLAPDFDKIVESLSLLKDFFTSGHKLVSEVIGASDLLLLLGSPEETAFRATDRGSESDKHFRKVSDKEKIDQLQEELLHTQLKYQRILERLEKENKELRKLVLQKDDKGIHHRKLKKSLIDMYSEVLDVLSDYDASYNTQDHLPRVVVVGDQSAGKTSVLEMIAQARIFPRGSGEMMTRSPVKVTLSEGPHHVALFKDSSREFDLTKEEDLAALRHEIELRMRKNVKEGCTVSPETISLNVKGPGLQRMVLVDLPGVINTVTSGMAPDTKETIFSISKAYMQNPNAIILCIQDGSVDAERSIVTDLVSQMDPHGRRTIFVLTKVDLAEKNVASPSRIQQIIEGKLFPMKALGYFAVVTGKGNSSESIEAIREYEEEFFQNSKLLKTSMLKAHQVTTRNLSLAVSDCFWKMVRESVEQQADSFKATRFNLETEWKNNYPRLRELDRNELFEKAKNEILDEVISLSQVTPKHWEEILQQSLWERVSTHVIENIYLPAAQTMNSGTFNTTVDIKLKQWTDKQLPNKAVEVAWETLQEEFSRFMTEPKGKEHDDIFDKLKEAVKEESIKRHKWNDFAEDSLRVIQHNALEDRSISDKQQWDAAIYFMEEALQARLKDTENAIENMVGPDWKKRWLYWKNRTQEQCVHNETKNELEKMLKCNEEHPAYLASDEITTVRKNLESRGVEVDPSLIKDTWHQVYRRHFLKTALNHCNLCRRGFYYYQRHFVDSELECNDVVLFWRIQRMLAITANTLRQQLTNTEVRRLEKNVKEVLEDFAEDGEKKIKLLTGKRVQLAEDLKKVREIQEKLDAFIEALHQEK

SEQ ID NO: 67462 - protein, 170 aa, Homo sapiens
LAALLAFVSLSLQFFHLIPVSTPKNGMSSKSRKRIMPDPVTEPPVTDPVYEALLYCNIPSVAERSMEGHAPHHFKLVSVHVFIRHGDRYPLYVIPKTKRPEIDCTLVANRKPYHPKLEAFISHMSKGSGASFESPLNSLPLYPNHPLCEMGELTQTVRRWLSASQEERPH

SEQ ID NO: 67463 - protein, 40 aa, Homo sapiens
IFVSALLMYPQQPELPDMSVIAALLIILPTADPFCETPGC

SEQ ID NO: 67464 - protein, 110 aa, Homo sapiens
LSPMARAALSAAPSNPRLLRVALLLLLLVAAGRRAAGASVATELRCQCLQTLQGIHPKNIQSVNVKSPGPHCAQTEVIATLKNGRKACLNPASPIVKKIIEKMLNSDKSN

SEQ ID NO: 67465 - protein, 232 aa, Homo sapiens
ICSLTLLSFLLLAAQVLLVEGKKKVKNGLHSKVVSEQKDTLGNTQIKQKSRPGNKGKFVTKDQANCRWAATEQEEGISLKVECTQLDHEFSCVFAGNPTSCLKLKDERVYWKQVARNLRSQKDICRYSKTAVKTRVCRKDFPESSLKLVSSTLFGNTKPRKEKTEMSPREHIKGKETTPSSLAVTQTMATKAPECVEDPDMANQRKTALEFCGETWSSLCTFFLSIVQDTSC

SEQ ID NO: 67466 - protein, 353 aa, Homo sapiens
RVRSFLRGLPALLLLLLFLGPWPAASHGGKYSREKNQPKPSPKRESGEEFRMEKLNQLWEKAQRLHLPPVRLAELHADLKIQERDELAWKKLKLDGLDEDGEKEARLIRNLNVILAKYGLDGKKDARQVTSNSLSGTQEDGLDDPRLEKLWHKAKTSGKFSGEELDKLWREFLHHKEKVHEYNVLLETLSRTEEIHENVISPSDLSDIKGSVLHSRHTELKEKLRSINQGLDRLRRVSHQGYSTEAEFEEPRVIDLWDLAQSANLTDKELEAFREELKHFEAKIEKHNHYQKQLEIAHEKLRHAESVGDGERVSRSREKHALLEGRTKELGYTVKKHLQDLSGRISRARHNEL

SEQ ID NO: 67467 - protein, 11 aa, Homo sapiens
IFPVIMLLLTH

SEQ ID NO: 67468 - protein, 17 aa, Homo sapiens
IKARRRRERPPLVLILF

SEQ ID NO: 67469 - protein, 790 aa, Homo sapiens
VSLHLTRLPQPLIAGMYLMMSVDTVIPAGEKVVNSDISCHYKNYPMHVFAYRVHTHHLGKVVSGYRVRNGQWTLIGRQSPQLPQAFYPVGHPVDVSFGDLLAARCVFTGEGRTEATHIGGTSSDEMCNLYIMYYMEAKHAVSFMTCTQNVAPDMFRTIPPEANIPIPVKSDMVMMHEHHKETEYKDKIPLLQQPKREEEEVLDQGDFYSLLSKLLGEREDVVHVHKYNPTEKAESESDLVAEIANVVQKKDLGRSDAREGAEHERGNAILVRDRIHKFHRLVSTLRPPESRVFSLQQPPPGEGTWEPEHTGDFHMEEALDWPGVYLLPGQVSGVALDPKNNLVIFHRGDHVWDGNSFDSKFVYQQIGLGPIEEDTILVIDPNNAAVLQSSGKNLFYLPHGLSIDKDGNYWVTDVALHQVFKLDPNNKEGPVLILGRSMQPGSDQNHFCQPTDVAVDPGTGAIYVSDGYCNSRIVQFSPSGKFITQWGEESSGSSPLPGQFTVPHSLALVPLLGQLCVADRENGRIQCFKTDTKEFVREIKHSSFGRNVFAISYIPGLLFAVNGKPHFGDQEPVQGFVMNFSNGEIIDIFKPVRKHFDMPHDIVASEDGTVYIGDAHTNTVWKFTLTEKLEHRSVKKAGIEVQEIKEAEAVVETKMENKPTSSELQKMQEKQKLIKEPGSGVPVVLITTLLVIPVVVLLAIAIFIRWKKSRAFGDSEHKLETSSGRVLGRFRGKGSGGLNLGNFFASRKGYSRKGFDRLSTEGSDQEKEDDGSESEEEYSAPLPALAPSSS

SEQ ID NO: 67470 - protein, 37 aa, Homo sapiens
LFLLWVLIMETKRVEIPGSVLDDLCRICEDYFMKTRK

SEQ ID NO: 67471 - protein, 747 aa, Homo sapiens
LFVCVSLQALFMGSPLRFDGRVVLVTGAGAGLGRAYALAFAERGALVVVNDLGGDFKGVGKGSLAADKVVEEIRRRGGKAVANYDSVEEGEKVVKTALDAFGRIDVVVNNAGILRDRSFARISDEDWDIIHRVHLRGSFQVTRAAWEHMKKQKYGRIIMTSSASGIYGNFGQANYSAAKLGLLGLANSLAIEGRKSNIHCNTIAPNAGSRMTQTVMPEDLVEALKPEYVAPLVLWLCHESCEENGGLFEVGAGWIGKLRWERTLGAIVRQKNHPMTPEAVKANWKKICDFENASKPQSIQESTGSIIEVLSKIDSEGGVSANHTSRATSTATSGFAGAIGQKLPPFSYAYTELEAIMYALGVGASIKDPKDLKFIYEGSSDFSCLPTFGVIIGQKSMMGGGLAEIPGLSINFAKVLHGEQYLELYKPLPRAGKLKCEAVVADVLDKGSGVVIIMDVYSYSEKELICHNQFSLFLVGSGGFGGKRTSDKVKVAVAIPNRPPDAVLTDTTSLNQAALYRLSGDWNPLHIDPNFASLAGFDKPILHGLCTFGFSARRVLQQFADNDVSRFKAIKARFAKPVYPGQTLQTEMWKEGNRIHFQTKVQETGDIVISNAYVDLAPTSGTSAKTPSEGGKLQSTFVFEEIGRRLKDIGPEVVKKVNAVFEWHITKGGNIGAKWTIDLKSGSGKVYQGPAKGAADTTIILSDEDFMEVVLGKLDPQKAFFSGRLKARGNIMLSQKLQMILKDYAKL

SEQ ID NO: 67472 - protein, 369 aa, Homo sapiens
KILSHFPMKLHCCLFTLVASIIVPAAFVLEDVDFDQMVSLEANRSSYNASFPSSFELSASSHSDDDVIIAKEGTSVSIECLLTASHYEDVHWHNSKGQQLDGRSRGGKWLVSDNFLNITNVAFDDRGLYTCFVTSPIRASYSVTLRVIFTSGDMSVYYMIVCLIAFTITLILNVTRLCMMSSHLRKTEKAINEFFRTEGAEKLQKAFEIAKRIPIITSAKTLELAKVTQFKTMEFARYIEELARSVPLPPLILNCRAFVEEMFEAVRVDDPDDLGERIKERPALNAQGGIYVINPEMGRSNSPGGDSDDGSLNEQGQEIAVQVSVHLQSETKSIDTESQGSSHFSPPDDIGSAESNCNYKDGAYENCQL

SEQ ID NO: 67473 - protein, 317 aa, Homo sapiens
RARTPRLLLLQCLLAAARPSSADGSAPDSPFTSPPLREEIMANNFSLESHNISLTEHSSMPVEKNITLERPSNVNLTCQFTTSGDLNAVNVTWKKDGEQLENNYLVSATGSTLYTQYRFTIINSKQMGSYSCFFREEKEQRGTFNFKVPELHGKNKPLISYVGDSTVLTCKCQNCFPLNWTWYSSNGSVKVPVGVQMNKYVINGTYANETKLKITQLLEEDGESYWCRALFQLGESEEHIELVVLSYLVPLKPFLVIVAEVILLVATILLCEKYTQKKKKHSDEGKEFEQIEQLKSDDSNGIENNVPRHRKNESLGQ

SEQ ID NO: 67474 - protein, 190 aa, Homo sapiens
VGGTLVAVYAVATPFVTPALRKVCLPFVPATTKQIENVVKMLRCRRGSLVDIGSGDGRIVIAAAKKGFTAVGYELNPWLVWYSRYRAWREGVHGSAKFYISDLWKVTFSQYSNVVIFGVPQMMLQLEKKLERELEDDARVIACRFPFPHWTPDHVTGEGIDTVWAYDASTFRGREKRPCTSMHFQLPIQA

SEQ ID NO: 67475 - protein, 24 aa, Homo sapiens
ILLQLAQDLFPRLCPLALPSLLVL

SEQ ID NO: 67476 - protein, 247 aa, Homo sapiens
LLGCLCLALLCLGGADKRLRDNHEWKKLIMVQHWPETVCEKIQNDCRDPPDYWTIHGLWPDKSEGCNRSWPFNLEEIKDLLPEMRAYWPDVIHSFPNRSRFWKHEWEKHGTCAAQVDALNSQKKYFGRSLELYRELDLNSVLLKLGIKPSINYYQVADFKDALARVYGVIPKIQCLPPSQDEEVQTIGQIELCLTKQDQQLQNCTEPGEQPSPKQEVWLANGAAESRGLRVCEDGPVFYPPPKKTKH

SEQ ID NO: 67477 - protein, 558 aa, Homo sapiens
LLLLLLWVTGQAAPVAGLGSDAELQIERRFVPDECPRTVRSGDFVRYHYVGTFPDGQKFDSSYDRDSTFNVFVGKGQLITGMDQALVGMCVNERRFVKIPPKLAYGNEGVSGVIPPNSVLHFDVLLMDIWNSEDQVQIHTYFKPPSCPRTIQVSDFVRYHYNGTFLDGTLFDSSHNRMKTYDTYVGIGWLIPGMDKGLLGMCVGEKRIITIPPFLAYGEDGDGKDIPGQASLVFDVALLDLHNPKDSISIENKVVPENCERISQSGDFLRYHYNGTLLDGTLFDSSYSRNRTFDTYIGQGYVIPGMDEGLLGVCIGEKRRIVVPPHLGYGEEGRGNIPGSAVLVFDIHVIDFHNPSDSISITSHYKPPDCSVLSKKGDYLKYHYNASLLDGTLLDSTWNLGKTYNIVLGSGQVVLGMDMGLREMCVGEKRTVIIPPHLGYGEAGVDGEVPGSAVLVFDIELLELVAGLPEGYMFIWNGEVSPNLFEEIDKDGNGEVLLEEFSEYIHAQVASGKGKLAPGFDAELIVKNMFTNQDRNGDGKVTAEEFKLKDQEAKHDEL

SEQ ID NO: 67478 - protein, 60 aa, Homo sapiens
LVFFGASILVLPKCPDPKQESVAEIGTWERNNLGNMKVMLVAKGRQLDSVGRAVADPSVV

SEQ ID NO: 67479 - protein, 215 aa, Homo sapiens
IFAICILMITELILASKSYYDILGVPKSASERQIKKAFHKLAMKYHPDKNKSPDAEAKFREIAEAYETLSDANRRKEYDTLGHSAFTSGKGQRGSGSSFEQSFNFNFDDLFKDFGFFGQNQNTGSKKRFENHFQTRQDGGSSRQRHHFQEFSFGGGLFDDMFEDMEKMFSFSGFDSTNQHTVQTENRFHGSSKHCRTVTQRRGNMVTTYTDCSGQ

SEQ ID NO: 67480 - protein, 31 aa, Homo sapiens
LAWRLRINFPYLYIVASMMLNVRLQVHIEIH

SEQ ID NO: 67481 - protein, 29 aa, Homo sapiens
RVFFLGFIIRYLLPFISARMWHLLSFDKD

SEQ ID NO: 67482 - protein, 76 aa, Homo sapiens
MAVSGVEKTRGWLGLALLAALGDPRATPLSPERTRWAMKAAQRRKNKRIRRKRGTGPLWQMEARRPQRNSPQKKFP

SEQ ID NO: 67483 - protein, 214 aa, Homo sapiens
LQAAAGSSRSLGNMRRAWILLTLGLVACVSAESRAELTSDKDMYLDNSSIEEASGVYPIDDDDYASASGSGADEDVESPELTTSRPLPKILLTSAAPKVETTTLNIQNKIPAQTKSPEETDKEKVHLSDSERKMDPAEEDTNVYTEKHSDSLFKRTEVLAAVIAGGVIGFLFAIFLILLLVYRMRKKDEGSYDLGERKPSSAAYQKAPTKEFYA

SEQ ID NO: 67484 - protein, 569 aa, Homo sapiens
KGRCEAIMDAMKRGLCCVLLLCGAVFVSPSQEIHARFRRGARSYQVICRDEKTQMIYQQHQSWLRPVLRSNRVEYCWCNSGRAQCHSVPVKSCSEPRCFNGGTCQQALYFSDFVCQCPEGFAGKCCEIDTRATCYEDQGISYRGTWSTAESGAECTNWNSSALAQKPYSGRRPDAIRLGLGNHNYCRNPDRDSKPWCYVFKAGKYSSEFCSTPACSEGNSDCYFGNGSAYRGTHSLTESGASCLPWNSMILIGKVYTAQNPSAQALGLGKHNYCRNPDGDAKPWCHVLKNRRLTWEYCDVPSCSTCGLRQYSQPQFRIKGGLFADIASHPWQAAIFAKHRRSPGERFLCGGILISSCWILSAAHCFQERFPPHHLTVILGRTYRVVPGEEEQKFEVEKYIVHKEFDDDTYDNDIALLQLKSDSSRCAQESSVVRTVCLPPADLQLPDWTECELSGYGKHEALSPFYSERLKEAHVRLYPSSRCTSQHLLNRTVTDNMLCAGDTRSGGPQANLHDACQGDSGGPLVCLNDGRMTLVGIISWGLGCGQKDVPGVYTKVTNYLDWIRDNMRP

SEQ ID NO: 67485 - protein, 780 aa, Homo sapiens
ISPKTGMERPLCSHLCSCLAMLALLSPLSLAQYDSWPHYPEYFQQPAPEYHQPQAPANVAKIQLRLAGQKRKHSEGRVEVYYDGQWGTVCDDDFSIHAAHVVCRELGYVEAKSWTASSSYGKGEGPIWLDNLHCTGNEATLAACTSNGWGVTDCKHTEDVGVVCSDKRIPGFKFDNSLINQIENLNIQVEDIRIRAILSTYRKRTPVMEGYVEVKEGKTWKQICDKHWTAKNSRVVCGMFGFPGERTYNTKVYKMFASRRKQRYWPFSMDCTGTEAHISSCKLGPQVSLDPMKNVTCENGLPAVVSCVPGQVFSPDGPSRFRKAYKPEQPLVRLRGGAYIGEGRVEVLKNGEWGTVCDDKWDLVSASVVCRELGFGSAKEAVTGSRLGQGIGPIHLNEIQCTGNEKSIIDCKFNAESQGCNHEEDAGVRCNTPAMGLQKKLRLNGGRNPYEGRVEVLVERNGSLVWGMVCGQNWGIVEAMVVCRQLGLGFASNAFQETWYWHGDVNSNKVVMSGVKCSGTELSLAHCRHDGEDVACPQGGVQYGAGVACSETAPDLVLNAEMVQQTTYLEDRPMFMLQCAMEENCLSASAAQTDPTTGYRRLLRFSSQIHNNGQSDFRPKNGRHAWIWHDCHRHYHSMEVFTHYDLLNLNGTKVAEGHKASFCLEDTECEGDIQKNYECANFGDQGITMGCWDMYRHDIDCQWVDITDVPPGDYLFQVVINPNFEVAESDYSNNIMKCRSRYDGHRIWMYNCHIGGSFSEETEKKFEHFSGLLNNQLSPQ

SEQ ID NO: 67486 - protein, 509 aa, Homo sapiens
LFAGVTALMAAASVTPPGSLELLQPGFSKTLLGTKLEAKYLCSACRNVLRRPFQAQCGHRYCSFCLASILSSGPQNCAACVHEGIYEEGISILESSSAFPDNAARREVESLPAVCPSDGCTWKGTLKEYESCHEGRCPLMLTECPACKGLVRLGEKERHLEHECPERSLSCRHCRAPCCGADVKAHHEVCPKFPLTCDGCGKKKIPREKFQDHVKTCGKCRVPCRFHAIGCLETVEGEKQQEHEVQWLREHLAMLLSSVLEAKPLLGDQSHAGSELLQRCESLEKKTATFENIVCVLNREVERVAMTAEACSRQHRLDQDKIEALSSKVQQLERSIGLKDLAMADLEQKVLEMEASTYDGVFIWKISDFARKRQEAVAGRIPAIFSPAFYTSRYGYKMCLRIYLNGDGTGRGTHLSLFFVVMKGPNDALLRWPFNQKVTLMLLDQNNREHVIDAFRPDVTSSSFQRPVNDMNIASGCPLFCPVSKMEAKNSYVRDDAIFIKAIVDLTGL

SEQ ID NO: 67487 - protein, 42 aa, Homo sapiens
LIEFLWCSLACSSVFCISCSVMFKLRNALCGSSESHLWFSRH

SEQ ID NO: 67488 - protein, 1178 aa, Homo sapiens
LALLLAVAAARIMSGRRCAGGGAACASAAAEAVEPAARELFEACRNGDVERVKRLVTPEKVNSRDTAGRKSTPLHFAAGFGRKDVVEYLLQNGANVQARDDGGLIPLHNACSFGHAEVVNLLLRHGADPNARDNWNYTPLHEAAIKGKIDVCIVLLQHGAEPTIRNTDGRTALDLADPSAKAVLTGEYKKDELLESARSGNEEKMMALLTPLNVNCHASDGRKSTPLHLAAGYNRVKIVQLLLQHGADVHAKDKGDLVPLHNACSYGHYEVTELLVKHGACVNAMDLWQFTPLHEAASKNRVEVCSLLLSYGADPTLLNCHNKSAIDLAPTPQLKERLAYEFKGHSLLQAAREADVTRIKKHLSLEMVNFKHPQTHETALHCAAASPYPKRKQICELLLRKGANINEKTKEFLTPLHVASEKAHNDVVEVVVKHEAKVNALDNLGQTSLHRAAYCGHLQTCRLLLSYGCDPNIISLQGFTALQMGNENVQQLLQEGISLGNSEADRQLLEAAKAGDVETVKKLCTVQSVNCRDIEGRQSTPLHFAAGYNRVSVVEYLLQHGADVHAKDKGGLVPLHNACSYGHYEVAELLVKHGAVVNVADLWKFTPLHEAAAKGKYEICKLLLQHGADPTKKNRDGNTPLDLVKDGDTDIQDLLRGDAALLDAAKKGCLARVKKLSSPDNVNCRDTQGRHSTPLHLAAGYNNLEVAEYLLQHGADVNAQDKGGLIPLHNAASYGHVDVAALLIKYNACVNATDKWAFTPLHEAAQKGRTQLCALLLAHGADPTLKNQEGQTPLDLVSADDVSALLTAAMPPSALPSCYKPQVLNGVRSPGATADALSSGPSSPSSLSAASSLDNLSGSFSELSSVVSSSGTEGASSLEKKEVPGVDFSITQFVRNLGLEHLMDIFEREQITLDVLVEMGHKELKEIGINAYGHRHKLIKGVERLISGQQGLNPYLTLNTSGSGTILIDLSPDDKEFQSVEEEMQSTVREHRDGGHAGGIFNRYNILKIQKVCNKKLWERYTHRRKEVSEENHNHANERMLFHGSPFVNAIIHKGFDERHAYIGGMFGAGIYFAENSSKSNQYVYGIGGGTGCPVHKDRSCYICHRQLLFCRVTLGKSFLQFSAMKMAHSPPGHHSVTGRPSVNGLALAEYVIYRGEQAYPEYLITYQIMRPEGMVDG

SEQ ID NO: 67489 - protein, 23 aa, Homo sapiens
LAFLWAGGLAGVVLGALAVLRSQ

SEQ ID NO: 67490 - protein, 765 aa, Homo sapiens
LASAVLEVTMAWSPPATLFLFLLLLGQPPPSRPQSLGTTKLRLVGPESKPEEGRLEVLHQGQWGTVCDDNFAIQEATVACRQLGFEAALTWAHSAKYGQGEGPIWLDNVRCVGTESSLDQCGSNGWGVSDCSHSEDVGVICHPRRHRGYLSETVSNALGPQGRRLEEVRLKPILASAKQHSPVTEGAVEVKYEGHWRQVCDQGWTMNNSRVVCGMLGFPSEVPVDSHYYRKVWDLKMRDPKSRLKSLTNKNSFWIHQVTCLGTEPHMANCQVQVAPARGKLRPACPGGMHAVVSCVAGPHFRPPKTKPQRKGSWAEEPRVRLRSGAQVGEGRVEVLMNRQWGTVCDHRWNLISASVVCRQLGFGSAREALFGARLGQGLGPIHLSEVRCRGYERTLSDCPALEGSQNGCQHENDAAVRCNVPNMGFQNQVRLAGGRIPEEGLLEVQVEVNGVPRWGSVCSENWGLTEAMVACRQLGLGFAIHAYKETWFWSGTPRAQEVVMSGVRCSGTELALQQCQRHGPVHCSHGGGRFLAGVSCMDSAPDLVMNAQLVQETAYLEDRPLSQLYCAHEENCLSKSADHMDWPYGYRRLLRFSTQIYNLGRTDFRPKTGRDSWVWHQCHRHYHSIEVFTHYDLLTLNGSKVAEGHKASFCLEDTNCPTGLQRRYACANFGEQGVTVGCWDTYRHDIDCQWVDITDVGPGNYIFQVIVNPHYEVAESDFSNNMLQCRCKYDGHRVWLHNCHTGNSYPANAELSLEQEQRLRNNLI

SEQ ID NO: 67491 - protein, 26 aa, Homo sapiens
IASLGSHLMLGFIIPTSLSLLLACTS

SEQ ID NO: 67492 - protein, 30 aa, Homo sapiens
LPIFLTRLWLITAVMSVKRKITRRRRRPHS

SEQ ID NO: 67493 - protein, 655 aa, Homo sapiens
LLLLGLLLPASLTGGVGSLNLEELSEMRYGIEILPLPVMGGQSQSSDVVIVSSKYKQRYECRLPAGAIHFQREREEETPAYQGPGIPELLSPMRDAPCLLKTKDWWTYEFCYGRHIQQYHMEDSEIKGEVLYLGYYQSAFDWDDETAKASKQHRLKRYHSQTYGNGSKCDLNGRPREAEVRFLCDEGAGISGDYIDRVDEPLSCSYVLTIRTPRLCPHPLLRPPPSAAPQAILCHPSLQPEEYMAYVQRQADSKQYGDKIIEELQDLGPQVWSETKSGVAPQKMAGASPTKDDSKDSDFWKMLNEPEDQAPGGEEVPAEEQDPSPEAADSASGAPNDFQNNVQVKVIRSPADLIRFIEELKGGTKKGKPNIGQEQPVDDAAEVPQREPEKERGDPERQREMEEEEDEDEDEDEDEDERQLLGEFEKELEGILLPSDRDRLRSEVKAGMERELENIIQETEKELDPDGLKKESERDRAMLALTSTLNKLIKRLEEKQSPELVKKHKKKRVVPKKPPPSPQPTEEDPEHRVRVRVTKLRLGGPNQDLTVLEMKRENPQLKQIEGLVKELLEREGLTAAGKIEIKIVRPWAEGTEEGARWLTDEDTRNLKEIFFNILVPGAEEAQKERQRQKELESNYRRVWGSPGGEGTGDLDEFDF

SEQ ID NO: 67494 - protein, 99 aa, Homo sapiens
ILLAILAALAVVTLCYESHESMESYELNPFINRRNANTFISPQQRWRAKVQERIRERSKPVHELNREACDDYRLCERYAMVYGYNAAYNRYFRKRRGTK

SEQ ID NO: 67495 - protein, 11 aa, Homo sapiens
ISVFEMSALLL

SEQ ID NO: 67496 - protein, 49 aa, Homo sapiens
IGWRWGGGRWKGLASLGFTPVLDFLLPCFQAVGGYRGREVGSAETWIWF

SEQ ID NO: 67497 - protein, 176 aa, Homo sapiens
LALLLGALLGTAWARRSQDLHCGACRALVDELEWEIAQVDPKKTIQMGSFRINPDGSQSVVEVPYARSEAHLTELLEEICDRMKEYGEQIDPSTHRKNYVRVVGRNGESSELDLQGIRIDSDISGTLKFACESIVEEYEDELIEFFSREADNVKDKLCSKRTDLCDHALHISHDEL

SEQ ID NO: 67498 - protein, 426 aa, Homo sapiens
LLTPHLLLVLVQLSPARGHRTTGPRFLISDRDPQCNLHCSRTQPKPICASDGRSYESMCEYQRAKCRDPTLGVVHRGRCKDAGQSKCRLERAQALEQAKKPQEAVFVPECGEDGSFTQVQCHTYTGYCWCVTPDGKPISGSSVQNKTPVCSGSVTDKPLSQGNSGRKDDGSKPTPTMETQPVFDGDEITAPTLWIKHLVIKDSKLNNTNIRNSEKVYSCDQERQSALEEAQQNPREGIVIPECAPGGLYKPVQCHQSTGYCWCVLVDTGRPLPGTSTRYVMPSCESDARAKTTEADDPFKDRELPGCPEGKKMEFITSLLDALTTDMVQAINSAAPTGGGRFSEPDPSHTLEERVVHWYFSQLDSNSSNDINKREMKPFKRYVKKKAKPKKCARRFTDYCDLNKDKVISLPELKGCLGVSKEGRLV

SEQ ID NO: 67499 - protein, 477 aa, Homo sapiens
VGRQAAGAAMGRGWGFLFGLLGAVWLLSSGHGEEQPPETAAQRCFCQVSGYLDDCTCDVETIDRFNNYRLFPRLQKLLESDYFRYYKVNLKRPCPFWNDISQCGRRDCAVKPCQSDEVPDGIKSASYKYSEEANNLIEECEQAERLGAVDESLSEETQKAVLQWTKHDDSSDNFCEADDIQSPEAEYVDLLLNPERYTGYKGPDAWKIWNVIYEENCFKPQTIKRPLNPLASGQGTSEENTFYSWLEGLCVEKRAFYRLISGLHASINVHLSARYLLQETWLEKKWGHNITEFQQRFDGILTEGEGPRRLKNLYFLYLIELRALSKVLPFFERPDFQLFTGNKIQDEENKMLLLEILHEIKSFPLHFDENSFFAGDKKEAHKLKEDFRLHFRNISRIMDCVGCFKCRLWGKLQTQGLGTALKILFSEKLIANMPESGPSYEFHLTRQEIVSLFNAFGRISTSVKELENFRNLLQNIH

SEQ ID NO: 67500 - protein, 69 aa, Homo sapiens
VLVFVTVFLVLQLRSGFSFRGVKVYTMDRGLISYKGLPPEAWQEECPSDSEEDEGRGERTAFIKDQSAL

SEQ ID NO: 67501 - protein, 36 aa, Homo sapiens
LRHRRPEPPLLCCLLLFLRAPVSARPPTLLRNLTRN

SEQ ID NO: 67502 - protein, 11 aa, Homo sapiens
IALWRLLLGCA

SEQ ID NO: 67503 - protein, 316 aa, Homo sapiens
LLAGWLCLSLASVWLARRMWTLRSPLTRSLYVNMTSGPGGPAAAAGGRKENHQWYVCNREKLCESLQAVFVQSYLDQGTQIFLNNSIEKSGWLFIQLYHSFVSSVFSLFMSRTSINGLLGRGSMFVFSPDQFQRLLKINPDWKTHRLLDLGAGDGEVTKIMSPHFEEIYATELSETMIWQLQKKKYRVLGINEWQNTGFQYDVISCLNLLDRCDQPLTLLKDIRSVLEPTRGRVILALVLPFHPYVENVGGKWEKPSEILEIKGQNWEEQVNSLPEVFRKAGFVIEAFTRLPYLCEGDMYNDYYVLDDAVFVLKPV

SEQ ID NO: 67504 - protein, 41 aa, Homo sapiens
VAGSLCVLQIVTLMVAPMAWLEDKQIEDIGNGVIKMIDHEA

SEQ ID NO: 67505 - protein, 34 aa, Homo sapiens; identical to SEQ ID NO: 26538

SEQ ID NO: 67506 - protein, 15 aa, Homo sapiens
ISRYVTLFSRISLIL

SEQ ID NO: 67507 - protein, 99 aa, Homo sapiens
LRGFNRALLLALNMVDRTGHSHCSGATGAAFGNEVPQPPTHCFGCLLHLKLYEGQEEGCGDEWLYRLATDGELEQPVAPRGGRKGGTADPTPAVPGFGG

SEQ ID NO: 67508 - protein, 67 aa, Homo sapiens
MIQSPEAAGQEAVLLVLPLVVGLLNLGAPYLCRVLAALEPHDSPVLEVYVAICRCVAAHENIIWCWS

SEQ ID NO: 67509 - protein, 40 aa, Homo sapiens
IPILISNSSLPPSVRLMALLAGWIIELSGGTDAAAIPNKS

SEQ ID NO: 67510 - protein, 51 aa, Homo sapiens
MYLAMVLLGATHGLIFLPVLLSYIGPSVNKAKSCATEERYKGTERERLLNF

SEQ ID NO: 67511 - protein, 23 aa, Homo sapiens
ILPPPSQAGLMSVLTLLPLLPGP

SEQ ID NO: 67512 - protein, 607 aa, Homo sapiens
LALLLLLLAPLPPGAPPGADAYFPEERWSPESPLQAPRVLIALLARNAAHALPTTLGALERLRHPRERTALWVATDHNMDNTSTVLREWLVAVKSLYHSVEWRPAEEPRSYPDEEGPKHWSDSRYEHVMKLRQAALKSARDMWADYILFVDADNLILNPDTLSLLIAENKTVVAPMLDSRAAYSNFWCGMTSQGYYKRTPAYIPIRKRDRRGCFAVPMVHSTFLIDLRKAASRNLAFYPPHPDYTWSFDDIIVFAFSCKQAEVQMYVCNKEEYGFLPVPLRAHSTLQDEAESFMHVQLEVMVKHPPAEPSRFISAPTKTPDKMGFDEVFMINLRRRQDRRERMLRALQAQEIECRLVEAVDGKAMNTSQVEALGIQMLPGYRDPYHGRPLTKGELGCFLSHYNIWKEVVDRGLQKSLVFEDDLRFEIFFKRRLMNLMRDVEREGLDWDLIYVGRKRMQVEHPEKAVPRVRNLVEADYSYWTLAYVISLQGARKLLAAEPLSKMLPVDEFLPVMFDKHPVSEYKAHFSLRNLHAFSVEPLLIYPTHYTGDDGYVSDTETSVVWNNEHVKTDWDRAKSQKMREQQALSREAKNSDVLQSPLDSAARDEL

SEQ ID NO: 67513 - protein, 462 aa, Homo sapiens
LWPLLLLLLLETGAQDVRVQVLPEVRGQLGGTVELPCHLLPPVPGLYISLVTWQRPDAPANHQNVAAFHPKMGPSFPSPKPGSERLSFVSAKQSTGQDTEAELQDATLALHGLTVEDEGNYTCEFATFPKGSVRGMTWLRVIAKPKNQAEAQKVTFSQDPTTVALCISKEGRPPARISWLSSLDWEAKETQVSGTLAGTVTVTSRFTLVPSGRADGVTVTCKVEHESFEEPALIPVTLSVRYPPEVSISGYDDNWYLGRTDATLSCDVRSNPEPTGYDWSTTSGTFPTSAVAQGSQLVIHAVDSLFNTTFVCTVTNAVGMGRAEQVIFVRETPRASPRDVGPLVWGAVGGTLLVLLLLAGGSLAFILLRVRRRRKSPGGAGGGASGDGGFYDPKAQVLGNGDPVFWTPVVPGPMEPDGKDEEEEEEEEKAEKGLMLPPPPALEDDMESQLDGSLISRRAVYV

SEQ ID NO: 67514 - protein, 59 aa, Homo sapiens
TPRMHRLWIGPAFFLMTSLSVSGAVIPRNGGPGGVSSGPCLLQLLCGQAGSSTIRKIPS

SEQ ID NO: 67515 - protein, 331 aa, Homo sapiens
RGPMMWRPSVLLLLLLLRHGAQGKPSPDAGPHGQGRVHQAAPLSDAPHDDAHGNFQYDHEAFLGREVAKEFDQLTPEESQARLGRIVDRMDRAGDGDGWVSLAELRAWIAHTQQRHIRDSVSAAWDTYDTDRDGRVGWEELRNATYGHYAPGEEFHDVEDAETYKKMLARDERRFRVADQDGDSMATREELTAFLHPEEFPHMRDIVIAETLEDLDRNKDGYVQVEEYIADLYSAEPGEEEPAWVQTERQQFRDFRDLNKDGHLDGSEVGHWVLPPAQDQPLVEANHLLHESDTDKDGRLSKAEILGNWNMFVGSQATNYGEDLTRHHDEL

SEQ ID NO: 67516 - protein, 488 aa, Homo sapiens
RSWVAIRGLLRSYLQAAVTALSLEWKLLEGGPAAMSTFRQEDVEDHYEMGEELGSGQFAIVRKCRQKGTGKEYAAKFIKKRRLSSSRRGVSREEIEREVNILREIRHPNIITLHDIFENKTDVVLILELVSGGELFDFLAEKESLTEDEATQFLKQILDGVHYLHSKRIAHFDLKPENIMLLDKNVPNPRIKLIDFGIAHKIEAGNEFKNIFGTPEFVAPEIVNYEPLGLEADMWSIGVITYILLSGASPFLGETKQETLTNISAVNYDFDEEYFSNTSELAKDFIRRLLVKDPKRRMTIAQSLEHSWIKAIRRRNVRGEDSGRKPERRRLKTTRLKEYTIKSHSSLPPNNSYADFERFSKVLEEAAAAEEGLRELQRSRRLCHEDVEALAAIYEEKEAWYREESDSLGQDLRRLRQELLKTEALKRQAQEEAKGALLGTSGLKRRFSRLENRYEALAKQVASEMRFVQDLVRALEQEKLQGVECGLR

SEQ ID NO: 67517 - protein, 1027 aa, Homo sapiens
RAARALLPLLLQACWTAAQDEPETPRAVAFQDCPVDLFFVLDTSESVALRLKPYGALVDKVKSFTKRFIDNLRDRYYRCDRNLVWNAGALHYSDEVEIIQGLTRMPGGRDALKSSVDAVKYFGKGTYTDCAIKKGLEQLLVGGSHLKENKYLIVVTDGHPLEGYKEPCGGLEDAVNEAKHLGVKVFSVAITPDHLEPRLSIIATDHTYRRNFTAADWGQSRDAEEAISQTIDTIVDMIKNNVEQVCCSFECQPARGPPGLRGDPGFEGERGKPGLPGEKGEAGDPGRPGDLGPVGYQGMKGEKGSRGEKGSRGPKGYKGEKGKRGIDGVDGVKGEMGYPGLPGCKGSPGFDGIQGPPGPKGDPGAFGLKGEKGEPGADGEAGRPGSSGPSGDEGQPGEPGPPGEKGEAGDEGNPGPDGAPGERGGPGERGPRGTPGTRGPRGDPGEAGPQGDQGREGPVGVPGDPGEAGPIGPKGYRGDEGPPGSEGARGAPGPAGPPGDPGLMGERGEDGPAGNGTEGFPGFPGYPGNRGAPGINGTKGYPGLKGDEGEAGDPGDDNNDIAPRGVKGAKGYRGPEGPQGPPGHQGPPGPDECEILDIIMKMCSCCECKCGPIDLLFVLDSSESIGLQNFEIAKDFVVKVIDRLSRDELVKFEPGQSYAGVVQYSHSQMQEHVSLRSPSIRNVQELKEAIKSLQWMAGGTFTGEALQYTRDQLLPPSPNNRIALVITDGRSDTQRDTTPLNVLCSPGIQVVSVGIKDVFDFIPGSDQLNVISCQGLAPSQGRPGLSLVKENYAELLEDAFLKNVTAQICIDKKCPDYTCPITFSSPADITILLDGSASVGSHNFDTTKRFAKRLAERFLTAGRTDPAHDVRVAVVQYSGTGQQRPERASLQFLQNYTALASAVDAMDFINDATDVNDALGYVTRFYREASSGAAKKRLLLFSDGNSQGATPAAIEKAVQEAQRAGIEIFVVVVGRQVNEPHIRVLVTGKTAEYDVAYGESHLFRVPSYQALLRGVFHQTVSRKVALG

SEQ ID NO: 67518 - protein, 22 aa, Homo sapiens
LPVDFAGLLLSCGLLSGSVFPL

SEQ ID NO: 67519 - protein, 1253 aa, Homo sapiens
VPPGKMVVALRYVWPLLLCSPCLLIQIPEELMEPPVITEQSPRRLVVFPTDDISLKCEASGKPEVQFRWTRDGVHFKPKEELGVTVYQSPHSGSFTITGNNSNFAQRFQGIYRCFASNKLGTAMSHEIRLMAEGAPKWPKETVKPVEVEEGESVVLPCNPPPSAEPLRIYWMNSKILHIKQDERVTMGQNGNLYFANVLTSDNHSDYICHAHFPGTRTIIQKEPIDLRVKATNSMIDRKPRLLFPTNSSSHLVALQGQPLVLECIAEGFPTPTIKWLRPSGPMPADRVTYQNHNKTLQLLKVGEEDDGEYRCLAENSLGSARHAYYVTVEAAPYWLHKPQSHLYGPGETARLDCQVQGRPQPEVTWRINGIPVEELAKDQKYRIQRGALILSNVQPSDTMVTQCEARNRHGLLLANAYIYVVQLPAKILTADNQTYMAVQGSTAYLLCKAFGAPVPSVQWLDEDGTTVLQDERFFPYANGTLGIRDLQANDTGRYFCLAANDQNNVTIMANLKVKDATQITQGPRSTIEKKGSRVTFTCQASFDPSLQPSITWRGDGRDLQELGDSDKYFIEDGRLVIHSLDYSDQGNYSCVASTELDVVESRAQLLVVGSPGPVPRLVLSDLHLLTQSQVRVSWSPAEDHNAPIEKYDIEFEDKEMAPEKWYSLGKVPGNQTSTTLKLSPYVHYTFRVTAINKYGPGEPSPVSETVVTPEAAPEKNPVDVKGEGNETTNMVITWKPLRWMDWNAPQVQYRVQWRPQGTRGPWQEQIVSDPFLVVSNTSTFVPYEIKVQAVNSQGKGPEPQVTIGYSGEDYPQAIPELEGIEILNSSAVLVKWRPVDLAQVKGHLRGYNVTYWREGSQRKHSKRHIHKDHVVVPANTTSVILSGLRPYSSYHLEVQAFNGRGSGPASEFTFSTPEGVPGHPEALHLECQSNTSLLLRWQPPLSHNGVLTGYVLSYHPLDEGGKGQLSFNLRDPELRTHNLTDLSPHLRYRFQLQATTKEGPGEAIVREGGTMALSGISDFGNISATAGENYSVVSWVPKEGQCNFRFHILFKALGEEKGGASLSPQYVSYNQSSYTQWDLQPDTDYEIHLFKERMFRHQMAVKTNGTGRVRLPPAGFATEGWFIGFVSAIILLLLVLLILCFIKRSKGGKYSVKDKEDTQVDSEARPMKDETFGEYSDNEEKAFGSSQPSLNGDIKPLGSDDSLADYGGSVDVQFNEDGSFIGQYSGKKEKEAAGGNDSSGATSPINPAVALE

SEQ ID NO: 67520 - protein, 1578 aa, Homo sapiens
MGKGHRMTPACPLLLSVILSLRLATAFDPAPSACSALASGVLYGAFSLQDLFPTIASGCSWTLENPDPTKYSLYLRFNRQEQVCAHFAPRLLPLDHYLVNFTCLRPSPEEAVAQAESEVGRPEEEEAEAAAGLELCSGSGPFTFLHFDKNFVQLCLSAEPSEAPRLLAPAALAFRFVEVLLINNNNSSQFTCGVLCRWSEECGRAAGRACGFAQPGCSCPGEAGAGSTTTTSPGPPAAHTLSNALVPGGPAPPAEADLHSGSSNDLFTTEMRYGEEPEEEPKVKTQWPRSADEPGLYMAQTGDPAAEEWSPWSVCSLTCGQGLQVRTRSCVSSPYGTLCSGPLRETRPCNNSATCPVHGVWEEWGSWSLCSRSCGRGSRSRMRTCVPPQHGGKACEGPELQTKLCSMAACPVEGQWLEWGPWGPCSTSCANGTQQRSRKCSVAGPAWATCTGALTDTRECSNLECPATDSKWGPWNAWSLCSKTCDTGWQRRFRMCQATGTQGYPCEGTGEEVKPCSEKRCPAFHEMCRDEYVMLMTWKKAAAGEIIYNKCPPNASGSASRRCLLSAQGVAYWGLPSFARCISHEYRYLYLSLREHLAKGQRMLAGEGMSQVVRSLQELLARRTYYSGDLLFSVDILRNVTDTFKRATYVPSADDVQRFFQVVSFMVDAENKEKWDDAQQVSPGSVHLLRVVEDFIHLVGDALKAFQSSLIVTDNLVISIQREPVSAVSSDITFPMRGRRGMKDWVRHSEDRLFLPKEVLSLSSPGKPATSGAAGSPGRGRGPGTVPPGPGHSHQRLLPADPDESSYFVIGAVLYRTLGLILPPPRPPLAVTSRVMTVTVRPPTQPPAEPLITVELSYIINGTTDPHCASWDYSRADASSGDWDTENCQTLETQAAHTRCQCQHLSTFAVLAQPPKDLTLELAGSPSVPLVIGCAVSCMALLTLLAIYAAFWRFIKSERSIILLNFCLSILASNILILVGQSRVLSKGVCTMTAAFLHFFFLSSFCWVLTEAWQSYLAVIGRMRTRLVRKRFLCLGWGLPALVVAVSVGFTRTKGYGTSSYCWLSLEGGLLYAFVGPAAVIVLVNMLIGIIVFNKLMARDGISDKSKKQRAGSERCPWASLLLPCSACGAVPSPLLSSASARNAMASLWSSCVVLPLLALTWMSAVLAMTDRRSVLFQALFAVFNSAQGFVITAVHCFLRREVQDVVKCQMGVCRADESEDSPDSCKNGQLQILSDFEKDVDLACQTVLFKEVNTCNPSTITGTLSRLSLDEDEEPKSCLVGPEGSLSFSPLPGNILVPMAASPGLGEPPPPQEANPVYMCGEGGLRQLDLTWLRPTEPGSEGDYMVLPRRTLSLQPGGGGGGGEDAPRARPEGTPRRAAKTVAHTEGYPSFLSVDHSGLGLGPAYGSLQNPYGMTFQPPPPTPSARQVPEPGERSRTMPRTVPGSTMKMGSLERKKLRYSDLDFEVMHTRKRHSELYHELNQKFHTFDRYRSQSTAKREKRWSVSSGGAAERSVCTDKPSPGERPSLSQHRRHQSWSTFKSMTLGSLPPKPRERLTLHRAAAWEPTEPPDGDFQTEV

SEQ ID NO: 67521 - protein, 1396 aa, Homo sapiens
MRSLWFIIVISFLPNTEGFSRAALPFGLVRRELSCEGYSIDLRCPGSDVIMIESANYGRTDDKICDADPFQMENTDCYLPDAFKIMTQRCNNRTQCIVVTGSDVFPDPCPGTYKYLEVQYECVPYIFVCPGTLKAIVDSPCIYEAEQKAGAWCKDPLQAADKIYFMPWTPYRTDTLIEYASLEDFQNSRQTTTYKLPNRVDGTGFVVYDGAVFFNKERTRNIVKFDLRTRIKSGEAIINYANYHDTSPYRWGGKTDIDLAVDENGLWVIYATEQNNGMIVISQLNPYTLRFEATWETVYDKRAASNAFMICGVLYVVRSVYQDNESETGKNSIDYIYNTRLNRGEYVDVPFPNQYQYIAAVDYNPRDNQLYVWNNNFILRYSLEFGPPDPAQVPTTAVTITSSAELFKTIISTTSTTSQKGPMSTTVAGSQEGSKGTKPPPAVSTTKIPPITNIFPLPERFCEALDSKGIKWPQTQRGMMVERPCPKGTRGTASYLCMISTGTWNPKGPDLSNCTSHWVNQLAQKIRSGENAASLANELAKHTKGPVFAGDVSSSVRLMEQLVDILDAQLQELKPSEKDSAGRSYNKAIVDTVDNLLRPEALESWKHMNSSEQAHTATMLLDTLEEGAFVLADNLLEPTRVSMPTENIVLEVAVLSTEGQIQDFKFPLGIKGAGSSIQLSANTVKQNSRNGLAKLVFIIYRSLGQFLSTENATIKLGADFIGRNSTIAVNSHVISVSINKESSRVYLTDPVLFTLPHIDPDNYFNANCSFWNYSERTMMGYWSTQGCKLVDTNKTRTTCACSHLTNFAILMAHREIAYKDGVHELLLTVITWVGIVISLVCLAICIFTFCFFRGLQSDRNTIHKNLCINLFIAEFIFLIGIDKTKYAIACPIFAGLLHFFFLAAFAWMCLEGVQLYLMLVEVFESEYSRKKYYYVAGYLFPATVVGVSAAIDYKSYGTEKACWLHVDNYFIWSFIGPVTFIILLNIIFLVITLCKMVKHSNTLKPDSSRLENIKSWVLGAFALLCLLGLTWSFGLLFINEETIVMAYLFTIFNAFQGVFIFIFHCALQKKVRKEYGKCFRHSYCCGGLPTESPHSSVKASTTRTSARYSSGTQSRIRRMWNDTVRKQSESSFISGDINSTSTLNQGHSLNNARDTSAMDTLPLNGNFNNSYSLHKGDYNDSVQVVDCGLSLNDTAFEKMIISELVHNNLRGSSKTHNLELTLPVKPVIGGSSSEDDAIVADASSLMHSDNPGLELHHKELEAPLIPQRTHSLLYQPQKKVKSEGTDSYVSQLTAEAEDHLQSPNRDSLYTSMPNLRDSPYPESSPDMEEDLSPSRRSENEDIYYKSMPNLGAGHQLQMCYQISRGNSDGYIIPINKEGCIPEGDVREGQMQLVTSL

SEQ ID NO: 67522 - protein, 349 aa, Homo sapiens [sequence omitted]

SEQ ID NO: 67523 - protein, 222 aa, Homo sapiens [sequence omitted]

SEQ ID NO: 67524 - protein, 397 aa, Homo sapiens
MWLLLTTTCLICGTLNAGGFLDLENEVNPEVWMNTSEIIIYNGYPSEEYEVTTEDGYILLVNRIPYGRTHARSTGPRPVVYMQHALFADNAYWLENYANGSLGFLLADAGYDVWMGNSRGNTWSRRHKTLSETDEKFWAFSFDEMAKYDLPGVIDFIVNKTGQEKLYFIGHSLGTTIGFVAFSTMPELAQRIKMNFALGPTISFKYPTGIFTRFFLLPNSIIKAVFGTKGFFLEDKKTKIASTKICNNKILWLICSEFMSLWAGSNKKNMNQSRMDVYMSHAPTGSSVHNILHIKQLYHSDEFRAYDWGNDADNMKHYNQSHPPIYDLTAMKVPTAIWAGGHDVLVTPQDVARILPQIKSLHYFKLLPDWNHFDFVWGLDAPQRMYSEIIALMKAYS

SEQ ID NO: 67525 - protein, 44 aa, Homo sapiens
MACTAVLENLFFSAVLLGWGSLLIILKNEGFYSSTCPAVPGVMC

SEQ ID NO: 67526 - protein, 318 aa, Homo sapiens
MLALVLVVMVWYSISREDSFYFPIPEKKEPCLQGEAESKASKLFGNYSRDQPIFLRLEDYFWVKTPSAYELPYGTKGSEDLLLRVLAITSSSIPKNIQSLRCRRCVVVGNGHRLRNSSLGDAINKYDVVIRLNNAPVAGYEGDVGSKTTMRLFYPESAHFDPKVENNPDTLLVLVAFKAMDFHWIETILSDKKRVRKGFWKQPPLIWDVNPKQIRILNPFFMEIAADKLLSLPMQQPRKIKQKPTTGLLAITLALHLCDLVHIAGFGYPDAYNKKQTIHYYEQITLKSMAGSGHNVSQEALAIKRMLEMGAIKNLTSF

SEQ ID NO: 67527 - protein, 229 aa, Homo sapiens
MLALVLVVMVWYSISREDRYIELFYFPIPEKKEPCLQGEAESKASKLFGNYSRDQPIFLRLEDYFWVKTPSAYELPYGTKGSEDLLLRVLAITSSSIPKNIQSLRCRRCVVVGNGHRLRNSSLGDAINKYDVVIRLNNAPVAGYEGDVGSKTTMRLFYPESAHFDPKVENNPDTLLVLVAFKAMDFHWIETILSDKKRVSWGTDWGLRPGGGDAARVRTSRSLMSAWQS

SEQ ID NO: 67528 - protein, 169 aa, Homo sapiens [sequence omitted]

SEQ ID NO: 67529 - protein, 361 aa, Homo sapiens
MKYICLMMKFGPMILIVGCGECTSWKENSQPPCQEAVVLALMESCTFLEDMMTKDTAIEDETYIWEKITDFEGQPPTPRDKLSCWVYKDRLIYFGGYGCRRHSELQDCFDVHDASWEEQIFWGWHNDVHIFDTKTQTWFQPEIKGGVPPQPRAAHTCAVLGNKGYIFGGRVLQTRMNDLHYLNLDTWTWSGRITINGESPKHRSWHTLTPIADDKLFLCGGLSADNIPLSDGWIHNVTTNCWKQLTHLPKTRPRLWHTACLGKENEIMVFGGSKDDLLALDTGHCNDLLIFQTQPYSLLRSCLDCIGKNSIMLESQISLLPPKLLQQVLKKITFWAAANHREEQRVQKEETENKYQWISSN

SEQ ID NO: 67530 - protein, 56 aa, Homo sapiens
MSVWMAAAGLSAVITSWTRPSRRTSVCGVGVTARPATPSQAPLTLMTSAEATTRSS

SEQ ID NO: 67531 - protein, 35 aa, Homo sapiens
MFLGSWTAVCLPHAQLCCLLVTPVSYCSMTSHTEM

SEQ ID NO: 67532 - protein, 658 aa, Homo sapiens
MGLFAFVVLCSILFSLYPDQGKLWQLLALSPLENYSVNLSSHVDSTLLQVDLAGALVASGPSRPGREEHIVVELTQADALGSRWRRPQQVTHNWTVYLNPRRSEHSVMSRTFEVLTRETVSISIRASLQQTQAVPLLMAHQYLRGSVETQVTIATAILAGVYALIIFEIVHRTLAAMLGSLAALAALAVIGDRPSLTHVVEWIDFETLALLFGMMILVAIFSETGFFDYCAVKAYRLSRGRVWAMIIMLCLIAAVLSAFLDNVTTMLLFTPVTIRLCEVLNLDPRQVLIAEVIFTNIGGAATAIGDPPNVIIVSNQELRKMGLDFAGFTAHMFIGICLVLLVCFPLLRLLYWNRKLYNKEPSEIVELKHEIHVWRLTAQRISPASREETAVRRLLLGKVLALEHLLARRLHTFHRQISQEDKNWETNIQELQKKHRISDGILLAKCLTVLGFVIFMFFLNSFVPGIHLDLGWIAILGAIWLLILADIHDFEIILHRVEWATLLFFAALFVLMEALAHLHLIEYVGEQTALLIKMVPEEQRLIAAIVLVVWVSALASSLIDNIPFTATMIPVLLNLSHDPEVGLPAPPLMYALAFGACLGGNGTLIGASANVVCAGIAEQHGYGFSFMEFFRLGFPMMVVSCTVGMCYLLVAHVVVGWN

SEQ ID NO: 67533 - protein, 30 aa, Homo sapiens
MLATPPGASLRLLLTVVTPLYLVSRGCLRC

SEQ ID NO: 67534 - protein, 159 aa, Homo sapiens
MPPPRLLFFLLFLTPMEVRPEEPLVVKVEEGDNAVLQCLKGTSDGPTQQLTWSRESPLKPFLKLSLGLPGLGIHMRPLAIWLFIFNVSQQMGGFYLCQPGPPSEKAWQPGWTVNVEGSGEGRAGAGAGGEKGGHHGQKRSAATMELERGAGGIEGETRS

SEQ ID NO: 67535 - protein, 151 aa, Homo sapiens
MKALLALPLLLLLSTPPCAPQVSGIRGDALERFCLQQPLDCDDIYAQGYQSDGVYLIYPSGPSVPVPVFCDMTTEGGKWTVFQKRFNGSVSFFRGWNDYKLGFGRADGEYWLGKAGTRWAEGLPQGQVLVDQLPLLPRAAEHAPPDTEAEV

SEQ ID NO: 67536 - protein, 2624 aa, Homo sapiens
MFIASLTIWLLCRNIVQKPVTDEAAQSNPEFENEELAEGEKIDSEEALIYEEDFNGGDGVEGELEESTKLKMFRRLASVASKLKEFIGNMITTAGKVVVTILLGSSGMMLPSLTSSVYFFVFLGLCTWWSWCRTFDPLLFSCLCVLLAIFTAGHLIGLYLYQFQFFQEAVPPNDYYARLFGIKSVIQTDCSSTWKIIVNPDLSWYHHANPILLLVMYYTLATLIRIWLQEPLVQDEGTKEEDKALACSPIQITAGRRRSLWYATHYPTDERKLLSMTQDDYKPSDGLLVTVNGNPVDYHTIHPSLPMENGPGKADLYSTPQYRWEPSDESSEKREEEEEEKEEFEEERSREEKRSIKVHAMVSVFQFIMKQSYICALIAMMAWSITYHSWLTFVLLIWSCTLWMIRNRRKYAMISSPFMVVYGNLLLILQYIWSFELPEIKKVPGFLEKKEPGELASKILFTITFWLLLRQHLTEQKALQEKEALLSEVKIGSQENEEKDEELQDIQVEGEPKEEEEEEAKEEKQERKKVEQEEAEEEDEQDIMKVLGNLVVAMFIKYWIYVCGGMFFFVSFEGKIVMYKIIYMVLFLFCVALYQVHYEWWRKILKYFWMSVVIYTMLVLIFIYTYQFENFPGLWQNMTGLKKEKLEDLGLKQFTVAELFTRIFIPTSFLLVCILHLHYFHDRFLELTDLKSIPSKEDNTIYRLAHPEGSLPDLTMMHLTASLEKPEVRKLAEPGEEKLEGYSEKAQKGDLGKDSEESEEDGEEEEESEEEEETSDLRNKWHLVIDRLTVLFLKFLEYFHKLQVFMWWILELHIIKIVSSYIIWVSVKEVSLFNYVFLISWAFALPYAKLRRLASSVCTVWTCVIIVCKMLYQLQTIKPENFSVNCSLPNENQTNIPFNELNKSLLYSAPIDPTEWVGLRKSSPLLVYLRNNLLMLAILAFEVTIYRHQEYYRGRNNLTAPVSRTIFHDITRLHLDDGLINCAKYFINYFFYKFGLETCFLMSVNVIGQRMDFYAMIHACWLIAVLYRRRRKAIAEIWPKYCCFLACIITFQYFICIGIPPAPCRDYPWRFKGASFNDNIIKWLYFPDFIVRPNPVFLVYDFMLLLCASLQRQIFEDENKAAVRIMAGDNVEICMNLDAASFSQHNPVPDFIHCRSYLDMSKVIIFSYLFWFVLTIIFITGTTRISIFCMGYLVACFYFLLFGGDLLLKPIKSILRYWDWLIAYNVFVITMKNILSIGACGYIGTLVHNSCWLIQAFSLACTVKGYQMPAANSPCTLPSGEAGIIWDSICFAFLLLQRRVFMSYYFLHVVADIKASQILASRGAELFQATIVKAVKARIEEEKKSMDQLKRQMDRIKARQQKYKKGKERMLSLTQEPGEGQDMQKLSEEDDEREADKQKAKGKKKQWWRPWVDHASMVRSGDYYLFETDSEEEEEEELKKEDEEPPRRSAFQFVYQAWITDPKTALRQRHKEKKRSAREERKRRRKGSKEGPVEWEDREDEPIKKKSDGPDNIIKRIFNILKFTWVLFLATVDSFTTWLNSISREHIDISTVLRIERCMLTREIKKGNVPTRESIHMYYQNHIMNLSRESGLDTIDEHPGAASGAQTAHRMDSLDSHDSISSEPTQCTMLYSRQGTTETIEEVEAEQEEEAGSTAPEPREAKEYEATGYDVGAMGAEEASLTPEEELTQFSTLDGDVEAPPSYSKAVSFEHLSFGSQDDSAGKNRMAVSPDDSRTDKLGSSILPPLTHELTASELLLKKMFHDDELEESEKFYVGQPRFLLLFYAMYNTLVARSEMVCYFVIILNHMVSASMITLLLPILIFLWAMLSVPRPSRRFWMMAIVYTEVAIVVKYFFQFGFFPWNKNVEVNKDKPYHPPNIIGVEKKEGYVLYDLIQLLALFFHRSILKCHGLWDEDDMTESGMAREESDDELSLGHGRRDSSDSLKSINLAASVESVHVTFPEQQTAVRRKRSGSSSEPSQRSSFSSNRSQRGSTSTRNSSQKGSSVLSIKQKGKRELYMEKLQEHLIKAKAFTIKKTLEIYVPIKQFFYNLIHPEYSAVTDVYVLMFLADTVDFIIIVFGFWAFGKHSAAADITSSLSEDQVPGPFLVMVLIQFGTMVVDRALYLRKTVLGKVIFQVILVFGIHFWMFFILPGVTERKFSQNLVAQLWYFVKCVYFGLSAYQIRCGYPTRVLGNFLTKSYNYVNLFLFQGFRLVPFLTELRAVMDWVWTDTTLSLSSWICVEDIYAHIFILKCWRESEKRYPQPRGQKKKKVVKYGMGGMIIVLLICIVWFPLLFMSLIKSVAGVINQPLDVSVTITLGGYQPIFTMSAQQSQLKVMDQQSFNKFIQAFSRDTGAMQFLENYEKEDITVAELEGNSNSLWTISPPSKQKMIHELLDPNSSFSVVFSWSIQRNLSLGAKSEIATDKLSFPLKNITRKNIAKMIAGNSTESSKTPVTIEKIYPYYVKAPSDSNSKPIKQLLSENNFMDITIILSRDNTTKYNSEWWVLNLTGNRIYNPNSQALELVVFNDKVSPPSLGFLAGYGIMGLYASVVLVIGKFVREFFSGISHSIMFEELPNVDRILKLCTDIFLVRETGELELEEDLYAKLIFLYRSPETMIKWTREKTN

SEQ ID NO: 67537 - protein, 63 aa, Homo sapiens
MAVLGVQLVVTLLTATLMHRLAPHCSFARWLLCNGSLFRYKHPSEEELRALAGKPRPRGRKER

SEQ ID NO: 67538 - protein, 409 aa, Homo sapiens
MVSPRMSGLLSQTVILALIFLPQTRPAGVFELQIHSFGPGPGPGAPRSPCSARLPCRLFFRVCLKPGLSEEAAESPCALGAALSARGPVYTEQPGAPAPDLPLPDGLLQVPFRDAWPGTFSFIIETWREELGDQIGGPAWSLLARVAGRRRLAAGGPWARDIQRAGAWELRFSYRARCEPPAVGTACTRLCRPRSAPSRCGPGLRPCAPLEDECEAPLVCRAGCSPEHGFCEQPGECRCLEGWTGPLCTVPVSTSSCLSPRGPSSATTGCLVPGPGPCDGNPCANGGSCSETPRSFECTCPRGFYGLRCEVSGVTCADGPCFNGGLCVGGADPDSAYICHCPPGFQGSNCEKRVDRCSLQPCRNGEAWRPERRGMGWGSWMAQTVQGWNPGFDSSNPRAWGPDLPPASL

SEQ ID NO: 67539 - protein, 297 aa, Homo sapiens
MATAERRALGIGFQWLSLATLVLICAGQGGRREDGGPACYGGFDLYFILDKSGSVLHHWNEIYYFVEQLAHKFISPQLRMSFIVFSTRGTTLMKLTEDREQIRQGLEELQKVLPGGDTYMHEGFERASEQIYYENRQGYRTASVIIALTDGELHEDLFFYSEREANRSRDLGAIVYCVGVKDFNETQLARIADSKDHVFPVNDGFQALQGIIHSILKKSCIEILAAEPSTICAGESFQVVVRGNGFRHARNVDRVLCSFKINDSVTLSKSLQSPWVSSTSGFKEGNSHPCLPARPHT

SEQ ID NO: 67540 - protein, 375 aa, Homo sapiens
MFGWATAPAVLQSLSLLFLPAGTDETATHKDLIPLQGGEAPKLGPGRPRYSFLDLFRARDNMRGRTTVGLGLVLFQQLTGQPNVLCYASTIFSSVGFHGGSSAVLASVGLGAVKVAATLTAMGLVDRAGRRALLLAGCALMALSVSGIGLVSFAVPMDSGPSCLAVPNATGQTGLPGDSGLLQDSSLPPIPRTNEDQREPILSTAKKTKPHPRSGDPSAPPRLALSSALPGPPLPARGHALLRWTALLCLMVFVSAFSFGFGPVTWLVLSEIYPVEIRGRAFAFCNSFNWAANLFISLSFLDLIGTIGLSWTFLLYGLTAVLGLGFIYLFVPETKGQSLAEIDQQFQKRRFTLSFGHRQNSTGIPYSRIEISAAS

SEQ ID NO: 67541 - protein, 14 aa, Homo sapiens
MLLMLIVIGVFASN

SEQ ID NO: 67542 - protein, 52 aa, Homo sapiens
MFSRQWLLFPVGSPTASLAWVFSAVPLDTSSEKHMNSSESPVPLGKFPIATH

SEQ ID NO: 67543 - protein, 111 aa, Homo sapiens
MKNTRAIILRTLLGLSPCSCLQDPLAFLSLAKGGGLCGLTTHTAAPVGLIQSVEFFKREKLKSLRRKEFCLQTVFELKTVASTPAGISSLLASSADSHLPASTIAAEAEEP

SEQ ID NO: 67544 - protein, 1611 aa, Homo sapiens
MIAEPAHFYLFGLICLCSGSRLRQEDFPPRIVEHPSDLIVSKGEPATLNCKAEGRPTPTIEWYKGGERVETDKDDPRSHRMLLPSGSLFFLRIVHGRKSRPDEGVYVCVARNYLGEAVSHNASLEVAILRDDFRQNPSDVMVAVGEPAVMECQPPRGHPEPTISWKKDGSPLDDKDERITIRGGKLMITYTRKSDAGKYVCVGTNMVGERESEVAELTVLERPSFVKRPSNLAVTVDDSAEFKCEARGDPVPTVRWRKDDGELPKSRYEIRDDHTLKIRKVTAGDMGSYTCVAENMVGKAEASATLTVQEPPHFVVKPRDQVVALGRTVTFQCEATGNPQPAIFWRREGSQNLLFSYQPPQSSSRFSVSQTGDLTITNVQRSDVGYYICQTLNVAGSIITKAYLEVTDVIADRPPPVIRQGPVNQTVAVDGTFVLSCVATGSPVPTILWRKDGVLVSTQDSRIKQLENGVLQIRYAKLGDTGRYTCIASTPSGEATWSAYIEVQEFGVPVQPPRPTDPNLIPSAPSKPEVTDVSRNTVTLSWQPNLNSGATPTSYIIEAFSHASGSSWQTVAENVKTETSAIKGLKPNAIYLFLVRAANAYGISDPSQISDPVKTQDVLPTSQGVDHKQVQRELGNAVLHLHNPTVLSSSSIEVHWTVDQQSQYIQGYKILYRPSGANHGESDWLVFEVRTPAKNSVVIPDLRKGVNYEIKARPFFNEFQGADSEIKFAKTLEEGNAPPQGVTVSKNDGNGTAILVSWQPPPEDTQNGMVQEYKVWCLGNETRYHINKTVDGSTFSVVIPFLVPGIRYSVEVAASTGAGSGVKSEPQFIQLDAHGNPVSPEDQVSLAQQISDVVKQPAFIAGIGAACWIILMVFSIWLYRHRKKRNGLTSTYAGIRKVPSFTFTPTVTYQRGGEAVSSGGRPGLLNISEPAAQPWLADTWPNTGNNHNDCSISCCTAGNGNSDSNLTTYSRPADCIANYNNQLDNKQTNLMLPESTVYGDVDLSNKINEMKTFNSPNLKDGRFVNPSGQPTPYATTQLIQSNLSNNMNNGSGDSGEKHWKPLGQQKQEVAPVQYNIVEQNKLNKDYRANDTVPPTIPYNQSYDQNTGGSYNSSDRGSSTSGNQGHKKGARTPKVPKQGGMNWADLLPPPPAHPPPHSNSEEYNISVDESYDQEMPCPVPPARMYLQQDELEEEEDERGPTPPVRGAASSPAAVSYSHQSTATLTPSPQEELQPMLQDCPEETGHMQHQPDRRRQPVSPPPPPRPISPPHTYGYISGPLVSDMDTDAPEEEEDEADMEVAKMQTRRLLLRGLEQTPASSVGDLESSVTGSMINGWGSASEEDNISSGRSSVSSSDGSFFTDADFAQAVAAAAEYAGLKVARRQMQDAAGRRHFHASQCPRPTSPVSTDSNMSAAVMQKTRPAKKLKHQPGHLRRETYTDDLPPPPVPPPAIKSPTAQSKTQLEVRPVVVPKLPSMDARTDRSSDRKGSSYKGREVLDGRQVVDMRTNPGDPREAQEQQNDGKGRGNKAAKRDLPPAKTHLIQEDILPYCRPTFPTSNNPRDPSSSSSMSSRGSGSRQREQANVGRRNIAEMQVLGGYERGEDNNEELEETES

SEQ ID NO: 67545 - protein, 34 aa, Homo sapiens
MLNLLSTLIFHFTFIRTTAVIAPAILCRNDLKTD

SEQ ID NO: 67546 - protein, 109 aa, Homo sapiens
MEAPAAGLFLLLLLGTWAPAPGSASSEAPPLINEDVKRTVDLSSHLAKVTAEVVLAHLGGGSTSRATSFLLALEPELEARLAHLGVQVKGEDEEENNLEVRETKIKGKR

SEQ ID NO: 67547 - protein, 18 aa, Homo sapiens
MRILRGPYAALFAAVLTS

SEQ ID NO: 67548 - protein, 33 aa, Homo sapiens
MLLWLLMLGRSASFCSVADKLQWTLAQRTGPHP

SEQ ID NO: 67549 - protein, 157 aa, Homo sapiens [sequence omitted]

SEQ ID NO: 67550 - protein, 63 aa, Homo sapiens [sequence omitted]

SEQ ID NO: 67551 - protein, 262 aa, Homo sapiens
MPKHCFLGFLISFFLTGVAGTQSTHESLKPQRVQFQSRNFHNILQWQPGRALTGNSSVYFVQYKIMFSCSMKSSHQKPSGCWQHISCNFPGCRTLAKYGQRQWKNKEDCWGTQELSCDLTSETSDIQEPYYGRVRAASAGSYSEWSMTPRFTPWWETKIDPPVMNITQVNGSLLVILHAPNLPYRYQKEKNVSIEDYYELLYRVFIINNSLEKEQKVYEGAHRAVEIEALTPHSSYCVVAEIYQPMLDRRSQRSEERCVEIP

SEQ ID NO: 67552 - protein, 35 aa, Homo sapiens
MYVLLLLVLWVPATFMSCNAHPEGVQLHFSSQQGY

SEQ ID NO: 67553 - protein, 94 aa, Homo sapiens
MILGLICLLRWRRRKGQQRTKATTPAREPFQNTEEPYENIRNEGQNTDPKLNPKDDGIVYASLALSSSTSPRAPPSHRPLKSPQNETLYSVLKA

SEQ ID NO: 67554 - protein, 542 aa, Homo sapiens
MVKAFFLTFCQVSSEDRSALWALVTFYGGDCQLTLNKKCTHLIVPEPKGEKYECALKRASIKIVTPDWVLDCVSEKTKKDEAFYHPRLIIYEEEEEEEEEEEEVENEEQDSQNEGSTDEKSSPASSQEGSPSGDQQFSPKSNTEKSKGELMFDDSSDSSPEKQERNLNWTPAEVPQLAAAKRRLPQGKEPGLINLCANVPPVPGNILPPEVRGNLMAAGQNLQSSERSEMIATWSPAVRTLRNITNNADIQQMNRPSNVAHILQTLSAPTKNLEQQVNHSQQGHTNANAVLFSQVKVTPETHMLQQQQQAQQQQQQHPVLHLQPQQIMQLQQQQQQQISQQPYPQQPPHPFSQQQQQQQQAHPHQFSQQQLQFPQQQLHPPQQLHRPQQQLQPFQQQHALQQQFHQLQQHQLQQQQLAQLQQQHSLLQQQQQQQIQQQQLQRMHQQQQQQQMQSQTAPHLSQTSQALQHQVPPQQPPQQQQQQQPPPSPQQHQLFGHDPAVEIPEEGFLLGCVFAIADYPEQMSDKQLLATWKRVRLCLEEG

SEQ ID NO: 67555 - protein, 87 aa, Homo sapiens
MGCLLLLLCTPVGLSRMFTVMGQLLVKPTILEDLDEQIYIITLEEEALQRRLNGLSSSVEYNIMELEQELENVKTLKTKLGIVLFFS

SEQ ID NO: 67556 - protein, 590 aa, Homo sapiens
MAQDRLQLFIAKMKIPFLLLFFLWEAESHAASRPNIILVMADDLGIGDPGCYGNKTIRTPNIDRLASGGVKLTQHLAASPLCTPSRAAFMTGRYPVRSGMASWSRTGVFLFTASSGGLPTDEITFAKLLKDQGYSTALIGKWHLGMSCHSKTDFCHHPLHHGFNYFYGISLTNLRDCKPGEGSVFTTGFKRLVFLPLQIVGVTLLTLAALNCLGLLHVPLGVFFSLLFLAALILTLFLGFLHYFRPLNCFMMRNYEIIQQPMSYDNLTQRLTVEAAQFIQRNTETPFLLVLSYLHVHTALFSSKDFAGKSQHGVYGDAVEEMDWSVGQILNLLDELRLANDTLIYFTSDQGAHVEEVSSKGEIHGGSNGIYKGGKANNWEGGIRVPGILRWPRVIQAGQKIDEPTSNMDIFPTVAKLAGAPLPEDRIIDGRDLMPLLEGKSQRSDHEFLFHYCNAYLNAVRWHPQNSTSIWKAFFFTPNFNPVGSNGCFATHVCFCFGSYVTHHDPPLLFDISKDPRERNPLTPASEPRFYEILKVMQEAADRHTQTLPEVPDQFSWNNFLWKPWLQLCCPSTGLSCQCDREKQDKRLSR

SEQ ID NO: 67557 - protein, 23 aa, Homo sapiens
MAFWLSSSVVSVLISLISDTSSI

SEQ ID NO: 67558 - protein, 39 aa, Homo sapiens
MEPLMAPKMRTALTLCLTSSLWVCEWWLSKEFKPSCTWQ

SEQ ID NO: 67559 - protein, 312 aa, Homo sapiens
TLALCGAALLYLARCAAEPGDPRAMSGRSPPPPAPARAAAFLAVLVASAPRAAERRSVIRSTWLARRGAPGDVWARFAVGTAGLGAEERRALEREQARHGDLLLLPALRDAYENLTAKVLAMLAWLDEHVAFEFVLKADDDSFARLDALLAELRAREPARRRRLYWGFFSGRGRVKPGGRWREAAWQLCDYYLPYALGGGYVLSADLVHYLRLSRDYLRAWHSEDVSLGAWLAPVDVQREHDPRFDTEYRSRGCSNQYLVTHKQSLEDMLEKHATLAREGRLCKREVQLRLSYVYDWSAPPSQCCQRREGIP

SEQ ID NO: 67560 - protein, 49 aa, Homo sapiens
RLSLMGAFLLATSLKWNLLVALLPLQLWCYTEKLEVSKQTREKEKHQKV

SEQ ID NO: 67561 - protein, 36 aa, Homo sapiens
VLLCLISLLLLCYMCVCHFQFFVKDTKNLGLHNTSR

SEQ ID NO: 67562 - protein, 765 aa, Homo sapiens
LWLSMALPALGLDPWSLLGLFLFQLLQLLLPTTTAGGGGQGPMPRVRYYAGDERRALSFFHQKGLQDFDTLLLSGDGNTLYVGAREAILALDIQDPGVPRLKNMIPWPASDRKKSECAFKKKSNETQCFNFIRVLVSYNVTHLYTCGTFAFSPACTFIELQDSYLLPISEDKVMEGKGQSPFDPAHKHTAVLVDGMLYSGTMNNFLGSEPILMRTLGSQPVLKTDNFLRWLHHDASFVAAIPSTQVVYFFFEETASEFDFFERLHTSRVARVCKNDVGGEKLLQKKWTTFLKAQLLCTQPGQLPFNVIRHAVLLPADSPTAPHIYAVFTSQWQVGGTRSSAVCAFSLLDIERVFKGKYKELNKETSRWTTYRGPETNPRPGSCSVGPSSDKALTFMKDHFLMDEQVVGTPLLVKSGVEYTRLAVETAQGLDGHSHLVMYLGTTTGSLHKAVVSGDSSAHLVEEIQLFPDPEPVRNLQLAPTQGAVFVGFSGGVWRVPRANCSVYESCVDCVLARDPHCAWDPESRTCCLLSAPNLNSWKQDMERGNPEWACASGPMSRSLRPQSRPQIIKEVLAVPNSILELPCPHLSALASYYWSHGPAAVPEASSTVYNGSLLLIVQDGVGGLYQCWATENGFSYPVISYWVDSQDQTLALDPELAGIPREHVKVPLTRVSGGAALAAQQSYWPHFVTVTVLFALVLSGALIILVASPLRALRARGKVQGCETLRPGEKAPLSREQHLQSPKECRTSASDVDADNNCLGTEVA

SEQ ID NO: 67563 - protein, 46 aa, Homo sapiens
IFSYNVVFLFVGTASLGLFLSSTFPSMLAYTEDSLQYKDIPGSGQL

SEQ ID NO: 67564 - protein, 91 aa, Homo sapiens
LLCLWIAVLAHTDRSPRMCTEGAFPHRSACSLPLTHVHTHIHVCVPVLWGSVPRGANPRRKKTVIQLFSSQDCLSPTPSESSYVGYWERSM

SEQ ID NO: 67565 - protein, 311 aa, Homo sapiens
LLLLLWLSLPVRLPSFVVSQRCAGLLLAALRIQGVGCQVQVWKALLQEMPLTALLRNLGKMTANSVLEPGNSEVSLVCEKLCNEKLLKKARIHPFHILIALETYKTGHGLRGKLKWRPDEEILKALDAAFYKTFKTVEPTGKRFLLAVDVSASMNQRVLGSILNASTVAAAMCMVVTRTEKDSYVVAFSDEMVPCPVTTDMTLQQVLMAMSQIPAGGTDCSLPMIWAQKTNTPADVFIVFTDNETFAGGVHPAIALREYRKKMDIPAKLIVCGMTSNGFTIADPDDRGMLDMCGFDTGALDVIRNFTLDMI

SEQ ID NO: 67566 - protein, 64 aa, Homo sapiens
TRPPSLSLLLPSALLSCGKRAARGVSARSCLRGLVTVCIAPCCKCGRRSLRPGFLFNVNSFCFQ

SEQ ID NO: 67567 - protein, 44 aa, Homo sapiens
LVSLCFGSLWPVLSRLLASRPAARPRGSSWPPRRPARARRPRAG

SEQ ID NO: 67568 - protein, 94 aa, Homo sapiens
LLLFILLLVTVLLAARRRRGGYEYSDQKSGKSKGKDVNLAEFAVAAGDQMLYRSEDIQLDYKNNILKERAELAHSPLPAKYIDLDKGFRKENCK

SEQ ID NO: 67569 - protein, 154 aa, Homo sapiens
LPPLLCAGIMELALLCGLVVMAGVIPIQGGILNLNKMVKQVTGKMPILSYWPYGCHCGLGGRGQPKDATDWCCQTHDCCYDHLKTQGCSIYKDYYRYNFSQGNIHCSDKGSWCEQQLCACDKEVAFCLKRNLDTYQKRLRFYWRPHCRGQTPGC

SEQ ID NO: 67570 - protein, 994 aa, Homo sapiens
IMAAEWASRFWLWATLLIPAAAVYEDQVGKFDWRQQYVGKVKFASLEFSPGSKKLVVATEKNVIAALNSRTGEILWRHVDKGTAEGAVDAMLLHGQDVITVSNGGRIMRSWETNIGGLNWEITLDSGSFQALGLVGLQESVRYIAVLKKTTLALHHLSSGHLKWVEHLPESDSIHYQMVYSYGSGVVWALGVVPFSHVNIVKFNVEDGEIVQQVRVSTPWLQHLSGACGVVDEAVLVCPDPSSRSLQTLALETEWELRQIPLQSLDLEFGSGFQPRVLPTQPNPVDASRAQFFLHLSPSHYALLQYHYGTLSLLKNFPQTALVSFATTGEKTVAAVMACRNEVQKSSSSEDGSMGSFSEKSSSKDSLACFNQTYTINLYLVETGRRLLDTTITFSLEQSGTRPERLYIQVFLKKDDSVGYRALVQTEDHLLLFLQQLAGKVVLWSREESLAEVVCLEMVDLPLTGAQAELEGEFGKKADGLLGMFLKRLSSQLILLQAWTSHLWKMFYDARKPRSQIKNEINIDTLARDEFNLQKMMVMVTASGKLFGIESSSGTILWKQYLPNVKPDSSFKLMVQRTTAHFPHPPQCTLLVKDKESGMSSLYVFNPIFGKWSQVAPPVLKRPILQSLLLPVMDQDYAKVLLLIDDEYKVTAFPATRNVLRQLHELAPSIFFYLVDAEQGRLCGYRLRKDLTTELSWELTIPPEVQRIVKVKGKRSSEHVHSQGRVMGDRSVLYKSLNPNLLAVVTESTDAHHERTFIGIFLIDGVTGRIIHSSVQKKAKGPVHIVHSENWVVYQYWNTKARRNEFTVLELYEGTEQYNATAFSSLDRPQLPQVLQQSYIFPSSISAMEATITERGITSRHLLIGLPSGAILSLPKALLDPRRPEIPTEQSREENLIPYSPDVQIHAERFINYNQTVSRMRGIYTAPSGLESTCLVVAYGLDIYQTRVYPSKQFDVLKDDYDYVLISSVLFGLVFATMITKRLAQVKLLNRAWR

SEQ ID NO: 67571 - protein, 14 aa, Homo sapiens
KEKPYVWLFSFLFL

SEQ ID NO: 67572 - protein, 72 aa, Homo sapiens
LAFRALVLLDLLGLLDLLASLVRLESEAPRGTLDQMDHRGPQDPLGNLVAREPSRVWKAVRISCVQPTVHPE

SEQ ID NO: 67573 - protein, 747 aa, Homo sapiens
VAGGSVRSEGAMAVRALKLLTTLLAVVAAASQAEVESEAGWGMVTPDLLFAEGTAAYARGDWPGVVLSMERALRSRAALRALRLRCRTQCAADFPWELDPDWSPSPAQASGAAALRDLSFFGGLLRRAACLRRCLGPPAAHSLSEEMELEFRKRSPYNYLQVAYFKINKLEKAVAAAHTFFVGNPEHMEMQQNLDYYQTMSGVKEADFKDLETQPHMQEFRLGVRLYSEEQPQEAVPHLEAALQEYFVAYEECRALCEGPYDYDGYNYLEYNADLFQAITDHYIQVLNCKQNCVTELASHPSREKPFEDFLPSHYNYLQFAYYNIGNYTQAVECAKTYLLFFPNDEVMNQNLAYYAAMLGEEHTRSIGPRESAKEYRQRSLLEKELLFFAYDVFGIPFVDPDSWTPEEVIPKRLQEKQKSERETAVRISQEIGNLMKEIETLVEEKTKESLDVSRLTREGGPLLYEGISLTMNSKLLNGSQRVVMDGVISDHECQELQRLTNVAATSGDGYRGQTSPHTPNEKFYGVTVFKALKLGQEGKVPLQSAHLYYNVTEKVRRIMESYFRLDTPLYFSYSHLVCRTAIEEVQAERKDDSHPVHVDNCILNAETLVCVKEPPAYTFRDYSAILYLNGDFDGGNFYFTELDAKTVTAEVQPQCGRAVGFSSGTENPHGVKAVTRGQRCAIALWFTLDPRHSERDRVQADDLVKMLFSPEEMDLSQEQPLDAQQGPPEPAQESLSGSESKPKDEL

SEQ ID NO: 67574 - protein, 552 aa, Homo sapiens
RMLCSLLLCECLLLVAGYAHDDDWIDPTDMLNYDAASGTMRKSQAKYGISGEKDVSPDLSCADEISECYHKLDSLTYKIDECEKKKREDYESQSNPVFRRYLNKILIEAGKLGLPDENKGDMHYDAEIILKRETLLEIQKFLNGEDWKPGALDDALSDILINFKFHDFETWKWRFEDSFGVDPYNVLMVLLCLLCIVVLVATELWTYVRWYTQLRRVLIISFLFSLGWNWMYLYKLAFAQHQAEVAKMEPLNNVCAKKMDWTGSIWEWFRSSWTYKDDPCQKYYELLLVNPIWLVPPTKALAVTFTTFVTEPLKHIGKGTGEFIKALMKEIPALLHLPVLIIMALAILSFCYGAGKSVHVLRHIGGPESEPPQALRPRDRRRQEEIDYRPDGGAGDADFHYRGQMGPTEQGPYAKTYEGRREILRERDVDLRFQTGNKSPEVLRAFDVPDAEAREHPTVVPSHKSPVLDTKPKETGGILGEGTPKESSTESSQSAKPVSGQDTSGNTEGSPAAEKAQLKSEAAGSPDQGSTYSPARGVAGPRGQDPVSSPCG

SEQ ID NO: 67575 - protein, 44 aa, Homo sapiens; identical to SEQ ID NO: 67567

SEQ ID NO: 67576 - protein, 291 aa, Homo sapiens
VGLVTLLGLAVGSYLVRRSRRPQVTLLDPNEKYLLRLLDKTTVSHNTKRFRFALPTAHHTLGLPVGKHIYLSTRIDGSLVIRPYTPVTSDEDQGYVDLVIKVYLKGVHPKFPEGGKMSQYLDSLKVGDVVEFRGPSGLLTYTGKGHFNIQPNKKSPPEPRVAKKLGMIAGGTGITPMLQLIRAILKVPEDPTQCFLLFANQTEKDIILREDLEELQARYPNRFKLWFTLDHPPKDWAYSKGFVTADMIREHLPAPGDDVLVLLCGPPPMVQLACHPNLDKLGYSQKMRFTY

SEQ ID NO: 67577 - protein, 59 aa, Homo sapiens
IDVSCFLFLILVFSIIRRRFWDYGRIALVSEADSESRFQRLSSTSSSGQQDFENELVGI

SEQ ID NO: 67578 - protein, 554 aa, Homo sapiens
LLRLVAFHLGLLFVWLCQRFSRALMAAKRSSGAAPAPASASAPAPVPGGEAERVRVFHKQAFEYISIALRIDEDEKAGQKEQAVEWYKKGIEELEKGIAVIVTGQGEQCERARRLQAKMMTNLVMAKDRLQLLEKMQPVLPFSKSQTDVYNDSTNLACRNGHLQSESGAVPKRKDPLTHTSNSLPRSKTVMKTGSAGLSGHHRAPSYSGLSMVSGVKQGSGPAPTTHKGTPKTNRTNKPSTPTTATRKKKDLKNFRNVDSNLANLIMNEIVDNGTAVKFDDIAGQDLAKQALQEIVILPSLRPELFTGLRAPARGLLLFGPPGNGKTMLAKAVAAESNATFFNISAASLTSKYVGEGEKLVRALFAVARELQPSIIFIDEVDSLLCERREGEHDASRRLKTEFLIEFDGVQSAGDDRVLVMGATNRPQELDEAVLRRFIKRVYVSLPNEETRLLLLKNLLCKQGSPLTQKELAQLARMTDGYSGSDLTALAKDAALGPIRELKPEQVKNMSASEMRNIRLSDFTESLKKIKRSVSPQTLEAYIRWNKDFGDTTV

SEQ ID NO: 67579 - protein, 385 aa, Homo sapiens
ILMMANVFIYFIMEVSKSSSQEKNGKGEVIIPKEKFWKISTPPEAYWNREQEKLNRQYNPILSMLTNQTGEAGRLSNISHLNYCEPDLRVTSVVTGFNNLPDRFKDFLLYLRCRNYSLLIDQPDKCAKKPFLLLAIKSLTPHFARRQAIRESWGQESNAGNQTVVRVFLLGQTPPEDNHPDLSDMLKFESEKHQDILMWNYRDTFFNLSLKEVLFLRWVSTSCPDTEFVFKGDDDVFVNTHHILNYLNSLSKTKAKDLFIGDVIHNAGPHRDKKLKYYIPEVVYSGLYPPYAGGGGFLYSGHLALRLYHITDQVHLYPIDDVYTGMCLQKLGLVPEKHKGFRTFDIEEKNKNNICSYVDLMLVHSRKPQEMIDIWSQLQSAHLKC

SEQ ID NO: 67580 - protein, 755 aa, Homo sapiens
LAAPVLLVLLWALGARGQGSPQQGTIVGMRLASCNKSCGTNPDGIIFVSEGSTVNLRLYGYSLGNISSNLISFTEVDDAETLHKSTSCLELTKDLVVQQLVNVSRGNTSGVLVVLTKFLRRSESMKLYALCTRAQPDGPWLKWTDKDSLLFMVEEPGRFLPLWLHILLITVLLVLSGIFSGLNLGLMALDPMELRIVQNCGTEKERRYARKIEPIRRKGNYLLCSLLLGNVLVNTSLTILLDNLIGSGLMAVASSTIGIVIFGEILPQALCSRHGLAVGANTILLTKFFMLLTFPLSFPISKLLDFFLGQEIRTVYNREKLMEMLKVTEPYNDLVKEELNMIQGALELRTKTVEDIMTQLQDCFMIRSDAILDFNTMSEIMESGYTRIPVFEDEQSNIVDILYVKDLAFVDPDDCTPLKTITRFYNHPVHFVFHDTKLDAMLEEFKKGKSHLAIVQKVNNEGEGDPFYEVLGLVTLEDVIEEIIKSEILDESDMYTDNRSRKRVSEKNKRDFSAFKDADNELKVKISPQLLLAAHRFLATEVSQFSPSLISEKILLRLLKYPDVIQELKFDEHNKYYARHYLYTRNKPADYFILILQGKVEVEAGKENMKFETGAFSYYGTMALTSVPSDRSPAHPTPLSRSASLSYPDRTDVSTAATLAGSSNQFGSSVLGQYISDFSVRALVDLQYIKITRQQYQNGLLASRMENSPQFPIDGCTTHMENLAEKSELPVVDETTTLLNERNSLLHKASHENAI

SEQ ID NO: 67581 - protein, 723 aa, Homo sapiens
VTFGFIWGMMLLHFTIQQRTQPESSSMLREQILDLSKRYIKALAEENRNVVDGPYAGVMTAYDLKKTLAVLLDNILQRIGKLESKVDNLVVNGTGTNSTNSTTAVPSLVALEKINVADIINGAQEKCVLPPMDGYPHCEGKIKWMKDMWRSDPCYADYGVDGSTCSFFIYLSEVENWCPHLPWRAKNPYEEADHNSLAEIRTDFNILYSMMKKHEEFRWMRLRIRRMADAWIQAIKSLAEKQNLEKRKRKKVLVHLGLLTKESGFKIAETAFSGGPLGELVQWSDLITSLYLLGHDIRISASLAELKEIMKKVVGNRSGCPTVGDRIVELIYIDIVGLAQFKKTLGPSWVHYQCMLRVLDSFGTEPEFNHANYAQSKGHKTPWGKWNLNPQQFYTMFPHTPDNSFLGFVVEQHLNSSDIHHINEIKRQNQSLVYGKVDSFWKNKKIYLDIIHTYMEVHATVYGSSTKNIPSYVKNHGILSGRDLQFLLRETKLFVGLGFPYEGPAPLEAIANGCAFLNPKFNPPKSSKNTDFFIGKPTLRELTSQHPYAEVFIGRPHVWTVDLNNQEEVEDAVKAILNQKIEPYMPYEFTCEGMLQRINAFIEKQDFCHGQVMWPPLSALQVKLAEPGQSCKQVCQESQLICEPSFFQHLNKDKDMLKYKVTCQSSELAKDILVPSFDPKNKHCVFQGDLLLFSCAGAHPRHQRVCPCRDFIKGQVALCKDCL

SEQ ID NO: 67582 - protein, 76 aa, Homo sapiens
VKRFSRQRFSDALRRSHLLMLLTFCPCSSSHLEHFQFWFCGAAGLSLSGEGGSWSRRRSSGKSRRLPGQLPHWKGF

SEQ ID NO: 67583 - protein, 1034 aa, Homo sapiens
LQRPWRVPWLPWTILLVSTAAASQNQERLCAFKDPYQQDLGIGESRISHENGTILCSKGSTCYGLWEKSKGDINLVKQGCWSHIGDPQECHYEECVVTTTPPSIQNGTYRFCCCSTDLCNVNFTENFPPPDTTPLSPPHSFNRDETIIIALASVSVLAVLIVALCFGYRMLTGDRKQGLHSMNMMEAAASEPSLDLDNLKLLELIGRGRYGAVYKGSLDERPVAVKVFSFANRQNFINEKNIYRVPLMEHDNIARFIVGDERVTADGRMEYLLVMEYYPNGSLCKYLSLHTSDWVSSCRLAHSVTRGLAYLHTELPRGDHYKPAISHRDLNSRNVLVKNDGTCVISDFGLSMRLTGNRLVRPGEEDNAAISEVGTIRYMAPEVLEGAVNLRDCESALKQVDMYALGLIYWEIFMRCTDLFPGESVPEYQMAFQTEVGNHPTFEDMQVLVSREKQRPKFPEAWKENSLAVRSLKETIEDCWDQDAEARLTAQCAEERMAELMMIWERNKSVSPTVNPMSTAMQNERNLSHNRRVPKIGPYPDYSSSSYIEDSIHHTDSIVKNISSEHSMSSTPLTIGEKNRNSINYERQQAQARIPSPETSVTSLSTNTTTTNTTGLTPSTGMTTISEMPYPDETNLHTTNVAQSIGPTPVCLQLTEEDLETNKLDPKEVDKNLKESSDENLMEHSLKQFSGPDPLSSTSSSLLYPLIKLAVEATGQQDFTQTANGQACLIPDVLPTQIYPLPKQQNLPKRPTSLPLNTKNSTKEPRLKFGSKHKSNLKQVETGVAKMNTINAAEPHVVTVTMNGVAGRNHSVNSHAATTQYANGTVLSGQTTNIVTHRAQEMLQNQFIGEDTRLNINSSPDEHEPLLRREQQAGHDEGVLDRLVDRRERPLEGGRTNSNNNNSNPCSEQDVLAQGVPSTAADPGPSKPRRAQRPNSLDLSATNVLDGSSIQIGESTQDGKSGSGEKIKKRVKTPYSLKRWRPSTWVISTESLDCEVNNNGSNRAVHSKSSTAVYLAEGGTATTMVSKDIGMNCL

SEQ ID NO: 67584 - protein, 386 aa, Homo sapiens
IANVWSLVSRLPFLGALGVAVAVAEIGCTMSAFEKPQIIAHIQKGFNYTVFDCKWVPCSAKFVTMGNFARGTGVIQLYEIQHGDLKLLREIEKAKPIKCGTFGATSLQQRYLATGDFGGNLHIWNLEAPEMPVYSVKGHKEIINAIDGIGGLGIGEGAPEIVTGSRDGTVKVWDPRQKDDPVANMEPVQGENKRDCWTVAFGNAYNQEERVVCAGYDNGDIKLFDLRNMALRWETNIKNGVCSLEFDRKDISMNKLVATSLEGKFHVFDMRTQHPTKGFASVSEKAHKSTVWQVRHLPQNRELFLTAGGAGGLHLWKYEYPIQRSKKDSEGIEMGVAGSVSLLQNVTLSTQPISSLDWSPDKRGLCVCSSFDQTVRVLIVTKLNKI

SEQ ID NO: 67585 - protein, 35 aa, Homo sapiens
VCVLISLISGMFFCLMNAILNAVLERGVGVRVYSI

SEQ ID NO: 67586 - protein, 758 aa, Homo sapiens
KAFPAMRPVSVWQWSPWGLLLCLLCSSCLGSPSPSTGPEKKAGSQGLRFRLAGFPRKPYEGRVEIQRAGEWGTICDDDFTLQAAHILCRELGFTEATGWTHSAKYGPGTGRIWLDNLSCSGTEQSVTECASRGWGNSDCTHDEDAGVICKDQRLPGFSDSNVIEVEHHLQVEEVRIRPAVGWGRRPLPVTEGLVEVRLPDGWSQVCDKGWSAHNSHVVCGMLGFPSEKRVNAAFYRLLAQRQQHSFGLHGVACVGTEAHLSLCSLEFYRANDTARCPGGGPAVVSCVPGPVYAASSGQKKQQQSKPQGEARVRLKGGAHPGEGRVEVLKASTWGTVCDRKWDLHAASVVCRELGFGSAREALSGARMGQGMGAIHLSEVRCSGQELSLWKCPHKNITAEDCSHSQDAGVRCNLPYTGAETRIRLSGGRSQHEGRVEVQIGGPGPLRWGLICGDDWGTLEAMVACRQLGLGYANHGLQETWYWDSGNITEVVMSGVRCTGTELSLDQCAHHGTHITCKRTGTRFTAGVICSETASDLLLHSALVQETAYIEDRPLHMLYCAAEENCLASSARSANWPYGHRRLLRFSSQIHNLGRADFRPKAGRHSWVWHECHGHYHSMDIFTHYDILTPNGTKVAEGHKASFCLEDTECQEDVSKRYECANFGEQGITVGCWDLYRHDIDCQWIDITDVKPGNYILQVVINPNFEVAESDFTNNAMKCNCKYDGHRIWVHNCHIGDAFSEEANRRFERYPGQTSNQII

SEQ ID NO: 67587 - protein, 418 aa, Homo sapiens
RRRRRRSRGRAVKFGSQIFSLLLAIPSASPAPGVTSAGRGPACVCARRSGRMAVLKLTDQPPLVQAIFSGDPEEIRMLIHKTEDVNTLDSEKRTPLHVAAFLGDAEIIELLILSGARVNAKDNMWLTPLHRAVASRSEEAVQVLIKHSADVNARDKNWQTPLHVAAANKAVKCAEVIIPLLSSVNVSDRGGRTALHHAALNGHVEMVNLLLAKGANINAFDKKDRRALHWAAYMGHLDVVALLINHGAEVTCKDKKGYTPLHAAASNGQINVVKHLLNLGVEIDEINVYGNTALHIACYNGQDAVVNELIDYGANVNQPNNNGFTPLHFAAASTHGALCLELLVNNGADVNIQSKDGKSPLHMTAVHGRFTRSQTLIQNGGEIDCVDKDGNTPLHVAARYGHELLINTLITSGADTAK

SEQ ID NO: 67588 - protein, 511 aa, Homo sapiens
TAPWVALALLWGSLCAGSGRGEAETRECIYYNANWELERTNQSGLERCEGEQDKRLHCYASWRNSSGTIELVKKGCWLDDFNCYDRQECVATEENPQVYFCCCEGNFCNERFTHLPEAGGPEVTYEPPPTAPTLLTVLAYSLLPIGGLSLIVLLAFWMYRHRKPPYGHVDIHEDPGPPPPSPLVGLKPLQLLEIKARGRFGCVWKAQLMNDFVAVKIFPLQDKQSWQSEREIFSTPGMKHENLLQFIAAEKRGSNLEVELWLITAFHDKGSLTDYLKGNIITWNELCHVAETMSRGLSYLHEDVPWCRGEGHKPSIAHRDFKSKNVLLKSDLTAVLADFGLAVRFEPGKPPGDTHGQVGTRRYMAPEVLEGAINFQRDAFLRIDMYAMGLVLWELVSRCKAADGPVDEYMLPFEEEIGQHPSLEELQEVVVHKKMRPTIKDHWLKHPGLAQLCVTIEECWDHDAEARLSAGCVEERVSLIRRSVNGTTSDCLVSLVTSVTNVDLPPKESSI

SEQ ID NO: 67589 - protein, 38 aa, Homo sapiens
VGVQLFPFRLAAAISLISQVSQDGCIQVHPGAMEKEAV

SEQ ID NO: 67590 - protein, 84 aa, Homo sapiens
ILRWLACWAWGLLTDSMEQGWAVCAHAQHALRGGGGGRGFLMSVQELKVSGVLPRICPTPHDKTELCNKQYQFILAVGFCFFSS

SEQ ID NO: 67591 - protein, 410 aa, Homo sapiens
LGSLLVLMVLHSPSLLASWQRNELTDRRFLQLNKCPACFGTSWCRRFLNGQVVFEAWGRLRLLDFLNVKNVYFAQYGEPREGGRRRVVLKRLGSQRELAQLDQSICKRATGRPRCDLLQAMPRTEFARLNGDVRLLTPEAVEGWSDLVHCPSQRLLDRLVRRYAETKDSGSFLLRNLKDSERMQLLLTLAFNPEPLVLQSFPSDEGWPFAKYLGACGRMVAVNYVGEELWSYFNAPWEKRVDLAWQLMEIAEQLTNNDFEFALYLLDVSFDNFAVGPRDGKVIIVDAENVLVADKRLIRQNKPENWDVWYESKFDDCDKEACLSFSKEILCARATVDHNYYAVCQNLLSRHATWRGTSGGLLHDPPSEIAKDGRLEALLDECANPKKRYGRFQAAKELREYLAQLSNNVR

SEQ ID NO: 67592 - protein, 52 aa, Homo sapiens
VVSALRSLGCSLLGFSCVAEEGEEKSSRQAQPSPARSPDGAAAGAARALTEP

SEQ ID NO: 67593 - protein, 700 aa, Homo sapiens
LREPAALEMELLPLWLCLGFHFLTVGWRNRSGTATAASQGVCKLVGGAADCRGQSLASVPSSLPPHARMLTLDANPLKTLWNHSLQPYPLLESLSLHSCHLERISRGAFQEQGHLRSLVLGDNCLSENYEETAAALHALPGLRRLDLSGNALTEDMAALMLQNLSSLRSVSLAGNTIMRLDDSVFEGLERLRELDLQRNYIFEIEGGAFDGLAELRHLNLAFNNLPCIVDFGLTRLRVLNVSYNVLEWFLATGGEAAFELETLDLSHNQLLFFPLLPQYSKLRTLLLRDNNMGFYRDLYNTSSPREMVAQFLLVDGNVTNITTVSLWEEFSSSDLADLRFLDMSQNQFQYLPDGFLRKMPSLSHLNLHQNCLMTLHIREHEPPGALTELDLSHNQLSELHLAPGLASCLGSLRLFNLSSNQLLGVPPGLFANARNITTLDMSHNQISLCPLPAASDRVGPPSCVDFRNMASLRSLSLEGCGLGALPDCPFQGTSLTYLDLSSNWGVLNGSLAPLQDVAPMLQVLSLRNMGLHSSFMALDFSGFGNLRDLDLSGNCLTTFPRFGGSLALETLDLRRNSLTALPQKAVSEQLSRGLRTIYLSQNPYDCCGVDGWGALQHGQTVADWAMVTCNLSSKIIRVTELPGGVPRDCKWERLDLGLLYLVLILPSCLTLLVACTVIVLTFKKPLLQVIKSRCHWSSVY

SEQ ID NO: 67594 - protein, 35 aa, Homo sapiens
LVVMPGFLVRILPLLLVLLLLGPTRGLRVCALELS

SEQ ID NO: 67595 - protein, 82 aa, Homo sapiens
ILLCFEGLLFLIFTSVMFGTQVHSICTDETGIEQLKKEERRWAKKTKWMNMKAVFGHPFSLGWASPFATPDQGKADPYQYVV

SEQ ID NO: 67596 - protein, 103 aa, Homo sapiens
IGFHLARTFYVALLLWPMCCILCPQCATGPQRNVCLSNHGSGAVWQECKSGWRPGSPPGALHPPSRRTQQHDALRRSHCVQAPHLPGTALLRVPPSRNEGVHP

SEQ ID NO: 67597 - protein, 306 aa, Homo sapiens
RMSRELAPLLLLLLSIHSALAMRICSFNVRSFGESKQEDKNAMDVIVKVIKRCDIILVMEIKDSNNRICPILMEKLNRNSRRGITYNYVISSRLGRNTYKEQYAFLYKEKLVSVKRSYHYHDYQDGDADVFSREPFVVWFQSPHTAVKDFVIIPLHTTPETSVKEIDELVEVYTDVKHRWKAENFIFMGDFNAGCSYVPKKAWKNIRLRTDPRFVWLIGDQEDTTVKKSTNCAYDRIVLRGQEIVSSVVPKSNSVFDFQKAYKLTEEEALDVSDHFPVEFKLQSSRAFTNSKKSVTLRKKTKSKRS

SEQ ID NO: 67598 - protein, 125 aa, Homo sapiens
VGCPASGLLLLLVLLRRPAASPSRAGGESGCGFVLTVIVAFPRLGGLRAGLLLLRERAVLSDPTPSRGSPHTLGCVRVEWDPRTRVSLDSYGAERTKIPDGKLNEWQKPWWSRRKSPKRSNFGYY

SEQ ID NO: 67599 - protein, 20 aa, Homo sapiens
VFICNLVLFIVLRRYLVEAL

SEQ ID NO: 67600 - protein, 464 aa, Homo sapiens
ILVNVTHDLSSFHMLRFYLFISLLCLSRSDAEETCPSFTRLSFHSAVVGTGLNVRLMLYTRKNLTCAQTINSSAFGNLNVTKKTTFIVHGFRPTGSPPVWMDDLVKGLLSVEDMNVVVVDWNRGATTLIYTHASSKTRKVAMVLKEFIDQMLAEGASLDDIYMIGVSLGAHISGFVGEMYDGWLGRITGLDPAGPLFNGKPHQDRLDPSDAQFVDVIHSDTDALGYKEPLGNIDFYPNGGLDQPGCPKTILGGFQYFKCDHQRSVYLYLSSLRESCTITAYPCDSYQDYRNGKCVSCGTSQKESCPLLGYYADNWKDHLRGKDPPMTKAFFDTAEESPFCMYHYFVDIITWNKNVRRGDITIKLRDKAGNTTESKINHEPTTFQKYHQVSLLARFNQDLDKVAAISLMFSTGSLIGPRYKLRILRMKLRSLAHPERPQLCRYDLVLMENVETVFQPILCPELQL

SEQ ID NO: 67601 - protein, 709 aa, Homo sapiens
RMRERIWAPPLLLLLPLLLPPPLWGGPPDSPRRELELEPGPLQPFDLLYASGAAAYYSGDYERAVRDLEAALRSHRRLREIRTRCARHCAARHPLPPPPPGEGPGAELPLFRSLLGRARCYRSCETQRLGGPASRHRVSEDVRSDFQRRVPYNYLQRAYIKLNQLEKAVEAAHTFFVANPEHMEMQQNIENYRATAGVEALQLVDREAKPHMESYNAGVKHYEADDFEMAIRHFEQALREYFVEDTECRTLCEGPQRFEEYEYLGYKAGLYEAIADHYMQVLVCQHECVRELATRPGRLSPIENFLPLHYDYLQFAYYRVGEYVKALECAKAYLLCHPDDEDVLDNVDYYESLLDDSIDPASIEAREDLTMFVKRHKLESELIKSAAEGLGFSYTEPNYWIRYGGRQDENRVPSGVNVEGAEVHGFSMGKKLSPKIDRDLREGGPLLYENITFVYNSEQLNGTQRVLLDNVLSEEQCRELHSVASGIMLVGDGYRGKTSPHTPNEKFEGATVLKALKSGYEGRVPLKSARLFYDISEKARRIVESYFMLNSTLYFSYTHMVCRTALSGQQDRRNDLSHPIHADNCLLDPEANECWKEPPAYTFRDYSALLYMNDDFEGGEFIFTEMDAKTVTASIKPKCGRMISFSSGGENPHGVKAVTKGKRCAVALWFTLDPLYRELERIQADEVIAILDQEQQGKHELNINPKDEL

SEQ ID NO: 67602 - protein, 318 aa, Homo sapiens
LGTKYQATMVYKTLFALCILTAGWRVQSLPTSAPLSVSLPTNIVPPTTIWTSSPQNTDADTASPSNGTHNNSVLPVTASAPTSLLPKNISIESREEEITSPGSNWEGTNTDPSPSGFSSTSGGVHLTTTLEEHSSGTPEAGVAATLSQSAAEPPTLISPQAPASSPSSLSTSPPEVFSASVTTNHSSTVTSTQPTGAPTAPESPTEESSSDHTPTSHATAEPVPQEKTPPTTVSGKVMCELIDMETTTTFPRVIMQEVEHALSSGSIAAITVTVIAVVLLVFGVAAYLKIRHSSYGRLLDDHDYGSWGNYNNPLYDDS

SEQ ID NO: 67603 - protein, 40 aa, Homo sapiens
LRELTPLSVHLLLLRLVLSLKSQDRRLRGKDGVNWVGRDN

SEQ ID NO: 67604 - protein, 21 aa, Homo sapiens
MHTSGRGWGTTCLLVLLASDE

SEQ ID NO: 67605 - protein, 933 aa, Homo sapiens
ISVARDLKMRLHLLLLLALCGAGTTAAELSYSLRGNWSICNGNGSLELPGAVPGCVHSALFQQGLIQDSYYRFNDLNYRWVSLDNWTYSKEFKIPFEISKWQKVNLILEGVDTVSKILFNEVTIGETDNMFNRYSFDITNVVRDVNSIELRFQSAVLYAAQQSKAHTRYQVPPDCPPLVQKGECHVNFVRKEQCSFSWDWGPSFPTQGIWKDVRIEAYNICHLNYFTFSPIYDKSAQEWNLEIESTFDVVSSKPVGGQVIVAIPKLQTQQTYSIELQPGKRIVELFVNISKNITVETWWPHGHGNQTGYNMTVLFELDGGLNIEKSAKVYFRTVELIEEPIKGSPGLSFYFKINGFPIFLKGSNWIPADSFQDRVTSELFHKKMKFFSRHSHGIIGSIFFLFKCSSPLPAGAGLAVVLQPNWANWLRLLLQSVVDANMNTLRVWGGGIYEQDEFYELCDELGIMVWQDFMFACALYPTDQGFLDSVTAEVAYQIKRLKSHPSIIIWSGNNENEEALMMNWYHISFTDRPIYIKDYVTLYVKNIRELVLAGDKSRPFITSSPTNGAETVAEAWVSQNPNSNYFGDVHFYDYISDCWNWKVFPKARFASEYGYQSWPSFSTLEKVSSTEDWSFNSKFSLHRQHHEGGNKQMLYQAGLHFKLPQSTDPLRTFKDTIYLTQVMQAQCVKTETEFYRRSRSEIVDQQGHTMGALYWQLNDIWQAPSWASLEYGGKWKMLHYFAQNFFAPLLPVGFENENTFYIYGVSDLHSDYSMTLSVRVHTWSSLEPVCSRVTERFVMKGGEAVCLYEEPVSELLRRCGNCTRESCVVSFYLSADHELLSPTNYHFLSSPKEAVGLCKAQITAIISQQGDIFVFDLETSAVAPFVWLDVGSIPGRFSDNGFLMTEKTRTILFYPWEPTSKNELEQSFHVTSLTDIY

SEQ ID NO: 67606 - protein, 18 aa, Homo sapiens
MQRVFLCLFCTLVNYVPP

SEQ ID NO: 67607 - protein, 103 aa, Homo sapiens
LIFWWVYQLLVECPCDSFRCQLDRIEGCLDGWGSTVSEKDHVFGGDCFMSEFQGTHSDHGSGIIKRDTKACSLSLPCKTTTQRLPSANQKQVGFPQTPDLPAP

SEQ ID NO: 67608 - protein, 53 aa, Homo sapiens
KLLLMRVFLRLFFVTLLYDWCNEESPGGEMILNYPVGPTCHHIAILLSRKQKI

SEQ ID NO: 67609 - protein, 30 aa, Homo sapiens
VEMLLVYFVATAVTAWSASPSQARGLPLIQ

SEQ ID NO: 67610 - protein, 346 aa, Homo sapiens
RQHSGLEAAALLLAVTMDPLETPIKDGILYQQHVKFGKKCWRKVWALLYAGGPSGVARLESWEVRDGGLGAAGDRSAGPGRRGERRVIRLADCVSVLPADGESCPRDTGAFLLTTTERSHLLAAQHRQAWMGPICQLAFPGTGEASSGSTDAQSPKRGLVPMEENSIYSSWQEVGEFPVVVQRTEAATRCQLKGPALLVLGPDAIQLREAKGTQALYSWPYHFLRKFGSDKILLGTPGVSLLICKGERTDDVSGIILDESLLRAYSVPGAGGHSRVQDSLGPVLREPTFQGERSFLKTSMLRSLLCSCSWRHPRSQPRTQASCLQGSDCPAPHRNSTSAAHTLGTS

SEQ ID NO: 67611 - protein, 537 aa, Homo sapiens
VTMKLWVSALLMAWFGVLSCVQAEFFTSIGHMTDLIYAEKELVQSLKEYILVEEAKLSKIKSWANKMEALTSKSAADAEGYLAHPVNAYKLVKRLNTDWPALEDLVLQDSAAGFIANLSVQRQFFPTDEDEIGAAKALMRLQDTYRLDPGTISRGELPGTKYQAMLSVDDCFGMGRSAYNEGDYYHTVLWMEQVLKQLDAGEEATTTKSQVLDYLSYAVFQLGDLHRALELTRRLLSLDPSHERAGGNLRYFEQLLEEEREKTLTNQTEAELATPEGIYERPVDYLPERDVYESLCRGEGVKLTPRRQKRLFCRYHHGNRAPQLLIAPFKEEDEWDSPHIVRYYDVMSDEEIERIKEIAKPKLARATVRDPKTGVLTVASYRVSKSSWLEEDDDPVVARVNRRMQHITGLTVKTAELLQVANYGVGGQYEPHFDFSRNDERDTFKHLGTGNRVATFLNYMSDVEAGGATVFPDLGAAIWPKKGTAVFWYNLLRSGEGDYRTRHAACPVLVGCKWVSNKWFHERGQEFLRPCGSTEVD

SEQ ID NO: 67612 - protein, 42 aa, Homo sapiens
LAVALVSTHLPATLVIVATAGLDCQTGFSFYLEAFSEGSRSI

SEQ ID NO: 67613 - protein, 20 aa, Homo sapiens
LYSVLGMHVILTQWLLLTNR

SEQ ID NO: 67614 - protein, 34 aa, Homo sapiens
VVIERGEAFRSCLLSLLLAPNADCEPGDAVVHFL

SEQ ID NO: 67615 - protein, 72 aa, Homo sapiens
LCCCFLISSTKIFLSGVYLIGSVLSSPPPPPPSLRCVCRCRCCRRRCCCCSPRRYTNPRLFVSPLGSVEFLC

SEQ ID NO: 67616 - protein, 147 aa, Homo sapiens
LTKRRMGLKLNGRYISLILAVQIAYLVQAVRAAGKCDAVFKGFSDCLLKLGDSMANYPQGLDDKTNIKTVCTYWEDFHSCTVTALTDCQEGAKDMWDKLRKESKNLNIQGSLFELCGSGNGAAGSLLPAFPVLLVSLSAALATWLSF

SEQ ID NO: 67617 - protein, 130 aa, Homo sapiens
KALRIPGDLRVATVTLMLAMLSSLLAEGRDSPVEPTVTISPSRTEALNHHNLLVCSVTDFYPGQIKVRWFRNDQEETAGVVSTPLIRNGDWTFQILVMLEMTPQRGDVYTCHVEHPSLQSPITVEWRLLH

SEQ ID NO: 67618 - protein, 82 aa, Homo sapiens
ISLGPSLLLFLSLDARLLRTPSPGGPAACELTEGLRLGEWVSPRPCPCSRPWPGPWLSPLCAEIVSLCGYSGVETAGSVTAS

SEQ ID NO: 67619 - protein, 49 aa, Homo sapiens
ISLGPSLLLFLSLDARLLRTPSPGGPAALLPTLTSRRPWPPSQTGSYSC

SEQ ID NO: 67620 - protein, 28 aa, Homo sapiens
LLFLGAGLFIYFRNQKGHSGLQPTGFLS

SEQ ID NO: 67621 - protein, 686 aa, Homo sapiens
KKIVLLAGWALFLFLAYKVSKTDREYQEYNPYEVLNLDPGATVAEIKKQYRLLSLKYHPDKGGDEVMFMRIAKAYAALTDEESRKNWEEFGNPDGPQATSFGIALPAWIVDQKNSILVLLVYGLAFMVILPVVVGSWWYRSIRYSGDQILIRTTQIYTYFVYKTRNMDMKRLIMVLAGASEFDPQYNKDATSRPTDNILIPQLIREIGSINLKKNEPPLTCPYSLKARVLLLSHLARMKIPETLEEDQQFMLKKCPALLQEMVNVICQLIVMARNREEREFRAPTLASLENCMKLSQMAVQGLQQFKSPLLQLPHIEEDNLRRVSNHKKYKIKTIQDLVSLKESDRHTLLHFLEDEKYEEVMAVLGSFPYVTMDIKSQVLDDEDSNNITVGSLVTVLVKLTRQTMAEVFEKEQSICAAEEQPAEDGQGETNKNRTKGGWQQKSKGPKKTAKSKKKKPLKKKPTPVLLPQSKQQKQKQANGVVGNEAAVKEDEEEVSDKGSDSEEEETNRDSQSEKDDGSDRDSDREQDEKQNKDDEAEWQELQQSIQRKERALLETKSKITHPVYSLYFPEEKQEWWWLYIADRKEQTLISMPYHVCTLKDTEEVELKFPAPGKPGNYQYTVFLRSDSYMGLDQIKPLKLEVHEAKPVPENHPQWDTAIEGDEDQEDSEGFEDSFEEEEEEEEDDD

SEQ ID NO: 67622 - protein, 255 aa, Homo sapiens
KHQSVMALRAGLVLGFHTLMTLLSPQEAGATKADHMGSYGPAFYQSYGASGQFTHEFDEEQLFSVDLKKSEAVWRLPEFGDFARFDPQGGLAGIAAIKAHLDILVERSNRSRAINVPPRVTVLPKSRVELGQPNILICIVDNIFPPVINITWLRNGQTVTEGVAQTSFYSQPDHLFRKFHYLPFVPSAEDVYDCQVEHWGLDAPLLRHWELQVPIPPPDAMETLVCALGLAIGLVGFLVGTVLIIMGTYVSSVPR

SEQ ID NO: 67623 - protein, 242 aa, Homo sapiens
LPYLLLGVNLFFFTLTCGTNPGIITKANELLFLHVYEFDEVMFPKNVRCSTCDLRKPARSKHCSVCNWCVHRFDHHCVWVNNCIGAWNIRYFLIYVLTLTASAATVAIVSTTFLVHLVVMSDLYQETYIDDLGHLHVMDTVFLIQYLFLTFPRIVFMLGFVVVLSFLLGGYLLFVLYLAATNQTTNEWYRGDWAWCQRCPLVAWPPSAEPQVHRNIHSHGLRSNLQEIFLPAFPCHERKKQE

SEQ ID NO: 67624 - protein, 346 aa, Homo sapiens
IGFLLCSQLFSILLGEKVDTQPNVLHNDPHARHSDDNGQNHLEGQMNFNADSSQHKDENTDIAENLYQKVRILCWVMTGPQNLEKKAKHVKATWAQRCNKVLFMSSEENKDFPAVGLKTKEGRDQLYWKTIKAFQYVHEHYLEDADWFLKADDDTYVILDNLRWLLSKYDPEEPIYFGRRFKPYVKQGYMSGGAGYVLSKEALKRFVDAFKTDKCTHSSSIEDLALGRCMEIMNVEAGDSRDTIGKETFHPFVPEHHLIKGYLPRTFWYWNYNYYPPVEGPGCCSDLAVSFHYVDSTTMYELEYLVYHLRPYGYLYRYQPTLPERILKEISQANKNEDTKVKLGNP

SEQ ID NO: 67625 - protein, 71 aa, Homo sapiens
ISVGCLAIFVTVISLLVYKKHKEYNPIENSPGNVVRSKGLSVFLNRAKAVFFPGNQEKDPLLKNQEFKGVS

SEQ ID NO: 67626 - protein, 46 aa, Homo sapiens
VAASSILVFFGASILVLPKCPDPKQELIGSPQNMLLGTDLAPAYSA

SEQ ID NO: 67627 - protein, 210 aa, Homo sapiens
RLFLWNAVLTLFVTSLIGALIPEPEVKIEVLQKPFICHRKTKGGDLMLVHYEGYLEKDGSLFHSTHKHNNGQPIWFTLGILEALKGWDQGLKGMCVGEKRKLIIPPALGYGKEGKGKIPPESTLIFNIDLLEIRNGPRSHESFQEMDLNDDWKLSKDEVKAYLKKEFEKHGAVVNESHHDALVEDIFDKEDEDKDGFISAREFTYKHDEL

SEQ ID NO: 67628 - protein, 63 aa, Homo sapiens
RKSILLLLPFTTTYLCELGFSILTRLKTKKRNRLNSAPDMRVALSSCVPDWKELMNRQAHPSH

SEQ ID NO: 67629 - protein, 45 aa, Homo sapiens
RRHSRGPRFTLLPLAGDAVIVACGLGSTMAPKGQRGREAGTETSI

SEQ ID NO: 67630 - protein, 20 aa, Homo sapiens
LLILSAFPVLYLDLAPSTFL

SEQ ID NO: 67631 - protein, 445 aa, Homo sapiens
LLLFVGLLLTWESGQVLGDQTVSDNELQEMSNQGSKYVNKEIQNAVNGVKQIKTLIEKTNEERKTLLSNLEEAKKKKEDALNETRESETKLKELPGVCNETMMALWEECKPCLKQTCMKFYARVCRSGSGLVGRQLEEFLNQSSPFYFWMNGDRIDSLLENDRQQTHMLDVMQDHFSRASSIIDELFQDRFFTREPQDTYHYLPFSLPHRRPHFFFPKSRIVRSLMPFSPYEPLNFHAMFQPFLEMIHEAQQAMDIHFHSPAFQHPPTEFIREGDDDRTVCREIRHNSTGCLRMKDQCDKCREILSVDCSTNNPSQAKLRRELDESLQVAERLTRKYNELLKSYQWKMLNTSSLLEQLNEQFNWVSRLANLTQGEDQYYLRVTTVASHTSDSDVPSGVTEVVVKLFDSDPITVTVPVEVSRKNPKFMETVAEKALQEYRKKHREE

SEQ ID NO: 67632 - protein, 215 aa, Homo sapiens
KMVLGGCPVSYLLLCGQAALLLGNLLLLHCVSRSHSQNATAEPELTSAGAAQPEGPGGAASWEYGDPHSPVILCSYLPDEFIECEDPVDHVGNATASQELGYGCLKFGGQAYSDVEHTSVQCHALDGIECASPRTFLRENKPCIKYTGHYFITTLLYSFFLGCFGVDRFCLGHTGTAVGKLLTLGGLGIWWFVDLILLITGGLMPSDGSNWCTVY

SEQ ID NO: 67633 - protein, 405 aa, Homo sapiens
KTLVLVVAAVLLLVSAESALITQQDLAPQQRAAPQQKRSSPSEGLCPPGHHISEDGRDCISCKYGQDYSTHWNDLLFCLRCTRCDSGEVELSPCTTTRNTVCQCEEGTFREEDSPEMCRKCRTGCPRGMVKVGDCTPWSDIECVHKESGTKHSGEVPAVEETVTSSPGTPASPCSLSGIIIGVTVAAVVLIVAVFVCKSLLWKKVLPYLKGICSGGGGDPERVDRSSQRPGAEDNVLNEIVSILQPTQVPEQEMEVQEPAEPTGVNMLSPGESEHLLEPAEAERSQRRRLLVPANEGDPTETLRQCFDDFADLVPFDSWEPLMRKLGLMDNEIKVAKAEAAGHRDTLYTMLIKWVNKTGRDASVHTLLDALETLGERLAKQKIEDHLLSSGKFMYLEGNADSAMS

SEQ ID NO: 67634 - protein, 345 aa, Homo sapiens
VFCLLGLGVLYHLYSGFLAGRFSLFGLGGEPGGGAAGPAAAADGGTVDLREMLAVSVLAAVRGGDEVRRVRESNVLHEKSKGKTREGAEDKMTSGDVLSNRKMFYLLKTAFPSVQINTEEHVDAADQEVILWDHKIPEDILKEVTTPKEVPAESVTVWIDPLDATQEYTEDLRKYVTTMVCVAVNGKPMLGVIHKPFSEYTAWAMVDGGSNVKARSSYNEKTPRIVVSRSHSGMVKQVALQTFGNQTTIIPAGGAGYKVLALLDVPDKSQEKADLYIHVTYIKKWDICAGNAILKALGGHMTTLSGEEISYTGSDGIEGGLLASIRMNHQALVRKLPDLEKTGHK

SEQ ID NO: 67635 - protein, 402 aa, Homo sapiens
VALAARAMPGRSCVALVLLAAAVSCAVAQHAPPWTEDCRKSTYPPSGPTYRGAVPWYTINLDLPPYKRWHELMLDKAPVLKVIVNSLKNMINTFVPSGKIMQVVDEKLPGLLGNFPGPFEEEMKGIAAVTDIPLGEIISFNIFYELFTICTSIVAEDKKGHLIHGRNMDFGVFLGWNINNDTWVITEQLKPLTVNLDFQRNNKTVFKASSFAGYVGMLTGFKPGLFSLTLNERFSINGGYLGILEWILGKKDVMWIGFLTRTVLENSTSYEEAKNLLTKTKILAPAYFILGGNQSGEGCVITRDRKESLDVYELDAKQGRWYVVQTNYDRWKHPFFLDDRRTPAKMCLNRTSQENISFETMYDVLSTKPVLNKLTVYTTLIDVTKGQFETYLRDCPDPCIGW

SEQ ID NO: 67636 - protein, 10 aa, Homo sapiens
ITILLLLQWR

SEQ ID NO: 67637 - protein, 291 aa, Homo sapiens
KMRIFAVFIFMTYWHLLNAFTVTVPKDLYVVEYGSNMTIECKFPVEKQLDLAALIVYWEMEDKNIIQFVHGEEDLKVQHSSYRQRARLLKDQLSLGNAALQITDVKLQDAGVYRCMISYGGADYKRITVKVNAPYNKINQRILVVDPVTSEHELTCQAEGYPKAEVIWTSSDHQVLSGKTTTTNSKREEKLFNVTSTLRINTTTNEIFYCTFRRLDPEENHTAELVIPELPLAHPPNERTHLVILGAILLCLGVALTFIFRLRKGRMMDVKKCGIQDTNSKKQSDTHLEET

SEQ ID NO: 67638 - protein, 70 aa, Homo sapiens
MATVRASLRGALLLLLAVAGVAEVAGGLAPGSAGALCCNHSKDNQMCRDVCEQHSWILPSQLFADFLLKK

SEQ ID NO: 67639 - protein, 57 aa, Homo sapiens
KNVQRNLILLHPQLLLLVDQIHLGEESPLETAASFFHNVDVPFEETVVDGVHGAFIR

SEQ ID NO: 67640 - protein, 52 aa, Homo sapiens
ICPRPSPSLYAFWSLFGAFCLQLRQSGHRNQSETIASAIKTIVHHGGTHGYL

SEQ ID NO: 67641 - protein, 369 aa, Homo sapiens
LPAAPPLAFCCYTSVLLLFAFSLPGSRASNQPPGGGGGSGGDCPGGKGKSINCSELNVRESDVRVCDESSCKYGGVCKEDGDGLKCACQFQCHTNYIPVCGSNGDTYQNECFLRRAACKHQKEITVIARGPCYSDNGSGSGEGEEEGSGAEVHRKHSKCGPCKYKAECDEDAENVGCVCNIDCSGYSFNPVCASDGSSYNNPCFVREASCIKQEQIDIRHLGHCTDTDDTSLLGKKDDGLQYRPDVKDASDQREDVYIGNHMPCPENLNGYCIHGKCEFIYSTQKASCRCESGYTGQHCEKTDFSILYVVPSRQKLTHVLIAAIIGAVQIAIIVAIVMCITRKCPKNNRGRRQKQNLGHFTSDTSSRMV

SEQ ID NO: 67642 - protein, 43 aa, Homo sapiens
LLLFVYFLLLPRRRRRHHEGNRALAGRAVRQPNRRQVLGGDQR

SEQ ID NO: 67643 - protein, 846 aa, Homo sapiens
TSAFPPFLLFFSGFAWEAVPGFQGSTRFSMANATRRGSGVEQKSQESVSFKDVTVGFTQEEWQHLDPSQRALYRDVMLENYSNLVSVGYCVHKPEVIFRLQQGEEPWKQEEEFPSQSFPVWTADHLKERSQENQSKHLWEVVFINNEMLTKEQGDVIGIPFNVDVSSFPSRKMFCQCDSCGMSFNTVSELVISKINYLGKKSDEFNACGKLLLNIKHDETHTQEKNEVLKNRNTLSHHEETLQHEKIQTLEHNFEYSICQETLLEKAVFNTQKRENAEENNCDYNEFGRTLCDSSSLLFHQISPSRDNHYEFSDCEKFLCVKSTLSKPHGVSMKHYDCGESGNNFRRKLCLSHLQKGDKGEKHFECNECGKAFWEKSHLTRHQRVHTGQKPFQCNECEKAFWDKSNLTKHQRSHTGEKPFECNECGKAFSHKSALTLHQRTHTGEKPYQCNACGKTFCQKSDLTKHQRTHTGLKPYECYECGKSFRVTSHLKVHQRTHTGEKPFECLECGKSFSEKSNLTQHQRIHIGDKSYECNACGKTFYHKSLLTRHQIIHTGWKPYECYECGKTFCLKSDLTVHQRTHTGQKPFACPECGKFFSHKSTLSQHYRTHTGEKPYECHECGKIFYNKSYLTKHNRTHTGEKPYECNECGKAFYQKSQLTQHQRIHIGEKPYKCNECGKAFCHKSALIVHQRTHTQEKPYKCNECGKSFCVKSGLIFHERKHTGEKPYECNECGKFFRHKSSLTVHHRAHTGEKSCQCNECGKIFYRKSELAQHQRSHTGEKPYECNTCRKTFSQKSNLIVHQRRHIGENLMNEMDIRNFQPQVSLHNASEYSHCGESPDDILNVQ

SEQ ID NO: 67644 - protein, 688 aa, Homo sapiens
IWLGMWVLLRSGYPLRILLPLRGEWMGRRGLPRNLAPGPPRRRYRKETLQALDMPVLPVTATEIRQYLRGHGIPFQDGHSCLRALSPFAESSQLKGQTGVTTSFSLFIDKTTGHFLCMTSLAEGSWEDFQASVEGRGDGAREGFLLSKAPEFEDSEEVRRIWNRAIPLWELPDQEEVQLADTMFGLTKVTDDTLKRFSVRYLRPARSLVFPWFSPGGSGLRGLKLLEAKCQGDGVSYEETTIPRPSAYHNLFGLPLISRRDAEVVLTSRELDSLALNQSTGLPTLTLPRGTTCLPPALLPYLEQFRRIVFWLGDDLRSWEAAKLFARKLNPKRCFLVRPGDQQPRPLEALNGGFNLSRILRTALPAWHKSIVSFRQLREEVLGELSNVEQAAGLRWSRFPDLNRILKGHRKGELTVFTGPTGSGKTTFISEYALDLCSQGVNTLWGSFEISNVRLARVMLTQFAEGRLEDQLDKYDHWADRFEDLPLYFMTFHGQQSIRTVIDTMQHAVYVYDICHVIIDNLQFMMGHEQLSTDRIAAQDYIIGVFRKFATDNNCHVTLVIHPRKEDDDKELQTASIFGSAKASQEADNVLILQDRKLVTGPGKRYLQVSKNRFDGDVGVFPLEFNKNSLTFSIPPKNKARLKKIKDDTGPVAKKPSSGKKGATTQNSEICSGQAPTPDQPDTSKRSK

SEQ ID NO: 67645 - protein, 119 aa, Homo sapiens
LGSLLGLLLLGLMAFLILPRVTQAMQRGLGRSEVSPGEAIYDVIGEMPPAGLYEEIMEAEAVLQDEEDGSVVKVDTEAAVSGEVSNLLEGQSIRAEGGHSRPVSQGYDEAAFPLEEMTL

SEQ ID NO: 67646 - protein, 38 aa, Homo sapiens
VHLVANELDAGRVQLLLAQGVAAAVLLVQVVMGEELGE

SEQ ID NO: 67647 - protein, 39 aa, Homo sapiens
IFFSWCVWWLFLSVEGKRRYHPRLSPTPLQNGFSDTPAV

SEQ ID NO: 67648 - protein, 32 aa, Homo sapiens
IWSSKSTRPLLLTVRSILAATSLTCSWTPHVL

SEQ ID NO: 67649 - protein, 196 aa, Homo sapiens
IAVGMLFFIQMKIILRNKTSIESWIEEKAKDRIQYYQLDEVFVFPYDMGSRWRNFKQVFTWSGVPEGDGLEWPVREGCHQYSLTIEQLKQKADKRVRSVRYKVIEDYSGACCPLNKGIKTFFTSPCTEEPRIQLQKGEFILATRGLRYWLYGDKILDDSFIEGVSRIRGWFPRKCVEKCPCDAETDQAPEGEKKNR

SEQ ID NO: 67650 - protein, 81 aa, Homo sapiens
KAAVVRKILWLVTTSQHVESSLPLWVPALQPTSSALGQVYNRLQISLYPAFSHQTCSFLEQHPVYHCTPQSYTWQVLRPPQ

SEQ ID NO: 67651 - protein, 24 aa, Homo sapiens
IHVIFLLLVSSAANISLRGNITGK

SEQ ID NO: 67652 - protein, 144 aa, Homo sapiens
RMQHRGFLLLTLLALLALTSAVAKKKDKVKKGGPGSECAEWAWGPCTPSSKDCGVGFREGTCGAQTQRIRCRVPCNWKKEFGADCKYKFENWGACDGGTGTKVRQGTLKKARYNAQCQETIRVTKPCTPKTKAKAKAKKGKGKD

SEQ ID NO: 67653 - protein, 14 aa, Homo sapiens
LVSKGFLKCLVVLG

SEQ ID NO: 67654 - protein, 36 aa, Homo sapiens
RVLSWVPALCGWWCTILSSAPQGFAFISKIKKQSGE

SEQ ID NO: 67655 - protein, 439 aa, Homo sapiens
RPATTRGLRMKPSLLCRPLSCFLMLLPWPLATLTSTTLWQCPPGEEPDLDPGQGTLCRPCPPGTFSAAWGSSPCQPHARCSLWRRLEAQVGMATRDTLCGDCWPGWFGPWGVPRVPCQPCSWAPLGTHGCDEWGRRARRGVEVAAGASSGGETRQPGNGTRAGGPEETAAQYAVIAIVPVFCLMGLLGILVCNLLKRKGYHCTAHKEVGPGPGGGGSGINPAYRTEDANEDTIGVLVRLITEKKENAAALEELLKEYHSKQLVQTSHRPVSKLPPAPPNVPHICPHRHHLHTVQGLASLSGPCCSRCSQKKWPEVLLSPEAVAATTPVPSLLPNPTRVPKAGAKAGRQGEITILSVGRFRVARIPEQRTSSMVSEVKTITEAGPSWGDLPDSPQPGLPPEQQALLGSGGSRTKWLKPPAENKAEENRYVVRLSESNLVI

SEQ ID NO: 67656 - protein, 204 aa, Homo sapiens
LLRRLLLAALLQLAPAQAPVSQPDAPGHQRKVVSWIDVYTRATCQPREVVVPLTVELMGTVAKQLVPSCVTVQRCGGCCPDDGLECVPTGQHQVRMQILMIRYPSSQLGEMSLEEHSQCECRPKKKDSAVKPDRAATPHHRPQPRSVPGWDSAPGAPSPADITHPTPAPGPSAHAAPSTTSALTPGPAAAAADAAASSVAKGGA

SEQ ID NO: 67657 - protein, 254 aa, Homo sapiens
LARVMAPGVLAGVVSVVAGLGDAVGRELHRERWCGWSGLGGQQTQGQSGCPGDPQGLRVGAAPRAEAQGQAGGYLPRTRAPRSHPVGMCGCLGAGPLQRPQRCWCAGPGAAGCGVSGAAQSGQLQCSQIGSGLCVKGQAGTEERRWGLGGREGMGVSKGAGPWLLWPPLTPSPRCWGPRPSPLLTGLRHEAELVPGPDSTVHLPERRGHGHGGRGQKEAADRGQEAGGPLSHQIAQRGCPAHALHGEAGRWDRV

SEQ ID NO: 67658 - protein, 25 aa, Homo sapiens
ILKVALFLLDLAELVAWGVGEIKRT

SEQ ID NO: 67659 - protein, 894 aa, Homo sapiens
LALGVSCLGLIRAVAAAAAMGKTANSPGSGARPDPVRSFNRWKKKHSHRQNKKKQLRKQLKKPEWQVERESISRLMQNYEKINVNEITRFSDFPLSKKTLKGLQEAQYRLVTEIQKQTIGLALQGKDVLGAAKTGSGKTLAFLVPVLEALYRLQWTSTDGLGVLIISPTRELAYQTFEVLRKVGKNHDFSAGLIIGGKDLKHEAERINNINILVCTPGRLLQHMDETVSFHATDLQMLVLDEADRILDMGFADTMNAVIENLPKKRQTLLFSATQTKSVKDLARLSLKNPEYVWVHEKAKYSTPATLEQNYIVCELQQKISVLYSFLRSHLKKKSIVFFSSCKEVQYLYRVFCRLRPGVSILALHGRQQQMRRMEVYNEFVRKRAAVLFATDIAARGLDFPAVNWVLQFDCPEDANTYIHRAGRTARYKEDGEALLILLPSEKAMVQQLLQKKVPVKEIKINPEKLIDVQKKLESILAQDQDLKERAQRCFVSYVRSVYLMKDKEVFDVSKLPIPEYALSLGLAVAPRVRFLQKMQKQPTKELVRSQADKVIEPRAPSLTNDEVEEFRAYFNEKMSILQKGGKRLEGTEHRQDNDTGNEEQEEEEDDEEEMEEKLAKAKGSQAPSLPNTSEAQKIKEVPTQFLDRDEEEEDADFLKVKRHNVFGLDLKDEKTLQKKEPSKSSIKKKMTKVAEAKKVMKRNFKVNKKITFTDEGELVQQWPQMQKSAIKDAEEDDDTGGINLHKAKERLQEEDKFDKEEYRKKIKAKHREKRLKEREARREANKRQAKAKDEEEAFLDWSDDDDDDDDGFDPSTLPDPDKYRSSEDSDSEDMENKISDTKKKQGMKKRSNSEVEDVGPTSHNRKKARWDTLEPLDTGLSLAEDEELVLHLLRSQS

SEQ ID NO: 67660 - protein, 852 aa, Homo sapiens
LGLPFLVLLVASVESHLGVLGPKNVSQKDAEFERTYVDEVNSELVNIYTFNHTVTRNRTEGVRVSVNVLNKQKGAPLLFVVRQKEAVVSFQVPLILRGMFQRKYLYQKVERTLCQPPTKNESEIQFFYVDVSTLSPVNTTYQLRVSRMDDFVLRTGEQFSFNTTAAQPQYFKYEFPEGVDSVIVKVTSNKAFPCSVISIQDVLCPVYDLDNNVAFIGMYQTMTKKAAITVQRKDFPSNSFYVVVVVKTEDQACGGSLPFYPFAEDEPVDQGHRQKTLSVLVSQAVTSEAYVSGMLFCLGIFLSFYLLTVLLACWENWRQKKKTLLVAIDRACPESGHPRVLADSFPGSSPYEGYNYGSFENVSGSTDGLVDSAGTGDLSYGYQGHDQFKRRLPSGQMRQLCIAMGRSFEPVGTRPRVDSMSSVEEDDYDTLTDIDSDKNVIRTKQYLYVADLARKDKRVLRKKYQIYFWNIATIAVFYALPVVQLVITYQTVVNVTGNQDICYYNFLCAHPLGNLSAFNNILSNLGYILLGLLFLLIILQREINHNRALLRNDLCALECGIPKHFGLFYAMGTALMMEGLLSACYHVCPNYTNFQFDTSFMYMIAGLCMLKLYQKRHPDINASAYSAYACLAIVIFFSVLGVVFGKGNTAFWIVFSIIHIIATLLLSTQLYYMGRWKLDSGIFRRILHVLYTDCIRQCSGPLYVDRMVLLVMGNVINWSLAAYGLIMRPNDFASYLLAIGICNLLLYFAFYIIMKLRSGERIKLIPLLCIVCTSVVWGFALFFFFQGLSTWQKTPAESREHNRDCILLDFFDDHDIWHFLSSIAMFGSFLVSGPPGRAGWVREGSSCLLLCG

SEQ ID NO: 67661 - protein, 46 aa, Homo sapiens
ICFALVLAVLRQQDKEARTKESRSSPAVEQQLLVSGPGKKPEDSRV

SEQ ID NO: 67662 - protein, 293 aa, Homo sapiens
LTITVTGVTVLVLVLKSMNSRRREPITLQDPEAKYPLPLIEKEKISHNTRRFRFGLPSPDHVLGLPVGNYVQLLAKIDNELVVRAYTPVSSDDDRGFVDLIIKIYFKNVHPQYPEGGKMTQYLENMKIGETIFFRGPRGRLFYHGPGNLGIRPDQTSEPKKTLADHLGMIAGGTGITPMLQLIRHITKDPSDRTRMSLIFANQTEEDILVRKELEEIARTHPDQFNLWYTLDRPPIGWKYSSGFVTADMIKEHLPPPAKSTLILVCGPPPLIQTAAHPNLEKLGYTQDMIFTY

SEQ ID NO: 67663 - protein, 566 aa, Homo sapiens
KGRMGLQACLLGLFALILSGKCSYSPEPDQRRTLPPGWVSLGRADPEEELSLTFALRQQNVERLSELVQAVSDPSSPQYGKYLTLENVADLVRPSPLTLHTVQKWLLAAGAQKCHSVITQDFLTCWLSIRQAELLLPGAEFHHYVGGPTETHVVRSPHPYQLPQALAPHVDFVGGLHRFPPTSSLRQRPEPQVTGTVGLHLGVTPSVIRKRYNLTSQDVGSGTSNNSQACAQFLEQYFHDSDLAQFMRLFGGNFAHQASVARVVGQQGRGRAGIEASLDVQYLMSAGANISTWVYSSPGRHEGQEPFLQWLMLLSNESALPHVHTVSYGDDEDSLSSAYIQRVNTELMKAAARGLTLLFASGDSGAGCWSVSGRHQFRPTFPASSPYVTTVGGTSFQEPFLITNEIVDYISGGGFSNVFPRPSYQEEAVTKFLSSSPHLPPSSYFNASGRAYPDVAALSDGYWVVSNRVPIPWVSGTSASTPVFGGILSLINEHRILSGRPPLGFLNPRLYQQHGAGLFDVTRGCHESCLDEEVEGQGFCSGPGWDPVTGWGTPNFPALLKTLLNP

SEQ ID NO: 67664 - protein, 1167 aa, Homo sapiens
LGATCLFACVPLSSVALESRRAAPSLDMSYNYVVTAQKPTAVNGCVTGHFTSAEDLNLLIAKNTRLEIYVVTAEGLRPVKEVGMYGKIAVMELFRPKGESKDLLFILTAKYNACILEYKQSGESIDIITRAHGNVQDRIGRPSETGIIGIIDPECRMIGLRLYDGLFKVIPLDRDNKELKAFNIRLEELHVIDVKFLYGCQAPTICFVYQDPQGRHVKTYEVSLREKEFNKGPWKQENVEAEASMVIAVPEPFGGAIIIGQESITYHNGDKYLAIAPPIIKQSTIVCHNRVDPNGSRYLLGDMEGRLFMLLLEKEEQMDGTVTLKDLRVELLGETSIAECLTYLDNGVVFVGSRLGDSQLVKLNVDSNEQGSYVVAMETFTNLGPIVDMCVVDLERQGQGQLVTCSGAFKEGSLRIIRNGIGIHEHASIDLPGIKGLWPLRSDPNRETDDTLVLSFVGQTRVLMLNGEEVEETELMGFVDDQQTFFCGNVAHQQLIQITSASVRLVSQEPKALVSEWKEPQAKNISVASCNSSQVVVAVGRALYYLQIHPQELRQISHTEMEHEVACLDITPLGDSNGLSPLCAIGLWTDISARILKLPSFELLHKEMLGGEIIPRSILMTTFESSHYLLCALGDGALFYFGLNIETGLLSDRKKVTLGTQPTVLRTFRSLSTTNVFACSDRPTVIYSSNHKLVFSNVNLKEVNYMCPLNSDGYPDSLALANNSTLTIGTIDEIQKLHIRTVPLYESPRKICYQEVSQCFGVLSSRIEVQDTSGGTTALRPSASTQALSSSVSSSKLFSSSTAPHETSFGEEVEVHNLLIIDQHTFEVLHAHQFLQNEYALSLVSCKLGKDPNTYFIVGTAMVYPEEAEPKQGRIVVFQYSDGKLQTVAEKEVKGAVYSMVEFNGKLLASINSTVRLYEWTTEKELRTECNHYNNIMALYLKTKGDFILVGDLMRSVLLLAYKPMEGNFEEIARDFNPNWMSAVEILDDDNFLGAENAFNLFVCQKDSAATTDEERQHLQEVGLFHLGEFVNVFCHGSLVMQNLGETSTPTQGSVLFGTVNGMIGLVTSLSESWYNLLLDMQNRLNKVIKSVGKIEHSFWRSFHTERKTEPATGFIDGDLIESFLDISRPKMQEVVANLQYDDGSGMKREATADDLIKVVEELTRIH

SEQ ID NO: 67665 - protein, 29 aa, Homo sapiens
IVFLAMGGLSLSQLPPEPQFPYVEVGRAS

SEQ ID NO: 67666 - protein, 363 aa, Homo sapiens
ILLLLWVSVFLYGSFYYSYMPTVSHLSPVHFYYRTDCDSSTTSLCSFPVANVSLTKGGRDRVLMYGQPYRVTLELELPESPVNQDLGMFLVTISCYTRGGRIISTSSRSVMLHYRSDLLQMLDTLVFSSLLLFGFAEQKQLLEVELYADYRENSYVPTTGAIIEIHSKRIQLYGAYLRIHAHFTGLRYLLYNFPMTCAFIGVASNFTFLSVIVLFSYMQWVWGGIWPRHRFSLQVNIRKRDNSRKEVQRRISAHQPGAGPEGQEESTPQSDVTEDGESPEDPSGTEGQLSEEEKPDQQPLSGEEELEPEASDGSGSWEDAALLTEANLPAPAPASASAPVLETLGSSEPAGGALRQRPTCSSS

SEQ ID NO: 67667 - protein, 102 aa, Homo sapiens
LSLLLAVTGGAAALSALSPPGENEPQCPPARSQPCPGQRKTTRIPGSGRRPGWAAPVRAGDSAPPLAAVSGNWVPALRGFQRTGTPFPGSPAHPAGEGGRCR

SEQ ID NO: 67668 - protein, 363 aa, Homo sapiens
LRPTMPSLLLLFTAALLSSWAQLLTDANSWWSLALNPVQRPEMFIIGAQPVCSQLPGLSPGQRKLCQLYQEHMAYIGEGAKTGIKECQHQFRQRRWNCSTADNASVFGRVMQIGSRETAFTHAVSAAGVVNAISRACREGELSTCGCSRTARPKDLPRDWLWGGCGDNVEYGYRFAKEFVDAREREKNFAKGSEEQGRVLMNLQNNEAGRRAVYKMADVACKCHGVSGSCSLKTCWLQLAEFRKVGDRLKEKYDSAAAMRVTRKGRLELVNSRFTQPTPEDLVYVDPSPDYCLRNESTGSLGTQGRLCNKTSEGMDGCELMCCGRGYNQFKSVQVERCHCKFHWCCFVRCKKCTEIVDQYICK

SEQ ID NO: 67669 - protein, 90 aa, Homo sapiens
MWVAVLLMCQMYQISCLGITTNERMNARRYKHFKVTTTSIESPFNHGCVRNIIDFFEFRCCGLFRPVIVDWTRQYTIEYDQISGSGYQLV

SEQ ID NO: 67670 - protein, 61 aa, Homo sapiens
VKLGGEGGGRWRLMLLFFVAAAALALGAEPEGRRWRDDCRVGEQRSGARLVSQHPECGFLL

SEQ ID NO: 67671 - protein, 23 aa, Homo sapiens
IFALLNSHSILFLSSVAFPVIVP

SEQ ID NO: 67672 - protein, 564 aa, Homo sapiens
KSFEKIGVLFVTLRELLYVVQTPCSWHCSFLWRRTTNSGEFTVSLSDVLLTWKYLLHEKLNLPVENMDVTDHYEDVRKIYDDFLKNSNMLDLIDVYQKCRALTSNCENYNTVSPSQLLDFLSGKQYAVGDETDLSIPTSPTSKYNRDNEKVQLLARKIIFSYLNLLVNSKNDLAVAYILNIPDRGLGREAFTDLKHAAREKQMSIFLVATSFIRTIELGGKGYAPPPSDPLRTHVKGLSNFINFIDKLDEILGEIPNPSIAGGQILSVIKMQLIKGQNSRDPFCKAIEEVAQDLDLRIKNIINSQEGVVALSTTDISPARPKSHAINHGTAYCGRDTVKALLVLLDEEAANAPTKNKAELLYDEENTIHHHGTSILTLFRSPTQVNNSIKPLRERICVSMQEKKIKMKQTLIRSQFACTYKDDYMISKDNWNNVNLASKPLCVLYMENDLSEGVNPSVGRSTIGTSFGNVHLDRSKNEKVSRKSTSQTGNKSSKRKQVDLDGENILCDNRNEPPQHKNAKIPKKSNDSQNRLYGKLAKVAKSNKCTAKDKLISGQAKLTQFFRL

SEQ ID NO: 67673 - protein, 31 aa, Homo sapiens
LGGTLGLGGFVGLVSFRGDCAVLGEGTPREP

SEQ ID NO: 67674 - protein, 93 aa, Homo sapiens
IIFSYVCFALVSDKLYQRKEPVISSVHTKVKGIAEVKEEIVENGVKKLVHSVFDTADYTFPLQGNSFFVMTNFLKTEGQEQRLCPEEFRPEGV

SEQ ID NO: 67675 - protein, 236 aa, Homo sapiens
LLLLLLLLLLGLLAPGAQGARGRGGAEKNSYRRTVNTFSQSVSSLFGEDNVRAAQKFLARLTERFVLGVDMFVETLWKVWTELLDVLGLDVSNLSQYFSPASVSSSPARALLLVGVVLLAYWFLSLTLGFTFSVLHVVFGRFFWIVRVVLFSMSCVYILHKYEGEPENAVLPLCFVVAVYFMTGPMGFYWRSSPSGPSNPSNPSVEEKLEHLEKQVRLLNIRLNRVLESLDRSKDK

SEQ ID NO: 67676 - protein, 55 aa, Homo sapiens
IWSFGVVLWELLTGEIPYKDVDSSAIIWGVGSNSLHLPVPSSCPDGFKILLRQCW

SEQ ID NO: 67677 - protein, 355 aa, Homo sapiens
IILLLLAQVSWAGPFQQRGLFDFMLEDEASGIGPEVPDDRDFEPSLGPVCPFRCQCHLRVVQCSDLGLDKVPKDLPPDTTLLDLQNNKITEIKDGDFKNLKNLHALILVNNKISKVSPGAFTPLVKLERLYLSKNQLKELPEKMPKTLQELRAHENEITKVRKVTFNGLNQMIVIELGTNPLKSSGIENGAFQGMKKLSYIRIADTNITSIPQGLPPSLTELHLDGNKISRVDAASLKGLNNLAKLGLSFNSISAVDNGSLANTPHLRELHLDNNKLTRVPGGLAEHKYIQVVYLHNNNISVVGSSDFCPPGHNTKKASYSGVSLFSNPVQYWEIQPSTFRCVYVRSAIQLGNYK

SEQ ID NO: 67678 - protein, 35 aa, Homo sapiens
IPYLTALGDLLGTALLALSFHFLWLIGDRDGDVGD

SEQ ID NO: 67679 - protein, 11 aa, Homo sapiens
MSASGGLLGLF

SEQ ID NO: 67680 - protein, 490 aa, Homo sapiens
LCAVLGAVMIVMVPSLIKQQVLKNVRIDPSSLSFNMWKEIPIPFYLSVYFFDVMNPSEILKGEKPQVRERGPYVYREFRHKSNITFNNNDTVSFLEYRTFQFQPSKSHGSESDYIVMPNILVLGAAVMMENKPMTLKLIMTLAFTTLGERAFMNRTVGEIMWGYKDPLVNLINKYFPGMFPFKDKFGLFAELNNSDSGLFTVFTGVQNISRIHLVDKWNGLSKVDFWHSDQCNMINGTSGQMWPPFMTPESSLEFYSPEACRSMKLMYKESGVFEGIPTYRFVAPKTLFANGSIYPPNEGFCPCLESGIQNVSTCRFSAPLFLSHPHFLNADPVLAEAVTGLHPNQEAHSLFLDIHPVTGIPMNCSVKLQLSLYMKSVAGIGQTGKIEPVVLPLLWFAESGAMEGETLHTFYTQLVLMPKVMHYAQYVLLALGCVLLLVPVICQIRSQEKCYLFWSSSKKGSKDKEAIQAYSESLMTSAPKGSVLQEAKL

SEQ ID NO: 67681 - protein, 110 aa, Homo sapiens
IAVGLGVAALAFAGRYAFRIWKPLEQVITETAKKISTPSFSSYYKGGFEQKMSRREAGLILGVSPSAGKAKIRTAHRRVMILNHPDKGGSPYVAAKINEAKDLLETTTKH

SEQ ID NO: 67682 - protein, 70 aa, Homo sapiens
TEARLVFLQKFPPWAVVEVVTVIVAAPAAATATTRDGGGCSRNCNIPEVFPELLGCPNRRGPPGGVRGAD

SEQ ID NO: 67683 - protein, 29 aa, Homo sapiens
VSQGHLLAVSVACVALAPRSSISGADVWA

SEQ ID NO: 67684 - protein, 77 aa, Homo sapiens
IQFLGGLLIGAGCALYPLGWDSEEVRQTCGYTSGQFDLGKCEIGWAYYCTGAGATAAMLLCTWLACFSGKKQKHYPY

SEQ ID NO: 67685 - protein, 847 aa, Homo sapiens
ISSHDNMKLWIHLFYSSLLACISLHSQTPVLSSRGSCDSLCNCEEKDGTMLINCEAKGIKMVSEISVPPSRPFQLSLLNNGLTMLHTNDFSGLTNAISIHLGFNNIADIEIGAFNGLGLLKQLHINHNSLEILKEDTFHGLENLEFLQADNNFITVIEPSAFSKLNRLKVLILNDNAIESLPPNIFRFVPLTHLDLRGNQLQTLPYVGFLEHIGRILDLQLEDNKWACNCDLLQLKTWLENMPPQSIIGDVVCNSPPFFKGSILSRLKKESICPTPPVYEEHEDPSGSLHLAATSSINDSRMSTKTTSILKLPTKAPGLIPYITKPSTQLPGPYCPIPCNCKVLSPSGLLIHCQERNIESLSDLRPPPQNPRKLILAGNIIHSLMKSDLVEYFTLEMLHLGNNRIEVLEEGSFMNLTRLQKLYLNGNHLTKLSKGMFLGLHNLEYLYLEYNAIKEILPGTFNPMPKLKVLYLNNNLLQVLPPHIFSGVPLTKVNLKTNQFTHLPVSNILDDLDLLTQIDLEDNPWDCSCDLVGLQQWIQKLSKNTVTDDILCTSPGHLDKKELKALNSEILCPGLVNNPSMPTQTSYLMVTTPATTTNTADTILRSLTDAVPLSVLILGLLIMFITIVFCAAGIVVLVLHRRRRYKKKQVDEQMRDNSPVHLQYSMYGHKTTHHTTERPSASLYEQHMVSPMVHVYRSPSFGPKHLEEEEERNEKEGSDAKHLQRSLLEQENHSPLTGSNMKYKTTNQSTEFLSFQDASSLYRNILEKERELQQLGITEYLRKNIAQLQPDMEAHYPGAHEELKLMETLMYSRPRKVLVEQTKNEYFELKANLHAEPDYLEVLEQQT

SEQ ID NO: 67686 - protein, 72 aa, Homo sapiens
IYRWIISRVRLVNVWHFATLLLLSGDSSSTRRDRRRKAAEPGEERNMGTRAKSRRRPSRPLFLYSGSGYIRE

SEQ ID NO: 67687 - protein, 622 aa, Homo sapiens
VSSLSVTMSAAWIPALGLGVCLLLLPGPAGSEGAGEWGSWGASRRSQGLSTSGYKRDSDPAPWASALPPEEEGAKVEPPRGAPALTPAADLLLLTCFSHAPIAITCFTRGLDIRKEKADVLCPGGCPLEEFSVYGNIVYASVSSICGAAVHRGVISNSGGPVRVYSLPGRENYSSVDANGIQSQMLSRWSASFTVTKGKSSTQEATGQAVSTAHPPTGKRLKKTPEKKTGNKDCKADIAFLIDGSFNIGQRRFNLQKNFVGKVALMLGIGTEGPHVGLVQASEHPKIEFYLKNFTSAKDVLFAIKEVGFRGGNSNTGKALKHTAQKFFTVDAGVRKGIPKVVVVFIDGWPSDDIEEAGIVAREFGVNVFIVSVAKPIPEELGMVQDVTFVDKAVCRNNGFFSYHMPNWFGTTKYVKPLVQKLCTHEQMMCSKTCYNSVNIAFLIDGSSSVGDSNFRLMLEFVSNIAKTFEISDIGAKIAAVQFTYDQRTEFSFTDYSTKENVLAVIRNIRYMSGGTATGDAISFTVRNVFGPIRESPNKNFLVIVTDGQSYDDVQGPAAAAHDAGITIFSVGVAWAPLDDLKDMASKPKESHAFFTREFTGLEPIVSDVIRGICRDFLESQQ

SEQ ID NO: 67688 - protein, 436 aa, Homo sapiens
ILTLVVAACGFVLWSSNGRQRKNEALAPPLLDAEPARGAGGRGGDHPSVAVGIRRVSNVSAASLVPAVPQPEADNLTLRYRSLVYQLNFDQTLRNVDKAGTWAPRELVLVVQVHNRPEYLRLLLDSLRKAQGIDNVLVIFSHDFWSTEINQLIAGVNFCPVLQVFFPFSIQLYPNEFPGSDPRDCPRDLPKNAALKLGCINAEYPDSFGHYREAKFSQTKHHWWWKLHFVWERVKILRDYAGLILFLEEDHYLAPDFYHVFKKMWKLKQQECPECDVLSLGTYSASRSFYGMADKVDVKTWKSTEHNMGLALTRNAYQKLIECTDTFCTYDDYNWDWTLQYLTVSCLPKFWKVLVPQIPRIFHAGDCGMHHKKTCRPSTQSAQIESLLNNNKQYMFPETLTISEKFTVVAISPPRKNGGWGDIRDHELCKSYRRLQ

SEQ ID NO: 67689 - protein, 64 aa, Homo sapiens
VLFSVTVVLLGPVAKCAPTPAVRSQLILRGKSSHQATERKSVLCGLQEELGHTAGNEVAGHKLS

SEQ ID NO: 67690 - protein, 49 aa, Homo sapiens
ISWIRVLEMAAYWTHGFSSDLHLLLALLFMQEKSPEFTVCQNNFLTNIY

SEQ ID NO: 67691 - protein, 16 aa, Homo sapiens
VCFLLLSHIWVMMTQV

SEQ ID NO: 67692 - protein, 353 aa, Homo sapiens
TTPMKPLVLLVALLLWPSSVPAYPSITVTPDEEQNLNHYIQVLENLVRSVPSGEPGREKKSNSPKHVYSIASKGSKFKELVTHGDASTENDVLTNPISEETTTFPTGGFTPEIGKKKHTESTPFWSIKPNNVSIVLHAEEPYIENEEPEPEPEPAAKQTEAPRMLPVVTESSTSPYVTSYKSPVTTLDKSTGIGISTESEDVPQLSGETAIEKPEEFGKHPESWNNDDILKKILDINSQVQQALLSDTSNPAYREDIEASKDHLKRSLALAAAAEHKLKTMYKSQLLPVGRTSNKIDDIETVINMLCNSRSKLYEYLDIKCVPPEMREKAATVFNTLKNMCRSRRVTALLKVY

SEQ ID NO: 67693 - protein, 248 aa, Homo sapiens
KMAGGVLPLRGLRALCRVLLFLSQFCILSGGEQSQALAQSIKDPGPTRTFTVVPRAAESTEIPPYVMKCPSNGLCSRLPADCIDCTTNFSCTYGKPVTFDCAVKPSVTCVDQDFKSQKNFIINMTCRFCWQLPETDYECTNSTSCMTVSCPRQRYPANCTVRDHVHCLGNRTFPKMLYCNWTGGYKWSTALALSITLGGFGADRFYLGQWREGLGKLFSFGGLGIWTLIDVLLIGVGYVGPADGSLYI

SEQ ID NO: 67694 - protein, 910 aa, Homo sapiens
LLFLILLSCPWIQGLPLKEEEILPEPGSETPTVASEALAELLHGALLRRGPEMGYLPGSDRDPTLATPPAGQTLAVPSLPRATEPGTGPLTTAVTPNGVRGAGPTAPELLTPPPGTTAPPPPSPASPGPPLGPEGGEEETTTTIITTTTVTTTVTSPVLCNNNISEGEGYVESPDLGSPVSRTLGLLDCTYSIHVYPGYGIEIQVQTLNLSQEEELLVLAGGGSPGLAPRLLANSSMLGEGQVLRSPTNRLLLHFQSPRVPRGGGFRIHYQAYLLSCGFPPRPAHGDVSVTDLHPGGTATFHCDSGYQLQGEETLICLNGTRPSWNGETPSCMASCGGTIHNATLGRIVSPEPGGAVGPNLTCRWVIEAAEGRRLHLHFERVSLDEDNDRLMVRSGGSPLSPVIYDSDMDDVPERGLISDAQSLYVELLSETPANPLLLSLRFEAFEEDRCFAPFLAHGNVTTTDPEYRPGALATFSCLPGYALEPPGPPNAIECVDPTEPHWNDTEPACKAMCGGELSEPAGVVLSPDWPQSYSPGQDCVWGVHVQEEKRILLQVEILNVREGDMLTLFDGDGPSARVLAQLRGPQPRRRLLSSGPDLTLQFQAPPGPPNPGLGQGFVLHFKEVPRNDTCPELPPPEWGWRTASHGDLIRGTVLTYQCEPGYELLGSDILTCQWDLSWSAAPPACQKIMTCADPGEIANGHRTASDAGFPVGSHVQYRCLPGYSLEGAAMLTCYSRDTGTPKWSDRVPKCALKYEPCLNPGVPENGYQTLYKHHYQAGESLRFFCYEGFELIGEVTITCVPGHPSQWTSQPPLCKVAYEELLDNRKLEVTQTTDPSRQLEGGNLALAILLPLGLVIVLGSGVYIYYTKLQGKSLFGFSGSHSYSPITVESDFSNPLYEAGDTREYEVSI

SEQ ID NO: 67695 - protein, 35 aa, Homo sapiens
VSAGLGSATAALFVLSPARWTSLPGSPSAVRRRKS

SEQ ID NO: 67696 - protein, 116 aa, Homo sapiens
VVICKGFLILCSSLDLTTLVPERQVDQGRGFESILDVLSVMYINAQLPREQRHRWCLLFSSELHGHSFSQLCGHITHRGPCVAVLEDHDKHVFGGFASCSWEVKPQFQGKTWCPEP

SEQ ID NO: 67697 - protein, 41 aa, Homo sapiens
RSFFSALVRFLFGFLPASGATRVARQQPLGDLVLGSCPAWG

SEQ ID NO: 67698 - protein, 62 aa, Homo sapiens
VAGGWRSWICPLMVALLIPGLLKSKERLSMLRHERICSCSSRENGWDRLLRNNSAGKSGRWL

SEQ ID NO: 67699 - protein, 295 aa, Homo sapiens
VIWLYGGARAVSLWGAGAVLRCFLPMGFWCRMSENQEQEEVITVRVQDPRVQNEGSWNSYVDYKIFLHTNSKAFTAKTSCVRRRYREFVWLRKQLQRNAGLVPVPELPGKSTFFGTSDEFIEKRRQGLQHFLEKVLQSVVLLSDSQLHLFLQSQLSVPEIEACVQGRSTMTVSDAILRYAMSNCGWAQEERQSSSHLAKGDQPKSCCFLPRSGRRSSPSPPPSEEKDHLEVWAPVVDSEVPSLESPTLPPLSSPLCCDFGRPKEGTSTLQSVRRAVGGDHAVPLDPGQLETVLEK

SEQ ID NO: 67700 - protein, 72 aa, Homo sapiens
KEINIFKLDVSTVLLFCLESGTRGASACAAGAAGNSGCFSLSLSFLGAHFCCFDSRAYQVRSEGGRRQCPFC

SEQ ID NO: 67701 - protein, 37 aa, Homo sapiens
IPFLMQTLVLFSTCAVRTHWPSGVLTPTPPTPCLSPN

SEQ ID NO: 67702 - protein, 118 aa, Homo sapiens
ILMTSFFLEIVLMGYIFLDSKDPEYKKFLETYCVEEEKASANPETLLGEMEAKTRELIARRTTPLLEYIKNRKLEKQRIREEKREERRRRELEKKRLREEEKRRRREEERCKKKKRDR

SEQ ID NO: 67703 - protein, 48 aa, Homo sapiens
RCSSAAIPGPGRALGLLLSATTLALPSHAQGDKRPAPAPQASLQHPVM

SEQ ID NO: 67704 - protein, 15 aa, Homo sapiens
VLTCFLSLCILSLYS

SEQ ID NO: 67705 - protein, 64 aa, Homo sapiens [sequence omitted]

SEQ ID NO: 67706 - protein, 921 aa, Homo sapiens
IHFVFFASIFDIYFTSPLVHGMTPQFTPLPPPARRLVLFVADGLRADALYELDENGNSRAPFIRNIIMHEGSWGISHTRVPTESRPGHVALIAGFYEDVSAVAKGWKENPVEFDSLFNESKYTWSWGSPDILPMFAKGASGDHVYTYSYDAKREDFGAQDATKLDTWVFDNVKDFFHHARNNQSLFSKINEEKIVFFLHLLGIDTNGHAHRPSSRDYKHNIKKVDDGVKEIVSMFNHFYGNDGKTTFIFTSDHGMTDWGSHGAGHPSETLTPLVTWGAGIKYPQRVSAQQFDDAFLKEWRLENWKRLDVNQADIAPLMTSLIGVPFPLNSVGILPVDYLNNTDLFKAESMFTNAVQILEQFKVKMTQKKEVTLPFLFTPFKLLSDSKQFNILRKARSYIKHRKFDEVVSLCKELIHLALKGLSYYHTYDRFFLGVNVVIGFVGWISYASLLIIKSHSNLIKGVSKEVKKPSHLLPCSFVAIGILVAFFLLIQACPWTYYVYGLLPLPIWYAVLREFQVIQDLVVSVLTYPLSHFVGYLLAFTLGIEVLVLSFFYRYMLTAGLTAFAAWPFLTRLWTRAKMTSLSWTFFSLLLAVFPLMPVVGRKPDISLVMGAGLLVLLLSLCVVTSLMKRKDSFIKEELLVHLLQVLSTVLSMYVVYSTQSSLLRKQGLPLMNQIISWATLASSLVVPLLSSPVLFQRLFSILLSLMSTYLLLSTGYEALFPLVLSCLMFVWINIEQETLQQSGVCCKQKLTSIQFSYNTDITQFRQLYLDDIRRAFFLVFFLVTAFFGTGNIASINSFDLASVYCFLTVFSPFMMGALMMWKILIPFVLVMCAFEAVQLTTQLSSKSLFLIVLVISDIMALHFFFLVKDYGSWLDIGTSISHYVIVMSMTIFLVFLNGLAQLLTTKKLRLCGKPKSHFM

SEQ ID NO: 67707 - protein, 49 aa, Homo sapiens
MILTMLLMLKLCTEVRVANELNARRRSFTASRWCSCGPVVTPSRRPTSC

SEQ ID NO: 67708 - protein, 35 aa, Homo sapiens
IRVNLISRQLNTFFLAVLLVVCMPCFHSVCTGKRT

SEQ ID NO: 67709 - protein, 34 aa, Homo sapiens
ISAFLFTVTFAWCPPGLSNLTILSCPERWLMNGA

SEQ ID NO: 67710 - protein, 220 aa, Homo sapiens
LLLLLLLAAACAVFLACPWAVSGARASPGSAASPRLREGPELSPDDPAGLLDLRQGMFAQLVAQNVLLIDGPLSWYSDPGLAGVSLTGGLSYKEDTKELVVAKAGVYYVFFQLELRRVVAGEGSGSVSLALHLQPLRSAAGAAALALTVDLPPASSEARNSAFGFQGRLLHLSAGQRLGVHLHTEARARHAWQLTQGATVLGLFRVTPEIPAGLPSPRSE

SEQ ID NO: 67711 - protein, 73 aa, Homo sapiens
LVLAASCLLLQPLWPCDLQVLGDPQLRDPRKPRNGIVVTKPDLITCLEQGKKPFTVKRHEMIAKSPAPRGEVL

SEQ ID NO: 67712 - protein, 234 aa, Homo sapiens
TQREMPWTILLFAAGSLAIPAPSIRLVPPYPSSQEDPIHIACMAPGNFPGANFTLYRGGQVVQLLQAPTDQRGVTFNLSGGSSKAPGGPFHCQYGVLGELNQSQLSDLSEPVNVSFPVPTWILVLSLSLAGALFLLAGLVAVALVVRKVKLRNLQKKRDRESCWAQINFDSTDMSFDNSLFTVSAKTMPEEDPATLDDHSGTTATPSNSRTRKRPTSTSSSPETPEFSTFRACQ

SEQ ID NO: 67713 - protein, 14 aa, Homo sapiens
LGVLCVCLLACLSY

SEQ ID NO: 67714 - protein, 20 aa, Homo sapiens
LSLPVLVVVLSIVLEGPAPA

SEQ ID NO: 67715 - protein, 239 aa, Homo sapiens
MGGRVFLVFLAFCVWLTLPGAETQDSRGCARWCPQDSSCVNATACRCNPGFSSFSEIITTPMETCDDINECATLSKVSCGKFSDCWNTEGSYDCVCSPGYEPVSGAKTFKNESENTCQDVDECQQNPRLCKSYGTCVNTLGSYTCQCLPGFKLKPEDPKLCTDVNECTSGQNPCHSSTHCLNNVGSYQCRCRPGWQPIPGSPNGPNNTVCEGRELRSHVPRDPQTSDHMFNGAHTNQAE

SEQ ID NO: 67716 - protein, 349 aa, Homo sapiens
KTCRDPAHRSCPRDMGHPPLLPLLLLLHTCVPASWGLRCMQCKTNGDCRVEECALGQDLCRTTIVRLWEEGEELELVEKSCTHSEKTNRTLSYRTGLKITSLTEVVCGLDLCNQGNSGRAVTYSRSRYLECISCGSSDMSCERGRHQSLQCRSPEEQCLDVVTHWIQEGEEGRPKDDRHLRGCGYLPGCPGSNGFHNNDTFHFLKCCNTTKCNEGPILELENLPQNGRQCYSCKGNSTHGCSSEETFLIDCRGPMNQCLVATGTHEPKNQSYMVRGCATASMCQHAHLGDAFSMNHIDVSCCTKSGCNHPDLDVQYRSGAAPQPGPAHLSLTITLLMTARLWGGTLLWT

SEQ ID NO: 67717 - protein, 39 aa, Homo sapiens
LSMYFFVLGILALSHTIRSEGISLQHLKQLSREPVQGLG

SEQ ID NO: 67718 - protein, 14 aa, Homo sapiens
LLLIPPLLLTTLIQ

SEQ ID NO: 67719 - protein, 55 aa, Homo sapiens
LPMNLLCIAPMFYSALMTSGRKMCCAMSPSLWRDSGSALTGPCWRHAAVTSTQES

SEQ ID NO: 67720 - protein, 55 aa, Homo sapiens
INWLLGWMFSTSFLAANFSPIVFLLQQGEKVLCGPRRAVKLRVRGSVRGRMCVRV

SEQ ID NO: 67721 - protein, 17 aa, Homo sapiens
LLPCFLLLCCSACPSLL

SEQ ID NO: 67722 - protein, 129 aa, Homo sapiens
IDLFKNIFQLVGLDLFVFPYRVVATAPGCGVIECIPDCTSRDQLGRQTDFGMYDYFTRQYGDESTLAFQQARYNFIRSMAAYSLLLFLLQIKDRHNGNIMLDKKGHIIHIGQPATAPPSSPFTPAPRGG

SEQ ID NO: 67723 - protein, 692 aa, Homo sapiens
KRTRAGGRMGLSAAAPLWGPPGLLLAIALHPALSVPPRRDYCVLGAGPAGLQMAYFLQRAGRDYAVFERAPRPGSFFTRYPRHRKLISINKRYTGKANAEFNLRHDWNSLLSHDPRLLFRHYSRAYFPDARDMVRYLGDFADTLGLRVQYNTTIAHVTLDKDRQAWNGHYFILTDQKGQVHQCSVLFVATGLSVPNQVDFPGSEYAEGYESVSVDPEDFVGQNVLILGRGNSAFETAENILGVTNFIHMLSRSRVRLSWATHYVGDLRAINNGLLDTYQLKSLDGLLESDLTDLAILKDSKGKFHVTPKFFLEEANTNQSADSITLPQDDNDNFAMRVPYDRVIRCLGWNFDFSIFNKSLRLNSGNAFGKKYPLIRASYESKGSRGLFILGTASHSVDYRKSAGGFIHGFRYTVRAVHRLLEHRHHSVTWPATELPITQLTSSIVRRVNEASGLYQMFGVLADVILLKENSTAFEYLEEFPIQMLAQLETLTGRKAKHGLFVINMEYGRNFSGPDKDVFFDDRSVGHTEDAWQSNFLHPVIYYYRYLPTEQEVRFRPAHWPLPRPTAIHHIVEDFLTDWTAPIGHILPLRRFLENCLDTDLRSFYAESCFLFALTRQKLPPFCQQGYLRMQGLVSTESLWQHRVESRLLRDYAPTGRRLEDSSQQLGDQEPLGSPLAPGPLAQSVDSNKEEL

SEQ ID NO: 67724 - protein, 48 aa, Homo sapiens
ISGKSIGWLVHLSVWSVAVFLPDQMSRLVSEGQCEKKIVSELEKLLED

SEQ ID NO: 67725 - protein, 55 aa, Homo sapiens
LLLFSSFVFFFSLETGSSYVGQAGLESPGSSDPPASASGKVGLQARIAAPGQSLF

SEQ ID NO: 67726 - protein, 31 aa, Homo sapiens
MRMQQLLGVTGFLWVLCEEYAFIPVSGRGEE

SEQ ID NO: 67727 - protein, 295 aa, Homo sapiens
MLLVLLVLSWLPHGGALSLAEASRASFPGPSELHSEDSRFRELRKRYEDLLTRLRANQSWEDSNTDLVPAPAVRILTPEVRLGSGGHLHLRISRAALPEGLPEASRLHRALFRLSPTASRSWDVTRPLRRQLSLARPQAPALHLRLSPPPSQSDQLLAESSSARPQLELHLRPQAARGRRRARARNGDHCPLGPGRCCRLHTVRASLEDLGWADWVLSPREVQVTMCIGACPSQFRAANMHAQIKTSLHRLKPDTVPAPCCVPASYNPMVLIQKTDTGVSLQTYDDLLAKDCHCI

SEQ ID NO: 67728 - protein, 75 aa, Homo sapiens
MRENVSLLAALVIATCLPQNRSSMDEQTEKCVRRLVTETDQGRHLKKHLSCDLLAGTLKSCYANGPATLAGRNYC

SEQ ID NO: 67729 - protein, 907 aa, Homo sapiens
MFPLTWVFLALYFSRHQVRGQPDPPCGGRLNSKDAGYITSPGYPQDYPSHQNCEWIVYAPEPNQKIVLNFNPHFEIEKHDCKYDFIEIRDGDSESADLLGKHCGNIAPPTIISSGSMLYIKFTSDYARQGAGFSLRYEIFKTGSEDCSKNFTSPNGTIESPGFPEKYPHNLDCTFTILAKPKMEIILQFLIFDLEHDPLQVGEGDCKYDWLDIWDGIPHVGPLIGKYCGTKTPSELRSSTGILSLTFHTDMAVAKDGFSARYYLVHQEPLENFQCNVPLGMESGRIANEQISASSTYSDGRWTPQQSRLHGDDNGWTPNLDSNKEYLQVDLRFLTMLTAIATQGAISRETQNGYYVKSYKLEVSTNGEDWMVYRHGKNHKVFQANNDATEVVLNKLHAPLLTRFVRIRPQTWHSGIALRLELFGCRVTDAPCSNMLGMLSGLIADSQISASSTQEYLWSPSAARLVSSRSGWFPRIPQAQPGEEWLQVDLGTPKTVKGVIIQGARGGDSITAVEARAFVRKFKVSYSLNGKDWEYIQDPRTQQPKLFEGNMHYDTPDIRRFDPIPAQYVRVYPERWSPAGIGMRLEVLGCDWTDSKPTVETLGPTVKSEETTTPYPTEEEATECGENCSFEDDKDLQLPSGFNCNFDFLEEPCGWMYDHAKWLRTTWASSSSPNDRTFPDDRNFLRLQSDSQREGQYARLISPPVHLPRSPVCMEFQYQATGGRGVALQVVREASQESKLLWVIREDQGGEWKHGRIILPSYDMEYQIVFEGVIGKGRSGEIAIDDIRISTDVPLENCMEPISAFADEYEVDWSNSSSATSGSGAPSTDKEKSWLYTLDPILITIIAMSSLGVLLGATCAGLLLYCTCSYSGLSSRSCTTLENYNFELYDGLKHKVKMNHQKCCSEA

SEQ ID NO: 67730 - protein, 160 aa, Homo sapiens
MRGANAWAPLCLLLAAATQLSRQQSPERPVFTCGGILTGESGFIGSEGFPGVYPPNSKCTWKITVPEGKVVVLNFRFIDLESDNLCRYDFVDVYNGHANGQRIGRFCGTFRPGALVSSGNKMMVQMISDANTAGNGFMAMFSAAEPNERGRWEMAEKKSQ

SEQ ID NO: 67731 - protein, 167 aa, Homo sapiens
MGLSVLLGLLALMATAAVARGWLRAGEERSGRPACQKANGFPPDKSSGSKKQKQYQRIRKEKPQQHNFTHRLLAAALKSHSGNISCMDFSSNGKYLATCADDRTIRIWSTKDFLQREHRSMRANVELDHATLSLHRLAGQRGHPPCLQDDQAGGWGLHLHSHPRGLP

SEQ ID NO: 67732 - protein, 45 aa, Homo sapiens
MGLSVLLGLLALMATAAVARGWLRAGEERSGRPAWSCSVTQDGMQ

SEQ ID NO: 67733 - protein, 111 aa, Homo sapiens [sequence omitted]

SEQ ID NO: 67734 - protein, 133 aa, Homo sapiens
MLLAPLLPALLLVRPAGALVEGLYCGTRDCYEVLGVSRSAGKAEIARAYRQLARRYHPDRYRPQPGDEGPGRTPQSAEEAFLLVATAYETLKVSQAAAELQQYCMQNACKDALLVGVPAGSNPFREPRSCALL

SEQ ID NO: 67735 - protein, 121 aa, Homo sapiens
MLLAPLLPALLLVRPAGALVEGLYCGTRDCYEVLGVSRSAGKAEIARAYRQLARRYHPDRYRPQPGDEGPGRTPQSAEEAFLLVATAYETLKILVMFQSSCICPRGLGVEWTPAEAPQLFL

SEQ ID NO: 67736 - protein, 66 aa, Homo sapiens
MRAARAAPLLQLLLLLGPWLEAAGVAESPLPAVVLAILARNAEHSLPHYLGALERLDYPRARMALW

SEQ ID NO: 67737 - protein, 57 aa, Homo sapiens
MITPMLLTLFLITQLKMLNTNYHLPPSPKPMKMKNYNKPWEPKWTKICSLHSLPPQS

SEQ ID NO: 67738 - protein, 966 aa, Homo sapiens
LLGVFLALVAPGVLGISCGSPPPILNGRISYYSTPIAVGTVIRYSCSGTFRLIGEKSLLCITKDKVDGTWDKPAPKCEYFNKYSSCPEPIVPGGYKIRGSTPYRHGDSVTFACKTNFSMNGNKSVWCQANNMWGPTRLPTCVSVFPLECPALPMIHNGHHTSENVGSIAPGLSVTYSCESGYLLVGEKIINCLSSGKWSAVPPTCEEARCKSLGRFPNGKVKEPPILRVGVTANFFCDEGYRLQGPPSSRCVIAGQGVAWTKMPVCEEIFCPSPPPILNGRHIGNSLANVSYGSIVTYTCDPDPEEGVNFILIGESTLRCTVDSQKTGTWSGPAPRCELSTSAVQCPHPQILRGRMVSGQKDRYTYNDTVIFACMFGFTLKGSKQIRCNAQGTWEPSAPVCEKECQAPPNILNGQKEDRHMVRFDPGTSIKYSCNPGYVLVGEESIQCTSEGVWTPPVPQCKVAACEATGRQLLTKPQHQFVRPDVNSSCGEGYKLSGSVYQECQGTIPWFMEIRLCKEITCPPPPVIYNGAHTGSSLEDFPYGTTVTYTCNPGPERGVEFSLIGESTIRCTSNDQERGTWSGPAPLCKLSLLAVQCSHVHIANGYKISGKEAPYFYNDTVTFKCYSGFTLKGSSQIRCKADNTWDPEIPVCEKETCQHVRQSLQELPAGSRVELVNTSCQDGYQLTGHAYQMCQDAENGIWFKKIPLCKVIHCHPPPVIVNGKHTGMMAENFLYGNEVSYECDQGFYLLGEKKLQCRSDSKGHGSWSGPSPQCLRSPPVTRCPNPEVKHGYKLNKTHSAYSHNDIVYVDCNPGFIMNGSRVIRCHTDNTWVPGVPTCIKKEVNCSSPADMDGIQKGLEPRKMYQYGAVVTLECEDGYMLEGSPQSQCQSDHQWNPPLAVCRSRSLAPVLCGIAAGLILLTFLIVITLYVISKHRARNYYTDTSQKEAFHLEAREVYSVDPYNPAS

SEQ ID NO: 67739 - protein, 61 aa, Homo sapiens
TSTALLFLLFFLTLRFSVVKRGRKKLLYIFKQPFMRPVQTTQEEDGCSCRFPEEEEGGCEL

SEQ ID NO: 67740 - protein, 67 aa, Homo sapiens
LLHIFWAYLILRMAHKFITGKLVEDERSDREETESSEGEEAAAGGGAKSRPLANGHPILNNNHRKND

SEQ ID NO: 67741 - protein, 30 aa, Homo sapiens
RGKLEGVVLLSQLSCLSAMFSGRVWLGLPP

SEQ ID NO: 67742 - protein, 13 aa, Homo sapiens
KYQIIIMLYLNYL

SEQ ID NO: 67743 - protein, 26 aa, Homo sapiens
IVVPITVTLLVTALVVWQSKRTEGIV

SEQ ID NO: 67744 - protein, 149 aa, Homo sapiens
RILMTMRSLLRTPFLCGLLWAFCAPGARAEEPAASFSQPGSMGLDKNTVHDQEHIMEHLEGVINKPEAEMSPQELQLHYFKMHDYDGNNLLDGLELSTAITHVHKEEGSEQAPLMSEDELINIIDGVLRDDDKNNDGYIDYAEFAKSLQ

SEQ ID NO: 67745 - protein, 141 aa, Homo sapiens
IQHIKQDFYKLGIFLILCFQRMQGVVNRLSKLLKPGGMLLFRDYGRYDKTQLRFKKGHCLSENFYVRGDGTRAYFFTKGEVHSMFCKASLDEKQNLVDRRLQVNRKKQVKMHRVWIQGKFQKPLHQTQNSSNMVSTLLSQD

SEQ ID NO: 67746 - protein, 2456 aa, Homo sapiens
VRASLPHRLNMLRGPGPGLLLLAVQCLGTAVPSTGASKSKRQAQQMVQPQSPVAVSQSKPGCYDNGKHYQINQQWERTYLGNALVCTCYGGSRGFNCESKPEAEETCFDKYTGNTYRVGDTYERPKDSMIWDCTCIGAGRGRISCTIANRCHEGGQSYKIGDTWRRPHETGGYMLECVCLGNGKGEWTCKPIAEKCFDHAAGTSYVVGETWEKPYQGWMMVDCTCLGEGSGRITCTSRNRCNDQDTRTSYRIGDTWSKKDNRGNLLQCICTGNGRGEWKCERHTSVQTTSSGSGPFTDVRAAVYQPQPHPQPPPYGHCVTDSGVVYSVGMQWLKTQGNKQMLCTCLGNGVSCQETAVTQTYGGNSNGEPCVLPFTYNGRTFYSCTTEGRQDGHLWCSTTSNYEQDQKYSFCTDHTVLVQTRGGNSNGALCHFPFLYNNHNYTDCTSEGRRDNMKWCGTTQNYDADQKFGFCPMAAHEEICTTNEGVMYRIGDQWDKQHDMGHMMRCTCVGNGRGEWTCIAYSQLRDQCIVDDITYNVNDTFHKRHEEGHMLNCTCFGQGRGRWKCDPVDQCQDSETGTFYQIGDSWEKYVHGVRYQCYCYGRGIGEWHCQPLQTYPSSSGPVEVFITETPSQPNSHPIQWNAPQPSHISKYILRWRPKNSVGRWKEATIPGHLNSYTIKGLKPGVVYEGQLISIQQYGHQEVTRFDFTTTSTSTPVTSNTVTGETTPFSPLVATSESVTEITASSFVVSWVSASDTVSGFRVEYELSEEGDEPQYLDLPSTATSVNIPDLLPGRKYIVNVYQISEDGEQSLILSTSQTTAPDAPPDTTVDQVDDTSIVVRWSRPQAPITGYRIVYSPSVEGSSTELNLPETANSVTLSDLQPGVQYNITIYAVEENQESTPVVIQQETTGTPRSDTVPSPRDLQFVEVTDVKVTIMWTPPESAVTGYRVDVIPVNLPGEHGQRLPISRNTFAEVTGLSPGVTYYFKVFAVSHGRESKPLTAQQTTKLDAPTNLQFVNETDSTVLVRWTPPRAQITGYRLTVGLTRRGQPRQYNVGPSVSKYPLRNLQPASEYTVSLVAIKGNQESPKATGVFTTLQPGSSIPPYNTEVTETTIVITWTPAPRIGFKLGVRPSQGGEAPREVTSDSGSIVVSGLTPGVEYVYTIQVLRDGQERDAPIVNKVVTPLSPPTNLHLEANPDTGVLTVSWERSTTPDITGYRITTTPTNGQQGNSLEEVVHADQSSCTFDNLSPGLEYNVSVYTVKDDKESVPISDTIIPEVPQLTDLSFVDITDSSIGLRWTPLNSSTIIGYRITVVAAGEGIPIFEDFVDSSVGYYTVTGLEPGIDYDISVITLINGGESAPTTLTQQTAVPPPTDLRFTNIGPDTMRVTWAPPPSIDLTNFLVRYSPVKNEEDVAELSISPSDNAVVLTNLLPGTEYVVSVSSVYEQHESTPLRGRQKTGLDSPTGIDFSDITANSFTVHWIAPRATITGYRIRHHPEHFSGRPREDRVPHSRNSITLTNLTPGTEYVVSIVALNGREESPLLIGQQSTVSDVPRDLEVVAATPTSLLISWDAPAVTVRYYRITYGETGGNSPVQEFTVPGSKSTATISGLKPGVDYTITVYAVTGRGDSPASSKPISINYRTEIDKPSQMQVTDVQDNSISVKWLPSSSPVTGYRVTTTPKNGPGPTKTKTAGPDQTEMTIEGLQPTVEYVVSVYAQNPSGESQPLVQTAVTNIDRPKGLAFTDVDVDSIKIAWESPQGQVSRYRVTYSSPEDGIHELFPAPDGEEDTAELQGLRPGSEYTVSVVALHDDMESQPLIGTQSTAIPAPTDLKFTQVTPTSLSAQWTPPNVQLTGYRVRVTPKEKTGPMKEINLAPDSSSVVVSGLMVATKYEVSVYALKDTLTSRPAQGVVTTLENVSPPRRARVTDATETTITISWRTKTETITGFQVDAVPANGQTPIQRTIKPDVRSYTITGLQPGTDYKIYLYTLNDNARSSPVVIDASTAIDAPSNLRFLATTPNSLLVSWQPPRARITGYIIKYEKPGSPPREVVPRPRPGVTEATITGLEPGTEYTIYVIALKNNQKSEPLIGRKKTDELPQLVTLPHPNLHGPEILDVPSTVQKTPFVTHPGYDTGNGIQLPGTSGQQPSVGQQMIFEEHGFRRTTPPTTATPIRHRPRPYPPNVGQEALSQTTISWAPFQDTSEYIISCHPVGTDEEPLQFRVPGTSTSATLTGLTRGATYNVIVEALKDQQRHKVREEVVTVGNSVNEGLNQPTDDSCFDPYTVSHYAVGDEWERMSESGFKLLCQCLGFGSGHFRCDSSRWCHDNGVNYKIGEKWDRQGENGQMMSCTCLGNGKGEFKCDPHEATCYDDGKTYHVGEQWQKEYLGAICSCTCFGGQRGWRCDNCRRPGGEPSPEGTTGQSYNQYSQRYHQRTNTNVNCPIECFMPLDVQADREDSRE

SEQ ID NO: 67747 - protein, 21 aa, Homo sapiens
LGMLLCLCIWSLFGATVDRHL

SEQ ID NO: 67748 - protein, 364 aa, Homo sapiens
ILTVQLFAFLNLLPVEADILAYNFENASQTFDDLPARFGYRLPAEGLKGFLINSKPENACEPIVPPPVKDNSSGTFIVLIRRLDCNFDIKVLNAQRAGYKAAIVHNVDSDDLISMGSNDIEVLKKIDIPSVFIGESSANSLKDEFTYEKGGHLILVPEFSLPLEYYLIPFLIIVGICLILIVIFMITKFVQDRHRARRNRLRKDQLKKLPVHKFKKGDEYDVCAICLDEYEDGDKLRILPCSHAYHCKCVDPWLTKTKKTCPVCKQKVVPSQGDSDSDTDSSQEENEVTEHTPLLRPLASVSAQSFGALSESRSHQNMTESSDYEEDDNEDTDSSDAENEINEHDVVVQLQPNGERDYNIANTV

SEQ ID NO: 67749 - protein, 19 aa, Homo sapiens
MLLLFVSLVLMSLCLMQRF

SEQ ID NO: 67750 - protein, 15 aa, Homo sapiens
VVFPGRVFSIVLWMC

SEQ ID NO: 67751 - protein, 33 aa, Homo sapiens
LGLIVFLGIVLGNLWKEKKTDKTKKGIENKIEN

SEQ ID NO: 67752 - protein, 183 aa, Homo sapiens
LQFRGSMLALAMVSLEMEKLIPDWLSLTIELLQKAQMDSSQLIHCRELVAHHLSTLQSSLPLNSVYVYRPLKHTLVTCDKGVFRLHPSSVPGPDFSKDNSKPEVPVRGTAAFYHHLPAASGCKQTSTKRKVEEMEVDDFYDGIKRLYNEDNVSENVGSVCGTDLSRQEGHASPCPPLQPVSVM

SEQ ID NO: 67753 - protein, 160 aa, Homo sapiens
KMKNHLLFWGVLAVFIKAVHVKAQEDERIVLVDNKCKCARITSRIIRSSEDPNEDIVERNIRIIVPLNNRENISDPTSPLRTRFVYHLSDLCKKCDPTEVELDNQIVTATQSNICDEDSATETCYTYDRNKCYTAVVPLVYGGETKMVETALTPDACYPD

SEQ ID NO: 67754 - protein, 61 aa, Homo sapiens
IGIQLVVTMVMASVMQKIIPHYSLARWLLCNGSLRWYQHPTEEELRILAGKQQKGKTKKDR

SEQ ID NO: 67755 - protein, 128 aa, Homo sapiens
LAPGAMRLSLPLLLLLLGAWAIPGGLGDRAPLTATAPQLDDEEMYSAHMPAHLRCDACRAVAYQSLLVPDVAKSGKGRDQTSYLKLWGAAGAERVGLHGCPGPELLPELAGLRSSRSGPSETSHRPRT

SEQ ID NO: 67756 - protein, 49 aa, Homo sapiens
MTPPERLFLPRVCGTTLHLLLLGLLLVLLPGAQVRQQENGGCWGGSAKP

SEQ ID NO: 67757 - protein, 17 aa, Homo sapiens
LGLALGAVFSFLFRAIV

SEQ ID NO: 67758 - protein, 14 aa, Homo sapiens
TCLTVALGFYRLWI

SEQ ID NO: 67759 - protein, 265 aa, Homo sapiens
KALRIPGDLRVATVTLMLAMLSSLLAEGRDSPEDFVFQFKGMCYFTNGTERVRLVTRYIYNREEYARFDSDVGVYRAVTPQGRPDAEYWNSQKEVLEGTRAELDTVCRHNYEVAFRGILQRRVEPTVTISPSRTEALNHHNLLVCSVTDFYPGQIKVRWFRNDQEETAGVVSTPLIRNGDWTFQILVMLEMTPQRGDVYTCHVEHPSLQSPITVEWRAQSESAQSKMLSGVGGFVLGLIFLGLGLIIRQRSQKGPQGPPPAGLLH

SEQ ID NO: 67760 - protein, 198 aa, Homo sapiens
TMSRLSRSLLWAATCLGVLCVLSADKNTTQHPNVTTLAPISNVTSAPVTSLPLVTTPAPETCEGRNSCVSCFNVSVVNTTCFWIECKDESYCSHNSTVSDCQVGNTTDFCSVSTATPVPTANSTAKPTVQPSPSTTSKTVTTSGTTNNTVTPTSQPVRKSTFDAASFIGGIVLVLGVQAVIFFLYKFCKSKERNYHTL

SEQ ID NO: 67761 - protein, 12 aa, Homo sapiens
LCGTFLLCLSSW

SEQ ID NO: 67762 - protein, 298 aa, Homo sapiens
KSLSLLLAVALGLATAVSAGPAVIECWFVEDASGKGLAKRPGALLLRQGPGEPPPRPDLDPELYLSVHDPAGALQAAFRRYPRGAPAPHCEMSRFVPLPASAKWASGLTPAQNCPRALDGAWLMVSISSPVLSLSSLLRPQPEPQQEPVLITMATVVLTVLTHTPAPRVRLGQDALLDLSFAYMPPTSEAASSLAPGPPPFGLEWRRQHLGKGHLLLAATPGLNGQMPAAQEGAVAFAAWDDDEPWGPWTGNGTFWLPTVQPFQEGTYLATIHLPYLQGQVTLELAVYSELGDRGLQG

SEQ ID NO: 67763 - protein, 726 aa, Homo sapiens
VTKLLPALLLQHVLLHLLLLPIAIPYAEGQRKRRNTIHEFKKSAKTTLIKIDPALKIKTKKVNTADQCANRCTRNKGLPFTCKAFVFDKARKQCLWFPFNSMSSGVKKEFGHEFDLYENKDYIRNCIIGKGRSYKGTVSITKSGIKCQPWSSMIPHEHSFLPSSYRGKDLQENYCRNPRGEEGGPWCFTSNPEVRYEVCDIPQCSEVECMTCNGESYRGLMDHTESGKICQRWDHQTPHRHKFLPERYPDKGFDDNYCRNPDGQPRPWCYTLDPHTRWEYCAIKTCADNTMNDTDVPLETTECIQGQGEGYRGTVNTIWNGIPCQRWDSQYPHEHDMTPENFKCKDLRENYCRNPDGSESPWCFTTDPNIRVGYCSQIPNCDMSHGQDCYRGNGKNYMGNLSQTRSGLTCSMWDKNMEDLHRHIFWEPDASKLNENYCRNPDDDAHGPWCYTGNPLIPWDYCPISRCEGDTTPTIVNLDHPVISCAKTKQLRVVNGIPTRTNIGWMVSLRYRNKHICGGSLIKESWVLTARQCFPSRDLKDYEAWLGIHDVHGRGDEKCKQVLNVSQLVYGPEGSDLVLMKLARPAVLDDFVSTIDLPNYGCTIPEKTSCSVYGWGYTGLINYDGLLRVAHLYIMGNEKCSQHHRGKVTLNESEICAGAEKIGSGPCEGDYGGPLVCEQHKMRMVLGVIVPGRGCAIPNRPGIFVRVAYYAKWIHKIILTYKVPQS

SEQ ID NO: 67764 - protein, 19 aa, Homo sapiens
MNTWMKTSISWWLCMTTPL

SEQ ID NO: 67765 - protein, 332 aa, Homo sapiens
IWTLLPLVLTSVARLSSKSVNAQVTDINSKGLELRKTVTTVETQNLEGLHHDGQFCHKPCPPGERKARDCTVNGDEPDCVPCQEGKEYTDKAHFSSKCRRCRLCDEGHGLEVEINCTRTQNTKCRCKPNFFCNSTVCEHCDPCTKCEHGIIKECTLTSNTKCKEEGSRSNLGWLCLLLLPIPLIVWVKRKEVQKTCRKHRKENQGSHESPTLNPETVAINLSDVDLSKYITTIAGVMTLSQVKGFVRKNGVNEAKIDEIKNDNVQDTAEQKVQLLRNWHQLHGKKEAYDTLIKDLKKANLCTLAEKIQTIILKDITSDSENSNFRNEIQSLV

SEQ ID NO: 67766 - protein, 18 aa, Homo sapiens
IDFFILFCLLGRTWLQGF

SEQ ID NO: 67767 - protein, 159 aa, Homo sapiens
KIKPEDAMDFGISLLFYGLYYGVLERDFAEMCADYMASTIGFYSESGMPTKHLSDSVCAVCGQQIFVDVSEEGIIENTYRLSCNHVFHEFCIRGWCIVGKKQTCPYCKEKVDLKRMFSNPWERPHVMYGQLLDWLRYLVAWQPVIIGVVQGINYILGLE

SEQ ID NO: 67768 - protein, 36 aa, Homo sapiens
ILEMYWAGLTVAVEMLLGPVVTMQIVPRVAQKREFI

SEQ ID NO: 67769 - protein, 378 aa, Homo sapiens
LRFLFLGLSALAPPSRAQLQLHLPANRLQAVEGGEVVLPAWYTLHGEVSSSQPWEVPFVMWFFKQKEKEDQVLSYINGVTTSKPGVSLVYSMPSRNLSLRLEGLQEKDSGPYSCSVNVQDKQGKSRGHSIKTLELNVLVPPAPPSCRLQGVPHVGANVTLSCQSPRSKPAVQYQWDRQLPSFQTFFAPALDVIRGSLSLTNLSSSMAGVYVCKAHNEVGTAQCNVTLEVSTGPGAAVVAGAVVGTLVGLGLLAGLVLLYHRRGKALEEPANDIKEDAIAPRTLPWPKSSDTISKNGTLSSVTSARALRPPHGPPRPGALTPTPSLSSQALPSPRLPTTDGAHPQPISPIPGGVSSSGLSRMGAVPVMVPAQSQAGSLV

SEQ ID NO: 67770 - protein, 141 aa, Homo sapiens
KCCFCDFLKVKMHTMSSSHLFYLALCLLTFTSSATAGPETLCGAELVDALQFVCGDRGFYFNKPTGYGSSSRRAPQTGIVDECCFRSCDLRRLEMYCAPLKPAKSARSVRAQRHTDMPKTQKEVHLKNASRGSAGNKNYRM

SEQ ID NO: 67771 - protein, 17 aa, Homo sapiens
ITVGGIMILAGLTSSHL

SEQ ID NO: 67772 - protein, 494 aa, Homo sapiens
LGSVFPFLLVLVDLQYEGAECGVNADVEKHLELGKKLLAAGQLADALSQFHAAVDGDPDNYIAYYRRATVFLAMGKSKAALPDLTKVIQLKMDFTAARLQRGHLLLKQGKLDEAEDDFKKVLKSNPSENEEKEAQSQLIKSDEMQRLRSQALNAFGSGDYTAAIAFLDKILEVCVWDAELRELRAECFIKEGEPRKAISDLKAASKLKNDNTEAFYKISTLYYQLGDHELSLSEVRECLKLDQDHKRCFAHYKQVKKLNKLIESAEELIRDGRYTDATSKYESVMKTEPSIAEYTVRSKERICHCFSKDEKPVEAIRVCSEVLQMEPDNVNALKDRAEAYLIEEMYDEAIQDYETAQEHNENDQQIREGLEKAQRLLKQSQKRDYYKILGVKRNAKKQEIIKAYRKLALQWHPDNFQNEEEKKKAEKKFIDIAAAKEVLSDPEMRKKFDDGEDPLDAESQQGGGGNPFHRSWNSWQGFNPFSSGGPFRFKFHFN

SEQ ID NO: 67773 - protein, 405 aa, Homo sapiens
LLLLLLLLGLMHCASAAMFMVKNGNGTACIMANFSAAFSVNYDTKSGPKNMTFDLPSDATVVLNRSSCGKENTSDPSLVIAFGRGHTLTLNFTRNATRYSVQLMSFVYNLSDTHLFPNASSKEIKTVESITDIRADIDKKYRCVSGTQVHMNNVTVTLHDATIQAYLSNSSFSRGETRCEQDRPSPTTAPPAPPSPSPSPVPKSPSVDKYNVSGTNGTCLLASMGLQLNLTYERKDNTTVTRLLNINPNKTSASGSCGAHLVTLELHSEGTTVLLFQFGMNASSSRFFLQGIQLNTILPDARDPAFKAANGSLRALQATVGNSYKCNAEEHVRVTKAFSVNIFKVWVQAFKVEGGQFGSVEECLLDENSMLIPIAVGGALAGLVLIVLIAYLVGRKRSHAGYQTI

SEQ ID NO: 67774 - protein, 520 aa, Homo sapiens
VSSLSVTMSAAWIPALGLGVCLLLLPGPAGSEGAAPIAITCFTRGLDIRKEKADVLCPGGCPLEEFSVYGNIVYASVSSICGAAVHRGVISNSGGPVRVYSLPGRENYSSVDANGIQSQMLSRWSASFTVTKGKSSTQEATGQAVSTAHPPTGKRLKKTPEKKTGNKDCKADIAFLIDGSFNIGQRRFNLQKNFVGKVALMLGIGTEGPHVGLVQASEHPKIEFYLKNFTSAKDVLFAIKEVGFRGGNSNTDVAERMSSTTVDSEERLLRGKALKHTAQKFFTVDAGVRKGIPKVVVVFIDGWPSDDIEEAGIVAREFGVNVFIVSVAKPIPEELGMVQDVTFVDKAVCRNNGFFSYHMPNWFGTTKYVKPLVQKLCTHEQMMCSKTCYNSVNIAFLIDGSSSVGDSNFRLMLEFVSNIAKTFEISDIGAKIAAVQFTYDQRTEFSFTDYSTKENVLAVIRNIRYMSGGTATGDAISFTVRNVFGPIRESPNKNFLVIVTDGQSYDDVQGPAAAAHDAAK

SEQ ID NO: 67775 - protein, 65 aa, Homo sapiens
ISCVSVILVLGILCPKEFRLRSERGSGGIEGERPEGQCSTIPTCFSATPAALPPSGWRRLAAAGW

SEQ ID NO: 67776 - protein, 133 aa, Homo sapiens
LARPLLAALRLRLLGLGLGFISRLTSSQSRASSVGFMSLFDENELLRSHWYLYWGNIAYKQEAYSLSGENFFMSETENSCSRLCHPFFSRQKIPKSCNQRSLHLIDKATNKPKCLSMSTAACQTSSIATRCPV

SEQ ID NO: 67777 - protein, 1808 aa, Homo sapiens
LRNPWRGFLPLTLALFVGAGHAQRDPVGRYEPAGGDANRLRRPGGSYPAAAAAKVYSLFREQDAPVAGLQPVERAQPGWGSPRRPTEAEARRPSRAQQSRRVQPPAQTRRSTPLGQQQPAPRTRAAPALPRLGTPQRSGAAPPTPPRGRLTGRNVCGGQCCPGWTTANSTNHCIKPVCEPPCQNRGSCSRPQLCVCRSGFRGARCEEVIPDEEFDPQNSRLAPRRWAERSPNLRRSSAAGEGTLARAQPPAPQSPPAPQSPPAGTLSGLSQTHPSQQHVGLSRTVRLHPTATASSQLSSNALPPGPGLEQRDGTQQAVPLEHPSSPWGLNLTEKIKKIKIVFTPTICKQTCARGHCANSCERGDTTTLYSQGGHGHDPKSGFRIYFCQIPCLNGGRCIGRDECWCPANSTGKFCHLPIPQPDREPPGRGSRPRALLEAPLKQSTFTLPLSNQLASVNPSLVKVHIHHPPEASVQIHQVAQVRGGVEEALVENSVETRPPPWLPASPGHSLWDSNNIPARSGEPPRPLPPAAPRPRGLLGRCYLNTVNGQCANPLLELTTQEDCCGSVGAFWGVTLCAPCPPRPASPVIENGQLECPQGYKRLNLTHCQDINECLTLGLCKDAECVNTRGSYLCTCRPGLMLDPSRSRCVSDKAISMLQGLCYRSLGPGTCTLPLAQRITKQICCCSRVGKAWGSECEKCPLPGTEAFREICPAGHGYTYASSDIRLSMRKAEEEELARPPREQGQRSSGALPGPAERQPLRVVTDTWLEAGTIPDKGDSQAGQVTTSVTHAPAWVTGNATTPPMPEQGIAEIQEEQVTPSTDVLVTLSTPGIDRCAAGATNVCGPGTCVNLPDGYRCVCSPGYQLHPSQAYCTDDNECLRDPCKGKGRCINRVGSYSCFCYPGYTLATSGATQECQDINECEQPGVCSGGQCTNTEGSYHCECDQGYIMVRKGHCQDINECRHPGTCPDGRCVNSPGSYTCLACEEGYRGQSGSCVDVNECLTPGVCAHGKCTNLEGSFRCSCEQGYEVTSDEKGCQDVDECASRASCPTGLCLNTEGSFACSACENGYWVNEDGTACEDLDECAFPGVCPSGVCTNTAGSFSCKDCDGGYRPSPLGDSCEDVDECEDPQSSCLGGECKNTVGSYQCLCPQGFQLANGTVCEDVNECMGEEHCAPHGECLNSHGSFFCLCAPGFVSAEGGTSCQDVDECATTDPCVGGHCVNTEGSFNCLCETGFQPSPESGECVDIDECEDYGDPVCGTWKCENSPGSYRCVLGCQPGFHMAPNGDCIDIDECANDTMCGSHGFCDNTDGSFRCLCDQGFEISPSGWDCVDVNECELMLAVCGAALCENVEGSFLCLCASDLEEYDAQEGHCRPRGAGGQSMSEAPTGDHAPAPTRMDCYSGQKGHAPCSSVLGRNTTQAECCCTQGASWGDACDLCPSEDSAEFSEICPSGKGYIPVEGAWTFGQTMYTDADECVIFGPGLCPNGRCLNTVPGYVCLCNPGFHYDASHKKCEDHDECQDLACENGECVNTEGSFHCFCSPPLTLDLSQQRCMNSTSSTEDLPDHDIHMDICWKKVTNDVCSEPLRGHRTTYTECCCQDGEAWSQQCALCPPRSSEVYAQLCNVARIEAEREAGVHFRPGYEYGPGPDDLHYSIYGPDGAPFYNYLGPEDTVPEPAFPNTAGHSADRTPILESPLQPSELQPHYVASHPEPPAGFEGLQAEECGILNGCENGRCVRVREGYTCDCFEGFQLDAAHMACVDVNECDDLNGPAVLCVHGYCENTEGSYRCHCSPGYVAEAGPPHCTAKE

SEQ ID NO: 67778 - protein, 25 aa, Homo sapiens
MYFILFLWLLVYCLLLFPQLDVSRL

SEQ ID NO: 67779 - protein, 8 aa, Homo sapiens
VFWCFALL

SEQ ID NO: 67780 - protein, 649 aa, Homo sapiens
IAGVCGWLLLSGPCGVGLDLDSRLLGASAMRRSEVLAEESIVCLQKALNHLREIWELIGIPEDQRLQRTEVVKKHIKELLDMMIAEEESLKERLIKSISVCQKELNTLCSELHVEPFQEEGETTILQLEKDLRTQVELMRKQKKERKQELKLLQEQDQELCEILCMPHYDIDSASVPSLEELNQFRQHVTTLRETKASRREEFVSIKRQIILCMEALDHTPDTSFERDVVCEDEDAFCLSLENIATLQKLLRQLEMQKSQNEAVCEGLRTQIRELWDRLQIPEEEREAVATIMSGSKAKVRKALQLEVDRLEELKMQNMKKVIEAIRVELVQYWDQCFYSQEQRQAFAPFCAEDYTESLLQLHDAEIVRLKNYYEVHKELFEGVQKWEETWRLFLEFERKASDPNRFTNRGGNLLKEEKQRAKLQKMLPKLEEELKARIELWEQEHSKAFMVNGQKFMEYVAEQWEMHRLEKERAKQERQLKNKKQTETEMLYGSAPRTPSKRRGLAPNTPGKARKLNTTTMSNATANSSIRPIFGGTVYHSPVSRLPPSGSKPVAASTCSGKKTPRTGRHGANKENLELNGSILSGGYPGSAPLQRNFSINSVASTYSEFAKDPSLSDSSTVGLQRELSKASKSDATSGILNSTNIQS

SEQ ID NO: 67781 - protein, 66 aa, Homo sapiens
LILLLGNFFCIRKKPKEPQPEVAAAEEEKLHKPPADSGVDLREVEHFLKAEPEKNGEVVHTPETSV

SEQ ID NO: 67782 - protein, 67 aa, Homo sapiens
VPSRFLTLLAHLVVVITLFWSRDSNIQACLPLTFTPEEYDKQDIHALPAVTEMALFVTVFGLKKKPF

SEQ ID NO: 67783 - protein, 18 aa, Homo sapiens
IVVLGKTVLIILEVLQFQ
